United States Patent Application Publication US 2004/0234960 A1 - sequence listing, part 3

SEQ ID NO: 6484 - DNA, 554 bp, Artificial Sequence
  chemically treated genomic DNA (Homo sapiens) CpG-island No: 6484
tcgtcgaacatcgccaactccacgccaaactctttcaaccctttttcgctaccacaaatactctaaaaaatcaacccgcccgatacgccacgacgaatcgcttcgatctaaataataacgtacgccaatacacaaccctaaattaaaatattaaatttatcgatcacgccataaataatatccaacacgcgacttaaattttccacgtcgtcaatcaccgaattaacgccgatcaccgcatcgcccaccccgaaaaaaaacccttcgtaaatttacgcgacgatactttacacgtcgtcacgaatatcatttaactacaaacgaacgctaaaaatacccgaaataccgataataatattaacctttttaattaccgacattttcttcgcgccgtaaatcaaatccgcgttaaaacaaatcttcgctaccgccgcgaccacttccgaaatcaaccctttacgaataaaaacaatatcgtccacgctaatttcatcgctcaacacatactcacgcaattcgctaatactccaatttttaatctaattataaaccgt

SEQ ID NO: 6485 - DNA, 750 bp, Artificial Sequence
  chemically treated genomic DNA (Homo sapiens) CpG-island No: 6485
taggatttgatttcggcgttggtgaaaattttcgtcgattcgcgtagtaatattatcggtattaaagatattatcgatttcgtcgtttatttgcgtagtatgatttatatcgttaaaggtgtttattcgtattttatcgtgttttgcggttacgacgattatttgtttaatattttgttgttcggcggcgacggggcgatatcggcgagcggtaattttgtttcgtaggtgtcggtgaattttttgaaagtttggcgcgacggggacgtggcgaaagcggtcgggtattattagattttgttgtaaatttcgtagatgtattagttggatacgtcgtttgtgaacgtgattaaagaggcgatcgtgttttgcggtcgttttgtttttacgtacgtgttgtcgttcgtttcgtcgttggacgagtcgcgtaaggcgtagttgaaaattttgttgtaatagtttaagttttgttgagtcggacgataacgatgattattgagaaaatttttatttcgtaggacgacgcgttttatgcggtgattatttacgcggcggggtcgtagggcgttttgtcgcgtgatttcgtagatgttgatggaaatttttagcggtaattttgttcggtatgacgttagacgttcgggatgggtttgggacgtttataagtttattcgttaaaaaggtgttgattatcggtttttatttagatttatcgtattgtgttttaaaggttgtatggtattgatttgt

SEQ ID NO: 6486 - DNA, 750 bp, Artificial Sequence
  chemically treated genomic DNA (Homo sapiens) CpG-island No: 6486
acaaatcaataccatacaacctttaaaacacaatacgataaatctaaataaaaaccgataatcaacacctttttaacgaataaacttataaacgtcccaaacccatcccgaacgtctaacgtcataccgaacaaaattaccgctaaaaatttccatcaacatctacgaaatcacgcgacaaaacgccctacgaccccgccgcgtaaataatcaccgcataaaacgcgtcgtcctacgaaataaaaattttctcaataatcatcgttatcgtccgactcaacaaaacttaaactattacaacaaaattttcaactacgccttacgcgactcgtccaacgacgaaacgaacgacaacacgtacgtaaaaacaaaacgaccgcaaaacacgatcgcctctttaatcacgttcacaaacgacgtatccaactaatacatctacgaaatttacaacaaaatctaataatacccgaccgctttcgccacgtccccgtcgcgccaaactttcaaaaaattcaccgacacctacgaaacaaaattaccgctcgccgatatcgccccgtcgccgccgaacaacaaaatattaaacaaataatcgtcgtaaccgcaaaacacgataaaatacgaataaacacctttaacgatataaatcatactacgcaaataaacgacgaaatcgataatatctttaataccgataatattactacgcgaatcgacgaaaattttcaccaacgccgaaatcaaatccta

SEQ ID NO: 6487 - DNA, 750 bp, Artificial Sequence
  chemically treated genomic DNA (Homo sapiens) CpG-island No: 6487
ataggttaatgttatataatttttagagtatagtgcgatgaatttaagtggaggtcgataattagtatttttttagcgggtgagtttgtgggcgttttaagtttatttcgggcgtttggcgttatgtcgaatagggttgtcgttggagatttttattagtatttgcggggttacgcggtagagcgttttgcggtttcgtcgcgtgggtgattatcgtataaaacgcgtcgttttgcggggtgaaaatttttttaatggttatcgttatcgttcggtttagtaaagtttgagttgttgtagtagggtttttagttgcgttttgcgcggttcgtttagcggcgaggcgggcggtagtacgtgcgtggagataggacgatcgtagagtacgatcgtttttttaattacgtttataaacggcgtatttagttgatatatttgcggaatttgtagtaaggtttgatgatattcggtcgttttcgttacgttttcgtcgcgttaggtttttagaagatttatcgatatttgcggggtaaagttgtcgttcgtcgatatcgtttcgtcgtcgtcgagtagtagggtattgaatagatgatcgtcgtagtcgtagagtacggtgaagtgcggatgggtatttttgacggtatggattatgttgcgtaggtgggcgacggagtcgatggtgtttttgatgtcgataatattgttgcgcgagtcggcgagggtttttattagcgtcggagttagattttg

SEQ ID NO: 6488 - DNA, 750 bp, Artificial Sequence
  chemically treated genomic DNA (Homo sapiens) CpG-island No: 6488
caaaatctaactccgacgctaataaaaaccctcgccgactcgcgcaacaatattatcgacatcaaaaacaccatcgactccgtcgcccacctacgcaacataatccataccgtcaaaaatacccatccgcacttcaccgtactctacgactacgacgatcatctattcaataccctactactcgacgacgacgaaacgatatcgacgaacgacaactttaccccgcaaatatcgataaatcttctaaaaacctaacgcgacgaaaacgtaacgaaaacgaccgaatatcatcaaaccttactacaaattccgcaaatatatcaactaaatacgccgtttataaacgtaattaaaaaaacgatcgtactctacgatcgtcctatctccacgcacgtactaccgcccgcctcgccgctaaacgaaccgcgcaaaacgcaactaaaaaccctactacaacaactcaaactttactaaaccgaacgataacgataaccattaaaaaaattttcaccccgcaaaacgacgcgttttatacgataatcacccacgcgacgaaaccgcaaaacgctctaccgcgtaaccccgcaaatactaataaaaatctccaacgacaaccctattcgacataacgccaaacgcccgaaataaacttaaaacgcccacaaactcacccgctaaaaaaatactaattatcgacctccacttaaattcatcgcactatactctaaaaattatataacattaacctat

SEQ ID NO: 6489 - DNA, 1029 bp, Artificial Sequence
  chemically treated genomic DNA (Homo sapiens) CpG-island No: 6489
ttttcgcgatggtttggatgttatttttttgcggttttttttgtaagttttgacggattttcggcgagtcggcgagggtacgcgttattgttagtgttttgttggttagtttatttcgcgttatattattgatttgcgagaagtagtatgttgtttgtgtttggtgttaatgtcgcgatggttagtaatttttttatttattcggttgatgttttgatgtttgatttcgaagatttcgtagtattgcgtgaaaaagatatcgttcgtcgtatggtttattacgcgttgtaatattcgttgtatcgcgatattgaaattattgtgcgtgttaacgcgttggatttcgaatggggtgttaacgatttggaagtcgtcgttcgcggtggtgcggacgttgtgcgtttgtcgaaaatcgatatcgtttaggatgttttggatattgaaaaagagattttgcgtatcgaaaaagtttgtggtcgtgaattcggtagtatcggtttgttggcggcgattgaattttcgttggggattattcgcgtagtggaaatcgtttacgttttcgagcgtttgatcggtatcgttttcggtgtagaagattatgtgcgtaatttgcgtatagaacgtttttcggaaggaattgaattgttgttcgtacgttgttttattttgtaggtcgcgcgttttgcgggtatttaggcgttcgatatcgtttatttcgacgttaataacgaagtcggatttttgtaagaagtcgtttatattaaatagttgggttttgacggtaaatcgttgattaattcgcgttagattgatttgttgtataatttttacgtatcgatttagaaagaagtggattacgttcgtcgcgtcgtagaagtcgttgaagtcgtcgttcgcgaagggtttcgcgtggtttttttgaacggtaagatggtggacggttcggttatcgatcgcgttcgtttggtgttttttcgtgtagaatttttcggtattcgcgaagaataataattaatgtaagaaattaaa

SEQ ID NO: 6490 - DNA, 1029 bp, Artificial Sequence
  chemically treated genomic DNA (Homo sapiens) CpG-island No: 6490
tttaatttcttacattaattattattcttcgcgaataccgaaaaattctacacgaaaaaacaccaaacgaacgcgatcgataaccgaaccgtccaccatcttaccgttcaaaaaaaccacgcgaaacccttcgcgaacgacgacttcaacgacttctacgacgcgacgaacgtaatccacttctttctaaatcgatacgtaaaaattatacaacaaatcaatctaacgcgaattaatcaacgatttaccgtcaaaacccaactatttaatataaacgacttcttacaaaaatccgacttcgttattaacgtcgaaataaacgatatcgaacgcctaaatacccgcaaaacgcgcgacctacaaaataaaacaacgtacgaacaacaattcaattccttccgaaaaacgttctatacgcaaattacgcacataatcttctacaccgaaaacgataccgatcaaacgctcgaaaacgtaaacgatttccactacgcgaataatccccaacgaaaattcaatcgccgccaacaaaccgatactaccgaattcacgaccacaaactttttcgatacgcaaaatctctttttcaatatccaaaacatcctaaacgatatcgattttcgacaaacgcacaacgtccgcaccaccgcgaacgacgacttccaaatcgttaacaccccattcgaaatccaacgcgttaacacgcacaataatttcaatatcgcgatacaacgaatattacaacgcgtaataaaccatacgacgaacgatatctttttcacgcaatactacgaaatcttcgaaatcaaacatcaaaacatcaaccgaataaataaaaaaattactaaccatcgcgacattaacaccaaacacaaacaacatactacttctcgcaaatcaataatataacgcgaaataaactaaccaacaaaacactaacaataacgcgtaccctcgccgactcgccgaaaatccgtcaaaacttacaaaaaaaaccgcaaaaaaataacatccaaaccatcgcgaaaa

SEQ ID NO: 6491 - DNA, 1029 bp, Artificial Sequence
  chemically treated genomic DNA (Homo sapiens) CpG-island No: 6491
tttagttttttatattgattattatttttcgcggatgtcggaaagttttgtacgggagagtattagacgggcgcgatcgataatcggatcgtttattattttgtcgtttagggaaattacgcgaggtttttcgcgagcggcggttttagcggtttttacgacgcggcgggcgtgatttatttttttttgggtcggtgcgtagaggttgtgtagtagattaatttgacgcgggttgattagcgatttgtcgttaaagtttagttgtttgatgtgggcggttttttgtagaaattcggtttcgttgttagcgtcggaatagacggtatcgaacgtttgaatattcgtagagcgcgcggtttgtaaaatggaatagcgtgcgaatagtagtttagtttttttcggggagcgttttgtacgtaggttgcgtatatagttttttgtatcgagggcgatatcgattaaacgttcggaagcgtgagcgatttttattgcgcgggtaatttttagcggagatttaatcgtcgttagtaggtcggtgttgtcgggtttacgattataggttttttcgatacgtaggattttttttttaatatttagaatattttgagcggtatcggttttcggtagacgtataacgttcgtattatcgcgaacgacggtttttaggtcgttaatattttattcggaatttagcgcgttgatacgtataatggttttaatatcgcgatatagcggatgttgtagcgcgtggtaaattatgcggcgggcggtgttttttttacgtaatgttacggagttttcgaggttaaatattagggtattagtcgggtagatgaaggagttgttgattatcgcggtattggtattaggtataaataatatgttatttttcgtaaattagtgatatgacgcgagatgggttagttaataaggtattggtagtggcgcgtattttcgtcgattcgtcggaaattcgttagggtttgtagaaaaaatcgtaggagagtggtatttaggttatcgcggaag

SEQ ID NO: 6492 - DNA, 1029 bp, Artificial Sequence
  chemically treated genomic DNA (Homo sapiens) CpG-island No: 6492
cttccgcgataacctaaataccactctcctacgattttttctacaaaccctaacgaatttccgacgaatcgacgaaaatacgcgccactaccaataccttattaactaacccatctcgcgtcatatcactaatttacgaaaaataacatattatttatacctaataccaataccgcgataatcaacaactccttcatctacccgactaataccctaatatttaacctcgaaaactccgtaacattacgtaaaaaaaacaccgcccgccgcataatttaccacgcgctacaacatccgctatatcgcgatattaaaaccattatacgtatcaacgcgctaaattccgaataaaatattaacgacctaaaaaccgtcgttcgcgataatacgaacgttatacgtctaccgaaaaccgataccgctcaaaatattctaaatattaaaaaaaaaatcctacgtatcgaaaaaacctataatcgtaaacccgacaacaccgacctactaacgacgattaaatctccgctaaaaattacccgcgcaataaaaatcgctcacgcttccgaacgtttaatcgatatcgccctcgatacaaaaaactatatacgcaacctacgtacaaaacgctccccgaaaaaaactaaactactattcgcacgctattccattttacaaaccgcgcgctctacgaatattcaaacgttcgataccgtctattccgacgctaacaacgaaaccgaatttctacaaaaaaccgcccacatcaaacaactaaactttaacgacaaatcgctaatcaacccgcgtcaaattaatctactacacaacctctacgcaccgacccaaaaaaaaataaatcacgcccgccgcgtcgtaaaaaccgctaaaaccgccgctcgcgaaaaacctcgcgtaatttccctaaacgacaaaataataaacgatccgattatcgatcgcgcccgtctaatactctcccgtacaaaactttccgacatccgcgaaaaataataatcaatataaaaaactaaa

SEQ ID NO: 6493 - DNA, 1198 bp, Artificial Sequence
  chemically treated genomic DNA (Homo sapiens) CpG-island No: 6493
acggcggttaggcgtagtttgtcgcgtaggtatttagtaaagaaagtaaagtcgtcggaggtaatcgttattttttagtttagcgtttttagtttgagtattagttgcgttaagtttggtattagcggtagatttttacgtatttgttgtagaatattggcgttagcgttttttagcgtcgttatacggttgcgtaggttggcggtaaaatcgagttcgtcgcgtatcgttcgttcggttattttcgttattatttcgttcgtttcggttagtttggtaattttattaatatatttaatttggatggcggtggagtttatatttattattagtaaattcggcgtgcgtaggtgcgggattttttttagcggggcgatatttagttgcgtttcgtgggttaggcgtgtagttcgtgcggtgagtgaatttgttagacgaattatttgataattttttacgtattaggcggtaataattattatcgtcgtatttagtttgttttggtattgggttagacgttgtttatttagtttacgattatatagtagttagtcgttacgatttgcgtggaatttagtggattattttttattatttatgaagagtcgttcgggtataagaatatttttgtaggcgatttagtatgttgtattttttcggttcgtttatgtacggcgtaatgtgcgaatatatacgtagcggattttggtaatttttgtggcgtatggcgcggttaaatttatattggttgaatttcgttatagcgttcggtagtagcggatgttgggttttacgtttcgtttcgttttcggtaaagttcgttatatataagtcgattggttcggcggtgtatagtattagatttatttagtttagcgttttgttagatgttaataacggatcgtttttttcggttaacgtttcggttttattttcgtttatcgtaaggatagagacgtgatttttgaggaattgttgttattattgcggattttcggtaatgataaatttggtgtttagcgttagtattatcggtacgttatattttttcgcgtatttaatggtttttatggttgttttcggtatgggtttattcggtttgtaacgtattagatatgaggtgagaattagtgtcgaggtttcggtaattatatttttcggaatgtttttagttcgtagttggtttatgtggtttgga

SEQ ID NO: 6494 - DNA, 1198 bp, Artificial Sequence
  chemically treated genomic DNA (Homo sapiens) CpG-island No: 6494
tccaaaccacataaaccaactacgaactaaaaacattccgaaaaatataattaccgaaacctcgacactaattctcacctcatatctaatacgttacaaaccgaataaacccataccgaaaacaaccataaaaaccattaaatacgcgaaaaaatataacgtaccgataatactaacgctaaacaccaaatttatcattaccgaaaatccgcaataataacaacaattcctcaaaaatcacgtctctatccttacgataaacgaaaataaaaccgaaacgttaaccgaaaaaaacgatccgttattaacatctaacaaaacgctaaactaaataaatctaatactatacaccgccgaaccaatcgacttatatataacgaactttaccgaaaacgaaacgaaacgtaaaacccaacatccgctactaccgaacgctataacgaaattcaaccaatataaatttaaccgcgccatacgccacaaaaattaccaaaatccgctacgtatatattcgcacattacgccgtacataaacgaaccgaaaaaatacaacatactaaatcgcctacaaaaatattcttatacccgaacgactcttcataaataataaaaaataatccactaaattccacgcaaatcgtaacgactaactactatataatcgtaaactaaataaacaacgtctaacccaataccaaaacaaactaaatacgacgataataattattaccgcctaatacgtaaaaaattatcaaataattcgtctaacaaattcactcaccgcacgaactacacgcctaacccacgaaacgcaactaaatatcgccccgctaaaaaaaatcccgcacctacgcacgccgaatttactaataataaatataaactccaccgccatccaaattaaatatattaataaaattaccaaactaaccgaaacgaacgaaataataacgaaaataaccgaacgaacgatacgcgacgaactcgattttaccgccaacctacgcaaccgtataacgacgctaaaaaacgctaacgccaatattctacaacaaatacgtaaaaatctaccgctaataccaaacttaacgcaactaatactcaaactaaaaacgctaaactaaaaaataacgattacctccgacgactttactttctttactaaatacctacgcgacaaactacgcctaaccgccgt

SEQ ID NO: 6495 - DNA, 1198 bp, Artificial Sequence
  chemically treated genomic DNA (Homo sapiens) CpG-island No: 6495
tttaggttatatgaattagttgcgggttgaaagtatttcggaagatgtgattgtcggagtttcggtattggtttttattttatatttggtgcgttgtaagtcgggtgaatttatgtcggaagtaattatgaaagttattgagtacgcgaagaaatataacgtatcggtggtgttgacgttgggtattaagtttgttattgtcgagaattcgtagtggtggtagtaattttttaaagattacgtttttatttttgcgatgaacgaagatgaagtcgaagcgttgatcggagaaagcgattcgttgttggtatttgataaggcgttggattgggtagatttggtgttgtgtatcgtcgggttaatcggtttgtatatggcgggttttatcgaagacgaagcgaaacgtaaaatttagtattcgttgttgtcgggcgttatagcggaatttaattagtatgagtttagtcgcgttatgcgttataaggattgttagaattcgttgcgtgtatattcgtatattgcgtcgtatatgggcgggtcggaaaaatgtaatatattgggtcgtttgtagagatgtttttatgttcgggcggttttttataagtggtgaaaagtgatttattggattttacgtaggtcgtagcggttggttgttgtatggtcgtgggttggataaataacgtttgatttaatattagagtaaattgggtgcggcgatggtgattgttgtcgtttggtgcgtggaagattattaggtgattcgtttggtaggtttatttatcgtacgggttatacgtttggtttacgaagcgtagttggatgtcgtttcgttggggaaaatttcgtatttgcgtacgtcgggtttgttggtgatggatatggattttatcgttatttagattgaatgtattgatgaaattgttaaattggtcggaacgggcgagatggtggcggaagtaatcgaacgggcgatgcgcggcgaattcgattttatcgttagtttgcgtagtcgtgtggcgacgttgaaaggcgttgacgttaatattttgtaataggtgcgtgaaaatttgtcgttgatgttaggtttaacgtaattggtgtttaagttggaaacgttgggttggaaagtggcgattgttttcggcggttttattttttttgttgaatatttgcgcgataagttgcgtttgatcgtcgt

SEQ ID NO: 6496 - DNA, 1198 bp, Artificial Sequence
  chemically treated genomic DNA (Homo sapiens) CpG-island No: 6496
acgacgatcaaacgcaacttatcgcgcaaatattcaacaaaaaaaataaaaccgccgaaaacaatcgccactttccaacccaacgtttccaacttaaacaccaattacgttaaacctaacatcaacgacaaattttcacgcacctattacaaaatattaacgtcaacgcctttcaacgtcgccacacgactacgcaaactaacgataaaatcgaattcgccgcgcatcgcccgttcgattacttccgccaccatctcgcccgttccgaccaatttaacaatttcatcaatacattcaatctaaataacgataaaatccatatccatcaccaacaaacccgacgtacgcaaatacgaaattttccccaacgaaacgacatccaactacgcttcgtaaaccaaacgtataacccgtacgataaataaacctaccaaacgaatcacctaataatcttccacgcaccaaacgacaacaatcaccatcgccgcacccaatttactctaatattaaatcaaacgttatttatccaacccacgaccatacaacaaccaaccgctacgacctacgtaaaatccaataaatcacttttcaccacttataaaaaaccgcccgaacataaaaacatctctacaaacgacccaatatattacatttttccgacccgcccatatacgacgcaatatacgaatatacacgcaacgaattctaacaatccttataacgcataacgcgactaaactcatactaattaaattccgctataacgcccgacaacaacgaatactaaattttacgtttcgcttcgtcttcgataaaacccgccatatacaaaccgattaacccgacgatacacaacaccaaatctacccaatccaacgccttatcaaataccaacaacgaatcgctttctccgatcaacgcttcgacttcatcttcgttcatcgcaaaaataaaaacgtaatctttaaaaaattactaccaccactacgaattctcgacaataacaaacttaatacccaacgtcaacaccaccgatacgttatatttcttcgcgtactcaataactttcataattacttccgacataaattcacccgacttacaacgcaccaaatataaaataaaaaccaataccgaaactccgacaatcacatcttccgaaatactttcaacccgcaactaattcatataacctaaa

SEQ ID NO: 6497 - DNA, 658 bp, Artificial Sequence
  chemically treated genomic DNA (Homo sapiens) CpG-island No: 6497
ggtagagatatcggtaattatcggtataattggaaggttgtcgattagaattataaattcgttgacgaagttatcgtgttaggtattttaaggcgtggtcgtcgtaaagattagcgatagtgttggtagttttttatttgtttttatagatcgtttattatgcgtatgttcggggtatggatacgtttataaagttgatttaaaagaataaataggatttcgtcgtcgataaatcgtgcgtaattatttggattatcgcgttttggtaggttaattggttgtcggtgagatagtaattagtacgaagtttatgtgggaaatcgaggtgtaggcgattagacgtttgatatcggtttgggcgaaggttatttacgtatcgtagaagatgtcgataatatttagttatatagtaattggcgcgaattttgtcgacgcgttcgggaatagcggtagggagaaacgtagtaaatcgtaagcggtagtttttagtaagattttcgcgaggttaacggaatcggcggtcggagtttgggagtgcgtattcggtagttagttatgtagcggaattatcggtattttgattgcgaaggcgatgaagaagtttagtattaataggtattttatattattggatattggcgtatttagtagtttttta

SEQ ID NO: 6498 - DNA, 658 bp, Artificial Sequence
  chemically treated genomic DNA (Homo sapiens) CpG-island No: 6498
taaaaaactactaaatacgccaatatccaataatataaaatacctattaatactaaacttcttcatcgccttcgcaatcaaaataccgataattccgctacataactaactaccgaatacgcactcccaaactccgaccgccgattccgttaacctcgcgaaaatcttactaaaaactaccgcttacgatttactacgtttctccctaccgctattcccgaacgcgtcgacaaaattcgcgccaattactatataactaaatattatcgacatcttctacgatacgtaaataaccttcgcccaaaccgatatcaaacgtctaatcgcctacacctcgatttcccacataaacttcgtactaattactatctcaccgacaaccaattaacctaccaaaacgcgataatccaaataattacgcacgatttatcgacgacgaaatcctatttattcttttaaatcaactttataaacgtatccataccccgaacatacgcataataaacgatctataaaaacaaataaaaaactaccaacactatcgctaatctttacgacgaccacgccttaaaatacctaacacgataacttcgtcaacgaatttataattctaatcgacaaccttccaattataccgataattaccgatatctctacc

SEQ ID NO: 6499 - DNA, 658 bp, Artificial Sequence
  chemically treated genomic DNA (Homo sapiens) CpG-island No: 6499
tgaagagttgttgaatacgttaatgtttagtggtgtggaatatttgttaatgttgggtttttttatcgttttcgtagttaaaatgtcggtggtttcgttgtatggttggttgtcggatgcgtatttttaggtttcgatcgtcggtttcgttgatttcgcggggattttgttgaaaattgtcgtttacggtttgttgcgtttttttttgtcgttgttttcgaacgcgtcggtagagttcgcgttaattgttatgtggttgggtgttatcggtattttttacggtgcgtggatggttttcgtttagatcgatattaaacgtttgatcgtttatatttcggttttttatatgggtttcgtgttgattgttattttatcggtagttagttggtttattagggcgcggtaatttagatgattgcgtacggtttgtcggcggcggggttttgtttatttttttgggttagttttatgaacgtatttatatttcggatatgcgtatgatgggcggtttgtgggagtagatgaaaggttgttagtattgtcgttgatttttgcggcggttacgttttggaatgtttggtacggtaatttcgttagcgaatttatgattttggtcggtagttttttagttgtatcggtgattatcggtatttttatt

SEQ ID NO: 6500 - DNA, 658 bp, Artificial Sequence
  chemically treated genomic DNA (Homo sapiens) CpG-island No: 6500
aataaaaataccgataatcaccgatacaactaaaaaactaccgaccaaaatcataaattcgctaacgaaattaccgtaccaaacattccaaaacgtaaccgccgcaaaaatcaacgacaatactaacaacctttcatctactcccacaaaccgcccatcatacgcatatccgaaatataaatacgttcataaaactaacccaaaaaaataaacaaaaccccgccgccgacaaaccgtacgcaatcatctaaattaccgcgccctaataaaccaactaactaccgataaaataacaatcaacacgaaacccatataaaaaaccgaaatataaacgatcaaacgtttaatatcgatctaaacgaaaaccatccacgcaccgtaaaaaataccgataacacccaaccacataacaattaacgcgaactctaccgacgcgttcgaaaacaacgacaaaaaaaaacgcaacaaaccgtaaacgacaattttcaacaaaatccccgcgaaatcaacgaaaccgacgatcgaaacctaaaaatacgcatccgacaaccaaccatacaacgaaaccaccgacattttaactacgaaaacgataaaaaaacccaacattaacaaatattccacaccactaaacattaacgtattcaacaactcttca

SEQ ID NO: 6501 - DNA, 557 bp, Artificial Sequence
  chemically treated genomic DNA (Homo sapiens) CpG-island No: 6501
  unsure (227)
atcgatagttcgttggaagaagttgttgcgttggatggtgcgatatcgtggtaggtttttcgttttgttttgttgtcgttgttagtatcgattttggcggtggtatttattttgtcggttatcgttgttattattgaagtttcggtcgcgtcgtttgtattgcgtgacgtaaatagttatattttggtcggggggatgtagtaatattttaattcgtaaaattattntgtggggtgatttttgtcgtcgttgtcgtgatgtttgtattatcgattaatattcgttttttgttggtttaacgttggttgggtaatcgttttgacggaaggtggtgttagtttattagttattaggatgaaatcggtattaaaacgttgggcgaaatttttacggtcgatattttcgttttgatcgcgtagttcgtcgtagaattttagacgtttgagcgaattatcgtcgtatattataaattgaatgcgttgttgttagtcgagcgttagtttagttattattttttcggttttaatgtgattggtgattttttcgttggttagatt

SEQ ID NO: 6502 - DNA, 557 bp, Artificial Sequence
  chemically treated genomic DNA (Homo sapiens) CpG-island No: 6502
  unsure (331)
aatctaaccaacgaaaaaatcaccaatcacattaaaaccgaaaaaataataactaaactaacgctcgactaacaacaacgcattcaatttataatatacgacgataattcgctcaaacgtctaaaattctacgacgaactacgcgatcaaaacgaaaatatcgaccgtaaaaatttcgcccaacgttttaataccgatttcatcctaataactaataaactaacaccaccttccgtcaaaacgattacccaaccaacgttaaaccaacaaaaaacgaatattaatcgataatacaaacatcacgacaacgacgacaaaaatcaccccacanaataattttacgaattaaaatattactacatccccccgaccaaaatataactatttacgtcacgcaatacaaacgacgcgaccgaaacttcaataataacaacgataaccgacaaaataaataccaccgccaaaatcgatactaacaacgacaacaaaacaaaacgaaaaacctaccacgatatcgcaccatccaacgcaacaacttcttccaacgaactatcgat

SEQ ID NO: 6503 - DNA, 557 bp, Artificial Sequence
  chemically treated genomic DNA (Homo sapiens) CpG-island No: 6503
  unsure (331)
gatttgattagcgaagagattattaattatattgaagtcggaaaagtggtgattaaattggcgttcgattggtagtagcgtatttagtttgtgatgtgcgacgatggttcgtttaagcgtttgaagttttgcgacgagttgcgcgattaaaacgaagatatcgatcgtgaagatttcgtttagcgttttgatgtcgattttattttgatgattggtgaattggtattatttttcgttaaggcggttgtttagttagcgttgagttagtaagaagcgaatgttgatcggtaatgtagatattacggtagcggcggtaaaagttattttatanggtagttttgcgggttgaggtattgttgtattttttcggttagggtgtagttgtttacgttacgtagtataagcgacgcgatcggaattttagtaatggtagcgataatcgataggatgaatattatcgttagaatcggtattgatagcggtaataggataaggcggaaggtttgttacggtgtcgtattatttagcgtagtagttttttttagcgaattgtcgat

SEQ ID NO: 6504 - DNA, 557 bp, Artificial Sequence
  chemically treated genomic DNA (Homo sapiens) CpG-island No: 6504
  unsure (227)
atcgacaattcgctaaaaaaaactactacgctaaataatacgacaccgtaacaaaccttccgccttatcctattaccgctatcaataccgattctaacgataatattcatcctatcgattatcgctaccattactaaaattccgatcgcgtcgcttatactacgtaacgtaaacaactacaccctaaccgaaaaaatacaacaatacctcaacccgcaaaactaccntataaaataacttttaccgccgctaccgtaatatctacattaccgatcaacattcgcttcttactaactcaacgctaactaaacaaccgccttaacgaaaaataataccaattcaccaatcatcaaaataaaatcgacatcaaaacgctaaacgaaatcttcacgatcgatatcttcgttttaatcgcgcaactcgtcgcaaaacttcaaacgcttaaacgaaccatcgtcgcacatcacaaactaaatacgctactaccaatcgaacgccaatttaatcaccacttttccgacttcaatataattaataatctcttcgctaatcaaatc

SEQ ID NO: 6505 - DNA, 801 bp, Artificial Sequence
  chemically treated genomic DNA (Homo sapiens) CpG-island No: 6505
agcgttgtgcgtttattgtagaatttattggcgcgattttttattgtgttttaaggtcgggttggtgatcgggaattttattgttggcgtgcgttattaggcgcgggtagttcgttatcgcgagtaacgtatacggtatttatatgaaatgtcgaaagttttggcggtgggtcgtagttcgtaggatatcgttgttattagcgaataatttattgtttttacgttttatgttcgtagttaggtgttgttgttcgatgataacggtaaattgtagtcgttaatatattcgtaaggaatgacgtcgtgggacgatgttatcgcgtagtggagttttgataaaggtttgtttgcgggcgcgggtatcgatacgttattcggtgtatcgtattagattttgtcgttaaaaagcggcgagaaaatttacgggttggtggtggtggagtcggggaatttgcgttagttgatgatttcggaatagtagcgtttgttggagacgtttacgttgttagtcgttaatgtttttgagcggttgacgttaatcgttagcgaagaataggcgcggatggtaagcgaacgtgaatagattcgtaacgttttgttggcggcgttttcgtatgatttacgtacgtcgtttacggtgttgtttggttaggtagaaattttaacgttcgatttggtaagcgaaggattattttacgttcgttaggttagcgagattcgttagtatgtgttgaatattattcgattggtgaataatttattggatatggcgcgaatttagttcggcggttttaatttgaa

SEQ ID NO: 6506 - DNA, 801 bp, Artificial Sequence
  chemically treated genomic DNA (Homo sapiens) CpG-island No: 6506
ttcaaattaaaaccgccgaactaaattcgcgccatatccaataaattattcaccaatcgaataatattcaacacatactaacgaatctcgctaacctaacgaacgtaaaataatccttcgcttaccaaatcgaacgttaaaatttctacctaaccaaacaacaccgtaaacgacgtacgtaaatcatacgaaaacgccgccaacaaaacgttacgaatctattcacgttcgcttaccatccgcgcctattcttcgctaacgattaacgtcaaccgctcaaaaacattaacgactaacaacgtaaacgtctccaacaaacgctactattccgaaatcatcaactaacgcaaattccccgactccaccaccaccaacccgtaaattttctcgccgctttttaacgacaaaatctaatacgatacaccgaataacgtatcgatacccgcgcccgcaaacaaacctttatcaaaactccactacgcgataacatcgtcccacgacgtcattccttacgaatatattaacgactacaatttaccgttatcatcgaacaacaacacctaactacgaacataaaacgtaaaaacaataaattattcgctaataacaacgatatcctacgaactacgacccaccgccaaaactttcgacatttcatataaataccgtatacgttactcgcgataacgaactacccgcgcctaataacgcacgccaacaataaaattcccgatcaccaacccgaccttaaaacacaataaaaaatcgcgccaataaattctacaataaacgcacaacgct

SEQ ID NO: 6507 - DNA, 801 bp, Artificial Sequence
  chemically treated genomic DNA (Homo sapiens) CpG-island No: 6507
tttaaattaaagtcgtcggattgaattcgcgttatatttagtagattatttattagtcgggtagtgtttagtatatgttgacggatttcgttggtttggcgggcgtggggtgatttttcgtttgttagatcgagcgttaagatttttgtttgattaaatagtatcgtaagcggcgtgcgtaaattatgcgaaagcgtcgttagtagggcgttgcggatttgtttacgttcgtttgttattcgcgtttgtttttcgttggcggttagcgttagtcgtttaagggtattggcgattaatagcgtaaacgtttttagtaggcgttgttgtttcgggattattaattggcgtagatttttcggttttattattattagttcgtaggttttttcgtcgttttttagcggtaaaatttggtacggtatatcgggtaacgtgtcggtgttcgcgttcgtaggtaggtttttattaaaattttattgcgcgatggtatcgttttacggcgttattttttgcggatgtgttaacggttgtaatttatcgttgttatcgggtaataatatttgattgcgggtatgaaacgtggaggtaataaattgttcgttggtggtagcgatattttgcggattgcggtttatcgttagagttttcgatattttatataagtgtcgtgtgcgttgttcgcggtaacgggttattcgcgtttgataacgtacgttagtagtaaggttttcgattattagttcgattttagagtatagtagaaggtcgcgttagtgagttttgtaatgaacgtataacgtt

SEQ ID NO: 6508 - DNA, 801 bp, Artificial Sequence
  chemically treated genomic DNA (Homo sapiens) CpG-island No: 6508
aacgttatacgttcattacaaaactcactaacgcgaccttctactatactctaaaatcgaactaataatcgaaaaccttactactaacgtacgttatcaaacgcgaataacccgttaccgcgaacaacgcacacgacacttatataaaatatcgaaaactctaacgataaaccgcaatccgcaaaatatcgctaccaccaacgaacaatttattacctccacgtttcatacccgcaatcaaatattattacccgataacaacgataaattacaaccgttaacacatccgcaaaaaataacgccgtaaaacgataccatcgcgcaataaaattttaataaaaacctacctacgaacgcgaacaccgacacgttacccgatataccgtaccaaattttaccgctaaaaaacgacgaaaaaacctacgaactaataataataaaaccgaaaaatctacgccaattaataatcccgaaacaacaacgcctactaaaaacgtttacgctattaatcgccaatacccttaaacgactaacgctaaccgccaacgaaaaacaaacgcgaataacaaacgaacgtaaacaaatccgcaacgccctactaacgacgctttcgcataatttacgcacgccgcttacgatactatttaatcaaacaaaaatcttaacgctcgatctaacaaacgaaaaatcaccccacgcccgccaaaccaacgaaatccgtcaacatatactaaacactacccgactaataaataatctactaaatataacgcgaattcaatccgacgactttaatttaaa

SEQ ID NO: 6509 - DNA, 687 bp, Artificial Sequence
  chemically treated genomic DNA (Homo sapiens) CpG-island No: 6509
  unsure (534, 673, 683)
gtttattttaatgcggttagttgtatatcgttaatattacgacgtttacgacgcggacgatttttaggttattacgcgggttacggtcgttacgatcgcgcggattacggttattcggttacggaatttacgtttcggacgtatcggcgtatttggcggtacgatagagtacgtttattttgtgttatttttagtagtgtcgtagttagagttcgagaattagtttttttaattttataagtcggttgaatttggttaataggggtcggatatattttaattttggttttatcgggggggatttaaacgggaatttttacggggtgggtataaatcggtggtagaatttcgaaagagatttaattagagggaggacgtaatttaatcgggtaaataagagcgtcggacgtcgggtcggcgatacgattataatttcgatgaatacgacgttttatcgtacggcggagagaagtatattttaaaagattcgtaaataataggtttaatttagatttttttttatattatcgaagngttatttttttttaggttatacggtcgacgtttttttcggtcggagttgtatcggtgtgtaaaatatattttttggaattaataatgcgtagtttattattcgggtaagatttgcgttttatcgaggttattcgttttnggtaatatgntggt

SEQ ID NO: 6510 - DNA, 687 bp, Artificial Sequence
  chemically treated genomic DNA (Homo sapiens) CpG-island No: 6510
  unsure (5, 15, 154)
accancatattaccnaaaacgaataacctcgataaaacgcaaatcttacccgaataataaactacgcattattaattccaaaaaatatattttacacaccgatacaactccgaccgaaaaaaacgtcgaccgtataacctaaaaaaaaataacncttcgataatataaaaaaaaatctaaattaaacctattatttacgaatcttttaaaatatacttctctccgccgtacgataaaacgtcgtattcatcgaaattataatcgtatcgccgacccgacgtccgacgctcttatttacccgattaaattacgtcctccctctaattaaatctctttcgaaattctaccaccgatttatacccaccccgtaaaaattcccgtttaaatcccccccgataaaaccaaaattaaaatatatccgacccctattaaccaaattcaaccgacttataaaattaaaaaaactaattctcgaactctaactacgacactactaaaaataacacaaaataaacgtactctatcgtaccgccaaatacgccgatacgtccgaaacgtaaattccgtaaccgaataaccgtaatccgcgcgatcgtaacgaccgtaacccgcgtaataacctaaaaatcgtccgcgtcgtaaacgtcgtaatattaacgatatacaactaaccgcattaaaataaac

SEQ ID NO: 6511 - DNA, 687 bp, Artificial Sequence
  chemically treated genomic DNA (Homo sapiens) CpG-island No: 6511
  unsure (5, 15, 154)
attantatattattnggagcgaatgatttcggtggaacgtagattttattcgagtggtaggttgcgtattgttggttttaggaggtgtattttgtatatcggtataatttcgatcgaaaaaagcgtcggtcgtatgatttgaaaaagggtggtntttcggtggtgtgagggggggtttgggttgggtttgttgtttgcgggttttttggggtgtgttttttttcgtcgtgcggtagggcgtcgtgtttatcggggttgtagtcgtgtcgtcggttcggcgttcggcgtttttgtttgttcggttgggttgcgttttttttttagttaggtttttttcgagattttgttatcggtttgtgtttatttcgtggaaattttcgtttaagtttttttcggtggaattaggattgggatatattcggtttttgttgattaaatttagtcgatttgtgaagttgaaagagttgattttcgaattttggttgcggtattgttgaaaatggtatagggtgaacgtattttgtcgtatcgttagatgcgtcgatgcgttcgaaacgtgaatttcgtgatcggatgatcgtggttcgcgcgatcgtaacgatcgtggttcgcgtggtgatttgaagatcgttcgcgtcgtgaacgtcgtgatgttggcgatatgtagttgatcgtattgaagtgggt

SEQ ID NO: 6512 - DNA, 687 bp, Artificial Sequence
  chemically treated genomic DNA (Homo sapiens) CpG-island No: 6512
  unsure (534, 673, 683)
acccacttcaatacgatcaactacatatcgccaacatcacgacgttcacgacgcgaacgatcttcaaatcaccacgcgaaccacgatcgttacgatcgcgcgaaccacgatcatccgatcacgaaattcacgtttcgaacgcatcgacgcatctaacgatacgacaaaatacgttcaccctataccattttcaacaataccgcaaccaaaattcgaaaatcaactctttcaacttcacaaatcgactaaatttaatcaacaaaaaccgaatatatcccaatcctaattccaccgaaaaaaacttaaacgaaaatttccacgaaataaacacaaaccgataacaaaatctcgaaaaaaacctaactaaaaaaaaaacgcaacccaaccgaacaaacaaaaacgccgaacgccgaaccgacgacacgactacaaccccgataaacacgacgccctaccgcacgacgaaaaaaaacacaccccaaaaaacccgcaaacaacaaacccaacccaaaccccccctcacaccaccgaaanaccaccctttttcaaatcatacgaccgacgcttttttcgatcgaaattataccgatatacaaaatacacctcctaaaaccaacaatacgcaacctaccactcgaataaaatctacgttccaccgaaatcattcgctccnaataatatantaat

SEQ ID NO: 6513 - DNA, 1174 bp, Artificial Sequence
  chemically treated genomic DNA (Homo sapiens) CpG-island No: 6513
  unsure (403, 445, 561, 726, 809..)
aggtcgatgtgaatagttgtttcgcgtgttacgtgggcgttgaggacggaggtaacgagattggagtttatttagggcggggaggtggtagcgttgcgcggacgtcgggagaacgtcgattagggagaaggtcgattagggagaacgtaagttcgagcgtttaattaggtgggggtggtacgttattaggtcgatttttattaacgggtaaagcggacgtttacgattcggttaagcgtttagtagaatttgtcggcgtatttatatggagcggcgtatcgtatgcggtacgtggttttttgttatgatcgttacgataatatcgttaattagacgcgtagcggttggtatttcgttgttcgtatcgtatttgtattatgcggcgatggttcgcgcgttagtngtggatgttcgtttttgcgacgtttcgcggttagtcgtattnttaggtcgttaaagttgcggatgaggtatggtcggagtaaattataataggtatatcggagacggtgaacggttagttttgtaatgtgtattaataattcgtcgacggttcggaangagtatcggatagcggtagatttaataatagcgggcgcgatagtattaatttagttacgataatcggcgcgtgagatagttagtttagttttagtgcgcgttgcgtggttgtttcgcgatcgtagtttgagtacgttattagaatcgtgtgaggtatgatatttngtgagcgtagcgatataagatttggttggcgcgtcgtttaggagtagtcgcgagtttcgcgacgttcgtagttattgttgaanntatttaaggagtaaaatcggttacggtatatttgtagaaggtttaaatacgttatcggaagcgttttggattaacgtcgtcgtgggtcgttcggtaggggttagtcggtagatggtcgaattaatttttacgtcgggttaggggttaatttggatgggtattttcggtcggtcggatgtttattggaaggaatttattatattcgtatattgtacgcggattattcggtatgcgcgtatcgtcgcgtgataaatcgcgcgagtcgtcgttcgaaaatttattttggtacgtgtaacgtcggtttattgcgagcgttcgttagtagttagatatatggatgtttaggagagtaaattaataaaga

SEQ ID NO: 6514 - DNA, 1174 bp, Artificial Sequence
  chemically treated genomic DNA (Homo sapiens) CpG-island No: 6514
  unsure (365..366, 449, 614, 730, 772)
tctttattaatttactctcctaaacatccatatatctaactactaacgaacgctcgcaataaaccgacgttacacgtaccaaaataaattttcgaacgacgactcgcgcgatttatcacgcgacgatacgcgcataccgaataatccgcgtacaatatacgaatataataaattccttccaataaacatccgaccgaccgaaaatacccatccaaattaacccctaacccgacgtaaaaattaattcgaccatctaccgactaacccctaccgaacgacccacgacgacgttaatccaaaacgcttccgataacgtatttaaaccttctacaaatataccgtaaccgattttactccttaaatannttcaacaataactacgaacgtcgcgaaactcgcgactactcctaaacgacgcgccaaccaaatcttatatcgctacgctcacnaaatatcatacctcacacgattctaataacgtactcaaactacgatcgcgaaacaaccacgcaacgcgcactaaaactaaactaactatctcacgcgccgattatcgtaactaaattaatactatcgcgcccgctattattaaatctaccgctatccgatactcnttccgaaccgtcgacgaattattaatacacattacaaaactaaccgttcaccgtctccgatatacctattataatttactccgaccatacctcatccgcaactttaacgacctaanaatacgactaaccgcgaaacgtcgcaaaaacgaacatccacnactaacgcgcgaaccatcgccgcataatacaaatacgatacgaacaacgaaataccaaccgctacgcgtctaattaacgatattatcgtaacgatcataacaaaaaaccacgtaccgcatacgatacgccgctccatataaatacgccgacaaattctactaaacgcttaaccgaatcgtaaacgtccgctttacccgttaataaaaatcgacctaataacgtaccacccccacctaattaaacgctcgaacttacgttctccctaatcgaccttctccctaatcgacgttctcccgacgtccgcgcaacgctaccacctccccgccctaaataaactccaatctcgttacctccgtcctcaacgcccacgtaacacgcgaaacaactattcacatcgacct

SEQ ID NO: 6515 - DNA, 1174 bp, Artificial Sequence
  chemically treated genomic DNA (Homo sapiens) CpG-island No: 6515
  unsure (365..366, 449, 614, 730, 772)
tttttgttaatttgtttttttgagtatttatatgtttaattgttagcgaacgttcgtagtgaatcggcgttatacgtgttagggtaggttttcgggcggcgattcgcgcggtttgttacgcggcgatacgcgtatgtcgagtggttcgcgtataatgtacgggtatggtgggttttttttagtaagtattcgatcggtcgggaatgtttatttaggttggtttttagttcgacgtgagggttaattcggttatttatcggttggtttttatcggacgatttacgacgacgttagtttagaacgttttcggtgacgtatttgggttttttgtaggtgtatcgtgatcggttttattttttaggtanntttagtaatggttgcggacgtcgcgggattcgcggttatttttggacggcgcgttagttagattttgtgtcgttgcgtttatngggtgttatgttttatacggttttgatggcgtgtttaggttacggtcgcggagtagttacgtaacgcgtattaggattgggttagttattttacgcgtcgattgtcgtagttgggttagtattatcgcgttcgttgttgttaggtttatcgttattcgatgtttntttcgagtcgtcggcgggttgttggtgtatattgtagagttggtcgtttatcgttttcggtatatttattatggtttgtttcggttatgttttattcgtaattttagcggtttganggtacggttagtcgcgggacgtcgtaagggcgggtatttatngttggcgcgcgggttatcgtcgtatgatgtaggtacggtgcgggtaacggagtgttagtcgttacgcgtttggttaacggtattgtcgtggcggttatggtagaaggttacgtgtcgtatgcgatgcgtcgttttatatgggtgcgtcggtagattttgttaggcgtttgatcgggtcgtgggcgttcgttttgttcgttaataggggtcggtttggtggcgtgttatttttatttggttgggcgttcgggtttgcgttttttttggtcggttttttttttggtcggcgttttttcggcgttcgcgtagcgttgttattttttcgttttgggtaagttttagtttcgttgttttcgtttttagcgtttacgtggtacgcggggtagttatttatatcggttt

SEQ ID NO: 6516 - DNA, 1174 bp, Artificial Sequence
  chemically treated genomic DNA (Homo sapiens) CpG-island No: 6516
  unsure (403, 445, 561, 726, 809..)
aaaccgatataaataactaccccgcgtaccacgtaaacgctaaaaacgaaaacaacgaaactaaaacttacccaaaacgaaaaaataacaacgctacgcgaacgccgaaaaaacgccgaccaaaaaaaaaaccgaccaaaaaaaacgcaaacccgaacgcccaaccaaataaaaataacacgccaccaaaccgacccctattaacgaacaaaacgaacgcccacgacccgatcaaacgcctaacaaaatctaccgacgcacccatataaaacgacgcatcgcatacgacacgtaaccttctaccataaccgccacgacaataccgttaaccaaacgcgtaacgactaacactccgttacccgcaccgtacctacatcatacgacgataacccgcgcgccaacnataaatacccgcccttacgacgtcccgcgactaaccgtaccntcaaaccgctaaaattacgaataaaacataaccgaaacaaaccataataaatataccgaaaacgataaacgaccaactctacaatatacaccaacaacccgccgacgactcgaaanaaacatcgaataacgataaacctaacaacaacgaacgcgataatactaacccaactacgacaatcgacgcgtaaaataactaacccaatcctaatacgcgttacgtaactactccgcgaccgtaacctaaacacgccatcaaaaccgtataaaacataacacccnataaacgcaacgacacaaaatctaactaacgcgccgtccaaaaataaccgcgaatcccgcgacgtccgcaaccattactaaanntacctaaaaaataaaaccgatcacgatacacctacaaaaaacccaaatacgtcaccgaaaacgttctaaactaacgtcgtcgtaaatcgtccgataaaaaccaaccgataaataaccgaattaaccctcacgtcgaactaaaaaccaacctaaataaacattcccgaccgatcgaatacttactaaaaaaaacccaccatacccgtacattatacgcgaaccactcgacatacgcgtatcgccgcgtaacaaaccgcgcgaatcgccgcccgaaaacctaccctaacacgtataacgccgattcactacgaacgttcgctaacaattaaacatataaatactcaaaaaaacaaattaacaaaaa

SEQ ID NO: 6517 - DNA, 602 bp, Artificial Sequence
  chemically treated genomic DNA (Homo sapiens) CpG-island No: 6517
acgtcgtattatttttttttatcggattcgtttgaacgtaatttgggcgttttcgtaaaacgtcgaacgaaggtacgttgttttatggtttggtgaggatggtaacgatatgtgggacgttatttttttttgcggtttttgtgcgtgattcgtcgtaagtcgttggatgaaattggcggtattgttgtcgaaacgtgattgaagatgcgtatatttttttgcggttgtatcgtcgtggttatttttcgcgtatatgcgtatttcgtaggcggcggggttggcgatcgaaagttgtcggcgtatatcggttagcgtattcgttgggcgcgcgggatggtataatttttcgtttcgataattcgtttatcggtaaagggttgaagtttgttagcggttatgttacgttaacgttatgttttattttttgtcgggtattttcggttgatttttttgattgcgtcgttggcgtttttgttgttttatgttttattatttatgcgtttagcgttgatgtatcgttttattcgtgttgtcgttatgattttatgtatagttttgtattaatttttaagattttagggttattttatcgttattttttt

SEQ ID NO: 6518 - DNA, 602 bp, Artificial Sequence
  chemically treated genomic DNA (Homo sapiens) CpG-island No: 6518
aaaaaaataacgataaaataaccctaaaatcttaaaaattaatacaaaactatacataaaatcataacgacaacacgaataaaacgatacatcaacgctaaacgcataaataataaaacataaaacaacaaaaacgccaacgacgcaatcaaaaaaatcaaccgaaaatacccgacaaaaaataaaacataacgttaacgtaacataaccgctaacaaacttcaaccctttaccgataaacgaattatcgaaacgaaaaattataccatcccgcgcgcccaacgaatacgctaaccgatatacgccgacaactttcgatcgccaaccccgccgcctacgaaatacgcatatacgcgaaaaataaccacgacgatacaaccgcaaaaaaatatacgcatcttcaatcacgtttcgacaacaataccgccaatttcatccaacgacttacgacgaatcacgcacaaaaaccgcaaaaaaaaataacgtcccacatatcgttaccatcctcaccaaaccataaaacaacgtaccttcgttcgacgttttacgaaaacgcccaaattacgttcaaacgaatccgataaaaaaaaataatacgacgt

SEQ ID NO: 6519 - DNA, 602 bp, Artificial Sequence
  chemically treated genomic DNA (Homo sapiens) CpG-island No: 6519
gaaagagtggcgatgaggtggttttgggattttgggagttggtgtagggttgtgtatgggattatagcggtagtacgaatagggcgatgtattaacgttgggcgtatagatgatgaggtatgaagtagtaggaacgttagcggcgtagttaggaagattagtcgggaatgttcgataagaagtggaatatggcgttgacgtaatatagtcgttagtaaattttagttttttatcggtgagcgggttatcgagacggaagattgtattatttcgcgcgtttagcgaatacgttgatcgatatgcgtcgatagttttcggtcgttagtttcgtcgtttgcggaatacgtatatacgcggaggatagttacgacggtgtaatcgtagagaagtatgcgtatttttagttacgtttcgatagtaatgtcgttaattttatttagcggtttacgacgaattacgtataggaatcgtagaagaaagtggcgttttatatatcgttgttatttttattagattatagaatagcgtgttttcgttcggcgttttacggaaacgtttaggttgcgtttaaacgggttcggtgagaagaagtggtgcggcgt

SEQ ID NO: 6520 - DNA, 602 bp, Artificial Sequence
  chemically treated genomic DNA (Homo sapiens) CpG-island No: 6520
acgccgcaccacttcttctcaccgaacccgtttaaacgcaacctaaacgtttccgtaaaacgccgaacgaaaacacgctattctataatctaataaaaataacaacgatatataaaacgccactttcttctacgattcctatacgtaattcgtcgtaaaccgctaaataaaattaacgacattactatcgaaacgtaactaaaaatacgcatacttctctacgattacaccgtcgtaactatcctccgcgtatatacgtattccgcaaacgacgaaactaacgaccgaaaactatcgacgcatatcgatcaacgtattcgctaaacgcgcgaaataatacaatcttccgtctcgataacccgctcaccgataaaaaactaaaatttactaacgactatattacgtcaacgccatattccacttcttatcgaacattcccgactaatcttcctaactacgccgctaacgttcctactacttcatacctcatcatctatacgcccaacgttaatacatcgccctattcgtactaccgctataatcccatacacaaccctacaccaactcccaaaatcccaaaaccacctcatcgccactctttc

SEQ ID NO: 6521 - DNA, 589 bp, Artificial Sequence
  chemically treated genomic DNA (Homo sapiens) CpG-island No: 6521
cgttcggcgtatcgattggttcgaattagggattggaaatcgcgttatgttggagattattatttagtaggttatagtgtcggtggttgtgatgttggtatcggcgtttttagttatatcgcgtaggcgattggaaatggggtcgacgcggtgttagtgaatacggcgattgtcgtcgcggacgattcgttaatatggcgaaggtatttcgtttggcggtagaagtaggtttattggacgttagttcggatcgggtagtcgtagatattttgtttatgttattagtcgttgatcggatttttggaggtatcggtatgaaaatttttagcgatcgcggcgataattggattgggacgatattcgtttgcgtattaacggtaaaacgttgttgacgtagagcgggcgttaaatgtttcgtaatttattcgcgacgtatgatggcgttgttatcgtttgtcgttagtggttatttggaataattgtttaacgggcgtagcgtttgattcgttagcgatttggtaatatagttagttttacgtttcgttttatttttttaatttttgcgttaacgattgtacgtttgtggatt

SEQ ID NO: 6522 - DNA, 589 bp, Artificial Sequence
  chemically treated genomic DNA (Homo sapiens) CpG-island No: 6522
aatccacaaacgtacaatcgttaacgcaaaaattaaaaaaataaaacgaaacgtaaaactaactatattaccaaatcgctaacgaatcaaacgctacgcccgttaaacaattattccaaataaccactaacgacaaacgataacaacgccatcatacgtcgcgaataaattacgaaacatttaacgcccgctctacgtcaacaacgttttaccgttaatacgcaaacgaatatcgtcccaatccaattatcgccgcgatcgctaaaaattttcataccgatacctccaaaaatccgatcaacgactaataacataaacaaaatatctacgactacccgatccgaactaacgtccaataaacctacttctaccgccaaacgaaataccttcgccatattaacgaatcgtccgcgacgacaatcgccgtattcactaacaccgcgtcgaccccatttccaatcgcctacgcgatataactaaaaacgccgataccaacatcacaaccaccgacactataacctactaaataataatctccaacataacgcgatttccaatccctaattcgaaccaatcgatacgccgaacg

SEQ ID NO: 6523 - DNA, 589 bp, Artificial Sequence
  chemically treated genomic DNA (Homo sapiens) CpG-island No: 6523
aatttatagacgtgtagtcgttagcgtaaagattggaaagataaagcgggacgtagaattaattgtgttgttaaatcgttgacgggttagacgttgcgttcgttgggtagttgttttagatagttattggcggtaggcgataatagcgttattatgcgtcgcgggtgagttgcgaggtatttagcgttcgttttacgttagtagcgttttgtcgttgatacgtaggcggatgtcgttttagtttagttgtcgtcgcgatcgttgaaggtttttatgtcgatgtttttagaaattcggttagcggttggtggtatgagtaaaatatttgcggttgttcggttcggattgacgtttagtaggtttgtttttatcgttagacgaaatgttttcgttatgttgacggatcgttcgcgacggtaatcgtcgtatttattaatatcgcgtcggttttatttttagtcgtttgcgcggtatggttgggaacgtcgatgttagtattataattatcggtattgtggtttgttggataataatttttagtatggcgcggtttttagtttttgattcgagttaatcggtgcgtcgagcg

SEQ ID NO: 6524 - DNA, 589 bp, Artificial Sequence
  chemically treated genomic DNA (Homo sapiens) CpG-island No: 6524
cgctcgacgcaccgattaactcgaatcaaaaactaaaaaccgcgccatactaaaaattattatccaacaaaccacaataccgataattataatactaacatcgacgttcccaaccataccgcgcaaacgactaaaaataaaaccgacgcgatattaataaatacgacgattaccgtcgcgaacgatccgtcaacataacgaaaacatttcgtctaacgataaaaacaaacctactaaacgtcaatccgaaccgaacaaccgcaaatattttactcataccaccaaccgctaaccgaatttctaaaaacatcgacataaaaaccttcaacgatcgcgacgacaactaaactaaaacgacatccgcctacgtatcaacgacaaaacgctactaacgtaaaacgaacgctaaatacctcgcaactcacccgcgacgcataataacgctattatcgcctaccgccaataactatctaaaacaactacccaacgaacgcaacgtctaacccgtcaacgatttaacaacacaattaattctacgtcccgctttatctttccaatctttacgctaacgactacacgtctataaatt

SEQ ID NO: 6525 - DNA, 737 bp, Artificial Sequence
  chemically treated genomic DNA (Homo sapiens) CpG-island No: 6525
  unsure (710, 724)
taattcggcgagtagtcgggtatcgtcggtttgtggggatatttttttagcgttatcgttatttgagagcgtaaatttataattcgttttgtttcgggaataacgttaagaattgttttttcgtttgggtgcggtttgcgttatttgttcgttgacgttttataacgttacgtttcgttttattttagcgtaattagaattagtaatatcggtagaattattattcgttagcggtttattgttttcggtagttgacgcgaggttgttacggttttgttagtagttttttttcggttcgttataagtggtaatggcgggtagagttgtaacgttaggcgtttagcgtttgcgttagtttatgttgatagttttttcggtgtatgtcgattacggttagcgaaagcggtaaattttgtttattgagttggggcggaatatgatcggagttagcgttagttcggcgttttattttcggtattatcgatgcggtagataattcgttgcgtatcgtaagttataaatttataggaatggatatttagttcggcgcgacggtagcgcgggtgatgtcgttttttgtaattattgcgtaatgttgcgtatatgttgttggtgaattattgttcggttgttagttgttggtcgatatttaacggggcgaaatgtaggttattatattttgttttagttttttttttagtaagggcggngagaatatcggtangtacgacgatgga

SEQ ID NO: 6526 - DNA, 737 bp, Artificial Sequence
  chemically treated genomic DNA (Homo sapiens) CpG-island No: 6526
  unsure (14, 28)
tccatcgtcgtacntaccgatattctcnccgcccttactaaaaaaaaaactaaaacaaaatataataacctacatttcgccccgttaaatatcgaccaacaactaacaaccgaacaataattcaccaacaacatatacgcaacattacgcaataattacaaaaaacgacatcacccgcgctaccgtcgcgccgaactaaatatccattcctataaatttataacttacgatacgcaacgaattatctaccgcatcgataataccgaaaataaaacgccgaactaacgctaactccgatcatattccgccccaactcaataaacaaaatttaccgctttcgctaaccgtaatcgacatacaccgaaaaaactatcaacataaactaacgcaaacgctaaacgcctaacgttacaactctacccgccattaccacttataacgaaccgaaaaaaaactactaacaaaaccgtaacaacctcgcgtcaactaccgaaaacaataaaccgctaacgaataataattctaccgatattactaattctaattacgctaaaataaaacgaaacgtaacgttataaaacgtcaacgaacaaataacgcaaaccgcacccaaacgaaaaaacaattcttaacgttattcccgaaacaaaacgaattataaatttacgctctcaaataacgataacgctaaaaaaatatccccacaaaccgacgatacccgactactcgccgaatta

SEQ ID NO: 6527 - DNA, 737 bp, Artificial Sequence
  chemically treated genomic DNA (Homo sapiens) CpG-island No: 6527
  unsure (14, 28)
tttatcgtcgtgtntatcgatatttttntcgtttttattggaagaggagttgaagtaggatatgatgatttgtatttcgtttcgttgaatatcgattagtaattggtaatcgagtagtgatttattaatagtatatgcgtaatattgcgtagtggttgtagaaaacggtattattcgcgttatcgtcgcgtcggattggatgtttatttttgtgggtttatggtttgcgatgcgtaacgggttatttgtcgtatcgatgatgtcggggatggagcgtcgggttggcgttggtttcggttatgtttcgttttagtttaatgagtaggatttatcgttttcgttaatcgtagtcggtatgtatcggaaaagttattagtatgggttggcgtagacgttgaacgtttgacgttatagttttgttcgttattattatttatggcgaatcggaagggaattgttgatagggtcgtggtagtttcgcgttagttatcgaaaatagtgggtcgttggcgggtgatgattttgtcgatattgttgattttggttgcgttggagtggagcggggcgtgacgttatggagcgttagcgaataggtggcgtaagtcgtatttaggcggaggaatagtttttaacgttgttttcggagtagaacggattgtgaatttacgtttttaggtgacgatggcgttgaaaaaatatttttataggtcgacgatattcggttgttcgtcgagttg

SEQ ID NO: 6528 - DNA, 737 bp, Artificial Sequence
  chemically treated genomic DNA (Homo sapiens) CpG-island No: 6528
  unsure (710, 724)
caactcgacgaacaaccgaatatcgtcgacctataaaaatattttttcaacgccatcgtcacctaaaaacgtaaattcacaatccgttctactccgaaaacaacgttaaaaactattcctccgcctaaatacgacttacgccacctattcgctaacgctccataacgtcacgccccgctccactccaacgcaaccaaaatcaacaatatcgacaaaatcatcacccgccaacgacccactattttcgataactaacgcgaaactaccacgaccctatcaacaattcccttccgattcgccataaataataataacgaacaaaactataacgtcaaacgttcaacgtctacgccaacccatactaataacttttccgatacataccgactacgattaacgaaaacgataaatcctactcattaaactaaaacgaaacataaccgaaaccaacgccaacccgacgctccatccccgacatcatcgatacgacaaataacccgttacgcatcgcaaaccataaacccacaaaaataaacatccaatccgacgcgacgataacgcgaataataccgttttctacaaccactacgcaatattacgcatatactattaataaatcactactcgattaccaattactaatcgatattcaacgaaacgaaatacaaatcatcatatcctacttcaactcctcttccaataaaaacganaaaaatatcgatanacacgacgataaa

SEQ ID NO: 6529 - DNA, 814 bp, Artificial Sequence
  chemically treated genomic DNA (Homo sapiens) CpG-island No: 6529
  unsure (266)
gtcgacgtcggaggttgtaggatttgcggtgaggtaatcgcgtttgtatataatagtattttttgttggtcgttgcgcgggttgggatggtgttgtcgttttttagttattgacgtttatcgcgcgtttgtcgttaaaaatgatgtgatcggttatagcggagtacgaatggttaggttaggacgcgatttggtttgatcgagatagttcgcgcggtgttggcgcgacggttttgcggcgtgacggtgcgatttatcgattaaaanttttttgttgataatcgttgagatcgttcgtgcgcgggtagtcgtttgtacgttcgttttaattatcgttttaaatagcggattgacgtcggtttggaggtagtgacgtttatcgggttattatcgtcgtgatagtcgttttatttatatcgcgagtttcgcgttttgcggtagtagggtaggtagttaggtagttttagttttttagatcgggtttttgcgtttagttatcgagattagcgtattgttacggatgtagtatatgtcgttgattagcgacgatttattagatttttatcgcgttcgtattttatgcggcggttatttataaacggttaggtttcgttttataggtttagttgtagcgtttattttgtagcgggatgttagggtagcgggtatttgggtgcggaagttaaagcgatagttcgggcgttcgttttaagtagtagtacggaggtattcggatttttagttagacggtagcgagaacgttgtcggttgagtcggtattaataatgatgtagttaattgtaaataaatttttt

SEQ ID NO: 6530 - DNA, 814 bp, Artificial Sequence
  chemically treated genomic DNA (Homo sapiens) CpG-island No: 6530
  unsure (549)
aaaaaatttatttacaattaactacatcattattaataccgactcaaccgacaacgttctcgctaccgtctaactaaaaatccgaatacctccgtactactacttaaaacgaacgcccgaactatcgctttaacttccgcacccaaatacccgctaccctaacatcccgctacaaaataaacgctacaactaaacctataaaacgaaacctaaccgtttataaataaccgccgcataaaatacgaacgcgataaaaatctaataaatcgtcgctaatcaacgacatatactacatccgtaacaatacgctaatctcgataactaaacgcaaaaacccgatctaaaaaactaaaactacctaactacctaccctactaccgcaaaacgcgaaactcgcgatataaataaaacgactatcacgacgataataacccgataaacgtcactacctccaaaccgacgtcaatccgctatttaaaacgataattaaaacgaacgtacaaacgactacccgcgcacgaacgatctcaacgattatcaacaaaaaanttttaatcgataaatcgcaccgtcacgccgcaaaaccgtcgcgccaacaccgcgcgaactatctcgatcaaaccaaatcgcgtcctaacctaaccattcgtactccgctataaccgatcacatcatttttaacgacaaacgcgcgataaacgtcaataactaaaaaacgacaacaccatcccaacccgcgcaacgaccaacaaaaaatactattatatacaaacgcgattacctcaccgcaaatcctacaacctccgacgtcgac

SEQ ID NO: 6531 - DNA, 814 bp, Artificial Sequence
  chemically treated genomic DNA (Homo sapiens) CpG-island No: 6531
  unsure (549)
aggaggtttatttgtaattgattatattattattggtgtcggtttagtcggtaacgttttcgttatcgtttgattgaagattcgaatattttcgtgttgttgtttgaagcgggcgttcggattatcgttttgattttcgtatttagatgttcgttgttttggtatttcgttatagggtaaacgttataattgggtttatgaaacggaatttgatcgtttatgaataatcgtcgtatggagtgcggacgcggtaaaggtttggtggatcgtcgttgattaacggtatgtgttatattcgtggtaatgcgttgatttcgataattgggcgtaagaattcggtttggagaattggagttatttgattgtttgttttattatcgtaaggcgcgagattcgcgatatgggtgaaacgattattacggcggtgatggttcggtgagcgttattatttttaaatcggcgttaattcgttgtttgaagcgatgattgaagcgggcgtgtaggcggttattcgcgtacggacgattttaacggttattagtaggaagnttttggtcgatggatcgtatcgttacgtcgtagggtcgtcgcgttagtatcgcgcgggttatttcgattaggttaaatcgcgttttaatttgattattcgtatttcgttatgatcgattatattatttttgacggtaaacgcgcggtgggcgttaatggttggaaggcgatagtattattttaattcgcgtaacggttaataagaagtgttgttatgtgtaggcgcgattgttttatcgtagattttgtaattttcggcgtcggt

SEQ ID NO: 6532 - DNA, 814 bp, Artificial Sequence
  chemically treated genomic DNA (Homo sapiens) CpG-island No: 6532
  unsure (266)
accgacgccgaaaattacaaaatctacgataaaacaatcgcgcctacacataacaacacttcttattaaccgttacgcgaattaaaataatactatcgccttccaaccattaacgcccaccgcgcgtttaccgtcaaaaataatataatcgatcataacgaaatacgaataatcaaattaaaacgcgatttaacctaatcgaaataacccgcgcgatactaacgcgacgaccctacgacgtaacgatacgatccatcgaccaaaancttcctactaataaccgttaaaatcgtccgtacgcgaataaccgcctacacgcccgcttcaatcatcgcttcaaacaacgaattaacgccgatttaaaaataataacgctcaccgaaccatcaccgccgtaataatcgtttcacccatatcgcgaatctcgcgccttacgataataaaacaaacaatcaaataactccaattctccaaaccgaattcttacgcccaattatcgaaatcaacgcattaccacgaatataacacataccgttaatcaacgacgatccaccaaacctttaccgcgtccgcactccatacgacgattattcataaacgatcaaattccgtttcataaacccaattataacgtttaccctataacgaaataccaaaacaacgaacatctaaatacgaaaatcaaaacgataatccgaacgcccgcttcaaacaacaacacgaaaatattcgaatcttcaatcaaacgataacgaaaacgttaccgactaaaccgacaccaataataatataatcaattacaaataaacctcct

SEQ ID NO: 6533 - DNA, 1765 bp, Artificial Sequence
  chemically treated genomic DNA (Homo sapiens) CpG-island No: 6533
tattggcgatcgttagcggggttataaataaattgtgttgcggaaatgtatttgtaacgtcgggaattgtttgcgaaatagtttcgttacgtcggttgtatataagagtcgttcgttagttataaattagtaatgttttgtttttaatatgtcgggcgataatgttcgttattttttcgtatatcggtttatcgtaggttaaatttttttatcgtgatcgcgtttgtattgtttcgtttttttagcgaaatacggcgattttcggcgagagttagagagatgtgatgtcgtcggtggttttattcgtcgagtacgttattttgtttttttttacgatgtaatgtcggtagtgtcgtcgtcgatatttattatatcggcgttgtttattgtagtagattcgtaattgcggttggtttatttagtatatggtttattttagttcggtagattttagtacgttgatggaaatacgcgggttcgtatcggaggaaatgaagtcgtcgtatggttaaaacgacgatcgaattgttgttgagcgtgtcgagatggcgacgaataatggtgatagcgtcgaagaaatttagacgatgtcgtcgcgaattatatcggtttagtcgaggtatatcgttacggttgatcgtcgcggtcgataaatatcgaaaatatatcgtaagtggttaatttaattttaggtatagcggggatatcgtcgcggggggcggttcggtgatcgcggtgttcgcgcgtgggatgatatatttcgagtttatatttattcgtattagtagttcgcgttatacggagttatagttattagtattatcggtaggttgatcggcgtttatatttcgtagcgaatttggatattcgtatttcgtatgttatagattcggtaggaatcgtttgttcgattcggagttgtattcggatagtatttttagtatgtgtcggataatcgtatcgttcgtgacgcgtattatttttatcggtatgacgttacggtaggttgatagagaaaatcgattttatttcggaaggggttatcgtacggatgatgagcggatttatcggtattattacgatagttagtatcgttggtgtattatacgcggatataatatgtagagtcgttggtcgaaagcgttatttttacgattcgttgggtcgtagggtggtaaaacgggtgtggcgcgtgaacgggatttgacgggttggatgtcgttgttacggaaatcgtaaggatttggtacggttgggacggcgatcggttgattacgatatagaacgacgaattcgtatttagacgatttattagtcggggagttttacgttatttatagggttgaaatcgttatcggtgagttggcgaaaacgtagcgtcgtagtcggcggatattttttagtagttcggcggcgaagacggtggtagtgtggtgtttcgtcggtgttggtgtagatgttcgatcggttggaaagtgaaattttgttgatcgggtgagtgaggaaagtcgtcgttggttggtatcgtgcggtcgacggtggagtagatgtaaaattagatggattcggtgtatacgtcggcggaaaaatttatttgtattattgcgattatcgcggtttgtcgttggcgttgttagtacggaaggggtaatagaatggtgcgtagaatacgatgaatgggtaatttgttgaatgaagagaattcgtattagttgtagtagtttattcgttgtcggggtagtagtatgatgaggagttcggtttg

SEQ ID NO: 6534 - DNA, 1765 bp, Artificial Sequence
  chemically treated genomic DNA (Homo sapiens) CpG-island No: 6534
caaaccgaactcctcatcatactactaccccgacaacgaataaactactacaactaatacgaattctcttcattcaacaaattacccattcatcgtattctacgcaccattctattaccccttccgtactaacaacgccaacgacaaaccgcgataatcgcaataatacaaataaatttttccgccgacgtatacaccgaatccatctaattttacatctactccaccgtcgaccgcacgataccaaccaacgacgactttcctcactcacccgatcaacaaaatttcactttccaaccgatcgaacatctacaccaacaccgacgaaacaccacactaccaccgtcttcgccgccgaactactaaaaaatatccgccgactacgacgctacgttttcgccaactcaccgataacgatttcaaccctataaataacgtaaaactccccgactaataaatcgtctaaatacgaattcgtcgttctatatcgtaatcaaccgatcgccgtcccaaccgtaccaaatccttacgatttccgtaacaacgacatccaacccgtcaaatcccgttcacgcgccacacccgttttaccaccctacgacccaacgaatcgtaaaaataacgctttcgaccaacgactctacatattatatccgcgtataatacaccaacgatactaactatcgtaataataccgataaatccgctcatcatccgtacgataaccccttccgaaataaaatcgattttctctatcaacctaccgtaacgtcataccgataaaaataatacgcgtcacgaacgatacgattatccgacacatactaaaaatactatccgaatacaactccgaatcgaacaaacgattcctaccgaatctataacatacgaaatacgaatatccaaattcgctacgaaatataaacgccgatcaacctaccgataatactaataactataactccgtataacgcgaactactaatacgaataaatataaactcgaaatatatcatcccacgcgcgaacaccgcgatcaccgaaccgccccccgcgacgatatccccgctatacctaaaattaaattaaccacttacgatatattttcgatatttatcgaccgcgacgatcaaccgtaacgatatacctcgactaaaccgatataattcgcgacgacatcgtctaaatttcttcgacgctatcaccattattcgtcgccatctcgacacgctcaacaacaattcgatcgtcgttttaaccatacgacgacttcatttcctccgatacgaacccgcgtatttccatcaacgtactaaaatctaccgaactaaaataaaccatatactaaataaaccaaccgcaattacgaatctactacaataaacaacgccgatataataaatatcgacgacgacactaccgacattacatcgtaaaaaaaaacaaaataacgtactcgacgaataaaaccaccgacgacatcacatctctctaactctcgccgaaaatcgccgtatttcgctaaaaaaacgaaacaatacaaacgcgatcacgataaaaaaatttaacctacgataaaccgatatacgaaaaaataacgaacattatcgcccgacatattaaaaacaaaacattactaatttataactaacgaacgactcttatatacaaccgacgtaacgaaactatttcgcaaacaattcccgacgttacaaatacatttccgcaacacaatttatttataaccccgctaacgatcgccaata

SEQ ID NO: 6535 - DNA, 1765 bp, Artificial Sequence
  chemically treated genomic DNA (Homo sapiens) CpG-island No: 6535
taggtcggattttttattatattgttgtttcggtagcggataagttgttgtagttgatgcgggttttttttatttagtaggttgtttatttatcgtattttgcgtattattttgttgtttttttcgtgttgatagcgttagcggtaggtcgcgatggtcgtagtggtataggtggattttttcgtcggcgtgtatatcgggtttatttggttttgtatttgttttatcgtcggtcgtacgatgttagttagcggcggttttttttatttattcggttagtaggattttattttttagtcggtcgagtatttgtattagtatcggcgggatattatattgttatcgttttcgtcgtcggattgttgaagggtattcgtcggttgcggcgttgcgttttcgttagtttatcggtggcggttttaattttatgagtggcgtgaagtttttcggttgataaatcgtttggatgcgggttcgtcgttttgtatcgtggttagtcggtcgtcgttttagtcgtattaggtttttgcggttttcgtgatagcgatatttagttcgttaggtttcgtttacgcgttatattcgttttgttattttgcggtttagcgggtcgtaaagatagcgttttcgattagcggttttgtatattgtgttcgcgtgtagtgtattagcggtgttgattgtcgtaatggtatcggtgagttcgtttattattcgtgcgataatttttttcgggatgaggtcggttttttttgttagtttgtcgtgacgttatatcggtaaagatagtgcgcgttacgggcgatacggttattcggtatatgttgagggtgttgttcgggtgtagtttcgggtcgggtaggcggtttttgtcgggtttgtggtatacgggatgcggatatttagattcgttgcggggtgtgaacgtcggttagtttgtcggtggtgttgatagttgtaatttcgtatggcgcgggttgttgatgcggatgggtataagttcgaggtgtattattttacgcgcggatatcgcggttatcggatcgtttttcgcggcggtattttcgttgtgtttggggttgaattggttatttgcgatgtgttttcgatgtttgtcgatcgcgacggttagtcgtggcggtatgtttcgattgggtcgatgtggttcgcgacggtatcgtttggattttttcggcgttgttattattgttcgtcgttatttcgatacgtttagtagtaattcggtcgtcgttttagttatgcggcgattttatttttttcggtacggattcgcgtatttttattaacgtgttggaatttgtcggattggagtgagttatgtgttggatgagttaatcgtagttgcggatttgttgtaatggataacgtcggtgtagtggatatcggcggcggtattatcggtattgtatcgtgaaaaagggtaaggtgacgtattcggcggatgaagttatcggcgatattatatttttttgattttcgtcggaaatcgtcgtatttcgttggaaaggcggagtagtataagcgcggttacggtgaagagatttggtttgcggtaaatcggtgtacgaaaaaatggcggatattgtcgttcggtatattgaaggtagggtattattgatttatggttggcgggcggtttttgtatgtaatcggcgtggcggaattgtttcgtaaataattttcggcgttataggtgtattttcgtagtatagtttgtttatgatttcgttggcgatcgttagta

SEQ ID NO: 6536 - DNA, 1765 bp, Artificial Sequence
  chemically treated genomic DNA (Homo sapiens) CpG-island No: 6536
tactaacgatcgccaacgaaatcataaacaaactatactacgaaaatacacctataacgccgaaaattatttacgaaacaattccgccacgccgattacatacaaaaaccgcccgccaaccataaatcaataataccctaccttcaatataccgaacgacaatatccgccattttttcgtacaccgatttaccgcaaaccaaatctcttcaccgtaaccgcgcttatactactccgcctttccaacgaaatacgacgatttccgacgaaaatcaaaaaaatataatatcgccgataacttcatccgccgaatacgtcaccttaccctttttcacgatacaataccgataataccgccgccgatatccactacaccgacgttatccattacaacaaatccgcaactacgattaactcatccaacacataactcactccaatccgacaaattccaacacgttaataaaaatacgcgaatccgtaccgaaaaaaataaaatcgccgcataactaaaacgacgaccgaattactactaaacgtatcgaaataacgacgaacaataataacaacgccgaaaaaatccaaacgataccgtcgcgaaccacatcgacccaatcgaaacataccgccacgactaaccgtcgcgatcgacaaacatcgaaaacacatcgcaaataaccaattcaaccccaaacacaacgaaaataccgccgcgaaaaacgatccgataaccgcgatatccgcgcgtaaaataatacacctcgaacttatacccatccgcatcaacaacccgcgccatacgaaattacaactatcaacaccaccgacaaactaaccgacgttcacaccccgcaacgaatctaaatatccgcatcccgtataccacaaacccgacaaaaaccgcctacccgacccgaaactacacccgaacaacaccctcaacatataccgaataaccgtatcgcccgtaacgcgcactatctttaccgatataacgtcacgacaaactaacaaaaaaaaccgacctcatcccgaaaaaaattatcgcacgaataataaacgaactcaccgataccattacgacaatcaacaccgctaatacactacacgcgaacacaatatacaaaaccgctaatcgaaaacgctatctttacgacccgctaaaccgcaaaataacaaaacgaatataacgcgtaaacgaaacctaacgaactaaatatcgctatcacgaaaaccgcaaaaacctaatacgactaaaacgacgaccgactaaccacgatacaaaacgacgaacccgcatccaaacgatttatcaaccgaaaaacttcacgccactcataaaattaaaaccgccaccgataaactaacgaaaacgcaacgccgcaaccgacgaatacccttcaacaatccgacgacgaaaacgataacaatataatatcccgccgatactaatacaaatactcgaccgactaaaaaataaaatcctactaaccgaataaataaaaaaaaccgccgctaactaacatcgtacgaccgacgataaaacaaatacaaaaccaaataaacccgatatacacgccgacgaaaaaatccacctataccactacgaccatcgcgacctaccgctaacgctatcaacacgaaaaaaacaacaaaataatacgcaaaatacgataaataaacaacctactaaataaaaaaaacccgcatcaactacaacaacttatccgctaccgaaacaacaatataataaaaaatccgaccta

SEQ ID NO: 6537 - DNA, 855 bp, Artificial Sequence
  chemically treated genomic DNA (Homo sapiens) CpG-island No: 6537
ggtgcgcgagagcgttggatcggtgcggtgcgttttatgcggtaggatttgtgagatagtggtagatatgataaaggtgggttacgtgggggtggttggatttcgggtcgaatttagaaaggagggattattattcggggtatttagtttgagatagcgggttacgggtatcgatttaattaagtgttaagagtgggggtaggaatggcgatcgaaggtcgtaagggataagcgttaggggtttagggggtatagcggcggggttagtttggaggtgaatgtcgtgagtttgattttggtcgtaatgatatacgggtgttggcgttggatttggtggggtttggggaacgtgggattcgatcggaagggtagggcgttaatatagtgttggggcgggtagttgatgcgtacggtgtttggttagtgcggattcgcggggaaaaatttggatagtatgatacgtgggtcgtaggagattgcggatagtggacggtattggtgggaaagtggcgtgggggtggggggttttgatggtggtattttcggtcgagacggtgcgtgtaatatgcggcggcgtgaaagattgtttggggggtgtgacggggggataatgatgatgtattttgatgcgcgggattcggaaggggttgtggacgcgagttgatatgtgttgtaagcggatcgcgatgaagggggtatgtcgggtggtgttattatcgcgtcgatatcgcgggagtcggtgtaaaagtgtatagttattcgtatagggtagtaatggttgaatatcggtatttattttacgaattatgttcgatagcggtatcgggagttgaacgtttgttgattgaatattta

SEQ ID NO: 6538 - DNA, 855 bp, Artificial Sequence
  chemically treated genomic DNA (Homo sapiens) CpG-island No: 6538
taaatattcaatcaacaaacgttcaactcccgataccgctatcgaacataattcgtaaaataaataccgatattcaaccattactaccctatacgaataactatacacttttacaccgactcccgcgatatcgacgcgataataacaccacccgacatacccccttcatcgcgatccgcttacaacacatatcaactcgcgtccacaaccccttccgaatcccgcgcatcaaaatacatcatcattatccccccgtcacaccccccaaacaatctttcacgccgccgcatattacacgcaccgtctcgaccgaaaataccaccatcaaaaccccccacccccacgccactttcccaccaataccgtccactatccgcaatctcctacgacccacgtatcatactatccaaatttttccccgcgaatccgcactaaccaaacaccgtacgcatcaactacccgccccaacactatattaacgccctacccttccgatcgaatcccacgttccccaaaccccaccaaatccaacgccaacacccgtatatcattacgaccaaaatcaaactcacgacattcacctccaaactaaccccgccgctataccccctaaacccctaacgcttatcccttacgaccttcgatcgccattcctacccccactcttaacacttaattaaatcgatacccgtaacccgctatctcaaactaaataccccgaataataatccctcctttctaaattcgacccgaaatccaaccacccccacgtaacccacctttatcatatctaccactatctcacaaatcctaccgcataaaacgcaccgcaccgatccaacgctctcgcgcacc

SEQ ID NO: 6539 - DNA, 855 bp, Artificial Sequence
  chemically treated genomic DNA (Homo sapiens) CpG-island No: 6539
tgggtatttaattagtaaacgtttaattttcggtatcgttatcgggtataattcgtggagtggatgtcggtgtttaattattgttattttgtacgggtggttgtatatttttatatcggttttcgcggtgtcggcgcggtagtggtattattcggtatgttttttttatcgcggttcgtttgtaatatatattaattcgcgtttataatttttttcgagtttcgcgtattaaggtatattattattgttttttcgttatattttttaagtagttttttacgtcgtcgtatattatacgtatcgtttcggtcgagggtgttattattaaaattttttatttttacgttatttttttattaatatcgtttattattcgtaattttttacggtttacgtattatattatttaggttttttttcgcgggttcgtattaattaggtatcgtgcgtattaattattcgttttagtattgtattagcgttttattttttcgatcgggttttacgttttttaagttttattaggtttagcgttaatattcgtatgttattacggttagggttaggtttacggtatttatttttaggttaatttcgtcgttatattttttgaatttttaacgtttgttttttacggttttcggtcgttatttttgtttttatttttaatatttaattaaatcggtattcgtagttcgttgttttaagttaggtatttcgggtagtggttttttttttttaaattcggttcggggtttagttatttttacgtaatttatttttattatatttattattattttataagttttgtcgtataaagcgtatcgtatcggtttaacgttttcgcgtatt

SEQ ID NO: 6540 - DNA, 855 bp, Artificial Sequence
  chemically treated genomic DNA (Homo sapiens) CpG-island No: 6540
aatacgcgaaaacgttaaaccgatacgatacgctttatacgacaaaacttataaaataataataaatataataaaaataaattacgtaaaaataactaaaccccgaaccgaatttaaaaaaaaaaaaccactacccgaaatacctaacttaaaacaacgaactacgaataccgatttaattaaatattaaaaataaaaacaaaaataacgaccgaaaaccgtaaaaaacaaacgttaaaaattcaaaaaatataacgacgaaattaacctaaaaataaataccgtaaacctaaccctaaccgtaataacatacgaatattaacgctaaacctaataaaacttaaaaaacgtaaaacccgatcgaaaaaataaaacgctaatacaatactaaaacgaataattaatacgcacgatacctaattaatacgaacccgcgaaaaaaaacctaaataatataatacgtaaaccgtaaaaaattacgaataataaacgatattaataaaaaaataacgtaaaaataaaaaattttaataataacaccctcgaccgaaacgatacgtataatatacgacgacgtaaaaaactacttaaaaaatataacgaaaaaacaataataatataccttaatacgcgaaactcgaaaaaaattataaacgcgaattaatatatattacaaacgaaccgcgataaaaaaaacataccgaataataccactaccgcgccgacaccgcgaaaaccgatataaaaatatacaaccacccgtacaaaataacaataattaaacaccgacatccactccacgaattatacccgataacgataccgaaaattaaacgtttactaattaaataccca

SEQ ID NO: 6541 - DNA, 570 bp, Artificial Sequence
  chemically treated genomic DNA (Homo sapiens) CpG-island No: 6541
gattaatttacgttcgttagtggagcgtattaacggcgcgacggtggatgtacgtttgggtaataaatttcgtatttttcgtggttatacggtagcgtttatcgatttgagcggttttaaagatgaagtgagcgtcgcgtttgatcgcgtgatgagcgatgagatcgttttcgacgagggcgaggcgttttatttttatttaggagagttggcgttggcggtgacgttggagtcggtgacgttgttagtcgatttggtgggttggttggacgggcgttttttattggcgcgtttggggttgatggtgtacgttatcgcgtatcgtatcgattcgggttggtttggttgtattgtgttggagttttataatttcggtaagttgtcgttggcgttgcgttcgggtatgttaattggtgcgttgagttttgagtcgtttttcggttcggcggtgcgattttataatcgtcgtgaagatgcgaaatatcgtaattagtagggcgcggtagttagtcgaatcgataaagattaatttaggtttattgaggatattatgagacgatttttgacgaa

SEQ ID NO: 6542 - DNA, 570 bp, Artificial Sequence
  chemically treated genomic DNA (Homo sapiens) CpG-island No: 6542
ttcgtcaaaaatcgtctcataatatcctcaataaacctaaattaatctttatcgattcgactaactaccgcgccctactaattacgatatttcgcatcttcacgacgattataaaatcgcaccgccgaaccgaaaaacgactcaaaactcaacgcaccaattaacatacccgaacgcaacgccaacgacaacttaccgaaattataaaactccaacacaatacaaccaaaccaacccgaatcgatacgatacgcgataacgtacaccatcaaccccaaacgcgccaataaaaaacgcccgtccaaccaacccaccaaatcgactaacaacgtcaccgactccaacgtcaccgccaacgccaactctcctaaataaaaataaaacgcctcgccctcgtcgaaaacgatctcatcgctcatcacgcgatcaaacgcgacgctcacttcatctttaaaaccgctcaaatcgataaacgctaccgtataaccacgaaaaatacgaaatttattacccaaacgtacatccaccgtcgcgccgttaatacgctccactaacgaacgtaaattaatc

SEQ ID NO: 6543 - DNA, 570 bp, Artificial Sequence
  chemically treated genomic DNA (Homo sapiens) CpG-island No: 6543
ttcgttagaaatcgttttatggtatttttaatgggtttgaattagtttttatcgattcggttggttatcgcgttttgttggttgcgatatttcgtatttttacggcggttgtaaggtcgtatcgtcgggtcggaaagcggtttaaagtttagcgtattaattaatatgttcggacgtagcgttagcggtagtttatcggagttgtagaattttagtataatgtaattagattagttcggatcgatgcggtgcgcggtgacgtgtattattagttttagacgcgttagtgaggaacgttcgtttagttagtttattagatcggttggtagcgttatcgattttagcgttatcgttagcgttagtttttttgggtgaagatagaacgtttcgttttcgtcgagaacgattttatcgtttattacgcggttaagcgcggcgtttattttatttttgggatcgtttagatcgataaacgttgtcgtgtgattacggaaggtacgaaatttattgtttaggcgtatatttatcgtcgcgtcgttaatacgttttattggcggacgtgggttgatt

SEQ ID NO: 6544 - DNA, 570 bp, Artificial Sequence
  chemically treated genomic DNA (Homo sapiens) CpG-island No: 6544
aatcaacccacgtccgccaataaaacgtattaacgacgcgacgataaatatacgcctaaacaataaatttcgtaccttccgtaatcacacgacaacgtttatcgatctaaacgatcccaaaaataaaataaacgccgcgcttaaccgcgtaataaacgataaaatcgttctcgacgaaaacgaaacgttctatcttcacccaaaaaaactaacgctaacgataacgctaaaatcgataacgctaccaaccgatctaataaactaactaaacgaacgttcctcactaacgcgtctaaaactaataatacacgtcaccgcgcaccgcatcgatccgaactaatctaattacattatactaaaattctacaactccgataaactaccgctaacgctacgtccgaacatattaattaatacgctaaactttaaaccgctttccgacccgacgatacgaccttacaaccgccgtaaaaatacgaaatatcgcaaccaacaaaacgcgataaccaaccgaatcgataaaaactaattcaaacccattaaaaataccataaaacgatttctaacgaa

SEQ ID NO: 6545 - DNA, 932 bp, Artificial Sequence
  chemically treated genomic DNA (Homo sapiens) CpG-island No: 6545
agttggtttgttttggtgaatgtgaatgtcgggagtgcgcggatttgtggtcgagtattatttgcggcgttggtgttggcgtgtgaggaatatgcgaatgttgggtatcgggacggtcgggggtgataaggttttgtttgcgcgcgggttatgttaagtttgtgggttcggttttgatgcgtaggtgtttcgatatatgttgcgggtatagtggtttgcggcgcgtatttttttggagaatggtgaataagggcggggcggaaaatggtttgcggaaatgagattgtttgggtaggttaatgaggtacggtcgcgggaggggagtaatgtgcggggttgggattacgcgcgaaaatatgttgttgttttattttaggggcgttattacggtcggttgtagggtgatcgggtcggtggttgtagttgtttgtattggggatgatttgggaatagtgcgttgaacgtttagtcggcgggtattgatggtaggacgttggggaggttgttaggtgatgaggacgtgtcgatgggaatgtgtgaggtggagaaggtaaagggatatggatcgtagggattattggaaggggtttgtacgtatttgggaatcgagggtgtatggcgtttgatgtatattatagaatgtcggggttgatatgtaattgcgcgtgtgtgagtttatggggaggtttttattttcggcgatagttggtttgtaatcgtgttgggatgttttgtttatttggataagcgaatacgtagggttcgttaaggtttggggcggttggtcggtgtagtttttagtgaggttagtttttaggatgcggcgggggtgggagttcggcggaagttttggggcgcgtttggggtagttgttagttcgtagggtgcgtaattgttgtgtgaagattcggaaggtgtgtacggatcggggt

SEQ ID NO: 6546 - DNA, 932 bp, Artificial Sequence
  chemically treated genomic DNA (Homo sapiens) CpG-island No: 6546
accccgatccgtacacaccttccgaatcttcacacaacaattacgcaccctacgaactaacaactaccccaaacgcgccccaaaacttccgccgaactcccacccccgccgcatcctaaaaactaacctcactaaaaactacaccgaccaaccgccccaaaccttaacgaaccctacgtattcgcttatccaaataaacaaaacatcccaacacgattacaaaccaactatcgccgaaaataaaaacctccccataaactcacacacgcgcaattacatatcaaccccgacattctataatatacatcaaacgccatacaccctcgattcccaaatacgtacaaaccccttccaataatccctacgatccatatccctttaccttctccacctcacacattcccatcgacacgtcctcatcacctaacaacctccccaacgtcctaccatcaatacccgccgactaaacgttcaacgcactattcccaaatcatccccaatacaaacaactacaaccaccgacccgatcaccctacaaccgaccgtaataacgcccctaaaataaaacaacaacatattttcgcgcgtaatcccaaccccgcacattactcccctcccgcgaccgtacctcattaacctacccaaacaatctcatttccgcaaaccattttccgccccgcccttattcaccattctccaaaaaaatacgcgccgcaaaccactatacccgcaacatatatcgaaacacctacgcatcaaaaccgaacccacaaacttaacataacccgcgcgcaaacaaaaccttatcacccccgaccgtcccgatacccaacattcgcatattcctcacacgccaacaccaacgccgcaaataatactcgaccacaaatccgcgcactcccgacattcacattcaccaaaacaaaccaact

SEQ ID NO: 6547 - DNA, 932 bp, Artificial Sequence
  chemically treated genomic DNA (Homo sapiens) CpG-island No: 6547
atttcgattcgtgtatatttttcgggtttttatataatagttacgtattttacgagttagtagttattttaaacgcgttttaaggttttcgtcgaatttttattttcgtcgtattttagggattggttttattaagggttgtatcggttaatcgttttaagttttaacggattttacgtattcgtttatttaggtgggtaggatattttaatacggttataagttaattatcgtcggaggtaggagtttttttataggtttatatacgcgtagttatatattaatttcggtattttgtagtgtgtattaaacgttatgtattttcggtttttaggtacgtataggttttttttaatagtttttacggtttatgtttttttattttttttattttatatatttttatcggtacgtttttattatttagtaatttttttagcgttttattattagtattcgtcggttaggcgtttaacgtattgtttttaagttatttttagtataagtaattgtaattatcggttcggttattttatagtcggtcgtaatagcgtttttaaagtaaggtaataatatgttttcgcgcgtagttttagtttcgtatattatttttttttcgcggtcgtgttttattagtttatttaagtaattttattttcgtaaattatttttcgtttcgtttttatttattattttttaagggggtgcgcgtcgtaagttattatattcgtagtatatgtcggagtatttacgtattaaagtcgggtttataaatttggtatggttcgcgcgtaagtagggttttgttattttcggtcgtttcggtgtttaatattcgtatgttttttatacgttaatattagcgtcgtagataatattcggttataagttcgcgtattttcggtatttatatttattaaggtaggttagtt

SEQ ID NO: 6548 - DNA, 932 bp, Artificial Sequence
  chemically treated genomic DNA (Homo sapiens) CpG-island No: 6548
aactaacctaccttaataaatataaataccgaaaatacgcgaacttataaccgaatattatctacgacgctaatattaacgtataaaaaacatacgaatattaaacaccgaaacgaccgaaaataacaaaaccctacttacgcgcgaaccataccaaatttataaacccgactttaatacgtaaatactccgacatatactacgaatataataacttacgacgcgcacccccttaaaaaataataaataaaaacgaaacgaaaaataatttacgaaaataaaattacttaaataaactaataaaacacgaccgcgaaaaaaaaataatatacgaaactaaaactacgcgcgaaaacatattattaccttactttaaaaacgctattacgaccgactataaaataaccgaaccgataattacaattacttatactaaaaataacttaaaaacaatacgttaaacgcctaaccgacgaatactaataataaaacgctaaaaaaattactaaataataaaaacgtaccgataaaaatatataaaataaaaaaaataaaaaaacataaaccgtaaaaactattaaaaaaaacctatacgtacctaaaaaccgaaaatacataacgtttaatacacactacaaaataccgaaattaatatataactacgcgtatataaacctataaaaaaactcctacctccgacgataattaacttataaccgtattaaaatatcctacccacctaaataaacgaatacgtaaaatccgttaaaacttaaaacgattaaccgatacaacccttaataaaaccaatccctaaaatacgacgaaaataaaaattcgacgaaaaccttaaaacgcgtttaaaataactactaactcgtaaaatacgtaactattatataaaaacccgaaaaatatacacgaatcgaaat

SEQ ID NO: 6549 - DNA, 617 bp, Artificial Sequence
  chemically treated genomic DNA (Homo sapiens) CpG-island No: 6549
  unsure (24, 33..34, 47..48, 65..)
tcgagtcggggcgaaatttacgtnatttttttnntgggcgtgggggnngttgcgagcgtcgggtnntttttttagtgatacgagttagtcgtgttttttggatagatttgtcggtagagttggattttcgatatcgaggcgtttcgtattttcgacggtcgttttcgtagttcgattagttttcgtcgtcgtcgcgtttttgcgtgcgttcgggtttcgtcgcggttcgtaggttttcggtcgtcgggggtttttttttttcgttgggggaattgggggtcgggtttcgcgtatgcgttgtcggcgttttcgcgtttcgcggggcggggggttgggaattggagtttttttttgttagttttggtttcgttttttgttcgtttttttttttcgtttcggcggaaagttttttttttattttcgttgaggttagtggtagttttttgggtattttttcggtttgcgtagggagtaaagggatcgcggcgttatttgcgcgtattacgcgtgaaacgtgcggataggacgtttttagaaagttttgtttttcgcgcgtattgttttagttatttttacgtcggttttatttgttttttttttttttttttttttttttt

SEQ ID NO: 6550 - DNA, 617 bp, Artificial Sequence
  chemically treated genomic DNA (Homo sapiens) CpG-island No: 6550
  unsure (552..553, 570..571, 584..585, 594)
aaaaaaaaaaaaaaaaaaaaaaaaaaacaaataaaaccgacgtaaaaataactaaaacaatacgcgcgaaaaacaaaactttctaaaaacgtcctatccgcacgtttcacgcgtaatacgcgcaaataacgccgcgatccctttactccctacgcaaaccgaaaaaatacccaaaaaactaccactaacctcaacgaaaataaaaaaaaaactttccgccgaaacgaaaaaaaaaaacgaacaaaaaacgaaaccaaaactaacaaaaaaaaactccaattcccaaccccccgccccgcgaaacgcgaaaacgccgacaacgcatacgcgaaacccgacccccaattcccccaacgaaaaaaaaaaacccccgacgaccgaaaacctacgaaccgcgacgaaacccgaacgcacgcaaaaacgcgacgacgacgaaaactaatcgaactacgaaaacgaccgtcgaaaatacgaaacgcctcgatatcgaaaatccaactctaccgacaaatctatccaaaaaacacgactaactcgtatcactaaaaaaannacccgacgctcgcaacnncccccacgcccannaaaaaaatnacgtaaatttcgccccgactcga

SEQ ID NO: 6551 - DNA, 617 bp, Artificial Sequence
  chemically treated genomic DNA (Homo sapiens) CpG-island No: 6551
  unsure (552..553, 570..571, 584..585, 594)
aaaaaaaaagagagagagaaagaaaaataggtggaatcgacgtaaggatggttagagtagtgcgcgcggaaggtagaattttttgggggcgttttgttcgtacgttttacgcgtggtgcgcgtaggtggcgtcgcggtttttttgttttttgcgtaagtcggaggggtgtttagaaggttattattagttttagcgaaggtgagagagaagtttttcgtcgaagcgagggaggagggcgggtaggaagcggagttagagttggtaaagaaaggttttaatttttagtttttcgtttcgcggggcgcgggggcgtcggtagcgtatgcgcgaggttcggtttttaatttttttagcgagggagggaggttttcggcggtcgggagtttgcgagtcgcggcgggattcgagcgtacgtaggggcgcggcgacggcgggggttagtcgggttgcggaggcggtcgtcgggagtgcggagcgtttcggtatcgagggtttaattttgtcggtaggtttatttagagggtacggttggttcgtgttattgggagggnngttcggcgttcgtagtnntttttacgtttanngagaggatngcgtgagtttcgtttcggttcga

SEQ ID NO: 6552 - DNA, 617 bp, Artificial Sequence
  chemically treated genomic DNA (Homo sapiens) CpG-island No: 6552
  unsure (24, 33..34, 47..48, 65..)
tcgaaccgaaacgaaactcacgcnatcctctcnntaaacgtaaaaannactacgaacgccgaacnnccctcccaataacacgaaccaaccgtaccctctaaataaacctaccgacaaaattaaaccctcgataccgaaacgctccgcactcccgacgaccgcctccgcaacccgactaacccccgccgtcgccgcgcccctacgtacgctcgaatcccgccgcgactcgcaaactcccgaccgccgaaaacctccctccctcgctaaaaaaattaaaaaccgaacctcgcgcatacgctaccgacgcccccgcgccccgcgaaacgaaaaactaaaaattaaaacctttctttaccaactctaactccgcttcctacccgccctcctccctcgcttcgacgaaaaacttctctctcaccttcgctaaaactaataataaccttctaaacacccctccgacttacgcaaaaaacaaaaaaaccgcgacgccacctacgcgcaccacgcgtaaaacgtacgaacaaaacgcccccaaaaaattctaccttccgcgcgcactactctaaccatccttacgtcgattccacctatttttctttctctctctcttttttttt

SEQ ID NO: 6553 - DNA, 669 bp, Artificial Sequence
  chemically treated genomic DNA (Homo sapiens) CpG-island No: 6553
ggggcggcgttgagcgtttatggtcgtagttgttgggcggtgtgatgttgacgttgttgttatttcgttcgttaattttgatggggtttgatgatggcgtggcgcgtaatttcgggttggttttgtcgtttgcgcgtttggtagcgttgtcgttggcgattgttattagtgcgttgttggtgaacgttgtggggattatcggttttatcgggttgttcgcgtcgttttggtaaaaatgttgggggcgcggcgtttgttgttacgattgatgttggcgtcgttgattggtgcgttgattttttggtttttcgattaaattattttttggttgattcgcgtgtggatggaagtgtttatcggttcggttattgcgttgatcggtgcgtcgttgttattgtggttgttgtcgcgtttacgtagtattagcgcgtcggatataaggttaacgatcgtgtcgcggttgaacgttaatatgtgttggcgtttgttttcgcgggcggcgtgttgttgttgatggttgtggtggtggcgttgtcgtttggtcgtgatgcgtacggttggacgtgggcgagcggggcgttgttcgaggatttaatgttttggcgttggtcgcgaattatggcggcgttgtttgcgggcgttatgttggcggtggcgggttgttattat

SEQ ID NO: 6554 - DNA, 669 bp, Artificial Sequence
  chemically treated genomic DNA (Homo sapiens) CpG-island No: 6554
ataataacaacccgccaccgccaacataacgcccgcaaacaacgccgccataattcgcgaccaacgccaaaacattaaatcctcgaacaacgccccgctcgcccacgtccaaccgtacgcatcacgaccaaacgacaacgccaccaccacaaccatcaacaacaacacgccgcccgcgaaaacaaacgccaacacatattaacgttcaaccgcgacacgatcgttaaccttatatccgacgcgctaatactacgtaaacgcgacaacaaccacaataacaacgacgcaccgatcaacgcaataaccgaaccgataaacacttccatccacacgcgaatcaaccaaaaaataatttaatcgaaaaaccaaaaaatcaacgcaccaatcaacgacgccaacatcaatcgtaacaacaaacgccgcgcccccaacatttttaccaaaacgacgcgaacaacccgataaaaccgataatccccacaacgttcaccaacaacgcactaataacaatcgccaacgacaacgctaccaaacgcgcaaacgacaaaaccaacccgaaattacgcgccacgccatcatcaaaccccatcaaaattaacgaacgaaataacaacaacgtcaacatcacaccgcccaacaactacgaccataaacgctcaacgccgcccc

SEQ ID NO: 6555 - DNA, 669 bp, Artificial Sequence
  chemically treated genomic DNA (Homo sapiens) CpG-island No: 6555
ataataatagttcgttatcgttagtatgacgttcgtaaatagcgtcgttataattcgcggttagcgttagggtattaaattttcgagtaacgtttcgttcgtttacgtttagtcgtgcgtattacgattaaacgatagcgttattattatagttattaatagtagtacgtcgttcgcgagggtaaacgttagtatatgttggcgtttagtcgcgatacgatcgttgattttatattcggcgcgttaatgttgcgtaaacgcggtaatagttatagtagtagcggcgtatcgattaacgtagtgatcgaatcggtggatatttttatttatacgcgagttagttagaggatgatttgatcggaaagttagaggattagcgtattaattaacgacgttagtattagtcgtggtagtagacgtcgcgtttttagtatttttgttagagcggcgcgaataattcgataaagtcgataatttttatagcgtttattagtagcgtattgatgataatcgttagcgatagcgttgttagacgcgtaagcgataaggttagttcgagattgcgcgttacgttattattaagttttattagggttaacggacgaagtagtagtaacgttagtattatatcgtttagtagttgcggttataaacgtttaacgtcgtttt

SEQ ID NO: 6556 - DNA, 669 bp, Artificial Sequence
  chemically treated genomic DNA (Homo sapiens) CpG-island No: 6556
aaaacgacgttaaacgtttataaccgcaactactaaacgatataatactaacgttactactacttcgtccgttaaccctaataaaacttaataataacgtaacgcgcaatctcgaactaaccttatcgcttacgcgtctaacaacgctatcgctaacgattatcatcaatacgctactaataaacgctataaaaattatcgactttatcgaattattcgcgccgctctaacaaaaatactaaaaacgcgacgtctactaccacgactaatactaacgtcgttaattaatacgctaatcctctaactttccgatcaaatcatcctctaactaactcgcgtataaataaaaatatccaccgattcgatcactacgttaatcgatacgccgctactactataactattaccgcgtttacgcaacattaacgcgccgaatataaaatcaacgatcgtatcgcgactaaacgccaacatatactaacgtttaccctcgcgaacgacgtactactattaataactataataataacgctatcgtttaatcgtaatacgcacgactaaacgtaaacgaacgaaacgttactcgaaaatttaataccctaacgctaaccgcgaattataacgacgctatttacgaacgtcatactaacgataacgaactattattat

SEQ ID NO: 6557 - DNA, 528 bp, Artificial Sequence
  chemically treated genomic DNA (Homo sapiens) CpG-island No: 6557
tagatcgcgcgtattcgttttttttttggggcgtcggcggagcgtggttaattaacgggcgcggttatggtagcggaagtcggaagcggcgagcggggtcgttttgggtttaggggaggcgggtcgagggcgtttgagttgaggttcgcgtcgattttgggttggaggaggtggcggtcgttgaggttgcggcgtgaagacggcgggtatggtggggcgggagaaagagttttttatatattttgttttcgggagttgtcggttggtggaggtgagggagtcggtttgggcgttttcggtgggagcgggggcgtcgagggggacgagttatcggggcgcgggcggttttgtaggcgtatttcgttcgggttagagttttcggtcgggagtggttttatcgttatttttttagtttcggattcgaggggggcgttatcgagtttgtttattttagcgtatacgggttagtgttttttttttttagttattgcggtaggaagtaagtaggtggaggttttattttcgagt

SEQ ID NO: 6558 - DNA, 528 bp, Artificial Sequence
  chemically treated genomic DNA (Homo sapiens) CpG-island No: 6558
actcgaaaataaaacctccacctacttacttcctaccgcaataactaaaaaaaaaaaacactaacccgtatacgctaaaataaacaaactcgataacgcccccctcgaatccgaaactaaaaaaataacgataaaaccactcccgaccgaaaactctaacccgaacgaaatacgcctacaaaaccgcccgcgccccgataactcgtccccctcgacgcccccgctcccaccgaaaacgcccaaaccgactccctcacctccaccaaccgacaactcccgaaaacaaaatatataaaaaactctttctcccgccccaccatacccgccgtcttcacgccgcaacctcaacgaccgccacctcctccaacccaaaatcgacgcgaacctcaactcaaacgccctcgacccgcctcccctaaacccaaaacgaccccgctcgccgcttccgacttccgctaccataaccgcgcccgttaattaaccacgctccgccgacgccccaaaaaaaaaacgaatacgcgcgatcta

SEQ ID NO: 6559 - DNA, 528 bp, Artificial Sequence
  chemically treated genomic DNA (Homo sapiens) CpG-island No: 6559
attcgaaagtaaaatttttatttatttgttttttgtcgtagtggttggaagaaaaaaatattgattcgtgtgcgttgagataaataaattcggtggcgtttttttcggattcggggttgggagggtggcggtgagattattttcggtcggaggttttgattcgggcggaatacgtttgtaaagtcgttcgcgtttcggtggttcgtttttttcggcgttttcgtttttatcggagacgtttaggtcgatttttttatttttattagtcgatagttttcgggaataaagtgtatagagagttttttttttcgttttattatgttcgtcgtttttacgtcgtagttttagcggtcgttattttttttaatttaggatcgacgcgggttttagtttagacgttttcggttcgttttttttaggtttagaacgatttcgttcgtcgttttcggttttcgttgttatagtcgcgttcgttgattggttacgtttcgtcgacgttttagaaagagggcgggtacgcgcggtttg

SEQ ID NO: 6560 - DNA, 528 bp, Artificial Sequence
  chemically treated genomic DNA (Homo sapiens) CpG-island No: 6560
caaaccgcgcgtacccgccctctttctaaaacgtcgacgaaacgtaaccaatcaacgaacgcgactataacaacgaaaaccgaaaacgacgaacgaaatcgttctaaacctaaaaaaaacgaaccgaaaacgtctaaactaaaacccgcgtcgatcctaaattaaaaaaaataacgaccgctaaaactacgacgtaaaaacgacgaacataataaaacgaaaaaaaaaactctctatacactttattcccgaaaactatcgactaataaaaataaaaaaatcgacctaaacgtctccgataaaaacgaaaacgccgaaaaaaacgaaccaccgaaacgcgaacgactttacaaacgtattccgcccgaatcaaaacctccgaccgaaaataatctcaccgccaccctcccaaccccgaatccgaaaaaaacgccaccgaatttatttatctcaacgcacacgaatcaatatttttttcttccaaccactacgacaaaaaacaaataaataaaaattttactttcgaat

SEQ ID NO: 6561 - DNA, 607 bp, Artificial Sequence
  chemically treated genomic DNA (Homo sapiens) CpG-island No: 6561
  unsure (193, 358, 581, 587, 589)
atggcggttttattgtttagggttcggtaggtgtaagaattggcgcgtttatcggcgtggcgtgttcggtgtgttcgggcgggatgatttcgggtaattcggtaaattcgttgttgggggcgaaggtgttgttcggcgagacggattttgcgttgttcggttcgttgtcgtttattttttttcgtatttatancggggttcggacgaagacgtttgtatcggtgggcgttttttgtttcggttggaaagcgttttttgatattcgtttatagttacgtgatgacggattgatatttaacgacggcggggggcggagtatttattttgagtcgttgttgtcgggggaagcggtgtatantcgtaatgagttaatgtggttggtgcgcggtggtaaggtaggatagtcggacgggtatacgtttgcgcggttgtggggggcgttgtcgtcggatattcggttaagttcgtatttttatttggcgattaataaggtataggggtcgcggtgggtattggggtgggttgaacgggtgttcggtttttaaagacgtcgatgatatttattgataattatcgtaggnatttantnggttgattaatttagtaa

SEQ ID NO: 6562 - DNA, 607 bp, Artificial Sequence
  chemically treated genomic DNA (Homo sapiens) CpG-island No: 6562
  unsure (19, 21, 27, 250, 415)
ttactaaattaatcaaccnantaaatncctacgataattatcaataaatatcatcgacgtctttaaaaaccgaacacccgttcaacccaccccaatacccaccgcgacccctataccttattaatcgccaaataaaaatacgaacttaaccgaatatccgacgacaacgccccccacaaccgcgcaaacgtatacccgtccgactatcctaccttaccaccgcgcaccaaccacattaactcattacgantatacaccgcttcccccgacaacaacgactcaaaataaatactccgccccccgccgtcgttaaatatcaatccgtcatcacgtaactataaacgaatatcaaaaaacgctttccaaccgaaacaaaaaacgcccaccgatacaaacgtcttcgtccgaaccccgntataaatacgaaaaaaaataaacgacaacgaaccgaacaacgcaaaatccgtctcgccgaacaacaccttcgcccccaacaacgaatttaccgaattacccgaaatcatcccgcccgaacacaccgaacacgccacgccgataaacgcgccaattcttacacctaccgaaccctaaacaataaaaccgccat

SEQ ID NO: 6563 - DNA, 607 bp, Artificial Sequence
  chemically treated genomic DNA (Homo sapiens) CpG-island No: 6563
  unsure (19, 21, 27, 250, 415)
ttgttgagttaattagttngntgagtntttacgatgattattagtaggtattatcgacgtttttaggaatcgggtattcgtttagtttattttagtatttatcgcggtttttgtgttttgttggtcgttaggtaaaaatgcgggtttaatcggatattcggcgatagcgttttttatagtcgcgtaagcgtatgttcgttcggttgttttgttttattatcgcgtattagttatattgatttattgcggntgtatatcgtttttttcggtagtagcggtttaaagtgaatgtttcgtttttcgtcgtcgttgagtattagttcgttattacgtagttgtaagcggatattagaaggcgttttttagtcggggtagaaaacgtttatcggtgtaggcgttttcgttcggatttcgntgtaggtgcgggagagaatgaacggtagcgggtcgggtagcgtaaggttcgtttcgtcgggtagtattttcgtttttagtagcggatttatcgggttgttcgaagttatttcgttcggatatatcgagtacgttacgtcggtgggcgcgttaatttttatatttgtcgaattttggataatgggatcgttat

SEQ ID NO: 6564 - DNA, 607 bp, Artificial Sequence
  chemically treated genomic DNA (Homo sapiens) CpG-island No: 6564
  unsure (193, 358, 581, 587, 589)
ataacgatcccattatccaaaattcgacaaatataaaaattaacgcgcccaccgacgtaacgtactcgatatatccgaacgaaataacttcgaacaacccgataaatccgctactaaaaacgaaaatactacccgacgaaacgaaccttacgctacccgacccgctaccgttcattctctcccgcacctacancgaaatccgaacgaaaacgcctacaccgataaacgttttctaccccgactaaaaaacgccttctaatatccgcttacaactacgtaataacgaactaatactcaacgacgacgaaaaacgaaacattcactttaaaccgctactaccgaaaaaaacgatatacanccgcaataaatcaatataactaatacgcgataataaaacaaaacaaccgaacgaacatacgcttacgcgactataaaaaacgctatcgccgaatatccgattaaacccgcatttttacctaacgaccaacaaaacacaaaaaccgcgataaatactaaaataaactaaacgaatacccgattcctaaaaacgtcgataatacctactaataatcatcgtaaanactcancnaactaattaactcaacaa

SEQ ID NO: 6565 - DNA, 514 bp, Artificial Sequence
  chemically treated genomic DNA (Homo sapiens) CpG-island No: 6565
agttcgtaatcgagtgtttttatgaaagtgatttgcgtcgggtaaagcgacgttggtatggcgtttttcgttcggtatgtcgattttaatttttgtttcggtaaaggcgtaaatatatttacggttttcgtttcgatcgttgcgcggatgaaataggtcgtagagtaaatcggacgcgacgttggtttttatgtgttgtttatggtgattgtcgatgaaatcgacgatgtcgttcgcgttaaatgggaatattataaagcgggcgcggatgaagaggcgttaagttggttaatcgaataaagttagaaagatattcgtttcggtattgatattaacgttcgttagatggtcgattttatttcggcggtaaatattaatatggggacgttagtcggtttttacgttagtgtcgaggggtatttcgattgttgttattcggtgtggttattttgtttttttggagaagagtcgtgaagcgatttgtatttatttttatttgtttgttattataggt

SEQ ID NO: 6566 - DNA, 514 bp, Artificial Sequence
  chemically treated genomic DNA (Homo sapiens) CpG-island No: 6566
acctataataacaaacaaataaaaataaatacaaatcgcttcacgactcttctccaaaaaaacaaaataaccacaccgaataacaacaatcgaaatacccctcgacactaacgtaaaaaccgactaacgtccccatattaatatttaccgccgaaataaaatcgaccatctaacgaacgttaatatcaataccgaaacgaatatctttctaactttattcgattaaccaacttaacgcctcttcatccgcgcccgctttataatattcccatttaacgcgaacgacatcgtcgatttcatcgacaatcaccataaacaacacataaaaaccaacgtcgcgtccgatttactctacgacctatttcatccgcgcaacgatcgaaacgaaaaccgtaaatatatttacgcctttaccgaaacaaaaattaaaatcgacataccgaacgaaaaacgccataccaacgtcgctttacccgacgcaaatcactttcataaaaacactcgattacgaact

SEQ ID NO: 6567 - DNA, 514 bp, Artificial Sequence
  chemically treated genomic DNA (Homo sapiens) CpG-island No: 6567
gtttgtaataataggtagataagaatgagtgtaggtcgttttacgatttttttttagaggggtagaataattatatcggatgataatagtcgaggtatttttcgatattggcgtaagaatcgattaacgtttttatattgatgtttatcgtcgaagtgggatcggttatttgacgaacgttggtgttagtatcggagcgggtatttttttgattttgttcggttagttagtttaacgtttttttattcgcgttcgttttgtagtgtttttatttggcgcgagcggtatcgtcggttttatcggtaattattataaataatatataagagttaacgtcgcgttcggtttgttttgcggtttgttttattcgcgtagcggtcggggcgaaagtcgtgggtgtatttacgtttttgtcgaaatagaagttgaaatcggtatatcgggcggagaacgttatgttagcgtcgttttgttcggcgtagattatttttatggggatattcggttgcggatt

SEQ ID NO: 6568 - DNA, 514 bp, Artificial Sequence
  chemically treated genomic DNA (Homo sapiens) CpG-island No: 6568
aatccgcaaccgaatatccccataaaaataatctacgccgaacaaaacgacgctaacataacgttctccgcccgatataccgatttcaacttctatttcgacaaaaacgtaaatacacccacgactttcgccccgaccgctacgcgaataaaacaaaccgcaaaacaaaccgaacgcgacgttaactcttatatattatttataataattaccgataaaaccgacgataccgctcgcgccaaataaaaacactacaaaacgaacgcgaataaaaaaacgttaaactaactaaccgaacaaaatcaaaaaaatacccgctccgatactaacaccaacgttcgtcaaataaccgatcccacttcgacgataaacatcaatataaaaacgttaatcgattcttacgccaatatcgaaaaatacctcgactattatcatccgatataattattctacccctctaaaaaaaaatcgtaaaacgacctacactcattcttatctacctattattacaaac

SEQ ID NO: 6569 - DNA, 534 bp, Artificial Sequence
  chemically treated genomic DNA (Homo sapiens) CpG-island No: 6569
tggtcgcgtcgcgttcgtttagtagtttggcggtgcgtatttcgttattgtgcgtttatatatcgaatagttcgggtttcgtggttttgagtagttggtacgatagttaggcgttttggttcgagtcgtcgtttatcgttattattttggttattaggtagttcggttcggtcgttcggggtattagttcggtgtagggcgcggagttattttgtagcgggtatagtacgaagggcgagttgtcgttggcgtttagtattagtacgcgtattagcgtttcgttgtttaaagtcggggagtcgcggtttgaagcgtttattcggaattcgaacgtttgtagggtttcgtagtttagcgatttgagggcgaataggtggtcgttgtttgtgttgatggagattagggaggcgaggggtaggtgcggattttggggcggtagtagcgagtaggtgatcgggcgtggtttgagattcgatagtagagaaattgaattttttttattgtgttttaaagtttagttttttatgttaaata

SEQ ID NO: 6570 - DNA, 534 bp, Artificial Sequence
  chemically treated genomic DNA (Homo sapiens) CpG-island No: 6570
tatttaacataaaaaactaaactttaaaacacaataaaaaaaattcaatttctctactatcgaatctcaaaccacgcccgatcacctactcgctactaccgccccaaaatccgcacctacccctcgcctccctaatctccatcaacacaaacaacgaccacctattcgccctcaaatcgctaaactacgaaaccctacaaacgttcgaattccgaataaacgcttcaaaccgcgactccccgactttaaacaacgaaacgctaatacgcgtactaatactaaacgccaacgacaactcgcccttcgtactatacccgctacaaaataactccgcgccctacaccgaactaataccccgaacgaccgaaccgaactacctaataaccaaaataataacgataaacgacgactcgaaccaaaacgcctaactatcgtaccaactactcaaaaccacgaaacccgaactattcgatatataaacgcacaataacgaaatacgcaccgccaaactactaaacgaacgcgacgcgacca

SEQ ID NO: 6571 - DNA, 534 bp, Artificial Sequence
  chemically treated genomic DNA (Homo sapiens) CpG-island No: 6571
tatttggtatgaggaattaggttttagagtatagtggagggaatttaatttttttattgtcgggttttaagttacgttcggttatttattcgttgttgtcgttttaggattcgtatttgtttttcgtttttttggtttttattaatatagataacggttatttgttcgtttttaggtcgttggattacgaggttttgtaggcgttcgagtttcgggtgggcgttttagatcgcggtttttcggttttgagtagcgaggcgttggtgcgcgtgttggtgttggacgttaacgataattcgtttttcgtgttgtattcgttgtagaatggtttcgcgttttgtatcgagttggtgtttcgggcggtcgagtcgggttatttggtgattaaggtggtggcggtggacggcgattcgggttagaacgtttggttgtcgtattagttgtttaaggttacggagttcgggttgttcggtgtgtgggcgtataatggcgaggtgcgtatcgttaggttgttgagcgagcgcgacgcggtta

SEQ ID NO: 6572 - DNA, 534 bp, Artificial Sequence
  chemically treated genomic DNA (Homo sapiens) CpG-island No: 6572
taaccgcgtcgcgctcgctcaacaacctaacgatacgcacctcgccattatacgcccacacaccgaacaacccgaactccgtaaccttaaacaactaatacgacaaccaaacgttctaacccgaatcgccgtccaccgccaccaccttaatcaccaaataacccgactcgaccgcccgaaacaccaactcgatacaaaacgcgaaaccattctacaacgaatacaacacgaaaaacgaattatcgttaacgtccaacaccaacacgcgcaccaacgcctcgctactcaaaaccgaaaaaccgcgatctaaaacgcccacccgaaactcgaacgcctacaaaacctcgtaatccaacgacctaaaaacgaacaaataaccgttatctatattaataaaaaccaaaaaaacgaaaaacaaatacgaatcctaaaacgacaacaacgaataaataaccgaacgtaacttaaaacccgacaataaaaaaattaaattccctccactatactctaaaacctaattcctcataccaaata

SEQ ID NO: 6573 - DNA, 531 bp, Artificial Sequence
  chemically treated genomic DNA (Homo sapiens) CpG-island No: 6573
ttgttcgttcgcgagaataatagtttcgttttgtatattggtagcgttagtatcgtagagattaatatttaggttatttattcgttgttgtcgtttcggaattcgtatttgtttttcgtttttttggtttttattaatatagataacggttatttgttcgtttttaggtcgttggattacgaggttttgtaggagttcgagtttcgcgtgggcgttttagatcgcggttttacggcgttgagtagcgaggcgttggtgcgcgtgttggtgttggacgttaacgatagtttatttttcgtgttgttttcgttgtagaacggtttcgcgttttgtatcgagttgatgtttcgggcgggtcgtcgagtcgggttatttggtgattaaggtggtggcggtggacggtgattcgggttagaacgtttggttgtcgtagtagttgtttaaggttacggagttagggttgttcggcgtgtgggcgtataatgtattgataggttgttgagcgagcgtgatatagttaagtataggttg

SEQ ID NO: 6574 - DNA, 531 bp, Artificial Sequence
  chemically treated genomic DNA (Homo sapiens) CpG-island No: 6574
caacctatacttaactatatcacgctcgctcaacaacctatcaatacattatacgcccacacgccgaacaaccctaactccgtaaccttaaacaactactacgacaaccaaacgttctaacccgaatcaccgtccaccgccaccaccttaatcaccaaataacccgactcgacgacccgcccgaaacatcaactcgatacaaaacgcgaaaccgttctacaacgaaaacaacacgaaaaataaactatcgttaacgtccaacaccaacacgcgcaccaacgcctcgctactcaacgccgtaaaaccgcgatctaaaacgcccacgcgaaactcgaactcctacaaaacctcgtaatccaacgacctaaaaacgaacaaataaccgttatctatattaataaaaaccaaaaaaacgaaaaacaaatacgaattccgaaacgacaacaacgaataaataacctaaatattaatctctacgatactaacgctaccaatatacaaaacgaaactattattctcgcgaacgaacaa

SEQ ID NO: 6575 - DNA, 531 bp, Artificial Sequence
  chemically treated genomic DNA (Homo sapiens) CpG-island No: 6575
tagtttgtgtttggttgtgttacgttcgtttagtagtttgttagtgtattgtgcgtttatacgtcgaatagttttggtttcgtggttttgagtaattgttacgatagttaggcgttttggttcgagttatcgtttatcgttattattttggttattaggtagttcggttcggcggttcgttcggggtattagttcggtgtagggcgcggagtcgttttgtagcgggaatagtacgaagagtgagttgtcgttggcgtttagtattagtacgcgtattagcgtttcgttgtttagcgtcgtggagtcgcggtttgaagcgtttacgcggaattcgaatttttgtagggtttcgtagtttagcgatttgagggcgaataggtggtcgttgtttgtgttgatggagattagggaggcgaggggtaggtgcgggtttcggggcggtagtagcgagtaggtgatttggatgttggtttttgcggtgttgacgttgttaatatgtagggcggggttgttgttttcgcggacgaatag

SEQ ID NO: 6576 - DNA, 531 bp, Artificial Sequence
  chemically treated genomic DNA (Homo sapiens) CpG-island No: 6576
ctattcgtccgcgaaaacaacaaccccgccctacatattaacaacgtcaacaccgcaaaaaccaacatccaaatcacctactcgctactaccgccccgaaacccgcacctacccctcgcctccctaatctccatcaacacaaacaacgaccacctattcgccctcaaatcgctaaactacgaaaccctacaaaaattcgaattccgcgtaaacgcttcaaaccgcgactccacgacgctaaacaacgaaacgctaatacgcgtactaatactaaacgccaacgacaactcactcttcgtactattcccgctacaaaacgactccgcgccctacaccgaactaataccccgaacgaaccgccgaaccgaactacctaataaccaaaataataacgataaacgataactcgaaccaaaacgcctaactatcgtaacaattactcaaaaccacgaaaccaaaactattcgacgtataaacgcacaatacactaacaaactactaaacgaacgtaacacaaccaaacacaaacta

SEQ ID NO: 6577 - DNA, 769 bp, Artificial Sequence
  chemically treated genomic DNA (Homo sapiens) CpG-island No: 6577
cgagtataatataatcgtgttgttttttgacgttaatgataacgtttttatttttatttaaattttttatattttgttcgttcgcgagaataatagtttcgttttgtatatcggtagcgttagcgttatagatagagatttagcgtattaacgtttaggttaattattcgttgttgtcgttttagatcgggatttgtttttcgtttttttggtttttattaacgcgtataatggttattagtatgtttttaggtcggtggattataaggtttatacgtagttcgagtttcgcgtgcgcgttatagatcgcgggttttcggcgttacgtagcgaggcgttggtgcgagtgttggtgttggacgttaacgatatttcgtttttcgtgttgtattcgttgtagaacggtttcgcgttttgtatcgagttggtgtttcgggcggtcgagtcgggttatttggtgattaaggtggtggcggtggacggcgattcgggttagaacgtttggttgtcgtattagttgtttaaggttacggagttcgggttgttcggcgtgtgggcgtataatggcgaggtgcgtatcgttaggttgttgagcgagcgcgacgcggttaagtataggttggtggtgttggttaaggataatggcgagttttcgcgttcggttatcgttacgttgtacgtgtttttggtggacggttttttttagttttatttgtttttttcggaggcggtttcggtttaggtttaggtcgatttgtttatcgtttat

SEQ ID NO: 6578 - DNA, 769 bp, Artificial Sequence
  chemically treated genomic DNA (Homo sapiens) CpG-island No: 6578
ataaacgataaacaaatcgacctaaacctaaaccgaaaccgcctccgaaaaaaacaaataaaactaaaaaaaaccgtccaccaaaaacacgtacaacgtaacgataaccgaacgcgaaaactcgccattatccttaaccaacaccaccaacctatacttaaccgcgtcgcgctcgctcaacaacctaacgatacgcacctcgccattatacgcccacacgccgaacaacccgaactccgtaaccttaaacaactaatacgacaaccaaacgttctaacccgaatcgccgtccaccgccaccaccttaatcaccaaataacccgactcgaccgcccgaaacaccaactcgatacaaaacgcgaaaccgttctacaacgaatacaacacgaaaaacgaaatatcgttaacgtccaacaccaacactcgcaccaacgcctcgctacgtaacgccgaaaacccgcgatctataacgcgcacgcgaaactcgaactacgtataaaccttataatccaccgacctaaaaacatactaataaccattatacgcgttaataaaaaccaaaaaaacgaaaaacaaatcccgatctaaaacgacaacaacgaataattaacctaaacgttaatacgctaaatctctatctataacgctaacgctaccgatatacaaaacgaaactattattctcgcgaacgaacaaaatataaaaaatttaaataaaaataaaaacgttatcattaacgtcaaaaaacaacacgattatattatactcg

SEQ ID NO: 6579 - DNA, 769 bp, Artificial Sequence
  chemically treated genomic DNA (Homo sapiens) CpG-island No: 6579
gtagacggtgagtaagtcggtttgggtttgggtcggggtcgttttcgggagaggtaggtagggttgggagaagtcgtttattaggagtacgtgtagcgtggcggtggtcgagcgcggaggttcgttattgtttttgattagtattattagtttgtgtttggtcgcgtcgcgttcgtttagtagtttggcggtgcgtatttcgttattgtgcgtttatacgtcgaatagttcgggtttcgtggttttgagtagttggtacgatagttaggcgttttggttcgagtcgtcgtttatcgttattattttggttattaggtagttcggttcggtcgttcggggtattagttcggtgtagggcgcggagtcgttttgtagcgggtatagtacgaagggcgaggtgtcgttggcgtttagtattagtattcgtattagcgtttcgttgcgtaacgtcggggattcgcggtttgtggcgcgtacgcgaaattcgaattgcgtgtaggttttgtagtttatcgatttggaggtatattagtggttattgtgcgcgttgatggagattaaggaggcgaggggtaggtttcggtttggggcggtagtagcgagtagttgatttgggcgttggtgcgttgagtttttgtttgtggcgttgacgttgtcgatgtgtagggcggggttgttgttttcgcggacgaatagggtgtaggaggtttgggtgaaggtgggggcgttgttattgacgttagagagtagtacggttatgttgtattcg

SEQ ID NO: 6580 - DNA, 769 bp, Artificial Sequence
  chemically treated genomic DNA (Homo sapiens) CpG-island No: 6580
cgaatacaacataaccgtactactctctaacgtcaataacaacgcccccaccttcacccaaacctcctacaccctattcgtccgcgaaaacaacaaccccgccctacacatcgacaacgtcaacgccacaaacaaaaactcaacgcaccaacgcccaaatcaactactcgctactaccgccccaaaccgaaacctacccctcgcctccttaatctccatcaacgcgcacaataaccactaatatacctccaaatcgataaactacaaaacctacacgcaattcgaatttcgcgtacgcgccacaaaccgcgaatccccgacgttacgcaacgaaacgctaatacgaatactaatactaaacgccaacgacacctcgcccttcgtactatacccgctacaaaacgactccgcgccctacaccgaactaataccccgaacgaccgaaccgaactacctaataaccaaaataataacgataaacgacgactcgaaccaaaacgcctaactatcgtaccaactactcaaaaccacgaaacccgaactattcgacgtataaacgcacaataacgaaatacgcaccgccaaactactaaacgaacgcgacgcgaccaaacacaaactaataatactaatcaaaaacaataacgaacctccgcgctcgaccaccgccacgctacacgtactcctaataaacgacttctcccaaccctacctacctctcccgaaaacgaccccgacccaaacccaaaccgacttactcaccgtctac

SEQ ID NO: 6581 - DNA, 689 bp, Artificial Sequence
  chemically treated genomic DNA (Homo sapiens) CpG-island No: 6581
tattaatacggataacggttatttgttcgttttttagtcgttggattacgaggttttgtaggttttcgagtttcgcgtgggcgttatagatcgcggtttttcggcgttgagtagcgaggcgttggtgcgcgtgttggtgttggacgttaacgataattcgtttttcgtgttgtattcgttgtagaacggtttcgcgttttgtatcgagttggtgtttcgggcggtcgagtcgggttatttggtgattaaggtggtggcggtggacggcgattcgggttagaacgtttggttgtcgtattagttgtttaaggttacggagttcgggttgttcggcgtgtgggcgtataatggcgaggtgcgtatcgttaggttgttgagcgagcgcgacgtggttaagtataggttagtggtgttggttaaggataatggcgagttttcgcgttcggttatcgttacgttgtaagtgtttttggtggacggttttttttaattttatttgtcgtttttagaggcggtttcggtttaagtttaggtcgattcgtttatcgtttatttggtggtggtattggtttcggtgttttcgtttttttttttttcggtgtttttgttcgtggtagtgcggttgtgtaggaggagtagggcggttttagtgggtcgttgttcggtgttcgagggtttttttttagggt

SEQ ID NO: 6582 - DNA, 689 bp, Artificial Sequence
  chemically treated genomic DNA (Homo sapiens) CpG-island No: 6582
accctaaaaaaaaaccctcgaacaccgaacaacgacccactaaaaccgccctactcctcctacacaaccgcactaccacgaacaaaaacaccgaaaaaaaaaaaaacgaaaacaccgaaaccaataccaccaccaaataaacgataaacgaatcgacctaaacttaaaccgaaaccgcctctaaaaacgacaaataaaattaaaaaaaaccgtccaccaaaaacacttacaacgtaacgataaccgaacgcgaaaactcgccattatccttaaccaacaccactaacctatacttaaccacgtcgcgctcgctcaacaacctaacgatacgcacctcgccattatacgcccacacgccgaacaacccgaactccgtaaccttaaacaactaatacgacaaccaaacgttctaacccgaatcgccgtccaccgccaccaccttaatcaccaaataacccgactcgaccgcccgaaacaccaactcgatacaaaacgcgaaaccgttctacaacgaatacaacacgaaaaacgaattatcgttaacgtccaacaccaacacgcgcaccaacgcctcgctactcaacgccgaaaaaccgcgatctataacgcccacgcgaaactcgaaaacctacaaaacctcgtaatccaacgactaaaaaacgaacaaataaccgttatccgtattaata

SEQ ID NO: 6583 - DNA, 689 bp, Artificial Sequence
  chemically treated genomic DNA (Homo sapiens) CpG-island No: 6583
gttttggaaaggggttttcgggtatcgagtagcgatttattgaggtcgttttgttttttttgtatagtcgtattgttacgaataggaatatcgagaagaggaagagcgaagatatcgaggttaatgttattattaggtagacggtaagcgagtcggtttgggtttgggtcggggtcgtttttgggagcggtaggtagggttgagagaagtcgtttattaggagtatttgtagcgtggcggtggtcgagcgcggaggttcgttattgtttttgattagtattattagtttgtgtttggttacgtcgcgttcgtttagtagtttggcggtgcgtatttcgttattgtgcgtttatacgtcgaatagttcgggtttcgtggttttgagtagttggtacgatagttaggcgttttggttcgagtcgtcgtttatcgttattattttggttattaggtagttcggttcggtcgttcggggtattagttcggtgtagggcgcggagtcgttttgtagcgggtatagtacgaagggcgagttgtcgttggcgtttagtattagtacgcgtattagcgtttcgttgtttaacgtcgggaagtcgcggtttgtggcgtttacgcggaattcgaaagtttgtagggtttcgtagtttagcgattggagagcgaataggtggtcgttgttcgtgttaatg

SEQ ID NO: 6584 - DNA, 689 bp, Artificial Sequence
  chemically treated genomic DNA (Homo sapiens) CpG-island No: 6584
cattaacacgaacaacgaccacctattcgctctccaatcgctaaactacgaaaccctacaaactttcgaattccgcgtaaacgccacaaaccgcgacttcccgacgttaaacaacgaaacgctaatacgcgtactaatactaaacgccaacgacaactcgcccttcgtactatacccgctacaaaacgactccgcgccctacaccgaactaataccccgaacgaccgaaccgaactacctaataaccaaaataataacgataaacgacgactcgaaccaaaacgcctaactatcgtaccaactactcaaaaccacgaaacccgaactattcgacgtataaacgcacaataacgaaatacgcaccgccaaactactaaacgaacgcgacgtaaccaaacacaaactaataatactaatcaaaaacaataacgaacctccgcgctcgaccaccgccacgctacaaatactcctaataaacgacttctctcaaccctacctaccgctcccaaaaacgaccccgacccaaacccaaaccgactcgcttaccgtctacctaataataacattaacctcgatatcttcgctcttcctcttctcgatattcctattcgtaacaatacgactatacaaaaaaaacaaaacgacctcaataaatcgctactcgatacccgaaaacccctttccaaaac

SEQ ID NO: 6585 - DNA, 553 bp, Artificial Sequence
  chemically treated genomic DNA (Homo sapiens) CpG-island No: 6585
tattaacgcggataacggttatttattcgtttttaggtttttggattacgaggttttgtaggagttcgggtttcgcgtgggcgtcgtagatcgcggtttttcggcgttgagtagcgaggtgttggtgcgcgtgttggtgttggacgttaacgataattcgtttttcgtgttgtattcgttgtagaacggtttcgcgttttgtatcgagttggtgttttgggcggtcgagtcgggttatttggtgattaaggtggtggcggtggacggtgattcgggttagaacgtttggttgtcgtattagttgtttaaggttacggagttcgggttattcggcgtgtgggcgtataatggcgaggtgcgtatcgttaggttgttgagcgagcgcgacgcggttaagtataggttggtggtgttggttaaggataatggcgagttttcgcgttcggttatcgttacgttgtacgtgtttttggtggacggttttttttagttttatttgtttttttcggaggcggtttcggtttaggtttaggtcgattcgtttattgtttat

SEQ ID NO: 6586 - DNA, 553 bp, Artificial Sequence
  chemically treated genomic DNA (Homo sapiens) CpG-island No: 6586
ataaacaataaacgaatcgacctaaacctaaaccgaaaccgcctccgaaaaaaacaaataaaactaaaaaaaaccgtccaccaaaaacacgtacaacgtaacgataaccgaacgcgaaaactcgccattatccttaaccaacaccaccaacctatacttaaccgcgtcgcgctcgctcaacaacctaacgatacgcacctcgccattatacgcccacacgccgaataacccgaactccgtaaccttaaacaactaatacgacaaccaaacgttctaacccgaatcaccgtccaccgccaccaccttaatcaccaaataacccgactcgaccgcccaaaacaccaactcgatacaaaacgcgaaaccgttctacaacgaatacaacacgaaaaacgaattatcgttaacgtccaacaccaacacgcgcaccaacacctcgctactcaacgccgaaaaaccgcgatctacgacgcccacgcgaaacccgaactcctacaaaacctcgtaatccaaaaacctaaaaacgaataaataaccgttatccgcgttaata

SEQ ID NO: 6587 - DNA, 553 bp, Artificial Sequence
  chemically treated genomic DNA (Homo sapiens) CpG-island No: 6587
gtagatagtgagcgagtcggtttgggtttgggtcggggtcgttttcgggagaggtaggtagggttgggagaagtcgtttattaggagtacgtgtagcgtggcggtggtcgagcgcggaggttcgttattgtttttgattagtattattagtttgtgtttggtcgcgtcgcgttcgtttagtagtttggcggtgcgtatttcgttattgtgcgtttatacgtcgaatagttcgggtttcgtggttttgagtagttggtacgatagttaggcgttttggttcgagttatcgtttatcgttattattttggttattaggtagttcggttcggtcgtttagggtattagttcggtgtagggcgcggagtcgttttgtagcgggtatagtacgaagggcgagttgtcgttggcgtttagtattagtacgcgtattagtatttcgttgtttagcgtcggggagtcgcggtttgcggcgtttacgcgaaattcgaatttttgtagggtttcgtagtttaaagatttgagggcgaataggtggtcgttgttcgcgttgatg

SEQ ID NO: 6588 - DNA, 553 bp, Artificial Sequence
  chemically treated genomic DNA (Homo sapiens) CpG-island No: 6588
catcaacgcgaacaacgaccacctattcgccctcaaatctttaaactacgaaaccctacaaaaattcgaatttcgcgtaaacgccgcaaaccgcgactccccgacgctaaacaacgaaatactaatacgcgtactaatactaaacgccaacgacaactcgcccttcgtactatacccgctacaaaacgactccgcgccctacaccgaactaataccctaaacgaccgaaccgaactacctaataaccaaaataataacgataaacgataactcgaaccaaaacgcctaactatcgtaccaactactcaaaaccacgaaacccgaactattcgacgtataaacgcacaataacgaaatacgcaccgccaaactactaaacgaacgcgacgcgaccaaacacaaactaataatactaatcaaaaacaataacgaacctccgcgctcgaccaccgccacgctacacgtactcctaataaacgacttctcccaaccctacctacctctcccgaaaacgaccccgacccaaacccaaaccgactcgctcactatctac

SEQ ID NO: 6589 - DNA, 759 bp, Artificial Sequence
  chemically treated genomic DNA (Homo sapiens) CpG-island No: 6589
aaaatcgagtataatataacggttttggttttcgacgttaatgataacgttttcgtttttatttaaattttttatattttgttcgttcgcgagaataatagtttcgttttgtatatcggtagcgttagcgttatagatagagattcgggtattaacgtttaggttatttattcgttgttgtcgttttaagattcgtatttgtttttcgtttttttggtttttattaacgcggataacggttatttgttcgtttttaggtcgttggattacgaggttttgtaggttttcgagtttcgcgtgggcgttatagatcgcggttttttcgcgttgagtagcgaggcgttggtgcgcgtgttggtgttggacgttaacgataattcgtttttcgtgttgtattcgttgtagaacggtttcgcgttttgtatcgagttggtgtttcgggcggtcgagtcgggttatttggtgattaaggtggtggcggtggacggcgattcgggttagaacgtttggttgtcgtattagttgtttaaggttacggagttcgggttgttcggtgtgtgggcgtataatggggaggtgcgtatcgttaggttgttgagcgagcgcgacgcggttaagtataggttggtggtgttggttaaggataatggcgagtttttcgttgttcggttatataatacgcgtgttatttgttttttgggtggagcggtttttttttagttttaatttgttcgtttttcggagggttgtttttagttt

SEQ ID NO: 6590 - DNA, 759 bp, Artificial Sequence
  chemically treated genomic DNA (Homo sapiens) CpG-island No: 6590
aaactaaaaacaaccctccgaaaaacgaacaaattaaaactaaaaaaaaaccgctccacccaaaaaacaaataacacgcgtattatataaccgaacaacgaaaaactcgccattatccttaaccaacaccaccaacctatacttaaccgcgtcgcgctcgctcaacaacctaacgatacgcacctccccattatacgcccacacaccgaacaacccgaactccgtaaccttaaacaactaatacgacaaccaaacgttctaacccgaatcgccgtccaccgccaccaccttaatcaccaaataacccgactcgaccgcccgaaacaccaactcgatacaaaacgcgaaaccgttctacaacgaatacaacacgaaaaacgaattatcgttaacgtccaacaccaacacgcgcaccaacgcctcgctactcaacgcgaaaaaaccgcgatctataacgcccacgcgaaactcgaaaacctacaaaacctcgtaatccaacgacctaaaaacgaacaaataaccgttatccgcgttaataaaaaccaaaaaaacgaaaaacaaatacgaatcttaaaacgacaacaacgaataaataacctaaacgttaatacccgaatctctatctataacgctaacgctaccgatatacaaaacgaaactattattctcgcgaacgaacaaaatataaaaaatttaaataaaaacgaaaacgttatcattaacgtcgaaaaccaaaaccgttatattatactcgatttt

SEQ ID NO: 6591 - DNA, 759 bp, Artificial Sequence
  chemically treated genomic DNA (Homo sapiens) CpG-island No: 6591
aggttggaggtagtttttcgaaaagcgggtaggttagggttgaggaaaagtcgttttatttaggaagtaagtgatacgcgtgttgtgtggtcgagtaacgaaaggttcgttattgtttttgattagtattattagtttgtgtttggtcgcgtcgcgttcgtttagtagtttggcggtgcgtatttttttattgtgcgtttatatatcgaatagttcgggtttcgtggttttgagtagttggtacgatagttaggcgttttggttcgagtcgtcgtttatcgttattattttggttattaggtagttcggttcggtcgttcggggtattagttcggtgtagggcgcggagtcgttttgtagcgggtatagtacgaagggcgagttgtcgttggcgtttagtattagtacgcgtattagcgtttcgttgtttagcgcgggggagtcgcggtttgtggcgtttacgcggaattcgaaagtttgtagggtttcgtagtttagcgatttgagggcgaataggtggtcgttgttcgcgttgatggagattagggaggcgaggggtaggtgcgggttttggggcggtagtagcgagtaggtgatttgggcgttggtgttcgagtttttgtttgtggcgttgacgttgtcgatgtgtagggcggggttgttgttttcgcggacgaatagggtgtaggaggtttgggtgaaggcgggggcgttgttattgacgtcggagattaggatcgttatgttgtgttcggtttt

SEQ ID NO: 6592 - DNA, 759 bp, Artificial Sequence
  chemically treated genomic DNA (Homo sapiens) CpG-island No: 6592
aaaaccgaacacaacataacgatcctaatctccgacgtcaataacaacgcccccgccttcacccaaacctcctacaccctattcgtccgcgaaaacaacaaccccgccctacacatcgacaacgtcaacgccacaaacaaaaactcgaacaccaacgcccaaatcacctactcgctactaccgccccaaaacccgcacctacccctcgcctccctaatctccatcaacgcgaacaacgaccacctattcgccctcaaatcgctaaactacgaaaccctacaaactttcgaattccgcgtaaacgccacaaaccgcgactcccccgcgctaaacaacgaaacgctaatacgcgtactaatactaaacgccaacgacaactcgcccttcgtactatacccgctacaaaacgactccgcgccctacaccgaactaataccccgaacgaccgaaccgaactacctaataaccaaaataataacgataaacgacgactcgaaccaaaacgcctaactatcgtaccaactactcaaaaccacgaaacccgaactattcgatatataaacgcacaataaaaaaatacgcaccgccaaactactaaacgaacgcgacgcgaccaaacacaaactaataatactaatcaaaaacaataacgaacctttcgttactcgaccacacaacacgcgtatcacttacttcctaaataaaacgacttttcctcaaccctaacctacccgcttttcgaaaaactacctccaacct

SEQ ID NO: 6593 - DNA, 670 bp, Artificial Sequence
  chemically treated genomic DNA (Homo sapiens) CpG-island No: 6593
tcggggtcgtttagttttttttgtatagtcgtatcgttacgaataggagtatcgagaggaggaagagcgaagatatcgaggttaacgttattattaggtagacggtgagcgagttggtttggttcggggtcgttttcgggagtcgtaggtagggttgggagaagtcgtttattaggagtacgtgtagcgtggcggtggtcgagcgcggaggttcgttattgtttttgattagtattattagtttttgtttggttgcgtcgcgttcgtttagtagtttggcggtgcgtatttcgttattgtgcgtttatatatcgaatagttcgggtttcgtggttttgagtagttggtacgatagttaggcgttttggttcgagtcgtcgtttatcgttattattttggttattaggtagttcggttcggtcgttcggggtattagttcggtgtagggcgcggagttgttttgtagcgggtatagtacgaagggcgagttgtcgttggcgtttagtattagtacgcgtattagcgtttcgttgtttaaagtcggggagtcgcggtttgaggcgtttacgcggaagtcgaaagtttgtagggtttcgtagtttagcgatttgagggtaaataggtggttattgttcgcgttgatggagattagggaggcgaggggtaggtg

SEQ ID NO: 6594 - DNA, 670 bp, Artificial Sequence
  chemically treated genomic DNA (Homo sapiens) CpG-island No: 6594
cacctacccctcgcctccctaatctccatcaacgcgaacaataaccacctatttaccctcaaatcgctaaactacgaaaccctacaaactttcgacttccgcgtaaacgcctcaaaccgcgactccccgactttaaacaacgaaacgctaatacgcgtactaatactaaacgccaacgacaactcgcccttcgtactatacccgctacaaaacaactccgcgccctacaccgaactaataccccgaacgaccgaaccgaactacctaataaccaaaataataacgataaacgacgactcgaaccaaaacgcctaactatcgtaccaactactcaaaaccacgaaacccgaactattcgatatataaacgcacaataacgaaatacgcaccgccaaactactaaacgaacgcgacgcaaccaaacaaaaactaataatactaatcaaaaacaataacgaacctccgcgctcgaccaccgccacgctacacgtactcctaataaacgacttctcccaaccctacctacgactcccgaaaacgaccccgaaccaaaccaactcgctcaccgtctacctaataataacgttaacctcgatatcttcgctcttcctcctctcgatactcctattcgtaacgatacgactatacaaaaaaaactaaacgaccccga

SEQ ID NO: 6595 - DNA, 670 bp, Artificial Sequence
  chemically treated genomic DNA (Homo sapiens) CpG-island No: 6595
tatttgtttttcgtttttttggtttttattaacgcggataatggttatttgtttgtttttaggtcgttggattacgaggttttgtaggttttcgattttcgcgtgggcgttttagatcgcggtttttcggttttgagtagcgaggcgttggtgcgcgtattggtgttggacgttaacgataattcgtttttcgtgttgtattcgttgtagaatagtttcgcgttttgtatcgagttggtgtttcgggcggtcgagtcgggttatttggtgattaaggtggtggcggtggacggcgattcgggttagaacgtttggttgtcgtattagttgtttaaggttacggagttcgggttgttcggtgtgtgggcgtataatggcgaggtgcgtatcgttaggttgttgagcgagcgcgacgtagttaagtagaggttggtggtgttggttaaggataatggcgagttttcgcgttcggttatcgttacgttgtacgtgtttttggtggacggttttttttagttttatttgcggttttcggaggcggtttcggattaggttaattcgtttatcgtttatttggtggtggcgttggtttcggtgttttcgtttttttttttttcggtgtttttgttcgtggcggtgcggttgtgtaggaggagttgggcggtttcgg

SEQ ID NO: 6596 - DNA, 670 bp, Artificial Sequence
  chemically treated genomic DNA (Homo sapiens) CpG-island No: 6596
ccgaaaccgcccaactcctcctacacaaccgcaccgccacgaacaaaaacaccgaaaaaaaaaaaaacgaaaacaccgaaaccaacgccaccaccaaataaacgataaacgaattaacctaatccgaaaccgcctccgaaaaccgcaaataaaactaaaaaaaaccgtccaccaaaaacacgtacaacgtaacgataaccgaacgcgaaaactcgccattatccttaaccaacaccaccaacctctacttaactacgtcgcgctcgctcaacaacctaacgatacgcacctcgccattatacgcccacacaccgaacaacccgaactccgtaaccttaaacaactaatacgacaaccaaacgttctaacccgaatcgccgtccaccgccaccaccttaatcaccaaataacccgactcgaccgcccgaaacaccaactcgatacaaaacgcgaaactattctacaacgaatacaacacgaaaaacgaattatcgttaacgtccaacaccaatacgcgcaccaacgcctcgctactcaaaaccgaaaaaccgcgatctaaaacgcccacgcgaaaatcgaaaacctacaaaacctcgtaatccaacgacctaaaaacaaacaaataaccattatccgcgttaataaaaaccaaaaaaacgaaaaacaaata

SEQ ID NO: 6597 - DNA, 564 bp, Artificial Sequence
  chemically treated genomic DNA (Homo sapiens) CpG-island No: 6597
gcgttggcggggcgtgaagcggtaatcgtaatcgatatcgtcggaattacgcgtgacgtgttgcgtgagtatatttatattgacggaatgtcgttgtatattatcgatatcgtcgggttacgtgaagttagtgacgaagtagaacgtattggtatcgagcgcgcgtggtaggaaattgaataggtcgatcgcgtgttgtttatggtcgatggtattataatagacgtcgtggattcggtagagatttggtcggaatttattgttcgtttgttagcgaaattgtcgattatcgtggtgcgtaataaagtcgatattatcggcgaaacgttgggaatgagtgaagtgaacggttacgcgttaattcgtttttcggtaaggattggtgaaggcgtggacgtgttgcgtaattattttaaatagagtatgggttttgatattaatatggaaggcggttttttggcgcgtcgtcgttatttataggcgttggaataggtagcggaatatttataatagggtaaagcgtaattgttgggagtttgggtaggtgaattgttggcggaagag

SEQ ID NO: 6598 - DNA, 564 bp, Artificial Sequence
  chemically treated genomic DNA (Homo sapiens) CpG-island No: 6598
ctcttccgccaacaattcacctacccaaactcccaacaattacgctttaccctattataaatattccgctacctattccaacgcctataaataacgacgacgcgccaaaaaaccgccttccatattaatatcaaaacccatactctatttaaaataattacgcaacacgtccacgccttcaccaatccttaccgaaaaacgaattaacgcgtaaccgttcacttcactcattcccaacgtttcgccgataatatcgactttattacgcaccacgataatcgacaatttcgctaacaaacgaacaataaattccgaccaaatctctaccgaatccacgacgtctattataataccatcgaccataaacaacacgcgatcgacctattcaatttcctaccacgcgcgctcgataccaatacgttctacttcgtcactaacttcacgtaacccgacgatatcgataatatacaacgacattccgtcaatataaatatactcacgcaacacgtcacgcgtaattccgacgatatcgattacgattaccgcttcacgccccgccaacgc

SEQ ID NO: 6599 - DNA, 564 bp, Artificial Sequence
  chemically treated genomic DNA (Homo sapiens) CpG-island No: 6599
ttttttcgttagtagtttatttgtttaggtttttaatagttgcgttttgttttgttgtagatgtttcgttgtttgttttagcgtttgtaggtggcgacgacgcgttaggaagtcgttttttatgttggtgttaaagtttatgttttgtttgagatggttacgtagtacgtttacgtttttattagtttttgtcgagagacgaattaacgcgtgatcgtttattttatttatttttagcgtttcgtcggtgatatcggttttattgcgtattacggtgatcggtagtttcgttggtagacgggtaataaatttcggttagatttttgtcggatttacggcgtttgttgtggtgttatcgattataaatagtacgcggtcggtttgtttaattttttgttacgcgcgttcgatattaatacgttttatttcgttattggttttacgtagttcggcggtatcgatgatatgtagcggtatttcgttaatgtggatatgtttacgtagtacgttacgcgtagtttcggcgatatcggttacgattgtcgttttacgtttcgttagcgt

SEQ ID NO: 6600 - DNA, 564 bp, Artificial Sequence
  chemically treated genomic DNA (Homo sapiens) CpG-island No: 6600
acgctaacgaaacgtaaaacgacaatcgtaaccgatatcgccgaaactacgcgtaacgtactacgtaaacatatccacattaacgaaataccgctacatatcatcgataccgccgaactacgtaaaaccaataacgaaataaaacgtattaatatcgaacgcgcgtaacaaaaaattaaacaaaccgaccgcgtactatttataatcgataacaccacaacaaacgccgtaaatccgacaaaaatctaaccgaaatttattacccgtctaccaacgaaactaccgatcaccgtaatacgcaataaaaccgatatcaccgacgaaacgctaaaaataaataaaataaacgatcacgcgttaattcgtctctcgacaaaaactaataaaaacgtaaacgtactacgtaaccatctcaaacaaaacataaactttaacaccaacataaaaaacgacttcctaacgcgtcgtcgccacctacaaacgctaaaacaaacaacgaaacatctacaacaaaacaaaacgcaactattaaaaacctaaacaaataaactactaacgaaaaaa

SEQ ID NO: 6601 - DNA, 555 bp, Artificial Sequence
  chemically treated genomic DNA (Homo sapiens) CpG-island No: 6601
tgttttagtagttcgtgaatagtttgttcggcggcgtattgtatcgtttgatcgttaaataggatttgtattgtttttttcgtatatcgggtaattattggcgcggcgtaacgttaggttgcgttattggttcgatttatcgtcgaatagtcggagttttttcgtaggtgtttttatatcgtttaataatttaatggtttttagtgtttgtaaagtgtttataatttcgattatcgggttaattacgttcgtcgtgcggtagttgcgttttggtttttggttatttggttataggtagcggtaatatttttgtttttagggcggcgttagtattattaattgatcgttaaattcgatcgcgttggcggtgataagcggcgtgttgagtgttacgtaggcggtattaattttttggcgagtcgttatattgtcggtatagtcgagtattatatcggttcgtgtaatcgtattttttaacgttttattcgttaatcgttgttgtaatgttgttagttgaatgtcgggatttaattgtgttagtcgttgttggttgat

SEQ ID NO: 6602 - DNA, 555 bp, Artificial Sequence
  chemically treated genomic DNA (Homo sapiens) CpG-island No: 6602
atcaaccaacaacgactaacacaattaaatcccgacattcaactaacaacattacaacaacgattaacgaataaaacgttaaaaaatacgattacacgaaccgatataatactcgactataccgacaatataacgactcgccaaaaaattaataccgcctacgtaacactcaacacgccgcttatcaccgccaacgcgatcgaatttaacgatcaattaataatactaacgccgccctaaaaacaaaaatattaccgctacctataaccaaataaccaaaaaccaaaacgcaactaccgcacgacgaacgtaattaacccgataatcgaaattataaacactttacaaacactaaaaaccattaaattattaaacgatataaaaacacctacgaaaaaactccgactattcgacgataaatcgaaccaataacgcaacctaacgttacgccgcgccaataattacccgatatacgaaaaaaacaatacaaatcctatttaacgatcaaacgatacaatacgccgccgaacaaactattcacgaactactaaaaca

SEQ ID NO: 6603 - DNA, 555 bp, Artificial Sequence
  chemically treated genomic DNA (Homo sapiens) CpG-island No: 6603
gttagttaatagcgattgatatagttgaatttcgatatttaattgatagtattataataacggttaacgggtgaggcgttaaaagatgcggttgtacgggtcgatgtggtgttcgattgtatcgataatatggcgattcgttaggagattaatgtcgtttgcgtggtatttaatacgtcgtttattatcgttagcgcggtcggatttggcggttagttgatggtattgacgtcgttttgggagtaggggtgttatcgttgtttgtggttagataattaggagttagaacgtaattgtcgtacggcgggcgtggttggttcggtggtcggggttatgggtattttgtaggtattggaagttattaagttattaagcggtatagagatatttgcgggagaatttcgattgttcgacggtaaatcgagttagtggcgtagtttggcgttgcgtcgcgttagtggttgttcggtatgcggaggaagtaatgtagattttgtttaacgattaagcgatgtagtgcgtcgtcgggtaaattgtttacgaattattggagta

SEQ ID NO: 6604 - DNA, 555 bp, Artificial Sequence
  chemically treated genomic DNA (Homo sapiens) CpG-island No: 6604
tactccaataattcgtaaacaatttacccgacgacgcactacatcgcttaatcgttaaacaaaatctacattacttcctccgcataccgaacaaccactaacgcgacgcaacgccaaactacgccactaactcgatttaccgtcgaacaatcgaaattctcccgcaaatatctctataccgcttaataacttaataacttccaatacctacaaaatacccataaccccgaccaccgaaccaaccacgcccgccgtacgacaattacgttctaactcctaattatctaaccacaaacaacgataacacccctactcccaaaacgacgtcaataccatcaactaaccgccaaatccgaccgcgctaacgataataaacgacgtattaaataccacgcaaacgacattaatctcctaacgaatcgccatattatcgatacaatcgaacaccacatcgacccgtacaaccgcatcttttaacgcctcacccgttaaccgttattataatactatcaattaaatatcgaaattcaactatatcaatcgctattaactaac

SEQ ID NO: 6605 - DNA, 607 bp, Artificial Sequence
  chemically treated genomic DNA (Homo sapiens) CpG-island No: 6605
tcggtcgtttattcgaggtagtttcggaatttcggatttagttatgcgcgtagggaattgtcgggtcgagcgagtttatcgaagtgtttcgcgtcgtgcgcgtttcgagcgttcgttttagttttcgggtgagttttttagtcgtcgttcggtcgcgtttgggtcgttttttcggttagggggagcgggagtgtaggtagcgggaagggagtcggtttcgtaggtttcgggggcgagcgggcgcggggtaggcgtcgggcgggaggaagttagcgtaggcgcggtcgagtttcgggagtcgaggttggaaacgttggagcgggcgttgttatcgaaggcggttcgggatcgggacgcgggttcgagcgatcggagcgcggttgtcgtggcgttggtcgtagtttaggttgatgtcgttggatcgggcgtgtcgttatcgtcgtcgtcgtcggatttcgttaggttggttcgtgggttttcgtaggttgcgcgttgagtttcggaatcgtcgcgcgtcggggatttttttttcgcggtttagttcgttttgtttttggtttttggggtttgtcgtttgttttttttttttgttggtttaagttgcggg

SEQ ID NO: 6606 - DNA, 607 bp, Artificial Sequence
  chemically treated genomic DNA (Homo sapiens) CpG-island No: 6606
cccgcaacttaaaccaacaaaaaaaaaaaacaaacgacaaaccccaaaaaccaaaaacaaaacgaactaaaccgcgaaaaaaaaatccccgacgcgcgacgattccgaaactcaacgcgcaacctacgaaaacccacgaaccaacctaacgaaatccgacgacgacgacgataacgacacgcccgatccaacgacatcaacctaaactacgaccaacgccacgacaaccgcgctccgatcgctcgaacccgcgtcccgatcccgaaccgccttcgataacaacgcccgctccaacgtttccaacctcgactcccgaaactcgaccgcgcctacgctaacttcctcccgcccgacgcctaccccgcgcccgctcgcccccgaaacctacgaaaccgactcccttcccgctacctacactcccgctccccctaaccgaaaaaacgacccaaacgcgaccgaacgacgactaaaaaactcacccgaaaactaaaacgaacgctcgaaacgcgcacgacgcgaaacacttcgataaactcgctcgacccgacaattccctacgcgcataactaaatccgaaattccgaaactacctcgaataaacgaccga

SEQ ID NO: 6607 - DNA, 607 bp, Artificial Sequence
  chemically treated genomic DNA (Homo sapiens) CpG-island No: 6607
ttcgtagtttgggttagtagaagggaagggtagacggtaggttttagaggttaggggtaggacggattgagtcgcggggagggggttttcggcgcgcggcggtttcggagtttagcgcgtagtttgcgggagtttacgggttagtttggcggggttcgacggcggcggcggtggcggtacgttcgatttagcggtattagtttgggttacgattagcgttacggtagtcgcgtttcggtcgttcggattcgcgtttcggtttcgggtcgttttcggtggtagcgttcgttttagcgtttttagtttcggttttcggggttcggtcgcgtttacgttgattttttttcgttcggcgtttgtttcgcgttcgttcgttttcggagtttgcggggtcggtttttttttcgttgtttgtattttcgttttttttggtcgggagggcggtttaagcgcggtcgagcggcggttggagggtttattcgggagttggagcgggcgttcgaggcgcgtacggcgcgggatatttcggtgagttcgttcggttcggtagttttttgcgcgtatggttgggttcggggtttcgagattgtttcgggtaggcggtcgg

SEQ ID NO: 6608 - DNA, 607 bp, Artificial Sequence
  chemically treated genomic DNA (Homo sapiens) CpG-island No: 6608
ccgaccgcctacccgaaacaatctcgaaaccccgaacccaaccatacgcgcaaaaaactaccgaaccgaacgaactcaccgaaatatcccgcgccgtacgcgcctcgaacgcccgctccaactcccgaataaaccctccaaccgccgctcgaccgcgcttaaaccgccctcccgaccaaaaaaaacgaaaatacaaacaacgaaaaaaaaaccgaccccgcaaactccgaaaacgaacgaacgcgaaacaaacgccgaacgaaaaaaaatcaacgtaaacgcgaccgaaccccgaaaaccgaaactaaaaacgctaaaacgaacgctaccaccgaaaacgacccgaaaccgaaacgcgaatccgaacgaccgaaacgcgactaccgtaacgctaatcgtaacccaaactaataccgctaaatcgaacgtaccgccaccgccgccgccgtcgaaccccgccaaactaacccgtaaactcccgcaaactacgcgctaaactccgaaaccgccgcgcgccgaaaaccccctccccgcgactcaatccgtcctacccctaacctctaaaacctaccgtctacccttcccttctactaacccaaactacgaa

SEQ ID NO: 6609 - DNA, 800 bp, Artificial Sequence
  chemically treated genomic DNA (Homo sapiens) CpG-island No: 6609
  unsure (612, 637, 649)
gtatttgcgttaggcgtatagtatttttgggcgcgggacgggcgaacgtcgtgggttttaagttgagttgggtcggttttgtagcgtcggagagtaggcggcgtagggaagggagatggggcgggatgtggggaaagttgtcgatgtttggattttttcggttcggatggcgttagttgtttttagtttagtcgcggaaattcgagttttttttagcggttcgacggttcgggcgtttcgtaattttgggtttttttcgcggtgttttcgtcgttcgtttttgcgttttggtcggtttttacgttttttcgaggtttcggcgtagcgcggtcgtcgtttatttttttatattttagaggtcgtagcgtcgttttttttttcgtatttttttttcgtaaaggagtttttcgtttcgcgcgaggtcgcggcgaggaggggcgcggttcggcgtttgggagtttatattttttcgacgcgcgtatcgtttagtagggttgtcgcgtattttcggtttcgtcgcgtatgttcgtcggtaagtattttcggttttcgtgttagttattgtgttttttcgttttttacgttttttagtcgtttttttagtgagtgttnatttatagtgtgtgttcgtgtgttnattcgtgtgttnatttgtgtgtcgagtacgtaagtcggttggttttgtttggagttggtggcggcgaagttggacggcggatggtgacgttgttatggtttggcggtgtcgtgtgttatgtatgttgtttatagggtcggtgttgtgattgagtgttggttat

SEQ ID NO: 6610 - DNA, 800 bp, Artificial Sequence
  chemically treated genomic DNA (Homo sapiens) CpG-island No: 6610
  unsure (152, 164, 189)
ataaccaacactcaatcacaacaccgaccctataaacaacatacataacacacgacaccgccaaaccataacaacgtcaccatccgccgtccaacttcgccgccaccaactccaaacaaaaccaaccgacttacgtactcgacacacaaatnaacacacgaatnaacacacgaacacacactataaatnaacactcactaaaaaaacgactaaaaaacgtaaaaaacgaaaaaacacaataactaacacgaaaaccgaaaatacttaccgacgaacatacgcgacgaaaccgaaaatacgcgacaaccctactaaacgatacgcgcgtcgaaaaaatataaactcccaaacgccgaaccgcgcccctcctcgccgcgacctcgcgcgaaacgaaaaactcctttacgaaaaaaaaatacgaaaaaaaaaacgacgctacgacctctaaaatataaaaaaataaacgacgaccgcgctacgccgaaacctcgaaaaaacgtaaaaaccgaccaaaacgcaaaaacgaacgacgaaaacaccgcgaaaaaaacccaaaattacgaaacgcccgaaccgtcgaaccgctaaaaaaaactcgaatttccgcgactaaactaaaaacaactaacgccatccgaaccgaaaaaatccaaacatcgacaactttccccacatcccgccccatctcccttccctacgccgcctactctccgacgctacaaaaccgacccaactcaacttaaaacccacgacgttcgcccgtcccgcgcccaaaaatactatacgcctaacgcaaatac

SEQ ID NO: 6611 - DNA, 800 bp, Artificial Sequence
  chemically treated genomic DNA (Homo sapiens) CpG-island No: 6611
  unsure (152, 164, 189)
gtggttagtatttagttatagtatcgattttgtgagtagtatgtatggtatacggtatcgttaggttatggtagcgttattattcgtcgtttagtttcgtcgttattagttttaggtagggttagtcgatttacgtattcgatatataaatngatatacggatnagtatacgaatatatattgtggatnaatatttattagagggacgattgagggacgtggggaacgggggaatatagtgattgatacggagatcggaggtatttatcgacgagtatacgcgacgggatcggggatacgcggtagttttgttaggcggtgcgcgcgtcggaggaatgtaagtttttaggcgtcgggtcgcgttttttttcgtcgcggtttcgcgcggggcggaggatttttttgcgggggaggaatgcgaggaaggagacggcgttgcggtttttggaatgtggggggataggcggcggtcgcgttgcgtcgggatttcggaggggcgtggaggtcggttaggacgtaggggcgggcggcggaggtatcgcggggagagtttagggttgcggggcgttcgggtcgtcgggtcgttgggaagagttcggattttcgcggttgagttggaggtagttggcgttattcgggtcggagagatttaagtatcgatagttttttttatatttcgttttattttttttttttgcgtcgtttgtttttcggcgttgtagggtcgatttagtttagtttggaatttacggcgttcgttcgtttcgcgtttaggaatattgtgcgtttagcgtagatgt

SEQ ID NO: 6612 - DNA, 800 bp, Artificial Sequence
  chemically treated genomic DNA (Homo sapiens) CpG-island No: 6612
  unsure (612, 637, 649)
acatctacgctaaacgcacaatattcctaaacgcgaaacgaacgaacgccgtaaattccaaactaaactaaatcgaccctacaacgccgaaaaacaaacgacgcaaaaaaaaaaaataaaacgaaatataaaaaaaactatcgatacttaaatctctccgacccgaataacgccaactacctccaactcaaccgcgaaaatccgaactcttcccaacgacccgacgacccgaacgccccgcaaccctaaactctccccgcgatacctccgccgcccgcccctacgtcctaaccgacctccacgcccctccgaaatcccgacgcaacgcgaccgccgcctatccccccacattccaaaaaccgcaacgccgtctccttcctcgcattcctcccccgcaaaaaaatcctccgccccgcgcgaaaccgcgacgaaaaaaaacgcgacccgacgcctaaaaacttacattcctccgacgcgcgcaccgcctaacaaaactaccgcgtatccccgatcccgtcgcgtatactcgtcgataaatacctccgatctccgtatcaatcactatattcccccgttccccacgtccctcaatcgtccctctaataaatattnatccacaatatatattcgtatactnatccgtatatcnatttatatatcgaatacgtaaatcgactaaccctacctaaaactaataacgacgaaactaaacgacgaataataacgctaccataacctaacgataccgtataccatacatactactcacaaaatcgatactataactaaatactaaccac

SEQ ID NO: 6613 - DNA, 562 bp, Artificial Sequence
  chemically treated genomic DNA (Homo sapiens) CpG-island No: 6613
taggcgggtcgggttttcgtggttagatttatcgttagatcgttaattatcggtagttttttgttgcgtatttgcgtagtaattgttttagtacgcgcgtatttgaaatttgatgcggtaatgcgttgataatatcgcgttatttttttttttttatatcgcgcgtatacgtattgaattatttcgttttcgtagattttacggatttcggcgcgcgaagtgataatttttttttagtcggataattcggtttttgtacgatatttagtagttgatcgaggtggttttcggttggtcgataaatgcgaatggcgattgagttattttatttaggatatgcggtggaaatacggcggtaggttacgggaaaatcggtggtcgttaattatagttgggtaacggcggaataaagggagcgcgaaagcgttaaatgggtttatagcgttgtagtattaatacggaatatatatatatcgattaaattttttaaattaatgaggcgttattttttaattcgaagtgtaatagtaatataatatattttcgggacgttattatagta

SEQ ID NO: 6614 - DNA, 562 bp, Artificial Sequence
  chemically treated genomic DNA (Homo sapiens) CpG-island No: 6614
tactataataacgtcccgaaaatatattatattactattacacttcgaattaaaaaataacgcctcattaatttaaaaaatttaatcgatatatatatattccgtattaatactacaacgctataaacccatttaacgctttcgcgctccctttattccgccgttacccaactataattaacgaccaccgattttcccgtaacctaccgccgtatttccaccgcatatcctaaataaaataactcaatcgccattcgcatttatcgaccaaccgaaaaccacctcgatcaactactaaatatcgtacaaaaaccgaattatccgactaaaaaaaaattatcacttcgcgcgccgaaatccgtaaaatctacgaaaacgaaataattcaatacgtatacgcgcgatataaaaaaaaaaaaataacgcgatattatcaacgcattaccgcatcaaatttcaaatacgcgcgtactaaaacaattactacgcaaatacgcaacaaaaaactaccgataattaacgatctaacgataaatctaaccacgaaaacccgacccgccta

SEQ ID NO: 6615 - DNA, 562 bp, Artificial Sequence
  chemically treated genomic DNA (Homo sapiens) CpG-island No: 6615
tgttgtggtagcgtttcgaggatgtgttgtgttgttgttgtatttcgggttggagggtggcgttttattgatttgggagatttagtcggtgtgtgtatatttcgtgttggtgttgtagcgttatgggtttatttggcgttttcgcgttttttttgtttcgtcgttgtttaattgtggttaacggttatcggttttttcgtggtttgtcgtcgtgtttttatcgtatattttgggtgaagtggtttagtcgttattcgtatttatcgattagtcgaaaattatttcgattagttgttggatatcgtgtaggggtcggattattcgattgaagggaaattattatttcgcgcgtcgagattcgtaaaatttacgagaacggagtggtttagtgcgtatgcgcgcggtgtggaagaaagaagatggcgcggtgttattagcgtattgtcgtattaggttttaggtgcgcgcgtattggagtaattgttgcgtaaatgcgtaataaaaagttgtcgatggttgacgatttggcgatgaatttgattacgagaattcgattcgtttg

SEQ ID NO: 6616 - DNA, 562 bp, Artificial Sequence
  chemically treated genomic DNA (Homo sapiens) CpG-island No: 6616
caaacgaatcgaattctcgtaatcaaattcatcgccaaatcgtcaaccatcgacaactttttattacgcatttacgcaacaattactccaatacgcgcgcacctaaaacctaatacgacaatacgctaataacaccgcgccatcttctttcttccacaccgcgcgcatacgcactaaaccactccgttctcgtaaattttacgaatctcgacgcgcgaaataataatttcccttcaatcgaataatccgacccctacacgatatccaacaactaatcgaaataattttcgactaatcgataaatacgaataacgactaaaccacttcacccaaaatatacgataaaaacacgacgacaaaccacgaaaaaaccgataaccgttaaccacaattaaacaacgacgaaacaaaaaaaacgcgaaaacgccaaataaacccataacgctacaacaccaacacgaaatatacacacaccgactaaatctcccaaatcaataaaacgccaccctccaacccgaaatacaacaacaacacaacacatcctcgaaacgctaccacaaca

SEQ ID NO: 6617 - DNA, 1137 bp, Artificial Sequence
  chemically treated genomic DNA (Homo sapiens) CpG-island No: 6617
  unsure (3)
gtnacgtttaataatttaacgttattacgtatatttttgcgtataaacgatattcgcgcgcgtgtacgtatagtacgtatatacgtttttcgtacgtttaacgaaacgtttttatatatatatatatatacgtttttgttttacgtgtaaattacgtgcgtatatatttacgttttttgtatatttataagcgtatattgtacgtattttattattagttttacgttttttttatttatattcgttttatatacgagatattcgttttattgtttatttacgtatacgtcgtgtcgtttttttgttttttatcgtagtgataatgcgcgttttttttaagtatcggcgatttatatatatttttaatttcgatacggttttattgatttatttgtattatatttttgcgtttagatattttatttacgtgtttcgttgtgcgattcgcgcgttttatcgttggtcgcggtcgcgaattcgtatcgtattttcgtttcggatatcgtttcggtcgttaggtacgcgatcgtattacgtacgcgttttttgagttttttttgtttttttcgtcgcgtcgcggttttttcgcgtttgggcggcgcgtcgacgttcgtagtttttttttttttcgtagtcgtttggtcgcgtgttcgtttttgaagtcgttatcgttttgatcggttgttttttcgttttatggcggttacgtacgcgattgcggtattttcgggggttttacgttcgatagtggtatgtgttttttagtcgtttgttagtcgtcgcgcgtagttcgttggcgcgttcgttgattgacgtggtttttgtttttggcgcggttcgttttcgatgcgttatcgaattttcgcgcgttaggtttcgcgggaggatttcgtagcgtttcgttatatcgggtttcgcgttttagtcgttttcgtacgttgggcgtttttacgcgtcgttcgtgttcggttgtcgtttggtttcgtttttcggggggacgcgttcgattgtcgcgtttttggcgcgttaggcggcgcgcgtgttttgggtttttttcggcgtcgggggtttttggggttgagtgtcgcgcggtatagcgcgttttgtttttattcggtaacggtagttttcgcgtcg

SEQ ID NO: 6618 - DNA, 1137 bp, Artificial Sequence
  chemically treated genomic DNA (Homo sapiens) CpG-island No: 6618
  unsure (1135)
cgacgcgaaaactaccgttaccgaataaaaacaaaacgcgctataccgcgcgacactcaaccccaaaaacccccgacgccgaaaaaaacccaaaacacgcgcgccgcctaacgcgccaaaaacgcgacaatcgaacgcgtccccccgaaaaacgaaaccaaacgacaaccgaacacgaacgacgcgtaaaaacgcccaacgtacgaaaacgactaaaacgcgaaacccgatataacgaaacgctacgaaatcctcccgcgaaacctaacgcgcgaaaattcgataacgcatcgaaaacgaaccgcgccaaaaacaaaaaccacgtcaatcaacgaacgcgccaacgaactacgcgcgacgactaacaaacgactaaaaaacacataccactatcgaacgtaaaacccccgaaaataccgcaatcgcgtacgtaaccgccataaaacgaaaaaacaaccgatcaaaacgataacgacttcaaaaacgaacacgcgaccaaacgactacgaaaaaaaaaaaaactacgaacgtcgacgcgccgcccaaacgcgaaaaaaccgcgacgcgacgaaaaaaacaaaaaaaactcaaaaaacgcgtacgtaatacgatcgcgtacctaacgaccgaaacgatatccgaaacgaaaatacgatacgaattcgcgaccgcgaccaacgataaaacgcgcgaatcgcacaacgaaacacgtaaataaaatatctaaacgcaaaaatataatacaaataaatcaataaaaccgtatcgaaattaaaaatatatataaatcgccgatacttaaaaaaaacgcgcattatcactacgataaaaaacaaaaaaacgacacgacgtatacgtaaataaacaataaaacgaatatctcgtatataaaacgaatataaataaaaaaaacgtaaaactaataataaaatacgtacaatatacgcttataaatatacaaaaaacgtaaatatatacgcacgtaatttacacgtaaaacaaaaacgtatatatatatatatataaaaacgtttcgttaaacgtacgaaaaacgtatatacgtactatacgtacacgcgcgcgaatatcgtttatacgcaaaaatatacgtaataacgttaaattattaaacgtnac

SEQ ID NO: 6619 - DNA, 1137 bp, Artificial Sequence
  chemically treated genomic DNA (Homo sapiens) CpG-island No: 6619
  unsure (1135)
cggcgcgggggttatcgttgtcgggtggagatagggcgcgttgtgtcgcgcggtatttagttttaggggttttcggcgtcgagggggatttaggatacgcgcgtcgtttggcgcgttaggggcgcggtaatcggacgcgttttttcgggggacgaaattaggcggtagtcgagtacgggcggcgcgtgaaggcgtttagcgtgcgagggcggttgagacgcggggttcggtatggcggggcgttgcggagttttttcgcggggtttggcgcgcgaaggttcggtggcgtatcgagggcgggtcgcgttaggggtagaaattacgttaattagcgggcgcgttaacgggttacgcgcggcggttagtaaacggttagggggtatatattattgtcgagcgtggggttttcgaaagtgtcgtagtcgcgtgcgtggtcgttatgaagcggaggagtagtcggttagggcgatgacggttttaagggcgagtacgcggttaagcggttacgaggagaggaggggttgcgagcgtcgacgcgtcgtttaggcgcgagagagtcgcggcgcggcggagaaggtaggggagatttaaggggcgcgtgcgtggtgcggtcgcgtgtttggcggtcgaagcggtgttcgaagcgggggtgcggtgcgggttcgcggtcgcggttagcggtggagcgcgcgggtcgtatagcgagatacgtgggtgagatgtttggacgtagggatgtggtgtaagtgggttagtgaggtcgtgtcggggttgagagtgtgtgtgagtcgtcggtgtttgagggaggcgcgtattgttattgcgatgggagatagggaggcggtacggcgtgtgcgtaggtggatagtagagcgggtgtttcgtgtgtgggacgggtgtaagtgaggagagcgtggggttggtgatgaggtgcgtgtagtgtgcgtttgtaggtgtgtagagggcgtgggtgtgtgcgtacgtgatttgtacgtggggtagaggcgtgtgtgtgtgtgtgtgtagaggcgtttcgttaggcgtgcggagagcgtgtgtgcgtgttgtgcgtgtacgcgcgcggatatcgtttgtgcgtaagagtgtgcgtagtgacgttaggttgttgggcgtngt

SEQ ID NO: 6620 - DNA, 1137 bp, Artificial Sequence
  chemically treated genomic DNA (Homo sapiens) CpG-island No: 6620
  unsure (3)
acnacgcccaacaacctaacgtcactacgcacactcttacgcacaaacgatatccgcgcgcgtacacgcacaacacgcacacacgctctccgcacgcctaacgaaacgcctctacacacacacacacacacgcctctaccccacgtacaaatcacgtacgcacacacccacgccctctacacacctacaaacgcacactacacgcacctcatcaccaaccccacgctctcctcacttacacccgtcccacacacgaaacacccgctctactatccacctacgcacacgccgtaccgcctccctatctcccatcgcaataacaatacgcgcctccctcaaacaccgacgactcacacacactctcaaccccgacacgacctcactaacccacttacaccacatccctacgtccaaacatctcacccacgtatctcgctatacgacccgcgcgctccaccgctaaccgcgaccgcgaacccgcaccgcacccccgcttcgaacaccgcttcgaccgccaaacacgcgaccgcaccacgcacgcgccccttaaatctcccctaccttctccgccgcgccgcgactctctcgcgcctaaacgacgcgtcgacgctcgcaacccctcctctcctcgtaaccgcttaaccgcgtactcgcccttaaaaccgtcatcgccctaaccgactactcctccgcttcataacgaccacgcacgcgactacgacactttcgaaaaccccacgctcgacaataatatataccccctaaccgtttactaaccgccgcgcgtaacccgttaacgcgcccgctaattaacgtaatttctacccctaacgcgacccgccctcgatacgccaccgaaccttcgcgcgccaaaccccgcgaaaaaactccgcaacgccccgccataccgaaccccgcgtctcaaccgccctcgcacgctaaacgccttcacgcgccgcccgtactcgactaccgcctaatttcgtcccccgaaaaaacgcgtccgattaccgcgcccctaacgcgccaaacgacgcgcgtatcctaaatccccctcgacgccgaaaacccctaaaactaaataccgcgcgacacaacgcgccctatctccacccgacaacgataacccccgcgccg

SEQ ID NO: 6621 - DNA, 500 bp, Artificial Sequence
  chemically treated genomic DNA (Homo sapiens) CpG-island No: 6621
tggattgtcgcgtgttgtgggtattgtacgaggtgcgtttttatttttagcggttaagagggtttataagatcgaatttaattttttagaagtttacgcgatatttacgtttttaaattaaggtttttcgcgcgtacggtttgttgggagatgtagtttattatttatatattagttattttgatgttttggaagagagcgcggtcgttacgttggttttgtatttttaggagacgttcgtagttttcgcgttttttttcggttaattcgcggaagaagtggtttacgttttttagagttatattatcgcggtcgaaatagaagttttacgggaagagatggaggtaataatggttagcgggaggcgaggttaaggggatttcgttttttgtttattcgatcgtataaagaaggttggcgcgtgtagtgagggtcggaggtgcgtagttggaggaaattagggttaggggcgttttggggatttattagagagaggtagg

SEQ ID NO: 6622 - DNA, 500 bp, Artificial Sequence
  chemically treated genomic DNA (Homo sapiens) CpG-island No: 6622
cctacctctctctaataaatccccaaaacgcccctaaccctaatttcctccaactacgcacctccgaccctcactacacgcgccaaccttctttatacgatcgaataaacaaaaaacgaaatccccttaacctcgcctcccgctaaccattattacctccatctcttcccgtaaaacttctatttcgaccgcgataatataactctaaaaaacgtaaaccacttcttccgcgaattaaccgaaaaaaaacgcgaaaactacgaacgtctcctaaaaatacaaaaccaacgtaacgaccgcgctctcttccaaaacatcaaaataactaatatataaataataaactacatctcccaacaaaccgtacgcgcgaaaaaccttaatttaaaaacgtaaatatcgcgtaaacttctaaaaaattaaattcgatcttataaaccctcttaaccgctaaaaataaaaacgcacctcgtacaatacccacaacacgcgacaatcca

SEQ ID NO: 6623 - DNA, 500 bp, Artificial Sequence
  chemically treated genomic DNA (Homo sapiens) CpG-island No: 6623
tttatttttttttggtgagtttttaggacgtttttggttttaattttttttagttgcgtattttcggtttttattgtacgcgttagttttttttgtgcggtcgggtaaatagagggcggagtttttttggtttcgtttttcgttaattattgttgtttttattttttttcgtagggtttttatttcgatcgcgatgatgtggttttggaaggcgtgagttatttttttcgcgaattggtcgaggagaagcgcgagggttacgagcgttttttgaagatgtaaaattagcgtggcggtcgcgtttttttttaggatattaaggtaattagtgtgtgggtaatggattatattttttagtaggtcgtgcgcgcgaggagttttgatttgagggcgtaggtgtcgcgtgggtttttgggagattgagttcggttttgtgagtttttttaatcgttggaaatagaggcgtatttcgtgtagtgtttataatacgcggtagttta

SEQ ID NO: 6624 - DNA, 500 bp, Artificial Sequence
  chemically treated genomic DNA (Homo sapiens) CpG-island No: 6624
taaactaccgcgtattataaacactacacgaaatacgcctctatttccaacgattaaaaaaactcacaaaaccgaactcaatctcccaaaaacccacgcgacacctacgccctcaaatcaaaactcctcgcgcgcacgacctactaaaaaatataatccattacccacacactaattaccttaatatcctaaaaaaaaacgcgaccgccacgctaattttacatcttcaaaaaacgctcgtaaccctcgcgcttctcctcgaccaattcgcgaaaaaaataactcacgccttccaaaaccacatcatcgcgatcgaaataaaaaccctacgaaaaaaaataaaaacaacaataattaacgaaaaacgaaaccaaaaaaactccgccctctatttacccgaccgcacaaaaaaaactaacgcgtacaataaaaaccgaaaatacgcaactaaaaaaaattaaaaccaaaaacgtcctaaaaactcaccaaaaaaaaataaa

SEQ ID NO: 6625 - DNA, 786 bp, Artificial Sequence
  chemically treated genomic DNA (Homo sapiens) CpG-island No: 6625
gattagcgtacgtttaaacggtttggatagatatttcgtagtatcgttttgtagggtcgatttttagaggattttttcgtttgaatatcgttattattagcgtgttgttgacgttggtcgataacgatacgtcggtgtggttttttattttattaaataacgatatcgttaattagagtttgcgtttttatattaacgcgtcgttggttagttagtcggaataggcgattttcgcggtgacggatgaggcgatttttagcgaatagtttaacgttttttttatcggtatcgtcgttgcgtcggaagcgggtgcgacgttgattttataggtcgttagtttgagcggcggacgtatgttgcgttttattggtgcgggtattgtcgaagaacgaatgatcgtttcgtagttgtcggagtgtattttgtacgaatttatcgagcgttcgtattcgttttcgttcggtatcgatttgattttgatttgtggcgagcgtttgttggttatttcgcgaattatttatgtggatgtgtgtttatgtacgttgtcgtgaaagggggcgagaatgcgatcgacgtcgtttattttttgtaagagagtcgacgtcgaggcgatatcgatttgttcgaattgagcgtcgtttagattgaatagtagtttaatttcgcggtagatcgcgtgatgatcgaaggcgtattgtcgacgtttgattggtcgttcgtagttattagttgattaataggcgtaaaaaaatcgggggaattattttataagcgttaatttaaggg

SEQ ID NO: 6626 - DNA, 786 bp, Artificial Sequence
  chemically treated genomic DNA (Homo sapiens) CpG-island No: 6626
cccttaaattaacgcttataaaataattcccccgatttttttacgcctattaatcaactaataactacgaacgaccaatcaaacgtcgacaatacgccttcgatcatcacgcgatctaccgcgaaattaaactactattcaatctaaacgacgctcaattcgaacaaatcgatatcgcctcgacgtcgactctcttacaaaaaataaacgacgtcgatcgcattctcgccccctttcacgacaacgtacataaacacacatccacataaataattcgcgaaataaccaacaaacgctcgccacaaatcaaaatcaaatcgataccgaacgaaaacgaatacgaacgctcgataaattcgtacaaaatacactccgacaactacgaaacgatcattcgttcttcgacaatacccgcaccaataaaacgcaacatacgtccgccgctcaaactaacgacctataaaatcaacgtcgcacccgcttccgacgcaacgacgataccgataaaaaaaacgttaaactattcgctaaaaatcgcctcatccgtcaccgcgaaaatcgcctattccgactaactaaccaacgacgcgttaatataaaaacgcaaactctaattaacgatatcgttatttaataaaataaaaaaccacaccgacgtatcgttatcgaccaacgtcaacaacacgctaataataacgatattcaaacgaaaaaatcctctaaaaatcgaccctacaaaacgatactacgaaatatctatccaaaccgtttaaacgtacgctaatc

SEQ ID NO: 6627 - DNA, 786 bp, Artificial Sequence
  chemically treated genomic DNA (Homo sapiens) CpG-island No: 6627
tttttaagttagcgtttatgggataattttttcggtttttttacgtttgttaattagttaatggttgcgggcgattaattaagcgtcggtaatgcgttttcggttattacgcgatttatcgcgaggttaagttgttgtttaatttgggcgacgtttagttcgggtaaatcggtatcgtttcggcgtcggtttttttgtagagagtgggcggcgtcgatcgtattttcgtttttttttacggtaacgtatatgagtatatatttatatgagtggttcgcggaatagttagtaggcgttcgttataggttaggattaggtcgatgtcgagcgggaacggatgcgggcgttcggtgagttcgtgtagaatgtatttcggtagttgcggagcgattattcgtttttcggtaatattcgtattagtaaggcgtaatatgcgttcgtcgtttaggttggcgatttgtaaaattagcgtcgtattcgttttcggcgtaacggcggtgtcggtggaaagggcgttgagttgttcgttggaaatcgttttattcgttatcgcgaaggtcgtttgtttcggttggttgattagcggcgcgttggtatgaaaacgtaggttttggttgacgatatcgttatttaatggggtagaaagttatatcggcgtgtcgttatcggttagcgttagtagtacgttggtggtggcgatatttagacggggggattttttaagagtcgattttgtagagcgatgttgcggggtatttatttagatcgtttggacgtacgttggtt

SEQ ID NO: 6628 - DNA, 786 bp, Artificial Sequence
  chemically treated genomic DNA (Homo sapiens) CpG-island No: 6628
aaccaacgtacgtccaaacgatctaaataaataccccgcaacatcgctctacaaaatcgactcttaaaaaatccccccgtctaaatatcgccaccaccaacgtactactaacgctaaccgataacgacacgccgatataactttctaccccattaaataacgatatcgtcaaccaaaacctacgttttcataccaacgcgccgctaatcaaccaaccgaaacaaacgaccttcgcgataacgaataaaacgatttccaacgaacaactcaacgccctttccaccgacaccgccgttacgccgaaaacgaatacgacgctaattttacaaatcgccaacctaaacgacgaacgcatattacgccttactaatacgaatattaccgaaaaacgaataatcgctccgcaactaccgaaatacattctacacgaactcaccgaacgcccgcatccgttcccgctcgacatcgacctaatcctaacctataacgaacgcctactaactattccgcgaaccactcatataaatatatactcatatacgttaccgtaaaaaaaaacgaaaatacgatcgacgccgcccactctctacaaaaaaaccgacgccgaaacgataccgatttacccgaactaaacgtcgcccaaattaaacaacaacttaacctcgcgataaatcgcgtaataaccgaaaacgcattaccgacgcttaattaatcgcccgcaaccattaactaattaacaaacgtaaaaaaaccgaaaaaattatcccataaacgctaacttaaaaa

SEQ ID NO: 6629 - DNA, 807 bp, Artificial Sequence
  chemically treated genomic DNA (Homo sapiens) CpG-island No: 6629
gatttggcgtaggttatgatgttcgttttttataagtttattagtagtagtttcgtgaacgattatgtaggaatttttttcgcgtgtgtagttttagatatggacgaacggcgtatgttaaatgcgtcgtttagtttgcgtttgatattggtggaaaaattgcgtcgatgttggatttcggttattcggtattgacgtagatcgcgtagtattggcgttgttgtaaaaaatggattatcgttagtattttgttttttcgggtttttttagtaaatgtcgtttgtatgagtggtttttagttcgtgtcgcggaaggaaaaggcgttaacgtaacgaggtttattggtgtaggtaggtgatagagcgagtaaatttttattcgttggcgtgttggggcgtataacgtttgtcgttgtttgggcgttgttttatcgttttggaggagttgcgttgggggtatttggcgatgtttgtcgtttgggaagttcgtaagcggtggcgttgttttgggtgatttgttcgagaaagcgatataatatttggtagagagtattatgcggtatcgattacgcgttattattattattagtggtttgttttttcgtcgtttcgacgggcggggagtatgttgattttttaagttggttgggaaatggattacggtagataaataattcgtttgttggttagtgatttaacgttgtaaattgtcgcgttggggatgttacgattttgtttagcgtagcgtttgcgggggtaatgttcgaggaaattttttttgtaaatttggcgtaaataatagttatat

SEQ ID NO: 6630 - DNA, 807 bp, Artificial Sequence
  chemically treated genomic DNA (Homo sapiens) CpG-island No: 6630
atataactattatttacgccaaatttacaaaaaaaatttcctcgaacattacccccgcaaacgctacgctaaacaaaatcgtaacatccccaacgcgacaatttacaacgttaaatcactaaccaacaaacgaattatttatctaccgtaatccatttcccaaccaacttaaaaaatcaacatactccccgcccgtcgaaacgacgaaaaaacaaaccactaataataataataacgcgtaatcgataccgcataatactctctaccaaatattatatcgctttctcgaacaaatcacccaaaacaacgccaccgcttacgaacttcccaaacgacaaacatcgccaaatacccccaacgcaactcctccaaaacgataaaacaacgcccaaacaacgacaaacgttatacgccccaacacgccaacgaataaaaatttactcgctctatcacctacctacaccaataaacctcgttacgttaacgccttttccttccgcgacacgaactaaaaaccactcatacaaacgacatttactaaaaaaacccgaaaaaacaaaatactaacgataatccattttttacaacaacgccaatactacgcgatctacgtcaataccgaataaccgaaatccaacatcgacgcaatttttccaccaatatcaaacgcaaactaaacgacgcatttaacatacgccgttcgtccatatctaaaactacacacgcgaaaaaaattcctacataatcgttcacgaaactactactaataaacttataaaaaacgaacatcataacctacgccaaatc

SEQ ID NO: 6631 - DNA, 807 bp, Artificial Sequence
  chemically treated genomic DNA (Homo sapiens) CpG-island No: 6631
atgtaattattatttacgttaaatttatagagaagattttttcgagtattgttttcgtagacgttgcgttgaatagagtcgtggtatttttagcgcgatagtttgtagcgttgggttattgattagtaaacgggttgtttatttgtcgtggtttattttttagttaatttaaaaaattagtatgtttttcgttcgtcggaacggcgaagaggtaaattattgatggtaatagtgacgcgtggtcggtgtcgtatgatattttttgttagatgttgtgtcgttttttcgagtaaattatttagaataacgttatcgtttgcgggttttttagacggtaggtatcgttaaatgtttttagcgtaatttttttagaacgataaaatagcgtttaggtaacgataggcgttatacgttttagtacgttagcgggtaaaaatttgttcgttttgttatttgtttgtattagtaggtttcgttgcgttaacgtttttttttttcgcgatacgggttgaaaattatttatataggcggtatttgttgggggagttcgggaaagtagagtgttggcggtgatttattttttgtagtagcgttagtgttgcgcgatttgcgttagtgtcggatgatcgggatttagtatcgacgtagtttttttattaatgttagacgtaggttaagcggcgtatttaatatgcgtcgttcgtttatgtttgaagttgtatacgcgaaagaagtttttgtatagtcgtttacgaaattgttgttgatgggtttgtggaaggcgggtattatagtttgcgttagatt

SEQ ID NO: 6632 - DNA, 807 bp, Artificial Sequence
  chemically treated genomic DNA (Homo sapiens) CpG-island No: 6632
aatctaacgcaaactataatacccgccttccacaaacccatcaacaacaatttcgtaaacgactatacaaaaacttctttcgcgtatacaacttcaaacataaacgaacgacgcatattaaatacgccgcttaacctacgtctaacattaataaaaaaactacgtcgatactaaatcccgatcatccgacactaacgcaaatcgcgcaacactaacgctactacaaaaaataaatcaccgccaacactctactttcccgaactcccccaacaaataccgcctatataaataattttcaacccgtatcgcgaaaaaaaaaaacgttaacgcaacgaaacctactaatacaaacaaataacaaaacgaacaaatttttacccgctaacgtactaaaacgtataacgcctatcgttacctaaacgctattttatcgttctaaaaaaattacgctaaaaacatttaacgatacctaccgtctaaaaaacccgcaaacgataacgttattctaaataatttactcgaaaaaacgacacaacatctaacaaaaaatatcatacgacaccgaccacgcgtcactattaccatcaataatttacctcttcgccgttccgacgaacgaaaaacatactaattttttaaattaactaaaaaataaaccacgacaaataaacaacccgtttactaatcaataacccaacgctacaaactatcgcgctaaaaataccacgactctattcaacgcaacgtctacgaaaacaatactcgaaaaaatcttctctataaatttaacgtaaataataattacat

SEQ ID NO: 6633 - DNA, 575 bp, Artificial Sequence
  chemically treated genomic DNA (Homo sapiens) CpG-island No: 6633
attcgtcgtttgatttagtttcgataatttaattgtcgttcgtcgtcgataatcgcgatgttgttatcgtagtatgtcgcgttagaatgtcggttagcggtaaattttgttagtagttttttttcgatagcgacgggtaaattttttcggttagcgggtgaatggatgtttattttcgttttttaatgtaatttaaaaacgtttaatatggtagaagtttgacgtttgtttcgcgttatttatttaacggtgacgacgtaggttaattttcgtttcggtaaatagacgtatttgattttttcgtagtttcgttagcggatggttattatttattcgtcgttattttcgttgttatattaattataatgtcgttaaatagttcgcggtcgaacggttttagtttagtaatatttgggtcgcggtttgatgcgggaaatcgtttagcgcgggggtcggatgagtagataggttagagttagtgcgtttttttgcgaattcgttttattttaaagggagttgcgagatgttatagcgtcggcgtggtgattagttgtggaaagaaggaacgtgtaatt

SEQ ID NO: 6634 - DNA, 575 bp, Artificial Sequence
  chemically treated genomic DNA (Homo sapiens) CpG-island No: 6634
aattacacgttccttctttccacaactaatcaccacgccgacgctataacatctcgcaactccctttaaaataaaacgaattcgcaaaaaaacgcactaactctaacctatctactcatccgacccccgcgctaaacgatttcccgcatcaaaccgcgacccaaatattactaaactaaaaccgttcgaccgcgaactatttaacgacattataattaatataacaacgaaaataacgacgaataaataataaccatccgctaacgaaactacgaaaaaatcaaatacgtctatttaccgaaacgaaaattaacctacgtcgtcaccgttaaataaataacgcgaaacaaacgtcaaacttctaccatattaaacgtttttaaattacattaaaaaacgaaaataaacatccattcacccgctaaccgaaaaaatttacccgtcgctatcgaaaaaaaactactaacaaaatttaccgctaaccgacattctaacgcgacatactacgataacaacatcgcgattatcgacgacgaacgacaattaaattatcgaaactaaatcaaacgacgaat

SEQ ID NO: 6635 - DNA, 575 bp, Artificial Sequence
  chemically treated genomic DNA (Homo sapiens) CpG-island No: 6635
agttatacgttttttttttttatagttgattattacgtcgacgttgtggtatttcgtaattttttttaaggtaaagcgaattcgtaagaaaacgtattgattttggtttgtttgtttattcgattttcgcgttgagcggtttttcgtattaggtcgcgatttaggtattgttgaattggaatcgttcgatcgcgaattgtttggcggtattgtggttggtgtgatagcgaaggtaacggcgaatgggtggtgattattcgttggcgaagttgcgggaaaattaggtgcgtttgtttgtcggagcggggattggtttgcgtcgttatcgttgggtgagtggcgcgaaataggcgttaaatttttattatgttgaacgtttttggattgtattaaggagcgaggatgagtatttatttattcgttggtcggaagagtttgttcgtcgttatcgggaaaaagttattggtaggatttgtcgttgatcgatattttgacgcgatatgttgcggtgatagtatcgcggttatcgacggcgagcgatagttgagttatcgggattgaattaggcggcggat

SEQ ID NO: 6636 - DNA, 575 bp, Artificial Sequence
  chemically treated genomic DNA (Homo sapiens) CpG-island No: 6636
atccgccgcctaattcaatcccgataactcaactatcgctcgccgtcgataaccgcgatactatcaccgcaacatatcgcgtcaaaatatcgatcaacgacaaatcctaccaataactttttcccgataacgacgaacaaactcttccgaccaacgaataaataaatactcatcctcgctccttaatacaatccaaaaacgttcaacataataaaaatttaacgcctatttcgcgccactcacccaacgataacgacgcaaaccaatccccgctccgacaaacaaacgcacctaattttcccgcaacttcgccaacgaataatcaccacccattcgccgttaccttcgctatcacaccaaccacaataccgccaaacaattcgcgatcgaacgattccaattcaacaatacctaaatcgcgacctaatacgaaaaaccgctcaacgcgaaaatcgaataaacaaacaaaccaaaatcaatacgttttcttacgaattcgctttaccttaaaaaaaattacgaaataccacaacgtcgacgtaataatcaactataaaaaaaaaaaacgtataact

SEQ ID NO: 6637 - DNA, 1052 bp, Artificial Sequence
  chemically treated genomic DNA (Homo sapiens) CpG-island No: 6637
ttcgtatcgtttggaatatcggacggtttttgttagtatggtttgaatatggcgtttaatattggttttcgtttcgttattaatattggatcgatatcggtggttaggcgattcggattatttattcggtattggttattgcgtcgcgtagtatttttaacgtgtggtcggtaattttatttgtaggtatagtacgcgtagcgtcgaataacgttgattcgtattgtcgaagtcgaggttagtatatttacgacgatttgttcggttagtgttgaagaatgataattatcgcgtttatgtcgtcggttttagcgatgagcggaataggggattttgagcgtttaggcggttggcgatattgcgttgtagtaacgtagtatttcggttgaatcggtaaatattatttcgcgtacgcgattattattcgtagttgcgcgtttacggttttatttcgatttggtagtaattgtattacgttggcggtatattcgtttttagtaaaatggcgattttttgcgcggtaatagcggcgtttgttttgtcggttttgttagtacgttgttatttgtcgttatgcggcggcgatttgttcggtgaaaatagttagcgggaagttttacggatgatatatattataggttttaatggacggtgggtttcgttagcgaaatttttcgtatttgttcggcgtagtagtggagaaaatcgatcgtttcgcgtattcggtaatggcgttattgaaggttttttcggttttacgtattagaatataattagttgttgtatttggttttttattagtacggtagcgcggtgtaaatcgttgcgcgtttagtcggaggcgtggtaaattagattggcgcgttataatcgtattttttagcgtttgttttattttacgcggcgtggttttacgttatagtttataatatttttcggtttcgtagggttaataacgggcgatatttatttgtcgttatcggttgttttagtattggtaaggtttgttattttttagtgtattattgagtagggtagaggagagcgaggtt

SEQ ID NO: 6638 - DNA, 1052 bp, Artificial Sequence
  chemically treated genomic DNA (Homo sapiens) CpG-island No: 6638
aacctcgctctcctctaccctactcaataatacactaaaaaataacaaaccttaccaatactaaaacaaccgataacgacaaataaatatcgcccgttattaaccctacgaaaccgaaaaatattataaactataacgtaaaaccacgccgcgtaaaataaaacaaacgctaaaaaatacgattataacgcgccaatctaatttaccacgcctccgactaaacgcgcaacgatttacaccgcgctaccgtactaataaaaaaccaaatacaacaactaattatattctaatacgtaaaaccgaaaaaaccttcaataacgccattaccgaatacgcgaaacgatcgattttctccactactacgccgaacaaatacgaaaaatttcgctaacgaaacccaccgtccattaaaacctataatatatatcatccgtaaaacttcccgctaactattttcaccgaacaaatcgccgccgcataacgacaaataacaacgtactaacaaaaccgacaaaacaaacgccgctattaccgcgcaaaaaatcgccattttactaaaaacgaatataccgccaacgtaatacaattactaccaaatcgaaataaaaccgtaaacgcgcaactacgaataataatcgcgtacgcgaaataatatttaccgattcaaccgaaatactacgttactacaacgcaatatcgccaaccgcctaaacgctcaaaatcccctattccgctcatcgctaaaaccgacgacataaacgcgataattatcattcttcaacactaaccgaacaaatcgtcgtaaatatactaacctcgacttcgacaatacgaatcaacgttattcgacgctacgcgtactatacctacaaataaaattaccgaccacacgttaaaaatactacgcgacgcaataaccaataccgaataaataatccgaatcgcctaaccaccgatatcgatccaatattaataacgaaacgaaaaccaatattaaacgccatattcaaaccatactaacaaaaaccgtccgatattccaaacgatacgaa

SEQ ID NO: 6639 - DNA, 1052 bp, Artificial Sequence
  chemically treated genomic DNA (Homo sapiens) CpG-island No: 6639
ggtttcgtttttttttgttttgtttaatagtgtattgaaaaatggtaggttttgttaatgttggaataatcggtagcggtaggtgaatgtcgttcgttattaattttgcggaatcgaaagatattgtgggttatggcgtgaagttacgtcgcgtgaagtagaataggcgttggaaagtgcggttataacgcgttaatttggtttgttacgttttcggttgaacgcgtagcgatttgtatcgcgttgtcgtgttgatggaaagttagatgtagtaattgattgtattttggtgcgtgaggtcggaaaaatttttagtaacgttattgtcgaatgcgcgaagcggtcgattttttttattattacgtcggataggtgcgggagatttcgttaacgaaatttatcgtttattagggtttgtggtgtgtattattcgtggaatttttcgttggttatttttatcgggtagatcgtcgtcgtatggcggtaggtaatagcgtgttggtaaaatcggtagaataaacgtcgttattgtcgcgtaagggatcgttattttgttggaagcgggtgtatcgttagcgtggtgtaattgttgttaggtcggggtgaaatcgtgggcgcgtaattgcgggtgatgatcgcgtgcgcggggtgatgtttatcggtttaatcgaagtgttacgttattgtagcgtaatatcgttagtcgtttggacgtttagggttttttatttcgtttatcgttgaaatcggcggtatgaacgcgatgattgttattttttagtattgatcgaataggtcgtcgtggatgtattggtttcggtttcgatagtgcgggttagcgttgttcggcgttgcgcgtgttgtgtttgtagatgagattgtcgattatacgttgaaaatgttgcgcggcgtaatggttaatgtcggatgggtaattcgggtcgtttgattatcgatatcggtttagtattgatagcgaagcgaaagttaatattgagcgttatatttagattatgttagtaaaggtcgttcggtgttttaggcggtgcggg

SEQ ID NO: 6640 - DNA, 1052 bp, Artificial Sequence
  chemically treated genomic DNA (Homo sapiens) CpG-island No: 6640
cccgcaccgcctaaaacaccgaacgacctttactaacataatctaaatataacgctcaatattaactttcgcttcgctatcaatactaaaccgatatcgataatcaaacgacccgaattacccatccgacattaaccattacgccgcgcaacattttcaacgtataatcgacaatctcatctacaaacacaacacgcgcaacgccgaacaacgctaacccgcactatcgaaaccgaaaccaatacatccacgacgacctattcgatcaatactaaaaaataacaatcatcgcgttcataccgccgatttcaacgataaacgaaataaaaaaccctaaacgtccaaacgactaacgatattacgctacaataacgtaacacttcgattaaaccgataaacatcaccccgcgcacgcgatcatcacccgcaattacgcgcccacgatttcaccccgacctaacaacaattacaccacgctaacgatacacccgcttccaacaaaataacgatcccttacgcgacaataacgacgtttattctaccgattttaccaacacgctattacctaccgccatacgacgacgatctacccgataaaaataaccaacgaaaaattccacgaataatacacaccacaaaccctaataaacgataaatttcgttaacgaaatctcccgcacctatccgacgtaataataaaaaaaatcgaccgcttcgcgcattcgacaataacgttactaaaaatttttccgacctcacgcaccaaaatacaatcaattactacatctaactttccatcaacacgacaacgcgatacaaatcgctacgcgttcaaccgaaaacgtaacaaaccaaattaacgcgttataaccgcactttccaacgcctattctacttcacgcgacgtaacttcacgccataacccacaatatctttcgattccgcaaaattaataacgaacgacattcacctaccgctaccgattattccaacattaacaaaacctaccatttttcaatacactattaaacaaaacaaaaaaaaacgaaacc

SEQ ID NO: 6641 - DNA, 511 bp, Artificial Sequence
  chemically treated genomic DNA (Homo sapiens) CpG-island No: 6641
tcggggcggattcgggttcgatttcgtcgtattaggtttagtatttagagacggtgttatcggaatatcgtattcgggaattttgagcgtttatgaggaagtcggagggagagtgacgaggacgttacggcggcgggaagcgatttttatttatataagagttttaaggtttgaaatttagaatacgttttcgatagggagttaggtttacgaagtcgcgttaaggattaaatatcgttattagacgtatcgtatcgttttatttttaagatagataggaatcgcgtcgtttttttatggtttatttgaagtaacggcgttttggaatttacgtaaagggaattttaaggtaataggtggaatttcggttttttatacgcgtggaaatcgcgtttaggaatggaaacgattattataggcgaattaattagattttagtttggtttagtttttggacgattagagatttgttcgtagtttaaagtcgtttttttgcgttaggacgtttatt

SEQ ID NO: 6642 - DNA, 511 bp, Artificial Sequence
  chemically treated genomic DNA (Homo sapiens) CpG-island No: 6642
aataaacgtcctaacgcaaaaaaacgactttaaactacgaacaaatctctaatcgtccaaaaactaaaccaaactaaaatctaattaattcgcctataataatcgtttccattcctaaacgcgatttccacgcgtataaaaaaccgaaattccacctattaccttaaaattccctttacgtaaattccaaaacgccgttacttcaaataaaccataaaaaaacgacgcgattcctatctatcttaaaaataaaacgatacgatacgtctaataacgatatttaatccttaacgcgacttcgtaaacctaactccctatcgaaaacgtattctaaatttcaaaccttaaaactcttatataaataaaaatcgcttcccgccgccgtaacgtcctcgtcactctccctccgacttcctcataaacgctcaaaattcccgaatacgatattccgataacaccgtctctaaatactaaacctaatacgacgaaatcgaacccgaatccgccccga

SEQ ID NO: 6643 - DNA, 511 bp, Artificial Sequence
  chemically treated genomic DNA (Homo sapiens) CpG-island No: 6643
ggtgagcgttttggcgtagggggacgattttgagttgcgggtaggtttttggtcgtttaggagttgggttaggttggggtttggttgattcgtttatagtggtcgtttttatttttgggcgcggtttttacgcgtgtgggaaatcggggttttatttattgttttgggattttttttgcgtgggttttaaggcgtcgttgttttaaatgggttatggaagggcggcgcggtttttgtttgttttgggggtggggcggtgcggtgcgtttggtggcggtgtttggtttttggcgcggtttcgtgggtttggttttttgtcgggggcgtgttttgggttttagattttggagtttttgtataggtgggagtcgtttttcgtcgtcgtagcgttttcgttatttttttttcgatttttttatgggcgtttagagttttcggatgcgatatttcggtgatatcgtttttgggtgttgggtttagtgcgacgaggtcgggttcgggttcgtttcgg

SEQ ID NO: 6644 - DNA, 511 bp, Artificial Sequence
  chemically treated genomic DNA (Homo sapiens) CpG-island No: 6644
ccgaaacgaacccgaacccgacctcgtcgcactaaacccaacacccaaaaacgatatcaccgaaatatcgcatccgaaaactctaaacgcccataaaaaaatcgaaaaaaaaataacgaaaacgctacgacgacgaaaaacgactcccacctatacaaaaactccaaaatctaaaacccaaaacacgcccccgacaaaaaaccaaacccacgaaaccgcgccaaaaaccaaacaccgccaccaaacgcaccgcaccgccccacccccaaaacaaacaaaaaccgcgccgcccttccataacccatttaaaacaacgacgccttaaaacccacgcaaaaaaaatcccaaaacaataaataaaaccccgatttcccacacgcgtaaaaaccgcgcccaaaaataaaaacgaccactataaacgaatcaaccaaaccccaacctaacccaactcctaaacgaccaaaaacctacccgcaactcaaaatcgtccccctacgccaaaacgctcacc

SEQ ID NO: 6645 - DNA, 518 bp, Artificial Sequence
  chemically treated genomic DNA (Homo sapiens) CpG-island No: 6645
ttacgttttcggaggcgatttgttttttttatcgcgcgtttcgaaagtattgttttttttcggggtttcgggttatcgattttatttatagagcggcgggaggattgtaggtacggtcggtttagggtattcggttcggcggaaaatgtagaggtcgcgttcgtttttaattaacggttttgattcgtttagcgtagttttcgacggacgtaggtttcgcgcggtatttatcggcgcgcgtcgtataatggcgttcgtcggtcggcggcgaagtgcgttattcgtcgtttcgaattataatttttagacgttttcgcggcgcgttagttgttttatttagcggcggttattttgattggtcggttaggggcggtaggtaagtcggggatagtaggaggaggatattcgtcgatgtttttcggcggttagttaggtaaggggaggtttttggtgagggacgttaggtcgtagggtttatattaatgtgggcggcgattcgagttgggagagagtcgtgt

SEQ ID NO: 6646 - DNA, 518 bp, Artificial Sequence
  chemically treated genomic DNA (Homo sapiens) CpG-island No: 6646
acacgactctctcccaactcgaatcgccgcccacattaatataaaccctacgacctaacgtccctcaccaaaaacctccccttacctaactaaccgccgaaaaacatcgacgaatatcctcctcctactatccccgacttacctaccgcccctaaccgaccaatcaaaataaccgccgctaaataaaacaactaacgcgccgcgaaaacgtctaaaaattataattcgaaacgacgaataacgcacttcgccgccgaccgacgaacgccattatacgacgcgcgccgataaataccgcgcgaaacctacgtccgtcgaaaactacgctaaacgaatcaaaaccgttaattaaaaacgaacgcgacctctacattttccgccgaaccgaataccctaaaccgaccgtacctacaatcctcccgccgctctataaataaaatcgataacccgaaaccccgaaaaaaaacaatactttcgaaacgcgcgataaaaaaaacaaatcgcctccgaaaacgtaa

SEQ ID NO: 6647 - DNA, 518 bp, Artificial Sequence
  chemically treated genomic DNA (Homo sapiens) CpG-island No: 6647
gtacgatttttttttagttcgggtcgtcgtttatattagtgtgggttttgcggtttagcgttttttattagaggtttttttttgtttagttgatcgtcgagggatatcgacgagtattttttttttgttgttttcggtttgtttgtcgtttttaatcggttagttaagatggtcgtcgttgggtgaggtagttggcgcgtcgcgggggcgtttgggagttgtagttcgggacggcgggtgacgtatttcgtcgtcggtcgacgggcgttattgtgcggcgcgcgtcggtgagtgtcgcgcgaaatttgcgttcgtcgggggttgcgttgggcgggttagaatcgttagttgggggcgagcgcggtttttgtatttttcgtcgagtcgggtattttgagtcggtcgtgtttgtagttttttcgtcgttttgtgggtggggtcggtgattcggaatttcgaggggagatagtgttttcggggcgcgcggtggagagaatagatcgttttcggaagcgtgg

SEQ ID NO: 6648 - DNA, 518 bp, Artificial Sequence
  chemically treated genomic DNA (Homo sapiens) CpG-island No: 6648
ccacgcttccgaaaacgatctattctctccaccgcgcgccccgaaaacactatctcccctcgaaattccgaatcaccgaccccacccacaaaacgacgaaaaaactacaaacacgaccgactcaaaatacccgactcgacgaaaaatacaaaaaccgcgctcgcccccaactaacgattctaacccgcccaacgcaacccccgacgaacgcaaatttcgcgcgacactcaccgacgcgcgccgcacaataacgcccgtcgaccgacgacgaaatacgtcacccgccgtcccgaactacaactcccaaacgcccccgcgacgcgccaactacctcacccaacgacgaccatcttaactaaccgattaaaaacgacaaacaaaccgaaaacaacaaaaaaaaaatactcgtcgatatccctcgacgatcaactaaacaaaaaaaaacctctaataaaaaacgctaaaccgcaaaacccacactaatataaacgacgacccgaactaaaaaaaaatcgtac

SEQ ID NO: 6649 - DNA, 517 bp, Artificial Sequence
  chemically treated genomic DNA (Homo sapiens) CpG-island No: 6649
atgcgagtcggaatttacgggtgacgttaaggaaagagcgggggcgtttagattagttcggagcgatttcgtttttagaggagtgattttaatcgttacggagcgttttatttattaggagaattacgtttttggttagattttcgttttagcggttcgatatgtttattatttaggtgaaatttattcgcggacgcgtttttttcgttttataaggattcggcggatttttattcgttaagattttttttcgaggaaacggaggtagcgtagggtttagggatgcgtcggtatttacggttgcggtcggcggtagttatgtttcgggcgattgcgtttgcgcggttgtcggataaggatgtgcgcgtgcgcggagttttcgagtttttttcgtttaacgtggggcggtcgcgggtatcgggttatttattattttggcgtggatttgttcggggcggacgcgtaggtatttatttttttttatggttttttttgattttaattcgatgttattatt

SEQ ID NO: 6650 - DNA, 517 bp, Artificial Sequence
  chemically treated genomic DNA (Homo sapiens) CpG-island No: 6650
aataataacatcgaattaaaatcaaaaaaaaccataaaaaaaaataaatacctacgcgtccgccccgaacaaatccacgccaaaataataaataacccgatacccgcgaccgccccacgttaaacgaaaaaaactcgaaaactccgcgcacgcgcacatccttatccgacaaccgcgcaaacgcaatcgcccgaaacataactaccgccgaccgcaaccgtaaataccgacgcatccctaaaccctacgctacctccgtttcctcgaaaaaaaatcttaacgaataaaaatccgccgaatccttataaaacgaaaaaaacgcgtccgcgaataaatttcacctaaataataaacatatcgaaccgctaaaacgaaaatctaaccaaaaacgtaattctcctaataaataaaacgctccgtaacgattaaaatcactcctctaaaaacgaaatcgctccgaactaatctaaacgcccccgctctttccttaacgtcacccgtaaattccgactcgcat

SEQ ID NO: 6651 - DNA, 517 bp, Artificial Sequence
  chemically treated genomic DNA (Homo sapiens) CpG-island No: 6651
aatgatagtatcgggttaaaattagaggagattataggagaaagtaaatgtttgcgcgttcgtttcgagtaagtttacgttagggtaatgaataattcggtattcgcggtcgttttacgttgggcgggggaagttcggggatttcgcgtacgcgtatatttttgttcggtagtcgcgtaagcgtaatcgttcggaatatggttgtcgtcggtcgtaatcgtaagtgtcgacgtatttttgagttttgcgttgttttcgttttttcggagggaagttttggcgggtggaggttcgtcgggtttttgtggggcgggaggggcgcgttcgcgggtgggttttatttgggtggtgggtatgtcgggtcgttagggcgagggtttggttaggggcgtagtttttttggtgggtgggacgtttcgtggcgattggggttatttttttgaggacgaggtcgtttcgggttggtttggacgttttcgttttttttttagcgttattcgtgagtttcggttcgtat

SEQ ID NO: 6652 - DNA, 517 bp, Artificial Sequence
  chemically treated genomic DNA (Homo sapiens) CpG-island No: 6652
atacgaaccgaaactcacgaataacgctaaaaaaaaaacgaaaacgtccaaaccaacccgaaacgacctcgtcctcaaaaaaataaccccaatcgccacgaaacgtcccacccaccaaaaaaactacgcccctaaccaaaccctcgccctaacgacccgacatacccaccacccaaataaaacccacccgcgaacgcgcccctcccgccccacaaaaacccgacgaacctccacccgccaaaacttccctccgaaaaaacgaaaacaacgcaaaactcaaaaatacgtcgacacttacgattacgaccgacgacaaccatattccgaacgattacgcttacgcgactaccgaacaaaaatatacgcgtacgcgaaatccccgaacttcccccgcccaacgtaaaacgaccgcgaataccgaattattcattaccctaacgtaaacttactcgaaacgaacgcgcaaacatttactttctcctataatctcctctaattttaacccgatactatcatt

SEQ ID NO: 6653 - DNA, 546 bp, Artificial Sequence
  chemically treated genomic DNA (Homo sapiens) CpG-island No: 6653
cgatcgatattttcgacgtttaggatgaggaatatcgggagtcggtgttgttttttaacgttgcggttcgcgtggcggtggaagtaggtattgtcgattattggtataagtatgttggtttgaaaggggtaattgtcgggatgacgggttacggggaatttgtttcggcggataagttgttttcgttttttggttttatcgtcgagaatattgtggtaaaagcgtataaggtgttgggagtgaaaggtgtttgatggtgattgtcggatgttgattgtcggatgcgacgttgacgcgttttattcggtttatagcgttttattcggtttatatgtttcgttattttgtttaacgggtgatttataacgtgggttaggcgtttggtttatgttagttatcgtaggtgggttttgcggcgtaacgtattaggcgaaaacgttgatcgttaaagcgttagcgcgtttgaatgttataatcgtttaattcgcgttttttcgttaaggttattagtttacgcgattttttataaaacggggcggtttttgg

SEQ ID NO: 6654 - DNA, 546 bp, Artificial Sequence
  chemically treated genomic DNA (Homo sapiens) CpG-island No: 6654
ccaaaaaccgccccgttttataaaaaatcgcgtaaactaataaccttaacgaaaaaacgcgaattaaacgattataacattcaaacgcgctaacgctttaacgatcaacgttttcgcctaatacgttacgccgcaaaacccacctacgataactaacataaaccaaacgcctaacccacgttataaatcacccgttaaacaaaataacgaaacatataaaccgaataaaacgctataaaccgaataaaacgcgtcaacgtcgcatccgacaatcaacatccgacaatcaccatcaaacacctttcactcccaacaccttatacgcttttaccacaatattctcgacgataaaaccaaaaaacgaaaacaacttatccgccgaaacaaattccccgtaacccgtcatcccgacaattacccctttcaaaccaacatacttataccaataatcgacaatacctacttccaccgccacgcgaaccgcaacgttaaaaaacaacaccgactcccgatattcctcatcctaaacgtcgaaaatatcgatcg

SEQ ID NO: 6655 - DNA, 546 bp, Artificial Sequence
  chemically treated genomic DNA (Homo sapiens) CpG-island No: 6655
ttaagaatcgtttcgttttatgagaagtcgcgtgaattggtgattttagcgaaagggcgcggattaagcgattgtggtatttaggcgcgttggcgttttgacggttagcgttttcgtttggtgcgttacgtcgtagaatttatttgcgataattggtatgggttagacgtttggtttacgttgtggattattcgttaaataaaatggcgggatatgtaggtcggataagacgttgtaggtcggataagacgcgttagcgtcgtattcggtaattagtattcggtaattattattaggtattttttatttttagtattttatgcgtttttgttataatattttcggcggtaaagttaaagaacgggaatagtttattcgtcggagtagatttttcgtaattcgttatttcgataattgttttttttagattaatatatttgtattagtaatcggtaatatttgtttttatcgttacgcgagtcgtaacgttagaaggtaatatcgattttcgatattttttattttgggcgtcgaaaatatcggtcg

SEQ ID NO: 6656 - DNA, 546 bp, Artificial Sequence
  chemically treated genomic DNA (Homo sapiens) CpG-island No: 6656
cgaccgatattttcgacgcccaaaataaaaaatatcgaaaatcgatattaccttctaacgttacgactcgcgtaacgataaaaacaaatattaccgattactaatacaaatatattaatctaaaaaaaacaattatcgaaataacgaattacgaaaaatctactccgacgaataaactattcccgttctttaactttaccgccgaaaatattataacaaaaacgcataaaatactaaaaataaaaaatacctaataataattaccgaatactaattaccgaatacgacgctaacgcgtcttatccgacctacaacgtcttatccgacctacatatcccgccattttatttaacgaataatccacaacgtaaaccaaacgtctaacccataccaattatcgcaaataaattctacgacgtaacgcaccaaacgaaaacgctaaccgtcaaaacgccaacgcgcctaaataccacaatcgcttaatccgcgccctttcgctaaaatcaccaattcacgcgacttctcataaaacgaaacgattcttaa

SEQ ID NO: 6657 - DNA, 673 bp, Artificial Sequence
  chemically treated genomic DNA (Homo sapiens) CpG-island No: 6657
attatggtttagttttttatacgttttttcgtcgggtttcgtttttacggtttttagtgaagtcggagggcggggtttaatcgcgtttggttgcgcggaaattaagatttttttttagagttgcggaggacgcggtcgtcgttttttttaattttttaggttttcgaggtcgggtttagagtttttagttttttttgaaattttggagcggaattagaagtgcgcgtggttatagcggcgttttttgttttttagtcgtcgttggtttaacggtttttttagtagtagtttttgcgattaggtgcggttttaggtgcggtttagttattcggagggaggtagacgggggcggggtttcggtgagggagagatgggagcggggattgggtgaagggcgagatgggggtggggttttcgttaagggtgagacgggggcgggattttcgttaaggggaaattggggttaagtttttgttaaggaaaaaatggggcggggaattcgttaaaaggaaaatgggggcggggtttgggtgaaggaaaaataggggtcgaattttttttaaggggaaatagggtcgggttttcgttaaggaaaaaatgggtcgggttttggttaaggaaaaaattcggggggatatttttaaggaaatataggggtcgggaattttttttt

SEQ ID NO: 6658 - DNA, 673 bp, Artificial Sequence
  chemically treated genomic DNA (Homo sapiens) CpG-island No: 6658
aaaaaaaaattcccgacccctatatttccttaaaaatatccccccgaattttttccttaaccaaaacccgacccattttttccttaacgaaaacccgaccctatttccccttaaaaaaaattcgacccctatttttccttcacccaaaccccgcccccattttccttttaacgaattccccgccccattttttccttaacaaaaacttaaccccaatttccccttaacgaaaatcccgcccccgtctcacccttaacgaaaaccccacccccatctcgcccttcacccaatccccgctcccatctctccctcaccgaaaccccgcccccgtctacctccctccgaataactaaaccgcacctaaaaccgcacctaatcgcaaaaactactactaaaaaaaccgttaaaccaacgacgactaaaaaacaaaaaacgccgctataaccacgcgcacttctaattccgctccaaaatttcaaaaaaaactaaaaactctaaacccgacctcgaaaacctaaaaaattaaaaaaaacgacgaccgcgtcctccgcaactctaaaaaaaaatcttaatttccgcgcaaccaaacgcgattaaaccccgccctccgacttcactaaaaaccgtaaaaacgaaacccgacgaaaaaacgtataaaaaactaaaccataat

SEQ ID NO: 6659 - DNA, 673 bp, Artificial Sequence
  chemically treated genomic DNA (Homo sapiens) CpG-island No: 6659
aaaagagagttttcggtttttatatttttttgggaatgttttttcgggttttttttttaattaggattcggtttattttttttttaacgaagattcggttttatttttttttaaaggggattcggtttttgttttttttttatttaggtttcgtttttattttttttttaacggatttttcgttttattttttttttaataaagatttggttttaatttttttttaacgggggtttcgttttcgttttatttttaacggagattttatttttatttcgttttttatttagttttcgtttttattttttttttatcgagatttcgttttcgtttgttttttttcgggtggttaagtcgtatttgaagtcgtatttggtcgtagaggttattgttggggaaatcgttgggttagcggcggttaaagggtaggaggcgtcgttgtggttacgcgtatttttgatttcgttttagggttttagaaggaattgagggttttggattcggtttcggaggtttgaggagttgggaggggcggcggtcgcgtttttcgtaattttggggagaagttttagttttcgcgtagttaaacgcgattggatttcgtttttcggttttattggggatcgtgggggcggaattcggcgggaggacgtatggggggttggattatgat

SEQ ID NO: 6660 - DNA, 673 bp, Artificial Sequence
  chemically treated genomic DNA (Homo sapiens) CpG-island No: 6660
atcataatccaaccccccatacgtcctcccgccgaattccgcccccacgatccccaataaaaccgaaaaacgaaatccaatcgcgtttaactacgcgaaaactaaaacttctccccaaaattacgaaaaacgcgaccgccgcccctcccaactcctcaaacctccgaaaccgaatccaaaaccctcaattccttctaaaaccctaaaacgaaatcaaaaatacgcgtaaccacaacgacgcctcctaccctttaaccgccgctaacccaacgatttccccaacaataacctctacgaccaaatacgacttcaaatacgacttaaccacccgaaaaaaaacaaacgaaaacgaaatctcgataaaaaaaaaataaaaacgaaaactaaataaaaaacgaaataaaaataaaatctccgttaaaaataaaacgaaaacgaaacccccgttaaaaaaaaattaaaaccaaatctttattaaaaaaaaaataaaacgaaaaatccgttaaaaaaaaaataaaaacgaaacctaaataaaaaaaaaacaaaaaccgaatcccctttaaaaaaaaataaaaccgaatcttcgttaaaaaaaaaataaaccgaatcctaattaaaaaaaaaacccgaaaaaacattcccaaaaaaatataaaaaccgaaaactctctttt

SEQ ID NO: 6661 - DNA, 587 bp, Artificial Sequence
  chemically treated genomic DNA (Homo sapiens) CpG-island No: 6661
tcgggggcgggttcgcggcgttcggcggtcgagtaaattttttcgaatatagtttgtttcgtttttttttttttgttgttttgttttttttttcgtcggataaggtacgtcgcgagaacggtttcgtttttttttttttgttcgggcgcgggttttatttcgggggggttcgttgcggcgtaatagttttattacggggcgttcgttggttttggtacgggtgtttgggggtttcgtcgagtcgtttataaaggaaggtttcgtggggttgtttgtaggggcgttttttttttttagcgtttttacgcggcgtttcgcgttttttttcgtttagttttttttgggttttcgttcgtaggttcgggttcggcggggcgttcgattatttttttgttattgggggtgtcgcgtgtcggcggtttcgtaggggtttataaaaaaaagacgcgttttcgttttttttttcgtcgtcggttttacgggtattagtagtcggcgtttacggggggcgttttttagggtggtgggggatatatatatatatatatatatttttttttttggataggaagtagaatttattggtg

SEQ ID NO: 6662 - DNA, 587 bp, Artificial Sequence
  chemically treated genomic DNA (Homo sapiens) CpG-island No: 6662
caccaataaattctacttcctatccaaaaaaaaaaatatatatatatatatatatatcccccaccaccctaaaaaacgccccccgtaaacgccgactactaatacccgtaaaaccgacgacgaaaaaaaaaacgaaaacgcgtcttttttttataaacccctacgaaaccgccgacacgcgacacccccaataacaaaaaaataatcgaacgccccgccgaacccgaacctacgaacgaaaacccaaaaaaaactaaacgaaaaaaaacgcgaaacgccgcgtaaaaacgctaaaaaaaaaaaacgcccctacaaacaaccccacgaaaccttcctttataaacgactcgacgaaacccccaaacacccgtaccaaaaccaacgaacgccccgtaataaaactattacgccgcaacgaacccccccgaaataaaacccgcgcccgaacaaaaaaaaaaaaacgaaaccgttctcgcgacgtaccttatccgacgaaaaaaaaaacaaaacaacaaaaaaaaaaaaacgaaacaaactatattcgaaaaaatttactcgaccgccgaacgccgcgaacccgcccccga

SEQ ID NO: 6663 - DNA, 587 bp, Artificial Sequence
  chemically treated genomic DNA (Homo sapiens) CpG-island No: 6663
tattaataaattttattttttgtttaaaaaaaaaaatgtgtgtgtgtgtgtgtgtgttttttattattttaaaagacgtttttcgtgggcgtcggttgttgatattcgtggagtcggcggcgggaaggaaaacgggggcgcgttttttttttgtgagtttttgcggggtcgtcggtacgcggtatttttagtggtaagggagtgatcgaacgtttcgtcgagttcggatttgcgggcgggggtttagggagggttaagcggggagaagcgcgaagcgtcgcgtgaagacgttggagaggagaggcgtttttgtaagtagttttacggagtttttttttatgaacggttcggcgaggtttttaggtattcgtgttagggttagcgaacgtttcgtagtggagttgttgcgtcgtaacggattttttcggggtagagttcgcgttcgggtaggagagaagagacggggtcgttttcgcggcgtgttttattcggcggggggagagatagggtagtagaagggagggggcggaataggttgtgttcggggaggtttgttcgatcgtcggacgtcgcgagttcgttttcgg

SEQ ID NO: 6664 - DNA, 587 bp, Artificial Sequence
  chemically treated genomic DNA (Homo sapiens) CpG-island No: 6664
ccgaaaacgaactcgcgacgtccgacgatcgaacaaacctccccgaacacaacctattccgccccctcccttctactaccctatctctccccccgccgaataaaacacgccgcgaaaacgaccccgtctcttctctcctacccgaacgcgaactctaccccgaaaaaatccgttacgacgcaacaactccactacgaaacgttcgctaaccctaacacgaatacctaaaaacctcgccgaaccgttcataaaaaaaaactccgtaaaactacttacaaaaacgcctctcctctccaacgtcttcacgcgacgcttcgcgcttctccccgcttaaccctccctaaacccccgcccgcaaatccgaactcgacgaaacgttcgatcactcccttaccactaaaaataccgcgtaccgacgaccccgcaaaaactcacaaaaaaaaaacgcgcccccgttttccttcccgccgccgactccacgaatatcaacaaccgacgcccacgaaaaacgtcttttaaaataataaaaaacacacacacacacacacacatttttttttttaaacaaaaaataaaatttattaata

SEQ ID NO: 6665 - DNA, 804 bp, Artificial Sequence
  chemically treated genomic DNA (Homo sapiens) CpG-island No: 6665
tcgttttaattacgtttttatggcgtagttttttttttgttttcgtttttcgttttttatttttcgagcgtttttatcgttttttagttacgtttttggcgtttggttttgttgtagtttggttttcgtttagattacgatttttcggttaggttttcgtcgttaatttcgtttttaaggtttcgtttcgttttagtttcgttttttagcggttgttcgagtttttattcgttttagttacgtttttaaggcgtggttttcgtttgtagttttatttaggtttcgtttcgttttagtcgcgtttttcgggtttgattttcgttttattttagttacgttttttggatttggttttcgtttttagtttcgttttttagtcgcgttttagtttcgttttttggatttggtttcgttttttggtttcgtttttgagtttcgtttaattttagcgacgtttttcgggtttgggtttcgtttttagtttcgttttcgggtttcgtttttttttagttacgtttttcggatttggttttagtttttagtttcgttttcgattttcgttttattttagttacgttttttcggatttggttttggtttttagtttcgttttcgatttttattttatttcggttacgtatttcggatttggttttcgtttttagtttcggttttcgagattagttttaatttaggtttcgttttttggatttggttttagtttttagtcgcggttaaattacgttttagttatttttcgtaagttttttattgttttagttacgttttttaggttggtttttg

SEQ ID NO: 6666 - DNA, 804 bp, Artificial Sequence
  chemically treated genomic DNA (Homo sapiens) CpG-island No: 6666
caaaaaccaacctaaaaaacgtaactaaaacaataaaaaacttacgaaaaataactaaaacgtaatttaaccgcgactaaaaactaaaaccaaatccaaaaaacgaaacctaaattaaaactaatctcgaaaaccgaaactaaaaacgaaaaccaaatccgaaatacgtaaccgaaataaaataaaaatcgaaaacgaaactaaaaaccaaaaccaaatccgaaaaaacgtaactaaaataaaacgaaaatcgaaaacgaaactaaaaactaaaaccaaatccgaaaaacgtaactaaaaaaaaacgaaacccgaaaacgaaactaaaaacgaaacccaaacccgaaaaacgtcgctaaaattaaacgaaactcaaaaacgaaaccaaaaaacgaaaccaaatccaaaaaacgaaactaaaacgcgactaaaaaacgaaactaaaaacgaaaaccaaatccaaaaaacgtaactaaaataaaacgaaaatcaaacccgaaaaacgcgactaaaacgaaacgaaacctaaataaaactacaaacgaaaaccacgccttaaaaacgtaactaaaacgaataaaaactcgaacaaccgctaaaaaacgaaactaaaacgaaacgaaaccttaaaaacgaaattaacgacgaaaacctaaccgaaaaatcgtaatctaaacgaaaaccaaactacaacaaaaccaaacgccaaaaacgtaactaaaaaacgataaaaacgctcgaaaaataaaaaacgaaaaacgaaaacaaaaaaaaaactacgccataaaaacgtaattaaaacga

SEQ ID NO: 6667 - DNA, 804 bp, Artificial Sequence
  chemically treated genomic DNA (Homo sapiens) CpG-island No: 6667
tagaaattagtttggaaagcgtggttgaggtagtgagaggtttgcgggaggtggttgaggcgtgatttggtcgcgattgggaattaagattaagtttagaaggcggggtttggattgaggttaatttcggaagtcggggttagagacgaggattaagttcggaatgcgtggtcggggtggggtgaggatcggaggcggggttagagattaggattaagttcggaaaggcgtggttggggtggggcgaggatcggaggcggggttagaaattgggattaagttcggaaggcgtggttggggaggggcgagattcggggacggggttagaggcgaggtttaagttcggaaggcgtcgttggagttgggcgaggtttaggggcggagttagagaacggaattaagtttagaaggcggggttggggcgcggttagggggcggggttagagacgaggattaagtttagaaggcgtggttggggtggggcgaggattaagttcggaaggcgcggttggagcggggcgaggtttaggtggggttgtagacgagaattacgttttggaggcgtggttagggcgggtagaggttcggataatcgttggaaggcggggttggggcggggcgagattttgggggcggggttgacgacgaggatttagtcgagaggtcgtggtttggacggaaattaggttgtagtaggattaggcgttaagggcgtggttggggagcgatggagacgttcggaaggtggggagcgggggacggagatagggagaagattacgttatgaaggcgtggttgaggcgg

SEQ ID NO: 6668 - DNA, 804 bp, Artificial Sequence
  chemically treated genomic DNA (Homo sapiens) CpG-island No: 6668
ccgcctcaaccacgccttcataacgtaatcttctccctatctccgtcccccgctccccaccttccgaacgtctccatcgctccccaaccacgcccttaacgcctaatcctactacaacctaatttccgtccaaaccacgacctctcgactaaatcctcgtcgtcaaccccgcccccaaaatctcgccccgccccaaccccgccttccaacgattatccgaacctctacccgccctaaccacgcctccaaaacgtaattctcgtctacaaccccacctaaacctcgccccgctccaaccgcgccttccgaacttaatcctcgccccaccccaaccacgccttctaaacttaatcctcgtctctaaccccgccccctaaccgcgccccaaccccgccttctaaacttaattccgttctctaactccgcccctaaacctcgcccaactccaacgacgccttccgaacttaaacctcgcctctaaccccgtccccgaatctcgcccctccccaaccacgccttccgaacttaatcccaatttctaaccccgcctccgatcctcgccccaccccaaccacgcctttccgaacttaatcctaatctctaaccccgcctccgatcctcaccccaccccgaccacgcattccgaacttaatcctcgtctctaaccccgacttccgaaattaacctcaatccaaaccccgccttctaaacttaatcttaattcccaatcgcgaccaaatcacgcctcaaccacctcccgcaaacctctcactacctcaaccacgctttccaaactaatttcta

SEQ ID NO: 6669 - DNA, 573 bp, Artificial Sequence
  chemically treated genomic DNA (Homo sapiens) CpG-island No: 6669
tttttattcgcggttggttcggttttgggatcgaattattttttagcgagaggaaggttaaatttttcgatcggttacgggaaggtcgcggtcgtcgttttgttagtcgtttcggcgtttttaggatttttcgggtttttttaatcggaagcggaagtgcgtgtcggcgggattatggcgattttggtcgaattgtcggattcggttttgttcgagatttttttttatttttcggtacgggatcggattcgtatttttaggtgcggtttcgttttcggggggaagggtagggcggagggcgtagttggtatttggagatgcgatgtggttcggggttggggtcgttttaatcgcgcgtttttttttttagggtttgttatcgttggaagaggttggtggacgatcggtggttgtggcgatatgtcgatttgacgttttatacggtacgcgtagttggtcgggcgggtttgggtcgcggtcgcggtgttcggatttcgaagattattttttttattttgggattgtgtgtcggggttcgggttggggatttagagttaggcgattcggggttta

SEQ ID NO: 6670 - DNA, 573 bp, Artificial Sequence
  chemically treated genomic DNA (Homo sapiens) CpG-island No: 6670
taaaccccgaatcgcctaactctaaatccccaacccgaaccccgacacacaatcccaaaataaaaaaaataatcttcgaaatccgaacaccgcgaccgcgacccaaacccgcccgaccaactacgcgtaccgtataaaacgtcaaatcgacatatcgccacaaccaccgatcgtccaccaacctcttccaacgataacaaaccctaaaaaaaaaaacgcgcgattaaaacgaccccaaccccgaaccacatcgcatctccaaataccaactacgccctccgccctacccttccccccgaaaacgaaaccgcacctaaaaatacgaatccgatcccgtaccgaaaaataaaaaaaaatctcgaacaaaaccgaatccgacaattcgaccaaaatcgccataatcccgccgacacgcacttccgcttccgattaaaaaaacccgaaaaatcctaaaaacgccgaaacgactaacaaaacgacgaccgcgaccttcccgtaaccgatcgaaaaatttaaccttcctctcgctaaaaaataattcgatcccaaaaccgaaccaaccgcgaataaaaa

SEQ ID NO: 6671 - DNA, 573 bp, Artificial Sequence
  chemically treated genomic DNA (Homo sapiens) CpG-island No: 6671
taggtttcggatcgtttggttttaaatttttagttcgggtttcgatatatagttttagggtgggagaggtggttttcggggttcgggtatcgcgatcgcggtttaggttcgttcggttagttgcgcgtatcgtgtagagcgttaggtcgatatgtcgttatagttatcggtcgtttattagttttttttagcggtgatagattttgggggaggggacgcgcggttagaacgattttagtttcgggttatatcgtatttttaggtgttagttgcgtttttcgttttgttttttttttcggaggcggggtcgtatttggagatgcggattcggtttcgtatcgggaggtaagagaagatttcgagtaggatcgagttcggtagttcgattaaagtcgttatgatttcgtcgatacgtattttcgttttcggttaaagagattcgaggggttttgggggcgtcgaggcggttgatagggcggcggtcgcgattttttcgtagtcggtcgagaaatttgatttttttttcgttgggaagtgattcggttttagggtcggattagtcgcggatgggga

SEQ ID NO: 6672 - DNA, 573 bp, Artificial Sequence
  chemically treated genomic DNA (Homo sapiens) CpG-island No: 6672
tccccatccgcgactaatccgaccctaaaaccgaatcacttcccaacgaaaaaaaaatcaaatttctcgaccgactacgaaaaaatcgcgaccgccgccctatcaaccgcctcgacgcccccaaaacccctcgaatctctttaaccgaaaacgaaaatacgtatcgacgaaatcataacgactttaatcgaactaccgaactcgatcctactcgaaatcttctcttacctcccgatacgaaaccgaatccgcatctccaaatacgaccccgcctccgaaaaaaaaaacaaaacgaaaaacgcaactaacacctaaaaatacgatataacccgaaactaaaatcgttctaaccgcgcgtcccctcccccaaaatctatcaccgctaaaaaaaactaataaacgaccgataactataacgacatatcgacctaacgctctacacgatacgcgcaactaaccgaacgaacctaaaccgcgatcgcgatacccgaaccccgaaaaccacctctcccaccctaaaactatatatcgaaacccgaactaaaaatttaaaaccaaacgatccgaaaccta

SEQ ID NO: 6673 - DNA, 828 bp, Artificial Sequence
  chemically treated genomic DNA (Homo sapiens) CpG-island No: 6673
  unsure (750, 758..759, 761, 763)
agattcgggtagggattcggtgagggggagacgggggtggggttttggtgatcgaaagacgggggcggagatttggtgaggggagacggaggcggggattcggtgataggattaacgggggcggggattcggtgagggagagataggggcgggaatcggtgaggggagacggaggcggggaatcggtgaggggagagacgggggcggggattcggtgacggggagacgggggcgggaatcggtgaggggacgacgggggcggggattcggtgagggaagagaagagggcgggattcggtgagggggagacgggggcggggatttggtgagcggacgacgggggcggggattcggtgaggggagagaagagggattaggtgagggggagatagggattcgatgatagatagggtagggtttcggtgaggggaatcgggggtcggggatttcgtaagggagagataggggtggggattaggtgatggggagattgggacgagaattcggtgagggagagacggggggcggggattcggtgaggggttgttagaggcgggattttagtgaggggagagaagagggcgggattttagtgaagggagagaagagggcggggattcgatgagggggagacggggtcggggattcgatgacgggaagggtaggggattcgatgaaggagagattgtggcggggattcgattaaggagatgtcggggcggggttttcgtgaggggataaatagggatngtaatttnntnanggggattttagtcgtggggatatgtataaatgacgtcggttcggcgatttttagagttttttttg

SEQ ID NO: 6674 - DNA, 828 bp, Artificial Sequence
  chemically treated genomic DNA (Homo sapiens) CpG-island No: 6674
  unsure (66, 68, 70..71, 79)
caaaaaaaactctaaaaatcgccgaaccgacgtcatttatacatatccccacgactaaaatccccntnannaaattacnatccctatttatcccctcacgaaaaccccgccccgacatctccttaatcgaatccccgccacaatctctccttcatcgaatcccctacccttcccgtcatcgaatccccgaccccgtctccccctcatcgaatccccgccctcttctctcccttcactaaaatcccgccctcttctctcccctcactaaaatcccgcctctaacaacccctcaccgaatccccgccccccgtctctccctcaccgaattctcgtcccaatctccccatcacctaatccccacccctatctctcccttacgaaatccccgacccccgattcccctcaccgaaaccctaccctatctatcatcgaatccctatctccccctcacctaatccctcttctctcccctcaccgaatccccgcccccgtcgtccgctcaccaaatccccgcccccgtctccccctcaccgaatcccgccctcttctcttccctcaccgaatccccgcccccgtcgtcccctcaccgattcccgcccccgtctccccgtcaccgaatccccgcccccgtctctcccctcaccgattccccgcctccgtctcccctcaccgattcccgcccctatctctccctcaccgaatccccgcccccgttaatcctatcaccgaatccccgcctccgtctcccctcaccaaatctccgcccccgtctttcgatcaccaaaaccccacccccgtctccccctcaccgaatccctacccgaatct

SEQ ID NO: 6675 - DNA, 828 bp, Artificial Sequence
  chemically treated genomic DNA (Homo sapiens) CpG-island No: 6675
  unsure (66, 68, 70..71, 79)
tagagaagattttagagatcgtcggatcgacgttatttgtatatgtttttacggttgaagtttttntnanngagttatnatttttgtttatttttttacgaagatttcgtttcggtatttttttaatcgagttttcgttatagttttttttttatcgagttttttatttttttcgttatcgagttttcggtttcgttttttttttatcgagttttcgtttttttttttttttttattgagatttcgtttttttttttttttttattgaggtttcgtttttgatagttttttatcgagttttcgtttttcgttttttttttatcgagttttcgttttagtttttttattatttaatttttatttttgttttttttttacgaagttttcggttttcggttttttttatcgagattttgttttgtttgttatcgagtttttgttttttttttatttagttttttttttttttttttatcgagttttcgttttcgtcgttcgtttattaagttttcgttttcgttttttttttatcgagtttcgtttttttttttttttttatcgagttttcgttttcgtcgtttttttatcgattttcgttttcgttttttcgttatcgagttttcgttttcgtttttttttttatcgatttttcgttttcgtttttttttatcgattttcgtttttgttttttttttatcgagttttcgttttcgttaattttattatcgagttttcgttttcgtttttttttattaagttttcgttttcgtttttcggttattaagattttattttcgttttttttttatcgagtttttgttcgggttt

SEQ ID NO: 6676 - DNA, 828 bp, Artificial Sequence
  chemically treated genomic DNA (Homo sapiens) CpG-island No: 6676
  unsure (750, 758..759, 761, 763)
aaacccgaacaaaaactcgataaaaaaaaaacgaaaataaaatcttaataaccgaaaaacgaaaacgaaaacttaataaaaaaaaacgaaaacgaaaactcgataataaaattaacgaaaacgaaaactcgataaaaaaaaaacaaaaacgaaaatcgataaaaaaaaacgaaaacgaaaaatcgataaaaaaaaaaacgaaaacgaaaactcgataacgaaaaaacgaaaacgaaaatcgataaaaaaacgacgaaaacgaaaactcgataaaaaaaaaaaaaaaaacgaaactcgataaaaaaaaaacgaaaacgaaaacttaataaacgaacgacgaaaacgaaaactcgataaaaaaaaaaaaaaaaaactaaataaaaaaaaaacaaaaactcgataacaaacaaaacaaaatctcgataaaaaaaaccgaaaaccgaaaacttcgtaaaaaaaaaacaaaaataaaaattaaataataaaaaaactaaaacgaaaactcgataaaaaaaaaacgaaaaacgaaaactcgataaaaaactatcaaaaacgaaacctcaataaaaaaaaaaaaaaaaacgaaatctcaataaaaaaaaaaaaaaaaacgaaaactcgataaaaaaaaaacgaaaccgaaaactcgataacgaaaaaaataaaaaactcgataaaaaaaaaactataacgaaaactcgattaaaaaaataccgaaacgaaatcttcgtaaaaaaataaacaaaaatnataactcnntnanaaaaacttcaaccgtaaaaacatatacaaataacgtcgatccgacgatctctaaaatcttctcta

SEQ ID NO: 6677 - DNA, 604 bp, Artificial Sequence
  chemically treated genomic DNA (Homo sapiens) CpG-island No: 6677
gttagtggatgaacgttcgttgtggttagatatcggtaaataatatggtagtaaagagtcgaggattatatcgtcgtttcgttataaagtcgtataatttatttggtcgggaattataataatgcgcggttatttaattaaaatttgaacggttttgttagggttttacgtaaggaaggggtcggtttaataatgggtataataattcggtcggtaaaattatagtcgtcgttttttttagcggggagttttttaatgggttatatcggagagcgggtcgggaaaggcgagagggagatttataaagtgggttcgcgagagcggcgacgaattgcgtcggggggcgttggcgcgcggcgttacgaatagagtttagaatacgagacgcgtagtatttattacgacgttaggtatcgtagcgatagtataatagaagtagtgagcggcggtagtacgggcgaggagataggattattacgcgttagagtcgaattagttttcgacgattaagagcgaggtaatgtaagtatagtgtaattagagttagatagttaaataagatatagagagtattcgtttacgatcgatcgtatatttagtatta

SEQ ID NO: 6678 - DNA, 604 bp, Artificial Sequence
  chemically treated genomic DNA (Homo sapiens) CpG-island No: 6678
taatactaaatatacgatcgatcgtaaacgaatactctctatatcttatttaactatctaactctaattacactatacttacattacctcgctcttaatcgtcgaaaactaattcgactctaacgcgtaataatcctatctcctcgcccgtactaccgccgctcactacttctattatactatcgctacgatacctaacgtcgtaataaatactacgcgtctcgtattctaaactctattcgtaacgccgcgcgccaacgccccccgacgcaattcgtcgccgctctcgcgaacccactttataaatctccctctcgcctttcccgacccgctctccgatataacccattaaaaaactccccgctaaaaaaaacgacgactataattttaccgaccgaattattatacccattattaaaccgaccccttccttacgtaaaaccctaacaaaaccgttcaaattttaattaaataaccgcgcattattataattcccgaccaaataaattatacgactttataacgaaacgacgatataatcctcgactctttactaccatattatttaccgatatctaaccacaacgaacgttcatccactaac

SEQ ID NO: 6679 - DNA, 604 bp, Artificial Sequence
  chemically treated genomic DNA (Homo sapiens) CpG-island No: 6679
tagtgttgggtgtgcgatcggtcgtgggcgagtgttttttatgttttatttaattatttagttttggttgtattgtgtttgtattgtttcgtttttggtcgtcgagagttgattcgattttagcgcgtggtggttttgttttttcgttcgtattgtcgtcgtttattgtttttgttgtgttgtcgttgcggtgtttggcgtcgtgatgggtgttgcgcgtttcgtgttttgggttttattcgtggcgtcgcgcgttaacgtttttcggcgtaattcgtcgtcgttttcgcgagtttattttgtgggtttttttttcgtttttttcgattcgtttttcggtgtagtttattggggaatttttcgttagagagggcggcggttatagttttgtcggtcggattattgtgtttattattgggtcggttttttttttacgtgaggttttggtaagatcgtttaggttttgattgggtgatcgcgtattgttgtggttttcgattaggtgaattgtacggttttatggcgaagcggcgatgtgattttcggttttttattgttatgttgtttatcggtatttggttataacgggcgtttatttattggt

SEQ ID NO: 6680 - DNA, 604 bp, Artificial Sequence
  chemically treated genomic DNA (Homo sapiens) CpG-island No: 6680
accaataaataaacgcccgttataaccaaataccgataaacaacataacaataaaaaaccgaaaatcacatcgccgcttcgccataaaaccgtacaattcacctaatcgaaaaccacaacaatacgcgatcacccaatcaaaacctaaacgatcttaccaaaacctcacgtaaaaaaaaaaccgacccaataataaacacaataatccgaccgacaaaactataaccgccgccctctctaacgaaaaattccccaataaactacaccgaaaaacgaatcgaaaaaaacgaaaaaaaaacccacaaaataaactcgcgaaaacgacgacgaattacgccgaaaaacgttaacgcgcgacgccacgaataaaacccaaaacacgaaacgcgcaacacccatcacgacgccaaacaccgcaacgacaacacaacaaaaacaataaacgacgacaatacgaacgaaaaaacaaaaccaccacgcgctaaaatcgaatcaactctcgacgaccaaaaacgaaacaatacaaacacaatacaaccaaaactaaataattaaataaaacataaaaaacactcgcccacgaccgatcgcacacccaacacta

SEQ ID NO: 6681 - DNA, 1063 bp, Artificial Sequence
  chemically treated genomic DNA (Homo sapiens) CpG-island No: 6681
  unsure (1052, 1054)
ttattcgttattttcgtatgggtcgcggtgtcgtgtttgcgcggaagatttgaaaatggcgagtttgtttggtattatatcgatcgggtgattgcgttgatttttgtgattggcgcggcgatggcgcggtggcgggtgtgttgttcggttagttttacggcgttattaattttttatcggttttatggtcgggatgaaagtttttatcgcggcggtgttcggtggattggtagtatttcgggagcgatgattggcggtttgattttggggatgcggaggcgtttttttttgtttatttgagtacggaatataaagatgtggtttattcgttttgttgattttggtgttgttggtgatgtcgatcggtatttgggtcgttcggaggtagagaaagtatgaaatcgatgtatattgtaatgcgttgttttttgtcgcgatgttttttgtgttggcgggcgtttttatggggtgtaattggagttggatggtattaaattggtggtcgatacggtttcggtgttcgttggtagtgggtgtttatcggtacggcggtggtttttttttttagtttttgcgatcggttttttagaaagggttgaaaagcgttttcggattaagtttattttgttcgttattgatggttttacggtgaagtagaaattgttttcgtggcgttgttggtgtttgcggtggcgtggcgtttatggtttacggggaggtggatttgtatttgattatgatttatttattttcggtttcgggtgaacgtggttgttggtttttttggtttgttggtgttggggtacggcggttttacgttatcggcgtttatatttttgcgttgtttaattattattacgtttgggtttttggatttgtttgtcgattgttggattaatggtagcggcgcgggttttttgttcggtttttcggtgttgcgtttgcgttgaatatttggttatatcgtatttataagtttcgatacgaatattacgaagtcggtaacgttataagtgttaaatgtttgtgggttgttttatatgtacgtgagntnttattcgat

SEQ ID NO: 6682 - DNA, 1063 bp, Artificial Sequence
  chemically treated genomic DNA (Homo sapiens) CpG-island No: 6682
  unsure (10, 12)
atcgaataananctcacgtacatataaaacaacccacaaacatttaacacttataacgttaccgacttcgtaatattcgtatcgaaacttataaatacgatataaccaaatattcaacgcaaacgcaacaccgaaaaaccgaacaaaaaacccgcgccgctaccattaatccaacaatcgacaaacaaatccaaaaacccaaacgtaataataattaaacaacgcaaaaatataaacgccgataacgtaaaaccgccgtaccccaacaccaacaaaccaaaaaaaccaacaaccacgttcacccgaaaccgaaaataaataaatcataatcaaatacaaatccacctccccgtaaaccataaacgccacgccaccgcaaacaccaacaacgccacgaaaacaatttctacttcaccgtaaaaccatcaataacgaacaaaataaacttaatccgaaaacgcttttcaaccctttctaaaaaaccgatcgcaaaaactaaaaaaaaaaaccaccgccgtaccgataaacacccactaccaacgaacaccgaaaccgtatcgaccaccaatttaataccatccaactccaattacaccccataaaaacgcccgccaacacaaaaaacatcgcgacaaaaaacaacgcattacaatatacatcgatttcatactttctctacctccgaacgacccaaataccgatcgacatcaccaacaacaccaaaatcaacaaaacgaataaaccacatctttatattccgtactcaaataaacaaaaaaaaacgcctccgcatccccaaaatcaaaccgccaatcatcgctcccgaaatactaccaatccaccgaacaccgccgcgataaaaactttcatcccgaccataaaaccgataaaaaattaataacgccgtaaaactaaccgaacaacacacccgccaccgcgccatcgccgcgccaatcacaaaaatcaacgcaatcacccgatcgatataataccaaacaaactcgccattttcaaatcttccgcgcaaacacgacaccgcgacccatacgaaaataacgaataa

SEQ ID NO: 6683 - DNA, 1063 bp, Artificial Sequence
  chemically treated genomic DNA (Homo sapiens) CpG-island No: 6683
  unsure (10, 12)
gtcgagtaangntttacgtgtatgtagggtaatttataggtatttaatatttgtagcgttgtcggtttcgtgatgttcgtgtcggaatttgtggatgcggtataattaagtgtttagcgtaaacgtagtatcggaaaatcgagtaggaagttcgcgtcgttgttattaatttagtaatcggtaggtaggtttagaagtttaagcgtaatagtgattgagtagcgtaaaagtgtaagcgtcgatggcgtaaaatcgtcgtattttagtattagtagattagaaagattaataattacgtttattcgagatcgaggataagtagattatggttaggtgtaaatttattttttcgtgaattataaacgttacgttatcgtaagtattaatagcgttacgaggatagtttttgttttatcgtggagttattaatggcgggtagaataaatttggttcggaaacgttttttaattttttttggaaagtcggtcgtaaaagttgaagaaaaagattatcgtcgtgtcgataaatatttattgttaacggatatcgaagtcgtgtcgattattagtttggtgttatttagttttagttgtattttataaagacgttcgttagtataaagaatatcgcggtagagagtagcgtattgtaatatgtatcggttttatattttttttattttcgggcgatttaaatatcggtcggtattattagtagtattagaattagtagggcgaatgagttatatttttatatttcgtatttagataggtagaagagagcgttttcgtatttttagaattaggtcgttaattatcgttttcggaatgttgttaatttatcgagtatcgtcgcggtaaaggtttttatttcggttataaagtcgatgaggggttaatgacgtcgtagaattgatcgagtagtatattcgttatcgcgttatcgtcgcgttaattataaaggttagcgtaattattcggtcggtgtaatgttaagtagattcgttatttttagatttttcgcgtaggtacgatatcgcgatttatgcgggaatagcgaatga

SEQ ID NO: 6684 - DNA, 1063 bp, Artificial Sequence
  chemically treated genomic DNA (Homo sapiens) CpG-island No: 6684
  unsure (1052, 1054)
tcattcgctattcccgcataaatcgcgatatcgtacctacgcgaaaaatctaaaaataacgaatctacttaacattacaccgaccgaataattacgctaacctttataattaacgcgacgataacgcgataacgaatatactactcgatcaattctacgacgtcattaacccctcatcgactttataaccgaaataaaaacctttaccgcgacgatactcgataaattaacaacattccgaaaacgataattaacgacctaattctaaaaatacgaaaacgctctcttctacctatctaaatacgaaatataaaaatataactcattcgccctactaattctaatactactaataataccgaccgatatttaaatcgcccgaaaataaaaaaaatataaaaccgatacatattacaatacgctactctctaccgcgatattctttatactaacgaacgtctttataaaatacaactaaaactaaataacaccaaactaataatcgacacgacttcgatatccgttaacaataaatatttatcgacacgacgataatctttttcttcaacttttacgaccgactttccaaaaaaaattaaaaaacgtttccgaaccaaatttattctacccgccattaataactccacgataaaacaaaaactatcctcgtaacgctattaatacttacgataacgtaacgtttataattcacgaaaaaataaatttacacctaaccataatctacttatcctcgatctcgaataaacgtaattattaatctttctaatctactaatactaaaatacgacgattttacgccatcgacgcttacacttttacgctactcaatcactattacgcttaaacttctaaacctacctaccgattactaaattaataacaacgacgcgaacttcctactcgattttccgatactacgtttacgctaaacacttaattataccgcatccacaaattccgacacgaacatcacgaaaccgacaacgctacaaatattaaatacctataaattaccctacatacacgtaaancnttactcgac

SEQ ID NO: 6685 - DNA, 878 bp, Artificial Sequence
  chemically treated genomic DNA (Homo sapiens) CpG-island No: 6685
atagttgttattagcgttagtcgataattttttgtacgttataattacgagagagatcgtgtatcggcgggtaagtttttgtattagtggttcgacggtacgatattcgtcgagtcgtgtgcgattttgtaattaatattttcggtttttagcgacggaaaaattatatattgggttttgttttgtagcgggttggtaggcgttttttgcgtcgttttttcggtacgaagtcggcgttaaattgtaattcgttatttattattagtttggtgcgcgtttacggacgatttttgtcgtttgttggacgttagtaaataggggtgacgggcgttattattgttggaaaacgatagtatcgttacggcggttttttttcggtgatggcgcgttaggtttcggtattggtaagcgtatattcgttagttgcgtcgtcgtcggttgtggtattacgttgtaatcggaaagtttaacgtcgggtcgttgtattgtggtaatattaggaaaatggaaagagcgttttatagtttggttgtaagtcgataatgcgtaattcggtacgagtatatttgtcgtggaagagaggttgttcgcgatatagatattcgtttatcggcgttgattattgttgcggcgaatattagagggtcggtaagttttttagcgtattcggcggcgttttttcgttcgcgcgggttagttagcgatggtaaatttttttcgtattgcgaggttgttatgcggattaattatttgtattcgtttatcgttacgtcgtgattgagcgtaaattgacgaagtttaaacgattggcgattagaatgggcgttgttagattttgtgggattttttagagtatttaatagtatgtagttgtttgt

SEQ ID NO: 6686 - DNA, 878 bp, Artificial Sequence
  chemically treated genomic DNA (Homo sapiens) CpG-island No: 6686
acaaacaactacatactattaaatactctaaaaaatcccacaaaatctaacaacgcccattctaatcgccaatcgtttaaacttcgtcaatttacgctcaatcacgacgtaacgataaacgaatacaaataattaatccgcataacaacctcgcaatacgaaaaaaatttaccatcgctaactaacccgcgcgaacgaaaaaacgccgccgaatacgctaaaaaacttaccgaccctctaatattcgccgcaacaataatcaacgccgataaacgaatatctatatcgcgaacaacctctcttccacgacaaatatactcgtaccgaattacgcattatcgacttacaaccaaactataaaacgctctttccattttcctaatattaccacaatacaacgacccgacgttaaactttccgattacaacgtaataccacaaccgacgacgacgcaactaacgaatatacgcttaccaataccgaaacctaacgcgccatcaccgaaaaaaaaccgccgtaacgatactatcgttttccaacaataataacgcccgtcacccctatttactaacgtccaacaaacgacaaaaatcgtccgtaaacgcgcaccaaactaataataaataacgaattacaatttaacgccgacttcgtaccgaaaaaacgacgcaaaaaacgcctaccaacccgctacaaaacaaaacccaatatataatttttccgtcgctaaaaaccgaaaatattaattacaaaatcgcacacgactcgacgaatatcgtaccgtcgaaccactaatacaaaaacttacccgccgatacacgatctctctcgtaattataacgtacaaaaaattatcgactaacgctaataacaactat

SEQ ID NO: 6687 - DNA, 878 bp, Artificial Sequence
  chemically treated genomic DNA (Homo sapiens) CpG-island No: 6687
gtaggtagttgtatgttgttaggtgttttagaggattttataaggtttggtaacgtttattttggtcgttaatcgtttgaatttcgttagtttgcgtttagttacggcgtggcgatggacgggtataggtgattgattcgtatggtaatttcgtaatgcgggaagaatttgttatcgttggttggttcgcgcgggcgaaaaaacgtcgtcggatgcgttggaaaatttatcgattttttgatgttcgtcgtagtaatggttagcgtcggtaagcggatgtttgtatcgcgggtaattttttttttacggtaaatgtgttcgtgtcggattacgtattatcggtttgtagttaggttgtaaaacgttttttttatttttttgatgttgttatagtatagcggttcggcgttgggtttttcgattgtagcgtggtgttatagtcgacggcggcgtagttggcggatatgcgtttgttagtgtcgaaatttggcgcgttattatcggagaagagtcgtcgtggcgatgttgtcgttttttagtaatggtagcgttcgttatttttgtttgttaacgtttagtaggcgatagaaatcgttcgtgagcgcgtattaaattggtggtggatggcgagttatagtttgacgtcgatttcgtgtcggaagggcggcgtaaaaagcgtttgttagttcgttatagggtaaggtttaatgtatggttttttcgtcgttggaagtcggaaatattggttataaaatcgtatacgattcggcggatatcgtgtcgtcgggttattgatataaggatttgttcgtcgatgtacgatttttttcgtggttgtagcgtgtaggaaattatcgattggcgttggtggtagttgt

SEQ ID NO: 6688 - DNA, 878 bp, Artificial Sequence
  chemically treated genomic DNA (Homo sapiens) CpG-island No: 6688
acaactaccaccaacgccaatcgataatttcctacacgctacaaccacgaaaaaaatcgtacatcgacgaacaaatccttatatcaataacccgacgacacgatatccgccgaatcgtatacgattttataaccaatatttccgacttccaacgacgaaaaaaccatacattaaaccttaccctataacgaactaacaaacgctttttacgccgcccttccgacacgaaatcgacgtcaaactataactcgccatccaccaccaatttaatacgcgctcacgaacgatttctatcgcctactaaacgttaacaaacaaaaataacgaacgctaccattactaaaaaacgacaacatcgccacgacgactcttctccgataataacgcgccaaatttcgacactaacaaacgcatatccgccaactacgccgccgtcgactataacaccacgctacaatcgaaaaacccaacgccgaaccgctatactataacaacatcaaaaaaataaaaaaaacgttttacaacctaactacaaaccgataatacgtaatccgacacgaacacatttaccgtaaaaaaaaaattacccgcgatacaaacatccgcttaccgacgctaaccattactacgacgaacatcaaaaaatcgataaattttccaacgcatccgacgacgttttttcgcccgcgcgaaccaaccaacgataacaaattcttcccgcattacgaaattaccatacgaatcaatcacctatacccgtccatcgccacgccgtaactaaacgcaaactaacgaaattcaaacgattaacgaccaaaataaacgttaccaaaccttataaaatcctctaaaacacctaacaacatacaactacctac

SEQ ID NO: 6689 - DNA, 534 bp, Artificial Sequence
  chemically treated genomic DNA (Homo sapiens) CpG-island No: 6689
gtttgtcgtttaggtttttttagggacgttaggtgttatttttgttcgcgtttgtcggtttttcggttgttttttatattttttttatttcgagatttttttcgtttttggattcgtattttaaatttttttaagcggtttaatttcgatagttatcgtcgttataattcggtatatcgtttcgttttttttatttattatacgtcgcgaacgttttaattttcgttttaagagcgttagttttgcgtttgcgtatatagttatttcgttttgattcgtttcgttattatagaagagttaatcggaagttttgggttgtttaaatttattttgcgtttgtgtatagtacgttttcgtttcgtttcgtttgggcggagtttcgagtgattgcgttttttagaggttagtagaggtattgcggatagatttgtaagcgtttttttttcggtttcgtttttttttttttaagttagttacgtgcgttttagtttcgggacgtcggggttttaatttaaagaggagttggtttggggt

SEQ ID NO: 6690 - DNA, 534 bp, Artificial Sequence
  chemically treated genomic DNA (Homo sapiens) CpG-island No: 6690
accccaaaccaactcctctttaaattaaaaccccgacgtcccgaaactaaaacgcacgtaactaacttaaaaaaaaaaaaacgaaaccgaaaaaaaaacgcttacaaatctatccgcaatacctctactaacctctaaaaaacgcaatcactcgaaactccgcccaaacgaaacgaaacgaaaacgtactatacacaaacgcaaaataaatttaaacaacccaaaacttccgattaactcttctataataacgaaacgaatcaaaacgaaataactatatacgcaaacgcaaaactaacgctcttaaaacgaaaattaaaacgttcgcgacgtataataaataaaaaaaacgaaacgatataccgaattataacgacgataactatcgaaattaaaccgcttaaaaaaatttaaaatacgaatccaaaaacgaaaaaaatctcgaaataaaaaaaatataaaaaacaaccgaaaaaccgacaaacgcgaacaaaaataacacctaacgtccctaaaaaaacctaaacgacaaac

SEQ ID NO: 6691 - DNA, 534 bp, Artificial Sequence
  chemically treated genomic DNA (Homo sapiens) CpG-island No: 6691
gttttagattagtttttttttgggttaaaatttcggcgtttcggagttgaggcgtacgtggttagtttggggaggagagggcggggtcggggaggaggcgtttgtaagtttgttcgtaatgtttttattggtttttagagggcgtaattattcgaggtttcgtttaagcgaggcggggcggaagcgtgttgtgtataggcgtaagatgggtttgggtagtttagagttttcgattggtttttttgtggtggcggggcgggttagaacgagatggttgtgtgcgtaggcgtaagattagcgtttttgggacggaagttaaggcgttcgcggcgtgtggtaagtgaggggggcgggacggtgtatcgggttgtggcggcgatggttgtcggagttgggtcgtttgggggagtttggggtgcgagtttaggggcgagggaagtttcgagatgaggagaatgtaggaggtagtcgaagggtcggtaaacgcggatagagatggtatttggcgtttttgggagaatttgggcgataggt

SEQ ID NO: 6692 - DNA, 534 bp, Artificial Sequence
  chemically treated genomic DNA (Homo sapiens) CpG-island No: 6692
acctatcgcccaaattctcccaaaaacgccaaataccatctctatccgcgtttaccgacccttcgactacctcctacattctcctcatctcgaaacttccctcgcccctaaactcgcaccccaaactcccccaaacgacccaactccgacaaccatcgccgccacaacccgatacaccgtcccgcccccctcacttaccacacgccgcgaacgccttaacttccgtcccaaaaacgctaatcttacgcctacgcacacaaccatctcgttctaacccgccccgccaccacaaaaaaaccaatcgaaaactctaaactacccaaacccatcttacgcctatacacaacacgcttccgccccgcctcgcttaaacgaaacctcgaataattacgccctctaaaaaccaataaaaacattacgaacaaacttacaaacgcctcctccccgaccccgccctctcctccccaaactaaccacgtacgcctcaactccgaaacgccgaaattttaacccaaaaaaaaactaatctaaaac

SEQ ID NO: 6693 - DNA, 751 bp, Artificial Sequence
  chemically treated genomic DNA (Homo sapiens) CpG-island No: 6693
ggttgtttcgcgtaattttattattttttttaatttttacggcgtttcgttattcggggttttcgtttttttcgtaagtttattttttttgcgggtatttgcgtttttgtagtttgcgttttcgtgcgtttatattgaagtttttttcggagtcgagttcgggtttcgttttttgtagaagttttcgttttattaaggttttacgcgagttcgggattttcgttttattcgtatcgtttttatttttagttatcgatttgtttcgtgcgtttttcggaggagttaggcgttcgtacgatttagttcggatattgggggcggcgaagtttcggcgcggggatcgtggtcgggggcgaaggattttcgggcgttttcgtttcggggtcgttgaggcggtagtagcgattttcggaagcgaagacgggtaaggcgagcggttcgagtttattattagtcgttttttatgattcgtattacggtcgtcgcgcgtcgtatcgttttatcggttttcggtaggttgtaatttatgttatttaggatgaatggtttatttattggttatgcgttcgttatttaggttcggcgtgaattgtttattggtcggaatggtagtgatttttttttttgttatttaggtcggtagtgttcgtttttttttgattttgtatcggattacgaattttagcgattattgcgttcggggaaagtcgatatttagaagtcgtaggcgagatgtttgttgggaattgta

SEQ ID NO: 6694 - DNA, 751 bp, Artificial Sequence
  chemically treated genomic DNA (Homo sapiens) CpG-island No: 6694
tacaattcccaacaaacatctcgcctacgacttctaaatatcgactttccccgaacgcaataatcgctaaaattcgtaatccgatacaaaatcaaaaaaaaacgaacactaccgacctaaataacaaaaaaaaaaatcactaccattccgaccaataaacaattcacgccgaacctaaataacgaacgcataaccaataaataaaccattcatcctaaataacataaattacaacctaccgaaaaccgataaaacgatacgacgcgcgacgaccgtaatacgaatcataaaaaacgactaataataaactcgaaccgctcgccttacccgtcttcgcttccgaaaatcgctactaccgcctcaacgaccccgaaacgaaaacgcccgaaaatccttcgcccccgaccacgatccccgcgccgaaacttcgccgcccccaatatccgaactaaatcgtacgaacgcctaactcctccgaaaaacgcacgaaacaaatcgataactaaaaataaaaacgatacgaataaaacgaaaatcccgaactcgcgtaaaaccttaataaaacgaaaacttctacaaaaaacgaaacccgaactcgactccgaaaaaaacttcaatataaacgcacgaaaacgcaaactacaaaaacgcaaatacccgcaaaaaaaataaacttacgaaaaaaacgaaaaccccgaataacgaaacgccgtaaaaattaaaaaaaataataaaattacgcgaaacaacc

SEQ ID NO: 6695 - DNA, 751 bp, Artificial Sequence
  chemically treated genomic DNA (Homo sapiens) CpG-island No: 6695
tataatttttagtagatatttcgtttgcgatttttgaatatcggtttttttcgagcgtaatgatcgttgggattcgtagttcggtataaaattaaggagggacgggtattatcggtttagatgatagaggagggaattattgttatttcgattaatggatagtttacgtcggatttgagtggcgagcgtatagttaatgggtaagttatttattttgagtgatatgggttgtaatttatcggaggtcggtggggcggtacggcgcgcggcggtcgtagtgcgaattatgggaggcggttggtggtgggttcgggtcgttcgttttgttcgttttcgttttcggaggtcgttattgtcgttttagcggtttcggagcgggggcgttcgggggtttttcgttttcggttacggttttcgcgtcggggtttcgtcgtttttagtgttcgagttggatcgtgcggacgtttggttttttcgaaaagcgtacgagataggtcggtggttaggggtgggggcggtgcggatgggacgggggtttcgggttcgcgtgggattttgatggggcgggggtttttgtaggaaacggggttcgggttcggtttcgagaagggttttagtgtgagcgtacggaagcgtagattgtaagagcgtaggtgttcgtagaggggatgggtttgcggggaggacgaggatttcgggtaacggggcgtcgtagggattggagggggtggtagggttgcgcgaggtagtt

SEQ ID NO: 6696 - DNA, 751 bp, Artificial Sequence
  chemically treated genomic DNA (Homo sapiens) CpG-island No: 6696
aactacctcgcgcaaccctaccaccccctccaatccctacgacgccccgttacccgaaatcctcgtcctccccgcaaacccatcccctctacgaacacctacgctcttacaatctacgcttccgtacgctcacactaaaacccttctcgaaaccgaacccgaaccccgtttcctacaaaaacccccgccccatcaaaatcccacgcgaacccgaaacccccgtcccatccgcaccgcccccacccctaaccaccgacctatctcgtacgcttttcgaaaaaaccaaacgtccgcacgatccaactcgaacactaaaaacgacgaaaccccgacgcgaaaaccgtaaccgaaaacgaaaaacccccgaacgcccccgctccgaaaccgctaaaacgacaataacgacctccgaaaacgaaaacgaacaaaacgaacgacccgaacccaccaccaaccgcctcccataattcgcactacgaccgccgcgcgccgtaccgccccaccgacctccgataaattacaacccatatcactcaaaataaataacttacccattaactatacgctcgccactcaaatccgacgtaaactatccattaatcgaaataacaataattccctcctctatcatctaaaccgataatacccgtccctccttaattttataccgaactacgaatcccaacgatcattacgctcgaaaaaaaccgatattcaaaaatcgcaaacgaaatatctactaaaaattata

SEQ ID NO: 6697 - DNA, 771 bp, Artificial Sequence
  chemically treated genomic DNA (Homo sapiens) CpG-island No: 6697
tgaagtgacgtcgtgttaatttacggttcgaaattatttttttcggtaattttcgtgcgtatggggtaaatcgaattgtgttaataacgtcgaaagtttgtgtatcgtttcggcgattttcgtttaacggtcgtgggagttggtatttagaatatttcggaatagttaatatgttggtattaagtttgatgggttttttcgagtcgggtgaaaatattcgggattgtgggaattgtcgtacgggtattaatcgtatcgcgagattttcgaacgattatagtcgtgtttagtatgcgtgatggtttgataagttttattagttttggtatttagagcgtgcgacggtggattgattttttgtatcgaagcgtatttattgtatttgtcgtatacgaattcgataagtatcgagttaagcgggtagtcgtttgggtacggcgttggcgatggcggttgattatgagattaatatggtgtcgttggtgcgtaatttggaagagtttattcgttcgtgagttttgcggttggtgtacgtcgtagtcgcgataggtttgtcgtggagcgtgaaaattattgcgtgcgttaggagcgtaggtgaaggtatagtcgggacgatatcgaaatatttgagtaattgtgtcgatttttaggttcgggtaaaattttattgtgtttacgtatttggtgtagtggagtcgttatagagcgttattaaatattttcgcgaagaatttagaggcgggaattaaatagtcgtttagtaatatttat

SEQ ID NO: 6698 - DNA, 771 bp, Artificial Sequence
  chemically treated genomic DNA (Homo sapiens) CpG-island No: 6698
ataaatattactaaacgactatttaattcccgcctctaaattcttcgcgaaaatatttaataacgctctataacgactccactacaccaaatacgtaaacacaataaaattttacccgaacctaaaaatcgacacaattactcaaatatttcgatatcgtcccgactataccttcacctacgctcctaacgcacgcaataattttcacgctccacgacaaacctatcgcgactacgacgtacaccaaccgcaaaactcacgaacgaataaactcttccaaattacgcaccaacgacaccatattaatctcataatcaaccgccatcgccaacgccgtacccaaacgactacccgcttaactcgatacttatcgaattcgtatacgacaaatacaataaatacgcttcgatacaaaaaatcaatccaccgtcgcacgctctaaataccaaaactaataaaacttatcaaaccatcacgcatactaaacacgactataatcgttcgaaaatctcgcgatacgattaatacccgtacgacaattcccacaatcccgaatattttcacccgactcgaaaaaacccatcaaacttaataccaacatattaactattccgaaatattctaaataccaactcccacgaccgttaaacgaaaatcgccgaaacgatacacaaactttcgacgttattaacacaattcgatttaccccatacgcacgaaaattaccgaaaaaaataatttcgaaccgtaaattaacacgacgtcacttca

SEQ ID NO: 6699 - DNA, 771 bp, Artificial Sequence
  chemically treated genomic DNA (Homo sapiens) CpG-island No: 6699
atgggtattgttgaacggttgtttgattttcgtttttaaatttttcgcggaaatatttgatggcgttttgtaacggttttattgtattaggtgcgtgggtatagtaaagttttattcgggtttaagaatcgatatagttgtttaagtgtttcgatatcgtttcggttgtatttttatttacgtttttagcgtacgtagtaatttttacgttttacggtagatttgtcgcggttacggcgtatattagtcgtaggatttacgggcgaataaatttttttaggttacgtattagcgatattatgttgattttatggttaatcgttatcgttagcgtcgtatttagacggttgttcgtttaattcgatatttatcgaattcgtatacggtagatataatgagtgcgtttcggtataggaagttagtttatcgtcgtacgttttggatgttagagttagtagaatttgttagattattacgtatattgagtacggttgtaatcgttcgaggatttcgcggtgcggttggtgttcgtacggtagtttttatagtttcggatgtttttattcgattcggagaagtttattagatttggtgttagtatgttaattatttcgagatgttttgaatattagtttttacgatcgttaagcgaggatcgtcggaacggtatataggttttcgacgttgttgatatagttcggtttattttatgcgtacggaggttgtcgggaagggtggtttcgagtcgtgggttagtacgacgttatttta

SEQ ID NO: 6700 - DNA, 771 bp, Artificial Sequence
  chemically treated genomic DNA (Homo sapiens) CpG-island No: 6700
taaaataacgtcgtactaacccacgactcgaaaccacccttcccgacaacctccgtacgcataaaataaaccgaactatatcaacaacgtcgaaaacctatataccgttccgacgatcctcgcttaacgatcgtaaaaactaatattcaaaacatctcgaaataattaacatactaacaccaaatctaataaacttctccgaatcgaataaaaacatccgaaactataaaaactaccgtacgaacaccaaccgcaccgcgaaatcctcgaacgattacaaccgtactcaatatacgtaataatctaacaaattctactaactctaacatccaaaacgtacgacgataaactaacttcctataccgaaacgcactcattatatctaccgtatacgaattcgataaatatcgaattaaacgaacaaccgtctaaatacgacgctaacgataacgattaaccataaaatcaacataatatcgctaatacgtaacctaaaaaaatttattcgcccgtaaatcctacgactaatatacgccgtaaccgcgacaaatctaccgtaaaacgtaaaaattactacgtacgctaaaaacgtaaataaaaatacaaccgaaacgatatcgaaacacttaaacaactatatcgattcttaaacccgaataaaactttactatacccacgcacctaatacaataaaaccgttacaaaacgccatcaaatatttccgcgaaaaatttaaaaacgaaaatcaaacaaccgttcaacaatacccat

SEQ ID NO: 6701 - DNA, 559 bp, Artificial Sequence
  chemically treated genomic DNA (Homo sapiens) CpG-island No: 6701
ttttattaggtttataaatcgttatcgattcgtatcgggtaattgtgggttacgatggtatcgcgatagtttgtttttttttaagtagtttttcgattacgttaggatcggtaagcgtcgaggtatcgtttaggttgttggtatcgttcgtcgtaattttgcgtagaatacggcgtataattttgtcggagcgggttttaggtagggagtcggtttagtgtagtacgtttggcgtcgttagcgggttaatttttttacgtatttagttgcggatttttgcgtatagttttggtgacggttttttttcgtgattaagcgtgacgtaggcgtagatcgtttgatttttaatattgtgcggaatatttattacggcggtttcggtaattttcggatgcgttattagcgtcgatttaatttttgtcgtttttagacggtgatcggagacgtttagtacgtcgtttatacgttcggttatttagtaatagttatttttatcgcgacgcgcgtcgtcgtcgttgaaatatatatttttgaaggtggagaagtaggtttgtttaaa

SEQ ID NO: 6702 - DNA, 559 bp, Artificial Sequence
  chemically treated genomic DNA (Homo sapiens) CpG-island No: 6702
tttaaacaaacctacttctccaccttcaaaaatatatatttcaacgacgacgacgcgcgtcgcgataaaaataactattactaaataaccgaacgtataaacgacgtactaaacgtctccgatcaccgtctaaaaacgacaaaaattaaatcgacgctaataacgcatccgaaaattaccgaaaccgccgtaataaatattccgcacaatattaaaaatcaaacgatctacgcctacgtcacgcttaatcacgaaaaaaaaccgtcaccaaaactatacgcaaaaatccgcaactaaatacgtaaaaaaattaacccgctaacgacgccaaacgtactacactaaaccgactccctacctaaaacccgctccgacaaaattatacgccgtattctacgcaaaattacgacgaacgataccaacaacctaaacgatacctcgacgcttaccgatcctaacgtaatcgaaaaactacttaaaaaaaaacaaactatcgcgataccatcgtaacccacaattacccgatacgaatcgataacgatttataaacctaataaaa

SEQ ID NO: 6703 - DNA, 559 bp, Artificial Sequence
  chemically treated genomic DNA (Homo sapiens) CpG-island No: 6703
tttgaatagatttatttttttatttttaaaaatatgtattttagcggcgacggcgcgcgtcgcgatgaagatggttattattggataatcgggcgtgtggacgacgtgttgaacgttttcggttatcgtttggggacggtagagattgagtcggcgttggtggcgtattcgaagattgtcgaagtcgtcgtagtaggtatttcgtataatattaaaggttaggcgatttacgtttacgttacgtttaattacggggaggaatcgttattagaattgtacgtagaagttcgtaattgggtgcgtaaagagattggttcgttggcgacgttagacgtgttgtattggatcgattttttgtttaaaattcgtttcggtaaaattatgcgtcgtattttgcgtaaaattgcggcgggcgatattagtaatttgggcgatatttcgacgtttgtcgattttggcgtagtcgagaagttgtttgaagagaagtaggttatcgcgatgttatcgtaatttataattgttcgatgcgagtcggtaacggtttgtaggtttgataaga

SEQ ID NO: 6704 - DNA, 559 bp, Artificial Sequence
  chemically treated genomic DNA (Homo sapiens) CpG-island No: 6704
tcttatcaaacctacaaaccgttaccgactcgcatcgaacaattataaattacgataacatcgcgataacctacttctcttcaaacaacttctcgactacgccaaaatcgacaaacgtcgaaatatcgcccaaattactaatatcgcccgccgcaattttacgcaaaatacgacgcataattttaccgaaacgaattttaaacaaaaaatcgatccaatacaacacgtctaacgtcgccaacgaaccaatctctttacgcacccaattacgaacttctacgtacaattctaataacgattcctccccgtaattaaacgtaacgtaaacgtaaatcgcctaacctttaatattatacgaaatacctactacgacgacttcgacaatcttcgaatacgccaccaacgccgactcaatctctaccgtccccaaacgataaccgaaaacgttcaacacgtcgtccacacgcccgattatccaataataaccatcttcatcgcgacgcgcgccgtcgccgctaaaatacatatttttaaaaataaaaaaataaatctattcaaa

SEQ ID NO: 6705 - DNA, 904 bp, Artificial Sequence
  chemically treated genomic DNA (Homo sapiens) CpG-island No: 6705
gaagttgattcgtcgaagatttagatcgaagtgtttcgtttgttatcgatttgtttcgcggaagagaacggttttatcgttaatttaggtcgttggttatagtggtattggaaaggtgcggacgtttcggggattgcgttgattgacggcgagatttttttcggtatttttttgcgtttgcgtaagatgtatgtcgaatagggtggcgcgaattcggattaggtgttgaatatgatatggaattacgttatttcgtatgagttatttttagaagaagtggcgatggagagtaacggtaaggcgttggtcgatattatcgattcggtaatcggtgcggttatcgttaagaaaggttaataatttagttcgttcgtttaattgcgcgatgacggtataattttttgtggttgttggattttcgtcggtagttggacgtcggaaggtaattagatggtacgtcgtgataacgtcgattcgtttggtttcggtaatacgttgggttgggtatgggtatggtcgtttaatcgtcgtattttgtataatcgcgttttcgtagattcgtagggtaattcgtgggattcgaagcgttagttgttgaaatgggacggtattaagtggatcggttgggatatttcggattatagcgtagcgttttcgggtagcggcgtcgggtcgtttattatgtagtaggaaggtatggggcgtttgtttgttttcgataagatggcggaaggttcgttttcggaatattacgagtcgtttgaaacgtcgttgggaattaattcgttgtatttaaacgttatttcgaattcggttgtacgtatttttaaagacgacgtcgaagtattgggtaaagtcgataagttttcgtatgtcggaattatttatcgtttgatcgagtatt

SEQ ID NO: 6706 - DNA, 904 bp, Artificial Sequence
  chemically treated genomic DNA (Homo sapiens) CpG-island No: 6706
aatactcgatcaaacgataaataattccgacatacgaaaacttatcgactttacccaatacttcgacgtcgtctttaaaaatacgtacaaccgaattcgaaataacgtttaaatacaacgaattaattcccaacgacgtttcaaacgactcgtaatattccgaaaacgaaccttccgccatcttatcgaaaacaaacaaacgccccataccttcctactacataataaacgacccgacgccgctacccgaaaacgctacgctataatccgaaatatcccaaccgatccacttaataccgtcccatttcaacaactaacgcttcgaatcccacgaattaccctacgaatctacgaaaacgcgattatacaaaatacgacgattaaacgaccatacccatacccaacccaacgtattaccgaaaccaaacgaatcgacgttatcacgacgtaccatctaattaccttccgacgtccaactaccgacgaaaatccaacaaccacaaaaaattataccgtcatcgcgcaattaaacgaacgaactaaattattaacctttcttaacgataaccgcaccgattaccgaatcgataatatcgaccaacgccttaccgttactctccatcgccacttcttctaaaaataactcatacgaaataacgtaattccatatcatattcaacacctaatccgaattcgcgccaccctattcgacatacatcttacgcaaacgcaaaaaaataccgaaaaaaatctcgccgtcaatcaacgcaatccccgaaacgtccgcacctttccaataccactataaccaacgacctaaattaacgataaaaccgttctcttccgcgaaacaaatcgataacaaacgaaacacttcgatctaaatcttcgacgaatcaacttc

SEQ ID NO: 6707 - DNA, 904 bp, Artificial Sequence
  chemically treated genomic DNA (Homo sapiens) CpG-island No: 6707
agtgttcggttagacgataggtggtttcgatatacgggaatttatcggttttatttaatgtttcggcgtcgtttttaaagatacgtgtagtcgggttcgagataacgtttggatgtagcgggttagtttttagcggcgttttaaacggttcgtagtgtttcgggaacggatttttcgttattttatcgagggtaaatagacgttttatgtttttttgttgtatgataaacggttcgacgtcgttattcggaggcgttgcgttgtagttcggaatattttagtcggtttatttagtgtcgttttattttagtaattgacgtttcggattttacgggttattttgcggatttgcggaggcgcggttatatagaatgcggcggttaagcggttatgtttatgtttagtttagcgtgttatcgaggttagacggatcggcgttattacggcgtgttatttggttgtttttcggcgtttagttatcggcgaaaatttagtagttataggaggttgtatcgttatcgcgtaattgggcgaacgaattaagttgttggttttttttgacgataatcgtatcggttgtcggatcggtaatatcggttagcgttttatcgttgttttttatcgttattttttttgaagatggtttatgcggaatggcgtagttttatgttatgtttagtatttggttcgggttcgcgttattttgttcggtatatattttgcgtaagcgtaggaagatatcggagaggatttcgtcgttagttagcgtaattttcggggcgttcgtatttttttagtgttattgtaattagcgatttgagttaacgatagaatcgttttttttcgcgaagtaggtcgatggtagacggaatatttcggtttggattttcgacgagttaatttt

SEQ ID NO: 6708 - DNA, 904 bp, Artificial Sequence
  chemically treated genomic DNA (Homo sapiens) CpG-island No: 6708
aaaattaactcgtcgaaaatccaaaccgaaatattccgtctaccatcgacctacttcgcgaaaaaaaacgattctatcgttaactcaaatcgctaattacaataacactaaaaaaatacgaacgccccgaaaattacgctaactaacgacgaaatcctctccgatatcttcctacgcttacgcaaaatatataccgaacaaaataacgcgaacccgaaccaaatactaaacataacataaaactacgccattccgcataaaccatcttcaaaaaaaataacgataaaaaacaacgataaaacgctaaccgatattaccgatccgacaaccgatacgattatcgtcaaaaaaaaccaacaacttaattcgttcgcccaattacgcgataacgatacaacctcctataactactaaattttcgccgataactaaacgccgaaaaacaaccaaataacacgccgtaataacgccgatccgtctaacctcgataacacgctaaactaaacataaacataaccgcttaaccgccgcattctatataaccgcgcctccgcaaatccgcaaaataacccgtaaaatccgaaacgtcaattactaaaataaaacgacactaaataaaccgactaaaatattccgaactacaacgcaacgcctccgaataacgacgtcgaaccgtttatcatacaacaaaaaaacataaaacgtctatttaccctcgataaaataacgaaaaatccgttcccgaaacactacgaaccgtttaaaacgccgctaaaaactaacccgctacatccaaacgttatctcgaacccgactacacgtatctttaaaaacgacgccgaaacattaaataaaaccgataaattcccgtatatcgaaaccacctatcgtctaaccgaacact

SEQ ID NO: 6709 - DNA, 1135 bp, Artificial Sequence
  chemically treated genomic DNA (Homo sapiens) CpG-island No: 6709
atattttataggattgttatacgtttaataatgacggtagtttgcgttagtcggtcgatacgttgttgacgttgatttattagaaggagaaatattatgtttgtttgtgagtttcgttcggttacgtagtacgatatcgacgcggtttacgcgttgatttgtgagttaaaataggcggagtttgattattacgcgtttcgcgtgggttttaacgttaatttgcgcgatttaaatatgcgttattatttggcgttgtttgatggcgaagttgtcggtatgatcggtttgtatttgtagttttatttgtattatgttaattggatcggcgaaatttaggagttggtggtaatgtcgtaggcgcgcggtttgaacgtcggtagtaagttattggcgtgggtagaagaagaagttcgttaggtcggggtcgaaatgatcgaattttcgattaacgtgaagcgttacgacgcgtatcgtttttatttgcgcgaaggttacgagtagagttattttcgttttattaaggcgttgtaatatgagtttgatttttacgtttatcggtatcggcggcgtatagggcgtttcggtatggggttgcgagtgtgcggtttgcgttagagcgcggcgttcgtcgtagtatcgtcgttaatcgtgtagcggcgtagtgaagtttaacgacgtaattattttgatcgacgtcgggttgtacgatttcgtcgatcgttggtcgttcggatcgttttagtagtttttgttgacgtattattatatggattacgtttagggttgttttcgttgcgttggggcgttggcgattcgatttcggtttacggttcgtcggatgaatagggttgcgacgatttgtttaaatattcgggtttgtttgattttagttatacggtggaatcgtttgtggtgtttgatttgtaggggttataggttacgtttttgtcgtttaattatttaaaattgattttcggttatttgttggaaacggtatatagtcgggtggcgtggttgtttgatatcgtaggtttgtcggaaaaaacgttgaaatttttacgtaataattagtcgtaggtaatggtgatggattgtagttattcgtcgcgcgcggatgtatcgcgtaattattgtg

SEQ ID NO: 6710 - DNA, 1135 bp, Artificial Sequence
  chemically treated genomic DNA (Homo sapiens) CpG-island No: 6710
cacaataattacgcgatacatccgcgcgcgacgaataactacaatccatcaccattacctacgactaattattacgtaaaaatttcaacgttttttccgacaaacctacgatatcaaacaaccacgccacccgactatataccgtttccaacaaataaccgaaaatcaattttaaataattaaacgacaaaaacgtaacctataacccctacaaatcaaacaccacaaacgattccaccgtataactaaaatcaaacaaacccgaatatttaaacaaatcgtcgcaaccctattcatccgacgaaccgtaaaccgaaatcgaatcgccaacgccccaacgcaacgaaaacaaccctaaacgtaatccatataataatacgtcaacaaaaactactaaaacgatccgaacgaccaacgatcgacgaaatcgtacaacccgacgtcgatcaaaataattacgtcgttaaacttcactacgccgctacacgattaacgacgatactacgacgaacgccgcgctctaacgcaaaccgcacactcgcaaccccataccgaaacgccctatacgccgccgataccgataaacgtaaaaatcaaactcatattacaacgccttaataaaacgaaaataactctactcgtaaccttcgcgcaaataaaaacgatacgcgtcgtaacgcttcacgttaatcgaaaattcgatcatttcgaccccgacctaacgaacttcttcttctacccacgccaataacttactaccgacgttcaaaccgcgcgcctacgacattaccaccaactcctaaatttcgccgatccaattaacataatacaaataaaactacaaatacaaaccgatcataccgacaacttcgccatcaaacaacgccaaataataacgcatatttaaatcgcgcaaattaacgttaaaacccacgcgaaacgcgtaataatcaaactccgcctattttaactcacaaatcaacgcgtaaaccgcgtcgatatcgtactacgtaaccgaacgaaactcacaaacaaacataatatttctccttctaataaatcaacgtcaacaacgtatcgaccgactaacgcaaactaccgtcattattaaacgtataacaatcctataaaatat

SEQ ID NO: 6711 - DNA, 1135 bp, Artificial Sequence
  chemically treated genomic DNA (Homo sapiens) CpG-island No: 6711
tatagtgattacgcggtgtattcgcgcgcggcgggtgattgtaatttattattattatttgcggttgattattgcgtaaaaattttagcgtttttttcggtaagtttgcggtgttagatagttacgttattcggttgtgtgtcgtttttagtagataatcgaaggttagttttgagtggttgagcggtaggggcgtgatttgtaatttttgtaaattaaatattataaacggttttatcgtgtggttgaaattaagtaggttcggatgtttaaatagatcgtcgtagttttgtttattcggcgggtcgtaaatcgggatcggatcgttaacgttttagcgtagcggaaatagttttggacgtgatttatatgataatgcgttagtaaaaattgttggaacgattcgggcgattagcgatcggcgagatcgtgtagttcggcgtcgattagggtgattgcgtcgttaaattttattacgtcgttgtacggttggcggcgatattgcggcgagcgtcgcgttttggcgtaggtcgtatattcgtagttttatgtcggaacgttttgtgcgtcgtcggtgtcggtgagcgtgagggttaggtttatgttatagcgttttggtgaagcggaagtggttttgttcgtagttttcgcgtagatagaaacggtgcgcgtcgtggcgttttacgttggtcgaaagttcggttatttcggtttcggtttggcgggtttttttttttgtttacgttagtaatttattgtcgacgtttagatcgcgcgtttgcggtattattattaatttttgaatttcgtcgatttagttgatatgatgtagatgaaattgtaaatgtaggtcgattatgtcgataatttcgttattaagtagcgttagatggtagcgtatgtttgggtcgcgtagattggcgttaaaatttacgcgaaacgcgtggtggttaaatttcgtttgttttagtttataaattagcgcgtaaatcgcgtcggtgtcgtattgcgtggtcgggcgaagtttataagtaggtatggtgtttttttttttgatggattagcgttagtagcgtgtcgatcgattggcgtaggttgtcgttattgttgagcgtatggtaattttgtggagtat

SEQ ID NO: 6712 - DNA, 1135 bp, Artificial Sequence
  chemically treated genomic DNA (Homo sapiens) CpG-island No: 6712
atactccacaaaattaccatacgctcaacaataacgacaacctacgccaatcgatcgacacgctactaacgctaatccatcaaaaaaaaaaacaccatacctacttataaacttcgcccgaccacgcaatacgacaccgacgcgatttacgcgctaatttataaactaaaacaaacgaaatttaaccaccacgcgtttcgcgtaaattttaacgccaatctacgcgacccaaacatacgctaccatctaacgctacttaataacgaaattatcgacataatcgacctacatttacaatttcatctacatcatatcaactaaatcgacgaaattcaaaaattaataataataccgcaaacgcgcgatctaaacgtcgacaataaattactaacgtaaacaaaaaaaaaaacccgccaaaccgaaaccgaaataaccgaactttcgaccaacgtaaaacgccacgacgcgcaccgtttctatctacgcgaaaactacgaacaaaaccacttccgcttcaccaaaacgctataacataaacctaaccctcacgctcaccgacaccgacgacgcacaaaacgttccgacataaaactacgaatatacgacctacgccaaaacgcgacgctcgccgcaatatcgccgccaaccgtacaacgacgtaataaaatttaacgacgcaatcaccctaatcgacgccgaactacacgatctcgccgatcgctaatcgcccgaatcgttccaacaatttttactaacgcattatcatataaatcacgtccaaaactatttccgctacgctaaaacgttaacgatccgatcccgatttacgacccgccgaataaacaaaactacgacgatctatttaaacatccgaacctacttaatttcaaccacacgataaaaccgtttataatatttaatttacaaaaattacaaatcacgcccctaccgctcaaccactcaaaactaaccttcgattatctactaaaaacgacacacaaccgaataacgtaactatctaacaccgcaaacttaccgaaaaaaacgctaaaatttttacgcaataatcaaccgcaaataataataataaattacaatcacccgccgcgcgcgaatacaccgcgtaatcactata

SEQ ID NO: 6713 - DNA, 905 bp, Artificial Sequence
  chemically treated genomic DNA (Homo sapiens) CpG-island No: 6713
tgtggcgagcggtattattatcgtattggatgtcgtggtaattggcgattgtgcgttgacggcgtgcgatcggttggagaatttggagaagatgattaacgttatcgaagagacgtataaacgcggcgttaatcgtcgtcgagtatcgtttgtatttgcgttgcgaattgtcgtattatattacgttgtcgttgtttgaaaaattggtgtagcgcgagtcggtacgttggtgtcgttgatggattattcgtcgggttagcgttagttcgttaatcgcgagaagtatcgcgaatattattagggtaaatatttttttattgatgcgtagatgtagtagtacgaagaagagtaattggcgttcgtcgtacgttggtcgtagtcgaatcgcgaatttatcgtcgttttgtgtcgcgcgcgaaaaattgcgtttgttagttacgatgacgttatttacgtttacgttgttgaattttattagtttggtagcgtgatcgtcgaattttttattacgttcgaagcggcggaagtttcgcgtaagtatggtatgaacgtgttgatgggcgcgtcgaatattgtgcgcggcggttcgtatttcggtaacgtggcggttagtgaattggcgtagtttggtttgttggatattttttttttcgattattatttcgttagtttgttcgatgcggtatttcgcgtcgtcgatgattagagtaatcgttttacgttgtcgtaggcggtgaagttggtgattaaaaatttagcgtaggcgtttaatttttaggatcgcggggtgattggcgagggtaaacgcgtcgatttggtgttggcgtatcgtaaggataattatatttatatcgattacgtttggcgttagggtaaaagggtgttttgatgatgggaaaattgat

SEQ ID NO: 6714 - DNA, 905 bp, Artificial Sequence
  chemically treated genomic DNA (Homo sapiens) CpG-island No: 6714
atcaattttcccatcatcaaaacacccttttaccctaacgccaaacgtaatcgatataaatataattatccttacgatacgccaacaccaaatcgacgcgtttaccctcgccaatcaccccgcgatcctaaaaattaaacgcctacgctaaatttttaatcaccaacttcaccgcctacgacaacgtaaaacgattactctaatcatcgacgacgcgaaataccgcatcgaacaaactaacgaaataataatcgaaaaaaaaaatatccaacaaaccaaactacgccaattcactaaccgccacgttaccgaaatacgaaccgccgcgcacaatattcgacgcgcccatcaacacgttcataccatacttacgcgaaacttccgccgcttcgaacgtaataaaaaattcgacgatcacgctaccaaactaataaaattcaacaacgtaaacgtaaataacgtcatcgtaactaacaaacgcaatttttcgcgcgcgacacaaaacgacgataaattcgcgattcgactacgaccaacgtacgacgaacgccaattactcttcttcgtactactacatctacgcatcaataaaaaaatatttaccctaataatattcgcgatacttctcgcgattaacgaactaacgctaacccgacgaataatccatcaacgacaccaacgtaccgactcgcgctacaccaatttttcaaacaacgacaacgtaatataatacgacaattcgcaacgcaaatacaaacgatactcgacgacgattaacgccgcgtttatacgtctcttcgataacgttaatcatcttctccaaattctccaaccgatcgcacgccgtcaacgcacaatcgccaattaccacgacatccaatacgataataataccgctcgccaca

SEQ ID NO: 6715 - DNA, 905 bp, Artificial Sequence
  chemically treated genomic DNA (Homo sapiens) CpG-island No: 6715
attagtttttttattattagaatatttttttattttgacgttagacgtggtcgatatgaatatgattgtttttgcgatgcgttagtattaggtcggcgcgtttgttttcgttaattatttcgcgattttggagattaagcgtttgcgttggatttttagttattagttttatcgtttgcggtagcgtaaagcggttgttttggttatcggcgacgcgaaatgtcgtatcgagtaggttggcggggtagtagtcggaagagaggatatttagtaggttaagttgcgttagtttattggtcgttacgttgtcggagtgcgagtcgtcgcgtataatattcggcgcgtttattagtacgtttatgttatgtttgcgcgaggttttcgtcgtttcgaacgtggtgggaaattcggcgattacgttgttaagttggtgagatttagtaacgtgggcgtgggtggcgttatcgtggttggtaagcgtaatttttcgcgcgcggtatagggcggcgatggattcgcgattcggttgcgattagcgtgcggcgagcgttagttgttttttttcgtattgttgtatttgcgtattagtgagggagtatttgttttgataatattcgcgatatttttcgcggttggcgaattggcgttggttcggcgagtggtttattagcgatattagcgtatcggttcgcgttgtattagttttttaaatagcggtagcgtggtgtgatgcggtagttcgtagcgtagatgtagacggtgttcggcgacggttgacgtcgcgtttatgcgttttttcgatggcgttgattattttttttagattttttagtcgatcgtacgtcgttagcgtatagtcgttaattgttacggtatttagtacggtggtgatgtcgttcgttata

SEQ ID NO: 6716 - DNA, 905 bp, Artificial Sequence
  chemically treated genomic DNA (Homo sapiens) CpG-island No: 6716
tataacgaacgacatcaccaccgtactaaataccgtaacaattaacgactatacgctaacgacgtacgatcgactaaaaaatctaaaaaaaataatcaacgccatcgaaaaaacgcataaacgcgacgtcaaccgtcgccgaacaccgtctacatctacgctacgaactaccgcatcacaccacgctaccgctatttaaaaaactaatacaacgcgaaccgatacgctaatatcgctaataaaccactcgccgaaccaacgccaattcgccaaccgcgaaaaatatcgcgaatattatcaaaacaaatactccctcactaatacgcaaatacaacaatacgaaaaaaaacaactaacgctcgccgcacgctaatcgcaaccgaatcgcgaatccatcgccgccctataccgcgcgcgaaaaattacgcttaccaaccacgataacgccacccacgcccacgttactaaatctcaccaacttaacaacgtaatcgccgaatttcccaccacgttcgaaacgacgaaaacctcgcgcaaacataacataaacgtactaataaacgcgccgaatattatacgcgacgactcgcactccgacaacgtaacgaccaataaactaacgcaacttaacctactaaatatcctctcttccgactactaccccgccaacctactcgatacgacatttcgcgtcgccgataaccaaaacaaccgctttacgctaccgcaaacgataaaactaataactaaaaatccaacgcaaacgcttaatctccaaaatcgcgaaataattaacgaaaacaaacgcgccgacctaatactaacgcatcgcaaaaacaatcatattcatatcgaccacgtctaacgtcaaaataaaaaaatattctaataataaaaaaactaat

SEQ ID NO: 6717 - DNA, 1103 bp, Artificial Sequence
  chemically treated genomic DNA (Homo sapiens) CpG-island No: 6717
tgacgaacgtggttggttgatagatattagttatattagcgaagggtatcgggtggcggtgtattataggtatgatgagaaaggtcggttgatcggtgagcgttagacggtgtattattcgtagacggaagtattgttttggtagtatgagattagatatgcgtataacgcgtaggggttggcgaatcgttgtatatcggatagtttgttcgtcgtggaatggttgatttacggtagcggttatttggtaggtatgaaattcggcgatatatcgttggtggagtatattcgcgatcgtttgtatcgggaaacgttgcgtagtttcggtcgttatgaatttattaacgtttatatttttgatcgggtagttatagagttagtatttgaatagttgttgtttgatcgcgattatatttggaacgataacggcgaatttattcgtattagtagttcgcgttagattcggagttatagttatagtattatcggtaggttgatcggcgtttatattatcgtagcgaatttggatattcgtatttcgtatgttatagattcggtaggtaatcgtttgttcgattcggagttgtattcggatagtatttttagtatgtggtcggataatcgtatcgttcgtgacgcgtattatttttatcggtatggatcgttacggtaggttgatagagaaaatcgattttatttcggaaggggttattcgtacggatgatgagcggatttatcggtattattacgatagttagtatcggttggtgtattatacgcggatataatattaagagtcgttggtcgaaagtcgttatttttacgattcgttgggtcgtagggtggtaaaacgggtgtggcggcgtgaacgggatttgacgggttggatgtcgttgttacggaaatcgtaagtgatttggtacggttgggacggcgatcggttgattacgatatagaacgatagaattcgtatttagacgatttattagtcggggagttttacgttatttattagagttgaaatcgttatcggtgagttggcgaaaacgtagcgtcgtagtttggcggatgttttttagtagttcggcggcgaagacggtggt

SEQ ID NO: 6718 - DNA, 1103 bp, Artificial Sequence
  chemically treated genomic DNA (Homo sapiens) CpG-island No: 6718
accaccgtcttcgccgccgaactactaaaaaacatccgccaaactacgacgctacgttttcgccaactcaccgataacgatttcaactctaataaataacgtaaaactccccgactaataaatcgtctaaatacgaattctatcgttctatatcgtaatcaaccgatcgccgtcccaaccgtaccaaatcacttacgatttccgtaacaacgacatccaacccgtcaaatcccgttcacgccgccacacccgttttaccaccctacgacccaacgaatcgtaaaaataacgactttcgaccaacgactcttaatattatatccgcgtataatacaccaaccgatactaactatcgtaataataccgataaatccgctcatcatccgtacgaataaccccttccgaaataaaatcgattttctctatcaacctaccgtaacgatccataccgataaaaataatacgcgtcacgaacgatacgattatccgaccacatactaaaaatactatccgaatacaactccgaatcgaacaaacgattacctaccgaatctataacatacgaaatacgaatatccaaattcgctacgataatataaacgccgatcaacctaccgataatactataactataactccgaatctaacgcgaactactaatacgaataaattcgccgttatcgttccaaatataatcgcgatcaaacaacaactattcaaatactaactctataactacccgatcaaaaatataaacgttaataaattcataacgaccgaaactacgcaacgtttcccgatacaaacgatcgcgaatatactccaccaacgatatatcgccgaatttcatacctaccaaataaccgctaccgtaaatcaaccattccacgacgaacaaactatccgatatacaacgattcgccaacccctacgcgttatacgcatatctaatctcatactaccaaaacaatacttccgtctacgaataatacaccgtctaacgctcaccgatcaaccgacctttctcatcatacctataatacaccgccacccgatacccttcgctaatataactaatatctatcaaccaaccacgttcgtca

SEQ ID NO: 6719 - DNA, 1103 bp, Artificial Sequence
  chemically treated genomic DNA (Homo sapiens) CpG-island No: 6719
gttatcgttttcgtcgtcggattgttgaagggtattcgttaggttgcggcgttgcgttttcgttagtttatcggtggcggttttaattttgatgagtggcgtgaagtttttcggttgataaatcgtttggatgcgggttttgtcgttttgtatcgtggttagtcggtcgtcgttttagtcgtattaggttatttgcggttttcgtgatagcgatatttagttcgttaggtttcgtttacgtcgttatattcgttttgttattttgcggtttagcgggtcgtaaagatagcgattttcgattagcggtttttgatattgtgttcgcgtgtagtgtattagtcggtgttgattgtcgtaatggtatcggtgagttcgtttattattcgtgcggataatttttttcgggatgaggtcggttttttttgttagtttgtcgtgacggtttatatcggtaaagatagtgcgcgttacgggcgatacggttattcggttatatgttgagggtgttgttcgggtgtagtttcgggtcgggtaggcggttatttgtcgggtttgtggtatacgggatgcggatatttagattcgttgcggtggtgtgaacgtcggttagtttgtcggtggtgttgtagttgtaatttcgggtttggcgcgggttgttgatgcggatgagttcgtcgttgtcgttttaggtgtaatcgcggttagatagtagttgtttaggtgttggttttgtaattgttcggttaggggtataagcgttggtgagtttataacggtcgaagttgcgtagcgtttttcggtgtaggcggtcgcgggtgtattttattagcggtgtgtcgtcgagttttatgtttgttaggtaatcgttgtcgtaggttagttattttacggcgggtaggttgttcggtatatagcggttcgttagtttttgcgcgttgtacgtatgtttggttttatgttgttagagtagtgttttcgtttgcgggtgatgtatcgtttgacgtttatcggttagtcggttttttttattatatttgtaatgtatcgttattcggtgtttttcgttgatatggttgatgtttgttagttagttacgttcgtta

SEQ ID NO: 6720 - DNA, 1103 bp, Artificial Sequence
  chemically treated genomic DNA (Homo sapiens) CpG-island No: 6720
taacgaacgtaactaactaacaaacatcaaccatatcaacgaaaaacaccgaataacgatacattacaaatataataaaaaaaaccgactaaccgataaacgtcaaacgatacatcacccgcaaacgaaaacactactctaacaacataaaaccaaacatacgtacaacgcgcaaaaactaacgaaccgctatataccgaacaacctacccgccgtaaaataactaacctacgacaacgattacctaacaaacataaaactcgacgacacaccgctaataaaatacacccgcgaccgcctacaccgaaaaacgctacgcaacttcgaccgttataaactcaccaacgcttatacccctaaccgaacaattacaaaaccaacacctaaacaactactatctaaccgcgattacacctaaaacgacaacgacgaactcatccgcatcaacaacccgcgccaaacccgaaattacaactacaacaccaccgacaaactaaccgacgttcacaccaccgcaacgaatctaaatatccgcatcccgtataccacaaacccgacaaataaccgcctacccgacccgaaactacacccgaacaacaccctcaacatataaccgaataaccgtatcgcccgtaacgcgcactatctttaccgatataaaccgtcacgacaaactaacaaaaaaaaccgacctcatcccgaaaaaaattatccgcacgaataataaacgaactcaccgataccattacgacaatcaacaccgactaatacactacacgcgaacacaatatcaaaaaccgctaatcgaaaatcgctatctttacgacccgctaaaccgcaaaataacaaaacgaatataacgacgtaaacgaaacctaacgaactaaatatcgctatcacgaaaaccgcaaataacctaatacgactaaaacgacgaccgactaaccacgatacaaaacgacaaaacccgcatccaaacgatttatcaaccgaaaaacttcacgccactcatcaaaattaaaaccgccaccgataaactaacgaaaacgcaacgccgcaacctaacgaatacccttcaacaatccgacgacgaaaacgataac

SEQ ID NO: 6721 - DNA, 651 bp, Artificial Sequence
  chemically treated genomic DNA (Homo sapiens) CpG-island No: 6721
  unsure (329)
ttatcggcggcgatcggacgtttcgttttaagtgggaagtgtgtggcgcgttaatggataatttgttagcggatttttgcgttgtaaggcgatagtagagaatatacgttgcggtttagatatgtgacgtattcggttatgaattgtcgtgacgttataatgtggcgcgaagaatgtttattttttggagcgtattgtgttgttagcggtcgtcgttgtcgttatatttgaattatttatcgatttcgattgggcgtcggacgtattagttaatgcgtcgatcggggtcgggaaattaatttggttgtcggtgttattgttggcgtatntttgcgtttacgggaagattatattggtggagtttggttgtttggtagcgcgttacgtcgcgtaacggttggcggagttgtttaacgaaaagttaggcgatatcgttggttatcggatgcgtgcgtaaaattgcgtcgggtcgaatattcgtttggaagtggttatcgaaggcgtgttgacgcgtatgatttagcgtgattcggaattgagcggtgttggattggtgatttttgatgaattttatgagcgtagtttgtaggcggatttggcgttggcgttgttattcgatgtgtaataaggtttgcgtgatgattttaaatt

SEQ ID NO: 6722 - DNA, 651 bp, Artificial Sequence
  chemically treated genomic DNA (Homo sapiens) CpG-island No: 6722
  unsure (323)
aatttaaaatcatcacgcaaaccttattacacatcgaataacaacgccaacgccaaatccgcctacaaactacgctcataaaattcatcaaaaatcaccaatccaacaccgctcaattccgaatcacgctaaatcatacgcgtcaacacgccttcgataaccacttccaaacgaatattcgacccgacgcaattttacgcacgcatccgataaccaacgatatcgcctaacttttcgttaaacaactccgccaaccgttacgcgacgtaacgcgctaccaaacaaccaaactccaccaatataatcttcccgtaaacgcaaanatacgccaacaataacaccgacaaccaaattaatttcccgaccccgatcgacgcattaactaatacgtccgacgcccaatcgaaatcgataaataattcaaatataacgacaacgacgaccgctaacaacacaatacgctccaaaaaataaacattcttcgcgccacattataacgtcacgacaattcataaccgaatacgtcacatatctaaaccgcaacgtatattctctactatcgccttacaacgcaaaaatccgctaacaaattatccattaacgcgccacacacttcccacttaaaacgaaacgtccgatcgccgccgataa

SEQ ID NO: 6723 - DNA, 651 bp, Artificial Sequence
  chemically treated genomic DNA (Homo sapiens) CpG-island No: 6723
  unsure (323)
agtttaaggttattacgtagattttgttgtatatcgagtaatagcgttaacgttaaattcgtttgtaagttgcgtttatgaaatttattaaggattattagtttaatatcgtttagtttcgggttacgttggattatgcgcgttagtacgttttcggtaattatttttaggcgggtattcggttcgacgtagttttgcgtacgtattcggtagttaacggtatcgtttggtttttcgttaagtagtttcgttagtcgttgcgcgacgtaacgcgttgttagataattaggttttattagtataattttttcgtgaacgtaggnatgcgttagtagtaatatcggtagttaggttgatttttcggtttcggtcggcgtattaattaatacgttcggcgtttaatcgagatcggtaagtaatttaggtatgacggtagcgacggtcgttgataatataatacgttttagagggtgaatatttttcgcgttatattgtagcgttacggtaatttataatcgagtgcgttatatgtttgaatcgtaacgtgtgttttttgttatcgttttatagcgtagagattcgttaatagattatttattggcgcgttatatattttttatttgaggcgggacgttcggtcgtcgtcgataa

SEQ ID NO: 6724 - DNA, 651 bp, Artificial Sequence
  chemically treated genomic DNA (Homo sapiens) CpG-island No: 6724
  unsure (329)
ttatcgacgacgaccgaacgtcccgcctcaaataaaaaatatataacgcgccaataaataatctattaacgaatctctacgctataaaacgataacaaaaaacacacgttacgattcaaacatataacgcactcgattataaattaccgtaacgctacaatataacgcgaaaaatattcaccctctaaaacgtattatattatcaacgaccgtcgctaccgtcatacctaaattacttaccgatctcgattaaacgccgaacgtattaattaatacgccgaccgaaaccgaaaaatcaacctaactaccgatattactactaacgcatncctacgttcacgaaaaaattatactaataaaacctaattatctaacaacgcgttacgtcgcgcaacgactaacgaaactacttaacgaaaaaccaaacgataccgttaactaccgaatacgtacgcaaaactacgtcgaaccgaatacccgcctaaaaataattaccgaaaacgtactaacgcgcataatccaacgtaacccgaaactaaacgatattaaactaataatccttaataaatttcataaacgcaacttacaaacgaatttaacgttaacgctattactcgatatacaacaaaatctacgtaataaccttaaact

SEQ ID NO: 6725 - DNA, 524 bp, Artificial Sequence
  chemically treated genomic DNA (Homo sapiens) CpG-island No: 6725
ttttgcgtatcgttaatacgtcgaagcgagagattggttcggttacgttgaaaaagttgggtgagtgggcgatgacgcgtaataaaagtatgtttatcgttagttttgatatgggtttgagttagacgtttagcggacgtggttatgaagtattgattcgttttatttattggttggtagaaatttagcgtttggcggagcgggagtcgattgtcgcggtgcgtgatttgatttatggtatgggattatgaattttggttgtacgaaatatcgtttagttcgaaagtcgtcgaaatgcgtatgaagaacgttaattaattgtttagttggatgacggagatgttggaaggtagtgaattggatgagtcgatgacgtttatttaggtggtgacgcgttttattttgcgcgatatgatggagcgtggtgagagtgaagaagagttggattaggtgtaattgatgattttttacgcgtcgaaagggttggagtttttttatgtttatatggtcggtatggaagaagg

SEQ ID NO: 6726 - DNA, 524 bp, Artificial Sequence
  chemically treated genomic DNA (Homo sapiens) CpG-island No: 6726
ccttcttccataccgaccatataaacataaaaaaactccaaccctttcgacgcgtaaaaaatcatcaattacacctaatccaactcttcttcactctcaccacgctccatcatatcgcgcaaaataaaacgcgtcaccacctaaataaacgtcatcgactcatccaattcactaccttccaacatctccgtcatccaactaaacaattaattaacgttcttcatacgcatttcgacgactttcgaactaaacgatatttcgtacaaccaaaattcataatcccataccataaatcaaatcacgcaccgcgacaatcgactcccgctccgccaaacgctaaatttctaccaaccaataaataaaacgaatcaatacttcataaccacgtccgctaaacgtctaactcaaacccatatcaaaactaacgataaacatacttttattacgcgtcatcgcccactcacccaactttttcaacgtaaccgaaccaatctctcgcttcgacgtattaacgatacgcaaaa

SEQ ID NO: 6727 - DNA, 524 bp, Artificial Sequence
  chemically treated genomic DNA (Homo sapiens) CpG-island No: 6727
tttttttttatatcgattatgtagatataaggaaattttagttttttcgacgcgtggagagttattagttgtatttgatttagtttttttttatttttattacgttttattatgtcgcgtaaagtaaagcgcgttattatttgggtgagcgttatcggtttatttagtttattgttttttagtattttcgttatttagttaaatagttggttgacgttttttatgcgtatttcggcggttttcgggttgggcgatgtttcgtatagttaggatttataattttatgttatggattagattacgtatcgcggtaatcggttttcgtttcgttagacgttggatttttgttaattagtgagtgaagcgggttaatgttttataattacgttcgttaagcgtttgatttaggtttatattaaagttggcggtaaatatgtttttattgcgcgttatcgtttatttatttagtttttttagcgtagtcgggttaatttttcgtttcggcgtgttaacgatacgtagaa

SEQ ID NO: 6728 - DNA, 524 bp, Artificial Sequence
  chemically treated genomic DNA (Homo sapiens) CpG-island No: 6728
ttctacgtatcgttaacacgccgaaacgaaaaattaacccgactacgctaaaaaaactaaataaataaacgataacgcgcaataaaaacatatttaccgccaactttaatataaacctaaatcaaacgcttaacgaacgtaattataaaacattaacccgcttcactcactaattaacaaaaatccaacgtctaacgaaacgaaaaccgattaccgcgatacgtaatctaatccataacataaaattataaatcctaactatacgaaacatcgcccaacccgaaaaccgccgaaatacgcataaaaaacgtcaaccaactatttaactaaataacgaaaatactaaaaaacaataaactaaataaaccgataacgctcacccaaataataacgcgctttactttacgcgacataataaaacgtaataaaaataaaaaaaaactaaatcaaatacaactaataactctccacgcgtcgaaaaaactaaaatttccttatatctacataatcgatataaaaaaaaa

SEQ ID NO: 6729 - DNA, 719 bp, Artificial Sequence
  chemically treated genomic DNA (Homo sapiens) CpG-island No: 6729
  unsure (656, 675..676, 683, 685..686, 692..693, 699..)
tgcggtatcgttgtgttatggcgatttcggacgatttgatttttaaatttgtagatatgttaggcgagaaagtggcgaaggttaatagtgggtattgtacgaagcgcgtgcgcgacggtatggtggttgaatttgttgtttcgcgaggtaatgtcggattttgtatttgcgttttgacgtaggattcgcgtttggatatcgttgaataggttacgtagtttgttaaatacgttaattcggatttatcgcgatcgtatcgcgtttttcgaagagtcgatgtaaaattcggcgtatgattcgcgagtcgttttgtcgtgaaattcggtattgttattgtttgggatgaaagtttgcgcgagtcggattttgtttttgtggttgaagagggcgtgcgcgcggtagttattaaatttacgtttacgggtagtttggaaaaagtacgcgagttaggtatagcgcggcgtacgcgttggggttgacggcggtgattagtttttttattgaatcgagtttaggtttaacgtaattggcgcggattgtcgtttggttaacgtcggatattattttagggttggatacgttggatttgatgtaggcgtagtaggtacgtcgttggtcgggtagtacgttgtttgtcgtggaagttgatgtattgngagcggttagttatgtatnnttttttntnngattgnngtcgtnnggtagttattggttgtgta

SEQ ID NO: 6730 - DNA, 719 bp, Artificial Sequence
  chemically treated genomic DNA (Homo sapiens) CpG-island No: 6730
  unsure (20..21, 27..28, 34..35, 37, 44..45, 64)
tacacaaccaataactaccnnacgacnncaatcnnanaaaaaannatacataactaaccgctcncaatacatcaacttccacgacaaacaacgtactacccgaccaacgacgtacctactacgcctacatcaaatccaacgtatccaaccctaaaataatatccgacgttaaccaaacgacaatccgcgccaattacgttaaacctaaactcgattcaataaaaaaactaatcaccgccgtcaaccccaacgcgtacgccgcgctatacctaactcgcgtactttttccaaactacccgtaaacgtaaatttaataactaccgcgcgcacgccctcttcaaccacaaaaacaaaatccgactcgcgcaaactttcatcccaaacaataacaataccgaatttcacgacaaaacgactcgcgaatcatacgccgaattttacatcgactcttcgaaaaacgcgatacgatcgcgataaatccgaattaacgtatttaacaaactacgtaacctattcaacgatatccaaacgcgaatcctacgtcaaaacgcaaatacaaaatccgacattacctcgcgaaacaacaaattcaaccaccataccgtcgcgcacgcgcttcgtacaatacccactattaaccttcgccactttctcgcctaacatatctacaaatttaaaaatcaaatcgtccgaaatcgccataacacaacgataccgca

SEQ ID NO: 6731 - DNA, 719 bp, Artificial Sequence
  chemically treated genomic DNA (Homo sapiens) CpG-island No: 6731
  unsure (20..21, 27..28, 34..35, 37, 44..45, 64)
tgtatagttagtgattgttnnacggtnntagttnnangagaagnnatgtataattaatcgtttntagtgtattaatttttacgataggtagcgtgttattcggttagcgacgtatttgttgcgtttgtattagatttagcgtgtttagttttggaatggtgttcggcgttaattaggcggtaattcgcgttagttgcgttaagtttaagttcgatttaatggaagaattgattatcgtcgttagttttagcgcgtgcgtcgcgttgtatttggttcgcgtattttttttagattgttcgtgagcgtgggtttgataattatcgcgcgtacgttttttttagttataaaggtaaaattcggttcgcgtaggtttttattttaggtaatggtaatgtcggattttacggtaaagcgattcgcgaattatacgtcgggttttgtatcggtttttcgagaaacgcgatgcggtcgcgataaattcgggttaacgtatttggtaaattgcgtgatttgtttagcggtgtttaggcgcgaattttgcgttaagacgtaaatgtagagttcggtattgtttcgcgaggtaatagatttagttattatgtcgtcgcgtacgcgtttcgtataatgtttattgttgattttcgttattttttcgtttggtatatttgtaagtttgaggattagatcgttcggaatcgttatgatatagcggtgtcgta

SEQ ID NO: 6732 - DNA, 719 bp, Artificial Sequence
  chemically treated genomic DNA (Homo sapiens) CpG-island No: 6732
  unsure (656, 675..676, 683, 685..686, 692..693, 699..)
tacgacaccgctatatcataacgattccgaacgatctaatcctcaaacttacaaatataccaaacgaaaaaataacgaaaatcaacaataaacattatacgaaacgcgtacgcgacgacataataactaaatctattacctcgcgaaacaataccgaactctacatttacgtcttaacgcaaaattcgcgcctaaacaccgctaaacaaatcacgcaatttaccaaatacgttaacccgaatttatcgcgaccgcatcgcgtttctcgaaaaaccgatacaaaacccgacgtataattcgcgaatcgctttaccgtaaaatccgacattaccattacctaaaataaaaacctacgcgaaccgaattttacctttataactaaaaaaaacgtacgcgcgataattatcaaacccacgctcacgaacaatctaaaaaaaatacgcgaaccaaatacaacgcgacgcacgcgctaaaactaacgacgataatcaattcttccattaaatcgaacttaaacttaacgcaactaacgcgaattaccgcctaattaacgccgaacaccattccaaaactaaacacgctaaatctaatacaaacgcaacaaatacgtcgctaaccgaataacacgctacctatcgtaaaaattaatacactanaaacgattaattatacatnncttctcntnnaactannaccgtnnaacaatcactaactataca

SEQ ID NO: 6733 - DNA, 718 bp, Artificial Sequence
  chemically treated genomic DNA (Homo sapiens) CpG-island No: 6733
attcgacgttagttttttttggttcgggcgtgagacgcgtttttttcgtgtttgttttttcgtttttttgcgttggatgttgtatagcgtaggtttttttttttttcgtttttcgtttttaaaattttattattgagaattcgatagttgtttcgagatgttgattttagtttacggagttagcgtgcgcgtttttaatgttcggtatatttatttttatttcgggattttttttttttttgcgggttttggattttcgggaggaagtttcgggtttttcggtttttcggagatatcggttgaggcgtttaggttagtgtagagtcgtcgtattgggatttaggcgttttttataggtgtacgtagggtatggtttaacggtttttcggatgggcggggaaatagtttcgggcggagtaattcgattattttattatgtttttgcggatgtttagaaaagttacgaggttcgggggatcgttttagtagtggtttggaaaggagagggcgcggcgaggggcgtatttcgcgtttagggtttacgtcgtttaggtttcgtgtttgttttttcgttattttaatttcgtattcgggattgttggtggttttttttttttttcgtcgttttcgtcgggttgtttagtttttttagggttatagatgcgtttttttttttttagtttcgcgggatacggaggtgagagtattgagatgggga

SEQ ID NO: 6734 - DNA, 718 bp, Artificial Sequence
  chemically treated genomic DNA (Homo sapiens) CpG-island No: 6734
tccccatctcaatactctcacctccgtatcccgcgaaactaaaaaaaaaaaaacgcatctataaccctaaaaaaactaaacaacccgacgaaaacgacgaaaaaaaaaaaaaaccaccaacaatcccgaatacgaaattaaaataacgaaaaaacaaacacgaaacctaaacgacgtaaaccctaaacgcgaaatacgcccctcgccgcgccctctcctttccaaaccactactaaaacgatcccccgaacctcgtaacttttctaaacatccgcaaaaacataataaaataatcgaattactccgcccgaaactatttccccgcccatccgaaaaaccgttaaaccataccctacgtacacctataaaaaacgcctaaatcccaatacgacgactctacactaacctaaacgcctcaaccgatatctccgaaaaaccgaaaaacccgaaacttcctcccgaaaatccaaaacccgcaaaaaaaaaaaaaatcccgaaataaaaataaatataccgaacattaaaaacgcgcacgctaactccgtaaactaaaatcaacatctcgaaacaactatcgaattctcaataataaaattttaaaaacgaaaaacgaaaaaaaaaaaaacctacgctatacaacatccaacgcaaaaaaacgaaaaaacaaacacgaaaaaaacgcgtctcacgcccgaaccaaaaaaaactaacgtcgaat

SEQ ID NO: 6735 - DNA, 718 bp, Artificial Sequence
  chemically treated genomic DNA (Homo sapiens) CpG-island No: 6735
tttttattttagtgtttttattttcgtatttcgcggggttggggggaggagggcgtatttgtggttttaaagagattaggtagttcggcgagaacggcggaaagagaagggaattattagtagtttcgggtgcggagttagggtgacggggaggtaggtacggggtttgggcggcgtgggttttgggcgcgaggtgcgtttttcgtcgcgtttttttttttttagattattgttggggcggtttttcgggtttcgtggtttttttgggtattcgtaggggtataatggggtgatcgaattgtttcgttcggggttgttttttcgtttattcgaggggtcgttgggttatgttttacgtgtatttgtgaggggcgtttgggttttagtgcggcgattttgtattggtttaagcgttttagtcggtgttttcggggagtcggagggttcgaggttttttttcgggagtttagagttcgtaggaaaaaaaagggtttcgaaatggagatgagtgtgtcgggtattagggacgcgtacgttggtttcgtgaattgggattagtatttcggggtaattgtcgaatttttaatgataaggttttgggaacgagaggcggggagggaaggggtttgcgttatataatatttagcgtagagggacggaagagtagatacgagaagggcgcgttttacgttcgggttagaggaaattggcgtcgaat

SEQ ID NO: 6736 - DNA, 718 bp, Artificial Sequence
  chemically treated genomic DNA (Homo sapiens) CpG-island No: 6736
attcgacgccaatttcctctaacccgaacgtaaaacgcgcccttctcgtatctactcttccgtccctctacgctaaatattatataacgcaaaccccttccctccccgcctctcgttcccaaaaccttatcattaaaaattcgacaattaccccgaaatactaatcccaattcacgaaaccaacgtacgcgtccctaatacccgacacactcatctccatttcgaaacccttttttttcctacgaactctaaactcccgaaaaaaaacctcgaaccctccgactccccgaaaacaccgactaaaacgcttaaaccaatacaaaatcgccgcactaaaacccaaacgcccctcacaaatacacgtaaaacataacccaacgacccctcgaataaacgaaaaaacaaccccgaacgaaacaattcgatcaccccattatacccctacgaatacccaaaaaaaccacgaaacccgaaaaaccgccccaacaataatctaaaaaaaaaaaaacgcgacgaaaaacgcacctcgcgcccaaaacccacgccgcccaaaccccgtacctacctccccgtcaccctaactccgcacccgaaactactaataattcccttctctttccgccgttctcgccgaactacctaatctctttaaaaccacaaatacgccctcctccccccaaccccgcgaaatacgaaaataaaaacactaaaataaaaa

SEQ ID NO: 6737 - DNA, 621 bp, Artificial Sequence
  chemically treated genomic DNA (Homo sapiens) CpG-island No: 6737
ttgttagaatagcgattatttagaatagcgcgtgtagtttaagtttgtgagtgatgatcgggttaagtattatcgtaattggtaaaggtaatgttaaagtttacgtcgataaacgttatcgttttggtgcggtttcgttcgcgcgtgatatcggaaagtagcgttataacggcggcggtaattgttttagagttttgttagcgttcggtttagaataattttttagatggagtcggaaagcgtagcgataacgttatcggcggtaaatatcgttagtttatcgataattaatggtatgcgattaatgcggtcggaaagtacgttaaacggaatttgataaacggtttgagttcgattatataaattaagggtatattcgtttaatgtttttttgtttatgtaaggtttatgcgtatttggtcgtatcgttaattataaaatgttagtagcgtaagagaatacgtttaatttaggcggttttatttaagacgttataaatcgtttatattttgataattcgatagtaacggtagacggtatttttaatagaaattcgggagtttgttatagtttttattaataggttgtttatcgcgattagttattttttgagtaggaaat

SEQ ID NO: 6738 - DNA, 621 bp, Artificial Sequence
  chemically treated genomic DNA (Homo sapiens) CpG-island No: 6738
atttcctactcaaaaaataactaatcgcgataaacaacctattaataaaaactataacaaactcccgaatttctattaaaaataccgtctaccgttactatcgaattatcaaaatataaacgatttataacgtcttaaataaaaccgcctaaattaaacgtattctcttacgctactaacattttataattaacgatacgaccaaatacgcataaaccttacataaacaaaaaaacattaaacgaatatacccttaatttatataatcgaactcaaaccgtttatcaaattccgtttaacgtactttccgaccgcattaatcgcataccattaattatcgataaactaacgatatttaccgccgataacgttatcgctacgctttccgactccatctaaaaaattattctaaaccgaacgctaacaaaactctaaaacaattaccgccgccgttataacgctactttccgatatcacgcgcgaacgaaaccgcaccaaaacgataacgtttatcgacgtaaactttaacattacctttaccaattacgataatacttaacccgatcatcactcacaaacttaaactacacgcgctattctaaataatcgctattctaacaa

SEQ ID NO: 6739 - DNA, 621 bp, Artificial Sequence
  chemically treated genomic DNA (Homo sapiens) CpG-island No: 6739
gttttttgtttaaggagtggttgatcgcggtggatagtttgttagtgggggttgtagtagattttcggatttttattgaggatgtcgtttgtcgttgttatcggattgttagggtgtaggcggtttatggcgttttgaatggggtcgtttgggttaggcgtatttttttgcgttgttggtattttatggttggcggtgcggttaagtgcgtatgggttttgtatgggtagggaagtattgagcgggtatgtttttggtttgtatggtcggatttaggtcgtttgttagatttcgtttggcgtgtttttcgatcgtattggtcgtatattattagttgtcggtgggttggcggtgtttgtcgtcggtagcgttatcgttgcgtttttcgattttatttggggaattattttgggtcgggcgttagtaaggttttggagtaattgtcgtcgtcgttatggcgttgtttttcgatgttacgcgcgaacgaaatcgtattaaagcgatggcgtttatcggcgtgagttttggtattatttttgttagttgcgatggtgtttggttcgattattatttataaatttgggttgtacgcgttgttttggatgatcgttattttggtaa

SEQ ID NO: 6740 - DNA, 621 bp, Artificial Sequence
  chemically treated genomic DNA (Homo sapiens) CpG-island No: 6740
ttaccaaaataacgatcatccaaaacaacgcgtacaacccaaatttataaataataatcgaaccaaacaccatcgcaactaacaaaaataataccaaaactcacgccgataaacgccatcgctttaatacgatttcgttcgcgcgtaacatcgaaaaacaacgccataacgacgacgacaattactccaaaaccttactaacgcccgacccaaaataattccccaaataaaatcgaaaaacgcaacgataacgctaccgacgacaaacaccgccaacccaccgacaactaataatatacgaccaatacgatcgaaaaacacgccaaacgaaatctaacaaacgacctaaatccgaccatacaaaccaaaaacatacccgctcaatacttccctacccatacaaaacccatacgcacttaaccgcaccgccaaccataaaataccaacaacgcaaaaaaatacgcctaacccaaacgaccccattcaaaacgccataaaccgcctacaccctaacaatccgataacaacgacaaacgacatcctcaataaaaatccgaaaatctactacaacccccactaacaaactatccaccgcgatcaaccactccttaaacaaaaaac

SEQ ID NO: 6741 - DNA, 740 bp, Artificial Sequence
  chemically treated genomic DNA (Homo sapiens) CpG-island No: 6741
gtcgagtcgtcgattattttcgttataaacggcgttagttgtatggcgggcgtaagttgaataatggcgtaattaatgacgtcgagaatataatcgtcggttaggtgtgcgtcgaaagtgagcgtagtaatgcgcgtagtgataacggttaacgggtaattatttattcgtatcggtgaagtggttttttttatttttttattggtcggtaatataacgcgcgtttcgtttgagaagtcgaaagggtagttattaatattcgcgagtcgtcgatatattattttattcgatgacgattcgttttttagattaggatagcgttttcgatttatagtttacggttttcgtatatacgtttataatacgattatcgcgggtcgatttcggagttttattttagtaggttatttcgtaattaataagcggcgtaaagtcgggggaagtttatagcgcgcgtttattttcgcgttagttatttttttacgttttatttacgttacgatcgattattatatttattcgattattcggacgtcgacgacgtttcgattattttatttattattatttttaatttttttgtatttcgtttttttattttttcgttttttttttttttattttttatttttttttttttattatttgttacgttattcgattattatatttatatatatttttttatattatttttcgtaattcgtttttttttatttatttttttattattattttat

SEQ ID NO: 6742 - DNA, 740 bp, Artificial Sequence
  chemically treated genomic DNA (Homo sapiens) CpG-island No: 6742
ataaaataataataaaaaaataaataaaaaaaaacgaattacgaaaaataatataaaaaaatatatataaatataataatcgaataacgtaacaaataataaaaaaaaaaaaataaaaaataaaaaaaaaaaaaacgaaaaaataaaaaaacgaaatacaaaaaaattaaaaataataataaataaaataatcgaaacgtcgtcgacgtccgaataatcgaataaatataataatcgatcgtaacgtaaataaaacgtaaaaaaataactaacgcgaaaataaacgcgcgctataaacttcccccgactttacgccgcttattaattacgaaataacctactaaaataaaactccgaaatcgacccgcgataatcgtattataaacgtatatacgaaaaccgtaaactataaatcgaaaacgctatcctaatctaaaaaacgaatcgtcatcgaataaaataatatatcgacgactcgcgaatattaataactaccctttcgacttctcaaacgaaacgcgcgttatattaccgaccaataaaaaaataaaaaaaaccacttcaccgatacgaataaataattacccgttaaccgttatcactacgcgcattactacgctcactttcgacgcacacctaaccgacgattatattctcgacgtcattaattacgccattattcaacttacgcccgccatacaactaacgccgtttataacgaaaataatcgacgactcgac

SEQ ID NO: 6743 - DNA, 740 bp, Artificial Sequence
  chemically treated genomic DNA (Homo sapiens) CpG-island No: 6743
gtagggtggtgatgagggggtaggtggggggaggcgggttgcggggagtggtgtgaagggatgtgtgtgggtgtggtagtcgggtggcgtagtaggtggtggggagaggggggtgggagatgggggggggaggagcggggaggtgaggaggcgggatgtaggggagttagaggtagtggtgggtgaggtggtcggggcgtcgtcggcgttcgggtggtcgagtgggtgtggtggtcggtcgtggcgtgggtggggcgtgggggagtggttggcgcggggatgagcgcgcgttgtgagtttttttcggttttacgtcgtttgttggttgcgagatggtttgttagaatggaatttcggggtcggttcgcggtgatcgtgttgtgggcgtgtgtgcgggggtcgtgggttgtaggtcgaagacgttgttttagtttgaggaacgggtcgttatcgggtggagtgatgtgtcggcggttcgcggatgttggtggttgttttttcggttttttaggcgagacgcgcgttgtattgtcggttaatgaaggggtagggagaattattttatcggtgcgaatggatgattgttcgttaatcgttgttattgcgcgtattgttgcgtttattttcggcgtatatttgatcgacggttatgttttcggcgttattggttacgttattatttagtttacgttcgttatgtaattgacgtcgtttatggcgggaatgatcggcggttcggt

SEQ ID NO: 6744 - DNA, 740 bp, Artificial Sequence
  chemically treated genomic DNA (Homo sapiens) CpG-island No: 6744
accgaaccgccgatcattcccgccataaacgacgtcaattacataacgaacgtaaactaaataataacgtaaccaataacgccgaaaacataaccgtcgatcaaatatacgccgaaaataaacgcaacaatacgcgcaataacaacgattaacgaacaatcatccattcgcaccgataaaataattctccctaccccttcattaaccgacaatacaacgcgcgtctcgcctaaaaaaccgaaaaaacaaccaccaacatccgcgaaccgccgacacatcactccacccgataacgacccgttcctcaaactaaaacaacgtcttcgacctacaacccacgacccccgcacacacgcccacaacacgatcaccgcgaaccgaccccgaaattccattctaacaaaccatctcgcaaccaacaaacgacgtaaaaccgaaaaaaactcacaacgcgcgctcatccccgcgccaaccactcccccacgccccacccacgccacgaccgaccaccacacccactcgaccacccgaacgccgacgacgccccgaccacctcacccaccactacctctaactcccctacatcccgcctcctcacctccccgctcctcccccccccatctcccacccccctctccccaccacctactacgccacccgactaccacacccacacacatcccttcacaccactccccgcaacccgcctccccccacctaccccctcatcaccaccctac

SEQ ID NO: 6745 - DNA, 607 bp, Artificial Sequence
  chemically treated genomic DNA (Homo sapiens) CpG-island No: 6745
agtgggtcgtttcgcgttttttataaacggtagatgatcgtaggcgtgattgcgcgttgagcgaataaacgttttcgtaattggttgacgttgttcgttatcgcgtacggcggcgtatagtcggttttataagttttcgtttagggttttggttattattagattttggcgtttaaaattttttattatttaatgcggtagcgcggtaatatttattcgcgcggtaattatttgaattaataataaggtgttatcgacgttttttagtgacgggttgacgtttgtcggttgaagaaaatgtcgttagatatttagtcgattacgttgtatcggataaattaatagcgtttcgttggcgagatttttcggtgtaattcgcgttttcgtcgttagtggatggttaggtgttaatattagacgtattttatagtcgaatatcggcgaataatgtaggttattgcgcggtagaatatcggacgttattattagatttagttttttttgttgtaaggcgggttgcgggttaaatgttacgttcgatttaaaatttatttttatttgcggttagtttttatggaaattttttaacgcgggtgttagttaattg

SEQ ID NO: 6746 - DNA, 607 bp, Artificial Sequence
  chemically treated genomic DNA (Homo sapiens) CpG-island No: 6746
caattaactaacacccgcgttaaaaaatttccataaaaactaaccgcaaataaaaataaattttaaatcgaacgtaacatttaacccgcaacccgccttacaacaaaaaaaactaaatctaataataacgtccgatattctaccgcgcaataacctacattattcgccgatattcgactataaaatacgtctaatattaacacctaaccatccactaacgacgaaaacgcgaattacaccgaaaaatctcgccaacgaaacgctattaatttatccgatacaacgtaatcgactaaatatctaacgacattttcttcaaccgacaaacgtcaacccgtcactaaaaaacgtcgataacaccttattattaattcaaataattaccgcgcgaataaatattaccgcgctaccgcattaaataataaaaaattttaaacgccaaaatctaataataaccaaaaccctaaacgaaaacttataaaaccgactatacgccgccgtacgcgataacgaacaacgtcaaccaattacgaaaacgtttattcgctcaacgcgcaatcacgcctacgatcatctaccgtttataaaaaacgcgaaacgacccact

SEQ ID NO: 6747 - DNA, 607 bp, Artificial Sequence
  chemically treated genomic DNA (Homo sapiens) CpG-island No: 6747
tagttggttgatattcgcgttagaaaatttttataagaattggtcgtaggtagagatggattttaaatcgggcgtgatatttgattcgtagttcgttttgtaatagggagagttggatttggtaatgacgttcgatattttgtcgcgtagtggtttgtattattcgtcgatgttcgattatgaagtgcgtttggtgttagtatttgattatttattggcggcgaaaacgcgaattatatcggaagatttcgttagcgagacgttattaatttattcggtgtagcgtagtcgattggatgtttggcggtattttttttagtcggtaggcgttagttcgttattgaaaagcgtcgataatattttattgttgatttagatggttgtcgcgcggatgggtattgtcgcgttatcgtattgggtagtagagagttttgagcgttagggtttggtggtgattaaaattttgggcgaaggtttgtggagtcgattgtacgtcgtcgtgcgcgatggcgagtagcgttagttagttacggaagcgtttattcgtttagcgcgtaattacgtttgcgattatttgtcgtttgtgaagagcgcggagcgatttatt

SEQ ID NO: 6748 - DNA, 607 bp, Artificial Sequence
  chemically treated genomic DNA (Homo sapiens) CpG-island No: 6748
aataaatcgctccgcgctcttcacaaacgacaaataatcgcaaacgtaattacgcgctaaacgaataaacgcttccgtaactaactaacgctactcgccatcgcgcacgacgacgtacaatcgactccacaaaccttcgcccaaaattttaatcaccaccaaaccctaacgctcaaaactctctactacccaatacgataacgcgacaatacccatccgcgcgacaaccatctaaatcaacaataaaatattatcgacgcttttcaataacgaactaacgcctaccgactaaaaaaaataccgccaaacatccaatcgactacgctacaccgaataaattaataacgtctcgctaacgaaatcttccgatataattcgcgttttcgccgccaataaataatcaaatactaacaccaaacgcacttcataatcgaacatcgacgaataatacaaaccactacgcgacaaaatatcgaacgtcattaccaaatccaactctccctattacaaaacgaactacgaatcaaatatcacgcccgatttaaaatccatctctacctacgaccaattcttataaaaattttctaacgcgaatatcaaccaacta

SEQ ID NO: 6749 - DNA, 593 bp, Artificial Sequence
  chemically treated genomic DNA (Homo sapiens) CpG-island No: 6749
ggatgggggcgttcgagaggggcgaagaaaggggggggtagcggggtagcgagagggagcgggcggcggtcggtggaggagagagggatcggaggcgtagaaggggttcggataggaggttgggggggggagaggcgtacgttaggagaggaggtggagaaggcgcgagggggaagaggggggggaggggtagggggggggaggaggggagagaggcgaggagaggcggtaggcgacggagggaagcgaggggacgagcggcgagggtcgttaggagggggcgagatcggggaggggagggggcggaggggggggggcggcggatacgaagggggggtgtggggagggagggggggtcgggagcggaggggggggcgggaggggggcgcgcgggggtggtaggagttgggggcgcggggagaaaggaagaaggggttagagggataacgagcgcgtaggaagggagagggggggaaggggagagagggggtaggggtgcgtaggcggggtagggagggagggaggggagggagggagaggggggcgtgggggttgggtgcggggtaggggggggggagaggggggagttagtg

SEQ ID NO: 6750 - DNA, 593 bp, Artificial Sequence
  chemically treated genomic DNA (Homo sapiens) CpG-island No: 6750
cactaactcccccctctcccccccccctaccccgcacccaacccccacgcccccctctccctccctcccctccctccctccctaccccgcctacgcacccctaccccctctctccccttccccccctctcccttcctacgcgctcgttatccctctaaccccttcttcctttctccccgcgcccccaactcctaccacccccgcgcgcccccctcccgcccccccctccgctcccgaccccccctccctccccacacccccccttcgtatccgccgcccccccccctccgccccctcccctccccgatctcgccccctcctaacgaccctcgccgctcgtcccctcgcttccctccgtcgcctaccgcctctcctcgcctctctcccctcctccccccccctacccctcccccccctcttccccctcgcgccttctccacctcctctcctaacgtacgcctctcccccccccaacctcctatccgaaccccttctacgcctccgatccctctctcctccaccgaccgccgcccgctccctctcgctaccccgctacccccccctttcttcgcccctctcgaacgcccccatcc

SEQ ID NO: 6751 - DNA, 593 bp, Artificial Sequence
  chemically treated genomic DNA (Homo sapiens) CpG-island No: 6751
tattggttttttttttttttttttttttgtttcgtatttaatttttacgttttttttttttttttttttttttttttttttttgtttcgtttgcgtatttttattttttttttttttttttttttttttttttttttgcgcgttcgttatttttttggtttttttttttttttttttcgcgtttttagtttttgttattttcgcgcgtttttttttcgttttttttttcgttttcgattttttttttttttttatatttttttttcgtgttcgtcgttttttttttttcgttttttttttttttcggtttcgtttttttttggcgattttcgtcgttcgttttttcgttttttttcgtcgtttgtcgttttttttcgtttttttttttttttttttttttttgtttttttttttttttttttttttcgcgttttttttatttttttttttagcgtgcgttttttttttttttagttttttgttcgagttttttttacgttttcgattttttttttttttatcggtcgtcgttcgttttttttcgttgtttcgttgttttttttttttttcgtttttttcgggcgtttttattt

SEQ ID NO: 6752 - DNA, 593 bp, Artificial Sequence
  chemically treated genomic DNA (Homo sapiens) CpG-island No: 6752
aaataaaaacgcccgaaaaaaacgaaaaaaaaaaaaaacaacgaaacaacgaaaaaaaacgaacgacgaccgataaaaaaaaaaaaaatcgaaaacgtaaaaaaaactcgaacaaaaaactaaaaaaaaaaaaaacgcacgctaaaaaaaaaaataaaaaaaacgcgaaaaaaaaaaaaaaaaaaaaaaacaaaaaaaaaaaaaaaaaaaaaaaaacgaaaaaaaacgacaaacgacgaaaaaaaacgaaaaaacgaacgacgaaaatcgccaaaaaaaaacgaaaccgaaaaaaaaaaaaaacgaaaaaaaaaaaacgacgaacacgaaaaaaaaatataaaaaaaaaaaaaaaatcgaaaacgaaaaaaaaaacgaaaaaaaaacgcgcgaaaataacaaaaactaaaaacgcgaaaaaaaaaaaaaaaaaaaccaaaaaaataacgaacgcgcaaaaaaaaaaaaaaaaaaaaaaaaaaaaaaaaaataaaaatacgcaaacgaaacaaaaaaaaaaaaaaaaaaaaaaaaaaaaaaaaaacgtaaaaattaaatacgaaacaaaaaaaaaaaaaaaaaaaaaaccaata

SEQ ID NO: 6753 - DNA, 639 bp, Artificial Sequence
  chemically treated genomic DNA (Homo sapiens) CpG-island No: 6753
cgcgttgttattaatggtgaataggttacgcgttatatttatcgttagtttcgggtagtcgttaaatatgcgtgggttattaaggaacgtcggtagtttttggtatatacgtatatcgcgtagcggattattttttttatgttgacgatttttcgtcgttttttgtttttcgaaatcgtcgttttttttttttgaacgtttcgtttcgttgggtttttcggcgcgtttttcgtttttatcggagcggaatcgggtttttatttcgggttcggtattatttcggttatttttcgggttgtggcgttttcgatcgcgatttttttgggtcgtatcgttgcgcgtttgttatatatcgcgttcggagtatattcgtgtgtttacgttcgtggttatttcgtattgttcgtgtgtttgtatgtttcgtcgtgcgtcgcggcgtcgtttgttttttattttcgtaattatagtcgcgcgtcgaattagcggaattagttatatcgttatatatatacgtacgtcgtattcgttttttattcgttatatttacgttttcgtttagtatcgcgtttcgagcgtattattttcgcgttttttttcgtttcgttacgattcgtacgcggttcgtatcgttaagtcgtt

SEQ ID NO: 6754 - DNA, 639 bp, Artificial Sequence
  chemically treated genomic DNA (Homo sapiens) CpG-island No: 6754
aacgacttaacgatacgaaccgcgtacgaatcgtaacgaaacgaaaaaaaacgcgaaaataatacgctcgaaacgcgatactaaacgaaaacgtaaatataacgaataaaaaacgaatacgacgtacgtatatatataacgatataactaattccgctaattcgacgcgcgactataattacgaaaataaaaaacaaacgacgccgcgacgcacgacgaaacatacaaacacacgaacaatacgaaataaccacgaacgtaaacacacgaatatactccgaacgcgatatataacaaacgcgcaacgatacgacccaaaaaaatcgcgatcgaaaacgccacaacccgaaaaataaccgaaataataccgaacccgaaataaaaacccgattccgctccgataaaaacgaaaaacgcgccgaaaaacccaacgaaacgaaacgttcaaaaaaaaaaaacgacgatttcgaaaaacaaaaaacgacgaaaaatcgtcaacataaaaaaaataatccgctacgcgatatacgtatataccaaaaactaccgacgttccttaataacccacgcatatttaacgactacccgaaactaacgataaatataacgcgtaacctattcaccattaataacaacgcg

SEQ ID NO: 6755 - DNA, 639 bp, Artificial Sequence
  chemically treated genomic DNA (Homo sapiens) CpG-island No: 6755
ggcgatttggcggtgcgggtcgcgtgcgggtcgtggcggggcgggggggggcgcgggggtggtgcgttcggggcgcggtgttgggcggaggcgtgggtgtggcgggtggggggcgggtacggcgtgcgtgtgtgtgtggcggtgtggttagtttcgttggttcggcgcgcggttgtggttgcgggggtgggggataggcggcgtcgcggcgtacggcggggtatataggtatacggataatgcggggtaattacgggcgtaaatatacgggtgtatttcggacgcgatgtgtagtaggcgcgtagcggtgcggtttagggggatcgcggtcgaagacgttatagttcggggggtggtcgggatagtgtcgggttcgggatggaagttcggtttcgtttcggtgaggacgggaggcgcgtcgggaagtttagcgagacggggcgtttagggagggagagcgacgatttcggagagtagagggcggcggaagatcgttagtatggggagagtggttcgttgcgcgatatgcgtatgtattagaaattatcggcgttttttgataatttacgtatgtttagcggttattcggagttggcggtgggtgtggcgcgtgatttgtttattattgatggtagcgcg

SEQ ID NO: 6756 - DNA, 639 bp, Artificial Sequence
  chemically treated genomic DNA (Homo sapiens) CpG-island No: 6756
cgcgctaccatcaataataaacaaatcacgcgccacacccaccgccaactccgaataaccgctaaacatacgtaaattatcaaaaaacgccgataatttctaatacatacgcatatcgcgcaacgaaccactctccccatactaacgatcttccgccgccctctactctccgaaatcgtcgctctccctccctaaacgccccgtctcgctaaacttcccgacgcgcctcccgtcctcaccgaaacgaaaccgaacttccatcccgaacccgacactatcccgaccaccccccgaactataacgtcttcgaccgcgatccccctaaaccgcaccgctacgcgcctactacacatcgcgtccgaaatacacccgtatatttacgcccgtaattaccccgcattatccgtatacctatataccccgccgtacgccgcgacgccgcctatcccccacccccgcaaccacaaccgcgcgccgaaccaacgaaactaaccacaccgccacacacacacgcacgccgtacccgccccccacccgccacacccacgcctccgcccaacaccgcgccccgaacgcaccacccccgcgcccccccccgccccgccacgacccgcacgcgacccgcaccgccaaatcgcc

SEQ ID NO: 6757 - DNA, 753 bp, Artificial Sequence
  chemically treated genomic DNA (Homo sapiens) CpG-island No: 6757
gatttcggtttgtaattttatttgtatatcgttgttttacgtcgataggttgtcgatattcgggtagagttggaattacggattgttgagatagtgcgcgtattttagcgttttgttgatggagtttattaacggataatttatgatttttatcgttagcgttatttgcgcgcggtttgttattttaacgttttttttttggtcgttacggttacgacgacgcgtttcgttattggttttttgattgttttcgttttagttcgttagttggattacgcgattatcggtattttgggcgagttggtttgttttcgtttgagttttttgttttgcgttcgttcgggtttttttttggttattggtacgacgttgttttaggtttttgtcggttgttcgtcggtttttacgcgtggtacgtcgattgtcgttcgttcgtttaaggtatttcgttttttcgttgtacgattagttgcgcggttattttcggggttcgtcggttgtttttttcgcggtttttcgcgttttattgtgttttttggttttttttgtgttttttttttttcgtttttcgtcgttttttcgttttcgtttttgttttttcgttttttcgtttttttttgttcgtggtgcgcgtttgttcgttcgttcgttttcgtttttgttgtttcgtttttttggcggtgttttcgtcgttcgtttttttgcgtgtttttattcgttttcgtcgtttttttcggttcgtcgtcgcgtttt

SEQ ID NO: 6758 - DNA, 753 bp, Artificial Sequence
  chemically treated genomic DNA (Homo sapiens) CpG-island No: 6758
aaaacgcgacgacgaaccgaaaaaaacgacgaaaacgaataaaaacacgcaaaaaaacgaacgacgaaaacaccgccaaaaaaacgaaacaacaaaaacgaaaacgaacgaacgaacaaacgcgcaccacgaacaaaaaaaaacgaaaaaacgaaaaaacaaaaacgaaaacgaaaaaacgacgaaaaacgaaaaaaaaaaaacacaaaaaaaaccaaaaaacacaataaaacgcgaaaaaccgcgaaaaaaacaaccgacgaaccccgaaaataaccgcgcaactaatcgtacaacgaaaaaacgaaataccttaaacgaacgaacgacaatcgacgtaccacgcgtaaaaaccgacgaacaaccgacaaaaacctaaaacaacgtcgtaccaataaccaaaaaaaaacccgaacgaacgcaaaacaaaaaactcaaacgaaaacaaaccaactcgcccaaaataccgataatcgcgtaatccaactaacgaactaaaacgaaaacaatcaaaaaaccaataacgaaacgcgtcgtcgtaaccgtaacgaccaaaaaaaaaacgttaaaataacaaaccgcgcgcaaataacgctaacgataaaaatcataaattatccgttaataaactccatcaacaaaacgctaaaatacgcgcactatctcaacaatccgtaattccaactctacccgaatatcgacaacctatcgacgtaaaacaacgatatacaaataaaattacaaaccgaaatc

SEQ ID NO: 6759 - DNA, 753 bp, Artificial Sequence
  chemically treated genomic DNA (Homo sapiens) CpG-island No: 6759
ggggcgcgacggcgggtcggaggagacggcgagggcgagtggagatacgtaggggggcgggcggcgagagtatcgttagagaggcgagatagtagaggcgaagacgagcgagcggataggcgcgtattacgagtaaggggaggcgggagggcgggggggtaaggacggaagcggggagacggcggggaacgaggggaggaaaatataagggagattagggaatataatgaggcgcgaagaatcgcggaggaggtaatcgacgagtttcgggggtgatcgcgtaattagtcgtgtagcggaaggacgaggtgttttgggcgaacggacgatagtcggcgtgttacgcgtgggaatcggcgggtaatcggtaagggtttaggataacgtcgtattaatggttagggggggattcgggcggacgtaaggtagaggatttaggcgaaaataaattagttcgtttaggatgtcggtaatcgcgtgatttagttggcgggttaggacggggatagttaggaagttaataacgagacgcgtcgtcgtggtcgtgacggttagaaagagagcgttgagatggtaagtcgcgcgtaggtgacgttggcgatggagattatggattattcgttgatgagttttattagtaaggcgttgggatacgcgtattattttaataattcgtggttttagttttattcggatatcggtaatttgtcggcgtgggataacgatgtgtagatggagttgtaggtcggaatt

SEQ ID NO: 6760 - DNA, 753 bp, Artificial Sequence
  chemically treated genomic DNA (Homo sapiens) CpG-island No: 6760
aattccgacctacaactccatctacacatcgttatcccacgccgacaaattaccgatatccgaataaaactaaaaccacgaattattaaaataatacgcgtatcccaacgccttactaataaaactcatcaacgaataatccataatctccatcgccaacgtcacctacgcgcgacttaccatctcaacgctctctttctaaccgtcacgaccacgacgacgcgtctcgttattaacttcctaactatccccgtcctaacccgccaactaaatcacgcgattaccgacatcctaaacgaactaatttattttcgcctaaatcctctaccttacgtccgcccgaatccccccctaaccattaatacgacgttatcctaaacccttaccgattacccgccgattcccacgcgtaacacgccgactatcgtccgttcgcccaaaacacctcgtccttccgctacacgactaattacgcgatcacccccgaaactcgtcgattacctcctccgcgattcttcgcgcctcattatattccctaatctcccttatattttcctcccctcgttccccgccgtctccccgcttccgtccttacccccccgccctcccgcctccccttactcgtaatacgcgcctatccgctcgctcgtcttcgcctctactatctcgcctctctaacgatactctcgccgcccgcccccctacgtatctccactcgccctcgccgtctcctccgacccgccgtcgcgcccc

SEQ ID NO: 6761 - DNA, 874 bp, Artificial Sequence
  chemically treated genomic DNA (Homo sapiens) CpG-island No: 6761
gagatttattttttatgcggatagtcgtttgacgttttttgttcgggagttgttggaaagtcgcgtatttgcgtattaagtttattgacgagtagggtcgtttgtttgttgacgatgaatagtagtagtcgtagttcgtttatgggttgattagtagcgatgaatattcgtaggcgtgttgcgaattgtgtcgttagtcggtggtaaaaaagtcggatacgttgatttatttgtcggcggaaaaaatggtcgttaaaagcgattcgcgtttgggttttcgcgcggttttcgatagtattattgcgttggtagtgtggttgtaaattgaattggcggaatcgtggtagtcgtggttggcggatattcgttcgcgttttggtaatattatgcgcgtcgatgcgttgggggaatcgttgggttgttaggcgattgtcgggttttttgacgaagatttgtatcggtttttttattagtcgttgcgttatttcgattacgattatttggtgtcggaagttagttacgggcgcgatgttgcgttgtttaatttgttacgtattaaagtgcgggaaatcgaaatcgtagcggcgtaggtttttattattcgtagttttgaagtattacgttcggatatttgtaggcgttgaatcggttttcgagtacggtttacgtgatgatgattttgagcgtaacgaagtagcgttaacggtgagtagatttagacgattgggggatcgtatgatttggacgtcgcgtgtttgggttggaggtcgtcgagggttatcggaggtaattacgtggcgaacggatatatttatagggggatttttgggtttacgagaattggatggttatagggagaggtaggtatcgggtt

SEQ ID NO: 6762 - DNA, 874 bp, Artificial Sequence
  chemically treated genomic DNA (Homo sapiens) CpG-island No: 6762
aacccgatacctacctctccctataaccatccaattctcgtaaacccaaaaatccccctataaatatatccgttcgccacgtaattacctccgataaccctcgacgacctccaacccaaacacgcgacgtccaaatcatacgatcccccaatcgtctaaatctactcaccgttaacgctacttcgttacgctcaaaatcatcatcacgtaaaccgtactcgaaaaccgattcaacgcctacaaatatccgaacgtaatacttcaaaactacgaataataaaaacctacgccgctacgatttcgatttcccgcactttaatacgtaacaaattaaacaacgcaacatcgcgcccgtaactaacttccgacaccaaataatcgtaatcgaaataacgcaacgactaataaaaaaaccgatacaaatcttcgtcaaaaaacccgacaatcgcctaacaacccaacgattcccccaacgcatcgacgcgcataatattaccaaaacgcgaacgaatatccgccaaccacgactaccacgattccgccaattcaatttacaaccacactaccaacgcaataatactatcgaaaaccgcgcgaaaacccaaacgcgaatcgcttttaacgaccattttttccgccgacaaataaatcaacgtatccgacttttttaccaccgactaacgacacaattcgcaacacgcctacgaatattcatcgctactaatcaacccataaacgaactacgactactactattcatcgtcaacaaacaaacgaccctactcgtcaataaacttaatacgcaaatacgcgactttccaacaactcccgaacaaaaaacgtcaaacgactatccgcataaaaaataaatctc

SEQ ID NO: 6763 - DNA, 874 bp, Artificial Sequence
  chemically treated genomic DNA (Homo sapiens) CpG-island No: 6763
ggttcgatatttgtttttttttgtggttatttagttttcgtgggtttaagggtttttttgtgagtatgttcgttcgttacgtggttattttcggtaattttcggcggtttttaatttaggtacgcgacgtttaaattatgcggttttttagtcgtttggatttgtttatcgttagcgttgtttcgttacgtttaggattattattacgtagatcgtgttcgaaagtcggtttagcgtttgtaaatgttcgggcgtaatattttaaagttgcgggtgataaagatttgcgtcgttacggtttcggtttttcgtattttggtgcgtagtagattgagtaacgtagtatcgcgttcgtggttggttttcggtattagatgatcgtggtcgagatagcgtagcggttgatgagaaagtcgatgtagattttcgttagaaagttcgataatcgtttggtagtttagcggtttttttagcgtatcggcgcgtataatgttgttaagacgcgaacggatattcgttagttacggttgttacggtttcgttagtttaatttgtagttatattgttagcgtaatggtgttgtcgagaatcgcgcgaaaatttagacgcggatcgtttttggcgattatttttttcgtcgataggtgagttagcgtattcggtttttttgttatcggttggcgatatagttcgtagtacgtttgcggatgtttatcgttattggttagtttatgaacgggttgcggttgttgttgtttatcgttaataaataggcggttttgttcgttaataaatttgatgcgtagatgcgcggttttttagtaattttcgggtagagggcgttaggcgattgttcgtatgggagatggatttt

SEQ ID NO: 6764 - DNA, 874 bp, Artificial Sequence
  chemically treated genomic DNA (Homo sapiens) CpG-island No: 6764
aaaatccatctcccatacgaacaatcgcctaacgccctctacccgaaaattactaaaaaaccgcgcatctacgcatcaaatttattaacgaacaaaaccgcctatttattaacgataaacaacaacaaccgcaacccgttcataaactaaccaataacgataaacatccgcaaacgtactacgaactatatcgccaaccgataacaaaaaaaccgaatacgctaactcacctatcgacgaaaaaaataatcgccaaaaacgatccgcgtctaaattttcgcgcgattctcgacaacaccattacgctaacaatataactacaaattaaactaacgaaaccgtaacaaccgtaactaacgaatatccgttcgcgtcttaacaacattatacgcgccgatacgctaaaaaaaccgctaaactaccaaacgattatcgaactttctaacgaaaatctacatcgactttctcatcaaccgctacgctatctcgaccacgatcatctaataccgaaaaccaaccacgaacgcgatactacgttactcaatctactacgcaccaaaatacgaaaaaccgaaaccgtaacgacgcaaatctttatcacccgcaactttaaaatattacgcccgaacatttacaaacgctaaaccgactttcgaacacgatctacgtaataataatcctaaacgtaacgaaacaacgctaacgataaacaaatccaaacgactaaaaaaccgcataatttaaacgtcgcgtacctaaattaaaaaccgccgaaaattaccgaaaataaccacgtaacgaacgaacatactcacaaaaaaacccttaaacccacgaaaactaaataaccacaaaaaaaaacaaatatcgaacc

SEQ ID NO: 6765 - DNA, 857 bp, Artificial Sequence
  chemically treated genomic DNA (Homo sapiens) CpG-island No: 6765
gtaatcggcgtatttaataagttataattagtttgaatataattaggttgttgtagtaattcgcgtattttttcgtcgttgagttggcgcgtttaggcgaaattcgtaaggttaatcgcgtcgcgttttagatgaatagataacgtatcggtatcgttttgcgttcgtgtaagagacgttagttattgtagatatttcggtttacgtttatcgcgacgcggcgggttaagtattacgacgcgcgtttcggttagcgtgttgcgggtagagatatcgcgtaatattaggcggtcgttatttgttagttataacggggtgtcgaagattagtttagtaaggttattttttagtagtgaaacgcgtttcgtgacgtggttggcggcgtggtgaatatgtagcggttgttattgggttagcggtgtatgggtttgaagttcgataattattcgtgtgaacggttttggcggtatatcggtaagtagttagtcgttacggttaatttgtttttttttcgtattattcgcgatgttaagcgcgatacgttgttcggtattggcgggttttgttggttggttttgcgtatgtagcgtacgtttacgtatcggtttatttatattagttagttagagtgaatcgtttaattttattttttcgtttaaagtcgattcggtgacgatagtcgggattttttacggtaatgcgcggtaaacgcgagcggaatttgttggtgggtgtcgcgttcgggattgataatgtcgttagggttatttcgatacggggtcgggaaaaaatgttgcgatacgatatcgaatattttagggggatattaattatgtagagatggaagagatagtaaa

SEQ ID NO: 6766 - DNA, 857 bp, Artificial Sequence
  chemically treated genomic DNA (Homo sapiens) CpG-island No: 6766
tttactatctcttccatctctacataattaatatccccctaaaatattcgatatcgtatcgcaacattttttcccgaccccgtatcgaaataaccctaacgacattatcaatcccgaacgcgacacccaccaacaaattccgctcgcgtttaccgcgcattaccgtaaaaaatcccgactatcgtcaccgaatcgactttaaacgaaaaaataaaattaaacgattcactctaactaactaatataaataaaccgatacgtaaacgtacgctacatacgcaaaaccaaccaacaaaacccgccaataccgaacaacgtatcgcgcttaacatcgcgaataatacgaaaaaaaaacaaattaaccgtaacgactaactacttaccgatataccgccaaaaccgttcacacgaataattatcgaacttcaaacccatacaccgctaacccaataacaaccgctacatattcaccacgccgccaaccacgtcacgaaacgcgtttcactactaaaaaataaccttactaaactaatcttcgacaccccgttataactaacaaataacgaccgcctaatattacgcgatatctctacccgcaacacgctaaccgaaacgcgcgtcgtaatacttaacccgccgcgtcgcgataaacgtaaaccgaaatatctacaataactaacgtctcttacacgaacgcaaaacgataccgatacgttatctattcatctaaaacgcgacgcgattaaccttacgaatttcgcctaaacgcgccaactcaacgacgaaaaaatacgcgaattactacaacaacctaattatattcaaactaattataacttattaaatacgccgattac

SEQ ID NO: 6767 - DNA, 857 bp, Artificial Sequence
  chemically treated genomic DNA (Homo sapiens) CpG-island No: 6767
tttattgttttttttatttttgtatagttgatatttttttaagatgttcggtatcgtgtcgtagtattttttttcgatttcgtgtcgggatgattttggcgatattgttagtttcggacgcgatatttattaataagtttcgttcgcgtttgtcgcgtattatcgtaaaaggtttcggttgtcgttatcggatcggttttaagcggggaagtgaagttaggcgatttattttggttgattggtgtaaataaatcgatgcgtgaacgtgcgttgtatgcgtaaaattagttaatagaattcgttaatgtcgggtagcgtatcgcgtttaatatcgcgggtgatgcggaaaaagagtagattaatcgtggcgattggttgtttgtcgatgtgtcgttagagtcgtttatacgggtgattgtcgagttttaaatttatatatcgttgatttagtggtagtcgttgtatatttattacgtcgttagttacgttacgggacgcgttttattgttggaagataattttgttgaattggttttcgatatttcgttatggttggtagataacgatcgtttggtattgcgcgatatttttgttcgtaatacgttggtcggagcgcgcgtcgtgatgtttaattcgtcgcgtcgcggtaaacgtaagtcggaatatttgtaatggttggcgttttttgtacgggcgtagagcgatgtcgatgcgttatttgtttatttggaacgcggcgcggttaattttgcggatttcgtttgggcgcgttagtttaacggcgaagggatgcgcgaattgttgtaatagtttggttatatttaggttggttatagtttgttgaatgcgtcggttgt

SEQ ID NO: 6768 - DNA, 857 bp, Artificial Sequence
  chemically treated genomic DNA (Homo sapiens) CpG-island No: 6768
acaaccgacgcattcaacaaactataaccaacctaaatataaccaaactattacaacaattcgcgcatcccttcgccgttaaactaacgcgcccaaacgaaatccgcaaaattaaccgcgccgcgttccaaataaacaaataacgcatcgacatcgctctacgcccgtacaaaaaacgccaaccattacaaatattccgacttacgtttaccgcgacgcgacgaattaaacatcacgacgcgcgctccgaccaacgtattacgaacaaaaatatcgcgcaataccaaacgatcgttatctaccaaccataacgaaatatcgaaaaccaattcaacaaaattatcttccaacaataaaacgcgtcccgtaacgtaactaacgacgtaataaatatacaacgactaccactaaatcaacgatatataaatttaaaactcgacaatcacccgtataaacgactctaacgacacatcgacaaacaaccaatcgccacgattaatctactctttttccgcatcacccgcgatattaaacgcgatacgctacccgacattaacgaattctattaactaattttacgcatacaacgcacgttcacgcatcgatttatttacaccaatcaaccaaaataaatcgcctaacttcacttccccgcttaaaaccgatccgataacgacaaccgaaaccttttacgataatacgcgacaaacgcgaacgaaacttattaataaatatcgcgtccgaaactaacaatatcgccaaaatcatcccgacacgaaatcgaaaaaaaatactacgacacgataccgaacatcttaaaaaaatatcaactatacaaaaataaaaaaaacaataaa

SEQ ID NO: 6769 - DNA, 514 bp, Artificial Sequence
  chemically treated genomic DNA (Homo sapiens) CpG-island No: 6769
tcgcgtttcgcgaagttttaatgagcgttttggcgtagattcgcgagtaaggttacgttttggatagcgaagagaacgagtagggcgtgcgttgcgtggcggtgtcggtgtggaattacgagtttcgcgttatcgtcgttttgagtttgtcgacgttgatttttcgcgtggacgacgcggagttggttaattttcgcgagtagttttagtaggtcgggttcgcgttttcgcgcgcgttgggttattcggtttgagtcgttagatcgggtcgtaggtgaagtagttaaagttcgcgtagtagtcgtcgtcggtgatgtttcgtagtgtaggttataaagcgtcgttgagaagcgcgtcgcgatttatcgtcgaagtttagtttattgttttcgtcgttggttcgtttttttaagaattttacggtaatcgttaacgtttcggggaagttcgatttcggcggatggttttacgttaggcgtgggtcggatatgatcgttcgtatacgttattgtgt

SEQ ID NO: 6770 - DNA, 514 bp, Artificial Sequence
  chemically treated genomic DNA (Homo sapiens) CpG-island No: 6770
acacaataacgtatacgaacgatcatatccgacccacgcctaacgtaaaaccatccgccgaaatcgaacttccccgaaacgttaacgattaccgtaaaattcttaaaaaaacgaaccaacgacgaaaacaataaactaaacttcgacgataaatcgcgacgcgcttctcaacgacgctttataacctacactacgaaacatcaccgacgacgactactacgcgaactttaactacttcacctacgacccgatctaacgactcaaaccgaataacccaacgcgcgcgaaaacgcgaacccgacctactaaaactactcgcgaaaattaaccaactccgcgtcgtccacgcgaaaaatcaacgtcgacaaactcaaaacgacgataacgcgaaactcgtaattccacaccgacaccgccacgcaacgcacgccctactcgttctcttcgctatccaaaacgtaaccttactcgcgaatctacgccaaaacgctcattaaaacttcgcgaaacgcga

SEQ ID NO: 6771 - DNA, 514 bp, Artificial Sequence
  chemically treated genomic DNA (Homo sapiens) CpG-island No: 6771
atataatggcgtgtgcgggcggttatattcggtttacgtttggcgtaagattattcgtcgaaatcgggttttttcgggacgttagcggttatcgtaagatttttgaggaaacgagttaacggcggggataataggttgaatttcgacgataaatcgcggcgcgttttttaacggcgttttgtggtttgtattgcgggatattatcggcgacggttgttacgcggattttgattattttatttacgattcggtttaacggtttaggtcgggtagtttagcgcgcgcgagagcgcgagttcggtttgttgaagttgttcgcggaaattagttagtttcgcgtcgtttacgcgggaggttagcgtcgataggtttagggcggcgatgacgcgggattcgtggttttatatcggtatcgttacgtagcgtacgttttgttcgtttttttcgttgtttagggcgtagttttgttcgcgggtttgcgttagggcgtttattaaggtttcgcgagacgcga

SEQ ID NO: 6772 - DNA, 514 bp, Artificial Sequence
  chemically treated genomic DNA (Homo sapiens) CpG-island No: 6772
tcgcgtctcgcgaaaccttaataaacgccctaacgcaaacccgcgaacaaaactacgccctaaacaacgaaaaaaacgaacaaaacgtacgctacgtaacgataccgatataaaaccacgaatcccgcgtcatcgccgccctaaacctatcgacgctaacctcccgcgtaaacgacgcgaaactaactaatttccgcgaacaacttcaacaaaccgaactcgcgctctcgcgcgcgctaaactacccgacctaaaccgttaaaccgaatcgtaaataaaataatcaaaatccgcgtaacaaccgtcgccgataatatcccgcaatacaaaccacaaaacgccgttaaaaaacgcgccgcgatttatcgtcgaaattcaacctattatccccgccgttaactcgtttcctcaaaaatcttacgataaccgctaacgtcccgaaaaaacccgatttcgacgaataatcttacgccaaacgtaaaccgaatataaccgcccgcacacgccattatat

SEQ ID NO: 6773 - DNA, 592 bp, Artificial Sequence
  chemically treated genomic DNA (Homo sapiens) CpG-island No: 6773
tagtttttgtaggaggcgtatcgttttcgtttcggttaatatttgatttttatagttagttttgatggtgaagaattacgtcgttgttattttattttgtcgtatttatttgtttggcgaatattattgtggcggcgaaagttattgaagcgcggacgtttttttcgttatgttcgcgatatatattcgttagcgtatgacgtttggtacgttatgttgtcgtagggtttttttcgttattagtcgtaagtcgaacgttaagcgcgttatttggttaatcgttagttacgattcgttattatttatttgggaatattttattataataaattatacgaaaatttatattcgtattagtaatcgtttattatatttatttttttacgtcgcgtaattttagtatttttttcgtttcgtcggtttttacgacgatttcgaagagtcgaacgtttatcgtaatcgtttttgtttattacgttaatagttttggtcgaaatatataatttatattaatttcgttcgcgtttatgtatgtcgtgttttcgggagcgtcgtattatttttatacgcgttattatatttatacgtttcg

SEQ ID NO: 6774 - DNA, 592 bp, Artificial Sequence
  chemically treated genomic DNA (Homo sapiens) CpG-island No: 6774
cgaaacgtataaatataataacgcgtataaaaataatacgacgctcccgaaaacacgacatacataaacgcgaacgaaattaatataaattatatatttcgaccaaaactattaacgtaataaacaaaaacgattacgataaacgttcgactcttcgaaatcgtcgtaaaaaccgacgaaacgaaaaaaatactaaaattacgcgacgtaaaaaaataaatataataaacgattactaatacgaatataaattttcgtataatttattataataaaatattcccaaataaataataacgaatcgtaactaacgattaaccaaataacgcgcttaacgttcgacttacgactaataacgaaaaaaaccctacgacaacataacgtaccaaacgtcatacgctaacgaatatatatcgcgaacataacgaaaaaaacgtccgcgcttcaataactttcgccgccacaataatattcgccaaacaaataaatacgacaaaataaaataacaacgacgtaattcttcaccatcaaaactaactataaaaatcaaatattaaccgaaacgaaaacgatacgcctcctacaaaaacta

SEQ ID NO: 6775 - DNA, 592 bp, Artificial Sequence
  chemically treated genomic DNA (Homo sapiens) CpG-island No: 6775
cgggacgtgtgggtgtggtggcgcgtgtgggggtggtgcggcgttttcgaggatacgatatgtatgggcgcgagcggagttagtgtgagttgtatatttcggttaaggttgttagcgtgatgggtagaggcggttgcggtaggcgttcgatttttcgggatcgtcgtaggggtcggcggagcgggaggaatgttggggttgcgcggcgtgggaaggtgggtgtggtggacggttgttggtgcgggtgtgagttttcgtgtggtttgttgtggtggggtgtttttagatgggtggtggcgggtcgtggttggcgattggttaggtagcgcgtttggcgttcggtttgcggttgatagcggggagggttttgcggtagtatgacgtgttaggcgttatacgttggcggatgtgtgtcgcgggtatagcgggagaaacgttcgcgttttaatggttttcgtcgttatagtggtgttcgttaggtagataggtgcggtaaagtggagtaataacggcgtaattttttattattaaagttggttgtgaaggttaaatgttgatcggggcgaaagcgatacgttttttgtaaaggttg

SEQ ID NO: 6776 - DNA, 592 bp, Artificial Sequence
  chemically treated genomic DNA (Homo sapiens) CpG-island No: 6776
caacctttacaaaaaacgtatcgctttcgccccgatcaacatttaaccttcacaaccaactttaataataaaaaattacgccgttattactccactttaccgcacctatctacctaacgaacaccactataacgacgaaaaccattaaaacgcgaacgtttctcccgctatacccgcgacacacatccgccaacgtataacgcctaacacgtcatactaccgcaaaaccctccccgctatcaaccgcaaaccgaacgccaaacgcgctacctaaccaatcgccaaccacgacccgccaccacccatctaaaaacaccccaccacaacaaaccacacgaaaactcacacccgcaccaacaaccgtccaccacacccaccttcccacgccgcgcaaccccaacattcctcccgctccgccgacccctacgacgatcccgaaaaatcgaacgcctaccgcaaccgcctctacccatcacgctaacaaccttaaccgaaatatacaactcacactaactccgctcgcgcccatacatatcgtatcctcgaaaacgccgcaccacccccacacgcgccaccacacccacacgtcccg

SEQ ID NO: 6777 - DNA, 871 bp, Artificial Sequence
  chemically treated genomic DNA (Homo sapiens) CpG-island No: 6777
ttttattttaattttttttttagaggggcgaggggatcgatcgcgtttaatgttgcgatcggtttgttttattttttgcgtaataattttaacgtattcgttgttattagtatcgtcgttttcgtatttgttagtattgttagttataattcggttatttttaatagcgtggtgacgaggaagattttttttagttttagcgtaatagtgatgttttggcggatattggcgtgagtggcgcgtgttagtttaattatttgtattaggtcgcgtaggtggttatgggttaatgttgcgtcggcggtttttagcgttacgtttgtgtcgttatttattgtaatttcgatggcggtagtttttatcgttggcgcgtcgttaatatcgttatcgattatcgttagcggcgtatgttgatttagttcggttatcgttttgattttatttttcggtaataggttcgttttaaattttagttttagtttttcggtaattgtcgtcgttgcgcgtggattatcgtcggtgaggattatttttttgacgtttagcgcgtttagttttattgatggtagttgtcgtatcggcgcgtagggtattttgtaacgttatggatattaagtacgttacgttcgtttattaggatatcgttgttcgggttttttatcgtattgaatagaatgttttcggaatttcgggggtaatataggttacgtgatacgtattaattaataatcgttattgtgggtaaggtatcgtgtatgcgtgcgcggtagttttttcggggggggcgtattacgggcgtgtgttgttgtacgcgattatttatcgtttttttttgggttcgttttttttttttgcgttgttttttttgttt

SEQ ID NO: 6778 - DNA, 871 bp, Artificial Sequence
  chemically treated genomic DNA (Homo sapiens) CpG-island No: 6778
aaacaaaaaaaacaacgcaaaaaaaaaaaacgaacccaaaaaaaaacgataaataatcgcgtacaacaacacacgcccgtaatacgccccccccgaaaaaactaccgcgcacgcatacacgataccttacccacaataacgattattaattaatacgtatcacgtaacctatattacccccgaaattccgaaaacattctattcaatacgataaaaaacccgaacaacgatatcctaataaacgaacgtaacgtacttaatatccataacgttacaaaataccctacgcgccgatacgacaactaccatcaataaaactaaacgcgctaaacgtcaaaaaaataatcctcaccgacgataatccacgcgcaacgacgacaattaccgaaaaactaaaactaaaatttaaaacgaacctattaccgaaaaataaaatcaaaacgataaccgaactaaatcaacatacgccgctaacgataatcgataacgatattaacgacgcgccaacgataaaaactaccgccatcgaaattacaataaataacgacacaaacgtaacgctaaaaaccgccgacgcaacattaacccataaccacctacgcgacctaatacaaataattaaactaacacgcgccactcacgccaatatccgccaaaacatcactattacgctaaaactaaaaaaaatcttcctcgtcaccacgctattaaaaataaccgaattataactaacaatactaacaaatacgaaaacgacgatactaataacaacgaatacgttaaaattattacgcaaaaaataaaacaaaccgatcgcaacattaaacgcgatcgatcccctcgcccctctaaaaaaaaaattaaaataaaa

SEQ ID NO: 6779 - DNA, 871 bp, Artificial Sequence
  chemically treated genomic DNA (Homo sapiens) CpG-island No: 6779
aaataagaaaaataacgtagaaaagaaggacgggtttaaaaggaggcggtgaatagtcgcgtgtagtagtatacgttcgtggtgcgtttttttcgagagggttgtcgcgtacgtatatacggtgttttatttataataacggttgttggttgatacgtgttacgtggtttatattgttttcggaatttcggaggtattttgtttaatgcgatgggaagttcgggtaacggtattttggtagacgaacgtgacgtgtttggtgtttatggcgttataggatattttgcgcgtcgatgcggtaattgttattagtgaaattgaacgcgttgggcgttaaaggggtgatttttatcggcgataatttacgcgtagcggcggtaattgtcggggagttggggttggagtttaaagcgggtttgttgtcggaagataaagttaaagcggtgatcgagttgaattaatatgcgtcgttggcgatggtcggtgacggtattaacgacgcgttagcgatgaaagttgtcgttatcgggattgtaatgggtagcggtatagacgtggcgttggaaatcgtcgacgtagtattaatttataattatttgcgcggtttggtgtaaatgattgaattggtacgcgttatttacgttaatattcgttagaatattattattgcgttggggttgaaagggatttttttcgttattacgttgttagggatgatcgggttgtggttggtagtgttggtagatacgggggcgacggtgttggtgatagcgaatgcgttaagattgttgcgtaggagataaggtaaatcgatcgtaatattgagcgcgatcggttttttcgtttttttggggagagggttagggtgagg

SEQ ID NO: 6780 - DNA, 871 bp, Artificial Sequence
  chemically treated genomic DNA (Homo sapiens) CpG-island No: 6780
cctcaccctaaccctctccccaaaaaaacgaaaaaaccgatcgcgctcaatattacgatcgatttaccttatctcctacgcaacaatcttaacgcattcgctatcaccaacaccgtcgcccccgtatctaccaacactaccaaccacaacccgatcatccctaacaacgtaataacgaaaaaaatccctttcaaccccaacgcaataataatattctaacgaatattaacgtaaataacgcgtaccaattcaatcatttacaccaaaccgcgcaaataattataaattaatactacgtcgacgatttccaacgccacgtctataccgctacccattacaatcccgataacgacaactttcatcgctaacgcgtcgttaataccgtcaccgaccatcgccaacgacgcatattaattcaactcgatcaccgctttaactttatcttccgacaacaaacccgctttaaactccaaccccaactccccgacaattaccgccgctacgcgtaaattatcgccgataaaaatcacccctttaacgcccaacgcgttcaatttcactaataacaattaccgcatcgacgcgcaaaatatcctataacgccataaacaccaaacacgtcacgttcgtctaccaaaataccgttacccgaacttcccatcgcattaaacaaaatacctccgaaattccgaaaacaatataaaccacgtaacacgtatcaaccaacaaccgttattataaataaaacaccgtatatacgtacgcgacaaccctctcgaaaaaaacgcaccacgaacgtatactactacacgcgactattcaccgcctccttttaaacccgtccttcttttctacgttatttttcttattt

SEQ ID NO: 6781 - DNA, 532 bp, Artificial Sequence
  chemically treated genomic DNA (Homo sapiens) CpG-island No: 6781
gcgttcgcgtgaggatgttttcggcgttatcgcgtggtcgcgtgattgagatgtcgttacggagagtacgcggttatgtttgaagcgtttggcgcgagcgtgatttcgcgtagtttttggtagtcgggcgtttggcggaaagcgtggttagagtgtttgattgtagtagggcgtgtgtcgtgatgtcgtcgaattggaacgttcgtagcgttcgttgcgtgtcgcgtttgtttgtgtaagttatatgcgttcgatgagcgcggcgaatgtgcgtcgatacgttgcgtatggtcgagttgtttagaatgtatacgttaagtgttgttattgtcgtcgtagcgtgatgtttagatgtgtagataaacggttagttttgacgtattggttgtttatttgttgttgaaagaagcgggtatcgggtttgcgatgtcggttgtttcgttgtttgaaattttcgatgatttgaataacgttaacgatgttatgatttagttgtttaatattgattggtatcgtggtttgatttaggtgt

SEQ ID NO: 6782 - DNA, 532 bp, Artificial Sequence
  chemically treated genomic DNA (Homo sapiens) CpG-island No: 6782
acacctaaatcaaaccacgataccaatcaatattaaacaactaaatcataacatcgttaacgttattcaaatcatcgaaaatttcaaacaacgaaacaaccgacatcgcaaacccgatacccgcttctttcaacaacaaataaacaaccaatacgtcaaaactaaccgtttatctacacatctaaacatcacgctacgacgacaataacaacacttaacgtatacattctaaacaactcgaccatacgcaacgtatcgacgcacattcgccgcgctcatcgaacgcatataacttacacaaacaaacgcgacacgcaacgaacgctacgaacgttccaattcgacgacatcacgacacacgccctactacaatcaaacactctaaccacgctttccgccaaacgcccgactaccaaaaactacgcgaaatcacgctcgcgccaaacgcttcaaacataaccgcgtactctccgtaacgacatctcaatcacgcgaccacgcgataacgccgaaaacatcctcacgcgaacgc

SEQ ID NO: 6783 - DNA, 532 bp, Artificial Sequence
  chemically treated genomic DNA (Homo sapiens) CpG-island No: 6783
gtatttgaattaggttacgatattagttaatattgagtagttgggttatgatatcgttggcgttgtttagattatcgagggttttaaatagcggagtaatcggtatcgtaaattcgatattcgttttttttagtagtaggtggatagttagtacgttaggattggtcgtttatttgtatatttgagtattacgttacggcggtaatggtagtatttgacgtgtgtattttgagtaattcgattatgcgtagcgtatcgacgtatattcgtcgcgtttatcgagcgtatatggtttgtatagatagacgcggtacgtagcggacgttacggacgttttagttcgacggtattacggtatacgttttgttatagttaggtattttgattacgtttttcgttagacgttcgattattagaggttacgcgggattacgttcgcgttagacgttttaggtatgatcgcgtgtttttcgtgacggtattttaattacgcgattacgcggtaacgtcggaaatatttttacgcgagcgt

SEQ ID NO: 6784 - DNA, 532 bp, Artificial Sequence
  chemically treated genomic DNA (Homo sapiens) CpG-island No: 6784
acgctcgcgtaaaaatatttccgacgttaccgcgtaatcgcgtaattaaaataccgtcacgaaaaacacgcgatcatacctaaaacgtctaacgcgaacgtaatcccgcgtaacctctaataatcgaacgtctaacgaaaaacgtaatcaaaatacctaactataacaaaacgtataccgtaataccgtcgaactaaaacgtccgtaacgtccgctacgtaccgcgtctatctatacaaaccatatacgctcgataaacgcgacgaatatacgtcgatacgctacgcataatcgaattactcaaaatacacacgtcaaatactaccattaccgccgtaacgtaatactcaaatatacaaataaacgaccaatcctaacgtactaactatccacctactactaaaaaaaacgaatatcgaatttacgataccgattactccgctatttaaaaccctcgataatctaaacaacgccaacgatatcataacccaactactcaatattaactaatatcgtaacctaattcaaatac

SEQ ID NO: 6785 - DNA, 506 bp, Artificial Sequence
  chemically treated genomic DNA (Homo sapiens) CpG-island No: 6785
cgtttacgtttagttcgcgtaatgtgcggaaatcgttgatttgcggtagttgtatattatttgttttatcgaggatcgttcgtgttagcggatggttggaattttgttttagtgtcgtcgttagacgtaatgttagcgttgtttaatatttttagcgttaattaggttggtggtggtaatagcgttagtatttattagtggcgaaagcggtttgtcgttatgtaattttaaggcgataattgagttaaagggtaattcggtcgggttagcgttaattttgttttgtatcggttgcgggtcgatattttttaacgttaggggttacgtatatattttcgatagggttttagggaataggcgaattcgggtatttcggtataaatcgtttattcgggaaaaatacggtcgttagaaagttcggaaacgtttaaagggagaatcgcgttggttcggtaagcgtttggggagtcgtacgcgcgaatttgttttaatggatttaaaacggg

SEQ ID NO: 6786 - DNA, 506 bp, Artificial Sequence
  chemically treated genomic DNA (Homo sapiens) CpG-island No: 6786
cccgttttaaatccattaaaacaaattcgcgcgtacgactccccaaacgcttaccgaaccaacgcgattctccctttaaacgtttccgaactttctaacgaccgtatttttcccgaataaacgatttataccgaaatacccgaattcgcctattccctaaaaccctatcgaaaatatatacgtaacccctaacgttaaaaaatatcgacccgcaaccgatacaaaacaaaattaacgctaacccgaccgaattaccctttaactcaattatcgccttaaaattacataacgacaaaccgctttcgccactaataaatactaacgctattaccaccaccaacctaattaacgctaaaaatattaaacaacgctaacattacgtctaacgacgacactaaaacaaaattccaaccatccgctaacacgaacgatcctcgataaaacaaataatatacaactaccgcaaatcaacgatttccgcacattacgcgaactaaacgtaaacg

SEQ ID NO: 6787 - DNA, 506 bp, Artificial Sequence
  chemically treated genomic DNA (Homo sapiens) CpG-island No: 6787
ttcgttttaggtttattggggtagattcgcgcgtgcggttttttaggcgtttgtcgggttaacgcgattttttttttgggcgttttcgggttttttggcggtcgtgtttttttcgggtggacggtttatgtcggggtgttcgggttcgtttgttttttgggattttgtcggaagtgtgtacgtagtttttggcgttagaagatgtcgattcgtagtcggtataggataaaattggcgttgattcgatcggattgttttttaatttagttatcgttttagagttgtatggcggtaaatcgttttcgttattggtaaatgttggcgttattgttattattagtttgattaacgttgaaaatgttgaataacgttggtattgcgtttggcggcggtattggagtaaggttttagttattcgttggtacgagcgattttcgataaagtaggtgatatgtagttatcgtaggttaacggttttcgtatattgcgcgggttgggcgtgagcg

SEQ ID NO: 6788 - DNA, 506 bp, Artificial Sequence
  chemically treated genomic DNA (Homo sapiens) CpG-island No: 6788
cgctcacgcccaacccgcgcaatatacgaaaaccgttaacctacgataactacatatcacctactttatcgaaaatcgctcgtaccaacgaataactaaaaccttactccaataccgccgccaaacgcaataccaacgttattcaacattttcaacgttaatcaaactaataataacaataacgccaacatttaccaataacgaaaacgatttaccgccatacaactctaaaacgataactaaattaaaaaacaatccgatcgaatcaacgccaattttatcctataccgactacgaatcgacatcttctaacgccaaaaactacgtacacacttccgacaaaatcccaaaaaacaaacgaacccgaacaccccgacataaaccgtccacccgaaaaaaacacgaccgccaaaaaacccgaaaacgcccaaaaaaaaaatcgcgttaacccgacaaacgcctaaaaaaccgcacgcgcgaatctaccccaataaacctaaaacgaa

SEQ ID NO: 6789 - DNA, 525 bp, Artificial Sequence
  chemically treated genomic DNA (Homo sapiens) CpG-island No: 6789
tatttttgtcgttcgcgttgcggttacggcggtttgaatgttggtaatgatcgggcgagtggttgagatattaaattcggcgagatttaagtagtcgtttggcgtggtataagcgttttgtatatttattacgattagcgtattttgttgcggatcgaaggtaatggttttcggtcgagcggttaaggtcgttattatgttattttttgagttagcgtaggtagatgggcgcggtattgtattagtggttgaatgcgttcgtcgaaggtttcgattttcgatagaaaatcgtcgaaggttaatagtacgttttcggcgataggtacgttgcgattttatttaaatgcgcgcgaattggcggtagaacgattaagttttatttgagtttacggtaatgggacggtatttagaattgggtttacggcgggtattcgaatgcgcgtttaaattttatagtttttgtgaaaatttcggagaaaacggtagtgtagttagataaagaaaaatatcgagaataaaatcggt

SEQ ID NO: 6790 - DNA, 525 bp, Artificial Sequence
  chemically treated genomic DNA (Homo sapiens) CpG-island No: 6790
accgattttattctcgatatttttctttatctaactacactaccgttttctccgaaattttcacaaaaactataaaatttaaacgcgcattcgaatacccgccgtaaacccaattctaaataccgtcccattaccgtaaactcaaataaaacttaatcgttctaccgccaattcgcgcgcatttaaataaaatcgcaacgtacctatcgccgaaaacgtactattaaccttcgacgattttctatcgaaaatcgaaaccttcgacgaacgcattcaaccactaatacaataccgcgcccatctacctacgctaactcaaaaaataacataataacgaccttaaccgctcgaccgaaaaccattaccttcgatccgcaacaaaatacgctaatcgtaataaatatacaaaacgcttataccacgccaaacgactacttaaatctcgccgaatttaatatctcaaccactcgcccgatcattaccaacattcaaaccgccgtaaccgcaacgcgaacgacaaaaata

SEQ ID NO: 6791 - DNA, 525 bp, Artificial Sequence
  chemically treated genomic DNA (Homo sapiens) CpG-island No: 6791
gtcggttttgttttcgatgtttttttttgtttgattgtattgtcgtttttttcggggtttttataggggttgtgagatttgggcgcgtattcgagtattcgtcgtggatttagttttaagtgtcgttttattgtcgtaaatttaaatgggatttagtcgttttatcgttagttcgcgcgtatttagatgaagtcgtagcgtgtttgtcgtcgaaggcgtgttgttaattttcgacgattttttgtcgggaatcgaaattttcggcgagcgtatttaattattgatgtaatgtcgcgtttatttatttgcgttgatttaggaggtggtatgatgacgattttaatcgttcgatcggaagttattattttcgattcgtagtaaagtgcgttgatcgtggtggatatgtaaaacgtttatgttacgttaggcggttatttagatttcgtcgggtttgatgttttaattattcgttcggttattgttaatatttaaatcgtcgtgatcgtagcgcgagcggtagggatg

SEQ ID NO: 6792 - DNA, 525 bp, Artificial Sequence
  chemically treated genomic DNA (Homo sapiens) CpG-island No: 6792
catccctaccgctcgcgctacgatcacgacgatttaaatattaacaataaccgaacgaataattaaaacatcaaacccgacgaaatctaaataaccgcctaacgtaacataaacgttttacatatccaccacgatcaacgcactttactacgaatcgaaaataataacttccgatcgaacgattaaaatcgtcatcataccacctcctaaatcaacgcaaataaataaacgcgacattacatcaataattaaatacgctcgccgaaaatttcgattcccgacaaaaaatcgtcgaaaattaacaacacgccttcgacgacaaacacgctacgacttcatctaaatacgcgcgaactaacgataaaacgactaaatcccatttaaatttacgacaataaaacgacacttaaaactaaatccacgacgaatactcgaatacgcgcccaaatctcacaacccctataaaaaccccgaaaaaaacgacaatacaatcaaacaaaaaaaaacatcgaaaacaaaaccgac

SEQ ID NO: 6793 - DNA, 867 bp, Artificial Sequence
  chemically treated genomic DNA (Homo sapiens) CpG-island No: 6793
tcgcgttaggataaagtgattatttttatttttatttattttatgaacgaagcggaacgttgcgatcgtattttattgatgtacgtcggaaaagtgtttgttagcggtatatcgtaggaattggttgagaaacgcggagtcgttagtttggaagaggtatttatcgtttatttgtaggaagcggtagggtagagtaacgaagtcgaagcgtcgttcgtggtatacgatattatttacgcgtcgcgttagggatttagtttgcgtcgtttgtttagttatagtcgtcgcgaagcgttggaattgcgacgcgatttagtacgttcgacgttggcgttgatgggaacggtgattttgatgttgataatgggttacggtattagtatggatgtggaaaatttgcgttttgcggtgttcgatcgcgattagatcgttagtagttaggcgtggatatttaattttttcggttttcgttattttatcgaatagtcgtcgtttattagttatgacgagtttgatcgtcggatgcgtgcgggcgatattacggtggcgattgagatttcgtttaatttcgggcgcgatatcgcgcgtggtacgtttgtggaattcggcgtttggatcgacggagtcgatgtcgagtcgtgttggaacggttaagcgtacgtgtaggttatgttttacgagttgttataggatgtgggaagttgataacggtattcgtatagtaaagcgcgttattaaatgtgaacgcgtaacgagatagtcgagagaaaagtcggtacgaagtttcgcgggaattttttttttgtaaaattcggatgttatcgtttcgggcggcgatatacgtgcgagatttattagagttatcgt

SEQ ID NO: 6794 - DNA, 867 bp, Artificial Sequence
  chemically treated genomic DNA (Homo sapiens) CpG-island No: 6794
acgataactctaataaatctcgcacgtatatcgccgcccgaaacgataacatccgaattttacaaaaaaaaaattcccgcgaaacttcgtaccgacttttctctcgactatctcgttacgcgttcacatttaataacgcgctttactatacgaataccgttatcaacttcccacatcctataacaactcgtaaaacataacctacacgtacgcttaaccgttccaacacgactcgacatcgactccgtcgatccaaacgccgaattccacaaacgtaccacgcgcgatatcgcgcccgaaattaaacgaaatctcaatcgccaccgtaatatcgcccgcacgcatccgacgatcaaactcgtcataactaataaacgacgactattcgataaaataacgaaaaccgaaaaaattaaatatccacgcctaactactaacgatctaatcgcgatcgaacaccgcaaaacgcaaattttccacatccatactaataccgtaacccattatcaacatcaaaatcaccgttcccatcaacgccaacgtcgaacgtactaaatcgcgtcgcaattccaacgcttcgcgacgactataactaaacaaacgacgcaaactaaatccctaacgcgacgcgtaaataatatcgtataccacgaacgacgcttcgacttcgttactctaccctaccgcttcctacaaataaacgataaatacctcttccaaactaacgactccgcgtttctcaaccaattcctacgatataccgctaacaaacacttttccgacgtacatcaataaaatacgatcgcaacgttccgcttcgttcataaaataaataaaaataaaaataatcactttatcctaacgcga

SEQ ID NO: 6795 - DNA, 867 bp, Artificial Sequence
  chemically treated genomic DNA (Homo sapiens) CpG-island No: 6795
gcggtggttttagtggatttcgtacgtgtgtcgtcgttcggagcggtaatattcgggttttatagaggaggggttttcgcggagtttcgtgtcggtttttttttcggttatttcgttgcgcgtttatatttgatagcgcgttttgttgtgcgggtgtcgttgttagttttttatattttgtaatagttcgtggggtatggtttgtacgtacgtttgatcgttttagtacggttcggtatcggtttcgtcgatttagacgtcgagttttataggcgtattacgcgcgatatcgcgttcgagattgggcgggattttaatcgttatcgtgatatcgttcgtacgtattcgacgattaagttcgttataattggtgagcggcggttgttcgataaagtaacgggaatcggagaggttgagtgtttacgtttggttattgacggtttggtcgcggtcgagtatcgtaaagcgtaggttttttatatttatattgatgtcgtaatttattattagtattaggattatcgtttttattagcgttagcgtcgaacgtattggatcgcgtcgtagttttagcgtttcgcggcggttgtagttaaatagacggcgtaggttaaatttttgacgcggcgcgtgggtggtgtcgtgtattacgggcggcgtttcggtttcgttgttttgttttgtcgttttttgtaaataggcgataaatgttttttttagattggcggtttcgcgttttttaattagtttttgcggtgtatcgttggtaagtattttttcggcgtgtattagtgagatgcggtcgtaacgtttcgtttcgtttataaagtgggtggagatgaagatagttattttgttttggcgcga

SEQ ID NO: 6796 - DNA, 867 bp, Artificial Sequence
  chemically treated genomic DNA (Homo sapiens) CpG-island No: 6796
tcgcgccaaaacaaaataactatcttcatctccacccactttataaacgaaacgaaacgttacgaccgcatctcactaatacacgccgaaaaaatacttaccaacgatacaccgcaaaaactaattaaaaaacgcgaaaccgccaatctaaaaaaaacatttatcgcctatttacaaaaaacgacaaaacaaaacaacgaaaccgaaacgccgcccgtaatacacgacaccacccacgcgccgcgtcaaaaatttaacctacgccgtctatttaactacaaccgccgcgaaacgctaaaactacgacgcgatccaatacgttcgacgctaacgctaataaaaacgataatcctaatactaataataaattacgacatcaatataaatataaaaaacctacgctttacgatactcgaccgcgaccaaaccgtcaataaccaaacgtaaacactcaacctctccgattcccgttactttatcgaacaaccgccgctcaccaattataacgaacttaatcgtcgaatacgtacgaacgatatcacgataacgattaaaatcccgcccaatctcgaacgcgatatcgcgcgtaatacgcctataaaactcgacgtctaaatcgacgaaaccgataccgaaccgtactaaaacgatcaaacgtacgtacaaaccataccccacgaactattacaaaatataaaaaactaacaacgacacccgcacaacaaaacgcgctatcaaatataaacgcgcaacgaaataaccgaaaaaaaaaccgacacgaaactccgcgaaaacccctcctctataaaacccgaatattaccgctccgaacgacgacacacgtacgaaatccactaaaaccaccgc

SEQ ID NO: 6797 - DNA, 543 bp, Artificial Sequence
  chemically treated genomic DNA (Homo sapiens) CpG-island No: 6797
gatcgaaggggatttcgggacgagattatttcgggttcggaaacggggggcgtcggattattttatcgtttcggggacgggggagggcggacgagattattttaagttagggggttttttcgagataaagttgcgttatcgattttagattttcgcgcggcgggttttatcgttagcgttagttggtggatgcgttcggagtagttatttagtagtagtattagaagtagtcgttgtttttatttcgcggggttttcgcggtcgagtttttttttttcgtttattgttatttttggagttatttttttttcgatttcgtttttggcgtttaagttcgtttatcgatgagttaatcgtcgtacggcggggttcggtttttcggagtttttagttcgttaattaattagtaattgttttttcgtaagttcgtttgtttgcgttatcgacggatagtatcggtttcgaatgggagagtcgataacgtttaatttttagtttatttttattaatcgttataaagattgttcggatgtgatttaatga

SEQ ID NO: 6798 - DNA, 543 bp, Artificial Sequence
  chemically treated genomic DNA (Homo sapiens) CpG-island No: 6798
tcattaaatcacatccgaacaatctttataacgattaataaaaataaactaaaaattaaacgttatcgactctcccattcgaaaccgatactatccgtcgataacgcaaacaaacgaacttacgaaaaaacaattactaattaattaacgaactaaaaactccgaaaaaccgaaccccgccgtacgacgattaactcatcgataaacgaacttaaacgccaaaaacgaaatcgaaaaaaaaataactccaaaaataacaataaacgaaaaaaaaaaactcgaccgcgaaaaccccgcgaaataaaaacaacgactacttctaatactactactaaataactactccgaacgcatccaccaactaacgctaacgataaaacccgccgcgcgaaaatctaaaatcgataacgcaactttatctcgaaaaaaccccctaacttaaaataatctcgtccgccctcccccgtccccgaaacgataaaataatccgacgccccccgtttccgaacccgaaataatctcgtcccgaaatccccttcgatc

SEQ ID NO: 6799 - DNA, 543 bp, Artificial Sequence
  chemically treated genomic DNA (Homo sapiens) CpG-island No: 6799
ttattaaattatattcggataatttttatagcgattggtgagagtgagttgggggttaagcgttatcggtttttttattcggaatcggtgttgttcgtcggtgacgtaagtaggcgggtttgcggagaggtaattgttgattggttggcggattggaaatttcgaaaggtcgggtttcgtcgtgcggcgattggtttatcggtgggcgggtttgggcgttagaggcggagtcggggaggaggtggttttagagatggtagtgagcgagaggagggggttcggtcgcgggagtttcgcggagtgggggtagcggttatttttggtgttgttgttgggtggttgtttcgggcgtatttattagttggcgttgacggtgaggttcgtcgcgcgagggtttggggtcggtggcgtaattttgtttcggagaagttttttggtttggagtggtttcgttcgttttttttcgttttcgaggcggtggagtggttcggcgtttttcgttttcgggttcggagtggtttcgtttcgggatttttttcggtt

SEQ ID NO: 6800 - DNA, 543 bp, Artificial Sequence
  chemically treated genomic DNA (Homo sapiens) CpG-island No: 6800
aaccgaaaaaaatcccgaaacgaaaccactccgaacccgaaaacgaaaaacgccgaaccactccaccgcctcgaaaacgaaaaaaaacgaacgaaaccactccaaaccaaaaaacttctccgaaacaaaattacgccaccgaccccaaaccctcgcgcgacgaacctcaccgtcaacgccaactaataaatacgcccgaaacaaccacccaacaacaacaccaaaaataaccgctacccccactccgcgaaactcccgcgaccgaaccccctcctctcgctcactaccatctctaaaaccacctcctccccgactccgcctctaacgcccaaacccgcccaccgataaaccaatcgccgcacgacgaaacccgacctttcgaaatttccaatccgccaaccaatcaacaattacctctccgcaaacccgcctacttacgtcaccgacgaacaacaccgattccgaataaaaaaaccgataacgcttaacccccaactcactctcaccaatcgctataaaaattatccgaatataatttaataa

SEQ ID NO: 6801 - DNA, 724 bp, Artificial Sequence
  chemically treated genomic DNA (Homo sapiens) CpG-island No: 6801
  unsure (673, 676..)
gcgtttcggggcgataattattcggtaatgcgcgcgttggtcgttttgggtgagtgttagcgtgtgataatttttcggtagtttcgtcggtagattgaacgttttgtttttcgttatatggtttttgtattgcgtttttttttcggtggttagtagttagttatattcgtcgttgttttttattattatcggtatttttttgtcgttggtataaattatgatattcgggattggcgttatcgttattttcgtggcggtacgttgatgtatcgcgttaagtaaacgtcgtttggtttcggcgttaatcgattgcggtttatcgtgggtattgatgtaattggggttaattttcgtcgttagcgcggtattatttagacgtttgttttttatcgagtttttttagcgttttgtttgtagattcgagtttgataatcgcgtatagagcgattcgagttagatattcgtacgcggcggattgaggatttttcgcgagttcggtttcggttgcgttcgtttttttttgtttggggtttattagggtgagtcggtttcgattcgtgcggcgttgcgtttggttattgggggtgtttcgcggggtacgttttttatggtcgtttttttcgttcgtacggaatttacggttaatttttgtttcgggttcgggtcgtgacgnttnngagagaaagaaagataagaaggaagaaagaagggagagtaaaattaa

SEQ ID NO: 6802 - DNA, 724 bp, Artificial Sequence
  chemically treated genomic DNA (Homo sapiens) CpG-island No: 6802
  unsure (48..49, 52)
ttaattttactctcccttctttcttccttcttatctttctttctctcnnaancgtcacgacccgaacccgaaacaaaaattaaccgtaaattccgtacgaacgaaaaaaacgaccataaaaaacgtaccccgcgaaacacccccaataaccaaacgcaacgccgcacgaatcgaaaccgactcaccctaataaaccccaaacaaaaaaaaacgaacgcaaccgaaaccgaactcgcgaaaaatcctcaatccgccgcgtacgaatatctaactcgaatcgctctatacgcgattatcaaactcgaatctacaaacaaaacgctaaaaaaactcgataaaaaacaaacgtctaaataataccgcgctaacgacgaaaattaaccccaattacatcaatacccacgataaaccgcaatcgattaacgccgaaaccaaacgacgtttacttaacgcgatacatcaacgtaccgccacgaaaataacgataacgccaatcccgaatatcataatttataccaacgacaaaaaaataccgataataataaaaaacaacgacgaatataactaactactaaccaccgaaaaaaaaacgcaatacaaaaaccatataacgaaaaacaaaacgttcaatctaccgacgaaactaccgaaaaattatcacacgctaacactcacccaaaacgaccaacgcgcgcattaccgaataattatcgccccgaaacgc

SEQ ID NO: 6803 - DNA, 724 bp, Artificial Sequence
  chemically treated genomic DNA (Homo sapiens) CpG-island No: 6803
  unsure (48..49, 52)
ttggttttgtttttttttttttttttttttttgttttttttttttttnngancgttacggttcgggttcggagtaagaattggtcgtaagtttcgtacggacggaaaaagcgattataaaggacgtatttcgcggaatatttttagtggttagacgtaacgtcgtacgaatcggagtcgatttattttagtaggttttaaatagggaaggacggacgtaatcggagtcggattcgcgggggatttttaattcgtcgcgtgcggatgtttagttcggatcgttttatgcgcgattattaggttcgaatttgtaggtaaaacgttaaggaagttcgatggaaagtaaacgtttggataatgtcgcgttggcggcggggattagttttaattatattaatgtttacggtaaatcgtagtcgattagcgtcgaaattaaacggcgtttgtttgacgcgatgtattaacgtatcgttacgaaagtggcggtaacgttagtttcgaatgttatggtttatattagcggtaaaaaaatgtcgatggtggtggagggtagcggcgaatatagttggttgttgattatcgaagaaggaacgtagtataaaggttatgtaacggggggtaaagcgtttaatttatcgacgaagttgtcggaaggttattatacgttgatatttatttaggacgattagcgcgcgtattgtcgggtgattgtcgtttcgaaacgt

SEQ ID NO: 6804 - DNA, 724 bp, Artificial Sequence
  chemically treated genomic DNA (Homo sapiens) CpG-island No: 6804
  unsure (673, 676..)
acgtttcgaaacgacaatcacccgacaatacgcgcgctaatcgtcctaaataaatatcaacgtataataaccttccgacaacttcgtcgataaattaaacgctttaccccccgttacataacctttatactacgttccttcttcgataatcaacaaccaactatattcgccgctaccctccaccaccatcgacatttttttaccgctaatataaaccataacattcgaaactaacgttaccgccactttcgtaacgatacgttaatacatcgcgtcaaacaaacgccgtttaatttcgacgctaatcgactacgatttaccgtaaacattaatataattaaaactaatccccgccgccaacgcgacattatccaaacgtttactttccatcgaacttccttaacgttttacctacaaattcgaacctaataatcgcgcataaaacgatccgaactaaacatccgcacgcgacgaattaaaaatcccccgcgaatccgactccgattacgtccgtccttccctatttaaaacctactaaaataaatcgactccgattcgtacgacgttacgtctaaccactaaaaatattccgcgaaatacgtcctttataatcgctttttccgtccgtacgaaacttacgaccaattcttactccgaacccgaaccgtaacgntcnnaaaaaaaaaaaaaacaaaaaaaaaaaaaaaaaaaaaaacaaaaccaa

SEQ ID NO: 6805 - DNA, 709 bp, Artificial Sequence
  chemically treated genomic DNA (Homo sapiens) CpG-island No: 6805
acgtttttttgttattgcggtaattattagattcgtattacgtacggcgttattattagcgaagattttcggattggtggtttggtaacggtattggttttttatattcgcgatgatgcggttttatttgtttatcgttatatcgtgcgattttagttacggtatttcgtgcggattgaagttaaacgttataattatcgcgtcggttggtatgataaatttattgttttttatcggtattggacgtcgacgtttttgggtattcggttttttaagacgcgtgcgtaggaaacgaatttcgtagacgtgattttgtttatttagtttaagcgttatcggttggacgttaaattcgaagttggtttttttttcgcgggcgttttttattttttttttcgagtttggtatgttagttttattacgacgataagcgtaggtgacgttattcgcgtcgtggcgtagtgcggtacgtatatagtttatcgcggtgtcgtcgtcgtttagtattacgacgttaagttcggcggtattgataaacggttttttcggtagtttttcgagttttattatttgtttagtgttggtaatgaggaacggtagcgcgttataaacgttcggggtattttttttgggtaaattcgtttttttggatcggtagtgtttaggtaaggaaaattcgtttttagtttttaagggttttagagaattt

SEQ ID NO: 6806 - DNA, 709 bp, Artificial Sequence
  chemically treated genomic DNA (Homo sapiens) CpG-island No: 6806
aaattctctaaaacccttaaaaactaaaaacgaattttccttacctaaacactaccgatccaaaaaaacgaatttacccaaaaaaaataccccgaacgtttataacgcgctaccgttcctcattaccaacactaaacaaataataaaactcgaaaaactaccgaaaaaaccgtttatcaataccgccgaacttaacgtcgtaatactaaacgacgacgacaccgcgataaactatatacgtaccgcactacgccacgacgcgaataacgtcacctacgcttatcgtcgtaataaaactaacataccaaactcgaaaaaaaaaataaaaaacgcccgcgaaaaaaaaaccaacttcgaatttaacgtccaaccgataacgcttaaactaaataaacaaaatcacgtctacgaaattcgtttcctacgcacgcgtcttaaaaaaccgaatacccaaaaacgtcgacgtccaataccgataaaaaacaataaatttatcataccaaccgacgcgataattataacgtttaacttcaatccgcacgaaataccgtaactaaaatcgcacgatataacgataaacaaataaaaccgcatcatcgcgaatataaaaaaccaataccgttaccaaaccaccaatccgaaaatcttcgctaataataacgccgtacgtaatacgaatctaataattaccgcaataacaaaaaaacgt

SEQ ID NO: 6807 - DNA, 709 bp, Artificial Sequence
  chemically treated genomic DNA (Homo sapiens) CpG-island No: 6807
agattttttggaatttttgggaattaaagacgggttttttttgtttaggtattatcggtttaggaaagcgggtttatttaaagaaaatgtttcgggcgtttatgacgcgttgtcgttttttattgttaatattaaataggtgatggggttcgaagagttatcggaagagtcgtttattaatatcgtcggatttaacgtcgtggtattgggcggcggcgatatcgcgatggattgtgtgcgtatcgtattgcgttacggcgcgagtaacgttatttgcgtttatcgtcgtgatgaagttaatatgttaggttcgaagaaagaagtgaagaacgttcgcgaagagggggttaatttcgaatttaacgtttagtcggtggcgtttgagttgaatgaataaggttacgtttgcgggattcgttttttgcgtacgcgttttggagagtcggatgtttaggggcgtcggcgtttagtgtcggtggaaggtagtgaatttgttatgttagtcgacgcggtgattatggcgtttggttttaattcgtacgggatgtcgtggttggagtcgtacggtgtaacggtagataaatggggtcgtattatcgcggatgtggaaagttagtatcgttattagattattaattcgaaaattttcgttggtggtgacgtcgtgcgtggtgcggatttggtggttatcgtaatggtagaaggacgt

SEQ ID NO: 6808 - DNA, 709 bp, Artificial Sequence
  chemically treated genomic DNA (Homo sapiens) CpG-island No: 6808
acgtccttctaccattacgataaccaccaaatccgcaccacgcacgacgtcaccaccaacgaaaattttcgaattaataatctaataacgatactaactttccacatccgcgataatacgaccccatttatctaccgttacaccgtacgactccaaccacgacatcccgtacgaattaaaaccaaacgccataatcaccgcgtcgactaacataacaaattcactaccttccaccgacactaaacgccgacgcccctaaacatccgactctccaaaacgcgtacgcaaaaaacgaatcccgcaaacgtaaccttattcattcaactcaaacgccaccgactaaacgttaaattcgaaattaaccccctcttcgcgaacgttcttcacttctttcttcgaacctaacatattaacttcatcacgacgataaacgcaaataacgttactcgcgccgtaacgcaatacgatacgcacacaatccatcgcgatatcgccgccgcccaataccacgacgttaaatccgacgatattaataaacgactcttccgataactcttcgaaccccatcacctatttaatattaacaataaaaaacgacaacgcgtcataaacgcccgaaacattttctttaaataaacccgctttcctaaaccgataatacctaaacaaaaaaaacccgtctttaattcccaaaaattccaaaaaatct

SEQ ID NO: 6809 - DNA, 667 bp, Artificial Sequence
  chemically treated genomic DNA (Homo sapiens) CpG-island No: 6809
gtgggggatggtacgtaggataatttgtcgggttgtgaaaaagcggtgtaggtaaaagtgaaagttttgtttgatgtttagttcgaagtggtttatttattggcgaagtggaaacgttagattttagggtaatacgattttagcgcgggcgaagggttgtatacgtatatgaaagtttttcgtttcgatgaagatcgttttttttcgttgtattcggtttatgttgattagtgggattgggaacgcgtaatgggcgacggtgagcgttaattttcgattttgaaaagtacggtagaggcgatttgggcgggaattaaagtaatcgaagttgcggttagcgaagagtttggtttggtatcgtttttgtcggattagatttatttcgtatatagttaggagttattgtttcgttattcggattttgatgttaagggcgtgagcgggcgatagcgaaagattttggcgcggtattttttgtcgggattggcggtaagttgaacgatggttattttacgacgtgtgcgttcggattttgttttggagttttcggttagttggttttggggtttaagaatttcggttgattcgtgtggtttcggtgacgtttttagggttttttttttacgtttcgttatggtacggaatattttagagcggtcgttgtcgt

SEQ ID NO: 6810 - DNA, 667 bp, Artificial Sequence
  chemically treated genomic DNA (Homo sapiens) CpG-island No: 6810
acgacaacgaccgctctaaaatattccgtaccataacgaaacgtaaaaaaaaaaccctaaaaacgtcaccgaaaccacacgaatcaaccgaaattcttaaaccccaaaaccaactaaccgaaaactccaaaacaaaatccgaacgcacacgtcgtaaaataaccatcgttcaacttaccgccaatcccgacaaaaaataccgcgccaaaatctttcgctatcgcccgctcacgcccttaacatcaaaatccgaataacgaaacaataactcctaactatatacgaaataaatctaatccgacaaaaacgataccaaaccaaactcttcgctaaccgcaacttcgattactttaattcccgcccaaatcgcctctaccgtacttttcaaaatcgaaaattaacgctcaccgtcgcccattacgcgttcccaatcccactaatcaacataaaccgaatacaacgaaaaaaaacgatcttcatcgaaacgaaaaactttcatatacgtatacaacccttcgcccgcgctaaaatcgtattaccctaaaatctaacgtttccacttcgccaataaataaaccacttcgaactaaacatcaaacaaaactttcacttttacctacaccgctttttcacaacccgacaaattatcctacgtaccatcccccac

SEQ ID NO: 6811 - DNA, 667 bp, Artificial Sequence
  chemically treated genomic DNA (Homo sapiens) CpG-island No: 6811
acgatagcgatcgttttaggatgtttcgtgttatagcgaagcgtggaaaaagaattttgagaacgttatcgaggttatacgggttaatcgaaatttttagattttagggttaattgatcgggggttttagaataaaattcgggcgtatacgtcgtgggatgattatcgtttagtttgtcgttaatttcgataaggaatatcgcgttaagatttttcgttatcgttcgtttacgtttttggtattaagattcggataacgagatagtaatttttggttgtgtacgaagtggatttgattcggtaggaacggtgttaggttaaatttttcgttaatcgtagtttcggttgttttaattttcgtttagatcgtttttatcgtgttttttagagtcgagaattgacgtttatcgtcgtttattacgcgtttttagttttattggttaatatagatcgagtgtaacggagaaagacggtttttatcggggcgaagggtttttatgtgcgtgtatagtttttcgttcgcgttgaagtcgtgttgttttaaggtttgacgtttttatttcgttagtgaatgaattatttcgaattgggtattaggtagagtttttatttttatttgtatcgtttttttatagttcgataagttattttgcgtgttattttttat

SEQ ID NO: 6812 - DNA, 667 bp, Artificial Sequence
  chemically treated genomic DNA (Homo sapiens) CpG-island No: 6812
ataaaaaataacacgcaaaataacttatcgaactataaaaaaacgatacaaataaaaataaaaactctacctaatacccaattcgaaataattcattcactaacgaaataaaaacgtcaaaccttaaaacaacacgacttcaacgcgaacgaaaaactatacacgcacataaaaacccttcgccccgataaaaaccgtctttctccgttacactcgatctatattaaccaataaaactaaaaacgcgtaataaacgacgataaacgtcaattctcgactctaaaaaacacgataaaaacgatctaaacgaaaattaaaacaaccgaaactacgattaacgaaaaatttaacctaacaccgttcctaccgaatcaaatccacttcgtacacaaccaaaaattactatctcgttatccgaatcttaataccaaaaacgtaaacgaacgataacgaaaaatcttaacgcgatattccttatcgaaattaacgacaaactaaacgataatcatcccacgacgtatacgcccgaattttattctaaaacccccgatcaattaaccctaaaatctaaaaatttcgattaacccgtataacctcgataacgttctcaaaattctttttccacgcttcgctataacacgaaacatcctaaaacgatcgctatcgt

SEQ ID NO: 6813 - DNA, 566 bp, Artificial Sequence
  chemically treated genomic DNA (Homo sapiens) CpG-island No: 6813
gcgggtttttattaaggttttgcgtaataagaggtttaatttcggacggttttcggatatttttcggtttatattttaggggtttttatttacgtttagtttttttttttatttggttcgtatatattggtattaattttcggtttttaattaaattttttcgattataaaatttataacggaacgtttagggaaagtttattacgttgggcggtataaggttatcgatttatatttacgtcgagggatcgaacgtcgttcgattagttattttcgtcgagtacgtatcgggttttaacgtagaaacgatatacgtattaagataaaaagcgtagcggtatattcgatatagacggatatatttagcgaatagttagacggattagtatacgagattcgttagtagacgtattataacgtcgttatttttacgattggatcgaatttataggtcgtttataacgaaaacgcgcggtaaatattcgagttattattttattattatatttttaatagcgtataagagagaaaaataaaaataagtgataagtaatatgatttttagg

SEQ ID NO: 6814 - DNA, 566 bp, Artificial Sequence
  chemically treated genomic DNA (Homo sapiens) CpG-island No: 6814
cctaaaaatcatattacttatcacttatttttatttttctctcttatacgctattaaaaatataataataaaataataactcgaatatttaccgcgcgttttcgttataaacgacctataaattcgatccaatcgtaaaaataacgacgttataatacgtctactaacgaatctcgtatactaatccgtctaactattcgctaaatatatccgtctatatcgaatataccgctacgctttttatcttaatacgtatatcgtttctacgttaaaacccgatacgtactcgacgaaaataactaatcgaacgacgttcgatccctcgacgtaaatataaatcgataaccttataccgcccaacgtaataaactttccctaaacgttccgttataaattttataatcgaaaaaatttaattaaaaaccgaaaattaataccaatatatacgaaccaaataaaaaaaaaaactaaacgtaaataaaaacccctaaaatataaaccgaaaaatatccgaaaaccgtccgaaattaaacctcttattacgcaaaaccttaataaaaacccgc

SEQ ID NO: 6815 - DNA, 566 bp, Artificial Sequence
  chemically treated genomic DNA (Homo sapiens) CpG-island No: 6815
tttagaagttatgttatttgttatttgtttttgttttttttttttgtgcgttgttgagggtgtggtggtggggtggtggttcgggtgtttgtcgcgcgttttcgttgtgggcggtttgtgggttcggtttagtcgtgggggtggcggcgttgtggtgcgtttgttggcgggtttcgtgtgttggttcgtttggttgttcgttgggtgtgttcgtttgtgtcgggtgtgtcgttgcgttttttgttttggtgcgtgtgtcgtttttgcgttggggttcggtgcgtgttcggcgggggtggttggtcgggcggcgttcgatttttcggcgtgggtgtgggtcggtggttttgtgtcgtttaacgtaatgggttttttttgggcgtttcgttatgggttttgtggtcgggaaaatttggttggaagtcggggattgatattaatgtgtgcgagttaggtaggggaaagagttaggcgtagatgggagtttttggagtgtgagtcggaaagtgttcgaaggtcgttcggggttagattttttgttgcgtagggttttggtgggggttcgt

SEQ ID NO: 6816 - DNA, 566 bp, Artificial Sequence
  chemically treated genomic DNA (Homo sapiens) CpG-island No: 6816
acgaacccccaccaaaaccctacgcaacaaaaaatctaaccccgaacgaccttcgaacactttccgactcacactccaaaaactcccatctacgcctaactctttcccctacctaactcgcacacattaatatcaatccccgacttccaaccaaattttcccgaccacaaaacccataacgaaacgcccaaaaaaaacccattacgttaaacgacacaaaaccaccgacccacacccacgccgaaaaatcgaacgccgcccgaccaaccacccccgccgaacacgcaccgaaccccaacgcaaaaacgacacacgcaccaaaacaaaaaacgcaacgacacacccgacacaaacgaacacacccaacgaacaaccaaacgaaccaacacacgaaacccgccaacaaacgcaccacaacgccgccacccccacgactaaaccgaacccacaaaccgcccacaacgaaaacgcgcgacaaacacccgaaccaccaccccaccaccacaccctcaacaacgcacaaaaaaaaaaaacaaaaacaaataacaaataacataacttctaaa

SEQ ID NO: 6817 - DNA, 507 bp, Artificial Sequence
  chemically treated genomic DNA (Homo sapiens) CpG-island No: 6817
ggtatttcgtttttgttcgcgtcgtgcgtttaacgtgaaggggatttagttttaggttcgcgattttcgtttcggagttcgggttcgtcgtcgtcgtcgtcgtcgttttatttcgtcggtttcgggtttagatcgcgaacgggttcgtttttcgggttttcgcgggtttttaggttagttcgtttttttcgagtttttttaggacgtaggtgaggagtttcgggttttcgattcgttgtttattacgaggagtagtgagttcggagtcgcggtagttttaatttagttatcgtcgttattttcgggtcgtttcggcgttttcggcgttttttcgtaggtttcgttttttaaaggggtcgtatcggaagggttgaagattcgttcggaattatcgtattttcgtttttttttgtcgattatttataggtttttgaggtcgtggagagtaggggatgcgggcgttaaaggggttggttatttttgggtgttcgtttgggagtcgttttt

SEQ ID NO: 6818 - DNA, 507 bp, Artificial Sequence
  chemically treated genomic DNA (Homo sapiens) CpG-island No: 6818
aaaaacgactcccaaacgaacacccaaaaataaccaacccctttaacgcccgcatcccctactctccacgacctcaaaaacctataaataatcgacaaaaaaaaacgaaaatacgataattccgaacgaatcttcaacccttccgatacgacccctttaaaaaacgaaacctacgaaaaaacgccgaaaacgccgaaacgacccgaaaataacgacgataactaaattaaaactaccgcgactccgaactcactactcctcgtaataaacaacgaatcgaaaacccgaaactcctcacctacgtcctaaaaaaactcgaaaaaaacgaactaacctaaaaacccgcgaaaacccgaaaaacgaacccgttcgcgatctaaacccgaaaccgacgaaataaaacgacgacgacgacgacgacgaacccgaactccgaaacgaaaatcgcgaacctaaaactaaatccccttcacgttaaacgcacgacgcgaacaaaaacgaaatacc

SEQ ID NO: 6819 - DNA, 507 bp, Artificial Sequence
  chemically treated genomic DNA (Homo sapiens) CpG-island No: 6819
agaggcggtttttaagcggatatttaggagtggttaatttttttaacgttcgtattttttgttttttacgattttaaaggtttgtaagtggtcgataaaaaggggcggggatgcggtggtttcgggcgggtttttagttttttcggtgcggtttttttaagaggcggggtttgcgggggggcgtcgagaacgtcggggcggttcgaagatggcggcggtggttggattggggttgtcgcggtttcgagtttattgtttttcgtggtgggtagcgagtcgggagttcggggttttttatttacgttttggaggagttcgaaagaggcgggttggtttgggggttcgcgggagttcgggaggcgggttcgttcgcggtttgggttcggggtcggcggggtggggcggcggcggcggcggcggcggattcgggtttcggggcgggggtcgcgggtttggggttgggttttttttacgttaggcgtacgacgcgggtaaaggcggggtgtt

SEQ ID NO: 6820 - DNA, 507 bp, Artificial Sequence
  chemically treated genomic DNA (Homo sapiens) CpG-island No: 6820
aacaccccgcctttacccgcgtcgtacgcctaacgtaaaaaaaacccaaccccaaacccgcgacccccgccccgaaacccgaatccgccgccgccgccgccgccgccccaccccgccgaccccgaacccaaaccgcgaacgaacccgcctcccgaactcccgcgaacccccaaaccaacccgcctctttcgaactcctccaaaacgtaaataaaaaaccccgaactcccgactcgctacccaccacgaaaaacaataaactcgaaaccgcgacaaccccaatccaaccaccgccgccatcttcgaaccgccccgacgttctcgacgcccccccgcaaaccccgcctcttaaaaaaaccgcaccgaaaaaactaaaaacccgcccgaaaccaccgcatccccgcccctttttatcgaccacttacaaacctttaaaatcgtaaaaaacaaaaaatacgaacgttaaaaaaattaaccactcctaaatatccgcttaaaaaccgcctct

SEQ ID NO: 6821 - DNA, 594 bp, Artificial Sequence
  chemically treated genomic DNA (Homo sapiens) CpG-island No: 6821
gtcgttttcgtgtacgttcggttttaggttaggagacgggggatttgggagcggtttttattttcgtttgcggatttttaattattatttggaggggaagtcggggcgtttatcgcgtagttttaattttttgttttttatttttgcgtttcgtcgcgtttttgtttttcgtagtcgtcggggttgtagggtacgtgcgcgtgggaggttgcgcgggttagggtattttagggggtttcgggggtaatatttattttttgagttcgggtcgagtttcgcgttcgtcgttatcgcggtttggtcgttgatatcggagttcgtttcgttttttttttcgcggcgcggcgcggttgtcggcgggtttcgttttcggggcgtggtttagaaagttttattttcgcgacggcgttaggaggtagggcgggttttgatttcgcgcgttttttattgggttatttaggcgtttagtttcgttagtttagcgcgttattggtttagtcgaagattaggtttttttttatgtttttttttttacgtattcgtagtttatttgtataatttaaagagataggcgttattttttcgtttgagatt

SEQ ID NO: 6822 - DNA, 594 bp, Artificial Sequence
  chemically treated genomic DNA (Homo sapiens) CpG-island No: 6822
aatctcaaacgaaaaaataacgcctatctctttaaattatacaaataaactacgaatacgtaaaaaaaaaaacataaaaaaaaacctaatcttcgactaaaccaataacgcgctaaactaacgaaactaaacgcctaaataacccaataaaaaacgcgcgaaatcaaaacccgccctacctcctaacgccgtcgcgaaaataaaactttctaaaccacgccccgaaaacgaaacccgccgacaaccgcgccgcgccgcgaaaaaaaaaacgaaacgaactccgatatcaacgaccaaaccgcgataacgacgaacgcgaaactcgacccgaactcaaaaaataaatattacccccgaaaccccctaaaataccctaacccgcgcaacctcccacgcgcacgtaccctacaaccccgacgactacgaaaaacaaaaacgcgacgaaacgcaaaaataaaaaacaaaaaattaaaactacgcgataaacgccccgacttcccctccaaataataattaaaaatccgcaaacgaaaataaaaaccgctcccaaatcccccgtctcctaacctaaaaccgaacgtacacgaaaacgac

SEQ ID NO: 6823 - DNA, 594 bp, Artificial Sequence
  chemically treated genomic DNA (Homo sapiens) CpG-island No: 6823
agttttaggcgaaagagtggcgtttgtttttttaaattatgtaaatagattgcgggtgcgtaagggggggaatataaaaaggagtttagttttcggttggattaatagcgcgttgagttggcggagttgggcgtttaaatggtttaatggggggcgcgcgggattagagttcgttttgttttttggcgtcgtcgcgggggtgggattttttaggttacgtttcgggggcggagttcgtcggtagtcgcgtcgcgtcgcggagggaggggcggggcgggtttcggtgttagcgattaagtcgcggtggcggcgagcgcggggttcggttcgagtttaggaggtgagtgttgttttcggaattttttgggatattttggttcgcgtagttttttacgcgtacgtgttttgtagtttcggcggttgcggagggtaaaggcgcggcgggacgtagggatggagagtagggggttggggttacgcggtgggcgtttcggttttttttttaagtggtaattgggggttcgtaggcgaaaatggggatcgtttttaaatttttcgttttttggtttagaatcgagcgtgtacgggggcggt

SEQ ID NO: 6824 - DNA, 594 bp, Artificial Sequence
  chemically treated genomic DNA (Homo sapiens) CpG-island No: 6824
accgcccccgtacacgctcgattctaaaccaaaaaacgaaaaatttaaaaacgatccccattttcgcctacgaacccccaattaccacttaaaaaaaaaaccgaaacgcccaccgcgtaaccccaaccccctactctccatccctacgtcccgccgcgcctttaccctccgcaaccgccgaaactacaaaacacgtacgcgtaaaaaactacgcgaaccaaaatatcccaaaaaattccgaaaacaacactcacctcctaaactcgaaccgaaccccgcgctcgccgccaccgcgacttaatcgctaacaccgaaacccgccccgcccctccctccgcgacgcgacgcgactaccgacgaactccgcccccgaaacgtaacctaaaaaatcccacccccgcgacgacgccaaaaaacaaaacgaactctaatcccgcgcgccccccattaaaccatttaaacgcccaactccgccaactcaacgcgctattaatccaaccgaaaactaaactcctttttatattcccccccttacgcacccgcaatctatttacataatttaaaaaaacaaacgccactctttcgcctaaaact

SEQ ID NO: 6825 - DNA, 626 bp, Artificial Sequence
  chemically treated genomic DNA (Homo sapiens) CpG-island No: 6825
gtcgggaatagttagtcggtgtttaacgcgagtgtatttcgagagagaagcgattaatagttgtcggtttgcgtttgcgcgcggcgggggcgtggttcggggcgagtggggtaaaggaggtagtcgggagcggcgggcgtaggtgttattggttgcgtcgggttacgtgggcgcgtaggcgtagcgcggtgtagttcgttcgtttatataaagtttagacgcggagaaaatggcggtaggggtcgaagcggcggcggaggtggcggcgacggagattaaaatggaggaagagagcggcgcgttcggcgtgtcgagcggtaacggggtttcgggttttaaggggtgagtattttacggttttttgttacgggtaagggttttttttcgcggtcgacgcgggcggcggtttcgttaggtttgttggcggtttagtttcggcgcggtttcggtttcgtgttgttttcgtatcgtttgtttagggtagcggcgtttagggtcgtgagcggggagtcgggggagtttttagaatcgttttttatatcgggtttcgagtttcgttatttttagtttttttaggtcggggttaatttcgtagtcgaggttttaggtttagttgttgcgtatgg

SEQ ID NO: 6826 - DNA, 626 bp, Artificial Sequence
  chemically treated genomic DNA (Homo sapiens) CpG-island No: 6826
ccatacgcaacaactaaacctaaaacctcgactacgaaattaaccccgacctaaaaaaactaaaaataacgaaactcgaaacccgatataaaaaacgattctaaaaactcccccgactccccgctcacgaccctaaacgccgctaccctaaacaaacgatacgaaaacaacacgaaaccgaaaccgcgccgaaactaaaccgccaacaaacctaacgaaaccgccgcccgcgtcgaccgcgaaaaaaaacccttacccgtaacaaaaaaccgtaaaatactcaccccttaaaacccgaaaccccgttaccgctcgacacgccgaacgcgccgctctcttcctccattttaatctccgtcgccgccacctccgccgccgcttcgacccctaccgccattttctccgcgtctaaactttatataaacgaacgaactacaccgcgctacgcctacgcgcccacgtaacccgacgcaaccaataacacctacgcccgccgctcccgactacctcctttaccccactcgccccgaaccacgcccccgccgcgcgcaaacgcaaaccgacaactattaatcgcttctctctcgaaatacactcgcgttaaacaccgactaactattcccgac

SEQ ID NO: 6827 - DNA, 626 bp, Artificial Sequence
  chemically treated genomic DNA (Homo sapiens) CpG-island No: 6827
ttatgcgtagtagttgggtttgaggtttcgattacggggttggtttcggtttggagggattgagggtggcgaggttcgaggttcggtgtaggggacgattttggaggttttttcggtttttcgtttacggttttggacgtcgttattttgagtaggcggtacgggaatagtacggggtcgaggtcgcgtcggggttaggtcgttaatagatttaacggagtcgtcgttcgcgtcggtcgcggagaggaatttttattcgtggtaaaggatcgtgggatatttattttttagggttcggagtttcgttgtcgttcggtacgtcgggcgcgtcgttttttttttttattttgattttcgtcgtcgttattttcgtcgtcgtttcgatttttgtcgttatttttttcgcgtttgggttttgtgtgagcgaacgggttgtatcgcgttgcgtttgcgcgtttacgtgattcgacgtaattagtaatatttgcgttcgtcgttttcggttgttttttttgttttattcgtttcgggttacgttttcgtcgcgcgtaggcgtagatcggtagttgttgatcgtttttttttcgagatatattcgcgttaggtatcgattggttgttttcggt

SEQ ID NO: 6828 - DNA, 626 bp, Artificial Sequence
  chemically treated genomic DNA (Homo sapiens) CpG-island No: 6828
accgaaaacaaccaatcgatacctaacgcgaatatatctcgaaaaaaaaacgatcaacaactaccgatctacgcctacgcgcgacgaaaacgtaacccgaaacgaataaaacaaaaaaaacaaccgaaaacgacgaacgcaaatattactaattacgtcgaatcacgtaaacgcgcaaacgcaacgcgatacaacccgttcgctcacacaaaacccaaacgcgaaaaaaataacgacaaaaatcgaaacgacgacgaaaataacgacgacgaaaatcaaaataaaaaaaaaaaacgacgcgcccgacgtaccgaacgacaacgaaactccgaaccctaaaaaataaatatcccacgatcctttaccacgaataaaaattcctctccgcgaccgacgcgaacgacgactccgttaaatctattaacgacctaaccccgacgcgacctcgaccccgtactattcccgtaccgcctactcaaaataacgacgtccaaaaccgtaaacgaaaaaccgaaaaaacctccaaaatcgtcccctacaccgaacctcgaacctcgccaccctcaatccctccaaaccgaaaccaaccccgtaatcgaaacctcaaacccaactactacgcataa

SEQ ID NO: 6829 - DNA, 549 bp, Artificial Sequence
  chemically treated genomic DNA (Homo sapiens) CpG-island No: 6829
atggcgcgggttcggatcggagagttttcgaggtttattcgatcgtttttcgggagggtgatttcgggggtcgggttttagtttttcgtttttttttttttcggggtttgttttttgattcgtaacgtggggggaggagagggggtgcgcgttcgggaggtttcgcgcgtagttagttcgagttaacggtaatcgagcgagggaagcgttaggaagggtcgcgaagtcgggtcggggggttttttttttgtttcgttttttagttttcgcgcgtcgatcgcgtttcgcgggaagtgtttttttcggaatcgtttttcgttttacgttttggttttggtttaagtttttcgtcgtttttcgtttttttttttcgggtgcgtcgtaggtattagtggagagatgggatttgttgtttagcgtttattttcggaagtagatagatacgaagtcgggggaggaattttttttttttcgtgtttcggggaagttgttttgttaggaggcgggtttatttatttttagattttattagtttttcgagttttgttt

SEQ ID NO: 6830 - DNA, 549 bp, Artificial Sequence
  chemically treated genomic DNA (Homo sapiens) CpG-island No: 6830
aaacaaaactcgaaaaactaataaaatctaaaaataaataaacccgcctcctaacaaaacaacttccccgaaacacgaaaaaaaaaaaattcctcccccgacttcgtatctatctacttccgaaaataaacgctaaacaacaaatcccatctctccactaatacctacgacgcacccgaaaaaaaaaaacgaaaaacgacgaaaaacttaaaccaaaaccaaaacgtaaaacgaaaaacgattccgaaaaaaacacttcccgcgaaacgcgatcgacgcgcgaaaactaaaaaacgaaacaaaaaaaaaaccccccgacccgacttcgcgacccttcctaacgcttccctcgctcgattaccgttaactcgaactaactacgcgcgaaacctcccgaacgcgcaccccctctcctccccccacgttacgaatcaaaaaacaaaccccgaaaaaaaaaaaaacgaaaaactaaaacccgacccccgaaatcaccctcccgaaaaacgatcgaataaacctcgaaaactctccgatccgaacccgcgccat

SEQ ID NO: 6831 - DNA, 549 bp, Artificial Sequence
  chemically treated genomic DNA (Homo sapiens) CpG-island No: 6831
aagtaggattcgaaaagttgatgaagtttggaagtaaatgaattcgttttttgatagaatagttttttcgaaatacgggaaaaaggggatttttttttcgatttcgtatttgtttgttttcgagggtgaacgttaagtagtagattttatttttttattaatatttgcggcgtattcggggaggaggagcgggaaacggcgagggatttgagttagggttagagcgtggggcgaggggcggtttcgagggaggtatttttcgcggagcgcggtcggcgcgcggggattaaggggcggggtaggaggggagtttttcgattcggtttcgcggttttttttgacgtttttttcgttcggttatcgttgattcgggttgattgcgcgcgaggtttttcgggcgcgtatttttttttttttttttacgttacggattagaaaatagatttcgggaggagaggggacggggggttgaaattcggttttcgaggttattttttcggggagcggtcgggtaggtttcggaggtttttcggttcgggttcgcgttat

SEQ ID NO: 6832 - DNA, 549 bp, Artificial Sequence
  chemically treated genomic DNA (Homo sapiens) CpG-island No: 6832
ataacgcgaacccgaaccgaaaaacctccgaaacctacccgaccgctccccgaaaaaataacctcgaaaaccgaatttcaaccccccgtcccctctcctcccgaaatctattttctaatccgtaacgtaaaaaaaaaaaaaaaaatacgcgcccgaaaaacctcgcgcgcaatcaacccgaatcaacgataaccgaacgaaaaaaacgtcaaaaaaaaccgcgaaaccgaatcgaaaaactcccctcctaccccgccccttaatccccgcgcgccgaccgcgctccgcgaaaaatacctccctcgaaaccgcccctcgccccacgctctaaccctaactcaaatccctcgccgtttcccgctcctcctccccgaatacgccgcaaatattaataaaaaaataaaatctactacttaacgttcaccctcgaaaacaaacaaatacgaaatcgaaaaaaaaatcccctttttcccgtatttcgaaaaaactattctatcaaaaaacgaattcatttacttccaaacttcatcaacttttcgaatcctactt

SEQ ID NO: 6833 - DNA, 579 bp, Artificial Sequence
  chemically treated genomic DNA (Homo sapiens) CpG-island No: 6833
tggagcgtatgggcgcgggtttgggttacggtatggatcgcgtgggtttcgagatcgagcgtatgggtttggttatggatcgtatgggtttcgtggagcgtatgggtttcggtattgagcgtatgggttcgttgggtttcgattatatggtttttagtattgagcgtatgggttagattatggagcgtattggttttggcgtggagcgtatgggtgtcggtatgggtttcggttttgagcgtatggtcgtttttatcgatcgtgtgggttagattattgagcgtatgggttttggcgtggagcgtatgggttttgttatcgagcgtatgggtttgagtatggagcgtatggtgttcgtaggtatgggagttggtttggagcgtatgggtttcgtgatggatcgtatggttatcggtttggagcgtatgggcgttaataatttggagcggatgggtttggagcgtatgggcgttaatagtttcgagcgtatgggtttggagcgtatgggtgttaatagtttcgagcgtatgggtttcgttatgggttcggttttgggcgttggtattgagcgtatgggtt

SEQ ID NO: 6834 - DNA, 579 bp, Artificial Sequence
  chemically treated genomic DNA (Homo sapiens) CpG-island No: 6834
aacccatacgctcaataccaacgcccaaaaccgaacccataacgaaacccatacgctcgaaactattaacacccatacgctccaaacccatacgctcgaaactattaacgcccatacgctccaaacccatccgctccaaattattaacgcccatacgctccaaaccgataaccatacgatccatcacgaaacccatacgctccaaaccaactcccatacctacgaacaccatacgctccatactcaaacccatacgctcgataacaaaacccatacgctccacgccaaaacccatacgctcaataatctaacccacacgatcgataaaaacgaccatacgctcaaaaccgaaacccataccgacacccatacgctccacgccaaaaccaatacgctccataatctaacccatacgctcaatactaaaaaccatataatcgaaacccaacgaacccatacgctcaataccgaaacccatacgctccacgaaacccatacgatccataaccaaacccatacgctcgatctcgaaacccacgcgatccataccgtaacccaaacccgcgcccatacgctcca

SEQ ID NO: 6835 - DNA, 579 bp, Artificial Sequence
  chemically treated genomic DNA (Homo sapiens) CpG-island No: 6835
ggtttatgcgtttaatgttagcgtttagggtcgggtttatggcggggtttatgcgttcgaggttgttggtatttatgcgttttaggtttatgcgttcgaggttgttggcgtttatgcgttttaggtttattcgttttagattgttggcgtttatgcgttttaggtcggtggttatgcgatttattacggggtttatgcgttttaggttagtttttatatttgcgggtattatgcgttttatgtttaggtttatgcgttcgatggtagggtttatgcgttttacgttagagtttatgcgtttaatggtttggtttatacggtcgatgggagcggttatgcgtttaaggtcgaagtttatgtcggtatttatgcgttttacgttagagttaatgcgttttatggtttggtttatgcgtttaatgttggaggttatgtggtcgaggtttagcgggtttatgcgtttaatgtcggagtttatgcgttttacggagtttatgcggtttatgattaggtttatgcgttcgatttcggagtttacgcgatttatgtcgtggtttaggttcgcgtttatgcgtttta

SEQ ID NO: 6836 - DNA, 579 bp, Artificial Sequence
  chemically treated genomic DNA (Homo sapiens) CpG-island No: 6836
taaaacgcataaacgcgaacctaaaccacgacataaatcgcgtaaactccgaaatcgaacgcataaacctaatcataaaccgcataaactccgtaaaacgcataaactccgacattaaacgcataaacccgctaaacctcgaccacataacctccaacattaaacgcataaaccaaaccataaaacgcattaactctaacgtaaaacgcataaataccgacataaacttcgaccttaaacgcataaccgctcccatcgaccgtataaaccaaaccattaaacgcataaactctaacgtaaaacgcataaaccctaccatcgaacgcataaacctaaacataaaacgcataatacccgcaaatataaaaactaacctaaaacgcataaaccccgtaataaatcgcataaccaccgacctaaaacgcataaacgccaacaatctaaaacgaataaacctaaaacgcataaacgccaacaacctcgaacgcataaacctaaaacgcataaataccaacaacctcgaacgcataaaccccgccataaacccgaccctaaacgctaacattaaacgcataaacc

SEQ ID NO: 6837 - DNA, 663 bp, Artificial Sequence
  chemically treated genomic DNA (Homo sapiens) CpG-island No: 6837
  unsure (362)
tcgagaagttgtcgtttatgtttagtacgcgttatttcggttcgtcgggtaattttttcggttaaatagcgttatggcgtttttttgtttggcggtttcgatgtcggttttttcggtttttatcggggtgtttttgcgaatttcggcgttgacgatgttttttagggtttttaattgtttaggtttgaatcgggttttcgaaatgattgaagttaaaacgtaggcgttggttatttattaacgaatttttttgttgtatatgtttatttaatatttgacgtaacgcggcgtgtagtaagtgagtggtcgacgtggtttaacgcggttgtatgtcgtacgtcggtatttatttgaagtgtttnatcggcgcgttcgacggttaggttatttagtattagtacgtcgtgatgtaggaacgtatcgtcggttttggtggtgtcgcgtattttaaaacgatcggaggtggagtttaggaaatcgtagttatcgatttggtcgtcggatttagcgtagaacggggtttgatttaggattataacgttttcgttattttcgtttagtacgtcgatcgatttgttttttttatagatagttacgattttggtcgagttaacggtggttttataattaatgaacgaagtcgttatattaatttttattagg

SEQ ID NO: 6838 - DNA, 663 bp, Artificial Sequence
  chemically treated genomic DNA (Homo sapiens) CpG-island No: 6838
  unsure (302)
cctaataaaaattaatataacgacttcgttcattaattataaaaccaccgttaactcgaccaaaatcgtaactatctataaaaaaaacaaatcgatcgacgtactaaacgaaaataacgaaaacgttataatcctaaatcaaaccccgttctacgctaaatccgacgaccaaatcgataactacgatttcctaaactccacctccgatcgttttaaaatacgcgacaccaccaaaaccgacgatacgttcctacatcacgacgtactaatactaaataacctaaccgtcgaacgcgccgatnaaacacttcaaataaataccgacgtacgacatacaaccgcgttaaaccacgtcgaccactcacttactacacgccgcgttacgtcaaatattaaataaacatatacaacaaaaaaattcgttaataaataaccaacgcctacgttttaacttcaatcatttcgaaaacccgattcaaacctaaacaattaaaaaccctaaaaaacatcgtcaacgccgaaattcgcaaaaacaccccgataaaaaccgaaaaaaccgacatcgaaaccgccaaacaaaaaaacgccataacgctatttaaccgaaaaaattacccgacgaaccgaaataacgcgtactaaacataaacgacaacttctcga

SEQ ID NO: 6839 - DNA, 663 bp, Artificial Sequence
  chemically treated genomic DNA (Homo sapiens) CpG-island No: 6839
  unsure (302)
tttggtaaaggttgatgtagcgatttcgtttattggttatgaagttatcgttggttcggttaagatcgtggttatttataaggaaggtaagtcggtcgacgtgttgaacgaaggtgacgagggcgttgtagttttggattagatttcgttttacgttgaattcggcggttaggtcggtgattgcggttttttgagttttattttcggtcgttttgaagtgcgcgatattattaagatcggcggtgcgtttttgtattacggcgtgttggtgttgggtaatttgatcgtcgggcgcgtcggtnggatattttaggtagatgtcgacgtacggtatgtaatcgcgttgaattacgtcggttatttatttgttgtacgtcgcgttgcgttaggtgttgggtgagtatgtgtagtagaagggttcgttggtggatagttagcgtttgcgttttgattttagttatttcgagggttcgatttaagtttgagtagttgaaggttttggaagatatcgttaacgtcgagattcgtaagaatatttcggtggaaatcgaagaaatcgatatcgagatcgttaagtaaaaaggcgttatggcgttgtttggtcgaggaagttattcggcggatcgaagtggcgcgtattgagtatgggcggtagtttttcgg

SEQ ID NO: 6840 - DNA, 663 bp, Artificial Sequence
  chemically treated genomic DNA (Homo sapiens) CpG-island No: 6840
  unsure (362)
ccgaaaaactaccgcccatactcaatacgcgccacttcgatccgccgaataacttcctcgaccaaacaacgccataacgcctttttacttaacgatctcgatatcgatttcttcgatttccaccgaaatattcttacgaatctcgacgttaacgatatcttccaaaaccttcaactactcaaacttaaatcgaaccctcgaaataactaaaatcaaaacgcaaacgctaactatccaccaacgaacccttctactacacatactcacccaacacctaacgcaacgcgacgtacaacaaataaataaccgacgtaattcaacgcgattacataccgtacgtcgacatctacctaaaatatccnaccgacgcgcccgacgatcaaattacccaacaccaacacgccgtaatacaaaaacgcaccgccgatcttaataatatcgcgcacttcaaaacgaccgaaaataaaactcaaaaaaccgcaatcaccgacctaaccgccgaattcaacgtaaaacgaaatctaatccaaaactacaacgccctcgtcaccttcgttcaacacgtcgaccgacttaccttccttataaataaccacgatcttaaccgaaccaacgataacttcataaccaataaacgaaatcgctacatcaacctttaccaaa

SEQ ID NO: 6841 - DNA, 624 bp, Artificial Sequence
  chemically treated genomic DNA (Homo sapiens) CpG-island No: 6841
ttcgagcgatgattgttttttcgaatttgattatgagcgtggtgtttttgtgttagtgcgtcgtgattttggtagggaagtcgttgtgtgtgagtatcgtttttacgatgttcgtcgtgaagttggcgtagttgagcgtgttgttttttttgggtacggagatgtaggtgttgatgagcggttcgcgttcgatgatgtagaaggtgcgcgcgttatcgttggtttgttttagtttgttcgtttttttgtcgaagagcgttttttatacggcgtttttgacgaagagtaacgcgtttagtattttggttttacgtcgggtatttttttcgcgcgttattagcgtatttagtacgcgcgcgtttatttggcggtttagcgcggttaggcgcgattgtagttcggttacggagaagacgcggttttggtagtgttgtattagttcggagaatagtagtgcgaaggcgtttaggtttatttcggtgcgcggtcgcgttagcgcgcgttttagtagcgtcgatttttcgcgcgtgaagcgcgtttttatgtcgtcgttattttgcggggagattaggaagtgtaggtgttaggggtaatgggaaggggagtaggtcgggaggaaaggag

SEQ ID NO: 6842 - DNA, 624 bp, Artificial Sequence
  chemically treated genomic DNA (Homo sapiens) CpG-island No: 6842
ctcctttcctcccgacctactccccttcccattacccctaacacctacacttcctaatctccccgcaaaataacgacgacataaaaacgcgcttcacgcgcgaaaaatcgacgctactaaaacgcgcgctaacgcgaccgcgcaccgaaataaacctaaacgccttcgcactactattctccgaactaatacaacactaccaaaaccgcgtcttctccgtaaccgaactacaatcgcgcctaaccgcgctaaaccgccaaataaacgcgcgcgtactaaatacgctaataacgcgcgaaaaaaatacccgacgtaaaaccaaaatactaaacgcgttactcttcgtcaaaaacgccgtataaaaaacgctcttcgacaaaaaaacgaacaaactaaaacaaaccaacgataacgcgcgcaccttctacatcatcgaacgcgaaccgctcatcaacacctacatctccgtacccaaaaaaaacaacacgctcaactacgccaacttcacgacgaacatcgtaaaaacgatactcacacacaacgacttccctaccaaaatcacgacgcactaacacaaaaacaccacgctcataatcaaattcgaaaaaacaatcatcgctcgaa

SEQ ID NO: 6843 - DNA, 624 bp, Artificial Sequence
  chemically treated genomic DNA (Homo sapiens) CpG-island No: 6843
ttttttttttttcggtttgtttttttttttattgtttttgatatttgtattttttggttttttcgtagggtggcggcggtatggaggcgcgttttacgcgcgggaagtcggcgttgttggagcgcgcgttggcgcggtcgcgtatcgaggtgagtttgagcgttttcgtattgttgtttttcgagttggtatagtattgttagagtcgcgtttttttcgtggtcgagttgtagtcgcgtttggtcgcgttgggtcgttaggtgggcgcgcgcgtgttggatgcgttggtggcgcgcgaaaagggtgttcggcgtgagattaaggtgttaggcgcgttgtttttcgttaagggcgtcgtgtggaaggcgtttttcggtaaggaggcggataagttggagtaggttaacgatgacgcgcgtattttttatattatcgagcgcgagtcgtttattaatatttatattttcgtgtttaaggagaatagtacgtttaattgcgttagttttacggcgggtatcgtggaggcggtgtttatatatagcggtttttttgttaaggttacggcgtattggtataagggtattacgtttatgattaagttcgaggaggtagttatcgttcgag

SEQ ID NO: 6844 - DNA, 624 bp, Artificial Sequence
  chemically treated genomic DNA (Homo sapiens) CpG-island No: 6844
ctcgaacgataactacctcctcgaacttaatcataaacgtaatacccttataccaatacgccgtaaccttaacaaaaaaaccgctatatataaacaccgcctccacgatacccgccgtaaaactaacgcaattaaacgtactattctccttaaacacgaaaatataaatattaataaacgactcgcgctcgataatataaaaaatacgcgcgtcatcgttaacctactccaacttatccgcctccttaccgaaaaacgccttccacacgacgcccttaacgaaaaacaacgcgcctaacaccttaatctcacgccgaacacccttttcgcgcgccaccaacgcatccaacacgcgcgcgcccacctaacgacccaacgcgaccaaacgcgactacaactcgaccacgaaaaaaacgcgactctaacaatactataccaactcgaaaaacaacaatacgaaaacgctcaaactcacctcgatacgcgaccgcgccaacgcgcgctccaacaacgccgacttcccgcgcgtaaaacgcgcctccataccgccgccaccctacgaaaaaaccaaaaaatacaaatatcaaaaacaataaaaaaaaaaacaaaccgaaaaaaaaaaaa

SEQ ID NO: 6845 - DNA, 508 bp, Artificial Sequence
  chemically treated genomic DNA (Homo sapiens) CpG-island No: 6845
gacggggtgtatgatcggggtcgggggttagtatttaggacggggtcggggtcgggggacgcggttagggtttagggtcggggtcgcgtcgggtttttatcgcgtttacgtagttttcgtagggcgtttttttgttttattagtttcgtttgcgtttttttaagtttcgcgcgcgtggtttgtagttgcgtttgcgttttcgagtttgggagtcgtagggtgagaggggcgagggcggcgaggatggggcgggatttcggagattagttttcgtttcgtattattcgtcgtaggttttcgtttcggttttttttttatcgcggtcgtaagattttatttttgcgtttatagtttcgatcgcgtttttttatagtagttgtggtagttttcgatttttttttttagggtatttagcgtcgtcgtttgtttcgaggttggaacgattttcgttttaaaatgtatgtttttcgggttatttgggaggatttaggggatttttttttagttt

SEQ ID NO: 6846 - DNA, 508 bp, Artificial Sequence
  chemically treated genomic DNA (Homo sapiens) CpG-island No: 6846
aaactaaaaaaaaatcccctaaatcctcccaaataacccgaaaaacatacattttaaaacgaaaatcgttccaacctcgaaacaaacgacgacgctaaataccctaaaaaaaaaaatcgaaaactaccacaactactataaaaaaacgcgatcgaaactataaacgcaaaaataaaatcttacgaccgcgataaaaaaaaaaccgaaacgaaaacctacgacgaataatacgaaacgaaaactaatctccgaaatcccgccccatcctcgccgccctcgcccctctcaccctacgactcccaaactcgaaaacgcaaacgcaactacaaaccacgcgcgcgaaacttaaaaaaacgcaaacgaaactaataaaacaaaaaaacgccctacgaaaactacgtaaacgcgataaaaacccgacgcgaccccgaccctaaaccctaaccgcgtcccccgaccccgaccccgtcctaaatactaacccccgaccccgatcatacaccccgtc

SEQ ID NO: 6847 - DNA, 508 bp, Artificial Sequence
  chemically treated genomic DNA (Homo sapiens) CpG-island No: 6847
aggttggaagggggttttttgagtttttttaagtgattcgaggggtatgtattttggggcgggggtcgttttagtttcgaagtagacggcggcgttgggtgttttgaaggaggaggtcggagattgttatagttgttgtgagggggcgcggtcgaggttgtgggcgtagggatggggttttgcggtcgcgatgggaggggggtcggggcggaggtttgcggcgggtggtgcggggcgggggttggttttcgaagtttcgttttattttcgtcgttttcgttttttttattttgcggtttttaggttcggggacgtaggcgtagttgtagattacgcgcgcggagtttggggaggcgtaggcgaagttgatggagtaggagagcgttttgcgggaattgcgtgagcgcggtgagggttcgacgcgatttcggttttgagttttggtcgcgtttttcgatttcgatttcgttttgagtgttgattttcgatttcgattatgtatttcgtt

SEQ ID NO: 6848 - DNA, 508 bp, Artificial Sequence
  chemically treated genomic DNA (Homo sapiens) CpG-island No: 6848
aacgaaatacataatcgaaatcgaaaatcaacactcaaaacgaaatcgaaatcgaaaaacgcgaccaaaactcaaaaccgaaatcgcgtcgaaccctcaccgcgctcacgcaattcccgcaaaacgctctcctactccatcaacttcgcctacgcctccccaaactccgcgcgcgtaatctacaactacgcctacgtccccgaacctaaaaaccgcaaaataaaaaaaacgaaaacgacgaaaataaaacgaaacttcgaaaaccaacccccgccccgcaccacccgccgcaaacctccgccccgacccccctcccatcgcgaccgcaaaaccccatccctacgcccacaacctcgaccgcgccccctcacaacaactataacaatctccgacctcctccttcaaaacacccaacgccgccgtctacttcgaaactaaaacgacccccgccccaaaatacatacccctcgaatcacttaaaaaaactcaaaaaacccccttccaacct

SEQ ID NO: 6849 - DNA, 1164 bp, Artificial Sequence
  chemically treated genomic DNA (Homo sapiens) CpG-island No: 6849
gttcgtagcgcggttagggtcgacgcggggtgtgtgttggggtttgggggtcgtgcggtggtggagatcggagcgttcgagattttttagcgaggtcggggtttgggtttttagggtgtgtggcgggggaagagatcgagaggagattttcgtaggggcgtgatgtgtgtaaaagagaagaaggcgtgtaagggaaggttttgggggtgcgggaggcgggaacgagaggttcgtacggggagattttattcggttcgtagatttcgttcggtttatttggaggtttggacgtcggggattttcgcgcggagttgggtcgcgggttttatttttatcgcgttttcgtagtcggcggggtaaagtttatcgttcgggtcgagtaggaagttcggaggtttcggcgcggtaggggttcgagttcggggattttcggcggtcggcgttattgtttttacggttttttgttttttcggttcggcgtttcgtttttttttagtatttgtcgcgttcggttcgtcgttttcgatttcggtttttcgagtttcggtatttgcgttttcgaacgcggttcgtagtatttacgttaggttggtcgtcgttttggttcgcgagaaatcgtattggtttagcgatttgatttcgggtattagaaaggtttttcgtagcggtttcgggttcggggggcgtcgtttttattatggcggcgtcgggattgcgggcgtcgggttcgcgttcggattgggtttgggttgggttgcgtcgcgttcgcgttttagtcgggttcgttgttgttatcgtcgttgtcgtcgtcgtcgtcgtcgtcgttgttgagttaggtgcggtcgtttgcgttggcgacgttgcgtcgggttcgtttcggggaggagtttaggtgcgtttcgttttcgaattcggattcggattttggcgcgtttttgcgtttcgttcgggttttttattgtagtgtgtacggagtagtaggggcggggcggaggggggcggtttggattgcggcgatggtggagggagtttgcggaggattgagtgtgtatgtgtgcgcgcgcgcgtgtgtgagtgtgtgcgcgcgcgtttagtttattggaaaggattagggattttttgtgtgtgttagttttagtgtttatttttaggcgtaggagtttt

SEQ ID NO: 6850 - DNA, 1164 bp, Artificial Sequence
  chemically treated genomic DNA (Homo sapiens) CpG-island No: 6850
aaaactcctacgcctaaaaataaacactaaaactaacacacacaaaaaatccctaatcctttccaataaactaaacgcgcgcgcacacactcacacacgcgcgcgcgcacacatacacactcaatcctccgcaaactccctccaccatcgccgcaatccaaaccgcccccctccgccccgcccctactactccgtacacactacaataaaaaacccgaacgaaacgcaaaaacgcgccaaaatccgaatccgaattcgaaaacgaaacgcacctaaactcctccccgaaacgaacccgacgcaacgtcgccaacgcaaacgaccgcacctaactcaacaacgacgacgacgacgacgacgacaacgacgataacaacaacgaacccgactaaaacgcgaacgcgacgcaacccaacccaaacccaatccgaacgcgaacccgacgcccgcaatcccgacgccgccataataaaaacgacgccccccgaacccgaaaccgctacgaaaaacctttctaatacccgaaatcaaatcgctaaaccaatacgatttctcgcgaaccaaaacgacgaccaacctaacgtaaatactacgaaccgcgttcgaaaacgcaaataccgaaactcgaaaaaccgaaatcgaaaacgacgaaccgaacgcgacaaatactaaaaaaaaacgaaacgccgaaccgaaaaaacaaaaaaccgtaaaaacaataacgccgaccgccgaaaatccccgaactcgaacccctaccgcgccgaaacctccgaacttcctactcgacccgaacgataaactttaccccgccgactacgaaaacgcgataaaaataaaacccgcgacccaactccgcgcgaaaatccccgacgtccaaacctccaaataaaccgaacgaaatctacgaaccgaataaaatctccccgtacgaacctctcgttcccgcctcccgcacccccaaaaccttcccttacacgccttcttctcttttacacacatcacgcccctacgaaaatctcctctcgatctcttcccccgccacacaccctaaaaacccaaaccccgacctcgctaaaaaatctcgaacgctccgatctccaccaccgcacgacccccaaaccccaacacacaccccgcgtcgaccctaaccgcgctacgaac

SEQ ID NO: 6851 - DNA, 1164 bp, Artificial Sequence
  chemically treated genomic DNA (Homo sapiens) CpG-island No: 6851
ggagtttttacgtttaagggtagatattggggttggtatatatagagggtttttaattttttttagtaagttaggcgcgcgcgtatatatttatatacgcgcgcgcgtatatatatatatttagtttttcgtaagttttttttattatcgtcgtagtttaggtcgttttttttcgtttcgtttttgttgtttcgtgtatattgtagtgaggggttcgggcggggcgtaggggcgcgttagggttcgggttcgggttcgggggcggggcgtatttgggttttttttcggggcgggttcgacgtagcgtcgttagcgtaagcggtcgtatttggtttagtagcggcggcggcggcggcggcggtagcggcggtagtagtagcgggttcggttggggcgcgagcgcggcgtagtttagtttaggtttagttcgagcgcggattcggcgttcgtagtttcggcgtcgttatggtggaggcggcgtttttcgggttcgggatcgttgcggaggatttttttagtgttcgagattaagtcgttggattagtacgatttttcgcgggttaaggcggcggttagtttggcgtgggtgttgcgggtcgcgttcgggggcgtaggtatcggggttcgggggatcggggtcgggggcggcgggtcgggcgcggtaggtgttgggggggggcggggcgtcgggtcgggaaggtagggggtcgtgggaataatagcgtcggtcgtcgggggttttcgggttcgggtttttgtcgcgtcggggttttcgagttttttgttcggttcgggcggtggattttgtttcgtcggttgcgggagcgcggtgggggtggggttcgcggtttagtttcgcgcgggggttttcggcgtttaagtttttaggtgagtcgggcggggtttgcgggtcgggtggggttttttcgtgcggatttttcgttttcgtttttcgtatttttaaggtttttttttgtacgttttttttttttttatatatattacgtttttgcgaggattttttttcggttttttttttcgttatatattttggagatttagatttcgatttcgttggggggtttcgagcgtttcggtttttattatcgtacgatttttaggttttaatatatatttcgcgtcggttttggtcgcgttgcgggt

SEQ ID NO: 6852 - DNA, 1164 bp, Artificial Sequence
  chemically treated genomic DNA (Homo sapiens) CpG-island No: 6852
acccgcaacgcgaccaaaaccgacgcgaaatatatattaaaacctaaaaatcgtacgataataaaaaccgaaacgctcgaaaccccccaacgaaatcgaaatctaaatctccaaaatatataacgaaaaaaaaaaccgaaaaaaaatcctcgcaaaaacgtaatatatataaaaaaaaaaaaaacgtacaaaaaaaaaccttaaaaatacgaaaaacgaaaacgaaaaatccgcacgaaaaaaccccacccgacccgcaaaccccgcccgactcacctaaaaacttaaacgccgaaaacccccgcgcgaaactaaaccgcgaaccccacccccaccgcgctcccgcaaccgacgaaacaaaatccaccgcccgaaccgaacaaaaaactcgaaaaccccgacgcgacaaaaacccgaacccgaaaacccccgacgaccgacgctattattcccacgaccccctaccttcccgacccgacgccccgcccccccccaacacctaccgcgcccgacccgccgcccccgaccccgatcccccgaaccccgatacctacgcccccgaacgcgacccgcaacacccacgccaaactaaccgccgccttaacccgcgaaaaatcgtactaatccaacgacttaatctcgaacactaaaaaaatcctccgcaacgatcccgaacccgaaaaacgccgcctccaccataacgacgccgaaactacgaacgccgaatccgcgctcgaactaaacctaaactaaactacgccgcgctcgcgccccaaccgaacccgctactactaccgccgctaccgccgccgccgccgccgccgctactaaaccaaatacgaccgcttacgctaacgacgctacgtcgaacccgccccgaaaaaaaacccaaatacgccccgcccccgaacccgaacccgaaccctaacgcgcccctacgccccgcccgaacccctcactacaatatacacgaaacaacaaaaacgaaacgaaaaaaaacgacctaaactacgacgataataaaaaaaacttacgaaaaactaaatatatatatatacgcgcgcgcgtatataaatatatacgcgcgcgcctaacttactaaaaaaaattaaaaaccctctatatataccaaccccaatatctacccttaaacgtaaaaactcc

SEQ ID NO: 6853 - DNA, 737 bp, Artificial Sequence
  chemically treated genomic DNA (Homo sapiens) CpG-island No: 6853
  unsure (660)
cgcgttggtggaaatcgttataattgcgtatatcgttaagtgaggtcgcgatgaaatttttatttttattttttttttatgttgatgcgttcgtagtggtgttgatttcgggttttgggggtagcggtagttattggttatcgtaattggcggtgttggagtaggagtattaggtagtttgttacgattagcgcggtatcggtaataatttcgatacgttggtagaagattatagtatcgtttagatggtagcggaattgtattaggcgttggtagtcgtagggattgagtattacgtagtggtcggttatgcgttcggtgcgttggtgggaatgtagttggcgttggattatttcgcgtcggtaattgtgttgattagcgttaacggttggttacgaataaacgtttatacgcgtcgttgtttttaggttcgcgaacgattattgtatagcggcggcgcgtaggtatgggtggaagcgtagtcgttgtttttttatttcgtcgattggatggcggttcgcgtatttcgtttggaggtagaagacgcgttggtattggcgtatttttagggtaaaaataatttattgcgtcgatttaacgtttttaaacgcgttgattttagttattatgcggatcgtattcgttgttcggtgtaaatantttgcgttagtgatgatttgttggtgttaatagtatgttttagtgaattttatgtcgttttgttcgatagttagaaa

SEQ ID NO: 6854 - DNA, 737 bp, Artificial Sequence
  chemically treated genomic DNA (Homo sapiens) CpG-island No: 6854
  unsure (78)
tttctaactatcgaacaaaacgacataaaattcactaaaacatactattaacaccaacaaatcatcactaacgcaaantatttacaccgaacaacgaatacgatccgcataataactaaaatcaacgcgtttaaaaacgttaaatcgacgcaataaattatttttaccctaaaaatacgccaataccaacgcgtcttctacctccaaacgaaatacgcgaaccgccatccaatcgacgaaataaaaaaacaacgactacgcttccacccatacctacgcgccgccgctatacaataatcgttcgcgaacctaaaaacaacgacgcgtataaacgtttattcgtaaccaaccgttaacgctaatcaacacaattaccgacgcgaaataatccaacgccaactacattcccaccaacgcaccgaacgcataaccgaccactacgtaatactcaatccctacgactaccaacgcctaatacaattccgctaccatctaaacgatactataatcttctaccaacgtatcgaaattattaccgataccgcgctaatcgtaacaaactacctaatactcctactccaacaccgccaattacgataaccaataactaccgctacccccaaaacccgaaatcaacaccactacgaacgcatcaacataaaaaaaaaataaaaataaaaatttcatcgcgacctcacttaacgatatacgcaattataacgatttccaccaacgcg

SEQ ID NO: 6855 - DNA, 737 bp, Artificial Sequence
  chemically treated genomic DNA (Homo sapiens) CpG-island No: 6855
  unsure (78)
tttttggttatcgggtagggcggtatgaagtttattggaatatgttgttggtattagtagattattattggcgtagantatttgtatcgggtagcggatgcgattcgtatggtgattaaagttagcgcgtttgagggcgttaagtcgacgtagtaaattatttttgttttgaaaatgcgttagtgttagcgcgttttttgtttttaggcgaggtgcgcgggtcgttatttagtcggcgggatagaggaataacggttgcgtttttatttatgtttgcgcgtcgtcgttatatagtaatcgttcgcgaatttgaaaatagcggcgcgtatgggcgtttattcgtagttagtcgttaacgttgattagtatagttatcgacgcgggataatttagcgttagttgtatttttattagcgtatcgagcgtatggtcgattattgcgtaatgtttaatttttgcggttattagcgtttgatgtagtttcgttgttatttgggcgatattgtaattttttgttagcgtgtcgggattattgtcggtgtcgcgttggtcgtaatagattatttgatatttttgttttagtatcgttagttgcggtaattagtaattgtcgttatttttaagattcgaaattaatattattacgggcgtattagtataagggggaggtgagagtgaaagttttatcgcggttttatttggcgatatgcgtaattgtggcgatttttattagcgcg

SEQ ID NO: 6856 - DNA, 737 bp, Artificial Sequence
  chemically treated genomic DNA (Homo sapiens) CpG-island No: 6856
  unsure (660)
cgcgctaataaaaatcgccacaattacgcatatcgccaaataaaaccgcgataaaactttcactctcacctcccccttatactaatacgcccgtaataatattaatttcgaatcttaaaaataacgacaattactaattaccgcaactaacgatactaaaacaaaaatatcaaataatctattacgaccaacgcgacaccgacaataatcccgacacgctaacaaaaaattacaatatcgcccaaataacaacgaaactacatcaaacgctaataaccgcaaaaattaaacattacgcaataatcgaccatacgctcgatacgctaataaaaatacaactaacgctaaattatcccgcgtcgataactatactaatcaacgttaacgactaactacgaataaacgcccatacgcgccgctattttcaaattcgcgaacgattactatataacgacgacgcgcaaacataaataaaaacgcaaccgttattcctctatcccgccgactaaataacgacccgcgcacctcgcctaaaaacaaaaaacgcgctaacactaacgcattttcaaaacaaaaataatttactacgtcgacttaacgccctcaaacgcgctaactttaatcaccatacgaatcgcatccgctacccgatacaaatantctacgccaataataatctactaataccaacaacatattccaataaacttcataccgccctacccgataaccaaaaa

SEQ ID NO: 6857 - DNA, 734 bp, Artificial Sequence
  chemically treated genomic DNA (Homo sapiens) CpG-island No: 6857
  unsure (475..)
gtttcgtagagttgatcgaaaaattggttgcggttattaagagcggtaaatacgatattattatttgtaattattcgaacggcgatatggtaggttatatcggggtgatggaagcggcggttaaagcggttgaagcgttggattattgcgtggaagaagtcgcgaaagcggttgagttcgtgggtggataattgttgattatcgttgattacggtaacgttgagtagatgcgcgattcggtaacgggttaggtatatacggtatatattaatttgttagtttcgttgatttacgttggtgataagaacgtgaaagcggttgaaggcggtaaattttttgatatcgcgtcgattatgttgtcgttgatgggtatggaaatttcgtaagagatgattggtaagtcgttgtttatcgtggaataatttttttttatgaggggaaaggcgattaatattatgatacgggtcgtgaaatnncgcgtaggtttgtaattagggttattatttacgttagcgtttttagcgttggcgtattgttgtgcgtttttttcgcgtacgcggatgagcgtgattaatttaaatttatttaggttgatatcgtcgtaaaagagcgcgcggtacgttaaaagtaataataacgcgtaagtttgttcgtataattgaaaaagtaggaagaagcgatttttgaagttattcgtaagttgcgcgaaacgtaaaatacgtttaattaattta

SEQ ID NO: 6858 - DNA, 734 bp, Artificial Sequence
  chemically treated genomic DNA (Homo sapiens) CpG-island No: 6858
  unsure (259..)
taaattaattaaacgtattttacgtttcgcgcaacttacgaataacttcaaaaatcgcttcttcctactttttcaattatacgaacaaacttacgcgttattattacttttaacgtaccgcgcgctcttttacgacgatatcaacctaaataaatttaaattaatcacgctcatccgcgtacgcgaaaaaaacgcacaacaatacgccaacgctaaaaacgctaacgtaaataataaccctaattacaaacctacgcgnnatttcacgacccgtatcataatattaatcgcctttcccctcataaaaaaaaattattccacgataaacaacgacttaccaatcatctcttacgaaatttccatacccatcaacgacaacataatcgacgcgatatcaaaaaatttaccgccttcaaccgctttcacgttcttatcaccaacgtaaatcaacgaaactaacaaattaatatataccgtatatacctaacccgttaccgaatcgcgcatctactcaacgttaccgtaatcaacgataatcaacaattatccacccacgaactcaaccgctttcgcgacttcttccacgcaataatccaacgcttcaaccgctttaaccgccgcttccatcaccccgatataacctaccatatcgccgttcgaataattacaaataataatatcgtatttaccgctcttaataaccgcaaccaatttttcgatcaactctacgaaac

SEQ ID NO: 6859 - DNA, 734 bp, Artificial Sequence
  chemically treated genomic DNA (Homo sapiens) CpG-island No: 6859
  unsure (259..)
tgagttgattgagcgtgttttgcgtttcgcgtagtttacgggtggttttagagatcgtttttttttgtttttttaattgtgcgagtaggtttgcgcgttgttgttgtttttggcgtatcgcgcgtttttttgcggcgatgttagtttgaatagatttgagttggttacgtttattcgcgtgcgcggaaaaggcgtataataatacgttagcgttaagaacgttggcgtagatgatggttttgattgtaaatttgcgcgnngttttacggttcgtgttatggtattaatcgtttttttttttatggggagggattattttacgatgaatagcggtttattagttattttttgcgggatttttatatttattagcgataatatggtcggcgcgatgttagaaagtttgtcgtttttaatcgtttttacgtttttattattaacgtaaattagcggaattggtaggttggtgtgtgtcgtgtgtgtttgattcgttgtcggatcgcgtatttgtttagcgttatcgtggttagcggtgattagtagttgtttatttacggatttaatcgttttcgcgattttttttacgtagtgatttagcgttttaatcgttttaatcgtcgtttttattatttcggtgtgatttattatgtcgtcgttcggatagttatagatgatggtgtcgtatttgtcgtttttgatggtcgtaattagtttttcggttagttttgcggagt

SEQ ID NO: 6860 - DNA, 734 bp, Artificial Sequence
  chemically treated genomic DNA (Homo sapiens) CpG-island No: 6860
  unsure (475..)
actccgcaaaactaaccgaaaaactaattacgaccatcaaaaacgacaaatacgacaccatcatctataactatccgaacgacgacataataaatcacaccgaaataataaaaacgacgattaaaacgattaaaacgctaaatcactacgtaaaaaaaatcgcgaaaacgattaaatccgtaaataaacaactactaatcaccgctaaccacgataacgctaaacaaatacgcgatccgacaacgaatcaaacacacacgacacacaccaacctaccaattccgctaatttacgttaataataaaaacgtaaaaacgattaaaaacgacaaactttctaacatcgcgccgaccatattatcgctaataaatataaaaatcccgcaaaaaataactaataaaccgctattcatcgtaaaataatccctccccataaaaaaaaaaacgattaataccataacacgaaccgtaaaacnncgcgcaaatttacaatcaaaaccatcatctacgccaacgttcttaacgctaacgtattattatacgccttttccgcgcacgcgaataaacgtaaccaactcaaatctattcaaactaacatcgccgcaaaaaaacgcgcgatacgccaaaaacaacaacaacgcgcaaacctactcgcacaattaaaaaaacaaaaaaaaacgatctctaaaaccacccgtaaactacgcgaaacgcaaaacacgctcaatcaactca

SEQ ID NO: 6861 - DNA, 610 bp, Artificial Sequence
  chemically treated genomic DNA (Homo sapiens) CpG-island No: 6861
  unsure (7, 142)
tagaagntacgtttggtatcgttcgcgttatttttttaatttgtttagttatcgcgtcgatattcgttagtatagtgtcggaaatttaatgtcgatggggtttttaatgtcggttgagagtaaatcgatacggttacgaatnggcggtatttatagattcgttagtttcggtagtcgtacggtgttatttagttttttaatgattttgtttatcgttatgtttggtcgttattgtttttgcggtttaagttggatggtcgtttttattatttttagcggagtagaatcggtggcggttttcgttttttcggttttgttaaatattcgcgttattttaggtacgtttataattagtttgtcggttttttgtagtatattcgtcgtttttgttgcggaaattttcggtagcgtcgatggtatatataataagtcgtttttattgatttgcggtaaaaatttttcgttaattttattgagcggttagagaatcgttagtatcgaaagcgtcgttattagtagcgtggttttcggttagtgtagtatttttagtaatagcggatgataaatacgaattaaaaagcgattgagcgggttattgtttttcggcgga

SEQ ID NO: 6862 - DNA, 610 bp, Artificial Sequence
  chemically treated genomic DNA (Homo sapiens) CpG-island No: 6862
  unsure (469, 604)
tccgccgaaaaacaataacccgctcaatcgctttttaattcgtatttatcatccgctattactaaaaatactacactaaccgaaaaccacgctactaataacgacgctttcgatactaacgattctctaaccgctcaataaaattaacgaaaaatttttaccgcaaatcaataaaaacgacttattatatataccatcgacgctaccgaaaatttccgcaacaaaaacgacgaatatactacaaaaaaccgacaaactaattataaacgtacctaaaataacgcgaatatttaacaaaaccgaaaaaacgaaaaccgccaccgattctactccgctaaaaataataaaaacgaccatccaacttaaaccgcaaaaacaataacgaccaaacataacgataaacaaaatcattaaaaaactaaataacaccgtacgactaccgaaactaacgaatctataaataccgccnattcgtaaccgtatcgatttactctcaaccgacattaaaaaccccatcgacattaaatttccgacactatactaacgaatatcgacgcgataactaaacaaattaaaaaaataacgcgaacgataccaaacgtancttcta

SEQ ID NO: 6863 - DNA, 610 bp, Artificial Sequence
  chemically treated genomic DNA (Homo sapiens) CpG-island No: 6863
  unsure (469, 604)
ttcgtcggaaagtagtaattcgtttaatcgttttttgattcgtgtttattattcgttgttgttgaaagtattgtattggtcgaaaattacgttgttggtggcggcgttttcggtgttgacggttttttggtcgtttaataaagttggcggggaatttttatcgtagattaatgaaggcgatttgttgtatatgttatcgacgttgtcggggattttcgtagtagaggcggcgagtatgttgtaaaaaatcgataagttaattatgagcgtatttgaagtggcgcgggtatttggtaaaatcgggaaagcggaaatcgttatcgattttgtttcgttggagatggtagaaacgattatttagtttaagtcgtaggagtagtggcggttaggtatgacgatggataaaattattgaggaattggataatatcgtgcggttgtcggggttggcgaatttgtgggtgtcgttnattcgtaatcgtatcgatttgtttttaatcggtattaaaagttttatcggtattaagttttcggtattgtgttggcggatatcgacgcgatggttgagtaaattgaagaagtagcgcgaacggtgttaggcgtantttttg

SEQ ID NO: 6864 - DNA, 610 bp, Artificial Sequence
  chemically treated genomic DNA (Homo sapiens) CpG-island No: 6864
  unsure (7, 142)
caaaaantacgcctaacaccgttcgcgctacttcttcaatttactcaaccatcgcgtcgatatccgccaacacaataccgaaaacttaataccgataaaacttttaataccgattaaaaacaaatcgatacgattacgaatnaacgacacccacaaattcgccaaccccgacaaccgcacgatattatccaattcctcaataattttatccatcgtcatacctaaccgccactactcctacgacttaaactaaataatcgtttctaccatctccaacgaaacaaaatcgataacgatttccgctttcccgattttaccaaatacccgcgccacttcaaatacgctcataattaacttatcgattttttacaacatactcgccgcctctactacgaaaatccccgacaacgtcgataacatatacaacaaatcgccttcattaatctacgataaaaattccccgccaactttattaaacgaccaaaaaaccgtcaacaccgaaaacgccgccaccaacaacgtaattttcgaccaatacaatactttcaacaacaacgaataataaacacgaatcaaaaaacgattaaacgaattactactttccgacgaa

SEQ ID NO: 6865 - DNA, 769 bp, Artificial Sequence
  chemically treated genomic DNA (Homo sapiens) CpG-island No: 6865
  unsure (31, 167)
gtaagtgggggttgtatattggcgcgacgtntgaaaaatagtgcgagcgcggtttgttggcgaaagatttttttttatttattgtgattcgtattagcgcggtattcgatgcgcgtatgggcggcgttacgttttcggttatgagtaatttcggttcgggtaattangggattatcgtaataatgtttgtggtggtggtagtagaatatttcggagcggatgatgaacggttggcgcgtgcgttgatgttttcgtatttgagcgtaatttatatttataattagttatcgcgtttgtttgcgttgtgtgtcgtaacgatcgtagtaatgggggtcgtcgtcgggatggtatggttggtggatgggcgttatgaaattatttcgatggcgattagtagtatgatcggcgatgttagcggtatgatttgcgatggtgcgtcgaatagttgcgcgatgaaggtttcgattagtgtttcggttgcgtggaaagcggtgttaatggcgttggatgatatcgtcgtgatcggtaatgaagggattgtggcgtatgatgttgagtagtcgattgttaatttgtgtgcgttagtaagttattcgatgtagtaaacggatcggtagattatcgagattatggcgagtaaggttagataaacgttaggttttggggatcgtgtcggatgcgatgttggcgtattttgttcggtttacgggttgtttaattcgttaatgttgttggattttgtaggtcggataaggcgttttcgtcgtat

SEQ ID NO: 6866 - DNA, 769 bp, Artificial Sequence
  chemically treated genomic DNA (Homo sapiens) CpG-island No: 6866
  unsure (603, 739)
atacgacgaaaacgccttatccgacctacaaaatccaacaacattaacgaattaaacaacccgtaaaccgaacaaaatacgccaacatcgcatccgacacgatccccaaaacctaacgtttatctaaccttactcgccataatctcgataatctaccgatccgtttactacatcgaataacttactaacgcacacaaattaacaatcgactactcaacatcatacgccacaatcccttcattaccgatcacgacgatatcatccaacgccattaacaccgctttccacgcaaccgaaacactaatcgaaaccttcatcgcgcaactattcgacgcaccatcgcaaatcataccgctaacatcgccgatcatactactaatcgccatcgaaataatttcataacgcccatccaccaaccataccatcccgacgacgacccccattactacgatcgttacgacacacaacgcaaacaaacgcgataactaattataaatataaattacgctcaaatacgaaaacatcaacgcacgcgccaaccgttcatcatccgctccgaaatattctactaccaccaccacaaacattattacgataatcccntaattacccgaaccgaaattactcataaccgaaaacgtaacgccgcccatacgcgcatcgaataccgcgctaatacgaatcacaataaataaaaaaaaatctttcgccaacaaaccgcgctcgcactatttttcanacgtcgcgccaatatacaacccccacttac

SEQ ID NO: 6867 - DNA, 769 bp, Artificial Sequence
  chemically treated genomic DNA (Homo sapiens) CpG-island No: 6867
  unsure (603, 739)
atgcggcgaaaacgttttattcggtttataaaatttaataatattaacgaattaaataattcgtaggtcggataagatgcgttagtatcgtattcggtacgatttttaaaatttggcgtttatttggttttgttcgttataatttcgataatttgtcgattcgtttgttgtatcgaatggtttgttaacgtatataggttggtaatcgattgtttaatattatgcgttataatttttttattgtcggttacggcggtattatttagcgttattaatatcgttttttacgtagtcgaagtattggtcgaaatttttatcgcgtagttgttcgacgtattatcgtaaattatgtcgttgatatcgtcgattatattgttgatcgttatcgagatggttttataacgtttatttattagttatgttatttcggcggcggtttttattgttgcggtcgttgcggtatatagcgtagataaacgcggtaattggttatggatgtaaattgcgtttaaatgcgaaagtattagcgtacgcgttagtcgtttattattcgtttcgaagtgttttgttattattattataggtattgttgcggtaattttntggttattcgagtcggagttatttatagtcggaagcgtagcgtcgtttatacgcgtatcggatgtcgcgttggtacgaattataatggatgaagagagatttttcgttagtaaatcgcgttcgtattgttttttangcgtcgcgttaatatgtagtttttatttat

SEQ ID NO: 6868 - DNA, 769 bp, Artificial Sequence
  chemically treated genomic DNA (Homo sapiens) CpG-island No: 6868
  unsure (31, 167)
ataaataaaaactacatattaacgcgacgcntaaaaaacaatacgaacgcgatttactaacgaaaaatctctcttcatccattataattcgtaccaacgcgacatccgatacgcgtataaacgacgctacgcttccgactataaataactccgactcgaataaccanaaaattaccgcaacaatacctataataataataacaaaacacttcgaaacgaataataaacgactaacgcgtacgctaatactttcgcatttaaacgcaatttacatccataaccaattaccgcgtttatctacgctatataccgcaacgaccgcaacaataaaaaccgccgccgaaataacataactaataaataaacgttataaaaccatctcgataacgatcaacaatataatcgacgatatcaacgacataatttacgataatacgtcgaacaactacgcgataaaaatttcgaccaatacttcgactacgtaaaaaacgatattaataacgctaaataataccgccgtaaccgacaataaaaaaattataacgcataatattaaacaatcgattaccaacctatatacgttaacaaaccattcgatacaacaaacgaatcgacaaattatcgaaattataacgaacaaaaccaaataaacgccaaattttaaaaatcgtaccgaatacgatactaacgcatcttatccgacctacgaattatttaattcgttaatattattaaattttataaaccgaataaaacgttttcgccgcat

SEQ ID NO: 6869 - DNA, 644 bp, Artificial Sequence
  chemically treated genomic DNA (Homo sapiens) CpG-island No: 6869
  unsure (144, 181)
ggcgggtagcgtattgttggttttacgtttgatggtattgtttaatttgaaaacgggcgatattattgacgtgggcgatgttattttgcggattgtcggagaagtgatttaggaatcggatttcggttttaattttttttagantgtttcgcgtttgatgatgaatttggcggatgtcgantaaatcggagtcgtgtagtcggggagtcgggttatttggcgttataaattcggcggtaacgagaattagttcgacggttatgagaaatggttgttattttagtttaaattcgaataacgttggtacggtttggaataggacgaaggcgcgttggggcgatcgatggaacgttcgtaatagtttttgttgttttcggcgtttttgattttgttgttggtagtggtagcggtggcggtagcgatgaattattattgtcgtagtcgttacgatttggtggcgatttttaaaacgttgggggtagggcgagcgtaattgcgtaagttaatcgtcggttagtggttgatggtgttgacgtttttagtcgttatcggtggggttataggtttgttgttcgaaaacgtgttgatggtgttgtttaagttcgttttgtttgttgtattatcgttagttagtttttggtcgt

SEQ ID NO: 6870 - DNA, 644 bp, Artificial Sequence
  chemically treated genomic DNA (Homo sapiens) CpG-island No: 6870
  unsure (464, 501)
acgaccaaaaactaactaacgataatacaacaaacaaaacgaacttaaacaacaccatcaacacgttttcgaacaacaaacctataaccccaccgataacgactaaaaacgtcaacaccatcaaccactaaccgacgattaacttacgcaattacgctcgccctacccccaacgttttaaaaatcgccaccaaatcgtaacgactacgacaataataattcatcgctaccgccaccgctaccactaccaacaacaaaatcaaaaacgccgaaaacaacaaaaactattacgaacgttccatcgatcgccccaacgcgccttcgtcctattccaaaccgtaccaacgttattcgaatttaaactaaaataacaaccatttctcataaccgtcgaactaattctcgttaccgccgaatttataacgccaaataacccgactccccgactacacgactccgatttantcgacatccgccaaattcatcatcaaacgcgaaacantctaaaaaaaattaaaaccgaaatccgattcctaaatcacttctccgacaatccgcaaaataacatcgcccacgtcaataatatcgcccgttttcaaattaaacaataccatcaaacgtaaaaccaacaatacgctacccgcc

SEQ ID NO: 6871 - DNA, 644 bp, Artificial Sequence
  chemically treated genomic DNA (Homo sapiens) CpG-island No: 6871
  unsure (464, 501)
acggttagaggttggttggcggtagtgtagtaggtagaacgggtttgagtagtattattaatacgttttcgaataataggtttatggttttatcggtaacggttgaaagcgttagtattattaattattgatcgacgattagtttacgtagttgcgttcgttttgtttttagcgttttgaggatcgttattagatcgtagcgattgcgatagtaatgatttatcgttatcgttatcgttgttattgttagtagtaaggttagaagcgtcgaaagtagtaggaattgttgcgagcgttttatcgatcgttttagcgcgttttcgttttgttttagatcgtattagcgttgttcgggtttaagttgaggtaataattattttttatagtcgtcgagttggttttcgttgtcgtcgaatttataacgttaggtgattcgatttttcggttgtacggtttcggtttantcgatattcgttagatttattattagacgcggagtantttggaaggggttaaaatcggaattcggtttttgaattattttttcggtaattcgtaaggtggtatcgtttacgttaatggtgtcgttcgtttttaggttaagtagtgttattaggcgtggggttagtaatacgttgttcgtt

SEQ ID NO: 6872 - DNA, 644 bp, Artificial Sequence
  chemically treated genomic DNA (Homo sapiens) CpG-island No: 6872
  unsure (144, 181)
aacgaacaacgtattactaaccccacgcctaataacactacttaacctaaaaacgaacgacaccattaacgtaaacgataccaccttacgaattaccgaaaaaataattcaaaaaccgaattccgattttaaccccttccaaantactccgcgtctaataataaatctaacgaatatcgantaaaccgaaaccgtacaaccgaaaaatcgaatcacctaacgttataaattcgacgacaacgaaaaccaactcgacgactataaaaaataattattacctcaacttaaacccgaacaacgctaatacgatctaaaacaaaacgaaaacgcgctaaaacgatcgataaaacgctcgcaacaattcctactactttcgacgcttctaaccttactactaacaataacaacgataacgataacgataaatcattactatcgcaatcgctacgatctaataacgatcctcaaaacgctaaaaacaaaacgaacgcaactacgtaaactaatcgtcgatcaataattaataatactaacgctttcaaccgttaccgataaaaccataaacctattattcgaaaacgtattaataatactactcaaacccgttctacctactacactaccgccaaccaacctctaaccgt

SEQ ID NO: 6873 - DNA, 954 bp, Artificial Sequence
  chemically treated genomic DNA (Homo sapiens) CpG-island No: 6873
cgtatagacgtcgacgttgcgaagtttttcgcgtttttgttcgttcgtttcgttcgagtttcggttttcggttattgggatcgtttacgttttaggtggtatagtttggacgtaggtttgtgtttttttttttcgttttcggtttcggtttcgtcggaagcgtatttatagtggattgggtttgtattcgagacgtggtggttggcgcgtcggtcggcgcggagggatgacgcgaggaggtagcgattaatgggaaacggcgtagatcggggcgtttgttttttcgtttagtttcgttttcgttcggcgtcgggtcgtcggacgggttggaaggggcggtcgttcgggtaggatggcggcggtcgcggtgggcgcgggttacggcgcggggggttcgggcgtagcgagtagtagtggtggggcgcgcgagggcgcgcgggtggcggcgttgtgtttgttgtggtacgcgttgagcgcgggcggtaacgtggttaataaggtgattttgagcgttttttcgttttcggtgatcgtgtcgttgtgttatattttggttttgtgcgttgggttttcgtcgttgttgcgcgtttggcgcgtgtttttcgcgtcgttcgtttcgggtttcggatttagttcgtattcgtcgttcggttcgttgttgtcgtcgcgtttttattcgcgttacgtgttatcgttcgttttcggtaagtatttcgcgttcgtgttagcgtacgttagtatttggaaggtgttcgtgttttatgtatatatcggtaggtttcgcgttcggtttcgggggcggcggtcgggttcgtcgtttcgggtttgggcgtatggataggagtgcgtcgttcggggcgcgtttcgtcggattgagaagttagtagaggggttgttaagggtttggtaggggagggatacgtacggggtttttagggagaagaggagttgaga

SEQ ID NO: 6874 - DNA, 954 bp, Artificial Sequence
  chemically treated genomic DNA (Homo sapiens) CpG-island No: 6874
tctcaactcctcttctccctaaaaaccccgtacgtatccctcccctaccaaacccttaacaacccctctactaacttctcaatccgacgaaacgcgccccgaacgacgcactcctatccatacgcccaaacccgaaacgacgaacccgaccgccgcccccgaaaccgaacgcgaaacctaccgatatatacataaaacacgaacaccttccaaatactaacgtacgctaacacgaacgcgaaatacttaccgaaaacgaacgataacacgtaacgcgaataaaaacgcgacgacaacaacgaaccgaacgacgaatacgaactaaatccgaaacccgaaacgaacgacgcgaaaaacacgcgccaaacgcgcaacaacgacgaaaacccaacgcacaaaaccaaaatataacacaacgacacgatcaccgaaaacgaaaaaacgctcaaaatcaccttattaaccacgttaccgcccgcgctcaacgcgtaccacaacaaacacaacgccgccacccgcgcgccctcgcgcgccccaccactactactcgctacgcccgaaccccccgcgccgtaacccgcgcccaccgcgaccgccgccatcctacccgaacgaccgccccttccaacccgtccgacgacccgacgccgaacgaaaacgaaactaaacgaaaaaacaaacgccccgatctacgccgtttcccattaatcgctacctcctcgcgtcatccctccgcgccgaccgacgcgccaaccaccacgtctcgaatacaaacccaatccactataaatacgcttccgacgaaaccgaaaccgaaaacgaaaaaaaaaaacacaaacctacgtccaaactataccacctaaaacgtaaacgatcccaataaccgaaaaccgaaactcgaacgaaacgaacgaacaaaaacgcgaaaaacttcgcaacgtcgacgtctatacg

SEQ ID NO: 6875 - DNA, 954 bp, Artificial Sequence
  chemically treated genomic DNA (Homo sapiens) CpG-island No: 6875
ttttagttttttttttttttgagaatttcgtgcgtgttttttttttattaaatttttggtagtttttttgttgattttttagttcggcgggacgcgtttcgggcggcgtatttttatttatgcgtttaaattcgaagcggcgggttcggtcgtcgttttcgaggtcgggcgcggaatttatcggtgtgtgtataggatacgggtattttttagatgttgacgtgcgttgatacggacgcgaagtatttgtcgaaggcgagcggtagtacgtagcgcgggtagaagcgcggcggtagtagcgggtcggacgacggatgcggattgggttcggggttcgagacgggcggcgcggggggtacgcgttaggcgcgtagtagcggcgggagtttagcgtatagagttaggatgtggtatagcgatacggttatcgggaacgggaaggcgtttaggattattttgttgattacgttgtcgttcgcgtttagcgcgtattatagtaggtatagcgtcgttattcgcgcgttttcgcgcgttttattattgttgttcgttgcgttcgggtttttcgcgtcgtggttcgcgtttatcgcggtcgtcgttattttgttcgagcggtcgttttttttagttcgttcgacggttcgacgtcgggcgggggcggggttgggcgggggggtaggcgtttcggtttacgtcgttttttattggtcgttgttttttcgcgttattttttcgcgtcggtcgacgcgttagttattacgtttcgagtgtaggtttagtttattgtagatgcgttttcggcggagtcgaggtcggaagcggaagaaggggatatagatttgcgtttaagttgtgttatttgagacgtgggcggttttagtgatcgggagtcggagttcgaacgggacgggcgaatagaagcgcggagggtttcgtagcgtcggcgtttgtgcg

SEQ ID NO: 6876 - DNA, 954 bp, Artificial Sequence
  chemically treated genomic DNA (Homo sapiens) CpG-island No: 6876
cgcacaaacgccgacgctacgaaaccctccgcgcttctattcgcccgtcccgttcgaactccgactcccgatcactaaaaccgcccacgtctcaaataacacaacttaaacgcaaatctatatccccttcttccgcttccgacctcgactccgccgaaaacgcatctacaataaactaaacctacactcgaaacgtaataactaacgcgtcgaccgacgcgaaaaaataacgcgaaaaaacaacgaccaataaaaaacgacgtaaaccgaaacgcctacccccccgcccaaccccgcccccgcccgacgtcgaaccgtcgaacgaactaaaaaaaacgaccgctcgaacaaaataacgacgaccgcgataaacgcgaaccacgacgcgaaaaacccgaacgcaacgaacaacaataataaaacgcgcgaaaacgcgcgaataacgacgctatacctactataatacgcgctaaacgcgaacgacaacgtaatcaacaaaataatcctaaacgccttcccgttcccgataaccgtatcgctataccacatcctaactctatacgctaaactcccgccgctactacgcgcctaacgcgtaccccccgcgccgcccgtctcgaaccccgaacccaatccgcatccgtcgtccgacccgctactaccgccgcgcttctacccgcgctacgtactaccgctcgccttcgacaaatacttcgcgtccgtatcaacgcacgtcaacatctaaaaaatacccgtatcctatacacacaccgataaattccgcgcccgacctcgaaaacgacgaccgaacccgccgcttcgaatttaaacgcataaataaaaatacgccgcccgaaacgcgtcccgccgaactaaaaaatcaacaaaaaaactaccaaaaatttaataaaaaaaaaacacgcacgaaattctcaaaaaaaaaaaaaactaaaa

SEQ ID NO: 6877 - DNA, 821 bp, Artificial Sequence
  chemically treated genomic DNA (Homo sapiens) CpG-island No: 6877
tgcgacgtcgattaaggggtacgtttcgcgtttttcggtttcgattaatatttattcgcgtcgttttagttttttcgcggcgtcgcgcgacggggatttattttgcgaaagtgttaggaaatttttgcgcgtgcgcgtcgttagtttttttcgcgcgttaggtatcgcgcggttttttttcgtttgtttttcgtttttattttcggagttttttagcgacggtcgtaagtggcgggcggaagcggttttagaagttcgtcgtaaacggttttttcgcgttattttcggtcggttttcgtagacggcgttggtggtcgatcgtgtggcgtcggaggacgtttttcgcggtcggagttatggagatgtcgttgtttttcgatggtgagatttaaatcggtcgagagatcgttttttttttttcggaattttttattggtcggtttcgtttttcggagttttcgggtttgggagggggcggggttcggtttcgcggtttcgtttgcggtttttttcgtgggttttcgtattttcggcgagcgtgtggtttttatcgggattcgtataagggcggttttttcggggtttatttttttggggttttcggtaaggcggacgggggttggggcgtcgagtttttcggttttgggcggttttcgttgacgtttcgcgtggtttttttttcgttttttagattaggagtttcgaaatgttatcgataagttcgtttagttcgtggttcgtaatgggttcgagtttgagaagatgattatggagaagtagaaggataattttaaattttcgttttttttcggaggcgaatt

SEQ ID NO: 6878 - DNA, 821 bp, Artificial Sequence
  chemically treated genomic DNA (Homo sapiens) CpG-island No: 6878
aattcgcctccgaaaaaaaacgaaaatttaaaattatccttctacttctccataatcatcttctcaaactcgaacccattacgaaccacgaactaaacgaacttatcgataacatttcgaaactcctaatctaaaaaacgaaaaaaaaaccacgcgaaacgtcaacgaaaaccgcccaaaaccgaaaaactcgacgccccaacccccgtccgccttaccgaaaaccccaaaaaaataaaccccgaaaaaaccgcccttatacgaatcccgataaaaaccacacgctcgccgaaaatacgaaaacccacgaaaaaaaccgcaaacgaaaccgcgaaaccgaaccccgccccctcccaaacccgaaaactccgaaaaacgaaaccgaccaataaaaaattccgaaaaaaaaaaaacgatctctcgaccgatttaaatctcaccatcgaaaaacaacgacatctccataactccgaccgcgaaaaacgtcctccgacgccacacgatcgaccaccaacgccgtctacgaaaaccgaccgaaaataacgcgaaaaaaccgtttacgacgaacttctaaaaccgcttccgcccgccacttacgaccgtcgctaaaaaactccgaaaataaaaacgaaaaacaaacgaaaaaaaaccgcgcgatacctaacgcgcgaaaaaaactaacgacgcgcacgcgcaaaaatttcctaacactttcgcaaaataaatccccgtcgcgcgacgccgcgaaaaaactaaaacgacgcgaataaatattaatcgaaaccgaaaaacgcgaaacgtaccccttaatcgacgtcgca

SEQ ID NO: 6879 - DNA, 821 bp, Artificial Sequence
  chemically treated genomic DNA (Homo sapiens) CpG-island No: 6879
aattcgttttcgaaaagaaacgagaatttggggttgtttttttgtttttttatagttatttttttaaattcgggtttattgcgagttacgaattgggcgagtttgtcgatgatatttcgaagtttttggtttggaggacggagaaaaggttacgcggggcgttagcgaggatcgtttaaagtcgggggattcggcgttttagttttcgttcgttttgtcggggattttaagggggtgggtttcgaagaggtcgtttttgtacgggtttcgataggggttatacgttcgtcgggaatgcggggatttacgggagaggtcgtaggcgaagtcgcgaggtcgagtttcgtttttttttagattcggggatttcgggaggcggggtcggttaataggaggtttcggggagagagaaacggtttttcggtcggtttgggttttattatcggggggtagcggtatttttatggtttcggtcgcggggaacgtttttcggcgttatacgatcgattattagcgtcgtttgcggaagtcggtcggaagtggcgcgagggagtcgtttacggcgggtttttagggtcgttttcgttcgttatttacggtcgtcgttgggaaatttcggaagtgagagcgggaggtaggcgggaagaagtcgcgcgatgtttggcgcgcgggaggggttagcgacgcgtacgcgtagaagttttttgatattttcgtagagtgggttttcgtcgcgcggcgtcgcggaaaggttggaacggcgcgggtgggtgttagtcgagatcggggggcgcggggcgtgttttttggtcggcgtcgta

SEQ ID NO: 6880 - DNA, 821 bp, Artificial Sequence
  chemically treated genomic DNA (Homo sapiens) CpG-island No: 6880
tacgacgccgaccaaaaaacacgccccgcgccccccgatctcgactaacacccacccgcgccgttccaacctttccgcgacgccgcgcgacgaaaacccactctacgaaaatatcaaaaaacttctacgcgtacgcgtcgctaacccctcccgcgcgccaaacatcgcgcgacttcttcccgcctacctcccgctctcacttccgaaatttcccaacgacgaccgtaaataacgaacgaaaacgaccctaaaaacccgccgtaaacgactccctcgcgccacttccgaccgacttccgcaaacgacgctaataatcgatcgtataacgccgaaaaacgttccccgcgaccgaaaccataaaaataccgctaccccccgataataaaacccaaaccgaccgaaaaaccgtttctctctccccgaaacctcctattaaccgaccccgcctcccgaaatccccgaatctaaaaaaaaacgaaactcgacctcgcgacttcgcctacgacctctcccgtaaatccccgcattcccgacgaacgtataacccctatcgaaacccgtacaaaaacgacctcttcgaaacccacccccttaaaatccccgacaaaacgaacgaaaactaaaacgccgaatcccccgactttaaacgatcctcgctaacgccccgcgtaaccttttctccgtcctccaaaccaaaaacttcgaaatatcatcgacaaactcgcccaattcgtaactcgcaataaacccgaatttaaaaaaataactataaaaaaacaaaaaaacaaccccaaattctcgtttcttttcgaaaacgaatt

SEQ ID NO: 6881 - DNA, 590 bp, Artificial Sequence
  chemically treated genomic DNA (Homo sapiens) CpG-island No: 6881
gaatttgaggatatagagaggcgttcggagacgtacgatttgcgttcggtgtaggggtggcggaagtagtttttaaggaggtaggggattagtttgagatcgtattgttgttgacgggttcgggtttcggcgggattttgttcgttcgggcgtcgggatcggagggagataaagattcgttgggtcgtcgcgtcgatagaaacgttcgtatttttcgtttattttttcgggatgtagtttagcgttttcgcgggttttcggtttgggagttttagcggcggtagggttcgggttttgggcggagaggatacgcgttgcgtattttttcgtttcgtcggtgttcgcgagggtcgttcgggtacgggaggtcgcgggtttcggtttgttatttttagggtcgtttgttattcgttcgtcgtaagttttttagtacgcgtcgtttcgtcgtcgttgttgagttttttagcgttttagttttcgatcgttcgtttcgcgtttcgtatttcggcgtcgtttttaggatcgttcggatcgtatttgttggagagagggggatgagcggcgcgatattttttcgtaggatttaggag

SEQ ID NO: 6882 - DNA, 590 bp, Artificial Sequence
  chemically treated genomic DNA (Homo sapiens) CpG-island No: 6882
ctcctaaatcctacgaaaaaatatcgcgccgctcatccccctctctccaacaaatacgatccgaacgatcctaaaaacgacgccgaaatacgaaacgcgaaacgaacgatcgaaaactaaaacgctaaaaaactcaacaacgacgacgaaacgacgcgtactaaaaaacttacgacgaacgaataacaaacgaccctaaaaataacaaaccgaaacccgcgacctcccgtacccgaacgaccctcgcgaacaccgacgaaacgaaaaaatacgcaacgcgtatcctctccgcccaaaacccgaaccctaccgccgctaaaactcccaaaccgaaaacccgcgaaaacgctaaactacatcccgaaaaaataaacgaaaaatacgaacgtttctatcgacgcgacgacccaacgaatctttatctccctccgatcccgacgcccgaacgaacaaaatcccgccgaaacccgaacccgtcaacaacaatacgatctcaaactaatcccctacctccttaaaaactacttccgccacccctacaccgaacgcaaatcgtacgtctccgaacgcctctctatatcctcaaattc

SEQ ID NO: 6883 - DNA, 590 bp, Artificial Sequence
  chemically treated genomic DNA (Homo sapiens) CpG-island No: 6883
tttttgagttttgcgggaagatgtcgcgtcgtttatttttttttttttagtaggtacggttcgggcggttttgggggcggcgtcggggtgcggggcgcgaggcgagcggtcgggagttgaggcgttgggagatttagtagcggcggcggggcggcgcgtgttgaagggtttgcggcgggcgggtggtaggcggttttgaaggtgataggtcgggattcgcggtttttcgtgttcgagcgattttcgcgggtatcggcgaggcgaggaggtgcgtagcgcgtgtttttttcgtttagggttcggattttgtcgtcgttgaagtttttaggtcggggattcgcggaggcgttgggttgtatttcggaggggtgggcgaggggtgcgagcgtttttgtcggcgcggcggtttagcgagtttttgttttttttcggtttcggcgttcgggcgggtagggtttcgtcggagttcggattcgttagtagtagtgcgattttagattgattttttgtttttttggaagttgttttcgttatttttgtatcgggcgtagatcgtacgttttcgggcgtttttttgtgtttttaaattt

SEQ ID NO: 6884 - DNA, 590 bp, Artificial Sequence
  chemically treated genomic DNA (Homo sapiens) CpG-island No: 6884
aaatttaaaaacacaaaaaaacgcccgaaaacgtacgatctacgcccgatacaaaaataacgaaaacaacttccaaaaaaacaaaaaatcaatctaaaatcgcactactactaacgaatccgaactccgacgaaaccctacccgcccgaacgccgaaaccgaaaaaaaacaaaaactcgctaaaccgccgcgccgacaaaaacgctcgcacccctcgcccacccctccgaaatacaacccaacgcctccgcgaatccccgacctaaaaacttcaacgacgacaaaatccgaaccctaaacgaaaaaaacacgcgctacgcacctcctcgcctcgccgatacccgcgaaaatcgctcgaacacgaaaaaccgcgaatcccgacctatcaccttcaaaaccgcctaccacccgcccgccgcaaacccttcaacacgcgccgccccgccgccgctactaaatctcccaacgcctcaactcccgaccgctcgcctcgcgccccgcaccccgacgccgcccccaaaaccgcccgaaccgtacctactaaaaaaaaaaaaataaacgacgcgacatcttcccgcaaaactcaaaaa

SEQ ID NO: 6885 - DNA, 692 bp, Artificial Sequence
  chemically treated genomic DNA (Homo sapiens) CpG-island No: 6885
aacggtgatgtagcggtaatagaacgcgagttgtagtatattagcgaagtgttggggttgaattacgataagtcgtaggtagtagatagtacgtcgaaatcgtagttgaaatcgtaattcgtttaaaaagaagtggcggatattgcgttgtaatgatacgttatattcggtatggtatgtcggatgtggcgtatgttgataagacgcgttagcgtcgtattaggtaatcggttcgggcgttagatgttggatgcggcgtaatcgttttatttaatttacggggtggagtattttatagcggtgtaggtttgataagacgcgttagcgtcgtattaggtaatcggtttgggcgttagatgtcggatgcggcgtaatcgttttattcgatttacggggtggagtattttatagcggtgtaggtttgataagacgcgttagcgtcgtattaggtaatcggttcggacgttggatgtcggatgcggcgtaatcgttttatttaatttacggggtggagtattttatagcggtgtaggtttgataagacgcgttagcgtcgtattaggcgtagattgtcggatgcggcgtgaacgttttagttcggtttacgtaagtttgtgataacgttaagtattcgatattattttttaattaaaagaatacgatatatatcgcgagtcgttataataagagcg

SEQ ID NO: 6886 - DNA, 692 bp, Artificial Sequence
  chemically treated genomic DNA (Homo sapiens) CpG-island No: 6886
cgctcttattataacgactcgcgatatatatcgtattcttttaattaaaaaataatatcgaatacttaacgttatcacaaacttacgtaaaccgaactaaaacgttcacgccgcatccgacaatctacgcctaatacgacgctaacgcgtcttatcaaacctacaccgctataaaatactccaccccgtaaattaaataaaacgattacgccgcatccgacatccaacgtccgaaccgattacctaatacgacgctaacgcgtcttatcaaacctacaccgctataaaatactccaccccgtaaatcgaataaaacgattacgccgcatccgacatctaacgcccaaaccgattacctaatacgacgctaacgcgtcttatcaaacctacaccgctataaaatactccaccccgtaaattaaataaaacgattacgccgcatccaacatctaacgcccgaaccgattacctaatacgacgctaacgcgtcttatcaacatacgccacatccgacataccataccgaatataacgtatcattacaacgcaatatccgccacttctttttaaacgaattacgatttcaactacgatttcgacgtactatctactacctacgacttatcgtaattcaaccccaacacttcgctaatatactacaactcgcgttctattaccgctacatcaccgtt

SEQ ID NO: 6887 - DNA, 692 bp, Artificial Sequence
  chemically treated genomic DNA (Homo sapiens) CpG-island No: 6887
cgtttttattgtggcggttcgcggtgtatgtcgtgtttttttaattgaggaatagtgtcggatgtttggcgttgttatagatttgcgtaggtcgaattaaggcgtttacgtcgtattcggtaatttacgtttgatgcgacgttggcgcgttttattaggtttatatcgttgtgaagtgttttatttcgtaggttggataaggcggttacgtcgtattcgatatttaacgttcgagtcggttgtttgatgcgacgttggcgcgttttattaggtttatatcgttgtgaagtgttttatttcgtaggtcggataaggcggttacgtcgtattcgatatttaacgtttaagtcggttgtttgatgcgacgttggcgcgttttattaggtttatatcgttgtgaagtgttttatttcgtaggttggataaggcggttacgtcgtatttaatatttaacgttcgagtcggttgtttgatgcgacgttggcgcgttttattagtatacgttatattcggtatattatgtcggatgtggcgtattattataacgtaatattcgttatttttttttgaacgggttgcggttttaattgcggtttcggcgtattatttgttgtttgcggtttgtcgtagtttaattttagtatttcgttggtgtattgtaattcgcgttttgttgtcgttatattatcgtt

SEQ ID NO: 6888 - DNA, 692 bp, Artificial Sequence
  chemically treated genomic DNA (Homo sapiens) CpG-island No: 6888
aacgataatataacgacaacaaaacgcgaattacaatacaccaacgaaatactaaaattaaactacgacaaaccgcaaacaacaaataatacgccgaaaccgcaattaaaaccgcaacccgttcaaaaaaaaataacgaatattacgttataataatacgccacatccgacataatataccgaatataacgtatactaataaaacgcgccaacgtcgcatcaaacaaccgactcgaacgttaaatattaaatacgacgtaaccgccttatccaacctacgaaataaaacacttcacaacgatataaacctaataaaacgcgccaacgtcgcatcaaacaaccgacttaaacgttaaatatcgaatacgacgtaaccgccttatccgacctacgaaataaaacacttcacaacgatataaacctaataaaacgcgccaacgtcgcatcaaacaaccgactcgaacgttaaatatcgaatacgacgtaaccgccttatccaacctacgaaataaaacacttcacaacgatataaacctaataaaacgcgccaacgtcgcatcaaacgtaaattaccgaatacgacgtaaacgccttaattcgacctacgcaaatctataacaacgccaaacatccgacactattcctcaattaaaaaaacacgacatacaccgcgaaccgccacaataaaaacg

SEQ ID NO: 6889 - DNA, 539 bp, Artificial Sequence
  chemically treated genomic DNA (Homo sapiens) CpG-island No: 6889
ttgggaagatttttttttagagcgtcgcggggagcgtttcgggttgggtttacggggattgcggaatacggggatgaatttggtttggggtagttagtattttacggtagatgaataatcgggagtagatttgtgggcgtgcggggattttaggcggcgcgcgggggcggggggaggggttgagttacgggggttagaggtgtcgtttggacggtttgagttgggggcgttcgcgttattttttacgtgtgcgagtgatgtaaatgtagattcgcgaggggcgggcgggggtggcgggcgggggtaggcgacggagttttcgtttgggagcgcgcgtgtgtgcgttaaaagttttgggttgatggatgtttcgcggcgcgtttggcgcggagagcggcgatttagcggggtagaggggggcgggaggattgcggcggcgcggggcggcgaggaaagtttcgtacggtttgggttggcgggtagaggtagtagagaaagaaatagaggtagtagaataaaaaatttttatttgaagttaa

SEQ ID NO: 6890 - DNA, 539 bp, Artificial Sequence
  chemically treated genomic DNA (Homo sapiens) CpG-island No: 6890
ttaacttcaaataaaaattttttattctactacctctatttctttctctactacctctacccgccaacccaaaccgtacgaaactttcctcgccgccccgcgccgccgcaatcctcccgcccccctctaccccgctaaatcgccgctctccgcgccaaacgcgccgcgaaacatccatcaacccaaaacttttaacgcacacacgcgcgctcccaaacgaaaactccgtcgcctacccccgcccgccacccccgcccgcccctcgcgaatctacatttacatcactcgcacacgtaaaaaataacgcgaacgcccccaactcaaaccgtccaaacgacacctctaacccccgtaactcaacccctccccccgcccccgcgcgccgcctaaaatccccgcacgcccacaaatctactcccgattattcatctaccgtaaaatactaactaccccaaaccaaattcatccccgtattccgcaatccccgtaaacccaacccgaaacgctccccgcgacgctctaaaaaaaaatcttcccaa

SEQ ID NO: 6891 - DNA, 539 bp, Artificial Sequence
  chemically treated genomic DNA (Homo sapiens) CpG-island No: 6891
ttgattttaggtaaaagttttttattttgttgtttttgtttttttttttgttgtttttgttcgttagtttaggtcgtgcggggtttttttcgtcgtttcgcgtcgtcgtagttttttcgtttttttttgtttcgttgggtcgtcgtttttcgcgttaggcgcgtcgcggggtatttattaatttagagtttttgacgtatatacgcgcgtttttagacggagatttcgtcgtttgttttcgttcgttattttcgttcgtttttcgcgggtttgtatttgtattattcgtatacgtagaaggtgacgcgagcgtttttagtttaggtcgtttaggcggtatttttagttttcgtggtttagttttttttttcgttttcgcgcgtcgtttaaggttttcgtacgtttatagatttgttttcgattgtttatttgtcgtggggtgttggttgttttaagttaagtttattttcgtatttcgtagttttcgtgggtttagttcggggcgtttttcgcgacgttttggagaaaagtttttttag

SEQ ID NO: 6892 - DNA, 539 bp, Artificial Sequence
  chemically treated genomic DNA (Homo sapiens) CpG-island No: 6892
ctaaaaaaacttttctccaaaacgtcgcgaaaaacgccccgaactaaacccacgaaaactacgaaatacgaaaataaacttaacttaaaacaaccaacaccccacgacaaataaacaatcgaaaacaaatctataaacgtacgaaaaccttaaacgacgcgcgaaaacgaaaaaaaaaactaaaccacgaaaactaaaaataccgcctaaacgacctaaactaaaaacgctcgcgtcaccttctacgtatacgaataatacaaatacaaacccgcgaaaaacgaacgaaaataacgaacgaaaacaaacgacgaaatctccgtctaaaaacgcgcgtatatacgtcaaaaactctaaattaataaataccccgcgacgcgcctaacgcgaaaaacgacgacccaacgaaacaaaaaaaaacgaaaaaactacgacgacgcgaaacgacgaaaaaaaccccgcacgacctaaactaacgaacaaaaacaacaaaaaaaaaaacaaaaacaacaaaataaaaaacttttacctaaaatcaa

SEQ ID NO: 6893 - DNA, 617 bp, Artificial Sequence
  chemically treated genomic DNA (Homo sapiens) CpG-island No: 6893
  unsure (24)
gattttcgcgcgacgttttatttncgttttaaacgttttaatttttacgcgttttagcgtgtatttggttttggtatttttacgatcggttcgggttattttagttacgttgagttgttacgacggtttcggttatcgttagcgtatgttttagcggtagatagttaaatttattcgcggtgcgggcgtaggtttttttgttgtcgtgttcgaaggaaaagtttatcgtttattaataggttaaagtttattagtttgtcgttttcggcgatcgttacgaagtttatgtcgttggcgtgtagatcgatatcgttttgtggcgggattattatcgtggttttgaatttacgcggtaggtaggtttggtcgaggatcggttttttattagtagtggcgatttttttttggtcgagttagattttcgtatacgcgcgggtacgaggtaatagatgtttagaaatttttttcgtttattcgtacgttttcgcgtgtagttgcgattcgtaagggttcgaggtgtagagtacgttacggtttatgtcgttagttgtcgttagcgtattaagatcgatcgagtgtagtatttggtgtatcggtttgacgtttttttttagaat

SEQ ID NO: 6894 - DNA, 617 bp, Artificial Sequence
  chemically treated genomic DNA (Homo sapiens) CpG-island No: 6894
  unsure (594)
attctaaaaaaaaacgtcaaaccgatacaccaaatactacactcgatcgatcttaatacgctaacgacaactaacgacataaaccgtaacgtactctacacctcgaacccttacgaatcgcaactacacgcgaaaacgtacgaataaacgaaaaaaatttctaaacatctattacctcgtacccgcgcgtatacgaaaatctaactcgaccaaaaaaaaatcgccactactaataaaaaaccgatcctcgaccaaacctacctaccgcgtaaattcaaaaccacgataataatcccgccacaaaacgatatcgatctacacgccaacgacataaacttcgtaacgatcgccgaaaacgacaaactaataaactttaacctattaataaacgataaacttttccttcgaacacgacaacaaaaaaacctacgcccgcaccgcgaataaatttaactatctaccgctaaaacatacgctaacgataaccgaaaccgtcgtaacaactcaacgtaactaaaataacccgaaccgatcgtaaaaataccaaaaccaaatacacgctaaaacgcgtaaaaattaaaacgtttaaaacgnaaataaaacgtcgcgcgaaaatc

SEQ ID NO: 6895 - DNA, 617 bp, Artificial Sequence
  chemically treated genomic DNA (Homo sapiens) CpG-island No: 6895
  unsure (594)
attttgaaaaagaacgttaaatcggtgtattagatgttgtattcggtcggttttgatgcgttggcgatagttaacgatatgaatcgtaacgtattttgtatttcgaatttttacgagtcgtagttgtacgcggaagcgtacgagtgggcgaagaagatttttgagtatttgttgtttcgtattcgcgcgtatgcggagatttggttcgattaggaaaaagtcgttattattgatgaagaatcgattttcggttagatttatttgtcgcgtaaatttaaaattacggtagtgatttcgttatagaacgatatcgatttgtacgttaacgatatgaatttcgtggcgatcgtcgaaaacggtaaattggtgggttttaatttgttggtgggcggtgggtttttttttcgaatacggtaataagaaaatttacgttcgtatcgcgagtgagtttggttatttgtcgttggagtatacgttggcggtggtcgaagtcgtcgtgataatttagcgtgattggggtaattcgaatcgatcgtaaaaatgttaaaattaaatatacgttggagcgcgtgggggttgagacgtttaaagcgnaagtggagcgtcgcgcggggatt

SEQ ID NO: 6896 - DNA, 617 bp, Artificial Sequence
  chemically treated genomic DNA (Homo sapiens) CpG-island No: 6896
  unsure (24)
aatccccgcgcgacgctccacttncgctttaaacgtctcaacccccacgcgctccaacgtatatttaattttaacatttttacgatcgattcgaattaccccaatcacgctaaattatcacgacgacttcgaccaccgccaacgtatactccaacgacaaataaccaaactcactcgcgatacgaacgtaaattttcttattaccgtattcgaaaaaaaaacccaccgcccaccaacaaattaaaacccaccaatttaccgttttcgacgatcgccacgaaattcatatcgttaacgtacaaatcgatatcgttctataacgaaatcactaccgtaattttaaatttacgcgacaaataaatctaaccgaaaatcgattcttcatcaataataacgactttttcctaatcgaaccaaatctccgcatacgcgcgaatacgaaacaacaaatactcaaaaatcttcttcgcccactcgtacgcttccgcgtacaactacgactcgtaaaaattcgaaatacaaaatacgttacgattcatatcgttaactatcgccaacgcatcaaaaccgaccgaatacaacatctaatacaccgatttaacgttctttttcaaaat

SEQ ID NO: 6897 - DNA, 594 bp, Artificial Sequence
  chemically treated genomic DNA (Homo sapiens) CpG-island No: 6897
tttgcgcgatgtcgttcgtatagtaggcgggttggttgtcgtgggtgtggcgttggggttataatagtaaatcggacgcgtatttggcgtgcggttgcgttcgttcggagttataaacgagaacgtttttgttagtgtttgtgtgcgttgcggttagtgtgtttaggtttgtttttacgatattttaaaattggcgacgttggtttttggtttgtcggcgggtacgttatattttgtcgtacgggatattttttgcgaaatgtgtgaggatatttcgtgcgttaaagtgtgtttaagcggtgcgttggatcgtgagattgaatcgatcgacgacgcgcggatggggttggcggtattggtggattatgaaaattgttttaatttttaagggttgcgttgcgatgtttgttatcgcgaatgttcgaaaattgatgaagttattattttggagttggagcgtaatacgcgtatcggtaagtacgttcgttttttgtcgatagtttatagcgacgtttgtatcgggtgcggtaagtgcgaaatagtaatgaaacgattattgatacgattttttttttttttttgttattttgaaat

SEQ ID NO: 6898 - DNA, 594 bp, Artificial Sequence
  chemically treated genomic DNA (Homo sapiens) CpG-island No: 6898
atttcaaaataacaaaaaaaaaaaaaaaatcgtatcaataatcgtttcattactatttcgcacttaccgcacccgatacaaacgtcgctataaactatcgacaaaaaacgaacgtacttaccgatacgcgtattacgctccaactccaaaataataacttcatcaattttcgaacattcgcgataacaaacatcgcaacgcaacccttaaaaattaaaacaattttcataatccaccaataccgccaaccccatccgcgcgtcgtcgatcgattcaatctcacgatccaacgcaccgcttaaacacactttaacgcacgaaatatcctcacacatttcgcaaaaaatatcccgtacgacaaaatataacgtacccgccgacaaaccaaaaaccaacgtcgccaattttaaaatatcgtaaaaacaaacctaaacacactaaccgcaacgcacacaaacactaacaaaaacgttctcgtttataactccgaacgaacgcaaccgcacgccaaatacgcgtccgatttactattataaccccaacgccacacccacgacaaccaacccgcctactatacgaacgacatcgcgcaaa

SEQ ID NO: 6899 - DNA, 594 bp, Artificial Sequence
  chemically treated genomic DNA (Homo sapiens) CpG-island No: 6899
attttagaatggtagagagaaggggagggtcgtattaatggtcgttttattattatttcgtatttatcgtattcggtataggcgtcgttgtgaattgtcggtagaaagcgggcgtgtttatcggtacgcgtgttgcgttttagttttagggtgatggttttattaattttcgggtattcgcgataataaatatcgtagcgtagtttttgaaagttgagatagtttttatggtttattagtatcgttagttttattcgcgcgtcgtcgatcgatttaattttacgatttagcgtatcgtttgggtatattttggcgtacggaatgtttttatatatttcgtaaggaatatttcgtgcgataaaatatggcgtgttcgtcgatagattagaggttagcgtcgttagttttaaggtgtcgtaagggtaagtttgaatatattgatcgtaacgtatataggtattggtaaaggcgttttcgtttatggtttcgggcgggcgtaatcgtacgttagatgcgcgttcggtttgttgttgtaattttagcgttatatttacggtagttagttcgtttgttgtgcgaacgatatcgcgtaga

SEQ ID NO: 6900 - DNA, 594 bp, Artificial Sequence
  chemically treated genomic DNA (Homo sapiens) CpG-island No: 6900
tctacgcgatatcgttcgcacaacaaacgaactaactaccgtaaatataacgctaaaattacaacaacaaaccgaacgcgcatctaacgtacgattacgcccgcccgaaaccataaacgaaaacgcctttaccaatacctatatacgttacgatcaatatattcaaacttacccttacgacaccttaaaactaacgacgctaacctctaatctatcgacgaacacgccatattttatcgcacgaaatattccttacgaaatatataaaaacattccgtacgccaaaatatacccaaacgatacgctaaatcgtaaaattaaatcgatcgacgacgcgcgaataaaactaacgatactaataaaccataaaaactatctcaactttcaaaaactacgctacgatatttattatcgcgaatacccgaaaattaataaaaccatcaccctaaaactaaaacgcaacacgcgtaccgataaacacgcccgctttctaccgacaattcacaacgacgcctataccgaatacgataaatacgaaataataataaaacgaccattaatacgaccctccccttctctctaccattctaaaat

SEQ ID NO: 6901 - DNA, 540 bp, Artificial Sequence
  chemically treated genomic DNA (Homo sapiens) CpG-island No: 6901
attattacgattattataaagaagatggttaattcggtatttagacggttgttgaatattagttgcgttagttgtgatttagtatattgcgacggaatattgtcgttgtcgattattgtttggaatttattagtaatggttaggaagtcgattttcgtattcgggttaaacgttttttgttagtttgcggttagggtataaattagtagttaggtcgttggtattagcgttatttaggcgtaacgttgacgttttattttgaataatattacggtatagagtattagcgttatttttgttagtatttggttggtaatattaaatagcggttatagagtgttaatgtcgtttagcggatcgattacgttttgatggaggaagtagttttacgttagtacgtatagcgttgttgttagtaggttagtaggtagtgaatcggttcgtatcgaacgtagcgtagaaagcggtgtacggttattatcgttggcgatggtgattgattttgtattttgtggtgtttagatttagattataaggatt

SEQ ID NO: 6902 - DNA, 540 bp, Artificial Sequence
  chemically treated genomic DNA (Homo sapiens) CpG-island No: 6902
aatccttataatctaaatctaaacaccacaaaatacaaaatcaatcaccatcgccaacgataataaccgtacaccgctttctacgctacgttcgatacgaaccgattcactacctactaacctactaacaacaacgctatacgtactaacgtaaaactacttcctccatcaaaacgtaatcgatccgctaaacgacattaacactctataaccgctatttaatattaccaaccaaatactaacaaaaataacgctaatactctataccgtaatattattcaaaataaaacgtcaacgttacgcctaaataacgctaataccaacgacctaactactaatttataccctaaccgcaaactaacaaaaaacgtttaacccgaatacgaaaatcgacttcctaaccattactaataaattccaaacaataatcgacaacgacaatattccgtcgcaatatactaaatcacaactaacgcaactaatattcaacaaccgtctaaataccgaattaaccatcttctttataataatcgtaataat

SEQ ID NO: 6903 - DNA, 540 bp, Artificial Sequence
  chemically treated genomic DNA (Homo sapiens) CpG-island No: 6903
aatttttatagtttaaatttaggtattataggatgtagaattaattattatcgttagcggtggtaatcgtgtatcgttttttgcgttgcgttcggtacggatcgatttattgtttgttaatttgttggtaatagcgttgtgcgtattggcgtggggttattttttttattagggcgtggtcgattcgttgggcggtattaatattttgtggtcgttgtttggtattgttaattagatgttggtagggatggcgttgatgttttgtgtcgtggtgttgtttaagatgaaacgttaacgttacgtttgggtggcgttggtattaacggtttggttgttgatttgtattttgatcgtaggttggtagaaagcgtttagttcggatgcgaaagtcggttttttggttattgttaataagttttaggtaatgatcgatagcggtaatatttcgtcgtagtatattgagttatagttggcgtaattggtgtttaataatcgtttggatgtcgggttaattattttttttatggtggtcgtggtggt

SEQ ID NO: 6904 - DNA, 540 bp, Artificial Sequence
  chemically treated genomic DNA (Homo sapiens) CpG-island No: 6904
accaccacgaccaccataaaaaaaataattaacccgacatccaaacgattattaaacaccaattacgccaactataactcaatatactacgacgaaatattaccgctatcgatcattacctaaaacttattaacaataaccaaaaaaccgactttcgcatccgaactaaacgctttctaccaacctacgatcaaaatacaaatcaacaaccaaaccgttaataccaacgccacccaaacgtaacgttaacgtttcatcttaaacaacaccacgacacaaaacatcaacgccatccctaccaacatctaattaacaataccaaacaacgaccacaaaatattaataccgcccaacgaatcgaccacgccctaataaaaaaaataaccccacgccaatacgcacaacgctattaccaacaaattaacaaacaataaatcgatccgtaccgaacgcaacgcaaaaaacgatacacgattaccaccgctaacgataataattaattctacatcctataatacctaaatttaaactataaaaatt

SEQ ID NO: 6905 - DNA, 701 bp, Artificial Sequence
  chemically treated genomic DNA (Homo sapiens) CpG-island No: 6905
attagagggcgagtaaggggattcggtacgtaaatcggtaattaggtgtttgcgtttatcggtgtaaatcgtttatgcggcggcgcgtcggcgatattcgggtaaacgggtaattagcgttaataacggatttaaacgttggggattacgagtacgagatcgtggacggattgtttacgttacgatatgcgatcgcgacgtcggtaatattcggtagcgagggttacgtataattagattaaatttgggcgcgtatttgcggaaaattttattttagcgcgatacgtcggtaaacggtaacgcgcgcgaggaaagttagatattttcggcgggaaataggttgttgggttgaatggcgttacgaattttttatagggggttgaatgtaaaagattgaatgtgggcgcgagttaacggtatcggtaagataaaggggttcggttgcgttgaggggtaaatcgggaaattgtttacgaggtttcgagggcgggggttatggagtggtggtgggtgggttaggtcggatggataagtggggattacggcgaaattaggattataacgaggaaatgttcgggaaggacggtagtggaggtattacgaaagggatatagaaaagaatggagtaaacgtagataattgatcgcgcgagtagtttttgcgttagcgtgcgggggtattggatgataagtgagaagtaa

SEQ ID NO: 6906 - DNA, 701 bp, Artificial Sequence
  chemically treated genomic DNA (Homo sapiens) CpG-island No: 6906
ttacttctcacttatcatccaatacccccgcacgctaacgcaaaaactactcgcgcgatcaattatctacgtttactccattcttttctatatccctttcgtaatacctccactaccgtccttcccgaacatttcctcgttataatcctaatttcgccgtaatccccacttatccatccgacctaacccacccaccaccactccataacccccgccctcgaaacctcgtaaacaatttcccgatttacccctcaacgcaaccgaacccctttatcttaccgataccgttaactcgcgcccacattcaatcttttacattcaaccccctataaaaaattcgtaacgccattcaacccaacaacctatttcccgccgaaaatatctaactttcctcgcgcgcgttaccgtttaccgacgtatcgcgctaaaataaaattttccgcaaatacgcgcccaaatttaatctaattatacgtaaccctcgctaccgaatattaccgacgtcgcgatcgcatatcgtaacgtaaacaatccgtccacgatctcgtactcgtaatccccaacgtttaaatccgttattaacgctaattacccgtttacccgaatatcgccgacgcgccgccgcataaacgatttacaccgataaacgcaaacacctaattaccgatttacgtaccgaatccccttactcgccctctaat

SEQ ID NO: 6907 - DNA, 701 bp, Artificial Sequence
  chemically treated genomic DNA (Homo sapiens) CpG-island No: 6907
ttattttttatttgttatttagtgttttcgtacgttaacgtaaagattattcgcgcggttagttatttgcgtttgttttatttttttttgtgtttttttcgtagtgtttttattgtcgtttttttcgggtattttttcgttgtagttttggtttcgtcgtaatttttatttgtttattcggtttgatttatttattattattttataattttcgttttcgagatttcgtaagtagtttttcggtttgttttttagcgtagtcgggtttttttgttttatcggtatcgttgattcgcgtttatatttagttttttgtatttagttttttatagggggttcgtggcgttatttagtttagtagtttatttttcgtcggaggtatttggtttttttcgcgcgcgttgtcgtttatcggcgtatcgcgttaaagtaaagtttttcgtaggtacgcgtttaggtttagtttagttgtacgtggttttcgttatcgggtgttatcggcgtcgcggtcgtatatcgtggcgtaggtaattcgtttacggtttcgtgttcgtagtttttaacgtttaggttcgttgttagcgttaattattcgtttgttcgggtgtcgtcggcgcgtcgtcgtataggcggtttgtatcggtgggcgtaggtatttggttatcggtttacgtgtcgggtttttttattcgttttttagt

SEQ ID NO: 6908 - DNA, 701 bp, Artificial Sequence
  chemically treated genomic DNA (Homo sapiens) CpG-island No: 6908
actaaaaaacgaataaaaaaacccgacacgtaaaccgataaccaaatacctacgcccaccgatacaaaccgcctatacgacgacgcgccgacgacacccgaacaaacgaataattaacgctaacaacgaacctaaacgttaaaaactacgaacacgaaaccgtaaacgaattacctacgccacgatatacgaccgcgacgccgataacacccgataacgaaaaccacgtacaactaaactaaacctaaacgcgtacctacgaaaaactttactttaacgcgatacgccgataaacgacaacgcgcgcgaaaaaaaccaaatacctccgacgaaaaataaactactaaactaaataacgccacgaaccccctataaaaaactaaatacaaaaaactaaatataaacgcgaatcaacgataccgataaaacaaaaaaacccgactacgctaaaaaacaaaccgaaaaactacttacgaaatctcgaaaacgaaaattataaaataataataaataaatcaaaccgaataaacaaataaaaattacgacgaaaccaaaactacaacgaaaaaatacccgaaaaaaacgacaataaaaacactacgaaaaaaacacaaaaaaaaataaaacaaacgcaaataactaaccgcgcgaataatctttacgttaacgtacgaaaacactaaataacaaataaaaaataa

SEQ ID NO: 6909 - DNA, 587 bp, Artificial Sequence
  chemically treated genomic DNA (Homo sapiens) CpG-island No: 6909
cgtttatgcgattcgtcgagttaacgttttgtcgtaacggtaagtgtacgttagacgtttattagtattgtattgtttagtttggtgcgatgcgtttatatcggggcgggtcgttttcgtttcgtttcgttttgtttttttcgtttcggttcggggcgggcgttgggcgtcgtttcgggtcgggcgcgcgtcgcggcgcgggtcgcgcgtcgcgtcgcgggcgtcgcgcggcgttcgggtcgggtcgggtcgcgcggggtttgggggtacgggcggggtcggggcgcgggcggggaggattggaaaaggggaatttggggtagtacggatcgtgtaagttgggcggcgagaggtcgatcggggaggcggagacgggggattacgtgatgaaatataaagttcggtattgcgaagcggtggacgcgagattgtatgtgatagtagcggatatgtatacgtggatttgggtggcgcggggatagaagatttgtacgcggattggggattagagttattaaatcggcgtagaatttttatataagtggggtaagtagtagttgagaggattgttggatgatatagtagtt

SEQ ID NO: 6910 - DNA, 587 bp, Artificial Sequence
  chemically treated genomic DNA (Homo sapiens) CpG-island No: 6910
aactactatatcatccaacaatcctctcaactactacttaccccacttatataaaaattctacgccgatttaataactctaatccccaatccgcgtacaaatcttctatccccgcgccacccaaatccacgtatacatatccgctactatcacatacaatctcgcgtccaccgcttcgcaataccgaactttatatttcatcacgtaatcccccgtctccgcctccccgatcgacctctcgccgcccaacttacacgatccgtactaccccaaattccccttttccaatcctccccgcccgcgccccgaccccgcccgtacccccaaaccccgcgcgacccgacccgacccgaacgccgcgcgacgcccgcgacgcgacgcgcgacccgcgccgcgacgcgcgcccgacccgaaacgacgcccaacgcccgccccgaaccgaaacgaaaaaaacaaaacgaaacgaaacgaaaacgacccgccccgatataaacgcatcgcaccaaactaaacaatacaatactaataaacgtctaacgtacacttaccgttacgacaaaacgttaactcgacgaatcgcataaacg

SEQ ID NO: 6911 - DNA, 587 bp, Artificial Sequence
  chemically treated genomic DNA (Homo sapiens) CpG-island No: 6911
ggttattatgttatttagtaatttttttaattattatttattttatttatatggaggttttacgtcggtttagtagttttggtttttagttcgcgtgtaagttttttattttcgcgttatttaagtttacgtgtatatgttcgttattattatatataatttcgcgtttatcgtttcgtagtatcgggttttatgttttattacgtagtttttcgttttcgttttttcggtcggtttttcgtcgtttaatttatacggttcgtattgttttaggttttttttttttaatttttttcgttcgcgtttcggtttcgttcgtgtttttaggtttcgcgcggttcggttcggttcgggcgtcgcgcggcgttcgcggcgcggcgcgcggttcgcgtcgcggcgcgcgttcggttcggggcggcgtttagcgttcgtttcgggtcggggcggggggggtagggcggggcggggcgggggcggttcgtttcgatgtaaacgtatcgtattaggttaagtaatatagtattagtgagcgtttggcgtgtatttgtcgttgcggtaaagcgttagttcggcgggtcgtataggcg

SEQ ID NO: 6912 - DNA, 587 bp, Artificial Sequence
  chemically treated genomic DNA (Homo sapiens) CpG-island No: 6912
cgcctatacgacccgccgaactaacgctttaccgcaacgacaaatacacgccaaacgctcactaatactatattacttaacctaatacgatacgtttacatcgaaacgaaccgcccccgccccgccccgccctaccccccccgccccgacccgaaacgaacgctaaacgccgccccgaaccgaacgcgcgccgcgacgcgaaccgcgcgccgcgccgcgaacgccgcgcgacgcccgaaccgaaccgaaccgcgcgaaacctaaaaacacgaacgaaaccgaaacgcgaacgaaaaaaattaaaaaaaaaaaacctaaaacaatacgaaccgtataaattaaacgacgaaaaaccgaccgaaaaaacgaaaacgaaaaactacgtaataaaacataaaacccgatactacgaaacgataaacgcgaaattatatataataataacgaacatatacacgtaaacttaaataacgcgaaaataaaaaacttacacgcgaactaaaaaccaaaactactaaaccgacgtaaaacctccatataaataaaataaataataattaaaaaaattactaaataacataataacc

SEQ ID NO: 6913 - DNA, 654 bp, Artificial Sequence
  chemically treated genomic DNA (Homo sapiens) CpG-island No: 6913
agggattcgggagttggaggtcgtagtcgcgcgagaatcgtcgggttgtcggggcgacgttttcggttggcgcgcgtagtttcgggagtaggggagttgtgaaatgggcggttagatttgttcggcgttgtgaattcgttagcgggagcgcgttcgcggtcgcgcgtttttcgttttttcggtttcgtcgttgacgcgtcgtagacgttggggagcgggaaggtaacggtagcgggatcgggatgaatagcggcggcggtttcggtttgggtttaggtttcggttttatttttacgtcggtgatttaggtgacgaatttgtcgtcggcggtgattagcgagtagatgcggacgttttttttttttttaggagaaatcgaggagttgcggttttatttttcggagtaagtgttggagttcggttgggggaggggcgcgggcgttatagagatttcgggagtcgaggcgtggaggagagcgcggacgcgggcgcgcggtgtatgttacgtgatcgcgtcggtttattttggtgtttatatttgattagggtattcgggtttcgtcgttttgttttttttagtcggatttggggggttaattattgtacggagtttttattaaggatttagaatggttgttttttttgtgttttcgg

SEQ ID NO: 6914 - DNA, 654 bp, Artificial Sequence
  chemically treated genomic DNA (Homo sapiens) CpG-island No: 6914
ccgaaaacacaaaaaaaacaaccattctaaatccttaataaaaactccgtacaataattaaccccccaaatccgactaaaaaaaacaaaacgacgaaacccgaataccctaatcaaatataaacaccaaaataaaccgacgcgatcacgtaacatacaccgcgcgcccgcgtccgcgctctcctccacgcctcgactcccgaaatctctataacgcccgcgcccctcccccaaccgaactccaacacttactccgaaaaataaaaccgcaactcctcgatttctcctaaaaaaaaaaaaaacgtccgcatctactcgctaatcaccgccgacgacaaattcgtcacctaaatcaccgacgtaaaaataaaaccgaaacctaaacccaaaccgaaaccgccgccgctattcatcccgatcccgctaccgttaccttcccgctccccaacgtctacgacgcgtcaacgacgaaaccgaaaaaacgaaaaacgcgcgaccgcgaacgcgctcccgctaacgaattcacaacgccgaacaaatctaaccgcccatttcacaactcccctactcccgaaactacgcgcgccaaccgaaaacgtcgccccgacaacccgacgattctcgcgcgactacgacctccaactcccgaatccct

SEQ ID NO: 6915 - DNA, 654 bp, Artificial Sequence
  chemically treated genomic DNA (Homo sapiens) CpG-island No: 6915
tcggaggtatagaaagggtaattattttaaatttttggtaagggtttcgtgtagtagttaattttttaaattcgattaaggagagtaggacggcggaattcgggtgttttaattaaatatgggtattaaggtaagtcggcgcgattacgtgatatgtatcgcgcgttcgcgttcgcgtttttttttacgtttcggttttcgaggtttttatggcgttcgcgttttttttttagtcgagttttagtatttatttcggggggtagagtcgtagtttttcgattttttttaggaaggaaaaaagcgttcgtatttgttcgttggttatcgtcgacgatagattcgttatttgaattatcgacgtgggggtgaggtcgaagtttaagtttaaatcgaagtcgtcgtcgttgtttatttcgatttcgttgtcgttgttttttcgttttttaacgtttacgacgcgttagcgacggagtcgggaaagcggagaacgcgcggtcgcgagcgcgttttcgttggcgaatttatagcgtcgggtagatttagtcgtttattttataatttttttgttttcggggttgcgcgcgttagtcggaagcgtcgtttcggtaattcggcggttttcgcgcggttgcggtttttagttttcgggttttt

SEQ ID NO: 6916 - DNA, 654 bp, Artificial Sequence
  chemically treated genomic DNA (Homo sapiens) CpG-island No: 6916
aaaaacccgaaaactaaaaaccgcaaccgcgcgaaaaccgccgaattaccgaaacgacgcttccgactaacgcgcgcaaccccgaaaacaaaaaaattataaaataaacgactaaatctacccgacgctataaattcgccaacgaaaacgcgctcgcgaccgcgcgttctccgctttcccgactccgtcgctaacgcgtcgtaaacgttaaaaaacgaaaaaacaacgacaacgaaatcgaaataaacaacgacgacgacttcgatttaaacttaaacttcgacctcacccccacgtcgataattcaaataacgaatctatcgtcgacgataaccaacgaacaaatacgaacgcttttttccttcctaaaaaaaatcgaaaaactacgactctaccccccgaaataaatactaaaactcgactaaaaaaaaaacgcgaacgccataaaaacctcgaaaaccgaaacgtaaaaaaaaacgcgaacgcgaacgcgcgatacatatcacgtaatcgcgccgacttaccttaatacccatatttaattaaaacacccgaattccgccgtcctactctccttaatcgaatttaaaaaattaactactacacgaaacccttaccaaaaatttaaaataattaccctttctatacctccga

SEQ ID NO: 6917 - DNA, 621 bp, Artificial Sequence
  chemically treated genomic DNA (Homo sapiens) CpG-island No: 6917
ggcgggggtgaaaagcgtgtagtaggttcgtattcgtgtcgtttagtcgttgggtgttagtcgtgcgtaggtgttgtggtttgttattttgttcggtgcgttgtcggaaatttttatcggattacgtattggtttgggggtgggttggtttacgttggtggcggcggagttgattgtcgcgacgcgcggtttaggatttatggtttagttagcgggtgaatttttcgtaattgacgtggtgttggcggggatcgcggtgattgcgattatcgttttttttttagaattgggtttgcgcgcgttatagcgtcgtttgacgttttggtatggagaagtataatgagtgaacgtttgagtattatttcgttggggtcgtatatcggcgtataaatttcgggtgtcgatttgacgcgttcgttaagcgataattagtttgaatagttttattatgcggtgttgcgttattacggtggtgtttttacgcgattaagttattacgtcgtagtagtaacgcgcgttggtttagcgttttggcgaattgtatatttattttgtttattcgtatgtcgaaggggttgacgagattatcgtgttggatatttataacgataattcgttaga

SEQ ID NO: 6918 - DNA, 621 bp, Artificial Sequence
  chemically treated genomic DNA (Homo sapiens) CpG-island No: 6918
tctaacgaattatcgttataaatatccaacacgataatctcgtcaaccccttcgacatacgaataaacaaaataaatatacaattcgccaaaacgctaaaccaacgcgcgttactactacgacgtaataacttaatcgcgtaaaaacaccaccgtaataacgcaacaccgcataataaaactattcaaactaattatcgcttaacgaacgcgtcaaatcgacacccgaaatttatacgccgatatacgaccccaacgaaataatactcaaacgttcactcattatacttctccataccaaaacgtcaaacgacgctataacgcgcgcaaacccaattctaaaaaaaaaacgataatcgcaatcaccgcgatccccgccaacaccacgtcaattacgaaaaattcacccgctaactaaaccataaatcctaaaccgcgcgtcgcgacaatcaactccgccgccaccaacgtaaaccaacccacccccaaaccaatacgtaatccgataaaaatttccgacaacgcaccgaacaaaataacaaaccacaacacctacgcacgactaacacccaacgactaaacgacacgaatacgaacctactacacgcttttcacccccgcc

SEQ ID NO: 6919 - DNA, 621 bp, Artificial Sequence
  chemically treated genomic DNA (Homo sapiens) CpG-island No: 6919
tttggcggattatcgttatgggtatttagtacgatgatttcgttaattttttcggtatgcgggtaaatagggtgaatatgtaattcgttaaaacgttgggttagcgcgcgttgttgttgcggcgtaatagtttgatcgcgtagaaatattatcgtgatggcgtagtatcgtatggtaaagttgtttaaattgattatcgtttaacgggcgcgttaggtcggtattcgaaatttgtgcgtcgatatacggttttagcggggtaatgtttagacgtttatttattgtatttttttatgttagggcgttaggcggcgttgtaacgcgcgtagatttagttttaaaagaaaggcgataatcgtaattatcgcgattttcgttagtattacgttagttgcgagaaatttattcgttgattgaattataaattttaaatcgcgcgtcgcggtaattagtttcgtcgttattagcgtagattagtttatttttagattaatacgtaattcggtgaggattttcggtagcgtatcgggtaaaatgataaattatagtatttgcgtacggttggtatttagcgattgggcggtacgaatgcgaatttgttgtacgttttttattttcgtt

SEQ ID NO: 6920 - DNA, 621 bp, Artificial Sequence
  chemically treated genomic DNA (Homo sapiens) CpG-island No: 6920
aacgaaaataaaaaacgtacaacaaattcgcattcgtaccgcccaatcgctaaataccaaccgtacgcaaatactataatttatcattttacccgatacgctaccgaaaatcctcaccgaattacgtattaatctaaaaataaactaatctacgctaataacgacgaaactaattaccgcgacgcgcgatttaaaatttataattcaatcaacgaataaatttctcgcaactaacgtaatactaacgaaaatcgcgataattacgattatcgcctttcttttaaaactaaatctacgcgcgttacaacgccgcctaacgccctaacataaaaaaatacaataaataaacgtctaaacattaccccgctaaaaccgtatatcgacgcacaaatttcgaataccgacctaacgcgcccgttaaacgataatcaatttaaacaactttaccatacgatactacgccatcacgataatatttctacgcgatcaaactattacgccgcaacaacaacgcgcgctaacccaacgttttaacgaattacatattcaccctatttacccgcataccgaaaaaattaacgaaatcatcgtactaaatacccataacgataatccgccaaa

SEQ ID NO: 6921 - DNA, 510 bp, Artificial Sequence
  chemically treated genomic DNA (Homo sapiens) CpG-island No: 6921
  unsure (446..447, 449, 455, 457, 464..465, 474)
agttcgtaatcgagtgtttttatgaaagtgatttgcgtcgggtaaagcgacgttggtatggcgtttttcgttcggtatgtcgattttaatttttgtttcggtaaaggcgtaaatatatttacggttttcgtttcgatcgttgcgcggatgaaataggtcgtagagtaaatcggacgcgacgttggtttttatgtgttgtttatggtgattgtcgatgaaatcgacgatgtcgttcgcgttaaatgggaatattataaagcgggcgcggatgaagaggcgtttagttggttaatcgaatataagttagaaagaatattcgtttcggtattgatattaacgttcgttagatggtcgattttatttcggcggtaaatattaatatggggacgttagtcggtttttacgttagtgtcgcgcgtatgttagatgaagtcgtaagcgtgttnntnggtgtntncgaaggnnngttgttgnttaatttgtcgacgagttttgttgttcgggatatgt

SEQ ID NO: 6922 - DNA, 510 bp, Artificial Sequence
  chemically treated genomic DNA (Homo sapiens) CpG-island No: 6922
  unsure (37, 45..46, 54, 56, 62, 64..)
acatatcccgaacaacaaaactcgtcgacaaattaancaacaacnnnccttcgnanacaccnannaacacgcttacgacttcatctaacatacgcgcgacactaacgtaaaaaccgactaacgtccccatattaatatttaccgccgaaataaaatcgaccatctaacgaacgttaatatcaataccgaaacgaatattctttctaacttatattcgattaaccaactaaacgcctcttcatccgcgcccgctttataatattcccatttaacgcgaacgacatcgtcgatttcatcgacaatcaccataaacaacacataaaaaccaacgtcgcgtccgatttactctacgacctatttcatccgcgcaacgatcgaaacgaaaaccgtaaatatatttacgcctttaccgaaacaaaaattaaaatcgacataccgaacgaaaaacgccataccaacgtcgctttacccgacgcaaatcactttcataaaaacactcgattacgaact

SEQ ID NO: 6923 - DNA, 510 bp, Artificial Sequence
  chemically treated genomic DNA (Homo sapiens) CpG-island No: 6923
  unsure (37, 45..46, 54, 56, 62, 64..)
gtatatttcggatagtaaaattcgtcgataggttaantagtagtnnnttttcgnangtattnannggtacgtttgcgattttatttaatatgcgcgcgatattggcgtaagaatcgattaacgtttttatattgatgtttatcgtcgaagtgggatcggttatttgacgaacgttggtgttagtatcggagcgggtattttttttgatttgtgttcggttagttagttgaacgtttttttattcgcgttcgttttgtagtgtttttatttggcgcgagcggtatcgtcggttttatcggtaattattataaataatatataagagttaacgtcgcgttcggtttgttttgcggtttgttttattcgcgtagcggtcggggcgaaagtcgtgggtgtatttacgtttttgtcgaaatagaagttgaaatcggtatatcgggcggagaacgttatgttagcgtcgttttgttcggcgtagattatttttatggggatattcggttgcggatt

SEQ ID NO: 6924 - DNA, 510 bp, Artificial Sequence
  chemically treated genomic DNA (Homo sapiens) CpG-island No: 6924
  unsure (446..447, 449, 455, 457, 464..465, 474)
aatccgcaaccgaatatccccataaaaataatctacgccgaacaaaacgacgctaacataacgttctccgcccgatataccgatttcaacttctatttcgacaaaaacgtaaatacacccacgactttcgccccgaccgctacgcgaataaaacaaaccgcaaaacaaaccgaacgcgacgttaactcttatatattatttataataattaccgataaaaccgacgataccgctcgcgccaaataaaaacactacaaaacgaacgcgaataaaaaaacgttcaactaactaaccgaacacaaatcaaaaaaaatacccgctccgatactaacaccaacgttcgtcaaataaccgatcccacttcgacgataaacatcaatataaaaacgttaatcgattcttacgccaatatcgcgcgcatattaaataaaatcgcaaacgtaccnntnaatacntncgaaaannnactactanttaacctatcgacgaattttactatccgaaatatac

SEQ ID NO: 6925 - DNA, 646 bp, Artificial Sequence
  chemically treated genomic DNA (Homo sapiens) CpG-island No: 6925
cgagtaggaggtacgaagagaggattggttaattgcgagtgggtaaggtgtggggggtatgtagcggggataacgtaagacgtgggacggcgaacggatgtaggatggggggatattggcgggggagtttagtcgttgcgagttaatgtacgacggattagatgggacgaagggcggcgtaaggtgtaggattaatatgggtataaatgggggagcgcggtgcggtgtaagcgaggcggggtagagcgtttgagatgaagagggatagcgattgggggattagggtggggagaagttgggaacgtattgttgttgaggagggggcgaaacgtgttgacggtttgtacgtgaaagttttgtcggtgtggtttacggatatggggttgaagagatgcgaaaggggatttgtatatggggattagtgagtatcgacgaaatgaaagagtggagaatttcgcggtttgggttagagcgcgatcggggtgcgaaggattgatttggtgagtgtgggaaggatggatcggagtgtacggaaggagcggagggttcgggcgattgtgacgaagttaacgaacgaatgcgggggggttgaaacgtggggattggattataaatgacgagtgggtggttcgttattatataatta

SEQ ID NO: 6926 - DNA, 646 bp, Artificial Sequence
  chemically treated genomic DNA (Homo sapiens) CpG-island No: 6926
taattatataataacgaaccacccactcgtcatttataatccaatccccacgtttcaacccccccgcattcgttcgttaacttcgtcacaatcgcccgaaccctccgctccttccgtacactccgatccatccttcccacactcaccaaatcaatccttcgcaccccgatcgcgctctaacccaaaccgcgaaattctccactctttcatttcgtcgatactcactaatccccatatacaaatcccctttcgcatctcttcaaccccatatccgtaaaccacaccgacaaaactttcacgtacaaaccgtcaacacgtttcgccccctcctcaacaacaatacgttcccaacttctccccaccctaatcccccaatcgctatccctcttcatctcaaacgctctaccccgcctcgcttacaccgcaccgcgctcccccatttatacccatattaatcctacaccttacgccgcccttcgtcccatctaatccgtcgtacattaactcgcaacgactaaactcccccgccaatatccccccatcctacatccgttcgccgtcccacgtcttacgttatccccgctacataccccccacaccttacccactcgcaattaaccaatcctctcttcgtacctcctactcg

SEQ ID NO: 6927 - DNA, 646 bp, Artificial Sequence
  chemically treated genomic DNA (Homo sapiens) CpG-island No: 6927
taattatgtggtagcgggttatttattcgttatttatagtttaatttttacgttttagttttttcgtattcgttcgttaatttcgttataatcgttcgggtttttcgtttttttcgtatatttcggtttattttttttatatttattaagttagtttttcgtatttcggtcgcgttttagtttaggtcgcggaattttttatttttttatttcgtcggtatttattagtttttatatgtaagttttttttcgtatttttttagttttatattcgtgggttatatcggtaaaatttttacgtgtaaatcgttaatacgtttcgttttttttttagtagtaatgcgtttttagtttttttttattttaattttttagtcgttgtttttttttattttaaacgttttatttcgtttcgtttgtatcgtatcgcgtttttttatttatatttatattaattttatattttgcgtcgtttttcgttttatttaattcgtcgtatattagttcgtaacggttaagttttttcgttagtgtttttttattttgtattcgttcgtcgttttacgttttacgttattttcgttatatgttttttatattttgtttattcgtagttggttagtttttttttcgtgttttttattcg

SEQ ID NO: 6928 - DNA, 646 bp, Artificial Sequence
  chemically treated genomic DNA (Homo sapiens) CpG-island No: 6928
cgaataaaaaacacgaaaaaaaaactaaccaactacgaataaacaaaatataaaaaacatataacgaaaataacgtaaaacgtaaaacgacgaacgaatacaaaataaaaaaacactaacgaaaaaacttaaccgttacgaactaatatacgacgaattaaataaaacgaaaaacgacgcaaaatataaaattaatataaatataaataaaaaaacgcgatacgatacaaacgaaacgaaataaaacgtttaaaataaaaaaaaacaacgactaaaaaattaaaataaaaaaaaactaaaaacgcattactactaaaaaaaaaacgaaacgtattaacgatttacacgtaaaaattttaccgatataacccacgaatataaaactaaaaaaatacgaaaaaaaacttacatataaaaactaataaataccgacgaaataaaaaaataaaaaattccgcgacctaaactaaaacgcgaccgaaatacgaaaaactaacttaataaatataaaaaaaataaaccgaaatatacgaaaaaaacgaaaaacccgaacgattataacgaaattaacgaacgaatacgaaaaaactaaaacgtaaaaattaaactataaataacgaataaataacccgctaccacataatta

SEQ ID NO: 6929 - DNA, 506 bp, Artificial Sequence
  chemically treated genomic DNA (Homo sapiens) CpG-island No: 6929
  unsure (438..439, 441, 443)
ttatcgacggacggacggacggacggacggaataaaatgcgggttatttgatagtgggtgtcgagattttgtattatatgtaacgattttgcggattggcgtcgagggggagcggggagtttaggagacgatgtgggggttgaagtttgtaggggggtgggcggacgagggacgcgcggagcgtttaaggtttaaatcgttcggttttttatggagttaagagacgtgttttaagttttagatcgtcgtcgtttagggagtaaaagacgtcgtaatgataatgtgttcgatagttacgttttgtatttttatgttttcgtgcgttttaggcgggatttcgttttgattattcgcggaggtttaatggatatagtttcggaacgcgtcgagtttgttttatcgttcgttgatgtattatttatattttttgcgtttatnnnngngtgttggtcgcggcgttgtgtggcgttgcggtgtttttgtcgtggcgcgtcggtgtgtggtcg

SEQ ID NO: 6930 - DNA, 506 bp, Artificial Sequence
  chemically treated genomic DNA (Homo sapiens) CpG-island No: 6930
  unsure (64, 66..67, 69)
cgaccacacaccgacgcgccacgacaaaaacaccgcaacgccacacaacgccgcgaccaacacncnnnnataaacgcaaaaaatataaataatacatcaacgaacgataaaacaaactcgacgcgttccgaaactatatccattaaacctccgcgaataatcaaaacgaaatcccgcctaaaacgcacgaaaacataaaaatacaaaacgtaactatcgaacacattatcattacgacgtcttttactccctaaacgacgacgatctaaaacttaaaacacgtctcttaactccataaaaaaccgaacgatttaaaccttaaacgctccgcgcgtccctcgtccgcccacccccctacaaacttcaacccccacatcgtctcctaaactccccgctccccctcgacgccaatccgcaaaatcgttacatataatacaaaatctcgacacccactatcaaataacccgcattttattccgtccgtccgtccgtccgtccgtcgataa

SEQ ID NO: 6931 - DNA, 506 bp, Artificial Sequence
  chemically treated genomic DNA (Homo sapiens) CpG-island No: 6931
  unsure (64, 66..67, 69)
cgattatatatcgacgcgttacggtagagatatcgtagcgttatataacgtcgcgattagtatntnnnnataaacgtaaggggtgtaggtggtgtattaacgggcggtgaggtagattcggcgcgtttcgggattgtgtttattagattttcgcggatggttaggacgggatttcgtttgaaacgtacgagggtatgagggtgtaaggcgtgattatcgaatatattgttattgcgacgttttttattttttaagcggcggcgatttagggtttaaggtacgttttttaattttatgaagggtcggacgatttaggttttaggcgtttcgcgcgtttttcgttcgtttatttttttgtagattttaatttttatatcgttttttaggtttttcgttttttttcggcgttagttcgtagggtcgttgtatatagtataaggtttcggtatttattgttagatggttcgtattttgtttcgttcgttcgttcgttcgttcgtcggtgg

SEQ ID NO: 6932 - DNA, 506 bp, Artificial Sequence
  chemically treated genomic DNA (Homo sapiens) CpG-island No: 6932
  unsure (438..439, 441, 443)
ccaccgacgaacgaacgaacgaacgaacgaaacaaaatacgaaccatctaacaataaataccgaaaccttatactatatacaacgaccctacgaactaacgccgaaaaaaaacgaaaaacctaaaaaacgatataaaaattaaaatctacaaaaaaataaacgaacgaaaaacgcgcgaaacgcctaaaacctaaatcgtccgacccttcataaaattaaaaaacgtaccttaaaccctaaatcgccgccgcttaaaaaataaaaaacgtcgcaataacaatatattcgataatcacgccttacaccctcataccctcgtacgtttcaaacgaaatcccgtcctaaccatccgcgaaaatctaataaacacaatcccgaaacgcgccgaatctacctcaccgcccgttaatacaccacctacaccccttacgtttatnnnnanatactaatcgcgacgttatataacgctacgatatctctaccgtaacgcgtcgatatataatcg

SEQ ID NO: 6933 - DNA, 652 bp, Artificial Sequence
  chemically treated genomic DNA (Homo sapiens) CpG-island No: 6933
tcggggaaggttcgattgaggtttttatttaattttcgagttaaagtttgtttttttcgttttcgtaatacgttcgcgggcgttggtaattacgttattgattttatcgagtattttttgcgtcgggtcgatatattttattagcggcgagtgggaaagatagtgaagataagcgtgtatattaggttattttttcgatagaaacgtcggtattagggcgggttagcgttattatcgacgttagtttatttagggttttgtttagggtttgcggaatggcggtggcggtaataaagcgattcgggcgtattattattagcgaagtattgtgttgcgcgaattagttacgtaggcgattttgcgtatcgtttacgcgtagtacgtcgtcgtggttattttgtgcggtatgaatttgtattttcggtattatttgaatgaagcgtgtgtttaacgcgcgttattgttggatttgttcggcgtttattttttatagtggattgtatttttagttaattatcgcgaagttcgcgtcgatcgcgttatcgagtagcgttacgtcgttcggttttagcgtgatttttggttgaataaatattttgtcgatcggagagtggttcggttggttttacgtaggaggggatcgtcgggattt

SEQ ID NO: 6934 - DNA, 652 bp, Artificial Sequence
  chemically treated genomic DNA (Homo sapiens) CpG-island No: 6934
aaatcccgacgatcccctcctacgtaaaaccaaccgaaccactctccgatcgacaaaatatttattcaaccaaaaatcacgctaaaaccgaacgacgtaacgctactcgataacgcgatcgacgcgaacttcgcgataattaactaaaaatacaatccactataaaaaataaacgccgaacaaatccaacaataacgcgcgttaaacacacgcttcattcaaataataccgaaaatacaaattcataccgcacaaaataaccacgacgacgtactacgcgtaaacgatacgcaaaatcgcctacgtaactaattcgcgcaacacaatacttcgctaataataatacgcccgaatcgctttattaccgccaccgccattccgcaaaccctaaacaaaaccctaaataaactaacgtcgataataacgctaacccgccctaataccgacgtttctatcgaaaaaataacctaatatacacgcttatcttcactatctttcccactcgccgctaataaaatatatcgacccgacgcaaaaaatactcgataaaatcaataacgtaattaccaacgcccgcgaacgtattacgaaaacgaaaaaaacaaactttaactcgaaaattaaataaaaacctcaatcgaaccttccccga

SEQ ID NO: 6935 - DNA, 652 bp, Artificial Sequence
  chemically treated genomic DNA (Homo sapiens) CpG-island No: 6935
aaatttcggcggtttttttttgcgtaaggttaatcgaattatttttcggtcggtaagatgtttatttagttaaaagttacgttgaaatcgggcgacgtgacgttgttcgataacgcgatcggcgcgaatttcgcggtaattggttggggatgtaatttattgtgggggatgagcgtcgagtaaatttagtagtggcgcgcgttgggtatacgttttatttaggtggtgtcggaagtgtaaatttatatcgtataggataattacgacggcgtattacgcgtgggcgatacgtaaggtcgtttgcgtagttggttcgcgtaatataatgtttcgttggtggtgatgcgttcggatcgttttgttgtcgttatcgttatttcgtaaattttgggtaagattttgaataaattggcgtcggtgatgacgttgattcgttttgatgtcgacgtttttgtcgaaaaggtagtttgatatgtacgtttatttttattgttttttttattcgtcgttggtggggtatgtcgattcggcgtaagaggtgttcgatgaggttaatggcgtgattgttagcgttcgcgagcgtattgcgggggcgaaagagataggttttaattcgggggttagataaaggttttaatcggatttttttcgg

SEQ ID NO: 6936 - DNA, 652 bp, Artificial Sequence
  chemically treated genomic DNA (Homo sapiens) CpG-island No: 6936
ccgaaaaaaatccgattaaaacctttatctaacccccgaattaaaacctatctctttcgcccccgcaatacgctcgcgaacgctaacaatcacgccattaacctcatcgaacacctcttacgccgaatcgacataccccaccaacgacgaataaaaaaaacaataaaaataaacgtacatatcaaactaccttttcgacaaaaacgtcgacatcaaaacgaatcaacgtcatcaccgacgccaatttattcaaaatcttacccaaaatttacgaaataacgataacgacaacaaaacgatccgaacgcatcaccaccaacgaaacattatattacgcgaaccaactacgcaaacgaccttacgtatcgcccacgcgtaatacgccgtcgtaattatcctatacgatataaatttacacttccgacaccacctaaataaaacgtatacccaacgcgcgccactactaaatttactcgacgctcatcccccacaataaattacatccccaaccaattaccgcgaaattcgcgccgatcgcgttatcgaacaacgtcacgtcgcccgatttcaacgtaacttttaactaaataaacatcttaccgaccgaaaaataattcgattaaccttacgcaaaaaaaaaccgccgaaattt

SEQ ID NO: 6937 - DNA, 592 bp, Artificial Sequence
  chemically treated genomic DNA (Homo sapiens) CpG-island No: 6937
gtcgtttgcgttaattgtacgtttcggatgatttgtattgtattgtttattttgtcgcgttcgcgtatatatatgggagtgaggttgcgcgcgcgcgcgcgtgcggggagtgggagcggacgggataaacggggggaaggggggatgattggggagtgggttgtatacggacggggggtcggtcgttgtcgtgaatagacgaagttatttgcgaaggacgaggtttggtgcggatattagttcgatatcgcgttcgcgacgatgataagcgatgatttatggtggtattatatcgttgtatcggatcgtaaataacgaaaagggcgggattaagtgattttaggtatcgacggttttgcggtttcgttttattattcggtgattgttcgtagtatttcgtgcgggtcggtttgcggattttgttcgtagttttgtttgttcgttagggtcgagttgttcgttcgttttgttttgaggtttcggtttttcggtcggtttttggtttttggtgattttacgggttttgcgttgtcggggggggtttcgttagtttattttgaaagtgtattaattgttatttattaataatata

SEQ ID NO: 6938 - DNA, 592 bp, Artificial Sequence
  chemically treated genomic DNA (Homo sapiens) CpG-island No: 6938
tatattattaataaataacaattaatacactttcaaaataaactaacgaaaccccccccgacaacgcaaaacccgtaaaatcaccaaaaaccaaaaaccgaccgaaaaaccgaaacctcaaaacaaaacgaacgaacaactcgaccctaacgaacaaacaaaactacgaacaaaatccgcaaaccgacccgcacgaaatactacgaacaatcaccgaataataaaacgaaaccgcaaaaccgtcgatacctaaaatcacttaatcccgcccttttcgttatttacgatccgatacaacgatataataccaccataaatcatcgcttatcatcgtcgcgaacgcgatatcgaactaatatccgcaccaaacctcgtccttcgcaaataacttcgtctattcacgacaacgaccgaccccccgtccgtatacaacccactccccaatcatccccccttccccccgtttatcccgtccgctcccactccccgcacgcgcgcgcgcgcgcaacctcactcccatatatatacgcgaacgcgacaaaataaacaatacaatacaaatcatccgaaacgtacaattaacgcaaacgac

SEQ ID NO: 6939 - DNA, 592 bp, Artificial Sequence
  chemically treated genomic DNA (Homo sapiens) CpG-island No: 6939
tgtgttgttaataggtggtaattggtgtatttttaggataaattggcgggatttttttcgatagcgtaaagttcgtaaaattattaaagattaaaagtcgatcggaagatcgggattttaaggtaggacgaacgggtagttcggttttagcggatagataaggttacgaatagagttcgtaagtcggttcgtacgaggtattacggatagttatcgggtggtaaaacgaggtcgtagggtcgtcgatgtttggaattatttggtttcgtttttttcgttatttacgattcggtatagcgatgtggtattattatgggttatcgtttgttatcgtcgcgggcgcggtatcgggttaatgttcgtattaggtttcgtttttcgtaagtagtttcgtttatttacggtaacgatcggtttttcgttcgtgtgtaatttattttttagttattttttttttttttcgtttgtttcgttcgtttttatttttcgtacgcgcgcgcgcgcgtagttttatttttatatgtatacgcgagcgcgatagggtaagtaatatagtataagttattcgaagcgtgtagttggcgtaggcggt

SEQ ID NO: 6940 - DNA, 592 bp, Artificial Sequence
  chemically treated genomic DNA (Homo sapiens) CpG-island No: 6940
accgcctacgccaactacacgcttcgaataacttatactatattacttaccctatcgcgctcgcgtatacatataaaaataaaactacgcgcgcgcgcgcgtacgaaaaataaaaacgaacgaaacaaacgaaaaaaaaaaaaaataactaaaaaataaattacacacgaacgaaaaaccgatcgttaccgtaaataaacgaaactacttacgaaaaacgaaacctaatacgaacattaacccgataccgcgcccgcgacgataacaaacgataacccataataataccacatcgctataccgaatcgtaaataacgaaaaaaacgaaaccaaataattccaaacatcgacgaccctacgacctcgttttaccacccgataactatccgtaatacctcgtacgaaccgacttacgaactctattcgtaaccttatctatccgctaaaaccgaactacccgttcgtcctaccttaaaatcccgatcttccgatcgacttttaatctttaataattttacgaactttacgctatcgaaaaaaatcccgccaatttatcctaaaaatacaccaattaccacctattaacaacaca

SEQ ID NO: 6941 - DNA, 549 bp, Artificial Sequence
  chemically treated genomic DNA (Homo sapiens) CpG-island No: 6941
gcgaggtcgtggtttcggggacgcgtttttcgttcgagagcgcgtacgatttcgatgtgggaagtaattttttataaatttatgagttgagtcgaaatgaatattttgcgtttcgcgtgtagacgcgggaggatagtattaagtacgcggagttggtgttggagcgcgttttggatcgagaacgggagtttagtttttagttagtgttgacggcgttggacggagggattttagtttttttcgttagtttgtttatttatattaaggtgttggacgcgaatgataatgcgtttgtttttaattagtttttgtatcgggcgcgcgttttggaggatgtatttttcggtacgcgcgtggtataagtttttgtaacggatttggatgaaggttttaacggtgaaattatttattttttcggtagttataatcgcgtcggcgtgcggtaattattcgttttagattttgtaatcgggatgttgataattaagggtcggttggatttcgaggatattaaattttatgagatttatatttaggttaaagataagg

SEQ ID NO: 6942 - DNA, 549 bp, Artificial Sequence
  chemically treated genomic DNA (Homo sapiens) CpG-island No: 6942
ccttatctttaacctaaatataaatctcataaaatttaatatcctcgaaatccaaccgacccttaattatcaacatcccgattacaaaatctaaaacgaataattaccgcacgccgacgcgattataactaccgaaaaaataaataatttcaccgttaaaaccttcatccaaatccgttacaaaaacttataccacgcgcgtaccgaaaaatacatcctccaaaacgcgcgcccgatacaaaaactaattaaaaacaaacgcattatcattcgcgtccaacaccttaatataaataaacaaactaacgaaaaaaactaaaatccctccgtccaacgccgtcaacactaactaaaaactaaactcccgttctcgatccaaaacgcgctccaacaccaactccgcgtacttaatactatcctcccgcgtctacacgcgaaacgcaaaatattcatttcgactcaactcataaatttataaaaaattacttcccacatcgaaatcgtacgcgctctcgaacgaaaaacgcgtccccgaaaccacgacctcgc

SEQ ID NO: 6943 - DNA, 549 bp, Artificial Sequence
  chemically treated genomic DNA (Homo sapiens) CpG-island No: 6943
ttttgtttttggtttggatgtaaattttatggagtttggtgttttcgaagtttagtcgatttttgattgttagtatttcggttataaggtttaaggcgaatagttgtcgtacgtcggcgcggttgtggttgtcgaaggagtaaataattttatcgttggggtttttatttagattcgttgtaaggatttgtattacgcgcgtgtcggagggtgtattttttaggacgcgcgttcggtataaggattggttgaagataggcgtattgttattcgcgtttagtattttgatgtgaataggtaggttggcggagagagttggggttttttcgtttaacgtcgttagtattaattggagattaggttttcgttttcggtttagggcgcgttttaatattagtttcgcgtatttggtgttgttttttcgcgtttgtacgcgaagcgtaaagtatttatttcggtttagtttataggtttgtaaagagttgttttttatatcgggatcgtgcgcgttttcgagcggaaagcgcgttttcggagttacggtttcgt

SEQ ID NO: 6944 - DNA, 549 bp, Artificial Sequence
  chemically treated genomic DNA (Homo sapiens) CpG-island No: 6944
acgaaaccgtaactccgaaaacgcgctttccgctcgaaaacgcgcacgatcccgatataaaaaacaactctttacaaacctataaactaaaccgaaataaatactttacgcttcgcgtacaaacgcgaaaaaacaacaccaaatacgcgaaactaatattaaaacgcgccctaaaccgaaaacgaaaacctaatctccaattaatactaacgacgttaaacgaaaaaaccccaactctctccgccaacctacctattcacatcaaaatactaaacgcgaataacaatacgcctatcttcaaccaatccttataccgaacgcgcgtcctaaaaaatacaccctccgacacgcgcgtaatacaaatccttacaacgaatctaaataaaaaccccaacgataaaattatttactccttcgacaaccacaaccgcgccgacgtacgacaactattcgccttaaaccttataaccgaaatactaacaatcaaaaatcgactaaacttcgaaaacaccaaactccataaaatttacatccaaaccaaaaacaaaa

SEQ ID NO: 6945 - DNA, 745 bp, Artificial Sequence
  chemically treated genomic DNA (Homo sapiens) CpG-island No: 6945
ttgagtagtgtcgagatatcgtatagcggtgtgcggattttatggtttatcgtcgttagaaacgcgattttgtttggttggttttttttgttttcgttcgtgtttgtcggtgtttattattagtttttgtaatttagttgtacgcgttttgatttgcgtcgtcgttgttcgcggtggcgatttagtgtatgaatattgttgcgaaacgtattattagtcgttcgatggtatttagttttcgtacgttagcggttttcgggaaggggagttaatattatcgtttagtagtcgttgtagcgtttgcgtttgtcggtaagtggacgcgtgattgagcgataaattacgcgttagaggattagattagtgcgtaaagtgaaattatttttagtaataataggttgtattggcgcgtgtattcgttttttttagatgcgttagttcgtgttgattacgtaggttatggtgttgattagttgattgagttcggtattaaattgggcgaattggcgaaggtattttgtgttagcgattggtgggtaatgcgggagttttcggttggttgataataggtcgcgtaatgtttttttgtcggtttcggtttatattttgttttggtttcggaaacgcgttttttttttttttgtattttcgcgaatatatttcgttgtattattttatttttggttgttatgttatttttatttttcgattttagaggatttttttggtgatgcgtgtgaaagtg

SEQ ID NO: 6946 - DNA, 745 bp, Artificial Sequence
  chemically treated genomic DNA (Homo sapiens) CpG-island No: 6946
cactttcacacgcatcaccaaaaaaatcctctaaaatcgaaaaataaaaataacataacaaccaaaaataaaataatacaacgaaatatattcgcgaaaatacaaaaaaaaaaaaaacgcgtttccgaaaccaaaacaaaatataaaccgaaaccgacaaaaaaacattacgcgacctattatcaaccaaccgaaaactcccgcattacccaccaatcgctaacacaaaataccttcgccaattcgcccaatttaataccgaactcaatcaactaatcaacaccataacctacgtaatcaacacgaactaacgcatctaaaaaaaacgaatacacgcgccaatacaacctattattactaaaaataatttcactttacgcactaatctaatcctctaacgcgtaatttatcgctcaatcacgcgtccacttaccgacaaacgcaaacgctacaacgactactaaacgataatattaactccccttcccgaaaaccgctaacgtacgaaaactaaataccatcgaacgactaataatacgtttcgcaacaatattcatacactaaatcgccaccgcgaacaacgacgacgcaaatcaaaacgcgtacaactaaattacaaaaactaataataaacaccgacaaacacgaacgaaaacaaaaaaaaccaaccaaacaaaatcgcgtttctaacgacgataaaccataaaatccgcacaccgctatacgatatctcgacactactcaa

SEQ ID NO: 6947 - DNA, 745 bp, Artificial Sequence
  chemically treated genomic DNA (Homo sapiens) CpG-island No: 6947
tatttttatacgtattattagggggattttttagagtcgaagggtgggagtgatatgataattaggagtggagtaatatagcggggtgtgttcgcgggagtataaaaagaagagaggcgcgttttcgaggttagaataaagtgtgagtcggggtcgataaaagggtattgcgcggtttattattagttagtcgggaattttcgtattgtttattagtcgttggtatagaatattttcgttagttcgtttagtttagtatcgaatttagttagttggttaatattatggtttgcgtaattagtacggattggcgtatttggaaaaagcgagtgtacgcgttaatatagtttgttattgttggggatggttttattttgcgtattgatttgattttttggcgcgtggtttatcgtttagttacgcgtttatttgtcgataaacgtaggcgttgtaacggttgttggacggtgatattgattttttttttcggaaatcgttggcgtacgggagttggatattatcgggcggttgatgatgcgtttcgtagtaatgtttatgtattgaatcgttatcgcgaatagcggcggcgtaggttaaagcgcgtatagttgaattgtaggaattggtgataaatatcgataggtacgggcggaagtagaaaaagttagttaggtaaaatcgcgtttttggcggcgatgagttatgagattcgtatatcgttgtacggtatttcggtattgtttaa

SEQ ID NO: 6948 - DNA, 745 bp, Artificial Sequence
  chemically treated genomic DNA (Homo sapiens) CpG-island No: 6948
ttaaacaataccgaaataccgtacaacgatatacgaatctcataactcatcgccgccaaaaacgcgattttacctaactaactttttctacttccgcccgtacctatcgatatttatcaccaattcctacaattcaactatacgcgctttaacctacgccgccgctattcgcgataacgattcaatacataaacattactacgaaacgcatcatcaaccgcccgataatatccaactcccgtacgccaacgatttccgaaaaaaaaaatcaatatcaccgtccaacaaccgttacaacgcctacgtttatcgacaaataaacgcgtaactaaacgataaaccacgcgccaaaaaatcaaatcaatacgcaaaataaaaccatccccaacaataacaaactatattaacgcgtacactcgctttttccaaatacgccaatccgtactaattacgcaaaccataatattaaccaactaactaaattcgatactaaactaaacgaactaacgaaaatattctataccaacgactaataaacaatacgaaaattcccgactaactaataataaaccgcgcaatacccttttatcgaccccgactcacactttattctaacctcgaaaacgcgcctctcttctttttatactcccgcgaacacaccccgctatattactccactcctaattatcatatcactcccacccttcgactctaaaaaatccccctaataatacgtataaaaata

SEQ ID NO: 6949 - DNA, 866 bp, Artificial Sequence
  chemically treated genomic DNA (Homo sapiens) CpG-island No: 6949
  unsure (29)
ttgagtattcgcgttttaatgcgttaggntttatgtgttatttcgtttagcgcgacgcgtcgttgtcgttaggttgaataatcgtcgcgatcgatattagggtaaaggcgaggaggcgcgatcgcgtattttacggtagatatgtttttcgtcgagcggggaggtaacgttatcgtaacgataagtttatcgggaagtagggcggtttaatgtgcggcgtttttttcggagggtgataaaaattagttagtgtgatatgcgagttttttttttcggcgtgatggtttttattatcgtatttagtaacgtattgcgatcgttatatcgttcggatgggtggtaatgtaggtttcgttacgtttattatcgcgtgttgacggttaaagtttttaagcgtcgcgtagcgttttcgggtaggcgtttattgtagggttgattggtgtcgtaaaaatagggtagcgcgtgcgttggagtagattatttgcggtggttgtttgattattaattgattagacgcgttagcgagtagggcgcgggagagtatcgcgtaatacgacgtacgcgttcgtgagtcgttaggtcggtgtttcgtattagtgttcgatgcgtagtttattcgcgtcggttattttaattttatgcgagttttaggtcgtttatatcgataaggtgggtgggcgttttaatttttagttttataggtttagtagattggtttcgttcgcgataaattttgcgtcgggtacggttgagcgttaagtgtcgtttcggttggggtatttattcgtttataggtaacgtttttatgattttatttttttcgtagtatttttaatggcggtaagatgttagcgtatgtattatag

SEQ ID NO: 6950 - DNA, 866 bp, Artificial Sequence
  chemically treated genomic DNA (Homo sapiens) CpG-island No: 6950
  unsure (838)
ctataatacatacgctaacatcttaccgccattaaaaatactacgaaaaaaataaaatcataaaaacgttacctataaacgaataaataccccaaccgaaacgacacttaacgctcaaccgtacccgacgcaaaatttatcgcgaacgaaaccaatctactaaacctataaaactaaaaattaaaacgcccacccaccttatcgatataaacgacctaaaactcgcataaaattaaaataaccgacgcgaataaactacgcatcgaacactaatacgaaacaccgacctaacgactcacgaacgcgtacgtcgtattacgcgatactctcccgcgccctactcgctaacgcgtctaatcaattaataatcaaacaaccaccgcaaataatctactccaacgcacgcgctaccctatttttacgacaccaatcaaccctacaataaacgcctacccgaaaacgctacgcgacgcttaaaaactttaaccgtcaacacgcgataataaacgtaacgaaacctacattaccacccatccgaacgatataacgatcgcaatacgttactaaatacgataataaaaaccatcacgccgaaaaaaaaaactcgcatatcacactaactaatttttatcaccctccgaaaaaaacgccgcacattaaaccgccctacttcccgataaacttatcgttacgataacgttacctccccgctcgacgaaaaacatatctaccgtaaaatacgcgatcgcgcctcctcgcctttaccctaatatcgatcgcgacgattattcaacctaacgacaacgacgcgtcgcgctaaacgaaataacacataaancctaacgcattaaaacgcgaatactcaa

SEQ ID NO: 6951 - DNA, 866 bp, Artificial Sequence
  chemically treated genomic DNA (Homo sapiens) CpG-island No: 6951
  unsure (838)
ttgtggtgtatacgttaatattttgtcgttattgaagatgttgcgggggagataaaattatgaaggcgttatttatgaacgagtgaatattttagtcgaggcggtatttagcgtttagtcgtattcggcgtaaaatttatcgcgggcgggattaatttgttggatttgtgaagttggaaattgaaacgtttatttattttatcgatgtgaacggtttgggattcgtataagattgaagtgatcgacgcgggtgggttgcgtatcgggtattggtacggaatatcgatttggcggtttacgagcgcgtgcgtcgtgttacgcggtattttttcgcgttttgttcgttggcgcgtttggttagttagtaattaggtaattatcgtaggtaatttgttttagcgtacgcgttgttttatttttacgatattaattagttttgtaataagcgtttgttcgggagcgttgcgcggcgtttgaaggttttagtcgttagtacgcggtggtaggcgtagcgaagtttgtattgttatttattcgagcgatatggcggtcgtaatgcgttgttggatgcggtggtggaaattattacgtcggagggaaagattcgtatattatattggttgatttttattatttttcgggaaaaacgtcgtatattaaatcgttttgtttttcggtgagtttatcgttgcggtgacgttattttttcgttcggcggaaaatatatttatcgtaaggtgcgcgatcgcgttttttcgtttttgttttggtatcggtcgcggcgattatttagtttgacggtagcggcgcgtcgcgttgggcggagtagtatataagntttggcgtattgaggcgcggatgtttag

SEQ ID NO: 6952 - DNA, 866 bp, Artificial Sequence
  chemically treated genomic DNA (Homo sapiens) CpG-island No: 6952
  unsure (29)
ctaaacatccgcgcctcaatacgccaaancttatatactactccgcccaacgcgacgcgccgctaccgtcaaactaaataatcgccgcgaccgataccaaaacaaaaacgaaaaaacgcgatcgcgcaccttacgataaatatattttccgccgaacgaaaaaataacgtcaccgcaacgataaactcaccgaaaaacaaaacgatttaatatacgacgtttttcccgaaaaataataaaaatcaaccaatataatatacgaatctttccctccgacgtaataatttccaccaccgcatccaacaacgcattacgaccgccatatcgctcgaataaataacaatacaaacttcgctacgcctaccaccgcgtactaacgactaaaaccttcaaacgccgcgcaacgctcccgaacaaacgcttattacaaaactaattaatatcgtaaaaataaaacaacgcgtacgctaaaacaaattacctacgataattacctaattactaactaaccaaacgcgccaacgaacaaaacgcgaaaaaataccgcgtaacacgacgcacgcgctcgtaaaccgccaaatcgatattccgtaccaatacccgatacgcaacccacccgcgtcgatcacttcaatcttatacgaatcccaaaccgttcacatcgataaaataaataaacgtttcaatttccaacttcacaaatccaacaaattaatcccgcccgcgataaattttacgccgaatacgactaaacgctaaataccgcctcgactaaaatattcactcgttcataaataacgccttcataattttatctcccccgcaacatcttcaataacgacaaaatattaacgtatacaccacaa

SEQ ID NO: 6953 - DNA, 596 bp, Artificial Sequence
  chemically treated genomic DNA (Homo sapiens) CpG-island No: 6953
tcgcgattgggtttattcgagttttttcgatagggaaattttggtcgtagcgttatgtagttgtcgttagaaatcgtttacgtttagcgttgtattaaattggcgcgttggtaacgattgttcgtgcgtaaggcgggtaatgcgttatgttaaatcgtacggtatgttgtataattaggcggcgaagaagtataattggtagacgttatcgttagagcggtatacgtttgcgattagtattgattttcgtcgggttggcgggaagcgagttgattcgtgtaggaagtaatatggtttgataacgcgcgaggaagtgtttgtcgatcgcggttttaggttgacggttcgttggtgtcgcgaagttagttaggcgcgttgattaaaacgaagaataggcgttggcgtaaacgttggagatggtgtaatacggagagttaaaagtattatcggcgaatgggtaacggtcgcggcgtaaacggttgtttgtatggcgacggcgagtacgtattggcgttcgttcgtcgattagttttgtatttgtcgaaaaggggattgttgtcgtagtataatttcgattataaagaatgaaaaaagga

SEQ ID NO: 6954 - DNA, 596 bp, Artificial Sequence
  chemically treated genomic DNA (Homo sapiens) CpG-island No: 6954
tccttttttcattctttataatcgaaattatactacgacaacaatccccttttcgacaaatacaaaactaatcgacgaacgaacgccaatacgtactcgccgtcgccatacaaacaaccgtttacgccgcgaccgttacccattcgccgataatacttttaactctccgtattacaccatctccaacgtttacgccaacgcctattcttcgttttaatcaacgcgcctaactaacttcgcgacaccaacgaaccgtcaacctaaaaccgcgatcgacaaacacttcctcgcgcgttatcaaaccatattacttcctacacgaatcaactcgcttcccgccaacccgacgaaaatcaatactaatcgcaaacgtataccgctctaacgataacgtctaccaattatacttcttcgccgcctaattatacaacataccgtacgatttaacataacgcattacccgccttacgcacgaacaatcgttaccaacgcgccaatttaatacaacgctaaacgtaaacgatttctaacgacaactacataacgctacgaccaaaatttccctatcgaaaaaactcgaataaacccaatcgcga

SEQ ID NO: 6955 - DNA, 596 bp, Artificial Sequence
  chemically treated genomic DNA (Homo sapiens) CpG-island No: 6955
ttttttttttattttttataatcggggttatgttgcgataataatttttttttcggtaaatgtagagttagtcggcgggcgaacgttagtgcgtgttcgtcgtcgttatgtaggtagtcgtttgcgtcgcgatcgttgtttattcgtcggtgatatttttgatttttcgtgttgtattatttttagcgtttgcgttagcgtttgtttttcgttttaattaacgcgtttgattggtttcgcggtattagcgagtcgttagtttgaaatcgcgatcggtaaatattttttcgcgcgttgttagattatattgttttttgtacgaattagttcgtttttcgttagttcgacgagaattaatgttgatcgtaagcgtatatcgttttggcgatggcgtttgttagttgtgttttttcgtcgtttggttgtataatatgtcgtgcggtttgatatgacgtattattcgttttgcgtacgggtaatcgttgttagcgcgttaatttgatatagcgttgggcgtaaacggtttttggcggtagttgtatggcgttgcgattaaaatttttttgtcgggaaaattcgggtgagtttaatcgcga

SEQ ID NO: 6956 - DNA, 596 bp, Artificial Sequence
  chemically treated genomic DNA (Homo sapiens) CpG-island No: 6956
tcgcgattaaactcacccgaattttcccgacaaaaaaattttaatcgcaacgccatacaactaccgccaaaaaccgtttacgcccaacgctatatcaaattaacgcgctaacaacgattacccgtacgcaaaacgaataatacgtcatatcaaaccgcacgacatattatacaaccaaacgacgaaaaaacacaactaacaaacgccatcgccaaaacgatatacgcttacgatcaacattaattctcgtcgaactaacgaaaaacgaactaattcgtacaaaaaacaatataatctaacaacgcgcgaaaaaatatttaccgatcgcgatttcaaactaacgactcgctaataccgcgaaaccaatcaaacgcgttaattaaaacgaaaaacaaacgctaacgcaaacgctaaaaataatacaacacgaaaaatcaaaaatatcaccgacgaataaacaacgatcgcgacgcaaacgactacctacataacgacgacgaacacgcactaacgttcgcccgccgactaactctacatttaccgaaaaaaaaattattatcgcaacataaccccgattataaaaaataaaaaaaaaa

SEQ ID NO: 6957 - DNA, 916 bp, Artificial Sequence
  chemically treated genomic DNA (Homo sapiens) CpG-island No: 6957
cggcgggcgatagacgcggcgggtacgcgggagtcggggtgtaggttgtaaagcggggtttttcgttgtagaagtcgttttcgtgtgtcgttttatagttgcgtacgcgttagtaatatattttcgttgttcgtcgcggttttgcgttaaagttttttcgggtagtcgtatacgtttttcggattcggcggcgcgtacgtatttagtaatagtagagtatatcgagggttacgtacggtagtcgcgttttgttaaatatgtttttgttcgggttgttcggtaagggcgatggattgagttgcgggacggggtcgaggtttttgattttcgagttcgggtcggggttggcgacggttttagttacggttttttttagtcggaggaggagagtagtcgagggcgggttggatcgggcggcgtttttatcgttagtaatggcgttcggggtttattttttatagtatttcgcgaatattcggttagtgtcgaggcgttcgtgtgttagcgcggtagttttgtagttttaggatttttttagtcggtacggtttgttcggttgtttttcgttcggatttcggcgtttttttttataggcggggcgttagattttcgttttaaggatggggatcggtagggaggaggaacgcggggttagtttttttcgttgagtagcgtaggatcgggtagcgcgcgggttcgcggcggggggagtgtagtaggggcggggttagggaaattttaggtcgcggcgttagttaattagcgtcgtcggttttatttttttcgatttgcggtattttttagaagtgcggttttcggtagtcgggcggggcgtgggggcggttttttttcgatttagggggttttgttttggatcgtaattgtttaggtggtttcgaatttaggttttaggtat

SEQ ID NO: 6958 - DNA, 916 bp, Artificial Sequence
  chemically treated genomic DNA (Homo sapiens) CpG-island No: 6958
atacctaaaacctaaattcgaaaccacctaaacaattacgatccaaaacaaaaccccctaaatcgaaaaaaaaccgcccccacgccccgcccgactaccgaaaaccgcacttctaaaaaataccgcaaatcgaaaaaaataaaaccgacgacgctaattaactaacgccgcgacctaaaatttccctaaccccgcccctactacactccccccgccgcgaacccgcgcgctacccgatcctacgctactcaacgaaaaaaactaaccccgcgttcctcctccctaccgatccccatccttaaaacgaaaatctaacgccccgcctataaaaaaaaacgccgaaatccgaacgaaaaacaaccgaacaaaccgtaccgactaaaaaaatcctaaaactacaaaactaccgcgctaacacacgaacgcctcgacactaaccgaatattcgcgaaatactataaaaaataaaccccgaacgccattactaacgataaaaacgccgcccgatccaacccgccctcgactactctcctcctccgactaaaaaaaaccgtaactaaaaccgtcgccaaccccgacccgaactcgaaaatcaaaaacctcgaccccgtcccgcaactcaatccatcgcccttaccgaacaacccgaacaaaaacatatttaacaaaacgcgactaccgtacgtaaccctcgatatactctactattactaaatacgtacgcgccgccgaatccgaaaaacgtatacgactacccgaaaaaactttaacgcaaaaccgcgacgaacaacgaaaatatattactaacgcgtacgcaactataaaacgacacacgaaaacgacttctacaacgaaaaaccccgctttacaacctacaccccgactcccgcgtacccgccgcgtctatcgcccgccg

SEQ ID NO: 6959 - DNA, 916 bp, Artificial Sequence
  chemically treated genomic DNA (Homo sapiens) CpG-island No: 6959
gtatttgaggtttgagttcgagattatttgagtaattgcggtttagagtaaagttttttggatcggaagggagtcgtttttacgtttcgttcggttgtcgagagtcgtatttttgggggatgtcgtaggtcgggagggatgaggtcgacggcgttgattggttgacgtcgcggtttggggtttttttggtttcgtttttgttgtatttttttcgtcgcgaattcgcgcgttgttcggttttgcgttgtttagcgggaggggttgatttcgcgttttttttttttgtcggtttttatttttaaagcgagagtttgacgtttcgtttgtgggagagagcgtcgggattcggacggggagtaatcgggtaggtcgtgtcggttgaggaggttttgaggttatagagttgtcgcgttggtatacgagcgtttcggtattaatcgagtgttcgcggggtgttgtgggggatgggtttcgggcgttattgttggcggtgggagcgtcgttcggtttagttcgttttcggttgtttttttttttcggttgggaggggtcgtagttggggtcgtcgttagtttcggttcgggttcgagaattaagggtttcggtttcgtttcgtagtttagtttatcgtttttgtcgggtagttcgggtagagatatgtttgataagacgcggttgtcgtacgtggttttcgatgtgttttgttgttgttgggtacgtacgcgtcgtcgggttcgaggggcgtgtgcggttgttcgggagggttttagcgtagagtcgcgacgggtagcgggggtgtgttgttgacgcgtgcgtagttgtggggcgatatacgggggcggtttttgtagcgagggatttcgttttgtagtttgtatttcggttttcgcgtgttcgtcgcgtttgtcgttcgtcg

SEQ ID NO: 6960 - DNA, 916 bp, Artificial Sequence
  chemically treated genomic DNA (Homo sapiens) CpG-island No: 6960
cgacgaacgacaaacgcgacgaacacgcgaaaaccgaaatacaaactacaaaacgaaatccctcgctacaaaaaccgcccccgtatatcgccccacaactacgcacgcgtcaacaacacacccccgctacccgtcgcgactctacgctaaaaccctcccgaacaaccgcacacgcccctcgaacccgacgacgcgtacgtacccaacaacaacaaaacacatcgaaaaccacgtacgacaaccgcgtcttatcaaacatatctctacccgaactacccgacaaaaacgataaactaaactacgaaacgaaaccgaaacccttaattctcgaacccgaaccgaaactaacgacgaccccaactacgacccctcccaaccgaaaaaaaaaaacaaccgaaaacgaactaaaccgaacgacgctcccaccgccaacaataacgcccgaaacccatcccccacaacaccccgcgaacactcgattaataccgaaacgctcgtataccaacgcgacaactctataacctcaaaacctcctcaaccgacacgacctacccgattactccccgtccgaatcccgacgctctctcccacaaacgaaacgtcaaactctcgctttaaaaataaaaaccgacaaaaaaaaaaaacgcgaaatcaacccctcccgctaaacaacgcaaaaccgaacaacgcgcgaattcgcgacgaaaaaaatacaacaaaaacgaaaccaaaaaaaccccaaaccgcgacgtcaaccaatcaacgccgtcgacctcatccctcccgacctacgacatcccccaaaaatacgactctcgacaaccgaacgaaacgtaaaaacgactcccttccgatccaaaaaactttactctaaaccgcaattactcaaataatctcgaactcaaacctcaaatac

SEQ ID NO: 6961 - DNA, 595 bp, Artificial Sequence
  chemically treated genomic DNA (Homo sapiens) CpG-island No: 6961
tacgggattgggaaggtttagtgaacgcgagtgtgaaagagttagtgggaagttggggtaaggcggtatatgcggagaattgaacgacgcggatacgtaaatgattgttgtagtatttttatatcgacgggattagaggttgaagtaggggtggatacgcgaagatatgacggtaacggatatcgtgagtagtgggattgttagtaggaattgtgtggcgcgtgatagtgtgggatttattgtggttgaagaaattgagggacggggttttcgacgtagaatatgcggcggcggtggggacgatagaatgagacgtgcgttagtagaattgttgttgacgacggataggcgggagaggaacgtacggggggagatggttttgcggcgaaggatagatttgaggagaaaaaggggttaggggggtggttggtacgggtgagagagaaaaagcgcgagtgagattgttattaagggtcgagatcgggggtgggttagttcgggttagggagagcggaatgttattaaatgggcgaatatggacgattgttataatgtaacggagcggaatagcgaatgagtaattttaaaagaagat

SEQ ID NO: 6962 - DNA, 595 bp, Artificial Sequence
  chemically treated genomic DNA (Homo sapiens) CpG-island No: 6962
atcttcttttaaaattactcattcgctattccgctccgttacattataacaatcgtccatattcgcccatttaataacattccgctctccctaacccgaactaacccacccccgatctcgacccttaataacaatctcactcgcgctttttctctctcacccgtaccaaccacccccctaacccctttttctcctcaaatctatccttcgccgcaaaaccatctccccccgtacgttcctctcccgcctatccgtcgtcaacaacaattctactaacgcacgtctcattctatcgtccccaccgccgccgcatattctacgtcgaaaaccccgtccctcaatttcttcaaccacaataaatcccacactatcacgcgccacacaattcctactaacaatcccactactcacgatatccgttaccgtcatatcttcgcgtatccacccctacttcaacctctaatcccgtcgatataaaaatactacaacaatcatttacgtatccgcgtcgttcaattctccgcatataccgccttaccccaacttcccactaactctttcacactcgcgttcactaaaccttcccaatcccgta

SEQ ID NO: 6963 - DNA, 595 bp, Artificial Sequence
  chemically treated genomic DNA (Homo sapiens) CpG-island No: 6963
gtttttttttaaagttgtttattcgttgtttcgtttcgttgtattgtggtaatcgtttatattcgtttatttagtggtatttcgttttttttggttcgggttagtttattttcggtttcgatttttggtgatagttttattcgcgtttttttttttttattcgtgttagttatttttttagtttttttttttttttaggtttatttttcgtcgtagggttattttttttcgtgcgtttttttttcgtttgttcgtcgttagtagtagttttattaacgtacgttttattttgtcgtttttatcgtcgtcgtatgttttacgtcgaaaatttcgttttttagtttttttagttatagtaagttttatattgttacgcgttatataatttttgttagtagttttattatttacggtgttcgttgtcgttatattttcgcgtatttatttttgttttaatttttggtttcgtcggtgtgggggtgttataataattatttgcgtgttcgcgtcgtttagtttttcgtatatgtcgttttgttttagttttttattaatttttttatattcgcgtttattaggtttttttagtttcgtg

SEQ ID NO: 6964 - DNA, 595 bp, Artificial Sequence
  chemically treated genomic DNA (Homo sapiens) CpG-island No: 6964
cacgaaactaaaaaaacctaataaacgcgaatataaaaaaattaataaaaaactaaaacaaaacgacatatacgaaaaactaaacgacgcgaacacgcaaataattattataacacccccacaccgacgaaaccaaaaattaaaacaaaaataaatacgcgaaaatataacgacaacgaacaccgtaaataataaaactactaacaaaaattatataacgcgtaacaatataaaacttactataactaaaaaaactaaaaaacgaaattttcgacgtaaaacatacgacgacgataaaaacgacaaaataaaacgtacgttaataaaactactactaacgacgaacaaacgaaaaaaaaacgcacgaaaaaaaataaccctacgacgaaaaataaacctaaaaaaaaaaaaaaactaaaaaaataactaacacgaataaaaaaaaaaaaacgcgaataaaactatcaccaaaaatcgaaaccgaaaataaactaacccgaaccaaaaaaaacgaaataccactaaataaacgaatataaacgattaccacaatacaacgaaacgaaacaacgaataaacaactttaaaaaaaaac

SEQ ID NO: 6965 - DNA, 606 bp, Artificial Sequence
  chemically treated genomic DNA (Homo sapiens) CpG-island No: 6965
cgtgataagttagaaatgcgcgtcgtttttacgttcggtgttaggtttaatttaaagcgagtgataatcggtttcggagagtaattgacgatatcggttttaatacggaaattagttagacgcgtttttattaggcgagttatttgtttaagcgtaaaggtatttatcggttttatttcgttcggcggcggtgttagtaaatttagagaaggtagcggcgtcgtcggtttatgtaacggacggttgtcgttattacgtattaatagcggatgaagtagggtattttgcggttgtggcgtaattggttgttgtggttgttgatattgttgttgcggcgtaatcggttgttgcggttgttgatattgttgttgtggcgtaatcggttgttgcggttgttgatattgtggttgcggcgtaatcggttgttgtggttgttgatattgcggttgcggcggaattggttgttgcggttgttgatattgttgttgcggtgtaatcggttgttgcggttgttgtataggtttaataattggcgtaaataacggttcgtgtggattattatttatacgttttgggattattttattacgaattacgacgagaacg

SEQ ID NO: 6966 - DNA, 606 bp, Artificial Sequence
  chemically treated genomic DNA (Homo sapiens) CpG-island No: 6966
cgttctcgtcgtaattcgtaataaaataatcccaaaacgtataaataataatccacacgaaccgttatttacgccaattattaaacctatacaacaaccgcaacaaccgattacaccgcaacaacaatatcaacaaccgcaacaaccaattccgccgcaaccgcaatatcaacaaccacaacaaccgattacgccgcaaccacaatatcaacaaccgcaacaaccgattacgccacaacaacaatatcaacaaccgcaacaaccgattacgccgcaacaacaatatcaacaaccacaacaaccaattacgccacaaccgcaaaataccctacttcatccgctattaatacgtaataacgacaaccgtccgttacataaaccgacgacgccgctaccttctctaaatttactaacaccgccgccgaacgaaataaaaccgataaatacctttacgcttaaacaaataactcgcctaataaaaacgcgtctaactaatttccgtattaaaaccgatatcgtcaattactctccgaaaccgattatcactcgctttaaattaaacctaacaccgaacgtaaaaacgacgcgcatttctaacttatcacg

SEQ ID NO: 6967 - DNA, 606 bp, Artificial Sequence
  chemically treated genomic DNA (Homo sapiens) CpG-island No: 6967
cgttttcgtcgtggttcgtagtgagatgattttagagcgtgtggatgatggtttatacgaatcgttgtttacgttaattgttgaatttgtatagtagtcgtaataatcggttgtatcgtagtagtaatattagtagtcgtaataattagtttcgtcgtagtcgtagtattagtagttataatagtcggttgcgtcgtagttataatattagtagtcgtaataatcggttgcgttatagtagtaatattagtagtcgtaataatcggttgcgtcgtagtagtagtattagtagttataatagttagttgcgttataatcgtaggatattttgttttattcgttgttgatgcgtaatggcgatagtcgttcgttgtataaatcgacgacgtcgttgttttttttggatttgttgatatcgtcgtcgagcgaagtggagtcggtagatatttttgcgtttgaataaatggttcgtttggtggaagcgcgtttggttgattttcgtattaaagtcgatgtcgttaattatttttcggggtcggttattattcgttttgaattgaatttggtatcgggcgtaaaagcggcgcgtatttttaatttgttacg

SEQ ID NO: 6968 - DNA, 606 bp, Artificial Sequence
  chemically treated genomic DNA (Homo sapiens) CpG-island No: 6968
cgtaacaaattaaaaatacgcgccgcttttacgcccgataccaaattcaattcaaaacgaataataaccgaccccgaaaaataattaacgacatcgactttaatacgaaaatcaaccaaacgcgcttccaccaaacgaaccatttattcaaacgcaaaaatatctaccgactccacttcgctcgacgacgatatcaacaaatccaaaaaaaacaacgacgtcgtcgatttatacaacgaacgactatcgccattacgcatcaacaacgaataaaacaaaatatcctacgattataacgcaactaactattataactactaatactactactacgacgcaaccgattattacgactactaatattactactataacgcaaccgattattacgactactaatattataactacgacgcaaccgactattataactactaatactacgactacgacgaaactaattattacgactactaatattactactacgatacaaccgattattacgactactatacaaattcaacaattaacgtaaacaacgattcgtataaaccatcatccacacgctctaaaatcatctcactacgaaccacgacgaaaacg

SEQ ID NO: 6969 - DNA, 788 bp, Artificial Sequence
  chemically treated genomic DNA (Homo sapiens) CpG-island No: 6969
  unsure (209)
cgttgattaaatttgtcgatgtattggttcggtatggatcggtaatttgttttcgtttttgtttattattatcgtttgtggcgcggtgtttggtttttatgcgttgattttttttgggattacgtcgaagatttggcgaacgaagggtaggcgtgttttatcggttacggtgggatgttaatggaatttttcgtggcgattatggcgtntgttttcgtttgtattatcgattcgggcgtgtattttgttatgaatagttcgattgcggtgttggtttcggtagggacggcggatgtggtcgtttttgtcgcgtaggttgtgagtagttgggttttagtattatattagatacgtttaattagattgttagcgaagtgggtgaatagtcgattatttttcgtgcgggcggtgcgtcgacgttggcggtggggatggtttatattttgtacggcgcgttgggcggtatgatggatgtggcgttttggtattatttcgttattttgtttgaagtattgtttattttgacggcggtggatgtaggtacgcgtgttgcgcgttttatgttgtaggatttgttgggcgtggtgttttttggttttgaatgcggatcgatttattgtttgttaatttgttggtaatagcgttgtgcgtattggcgtggggttattttttttattagggcgtggtcgattcgttgggcggttattaatattttgtggtcgttgtttggtattgttaattagatgttggtagggatggcgttgatgttttgtgtcgtggtgttgttt

SEQ ID NO: 6970 - DNA, 788 bp, Artificial Sequence
  chemically treated genomic DNA (Homo sapiens) CpG-island No: 6970
  unsure (580)
aaacaacaccacgacacaaaacatcaacgccatccctaccaacatctaattaacaataccaaacaacgaccacaaaatattaataaccgcccaacgaatcgaccacgccctaataaaaaaaataaccccacgccaatacgcacaacgctattaccaacaaattaacaaacaataaatcgatccgcattcaaaaccaaaaaacaccacgcccaacaaatcctacaacataaaacgcgcaacacgcgtacctacatccaccgccgtcaaaataaacaatacttcaaacaaaataacgaaataataccaaaacgccacatccatcataccgcccaacgcgccgtacaaaatataaaccatccccaccgccaacgtcgacgcaccgcccgcacgaaaaataatcgactattcacccacttcgctaacaatctaattaaacgtatctaatataatactaaaacccaactactcacaacctacgcgacaaaaacgaccacatccgccgtccctaccgaaaccaacaccgcaatcgaactattcataacaaaatacacgcccgaatcgataatacaaacgaaaacanacgccataatcgccacgaaaaattccattaacatcccaccgtaaccgataaaacacgcctacccttcgttcgccaaatcttcgacgtaatcccaaaaaaaatcaacgcataaaaaccaaacaccgcgccacaaacgataataataaacaaaaacgaaaacaaattaccgatccataccgaaccaatacatcgacaaatttaatcaacg

SEQ ID NO: 6971 - DNA, 788 bp, Artificial Sequence
  chemically treated genomic DNA (Homo sapiens) CpG-island No: 6971
  unsure (580)
gaataatattacggtatagagtattagcgttatttttgttagtatttggttggtaatattaaatagcggttatagagtgttaatagtcgtttagcggatcgattacgttttgatggaggaagtagttttacgttagtacgtatagcgttgttgttagtaggttagtaggtagtgaatcggttcgtatttaggattaggagatattacgtttagtagattttgtaatataaagcgcgtagtacgcgtatttgtatttatcgtcgttagaataaatagtgttttaaataaaatggcgaagtgatattagaacgttatatttattatgtcgtttagcgcgtcgtgtagaatgtaggttatttttatcgttagcgtcggcgtatcgttcgtacgggaaatgatcgattgtttatttatttcgttggtaatttggttaagcgtatttggtgtaatgttaaagtttagttatttataatttgcgcggtagaagcgattatattcgtcgtttttgtcggagttagtatcgtaatcgggttgtttatggtaaaatatacgttcggatcgatgatataggcggaaatangcgttataatcgttacgaaggattttattaatattttatcgtagtcgataaagtacgtttgtttttcgttcgttagattttcggcgtggttttagaagagattagcgtatggaagttagatatcgcgttataggcgatggtgataaataggaacgggaataggttatcggtttatatcgggttagtgtatcgataaatttggttagcg

SEQ ID NO: 6972 - DNA, 788 bp, Artificial Sequence
  chemically treated genomic DNA (Homo sapiens) CpG-island No: 6972
  unsure (209)
cgctaaccaaatttatcgatacactaacccgatataaaccgataacctattcccgttcctatttatcaccatcgcctataacgcgatatctaacttccatacgctaatctcttctaaaaccacgccgaaaatctaacgaacgaaaaacaaacgtactttatcgactacgataaaatattaataaaatccttcgtaacgattataacgcntatttccgcctatatcatcgatccgaacgtatattttaccataaacaacccgattacgatactaactccgacaaaaacgacgaatataatcgcttctaccgcgcaaattataaataactaaactttaacattacaccaaatacgcttaaccaaattaccaacgaaataaataaacaatcgatcatttcccgtacgaacgatacgccgacgctaacgataaaaataacctacattctacacgacgcgctaaacgacataataaatataacgttctaatatcacttcgccattttatttaaaacactatttattctaacgacgataaatacaaatacgcgtactacgcgctttatattacaaaatctactaaacgtaatatctcctaatcctaaatacgaaccgattcactacctactaacctactaacaacaacgctatacgtactaacgtaaaactacttcctccatcaaaacgtaatcgatccgctaaacgactattaacactctataaccgctatttaatattaccaaccaaatactaacaaaaataacgctaatactctataccgtaatattattc

SEQ ID NO: 6973 - DNA, 511 bp, Artificial Sequence
  chemically treated genomic DNA (Homo sapiens) CpG-island No: 6973
gaattggcgcggcgtgaagattggcgtggtttgttagtttttagttcggaaaagttcggaattatcgaagcgtaatgtaattattattatgcgaaatggaatatcgggtagagtgaagaagtttggtaaggggcgaaagagttgtggttaatcggtaagagttagtttaacgtttgtgataagttatttagcgtttggcgtgcgttaggtaaataagattcgttggcgtatttagagcgtattcgtttggcgatgaaagcgggtaatataggtttggtaatagtgttggtagggtagatgtttgtcgattattagattatcgtttcggtaattattttattggcgaataattttaatatcgtattgattttcgcgcgtataattggcgcgatcgattttattcgttaaatggttgggggggcgttttgtaatgtggcgcggtaggatgtttaaatgtatagttatgattttaatcgttggttaggcgtaataatttaatgaagattagatt

SEQ ID NO: 6974 - DNA, 511 bp, Artificial Sequence
  chemically treated genomic DNA (Homo sapiens) CpG-island No: 6974
aatctaatcttcattaaattattacgcctaaccaacgattaaaatcataactatacatttaaacatcctaccgcgccacattacaaaacgcccccccaaccatttaacgaataaaatcgatcgcgccaattatacgcgcgaaaatcaatacgatattaaaattattcgccaataaaataattaccgaaacgataatctaataatcgacaaacatctaccctaccaacactattaccaaacctatattacccgctttcatcgccaaacgaatacgctctaaatacgccaacgaatcttatttacctaacgcacgccaaacgctaaataacttatcacaaacgttaaactaactcttaccgattaaccacaactctttcgccccttaccaaacttcttcactctacccgatattccatttcgcataataataattacattacgcttcgataattccgaacttttccgaactaaaaactaacaaaccacgccaatcttcacgccgcgccaattc

SEQ ID NO: 6975 - DNA, 511 bp, Artificial Sequence
  chemically treated genomic DNA (Homo sapiens) CpG-island No: 6975
aatttgatttttattaagttgttgcgtttggttaacgattgggattataattgtgtatttaagtattttgtcgcgttatattgtaaaacgtttttttagttatttgacgggtaaaatcggtcgcgttagttgtacgcgcgaaggttagtacggtattagggttgttcgttagtgaaatgattgtcgaggcgatagtttggtaatcggtaggtatttgttttgttagtattgttattaggtttgtgttattcgtttttatcgttagacggatacgttttaaatacgttagcggattttgtttatttgacgtacgttagacgttaaataatttgttataggcgttaggttggtttttgtcggttagttatagttttttcgttttttgttaggtttttttattttgttcggtgttttatttcgtatagtagtaattatattgcgtttcggtagtttcgggttttttcgggttaaaggttaataagttacgttagtttttacgtcgcgttagttt

SEQ ID NO: 6976 - DNA, 511 bp, Artificial Sequence
  chemically treated genomic DNA (Homo sapiens) CpG-island No: 6976
aaactaacgcgacgtaaaaactaacgtaacttattaacctttaacccgaaaaaacccgaaactaccgaaacgcaatataattactactatacgaaataaaacaccgaacaaaataaaaaaacctaacaaaaaacgaaaaaactataactaaccgacaaaaaccaacctaacgcctataacaaattatttaacgtctaacgtacgtcaaataaacaaaatccgctaacgtatttaaaacgtatccgtctaacgataaaaacgaataacacaaacctaataacaatactaacaaaacaaatacctaccgattaccaaactatcgcctcgacaatcatttcactaacgaacaaccctaataccgtactaaccttcgcgcgtacaactaacgcgaccgattttacccgtcaaataactaaaaaaacgttttacaatataacgcgacaaaatacttaaatacacaattataatcccaatcgttaaccaaacgcaacaacttaataaaaatcaaatt

SEQ ID NO: 6977 - DNA, 1109 bp, Artificial Sequence
  chemically treated genomic DNA (Homo sapiens) CpG-island No: 6977
gcgcggtttcgtttttcgtttcgtcgaggtttcgttttttatattaaggtttcgttttttttttgtttttttcggttaaggtttattttttttttacgcggttcgttttttttttcgttaagttttcgttttttttttgcgcggttcgttttttttttcgttaaggtttcgtttttttttttcggggtttcgttttttatttcgtcgaggtttatatttttatttcggtagcggttttattatcggtatagagtttattcgttagttatatgtagaagacggcggtcgtcggtattagttttcgtcgcgttttcgtttgtcgtagtttgcgtcgtttgtcgttatcgcgcgtttttattgatttatattatcgtcgtcgtacgtacgtacgatcgtcgggttcgttggttggttcggtgcgggcggcggatttatcgtcggagaggattgttagcgtcgtcgtcgtacgtcgtttcggttcgggttcgggtttcgatttcgtttcgggttttagcgtcggtcgttcgttcggtcgggcgatgaagtgttattatgaggcgttgggggtgcggcgcgacgttagcgaggaggagtttaagaaggtttatcggaagttggttttgaaatggtattcgggtaagtatttgtttcgtagttttcgcggttattcggagaagttcggtttttttcgatttttttttttttcgggcggatttcgcggagttagtagagagggatttggcggtttaggagttttttgtttcgttcggttagtgttcggagtcgttttgttcgtttcggtgggcgaagcgttttgttttggcgtatttcggtttatattttatttttttatattcgcgatttcggtttcgtatcgttattgtagggggaaaattgtagtttaataattttatttgttttcgttatcgggtcgtagatattacgagggagtagtcgggaattcggaatttagatttgttttaggtttgtttttttttgcgttttttgtagcgtagtttttcggtgtttttttttcgttgttttttatttcgttcgggaattttagatattttaatttgatgtatggtttttttcgttttttagttaag

SEQ ID NO: 6978 - DNA, 1109 bp, Artificial Sequence
  chemically treated genomic DNA (Homo sapiens) CpG-island No: 6978
cttaactaaaaaacgaaaaaaaccatacatcaaattaaaatatctaaaattcccgaacgaaataaaaaacaacgaaaaaaaaacaccgaaaaactacgctacaaaaaacgcaaaaaaaaacaaacctaaaacaaatctaaattccgaattcccgactactccctcgtaatatctacgacccgataacgaaaacaaataaaattattaaactacaattttccccctacaataacgatacgaaaccgaaatcgcgaatataaaaaaataaaatataaaccgaaatacgccaaaacaaaacgcttcgcccaccgaaacgaacaaaacgactccgaacactaaccgaacgaaacaaaaaactcctaaaccgccaaatccctctctactaactccgcgaaatccgcccgaaaaaaaaaaaaatcgaaaaaaaccgaacttctccgaataaccgcgaaaactacgaaacaaatacttacccgaataccatttcaaaaccaacttccgataaaccttcttaaactcctcctcgctaacgtcgcgccgcacccccaacgcctcataataacacttcatcgcccgaccgaacgaacgaccgacgctaaaacccgaaacgaaatcgaaacccgaacccgaaccgaaacgacgtacgacgacgacgctaacaatcctctccgacgataaatccgccgcccgcaccgaaccaaccaacgaacccgacgatcgtacgtacgtacgacgacgataatataaatcaataaaaacgcgcgataacgacaaacgacgcaaactacgacaaacgaaaacgcgacgaaaactaataccgacgaccgccgtcttctacatataactaacgaataaactctataccgataataaaaccgctaccgaaataaaaatataaacctcgacgaaataaaaaacgaaaccccgaaaaaaaaaaacgaaaccttaacgaaaaaaaaaacgaaccgcgcaaaaaaaaaacgaaaacttaacgaaaaaaaaaacgaaccgcgtaaaaaaaaaataaaccttaaccgaaaaaaacaaaaaaaaaacgaaaccttaatataaaaaacgaaacctcgacgaaacgaaaaacgaaaccgcgc

SEQ ID NO: 6979 - DNA, 1109 bp, Artificial Sequence
  chemically treated genomic DNA (Homo sapiens) CpG-island No: 6979
tttaattaagaaacgaaaagagttatatattaggttgaagtatttgggattttcggacgaggtggagggtagcggaggaaaaatatcgagaggttgcgttgtaagggacgtagggaaaagtaagtttggggtaggtttgagtttcgagttttcgattgttttttcgtggtgtttgcgattcggtagcgggagtaagtgaggttgttggattgtagttttttttttatagtggcgatgcggggtcggggtcgcgggtatgaggagatggggtgtgagtcggggtgcgttagggtagagcgtttcgtttatcgagacgggtagggcggtttcgggtattggtcgggcggggtaaggagtttttaggtcgttaggtttttttttgttggtttcgcggagttcgttcgggggaagggaaggtcggggagggtcgggttttttcgagtggtcgcgggggttgcgggataggtatttattcgggtgttattttagggttagttttcgataggtttttttgagttttttttcgttggcgtcgcgtcgtatttttagcgttttatagtgatattttatcgttcgatcgggcgggcggtcggcgttggggttcgggacggggtcggggttcgggttcgggtcgaagcggcgtgcggcggcggcgttggtagtttttttcggcggtgagttcgtcgttcgtatcgggttagttagcgagttcggcggtcgtgcgtgcgtgcggcggcggtggtgtaggttagtgaaggcgcgcggtggcggtagacgacgtaggttgcggtaagcgggagcgcggcgggggttggtgtcggcggtcgtcgttttttgtatgtggttagcgggtgggttttgtgtcggtaatagggtcgttgtcgggatgggggtgtgggtttcggcggggtgagaggcgaggtttcgaggaaggaaggcggggttttggcgaggagagaggcgggtcgcgtaggagaaaggcgggagtttggcggggaaagaggcgggtcgcgtgggaggaaggtaggttttggtcgggaagaataggaggaaggcgggattttggtgtgagaggcggggtttcggcggggcgagaggcggggtcgcgt

SEQ ID NO: 6980 - DNA, 1109 bp, Artificial Sequence
  chemically treated genomic DNA (Homo sapiens) CpG-island No: 6980
acgcgaccccgcctctcgccccgccgaaaccccgcctctcacaccaaaatcccgccttcctcctattcttcccgaccaaaacctaccttcctcccacgcgacccgcctctttccccgccaaactcccgcctttctcctacgcgacccgcctctctcctcgccaaaaccccgccttccttcctcgaaacctcgcctctcaccccgccgaaacccacacccccatcccgacaacgaccctattaccgacacaaaacccacccgctaaccacatacaaaaaacgacgaccgccgacaccaacccccgccgcgctcccgcttaccgcaacctacgtcgtctaccgccaccgcgcgccttcactaacctacaccaccgccgccgcacgcacgcacgaccgccgaactcgctaactaacccgatacgaacgacgaactcaccgccgaaaaaaactaccaacgccgccgccgcacgccgcttcgacccgaacccgaaccccgaccccgtcccgaaccccaacgccgaccgcccgcccgatcgaacgataaaatatcactataaaacgctaaaaatacgacgcgacgccaacgaaaaaaaactcaaaaaaacctatcgaaaactaaccctaaaataacacccgaataaatacctatcccgcaacccccgcgaccactcgaaaaaacccgaccctccccgaccttcccttcccccgaacgaactccgcgaaaccaacaaaaaaaaacctaacgacctaaaaactccttaccccgcccgaccaatacccgaaaccgccctacccgtctcgataaacgaaacgctctaccctaacgcaccccgactcacaccccatctcctcatacccgcgaccccgaccccgcatcgccactataaaaaaaaaactacaatccaacaacctcacttactcccgctaccgaatcgcaaacaccacgaaaaaacaatcgaaaactcgaaactcaaacctaccccaaacttacttttccctacgtcccttacaacgcaacctctcgatatttttcctccgctaccctccacctcgtccgaaaatcccaaatacttcaacctaatatataactcttttcgtttcttaattaaa

SEQ ID NO: 6981 - DNA, 537 bp, Artificial Sequence
  chemically treated genomic DNA (Homo sapiens) CpG-island No: 6981
agttagttagttagagaattagtaggagaggaaaaagggtgggcgcgcgggtgggttcgggaggcggagattttcgggaagttggggttacgcggcggtgtaggcgacgggattgtagtgttatttttttcgagaaatttatacgttcgtacgttcgcgcgcgtacgtacgtgtatacggtgggtagggagaaaacgagagagtttgagtgttgggcgcgttttagcgatggtttttgtttttaatagtaaaattaattcgttcggtatttgttagggttttaaagtcgacggtggcgtcggttggagaatggattgtgatttttagatgtacgtgaaaatgtgtaagaagatcgtttagtttattaaggtaaggtggggcgtagcgggttagcgagttgtacgttcggggcgttcgagtcgggagttagtgcggatgcgtttttcgggaggttcgggttaaatttagatagaaattttgtttcggaggttaatcgggaagggaagcggttttaaatttgggtgatttgatttttta

SEQ ID NO: 6982 - DNA, 537 bp, Artificial Sequence
  chemically treated genomic DNA (Homo sapiens) CpG-island No: 6982
taaaaaatcaaatcacccaaatttaaaaccgcttcccttcccgattaacctccgaaacaaaatttctatctaaatttaacccgaacctcccgaaaaacgcatccgcactaactcccgactcgaacgccccgaacgtacaactcgctaacccgctacgccccaccttaccttaataaactaaacgatcttcttacacattttcacgtacatctaaaaatcacaatccattctccaaccgacgccaccgtcgactttaaaaccctaacaaataccgaacgaattaattttactattaaaaacaaaaaccatcgctaaaacgcgcccaacactcaaactctctcgttttctccctacccaccgtatacacgtacgtacgcgcgcgaacgtacgaacgtataaatttctcgaaaaaaataacactacaatcccgtcgcctacaccgccgcgtaaccccaacttcccgaaaatctccgcctcccgaacccacccgcgcgcccaccctttttcctctcctactaattctctaactaactaact

SEQ ID NO: 6983 - DNA, 537 bp, Artificial Sequence
  chemically treated genomic DNA (Homo sapiens) CpG-island No: 6983
tagaaggttaagttatttagatttaggatcgttttttttttcggttggttttcgagataaagtttttgtttggatttggttcgggtttttcgggaggcgtattcgtattgattttcggttcgggcgtttcgggcgtgtagttcgttggttcgttgcgttttattttattttggtgagttgggcgatttttttgtatatttttacgtgtatttggggattatagtttattttttagtcggcgttatcgtcggttttggagttttggtaagtgtcgggcgggttaattttgttgttgagagtagaagttatcgttaaaacgcgtttagtatttagattttttcgttttttttttgtttatcgtgtgtacgtgcgtgcgcgcgcgggcgtgcgagcgtgtgggtttttcgggagaggtggtattgtagtttcgtcgtttgtatcgtcgcgtggttttagtttttcgaaggttttcgtttttcgggtttattcgcgcgtttattttttttttttttttgttggttttttggttggttggtt

SEQ ID NO: 6984 - DNA, 537 bp, Artificial Sequence
  chemically treated genomic DNA (Homo sapiens) CpG-island No: 6984
aaccaaccaaccaaaaaaccaacaaaaaaaaaaaaaaaataaacgcgcgaataaacccgaaaaacgaaaaccttcgaaaaactaaaaccacgcgacgatacaaacgacgaaactacaataccacctctcccgaaaaacccacacgctcgcacgcccgcgcgcgcacgcacgtacacacgataaacaaaaaaaaaacgaaaaaatctaaatactaaacgcgttttaacgataacttctactctcaacaacaaaattaacccgcccgacacttaccaaaactccaaaaccgacgataacgccgactaaaaaataaactataatccccaaatacacgtaaaaatatacaaaaaaatcgcccaactcaccaaaataaaataaaacgcaacgaaccaacgaactacacgcccgaaacgcccgaaccgaaaatcaatacgaatacgcctcccgaaaaacccgaaccaaatccaaacaaaaactttatctcgaaaaccaaccgaaaaaaaaaacgatcctaaatctaaataacttaaccttcta

SEQ ID NO: 6985 - DNA, 1318 bp, Artificial Sequence
  chemically treated genomic DNA (Homo sapiens) CpG-island No: 6985
tttttttcgtttcggatttttcggggttattagacggtcgtttttttcgtttgggttcgggtttgggggaattgtttttagcgtttcggggttcgtttttcgtcggagtagtttggtttttttttttcggtttcgttagcgtcgtttttcgttttcggttttttcggtagggttgttcgaagttgtttcgggagttttttcggtgcggttcggaggaatttcgtaggatttcgggagacgtcgtcgtcgttgttcggcgggtttagggatcggtttttaggtttttaagtttttttcggggattttttgtcgtcgattttttttcggattcgtaggatattttttttcggaggtcgggtttggttcgttcgttcgtcgttttcgtttcgtttcgcgcgtcgcgtcgggagtttcgagttcgatttttttttcggacgttcggttcgttcgcgggacggaggcggcgatggtgattgggtagcggcgcggggtcggggtttgggtagggcggttcggtcgtttttttttttcgttgttttcgtttttttttttttttttttttttcgagtgttagttcgggcggtcgtcgagtttggcgttttttcgtttcgttgttttttttttcgcgtcgcggattttttttttttttttgcgttgtttttttttttcgtcgttttttttcgtttttttttcgtttttttttcgttttttttttttaggcgcggttagcgggggtaagagcgaggtggttgcgaggaggcgttattgaaagttttgatttggggaaggttgcgggttcggagtcggagacgtcgagttggggtcgggtgagtggtaggcgtcgggttcgcgcgcgttgcgggaggggagagtcggtgggttcggttaggtgggcgtttcgcgcgggcgtatggggagtcgttgcggtcggtcgagtattggttgtttgagtcgcggttggcgcgggaatttcgtttcggcgtttttgggagatcgcgtcgagcggtcggaggtgttgcgggatgggcgttgggtgttgggaatgggaagggaatagttgttttttagcgtcgtcggcggtcgtagaagtggaaaaaagttgtgtcgggaatagcgttttttcgggaagtcggcgcgagttttgttttttgggcgtcgttggcgggtttcggacggcggcgcgtgggttttaggcgtagttgggcgtcgggttttagcgcgtttggtatcgttttttgggggtcgtttcgtggtcgtttttgttgtttttggttcgtggcgtgtgggttattttggttatagacgttagttgtttttt

SEQ ID NO: 6986 - DNA, 1318 bp, Artificial Sequence
  chemically treated genomic DNA (Homo sapiens) CpG-island No: 6986
aaaaaacaactaacgtctataaccaaaataacccacacgccacgaaccaaaaacaacaaaaacgaccacgaaacgacccccaaaaaacgataccaaacgcgctaaaacccgacgcccaactacgcctaaaacccacgcgccgccgtccgaaacccgccaacgacgcccaaaaaacaaaactcgcgccgacttcccgaaaaaacgctattcccgacacaacttttttccacttctacgaccgccgacgacgctaaaaaacaactattcccttcccattcccaacacccaacgcccatcccgcaacacctccgaccgctcgacgcgatctcccaaaaacgccgaaacgaaattcccgcgccaaccgcgactcaaacaaccaatactcgaccgaccgcaacgactccccatacgcccgcgcgaaacgcccacctaaccgaacccaccgactctcccctcccgcaacgcgcgcgaacccgacgcctaccactcacccgaccccaactcgacgtctccgactccgaacccgcaaccttccccaaatcaaaactttcaataacgcctcctcgcaaccacctcgctcttacccccgctaaccgcgcctaaaaaaaaaaaacgaaaaaaaaacgaaaaaaaaacgaaaaaaaacgacgaaaaaaaaaaacaacgcaaaaaaaaaaaaaaaatccgcgacgcgaaaaaaaaaacaacgaaacgaaaaaacgccaaactcgacgaccgcccgaactaacactcgaaaaaaaaaaaaaaaaaaaaaaacgaaaacaacgaaaaaaaaaaacgaccgaaccgccctacccaaaccccgaccccgcgccgctacccaatcaccatcgccgcctccgtcccgcgaacgaaccgaacgtccgaaaaaaaaatcgaactcgaaactcccgacgcgacgcgcgaaacgaaacgaaaacgacgaacgaacgaaccaaacccgacctccgaaaaaaaatatcctacgaatccgaaaaaaaatcgacgacaaaaaatccccgaaaaaaacttaaaaacctaaaaaccgatccctaaacccgccgaacaacgacgacgacgtctcccgaaatcctacgaaattcctccgaaccgcaccgaaaaaactcccgaaacaacttcgaacaaccctaccgaaaaaaccgaaaacgaaaaacgacgctaacgaaaccgaaaaaaaaaaaccaaactactccgacgaaaaacgaaccccgaaacgctaaaaacaattcccccaaacccgaacccaaacgaaaaaaacgaccgtctaataaccccgaaaaatccgaaacgaaaaaaa

SEQ ID NO: 6987 - DNA, 1318 bp, Artificial Sequence
  chemically treated genomic DNA (Homo sapiens) CpG-island No: 6987
gagaagtagttgacgtttgtggttagagtgatttatacgttacggattagggatagtaggggcgattacggggcggtttttagggagcggtgttaggcgcgttggaattcggcgtttagttgcgtttgggatttacgcgtcgtcgttcgaagttcgttagcgacgtttagagagtagggttcgcgtcggtttttcgaggagacgttgttttcggtataatttttttttatttttgcggtcgtcggcggcgttgagaagtagttgttttttttttatttttagtatttaacgtttatttcgtagtattttcgatcgttcggcgcggttttttaggggcgtcgaagcgaagttttcgcgttagtcgcggtttaagtagttagtgttcggtcggtcgtaacggttttttatgcgttcgcgcggggcgtttatttggtcgggtttatcggtttttttttttcgtagcgcgcgcgggttcgacgtttgttatttattcggttttagttcggcgttttcggtttcgagttcgtagttttttttaagttagggtttttagtgacgttttttcgtagttatttcgtttttgttttcgttggtcgcgtttggaagaaggaggcgggaggagagcgagaggagagcgggaggaggcggcgggagaggggggtaacgtaagggaggggagagggttcgcggcgcgggggaggaggtagcgaggcgagagagcgttaagttcggcggtcgttcgggttagtattcggggagagggaggaggaggaggggcgggggtagcgagagaaagaggcggtcgagtcgttttgtttaggtttcggtttcgcgtcgttgtttagttattatcgtcgttttcgtttcgcgagcgggtcgggcgttcgggggaggggtcgggttcggggttttcggcgcggcgcgcggggcgggacgggggcggcgggcgggcggattaggttcggttttcggaggggagtgttttgcgggttcgggagggagtcggcgataggggattttcgagaggggtttgggggtttgggaatcggtttttgagttcgtcgggtagcggcggcggcgtttttcggggttttgcgaggttttttcgggtcgtatcggggaagttttcggagtagtttcgagtagttttgtcgggagggtcggaggcggagagcggcgttgacggagtcgggggagagaggttaggttgtttcggcggagagcgggtttcggggcgttaggagtagtttttttagattcgggtttaagcggaaagaacggtcgtttggtgatttcggagagttcgaaacgggaaagg

SEQ ID NO: 6988 - DNA, 1318 bp, Artificial Sequence
  chemically treated genomic DNA (Homo sapiens) CpG-island No: 6988
cctttcccgtttcgaactctccgaaatcaccaaacgaccgttctttccgcttaaacccgaatctaaaaaaactactcctaacgccccgaaacccgctctccgccgaaacaacctaacctctctcccccgactccgtcaacgccgctctccgcctccgaccctcccgacaaaactactcgaaactactccgaaaacttccccgatacgacccgaaaaaacctcgcaaaaccccgaaaaacgccgccgccgctacccgacgaactcaaaaaccgattcccaaacccccaaacccctctcgaaaatcccctatcgccgactccctcccgaacccgcaaaacactcccctccgaaaaccgaacctaatccgcccgcccgccgcccccgtcccgccccgcgcgccgcgccgaaaaccccgaacccgacccctcccccgaacgcccgacccgctcgcgaaacgaaaacgacgataataactaaacaacgacgcgaaaccgaaacctaaacaaaacgactcgaccgcctctttctctcgctacccccgcccctcctcctcctccctctccccgaatactaacccgaacgaccgccgaacttaacgctctctcgcctcgctacctcctcccccgcgccgcgaaccctctcccctcccttacgttacccccctctcccgccgcctcctcccgctctcctctcgctctcctcccgcctccttcttccaaacgcgaccaacgaaaacaaaaacgaaataactacgaaaaaacgtcactaaaaaccctaacttaaaaaaaactacgaactcgaaaccgaaaacgccgaactaaaaccgaataaataacaaacgtcgaacccgcgcgcgctacgaaaaaaaaaaaccgataaacccgaccaaataaacgccccgcgcgaacgcataaaaaaccgttacgaccgaccgaacactaactacttaaaccgcgactaacgcgaaaacttcgcttcgacgcccctaaaaaaccgcgccgaacgatcgaaaatactacgaaataaacgttaaatactaaaaataaaaaaaaaacaactacttctcaacgccgccgacgaccgcaaaaataaaaaaaaattataccgaaaacaacgtctcctcgaaaaaccgacgcgaaccctactctctaaacgtcgctaacgaacttcgaacgacgacgcgtaaatcccaaacgcaactaaacgccgaattccaacgcgcctaacaccgctccctaaaaaccgccccgtaatcgcccctactatccctaatccgtaacgtataaatcactctaaccacaaacgtcaactacttctc

SEQ ID NO: 6989 - DNA, 547 bp, Artificial Sequence
  chemically treated genomic DNA (Homo sapiens) CpG-island No: 6989
  unsure (440)
gcggtttcgaatcggtatggttttagtaaatcgttggtatggtggacggcgtaagattttgttttttgtttaattatcggtagttcgttggttaggcgtgttatttgttttgtaaaatcggtttgtatatcgttatatgtttgattcgtatcgataatgatacgtattaggtttaagtcgttgcggtatatatcgtagatgatgtcgtattttattttacgaatgcgtttaacggtttttttggtgtcgttattgattattaattttagtaaattaggtggggttgttagatttgtaacgcgttcggtaattttaagtagttcgataatgtttaagaacgtcgcgattgacgggttattttttatattagttttgtttttgatcgcgcgaagagtcgcgtcgataatatttttaaatcgtttatttttatcgtatatcgnttgattggtgtagataacggcggcgtcgtatttcggcgcgattacgttattattattgaatttttattttcgattttaatagttattagattgttagtatacgagtg

SEQ ID NO: 6990 - DNA, 547 bp, Artificial Sequence
  chemically treated genomic DNA (Homo sapiens) CpG-island No: 6990
  unsure (108)
cactcgtatactaacaatctaataactattaaaatcgaaaataaaaattcaataataataacgtaatcgcgccgaaatacgacgccgccgttatctacaccaatcaancgatatacgataaaaataaacgatttaaaaatattatcgacgcgactcttcgcgcgatcaaaaacaaaactaatataaaaaataacccgtcaatcgcgacgttcttaaacattatcgaactacttaaaattaccgaacgcgttacaaatctaacaaccccacctaatttactaaaattaataatcaataacgacaccaaaaaaaccgttaaacgcattcgtaaaataaaatacgacatcatctacgatatataccgcaacgacttaaacctaatacgtatcattatcgatacgaatcaaacatataacgatatacaaaccgattttacaaaacaaataacacgcctaaccaacgaactaccgataattaaacaaaaaacaaaatcttacgccgtccaccataccaacgatttactaaaaccataccgattcgaaaccgc

SEQ ID NO: 6991 - DNA, 547 bp, Artificial Sequence
  chemically treated genomic DNA (Homo sapiens) CpG-island No: 6991
  unsure (108)
tattcgtatattggtagtttgatagttattgaggtcgaagataggaatttaatagtaatagcgtggtcgcgtcgaggtacgacgtcgtcgttgtttatattaattagncggtgtgcgatgaaggtgaacggtttgagaatattgtcgacgcgatttttcgcgcgattaaaggtagggttggtgtagagaatgattcgttaatcgcggcgtttttgagtattgtcgaattgtttgaagttatcgagcgcgttatagatttgataattttatttggtttgttggaattggtggttagtggcgatattaaaaaagtcgttgagcgtattcgtgaggtggaatacggtattatttgcgatatgtgtcgtagcgatttagatttggtgcgtattattgtcgatgcgggttaggtatgtgacggtgtgtaagtcggttttgtagggtaagtggtacgtttggttaacgagttgtcgatgattaaataggaggtaaaattttacgtcgtttattatgttaacgatttattggagttatatcggttcgaagtcgt

SEQ ID NO: 6992 - DNA, 547 bp, Artificial Sequence
  chemically treated genomic DNA (Homo sapiens) CpG-island No: 6992
  unsure (440)
acgacttcgaaccgatataactccaataaatcgttaacataataaacgacgtaaaattttacctcctatttaatcatcgacaactcgttaaccaaacgtaccacttaccctacaaaaccgacttacacaccgtcacatacctaacccgcatcgacaataatacgcaccaaatctaaatcgctacgacacatatcgcaaataataccgtattccacctcacgaatacgctcaacgacttttttaatatcgccactaaccaccaattccaacaaaccaaataaaattatcaaatctataacgcgctcgataacttcaaacaattcgacaatactcaaaaacgccgcgattaacgaatcattctctacaccaaccctacctttaatcgcgcgaaaaatcgcgtcgacaatattctcaaaccgttcaccttcatcgcacaccgnctaattaatataaacaacgacgacgtcgtacctcgacgcgaccacgctattactattaaattcctatcttcgacctcaataactatcaaactaccaatatacgaata

SEQ ID NO: 6993 - DNA, 555 bp, Artificial Sequence
  chemically treated genomic DNA (Homo sapiens) CpG-island No: 6993
cggatagtagtaaaattaacgcggtcgttaaagagatggcgaatttgcgttagtcgttagatgagttacgggtgaaacgcgatatcgcgatggttgaagcgggtattcgcgcggagcgaattggggtatgggttatcgcggttgcggtggtggcggttatatgggtatgggttattggtaaattagaacgttttttcgtcgggttgtagcgatagatattagagtttgttattaatagtaattgcgaattttcgggcgtttttagttatgttacgttgattattatagaagagcggttttggcggcgttcgatatgcgttatcgtttgcgaatttaaattaggttttatgggttgtttttcgtaggtggttacggtttgttttatcgtatgttagggtttttcgaggtacggttgtattttcggttttttatcgtttaatgttggttggtgttcgtattaggtgattttatacgtcggtattcgtttatatcgtttatcgtgtttattggtaatgataacgttaatttgtaacgtgtcggaatcgatttggcgat

SEQ ID NO: 6994 - DNA, 555 bp, Artificial Sequence
  chemically treated genomic DNA (Homo sapiens) CpG-island No: 6994
atcgccaaatcgattccgacacgttacaaattaacgttatcattaccaataaacacgataaacgatataaacgaataccgacgtataaaatcacctaatacgaacaccaaccaacattaaacgataaaaaaccgaaaatacaaccgtacctcgaaaaaccctaacatacgataaaacaaaccgtaaccacctacgaaaaacaacccataaaacctaatttaaattcgcaaacgataacgcatatcgaacgccgccaaaaccgctcttctataataatcaacgtaacataactaaaaacgcccgaaaattcgcaattactattaataacaaactctaatatctatcgctacaacccgacgaaaaaacgttctaatttaccaataacccatacccatataaccgccaccaccgcaaccgcgataacccataccccaattcgctccgcgcgaatacccgcttcaaccatcgcgatatcgcgtttcacccgtaactcatctaacgactaacgcaaattcgccatctctttaacgaccgcgttaattttactactatccg

SEQ ID NO: 6995 - DNA, 555 bp, Artificial Sequence
  chemically treated genomic DNA (Homo sapiens) CpG-island No: 6995
atcgttaaatcgatttcggtacgttgtagattgacgttgttattattagtgagtacggtgagcgatatagacggatatcggcgtgtaaagttatttaatgcgggtattaattagtattgggcgatagagggtcgggaatatagtcgtgtttcgaggggttttggtatgcgatgaagtagatcgtagttatttgcgaagggtaatttataaaatttgatttagattcgtaggcgatagcgtatatcgagcgtcgttagagtcgtttttttgtgatggttagcgtggtatggttggaagcgttcgaaggttcgtagttattgttagtggtaaattttgatgtttgtcgttgtaattcgacgagaaagcgttttgatttattagtggtttatatttatatgatcgttattatcgtagtcgcggtagtttatgttttagttcgtttcgcgcgaatattcgttttagttatcgcgatatcgcgttttattcgtaatttatttaacgattgacgtaaattcgttatttttttggcgatcgcgttaattttgttgttattcg

SEQ ID NO: 6996 - DNA, 555 bp, Artificial Sequence
  chemically treated genomic DNA (Homo sapiens) CpG-island No: 6996
cgaataacaacaaaattaacgcgatcgccaaaaaaataacgaatttacgtcaatcgttaaataaattacgaataaaacgcgatatcgcgataactaaaacgaatattcgcgcgaaacgaactaaaacataaactaccgcgactacgataataacgatcatataaatataaaccactaataaatcaaaacgctttctcgtcgaattacaacgacaaacatcaaaatttaccactaacaataactacgaaccttcgaacgcttccaaccataccacgctaaccatcacaaaaaaacgactctaacgacgctcgatatacgctatcgcctacgaatctaaatcaaattttataaattacccttcgcaaataactacgatctacttcatcgcataccaaaacccctcgaaacacgactatattcccgaccctctatcgcccaatactaattaatacccgcattaaataactttacacgccgatatccgtctatatcgctcaccgtactcactaataataacaacgtcaatctacaacgtaccgaaatcgatttaacgat

SEQ ID NO: 6997 - DNA, 519 bp, Artificial Sequence
  chemically treated genomic DNA (Homo sapiens) CpG-island No: 6997
gtttatttttcggagttattatacgtttatttagttgtcgttaaaggatatagaggtcggggtagtggggtgaatagcgggcgggatgtgcgaggtgtgggtgggatcgggtgtgattttatttgatcgatttagaggatggagaatacggggacgttgagaatttggggttgatagtgggaaacgattggaatttgatggttagttgttgatgaatagtggcggtagcgggggggggtggattagggggatgagatcggttggggggcgtttgtgagtttgggttggcgtaggttgggggcggtgggatatcgtttgagtgaagatacgtaatgggtagagaagaggcgttgtgtatgttggggtgcgattagtattagagggggtgtttgagagcgttggatcggtgcggagcgggttagcgggagggtttgggagtaagtgtatggtgagataaacgtggggtggtgggggtgagggtatttcgggtcgggtttagaaaggtgggattattatcga

SEQ ID NO: 6998 - DNA, 519 bp, Artificial Sequence
  chemically treated genomic DNA (Homo sapiens) CpG-island No: 6998
tcgataataatcccacctttctaaacccgacccgaaataccctcacccccaccaccccacgtttatctcaccatacacttactcccaaaccctcccgctaacccgctccgcaccgatccaacgctctcaaacaccccctctaatactaatcgcaccccaacatacacaacgcctcttctctacccattacgtatcttcactcaaacgatatcccaccgcccccaacctacgccaacccaaactcacaaacgccccccaaccgatctcatccccctaatccacccccccccgctaccgccactattcatcaacaactaaccatcaaattccaatcgtttcccactatcaaccccaaattctcaacgtccccgtattctccatcctctaaatcgatcaaataaaatcacacccgatcccacccacacctcgcacatcccgcccgctattcaccccactaccccgacctctatatcctttaacgacaactaaataaacgtataataactccgaaaaataaac

SEQ ID NO: 6999 - DNA, 519 bp, Artificial Sequence
  chemically treated genomic DNA (Homo sapiens) CpG-island No: 6999
tcggtagtggttttatttttttaaattcggttcggggtgtttttatttttattattttacgtttattttattatgtatttatttttaagttttttcgttaattcgtttcgtatcggtttaacgtttttaggtattttttttggtattggtcgtattttaatatgtataacgttttttttttatttattacgtatttttatttaggcggtattttatcgtttttagtttacgttagtttaagtttataaacgttttttaatcggttttatttttttaatttattttttttcgttatcgttattatttattaataattggttattaaattttagtcgttttttattattagttttaagtttttaacgttttcgtgttttttattttttgggtcggttaagtgaaattatattcggttttatttatatttcgtatatttcgttcgttatttattttattatttcggtttttatattttttggcgataattggatagacgtatgatgatttcggaggatgggt

SEQ ID NO: 7000 - DNA, 519 bp, Artificial Sequence
  chemically treated genomic DNA (Homo sapiens) CpG-island No: 7000
acccatcctccgaaatcatcatacgtctatccaattatcgccaaaaaatataaaaaccgaaataataaaataaataacgaacgaaatatacgaaatataaataaaaccgaatataatttcacttaaccgacccaaaaaataaaaaacacgaaaacgttaaaaacttaaaactaataataaaaaacgactaaaatttaataaccaattattaataaataataacgataacgaaaaaaaataaattaaaaaaataaaaccgattaaaaaacgtttataaacttaaactaacgtaaactaaaaacgataaaataccgcctaaataaaaatacgtaataaataaaaaaaaaacgttatacatattaaaatacgaccaataccaaaaaaaatacctaaaaacgttaaaccgatacgaaacgaattaacgaaaaaacttaaaaataaatacataataaaataaacgtaaaataataaaaataaaaacaccccgaaccgaatttaaaaaaataaaaccactaccga

SEQ ID NO: 7001 - DNA, 530 bp, Artificial Sequence
  chemically treated genomic DNA (Homo sapiens) CpG-island No: 7001
  unsure (276, 278..)
ttacgcgtttcgttaattgtacggttggagatgggtggacggattgcgtacgttggcgttttcgatgatatggggggggggggggggggacgggacgatagataagtagaggggatgtatggatttggcgtaagaagcgttcggttgagtaagggattaagggttaacggaataacgggtatttgggtgggtggtgggtgcgggattaacgggtatcgggagtagttgatcgatggatgcggagatttggggtgttagtcgataggagagagggantnntcggagcgcgcgggggtttggtttaaagatgcgatatatttaggcgtagtgttgagcggatgttttcgcgggggttaagagggataggtcggatattcggaggaaaagttatattatgttttaagcgtcgtgatgcgcggaatgaggagcgcgggtttatacgagaggtggtagagtcgggcggggtgatattaagttgtatggattaagaaggagaagtacgtaataaaaattaagtaggaataaacgga

SEQ ID NO: 7002 - DNA, 530 bp, Artificial Sequence
  chemically treated genomic DNA (Homo sapiens) CpG-island No: 7002
  unsure (252..253, 255)
tccgtttattcctacttaatttttattacgtacttctccttcttaatccatacaacttaatatcaccccgcccgactctaccacctctcgtataaacccgcgctcctcattccgcgcatcacgacgcttaaaacataatataacttttcctccgaatatccgacctatccctcttaacccccgcgaaaacatccgctcaacactacgcctaaatatatcgcatctttaaaccaaacccccgcgcgctccgannantccctctctcctatcgactaacaccccaaatctccgcatccatcgatcaactactcccgatacccgttaatcccgcacccaccacccacccaaatacccgttattccgttaacccttaatcccttactcaaccgaacgcttcttacgccaaatccatacatcccctctacttatctatcgtcccgtccccccccccccccccccatatcatcgaaaacgccaacgtacgcaatccgtccacccatctccaaccgtacaattaacgaaacgcgtaa

SEQ ID NO: 7003 - DNA, 530 bp, Artificial Sequence
  chemically treated genomic DNA (Homo sapiens) CpG-island No: 7003
  unsure (252..253, 255)
ttcgtttatttttgtttggtttttattgcgtgttttttttttttaatttatataatttggtgttatttcgttcggttttgttatttttcgtatagattcgcgttttttatttcgcgtattacgacgtttaaagtatagtgtagtttttttttcgggtgttcgatttgttttttttaattttcgcggagatattcgtttaatattacgtttaaatgtatcgtatttttaggttaggttttcgcgcgtttcggnngnttttttttttttgtcgattggtattttaggttttcgtatttatcggttaattgttttcggtattcgttagtttcgtatttattatttatttagatattcgttgtttcgttaatttttaattttttatttaatcgaacgttttttacgttaagtttatgtattttttttatttatttatcgtttcgtttttttttttttttttttatattatcgagagcgttagcgtacgtaattcgtttatttatttttaatcgtgtagttggcggagcgcgtaa

SEQ ID NO: 7004 - DNA, 530 bp, Artificial Sequence
  chemically treated genomic DNA (Homo sapiens) CpG-island No: 7004
  unsure (276, 278..)
ttacgcgctccgccaactacacgattaaaaataaataaacgaattacgtacgctaacgctctcgataatataaaaaaaaaaaaaaaaaaacgaaacgataaataaataaaaaaaatacataaacttaacgtaaaaaacgttcgattaaataaaaaattaaaaattaacgaaacaacgaatatctaaataaataataaatacgaaactaacgaataccgaaaacaattaaccgataaatacgaaaacctaaaataccaatcgacaaaaaaaaaaaancnnccgaaacgcgcgaaaacctaacctaaaaatacgatacatttaaacgtaatattaaacgaatatctccgcgaaaattaaaaaaaacaaatcgaacacccgaaaaaaaaactacactatactttaaacgtcgtaatacgcgaaataaaaaacgcgaatctatacgaaaaataacaaaaccgaacgaaataacaccaaattatataaattaaaaaaaaaaaacacgcaataaaaaccaaacaaaaataaacgaa

SEQ ID NO: 7005 - DNA, 945 bp, Artificial Sequence
  chemically treated genomic DNA (Homo sapiens) CpG-island No: 7005
  unsure (895, 908..909, 916, 918..919, 933, 936, 943..)
gcggcgcggcggtcgtgtttagttgatgaggcgagcgttgcgggaggacgggacggcggggacgagggggcgaagtggggagggggggatgtaaaaaagggggggacgggatgttggtaaaagttagcgtaggcgggggggcgcggcgtttgggaggtaggggagcgcgacggggggcgcgtgaagaggttggagtatcgcgggaatgggtcgtgaagcggttagtatacgttggtagagatttggagggaagcggggttagggcgggagcgagggaattagcggggagtggttagttggcgaacggttgaggcgggattggggttacggtgcgtaggagttgttaggacgcgaacggtttaggagggggtatattcgttgggcggggttatgcggtttggatttaatgattacggaaaagtacggtggaagggcggcggtaggagttggattaggaaggtagaattgggaggagcgtcggcgttcggagtaattgggtatgaattgcgttttggagaagtttacgagtcggggttgcgttggcgtgtgatggggggggggggggggcgggttagtgttttggagattaattacggtgaacgattggggattatggtggggagtagttgggtacgaaatgttggtgtgaaggggcgtggagtgatgacgttggtattcgaaagataagcgggattggtcgtttagggtgattttgggacggatggatacgagagatgcgatggcgcggacggcgtgggggttgagacgatgaaatggtattattacgggggttgaaacgagggaatggtgatttaattgacgagggggtttatgggggtacgtagtgcggcggtgagttatggagtggaggggtttgagagacgtgcgtatgtgnttagtagtatganngttcggnannttttcgtgggtgtngtncggtgtnnt

SEQ ID NO: 7006 - DNA, 945 bp, Artificial Sequence
  chemically treated genomic DNA (Homo sapiens) CpG-island No: 7006
  unsure (2..3, 10, 13, 27..28, 30, 37..38, 51)
annacaccgnacnacacccacgaaaanntnccgaacnntcatactactaancacatacgcacgtctctcaaacccctccactccataactcaccgccgcactacgtacccccataaaccccctcgtcaattaaatcaccattccctcgtttcaacccccgtaataataccatttcatcgtctcaacccccacgccgtccgcgccatcgcatctctcgtatccatccgtcccaaaatcaccctaaacgaccaatcccgcttatctttcgaataccaacgtcatcactccacgccccttcacaccaacatttcgtacccaactactccccaccataatccccaatcgttcaccgtaattaatctccaaaacactaacccgccccccccccccccccatcacacgccaacgcaaccccgactcgtaaacttctccaaaacgcaattcatacccaattactccgaacgccgacgctcctcccaattctaccttcctaatccaactcctaccgccgcccttccaccgtacttttccgtaatcattaaatccaaaccgcataaccccgcccaacgaatataccccctcctaaaccgttcgcgtcctaacaactcctacgcaccgtaaccccaatcccgcctcaaccgttcgccaactaaccactccccgctaattccctcgctcccgccctaaccccgcttccctccaaatctctaccaacgtatactaaccgcttcacgacccattcccgcgatactccaacctcttcacgcgccccccgtcgcgctcccctacctcccaaacgccgcgcccccccgcctacgctaacttttaccaacatcccgtcccccccttttttacatccccccctccccacttcgccccctcgtccccgccgtcccgtcctcccgcaacgctcgcctcatcaactaaacacgaccgccgcgccgc

SEQ ID NO: 7007 - DNA, 945 bp, Artificial Sequence
  chemically treated genomic DNA (Homo sapiens) CpG-island No: 7007
  unsure (2..3, 10, 13, 27..28, 30, 37..38, 51)
anngtatcgnatnatatttacgagggnntntcgaatnnttatattgttagntatatacgtacgttttttaagtttttttattttataatttatcgtcgtattgcgtatttttataaattttttcgttaattaaattattattttttcgttttagttttcgtagtggtattattttatcgttttaatttttacgtcgttcgcgttatcgtatttttcgtgtttattcgttttagagttattttggacggttagtttcgtttatttttcgggtgttaacgttattattttacgtttttttatattagtatttcgtatttagttattttttattataatttttagtcgtttatcgtagttaatttttaaggtattagttcgttttttttttttttttattatacgttaacgtaatttcgattcgtaaatttttttagggcgtaatttatatttaattatttcgggcgtcggcgttttttttaattttatttttttaatttaatttttatcgtcgtttttttatcgtattttttcgtagttattaggtttaaatcgtatagtttcgtttagcgaatatgtttttttttgagtcgttcgcgttttggtagtttttacgtatcgtaattttaatttcgttttaatcgttcgttaattaattatttttcgttaattttttcgttttcgttttaatttcgtttttttttaagtttttattagcgtgtattagtcgttttacggtttattttcgcggtattttaatttttttacgcgtttttcgtcgcgtttttttgttttttaaacgtcgcgttttttcgtttacgttagtttttattagtatttcgttttttttttttttgtatttttttttttttatttcgttttttcgttttcgtcgtttcgttttttcgtagcgttcgttttattaattggatacggtcgtcgcgtcgt

SEQ ID NO: 7008 - DNA, 945 bp, Artificial Sequence
  chemically treated genomic DNA (Homo sapiens) CpG-island No: 7008
  unsure (895, 908..909, 916, 918..919, 933, 936, 943..)
acgacgcgacgaccgtatccaattaataaaacgaacgctacgaaaaaacgaaacgacgaaaacgaaaaaacgaaataaaaaaaaaaaaatacaaaaaaaaaaaaaacgaaatactaataaaaactaacgtaaacgaaaaaacgcgacgtttaaaaaacaaaaaaacgcgacgaaaaacgcgtaaaaaaattaaaataccgcgaaaataaaccgtaaaacgactaatacacgctaataaaaacttaaaaaaaaacgaaattaaaacgaaaacgaaaaaattaacgaaaaataattaattaacgaacgattaaaacgaaattaaaattacgatacgtaaaaactaccaaaacgcgaacgactcaaaaaaaaacatattcgctaaacgaaactatacgatttaaacctaataactacgaaaaaatacgataaaaaaacgacgataaaaattaaattaaaaaaataaaattaaaaaaaacgccgacgcccgaaataattaaatataaattacgccctaaaaaaatttacgaatcgaaattacgttaacgtataataaaaaaaaaaaaaaaacgaactaataccttaaaaattaactacgataaacgactaaaaattataataaaaaataactaaatacgaaatactaatataaaaaaacgtaaaataataacgttaacacccgaaaaataaacgaaactaaccgtccaaaataactctaaaacgaataaacacgaaaaatacgataacgcgaacgacgtaaaaattaaaacgataaaataataccactacgaaaactaaaacgaaaaaataataatttaattaacgaaaaaatttataaaaatacgcaatacgacgataaattataaaataaaaaaacttaaaaaacgtacgtatatanctaacaatataannattcganannccctcgtaaatatnatncgatacnnt

SEQ ID NO: 7009 - DNA, 514 bp, Artificial Sequence
  chemically treated genomic DNA (Homo sapiens) CpG-island No: 7009
tcgtacggttgtatttagttgtttcggggttcgcggaattttatagagtttttgtgggtttgagatcggttttttcgtcgggtttttttaaatttgtacgttcgatcggtcgcggaggcgttatttggggacgttaatttatacgtcgcggacgtattagtagtcgaggatttcgtaagggttagagtatgtggcggtataagagggggttttttatagttggcgttttcgattcgtttcggtttgttgtcgtttgtcgtttttagtcgttattttatcgcgttgtggtttttttttattattttttagattttttatgttagtcgcggggcggttcgtcgttttatattggagcgttcgagcgggtatcgcggtcgttgttttagaaaatttattaaaagcgttatacggtaattttttgtcgttggaagcggcggaataagcgttcggtattattttgtttaattagtgtattaataattgttgattgatttgataacggttaagttttttt

SEQ ID NO: 7010 - DNA, 514 bp, Artificial Sequence
  chemically treated genomic DNA (Homo sapiens) CpG-island No: 7010
aaaaaaacttaaccgttatcaaatcaatcaacaattattaatacactaattaaacaaaataataccgaacgcttattccgccgcttccaacgacaaaaaattaccgtataacgcttttaataaattttctaaaacaacgaccgcgatacccgctcgaacgctccaatataaaacgacgaaccgccccgcgactaacataaaaaatctaaaaaataataaaaaaaaaccacaacgcgataaaataacgactaaaaacgacaaacgacaacaaaccgaaacgaatcgaaaacgccaactataaaaaaccccctcttataccgccacatactctaacccttacgaaatcctcgactactaatacgtccgcgacgtataaattaacgtccccaaataacgcctccgcgaccgatcgaacgtacaaatttaaaaaaacccgacgaaaaaaccgatctcaaacccacaaaaactctataaaattccgcgaaccccgaaacaactaaatacaaccgtacga

SEQ ID NO: 7011 - DNA, 514 bp, Artificial Sequence
  chemically treated genomic DNA (Homo sapiens) CpG-island No: 7011
ggaaggatttagtcgttattaaattaattagtagttattaatgtattggttgagtaggatgatgtcgaacgtttgtttcgtcgtttttagcggtaggggattatcgtatggcgtttttggtgaattttttggaatagcggtcgcggtgttcgttcgggcgttttagtgtggggcgacgggtcgtttcgcggttagtatgggggatttaagaggtggtaaaggagggttatagcgcgatagaatggcggttgggaacggtaaacgataataggtcggggcgagtcggagacgttaattatggggggtttttttttgtgtcgttatatattttagtttttgcggggttttcggttattaatacgttcgcggcgtgtagattagcgtttttagatggcgttttcgcgatcggtcgggcgtataggtttgggaggattcgacggggaggtcggttttaaatttataagagttttatggggtttcgcggatttcggagtaattgagtgtaatcgtgcga

SEQ ID NO: 7012 - DNA, 514 bp, Artificial Sequence
  chemically treated genomic DNA (Homo sapiens) CpG-island No: 7012
tcgcacgattacactcaattactccgaaatccgcgaaaccccataaaactcttataaatttaaaaccgacctccccgtcgaatcctcccaaacctatacgcccgaccgatcgcgaaaacgccatctaaaaacgctaatctacacgccgcgaacgtattaataaccgaaaaccccgcaaaaactaaaatatataacgacacaaaaaaaaaccccccataattaacgtctccgactcgccccgacctattatcgtttaccgttcccaaccgccattctatcgcgctataaccctcctttaccacctcttaaatcccccatactaaccgcgaaacgacccgtcgccccacactaaaacgcccgaacgaacaccgcgaccgctattccaaaaaattcaccaaaaacgccatacgataatcccctaccgctaaaaacgacgaaacaaacgttcgacatcatcctactcaaccaatacattaataactactaattaatttaataacgactaaatccttcc

SEQ ID NO: 7013 - DNA, 533 bp, Artificial Sequence
  chemically treated genomic DNA (Homo sapiens) CpG-island No: 7013
tgtgtaggcgcgttcgaaatcgtgcgtttacgcggttaggttatggagcgttatacgttgtattttagggtaagattatcgtcgaaggtcgtgttatcggttatcgtatcggtggggttcggtgaaagttatttatgatattagcgaaatgaatcgtatcgaattggcgacgtgttggttattgatatgatcgattcggattgggaatcgatatgaagaaagtatttgttatcgttataaacgtggcggtcgttttgttagggcgatatcgtcgtgaacgggtattcggggaatgggttgtgggattgataacggttaaaacggagacgttcgtgttgtgcgaggtgtcggtagtatagagggggaatacgggaagttcgttaatacggttcgagacgttttgtattgtcgagggttagtgcgtttaataggggcgttcgaatattcgatggttttagtgtatagcgtcgaaattttagattcgttattataggtagatattatcgtaaaatttagttagtaggaagaatatg

SEQ ID NO: 7014 - DNA, 533 bp, Artificial Sequence
  chemically treated genomic DNA (Homo sapiens) CpG-island No: 7014
catattcttcctactaactaaattttacgataatatctacctataataacgaatctaaaatttcgacgctatacactaaaaccatcgaatattcgaacgcccctattaaacgcactaaccctcgacaatacaaaacgtctcgaaccgtattaacgaacttcccgtattccccctctatactaccgacacctcgcacaacacgaacgtctccgttttaaccgttatcaatcccacaacccattccccgaatacccgttcacgacgatatcgccctaacaaaacgaccgccacgtttataacgataacaaatactttcttcatatcgattcccaatccgaatcgatcatatcaataaccaacacgtcgccaattcgatacgattcatttcgctaatatcataaataactttcaccgaaccccaccgatacgataaccgataacacgaccttcgacgataatcttaccctaaaatacaacgtataacgctccataacctaaccgcgtaaacgcacgatttcgaacgcgcctacaca

SEQ ID NO: 7015 - DNA, 533 bp, Artificial Sequence
  chemically treated genomic DNA (Homo sapiens) CpG-island No: 7015
tatattttttttattaattggattttacggtggtgtttgtttgtgatagcggatttggggtttcggcgttatatattgggattatcgggtattcgggcgtttttgttgagcgtattagttttcgatagtgtaaaacgtttcgaatcgtgttaacgggtttttcgtattttttttttatattatcgatatttcgtatagtacgagcgttttcgttttaatcgttgttaattttatagtttatttttcggatgttcgtttacggcgatatcgttttgataggacgatcgttacgtttgtgacgatggtagatgttttttttatatcggtttttagttcgggtcggttatgttagtaattagtacgtcgttagttcgatgcggtttatttcgttgatgttatggatgatttttatcggattttatcgatgcgatgatcgatagtacggttttcggcgataattttattttggaatgtagcgtataacgttttatgatttgatcgcgtgagcgtacggtttcggacgcgtttgtata

SEQ ID NO: 7016 - DNA, 533 bp, Artificial Sequence
  chemically treated genomic DNA (Homo sapiens) CpG-island No: 7016
tatacaaacgcgtccgaaaccgtacgctcacgcgatcaaatcataaaacgttatacgctacattccaaaataaaattatcgccgaaaaccgtactatcgatcatcgcatcgataaaatccgataaaaatcatccataacatcaacgaaataaaccgcatcgaactaacgacgtactaattactaacataaccgacccgaactaaaaaccgatataaaaaaaacatctaccatcgtcacaaacgtaacgatcgtcctatcaaaacgatatcgccgtaaacgaacatccgaaaaataaactataaaattaacaacgattaaaacgaaaacgctcgtactatacgaaatatcgataatataaaaaaaaaatacgaaaaacccgttaacacgattcgaaacgttttacactatcgaaaactaatacgctcaacaaaaacgcccgaatacccgataatcccaatatataacgccgaaaccccaaatccgctatcacaaacaaacaccaccgtaaaatccaattaataaaaaaaatata

SEQ ID NO: 7017 - DNA, 587 bp, Artificial Sequence
  chemically treated genomic DNA (Homo sapiens) CpG-island No: 7017
agagtcggcgtttagagttagcggtttttcgaggatttattattaagttcgcggtataggtttcgattttatatttaacgttgttaaagtggtagagtcggcggggttgggatagaggcggtattgaggtcggcgttgtcggtggttgagaggttataagtttcggttcgttatattaggggcgacgttttttagaggtttcgcggtttattcgggcgggattggttttattgtttgcgcgttttgagaatagattacggtgttttagggtttatagtttcgcgtaggggagtttagttaggttttgtacgagcggtttttcgcgagtttagttttgagagattgggacgtaatttggtgttgagaagaatcgaatcgtttcgttgttttttgcgttaattatattttttagaggttttcgcggttttattttttcgattttattttaaaaaggtattttttttttatagtcggttggagttgtaggttcgtaagttcgtgaaggaagttcggtttagtgtgtttagtttcgtttttttgggttttatttgaggttagaatatagcggggtgaaggtggtgagagtt

SEQ ID NO: 7018 - DNA, 587 bp, Artificial Sequence
  chemically treated genomic DNA (Homo sapiens) CpG-island No: 7018
aactctcaccaccttcaccccgctatattctaacctcaaataaaacccaaaaaaacgaaactaaacacactaaaccgaacttccttcacgaacttacgaacctacaactccaaccgactataaaaaaaaaatacctttttaaaataaaatcgaaaaaataaaaccgcgaaaacctctaaaaaatataattaacgcaaaaaacaacgaaacgattcgattcttctcaacaccaaattacgtcccaatctctcaaaactaaactcgcgaaaaaccgctcgtacaaaacctaactaaactcccctacgcgaaactataaaccctaaaacaccgtaatctattctcaaaacgcgcaaacaataaaaccaatcccgcccgaataaaccgcgaaacctctaaaaaacgtcgcccctaatataacgaaccgaaacttataacctctcaaccaccgacaacgccgacctcaataccgcctctatcccaaccccgccgactctaccactttaacaacgttaaatataaaatcgaaacctataccgcgaacttaataataaatcctcgaaaaaccgctaactctaaacgccgactct

SEQ ID NO: 7019 - DNA, 587 bp, Artificial Sequence
  chemically treated genomic DNA (Homo sapiens) CpG-island No: 7019
agtttttattatttttatttcgttgtattttagttttaggtaggatttaaaaagacggaattaaatatattgagtcgggttttttttacggatttgcgaatttgtagttttagtcgattgtaagaaggaagtgtttttttgaggtggggtcggggaagtagggtcgcgaaggtttttgggaaatgtagttggcgtaggaagtagcggaacgattcgattttttttagtattaagttgcgttttaattttttagagttgggttcgcgggaggtcgttcgtgtaaaatttggttgagtttttttgcgcggagttgtgagttttggaatatcgtggtttgtttttaggacgcgtaaatagtgaagttagtttcgttcgggtgagtcgcggggtttttgggaagcgtcgtttttggtgtaacggatcgagatttgtggttttttagttatcgatagcgtcggttttagtgtcgtttttgttttagtttcgtcggttttgttattttggtagcgttaagtgtggaatcggggtttgtgtcgcgggtttggtggtgagttttcgggaaatcgttagttttgagcgtcgatttt

SEQ ID NO: 7020 - DNA, 587 bp, Artificial Sequence
  chemically treated genomic DNA (Homo sapiens) CpG-island No: 7020
aaaatcgacgctcaaaactaacgatttcccgaaaactcaccaccaaacccgcgacacaaaccccgattccacacttaacgctaccaaaataacaaaaccgacgaaactaaaacaaaaacgacactaaaaccgacgctatcgataactaaaaaaccacaaatctcgatccgttacaccaaaaacgacgcttcccaaaaaccccgcgactcacccgaacgaaactaacttcactatttacgcgtcctaaaaacaaaccacgatattccaaaactcacaactccgcgcaaaaaaactcaaccaaattttacacgaacgacctcccgcgaacccaactctaaaaaattaaaacgcaacttaatactaaaaaaaatcgaatcgttccgctacttcctacgccaactacatttcccaaaaaccttcgcgaccctacttccccgaccccacctcaaaaaaacacttccttcttacaatcgactaaaactacaaattcgcaaatccgtaaaaaaaacccgactcaatatatttaattccgtctttttaaatcctacctaaaactaaaatacaacgaaataaaaataataaaaact

SEQ ID NO: 7021 - DNA, 529 bp, Artificial Sequence
  chemically treated genomic DNA (Homo sapiens) CpG-island No: 7021
ttttggcgcggtcgggttattcggagttcgtttttgatttttcgttttcgtcggggttcggttttatttatttttcggcgtcgcgggttttgtaaacggtttcgcgatcgagattcgcgacgttattttttagaatttttcgcgaggagagcgaggcgaggattgaggtatgtaggattttgagttttgcgagatttaattagcgatatcgcgttttttatggatttcgcgaattacgagttttagacgttttgcgttacggtcgttatcgttgaattatattttttagagaattcgcggttttttttattgcgcgtttgcgttacgggggtaggtatcggagaggttgtgtgcggtcgtaggttttttagtgattttgagttgttgtgttgggaaagcggttaggttgcgcgcggggttgattggttgaatgtttgggtgtgtggttcgtgtgtgattgttgttgtatatttttatgtttgtcgacgaaagagcggcggattttgttagtgtagggagtttttgtatt

SEQ ID NO: 7022 - DNA, 529 bp, Artificial Sequence
  chemically treated genomic DNA (Homo sapiens) CpG-island No: 7022
aatacaaaaactccctacactaacaaaatccgccgctctttcgtcgacaaacataaaaatatacaacaacaatcacacacgaaccacacacccaaacattcaaccaatcaaccccgcgcgcaacctaaccgctttcccaacacaacaactcaaaatcactaaaaaacctacgaccgcacacaacctctccgatacctacccccgtaacgcaaacgcgcaataaaaaaaaccgcgaattctctaaaaaatataattcaacgataacgaccgtaacgcaaaacgtctaaaactcgtaattcgcgaaatccataaaaaacgcgatatcgctaattaaatctcgcaaaactcaaaatcctacatacctcaatcctcgcctcgctctcctcgcgaaaaattctaaaaaataacgtcgcgaatctcgatcgcgaaaccgtttacaaaacccgcgacgccgaaaaataaataaaaccgaaccccgacgaaaacgaaaaatcaaaaacgaactccgaataacccgaccgcgccaaaa

SEQ ID NO: 7023 - DNA, 529 bp, Artificial Sequence
  chemically treated genomic DNA (Homo sapiens) CpG-island No: 7023
aatatagaagttttttgtattgataaaattcgtcgttttttcgtcggtaagtataaaggtgtgtagtaatagttatatacgaattatatatttaagtatttaattagttagtttcgcgcgtagtttggtcgtttttttaatatagtagtttaaggttattggagagtttacgatcgtatatagttttttcggtatttgttttcgtggcgtaggcgcgtagtggagggggtcgcgggttttttgggagatgtagtttaacgatgacggtcgtggcgtaaagcgtttggggttcgtggttcgcggggtttatggggaacgcggtgtcgttggttagatttcgtagagtttagagttttgtatgttttagttttcgtttcgtttttttcgcggaggattttgggaggtgacgtcgcgggtttcggtcgcggggtcgtttgtagagttcgcggcgtcgggaggtgagtggggtcgggtttcggcgggagcgggaagttaagggcgggtttcgggtggttcggtcgcgttagga

SEQ ID NO: 7024 - DNA, 529 bp, Artificial Sequence
  chemically treated genomic DNA (Homo sapiens) CpG-island No: 7024
tcctaacgcgaccgaaccacccgaaacccgcccttaacttcccgctcccgccgaaacccgaccccactcacctcccgacgccgcgaactctacaaacgaccccgcgaccgaaacccgcgacgtcacctcccaaaatcctccgcgaaaaaaacgaaacgaaaactaaaacatacaaaactctaaactctacgaaatctaaccaacgacaccgcgttccccataaaccccgcgaaccacgaaccccaaacgctttacgccacgaccgtcatcgttaaactacatctcccaaaaaacccgcgaccccctccactacgcgcctacgccacgaaaacaaataccgaaaaaactatatacgatcgtaaactctccaataaccttaaactactatattaaaaaaacgaccaaactacgcgcgaaactaactaattaaatacttaaatatataattcgtatataactattactacacacctttatacttaccgacgaaaaaacgacgaattttatcaatacaaaaaacttctatatt

SEQ ID NO: 7025 - DNA, 1193 bp, Artificial Sequence
  chemically treated genomic DNA (Homo sapiens) CpG-island No: 7025
  unsure (567, 1147, 1189)
gtgcgtagaagtcgggattaggtagatatcgcgatgtttttcgttgcggtttttatgataatgacgaatcgttagtaggttcgcgtattcgttttgtgcgttagagttcggttgtatataaacggcgtcgtaatcggttagttttattagttagttagttagttgcgtaattatttgttgataattttcggtttgtttcggcgggtagaacgggtgtagttcggtaaatttcggttaggtgattgggattatttcggcggcggcgtttagttttatggtgtaggaatttagcgggattatcgtttgatttagcgttagatttttacgttttagcgagtgtatatagcgtattatttcggtttcgttgtggtagcgattaaatatcggatgggtgaggatttcgtcgtcgcgtagtatcgtaggttggatagagcggttgtcgtgagttacgtttttgtttagcgtgtcgatgtttaagtcgggggtatcggttagtagtacgttgaaaaattgtattacgtttttacgcgtgggttgtttagcgggtgattgttgtattgagttttntttggagatttttcgaagcggcgttttatcgtttttagtatgacgttttgtattgttttattgttgaagtcgtcggtagtgatcgtttagtgtagtgttttacgattatagtagtttagcgcgaacgtgatacgtagttttttttcgttattatagtagaattcgaattcgttagagtattatcgttgattgtttttttttacggttattttgtttgtatgtgttcgtttcgatggcggtatagtaggttttcgtttaagtaatagcgtattttggcgtatgattcggtaaatacgtttggtattgatcgtaggtatattattaagttttgtttgtttgcgaagtagcgtttatattcgacgataattatacgttggtagtttttcgataatatggtgtatacggagaagtatattcgtattattagtgtgacgattgcggcggttatttatttagttatcggttcgtttgagaatgacgtgtaattgcgtacgcgatattcggagataacggttgattaagtttattttttattttcggggtaataagggcgcgtgcgttatttatttttttgttcgtntatatttaacggtttttttgaggagtttattttttatcgttnggaa

SEQ ID NO: 7026 - DNA, 1193 bp, Artificial Sequence
  chemically treated genomic DNA (Homo sapiens) CpG-island No: 7026
  unsure (5, 47, 627)
ttccnaacgataaaaaataaactcctcaaaaaaaccgttaaatatanacgaacaaaaaaataaataacgcacgcgcccttattaccccgaaaataaaaaataaacttaatcaaccgttatctccgaatatcgcgtacgcaattacacgtcattctcaaacgaaccgataactaaataaataaccgccgcaatcgtcacactaataatacgaatatacttctccgtatacaccatattatcgaaaaactaccaacgtataattatcgtcgaatataaacgctacttcgcaaacaaacaaaacttaataatatacctacgatcaataccaaacgtatttaccgaatcatacgccaaaatacgctattacttaaacgaaaacctactataccgccatcgaaacgaacacatacaaacaaaataaccgtaaaaaaaaacaatcaacgataatactctaacgaattcgaattctactataataacgaaaaaaaactacgtatcacgttcgcgctaaactactataatcgtaaaacactacactaaacgatcactaccgacgacttcaacaataaaacaatacaaaacgtcatactaaaaacgataaaacgccgcttcgaaaaatctccaaanaaaactcaatacaacaatcacccgctaaacaacccacgcgtaaaaacgtaatacaatttttcaacgtactactaaccgatacccccgacttaaacatcgacacgctaaacaaaaacgtaactcacgacaaccgctctatccaacctacgatactacgcgacgacgaaatcctcacccatccgatatttaatcgctaccacaacgaaaccgaaataatacgctatatacactcgctaaaacgtaaaaatctaacgctaaatcaaacgataatcccgctaaattcctacaccataaaactaaacgccgccgccgaaataatcccaatcacctaaccgaaatttaccgaactacacccgttctacccgccgaaacaaaccgaaaattatcaacaaataattacgcaactaactaactaactaataaaactaaccgattacgacgccgtttatatacaaccgaactctaacgcacaaaacgaatacgcgaacctactaacgattcgtcattatcataaaaaccgcaacgaaaaacatcgcgatatctacctaatcccgacttctacgcac

SEQ ID NO: 7027 - DNA, 1193 bp, Artificial Sequence
  chemically treated genomic DNA (Homo sapiens) CpG-island No: 7027
  unsure (5, 47, 627)
ttttnaacgatggaaaatgaattttttaaagaagtcgttgaatatgnacgggtaaaaaagtggatagcgtacgcgtttttattgtttcggggatggggagtaagtttagttagtcgttgttttcgggtgtcgcgtgcgtagttgtacgttatttttagacgaatcgatgattggatggatggtcgtcgtagtcgttatattgatgatacggatgtgttttttcgtatatattatgttatcggagagttgttaacgtatggttatcgtcgggtatgggcgttgtttcgtagataggtagaatttgatggtatgtttgcgattaatgttaaacgtgtttatcggattatgcgttagaatgcgttgttgtttgagcgaaaatttgttgtatcgttatcgaaacgggtatatataggtagagtggtcgtgaaagaaagtaattagcgatggtgttttgacgggttcgagttttgttgtgataacggagagagattgcgtgttacgttcgcgttggattgttgtgatcgtgaggtattgtattgggcggttattatcggcggttttaatagtgaaatagtataggacgttatgttgggagcggtggaacgtcgtttcgggggatttttagangggatttagtgtagtagttattcgttaaataatttacgcgtgaaaacgtaatgtagttttttaacgtgttgttggtcgatattttcggtttggatatcgatacgttggataaagacgtggtttacgatagtcgttttatttagtttgcgatgttgcgcgacgacgaaatttttatttattcggtgtttaatcgttattatagcgaaatcgaaatgatgcgttatatgtattcgttggagcgtaaagatttggcgttgaattaggcgatgatttcgttgggtttttgtattatgaaattgaacgtcgtcgtcgagatgattttaattatttggtcggaatttgtcgaattgtattcgttttgttcgtcggagtaggtcgaaggttattagtagatgattgcgtagttggttgattggttggtgaaattgatcggttacgacgtcgtttgtatgtagtcgaattttggcgtatagggcgaatacgcgggtttgttggcgattcgttattattatgaaagtcgtaacgaagggtatcgcgatatttgtttgatttcggtttttgcgtat

SEQ ID NO: 7028 - DNA, 1193 bp, Artificial Sequence
  chemically treated genomic DNA (Homo sapiens) CpG-island No: 7028
  unsure (567, 1147, 1189)
atacgcaaaaaccgaaatcaaacaaatatcgcgatacccttcgttacgactttcataataataacgaatcgccaacaaacccgcgtattcgccctatacgccaaaattcgactacatacaaacgacgtcgtaaccgatcaatttcaccaaccaatcaaccaactacgcaatcatctactaataaccttcgacctactccgacgaacaaaacgaatacaattcgacaaattccgaccaaataattaaaatcatctcgacgacgacgttcaatttcataatacaaaaacccaacgaaatcatcgcctaattcaacgccaaatctttacgctccaacgaatacatataacgcatcatttcgatttcgctataataacgattaaacaccgaataaataaaaatttcgtcgtcgcgcaacatcgcaaactaaataaaacgactatcgtaaaccacgtctttatccaacgtatcgatatccaaaccgaaaatatcgaccaacaacacgttaaaaaactacattacgttttcacgcgtaaattatttaacgaataactactacactaaatcccntctaaaaatcccccgaaacgacgttccaccgctcccaacataacgtcctatactatttcactattaaaaccgccgataataaccgcccaatacaatacctcacgatcacaacaatccaacgcgaacgtaacacgcaatctctctccgttatcacaacaaaactcgaacccgtcaaaacaccatcgctaattactttctttcacgaccactctacctatatatacccgtttcgataacgatacaacaaattttcgctcaaacaacaacgcattctaacgcataatccgataaacacgtttaacattaatcgcaaacataccatcaaattctacctatctacgaaacaacgcccatacccgacgataaccatacgttaacaactctccgataacataatatatacgaaaaaacacatccgtatcatcaatataacgactacgacgaccatccatccaatcatcgattcgtctaaaaataacgtacaactacgcacgcgacacccgaaaacaacgactaactaaacttactccccatccccgaaacaataaaaacgcgtacgctatccacttttttacccgtncatattcaacgacttctttaaaaaattcattttccatcgttnaaaa

SEQ ID NO: 7029 - DNA, 582 bp, Artificial Sequence
  chemically treated genomic DNA (Homo sapiens) CpG-island No: 7029
ttagttgtattagtaattgatggtttatcgttatatttttagcgaagtttacgtcgtttagcgagttggcggtaaaaatttcggttatgatatagtcgataatgttataaacgtcgtgtatatcgaagatatcgtagggattatttattcgtagtaagcgtttgagtatggtaacgttttataagttcgttagattagttattacgtcgataattaacgcgtcgttaattttaatgtagtcgtaggttggcgttacgtcgattagatcggtaatcgcgttagaatacgtttttagtagtgaaggtttattacgtagcgtttatttatcgaagatttagttaagaattgtcgtcgtcgttgcgattatagtatttataaatgttagtgtcgcgattttattcgtcgtgttcgttgattcggcgttaaagttaaattaatcgatatagagaatggtagtttcggtgaagattatcggtaggttgtgcgggttaaacgtttaatatcgttatcggcgtttagattaacgtttgttataaatattattaaagatttttaggttggattaaatttagtttttaatta

SEQ ID NO: 7030 - DNA, 582 bp, Artificial Sequence
  chemically treated genomic DNA (Homo sapiens) CpG-island No: 7030
taattaaaaactaaatttaatccaacctaaaaatctttaataatatttataacaaacgttaatctaaacgccgataacgatattaaacgtttaacccgcacaacctaccgataatcttcaccgaaactaccattctctatatcgattaatttaactttaacgccgaatcaacgaacacgacgaataaaatcgcgacactaacatttataaatactataatcgcaacgacgacgacaattcttaactaaatcttcgataaataaacgctacgtaataaaccttcactactaaaaacgtattctaacgcgattaccgatctaatcgacgtaacgccaacctacgactacattaaaattaacgacgcgttaattatcgacgtaataactaatctaacgaacttataaaacgttaccatactcaaacgcttactacgaataaataatccctacgatatcttcgatatacacgacgtttataacattatcgactatatcataaccgaaatttttaccgccaactcgctaaacgacgtaaacttcgctaaaaatataacgataaaccatcaattactaatacaactaa

SEQ ID NO: 7031 - DNA, 582 bp, Artificial Sequence
  chemically treated genomic DNA (Homo sapiens) CpG-island No: 7031
tgattgagagttggatttgatttaatttggggatttttgatggtgtttatggtaggcgttggtttgagcgtcggtagcggtattgagcgtttaattcgtataatttgtcgatggtttttatcgggattgttattttttatatcggttggtttggttttaacgtcgggttagcgggtacggcgaatgaaatcgcggtattggtatttgtgaatattgtggtcgtaacggcggcggtaatttttggttggattttcggtgaatgggcgttgcgtggtaagtttttattgttgggggcgtgttttggcgcgattgtcggtttggtcggcgtgacgttagtttgcggttatattggggttggcggcgcgttgattatcggcgtggtagttggtttggcgggtttgtggggcgttattatgtttaaacgtttgttgcgggtggatgatttttgcgatgttttcggtgtgtacggcgtttgtggtattgtcggttgtattatgatcgggatttttgtcgttagttcgttgggcggcgtgggtttcgttgaaggtgtgacgatgggttattagttgttggtatagttgg

SEQ ID NO: 7032 - DNA, 582 bp, Artificial Sequence
  chemically treated genomic DNA (Homo sapiens) CpG-island No: 7032
ccaactataccaacaactaataacccatcgtcacaccttcaacgaaacccacgccgcccaacgaactaacgacaaaaatcccgatcataatacaaccgacaataccacaaacgccgtacacaccgaaaacatcgcaaaaatcatccacccgcaacaaacgtttaaacataataacgccccacaaacccgccaaaccaactaccacgccgataatcaacgcgccgccaaccccaatataaccgcaaactaacgtcacgccgaccaaaccgacaatcgcgccaaaacacgcccccaacaataaaaacttaccacgcaacgcccattcaccgaaaatccaaccaaaaattaccgccgccgttacgaccacaatattcacaaataccaataccgcgatttcattcgccgtacccgctaacccgacgttaaaaccaaaccaaccgatataaaaaataacaatcccgataaaaaccatcgacaaattatacgaattaaacgctcaataccgctaccgacgctcaaaccaacgcctaccataaacaccatcaaaaatccccaaattaaatcaaatccaactctcaatca

SEQ ID NO: 7033 - DNA, 554 bp, Artificial Sequence
  chemically treated genomic DNA (Homo sapiens) CpG-island No: 7033
gttaattggattgtattttataattcggcggaatagtttcgcgatgtattgttcgtttcgttagtttggtaggaaggcggtagtatggcgtatttgttgggtatcgatgacgtaggtcgtgatgtgttgtcgcgtttgatgtacggtgcgcgtttgtcgttgttggttggttgtttggtagttgtgttatcgttgattatgggcgttattttcggtttgatcgtcggttattttggcggtttggtcgataatattattatgcgcgtggtcgatattatgttggcgttgttaagtttgttgttggcgttggtgttggtggtaattttcggttcgtcgattggtaacgtcgcgttggtattgattttcgttggtttgtcgtattatgtgcgtttaattcgcgtcgtcgtgttggtggaagttaatcgcgattacgttatcgcgtttcgcgtggcgggtgtttgggcgatgcgttagatgtttattaatatttttttagaattgttttgcgtcgttgattgtttaggcgtcgttcggtttttttaacgttattttcg

SEQ ID NO: 7034 - DNA, 554 bp, Artificial Sequence
  chemically treated genomic DNA (Homo sapiens) CpG-island No: 7034
cgaaaataacgttaaaaaaaccgaacgacgcctaaacaatcaacgacgcaaaacaattctaaaaaaatattaataaacatctaacgcatcgcccaaacacccgccacgcgaaacgcgataacgtaatcgcgattaacttccaccaacacgacgacgcgaattaaacgcacataatacgacaaaccaacgaaaatcaataccaacgcgacgttaccaatcgacgaaccgaaaattaccaccaacaccaacgccaacaacaaacttaacaacgccaacataatatcgaccacgcgcataataatattatcgaccaaaccgccaaaataaccgacgatcaaaccgaaaataacgcccataatcaacgataacacaactaccaaacaaccaaccaacaacgacaaacgcgcaccgtacatcaaacgcgacaacacatcacgacctacgtcatcgatacccaacaaatacgccatactaccgccttcctaccaaactaacgaaacgaacaatacatcgcgaaactattccgccgaattataaaatacaatccaattaac

SEQ ID NO: 7035 - DNA, 554 bp, Artificial Sequence
  chemically treated genomic DNA (Homo sapiens) CpG-island No: 7035
cgagaatggcgttagagaaatcgagcgacgtttgaataattagcggcgtaaggtagttttggaaaaatgttaataaatatttgacgtatcgtttaggtattcgttacgcgagacgcggtgacgtaatcgcggttaatttttattagtacggcggcgcgggttaagcgtatatagtgcggtaagttagcgaaggttagtgttagcgcggcgttattaatcgacgggtcgaaaattgttattagtattagcgttagtagtagatttggtagcgttagtatgatatcgattacgcgtataatgatgttatcgattaggtcgttaaagtaatcggcgattaggtcgagaataacgtttataattagcgataatataattattagatagttaattagtagcgataggcgcgtatcgtatattaggcgcgatagtatattacggtttacgttatcggtgtttagtaagtgcgttatgttgtcgtttttttgttaggttggcggggcgagtagtgtatcgcggaattgtttcgtcgggttatagggtgtaatttagttggt

SEQ ID NO: 7036 - DNA, 554 bp, Artificial Sequence
  chemically treated genomic DNA (Homo sapiens) CpG-island No: 7036
accaactaaattacaccctataacccgacgaaacaattccgcgatacactactcgccccgccaacctaacaaaaaaacgacaacataacgcacttactaaacaccgataacgtaaaccgtaatatactatcgcgcctaatatacgatacgcgcctatcgctactaattaactatctaataattatattatcgctaattataaacgttattctcgacctaatcgccgattactttaacgacctaatcgataacatcattatacgcgtaatcgatatcatactaacgctaccaaatctactactaacgctaatactaataacaattttcgacccgtcgattaataacgccgcgctaacactaaccttcgctaacttaccgcactatatacgcttaacccgcgccgccgtactaataaaaattaaccgcgattacgtcaccgcgtctcgcgtaacgaatacctaaacgatacgtcaaatatttattaacatttttccaaaactaccttacgccgctaattattcaaacgtcgctcgatttctctaacgccattctcg

SEQ ID NO: 7037 - DNA, 534 bp, Artificial Sequence
  chemically treated genomic DNA (Homo sapiens) CpG-island No: 7037
  unsure (399)
gttgtaggcgttttttttttatgcggtattggaagtaggtgaagggtaggcggatatttggtaggatgcggtgtagttgatgacgttatattcggcgaaaggtttggagttttcgtaggtgtttatcgttggtatggaagagggtatgtttttaagttagatgtcgttggatgaaggcgggcgtttggaagaagaacgtcgtttggtttacgttggcgtaattcgcgcgatgtagaaattgacgttgatttacgcggaaattcgtcgtttgtatggtaaagaggtttattatcgttcgtcgcgttttatcggcgagttgtcggaagagtgtgtggaagaggtgcgtttgcgcgttacggtaagtcgttcggttagttattagcggatgggtacgtcgantgtcgagaacgatagcggttataagttcggttagcgcgtacgttacgttaagtttggtgaaggtattattgttaatatggaaggtagcggtgagtatagtcgtttgtaggtggtattttagggttaggggtatta

SEQ ID NO: 7038 - DNA, 534 bp, Artificial Sequence
  chemically treated genomic DNA (Homo sapiens) CpG-island No: 7038
  unsure (136)
taatacccctaaccctaaaataccacctacaaacgactatactcaccgctaccttccatattaacaataataccttcaccaaacttaacgtaacgtacgcgctaaccgaacttataaccgctatcgttctcgacantcgacgtacccatccgctaataactaaccgaacgacttaccgtaacgcgcaaacgcacctcttccacacactcttccgacaactcgccgataaaacgcgacgaacgataataaacctctttaccatacaaacgacgaatttccgcgtaaatcaacgtcaatttctacatcgcgcgaattacgccaacgtaaaccaaacgacgttcttcttccaaacgcccgccttcatccaacgacatctaacttaaaaacataccctcttccataccaacgataaacacctacgaaaactccaaacctttcgccgaatataacgtcatcaactacaccgcatcctaccaaatatccgcctacccttcacctacttccaataccgcataaaaaaaaaacgcctacaac

SEQ ID NO: 7039 - DNA, 534 bp, Artificial Sequence
  chemically treated genomic DNA (Homo sapiens) CpG-island No: 7039
  unsure (136)
taatatttttggttttgaaatgttatttgtaaacggttatgtttatcgttgttttttatattgataatggtgtttttattaaatttagcgtggcgtacgcgttggtcgagtttgtagtcgttgtcgttttcgatantcggcgtatttattcgttgatggttgatcgggcggtttatcgtggcgcgtaggcgtattttttttatatattttttcggtagttcgtcgataaagcgcgacgggcgatggtaaatttttttattatatagacggcgggttttcgcgtaggttagcgttagtttttgtatcgcgcgggttacgttaacgtaggttagacggcgttttttttttagacgttcgtttttatttagcgatatttggtttgggaatatgtttttttttatattaacgataaatatttgcgggaattttaggtttttcgtcgagtgtagcgttattaattgtatcgtattttgttaggtattcgtttgttttttatttgtttttagtgtcgtatgggagaggaacgtttgtagt

SEQ ID NO: 7040 - DNA, 534 bp, Artificial Sequence
  chemically treated genomic DNA (Homo sapiens) CpG-island No: 7040
  unsure (399)
actacaaacgttcctctcccatacgacactaaaaacaaataaaaaacaaacgaatacctaacaaaatacgatacaattaataacgctacactcgacgaaaaacctaaaattcccgcaaatatttatcgttaatataaaaaaaaacatattcccaaaccaaatatcgctaaataaaaacgaacgtctaaaaaaaaaacgccgtctaacctacgttaacgtaacccgcgcgatacaaaaactaacgctaacctacgcgaaaacccgccgtctatataataaaaaaatttaccatcgcccgtcgcgctttatcgacgaactaccgaaaaaatatataaaaaaaatacgcctacgcgccacgataaaccgcccgatcaaccatcaacgaataaatacgccgantatcgaaaacgacaacgactacaaactcgaccaacgcgtacgccacgctaaatttaataaaaacaccattatcaatataaaaaacaacgataaacataaccgtttacaaataacatttcaaaaccaaaaatatta

SEQ ID NO: 7041 - DNA, 795 bp, Artificial Sequence
  chemically treated genomic DNA (Homo sapiens) CpG-island No: 7041
cgacgttatcggtgttgttaaaagaaggttagtacgacgtagcgtaaaaattgttcgttatttttttcgttaattaaatgtttgaggagcgttatgttgttagcgtggcgattcgtaataaggttgaagttttgcgtttggtacgattgttgtattagtaagaatcggtaaattttattcgtttggattaattaatttggtaattgatgtagaacgagtagttacgcgaagttgtcgatttattgttgtaacgttattttttttagcgcgatgcgcgtgttagttagtattttaatggcgcgattggcgtttttgttggaaagttatttttatttggttaacgttatgttaaggtggcgattttatcgaaatttttatcgttggcggagtaacgttagtggtaaagttagttgtcgggttattgtacgattattgttcggtaatagttcgtttgttgggttgatatgtcgtttttttacgatgtcgtcgtttgtgaatcgtttggataaagtgttatcggcgatacgttattcggttgtgcgcgttgtatgtatggttttaggtcgaattaacgattatcgagcgtttggtaatatcgtgcggtagtttattaggcgtattaggttgaggattacgttatcgtatttggcggtttggtagaaaattatgtttttacgatatgagtaatgaggattttgtttgttgttgttaatatcgtttagtgcggtaggaaatggtgcggttcgcgatcgttggttacgaataggtagaaaacgtggattgggaagttaatgt

SEQ ID NO: 7042 - DNA, 795 bp, Artificial Sequence
  chemically treated genomic DNA (Homo sapiens) CpG-island No: 7042
acattaacttcccaatccacgttttctacctattcgtaaccaacgatcgcgaaccgcaccatttcctaccgcactaaacgatattaacaacaacaaacaaaatcctcattactcatatcgtaaaaacataattttctaccaaaccgccaaatacgataacgtaatcctcaacctaatacgcctaataaactaccgcacgatattaccaaacgctcgataatcgttaattcgacctaaaaccatacatacaacgcgcacaaccgaataacgtatcgccgataacactttatccaaacgattcacaaacgacgacatcgtaaaaaaacgacatatcaacccaacaaacgaactattaccgaacaataatcgtacaataacccgacaactaactttaccactaacgttactccgccaacgataaaaatttcgataaaatcgccaccttaacataacgttaaccaaataaaaataactttccaacaaaaacgccaatcgcgccattaaaatactaactaacacgcgcatcgcgctaaaaaaaataacgttacaacaataaatcgacaacttcgcgtaactactcgttctacatcaattaccaaattaattaatccaaacgaataaaatttaccgattcttactaatacaacaatcgtaccaaacgcaaaacttcaaccttattacgaatcgccacgctaacaacataacgctcctcaaacatttaattaacgaaaaaaataacgaacaatttttacgctacgtcgtactaaccttcttttaacaacaccgataacgtcg

SEQ ID NO: 7043 - DNA, 795 bp, Artificial Sequence
  chemically treated genomic DNA (Homo sapiens) CpG-island No: 7043
gtattagttttttagtttacgttttttgtttgttcgtagttagcgatcgcgagtcgtattattttttgtcgtattgggcggtattggtagtagtaagtaagatttttattgtttatgtcgtgaagatatgattttttgttaggtcgttagatgcggtggcgtagtttttaatttgatacgtttgataggttatcgtacgatgttgttaggcgttcggtggtcgttgattcggtttgaagttatgtatataacgcgtatagtcgggtagcgtgtcgtcgataatattttgtttagacggtttataggcggcggtatcgtaggaaggcgatatattagtttagtaagcgaattattgtcgggtaatgatcgtgtaatagttcggtaattgattttgttattgacgttgtttcgttagcggtaagggtttcgataaaatcgttattttagtatggcgttgattaggtaaggatgattttttagtagagacgttagtcgcgttattaaagtattggttgatacgcgtatcgcgttggaaaggatagcgttgtagtaataaatcggtagtttcgcgtgattgttcgttttgtattagttgttaggttagttgatttaggcgggtaagatttgtcggtttttgttgatatagtaatcgtgttagacgtagagttttagttttgttacgggtcgttacgttgatagtataacgttttttaagtatttaattggcggggagggtggcgagtagtttttgcgttgcgtcgtattgatttttttttaatagtatcggtagcgtcg

SEQ ID NO: 7044 - DNA, 795 bp, Artificial Sequence
  chemically treated genomic DNA (Homo sapiens) CpG-island No: 7044
cgacgctaccgatactattaaaaaaaaatcaatacgacgcaacgcaaaaactactcgccaccctccccgccaattaaatacttaaaaaacgttatactatcaacgtaacgacccgtaacaaaactaaaactctacgtctaacacgattactatatcaacaaaaaccgacaaatcttacccgcctaaatcaactaacctaacaactaatacaaaacgaacaatcacgcgaaactaccgatttattactacaacgctatcctttccaacgcgatacgcgtatcaaccaatactttaataacgcgactaacgtctctactaaaaaatcatccttacctaatcaacgccatactaaaataacgattttatcgaaacccttaccgctaacgaaacaacgtcaataacaaaatcaattaccgaactattacacgatcattacccgacaataattcgcttactaaactaatatatcgccttcctacgataccgccgcctataaaccgtctaaacaaaatattatcgacgacacgctacccgactatacgcgttatatacataacttcaaaccgaatcaacgaccaccgaacgcctaacaacatcgtacgataacctatcaaacgtatcaaattaaaaactacgccaccgcatctaacgacctaacaaaaaatcatatcttcacgacataaacaataaaaatcttacttactactaccaataccgcccaatacgacaaaaaataatacgactcgcgatcgctaactacgaacaaacaaaaaacgtaaactaaaaaactaatac

SEQ ID NO: 7045 - DNA, 571 bp, Artificial Sequence
  chemically treated genomic DNA (Homo sapiens) CpG-island No: 7045
gttattcggttatatgttgagggtgttgttcgggtgtagtttcgggtcgggtaggcggttatttgtcgggtttgtggtatacgggatgcggatatttagattcgttgcggtggtgtgaacgtcggttagtttgtcggtggtgttgtagttgtaatttcgggtttggcgcgggttgttgatgcggatgagttcgtcgttgtcgttttaggtgtaatcgcggttagatagtaagttgtttaagtgttggttttgtaattgttcggtaggggtataagcggtggtgagtttataacggtcgaagttgcgtatcgtttttcggtgtaagcggtcgcgggtgtattttattagcggtgtgtcgtcgagttttatgtttgataagtaatcgttgtcgtaggttagttattttacggcgggtaggttgtacggtatatagcggttcgttagtttttgcgcgttggacgtatgtttggttttatgttggtaaaaatatgttttcgtttgtaggtgatgtatcgtttgacgtttatcggtaattcggtttttttattatatttgtgtgtgtatgtgtgtg

SEQ ID NO: 7046 - DNA, 571 bp, Artificial Sequence
  chemically treated genomic DNA (Homo sapiens) CpG-island No: 7046
cacacacatacacacacaaatataataaaaaaaccgaattaccgataaacgtcaaacgatacatcacctacaaacgaaaacatatttttaccaacataaaaccaaacatacgtccaacgcgcaaaaactaacgaaccgctatataccgtacaacctacccgccgtaaaataactaacctacgacaacgattacttatcaaacataaaactcgacgacacaccgctaataaaatacacccgcgaccgcttacaccgaaaaacgatacgcaacttcgaccgttataaactcaccaccgcttatacccctaccgaacaattacaaaaccaacacttaaacaacttactatctaaccgcgattacacctaaaacgacaacgacgaactcatccgcatcaacaacccgcgccaaacccgaaattacaactacaacaccaccgacaaactaaccgacgttcacaccaccgcaacgaatctaaatatccgcatcccgtataccacaaacccgacaaataaccgcctacccgacccgaaactacacccgaacaacaccctcaacatataaccgaataac

SEQ ID NO: 7047 - DNA, 571 bp, Artificial Sequence
  chemically treated genomic DNA (Homo sapiens) CpG-island No: 7047
tatatatatatatatatagatatgatgagaaagtcgggttatcggtgagcgttagacggtgtattatttgtagacgaaagtatgtttttgttagtatgagattagatatgcgtttaacgcgtaggggttggcgaatcgttgtatatcgtatagtttgttcgtcgtggaatggttgatttacggtagcggttatttgttaggtatgaaattcggcgatatatcgttggtggagtatattcgcgatcgtttgtatcgggaaacgatgcgtagtttcggtcgttatgaatttattatcgtttatatttttgtcgggtagttatagagttagtatttgaatagtttgttgtttgatcgcgattatatttggaacgataacggcgaatttattcgtattagtagttcgcgttagattcggagttatagttatagtattatcggtaggttgatcggcgtttatattatcgtagcgaatttggatattcgtatttcgtatgttatagattcggtaggtaatcgtttgttcgattcggagttgtattcggatagtatttttagtatgtggtcggataat

SEQ ID NO: 7048 - DNA, 571 bp, Artificial Sequence
  chemically treated genomic DNA (Homo sapiens) CpG-island No: 7048
attatccgaccacatactaaaaatactatccgaatacaactccgaatcgaacaaacgattacctaccgaatctataacatacgaaatacgaatatccaaattcgctacgataatataaacgccgatcaacctaccgataatactataactataactccgaatctaacgcgaactactaatacgaataaattcgccgttatcgttccaaatataatcgcgatcaaacaacaaactattcaaatactaactctataactacccgacaaaaatataaacgataataaattcataacgaccgaaactacgcatcgtttcccgatacaaacgatcgcgaatatactccaccaacgatatatcgccgaatttcatacctaacaaataaccgctaccgtaaatcaaccattccacgacgaacaaactatacgatatacaacgattcgccaacccctacgcgttaaacgcatatctaatctcatactaacaaaaacatactttcgtctacaaataatacaccgtctaacgctcaccgataacccgactttctcatcatatctatatatatatatatata

SEQ ID NO: 7049 - DNA, 1014 bp, Artificial Sequence
  chemically treated genomic DNA (Homo sapiens) CpG-island No: 7049
tcgtttgaataacgcgttaagcgcgatgagttcggtgagtaaagcggtgtagtaaatcgtaggtcggataagacgtttcggcgtcgtattcgataatgtgtaggcgttgatgtcggatgcggtgtaagtattttattcggtttatagatcggagttaaatatgtaaatcggtacgaattttagttcggtattttatttggaagataattatttgattttcggttagcggcgtttcggggatgcggtgacgcgtttggataatcgtcgtatcgttcgtacgtttcgtggtgtttatttcggttacgcgtttgaagaagttgcgaatcgatacggcgttggtggtgttattcgcgttttggttaattatttttagtacgtcgttttcgttaattacgttggcggtaagttgaatgtcgtcggttttttagtcgtacggtatcggtatttcgcgttcgttaaacggtatttgataatcggggatcgttatcgtttttaagatggcgcggcggattatgcgtttggtttgttcgtcgaggtaggtaaagttgtagtcgtttagattagttatggttttgtttttgttgtagacgtttgagtagttttagttcggtttggaaatcgacgtagtgggggagtttgaggtgtgagataaagtttgcggtttcgacgttgtcggtatgtgttagtacgaattttttattttgcgtcgggtttgtcgcgtgttcgtcgtatttcggggtttgtagagcgcgggtcgattatcgttatatttatgggttttggttcgtttatgtcgaatattagttcgttgtggcgtaggacgtttttttttatgttattgcgtagggtaattacgtaacgtcgttcggtgttaatatcgaagggttgaagcgtcgcggatttagtcgtgaggcgattatcgttattcgtaatgcgtataagttgatatttttgttgagtattagttatatattcgttattattttttattttttaattatggggatatagtat

SEQ ID NO: 7050 - DNA, 1014 bp, Artificial Sequence
  chemically treated genomic DNA (Homo sapiens) CpG-island No: 7050
atactatatccccataattaaaaaataaaaaataataacgaatatataactaatactcaacaaaaatatcaacttatacgcattacgaataacgataatcgcctcacgactaaatccgcgacgcttcaacccttcgatattaacaccgaacgacgttacgtaattaccctacgcaataacataaaaaaaaacgtcctacgccacaacgaactaatattcgacataaacgaaccaaaacccataaatataacgataatcgacccgcgctctacaaaccccgaaatacgacgaacacgcgacaaacccgacgcaaaataaaaaattcgtactaacacataccgacaacgtcgaaaccgcaaactttatctcacacctcaaactcccccactacgtcgatttccaaaccgaactaaaactactcaaacgtctacaacaaaaacaaaaccataactaatctaaacgactacaactttacctacctcgacgaacaaaccaaacgcataatccgccgcgccatcttaaaaacgataacgatccccgattatcaaataccgtttaacgaacgcgaaataccgataccgtacgactaaaaaaccgacgacattcaacttaccgccaacgtaattaacgaaaacgacgtactaaaaataattaaccaaaacgcgaataacaccaccaacgccgtatcgattcgcaacttcttcaaacgcgtaaccgaaataaacaccacgaaacgtacgaacgatacgacgattatccaaacgcgtcaccgcatccccgaaacgccgctaaccgaaaatcaaataattatcttccaaataaaataccgaactaaaattcgtaccgatttacatatttaactccgatctataaaccgaataaaatacttacaccgcatccgacatcaacgcctacacattatcgaatacgacgccgaaacgtcttatccgacctacgatttactacaccgctttactcaccgaactcatcgcgcttaacgcgttattcaaacga

SEQ ID NO: 7051 - DNA, 1014 bp, Artificial Sequence
  chemically treated genomic DNA (Homo sapiens) CpG-island No: 7051
gtattgtgtttttatggttggggggtggggggtggtggcgagtatatgattgatatttagtagaagtattagtttatacgtattgcggatagcggtaatcgttttacggttgaattcgcggcgttttagtttttcgatattgatatcgaacggcgttgcgtggttattttgcgtaatgatataaggagggacgttttgcgttataacgggttggtgttcggtatgagcgagttaaaatttatgaatatggcgatggtcgattcgcgttttgtaagtttcgaagtacggcgagtacgcgataggttcggcgtaggatgaagagttcgtgttggtatatgtcgataacgtcgaagtcgtaggttttgttttatattttaaatttttttattacgtcgatttttaggtcgaattggagttatttaaacgtttgtaataggagtagaattatggttaatttgagcggttataattttgtttatttcgacgagtagattaaacgtatgattcgtcgcgttattttaaaagcggtggcgattttcggttattaggtgtcgtttggcgggcgcgagatgtcgatgtcgtacggttggggaatcggcggtatttagtttatcgttagcgtgattggcgaaagcgacgtgttgaaggtgattgattagggcgcggatgatattattaacgtcgtgtcgattcgtaatttttttaagcgcgtgatcggggtaaatattacggaacgtacggacgatgcgacggttatttagacgcgttatcgtattttcgaaacgtcgttgatcgaagattagataattattttttaggtggggtatcgagttagagttcgtatcggtttgtatgtttggtttcggtttgtaggtcgaataaggtgtttgtatcgtattcggtattaacgtttgtatattgtcggatgcgacgtcggggcgttttattcgatttacgatttattgtatcgttttatttatcgaatttatcgcgtttagcgcgttgtttaggcgg

SEQ ID NO: 7052 - DNA, 1014 bp, Artificial Sequence
  chemically treated genomic DNA (Homo sapiens) CpG-island No: 7052
ccgcctaaacaacgcgctaaacgcgataaattcgataaataaaacgatacaataaatcgtaaatcgaataaaacgccccgacgtcgcatccgacaatatacaaacgttaataccgaatacgatacaaacaccttattcgacctacaaaccgaaaccaaacatacaaaccgatacgaactctaactcgataccccacctaaaaaataattatctaatcttcgatcaacgacgtttcgaaaatacgataacgcgtctaaataaccgtcgcatcgtccgtacgttccgtaatatttaccccgatcacgcgcttaaaaaaattacgaatcgacacgacgttaataatatcatccgcgccctaatcaatcaccttcaacacgtcgctttcgccaatcacgctaacgataaactaaataccgccgattccccaaccgtacgacatcgacatctcgcgcccgccaaacgacacctaataaccgaaaatcgccaccgcttttaaaataacgcgacgaatcatacgtttaatctactcgtcgaaataaacaaaattataaccgctcaaattaaccataattctactcctattacaaacgtttaaataactccaattcgacctaaaaatcgacgtaataaaaaaatttaaaatataaaacaaaacctacgacttcgacgttatcgacatataccaacacgaactcttcatcctacgccgaacctatcgcgtactcgccgtacttcgaaacttacaaaacgcgaatcgaccatcgccatattcataaattttaactcgctcataccgaacaccaacccgttataacgcaaaacgtccctccttatatcattacgcaaaataaccacgcaacgccgttcgatatcaatatcgaaaaactaaaacgccgcgaattcaaccgtaaaacgattaccgctatccgcaatacgtataaactaatacttctactaaatatcaatcatatactcgccaccaccccccaccccccaaccataaaaacacaatac

SEQ ID NO: 7053 - DNA, 592 bp, Artificial Sequence
  chemically treated genomic DNA (Homo sapiens) CpG-island No: 7053
ttttttttttgtttttttgtttgttttttttttttcggattttcgtttttttttcggagtggcgcgtcgggggtttcgtcgttggttaggcgtgatgttgtacgtggagatgttgacgttggtgtttttggtgttttggatgtgtgtgtttagttaggattcgggttttaaggtcgtcgtcgatcgttacgttgtttattggaatagtagtaattttaggtaagtcgataataggcggagagttagggttattcgggtttcggggttttgcggaaggagcggcggcggggatcggcgcgtattaatcgttggcggcgcgtattttcggagtttgcgtcgttcgggcgttgatggtttgaggcgtcggcgggaagcgttcgcgtcgcgtttttttttgttaagtcgtcgcggaaaggttaggtatttttgggagttttcggggttgtttagattaattgtttttgcggggcgtcgggagattcggaaaagggcgggagtcggggagtagggatttttttgttttttagtttcggtatttggttggtattcggttttcggcgcggggagtttttagtgtgcgtagtcgggagtt

SEQ ID NO: 7054 - DNA, 592 bp, Artificial Sequence
  chemically treated genomic DNA (Homo sapiens) CpG-island No: 7054
aactcccgactacgcacactaaaaactccccgcgccgaaaaccgaataccaaccaaataccgaaactaaaaaacaaaaaaatccctactccccgactcccgcccttttccgaatctcccgacgccccgcaaaaacaattaatctaaacaaccccgaaaactcccaaaaatacctaacctttccgcgacgacttaacaaaaaaaaacgcgacgcgaacgcttcccgccgacgcctcaaaccatcaacgcccgaacgacgcaaactccgaaaatacgcgccgccaacgattaatacgcgccgatccccgccgccgctccttccgcaaaaccccgaaacccgaataaccctaactctccgcctattatcgacttacctaaaattactactattccaataaacaacgtaacgatcgacgacgaccttaaaacccgaatcctaactaaacacacacatccaaaacaccaaaaacaccaacgtcaacatctccacgtacaacatcacgcctaaccaacgacgaaacccccgacgcgccactccgaaaaaaaaacgaaaatccgaaaaaaaaaaaacaaacaaaaaaacaaaaaaaaaa

SEQ ID NO: 7055 - DNA, 592 bp, Artificial Sequence
  chemically treated genomic DNA (Homo sapiens) CpG-island No: 7055
agttttcggttgcgtatattgggggtttttcgcgtcgggaatcggatgttagttagatgtcggggttgggaagtagagaagtttttatttttcggttttcgttttttttcgagtttttcggcgtttcgtagaagtagttggtttaggtagtttcggggatttttaggggtatttggttttttcgcggcggtttaataaagaggggcgcgacgcgagcgtttttcgtcgacgttttaagttattagcgttcgggcgacgtaggtttcgagggtgcgcgtcgttagcggttggtgcgcgtcgattttcgtcgtcgtttttttcgtagggtttcgaggttcgggtagttttggtttttcgtttgttatcggtttatttggggttgttgttgttttagtagatagcgtagcggtcggcgacggttttggagttcgggttttggttgaatatatatatttagagtattagaaatattagcgttaatatttttacgtgtaatattacgtttggttagcggcggagttttcgacgcgttatttcggggagagagcggggattcggagggagggaggtaggtaaagggatagagagagag

SEQ ID NO: 7056 - DNA, 592 bp, Artificial Sequence
  chemically treated genomic DNA (Homo sapiens) CpG-island No: 7056
ctctctctctatccctttacctacctccctccctccgaatccccgctctctccccgaaataacgcgtcgaaaactccgccgctaaccaaacgtaatattacacgtaaaaatattaacgctaatatttctaatactctaaatatatatattcaaccaaaacccgaactccaaaaccgtcgccgaccgctacgctatctactaaaacaacaacaaccccaaataaaccgataacaaacgaaaaaccaaaactacccgaacctcgaaaccctacgaaaaaaacgacgacgaaaatcgacgcgcaccaaccgctaacgacgcgcaccctcgaaacctacgtcgcccgaacgctaataacttaaaacgtcgacgaaaaacgctcgcgtcgcgcccctctttattaaaccgccgcgaaaaaaccaaatacccctaaaaatccccgaaactacctaaaccaactacttctacgaaacgccgaaaaactcgaaaaaaaacgaaaaccgaaaaataaaaacttctctacttcccaaccccgacatctaactaacatccgattcccgacgcgaaaaacccccaatatacgcaaccgaaaact

SEQ ID NO: 7057 - DNA, 501 bp, Artificial Sequence
  chemically treated genomic DNA (Homo sapiens) CpG-island No: 7057
aattgatcgataaagtgggttagttaggtaaaaagttgtatatcgggcgtagtcgtaatgattaggtagcgattgatttgaaattgtggtgtaaagatatcgttagcgagttattgacggttaatcggtagttgtaatcggcgttggtggaaatcgtataaaataattaggacgcggtaatgttaggttatatttatttgtaacgcgtttagtcggtgacgttcgcgtattggtgtttggtttatgttgagatgttggcgcgtgatgaaagtcgtttgtaggatgcgtttaagcgtttggatgttagttcgttaggttgtggcgcgttggcgggaacggtttatgaaatcgatcgtgaatagttagtaggttggttgggttttgtttcggcgattcgtaatagtttcgatagcgtttttgatcgtgattatgtgttggaattgttttttgttgtcgttatcggtatggtgtatttgtcgcgttttgttgaagatttgattt

SEQ ID NO: 7058 - DNA, 501 bp, Artificial Sequence
  chemically treated genomic DNA (Homo sapiens) CpG-island No: 7058
aaatcaaatcttcaacaaaacgcgacaaatacaccataccgataacgacaacaaaaaacaattccaacacataatcacgatcaaaaacgctatcgaaactattacgaatcgccgaaacaaaacccaaccaacctactaactattcacgatcgatttcataaaccgttcccgccaacgcgccacaacctaacgaactaacatccaaacgcttaaacgcatcctacaaacgactttcatcacgcgccaacatctcaacataaaccaaacaccaatacgcgaacgtcaccgactaaacgcgttacaaataaatataacctaacattaccgcgtcctaattattttatacgatttccaccaacgccgattacaactaccgattaaccgtcaataactcgctaacgatatctttacaccacaatttcaaatcaatcgctacctaatcattacgactacgcccgatatacaactttttacctaactaacccactttatcgatcaatt

SEQ ID NO: 7059 - DNA, 501 bp, Artificial Sequence
  chemically treated genomic DNA (Homo sapiens) CpG-island No: 7059
aaattagatttttagtaaaacgcgatagatgtattatgtcgatagcggtagtagaaagtagttttaatatatggttacggttagaaacgttgtcgagattgttacgggtcgtcgaagtaaagtttagttagtttgttaattgtttacggtcgattttataggtcgttttcgttagcgcgttatagtttagcgggttgatatttagacgtttaagcgtattttgtaaacggtttttattacgcgttagtattttaatataggttaggtattagtgcgcgaacgttatcggttgggcgcgttgtaggtgagtgtaatttggtattatcgcgttttgattgttttgtgcggtttttattagcgtcgattgtagttgtcggttagtcgttagtaattcgttaacggtatttttgtattatagttttaggttagtcgttatttgattattacggttacgttcggtatgtagttttttgtttaattggtttattttgtcgattagtt

SEQ ID NO: 7060 - DNA, 501 bp, Artificial Sequence
  chemically treated genomic DNA (Homo sapiens) CpG-island No: 7060
aactaatcgacaaaataaaccaattaaacaaaaaactacataccgaacgtaaccgtaataatcaaataacgactaacctaaaactataatacaaaaataccgttaacgaattactaacgactaaccgacaactacaatcgacgctaataaaaaccgcacaaaacaatcaaaacgcgataataccaaattacactcacctacaacgcgcccaaccgataacgttcgcgcactaatacctaacctatattaaaatactaacgcgtaataaaaaccgtttacaaaatacgcttaaacgtctaaatatcaacccgctaaactataacgcgctaacgaaaacgacctataaaatcgaccgtaaacaattaacaaactaactaaactttacttcgacgacccgtaacaatctcgacaacgtttctaaccgtaaccatatattaaaactactttctactaccgctatcgacataatacatctatcgcgttttactaaaaatctaattt

SEQ ID NO: 7061 - DNA, 604 bp, Artificial Sequence
  chemically treated genomic DNA (Homo sapiens) CpG-island No: 7061
  unsure (488)
attcggagatacggaaattagagtttttcgcgttagcgaggataaatcggatttatttcgaaagagattgttagttagtttgagtttttcgcgttagcggggataaatcgttgttggagttggttgtaaggtaagtcgtttagagtttttcgcgttagcggggataaatcggggggcgtatgatcgtaaatattatttttcgggagtttttcgcgttagcggggataaatcgggagtttatatataggtggaatgatggattacgagtttttcgcgttagcggggataaatcgttcggtagttatgtttgtaacgtttgaatcgagagtttttcgcgttagtagggataaatcggtaacgacggtgagattttacgtttgacgttggtgtttttcgtattagcggggataaatcgggcgtattggatgcgatgatggatattatttggagttttttcgtttttgcggtagaatttttagttgttattnttaaatttattaagacgttttcgttaatttttttattagaggtagtattattcgtataacgttaggcgaattgagttttgtatgtttgtagttttcgatagacgattttttcgttt

SEQ ID NO: 7062 - DNA, 604 bp, Artificial Sequence
  chemically treated genomic DNA (Homo sapiens) CpG-island No: 7062
  unsure (117)
aaacgaaaaaatcgtctatcgaaaactacaaacatacaaaactcaattcgcctaacgttatacgaataatactacctctaataaaaaaattaacgaaaacgtcttaataaatttaanaataacaactaaaaattctaccgcaaaaacgaaaaaactccaaataatatccatcatcgcatccaatacgcccgatttatccccgctaatacgaaaaacaccaacgtcaaacgtaaaatctcaccgtcgttaccgatttatccctactaacgcgaaaaactctcgattcaaacgttacaaacataactaccgaacgatttatccccgctaacgcgaaaaactcgtaatccatcattccacctatatataaactcccgatttatccccgctaacgcgaaaaactcccgaaaaataatatttacgatcatacgccccccgatttatccccgctaacgcgaaaaactctaaacgacttaccttacaaccaactccaacaacgatttatccccgctaacgcgaaaaactcaaactaactaacaatctctttcgaaataaatccgatttatcctcgctaacgcgaaaaactctaatttccgtatctccgaat

SEQ ID NO: 7063 - DNA, 604 bp, Artificial Sequence
  chemically treated genomic DNA (Homo sapiens) CpG-island No: 7063
  unsure (117)
aaacgaagggatcgtttatcgaggattgtaggtatgtaagatttaattcgtttgacgttatgcggataatgttatttttggtgaaggagttggcgaaggcgttttgatgggtttganaatggtagttgggagttttatcgtagaggcgggggaattttaagtgatatttattatcgtatttagtgcgttcggtttattttcgttgatgcggggaatattagcgttaggcgtgaaattttatcgtcgttgtcggtttatttttgttggcgcggggaattttcggtttaggcgttgtaaatatggttatcgggcggtttattttcgttaacgcggggaattcgtagtttattattttatttatgtgtgaattttcggtttattttcgttggcgcggggaattttcgggggataatgtttacggttatgcgtttttcggtttattttcgttggcgcggggaattttgggcggtttgttttgtagttagttttagtagcggtttattttcgttggcgcggggaatttaagttggttggtaatttttttcggggtgagttcggtttattttcgttggcgcggggaattttagttttcgtattttcggat

SEQ ID NO: 7064 - DNA, 604 bp, Artificial Sequence
  chemically treated genomic DNA (Homo sapiens) CpG-island No: 7064
  unsure (488)
atccgaaaatacgaaaactaaaattccccgcgccaacgaaaataaaccgaactcaccccgaaaaaaattaccaaccaacttaaattccccgcgccaacgaaaataaaccgctactaaaactaactacaaaacaaaccgcccaaaattccccgcgccaacgaaaataaaccgaaaaacgcataaccgtaaacattatcccccgaaaattccccgcgccaacgaaaataaaccgaaaattcacacataaataaaataataaactacgaattccccgcgttaacgaaaataaaccgcccgataaccatatttacaacgcctaaaccgaaaattccccgcgccaacaaaaataaaccgacaacgacgataaaatttcacgcctaacgctaatattccccgcatcaacgaaaataaaccgaacgcactaaatacgataataaatatcacttaaaattcccccgcctctacgataaaactcccaactaccattntcaaacccatcaaaacgccttcgccaactccttcaccaaaaataacattatccgcataacgtcaaacgaattaaatcttacatacctacaatcctcgataaacgatcccttcgttt

SEQ ID NO: 7065 - DNA, 569 bp, Artificial Sequence
  chemically treated genomic DNA (Homo sapiens) CpG-island No: 7065
  unsure (69)
gtcgcgttgtcgtgtcgtgcgggcggcgtcgcggtttgttgcgtacggttcggcgcgtacggtcgtgtngtgcgcggtcgttttgtcgggcgtcgtcgttcgtcgcgcgttcggttgtcgtcgtcgcgcgttcgtagtgcgtcgttgcgggattgtattgattaattgtatcgtatagcgtcgatttttgattttgttagtggttcgggaagcgtaatgcgttatgtggtatatcgaagaagtattacggaagcgcgttgggtttaaggtacgagttcgcgttcgcgatataattatatagtcgtggcgttggtatgttgaagattgtttaatagatgaagtagatcggtagagtagaagggggggtaagaacggacggacggagaggaaggacgtaggtggggaattgatagtgaattagggcgcgattaaaagttttttaaataagtcggtaattgaatagggaatgcgcgtgtgtacggtaaaaaatcgggacggagggaatggtaatagtagggcgtaagatttgaaatagtataggcggtgttttgattataggagaaatgtta

SEQ ID NO: 7066 - DNA, 569 bp, Artificial Sequence
  chemically treated genomic DNA (Homo sapiens) CpG-island No: 7066
  unsure (501)
taacatttctcctataatcaaaacaccgcctatactatttcaaatcttacgccctactattaccattccctccgtcccgattttttaccgtacacacgcgcattccctattcaattaccgacttatttaaaaaacttttaatcgcgccctaattcactatcaattccccacctacgtccttcctctccgtccgtccgttcttacccccccttctactctaccgatctacttcatctattaaacaatcttcaacataccaacgccacgactatataattatatcgcgaacgcgaactcgtaccttaaacccaacgcgcttccgtaatacttcttcgatataccacataacgcattacgcttcccgaaccactaacaaaatcaaaaatcgacgctatacgatacaattaatcaatacaatcccgcaacgacgcactacgaacgcgcgacgacgacaaccgaacgcgcgacgaacgacgacgcccgacaaaacgaccgcgcacnacacgaccgtacgcgccgaaccgtacgcaacaaaccgcgacgccgcccgcacgacacgacaacgcgac

SEQ ID NO: 7067 - DNA, 569 bp, Artificial Sequence
  chemically treated genomic DNA (Homo sapiens) CpG-island No: 7067
  unsure (501)
tggtattttttttgtaattaaagtatcgtttgtattattttaagttttgcgttttattgttattatttttttcgtttcggttttttgtcgtgtatacgcgtattttttatttagttatcggtttatttagggagtttttggtcgcgttttaatttattattaattttttatttgcgtttttttttttcgttcgttcgtttttatttttttttttgttttgtcgatttattttatttgttaagtagtttttagtatgttaacgttacggttgtatagttatatcgcgggcgcgggttcgtgttttaggtttaacgcgttttcgtggtgttttttcggtgtattatatggcgtattgcgtttttcgggttattggtaaaattaaaaatcggcgttatacgatgtagttagttagtgtagtttcgtagcgacgtattgcgagcgcgcgacgacgatagtcgagcgcgcggcgagcggcggcgttcgataggacggtcgcgtatngtacgatcgtgcgcgtcggatcgtacgtagtaggtcgcgacgtcgttcgtacggtacggtagcgcggt

SEQ ID NO: 7068 - DNA, 569 bp, Artificial Sequence
  chemically treated genomic DNA (Homo sapiens) CpG-island No: 7068
  unsure (69)
accgcgctaccgtaccgtacgaacgacgtcgcgacctactacgtacgatccgacgcgcacgatcgtacnatacgcgaccgtcctatcgaacgccgccgctcgccgcgcgctcgactatcgtcgtcgcgcgctcgcaatacgtcgctacgaaactacactaactaactacatcgtataacgccgatttttaattttaccaataacccgaaaaacgcaatacgccatataatacaccgaaaaaacaccacgaaaacgcgttaaacctaaaacacgaacccgcgcccgcgatataactatacaaccgtaacgttaacatactaaaaactacttaacaaataaaataaatcgacaaaacaaaaaaaaaaataaaaacgaacgaacgaaaaaaaaaaacgcaaataaaaaattaataataaattaaaacgcgaccaaaaactccctaaataaaccgataactaaataaaaaatacgcgtatacacgacaaaaaaccgaaacgaaaaaaataataacaataaaacgcaaaacttaaaataatacaaacgatactttaattacaaaaaaaatacca

SEQ ID NO: 7069 - DNA, 728 bp, Artificial Sequence
  chemically treated genomic DNA (Homo sapiens) CpG-island No: 7069
aattttatttcgcggacgttttaggtagcggatggcggcgggggggggaggttaggggatatttaggggataaattttttagatttcgaggtagtcggcgacggcgtttaatttttaaataaatagaataaatttttatttggaaaaggtttttttcggggtttttttgcgttcgcggtttagtttttttgtagacggttatcgtgggtttttcgtagggttgcggagtttcggagttatcgaggtgggaggtgtcggttacgcgcgtttttaggaatagagtattgttttgtagtttagtacgaagggtcggttggagcgggagcgcgaggtttattgtaagaggattaggagttagtaagttcggttttttttcgtttttatttttcgtgcgttcggggttaagatcgtttgttcggaatttgattagtgttcgttttcgttgtggttttgggatttcgcggtggtttttttttggggacgaacggtagtgttcgaaggatgttttatttattttcgtttttagatttgttgggtttcgataatatttagtgggtgtcgcgagttttcgggcgtagagtttagcgttcggttttcgagtttaatttcgcgtttcgacggttttggcgtttttcgttgcgttaaattgtttatcgcgtataggttggaagcgaagtcgggttttttttttttggtttgtagggtttttttaggttttttttgttcgg

SEQ ID NO: 7070 - DNA, 728 bp, Artificial Sequence
  chemically treated genomic DNA (Homo sapiens) CpG-island No: 7070
ccgaacaaaaaaaacctaaaaaaaccctacaaaccaaaaaaaaaaaacccgacttcgcttccaacctatacgcgataaacaatttaacgcaacgaaaaacgccaaaaccgtcgaaacgcgaaattaaactcgaaaaccgaacgctaaactctacgcccgaaaactcgcgacacccactaaatattatcgaaacccaacaaatctaaaaacgaaaataaataaaacatccttcgaacactaccgttcgtccccaaaaaaaaaccaccgcgaaatcccaaaaccacaacgaaaacgaacactaatcaaattccgaacaaacgatcttaaccccgaacgcacgaaaaataaaaacgaaaaaaaaccgaacttactaactcctaatcctcttacaataaacctcgcgctcccgctccaaccgacccttcgtactaaactacaaaacaatactctattcctaaaaacgcgcgtaaccgacacctcccacctcgataactccgaaactccgcaaccctacgaaaaacccacgataaccgtctacaaaaaaactaaaccgcgaacgcaaaaaaaccccgaaaaaaaccttttccaaataaaaatttattctatttatttaaaaattaaacgccgtcgccgactacctcgaaatctaaaaaatttatcccctaaatatcccctaacctcccccccccgccgccatccgctacctaaaacgtccgcgaaataaaatt

SEQ ID NO: 7071 - DNA, 728 bp, Artificial Sequence
  chemically treated genomic DNA (Homo sapiens) CpG-island No: 7071
tcggataggaaaggtttggagggattttgtagattaggaggagggggttcgatttcgtttttagtttgtgcgcggtggatagtttagcgtagcgggaagcgttaaggtcgtcggggcgcgggattgagttcgagagtcggacgttggattttgcgttcgggaattcgcggtatttattgggtattgtcgggatttagtaagtttaggaacgggggtgggtagagtatttttcgggtattgtcgttcgtttttaaaagaagattatcgcggggttttagggttatagcgaggacgggtattggttagatttcggataggcggttttggtttcgggcgtacgaaaggtggagacgaagaaaagtcggatttattggtttttgatttttttgtagtgggtttcgcgttttcgttttagtcggtttttcgtgttaaattgtagggtagtgttttgtttttgaggacgcgcgtggtcggtattttttatttcggtgatttcgagatttcgtagttttgcggagagtttacgatggtcgtttgtagaggagttggatcgcgggcgtaggaagatttcggggaaggttttttttaagtaggagtttgttttatttatttgggaattggacgtcgtcgtcggttgtttcgaagtttgaggaatttgttttttaaatgttttttggtttttttttttcgtcgttattcgttgtttgggacgttcgcggggtggagtt

SEQ ID NO: 7072 - DNA, 728 bp, Artificial Sequence
  chemically treated genomic DNA (Homo sapiens) CpG-island No: 7072
aactccaccccgcgaacgtcccaaacaacgaataacgacgaaaaaaaaaaaccaaaaaacatttaaaaaacaaattcctcaaacttcgaaacaaccgacgacgacgtccaattcccaaataaataaaacaaactcctacttaaaaaaaaccttccccgaaatcttcctacgcccgcgatccaactcctctacaaacgaccatcgtaaactctccgcaaaactacgaaatctcgaaatcaccgaaataaaaaataccgaccacgcgcgtcctcaaaaacaaaacactaccctacaatttaacacgaaaaaccgactaaaacgaaaacgcgaaacccactacaaaaaaatcaaaaaccaataaatccgacttttcttcgtctccacctttcgtacgcccgaaaccaaaaccgcctatccgaaatctaaccaatacccgtcctcgctataaccctaaaaccccgcgataatcttcttttaaaaacgaacgacaatacccgaaaaatactctacccacccccgttcctaaacttactaaatcccgacaatacccaataaataccgcgaattcccgaacgcaaaatccaacgtccgactctcgaactcaatcccgcgccccgacgaccttaacgcttcccgctacgctaaactatccaccgcgcacaaactaaaaacgaaatcgaaccccctcctcctaatctacaaaatccctccaaacctttcctatccga

SEQ ID NO: 7073 - DNA, 1059 bp, Artificial Sequence
  chemically treated genomic DNA (Homo sapiens) CpG-island No: 7073
ggttcgcgcggttacggtttttcgtgatagtgtttgtaaagcgcggagggcgtttcggagaaggcggcgtatttgttagggtagggttttagggcggcgtttgcggagaaggggtatatagtggtttggtcgaagggcgttaagggcgcggcgtttacgggcgcggttaggttttggttttggttgaggaaggttattaggcgtcgtatttcgtttagggtttgcgtttgtatgaggatatagtttttggcgagtagtagcgtggcgattttggagagtttgcgtatcgacgggttgtgcgcgtaggggatgacggttcgtagttcgtttagcgcgtcgtttaggtcgtgtatgcgtcgtcgttcgcgcgcgttgatgttgagtcgtagagatcgttgttttcgcggtcgtcgtcgttcgttcgtcgcgttttttggttcgcgtcgtcgtcgtcgttgttcgaaggcgtcgttttcgttttcgttttgttcgtcgttgtttttcgtcgtttgagttggggcgcgaggtgtaggcgtcgcggggaggtcgtcgttcgggttcggagtgtcgtagtcgcgggtcgtttcgggttttcgcgtcgtttcgtaggcgagattcgtagtcgtcgtcgcgtagtcgtggtttagtgttaggtacgcgtttttcgatagcgatttgagttcggttatggtcgcgtcgtttgggttcgggggttcgtcgggtgggcggatgtttatgtgggtgagtagttttcgaggtcggttcgagttcgtcgttgtcgttgtcgttgcgatgaggttttcggttttgcgcgtcggtttggtttgtttgcgggttttagagtttcggcgttcgttgtttttttcgtttttttttttttttttatttttttttttttttagtcgcgacgcgtagggggcgggttttatttttttttcgttttcgtttcggttttaagtcgcggaggcgttcggtgggatttcgttgttgtttaattaggggggatcgggtgagtttttttttttggagtcgggttttattagcgtcgtaggtttatag

SEQ ID NO: 7074 - DNA, 1059 bp, Artificial Sequence
  chemically treated genomic DNA (Homo sapiens) CpG-island No: 7074
ctataaacctacgacgctaataaaacccgactccaaaaaaaaaaactcacccgatcccccctaattaaacaacaacgaaatcccaccgaacgcctccgcgacttaaaaccgaaacgaaaacgaaaaaaaaataaaacccgccccctacgcgtcgcgactaaaaaaaaaaaaaaataaaaaaaaaaaaaaaaacgaaaaaaacaacgaacgccgaaactctaaaacccgcaaacaaaccaaaccgacgcgcaaaaccgaaaacctcatcgcaacgacaacgacaacgacgaactcgaaccgacctcgaaaactactcacccacataaacatccgcccacccgacgaacccccgaacccaaacgacgcgaccataaccgaactcaaatcgctatcgaaaaacgcgtacctaacactaaaccacgactacgcgacgacgactacgaatctcgcctacgaaacgacgcgaaaacccgaaacgacccgcgactacgacactccgaacccgaacgacgacctccccgcgacgcctacacctcgcgccccaactcaaacgacgaaaaacaacgacgaacaaaacgaaaacgaaaacgacgccttcgaacaacgacgacgacgacgcgaaccaaaaaacgcgacgaacgaacgacgacgaccgcgaaaacaacgatctctacgactcaacatcaacgcgcgcgaacgacgacgcatacacgacctaaacgacgcgctaaacgaactacgaaccgtcatcccctacgcgcacaacccgtcgatacgcaaactctccaaaatcgccacgctactactcgccaaaaactatatcctcatacaaacgcaaaccctaaacgaaatacgacgcctaataaccttcctcaaccaaaaccaaaacctaaccgcgcccgtaaacgccgcgcccttaacgcccttcgaccaaaccactatataccccttctccgcaaacgccgccctaaaaccctaccctaacaaatacgccgccttctccgaaacgccctccgcgctttacaaacactatcacgaaaaaccgtaaccgcgcgaacc

SEQ ID NO: 7075 - DNA, 1059 bp, Artificial Sequence
  chemically treated genomic DNA (Homo sapiens) CpG-island No: 7075
ttgtgagtttgcggcgttggtggagttcggttttaggaagaggagtttattcggttttttttgattggatagtagcgaggttttatcgggcgttttcgcggtttaaaatcgaagcgggggcgagggggaggtagagttcgttttttgcgcgtcgcggttgggagggagaggaggtgggagagaaggaagaggcggaggaggtagcgggcgtcgaggttttgggattcgtaggtaagttagatcgacgcgtagagtcgggagttttatcgtagcggtagcggtagcggcgggttcgggtcggtttcgggggttgtttatttatatgagtattcgtttattcggcgagttttcgagtttaggcggcgcggttatggtcgagtttaagtcgttgtcgggggacgcgtatttggtattaagttacggttacgcggcggcggttgcgggtttcgtttacggggcggcgcgagaattcgaagcggttcgcggttacggtatttcgggttcgggcggcgattttttcgcggcgtttgtatttcgcgttttagtttaggcggcggagagtagcggcgaatagagcggggacgaggacgacgttttcgagtagcggcggcggcggcgcgggttagggagcgcggcggacgggcggcggcggtcgcgagagtagcggtttttgcggtttagtattaacgcgcgcgagcggcggcgtatgtacgatttaaacgacgcgttggacgggttgcgagtcgttattttttacgcgtatagttcgtcggtgcgtaagttttttaagatcgttacgttgttgttcgttaagaattatatttttatgtaggcgtaggttttggacgagatgcggcgtttggtggttttttttaattagggttagggtttggtcgcgttcgtaaacgtcgcgtttttgacgtttttcggttaggttattgtgtgtttttttttcgtaggcgtcgttttggggttttgttttgataagtgcgtcgtttttttcgggacgtttttcgcgttttgtaaatattgttacgagaagtcgtgatcgcgcgggtt

SEQ ID NO: 7076 - DNA, 1059 bp, Artificial Sequence
  chemically treated genomic DNA (Homo sapiens) CpG-island No: 7076
aacccgcgcgatcacgacttctcgtaacaatatttacaaaacgcgaaaaacgtcccgaaaaaaacgacgcacttatcaaaacaaaaccccaaaacgacgcctacgaaaaaaaaacacacaataacctaaccgaaaaacgtcaaaaacgcgacgtttacgaacgcgaccaaaccctaaccctaattaaaaaaaaccaccaaacgccgcatctcgtccaaaacctacgcctacataaaaatataattcttaacgaacaacaacgtaacgatcttaaaaaacttacgcaccgacgaactatacgcgtaaaaaataacgactcgcaacccgtccaacgcgtcgtttaaatcgtacatacgccgccgctcgcgcgcgttaatactaaaccgcaaaaaccgctactctcgcgaccgccgccgcccgtccgccgcgctccctaacccgcgccgccgccgccgctactcgaaaacgtcgtcctcgtccccgctctattcgccgctactctccgccgcctaaactaaaacgcgaaatacaaacgccgcgaaaaaatcgccgcccgaacccgaaataccgtaaccgcgaaccgcttcgaattctcgcgccgccccgtaaacgaaacccgcaaccgccgccgcgtaaccgtaacttaataccaaatacgcgtcccccgacaacgacttaaactcgaccataaccgcgccgcctaaactcgaaaactcgccgaataaacgaatactcatataaataaacaacccccgaaaccgacccgaacccgccgctaccgctaccgctacgataaaactcccgactctacgcgtcgatctaacttacctacgaatcccaaaacctcgacgcccgctacctcctccgcctcttccttctctcccacctcctctccctcccaaccgcgacgcgcaaaaaacgaactctacctccccctcgcccccgcttcgattttaaaccgcgaaaacgcccgataaaacctcgctactatccaatcaaaaaaaaccgaataaactcctcttcctaaaaccgaactccaccaacgccgcaaactcacaa

SEQ ID NO: 7077 - DNA, 842 bp, Artificial Sequence
  chemically treated genomic DNA (Homo sapiens) CpG-island No: 7077
ttgtagcgttagtcgtttttgtagtgtcggaatttttcgaaggtacgttagaagttaagtcggttatttcgatcgtatttaaggttcgggaggaagcgtcgaggttttcgagaatgtttagggaaattagttgcgtttataagttagttacgtagttttcgagtttcgggtcgtattcgtttaggttagttttgcgttttttttcgcgagcggtcgtttcgatttttattttcggaatcgttttagtcgcgattatcgagtgttcgttagttttttcgattttacgtagtttattagggtcggcgtttgaggttcgcgttttaggtcgcggcggttttgatcggtttcgttcgttcgttcgttcgttcgttcgttttttttttttcgcggtcgttattttttcggcgggagcggtttgtgcgggattcgcggttttcgttagtcgggtttcgatgtcggtttcgtttcgttttcgagggcggtttaagcggcggtcggtttttttattcggcgttcgggacgttatttatcgtaggtcgtaggtttttagggtttcgtagttattttttcgaacgtcgcggagtgggcggacggttatcgagatggcgcggggttagagcggcgttttcgcgcggcgggcggaggacgagatcggttatcgagacgttgcggggttagagcggagttcgggttgcgaagttcggtttcggattgcgcgtatgcgttcgttttttatatttgtatttcggacgcgtttttcgggtttgtattgataatgatttgtttgtattttttgtggatattttattttttcgattttaagagtgaaagttggggtagtg

SEQ ID NO: 7078 - DNA, 842 bp, Artificial Sequence
  chemically treated genomic DNA (Homo sapiens) CpG-island No: 7078
cactaccccaactttcactcttaaaatcgaaaaaataaaatatccacaaaaaatacaaacaaatcattatcaatacaaacccgaaaaacgcgtccgaaatacaaatataaaaaacgaacgcatacgcgcaatccgaaaccgaacttcgcaacccgaactccgctctaaccccgcaacgtctcgataaccgatctcgtcctccgcccgccgcgcgaaaacgccgctctaaccccgcgccatctcgataaccgtccgcccactccgcgacgttcgaaaaaataactacgaaaccctaaaaacctacgacctacgataaataacgtcccgaacgccgaataaaaaaaccgaccgccgcttaaaccgccctcgaaaacgaaacgaaaccgacatcgaaacccgactaacgaaaaccgcgaatcccgcacaaaccgctcccgccgaaaaaataacgaccgcgaaaaaaaaaaaacgaacgaacgaacgaacgaacgaacgaaaccgatcaaaaccgccgcgacctaaaacgcgaacctcaaacgccgaccctaataaactacgtaaaatcgaaaaaactaacgaacactcgataatcgcgactaaaacgattccgaaaataaaaatcgaaacgaccgctcgcgaaaaaaaacgcaaaactaacctaaacgaatacgacccgaaactcgaaaactacgtaactaacttataaacgcaactaatttccctaaacattctcgaaaacctcgacgcttcctcccgaaccttaaatacgatcgaaataaccgacttaacttctaacgtaccttcgaaaaattccgacactacaaaaacgactaacgctacaa

SEQ ID NO: 7079 - DNA, 842 bp, Artificial Sequence
  chemically treated genomic DNA (Homo sapiens) CpG-island No: 7079
tattgttttagtttttatttttggagtcggggaaataaggtgtttataaaggatgtaagtaagttattgttagtgtagattcgaagggcgcgttcggagtgtaggtatgaaagacgggcgtatgcgcgtagttcggggtcgggtttcgtagttcgggtttcgttttagtttcgtagcgtttcggtggtcggtttcgtttttcgttcgtcgcgcgggggcgtcgttttagtttcgcgttatttcggtggtcgttcgtttatttcgcggcgttcggggaaatggttgcgagattttagaggtttgcggtttgcggtaagtggcgtttcgggcgtcgggtagaagagtcggtcgtcgtttgggtcgttttcgggagcggggcggggtcggtatcggagttcggttggcgagagtcgcggatttcgtataggtcgttttcgtcgagaagatggcggtcgcggaagggaaggagcgggcgggcgggcgggcgagcgggcggggtcggttagagtcgtcgcggtttggggcgcgggttttagacgtcggttttggtgggttgcgtgaggtcgaggggattggcgagtattcggtggtcgcggttggaacggtttcgagggtgggagtcggggcggtcgttcgcggggaagagcgtagggttggtttgggcgagtgcggttcggggttcgggggttgcgtagttggtttgtaagcgtagttggtttttttaggtattttcggggatttcggcgttttttttcgggttttgggtgcggtcggggtggtcggtttagtttttggcgtgttttcgggggatttcggtattgtaggggcggttggcgttgtag

SEQ ID NO: 7080 - DNA, 842 bp, Artificial Sequence
  chemically treated genomic DNA (Homo sapiens) CpG-island No: 7080
ctacaacgccaaccgcccctacaataccgaaatcccccgaaaacacgccaaaaactaaaccgaccaccccgaccgcacccaaaacccgaaaaaaaacgccgaaatccccgaaaatacctaaaaaaaccaactacgcttacaaaccaactacgcaacccccgaaccccgaaccgcactcgcccaaaccaaccctacgctcttccccgcgaacgaccgccccgactcccaccctcgaaaccgttccaaccgcgaccaccgaatactcgccaatcccctcgacctcacgcaacccaccaaaaccgacgtctaaaacccgcgccccaaaccgcgacgactctaaccgaccccgcccgctcgcccgcccgcccgcccgctccttcccttccgcgaccgccatcttctcgacgaaaacgacctatacgaaatccgcgactctcgccaaccgaactccgataccgaccccgccccgctcccgaaaacgacccaaacgacgaccgactcttctacccgacgcccgaaacgccacttaccgcaaaccgcaaacctctaaaatctcgcaaccatttccccgaacgccgcgaaataaacgaacgaccaccgaaataacgcgaaactaaaacgacgcccccgcgcgacgaacgaaaaacgaaaccgaccaccgaaacgctacgaaactaaaacgaaacccgaactacgaaacccgaccccgaactacgcgcatacgcccgtctttcatacctacactccgaacgcgcccttcgaatctacactaacaataacttacttacatcctttataaacaccttatttccccgactccaaaaataaaaactaaaacaata

SEQ ID NO: 7081 - DNA, 829 bp, Artificial Sequence
  chemically treated genomic DNA (Homo sapiens) CpG-island No: 7081
tttcgtttgaggggcggtcgcggatattcggcgtttttttttcgttttatttcgtgcggttttacgtaaacgataggaaaaaagttgggattttcgttttcgatttagtgtagacgtcgttatttcggttttagattttcgcgttttaacgttttcgtagtagttattttgttagagggtcgacgttttttgattttggcgttaattcgtagtgcgtggtcgtcgcgaggggagttttgcgtaagtacggaagttgaggtttcgcgttttcgggaggtcgttcgtttcgttttttcgcgggggcgttttattggttatcggttcgcgttttcgcgtttttttgttgtcgcgagaggtgttgaggggcggttttcggtgcgtttgttttttcgtttttcgttttcgttttcgttttcgttttcgtcgcggtttttatttttgtttttttttattcgggcgtttcggcggtcgttatttttttttagtttaggagaggttgcggagtcgtagtcgtttagatcgcgtagcgcgggaggtaggtttcgtacggtaagatggcggcggcgggttcgggcggtcgggtcgagcgtttttcggggtcgggtcgggcgggtaggcgggatgtggtcggggtgcgcgtcgttttcgttttgggggttttggaagcgtcggcgttggtaggtgcggaattggggcgcgtagtgagtttaggttcggacggtcgtttcgcgtcggtgtttagggggtagttagggtttagtttttaggcgcgcggttttaggcgttggtgttttggggcggtttcggttagtttgaggggcggcggtag

SEQ ID NO: 7082 - DNA, 829 bp, Artificial Sequence
  chemically treated genomic DNA (Homo sapiens) CpG-island No: 7082
ctaccgccgcccctcaaactaaccgaaaccgccccaaaacaccaacgcctaaaaccgcgcgcctaaaaactaaaccctaactaccccctaaacaccgacgcgaaacgaccgtccgaacctaaactcactacgcgccccaattccgcacctaccaacgccgacgcttccaaaacccccaaaacgaaaacgacgcgcaccccgaccacatcccgcctacccgcccgacccgaccccgaaaaacgctcgacccgaccgcccgaacccgccgccgccatcttaccgtacgaaacctacctcccgcgctacgcgatctaaacgactacgactccgcaacctctcctaaactaaaaaaaaataacgaccgccgaaacgcccgaataaaaaaaaacaaaaataaaaaccgcgacgaaaacgaaaacgaaaacgaaaacgaaaaacgaaaaaacaaacgcaccgaaaaccgcccctcaacacctctcgcgacaacaaaaaaacgcgaaaacgcgaaccgataaccaataaaacgcccccgcgaaaaaacgaaacgaacgacctcccgaaaacgcgaaacctcaacttccgtacttacgcaaaactcccctcgcgacgaccacgcactacgaattaacgccaaaatcaaaaaacgtcgaccctctaacaaaataactactacgaaaacgttaaaacgcgaaaatctaaaaccgaaataacgacgtctacactaaatcgaaaacgaaaatcccaacttttttcctatcgtttacgtaaaaccgcacgaaataaaacgaaaaaaaaacgccgaatatccgcgaccgcccctcaaacgaaa

SEQ ID NO: 7083 - DNA, 829 bp, Artificial Sequence
  chemically treated genomic DNA (Homo sapiens) CpG-island No: 7083
ttatcgtcgttttttaggttggtcgggatcgttttagaatattagcgtttgaggtcgcgcgtttggaggttgagttttgattgttttttgggtatcggcgcggggcggtcgttcgggtttggatttattgcgcgttttaatttcgtatttgttagcgtcggcgtttttaaggtttttagagcgggggcggcgcgtatttcggttatatttcgtttgttcgttcggttcggtttcgggagacgttcggttcggtcgttcgggttcgtcgtcgttattttatcgtgcggaatttgtttttcgcgttgcgcggtttgggcggttgcggtttcgtagttttttttgggttggggagaggtggcggtcgtcggggcgttcgagtagaaggaggtagaggtgggggtcgcggcggaggcgggggcgggggcgggggcggggagcgggagggtaggcgtatcggaggtcgttttttagtatttttcgcgatagtaagagagcgcgagagcgcgagtcgatgattaatgaagcgttttcgcgagggggcggggcggacggtttttcggaagcgcggaattttagttttcgtatttgcgtagaatttttttcgcggcgattacgtattacgggttggcgttagagttaaaaggcgtcggttttttggtaagatggttgttgcggaggcgttggagcgcggaaatttggaatcgggatggcgacgtttatattgagtcggaggcgaaggttttagttttttttttgtcgtttgcgtgaggtcgtacggggtggggcgggggaaaggcgtcgggtgttcgcggtcgttttttagacgggg

SEQ ID NO: 7084 - DNA, 829 bp, Artificial Sequence
  chemically treated genomic DNA (Homo sapiens) CpG-island No: 7084
ccccgtctaaaaaacgaccgcgaacacccgacgcctttcccccgccccaccccgtacgacctcacgcaaacgacaaaaaaaaaactaaaaccttcgcctccgactcaatataaacgtcgccatcccgattccaaatttccgcgctccaacgcctccgcaacaaccatcttaccaaaaaaccgacgccttttaactctaacgccaacccgtaatacgtaatcgccgcgaaaaaaattctacgcaaatacgaaaactaaaattccgcgcttccgaaaaaccgtccgccccgccccctcgcgaaaacgcttcattaatcatcgactcgcgctctcgcgctctcttactatcgcgaaaaatactaaaaaacgacctccgatacgcctaccctcccgctccccgcccccgcccccgcccccgcctccgccgcgacccccacctctacctccttctactcgaacgccccgacgaccgccacctctccccaacccaaaaaaaactacgaaaccgcaaccgcccaaaccgcgcaacgcgaaaaacaaattccgcacgataaaataacgacgacgaacccgaacgaccgaaccgaacgtctcccgaaaccgaaccgaacgaacaaacgaaatataaccgaaatacgcgccgcccccgctctaaaaaccttaaaaacgccgacgctaacaaatacgaaattaaaacgcgcaataaatccaaacccgaacgaccgccccgcgccgatacccaaaaaacaatcaaaactcaacctccaaacgcgcgacctcaaacgctaatattctaaaacgatcccgaccaacctaaaaaacgacgataa

SEQ ID NO: 7085 - DNA, 658 bp, Artificial Sequence
  chemically treated genomic DNA (Homo sapiens) CpG-island No: 7085
tagttcgcgttattagtttcgtttttaataaaataggcgatggcggggcgggttcggagtgtttagataattttttaagagttttagataattttatttattagttcgttcgcgggatagtatcgtttattagtttcggggttttcgagtgcggaaattttatttttgcggtggggtttggacgttcgagagttttttttagtaaagtttttgaagaggagcgaggcggtttcgaggaatcgcggaggaagtgaagttagtttcgttattttttagatcggttttttatttcggttacgcgttattatagagttgaaggaggtttagagagtcgcgcgtgtcgcgttatcgagatcggaaggaggcggtatagatttggaggacgatcgcggagttgagcgtttagagtcgtcgaattatagagatcggaaataggagcgagcggtagcgtcggaaaggaggttaagagcgcgggcggcgaggtaagatggcggtaattaagaggaaacggcgtggaggttttgtagtttaggcgaagaagttaaaaagaaacgaaatagatgcggagtcgttagttaagcggtacgttatagtagaggaggtggaggaagaagagagggatcggattttaggtttcgtttgtaaggtaggaggggat

SEQ ID NO: 7086 - DNA, 658 bp, Artificial Sequence
  chemically treated genomic DNA (Homo sapiens) CpG-island No: 7086
atcccctcctaccttacaaacgaaacctaaaatccgatccctctcttcttcctccacctcctctactataacgtaccgcttaactaacgactccgcatctatttcgtttctttttaacttcttcgcctaaactacaaaacctccacgccgtttcctcttaattaccgccatcttacctcgccgcccgcgctcttaacctcctttccgacgctaccgctcgctcctatttccgatctctataattcgacgactctaaacgctcaactccgcgatcgtcctccaaatctataccgcctccttccgatctcgataacgcgacacgcgcgactctctaaacctccttcaactctataataacgcgtaaccgaaataaaaaaccgatctaaaaaataacgaaactaacttcacttcctccgcgattcctcgaaaccgcctcgctcctcttcaaaaactttactaaaaaaaactctcgaacgtccaaaccccaccgcaaaaataaaatttccgcactcgaaaaccccgaaactaataaacgatactatcccgcgaacgaactaataaataaaattatctaaaactcttaaaaaattatctaaacactccgaacccgccccgccatcgcctattttattaaaaacgaaactaataacgcgaacta

SEQ ID NO: 7087 - DNA, 658 bp, Artificial Sequence
  chemically treated genomic DNA (Homo sapiens) CpG-island No: 7087
atttttttttattttgtaaacggggtttgggattcggttttttttttttttttttattttttttgttgtggcgtgtcgtttagttggcggtttcgtatttatttcgtttttttttggttttttcgtttgaattgtaaagtttttacgtcgtttttttttggttgtcgttattttgtttcgtcgttcgcgtttttggtttttttttcggcgttgtcgttcgtttttattttcgatttttatggttcggcggttttaagcgtttagtttcgcggtcgttttttaggtttgtgtcgttttttttcggtttcggtggcgcggtacgcgcggttttttaggttttttttagttttgtggtgacgcgtggtcgaggtggagggtcggtttgaagagtggcgggattggttttatttttttcgcggtttttcggagtcgtttcgtttttttttagggattttgttgagaagggttttcgggcgtttagattttatcgtaaaggtagggttttcgtattcggggatttcgagattagtaagcgatgttgtttcgcgggcgggttggtgaatggggttgtttgggatttttggaggattatttggatatttcgggttcgtttcgttatcgtttgttttgttggaggcggggttggtggcgcgggttg

SEQ ID NO: 7088 - DNA, 658 bp, Artificial Sequence
  chemically treated genomic DNA (Homo sapiens) CpG-island No: 7088
caacccgcgccaccaaccccgcctccaacaaaacaaacgataacgaaacgaacccgaaatatccaaataatcctccaaaaatcccaaacaaccccattcaccaacccgcccgcgaaacaacatcgcttactaatctcgaaatccccgaatacgaaaaccctacctttacgataaaatctaaacgcccgaaaacccttctcaacaaaatccctaaaaaaaaacgaaacgactccgaaaaaccgcgaaaaaaataaaaccaatcccgccactcttcaaaccgaccctccacctcgaccacgcgtcaccacaaaactaaaaaaaacctaaaaaaccgcgcgtaccgcgccaccgaaaccgaaaaaaaacgacacaaacctaaaaaacgaccgcgaaactaaacgcttaaaaccgccgaaccataaaaatcgaaaataaaaacgaacgacaacgccgaaaaaaaaaccaaaaacgcgaacgacgaaacaaaataacgacaaccaaaaaaaaacgacgtaaaaactttacaattcaaacgaaaaaaccaaaaaaaaacgaaataaatacgaaaccgccaactaaacgacacgccacaacaaaaaaaataaaaaaaaaaaaaaaaaaccgaatcccaaaccccgtttacaaaataaaaaaaaat

SEQ ID NO: 7089 - DNA, 1099 bp, Artificial Sequence
  chemically treated genomic DNA (Homo sapiens) CpG-island No: 7089
ttcgcgcggtttcgtttttcgtttcgtcgaggtttcgttttttatattaaggtttcgttttttttttgtttttttcggttaaggtttattttttttttacgcggttcgttttttttttcgttaagttttcgttttttttttgcgcggttcgttttttttttcgttaaggtttcgtttttttttttcggggtttcgttttttatttcgtcgaggttttattttttttcgcgcggttttttcggtatagagtttatttttagtttatgcgaagcggcggtcgtcggaaatcgattatcgacgcgttttcgtttgtcgtagtttgacgtcgtttagtcgatatcgagcgtttttattgatttatattatcgtcgatacgtcgtacgtcgacgtcgggtatcgtatggttggttcggtgcgggcggcggattttcgtcggagaggattgttagttcgttttcgtcgtcgtttcggttcggttcggtttcgatttcgtttcggttttagcgtcggtcgttcgttcggtcgggcgatgaagtgttattatgaggcgttgggggtgcggcgcgacgttagcgaggaggagtttaagaaggtttatcggaagttggttttgaaatggtattcgggtaagtatttgtttcgtagttttcgcggttattcggagaagttcggtttttttcgatttttttttttttcgggcggatttcgcggagttagtagagagggatttggcggtttaggagttttttgtttcgttcggttagtgttcggagtcgttttgttcgtttcggtgggcgaagcgtttcgttttggcgtatttcggtttatattttatttttttatattcgcgatttcggtttcgtatcgttattgtagggggaaaattgtagtttaataattttatttgttttcgttatcgggtcgtagatattacgagggagtagtcgggaattcggaatttagatttgttttaggtttgtttttttttgcgttttttgtagcgtagtttttcggtgtttttttttcgttgttttttatttcgttcgggaattttagatattttaatttgatgtatggtttttttcgttttttagttaag

SEQ ID NO: 7090 - DNA, 1099 bp, Artificial Sequence
  chemically treated genomic DNA (Homo sapiens) CpG-island No: 7090
cttaactaaaaaacgaaaaaaaccatacatcaaattaaaatatctaaaattcccgaacgaaataaaaaacaacgaaaaaaaaacaccgaaaaactacgctacaaaaaacgcaaaaaaaaacaaacctaaaacaaatctaaattccgaattcccgactactccctcgtaatatctacgacccgataacgaaaacaaataaaattattaaactacaattttccccctacaataacgatacgaaaccgaaatcgcgaatataaaaaaataaaatataaaccgaaatacgccaaaacgaaacgcttcgcccaccgaaacgaacaaaacgactccgaacactaaccgaacgaaacaaaaaactcctaaaccgccaaatccctctctactaactccgcgaaatccgcccgaaaaaaaaaaaaatcgaaaaaaaccgaacttctccgaataaccgcgaaaactacgaaacaaatacttacccgaataccatttcaaaaccaacttccgataaaccttcttaaactcctcctcgctaacgtcgcgccgcacccccaacgcctcataataacacttcatcgcccgaccgaacgaacgaccgacgctaaaaccgaaacgaaatcgaaaccgaaccgaaccgaaacgacgacgaaaacgaactaacaatcctctccgacgaaaatccgccgcccgcaccgaaccaaccatacgatacccgacgtcgacgtacgacgtatcgacgataatataaatcaataaaaacgctcgatatcgactaaacgacgtcaaactacgacaaacgaaaacgcgtcgataatcgatttccgacgaccgccgcttcgcataaactaaaaataaactctataccgaaaaaaccgcgcgaaaaaaaataaaacctcgacgaaataaaaaacgaaaccccgaaaaaaaaaaacgaaaccttaacgaaaaaaaaaacgaaccgcgcaaaaaaaaaacgaaaacttaacgaaaaaaaaaacgaaccgcgtaaaaaaaaaataaaccttaaccgaaaaaaacaaaaaaaaaacgaaaccttaatataaaaaacgaaacctcgacgaaacgaaaaacgaaaccgcgcgaa

SEQ ID NO: 7091 - DNA, 1099 bp, Artificial Sequence
  chemically treated genomic DNA (Homo sapiens) CpG-island No: 7091
tttaattaagaaacgaaaagagttatatattaggttgaagtatttgggattttcggacgaggtggagggtagcggaggaaaaatatcgagaggttgcgttgtaagggacgtagggaaaagtaagtttggggtaggtttgagtttcgagttttcgattgttttttcgtggtgtttgcgattcggtagcgggagtaagtgaggttgttggattgtagttttttttttatagtggcgatgcggggtcggggtcgcgggtatgaggagatggggtgtgagtcggggtgcgttagggcggagcgtttcgtttatcgagacgggtagggcggtttcgggtattggtcgggcggggtaaggagtttttaggtcgttaggtttttttttgttggtttcgcggagttcgttcgggggaagggaaggtcggggagggtcgggttttttcgagtggtcgcgggggttgcgggataggtatttattcgggtgttattttagggttagttttcgataggtttttttgagttttttttcgttggcgtcgcgtcgtatttttagcgttttatagtgatattttatcgttcgatcgggcgggcggtcggcgttggggtcgggacggggtcggggtcgggtcgggtcgaagcggcggcggaggcgggttggtagtttttttcggcgggagttcgtcgttcgtatcgggttagttatgcgatgttcggcgtcggcgtgcggcgtgtcggcggtggtgtaggttagtgaaggcgttcggtgtcggttagacgacgttaggttgcggtaagcgggagcgcgtcggtggtcggttttcggcggtcgtcgtttcgtatgggttaggggtgggttttgtgtcggaaaggtcgcgcgggagggggtggggtttcggcggggtgagaggcgaggtttcgaggaaggaaggcggggttttggcgaggagagaggcgggtcgcgtaggagaaaggcgggagtttggcggggaaagaggcgggtcgcgtgggaggaaggtaggttttggtcgggaagaataggaggaaggcgggattttggtgtgagaggcggggtttcggcggggcgagaggcggggtcgcgcgga

SEQ ID NO: 7092 - DNA, 1099 bp, Artificial Sequence
  chemically treated genomic DNA (Homo sapiens) CpG-island No: 7092
tccgcgcgaccccgcctctcgccccgccgaaaccccgcctctcacaccaaaatcccgccttcctcctattcttcccgaccaaaacctaccttcctcccacgcgacccgcctctttccccgccaaactcccgcctttctcctacgcgacccgcctctctcctcgccaaaaccccgccttccttcctcgaaacctcgcctctcaccccgccgaaaccccaccccctcccgcgcgacctttccgacacaaaacccacccctaacccatacgaaacgacgaccgccgaaaaccgaccaccgacgcgctcccgcttaccgcaacctaacgtcgtctaaccgacaccgaacgccttcactaacctacaccaccgccgacacgccgcacgccgacgccgaacatcgcataactaacccgatacgaacgacgaactcccgccgaaaaaaactaccaacccgcctccgccgccgcttcgacccgacccgaccccgaccccgtcccgaccccaacgccgaccgcccgcccgatcgaacgataaaatatcactataaaacgctaaaaatacgacgcgacgccaacgaaaaaaaactcaaaaaaacctatcgaaaactaaccctaaaataacacccgaataaatacctatcccgcaacccccgcgaccactcgaaaaaacccgaccctccccgaccttcccttcccccgaacgaactccgcgaaaccaacaaaaaaaaacctaacgacctaaaaactccttaccccgcccgaccaatacccgaaaccgccctacccgtctcgataaacgaaacgctccgccctaacgcaccccgactcacaccccatctcctcatacccgcgaccccgaccccgcatcgccactataaaaaaaaaactacaatccaacaacctcacttactcccgctaccgaatcgcaaacaccacgaaaaaacaatcgaaaactcgaaactcaaacctaccccaaacttacttttccctacgtcccttacaacgcaacctctcgatatttttcctccgctaccctccacctcgtccgaaaatcccaaatacttcaacctaatatataactcttttcgtttcttaattaaa

SEQ ID NO: 7093 - DNA, 584 bp, Artificial Sequence
  chemically treated genomic DNA (Homo sapiens) CpG-island No: 7093
cgatattttaattttagttacgcgatttagtattcggtttttttttattttaggtcgcgtcgtttcgatttttcgcgtttttatagcgtacgaattttttggcgttaggttgggttagattcgtcggtttggtaggcgcggttttcggtttagttgcgtcggggcggtttagcgcgatttcgcgggttttttggttgttcgtttcggtttcggaatattgttagattttttttcgtagaggtagcgcgttattttagtttcgcggcggggcggggcgttttttaatttcgtttagttgcgttttcggtcggttaacgttgcgtttcgttttttatcgggatttaggcgttgattggtttttgagagattttttgcgtttaggtattggtttagtggtcgtttgtcgacgagggggcgggatttcgaggggtagcgattttcgtaacgcggtttttcgcgtttcggatttcggtggttgcgttcgcgtcgttttttttagattagatcgaagggttttttttattttttttttgtgggcggaaagagcggaatgttttatttttttgtggaataacggggttatg

SEQ ID NO: 7094 - DNA, 584 bp, Artificial Sequence
  chemically treated genomic DNA (Homo sapiens) CpG-island No: 7094
cataaccccgttattccacaaaaaaataaaacattccgctctttccgcccacaaaaaaaaaataaaaaaaacccttcgatctaatctaaaaaaaacgacgcgaacgcaaccaccgaaatccgaaacgcgaaaaaccgcgttacgaaaatcgctacccctcgaaatcccgccccctcgtcgacaaacgaccactaaaccaatacctaaacgcaaaaaatctctcaaaaaccaatcaacgcctaaatcccgataaaaaacgaaacgcaacgttaaccgaccgaaaacgcaactaaacgaaattaaaaaacgccccgccccgccgcgaaactaaaataacgcgctacctctacgaaaaaaaatctaacaatattccgaaaccgaaacgaacaaccaaaaaacccgcgaaatcgcgctaaaccgccccgacgcaactaaaccgaaaaccgcgcctaccaaaccgacgaatctaacccaacctaacgccaaaaaattcgtacgctataaaaacgcgaaaaatcgaaacgacgcgacctaaaataaaaaaaaaccgaatactaaatcgcgtaactaaaattaaaatatcg

SEQ ID NO: 7095 - DNA, 584 bp, Artificial Sequence
  chemically treated genomic DNA (Homo sapiens) CpG-island No: 7095
tatgatttcgttattttatagaaaaatggaatatttcgtttttttcgtttatagaggggaggtggggggaatttttcgatttagtttgggagaggcgacgcggacgtagttatcggaattcgggacgcgaagagtcgcgttacgggaatcgttatttttcggagtttcgttttttcgtcgataggcggttattggattaatgtttgggcgtaaagggttttttaggggttaattagcgtttaggtttcggtagggggcggggcgtagcgttggtcggtcgggggcgtagttgggcgggattggggagcgtttcgtttcgtcgcgggattggggtggcgcgttatttttgcggagaaggatttgatagtgtttcggagtcggggcgagtagttaaaaggttcgcggagtcgcgttgggtcgtttcggcgtagttgaatcgggggtcgcgtttgttaggtcgacgggtttggtttagtttggcgttaaggggttcgtgcgttgtggagacgcggagggtcgaggcggcgcggtttgaggtgaggaggggtcgggtgttgggtcgcgtagttggagttagagtgtcg

SEQ ID NO: 7096 - DNA, 584 bp, Artificial Sequence
  chemically treated genomic DNA (Homo sapiens) CpG-island No: 7096
cgacactctaactccaactacgcgacccaacacccgacccctcctcacctcaaaccgcgccgcctcgaccctccgcgtctccacaacgcacgaaccccttaacgccaaactaaaccaaacccgtcgacctaacaaacgcgacccccgattcaactacgccgaaacgacccaacgcgactccgcgaaccttttaactactcgccccgactccgaaacactatcaaatccttctccgcaaaaataacgcgccaccccaatcccgcgacgaaacgaaacgctccccaatcccgcccaactacgcccccgaccgaccaacgctacgccccgccccctaccgaaacctaaacgctaattaacccctaaaaaaccctttacgcccaaacattaatccaataaccgcctatcgacgaaaaaacgaaactccgaaaaataacgattcccgtaacgcgactcttcgcgtcccgaattccgataactacgtccgcgtcgcctctcccaaactaaatcgaaaaattccccccacctcccctctataaacgaaaaaaacgaaatattccatttttctataaaataacgaaatcata

SEQ ID NO: 7097 - DNA, 539 bp, Artificial Sequence
  chemically treated genomic DNA (Homo sapiens) CpG-island No: 7097
gattggtaattcgtttggtttgggcgagacggtaattttcgggattgtttttgcgttggggcgtagcggtttgaatgtcgaaaattacgaaaattttatttagatcgatgtagcgattaatcgtggtaatttcggtggtgcgttggttaatttgaacggcgaattgatcggtattaatatcgcgattttcgtatcggacggcggtaatatcggtatcggttttgttatttcgagtaatatggtgaaaaatttgatttcgtagatggtggaatacggttaggtgaaacgcggtgagttgggtattatggggattgagttgaatttcgaattggcgaaagcgatgaaagttgacgtttagcgcggtgttttcgtaagttatgttttgtttaattttttcgttgtaaaagcgggtattaaagcgggtgatgtgattattttattgaacggtaagtcgattagtagttttgtcgtattgcgtgtttaggtgggtattatgtcggagaaattagaatttgtattttgatagtttattttagagg

SEQ ID NO: 7098 - DNA, 539 bp, Artificial Sequence
  chemically treated genomic DNA (Homo sapiens) CpG-island No: 7098
cctctaaaataaactatcaaaatacaaattctaatttctccgacataatacccacctaaacacgcaatacgacaaaactactaatcgacttaccgttcaataaaataatcacatcacccgctttaatacccgcttttacaacgaaaaaattaaacaaaacataacttacgaaaacaccgcgctaaacgtcaactttcatcgctttcgccaattcgaaattcaactcaatccccataatacccaactcaccgcgtttcacctaaccgtattccaccatctacgaaatcaaatttttcaccatattactcgaaataacaaaaccgataccgatattaccgccgtccgatacgaaaatcgcgatattaataccgatcaattcgccgttcaaattaaccaacgcaccaccgaaattaccacgattaatcgctacatcgatctaaataaaattttcgtaattttcgacattcaaaccgctacgccccaacgcaaaaacaatcccgaaaattaccgtctcgcccaaaccaaacgaattaccaatc

SEQ ID NO: 7099 - DNA, 539 bp, Artificial Sequence
  chemically treated genomic DNA (Homo sapiens) CpG-island No: 7099
tttttagagtggattgttaggatgtagattttggttttttcggtatagtatttatttgagtacgtagtgcggtaaagttgttgatcggtttatcgtttagtgaggtgattatattattcgttttaatgttcgtttttgtagcggaggaattaggtagaatatggtttacgaaagtatcgcgttgggcgttaatttttatcgttttcgttagttcggagtttagtttagtttttataatatttagtttatcgcgttttatttggtcgtattttattatttgcgaggttaggttttttattatgttattcgggatagtaaaatcgatatcgatgttgtcgtcgttcggtgcgaggatcgcggtgttgatatcgattagttcgtcgtttaggttaattagcgtattatcggagttattacggttgatcgttgtatcggtttggatgaagttttcgtagttttcggtatttaggtcgttacgttttagcgtagagataatttcggaagttatcgtttcgtttagattaaacgggttattaatt

SEQ ID NO: 7100 - DNA, 539 bp, Artificial Sequence
  chemically treated genomic DNA (Homo sapiens) CpG-island No: 7100
aattaataacccgtttaatctaaacgaaacgataacttccgaaattatctctacgctaaaacgtaacgacctaaataccgaaaactacgaaaacttcatccaaaccgatacaacgatcaaccgtaataactccgataatacgctaattaacctaaacgacgaactaatcgatatcaacaccgcgatcctcgcaccgaacgacgacaacatcgatatcgattttactatcccgaataacataataaaaaacctaacctcgcaaataataaaatacgaccaaataaaacgcgataaactaaatattataaaaactaaactaaactccgaactaacgaaaacgataaaaattaacgcccaacgcgatactttcgtaaaccatattctacctaattcctccgctacaaaaacgaacattaaaacgaataatataatcacctcactaaacgataaaccgatcaacaactttaccgcactacgtactcaaataaatactataccgaaaaaaccaaaatctacatcctaacaatccactctaaaaa

SEQ ID NO: 7101 - DNA, 710 bp, Artificial Sequence
  chemically treated genomic DNA (Homo sapiens) CpG-island No: 7101
  unsure (368, 384)
cgtaagggacgagatgggtgtgcgtatgggacgaggtgggtgggagtatgagacgaggtgggtggggcggtgggtgaggttttcgtttttagacgggttggcgaggaagtagggaagaagtaacgttgggttggtgaggtaataggtggggcgtattggagttgcgggataataggtggaataaattggggattatattcgtgggcgtacgtgcggaagagggattgaggaggtttttgcgtgtttttttcgagtatcgtcgatagttttattcgtattttttgtttttcgtatcgttgatttttatcgtttcgcgtattgcgcgtttttagttttagtgtagttagttttcggtcgggttcgcgcgnaggttagggttgtaanttgttcgcgggcgggttggtggttggggagggcgttgggaggaggagtttcgtcgggtggacgcgcgttttttagcggcggaggcggaggcggtagcggcgaggtttgagggtgcgtgttagggagttttggcgcgttttttttttgtcggcgtttttttgcgtttgtagttgtttttcgacgttcgggaggtttattcgttagtcgcgatgggcgcgtagagtttaaaagggcgatttttaaataaaatttacgtatataaattttttagagatttttttattttttcgttaatatatatatatttatatatatatatatataat

SEQ ID NO: 7102 - DNA, 710 bp, Artificial Sequence
  chemically treated genomic DNA (Homo sapiens) CpG-island No: 7102
  unsure (327, 343)
attatatatatatatatataaatatatatatattaacgaaaaaataaaaaaatctctaaaaaatttatatacgtaaattttatttaaaaatcgcccttttaaactctacgcgcccatcgcgactaacgaataaacctcccgaacgtcgaaaaacaactacaaacgcaaaaaaacgccgacaaaaaaaaaacgcgccaaaactccctaacacgcaccctcaaacctcgccgctaccgcctccgcctccgccgctaaaaaacgcgcgtccacccgacgaaactcctcctcccaacgccctccccaaccaccaacccgcccgcgaacaanttacaaccctaacctncgcgcgaacccgaccgaaaactaactacactaaaactaaaaacgcgcaatacgcgaaacgataaaaatcaacgatacgaaaaacaaaaaatacgaataaaactatcgacgatactcgaaaaaaacacgcaaaaacctcctcaatccctcttccgcacgtacgcccacgaatataatccccaatttattccacctattatcccgcaactccaatacgccccacctattacctcaccaacccaacgttacttcttccctacttcctcgccaacccgtctaaaaacgaaaacctcacccaccgccccacccacctcgtctcatactcccacccacctcgtcccatacgcacacccatctcgtcccttacg

SEQ ID NO: 7103 - DNA, 710 bp, Artificial Sequence
  chemically treated genomic DNA (Homo sapiens) CpG-island No: 7103
  unsure (327, 343)
attgtgtgtatgtgtgtgtgggtgtgtgtgtgttggcggggggatgaggaagtttttggaggatttatatgcgtgagttttgtttgggggtcgtttttttgggttttgcgcgtttatcgcggttagcgggtgggtttttcgggcgtcggggagtagttgtaagcgtagggggacgtcggtagaagaaggacgcgttaggattttttagtacgtatttttaggtttcgtcgttgtcgttttcgttttcgtcgttgaagggcgcgcgtttattcggcgggatttttttttttaacgttttttttaattattagttcgttcgcgggtagnttgtagttttggtttncgcgcggattcggtcgggagttggttgtattagggttgggggcgcgtagtgcgcggagcggtaggagttagcggtgcggaaggtaggaggtgcgggtgaagttgtcggcggtgttcgaggggagtacgtaagaatttttttagtttttttttcgtacgtgcgtttacgagtgtagtttttagtttgttttatttattatttcgtagttttagtgcgttttatttgttgttttattagtttaacgttattttttttttgttttttcgttagttcgtttgggggcggagattttatttatcgttttatttatttcgttttatgtttttatttatttcgttttatgcgtatatttatttcgttttttgcg

SEQ ID NO: 7104 - DNA, 710 bp, Artificial Sequence
  chemically treated genomic DNA (Homo sapiens) CpG-island No: 7104
  unsure (368, 384)
cgcaaaaaacgaaataaatatacgcataaaacgaaataaataaaaacataaaacgaaataaataaaacgataaataaaatctccgcccccaaacgaactaacgaaaaaacaaaaaaaaaataacgttaaactaataaaacaacaaataaaacgcactaaaactacgaaataataaataaaacaaactaaaaactacactcgtaaacgcacgtacgaaaaaaaaactaaaaaaattcttacgtactcccctcgaacaccgccgacaacttcacccgcacctcctaccttccgcaccgctaactcctaccgctccgcgcactacgcgcccccaaccctaatacaaccaactcccgaccgaatccgcgcgnaaaccaaaactacaanctacccgcgaacgaactaataattaaaaaaaacgttaaaaaaaaaaatcccgccgaataaacgcgcgcccttcaacgacgaaaacgaaaacgacaacgacgaaacctaaaaatacgtactaaaaaatcctaacgcgtccttcttctaccgacgtccccctacgcttacaactactccccgacgcccgaaaaacccacccgctaaccgcgataaacgcgcaaaacccaaaaaaacgacccccaaacaaaactcacgcatataaatcctccaaaaacttcctcatccccccgccaacacacacacacccacacacacatacacacaat

SEQ ID NO: 7105 - DNA, 618 bp, Artificial Sequence
  chemically treated genomic DNA (Homo sapiens) CpG-island No: 7105
gtgcggatggcgaaagagggcgaaacgttggtgttgttcgacggtattgaagcgaagttgaatgttgatattttggttatcgtcgattataataaggcgttggcgatgggcggtattttcggtggcgaatattttggcgtgaatgacgaaatataaaacgtgttgttggaatgcgcgttttttagttcgttgtttattatcggtcgtgttcgtcgttatggtttgtatatcgatgcgttttatcgttatgagcgtggcgttgattcggtattgtagtataaagcgatggaacgtgcgattcgtttgttgatcgatatttgcggtggtgaggttggttcggtaattgatattattaacgaagtaacgtttgtcgaagcgtgtaattattattttacgtcgtagtaaattggatcgtttgatcggttattatattgcggatgagtaggttattgatattttgcgtcgtttcggttgcgaagtgatcgaaggtaaagacgaatggtaggtagttgcgtcgagttggcgtttcgatatggagattgaagaagatttggttgaagaagtcgcgcgtgtttacggttataataatatttcggatgagtcggtataggtaagttt

SEQ ID NO: 7106 - DNA, 618 bp, Artificial Sequence
  chemically treated genomic DNA (Homo sapiens) CpG-island No: 7106
aaacttacctataccgactcatccgaaatattattataaccgtaaacacgcgcgacttcttcaaccaaatcttcttcaatctccatatcgaaacgccaactcgacgcaactacctaccattcgtctttaccttcgatcacttcgcaaccgaaacgacgcaaaatatcaataacctactcatccgcaatataataaccgatcaaacgatccaatttactacgacgtaaaataataattacacgcttcgacaaacgttacttcgttaataatatcaattaccgaaccaacctcaccaccgcaaatatcgatcaacaaacgaatcgcacgttccatcgctttatactacaataccgaatcaacgccacgctcataacgataaaacgcatcgatatacaaaccataacgacgaacacgaccgataataaacaacgaactaaaaaacgcgcattccaacaacacgttttatatttcgtcattcacgccaaaatattcgccaccgaaaataccgcccatcgccaacgccttattataatcgacgataaccaaaatatcaacattcaacttcgcttcaataccgtcgaacaacaccaacgtttcgccctctttcgccatccgcac

SEQ ID NO: 7107 - DNA, 618 bp, Artificial Sequence
  chemically treated genomic DNA (Homo sapiens) CpG-island No: 7107
aggtttgtttgtatcggtttattcgggatgttgttgtagtcgtaaatacgcgcgatttttttaattagattttttttaatttttatatcgaaacgttagttcggcgtaattgtttgttattcgtttttgttttcggttatttcgtagtcgagacgacgtagaatgttagtaatttgtttattcgtaatatgatggtcgattaggcgatttagtttgttacgacgtagagtgatggttgtacgtttcggtaagcgttgtttcgttggtgatattaattatcgggttagttttattatcgtagatgtcgattagtagacgggtcgtacgttttatcgttttgtgttgtagtgtcggattaacgttacgtttataacggtgagacgtatcggtatgtaggttatgacgacgagtacgatcggtgatagatagcgggttaaagaacgcgtattttagtagtacgttttgtgtttcgttatttacgttagagtgttcgttatcgaagatgtcgtttatcgttagcgttttgttgtggtcggcgatgattagagtgttagtatttagtttcgttttagtatcgtcgagtagtattagcgtttcgttttttttcgttattcgtat

SEQ ID NO: 7108 - DNA, 618 bp, Artificial Sequence
  chemically treated genomic DNA (Homo sapiens) CpG-island No: 7108
atacgaataacgaaaaaaaacgaaacgctaatactactcgacgatactaaaacgaaactaaatactaacactctaatcatcgccgaccacaacaaaacgctaacgataaacgacatcttcgataacgaacactctaacgtaaataacgaaacacaaaacgtactactaaaatacgcgttctttaacccgctatctatcaccgatcgtactcgtcgtcataacctacataccgatacgtctcaccgttataaacgtaacgttaatccgacactacaacacaaaacgataaaacgtacgacccgtctactaatcgacatctacgataataaaactaacccgataattaatatcaccaacgaaacaacgcttaccgaaacgtacaaccatcactctacgtcgtaacaaactaaatcgcctaatcgaccatcatattacgaataaacaaattactaacattctacgtcgtctcgactacgaaataaccgaaaacaaaaacgaataacaaacaattacgccgaactaacgtttcgatataaaaattaaaaaaaatctaattaaaaaaatcgcgcgtatttacgactacaacaacatcccgaataaaccgatacaaacaaacct

SEQ ID NO: 7109 - DNA, 588 bp, Artificial Sequence
  chemically treated genomic DNA (Homo sapiens) CpG-island No: 7109
  unsure (386)
acgcgggattagtatgtcgatgtatttatttatacgtagtattttattgattagcgtacggttaggattattaatcgtttgtacggtattcgtcggtaagtcgtaggattttagggcgttttgaattatcgttatcgttgtagcgttagtgcgatacgtttttttgttatcgcgtaggattatcgtattatcggtttttaggtatagcgaagcgatattaatcgttacgttcgggcgcgttttataaattacgttaataatttttagcggtacgcgacgacgtttaagacgtaggtcgttgtttagtacgtcgttatcgattatttgttttatcgggatcggcgaggttgtatatttgaagtatttcgtcggtaatgttttttagncgtgcgggcgttagtgttagacggttaaagtatttttcgttagagttatgggtcgcgcggtaataatatcgagcgtagcgtgacgatgattttatgtgttttagattcgggaatatttatagttaattattcgttgagattgtatataagagcgtttgggaagttttttcgttacgatataggacgttcgaagatcggaaat

SEQ ID NO: 7110 - DNA, 588 bp, Artificial Sequence
  chemically treated genomic DNA (Homo sapiens) CpG-island No: 7110
  unsure (203)
atttccgatcttcgaacgtcctatatcgtaacgaaaaaacttcccaaacgctcttatatacaatctcaacgaataattaactataaatattcccgaatctaaaacacataaaatcatcgtcacgctacgctcgatattattaccgcgcgacccataactctaacgaaaaatactttaaccgtctaacactaacgcccgcacgnctaaaaaacattaccgacgaaatacttcaaatatacaacctcgccgatcccgataaaacaaataatcgataacgacgtactaaacaacgacctacgtcttaaacgtcgtcgcgtaccgctaaaaattattaacgtaatttataaaacgcgcccgaacgtaacgattaatatcgcttcgctatacctaaaaaccgataatacgataatcctacgcgataacaaaaaaacgtatcgcactaacgctacaacgataacgataattcaaaacgccctaaaatcctacgacttaccgacgaataccgtacaaacgattaataatcctaaccgtacgctaatcaataaaatactacgtataaataaatacatcgacatactaatcccgcgt

SEQ ID NO: 7111 - DNA, 588 bp, Artificial Sequence
  chemically treated genomic DNA (Homo sapiens) CpG-island No: 7111
  unsure (203)
gttttcggttttcggacgttttatgtcgtagcgaaaaggttttttagacgtttttatgtgtaattttagcggataattggttgtggatattttcgggtttggagtatatgggattatcgttacgttacgttcgatgttgttatcgcgcgatttatggttttagcgaaggatgttttgatcgtttggtattgacgttcgtacgnttgaaaggtattgtcgacgaggtattttaggtgtgtaatttcgtcgatttcggtggggtaggtaatcgatggcggcgtattggatagcggtttgcgttttgagcgtcgtcgcgtatcgttgggggttattggcgtgatttatgaagcgcgttcgaacgtgacggttgatgtcgtttcgttgtgtttgaaaatcggtaatgcggtgattttgcgcggtggtaaagaaacgtgtcgtattaacgttgtaacggtggcggtgatttaggacgttttgaaattttgcggtttatcggcgggtgtcgtgtaggcgattgataattttgatcgtgcgttggttagtgaaatgttgcgtatggataaatatatcgatatgttgatttcgcgt

SEQ ID NO: 7112 - DNA, 588 bp, Artificial Sequence
  chemically treated genomic DNA (Homo sapiens) CpG-island No: 7112
  unsure (386)
acgcgaaatcaacatatcgatatatttatccatacgcaacatttcactaaccaacgcacgatcaaaattatcaatcgcctacacgacacccgccgataaaccgcaaaatttcaaaacgtcctaaatcaccgccaccgttacaacgttaatacgacacgtttctttaccaccgcgcaaaatcaccgcattaccgattttcaaacacaacgaaacgacatcaaccgtcacgttcgaacgcgcttcataaatcacgccaataacccccaacgatacgcgacgacgctcaaaacgcaaaccgctatccaatacgccgccatcgattacctaccccaccgaaatcgacgaaattacacacctaaaatacctcgtcgacaatacctttcaancgtacgaacgtcaataccaaacgatcaaaacatccttcgctaaaaccataaatcgcgcgataacaacatcgaacgtaacgtaacgataatcccatatactccaaacccgaaaatatccacaaccaattatccgctaaaattacacataaaaacgtctaaaaaaccttttcgctacgacataaaacgtccgaaaaccgaaaac

SEQ ID NO: 7113 - DNA, 694 bp, Artificial Sequence
  chemically treated genomic DNA (Homo sapiens) CpG-island No: 7113
  unsure (627, 637..638, 640, 642..643, 645..)
gttagcgatgttggcgacgtcggcgaagttgttttttaggttttcggcgtagtcgtcgtttagcggtatgcgttagtaggggtttagggcggtttcgttcgcggcgagtagggatgcggttagtttatcgtcgttggtatatatgtcgttgcgtacgtcgtttagggcgatgacgtaggtttcggttagcgtcgttacgtcgacgacgatagcgggtttgaagcgttcggtataggttagcgcgtcgtagaggatgaggcggttttcggcgttcgtgtttaagatttcgatggtttggttcgatatcgacgtgacgatatcgttcggtttgatcgtatggtcgttgggtatgttttcgtaggcggtaacgattatgacgaggttgagtttgggttttaattcggttatcgcgcgtagcgtgtcgatgacgttggcggcgtcgtttatgtcgaattttatttcgtttatttcggtttttagttttaacgagatgttttcggtgtcgaaggtgatgtttttgtcgacgaggacgacgggcgttatcgttttgtaagcgttttttagcgcgttacgatgaagcgttacggttcgttcgaatttttgggtacgggttcggggggattgatnttttttgganngntnnannattgattgttgtcgtgagtcgtttttagaggatttttagaataaaata

SEQ ID NO: 7114 - DNA, 694 bp, Artificial Sequence
  chemically treated genomic DNA (Homo sapiens) CpG-island No: 7114
  unsure (49..50, 52..53, 55, 57..58, 68)
tattttattctaaaaatcctctaaaaacgactcacgacaacaatcaatnntnnancnntccaaaaaanatcaatccccccgaacccgtacccaaaaattcgaacgaaccgtaacgcttcatcgtaacgcgctaaaaaacgcttacaaaacgataacgcccgtcgtcctcgtcgacaaaaacatcaccttcgacaccgaaaacatctcgttaaaactaaaaaccgaaataaacgaaataaaattcgacataaacgacgccgccaacgtcatcgacacgctacgcgcgataaccgaattaaaacccaaactcaacctcgtcataatcgttaccgcctacgaaaacatacccaacgaccatacgatcaaaccgaacgatatcgtcacgtcgatatcgaaccaaaccatcgaaatcttaaacacgaacgccgaaaaccgcctcatcctctacgacgcgctaacctataccgaacgcttcaaacccgctatcgtcgtcgacgtaacgacgctaaccgaaacctacgtcatcgccctaaacgacgtacgcaacgacatatataccaacgacgataaactaaccgcatccctactcgccgcgaacgaaaccgccctaaacccctactaacgcataccgctaaacgacgactacgccgaaaacctaaaaaacaacttcgccgacgtcgccaacatcgctaac

SEQ ID NO: 7115 - DNA, 694 bp, Artificial Sequence
  chemically treated genomic DNA (Homo sapiens) CpG-island No: 7115
  unsure (49..50, 52..53, 55, 57..58, 68)
tattttattttggggattttttagaggcgatttacgatagtaattaatnntnngntnntttaaggggnattaattttttcgagttcgtgtttaggggttcgaacgaatcgtggcgttttatcgtggcgcgttagaaggcgtttgtaagacggtggcgttcgtcgttttcgtcggtaagggtattattttcgatatcggaggtatttcgttaaagttgggagtcgagatggacgagatgaagttcgatatgggcggcgtcgttagcgttatcggtacgttgcgcgcggtggtcgaattgaagtttaagtttaatttcgttatgatcgttgtcgtttgcgagaatatgtttagcggttatgcggttaagtcgggcgatgtcgttacgtcgatgtcgggttagattatcgaaattttgaatacggacgtcgagggtcgttttattttttgcgacgcgttgatttatgtcgagcgttttaagttcgttgtcgtcgtcgacgtggcgacgttgatcggggtttgcgttatcgttttgggcggcgtgcgtagcggtatgtatgttagcgacgatgaattggtcgtatttttgttcgtcgcgggcgaggtcgttttggatttttgttggcgtatgtcgttggacgacgattacgtcgaaggtttgaagagtaatttcgtcgacgtcgttaatatcgttggt

SEQ ID NO: 7116 - DNA, 694 bp, Artificial Sequence
  chemically treated genomic DNA (Homo sapiens) CpG-island No: 7116
  unsure (627, 637..638, 640, 642..643, 645..)
accaacgatattaacgacgtcgacgaaattactcttcaaaccttcgacgtaatcgtcgtccaacgacatacgccaacaaaaatccaaaacgacctcgcccgcgacgaacaaaaatacgaccaattcatcgtcgctaacatacataccgctacgcacgccgcccaaaacgataacgcaaaccccgatcaacgtcgccacgtcgacgacgacaacgaacttaaaacgctcgacataaatcaacgcgtcgcaaaaaataaaacgaccctcgacgtccgtattcaaaatttcgataatctaacccgacatcgacgtaacgacatcgcccgacttaaccgcataaccgctaaacatattctcgcaaacgacaacgatcataacgaaattaaacttaaacttcaattcgaccaccgcgcgcaacgtaccgataacgctaacgacgccgcccatatcgaacttcatctcgtccatctcgactcccaactttaacgaaatacctccgatatcgaaaataatacccttaccgacgaaaacgacgaacgccaccgtcttacaaacgccttctaacgcgccacgataaaacgccacgattcgttcgaacccctaaacacgaactcgaaaaaattaatnccccttaaannancnnannattaattactatcgtaaatcgcctctaaaaaatccccaaaataaaata

SEQ ID NO: 7117 - DNA, 534 bp, Artificial Sequence
  chemically treated genomic DNA (Homo sapiens) CpG-island No: 7117
tagagttggcgtaggttattgaagcggcgggcgcgattattattaatatcggtattggttggtatgaagtacgtatttcgattattgttacgttcgtgtcgcgcggcgtatttagttgggttacgcgtaaattgaaaggttacgtttcgttgtcgttggtaattattaatcggattaacgattcgtaggttgtcgacgatattttttcgcgcggcgatgtcgatatggtatcgatggcgcgatcgttttttgttgatgcggagttgttgttaaaagcgtaatcgggacgagtcgatgagattaatatttgtattggttgtaattaggtttgtttcgattaaattttcgttggtaaagttatttcgtgtttggtgaattttcgcgtttgttacgaaattaaaatgttaatttttttcgtcgtgtagaaaaaaaatttggcggtggtcggtgcgggatttgttgggttggcgtttgttattaacgcggcggcgcgtgggtattaggtaatattgtttgacgtttatagcgagattg

SEQ ID NO: 7118 - DNA, 534 bp, Artificial Sequence
  chemically treated genomic DNA (Homo sapiens) CpG-island No: 7118
caatctcgctataaacgtcaaacaatattacctaatacccacgcgccgccgcgttaataacaaacgccaacccaacaaatcccgcaccgaccaccgccaaattttttttctacacgacgaaaaaaattaacattttaatttcgtaacaaacgcgaaaattcaccaaacacgaaataactttaccaacgaaaatttaatcgaaacaaacctaattacaaccaatacaaatattaatctcatcgactcgtcccgattacgcttttaacaacaactccgcatcaacaaaaaacgatcgcgccatcgataccatatcgacatcgccgcgcgaaaaaatatcgtcgacaacctacgaatcgttaatccgattaataattaccaacgacaacgaaacgtaacctttcaatttacgcgtaacccaactaaatacgccgcgcgacacgaacgtaacaataatcgaaatacgtacttcataccaaccaataccgatattaataataatcgcgcccgccgcttcaataacctacgccaactcta

SEQ ID NO: 7119 - DNA, 534 bp, Artificial Sequence
  chemically treated genomic DNA (Homo sapiens) CpG-island No: 7119
taatttcgttatgagcgttaaataatgttatttgatgtttacgcgtcgtcgcgttaatggtaaacgttagtttagtaggtttcgtatcgattatcgttagattttttttttgtacggcgggaaggattggtattttggtttcgtggtaggcgcgaggatttattaggtacgaggtgattttgttaacgaagatttgatcgagataggtttgattgtagttaatataagtgttgattttatcggttcgtttcgattgcgtttttgatagtagtttcgtattagtaagaaacggtcgcgttatcgatattatatcggtatcgtcgcgcgagagaatatcgtcggtaatttgcggatcgttaattcggttggtggttattagcggtagcgagacgtggttttttagtttgcgcgtgatttagttaaatgcgtcgcgcggtacgggcgtggtaatggtcggaatacgtgttttatgttagttaatgtcggtgttgataatggtcgcgttcgtcgttttaatggtttgcgttagtttta

SEQ ID NO: 7120 - DNA, 534 bp, Artificial Sequence
  chemically treated genomic DNA (Homo sapiens) CpG-island No: 7120
taaaactaacgcaaaccattaaaacgacgaacgcgaccattatcaacaccgacattaactaacataaaacacgtattccgaccattaccacgcccgtaccgcgcgacgcatttaactaaatcacgcgcaaactaaaaaaccacgtctcgctaccgctaataaccaccaaccgaattaacgatccgcaaattaccgacgatattctctcgcgcgacgataccgatataatatcgataacgcgaccgtttcttactaatacgaaactactatcaaaaacgcaatcgaaacgaaccgataaaatcaacacttatattaactacaatcaaacctatctcgatcaaatcttcgttaacaaaatcacctcgtacctaataaatcctcgcgcctaccacgaaaccaaaataccaatccttcccgccgtacaaaaaaaaaatctaacgataatcgatacgaaacctactaaactaacgtttaccattaacgcgacgacgcgtaaacatcaaataacattatttaacgctcataacgaaatta

SEQ ID NO: 7121 - DNA, 541 bp, Artificial Sequence
  chemically treated genomic DNA (Homo sapiens) CpG-island No: 7121
gcgtatcgtttcgatgtatttagatttgttgtagagtagttcgtttaattttatggtcgtcgttttttttttttagtttcggattttgttagagttagtcggttagttttttagagatttcggttattttcggtcgtttttttattttcgttttaggtggtttattgggatttatcgatagcgcggtttttttttaggcggtttcgttttattgttcggtcgtttacggttgcgcgtgcgtaggtcgaatggtggatttaattggtcggagtttagggcgcgtttggttcgcgtgggttagttgatcgcgtattgagggtgcgatttcgggttttttatttttttttggggcgttttttcggtttagggttaattgggtttcggtgtcggtaggtttggggtcggcgacggttgtttttttcgttttgtcgtttgttcgatggacgagtttttcgggaagttttttagttgtgaggagaaggaaaaggtgtcgggggtgcgggaagggcggacgtaggattttgatttcgtttttttaggg

SEQ ID NO: 7122 - DNA, 541 bp, Artificial Sequence
  chemically treated genomic DNA (Homo sapiens) CpG-island No: 7122
ccctaaaaaaacgaaatcaaaatcctacgtccgcccttcccgcacccccgacaccttttccttctcctcacaactaaaaaacttcccgaaaaactcgtccatcgaacaaacgacaaaacgaaaaaaacaaccgtcgccgaccccaaacctaccgacaccgaaacccaattaaccctaaaccgaaaaaacgccccaaaaaaaaataaaaaacccgaaatcgcaccctcaatacgcgatcaactaacccacgcgaaccaaacgcgccctaaactccgaccaattaaatccaccattcgacctacgcacgcgcaaccgtaaacgaccgaacaataaaacgaaaccgcctaaaaaaaaaccgcgctatcgataaatcccaataaaccacctaaaacgaaaataaaaaaacgaccgaaaataaccgaaatctctaaaaaactaaccgactaactctaacaaaatccgaaactaaaaaaaaaaaacgacgaccataaaattaaacgaactactctacaacaaatctaaatacatcgaaacgatacgc

SEQ ID NO: 7123 - DNA, 541 bp, Artificial Sequence
  chemically treated genomic DNA (Homo sapiens) CpG-island No: 7123
ttttgggaaagcggggttagagttttgcgttcgtttttttcgtattttcggtattttttttttttttttatagttgaggggtttttcgggaggttcgtttatcgggtaggcgatagaacgaaaagagtagtcgtcgtcgattttaggtttgtcgatatcgggatttagttggttttgggtcggggaggcgttttaggaaggaatggggagttcgggatcgtatttttagtgcgcgattagttgatttacgcgggttaagcgcgttttaaatttcggttaattaaatttattattcggtttgcgtacgcgtagtcgtagacggtcgagtagtggagcgaggtcgtttaaaggagagtcgcgttgtcgatgagttttagtgggttatttggagcggaagtggaggagcggtcggaagtagtcggaatttttgaaagattgatcgattgattttgataggattcggggttgagggaaggaggcggcggttatggagttgggcgagttgttttataataagtttgagtatatcgagacggtgcgt

SEQ ID NO: 7124 - DNA, 541 bp, Artificial Sequence
  chemically treated genomic DNA (Homo sapiens) CpG-island No: 7124
acgcaccgtctcgatatactcaaacttattataaaacaactcgcccaactccataaccgccgcctccttccctcaaccccgaatcctatcaaaatcaatcgatcaatctttcaaaaattccgactacttccgaccgctcctccacttccgctccaaataacccactaaaactcatcgacaacgcgactctcctttaaacgacctcgctccactactcgaccgtctacgactacgcgtacgcaaaccgaataataaatttaattaaccgaaatttaaaacgcgcttaacccgcgtaaatcaactaatcgcgcactaaaaatacgatcccgaactccccattccttcctaaaacgcctccccgacccaaaaccaactaaatcccgatatcgacaaacctaaaatcgacgacgactactcttttcgttctatcgcctacccgataaacgaacctcccgaaaaacccctcaactataaaaaaaaaaaaaaaataccgaaaatacgaaaaaaacgaacgcaaaactctaaccccgctttcccaaaa

SEQ ID NO: 7125 - DNA, 642 bp, Artificial Sequence
  chemically treated genomic DNA (Homo sapiens) CpG-island No: 7125
gagaaagggagaaatttcgaaggaattttttttttttcggggttgggttttcgtatttacgtcgggtttggttttttaggttattttacgtgttcgggcgttcgtgttaattaggtttttttcggttgggttcgggtttaaaggttgttgttgcgtagggcgtttttatggtgtcgcgcggcgggcgggtttggattttaaattttcgcggttaattagtggcgcgtaggtttttgtaacgtttttagcgtcgcgtttgaattcggggaggagcggagcggtgcggaggttttgttcggatcgaggtttgtagcgtagtttcgggagtatgagtgttgtagtgattgtagggaagttggtacgggtatcggtcgattttgggaaagtcggggttttcggagttgtagttttcggagtttcggcggcggttttatcggcgaaagagatttcggaggttttagtggatttacgtagtcggcggcgttatgtgcggggtcgttttttgggtaagggcggttttgttaagtgtttcgagatttcggacgcggatattaagtgaggtgttcgcgaggtaagattgtgtttatagtttttgttgtttaagtcgtattagagggagaagatgtttatggaaatatttat

SEQ ID NO: 7126 - DNA, 642 bp, Artificial Sequence
  chemically treated genomic DNA (Homo sapiens) CpG-island No: 7126
ataaatatttccataaacatcttctccctctaatacgacttaaacaacaaaaactataaacacaatcttacctcgcgaacacctcacttaatatccgcgtccgaaatctcgaaacacttaacaaaaccgcccttacccaaaaaacgaccccgcacataacgccgccgactacgtaaatccactaaaacctccgaaatctctttcgccgataaaaccgccgccgaaactccgaaaactacaactccgaaaaccccgactttcccaaaatcgaccgatacccgtaccaacttccctacaatcactacaacactcatactcccgaaactacgctacaaacctcgatccgaacaaaacctccgcaccgctccgctcctccccgaattcaaacgcgacgctaaaaacgttacaaaaacctacgcgccactaattaaccgcgaaaatttaaaatccaaacccgcccgccgcgcgacaccataaaaacgccctacgcaacaacaacctttaaacccgaacccaaccgaaaaaaacctaattaacacgaacgcccgaacacgtaaaataacctaaaaaaccaaacccgacgtaaatacgaaaacccaaccccgaaaaaaaaaaaattccttcgaaatttctccctttctc

SEQ ID NO: 7127 - DNA, 642 bp, Artificial Sequence
  chemically treated genomic DNA (Homo sapiens) CpG-island No: 7127
atggatatttttatggatattttttttttttggtgcggtttgagtagtagagattataggtataattttgtttcgcgaatattttatttggtgttcgcgttcgagatttcgaagtatttggtaaagtcgtttttgtttaaaaagcggtttcgtatatagcgtcgtcggttgcgtgggtttattaggattttcgggatttttttcgtcggtggagtcgtcgtcggagtttcgggagttgtaatttcggggatttcggtttttttagggtcggtcggtgttcgtgttagtttttttgtagttattgtagtatttatgttttcgaagttgcgttgtagatttcgattcgagtagagttttcgtatcgtttcgttttttttcgaatttaaacgcggcgttgggaacgttataaaagtttgcgcgttattgattggtcgcggggatttaaaatttaaattcgttcgtcgcgcggtattatgggagcgttttgcgtagtagtagtttttaaattcggatttagtcggggaaaatttgattgatacggacgttcgaatacgtgggatagtttgggaaattaaattcggcgtggatgcggagatttagtttcgagagaggaggaattttttcggggtttttttttttttt

SEQ ID NO: 7128 - DNA, 642 bp, Artificial Sequence
  chemically treated genomic DNA (Homo sapiens) CpG-island No: 7128
aaaaaaaaaaaaaaccccgaaaaaattcctcctctctcgaaactaaatctccgcatccacgccgaatttaatttcccaaactatcccacgtattcgaacgtccgtatcaatcaaattttccccgactaaatccgaatttaaaaactactactacgcaaaacgctcccataataccgcgcgacgaacgaatttaaattttaaatccccgcgaccaatcaataacgcgcaaacttttataacgttcccaacgccgcgtttaaattcgaaaaaaaacgaaacgatacgaaaactctactcgaatcgaaatctacaacgcaacttcgaaaacataaatactacaataactacaaaaaaactaacacgaacaccgaccgaccctaaaaaaaccgaaatccccgaaattacaactcccgaaactccgacgacgactccaccgacgaaaaaaatcccgaaaatcctaataaacccacgcaaccgacgacgctatatacgaaaccgctttttaaacaaaaacgactttaccaaatacttcgaaatctcgaacgcgaacaccaaataaaatattcgcgaaacaaaattatacctataatctctactactcaaaccgcaccaaaaaaaaaaaatatccataaaaatatccat

SEQ ID NO: 7129 - DNA, 515 bp, Artificial Sequence
  chemically treated genomic DNA (Homo sapiens) CpG-island No: 7129
ggcgttgttatcgttgttggcgaacgggaaaattagttacgcgatgtacgatatttttcgtgaattgtattagtagattcgttgtaatgtcgatgagtaggcggtataagtcgttttggagttagtataatgatcgaatttgtttattcgtatacgtagttggttgcgggtgtggatgaagtcggacgcgggtcgttagttggcgcggtcgttatcgttgcggtgatttttgattcggcgcgttcgattgtcgggttgaatgattttaaaaagttgagcgaaaaacgtcgtttggcgttttatgaagagattaaagagaaagcgttgagttggagtttgggtcgcgcggaattttacgaaatcgacgagttgaatattttttatgcgattatgttggcgatgtagcgtgtcgtcgttgggttgtatattgcgtcggaatatgtgttgattgatggtaatcgttgttcgaaattatcgatgtttgcgatggttgtggtgaaaggcgatagtcgcgt

SEQ ID NO: 7130 - DNA, 515 bp, Artificial Sequence
  chemically treated genomic DNA (Homo sapiens) CpG-island No: 7130
acgcgactatcgcctttcaccacaaccatcgcaaacatcgataatttcgaacaacgattaccatcaatcaacacatattccgacgcaatatacaacccaacgacgacacgctacatcgccaacataatcgcataaaaaatattcaactcgtcgatttcgtaaaattccgcgcgacccaaactccaactcaacgctttctctttaatctcttcataaaacgccaaacgacgtttttcgctcaactttttaaaatcattcaacccgacaatcgaacgcgccgaatcaaaaatcaccgcaacgataacgaccgcgccaactaacgacccgcgtccgacttcatccacacccgcaaccaactacgtatacgaataaacaaattcgatcattatactaactccaaaacgacttataccgcctactcatcgacattacaacgaatctactaatacaattcacgaaaaatatcgtacatcgcgtaactaattttcccgttcgccaacaacgataacaacgcc

SEQ ID NO: 7131 - DNA, 515 bp, Artificial Sequence
  chemically treated genomic DNA (Homo sapiens) CpG-island No: 7131
acgcggttatcgttttttattatagttatcgtaggtatcggtaatttcgggtagcggttattattaattaatatatatttcggcgtaatatgtagtttagcgacggtacgttgtatcgttagtatggtcgtatgaagaatgtttagttcgtcgatttcgtggggtttcgcgcggtttagattttagtttaacgttttttttttgatttttttatagagcgttagacggcgtttttcgtttagttttttggaattatttagttcggtaatcgggcgcgtcgggttaaggattatcgtagcggtgacgatcgcgttaattaacggttcgcgttcgattttatttatattcgtaattagttgcgtgtgcggataaataaattcgattattgtgttaattttagaacggtttgtgtcgtttgtttatcggtattgtagcggatttgttgatgtagtttacggaaggtatcgtgtatcgcgtggttggttttttcgttcgttaatagcggtaatagcgtt

SEQ ID NO: 7132 - DNA, 515 bp, Artificial Sequence
  chemically treated genomic DNA (Homo sapiens) CpG-island No: 7132
aacgctattaccgctattaacgaacgaaaaaaccaaccacgcgatacacgataccttccgtaaactacatcaacaaatccgctacaataccgataaacaaacgacacaaaccgttctaaaattaacacaataatcgaatttatttatccgcacacgcaactaattacgaatataaataaaatcgaacgcgaaccgttaattaacgcgatcgtcaccgctacgataatccttaacccgacgcgcccgattaccgaactaaataattccaaaaaactaaacgaaaaacgccgtctaacgctctataaaaaaatcaaaaaaaaaacgttaaactaaaatctaaaccgcgcgaaaccccacgaaatcgacgaactaaacattcttcatacgaccatactaacgatacaacgtaccgtcgctaaactacatattacgccgaaatatatattaattaataataaccgctacccgaaattaccgatacctacgataactataataaaaaacgataaccgcgt

SEQ ID NO: 7133 - DNA, 768 bp, Artificial Sequence
  chemically treated genomic DNA (Homo sapiens) CpG-island No: 7133
atcgtggggttttgttatagaaattttagtagcgtagttatcggattgggttttggaggtcgagtcgtagttcgtgcggcggcgttgggaagagaaggcgtttcggtagtttttttgttatcggtttcgaggagcggttggtttttttagtttagcgtcgtcgtcgttcggtaattttaggcgtaattgggcgtaattggggtagttgcgatatcgaattttttatatttgtaatttgggtgttgcggttattgagaaaatggaggcgtagattaacgagcggtgtcgcgatcgagagatttcggttggcgaaatggtggtgtcgggagtttgcgagtgacgttagtcggcggggttgttaaggataatattcgttttgacgtagttaatggcgtcgttattaagaaattatcgattttgagaaaaaagagaggttcggttatcgagaaatttcgtacgataagtgttgtggtagaaaaatcgtttatttcgcgttataggtaaaatagttaatggaaattttaggtgttgcgatcgtgatatcggtattagagggtttcggatggagaaagcggcgtacggagattaggaaattatgtgtagtataattagtagaaaatcgtttggtcggttattcgggagaaagcgcggattagaaataagcgatttcgatgtagggaatcgcgtagttattgaagaaagtgatttacgtggtagtggtgttagcgaaatattgtagtttggacggtagttgtggggatgttatag

SEQ ID NO: 7134 - DNA, 768 bp, Artificial Sequence
  chemically treated genomic DNA (Homo sapiens) CpG-island No: 7134
ctataacatccccacaactaccgtccaaactacaatatttcgctaacaccactaccacgtaaatcactttcttcaataactacgcgattccctacatcgaaatcgcttatttctaatccgcgctttctcccgaataaccgaccaaacgattttctactaattatactacacataatttcctaatctccgtacgccgctttctccatccgaaaccctctaataccgatatcacgatcgcaacacctaaaatttccattaactattttacctataacgcgaaataaacgatttttctaccacaacacttatcgtacgaaatttctcgataaccgaacctctcttttttctcaaaatcgataatttcttaataacgacgccattaactacgtcaaaacgaatattatccttaacaaccccgccgactaacgtcactcgcaaactcccgacaccaccatttcgccaaccgaaatctctcgatcgcgacaccgctcgttaatctacgcctccattttctcaataaccgcaacacccaaattacaaatataaaaaattcgatatcgcaactaccccaattacgcccaattacgcctaaaattaccgaacgacgacgacgctaaactaaaaaaaccaaccgctcctcgaaaccgataacaaaaaaactaccgaaacgccttctcttcccaacgccgccgcacgaactacgactcgacctccaaaacccaatccgataactacgctactaaaatttctataacaaaaccccacgat

SEQ ID NO: 7135 - DNA, 768 bp, Artificial Sequence
  chemically treated genomic DNA (Homo sapiens) CpG-island No: 7135
ttgtggtatttttatagttgtcgtttaaattgtagtgtttcgttggtattattgttacgtgggttattttttttagtggttgcgcggttttttgtatcgaagtcgtttgtttttgattcgcgttttttttcggatggtcgattagacggttttttgttagttgtgttatatatagttttttggttttcgtgcgtcgttttttttattcgagattttttagtgtcggtgttacggtcgtagtatttggggtttttattggttgttttgtttgtggcgcggagtaggcggtttttttgttatagtatttgtcgtacggagtttttcggtggtcgaatttttttttttttttagagtcgatggttttttggtgacggcgttattggttgcgttaaaacgaatgttgtttttgataatttcgtcggttggcgttattcgtaggttttcggtattattatttcgttagtcgaggtttttcggtcgcggtatcgttcgttggtttgcgtttttatttttttagtggtcgtagtatttaggttgtagatgtgagggattcggtgtcgtagttgttttagttgcgtttagttgcgtttggagttatcgggcggcggcggcgttgggttgggggagttagtcgtttttcggggtcggtggtaggggagttgtcggggcgttttttttttttagcgtcgtcgtacggattgcggttcggtttttagaatttagttcggtggttgcgttgttggggtttttgtgataggattttacggt

SEQ ID NO: 7136 - DNA, 768 bp, Artificial Sequence
  chemically treated genomic DNA (Homo sapiens) CpG-island No: 7136
accgtaaaatcctatcacaaaaaccccaacaacgcaaccaccgaactaaattctaaaaaccgaaccgcaatccgtacgacgacgctaaaaaaaaaaaacgccccgacaactcccctaccaccgaccccgaaaaacgactaactcccccaacccaacgccgccgccgcccgataactccaaacgcaactaaacgcaactaaaacaactacgacaccgaatccctcacatctacaacctaaatactacgaccactaaaaaaataaaaacgcaaaccaacgaacgataccgcgaccgaaaaacctcgactaacgaaataataataccgaaaacctacgaataacgccaaccgacgaaattatcaaaaacaacattcgttttaacgcaaccaataacgccgtcaccaaaaaaccatcgactctaaaaaaaaaaaaaaattcgaccaccgaaaaactccgtacgacaaatactataacaaaaaaaccgcctactccgcgccacaaacaaaacaaccaataaaaaccccaaatactacgaccgtaacaccgacactaaaaaatctcgaataaaaaaaacgacgcacgaaaaccaaaaaactatatataacacaactaacaaaaaaccgtctaatcgaccatccgaaaaaaaacgcgaatcaaaaacaaacgacttcgatacaaaaaaccgcgcaaccactaaaaaaaataacccacgtaacaataataccaacgaaacactacaatttaaacgacaactataaaaataccacaa

SEQ ID NO: 7137 - DNA, 610 bp, Artificial Sequence
  chemically treated genomic DNA (Homo sapiens) CpG-island No: 7137
gttatggtacgttgttttcggttttagttagcgtattggtatattgtcgttagtaaataggttaagtaggggtttttgttgattcgttttcgttatcgaatttagtgaggtagtatcgtttattaattgataattacgcgtttgtgtttgtttacgtagcgtttttttttgttatttattagcggttgtcgttttagtaaaggtttttgcgtcgtcgttaagcgtaacgtcggtacgagcgttaagtagttgttcggtaatcgattttttttcgtttttttttagagcgttattcggatattttttattggtcgcgttcggatcgtagtatttgcgcgaggttatatgtgttattagcgtagcgggcgtggtattttgtaattttgcggtagaaacgttatcggtcgttagatttgcggtttttgttatttttagaatcgttgggtgatttttttcgtgaatatcgacgtttagcgcgtcgttataggttttgatatcggttgattaggcggttgttgatgtagtcgagtcggtgacgtagttcggtttgtcggtttttttatttagcgtatagtgagtgtattgttcggtaagcggtaaggtatttata

SEQ ID NO: 7138 - DNA, 610 bp, Artificial Sequence
  chemically treated genomic DNA (Homo sapiens) CpG-island No: 7138
tataaataccttaccgcttaccgaacaatacactcactatacgctaaataaaaaaaccgacaaaccgaactacgtcaccgactcgactacatcaacaaccgcctaatcaaccgatatcaaaacctataacgacgcgctaaacgtcgatattcacgaaaaaaatcacccaacgattctaaaaataacaaaaaccgcaaatctaacgaccgataacgtttctaccgcaaaattacaaaataccacgcccgctacgctaataacacatataacctcgcgcaaatactacgatccgaacgcgaccaataaaaaatatccgaataacgctctaaaaaaaaacgaaaaaaaatcgattaccgaacaactacttaacgctcgtaccgacgttacgcttaacgacgacgcaaaaacctttactaaaacgacaaccgctaataaataacaaaaaaaaacgctacgtaaacaaacacaaacgcgtaattatcaattaataaacgatactacctcactaaattcgataacgaaaacgaatcaacaaaaacccctacttaacctatttactaacgacaatataccaatacgctaactaaaaccgaaaacaacgtaccataac

SEQ ID NO: 7139 - DNA, 610 bp, Artificial Sequence
  chemically treated genomic DNA (Homo sapiens) CpG-island No: 7139
tatagatgttttatcgtttatcgggtaatatatttattatgcgttgaataaaaaaatcggtaaatcggattacgttatcgattcggttgtattagtaatcgtttggttaatcggtgttaaaatttataacggcgcgttgggcgtcgatatttacgaaaaagattatttaacgattttggaaatggtaaaagtcgtaggtttggcgatcggtaacgtttttatcgtagagttgtaggatgttacgttcgttgcgttggtggtatatgtgatttcgcgtaaatgttacggttcgagcgcgattagtgaaaaatgttcgggtaacgttttggaaaaaggcggaaaaggatcgattatcgaatagttgtttaacgttcgtgtcgacgttacgtttggcggcggcgtaaaaatttttgttgaaacggtaatcgttggtgaatggtagggaaaaacgttgcgtgaataggtataggcgcgtggttattagttggtgagcgatgttgttttattgaattcggtgacggaagcgaattagtaaaaatttttgtttggtttgtttgttgacggtaatatgttagtgcgttggttaggatcgaaagtaacgtattatggt

SEQ ID NO: 7140 - DNA, 610 bp, Artificial Sequence
  chemically treated genomic DNA (Homo sapiens) CpG-island No: 7140
accataatacgttactttcgatcctaaccaacgcactaacatattaccgtcaacaaacaaaccaaacaaaaatttttactaattcgcttccgtcaccgaattcaataaaacaacatcgctcaccaactaataaccacgcgcctatacctattcacgcaacgtttttccctaccattcaccaacgattaccgtttcaacaaaaatttttacgccgccgccaaacgtaacgtcgacacgaacgttaaacaactattcgataatcgatccttttccgcctttttccaaaacgttacccgaacatttttcactaatcgcgctcgaaccgtaacatttacgcgaaatcacatataccaccaacgcaacgaacgtaacatcctacaactctacgataaaaacgttaccgatcgccaaacctacgacttttaccatttccaaaatcgttaaataatctttttcgtaaatatcgacgcccaacgcgccgttataaattttaacaccgattaaccaaacgattactaatacaaccgaatcgataacgtaatccgatttaccgatttttttattcaacgcataataaatatattacccgataaacgataaaacatctata

SEQ ID NO: 7141 - DNA, 615 bp, Artificial Sequence
  chemically treated genomic DNA (Homo sapiens) CpG-island No: 7141
  unsure (214)
gcgtaacgttttcggagcgttattattttttgtgatagtttcggcggtaggagttttttaatggcgtaggtgtcgagtagatttagcgtttggtcggttaatttacgtagcgtggtttgttttacgtttttcgttgttggataaatcggcgtgagcgttttttgtaattttggcgtgttgagatcgttttgtacgcggtatttcgggtggatanttttcgtattatatttatcgcgttttgtttcgttataagttagtatacggcggttcgtcgttaggttattttttattgtcgcgttgaaattgaaaaagcgtatggtgaggatgtcggaatcgtcgttgatttggtaggttattattcgtcgatcgtcgaaggagatattgtagtttagtatttcgttttttatcgtggtataaacgttcggtagtagtttttcgatggggtagagatgggtgcgattttcgtagcgtaggggaaggtgtaagagtagattttgtacggtatgtaggttgattttcgttagtttgttattaagtgttgcgttaacgttcgttagggaattgagtgggatagtatttaataggcgattttttatggtatttattttgtagttt

SEQ ID NO: 7142 - DNA, 615 bp, Artificial Sequence
  chemically treated genomic DNA (Homo sapiens) CpG-island No: 7142
  unsure (402)
aaactacaaaataaataccataaaaaatcgcctattaaatactatcccactcaattccctaacgaacgttaacgcaacacttaataacaaactaacgaaaatcaacctacataccgtacaaaatctactcttacaccttcccctacgctacgaaaatcgcacccatctctaccccatcgaaaaactactaccgaacgtttataccacgataaaaaacgaaatactaaactacaatatctccttcgacgatcgacgaataataacctaccaaatcaacgacgattccgacatcctcaccatacgctttttcaatttcaacgcgacaataaaaaataacctaacgacgaaccgccgtatactaacttataacgaaacaaaacgcgataaatataatacgaaaantatccacccgaaataccgcgtacaaaacgatctcaacacgccaaaattacaaaaaacgctcacgccgatttatccaacaacgaaaaacgtaaaacaaaccacgctacgtaaattaaccgaccaaacgctaaatctactcgacacctacgccattaaaaaactcctaccgccgaaactatcacaaaaaataataacgctccgaaaacgttacgc

SEQ ID NO: 7143 - DNA, 615 bp, Artificial Sequence
  chemically treated genomic DNA (Homo sapiens) CpG-island No: 7143
  unsure (402)
aggttgtagggtaagtgttatgaaaggtcgtttgttagatgttgttttatttagttttttaacgggcgttggcgtagtatttagtaataaattggcgaaaattaatttgtatatcgtgtaggatttatttttatatttttttttgcgttacgaagatcgtatttatttttattttatcggagaattattgtcgggcgtttatgttacggtggaaggcgaagtgttgaattgtaatatttttttcggcggtcggcggatgatgatttgttagattagcgacggtttcggtatttttattatgcgtttttttaattttagcgcggtaatgaaaaatagtttggcggcgggtcgtcgtgtattggtttatggcgaagtaaagcgcggtaaatatggtgcggagantatttattcggaatatcgcgtgtagggcgattttagtacgttagaattataggaaacgtttacgtcggtttatttaataacggaaggcgtaaagtaggttacgttgcgtaaattaatcgattaggcgttggatttgttcgatatttgcgttattgaagaatttttgtcgtcggaattgttataaggaatgatgacgtttcggaagcgttgcgt

SEQ ID NO: 7144 - DNA, 615 bp, Artificial Sequence
  chemically treated genomic DNA (Homo sapiens) CpG-island No: 7144
  unsure (214)
acgcaacgcttccgaaacgtcatcattccttataacaattccgacgacaaaaattcttcaataacgcaaatatcgaacaaatccaacgcctaatcgattaatttacgcaacgtaacctactttacgccttccgttattaaataaaccgacgtaaacgtttcctataattctaacgtactaaaatcgccctacacgcgatattccgaataaatantctccgcaccatatttaccgcgctttacttcgccataaaccaatacacgacgacccgccgccaaactatttttcattaccgcgctaaaattaaaaaaacgcataataaaaataccgaaaccgtcgctaatctaacaaatcatcatccgccgaccgccgaaaaaaatattacaattcaacacttcgccttccaccgtaacataaacgcccgacaataattctccgataaaataaaaataaatacgatcttcgtaacgcaaaaaaaaatataaaaataaatcctacacgatatacaaattaattttcgccaatttattactaaatactacgccaacgcccgttaaaaaactaaataaaacaacatctaacaaacgacctttcataacacttaccctacaacct

SEQ ID NO: 7145 - DNA, 664 bp, Artificial Sequence
  chemically treated genomic DNA (Homo sapiens) CpG-island No: 7145
gtaggcggtaatcgtttattaggatagttatgtggagacgtagcgggttgttatttaggagcgggagaagtagtttcggttgtagtcgacgcgtgggaatttgttgttggagtaggagcggtaacgtaatttcgagaagtagcgggaggagcgcgcggttttggagaagttgtagagttagttgcggtacgagtagtagcgttgggagcgcgagcgttagtggtagtattaggagttggagcgtgcgggcgcgcggttgtaggagcgcgagggcgaggcgcggtagttacgcgagcggttggagtaggagcgggtcgagttggagcgttagcgttaggtttattagtacgatttggagcggttgcgcgaggtttagcgtgtcgtggagcgcgagcgggagcgtttggagttgttgcgtcgttttaagaagtagaatatcgcgttaggcgcgttgtcgttcgatatattggtcgaggtgagcgcgtagtagttagtgtgcgtaggttgggggtgatcggtttgtacgtgtatttgtacgagtgtatgtaggtgatagggttcgcgggtgtatgcgtgtaggagtgtaagagtaaacggtataagatatttttgtattaatagtttatgtcgtagtatagatttttttcggagttggttaaatgtt

SEQ ID NO: 7146 - DNA, 664 bp, Artificial Sequence
  chemically treated genomic DNA (Homo sapiens) CpG-island No: 7146
aacatttaaccaactccgaaaaaaatctatactacgacataaactattaatacaaaaatatcttataccgtttactcttacactcctacacgcatacacccgcgaaccctatcacctacatacactcgtacaaatacacgtacaaaccgatcacccccaacctacgcacactaactactacgcgctcacctcgaccaatatatcgaacgacaacgcgcctaacgcgatattctacttcttaaaacgacgcaacaactccaaacgctcccgctcgcgctccacgacacgctaaacctcgcgcaaccgctccaaatcgtactaataaacctaacgctaacgctccaactcgacccgctcctactccaaccgctcgcgtaactaccgcgcctcgccctcgcgctcctacaaccgcgcgcccgcacgctccaactcctaatactaccactaacgctcgcgctcccaacgctactactcgtaccgcaactaactctacaacttctccaaaaccgcgcgctcctcccgctacttctcgaaattacgttaccgctcctactccaacaacaaattcccacgcgtcgactacaaccgaaactacttctcccgctcctaaataacaacccgctacgtctccacataactatcctaataaacgattaccgcctac

SEQ ID NO: 7147 - DNA, 664 bp, Artificial Sequence
  chemically treated genomic DNA (Homo sapiens) CpG-island No: 7147
agtatttagttagtttcgagaaaggtttgtattgcggtatgagttgttaatgtaagggtattttgtgtcgtttgtttttatatttttgtacgtatgtattcgcgaattttgttatttgtatgtattcgtgtaaatgtacgtgtaaatcggttatttttaatttgcgtatattggttgttgcgcgtttatttcggttagtgtgtcgggcggtagcgcgtttggcgcggtgttttgttttttgaggcggcgtagtagttttaggcgttttcgttcgcgttttacggtacgttgggtttcgcgtagtcgttttaggtcgtgttggtaggtttggcgttggcgttttagttcggttcgtttttgttttagtcgttcgcgtagttgtcgcgtttcgttttcgcgtttttgtagtcgcgcgttcgtacgttttagtttttggtgttgttattggcgttcgcgtttttagcgttgttgttcgtgtcgtagttggttttgtagtttttttagggtcgcgcgtttttttcgttgtttttcgaagttgcgttgtcgtttttgttttagtagtaggtttttacgcgtcgattgtagtcggaattgtttttttcgtttttggatggtagttcgttgcgtttttatatagttgttttggtgggcgattatcgtttgt

SEQ ID NO: 7148 - DNA, 664 bp, Artificial Sequence
  chemically treated genomic DNA (Homo sapiens) CpG-island No: 7148
acaaacgataatcgcccaccaaaacaactatataaaaacgcaacgaactaccatccaaaaacgaaaaaaacaattccgactacaatcgacgcgtaaaaacctactactaaaacaaaaacgacaacgcaacttcgaaaaacaacgaaaaaaacgcgcgaccctaaaaaaactacaaaaccaactacgacacgaacaacaacgctaaaaacgcgaacgccaataacaacaccaaaaactaaaacgtacgaacgcgcgactacaaaaacgcgaaaacgaaacgcgacaactacgcgaacgactaaaacaaaaacgaaccgaactaaaacgccaacgccaaacctaccaacacgacctaaaacgactacgcgaaacccaacgtaccgtaaaacgcgaacgaaaacgcctaaaactactacgccgcctcaaaaaacaaaacaccgcgccaaacgcgctaccgcccgacacactaaccgaaataaacgcgcaacaaccaatatacgcaaattaaaaataaccgatttacacgtacatttacacgaatacatacaaataacaaaattcgcgaatacatacgtacaaaaatataaaaacaaacgacacaaaatacccttacattaacaactcataccgcaatacaaacctttctcgaaactaactaaatact

SEQ ID NO: 7149 - DNA, 506 bp, Artificial Sequence
  chemically treated genomic DNA (Homo sapiens) CpG-island No: 7149
tagagcgcgtcggcgttaggatttagcgattgttttcgatttagagggcgtcggtagaggtacgtatgcgcgttgtttcggtaggggttgtcgtggcgtagggggcgggattagaggcggttacgtgaggggttttgggttatcgggttacgtgatcgaggtatagattagttgatgtcggagggtttgaagtcgcgtcgcgagggagcgaggtcgtagtgatagcggcgggcgatcggatttaggttgtttcgtcgtattcgtttgcgtttcgcgttttcgttttagtatgatagtttcggcgggttcgcgcggtttaggtgagggcgcgggcggtatcgtggggtttcgaatttaggcgggcgggttgtgttttttatttggggcggcggagtttttagtttttttttttttaagttttagcgttgattttttacggtggagaaaagggtagacggtttttagaatttgggcggcgggtgggtattagtttttttaattttttt

SEQ ID NO: 7150 - DNA, 506 bp, Artificial Sequence
  chemically treated genomic DNA (Homo sapiens) CpG-island No: 7150
aaaaaaattaaaaaaactaatacccacccgccgcccaaattctaaaaaccgtctacccttttctccaccgtaaaaaatcaacgctaaaacttaaaaaaaaaaaaactaaaaactccgccgccccaaataaaaaacacaacccgcccgcctaaattcgaaaccccacgataccgcccgcgccctcacctaaaccgcgcgaacccgccgaaactatcatactaaaacgaaaacgcgaaacgcaaacgaatacgacgaaacaacctaaatccgatcgcccgccgctatcactacgacctcgctccctcgcgacgcgacttcaaaccctccgacatcaactaatctatacctcgatcacgtaacccgataacccaaaacccctcacgtaaccgcctctaatcccgccccctacgccacgacaacccctaccgaaacaacgcgcatacgtacctctaccgacgccctctaaatcgaaaacaatcgctaaatcctaacgccgacgcgctcta

SEQ ID NO: 7151 - DNA, 506 bp, Artificial Sequence
  chemically treated genomic DNA (Homo sapiens) CpG-island No: 7151
ggaagaattggagaggttggtgtttattcgtcgtttaagttttaggagtcgtttgtttttttttttatcgtgaaaagttagcgttggagtttagaaaaaaagagattaggagtttcgtcgttttaggtgggagatatagttcgttcgtttgagttcggggttttacggtgtcgttcgcgtttttatttgagtcgcgcggattcgtcggggttgttatgttggggcgggagcgcgggacgtaggcgggtacggcggggtagtttgggttcgatcgttcgtcgttgttattgcgatttcgttttttcgcggcgcggttttaaatttttcggtattagttgatttgtgtttcggttacgtgattcggtagtttagagttttttacgtgatcgtttttggtttcgttttttgcgttacgataatttttgtcggaatagcgcgtatgcgtgtttttgtcggcgttttttgggtcgaaggtagtcgttaggttttagcgtcgacgcgttttg

SEQ ID NO: 7152 - DNA, 506 bp, Artificial Sequence
  chemically treated genomic DNA (Homo sapiens) CpG-island No: 7152
caaaacgcgtcgacgctaaaacctaacgactaccttcgacccaaaaaacgccgacaaaaacacgcatacgcgctattccgacaaaaattatcgtaacgcaaaaaacgaaaccaaaaacgatcacgtaaaaaactctaaactaccgaatcacgtaaccgaaacacaaatcaactaataccgaaaaatttaaaaccgcgccgcgaaaaaacgaaatcgcaataacaacgacgaacgatcgaacccaaactaccccgccgtacccgcctacgtcccgcgctcccgccccaacataacaaccccgacgaatccgcgcgactcaaataaaaacgcgaacgacaccgtaaaaccccgaactcaaacgaacgaactatatctcccacctaaaacgacgaaactcctaatctctttttttctaaactccaacgctaacttttcacgataaaaaaaaaaacaaacgactcctaaaacttaaacgacgaataaacaccaacctctccaattcttcc

SEQ ID NO: 7153 - DNA, 519 bp, Artificial Sequence
  chemically treated genomic DNA (Homo sapiens) CpG-island No: 7153
tcgtttagttggaattaatcgatggaggtttcgttgtaaattggaatggtaaggggtggggcggagatcgggtaggtgtcggcgtggggcgttaagaggattataattttcggcgtgtttagcgcgtattacgtggtttggcgataacgcgttgcgttcgttcgggcggaattacgtttttcggtatgtattgcgggtcgtcgggttttagggaagagtcgcgttttcggggagggagtagtattggtttattttgtagatggggatatcgagttacgggttggttacgaatttttcgggggcgaaggtggcggagagggatgggttttaggacgttttggcgttcggggaaggttcggcgggacggatttgcggtgcgtagttagtgtcgttcgttttttaggtgtttggcgtgatgatcggggtcggagtggcggtggtggttacggtcgtgtttatttttttggtggtgcggaggttgcgagtgttaagtgagtattcgaggggttttttttggga

SEQ ID NO: 7154 - DNA, 519 bp, Artificial Sequence
  chemically treated genomic DNA (Homo sapiens) CpG-island No: 7154
tcccaaaaaaaacccctcgaatactcacttaacactcgcaacctccgcaccaccaaaaaaataaacacgaccgtaaccaccaccgccactccgaccccgatcatcacgccaaacacctaaaaaacgaacgacactaactacgcaccgcaaatccgtcccgccgaaccttccccgaacgccaaaacgtcctaaaacccatccctctccgccaccttcgcccccgaaaaattcgtaaccaacccgtaactcgatatccccatctacaaaataaaccaatactactccctccccgaaaacgcgactcttccctaaaacccgacgacccgcaatacataccgaaaaacgtaattccgcccgaacgaacgcaacgcgttatcgccaaaccacgtaatacgcgctaaacacgccgaaaattataatcctcttaacgccccacgccgacacctacccgatctccgccccaccccttaccattccaatttacaacgaaacctccatcgattaattccaactaaacga

SEQ ID NO: 7155 - DNA, 519 bp, Artificial Sequence
  chemically treated genomic DNA (Homo sapiens) CpG-island No: 7155
ttttaagaggggtttttcgggtgtttatttggtattcgtagttttcgtattattaggaggatgagtacggtcgtgattattatcgttatttcggtttcgattattacgttaagtatttgagggacgaacggtattggttgcgtatcgtaaattcgtttcgtcgagtttttttcgggcgttaggacgttttggaatttattttttttcgttattttcgttttcgaggagttcgtagttagttcgtgattcgatgtttttatttgtagaatgggttagtgttgtttttttttcgggggcgcgatttttttttgaggttcggcggttcgtagtgtatgtcgggaaacgtagtttcgttcgagcggacgtagcgcgttatcgttagattacgtaatgcgcgttgagtacgtcgggagttgtagtttttttggcgttttacgtcggtatttattcggttttcgttttattttttattattttagtttgtagcggagtttttatcggttgattttagttggacgg

SEQ ID NO: 7156 - DNA, 519 bp, Artificial Sequence
  chemically treated genomic DNA (Homo sapiens) CpG-island No: 7156
ccgtccaactaaaatcaaccgataaaaactccgctacaaactaaaataataaaaaataaaacgaaaaccgaataaataccgacgtaaaacgccaaaaaaactacaactcccgacgtactcaacgcgcattacgtaatctaacgataacgcgctacgtccgctcgaacgaaactacgtttcccgacatacactacgaaccgccgaacctcaaaaaaaaatcgcgcccccgaaaaaaaaacaacactaacccattctacaaataaaaacatcgaatcacgaactaactacgaactcctcgaaaacgaaaataacgaaaaaaaataaattccaaaacgtcctaacgcccgaaaaaaactcgacgaaacgaatttacgatacgcaaccaataccgttcgtccctcaaatacttaacgtaataatcgaaaccgaaataacgataataatcacgaccgtactcatcctcctaataatacgaaaactacgaataccaaataaacacccgaaaaacccctcttaaaa

SEQ ID NO: 7157 - DNA, 615 bp, Artificial Sequence
  chemically treated genomic DNA (Homo sapiens) CpG-island No: 7157
cgcgttcgtgttcgatgtttcggttggatttttttaaggtttcgtatttttcgttggggtttgatttgcggttgtacgagggtattatgcgtattacgtcgtatcgggattttgtttattcggttgttattcgggagtcgtcgagtttgtagtcgtcgttcgcgttgttttttttaatggattcgcgttgggatcgggaagagcgcgtgtcggaggcgtatcgcgcgttttcgtcgttatttacgtcgtcgtgggagttgttgtaagcgtaggcgcgggaacgtacgttcgttatgtaggtcggtaatttgtatttgtacgaggacgcgtacgtcgggatcggtttttttaacgcgtacgtcgtttacggttggttcgagttgtcggcgcgtattcgagagcggattcgcggcgcgcgttttattttcgatcgcgattttttgttttttggcgatcgcgataagttgcgtatttcgtttattacgtattaggcgttttttttattttacgacgcgcgttcgtagtttcgcgcgtttagttgttatttcggtgagcgcgcgttcgggttgagtgggcgatttgttttatattgtggtttttaaataggggtaaggg

SEQ ID NO: 7158 - DNA, 615 bp, Artificial Sequence
  chemically treated genomic DNA (Homo sapiens) CpG-island No: 7158
cccttacccctatttaaaaaccacaatataaaacaaatcgcccactcaacccgaacgcgcgctcaccgaaataacaactaaacgcgcgaaactacgaacgcgcgtcgtaaaataaaaaaaacgcctaatacgtaataaacgaaatacgcaacttatcgcgatcgccaaaaaacaaaaaatcgcgatcgaaaataaaacgcgcgccgcgaatccgctctcgaatacgcgccgacaactcgaaccaaccgtaaacgacgtacgcgttaaaaaaaccgatcccgacgtacgcgtcctcgtacaaatacaaattaccgacctacataacgaacgtacgttcccgcgcctacgcttacaacaactcccacgacgacgtaaataacgacgaaaacgcgcgatacgcctccgacacgcgctcttcccgatcccaacgcgaatccattaaaaaaaacaacgcgaacgacgactacaaactcgacgactcccgaataacaaccgaataaacaaaatcccgatacgacgtaatacgcataataccctcgtacaaccgcaaatcaaaccccaacgaaaaatacgaaaccttaaaaaaatccaaccgaaacatcgaacacgaacgcg

SEQ ID NO: 7159 - DNA, 615 bp, Artificial Sequence
  chemically treated genomic DNA (Homo sapiens) CpG-island No: 7159
tttttgtttttgtttgagaattataatgtgaagtaaatcgtttatttagttcgggcgcgcgtttatcgaggtggtaattgggcgcgcgaggttgcgggcgcgcgtcgtggggtggaaagagcgtttggtgcgtggtgggcgggatgcgtaatttgtcgcggtcgttaggaggtagggagtcgcggtcgaagatgaggcgcgcgtcgcggattcgttttcgggtgcgcgtcggtagttcgggttagtcgtaggcggcgtgcgcgttggagaggtcgatttcggcgtgcgcgttttcgtgtaggtgtaggttgtcggtttgtatggcgagcgtgcgttttcgcgtttgcgtttgtagtagtttttacggcggcgtggatggcggcgggaacgcgcggtgcgttttcgatacgcgtttttttcggttttagcgcgggtttattgggaaaagtagcgcgggcggcggttgtaggttcggcggttttcgggtggtagtcgggtaggtaaagtttcggtgcgacgtggtgcgtatggtgttttcgtgtagtcgtaggttaggttttagcgagaagtgcgaggttttgaggaagtttagtcgggatatcgggtacgggcgcg

SEQ ID NO: 7160 - DNA, 615 bp, Artificial Sequence
  chemically treated genomic DNA (Homo sapiens) CpG-island No: 7160
cgcgcccgtacccgatatcccgactaaacttcctcaaaacctcgcacttctcgctaaaacctaacctacgactacacgaaaacaccatacgcaccacgtcgcaccgaaactttacctacccgactaccacccgaaaaccgccgaacctacaaccgccgcccgcgctacttttcccaataaacccgcgctaaaaccgaaaaaaacgcgtatcgaaaacgcaccgcgcgttcccgccgccatccacgccgccgtaaaaactactacaaacgcaaacgcgaaaacgcacgctcgccatacaaaccgacaacctacacctacacgaaaacgcgcacgccgaaatcgacctctccaacgcgcacgccgcctacgactaacccgaactaccgacgcgcacccgaaaacgaatccgcgacgcgcgcctcatcttcgaccgcgactccctacctcctaacgaccgcgacaaattacgcatcccgcccaccacgcaccaaacgctctttccaccccacgacgcgcgcccgcaacctcgcgcgcccaattaccacctcgataaacgcgcgcccgaactaaataaacgatttacttcacattataattctcaaacaaaaacaaaaa

SEQ ID NO: 7161 - DNA, 684 bp, Artificial Sequence
  chemically treated genomic DNA (Homo sapiens) CpG-island No: 7161
tgttcggattgcgggcgagtttttcgtcgatagtttcgggttgagttagtatcgacgtacgtatagcggcgagaagtcgtatcgttgtttcgattgcgggaagttttttagttacggtgttattttggtttagtatcgtggtatttatattggggcgcggtcgtattagtgcgcggtttgcggtaaggttttcggttggcgttttacgttgttgaaatatcgtagtagttatagcggggagaagtcgtattattgttcggtgtgtggtaaggttttcgggtacggttcgtttttggtatagtatttgcgtacgtacggcggttcgcggttttataagtgttcggtgtgcgttaagggtttcggttagtgttttgcgttgtttaaatatttgcgtacgtatacgggcgagcggttttattcgtgttcgtagtgcggtaaggttttcgggtagagttcggcgttgttgtagtattagcgtatatatacggtcgagcgtttttatcgttgtttttattgcggtaaagttttcgggtagagttttaatttgtaatattatttgcgtatttatacgggcgagcggttttacgtttgttcgtattgttttaaggttttcggttagagtttagcgttgttttagtatttgtacgtgtattcgggcgagcgtttttatcgttgttagttttg

SEQ ID NO: 7162 - DNA, 684 bp, Artificial Sequence
  chemically treated genomic DNA (Homo sapiens) CpG-island No: 7162
caaaactaacaacgataaaaacgctcgcccgaatacacgtacaaatactaaaacaacgctaaactctaaccgaaaaccttaaaacaatacgaacaaacgtaaaaccgctcgcccgtataaatacgcaaataatattacaaattaaaactctacccgaaaactttaccgcaataaaaacaacgataaaaacgctcgaccgtatatatacgctaatactacaacaacgccgaactctacccgaaaaccttaccgcactacgaacacgaataaaaccgctcgcccgtatacgtacgcaaatatttaaacaacgcaaaacactaaccgaaacccttaacgcacaccgaacacttataaaaccgcgaaccgccgtacgtacgcaaatactataccaaaaacgaaccgtacccgaaaaccttaccacacaccgaacaataatacgacttctccccgctataactactacgatatttcaacaacgtaaaacgccaaccgaaaaccttaccgcaaaccgcgcactaatacgaccgcgccccaatataaataccacgatactaaaccaaaataacaccgtaactaaaaaacttcccgcaatcgaaacaacgatacgacttctcgccgctatacgtacgtcgatactaactcaacccgaaactatcgacgaaaaactcgcccgcaatccgaaca

SEQ ID NO: 7163 - DNA, 684 bp, Artificial Sequence
  chemically treated genomic DNA (Homo sapiens) CpG-island No: 7163
tagagttgatagcgatagggacgttcgttcgaatgtacgtgtaggtgttggagtagcgttgagttttggtcgaaggttttggagtagtgcgggtaggcgtagggtcgttcgttcgtgtggatgcgtaggtggtgttgtaagttggagttttgttcgaaggttttgtcgtagtgggggtagcggtaggggcgttcggtcgtgtgtgtgcgttggtgttgtagtagcgtcgagttttgttcgaaggttttgtcgtattgcggatacgggtagggtcgttcgttcgtgtgcgtgcgtaggtgtttgagtagcgtagagtattggtcgaagtttttggcgtatatcgggtatttgtggggtcgcgggtcgtcgtgcgtgcgtaggtgttgtgttaggagcgagtcgtgttcgaaggttttgttatatatcgggtagtggtgcggttttttttcgttgtggttgttgcgatgttttagtagcgtggagcgttagtcgaaggttttgtcgtaggtcgcgtattggtacggtcgcgttttagtgtggatgttacggtgttgagttagggtggtatcgtggttgaaggatttttcgtagtcggggtagcggtacggtttttcgtcgttgtgcgtgcgtcgatgttggtttagttcggagttgtcggcggaaggttcgttcgtaattcgggta

SEQ ID NO: 7164 - DNA, 684 bp, Artificial Sequence
  chemically treated genomic DNA (Homo sapiens) CpG-island No: 7164
tacccgaattacgaacgaaccttccgccgacaactccgaactaaaccaacatcgacgcacgcacaacgacgaaaaaccgtaccgctaccccgactacgaaaaatccttcaaccacgataccaccctaactcaacaccgtaacatccacactaaaacgcgaccgtaccaatacgcgacctacgacaaaaccttcgactaacgctccacgctactaaaacatcgcaacaaccacaacgaaaaaaaaccgcaccactacccgatatataacaaaaccttcgaacacgactcgctcctaacacaacacctacgcacgcacgacgacccgcgaccccacaaatacccgatatacgccaaaaacttcgaccaatactctacgctactcaaacacctacgcacgcacacgaacgaacgaccctacccgtatccgcaatacgacaaaaccttcgaacaaaactcgacgctactacaacaccaacgcacacacacgaccgaacgcccctaccgctacccccactacgacaaaaccttcgaacaaaactccaacttacaacaccacctacgcatccacacgaacgaacgaccctacgcctacccgcactactccaaaaccttcgaccaaaactcaacgctactccaacacctacacgtacattcgaacgaacgtccctatcgctatcaactcta

SEQ ID NO: 7165 - DNA, 504 bp, Artificial Sequence
  chemically treated genomic DNA (Homo sapiens) CpG-island No: 7165
ttagttatcgacgatgtagcgtggcgtattgattgtttcggtgaatacgtttatgtagcgcgtttgtttatatagttttttttacggttatgcgttggtgatgaaaaaaggttagcgtttgttacgagatgtattacgaatttaattggatagcgtcggttatcgttatgttgattaggtgatggagtacggcgaatacgttacgcgcggcgcgttgttggattttttttcgatggggagtgagttgttttatcgttttgatttttttgatgatgaaatcgatagtttgcgggtgtttgacgtcgatagttagcgtacgttggaggaagtagaagcgattaatttgttgttcgcgtacgaattttcgatcgataaagcggtaattgaattgtttcgtagttagtggcgcgatattttcgaagtgaagcgcgatttagaatatatttattaataaggggagtagaggtatattatttgtcgggatcgaatattggtagttattgt

SEQ ID NO: 7166 - DNA, 504 bp, Artificial Sequence
  chemically treated genomic DNA (Homo sapiens) CpG-island No: 7166
acaataactaccaatattcgatcccgacaaataatatacctctactccccttattaataaatatattctaaatcgcgcttcacttcgaaaatatcgcgccactaactacgaaacaattcaattaccgctttatcgatcgaaaattcgtacgcgaacaacaaattaatcgcttctacttcctccaacgtacgctaactatcgacgtcaaacacccgcaaactatcgatttcatcatcaaaaaaatcaaaacgataaaacaactcactccccatcgaaaaaaaatccaacaacgcgccgcgcgtaacgtattcgccgtactccatcacctaatcaacataacgataaccgacgctatccaattaaattcgtaatacatctcgtaacaaacgctaaccttttttcatcaccaacgcataaccgtaaaaaaaactatataaacaaacgcgctacataaacgtattcaccgaaacaatcaatacgccacgctacatcgtcgataactaa

SEQ ID NO: 7167 - DNA, 504 bp, Artificial Sequence
  chemically treated genomic DNA (Homo sapiens) CpG-island No: 7167
ataatggttgttagtattcgatttcggtaggtaatgtgtttttattttttttgttggtaaatatgttttggatcgcgttttatttcgaaggtatcgcgttattggttgcggaatagtttaattgtcgttttatcggtcggaaattcgtgcgcgggtagtagattgatcgtttttattttttttagcgtgcgttggttgtcgacgttaaatattcgtaggttgtcgattttattattaaagaaattaagacgataaggtagtttattttttatcgggaagagatttagtaacgcgtcgcgcgtggcgtattcgtcgtgttttattatttggttaatatggcgataatcggcgttgtttagttgggttcgtaatgtatttcgtgataggcgttgatttttttttattattagcgtatgatcgtggagaaaattgtgtgggtaaacgcgttgtataagcgtatttatcggaataattagtacgttacgttgtatcgtcggtagttgg

SEQ ID NO: 7168 - DNA, 504 bp, Artificial Sequence
  chemically treated genomic DNA (Homo sapiens) CpG-island No: 7168
ccaactaccgacgatacaacgtaacgtactaattattccgataaatacgcttatacaacgcgtttacccacacaattttctccacgatcatacgctaataataaaaaaaaatcaacgcctatcacgaaatacattacgaacccaactaaacaacgccgattatcgccatattaaccaaataataaaacacgacgaatacgccacgcgcgacgcgttactaaatctcttcccgataaaaaataaactaccttatcgtcttaatttctttaataataaaatcgacaacctacgaatatttaacgtcgacaaccaacgcacgctaaaaaaaataaaaacgatcaatctactacccgcgcacgaatttccgaccgataaaacgacaattaaactattccgcaaccaataacgcgataccttcgaaataaaacgcgatccaaaacatatttaccaacaaaaaaaataaaaacacattacctaccgaaatcgaatactaacaaccattat

SEQ ID NO: 7169 - DNA, 1026 bp, Artificial Sequence
  chemically treated genomic DNA (Homo sapiens) CpG-island No: 7169
acggcgcgttttgtacgcgaatttacggtcgtcggttgtttttttttcggttttcggttcgttgtttttagtcgtcgacgtcggttcgtatcgttttcgcgcgttgattggttcgcgtaggttttttgttcggttgttggcggttggggcgaagtcggcgggaggtcgtttcgttttcgttttcgtcgtagagtcgcggcgcgtagtttttttattcgtcgcggtcggggcggtggcgttgttgtcgtcgcggtttgtgaggtagtaattttttttcgtttttgttttattttttttttttttttttcgtttttttcgtttttttttttttcgtcgtttttcgttcgagtgaatgtggcgcggcggcgcgggacgtagtttcggtttttgtcgcggtttcgtaagttcgtgaggagacggagttgttttttgttttcgttttttgcgcgtttcggggagttatcgtcgttggcgaaggagaataagtagggtagcggagggacggtggcgggaaaacgggagagggaggagaagagggttcgagggcgagtagggaaagcggggagggacggacggaaggacggacggttcgacggacggttcggggagggggtcgttattgagtttgttcgatttttcggtttcggtttcgggtggcggcggtagcggcgtcgcggacgaagggcgcggtaagcgttatcgagataataattttgtcgttcggttttgggggtaacggagaggaagcggtggcggtttagcgcggtcgaggttcgtcgagcgttcgggtagcgttttcgttttcgtcggtcgggtgttgttgtcgttcggtgtgcggggcgcgtcggttgttcggaattcgaggttttcggcggtcgttttttttttttttttttttcggtgcgcgcggagttggtttttcgggtttttttggacggagttggattttgtttttcgttaaggtaggaagtgagtttcgtattgtaatttcgggcggtgttacgagtgaaaagttttgtttttttt

SEQ ID NO: 7170 - DNA, 1026 bp, Artificial Sequence
  chemically treated genomic DNA (Homo sapiens) CpG-island No: 7170
aaaaaaaacaaaacttttcactcgtaacaccgcccgaaattacaatacgaaactcacttcctaccttaacgaaaaacaaaatccaactccgtccaaaaaaacccgaaaaaccaactccgcgcgcaccgaaaaaaaaaaaaaaaaaaaacgaccgccgaaaacctcgaattccgaacaaccgacgcgccccgcacaccgaacgacaacaacacccgaccgacgaaaacgaaaacgctacccgaacgctcgacgaacctcgaccgcgctaaaccgccaccgcttcctctccgttacccccaaaaccgaacgacaaaattattatctcgataacgcttaccgcgcccttcgtccgcgacgccgctaccgccgccacccgaaaccgaaaccgaaaaatcgaacaaactcaataacgaccccctccccgaaccgtccgtcgaaccgtccgtccttccgtccgtccctccccgctttccctactcgccctcgaaccctcttctcctccctctcccgttttcccgccaccgtccctccgctaccctacttattctccttcgccaacgacgataactccccgaaacgcgcaaaaaacgaaaacaaaaaacaactccgtctcctcacgaacttacgaaaccgcgacaaaaaccgaaactacgtcccgcgccgccgcgccacattcactcgaacgaaaaacgacgaaaaaaaaaaaaacgaaaaaaacgaaaaaaaaaaaaaaaaaataaaacaaaaacgaaaaaaaattactacctcacaaaccgcgacgacaacaacgccaccgccccgaccgcgacgaataaaaaaactacgcgccgcgactctacgacgaaaacgaaaacgaaacgacctcccgccgacttcgccccaaccgccaacaaccgaacaaaaaacctacgcgaaccaatcaacgcgcgaaaacgatacgaaccgacgtcgacgactaaaaacaacgaaccgaaaaccgaaaaaaaaacaaccgacgaccgtaaattcgcgtacaaaacgcgccgt

SEQ ID NO: 7171 - DNA, 1026 bp, Artificial Sequence
  chemically treated genomic DNA (Homo sapiens) CpG-island No: 7171
aaaaaaaataaaattttttattcgtgatatcgttcggaattgtagtgcgaaatttattttttgttttggcgagaagtaggatttagtttcgtttaggggaattcggaaaattagtttcgcgcgtatcggagagggggaggggaggggacggtcgtcgggagtttcgggtttcgggtaatcggcgcgtttcgtatatcggacggtagtagtattcggtcggcgggggcgaggacgttgttcgggcgttcggcgagtttcggtcgcgttaggtcgttatcgtttttttttcgttgtttttagagtcgggcggtagggttattgtttcgatagcgtttgtcgcgtttttcgttcgcgacgtcgttgtcgtcgttattcggagtcggagtcgaggagtcgggtaggtttaatagcggtttttttttcgggtcgttcgtcgggtcgttcgttttttcgttcgttttttttcgttttttttattcgttttcgaattttttttttttttttttttcgttttttcgttatcgttttttcgttgttttgtttgttttttttcgttagcggcggtggtttttcgagacgcgtagggggcgggagtaggaggtagtttcgtttttttacgagtttgcggggtcgcggtaggggtcgagattgcgtttcgcgtcgtcgcgttatatttattcgagcgagagacggcgaggggagggaggacggagggagcggagagaaaggaggaggaatggggtaggggcggaggggagttattgttttataggtcgcggcggtaatagcgttatcgtttcggtcgcgacgggtgaagaggttgcgcgtcgcgattttgcggcgggggcgggggcggggcggtttttcgtcggtttcgttttaatcgttaatagtcgggtaggaggtttgcgcgggttagttagcgcgcgggggcggtgcgggtcgacgtcggcggttgggggtagcgggtcgggggtcgggggaggggtagtcggcggtcgtgggttcgcgtgtaaggcgcgtcgt

SEQ ID NO: 7172 - DNA, 1026 bp, Artificial Sequence
  chemically treated genomic DNA (Homo sapiens) CpG-island No: 7172
acgacgcgccttacacgcgaacccacgaccgccgactacccctcccccgacccccgacccgctacccccaaccgccgacgtcgacccgcaccgcccccgcgcgctaactaacccgcgcaaacctcctacccgactattaacgattaaaacgaaaccgacgaaaaaccgccccgcccccgcccccgccgcaaaatcgcgacgcgcaacctcttcacccgtcgcgaccgaaacgataacgctattaccgccgcgacctataaaacaataactcccctccgcccctaccccattcctcctcctttctctccgctccctccgtcctccctcccctcgccgtctctcgctcgaataaatataacgcgacgacgcgaaacgcaatctcgacccctaccgcgaccccgcaaactcgtaaaaaaacgaaactacctcctactcccgccccctacgcgtctcgaaaaaccaccgccgctaacgaaaaaaaacaaacaaaacaacgaaaaaacgataacgaaaaaacgaaaaaaaaaaaaaaaaaaaattcgaaaacgaataaaaaaaacgaaaaaaaacgaacgaaaaaacgaacgacccgacgaacgacccgaaaaaaaaaccgctattaaacctacccgactcctcgactccgactccgaataacgacgacaacgacgtcgcgaacgaaaaacgcgacaaacgctatcgaaacaataaccctaccgcccgactctaaaaacaacgaaaaaaaaacgataacgacctaacgcgaccgaaactcgccgaacgcccgaacaacgtcctcgcccccgccgaccgaatactactaccgtccgatatacgaaacgcgccgattacccgaaacccgaaactcccgacgaccgtcccctcccctccccctctccgatacgcgcgaaactaattttccgaattcccctaaacgaaactaaatcctacttctcgccaaaacaaaaaataaatttcgcactacaattccgaacgatatcacgaataaaaaattttatttttttt

SEQ ID NO: 7173 - DNA, 758 bp, Artificial Sequence
  chemically treated genomic DNA (Homo sapiens) CpG-island No: 7173
  unsure (559)
cgtgagcgcgtagtagtagttcggcgaagtttattaggttcgcgcggttatacgttttttgatacgtttgatatattttttgttaggtttgttttatcggattatcgtagttttgaatatgatgcggacgtaggtttttatttttttggttgttgatgtattatattgtttgtcgcggcggttattgtttttcgtcgaggtttatggttttgattagacgtttaagtaggcgtagttggtttttattgtcgaggatttggaaattttgcggtagattggcgtttatatggtgcgtacgtagtaaacgggtgcgttagttcggtggaaggtgcgatttatatatcgttttggttggtgttattagtggtcgatacgatgacgtattttcgtcgtcgttttgttggtaaacgttacgttataatcgagtatggcgagtagtttttacgtttattaattagcgatacgatgtattagtacgcgcgtgtttatatttgtcgcggtcgttagtattagaaggttgttgtttggcgcggtacggtttcgcgttgtttgttattanggttgtgatattcgtaatgaagatgaatcgaaatcggcgttgatgtcgcggtttggttttacggaaatttaggcggaagcgattttcgaattgaaattgcgttattttgttaaattggaagagatgaagattcgcggtgagtagagtgaattggaaaaagagcgcgattagttgtagggtattttggttttcgagcgta

SEQ ID NO: 7174 - DNA, 758 bp, Artificial Sequence
  chemically treated genomic DNA (Homo sapiens) CpG-island No: 7174
  unsure (200)
tacgctcgaaaaccaaaataccctacaactaatcgcgctctttttccaattcactctactcaccgcgaatcttcatctcttccaatttaacaaaataacgcaatttcaattcgaaaatcgcttccgcctaaatttccgtaaaaccaaaccgcgacatcaacgccgatttcgattcatcttcattacgaatatcacaaccntaataacaaacaacgcgaaaccgtaccgcgccaaacaacaaccttctaatactaacgaccgcgacaaatataaacacgcgcgtactaatacatcgtatcgctaattaataaacgtaaaaactactcgccatactcgattataacgtaacgtttaccaacaaaacgacgacgaaaatacgtcatcgtatcgaccactaataacaccaaccaaaacgatatataaatcgcaccttccaccgaactaacgcacccgtttactacgtacgcaccatataaacgccaatctaccgcaaaatttccaaatcctcgacaataaaaaccaactacgcctacttaaacgtctaatcaaaaccataaacctcgacgaaaaacaataaccgccgcgacaaacaatataatacatcaacaaccaaaaaaataaaaacctacgtccgcatcatattcaaaactacgataatccgataaaacaaacctaacaaaaaatatatcaaacgtatcaaaaaacgtataaccgcgcgaacctaataaacttcgccgaactactactacgcgctcacg

SEQ ID NO: 7175 - DNA, 758 bp, Artificial Sequence
  chemically treated genomic DNA (Homo sapiens) CpG-island No: 7175
  unsure (200)
tacgttcggaagttaaaatgttttgtaattggtcgcgttttttttttagtttattttgtttatcgcgaatttttattttttttagtttggtaagatgacgtagttttagttcgaggatcgttttcgtttgggttttcgtaaggttaaatcgcgatattagcgtcggtttcggtttatttttattacgaatgttatagttntaatgataaatagcgcgaagtcgtgtcgcgttaagtagtaattttttggtgttggcggtcgcggtaagtgtaaatacgcgcgtattggtgtatcgtatcgttggttgatgagcgtgaaaattgttcgttatattcgattatggcgtgacgtttattaataaagcggcggcggagatgcgttatcgtatcggttattgatggtattagttagggcggtatgtgggtcgtattttttatcgggttggcgtattcgtttgttgcgtgcgtattatatggacgttaatttgtcgtaggatttttagattttcgatagtgaagattagttacgtttgtttaagcgtttgattaaagttatgaatttcgacgagaagtagtggtcgtcgcggtaggtaatgtggtatattaatagttagaaagatgaaggtttgcgttcgtattatatttaaagttacggtaattcggtggagtagatttggtagaaggtgtattaggcgtattaggaagcgtgtgatcgcgcgggtttggtggatttcgtcgagttgttgttgcgcgtttacg

SEQ ID NO: 7176 - DNA, 758 bp, Artificial Sequence
  chemically treated genomic DNA (Homo sapiens) CpG-island No: 7176
  unsure (559)
cgtaaacgcgcaacaacaactcgacgaaatccaccaaacccgcgcgatcacacgcttcctaatacgcctaatacaccttctaccaaatctactccaccgaattaccgtaactttaaatataatacgaacgcaaaccttcatctttctaactattaatataccacattacctaccgcgacgaccactacttctcgtcgaaattcataactttaatcaaacgcttaaacaaacgtaactaatcttcactatcgaaaatctaaaaatcctacgacaaattaacgtccatataatacgcacgcaacaaacgaatacgccaacccgataaaaaatacgacccacataccgccctaactaataccatcaataaccgatacgataacgcatctccgccgccgctttattaataaacgtcacgccataatcgaatataacgaacaattttcacgctcatcaaccaacgatacgatacaccaatacgcgcgtatttacacttaccgcgaccgccaacaccaaaaaattactacttaacgcgacacgacttcgcgctatttatcattanaactataacattcgtaataaaaataaaccgaaaccgacgctaatatcgcgatttaaccttacgaaaacccaaacgaaaacgatcctcgaactaaaactacgtcatcttaccaaactaaaaaaaataaaaattcgcgataaacaaaataaactaaaaaaaaaacgcgaccaattacaaaacattttaacttccgaacgta

SEQ ID NO: 7177 - DNA, 1015 bp, Artificial Sequence
  chemically treated genomic DNA (Homo sapiens) CpG-island No: 7177
cgattacgttgtcgtcggcgcgtggttagggcgagtcgtttacggtaaattaacgttgtcgtttggggcgatcgttgattatatgttgatgggaagcgacgattagaaattgttgatgggtttcgatgcgggttacggtttttttgtatttttgacgatttggtggtttttgaggtgaatcgttatattttgcgtcgcgttatcgattaattggtggaaaaaggttgggtatagcgtcgttagggcgtcggcgtgttggtgttgatgcgttcgttcgattattcgtttaacgtttaggcgcgttttagttagaatttgttggattagggtagttattttattagcgaaaaattgttttcggtattgcgtttcgcgttcggttacgtcgttgacgtattggggattatcgagggggagaacgttatttatttgcgtattttgcgtcgtgttaacggcgtcgcgttttgtttaatcgattattatttcgcggattttattttttggtcgacgttgtaacgtttcgatagcggttcgttgtacgattttttgcgcgagtaaatcggaattgcgttgcgtcgtagttagacgcggattagcgttcgtcgcgtttaggttaaagagtgttagcgttttgaaatttcgaatatgtcgtcgttgttgtgcgtgcgtatttttaattatcgtgacggtgaaagtagttcggcggagtatttcgttagtttgacgcgcgtcgatatgattgaatttattatggagtattgaatgtacgtagatatcgcgattcgttaatattaggaggcggcgagtttttatgtttgtaggtcgcgtttatgaattttttcgagagatggtttaatgcgtagttatttgtcgtttatgtaaaagttatgatatcgtcgtaataggtcgggatcgtcgtttgataaaagttaacgtcgttgaagtaatggttgagtttgcgatggttgtcgatggtttttttttgttgtaaaaagtagacgtcgttttgtgcgat

SEQ ID NO: 7178 - DNA, 1015 bp, Artificial Sequence
  chemically treated genomic DNA (Homo sapiens) CpG-island No: 7178
atcgcacaaaacgacgtctactttttacaacaaaaaaaaaccatcgacaaccatcgcaaactcaaccattacttcaacgacgttaacttttatcaaacgacgatcccgacctattacgacgatatcataacttttacataaacgacaaataactacgcattaaaccatctctcgaaaaaattcataaacgcgacctacaaacataaaaactcgccgcctcctaatattaacgaatcgcgatatctacgtacattcaatactccataataaattcaatcatatcgacgcgcgtcaaactaacgaaatactccgccgaactactttcaccgtcacgataattaaaaatacgcacgcacaacaacgacgacatattcgaaatttcaaaacgctaacactctttaacctaaacgcgacgaacgctaatccgcgtctaactacgacgcaacgcaattccgatttactcgcgcaaaaaatcgtacaacgaaccgctatcgaaacgttacaacgtcgaccaaaaaataaaatccgcgaaataataatcgattaaacaaaacgcgacgccgttaacacgacgcaaaatacgcaaataaataacgttctccccctcgataatccccaatacgtcaacgacgtaaccgaacgcgaaacgcaataccgaaaacaatttttcgctaataaaataactaccctaatccaacaaattctaactaaaacgcgcctaaacgttaaacgaataatcgaacgaacgcatcaacaccaacacgccgacgccctaacgacgctatacccaacctttttccaccaattaatcgataacgcgacgcaaaatataacgattcacctcaaaaaccaccaaatcgtcaaaaatacaaaaaaaccgtaacccgcatcgaaacccatcaacaatttctaatcgtcgcttcccatcaacatataatcaacgatcgccccaaacgacaacgttaatttaccgtaaacgactcgccctaaccacgcgccgacgacaacgtaatcg

SEQ ID NO: 7179 - DNA, 1015 bp, Artificial Sequence
  chemically treated genomic DNA (Homo sapiens) CpG-island No: 7179
gtcgtataaaacggcgtttgttttttatagtaggaagaagttatcgatagttatcgtaaatttagttattattttagcgacgttggtttttattaggcggcgatttcgatttattacggcggtattatgatttttgtatgggcgatagataattacgtattaggttatttttcggggaaatttataggcgcgatttgtaggtatgaaagttcgtcgttttttaatgttggcgggtcgcggtatttgcgtgtatttagtgttttatagtgaatttaattatgtcggcgcgcgttaggttgacggagtatttcgtcgggttgtttttatcgttacggtggttaagggtgcgtacgtatagtagcggcgatatattcgggattttaagacgttggtattttttggtttgggcgcggcgggcgttgattcgcgtttggttgcggcgtagcgtaatttcggtttgttcgcgtagaaaatcgtgtagcgagtcgttgtcgaagcgttgtagcgtcggttagagggtgaggttcgcgaagtagtggtcgattaaatagagcgcgacgtcgttgatacgacgtagggtgcgtaggtggatgacgttttttttttcggtaatttttagtgcgttagcgacgtggtcggacgcggggcgtaatatcgaaagtagtttttcgttggtgggatggttgttttgatttagtagattttggttaaaacgcgtttgggcgttgagcgggtaatcgaacgggcgtattagtattagtacgtcgacgttttgacggcgttgtatttagtttttttttattagttggtcgatggcgcggcgtagggtgtggcgatttattttaaaggttattagatcgttaaaggtgtagagaaatcgtaattcgtatcgaagtttattagtagtttttgatcgtcgttttttattagtatatggttaacggtcgttttaggcggtaacgttaatttgtcgtgagcggttcgttttgattacgcgtcgacggtagcgtaatcg

SEQ ID NO: 7180 - DNA, 1015 bp, Artificial Sequence
  chemically treated genomic DNA (Homo sapiens) CpG-island No: 7180
cgattacgctaccgtcgacgcgtaatcaaaacgaaccgctcacgacaaattaacgttaccgcctaaaacgaccgttaaccatatactaataaaaaacgacgatcaaaaactactaataaacttcgatacgaattacgatttctctacacctttaacgatctaataacctttaaaataaatcgccacaccctacgccgcgccatcgaccaactaataaaaaaaaactaaatacaacgccgtcaaaacgtcgacgtactaatactaatacgcccgttcgattacccgctcaacgcccaaacgcgttttaaccaaaatctactaaatcaaaacaaccatcccaccaacgaaaaactactttcgatattacgccccgcgtccgaccacgtcgctaacgcactaaaaattaccgaaaaaaaaaacgtcatccacctacgcaccctacgtcgtatcaacgacgtcgcgctctatttaatcgaccactacttcgcgaacctcaccctctaaccgacgctacaacgcttcgacaacgactcgctacacgattttctacgcgaacaaaccgaaattacgctacgccgcaaccaaacgcgaatcaacgcccgccgcgcccaaaccaaaaaataccaacgtcttaaaatcccgaatatatcgccgctactatacgtacgcacccttaaccaccgtaacgataaaaacaacccgacgaaatactccgtcaacctaacgcgcgccgacataattaaattcactataaaacactaaatacacgcaaataccgcgacccgccaacattaaaaaacgacgaactttcatacctacaaatcgcgcctataaatttccccgaaaaataacctaatacgtaattatctatcgcccatacaaaaatcataataccgccgtaataaatcgaaatcgccgcctaataaaaaccaacgtcgctaaaataataactaaatttacgataactatcgataacttcttcctactataaaaaacaaacgccgttttatacgac

SEQ ID NO: 7181 - DNA, 632 bp, Artificial Sequence
  chemically treated genomic DNA (Homo sapiens) CpG-island No: 7181
tttgtgtacgtttgagttttaggataatcgtcgtttgtacgattgggtattggataatattacgatttttgtttattcgcgttagtatgagttttcgcgtttgaatttggaatatatcgtgatgtttaagcgtaagttgaatttgttggtgatcgataagtacgttgaaggttgggatgattcgcgtatgtcgattattttcggtttgcgtcgtcgtggttatattgcggtttttattcgtgagttttgtaaacgtatcggcgtgattaagtaggataatattattgagatggcgtcgttggaattttgtattcgtgaagattttaacgaaaatgcgtcgcgcgtaatggcgggtatcgattcggtgaaattggttatcgaaaattattagggcgaaggcgaaatggttattatgtcgaaatattcggaataaatcggaaatgggtattcgttaggtgtcgtttagcggtgagaattggattgatcgcgtcgattttcgcgaagaaattattggattggggttaatttttatcgtatttcgtattatttttacgttgaagagatgttcgattgggtagatgaatatggtatcgtggtgattgatgaaattgttgttgtcggttttaattttt

SEQ ID NO: 7182 - DNA, 632 bp, Artificial Sequence
  chemically treated genomic DNA (Homo sapiens) CpG-island No: 7182
aaaaattaaaaccgacaacaacaatttcatcaatcaccacgataccatattcatctacccaatcgaacatctcttcaacgtaaaaataatacgaaatacgataaaaattaaccccaatccaataatttcttcgcgaaaatcgacgcgatcaatccaattctcaccgctaaacgacacctaacgaatacccatttccgatttattccgaatatttcgacataataaccatttcgccttcgccctaataattttcgataaccaatttcaccgaatcgatacccgccattacgcgcgacgcattttcgttaaaatcttcacgaatacaaaattccaacgacgccatctcaataatattatcctacttaatcacgccgatacgtttacaaaactcacgaataaaaaccgcaatataaccacgacgacgcaaaccgaaaataatcgacatacgcgaatcatcccaaccttcaacgtacttatcgatcaccaacaaattcaacttacgcttaaacatcacgatatattccaaattcaaacgcgaaaactcatactaacgcgaataaacaaaaatcgtaatattatccaatacccaatcgtacaaacgacgattatcctaaaactcaaacgtacacaaa

SEQ ID NO: 7183 - DNA, 632 bp, Artificial Sequence
  chemically treated genomic DNA (Homo sapiens) CpG-island No: 7183
agaggttaaagtcgatagtagtagttttattaattattacgatgttatgtttatttgtttagtcgagtatttttttagcgtaagggtaatgcgaggtacggtaggagttggttttaatttagtggttttttcgcggaaatcggcgcgattaatttaatttttatcgttaaacggtatttgacgggtgtttattttcggtttgtttcggatgtttcggtatggtaattatttcgttttcgttttgatagttttcgataattagttttatcggatcgatattcgttattgcgcgcggcgtattttcgttgagatttttacggatgtaggattttagcgacgttattttaatggtgttgttttgtttggttacgtcgatgcgtttgtagaatttacgaatagaagtcgtagtgtaattacgacgacgtagatcggaaatggtcggtatacgcgggttattttagtttttaacgtgtttgtcggttattagtaggtttaatttacgtttggatattacggtgtattttagatttaggcgcgagaatttatattggcgcgggtgaataggaatcgtgatgttgtttagtatttagtcgtatagacgacggttgttttggaatttaagcgtatataga

SEQ ID NO: 7184 - DNA, 632 bp, Artificial Sequence
  chemically treated genomic DNA (Homo sapiens) CpG-island No: 7184
tctatatacgcttaaattccaaaacaaccgtcgtctatacgactaaatactaaacaacatcacgattcctattcacccgcgccaatataaattctcgcgcctaaatctaaaatacaccgtaatatccaaacgtaaattaaacctactaataaccgacaaacacgttaaaaactaaaataacccgcgtataccgaccatttccgatctacgtcgtcgtaattacactacgacttctattcgtaaattctacaaacgcatcgacgtaaccaaacaaaacaacaccattaaaataacgtcgctaaaatcctacatccgtaaaaatctcaacgaaaatacgccgcgcgcaataacgaatatcgatccgataaaactaattatcgaaaactatcaaaacgaaaacgaaataattaccataccgaaacatccgaaacaaaccgaaaataaacacccgtcaaataccgtttaacgataaaaattaaattaatcgcgccgatttccgcgaaaaaaccactaaattaaaaccaactcctaccgtacctcgcattacccttacgctaaaaaaatactcgactaaacaaataaacataacatcgtaataattaataaaactactactatcgactttaacctct

SEQ ID NO: 7185 - DNA, 874 bp, Artificial Sequence
  chemically treated genomic DNA (Homo sapiens) CpG-island No: 7185
tatgatcgaaattagcgcggtgttggcgggttttatttgtacggggggtagcgtttatttttggtcgttggcgatgatcgcgattttcggttatttggttaataagtgcggggagaatcgtgttgtttggtttttttcgggtttgagattatatgtttgtacgtttagtttagagatttttttaagttttcgcgtacgattttttttttatttatagtattcgttagcgcggcgaatttaattatcgtatatttatcgtttatttgatacgcgttaatcggtaatttagtacgtttacgtagtttacgtacgatgtcgaggtacgttttagtaggtttaattattaggtagtttgcgttttgggttttatttagtagtgatttacgaatcgttttacgacggtttattgggtttatttgatagtttttgcggtcgttttttaatgcgttttcggtagttttacggaacgggttataaaaggaggaggcgaatttggtcgaatacgatataatcgtcgtatttttaaatttcgtagcgtttagcgtttgacgaatcgtttgtatttggtcgtttatcgcggcggaaggggcgatgaagtttgtatttgtagtagttgtaattacggtttgtttgtttaaattttttagagtcgcgtcgttgtcgacgttatgttcgtatagtatatcgtagtgatcgtgagaagtgtatttatagaagtaggtgtttgatataacgattatttttggtacggtttgtttgtagatgcgcgatatacgcggttatagtttattttcgcgttaggtatcgttgtcggttgtgtgtttgtgtgtgtatttgtatgtttgagtatttgtgtttgtgtgtatatgtattg

SEQ ID NO: 7186 - DNA, 874 bp, Artificial Sequence
  chemically treated genomic DNA (Homo sapiens) CpG-island No: 7186
caatacatatacacacaaacacaaatactcaaacatacaaatacacacacaaacacacaaccgacaacgatacctaacgcgaaaataaactataaccgcgtatatcgcgcatctacaaacaaaccgtaccaaaaataatcgttatatcaaacacctacttctataaatacacttctcacgatcactacgatatactatacgaacataacgtcgacaacgacgcgactctaaaaaatttaaacaaacaaaccgtaattacaactactacaaatacaaacttcatcgccccttccgccgcgataaacgaccaaatacaaacgattcgtcaaacgctaaacgctacgaaatttaaaaatacgacgattatatcgtattcgaccaaattcgcctcctccttttataacccgttccgtaaaactaccgaaaacgcattaaaaaacgaccgcaaaaactatcaaataaacccaataaaccgtcgtaaaacgattcgtaaatcactactaaataaaacccaaaacgcaaactacctaataattaaacctactaaaacgtacctcgacatcgtacgtaaactacgtaaacgtactaaattaccgattaacgcgtatcaaataaacgataaatatacgataattaaattcgccgcgctaacgaatactataaataaaaaaaaaatcgtacgcgaaaacttaaaaaaatctctaaactaaacgtacaaacatataatctcaaacccgaaaaaaaccaaacaacacgattctccccgcacttattaaccaaataaccgaaaatcgcgatcatcgccaacgaccaaaaataaacgctaccccccgtacaaataaaacccgccaacaccgcgctaatttcgatcata

SEQ ID NO: 7187 - DNA, 874 bp, Artificial Sequence
  chemically treated genomic DNA (Homo sapiens) CpG-island No: 7187
taatatatgtatatatagatataaatgtttaaatatgtagatatatatatagatatataatcggtagcgatgtttggcgcgaagatggattgtggtcgcgtatgtcgcgtatttgtaagtagatcgtgttagaaatgatcgttatgttagatatttgtttttgtgaatatattttttacggttattgcggtgtgttgtgcgagtatggcgtcgataacgacgcgattttggaaaatttaggtaagtaagtcgtggttgtagttgttgtaggtgtagattttatcgtttttttcgtcgcgatggacggttaggtataggcgattcgttaggcgttggacgttgcgggatttaaagatacggcgattatgtcgtattcgattaagttcgttttttttttttatggttcgtttcgtgaagttgtcggaagcgtattaaaaggcgatcgtaaaagttattagatgaatttaatgaatcgtcgtgaggcgattcgtgaattattgttggatgaagtttagggcgtagattgtttgatggttaaatttgttggagcgtatttcgatatcgtgcgtgagttgcgtgaacgtattgaattgtcgattggcgcgtattaggtgagcggtgagtatgcgatgattaagttcgtcgcgttggcgggtgttatagatgaagagaaagtcgtgcgcgaaagtttaggggaatttttagattggacgtgtaggtatgtaattttagattcgaaggaagttaaatagtacggtttttttcgtatttattgattagataatcgaggatcgcggttatcgttagcggttagaaatgggcgttatttttcgtataagtaaagttcgttagtatcgcgttggtttcgattatg

SEQ ID NO: 7188 - DNA, 874 bp, Artificial Sequence
  chemically treated genomic DNA (Homo sapiens) CpG-island No: 7188
cataatcgaaaccaacgcgatactaacgaactttacttatacgaaaaataacgcccatttctaaccgctaacgataaccgcgatcctcgattatctaatcaataaatacgaaaaaaaccgtactatttaacttccttcgaatctaaaattacatacctacacgtccaatctaaaaattcccctaaactttcgcgcacgactttctcttcatctataacacccgccaacgcgacgaacttaatcatcgcatactcaccgctcacctaatacgcgccaatcgacaattcaatacgttcacgcaactcacgcacgatatcgaaatacgctccaacaaatttaaccatcaaacaatctacgccctaaacttcatccaacaataattcacgaatcgcctcacgacgattcattaaattcatctaataacttttacgatcgccttttaatacgcttccgacaacttcacgaaacgaaccataaaaaaaaaaaacgaacttaatcgaatacgacataatcgccgtatctttaaatcccgcaacgtccaacgcctaacgaatcgcctatacctaaccgtccatcgcgacgaaaaaaacgataaaatctacacctacaacaactacaaccacgacttacttacctaaattttccaaaatcgcgtcgttatcgacgccatactcgcacaacacaccgcaataaccgtaaaaaatatattcacaaaaacaaatatctaacataacgatcatttctaacacgatctacttacaaatacgcgacatacgcgaccacaatccatcttcgcgccaaacatcgctaccgattatatatctatatatatatctacatatttaaacatttatatctatatatacatatatta

SEQ ID NO: 7189 - DNA, 631 bp, Artificial Sequence
  chemically treated genomic DNA (Homo sapiens) CpG-island No: 7189
gaattttttcgtttggcgcggtttagtagcggtggcggcgcggtgttttacgatttcggtaatatttgttttatttttatggttggtaagtcggagtacgataaaattatttttacgtcgattgtgtttaatgcgttgaacgcgttcggcgttagcgtcgaagcgttcggacgtaacgatttggtggtgaaaatcgtcgaaggcgatcgtaaagttttaggttcggtttatcgcgaaattaaagatcgcggtttttattacggtattttgttatttaatgtcgattttagtcgtttggtaaattattttaattcggataaaaagaaattggcggcgaaaggtattacgtcggtacgttttcgcgtgattaattttatcgagttgttgtcggggattatttatgagtaggtttgcgaggttataatcgaggtttttttcgtttattatggcgagcgcgtggaagcgggaaattattttttcgaataaaacgttagagttgttaaattttgtcgaaatttttgttcgttaagatagttgggaatggaattttcgttaagtttcggtattttcgtattttttggatgaacggtttaattgggggcggtttggaattttatttcgacgttgaaaa

SEQ ID NO: 7190 - DNA, 631 bp, Artificial Sequence
  chemically treated genomic DNA (Homo sapiens) CpG-island No: 7190
ttttcaacgtcgaaataaaattccaaaccgcccccaattaaaccgttcatccaaaaaatacgaaaataccgaaacttaacgaaaattccattcccaactatcttaacgaacaaaaatttcgacaaaatttaacaactctaacgttttattcgaaaaaataatttcccgcttccacgcgctcgccataataaacgaaaaaaacctcgattataacctcgcaaacctactcataaataatccccgacaacaactcgataaaattaatcacgcgaaaacgtaccgacgtaatacctttcgccgccaatttctttttatccgaattaaaataatttaccaaacgactaaaatcgacattaaataacaaaataccgtaataaaaaccgcgatctttaatttcgcgataaaccgaacctaaaactttacgatcgccttcgacgattttcaccaccaaatcgttacgtccgaacgcttcgacgctaacgccgaacgcgttcaacgcattaaacacaatcgacgtaaaaataattttatcgtactccgacttaccaaccataaaaataaaacaaatattaccgaaatcgtaaaacaccgcgccgccaccgctactaaaccgcgccaaacgaaaaaattc

SEQ ID NO: 7191 - DNA, 631 bp, Artificial Sequence
  chemically treated genomic DNA (Homo sapiens) CpG-island No: 7191
tttttaacgtcgaaatgaagttttaggtcgtttttagttaaatcgtttatttagaagatgcgaaaatgtcggagtttgacggaagttttatttttagttattttggcgggtaaaggtttcggtaaagtttggtaattttggcgttttgttcggggagatgatttttcgtttttacgcgttcgttataatgggcgaaaaaggtttcggttatggtttcgtaaatttgtttatgggtgattttcggtaatagttcggtgaggttggttacgcgggaacgtatcgacgtaatgtttttcgtcgttagtttttttttattcggattgagatagtttgttaggcggttgaggtcggtattgagtagtaaggtgtcgtggtggaagtcgcgatttttggtttcgcgataggtcgagtttgagattttgcggtcgttttcgacggtttttattattagatcgttacgttcggacgtttcggcgttgacgtcgagcgcgtttagcgtattgagtataatcgacgtggagatagttttatcgtatttcggtttgttagttataaaggtaaagtaggtattgtcgagatcgtggaatatcgcgtcgttatcgttattaagtcgcgttaggcgggggaattt

SEQ ID NO: 7192 - DNA, 631 bp, Artificial Sequence
  chemically treated genomic DNA (Homo sapiens) CpG-island No: 7192
aaattcccccgcctaacgcgacttaataacgataacgacgcgatattccacgatctcgacaatacctactttacctttataactaacaaaccgaaatacgataaaactatctccacgtcgattatactcaatacgctaaacgcgctcgacgtcaacgccgaaacgtccgaacgtaacgatctaataataaaaaccgtcgaaaacgaccgcaaaatctcaaactcgacctatcgcgaaaccaaaaatcgcgacttccaccacgacaccttactactcaataccgacctcaaccgcctaacaaactatctcaatccgaataaaaaaaaactaacgacgaaaaacattacgtcgatacgttcccgcgtaaccaacctcaccgaactattaccgaaaatcacccataaacaaatttacgaaaccataaccgaaacctttttcgcccattataacgaacgcgtaaaaacgaaaaatcatctccccgaacaaaacgccaaaattaccaaactttaccgaaacctttacccgccaaaataactaaaaataaaacttccgtcaaactccgacattttcgcatcttctaaataaacgatttaactaaaaacgacctaaaacttcatttcgacgttaaaaa

SEQ ID NO: 7193 - DNA, 506 bp, Artificial Sequence
  chemically treated genomic DNA (Homo sapiens) CpG-island No: 7193
  unsure (24)
ggtatattttggtttacgttgaangacgcgagtttattgtcgattttagacgttttttttcgttttagtcgtgttaggtgttgttttagatttaggttatgtcgtttaattcgttgcgtatatcgtttgttgattacgtgtagttttttttttaggcgggatttatatagcggttagttattcgttatttatattattacgttaaagggtgatagtaggtttataagacgttttagcgtcgttatagtgcgtttatcgaatacgtgcgtaataatcgtttttcggagattgttatacgcgtaaaatagttagcgttggcgcgatttagtttcgatatagttttattgttcgtttattttcgcgtagacgatgacgttattgttcggttgtatgcgcgaggttatcgattgcggtttgagttttttaagtgacgtaaaatcgtgttgaggttaacgtttataatgcgggttgttgttcggtatttaacgttatttatggttatatta

SEQ ID NO: 7194 - DNA, 506 bp, Artificial Sequence
  chemically treated genomic DNA (Homo sapiens) CpG-island No: 7194
  unsure (483)
taatataaccataaataacgttaaataccgaacaacaacccgcattataaacgttaacctcaacacgattttacgtcacttaaaaaactcaaaccgcaatcgataacctcgcgcatacaaccgaacaataacgtcatcgtctacgcgaaaataaacgaacaataaaactatatcgaaactaaatcgcgccaacgctaactattttacgcgtataacaatctccgaaaaacgattattacgcacgtattcgataaacgcactataacgacgctaaaacgtcttataaacctactatcaccctttaacgtaataatataaataacgaataactaaccgctatataaatcccgcctaaaaaaaaaactacacgtaatcaacaaacgatatacgcaacgaattaaacgacataacctaaatctaaaacaacacctaacacgactaaaacgaaaaaaaacgtctaaaatcgacaataaactcgcgtcnttcaacgtaaaccaaaatatacc

SEQ ID NO: 7195 - DNA, 506 bp, Artificial Sequence
  chemically treated genomic DNA (Homo sapiens) CpG-island No: 7195
  unsure (483)
tgatatggttatgaatggcgttggatgtcgggtaatagttcgtattatgggcgttggttttaatacgattttacgttatttaaaaaatttaggtcgtagtcggtaatttcgcgtatatagtcgggtagtgacgttatcgtttgcgcggaaatggacgaatagtggggttatgtcggggttaaatcgcgttagcgttggttgttttacgcgtatgatagttttcggaagacggttgttgcgtacgtattcggtgaacgtattatggcgacgttggggcgttttatgagtttgttgttattttttgacgtggtgatatggatgacggatggttggtcgttgtatgaatttcgtttgaagggaaagttgtacgtaattagtaagcgatatacgtagcgaattgagcggtataatttgaatttgaggtagtatttggtacggttgggacggaaggggacgtttagagtcgataataaattcgcgttntttaacgtgggttaggatgtgtt

SEQ ID NO: 7196 - DNA, 506 bp, Artificial Sequence
  chemically treated genomic DNA (Homo sapiens) CpG-island No: 7196
  unsure (24)
aacacatcctaacccacgttaaanaacgcgaatttattatcgactctaaacgtccccttccgtcccaaccgtaccaaatactacctcaaattcaaattataccgctcaattcgctacgtatatcgcttactaattacgtacaactttcccttcaaacgaaattcatacaacgaccaaccatccgtcatccatatcaccacgtcaaaaaataacaacaaactcataaaacgccccaacgtcgccataatacgttcaccgaatacgtacgcaacaaccgtcttccgaaaactatcatacgcgtaaaacaaccaacgctaacgcgatttaaccccgacataaccccactattcgtccatttccgcgcaaacgataacgtcactacccgactatatacgcgaaattaccgactacgacctaaattttttaaataacgtaaaatcgtattaaaaccaacgcccataatacgaactattacccgacatccaacgccattcataaccatatca

SEQ ID NO: 7197 - DNA, 927 bp, Artificial Sequence
  chemically treated genomic DNA (Homo sapiens) CpG-island No: 7197
gttgtgatgttttttattgcgtggcgacgtaattatttttttaacgttacgttttcggttattgggtttaacgcggcgttggtttcgttttggtttgttggttaggcgggcgttatggacgttacgtcgttgatgcgcgttgatgggttcgttatgttttatatcgggttggtattgttggcgagtttcgttatttgtattttcgtttattcgtggtttgaaggttataacgataataaggatgagttttatttgttggtgttaattgtcgcgttgggcgggattttgttggcgaatgttaatatttggcgtttttgtttttcggtatcgaattgcgtgtagtagtagttggttagcgtgtttgagcgttacggtttgtcggatcggatgattatggataacggtttatcgtggggcgatattatcggtatttggacggcgttggagttgtggttgatgcgtttgggtattcgggtggggtattttcggttttattattcgtagacgtaggggaagttggagcgtttttatcgtagtttgaaggcggaagtgttgtagggaaaatggttcgtagatagcggtgaattgtagcgcgttttcgattattggcggacggtttataattttgaacgttcgtacgaggcgttggatatggcggtatcgggttcgcggtattagtcgttagcgcggtagtatagcggtaatataacgttttcgggaatacgatgaaggggtgatggttaggaaagtggatattagcggaaagttgagcgtgaaaggggtaagtttgagcgtaggtaaggcgtttaggggagaacgggtcgggttgaaggagatgtatgaagacggtagttacgatgtgtggtggtatagtacgaaagtgggggtgatcgatttgaagaaaaagtcgattattatgggtaaagg

SEQ ID NO: 7198 - DNA, 927 bp, Artificial Sequence
  chemically treated genomic DNA (Homo sapiens) CpG-island No: 7198
cctttacccataataatcgactttttcttcaaatcgatcacccccactttcgtactataccaccacacatcgtaactaccgtcttcatacatctccttcaacccgacccgttctcccctaaacgccttacctacgctcaaacttacccctttcacgctcaactttccgctaatatccactttcctaaccatcaccccttcatcgtattcccgaaaacgttatattaccgctatactaccgcgctaacgactaataccgcgaacccgataccgccatatccaacgcctcgtacgaacgttcaaaattataaaccgtccgccaataatcgaaaacgcgctacaattcaccgctatctacgaaccattttccctacaacacttccgccttcaaactacgataaaaacgctccaacttcccctacgtctacgaataataaaaccgaaaataccccacccgaatacccaaacgcatcaaccacaactccaacgccgtccaaataccgataatatcgccccacgataaaccgttatccataatcatccgatccgacaaaccgtaacgctcaaacacgctaaccaactactactacacgcaattcgataccgaaaaacaaaaacgccaaatattaacattcgccaacaaaatcccgcccaacgcgacaattaacaccaacaaataaaactcatccttattatcgttataaccttcaaaccacgaataaacgaaaatacaaataacgaaactcgccaacaataccaacccgatataaaacataacgaacccatcaacgcgcatcaacgacgtaacgtccataacgcccgcctaaccaacaaaccaaaacgaaaccaacgccgcgttaaacccaataaccgaaaacgtaacgttaaaaaaataattacgtcgccacgcaataaaaaacatcacaac

SEQ ID NO: 7199 - DNA, 927 bp, Artificial Sequence
  chemically treated genomic DNA (Homo sapiens) CpG-island No: 7199
tttttatttatggtgatcgattttttttttaggtcgattatttttattttcgtgttgtattattatatatcgtagttgtcgtttttatgtattttttttagttcgattcgtttttttttgaacgttttgtttgcgtttagatttattttttttacgtttagtttttcgttgatatttatttttttgattattatttttttatcgtattttcgggggcgttgtgttgtcgttgtattgtcgcgttgacggttgatatcgcgagttcggtatcgttatatttagcgtttcgtgcgggcgtttaaggttatagatcgttcgttagtggtcgaaggcgcgttgtagtttatcgttgtttgcgaattattttttttgtagtattttcgtttttaggttgcggtgaaaacgttttagttttttttgcgtttgcggatgataaggtcgggagtgttttattcggatatttaggcgtattagttatagttttagcgtcgtttaggtgtcggtggtgtcgttttacggtgagtcgttatttatggttattcggttcggtaggtcgtaacgtttaaatacgttgattagttgttgttgtacgtagttcgatatcgaggaatagagacgttagatgttggtattcgttagtaggatttcgtttagcgcggtaattaatattaataggtagaatttatttttgttgtcgttatagtttttaagttacgggtaggcgaaagtataggtggcgaggttcgttaataatattagttcggtgtaaagtatggcgaatttattaacgcgtattagcggcgtaacgtttatagcgttcgtttggttaataaattagagcgaaattagcgtcgcgttaagtttaataatcgagagcgtagcgttgaggaaatgattgcgtcgttacgtaatggagagtattataat

SEQ ID NO: 7200 - DNA, 927 bp, Artificial Sequence
  chemically treated genomic DNA (Homo sapiens) CpG-island No: 7200
attataatactctccattacgtaacgacgcaatcatttcctcaacgctacgctctcgattattaaacttaacgcgacgctaatttcgctctaatttattaaccaaacgaacgctataaacgttacgccgctaatacgcgttaataaattcgccatactttacaccgaactaatattattaacgaacctcgccacctatactttcgcctacccgtaacttaaaaactataacgacaacaaaaataaattctacctattaatattaattaccgcgctaaacgaaatcctactaacgaataccaacatctaacgtctctattcctcgatatcgaactacgtacaacaacaactaatcaacgtatttaaacgttacgacctaccgaaccgaataaccataaataacgactcaccgtaaaacgacaccaccgacacctaaacgacgctaaaactataactaatacgcctaaatatccgaataaaacactcccgaccttatcatccgcaaacgcaaaaaaaactaaaacgttttcaccgcaacctaaaaacgaaaatactacaaaaaaaataattcgcaaacaacgataaactacaacgcgccttcgaccactaacgaacgatctataaccttaaacgcccgcacgaaacgctaaatataacgataccgaactcgcgatatcaaccgtcaacgcgacaatacaacgacaacacaacgcccccgaaaatacgataaaaaaataataatcaaaaaaataaatatcaacgaaaaactaaacgtaaaaaaaataaatctaaacgcaaacaaaacgttcaaaaaaaaacgaatcgaactaaaaaaaatacataaaaacgacaactacgatatataataatacaacacgaaaataaaaataatcgacctaaaaaaaaaatcgatcaccataaataaaaa

SEQ ID NO: 7201 - DNA, 1024 bp, Artificial Sequence
  chemically treated genomic DNA (Homo sapiens) CpG-island No: 7201
gtcgtttggagtagatacgtcgtcgtcgcgttttttggaacggttagggaagtaagtagaagtcgggaagtcgcgaaagaggcgagaaagtgcgattttttttttagattttcggtttttcgtcgaaatttttgtcggtcggttaaattttagataatggaagttttacgtttttatttttatttttttttataagttcggtcgcgggtttttttcggttcgggatttcggcgttagtttcggagtcggagtttgtacgatacgttttttttcgtcgttttatttttttattcggagatcgtttatttttttcgttttatttttttatttttcgtttggtcggtttcgttcgattcggaggcggcgtttttttttttgttttaggtttaggaaggaggacggcggaggaagtagggggttttggttgcggggcgtagggatgtgggtcggcgatcggcgttcgagggcgtaaaaaggcggttcgaggattgcgcgcgggcgggtagcgcgggaagtcgggaagaaaggagggcgcgcgggggagaagtttgcgggtgcggggttttaggtcggggcgtttattttttcgcgtcgttcgcgttcgtcgtttagttttcgttgtaggttttgcgcgcggtttttcgtttcgttcgtttgttgttgtagggtttggattttgcgttttatcgtttttagggagttgaggtcggttatggcgcggaggcgtagaggcgtacgggtagcggcggacgttcggttgggttcggtttcggcgagagttgtatagtcgcgtttcggttttttaagtttttgtttgcgcgggggtcgttttcgttttttttcgtttttcgggtcggttgtcgtcggggcgatgaggttattcggtcggatcgtcgacgttagtatcgttgggggagggtttgacgtcggtatcgttggttatagttgttggaaagtgttttttttcgggatttatttggagaaagcgttgggaggcgtcgttttttttttttttttttttttt

SEQ ID NO: 7202 - DNA, 1024 bp, Artificial Sequence
  chemically treated genomic DNA (Homo sapiens) CpG-island No: 7202
aaaaaaaaaaaaaaaaaaaaaaacgacgcctcccaacgctttctccaaataaatcccgaaaaaaaacactttccaacaactataaccaacgataccgacgtcaaaccctcccccaacgatactaacgtcgacgatccgaccgaataacctcatcgccccgacgacaaccgacccgaaaaacgaaaaaaaacgaaaacgacccccgcgcaaacaaaaacttaaaaaaccgaaacgcgactatacaactctcgccgaaaccgaacccaaccgaacgtccgccgctacccgtacgcctctacgcctccgcgccataaccgacctcaactccctaaaaacgataaaacgcaaaatccaaaccctacaacaacaaacgaacgaaacgaaaaaccgcgcgcaaaacctacaacgaaaactaaacgacgaacgcgaacgacgcgaaaaaataaacgccccgacctaaaaccccgcacccgcaaacttctcccccgcgcgccctcctttcttcccgacttcccgcgctacccgcccgcgcgcaatcctcgaaccgcctttttacgccctcgaacgccgatcgccgacccacatccctacgccccgcaaccaaaaccccctacttcctccgccgtcctccttcctaaacctaaaacaaaaaaaaaaacgccgcctccgaatcgaacgaaaccgaccaaacgaaaaataaaaaaataaaacgaaaaaaataaacgatctccgaataaaaaaataaaacgacgaaaaaaaacgtatcgtacaaactccgactccgaaactaacgccgaaatcccgaaccgaaaaaaacccgcgaccgaacttataaaaaaaaataaaaataaaaacgtaaaacttccattatctaaaatttaaccgaccgacaaaaatttcgacgaaaaaccgaaaatctaaaaaaaaaatcgcactttctcgcctctttcgcgacttcccgacttctacttacttccctaaccgttccaaaaaacgcgacgacgacgtatctactccaaacgac

SEQ ID NO: 7203 - DNA, 1024 bp, Artificial Sequence
  chemically treated genomic DNA (Homo sapiens) CpG-island No: 7203
ggaggaagaggaggaggagaaggcggcgttttttagcgttttttttaaataagtttcgaaaaggggtattttttagtagttgtggttagcggtgtcgacgttaggtttttttttagcggtgttgacgtcggcggttcggtcgggtgattttatcgtttcgacggtagtcggttcggggggcggggagaggcgggggcggttttcgcgtaggtaaaggtttggggggtcggggcgcggttgtgtagttttcgtcggagtcgagtttagtcgagcgttcgtcgttgttcgtgcgtttttgcgttttcgcgttatggtcggttttaattttttggaggcggtgaaacgtaagatttaggttttgtagtagtaggcggacgaggcggaagatcgcgcgtagggtttgtaacgggagttggacggcgagcgcgagcggcgcgagaaagtgagcgtttcggtttggggtttcgtattcgtaagtttttttttcgcgcgttttttttttttttcggtttttcgcgttgttcgttcgcgcgtagttttcgggtcgtttttttacgttttcggacgtcgatcgtcgatttatatttttgcgtttcgtagttaggattttttatttttttcgtcgtttttttttttgggtttgggataggggagggggcgtcgttttcgggtcgggcggggtcggttaagcgggaaatggggggatggggcggagggggtgagcgattttcgggtggagaagtggagcggcgggagggggcgtatcgtgtaggtttcgatttcggggttggcgtcggggtttcgggtcgaggggaattcgcgatcggatttgtgggggagaatgaggatgaaaacgtggagtttttattgtttagggtttgatcggtcgatagggatttcgacgggggatcggggatttggggagggggtcgtattttttcgtttttttcgcggtttttcggtttttgtttgtttttttgatcgttttaaggggcgcggcggcgacgtgtttgttttaggcggt

SEQ ID NO: 7204 - DNA, 1024 bp, Artificial Sequence
  chemically treated genomic DNA (Homo sapiens) CpG-island No: 7204
accgcctaaaacaaacacgtcgccgccgcgccccttaaaacgatcaaaaaaacaaacaaaaaccgaaaaaccgcgaaaaaaacgaaaaaatacgaccccctccccaaatccccgatcccccgtcgaaatccctatcgaccgatcaaaccctaaacaataaaaactccacgttttcatcctcattctcccccacaaatccgatcgcgaattcccctcgacccgaaaccccgacgccaaccccgaaatcgaaacctacacgatacgccccctcccgccgctccacttctccacccgaaaatcgctcaccccctccgccccatccccccatttcccgcttaaccgaccccgcccgacccgaaaacgacgccccctcccctatcccaaacccaaaaaaaaaaacgacgaaaaaaataaaaaatcctaactacgaaacgcaaaaatataaatcgacgatcgacgtccgaaaacgtaaaaaaacgacccgaaaactacgcgcgaacgaacaacgcgaaaaaccgaaaaaaaaaaaaaacgcgcgaaaaaaaaacttacgaatacgaaaccccaaaccgaaacgctcactttctcgcgccgctcgcgctcgccgtccaactcccgttacaaaccctacgcgcgatcttccgcctcgtccgcctactactacaaaacctaaatcttacgtttcaccgcctccaaaaaattaaaaccgaccataacgcgaaaacgcaaaaacgcacgaacaacgacgaacgctcgactaaactcgactccgacgaaaactacacaaccgcgccccgaccccccaaacctttacctacgcgaaaaccgcccccgcctctccccgccccccgaaccgactaccgtcgaaacgataaaatcacccgaccgaaccgccgacgtcaacaccgctaaaaaaaaacctaacgtcgacaccgctaaccacaactactaaaaaataccccttttcgaaacttatttaaaaaaaacgctaaaaaacgccgccttctcctcctcctcttcctcc

SEQ ID NO: 7205 - DNA, 589 bp, Artificial Sequence
  chemically treated genomic DNA (Homo sapiens) CpG-island No: 7205
cgacgcgcggcgcgtttttggtttaattgttaatttagcgtaaggaaagtgaagatgttaataatgtttaatattatttacggaagtttttgttggtgcgtcgattttgttaagttaaatagttcgtcggtatcgatataattaaataacgtcggtaatcgttagatttaaatcgtttaattttattgagcggatgacgatttttgatgtacgatttttagttggtatttcgggttgatggttaattttataaattacgcgtcggatcgagtatcgggcgaatgatgttcgtacgtatcgtaaagtcgtcgaagtttttattcgtttcgcgttttttcgtttagcgttttattagtttattaagcgacgttaggattttcggttcggtgatgttttttttatatattcgtgggatacgtgttttaatgcggttgtcgttaagatgtaggttgtagcgattcggcgttttatttattaggtttattttcgttagtatcgcgcgattataatcgttcgggtagtttgttatacgtattacgatatgtttatcgttgatattatgtttcgttattaaattatcgatgttgtt

SEQ ID NO: 7206 - DNA, 589 bp, Artificial Sequence
  chemically treated genomic DNA (Homo sapiens) CpG-island No: 7206
aacaacatcgataatttaataacgaaacataatatcaacgataaacatatcgtaatacgtataacaaactacccgaacgattataatcgcgcgatactaacgaaaataaacctaataaataaaacgccgaatcgctacaacctacatcttaacgacaaccgcattaaaacacgtatcccacgaatatataaaaaaaacatcaccgaaccgaaaatcctaacgtcgcttaataaactaataaaacgctaaacgaaaaaacgcgaaacgaataaaaacttcgacgactttacgatacgtacgaacatcattcgcccgatactcgatccgacgcgtaatttataaaattaaccatcaacccgaaataccaactaaaaatcgtacatcaaaaatcgtcatccgctcaataaaattaaacgatttaaatctaacgattaccgacgttatttaattatatcgataccgacgaactatttaacttaacaaaatcgacgcaccaacaaaaacttccgtaaataatattaaacattattaacatcttcactttccttacgctaaattaacaattaaaccaaaaacgcgccgcgcgtcg

SEQ ID NO: 7207 - DNA, 589 bp, Artificial Sequence
  chemically treated genomic DNA (Homo sapiens) CpG-island No: 7207
gataatatcgataatttaatggcgaaatatggtgttagcgatgagtatatcgtgatgcgtgtaataggttgttcgaacggttgtggtcgcgcgatgttggcggaagtgggtttggtgggtaaagcgtcgggtcgttataatttgtattttggcggtaatcgtattgggatacgtattttacggatgtataaagaaaatattatcgagtcggaaattttggcgtcgtttgatgaattgatagggcgttgggcgaaagagcgcgaagcgggtgaaggtttcggcgattttacggtgcgtgcgggtattattcgttcggtgttcgattcggcgcgtgatttgtgggattaattattagttcggggtattagttagagatcgtatattaggggtcgttattcgtttaatggggttaagcggtttgggtttggcgattgtcggcgttatttggttatatcggtgtcggcgggttgtttgatttggtaaaatcggcgtattagtaagagttttcgtggatgatgttgggtattattggtatttttattttttttgcgttgggttggtagttaagttagaaacgcgtcgcgcgtcg

SEQ ID NO: 7208 - DNA, 589 bp, Artificial Sequence
  chemically treated genomic DNA (Homo sapiens) CpG-island No: 7208
cgacgcgcgacgcgtttctaacttaactaccaacccaacgcaaaaaaaataaaaataccaataatacccaacatcatccacgaaaactcttactaatacgccgattttaccaaatcaaacaacccgccgacaccgatataaccaaataacgccgacaatcgccaaacccaaaccgcttaaccccattaaacgaataacgacccctaatatacgatctctaactaataccccgaactaataattaatcccacaaatcacgcgccgaatcgaacaccgaacgaataatacccgcacgcaccgtaaaatcgccgaaaccttcacccgcttcgcgctctttcgcccaacgccctatcaattcatcaaacgacgccaaaatttccgactcgataatattttctttatacatccgtaaaatacgtatcccaatacgattaccgccaaaatacaaattataacgacccgacgctttacccaccaaacccacttccgccaacatcgcgcgaccacaaccgttcgaacaacctattacacgcatcacgatatactcatcgctaacaccatatttcgccattaaattatcgatattatc

SEQ ID NO: 7209 - DNA, 560 bp, Artificial Sequence
  chemically treated genomic DNA (Homo sapiens) CpG-island No: 7209
gttttagcgttttcgttatatttttagagcgtttttttttttcggacgttttttttttatttttaatgttttttcgttatttataagattgtgttttacgagttttttttcgttttaaagtttttaattatttataacgttttttatttgtatagttttttttttttggaatattatttttaatgttcgtcgtcgcgagatttttggtaattttcgcgcgtagaattatcgttttgtgttttttttttcggttttggatcggttttaatttttagagttcgcgtttgatttagattattcgcggtagagaagggatttgttagcgttcgatttagtttcggttatttacgcgtgggtttttttttcgttagttttcggcgtagcgttttttcgttattatggcgattttcgtttagattttagcggtttcggtttcgcggcgattgggtagtttcggtttaaggtgtagttgtagggtttagagttagagcggattttcggtagaaaaattcgtttgttttttcgcgtatagatttttgggagttgtagttttattaaag

SEQ ID NO: 7210 - DNA, 560 bp, Artificial Sequence
  chemically treated genomic DNA (Homo sapiens) CpG-island No: 7210
ctttaataaaactacaactcccaaaaatctatacgcgaaaaaacaaacgaatttttctaccgaaaatccgctctaactctaaaccctacaactacaccttaaaccgaaactacccaatcgccgcgaaaccgaaaccgctaaaatctaaacgaaaatcgccataataacgaaaaaacgctacgccgaaaactaacgaaaaaaaaacccacgcgtaaataaccgaaactaaatcgaacgctaacaaatcccttctctaccgcgaataatctaaatcaaacgcgaactctaaaaattaaaaccgatccaaaaccgaaaaaaaaaacacaaaacgataattctacgcgcgaaaattaccaaaaatctcgcgacgacgaacattaaaaataatattccaaaaaaaaaaaactatacaaataaaaaacgttataaataattaaaaactttaaaacgaaaaaaaactcgtaaaacacaatcttataaataacgaaaaaacattaaaaataaaaaaaaaacgtccgaaaaaaaaaaacgctctaaaaatataacgaaaacgctaaaac

SEQ ID NO: 7211 - DNA, 560 bp, Artificial Sequence
  chemically treated genomic DNA (Homo sapiens) CpG-island No: 7211
ttttggtgaaattataatttttaggggtttgtgcgcgagaaggtagacgggtttttttatcggaagttcgttttagttttgggttttataattgtattttgagtcggagttgtttagtcgtcgcgggatcggggtcgttggggtttggacgggggtcgttatggtaacgggggagcgttacgtcggggattggcggagggggggtttacgcgtaaatagtcgaggttggatcgggcgttgataagttttttttttgtcgcggatggtttgggttaggcgcgggttttggggattgggatcgatttagggtcgggaaggagggtatagggcggtgattttgcgcgcgggggttattaggggtttcgcggcgacgggtattgggggtggtgttttaaggggaaagggttgtgtaggtgggaaacgttgtagatggttggaagttttgaaacgagaggaaattcgtgagatatagttttgtgggtagcgagaaggtattggaggtggggagagggcgttcgaaagaggaaggcgttttggaagtgtggcgggagcgttgggat

SEQ ID NO: 7212 - DNA, 560 bp, Artificial Sequence
  chemically treated genomic DNA (Homo sapiens) CpG-island No: 7212
atcccaacgctcccgccacacttccaaaacgccttcctctttcgaacgccctctccccacctccaataccttctcgctacccacaaaactatatctcacgaatttcctctcgtttcaaaacttccaaccatctacaacgtttcccacctacacaaccctttccccttaaaacaccacccccaatacccgtcgccgcgaaacccctaataacccccgcgcgcaaaatcaccgccctataccctccttcccgaccctaaatcgatcccaatccccaaaacccgcgcctaacccaaaccatccgcgacaaaaaaaaaacttatcaacgcccgatccaacctcgactatttacgcgtaaaccccccctccgccaatccccgacgtaacgctcccccgttaccataacgacccccgtccaaaccccaacgaccccgatcccgcgacgactaaacaactccgactcaaaatacaattataaaacccaaaactaaaacgaacttccgataaaaaaacccgtctaccttctcgcgcacaaacccctaaaaattataatttcaccaaaa

SEQ ID NO: 7213 - DNA, 890 bp, Artificial Sequence
  chemically treated genomic DNA (Homo sapiens) CpG-island No: 7213
  unsure (747, 833, 835, 837, 839, 841, 847, 855..856, 858..859, 863..864)
  unsure (867, 869, 873, 875, 877, 884, 889)
gcgcgcgttggttgtagattttttttatagttaggagaaagagtacgcgttttttagtttcgtgtttttttttttgggacgacgaattgcggggttcggattgggttgaggcgggttacgtttttttatattttttaattaattttttttttggtgcgtttttttttttttagtttcgttttatcgttttacgttacgtcgttttttttggtttttttcgttatttcggcggttgcggttcgcgcggtaaatttattttttattgttttttattggttggttaggtttcgcgcgagcgggatcgcgtttttcgttttttatttttaaaatcgggttatgtttttttttttcggttttttttaagagttagcgcgaggtagtagatcggttgtttgagacgcgcgcgtagtttttgcggattatttttttcgttttgcgttagtagttgcgtcggttggtagtttttcgcgtacgcgcgttcgtttatttcgttttttttgttcgtttgtaagtcgtttcgcgtttagtcgcgacggcggtcgtcgtaatagcggtattttcgggggcgtacgcgtattgtatcgttcgcggtcgtttttaattttaggtagcggttgtggtagtaagtttttcgggtgcgtacgcgttttgatttttttttattgtttcgttggttgttttttcgcggcgcgcgtttaggggtcgttatatttttgtaacggtttacgcgtcgcgtacgcgtagtancgagggggcgcgcgcgcgggagcggtcgtcgtaagaaggaggtgtcgtcgttgtcgttattgcgagggagggagggagggagggantnantnangtttgntcgttttnntnnntgnnntngntttntntnttttttnttttnt

SEQ ID NO: 7214 - DNA, 890 bp, Artificial Sequence
  chemically treated genomic DNA (Homo sapiens) CpG-island No: 7214
  unsure (2, 7, 14, 16, 18, 22, 24, 26..27, 31..32, 35..36, 44, 50)
  unsure (52, 54, 56, 58, 144)
anaaaanaaaaaanananaaancnannncannnannaaaacgancaaacntnantnantccctccctccctccctccctcgcaataacgacaacgacgacacctccttcttacgacgaccgctcccgcgcgcgcgccccctcgntactacgcgtacgcgacgcgtaaaccgttacaaaaatataacgacccctaaacgcgcgccgcgaaaaaacaaccaacgaaacaataaaaaaaaatcaaaacgcgtacgcacccgaaaaacttactaccacaaccgctacctaaaattaaaaacgaccgcgaacgatacaatacgcgtacgcccccgaaaataccgctattacgacgaccgccgtcgcgactaaacgcgaaacgacttacaaacgaacaaaaaaaacgaaataaacgaacgcgcgtacgcgaaaaactaccaaccgacgcaactactaacgcaaaacgaaaaaaataatccgcaaaaactacgcgcgcgtctcaaacaaccgatctactacctcgcgctaactcttaaaaaaaaccgaaaaaaaaaaacataacccgattttaaaaataaaaaacgaaaaacgcgatcccgctcgcgcgaaacctaaccaaccaataaaaaacaataaaaaataaatttaccgcgcgaaccgcaaccgccgaaataacgaaaaaaaccaaaaaaaacgacgtaacgtaaaacgataaaacgaaactaaaaaaaaaaaaacgcaccaaaaaaaaaattaattaaaaaatataaaaaaacgtaacccgcctcaacccaatccgaaccccgcaattcgtcgtcccaaaaaaaaaaacacgaaactaaaaaacgcgtactctttctcctaactataaaaaaaatctacaaccaacgcgcgc

SEQ ID NO: 7215 - DNA, 890 bp, Artificial Sequence
  chemically treated genomic DNA (Homo sapiens) CpG-island No: 7215
  unsure (2, 7, 14, 16, 18, 22, 24, 26..27, 31..32, 35..36, 44, 50)
  unsure (52, 54, 56, 58, 144)
gngaggngaagggngnangggntngnnntannngnnagggcggntaagtntngntnantttttttttttttttttttttcgtaatggcggtagcggcggtattttttttttgcgacggtcgttttcgcgcgcgcgttttttcgntattgcgcgtgcgcggcgcgtggatcgttgtaggggtataacggtttttgggcgcgcgtcgcgaagggataattagcgaggtagtgggaagaggttagagcgcgtgcgtattcgaggggtttattgttatagtcgttgtttgaggttaggaacggtcgcggacggtgtagtgcgcgtgcgttttcgaaaatgtcgttattgcggcggtcgtcgtcgcgattgagcgcgaggcgatttgtaaacgagtagagggagcgggatgggcgagcgcgcgtgcgcggggggttgttagtcggcgtagttgttggcgtagggcggagggagtggttcgtaggagttgcgcgcgcgttttaagtagtcgatttattgtttcgcgttggtttttggagaaagtcgaaggagagaggtatggttcggttttgggggtggggggcgaagggcgcgatttcgttcgcgcgggatttgattagttaatgggaagtaatgggaggtgggtttgtcgcgcgagtcgtagtcgtcgggataacggaggaggttagaaggagcgacgtaacgtggggcggtggggcggggttgagaaggagggagcgtattagagagggagttgattggaggatatgaggaggcgtggttcgttttagtttaattcgagtttcgtaattcgtcgttttaggaagaagagtacggggttggagagcgcgtgtttttttttttggttgtgaagaaaatttgtagttaacgcgcgt

SEQ ID NO: 7216 - DNA, 890 bp, Artificial Sequence
  chemically treated genomic DNA (Homo sapiens) CpG-island No: 7216
  unsure (747, 833, 835, 837, 839, 841, 847, 855..856, 858..859, 863..864)
  unsure (867, 869, 873, 875, 877, 884, 889)
acgcgcgttaactacaaattttcttcacaaccaaaaaaaaaaacacgcgctctccaaccccgtactcttcttcctaaaacgacgaattacgaaactcgaattaaactaaaacgaaccacgcctcctcatatcctccaatcaactccctctctaatacgctccctccttctcaaccccgccccaccgccccacgttacgtcgctccttctaacctcctccgttatcccgacgactacgactcgcgcgacaaacccacctcccattacttcccattaactaatcaaatcccgcgcgaacgaaatcgcgcccttcgccccccacccccaaaaccgaaccatacctctctccttcgactttctccaaaaaccaacgcgaaacaataaatcgactacttaaaacgcgcgcgcaactcctacgaaccactccctccgccctacgccaacaactacgccgactaacaaccccccgcgcacgcgcgctcgcccatcccgctccctctactcgtttacaaatcgcctcgcgctcaatcgcgacgacgaccgccgcaataacgacattttcgaaaacgcacgcgcactacaccgtccgcgaccgttcctaacctcaaacaacgactataacaataaacccctcgaatacgcacgcgctctaacctcttcccactacctcgctaattatcccttcgcgacgcgcgcccaaaaaccgttatacccctacaacgatccacgcgccgcgcacgcgcaatancgaaaaaacgcgcgcgcgaaaacgaccgtcgcaaaaaaaaaataccgccgctaccgccattacgaaaaaaaaaaaaaaaaaaaaantnancnanacttanccgccctnncnnntannncnancccntncncccttcncctcnc

SEQ ID NO: 7217 - DNA, 796 bp, Artificial Sequence
  chemically treated genomic DNA (Homo sapiens) CpG-island No: 7217
ttattacggataaatttcgtagtgatatttttcggtagatgtgcgttaaagtttattttcggatgttggtggcgtaaaatttcgttacggatgcgttcgcggtttatattttcgcggatggcgatgaattttattttcggcgtgatgatgttttggcgggcgtagtgtagttgggtgataacggcgttttgtttttggtagcgtaaagggttgttagtacgtcgttaaaacgtagttcgtcgaggttattatttgttagtcgcgttttagtgtaatcggaattgcgtacggtaagtttttcggtatcgtcgcgcgtatcgatttacggttggcgtagttttgttagtttttgttgtacgttaatggtaatttgcggattattatacgggtcggaggtgtcgtagatcggaatcgtttcgtttttttcgtattgcggttgttttttgttatcgttaattagcgtcgggttaagttggattttacgtatcggtacgcgtacgtcggggtgtgtgttagtgatataaatgcgttttgagttgggaaaggcggtgttttttaggggtgtcgataaaatgttgggttcgggcgcgttgttcgcggcgggttagttttgttgtagatatagtttattttaaaaagttaaggacgtggtttgttagacgacggatgaagtaagagacgatcgtcgtaggggcgatgcgatagtagattaatttttgtttttttcgtaggtattagtttgattaggtttcgcggatttcgaataaacggttttagttagttaaggtatttcgat

SEQ ID NO: 7218 - DNA, 796 bp, Artificial Sequence
  chemically treated genomic DNA (Homo sapiens) CpG-island No: 7218
atcgaaataccttaactaactaaaaccgtttattcgaaatccgcgaaacctaatcaaactaatacctacgaaaaaaacaaaaattaatctactatcgcatcgcccctacgacgatcgtctcttacttcatccgtcgtctaacaaaccacgtccttaactttttaaaataaactatatctacaacaaaactaacccgccgcgaacaacgcgcccgaacccaacattttatcgacacccctaaaaaacaccgcctttcccaactcaaaacgcatttatatcactaacacacaccccgacgtacgcgtaccgatacgtaaaatccaacttaacccgacgctaattaacgataacaaaaaacaaccgcaatacgaaaaaaacgaaacgattccgatctacgacacctccgacccgtataataatccgcaaattaccattaacgtacaacaaaaactaacaaaactacgccaaccgtaaatcgatacgcgcgacgataccgaaaaacttaccgtacgcaattccgattacactaaaacgcgactaacaaataataacctcgacgaactacgttttaacgacgtactaacaaccctttacgctaccaaaaacaaaacgccgttatcacccaactacactacgcccgccaaaacatcatcacgccgaaaataaaattcatcgccatccgcgaaaatataaaccgcgaacgcatccgtaacgaaattttacgccaccaacatccgaaaataaactttaacgcacatctaccgaaaaatatcactacgaaatttatccgtaataa

SEQ ID NO: 7219 - DNA, 796 bp, Artificial Sequence
  chemically treated genomic DNA (Homo sapiens) CpG-island No: 7219
gtcggagtgttttaattggttgagatcgtttattcgggattcgcggaatttgattaggttaatatttgcgaagggaataagagttaatttgttatcgtatcgtttttgcggcgatcgttttttgttttattcgtcgtttgataagttacgtttttaattttttggaatgagttatgtttgtaataaaattgattcgtcgcgaataacgcgttcgggtttaatattttatcgatatttttggaaggtatcgttttttttaatttaaaacgtatttatattattggtatatatttcggcgtgcgcgtgtcgatgcgtgagatttagtttagttcgacgttaattggcggtagtaaagaatagtcgtagtacgaagaaaacgaagcgatttcggtttacgatattttcggttcgtatggtgattcgtagattgttattaacgtgtagtaagggttggtaaaattacgttagtcgtggatcgatgcgcgcggcgatatcgaagaatttatcgtgcgtagtttcgattatattaaagcgcggttggtagatgatggtttcgacgaattgcgttttaacggcgtattgataattttttacgttgttaaaagtaggacgtcgttgttatttaattgtattacgttcgttagggtattattacgtcggaaatggaatttatcgttattcgcgagaatatgggtcgcgagcgtattcgtagcgaggttttacgttattagtattcgggaatgagttttggcgtatatttgtcggaaaatattattgcggaatttgttcgtgatga

SEQ ID NO: 7220 - DNA, 796 bp, Artificial Sequence
  chemically treated genomic DNA (Homo sapiens) CpG-island No: 7220
tcatcacgaacaaattccgcaataatattttccgacaaatatacgccaaaactcattcccgaatactaataacgtaaaacctcgctacgaatacgctcgcgacccatattctcgcgaataacgataaattccatttccgacgtaataataccctaacgaacgtaatacaattaaataacaacgacgtcctacttttaacaacgtaaaaaattatcaatacgccgttaaaacgcaattcgtcgaaaccatcatctaccaaccgcgctttaatataatcgaaactacgcacgataaattcttcgatatcgccgcgcgcatcgatccacgactaacgtaattttaccaacccttactacacgttaataacaatctacgaatcaccatacgaaccgaaaatatcgtaaaccgaaatcgcttcgttttcttcgtactacgactattctttactaccgccaattaacgtcgaactaaactaaatctcacgcatcgacacgcgcacgccgaaatatataccaataatataaatacgttttaaattaaaaaaaacgataccttccaaaaatatcgataaaatattaaacccgaacgcgttattcgcgacgaatcaattttattacaaacataactcattccaaaaaattaaaaacgtaacttatcaaacgacgaataaaacaaaaaacgatcgccgcaaaaacgatacgataacaaattaactcttattcccttcgcaaatattaacctaatcaaattccgcgaatcccgaataaacgatctcaaccaattaaaacactccgac

SEQ ID NO: 7221 - DNA, 550 bp, Artificial Sequence
  chemically treated genomic DNA (Homo sapiens) CpG-island No: 7221
  unsure (163, 202)
tttgttttttcgcggtacggatagttatcgatagtagtgtttttatcgtatcgttgcgtttatcgaataatttagatattacgtcggagttacggtttagatcgagcgttagttgcgttatatcgtttgagttaattgagaagtcgtcgaaatattcgagggnaataattttggtcgtttggcgggggttcggtttaacggntaaggcgttggacgggattttatatattatgatttttagttcgttttcgttacgttttagtttttgacgcgttagttttttaattatcgttttcgtttgatttacggtacgtacgaacgggattatgattttaacgttggttagttttatgtcgttgcgtatacgttttattgttttatattttagcgcgaaatagtcgcggtaagttgtcggaaatatagcggtttttgttgtttacggaatgtcgtagtatcggcgttttttttatttggttcgtaacgtttattatcgattagtgttggtatattcgttcgatttaaaattagagagacggataatgacgcgttt

SEQ ID NO: 7222 - DNA, 550 bp, Artificial Sequence
  chemically treated genomic DNA (Homo sapiens) CpG-island No: 7222
  unsure (349, 388)
aaacgcgtcattatccgtctctctaattttaaatcgaacgaatataccaacactaatcgataataaacgttacgaaccaaataaaaaaaacgccgatactacgacattccgtaaacaacaaaaaccgctatatttccgacaacttaccgcgactatttcgcgctaaaatataaaacaataaaacgtatacgcaacgacataaaactaaccaacgttaaaatcataatcccgttcgtacgtaccgtaaatcaaacgaaaacgataattaaaaaactaacgcgtcaaaaactaaaacgtaacgaaaacgaactaaaaatcataatatataaaatcccgtccaacgccttanccgttaaaccgaacccccgccaaacgaccaaaattattnccctcgaatatttcgacgacttctcaattaactcaaacgatataacgcaactaacgctcgatctaaaccgtaactccgacgtaatatctaaattattcgataaacgcaacgatacgataaaaacactactatcgataactatccgtaccgcgaaaaaacaaa

SEQ ID NO: 7223 - DNA, 550 bp, Artificial Sequence
  chemically treated genomic DNA (Homo sapiens) CpG-island No: 7223
  unsure (349, 388)
aagcgcgttattgttcgtttttttgattttaaatcgaacgaatatgttaatattggtcggtggtgagcgttacgagttagatgaagagaacgtcgatgttacggtatttcgtggatagtagggatcgttatgttttcgatagtttatcgcgattgtttcgcgttggagtgtgaagtagtgaaacgtgtgcgtaacgatatgggattgattaacgttgagattatgatttcgttcgtgcgtatcgtagattaggcgaaagcggtggttgaagaattggcgcgttaggggttgaaacgtggcgagaacgggttgaaaattatgatgtgtgaaatttcgtttaacgttttgntcgttgggtcgggttttcgttagacgattagggttgttnttttcgaatatttcgacggttttttaattggtttaaacgatatgacgtagttggcgttcggtttggatcgtgatttcggcgtggtgtttgaattgttcgatgagcgtaacgatgcggtgaaagtattgttgtcgatggttattcgtgtcgcgaagaaatagg

SEQ ID NO: 7224 - DNA, 550 bp, Artificial Sequence
  chemically treated genomic DNA (Homo sapiens) CpG-island No: 7224
  unsure (163, 202)
cctatttcttcgcgacacgaataaccatcgacaacaatactttcaccgcatcgttacgctcatcgaacaattcaaacaccacgccgaaatcacgatccaaaccgaacgccaactacgtcatatcgtttaaaccaattaaaaaaccgtcgaaatattcgaaaanaacaaccctaatcgtctaacgaaaacccgacccaacgancaaaacgttaaacgaaatttcacacatcataattttcaacccgttctcgccacgtttcaacccctaacgcgccaattcttcaaccaccgctttcgcctaatctacgatacgcacgaacgaaatcataatctcaacgttaatcaatcccatatcgttacgcacacgtttcactacttcacactccaacgcgaaacaatcgcgataaactatcgaaaacataacgatccctactatccacgaaataccgtaacatcgacgttctcttcatctaactcgtaacgctcaccaccgaccaatattaacatattcgttcgatttaaaatcaaaaaaacgaacaataacgcgctt

SEQ ID NO: 7225 - DNA, 704 bp, Artificial Sequence
  chemically treated genomic DNA (Homo sapiens) CpG-island No: 7225
gttaatgcgtattttttatttttattaatttttattaatttattttttttacgttttttatttattataagcgatcgtttttttttttttttttttttcgttttttttgtattttgcgtttttttattcgtttgttttttattcgttgttttcgatttgtattgcgttttttgttattttttttttgttattttgtttttttttttttttttttacgttttatttttttatcgcgtttttttattataatgcgtaattgtatattttttttttttttcgtttatatacggtttgtttttatatatatttttacgtatttttatcgcgtattacgttcgttatttttttttttttttgttttattatttttaatttttttattttttttttagttattatttttcggttcgtatttttttcgtcgtatttttatttttttttttttttttttttcgtcgttttttttgttgagtatttagatattttttcggtttcgcggttttatttattagtttggtacgttggtacgttgggttttattattttttcgggtttttatttggcgtattttttttcggtttttttcgcgttttttttcgtcgattttttttcgttggttttttcgttttttttggttcgtttcgtttcggttttttatttcgggcgtcgttgtttatttattgtttcggtttttttttcgtcgt

SEQ ID NO: 7226 - DNA, 704 bp, Artificial Sequence
  chemically treated genomic DNA (Homo sapiens) CpG-island No: 7226
acgacgaaaaaaaaaccgaaacaataaataaacaacgacgcccgaaataaaaaaccgaaacgaaacgaaccaaaaaaaacgaaaaaaccaacgaaaaaaaatcgacgaaaaaaaacgcgaaaaaaaccgaaaaaaaatacgccaaataaaaacccgaaaaaataataaaacccaacgtaccaacgtaccaaactaataaataaaaccgcgaaaccgaaaaaatatctaaatactcaacaaaaaaaacgacgaaaaaaaaaaaaaaaaaaaaataaaaatacgacgaaaaaaatacgaaccgaaaaataataactaaaaaaaaaataaaaaaattaaaaataataaaacaaaaaaaaaaaaaaataacgaacgtaatacgcgataaaaatacgtaaaaatatatataaaaacaaaccgtatataaacgaaaaaaaaaaaaaatatacaattacgcattataataaaaaaacgcgataaaaaaataaaacgtaaaaaaaaaaaaaaaaaaacaaaataacaaaaaaaaaataacaaaaaacgcaatacaaatcgaaaacaacgaataaaaaacaaacgaataaaaaaacgcaaaatacaaaaaaaacgaaaaaaaaaaaaaaaaaaaaacgatcgcttataataaataaaaaacgtaaaaaaaataaattaataaaaattaataaaaataaaaaatacgcattaac

SEQ ID NO: 7227 - DNA, 704 bp, Artificial Sequence
  chemically treated genomic DNA (Homo sapiens) CpG-island No: 7227
acgacgagggagaggtcgggatagtgggtggatagcggcgttcggagtagagagtcgaggcgaggcgggttaggaggggcgggagggttagcggaggagagtcggcggggggaggcgcgggggaggtcgaggaggggtgcgttaggtggaggttcgggagagtggtggggtttagcgtgttagcgtgttaggttagtgggtgggatcgcgaggtcgaggaagtgtttaagtgtttaatagagagagcggcgagggaggggggggggagggggtgggggtgcgacgaggggggtgcgggtcggaaagtggtggttgagaggggagtggaggagttaggagtagtagagtagaaagggaggggagtggcgagcgtggtgcgcggtgaaggtgcgtgagagtgtgtgtgggagtaggtcgtgtgtgagcggagaggaaagggagtgtgtagttgcgtattgtagtagaagagcgcggtgagggggtggggcgtgggagagaggggagaggggtagggtggtaagaggggggtggtagagggcgtagtgtaggtcgggggtagcgggtagggagtaggcgggtgagagagcgtagggtgtagaggaagcgggggagaggaggggggaggggcggtcgtttgtggtgggtgggaggcgtagaggaggtgagttagtgggggttggtgggagtggggagtgcgtattggt

SEQ ID NO: 7228 - DNA, 704 bp, Artificial Sequence
  chemically treated genomic DNA (Homo sapiens) CpG-island No: 7228
accaatacgcactccccactcccaccaacccccactaactcacctcctctacgcctcccacccaccacaaacgaccgcccctcccccctcctctcccccgcttcctctacaccctacgctctctcacccgcctactccctacccgctacccccgacctacactacgccctctaccacccccctcttaccaccctacccctctcccctctctcccacgccccaccccctcaccgcgctcttctactacaatacgcaactacacactccctttcctctccgctcacacacgacctactcccacacacactctcacgcaccttcaccgcgcaccacgctcgccactcccctccctttctactctactactcctaactcctccactcccctctcaaccaccactttccgacccgcacccccctcgtcgcacccccaccccctcccccccccctccctcgccgctctctctattaaacacttaaacacttcctcgacctcgcgatcccacccactaacctaacacgctaacacgctaaaccccaccactctcccgaacctccacctaacgcacccctcctcgacctcccccgcgcctccccccgccgactctcctccgctaaccctcccgcccctcctaacccgcctcgcctcgactctctactccgaacgccgctatccacccactatcccgacctctccctcgtcgt

SEQ ID NO: 7229 - DNA, 629 bp, Artificial Sequence
  chemically treated genomic DNA (Homo sapiens) CpG-island No: 7229
cgtgatttgaaatcggtggtggaaatggggtcggatgcgttgatatatgttcgatttagggttgattatgttggtgcgtgagtatttttttgaaatgtcgatttatttttcggtgtaggttaacgtcgtgaattgggcgacggtgaaattttggtagtaaatgggtttgattcgcgtgattttttttcgcgagttgtcgttggaagagattgaagagattcgtaattaggtgtcggatatggagatcgagattttcgtttacggcgcgttgtgtatggtttatttcggtcgttgtttgttttttggttatattaataagcgcgattcgaattagggtatttgtattaacgtttgtcgttgggagtataacgtttaggaagggaaagaagatgatgttggtaatatcgtatataagtacgagtcgatttcggtgtaaaatgttgagtcgacgttgggtatcggcgtattaatcgataaagtgtttatgatcgaagaggtttagcgttcgggcgagtatatgatcgcgtttgaagatgagtacggtatttatattatgaattcgaaagatttgcgcgttatcgtttatgtagaacgtttgattaaaatgggcgtgtattcgttgaaaatcg

SEQ ID NO: 7230 - DNA, 629 bp, Artificial Sequence
  chemically treated genomic DNA (Homo sapiens) CpG-island No: 7230
cgattttcaacgaatacacgcccattttaatcaaacgttctacataaacgataacgcgcaaatctttcgaattcataatataaataccgtactcatcttcaaacgcgatcatatactcgcccgaacgctaaacctcttcgatcataaacactttatcgattaatacgccgatacccaacgtcgactcaacattttacaccgaaatcgactcgtacttatatacgatattaccaacatcatcttctttcccttcctaaacgttatactcccaacgacaaacgttaatacaaataccctaattcgaatcgcgcttattaatataaccaaaaaacaaacaacgaccgaaataaaccatacacaacgcgccgtaaacgaaaatctcgatctccatatccgacacctaattacgaatctcttcaatctcttccaacgacaactcgcgaaaaaaaatcacgcgaatcaaacccatttactaccaaaatttcaccgtcgcccaattcacgacgttaacctacaccgaaaaataaatcgacatttcaaaaaaatactcacgcaccaacataatcaaccctaaatcgaacatatatcaacgcatccgaccccatttccaccaccgatttcaaatcacg

SEQ ID NO: 7231 - DNA, 629 bp, Artificial Sequence
  chemically treated genomic DNA (Homo sapiens) CpG-island No: 7231
cgatttttagcgaatgtacgtttattttggttaggcgttttatatgggcgatggcgcgtagatttttcgagtttatgatgtaagtgtcgtgtttatttttaaacgcggttatatattcgttcggacgttgggttttttcgattataaatattttgtcggttggtgcgtcgatatttagcgtcggtttaatattttgtatcggaatcggttcgtatttgtgtacgatgttgttaatattattttttttttttttttggacgttgtatttttagcggtaggcgttggtgtaggtgttttggttcgggtcgcgtttgttgatatagttagagagtaggtagcgatcggagtaggttatgtatagcgcgtcgtgaacgaagatttcgatttttatattcggtatttgattgcggatttttttaattttttttagcgatagttcgcgagagaggattacgcgggttaggtttatttgttgttagaattttatcgtcgtttagtttacggcgttagtttgtatcgaaaggtggatcggtattttagggaagtgtttacgtattagtataattagttttggatcggatatatattagcgtattcggttttatttttattatcggttttaggttacg

SEQ ID NO: 7232 - DNA, 629 bp, Artificial Sequence
  chemically treated genomic DNA (Homo sapiens) CpG-island No: 7232
cgtaacctaaaaccgataataaaaataaaaccgaatacgctaatatatatccgatccaaaactaattatactaatacgtaaacacttccctaaaataccgatccacctttcgatacaaactaacgccgtaaactaaacgacgataaaattctaacaacaaataaacctaacccgcgtaatcctctctcgcgaactatcgctaaaaaaaattaaaaaaatccgcaatcaaataccgaatataaaaatcgaaatcttcgttcacgacgcgctatacataacctactccgatcgctacctactctctaactatatcaacaaacgcgacccgaaccaaaacacctacaccaacgcctaccgctaaaaatacaacgtccaaaaaaaaaaaaaaaataatattaacaacatcgtacacaaatacgaaccgattccgatacaaaatattaaaccgacgctaaatatcgacgcaccaaccgacaaaatatttataatcgaaaaaacccaacgtccgaacgaatatataaccgcgtttaaaaataaacacgacacttacatcataaactcgaaaaatctacgcgccatcgcccatataaaacgcctaaccaaaataaacgtacattcgctaaaaatcg

SEQ ID NO: 7233 - DNA, 509 bp, Artificial Sequence
  chemically treated genomic DNA (Homo sapiens) CpG-island No: 7233
agcgcgttcgattcgcgggtaggggattgcgggtcgggaggagagcgcggtattcgttttttttttgcgttcgttaagtggggggttgagggtttggggtacgggaggagggagacggggtacgggaagaaggagacggggcgcgggaagaatgcgacggggcgcgggaggaatgcgacggggcgcgagatatggcgcgggaagggcggggggagtcgttggttaggttcgagttcgcggggtgttcggcgggttggcggcgggtttatttttgtcggtttttgtttttgttttttcgggcgcgtggtcggtgcgtttgttttacgggttttttcgttgttcggtcggcgggagttttttttagcgtttcgtttggcgtttggatgtttgttagttttgtaggttatcgacgttcgcgcgatgttaaaaggcggggtggggcgggtattttgttcgggttgaggagggtatttgtttatatttgttagagaaatttagaggttttgggt

SEQ ID NO: 7234 - DNA, 509 bp, Artificial Sequence
  chemically treated genomic DNA (Homo sapiens) CpG-island No: 7234
acccaaaacctctaaatttctctaacaaatataaacaaataccctcctcaacccgaacaaaatacccgccccaccccgccttttaacatcgcgcgaacgtcgataacctacaaaactaacaaacatccaaacgccaaacgaaacgctaaaaaaaactcccgccgaccgaacaacgaaaaaacccgtaaaacaaacgcaccgaccacgcgcccgaaaaaacaaaaacaaaaaccgacaaaaataaacccgccgccaacccgccgaacaccccgcgaactcgaacctaaccaacgactccccccgcccttcccgcgccatatctcgcgccccgtcgcattcctcccgcgccccgtcgcattcttcccgcgccccgtctccttcttcccgtaccccgtctccctcctcccgtaccccaaaccctcaaccccccacttaacgaacgcaaaaaaaaaacgaataccgcgctctcctcccgacccgcaatcccctacccgcgaatcgaacgcgct

SEQ ID NO: 7235 - DNA, 509 bp, Artificial Sequence
  chemically treated genomic DNA (Homo sapiens) CpG-island No: 7235
atttaaagtttttgggtttttttagtagatatgggtaggtgttttttttagttcgagtaagatgttcgttttatttcgttttttggtatcgcgcgggcgtcggtggtttgtaggattggtaggtatttaggcgttaggcgaagcgttgagggaggttttcgtcggtcgaatagcggggagattcgtgaagtaggcgtatcggttacgcgttcggagggatagggatagggatcggtaggggtgggttcgtcgttaattcgtcgggtatttcgcggattcgggtttagttagcgatttttttcgtttttttcgcgttatgtttcgcgtttcgtcgtatttttttcgcgtttcgtcgtatttttttcgcgtttcgttttttttttttcgtgtttcgttttttttttttcgtgttttaggtttttagttttttatttgacgggcgtagggaaggggcgggtgtcgcgtttttttttcggttcgtagttttttattcgcgggtcgagcgcgtt

SEQ ID NO: 7236 - DNA, 509 bp, Artificial Sequence
  chemically treated genomic DNA (Homo sapiens) CpG-island No: 7236
aacgcgctcgacccgcgaataaaaaactacgaaccgaaaaaaaaacgcgacacccgccccttccctacgcccgtcaaataaaaaactaaaaacctaaaacacgaaaaaaaaaaaacgaaacacgaaaaaaaaaaaacgaaacgcgaaaaaaatacgacgaaacgcgaaaaaaatacgacgaaacgcgaaacataacgcgaaaaaaacgaaaaaaatcgctaactaaacccgaatccgcgaaatacccgacgaattaacgacgaacccacccctaccgatccctatccctatccctccgaacgcgtaaccgatacgcctacttcacgaatctccccgctattcgaccgacgaaaacctccctcaacgcttcgcctaacgcctaaatacctaccaatcctacaaaccaccgacgcccgcgcgataccaaaaaacgaaataaaacgaacatcttactcgaactaaaaaaaacacctacccatatctactaaaaaaacccaaaaactttaaat

SEQ ID NO: 7237 - DNA, 565 bp, Artificial Sequence
  chemically treated genomic DNA (Homo sapiens) CpG-island No: 7237
atggagcggtaatttgtaattagtcggcggtgcgtagtttatatagtacgtggttcgtattataggttgcgttattgagtgagttagtttttagatgttaggcgtatgacgagtttacggagcgggatttttttttttacgtatttcgggttttttgggcggggtcgtcgggtaggggggcggggagtattttgcgtcgttttttcgggatcgtttcgtttcgtcgtaattagagagttgggttggagttttaagcggaaatcgcgggagtcgagtttagttaggaatgtagattttttgaaaattaagtcgaagaatgcgtggttcggtgtttacgtataatgagtattgtttttcgtcgttttgtttatggtcgcgcgtgttttcgggtttaggggttgttttttacggttatttgttttgtttgtcgcggtttggtttttttatcggatttattaggcgttgggcgtgggtttttttattttggcgatcgtggtatatcggcgttttgagtttaattgtgtttttggggttatttttttttgtcgggagtacggtacgataa

SEQ ID NO: 7238 - DNA, 565 bp, Artificial Sequence
  chemically treated genomic DNA (Homo sapiens) CpG-island No: 7238
ttatcgtaccgtactcccgacaaaaaaaaataaccccaaaaacacaattaaactcaaaacgccgatataccacgatcgccaaaataaaaaaacccacgcccaacgcctaataaatccgataaaaaaaccaaaccgcgacaaacaaaacaaataaccgtaaaaaacaacccctaaacccgaaaacacgcgcgaccataaacaaaacgacgaaaaacaatactcattatacgtaaacaccgaaccacgcattcttcgacttaattttcaaaaaatctacattcctaactaaactcgactcccgcgatttccgcttaaaactccaacccaactctctaattacgacgaaacgaaacgatcccgaaaaaacgacgcaaaatactccccgcccccctacccgacgaccccgcccaaaaaacccgaaatacgtaaaaaaaaaaatcccgctccgtaaactcgtcatacgcctaacatctaaaaactaactcactcaataacgcaacctataatacgaaccacgtactatataaactacgcaccgccgactaattacaaattaccgctccat

SEQ ID NO: 7239 - DNA, 565 bp, Artificial Sequence
  chemically treated genomic DNA (Homo sapiens) CpG-island No: 7239
ttatcgtatcgtgttttcgataaggaggggtagttttaaaaatatagttaaatttagaacgtcggtatgttacggtcgttaaaatagaaaagtttacgtttagcgtttggtgagttcggtgaaggaattaggtcgcgataagtagggtaagtagtcgtgaggaataatttttagattcgagagtacgcgcggttatgagtaaagcggcggaagatagtatttattatgcgtggatatcggattacgtatttttcggtttggtttttaggaggtttgtatttttagttgggttcggttttcgcggttttcgtttggagttttagtttagttttttgattgcgacggggcggggcggtttcgggaaggcgacgtaggatgtttttcgtttttttgttcggcggtttcgtttagggagttcgggatgcgtggggagggaggtttcgtttcgtggattcgttatgcgtttggtatttggagattggtttatttaataacgtagtttgtgatgcggattacgtgttgtgtgggttgcgtatcgtcggttgattataggttatcgttttat

SEQ ID NO: 7240 - DNA, 565 bp, Artificial Sequence
  chemically treated genomic DNA (Homo sapiens) CpG-island No: 7240
ataaaacgataacctataatcaaccgacgatacgcaacccacacaacacgtaatccgcatcacaaactacgttattaaataaaccaatctccaaataccaaacgcataacgaatccacgaaacgaaacctccctccccacgcatcccgaactccctaaacgaaaccgccgaacaaaaaaacgaaaaacatcctacgtcgccttcccgaaaccgccccgccccgtcgcaatcaaaaaactaaactaaaactccaaacgaaaaccgcgaaaaccgaacccaactaaaaatacaaacctcctaaaaaccaaaccgaaaaatacgtaatccgatatccacgcataataaatactatcttccgccgctttactcataaccgcgcgtactctcgaatctaaaaattattcctcacgactacttaccctacttatcgcgacctaattccttcaccgaactcaccaaacgctaaacgtaaacttttctattttaacgaccgtaacataccgacgttctaaatttaactatatttttaaaactacccctccttatcgaaaacacgatacgataa

SEQ ID NO: 7241 - DNA, 806 bp, Artificial Sequence
  chemically treated genomic DNA (Homo sapiens) CpG-island No: 7241
cggtgatggcgcgttgggagggcggcggtttttgtagcgagggtggtggcgatgcgtatatcgagaggataaggaagcggttttcgacgagttttttcggggtttatggggtttttggcggttcggtttcggaggttagcggggttgttcgatttggtattggaaataatggtggttcggggttggaggtaatggcgcgagtgttggggggtaggggcgattaggggagtttcggtttttcgggtttagcgtcgcggagttttgttgcgggttttagtggtagtattttcgggaatcgtaggtgttgatttaaggttcggaataggcgggttttttgtttatattttgcggcgttcgcgattcgggtcgggcgattcggcgtcgggttttgttattcgttcgtatttagaggtcgtaaggtagtcgttagtttcgggattggattttagggcgttttcggttttgcgaggttttcgttttttttttcgttttttttttatcgtttttttgaggtattttgatgcgggcgggtatttttgtcgaaaatatttatagcgttcgttttttcggtttttcgagtagtgattttttcgcggttaatttttttagggaaattagcgattcgcggtttagatagcgattttcgttcgtaggtttttgttttgtttttagatttcggttttagtggtatttgtttagcgaggtttcgtttaattaagttattcgaattaattatttatttattcgttattatattatttcgatttaattcgtagcggggtattgattttatattcgtgtgtttt

SEQ ID NO: 7242 - DNA, 806 bp, Artificial Sequence
  chemically treated genomic DNA (Homo sapiens) CpG-island No: 7242
aaaacacacgaatataaaatcaataccccgctacgaattaaatcgaaataatataataacgaataaataaataattaattcgaataacttaattaaacgaaacctcgctaaacaaataccactaaaaccgaaatctaaaaacaaaacaaaaacctacgaacgaaaatcgctatctaaaccgcgaatcgctaatttccctaaaaaaattaaccgcgaaaaaatcactactcgaaaaaccgaaaaaacgaacgctataaatattttcgacaaaaatacccgcccgcatcaaaatacctcaaaaaaacgataaaaaaaaaacgaaaaaaaaaacgaaaacctcgcaaaaccgaaaacgccctaaaatccaatcccgaaactaacgactaccttacgacctctaaatacgaacgaataacaaaacccgacgccgaatcgcccgacccgaatcgcgaacgccgcaaaatataaacaaaaaacccgcctattccgaaccttaaatcaacacctacgattcccgaaaatactaccactaaaacccgcaacaaaactccgcgacgctaaacccgaaaaaccgaaactcccctaatcgcccctaccccccaacactcgcgccattacctccaaccccgaaccaccattatttccaataccaaatcgaacaaccccgctaacctccgaaaccgaaccgccaaaaaccccataaaccccgaaaaaactcgtcgaaaaccgcttccttatcctctcgatatacgcatcgccaccaccctcgctacaaaaaccgccgccctcccaacgcgccatcaccg

SEQ ID NO: 7243 - DNA, 806 bp, Artificial Sequence
  chemically treated genomic DNA (Homo sapiens) CpG-island No: 7243
aagatatacgagtgtaaagttagtgtttcgttgcgaattaaatcggggtgatgtgatggcgagtgagtgggtagttaattcggatggtttggttagacgaggtttcgttgagtaggtgttattgaagtcgaagtttgaaggtagagtaggaatttgcgggcgaaggtcgttatttgaatcgcgaatcgttggtttttttggggaggttggtcgcggagggattattgttcgaaggatcgagggagcgggcgttgtaggtgttttcggtagagatgttcgttcgtattagagtgttttaggagggcggtgaggaggagacggaagagagggcggggatttcgtagggtcgagggcgttttggggtttagtttcggggttggcggttgttttgcggtttttaggtgcgggcggataataaaattcggcgtcggatcgttcggttcgggtcgcgggcgtcgtaggatgtgggtagaaggttcgtttgtttcgagttttaaattaatatttgcggttttcgggggtgttattattggggttcgtagtaaggtttcgcggcgttaggttcgagaaatcgaaatttttttagtcgtttttgttttttagtattcgcgttattgtttttagtttcgagttattattgtttttagtgttaaatcgggtagtttcgttagttttcgaggtcgaatcgttaggggttttataagtttcgaggaggttcgtcgggaatcgtttttttattttttcggtatgcgtatcgttattattttcgttgtagaggtcgtcgtttttttagcgcgttattatcg

SEQ ID NO: 7244 - DNA, 806 bp, Artificial Sequence
  chemically treated genomic DNA (Homo sapiens) CpG-island No: 7244
cgataataacgcgctaaaaaaacgacgacctctacaacgaaaataataacgatacgcataccgaaaaaataaaaaaacgattcccgacgaacctcctcgaaacttataaaacccctaacgattcgacctcgaaaactaacgaaactacccgatttaacactaaaaacaataataactcgaaactaaaaacaataacgcgaatactaaaaaacaaaaacgactaaaaaaatttcgatttctcgaacctaacgccgcgaaaccttactacgaaccccaataataacacccccgaaaaccgcaaatattaatttaaaactcgaaacaaacgaaccttctacccacatcctacgacgcccgcgacccgaaccgaacgatccgacgccgaattttattatccgcccgcacctaaaaaccgcaaaacaaccgccaaccccgaaactaaaccccaaaacgccctcgaccctacgaaatccccgccctctcttccgtctcctcctcaccgccctcctaaaacactctaatacgaacgaacatctctaccgaaaacacctacaacgcccgctccctcgatccttcgaacaataatccctccgcgaccaacctccccaaaaaaaccaacgattcgcgattcaaataacgaccttcgcccgcaaattcctactctaccttcaaacttcgacttcaataacacctactcaacgaaacctcgtctaaccaaaccatccgaattaactacccactcactcgccatcacatcaccccgatttaattcgcaacgaaacactaactttacactcgtatatctt

SEQ ID NO: 7245 - DNA, 700 bp, Artificial Sequence
  chemically treated genomic DNA (Homo sapiens) CpG-island No: 7245
gtttcggcgttcgggatcgggcgggtcgtagtagggttttatatttgttgagtgattgaatatcgttttcggtcggggagagcgtcgtagtcgggtttattttaggtaggggttgggttttttcggtttcgtttaggtttcgtttttagcgcgaattcgtttttatttcgtttgtttacggagtagtagggggtttgattgtgttttttttttttgtttttttcgttttttttgtagttgttacgaaaattcggaacggcggagcggcgtcgtttttcgcggtatttttttggtagtttttggaggtcgcgttgggtatgtttagttagttgggtcgttttatttttcggagtaggaaagttcgggcgtttcggttgtaaagagtcgcggcggggggaaaatggagttttttattaattgtgagtgggttgtcgaggcgtcgggattcgggtttttcggagttttgatgggtgagggtagtattgacgtatttggtgcggttggcgaatcgcgtagtgacgaatcgatttcgtaatcggggaatttttagatttcgtagtcgagtgggtagtgggaaagttggtattttatgtttgttttcggaggaggcggtgtcggttcgatttttttgtaggagcgttaagttgtggtagttgtcgagtttaatttttgtggggcgttaggagttgttttttttttt

SEQ ID NO: 7246 - DNA, 700 bp, Artificial Sequence
  chemically treated genomic DNA (Homo sapiens) CpG-island No: 7246
aaaaaaaaaaacaactcctaacgccccacaaaaattaaactcgacaactaccacaacttaacgctcctacaaaaaaatcgaaccgacaccgcctcctccgaaaacaaacataaaataccaactttcccactacccactcgactacgaaatctaaaaattccccgattacgaaatcgattcgtcactacgcgattcgccaaccgcaccaaatacgtcaatactaccctcacccatcaaaactccgaaaaacccgaatcccgacgcctcgacaacccactcacaattaataaaaaactccattttccccccgccgcgactctttacaaccgaaacgcccgaactttcctactccgaaaaataaaacgacccaactaactaaacatacccaacgcgacctccaaaaactaccaaaaaaataccgcgaaaaacgacgccgctccgccgttccgaattttcgtaacaactacaaaaaaaacgaaaaaaacaaaaaaaaaaaacacaatcaaaccccctactactccgtaaacaaacgaaataaaaacgaattcgcgctaaaaacgaaacctaaacgaaaccgaaaaaacccaacccctacctaaaataaacccgactacgacgctctccccgaccgaaaacgatattcaatcactcaacaaatataaaaccctactacgacccgcccgatcccgaacgccgaaac

SEQ ID NO: 7247 - DNA, 700 bp, Artificial Sequence
  chemically treated genomic DNA (Homo sapiens) CpG-island No: 7247
gggaagggggatagtttttggcgttttataaaagttgggttcggtagttgttataatttaacgtttttataggagagtcgggtcgatatcgtttttttcgggggtaaatatgagatgttaatttttttattgtttattcggttgcggagtttagaggtttttcgattgcgagatcggttcgttattgcgcgattcgttagtcgtattaagtgcgttaatattgtttttatttattagggtttcggagagttcgggtttcggcgtttcggtagtttatttataattggtgaagggttttatttttttttcgtcgcggttttttatagtcggagcgttcgagtttttttatttcgagagatgaggcggtttagttgattgagtatgtttagcgcggtttttaagggttgttagggaggtgtcgcgaggggcggcgtcgtttcgtcgtttcgggttttcgtggtagttgtagaaagagcgagggaagtaagagggaaaagtatagttaaattttttgttgtttcgtggataggcgaggtgggagcgggttcgcgttgggggcggggtttaggcggggtcgggaaagtttagtttttatttgaagtggattcggttgcggcgtttttttcggtcgggaacggtgtttagttatttaataaatgtggagttttattgcgattcgttcgatttcggacgtcgagat

SEQ ID NO: 7248 - DNA, 700 bp, Artificial Sequence
  chemically treated genomic DNA (Homo sapiens) CpG-island No: 7248
atctcgacgtccgaaatcgaacgaatcgcaataaaactccacatttattaaataactaaacaccgttcccgaccgaaaaaaacgccgcaaccgaatccacttcaaataaaaactaaactttcccgaccccgcctaaaccccgcccccaacgcgaacccgctcccacctcgcctatccacgaaacaacaaaaaatttaactatacttttccctcttacttccctcgctctttctacaactaccacgaaaacccgaaacgacgaaacgacgccgcccctcgcgacacctccctaacaacccttaaaaaccgcgctaaacatactcaatcaactaaaccgcctcatctctcgaaataaaaaaactcgaacgctccgactataaaaaaccgcgacgaaaaaaaaataaaacccttcaccaattataaataaactaccgaaacgccgaaacccgaactctccgaaaccctaataaataaaaacaatattaacgcacttaatacgactaacgaatcgcgcaataacgaaccgatctcgcaatcgaaaaacctctaaactccgcaaccgaataaacaataaaaaaattaacatctcatatttacccccgaaaaaaacgatatcgacccgactctcctataaaaacgttaaattataacaactaccgaacccaacttttataaaacgccaaaaactatcccccttccc

SEQ ID NO: 7249 - DNA, 580 bp, Artificial Sequence
  chemically treated genomic DNA (Homo sapiens) CpG-island No: 7249
agagagggcgggatttcgttaggtcgagggcgttttggtgtttagtttcggggttggcggttgttttgcggtttttaagtgcgggcggataataaaatttcgtgcgtcggatttgttcggttcgggtcgcgggcgtcgtaggatgtgggtagtaaggttcgtttgtttcgagttattaaattaatatttgtcggttttcgggggtgttattattggggttcgtagtaaggtttcgcggcgttaggttcgagaaatcgaaatttttttagtcgtttttgttttttagtattcgcgttattgtttttagtttcgagttattattgtttttagtgttaaatcgggtagtttcgttagttttcgaggtcgaatcgttaggggttttataagtttcgaggaggttcgtcgggaatcgtttttttattttttcggtatgcgtatcgttattattttcgttgtagaggtcgtcgtttttttagcgcgttattatcgttttttttgttttttttttttttttagtttcggtttttgtattgatttggttcgggttgcgttttattgcgtttgttaattgttatacgtt

SEQ ID NO: 7250 - DNA, 580 bp, Artificial Sequence
  chemically treated genomic DNA (Homo sapiens) CpG-island No: 7250
aacgtataacaattaacaaacgcaataaaacgcaacccgaaccaaatcaatacaaaaaccgaaactaaaaaaaaaaaaaaaacaaaaaaaacgataataacgcgctaaaaaaacgacgacctctacaacgaaaataataacgatacgcataccgaaaaaataaaaaaacgattcccgacgaacctcctcgaaacttataaaacccctaacgattcgacctcgaaaactaacgaaactacccgatttaacactaaaaacaataataactcgaaactaaaaacaataacgcgaatactaaaaaacaaaaacgactaaaaaaatttcgatttctcgaacctaacgccgcgaaaccttactacgaaccccaataataacacccccgaaaaccgacaaatattaatttaataactcgaaacaaacgaaccttactacccacatcctacgacgcccgcgacccgaaccgaacaaatccgacgcacgaaattttattatccgcccgcacttaaaaaccgcaaaacaaccgccaaccccgaaactaaacaccaaaacgccctcgacctaacgaaatcccgccctctct

SEQ ID NO: 7251 - DNA, 580 bp, Artificial Sequence
  chemically treated genomic DNA (Homo sapiens) CpG-island No: 7251
agcgtgtgatagttggtaggcgtagtgaggcgtagttcgagttaagttaatgtaggggtcggggttgagggaggggaagaggtagaggaggcggtgatggcgcgttgggagggcggcggtttttgtagcgagggtggtggcgatgcgtatatcgagaggataaggaagcggttttcgacgagttttttcggggtttatggggtttttggcggttcggtttcggaggttagcggggttgttcgatttggtattggaaataatggtggttcggggttggaggtaatggcgcgagtgttggggggtaggggcgattaggggagtttcggtttttcgggtttagcgtcgcggagttttgttgcgggttttagtggtagtattttcgggaatcgataggtgttgatttaatggttcggaataggcgggttttgttgtttatattttgcggcgttcgcgattcgggtcgggtagattcggcgtacgaggttttgttattcgttcgtatttagaggtcgtaaggtagtcgttagtttcgggattggatattagggcgttttcggtttgacgaggtttcgtttttttt

SEQ ID NO: 7252 - DNA, 580 bp, Artificial Sequence
  chemically treated genomic DNA (Homo sapiens) CpG-island No: 7252
aaaaaaaacgaaacctcgtcaaaccgaaaacgccctaatatccaatcccgaaactaacgactaccttacgacctctaaatacgaacgaataacaaaacctcgtacgccgaatctacccgacccgaatcgcgaacgccgcaaaatataaacaacaaaacccgcctattccgaaccattaaatcaacacctatcgattcccgaaaatactaccactaaaacccgcaacaaaactccgcgacgctaaacccgaaaaaccgaaactcccctaatcgcccctaccccccaacactcgcgccattacctccaaccccgaaccaccattatttccaataccaaatcgaacaaccccgctaacctccgaaaccgaaccgccaaaaaccccataaaccccgaaaaaactcgtcgaaaaccgcttccttatcctctcgatatacgcatcgccaccaccctcgctacaaaaaccgccgccctcccaacgcgccatcaccgcctcctctacctcttcccctccctcaaccccgacccctacattaacttaactcgaactacgcctcactacgcctaccaactatcacacgct

SEQ ID NO: 7253 - DNA, 579 bp, Artificial Sequence
  chemically treated genomic DNA (Homo sapiens) CpG-island No: 7253
tgttcgaattgggttagtcgatgtacgttttcgataaagatcgtattgaaggcggtattgtggtgcggatggcgaaagagggcgaaacgttggtgttgttcgacggtattgaagcgaagttgaatgttgatattttggttatcgtcgattataataaggcgttggcgatgggcggtattttcggtggcgaatattttggcgtgaatgacgaaatataaaacgtgttgttggaatgcgcgttttttagttcgttgtttattatcggtcgtgttcgtcgttatggtttgtatatcgatgcgttttatcgttatgagcgtggcgttgattcggtattgtagtataaagcgatggaacgtgcgattcgtttgttgatcgatatttgcggtggtgaggttggttcggtaattgatattattaacgaagtaacgttgtcgaagcgtgtaattattattttacgtcgtagtaaattggatcgtttgatcggttattatattgcggatgagtaggtaattgatattttgcgtcgtttcggttgcgaagtgatcgaaggtaaagacgaatggtaggtagttgcgtcga

SEQ ID NO: 7254 - DNA, 579 bp, Artificial Sequence
  chemically treated genomic DNA (Homo sapiens) CpG-island No: 7254
tcgacgcaactacctaccattcgtctttaccttcgatcacttcgcaaccgaaacgacgcaaaatatcaattacctactcatccgcaatataataaccgatcaaacgatccaatttactacgacgtaaaataataattacacgcttcgacaacgttacttcgttaataatatcaattaccgaaccaacctcaccaccgcaaatatcgatcaacaaacgaatcgcacgttccatcgctttatactacaataccgaatcaacgccacgctcataacgataaaacgcatcgatatacaaaccataacgacgaacacgaccgataataaacaacgaactaaaaaacgcgcattccaacaacacgttttatatttcgtcattcacgccaaaatattcgccaccgaaaataccgcccatcgccaacgccttattataatcgacgataaccaaaatatcaacattcaacttcgcttcaataccgtcgaacaacaccaacgtttcgccctctttcgccatccgcaccacaataccgccttcaatacgatctttatcgaaaacgtacatcgactaacccaattcgaaca

SEQ ID NO: 7255 - DNA, 579 bp, Artificial Sequence
  chemically treated genomic DNA (Homo sapiens) CpG-island No: 7255
tcggcgtaattgtttgttattcgtttttgttttcggttatttcgtagtcgagacgacgtagaatgttagttatttgtttattcgtaatatgatggtcgattaggcgatttagtttgttacgacgtagagtgatggttgtacgtttcggtagcgttgtttcgttggtgatattaattatcgggttagttttattatcgtagatgtcgattagtagacgggtcgtacgttttatcgttttgtgttgtagtgtcggattaacgttacgtttataacggtgagacgtatcggtatgtaggttatgacgacgagtacgatcggtgatagatagcgggttaaagaacgcgtattttagtagtacgttttgtgtttcgttatttacgttagagtgttcgttatcgaagatgtcgtttatcgttagcgttttgttgtggtcggcgatgattagagtgttagtatttagtttcgttttagtatcgtcgagtagtattagcgtttcgttttttttcgttattcgtattataatgtcgtttttaatgcgatttttatcgaaagcgtgtatcggttggtttagttcgagta

SEQ ID NO: 7256 - DNA, 579 bp, Artificial Sequence
  chemically treated genomic DNA (Homo sapiens) CpG-island No: 7256
tactcgaactaaaccaaccgatacacgctttcgataaaaatcgcattaaaaacgacattataatacgaataacgaaaaaaaacgaaacgctaatactactcgacgatactaaaacgaaactaaatactaacactctaatcatcgccgaccacaacaaaacgctaacgataaacgacatcttcgataacgaacactctaacgtaaataacgaaacacaaaacgtactactaaaatacgcgttctttaacccgctatctatcaccgatcgtactcgtcgtcataacctacataccgatacgtctcaccgttataaacgtaacgttaatccgacactacaacacaaaacgataaaacgtacgacccgtctactaatcgacatctacgataataaaactaacccgataattaatatcaccaacgaaacaacgctaccgaaacgtacaaccatcactctacgtcgtaacaaactaaatcgcctaatcgaccatcatattacgaataaacaaataactaacattctacgtcgtctcgactacgaaataaccgaaaacaaaaacgaataacaaacaattacgccga

SEQ ID NO: 7257 - DNA, 603 bp, Artificial Sequence
  chemically treated genomic DNA (Homo sapiens) CpG-island No: 7257
  unsure (582..583, 585..586, 588..589, 591, 595, 598, 602)
tacgtcgcggcgatagagattacgtttaatgcgcgttaaattaggttttggtttacgcggttcgtttaggtttgttaggataatttttagtatacgttttgcgatatcgcggtgacgttgagttattgttagtatcggatattgtaagaagtcgagtagttcgttatcgttaaaggtggtaattgttaggttagaaggtagtttgtcgtcgcgacgtagcgtgatatttattattttttgtaataacgtaaacgacgttgtgaatagcgtttgcggtatcggatgcgtttttagttatttttcgaataattgggtagtcgtttttcgtttatagttgttggtatataggaaatgtatttcgcgcggattatttttttaggtagtacggaaattttgtttacgtaggaagttgatagaaagtttcggtagcgtattaagataaagtatcgtttcggcgggaaatttacgtaattttttcgttagtatttcggtattattttgatcggtattaattacgttggtgaagtgtttacgatcgagggcgcggtttagcggggtatcgagttagaagtcgtatttagnngnnnnntntttnaantgtnt

SEQ ID NO: 7258 - DNA, 603 bp, Artificial Sequence
  chemically treated genomic DNA (Homo sapiens) CpG-island No: 7258
  unsure (2, 6, 9, 13, 15..16, 18..19, 21..)
anacanttnaaanannnnncnnctaaatacgacttctaactcgataccccgctaaaccgcgccctcgatcgtaaacacttcaccaacgtaattaataccgatcaaaataataccgaaatactaacgaaaaaattacgtaaatttcccgccgaaacgatactttatcttaatacgctaccgaaactttctatcaacttcctacgtaaacaaaatttccgtactacctaaaaaaataatccgcgcgaaatacatttcctatataccaacaactataaacgaaaaacgactacccaattattcgaaaaataactaaaaacgcatccgataccgcaaacgctattcacaacgtcgtttacgttattacaaaaaataataaatatcacgctacgtcgcgacgacaaactaccttctaacctaacaattaccacctttaacgataacgaactactcgacttcttacaatatccgatactaacaataactcaacgtcaccgcgatatcgcaaaacgtatactaaaaattatcctaacaaacctaaacgaaccgcgtaaaccaaaacctaatttaacgcgcattaaacgtaatctctatcgccgcgacgta

SEQ ID NO: 7259 - DNA, 603 bp, Artificial Sequence
  chemically treated genomic DNA (Homo sapiens) CpG-island No: 7259
  unsure (2, 6, 9, 13, 15..16, 18..19, 21..)
anatanttngganannnnntnnttggatacgatttttagttcggtatttcgttggatcgcgttttcgatcgtgaatattttattagcgtggttggtgtcgattaggatgatgtcgaaatgttggcggaagagttacgtaagtttttcgtcgagacggtgttttattttggtgcgttatcggagttttttgttagttttttgcgtgaataaggttttcgtattgtttggaaagatgattcgcgcgaagtgtattttttgtatgttaatagttatgagcgggaggcggttgtttagttattcgaaaaatggttggaaacgtattcgatgtcgtaggcgttgtttataacgtcgtttgcgttgttgtaaggagtgatggatgttacgttgcgtcgcgacggtaaattgttttttgatttggtaattgttatttttggcgataacgaattgttcgattttttatagtgttcggtgttggtagtggtttaacgttatcgcgatgtcgtagagcgtgtgttggagattgttttggtaagtttggacgaatcgcgtaagttaaaatttggtttaacgcgtattaaacgtaatttttatcgtcgcggcgtg

SEQ ID NO: 7260 - DNA, 603 bp, Artificial Sequence
  chemically treated genomic DNA (Homo sapiens) CpG-island No: 7260
  unsure (582..583, 585..586, 588..589, 591, 595, 598, 602)
cacgccgcgacgataaaaattacgtttaatacgcgttaaaccaaattttaacttacgcgattcgtccaaacttaccaaaacaatctccaacacacgctctacgacatcgcgataacgttaaaccactaccaacaccgaacactataaaaaatcgaacaattcgttatcgccaaaaataacaattaccaaatcaaaaaacaatttaccgtcgcgacgcaacgtaacatccatcactccttacaacaacgcaaacgacgttataaacaacgcctacgacatcgaatacgtttccaaccatttttcgaataactaaacaaccgcctcccgctcataactattaacatacaaaaaatacacttcgcgcgaatcatctttccaaacaatacgaaaaccttattcacgcaaaaaactaacaaaaaactccgataacgcaccaaaataaaacaccgtctcgacgaaaaacttacgtaactcttccgccaacatttcgacatcatcctaatcgacaccaaccacgctaataaaatattcacgatcgaaaacgcgatccaacgaaataccgaactaaaaatcgtatccaannannnnntntccnaantatnt

SEQ ID NO: 7261 - DNA, 773 bp, Artificial Sequence
  chemically treated genomic DNA (Homo sapiens) CpG-island No: 7261
cggcggtggttcgcgacgagaagtttggtttgttttttcgttggatgaggtcgtacgtttggtttgtttgttttacgcgttacggcgcgacgtaacgtaatagcgtttgttagtagcggattatttgcggtttgtatatcggcggtacgttggttgtcgaagcggcgggttatttgtcggatattttggcgtggaagtcgacgatatttattaatatgtatgatgttggacgtcgatagttattagattattgatttcggcgatgattttatatcgtcgggcgtttttattcgatgatcgatttaattttacgtaatagttaattgtcgatttcggcgttaaatcgtaagtgcgcgtgttgttgttgatgtcgtgattggtttcggtgcgatcgtcgattttgtcgtttcgttgtgagcgtttggtaaaaagtttgtgtcgcgcgtttagataattaattatttatgttattgttacggtgataggtattgaacgtgattcgtaatgtcgttgtagtaaatcgttacgttggaagatgcggggattgcggtcgtgagttcgtatcggaagttattttgttggcggtagcgttaatttattcgttttcgtcgtcgtatagtaatatatatcgttattattggaaaacgtcgtcgtgattatatcggattacgtagttttgcgttggagttataaagcgttagtaaatcgttgtgtattattaatggtcgttagtcgtcggtggtaataaaaaattggtcgtttattagaacgtt

SEQ ID NO: 7262 - DNA, 773 bp, Artificial Sequence
  chemically treated genomic DNA (Homo sapiens) CpG-island No: 7262
aacgttctaataaacgaccaattttttattaccaccgacgactaacgaccattaataatacacaacgatttactaacgctttataactccaacgcaaaactacgtaatccgatataatcacgacgacgttttccaataataacgatatatattactatacgacgacgaaaacgaataaattaacgctaccgccaacaaaataacttccgatacgaactcacgaccgcaatccccgcatcttccaacgtaacgatttactacaacgacattacgaatcacgttcaatacctatcaccgtaacaataacataaataattaattatctaaacgcgcgacacaaactttttaccaaacgctcacaacgaaacgacaaaatcgacgatcgcaccgaaaccaatcacgacatcaacaacaacacgcgcacttacgatttaacgccgaaatcgacaattaactattacgtaaaattaaatcgatcatcgaataaaaacgcccgacgatataaaatcatcgccgaaatcaataatctaataactatcgacgtccaacatcatacatattaataaatatcgtcgacttccacgccaaaatatccgacaaataacccgccgcttcgacaaccaacgtaccgccgatatacaaaccgcaaataatccgctactaacaaacgctattacgttacgtcgcgccgtaacgcgtaaaacaaacaaaccaaacgtacgacctcatccaacgaaaaaacaaaccaaacttctcgtcgcgaaccaccgccg

SEQ ID NO: 7263 - DNA, 773 bp, Artificial Sequence
  chemically treated genomic DNA (Homo sapiens) CpG-island No: 7263
aacgttttaataaacggttagttttttattgttatcggcgattggcgattattggtaatgtataacggtttgttggcgttttgtagttttagcgtaaagttgcgtaattcgatgtaattacggcgacgttttttagtaatgacggtgtgtgttgttgtgcggcggcgagagcggatgaattaacgttgtcgttagtaaggtggttttcggtacgaatttacgatcgtaattttcgtattttttagcgtggcgatttgttgtagcggtattgcgggttacgtttagtgtttgttatcgtggtaatggtataagtggttgattatttaaacgcgcggtataggttttttgttaggcgtttatagcgaggcggtaggatcggcggtcgtatcgaagttaattacgatattagtagtaatacgcgtatttgcggtttagcgtcgagatcggtaattaattgttgcgtaaggttgggtcgattatcggatggggacgttcgacggtgtagaattatcgtcgaggttaataatttggtggttatcggcgtttagtattatgtatgttgatgggtatcgtcggtttttacgttaaggtgttcggtaagtaattcgtcgtttcggtagttagcgtatcgtcggtatataaatcgtaaataattcgttgttgataggcgttattgcgttacgtcgcgtcgtgacgcgtgaagtaggtaagttaggcgtgcggttttatttagcgaggaggtaaattagatttttcgtcgcgggttatcgtcg

SEQ ID NO: 7264 - DNA, 773 bp, Artificial Sequence
  chemically treated genomic DNA (Homo sapiens) CpG-island No: 7264
cgacgataacccgcgacgaaaaatctaatttacctcctcgctaaataaaaccgcacgcctaacttacctacttcacgcgtcacgacgcgacgtaacgcaataacgcctatcaacaacgaattatttacgatttatataccgacgatacgctaactaccgaaacgacgaattacttaccgaacaccttaacgtaaaaaccgacgatacccatcaacatacataatactaaacgccgataaccaccaaattattaacctcgacgataattctacaccgtcgaacgtccccatccgataatcgacccaaccttacgcaacaattaattaccgatctcgacgctaaaccgcaaatacgcgtattactactaatatcgtaattaacttcgatacgaccgccgatcctaccgcctcgctataaacgcctaacaaaaaacctataccgcgcgtttaaataatcaaccacttataccattaccacgataacaaacactaaacgtaacccgcaataccgctacaacaaatcgccacgctaaaaaatacgaaaattacgatcgtaaattcgtaccgaaaaccaccttactaacgacaacgttaattcatccgctctcgccgccgcacaacaacacacaccgtcattactaaaaaacgtcgccgtaattacatcgaattacgcaactttacgctaaaactacaaaacgccaacaaaccgttatacattaccaataatcgccaatcgccgataacaataaaaaactaaccgtttattaaaacgtt

SEQ ID NO: 7265 - DNA, 562 bp, Artificial Sequence
  chemically treated genomic DNA (Homo sapiens) CpG-island No: 7265
gttttattgttcggggatggggagtaagtttagttagtcgttgttttcgggtgtgcgtgcgtagttgtacgttatttttagacgaatcgatgattggatggatgtcgtcgtagtcgttatattgatgatacggatgtgttttttcgtatatatatgttatcggagagttgttaacgtatggttatcgtcgggtatgggcgcgtttcgtagataggtagaatttgatggtatgtttgcgattaatgttaaagtgtttatcggattatgcgttagaatgcgttgttgtttgagcgaaaatcgttgtatcgttatcgaaacgggtatatataggtagagtggtcgtgaaagaagtaattagcgatggtgttttgacgggttcgagttttgttgtgataacgagagagattgcgtgttacgttcgcgttggattgttgtgatcgtgaggtttgtattgggcggttattatcggcggttttaatagtgaaatagtataggcgttatgttgggagtgatacgaattagttcggtattttatgtatattattttattttttttttttaa

SEQ ID NO: 7266 - DNA, 562 bp, Artificial Sequence
  chemically treated genomic DNA (Homo sapiens) CpG-island No: 7266
ttaaaaaaaaaaaataaaataatatacataaaataccgaactaattcgtatcactcccaacataacgcctatactatttcactattaaaaccgccgataataaccgcccaatacaaacctcacgatcacaacaatccaacgcgaacgtaacacgcaatctctctcgttatcacaacaaaactcgaacccgtcaaaacaccatcgctaattacttctttcacgaccactctacctatatatacccgtttcgataacgatacaacgattttcgctcaaacaacaacgcattctaacgcataatccgataaacactttaacattaatcgcaaacataccatcaaattctacctatctacgaaacgcgcccatacccgacgataaccatacgttaacaactctccgataacatatatatacgaaaaaacacatccgtatcatcaatataacgactacgacgacatccatccaatcatcgattcgtctaaaaataacgtacaactacgcacgcacacccgaaaacaacgactaactaaacttactccccatccccgaacaataaaac

SEQ ID NO: 7267 - DNA, 562 bp, Artificial Sequence
  chemically treated genomic DNA (Homo sapiens) CpG-island No: 7267
ttagaaggaaggaatggagtgatgtgtatagggtatcgagttgattcgtattatttttagtatgacgtttgtattgttttattgttgaagtcgtcggtagtgatcgtttagtgtaggttttacgattatagtagtttagcgcgaacgtgatacgtagtttttttcgttattatagtagaattcgaattcgttagagtattatcgttgattgttttttttacggttattttgtttgtatgtgttcgtttcgatggcggtatagcggttttcgtttaagtaatagcgtattttggcgtatgattcggtaaatattttggtattgatcgtaggtatattattaagttttgtttgtttgcgaagcgcgtttatattcgacgataattatacgttggtagtttttcgataatatgtgtatacggagaagtatattcgtattattagtgtgacgattgcggcggtatttatttagttatcggttcgtttgagaatgacgtgtaattgcgtacgtatattcggagataacggttgattaagtttattttttattttcgggtaatagggt

SEQ ID NO: 7268 - DNA, 562 bp, Artificial Sequence
  chemically treated genomic DNA (Homo sapiens) CpG-island No: 7268
accctattacccgaaaataaaaaataaacttaatcaaccgttatctccgaatatacgtacgcaattacacgtcattctcaaacgaaccgataactaaataaataccgccgcaatcgtcacactaataatacgaatatacttctccgtatacacatattatcgaaaaactaccaacgtataattatcgtcgaatataaacgcgcttcgcaaacaaacaaaacttaataatatacctacgatcaataccaaaatatttaccgaatcatacgccaaaatacgctattacttaaacgaaaaccgctataccgccatcgaaacgaacacatacaaacaaaataaccgtaaaaaaaacaatcaacgataatactctaacgaattcgaattctactataataacgaaaaaaactacgtatcacgttcgcgctaaactactataatcgtaaaacctacactaaacgatcactaccgacgacttcaacaataaaacaatacaaacgtcatactaaaaataatacgaatcaactcgataccctatacacatcactccattccttccttctaa

SEQ ID NO: 7269 - DNA, 1026 bp, Artificial Sequence
  chemically treated genomic DNA (Homo sapiens) CpG-island No: 7269
aacgcgggtagttggtgttcgcgagtcgtttttggttttttgtttatacgttgttcgttatttttttttttcgtcgagggtagcgtggttattttattttttttatcggggtttttttttttttttgggatttaataagttaggaaattttcgggggtcgtcggaaagtttcgatagcggtagcgtagtcgatttagggttgcggttgtttcggtttcgtcgttaggggtcgttcgattgttcgtttttttaacgtttaggttagttcgggatcgcggcgttagttattttgttcggttttgttttgtttggtcgttgcgggcgttgacggtagtagttgttagttacggtttcgtcggtttcgtattcgggcgcggttaggtcgtgaggggtgcgttttgtttttttgagtttagtttgtcggtcggttcgtttattttgtggttttggtaagtttcgagcgttcggatcgtcgtttcggtgagttttatatgtagtacggtgatgttgttttgttttagtcgttcgtacgatagtttatagcgttgtttttttcgtaggttttttgtttttttcgtcgttattttaaatttttcggggtgtcgtcgtcgtcgtcgtttcggttttagtttttattgcggtcgcggttgtttgggtttttgtagtcgtcgttattgttagggttatttcgttgttgacgtattgttatatattgcgcggagttagatttcggattgttatcgtcgttattcgttttatttttcggtttcgcgtttcgtttcgggttcgttttattggttttgttttttttagaatcgtttttatcggtcgttttttatttttacgggggcgggtttaaagttattagagttttgtttttgggacgggacgttcgagaggtaagaggttgacgtttaggtgacgcgttaatttaattatgtttgacgttacgtttggtcgttttggttagtcggtcgagattggttaggttggtttggggatttttttgttaattggaagtttagg

SEQ ID NO: 7270 - DNA, 1026 bp, Artificial Sequence
  chemically treated genomic DNA (Homo sapiens) CpG-island No: 7270
cctaaacttccaattaacaaaaaaatccccaaaccaacctaaccaatctcgaccgactaaccaaaacgaccaaacgtaacgtcaaacataattaaattaacgcgtcacctaaacgtcaacctcttacctctcgaacgtcccgtcccaaaaacaaaactctaataactttaaacccgcccccgtaaaaataaaaaacgaccgataaaaacgattctaaaaaaaacaaaaccaataaaacgaacccgaaacgaaacgcgaaaccgaaaaataaaacgaataacgacgataacaatccgaaatctaactccgcgcaatatataacaatacgtcaacaacgaaataaccctaacaataacgacgactacaaaaacccaaacaaccgcgaccgcaataaaaactaaaaccgaaacgacgacgacgacgacaccccgaaaaatttaaaataacgacgaaaaaaacaaaaaacctacgaaaaaaacaacgctataaactatcgtacgaacgactaaaacaaaacaacatcaccgtactacatataaaactcaccgaaacgacgatccgaacgctcgaaacttaccaaaaccacaaaataaacgaaccgaccgacaaactaaactcaaaaaaacaaaacgcacccctcacgacctaaccgcgcccgaatacgaaaccgacgaaaccgtaactaacaactactaccgtcaacgcccgcaacgaccaaacaaaacaaaaccgaacaaaataactaacgccgcgatcccgaactaacctaaacgttaaaaaaacgaacaatcgaacgacccctaacgacgaaaccgaaacaaccgcaaccctaaatcgactacgctaccgctatcgaaactttccgacgacccccgaaaatttcctaacttattaaatcccaaaaaaaaaaaaaaaccccgataaaaaaaataaaataaccacgctaccctcgacgaaaaaaaaaaataacgaacaacgtataaacaaaaaaccaaaaacgactcgcgaacaccaactacccgcgtt

SEQ ID NO: 7271 - DNA, 1026 bp, Artificial Sequence
  chemically treated genomic DNA (Homo sapiens) CpG-island No: 7271
tttggatttttaattagtaggggagtttttaagttagtttggttaatttcggtcggttagttaagacgattagacgtgacgttagatatgattaagttggcgcgttatttagacgttagttttttatttttcggacgtttcgttttaggagtaaaattttagtgattttgggttcgttttcgtgagagtggagggcggtcgatgagggcggttttgaagggaataagattaatgagacgagttcggggcggggcgcggggtcggagggtggggcgggtggcggcggtggtagttcgaggtttggtttcgcgtagtatatgatagtacgttagtagcgggatggttttagtagtggcggcggttgtagaagtttaagtagtcgcggtcgtagtggaggttagagtcggagcggcggcggcggcggtatttcggggagtttaagatggcggcgggggggatagggggtttgcgggaggagtagcgttatgggttgtcgtgcggacggttggggtaggataatattatcgtattgtatgtgaagtttatcgagacggcgattcgggcgttcgagatttattagagttataaggtgagcgggtcggtcggtaggttgggtttagagaggtagagcgtattttttacggtttggtcgcgttcgggtgcggggtcggcggagtcgtggttggtagttgttatcgttagcgttcgtagcggttaggtagggtagggtcgggtagggtggttgacgtcgcggtttcgggttagtttgggcgttggggaagcgggtagtcgggcggtttttggcggcggggtcgaggtagtcgtagttttgggtcggttgcgttgtcgttgtcgggatttttcgacggttttcgaggattttttggtttgttgggttttaaggagggagagaggtttcgataagagaagtgagatgattacgttattttcggcggggaaggagggtagcgagtagcgtatgggtaaggaattagggacgattcgcgggtattagttgttcgcgtt

SEQ ID NO: 7272 - DNA, 1026 bp, Artificial Sequence
  chemically treated genomic DNA (Homo sapiens) CpG-island No: 7272
aacgcgaacaactaatacccgcgaatcgtccctaattccttacccatacgctactcgctaccctccttccccgccgaaaataacgtaatcatctcacttctcttatcgaaacctctctccctccttaaaacccaacaaaccaaaaaatcctcgaaaaccgtcgaaaaatcccgacaacgacaacgcaaccgacccaaaactacgactacctcgaccccgccgccaaaaaccgcccgactacccgcttccccaacgcccaaactaacccgaaaccgcgacgtcaaccaccctacccgaccctaccctacctaaccgctacgaacgctaacgataacaactaccaaccacgactccgccgaccccgcacccgaacgcgaccaaaccgtaaaaaatacgctctacctctctaaacccaacctaccgaccgacccgctcaccttataactctaataaatctcgaacgcccgaatcgccgtctcgataaacttcacatacaatacgataatattatcctaccccaaccgtccgcacgacaacccataacgctactcctcccgcaaaccccctatcccccccgccgccatcttaaactccccgaaataccgccgccgccgccgctccgactctaacctccactacgaccgcgactacttaaacttctacaaccgccgccactactaaaaccatcccgctactaacgtactatcatatactacgcgaaaccaaacctcgaactaccaccgccgccacccgccccaccctccgaccccgcgccccgccccgaactcgtctcattaatcttattcccttcaaaaccgccctcatcgaccgccctccactctcacgaaaacgaacccaaaatcactaaaattttactcctaaaacgaaacgtccgaaaaataaaaaactaacgtctaaataacgcgccaacttaatcatatctaacgtcacgtctaatcgtcttaactaaccgaccgaaattaaccaaactaacttaaaaactcccctactaattaaaaatccaaa

SEQ ID NO: 7273 - DNA, 1189 bp, Artificial Sequence
  chemically treated genomic DNA (Homo sapiens) CpG-island No: 7273
tttttcgtcggatttgacgaaggtggagaagcgattgaggttgcggtttacggtggtcgagtttttgggtttcgacgggtggtgttgcggggggatcgagtcgtcgcgggagtttagggataggtcggagcgcgtggataggcggtagcggtcggttgcgtttatattcgtcgaagacgagtcgtcgaggttcgggtatgtttcgttgtttagagcgttcggttcgttcgttatcgtggagttgtcgttttattcgtcgttttagttattatcgttgttttggttggtttggtagtcgtcgtagagttgttgaggcgacggttgtagggcgttttcgtcgtacgggaagttcgcgtcgggcggttggaaggtgttcggaggcggcgtttgttgtggttgtagtagcgtttggaaggcgttaggcggcggtttgaaggaggcggggggcgcgacgggtaggggttcgaagttttcggggggtatattggcgtagcgggtcggggcgttcgggtcgtcgtttttcgtcgggttaggttcgggggcgcggattatttgtatataggaggtcgggaagaggtcgcggtcgtcgcggttgttgattttttcgagttagttttcgatgttttgttcgttgtataggtttagtatttcgtgttttcgtagcgagattttttttgggtttttcgatttgaagtcgtatagcgttcgggcgcgtagcgttatggtttcggcgtttcgattggcggtttcgattttcggcgtttcgagtcgaggtttatttgaggggttcgcggtattgttcgagttttggcgcgcggattggagtttcgaaggcggtaaatttacgttgttcggattagtcggtcgcgtttttcgcgcggtttcgttcgtagcgtttttatttcgtagcgtcgattgtcgcgttgggtcgtcgtagtcgtcgtcggtcgggggcggggttcgcggttttttacgtttttagttgcgttaatttacggtcgagagttttttgttaggcgagagtaagcgatggtcgagtcgtcgagtttatcgtttgcgtcggttttgcggcggttattgttttttagtggtcggtgtcgcgaagtcgggcgtcgtagtgagcgcggttgaaggaggtttttatttcgaagtgaattatttgagatttttttaggtttttaagttaaat

SEQ ID NO: 7274 - DNA, 1189 bp, Artificial Sequence
  chemically treated genomic DNA (Homo sapiens) CpG-island No: 7274
atttaacttaaaaacctaaaaaaatctcaaataattcacttcgaaataaaaacctccttcaaccgcgctcactacgacgcccgacttcgcgacaccgaccactaaaaaacaataaccgccgcaaaaccgacgcaaacgataaactcgacgactcgaccatcgcttactctcgcctaacaaaaaactctcgaccgtaaattaacgcaactaaaaacgtaaaaaaccgcgaaccccgcccccgaccgacgacgactacgacgacccaacgcgacaatcgacgctacgaaataaaaacgctacgaacgaaaccgcgcgaaaaacgcgaccgactaatccgaacaacgtaaatttaccgccttcgaaactccaatccgcgcgccaaaactcgaacaataccgcgaacccctcaaataaacctcgactcgaaacgccgaaaatcgaaaccgccaatcgaaacgccgaaaccataacgctacgcgcccgaacgctatacgacttcaaatcgaaaaacccaaaaaaaatctcgctacgaaaacacgaaatactaaacctatacaacgaacaaaacatcgaaaactaactcgaaaaaatcaacaaccgcgacgaccgcgacctcttcccgacctcctatatacaaataatccgcgcccccgaacctaacccgacgaaaaacgacgacccgaacgccccgacccgctacgccaatataccccccgaaaacttcgaacccctacccgtcgcgccccccgcctccttcaaaccgccgcctaacgccttccaaacgctactacaaccacaacaaacgccgcctccgaacaccttccaaccgcccgacgcgaacttcccgtacgacgaaaacgccctacaaccgtcgcctcaacaactctacgacgactaccaaaccaaccaaaacaacgataataactaaaacgacgaataaaacgacaactccacgataacgaacgaaccgaacgctctaaacaacgaaacatacccgaacctcgacgactcgtcttcgacgaatataaacgcaaccgaccgctaccgcctatccacgcgctccgacctatccctaaactcccgcgacgactcgatccccccgcaacaccacccgtcgaaacccaaaaactcgaccaccgtaaaccgcaacctcaatcgcttctccaccttcgtcaaatccgacgaaaaa

SEQ ID NO: 7275 - DNA, 1189 bp, Artificial Sequence
  chemically treated genomic DNA (Homo sapiens) CpG-island No: 7275
gtttaatttaaaagtttaaagaaattttagataatttatttcggagtagaaattttttttagtcgcgtttattacggcgttcggtttcgcggtatcggttattagagggtagtggtcgtcgtaaagtcgacgtaggcggtgggttcggcggttcggttatcgtttgttttcgtttggtaaggggttttcggtcgtggattagcgtagttggagacgtgggaggtcgcgggtttcgttttcgatcggcggcggttgcggcggtttagcgcggtagtcggcgttgcgaagtggaggcgttgcgagcggagtcgcgcggagggcgcgatcggttggttcgggtagcgtgggtttgtcgttttcggggttttagttcgcgcgttagggttcgagtagtatcgcgggttttttaggtgggtttcggttcgggacgtcgggagtcgggatcgttagtcggggcgtcgggattatggcgttgcgcgttcgggcgttgtacgattttaggtcggagaatttaggagagatttcgttgcgagagtacgaggtgttgagtttgtgtagcgagtaggatatcgagggttggttcgagggggttaatagtcgcggcgatcgcggttttttttcggttttttatgtgtaggtgattcgcgttttcgagtttggttcggcgggagacggcggttcgggcgtttcggttcgttacgttaatgtgtttttcgggggtttcgagtttttgttcgtcgcgtttttcgttttttttaagtcgtcgtttgacgttttttaggcgttgttgtagttatagtaggcgtcgttttcgagtattttttagtcgttcggcgcgggtttttcgtacggcgggggcgttttgtagtcgtcgttttagtagttttacggcggttattaggttagttaaggtagcgatgatgattgggacgacgagtgggacgatagttttacggtggcggacgagtcgggcgttttgggtagcggagtatattcggatttcgacggttcgttttcggcgggtgtgggcgtagtcggtcgttatcgtttgtttacgcgtttcgatttgtttttgggttttcgcggcggttcggttttttcgtagtattattcgtcggggtttaagagttcggttatcgtgagtcgtaattttaatcgtttttttattttcgttaagttcggcggggag

SEQ ID NO: 7276 - DNA, 1189 bp, Artificial Sequence
  chemically treated genomic DNA (Homo sapiens) CpG-island No: 7276
ctccccgccgaacttaacgaaaataaaaaaacgattaaaattacgactcacgataaccgaactcttaaaccccgacgaataatactacgaaaaaaccgaaccgccgcgaaaacccaaaaacaaatcgaaacgcgtaaacaaacgataacgaccgactacgcccacacccgccgaaaacgaaccgtcgaaatccgaatatactccgctacccaaaacgcccgactcgtccgccaccgtaaaactatcgtcccactcgtcgtcccaatcatcatcgctaccttaactaacctaataaccgccgtaaaactactaaaacgacgactacaaaacgcccccgccgtacgaaaaacccgcgccgaacgactaaaaaatactcgaaaacgacgcctactataactacaacaacgcctaaaaaacgtcaaacgacgacttaaaaaaaacgaaaaacgcgacgaacaaaaactcgaaacccccgaaaaacacattaacgtaacgaaccgaaacgcccgaaccgccgtctcccgccgaaccaaactcgaaaacgcgaatcacctacacataaaaaaccgaaaaaaaaccgcgatcgccgcgactattaaccccctcgaaccaaccctcgatatcctactcgctacacaaactcaacacctcgtactctcgcaacgaaatctctcctaaattctccgacctaaaatcgtacaacgcccgaacgcgcaacgccataatcccgacgccccgactaacgatcccgactcccgacgtcccgaaccgaaacccacctaaaaaacccgcgatactactcgaaccctaacgcgcgaactaaaaccccgaaaacgacaaacccacgctacccgaaccaaccgatcgcgccctccgcgcgactccgctcgcaacgcctccacttcgcaacgccgactaccgcgctaaaccgccgcaaccgccgccgatcgaaaacgaaacccgcgacctcccacgtctccaactacgctaatccacgaccgaaaaccccttaccaaacgaaaacaaacgataaccgaaccgccgaacccaccgcctacgtcgactttacgacgaccactaccctctaataaccgataccgcgaaaccgaacgccgtaataaacgcgactaaaaaaaatttctactccgaaataaattatctaaaatttctttaaacttttaaattaaac

SEQ ID NO: 7277 - DNA, 511 bp, Artificial Sequence
  chemically treated genomic DNA (Homo sapiens) CpG-island No: 7277
cgatagtgcgtgcgtcgagcgatggttatgtgatttaggtattgattcgttcgggtatttatgtcgcgtcgttgtcgttacgttcggtgatggtgtttatattcgattagaaacgataaatcgtggcgtagtttcgttagaattttttgttgcgattggtttttggcgacgatgcggaagtggtgtttaatgttttgttaggtaaggtatttagcggtaagttggtagttattagtttagtcgttttcggcggattttattagtcgagtcggtattttatagacgtttaaatatagcgtcgggtttagatggcgtttttgcgattattgaattggatggagtatattgatttgggcggtttattcgacggtatttatcgttaggtggcgggttatttcgtttcgtttagtaatgtttcggggatggttaaagtgttatttttatgatacgttggggtattatttttattcggatttataatttttcgtttcgtttttgtgttttttattgt

SEQ ID NO: 7278 - DNA, 511 bp, Artificial Sequence
  chemically treated genomic DNA (Homo sapiens) CpG-island No: 7278
acaataaaaaacacaaaaacgaaacgaaaaattataaatccgaataaaaataataccccaacgtatcataaaaataacactttaaccatccccgaaacattactaaacgaaacgaaataacccgccacctaacgataaataccgtcgaataaaccgcccaaatcaatatactccatccaattcaataatcgcaaaaacgccatctaaacccgacgctatatttaaacgtctataaaataccgactcgactaataaaatccgccgaaaacgactaaactaataactaccaacttaccgctaaataccttacctaacaaaacattaaacaccacttccgcatcgtcgccaaaaaccaatcgcaacaaaaaattctaacgaaactacgccacgatttatcgtttctaatcgaatataaacaccatcaccgaacgtaacgacaacgacgcgacataaatacccgaacgaatcaatacctaaatcacataaccatcgctcgacgcacgcactatcg

SEQ ID NO: 7279 - DNA, 511 bp, Artificial Sequence
  chemically treated genomic DNA (Homo sapiens) CpG-island No: 7279
atagtgaaaaatataggggcggaacggaaagttatgagttcggataaaggtaatgttttagcgtgttatgggaatagtattttggttattttcgagatattgttgaacggaacggagtaattcgttatttggcggtaaatatcgtcgggtagatcgtttaaattagtgtgttttatttagtttaatggtcgtaaaaacgttatttgaattcggcgttgtgtttaaacgtttgtaaggtgtcggttcgattgataagattcgtcgggaacggttggattaatggttgttagtttatcgttgaatattttatttggtagagtattaaatattattttcgtatcgtcgttaggagttagtcgtagtaaggagttttgacggaattgcgttacgatttgtcgtttttgatcgggtataaatattattatcggacgtagcggtagcgacgcggtataggtattcggacgaattagtatttgggttatataattatcgttcggcgtacgtattatcg

SEQ ID NO: 7280 - DNA, 511 bp, Artificial Sequence
  chemically treated genomic DNA (Homo sapiens) CpG-island No: 7280
cgataatacgtacgccgaacgataattatataacccaaatactaattcgtccgaatacctataccgcgtcgctaccgctacgtccgataataatatttatacccgatcaaaaacgacaaatcgtaacgcaattccgtcaaaactccttactacgactaactcctaacgacgatacgaaaataatatttaatactctaccaaataaaatattcaacgataaactaacaaccattaatccaaccgttcccgacgaatcttatcaatcgaaccgacaccttacaaacgtttaaacacaacgccgaattcaaataacgtttttacgaccattaaactaaataaaacacactaatttaaacgatctacccgacgatatttaccgccaaataacgaattactccgttccgttcaacaatatctcgaaaataaccaaaatactattcccataacacgctaaaacattacctttatccgaactcataactttccgttccgcccctatatttttcactat

SEQ ID NO: 7281 - DNA, 601 bp, Artificial Sequence
  chemically treated genomic DNA (Homo sapiens) CpG-island No: 7281
  unsure (582, 593)
tattcgcgataggtggggcgagggtggtaatgttcgatatttgtcgtttaagtttttggttcggatcgggttttaatttatacgcgtatatacggttatagtcggttagtttatttttattgtatcggtagatattcggagggcgcgggcggtttcggtacgcgggttgtaattaggacgaggagggtcggcgagattagatcgtcggggcgtcgttttgaggtgttatttgattcgggtagtcgtattttgagcgcggtcgggtacgtagttaaaggtgtcgtcggtcggggaaagttattttttaaaggggtttttaggttcgttgtttcgcggtgcgggaatagcggttaagggagggagcgagcgagcgtgcgcgttaacgcgtttcgattttcgtatcgcggtatcgcgggagaggcgtttcgggtcgtcgagttttcgtatttttttagcgagcgtacgacgcgcgtatacgggggcgtacgttttcgtatatttatacgcgttgtatatttacggcgtttgcggttttatttttgtgttagggaatcgtaagttttttttattacgggggttttntagagtgaatntgtaggta

SEQ ID NO: 7282 - DNA, 601 bp, Artificial Sequence
  chemically treated genomic DNA (Homo sapiens) CpG-island No: 7282
  unsure (9, 20)
tacctacanattcactctanaaaacccccgtaataaaaaaaacttacgattccctaacacaaaaataaaaccgcaaacgccgtaaatatacaacgcgtataaatatacgaaaacgtacgcccccgtatacgcgcgtcgtacgctcgctaaaaaaatacgaaaactcgacgacccgaaacgcctctcccgcgataccgcgatacgaaaatcgaaacgcgttaacgcgcacgctcgctcgctccctcccttaaccgctattcccgcaccgcgaaacaacgaacctaaaaacccctttaaaaaataactttccccgaccgacgacacctttaactacgtacccgaccgcgctcaaaatacgactacccgaatcaaataacacctcaaaacgacgccccgacgatctaatctcgccgaccctcctcgtcctaattacaacccgcgtaccgaaaccgcccgcgccctccgaatatctaccgatacaataaaaataaactaaccgactataaccgtatatacgcgtataaattaaaacccgatccgaaccaaaaacttaaacgacaaatatcgaacattaccaccctcgccccacctatcgcgaata

SEQ ID NO: 7283 - DNA, 601 bp, Artificial Sequence
  chemically treated genomic DNA (Homo sapiens) CpG-island No: 7283
  unsure (9, 20)
tgtttgtangtttattttangagattttcgtggtgaggggagtttgcggttttttggtataggagtggggtcgtagacgtcgtgagtgtgtagcgcgtgtgagtgtgcgggggcgtgcgttttcgtgtgcgcgcgtcgtgcgttcgttggggaggtgcggggattcggcgattcggagcgtttttttcgcggtgtcgcggtgcggaagtcggggcgcgttggcgcgtacgttcgttcgtttttttttttggtcgttgttttcgtatcgcggggtagcgggtttggaggtttttttgagaagtagtttttttcggtcggcggtatttttggttgcgtgttcggtcgcgtttagggtgcgattgttcgggttagatagtattttagggcgacgtttcggcggtttgatttcgtcgatttttttcgttttggttgtaattcgcgtgtcgaggtcgttcgcgtttttcgagtgtttgtcggtgtagtgggggtggattggtcggttgtggtcgtgtgtgcgcgtgtggattggggttcggttcgagttagaagtttaagcggtagatgtcgggtattgttattttcgttttatttgtcgcgggtg

SEQ ID NO: 7284 - DNA, 601 bp, Artificial Sequence
  chemically treated genomic DNA (Homo sapiens) CpG-island No: 7284
  unsure (582, 593)
cacccgcgacaaataaaacgaaaataacaatacccgacatctaccgcttaaacttctaactcgaaccgaaccccaatccacacgcgcacacacgaccacaaccgaccaatccacccccactacaccgacaaacactcgaaaaacgcgaacgacctcgacacgcgaattacaaccaaaacgaaaaaaatcgacgaaatcaaaccgccgaaacgtcgccctaaaatactatctaacccgaacaatcgcaccctaaacgcgaccgaacacgcaaccaaaaataccgccgaccgaaaaaaactacttctcaaaaaaacctccaaacccgctaccccgcgatacgaaaacaacgaccaaaaaaaaaaacgaacgaacgtacgcgccaacgcgccccgacttccgcaccgcgacaccgcgaaaaaaacgctccgaatcgccgaatccccgcacctccccaacgaacgcacgacgcgcgcacacgaaaacgcacgcccccgcacactcacacgcgctacacactcacgacgtctacgaccccactcctataccaaaaaaccgcaaactcccctcaccacgaaaatctcntaaaataaacntacaaaca

SEQ ID NO: 7285 - DNA, 579 bp, Artificial Sequence
  chemically treated genomic DNA (Homo sapiens) CpG-island No: 7285
acgtgatcgatttcgaaacgtttaatgttttgttatttaacgggtttgttagtttgttatattatcgtgaagtcgttttgtaaggaattgttatgaacgaagtcgttagtttaggtgcgtttagtattttgtttatcgatgttcgtatttataacggttggcgggagatattcgttagcgatgagacgttacgggagatttatgttttgatgaaatgggggtcgatattagttaattgtttttcggtacggatcgtgtttattcgtacggtagaaggaaaagaacgtttgcgttcggtattttttagcggtaatttgtaaaaaattttgatcgcgttcgttatcgttatcgtcgtttgggatagtgaattttatgaacggttattattattgtttttttacggtgatgttcgtagttggtttatttttagtttataatttgtcgaagaaatagcgtttcgtaatagttttatgtaggcgggttatttgatcgtcgtttgtcgggcgttgggatattatacgaattttagttcggtattcggaaaagaagtaggtaagtttaggagagagaagataaatt

SEQ ID NO: 7286 - DNA, 579 bp, Artificial Sequence
  chemically treated genomic DNA (Homo sapiens) CpG-island No: 7286
aatttatcttctctctcctaaacttacctacttcttttccgaataccgaactaaaattcgtataatatcccaacgcccgacaaacgacgatcaaataacccgcctacataaaactattacgaaacgctatttcttcgacaaattataaactaaaaataaaccaactacgaacatcaccgtaaaaaaacaataataataaccgttcataaaattcactatcccaaacgacgataacgataacgaacgcgatcaaaattttttacaaattaccgctaaaaaataccgaacgcaaacgttcttttccttctaccgtacgaataaacacgatccgtaccgaaaaacaattaactaatatcgacccccatttcatcaaaacataaatctcccgtaacgtctcatcgctaacgaatatctcccgccaaccgttataaatacgaacatcgataaacaaaatactaaacgcacctaaactaacgacttcgttcataacaattccttacaaaacgacttcacgataatataacaaactaacaaacccgttaaataacaaaacattaaacgtttcgaaatcgatcacgt

SEQ ID NO: 7287 - DNA, 579 bp, Artificial Sequence
  chemically treated genomic DNA (Homo sapiens) CpG-island No: 7287
agtttatttttttttttttaaatttgtttgtttttttttcgggtatcgagttagagttcgtataatgttttagcgttcggtaggcgacgattagatagttcgtttgtatggaattgttgcgaaacgttgttttttcggtaagttgtgggttggaggtaaattaattgcgggtattatcgtggggaaatagtagtggtaatcgtttataaaatttattgttttaggcgacgatagcggtgacgggcgcggttagggttttttgtagattgtcgttggaaagtgtcgggcgtagacgtttttttttttttgtcgtgcgggtaaatacgattcgtgtcggagaatagttagttgatgtcggtttttattttattagggtataaatttttcgtaacgttttatcgttgacgggtgtttttcgttagtcgttgtgagtgcgggtatcggtgaatagggtgttaagcgtatttgggttaacggtttcgtttatagtaattttttatagggcggttttacggtgatgtaataggttggtaagttcgttgagtaatagagtattaaacgtttcgggatcggttacgt

SEQ ID NO: 7288 - DNA, 579 bp, Artificial Sequence
  chemically treated genomic DNA (Homo sapiens) CpG-island No: 7288
acgtaaccgatcccgaaacgtttaatactctattactcaacgaacttaccaacctattacatcaccgtaaaaccgccctataaaaaattactataaacgaaaccgttaacccaaatacgcttaacaccctattcaccgatacccgcactcacaacgactaacgaaaaacacccgtcaacgataaaacgttacgaaaaatttataccctaataaaataaaaaccgacatcaactaactattctccgacacgaatcgtatttacccgcacgacaaaaaaaaaaaaacgtctacgcccgacactttccaacgacaatctacaaaaaaccctaaccgcgcccgtcaccgctatcgtcgcctaaaacaataaattttataaacgattaccactactatttccccacgataatacccgcaattaatttacctccaacccacaacttaccgaaaaaacaacgtttcgcaacaattccatacaaacgaactatctaatcgtcgcctaccgaacgctaaaacattatacgaactctaactcgatacccgaaaaaaaaacaaacaaatttaaaaaaaaaaaaataaact

SEQ ID NO: 7289 - DNA, 889 bp, Artificial Sequence
  chemically treated genomic DNA (Homo sapiens) CpG-island No: 7289
aggatttttagaagaagacgtcgtcgttgaagatttgttggtagaagtgagttagtcgaagcgcgattttagcgaagaagagattatcgttcgtatgatgatttcgatggttaacgaagtggtgcgttgtttggaggaaggtattatcgttatttcggcggaagcggatatggcgttggtttacggtttgggttttttttcgttttacggcggcgcgtttcgttggttggatattttcggtagcgtaaaatatttcgatatggtatagtaatattagtatttcggttcgttgtatgaagtgtcggaaggtttgcgtaataaagcgcgttataacgaatcgtattatttttcggttgagttagttcgttcggttggcgatttgaaaacggtttaaggagttataatggaataggttgttattgtcgatgtaattcgtatttcgatgggtcgttcgaagggcggtgtttttcgtaacgtgcgtgtagaagattttttcgtttatttaatgcgtagtttgttggcgcgtaattcggcgttggaagcggcggttttcgacgatatttattggggttgtgtgtagtaaacgttggagtagggttttaatattcgtcgtaacgcggtcgcggggggattagattaatcgtgttggattttagattaattttagttcggtatttcgtgtcggtgggtttgcgttgttgttcgaaaattttaaaggttatttaatgtcggtgttgtgtaatttgttcggtacgttaaagcgcgtggcgatgggtatggggtaggaagatgtttcggcgttgcgtgaagttggtaaattattggcgtttttgaaagagtcggagtcgttaaaaggttttcgcgatttgtttgataaattgtcgtagtt

SEQ ID NO: 7290 - DNA, 889 bp, Artificial Sequence
  chemically treated genomic DNA (Homo sapiens) CpG-island No: 7290
aactacgacaatttatcaaacaaatcgcgaaaaccttttaacgactccgactctttcaaaaacgccaataatttaccaacttcacgcaacgccgaaacatcttcctaccccatacccatcgccacgcgctttaacgtaccgaacaaattacacaacaccgacattaaataacctttaaaattttcgaacaacaacgcaaacccaccgacacgaaataccgaactaaaattaatctaaaatccaacacgattaatctaatccccccgcgaccgcgttacgacgaatattaaaaccctactccaacgtttactacacacaaccccaataaatatcgtcgaaaaccgccgcttccaacgccgaattacgcgccaacaaactacgcattaaataaacgaaaaaatcttctacacgcacgttacgaaaaacaccgcccttcgaacgacccatcgaaatacgaattacatcgacaataacaacctattccattataactccttaaaccgttttcaaatcgccaaccgaacgaactaactcaaccgaaaaataatacgattcgttataacgcgctttattacgcaaaccttccgacacttcatacaacgaaccgaaatactaatattactataccatatcgaaatattttacgctaccgaaaatatccaaccaacgaaacgcgccgccgtaaaacgaaaaaaaacccaaaccgtaaaccaacgccatatccgcttccgccgaaataacgataataccttcctccaaacaacgcaccacttcgttaaccatcgaaatcatcatacgaacgataatctcttcttcgctaaaatcgcgcttcgactaactcacttctaccaacaaatcttcaacgacgacgtcttcttctaaaaatcct

SEQ ID NO: 7291 - DNA, 889 bp, Artificial Sequence
  chemically treated genomic DNA (Homo sapiens) CpG-island No: 7291
aattgcggtagtttattaaataggtcgcggaaattttttggcggtttcggtttttttagaaacgttaataatttattaattttacgtagcgtcgaaatatttttttgttttatgtttatcgttacgcgttttggcgtatcgaataggttgtatagtatcggtattgagtagtttttagggttttcgaataatagcgtaggtttatcggtacggggtatcgagttagggttagtttagggtttagtacggttagtttaattttttcgcggtcgcgttacggcgaatattaaaattttgttttagcgtttgttgtatataattttagtaaatatcgtcgagggtcgtcgtttttagcgtcgggttacgcgttagtaggttacgtattaaatgagcggagagattttttgtacgtacgttacgaaaagtatcgtttttcgaacggtttatcggggtgcgaattgtatcgataatgataatttgttttattgtgattttttaagtcgtttttaggtcgttaatcggacgggttggtttaatcggaggatagtacggttcgttatgacgcgttttattacgtagatttttcggtattttatatagcgggtcgaggtgttgatattgttgtgttatatcgaggtattttgcgttatcgagggtgtttagttagcggaacgcgtcgtcgtggaacggagggaagtttaggtcgtagattagcgttatattcgttttcgtcggagtggcgataatgtttttttttagatagcgtattatttcgttgattatcgggattattatgcgggcgataatttttttttcgttgaaatcgcgtttcggttggtttatttttgttagtaggtttttaacggcggcgtttttttttggggatttt

SEQ ID NO: 7292 - DNA, 889 bp, Artificial Sequence
  chemically treated genomic DNA (Homo sapiens) CpG-island No: 7292
aaaatccccaaaaaaaaacgccgccgttaaaaacctactaacaaaaataaaccaaccgaaacgcgatttcaacgaaaaaaaaattatcgcccgcataataatcccgataatcaacgaaataatacgctatctaaaaaaaaacattatcgccactccgacgaaaacgaatataacgctaatctacgacctaaacttccctccgttccacgacgacgcgttccgctaactaaacaccctcgataacgcaaaatacctcgatataacacaacaatatcaacacctcgacccgctatataaaataccgaaaaatctacgtaataaaacgcgtcataacgaaccgtactatcctccgattaaaccaacccgtccgattaacgacctaaaaacgacttaaaaaatcacaataaaacaaattatcattatcgatacaattcgcaccccgataaaccgttcgaaaaacgatacttttcgtaacgtacgtacaaaaaatctctccgctcatttaatacgtaacctactaacgcgtaacccgacgctaaaaacgacgaccctcgacgatatttactaaaattatatacaacaaacgctaaaacaaaattttaatattcgccgtaacgcgaccgcgaaaaaattaaactaaccgtactaaaccctaaactaaccctaactcgataccccgtaccgataaacctacgctattattcgaaaaccctaaaaactactcaataccgatactatacaacctattcgatacgccaaaacgcgtaacgataaacataaaacaaaaaaatatttcgacgctacgtaaaattaataaattattaacgtttctaaaaaaaccgaaaccgccaaaaaatttccgcgacctatttaataaactaccgcaatt

SEQ ID NO: 7293 - DNA, 563 bp, Artificial Sequence
  chemically treated genomic DNA (Homo sapiens) CpG-island No: 7293
ggttgttgtagggtggttttttgcgtattatagtgtcggtttttcggtattattaagtgggtaatggtatttggattacgttcgttagcgagtatatttagcgtcggttttttagcgcgatatttgtagtggtataggggtagcgcgggttaagtaggtagtcgttcgggcggtttatttgtcgggaacgatatttggtaacgacgttagacgttttttgttttagtaaattttggtagcgtacgtagtaatgtttgagtatacgggtgacgcgcgtatggaagatggcgtgcgtattatcggtttttattatttggtttgttatattacgatgattttatgtgtcgttttcgttattagcgttaggttatggtaattaatattagcgttatgttttttttttgttgtagttttagtagtgttcgatgatttgcgtttgaatggttacgtttagcgcggtggtcggttttcggtaattagtagttttggtcgataggtaatcgttatggcgattattagcgttggttgggattttttagagttattatagtatgatagttgat

SEQ ID NO: 7294 - DNA, 563 bp, Artificial Sequence
  chemically treated genomic DNA (Homo sapiens) CpG-island No: 7294
atcaactatcatactataataactctaaaaaatcccaaccaacgctaataatcgccataacgattacctatcgaccaaaactactaattaccgaaaaccgaccaccgcgctaaacgtaaccattcaaacgcaaatcatcgaacactactaaaactacaacaaaaaaaaaacataacgctaatattaattaccataacctaacgctaataacgaaaacgacacataaaatcatcgtaatataacaaaccaaataataaaaaccgataatacgcacgccatcttccatacgcgcgtcacccgtatactcaaacattactacgtacgctaccaaaatttactaaaacaaaaaacgtctaacgtcgttaccaaatatcgttcccgacaaataaaccgcccgaacgactacctacttaacccgcgctacccctataccactacaaatatcgcgctaaaaaaccgacgctaaatatactcgctaacgaacgtaatccaaataccattacccacttaataataccgaaaaaccgacactataatacgcaaaaaaccaccctacaacaacc

SEQ ID NO: 7295 - DNA, 563 bp, Artificial Sequence
  chemically treated genomic DNA (Homo sapiens) CpG-island No: 7295
gttagttgttatgttgtggtgattttagaggattttagttagcgttgatgatcgttatggcgattgtttgtcggttaaaattgttgattgtcgagaatcgattatcgcgttggacgtgattatttaggcgtaaattatcgaatattgttggagttatagtagaaagagaatatggcgttggtgttaattattatgatttggcgttggtggcggaagcggtatataaaattatcgtgatgtagtaggttaggtggtggaaatcggtgatgcgtacgttattttttatgcgcgcgttattcgtatatttaggtattgttgcgtgcgttgttagaatttgttaggataaagaacgtttggcgtcgttgttaggtgtcgttttcggtaagtagatcgttcgaacggttgtttgtttaattcgcgttgtttttatgttattgtagatgtcgcgttgaagaatcggcgttgaatatgttcgttgacgggcgtagtttaaatgttattatttatttgatgatgtcgggaggtcgatattatggtacgtaagaggttattttgtaataatt

SEQ ID NO: 7296 - DNA, 563 bp, Artificial Sequence
  chemically treated genomic DNA (Homo sapiens) CpG-island No: 7296
aattattacaaaataacctcttacgtaccataatatcgacctcccgacatcatcaaataaataataacatttaaactacgcccgtcaacgaacatattcaacgccgattcttcaacgcgacatctacaataacataaaaacaacgcgaattaaacaaacaaccgttcgaacgatctacttaccgaaaacgacacctaacaacgacgccaaacgttctttatcctaacaaattctaacaacgcacgcaacaatacctaaatatacgaataacgcgcgcataaaaaataacgtacgcatcaccgatttccaccacctaacctactacatcacgataattttatataccgcttccgccaccaacgccaaatcataataattaacaccaacgccatattctctttctactataactccaacaatattcgataatttacgcctaaataatcacgtccaacgcgataatcgattctcgacaatcaacaattttaaccgacaaacaatcgccataacgatcatcaacgctaactaaaatcctctaaaatcaccacaacataacaactaac

SEQ ID NO: 7297 - DNA, 706 bp, Artificial Sequence
  chemically treated genomic DNA (Homo sapiens) CpG-island No: 7297
  unsure (178, 212, 238, 277, 327, 362..363, 415..416, 433)
gtaatcgggtaaagcgtcgttgtatatgttatttaagcgtaggaagtgtatgacgttatcggtgcgggcgatacggtgatggcgttttggcggtaacgttggtagcgggtaattcgttggaagaagttttttttttgttaatgcggcggttgtgcgtggtggtcggtaaattgggaanttttacggtttcgtcgatcgagttggaaaatgtntgtacgtggacgtgcgatataggttnttggcgtgatgatcgaagaggaattgaaagttggtcgtngcggtagttgcgtaatacgtggtgaaaaagtggtgatgattaacggtgtntttggatatttttgtacgtcgggtacgttttttanntttggtaaatgtttcgtaagttgggtgatcgtttgattgttgttcgtttaanntagcgattttttattanaacggttgaaaggggattttcgttcggtaaatttattcgatagcgtatgattgtgttgggcgtattggaagcggtcgattgggtagtgcgtttgaagaggatacgtcgtagcgtttgatcgtcgggattttgttagattgttggtgaaaggcggcgattataaattagaagagattgtcgggagtaagaagtttgggttaacggtggcgaagtgttggtgtttaattttgaagacgttgttcgacgattaatattattaagaagatttaatag

SEQ ID NO: 7298 - DNA, 706 bp, Artificial Sequence
  chemically treated genomic DNA (Homo sapiens) CpG-island No: 7298
  unsure (274, 291..292, 344..345, 380, 430, 469, 495, 529)
ctattaaatcttcttaataatattaatcgtcgaacaacgtcttcaaaattaaacaccaacacttcgccaccgttaacccaaacttcttactcccgacaatctcttctaatttataatcgccgcctttcaccaacaatctaacaaaatcccgacgatcaaacgctacgacgtatcctcttcaaacgcactacccaatcgaccgcttccaatacgcccaacacaatcatacgctatcgaataaatttaccgaacgaaaatcccctttcaaccgttntaataaaaaatcgctannttaaacgaacaacaatcaaacgatcacccaacttacgaaacatttaccaaanntaaaaaacgtacccgacgtacaaaaatatccaaanacaccgttaatcatcaccactttttcaccacgtattacgcaactaccgcnacgaccaactttcaattcctcttcgatcatcacgccaanaacctatatcgcacgtccacgtacanacattttccaactcgatcgacgaaaccgtaaaanttcccaatttaccgaccaccacgcacaaccgccgcattaacaaaaaaaaaacttcttccaacgaattacccgctaccaacgttaccgccaaaacgccatcaccgtatcgcccgcaccgataacgtcatacacttcctacgcttaaataacatatacaacgacgctttacccgattac

SEQ ID NO: 7299 - DNA, 706 bp, Artificial Sequence
  chemically treated genomic DNA (Homo sapiens) CpG-island No: 7299
  unsure (274, 291..292, 344..345, 380, 430, 469, 495, 529)
ttgttggatttttttgatgatgttggtcgtcgagtaacgtttttaaagttgagtattaatatttcgttatcgttggtttagattttttattttcggtaattttttttggtttatagtcgtcgttttttattagtagtttggtaagatttcggcgattaagcgttgcggcgtgttttttttaaacgtattatttagtcgatcgtttttagtgcgtttagtataattatacgttgtcgagtgggtttatcgggcgggaatttttttttagtcgttntggtggaggatcgttgnnttgaacgggtaataattaagcggttatttagtttgcggggtatttgttaganntaagagacgtgttcggcgtgtaggaatgtttaaangtatcgttggttattattatttttttattacgtattacgtagttgtcgtnacggttagtttttagttttttttcggttattacgttaanagtttgtatcgtacgtttacgtatangtattttttagttcgatcggcgaaatcgtggagntttttagtttgtcgattattacgtatagtcgtcgtattggtaaagaagaggttttttttagcgaattattcgttgttagcgttgtcgttaggacgttattatcgtgtcgttcgtatcggtaacgttatatattttttgcgtttgggtggtatatgtagcggcgttttattcggttgt

SEQ ID NO: 7300 - DNA, 706 bp, Artificial Sequence
  chemically treated genomic DNA (Homo sapiens) CpG-island No: 7300
  unsure (178, 212, 238, 277, 327, 362..363, 415..416, 433)
acaaccgaataaaacgccgctacatataccacccaaacgcaaaaaatatataacgttaccgatacgaacgacacgataataacgtcctaacgacaacgctaacaacgaataattcgctaaaaaaaacctcttctttaccaatacgacgactatacgtaataatcgacaaactaaaaanctccacgatttcgccgatcgaactaaaaaatacntatacgtaaacgtacgatacaaactnttaacgtaataaccgaaaaaaaactaaaaactaaccgtnacgacaactacgtaatacgtaataaaaaaataataataaccaacgatacntttaaacattcctacacgccgaacacgtctcttanntctaacaaataccccgcaaactaaataaccgcttaattattacccgttcaanncaacgatcctccaccanaacgactaaaaaaaaattcccgcccgataaacccactcgacaacgtataattatactaaacgcactaaaaacgatcgactaaataatacgtttaaaaaaaacacgccgcaacgcttaatcgccgaaatcttaccaaactactaataaaaaacgacgactataaaccaaaaaaaattaccgaaaataaaaaatctaaaccaacgataacgaaatattaatactcaactttaaaaacgttactcgacgaccaacatcatcaaaaaaatccaacaa

SEQ ID NO: 7301 - DNA, 832 bp, Artificial Sequence
  chemically treated genomic DNA (Homo sapiens) CpG-island No: 7301
tcggttggcgcgtattcgtcgggcgatatgggcgaagattttaaggtatttcgaataatttgatgttatatatcgtttaggttgttgtagtcgtcgcgattcgttggcgatttttggtaacgattattcgatcgaagatgtattggcgtacgcgattatatttacgtaatggatttggcggacggttagtcgtggcgatggaaaaattggcgaataagttaggcgtatatatttatatttcggcgttggcgtaggtaatagcgtgttggacgtggttaatgttttcgtaaagtttgcggtaaatcggttaattattattttgtatcgcgtcgcgaggcgatttttcggtttattgggcggacgttagtaaagtcgatcgtgaacgaattggcgcgtaacgcgtatattcgatgaaatggcgtaggatatttggattggtagttacgttatttatagggatatttcgattaaggaacgattatacgtaatttaatttcgttgattatttatatcggcgttataattcgtttaggggtatggattttggtttatcggtacgcgttaagcgttcggttagggggtaggaaacgtagtaaatagtgtttttgggtcgattatatggttttttggtcggtaagggggggaaagggaaaaaatcgtataatcggatatatattatagatggagacgcgacggtaggttagttgtatgttgttaggtgattttagaggattttcgttaaagttaacgatacgggttattttattagtgtagacgcggtttattcgatttttgtagtgattttttcgatacgacgaatagtatgtttcgt

SEQ ID NO: 7302 - DNA, 832 bp, Artificial Sequence
  chemically treated genomic DNA (Homo sapiens) CpG-island No: 7302
acgaaacatactattcgtcgtatcgaaaaaatcactacaaaaatcgaataaaccgcgtctacactaataaaataacccgtatcgttaactttaacgaaaatcctctaaaatcacctaacaacatacaactaacctaccgtcgcgtctccatctataatatatatccgattatacgattttttccctttcccccccttaccgaccaaaaaaccatataatcgacccaaaaacactatttactacgtttcctaccccctaaccgaacgcttaacgcgtaccgataaaccaaaatccatacccctaaacgaattataacgccgatataaataatcaacgaaattaaattacgtataatcgttccttaatcgaaatatccctataaataacgtaactaccaatccaaatatcctacgccatttcatcgaatatacgcgttacgcgccaattcgttcacgatcgactttactaacgtccgcccaataaaccgaaaaatcgcctcgcgacgcgatacaaaataataattaaccgatttaccgcaaactttacgaaaacattaaccacgtccaacacgctattacctacgccaacgccgaaatataaatatatacgcctaacttattcgccaatttttccatcgccacgactaaccgtccgccaaatccattacgtaaatataatcgcgtacgccaatacatcttcgatcgaataatcgttaccaaaaatcgccaacgaatcgcgacgactacaacaacctaaacgatatataacatcaaattattcgaaataccttaaaatcttcgcccatatcgcccgacgaatacgcgccaaccga

SEQ ID NO: 7303 - DNA, 832 bp, Artificial Sequence
  chemically treated genomic DNA (Homo sapiens) CpG-island No: 7303
gcgaaatatgttattcgtcgtatcgaagagattattgtagaaatcgagtgggtcgcgtttatattggtaaagtgattcgtatcgttgattttggcggggattttttagagttatttagtagtatgtagttgatttgtcgtcgcgtttttatttgtggtatgtgttcggttatgcggtttttttttttttttttttttatcggttaggggattatgtgatcggtttagaaatattgtttgttgcgttttttgttttttgatcgggcgtttagcgcgtgtcggtaaattagaatttatgtttttgagcgggttgtagcgtcgatgtggatgattaacgggattaaattgcgtatggtcgttttttaatcgggatatttttgtggatggcgtgattgttagtttaggtgttttgcgttattttatcgagtgtgcgcgttacgcgttagttcgtttacggtcggttttgttggcgttcgtttagtaggtcggaaggtcgtttcgcgacgcggtgtaaaatgataattaatcggtttgtcgtaggttttgcgaaggtattaattacgtttagtacgttgttgtttacgttagcgtcgaggtgtagatgtgtacgtttggtttgttcgttagtttttttatcgttacgattgatcgttcgttagatttattacgtggatgtaatcgcgtacgttagtatattttcggtcggataatcgttattaaaaatcgttagcgagtcgcgacggttatagtaatttgggcgatgtatggtattaggttattcggaatgttttgggattttcgtttatatcgttcgacggatgcgcgttaatcgg

SEQ ID NO: 7304 - DNA, 832 bp, Artificial Sequence
  chemically treated genomic DNA (Homo sapiens) CpG-island No: 7304
ccgattaacgcgcatccgtcgaacgatataaacgaaaatcccaaaacattccgaataacctaataccatacatcgcccaaattactataaccgtcgcgactcgctaacgatttttaataacgattatccgaccgaaaatatactaacgtacgcgattacatccacgtaataaatctaacgaacgatcaatcgtaacgataaaaaaactaacgaacaaaccaaacgtacacatctacacctcgacgctaacgtaaacaacaacgtactaaacgtaattaataccttcgcaaaacctacgacaaaccgattaattatcattttacaccgcgtcgcgaaacgaccttccgacctactaaacgaacgccaacaaaaccgaccgtaaacgaactaacgcgtaacgcgcacactcgataaaataacgcaaaacacctaaactaacaatcacgccatccacaaaaatatcccgattaaaaaacgaccatacgcaatttaatcccgttaatcatccacatcgacgctacaacccgctcaaaaacataaattctaatttaccgacacgcgctaaacgcccgatcaaaaaacaaaaaacgcaacaaacaatatttctaaaccgatcacataatcccctaaccgataaaaaaaaaaaaaaaaaaaaaccgcataaccgaacacataccacaaataaaaacgcgacgacaaatcaactacatactactaaataactctaaaaaatccccgccaaaatcaacgatacgaatcactttaccaatataaacgcgacccactcgatttctacaataatctcttcgatacgacgaataacatatttcgc

SEQ ID NO: 7305 - DNA, 712 bp, Artificial Sequence
  chemically treated genomic DNA (Homo sapiens) CpG-island No: 7305
cgtcggttttgaggagtttcggttttcgcgtttttcgtttttatcgtcgtgagaatagcgcgtggtacgagtttagtagttagtttcgttttcgttcgggttttcgcggtcggaatcgaggaaggtcgaatcggaacgaagtcgtttttttagtaagttcgacggacgtagagtagatttattcggggtttatttcggttagtttttgcggttttcggtttttttcgattagttatcgtaatattcgggtagcggcggcgttttgttcggtttagttttagttagtttaaatttcgttttaggttcggttttttttttttttttcggttgtagcgtaattgagacgttaatatttttcgttttagattagtttacgggtcgaaggaatgtagattatagttgagggagaatttttgtttttaaagcgttttcgtatttagttacggaggtttagtttgggtagtcgtttggggtgcggcggtcgacggcgggggcggttgcggcgattgcggggcgcgcgttgtttcgagtgagtacgcgcgggagcgtcgtcgggtagcgtacggagtttaggtagttcgagcggtttttggtggacgcgcgcggagtagtaattcgatttcggcgagtaagcgcgtattaagaataatgtttttttttgtgatatggttttagtattttttattttttagggtattaggaaatttttttt

SEQ ID NO: 7306 - DNA, 712 bp, Artificial Sequence
  chemically treated genomic DNA (Homo sapiens) CpG-island No: 7306
aaaaaaaatttcctaataccctaaaaaataaaaaatactaaaaccatatcacaaaaaaaaacattattcttaatacgcgcttactcgccgaaatcgaattactactccgcgcgcgtccaccaaaaaccgctcgaactacctaaactccgtacgctacccgacgacgctcccgcgcgtactcactcgaaacaacgcgcgccccgcaatcgccgcaaccgcccccgccgtcgaccgccgcaccccaaacgactacccaaactaaacctccgtaactaaatacgaaaacgctttaaaaacaaaaattctccctcaactataatctacattccttcgacccgtaaactaatctaaaacgaaaaatattaacgtctcaattacgctacaaccgaaaaaaaaaaaaaaaaccgaacctaaaacgaaatttaaactaactaaaactaaaccgaacaaaacgccgccgctacccgaatattacgataactaatcgaaaaaaaccgaaaaccgcaaaaactaaccgaaataaaccccgaataaatctactctacgtccgtcgaacttactaaaaaaacgacttcgttccgattcgaccttcctcgattccgaccgcgaaaacccgaacgaaaacgaaactaactactaaactcgtaccacgcgctattctcacgacgataaaaacgaaaaacgcgaaaaccgaaactcctcaaaaccgacg

SEQ ID NO: 7307 - DNA, 712 bp, Artificial Sequence
  chemically treated genomic DNA (Homo sapiens) CpG-island No: 7307
aggggagattttttggtattttaggaagtggaggatattaaagttatgttatagggaggggtattatttttggtgcgcgtttgttcgtcggggtcgggttgttgtttcgcgcgcgtttattaggggtcgttcgagttatttaagtttcgtgcgttattcggcggcgttttcgcgcgtgtttattcggagtagcgcgcgtttcgtaatcgtcgtagtcgttttcgtcgtcggtcgtcgtattttaagcgattgtttaaattaagttttcgtggttgggtacgggagcgttttggggataaaaatttttttttaattgtggtttgtattttttcggttcgtgggttgatttggggcgggaagtattagcgttttagttgcgttgtagtcggggaggaaggaggaggtcgagtttggggcggagtttgggttgattggggttggatcgggtaagacgtcgtcgttgttcggatgttgcgatggttgatcgggggaggtcgagaatcgtagggattggtcgaggtaaatttcgggtgggtttgttttgcgttcgtcgagtttgttggaggggcggtttcgtttcggttcggtttttttcggtttcgatcgcggggattcgggcggaggcggggttggttgttgagttcgtgttacgcgttgtttttacgacggtgggggcggagggcgcgggagtcggagttttttagagtcggcg

SEQ ID NO: 7308 - DNA, 712 bp, Artificial Sequence
  chemically treated genomic DNA (Homo sapiens) CpG-island No: 7308
cgccgactctaaaaaactccgactcccgcgccctccgcccccaccgtcgtaaaaacaacgcgtaacacgaactcaacaaccaaccccgcctccgcccgaatccccgcgatcgaaaccgaaaaaaaccgaaccgaaacgaaaccgcccctccaacaaactcgacgaacgcaaaacaaacccacccgaaatttacctcgaccaatccctacgattctcgacctcccccgatcaaccatcgcaacatccgaacaacgacgacgtcttacccgatccaaccccaatcaacccaaactccgccccaaactcgacctcctccttcctccccgactacaacgcaactaaaacgctaatacttcccgccccaaatcaacccacgaaccgaaaaaatacaaaccacaattaaaaaaaaatttttatccccaaaacgctcccgtacccaaccacgaaaacttaatttaaacaatcgcttaaaatacgacgaccgacgacgaaaacgactacgacgattacgaaacgcgcgctactccgaataaacacgcgcgaaaacgccgccgaataacgcacgaaacttaaataactcgaacgacccctaataaacgcgcgcgaaacaacaacccgaccccgacgaacaaacgcgcaccaaaaataatacccctccctataacataactttaatatcctccacttcctaaaataccaaaaaatctcccct

SEQ ID NO: 7309 - DNA, 637 bp, Artificial Sequence
  chemically treated genomic DNA (Homo sapiens) CpG-island No: 7309
gaataggcgatatattcggttggcgagttcggtttcgcgggttcggtagcgtagcggatattgggaaagaggttataggtttcgtttatttgaagttatcgtttattttaggtttttagcgggtttcggattttattaatttcggtttcgttcgtttttggttcgcgttttttaaattttttcgaggttttagttttcgtttattcggttcgtttattttagtttttgtttattcgggttcgtttattttaggtcggtagttagttttaggtttttcgttttgcgtttcgtcgtcgtggtggcgtttgggaatcgaaggtaggtgtttttcgttttgtcgtttcgtttttttatttcgggttgtggtttaggtttagtgcgatttagggaacgaagcggtatttgtaacggcgttatcgttgttataggtttcgtagtagacggttaggtatggttgtttcgcggggtcgtgattaggacggcgcggggaaggcggatcgaggtttcgggttcgtttcggttcgggaggagagggggtcgcgttcggtcgtttttttttggtttcgtttttagtgtttttggtatcgtttgatttttgttgttttggggtttcgtttttttttttttttgattttat

SEQ ID NO: 7310 - DNA, 637 bp, Artificial Sequence
  chemically treated genomic DNA (Homo sapiens) CpG-island No: 7310
ataaaatcaaaaaaaaaaaaaaacgaaaccccaaaacaacaaaaatcaaacgataccaaaaacactaaaaacgaaaccaaaaaaaaacgaccgaacgcgaccccctctcctcccgaaccgaaacgaacccgaaacctcgatccgccttccccgcgccgtcctaatcacgaccccgcgaaacaaccatacctaaccgtctactacgaaacctataacaacgataacgccgttacaaataccgcttcgttccctaaatcgcactaaacctaaaccacaacccgaaataaaaaaacgaaacgacaaaacgaaaaacacctaccttcgattcccaaacgccaccacgacgacgaaacgcaaaacgaaaaacctaaaactaactaccgacctaaaataaacgaacccgaataaacaaaaactaaaataaacgaaccgaataaacgaaaactaaaacctcgaaaaaatttaaaaaacgcgaaccaaaaacgaacgaaaccgaaattaataaaatccgaaacccgctaaaaacctaaaataaacgataacttcaaataaacgaaacctataacctctttcccaatatccgctacgctaccgaacccgcgaaaccgaactcgccaaccgaatatatcgcctattc

SEQ ID NO: 7311 - DNA, 637 bp, Artificial Sequence
  chemically treated genomic DNA (Homo sapiens) CpG-island No: 7311
gtgaggttaggaaaggggaaggacgaagttttagagtaatagaagttaggcggtgttaggaatattgagagcggagttaggggaaggcggtcgagcgcggtttttttttttttcgggtcggggcgggttcgaggtttcgattcgtttttttcgcgtcgttttggttacggtttcgcggggtagttatgtttggtcgtttgttgcggggtttgtggtagcgatggcgtcgttataagtatcgtttcgttttttggatcgtattgaatttaagttataattcgaggtgagagggcgggacggtagaacgaggggtatttgttttcggtttttagacgttattacggcggcgggacgtaaagcggagagtttgaggttgattgtcggtttgagatgggcgggttcgggtgggtagggattgaggtgggcgggtcgggtgggcggggattgaggtttcggaggggtttaaggaacgcgggttagaggcgggcggggtcgaggttggtggagttcgaggttcgttggaagtttgaagtgggcggtggttttaggtgggcggggtttatggttttttttttagtgttcgttgcgttgtcgggttcgcgaggtcgagttcgttagtcggatgtgtcgtttgttt

SEQ ID NO: 7312 - DNA, 637 bp, Artificial Sequence
  chemically treated genomic DNA (Homo sapiens) CpG-island No: 7312
aaacaaacgacacatccgactaacgaactcgacctcgcgaacccgacaacgcaacgaacactaaaaaaaaaaccataaaccccgcccacctaaaaccaccgcccacttcaaacttccaacgaacctcgaactccaccaacctcgaccccgcccgcctctaacccgcgttccttaaacccctccgaaacctcaatccccgcccacccgacccgcccacctcaatccctacccacccgaacccgcccatctcaaaccgacaatcaacctcaaactctccgctttacgtcccgccgccgtaataacgtctaaaaaccgaaaacaaatacccctcgttctaccgtcccgccctctcacctcgaattataacttaaattcaatacgatccaaaaaacgaaacgatacttataacgacgccatcgctaccacaaaccccgcaacaaacgaccaaacataactaccccgcgaaaccgtaaccaaaacgacgcgaaaaaaacgaatcgaaacctcgaacccgccccgacccgaaaaaaaaaaaaaccgcgctcgaccgccttcccctaactccgctctcaatattcctaacaccgcctaacttctattactctaaaacttcgtccttcccctttcctaacctcac

SEQ ID NO: 7313 - DNA, 1693 bp, Artificial Sequence
  chemically treated genomic DNA (Homo sapiens) CpG-island No: 7313
ttttcgcgagtttcgcggtgtcgggtcgagattgtcgagaggaagcggcgtagcgttgtcgttaaggttttttttgtcgtcggtgcggtcgggattatttggcggcgcggcgcgtgtagcgcgtagagtttcgggagtttacgttttcgttttcgttttcgtttttttcgttttttagtttatttcgttcgttcgttttttcgttcggcggagagtatagtttatttttttttatttgcggtcgtcgggtcgttttttatttatatttttgtcgtaggtcggatttagtgcgttcgttcgtcggttagtttaggttaggcgttcggcgggtcgcgtttacgtagttggcgtaggaggttttacgttggcggcgtagtgttcgttttttgcgtttttttcgttttttttttttttcgtaggggtcgagcgaatgtagttcgcgagagaaaatggcggcggcggcggggaatcgcgtttcgtcgtcgggattttcgggcgttagggttacgagttttgagtagcgcggcggagagtttttaaggcgagtagcgcgttcgcggttgtcgcgggattgttgcgggaggcgggtagcggggtgtttgcgagcgggcggattggcggcggcggtagttgcgtaaagtgcggagtgtggagttggattagttgtttgagtagtcgtttttttttgtcgttttatcgtcggttttttcgattttttcgtcgtcggagttcgcggacgtagcggggagtgggatcggtttttagtttgtggcggtgtcgtcgttttacggagtcgcgagtcgcggcggcgtttattttatcgagtcggtggcggcgtcggatagcggcgtttcgagtttcgtagcggtcgagttcggggagaagcgggcgttcgtcgtcgagtcgttttttgtagcggttttcgtcgggtgagtagtacggtcggggtcgcggcggggatttggagagcgggtagagggtaatgaatgaatttcgggtattatgtacggcgtttcggggtttagcgtagcgaggttacgcgtcgttcgtcgggatttacgtttttgagtatttttcgattttttcggagtcgggcggcgtttcggatttagtttgggggatcggacggggacgtgcggaagagtttgttattgtttgtagatatgtgataggcgtgcgagtttttttgcggggaatcgttgcgaaaaggtgtagggggttacggttggttttgtgggatttttggaatcggggtttttcgaggagttcgggggcggggtacggttttgcggcggcgttttcggacgggtgttttcggggtaaaggtattggggggcgaggttcgagtttgaggcgggcggtggtcggaagaggggcggggtgggtgagaagttcgaggtcgggtgggagattgagaggatcgaagagaaagtagtaggttttagcggtcgtgataggtagagtttttcggttcgttcgggattcgagtttttaggtagatatcgcgggttgggttcggacgtaggcggcgcgtttttagcgtcggtcgtagggttttaggaggacggttcggtaacgtttgttaaagtcgtgcggcgggaggttgtatattcgcggaggtttgtagttttttaggaagtgcggtttgtttaattgtagtttttaaggggttttgagtgtttttgggaatgcg

SEQ ID NO: 7314 - DNA, 1693 bp, Artificial Sequence
  chemically treated genomic DNA (Homo sapiens) CpG-island No: 7314
cgcattcccaaaaacactcaaaaccccttaaaaactacaattaaacaaaccgcacttcctaaaaaactacaaacctccgcgaatatacaacctcccgccgcacgactttaacaaacgttaccgaaccgtcctcctaaaaccctacgaccgacgctaaaaacgcgccgcctacgtccgaacccaacccgcgatatctacctaaaaactcgaatcccgaacgaaccgaaaaactctacctatcacgaccgctaaaacctactactttctcttcgatcctctcaatctcccacccgacctcgaacttctcacccaccccgcccctcttccgaccaccgcccgcctcaaactcgaacctcgccccccaatacctttaccccgaaaacacccgtccgaaaacgccgccgcaaaaccgtaccccgcccccgaactcctcgaaaaaccccgattccaaaaatcccacaaaaccaaccgtaaccccctacaccttttcgcaacgattccccgcaaaaaaactcgcacgcctatcacatatctacaaacaataacaaactcttccgcacgtccccgtccgatcccccaaactaaatccgaaacgccgcccgactccgaaaaaatcgaaaaatactcaaaaacgtaaatcccgacgaacgacgcgtaacctcgctacgctaaaccccgaaacgccgtacataatacccgaaattcattcattaccctctacccgctctccaaatccccgccgcgaccccgaccgtactactcacccgacgaaaaccgctacaaaaaacgactcgacgacgaacgcccgcttctccccgaactcgaccgctacgaaactcgaaacgccgctatccgacgccgccaccgactcgataaaataaacgccgccgcgactcgcgactccgtaaaacgacgacaccgccacaaactaaaaaccgatcccactccccgctacgtccgcgaactccgacgacgaaaaaatcgaaaaaaccgacgataaaacgacaaaaaaaaacgactactcaaacaactaatccaactccacactccgcactttacgcaactaccgccgccgccaatccgcccgctcgcaaacaccccgctacccgcctcccgcaacaatcccgcgacaaccgcgaacgcgctactcgccttaaaaactctccgccgcgctactcaaaactcgtaaccctaacgcccgaaaatcccgacgacgaaacgcgattccccgccgccgccgccattttctctcgcgaactacattcgctcgacccctacgaaaaaaaaaaaaaacgaaaaaaacgcaaaaaacgaacactacgccgccaacgtaaaacctcctacgccaactacgtaaacgcgacccgccgaacgcctaacctaaactaaccgacgaacgaacgcactaaatccgacctacgacaaaaatataaataaaaaacgacccgacgaccgcaaataaaaaaaaataaactatactctccgccgaacgaaaaaacgaacgaacgaaataaactaaaaaacgaaaaaaacgaaaacgaaaacgaaaacgtaaactcccgaaactctacgcgctacacgcgccgcgccgccaaataatcccgaccgcaccgacgacaaaaaaaaccttaacgacaacgctacgccgcttcctctcgacaatctcgacccgacaccgcgaaactcgcgaaaa

SEQ ID NO: 7315 - DNA, 1693 bp, Artificial Sequence
  chemically treated genomic DNA (Homo sapiens) CpG-island No: 7315
cgtatttttaggaatatttaaagttttttgggggttgtaattagataaatcgtattttttaaaagattgtaagttttcgcgagtgtgtagtttttcgtcgtacggttttgataggcgttatcgagtcgtttttttggagttttgcggtcggcgttgggggcgcgtcgtttgcgttcgggtttagttcgcggtatttgtttagggattcgagtttcgggcgggtcgaggggttttgtttgttacggtcgttgggatttgttatttttttttcggtttttttagttttttattcgatttcgggttttttatttatttcgtttttttttcgattatcgttcgttttaggttcgggtttcgttttttagtgtttttgtttcggggatattcgttcgggggcgtcgtcgtagggtcgtgtttcgttttcgggtttttcggagagtttcgattttaggagttttataaagttagtcgtggttttttatattttttcgtaacggtttttcgtagagaggttcgtacgtttgttatatgtttgtaaataataataaattttttcgtacgttttcgttcggttttttaggttgggttcggggcgtcgttcgatttcgaaggggtcggggggtgtttaggggcgtaggtttcggcgagcggcgcgtagtttcgttgcgttgaatttcgggacgtcgtgtatggtgttcggggtttatttattgttttttgttcgttttttaagttttcgtcgcgatttcggtcgtgttgtttattcggcgggggtcgttgtaggagacggttcggcggcgggcgttcgttttttttcgggttcggtcgttgcgggattcgaggcgtcgttgttcggcgtcgttatcgattcggtaaggtgggcgtcgtcgcggttcgcggtttcgtggggcggcggtatcgttataggttggaagtcggttttatttttcgttgcgttcgcgggtttcggcgacggggaagtcgaggaggtcggcggtgaggcggtaaggaagagcggttgtttaggtagttggtttagttttatatttcgtattttgcgtagttgtcgtcgtcgttagttcgttcgttcgtaggtatttcgttgttcgtttttcgtagtagtttcgcggtagtcgcgggcgcgttgttcgttttgagggtttttcgtcgcgttgtttagggttcgtagttttggcgttcgggaatttcgacgacgaggcgcgatttttcgtcgtcgtcgttattttttttcgcgggttatattcgttcggtttttgcgagggagggagggggcggggagagcgtagggggcgggtattgcgtcgttagcgtaaggttttttgcgttaattgcgtgagcgcggttcgtcgggcgtttggtttggattgatcgacgggcgggcgtattgggttcggtttgcggtagaggtgtgggtggagggcggttcggcggtcgtaggtgggagggagtgggttgtgtttttcgtcgggcgagagggcgggcgggcgaggtggattgggaggcggagggggcgggggcggaggcggaggcgtgggttttcgggattttgcgcgttgtacgcgtcgcgtcgttaggtagtttcggtcgtatcggcgataggaggagttttggcggtagcgttgcgtcgttttttttcggtaatttcggttcggtatcgcggagttcgcgggag

SEQ ID NO: 7316 - DNA, 1693 bp, Artificial Sequence
  chemically treated genomic DNA (Homo sapiens) CpG-island No: 7316
ctcccgcgaactccgcgataccgaaccgaaattaccgaaaaaaaacgacgcaacgctaccgccaaaactcctcctatcgccgatacgaccgaaactacctaacgacgcgacgcgtacaacgcgcaaaatcccgaaaacccacgcctccgcctccgcccccgccccctccgcctcccaatccacctcgcccgcccgccctctcgcccgacgaaaaacacaacccactccctcccacctacgaccgccgaaccgccctccacccacacctctaccgcaaaccgaacccaatacgcccgcccgtcgatcaatccaaaccaaacgcccgacgaaccgcgctcacgcaattaacgcaaaaaaccttacgctaacgacgcaatacccgccccctacgctctccccgccccctccctccctcgcaaaaaccgaacgaatataacccgcgaaaaaaaataacgacgacgacgaaaaatcgcgcctcgtcgtcgaaattcccgaacgccaaaactacgaaccctaaacaacgcgacgaaaaaccctcaaaacgaacaacgcgcccgcgactaccgcgaaactactacgaaaaacgaacaacgaaatacctacgaacgaacgaactaacgacgacgacaactacgcaaaatacgaaatataaaactaaaccaactacctaaacaaccgctcttccttaccgcctcaccgccgacctcctcgacttccccgtcgccgaaacccgcgaacgcaacgaaaaataaaaccgacttccaacctataacgataccgccgccccacgaaaccgcgaaccgcgacgacgcccaccttaccgaatcgataacgacgccgaacaacgacgcctcgaatcccgcaacgaccgaacccgaaaaaaaacgaacgcccgccgccgaaccgtctcctacaacgacccccgccgaataaacaacacgaccgaaatcgcgacgaaaacttaaaaaacgaacaaaaaacaataaataaaccccgaacaccatacacgacgtcccgaaattcaacgcaacgaaactacgcgccgctcgccgaaacctacgcccctaaacaccccccgaccccttcgaaatcgaacgacgccccgaacccaacctaaaaaaccgaacgaaaacgtacgaaaaaatttattattatttacaaacatataacaaacgtacgaacctctctacgaaaaaccgttacgaaaaaatataaaaaaccacgactaactttataaaactcctaaaatcgaaactctccgaaaaacccgaaaacgaaacacgaccctacgacgacgcccccgaacgaatatccccgaaacaaaaacactaaaaaacgaaacccgaacctaaaacgaacgataatcgaaaaaaaaacgaaataaataaaaaacccgaaatcgaataaaaaactaaaaaaaccgaaaaaaaaataacaaatcccaacgaccgtaacaaacaaaacccctcgacccgcccgaaactcgaatccctaaacaaataccgcgaactaaacccgaacgcaaacgacgcgcccccaacgccgaccgcaaaactccaaaaaaacgactcgataacgcctatcaaaaccgtacgacgaaaaactacacactcgcgaaaacttacaatcttttaaaaaatacgatttatctaattacaacccccaaaaaactttaaatattcctaaaaatacg

SEQ ID NO: 7317 - DNA, 556 bp, Artificial Sequence
  chemically treated genomic DNA (Homo sapiens) CpG-island No: 7317
  unsure (250)
tggaggacggtacgtagttggttgtgttttcgtttttcgtcgggagatttatcgtgagttggggatttttttttatttaacgaggttgtcgaagaggtaggtttgcgttgggcgtaatattatgatttttaagttattagatggcgtagtaattgggcggttcgacggaagtgtcgttgaggttaataaaagttcgtttgtcgtttggttgaaaatttggttgcgtttaatatttgggtacgcgtagcgntgatcgaaatttattagggcgaattttttcgttgtttcgttatacgttggggattatgttattggagataacggggcgtgggtagttattcgtatttcgaatcgtcggtggtttttttttattcgcggtttgttcgttggtgaagagtatattcgcggcggggcgtagtagtgttttagggcgtttttattcggtttttattattggcgcggtttttttcgtgatattttttatttaggggatattttttttttcggtatttttttaagaatataaattcgttatttttattaataaaagtatata

SEQ ID NO: 7318 - DNA, 556 bp, Artificial Sequence
  chemically treated genomic DNA (Homo sapiens) CpG-island No: 7318
  unsure (307)
tatatacttttattaataaaaataacgaatttatattcttaaaaaaataccgaaaaaaaaaatatcccctaaataaaaaatatcacgaaaaaaaccgcgccaataataaaaaccgaataaaaacgccctaaaacactactacgccccgccgcgaatatactcttcaccaacgaacaaaccgcgaataaaaaaaaaccaccgacgattcgaaatacgaataactacccacgccccgttatctccaataacataatccccaacgtataacgaaacaacgaaaaaattcgccctaataaatttcgatcancgctacgcgtacccaaatattaaacgcaaccaaattttcaaccaaacgacaaacgaacttttattaacctcaacgacacttccgtcgaaccgcccaattactacgccatctaataacttaaaaatcataatattacgcccaacgcaaacctacctcttcgacaacctcgttaaataaaaaaaaatccccaactcacgataaatctcccgacgaaaaacgaaaacacaaccaactacgtaccgtcctcca

SEQ ID NO: 7319 - DNA, 556 bp, Artificial Sequence
  chemically treated genomic DNA (Homo sapiens) CpG-island No: 7319
  unsure (307)
tgtgtatttttgttggtaaagataacgggtttatatttttggaaagatgtcggggggaaggatgttttttaaatggggggtgttacggggagaatcgcgttagtggtgaaggtcgggtaggaacgttttggagtattattacgtttcgtcgcggatatgttttttattaacgaataggtcgcgggtggagagggattatcggcggttcggaatacgaataattatttacgtttcgttatttttaatagtataatttttagcgtatagcggaatagcggagagattcgttttgatgaatttcggttancgttacgcgtatttagatattgggcgtagttaggtttttagttagacgataggcgaatttttgttgattttaacggtattttcgtcgggtcgtttagttgttgcgttatttgatggtttaagaattatagtgttgcgtttaacgtagatttgttttttcggtagtttcgttgggtagagagagatttttagtttacggtagatttttcgacggaaagcgggagtataattaattgcgtgtcgtttttta

SEQ ID NO: 7320 - DNA, 556 bp, Artificial Sequence
  chemically treated genomic DNA (Homo sapiens) CpG-island No: 7320
  unsure (250)
taaaaaacgacacgcaattaattatactcccgctttccgtcgaaaaatctaccgtaaactaaaaatctctctctacccaacgaaactaccgaaaaaacaaatctacgttaaacgcaacactataattcttaaaccatcaaataacgcaacaactaaacgacccgacgaaaataccgttaaaatcaacaaaaattcgcctatcgtctaactaaaaacctaactacgcccaatatctaaatacgcgtaacgntaaccgaaattcatcaaaacgaatctctccgctattccgctatacgctaaaaattatactattaaaaataacgaaacgtaaataattattcgtattccgaaccgccgataatccctctccacccgcgacctattcgttaataaaaaacatatccgcgacgaaacgtaataatactccaaaacgttcctacccgaccttcaccactaacgcgattctccccgtaacaccccccatttaaaaaacatccttccccccgacatctttccaaaaatataaacccgttatctttaccaacaaaaatacaca

SEQ ID NO: 7321 - DNA, 736 bp, Artificial Sequence
  chemically treated genomic DNA (Homo sapiens) CpG-island No: 7321
acgtcgaagagttggtattgttggaaattttcgatacggtaaatcgattcgttatagtttgcgtgatgtatattttcggcgcggtcgcgttattcgttggtacgtcgaagcgatcgataaagtgtatggcgaagggcgattattagtagttatgagttggcgatgatcgtgcgtgaatcggtcgcgtgattgtcgttatcgtgtcgtggaatttttcgttgttgttgatttgtggaaattcggttcggcgttggcggcgggaaatagcgtgattttaaaacgtttgaaaaattatcgtttagtgcgattcgtttcgcggggttggcgaaaaagtaggtttgtcggatggtgtgttgaacgtggtgacgggtttaggttagaagtcgggtaggcgttgtcgcgttataacgatatcgacgttattgttttatcggtttaattcgtatcgggaaatagttgttgaaagatgcgggcgacgtaatatgaaacgcgtttggttggaagcgggcggtaaaagcgttaataacgtattcgttgattgatcggatttgtaataggcggtaagcgttatcgaataggtattttttataattagggataggtgtgtatcgtcggaacgcgtttttgttggacgagagtatcgtcgatgaatttttatttttgtaaattaaagggtaaatttgtagcgtgtattattgattcggtatatatgggttttattagggtaagcgatcgg

SEQ ID NO: 7322 - DNA, 736 bp, Artificial Sequence
  chemically treated genomic DNA (Homo sapiens) CpG-island No: 7322
ccgatcgcttaccctaataaaacccatatataccgaatcaataatacacgctacaaatttaccctttaatttacaaaaataaaaattcatcgacgatactctcgtccaacaaaaacgcgttccgacgatacacacctatccctaattataaaaaatacctattcgataacgcttaccgcctattacaaatccgatcaatcaacgaatacgttattaacgcttttaccgcccgcttccaaccaaacgcgtttcatattacgtcgcccgcatctttcaacaactatttcccgatacgaattaaaccgataaaacaataacgtcgatatcgttataacgcgacaacgcctacccgacttctaacctaaacccgtcaccacgttcaacacaccatccgacaaacctactttttcgccaaccccgcgaaacgaatcgcactaaacgataatttttcaaacgttttaaaatcacgctatttcccgccgccaacgccgaaccgaatttccacaaatcaacaacaacgaaaaattccacgacacgataacgacaatcacgcgaccgattcacgcacgatcatcgccaactcataactactaataatcgcccttcgccatacactttatcgatcgcttcgacgtaccaacgaataacgcgaccgcgccgaaaatatacatcacgcaaactataacgaatcgatttaccgtatcgaaaatttccaacaataccaactcttcgacgt

SEQ ID NO: 7323 - DNA, 736 bp, Artificial Sequence
  chemically treated genomic DNA (Homo sapiens) CpG-island No: 7323
tcgatcgtttgttttgataaggtttatgtgtgtcggattaatgatgtacgttgtaagtttgttttttgatttataagggtaagaatttatcggcgatgttttcgtttagtaaaggcgcgtttcggcgatgtatatttgtttttggttgtagaaaatgtttgttcggtggcgtttgtcgtttgttgtaaattcggttagttagcgaatacgttgttggcgtttttgtcgttcgtttttagttagacgcgttttatgttgcgtcgttcgtattttttagtagttgtttttcggtacgggttgaatcggtaaggtaatggcgtcgatatcgttatgacgcgatagcgtttgttcggtttttgatttaaattcgttattacgtttaatatattattcggtaagtttgttttttcgttagtttcgcgagacgaatcgtattgagcggtgattttttagacgttttagaattacgttgtttttcgtcgttagcgtcgggtcgagtttttataagttagtaatagcgggaagttttacggtacgatggcggtaattacgcgatcggtttacgtacgattatcgttagtttatggttattggtggtcgtttttcgttatatattttgtcgatcgtttcggcgtattagcgaatggcgcggtcgcgtcgggaatatgtattacgtagattgtgacgaatcggtttgtcgtgtcgagagtttttagtagtgttagtttttcggcgt

SEQ ID NO: 7324 - DNA, 736 bp, Artificial Sequence
  chemically treated genomic DNA (Homo sapiens) CpG-island No: 7324
acgccgaaaaactaacactactaaaaactctcgacacgacaaaccgattcgtcacaatctacgtaatacatattcccgacgcgaccgcgccattcgctaatacgccgaaacgatcgacaaaatatataacgaaaaacgaccaccaataaccataaactaacgataatcgtacgtaaaccgatcgcgtaattaccgccatcgtaccgtaaaacttcccgctattactaacttataaaaactcgacccgacgctaacgacgaaaaacaacgtaattctaaaacgtctaaaaaatcaccgctcaatacgattcgtctcgcgaaactaacgaaaaaacaaacttaccgaataatatattaaacgtaataacgaatttaaatcaaaaaccgaacaaacgctatcgcgtcataacgatatcgacgccattaccttaccgattcaacccgtaccgaaaaacaactactaaaaaatacgaacgacgcaacataaaacgcgtctaactaaaaacgaacgacaaaaacgccaacaacgtattcgctaactaaccgaatttacaacaaacgacaaacgccaccgaacaaacattttctacaaccaaaaacaaatatacatcgccgaaacgcgcctttactaaacgaaaacatcgccgataaattcttacccttataaatcaaaaaacaaacttacaacgtacatcattaatccgacacacataaaccttatcaaaacaaacgatcga

SEQ ID NO: 7325 - DNA, 532 bp, Artificial Sequence
  chemically treated genomic DNA (Homo sapiens) CpG-island No: 7325
cgtcgacgtagtttagttcgttggtttatgttttattagttttatcggtaggttaataatgcgttttgatagtcgttcgtatttatgattttattcgttagtataaagaacggaatcgtagtagggagaagttatcggtttcgtttattagcgtttgtgttatgatttgatatttaatatgttagttagaatagttacgtcgtttcgtataataatatgttatggttatagggaatcgattggatattattaaagaaaggtcgaaattttgtcggtttatttagtttttggcgggcgcgtttttaatttttcgttaggtggttaaaggcgcgcgtcgaagtgtttacgttggtggtatacgggttcgcgcggtatcggtttttgtttttttttttttttttttgtgtttcgaggcgttaatgttggggtgtcgtcgttttcggggggttttaggtgcggtttaaagacgaaggaatcgggatttgggagagttttttagagatttataatggttattaggatttataagtga

SEQ ID NO: 7326 - DNA, 532 bp, Artificial Sequence
  chemically treated genomic DNA (Homo sapiens) CpG-island No: 7326
tcacttataaatcctaataaccattataaatctctaaaaaactctcccaaatcccgattccttcgtctttaaaccgcacctaaaaccccccgaaaacgacgacaccccaacattaacgcctcgaaacacaaaaaaaaaaaaaaaaaaacaaaaaccgataccgcgcgaacccgtataccaccaacgtaaacacttcgacgcgcgcctttaaccacctaacgaaaaattaaaaacgcgcccgccaaaaactaaataaaccgacaaaatttcgacctttctttaataatatccaatcgattccctataaccataacatattattatacgaaacgacgtaactattctaactaacatattaaatatcaaatcataacacaaacgctaataaacgaaaccgataacttctccctactacgattccgttctttatactaacgaataaaatcataaatacgaacgactatcaaaacgcattattaacctaccgataaaactaataaaacataaaccaacgaactaaactacgtcgacg

SEQ ID NO: 7327 - DNA, 532 bp, Artificial Sequence
  chemically treated genomic DNA (Homo sapiens) CpG-island No: 7327
ttatttgtggattttgatagttattgtgggtttttagaagatttttttaaatttcggttttttcgtttttgaatcgtatttgggatttttcggagacggcggtattttaatattggcgtttcgggatataaaaaagaggggagaaaaataaaagtcggtatcgcgcgaattcgtgtgttattagcgtggatatttcgacgcgcgtttttagttatttggcggaaaattagaaacgcgttcgttaggggttaaataggtcggtagaatttcggtttttttttggtggtatttaatcggttttttatggttatggtatgttgttgtgcggggcggcgtaattgttttggttgatatgttgaatgttagattatggtataaacgttggtgaacggagtcgatagtttttttttgttgcgatttcgttttttgtgttggcgggtgaaattatgaatgcgggcggttgttaaaacgtattgttgatttgtcgatgaaattggtggggtataaattagcgggttgggttacgtcggcg

SEQ ID NO: 7328 - DNA, 532 bp, Artificial Sequence
  chemically treated genomic DNA (Homo sapiens) CpG-island No: 7328
cgccgacgtaacccaacccgctaatttataccccaccaatttcatcgacaaatcaacaatacgttttaacaaccgcccgcattcataatttcacccgccaacacaaaaaacgaaatcgcaacaaaaaaaaactatcgactccgttcaccaacgtttataccataatctaacattcaacatatcaaccaaaacaattacgccgccccgcacaacaacataccataaccataaaaaaccgattaaataccaccaaaaaaaaaccgaaattctaccgacctatttaacccctaacgaacgcgtttctaattttccgccaaataactaaaaacgcgcgtcgaaatatccacgctaataacacacgaattcgcgcgataccgacttttatttttctcccctcttttttatatcccgaaacgccaatattaaaataccgccgtctccgaaaaatcccaaatacgattcaaaaacgaaaaaaccgaaatttaaaaaaatcttctaaaaacccacaataactatcaaaatccacaaataa

SEQ ID NO: 7329 - DNA, 591 bp, Artificial Sequence
  chemically treated genomic DNA (Homo sapiens) CpG-island No: 7329
atggagcggattatgaataggtgttgaagaatatcgatacgcgtatttataacgatatgcgcggaattcggcgtttttgtttgtcgttatgttttggtatttattgttggagcggtatagaagatcgtttaggaaagcggtttgatttattacgacgttttgcgttggcgatgaacgacgtgttggacgaagtttgtcgtttattggtaattcgaaacgtttgacgatattaattcgcgatatttggtagttgtagttggtatgtttcgtcgttagggtaaacgcgtatggaaattgttggagtatttaagtttcgtgcggtttatgatttgttggttttgcgagttgaagttgagttaacgttgaattgtagcgtttggtgaaatggtggggtgagttttaggtttcgcgttattagattaaaaagggatgtttaacgagttggatgaagaattttatcgcgtcgtcgtattcgtcgtttacgtaaacgcgtattacgtcgtggggtatcgtatgatagtggcgtatattgttataggtagtaatttggtttttcgttggagtaggtttatgttggtttgaaagtattag

SEQ ID NO: 7330 - DNA, 591 bp, Artificial Sequence
  chemically treated genomic DNA (Homo sapiens) CpG-island No: 7330
ctaatactttcaaaccaacataaacctactccaacgaaaaaccaaattactacctataacaatatacgccactatcatacgataccccacgacgtaatacgcgtttacgtaaacgacgaatacgacgacgcgataaaattcttcatccaactcgttaaacatccctttttaatctaataacgcgaaacctaaaactcaccccaccatttcaccaaacgctacaattcaacgttaactcaacttcaactcgcaaaaccaacaaatcataaaccgcacgaaacttaaatactccaacaatttccatacgcgtttaccctaacgacgaaacataccaactacaactaccaaatatcgcgaattaatatcgtcaaacgtttcgaattaccaataaacgacaaacttcgtccaacacgtcgttcatcgccaacgcaaaacgtcgtaataaatcaaaccgctttcctaaacgatcttctataccgctccaacaataaataccaaaacataacgacaaacaaaaacgccgaattccgcgcatatcgttataaatacgcgtatcgatattcttcaacacctattcataatccgctccat

SEQ ID NO: 7331 - DNA, 591 bp, Artificial Sequence
  chemically treated genomic DNA (Homo sapiens) CpG-island No: 7331
ttaatgtttttaggttagtatggatttgttttagcggaaggttagattgttgtttatggtaatatacgttattgttatgcggtattttacgacgtggtgcgcgtttgcgtggacgacgagtacgacgacgcggtgaggttttttatttagttcgttgagtatttttttttggtttggtggcgcggaatttggaatttattttattattttattagacgttgtagtttagcgttagtttaattttagttcgtaaggttaataggttataagtcgtacggaatttggatgttttagtagtttttatgcgcgtttattttgacgacgggatatattaattgtaattgttagatatcgcgggttaatgtcgttagacgtttcgggttgttagtgaacggtaggtttcgtttagtacgtcgtttatcgttagcgtaaagcgtcgtgataggttaggtcgtttttttgggcgattttttgtgtcgttttagtagtgggtattagaatatggcggtaaataggaacgtcgggtttcgcgtatatcgttatggatacgcgtatcggtattttttagtatttgtttatgattcgttttat

SEQ ID NO: 7332 - DNA, 591 bp, Artificial Sequence
  chemically treated genomic DNA (Homo sapiens) CpG-island No: 7332
ataaaacgaatcataaacaaatactaaaaaataccgatacgcgtatccataacgatatacgcgaaacccgacgttcctatttaccgccatattctaatacccactactaaaacgacacaaaaaatcgcccaaaaaaacgacctaacctatcacgacgctttacgctaacgataaacgacgtactaaacgaaacctaccgttcactaacaacccgaaacgtctaacgacattaacccgcgatatctaacaattacaattaatatatcccgtcgtcaaaataaacgcgcataaaaactactaaaacatccaaattccgtacgacttataacctattaaccttacgaactaaaattaaactaacgctaaactacaacgtctaataaaataataaaataaattccaaattccgcgccaccaaaccaaaaaaaaatactcaacgaactaaataaaaaacctcaccgcgtcgtcgtactcgtcgtccacgcaaacgcgcaccacgtcgtaaaataccgcataacaataacgtatattaccataaacaacaatctaaccttccgctaaaacaaatccatactaacctaaaaacattaa

SEQ ID NO: 7333 - DNA, 681 bp, Artificial Sequence
  chemically treated genomic DNA (Homo sapiens) CpG-island No: 7333
ttagaatttggcgggtggtgcggaaatacgttggtttttgtgttcgattgtatcgttacgtcgatgggtagtcgttgttgaaacgttggttgtatatgttagtgcgcgatattcgcgtgttgttgagcgttagtaaattattggcgtattgtaggattttatcgtcgggttacgtcggtattgcgttaggtcggcgatttggaacgtattttggtacgtttgttttacgaattgttcgtttacgcgatttggttcgtatgcgttacgtttttagtaattgtcggagttgcgtgcgtagttagaaattgtcgatagtgtacggtataggcgttacgtgagaagatgggcgagtttgtcgagttgcgcgattgttggagcgagtaattatcgatatatcgtcggtgttggtacgcgacggggtgttatcgtatcgggttataacgaagagttggatgagtggcgcgcgcggttgacggcgcgatcgattatttggagcgtttggaagttcgcgagcgtaacgtatcggtttggatacgttgaaagttggttttaatgcggtgtacggtattatatttaaattagtcgtgggtaaagttatttggtatttattaatttatgcgtcgttagacgttgaaaaacgtcgagcgttatattattttagagttaagagtttaaaataag

SEQ ID NO: 7334 - DNA, 681 bp, Artificial Sequence
  chemically treated genomic DNA (Homo sapiens) CpG-island No: 7334
cttattttaaactcttaactctaaaataatataacgctcgacgtttttcaacgtctaacgacgcataaattaataaataccaaataactttacccacgactaatttaaatataataccgtacaccgcattaaaaccaactttcaacgtatccaaaccgatacgttacgctcgcgaacttccaaacgctccaaataatcgatcgcgccgtcaaccgcgcgcgccactcatccaactcttcgttataacccgatacgataacaccccgtcgcgtaccaacaccgacgatatatcgataattactcgctccaacaatcgcgcaactcgacaaactcgcccatcttctcacgtaacgcctataccgtacactatcgacaatttctaactacgcacgcaactccgacaattactaaaaacgtaacgcatacgaaccaaatcgcgtaaacgaacaattcgtaaaacaaacgtaccaaaatacgttccaaatcgccgacctaacgcaataccgacgtaacccgacgataaaatcctacaatacgccaataatttactaacgctcaacaacacgcgaatatcgcgcactaacatatacaaccaacgtttcaacaacgactacccatcgacgtaacgatacaatcgaacacaaaaaccaacgtatttccgcaccacccgccaaattctaa

SEQ ID NO: 7335 - DNA, 681 bp, Artificial Sequence
  chemically treated genomic DNA (Homo sapiens) CpG-island No: 7335
tttattttggatttttaattttggaatgatgtagcgttcggcgttttttagcgtttggcgacgtatgagttgatgggtgttagatggttttgtttacggttgatttgaatgtagtatcgtgtatcgtattaaagttaatttttagcgtgtttaggtcggtacgttacgttcgcggatttttagacgttttagataatcggtcgcgtcgttagtcgcgcgcgttatttatttagtttttcgttatagttcgatgcgataatatttcgtcgcgtattagtatcggcggtgtgtcgatgattgttcgttttagtaatcgcgtagttcggtaaattcgtttatttttttacgtagcgtttgtatcgtgtattatcgatagtttttaattgcgtacgtagtttcggtagttgttgaaagcgtggcgtatacgggttagatcgcgtgggcgagtagttcgtaaagtagacgtgttagaatacgttttaggtcgtcgatttgacgtagtatcggcgtagttcggcggtgaaattttgtaatgcgttaatagtttgttggcgtttagtaatacgcgggtatcgcgtattggtatatgtagttagcgttttagtaacggttgtttatcggcgtgacggtgtagtcgagtatagaagttagcgtattttcgtattattcgttaggttttgg

SEQ ID NO: 7336 - DNA, 681 bp, Artificial Sequence
  chemically treated genomic DNA (Homo sapiens) CpG-island No: 7336
ccaaaacctaacgaataatacgaaaatacgctaacttctatactcgactacaccgtcacgccgataaacaaccgttactaaaacgctaactacatataccaatacgcgatacccgcgtattactaaacgccaacaaactattaacgcattacaaaatttcaccgccgaactacgccgatactacgtcaaatcgacgacctaaaacgtattctaacacgtctactttacgaactactcgcccacgcgatctaacccgtatacgccacgctttcaacaactaccgaaactacgtacgcaattaaaaactatcgataatacacgatacaaacgctacgtaaaaaaataaacgaatttaccgaactacgcgattactaaaacgaacaatcatcgacacaccgccgatactaatacgcgacgaaatattatcgcatcgaactataacgaaaaactaaataaataacgcgcgcgactaacgacgcgaccgattatctaaaacgtctaaaaatccgcgaacgtaacgtaccgacctaaacacgctaaaaattaactttaatacgatacacgatactacattcaaatcaaccgtaaacaaaaccatctaacacccatcaactcatacgtcgccaaacgctaaaaaacgccgaacgctacatcattccaaaattaaaaatccaaaataaa

SEQ ID NO: 7337 - DNA, 648 bp, Artificial Sequence
  chemically treated genomic DNA (Homo sapiens) CpG-island No: 7337
ttcggtttcggattttagatttaaaagcgttttacgcgtttcgttttaggtttatcgttcgatttcgttagatagcgtttggacgggatcgggaaacggcggtcgttatagttgtttaggttttgggatttacgtttagagacgatagcgttggcgattattagaaggtttgcgggttttcgagaaaggaaaattcgtttatagtttagcggttgatattttttagttagtcgtagcgtcgttcgttttcgttttttcgtttatttcgtgggtcgattagtttcgttttcgcggggggttgtgggtatttcgaaggcgggtaaagttgtaagggaaggaagtaagggcgagttcgtcggattacgaagcgggacggaaattataatttttagtaggttttgggttttagtgcggtcgcgaagtagagcgggttgtagagttttgcgcgcgtagtggggatggaacgttgttaggtttagcgggtttggttgttgggggttcgagtagtacgttcggagtcgtcgcgcgttaaagcgggaatttgggaggcgagtagttttgtagttaatgtacgtattttaaattttcgggtttgcggacgttatgtataggtaaacggattgtaaaaaggggaagagtatgaaatgg

SEQ ID NO: 7338 - DNA, 648 bp, Artificial Sequence
  chemically treated genomic DNA (Homo sapiens) CpG-island No: 7338
ccatttcatactcttcccctttttacaatccgtttacctatacataacgtccgcaaacccgaaaatttaaaatacgtacattaactacaaaactactcgcctcccaaattcccgctttaacgcgcgacgactccgaacgtactactcgaacccccaacaaccaaacccgctaaacctaacaacgttccatccccactacgcgcgcaaaactctacaacccgctctacttcgcgaccgcactaaaacccaaaacctactaaaaattataatttccgtcccgcttcgtaatccgacgaactcgcccttacttccttcccttacaactttacccgccttcgaaatacccacaaccccccgcgaaaacgaaactaatcgacccacgaaataaacgaaaaaacgaaaacgaacgacgctacgactaactaaaaaatatcaaccgctaaactataaacgaattttcctttctcgaaaacccgcaaaccttctaataatcgccaacgctatcgtctctaaacgtaaatcccaaaacctaaacaactataacgaccgccgtttcccgatcccgtccaaacgctatctaacgaaatcgaacgataaacctaaaacgaaacgcgtaaaacgcttttaaatctaaaatccgaaaccgaa

SEQ ID NO: 7339 - DNA, 648 bp, Artificial Sequence
  chemically treated genomic DNA (Homo sapiens) CpG-island No: 7339
ttattttatgttttttttttttttgtaattcgtttatttgtgtatagcgttcgtaggttcgggagtttaaaatacgtgtattaattgtagagttgttcgttttttagattttcgttttggcgcgcggcggtttcgagcgtgttgttcgggtttttagtagttagattcgttaagtttagtaacgttttatttttattgcgcgcgtaaggttttatagttcgttttgtttcgcggtcgtattgaggtttaaggtttgttgggaattgtagttttcgtttcgtttcgtagttcgacgggttcgtttttattttttttttttgtagttttattcgttttcgagatatttataatttttcgcgggagcgggattggtcggtttacggggtaggcggggaggcggaagcgggcggcgttacggttgattgggaaatgttagtcgttggattgtagacggatttttttttttcgggagttcgtaggttttttggtgatcgttagcgttgtcgtttttgagcgtggattttagaatttggatagttgtggcggtcgtcgtttttcggtttcgtttagacgttgtttggcgagatcggacggtgagtttaaggcggaacgcgtgaggcgtttttgagtttggggttcggggtcgag

SEQ ID NO: 7340 - DNA, 648 bp, Artificial Sequence
  chemically treated genomic DNA (Homo sapiens) CpG-island No: 7340
ctcgaccccgaaccccaaactcaaaaacgcctcacgcgttccgccttaaactcaccgtccgatctcgccaaacaacgtctaaacgaaaccgaaaaacgacgaccgccacaactatccaaattctaaaatccacgctcaaaaacgacaacgctaacgatcaccaaaaaacctacgaactcccgaaaaaaaaaaatccgtctacaatccaacgactaacatttcccaatcaaccgtaacgccgcccgcttccgcctccccgcctaccccgtaaaccgaccaatcccgctcccgcgaaaaattataaatatctcgaaaacgaataaaactacaaaaaaaaaaaataaaaacgaacccgtcgaactacgaaacgaaacgaaaactacaattcccaacaaaccttaaacctcaatacgaccgcgaaacaaaacgaactataaaaccttacgcgcgcaataaaaataaaacgttactaaacttaacgaatctaactactaaaaacccgaacaacacgctcgaaaccgccgcgcgccaaaacgaaaatctaaaaaacgaacaactctacaattaatacacgtattttaaactcccgaacctacgaacgctatacacaaataaacgaattacaaaaaaaaaaaaaacataaaataa

SEQ ID NO: 7341 - DNA, 651 bp, Artificial Sequence
  chemically treated genomic DNA (Homo sapiens) CpG-island No: 7341
  unsure (636)
tttgattaatatttcggtggggattatcggtgcgatcgttatattgttgttaatgtcgaattatattatgtagacgcggcgttttgattttttcggatttttattgttggcggttggtatggcggtattaattttggcgttggacggtagtaaaggtataggtttatcgtcgttgacgattgtaggtttggtcgtagttggcgtggtggtattggtgttttatttgttgtacgttagaaataataatcgtgttttgtttagtttgaaattgtttcgtattcgtattttttcgttgggtttggcggggagttttgtcggacgtattggtagtggtatgttgttttttatgatatcggtttttttgtaaattggtttcggtttttcgtcgttttatgtcggattgatgatgatttcgatggtgtttggtagtatgggaatgaagcgaattgtggtataggtggtgaatcgttttggttatcgtcgggtattggtagcgattacgttgggtttgtcgttggttattttgttgtttatgattatcgttttgttgggttggtattacgttttgtcgttcgttttgtttttataagggatggttaattcgacgcgttttttttttatgaatattttgacgtntaaagatttttcgga

SEQ ID NO: 7342 - DNA, 651 bp, Artificial Sequence
  chemically treated genomic DNA (Homo sapiens) CpG-island No: 7342
  unsure (16)
tccgaaaaatctttanacgtcaaaatattcataaaaaaaaaacgcgtcgaattaaccatcccttataaaaacaaaacgaacgacaaaacgtaataccaacccaacaaaacgataatcataaacaacaaaataaccaacgacaaacccaacgtaatcgctaccaatacccgacgataaccaaaacgattcaccacctataccacaattcgcttcattcccatactaccaaacaccatcgaaatcatcatcaatccgacataaaacgacgaaaaaccgaaaccaatttacaaaaaaaccgatatcataaaaaacaacataccactaccaatacgtccgacaaaactccccgccaaacccaacgaaaaaatacgaatacgaaacaatttcaaactaaacaaaacacgattattatttctaacgtacaacaaataaaacaccaataccaccacgccaactacgaccaaacctacaatcgtcaacgacgataaacctatacctttactaccgtccaacgccaaaattaataccgccataccaaccgccaacaataaaaatccgaaaaaatcaaaacgccgcgtctacataatataattcgacattaacaacaatataacgatcgcaccgataatccccaccgaaatattaatcaaa

SEQ ID NO: 7343 - DNA, 651 bp, Artificial Sequence
  chemically treated genomic DNA (Homo sapiens) CpG-island No: 7343
  unsure (16)
ttcgggagatttttangcgttagggtgtttatggaggagaaacgcgtcgagttgattattttttgtaaaaataggacgaacggtaaaacgtagtattagtttagtagggcggtagttataaataatagggtgattagcgatagatttagcgtggtcgttattagtattcgacgataattaaagcgatttattatttgtattataattcgttttatttttatgttgttaagtattatcgggattattattagttcggtatgaaacggcgagaaatcgaggttaatttgtaggaaaatcggtgttataaagggtaatatgttattgttaatacgttcggtaaagtttttcgttaggtttagcgaaaaggtacgagtacggaatagttttagattgaatagggtacggttgttatttttggcgtgtagtagataaagtattagtgttattacgttaattgcgattaggtttgtaatcgttagcggcgataaatttgtatttttattgtcgtttagcgttagggttaatatcgttatgttaatcgttagtaataaaaattcggagagattaaagcgtcgcgtttgtatggtgtagttcggtattaatagtaatgtggcgatcgtatcgataatttttatcggaatgttgattaaa

SEQ ID NO: 7344 - DNA, 651 bp, Artificial Sequence
  chemically treated genomic DNA (Homo sapiens) CpG-island No: 7344
  unsure (636)
tttaatcaacattccgataaaaattatcgatacgatcgccacattactattaataccgaactacaccatacaaacgcgacgctttaatctctccgaatttttattactaacgattaacataacgatattaaccctaacgctaaacgacaataaaaatacaaatttatcgccgctaacgattacaaacctaatcgcaattaacgtaataacactaatactttatctactacacgccaaaaataacaaccgtaccctattcaatctaaaactattccgtactcgtaccttttcgctaaacctaacgaaaaactttaccgaacgtattaacaataacatattaccctttataacaccgattttcctacaaattaacctcgatttctcgccgtttcataccgaactaataataatcccgataatacttaacaacataaaaataaaacgaattataatacaaataataaatcgctttaattatcgtcgaatactaataacgaccacgctaaatctatcgctaatcaccctattatttataactaccgccctactaaactaatactacgttttaccgttcgtcctatttttacaaaaaataatcaactcgacgcgtttctcctccataaacaccctaacgcntaaaaatctcccgaa

SEQ ID NO: 7345 - DNA, 622 bp, Artificial Sequence
  chemically treated genomic DNA (Homo sapiens) CpG-island No: 7345
ttacgaatagtcgggacgcgcgggtcggggggatgcgtcgggggttggagggcggagagtatttttcgtaggtttcggttagagttcggggtcgggttatttgattcgcggaatttggggtcgcgcggggtggaatgggaggggaatggttagcgttttttttttcgtttttattggatttaggtcggcgggggtcggcgttcggcggttacgtggtggtgttgtcgttgttttcgtttcgtcggtttagttcgggagttcggcgtttattgattttcgtagcgggggaggaggagggattgcggcgtaggaagtcgagtaggaagcgagttcggcggtcgcgtttttttggggaagcggcgggcggggtggagtagttagttgggttcggggagcgtcgtcgtcgtttcgatggggtgagtgcgcggtacggagtttgggaggttttcggcgcggggtttcgggttcgtgttttcgtttttgtgtttggacgttcgggcgcgggaggcgttggggacggcgttcgggcggagcggttgagcgggttgtagtcggggtttcgttatttttttttggtttatcgtcggtagtttattgttttgcggagagtagatttggggat

SEQ ID NO: 7346 - DNA, 622 bp, Artificial Sequence
  chemically treated genomic DNA (Homo sapiens) CpG-island No: 7346
atccccaaatctactctccgcaaaacaataaactaccgacgataaaccaaaaaaaaataacgaaaccccgactacaacccgctcaaccgctccgcccgaacgccgtccccaacgcctcccgcgcccgaacgtccaaacacaaaaacgaaaacacgaacccgaaaccccgcgccgaaaacctcccaaactccgtaccgcgcactcaccccatcgaaacgacgacgacgctccccgaacccaactaactactccaccccgcccgccgcttccccaaaaaaacgcgaccgccgaactcgcttcctactcgacttcctacgccgcaatccctcctcctcccccgctacgaaaatcaataaacgccgaactcccgaactaaaccgacgaaacgaaaacaacgacaacaccaccacgtaaccgccgaacgccgacccccgccgacctaaatccaataaaaacgaaaaaaaaaacgctaaccattcccctcccattccaccccgcgcgaccccaaattccgcgaatcaaataacccgaccccgaactctaaccgaaacctacgaaaaatactctccgccctccaacccccgacgcatccccccgacccgcgcgtcccgactattcgtaa

SEQ ID NO: 7347 - DNA, 622 bp, Artificial Sequence
  chemically treated genomic DNA (Homo sapiens) CpG-island No: 7347
gtttttagatttgtttttcgtagagtagtgggttgtcggcggtggattagggagaggtggcgggatttcggttgtagttcgtttagtcgtttcgttcgggcgtcgtttttagcgtttttcgcgttcgagcgtttagatataaaggcggggatacgagttcgggatttcgcgtcgggagttttttaagtttcgtgtcgcgtatttattttatcgaggcggcggcggcgtttttcggatttagttggttgttttatttcgttcgtcgtttttttaggaaaacgcggtcgtcgggttcgttttttgttcggttttttgcgtcgtagtttttttttttttttcgttgcgggggttagtgggcgtcgagttttcgggttaggtcggcggggcgggggtagcggtagtattattacgtggtcgtcgggcgtcggttttcgtcgatttggatttagtgggagcgggaagggaggcgttaattattttttttttattttatttcgcgcggttttaaatttcgcgagttaggtgattcggtttcgggttttggtcgggatttgcggggggtgtttttcgttttttagttttcggcgtattttttcggttcgcgcgtttcggttgttcgtgg

SEQ ID NO: 7348 - DNA, 622 bp, Artificial Sequence
  chemically treated genomic DNA (Homo sapiens) CpG-island No: 7348
ccacgaacaaccgaaacgcgcgaaccgaaaaaatacgccgaaaactaaaaaacgaaaaacaccccccgcaaatcccgaccaaaacccgaaaccgaatcacctaactcgcgaaatttaaaaccgcgcgaaataaaataaaaaaaaaataattaacgcctcccttcccgctcccactaaatccaaatcgacgaaaaccgacgcccgacgaccacgtaataatactaccgctacccccgccccgccgacctaacccgaaaactcgacgcccactaacccccgcaacgaaaaaaaaaaaaaaactacgacgcaaaaaaccgaacaaaaaacgaacccgacgaccgcgttttcctaaaaaaacgacgaacgaaataaaacaaccaactaaatccgaaaaacgccgccgccgcctcgataaaataaatacgcgacacgaaacttaaaaaactcccgacgcgaaatcccgaactcgtatccccgcctttatatctaaacgctcgaacgcgaaaaacgctaaaaacgacgcccgaacgaaacgactaaacgaactacaaccgaaatcccgccacctctccctaatccaccgccgacaacccactactctacgaaaaacaaatctaaaaac

SEQ ID NO: 7349 - DNA, 993 bp, Artificial Sequence
  chemically treated genomic DNA (Homo sapiens) CpG-island No: 7349
gttgcgtgcgagatttagaggtttcggttagcgcgtcggtcgtagggagtgcgagtatttgtgagtttcgcgtcgggtcggtgaagtttggtgttgtcgagttcgtttagaaagtacggtcgcgcgttgtcggacgtaggtttataggtttagtcgatttaggtagtaatttttttagtttcgtcgtcgttgttaaggcgatcgtcgtcgaacgttttcgcggcgggtttcgtttttcggttaatcggatcggcgttcggtgaagtttagattttttttgtttcgtagttattttaggtttcggataggaggtagtgtcgtttcggtcgaaggttcgagcgttcgaggcgtttgggatggtgtgggatcgggtaggtggcgtgagggtgcgcggtttcgaattgtaggggcgggaacggaggttgggagcgtcgagttgtttgacgcgtttacgggagagacgtcgggttcgttcgttttttcggcgtttgttcggtcgtttgaagtcgagaggtagcggcggcgcggttttaattttaatagttgttcgtttaggcgttttgcgggattcgggtagggagtaggcgacggcggttttttaagcgttcgaggatttcgttaggggcggtaggagttcgttataaggggcgggaagggaagggttttatatttaggggagcgtttgtttcgtttgttaagttgtggcgtttgagggtttttgagtgttgtagtcggttgtttcgggacggttgttttttattggttttgggcgttggtcggcgttgttcgagatgggttagtttttgtttcgtttttgggtttttttgttcgggttttttgcgttcgtatatagtgtttatcgtttttatatgtagtttgtcgttttttttttttcggcggttttttttttttggggttttttggttttacgatatgtttatataatgtttgtgattgtacgagttttgcgtgggtttgtgggttttgtttttt

SEQ ID NO: 7350 - DNA, 993 bp, Artificial Sequence
  chemically treated genomic DNA (Homo sapiens) CpG-island No: 7350
aaaaaacaaaacccacaaacccacgcaaaactcgtacaatcacaaacattatataaacatatcgtaaaaccaaaaaaccccaaaaaaaaaaaaccgccgaaaaaaaaaaaacgacaaactacatataaaaacgataaacactatatacgaacgcaaaaaacccgaacaaaaaaacccaaaaacgaaacaaaaactaacccatctcgaacaacgccgaccaacgcccaaaaccaataaaaaacaaccgtcccgaaacaaccgactacaacactcaaaaaccctcaaacgccacaacttaacaaacgaaacaaacgctcccctaaatataaaacccttcccttcccgccccttataacgaactcctaccgcccctaacgaaatcctcgaacgcttaaaaaaccgccgtcgcctactccctacccgaatcccgcaaaacgcctaaacgaacaactattaaaattaaaaccgcgccgccgctacctctcgacttcaaacgaccgaacaaacgccgaaaaaacgaacgaacccgacgtctctcccgtaaacgcgtcaaacaactcgacgctcccaacctccgttcccgcccctacaattcgaaaccgcgcaccctcacgccacctacccgatcccacaccatcccaaacgcctcgaacgctcgaaccttcgaccgaaacgacactacctcctatccgaaacctaaaataactacgaaacaaaaaaaatctaaacttcaccgaacgccgatccgattaaccgaaaaacgaaacccgccgcgaaaacgttcgacgacgatcgccttaacaacgacgacgaaactaaaaaaattactacctaaatcgactaaacctataaacctacgtccgacaacgcgcgaccgtactttctaaacgaactcgacaacaccaaacttcaccgacccgacgcgaaactcacaaatactcgcactccctacgaccgacgcgctaaccgaaacctctaaatctcgcacgcaac

SEQ ID NO: 7351 - DNA, 993 bp, Artificial Sequence
  chemically treated genomic DNA (Homo sapiens) CpG-island No: 7351
gaagggtaaaatttataagtttacgtaaaattcgtatagttataaatattatgtaaatatgtcgtgaggttaagaggttttaaggagaaagaatcgtcgggaggaagagaacggtaagttgtatgtaaggacgatgggtattgtgtgcggacgtaggagattcgggtagaggggtttaggggcgggataaagattggtttatttcgggtagcgtcggttagcgtttagaattagtgaaaggtagtcgtttcggggtagtcgattgtagtatttaagggtttttaaacgttatagtttaataggcgaggtaaacgtttttttgaatgtaagattttttttttttcgttttttgtaacgggtttttgtcgtttttaacgggattttcggacgtttgaggagtcgtcgtcgtttgttttttattcgggtttcgtagggcgtttgggcgggtagttgttggggttagaatcgcgtcgtcgttgtttttcggttttaaacggtcgggtaggcgtcgagagagcgggcgagttcggcgtttttttcgtaggcgcgttaggtagttcggcgtttttagttttcgttttcgtttttgtagttcggggtcgcgtatttttacgttatttattcggttttatattattttagacgtttcgggcgttcgggttttcggtcgaagcggtattgttttttgttcggggtttgaaatggttgcggaataaagagaatttgggttttatcgagcgtcggttcgattggtcggggggcggagttcgtcgcgggaacgttcggcggcggtcgttttggtaacggcggcggggttaggaaaattgttgtttgggtcggttgggtttgtgggtttgcgttcgatagcgcgcggtcgtgttttttaagcgggttcggtagtattagattttatcggttcggcgcggggtttataagtgttcgtattttttgcggtcggcgcgttgatcggagtttttgggtttcgtacgtagt

SEQ ID NO: 7352 - DNA, 993 bp, Artificial Sequence
  chemically treated genomic DNA (Homo sapiens) CpG-island No: 7352
actacgtacgaaacccaaaaactccgatcaacgcgccgaccgcaaaaaatacgaacacttataaaccccgcgccgaaccgataaaatctaatactaccgaacccgcttaaaaaacacgaccgcgcgctatcgaacgcaaacccacaaacccaaccgacccaaacaacaattttcctaaccccgccgccgttaccaaaacgaccgccgccgaacgttcccgcgacgaactccgccccccgaccaatcgaaccgacgctcgataaaacccaaattctctttattccgcaaccatttcaaaccccgaacaaaaaacaataccgcttcgaccgaaaacccgaacgcccgaaacgtctaaaataatataaaaccgaataaataacgtaaaaatacgcgaccccgaactacaaaaacgaaaacgaaaactaaaaacgccgaactacctaacgcgcctacgaaaaaaacgccgaactcgcccgctctctcgacgcctacccgaccgtttaaaaccgaaaaacaacgacgacgcgattctaaccccaacaactacccgcccaaacgccctacgaaacccgaataaaaaacaaacgacgacgactcctcaaacgtccgaaaatcccgttaaaaacgacaaaaacccgttacaaaaaacgaaaaaaaaaaaatcttacattcaaaaaaacgtttacctcgcctattaaactataacgtttaaaaacccttaaatactacaatcgactaccccgaaacgactacctttcactaattctaaacgctaaccgacgctacccgaaataaaccaatctttatcccgcccctaaacccctctacccgaatctcctacgtccgcacacaatacccatcgtccttacatacaacttaccgttctcttcctcccgacgattctttctccttaaaacctcttaacctcacgacatatttacataatatttataactatacgaattttacgtaaacttataaattttacccttc

SEQ ID NO: 7353 - DNA, 513 bp, Artificial Sequence
  chemically treated genomic DNA (Homo sapiens) CpG-island No: 7353
gtttcgcgttgcggtttagttttcggcggtcgggggttttcgtcgttttcgtttttgttttttttttatttttcgagatcggttttttttttgggttcgggcgcgggggaagtcgtcgttgtttttgtcgggcgattcgcgtacgcggttttggtgtttgggtcgggggcgtcgtcgcgtggggtttacgtcgttaaggttatcggttttcggcgcgtaggaggcgggggttttcggtcgtcgttcgggatcgcgatatgtgcgcgggtcgggtcgttacgttttcgttcgtcgttgatttgtcgcgggggtagggagcgggcgggcgggagcggttcgggtttatataatgcgtttcgttgggtgggggtggtaggtcgagcgggaggtcgggtggagggcgttttgtgcgcggcggagttcgtcgtttgattggttagaaatgggtggagttggcgcggggtttgaattgtagttgtgtgggttttgggggtttttttacgtttttgtttt

SEQ ID NO: 7354 - DNA, 513 bp, Artificial Sequence
  chemically treated genomic DNA (Homo sapiens) CpG-island No: 7354
aaaacaaaaacgtaaaaaaacccccaaaacccacacaactacaattcaaaccccgcgccaactccacccatttctaaccaatcaaacgacgaactccgccgcgcacaaaacgccctccacccgacctcccgctcgacctaccacccccacccaacgaaacgcattatataaacccgaaccgctcccgcccgcccgctccctacccccgcgacaaatcaacgacgaacgaaaacgtaacgacccgacccgcgcacatatcgcgatcccgaacgacgaccgaaaacccccgcctcctacgcgccgaaaaccgataaccttaacgacgtaaaccccacgcgacgacgcccccgacccaaacaccaaaaccgcgtacgcgaatcgcccgacaaaaacaacgacgacttcccccgcgcccgaacccaaaaaaaaaaccgatctcgaaaaataaaaaaaaaacaaaaacgaaaacgacgaaaacccccgaccgccgaaaactaaaccgcaacgcgaaac

SEQ ID NO: 7355 - DNA, 513 bp, Artificial Sequence
  chemically treated genomic DNA (Homo sapiens) CpG-island No: 7355
agggtaaggacgtggaaaaatttttaagatttatatagttgtagtttaaatttcgcgttagttttatttatttttggttagttaggcggcgagtttcgtcgcgtatagagcgttttttattcggtttttcgttcggtttgttatttttatttagcggggcgtattgtgtgggttcgggtcgttttcgttcgttcgttttttattttcgcggtaggttagcggcgggcggggacgtggcggttcggttcgcgtatatgtcgcgatttcgggcggcggtcgggggttttcgttttttgcgcgtcggaagtcggtggttttggcggcgtgagttttacgcggcggcgttttcggtttaggtattagggtcgcgtgcgcgagtcgttcggtaggggtagcggcggtttttttcgcgttcggatttagggaggaggtcggtttcggaggatgggggaggggtagaggcggaggcgacgggagttttcggtcgtcgggggttgggtcgtagcgcggggt

SEQ ID NO: 7356 - DNA, 513 bp, Artificial Sequence
  chemically treated genomic DNA (Homo sapiens) CpG-island No: 7356
accccgcgctacgacccaacccccgacgaccgaaaactcccgtcgcctccgcctctacccctcccccatcctccgaaaccgacctcctccctaaatccgaacgcgaaaaaaaccgccgctacccctaccgaacgactcgcgcacgcgaccctaatacctaaaccgaaaacgccgccgcgtaaaactcacgccgccaaaaccaccgacttccgacgcgcaaaaaacgaaaacccccgaccgccgcccgaaatcgcgacatatacgcgaaccgaaccgccacgtccccgcccgccgctaacctaccgcgaaaataaaaaacgaacgaacgaaaacgacccgaacccacacaatacgccccgctaaataaaaataacaaaccgaacgaaaaaccgaataaaaaacgctctatacgcgacgaaactcgccgcctaactaaccaaaaataaataaaactaacgcgaaatttaaactacaactatataaatcttaaaaatttttccacgtccttaccct

SEQ ID NO: 7357 - DNA, 517 bp, Artificial Sequence
  chemically treated genomic DNA (Homo sapiens) CpG-island No: 7357
agtacgttttttttatatcgcgttgggatatgtgttttcgacgtaaattaaatagatgttttttgtatcgtaggggttggaatagttggtacggtatgttgagcgattggcggattattttatcgtggcgattggcggtattagtttggtacgcgcgtttgcggtgatagtaacgggtgtcggtagtatcgtcgtcgttagcgttattatttaagtcgtagattggcgtttggtaacggtatagttgttggaaattgtaggagttggcgatgaatgatcgtgattttatgcgttatagtcgttaaattttgttcgacgatatcgttttggacgggtagtaaaaattgttcgatagttaggtgttgattatcggtttgggcgggttgggtatatttgttgcgttgtatttggcgggcgttggcgtcgggacgttggtattggtagatgacgacgatgtgtatttaagtaatttgtaacgataaattttttttattattgaagatatcgatcgttcgaa

SEQ ID NO: 7358 - DNA, 517 bp, Artificial Sequence
  chemically treated genomic DNA (Homo sapiens) CpG-island No: 7358
ttcgaacgatcgatatcttcaataataaaaaaaatttatcgttacaaattacttaaatacacatcgtcgtcatctaccaataccaacgtcccgacgccaacgcccgccaaatacaacgcaacaaatatacccaacccgcccaaaccgataatcaacacctaactatcgaacaatttttactacccgtccaaaacgatatcgtcgaacaaaatttaacgactataacgcataaaatcacgatcattcatcgccaactcctacaatttccaacaactataccgttaccaaacgccaatctacgacttaaataataacgctaacgacgacgatactaccgacacccgttactatcaccgcaaacgcgcgtaccaaactaataccgccaatcgccacgataaaataatccgccaatcgctcaacataccgtaccaactattccaacccctacgatacaaaaaacatctatttaatttacgtcgaaaacacatatcccaacgcgatataaaaaaaacgtact

SEQ ID NO: 7359 - DNA, 517 bp, Artificial Sequence
  chemically treated genomic DNA (Homo sapiens) CpG-island No: 7359
ttcgggcgatcgatatttttagtggtaaagaggatttgtcgttgtagattgtttaaatgtatatcgtcgttatttgttagtattagcgtttcgacgttagcgttcgttaggtatagcgtagtaggtgtatttagttcgtttagatcgataattagtatttggttgtcgagtagtttttgttgttcgtttagagcgatatcgtcgagtaggatttggcggttataacgtataaagttacggttatttatcgttaatttttgtaatttttagtaattgtgtcgttgttaaacgttagtttgcggtttgagtaatggcgttgacgacggcgatattgtcgatattcgttgttattatcgtaggcgcgcgtgttagattgatatcgttaatcgttacggtgggataattcgttagtcgtttaatatgtcgtgttagttgttttagtttttgcggtgtagaaggtatttgtttggtttgcgtcgggaatatatgttttagcgcgatataagaggggcgtgtt

SEQ ID NO: 7360 - DNA, 517 bp, Artificial Sequence
  chemically treated genomic DNA (Homo sapiens) CpG-island No: 7360
aacacgcccctcttatatcgcgctaaaacatatattcccgacgcaaaccaaacaaataccttctacaccgcaaaaactaaaacaactaacacgacatattaaacgactaacgaattatcccaccgtaacgattaacgatatcaatctaacacgcgcgcctacgataataacaacgaatatcgacaatatcgccgtcgtcaacgccattactcaaaccgcaaactaacgtttaacaacgacacaattactaaaaattacaaaaattaacgataaataaccgtaactttatacgttataaccgccaaatcctactcgacgatatcgctctaaacgaacaacaaaaactactcgacaaccaaatactaattatcgatctaaacgaactaaatacacctactacgctatacctaacgaacgctaacgtcgaaacgctaatactaacaaataacgacgatatacatttaaacaatctacaacgacaaatcctctttaccactaaaaatatcgatcgcccgaa

SEQ ID NO: 7361 - DNA, 879 bp, Artificial Sequence
  chemically treated genomic DNA (Homo sapiens) CpG-island No: 7361
ggaagagttgtattcgcgtatttttgaattgatggaagaagtggtaaaacgcgttgaagtcgatggtatttaggcgtggtgggatttcgatgcgaaagagattttcggcgacgaagttgattagtacgtgaaagtgtcggatatattggatgtatggtttgatttcggatttatttatttttttgttgttgacgtgcgttcggaatttgtcggttacgtagcggatatgtatttggaaggttttgattaatatcgcggttggtttatgttttttttaatgatttttatcgcgatgaagggtaaagcgtcgtatcgttaggtattgatttacggttttatcgtggatggttaggtcgtaagatgtttaaatttatcggtaatatcgtttcgtcgtaggatgtgatgaataaattgggcgcggatattttgcgtttgtgggtggtattaatcgattatatcggtgaaatggtcgtttttgacgagattttgaaacgtgttgtcgatagttatcgtcgtattcgtaatatcgcgcgttttttgttggtaaatttgaacggttttgatttagtaaaagatatggtgaaatcggaagagatggtggtattggatcgttgggtcgtaggttgtgcgaaagcggtataggaagatatttttaaggcgtacgaagtatacgatttttacgaagtggtatagcgtttgatgcgtttttgtttcgttgagatgggttttttttatttcgatattattaaagatcgttagtatatcgttaaagcggatagtgtggcgcgtcgtagttgttagattgcgttatattatatcgtagaagcgttggtgcgttggatggtattaatttttttttttatcgttgatgaagtgtgg

SEQ ID NO: 7362 - DNA, 879 bp, Artificial Sequence
  chemically treated genomic DNA (Homo sapiens) CpG-island No: 7362
ccacacttcatcaacgataaaaaaaaaaattaataccatccaacgcaccaacgcttctacgatataatataacgcaatctaacaactacgacgcgccacactatccgctttaacgatatactaacgatctttaataatatcgaaataaaaaaaacccatctcaacgaaacaaaaacgcatcaaacgctataccacttcgtaaaaatcgtatacttcgtacgccttaaaaatatcttcctataccgctttcgcacaacctacgacccaacgatccaataccaccatctcttccgatttcaccatatcttttactaaatcaaaaccgttcaaatttaccaacaaaaaacgcgcgatattacgaatacgacgataactatcgacaacacgtttcaaaatctcgtcaaaaacgaccatttcaccgatataatcgattaataccacccacaaacgcaaaatatccgcgcccaatttattcatcacatcctacgacgaaacgatattaccgataaatttaaacatcttacgacctaaccatccacgataaaaccgtaaatcaatacctaacgatacgacgctttacccttcatcgcgataaaaatcattaaaaaaaacataaaccaaccgcgatattaatcaaaaccttccaaatacatatccgctacgtaaccgacaaattccgaacgcacgtcaacaacaaaaaaataaataaatccgaaatcaaaccatacatccaatatatccgacactttcacgtactaatcaacttcgtcgccgaaaatctctttcgcatcgaaatcccaccacgcctaaataccatcgacttcaacgcgttttaccacttcttccatcaattcaaaaatacgcgaatacaactcttcc

SEQ ID NO: 7363 - DNA, 879 bp, Artificial Sequence
  chemically treated genomic DNA (Homo sapiens) CpG-island No: 7363
ttatattttattagcggtgaaggagaggattggtgttatttagcgtattagcgtttttgcgatgtgatatagcgtagtttggtagttacgacgcgttatattgttcgttttggcggtgtattgacggtttttgatgatgtcgaggtagaaggaatttattttaacggagtagaagcgtattagacgttgtattatttcgtggaaatcgtatgtttcgtacgttttgaggatgtttttttgtgtcgttttcgtataatttacggtttagcgatttagtattattatttttttcggttttattatattttttgttggattaaaatcgtttaggtttgttagtaggaagcgcgcggtgttacggatacgacgatagttatcggtagtacgttttaggatttcgttagaaacggttattttatcggtgtagtcggttgatgttatttatagacgtagaatattcgcgtttagtttgtttattatattttgcggcgaaacggtattgtcgatggatttagatattttgcggtttgattatttacggtaaagtcgtgggttagtatttgacgatacggcgttttattttttatcgcggtggagattattagggaagatatgaattagtcgcggtgttggttagaattttttagatatatgttcgttgcgtgatcggtaaatttcggacgtacgttaataatagaagagtgggtagattcggagttaaattatatatttaatgtgttcggtatttttacgtattgattagtttcgtcgtcgaggatttttttcgtatcgagattttattacgtttggatgttatcgattttaacgcgttttgttattttttttattagtttaagggtacgcggatgtagttttttt

SEQ ID NO: 7364 - DNA, 879 bp, Artificial Sequence
  chemically treated genomic DNA (Homo sapiens) CpG-island No: 7364
aaaaaaactacatccgcgtacccttaaactaataaaaaaaataacaaaacgcgttaaaatcgataacatccaaacgtaataaaatctcgatacgaaaaaaatcctcgacgacgaaactaatcaatacgtaaaaataccgaacacattaaatatataatttaactccgaatctacccactcttctattattaacgtacgtccgaaatttaccgatcacgcaacgaacatatatctaaaaaattctaaccaacaccgcgactaattcatatcttccctaataatctccaccgcgataaaaaataaaacgccgtatcgtcaaatactaacccacgactttaccgtaaataatcaaaccgcaaaatatctaaatccatcgacaataccgtttcgccgcaaaatataataaacaaactaaacgcgaatattctacgtctataaataacatcaaccgactacaccgataaaataaccgtttctaacgaaatcctaaaacgtactaccgataactatcgtcgtatccgtaacaccgcgcgcttcctactaacaaacctaaacgattttaatccaacaaaaaatataataaaaccgaaaaaaataataatactaaatcgctaaaccgtaaattatacgaaaacgacacaaaaaaacatcctcaaaacgtacgaaacatacgatttccacgaaataatacaacgtctaatacgcttctactccgttaaaataaattccttctacctcgacatcatcaaaaaccgtcaatacaccgccaaaacgaacaatataacgcgtcgtaactaccaaactacgctatatcacatcgcaaaaacgctaatacgctaaataacaccaatcctctccttcaccgctaataaaatataa

SEQ ID NO: 7365 - DNA, 1090 bp, Artificial Sequence
  chemically treated genomic DNA (Homo sapiens) CpG-island No: 7365
cgttaggttcggtggttgacgttaattggttgtggtggttatagtaaaacgtcgatttttgttattcggcgtggttatgcgcgtgatgaggttcgttattatattcgggttgtattttgttgttttgtttgcggtattcgtttgtgttttgagtttgtttacggcgttaaattgattttgcgtgacgttgtcgttcgcgtgttttttttttattattcgttttagttcggtttcgttttgcgtgtgtagtattttacggcggtttaggttgtcggtgatggtgatgcggttttttttatattgatacgtgtagtttaagtttgtcgggtttagttgttttgttattcgttcgtcgttgtcgtaacggtaacggattttcggtcggttcgtgtgacggtgcgttattattcggtttcggtatttattatcgtaagtaaagttgcgtatttgtttgttattacggttatatattatcgttagttcgtcgcggggcgttagttatagcgtattagcggcgcggtaggtaaatttttcgggtatttcgggtcgtgcgttagttatacggtagatagacggatgtcgttgtttcggttatattcggtgtattcggtagggtattatgaaaagcggacggtttcgtttcgtcggaaatggtttgttgtcgggttttttttgttcgttgcgtttgcgtggttagtattagtcggaagtgacgttaggtattattcgttacgtcggtgatttcgtcgttgaatttatcggcggtttcgcggtggaacgtttgtgtgcgttcgaagcggtttattagttcggttagtattcggtacggcggtagcggcgtaggtagtattttattcgttttcggtattcgtttatattaatcgagtagttattacggtttttgcggattgtttgtcgttagataacgatgcggatttaagcggagttttttcggtagcgtttgttagagtgcggttagtcggtgatttttatttagtttcgttacgtcgtcgcgtattagttatagtgattcgttgcggttgtaatcgtttttatcgggaaataggtgtttaaaatataggtttttggt

SEQ ID NO: 7366 - DNA, 1090 bp, Artificial Sequence
  chemically treated genomic DNA (Homo sapiens) CpG-island No: 7366
accaaaaacctatattttaaacacctatttcccgataaaaacgattacaaccgcaacgaatcactataactaatacgcgacgacgtaacgaaactaaataaaaatcaccgactaaccgcactctaacaaacgctaccgaaaaaactccgcttaaatccgcatcgttatctaacgacaaacaatccgcaaaaaccgtaataactactcgattaatataaacgaataccgaaaacgaataaaatactacctacgccgctaccgccgtaccgaatactaaccgaactaataaaccgcttcgaacgcacacaaacgttccaccgcgaaaccgccgataaattcaacgacgaaatcaccgacgtaacgaataatacctaacgtcacttccgactaatactaaccacgcaaacgcaacgaacaaaaaaaacccgacaacaaaccatttccgacgaaacgaaaccgtccgcttttcataataccctaccgaatacaccgaatataaccgaaacaacgacatccgtctatctaccgtataactaacgcacgacccgaaatacccgaaaaatttacctaccgcgccgctaatacgctataactaacgccccgcgacgaactaacgataatatataaccgtaataacaaacaaatacgcaactttacttacgataataaataccgaaaccgaataataacgcaccgtcacacgaaccgaccgaaaatccgttaccgttacgacaacgacgaacgaataacaaaacaactaaacccgacaaacttaaactacacgtatcaatataaaaaaaaccgcatcaccatcaccgacaacctaaaccgccgtaaaatactacacacgcaaaacgaaaccgaactaaaacgaataataaaaaaaaaacacgcgaacgacaacgtcacgcaaaatcaatttaacgccgtaaacaaactcaaaacacaaacgaataccgcaaacaaaacaacaaaatacaacccgaatataataacgaacctcatcacgcgcataaccacgccgaataacaaaaatcgacgttttactataaccaccacaaccaattaacgtcaaccaccgaacctaacg

SEQ ID NO: 7367 - DNA, 1090 bp, Artificial Sequence
  chemically treated genomic DNA (Homo sapiens) CpG-island No: 7367
gttagaagtttgtattttgagtatttgtttttcggtgaggacggttatagtcgtagcgagttattgtggttggtgcgcggcggcgtggcgaaattggatgaaggttatcggttggtcgtattttggtaggcgttgtcggaagaatttcgtttaagttcgtatcgttatttggcgataaatagttcgtaggggtcgtggtggttgttcggttggtgtgagcgggtgtcggaagcggatgaggtgttgtttgcgtcgttgtcgtcgtatcgggtattgatcgggttggtggatcgtttcgggcgtatatagacgttttatcgcgaagtcgtcggtgaatttagcggcgaaattatcggcgtgacggatggtgtttggcgttattttcggttggtattgattacgtaggcgtagcgggtagaagaagttcggtagtaggttattttcggcgggacggaatcgttcgttttttatgatattttgtcgggtatatcgaatatggtcgggataacggtattcgtttgtttgtcgtgtggttgacgtacgattcggaatattcggagaatttatttgtcgcgtcgttggtgcgttatggttgacgtttcgcggcgaattggcggtggtgtatgatcgtagtggtaaataggtgcgtagttttatttacgatgataaatatcggggtcggatggtggcgtatcgttatacgggtcggtcggaaattcgttatcgttacgatagcgacgggcgggtgatagaatagttaaattcggtaggtttaagttatacgtattagtatgagaaagatcgtattattattatcgatagtttggatcgtcgtgaagtgttgtatacgtagggcgaagtcgggttgaagcgggtggtgaaaaaggaatacgcggacggtagcgttacgtagagttagtttgacgtcgtgggtaggtttagggtatagacggatgtcgtaggtaggataatagagtatagttcggatgtggtgacgggttttattacgcgtataattacgtcggatggtagggatcggcgttttattataattattataattagttaacgttagttatcgggtttgacg

SEQ ID NO: 7368 - DNA, 1090 bp, Artificial Sequence
  chemically treated genomic DNA (Homo sapiens) CpG-island No: 7368
cgtcaaacccgataactaacgttaactaattataataattataataaaacgccgatccctaccatccgacgtaattatacgcgtaataaaacccgtcaccacatccgaactatactctattatcctacctacgacatccgtctataccctaaacctacccacgacgtcaaactaactctacgtaacgctaccgtccgcgtattcctttttcaccacccgcttcaacccgacttcgccctacgtatacaacacttcacgacgatccaaactatcgataataataatacgatctttctcatactaatacgtataacttaaacctaccgaatttaactattctatcacccgcccgtcgctatcgtaacgataacgaatttccgaccgacccgtataacgatacgccaccatccgaccccgatatttatcatcgtaaataaaactacgcacctatttaccactacgatcatacaccaccgccaattcgccgcgaaacgtcaaccataacgcaccaacgacgcgacaaataaattctccgaatattccgaatcgtacgtcaaccacacgacaaacaaacgaataccgttatcccgaccatattcgatatacccgacaaaatatcataaaaaacgaacgattccgtcccgccgaaaataacctactaccgaacttcttctacccgctacgcctacgtaatcaataccaaccgaaaataacgccaaacaccatccgtcacgccgataatttcgccgctaaattcaccgacgacttcgcgataaaacgtctatatacgcccgaaacgatccaccaacccgatcaatacccgatacgacgacaacgacgcaaacaacacctcatccgcttccgacacccgctcacaccaaccgaacaaccaccacgacccctacgaactatttatcgccaaataacgatacgaacttaaacgaaattcttccgacaacgcctaccaaaatacgaccaaccgataaccttcatccaatttcgccacgccgccgcgcaccaaccacaataactcgctacgactataaccgtcctcaccgaaaaacaaatactcaaaatacaaacttctaac

SEQ ID NO: 7369 - DNA, 574 bp, Artificial Sequence
  chemically treated genomic DNA (Homo sapiens) CpG-island No: 7369
cgttgacgtagttttatgaggcgtcggtaacgttaatttggcgcgatagtgacgagcgtatggtataatttatcgttcgtttgaacgaattgggtttatagtttatgtagggtgcgcgtttttggtacgtattggatgtttttgtcggaaaagattaggttgttaattggattatcgcgatttattaataattgttaggtaaacgtttaattatatttggtttgggcgatgggttaaacgatgcgtttttattggaggtaatggattacgcggtgattgtgaaagggttaaatcgtgaaggggtgtatttgtatgatgaggattcggttcgcgttatggcgaacgtagcgtgaaggatcggaaggatggcgtgaagggttggattatttttttttcgttcgttaagcgttatcgtttagcgaatattcgattacgtttagtttgtttagcgagataaagtcgacggtcggttagtgattggagttgtttaaaattataattatcggttttttcgttgttgtttatttttagcgaggtattgatgcgtatcgtcgtatttttggcgattaatatt

SEQ ID NO: 7370 - DNA, 574 bp, Artificial Sequence
  chemically treated genomic DNA (Homo sapiens) CpG-island No: 7370
aatattaatcgccaaaaatacgacgatacgcatcaatacctcgctaaaaataaacaacaacgaaaaaaccgataattataattttaaacaactccaatcactaaccgaccgtcgactttatctcgctaaacaaactaaacgtaatcgaatattcgctaaacgataacgcttaacgaacgaaaaaaaaataatccaacccttcacgccatccttccgatccttcacgctacgttcgccataacgcgaaccgaatcctcatcatacaaatacaccccttcacgatttaaccctttcacaatcaccgcgtaatccattacctccaataaaaacgcatcgtttaacccatcgcccaaaccaaatataattaaacgtttacctaacaattattaataaatcgcgataatccaattaacaacctaatcttttccgacaaaaacatccaatacgtaccaaaaacgcgcaccctacataaactataaacccaattcgttcaaacgaacgataaattataccatacgctcgtcactatcgcgccaaattaacgttaccgacgcctcataaaactacgtcaacg

SEQ ID NO: 7371 - DNA, 574 bp, Artificial Sequence
  chemically treated genomic DNA (Homo sapiens) CpG-island No: 7371
gatgttgatcgttaagagtacgacgatacgtattagtgtttcgttgggggtaagtagtagcgaggaaatcggtgattatgattttgaataattttagttattggtcgatcgtcggttttatttcgttaaataggttgggcgtaatcgggtattcgttgagcgataacgtttaacgggcggagaaaaaatggtttagttttttacgttattttttcggttttttacgttgcgttcgttatgacgcgggtcggatttttattatgtagatgtatttttttacgatttagtttttttataattatcgcgtaatttattatttttagtaagggcgtatcgtttggtttatcgtttaggttaagtgtggttgggcgtttgtttgataattgttgataggtcgcgataatttagttggtagtttgatttttttcggtagaagtatttagtacgtgttagaagcgcgtattttgtataaattgtaagtttagttcgtttagacgagcggtaaattgtgttatacgttcgttattgtcgcgttagattagcgttatcgacgttttatgaagttgcgttagcg

SEQ ID NO: 7372 - DNA, 574 bp, Artificial Sequence
  chemically treated genomic DNA (Homo sapiens) CpG-island No: 7372
cgctaacgcaacttcataaaacgtcgataacgctaatctaacgcgacaataacgaacgtataacacaatttaccgctcgtctaaacgaactaaacttacaatttatacaaaatacgcgcttctaacacgtactaaatacttctaccgaaaaaaatcaaactaccaactaaattatcgcgacctatcaacaattatcaaacaaacgcccaaccacacttaacctaaacgataaaccaaacgatacgcccttactaaaaataataaattacgcgataattataaaaaaactaaatcgtaaaaaaatacatctacataataaaaatccgacccgcgtcataacgaacgcaacgtaaaaaaccgaaaaaataacgtaaaaaactaaaccattttttctccgcccgttaaacgttatcgctcaacgaatacccgattacgcccaacctatttaacgaaataaaaccgacgatcgaccaataactaaaattattcaaaatcataatcaccgatttcctcgctactacttacccccaacgaaacactaatacgtatcgtcgtactcttaacgatcaacatc

SEQ ID NO: 7373 - DNA, 629 bp, Artificial Sequence
  chemically treated genomic DNA (Homo sapiens) CpG-island No: 7373
ggaagtacgcgtgtatgttcgtggtcgcgataagggtagattagagggcgtgacgacggcgatttggggttggaattggtgggttgggggtacgtgggaatcgataggaagggtagggcgttaatattgtatcgggcgggtagaaggtgcgtagggtgcgtggttagtggggattcgcgggaaaaattgggtagattgttaggtgggtataggtgattgttgatagcgtcggtaatggtgggaaagtggcgtgggcgtgggtggttttgaaggggttttttgggcggtgacggtgcgtgtaaaacggggcggcgtgagtggttgttggtggatgagacggggaggttatgtgatgttggatgaagcgcgggattggatggggttgtggatacgagttgataagtgttatatgcggatttagaagacggggtttggggggagttgcgtgtacgttattaatatcgcgggggttttgtaagagtgtgtaattattcgtatagggatgtaatggttgaaatatataaattgatatcggtttgtatatttcgaattatgggcggtagggggtgcgtagttgaaacggttggtggatttgaagtatttagagagtttttgtcggaaaggattaa

SEQ ID NO: 7374 - DNA, 629 bp, Artificial Sequence
  chemically treated genomic DNA (Homo sapiens) CpG-island No: 7374
ttaatcctttccgacaaaaactctctaaatacttcaaatccaccaaccgtttcaactacgcaccccctaccgcccataattcgaaatatacaaaccgatatcaatttatatatttcaaccattacatccctatacgaataattacacactcttacaaaacccccgcgatattaataacgtacacgcaactccccccaaaccccgtcttctaaatccgcatataacacttatcaactcgtatccacaaccccatccaatcccgcgcttcatccaacatcacataacctccccgtctcatccaccaacaaccactcacgccgccccgttttacacgcaccgtcaccgcccaaaaaaccccttcaaaaccacccacgcccacgccactttcccaccattaccgacgctatcaacaatcacctatacccacctaacaatctacccaatttttcccgcgaatccccactaaccacgcaccctacgcaccttctacccgcccgatacaatattaacgccctacccttcctatcgattcccacgtacccccaacccaccaattccaaccccaaatcgccgtcgtcacgccctctaatctacccttatcgcgaccacgaacatacacgcgtacttcc

SEQ ID NO: 7375 - DNA, 629 bp, Artificial Sequence
  chemically treated genomic DNA (Homo sapiens) CpG-island No: 7375
ttaatttttttcggtaaaaattttttgggtattttaaatttattaatcgttttaattgcgtattttttatcgtttataattcgaggtgtgtaggtcggtgttaatttatgtgttttaattattgtatttttgtgcgggtggttgtatatttttataaggttttcgcggtgttggtaacgtatacgtagttttttttaggtttcgttttttaggttcgtatgtaatatttattaattcgtgtttataattttatttagtttcgcgttttatttaatattatatagttttttcgttttatttattagtagttatttacgtcgtttcgttttatacgtatcgttatcgtttaggggatttttttaaaattatttacgtttacgttatttttttattattatcggcgttattagtagttatttatgtttatttaatagtttatttagtttttttcgcgggtttttattaattacgtattttgcgtattttttattcgttcgatatagtattagcgttttattttttttatcggtttttacgtatttttagtttattagttttagttttaagtcgtcgtcgttacgttttttagtttatttttatcgcggttacgggtatatacgcgtattttt

SEQ ID NO: 7376 - DNA, 629 bp, Artificial Sequence
  chemically treated genomic DNA (Homo sapiens) CpG-island No: 7376
aaaaatacgcgtatatacccgtaaccgcgataaaaataaactaaaaaacgtaacgacgacgacttaaaactaaaactaataaactaaaaatacgtaaaaaccgataaaaaaaataaaacgctaatactatatcgaacgaataaaaaatacgcaaaatacgtaattaataaaaacccgcgaaaaaaactaaataaactattaaataaacataaataactactaataacgccgataataataaaaaaataacgtaaacgtaaataattttaaaaaaatcccctaaacgataacgatacgtataaaacgaaacgacgtaaataactactaataaataaaacgaaaaaactatataatattaaataaaacgcgaaactaaataaaattataaacacgaattaataaatattacatacgaacctaaaaaacgaaacctaaaaaaaactacgtatacgttaccaacaccgcgaaaaccttataaaaatatacaaccacccgcacaaaaatacaataattaaaacacataaattaacaccgacctacacacctcgaattataaacgataaaaaatacgcaattaaaacgattaataaatttaaaatacccaaaaaatttttaccgaaaaaaattaa

SEQ ID NO: 7377 - DNA, 548 bp, Artificial Sequence
  chemically treated genomic DNA (Homo sapiens) CpG-island No: 7377
ggagcggataggcggaggaagtaaacgtgcgtgagatggtaggggagtatttgtagttcgattgcgcgggcgcgttagataacgggatgggaacgcgtcgttaaagatacgggttgtgaaaagatacgggtagggagagtaggagtcgggatacgtaacgatttatggtaattagttatttggtacgacgatttgaaggatggcgatgtcggagtgcgttatatgattttacgatgttttattacgagggagttcgagggagataagacgttgataagcgaacgcgaaaaaaaattgtcgacgaaagtaggggattgtaggggtgttggggaggtttgatagcgttatgtcgggcgaagacggttatcgagtgtataaaggggaaagttgggtagagtgagaaagttacggttggacgaagattaggggaattatgtaggaggcgcggttttggttcgtaaaattcgggatcgaatcggcgtgggtttatacgtaataaatataaatagaaattgttgttagtttgtatttatttgtgaggcgtaaaa

SEQ ID NO: 7378 - DNA, 548 bp, Artificial Sequence
  chemically treated genomic DNA (Homo sapiens) CpG-island No: 7378
ttttacgcctcacaaataaatacaaactaacaacaatttctatttatatttattacgtataaacccacgccgattcgatcccgaattttacgaaccaaaaccgcgcctcctacataattcccctaatcttcgtccaaccgtaactttctcactctacccaactttcccctttatacactcgataaccgtcttcgcccgacataacgctatcaaacctccccaacacccctacaatcccctactttcgtcgacaattttttttcgcgttcgcttatcaacgtcttatctccctcgaactccctcgtaataaaacatcgtaaaatcatataacgcactccgacatcgccatccttcaaatcgtcgtaccaaataactaattaccataaatcgttacgtatcccgactcctactctccctacccgtatcttttcacaacccgtatctttaacgacgcgttcccatcccgttatctaacgcgcccgcgcaatcgaactacaaatactcccctaccatctcacgcacgtttacttcctccgcctatccgctcc

SEQ ID NO: 7379 - DNA, 548 bp, Artificial Sequence
  chemically treated genomic DNA (Homo sapiens) CpG-island No: 7379
ttttgcgttttataggtaagtgtaaattaatagtaatttttgtttatgtttgttacgtgtaggtttacgtcggttcggtttcgggttttacgggttaaggtcgcgttttttgtatagtttttttggttttcgtttagtcgtagtttttttattttgtttagtttttttttttgtatattcggtagtcgttttcgttcggtatagcgttattaagtttttttaatatttttgtaattttttgttttcgtcggtagttttttttcgcgttcgtttgttaacgttttgtttttttcgggttttttcgtggtggggtatcgtggggttatgtggcgtatttcggtatcgttattttttaagtcgtcgtgttaggtggttagttattataaatcgttgcgtatttcggtttttgttttttttattcgtgtttttttatagttcgtgtttttaacggcgcgtttttatttcgttatttggcgcgttcgcgtagtcgggttgtaggtgtttttttattattttacgtacgtttgtttttttcgtttgttcgtttt

SEQ ID NO: 7380 - DNA, 548 bp, Artificial Sequence
  chemically treated genomic DNA (Homo sapiens) CpG-island No: 7380
aaaacgaacaaacgaaaaaaacaaacgtacgtaaaataataaaaaaacacctacaacccgactacgcgaacgcgccaaataacgaaataaaaacgcgccgttaaaaacacgaactataaaaaaacacgaataaaaaaaacaaaaaccgaaatacgcaacgatttataataactaaccacctaacacgacgacttaaaaaataacgataccgaaatacgccacataaccccacgataccccaccacgaaaaaacccgaaaaaaacaaaacgttaacaaacgaacgcgaaaaaaaactaccgacgaaaacaaaaaattacaaaaatattaaaaaaacttaataacgctataccgaacgaaaacgactaccgaatatacaaaaaaaaaaactaaacaaaataaaaaaactacgactaaacgaaaaccaaaaaaactatacaaaaaacgcgaccttaacccgtaaaacccgaaaccgaaccgacgtaaacctacacgtaacaaacataaacaaaaattactattaatttacacttacctataaaacgcaaaa

SEQ ID NO: 7381 - DNA, 890 bp, Artificial Sequence
  chemically treated genomic DNA (Homo sapiens) CpG-island No: 7381
gagtaaattgcgagtgttaatcggtggatttaaatggcgtcgggggagtgagtagtttttgcgcggacggggcggcggacgtcggtattaagaatttatgattagaggcgagcgtaagatagatttttgttcgatatttcgtgggtttatataatatgacgatatagtggatatatcgtcggcggtgtgacggttggtttgagagagggagagtgcggggaagcgcgacgcgattttgaaagattcggttttgcgtatgtatcgttggtttgggtgtttcgcgtgttttgacgtatttttgattatgtaatgtttggtataatttttttaaacgggcggtattaaagaataggttgtggattcggtttgtatcgtggtaaaggtggtttagcggagaggacgggaggggagtgaagggcgggggacggaagatatcgaataatatcgcggattgaagggcggtcgggggaatcgatatagcgacgcgtaagattataaaatcgtggtcgatcgtttgtacggcgatttggtttgatttaagaatgggttgagaaatgtttagcgaaaggagtagtaacgacgtaacgaacggaagtgaacgaaacgagttgtcgtaagcggacgtcgtagtggtttagcggaatagttaatatcggtagcgacgggatatttgtagaaaatacgttcggattaatcgtcgtttacgataaatacggttattcgggaacgaatacgagtagaaattaaaatcgagagtgggtaaattcgatatatagggtgattgcgagtgatgcgagcggaatggagggcgttgcgtttggaggtgatatttagttcgagtgttggaagagaattaacgataatggattttttgtaacgtgtcgatagaa

SEQ ID NO: 7382 - DNA, 890 bp, Artificial Sequence
  chemically treated genomic DNA (Homo sapiens) CpG-island No: 7382
ttctatcgacacgttacaaaaaatccattatcgttaattctcttccaacactcgaactaaatatcacctccaaacgcaacgccctccattccgctcgcatcactcgcaatcaccctatatatcgaatttacccactctcgattttaatttctactcgtattcgttcccgaataaccgtatttatcgtaaacgacgattaatccgaacgtattttctacaaatatcccgtcgctaccgatattaactattccgctaaaccactacgacgtccgcttacgacaactcgtttcgttcacttccgttcgttacgtcgttactactcctttcgctaaacatttctcaacccattcttaaatcaaaccaaatcgccgtacaaacgatcgaccacgattttataatcttacgcgtcgctatatcgattcccccgaccgcccttcaatccgcgatattattcgatatcttccgtcccccgcccttcactcccctcccgtcctctccgctaaaccacctttaccacgatacaaaccgaatccacaacctattctttaataccgcccgtttaaaaaaattataccaaacattacataatcaaaaatacgtcaaaacacgcgaaacacccaaaccaacgatacatacgcaaaaccgaatctttcaaaatcgcgtcgcgcttccccgcactctccctctctcaaaccaaccgtcacaccgccgacgatatatccactatatcgtcatattatataaacccacgaaatatcgaacaaaaatctatcttacgctcgcctctaatcataaattcttaataccgacgtccgccgccccgtccgcgcaaaaactactcactcccccgacgccatttaaatccaccgattaacactcgcaatttactc

SEQ ID NO: 7383 - DNA, 890 bp, Artificial Sequence
  chemically treated genomic DNA (Homo sapiens) CpG-island No: 7383
ttttatcgatacgttataaggggtttattgtcgttagtttttttttaatattcgggttaaatgttatttttaagcgtaacgttttttatttcgttcgtattattcgtaattattttgtatgtcgggtttgtttattttcggttttaatttttattcgtgttcgttttcgggtggtcgtgtttgtcgtgagcggcggttaattcgagcgtattttttataggtgtttcgtcgttgtcggtattagttatttcgttagattattgcggcgttcgtttgcggtaattcgtttcgtttattttcgttcgttacgtcgttattgtttttttcgttgggtattttttagtttatttttaggttaggttaggtcgtcgtgtaggcggtcgattacggttttgtggttttgcgcgtcgttatgtcggttttttcggtcgttttttagttcgcggtgttattcggtatttttcgtttttcgttttttatttttttttcgtttttttcgttgggttatttttattacggtataagtcgggtttatagtttattttttggtatcgttcgtttaagggggttatgttaggtattgtatggttaagggtgcgttagggtacgcggggtatttaggttagcggtatatgcgtaaggtcgggttttttaaggtcgcgtcgcgttttttcgtatttttttttttttaaattagtcgttatatcgtcggcggtgtatttattatatcgttatattgtataggtttacggggtatcgggtaaaagtttgttttacgttcgtttttagttatgggtttttagtgtcggcgttcgtcgtttcgttcgcgtaggggttgtttattttttcggcgttatttaagtttatcggttggtattcgtagtttgttt

SEQ ID NO: 7384 - DNA, 890 bp, Artificial Sequence
  chemically treated genomic DNA (Homo sapiens) CpG-island No: 7384
aaacaaactacgaataccaaccgataaacttaaataacgccgaaaaaataaacaacccctacgcgaacgaaacgacgaacgccgacactaaaaacccataactaaaaacgaacgtaaaacaaacttttacccgataccccgtaaacctatacaatataacgatataataaatacaccgccgacgatataacgactaatttaaaaaaaaaaaaatacgaaaaaacgcgacgcgaccttaaaaaacccgaccttacgcatataccgctaacctaaataccccgcgtaccctaacgcacccttaaccatacaatacctaacataacccccttaaacgaacgataccaaaaaataaactataaacccgacttataccgtaataaaaataacccaacgaaaaaaacgaaaaaaaaataaaaaacgaaaaacgaaaaataccgaataacaccgcgaactaaaaaacgaccgaaaaaaccgacataacgacgcgcaaaaccacaaaaccgtaatcgaccgcctacacgacgacctaacctaacctaaaaataaactaaaaaatacccaacgaaaaaaacaataacgacgtaacgaacgaaaataaacgaaacgaattaccgcaaacgaacgccgcaataatctaacgaaataactaataccgacaacgacgaaacacctataaaaaatacgctcgaattaaccgccgctcacgacaaacacgaccacccgaaaacgaacacgaataaaaattaaaaccgaaaataaacaaacccgacatacaaaataattacgaataatacgaacgaaataaaaaacgttacgcttaaaaataacatttaacccgaatattaaaaaaaaactaacgacaataaaccccttataacgtatcgataaaa

SEQ ID NO: 7385 - DNA, 788 bp, Artificial Sequence
  chemically treated genomic DNA (Homo sapiens) CpG-island No: 7385
tttaggcgttaggcggagcgttgagggaggttttcgtcggtcgaatagcggggagattcgtgaagtaggcgtatcggttacgcgttcggagggatagggatagggatcggtaggggtgggttcgtcgttaattcgtcgggtatttcgcggattcgggtttagttagcgatttttttcgtttttttcgcgttttgtttcgcgtttcgtcgtttttttttcgcgtttcgtcgtttttttttcgcgtttcgttttttttttttcgtgtttcgttttttttttttcgtgttttaggtttttagttttttatttgacgggcgtagggaaggggcgggtgtcgcgtttttttttcggttcgtagttttttattcgcggttcgagcgcgttgtatttggggttttggggtcgtttttatttttgcgtcgtcgttattattattgtcgtcggtttagtttttttaggatcgaaagtgaaagtggagttcggggagcggtaggttggcgttgagcggcgtttcggttcgagttttagcggtaggcggggaagtttttggttaaggcgggagttggggaaagggtaaacgggagtggggtcgagcgagggaagtcgtaatttttaggaagggaattggtaaatgagcgttgtacgtcggggaagttgcgaggttgcgatgtgggggattaggcgtaggaagtgtacgtttttttgaacgcggattcgtgtgtgtgtgtgtgtgtgtgtgtgtgtgtgtgtgtgtgtgtgtgtgtgtgtgtgtgtgtgttgagatgttt

SEQ ID NO: 7386 - DNA, 788 bp, Artificial Sequence
  chemically treated genomic DNA (Homo sapiens) CpG-island No: 7386
aaacatctcaacacacacacacacacacacacacacacacacacacacacacacacacacacacacacacacgaatccgcgttcaaaaaaacgtacacttcctacgcctaatcccccacatcgcaacctcgcaacttccccgacgtacaacgctcatttaccaattcccttcctaaaaattacgacttccctcgctcgaccccactcccgtttaccctttccccaactcccgccttaaccaaaaacttccccgcctaccgctaaaactcgaaccgaaacgccgctcaacgccaacctaccgctccccgaactccactttcactttcgatcctaaaaaaactaaaccgacgacaataataataacgacgacgcaaaaataaaaacgaccccaaaaccccaaatacaacgcgctcgaaccgcgaataaaaaactacgaaccgaaaaaaaaacgcgacacccgccccttccctacgcccgtcaaataaaaaactaaaaacctaaaacacgaaaaaaaaaaaacgaaacacgaaaaaaaaaaaacgaaacgcgaaaaaaaaacgacgaaacgcgaaaaaaaaacgacgaaacgcgaaacaaaacgcgaaaaaaacgaaaaaaatcgctaactaaacccgaatccgcgaaatacccgacgaattaacgacgaacccacccctaccgatccctatccctatccctccgaacgcgtaaccgatacgcctacttcacgaatctccccgctattcgaccgacgaaaacctccctcaacgctccgcctaacgcctaaa

SEQ ID NO: 7387 - DNA, 788 bp, Artificial Sequence
  chemically treated genomic DNA (Homo sapiens) CpG-island No: 7387
aagtattttaatatatatatatatatatatatatatatatatatatatatatatatatatatatatatatacggattcgcgtttagaaaggcgtgtattttttacgtttgattttttatatcgtaatttcgtagttttttcggcgtgtagcgtttatttattaattttttttttgggagttgcggtttttttcgttcggttttattttcgtttattttttttttagttttcgttttagttaggggttttttcgtttgtcgttagggttcgggtcgaagcgtcgtttagcgttagtttgtcgtttttcgggttttatttttattttcggttttgggggagttaggtcggcggtagtggtggtggcggcggcgtaagggtgagggcggttttagaattttaggtatagcgcgttcgagtcgcgggtaggggattgcgggtcgggaggagagcgcggtattcgttttttttttgcgttcgttaagtggggggttgagggtttggggtacgggaggagggagacggggtacgggaggagggagacggggcgcgggaggaaggcgacggggcgcgggaggaaggcgacggggcgcgagatagggcgcgggaagggcggggggagtcgttggttaggttcgagttcgcggggtgttcggcgggttggcggcgggtttatttttgtcggtttttgtttttgttttttcgggcgcgtggtcggtgcgtttgttttacgggttttttcgttgttcggtcggcgggagttttttttagcgtttcgtttggcgtttgga

SEQ ID NO: 7388 - DNA, 788 bp, Artificial Sequence
  chemically treated genomic DNA (Homo sapiens) CpG-island No: 7388
tccaaacgccaaacgaaacgctaaaaaaaactcccgccgaccgaacaacgaaaaaacccgtaaaacaaacgcaccgaccacgcgcccgaaaaaacaaaaacaaaaaccgacaaaaataaacccgccgccaacccgccgaacaccccgcgaactcgaacctaaccaacgactccccccgcccttcccgcgccctatctcgcgccccgtcgccttcctcccgcgccccgtcgccttcctcccgcgccccgtctccctcctcccgtaccccgtctccctcctcccgtaccccaaaccctcaaccccccacttaacgaacgcaaaaaaaaaacgaataccgcgctctcctcccgacccgcaatcccctacccgcgactcgaacgcgctatacctaaaattctaaaaccgccctcacccttacgccgccgccaccaccactaccgccgacctaactcccccaaaaccgaaaataaaaataaaacccgaaaaacgacaaactaacgctaaacgacgcttcgacccgaaccctaacgacaaacgaaaaaacccctaactaaaacgaaaactaaaaaaaaaataaacgaaaataaaaccgaacgaaaaaaaccgcaactcccaaaaaaaaaattaataaataaacgctacacgccgaaaaaactacgaaattacgatataaaaaatcaaacgtaaaaaatacacgcctttctaaacgcgaatccgtatatatatatatatatatatatatatatatatatatatatatatatatatatatatatattaaaatactt

SEQ ID NO: 7389 - DNA, 701 bp, Artificial Sequence
  chemically treated genomic DNA (Homo sapiens) CpG-island No: 7389
cgagggagcggtaatttgtaattagtcggcggtgcgtagtttatatagtacgtggttcgtattataggttgcgttattgagtgagttagtttttagatgttaggcgtatgacgagtttacggagcgggatttttttttttacgtatttcgggttttcggggcggggtcgtcgggtaggggggcggggagtattttgcgtcgttttttcgggatcgtttcgtttcgtcgtatttagagagttgggttggagttttaagcggaaatcgcgggagtcgagtttagttaggaatgtagattttttgaaaattaagtcgaggattgcggggttcggtgtttacgtagagtgagtattgtttttcgtcgttttgttttaggtcgcgcgtgttttcgggtttagggtttgtgttttcggttatttgttttgcgtgttcggggtttggtttttgtagcggattttttaggttcgggacgtgcgttttttttattatcgcgattttggcgatatcgtgcgttttgagtttaattgtgttttttggcgattttttttttttgtcggtaatattgttattgtttttttcgtcgggaaatgtatttggtgatcggacgcgtagggttataaaataagggatttgtgtggttcggtataagtggttcgagataagtggttcgagataagtggtttaaaagaaggaaagtagtag

SEQ ID NO: 7390 - DNA, 701 bp, Artificial Sequence
  chemically treated genomic DNA (Homo sapiens) CpG-island No: 7390
ctactactttccttcttttaaaccacttatctcgaaccacttatctcgaaccacttataccgaaccacacaaatcccttattttataaccctacgcgtccgatcaccaaatacatttcccgacgaaaaaaacaataacaatattaccgacaaaaaaaaaaaatcgccaaaaaacacaattaaactcaaaacgcacgatatcgccaaaatcgcgataataaaaaaaacgcacgtcccgaacctaaaaaatccgctacaaaaaccaaaccccgaacacgcaaaacaaataaccgaaaacacaaaccctaaacccgaaaacacgcgcgacctaaaacaaaacgacgaaaaacaatactcactctacgtaaacaccgaaccccgcaatcctcgacttaattttcaaaaaatctacattcctaactaaactcgactcccgcgatttccgcttaaaactccaacccaactctctaaatacgacgaaacgaaacgatcccgaaaaaacgacgcaaaatactccccgcccccctacccgacgaccccgccccgaaaacccgaaatacgtaaaaaaaaaaatcccgctccgtaaactcgtcatacgcctaacatctaaaaactaactcactcaataacgcaacctataatacgaaccacgtactatataaactacgcaccgccgactaattacaaattaccgctccctcg

SEQ ID NO: 7391 - DNA, 701 bp, Artificial Sequence
  chemically treated genomic DNA (Homo sapiens) CpG-island No: 7391
ttgttgtttttttttttttgggttatttgtttcgggttatttgtttcgggttatttgtatcgggttatataaattttttgttttgtaattttacgcgttcggttattagatatatttttcggcggaaggggtagtaatagtgttatcgataaggaggaggagtcgttaagaaatatagttaaatttagaacgtacggtatcgttagggtcgcgatagtaggaaaagcgtacgtttcgagtttggggagttcgttgtagggattaggtttcggatacgtagggtaggtagtcgggggtataggttttagattcgggagtacgcgcggtttggagtaaagcggcggaagatagtatttattttgcgtggatatcggatttcgtagttttcggtttggtttttaggaggtttgtatttttagttgggttcggttttcgcggttttcgtttggagttttagtttagttttttgagtgcgacggggcggggcggtttcgggaaggcgacgtaggatgtttttcgtttttttgttcggcggtttcgtttcgggagttcgggatgcgtggggagggaggtttcgtttcgtggattcgttatgcgtttggtatttggagattggtttatttaataacgtagtttgtgatgcggattacgtgttgtgtgggttgcgtatcgtcggttgattataggttatcgttttttcg

SEQ ID NO: 7392 - DNA, 701 bp, Artificial Sequence
  chemically treated genomic DNA (Homo sapiens) CpG-island No: 7392
cgaaaaaacgataacctataatcaaccgacgatacgcaacccacacaacacgtaatccgcatcacaaactacgttattaaataaaccaatctccaaataccaaacgcataacgaatccacgaaacgaaacctccctccccacgcatcccgaactcccgaaacgaaaccgccgaacaaaaaaacgaaaaacatcctacgtcgccttcccgaaaccgccccgccccgtcgcactcaaaaaactaaactaaaactccaaacgaaaaccgcgaaaaccgaacccaactaaaaatacaaacctcctaaaaaccaaaccgaaaactacgaaatccgatatccacgcaaaataaatactatcttccgccgctttactccaaaccgcgcgtactcccgaatctaaaacctatacccccgactacctaccctacgtatccgaaacctaatccctacaacgaactccccaaactcgaaacgtacgcttttcctactatcgcgaccctaacgataccgtacgttctaaatttaactatatttcttaacgactcctcctccttatcgataacactattactaccccttccgccgaaaaatatatctaataaccgaacgcgtaaaattacaaaacaaaaaatttatataacccgatacaaataacccgaaacaaataacccgaaacaaataacccaaaaaaaaaaaaacaacaa

SEQ ID NO: 7393 - DNA, 551 bp, Artificial Sequence
  chemically treated genomic DNA (Homo sapiens) CpG-island No: 7393
aagtaggagattggtaggtcggcgagagtaggtggttcgtcggtcgtatttcggttttttttttttcgttcgtttgtatttggacgacggttttcgcggcggtcggaggggagtattttttatattgttaattcgtattaatgggatttttttcgtgggaattgtttttttcggcggacgtgtttttcgggttcggcgtgggcgggcgggtgtcgcgaattttttgtagattttgggtcggtttagtgtttttttagcgttggggtcgagtttgtattattcgtcgtcgtcgtcgtcgagggggcgggggaggtgtcgcggggggcgggcgcggcgcgcggggaggggaaggggttttcgcgcgattgggcgaggttttcggtgttgtgattgaaattcgttaatatggcggcgatcggtcgcggtcgttttttgaagaattttcgagtacgaggtaagttcgttgtaatttttattttttatcgttcggcgttcgttatttttggtatttgtttttttttggttttgggttggggagcgagtcggggcgt

SEQ ID NO: 7394 - DNA, 551 bp, Artificial Sequence
  chemically treated genomic DNA (Homo sapiens) CpG-island No: 7394
acgccccgactcgctccccaacccaaaaccaaaaaaaaacaaataccaaaaataacgaacgccgaacgataaaaaataaaaattacaacgaacttacctcgtactcgaaaattcttcaaaaaacgaccgcgaccgatcgccgccatattaacgaatttcaatcacaacaccgaaaacctcgcccaatcgcgcgaaaaccccttcccctccccgcgcgccgcgcccgccccccgcgacacctcccccgccccctcgacgacgacgacgacgaataatacaaactcgaccccaacgctaaaaaaacactaaaccgacccaaaatctacaaaaaattcgcgacacccgcccgcccacgccgaacccgaaaaacacgtccgccgaaaaaaacaattcccacgaaaaaaatcccattaatacgaattaacaatataaaaaatactcccctccgaccgccgcgaaaaccgtcgtccaaatacaaacgaacgaaaaaaaaaaaaccgaaatacgaccgacgaaccacctactctcgccgacctaccaatctcctactt

SEQ ID NO: 7395 - DNA, 551 bp, Artificial Sequence
  chemically treated genomic DNA (Homo sapiens) CpG-island No: 7395
gcgtttcggttcgttttttaatttagggttaggggaaggtaagtgttaggggtggcgggcgtcgggcggtggggagtgagggttgtagcgggtttatttcgtattcggaggttttttagagagcggtcgcggtcgatcgtcgttatattgacgggttttagttataatatcggaaatttcgtttaatcgcgcgagaattttttttttttttcgcgcgtcgcgttcgtttttcgcggtatttttttcgttttttcggcggcgacggcggcgggtggtgtaggttcggttttagcgttgagggagtattgagtcgatttaaggtttgtaaggagttcgcggtattcgttcgtttacgtcggattcggagggtacgttcgtcgggaggggtagtttttacgaggaaagttttattgatgcgagttggtagtgtagaggatgttttttttcggtcgtcgcggaagtcgtcgtttaaatgtaggcgagcggggaggaggaggtcgggatgcggtcggcgggttatttgttttcgtcggtttgttagttttttgttt

SEQ ID NO: 7396 - DNA, 551 bp, Artificial Sequence
  chemically treated genomic DNA (Homo sapiens) CpG-island No: 7396
aaacaaaaaactaacaaaccgacgaaaacaaataacccgccgaccgcatcccgacctcctcctccccgctcgcctacatttaaacgacgacttccgcgacgaccgaaaaaaaacatcctctacactaccaactcgcatcaataaaactttcctcgtaaaaactacccctcccgacgaacgtaccctccgaatccgacgtaaacgaacgaataccgcgaactccttacaaaccttaaatcgactcaatactccctcaacgctaaaaccgaacctacaccacccgccgccgtcgccgccgaaaaaacgaaaaaaataccgcgaaaaacgaacgcgacgcgcgaaaaaaaaaaaaaattctcgcgcgattaaacgaaatttccgatattataactaaaacccgtcaatataacgacgatcgaccgcgaccgctctctaaaaaacctccgaatacgaaataaacccgctacaaccctcactccccaccgcccgacgcccgccacccctaacacttaccttcccctaaccctaaattaaaaaacgaaccgaaacgc

SEQ ID NO: 7397 - DNA, 667 bp, Artificial Sequence
  chemically treated genomic DNA (Homo sapiens) CpG-island No: 7397
ttcgtatcgttatcgtttttatttttcgtagtagcgtttttgacgttgcgcgatcgttgttaaggcgattggaatcgcggttcgaggtaattggagggtacggcggggcggggcgtttattttaggcggtttttgattggtttcggtcgtttttgcgttatagtttcgtttttgttcgggagtttcgtagcggtgatttgtttcgacgttcggcgtgatttagcggattaatggcggtcgttcgcggcgcgagggtgcggggatggggttcgttcgcggcgttgggcgcgttcgttagttaggggtcgttatgatcgagtggtttaggttcgagcgaagttcgcgcgcgtgagttcgtcgcggtttattcgttttttcgttcgttagagcgtttatcggacgtttattcgggagggtttcggcgtcgcgtcggcgggagttggttcggatcgcggtttaggggcgcgcgtcgggggaggcgggttcgggttcgggaggggcgggtcgggtcggggtttagagtttttcgcgagtttgatgtcgcgacggacggacggtagttgacgttcgcgggcgcgttgggggttgtgcgtttttttgatttattcgttggttttcgtcgttaggcgattttagtatttgtttaataggggggttaatttttcgg

SEQ ID NO: 7398 - DNA, 667 bp, Artificial Sequence
  chemically treated genomic DNA (Homo sapiens) CpG-island No: 7398
ccgaaaaattaacccccctattaaacaaatactaaaatcgcctaacgacgaaaaccaacgaataaatcaaaaaaacgcacaacccccaacgcgcccgcgaacgtcaactaccgtccgtccgtcgcgacatcaaactcgcgaaaaactctaaaccccgacccgacccgcccctcccgaacccgaacccgcctcccccgacgcgcgcccctaaaccgcgatccgaaccaactcccgccgacgcgacgccgaaaccctcccgaataaacgtccgataaacgctctaacgaacgaaaaaacgaataaaccgcgacgaactcacgcgcgcgaacttcgctcgaacctaaaccactcgatcataacgacccctaactaacgaacgcgcccaacgccgcgaacgaaccccatccccgcaccctcgcgccgcgaacgaccgccattaatccgctaaatcacgccgaacgtcgaaacaaatcaccgctacgaaactcccgaacaaaaacgaaactataacgcaaaaacgaccgaaaccaatcaaaaaccgcctaaaataaacgccccgccccgccgtaccctccaattacctcgaaccgcgattccaatcgccttaacaacgatcgcgcaacgtcaaaaacgctactacgaaaaataaaaacgataacgatacgaa

SEQ ID NO: 7399 - DNA, 667 bp, Artificial Sequence
  chemically treated genomic DNA (Homo sapiens) CpG-island No: 7399
tcggggaattagtttttttgttggataggtattagggtcgtttaacgacgggaattaacgggtgggttagagaggcgtatagtttttagcgcgttcgcgggcgttagttgtcgttcgttcgtcgcgatattagattcgcgaggggttttgaatttcggttcggttcgtttttttcgggttcgggttcgtttttttcgacgcgcgtttttggatcgcgattcgggttagttttcgtcgacgcggcgtcgagattttttcgggtgggcgttcgatggacgttttggcgggcggagggacggatgggtcgcggcggatttacgcgcgcgggtttcgttcgggtttgggttattcggttatggcgatttttggttggcgagcgcgtttaacgtcgcgggcggattttattttcgtattttcgcgtcgcgggcggtcgttattggttcgttggattacgtcgggcgtcgggataagttatcgttgcgggattttcgggtaggggcggggttgtgacgtagaggcggtcgaggttaattagaagtcgtttgggatgagcgtttcgtttcgtcgtgttttttagttatttcgggtcgcggttttagtcgttttggtaacggtcgcgtagcgttagggacgttgttgcggaaagtggagacggtggcggtgcggg

SEQ ID NO: 7400 - DNA, 667 bp, Artificial Sequence
  chemically treated genomic DNA (Homo sapiens) CpG-island No: 7400
cccgcaccgccaccgtctccactttccgcaacaacgtccctaacgctacgcgaccgttaccaaaacgactaaaaccgcgacccgaaataactaaaaaacacgacgaaacgaaacgctcatcccaaacgacttctaattaacctcgaccgcctctacgtcacaaccccgcccctacccgaaaatcccgcaacgataacttatcccgacgcccgacgtaatccaacgaaccaataacgaccgcccgcgacgcgaaaatacgaaaataaaatccgcccgcgacgttaaacgcgctcgccaaccaaaaatcgccataaccgaataacccaaacccgaacgaaacccgcgcgcgtaaatccgccgcgacccatccgtccctccgcccgccaaaacgtccatcgaacgcccacccgaaaaaatctcgacgccgcgtcgacgaaaactaacccgaatcgcgatccaaaaacgcgcgtcgaaaaaaacgaacccgaacccgaaaaaaacgaaccgaaccgaaattcaaaacccctcgcgaatctaatatcgcgacgaacgaacgacaactaacgcccgcgaacgcgctaaaaactatacgcctctctaacccacccgttaattcccgtcgttaaacgaccctaatacctatccaacaaaaaaactaattccccga

SEQ ID NO: 7401 - DNA, 804 bp, Artificial Sequence
  chemically treated genomic DNA (Homo sapiens) CpG-island No: 7401
gatcgtcgtcgttattgtatgtttaagggaattcggagttgttttaatttaggtttgacgttttttatagtgttttgtgtgaattggtaggggagaaacgacggttggggaacgaacggggttattcgttttattaatggtttagaagtatttttattatttgtttttagagttttcgatttaaatttttttttaagatcgacgcggtcgcgacgttgtaaaagttcgtttcggtttttttggttcgcggtcggcggttttttttgaaggcggcgtagtaggatcgggtttgttcgtttggggcgtttggtttttgtttcgcgtcgaggttcggttaggagtgcgtttgggagttttcggcgcggtttcggggataaaggttcgcgagtcgacgtgtagtagagtttatttaggttcgttcgattagaaaacgagaacgttcggaggcgggaggtcggaggtaggttgttggttggagaatcgcggtaacgacggcgtaaagtcggcgcggaaagggtaggcgtaggatttatttgacgtcgttttttttagtcggtttttttgattttttaagtttcgtattacggcggatttatagtttgagtaaaggttttattttagtcgcggatatggcggttgttttttttgcgtcgatcggagcgcgtcgaggggtttgttggagttcgtatttcggcggggattttcggcgtcggttagggggtcgttatatggttttggataagcgtttttttggttgacgggttggattattgggtatgttattaggggtagtgaattttaacg

SEQ ID NO: 7402 - DNA, 804 bp, Artificial Sequence
  chemically treated genomic DNA (Homo sapiens) CpG-island No: 7402
cgttaaaattcactacccctaataacatacccaataatccaacccgtcaaccaaaaaaacgcttatccaaaaccatataacgaccccctaaccgacgccgaaaatccccgccgaaatacgaactccaacaaacccctcgacgcgctccgatcgacgcaaaaaaaacaaccgccatatccgcgactaaaataaaacctttactcaaactataaatccgccgtaatacgaaacttaaaaaatcaaaaaaaccgactaaaaaaaacgacgtcaaataaatcctacgcctaccctttccgcgccgactttacgccgtcgttaccgcgattctccaaccaacaacctacctccgacctcccgcctccgaacgttctcgttttctaatcgaacgaacctaaataaactctactacacgtcgactcgcgaacctttatccccgaaaccgcgccgaaaactcccaaacgcactcctaaccgaacctcgacgcgaaacaaaaaccaaacgccccaaacgaacaaacccgatcctactacgccgccttcaaaaaaaaccgccgaccgcgaaccaaaaaaaccgaaacgaacttttacaacgtcgcgaccgcgtcgatcttaaaaaaaaatttaaatcgaaaactctaaaaacaaataataaaaatacttctaaaccattaataaaacgaataaccccgttcgttccccaaccgtcgtttctcccctaccaattcacacaaaacactataaaaaacgtcaaacctaaattaaaacaactccgaattcccttaaacatacaataacgacgacgatc

SEQ ID NO: 7403 - DNA, 804 bp, Artificial Sequence
  chemically treated genomic DNA (Homo sapiens) CpG-island No: 7403
cgttaaaatttattgtttttggtgatatgtttaatggtttaattcgttagttaggaaagcgtttgtttaggattatatggcggttttttggtcgacgtcggaagttttcgtcgggatacgagttttagtagatttttcggcgcgtttcggtcgacgtagggaaagtagtcgttatgttcgcggttgaggtgaggtttttgtttagattgtgggttcgtcgtagtgcggggtttggggggttaggagagtcggttgggagaggcggcgttaggtgggttttgcgtttgtttttttcgcgtcggttttgcgtcgtcgttgtcgcggttttttagttagtagtttgttttcggtttttcgttttcgggcgttttcgttttttggtcggacgggtttgggtgaattttgttgtacgtcggttcgcgggtttttgttttcgaggtcgcgtcgggagtttttaagcgtatttttggtcggatttcggcgcgggataaaagttaaacgttttaggcgggtagattcgattttgttgcgtcgtttttaagggggatcgtcggtcgcgagttagggaggtcgggacgagtttttgtagcgtcgcggtcgcgtcggttttgaggagaaatttgggtcgggagttttggaagtaggtgataaggatgtttttgagttattgatgggacgaataatttcgttcgttttttagtcgtcgttttttttttgttagtttatataaagtattgtgaaggacgttagatttgggttggaatagtttcgggtttttttaaatatgtagtgacggcggcggtt

SEQ ID NO: 7404 - DNA, 804 bp, Artificial Sequence
  chemically treated genomic DNA (Homo sapiens) CpG-island No: 7404
aaccgccgccgtcactacatatttaaaaaaacccgaaactattccaacccaaatctaacgtccttcacaatactttatataaactaacaaaaaaaaaacgacgactaaaaaacgaacgaaattattcgtcccatcaataactcaaaaacatccttatcacctacttccaaaactcccgacccaaatttctcctcaaaaccgacgcgaccgcgacgctacaaaaactcgtcccgacctccctaactcgcgaccgacgatcccccttaaaaacgacgcaacaaaatcgaatctacccgcctaaaacgtttaacttttatcccgcgccgaaatccgaccaaaaatacgcttaaaaactcccgacgcgacctcgaaaacaaaaacccgcgaaccgacgtacaacaaaattcacccaaacccgtccgaccaaaaaacgaaaacgcccgaaaacgaaaaaccgaaaacaaactactaactaaaaaaccgcgacaacgacgacgcaaaaccgacgcgaaaaaaacaaacgcaaaacccacctaacgccgcctctcccaaccgactctcctaaccccccaaaccccgcactacgacgaacccacaatctaaacaaaaacctcacctcaaccgcgaacataacgactactttccctacgtcgaccgaaacgcgccgaaaaatctactaaaactcgtatcccgacgaaaacttccgacgtcgaccaaaaaaccgccatataatcctaaacaaacgctttcctaactaacgaattaaaccattaaacatatcaccaaaaacaataaattttaacg

SEQ ID NO: 7405 - DNA, 783 bp, Artificial Sequence
  chemically treated genomic DNA (Homo sapiens) CpG-island No: 7405
ttttttaatatttttaggcgtatttattatcgggttaatatcggcgttagtgttcgcgtatttttagtaggtcgtcgggtattattataattagtgtatttttatatatcgttttagtatatgttcgttattatgtatttattacgttaggtggttatagttagcgcgtcgtaatatatattattatttgtggtaaagagtaatttttcgtggttttagaggtatgattatttttcgtgtggtacgtcgtagtatatattagacgttattacgtaggtatacgttatttagcggtgttacgttttatttagtagttatattttagtgcggcgttcgttatatttcgtacgtattttaggatggcgttgtatacgtattacgtttatgtacgtatatttagtaggtaggttcgtatatatttattcgtttacgtttatatagtagtcgatttattttttttagataattcggttcgaagggttacgttttttatttggtgcgttttcggttatttttatttcgtacgtatcgaatttacgtaatagggtatttttttattttaattaatataattggtaattcgtatttagtgttatttacgttgtatacggtgtttataaatcggtattttttttagggcgtcgtgcgtatagttggtaaataattaattcgtttagggggcgttttttagatttataaaggtgtattaattcgtaacgtataataatattgcgttttaggattattcgacgttttttattataatataaggtatgtggttag

SEQ ID NO: 7406 - DNA, 783 bp, Artificial Sequence
  chemically treated genomic DNA (Homo sapiens) CpG-island No: 7406
ctaaccacataccttatattataataaaaaacgtcgaataatcctaaaacgcaatattattatacgttacgaattaatacacctttataaatctaaaaaacgccccctaaacgaattaattatttaccaactatacgcacgacgccctaaaaaaaataccgatttataaacaccgtatacaacgtaaataacactaaatacgaattaccaattatattaattaaaataaaaaaataccctattacgtaaattcgatacgtacgaaataaaaataaccgaaaacgcaccaaataaaaaacgtaacccttcgaaccgaattatctaaaaaaaataaatcgactactatataaacgtaaacgaataaatatatacgaacctacctactaaatatacgtacataaacgtaatacgtatacaacgccatcctaaaatacgtacgaaatataacgaacgccgcactaaaatataactactaaataaaacgtaacaccgctaaataacgtatacctacgtaataacgtctaatatatactacgacgtaccacacgaaaaataatcatacctctaaaaccacgaaaaattactctttaccacaaataataatatatattacgacgcgctaactataaccacctaacgtaataaatacataataacgaacatatactaaaacgatatataaaaatacactaattataataatacccgacgacctactaaaaatacgcgaacactaacgccgatattaacccgataataaatacgcctaaaaatattaaaaaa

SEQ ID NO: 7407 - DNA, 783 bp, Artificial Sequence
  chemically treated genomic DNA (Homo sapiens) CpG-island No: 7407
ttagttatatattttgtgttgtaatgaggggcgtcgaatggttttgaggcgtaatgttgttgtgcgttgcgaattgatatatttttgtgaatttggggggcgttttttgggcgggttggttgtttgttagttgtgcgtacggcgttttggggggaatatcgatttgtgaatatcgtgtgtagcgtgggtggtattgggtgcgggttgttaattgtgttggttgggatggaagggtgttttgttgcgtgggttcggtgcgtacgggatggggataatcggggacgtattaagtggggaacgtggtttttcgggtcggattgtttggagaaaatgggtcggttgttgtgtaggcgtgggcgaatgaatgtatgcgaatttgtttgttaaatgtgcgtgtatgggcgtgatacgtgtgtaacgttattttaggatacgtgcgggatatgacgggcgtcgtattggggtgtgattgttgggtgggacgtgatatcgttgggtggcgtgtgtttgcgtggtggcgtttgatgtgtgttgcgacgtgttatacgggaaatgattatgtttttggggttacgggagattgttttttgttatagatgataatgtgtgttgcgacgcgttggttgtggttatttgacgtggtgaatgtatggtggcggatatgtgttggggcgatgtgtggggatgtattggttgtgatgatgttcgacgatttgttggggatgcgcgggtattggcgtcgatgttggttcggtgatgaatgcgtttgggaatattagaggg

SEQ ID NO: 7408 - DNA, 783 bp, Artificial Sequence
  chemically treated genomic DNA (Homo sapiens) CpG-island No: 7408
ccctctaatattcccaaacgcattcatcaccgaaccaacatcgacgccaatacccgcgcatccccaacaaatcgtcgaacatcatcacaaccaatacatccccacacatcgccccaacacatatccgccaccatacattcaccacgtcaaataaccacaaccaacgcgtcgcaacacacattatcatctataacaaaaaacaatctcccgtaaccccaaaaacataatcatttcccgtataacacgtcgcaacacacatcaaacgccaccacgcaaacacacgccacccaacgatatcacgtcccacccaacaatcacaccccaatacgacgcccgtcatatcccgcacgtatcctaaaataacgttacacacgtatcacgcccatacacgcacatttaacaaacaaattcgcatacattcattcgcccacgcctacacaacaaccgacccattttctccaaacaatccgacccgaaaaaccacgttccccacttaatacgtccccgattatccccatcccgtacgcaccgaacccacgcaacaaaacacccttccatcccaaccaacacaattaacaacccgcacccaataccacccacgctacacacgatattcacaaatcgatattccccccaaaacgccgtacgcacaactaacaaacaaccaacccgcccaaaaaacgccccccaaattcacaaaaatatatcaattcgcaacgcacaacaacattacgcctcaaaaccattcgacgcccctcattacaacacaaaatatataactaa

SEQ ID NO: 7409 - DNA, 536 bp, Artificial Sequence
  chemically treated genomic DNA (Homo sapiens) CpG-island No: 7409
ggtttatttgcgttataaattggtggagcgtttgcgtattatcggggtcgttaattattattttaattatcgtggtggttggcgtgcgttaggcgttggtaaatgtcgttttaagtttttgttagttttgcggacgatgatattttagttcgaatatcgcggcggcgtgtttaaaatggacgttttgcggtattagatagaaacgtttacgttcgttttgcggcgttggtaatagcgagaaaatttgttcgtcgttgttgtttattataattaatattagcggcgtagaaatttgacgtaataacgttagcgcgttgagatcgtaaagtgcggagagatcgtttataatcgttagcgtcggtttgtcgtttgttcgttgaacgtcggcggcggtcgaaagtagttcgtcgatatcgttggttttacggttgttgtatatcgggtaattttgtcgaaagttgcgaaaggaatacgttgatgggtttggttgtagtttttgtttttagcgtttgtttagttaggtttagtttcgttgt

SEQ ID NO: 7410 - DNA, 536 bp, Artificial Sequence
  chemically treated genomic DNA (Homo sapiens) CpG-island No: 7410
acaacgaaactaaacctaactaaacaaacgctaaaaacaaaaactacaaccaaacccatcaacgtattcctttcgcaactttcgacaaaattacccgatatacaacaaccgtaaaaccaacgatatcgacgaactactttcgaccgccgccgacgttcaacgaacaaacgacaaaccgacgctaacgattataaacgatctctccgcactttacgatctcaacgcgctaacgttattacgtcaaatttctacgccgctaatattaattataataaacaacaacgacgaacaaattttctcgctattaccaacgccgcaaaacgaacgtaaacgtttctatctaataccgcaaaacgtccattttaaacacgccgccgcgatattcgaactaaaatatcatcgtccgcaaaactaacaaaaacttaaaacgacatttaccaacgcctaacgcacgccaaccaccacgataattaaaataataattaacgaccccgataatacgcaaacgctccaccaatttataacgcaaataaacc

SEQ ID NO: 7411 - DNA, 536 bp, Artificial Sequence
  chemically treated genomic DNA (Homo sapiens) CpG-island No: 7411
ataacggggttgggtttggttgagtaggcgttaaaaataagggttgtagttaggtttattaacgtgtttttttcgtaattttcggtagggttattcggtgtatagtaatcgtggggttagcggtatcgacgggttgttttcgatcgtcgtcggcgtttagcgggtaagcggtaaatcgacgttggcgattgtgggcgattttttcgtattttacgattttaacgcgttggcgttattgcgttaggtttttgcgtcgttggtattaattgtggtgaataataacggcgggtaaattttttcgttgttgttaacgtcgtaaagcgagcgtgagcgtttttatttgatgtcgtaaaacgtttattttgagtacgtcgtcgcgatgttcgagttgaaatattatcgttcgtaaaattggtaggaatttgaaacggtatttgttaacgtttggcgtacgttaattattacggtgattgaaatggtggttaacgatttcgatggtgcgtaaacgttttattaatttgtggcgtaggtaagtt

SEQ ID NO: 7412 - DNA, 536 bp, Artificial Sequence
  chemically treated genomic DNA (Homo sapiens) CpG-island No: 7412
aacttacctacgccacaaattaataaaacgtttacgcaccatcgaaatcgttaaccaccatttcaatcaccgtaataattaacgtacgccaaacgttaacaaataccgtttcaaattcctaccaattttacgaacgataatatttcaactcgaacatcgcgacgacgtactcaaaataaacgttttacgacatcaaataaaaacgctcacgctcgctttacgacgttaacaacaacgaaaaaatttacccgccgttattattcaccacaattaataccaacgacgcaaaaacctaacgcaataacgccaacgcgttaaaatcgtaaaatacgaaaaaatcgcccacaatcgccaacgtcgatttaccgcttacccgctaaacgccgacgacgatcgaaaacaacccgtcgataccgctaaccccacgattactatacaccgaataaccctaccgaaaattacgaaaaaaacacgttaataaacctaactacaacccttatttttaacgcctactcaaccaaacccaaccccgttat

SEQ ID NO: 7413 - DNA, 520 bp, Artificial Sequence
  chemically treated genomic DNA (Homo sapiens) CpG-island No: 7413
cgtaaattttggtttagtcgtatgacgtaattagttggtagcggcggttttatcgtcggttatttgttagtaaattattcggattttgttggcgttagagatttagtcgttgtgatatttgttattttttagtaggttttttagacggtttagttggttacgggcgttatttaaattattacgggttagcgagtattgaattaatattgttaggtattgaagttggggttgtggttgataagacgataagattttaatttcgttacgcgtcgacgtttcggttttatttagtcgcgcgttaggtttataatagttgcgtacgaatgcgtattagatgtttgttgttgtaggtcgagcgattttaatttttgacgttttattgtattttgacgttttaggtttagtaaacgtttcggggttgttattagtatattaacgtcgttacgtagttttattatttgcgggttaatatttatattattaaatattattagcgaacgaatgtttaggtatttgttgt

SEQ ID NO: 7414 - DNA, 520 bp, Artificial Sequence
  chemically treated genomic DNA (Homo sapiens) CpG-island No: 7414
acaacaaatacctaaacattcgttcgctaataatatttaataatataaatattaacccgcaaataataaaactacgtaacgacgttaatatactaataacaaccccgaaacgtttactaaacctaaaacgtcaaaatacaataaaacgtcaaaaattaaaatcgctcgacctacaacaacaaacatctaatacgcattcgtacgcaactattataaacctaacgcgcgactaaataaaaccgaaacgtcgacgcgtaacgaaattaaaatcttatcgtcttatcaaccacaaccccaacttcaatacctaacaatattaattcaatactcgctaacccgtaataatttaaataacgcccgtaaccaactaaaccgtctaaaaaacctactaaaaaataacaaatatcacaacgactaaatctctaacgccaacaaaatccgaataatttactaacaaataaccgacgataaaaccgccgctaccaactaattacgtcatacgactaaaccaaaatttacg

SEQ ID NO: 7415 - DNA, 520 bp, Artificial Sequence
  chemically treated genomic DNA (Homo sapiens) CpG-island No: 7415
atagtaaatatttgaatattcgttcgttggtggtgtttggtggtgtgagtattaattcgtagatgatgaaattgcgtggcggcgttgatgtgttggtggtaatttcgggacgtttgttggatttggaacgttagaatgtaatagagcgttaaaggttgaaatcgttcgatttgtaatagtaagtatttggtgcgtattcgtgcgtagttgttatgggtttggcgcgcggttggatgaagtcgaagcgtcggcgcgtagcgggattgaagttttgtcgttttattagttatagttttagttttagtgtttggtaatgttgatttaatgttcgttggttcgtggtgatttagataacgttcgtagttagttgaatcgtttggaaaatttgttggggaatggtaaatattatagcgattggatttttaacgttaataaagttcgggtgatttattggtaaatgatcggcgataaagtcgtcgttgttaattggttgcgttatacggttaaattagagtttgcg

SEQ ID NO: 7416 - DNA, 520 bp, Artificial Sequence
  chemically treated genomic DNA (Homo sapiens) CpG-island No: 7416
cgcaaactctaatttaaccgtataacgcaaccaattaacaacgacgactttatcgccgatcatttaccaataaatcacccgaactttattaacgttaaaaatccaatcgctataatatttaccattccccaacaaattttccaaacgattcaactaactacgaacgttatctaaatcaccacgaaccaacgaacattaaatcaacattaccaaacactaaaactaaaactataactaataaaacgacaaaacttcaatcccgctacgcgccgacgcttcgacttcatccaaccgcgcgccaaacccataacaactacgcacgaatacgcaccaaatacttactattacaaatcgaacgatttcaacctttaacgctctattacattctaacgttccaaatccaacaaacgtcccgaaattaccaccaacacatcaacgccgccacgcaatttcatcatctacgaattaatactcacaccaccaaacaccaccaacgaacgaatattcaaatatttactat

SEQ ID NO: 7417 - DNA, 539 bp, Artificial Sequence
  chemically treated genomic DNA (Homo sapiens) CpG-island No: 7417
  unsure (236)
gttttattcggcgttagagatattttcgatcgttttatttttttttcggatttttcgttattgtttttttttttcggtatgtagtttcggttcgggttttagtttcgttttcggtcgcggtttcggtttcgttgaattcgcgtattagtttataggcggcggagtcggcgtaggtttcggcgaagatttagtaaacggagtagggtcgtgtttttttcgggttcggtttttttcgngttcgacgcgtcgttatcgcgtcgtagggttattcgaatttttttaggttttagttgtttcggtcgcgcggtttcgtttcgtcggaattcgagggcggtcggaagcggttcgtgcggagttaggtcggggtaatgcggcgtcgacgcgcgtatttggatcgtaaaggggcgggaattcgtgatcgttatttagtgcgtaagatcggtcgaaggaaacgagggaaaaggtaaatcggcgtagtttatattttttttttttttcgtttttttggtattatgtaaaaggtaatatagaagaagcga

SEQ ID NO: 7418 - DNA, 539 bp, Artificial Sequence
  chemically treated genomic DNA (Homo sapiens) CpG-island No: 7418
  unsure (304)
tcgcttcttctatattaccttttacataataccaaaaaaacgaaaaaaaaaaaaaatataaactacgccgatttaccttttccctcgtttccttcgaccgatcttacgcactaaataacgatcacgaattcccgcccctttacgatccaaatacgcgcgtcgacgccgcattaccccgacctaactccgcacgaaccgcttccgaccgccctcgaattccgacgaaacgaaaccgcgcgaccgaaacaactaaaacctaaaaaaattcgaataaccctacgacgcgataacgacgcgtcgaacncgaaaaaaaccgaacccgaaaaaaacacgaccctactccgtttactaaatcttcgccgaaacctacgccgactccgccgcctataaactaatacgcgaattcaacgaaaccgaaaccgcgaccgaaaacgaaactaaaacccgaaccgaaactacataccgaaaaaaaaaaacaataacgaaaaatccgaaaaaaaaataaaacgatcgaaaatatctctaacgccgaataaaac

SEQ ID NO: 7419 - DNA, 539 bp, Artificial Sequence
  chemically treated genomic DNA (Homo sapiens) CpG-island No: 7419
  unsure (304)
tcgttttttttgtgttgttttttgtatgatattaaaaaagcgagagaggaggaggatgtgagttacgtcggtttgttttttttttcgtttttttcggtcggttttgcgtattggatgacgattacgggttttcgtttttttacggtttaaatgcgcgcgtcggcgtcgtattgtttcggtttggtttcgtacgggtcgttttcggtcgttttcgggtttcggcggggcggggtcgcgcggtcgaggtaattggagtttgaaagagttcgggtagttttgcggcgcggtggcggcgcgtcgggtncgggaggagtcgagttcggggaggatacggttttgtttcgtttgttgggttttcgtcggggtttgcgtcggtttcgtcgtttgtgggttggtgcgcgagtttagcgaggtcgaggtcgcggtcggggacggggttggggttcgaatcgaggttgtatgtcggaggaagagagtagtgacggggaattcgaggaggaggtgaggcggtcggaggtgtttttagcgtcgggtagggt

SEQ ID NO: 7420 - DNA, 539 bp, Artificial Sequence
  chemically treated genomic DNA (Homo sapiens) CpG-island No: 7420
  unsure (236)
accctacccgacgctaaaaacacctccgaccgcctcacctcctcctcgaattccccgtcactactctcttcctccgacatacaacctcgattcgaaccccaaccccgtccccgaccgcgacctcgacctcgctaaactcgcgcaccaacccacaaacgacgaaaccgacgcaaaccccgacgaaaacccaacaaacgaaacaaaaccgtatcctccccgaactcgactcctcccgnacccgacgcgccgccaccgcgccgcaaaactacccgaactctttcaaactccaattacctcgaccgcgcgaccccgccccgccgaaacccgaaaacgaccgaaaacgacccgtacgaaaccaaaccgaaacaatacgacgccgacgcgcgcatttaaaccgtaaaaaaacgaaaacccgtaatcgtcatccaatacgcaaaaccgaccgaaaaaaacgaaaaaaaaaacaaaccgacgtaactcacatcctcctcctctctcgcttttttaatatcatacaaaaaacaacacaaaaaaaacga

SEQ ID NO: 7421 - DNA, 645 bp, Artificial Sequence
  chemically treated genomic DNA (Homo sapiens) CpG-island No: 7421
gtggagttgtcgattcggagtcgtttttgtcggatttggtttgtcgtagaatcgagagttcgcgtttttttgagcggtttatcgtcgttttagtcgttatttatacgttcgcgatttatggtcgtcgttttgttggtgacgttgtgttatcgttgttgtttgtcgttagttggtaggagtggatttataaagggttgacgttgttgttgattggttgttcgtgtgcgttagttattttaacgtttgtcggcgattattttcggtttgtcggcggtagcgcgtcgtggggcgttgattaaaggcggagcggcgttggaatagttgggtcgtgttatttaggtggcgtttgataaaatcggtacgttgatcgtcggtaaatcgcgcgttatcgcgatttattcggtaacgggtattagtgaatttgaattgttgatattggcggcggcggtcgagtaaggcgcgacgtatttattggcgtaagttatcgtacgcgaagtataggttgttgaattcgttatttttatcgtcgaattatagcgggcgttggtcgggtttggtattgaagcgtaggttaacggtgagcgcgtattgatttgcgttgtcgggaaatatttcgttgatgtatttattggtttaattaacgaa

SEQ ID NO: 7422 - DNA, 645 bp, Artificial Sequence
  chemically treated genomic DNA (Homo sapiens) CpG-island No: 7422
ttcgttaattaaaccaataaatacatcaacgaaatatttcccgacaacgcaaatcaatacgcgctcaccgttaacctacgcttcaataccaaacccgaccaacgcccgctataattcgacgataaaaataacgaattcaacaacctatacttcgcgtacgataacttacgccaataaatacgtcgcgccttactcgaccgccgccgccaatatcaacaattcaaattcactaatacccgttaccgaataaatcgcgataacgcgcgatttaccgacgatcaacgtaccgattttatcaaacgccacctaaataacacgacccaactattccaacgccgctccgcctttaatcaacgccccacgacgcgctaccgccgacaaaccgaaaataatcgccgacaaacgttaaaataactaacgcacacgaacaaccaatcaacaacaacgtcaaccctttataaatccactcctaccaactaacgacaaacaacaacgataacacaacgtcaccaacaaaacgacgaccataaatcgcgaacgtataaataacgactaaaacgacgataaaccgctcaaaaaaacgcgaactctcgattctacgacaaaccaaatccgacaaaaacgactccgaatcgacaactccac

SEQ ID NO: 7423 - DNA, 645 bp, Artificial Sequence
  chemically treated genomic DNA (Homo sapiens) CpG-island No: 7423
ttcgttaattaaattagtaaatgtattagcgggatgtttttcggtagcgtaaattaatacgcgtttatcgttaatttgcgttttaatgttagattcgattagcgttcgttgtgattcggcggtgggaatggcgagtttagtaatttgtgtttcgcgtacgatggtttgcgttagtggatgcgtcgcgttttgttcgatcgtcgtcgttagtgttagtagtttagatttattaatattcgttgtcggatgaatcgcggtaacgcgcggtttatcgacggttagcgtatcggttttattaaacgttatttgagtaatacgatttagttgttttagcgtcgtttcgtttttaattaacgttttacgacgcgttgtcgtcgatagatcggaggtaatcgtcgataggcgttgagataattaacgtatacgggtagttaattagtagtagcgttagttttttataaatttatttttgttagttggcggtaaatagtagcggtggtatagcgttattagtagagcgacggttataaatcgcgggcgtatagataacggttgaaacggcgataaatcgtttaagggagcgcgagttttcggttttacgataggttagattcggtaagggcggtttcgggtcgataattttat

SEQ ID NO: 7424 - DNA, 645 bp, Artificial Sequence
  chemically treated genomic DNA (Homo sapiens) CpG-island No: 7424
ataaaattatcgacccgaaaccgcccttaccgaatctaacctatcgtaaaaccgaaaactcgcgctcccttaaacgatttatcgccgtttcaaccgttatctatacgcccgcgatttataaccgtcgctctactaataacgctataccaccgctactatttaccgccaactaacaaaaataaatttataaaaaactaacgctactactaattaactacccgtatacgttaattatctcaacgcctatcgacgattacctccgatctatcgacgacaacgcgtcgtaaaacgttaattaaaaacgaaacgacgctaaaacaactaaatcgtattactcaaataacgtttaataaaaccgatacgctaaccgtcgataaaccgcgcgttaccgcgattcatccgacaacgaatattaataaatctaaactactaacactaacgacgacgatcgaacaaaacgcgacgcatccactaacgcaaaccatcgtacgcgaaacacaaattactaaactcgccattcccaccgccgaatcacaacgaacgctaatcgaatctaacattaaaacgcaaattaacgataaacgcgtattaatttacgctaccgaaaaacatcccgctaatacatttactaatttaattaacgaa

SEQ ID NO: 7425 - DNA, 672 bp, Artificial Sequence
  chemically treated genomic DNA (Homo sapiens) CpG-island No: 7425
tgcgcgtcgatgttgtaacgtattagtgaattgaacgcgttgggcgttaaggggtgatttttatcggcgataatttacgcgtagcggcggtaatgtcggggagttggggttggagtttaaagcgggtttgtgtcggaagataaagttaaagcggtgatcgagttgaattaatatgcgtcgttggcgatggtcggtgacggtattaacgacgcgttagcgatgaaagttgtcgttatcgggattgtaatgggtagcggtatagacgtggcgttggaaatcgtcgacgtagtattaatttataattatttgcgcggtttggtgtaaatgattgaattggtacgcgttatttacgttaatattcgttagaatattattattgcgttggggttgaaagggatttttttcgttattacgttgttagggatgatcgggttgtggttggtagtgttggtagatacgggggcgacggtgttggtgatagcgaatgcgtaagatgtggcgtaggagataaggtaaatcgatcgtaatatgagcgcgatcggttttttcgtttttttggggagagggtagggtgaggggataaggggtatcgaggttaattagtttattaacgtttacgagttaatacgataggtagtatcgttttataataatcggttttagtataaatta

SEQ ID NO: 7426 - DNA, 672 bp, Artificial Sequence
  chemically treated genomic DNA (Homo sapiens) CpG-island No: 7426
taatttatactaaaaccgattattataaaacgatactacctatcgtattaactcgtaaacgttaataaactaattaacctcgataccccttatcccctcaccctaccctctccccaaaaaaacgaaaaaaccgatcgcgctcatattacgatcgatttaccttatctcctacgccacatcttacgcattcgctatcaccaacaccgtcgcccccgtatctaccaacactaccaaccacaacccgatcatccctaacaacgtaataacgaaaaaaatccctttcaaccccaacgcaataataatattctaacgaatattaacgtaaataacgcgtaccaattcaatcatttacaccaaaccgcgcaaataattataaattaatactacgtcgacgatttccaacgccacgtctataccgctacccattacaatcccgataacgacaactttcatcgctaacgcgtcgttaataccgtcaccgaccatcgccaacgacgcatattaattcaactcgatcaccgctttaactttatcttccgacacaaacccgctttaaactccaaccccaactccccgacattaccgccgctacgcgtaaattatcgccgataaaaatcaccccttaacgcccaacgcgttcaattcactaatacgttacaacatcgacgcgca

SEQ ID NO: 7427 - DNA, 672 bp, Artificial Sequence
  chemically treated genomic DNA (Homo sapiens) CpG-island No: 7427
tggtttgtattaggatcgattgttgtagaacgatgttgtttatcgtattgattcgtaagcgttgataggttgattggtttcgatgttttttgtttttttattttattttttttttagaggggcgaggggatcgatcgcgtttatgttgcgatcggtttgttttattttttgcgttatattttacgtattcgttgttattagtatcgtcgttttcgtatttgttagtattgttagttataattcggttatttttaatagcgtggtgacgaggaagattttttttagttttagcgtaatagtgatgttttggcggatattggcgtgagtggcgcgtgttagtttaattatttgtattaggtcgcgtaggtggttatgggttaatgttgcgtcggcggtttttagcgttacgtttgtgtcgttatttattgtaatttcgatggcggtagtttttatcgttggcgcgtcgttaatatcgttatcgattatcgttagcggcgtatgttgatttagttcggttatcgttttgattttatttttcggtataggttcgttttaaattttagttttagtttttcggtattgtcgtcgttgcgcgtggattatcgtcggtgaggattattttttgacgtttagcgcgtttagtttattgatgcgttgtagtatcggcgcgta

SEQ ID NO: 7428 - DNA, 672 bp, Artificial Sequence
  chemically treated genomic DNA (Homo sapiens) CpG-island No: 7428
tacgcgccgatactacaacgcatcaataaactaaacgcgctaaacgtcaaaaaataatcctcaccgacgataatccacgcgcaacgacgacaataccgaaaaactaaaactaaaatttaaaacgaacctataccgaaaaataaaatcaaaacgataaccgaactaaatcaacatacgccgctaacgataatcgataacgatattaacgacgcgccaacgataaaaactaccgccatcgaaattacaataaataacgacacaaacgtaacgctaaaaaccgccgacgcaacattaacccataaccacctacgcgacctaatacaaataattaaactaacacgcgccactcacgccaatatccgccaaaacatcactattacgctaaaactaaaaaaaatcttcctcgtcaccacgctattaaaaataaccgaattataactaacaatactaacaaatacgaaaacgacgatactaataacaacgaatacgtaaaatataacgcaaaaaataaaacaaaccgatcgcaacataaacgcgatcgatcccctcgcccctctaaaaaaaaaataaaataaaaaaacaaaaaacatcgaaaccaatcaacctatcaacgcttacgaatcaatacgataaacaacatcgttctacaacaatcgatcctaatacaaacca

SEQ ID NO: 7429 - DNA, 569 bp, Artificial Sequence
  chemically treated genomic DNA (Homo sapiens) CpG-island No: 7429
gcgtcgttgtttatcgtgattaggtgtaatacggcggttagtgttggaacgtggaattagtcgggtgacgtatggtatagttagaaagggattatggcgacgtggcggtagagtttggtggatatgtcgacgtgtggttgaagttattttcggaaatgtaataatattacggtgattttgcgtaattttgagtcgtatggcgttggatgttatagagcgtttgtaagttggtgggaggagagcgaggcgttggagtcggagtttcgttttattgaaatttcggtggtttacggtggtgtaggcggatcggattaggcggtggtcgcggcgtatgcgggtgagcgtaaaatagggtgatgaatgtatttttcgaggaatacgtggtaggttattaggtataatcgggattttcgattcgggagtagcggaatatataataagataggaacgcgaacggattaattttattaggtagtacgaacggatcgaaggttaaaaggggtattcgcgggaattcgagtgaggaattacgggtattataaaagggtatcggtatgaaatatattgcg

SEQ ID NO: 7430 - DNA, 569 bp, Artificial Sequence
  chemically treated genomic DNA (Homo sapiens) CpG-island No: 7430
cgcaatatatttcataccgatacccttttataatacccgtaattcctcactcgaattcccgcgaataccccttttaaccttcgatccgttcgtactacctaataaaattaatccgttcgcgttcctatcttattatatattccgctactcccgaatcgaaaatcccgattatacctaataacctaccacgtattcctcgaaaaatacattcatcaccctattttacgctcacccgcatacgccgcgaccaccgcctaatccgatccgcctacaccaccgtaaaccaccgaaatttcaataaaacgaaactccgactccaacgcctcgctctcctcccaccaacttacaaacgctctataacatccaacgccatacgactcaaaattacgcaaaatcaccgtaatattattacatttccgaaaataacttcaaccacacgtcgacatatccaccaaactctaccgccacgtcgccataatccctttctaactataccatacgtcacccgactaattccacgttccaacactaaccgccgtattacacctaatcacgataaacaacgacgc

SEQ ID NO: 7431 - DNA, 569 bp, Artificial Sequence
  chemically treated genomic DNA (Homo sapiens) CpG-island No: 7431
cgtaatatgttttatgtcggtatttttttgtggtgttcgtagttttttattcgggttttcgcgggtattttttttggttttcgattcgttcgtattgtttggtggagttagttcgttcgcgtttttgttttgttatgtgtttcgttattttcggatcgggaatttcggttgtatttggtgatttgttacgtatttttcgaggagtgtatttattattttgttttgcgtttattcgtatgcgtcgcgattatcgtttaattcggttcgtttgtattatcgtaaattatcggaattttaataaagcgagatttcggttttagcgtttcgttttttttttattagtttgtaaacgttttatggtatttagcgttatgcgatttaggattacgtaaaattatcgtgatattgttgtattttcgggaatggttttaattatacgtcggtatatttattagattttgtcgttacgtcgttatgatttttttttggttatgttatgcgttattcggttggttttacgttttagtattgatcgtcgtgttgtatttgattacgatgaataacggcgt

SEQ ID NO: 7432 - DNA, 569 bp, Artificial Sequence
  chemically treated genomic DNA (Homo sapiens) CpG-island No: 7432
acgccgttattcatcgtaatcaaatacaacacgacgatcaatactaaaacgtaaaaccaaccgaataacgcataacataaccaaaaaaaaatcataacgacgtaacgacaaaatctaataaatataccgacgtataattaaaaccattcccgaaaatacaacaatatcacgataattttacgtaatcctaaatcgcataacgctaaataccataaaacgtttacaaactaataaaaaaaaaacgaaacgctaaaaccgaaatctcgctttattaaaattccgataatttacgataatacaaacgaaccgaattaaacgataatcgcgacgcatacgaataaacgcaaaacaaaataataaatacactcctcgaaaaatacgtaacaaatcaccaaatacaaccgaaattcccgatccgaaaataacgaaacacataacaaaacaaaaacgcgaacgaactaactccaccaaacaatacgaacgaatcgaaaaccaaaaaaaatacccgcgaaaacccgaataaaaaactacgaacaccacaaaaaaataccgacataaaacatattacg

SEQ ID NO: 7433 - DNA, 550 bp, Artificial Sequence
  chemically treated genomic DNA (Homo sapiens) CpG-island No: 7433
tcggtgacgttggttagttagaaacggatttggcgattggcgtagcgtttggtggatatgtcgaatgtggttgaagttattttcggtatgaataatattacggtgattttgcgtaattttgagtcgttggcgttggatgttatagagcgttgtgtaaacgttggtgggaggagagcgaggcgttggagtcggagtttcgttttattgaaatttcggtggtttacggtggtgtagggcggatcggatttggcgggggtcgcggcgtattgcgggttgagcgaaaatagggttgttgattgtatttttacgtggaatacggggtcggattttaggttttattcgggttttcgtatttcgggagttgtcggataatataacggtagggcgttgaacggttatcgttcgaagtttgacggaatcggcggtcgtaacggggttaattagggtagtcgcgtgggggcgacgatggtattatatatacgagatatgcgagacggaagtatattgtatatatcgaaaaaatggcggtttaatagagggtgagaaatag

SEQ ID NO: 7434 - DNA, 550 bp, Artificial Sequence
  chemically treated genomic DNA (Homo sapiens) CpG-island No: 7434
ctatttctcaccctctattaaaccgccattttttcgatatatacaatatacttccgtctcgcatatctcgtatatataataccatcgtcgcccccacgcgactaccctaattaaccccgttacgaccgccgattccgtcaaacttcgaacgataaccgttcaacgccctaccgttatattatccgacaactcccgaaatacgaaaacccgaataaaacctaaaatccgaccccgtattccacgtaaaaatacaatcaacaaccctattttcgctcaacccgcaatacgccgcgacccccgccaaatccgatccgccctacaccaccgtaaaccaccgaaatttcaataaaacgaaactccgactccaacgcctcgctctcctcccaccaacgtttacacaacgctctataacatccaacgccaacgactcaaaattacgcaaaatcaccgtaatattattcataccgaaaataacttcaaccacattcgacatatccaccaaacgctacgccaatcgccaaatccgtttctaactaaccaacgtcaccga

SEQ ID NO: 7435 - DNA, 550 bp, Artificial Sequence
  chemically treated genomic DNA (Homo sapiens) CpG-island No: 7435
ttattttttattttttgttgaatcgttattttttcgatatatatagtgtgttttcgtttcgtatatttcgtgtgtgtggtgttatcgtcgtttttacgcggttgttttggttaatttcgttgcggtcgtcgatttcgttagatttcggacgatagtcgtttagcgttttgtcgttgtattgttcggtaattttcgagatacggaagttcgggtgagatttgaaattcgatttcgtattttacgtaggagtgtagttaataattttgttttcgtttaattcgtaatgcgtcgcgattttcgttaaattcggttcgttttgtattatcgtaaattatcggaattttaataaagcgagatttcggttttagcgtttcgttttttttttattagcgtttgtataacgttttatggtatttagcgttagcgatttaggattacgtaaaattatcgtgatattgtttatgtcgggaatggttttaattatattcggtatatttattagacgttgcgttagtcgttagattcgtttttggttagttagcgttatcgg

SEQ ID NO: 7436 - DNA, 550 bp, Artificial Sequence
  chemically treated genomic DNA (Homo sapiens) CpG-island No: 7436
ccgataacgctaactaaccaaaaacgaatctaacgactaacgcaacgtctaataaatataccgaatataattaaaaccattcccgacataaacaatatcacgataattttacgtaatcctaaatcgctaacgctaaataccataaaacgttatacaaacgctaataaaaaaaaaacgaaacgctaaaaccgaaatctcgctttattaaaattccgataatttacgataatacaaaacgaaccgaatttaacgaaaatcgcgacgcattacgaattaaacgaaaacaaaattattaactacactcctacgtaaaatacgaaatcgaatttcaaatctcacccgaacttccgtatctcgaaaattaccgaacaatacaacgacaaaacgctaaacgactatcgtccgaaatctaacgaaatcgacgaccgcaacgaaattaaccaaaacaaccgcgtaaaaacgacgataacaccacacacacgaaatatacgaaacgaaaacacactatatatatcgaaaaaataacgattcaacaaaaaataaaaaataa

SEQ ID NO: 7437 - DNA, 586 bp, Artificial Sequence
  chemically treated genomic DNA (Homo sapiens) CpG-island No: 7437
cgtcgttgtaatatatttataacgggtagggcgcgtttcgtgtttgggatttcgtattgtttgaagaagtagtgttggcgtttgaatatggttatgttatcgtagaattacgtattttgattatttgggaagcgtagttcggtgatttcgttaacggtgcgtaggtggttatcgattagtttattttttttggcgaatagaaatggggtcggatgtgtggtttggtgatgttgttgtcgtacggttacgaagggtaggggtcggagtatttttgtcgcgcgtttggaacgttatttgtaattttgtgttgagtaaaatatgtaggtttgcgtatcgtttatttcggtataggtttattatatgttgcgtcgttaggcgttgcgcgggatgcgtcgttcgttggtcgtgatgtcgtcgaaatttttgttgcgttattcgttggcggtttttagtttcgaagaattggcgaacggtatttttttgttagttatcggtgaaatcgacgagtttgattcgaagggcgtgaagcgcgtagtgatgtgttttggtaaggtttattacgatttgttggaatagcgtcgtaaga

SEQ ID NO: 7438 - DNA, 586 bp, Artificial Sequence
  chemically treated genomic DNA (Homo sapiens) CpG-island No: 7438
tcttacgacgctattccaacaaatcgtaataaaccttaccaaaacacatcactacgcgcttcacgcccttcgaatcaaactcgtcgatttcaccgataactaacaaaaaaataccgttcgccaattcttcgaaactaaaaaccgccaacgaataacgcaacaaaaatttcgacgacatcacgaccaacgaacgacgcatcccgcgcaacgcctaacgacgcaacatataataaacctataccgaaataaacgatacgcaaacctacatattttactcaacacaaaattacaaataacgttccaaacgcgcgacaaaaatactccgacccctacccttcgtaaccgtacgacaacaacatcaccaaaccacacatccgaccccatttctattcgccaaaaaaaataaactaatcgataaccacctacgcaccgttaacgaaatcaccgaactacgcttcccaaataatcaaaatacgtaattctacgataacataaccatattcaaacgccaacactacttcttcaaacaatacgaaatcccaaacacgaaacgcgccctacccgttataaatatattacaacgacg

SEQ ID NO: 7439 - DNA, 586 bp, Artificial Sequence
  chemically treated genomic DNA (Homo sapiens) CpG-island No: 7439
ttttacgacgttgttttagtaggtcgtaataaattttattagaatatattattacgcgttttacgtttttcggattaagttcgtcgattttatcgatggttggtaggaaggtgtcgttcgttagtttttcgaggttggaaatcgttagcggatgacgtagtagggatttcggcgatattacgattagcggacgacgtatttcgcgtagcgtttgacgacgtagtatgtggtaaatttgtgtcggggtagacggtacgtaaatttgtatgttttgtttagtataaagttgtagataacgttttagacgcgcggtaggagtgtttcggtttttgtttttcgtaatcgtgcggtagtaatattattagattatatattcggttttatttttgttcgttagaggagatgaattggtcgataattatttgcgtatcgttggcgaagttatcgaattgcgttttttagatggttagagtgcgtggttttgcggtggtataattatatttaaacgttagtattgtttttttagatagtacggagttttagatacggaacgcgttttgttcgttatggatatgttgtagcggcg

SEQ ID NO: 7440 - DNA, 586 bp, Artificial Sequence
  chemically treated genomic DNA (Homo sapiens) CpG-island No: 7440
cgccgctacaacatatccataacgaacaaaacgcgttccgtatctaaaactccgtactatctaaaaaaacaatactaacgtttaaatataattataccaccgcaaaaccacgcactctaaccatctaaaaaacgcaattcgataacttcgccaacgatacgcaaataattatcgaccaattcatctcctctaacgaacaaaaataaaaccgaatatataatctaataatattactaccgcacgattacgaaaaacaaaaaccgaaacactcctaccgcgcgtctaaaacgttatctacaactttatactaaacaaaacatacaaatttacgtaccgtctaccccgacacaaatttaccacatactacgtcgtcaaacgctacgcgaaatacgtcgtccgctaatcgtaatatcgccgaaatccctactacgtcatccgctaacgatttccaacctcgaaaaactaacgaacgacaccttcctaccaaccatcgataaaatcgacgaacttaatccgaaaaacgtaaaacgcgtaataatatattctaataaaatttattacgacctactaaaacaacgtcgtaaaa

SEQ ID NO: 7441 - DNA, 618 bp, Artificial Sequence
  chemically treated genomic DNA (Homo sapiens) CpG-island No: 7441
tattaacgcggtaaaattttgcgttagcgtattatgaaacgtttacgcgcgttgattaatcggtgtttgttagtttagttattgttgttagaaagtggcgagatttagttgattgtttattcgcggtattgttatcggatgcgttatttcgtggtatgaggttgcgagcgtttttagagtataagtcgttttatttttataatttaacgtggttggcgtatagtttagtgtcgtcgttattgtatcgaaaaaacgtttatacgatgacgttagcggcgcgttaattttacgtttaatggttcgcgttagtacgttttagttttgttgttgtatatttgttgttttagagtaattttgttatttcggtataaagcgtaggtattgcgttagtaggtttcgttacggttgtttcgttgttaaatcgttattcggaagcgttattgtaggtaagtcgtttaggtgtttatattcgcgatagtttattcgtaggtattcgtcgttttataaagcgtcgtttttttttatatcgatatcgtcgagcgttacgcgttttcgggagtaattttttttttgtttttgttaacgtaattttgcgagttgtacgtttaaatagttgaa

SEQ ID NO: 7442 - DNA, 618 bp, Artificial Sequence
  chemically treated genomic DNA (Homo sapiens) CpG-island No: 7442
ttcaactatttaaacgtacaactcgcaaaattacgttaacaaaaacaaaaaaaaaattactcccgaaaacgcgtaacgctcgacgatatcgatataaaaaaaaacgacgctttataaaacgacgaatacctacgaataaactatcgcgaatataaacacctaaacgacttacctacaataacgcttccgaataacgatttaacaacgaaacaaccgtaacgaaacctactaacgcaatacctacgctttataccgaaataacaaaattactctaaaacaacaaatatacaacaacaaaactaaaacgtactaacgcgaaccattaaacgtaaaattaacgcgccgctaacgtcatcgtataaacgttttttcgatacaataacgacgacactaaactatacgccaaccacgttaaattataaaaataaaacgacttatactctaaaaacgctcgcaacctcataccacgaaataacgcatccgataacaataccgcgaataaacaatcaactaaatctcgccactttctaacaacaataactaaactaacaaacaccgattaatcaacgcgcgtaaacgtttcataatacgctaacgcaaaattttaccgcgttaata

SEQ ID NO: 7443 - DNA, 618 bp, Artificial Sequence
  chemically treated genomic DNA (Homo sapiens) CpG-island No: 7443
tttaattatttgagcgtataattcgtaaggttacgttaataaaagtaggaaaaaggttgttttcggaggcgcgtgacgttcgacggtatcggtatgggggagaacggcgttttgtggggcggcgagtgtttgcgggtgaattatcgcgaatgtgagtatttgggcggtttgtttgtagtggcgttttcgggtggcgatttggtagcgaagtagtcgtggcgaaatttgttggcgtagtgtttgcgttttgtgtcggagtggtagaattattttgaaatagtaagtgtgtaatagtaaaattggagcgtgttggcgcgggttattgagcgtggaattaacgcgtcgttggcgttatcgtgtgggcgttttttcgatgtagtggcggcggtattgggttgtgcgttagttacgttaagttatgaaggtgaagcggtttgtgttttggaggcgttcgtagttttatgttacggagtgacgtattcggtgataatgtcgcgggtggataattaattggatttcgttattttttggtagtagtggttgaattggtaggtatcggttaattaacgcgcgtgggcgttttatgatgcgttggcgtagggttttgtcgcgttgatg

SEQ ID NO: 7444 - DNA, 618 bp, Artificial Sequence
  chemically treated genomic DNA (Homo sapiens) CpG-island No: 7444
catcaacgcgacaaaaccctacgccaacgcatcataaaacgcccacgcgcgttaattaaccgatacctaccaattcaaccactactaccaaaaaataacgaaatccaattaattatccacccgcgacattatcaccgaatacgtcactccgtaacataaaactacgaacgcctccaaaacacaaaccgcttcaccttcataacttaacgtaactaacgcacaacccaataccgccgccactacatcgaaaaaacgcccacacgataacgccaacgacgcgttaattccacgctcaataacccgcgccaacacgctccaattttactattacacacttactatttcaaaataattctaccactccgacacaaaacgcaaacactacgccaacaaatttcgccacgactacttcgctaccaaatcgccacccgaaaacgccactacaaacaaaccgcccaaatactcacattcgcgataattcacccgcaaacactcgccgccccacaaaacgccgttctcccccataccgataccgtcgaacgtcacgcgcctccgaaaacaacctttttcctacttttattaacgtaaccttacgaattatacgctcaaataattaaa

SEQ ID NO: 7445 - DNA, 637 bp, Artificial Sequence
  chemically treated genomic DNA (Homo sapiens) CpG-island No: 7445
cggtatcgaacgttcgcgcggtagcgtacgtcgttcgcgatcggaatcggaatgatgtcgacgtcgttttgcggtatcgtgtgcgtttgtttcgtgtcgagtagcgtttcgggtcgcgcgcgcgcgaggtttacggtgtcgtcgggttcgttcgcgtttacggcgggcggtgttttcgtgagcgcgagcgcgacgttcgcgaacgggttggtcgtatcgagcgcgattagcggcgcgattttcgcgcgaagcgtcgtgtcgttcggcgcgagcgcgcgcgtacgtacggcgacgacgagttcggtcggcgcgtgcgtgaggcgaaagcgttttgcgttgtcgggtaggacggggatgatcgttttgtcgatttggacggtgacgtgtagtttcgagggcgtgatttcggtcggcgtcgtgacgttgtttgcgacggagaagtcgtcgcggcggacgacggcgttcgcgtcgtcgatcgcggcgttcgcgcggtacgtttggacggcgatgcggtagtacgacggcgcgtttttttcgcgcgggacgagcgacgggtcgacgagttacgcgcgtgatatttgatcgtaatcgtgcggtataaaaaagatagatagagtgataatattcgtttgtattt

SEQ ID NO: 7446 - DNA, 637 bp, Artificial Sequence
  chemically treated genomic DNA (Homo sapiens) CpG-island No: 7446
aaatacaaacgaatattatcactctatctatcttttttataccgcacgattacgatcaaatatcacgcgcgtaactcgtcgacccgtcgctcgtcccgcgcgaaaaaaacgcgccgtcgtactaccgcatcgccgtccaaacgtaccgcgcgaacgccgcgatcgacgacgcgaacgccgtcgtccgccgcgacgacttctccgtcgcaaacaacgtcacgacgccgaccgaaatcacgccctcgaaactacacgtcaccgtccaaatcgacaaaacgatcatccccgtcctacccgacaacgcaaaacgctttcgcctcacgcacgcgccgaccgaactcgtcgtcgccgtacgtacgcgcgcgctcgcgccgaacgacacgacgcttcgcgcgaaaatcgcgccgctaatcgcgctcgatacgaccaacccgttcgcgaacgtcgcgctcgcgctcacgaaaacaccgcccgccgtaaacgcgaacgaacccgacgacaccgtaaacctcgcgcgcgcgcgacccgaaacgctactcgacacgaaacaaacgcacacgataccgcaaaacgacgtcgacatcattccgattccgatcgcgaacgacgtacgctaccgcgcgaacgttcgataccg

SEQ ID NO: 7447 - DNA, 637 bp, Artificial Sequence
  chemically treated genomic DNA (Homo sapiens) CpG-island No: 7447
agatgtagacgaatattattattttatttgttttttttatatcgtacgattgcgattagatgttacgcgcgtggttcgtcgattcgtcgttcgtttcgcgcggggagaacgcgtcgtcgtgttatcgtatcgtcgtttaggcgtatcgcgcgggcgtcgcggtcggcggcgcgagcgtcgtcgttcgtcgcggcgattttttcgtcgtaggtaacgttacggcgtcggtcggggttacgttttcggggttgtacgttatcgtttaagtcgataaggcgattattttcgttttgttcgatagcgtaggacgttttcgttttacgtacgcgtcggtcgggttcgtcgtcgtcgtgcgtgcgcgcgcgttcgcgtcggacggtacggcgtttcgcgcggagatcgcgtcgttggtcgcgttcgatgcggttaattcgttcgcgaacgtcgcgttcgcgtttacgaaggtatcgttcgtcgtagacgcgaacgagttcgacgatatcgtgagtttcgcgcgcgcgcggttcggggcgttgttcggtacggagtagacgtatacgatgtcgtaaggcgacgtcgatattatttcgatttcggtcgcgagcggcgtgcgttatcgcgcgagcgttcgatgtcg

SEQ ID NO: 7448 - DNA, 637 bp, Artificial Sequence
  chemically treated genomic DNA (Homo sapiens) CpG-island No: 7448
cgacatcgaacgctcgcgcgataacgcacgccgctcgcgaccgaaatcgaaataatatcgacgtcgccttacgacatcgtatacgtctactccgtaccgaacaacgccccgaaccgcgcgcgcgcgaaactcacgatatcgtcgaactcgttcgcgtctacgacgaacgataccttcgtaaacgcgaacgcgacgttcgcgaacgaattaaccgcatcgaacgcgaccaacgacgcgatctccgcgcgaaacgccgtaccgtccgacgcgaacgcgcgcgcacgcacgacgacgacgaacccgaccgacgcgtacgtaaaacgaaaacgtcctacgctatcgaacaaaacgaaaataatcgccttatcgacttaaacgataacgtacaaccccgaaaacgtaaccccgaccgacgccgtaacgttacctacgacgaaaaaatcgccgcgacgaacgacgacgctcgcgccgccgaccgcgacgcccgcgcgatacgcctaaacgacgatacgataacacgacgacgcgttctccccgcgcgaaacgaacgacgaatcgacgaaccacgcgcgtaacatctaatcgcaatcgtacgatataaaaaaaacaaataaaataataatattcgtctacatct

SEQ ID NO: 7449 - DNA, 727 bp, Artificial Sequence
  chemically treated genomic DNA (Homo sapiens) CpG-island No: 7449
tggtttgtcggtgacgcgtgcgtatgttgagcgggacgtgtcggggttgatacgcgaggtttcggtacgttaacgtcggtatgcgtattagacgcgtatacggggtttttgattttcgttgcggcgtttgcggttgagtattacgaagaatttattgattgacggcggtttagtgcgcggttgttaacggatcgatttggtacgtatcgacgttcgttggggacgtgtcgtttacgtcgttattgtagtattttcgattatattgcggtagtgttacggaatagtaaattatttgcgttgaagttatttattgcgtttgggcgttttgggttaaatcgcgttcggcgaagttgagcgagattattattttatatatatatgttttttacgcgtttgggtagaattaataatgacggggcgggaggcgatgatatttttacgtgaagtttgggtatgttgcgtaagcgagaacggattatggtgatgatgttatttcgtaatagttacggttcgcgtttacgttgcgaggtgggttttcggtgcgcgtcgggttacgtcggcgttagcgcgcgtttaatttgcgaatgcggggatattaggtattgtttttaagattcgaattagatatgaagtcgatttgtttcgattatagcgtatcgttattgtttgattggttaatttgtatttttataaaaagtggttattacgtattcgggtttattttaat

SEQ ID NO: 7450 - DNA, 727 bp, Artificial Sequence
  chemically treated genomic DNA (Homo sapiens) CpG-island No: 7450
attaaaataaacccgaatacgtaataaccactttttataaaaatacaaattaaccaatcaaacaataacgatacgctataatcgaaacaaatcgacttcatatctaattcgaatcttaaaaacaatacctaatatccccgcattcgcaaattaaacgcgcgctaacgccgacgtaacccgacgcgcaccgaaaacccacctcgcaacgtaaacgcgaaccgtaactattacgaaataacatcatcaccataatccgttctcgcttacgcaacatacccaaacttcacgtaaaaatatcatcgcctcccgccccgtcattattaattctacccaaacgcgtaaaaaacatatatatataaaataataatctcgctcaacttcgccgaacgcgatttaacccaaaacgcccaaacgcaataaataacttcaacgcaaataatttactattccgtaacactaccgcaatataatcgaaaatactacaataacgacgtaaacgacacgtccccaacgaacgtcgatacgtaccaaatcgatccgttaacaaccgcgcactaaaccgccgtcaatcaataaattcttcgtaatactcaaccgcaaacgccgcaacgaaaatcaaaaaccccgtatacgcgtctaatacgcataccgacgttaacgtaccgaaacctcgcgtatcaaccccgacacgtcccgctcaacatacgcacgcgtcaccgacaaacca

SEQ ID NO: 7451 - DNA, 727 bp, Artificial Sequence
  chemically treated genomic DNA (Homo sapiens) CpG-island No: 7451
gttgaggtaaattcgggtacgtgatgattattttttgtgaaggtataggttagttagttaggtagtaacgatgcgttataatcgggataggtcggttttatgtttggttcgggttttgggggtagtatttggtgttttcgtattcgtaagttgggcgcgcgttggcgtcggcgtagttcggcgcgtatcgaaggtttatttcgtagcgtagacgcgggtcgtggttgttgcggggtggtattattattataattcgttttcgtttgcgtaatatgtttaagttttacgtgggggtattatcgtttttcgtttcgttattattggttttgtttaagcgcgtgaagggtatgtgtatgtagggtaatggtttcgtttagtttcgtcgggcgcggtttggtttagaacgtttaggcgtaataggtggttttagcgtaaatggtttgttgtttcgtggtattgtcgtagtatggtcgggggtgttgtagtagcggcgtgggcggtacgtttttaacgggcgtcggtacgtgttaggtcggttcgttggtagtcgcgtattgggtcgtcgttagttaatgagtttttcgtggtatttagtcgtaggcgtcgtagcgggggttaggggtttcgtgtgcgcgtttggtacgtatgtcggcgttggcgtatcggggtttcgcgtgttagtttcggtacgtttcgtttagtatgcgtacgcgttatcggtaggtta

SEQ ID NO: 7452 - DNA, 727 bp, Artificial Sequence
  chemically treated genomic DNA (Homo sapiens) CpG-island No: 7452
taacctaccgataacgcgtacgcatactaaacgaaacgtaccgaaactaacacgcgaaaccccgatacgccaacgccgacatacgtaccaaacgcgcacacgaaacccctaacccccgctacgacgcctacgactaaataccacgaaaaactcattaactaacgacgacccaatacgcgactaccaacgaaccgacctaacacgtaccgacgcccgttaaaaacgtaccgcccacgccgctactacaacacccccgaccatactacgacaataccacgaaacaacaaaccatttacgctaaaaccacctattacgcctaaacgttctaaaccaaaccgcgcccgacgaaactaaacgaaaccattaccctacatacacatacccttcacgcgcttaaacaaaaccaataataacgaaacgaaaaacgataatacccccacgtaaaacttaaacatattacgcaaacgaaaacgaattataataataataccaccccgcaacaaccacgacccgcgtctacgctacgaaataaaccttcgatacgcgccgaactacgccgacgccaacgcgcgcccaacttacgaatacgaaaacaccaaatactacccccaaaacccgaaccaaacataaaaccgacctatcccgattataacgcatcgttactacctaactaactaacctataccttcacaaaaaataatcatcacgtacccgaatttacctcaac

SEQ ID NO: 7453 - DNA, 500 bp, Artificial Sequence
  chemically treated genomic DNA (Homo sapiens) CpG-island No: 7453
tacggtcgcgaatatttgaattgtaatgtttatttacgtgcgcgggcgtattttatgggggggggggggggggggcgcggggcgggaaattaaatcggttgtacgtttataaataggggtggtaaggtcgtaaatcgaaaaataaaaataggtggtgtttcgtttggcgggagaagaagttttgtttgggtggtagcgcgttaaagtaaaaacgtcgacgacgtatacgtgttgtttatcgggcgaagggttgttgttcgcgggaagtatttgcggggaaggtaaggcgttataaagagtatggacgattttaagttatgcggttcgaagggtgtttgggtatgtattatcgttgattaaaattttcgcgtttattacgtacgaatcgtgatttttcgcgcgcgtgattgatgtcgtgtttgatgtaggataattattttagtagtaatatagtgaattggatgataattgcggttcgatcgcgaagtaaatgagaagtg

SEQ ID NO: 7454 - DNA, 500 bp, Artificial Sequence
  chemically treated genomic DNA (Homo sapiens) CpG-island No: 7454
cacttctcatttacttcgcgatcgaaccgcaattatcatccaattcactatattactactaaaataattatcctacatcaaacacgacatcaatcacgcgcgcgaaaaatcacgattcgtacgtaataaacgcgaaaattttaatcaacgataatacatacccaaacacccttcgaaccgcataacttaaaatcgtccatactctttataacgccttaccttccccgcaaatacttcccgcgaacaacaacccttcgcccgataaacaacacgtatacgtcgtcgacgtttttactttaacgcgctaccacccaaacaaaacttcttctcccgccaaacgaaacaccacctatttttatttttcgatttacgaccttaccacccctatttataaacgtacaaccgatttaatttcccgccccgcgcccccccccccccccccccataaaatacgcccgcgcacgtaaataaacattacaattcaaatattcgcgaccgta

SEQ ID NO: 7455 - DNA, 500 bp, Artificial Sequence
  chemically treated genomic DNA (Homo sapiens) CpG-island No: 7455
tattttttatttatttcgcggtcgggtcgtaattattatttagtttattgtgttgttgttaaggtaattgttttgtattaagtacggtattagttacgcgcgcggggggttacggttcgtacgtggtaagcgcgggggttttggttagcggtagtgtatgtttaagtatttttcgagtcgtatggtttaaggtcgtttatattttttgtggcgttttatttttttcgtaggtgtttttcgcgggtagtagtttttcgttcggtgggtagtacgtatacgtcgtcggcgtttttgttttagcgcgttattatttaggtagggttttttttttcgttaagcggggtattatttgtttttatttttcggtttgcggttttgttatttttgtttatggacgtgtagtcggtttggtttttcgtttcgcgtttttttttttttttttttatagaatacgttcgcgtacgtgggtaagtattatagtttaagtgttcgcgatcgtg

SEQ ID NO: 7456 - DNA, 500 bp, Artificial Sequence
  chemically treated genomic DNA (Homo sapiens) CpG-island No: 7456
cacgatcgcgaacacttaaactataatacttacccacgtacgcgaacgtattctataaaaaaaaaaaaaaaaaaacgcgaaacgaaaaaccaaaccgactacacgtccataaacaaaaataacaaaaccgcaaaccgaaaaataaaaacaaataataccccgcttaacgaaaaaaaaaaccctacctaaataataacgcgctaaaacaaaaacgccgacgacgtatacgtactacccaccgaacgaaaaactactacccgcgaaaaacacctacgaaaaaaataaaacgccacaaaaaatataaacgaccttaaaccatacgactcgaaaaatacttaaacatacactaccgctaaccaaaacccccgcgcttaccacgtacgaaccgtaaccccccgcgcgcgtaactaataccgtacttaatacaaaacaattaccttaacaacaacacaataaactaaataataattacgacccgaccgcgaaataaataaaaaata

SEQ ID NO: 7457 - DNA, 520 bp, Artificial Sequence
  chemically treated genomic DNA (Homo sapiens) CpG-island No: 7457
tcgtcgttcgtcgtttcggtttttttatcgttatcgtcgtcgttttcgtgttggtcgtcggcgttgttagttttgagtcgtttaggggttcggtcgtttttattgtcgtcgtcgtagtagcggttatcgtcgttttcgtcgttcgtcgtcgttatttttattatcgttttcgatcgttttcgttgttcgttcggttgttgtttttgttttagtcgtcgacgtcgttttttcgttcggggtagtagttttcgcgatatggcggcgtagaattcgttttttttcgttttttattgggggagggatacgttcgttattcgtcgtttttattcgatagggggagttattggtttcgtcgcggggggagggtaggtcgttatacgttttgcgcgtttattggatattgtttacgtcgttttgtaggagggttcgtttttgtttgtttgagatattttttataggtggtcgttttttgttagttttttcgtcgatttcgtcgttttaaaataaaatttaatttgat

SEQ ID NO: 7458 - DNA, 520 bp, Artificial Sequence
  chemically treated genomic DNA (Homo sapiens) CpG-island No: 7458
atcaaattaaattttattttaaaacgacgaaatcgacgaaaaaactaacaaaaaacgaccacctataaaaaatatctcaaacaaacaaaaacgaaccctcctacaaaacgacgtaaacaatatccaataaacgcgcaaaacgtataacgacctaccctccccccgcgacgaaaccaataactccccctatcgaataaaaacgacgaataacgaacgtatccctcccccaataaaaaacgaaaaaaaacgaattctacgccgccatatcgcgaaaactactaccccgaacgaaaaaacgacgtcgacgactaaaacaaaaacaacaaccgaacgaacaacgaaaacgatcgaaaacgataataaaaataacgacgacgaacgacgaaaacgacgataaccgctactacgacgacgacaataaaaacgaccgaacccctaaacgactcaaaactaacaacgccgacgaccaacacgaaaacgacgacgataacgataaaaaaaccgaaacgacgaacgacga

SEQ ID NO: 7459 - DNA, 520 bp, Artificial Sequence
  chemically treated genomic DNA (Homo sapiens) CpG-island No: 7459
attaaattggattttattttaaggcggcggggtcgacggaaagattggtagaaagcgattatttataaggagtgttttagataaataagggcgggtttttttgtagaacggcgtgggtaatgtttaataagcgcgtaaggcgtgtggcggtttatttttttttcgcggcgggattagtggttttttttatcgggtgggggcggcgggtgacgggcgtgttttttttttaatgagaggcggggggaggcgggttttgcgtcgttatgtcgcggaggttgttgtttcgggcggagaagcggcgtcggcggttggagtagaggtagtagtcggacgagtagcggaggcggtcgggagcgatggtgaagatggcggcggcgggcggcggaggcggcggtggtcgttattacggcggcggtagtgagggcggtcgggtttttaagcggtttaagattgataacgtcggcgattagtacggaggcggcggcggtggcggtggaggagtcggggcggcgggcggcgg

SEQ ID NO: 7460 - DNA, 520 bp, Artificial Sequence
  chemically treated genomic DNA (Homo sapiens) CpG-island No: 7460
ccgccgcccgccgccccgactcctccaccgccaccgccgccgcctccgtactaatcgccgacgttatcaatcttaaaccgcttaaaaacccgaccgccctcactaccgccgccgtaataacgaccaccgccgcctccgccgcccgccgccgccatcttcaccatcgctcccgaccgcctccgctactcgtccgactactacctctactccaaccgccgacgccgcttctccgcccgaaacaacaacctccgcgacataacgacgcaaaacccgcctccccccgcctctcattaaaaaaaaaacacgcccgtcacccgccgcccccacccgataaaaaaaaccactaatcccgccgcgaaaaaaaaataaaccgccacacgccttacgcgcttattaaacattacccacgccgttctacaaaaaaacccgcccttatttatctaaaacactccttataaataatcgctttctaccaatctttccgtcgaccccgccgccttaaaataaaatccaatttaat

SEQ ID NO: 7461 - DNA, 594 bp, Artificial Sequence
  chemically treated genomic DNA (Homo sapiens) CpG-island No: 7461
ggcggggtcgtttcggtggtggtggtcggtggttgtttgaagacgttcgtttgtagcgtaggcgcggggaagttcgatagtattacgttttggttcgtttttttcgtcgttatgaacgttaggttttgcggggttttgggttgttgcgggagcgttttcggttcgttttggatggtgagcgtggcgttcgcgggcgtaaacggtttgggcgttagttggtagagtttgggcggtagtattttcgcgggtttgggttggatgggcgtgggtgtgcgatgtaggattacgttgggcgtcgggattagtggcgacgagtcgaggtttggggttatcgttagcggttgtttcgagggcgtttcggtgggagtcgaggcggttttcgcgttttcgaatatagagtttttattgagcgtggtggttatagcggtcgagaggtttttttggatgattaggttagttttttgtggcgagatatcggtcgacgttagcgttacgggtttcgaggggttagtcgtcgaggttaggtagtcgttgacgggtatttgtttggttaggagttgggaggtgggcgtgttgagcgttatgacgggttgg

SEQ ID NO: 7462 - DNA, 594 bp, Artificial Sequence
  chemically treated genomic DNA (Homo sapiens) CpG-island No: 7462
ccaacccgtcataacgctcaacacgcccacctcccaactcctaaccaaacaaatacccgtcaacgactacctaacctcgacgactaacccctcgaaacccgtaacgctaacgtcgaccgatatctcgccacaaaaaactaacctaatcatccaaaaaaacctctcgaccgctataaccaccacgctcaataaaaactctatattcgaaaacgcgaaaaccgcctcgactcccaccgaaacgccctcgaaacaaccgctaacgataaccccaaacctcgactcgtcgccactaatcccgacgcccaacgtaatcctacatcgcacacccacgcccatccaacccaaacccgcgaaaatactaccgcccaaactctaccaactaacgcccaaaccgtttacgcccgcgaacgccacgctcaccatccaaaacgaaccgaaaacgctcccgcaacaacccaaaaccccgcaaaacctaacgttcataacgacgaaaaaaacgaaccaaaacgtaatactatcgaacttccccgcgcctacgctacaaacgaacgtcttcaaacaaccaccgaccaccaccaccgaaacgaccccgcc

SEQ ID NO: 7463 - DNA, 594 bp, Artificial Sequence
  chemically treated genomic DNA (Homo sapiens) CpG-island No: 7463
ttagttcgttatggcgtttaatacgtttattttttagtttttggttaagtaggtgttcgttagcggttatttggtttcggcggttggtttttcggagttcgtgacgttggcgtcggtcggtgtttcgttatagggggttggtttggttatttagaagaatttttcggtcgttgtggttattacgtttaatgggaattttgtgttcggaggcgcgggggtcgtttcggtttttatcgggacgttttcgggatagtcgttggcggtggttttaggtttcggttcgtcgttattggtttcggcgtttaacgtgattttgtatcgtatatttacgtttatttagtttaagttcgcgggggtgttgtcgtttaagttttattagttgacgtttaagtcgtttgcgttcgcgggcgttacgtttattatttagggcgagtcgggggcgttttcgtagtagtttaaggtttcgtagaatttgacgtttatggcggcggggaaggcgggttagaacgtggtgttgtcgggttttttcgcgtttgcgttgtaagcgaacgtttttaagtagttatcggttattattatcggagcggtttcgtt

SEQ ID NO: 7464 - DNA, 594 bp, Artificial Sequence
  chemically treated genomic DNA (Homo sapiens) CpG-island No: 7464
aacgaaaccgctccgataataataaccgataactacttaaaaacgttcgcttacaacgcaaacgcgaaaaaacccgacaacaccacgttctaacccgccttccccgccgccataaacgtcaaattctacgaaaccttaaactactacgaaaacgcccccgactcgccctaaataataaacgtaacgcccgcgaacgcaaacgacttaaacgtcaactaataaaacttaaacgacaacacccccgcgaacttaaactaaataaacgtaaatatacgatacaaaatcacgttaaacgccgaaaccaataacgacgaaccgaaacctaaaaccaccgccaacgactatcccgaaaacgtcccgataaaaaccgaaacgacccccgcgcctccgaacacaaaattcccattaaacgtaataaccacaacgaccgaaaaattcttctaaataaccaaaccaaccccctataacgaaacaccgaccgacgccaacgtcacgaactccgaaaaaccaaccgccgaaaccaaataaccgctaacgaacacctacttaaccaaaaactaaaaaataaacgtattaaacgccataacgaactaa

SEQ ID NO: 7465 - DNA, 911 bp, Artificial Sequence
  chemically treated genomic DNA (Homo sapiens) CpG-island No: 7465
ttggtattttatatttggcgtaacgcggagtacgtttacgcgtacgtacgcgtgacgatttaacgtaacgttcgtattaaggttaacgttttattttagggtttttttttcgggtaatcggggaacggattttcgcgtttttttattcgtcgtttacgacgattggggacgacgatcgcgagcgttttatttgatttacgacgtgtacgtacgcgtgcgttacggttttcgttcgcgttttatacgtgtttaggacgattttacgcggattcgacggttatatttcgacgttgggtttttacgcgggatttataattatattgcgtattacgattgattacggatacgcgattggttggcgcggttgttgttgattgattgcgggatacgattgatcggttgatttcgatttattacggtatacgcgattcgttttcgataacggatttattggtacgaacgtattttttcgggttattacgttcgggattgtcggtaacgcgattcgattggacgaacggatcgattcgcggaacgattcgattggacgaacggattgtttgcggaacggatcgattcggcggacgcgattgattgcggaacgtttttcgattgttaacgcgattgattgcggtacggattgattgcgcgaacggattgattgcggatcggattgattgtggatacggattgattggaggatacggattgattgtggatacggattgattgggatacggattgattgaggatacgggtgattggacgatacgggtgattaggatacggattgattggaggatacggttgattggagatcggattgattgggatacggattgatatggggtacggtatgtttggagataaggacgtttgaatatacgagtcgttaggagtaataggtagat

SEQ ID NO: 7466 - DNA, 911 bp, Artificial Sequence
  chemically treated genomic DNA (Homo sapiens) CpG-island No: 7466
atctacctattactcctaacgactcgtatattcaaacgtccttatctccaaacataccgtaccccatatcaatccgtatcccaatcaatccgatctccaatcaaccgtatcctccaatcaatccgtatcctaatcacccgtatcgtccaatcacccgtatcctcaatcaatccgtatcccaatcaatccgtatccacaatcaatccgtatcctccaatcaatccgtatccacaatcaatccgatccgcaatcaatccgttcgcgcaatcaatccgtaccgcaatcaatcgcgttaacaatcgaaaaacgttccgcaatcaatcgcgtccgccgaatcgatccgttccgcaaacaatccgttcgtccaatcgaatcgttccgcgaatcgatccgttcgtccaatcgaatcgcgttaccgacaatcccgaacgtaataacccgaaaaaatacgttcgtaccaataaatccgttatcgaaaacgaatcgcgtataccgtaataaatcgaaatcaaccgatcaatcgtatcccgcaatcaatcaacaacaaccgcgccaaccaatcgcgtatccgtaatcaatcgtaatacgcaatataattataaatcccgcgtaaaaacccaacgtcgaaatataaccgtcgaatccgcgtaaaatcgtcctaaacacgtataaaacgcgaacgaaaaccgtaacgcacgcgtacgtacacgtcgtaaatcaaataaaacgctcgcgatcgtcgtccccaatcgtcgtaaacgacgaataaaaaaacgcgaaaatccgttccccgattacccgaaaaaaaaaccctaaaataaaacgttaaccttaatacgaacgttacgttaaatcgtcacgcgtacgtacgcgtaaacgtactccgcgttacgccaaatataaaataccaa

SEQ ID NO: 7467 - DNA, 911 bp, Artificial Sequence
  chemically treated genomic DNA (Homo sapiens) CpG-island No: 7467
gtttgtttgttgtttttggcggttcgtgtgtttaggcgtttttgtttttaggtatgtcgtgttttatgttagttcgtgttttagttagttcggtttttagttaatcgtgttttttagttagttcgtgttttagttattcgtgtcgtttagttattcgtgtttttagttagttcgtgttttagttagttcgtgtttatagttagttcgtgttttttagttagttcgtgtttatagttagttcggttcgtagttagttcgttcgcgtagttagttcgtgtcgtagttagtcgcgttggtagtcggagggcgtttcgtagttagtcgcgttcgtcgagtcggttcgtttcgtaggtagttcgttcgtttagtcgagtcgtttcgcgagtcgattcgttcgtttagtcgagtcgcgttgtcggtagtttcgagcgtagtggttcgagggagtgcgttcgtgttagtgagttcgttgtcggaggcgagtcgcgtgtgtcgtagtggatcggggttagtcggttagtcgtgtttcgtagttagttagtagtagtcgcgttagttagtcgcgtgttcgtagttagtcgtggtgcgtagtgtggttgtgagtttcgcgtagggatttagcgtcggggtgtgatcgtcgagttcgcgtggggtcgttttgggtacgtgtgggacgcgagcgagggtcgtggcgtacgcgtgcgtgtacgtcgtgggttaggtgggacgttcgcggtcgtcgtttttagtcgtcgtgggcggcgggtgaaagagcgcgaaggttcgtttttcggttgttcgagggaggggttttggaatggagcgttggttttggtgcgagcgttgcgttgggtcgttacgcgtgcgtgcgcgtgggcgtgtttcgcgttgcgttaggtgtggggtgttag

SEQ ID NO: 7468 - DNA, 911 bp, Artificial Sequence
  chemically treated genomic DNA (Homo sapiens) CpG-island No: 7468
ctaacaccccacacctaacgcaacgcgaaacacgcccacgcgcacgcacgcgtaacgacccaacgcaacgctcgcaccaaaaccaacgctccattccaaaacccctccctcgaacaaccgaaaaacgaaccttcgcgctctttcacccgccgcccacgacgactaaaaacgacgaccgcgaacgtcccacctaacccacgacgtacacgcacgcgtacgccacgaccctcgctcgcgtcccacacgtacccaaaacgaccccacgcgaactcgacgatcacaccccgacgctaaatccctacgcgaaactcacaaccacactacgcaccacgactaactacgaacacgcgactaactaacgcgactactactaactaactacgaaacacgactaaccgactaaccccgatccactacgacacacgcgactcgcctccgacaacgaactcactaacacgaacgcactccctcgaaccactacgctcgaaactaccgacaacgcgactcgactaaacgaacgaatcgactcgcgaaacgactcgactaaacgaacgaactacctacgaaacgaaccgactcgacgaacgcgactaactacgaaacgccctccgactaccaacgcgactaactacgacacgaactaactacgcgaacgaactaactacgaaccgaactaactataaacacgaactaactaaaaaacacgaactaactataaacacgaactaactaaaacacgaactaactaaaaacacgaataactaaacgacacgaataactaaaacacgaactaactaaaaaacacgattaactaaaaaccgaactaactaaaacacgaactaacataaaacacgacatacctaaaaacaaaaacgcctaaacacacgaaccgccaaaaacaacaaacaaac

SEQ ID NO: 7469 - DNA, 806 bp, Artificial Sequence
  chemically treated genomic DNA (Homo sapiens) CpG-island No: 7469
tcggtttggtttatgcgtattcgttttcgtttttttgcgtataattcgattcggatgtcgagtcgtatttggcgcgatgtgggtacgttggaaattttatggaaagcgaatttcgatttggttttattcgcgtgttatgtatgtttgtaggtttatcgttgttattgttagtagtaaggttagaagcgtcgaaagtagtaggaattgttgcgagcgttttatcgatcgttttagcgcgttttcgttttgttttagatcgtattagcgttgttcgggtttaagttgaggtaataattattttttatagtcgtcgagttggttttcgttgtcgtcgaatttataacgttaggtgattcgatttttcggttgtacggtttcggttttatcgatattcgttagatttattattagacgcggagttatttggaaggggttaaaatcggaattcggtttttgaattattttttcggtaattcgtaaggtggtatcgtttacgttaatggtgtcgttcgtttttaggttaagtagtgttattaggcgtggggttagtaatacgttgttcgtttgcggttttaggttagggggattagtttgtagatcgttatatatcgggtagatattatttatcgttttgacgttcgttagttgcggtgtgtcgtttgtaaaggttattgtggtaaaagttagttgtttgtcgatttttaggtcgcgtttttgcgttttttttagttacgtttgcgaaaagtataatggttattgcgtttattcgtttaattttataattcggaagatgttttattttagag

SEQ ID NO: 7470 - DNA, 806 bp, Artificial Sequence
  chemically treated genomic DNA (Homo sapiens) CpG-island No: 7470
ctctaaaataaaacatcttccgaattataaaattaaacgaataaacgcaataaccattatacttttcgcaaacgtaactaaaaaaaacgcaaaaacgcgacctaaaaatcgacaaacaactaacttttaccacaataacctttacaaacgacacaccgcaactaacgaacgtcaaaacgataaataatatctacccgatatataacgatctacaaactaatccccctaacctaaaaccgcaaacgaacaacgtattactaaccccacgcctaataacactacttaacctaaaaacgaacgacaccattaacgtaaacgataccaccttacgaattaccgaaaaaataattcaaaaaccgaattccgattttaaccccttccaaataactccgcgtctaataataaatctaacgaatatcgataaaaccgaaaccgtacaaccgaaaaatcgaatcacctaacgttataaattcgacgacaacgaaaaccaactcgacgactataaaaaataattattacctcaacttaaacccgaacaacgctaatacgatctaaaacaaaacgaaaacgcgctaaaacgatcgataaaacgctcgcaacaattcctactactttcgacgcttctaaccttactactaacaataacaacgataaacctacaaacatacataacacgcgaataaaaccaaatcgaaattcgctttccataaaatttccaacgtacccacatcgcgccaaatacgactcgacatccgaatcgaattatacgcaaaaaaacgaaaacgaatacgcataaaccaaaccga

SEQ ID NO: 7471 - DNA, 806 bp, Artificial Sequence
  chemically treated genomic DNA (Homo sapiens) CpG-island No: 7471
ttttgaagtgaaatatttttcgggttgtgaggttaagcgaataagcgtaatgattattgtgtttttcgtaagcgtggttggaggaagcgtaaaagcgcggtttgaaagtcggtaagtagttgatttttgttataatgatttttgtaggcgatatatcgtagttggcgaacgttaaagcggtggatgatatttattcgatgtatggcgatttgtaaattaatttttttggtttgaaatcgtaggcgggtagcgtattgttggttttacgtttgatggtattgtttaatttgaaaacgggcgatattattgacgtgggcgatgttattttgcggattgtcggagaagtgatttaggaatcggatttcggttttaattttttttagatggtttcgcgtttgatgatgaatttggcggatgtcgataaaatcggagtcgtgtagtcggggagtcgggttatttggcgttataaattcggcggtaacgagaattagttcgacggttatgagaaatggttgttattttagtttaaattcgaataacgttggtacggtttggaataggacgaaggcgcgttggggcgatcgatggaacgttcgtaatagtttttgttgttttcggcgtttttgattttgttgttggtagtggtagcggtggatttgtaggtatgtatgatacgcggataaggttagatcgaggttcgttttttataaagtttttagcgtatttatatcgcgttaagtacggttcggtattcgggtcggattgtacgtaagagagcgggaacgggtgcgtataggttagatcgg

SEQ ID NO: 7472 - DNA, 806 bp, Artificial Sequence
  chemically treated genomic DNA (Homo sapiens) CpG-island No: 7472
ccgatctaacctatacgcacccgttcccgctctcttacgtacaatccgacccgaataccgaaccgtacttaacgcgatataaatacgctaaaaactttataaaaaacgaacctcgatctaaccttatccgcgtatcatacatacctacaaatccaccgctaccactaccaacaacaaaatcaaaaacgccgaaaacaacaaaaactattacgaacgttccatcgatcgccccaacgcgccttcgtcctattccaaaccgtaccaacgttattcgaatttaaactaaaataacaaccatttctcataaccgtcgaactaattctcgttaccgccgaatttataacgccaaataacccgactccccgactacacgactccgattttatcgacatccgccaaattcatcatcaaacgcgaaaccatctaaaaaaaattaaaaccgaaatccgattcctaaatcacttctccgacaatccgcaaaataacatcgcccacgtcaataatatcgcccgttttcaaattaaacaataccatcaaacgtaaaaccaacaatacgctacccgcctacgatttcaaaccaaaaaaattaatttacaaatcgccatacatcgaataaatatcatccaccgctttaacgttcgccaactacgatatatcgcctacaaaaatcattataacaaaaatcaactacttaccgactttcaaaccgcgcttttacgcttcctccaaccacgcttacgaaaaacacaataatcattacgcttattcgcttaacctcacaacccgaaaaatatttcacttcaaaa

SEQ ID NO: 7473 - DNA, 872 bp, Artificial Sequence
  chemically treated genomic DNA (Homo sapiens) CpG-island No: 7473
ttgacgcgttgcgcgagaagattgtgtatcgtcgttttataggtttcgacgtcgtttcgttttattatcgatattattacgttggtatttagttgatcggcgcgagatttaatcgtcgtttgatgtaaatgcgtcgttaggaagtcgttgcgtcggaagatgtttggcgtgatattattaatgtttggtaattacgtatacgttaattggtttgtttgtaattgttagtcgattggcgattgcgtaaggcgcgagagcgcgatttggcggtgaattttgtcgtgcgtgaagagtatttgtgggcggtagcgcgttatatgtcgggaagtttaggcgaattggatagtttgggtttattcggtagcgaaattcgtttttacggtaaaacgttgtttgcgttggtggaaaaagcgtaaaaattgtcggaagatgttttacggtatcgatgtttaattgatggatatgcggggttatgcgttatgatgtaaagtattcggtcgatgcgtagttgaaagtcgtattgatttagtcgttaaatgtattgcgggaatgggtagtaaatcgtttagaattgtaggcgttatgtacgtaatatggcgagttggcgtaggtaggaatataacgattgttgtcggggtcgacgggtgaacgtaatatttggacgttgttgtcgcgtgagcgcgtgttgtgtattgtcgatgatgagtaggatgcgttgatttagttcgtcgtcgtgttggcggtgggtagttaggtattgtggtcggatgacgcgttgtatcgttagttagtgaaggtattgttatcggtagttagcgaacgtatttaattggcgaaagcggaaaatataatcgtttaatcgtttgatgcgg

SEQ ID NO: 7474 - DNA, 872 bp, Artificial Sequence
  chemically treated genomic DNA (Homo sapiens) CpG-island No: 7474
ccgcatcaaacgattaaacgattatattttccgctttcgccaattaaatacgttcgctaactaccgataacaataccttcactaactaacgatacaacgcgtcatccgaccacaatacctaactacccaccgccaacacgacgacgaactaaatcaacgcatcctactcatcatcgacaatacacaacacgcgctcacgcgacaacaacgtccaaatattacgttcacccgtcgaccccgacaacaatcgttatattcctacctacgccaactcgccatattacgtacataacgcctacaattctaaacgatttactacccattcccgcaatacatttaacgactaaatcaatacgactttcaactacgcatcgaccgaatactttacatcataacgcataaccccgcatatccatcaattaaacatcgataccgtaaaacatcttccgacaatttttacgctttttccaccaacgcaaacaacgttttaccgtaaaaacgaatttcgctaccgaataaacccaaactatccaattcgcctaaacttcccgacatataacgcgctaccgcccacaaatactcttcacgcacgacaaaattcaccgccaaatcgcgctctcgcgccttacgcaatcgccaatcgactaacaattacaaacaaaccaattaacgtatacgtaattaccaaacattaataatatcacgccaaacatcttccgacgcaacgacttcctaacgacgcatttacatcaaacgacgattaaatctcgcgccgatcaactaaataccaacgtaataatatcgataataaaacgaaacgacgtcgaaacctataaaacgacgatacacaatcttctcgcgcaacgcgtcaa

SEQ ID NO: 7475 - DNA, 872 bp, Artificial Sequence
  chemically treated genomic DNA (Homo sapiens) CpG-island No: 7475
tcgtattaaacggttgagcggttatatttttcgttttcgttagttgaatacgttcgttgattgtcgatggtaatgtttttattaattgacgatgtagcgcgttattcggttatagtatttggttgtttatcgttagtacggcggcgagttgagttagcgtattttgtttattatcggtaatatataatacgcgtttacgcggtagtagcgtttaggtgttgcgtttattcgtcggtttcggtagtaatcgttgtgtttttgtttgcgttagttcgttatattgcgtatataacgtttgtaattttggacgatttgttgtttattttcgtagtgtatttagcggttgagttaatgcggtttttaattgcgtatcgatcggatattttgtattatgacgtataatttcgtatgtttattagttaagtatcggtgtcgtaaggtatttttcggtaatttttgcgttttttttattagcgtaagtagcgttttatcgtgaaagcggatttcgttatcggataaatttaggttgtttagttcgtttaaatttttcggtatataacgcgttatcgtttataaatgttttttacgtacgataaagtttatcgttagatcgcgttttcgcgttttgcgtagtcgttagtcggttaatagttgtagataggttagttggcgtgtgcgtaattgttaggtattggtgatattacgttaggtatttttcggcgtaacgattttttgacgacgtatttgtattaggcggcgattaaatttcgcgtcgattaattgggtgttagcgtggtggtgtcgatggtagaacgaagcggcgtcgaagtttgtaaagcggcggtgtataattttttcgcgtaacgcgttag

SEQ ID NO: 7476 - DNA, 872 bp, Artificial Sequence
  chemically treated genomic DNA (Homo sapiens) CpG-island No: 7476
ctaacgcgttacgcgaaaaaattatacaccgccgctttacaaacttcgacgccgcttcgttctaccatcgacaccaccacgctaacacccaattaatcgacgcgaaatttaatcgccgcctaatacaaatacgtcgtcaaaaaatcgttacgccgaaaaatacctaacgtaatatcaccaatacctaacaattacgcacacgccaactaacctatctacaactattaaccgactaacgactacgcaaaacgcgaaaacgcgatctaacgataaactttatcgtacgtaaaaaacatttataaacgataacgcgttatataccgaaaaatttaaacgaactaaacaacctaaatttatccgataacgaaatccgctttcacgataaaacgctacttacgctaataaaaaaaacgcaaaaattaccgaaaaataccttacgacaccgatacttaactaataaacatacgaaattatacgtcataatacaaaatatccgatcgatacgcaattaaaaaccgcattaactcaaccgctaaatacactacgaaaataaacaacaaatcgtccaaaattacaaacgttatatacgcaatataacgaactaacgcaaacaaaaacacaacgattactaccgaaaccgacgaataaacgcaacacctaaacgctactaccgcgtaaacgcgtattatatattaccgataataaacaaaatacgctaactcaactcgccgccgtactaacgataaacaaccaaatactataaccgaataacgcgctacatcgtcaattaataaaaacattaccatcgacaatcaacgaacgtattcaactaacgaaaacgaaaaatataaccgctcaaccgtttaatacga

SEQ ID NO: 7477 - DNA, 644 bp, Artificial Sequence
  chemically treated genomic DNA (Homo sapiens) CpG-island No: 7477
tgcggatttcgtttgcgaacgggtgattgcgttcgtaatcgcgttgggtggagtaggttagcgttagtaaatagttttcgtcgtcgcgtattaattgttgtaaacgggaggagcgtgagtaggggtaaatcggcggcgtgcgggtgatgttattcggttgtgcgtcgttattttttttaaatttcgttagtttttgacgcgttagtaggttgaaaacgtgcggcgacggttgttgttcgttgtcggcggtggttagcgtcggcgtttcgtcgtttgttagtagggtaaaatcgagtaggcgatgggtgtagtcgtaggttgggttaagtagttggtcgtcgggaatgtttttataaacggcggagatacggcgttcgagacgtatttcggtggtgtcgagcggttcgtttatcgttagtttttttaacgtggtgcggtaggcgcgtaataaggaaatcgttttaacgttatcgtcgtttggtttgttttagcgttagcgtcgttagttcgcggtcggtaatgtcgtttttcggttattacgcgatttatcgcgaggtaaattttttttacgtaagtatgtatgtttgtaggtttcgggttaagtatgtatgtttgtaggttttatttaaataacgcgaagtgta

SEQ ID NO: 7478 - DNA, 644 bp, Artificial Sequence
  chemically treated genomic DNA (Homo sapiens) CpG-island No: 7478
tacacttcgcgttatttaaataaaacctacaaacatacatacttaacccgaaacctacaaacatacatacttacgtaaaaaaaatttacctcgcgataaatcgcgtaataaccgaaaaacgacattaccgaccgcgaactaacgacgctaacgctaaaacaaaccaaacgacgataacgttaaaacgatttccttattacgcgcctaccgcaccacgttaaaaaaactaacgataaacgaaccgctcgacaccaccgaaatacgtctcgaacgccgtatctccgccgtttataaaaacattcccgacgaccaactacttaacccaacctacgactacacccatcgcctactcgattttaccctactaacaaacgacgaaacgccgacgctaaccaccgccgacaacgaacaacaaccgtcgccgcacgttttcaacctactaacgcgtcaaaaactaacgaaatttaaaaaaaataacgacgcacaaccgaataacatcacccgcacgccgccgatttacccctactcacgctcctcccgtttacaacaattaatacgcgacgacgaaaactatttactaacgctaacctactccacccaacgcgattacgaacgcaatcacccgttcgcaaacgaaatccgca

SEQ ID NO: 7479 - DNA, 644 bp, Artificial Sequence
  chemically treated genomic DNA (Homo sapiens) CpG-island No: 7479
tatatttcgcgttatttagatgagatttgtaggtatgtatgtttagttcgggatttgtaggtatgtatgtttgcgtaaaagaagtttatttcgcggtagatcgcgtgatgatcgaagggcggtattgtcgatcgcgaattggcggcgttggcgttgaaataggttaggcggcgataacgttgaagcgatttttttgttgcgcgtttatcgtattacgttggggaagttggcggtaagcgagtcgttcgatattatcgggatgcgtttcgaacgtcgtattttcgtcgtttataaagatattttcggcggttagttgtttggtttaatttacgattatatttatcgtttgttcgattttattttgttggtaaacggcgaagcgtcgacgttgattatcgtcgatagcgaatagtagtcgtcgtcgtacgtttttagtttgttggcgcgttaggggttggcgaagtttgaagaggatagcggcgtatagtcggatgatattattcgtacgtcgtcggtttatttttgtttacgtttttttcgtttgtagtagttgatgcgcggcgacgaaggttatttgttggcgttggtttattttatttaacgcggttacgggcgtaattattcgttcgtaggcgagattcgta

SEQ ID NO: 7480 - DNA, 644 bp, Artificial Sequence
  chemically treated genomic DNA (Homo sapiens) CpG-island No: 7480
tacgaatctcgcctacgaacgaataattacgcccgtaaccgcgttaaataaaataaaccaacgccaacaaataaccttcgtcgccgcgcatcaactactacaaacgaaaaaaacgtaaacaaaaataaaccgacgacgtacgaataatatcatccgactatacgccgctatcctcttcaaacttcgccaacccctaacgcgccaacaaactaaaaacgtacgacgacgactactattcgctatcgacgataatcaacgtcgacgcttcgccgtttaccaacaaaataaaatcgaacaaacgataaatataatcgtaaattaaaccaaacaactaaccgccgaaaatatctttataaacgacgaaaatacgacgttcgaaacgcatcccgataatatcgaacgactcgcttaccgccaacttccccaacgtaatacgataaacgcgcaacaaaaaaatcgcttcaacgttatcgccgcctaacctatttcaacgccaacgccgccaattcgcgatcgacaataccgcccttcgatcatcacgcgatctaccgcgaaataaacttcttttacgcaaacatacatacctacaaatcccgaactaaacatacatacctacaaatctcatctaaataacgcgaaatata

SEQ ID NO: 7481 - DNA, 509 bp, Artificial Sequence
  chemically treated genomic DNA (Homo sapiens) CpG-island No: 7481
tcgcgagatcggacgatgttagaatagatcgcggtaagagaatagggaattagtattcgggttacgatacgggttggatattaggttgattacgtcgaacgcgtcgaggttgttgaatagataatcggttaggtaaatttttatcgtttttatcgatatttcgtcggtttgtagcgaattagcgttattagtagatagtcgaggtgagagatagatgagtaatcgagtagacgtttgatattggtttggtttagcgttattaggttatcgaagatgatggaggtaaaggcgataatcgttagtattacgcgaatcgtttcgttgttatttatcggtgcgtagaggaatagacgtattattatatcgaagatagcgattttgttcgtcgtcgttaggaaagtggaaatcggcgtagaataatggtataggtttacggatatttttttattattttatttagtacgttttgaattttagatatatgcgtatcgaatatggtttttgttatt

SEQ ID NO: 7482 - DNA, 509 bp, Artificial Sequence
  chemically treated genomic DNA (Homo sapiens) CpG-island No: 7482
aataacaaaaaccatattcgatacgcatatatctaaaattcaaaacgtactaaataaaataataaaaaaatatccgtaaacctataccattattctacgccgatttccactttcctaacgacgacgaacaaaatcgctatcttcgatataataatacgtctattcctctacgcaccgataaataacaacgaaacgattcgcgtaatactaacgattatcgcctttacctccatcatcttcgataacctaataacgctaaaccaaaccaatatcaaacgtctactcgattactcatctatctctcacctcgactatctactaataacgctaattcgctacaaaccgacgaaatatcgataaaaacgataaaaatttacctaaccgattatctattcaacaacctcgacgcgttcgacgtaatcaacctaatatccaacccgtatcgtaacccgaatactaattccctattctcttaccgcgatctattctaacatcgtccgatctcgcga

SEQ ID NO: 7483 - DNA, 509 bp, Artificial Sequence
  chemically treated genomic DNA (Homo sapiens) CpG-island No: 7483
gatggtagaaattatgttcggtgcgtatatgtttgaaatttagggcgtattgggtgaaatggtgaaagagtattcgtgggtttatgttattgttttgcgtcggtttttatttttttggcgacggcgagtaaaatcgttattttcggtgtggtgatgcgtttgtttttttacgtatcggtgggtgatagcgaagcgattcgcgtggtgttggcgattatcgtttttgtttttattattttcggtaatttgatggcgttgagttagattaatattaaacgtttgttcggttatttatttattttttatttcggttatttgttggtagcgttgattcgttgtaaatcggcgagatgtcgatggaagcggtaggggtttatttggtcggttatttgtttagtagtttcggcgcgttcggcgtggttagtttgatgtttagttcgtatcgtggttcggatgttgattttttgtttttttatcgcggtttgttttggtatcgttcgatttcgcgg

SEQ ID NO: 7484 - DNA, 509 bp, Artificial Sequence
  chemically treated genomic DNA (Homo sapiens) CpG-island No: 7484
ccgcgaaatcgaacgataccaaaacaaaccgcgataaaaaaacaaaaaatcaacatccgaaccacgatacgaactaaacatcaaactaaccacgccgaacgcgccgaaactactaaacaaataaccgaccaaataaacccctaccgcttccatcgacatctcgccgatttacaacgaatcaacgctaccaacaaataaccgaaataaaaaataaataaataaccgaacaaacgtttaatattaatctaactcaacgccatcaaattaccgaaaataataaaaacaaaaacgataatcgccaacaccacgcgaatcgcttcgctatcacccaccgatacgtaaaaaaacaaacgcatcaccacaccgaaaataacgattttactcgccgtcgccaaaaaaataaaaaccgacgcaaaacaataacataaacccacgaatactctttcaccatttcacccaatacgccctaaatttcaaacatatacgcaccgaacataatttctaccatc

SEQ ID NO: 7485 - DNA, 594 bp, Artificial Sequence
  chemically treated genomic DNA (Homo sapiens) CpG-island No: 7485
tggcggggcgtttttcggcggtaaaacgacgtattaggaaacgttataaattaggatgtttttgattcgatggtcgtgttcgtggcgtatggttgttaggggtatcgggaaacggggatgttacgggcgtatgttatagtttatgtcgagggtgtcgttatcggcgttcgtgtgcgtggaagtagagcgcgtgtttataatcgaggggcgtatttcggcgatgtttagttattgtagacgtgtatgggtaaatgcgggtttcggttataggcgttttggcgcgtgtttagcgtgaatatgacgagaagtggggttggtacgtgtaagtcgatgtgggtgtagttcgcgggtaaggggcgattcggtgcgggacgttgacgatacgacgttcggtgtcgatagggtatgtcggtatatggtgtatttggcgggtaacgttagggttgttgtggatgggaattagaatcggtacgttaagtgttaagtaagagaggaggtagggcgttagatatgatgattgaaaggtatcgcgtcgagtatgaggggaatattgtttaaatagagatggaatagtggcgatttgaggtcgtagat

SEQ ID NO: 7486 - DNA, 594 bp, Artificial Sequence
  chemically treated genomic DNA (Homo sapiens) CpG-island No: 7486
atctacgacctcaaatcgccactattccatctctatttaaacaatattcccctcatactcgacgcgatacctttcaatcatcatatctaacgccctacctcctctcttacttaacacttaacgtaccgattctaattcccatccacaacaaccctaacgttacccgccaaatacaccatataccgacataccctatcgacaccgaacgtcgtatcgtcaacgtcccgcaccgaatcgccccttacccgcgaactacacccacatcgacttacacgtaccaaccccacttctcgtcatattcacgctaaacacgcgccaaaacgcctataaccgaaacccgcatttacccatacacgtctacaataactaaacatcgccgaaatacgcccctcgattataaacacgcgctctacttccacgcacacgaacgccgataacgacaccctcgacataaactataacatacgcccgtaacatccccgtttcccgatacccctaacaaccatacgccacgaacacgaccatcgaatcaaaaacatcctaatttataacgtttcctaatacgtcgttttaccgccgaaaaacgccccgcca

SEQ ID NO: 7487 - DNA, 594 bp, Artificial Sequence
  chemically treated genomic DNA (Homo sapiens) CpG-island No: 7487
gtttacggttttaaatcgttattattttatttttatttggataatattttttttatgttcggcgcgatgttttttaattattatatttggcgttttgtttttttttttgtttggtatttagcgtatcgattttagtttttatttataatagttttgacgttattcgttaggtatattatgtgtcggtatgttttgtcggtatcggacgtcgtgtcgttaacgtttcgtatcgggtcgttttttgttcgcgagttatatttatatcgatttgtacgtattagttttatttttcgttatgtttacgttagatacgcgttagagcgtttgtgatcggaattcgtatttgtttatatacgtttgtagtagttggatatcgtcgaaatgcgtttttcgattgtggatacgcgttttatttttacgtatacggacgtcggtaacggtattttcgatataagttgtgatatgcgttcgtgatattttcgtttttcgatgtttttggtagttatacgttacgggtacgattatcgggttaagagtattttggtttgtaacgttttttgatgcgtcgttttatcgtcggaaagcgtttcgtta

SEQ ID NO: 7488 - DNA, 594 bp, Artificial Sequence
  chemically treated genomic DNA (Homo sapiens) CpG-island No: 7488
taacgaaacgctttccgacgataaaacgacgcatcaaaaaacgttacaaaccaaaatactcttaacccgataatcgtacccgtaacgtataactaccaaaaacatcgaaaaacgaaaatatcacgaacgcatatcacaacttatatcgaaaataccgttaccgacgtccgtatacgtaaaaataaaacgcgtatccacaatcgaaaaacgcatttcgacgatatccaactactacaaacgtatataaacaaatacgaattccgatcacaaacgctctaacgcgtatctaacgtaaacataacgaaaaataaaactaatacgtacaaatcgatataaatataactcgcgaacaaaaaacgacccgatacgaaacgttaacgacacgacgtccgataccgacaaaacataccgacacataatatacctaacgaataacgtcaaaactattataaataaaaactaaaatcgatacgctaaataccaaacaaaaaaaaaaacaaaacgccaaatataataattaaaaaacatcgcgccgaacataaaaaaaatattatccaaataaaaataaaataataacgatttaaaaccgtaaac

SEQ ID NO: 7489 - DNA, 581 bp, Artificial Sequence
  chemically treated genomic DNA (Homo sapiens) CpG-island No: 7489
ttgggggttgaatgtttttgattcgtcgtagggtaatttatttttatttcgtttggaatggcgacgttgtggcggtaaagttacgttgcggttgacgttatttagcgaaatttcgatgtcggtttattatattttggggttgaagtaggttttaagggtatggttgttcgttatttaaagtggtacgcgagttgggtttagaacgtcgtgagatagttcggtttttatttgtcgtggcgaaattatagtttaatgcggcggcgtatcggtttttgatcggttataataaacggtatcgttgattagttcggtttttttatcgatatttgattacgtatcggatatcgtttgggattttcgtttgtcgcgtgtgaaatcgattagtgttttaggttataaattcggtatggtttcgttgggatgcggttgggttatttggcgtgacgaagaagcgttgtcgtaggaattggtgtttaacgttgatgtcgcgtagggtatttatttttcgattttcggttgttgcggtgataaatagttttgttttagtaaaatcgtattttcgtagaatttgaatagtgaaa

SEQ ID NO: 7490 - DNA, 581 bp, Artificial Sequence
  chemically treated genomic DNA (Homo sapiens) CpG-island No: 7490
tttcactattcaaattctacgaaaatacgattttactaaaacaaaactatttatcaccgcaacaaccgaaaatcgaaaaataaataccctacgcgacatcaacgttaaacaccaattcctacgacaacgcttcttcgtcacgccaaataacccaaccgcatcccaacgaaaccataccgaatttataacctaaaacactaatcgatttcacacgcgacaaacgaaaatcccaaacgatatccgatacgtaatcaaatatcgataaaaaaaccgaactaatcaacgataccgtttattataaccgatcaaaaaccgatacgccgccgcattaaactataatttcgccacgacaaataaaaaccgaactatctcacgacgttctaaacccaactcgcgtaccactttaaataacgaacaaccatacccttaaaacctacttcaaccccaaaatataataaaccgacatcgaaatttcgctaaataacgtcaaccgcaacgtaactttaccgccacaacgtcgccattccaaacgaaataaaaataaattaccctacgacgaatcaaaaacattcaacccccaa

SEQ ID NO: 7491 - DNA, 581 bp, Artificial Sequence
  chemically treated genomic DNA (Homo sapiens) CpG-island No: 7491
ttttattatttaggttttgcgggaatacggttttgttgaggtaaaattgtttattatcgtagtaatcgaaggtcggggaatggatgttttgcgcgatattaacgttgaatattagtttttgcggtagcgttttttcgttacgttagataatttagtcgtattttagcggagttatatcgaatttatggtttgaagtattgatcgattttatacgcggtaggcggaagttttagacgatattcggtgcgtaattaggtgtcggtagagaagtcggattggttaacggtgtcgtttattatggtcgattaggggtcggtacgtcgtcgtattgaattgtggtttcgttacggtagatagggatcgaattgttttacgacgttttaaatttagttcgcgtattattttaaatggcgaatagttatatttttgggatttattttagttttaggatgtgatgagtcgatatcgaggtttcgttgaatagcgttagtcgtagcgtggttttatcgttatagcgtcgttattttaggcggggtaaaagtaaattgttttgcgacgggttaaaagtatttagtttttaa

SEQ ID NO: 7492 - DNA, 581 bp, Artificial Sequence
  chemically treated genomic DNA (Homo sapiens) CpG-island No: 7492
ttaaaaactaaatacttttaacccgtcgcaaaacaatttacttttaccccgcctaaaataacgacgctataacgataaaaccacgctacgactaacgctattcaacgaaacctcgatatcgactcatcacatcctaaaactaaaataaatcccaaaaatataactattcgccatttaaaataatacgcgaactaaatttaaaacgtcgtaaaacaattcgatccctatctaccgtaacgaaaccacaattcaatacgacgacgtaccgacccctaatcgaccataataaacgacaccgttaaccaatccgacttctctaccgacacctaattacgcaccgaatatcgtctaaaacttccgcctaccgcgtataaaatcgatcaatacttcaaaccataaattcgatataactccgctaaaatacgactaaattatctaacgtaacgaaaaaacgctaccgcaaaaactaatattcaacgttaatatcgcgcaaaacatccattccccgaccttcgattactacgataataaacaattttacctcaacaaaaccgtattcccgcaaaacctaaataataaaa

SEQ ID NO: 7493 - DNA, 502 bp, Artificial Sequence
  chemically treated genomic DNA (Homo sapiens) CpG-island No: 7493
cgcggttgttggcggcgtacgttcgggatatgaagatcggattgtttggttgcgtaaattgattgcgtggtaggaagagatggttgatttcggcgaaatgttcgacgaagtacgtagttaggtttttgacgatcgggtgtacgtttttacgtcgaaaggtgatgtcgttgatttgtttgcgggattaacgtcgttggatttcgtttattatatttatagtgatgtcggatatcgttgtatcggggtaaaaattggcgggcgtattgtgtcgtttatttattagttgtagatgggcgattagattgaaattattatttagaaatagtcgaattttagtcgtgattggttaaatttaaatttcggttacgttataattagtcgtgggttgcgtatattaggtgtgcgtttgcgttaatattatgaaagtagtttgaaagtggttgaatggttggtagaatattcgtaagttgcgcgagttaattattttgttttgtttggtagt

SEQ ID NO: 7494 - DNA, 502 bp, Artificial Sequence
  chemically treated genomic DNA (Homo sapiens) CpG-island No: 7494
actaccaaacaaaacaaaataattaactcgcgcaacttacgaatattctaccaaccattcaaccactttcaaactactttcataatattaacgcaaacgcacacctaatatacgcaacccacgactaattataacgtaaccgaaatttaaatttaaccaatcacgactaaaattcgactatttctaaataataatttcaatctaatcgcccatctacaactaataaataaacgacacaatacgcccgccaatttttaccccgatacaacgatatccgacatcactataaatataataaacgaaatccaacgacgttaatcccgcaaacaaatcaacgacatcacctttcgacgtaaaaacgtacacccgatcgtcaaaaacctaactacgtacttcgtcgaacatttcgccgaaatcaaccatctcttcctaccacgcaatcaatttacgcaaccaaacaatccgatcttcatatcccgaacgtacgccgccaacaaccgcg

SEQ ID NO: 7495 - DNA, 502 bp, Artificial Sequence
  chemically treated genomic DNA (Homo sapiens) CpG-island No: 7495
attgttaggtagagtagggtggttaattcgcgtaatttgcggatgttttgttagttatttagttatttttagattgtttttatgatgttgacgtaaacgtatatttaatgtgcgtagtttacggttggttgtgacgtaatcgaggtttgggtttaattagttacggttggggttcggttgtttttgggtgataattttaatttggtcgtttatttgtagttggtaggtgaacggtataatgcgttcgttaatttttgtttcgatgtagcggtgttcgatattattgtggatgtggtaagcgaagtttagcggcgttgatttcgtaggtaaattaacgatattatttttcggcgtaaagacgtatattcggtcgttaaagatttgattacgtatttcgtcgagtatttcgtcggaattagttatttttttttgttacgtaattagtttacgtagttaggtaattcggtttttatgtttcgaacgtgcgtcgttagtagtcgcg

SEQ ID NO: 7496 - DNA, 502 bp, Artificial Sequence
  chemically treated genomic DNA (Homo sapiens) CpG-island No: 7496
cgcgactactaacgacgcacgttcgaaacataaaaaccgaattacctaactacgtaaactaattacgtaacaaaaaaaaataactaattccgacgaaatactcgacgaaatacgtaatcaaatctttaacgaccgaatatacgtctttacgccgaaaaataatatcgttaatttacctacgaaatcaacgccgctaaacttcgcttaccacatccacaataatatcgaacaccgctacatcgaaacaaaaattaacgaacgcattataccgttcacctaccaactacaaataaacgaccaaattaaaattatcacccaaaaacaaccgaaccccaaccgtaactaattaaacccaaacctcgattacgtcacaaccaaccgtaaactacgcacattaaatatacgtttacgtcaacatcataaaaacaatctaaaaataactaaataactaacaaaacatccgcaaattacgcgaattaaccaccctactctacctaacaat

SEQ ID NO: 7497 - DNA, 525 bp, Artificial Sequence
  chemically treated genomic DNA (Homo sapiens) CpG-island No: 7497
cgtaaattttggtttagtcgtatgacgtaattagttggtagcggcggttttattttttcgttggttatttttatcgggtagatcgtcgtcgtattggcggtaggtaatagcgtgttggtaaaatcggtagaataaacgtcgttgattgtcgcgtaagggatcgttattttgttggaagcgggtgtatcgttaggcgtggtgtaattgttgcgcggtgtaagtttataggttgtaggttttttttttatatgattcgtgttaatattattaaaggtttgggatcggtattgtaaatcgcggagggttggagcgtggaattgtcgaaggatgtgtattattttttttataaacgtattaatttaatttggttatattggagcgttttttgagtttgttgtcggtttttgaggtcgaggtatagatgacggatggttggtcgttgtatgaattacgtttgaagggaaagttgtacgttattagtaagcgttatatttagcgtattgagcgatataatttgaatttgag

SEQ ID NO: 7498 - DNA, 525 bp, Artificial Sequence
  chemically treated genomic DNA (Homo sapiens) CpG-island No: 7498
ctcaaattcaaattatatcgctcaatacgctaaatataacgcttactaataacgtacaactttcccttcaaacgtaattcatacaacgaccaaccatccgtcatctatacctcgacctcaaaaaccgacaacaaactcaaaaaacgctccaatataaccaaattaaattaatacgtttataaaaaaaataatacacatccttcgacaattccacgctccaaccctccgcgatttacaataccgatcccaaacctttaataatattaacacgaatcatataaaaaaaaaacctacaacctataaacttacaccgcgcaacaattacaccacgcctaacgatacacccgcttccaacaaaataacgatcccttacgcgacaatcaacgacgtttattctaccgattttaccaacacgctattacctaccgccaatacgacgacgatctacccgataaaaataaccaacgaaaaaataaaaccgccgctaccaactaattacgtcatacgactaaaccaaaatttacg

SEQ ID NO: 7499 - DNA, 525 bp, Artificial Sequence
  chemically treated genomic DNA (Homo sapiens) CpG-island No: 7499
tttagatttagattatgtcgtttaatgcgttgagtgtaacgtttgttgataacgtgtagttttttttttaggcgtgatttatatagcggttagttattcgttatttatatttcgattttaaaggtcgatagtaggtttagaagacgttttagtgtggttaggttgagttggtgcgtttgtagaagaagtaatgtatatttttcggtaattttacgttttagtttttcgcgatttgtagtatcggttttaggtttttgatgatgttgatacgagttatgtgaaaggaggatttgtagtttgtaagtttgtatcgcgtagtaattgtattacgtttggcggtatattcgtttttagtaaaatggcgattttttgcgcggtaattagcggcgtttgttttgtcggttttgttagtacgttgttatttgtcgttagtgcggcggcgatttgttcggtgaaaatagttagcgggaagataaagtcgtcgttgttaattggttgcgttatacggttaaattagagtttgcg

SEQ ID NO: 7500 - DNA, 525 bp, Artificial Sequence
  chemically treated genomic DNA (Homo sapiens) CpG-island No: 7500
cgcaaactctaatttaaccgtataacgcaaccaattaacaacgacgactttatcttcccgctaactattttcaccgaacaaatcgccgccgcactaacgacaaataacaacgtactaacaaaaccgacaaaacaaacgccgctaattaccgcgcaaaaaatcgccattttactaaaaacgaatataccgccaaacgtaatacaattactacgcgatacaaacttacaaactacaaatcctcctttcacataactcgtatcaacatcatcaaaaacctaaaaccgatactacaaatcgcgaaaaactaaaacgtaaaattaccgaaaaatatacattacttcttctacaaacgcaccaactcaacctaaccacactaaaacgtcttctaaacctactatcgacctttaaaatcgaaatataaataacgaataactaaccgctatataaatcacgcctaaaaaaaaaactacacgttatcaacaaacgttacactcaacgcattaaacgacataatctaaatctaaa

SEQ ID NO: 7501 - DNA, 556 bp, Artificial Sequence
  chemically treated genomic DNA (Homo sapiens) CpG-island No: 7501
cgtagggtgtttcgtaagagaaaatacgatggtagtaatatcgttcgcggcgatttcggaggagagtaggttttttagttatttaggggtaaattgtaaaattagcggttgttgagatacgtttagattaatcgttagcgatagcgcgataattagaatcgttcgacggtttagcggtttacgagaaacgatacgtatatcggagcgggcgatggtgttaaatattttagcggcgtgttagttagtcgggcgcgaaggcgattagtaaaataaagtcgatataaatatttagtcgcgagtagttgttaaattacgtttggggaattaacgtgtatgtggaagatcgtacggtcgatgtttatattcgtcgtttgcgtaaagtattggagttcggcgggtattcgtagtgatgagggtgatgtacggcgcgaaaaattggcggtatttattacgcgttttcgtgtcggagtataggatttgtcgtttacgtttgttgatttatgtagcgttatttagttattgattgtcggttgatataattcgtttttataaattg

SEQ ID NO: 7502 - DNA, 556 bp, Artificial Sequence
  chemically treated genomic DNA (Homo sapiens) CpG-island No: 7502
caatttataaaaacgaattatatcaaccgacaatcaataactaaataacgctacataaatcaacaaacgtaaacgacaaatcctatactccgacacgaaaacgcgtaataaataccgccaatttttcgcgccgtacatcaccctcatcactacgaatacccgccgaactccaatactttacgcaaacgacgaatataaacatcgaccgtacgatcttccacatacacgttaattccccaaacgtaatttaacaactactcgcgactaaatatttatatcgactttattttactaatcgccttcgcgcccgactaactaacacgccgctaaaatatttaacaccatcgcccgctccgatatacgtatcgtttctcgtaaaccgctaaaccgtcgaacgattctaattatcgcgctatcgctaacgattaatctaaacgtatctcaacaaccgctaattttacaatttacccctaaataactaaaaaacctactctcctccgaaatcgccgcgaacgatattactaccatcgtattttctcttacgaaacaccctacg

SEQ ID NO: 7503 - DNA, 556 bp, Artificial Sequence
  chemically treated genomic DNA (Homo sapiens) CpG-island No: 7503
tagtttgtaaggacgggttgtattaatcgataattaatggttggatggcgttgtatgaattagtaagcgtaaacggtaaattttgtatttcggtacgaaaacgcgtaatgagtgtcgttagtttttcgcgtcgtgtattatttttattattgcgaatgttcgtcgggttttagtgttttacgtaggcgacgaatgtggatatcgatcgtgcggttttttatatatacgttagttttttagacgtggtttaatagttgttcgcggttgggtgtttatatcggttttattttattgatcgttttcgcgttcggttggttggtacgtcgttgaaatgtttggtattatcgttcgtttcggtgtgcgtatcgtttttcgtgagtcgttgaatcgtcgggcgattttgattatcgcgttgtcgttggcggttggtttgggcgtgttttagtagtcgttgattttgtagtttgtttttgaatggttgaaaaatttgttttttttcgggatcgtcgcgggcggtattattgttatcgtgtttttttttgcggggtattttgcg

SEQ ID NO: 7504 - DNA, 556 bp, Artificial Sequence
  chemically treated genomic DNA (Homo sapiens) CpG-island No: 7504
cgcaaaataccccgcaaaaaaaaacacgataacaataataccgcccgcgacgatcccgaaaaaaaacaaatttttcaaccattcaaaaacaaactacaaaatcaacgactactaaaacacgcccaaaccaaccgccaacgacaacgcgataatcaaaatcgcccgacgattcaacgactcacgaaaaacgatacgcacaccgaaacgaacgataataccaaacatttcaacgacgtaccaaccaaccgaacgcgaaaacgatcaataaaataaaaccgatataaacacccaaccgcgaacaactattaaaccacgtctaaaaaactaacgtatatataaaaaaccgcacgatcgatatccacattcgtcgcctacgtaaaacactaaaacccgacgaacattcgcaataataaaaataatacacgacgcgaaaaactaacgacactcattacgcgttttcgtaccgaaatacaaaatttaccgtttacgcttactaattcatacaacgccatccaaccattaattatcgattaatacaacccgtccttacaaacta

SEQ ID NO: 7505 - DNA, 555 bp, Artificial Sequence
  chemically treated genomic DNA (Homo sapiens) CpG-island No: 7505
atagaaaggcgttgtagaggcgggggttcgttttcgggtgtgtttgcgagtgtgtgtcgggtgcgcgcgtttaggttagggggtgcgggcgggtagcggggaatcggatttgtaggcggcgattttttttatcgcggttttttttttagttttaaattttgcgcgttcgggattattattagcgcgatagttttttttgttaggtttcggattcgtggggtgggcgttagaggacgtatatttgttttattggagattttttttgattttgggcgttaagtcgggatttgtgtatttcgaagttttagttgcgtgagttcgtttttgatttcggaaattcgttagttttgtagggcgttcggtttagaataggggttagagtgcggggatttttataagcgcgcgcgcgcgcgcgcgtatatatatatatatatatatatatatatatatatatcgcgcggtaggaagtttcgagatcgttcgcgtggggagggtttattcgcggttaggattagtttacgtgggtaattttatttttgtattaggtttttgtgt

SEQ ID NO: 7506 - DNA, 555 bp, Artificial Sequence
  chemically treated genomic DNA (Homo sapiens) CpG-island No: 7506
acacaaaaacctaatacaaaaataaaattacccacgtaaactaatcctaaccgcgaataaaccctccccacgcgaacgatctcgaaacttcctaccgcgcgatatatatatatatatatatatatatatatatatatacgcgcgcgcgcgcgcgcgcttataaaaatccccgcactctaacccctattctaaaccgaacgccctacaaaactaacgaatttccgaaatcaaaaacgaactcacgcaactaaaacttcgaaatacacaaatcccgacttaacgcccaaaatcaaaaaaaatctccaataaaacaaatatacgtcctctaacgcccaccccacgaatccgaaacctaacaaaaaaaactatcgcgctaataataatcccgaacgcgcaaaatttaaaactaaaaaaaaaaccgcgataaaaaaaatcgccgcctacaaatccgattccccgctacccgcccgcaccccctaacctaaacgcgcgcacccgacacacactcgcaaacacacccgaaaacgaacccccgcctctacaacgcctttctat

SEQ ID NO: 7507 - DNA, 555 bp, Artificial Sequence
  chemically treated genomic DNA (Homo sapiens) CpG-island No: 7507
gtataaaggtttggtgtaagagtggggttgtttacgtgggttggttttggtcgcgggtggattttttttacgcgggcggtttcggagttttttgtcgcgcggtgtgtgtgtgtgtgtgtgtgtgtgtgtgtgtgtgtgcgcgcgcgcgcgcgcgcgtttgtggaggttttcgtattttggtttttgttttgggtcgagcgttttgtagagttggcgagttttcggggttagaaacgggtttacgtaattggggtttcgggatgtataagtttcggtttggcgtttaaaattagagaaagtttttagtgggatagatgtgcgttttttgacgtttattttacgagttcgaaatttggtaggaggggttgtcgcgttggtggtggtttcgggcgcgtagggtttggggttgggagaggggtcgcgatgggagggatcgtcgtttgtagattcggtttttcgttgttcgttcgtattttttgatttggacgcgcgtattcggtatatattcgtaaatatattcgggggcggattttcgtttttgtagcgtttttttgt

SEQ ID NO: 7508 - DNA, 555 bp, Artificial Sequence
  chemically treated genomic DNA (Homo sapiens) CpG-island No: 7508
acaaaaaaacgctacaaaaacgaaaatccgcccccgaatatatttacgaatatataccgaatacgcgcgtccaaatcaaaaaatacgaacgaacaacgaaaaaccgaatctacaaacgacgatccctcccatcgcgacccctctcccaaccccaaaccctacgcgcccgaaaccaccaccaacgcgacaacccctcctaccaaatttcgaactcgtaaaataaacgtcaaaaaacgcacatctatcccactaaaaactttctctaattttaaacgccaaaccgaaacttatacatcccgaaaccccaattacgtaaacccgtttctaaccccgaaaactcgccaactctacaaaacgctcgacccaaaacaaaaaccaaaatacgaaaacctccacaaacgcgcgcgcgcgcgcgcgcacacacacacacacacacacacacacacacacacaccgcgcgacaaaaaactccgaaaccgcccgcgtaaaaaaaatccacccgcgaccaaaaccaacccacgtaaacaaccccactcttacaccaaacctttatac

SEQ ID NO: 7509 - DNA, 960 bp, Artificial Sequence
  chemically treated genomic DNA (Homo sapiens) CpG-island No: 7509
tcgttttcgtttaggtttagattttggtcgggcgattttttcggtatcgtagttatttcggggtagggttgcgcggttttgagcggtggtcgttcgcgttgagtttatttcggagtcggtagatcgggttcgggcgtagttttcgttttacgtagttgtcggtttcgggcgtcgggcgtagtttcgtcgtttatgttcgttgcgcgggtcgtttcggtttcgttttggagttattttttttttcgtttttaattttttttttatttatttttttcgtttcggttttcgttttacgcggtttttcgcggcgcggcgcgtcggggttttttttttttatttttttttcgttttttttttttttcgcggtcgtcgttttcgtcgtcgtcgtttttttttcgcgtcgtttttcggttgttttttcgtcgtttttatttttttttttttttttttttttttcggcggtttttttcgattgttggagagaaaattagttttttattttagtttttagttagcgtttcgtcgcggtttagttcggacgtaaagggtagcgattcggttttaaattatttagcgcgaacgggcgcgcgcggcgatttttggttcggggttcggttgcgtcgcggggtagaggattagagtcgtaattagtttcgcgcgttcgcgtttggcgataaaaacgcgtcgtttttttttttttcgtcgggcgatttttattcgtttttttcgaagttcgcgttttttcgtcggggtcgcggttaggattttttcgggagcggtgcgtttaggttttagcgtttttcgcggtttagtttttcgtttttcgtcggtcggttacgcggcgttcgggtttttttcgggttcggggagggggcgggggagaggttgattttaattattgttattttatttgatgtaatattttttcgggcgtttttagttgggtataaattttcggtt

SEQ ID NO: 7510 - DNA, 960 bp, Artificial Sequence
  chemically treated genomic DNA (Homo sapiens) CpG-island No: 7510
aaccgaaaatttatacccaactaaaaacgcccgaaaaaatattacatcaaataaaataacaataattaaaatcaacctctcccccgccccctccccgaacccgaaaaaaacccgaacgccgcgtaaccgaccgacgaaaaacgaaaaactaaaccgcgaaaaacgctaaaacctaaacgcaccgctcccgaaaaaatcctaaccgcgaccccgacgaaaaaacgcgaacttcgaaaaaaacgaataaaaatcgcccgacgaaaaaaaaaaaaacgacgcgtttttatcgccaaacgcgaacgcgcgaaactaattacgactctaatcctctaccccgcgacgcaaccgaaccccgaaccaaaaatcgccgcgcgcgcccgttcgcgctaaataatttaaaaccgaatcgctaccctttacgtccgaactaaaccgcgacgaaacgctaactaaaaactaaaataaaaaactaattttctctccaacaatcgaaaaaaaccgccgaaaaaaaaaaaaaaaaaaaaaaaaataaaaacgacgaaaaaacaaccgaaaaacgacgcgaaaaaaaaacgacgacgacgaaaacgacgaccgcgaaaaaaaaaaaaaacgaaaaaaaaataaaaaaaaaaaaccccgacgcgccgcgccgcgaaaaaccgcgtaaaacgaaaaccgaaacgaaaaaaataaataaaaaaaaaattaaaaacgaaaaaaaaaataactccaaaacgaaaccgaaacgacccgcgcaacgaacataaacgacgaaactacgcccgacgcccgaaaccgacaactacgtaaaacgaaaactacgcccgaacccgatctaccgactccgaaataaactcaacgcgaacgaccaccgctcaaaaccgcgcaaccctaccccgaaataactacgataccgaaaaaatcgcccgaccaaaatctaaacctaaacgaaaacga

SEQ ID NO: 7511 - DNA, 960 bp, Artificial Sequence
  chemically treated genomic DNA (Homo sapiens) CpG-island No: 7511
agtcgaaaatttatgtttagttgaaagcgttcggggaaatattatattagatgaaatgataatgattaaaattagtttttttttcgtttttttttcgagttcggaggaggttcgggcgtcgcgtggtcggtcggcggggggcggggggttgggtcgcggagggcgttggggtttgggcgtatcgttttcgggagggttttggtcgcggtttcggcgggaaggcgcgggtttcgggagaggcgggtggggatcgttcggcgaaaggaggggaaacggcgcgtttttgtcgttaggcgcgggcgcgcggagttaattgcgattttaattttttgtttcgcggcgtagtcgagtttcgagttaggagtcgtcgcgcgcgttcgttcgcgttgggtaatttggggtcggatcgttgttttttacgttcgggttgggtcgcggcgaggcgttggttaggggttggagtggggggttggttttttttttagtaatcgagggaggtcgtcggagagagaggagggaggagaggaggtgggagcggcgggagggtagtcggagagcggcgcgaggaggaggcggcggcggcggaggcggcggtcgcgaagaggggaggaggcgaggggagggtggggaggggaggtttcggcgcgtcgcgtcgcgaggggtcgcgtgaagcgggggtcggggcgggaggggtgggtggggggagggttgggggcgagagagaaagtaattttaggacgagatcggagcgattcgcgtagcgagtataggcggcgaagttgcgttcggcgttcgagatcggtagttgcgtggggcgggggttgcgttcgagttcgatttgtcggtttcgaggtaagtttagcgcgggcggttatcgtttagagtcgcgtaattttgtttcgaagtggttgcgatatcgagaaagtcgttcggttagggtttggatttgggcgggggcgg

SEQ ID NO: 7512 - DNA, 960 bp, Artificial Sequence
  chemically treated genomic DNA (Homo sapiens) CpG-island No: 7512
ccgcccccgcccaaatccaaaccctaaccgaacgactttctcgatatcgcaaccacttcgaaacaaaattacgcgactctaaacgataaccgcccgcgctaaacttacctcgaaaccgacaaatcgaactcgaacgcaacccccgccccacgcaactaccgatctcgaacgccgaacgcaacttcgccgcctatactcgctacgcgaatcgctccgatctcgtcctaaaattactttctctctcgcccccaaccctccccccacccacccctcccgccccgacccccgcttcacgcgacccctcgcgacgcgacgcgccgaaacctcccctccccaccctcccctcgcctcctcccctcttcgcgaccgccgcctccgccgccgccgcctcctcctcgcgccgctctccgactaccctcccgccgctcccacctcctctcctccctcctctctctccgacgacctccctcgattactaaaaaaaaaaccaaccccccactccaacccctaaccaacgcctcgccgcgacccaacccgaacgtaaaaaacaacgatccgaccccaaattacccaacgcgaacgaacgcgcgcgacgactcctaactcgaaactcgactacgccgcgaaacaaaaaattaaaatcgcaattaactccgcgcgcccgcgcctaacgacaaaaacgcgccgtttcccctcctttcgccgaacgatccccacccgcctctcccgaaacccgcgccttcccgccgaaaccgcgaccaaaaccctcccgaaaacgatacgcccaaaccccaacgccctccgcgacccaaccccccgccccccgccgaccgaccacgcgacgcccgaacctcctccgaactcgaaaaaaaaacgaaaaaaaaactaattttaatcattatcatttcatctaatataatatttccccgaacgctttcaactaaacataaattttcgact

SEQ ID NO: 7513 - DNA, 548 bp, Artificial Sequence
  chemically treated genomic DNA (Homo sapiens) CpG-island No: 7513
gacgtttgcggatacgcggtcggtcgtcgcgggggagggacgcgttggggtatcgggtcgatcgttcgcggttagacgcgttattttttttacgcgcgcggcgcgatggagacggcggtagttaagatttttcgcggtcgaggttcgcgtttcggacgtttttttttagttttcgtttcggtcgttttttttttttttttttttatttttattttttttttttttttttttttttttgttttttttgcgtttcgttcgtgtttttttttttttttcggcgattatttttcggtttttaggaaacggagcgcgcgattggtcggtattgcgttttcgtttggttttagggacgttcgggtcggagatcggttgggatcgcggggcgggtgcgtacgggtcggaacggcgtttgggtttcgatcgtcggtttcggtcgggtttggacgttttttagcggtcgtattttcggggtggggggcgttcggggtcggtttggagttggggtgagggggattcggggtgttagtgggaggaaggtgaagtggggg

SEQ ID NO: 7514 - DNA, 548 bp, Artificial Sequence
  chemically treated genomic DNA (Homo sapiens) CpG-island No: 7514
cccccacttcaccttcctcccactaacaccccgaatccccctcaccccaactccaaaccgaccccgaacgccccccaccccgaaaatacgaccgctaaaaaacgtccaaacccgaccgaaaccgacgatcgaaacccaaacgccgttccgacccgtacgcacccgccccgcgatcccaaccgatctccgacccgaacgtccctaaaaccaaacgaaaacgcaataccgaccaatcgcgcgctccgtttcctaaaaaccgaaaaataatcgccgaaaaaaaaaaaaaaacacgaacgaaacgcaaaaaaaacaaaaaaaaaaaaaaaaaaaaaaaaaataaaaataaaaaaaaaaaaaaaaaaaacgaccgaaacgaaaactaaaaaaaaacgtccgaaacgcgaacctcgaccgcgaaaaatcttaactaccgccgtctccatcgcgccgcgcgcgtaaaaaaaataacgcgtctaaccgcgaacgatcgacccgataccccaacgcgtccctcccccgcgacgaccgaccgcgtatccgcaaacgtc

SEQ ID NO: 7515 - DNA, 548 bp, Artificial Sequence
  chemically treated genomic DNA (Homo sapiens) CpG-island No: 7515
tttttattttattttttttttattggtatttcgagttttttttattttagttttaggtcgatttcgagcgttttttatttcgggagtgcggtcgttagggggcgtttaggttcggtcggagtcggcggtcgggatttaggcgtcgtttcggttcgtgcgtattcgtttcgcggttttagtcggttttcggttcgggcgtttttggagttaggcgggggcgtagtgtcggttagtcgcgcgtttcgttttttaggagtcgggaaatggtcgtcgaggaggaggaggaggtacgggcggggcgtaaaggaaataggaggaagaggaaggggaggaggagtgggagtgggagaaaaggaggaaggggcggtcgaagcggagattggggaggggcgttcggggcgcggatttcggtcgcggggagttttggttgtcgtcgtttttatcgcgtcgcgcgcgtaaaggaaatggcgcgtttagtcgcgagcggtcggttcggtgttttagcgcgtttttttttcgcggcggtcgatcgcgtgttcgtagacgtt

SEQ ID NO: 7516 - DNA, 548 bp, Artificial Sequence
  chemically treated genomic DNA (Homo sapiens) CpG-island No: 7516
aacgtctacgaacacgcgatcgaccgccgcgaaaaaaaaacgcgctaaaacaccgaaccgaccgctcgcgactaaacgcgccatttcctttacgcgcgcgacgcgataaaaacgacgacaaccaaaactccccgcgaccgaaatccgcgccccgaacgcccctccccaatctccgcttcgaccgccccttcctccttttctcccactcccactcctcctccccttcctcttcctcctatttcctttacgccccgcccgtacctcctcctcctcctcgacgaccatttcccgactcctaaaaaacgaaacgcgcgactaaccgacactacgcccccgcctaactccaaaaacgcccgaaccgaaaaccgactaaaaccgcgaaacgaatacgcacgaaccgaaacgacgcctaaatcccgaccgccgactccgaccgaacctaaacgccccctaacgaccgcactcccgaaataaaaaacgctcgaaatcgacctaaaactaaaataaaaaaaactcgaaataccaataaaaaaaaaataaaataaaaa

SEQ ID NO: 7517 - DNA, 1436 bp, Artificial Sequence
  chemically treated genomic DNA (Homo sapiens) CpG-island No: 7517
  unsure (358, 365, 634, 967)
cggggggaaaacggaagtcggatttatgggttttcggcgcgaaattatgaagacgaagttttaaatcgggtatcggggaaaaatttttaatggggggcgggatattaatacggggggcggtggtgtagttttcgggcgggcgtggagaaaagcgtttcgtaaaggtgatttacgagggggaggacgggagattcgggttcggggaggggggtcgagagggggggtcggaggttcggggaagaacggattttgtgggggtaaggggacgtacgtagcgcgatacgttacgatcgtaggtatatttcgagatagtttagatattagaggatacggatcgggtaattttcgtattagttangttttanttacgtaatattagaggagcgtagtagtaattaatcgaagtattagatatcgagtaacgatagtatataacgtacgatatataaatttagttatagcgttataggtattagcgagaggatatacgaagagacgacgagcgataggatatacgtcgacgcgagaatatatatcgtagataatacgagaagtacgagggtagatacgtatacgcgaataaaggtttaaggagacgacgaagagtatacgtaaagtacggagtatattacgnatattattattatataagatatataagataataagattcgatagtaaacgggtagacgcgaatatatacgcgagtaaggtacgaagcgacgaggagaaaattattagataaagatttaaaagtagaagagtagatagagcgagaagtagaggacgttagatataagtagtaaggaacgagaacgtatagatatacgtacgtataaagaatacgatacgatcgagtacgcgtataattagattaataggataatcgcgagatatattatatataggatatattaagagtatataacggtaagagtttatagtatagtcgtacgagtagacgatnagagcgcgtgataatatatagttgtattagtagatacgatcgagtacgagaacgacgttaatagcggcgcgaggatatcgaacgatacgtagatatagtgtaattgtagatattacgagatacgcgcgacgtatacgataattagatggattaacgagaaatacgttgaatatagtattatcggatagtagacgagacggagagtattacgcgacgcgagtatacgaatatagtaattatttataggaggataaagttagtgtgcgtacgaatatcgtcgagtaatatagaagcgatacgatcgatagagagatacgaaatattatagtagtataacgaatataattaataaggagacgcgatatcgcgcgataagagtatatagtacgtaatatcgtaggttatggttaggtaagggggaggtcgttacgggttaagcgggggaaagttaaatcgttgggtttaatat

SEQ ID NO: 7518 - DNA, 1436 bp, Artificial Sequence
  chemically treated genomic DNA (Homo sapiens) CpG-island No: 7518
  unsure (470, 803, 1072, 1079)
atattaaacccaacgatttaactttcccccgcttaacccgtaacgacctcccccttacctaaccataacctacgatattacgtactatatactcttatcgcgcgatatcgcgtctccttattaattatattcgttatactactataatatttcgtatctctctatcgatcgtatcgcttctatattactcgacgatattcgtacgcacactaactttatcctcctataaataattactatattcgtatactcgcgtcgcgtaatactctccgtctcgtctactatccgataatactatattcaacgtatttctcgttaatccatctaattatcgtatacgtcgcgcgtatctcgtaatatctacaattacactatatctacgtatcgttcgatatcctcgcgccgctattaacgtcgttctcgtactcgatcgtatctactaatacaactatatattatcacgcgctctnatcgtctactcgtacgactatactataaactcttaccgttatatactcttaatatatcctatatataatatatctcgcgattatcctattaatctaattatacgcgtactcgatcgtatcgtattctttatacgtacgtatatctatacgttctcgttccttactacttatatctaacgtcctctacttctcgctctatctactcttctacttttaaatctttatctaataattttctcctcgtcgcttcgtaccttactcgcgtatatattcgcgtctacccgtttactatcgaatcttattatcttatatatcttatataataataatatncgtaatatactccgtactttacgtatactcttcgtcgtctccttaaacctttattcgcgtatacgtatctaccctcgtacttctcgtattatctacgatatatattctcgcgtcgacgtatatcctatcgctcgtcgtctcttcgtatatcctctcgctaatacctataacgctataactaaatttatatatcgtacgttatatactatcgttactcgatatctaatacttcgattaattactactacgctcctctaatattacgtaantaaaacntaactaatacgaaaattacccgatccgtatcctctaatatctaaactatctcgaaatatacctacgatcgtaacgtatcgcgctacgtacgtccccttacccccacaaaatccgttcttccccgaacctccgaccccccctctcgacccccctccccgaacccgaatctcccgtcctccccctcgtaaatcacctttacgaaacgcttttctccacgcccgcccgaaaactacaccaccgccccccgtattaatatcccgccccccattaaaaatttttccccgatacccgatttaaaacttcgtcttcataatttcgcgccgaaaacccataaatccgacttccgttttccccccg

SEQ ID NO: 7519 - DNA, 1436 bp, Artificial Sequence
  chemically treated genomic DNA (Homo sapiens) CpG-island No: 7519
  unsure (470, 803, 1072, 1079)
gtattgggtttagcggtttagttttttttcgtttggttcgtggcgattttttttttatttggttatggtttgcgatgttgcgtgttgtgtgtttttgtcgcgcggtgtcgcgtttttttgttggttgtgttcgttgtgttgttgtggtgtttcgtgtttttttgtcggtcgtgtcgtttttgtgttgttcggcgatgttcgtgcgtatattggttttgtttttttgtgggtggttgttgtgttcgtatgttcgcgtcgcgtgatgtttttcgtttcgtttgttgttcggtggtgttgtgtttagcgtgtttttcgttagtttatttggttgtcgtgtgcgtcgcgcgtgtttcgtgatgtttgtagttgtattgtgtttgcgtgtcgttcggtgttttcgcgtcgttgttggcgtcgttttcgtgttcggtcgtatttgttggtgtagttgtgtgttgttacgcgttttngtcgtttgttcgtgcggttgtgttgtgggtttttgtcgttgtgtgtttttggtgtgttttgtgtgtggtgtgtttcgcggttgttttgttggtttggttgtgcgcgtgttcggtcgtgtcgtgttttttgtgcgtgcgtgtgtttgtgcgttttcgttttttgttgtttgtgtttggcgttttttgtttttcgttttgtttgtttttttgtttttgggtttttgtttggtggtttttttttcgtcgtttcgtgttttgttcgcgtgtgtgttcgcgtttgttcgtttgttgtcgggttttgttgttttgtgtgttttgtgtggtggtggtgtncgtggtgtgtttcgtgttttgcgtgtgtttttcgtcgtttttttgggtttttgttcgcgtgtgcgtgtttgttttcgtgtttttcgtgttgtttgcggtgtgtgttttcgcgtcggcgtgtgttttgtcgttcgtcgttttttcgtgtgttttttcgttggtgtttgtggcgttgtggttgggtttgtgtgtcgtgcgttgtgtgttgtcgttgttcggtgtttggtgtttcggttggttgttgttgcgtttttttggtgttgcgtggntggggtntggttaatgcggagattgttcgattcgtgttttttggtgtttgaattgtttcgaggtgtgtttgcggtcgtagcgtgtcgcgttgcgtgcgtttttttgtttttatagggttcgttttttttcgagttttcggttttttttttcggttttttttttcgggttcggatttttcgttttttttttcgtgggttatttttgcggggcgtttttttttacgttcgttcgggggttatattatcgtttttcgtgttggtatttcgttttttattaagggttttttttcggtgttcggtttagggtttcgtttttatggtttcgcgtcgaaggtttatggattcgattttcgtttttttttcg

SEQ ID NO: 7520 - DNA, 1436 bp, Artificial Sequence
  chemically treated genomic DNA (Homo sapiens) CpG-island No: 7520
  unsure (358, 365, 634, 967)
cgaaaaaaaaacgaaaatcgaatccataaaccttcgacgcgaaaccataaaaacgaaaccctaaaccgaacaccgaaaaaaaacccttaataaaaaacgaaataccaacacgaaaaacgataatataacccccgaacgaacgtaaaaaaaaacgccccgcaaaaataacccacgaaaaaaaaaacgaaaaatccgaacccgaaaaaaaaaaccgaaaaaaaaaaccgaaaactcgaaaaaaaacgaaccctataaaaacaaaaaaacgcacgcaacgcgacacgctacgaccgcaaacacacctcgaaacaattcaaacaccaaaaaacacgaatcgaacaatctccgcattaaccanaccccanccacgcaacaccaaaaaaacgcaacaacaaccaaccgaaacaccaaacaccgaacaacgacaacacacaacgcacgacacacaaacccaaccacaacgccacaaacaccaacgaaaaaacacacgaaaaaacgacgaacgacaaaacacacgccgacgcgaaaacacacaccgcaaacaacacgaaaaacacgaaaacaaacacgcacacgcgaacaaaaacccaaaaaaacgacgaaaaacacacgcaaaacacgaaacacaccacgnacaccaccaccacacaaaacacacaaaacaacaaaacccgacaacaaacgaacaaacgcgaacacacacgcgaacaaaacacgaaacgacgaaaaaaaaaccaccaaacaaaaacccaaaaacaaaaaaacaaacaaaacgaaaaacaaaaaacgccaaacacaaacaacaaaaaacgaaaacgcacaaacacacgcacgcacaaaaaacacgacacgaccgaacacgcgcacaaccaaaccaacaaaacaaccgcgaaacacaccacacacaaaacacaccaaaaacacacaacgacaaaaacccacaacacaaccgcacgaacaaacgacnaaaacgcgtaacaacacacaactacaccaacaaatacgaccgaacacgaaaacgacgccaacaacgacgcgaaaacaccgaacgacacgcaaacacaatacaactacaaacatcacgaaacacgcgcgacgcacacgacaaccaaataaactaacgaaaaacacgctaaacacaacaccaccgaacaacaaacgaaacgaaaaacatcacgcgacgcgaacatacgaacacaacaaccacccacaaaaaaacaaaaccaatatacgcacgaacatcgccgaacaacacaaaaacgacacgaccgacaaaaaaacacgaaacaccacaacaacacaacgaacacaaccaacaaaaaaacgcgacaccgcgcgacaaaaacacacaacacgcaacatcgcaaaccataaccaaataaaaaaaaaatcgccacgaaccaaacgaaaaaaaactaaaccgctaaacccaatac

SEQ ID NO: 7521 - DNA, 1351 bp, Artificial Sequence
  chemically treated genomic DNA (Homo sapiens) CpG-island No: 7521
  unsure (17, 19, 23, 25, 28, 30, 33, 36, 52, 64, 99, 106, 108, 156)
  unsure (228, 236, 398, 510, 651, 687, 772, 835, 893, 1000, 1071, 1176)
  unsure (1181, 1191, 1211)
agtacgcgacgtagaananagtntncgntnttncgngtcgttcgggcgagtncgtcgcgcgcgncggtcgcggcgtaagcgcgcgcgcgtcgtcgtcgngcgcgtntngaattttcggcgacgagcgtagcgtagaggacgttagaatatagagtnatttattagcgcgaagcgcgtagtatatagatagagatacgagcgcgatagagagtattatacgagacgagngaacgttntagcgtatatcggaggtatagatagagatagcgagacgcgagtacgtacgtcgatatagagaagacgatatagaatagagtacgtacgaggatagatattagttaacgtagagatagcgttatacgttcgttatataggagatcgcggagcgcgaacgacgngtacgatacgacgacgagtacgtagagacggatacgaagagacgtatcgcgcgtaggatatacgagtatacgagacgtataaacgttatatatacgagtacgatcgtagatnagattatacgacgatagaacgagttattatagtagagcgatacgataggagcgagacgtatatatatataagagtaagataacgagagtataataacgagatacgcgacgagcgcgacgaggtacgtagcgtagcgagtangtagcgcgacgaacgagagacgcggatattcgcgancgtagacgcgcgtacgatacgacgagatatacgtcgagacgatagagcgagtatacgacgtaggtacgcgcgatagcgatagcgngatcgacggttagtagaagagatattagcgtcgtagaagatacgataatagtagtatataggngtcgagatcgagtatagagattagatcgtacgatataacggtacgatcgagcgacgtngtacgattaatagtattagacgacgggacgtaagaagtatagacgatatcgatatcgatagtagagatatcgatcgagacggcgcgttgacgagacgttcgtattanacgatattaagagatatatacgagtatagacgtatatattagcgaaacgtacgtagcgtatagagtaaatnagaatagtacgcgaggtatacgtaatatagtatagacgagcgatacgcgaaacgtatagtatacggcgtagaagagtatagtcgcgacgcggtatagacgatagnacgancgacgaggtnagcgacgcgcgtatcgtagntcgagatatacgtatagcgttgtttgcgtaggtgtagcgtcgtttttttgagagtatgtgttggcggagtagagttgtcgggttttttggtaattttttatttatttatttgaggacgtcgtgtgttttaggaggatagt

SEQ ID NO: 7522 - DNA, 1351 bp, Artificial Sequence
  chemically treated genomic DNA (Homo sapiens) CpG-island No: 7522
  unsure (141, 161, 171, 176, 281, 352, 459, 517, 580, 665, 701, 842)
  unsure (954, 1116, 1124, 1196, 1244, 1246, 1253, 1288, 1300, 1316)
  unsure (1319, 1322, 1324, 1327, 1329, 1333, 1335)
actatcctcctaaaacacacgacgtcctcaaataaataaataaaaaattaccaaaaaacccgacaactctactccgccaacacatactctcaaaaaaacgacgctacacctacgcaaacaacgctatacgtatatctcganctacgatacgcgcgtcgctnacctcgtcgntcgtnctatcgtctataccgcgtcgcgactatactcttctacgccgtatactatacgtttcgcgtatcgctcgtctatactatattacgtatacctcgcgtactattctnatttactctatacgctacgtacgtttcgctaatatatacgtctatactcgtatatatctcttaatatcgtntaatacgaacgtctcgtcaacgcgccgtctcgatcgatatctctactatcgatatcgatatcgtctatacttcttacgtcccgtcgtctaatactattaatcgtacnacgtcgctcgatcgtaccgttatatcgtacgatctaatctctatactcgatctcgacncctatatactactattatcgtatcttctacgacgctaatatctcttctactaaccgtcgatcncgctatcgctatcgcgcgtacctacgtcgtatactcgctctatcgtctcgacgtatatctcgtcgtatcgtacgcgcgtctacgntcgcgaatatccgcgtctctcgttcgtcgcgctacntactcgctacgctacgtacctcgtcgcgctcgtcgcgtatctcgttattatactctcgttatcttactcttatatatatatacgtctcgctcctatcgtatcgctctactataataactcgttctatcgtcgtataatctnatctacgatcgtactcgtatatataacgtttatacgtctcgtatactcgtatatcctacgcgcgatacgtctcttcgtatccgtctctacgtactcgtcgtcgtatcgtacncgtcgttcgcgctccgcgatctcctatataacgaacgtataacgctatctctacgttaactaatatctatcctcgtacgtactctattctatatcgtcttctctatatcgacgtacgtactcgcgtctcgctatctctatctatacctccgatatacgctanaacgttcnctcgtctcgtataatactctctatcgcgctcgtatctctatctatatactacgcgcttcgcgctaataaatnactctatattctaacgtcctctacgctacgctcgtcgccgaaaattcnanacgcgcncgacgacgacgcgcgcgcgcttacgccgcgaccgncgcgcgcgacgnactcgcccgaacgacncgnaanancgnanactntnttctacgtcgcgtact

SEQ ID NO: 7523 - DNA, 1351 bp, Artificial Sequence
  chemically treated genomic DNA (Homo sapiens) CpG-island No: 7523
  unsure (141, 161, 171, 176, 281, 352, 459, 517, 580, 665, 701, 842)
  unsure (954, 1116, 1124, 1196, 1244, 1246, 1253, 1288, 1300, 1316)
  unsure (1319, 1322, 1324, 1327, 1329, 1333, 1335)
gttatttttttgagatatacgacgtttttaaatggataaatggagagttattagaggattcggtaattttatttcgttagtatatgtttttaggaagacgacgttatatttacgtaggtagcgttgtgcgtgtgtttcggnttgcggtgcgcgcgtcgttngtttcgtcgntcgtnttgtcgtttgtgtcgcgtcgcggttgtgtttttttgcgtcgtgtgttgtgcgtttcgcgtgtcgttcgtttgtgttgtgttgcgtgtgtttcgcgtgttgttttngtttgttttgtgcgttgcgtgcgtttcgttggtgtgtgcgtttgtgttcgtgtgtgttttttggtgtcgtntggtgcgggcgtttcgttagcgcgtcgtttcggtcggtgtttttgttgtcggtgtcggtgtcgtttgtgttttttgcgtttcgtcgtttggtgttgttggtcgtgtngcgtcgttcggtcgtgtcgttgtgtcgtgcggtttggtttttgtgttcggtttcggtntttgtgtgttgttgttgtcgtgttttttgcggcgttggtgttttttttgttggtcgtcggttncgttgtcgttgtcgcgcgtgtttgcgtcgtgtgttcgttttgtcgtttcggcgtgtgtttcgtcgtgtcgtgcgcgcgtttgcgntcgcgggtgttcgcgtttttcgttcgtcgcgttgtntgttcgttgcgttgcgtgtttcgtcgcgttcgtcgcgtgtttcgttgttgtgttttcgttgttttgtttttgtgtgtgtgtgcgtttcgtttttgtcgtgtcgttttgttgtggtggttcgttttgtcgtcgtgtggtttngtttgcggtcgtgttcgtgtgtgtggcgtttgtgcgtttcgtgtgttcgtgtgttttgcgcgcggtgcgttttttcgtgttcgtttttgcgtgttcgtcgtcgtgtcgtgtncgtcgttcgcgtttcgcggttttttgtgtggcgggcgtgtggcgttgtttttgcgttggttggtgtttgttttcgtgcgtgttttgttttgtgtcgttttttttgtgtcggcgtgcgtgttcgcgtttcgttgtttttgtttgtgttttcggtgtgcgttgnggcgtttnttcgtttcgtgtggtgttttttgtcgcgttcgtgtttttgtttgtgtgttgcgcgtttcgcgttggtgggtngttttgtgttttggcgttttttgcgttgcgttcgtcgtcgggggtttngngcgcgtncggcggcggcgcgcgcgcgtttgcgtcgcggtcgncgcgcgcggcgngttcgttcgggcggtncgnggngncgngngttntnttttgcgtcgcgtgtt

SEQ ID NO: 7524 - DNA, 1351 bp, Artificial Sequence
  chemically treated genomic DNA (Homo sapiens) CpG-island No: 7524
  unsure (17, 19, 23, 25, 28, 30, 33, 36, 52, 64, 99, 106, 108, 156)
  unsure (228, 236, 398, 510, 651, 687, 772, 835, 893, 1000, 1071, 1176)
  unsure (1181, 1191, 1211)
aacacgcgacgcaaaananaacncncgncnccncgnaccgcccgaacgaacncgccgcgcgcgncgaccgcgacgcaaacgcgcgcgcgccgccgccgnacgcgcncnaaacccccgacgacgaacgcaacgcaaaaaacgccaaaacacaaaacnacccaccaacgcgaaacgcgcaacacacaaacaaaaacacgaacgcgacaaaaaacaccacacgaaacgaanaaacgccncaacgcacaccgaaaacacaaacaaaaacaacgaaacgcgaacacgcacgccgacacaaaaaaaacgacacaaaacaaaacacgcacgaaaacaaacaccaaccaacgcaaaaacaacgccacacgcccgccacacaaaaaaccgcgaaacgcgaacgacgnacacgacacgacgacgaacacgcaaaaacgaacacgaaaaaacgcaccgcgcgcaaaacacacgaacacacgaaacgcacaaacgccacacacacgaacacgaccgcaaacnaaaccacacgacgacaaaacgaaccaccacaacaaaacgacacgacaaaaacgaaacgcacacacacacaaaaacaaaacaacgaaaacacaacaacgaaacacgcgacgaacgcgacgaaacacgcaacgcaacgaacanacaacgcgacgaacgaaaaacgcgaacacccgcgancgcaaacgcgcgcacgacacgacgaaacacacgccgaaacgacaaaacgaacacacgacgcaaacacgcgcgacaacgacaacgnaaccgacgaccaacaaaaaaaacaccaacgccgcaaaaaacacgacaacaacaacacacaaanaccgaaaccgaacacaaaaaccaaaccgcacgacacaacgacacgaccgaacgacgcnacacgaccaacaacaccaaacgacgaaacgcaaaaaacacaaacgacaccgacaccgacaacaaaaacaccgaccgaaacgacgcgctaacgaaacgcccgcaccanacgacaccaaaaaacacacacgaacacaaacgcacacaccaacgaaacgcacgcaacgcacaaaacaaacnaaaacaacacgcgaaacacacgcaacacaacacaaacgaacgacacgcgaaacgcacaacacacgacgcaaaaaaacacaaccgcgacgcgacacaaacgacaanacgancgacgaaacnaacgacgcgcgcaccgcaanccgaaacacacgcacaacgctacctacgtaaatataacgtcgtcttcctaaaaacatatactaacgaaataaaattaccgaatcctctaataactctccatttatccatttaaaaacgtcgtatatctcaaaaaaataac

SEQ ID NO: 7525 - DNA, 544 bp, Artificial Sequence
  chemically treated genomic DNA (Homo sapiens) CpG-island No: 7525
  unsure (3, 6, 20, 460, 531, 539)
agngangcgtatacgagttngatcgttatttgatagtgtgcgttttcgatatatatgtttatttagttgtatgttgtaatatttatcgcgttgatgattatcgtcgattatatatagttgttacgatttgtttcgatcgtcgtatcgtagtattcgaagatgtcgtcgtcgatatacgttatttagtatttgtttttatgtgttttattagattgacgatgtattttcgatgttgtatcgtttatcgtgaggatcgtatcgttcgattttatgatttggtgtatcgtaatcgagtgagtattgatgtacggacgtgtgatttacgattttcgtatttcgttgattttgcgatacgtatatgttatgtcgataattttacgtatcgatatagttcgtacgagtagcgtttcgatcgttgttgtgattacgagagttttttatgtgaggttgattcgtagtntagattgagtagatgttgtcgtacgcgtattttgttttgtatgttatgtcgttatatataagtatgatgtngcgtcgantagtt

SEQ ID NO: 7526 - DNA, 544 bp, Artificial Sequence
  chemically treated genomic DNA (Homo sapiens) CpG-island No: 7526
  unsure (6, 14, 85, 525, 539, 542)
aactantcgacgcnacatcatacttatatataacgacataacatacaaaacaaaatacgcgtacgacaacatctactcaatctanactacgaatcaacctcacataaaaaactctcgtaatcacaacaacgatcgaaacgctactcgtacgaactatatcgatacgtaaaattatcgacataacatatacgtatcgcaaaatcaacgaaatacgaaaatcgtaaatcacacgtccgtacatcaatactcactcgattacgatacaccaaatcataaaatcgaacgatacgatcctcacgataaacgatacaacatcgaaaatacatcgtcaatctaataaaacacataaaaacaaatactaaataacgtatatcgacgacgacatcttcgaatactacgatacgacgatcgaaacaaatcgtaacaactatatataatcgacgataatcatcaacgcgataaatattacaacatacaactaaataaacatatatatcgaaaacgcacactatcaaataacgatcnaactcgtatacgcntcnct

SEQ ID NO: 7527 - DNA, 544 bp, Artificial Sequence
  chemically treated genomic DNA (Homo sapiens) CpG-island No: 7527
  unsure (6, 14, 85, 525, 539, 542)
agttantcgacgtnatattatgtttgtgtatgacgatatgatatgtagagtaagatacgcgtacgatagtatttgtttagtttgngttacgagttagttttatatgaggaattttcgtagttatagtagcgatcgaagcgttattcgtacgagttatgtcgatgcgtgagattatcgatatagtatatgcgtgtcgtaggattagcgagatgcgagagtcgtgaattatacgttcgtatattagtgtttattcgattacgatgtattagattatagagtcgagcgatacgatttttacgatgagcgatgtagtatcgaggatgtatcgttagtttgatagagtatatgaagataggtgttgagtagcgtgtgtcgacgacgatattttcgagtattacgatgcgacgatcgaggtagatcgtagtagttatgtgtagtcgacgatgattattagcgcgatgggtgttgtagtatatagttagatgagtatatgtgtcgaggacgtatattgttagatgacgattngattcgtgtgcgtnttntt

SEQ ID NO: 7528 - DNA, 544 bp, Artificial Sequence
  chemically treated genomic DNA (Homo sapiens) CpG-island No: 7528
  unsure (3, 6, 20, 460, 531, 539)
aanaanacgcacacgaatcnaatcgtcatctaacaatatacgtcctcgacacatatactcatctaactatatactacaacacccatcgcgctaataatcatcgtcgactacacataactactacgatctacctcgatcgtcgcatcgtaatactcgaaaatatcgtcgtcgacacacgctactcaacacctatcttcatatactctatcaaactaacgatacatcctcgatactacatcgctcatcgtaaaaatcgtatcgctcgactctataatctaatacatcgtaatcgaataaacactaatatacgaacgtataattcacgactctcgcatctcgctaatcctacgacacgcatatactatatcgataatctcacgcatcgacataactcgtacgaataacgcttcgatcgctactataactacgaaaattcctcatataaaactaactcgtaacncaaactaaacaaatactatcgtacgcgtatcttactctacatatcatatcgtcatacacaaacataatatnacgtcgantaact

SEQ ID NO: 7529 - DNA, 1762 bp, Artificial Sequence
  chemically treated genomic DNA (Homo sapiens) CpG-island No: 7529
  unsure (1426, 1496, 1732, 1741..1742, 1745)
aacggcgtttatattttttatttcggttttttttttggcggtcgtttaattacgtacgtgaggtttacgtattttttttatttttttttggttggcgttttatatttttttttttttttgttttcgttttttttttttttgttttttggcgtgacgtttcgtttttttcgcggttttttttaatttttcgttttattttttttttttttttttgtttttttttttttttattttcgtagtttttttttttttatcggcgttttttttttttttcgcgtttttacgtttacggtatttatatttttttttattattttttacgcgtttttttttttttttttcgttttttttttttttttttttttgttttttcgcgtttttttttttttttgtttttttttttttttttttttttttttttttttttttttttttttttttttttcgttttttttgcggtcgtttttttttttttttcgcgtttttttttttttttttgcgttcgtttttttttcgcgcgcgtttttttcgtgattttcgtttttttttattcgcgttttttattttttattgttttgtttttttcggttttcggttgtttttttttcgttttcgtcgcgtttttattttgttttttttttattttgtttttttcggtttttttttcgtttttttttttttttcgtttttcgtttttcgttttttttttttttttttttttttttttgttttagtttcgtttcgttattttcgttttcgttttttcgtttttttttgcgttttttttttattcgcggttttgttcgtcgttttcgtttcgtttttttttttcgtgtttttttttttgtttttttcgcgttttttttcgtttttttcgttttcgttttttttcgtcgtcggtttttcgttttgttttttttcgtttcgtttttttggtttttttgttcggcgtttttttcgtttgtcgtgtattcgcgtttcgtcggttttcgcgttttcgtttttgtcgttttcgtttttttttttttttttttcgttttttttttttttttttttttgcgttttcgttttgtcgtttgttattttttttttttttttttttttcgttttttttcgtttttttgtttttttttttttcgtttttttttttttttttttcgtcgtttgttcgttttttttttttacgtcgttgtggtttcggttttttgtttgttttcgttgtttttttgtttttgtcggttttgcgtcgttattgtttcgtttttatacgcgtttttttttttcgttttttcgtttttacgtttgttgtttttgttcgtgcgtcgttttttttagtaagttgttcgtattttttgtttatttcgttttttgacgcgttatattatttcgttttgttttttgttttttttattatcgttttttttancgttttgtagcgtgtttatttgcgttttcgtgttattttttttttacgtttattttattttgttgttttnattttgttttcgtgcgcgttgttgtttacgtgttcgcgttgttttttcgtatttttttttgttgttttcgattttttcgtgtttttttttgatttttatcgtttttatcgttttgatttgttgtttcgagtacgatatttcgtttgttcggtcgtcgtcgttttgtttttcgttttattgtttttcgcgcgtcgacgagtatttttttcgtcgtattcgtcgagttgtatttggtntttttttannttntttagaatttattttat

SEQ ID NO: 7530 - DNA, 1762 bp, Artificial Sequence
  chemically treated genomic DNA (Homo sapiens) CpG-island No: 7530
  unsure (18, 21..22, 31, 267, 337)
ataaaataaattctaaanaanntaaaaaaanaccaaatacaactcgacgaatacgacgaaaaaaatactcgtcgacgcgcgaaaaacaataaaacgaaaaacaaaacgacgacgaccgaacaaacgaaatatcgtactcgaaacaacaaatcaaaacgataaaaacgataaaaatcaaaaaaaaacacgaaaaaatcgaaaacaacaaaaaaaaatacgaaaaaacaacgcgaacacgtaaacaacaacgcgcacgaaaacaaaatnaaaacaacaaaataaaataaacgtaaaaaaaaaataacacgaaaacgcaaataaacacgctacaaaacgntaaaaaaaacgataataaaaaaaacaaaaaacaaaacgaaataatataacgcgtcaaaaaacgaaataaacaaaaaatacgaacaacttactaaaaaaaacgacgcacgaacaaaaacaacaaacgtaaaaacgaaaaaacgaaaaaaaaaaacgcgtataaaaacgaaacaataacgacgcaaaaccgacaaaaacaaaaaaacaacgaaaacaaacaaaaaaccgaaaccacaacgacgtaaaaaaaaaaaacgaacaaacgacgaaaaaaaaaaaaaaaaaaacgaaaaaaaaaaaaacaaaaaaacgaaaaaaaacgaaaaaaaaaaaaaaaaaaaaaataacaaacgacaaaacgaaaacgcaaaaaaaaaaaaaaaaaaaaaacgaaaaaaaaaaaaaaaaaaacgaaaacgacaaaaacgaaaacgcgaaaaccgacgaaacgcgaatacacgacaaacgaaaaaaacgccgaacaaaaaaaccaaaaaaacgaaacgaaaaaaaacaaaacgaaaaaccgacgacgaaaaaaaacgaaaacgaaaaaaacgaaaaaaaacgcgaaaaaaacaaaaaaaaaaacacgaaaaaaaaaaacgaaacgaaaacgacgaacaaaaccgcgaataaaaaaaaaacgcaaaaaaaaacgaaaaaacgaaaacgaaaataacgaaacgaaactaaaacaaaaaaaaaaaaaaaaaaaaaaaaaaaacgaaaaacgaaaaacgaaaaaaaaaaaaaaacgaaaaaaaaaccgaaaaaaacaaaataaaaaaaaaacaaaataaaaacgcgacgaaaacgaaaaaaaaacaaccgaaaaccgaaaaaaacaaaacaataaaaaataaaaaacgcgaataaaaaaaaacgaaaatcacgaaaaaaacgcgcgcgaaaaaaaaacgaacgcaaaaaaaaaaaaaaaaacgcgaaaaaaaaaaaaaaacgaccgcaaaaaaaacgaaaaaaaaaaaaaaaaaaaaaaaaaaaaaaaaaaaaaaaaaaaaaaaaaaaaacaaaaaaaaaaaaaaacgcgaaaaaacaaaaaaaaaaaaaaaaaaaaaacgaaaaaaaaaaaaaaaaacgcgtaaaaaataataaaaaaaaatataaataccgtaaacgtaaaaacgcgaaaaaaaaaaaaaacgccgataaaaaaaaaaaaactacgaaaataaaaaaaaaaaaaaacaaaaaaaaaaaaaaaaaataaaacgaaaaattaaaaaaaaccgcgaaaaaaacgaaacgtcacgccaaaaaacaaaaaaaaaaaaaacgaaaacaaaaaaaaaaaaaaatataaaacgccaaccaaaaaaaaataaaaaaaatacgtaaacctcacgtacgtaattaaacgaccgccaaaaaaaaaaccgaaataaaaaatataaacgccgtt

SEQ ID NO: 7531 - DNA, 1762 bp, Artificial Sequence
  chemically treated genomic DNA (Homo sapiens) CpG-island No: 7531
  unsure (18, 21..22, 31, 267, 337)
atagagtgaattttgggnaanntaggagganattaaatatagttcgacgagtacgacggagagagtgttcgtcgacgcgcggagagtagtagagcgagaggtaagacgacgacgatcgagtaagcgagatgtcgtattcgaagtagtagattaagacgatgagagcgatagagattagaagagagtacggaagagtcgaggatagtagagagagatacgagagagtagcgcgagtacgtgagtagtagcgcgtacgagagtagagtnagagtagtagagtggagtgaacgtagagaagagatggtacgaggacgtagatggatacgttatagagcgntgagagagacggtagtgaagagagtagagagtagagcggagtagtgtagcgcgttaggaggcggagtgagtaagaagtacgagtagtttgttaagagagacgacgtacgagtagaggtagtaggcgtgagagcgaaaggacgagagagagaagcgcgtgtaaaggcggagtagtggcggcgtaggatcgatagagatagggaggtagcgggagtaggtagggagtcgagattatagcgacgtggagagagaggacgggtaggcggcgagaaggagggaggagagagcgagagaggggaggataggggggcgaggagaggcggggaagggggagagaagaggggtagtaggcggtagagcgggagcgtaggggaggggaggagggaggagcggggaaggagggggggaagacgagagcggtaagggcgagagcgcggaggtcgacgggacgcgggtgtacggtaggcggagagagcgtcgggtagaggagttagagaggcgggacgagggagggtaggacggggagtcgacggcgagagggaacgagggcgagagaggcggggggaggcgcgggggaggtagaggagaaggtacgagaagaaagggcggaacggagacggcgagtagagtcgcgagtgggggagaagcgtagaaaggagcgagggagcgggaacgagggtggcggagcgaggttgaaatagaagggagaaaggagagaagaggggagcgaggagcggagggcgggaagaaggagagggcgggagggaggtcggagggggtagagtagggaaggggtagggtggggacgcggcggaggcggagaggaagtagtcgggagtcgagaaagataagatagtggagggtggggaacgcggataaggggaagcggaggttacggggggagcgcgcgcggagagggagcgggcgtagaggggaagaaaagggcgcgagggaggggaggaagcggtcgtagggagggcgggggagaggaggaagggggagagggaggggggagagggaggagagagagagagtagaggggaagaagggcgcgaagagataggagagggagggagggaggggcgggagaggagggaagagacgcgtggagagtgatggggaagagtgtgggtgtcgtgggcgtgggggcgcgggaaaagaaaagagcgtcggtaaaaaaaaaaaaattgcgggggtgggggggagggggggtagagagaggggaggagggtaaagcggggagttggagggaatcgcggggggggcggagcgttacgttagagggtaggaggggaggaggcgggagtagggggggggagaagtgtaagacgttagttaggagaaggtagggagagtgcgtggattttacgtgcgtggttaggcggtcgttaaggaggaggtcgaggtagggggtgtgaacgtcgtt

SEQ ID NO: 7532 - DNA, 1762 bp, Artificial Sequence
  chemically treated genomic DNA (Homo sapiens) CpG-island No: 7532
  unsure (1426, 1496, 1732, 1741..1742, 1745)
aacgacgttcacaccccctacctcgacctcctccttaacgaccgcctaaccacgcacgtaaaatccacgcactctccctaccttctcctaactaacgtcttacacttctccccccccctactcccgcctcctcccctcctaccctctaacgtaacgctccgccccccccgcgattccctccaactccccgctttaccctcctcccctctctctaccccccctcccccccacccccgcaatttttttttttttaccgacgctcttttcttttcccgcgcccccacgcccacgacacccacactcttccccatcactctccacgcgtctcttccctcctctcccgcccctccctccctccctctcctatctcttcgcgcccttcttcccctctactctctctctctcctccctctcccccctccctctcccccttcctcctctcccccgccctccctacgaccgcttcctcccctccctcgcgcccttttcttcccctctacgcccgctccctctccgcgcgcgctccccccgtaacctccgcttccccttatccgcgttccccaccctccactatcttatctttctcgactcccgactacttcctctccgcctccgccgcgtccccaccctaccccttccctactctaccccctccgacctccctcccgccctctccttcttcccgccctccgctcctcgctcccctcttctctcctttctcccttctatttcaacctcgctccgccaccctcgttcccgctccctcgctcctttctacgcttctcccccactcgcgactctactcgccgtctccgttccgccctttcttctcgtaccttctcctctacctcccccgcgcctccccccgcctctctcgccctcgttccctctcgccgtcgactccccgtcctaccctccctcgtcccgcctctctaactcctctacccgacgctctctccgcctaccgtacacccgcgtcccgtcgacctccgcgctctcgcccttaccgctctcgtcttccccccctccttccccgctcctccctcctcccctcccctacgctcccgctctaccgcctactacccctcttctctcccccttccccgcctctcctcgcccccctatcctcccctctctcgctctctcctccctccttctcgccgcctacccgtcctctctctccacgtcgctataatctcgactccctacctactcccgctacctccctatctctatcgatcctacgccgccactactccgcctttacacgcgcttctctctctcgtcctttcgctctcacgcctactacctctactcgtacgtcgtctctcttaacaaactactcgtacttcttactcactccgcctcctaacgcgctacactactccgctctactctctactctcttcactaccgtctctctcancgctctataacgtatccatctacgtcctcgtaccatctcttctctacgttcactccactctactactctnactctactctcgtacgcgctactactcacgtactcgcgctactctctcgtatctctctctactatcctcgactcttccgtactctcttctaatctctatcgctctcatcgtcttaatctactacttcgaatacgacatctcgcttactcgatcgtcgtcgtcttacctctcgctctactactctccgcgcgtcgacgaacactctctccgtcgtactcgtcgaactatatttaatntcctcctannttncccaaaattcactctat

SEQ ID NO: 7533 - DNA, 1995 bp, Artificial Sequence
  chemically treated genomic DNA (Homo sapiens) CpG-island No: 7533
tattcgggtttttttttttttcgtatttttttttttttttgggttcggttttttttttcgtttttttttttaattgcgttttattattcgtattgcgtgcgtcgttgtttcggtttttttttttttttattttttttcgttgttttttttttttttttttttttttcgtgcgtcgtggggtttcgttcgttttttttttttttttttttttttttatatcgtttttttttttcgttcgtttttttttgttttcgcgtttgtttttttttcgtttttttttttttttttttttcgcgttttttttttttcggtttgtttttttttgtttcgtttttttttttttttttttttttttttgttgcgtttttttcgtttcgtttgtacgttttcgttttgttgttttttttttttttttttttttcggtttttttttttttttttttcgttgcgtatttttttcgttttgttttcgtttttacgttttgtttcgtttttttcgtttttttcgttttcggttttttcgtttttttttttttatttttttgtttttttttttttttttttttttttatttttttgtttttttcgttttgtttttttttcgggttttttatcgtttttttcgcgttgtcgtttttttttgtgtttttttttttatttcgttttcgcgttattttttttttgttttttgtcgttgcgatttcgttttttttttttattttttttcgtttttgttttttttttttttcgtcgttttcgcgtttcgtatatcggtcgtttcggtcgttttttgcgtttttttttttttttttttttatttttcgttcgtttgtcgtttatttcgcgttttcggttttgttcgtttttttttttttatgttttcgcgcgttcgtgtttttttttttttttttttttcgttttcgcgtttttcgtttcgttttttttttttttcgttttttttttttcgtttttgatttgttttttttcgtttcgtcgtgtttgatattttttttttcgttattttcgtgtttttgagttatcgtcgttttatttttcgtttttttattttttttcgattttttttttatcgtgttatatgcgtcgtgttgatttacgtgtcgattttcgttttgttttttttcgtttttcgcgcgttttttttttttgttgtatttgatttttttttttttttttttttttcgttttttatacgtcgtttttttttttttttttcgttcgtttgttttcgtttttttttttttttttttttttcgttttttttttatgttttattttgttttttttcgtttttttttttttttcgttttcgtttgtttgtcggtatgtcgtcgtgggttttgtagggttcgcgatatgttcgtgagagttaacgcgtttattatgttcgtttttttttcgtttgtcgtaatattagtcgatatgtgttgtttttagcgatcgtttttcgatattattttagttatcgtattgtcgtgagatgttattagatagtttaataatagttcgttgcgtggcggatattatatcgtggttgtatggttagagttgtattatattatatgtcgacgttttgttttttttagttatgcgttgtttttttttatgtacgttgttatatttttgatcgtcgtttagtttgttatttagtcgttttcgtgttaatcgtgacggtggagtagtgtcggttttgcgttatttatggcgttttttatcgtttattttcgtttaagtcgaatttttatgtttgtgtgttgttgcggttcgcggttgatgcggtttatttattttcgatttaagagcgtcgttttataacgtgtttagttttagtatgaacgttacggggttatgaatcggttgaggatatatgtgatcgacgtcgttcgtttatatagtgtttatattataggagtgttttacgttaatttttcgaataatacggtgttagttgttttattttggttttggtgttttgtt

SEQ ID NO: 7534 - DNA, 1995 bp, Artificial Sequence
  chemically treated genomic DNA (Homo sapiens) CpG-island No: 7534
aacaaaacaccaaaaccaaaataaaacaactaacaccgtattattcgaaaaattaacgtaaaacactcctataatataaacactatataaacgaacgacgtcgatcacatatatcctcaaccgattcataaccccgtaacgttcatactaaaactaaacacgttataaaacgacgctcttaaatcgaaaataaataaaccgcatcaaccgcgaaccgcaacaacacacaaacataaaaattcgacttaaacgaaaataaacgataaaaaacgccataaataacgcaaaaccgacactactccaccgtcacgattaacacgaaaacgactaaataacaaactaaacgacgatcaaaaatataacaacgtacataaaaaaaaacaacgcataactaaaaaaaacaaaacgtcgacatataatataatacaactctaaccatacaaccacgatataatatccgccacgcaacgaactattattaaactatctaataacatctcacgacaatacgataactaaaataatatcgaaaaacgatcgctaaaaacaacacatatcgactaatattacgacaaacgaaaaaaaaacgaacataataaacgcgttaactctcacgaacatatcgcgaaccctacaaaacccacgacgacataccgacaaacaaacgaaaacgaaaaaaaaaaaaaaacgaaaaaaaacaaaataaaacataaaaaaaaaacgaaaaaaaaaaaaaaaaaaaaaaacgaaaacaaacgaacgaaaaaaaaaaaaaaaaacgacgtataaaaaacgaaaaaaaaaaaaaaaaaaaaaaatcaaatacaacaaaaaaaaaaaacgcgcgaaaaacgaaaaaaaacaaaacgaaaatcgacacgtaaatcaacacgacgcatataacacgataaaaaaaaaatcgaaaaaaaataaaaaaacgaaaaataaaacgacgataactcaaaaacacgaaaataacgaaaaaaaaaatatcaaacacgacgaaacgaaaaaaaacaaatcaaaaacgaaaaaaaaaaaacgaaaaaaaaaaaaaacgaaacgaaaaacgcgaaaacgaaaaaaaaaaaaaaaaaaaaacacgaacgcgcgaaaacataaaaaaaaaaaaacgaacaaaaccgaaaacgcgaaataaacgacaaacgaacgaaaaataaaaaaaaaaaaaaaaaaaaacgcaaaaaacgaccgaaacgaccgatatacgaaacgcgaaaacgacgaaaaaaaaaaaaaacaaaaacgaaaaaaaataaaaaaaaaaaacgaaatcgcaacgacaaaaaacaaaaaaaaaataacgcgaaaacgaaataaaaaaaaaaacacaaaaaaaaacgacaacgcgaaaaaaacgataaaaaacccgaaaaaaaaacaaaacgaaaaaaacaaaaaaataaaaaaaaaaaaaaaaaaaaaaaaacaaaaaaataaaaaaaaaaaaacgaaaaaaccgaaaacgaaaaaaacgaaaaaaacgaaacaaaacgtaaaaacgaaaacaaaacgaaaaaaatacgcaacgaaaaaaaaaaaaaaaaaaaccgaaaaaaaaaaaaaaaaaaaaaacaacaaaacgaaaacgtacaaacgaaacgaaaaaaacgcaacaaaaaaaaaaaaaaaaaaaaaaaaaaacgaaacaaaaaaaaacaaaccgaaaaaaaaaaaacgcgaaaaaaaaaaaaaaaaaaaaacgaaaaaaaaacaaacgcgaaaacaaaaaaaaacgaacgaaaaaaaaaaacgatataaaaaaaaaaaaaaaaaaaaaaaaaacgaacgaaaccccacgacgcacgaaaaaaaaaaaaaaaaaaaaaaaacaacgaaaaaaaataaaaaaaaaaaaaaaccgaaacaacgacgcacgcaatacgaataataaaacgcaattaaaaaaaaaaacgaaaaaaaaaaccgaacccaaaaaaaaaaaaaaatacgaaaaaaaaaaaaacccgaata

SEQ ID NO: 7535 - DNA, 1995 bp, Artificial Sequence
  chemically treated genomic DNA (Homo sapiens) CpG-island No: 7535
agtagggtattaggattaggatgaagtagttggtatcgtgttgttcgaggagttgacgtggaatatttttatggtgtgggtattatataggcgaacggcgtcgattatatatatttttagtcgatttataatttcgtggcgtttatgttgaggttggatacgttatagaacggcgtttttgagtcggaggtagatagatcgtattaatcgcggatcgtaatagtatataggtatgagagttcggtttagacgagggtagacggtaagaggcgttatgagtaacgtagagtcgatattgttttatcgttacgattggtacgaagacgattaggtgatagattggacgacgattagggatgtgatagcgtgtatggaggaggatagcgtatggttgagagagataggacgtcggtatatagtgtgatgtagttttggttatgtaattacgatgtggtgttcgttacgtagcgagttgttgttgaattgtttggtggtattttacggtagtacgatagttgagatgatgtcgggagacgatcgttggagatagtatatatcgattgatattgcgataggcgagggagggacgagtatggtggacgcgttgatttttacggatatatcgcgagttttgtaaggtttacggcgatatgtcggtagatagacgaggacgagagagggagaggggcggaaggagatagagtgaggtataggagagaggcggagaggagaagaaggagaaaggacggaggtagacggacgaagagaagaaggagaagcgacgtatgggaggcgggaaggagagagaggagagagagttaagtgtagtagagagaggaggcgcgcgagagacgagagaggataggacgagagtcggtacgtgagttagtacggcgtatgtgatacgatgagaagagagtcgaagagagatgagagaacgagagatgaagcgacggtgatttagaggtacgagagtgacgagagaggaagtgttagatacgacgaggcgagagagagtagattagagacgagagaggagagacgagagaggggagggacgagacggagagcgcggagacgagaaagagagagggagaagggtacgggcgcgcgagagtatgagaaggagaagacgagtagagtcgaggacgcggagtgagcggtaggcgagcgagggatggaagagagaagagagagagacgtagaggacgatcgagacgatcgatgtacgagacgcgaaggcgacgaaggggaggagagataagaacgagagagagtgagagagagagacgaaatcgtaacgatagaggatagaggagagatagcgcggaggcgagatgagaagaggggtatagagagagacggtagcgcggagagagcggtgagaggttcgaaaggagaatagagcgaggagggtagaagggtgaagagagagggagggagggagaggtagagggatagagaaggaggagcgaaggagtcgaggacggaggaagcgaggagaacggagtagggcgtggagacgagaataggacgaagggaatgcgtagcggggggagagaggagagggatcgaggaggaaaagggagagagagatagtagaacggagacgtgtaggcgggacggagaaggcgtaataggaagaggaggagaaaggggggggagcgggataaggggaagtaggtcgagagaggagaagcgcggaagaggaagaagggaaagaacgaaggggagataagcgcggaagtagaagagagcgagcggggaagagaggcggtgtggagggaagaaaggaaggagggagggcgagcgagattttacggcgtacgggagagggggagaaaagggaggaatagcgaaggagagtgagagggaggagagatcgaaatagcgacgtacgtagtacggataatagagcgtaattgaaaggggaagcggagaggagggtcgaatttaaaggagggagaaggtgcgagagagaagggggttcgggtg

SEQ ID NO: 7536 - DNA, 1995 bp, Artificial Sequence
  chemically treated genomic DNA (Homo sapiens) CpG-island No: 7536
cacccgaacccccttctctctcgcaccttctccctcctttaaattcgaccctcctctccgcttcccctttcaattacgctctattatccgtactacgtacgtcgctatttcgatctctcctccctctcactctccttcgctattcctcccttttctccccctctcccgtacgccgtaaaatctcgctcgccctccctccttcctttcttccctccacaccgcctctcttccccgctcgctctcttctacttccgcgcttatctccccttcgttctttcccttcttcctcttccgcgcttctcctctctcgacctacttccccttatcccgctcccccccctttctcctcctcttcctattacgccttctccgtcccgcctacacgtctccgttctactatctctctctcccttttcctcctcgatccctctcctctctccccccgctacgcattcccttcgtcctattctcgtctccacgccctactccgttctcctcgcttcctccgtcctcgactccttcgctcctccttctctatccctctacctctccctccctccctctctcttcacccttctaccctcctcgctctattctcctttcgaacctctcaccgctctctccgcgctaccgtctctctctatacccctcttctcatctcgcctccgcgctatctctcctctatcctctatcgttacgatttcgtctctctctctcactctctctcgttcttatctctcctccccttcgtcgccttcgcgtctcgtacatcgatcgtctcgatcgtcctctacgtctctctctcttctctcttccatccctcgctcgcctaccgctcactccgcgtcctcgactctactcgtcttctccttctcatactctcgcgcgcccgtacccttctccctctctctttctcgtctccgcgctctccgtctcgtccctcccctctctcgtctctcctctctcgtctctaatctactctctctcgcctcgtcgtatctaacacttcctctctcgtcactctcgtacctctaaatcaccgtcgcttcatctctcgttctctcatctctcttcgactctcttctcatcgtatcacatacgccgtactaactcacgtaccgactctcgtcctatcctctctcgtctctcgcgcgcctcctctctctactacacttaactctctctcctctctctccttcccgcctcccatacgtcgcttctccttcttctcttcgtccgtctacctccgtcctttctccttcttctcctctccgcctctctcctatacctcactctatctccttccgcccctctccctctctcgtcctcgtctatctaccgacatatcgccgtaaaccttacaaaactcgcgatatatccgtaaaaatcaacgcgtccaccatactcgtccctccctcgcctatcgcaatatcaatcgatatatactatctccaacgatcgtctcccgacatcatctcaactatcgtactaccgtaaaataccaccaaacaattcaacaacaactcgctacgtaacgaacaccacatcgtaattacataaccaaaactacatcacactatataccgacgtcctatctctctcaaccatacgctatcctcctccatacacgctatcacatccctaatcgtcgtccaatctatcacctaatcgtcttcgtaccaatcgtaacgataaaacaatatcgactctacgttactcataacgcctcttaccgtctaccctcgtctaaaccgaactctcatacctatatactattacgatccgcgattaatacgatctatctacctccgactcaaaaacgccgttctataacgtatccaacctcaacataaacgccacgaaattataaatcgactaaaaatatatataatcgacgccgttcgcctatataatacccacaccataaaaatattccacgtcaactcctcgaacaacacgataccaactacttcatcctaatcctaataccctact

SEQ ID NO: 7537 - DNA, 517 bp, Artificial Sequence
  chemically treated genomic DNA (Homo sapiens) CpG-island No: 7537
  unsure (365)
agcgtttttacgatatattttagcgtcgttttatgtagttattttcgtttggtgtatcgtcgatcgttttttgttttaatacgttgtagatatcgtttattttttttttagttcgcgatagatattattttcgttgttatttattttagtattttgttacgacggttgtttagtcgtcgtaattttcgcgttatcggttagagtttagttatagttttgtttagttattttttttattcgtattaatttggttcgtgacgcgtttcgtcgatttgttacgttgtttttcgtagattgtgcgtcgattcgatattcgtttatttagttttgttgatgcgtggtagatagttgttgttttagattgnttagcgtttttaggatataaggtggtttttagatcgcgtatgattttgtatatttcgtttatgttcgttggttgttatttgtttagagcggttagcgtttatatggattatagttttatcgtagtgttgttttgatttatatatatattgtg

SEQ ID NO: 7538 - DNA, 517 bp, Artificial Sequence
  chemically treated genomic DNA (Homo sapiens) CpG-island No: 7538
  unsure (153)
cacaatatatatataaatcaaaacaacactacgataaaactataatccatataaacgctaaccgctctaaacaaataacaaccaacgaacataaacgaaatatacaaaatcatacgcgatctaaaaaccaccttatatcctaaaaacgctaancaatctaaaacaacaactatctaccacgcatcaacaaaactaaataaacgaatatcgaatcgacgcacaatctacgaaaaacaacgtaacaaatcgacgaaacgcgtcacgaaccaaattaatacgaataaaaaaaataactaaacaaaactataactaaactctaaccgataacgcgaaaattacgacgactaaacaaccgtcgtaacaaaatactaaaataaataacaacgaaaataatatctatcgcgaactaaaaaaaaaataaacgatatctacaacgtattaaaacaaaaaacgatcgacgatacaccaaacgaaaataactacataaaacgacgctaaaatatatcgtaaaaacgct

SEQ ID NO: 7539 - DNA, 517 bp, Artificial Sequence
  chemically treated genomic DNA (Homo sapiens) CpG-island No: 7539
  unsure (153)
tatagtgtgtatgtgagttagagtagtattgcggtagaattatgatttatgtggacgttagtcgttttgagtaggtgatagttagcgagtatagacgaggtatgtagagttatacgcgatttagagattattttatattttgagagcgttgantagtttagagtagtagttgtttattacgtattagtaggattagatgagcgagtgtcggatcgacgtataatttacgagaagtagcgtgatagatcgacggagcgcgttacgaattagattagtgcgagtggagagaatgattgaatagaattgtggttagattttggtcgatagcgcggagattacggcgattagatagtcgtcgtagtaagatgttggagtggatggtagcgagagtgatatttatcgcgagttgagaagaaggtaagcgatatttgtagcgtattgaagtagagggcggtcgacgatgtattaggcgaggatagttatatagagcggcgttgagatgtgtcgtgaggacgtt

SEQ ID NO: 7540 - DNA, 517 bp, Artificial Sequence
  chemically treated genomic DNA (Homo sapiens) CpG-island No: 7540
  unsure (365)
aacgtcctcacgacacatctcaacgccgctctatataactatcctcgcctaatacatcgtcgaccgccctctacttcaatacgctacaaatatcgcttaccttcttctcaactcgcgataaatatcactctcgctaccatccactccaacatcttactacgacgactatctaatcgccgtaatctccgcgctatcgaccaaaatctaaccacaattctattcaatcattctctccactcgcactaatctaattcgtaacgcgctccgtcgatctatcacgctacttctcgtaaattatacgtcgatccgacactcgctcatctaatcctactaatacgtaataaacaactactactctaaactantcaacgctctcaaaatataaaataatctctaaatcgcgtataactctacatacctcgtctatactcgctaactatcacctactcaaaacgactaacgtccacataaatcataattctaccgcaatactactctaactcacatacacactata

SEQ ID NO: 7541 - DNA, 816 bp, Artificial Sequence
  chemically treated genomic DNA (Homo sapiens) CpG-island No: 7541
agcgatcgataggtaatcggagaagttcgaaatgtttcgtaagagtacgtcggtatttttttttgagtgataggtattcgattttttgatttcgtcggtcgttatttttatattaaaaagcgttcggtttgtacgtatttttcgacgttttgatggaacgattttttcgagtttattttggcgcggtacgtttcgttaagttttaattttcgtttattttcgagcgtttcgtcgagaaaacgcgcggcgtcgcgggtagcgttttcgttttcgtacgtttcggtagcgcggggtcgcggatatcgcgttttttagcgttaatcgggtcgggggttacgcgttttttcggttttattcggtcgacgtcgtttattacgaggcgcgcggcggcggtcgcgggtttatttatcgtagaggcgcgtatcggttcggatttcgtttttcgtcgttttttttttttgttatcgcgtagtcgtcgtcggattttttgttcgtcgttcgtcgttcgtcggcgggcgcggcggtttttttttttttttcgtcgttttttttcgcgcgtatttcgtttgttttcgcggttcgtacggacggcggggggcggtttcgtacgtcgtttcgttcgcggtatttttcgtagtttcgcgcgtcggttttttttcgttttttacgtttcgtcgttgttcgtcgtttcggttcgttttttttttttcgttttttttcgcgcggcgttcgcggcgggcggggggattatatacgaattttagattttaatatataggggtattttagagagtttatcgtcgttgtattttttat

SEQ ID NO: 7542 - DNA, 816 bp, Artificial Sequence
  chemically treated genomic DNA (Homo sapiens) CpG-island No: 7542
ataaaaaatacaacgacgataaactctctaaaatacccctatatattaaaatctaaaattcgtatataatccccccgcccgccgcgaacgccgcgcgaaaaaaaacgaaaaaaaaaaaacgaaccgaaacgacgaacaacgacgaaacgtaaaaaacgaaaaaaaaccgacgcgcgaaactacgaaaaataccgcgaacgaaacgacgtacgaaaccgccccccgccgtccgtacgaaccgcgaaaacaaacgaaatacgcgcgaaaaaaaacgacgaaaaaaaaaaaaaaaccgccgcgcccgccgacgaacgacgaacgacgaacaaaaaatccgacgacgactacgcgataacaaaaaaaaaaaacgacgaaaaacgaaatccgaaccgatacgcgcctctacgataaataaacccgcgaccgccgccgcgcgcctcgtaataaacgacgtcgaccgaataaaaccgaaaaaacgcgtaacccccgacccgattaacgctaaaaaacgcgatatccgcgaccccgcgctaccgaaacgtacgaaaacgaaaacgctacccgcgacgccgcgcgttttctcgacgaaacgctcgaaaataaacgaaaattaaaacttaacgaaacgtaccgcgccaaaataaactcgaaaaaatcgttccatcaaaacgtcgaaaaatacgtacaaaccgaacgctttttaatataaaaataacgaccgacgaaatcaaaaaatcgaatacctatcactcaaaaaaaaataccgacgtactcttacgaaacatttcgaacttctccgattacctatcgatcgct

SEQ ID NO: 7543 - DNA, 816 bp, Artificial Sequence
  chemically treated genomic DNA (Homo sapiens) CpG-island No: 7543
gtggagggtgtagcgacgatggattttttagagtgtttttgtgtgttagagtttagaattcgtatgtaattttttcgttcgtcgcgggcgtcgcgcggggggggacgggggagggggggcgggtcggggcggcgggtagcggcgaggcgtggggggcgggggggggtcggcgcgcggggttgcggggggtgtcgcgggcggggcggcgtgcggggtcgtttttcgtcgttcgtgcgggtcgcgggggtaggcggggtgcgcgcggggaggggcggcgaggggagggggggggtcgtcgcgttcgtcggcgggcggcgggcggcgggtagggggttcggcggcggttgcgcggtggtagggaggaggggcggcgaggggcggggttcggatcgatgcgcgtttttgcggtgggtgggttcgcggtcgtcgtcgcgcgtttcgtggtgggcgacgtcgatcgggtggggtcgggggggcgcgtggttttcggttcgattggcgttgagggacgcggtgttcgcggtttcgcgttgtcggggcgtacgggagcgggggcgttgttcgcggcgtcgcgcgttttttcggcggggcgttcggaagtgggcggggattagggtttggcggggcgtgtcgcgttagggtgggttcgggggggtcgttttattagggcgtcggaggatacgtgtaggtcggacgttttttggtgtggggatggcggtcggcggggttagggggtcgggtgtttgttatttaggggggggtgtcgacgtgtttttgcggggtatttcgggttttttcggttgtttatcggtcgtt

SEQ ID NO: 7544 - DNA, 816 bp, Artificial Sequence
  chemically treated genomic DNA (Homo sapiens) CpG-island No: 7544
aacgaccgataaacaaccgaaaaaacccgaaataccccgcaaaaacacgtcgacacccccccctaaataacaaacacccgaccccctaaccccgccgaccgccatccccacaccaaaaaacgtccgacctacacgtatcctccgacgccctaataaaacgacccccccgaacccaccctaacgcgacacgccccgccaaaccctaatccccgcccacttccgaacgccccgccgaaaaaacgcgcgacgccgcgaacaacgcccccgctcccgtacgccccgacaacgcgaaaccgcgaacaccgcgtccctcaacgccaatcgaaccgaaaaccacgcgcccccccgaccccacccgatcgacgtcgcccaccacgaaacgcgcgacgacgaccgcgaacccacccaccgcaaaaacgcgcatcgatccgaaccccgcccctcgccgcccctcctccctaccaccgcgcaaccgccgccgaaccccctacccgccgcccgccgcccgccgacgaacgcgacgaccccccccctcccctcgccgcccctccccgcgcgcaccccgcctacccccgcgacccgcacgaacgacgaaaaacgaccccgcacgccgccccgcccgcgacaccccccgcaaccccgcgcgccgacccccccccgccccccacgcctcgccgctacccgccgccccgacccgccccccctcccccgtccccccccgcgcgacgcccgcgacgaacgaaaaaattacatacgaattctaaactctaacacacaaaaacactctaaaaaatccatcgtcgctacaccctccac

SEQ ID NO: 7545 - DNA, 515 bp, Artificial Sequence
  chemically treated genomic DNA (Homo sapiens) CpG-island No: 7545
agagatttcgcgtttttcgttggtatttggtatcgtacgcgttttatttgcgagggttgcgggtcgaggtcgcggtcgcggtatcgtagttggtagttttgcgtgttttcgagttggggggcgaagggatcgcgggcggacggcgcggaggcggcgggcggcgacgttaatagtagtagtagtagtagcggcggtggtattagcgttatcgtagttatggtcgggcggaacgcggggggcgcgggggattttagtttaggtcgggtacggaggatgtagcggttgcggcggggatcggggcgttgacgttattcgagcgaggtagtttgggaagcggggggtgggagatgcggagagcgggcggggtagttgcgttgcggtattcgaggcgtgcgggtcgggcggggtaggtgtatcgcggtttttatcgtttattttatcgcgggggttttaggatatttttttggtgtttacgggcgggggatttttgttggcgtttggggttaaaaggaaat

SEQ ID NO: 7546 - DNA, 515 bp, Artificial Sequence
  chemically treated genomic DNA (Homo sapiens) CpG-island No: 7546
atttccttttaaccccaaacgccaacaaaaatcccccgcccgtaaacaccaaaaaaatatcctaaaacccccgcgataaaataaacgataaaaaccgcgatacacctaccccgcccgacccgcacgcctcgaataccgcaacgcaactaccccgcccgctctccgcatctcccaccccccgcttcccaaactacctcgctcgaataacgtcaacgccccgatccccgccgcaaccgctacatcctccgtacccgacctaaactaaaatcccccgcgccccccgcgttccgcccgaccataactacgataacgctaataccaccgccgctactactactactactattaacgtcgccgcccgccgcctccgcgccgtccgcccgcgatcccttcgccccccaactcgaaaacacgcaaaactaccaactacgataccgcgaccgcgacctcgacccgcaaccctcgcaaataaaacgcgtacgataccaaataccaacgaaaaacgcgaaatctct

SEQ ID NO: 7547 - DNA, 515 bp, Artificial Sequence
  chemically treated genomic DNA (Homo sapiens) CpG-island No: 7547
atttttttttggttttaagcgttagtagagatttttcgttcgtgggtattagggaggtgttttgggattttcgcgatgggatagacggtgggggtcgcgatgtatttgtttcgttcgattcgtacgtttcgggtgtcgtagcgtagttatttcgttcgtttttcgtattttttatttttcgttttttaggttgtttcgttcgggtgacgttagcgtttcggttttcgtcgtagtcgttgtatttttcgtgttcggtttgagttggagtttttcgcgtttttcgcgtttcgttcggttatggttgcggtggcgttgatgttatcgtcgttgttgttgttgttgttgttggcgtcgtcgttcgtcgttttcgcgtcgttcgttcgcgattttttcgttttttagttcggggatacgtagaattgttagttgcggtgtcgcgatcgcgatttcggttcgtagttttcgtaggtgaggcgcgtgcggtgttaggtgttagcgggggacgcgggattttt

SEQ ID NO: 7548 - DNA, 515 bp, Artificial Sequence
  chemically treated genomic DNA (Homo sapiens) CpG-island No: 7548
aaaaatcccgcgtcccccgctaacacctaacaccgcacgcgcctcacctacgaaaactacgaaccgaaatcgcgatcgcgacaccgcaactaacaattctacgtatccccgaactaaaaaacgaaaaaatcgcgaacgaacgacgcgaaaacgacgaacgacgacgccaacaacaacaacaacaacaacgacgataacatcaacgccaccgcaaccataaccgaacgaaacgcgaaaaacgcgaaaaactccaactcaaaccgaacacgaaaaatacaacgactacgacgaaaaccgaaacgctaacgtcacccgaacgaaacaacctaaaaaacgaaaaataaaaaatacgaaaaacgaacgaaataactacgctacgacacccgaaacgtacgaatcgaacgaaacaaatacatcgcgacccccaccgtctatcccatcgcgaaaatcccaaaacacctccctaatacccacgaacgaaaaatctctactaacgcttaaaaccaaaaaaaaat

SEQ ID NO: 7549 - DNA, 720 bp, Artificial Sequence
  chemically treated genomic DNA (Homo sapiens) CpG-island No: 7549
cgcgcggaagtatattttagacgatttcgatattcgtaatatcgatcgttttgtcggcgcgtcgtttttaggttatatcgtttagacgtacggcgattaggggttggtagtcgattttattaaagcgtattttaacggtatcgtaggttagagtttcggcgtgtggaacgcgggcggcgtggaattgtatttgatcggtgatgttaacgattatgtcggtaaaggtatggcgggcggtttaatcgttattcgtttttcggttggtttcgtttttcgtagttatgaagtaagtattatcggtaatatttgtttgtatggcgcgatcggtggtcgtttgtatgtcgtaggtcgcgcgggtgaacgtttcggcgtgcgtaatttcggtgttattatcgtggtagaaggtattggcgataacggttgtgaatatatgacgggtggtatcgtttgtattttgggtaaaatcggcgttaatttcggtgcgggtatgaacggcggatttatttacgttttcgatgaaagcggcgattttcgtaaacgcgttaaaacgggaattggtcggagttttaagcgttgacgttttggcgatttatgaagagtatttgcgtggttttattatcgagtaagggtagtatatcgtttttagcgcggtgaaaagattttggcgaattgggtaattatttaggattggaaatttatagtttagatagtgaagattag

SEQ ID NO: 7550 - DNA, 720 bp, Artificial Sequence
  chemically treated genomic DNA (Homo sapiens) CpG-island No: 7550
ctaatcttcactatctaaactataaatttccaatcctaaataattacccaattcgccaaaatcttttcaccgcgctaaaaacgatatactacccttactcgataataaaaccacgcaaatactcttcataaatcgccaaaacgtcaacgcttaaaactccgaccaattcccgttttaacgcgtttacgaaaatcgccgctttcatcgaaaacgtaaataaatccgccgttcatacccgcaccgaaattaacgccgattttacccaaaatacaaacgataccacccgtcatatattcacaaccgttatcgccaataccttctaccacgataataacaccgaaattacgcacgccgaaacgttcacccgcgcgacctacgacatacaaacgaccaccgatcgcgccatacaaacaaatattaccgataatacttacttcataactacgaaaaacgaaaccaaccgaaaaacgaataacgattaaaccgcccgccatacctttaccgacataatcgttaacatcaccgatcaaatacaattccacgccgcccgcgttccacacgccgaaactctaacctacgataccgttaaaatacgctttaataaaatcgactaccaacccctaatcgccgtacgtctaaacgatataacctaaaaacgacgcgccgacaaaacgatcgatattacgaatatcgaaatcgtctaaaatatacttccgcgcg

SEQ ID NO: 7551 - DNA, 720 bp, Artificial Sequence
  chemically treated genomic DNA (Homo sapiens) CpG-island No: 7551
ttaatttttattgtttaagttgtgggtttttaattttggatggttgtttagttcgttagaatttttttatcgcgttgagagcggtatgttgtttttgttcggtgataagattacgtagatgttttttatggatcgttagagcgttaacgtttaagatttcgattagttttcgttttaacgcgtttgcggaaatcgtcgtttttatcgagaacgtaagtgaattcgtcgtttatgttcgtatcgaagttaacgtcggttttatttagaatgtagacgatattattcgttatatatttataatcgttgtcgttaatgttttttattacggtgatagtatcggagttacgtacgtcgaaacgtttattcgcgcggtttgcggtatatagacgattatcggtcgcgttatataggtaggtgttgtcgataatgtttgttttatggttgcggaaggcggaattaatcggaggacgaatggcgattaagtcgttcgttatgtttttatcgatatagtcgttggtattatcggttaggtatagttttacgtcgttcgcgttttatacgtcgaagttttggtttgcggtgtcgttgaagtacgttttgataggatcggttgttagtttttgatcgtcgtgcgtttgggcgatatagtttgaaagcgacgcgtcgatagaacggtcggtgttgcgaatatcggggtcgtttagagtgtattttcgcgcg

SEQ ID NO: 7552 - DNA, 720 bp, Artificial Sequence
  chemically treated genomic DNA (Homo sapiens) CpG-island No: 7552
cgcgcgaaaatacactctaaacgaccccgatattcgcaacaccgaccgttctatcgacgcgtcgctttcaaactatatcgcccaaacgcacgacgatcaaaaactaacaaccgatcctatcaaaacgtacttcaacgacaccgcaaaccaaaacttcgacgtataaaacgcgaacgacgtaaaactatacctaaccgataataccaacgactatatcgataaaaacataacgaacgacttaatcgccattcgtcctccgattaattccgccttccgcaaccataaaacaaacattatcgacaacacctacctatataacgcgaccgataatcgtctatataccgcaaaccgcgcgaataaacgtttcgacgtacgtaactccgatactatcaccgtaataaaaaacattaacgacaacgattataaatatataacgaataatatcgtctacattctaaataaaaccgacgttaacttcgatacgaacataaacgacgaattcacttacgttctcgataaaaacgacgatttccgcaaacgcgttaaaacgaaaactaatcgaaatcttaaacgttaacgctctaacgatccataaaaaacatctacgtaatcttatcaccgaacaaaaacaacataccgctctcaacgcgataaaaaaattctaacgaactaaacaaccatccaaaattaaaaacccacaacttaaacaataaaaattaa

SEQ ID NO: 7553 - DNA, 601 bp, Artificial Sequence
  chemically treated genomic DNA (Homo sapiens) CpG-island No: 7553
agttttgtcgtcgttttttaatcgttgttcgggttaatttagtttattttaacggtattatggcggttttttagggcgttgaagttgtagcggaacggcgcgttattattcggtattattatattattgcggttataggtttacgttttattcgacggtcggttttgtacgaacgttagcgtttgttcgttttatatcggtatatagcgtatcgtcgagtagaaatcgttgagtatattttacgttttacgttgtgtggttaggtacgtattataggtgatgcgcggtttcgtgtcgttaaagtcgttcggtattgattggtcgtagtattggtcgatgatatatagcgtttatttatttatattcgtcgtattaagacgtttttttatgtcgtagcgcggatgggttagtatattttatagatattaggttatgttgttgttgtatgcggggttaaacgtttcgttttagatacgttgtattgtcgcgtttgcgggttatatttcgacggtatttgtagaatacgttcgcgtagatgataattacggtttaattggtggttgtcgattttttttgttttattgatgtaagattacgattt

SEQ ID NO: 7554 - DNA, 601 bp, Artificial Sequence
  chemically treated genomic DNA (Homo sapiens) CpG-island No: 7554
aaatcgtaatcttacatcaataaaacaaaaaaaatcgacaaccaccaattaaaccgtaattatcatctacgcgaacgtattctacaaataccgtcgaaatataacccgcaaacgcgacaatacaacgtatctaaaacgaaacgtttaaccccgcatacaacaacaacataacctaatatctataaaatatactaacccatccgcgctacgacataaaaaaacgtcttaatacgacgaatataaataaataaacgctatatatcatcgaccaatactacgaccaatcaataccgaacgactttaacgacacgaaaccgcgcatcacctataatacgtacctaaccacacaacgtaaaacgtaaaatatactcaacgatttctactcgacgatacgctatataccgatataaaacgaacaaacgctaacgttcgtacaaaaccgaccgtcgaataaaacgtaaacctataaccgcaataatataataataccgaataataacgcgccgttccgctacaacttcaacgccctaaaaaaccgccataataccgttaaaataaactaaattaacccgaacaacgattaaaaaacgacgacaaaact

SEQ ID NO: 7555 - DNA, 601 bp, Artificial Sequence
  chemically treated genomic DNA (Homo sapiens) CpG-island No: 7555
ggatcgtggttttatattagtaaaatagaggggatcggtagttattagttgagtcgtaattattatttgcgcgggcgtattttgtaggtgtcgtcgaaatataattcgtagacgcggtaatatagcgtatttgggacgaaacgtttaatttcgtatatagtaataatatggtttggtgtttgtgggatatgttgatttattcgcgttacggtatggggaaacgttttggtgcggcggatgtggataaatgggcgttgtatgttatcggttagtattgcgattagttagtgtcggacggttttggcggtacggagtcgcgtattatttgtaatgcgtatttgattatatagcgtaaggcgtgggatgtgtttagcgatttttgttcggcgatgcgttgtatgtcggtatggaacgggtagacgttgacgttcgtgtaggatcgatcgtcggataagacgtggatttataatcgtagtaatgtggtgatgtcggatgatggcgcgtcgtttcgttatagttttagcgttttgaaggatcgttataatgtcgttgaggtgaattggattgattcgaataacggttgggagacggcgatagagtt

SEQ ID NO: 7556 - DNA, 601 bp, Artificial Sequence
  chemically treated genomic DNA (Homo sapiens) CpG-island No: 7556
aactctatcgccgtctcccaaccgttattcgaatcaatccaattcacctcaacgacattataacgatccttcaaaacgctaaaactataacgaaacgacgcgccatcatccgacatcaccacattactacgattataaatccacgtcttatccgacgatcgatcctacacgaacgtcaacgtctacccgttccataccgacatacaacgcatcgccgaacaaaaatcgctaaacacatcccacgccttacgctatataatcaaatacgcattacaaataatacgcgactccgtaccgccaaaaccgtccgacactaactaatcgcaatactaaccgataacatacaacgcccatttatccacatccgccgcaccaaaacgtttccccataccgtaacgcgaataaatcaacatatcccacaaacaccaaaccatattattactatatacgaaattaaacgtttcgtcccaaatacgctatattaccgcgtctacgaattatatttcgacgacacctacaaaatacgcccgcgcaaataataattacgactcaactaataactaccgatcccctctattttactaatataaaaccacgatcc

SEQ ID NO: 7557 - DNA, 824 bp, Artificial Sequence
  chemically treated genomic DNA (Homo sapiens) CpG-island No: 7557
atttggtttagttagatattgagcggtatatggcgtgtaaattttcgcgtcgtacgtatattttagacgattttttcgtttgaacgtaatttggggcgttttcgtaaaacgtcgaacgaaggtacgttgttttatggtttggtgtaggatggtaacgatatgtgggacgttatttttttttgcggtttttgtgcggtgattcgtcgtaagtcgttggatgaaattggcggtattgttgtcgaaatcgtgattgaagatgcgtatatttttttgcggttgtatcgtcgtggttatattttcgcgtatatgcgtatttcgtaggcggcggggttggcgatcgaaagtttgtcggcgtatatcggttagcgtattcgttgggcgcgcgggatggtataaatttttcgtttcgataattcgtttatcggtaaagggttgaagtttgtttagcggttatgttacgttaacgttatgttttattttttgtcgggtattttacggttgatttttttgattgcgtcgttggcgtttttgttgttttatgtttatattatttatgcgttagcgttgatgatcgttttattcgtgttgtcgtatatgatttatgttagtttgattaattttaagatttagggtaaatatcgttattttttttggagtgaaatttacgaaacggtgttggcgtggtataatcgtatatcgaagtcgcgtatttagaagatttttatcgatggttatttgagttatttattgattcgtagttgttgatgatagttgttgacgttgtatgcgtttatttgtgtacgtaaatgcgttcgatggtataa

SEQ ID NO: 7558 - DNA, 824 bp, Artificial Sequence
  chemically treated genomic DNA (Homo sapiens) CpG-island No: 7558
ttataccatcgaacgcatttacgtacacaaataaacgcatacaacgtcaacaactatcatcaacaactacgaatcaataaataactcaaataaccatcgataaaaatcttctaaatacgcgacttcgatatacgattataccacgccaacaccgtttcgtaaatttcactccaaaaaaaataacgatatttaccctaaatcttaaaattaatcaaactaacataaatcatatacgacaacacgaataaaacgatcatcaacgctaacgcataaataatataaacataaaacaacaaaaacgccaacgacgcaatcaaaaaaatcaaccgtaaaatacccgacaaaaaataaaacataacgttaacgtaacataaccgctaaacaaacttcaaccctttaccgataaacgaattatcgaaacgaaaaatttataccatcccgcgcgcccaacgaatacgctaaccgatatacgccgacaaactttcgatcgccaaccccgccgcctacgaaatacgcatatacgcgaaaatataaccacgacgatacaaccgcaaaaaaatatacgcatcttcaatcacgatttcgacaacaataccgccaatttcatccaacgacttacgacgaatcaccgcacaaaaaccgcaaaaaaaaataacgtcccacatatcgttaccatcctacaccaaaccataaaacaacgtaccttcgttcgacgttttacgaaaacgccccaaattacgttcaaacgaaaaaatcgtctaaaatatacgtacgacgcgaaaatttacacgccatataccgctcaatatctaactaaaccaaat

SEQ ID NO: 7559 - DNA, 824 bp, Artificial Sequence
  chemically treated genomic DNA (Homo sapiens) CpG-island No: 7559
ttgtgttatcgagcgtatttacgtatatagatgagcgtatatagcgttagtagttattattagtagttgcgagttagtaaatagtttaggtagttatcggtgggggttttttaggtgcgcggtttcggtgtgcgattatattacgttagtatcgtttcgtagattttattttagaaagagtggcgatatttgttttggattttggagttggttaggttggtatggattatatgcggtagtacgaatagggcgattattaacgttggcgtatagatgatgtaggtatgaagtagtaggaacgttagcggcgtagttaggaagattagtcgtggaatgttcgataagaagtggaatatggcgttgacgtaatatagtcgttgagtaaattttagttttttatcggtgagcgggttatcgagacggaagatttgtattatttcgcgcgtttagcgaatacgttgatcgatatgcgtcgatagattttcggtcgttagtttcgtcgtttgcggaatacgtatatacgcggaggtatagttacgacggtgtaatcgtagagaagtatgcgtatttttagttacggtttcgatagtaatgtcgttaattttatttagcggtttacgacgaattatcgtataggaatcgtagaagaaagtggcgttttatatatcgttgttattttgtattagattatagaatagcgtgttttcgttcggcgttttacggaaacgttttaggttgcgtttaaacggagagatcgtttagagtgtacgtgcggcgcgaaagtttgtacgttatgtgtcgtttaatatttggttggattaagt

SEQ ID NO: 7560 - DNA, 824 bp, Artificial Sequence
  chemically treated genomic DNA (Homo sapiens) CpG-island No: 7560
acttaatccaaccaaatattaaacgacacataacgtacaaactttcgcgccgcacgtacactctaaacgatctctccgtttaaacgcaacctaaaacgtttccgtaaaacgccgaacgaaaacacgctattctataatctaatacaaaataacaacgatatataaaacgccactttcttctacgattcctatacgataattcgtcgtaaaccgctaaataaaattaacgacattactatcgaaaccgtaactaaaaatacgcatacttctctacgattacaccgtcgtaactatacctccgcgtatatacgtattccgcaaacgacgaaactaacgaccgaaaatctatcgacgcatatcgatcaacgtattcgctaaacgcgcgaaataatacaaatcttccgtctcgataacccgctcaccgataaaaaactaaaatttactcaacgactatattacgtcaacgccatattccacttcttatcgaacattccacgactaatcttcctaactacgccgctaacgttcctactacttcatacctacatcatctatacgccaacgttaataatcgccctattcgtactaccgcatataatccataccaacctaaccaactccaaaatccaaaacaaatatcgccactctttctaaaataaaatctacgaaacgatactaacgtaatataatcgcacaccgaaaccgcgcacctaaaaaacccccaccgataactacctaaactatttactaactcgcaactactaataataactactaacgctatatacgctcatctatatacgtaaatacgctcgataacacaa

SEQ ID NO: 7561 - DNA, 556 bp, Artificial Sequence
  chemically treated genomic DNA (Homo sapiens) CpG-island No: 7561
tatcgttagtagaatcggatggtttgttagcgtatattatacgcgttcgaattacggtagaatgattacgtaataaacgtcgttaatacgtaggttgttgatatcggattcgcggattatcgcgatcgaatcgaatatggtggcgcgtttgtcgttatcgtttatcgtatcgttaagtattttataatcgcgtgggttatttgttaatagcgtaattacgttgcgttgggcgttatacggtaattggaaattaattatcgtcgttaatcgtaacgggagaggttagttttgatcgtgtttttgtcgcgcgatcgtttttttttcggtataatggcgggggaacggggggtttagatatcgcgttataaatatttttgaggattttttttggaaggcgcgggaatatttcgttttatcggaatcgttggtcggatcgatggatatgatcgttgcgttgtcggcgatttttttttcggtatttgttttggggatgtttttaatttaggtatttttcgttgaattggattggttatttatcgtgggtattagatagttt

SEQ ID NO: 7562 - DNA, 556 bp, Artificial Sequence
  chemically treated genomic DNA (Homo sapiens) CpG-island No: 7562
aaactatctaatacccacgataaataaccaatccaattcaacgaaaaatacctaaattaaaaacatccccaaaacaaataccgaaaaaaaaatcgccgacaacgcaacgatcatatccatcgatccgaccaacgattccgataaaacgaaatattcccgcgccttccaaaaaaaatcctcaaaaatatttataacgcgatatctaaaccccccgttcccccgccattataccgaaaaaaaaacgatcgcgcgacaaaaacacgatcaaaactaacctctcccgttacgattaacgacgataattaatttccaattaccgtataacgcccaacgcaacgtaattacgctattaacaaataacccacgcgattataaaatacttaacgatacgataaacgataacgacaaacgcgccaccatattcgattcgatcgcgataatccgcgaatccgatatcaacaacctacgtattaacgacgtttattacgtaatcattctaccgtaattcgaacgcgtataatatacgctaacaaaccatccgattctactaacgata

SEQ ID NO: 7563 - DNA, 556 bp, Artificial Sequence
  chemically treated genomic DNA (Homo sapiens) CpG-island No: 7563
aaattgtttggtatttacggtaggtagttagtttagtttaacggagaatatttgaattaaaagtatttttagagtaaatgtcggaaaggagatcgtcgatagcgtaacggttatatttatcgattcggttaacggtttcgatgaggcggggtattttcgcgttttttaaaaagggtttttaagggtatttgtggcgcgatgtttgagtttttcgttttttcgttattgtgtcggaagaagagcgatcgcgcggtagaaatacggttaaagttgatttttttcgttgcgattggcggcggtgattggtttttagttgtcgtataacgtttagcgtagcgtgattgcgttgttggtagatagtttacgcggttatgaaatgtttaacgatgcggtgaacgatagcggtaaacgcgttattatgttcggttcggtcgcggtgattcgcgagttcggtattaatagtttacgtgttggcgacgtttattacgtagttattttgtcgtggttcgagcgcgtgtggtatgcgttggtaaattattcgattttgttggcggtg

SEQ ID NO: 7564 - DNA, 556 bp, Artificial Sequence
  chemically treated genomic DNA (Homo sapiens) CpG-island No: 7564
caccgccaacaaaatcgaataatttaccaacgcataccacacgcgctcgaaccacgacaaaataactacgtaataaacgtcgccaacacgtaaactattaataccgaactcgcgaatcaccgcgaccgaaccgaacataataacgcgtttaccgctatcgttcaccgcatcgttaaacatttcataaccgcgtaaactatctaccaacaacgcaatcacgctacgctaaacgttatacgacaactaaaaaccaatcaccgccgccaatcgcaacgaaaaaaatcaactttaaccgtatttctaccgcgcgatcgctcttcttccgacacaataacgaaaaaacgaaaaactcaaacatcgcgccacaaatacccttaaaaaccctttttaaaaaacgcgaaaataccccgcctcatcgaaaccgttaaccgaatcgataaatataaccgttacgctatcgacgatctcctttccgacatttactctaaaaatacttttaattcaaatattctccgttaaactaaactaactacctaccgtaaataccaaacaattt

SEQ ID NO: 7565 - DNA, 699 bp, Artificial Sequence
  chemically treated genomic DNA (Homo sapiens) CpG-island No: 7565
tagaacgggtttgagtagtattattaatacgttttcgaataataggtttatggttttatcggtaacggttgaaagcgttagtattattaattattgatcgacgattagtttacgtagttgcgttcgttttgtttttagcgttttgaggatcgttattagatcgtagcgattgcgatagtaatgatttatcgttatcgttatcgttgttattgttagtagtaaggttagaagcgtcgaaagtagtaggaattgttgcgagcgttttatcgatcgttttagcgcgttttcgttttgttttagatcgtattagcgttgttcgggtttaagttgaggtaataattattttttatagtcgtcgagttggttttcgttgtcgtcgaatttataacgttagggtgattcgatttttcggttgtacggtttcggttttatcgatattcgttagatttattattagacgcggagttatttggaaggggttaaaatcggaattcggtttttgaattattttttcggtaattcgtaaggtggtatcgtttacgttaatggtgtcgttcgttttttagttaagtagggttattaggcgtgggggtagtaatacgttgttcgtttgcggggggcggtaaatatgtacgtttaatagtttattttagaggttttttatgtaagttagatatagcgaattttaaattattttat

SEQ ID NO: 7566 - DNA, 699 bp, Artificial Sequence
  chemically treated genomic DNA (Homo sapiens) CpG-island No: 7566
ataaaataatttaaaattcgctatatctaacttacataaaaaacctctaaaataaactattaaacgtacatatttaccgccccccgcaaacgaacaacgtattactacccccacgcctaataaccctacttaactaaaaaacgaacgacaccattaacgtaaacgataccaccttacgaattaccgaaaaaataattcaaaaaccgaattccgattttaaccccttccaaataactccgcgtctaataataaatctaacgaatatcgataaaaccgaaaccgtacaaccgaaaaatcgaatcaccctaacgttataaattcgacgacaacgaaaaccaactcgacgactataaaaaataattattacctcaacttaaacccgaacaacgctaatacgatctaaaacaaaacgaaaacgcgctaaaacgatcgataaaacgctcgcaacaattcctactactttcgacgcttctaaccttactactaacaataacaacgataacgataacgataaatcattactatcgcaatcgctacgatctaataacgatcctcaaaacgctaaaaacaaaacgaacgcaactacgtaaactaatcgtcgatcaataattaataatactaacgctttcaaccgttaccgataaaaccataaacctattattcgaaaacgtattaataatactactcaaacccgttcta

SEQ ID NO: 7567 - DNA, 699 bp, Artificial Sequence
  chemically treated genomic DNA (Homo sapiens) CpG-island No: 7567
ataaaataatttgaggttcgttatgtttgatttatatagggagtttttagagtggattattaggcgtgtatgtttgtcgtttttcgtaggcgggtagcgtattgttgtttttacgtttgatggttttgtttaattgaaaaacgggcgatattattgacgtgggcgatgttattttgcggattgtcggagaagtgatttaggaatcggatttcggttttaattttttttagatggtttcgcgtttgatgatgaatttggcggatgtcgataaaatcggagtcgtgtagtcggggagtcgggttattttggcgttataaattcggcggtaacgagaattagttcgacggttatgagaaatggttgttattttagtttaaattcgaataacgttggtacggtttggaataggacgaaggcgcgttggggcgatcgatggaacgttcgtaatagtttttgttgttttcggcgtttttgattttgttgttggtagtggtagcggtggcggtagcgatgaattattattgtcgtagtcgttacgatttggtggcgatttttaaaacgttgggggtagggcgagcgtaattgcgtaagttaatcgtcggttagtggttgatggtgttgacgtttttagtcgttatcggtggggttataggtttgttgttcgaaaacgtgttgatggtgttgtttaagttcgttttg

SEQ ID NO: 7568 - DNA, 699 bp, Artificial Sequence
  chemically treated genomic DNA (Homo sapiens) CpG-island No: 7568
caaaacgaacttaaacaacaccatcaacacgttttcgaacaacaaacctataaccccaccgataacgactaaaaacgtcaacaccatcaaccactaaccgacgattaacttacgcaattacgctcgccctacccccaacgttttaaaaatcgccaccaaatcgtaacgactacgacaataataattcatcgctaccgccaccgctaccactaccaacaacaaaatcaaaaacgccgaaaacaacaaaaactattacgaacgttccatcgatcgccccaacgcgccttcgtcctattccaaaccgtaccaacgttattcgaatttaaactaaaataacaaccatttctcataaccgtcgaactaattctcgttaccgccgaatttataacgccaaaataacccgactccccgactacacgactccgattttatcgacatccgccaaattcatcatcaaacgcgaaaccatctaaaaaaaattaaaaccgaaatccgattcctaaatcacttctccgacaatccgcaaaataacatcgcccacgtcaataatatcgcccgtttttcaattaaacaaaaccatcaaacgtaaaaacaacaatacgctacccgcctacgaaaaacgacaaacatacacgcctaataatccactctaaaaactccctatataaatcaaacataacgaacctcaaattattttat

SEQ ID NO: 7569 - DNA, 1082 bp, Artificial Sequence
  chemically treated genomic DNA (Homo sapiens) CpG-island No: 7569
  unsure (170)
tcgagagtttttcgacggggtttgagttacggacgattttttttttataaggaatttttgaaattatttttttcgagttttttacgtagggttcgaatttttttatagatattcgttgggttttcgggatcgtttagagtgttttgtaggcggtcgtatttcgtagtatnttcgcgttagtaggttcgggagttttataaggttcggttaaggttttttttaacggatttcgtttttttgatttcgagtttcggtttaagagtttcgttcgtcgtttatattcgttgttcgagttttcgaaaggtttttgtttaaggcgcggcgtattttggcggtcgcgtaaataggaagcgtcgcgtttagtcgggtcgttttcgttatagtttttgtattagtagcgggcgttcggagtcgtttagtacgcgtaggtgtttcgttcgttattcgtcgttttttacgttcgtcgtcgcgggtcggtttagagcgtcgtataaagcgaaggcgtttacgtagttgttttcgtcggggttatcgtcggggttgtttgttaggtcgtagcgttttagcgtatcggttacgagttcgcgcgtcgtggagcgcgtcgtggttagtacgtttttgtagttggcgttcgatgttagttcggcgtcgaagattttgaggattttcggagggcgtcgtggcgcgggtagttagcgggggttcgggggttacgttcgtcgttagtttcggtagttttttttcgttggtttagcgttgtcgcgttttttcgggggtttttagggttttttgcgtcgttggatttcgtggtttcggttttcgagtttcggaagagttgggagatgcgtttggcgcggttatcggaggttttttcggtcgttttgatagcgtttattcgtcgtagttttacgtgcggcgggggcggaggtagcggttcgttgttgcggtttttcgtgttcgacgaagaagatttgggagttcgtcggggaatagagtcgcgggagagagatttaggacgatacgttaagacgggggtgggggtatattaggagggaagtgggtagagatttagagggaggata

SEQ ID NO: 7570 - DNA, 1082 bp, Artificial Sequence
  chemically treated genomic DNA (Homo sapiens) CpG-island No: 7570
  unsure (913)
tatcctccctctaaatctctacccacttccctcctaatatacccccacccccgtcttaacgtatcgtcctaaatctctctcccgcgactctattccccgacgaactcccaaatcttcttcgtcgaacacgaaaaaccgcaacaacgaaccgctacctccgcccccgccgcacgtaaaactacgacgaataaacgctatcaaaacgaccgaaaaaacctccgataaccgcgccaaacgcatctcccaactcttccgaaactcgaaaaccgaaaccacgaaatccaacgacgcaaaaaaccctaaaaacccccgaaaaaacgcgacaacgctaaaccaacgaaaaaaaactaccgaaactaacgacgaacgtaacccccgaacccccgctaactacccgcgccacgacgccctccgaaaatcctcaaaatcttcgacgccgaactaacatcgaacgccaactacaaaaacgtactaaccacgacgcgctccacgacgcgcgaactcgtaaccgatacgctaaaacgctacgacctaacaaacaaccccgacgataaccccgacgaaaacaactacgtaaacgccttcgctttatacgacgctctaaaccgacccgcgacgacgaacgtaaaaaacgacgaataacgaacgaaacacctacgcgtactaaacgactccgaacgcccgctactaatacaaaaactataacgaaaacgacccgactaaacgcgacgcttcctatttacgcgaccgccaaaatacgccgcgccttaaacaaaaacctttcgaaaactcgaacaacgaatataaacgacgaacgaaactcttaaaccgaaactcgaaatcaaaaaaacgaaatccgttaaaaaaaaccttaaccgaaccttataaaactcccgaacctactaacgcgaanatactacgaaatacgaccgcctacaaaacactctaaacgatcccgaaaacccaacgaatatctataaaaaaattcgaaccctacgtaaaaaactcgaaaaaaataatttcaaaaattccttataaaaaaaaaatcgtccgtaactcaaaccccgtcgaaaaactctcga

SEQ ID NO: 7571 - DNA, 1082 bp, Artificial Sequence
  chemically treated genomic DNA (Homo sapiens) CpG-island No: 7571
  unsure (913)
tgttttttttttgggtttttgtttattttttttttaatatgtttttattttcgttttggcgtgtcgttttgggtttttttttcgcgattttgtttttcggcggatttttaggtttttttcgtcggatacggggagtcgtagtagcgagtcgttattttcgttttcgtcgtacgtggagttgcggcgagtgggcgttgttaaggcggtcgggggagttttcggtagtcgcgttaagcgtattttttagttttttcggggttcggggatcgggattacggggtttagcggcgtaggaggttttggggattttcgggggggcgcggtagcgttgggttagcgagaagaagttgtcggagttggcggcgggcgtggttttcgagttttcgttggttattcgcgttacggcgtttttcgggggtttttaagattttcggcgtcggattggtatcgggcgttaattataagagcgtgttggttacggcgcgttttacggcgcgcgagttcgtggtcgatgcgttagagcgttacggtttagtaggtagtttcggcggtggtttcggcgagagtagttgcgtggacgttttcgttttgtgcgacgttttgggtcggttcgcggcggcgggcgtgggaagcggcgagtggcgggcggagtatttgcgcgtgttgggcgatttcgagcgttcgttgttggtgtaggagttgtggcgggggcggttcggttgggcgcggcgttttttatttgcgcggtcgttaagatgcgtcgcgttttgaataggagtttttcgggggttcggatagcgaatgtgaacggcgggcggggtttttgggtcgggattcggggttaaaaaagcggggttcgttggggggggttttggtcgggttttgtgggattttcgggtttgttggcgcgaanatgttgcgaaatgcgatcgtttgtaggatattttagacgatttcgaaaatttaacgaatatttataaaggaattcgggttttacgtgagaagttcggagggggtggttttaggagttttttgtggagaggggatcgttcgtgatttagatttcgtcgaaaagttttcga

SEQ ID NO: 7572 - DNA, 1082 bp, Artificial Sequence
  chemically treated genomic DNA (Homo sapiens) CpG-island No: 7572
  unsure (170)
tcgaaaacttttcgacgaaatctaaatcacgaacgatcccctctccacaaaaaactcctaaaaccaccccctccgaacttctcacgtaaaacccgaattcctttataaatattcgttaaattttcgaaatcgtctaaaatatcctacaaacgatcgcatttcgcaacatnttcgcgccaacaaacccgaaaatcccacaaaacccgaccaaaaccccccccaacgaaccccgcttttttaaccccgaatcccgacccaaaaaccccgcccgccgttcacattcgctatccgaacccccgaaaaactcctattcaaaacgcgacgcatcttaacgaccgcgcaaataaaaaacgccgcgcccaaccgaaccgcccccgccacaactcctacaccaacaacgaacgctcgaaatcgcccaacacgcgcaaatactccgcccgccactcgccgcttcccacgcccgccgccgcgaaccgacccaaaacgtcgcacaaaacgaaaacgtccacgcaactactctcgccgaaaccaccgccgaaactacctactaaaccgtaacgctctaacgcatcgaccacgaactcgcgcgccgtaaaacgcgccgtaaccaacacgctcttataattaacgcccgataccaatccgacgccgaaaatcttaaaaacccccgaaaaacgccgtaacgcgaataaccaacgaaaactcgaaaaccacgcccgccgccaactccgacaacttcttctcgctaacccaacgctaccgcgcccccccgaaaatccccaaaacctcctacgccgctaaaccccgtaatcccgatccccgaaccccgaaaaaactaaaaaatacgcttaacgcgactaccgaaaactcccccgaccgccttaacaacgcccactcgccgcaactccacgtacgacgaaaacgaaaataacgactcgctactacgactccccgtatccgacgaaaaaaacctaaaaatccgccgaaaaacaaaatcgcgaaaaaaaaacccaaaacgacacgccaaaacgaaaataaaaacatattaaaaaaaaaataaacaaaaacccaaaaaaaaaaca

SEQ ID NO: 7573 - DNA, 521 bp, Artificial Sequence
  chemically treated genomic DNA (Homo sapiens) CpG-island No: 7573
cggtttcgattattacgttaagtatttgagggacgaacggtattggttgcgtatcgtaaattcgtttcgtcgagtttttttcgggcgttaggacgttttggaatttattttttttcgttattttcgttttcgaggagttcgtagttagttcgtgattcgatgtttttatttgtagaatgggttagtgttgtttttttttcgggggcgcgatttttttttgaggttcgtgcggttcgtagtgtatgtcgggaaacgtagtttcgttcgagcggattgtagcgcgttatcgttagattacgtaatgcgcgttgagtacgtcgggagttgtagtttttttggcgttttacgtcggtatttattcggttttcgttttattttttattattttagtttgtagcggagtttttatcggttgattttagttggacggtcgatttggtagttcggagttttgggaaattaaggagtcgaaggaattcgtgtaagtcgttaatttgggtttattttttttttgttttaag

SEQ ID NO: 7574 - DNA, 521 bp, Artificial Sequence
  chemically treated genomic DNA (Homo sapiens) CpG-island No: 7574
cttaaaacaaaaaaaaaataaacccaaattaacgacttacacgaattccttcgactccttaatttcccaaaactccgaactaccaaatcgaccgtccaactaaaatcaaccgataaaaactccgctacaaactaaaataataaaaaataaaacgaaaaccgaataaataccgacgtaaaacgccaaaaaaactacaactcccgacgtactcaacgcgcattacgtaatctaacgataacgcgctacaatccgctcgaacgaaactacgtttcccgacatacactacgaaccgcacgaacctcaaaaaaaaatcgcgcccccgaaaaaaaaacaacactaacccattctacaaataaaaacatcgaatcacgaactaactacgaactcctcgaaaacgaaaataacgaaaaaaaataaattccaaaacgtcctaacgcccgaaaaaaactcgacgaaacgaatttacgatacgcaaccaataccgttcgtccctcaaatacttaacgtaataatcgaaaccg

SEQ ID NO: 7575 - DNA, 521 bp, Artificial Sequence
  chemically treated genomic DNA (Homo sapiens) CpG-island No: 7575
tttgaggtaggggagaggtgggtttagattgacgatttgtacgggttttttcgattttttgattttttaggatttcgggttattagatcggtcgtttagttggaattaatcgatggaggtttcgttgtaaattggaatggtaaggggtggggcggagatcgggtaggtgtcggcgtggggcgttaagaggattataattttcggcgtgtttagcgcgtattacgtggtttggcgataacgcgttgtagttcgttcgggcggaattacgtttttcggtatgtattgcgggtcgtacgggttttagggaagagtcgcgttttcggggagggagtagtattggtttattttgtagatggggatatcgagttacgggttggttacgaatttttcgggggcgaaggtggcggagagggatgggttttaggacgttttggcgttcggggaaggttcggcgggacggatttgcggtgcgtagttagtgtcgttcgttttttaggtgtttggcgtgatgatcggggtcg

SEQ ID NO: 7576 - DNA, 521 bp, Artificial Sequence
  chemically treated genomic DNA (Homo sapiens) CpG-island No: 7576
cgaccccgatcatcacgccaaacacctaaaaaacgaacgacactaactacgcaccgcaaatccgtcccgccgaaccttccccgaacgccaaaacgtcctaaaacccatccctctccgccaccttcgcccccgaaaaattcgtaaccaacccgtaactcgatatccccatctacaaaataaaccaatactactccctccccgaaaacgcgactcttccctaaaacccgtacgacccgcaatacataccgaaaaacgtaattccgcccgaacgaactacaacgcgttatcgccaaaccacgtaatacgcgctaaacacgccgaaaattataatcctcttaacgccccacgccgacacctacccgatctccgccccaccccttaccattccaatttacaacgaaacctccatcgattaattccaactaaacgaccgatctaataacccgaaatcctaaaaaatcaaaaaatcgaaaaaacccgtacaaatcgtcaatctaaacccacctctcccctacctcaaa

SEQ ID NO: 7577 - DNA, 809 bp, Artificial Sequence
  chemically treated genomic DNA (Homo sapiens) CpG-island No: 7577
agggaaagaaggtcgcgattggttcgtttcgaaaggtgggcggggtttttttcgatttgtgcgcgcgcgtcgcggggaggtgttgtcgagggcggagcgggagggggcgtggtttcgcgcgggcggtcgttgacggcgaggtttcgtttcggatgtcgcgtgtcgttgaaagggcggcggcgattggtcggcgtcgcgggggcgggcggggcggaaggttttggagggggttggcgggttttggaagttttcgtcggacgggtatatagagttcgggattggtcggcggcggagtcgggggacggcgatagcgggtcggcgggtcgtaggagggggttatgggtaaagattattattagacgttgggtttggttcgcggcgcgtcggacgaggagattaagcgggtttatcgtcgttaggcgttgcgttattattcggataagaataaggagttcggcgtcgaggagaagtttaaggagatcgttgaggtttacgacgtgtttagcgattcgcgtaagcgcgagattttcgatcgttacggggaggaaggtgtgtgttcgcggttaggggcgcggtttcgttttttgatagatagggaaattgaggtacgttggtttttttcggcggtttttcgggaaggacgtttcgggtcgtggggtcgagttgtttcgtttttcggtttcgcgggttttcgttttcggattggcggtcgcgcggtgggaggaggagttttggtttagtcgttcggttagaagtttttagtatgtttggggttgttttttttcgggcgttttttttcgcggtttcga

SEQ ID NO: 7578 - DNA, 809 bp, Artificial Sequence
  chemically treated genomic DNA (Homo sapiens) CpG-island No: 7578
tcgaaaccgcgaaaaaaaacgcccgaaaaaaaacaaccccaaacatactaaaaacttctaaccgaacgactaaaccaaaactcctcctcccaccgcgcgaccgccaatccgaaaacgaaaacccgcgaaaccgaaaaacgaaacaactcgaccccacgacccgaaacgtccttcccgaaaaaccgccgaaaaaaaccaacgtacctcaatttccctatctatcaaaaaacgaaaccgcgcccctaaccgcgaacacacaccttcctccccgtaacgatcgaaaatctcgcgcttacgcgaatcgctaaacacgtcgtaaacctcaacgatctccttaaacttctcctcgacgccgaactccttattcttatccgaataataacgcaacgcctaacgacgataaacccgcttaatctcctcgtccgacgcgccgcgaaccaaacccaacgtctaataataatctttacccataaccccctcctacgacccgccgacccgctatcgccgtcccccgactccgccgccgaccaatcccgaactctatatacccgtccgacgaaaacttccaaaacccgccaaccccctccaaaaccttccgccccgcccgcccccgcgacgccgaccaatcgccgccgccctttcaacgacacgcgacatccgaaacgaaacctcgccgtcaacgaccgcccgcgcgaaaccacgccccctcccgctccgccctcgacaacacctccccgcgacgcgcgcgcacaaatcgaaaaaaaccccgcccacctttcgaaacgaaccaatcgcgaccttctttccct

SEQ ID NO: 7579 - DNA, 809 bp, Artificial Sequence
  chemically treated genomic DNA (Homo sapiens) CpG-island No: 7579
tcggggtcgcgggaggaggcgttcggggaggggtagttttagatatgttagaagtttttggtcgagcggttgggttaaggtttttttttttatcgcgcggtcgttaattcgagggcggaggttcgcgaggtcggagggcggggtagttcggttttacggttcggggcgtttttttcggggggtcgtcgagaggggttagcgtgttttagtttttttgtttgttaaaaggcggggtcgcgtttttggtcgcgagtatatattttttttttcgtagcggtcgaagatttcgcgtttgcgcgggtcgttgagtacgtcgtaggttttagcgatttttttgaattttttttcggcgtcgggttttttgtttttgttcgggtggtagcgtagcgtttggcggcggtaggttcgtttgattttttcgttcgacgcgtcgcgggttaggtttaacgtttggtagtagtttttatttatgatttttttttgcggttcgtcgattcgttgtcgtcgtttttcggtttcgtcgtcgattagtttcggattttatatattcgttcggcggaagtttttagagttcgttagttttttttagaatttttcgtttcgttcgttttcgcggcgtcggttaatcgtcgtcgtttttttagcgatacgcgatattcggggcggggtttcgtcgttaacggtcgttcgcgcggggttacgttttttttcgtttcgttttcggtaatattttttcgcggcgcgcgcgtataggtcggaggaggtttcgtttatttttcgggacgagttaatcgcgatttttttttttt

SEQ ID NO: 7580 - DNA, 809 bp, Artificial Sequence
  chemically treated genomic DNA (Homo sapiens) CpG-island No: 7580
aaaaaaaaaaaatcgcgattaactcgtcccgaaaaataaacgaaacctcctccgacctatacgcgcgcgccgcgaaaaaatattaccgaaaacgaaacgaaaaaaaacgtaaccccgcgcgaacgaccgttaacgacgaaaccccgccccgaatatcgcgtatcgctaaaaaaacgacgacgattaaccgacgccgcgaaaacgaacgaaacgaaaaattctaaaaaaaactaacgaactctaaaaacttccgccgaacgaatatataaaatccgaaactaatcgacgacgaaaccgaaaaacgacgacaacgaatcgacgaaccgcaaaaaaaaatcataaataaaaactactaccaaacgttaaacctaacccgcgacgcgtcgaacgaaaaaatcaaacgaacctaccgccgccaaacgctacgctaccacccgaacaaaaacaaaaaacccgacgccgaaaaaaaattcaaaaaaatcgctaaaacctacgacgtactcaacgacccgcgcaaacgcgaaatcttcgaccgctacgaaaaaaaaaatatatactcgcgaccaaaaacgcgaccccgccttttaacaaacaaaaaaactaaaacacgctaacccctctcgacgaccccccgaaaaaaacgccccgaaccgtaaaaccgaactaccccgccctccgacctcgcgaacctccgccctcgaattaacgaccgcgcgataaaaaaaaaaaccttaacccaaccgctcgaccaaaaacttctaacatatctaaaactacccctccccgaacgcctcctcccgcgaccccga

SEQ ID NO: 7581 - DNA, 1096 bp, Artificial Sequence
  chemically treated genomic DNA (Homo sapiens) CpG-island No: 7581
tttgtttgcgtttatattattgtttatcggtgtatatcggtttcgggcgtatacgcgtagttcgttatttggttttaatatatataaattatacgttttattaaaataatttatcggaggcgtatacgttcgcgattattacgtaaatatatttttgagatatattttttcggttataggttcgcgtttcgggaatttcgtcgcggtacgggtttttgtttatatatagtttacggggatacgcgtcggtttcgttttcggttatagtacgtatagtttaggaattacgatcgtaaatattagtgcggtggtttcgcgtcggttttgtttcgagttttttacgtattagtcggtggatttatagcggcgtttatatatttatcgtcgtatgcgcgtatcgtcgcggttcgggtggagcggttttcggggatatagtttggggattcgtacgtttttaggttcgcggtttcgggcgcgttttttcgtaggcggggcgcgggggacgtcgtgggagtcgtttaattttttttttttcggtttttttggggtcgtttttttcgggcgtttttcgttttttttttttttcgtttcgtcgttttttggggtttacgtttttttttattcgttttttttgtttttttgcgttcgattttggttttgcggtttattttattcgtcgcgtcgtagggcggaggagtcggggtgcgtgggaggggggcgtttcgcggttattcggggagttttttagaggcggagtttcgcgcgtcggggttatttcggggcgggtttcggatcgttcgaggttatcgaggagtttcgaggttatcggttcggcgcgtcgttcgttttttttaggcgttttaaggacggtttttcgcgcgttcggtttttcggttttttcgcgtcgatcggttttttcgaggcggtattttgaagtcgtttacgggtgatatttaggttttcgtcgattgggattttttagagattgggggtttgttcggaagttggattttacggagatgaaacggaagattacgaggatatgatttttatatagaatttttttatttacgtggttttgcgcgagttattttat

SEQ ID NO: 7582 - DNA, 1096 bp, Artificial Sequence
  chemically treated genomic DNA (Homo sapiens) CpG-island No: 7582
ataaaataactcgcgcaaaaccacgtaaataaaaaaattctatataaaaatcatatcctcgtaatcttccgtttcatctccgtaaaatccaacttccgaacaaacccccaatctctaaaaaatcccaatcgacgaaaacctaaatatcacccgtaaacgacttcaaaataccgcctcgaaaaaaccgatcgacgcgaaaaaaccgaaaaaccgaacgcgcgaaaaaccgtccttaaaacgcctaaaaaaaacgaacgacgcgccgaaccgataacctcgaaactcctcgataacctcgaacgatccgaaacccgccccgaaataaccccgacgcgcgaaactccgcctctaaaaaactccccgaataaccgcgaaacgcccccctcccacgcaccccgactcctccgccctacgacgcgacgaataaaataaaccgcaaaaccaaaatcgaacgcaaaaaaacaaaaaaaacgaataaaaaaaaacgtaaaccccaaaaaacgacgaaacgaaaaaaaaaaaaaacgaaaaacgcccgaaaaaaacgaccccaaaaaaaccgaaaaaaaaaaaattaaacgactcccacgacgtcccccgcgccccgcctacgaaaaaacgcgcccgaaaccgcgaacctaaaaacgtacgaatccccaaactatatccccgaaaaccgctccacccgaaccgcgacgatacgcgcatacgacgataaatatataaacgccgctataaatccaccgactaatacgtaaaaaactcgaaacaaaaccgacgcgaaaccaccgcactaatatttacgatcgtaattcctaaactatacgtactataaccgaaaacgaaaccgacgcgtatccccgtaaactatatataaacaaaaacccgtaccgcgacgaaattcccgaaacgcgaacctataaccgaaaaaatatatctcaaaaatatatttacgtaataatcgcgaacgtatacgcctccgataaattattttaataaaacgtataatttatatatattaaaaccaaataacgaactacgcgtatacgcccgaaaccgatatacaccgataaacaataatataaacgcaaacaaa

SEQ ID NO: 7583 - DNA, 1096 bp, Artificial Sequence
  chemically treated genomic DNA (Homo sapiens) CpG-island No: 7583
atggagtgattcgcgtagggttacgtagatgagaaagttttgtatggagattatattttcgtgatttttcgttttattttcgtgaggtttagttttcgggtaggtttttaatttttagaggattttagtcggcgggggtttggatattattcgtaagcgattttagggtatcgtttcgggagggtcggtcggcgcgagggggtcggggagtcgggcgcgcggggagtcgtttttggagcgtttggggagggcgggcggcgcgtcgggtcggtgatttcggggtttttcggtgatttcgggcggttcgggattcgtttcggagtgatttcggcgcgcgaggtttcgtttttggggggtttttcgggtgatcgcggagcgttttttttttacgtatttcgattttttcgttttgcggcgcggcgggtggggtgggtcgtagggttagggtcgagcgtagaggggtagagaggacgaatagaggggaacgtgggttttagaaggcggcggagcgggagggaggaggaacgaagggcgttcgggaaggacggttttagggaggtcgggggagagggggttaagcggtttttacggcgtttttcgcgtttcgtttgcgaggaggcgcgttcggggtcgcgggtttggaaacgtgcgggtttttaggttgtgttttcgggagtcgttttattcgagtcgcggcggtgcgcgtatgcggcggtgggtgtgtagacgtcgttgtggatttatcggttaatgcgtggaaggttcggagtagggtcggcgcggggttatcgtattgatgtttgcggtcgtggtttttgggttgtgcgtgttgtggtcggaggcgagatcggcgcgtgttttcgtgggttgtgtgtgaataggggttcgtgtcgcggcggggttttcggggcgcgagtttgtggtcggagaggtgtgttttaggagtgtgtttgcgtggtggtcgcgggcgtgtgcgttttcggtgggttattttggtgggacgtgtggtttgtgtgtgttgggattaggtggcgggttgcgcgtgtacgttcggggtcggtgtgtatcggtgggtagtagtgtgagcgtaggtagg

SEQ ID NO: 7584 - DNA, 1096 bp, Artificial Sequence
  chemically treated genomic DNA (Homo sapiens) CpG-island No: 7584
cctacctacgctcacactactacccaccgatacacaccgaccccgaacgtacacgcgcaacccgccacctaatcccaacacacacaaaccacacgtcccaccaaaataacccaccgaaaacgcacacgcccgcgaccaccacgcaaacacactcctaaaacacacctctccgaccacaaactcgcgccccgaaaaccccgccgcgacacgaacccctattcacacacaacccacgaaaacacgcgccgatctcgcctccgaccacaacacgcacaacccaaaaaccacgaccgcaaacatcaatacgataaccccgcgccgaccctactccgaaccttccacgcattaaccgataaatccacaacgacgtctacacacccaccgccgcatacgcgcaccgccgcgactcgaataaaacgactcccgaaaacacaacctaaaaacccgcacgtttccaaacccgcgaccccgaacgcgcctcctcgcaaacgaaacgcgaaaaacgccgtaaaaaccgcttaaccccctctcccccgacctccctaaaaccgtccttcccgaacgcccttcgttcctcctccctcccgctccgccgccttctaaaacccacgttcccctctattcgtcctctctacccctctacgctcgaccctaaccctacgacccaccccacccgccgcgccgcaaaacgaaaaaatcgaaatacgtaaaaaaaaaacgctccgcgatcacccgaaaaaccccccaaaaacgaaacctcgcgcgccgaaatcactccgaaacgaatcccgaaccgcccgaaatcaccgaaaaaccccgaaatcaccgacccgacgcgccgcccgccctccccaaacgctccaaaaacgactccccgcgcgcccgactccccgaccccctcgcgccgaccgaccctcccgaaacgataccctaaaatcgcttacgaataatatccaaacccccgccgactaaaatcctctaaaaattaaaaacctacccgaaaactaaacctcacgaaaataaaacgaaaaatcacgaaaatataatctccatacaaaactttctcatctacgtaaccctacgcgaatcactccat

SEQ ID NO: 7585 - DNA, 892 bp, Artificial Sequence
  chemically treated genomic DNA (Homo sapiens) CpG-island No: 7585
atgttgtcgttagcgtttattaataaggggcgtttgattatttgtttaaatcgtttgatatcgacgaagtagtggcgttggttgagcgcgttattagttattattaggaatagtagtagtcgcgtaatgtttagtttaacggtttaacgatcgatattatcggcgaagcgttagttatgtaggacgtgtttcgtattatcggtcggttttcgcgtttttttattagcgtgttgattaacggcgaattcggtatcggtaaagaattggtcgtttatgttttgtatcgtttagttcgcgcgcggtaatttgtaaaaaatggcgcgttagacggggaatattttttcgacgtttcgtagcggcggtagatgaacgcggataacgtttaggcggtggaatagatttttacggaatttatttttttgtattcgttgttcgagatttaggttttttacggcgatatttcgcgttatatggcgggtgattcgattgcgggtaaattgtttggtggttttttgtttaaaatgtacggtttgttagttgtcgtaattgttatttggtattttgttaaattagaaaatcgcgcgaaagtgggcggtattatgattttcgcggcgttgatttcgtttttggatcggtattatcgagtcgatcgagtttttttttatgttcgttcggcggattagttataggttttcgatgaaacgattttcgttagtgggatcgtgtcgcgtattggtttttagggtttgaggaaatggcgattttttgcgtaataattcgtaagacgttaggtattacgattatgtattagacgtacgattagtcggttttcgaaagcgatattcggggatgttaaaatgtttgaaattataattttattttatttgtgatt

SEQ ID NO: 7586 - DNA, 892 bp, Artificial Sequence
  chemically treated genomic DNA (Homo sapiens) CpG-island No: 7586
aatcacaaataaaataaaattataatttcaaacattttaacatccccgaatatcgctttcgaaaaccgactaatcgtacgtctaatacataatcgtaatacctaacgtcttacgaattattacgcaaaaaatcgccatttcctcaaaccctaaaaaccaatacgcgacacgatcccactaacgaaaatcgtttcatcgaaaacctataactaatccgccgaacgaacataaaaaaaaactcgatcgactcgataataccgatccaaaaacgaaatcaacgccgcgaaaatcataataccgcccactttcgcgcgattttctaatttaacaaaataccaaataacaattacgacaactaacaaaccgtacattttaaacaaaaaaccaccaaacaatttacccgcaatcgaatcacccgccatataacgcgaaatatcgccgtaaaaaacctaaatctcgaacaacgaatacaaaaaaataaattccgtaaaaatctattccaccgcctaaacgttatccgcgttcatctaccgccgctacgaaacgtcgaaaaaatattccccgtctaacgcgccattttttacaaattaccgcgcgcgaactaaacgatacaaaacataaacgaccaattctttaccgataccgaattcgccgttaatcaacacgctaataaaaaaacgcgaaaaccgaccgataatacgaaacacgtcctacataactaacgcttcgccgataatatcgatcgttaaaccgttaaactaaacattacgcgactactactattcctaataataactaataacgcgctcaaccaacgccactacttcgtcgatatcaaacgatttaaacaaataatcaaacgccccttattaataaacgctaacgacaacat

SEQ ID NO: 7587 - DNA, 892 bp, Artificial Sequence
  chemically treated genomic DNA (Homo sapiens) CpG-island No: 7587
agttataagtaaggtagggttatgattttaggtattttagtattttcgggtatcgttttcggagatcgattggtcgtgcgtttggtgtatgatcgtgatgtttggcgttttgcggattattacgtagagaatcgttatttttttaagttttgggagttagtgcgcggtacgattttattggcgaggatcgttttatcgaaagtttgtaattgattcgtcgaacgaatatgaaggagaattcgatcggttcggtgatatcggtttaggaacgaggttagcgtcgcggagattataatatcgtttattttcgcgcggttttttggtttagtagagtgttagatagtaattgcggtagttggtagatcgtatattttgaataggaagttattagatagtttattcgtagtcgggttattcgttatataacgcggaatgtcgtcgtggaaaatttgaatttcgaatagcgagtgtaggaaggtaagtttcgtgaggatttgttttatcgtttgaacgttattcgcgtttatttgtcgtcgttgcggaacgtcgggaagatatttttcgtttggcgcgttattttttataggttgtcgcgcgcgaattgggcgatgtagggtatgagcgattagttttttatcggtgtcggattcgtcgttaattagtacgttaatagaagaacgcgaaagtcgatcgataatacggaatacgttttgtatggttggcgtttcgtcgatgatatcggtcgttgggtcgttaagttgaatattacgcggttgttgttgtttttggtaatgattgatagcgcgtttaattagcgttattgtttcgtcgatattaaacggtttgggtagataattaaacgttttttgttgataggcgttgacggtagtat

SEQ ID NO: 7588 - DNA, 892 bp, Artificial Sequence
  chemically treated genomic DNA (Homo sapiens) CpG-island No: 7588
atactaccgtcaacgcctatcaacaaaaaacgtttaattatctacccaaaccgtttaatatcgacgaaacaataacgctaattaaacgcgctatcaatcattaccaaaaacaacaacaaccgcgtaatattcaacttaacgacccaacgaccgatatcatcgacgaaacgccaaccatacaaaacgtattccgtattatcgatcgactttcgcgttcttctattaacgtactaattaacgacgaatccgacaccgataaaaaactaatcgctcataccctacatcgcccaattcgcgcgcgacaacctataaaaaataacgcgccaaacgaaaaatatcttcccgacgttccgcaacgacgacaaataaacgcgaataacgttcaaacgataaaacaaatcctcacgaaacttaccttcctacactcgctattcgaaattcaaattttccacgacgacattccgcgttatataacgaataacccgactacgaataaactatctaataacttcctattcaaaatatacgatctaccaactaccgcaattactatctaacactctactaaaccaaaaaaccgcgcgaaaataaacgatattataatctccgcgacgctaacctcgttcctaaaccgatatcaccgaaccgatcgaattctccttcatattcgttcgacgaatcaattacaaactttcgataaaacgatcctcgccaataaaatcgtaccgcgcactaactcccaaaacttaaaaaaataacgattctctacgtaataatccgcaaaacgccaaacatcacgatcatacaccaaacgcacgaccaatcgatctccgaaaacgatacccgaaaatactaaaatacctaaaatcataaccctaccttacttataact

SEQ ID NO: 7589 - DNA, 516 bp, Artificial Sequence
  chemically treated genomic DNA (Homo sapiens) CpG-island No: 7589
attgtatcggattatattttattttttgtcgtgttgtgtgtatgttcgtatttttgtcgatagttgtttggagatttttttgattttagtcgagttatttcgtgtgtaggttcgtcggttcgagttattttattttattgcgtatcggtatttttattcgttcgtttgttgtttcgtattcgtattatatgtttgttgtgtttttttttggtttcgttgtattgcgtaattttggcgtagtcgatgcgttaatcgttagttaatgtcgcgtttttagttttatattagttggttatcgttcgcggttttagtatttatttcgtttcggttttttgtatgatgttgtggtattgattagcggattttataatttttcggcgtgaaatcgttatgtttttgattacgtattcgaggttcgttattcggggattttttagagtattaattagtttttggtaaaatttttttttgtcgagcggtttcgtttaatggttggataaaatgaataaatggagt

SEQ ID NO: 7590 - DNA, 516 bp, Artificial Sequence
  chemically treated genomic DNA (Homo sapiens) CpG-island No: 7590
actccatttattcattttatccaaccattaaacgaaaccgctcgacaaaaaaaaattttaccaaaaactaattaatactctaaaaaatccccgaataacgaacctcgaatacgtaatcaaaaacataacgatttcacgccgaaaaattataaaatccgctaatcaataccacaacatcatacaaaaaaccgaaacgaaataaatactaaaaccgcgaacgataaccaactaatataaaactaaaaacgcgacattaactaacgattaacgcatcgactacgccaaaattacgcaatacaacgaaaccaaaaaaaaacacaacaaacatataatacgaatacgaaacaacaaacgaacgaataaaaataccgatacgcaataaaataaaataactcgaaccgacgaacctacacacgaaataactcgactaaaatcaaaaaaatctccaaacaactatcgacaaaaatacgaacatacacacaacacgacaaaaaataaaatataatccgatacaat

SEQ ID NO: 7591 - DNA, 516 bp, Artificial Sequence
  chemically treated genomic DNA (Homo sapiens) CpG-island No: 7591
gttttatttatttattttatttaattattgagcgaagtcgttcggtagggagaggttttgttaggagttagttggtgttttagaaggttttcgagtgacgagtttcggatgcgtaattagaggtatagcggttttacgtcgagagattgtagagttcgttgattagtgttatagtattatatagaggatcgaagcgagataggtgttaaagtcgcgagcggtgattaattgatgtgagattgagaacgcgatattaattagcggttgacgtatcgattacgttagagttgcgtaatatagcgaaattaagaggagatatagtaggtatgtgatgcgaatgcgggatagtaggcgagcgagtagaagtatcggtacgtagtgagatggagtagttcggatcgacgagtttgtatacgagataattcgattagagttagggaagtttttagatagttgtcgatagaggtgcgaatatgtatataatacgatagagagtaaagtgtagttcgatgtaat

SEQ ID NO: 7592 - DNA, 516 bp, Artificial Sequence
  chemically treated genomic DNA (Homo sapiens) CpG-island No: 7592
attacatcgaactacactttactctctatcgtattatatacatattcgcacctctatcgacaactatctaaaaacttccctaactctaatcgaattatctcgtatacaaactcgtcgatccgaactactccatctcactacgtaccgatacttctactcgctcgcctactatcccgcattcgcatcacatacctactatatctcctcttaatttcgctatattacgcaactctaacgtaatcgatacgtcaaccgctaattaatatcgcgttctcaatctcacatcaattaatcaccgctcgcgactttaacacctatctcgcttcgatcctctatataatactataacactaatcaacgaactctacaatctctcgacgtaaaaccgctatacctctaattacgcatccgaaactcgtcactcgaaaaccttctaaaacaccaactaactcctaacaaaacctctccctaccgaacgacttcgctcaataattaaataaaataaataaataaaac

SEQ ID NO: 7593 - DNA, 548 bp, Artificial Sequence
  chemically treated genomic DNA (Homo sapiens) CpG-island No: 7593
tttttttcgatttcgtatttgtttgttttcgagggtgaacgttaagtagtagattttatttttttattaatatttgcggcgtattcggggaggaggagcgggaaacggcgagggatttgagttagggttagagcgtggggcgaggggcggtttcgagggaggtatttttcgcggagcgcggtcggcgcgcggggattaaggggcggggtaggaggggagtttttcgattcggtttcgcggttttttttgacgtttttttcgttcggttatcgttgattcgggttgattgcgcgcgaggtttttcgggcgcgtatttttttttttttttttacgttacggattagaaaatagatttcgggaggagaggggacggggggttgaaattcggttttcgaggttattttttcggggagcggtcgggtaggtttcggaggtttttcggttcgggttcgcgttattaatttttatgcgtagtagttgggtttgaggtttcgattacggggttggtttcggtttggagggattgagggtggcgaggttcgaggttt

SEQ ID NO: 7594 - DNA, 548 bp, Artificial Sequence
  chemically treated genomic DNA (Homo sapiens) CpG-island No: 7594
aaacctcgaacctcgccaccctcaatccctccaaaccgaaaccaaccccgtaatcgaaacctcaaacccaactactacgcataaaaattaataacgcgaacccgaaccgaaaaacctccgaaacctacccgaccgctccccgaaaaaataacctcgaaaaccgaatttcaaccccccgtcccctctcctcccgaaatctattttctaatccgtaacgtaaaaaaaaaaaaaaaaatacgcgcccgaaaaacctcgcgcgcaatcaacccgaatcaacgataaccgaacgaaaaaaacgtcaaaaaaaaccgcgaaaccgaatcgaaaaactcccctcctaccccgccccttaatccccgcgcgccgaccgcgctccgcgaaaaatacctccctcgaaaccgcccctcgccccacgctctaaccctaactcaaatccctcgccgtttcccgctcctcctccccgaatacgccgcaaatattaataaaaaaataaaatctactacttaacgttcaccctcgaaaacaaacaaatacgaaatcgaaaaaaa

SEQ ID NO: 7595 - DNA, 548 bp, Artificial Sequence
  chemically treated genomic DNA (Homo sapiens) CpG-island No: 7595
gggtttcgagtttcgttatttttagtttttttaggtcggggttaatttcgtagtcgaggttttaggtttagttgttgcgtatgggggttgatggcgcgggttcggatcggagagttttcgaggtttattcgatcgtttttcgggagggtgatttcgggggtcgggttttagtttttcgtttttttttttttcggggtttgttttttgattcgtaacgtggggggaggagagggggtgcgcgttcgggaggtttcgcgcgtagttagttcgagttaacggtaatcgagcgagggaagcgttaggaagggtcgcgaagtcgggtcggggggttttttttttgtttcgttttttagttttcgcgcgtcgatcgcgtttcgcgggaagtgtttttttcggaatcgtttttcgttttacgttttggttttggtttaagtttttcgtcgtttttcgtttttttttttcgggtgcgtcgtaggtattagtggagagatgggatttgttgtttagcgtttattttcggaagtagatagatacgaagtcgggggagg

SEQ ID NO: 7596 - DNA, 548 bp, Artificial Sequence
  chemically treated genomic DNA (Homo sapiens) CpG-island No: 7596
cctcccccgacttcgtatctatctacttccgaaaataaacgctaaacaacaaatcccatctctccactaatacctacgacgcacccgaaaaaaaaaaacgaaaaacgacgaaaaacttaaaccaaaaccaaaacgtaaaacgaaaaacgattccgaaaaaaacacttcccgcgaaacgcgatcgacgcgcgaaaactaaaaaacgaaacaaaaaaaaaaccccccgacccgacttcgcgacccttcctaacgcttccctcgctcgattaccgttaactcgaactaactacgcgcgaaacctcccgaacgcgcaccccctctcctccccccacgttacgaatcaaaaaacaaaccccgaaaaaaaaaaaaacgaaaaactaaaacccgacccccgaaatcaccctcccgaaaaacgatcgaataaacctcgaaaactctccgatccgaacccgcgccatcaacccccatacgcaacaactaaacctaaaacctcgactacgaaattaaccccgacctaaaaaaactaaaaataacgaaactcgaaaccc

SEQ ID NO: 7597 - DNA, 624 bp, Artificial Sequence
  chemically treated genomic DNA (Homo sapiens) CpG-island No: 7597
ggacgattttggaggttttttcggtttttcgtttacggttttggacgtcgttattttgagtaggcggtacgggaatagtcggggtcgaggtcgcgtcggggttaggtcgttaatagatttaacggagtcgtcgttcgcgtcggtcgcggagaggaatttttattcgtggtaaaggatcgtgggatatttattttttagggttcggagtttcgttgtcgttcggtacgtcgggcgcgtcgttttttttttttattttgattttcgtcgtcgttattttcgtcgtcgtttcgatttttgtcgttatttttttcgcgtttgggttttgtgtgagcgaacgggttgtatcgcgttgcgtttgcgcgtttacgtgattcgacgtaattagtaatatttgcgttcgtcgttttcggttgtttttttggttttattcgtttcgggttacgttttcgtcgcgcgtaggcgtagatcggtagttgttgatcgtttttttttcgagatatattcgcgttaggtatcgattggttgttttcggcgcgcgttttttgagttcgatagaggaggtatttttttattttattttatataaatatttagatttagttatttttagttttttgtaattag

SEQ ID NO: 7598 - DNA, 624 bp, Artificial Sequence
  chemically treated genomic DNA (Homo sapiens) CpG-island No: 7598
ctaattacaaaaaactaaaaataactaaatctaaatatttatataaaataaaataaaaaaatacctcctctatcgaactcaaaaaacgcgcgccgaaaacaaccaatcgatacctaacgcgaatatatctcgaaaaaaaaacgatcaacaactaccgatctacgcctacgcgcgacgaaaacgtaacccgaaacgaataaaaccaaaaaaacaaccgaaaacgacgaacgcaaatattactaattacgtcgaatcacgtaaacgcgcaaacgcaacgcgatacaacccgttcgctcacacaaaacccaaacgcgaaaaaaataacgacaaaaatcgaaacgacgacgaaaataacgacgacgaaaatcaaaataaaaaaaaaaaacgacgcgcccgacgtaccgaacgacaacgaaactccgaaccctaaaaaataaatatcccacgatcctttaccacgaataaaaattcctctccgcgaccgacgcgaacgacgactccgttaaatctattaacgacctaaccccgacgcgacctcgaccccgactattcccgtaccgcctactcaaaataacgacgtccaaaaccgtaaacgaaaaaccgaaaaaacctccaaaatcgtcc

SEQ ID NO: 7599 - DNA, 624 bp, Artificial Sequence
  chemically treated genomic DNA (Homo sapiens) CpG-island No: 7599
ttggttatagaaagttgagagtgattaggtttaggtgtttgtgtggggtggggtggggagatgttttttttatcggatttagaggacgcgcgtcgggaatagttagtcggtgtttaacgcgagtgtatttcgagagagaagcgattaatagttgtcggtttgcgtttgcgcgcggcgggggcgtggttcggggcgagtggggttaaggaggtagtcgggagcggcgggcgtaggtgttattggttgcgtcgggttacgtgggcgcgtaggcgtagcgcggtgtagttcgttcgtttatataaagtttagacgcggagaaaatggcggtaggggtcgaagcggcggcggaggtggcggcgacggagattaaaatggaggaagagagcggcgcgttcggcgtgtcgagcggtaacggggtttcgggttttaaggggtgagtattttacggttttttgttacgggtaagggttttttttcgcggtcgacgcgggcggcggtttcgttaggtttgttggcggtttagtttcggcgcggtttcggtttcggttgttttcgtatcgtttgtttagggtagcggcgtttagggtcgtgagcggggagtcgggggagtttttagaatcgttt

SEQ ID NO: 7600 - DNA, 624 bp, Artificial Sequence
  chemically treated genomic DNA (Homo sapiens) CpG-island No: 7600
aaacgattctaaaaactcccccgactccccgctcacgaccctaaacgccgctaccctaaacaaacgatacgaaaacaaccgaaaccgaaaccgcgccgaaactaaaccgccaacaaacctaacgaaaccgccgcccgcgtcgaccgcgaaaaaaaacccttacccgtaacaaaaaaccgtaaaatactcaccccttaaaacccgaaaccccgttaccgctcgacacgccgaacgcgccgctctcttcctccattttaatctccgtcgccgccacctccgccgccgcttcgacccctaccgccattttctccgcgtctaaactttatataaacgaacgaactacaccgcgctacgcctacgcgcccacgtaacccgacgcaaccaataacacctacgcccgccgctcccgactacctccttaaccccactcgccccgaaccacgcccccgccgcgcgcaaacgcaaaccgacaactattaatcgcttctctctcgaaatacactcgcgttaaacaccgactaactattcccgacgcgcgtcctctaaatccgataaaaaaaacatctccccaccccaccccacacaaacacctaaacctaatcactctcaactttctataaccaa

SEQ ID NO: 7601 - DNA, 587 bp, Artificial Sequence
  chemically treated genomic DNA (Homo sapiens) CpG-island No: 7601
tcgacggttagcggttagaggtcgttcgttcgattttaagatggcgttcgttatagttgttaggtgttaagatggcggcgcggggtcgcgttcgcgtttttaggttttttttttttagttttttttcggttggtagtacgattcgcgtagtcgtgcgtcgattgtttttcggtttgggtaatggtttcggttgtcggtcgacgatcgtttcgcgttatgcggtttttcggttggtggtaagtattgttgtgggtgttgggatttttcgttcgcggcgtggagggtgagtgtgggtcgggggcggtgtatgagatgatggggcgagttgaggtttattcgggcgacgttttggatttgcgcgaaggtcggcggtgcgcgattcgtttttttttggcgttttttcgggcgcgttttttcgattttttttttcgcgtatcgttcgttggtggttcgcgaaagggggtcggtgggttgagggtcggtggacgggagttcgggggtggttgggtcgcgtttaggtcgtttttagttcgtggttggtagttaggagggatagtgcggtaagcgttgttgaggtatattttttg

SEQ ID NO: 7602 - DNA, 587 bp, Artificial Sequence
  chemically treated genomic DNA (Homo sapiens) CpG-island No: 7602
caaaaaatatacctcaacaacgcttaccgcactatccctcctaactaccaaccacgaactaaaaacgacctaaacgcgacccaaccacccccgaactcccgtccaccgaccctcaacccaccgaccccctttcgcgaaccaccaacgaacgatacgcgaaaaaaaaaatcgaaaaaacgcgcccgaaaaaacgccaaaaaaaaacgaatcgcgcaccgccgaccttcgcgcaaatccaaaacgtcgcccgaataaacctcaactcgccccatcatctcatacaccgcccccgacccacactcaccctccacgccgcgaacgaaaaatcccaacacccacaacaatacttaccaccaaccgaaaaaccgcataacgcgaaacgatcgtcgaccgacaaccgaaaccattacccaaaccgaaaaacaatcgacgcacgactacgcgaatcgtactaccaaccgaaaaaaaactaaaaaaaaaaaacctaaaaacgcgaacgcgaccccgcgccgccatcttaacacctaacaactataacgaacgccatcttaaaatcgaacgaacgacctctaaccgctaaccgtcga

SEQ ID NO: 7603 - DNA, 587 bp, Artificial Sequence
  chemically treated genomic DNA (Homo sapiens) CpG-island No: 7603
tagagggtatgttttagtagcgtttatcgtattgttttttttggttattagttacgggttgagggcggtttgaacgcggtttaattattttcgggttttcgtttatcggtttttagtttatcggttttttttcgcgggttattagcgggcggtgcgcggggagagaagtcggggagacgcgttcggggagacgttaagaaggggcgagtcgcgtatcgtcggttttcgcgtaggtttagagcgtcgttcgggtggattttagttcgttttattattttatgtatcgttttcggtttatatttattttttacgtcgcggacgggaagttttagtatttatagtaatatttgttattagtcgaggagtcgtatgacgcggggcggtcgtcgatcggtagtcgggattattgtttaggtcgagaggtaatcggcgtacggttacgcgagtcgtgttgttagtcggaggaaggttgggggaggagagtttgggagcgcgggcgcggtttcgcgtcgttattttaatatttggtagttgtggcgggcgttattttggagtcgggcggacggtttttagtcgttggtcgtcgg

SEQ ID NO: 7604 - DNA, 587 bp, Artificial Sequence
  chemically treated genomic DNA (Homo sapiens) CpG-island No: 7604
ccgacgaccaacgactaaaaaccgtccgcccgactccaaaataacgcccgccacaactaccaaatattaaaataacgacgcgaaaccgcgcccgcgctcccaaactctcctcccccaaccttcctccgactaacaacacgactcgcgtaaccgtacgccgattacctctcgacctaaacaataatcccgactaccgatcgacgaccgccccgcgtcatacgactcctcgactaataacaaatattactataaatactaaaacttcccgtccgcgacgtaaaaaataaatataaaccgaaaacgatacataaaataataaaacgaactaaaatccacccgaacgacgctctaaacctacgcgaaaaccgacgatacgcgactcgccccttcttaacgtctccccgaacgcgtctccccgacttctctccccgcgcaccgcccgctaataacccgcgaaaaaaaaccgataaactaaaaaccgataaacgaaaacccgaaaataattaaaccgcgttcaaaccgccctcaacccgtaactaataaccaaaaaaaacaatacgataaacgctactaaaacataccctcta

SEQ ID NO: 7605 - DNA, 532 bp, Artificial Sequence
  chemically treated genomic DNA (Homo sapiens) CpG-island No: 7605
  unsure (431)
aacgtgatgttgtatttcggagcgtttcgttttttggttatgaatacgtttggtatggtgaagttgttttagggtttgggcgttatttttcgtaagaatttgttgattacgcggaaggcgaataataatttgttatttttgtcgggaggtaattatttgggcgtggtcggttagttggttcgtatatcgtcgtcgttttcgttagcgttaagtaacggtttgtcgggtaagaatttcgtttcgggtagaattatttacgtttagcgatcgaatgttattgtataagatcgtttgaggtgtaataagagggcgttggtatgaagaaaagttggtggtggattaagcggatcgtcgggagttatgatagttaagcgtttgaatgaattgttaatgggaaaggcgaagaaggaggagaagttattatcggatancgaggatggcggcgagtagtcgacgaaggataaggaacgcgataaattgaggatgttattttaagattatagggaattgtgtataatgaggattaagagaa

SEQ ID NO: 7606 - DNA, 532 bp, Artificial Sequence
  chemically treated genomic DNA (Homo sapiens) CpG-island No: 7606
  unsure (102)
ttctcttaatcctcattatacacaattccctataatcttaaaataacatcctcaatttatcgcgttccttatccttcgtcgactactcgccgccatcctcgntatccgataataacttctcctccttcttcgcctttcccattaacaattcattcaaacgcttaactatcataactcccgacgatccgcttaatccaccaccaacttttcttcataccaacgccctcttattacacctcaaacgatcttatacaataacattcgatcgctaaacgtaaataattctacccgaaacgaaattcttacccgacaaaccgttacttaacgctaacgaaaacgacgacgatatacgaaccaactaaccgaccacgcccaaataattacctcccgacaaaaataacaaattattattcgccttccgcgtaatcaacaaattcttacgaaaaataacgcccaaaccctaaaacaacttcaccataccaaacgtattcataaccaaaaaacgaaacgctccgaaatacaacatcacgtt

SEQ ID NO: 7607 - DNA, 532 bp, Artificial Sequence
  chemically treated genomic DNA (Homo sapiens) CpG-island No: 7607
  unsure (102)
tttttttgatttttattatgtatagttttttgtagttttagagtgatatttttaatttgtcgcgttttttgtttttcgtcggttgttcgtcgttattttcgntattcggtggtggtttttttttttttttcgttttttttattagtagtttatttaaacgtttggttgttatgattttcggcgattcgtttgatttattattagtttttttttatattagcgtttttttattgtattttaggcgattttgtgtaatgatattcgatcgttgagcgtaaatggttttgttcgaggcgggatttttattcggtagatcgttgtttaacgttggcgagggcggcggcggtgtgcgggttagttgatcgattacgtttaggtgattatttttcgatagggatagtaaattgttgttcgtttttcgcgtggttaatagatttttgcggaaggtgacgtttaggttttggggtaattttattatgttaaacgtgtttatggttaagggacgaggcgtttcggagtatagtattacgtt

SEQ ID NO: 7608 - DNA, 532 bp, Artificial Sequence
  chemically treated genomic DNA (Homo sapiens) CpG-island No: 7608
  unsure (431)
aacgtaatactatactccgaaacgcctcgtcccttaaccataaacacgtttaacataataaaattaccccaaaacctaaacgtcaccttccgcaaaaatctattaaccacgcgaaaaacgaacaacaatttactatccctatcgaaaaataatcacctaaacgtaatcgatcaactaacccgcacaccgccgccgccctcgccaacgttaaacaacgatctaccgaataaaaatcccgcctcgaacaaaaccatttacgctcaacgatcgaatatcattacacaaaatcgcctaaaatacaataaaaaaacgctaatataaaaaaaaactaataataaatcaaacgaatcgccgaaaatcataacaaccaaacgtttaaataaactactaataaaaaaaacgaaaaaaaaaaaaaaaccaccaccgaatancgaaaataacgacgaacaaccgacgaaaaacaaaaaacgcgacaaattaaaaatatcactctaaaactacaaaaaactatacataataaaaatcaaaaaaa

SEQ ID NO: 7609 - DNA, 616 bp, Artificial Sequence
  chemically treated genomic DNA (Homo sapiens) CpG-island No: 7609
cggataattcgtatattcggtttatcgttttattttgattggtaggtcgttttaaatatttgtatttgacgcgcggtgtcgttttttagcgttagcgtttgatagtgttcggtggtgatgcggttttttgttagcgtatcgaggatgataggcgtaaggtttgttagttttagtattcgttgaacgtggcggggcgaataatttagtaaattatcgatttgtgtaggtgttttgtttttttgcgttattgtacggaattcggtaatttgttcggtagggtgtatatttcgacgatgatcgttttcggttatcgatgcggtagtcgttagtttttgcggaatgatttttatacggataggttagttaatttgaatgatgttacgttttgttagtatgttgagtgttgttagtcggcgattatttgcggcgatatcgtaacggttatttggtagggtatgaataattagattttgtaataggtcgatattttttatggagttcgttagttcgttgacggatttcggagaatacgggatcgtgcgtatatttaggggagatttaaatagtgtagtagtcgatttgtttcgttttatttatattttttgttatgataggt

SEQ ID NO: 7610 - DNA, 616 bp, Artificial Sequence
  chemically treated genomic DNA (Homo sapiens) CpG-island No: 7610
acctatcataacaaaaaatataaataaaacgaaacaaatcgactactacactatttaaatctcccctaaatatacgcacgatcccgtattctccgaaatccgtcaacgaactaacgaactccataaaaaatatcgacctattacaaaatctaattattcataccctaccaaataaccgttacgatatcgccgcaaataatcgccgactaacaacactcaacatactaacaaaacgtaacatcattcaaattaactaacctatccgtataaaaatcattccgcaaaaactaacgactaccgcatcgataaccgaaaacgatcatcgtcgaaatatacaccctaccgaacaaattaccgaattccgtacaataacgcaaaaaaacaaaacacctacacaaatcgataatttactaaattattcgccccgccacgttcaacgaatactaaaactaacaaaccttacgcctatcatcctcgatacgctaacaaaaaaccgcatcaccaccgaacactatcaaacgctaacgctaaaaaacgacaccgcgcgtcaaatacaaatatttaaaacgacctaccaatcaaaataaaacgataaaccgaatatacgaattatccg

SEQ ID NO: 7611 - DNA, 616 bp, Artificial Sequence
  chemically treated genomic DNA (Homo sapiens) CpG-island No: 7611
gtttgttataatagagaatatgggtaaagcggggtagatcggttattgtattatttaagttttttttaaatgtgcgtacggtttcgtatttttcggagttcgttagcgaattggcggattttataaaaggtgtcggtttgttatagaatttggttgtttatgttttgttaggtgatcgttacggtgtcgtcgtaggtggtcgtcgattggtagtatttaatatgttggtagagcgtgatattatttaggttgattggtttgttcgtgtgaaggttatttcgtaggagttggcgattgtcgtatcgatgatcgagaacggttatcgtcgggatatgtattttgtcgaatagattgtcggatttcgtgtaatggcgtaggaaggtaaaatatttgtataaatcggtgatttgttgggttattcgtttcgttacgtttagcgaatgttgaaattggtagattttgcgtttgttattttcgatgcgttggtagaagatcgtattattatcgagtattgttaggcgttggcgttggagaacgatatcgcgcgttaggtgtaggtgtttgaagcggtttgttagttaggatggggcggtaaatcggatgtgcgggttattcg

SEQ ID NO: 7612 - DNA, 616 bp, Artificial Sequence
  chemically treated genomic DNA (Homo sapiens) CpG-island No: 7612
cgaataacccgcacatccgatttaccgccccatcctaactaacaaaccgcttcaaacacctacacctaacgcgcgatatcgttctccaacgccaacgcctaacaatactcgataataatacgatcttctaccaacgcatcgaaaataacaaacgcaaaatctaccaatttcaacattcgctaaacgtaacgaaacgaataacccaacaaatcaccgatttatacaaatattttaccttcctacgccattacacgaaatccgacaatctattcgacaaaatacatatcccgacgataaccgttctcgatcatcgatacgacaatcgccaactcctacgaaataaccttcacacgaacaaaccaatcaacctaaataatatcacgctctaccaacatattaaatactaccaatcgacgaccacctacgacgacaccgtaacgatcacctaacaaaacataaacaaccaaattctataacaaaccgacaccttttataaaatccgccaattcgctaacgaactccgaaaaatacgaaaccgtacgcacatttaaaaaaaacttaaataatacaataaccgatctaccccgctttacccatattctctattataacaaac

SEQ ID NO: 7613 - DNA, 629 bp, Artificial Sequence
  chemically treated genomic DNA (Homo sapiens) CpG-island No: 7613
cgttttgcgtagttttttatgcgagagcgggatatttcgttgcgttacgttttttagtaatacgtttcggatatcgtaggttagaagtcggggcgtgttatcgttaaataatttcggttattagggttttagggtgtttacggtattatttagcgtgggtagatttagataaatggatagcgtttgtttggtttgcgttttttttgtcgttagttttgtttttcgggcggttttttcggttagtttttgtttttttattttttattttggtggcgtggtgatattgatgatggtttttcggttgcggataagcgtttttttttttgtttttcgttttagtgttagtatcggtcgtttttgttttgttatgttgtgttttgtttttgacgaattatttttttgcggttaaagatattatattcgttatagcgttagaacgtttagtatagttagatgataggtatagaacgtcgggaaaaagttttcgggttagaaacgggataataatttttttgtatacgatattagattaacggttagtatcgttattataaggtcggttatagtcgtcgtattattggtggtttttagagtatagtggagatgatttttaatattttttttattgg

SEQ ID NO: 7614 - DNA, 629 bp, Artificial Sequence
  chemically treated genomic DNA (Homo sapiens) CpG-island No: 7614
ccaataaaaaaaatattaaaaatcatctccactatactctaaaaaccaccaataatacgacgactataaccgaccttataataacgatactaaccgttaatctaatatcgtatacaaaaaaattattatcccgtttctaacccgaaaactttttcccgacgttctatacctatcatctaactatactaaacgttctaacgctataacgaatataatatctttaaccgcaaaaaaataattcgtcaaaaacaaaacacaacataacaaaacaaaaacgaccgatactaacactaaaacgaaaaacaaaaaaaaaaacgcttatccgcaaccgaaaaaccatcatcaatatcaccacgccaccaaaataaaaaataaaaaaacaaaaactaaccgaaaaaaccgcccgaaaaacaaaactaacgacaaaaaaaacgcaaaccaaacaaacgctatccatttatctaaatctacccacgctaaataataccgtaaacaccctaaaaccctaataaccgaaattatttaacgataacacgccccgacttctaacctacgatatccgaaacgtattactaaaaaacgtaacgcaacgaaatatcccgctctcgcataaaaaactacgcaaaacg

SEQ ID NO: 7615 - DNA, 629 bp, Artificial Sequence
  chemically treated genomic DNA (Homo sapiens) CpG-island No: 7615
ttagtaaaaaggatgttgggaattatttttattgtgttttaaaggttattagtgatgcggcggttgtagtcggttttgtgatgacggtgttgatcgttggtttggtgtcgtgtgtagggaaattattatttcgtttttggttcggagattttttttcgacgttttatgtttgttatttggttgtgttgggcgttttggcgttgtgacgggtgtggtatttttggtcgtaagaggatgattcgttagaggtagaatatagtatgatagagtagaagcgatcggtattgatattgaagcggaagatagaaggggagacgtttgttcgtagtcggaaaattattattaatgttattacgttattaaagtggaaggtgaaaaagtagaagttggtcgagaaagtcgttcgggaagtagagttggcggtaaaaaaagcgtaggttagataggcgttgtttatttatttgaatttgtttacgttggatgatgtcgtgaatattttgaagttttggtggtcgggattatttgacggtgatacgtttcggtttttggtttgcggtattcgggacgtgttattggaagacgtggcgtagcggaatatttcgttttcgtataaaaaattgcgtagggcg

SEQ ID NO: 7616 - DNA, 629 bp, Artificial Sequence
  chemically treated genomic DNA (Homo sapiens) CpG-island No: 7616
cgccctacgcaattttttatacgaaaacgaaatattccgctacgccacgtcttccaataacacgtcccgaataccgcaaaccaaaaaccgaaacgtatcaccgtcaaataatcccgaccaccaaaacttcaaaatattcacgacatcatccaacgtaaacaaattcaaataaataaacaacgcctatctaacctacgctttttttaccgccaactctacttcccgaacgactttctcgaccaacttctactttttcaccttccactttaataacgtaataacattaataataattttccgactacgaacaaacgtctccccttctatcttccgcttcaatatcaataccgatcgcttctactctatcatactatattctacctctaacgaatcatcctcttacgaccaaaaataccacacccgtcacaacgccaaaacgcccaacacaaccaaataacaaacataaaacgtcgaaaaaaaatctccgaaccaaaaacgaaataataatttccctacacacgacaccaaaccaacgatcaacaccgtcatcacaaaaccgactacaaccgccgcatcactaataacctttaaaacacaataaaaataattcccaacatcctttttactaa

SEQ ID NO: 7617 - DNA, 513 bp, Artificial Sequence
  chemically treated genomic DNA (Homo sapiens) CpG-island No: 7617
tagacggcgagcgattgagggtgatagggaaaattttcggatttcgcgttttcggcggtgatcgtttgtaggtggtattcgttagtgaagatgcgatgacggttgttgtgtcgggacgggttgaatcggttattttgtttgtgagcgatttatcgtttacggtattgaagttggagaacggttgggtggaaacgttcgggtatttcgttagcgatagtgcgacggtttttgttttcgttatatagatggtaatggataatgttattttgaacggtttggttcgtagtggtcgtgatgttcggttgtattttttattggatgaaattcgtattgcggaaaaatttgttcgttattcgttttttacggtggtttttgagtagataaagacgcgggtcggtgagatatcgttggaaacggttattagttattagaagttcgtattttatacgtcggtatagtaggttatttattttgttttttcggtggtggaaagtaaaaaattggtttttagta

SEQ ID NO: 7618 - DNA, 513 bp, Artificial Sequence
  chemically treated genomic DNA (Homo sapiens) CpG-island No: 7618
tactaaaaaccaattttttactttccaccaccgaaaaaacaaaataaataacctactataccgacgtataaaatacgaacttctaataactaataaccgtttccaacgatatctcaccgacccgcgtctttatctactcaaaaaccaccgtaaaaaacgaataacgaacaaatttttccgcaatacgaatttcatccaataaaaaatacaaccgaacatcacgaccactacgaaccaaaccgttcaaaataacattatccattaccatctatataacgaaaacaaaaaccgtcgcactatcgctaacgaaatacccgaacgtttccacccaaccgttctccaacttcaataccgtaaacgataaatcgctcacaaacaaaataaccgattcaacccgtcccgacacaacaaccgtcatcgcatcttcactaacgaataccacctacaaacgatcaccgccgaaaacgcgaaatccgaaaattttccctatcaccctcaatcgctcgccgtcta

SEQ ID NO: 7619 - DNA, 513 bp, Artificial Sequence
  chemically treated genomic DNA (Homo sapiens) CpG-island No: 7619
tgttgaaggttagttttttattttttattatcggaagggtaagatgaatggtttgttgtgtcggcgtgtgaagtgcggatttttgatgattgatagtcgtttttagcgatgttttatcggttcgcgtttttatttgtttagaaattatcgtaaaggacggatggcgggtaagttttttcgtagtacgggttttatttagtgaggaatatagtcggatattacgattattgcgggttagatcgtttagggtggtattgtttattgttatttgtgtgacggaggtaaaaatcgtcgtattgtcgttgacggaatgttcgggcgtttttatttagtcgttttttagttttagtgtcgtgaacggtgaatcgtttataggtagggtggtcggtttagttcgtttcggtataataatcgttatcgtatttttattgacggatgttatttgtaggcggttatcgtcggagacgcggagttcgggaattttttttgttatttttagtcgttcgtcgtttg

SEQ ID NO: 7620 - DNA, 513 bp, Artificial Sequence
  chemically treated genomic DNA (Homo sapiens) CpG-island No: 7620
caaacgacgaacgactaaaaataacaaaaaaaattcccgaactccgcgtctccgacgataaccgcctacaaataacatccgtcaataaaaatacgataacgattattataccgaaacgaactaaaccgaccaccctacctataaacgattcaccgttcacgacactaaaactaaaaaacgactaaataaaaacgcccgaacattccgtcaacgacaatacgacgatttttacctccgtcacacaaataacaataaacaataccaccctaaacgatctaacccgcaataatcgtaatatccgactatattcctcactaaataaaacccgtactacgaaaaaacttacccgccatccgtcctttacgataatttctaaacaaataaaaacgcgaaccgataaaacatcgctaaaaacgactatcaatcatcaaaaatccgcacttcacacgccgacacaacaaaccattcatcttacccttccgataataaaaaataaaaaactaaccttcaaca

SEQ ID NO: 7621 - DNA, 568 bp, Artificial Sequence
  chemically treated genomic DNA (Homo sapiens) CpG-island No: 7621
ggtatgtgggaaatgtcgggtgtatcggtggaggtttttttcggacgtttatagattattcgggaggtcgtcggggaagacgtttcgttgaaatttcgggatgtggcggcgttggatacgcgtaaatttaaatagtatgtcgattcggagattaaaatggtcgagtggatgtagacgttgaaggaaatcgggttcgatattcgggtatatcgtgacgcggcggattagcgtgcggattttcgtacgttgacgttcgggtttgttttataggacgggtcggatgtgtagtaggcggtgatataggcgattgtcggattaagtgaacgaaaagtgtagtttacgtatacggacgtattggttagaacggtcggtatattgtcgtcggaaaatggtgtgattgaacgggtacgcgtcggtatcgatgaggttattagtcgtgagtagtttatttttttcgatcgggtgaaggggtaatttagcgaacgggatttatgtgttgaaaaatttgggaaaattggcggttaattcgggatataatggaggtaaaattcgggtgaatttacgattt

SEQ ID NO: 7622 - DNA, 568 bp, Artificial Sequence
  chemically treated genomic DNA (Homo sapiens) CpG-island No: 7622
aaatcgtaaattcacccgaattttacctccattatatcccgaattaaccgccaattttcccaaatttttcaacacataaatcccgttcgctaaattaccccttcacccgatcgaaaaaaataaactactcacgactaataacctcatcgataccgacgcgtacccgttcaatcacaccattttccgacgacaatataccgaccgttctaaccaatacgtccgtatacgtaaactacacttttcgttcacttaatccgacaatcgcctatatcaccgcctactacacatccgacccgtcctataaaacaaacccgaacgtcaacgtacgaaaatccgcacgctaatccgccgcgtcacgatatacccgaatatcgaacccgatttccttcaacgtctacatccactcgaccattttaatctccgaatcgacatactatttaaatttacgcgtatccaacgccgccacatcccgaaatttcaacgaaacgtcttccccgacgacctcccgaataatctataaacgtccgaaaaaaacctccaccgatacacccgacatttcccacatacc

SEQ ID NO: 7623 - DNA, 568 bp, Artificial Sequence
  chemically treated genomic DNA (Homo sapiens) CpG-island No: 7623
gaatcgtgggtttattcgggttttgtttttattatgtttcgaattagtcgttaatttttttaggttttttagtatatgaatttcgttcgttgaattgtttttttattcggtcgagggggataagttgtttacggttgatggttttatcgatatcggcgcgtgttcgtttaattatattatttttcggcgatagtatgtcgatcgttttggttagtacgttcgtgtacgtgaattgtatttttcgtttatttaattcggtaatcgtttgtgttatcgtttgttgtatattcggttcgttttgtgaagtaggttcgggcgttagcgtgcggagattcgtacgttgattcgtcgcgttacgatatgttcggatgtcgaattcggttttttttagcgtttgtatttattcggttattttgattttcggatcgatatgttgtttggatttacgcgtatttagcgtcgttatatttcgggattttagcgaggcgtttttttcgacggtttttcggatagtttgtgagcgttcggaaaaggtttttatcggtatattcggtattttttatatatt

SEQ ID NO: 7624 - DNA, 568 bp, Artificial Sequence
  chemically treated genomic DNA (Homo sapiens) CpG-island No: 7624
aatatataaaaaataccgaatataccgataaaaaccttttccgaacgctcacaaactatccgaaaaaccgtcgaaaaaaacgcctcgctaaaatcccgaaatataacgacgctaaatacgcgtaaatccaaacaacatatcgatccgaaaatcaaaataaccgaataaatacaaacgctaaaaaaaaccgaattcgacatccgaacatatcgtaacgcgacgaatcaacgtacgaatctccgcacgctaacgcccgaacctacttcacaaaacgaaccgaatatacaacaaacgataacacaaacgattaccgaattaaataaacgaaaaatacaattcacgtacacgaacgtactaaccaaaacgatcgacatactatcgccgaaaaataatataattaaacgaacacgcgccgatatcgataaaaccatcaaccgtaaacaacttatccccctcgaccgaataaaaaaacaattcaacgaacgaaattcatatactaaaaaacctaaaaaaattaacgactaattcgaaacataataaaaacaaaacccgaataaacccacgattc

SEQ ID NO: 7625 - DNA, 756 bp, Artificial Sequence
  chemically treated genomic DNA (Homo sapiens) CpG-island No: 7625
aacgtattgatttgtcgttacgttcgtaatttgttgttggcgtagggttggtcggaagagacggatgtcgattagcgtaattcgaagtattcgggttggattagtatttatgttttgttggatgcgtttcggttggcgacgttattcgttaatcgttacggcggcgtattgtcgtcgtatttggttttcgttatttagaaattgatcggaatcggagcggaatttgttttgttcggtagttagtggtagtcgttgtcggtgttttcgttagacggaacgtaggtgtttttttcgtatgtcggtgaatggttgatcgaagacgaaattagggttgtatttgtcgcggtgcgcgatgtcgtacgtagtgttagttgtcgggtggtagaagatatacggcgtattcggacggcgttgattattatcggttagacgttattgattcgttagattcgtcgttttcgtttggtcgtgaaggaaagcgattatttttgttggttcgatgaggacgacgaaaatttgttcgtggtgttcgatgttattttgaatcggggcgtacgtttttcggcggtggaaatgtatttggttagcgattgtattgaatatattttgtttagtgggttggtttgcgatgtgttgcgtatatcggatgaatcgtttcgttttagagtatattaataaagtttgtggtttcggttgaggttgacgttgaattgtgtttttttttcggttgagtttgagtatttgcggtacgtatta

SEQ ID NO: 7626 - DNA, 756 bp, Artificial Sequence
  chemically treated genomic DNA (Homo sapiens) CpG-island No: 7626
taatacgtaccgcaaatactcaaactcaaccgaaaaaaaaacacaattcaacgtcaacctcaaccgaaaccacaaactttattaatatactctaaaacgaaacgattcatccgatatacgcaacacatcgcaaaccaacccactaaacaaaatatattcaatacaatcgctaaccaaatacatttccaccgccgaaaaacgtacgccccgattcaaaataacatcgaacaccacgaacaaattttcgtcgtcctcatcgaaccaacaaaaataatcgctttccttcacgaccaaacgaaaacgacgaatctaacgaatcaataacgtctaaccgataataatcaacgccgtccgaatacgccgtatatcttctaccacccgacaactaacactacgtacgacatcgcgcaccgcgacaaatacaaccctaatttcgtcttcgatcaaccattcaccgacatacgaaaaaaacacctacgttccgtctaacgaaaacaccgacaacgactaccactaactaccgaacaaaacaaattccgctccgattccgatcaatttctaaataacgaaaaccaaatacgacgacaatacgccgccgtaacgattaacgaataacgtcgccaaccgaaacgcatccaacaaaacataaatactaatccaacccgaatacttcgaattacgctaatcgacatccgtctcttccgaccaaccctacgccaacaacaaattacgaacgtaacgacaaatcaatacgtt

SEQ ID NO: 7627 - DNA, 756 bp, Artificial Sequence
  chemically treated genomic DNA (Homo sapiens) CpG-island No: 7627
tggtacgtgtcgtaggtgtttagatttagtcggaagaggggtatagtttagcgttagttttagtcggaattataggttttattgatgtgttttaaggcggggcggtttattcggtatacgtagtatatcgtaggttagtttattagataggatatgtttaatataatcgttgattagatatatttttatcgtcgaaaaacgtgcgtttcggtttaggatggtatcgagtattacgggtaggttttcgtcgtttttatcgagttagtaggggtgatcgtttttttttacgattaggcgaaagcggcgagtttggcgggttagtaacgtttgatcggtggtggttagcgtcgttcggatacgtcgtatattttttgttattcggtaattgatattgcgtacggtatcgcgtatcgcggtaagtatagttttgatttcgttttcggttagttatttatcggtatacggaaaagatatttgcgtttcgtttgacggaagtatcggtagcgattgttattgattgtcggatagaataagtttcgtttcggtttcggttagtttttgaatggcggaggttaggtgcggcggtagtacgtcgtcgtggcggttaacgagtaacgtcgttagtcggggcgtatttagtagaatataaatgttgatttagttcggatatttcgggttacgttggtcgatattcgtttttttcggttagttttgcgttagtagtaggttacgggcgtgacgataaattagtgcgtt

SEQ ID NO: 7628 - DNA, 756 bp, Artificial Sequence
  chemically treated genomic DNA (Homo sapiens) CpG-island No: 7628
aacgcactaatttatcgtcacgcccgtaacctactactaacgcaaaactaaccgaaaaaaacgaatatcgaccaacgtaacccgaaatatccgaactaaatcaacatttatattctactaaatacgccccgactaacgacgttactcgttaaccgccacgacgacgtactaccgccgcacctaacctccgccattcaaaaactaaccgaaaccgaaacgaaacttattctatccgacaatcaataacaatcgctaccgatacttccgtcaaacgaaacgcaaatatcttttccgtataccgataaataactaaccgaaaacgaaatcaaaactatacttaccgcgatacgcgataccgtacgcaatatcaattaccgaataacaaaaaatatacgacgtatccgaacgacgctaaccaccaccgatcaaacgttactaacccgccaaactcgccgctttcgcctaatcgtaaaaaaaaacgatcacccctactaactcgataaaaacgacgaaaacctacccgtaatactcgataccatcctaaaccgaaacgcacgtttttcgacgataaaaatatatctaatcaacgattatattaaacatatcctatctaataaactaacctacgatatactacgtataccgaataaaccgccccgccttaaaacacatcaataaaacctataattccgactaaaactaacgctaaactatacccctcttccgactaaatctaaacacctacgacacgtacca

SEQ ID NO: 7629 - DNA, 1034 bp, Artificial Sequence
  chemically treated genomic DNA (Homo sapiens) CpG-island No: 7629
tgagcgcgacgaagggaagtcgggtcgggtagaaatttatcgttttttaggggttttggaagtttgttcgggaagagtttttgcgtagcgtgttttcgttcgagagtttggagggagaatcggaggggagtgaggggcggtgggatcgcgggggtcggggtcgacgtcggggtagggacgttttgcgcgttggagatttcgagggtcgcgcgtaattggggcggcgcggttcggcgatcgcgggggaggagtcgggcgtcggcgggggtttatttttgtttcgtttggggtttcggcgtttgttttcgggattttcgggatttttgcgtcgtcggtcgcgttttcggattcgtttacgagcgacgatttgagttcggttaggtcgcgttcgggatcggcggcgttgtcgcggtttttgtcgttttgtttttcgtttttattttggaaggttattagttcgttcggcgcgtcgaggtcgtcgtcgtcgttcgcgtcgttttcgtcggagtttagttgcggtatggtgcgtttcgttcgtcggagcgcggggcgttgggcgtcgggagtgcggggcgcggagtcggttcggggggcggcgagttcggagttcgaattttcgagttcggatcgcggcgggcggagcgcgggttgatttcgtttgggcgggttgtaggcgcgggttagggcgcggggtagagcggtttcgcgagttggcgggtcggaatattaaaggcgtcgtcggtcgagtgtcgggggcggggcgggtattgggggcgggtcgggtcgggggcgggatataggttcgtttcgttttttttttttcgggagaggtcgggacgcgtttattcggtatagttttaaagggttcgttttttcggagcgtattttgagagagacgtcggataagtttgggaatgattatttttttttcgaaacgtagagattttaacgggaatttttgatttcgtttatttatttataattagatattttttttgttttttgcgtttaggtttttttttcggttgtggagg

SEQ ID NO: 7630 - DNA, 1034 bp, Artificial Sequence
  chemically treated genomic DNA (Homo sapiens) CpG-island No: 7630
cctccacaaccgaaaaaaaaacctaaacgcaaaaaacaaaaaaaatatctaattataaataaataaacgaaatcaaaaattcccgttaaaatctctacgtttcgaaaaaaaaataatcattcccaaacttatccgacgtctctctcaaaatacgctccgaaaaaacgaaccctttaaaactataccgaataaacgcgtcccgacctctcccgaaaaaaaaaaaacgaaacgaacctatatcccgcccccgacccgacccgcccccaatacccgccccgcccccgacactcgaccgacgacgcctttaatattccgacccgccaactcgcgaaaccgctctaccccgcgccctaacccgcgcctacaacccgcccaaacgaaatcaacccgcgctccgcccgccgcgatccgaactcgaaaattcgaactccgaactcgccgccccccgaaccgactccgcgccccgcactcccgacgcccaacgccccgcgctccgacgaacgaaacgcaccataccgcaactaaactccgacgaaaacgacgcgaacgacgacgacgacctcgacgcgccgaacgaactaataaccttccaaaataaaaacgaaaaacaaaacgacaaaaaccgcgacaacgccgccgatcccgaacgcgacctaaccgaactcaaatcgtcgctcgtaaacgaatccgaaaacgcgaccgacgacgcaaaaatcccgaaaatcccgaaaacaaacgccgaaaccccaaacgaaacaaaaataaacccccgccgacgcccgactcctcccccgcgatcgccgaaccgcgccgccccaattacgcgcgaccctcgaaatctccaacgcgcaaaacgtccctaccccgacgtcgaccccgacccccgcgatcccaccgcccctcactcccctccgattctccctccaaactctcgaacgaaaacacgctacgcaaaaactcttcccgaacaaacttccaaaacccctaaaaaacgataaatttctacccgacccgacttcccttcgtcgcgctca

SEQ ID NO: 7631 - DNA, 1034 bp, Artificial Sequence
  chemically treated genomic DNA (Homo sapiens) CpG-island No: 7631
tttttatagtcggaggagaaatttgggcgtagaaagtagggggaatatttggttgtaggtgagtaagcggggttaggagttttcgttagagtttttgcgtttcgggagaagggtgattatttttaggtttgttcgacgttttttttagggtgcgtttcggaagagcgagttttttaaggttatgtcgagtgggcgcgtttcggtttttttcgggagaggagaggcggggcggatttgtgtttcgttttcggttcggttcgtttttagtgttcgtttcgttttcggtattcggtcggcggcgtttttgatgtttcgattcgttagttcgcggagtcgttttgtttcgcgttttagttcgcgtttgtagttcgtttaggcggagttagttcgcgtttcgttcgtcgcgattcgggttcggaggttcggatttcgggttcgtcgtttttcgggtcggtttcgcgtttcgtattttcggcgtttagcgtttcgcgtttcggcgggcggagcgtattatgtcgtagttggatttcggcgggggcggcgcgggcggcggcgacgatttcggcgcgtcggacgagttggtggttttttaggatgaaggcgaggagtaggacgataagagtcgcgatagcgtcgtcggtttcgagcgcgatttggtcgagtttaagtcgtcgttcgtgaacgagttcgagggcgcggtcggcggcgtagggatttcgggggtttcggggataggcgtcggggttttaggcgagatagaggtgaattttcgtcggcgttcggtttttttttcgcggtcgtcgagtcgcgtcgttttagttgcgcgcggttttcggggtttttagcgcgtagagcgtttttgtttcggcgtcggtttcgattttcgcggttttatcgttttttattttttttcggttttttttttaggttttcgggcgggaatacgttgcgtagagatttttttcggataaatttttagagtttttggaggacggtgagtttttgttcggttcggttttttttcgtcgcgttta

SEQ ID NO: 7632 - DNA, 1034 bp, Artificial Sequence
  chemically treated genomic DNA (Homo sapiens) CpG-island No: 7632
taaacgcgacgaaaaaaaaccgaaccgaacaaaaactcaccgtcctccaaaaactctaaaaatttatccgaaaaaaatctctacgcaacgtattcccgcccgaaaacctaaaaaaaaaaccgaaaaaaaataaaaaacgataaaaccgcgaaaatcgaaaccgacgccgaaacaaaaacgctctacgcgctaaaaaccccgaaaaccgcgcgcaactaaaacgacgcgactcgacgaccgcgaaaaaaaaaccgaacgccgacgaaaattcacctctatctcgcctaaaaccccgacgcctatccccgaaacccccgaaatccctacgccgccgaccgcgccctcgaactcgttcacgaacgacgacttaaactcgaccaaatcgcgctcgaaaccgacgacgctatcgcgactcttatcgtcctactcctcgccttcatcctaaaaaaccaccaactcgtccgacgcgccgaaatcgtcgccgccgcccgcgccgcccccgccgaaatccaactacgacataatacgctccgcccgccgaaacgcgaaacgctaaacgccgaaaatacgaaacgcgaaaccgacccgaaaaacgacgaacccgaaatccgaacctccgaacccgaatcgcgacgaacgaaacgcgaactaactccgcctaaacgaactacaaacgcgaactaaaacgcgaaacaaaacgactccgcgaactaacgaatcgaaacatcaaaaacgccgccgaccgaataccgaaaacgaaacgaacactaaaaacgaaccgaaccgaaaacgaaacacaaatccgccccgcctctcctctcccgaaaaaaaccgaaacgcgcccactcgacataaccttaaaaaactcgctcttccgaaacgcaccctaaaaaaaacgtcgaacaaacctaaaaataatcacccttctcccgaaacgcaaaaactctaacgaaaactcctaaccccgcttactcacctacaaccaaatattccccctactttctacgcccaaatttctcctccgactataaaaa

SEQ ID NO: 7633 - DNA, 708 bp, Artificial Sequence
  chemically treated genomic DNA (Homo sapiens) CpG-island No: 7633
cgttcggcggtcgtggtttagttttaagttatatcggtcgcgttttttagggcgcgcgggcgtcgcgtagcgagcggtcgtggggtagcgcggcgaaggtcgaatggcgtagttggtaatcgatgaagaggacgacgagcgttatcgagagtagtagtaggaagaagagtagtaggtaggtgggtaggtcgggttttgtggtcgcgtcgttttttatatcgcgcgtagtggttagttttagcggtaaagcgttttttgttttgatcgtggtttttggggttagcgcgttgtttatcgtcgtttcggggtcgttcgtggcgttgaatatgtcgtcgtatatggttcgcgggtttcgtcgattttagtcggatcgttttatttggtttggagtatattggcgcgattcggcgtttttatggcgcgtttttttcgttttgtcgcgtttaattgatcgagagtcggtgttttggggtcggcggggattgtaaagatttcgggacgcgttcgtttattcgttttcgcgtttagttgtttttttcgtcggttggcggattttagttttcggagttggatagttttgtgttcgcgtttttcgggtttattgttttttttcgtcgttattaggatagaggttttagttattgattcgtttttcggttttataatagttcgtttagttcggatttttagttttagtgagttttaggt

SEQ ID NO: 7634 - DNA, 708 bp, Artificial Sequence
  chemically treated genomic DNA (Homo sapiens) CpG-island No: 7634
acctaaaactcactaaaactaaaaatccgaactaaacgaactattataaaaccgaaaaacgaatcaataactaaaacctctatcctaataacgacgaaaaaaaacaataaacccgaaaaacgcgaacacaaaactatccaactccgaaaactaaaatccgccaaccgacgaaaaaaacaactaaacgcgaaaacgaataaacgaacgcgtcccgaaatctttacaatccccgccgaccccaaaacaccgactctcgatcaattaaacgcgacaaaacgaaaaaaacgcgccataaaaacgccgaatcgcgccaatatactccaaaccaaataaaacgatccgactaaaatcgacgaaacccgcgaaccatatacgacgacatattcaacgccacgaacgaccccgaaacgacgataaacaacgcgctaaccccaaaaaccacgatcaaaacaaaaaacgctttaccgctaaaactaaccactacgcgcgatataaaaaacgacgcgaccacaaaacccgacctacccacctacctactactcttcttcctactactactctcgataacgctcgtcgtcctcttcatcgattaccaactacgccattcgaccttcgccgcgctaccccacgaccgctcgctacgcgacgcccgcgcgccctaaaaaacgcgaccgatataacttaaaactaaaccacgaccgccgaacg

SEQ ID NO: 7635 - DNA, 708 bp, Artificial Sequence
  chemically treated genomic DNA (Homo sapiens) CpG-island No: 7635
atttggagtttattggagttgagggttcgagttgagcgggttgttgtaaagtcgaaaggcgagttagtgattgggatttttgttttggtggcgacggagagaaatagtgagttcgaggggcgcgggtatagaattgtttagtttcgagaattggggttcgttagtcggcggggaaagtagttgagcgcggaggcgagtgagcggacgcgtttcggggtttttgtagttttcgtcggttttaaggtatcgattttcggttagttgggcgcggtagggcgggaggggcgcgttatggaggcgtcgggtcgcgttagtatgttttaggttaagtgaagcggttcggttggggtcggcgggattcgcgggttatgtacggcgatatatttaacgttacgggcggtttcgaggcggcggtaggtagcgcgttggttttaggagttacggttaaggtagaaggcgttttgtcgttggagttggttattgcgcgcggtatgagggacggcgcggttataaagttcgatttgtttatttatttgttgtttttttttttgttgttgttttcggtggcgttcgtcgttttttttatcggttgttagttgcgttattcggttttcgtcgcgttgttttacgatcgttcgttgcgcgacgttcgcgcgttttggaagacgcggtcggtgtagtttgggattgagttacggtcgtcgggcg

SEQ ID NO: 7636 - DNA, 708 bp, Artificial Sequence
  chemically treated genomic DNA (Homo sapiens) CpG-island No: 7636
cgcccgacgaccgtaactcaatcccaaactacaccgaccgcgtcttccaaaacgcgcgaacgtcgcgcaacgaacgatcgtaaaacaacgcgacgaaaaccgaataacgcaactaacaaccgataaaaaaaacgacgaacgccaccgaaaacaacaacaaaaaaaaaaacaacaaataaataaacaaatcgaactttataaccgcgccgtccctcataccgcgcgcaataaccaactccaacgacaaaacgccttctaccttaaccgtaactcctaaaaccaacgcgctacctaccgccgcctcgaaaccgcccgtaacgttaaatatatcgccgtacataacccgcgaatcccgccgaccccaaccgaaccgcttcacttaacctaaaacatactaacgcgacccgacgcctccataacgcgcccctcccgccctaccgcgcccaactaaccgaaaatcgataccttaaaaccgacgaaaactacaaaaaccccgaaacgcgtccgctcactcgcctccgcgctcaactactttccccgccgactaacgaaccccaattctcgaaactaaacaattctatacccgcgcccctcgaactcactatttctctccgtcgccaccaaaacaaaaatcccaatcactaactcgcctttcgactttacaacaacccgctcaactcgaaccctcaactccaataaactccaaat

SEQ ID NO: 7637 - DNA, 588 bp, Artificial Sequence
  chemically treated genomic DNA (Homo sapiens) CpG-island No: 7637
tttcgggtagttagcgaggttttcgtagtcgttgggtcgtatcgtgttcgttagtcgggatttcggtaggttaggattcggtttatttttcgttcgataggttttgggtcgttttcgtttcgttcgcggtcgaacgttttcgtttcggttcgagttcgtcggggtagagtttgtagtttttagtttttttcgttcgcgcgcgtcggggatttttatttattcgcgagtcggttaggcgcgttttttcgacgtcgtcgttgcgttttttttcgttgtaattttattagtagttcggtcgcgggatacgcgtacggcgttcgttcgtttaggattcggatgagggagggagggagagggagttcgggaggacgttcgttggggtcggcgtatgcgcgttagaggcggagtgatcgttgcgggatcgagggaggggtgttttgttcgggcggttgaaagaagttttcgcgtcgggtttcgcgtcggttaacgtcgattttcgattagttggaggttttcgcgtcgatggttaggtttgggaatgggaattagatagtttttattattattatagtaggcgttagaagtttt

SEQ ID NO: 7638 - DNA, 588 bp, Artificial Sequence
  chemically treated genomic DNA (Homo sapiens) CpG-island No: 7638
aaaacttctaacgcctactataataataataaaaactatctaattcccattcccaaacctaaccatcgacgcgaaaacctccaactaatcgaaaatcgacgttaaccgacgcgaaacccgacgcgaaaacttctttcaaccgcccgaacaaaacacccctccctcgatcccgcaacgatcactccgcctctaacgcgcatacgccgaccccaacgaacgtcctcccgaactccctctccctccctccctcatccgaatcctaaacgaacgaacgccgtacgcgtatcccgcgaccgaactactaataaaattacaacgaaaaaaaacgcaacgacgacgtcgaaaaaacgcgcctaaccgactcgcgaataaataaaaatccccgacgcgcgcgaacgaaaaaaactaaaaactacaaactctaccccgacgaactcgaaccgaaacgaaaacgttcgaccgcgaacgaaacgaaaacgacccaaaacctatcgaacgaaaaataaaccgaatcctaacctaccgaaatcccgactaacgaacacgatacgacccaacgactacgaaaacctcgctaactacccgaaa

SEQ ID NO: 7639 - DNA, 588 bp, Artificial Sequence
  chemically treated genomic DNA (Homo sapiens) CpG-island No: 7639
gaagtttttagcgtttattgtggtggtggtgggagttatttgatttttatttttaggtttggttatcgacgcgaaggtttttagttgatcggaagtcggcgttggtcggcgcggagttcggcgcggaggttttttttagtcgttcgggtaagatatttttttttcggtttcgtagcggttatttcgtttttggcgcgtatgcgtcgattttagcgggcgttttttcgggtttttttttttttttttttttattcgggttttgggcgagcgggcgtcgtgcgcgtgtttcgcggtcgagttgttaataaagttgtagcgaggagaagcgtagcgacggcgtcgggagagcgcgtttagtcggttcgcgagtgagtgagggttttcggcgcgcgcgggcgaggggaattgggggttgtaggttttgtttcggcggattcgggtcgaggcgggggcgttcggtcgcggacggagcggaaacgatttagggtttgtcgggcgggaggtaggtcgagttttggtttgtcggggtttcggttggcggatacggtgcggtttagcggttgcggaggtttcgttggttgttcgggg

SEQ ID NO: 7640 - DNA, 588 bp, Artificial Sequence
  chemically treated genomic DNA (Homo sapiens) CpG-island No: 7640
ccccgaacaaccaacgaaacctccgcaaccgctaaaccgcaccgtatccgccaaccgaaaccccgacaaaccaaaactcgacctacctcccgcccgacaaaccctaaatcgtttccgctccgtccgcgaccgaacgcccccgcctcgacccgaatccgccgaaacaaaacctacaacccccaattcccctcgcccgcgcgcgccgaaaaccctcactcactcgcgaaccgactaaacgcgctctcccgacgccgtcgctacgcttctcctcgctacaactttattaacaactcgaccgcgaaacacgcgcacgacgcccgctcgcccaaaacccgaataaaaaaaaaaaaaaaaaaaaacccgaaaaaacgcccgctaaaatcgacgcatacgcgccaaaaacgaaataaccgctacgaaaccgaaaaaaaaatatcttacccgaacgactaaaaaaaacctccgcgccgaactccgcgccgaccaacgccgacttccgatcaactaaaaaccttcgcgtcgataaccaaacctaaaaataaaaatcaaataactcccaccaccaccacaataaacgctaaaaacttc

SEQ ID NO: 7641 - DNA, 902 bp, Artificial Sequence
  chemically treated genomic DNA (Homo sapiens) CpG-island No: 7641
gtttacgcgtgggttgatattcggttttcggtacggcgtgtggatgcgcgggacgaatatagcgggttatttataggtttttggcggttgcgcgtacgtagatttgcgaaagttgtcgggcgtcggtagtttcgttcgggtgggcggtttacgtcgcgtttcgtttttttcgcgtcgcggttcgcggttcgtagttttttcggcgtttttcggagttcgcgcggaggttcgggtaacgtcgcgcgtcggcgagtttttagtttggagttttcgattttttattttttggtgtttcgcgcgttttttattcgacgtcgtcggtgtttcgcgttttaaaggcgtatttatttttgttgtaggagcgattcggcggtcgcgcgcgagggtttcggcgacgtaggggttgtagtgagggcgcgcggagcgcgatttcgagtggaagagggaagaaggtagaggttgtcgggtttttaaggtcgtcgggtacggtcggcgtggattgggtacggtttcgggtggtttcggttcggcggggttcgggcgtacgttttgtttcgattaaggagtggcgagttttgttagggtagcggcgttatcgagtaatttaaatatttagcgggattttttagttttggtcggtttcgttttcggatagtcgcgcgggcgtttattggtcggttgcgtgtcgttatttcggggaaattaggttgttgtagagttagcggcgaaggggaagtatagggcggttgtttcgttttatttttttcggtcgggcgttatcgtttcggggttatcgcgggttcgtttcgagcgtttttaatttatttttgtttcggtttgttcggaggagggttgttcgggatagtttagcgttttcggttttagtttgtttttttatttcg

SEQ ID NO: 7642 - DNA, 902 bp, Artificial Sequence
  chemically treated genomic DNA (Homo sapiens) CpG-island No: 7642
cgaaataaaaaaacaaactaaaaccgaaaacgctaaactatcccgaacaaccctcctccgaacaaaccgaaacaaaaataaattaaaaacgctcgaaacgaacccgcgataaccccgaaacgataacgcccgaccgaaaaaaataaaacgaaacaaccgccctatacttccccttcgccgctaactctacaacaacctaatttccccgaaataacgacacgcaaccgaccaataaacgcccgcgcgactatccgaaaacgaaaccgaccaaaactaaaaaatcccgctaaatatttaaattactcgataacgccgctaccctaacaaaactcgccactccttaatcgaaacaaaacgtacgcccgaaccccgccgaaccgaaaccacccgaaaccgtacccaatccacgccgaccgtacccgacgaccttaaaaacccgacaacctctaccttcttccctcttccactcgaaatcgcgctccgcgcgccctcactacaacccctacgtcgccgaaaccctcgcgcgcgaccgccgaatcgctcctacaacaaaaataaatacgcctttaaaacgcgaaacaccgacgacgtcgaataaaaaacgcgcgaaacaccaaaaaataaaaaatcgaaaactccaaactaaaaactcgccgacgcgcgacgttacccgaacctccgcgcgaactccgaaaaacgccgaaaaaactacgaaccgcgaaccgcgacgcgaaaaaaacgaaacgcgacgtaaaccgcccacccgaacgaaactaccgacgcccgacaactttcgcaaatctacgtacgcgcaaccgccaaaaacctataaataacccgctatattcgtcccgcgcatccacacgccgtaccgaaaaccgaatatcaacccacgcgtaaac

SEQ ID NO: 7643 - DNA, 902 bp, Artificial Sequence
  chemically treated genomic DNA (Homo sapiens) CpG-island No: 7643
cggagtgagaggataggttggggtcgggggcgttgggttgtttcgggtagttttttttcgggtaagtcggagtaggggtggattgggagcgttcggggcgggttcgcggtggtttcggggcggtggcgttcggtcggagagggtggggcggagtagtcgttttgtatttttttttcgtcgttagttttataatagtttgattttttcgaaatgacggtacgtagtcggttaatgggcgttcgcgcggttgttcgggggcggggtcggttagggttggggaatttcgttaagtgtttggattgttcggtggcgtcgttgttttggtagagttcgttattttttagtcgaggtaagacgtgcgttcgagtttcgtcgaatcgaggttattcggagtcgtgtttagtttacgtcggtcgtgttcggcggttttaagaattcggtaatttttgttttttttttttttttattcggagtcgcgtttcgcgcgtttttattgtagtttttgcgtcgtcgggattttcgcgcgcgatcgtcgaatcgtttttgtagtagaggtgagtacgtttttgaggcgcggggtatcggcggcgtcgaataaaaggcgcgcggggtattaggaagtggggggtcgaaagttttaggttggagattcgtcggcgcgcggcgttgttcgggttttcgcgcgggtttcggggggcgtcggaggagttgcgagtcgcgggtcgcggcgcggggagggcgggacgcggcgtggatcgtttattcggacgaggttgtcggcgttcggtagttttcgtagatttgcgtgcgcgtagtcgttaggggtttgtaggtggttcgttatgttcgtttcgcgtatttatacgtcgtgtcggggatcgagtgttagtttacgcgtgggt

SEQ ID NO: 7644 - DNA, 902 bp, Artificial Sequence
  chemically treated genomic DNA (Homo sapiens) CpG-island No: 7644
acccacgcgtaaactaacactcgatccccgacacgacgtataaatacgcgaaacgaacataacgaaccacctacaaacccctaacgactacgcgcacgcaaatctacgaaaactaccgaacgccgacaacctcgtccgaataaacgatccacgccgcgtcccgccctccccgcgccgcgacccgcgactcgcaactcctccgacgccccccgaaacccgcgcgaaaacccgaacaacgccgcgcgccgacgaatctccaacctaaaactttcgaccccccacttcctaataccccgcgcgccttttattcgacgccgccgataccccgcgcctcaaaaacgtactcacctctactacaaaaacgattcgacgatcgcgcgcgaaaatcccgacgacgcaaaaactacaataaaaacgcgcgaaacgcgactccgaataaaaaaaaaaaaaaaacaaaaattaccgaattcttaaaaccgccgaacacgaccgacgtaaactaaacacgactccgaataacctcgattcgacgaaactcgaacgcacgtcttacctcgactaaaaaataacgaactctaccaaaacaacgacgccaccgaacaatccaaacacttaacgaaattccccaaccctaaccgaccccgcccccgaacaaccgcgcgaacgcccattaaccgactacgtaccgtcatttcgaaaaaatcaaactattataaaactaacgacgaaaaaaaaatacaaaacgactactccgccccaccctctccgaccgaacgccaccgccccgaaaccaccgcgaacccgccccgaacgctcccaatccacccctactccgacttacccgaaaaaaaactacccgaaacaacccaacgcccccgaccccaacctatcctctcactccg

SEQ ID NO: 7645 - DNA, 716 bp, Artificial Sequence
  chemically treated genomic DNA (Homo sapiens) CpG-island No: 7645
cgtggcgtttaggtacggaattttagagggtttcgtttattattatagggtttcgtttcgtcgtttcgtcgttttttaattattaggttcggtagtcggcggcgtcgtttggtagttttttttttttttcgtttcgttggtcgcgggcgcgggggacgttagcgttgttagcgtggaaagagttgcggggcgcgggaggaggaagtagagttcgggatcgtcgggttattatcggtcgttttagttatggacgcgtttttggagaaggtgcgtgtcgggagggggcgatggggacggtgttgcggttcggggttttcgttttcgaggtaattattttttagtcgcgagttgttattgtgattcggatagggggacgcgggttgataggtttcgtttgaggaggtttcgtcgggagggcggttggggttcgggcgcgttacggggtcgggtgttttttgggttttcgtgggtcgaagaggttgggcggggtttcgtgggggtcgcgaggggttcggagtttaggattgggatcgcggggtcgattttgggttttgtcgaggtttcgcgagtggtcggtttgagttcggttggttttttcggaggatcgggagtttttcgttggcggttttagatgttttcggaaagaagtcgtagttattttagagttagttgtaaatttgtgggttttttttggttttcgagttaggaatgaaaat

SEQ ID NO: 7646 - DNA, 716 bp, Artificial Sequence
  chemically treated genomic DNA (Homo sapiens) CpG-island No: 7646
attttcattcctaactcgaaaaccaaaaaaaacccacaaatttacaactaactctaaaataactacgacttctttccgaaaacatctaaaaccgccaacgaaaaactcccgatcctccgaaaaaaccaaccgaactcaaaccgaccactcgcgaaacctcgacaaaacccaaaatcgaccccgcgatcccaatcctaaactccgaacccctcgcgacccccacgaaaccccgcccaacctcttcgacccacgaaaacccaaaaaacacccgaccccgtaacgcgcccgaaccccaaccgccctcccgacgaaacctcctcaaacgaaacctatcaacccgcgtccccctatccgaatcacaataacaactcgcgactaaaaaataattacctcgaaaacgaaaaccccgaaccgcaacaccgtccccatcgccccctcccgacacgcaccttctccaaaaacgcgtccataactaaaacgaccgataataacccgacgatcccgaactctacttcctcctcccgcgccccgcaactctttccacgctaacaacgctaacgtcccccgcgcccgcgaccaacgaaacgaaaaaaaaaaaaaactaccaaacgacgccgccgactaccgaacctaataattaaaaaacgacgaaacgacgaaacgaaaccctataataataaacgaaaccctctaaaattccgtacctaaacgccacg

SEQ ID NO: 7647 - DNA, 716 bp, Artificial Sequence
  chemically treated genomic DNA (Homo sapiens) CpG-island No: 7647
atttttatttttaattcggagattaagaaaaatttataggtttgtagttggttttgaaataattgcggttttttttcgggagtatttggggtcgttaacggagagttttcggtttttcgaaagggttagtcgagtttaggtcggttattcgcggaatttcggtagggtttaaggtcggtttcgcggttttagttttgggtttcgggtttttcgcggtttttacggaatttcgtttagttttttcggtttacggggatttaagagatattcggtttcgtgacgcgttcgggttttagtcgttttttcggcgaggtttttttaggcgaggtttgttagttcgcgtttttttgttcgggttataatggtagttcgcgattgggaaatagttgtttcggaagcgggagtttcgggtcgtagtatcgtttttatcgttttttttcggtacgtattttttttagggacgcgtttatggttgaggcggtcggtggtggttcggcggtttcgggttttatttttttttttcgcgtttcgtagttttttttacgttggtagcgttgacgtttttcgcgttcgcggttagcggggcggagaagaggaggagttgttaggcggcgtcgtcggttgtcgaatttgatggttgaggggcggcggggcggcggggcggggttttgtaatggtgggcggagttttttgggatttcgtatttgggcgttacg

SEQ ID NO: 7648 - DNA, 716 bp, Artificial Sequence
  chemically treated genomic DNA (Homo sapiens) CpG-island No: 7648
cgtaacgcccaaatacgaaatcccaaaaaactccgcccaccattacaaaaccccgccccgccgccccgccgcccctcaaccatcaaattcgacaaccgacgacgccgcctaacaactcctcctcttctccgccccgctaaccgcgaacgcgaaaaacgtcaacgctaccaacgtaaaaaaaactacgaaacgcgaaaaaaaaaaataaaacccgaaaccgccgaaccaccaccgaccgcctcaaccataaacgcgtccctaaaaaaaatacgtaccgaaaaaaaacgataaaaacgatactacgacccgaaactcccgcttccgaaacaactatttcccaatcgcgaactaccattataacccgaacaaaaaaacgcgaactaacaaacctcgcctaaaaaaacctcgccgaaaaaacgactaaaacccgaacgcgtcacgaaaccgaatatctcttaaatccccgtaaaccgaaaaaactaaacgaaattccgtaaaaaccgcgaaaaacccgaaacccaaaactaaaaccgcgaaaccgaccttaaaccctaccgaaattccgcgaataaccgacctaaactcgactaaccctttcgaaaaaccgaaaactctccgttaacgaccccaaatactcccgaaaaaaaaccgcaattatttcaaaaccaactacaaacctataaatttttcttaatctccgaattaaaaataaaaat

SEQ ID NO: 7649 - DNA, 789 bp, Artificial Sequence
  chemically treated genomic DNA (Homo sapiens) CpG-island No: 7649
atttcggtcgttttggtatcggggttgaagtgtaggtttttggaggagcggtgcgtacgtttaggggtagtcgagaatataagttaaggtacgagcggataattttacggggacgagtattggcgttcggacgcgatttcgcgagaggttaggcggaatttattggaagcgtgagttagcggggattattttcgggcgaaattaaaggagaaagaggggaatttaggggtttcggggcgtttaggttcgcgcggacggggaggttagagttgtttcgaagttatttttttattttatcggtttttacgggtttcgcgtttagttatagttcggcgggagtaatgcggtagttataatagttgtttggggtcgtcgcgggtcggaaagcggggttcggggatgggaagggggcggggcgaagcgagtaaaaagtttcggggaagtcgagatcgcgatttttcgcgttttacggttttcgggtaagggtattgtcggcgcgtgattttagtagcgtacgagcgcgtcgtgacgttttcgcggagtttcgtttttgttacgtgggtttgtttgggtttcgcgaggtatcgttttcgcggtttttttgttatttttagaggcgagttgtggaagttttgatttttagggtcgttttagaatcggggtttcggatcggcggggtttttgtacgtggaatcggaatatttgagatgatcgtaggttttgtggagtgtggggagcgcgggagtttttttttttttcgaggttcgtgttagggtttattttaaagtt

SEQ ID NO: 7650 - DNA, 789 bp, Artificial Sequence
  chemically treated genomic DNA (Homo sapiens) CpG-island No: 7650
aactttaaaataaaccctaacacgaacctcgaaaaaaaaaaaaactcccgcgctccccacactccacaaaacctacgatcatctcaaatattccgattccacgtacaaaaaccccgccgatccgaaaccccgattctaaaacgaccctaaaaatcaaaacttccacaactcgcctctaaaaataacaaaaaaaccgcgaaaacgatacctcgcgaaacccaaacaaacccacgtaacaaaaacgaaactccgcgaaaacgtcacgacgcgctcgtacgctactaaaatcacgcgccgacaatacccttacccgaaaaccgtaaaacgcgaaaaatcgcgatctcgacttccccgaaactttttactcgcttcgccccgcccccttcccatccccgaaccccgctttccgacccgcgacgaccccaaacaactattataactaccgcattactcccgccgaactataactaaacgcgaaacccgtaaaaaccgataaaataaaaaaataacttcgaaacaactctaacctccccgtccgcgcgaacctaaacgccccgaaacccctaaattcccctctttctcctttaatttcgcccgaaaataatccccgctaactcacgcttccaataaattccgcctaacctctcgcgaaatcgcgtccgaacgccaatactcgtccccgtaaaattatccgctcgtaccttaacttatattctcgactacccctaaacgtacgcaccgctcctccaaaaacctacacttcaaccccgataccaaaacgaccgaaat

SEQ ID NO: 7651 - DNA, 789 bp, Artificial Sequence
  chemically treated genomic DNA (Homo sapiens) CpG-island No: 7651
ggttttggagtaagttttggtacgggtttcgagggaagaaagaattttcgcgttttttatattttatagggtttgcgattattttagatgtttcggttttacgtgtagaaatttcgtcggttcgaggtttcggttttaaaacggttttaagagttaaggtttttatagttcgtttttgagggtggtaaagaggtcgcgggggcggtgtttcgcgagatttaaataagtttacgtggtaggggcggggtttcgcgaaggcgttacggcgcgttcgtgcgttgttgaggttacgcgtcggtagtatttttgttcgggggtcgtaaagcgcggaaggtcgcggtttcggttttttcggaattttttgttcgtttcgtttcgttttttttttattttcgaatttcgtttttcggttcgcggcgattttaggtaattgttgtggttgtcgtattgttttcgtcgggttgtagttgagcgcggagttcgtggggatcggtgaggtaaggagatagtttcggggtaattttggttttttcgttcgcgcgggtttaagcgtttcgggatttttgggttttttttttttttttttggtttcgttcgggggtggttttcgttagtttacgtttttagtgggtttcgtttggtttttcgcgaagtcgcgttcgggcgttagtattcgttttcgtaaggttgttcgttcgtgttttggtttgtgttttcggttatttttgggcgtgcgtatcgtttttttaggagtttgtattttagtttcgatgttagggcggtcggggt

SEQ ID NO: 7652 - DNA, 789 bp, Artificial Sequence
  chemically treated genomic DNA (Homo sapiens) CpG-island No: 7652
accccgaccgccctaacatcgaaactaaaatacaaactcctaaaaaaacgatacgcacgcccaaaaataaccgaaaacacaaaccaaaacacgaacgaacaaccttacgaaaacgaatactaacgcccgaacgcgacttcgcgaaaaaccaaacgaaacccactaaaaacgtaaactaacgaaaaccacccccgaacgaaaccaaaaaaaaaaaaaaaaaacccaaaaatcccgaaacgcttaaacccgcgcgaacgaaaaaaccaaaattaccccgaaactatctccttacctcaccgatccccacgaactccgcgctcaactacaacccgacgaaaacaatacgacaaccacaacaattacctaaaatcgccgcgaaccgaaaaacgaaattcgaaaataaaaaaaaaacgaaacgaaacgaacaaaaaattccgaaaaaaccgaaaccgcgaccttccgcgctttacgacccccgaacaaaaatactaccgacgcgtaacctcaacaacgcacgaacgcgccgtaacgccttcgcgaaaccccgcccctaccacgtaaacttatttaaatctcgcgaaacaccgcccccgcgacctctttaccaccctcaaaaacgaactataaaaaccttaactcttaaaaccgttttaaaaccgaaacctcgaaccgacgaaatttctacacgtaaaaccgaaacatctaaaataatcgcaaaccctataaaatataaaaaacgcgaaaattctttcttccctcgaaacccgtaccaaaacttactccaaaacc

SEQ ID NO: 7653 - DNA, 747 bp, Artificial Sequence
  chemically treated genomic DNA (Homo sapiens) CpG-island No: 7653
agttttcgtagtcgttttttacgttttttttttaatttattagcggttttacgttttttttttcggtgttcgttttttttcgtttcggttttacgtgcgcgcgcgtttttaggttttgtttcggaagtgtttttggcgtatagtcggaagtgcgtaggtagtgttcgcggcggcggcgacggcggcgggaggttcggttgtcgttcgttggtcgcgcggcgtcgcgttcggcggtcgttattgtaggttaggtcgcgggcggggggtacgggaggttgcggggagcgagggtcgagtcgggattgggggcgagggcgcgagggagcgggaagttagggagtcggggtcgggcggggcgcgcggttcggagagaagaatggcgagtcgaggggcggggagcgcgggcgggggaggggtggtcgggaagggggagggcggcgggagggcggcgcggaggtgggggtaagttcggaggggttttcggggtgggagggttaggagtgtgggggaagggagcggtgtggagacggaaggcggagggaaggaagggagcgagcggggcggagcgggagaagggcggaaagggtggtcgagcgcgggcggaggacggagaagggggcggcgagggtcggaatttcgaggtacgtgcgggaaggggtttttttcggggttgggagggagtttagttcgttatgtttgcgggagcggagtagaattggaatttaggaagtagcgggaagagtagaa

SEQ ID NO: 7654 - DNA, 747 bp, Artificial Sequence
  chemically treated genomic DNA (Homo sapiens) CpG-island No: 7654
ttctactcttcccgctacttcctaaattccaattctactccgctcccgcaaacataacgaactaaactccctcccaaccccgaaaaaaaccccttcccgcacgtacctcgaaattccgaccctcgccgcccccttctccgtcctccgcccgcgctcgaccaccctttccgcccttctcccgctccgccccgctcgctcccttccttccctccgccttccgtctccacaccgctcccttcccccacactcctaaccctcccaccccgaaaacccctccgaacttacccccacctccgcgccgccctcccgccgccctcccccttcccgaccacccctcccccgcccgcgctccccgcccctcgactcgccattcttctctccgaaccgcgcgccccgcccgaccccgactccctaacttcccgctccctcgcgccctcgcccccaatcccgactcgaccctcgctccccgcaacctcccgtaccccccgcccgcgacctaacctacaataacgaccgccgaacgcgacgccgcgcgaccaacgaacgacaaccgaacctcccgccgccgtcgccgccgccgcgaacactacctacgcacttccgactatacgccaaaaacacttccgaaacaaaacctaaaaacgcgcgcgcacgtaaaaccgaaacgaaaaaaaacgaacaccgaaaaaaaaaacgtaaaaccgctaataaattaaaaaaaaaacgtaaaaaacgactacgaaaact

SEQ ID NO: 7655 - DNA, 747 bp, Artificial Sequence
  chemically treated genomic DNA (Homo sapiens) CpG-island No: 7655
ttttgtttttttcgttattttttaggttttagttttatttcgttttcgtaagtatagcgggttgggtttttttttaatttcgggaagagttttttttcgtacgtatttcgagatttcggttttcgtcgttttttttttcgtttttcgttcgcgttcggttatttttttcgtttttttttcgtttcgtttcgttcgttttttttttttttttcgtttttcgtttttatatcgttttttttttttatatttttggtttttttatttcggaggttttttcgggtttgtttttattttcgcgtcgttttttcgtcgtttttttttttttcggttatttttttttcgttcgcgtttttcgtttttcggttcgttattttttttttcgagtcgcgcgtttcgttcggtttcggttttttagtttttcgttttttcgcgttttcgtttttaatttcggttcggttttcgtttttcgtagtttttcgtgtttttcgttcgcggtttgatttgtaatggcggtcgtcgagcgcggcgtcgcgcggttaacgggcgataatcgaatttttcgtcgtcgtcgtcgtcgtcgcgagtattgtttgcgtattttcgattatgcgttaggagtattttcggggtagagtttgagagcgcgcgcgtacgtggggtcggggcggagagaggcgagtatcgggaaggggagcgtggggtcgttggtgagttggggaaggggcgtgggaagcggttgcgagagtt

SEQ ID NO: 7656 - DNA, 747 bp, Artificial Sequence
  chemically treated genomic DNA (Homo sapiens) CpG-island No: 7656
aactctcgcaaccgcttcccacgccccttccccaactcaccaacgaccccacgctccccttcccgatactcgcctctctccgccccgaccccacgtacgcgcgcgctctcaaactctaccccgaaaatactcctaacgcataatcgaaaatacgcaaacaatactcgcgacgacgacgacgacgacgaaaaattcgattatcgcccgttaaccgcgcgacgccgcgctcgacgaccgccattacaaatcaaaccgcgaacgaaaaacacgaaaaactacgaaaaacgaaaaccgaaccgaaattaaaaacgaaaacgcgaaaaaacgaaaaactaaaaaaccgaaaccgaacgaaacgcgcgactcgaaaaaaaaaataacgaaccgaaaaacgaaaaacgcgaacgaaaaaaaaataaccgaaaaaaaaaaaaacgacgaaaaaacgacgcgaaaataaaaacaaacccgaaaaaacctccgaaataaaaaaaccaaaaatataaaaaaaaaaaacgatataaaaacgaaaaacgaaaaaaaaaaaaaaaacgaacgaaacgaaacgaaaaaaaaacgaaaaaaataaccgaacgcgaacgaaaaacgaaaaaaaaaacgacgaaaaccgaaatctcgaaatacgtacgaaaaaaaactcttcccgaaattaaaaaaaaacccaacccgctatacttacgaaaacgaaataaaactaaaacctaaaaaataacgaaaaaaacaaaa

SEQ ID NO: 7657 - DNA, 569 bp, Artificial Sequence
  chemically treated genomic DNA (Homo sapiens) CpG-island No: 7657
ttcgcgtcggacgcggcgttcgtagggttgggagttggtcgggtgcggggggttcggcgagaggtatttttgttattcggcgcgtttcggtttcggcgtagtttcgcgcggttttttttttttgggtgtcggtcggttcgcgtttatcgtgtcgtcggttgtcgcgtttcggagtttagtaggttcgcggcggttttatgttttttttttcgtttcgtttcgcgtcgtcgcgcgtttcgattgtcgtttgtttagtcgagtcgtttttaagtattcggcgcgtgttcgttaggagaggcgtttttttcggttttggggtcgggaaagttgattagagtgggagggttttcgcgggcgtattttcgatttcgcgcggtttttagggagcgttataagttagcgttcggcggggacgtttagtttcgggtggacgcggtttcggttcgtaagattcgtagtttttgcgtttttttcgaagttgggtttttcgagtggggtcgaaggttacgcggttttgtaatcgttttgggattagttgttaaggtaagacggttattgggtttaattta

SEQ ID NO: 7658 - DNA, 569 bp, Artificial Sequence
  chemically treated genomic DNA (Homo sapiens) CpG-island No: 7658
taaattaaacccaataaccgtcttaccttaacaactaatcccaaaacgattacaaaaccgcgtaaccttcgaccccactcgaaaaacccaacttcgaaaaaaacgcaaaaactacgaatcttacgaaccgaaaccgcgtccacccgaaactaaacgtccccgccgaacgctaacttataacgctccctaaaaaccgcgcgaaatcgaaaatacgcccgcgaaaaccctcccactctaatcaactttcccgaccccaaaaccgaaaaaaacgcctctcctaacgaacacgcgccgaatacttaaaaacgactcgactaaacaaacgacaatcgaaacgcgcgacgacgcgaaacgaaacgaaaaaaaaaacataaaaccgccgcgaacctactaaactccgaaacgcgacaaccgacgacacgataaacgcgaaccgaccgacacccaaaaaaaaaaaaccgcgcgaaactacgccgaaaccgaaacgcgccgaataacaaaaatacctctcgccgaaccccccgcacccgaccaactcccaaccctacgaacgccgcgtccgacgcgaa

SEQ ID NO: 7659 - DNA, 569 bp, Artificial Sequence
  chemically treated genomic DNA (Homo sapiens) CpG-island No: 7659
taggttgagtttaatgatcgttttgttttggtagttggttttagggcgattgtagagtcgcgtggttttcggttttattcgggggatttagtttcggagagggcgtaggggttgcgagttttgcgagtcggagtcgcgtttattcgggattaggcgttttcgtcgagcgttggtttgtggcgttttttggggatcgcgcggggtcgggggtgcgttcgcgggggtttttttattttggttaattttttcggttttagggtcgggggaggcgttttttttggcgggtacgcgtcgggtatttaagggcggttcggttgggtaggcggtagtcggagcgcgcggcggcgcggagcggagcgggaggaggggtatggagtcgtcgcgggtttgttgagtttcggagcgcggtagtcggcggtacggtgagcgcgggtcggtcggtatttaggaggggagggtcgcgcggggttgcgtcgaggtcggggcgcgtcgggtggtaggggtgtttttcgtcgagtttttcgtattcggttagtttttagttttgcgggcgtcgcgttcggcgcggg

SEQ ID NO: 7660 - DNA, 569 bp, Artificial Sequence
  chemically treated genomic DNA (Homo sapiens) CpG-island No: 7660
cccgcgccgaacgcgacgcccgcaaaactaaaaactaaccgaatacgaaaaactcgacgaaaaacacccctaccacccgacgcgccccgacctcgacgcaaccccgcgcgaccctcccctcctaaataccgaccgacccgcgctcaccgtaccgccgactaccgcgctccgaaactcaacaaacccgcgacgactccatacccctcctcccgctccgctccgcgccgccgcgcgctccgactaccgcctacccaaccgaaccgcccttaaatacccgacgcgtacccgccaaaaaaaacgcctcccccgaccctaaaaccgaaaaaattaaccaaaataaaaaaacccccgcgaacgcacccccgaccccgcgcgatccccaaaaaacgccacaaaccaacgctcgacgaaaacgcctaatcccgaataaacgcgactccgactcgcaaaactcgcaacccctacgccctctccgaaactaaatcccccgaataaaaccgaaaaccacgcgactctacaatcgccctaaaaccaactaccaaaacaaaacgatcattaaactcaaccta

SEQ ID NO: 7661 - DNA, 557 bp, Artificial Sequence
  chemically treated genomic DNA (Homo sapiens) CpG-island No: 7661
ggcgcgttttttcgtttttcgggggtcgttacggttttttcgcgttttcgggtattttttttcgcgtttgcgttgtgttttacgggggcggggtttagatttttgttagcggcggcggcggtggcggcgatcgttagttttcgttgaggagaaatacgaaacggattttttggttttttttttttttttttttcgttttgaattttttttttggttatcgagaattagttttcgtggagttttttttttatttcgttatcgttttttcggttttcggtttagtggaagttattattttcgaggaggaggtagcggtagtcgttttcgcgtcgtcgttttcggttcggtgttcgcggtttcggagaggaggtgtcgtcgttatcgtcgttttttttttttcgttgttttcgggtcgggttgggtcgagttgcgatgttttcggattttattttattgtttagcgcggatttagatttggaatcgtttaagtttttttattcgcgaggtgagttaggttgtggggggtggggcgtgggggcggggagatagggagatag

SEQ ID NO: 7662 - DNA, 557 bp, Artificial Sequence
  chemically treated genomic DNA (Homo sapiens) CpG-island No: 7662
ctatctccctatctccccgcccccacgccccaccccccacaacctaactcacctcgcgaataaaaaaacttaaacgattccaaatctaaatccgcgctaaacaataaaataaaatccgaaaacatcgcaactcgacccaacccgacccgaaaacaacgaaaaaaaaaaaacgacgataacgacgacacctcctctccgaaaccgcgaacaccgaaccgaaaacgacgacgcgaaaacgactaccgctacctcctcctcgaaaataataacttccactaaaccgaaaaccgaaaaaacgataacgaaataaaaaaaaaactccacgaaaactaattctcgataaccaaaaaaaaaattcaaaacgaaaaaaaaaaaaaaaaaaaaccaaaaaatccgtttcgtatttctcctcaacgaaaactaacgatcgccgccaccgccgccgccgctaacaaaaatctaaaccccgcccccgtaaaacacaacgcaaacgcgaaaaaaaatacccgaaaacgcgaaaaaaccgtaacgacccccgaaaaacgaaaaaacgcgcc

SEQ ID NO: 7663 - DNA, 557 bp, Artificial Sequence
  chemically treated genomic DNA (Homo sapiens) CpG-island No: 7663
ttgtttttttgttttttcgtttttacgttttattttttatagtttgatttatttcgcgagtagagggatttgggcgattttaggtttaggttcgcgttgagtaatgagatgaagttcgagggtatcgtagttcgatttagttcggttcgagggtagcgggagggggggagcggcggtggcggcggtatttttttttcgggatcgcgggtatcgaatcgggggcggcgacgcgagggcggttgtcgttgtttttttttcgagggtagtgatttttattgggtcgaggatcgaggaaacgatggcgaggtggagggggaattttacggggattgattttcggtgattaggagaggggtttaggacggggaaggggaagggggagagttaaagggttcgtttcgtgtttttttttagcgaaaattgacggtcgtcgttatcgtcgtcgtcgttgataggaatttgagtttcgttttcgtggggtatagcgtaggcgcggaggggggtgttcgggagcgcggaagagtcgtggcggttttcggagggcggggaggcgcgtt

SEQ ID NO: 7664 - DNA, 557 bp, Artificial Sequence
  chemically treated genomic DNA (Homo sapiens) CpG-island No: 7664
aacgcgcctccccgccctccgaaaaccgccacgactcttccgcgctcccgaacacccccctccgcgcctacgctataccccacgaaaacgaaactcaaattcctatcaacgacgacgacgataacgacgaccgtcaattttcgctaaaaaaaaacacgaaacgaaccctttaactctcccccttccccttccccgtcctaaacccctctcctaatcaccgaaaatcaatccccgtaaaattccccctccacctcgccatcgtttcctcgatcctcgacccaataaaaatcactaccctcgaaaaaaaaacaacgacaaccgccctcgcgtcgccgcccccgattcgatacccgcgatcccgaaaaaaaaataccgccgccaccgccgctccccccctcccgctaccctcgaaccgaactaaatcgaactacgataccctcgaacttcatctcattactcaacgcgaacctaaacctaaaatcgcccaaatccctctactcgcgaaataaatcaaactataaaaaataaaacgtaaaaacgaaaaaacaaaaaaacaa

SEQ ID NO: 7665 - DNA, 666 bp, Artificial Sequence
  chemically treated genomic DNA (Homo sapiens) CpG-island No: 7665
tgttgcgcgtaatttaatagtttatgcgcggtagatcgtagagtatataacgaggcgttagcgtaagcggtatgaagtacgtttgaattggttgggcgaatagcgaatttttttataattgatcggtagtatgacgaatatgttcgaggttcgttagatcggtatgacgttagcgtttgttaagcgcggtatgggtaaaattttttatttagcgttgttgttttggcggtggtaatttatcgttgttggttaatttatagcgcgttcgattcgttaggtagttttatatcgaacgatatcggaaatatttgttgtggcgtaatatagttttttattagcgtttcggaaattagtgttcgtatttggtcggcgtcgttattgttacgattttgttgatcgaatttattgattagtacgtatagcggtatcgattgttttatcgttaaaatcgttttacggatttttttatcggagatcgattttagttgcgtataatttagtatcgttagtatcgtcgaggcgcgtgttagttgttggttaagtattttttgtagatgcggttgttcggttttatttggttcgggggtatttagtaacgttaattgatcgggataattttttagtttcgttagatgataaattttattttaattacgggaatatgtt

SEQ ID NO: 7666 - DNA, 666 bp, Artificial Sequence
  chemically treated genomic DNA (Homo sapiens) CpG-island No: 7666
aacatattcccgtaattaaaataaaatttatcatctaacgaaactaaaaaattatcccgatcaattaacgttactaaatacccccgaaccaaataaaaccgaacaaccgcatctacaaaaaatacttaaccaacaactaacacgcgcctcgacgatactaacgatactaaattatacgcaactaaaatcgatctccgataaaaaaatccgtaaaacgattttaacgataaaacaatcgataccgctatacgtactaatcaataaattcgatcaacaaaatcgtaacaataacgacgccgaccaaatacgaacactaatttccgaaacgctaataaaaaactatattacgccacaacaaatatttccgatatcgttcgatataaaactacctaacgaatcgaacgcgctataaattaaccaacaacgataaattaccaccgccaaaacaacaacgctaaataaaaaattttacccataccgcgcttaacaaacgctaacgtcataccgatctaacgaacctcgaacatattcgtcatactaccgatcaattataaaaaaattcgctattcgcccaaccaattcaaacgtacttcataccgcttacgctaacgcctcgttatatactctacgatctaccgcgcataaactattaaattacgcgcaaca

SEQ ID NO: 7667 - DNA, 666 bp, Artificial Sequence
  chemically treated genomic DNA (Homo sapiens) CpG-island No: 7667
agtatattttcgtgattgaagtggagtttgttatttagcggggttggagagttatttcggttagttgacgttattggatattttcgggttaaatgaagtcgggtaatcgtatttgtaaaaaatgtttaattagtagttggtacgcgtttcggcggtattggcggtgttggattatacgtaattgaaatcgattttcgatgaagaggttcgtgaggcgattttggcggtggggtaatcggtgtcgttgtacgtgttggttaataagttcgattaataggatcgtaatagtgacgacgtcgattaggtgcgggtattgattttcgggacgttgatgaaaggttgtattacgttatagtagatattttcggtgtcgttcgatgtggggttatttggcgaatcgggcgcgttatgagttagttaataacggtaagttattatcgttagagtaataacgttgggtggaagattttgtttatgtcgcgtttggtaggcgttggcgttatgtcgatttggcggatttcgaatatattcgttatgttgtcgattagttgtgggaagattcgttgttcgtttagttaatttaggcgtgttttatgtcgtttacgttaacgtttcgttgtatgttttgcgatttgtcgcgtataaattgttgaattacgcgtagta

SEQ ID NO: 7668 - DNA, 666 bp, Artificial Sequence
  chemically treated genomic DNA (Homo sapiens) CpG-island No: 7668
tactacgcgtaattcaacaatttatacgcgacaaatcgcaaaacatacaacgaaacgttaacgtaaacgacataaaacacgcctaaattaactaaacgaacaacgaatcttcccacaactaatcgacaacataacgaatatattcgaaatccgccaaatcgacataacgccaacgcctaccaaacgcgacataaacaaaatcttccacccaacgttattactctaacgataataacttaccgttattaactaactcataacgcgcccgattcgccaaataaccccacatcgaacgacaccgaaaatatctactataacgtaatacaacctttcatcaacgtcccgaaaatcaatacccgcacctaatcgacgtcgtcactattacgatcctattaatcgaacttattaaccaacacgtacaacgacaccgattaccccaccgccaaaatcgcctcacgaacctcttcatcgaaaatcgatttcaattacgtataatccaacaccgccaataccgccgaaacgcgtaccaactactaattaaacattttttacaaatacgattacccgacttcatttaacccgaaaatatccaataacgtcaactaaccgaaataactctccaaccccgctaaataacaaactccacttcaatcacgaaaatatact

SEQ ID NO: 7669 - DNA, 507 bp, Artificial Sequence
  chemically treated genomic DNA (Homo sapiens) CpG-island No: 7669
  unsure (66, 94)
ggtgtaacgcgcggtacgtttgcgttatgaattggttttggattggtcggggatcgcggtggcgtntgacgttatggatgatattgcgtatttnaagtaggaaaatcgtttgttgcgttagcggttttttcggtttgtagtttattcgtgatgtgtgtttgtcggatgcgatgacgtattttaatcggtttataaagattatagtttttgtgggtcggataaggcgtttacgtcgtattcggtaattgcgttataatgtttgatgcgacgttgttcgcgtttttttaggtttacgtgcggtattagataaatgttattgttttggtttttcgttttagttatcgttttcggaaagatcgttattgttggggattcgtttttttttagtagtttatttttcgaggtcgattagttgataacgtttggagtaaaatggtcgaaacgggttgattttattttatattatcgttttttcgtaggttgggtaatttatcgtaatagtttttg

SEQ ID NO: 7670 - DNA, 507 bp, Artificial Sequence
  chemically treated genomic DNA (Homo sapiens) CpG-island No: 7670
  unsure (414, 442)
caaaaactattacgataaattacccaacctacgaaaaaacgataatataaaataaaatcaacccgtttcgaccattttactccaaacgttatcaactaatcgacctcgaaaaataaactactaaaaaaaaacgaatccccaacaataacgatctttccgaaaacgataactaaaacgaaaaaccaaaacaataacatttatctaataccgcacgtaaacctaaaaaaacgcgaacaacgtcgcatcaaacattataacgcaattaccgaatacgacgtaaacgccttatccgacccacaaaaactataatctttataaaccgattaaaatacgtcatcgcatccgacaaacacacatcacgaataaactacaaaccgaaaaaaccgctaacgcaacaaacgattttcctacttnaaatacgcaatatcatccataacgtcanacgccaccgcgatccccgaccaatccaaaaccaattcataacgcaaacgtaccgcgcgttacacc

SEQ ID NO: 7671 - DNA, 507 bp, Artificial Sequence
  chemically treated genomic DNA (Homo sapiens) CpG-island No: 7671
  unsure (414, 442)
tagaaattattacggtgaattgtttaatttgcgggaaaacggtggtgtggggtgaaattagttcgtttcggttattttgttttaaacgttgttagttgatcgatttcggagaatgggttgttgaagaaaaacgaatttttagtagtggcgattttttcgaaagcgatgattggagcgaagaattaaagtagtgatatttgtttgatgtcgtacgtaggtttgaaaagacgcggatagcgtcgtattaggtattatggcgtagttgtcggatgcggcgtgaacgttttattcggtttataggaattgtaatttttgtagatcggttaagatgcgttatcgtattcggtaaatatatattacggatgagttataaatcgggaaagtcgttggcgtagtaggcggtttttttgtttnaggtgcgtaatattatttataacgttangcgttatcgcgattttcggttagtttagagttagtttatgacgtaggcgtatcgcgcgttgtatt

SEQ ID NO: 7672 - DNA, 507 bp, Artificial Sequence
  chemically treated genomic DNA (Homo sapiens) CpG-island No: 7672
  unsure (66, 94)
aatacaacgcgcgatacgcctacgtcataaactaactctaaactaaccgaaaatcgcgataacgcntaacgttataaataatattacgcacctnaaacaaaaaaaccgcctactacgccaacgactttcccgatttataactcatccgtaatatatatttaccgaatacgataacgcatcttaaccgatctacaaaaattacaattcctataaaccgaataaaacgttcacgccgcatccgacaactacgccataatacctaatacgacgctatccgcgtcttttcaaacctacgtacgacatcaaacaaatatcactactttaattcttcgctccaatcatcgctttcgaaaaaatcgccactactaaaaattcgtttttcttcaacaacccattctccgaaatcgatcaactaacaacgtttaaaacaaaataaccgaaacgaactaatttcaccccacaccaccgttttcccgcaaattaaacaattcaccgtaataatttcta

SEQ ID NO: 7673 - DNA, 572 bp, Artificial Sequence
  chemically treated genomic DNA (Homo sapiens) CpG-island No: 7673
agcgttacgtcgtgcgttcgttaggttagtttcgtttttgttcgttcgtttttgtttaaattagattagttttagttttagttttagttttttttttttttggatcgagcgttcgtattttcggttttgtagttattcgagtttcgtttattgtcgtttgtatacgagttttttttggtatagcgtttttatatttcgggatcgttttaacggtttattgcgttttttttgggattatattcgattgtttcgcgcgttttgggatcggatttatttatttcgcgtggtatttagttgtttgttcggagcgttagttagcgtttttcgtttttcgtttttcggtattttcggggggttcgttcgttttgtattttggagtttcgggtcgcgagtttttgttaatttttttggattttcgcggtcgtgggtagcggttgtcgcgtttgtttgttcgagggaggtaggtgtggatcgcggtcggtaaggttgtggggggttgggagttcgcgttgtaggtttgtgcgttcgggtgtagttggcgtttggagcgtgttgggtttgggtttgggaat

SEQ ID NO: 7674 - DNA, 572 bp, Artificial Sequence
  chemically treated genomic DNA (Homo sapiens) CpG-island No: 7674
attcccaaacccaaacccaacacgctccaaacgccaactacacccgaacgcacaaacctacaacgcgaactcccaaccccccacaaccttaccgaccgcgatccacacctacctccctcgaacaaacaaacgcgacaaccgctacccacgaccgcgaaaatccaaaaaaattaacaaaaactcgcgacccgaaactccaaaatacaaaacgaacgaaccccccgaaaataccgaaaaacgaaaaacgaaaaacgctaactaacgctccgaacaaacaactaaataccacgcgaaataaataaatccgatcccaaaacgcgcgaaacaatcgaatataatcccaaaaaaaacgcaataaaccgttaaaacgatcccgaaatataaaaacgctataccaaaaaaaactcgtatacaaacgacaataaacgaaactcgaataactacaaaaccgaaaatacgaacgctcgatccaaaaaaaaaaaaaactaaaactaaaactaaaactaatctaatttaaacaaaaacgaacgaacaaaaacgaaactaacctaacgaacgcacgacgtaacgct

SEQ ID NO: 7675 - DNA, 572 bp, Artificial Sequence
  chemically treated genomic DNA (Homo sapiens) CpG-island No: 7675
atttttaagtttagatttagtacgttttagacgttagttgtattcgggcgtataggtttgtagcgcgggtttttagttttttatagttttgtcggtcgcggtttatatttatttttttcgggtagataggcgcggtagtcgttgtttacggtcgcgagggtttagaggagttggtagaggttcgcggttcggagttttagggtgtagggcgggcgggtttttcgagagtgtcggggagcggagagcggggagcgttagttggcgtttcgggtaagtagttgggtgttacgcggggtagatggattcgattttagggcgcgcggggtagtcggatgtgattttaggaagggcgtagtgggtcgttgggacgatttcgggatgtgggagcgttgtgttaggggggattcgtgtgtaggcgatagtgagcgggattcgggtggttgtagggtcgggagtgcgggcgttcgatttaggaaggaggggagttgaggttgaagttggggttggtttagtttgagtagaagcgggcgggtaggggcggggttggtttggcgggcgtacggcgtggcgtt

SEQ ID NO: 7676 - DNA, 572 bp, Artificial Sequence
  chemically treated genomic DNA (Homo sapiens) CpG-island No: 7676
aacgccacgccgtacgcccgccaaaccaaccccgcccctacccgcccgcttctactcaaactaaaccaaccccaacttcaacctcaactcccctccttcctaaatcgaacgcccgcactcccgaccctacaaccacccgaatcccgctcactatcgcctacacacgaatcccccctaacacaacgctcccacatcccgaaatcgtcccaacgacccactacgcccttcctaaaatcacatccgactaccccgcgcgccctaaaatcgaatccatctaccccgcgtaacacccaactacttacccgaaacgccaactaacgctccccgctctccgctccccgacactctcgaaaaacccgcccgccctacaccctaaaactccgaaccgcgaacctctaccaactcctctaaaccctcgcgaccgtaaacaacgactaccgcgcctatctacccgaaaaaaataaatataaaccgcgaccgacaaaactataaaaaactaaaaacccgcgctacaaacctatacgcccgaatacaactaacgtctaaaacgtactaaatctaaacttaaaaat

SEQ ID NO: 7677 - DNA, 679 bp, Artificial Sequence
  chemically treated genomic DNA (Homo sapiens) CpG-island No: 7677
gatttttcgtggtcgtaatcgtatatttaggtcgtatcgcgggaacgcgatggtaaacgatcgtttttgtaaatcgttataatgataatggtagtagcgggtaggtaattagtagtaacgtgattatcggttgagaaacggtggtgttagtaggttttagcggtagaggtatagtagtagagagtatcggtagtagttacggcgtagtaatatcgttaattacgtagtaaatcgttagtgttattacgtttacgtttattaggagcggcgtataggtggcgttttcggtttttttggtgcgcggcgcgtcgaggaacgtgacgttatagattttcgttatatatattatcgttagcgtatcggtaattgttagttttatagcgagtagcggttttagtagacgggtaataaacgcgttattattgtttagtttgaaaaatgattgatagatatttatttttcggtaaaattatttagcggcggtagcgtagttattgttattagttcgattaatatggcgatggagataatcggtatttttttggttaagtattatcgagtttttcgatatcgcgaatatcgggtataggaattagaacgatttttcggtatttcggacgaggaattaggtgatcggtttttgtagtaaaattaaggggttttaattgggggtttaaaa

SEQ ID NO: 7678 - DNA, 679 bp, Artificial Sequence
  chemically treated genomic DNA (Homo sapiens) CpG-island No: 7678
ttttaaacccccaattaaaaccccttaattttactacaaaaaccgatcacctaattcctcgtccgaaataccgaaaaatcgttctaattcctatacccgatattcgcgatatcgaaaaactcgataatacttaaccaaaaaaataccgattatctccatcgccatattaatcgaactaataacaataactacgctaccgccgctaaataattttaccgaaaaataaatatctatcaatcatttttcaaactaaacaataataacgcgtttattacccgtctactaaaaccgctactcgctataaaactaacaattaccgatacgctaacgataatatatataacgaaaatctataacgtcacgttcctcgacgcgccgcgcaccaaaaaaaccgaaaacgccacctatacgccgctcctaataaacgtaaacgtaataacactaacgatttactacgtaattaacgatattactacgccgtaactactaccgatactctctactactatacctctaccgctaaaacctactaacaccaccgtttctcaaccgataatcacgttactactaattacctacccgctactaccattatcattataacgatttacaaaaacgatcgtttaccatcgcgttcccgcgatacgacctaaatatacgattacgaccacgaaaaatc

SEQ ID NO: 7679 - DNA, 679 bp, Artificial Sequence
  chemically treated genomic DNA (Homo sapiens) CpG-island No: 7679
ttttgaatttttaattaaggttttttggttttgttataaaggtcggttatttggtttttcgttcggggtgtcggggagtcgttttggtttttgtattcggtattcgcgatatcgaaaaattcggtggtatttggttaagaaaatgtcggttatttttatcgttatgttagtcgggttgatggtaatggttgcgttgtcgtcgttgaatggttttgtcggggaatgggtatttattaattattttttaaattgagtaatagtggcgcgtttgttgttcgtttgttggggtcgttgttcgttgtggggttggtaattatcggtgcgttggcggtgatgtgtatggcgaaagtttatggcgttacgtttttcggcgcgtcgcgtattaaagaagtcgaaaacgttatttgtgcgtcgtttttgatgagcgtaagcgtagtggtattggcgatttgttgcgtaattggcggtgttgttgcgtcgtggttattgtcgatgttttttgttgttgtatttttgtcgttggagtttgttaatattatcgttttttaatcgatgattacgttgttgttgattgtttgttcgttgttgttattattattatggcgatttgtaaaggcgatcgtttgttatcgcgttttcgcggtgcggtttgggtgtgcggttacgattacgaaaaatt

SEQ ID NO: 7680 - DNA, 679 bp, Artificial Sequence
  chemically treated genomic DNA (Homo sapiens) CpG-island No: 7680
aatttttcgtaatcgtaaccgcacacccaaaccgcaccgcgaaaacgcgataacaaacgatcgcctttacaaatcgccataataataataacaacaacgaacaaacaatcaacaacaacgtaatcatcgattaaaaaacgataatattaacaaactccaacgacaaaaatacaacaacaaaaaacatcgacaataaccacgacgcaacaacaccgccaattacgcaacaaatcgccaataccactacgcttacgctcatcaaaaacgacgcacaaataacgttttcgacttctttaatacgcgacgcgccgaaaaacgtaacgccataaactttcgccatacacatcaccgccaacgcaccgataattaccaaccccacaacgaacaacgaccccaacaaacgaacaacaaacgcgccactattactcaatttaaaaaataattaataaatacccattccccgacaaaaccattcaacgacgacaacgcaaccattaccatcaacccgactaacataacgataaaaataaccgacattttcttaaccaaataccaccgaatttttcgatatcgcgaataccgaatacaaaaaccaaaacgactccccgacaccccgaacgaaaaaccaaataaccgacctttataacaaaaccaaaaaaccttaattaaaaattcaaaa

SEQ ID NO: 7681 - DNA, 707 bp, Artificial Sequence
  chemically treated genomic DNA (Homo sapiens) CpG-island No: 7681
  unsure (68)
gtcgttgttgtaatcgggtaaagcgtcgttgtatatgttaatttaagcgtaggaagtgtatgacgtantcggtgcgggcgatacggtgattggcgttttggcggtaacgttggtagcgggtaattcgttggaagaagtttgtttttttgttaatgcggcggttggcgtggtggtcggtaaattgggaatttttacggtttcgtcgatcgagttggaaaatgttgtacgtggacgtgtagatataggttttggcgtgatgatcgaagaggaattgaagttggtcgtagcggtagcgcgtaaacgtggtgaaaaagtggtgatgattaacggtgtttttgatattttgtacgtcgggtacgttttttatttggtaaatgttcgtaagttgggtgatcgtttgattgttgtcgttaatagcgatgtttttattaaacggttgaaaggggattttcgttcggtaaatttattcgaatagcgtatgattgtgttgggcgtattggaagcggtcgattgggtagtgtcgtttgaagaggatacgtcgtagcgtttgatcgtcgggattttgttagatttgttggtgaaaggcggcgattataattagaagagattgtcgggagtaaagaagtttgggttaacggtggcgaagtgttggtgtttaattttgaagacggttgttcgacgattaatattattaagaagatttaata

SEQ ID NO: 7682 - DNA, 707 bp, Artificial Sequence
  chemically treated genomic DNA (Homo sapiens) CpG-island No: 7682
  unsure (640)
tattaaatcttcttaataatattaatcgtcgaacaaccgtcttcaaaattaaacaccaacacttcgccaccgttaacccaaacttctttactcccgacaatctcttctaattataatcgccgcctttcaccaacaaatctaacaaaatcccgacgatcaaacgctacgacgtatcctcttcaaacgacactacccaatcgaccgcttccaatacgcccaacacaatcatacgctattcgaataaatttaccgaacgaaaatcccctttcaaccgtttaataaaaacatcgctattaacgacaacaatcaaacgatcacccaacttacgaacatttaccaaataaaaaacgtacccgacgtacaaaatatcaaaaacaccgttaatcatcaccactttttcaccacgtttacgcgctaccgctacgaccaacttcaattcctcttcgatcatcacgccaaaacctatatctacacgtccacgtacaacattttccaactcgatcgacgaaaccgtaaaaattcccaatttaccgaccaccacgccaaccgccgcattaacaaaaaaacaaacttcttccaacgaattacccgctaccaacgttaccgccaaaacgccaatcaccgtatcgcccgcaccgantacgtcatacacttcctacgcttaaattaacatatacaacgacgctttacccgattacaacaacgac

SEQ ID NO: 7683 - DNA, 707 bp, Artificial Sequence
  chemically treated genomic DNA (Homo sapiens) CpG-island No: 7683
  unsure (640)
tgttggatttttttgatgatgttggtcgtcgagtaatcgtttttaaagttgagtattaatatttcgttatcgttggtttagatttttttattttcggtaattttttttggttatagtcgtcgttttttattagtagatttggtaagatttcggcgattaagcgttgcggcgtgttttttttaaacgatattatttagtcgatcgtttttagtgcgtttagtataattatacgttgttcgagtgggtttatcgggcgggaatttttttttagtcgtttggtggaggtatcgttgttgacggtaataattaagcggttatttagtttgcgggtatttgttagataagagacgtgttcggcgtgtaggatgttaaagatatcgttggttattattatttttttattacgtttacgcgttgtcgttacggttagttttagttttttttcggttattacgttaaagtttgtatttgtacgtttacgtatagtattttttagttcgatcggcgaaatcgtggaggtttttagtttgtcgattattacgttagtcgtcgtattggtaaagaagtaggttttttttagcgaattattcgttgttagcgttgtcgttaggacgttaattatcgtgtcgttcgtatcggntacgttatatattttttgcgtttgggttggtatatgtagcggcgttttattcggttgtagtagcgat

SEQ ID NO: 7684 - DNA, 707 bp, Artificial Sequence
  chemically treated genomic DNA (Homo sapiens) CpG-island No: 7684
  unsure (68)
atcgctactacaaccgaataaaacgccgctacatataccaacccaaacgcaaaaaatatataacgtanccgatacgaacgacacgataattaacgtcctaacgacaacgctaacaacgaataattcgctaaaaaaaacctacttctttaccaatacgacgactaacgtaataatcgacaaactaaaaacctccacgatttcgccgatcgaactaaaaaatactatacgtaaacgtacaaatacaaactttaacgtaataaccgaaaaaaaactaaaactaaccgtaacgacaacgcgtaaacgtaataaaaaaataataataaccaacgatatctttaacatcctacacgccgaacacgtctcttatctaacaaatacccgcaaactaaataaccgcttaattattaccgtcaacaacgatacctccaccaaacgactaaaaaaaaattcccgcccgataaacccactcgaacaacgtataattatactaaacgcactaaaaacgatcgactaaataatatcgtttaaaaaaaacacgccgcaacgcttaatcgccgaaatcttaccaaatctactaataaaaaacgacgactataaccaaaaaaaattaccgaaaataaaaaaatctaaaccaacgataacgaaatattaatactcaactttaaaaacgattactcgacgaccaacatcatcaaaaaaatccaaca

SEQ ID NO: 7685 - DNA, 1003 bp, Artificial Sequence
  chemically treated genomic DNA (Homo sapiens) CpG-island No: 7685
taatattttcggttcgtttattaggtataggttagacgagttttggttttattttatcggagagtttgttcgttaggcgttcggtaaacggtttaagagacgtaaattttagtaggcgagtaaaagtttgtttacgtgtttcgtcggtgacgttgcgtaaattcgcgtatagattgaggttttttattatcgtgagatttttatatagattaaatttttgcggtatataatcgagtacggcgtgtagcgcgtcgtcgtttttgatcggattaaagttaattatcgtggtattgtcgttgtcgggttttagtaatttcgttaatattcgtattagcgtggttttatttgtatcgttcggttttattaatttcgttatataatcggcgtgaatggtataatcgagcgggcgcgacggcgggtttgtttatgttcggaaagcgtttttttaggtcgtttagcgtgataacggtattatttatgttttgtttcgttatcgaattgtatcgttattggtattttttggcgtaacgtattatcggcgtcggttattataatacgtaggcgatagacgaggtcggtacgtagattcggcgtttcgacggttttcggggtaaatttagtagtcggcgaaacgaaattaatttgttcgtgatacggtttgttcgggcgattatcggtataaagtagtattttgcgtttcggttgggtttggttaagattacgtttattaatataagcgcgtatttatatcggacgcgttagtgaaacggtaaatatcgtgttatttttattgaggatcgtgtttggttttatcgcgcgcgttaatagcgtgttattagacggggttattaacgttgagttttgtaaatttaatttcgtttgcgttagttgcgtttgcgtttgttcgaggttggttttcgtttgagcgatgttttgtttacggttatcggaacggtattgacgtaatttattttgtgttgattttagcgttgtttgcgtttgg

SEQ ID NO: 7686 - DNA, 1003 bp, Artificial Sequence
  chemically treated genomic DNA (Homo sapiens) CpG-island No: 7686
ccaaacgcaaacaacgctaaaatcaacacaaaataaattacgtcaataccgttccgataaccgtaaacaaaacatcgctcaaacgaaaaccaacctcgaacaaacgcaaacgcaactaacgcaaacgaaattaaatttacaaaactcaacgttaataaccccgtctaataacacgctattaacgcgcgcgataaaaccaaacacgatcctcaataaaaataacacgatatttaccgtttcactaacgcgtccgatataaatacgcgcttatattaataaacgtaatcttaaccaaacccaaccgaaacgcaaaatactactttataccgataatcgcccgaacaaaccgtatcacgaacaaattaatttcgtttcgccgactactaaatttaccccgaaaaccgtcgaaacgccgaatctacgtaccgacctcgtctatcgcctacgtattataataaccgacgccgataatacgttacgccaaaaaataccaataacgatacaattcgataacgaaacaaaacataaataataccgttatcacgctaaacgacctaaaaaaacgctttccgaacataaacaaacccgccgtcgcgcccgctcgattataccattcacgccgattatataacgaaattaataaaaccgaacgatacaaataaaaccacgctaatacgaatattaacgaaattactaaaacccgacaacgacaataccacgataattaactttaatccgatcaaaaacgacgacgcgctacacgccgtactcgattatataccgcaaaaatttaatctatataaaaatctcacgataataaaaaacctcaatctatacgcgaatttacgcaacgtcaccgacgaaacacgtaaacaaacttttactcgcctactaaaatttacgtctcttaaaccgtttaccgaacgcctaacgaacaaactctccgataaaataaaaccaaaactcgtctaacctatacctaataaacgaaccgaaaatatta

SEQ ID NO: 7687 - DNA, 1003 bp, Artificial Sequence
  chemically treated genomic DNA (Homo sapiens) CpG-island No: 7687
ttaggcgtaggtaacgttgaaattagtataggataaattgcgttagtatcgtttcggtaatcgtgaataggatatcgtttaggcgaaagttagtttcgaataggcgtaggcgtaattggcgtaggcggagttgaatttataggatttaacgttgatagtttcgtttgatggtacgttgttaacgcgcgcggtggagttaggtacggtttttaatgaaggtggtacggtgtttatcgttttattaacgcgttcggtgtgggtgcgcgtttatgttgatgaacgtaattttgattaggtttagtcggggcgtaaagtgttgttttatatcgatggtcgttcggataagtcgtattacgggtagattggtttcgtttcgtcgattgttgaatttatttcgaaaatcgtcgaaacgtcggatttgcgtatcgatttcgtttatcgtttgcgtattgtggtgatcgacgtcgatgatgcgttacgttagggaatgttagtgacggtataattcggtgacgaggtaggatatgaatgatgtcgttattacgttgaacggtttggaaaaacgtttttcgggtatggataagttcgtcgtcgcgttcgttcgattgtattatttacgtcggttatgtgacggggttggtggggtcggacggtgtaggtaaaattacgttgatgcggatgttggcgggattattgaaattcgatagcggtagtgttacggtgattggttttgattcgattaaaaacgacggcgcgttgtacgtcgtgttcggttatatgtcgtagaaatttggtttgtatgaagattttacggtgatggagaattttaatttgtacgcggatttgcgtagcgttatcggcgaggtacgtgagtaaatttttgttcgtttgttggagtttacgttttttgggtcgtttatcggacgtttggcgggtaagtttttcggtgggatgaaattaaaattcgtttggtttgtatttggtgggcgaatcgaaagtgttg

SEQ ID NO: 7688 - DNA, 1003 bp, Artificial Sequence
  chemically treated genomic DNA (Homo sapiens) CpG-island No: 7688
caacactttcgattcgcccaccaaatacaaaccaaacgaattttaatttcatcccaccgaaaaacttacccgccaaacgtccgataaacgacccaaaaaacgtaaactccaacaaacgaacaaaaatttactcacgtacctcgccgataacgctacgcaaatccgcgtacaaattaaaattctccatcaccgtaaaatcttcatacaaaccaaatttctacgacatataaccgaacacgacgtacaacgcgccgtcgtttttaatcgaatcaaaaccaatcaccgtaacactaccgctatcgaatttcaataatcccgccaacatccgcatcaacgtaattttacctacaccgtccgaccccaccaaccccgtcacataaccgacgtaaataatacaatcgaacgaacgcgacgacgaacttatccatacccgaaaaacgtttttccaaaccgttcaacgtaataacgacatcattcatatcctacctcgtcaccgaattataccgtcactaacattccctaacgtaacgcatcatcgacgtcgatcaccacaatacgcaaacgataaacgaaatcgatacgcaaatccgacgtttcgacgattttcgaaataaattcaacaatcgacgaaacgaaaccaatctacccgtaatacgacttatccgaacgaccatcgatataaaacaacactttacgccccgactaaacctaatcaaaattacgttcatcaacataaacgcgcacccacaccgaacgcgttaataaaacgataaacaccgtaccaccttcattaaaaaccgtacctaactccaccgcgcgcgttaacaacgtaccatcaaacgaaactatcaacgttaaatcctataaattcaactccgcctacgccaattacgcctacgcctattcgaaactaactttcgcctaaacgatatcctattcacgattaccgaaacgatactaacgcaatttatcctatactaatttcaacgttacctacgcctaa

SEQ ID NO: 7689 - DNA, 625 bp, Artificial Sequence
  chemically treated genomic DNA (Homo sapiens) CpG-island No: 7689
gttcgagttcggttttcgggtcgtcgtttagttttttttcgcgtttttttgcgtttgggttattttcgatttttgttgttcggtttttagtttttttttatttatttcgtttcgttatgtttcgttttagtcgttcggtttttttttttttgtacgtttcgttttcgatttttcggttttttttcggtttgttcgttatatttttggttttttttgtaagtttcgtttttggtttttgtttttttttttttcgtcggttttaattcgcgtttggttaaggttcgcgggaattcgagagttatcgagagagtagagaattcggcgtcgttaaatagtttagttcgcgttttagcgtttcggcgtcgtcgacgttattttttcgagtaagtggtttttgggcgcgttcgtttcgcgtatattttagcgcgtttttttcgtcgttgggttgcgggttgttttcggggagcgttttcggtttaggagagtttttgaagcgagtgtgagtgagtgtgattgggtgcgtatgaataatttgtataggtgggtgtgcgtacgagtgtgtgtaggagcgtatagtttagagatttcgcgaaattattcggttagtgacggatgacgattagat

SEQ ID NO: 7690 - DNA, 625 bp, Artificial Sequence
  chemically treated genomic DNA (Homo sapiens) CpG-island No: 7690
atctaatcgtcatccgtcactaaccgaataatttcgcgaaatctctaaactatacgctcctacacacactcgtacgcacacccacctatacaaattattcatacgcacccaatcacactcactcacactcgcttcaaaaactctcctaaaccgaaaacgctccccgaaaacaacccgcaacccaacgacgaaaaaaacgcgctaaaatatacgcgaaacgaacgcgcccaaaaaccacttactcgaaaaaataacgtcgacgacgccgaaacgctaaaacgcgaactaaactatttaacgacgccgaattctctactctctcgataactctcgaattcccgcgaaccttaaccaaacgcgaattaaaaccgacgaaaaaaaaaaaaacaaaaaccaaaaacgaaacttacaaaaaaaaccaaaaatataacgaacaaaccgaaaaaaaaccgaaaaatcgaaaacgaaacgtacaaaaaaaaaaaaaccgaacgactaaaacgaaacataacgaaacgaaataaataaaaaaaaactaaaaaccgaacaacaaaaatcgaaaataacccaaacgcaaaaaaacgcgaaaaaaaactaaacgacgacccgaaaaccgaactcgaac

SEQ ID NO: 7691 - DNA, 625 bp, Artificial Sequence
  chemically treated genomic DNA (Homo sapiens) CpG-island No: 7691
gtttgatcgttattcgttattgatcgagtaatttcgcggagtttttgagttgtgcgtttttgtatatattcgtacgtatatttatttatataagttgtttatacgtatttagttatatttatttatattcgttttagaaatttttttgagtcggaggcgtttttcgagagtagttcgtagtttagcggcgggagaggcgcgttggagtgtgcgcgggacgggcgcgtttaggagttatttattcggaggagtggcgtcgacggcgtcgggacgttgaagcgcgagttgggttgtttggcggcgtcgagttttttgttttttcggtggttttcgggttttcgcggattttagttaagcgcgggttagagtcggcgggagaaaaggaggtagaggttaggggcggaatttgtaggagggattaagggtgtggcgggtaggtcggggaggagtcgggaggtcgggggcggagcgtgtagggaaggaggagtcgagcggttggggcggggtatggcggggcggagtgggtgaggaggagttggggatcggatagtaggagtcggaagtggtttaggcgtaggagagcgcggagaagggttgggcggcggttcgggagtcggattcggat

SEQ ID NO: 7692 - DNA, 625 bp, Artificial Sequence
  chemically treated genomic DNA (Homo sapiens) CpG-island No: 7692
atccgaatccgactcccgaaccgccgcccaacccttctccgcgctctcctacgcctaaaccacttccgactcctactatccgatccccaactcctcctcacccactccgccccgccataccccgccccaaccgctcgactcctccttccctacacgctccgcccccgacctcccgactcctccccgacctacccgccacacccttaatccctcctacaaattccgcccctaacctctacctccttttctcccgccgactctaacccgcgcttaactaaaatccgcgaaaacccgaaaaccaccgaaaaaacaaaaaactcgacgccgccaaacaacccaactcgcgcttcaacgtcccgacgccgtcgacgccactcctccgaataaataactcctaaacgcgcccgtcccgcgcacactccaacgcgcctctcccgccgctaaactacgaactactctcgaaaaacgcctccgactcaaaaaaatttctaaaacgaatataaataaatataactaaatacgtataaacaacttatataaataaatatacgtacgaatatatacaaaaacgcacaactcaaaaactccgcgaaattactcgatcaataacgaataacgatcaaac

SEQ ID NO: 7693 - DNA, 609 bp, Artificial Sequence
  chemically treated genomic DNA (Homo sapiens) CpG-island No: 7693
gttttagaattggtcgttggtatgtagtgcggtggtagcgatgcgttttttggtgtaacggtaaattcggcggttggttatgcgtttgatttattggtgcgttgcggcgtaacggtgatgtttttagaagtaacggaagtgcgtgacgcgatttatttgttgatattacgcgtagtgaacgaagaggtcggtaaacggttgttggaggagatggagtggtacgataattattttaatatgggaaaaatcgatcgtagcgttaatttttcgtcgggtaataagaaaggcggtttggtaaacgtggtagagaaggtattcggttttattgttaaatcgggtaaaagcgtaattgttgaagtgttgtcgttcggttaacgttcgattaaacgcggattaatttacgtcgcgacgttagttagcgattttgtttgtggtacgtaataggtggtttcgggtattatagtgtaagtgtttacgatcggtcgtggtacgtcgtacggtttgatggcggtattcgttattaaaatggtaattcgtatcgagttggcgaatcgttggtttgatttaatggatattaatgcgggtattatcgttatcggcgaagaaatt

SEQ ID NO: 7694 - DNA, 609 bp, Artificial Sequence
  chemically treated genomic DNA (Homo sapiens) CpG-island No: 7694
aatttcttcgccgataacgataatacccgcattaatatccattaaatcaaaccaacgattcgccaactcgatacgaattaccattttaataacgaataccgccatcaaaccgtacgacgtaccacgaccgatcgtaaacacttacactataatacccgaaaccacctattacgtaccacaaacaaaatcgctaactaacgtcgcgacgtaaattaatccgcgtttaatcgaacgttaaccgaacgacaacacttcaacaattacgcttttacccgatttaacaataaaaccgaataccttctctaccacgtttaccaaaccgcctttcttattacccgacgaaaaattaacgctacgatcgatttttcccatattaaaataattatcgtaccactccatctcctccaacaaccgtttaccgacctcttcgttcactacgcgtaatatcaacaaataaatcgcgtcacgcacttccgttacttctaaaaacatcaccgttacgccgcaacgcaccaataaatcaaacgcataaccaaccgccgaatttaccgttacaccaaaaaacgcatcgctaccaccgcactacataccaacgaccaattctaaaac

SEQ ID NO: 7695 - DNA, 609 bp, Artificial Sequence
  chemically treated genomic DNA (Homo sapiens) CpG-island No: 7695
agttttttcgtcggtagcgatggtgttcgtattaatatttattaaattaaattagcggttcgttagttcggtgcgggttgttattttaatgacgggtatcgttattaggtcgtacggcgtattacgatcggtcgtaaatatttgtattgtgatattcgaagttatttgttgcgtgttatagataaaatcgttggttggcgtcgcggcgtaaattaattcgcgtttagtcgggcgttgatcgggcgatagtattttaataattgcgtttttattcgatttagtaatggagtcgagtgttttttttattacgtttgttagatcgttttttttgttgttcggcgaagggttggcgttgcggtcggttttttttatattgagatagttatcgtattattttattttttttagtagtcgtttgtcgattttttcgtttattgcgcgtggtgttagtagatggatcgcgttacgtattttcgttatttttgaaaatattatcgttgcgtcgtagcgtattagtagattagacgtatagttaatcgtcgggtttgtcgttatattagaaaacgtatcgttgttatcgtattgtatattaacgattagttttgaagt

SEQ ID NO: 7696 - DNA, 609 bp, Artificial Sequence
  chemically treated genomic DNA (Homo sapiens) CpG-island No: 7696
acttcaaaactaatcgttaatatacaatacgataacaacgatacgttttctaatataacgacaaacccgacgattaactatacgtctaatctactaatacgctacgacgcaacgataatattttcaaaaataacgaaaatacgtaacgcgatccatctactaacaccacgcgcaataaacgaaaaaatcgacaaacgactactaaaaaaaataaaataatacgataactatctcaatataaaaaaaaccgaccgcaacgccaacccttcgccgaacaacaaaaaaaacgatctaacaaacgtaataaaaaaaacactcgactccattactaaatcgaataaaaacgcaattattaaaatactatcgcccgatcaacgcccgactaaacgcgaattaatttacgccgcgacgccaaccaacgattttatctataacacgcaacaaataacttcgaatatcacaatacaaatatttacgaccgatcgtaatacgccgtacgacctaataacgatacccgtcattaaaataacaacccgcaccgaactaacgaaccgctaatttaatttaataaatattaatacgaacaccatcgctaccgacgaaaaaact

SEQ ID NO: 7697 - DNA, 508 bp, Artificial Sequence
  chemically treated genomic DNA (Homo sapiens) CpG-island No: 7697
cgcgtaggtacgttcgttggcggttggcgtatataacgatcgttagttgttgtaattttgttatattttagaagtggtcgatagtgcgttgaaaattttcgacgaagcgggattatttggcgaattgcgtttgcgttagggttggcgttgtggcgatggtcggtgtagcgttattcgtaattcgttgtattgttatcgtttttggtagtaattgaaaggttagtcggtcgaatttatttggtagttcgatacggtattagtttggtggtagtattgcgtatcggttcgatcgaaagtttgatttaggggttgtattagttcgtttttcgcgtagaaaaacgtatcggtttggtattgttcggtaagggtaatatcggttttcgttggttggaattgttcgttcgtgagtagagtacgttttcggtacgtatcggttttgagtatgtgttggtaggtgtggtggatagtcgtcgtatttgttgagttatgacgggttggacgtagtcgg

SEQ ID NO: 7698 - DNA, 508 bp, Artificial Sequence
  chemically treated genomic DNA (Homo sapiens) CpG-island No: 7698
ccgactacgtccaacccgtcataactcaacaaatacgacgactatccaccacacctaccaacacatactcaaaaccgatacgtaccgaaaacgtactctactcacgaacgaacaattccaaccaacgaaaaccgatattacccttaccgaacaataccaaaccgatacgtttttctacgcgaaaaacgaactaatacaacccctaaatcaaactttcgatcgaaccgatacgcaatactaccaccaaactaataccgtatcgaactaccaaataaattcgaccgactaacctttcaattactaccaaaaacgataacaatacaacgaattacgaataacgctacaccgaccatcgccacaacgccaaccctaacgcaaacgcaattcgccaaataatcccgcttcgtcgaaaattttcaacgcactatcgaccacttctaaaatataacaaaattacaacaactaacgatcgttatatacgccaaccgccaacgaacgtacctacgcg

SEQ ID NO: 7699 - DNA, 508 bp, Artificial Sequence
  chemically treated genomic DNA (Homo sapiens) CpG-island No: 7699
tcggttgcgtttagttcgttatagtttaataggtgcggcggttgtttattatatttgttagtatatatttaaagtcggtacgtgtcgaaagcgtgttttgtttacgggcgaatagttttagttaacgggaatcgatattgtttttatcgaataatattaggtcgatgcgtttttttgcgcggaagacggattgatgtagtttttgaattaggttttcggtcgggtcggtgcgtagtattgttattaggttgatgtcgtatcggattgttaggtaaattcgatcggttggttttttagttgttgttagaagcggtggtaatgtagcgggttacgggtgacgttgtatcgattatcgttatagcgttagttttgacgtaggcgtagttcgttaggtaatttcgtttcgtcgaggatttttagcgtattgtcggttatttttgaggtgtagtaaaattgtagtaattggcgatcgttatgtacgttaatcgttagcgggcgtatttgcgcg

SEQ ID NO: 7700 - DNA, 508 bp, Artificial Sequence
  chemically treated genomic DNA (Homo sapiens) CpG-island No: 7700
cgcgcaaatacgcccgctaacgattaacgtacataacgatcgccaattactacaattttactacacctcaaaaataaccgacaatacgctaaaaatcctcgacgaaacgaaattacctaacgaactacgcctacgtcaaaactaacgctataacgataatcgatacaacgtcacccgtaacccgctacattaccaccgcttctaacaacaactaaaaaaccaaccgatcgaatttacctaacaatccgatacgacatcaacctaataacaatactacgcaccgacccgaccgaaaacctaattcaaaaactacatcaatccgtcttccgcgcaaaaaaacgcatcgacctaatattattcgataaaaacaatatcgattcccgttaactaaaactattcgcccgtaaacaaaacacgctttcgacacgtaccgactttaaatatatactaacaaatataataaacaaccgccgcacctattaaactataacgaactaaacgcaaccga

SEQ ID NO: 7701 - DNA, 567 bp, Artificial Sequence
  chemically treated genomic DNA (Homo sapiens) CpG-island No: 7701
  unsure (373)
ggtaaaatcgaagaggtaattaaagcgttggagttgggtcgggtttgcggcgtatttattgcggcgtttattaaacgcgcggatagttcgattatttcggcggcggaatttagtattgattattaggtcgattgtatttgggaaatttatttgttgttttgttatagcgtggtgttggagatgattattcgtttcgcgtcgaacgcggaaatcggtaagattaaaaacgattttaagtagttgtcgaatgcgttcggttatttggtacgtatttgggaagaaaaaggtcgttagtttggtgaattggttagttagtggtcgatgatttatatcgttgttgcgggttcgttgcgttcgttgggttataaagaanggtattgtaacgttgatggaatttatttggacgtacggttgcgtgattgagagcggagagtttcgttatggttcgttggagattgtcgaatcgggcgtttcgtttttgtttttgttcggtaatgatgaaagtcgttatattatcgaacgcgttattaattttgttaaatagcgtattgataacgtgatcgttat

SEQ ID NO: 7702 - DNA, 567 bp, Artificial Sequence
  chemically treated genomic DNA (Homo sapiens) CpG-island No: 7702
  unsure (195)
ataacgatcacgttatcaatacgctatttaacaaaattaataacgcgttcgataatataacgactttcatcattaccgaacaaaaacaaaaacgaaacgcccgattcgacaatctccaacgaaccataacgaaactctccgctctcaatcacgcaaccgtacgtccaaataaattccatcaacgttacaataccnttctttataacccaacgaacgcaacgaacccgcaacaacgatataaatcatcgaccactaactaaccaattcaccaaactaacgacctttttcttcccaaatacgtaccaaataaccgaacgcattcgacaactacttaaaatcgtttttaatcttaccgatttccgcgttcgacgcgaaacgaataatcatctccaacaccacgctataacaaaacaacaaataaatttcccaaatacaatcgacctaataatcaatactaaattccgccgccgaaataatcgaactatccgcgcgtttaataaacgccgcaataaatacgccgcaaacccgacccaactccaacgctttaattacctcttcgattttacc

SEQ ID NO: 7703 - DNA, 567 bp, Artificial Sequence
  chemically treated genomic DNA (Homo sapiens) CpG-island No: 7703
  unsure (195)
atgacgattacgttgttagtacgttgtttaataaagttaatggcgcgttcggtggtgtggcgatttttattattgtcgagtaggaataggaacggaacgttcggttcgataatttttagcgggttatggcggaatttttcgtttttaattacgtagtcgtgcgtttaggtaaattttattagcgttataatgttnttttttgtaatttagcggacgtagcggattcgtagtaacggtataaattatcggttattggttggttagtttattaagttggcggtttttttttttttaggtgcgtattagatgatcgagcgtattcggtaattgtttgagatcgtttttgattttgtcgattttcgcgttcggcgcgaggcgggtgattatttttagtattacgttgtagtagagtagtaggtgaattttttagatatagtcggtttgataattaatgttaaatttcgtcgtcgaggtaatcgggttattcgcgcgtttggtgaacgtcgtagtgagtgcgtcgtaggttcggtttagttttagcgttttgattattttttcggttttatt

SEQ ID NO: 7704 - DNA, 567 bp, Artificial Sequence
  chemically treated genomic DNA (Homo sapiens) CpG-island No: 7704
  unsure (373)
aataaaaccgaaaaaataatcaaaacgctaaaactaaaccgaacctacgacgcactcactacgacgttcaccaaacgcgcgaataacccgattacctcgacgacgaaatttaacattaattatcaaaccgactatatctaaaaaattcacctactactctactacaacgtaatactaaaaataatcacccgcctcgcgccgaacgcgaaaatcgacaaaatcaaaaacgatctcaaacaattaccgaatacgctcgatcatctaatacgcacctaaaaaaaaaaaaaccgccaacttaataaactaaccaaccaataaccgataatttataccgttactacgaatccgctacgtccgctaaattacaaaaaanaacattataacgctaataaaatttacctaaacgcacgactacgtaattaaaaacgaaaaattccgccataacccgctaaaaattatcgaaccgaacgttccgttcctattcctactcgacaataataaaaatcgccacaccaccgaacgcgccattaactttattaaacaacgtactaacaacgtaatcgtcat

SEQ ID NO: 7705 - DNA, 634 bp, Artificial Sequence
  chemically treated genomic DNA (Homo sapiens) CpG-island No: 7705
gaagtgagcgggtttcgttttttttttttttcgttttcgttggagtcgtttttgtcgcggttttttcggttgttagtttttcggcgagtcggagttttagtgtcgtatcgttagttttcggtcgcgcggagtcgggatgtattgtttttgttgtgggtttttattatggagattaaacgggtggagattttcggtagcgttttggacgatttttgtaggtatcgcgttattcgattttttttcgttttcgtcgggtttttttagtttcgtcgatttttagaggtttttgggttttttttttcgtttacgtttatgttttcgtttttcgttttcgtcgttgttcgttttttatcgtcgattttgtttttcgacgatatcgttttttttttcgtcgtagtttttttgttttttaaggtttttcgttttttttcgtagaatattcggaatttttttattttttaagttatttaattattttgttttttcgtaggcgtagtcgtttcgtcggagtttgggttttagcgttttgtcgtcgtcgtcgttttttttttttattgttttttttgtttttgtgatttttttacgtcgtgtatttttttttttttgtgttttatttttcgattttgaaggaaga

SEQ ID NO: 7706 - DNA, 634 bp, Artificial Sequence
  chemically treated genomic DNA (Homo sapiens) CpG-island No: 7706
tcttccttcaaaatcgaaaaataaaacacaaaaaaaaaaaaatacacgacgtaaaaaaatcacaaaaacaaaaaaaacaataaaaaaaaaaaacgacgacgacgacaaaacgctaaaacccaaactccgacgaaacgactacgcctacgaaaaaacaaaataattaaataacttaaaaaataaaaaaattccgaatattctacgaaaaaaaacgaaaaaccttaaaaaacaaaaaaactacgacgaaaaaaaaaacgatatcgtcgaaaaacaaaatcgacgataaaaaacgaacaacgacgaaaacgaaaaacgaaaacataaacgtaaacgaaaaaaaaaacccaaaaacctctaaaaatcgacgaaactaaaaaaacccgacgaaaacgaaaaaaaatcgaataacgcgatacctacaaaaatcgtccaaaacgctaccgaaaatctccacccgtttaatctccataataaaaacccacaacaaaaacaatacatcccgactccgcgcgaccgaaaactaacgatacgacactaaaactccgactcgccgaaaaactaacaaccgaaaaaaccgcgacaaaaacgactccaacgaaaacgaaaaaaaaaaaaaacgaaacccgctcacttc

SEQ ID NO: 7707 - DNA, 634 bp, Artificial Sequence
  chemically treated genomic DNA (Homo sapiens) CpG-island No: 7707
tttttttttagaatcggggaatgagatatagggaggagggggtgtacggcgtggaaaagttatagaggtagaaaaaataatgggagagggaggcggcggcggcggtaaaacgttaagatttaggtttcggcgaagcggttacgtttgcgggaaagtaaaatagttgagtaatttaaaaaatgaggaaatttcgggtgttttgcggggaaggacggagggttttgagaaatagggaggttgcggcggaaagaggggcggtgtcgtcggagagtagggtcgacgatggaaagcgagtagcggcgggagcggaaagcgaggatatggacgtgggcggggaagaagatttagaggtttttgggggtcggcgaaattgagaaaattcgacgggggcgaaagggggtcgggtagcgcggtatttgtagagatcgtttaggacgttgtcgggaatttttattcgtttggtttttatgatgaggatttatagtaggaatagtgtatttcggtttcgcgcggtcggggattgacggtacggtattaggatttcggttcgtcggagagttggtagtcgagggagtcgcggtagagacgattttaacggagacgagaaggggaaggggcgggattcgtttatttt

SEQ ID NO: 7708 - DNA, 634 bp, Artificial Sequence
  chemically treated genomic DNA (Homo sapiens) CpG-island No: 7708
aaaataaacgaatcccgccccttccccttctcgtctccgttaaaatcgtctctaccgcgactccctcgactaccaactctccgacgaaccgaaatcctaataccgtaccgtcaatccccgaccgcgcgaaaccgaaatacactattcctactataaatcctcatcataaaaaccaaacgaataaaaattcccgacaacgtcctaaacgatctctacaaataccgcgctacccgaccccctttcgcccccgtcgaattttctcaatttcgccgacccccaaaaacctctaaatcttcttccccgcccacgtccatatcctcgctttccgctcccgccgctactcgctttccatcgtcgaccctactctccgacgacaccgcccctctttccgccgcaacctccctatttctcaaaaccctccgtccttccccgcaaaacacccgaaatttcctcattttttaaattactcaactattttactttcccgcaaacgtaaccgcttcgccgaaacctaaatcttaacgttttaccgccgccgccgcctccctctcccattattttttctacctctataacttttccacgccgtacaccccctcctccctatatctcattccccgattctaaaaaaaaa

SEQ ID NO: 7709 - DNA, 664 bp, Artificial Sequence
  chemically treated genomic DNA (Homo sapiens) CpG-island No: 7709
cgggcgacgcgtattattttttaggtattcggtttcgcgttttattcgtagtagcgtttagcgagaattgcgaaggaggtaggtttcgggtattcgttttcgcgcgtgggcggggtcggttggagggggcggtgttttcgggattgtgagcggggtttttcggggtgtgggtggggttttcggtcgtgggtagggtcggttagggagaggcggggttttcgagaatgggcggggttttcgagaatgggcggggttttcgggagtgcgtttttttcgtatatgcgttttgatagtttaataatggcggcgttcgcggagtcgttgaggaggcggaagattgggtattcggattcggagtttgagtcgtcgttcgcgtcggggcgtggtttcgtaggtttttcggtttatttttatacgggtattttttggttgattcggatcgtgtttttgaaggttttagttttcgtgtattgtgagtgtcgggcgggttcgggatattcgttagtgttattttcgcgtattacgattttcgttttttttcgagattttttcgcgcggtttcgcggtcgcggcgtttttacgtagtttttttttttgttggggttcgggtaaggcggggcgggtagggtaggataaggtttgttggcgatagcgtattcggttt

SEQ ID NO: 7710 - DNA, 664 bp, Artificial Sequence
  chemically treated genomic DNA (Homo sapiens) CpG-island No: 7710
aaaccgaatacgctatcgccaacaaaccttatcctaccctacccgccccgccttacccgaaccccaacaaaaaaaaaaactacgtaaaaacgccgcgaccgcgaaaccgcgcgaaaaaatctcgaaaaaaaacgaaaatcgtaatacgcgaaaataacactaacgaatatcccgaacccgcccgacactcacaatacacgaaaactaaaaccttcaaaaacacgatccgaatcaaccaaaaaatacccgtataaaaataaaccgaaaaacctacgaaaccacgccccgacgcgaacgacgactcaaactccgaatccgaatacccaatcttccgcctcctcaacgactccgcgaacgccgccattattaaactatcaaaacgcatatacgaaaaaaacgcactcccgaaaaccccgcccattctcgaaaaccccgcccattctcgaaaaccccgcctctccctaaccgaccctacccacgaccgaaaaccccacccacaccccgaaaaaccccgctcacaatcccgaaaacaccgccccctccaaccgaccccgcccacgcgcgaaaacgaatacccgaaacctacctccttcgcaattctcgctaaacgctactacgaataaaacgcgaaaccgaatacctaaaaaataatacgcgtcgcccg

SEQ ID NO: 7711 - DNA, 664 bp, Artificial Sequence
  chemically treated genomic DNA (Homo sapiens) CpG-island No: 7711
gggtcgggtgcgttgtcgttagtaagttttgttttgttttgttcgtttcgttttgttcgggttttagtaggaaggagggttgcgtgggggcgtcgcggtcgcgagatcgcgcggaggagtttcgagggagggcgggggtcgtggtgcgcggaggtgatattggcggatgtttcgggttcgttcggtatttatagtatacgaaggttagggtttttaggagtacgattcgggttagttagaaggtgttcgtgtggagatgggtcggagagtttgcggggttacgtttcggcgcgggcggcgatttaggtttcggattcgagtatttagtttttcgtttttttagcgatttcgcgggcgtcgttattgttgggttgttagggcgtatgtgcggggagggcgtattttcggaggtttcgtttattttcggaggtttcgtttattttcggaggtttcgtttttttttggtcggttttgtttacggtcgaaggttttatttatatttcgggaggtttcgtttatagtttcggaggtatcgttttttttagtcggtttcgtttacgcgcgggagcgggtgttcggagtttgtttttttcgtagttttcgttgggcgttgttgcgggtagggcgcggggtcgggtatttgggaggtggtgcgcgtcgttcg

SEQ ID NO: 7712 - DNA, 664 bp, Artificial Sequence
  chemically treated genomic DNA (Homo sapiens) CpG-island No: 7712
cgaacgacgcgcaccacctcccaaatacccgaccccgcgccctacccgcaacaacgcccaacgaaaactacgaaaaaaacaaactccgaacacccgctcccgcgcgtaaacgaaaccgactaaaaaaaacgatacctccgaaactataaacgaaacctcccgaaatataaataaaaccttcgaccgtaaacaaaaccgaccaaaaaaaaacgaaacctccgaaaataaacgaaacctccgaaaataaacgaaacctccgaaaatacgccctccccgcacatacgccctaacaacccaacaataacgacgcccgcgaaatcgctaaaaaaacgaaaaactaaatactcgaatccgaaacctaaatcgccgcccgcgccgaaacgtaaccccgcaaactctccgacccatctccacacgaacaccttctaactaacccgaatcgtactcctaaaaaccctaaccttcgtatactataaataccgaacgaacccgaaacatccgccaatatcacctccgcgcaccacgacccccgccctccctcgaaactcctccgcgcgatctcgcgaccgcgacgcccccacgcaaccctccttcctactaaaacccgaacaaaacgaaacgaacaaaacaaaacaaaacttactaacgacaacgcacccgaccc

SEQ ID NO: 7713 - DNA, 2146 bp, Artificial Sequence
  chemically treated genomic DNA (Homo sapiens) CpG-island No: 7713
tttgggtcgtgattttatgttgttatcgtgagtttgtgtttgggtcgtgatttcgtgttgttatcgtgagtttgtgtttgggtcgtgatttcgtgttgttatcgtgagtttgtgtttgggtcgtgatttcgtgttgttacgagagtttgtgtttgggtcgtgatttcgtgttgttatcgtgagtttgtgtttgggtcgtgatttcgtgtttgttagcgtgatgtttgtttgggtggtgatttcgtgttgttatcgtgagtttgtgtttgggtcgtgatttcgtgttgttatcgtgagtttgtgtttgggtcgtgatttcgtgttgttatcgtgagtttgtgtttgggtcgtgattttcgtgttgttatcgtgatgttttgtgttgtggttcgtgattttcgtgttgttatcgtgatgttttgttttgggtggtgatttcgtgttgttatcgtgagtttgtgtttgggtcgtgatttcgtgttgttatcgtgagtttgtgttttgggttcgtgatttcgtgttgttatcgtgagttttgtgtttgggtcgtgatttcgtgttgtttattcgtgagttttgtgttgtgggttcgatgatttttcgtgttgttattcgtgagttttgttttgggggtcgttgatttttcgttgttgttatcgtgagtttgtgtttgggtcgtgatttcgtgttgttatcgtgagtttgtgtttgggtcgtgatttcgtgttgttatcgtgagtttgtttgggtggtgatttcgtgttgttatcgtgagtttgtgtttgggtcgtgatttcgtgttgttatcgtgagtttgtgtttgggtcgtgatttcgtgttgttatcgtgagtttgtgtttgggtcgtgatttcgtgttgttatcgtgagtttgtgtttgggtcgtgttttcgtgttgttatcgagagtttgtttgggtcgtgatttcgtgttgttatcgtgagtttgtgtttgggtcgtgatttcgtgttgttatcgagagtttgtgtttgggtcgtgatttcgtgttgtatatcgtgagtttgtgtttgggtcgagatttcgtgttgttatcgtgagtattgtgtttgggtcgtgatttcgtgttgttatcgtgagtttgtagtttgggtcgtgatttcgtgttgttatcgtgagtttgtgtttgggtcgtgatttcgtgttgttatcgtgagtttgtgtttgggtcgtgatttcgtgttgttatcgtgagtttgtgtttgggtcgtgatttcgtgttgttatcgtgagtttgtttgggtcgtgatttcgtgttgttatcgtgattttgtttgggtcgtgatttcgtgttgttatcgtgagtttgtgtttgggtcgtgatttcgtgttgttatcgtgagtttgtgtttgggtcgtgatttcgtgttgttatcgtgagtttgtttgggtcgtgatttcgtgttgttatcgtgagtttgtgtttgggtcgtgatttcgtgttgttatcgtgagtttgtgtttgggtcgtgatttcgtgttgttatcgtgagtttgtttgggtcgtgatttcgtgttgttatcgtgagtttgtgtttgggtcgtgatttcgtgttgttatcgtgagtttgtgtttgggtcgtgatttcgtgttgttatcgtgagtttgtgtttgggtcgtgatttcgtgttgttatcgtgagtttgtttgggtcgtgatttcgtgttgttttcgtgagtttgtgtttgggtcgtgatttcgtgttgttatcgtgagtttgtgtttgggtcgtgatttcgtgttgttatcgtgagtttgtttgggtcgtgatttcgtgttgttatcgtgagtttgtgtttgggtcgtgatttcgtgttgttatcgtgagtttgtgtttgggtcgtgatttcgtgttgttaatttcgttgaaggttttttggttttggggtcgtgatttcgtgttgttatcgtgagtttgtgtttgggtcgtgatttcgtgttgttatcgtgagtttgtgtttgggtcgtgatttcgtgttgttatcgtgagtttgtgtttgggtcgtgatttcgtgttgttatcgtgagtttgtgtttgggtcgtgatttcgtgttgttatcgtgagtttgtgtttgggttgtgatttagtgttgttattgtgagtttt

SEQ ID NO: 7714 - DNA, 2146 bp, Artificial Sequence
  chemically treated genomic DNA (Homo sapiens) CpG-island No: 7714
aaaactcacaataacaacactaaatcacaacccaaacacaaactcacgataacaacacgaaatcacgacccaaacacaaactcacgataacaacacgaaatcacgacccaaacacaaactcacgataacaacacgaaatcacgacccaaacacaaactcacgataacaacacgaaatcacgacccaaacacaaactcacgataacaacacgaaatcacgaccccaaaaccaaaaaaccttcaacgaaattaacaacacgaaatcacgacccaaacacaaactcacgataacaacacgaaatcacgacccaaacacaaactcacgataacaacacgaaatcacgacccaaacaaactcacgataacaacacgaaatcacgacccaaacacaaactcacgataacaacacgaaatcacgacccaaacacaaactcacgaaaacaacacgaaatcacgacccaaacaaactcacgataacaacacgaaatcacgacccaaacacaaactcacgataacaacacgaaatcacgacccaaacacaaactcacgataacaacacgaaatcacgacccaaacacaaactcacgataacaacacgaaatcacgacccaaacaaactcacgataacaacacgaaatcacgacccaaacacaaactcacgataacaacacgaaatcacgacccaaacacaaactcacgataacaacacgaaatcacgacccaaacaaactcacgataacaacacgaaatcacgacccaaacacaaactcacgataacaacacgaaatcacgacccaaacacaaactcacgataacaacacgaaatcacgacccaaacaaaatcacgataacaacacgaaatcacgacccaaacaaactcacgataacaacacgaaatcacgacccaaacacaaactcacgataacaacacgaaatcacgacccaaacacaaactcacgataacaacacgaaatcacgacccaaacacaaactcacgataacaacacgaaatcacgacccaaactacaaactcacgataacaacacgaaatcacgacccaaacacaatactcacgataacaacacgaaatctcgacccaaacacaaactcacgatatacaacacgaaatcacgacccaaacacaaactctcgataacaacacgaaatcacgacccaaacacaaactcacgataacaacacgaaatcacgacccaaacaaactctcgataacaacacgaaaacacgacccaaacacaaactcacgataacaacacgaaatcacgacccaaacacaaactcacgataacaacacgaaatcacgacccaaacacaaactcacgataacaacacgaaatcacgacccaaacacaaactcacgataacaacacgaaatcaccacccaaacaaactcacgataacaacacgaaatcacgacccaaacacaaactcacgataacaacacgaaatcacgacccaaacacaaactcacgataacaacaacgaaaaatcaacgacccccaaaacaaaactcacgaataacaacacgaaaaatcatcgaacccacaacacaaaactcacgaataaacaacacgaaatcacgacccaaacacaaaactcacgataacaacacgaaatcacgaacccaaaacacaaactcacgataacaacacgaaatcacgacccaaacacaaactcacgataacaacacgaaatcaccacccaaaacaaaacatcacgataacaacacgaaaatcacgaaccacaacacaaaacatcacgataacaacacgaaaatcacgacccaaacacaaactcacgataacaacacgaaatcacgacccaaacacaaactcacgataacaacacgaaatcacgacccaaacacaaactcacgataacaacacgaaatcaccacccaaacaaacatcacgctaacaaacacgaaatcacgacccaaacacaaactcacgataacaacacgaaatcacgacccaaacacaaactctcgtaacaacacgaaatcacgacccaaacacaaactcacgataacaacacgaaatcacgacccaaacacaaactcacgataacaacacgaaatcacgacccaaacacaaactcacgataacaacataaaatcacgacccaaa

SEQ ID NO: 7715 - DNA, 2146 bp, Artificial Sequence
  chemically treated genomic DNA (Homo sapiens) CpG-island No: 7715
aagatttatagtgataatattggattataatttagatatagatttacggtgatagtacgggattacgatttagatatagatttacggtgatagtacgggattacgatttagatatagatttacggtgatagtacgggattacgatttagatatagatttacggtgatagtacgggattacgatttagatatagatttacggtgatagtacgggattacgattttaagattaaggaatttttaacggggttgataatacgggattacgatttagatatagatttacggtgatagtacgggattacgatttagatatagatttacggtgataatacgggattacgatttagatagatttacggtgatagtacgggattacgatttagatatagatttacggtgatagtacgggattacgatttagatatagatttacggggatagtacgggattacgatttagatagatttacggtgatagtacgggattacgatttagatatagatttacggtgatagtacgggattacgatttagatatagatttacggtgatagtacgggattacgatttagatatagatttacggtgataatacgggattacgatttagatagatttacggtgatagtacgggattacgatttagatatagatttacggtgatagtacgggattacgatttagatatagatttacggtgatagtacgggattacgatttagatagatttacggtgatagtacgggattacgatttagatatagatttacggtgatagtacgggattacgatttagatatagatttacggtgatagtacgggattacgatttagatagaattacggtgatagtacgggattacgatttagatagatttacggtgatagtacgggattacgatttagatatagatttacggtgatagtacgggattacgatttagatatagatttacggtgatagtacgggattacgatttagatatagatttacggtgatagtacgggattacgatttagattatagatttacggtgatagtacgggattacgatttagatatagtatttacggtgatagtacgggatttcgatttagatatagatttacggtgtatagtacgggattacgatttagatatagattttcggtgatagtacgggattacgatttagatatagatttacggtgatagtacgggattacgatttagatagattttcggtgatagtacgggagtacgatttagatatagatttacggtgatagtacgggattacgatttagatatagatttacggtgatagtacgggattacgatttagatatagatttacggtgatagtacgggattacgatttagatatagatttacggtgatagtacgggattattatttagatagatttacggtgatagtacgggattacgatttagatatagatttacggtgatagtacgggattacgatttagatatagatttacggtgatagtagcggggaattaacgatttttaaaatagaatttacgggtgatagtacggggagttatcgaatttataatatagaatttacgggtgaatagtacgggattacgatttagatatagaatttacggtgatagtacgggattacgaatttagaatatagatttacggtgatagtacgggattacgatttagatatagatttacggtgatagtacgggattattatttagaataagatattacggtgatagtacgggagttacgagttataatataagatattacggtgatagtacgggaattacgatttagatatagatttacggtgatagtacgggattacgatttagatatagatttacggtgatagtacgggattacgatttagatatagatttacggtgatagtacgggattattatttagatagatattacgttgatagatacgggattacgatttagatatagatttacggtgatagtacgggattacgatttagatatagattttcgtgatagtacgggattacgatttagatatagatttacggtgatagtacgggattacgatttagatatagatttacggtgatagtacgggattacgatttagatatagatttacggtgatagtatgggattacgatttaga

SEQ ID NO: 7716 - DNA, 2146 bp, Artificial Sequence
  chemically treated genomic DNA (Homo sapiens) CpG-island No: 7716
tctaaatcgtaatcccatactatcaccgtaaatctatatctaaatcgtaatcccgtactatcaccgtaaatctatatctaaatcgtaatcccgtactatcaccgtaaatctatatctaaatcgtaatcccgtactatcacgaaaatctatatctaaatcgtaatcccgtactatcaccgtaaatctatatctaaatcgtaatcccgtatctatcaacgtaatatctatctaaataataatcccgtactatcaccgtaaatctatatctaaatcgtaatcccgtactatcaccgtaaatctatatctaaatcgtaatcccgtactatcaccgtaaatctatatctaaatcgtaattcccgtactatcaccgtaatatcttatattataactcgtaactcccgtactatcaccgtaatatcttattctaaataataatcccgtactatcaccgtaaatctatatctaaatcgtaatcccgtactatcaccgtaaatctatattctaaattcgtaatcccgtactatcaccgtaaattctatatctaaatcgtaatcccgtactattcacccgtaaattctatattataaattcgataactccccgtactatcacccgtaaattctattttaaaaatcgttaattccccgctactatcaccgtaaatctatatctaaatcgtaatcccgtactatcaccgtaaatctatatctaaatcgtaatcccgtactatcaccgtaaatctatctaaataataatcccgtactatcaccgtaaatctatatctaaatcgtaatcccgtactatcaccgtaaatctatatctaaatcgtaatcccgtactatcaccgtaaatctatatctaaatcgtaatcccgtactatcaccgtaaatctatatctaaatcgtactcccgtactatcaccgaaaatctatctaaatcgtaatcccgtactatcaccgtaaatctatatctaaatcgtaatcccgtactatcaccgaaaatctatatctaaatcgtaatcccgtactatacaccgtaaatctatatctaaatcgaaatcccgtactatcaccgtaaatactatatctaaatcgtaatcccgtactatcaccgtaaatctataatctaaatcgtaatcccgtactatcaccgtaaatctatatctaaatcgtaatcccgtactatcaccgtaaatctatatctaaatcgtaatcccgtactatcaccgtaaatctatatctaaatcgtaatcccgtactatcaccgtaaatctatctaaatcgtaatcccgtactatcaccgtaattctatctaaatcgtaatcccgtactatcaccgtaaatctatatctaaatcgtaatcccgtactatcaccgtaaatctatatctaaatcgtaatcccgtactatcaccgtaaatctatctaaatcgtaatcccgtactatcaccgtaaatctatatctaaatcgtaatcccgtactatcaccgtaaatctatatctaaatcgtaatcccgtactatcaccgtaaatctatctaaatcgtaatcccgtattatcaccgtaaatctatatctaaatcgtaatcccgtactatcaccgtaaatctatatctaaatcgtaatcccgtactatcaccgtaaatctatatctaaatcgtaatcccgtactatcaccgtaaatctatctaaatcgtaatcccgtactatccccgtaaatctatatctaaatcgtaatcccgtactatcaccgtaaatctatatctaaatcgtaatcccgtactatcaccgtaaatctatctaaatcgtaatcccgtattatcaccgtaaatctatatctaaatcgtaatcccgtactatcaccgtaaatctatatctaaatcgtaatcccgtattatcaaccccgttaaaaattccttaatcttaaaatcgtaatcccgtactatcaccgtaaatctatatctaaatcgtaatcccgtactatcaccgtaaatctatatctaaatcgtaatcccgtactatcaccgtaaatctatatctaaatcgtaatcccgtactatcaccgtaaatctatatctaaatcgtaatcccgtactatcaccgtaaatctatatctaaattataatccaatattatcactataaatctt

SEQ ID NO: 7717 - DNA, 860 bp, Artificial Sequence
  chemically treated genomic DNA (Homo sapiens) CpG-island No: 7717
ttcgggcggtgttggtgttcgtgttgtatttgttggtgtgtgcggtcgggttgggcgggaatacgttggttatttacgtggtgttgcgtttcgttaagatgaagatcgttattaatatttatatttttaatttggtagtggtcgacgttttgtatatgttggggttgttttttttggttacgtagaacgtcgcgtttttttggtttttcggtttcgttttgtgtcgtttggttatgacgttggacggcgttaattagtttattagtgttttttgtttgatagttatgagcgtggatcgttatttggtagtggtgtattcgttgagttcggttcgttggcgtcgttcgcgtgtggttaagttggcgagcgtcgcggtttgggttttgtttttgtgtatgtcgttgtcgtttttggtgttcgcggacgtgtaggagggcggtatttgtaacgttagttggtcggagttcgtggggttgtggggcgtcgtttttattatttatacggtcgtgttgggttttttcgcgtcgttgttggttatttgtttgtgttatttgtttatcgtggtgaaggtgagggcggcgggcgtgcgcgtgggttgcgtgcggcggcgttcggagcggaaggtgacgcgtatggtgttggtggtggtgttggtgtttgcgggatgttggttgtttttttttatcgttaatatcgttaatttggtcgtggcgttgttttaggagttcgttttcgtcggtttttattttttcgtggttatttttttttacgttaatagttgtgttaatttcgttttttacggttttttttttgataattttcgttagagtttttagaaggttttgtgttttcgtaagggt

SEQ ID NO: 7718 - DNA, 860 bp, Artificial Sequence
  chemically treated genomic DNA (Homo sapiens) CpG-island No: 7718
acccttacgaaaacacaaaaccttctaaaaactctaacgaaaattatcaaaaaaaaaaccgtaaaaaacgaaattaacacaactattaacgtaaaaaaaaataaccacgaaaaaataaaaaccgacgaaaacgaactcctaaaacaacgccacgaccaaattaacgatattaacgataaaaaaaaacaaccaacatcccgcaaacaccaacaccaccaccaacaccatacgcgtcaccttccgctccgaacgccgccgcacgcaacccacgcgcacgcccgccgccctcaccttcaccacgataaacaaataacacaaacaaataaccaacaacgacgcgaaaaaacccaacacgaccgtataaataataaaaacgacgccccacaaccccacgaactccgaccaactaacgttacaaataccgccctcctacacgtccgcgaacaccaaaaacgacaacgacatacacaaaaacaaaacccaaaccgcgacgctcgccaacttaaccacacgcgaacgacgccaacgaaccgaactcaacgaatacaccactaccaaataacgatccacgctcataactatcaaacaaaaaacactaataaactaattaacgccgtccaacgtcataaccaaacgacacaaaacgaaaccgaaaaaccaaaaaaacgcgacgttctacgtaaccaaaaaaaacaaccccaacatatacaaaacgtcgaccactaccaaattaaaaatataaatattaataacgatcttcatcttaacgaaacgcaacaccacgtaaataaccaacgtattcccgcccaacccgaccgcacacaccaacaaatacaacacgaacaccaacaccgcccgaa

SEQ ID NO: 7719 - DNA, 860 bp, Artificial Sequence
  chemically treated genomic DNA (Homo sapiens) CpG-island No: 7719
gtttttgcggaggtatagaattttttggaagttttggcggaagttgttagagaggaagtcgtagaggacggggttggtatagttgttggcgtaggagaggatgattacgaagaagtagaggtcggcggaggcgggtttttggggtagcgttacggttaggttgacgatgttgacggtgaagaagggtagttaatatttcgtaaatattagtattattattaatattatgcgcgttatttttcgtttcgagcgtcgtcgtacgtagtttacgcgtacgttcgtcgtttttatttttattacgatgagtaggtagtataggtagatgattagtagcggcgcgaagaagtttagtacggtcgtgtagatgatgaagacggcgttttatagttttacgggtttcggttagttggcgttgtaggtatcgtttttttgtacgttcgcgaatattaggagcggtagcgatatgtatagagataggatttaggtcgcggcgttcgttagtttggttatacgcgggcggcgttagcgggtcgagtttagcgggtgtattattgttaggtagcggtttacgtttatgattgttaggtagaagatattggtgaattggttgacgtcgtttagcgttatgattaggcggtataggacggggtcgaagggttagaaggacgcggcgttttgcgtggttaggaaaggtagttttagtatgtataggacgtcggttattgttaggttgagaatgtagatgttggtgacggtttttattttggcgaagcgtagtattacgtagatgattagcgtgttttcgtttagttcggtcgtatatattagtaggtatagtacgggtattagtatcgttcggg

SEQ ID NO: 7720 - DNA, 860 bp, Artificial Sequence
  chemically treated genomic DNA (Homo sapiens) CpG-island No: 7720
cccgaacgatactaatacccgtactatacctactaatatatacgaccgaactaaacgaaaacacgctaatcatctacgtaatactacgcttcgccaaaataaaaaccgtcaccaacatctacattctcaacctaacaataaccgacgtcctatacatactaaaactacctttcctaaccacgcaaaacgccgcgtccttctaacccttcgaccccgtcctataccgcctaatcataacgctaaacgacgtcaaccaattcaccaatatcttctacctaacaatcataaacgtaaaccgctacctaacaataatacacccgctaaactcgacccgctaacgccgcccgcgtataaccaaactaacgaacgccgcgacctaaatcctatctctatacatatcgctaccgctcctaatattcgcgaacgtacaaaaaaacgatacctacaacgccaactaaccgaaacccgtaaaactataaaacgccgtcttcatcatctacacgaccgtactaaacttcttcgcgccgctactaatcatctacctatactacctactcatcgtaataaaaataaaaacgacgaacgtacgcgtaaactacgtacgacgacgctcgaaacgaaaaataacgcgcataatattaataataatactaatatttacgaaatattaactacccttcttcaccgtcaacatcgtcaacctaaccgtaacgctaccccaaaaacccgcctccgccgacctctacttcttcgtaatcatcctctcctacgccaacaactataccaaccccgtcctctacgacttcctctctaacaacttccgccaaaacttccaaaaaattctatacctccgcaaaaac

SEQ ID NO: 7721 - DNA, 1753 bp, Artificial Sequence
  chemically treated genomic DNA (Homo sapiens) CpG-island No: 7721
atttttgtatatagtcggggtataattaatttttgtatatagtcggcgtttaattaattattgtatatagtcggtatttaattaattatagtatatagtcgtcgtttaattaattatagtatatagtcggtatttaattaatttttgtatatagtcggcgtttaattaattatagtatatagtcggcgtttaattaatttttgtatatagtcggcgtttaattaatttttgtatatagtcggcgtttaataaattattgtatatagtcggcgtttaattaattatagtatatagtcggcgtttaattaattatagtatatagtcggcgtttaattaatttttgtatatagtcggcgtttaattaattcgtgtatatagtcggcgtttaattaattatagtatatagtcgtcgtttaattaattatagtatatagtcggtatttaattaatttttgtatatagtcggcgtttaattaattatagtatatagtcggcgtttaattaatttttgtatatagtcggcgtttaattaatttttgtatatagtcggcgtttaataaattattgtatatagtcggcgtttaattaattatagtatatagtcggcgtttaattaatttttgtatatagtcggcgtttaattaattcgtgtatatagttagcgtttaattaattatagtatatagtcggcgtttaattaattattgtatatagtcggcgtttaattaattcgtgtatatagtcggcgtttaattaatttttgtatatagtcggcgtttaataaattatagtatatagtcggcgtttaattaatttttgtatatagtcggcgtttaacgaatttttgtatatagtcggcgtttaattaatttttgtatatagtcggcgtttaattaatttttgtatatagtcggcgtttaataaattatagtatatagtcggcgtttaattaatttttgtatatagtcggcgtttaattaattcgtgtatatagtcggcgtttaattaattattgtatatagtcggcgtttaattaattatagtatatagtcggcgtttaattaatttttgtatatagtcggcgtttaacgaattcgtgtatatagtcggcgtttaattaatttttgtatatagtcggcgtttaattaatttttgtatatagtcggcgtttaataaattatagtatatagtcggcgtttaattaatttttgtatatagtcggcgtttaattaatttttgtatatagtcggcgtttaattaattattgtatatagtcggcgtttaattaattatagtatatagtcggcgtttaattaatttttgtatatagtcggtgtttaataaattatagtatatagtcggcgtttaattaatttttgtatatagtcggcgtttaattaattatagtatatagtcggcgtttaattaattatagtatatagtcggcgtttaattaatttttgtatatagtcggcgtttaataaattattgtatatagtcggcgtttaattaatttttgtatatagttagcgtttaataaattattgtatatagtcggcgttgaagtttcgcgtgttcgtttattttagttattatttatatgttatgttattagtagtagcgagttgttttcgttttaaggagaaggtcggtttaaaagtcgttcgacgcgaaaatcgaagaaagcgagaaaaaagatcgaaaagatcgaaagatcgaagagttaagaagtcgtaaaaagggaaaagtagag

SEQ ID NO: 7722 - DNA, 1753 bp, Artificial Sequence
  chemically treated genomic DNA (Homo sapiens) CpG-island No: 7722
ctctacttttccctttttacgacttcttaactcttcgatctttcgatcttttcgatcttttttctcgctttcttcgattttcgcgtcgaacgacttttaaaccgaccttctccttaaaacgaaaacaactcgctactactaataacataacatataaataataactaaaataaacgaacacgcgaaacttcaacgccgactatatacaataatttattaaacgctaactatatacaaaaattaattaaacgccgactatatacaataatttattaaacgccgactatatacaaaaattaattaaacgccgactatatactataattaattaaacgccgactatatactataattaattaaacgccgactatatacaaaaattaattaaacgccgactatatactataatttattaaacaccgactatatacaaaaattaattaaacgccgactatatactataattaattaaacgccgactatatacaataattaattaaacgccgactatatacaaaaattaattaaacgccgactatatacaaaaattaattaaacgccgactatatactataatttattaaacgccgactatatacaaaaattaattaaacgccgactatatacaaaaattaattaaacgccgactatatacacgaattcgttaaacgccgactatatacaaaaattaattaaacgccgactatatactataattaattaaacgccgactatatacaataattaattaaacgccgactatatacacgaattaattaaacgccgactatatacaaaaattaattaaacgccgactatatactataatttattaaacgccgactatatacaaaaattaattaaacgccgactatatacaaaaattaattaaacgccgactatatacaaaaattcgttaaacgccgactatatacaaaaattaattaaacgccgactatatactataatttattaaacgccgactatatacaaaaattaattaaacgccgactatatacacgaattaattaaacgccgactatatacaataattaattaaacgccgactatatactataattaattaaacgctaactatatacacgaattaattaaacgccgactatatacaaaaattaattaaacgccgactatatactataattaattaaacgccgactatatacaataatttattaaacgccgactatatacaaaaattaattaaacgccgactatatacaaaaattaattaaacgccgactatatactataattaattaaacgccgactatatacaaaaattaattaaataccgactatatactataattaattaaacgacgactatatactataattaattaaacgccgactatatacacgaattaattaaacgccgactatatacaaaaattaattaaacgccgactatatactataattaattaaacgccgactatatactataattaattaaacgccgactatatacaataatttattaaacgccgactatatacaaaaattaattaaacgccgactatatacaaaaattaattaaacgccgactatatactataattaattaaacgccgactatatacaaaaattaattaaataccgactatatactataattaattaaacgacgactatatactataattaattaaataccgactatatacaataattaattaaacgccgactatatacaaaaattaattataccccgactatatacaaaaat

SEQ ID NO: 7723 - DNA, 1753 bp, Artificial Sequence
  chemically treated genomic DNA (Homo sapiens) CpG-island No: 7723
ttttgtttttttttttttgcggttttttggtttttcggtttttcggttttttcggttttttttttcgtttttttcggttttcgcgtcgggcgatttttgggtcggttttttttttaggacgggggtagttcgttgttgttgatggtatggtatgtgggtgatggttggggtgggcgggtacgcggagttttagcgtcgattgtgtgtagtgatttgttgagcgttgattgtgtgtagggattggttgagcgtcgattgtgtgtagtgatttgttgagcgtcgattgtgtgtagggattggttgagcgtcgattgtgtgttgtgattggttgagcgtcgattgtgtgttgtgattggttgagcgtcgattgtgtgtaggaattgattgagcgtcgattgtgtgttgtgatttgttgagtatcgattgtgtgtagggattggttgagcgtcgattgtgtgttgtgattggttgagcgtcgattgtgtgtagtgattggttgagcgtcgattgtgtgtagggattggttgagcgtcgattgtgtgtagggattgattgagcgtcgattgtgtgttgtgatttgttgagcgtcgattgtgtgtagggattggttgagcgtcgattgtgtgtagggattgattgagcgtcgattgtgtgtacggattcgttgagcgtcgattgtgtgtagggattgattgagcgtcgattgtgtgttgtgattggttgagcgtcgattgtgtgtagtgattggttgagcgtcgattgtgtgtacggattggttgagcgtcgattgtgtgtagggattgattgagcgtcgattgtgtgttgtgatttgttgagcgtcgattgtgtgtagggattggttgagcgtcgattgtgtgtagggattgattgagcgtcgattgtgtgtagggattcgttgagcgtcgattgtgtgtagggattgattgagcgtcgattgtgtgttgtgatttgttgagcgtcgattgtgtgtagggattggttgagcgtcgattgtgtgtacggattggttgagcgtcgattgtgtgtagtgattggttgagcgtcgattgtgtgttgtgattggttgagcgttgattgtgtgtacggattggttgagcgtcgattgtgtgtagggattggttgagcgtcgattgtgtgttgtgattggttgagcgtcgattgtgtgtagtgatttgttgagcgtcgattgtgtgtagggattggttgagcgtcgattgtgtgtagggattgattgagcgtcgattgtgtgttgtgattggttgagcgtcgattgtgtgtagggattggttgagtgtcgattgtgtgttgtgattggttgagcgacgattgtgtgttgtgattggttgagcgtcgattgtgtgtacggattggttgagcgtcgattgtgtgtagggattggttgagcgtcgattgtgtgttgtgattggttgagcgtcgattgtgtgttgtgattggttgagcgtcgattgtgtgtagtgatttgttgagcgtcgattgtgtgtagggattggttgagcgtcgattgtgtgtagggattgattgagcgtcgattgtgtgttgtgattggttgagcgtcgattgtgtgtagggattggttgagtgtcgattgtgtgttgtgattggttgagcgacgattgtgtgttgtgattggttgagtgtcgattgtgtgtagtgattgattgagcgtcgattgtgtgtagggattggttgtgtttcgattgtgtgtagggat

SEQ ID NO: 7724 - DNA, 1753 bp, Artificial Sequence
  chemically treated genomic DNA (Homo sapiens) CpG-island No: 7724
atccctacacacaatcgaaacacaaccaatccctacacacaatcgacgctcaatcaatcactacacacaatcgacactcaaccaatcacaacacacaatcgtcgctcaaccaatcacaacacacaatcgacactcaaccaatccctacacacaatcgacgctcaaccaatcacaacacacaatcgacgctcaatcaatccctacacacaatcgacgctcaaccaatccctacacacaatcgacgctcaacaaatcactacacacaatcgacgctcaaccaatcacaacacacaatcgacgctcaaccaatcacaacacacaatcgacgctcaaccaatccctacacacaatcgacgctcaaccaatccgtacacacaatcgacgctcaaccaatcacaacacacaatcgtcgctcaaccaatcacaacacacaatcgacactcaaccaatccctacacacaatcgacgctcaaccaatcacaacacacaatcgacgctcaatcaatccctacacacaatcgacgctcaaccaatccctacacacaatcgacgctcaacaaatcactacacacaatcgacgctcaaccaatcacaacacacaatcgacgctcaaccaatccctacacacaatcgacgctcaaccaatccgtacacacaatcaacgctcaaccaatcacaacacacaatcgacgctcaaccaatcactacacacaatcgacgctcaaccaatccgtacacacaatcgacgctcaaccaatccctacacacaatcgacgctcaacaaatcacaacacacaatcgacgctcaatcaatccctacacacaatcgacgctcaacgaatccctacacacaatcgacgctcaatcaatccctacacacaatcgacgctcaaccaatccctacacacaatcgacgctcaacaaatcacaacacacaatcgacgctcaatcaatccctacacacaatcgacgctcaaccaatccgtacacacaatcgacgctcaaccaatcactacacacaatcgacgctcaaccaatcacaacacacaatcgacgctcaatcaatccctacacacaatcgacgctcaacgaatccgtacacacaatcgacgctcaatcaatccctacacacaatcgacgctcaaccaatccctacacacaatcgacgctcaacaaatcacaacacacaatcgacgctcaatcaatccctacacacaatcgacgctcaaccaatccctacacacaatcgacgctcaaccaatcactacacacaatcgacgctcaaccaatcacaacacacaatcgacgctcaaccaatccctacacacaatcgatactcaacaaatcacaacacacaatcgacgctcaatcaattcctacacacaatcgacgctcaaccaatcacaacacacaatcgacgctcaaccaatcacaacacacaatcgacgctcaaccaatccctacacacaatcgacgctcaacaaatcactacacacaatcgacgctcaaccaatccctacacacaatcaacgctcaacaaatcactacacacaatcgacgctaaaactccgcgtacccgcccaccccaaccatcacccacataccataccatcaacaacaacgaactacccccgtcctaaaaaaaaaaccgacccaaaaatcgcccgacgcgaaaaccgaaaaaaacgaaaaaaaaaaccgaaaaaaccgaaaaaccgaaaaaccaaaaaaccgcaaaaaaaaaaaaacaaaa

SEQ ID NO: 7725 - DNA, 1061 bp, Artificial Sequence
  chemically treated genomic DNA (Homo sapiens) CpG-island No: 7725
gttttcggtcgggttagaatagggggtaggaggcgcgttttgtgcggtcggtggcggttttaggtgggtgcggtgcgttggtaggaagcggtagtacgattttcgattttgtatttggatttttttagtaacggattagttttttttgtcgatcgggtcggggagatcgcgtggtttagtggttgtagcggttatcggttcgggcgtgggggttttgagggtatcggcgcggtaggttattcgggtttcgcgggtcgtaagttcggagacgcgcgtgtttcgcgttggttgtttgattcggaatggcgtagttttttcgtttttagcgcgttggttgaaaggattcgagttattttcggggacggtcgggtcgaggttatttcgcggggcggttttgggcggggattcggattcgcggttggacgttcgtttcggggggggtaatgtttttttttcgatttcgcggtttttattagggcggtatatttcgtttttttttcgttttcgtaggcgtttagggtttataggttcggagcggttttcgtttttgtcggattatttagggtcgtttcgtcggaggggttttttcgttttcgagttttaggttacgttcggaaggttcggggttttcgcgttcggttacgttattcgttcggcggttttagggatttagcgtcggggttagcgtaggtttcgtttagcgttttcgttttttttagttggtcggttttcgggatcgcgttttcgttcgcgttttttacgttcgtattcgtatgggtagggcggttcggggttttttagtttcgagtcgcggttttttgaagcgcgttatttggacgtgcgttgttcgtagattttggacgagttgggtttgggcgttgcgcggcggaatcgattttgttttggatcgtaggtagtagttgatttcgcgttatcggtttgcgggcgagattttaggcgcgagacgggttgtgtgtgtgtgtgtgtgtgtgagagagagagagagagagagagagagagagagagagagagagagtgtgtgtgtgtgtgtgtgtgtgtgt

SEQ ID NO: 7726 - DNA, 1061 bp, Artificial Sequence
  chemically treated genomic DNA (Homo sapiens) CpG-island No: 7726
acacacacacacacacacacacacactctctctctctctctctctctctctctctctctctctctctctcacacacacacacacacacacaacccgtctcgcgcctaaaatctcgcccgcaaaccgataacgcgaaatcaactactacctacgatccaaaacaaaatcgattccgccgcgcaacgcccaaacccaactcgtccaaaatctacgaacaacgcacgtccaaataacgcgcttcaaaaaaccgcgactcgaaactaaaaaaccccgaaccgccctacccatacgaatacgaacgtaaaaaacgcgaacgaaaacgcgatcccgaaaaccgaccaactaaaaaaaacgaaaacgctaaacgaaacctacgctaaccccgacgctaaatccctaaaaccgccgaacgaataacgtaaccgaacgcgaaaaccccgaaccttccgaacgtaacctaaaactcgaaaacgaaaaaacccctccgacgaaacgaccctaaataatccgacaaaaacgaaaaccgctccgaacctataaaccctaaacgcctacgaaaacgaaaaaaaaacgaaatataccgccctaataaaaaccgcgaaatcgaaaaaaaaacattaccccccccgaaacgaacgtccaaccgcgaatccgaatccccgcccaaaaccgccccgcgaaataacctcgacccgaccgtccccgaaaataactcgaatcctttcaaccaacgcgctaaaaacgaaaaaactacgccattccgaatcaaacaaccaacgcgaaacacgcgcgtctccgaacttacgacccgcgaaacccgaataacctaccgcgccgataccctcaaaacccccacgcccgaaccgataaccgctacaaccactaaaccacgcgatctccccgacccgatcgacaaaaaaaactaatccgttactaaaaaaatccaaatacaaaatcgaaaatcgtactaccgcttcctaccaacgcaccgcacccacctaaaaccgccaccgaccgcacaaaacgcgcctcctaccccctattctaacccgaccgaaaac

SEQ ID NO: 7727 - DNA, 1061 bp, Artificial Sequence
  chemically treated genomic DNA (Homo sapiens) CpG-island No: 7727
atatatatatatatatatatatatatttttttttttttttttttttttttttttttttttttttttttttatatatatatatatatatatagttcgtttcgcgtttgaggtttcgttcgtaggtcggtggcgcggggttagttgttgtttgcggtttaggatagggtcggtttcgtcgcgtagcgtttaggtttagttcgtttagagtttgcggatagcgtacgtttaggtaacgcgttttaaggggtcgcggttcggagttgggggatttcgggtcgttttgtttatacgagtgcgagcgtggagagcgcgggcgggggcgcggtttcgggggtcggttagttggagggggcgggagcgttgggcggggtttgcgttgatttcggcgttgagtttttggggtcgtcgggcggatggcgtggtcggacgcgggggtttcgggtttttcgggcgtgatttagggttcgggggcggggaggttttttcggcggggcggttttgggtggttcggtagaggcggaggtcgtttcgagtttgtgagttttgggcgtttgcggaggcggggagagggcggggtgtgtcgttttggtggggatcgcggggtcggagaggggatattgtttttttcgaggcgaacgtttaatcgcgggttcgggttttcgtttaaggtcgtttcgcgaggtggtttcggttcggtcgttttcgagggtggttcggatttttttaattagcgcgttggaggcgaaggggttgcgttatttcgggttaggtagttaacgcgggatacgcgcgttttcgagtttgcggttcgcgaaattcgggtgatttatcgcgtcggtgtttttaaagtttttacgttcgggtcggtggtcgttgtagttattgagttacgcggttttttcggttcggtcggtagaaggagttggttcgttattagaaaagtttagatgtaaagtcgggggtcgtgttgtcgttttttgttagcgtatcgtatttatttggggtcgttatcgatcgtataggacgcgttttttattttttgttttggttcggtcgagagt

SEQ ID NO: 7728 - DNA, 1061 bp, Artificial Sequence
  chemically treated genomic DNA (Homo sapiens) CpG-island No: 7728
actctcgaccgaaccaaaacaaaaaataaaaaacgcgtcctatacgatcgataacgaccccaaataaatacgatacgctaacaaaaaacgacaacacgacccccgactttacatctaaacttttctaataacgaaccaactccttctaccgaccgaaccgaaaaaaccgcgtaactcaataactacaacgaccaccgacccgaacgtaaaaactttaaaaacaccgacgcgataaatcacccgaatttcgcgaaccgcaaactcgaaaacgcgcgtatcccgcgttaactacctaacccgaaataacgcaaccccttcgcctccaacgcgctaattaaaaaaatccgaaccaccctcgaaaacgaccgaaccgaaaccacctcgcgaaacgaccttaaacgaaaacccgaacccgcgattaaacgttcgcctcgaaaaaaacaatatcccctctccgaccccgcgatccccaccaaaacgacacaccccgccctctccccgcctccgcaaacgcccaaaactcacaaactcgaaacgacctccgcctctaccgaaccacccaaaaccgccccgccgaaaaaacctccccgcccccgaaccctaaatcacgcccgaaaaacccgaaacccccgcgtccgaccacgccatccgcccgacgaccccaaaaactcaacgccgaaatcaacgcaaaccccgcccaacgctcccgccccctccaactaaccgacccccgaaaccgcgcccccgcccgcgctctccacgctcgcactcgtataaacaaaacgacccgaaatcccccaactccgaaccgcgaccccttaaaacgcgttacctaaacgtacgctatccgcaaactctaaacgaactaaacctaaacgctacgcgacgaaaccgaccctatcctaaaccgcaaacaacaactaaccccgcgccaccgacctacgaacgaaacctcaaacgcgaaacgaactatatatatatatatatatataaaaaaaaaaaaaaaaaaaaaaaaaaaaaaaaaaaaaaaaaaaaatatatatatatatatatatatatat

SEQ ID NO: 7729 - DNA, 1059 bp, Artificial Sequence
  chemically treated genomic DNA (Homo sapiens) CpG-island No: 7729
tcgggcggggtaggcgggggcgcggcgagagtcgcggagttttttttatgggtgggggggcgggggcggtcgggtttcgttttcgggggatcggggcgcgtttcgttaatgggtagtcgggcgcggggcggggtcgcggggtcgtcgtttaaagaaatttgttgcgggtttcgtagcgggattcgagtttcggcggcggcggcggcggcggtaggggcgagggtcggggttatcgcgcggcgatttcgggtttcggagcgatcgtagggtagtttcgggcgtcggtttcggtgcgcgttttttgtgcgcgttttttcgcgcgcggtttcgatgttggatatgagcgaggttcgtttttagtcgttttgtagttcgttcggtatcgttagttttatgtcgtacgtggaggattcggattcggacgcgtcgtcgtttttcgtcggtttcgagggtttgggtcgcgcgggggtcgcggtggggggcgttcggggcgattcggcggaggcggcggacgagcgtttttcggtttgtattcgcgacgtcgtgtcgtaggtgtttaagggttacgattggagtttggtgtttatgtcggtgcgcggcggcggcggcggcgcgtttaaagttaagtcgtatgtgaagcggtttatgaacgtatttatggtgtgggcgtaggcggcgcgtcgtaagttggtcgattagtattcgtatttgtataacgtcgagtttagtaagacgttgggtaagttgtggcggtgagtgtcggcgtttcgggggcggggttcgggattttggtcgtttttggtttcggattgcgagcgggggtttggagggcgtagagttcgcggaggtggtggttatacgtaggtttcgggttttgtatttcgggcgggtgttagggcggggttttagtggaaaaatattttttggttagtcggggttcggcgttagttatgggagtcgggattcgcggagggtagcgtttggggtgtgtattttcgtggcgggtgcgttttggagttagtttttttggcggggaatattttgcggagggttatggtt

SEQ ID NO: 7730 - DNA, 1059 bp, Artificial Sequence
  chemically treated genomic DNA (Homo sapiens) CpG-island No: 7730
aaccataaccctccgcaaaatattccccgccaaaaaaactaactccaaaacgcacccgccacgaaaatacacaccccaaacgctaccctccgcgaatcccgactcccataactaacgccgaaccccgactaaccaaaaaatatttttccactaaaaccccgccctaacacccgcccgaaatacaaaacccgaaacctacgtataaccaccacctccgcgaactctacgccctccaaacccccgctcgcaatccgaaaccaaaaacgaccaaaatcccgaaccccgcccccgaaacgccgacactcaccgccacaacttacccaacgtcttactaaactcgacgttatacaaatacgaatactaatcgaccaacttacgacgcgccgcctacgcccacaccataaatacgttcataaaccgcttcacatacgacttaactttaaacgcgccgccgccgccgccgcgcaccgacataaacaccaaactccaatcgtaacccttaaacacctacgacacgacgtcgcgaatacaaaccgaaaaacgctcgtccgccgcctccgccgaatcgccccgaacgccccccaccgcgacccccgcgcgacccaaaccctcgaaaccgacgaaaaacgacgacgcgtccgaatccgaatcctccacgtacgacataaaactaacgataccgaacgaactacaaaacgactaaaaacgaacctcgctcatatccaacatcgaaaccgcgcgcgaaaaaacgcgcacaaaaaacgcgcaccgaaaccgacgcccgaaactaccctacgatcgctccgaaacccgaaatcgccgcgcgataaccccgaccctcgcccctaccgccgccgccgccgccgccgaaactcgaatcccgctacgaaacccgcaacaaatttctttaaacgacgaccccgcgaccccgccccgcgcccgactacccattaacgaaacgcgccccgatcccccgaaaacgaaacccgaccgcccccgcccccccacccataaaaaaaactccgcgactctcgccgcgcccccgcctaccccgcccga

SEQ ID NO: 7731 - DNA, 1059 bp, Artificial Sequence
  chemically treated genomic DNA (Homo sapiens) CpG-island No: 7731
agttatggtttttcgtagggtgtttttcgttaggagaattggttttagagcgtattcgttacgagggtgtatattttaggcgttgtttttcgcggatttcgatttttatagttggcgtcggatttcggttggttagaggatgtttttttattgggatttcgttttgatattcgttcggggtgtagagttcggagtttgcgtgtggttattattttcgcgagttttgcgttttttaggttttcgttcgtagttcgagattaggggcggttaaggtttcgaatttcgttttcggggcgtcggtatttatcgttatagtttgtttagcgttttgttgagttcggcgttgtgtaggtgcgggtattggtcggttagtttgcggcgcgtcgtttgcgtttatattatgaatgcgtttatgggtcgttttatatgcggtttggttttgagcgcgtcgtcgtcgtcgtcgcgtatcggtatgggtattagattttagtcgtagtttttgagtatttgcgatacggcgtcgcggatgtaggtcgggaagcgttcgttcgtcgttttcgtcgggtcgtttcgggcgttttttatcgcgattttcgcgcggtttaggttttcggagtcggcgggagacggcggcgcgttcgagttcgagttttttacgtgcgatatggagttggcggtgtcggacgggttgtagggcggttgggagcgggtttcgtttatgtttagtatcggggtcgcgcgcggaggggcgcgtataggagacgcgtatcggggtcggcgttcggggttgttttgcggtcgtttcgggattcgaggtcgtcgcgcggtggtttcgattttcgtttttgtcgtcgtcgtcgtcgtcgtcgaggttcgggtttcgttgcgggattcgtaataagtttttttaagcggcggtttcgcggtttcgtttcgcgttcggttatttattggcggagcgcgtttcgatttttcggaggcggagttcggtcgttttcgtttttttatttataaagaaagtttcgcggttttcgtcgcgttttcgtttgtttcgttcgg

SEQ ID NO: 7732 - DNA, 1059 bp, Artificial Sequence
  chemically treated genomic DNA (Homo sapiens) CpG-island No: 7732
ccgaacgaaacaaacgaaaacgcgacgaaaaccgcgaaactttctttataaataaaaaaacgaaaacgaccgaactccgcctccgaaaaatcgaaacgcgctccgccaataaataaccgaacgcgaaacgaaaccgcgaaaccgccgcttaaaaaaacttattacgaatcccgcaacgaaacccgaacctcgacgacgacgacgacgacgacaaaaacgaaaatcgaaaccaccgcgcgacgacctcgaatcccgaaacgaccgcaaaacaaccccgaacgccgaccccgatacgcgtctcctatacgcgcccctccgcgcgcgaccccgatactaaacataaacgaaacccgctcccaaccgccctacaacccgtccgacaccgccaactccatatcgcacgtaaaaaactcgaactcgaacgcgccgccgtctcccgccgactccgaaaacctaaaccgcgcgaaaatcgcgataaaaaacgcccgaaacgacccgacgaaaacgacgaacgaacgcttcccgacctacatccgcgacgccgtatcgcaaatactcaaaaactacgactaaaatctaatacccataccgatacgcgacgacgacgacgacgcgctcaaaaccaaaccgcatataaaacgacccataaacgcattcataatataaacgcaaacgacgcgccgcaaactaaccgaccaatacccgcacctacacaacgccgaactcaacaaaacgctaaacaaactataacgataaataccgacgccccgaaaacgaaattcgaaaccttaaccgcccctaatctcgaactacgaacgaaaacctaaaaaacgcaaaactcgcgaaaataataaccacacgcaaactccgaactctacaccccgaacgaatatcaaaacgaaatcccaataaaaaaacatcctctaaccaaccgaaatccgacgccaactataaaaatcgaaatccgcgaaaaacaacgcctaaaatatacaccctcgtaacgaatacgctctaaaaccaattctcctaacgaaaaacaccctacgaaaaaccataact

SEQ ID NO: 7733 - DNA, 663 bp, Artificial Sequence
  chemically treated genomic DNA (Homo sapiens) CpG-island No: 7733
aggtcgggtcggtaggagcgggaaagaggggtcgttaggcgttcggggtttgtagggtcgtagaggttagaaggggtaggtggggtcgtcgggcgtcgcgtgtcgacgtgtttacgtcgtttttttcgtgggtcggcgcgagggtttgtatagtttcgattatttttaggcggtgtttttcgatacggagttggtgaatttggacggcgttttcgatttggtcgcgggtcgttttttttgtacggtgttcggcgtttatttttttagttttaacgtgtatatttggaattataaggagatttatttgtatattatgttgaatcggcggttcgcggtcgtgttttacgcgtagtttagcgagcgtagcgttatgtaggtttagagtttgatgttgttgttggcggcgggcgacgtcgtttgggtgcgtatgttttagcgcgatcgggataacgttatttacggcgagtacggagatttttatattatttttagcggttatttggttaagtcggtcgtcgagttgtagtcgggtgaggggtttcgcggttgagtatcgggcgcgcgcgcgcgtgtgtgtgtgtgtttgtgtgtgtgtgtgtgggggtgggtgtgggtgtgtgtgtgtgggatggattgaagattattgcgagattaacgaagaga

SEQ ID NO: 7734 - DNA, 663 bp, Artificial Sequence
  chemically treated genomic DNA (Homo sapiens) CpG-island No: 7734
tctcttcgttaatctcgcaataatcttcaatccatcccacacacacacacccacacccacccccacacacacacacacaaacacacacacacacgcgcgcgcgcgcccgatactcaaccgcgaaacccctcacccgactacaactcgacgaccgacttaaccaaataaccgctaaaaataatataaaaatctccgtactcgccgtaaataacgttatcccgatcgcgctaaaacatacgcacccaaacgacgtcgcccgccgccaacaacaacatcaaactctaaacctacataacgctacgctcgctaaactacgcgtaaaacacgaccgcgaaccgccgattcaacataatatacaaataaatctccttataattccaaatatacacgttaaaactaaaaaaataaacgccgaacaccgtacaaaaaaaacgacccgcgaccaaatcgaaaacgccgtccaaattcaccaactccgtatcgaaaaacaccgcctaaaaataatcgaaactatacaaaccctcgcgccgacccacgaaaaaaacgacgtaaacacgtcgacacgcgacgcccgacgaccccacctaccccttctaacctctacgaccctacaaaccccgaacgcctaacgacccctctttcccgctcctaccgacccgacct

SEQ ID NO: 7735 - DNA, 663 bp, Artificial Sequence
  chemically treated genomic DNA (Homo sapiens) CpG-island No: 7735
ttttttcgttggtttcgtagtggtttttagtttattttatatatatatatttatatttatttttatatatatatatatagatatatatatatacgcgcgcgcgcgttcggtgtttagtcgcggggttttttattcggttatagttcggcggtcggtttgattaggtggtcgttgaaggtgatgtagaggttttcgtgttcgtcgtagatggcgttgtttcggtcgcgttggaatatgcgtatttagacggcgtcgttcgtcgttagtagtagtattaggttttgggtttgtatgacgttgcgttcgttgggttgcgcgtagagtacggtcgcgggtcgtcggtttagtatgatgtgtaggtaggtttttttgtagttttaggtgtgtacgttgaggttgaggaagtagacgtcgggtatcgtgtagaggaagcggttcgcggttaggtcgaaggcgtcgtttaggtttattagtttcgtgtcgaagggtatcgtttggaagtggtcggagttgtgtaggttttcgcgtcggtttacggagaaggcggcgtaggtacgtcggtacgcggcgttcggcggttttatttgttttttttggtttttgcggttttgtaggtttcgggcgtttggcggtttttttttttcgtttttgtcggttcgattt

SEQ ID NO: 7736 - DNA, 663 bp, Artificial Sequence
  chemically treated genomic DNA (Homo sapiens) CpG-island No: 7736
aaatcgaaccgacaaaaacgaaaaaaaaaaaccgccaaacgcccgaaacctacaaaaccgcaaaaaccaaaaaaaacaaataaaaccgccgaacgccgcgtaccgacgtacctacgccgccttctccgtaaaccgacgcgaaaacctacacaactccgaccacttccaaacgatacccttcgacacgaaactaataaacctaaacgacgccttcgacctaaccgcgaaccgcttcctctacacgatacccgacgtctacttcctcaacctcaacgtacacacctaaaactacaaaaaaacctacctacacatcatactaaaccgacgacccgcgaccgtactctacgcgcaacccaacgaacgcaacgtcatacaaacccaaaacctaatactactactaacgacgaacgacgccgtctaaatacgcatattccaacgcgaccgaaacaacgccatctacgacgaacacgaaaacctctacatcaccttcaacgaccacctaatcaaaccgaccgccgaactataaccgaataaaaaaccccgcgactaaacaccgaacgcgcgcgcgcgtatatatatatatctatatatatatatataaaaataaatataaatatatatatataaaataaactaaaaaccactacgaaaccaacgaaaaaa

SEQ ID NO: 7737 - DNA, 567 bp, Artificial Sequence
  chemically treated genomic DNA (Homo sapiens) CpG-island No: 7737
  unsure (112, 169, 249, 256, 261, 288, 418, 464, 509, 519, 532, 541)
  unsure (546, 549..550, 559)
cggtcgtagaggcgtattatggggaggaatttcgttaacgtgtgggaagtcgttcgttgggtacgcggtgtattagtcggcgtattttgtgtgaggcggttgggcgataggntttcgtgggagtaattatcggggaaatcgttttgggaacgtaatttttcgtttgggngatatgttcgtatgaagaggagatttcgtgttcgatcggttggcgttgcgtcgtattatttacgtgtgtagcgattaggnttggtanagcgnttttacggaaggaatttttttcggttngggtagtagtttcgtatgttacgaagggttttcgttttcgaattgggtgcggtgtgggggtgttatattcgcgtgttggtatgtaaatcgggtgggaaaattttttgtagggaaacgatatcgcggtggnttggtgaaagtggttcgataggtaaagaaggtttttcggttttcgntttggggtgtagtttgtcgtgttaagcgtattggtggggaaaagnaagtaagttngaaataaatttgncgggcgaanggaanttnncgttggatnaggggttg

SEQ ID NO: 7738 - DNA, 567 bp, Artificial Sequence
  chemically treated genomic DNA (Homo sapiens) CpG-island No: 7738
  unsure (9, 18..19, 22, 27, 36, 49, 59, 104, 150, 280, 307, 312, 319)
  unsure (399, 456)
caacccctnatccaacgnnaanttccnttcgcccgncaaatttatttcnaacttacttncttttccccaccaatacgcttaacacgacaaactacaccccaaancgaaaaccgaaaaaccttctttacctatcgaaccactttcaccaanccaccgcgatatcgtttccctacaaaaaattttcccacccgatttacataccaacacgcgaatataacacccccacaccgcacccaattcgaaaacgaaaacccttcgtaacatacgaaactactacccnaaccgaaaaaaattccttccgtaaaancgctntaccaancctaatcgctacacacgtaaataatacgacgcaacgccaaccgatcgaacacgaaatctcctcttcatacgaacatatcncccaaacgaaaaattacgttcccaaaacgatttccccgataattactcccacgaaancctatcgcccaaccgcctcacacaaaatacgccgactaatacaccgcgtacccaacgaacgacttcccacacgttaacgaaattcctccccataatacgcctctacgaccg

SEQ ID NO: 7739 - DNA, 567 bp, Artificial Sequence
  chemically treated genomic DNA (Homo sapiens) CpG-island No: 7739
  unsure (9, 18..19, 22, 27, 36, 49, 59, 104, 150, 280, 307, 312, 319)
  unsure (399, 456)
taatttttnatttaacgnnganttttnttcgttcgntaggtttgttttnaatttgtttntttttttttattagtgcgtttggtacgataagttgtattttaagncgaaagtcggagggttttttttgtttatcgaattatttttattaanttatcgcggtgtcgtttttttgtaaggggtttttttattcggtttgtatgttagtacgcggatgtggtatttttatatcgtatttaattcgaagacgggggtttttcgtgatatgcgagattgttatttngatcgagggaggtttttttcgtaggancgttntgttagntttggtcgttatatacgtgggtggtgcggcgtaacgttagtcggtcggatacggggttttttttttatgcgagtatattntttaagcgaagggttgcgtttttagaacggttttttcggtggttgtttttacgaggntttgtcgtttaatcgttttatataaggtgcgtcgattggtatatcgcgtgtttagcgggcggttttttatacgttggcggagtttttttttatggtgcgtttttacggtcg

SEQ ID NO: 7740 - DNA, 567 bp, Artificial Sequence
  chemically treated genomic DNA (Homo sapiens) CpG-island No: 7740
  unsure (112, 169, 249, 256, 261, 288, 418, 464, 509, 519, 532, 541)
  unsure (546, 549..550, 559)
cgaccgtaaaaacgcaccataaaaaaaaactccgccaacgtataaaaaaccgcccgctaaacacgcgatataccaatcgacgcaccttatataaaacgattaaacgacaaancctcgtaaaaacaaccaccgaaaaaaccgttctaaaaacgcaacccttcgcttaaanaatatactcgcataaaaaaaaaaccccgtatccgaccgactaacgttacgccgcaccacccacgtatataacgaccaaanctaacanaacgntcctacgaaaaaaacctccctcgatcnaaataacaatctcgcatatcacgaaaaacccccgtcttcgaattaaatacgatataaaaataccacatccgcgtactaacatacaaaccgaataaaaaaaccccttacaaaaaaacgacaccgcgataanttaataaaaataattcgataaacaaaaaaaaccctccgactttcgncttaaaatacaacttatcgtaccaaacgcactaataaaaaaaaanaaacaaattnaaaacaaacctancgaacgaanaaaantcnncgttaaatnaaaaatta

SEQ ID NO: 7741 - DNA, 736 bp, Artificial Sequence
  chemically treated genomic DNA (Homo sapiens) CpG-island No: 7741
attgtcgtttcggcggatgttttttcgtttttgcgaatgtagggtgtcgtttatgttacgcgtattgtcgaagattttcgcgatcgtggttagtatgtgttgttgattatggatttttttattcgttacgcgatggtttagcgtgaaattgcgttggcgattggcgaatttttcgttattaaaggttatttatcgtcggtgtttgttaaattatcggtattggtcgagcgtgtcggaaatggtattagcggcggcggttcgattatcgcgttttatatcgtgtttattgaaggcgatgattagtaggattcgattgtcgatttcgcgcgggcgattttcgacggttatattgtgttgtttcgttattggcggaagtcgggtattattcggttatcgatattgaagcgttattagtcgcgtaatgacggtttgattagtgagtaatattacgcgcgagtgcgtatttttaaatagttgttgtttagtttttagcgtaatcgcgatttggttagcgtcggcgcgtatgttaaaggtagcgattcgatttttataaagttatcgttttgtggtcgtagttggagggttatttgtaataaggtatttttgaacgcgcggattgggaagcgtttttttagggttgagcgtattttttttatagtgttataatttagagatacggcgatggtagaatatgtgcgttaggattttaagatcggtaataagagtaagatgcgtt

SEQ ID NO: 7742 - DNA, 736 bp, Artificial Sequence
  chemically treated genomic DNA (Homo sapiens) CpG-island No: 7742
aacgcatcttactcttattaccgatcttaaaatcctaacgcacatattctaccatcgccgtatctctaaattataacactataaaaaaaatacgctcaaccctaaaaaaacgcttcccaatccgcgcgttcaaaaataccttattacaaataaccctccaactacgaccacaaaacgataactttataaaaatcgaatcgctacctttaacatacgcgccgacgctaaccaaatcgcgattacgctaaaaactaaacaacaactatttaaaaatacgcactcgcgcgtaatattactcactaatcaaaccgtcattacgcgactaataacgcttcaatatcgataaccgaataatacccgacttccgccaataacgaaacaacacaatataaccgtcgaaaatcgcccgcgcgaaatcgacaatcgaatcctactaatcatcgccttcaataaacacgatataaaacgcgataatcgaaccgccgccgctaataccatttccgacacgctcgaccaataccgataatttaacaaacaccgacgataaataacctttaataacgaaaaattcgccaatcgccaacgcaatttcacgctaaaccatcgcgtaacgaataaaaaaatccataatcaacaacacatactaaccacgatcgcgaaaatcttcgacaatacgcgtaacataaacgacaccctacattcgcaaaaacgaaaaaacatccgccgaaacgacaat

SEQ ID NO: 7743 - DNA, 736 bp, Artificial Sequence
  chemically treated genomic DNA (Homo sapiens) CpG-island No: 7743
ggcgtattttatttttgttgtcgattttaaggttttagcgtatatgttttgttatcgtcgtatttttgggttatgatattgtggggaagatacgtttagttttggagagacgttttttagttcgcgcgtttaaaaatgttttgttgtaaatagttttttagttgcggttatagggcgatggttttatggagatcggatcgttgtttttggtatacgcgtcgacgttaattagatcgcggttacgttgaaaattgaataatagttgtttgaaggtgcgtattcgcgcgtaatgttgtttattgattaagtcgttattgcgcggttgatgacgttttaatatcgatagtcggatagtgttcggttttcgttagtggcgagatagtataatgtgatcgtcgaggatcgttcgcgcggagtcggtaatcggattttgttggttatcgtttttagtgagtacggtataaaacgcggtaatcgagtcgtcgtcgttaatgttattttcggtacgttcgattagtgtcggtaatttggtaaatatcgacggtggataatttttggtggcggggggttcgttaatcgttagcgtaattttacgttgggttatcgcgtagcgggtgagggagtttataattagtaatatatgttgattacgatcgcgaaaattttcggtaatgcgcgtggtataggcggtattttgtattcgtaggagcggagaaatattcgtcggagcggtaat

SEQ ID NO: 7744 - DNA, 736 bp, Artificial Sequence
  chemically treated genomic DNA (Homo sapiens) CpG-island No: 7744
attaccgctccgacgaatatttctccgctcctacgaatacaaaataccgcctataccacgcgcattaccgaaaattttcgcgatcgtaatcaacatatattactaattataaactccctcacccgctacgcgataacccaacgtaaaattacgctaacgattaacgaaccccccgccaccaaaaattatccaccgtcgatatttaccaaattaccgacactaatcgaacgtaccgaaaataacattaacgacgacgactcgattaccgcgttttataccgtactcactaaaaacgataaccaacaaaatccgattaccgactccgcgcgaacgatcctcgacgatcacattatactatctcgccactaacgaaaaccgaacactatccgactatcgatattaaaacgtcatcaaccgcgcaataacgacttaatcaataaacaacattacgcgcgaatacgcaccttcaaacaactattattcaattttcaacgtaaccgcgatctaattaacgtcgacgcgtataccaaaaacaacgatccgatctccataaaaccatcgccctataaccgcaactaaaaaactatttacaacaaaacatttttaaacgcgcgaactaaaaaacgtctctccaaaactaaacgtatcttccccacaatatcataacccaaaaatacgacgataacaaaacatatacgctaaaaccttaaaatcgacaacaaaaataaaatacgcc

SEQ ID NO: 7745 - DNA, 1244 bp, Artificial Sequence
  chemically treated genomic DNA (Homo sapiens) CpG-island No: 7745
tcgaggtatcgagatcggtatacgtagttattgttagcgtgcgggggatcggcgtggcggttatgattaattgatgcggatggaagttttgttgttggttttttttttataatgttagacgttgatgtacgttaaaacgatgttgttcgtcgataattattagcgttaggtcgttaaattgtatttgtttttggaagatggcgtgtgtatcgataattatttgtatttgatcgttggcgatggttttttgttgtgttagtcgtgttttatttttttgtttatcggcgagttagtttatttcgatatcgagcggtgtaaattagttgcggaagttattggcgtgttgttcggcgagtaattcggttggtgttattaatgttatttgtttgtcgtgggtaatcgtacgtaacgcggcgagggcggcgattagcgttttatcggaatttatatcgttttgtattagacgtattatcggtatatttagcgttatatcgcgttcgattttcgttattacgcgtgtttgtgcgttcgttggtttgaacggtaaggcggcgaggagttattttttagcgtgttattggcgtttagcggttgggtatgaaaacgttgtgtttcggtacgtaaggttaatatgttgaggttgtgcgttagtagtttttttagaattagacgacgttgcgtcggatgttgttcggtttttagatcgttaagttgtagcgtcggtggcgggcggtgtaaagtgcgtaacgttttcggtagcgttattattttttgtgatagtttcggcggtaggagttttttaatggcgtaggtgtcgagtagatttagcgtttggtcggttaatttacgtagcgtggtttgttttacgtttttcgttgttggataaatcggcgtgagcgttttttgtaattttggcgtgttgagatcgttttgtacgcggtatttcgggtggattattttcgtattatatttatcgcgttttgtttcgttataagttagtatacggcggttcgtcgttaggttattttttattgtcgcgttgaaattgaaaaagcgtatggtgaggatgtcggaatcgtcgttgatttggtaggttattattcgtcgatcgtcgaaggagatattgtagtttagtatttcgttttttatcgtggtataaacgttcggtagtagtttttcgatggggtagagatgggtgcgattttcgtagcgtaggggaaggtgtaagagtagattttgtacgg

SEQ ID NO: 7746 - DNA, 1244 bp, Artificial Sequence
  chemically treated genomic DNA (Homo sapiens) CpG-island No: 7746
ccgtacaaaatctactcttacaccttcccctacgctacgaaaatcgcacccatctctaccccatcgaaaaactactaccgaacgtttataccacgataaaaaacgaaatactaaactacaatatctccttcgacgatcgacgaataataacctaccaaatcaacgacgattccgacatcctcaccatacgctttttcaatttcaacgcgacaataaaaaataacctaacgacgaaccgccgtatactaacttataacgaaacaaaacgcgataaatataatacgaaaataatccacccgaaataccgcgtacaaaacgatctcaacacgccaaaattacaaaaaacgctcacgccgatttatccaacaacgaaaaacgtaaaacaaaccacgctacgtaaattaaccgaccaaacgctaaatctactcgacacctacgccattaaaaaactcctaccgccgaaactatcacaaaaaataataacgctaccgaaaacgttacgcactttacaccgcccgccaccgacgctacaacttaacgatctaaaaaccgaacaacatccgacgcaacgtcgtctaattctaaaaaaactactaacgcacaacctcaacatattaaccttacgtaccgaaacacaacgttttcatacccaaccgctaaacgccaataacacgctaaaaaataactcctcgccgccttaccgttcaaaccaacgaacgcacaaacacgcgtaataacgaaaatcgaacgcgatataacgctaaatataccgataatacgtctaatacaaaacgatataaattccgataaaacgctaatcgccgccctcgccgcgttacgtacgattacccacgacaaacaaataacattaataacaccaaccgaattactcgccgaacaacacgccaataacttccgcaactaatttacaccgctcgatatcgaaataaactaactcgccgataaacaaaaaaataaaacacgactaacacaacaaaaaaccatcgccaacgatcaaatacaaataattatcgatacacacgccatcttccaaaaacaaatacaatttaacgacctaacgctaataattatcgacgaacaacatcgttttaacgtacatcaacgtctaacattataaaaaaaaaaccaacaacaaaacttccatccgcatcaattaatcataaccgccacgccgatcccccgcacgctaacaataactacgtataccgatctcgatacctcga

SEQ ID NO: 7747 - DNA, 1244 bp, Artificial Sequence
  chemically treated genomic DNA (Homo sapiens) CpG-island No: 7747
tcgtgtaggatttatttttatatttttttttgcgttacgaagatcgtatttatttttattttatcggagaattattgtcgggcgtttatgttacggtggaaggcgaagtgttgaattgtaatatttttttcggcggtcggcggatgatgatttgttagattagcgacggtttcggtatttttattatgcgtttttttaattttagcgcggtaatgaaaaatagtttggcggcgggtcgtcgtgtattggtttatggcgaagtaaagcgcggtaaatatggtgcggagatgatttattcggaatatcgcgtgtagggcgattttagtacgttagaattataggaaacgtttacgtcggtttatttaataacggaaggcgtaaagtaggttacgttgcgtaaattaatcgattaggcgttggatttgttcgatatttgcgttattgaagaatttttgtcgtcggaattgttataaggaatgatgacgttatcggaagcgttgcgtattttgtatcgttcgttatcgacgttatagtttagcgatttggaaatcgggtagtattcggcgtaacgtcgtttgattttggaagaattgttggcgtataattttagtatgttagttttacgtgtcggagtatagcgtttttatgtttagtcgttgagcgttaatgatacgttgaaaaataatttttcgtcgttttatcgtttaagttaacgggcgtataggtacgcgtagtggcggagatcgagcgcgatatggcgttggatgtgtcgatgatgcgtttggtgtagggcgatgtaggtttcggtaaaacgttggtcgtcgttttcgtcgcgttgcgtgcgattgtttacggtaaataggtagtattgatggtattaatcgaattattcgtcgagtagtacgttaataattttcgtaattggtttgtatcgttcggtatcgaagtgggttggttcgtcggtaagtagaaaggtaaagtacggttggtatagtaggaagttatcgttagcggttaggtgtagatgattgtcggtatatacgttattttttaggaataggtgtagtttaacggtttggcgttggtgattatcgacgaatagtatcgttttggcgtgtattagcgtttggtattgtgggagaaaggttagtagtagggtttttattcgtattagttgattatgatcgttacgtcgatttttcgtacgttggtaatgattgcgtatgtcgatttcgatatttcgg

SEQ ID NO: 7748 - DNA, 1244 bp, Artificial Sequence
  chemically treated genomic DNA (Homo sapiens) CpG-island No: 7748
ccgaaatatcgaaatcgacatacgcaatcattaccaacgtacgaaaaatcgacgtaacgatcataatcaactaatacgaataaaaaccctactactaacctttctcccacaataccaaacgctaatacacgccaaaacgatactattcgtcgataatcaccaacgccaaaccgttaaactacacctattcctaaaaaataacgtatataccgacaatcatctacacctaaccgctaacgataacttcctactataccaaccgtactttacctttctacttaccgacgaaccaacccacttcgataccgaacgatacaaaccaattacgaaaattattaacgtactactcgacgaataattcgattaataccatcaatactacctatttaccgtaaacaatcgcacgcaacgcgacgaaaacgacgaccaacgttttaccgaaacctacatcgccctacaccaaacgcatcatcgacacatccaacgccatatcgcgctcgatctccgccactacgcgtacctatacgcccgttaacttaaacgataaaacgacgaaaaattatttttcaacgtatcattaacgctcaacgactaaacataaaaacgctatactccgacacgtaaaactaacatactaaaattatacgccaacaattcttccaaaatcaaacgacgttacgccgaatactacccgatttccaaatcgctaaactataacgtcgataacgaacgatacaaaatacgcaacgcttccgataacgtcatcattccttataacaattccgacgacaaaaattcttcaataacgcaaatatcgaacaaatccaacgcctaatcgattaatttacgcaacgtaacctactttacgccttccgttattaaataaaccgacgtaaacgtttcctataattctaacgtactaaaatcgccctacacgcgatattccgaataaatcatctccgcaccatatttaccgcgctttacttcgccataaaccaatacacgacgacccgccgccaaactatttttcattaccgcgctaaaattaaaaaaacgcataataaaaataccgaaaccgtcgctaatctaacaaatcatcatccgccgaccgccgaaaaaaatattacaattcaacacttcgccttccaccgtaacataaacgcccgacaataattctccgataaaataaaaataaatacgatcttcgtaacgcaaaaaaaaatataaaaataaatcctacacga

SEQ ID NO: 7749 - DNA, 1059 bp, Artificial Sequence
  chemically treated genomic DNA (Homo sapiens) CpG-island No: 7749
acgtcggttgtcgatgtcgcgcgtcggggtatgttagaggtaggttatggcgacgatgtcggttataatatcggttacgttatcggtattgaagtttatgaagattcgcgttggttatcgcgggatattacgacgttatagttaggtatgttattgatcgtggagtcggggatttatttgttagggtaagggggcgtgcgtatcgaagatgttgtgttggttatttcgtaaggcgtagaagtgttttacgttatgtcgtaaatagtgttgtttacgggagaggtataatggatttatcgttattaaaagcgttgagcgaggtagatgcgatcgttttttcggaataggaagtgcggtagattttgttggaagaagcggatcgtttgtaaaaagaagtgcgagttgatggtttgggatcggtgttgattcgtttgaatgaatcgataggttcgaaggtgatgatttgtgcgtatatggacgaagtgggatttatggtgcgtagtatttttcgcgaaggggcgattgatgtgttgtcggttggtaacgtacgtatggttgttcgttagttgtagtcggtgcgtattattattcgtgaagagtgtaaaattttaggtttgtttgacggcgatcggtaggggaatgacgttagcgttatgcgcgtggatattggtgcgcgtttttatgacgaagtgatgtaggcgggaattcgtttcggcgatcgcgttacgtttgatattattttttaggtttttttttattagcgagtgatggggaaagtttttgatgatcgtttcggttgttatttgttggtgacgtaattgcgcgaattgtacgacgtcgaattatttgcggaagtgtggttggtggtaagttttagcgaagaggtgggattacgcggcgggtaaattgttattcgcgcggtgtcgtcggacgtcgttattgtgtttgatatcgtttgttgggcgaaaaattttgattatggcgcggttaattatcgttagattggtaacgggtcgatgttggtgttaagcgataagtcgttgattgcgtcgttaaaat

SEQ ID NO: 7750 - DNA, 1059 bp, Artificial Sequence
  chemically treated genomic DNA (Homo sapiens) CpG-island No: 7750
attttaacgacgcaatcaacgacttatcgcttaacaccaacatcgacccgttaccaatctaacgataattaaccgcgccataatcaaaatttttcgcccaacaaacgatatcaaacacaataacgacgtccgacgacaccgcgcgaataacaatttacccgccgcgtaatcccacctcttcgctaaaacttaccaccaaccacacttccgcaaataattcgacgtcgtacaattcgcgcaattacgtcaccaacaaataacaaccgaaacgatcatcaaaaactttccccatcactcgctaataaaaaaaaacctaaaaaataatatcaaacgtaacgcgatcgccgaaacgaattcccgcctacatcacttcgtcataaaaacgcgcaccaatatccacgcgcataacgctaacgtcattcccctaccgatcgccgtcaaacaaacctaaaattttacactcttcacgaataataatacgcaccgactacaactaacgaacaaccatacgtacgttaccaaccgacaacacatcaatcgccccttcgcgaaaaatactacgcaccataaatcccacttcgtccatatacgcacaaatcatcaccttcgaacctatcgattcattcaaacgaatcaacaccgatcccaaaccatcaactcgcacttctttttacaaacgatccgcttcttccaacaaaatctaccgcacttcctattccgaaaaaacgatcgcatctacctcgctcaacgcttttaataacgataaatccattatacctctcccgtaaacaacactatttacgacataacgtaaaacacttctacgccttacgaaataaccaacacaacatcttcgatacgcacgcccccttaccctaacaaataaatccccgactccacgatcaataacatacctaactataacgtcgtaatatcccgcgataaccaacgcgaatcttcataaacttcaataccgataacgtaaccgatattataaccgacatcgtcgccataacctacctctaacataccccgacgcgcgacatcgacaaccgacgt

SEQ ID NO: 7751 - DNA, 1059 bp, Artificial Sequence
  chemically treated genomic DNA (Homo sapiens) CpG-island No: 7751
gttttggcggcgtaattagcgatttgtcgtttaatattagtatcggttcgttattaatttggcgatggttagtcgcgttataattaaagtttttcgtttagtaggcggtattaagtataatggcgacgttcggcgatatcgcgcgggtggtagtttgttcgtcgcgtaattttattttttcgttggaatttgttattagttatattttcgtaggtagttcggcgtcgtgtagttcgcgtagttgcgttattagtagatagtaatcgaggcggttattaaaggttttttttattattcgttggtgagggagaatttgaaaagtggtattaaacgtgacgcgatcgtcgggacgaattttcgtttgtattatttcgttataggagcgcgtattaatgtttacgcgtatggcgttgacgttatttttttgtcggtcgtcgttaagtaggtttggaattttgtattttttacgggtggtgatgcgtatcggttgtagttggcgggtagttatgcgtacgttgttaatcggtagtatattaatcgttttttcgcgggagatgttgcgtattataaattttatttcgtttatatgcgtatagattattattttcggatttgtcgatttatttaggcggattagtatcgattttagattattaattcgtatttttttttgtaggcgattcgttttttttagtaggatttgtcgtattttttgtttcgaggaggcgatcgtatttgtttcgtttaacgtttttaatagcgataaatttattatgtttttttcgtgagtaatattgtttacggtatggcgtagagtatttttgcgttttgcggggtaattagtataatattttcgatgcgtacgtttttttgttttggtaaataaattttcggttttacggttagtaatatgtttggttgtagcgtcgtggtgtttcgcggtgattaacgcggatttttatgaattttaatgtcgatagcgtgatcggtgttatgatcgatatcgtcgttataatttgtttttggtatgtttcggcgcgcggtatcgataatcggcgt

SEQ ID NO: 7752 - DNA, 1059 bp, Artificial Sequence
  chemically treated genomic DNA (Homo sapiens) CpG-island No: 7752
acgccgattatcgataccgcgcgccgaaacataccaaaaacaaattataacgacgatatcgatcataacaccgatcacgctatcgacattaaaattcataaaaatccgcgttaatcaccgcgaaacaccacgacgctacaaccaaacatattactaaccgtaaaaccgaaaatttatttaccaaaacaaaaaaacgtacgcatcgaaaatattatactaattaccccgcaaaacgcaaaaatactctacgccataccgtaaacaatattactcacgaaaaaaacataataaatttatcgctattaaaaacgttaaacgaaacaaatacgatcgcctcctcgaaacaaaaaatacgacaaatcctactaaaaaaaacgaatcgcctacaaaaaaaaatacgaattaataatctaaaatcgatactaatccgcctaaataaatcgacaaatccgaaaataataatctatacgcatataaacgaaataaaatttataatacgcaacatctcccgcgaaaaaacgattaatatactaccgattaacaacgtacgcataactacccgccaactacaaccgatacgcatcaccacccgtaaaaaatacaaaattccaaacctacttaacgacgaccgacaaaaaaataacgtcaacgccatacgcgtaaacattaatacgcgctcctataacgaaataatacaaacgaaaattcgtcccgacgatcgcgtcacgtttaataccacttttcaaattctccctcaccaacgaataataaaaaaaacctttaataaccgcctcgattactatctactaataacgcaactacgcgaactacacgacgccgaactacctacgaaaatataactaataacaaattccaacgaaaaaataaaattacgcgacgaacaaactaccacccgcgcgatatcgccgaacgtcgccattatacttaataccgcctactaaacgaaaaactttaattataacgcgactaaccatcgccaaattaataacgaaccgatactaatattaaacgacaaatcgctaattacgccgccaaaac

SEQ ID NO: 7753 - DNA, 602 bp, Artificial Sequence
  chemically treated genomic DNA (Homo sapiens) CpG-island No: 7753
gcgtttcgtggtagggattcgtcgcggtttttatttcgttttatacggtttttattttaagggggtaattgcggattttagagtagggtaggggcgcggagggttgcgtatttcggattcggagtttttttgggtttgtcgatttgttttacgtttagttttgttgttttttgtttcggtttatcgtttatcgggtcgtttcgtcgaagggtcggtttcgcggtgtttcggggtgtcgacgttttaagtttgatatgtgtagtattggcgttatttgtttagcgtttcgtacgttgtcgattcgggttttagggttcgcgcgttttttcggattcgtacgtttttacgtttatttgtgggcgttttggacgtttcggttaggacgtttattttcgcgttttcgggttatttattcgttacggtttttttgtagtcgtttgcgcggcgtatcgtgggtgtagattgagtaggcgttcgttagttgggggtggcggcgtttgtcgggtatcgcgtaggaaggataggtacgaaattaggtcggttgtggatttttgggtattgaagggatttgagtcgttgacgttgagttgtcggattgaaga

SEQ ID NO: 7754 - DNA, 602 bp, Artificial Sequence
  chemically treated genomic DNA (Homo sapiens) CpG-island No: 7754
tcttcaatccgacaactcaacgtcaacgactcaaatcccttcaatacccaaaaatccacaaccgacctaatttcgtacctatccttcctacgcgatacccgacaaacgccgccacccccaactaacgaacgcctactcaatctacacccacgatacgccgcgcaaacgactacaaaaaaaccgtaacgaataaataacccgaaaacgcgaaaataaacgtcctaaccgaaacgtccaaaacgcccacaaataaacgtaaaaacgtacgaatccgaaaaaacgcgcgaaccctaaaacccgaatcgacaacgtacgaaacgctaaacaaataacgccaatactacacatatcaaacttaaaacgtcgacaccccgaaacaccgcgaaaccgacccttcgacgaaacgacccgataaacgataaaccgaaacaaaaaacaacaaaactaaacgtaaaacaaatcgacaaacccaaaaaaactccgaatccgaaatacgcaaccctccgcgcccctaccctactctaaaatccgcaattacccccttaaaataaaaaccgtataaaacgaaataaaaaccgcgacgaatccctaccacgaaacgc

SEQ ID NO: 7755 - DNA, 602 bp, Artificial Sequence
  chemically treated genomic DNA (Homo sapiens) CpG-island No: 7755
tttttagttcggtaatttaacgttaacgatttaagtttttttagtgtttaagagtttatagtcgatttagtttcgtgtttgttttttttgcgcggtgttcggtagacgtcgttatttttagttggcgagcgtttgtttaatttatatttacggtacgtcgcgtagacggttgtagggaggtcgtgacgggtaaatggttcgaggacgcgggagtgaacgttttggtcgaggcgtttaggacgtttataaatggacgtaaaggcgtgcgagttcggaggagcgcgcggattttggggttcggatcggtaacgtgcgggacgttgaatagatggcgttagtgttgtatatgttaggtttgaggcgtcgatatttcgaagtatcgcggagtcggtttttcggcggggcggttcgatggacggtgagtcggagtagagggtagtaggattagacgtgagataagtcgatagatttaaagagatttcggattcgagatgcgtagtttttcgcgtttttgttttgttttggagttcgtagttatttttttgagatgggaatcgtatggaacggagtgggggtcgcggcggatttttgttacgaggcgt

SEQ ID NO: 7756 - DNA, 602 bp, Artificial Sequence
  chemically treated genomic DNA (Homo sapiens) CpG-island No: 7756
acgcctcgtaacaaaaatccgccgcgacccccactccgttccatacgattcccatctcaaaaaaataactacgaactccaaaacaaaacaaaaacgcgaaaaactacgcatctcgaatccgaaatctctttaaatctatcgacttatctcacgtctaatcctactaccctctactccgactcaccgtccatcgaaccgccccgccgaaaaaccgactccgcgatacttcgaaatatcgacgcctcaaacctaacatatacaacactaacgccatctattcaacgtcccgcacgttaccgatccgaaccccaaaatccgcgcgctcctccgaactcgcacgcctttacgtccatttataaacgtcctaaacgcctcgaccaaaacgttcactcccgcgtcctcgaaccatttacccgtcacgacctccctacaaccgtctacgcgacgtaccgtaaatataaattaaacaaacgctcgccaactaaaaataacgacgtctaccgaacaccgcgcaaaaaaaacaaacacgaaactaaatcgactataaactcttaaacactaaaaaaacttaaatcgttaacgttaaattaccgaactaaaaa

SEQ ID NO: 7757 - DNA, 642 bp, Artificial Sequence
  chemically treated genomic DNA (Homo sapiens) CpG-island No: 7757
  unsure (613)
ggagtcggagtcgttttcggttgcgttttgtttttgaatttcgattttcgtcggttttcgggaaaatcgtagcggggtagcgcgggcgttgtcggaatttgtagttttatttttcgtcgcgttaaatagtcggaaacgggggcggttagaatagagaattatcgaggcgaaggtacgggtggcggcgaggggttaattcgcgtcgggggcggggttggttgtgaggtcgtcggaggtggttgggtgggaggagattcgtttatatatacgaggaggagggttgagttgttgtcgtcgtcgtttttgtcgtcgtcgcgagtgtggagtcgggattggagttgttgtcgcggcgacgtcggggatttttgtcgttagttttcggtttttttgtttcgtcgtttttttttagttagcgttgtttattttttttcggtcgggcgtttttgtttttatttttcgttttttgtttattatatatacggttttttcgattatggattcgggtagtggcggcggcggcggcggcggcggcggcggcgggagtagtagcggtagtagtagtagcgattcggcgtttgattgttgggattaggcggatatggaagttttcggngtcgggggtttttgtgcggcggcgggcgg

SEQ ID NO: 7758 - DNA, 642 bp, Artificial Sequence
  chemically treated genomic DNA (Homo sapiens) CpG-island No: 7758
  unsure (30)
ccgcccgccgccgcacaaaaacccccgacnccgaaaacttccatatccgcctaatcccaacaatcaaacgccgaatcgctactactactaccgctactactcccgccgccgccgccgccgccgccgccgccgccactacccgaatccataatcgaaaaaaccgtatatataataaacaaaaaacgaaaaataaaaacaaaaacgcccgaccgaaaaaaaataaacaacgctaactaaaaaaaaacgacgaaacaaaaaaaccgaaaactaacgacaaaaatccccgacgtcgccgcgacaacaactccaatcccgactccacactcgcgacgacgacaaaaacgacgacgacaacaactcaaccctcctcctcgtatatataaacgaatctcctcccacccaaccacctccgacgacctcacaaccaaccccgcccccgacgcgaattaacccctcgccgccacccgtaccttcgcctcgataattctctattctaaccgcccccgtttccgactatttaacgcgacgaaaaataaaactacaaattccgacaacgcccgcgctaccccgctacgattttcccgaaaaccgacgaaaatcgaaattcaaaaacaaaacgcaaccgaaaacgactccgactcc

SEQ ID NO: 7759 - DNA, 642 bp, Artificial Sequence
  chemically treated genomic DNA (Homo sapiens) CpG-island No: 7759
  unsure (30)
tcgttcgtcgtcgtataagggttttcgatntcgggggtttttatgttcgtttggttttagtagttaggcgtcgagtcgttgttgttgttgtcgttgttgttttcgtcgtcgtcgtcgtcgtcgtcgtcgtcgttattgttcggatttatgatcgggggggtcgtgtgtgtggtggatagagagcgagaaatggaggtaggggcgttcggtcggagaggagtgggtaacgttgattgagggaaggcggcggggtagaagggtcgggagttagcgataaagattttcggcgtcgtcgcggtagtagttttagtttcgattttatattcgcgacgacgatagaggcggcggcggtagtagtttaattttttttttcgtgtgtgtgagcggatttttttttatttaattattttcgacggttttatagttaatttcgttttcggcgcggattgatttttcgtcgttattcgtattttcgtttcggtagttttttgttttggtcgttttcgttttcggttatttagcgcggcgggaggtggaattataagtttcggtagcgttcgcgttatttcgttgcggttttttcgggggtcgacgggagtcgaagtttagggatagggcgtaatcggaagcggtttcggtttt

SEQ ID NO: 7760 - DNA, 642 bp, Artificial Sequence
  chemically treated genomic DNA (Homo sapiens) CpG-island No: 7760
  unsure (613)
aaaaccgaaaccgcttccgattacgccctatccctaaacttcgactcccgtcgacccccgaaaaaaccgcaacgaaataacgcgaacgctaccgaaacttataattccacctcccgccgcgctaaataaccgaaaacgaaaacgaccaaaacaaaaaactaccgaaacgaaaatacgaataacgacgaaaaatcaatccgcgccgaaaacgaaattaactataaaaccgtcgaaaataattaaataaaaaaaaatccgctcacacacacgaaaaaaaaaattaaactactaccgccgccgcctctatcgtcgtcgcgaatataaaatcgaaactaaaactactaccgcgacgacgccgaaaatctttatcgctaactcccgacccttctaccccgccgccttccctcaatcaacgttacccactcctctccgaccgaacgcccctacctccatttctcgctctctatccaccacacacacgacccccccgatcataaatccgaacaataacgacgacgacgacgacgacgacgacgacgaaaacaacaacgacaacaacaacaacgactcgacgcctaactactaaaaccaaacgaacataaaaacccccganatcgaaaacccttatacgacgacgaacga

SEQ ID NO: 7761 - DNA, 636 bp, Artificial Sequence
  chemically treated genomic DNA (Homo sapiens) CpG-island No: 7761
ttttttcgttggacgttgttttattttttagcgtttttgtttaggtcgcggtttaggcgaggttttagaaaatttcggtgttggttaattagttttgagttcgagcgcgtttagtgcgtaacgtggtttttttattggtttatttagtgggtcgcgcgtcgacgtcggggtttcggattgaacggcgcgtttaggtttttgtttttagttagacgtggcgttatcgtttttagttcgtagtttcggcgtagttaatggcggcgtttttcgggcggtaagcgcggtttttcgtcgttagagggcgtcgtcgcgggcgtaatcgagtcgttgtcgtcgtcgttaatcgagggagagttgcgagcgagtatttaggtttcgtcgtcgtcgtcgttatcgttgttcgtttgtcgtcgttcgttttcgtttgttttttgtcgtcggtcggcgcgtcgtttttataggtaggggtaaggggacgtcgtcgggtatgaaggaaacgcgcgcgttcgcgttttcgattttttcgagcgcgtcgtcgtttcgtgttcgcgcgcggaacgttaacggacggcgggcggggcgggggagagggcggaggagttcggggttcgcggaatcgagaggaatttgaaaaga

SEQ ID NO: 7762 - DNA, 636 bp, Artificial Sequence
  chemically treated genomic DNA (Homo sapiens) CpG-island No: 7762
tcttttcaaattcctctcgattccgcgaaccccgaactcctccgccctctcccccgccccgcccgccgtccgttaacgttccgcgcgcgaacacgaaacgacgacgcgctcgaaaaaatcgaaaacgcgaacgcgcgcgtttccttcatacccgacgacgtccccttacccctacctataaaaacgacgcgccgaccgacgacaaaaaacaaacgaaaacgaacgacgacaaacgaacaacgataacgacgacgacgacgaaacctaaatactcgctcgcaactctccctcgattaacgacgacgacaacgactcgattacgcccgcgacgacgccctctaacgacgaaaaaccgcgcttaccgcccgaaaaacgccgccattaactacgccgaaactacgaactaaaaacgataacgccacgtctaactaaaaacaaaaacctaaacgcgccgttcaatccgaaaccccgacgtcgacgcgcgacccactaaataaaccaataaaaaaaccacgttacgcactaaacgcgctcgaactcaaaactaattaaccaacaccgaaattttctaaaacctcgcctaaaccgcgacctaaacaaaaacgctaaaaaataaaacaacgtccaacgaaaaaa

SEQ ID NO: 7763 - DNA, 636 bp, Artificial Sequence
  chemically treated genomic DNA (Homo sapiens) CpG-island No: 7763
tttttttaggtttttttcggtttcgcgggtttcggattttttcgttttttttttcgtttcgttcgtcgttcgttaacgtttcgcgcgcgagtacgaggcggcggcgcgttcgggggggtcgggggcgcgggcgcgcgcgttttttttatgttcggcggcgtttttttatttttatttgtggggacgacgcgtcggtcggcggtagaaggtaggcggaggcgggcggcggtaggcgggtagcggtggcggcggcggcggcggggtttgggtgttcgttcgtagttttttttcggttagcggcggcggtagcggttcggttgcgttcgcggcggcgttttttagcggcgggaggtcgcgtttgtcgttcgggagacgtcgttattggttgcgtcggagttacgggttgggggcggtggcgttacgtttgattgggggtagggatttgggcgcgtcgtttaattcggagtttcggcgtcgacgcgcggtttattgggtgagttaatgggaaggttacgttgcgtattggacgcgttcggatttaagattgattaattagtatcggggttttttggggtttcgtttgggtcgcggtttgagtagaagcgttaggaggtagaatagcgtttagcggggaga

SEQ ID NO: 7764 - DNA, 636 bp, Artificial Sequence
  chemically treated genomic DNA (Homo sapiens) CpG-island No: 7764
tctccccgctaaacgctattctacctcctaacgcttctactcaaaccgcgacccaaacgaaaccccaaaaaaccccgatactaattaatcaatcttaaatccgaacgcgtccaatacgcaacgtaaccttcccattaactcacccaataaaccgcgcgtcgacgccgaaactccgaattaaacgacgcgcccaaatccctacccccaatcaaacgtaacgccaccgcccccaacccgtaactccgacgcaaccaataacgacgtctcccgaacgacaaacgcgacctcccgccgctaaaaaacgccgccgcgaacgcaaccgaaccgctaccgccgccgctaaccgaaaaaaaactacgaacgaacacccaaaccccgccgccgccgccgccaccgctacccgcctaccgccgcccgcctccgcctaccttctaccgccgaccgacgcgtcgtccccacaaataaaaataaaaaaacgccgccgaacataaaaaaaacgcgcgcgcccgcgcccccgacccccccgaacgcgccgccgcctcgtactcgcgcgcgaaacgttaacgaacgacgaacgaaacgaaaaaaaaaacgaaaaaatccgaaacccgcgaaaccgaaaaaaacctaaaaaaa

SEQ ID NO: 7765 - DNA, 503 bp, Artificial Sequence
  chemically treated genomic DNA (Homo sapiens) CpG-island No: 7765
tcgtcgaaagtttgtaacgcggatattttaggatagagaattgttaacgaatcgttgggtttaggttatttttgattttttattgaagggtcgcgttttgtttcgtgaatgcgttagcgtcggtaattagttaggcgacgtttttacgttttgtgttagagaagatcggggattcgttttggtaaagtacgggtaacgcgatatgtattgttgcgttttatcgcggaattgagcgtattttcgtttggcgggtggacgatatcggaaagcgtataaattcgtcgatattcggttgtgttggtcgtagggaagttgtcggtaataggcgtagatggcgacgaatagtggtttgatggtttgttttggatttgatcgattttcgatcgtagggttttttagggcgcgcgtggggtagaagttagtcgcgtaattgaatttgattgatgatatacgtttttggtaggagaagatgtgttttacgttttgatcgtatttaacggtga

SEQ ID NO: 7766 - DNA, 503 bp, Artificial Sequence
  chemically treated genomic DNA (Homo sapiens) CpG-island No: 7766
tcaccgttaaatacgatcaaaacgtaaaacacatcttctcctaccaaaaacgtatatcatcaatcaaattcaattacgcgactaacttctaccccacgcgcgccctaaaaaaccctacgatcgaaaatcgatcaaatccaaaacaaaccatcaaaccactattcgtcgccatctacgcctattaccgacaacttccctacgaccaacacaaccgaatatcgacgaatttatacgctttccgatatcgtccacccgccaaacgaaaatacgctcaattccgcgataaaacgcaacaatacatatcgcgttacccgtactttaccaaaacgaatccccgatcttctctaacacaaaacgtaaaaacgtcgcctaactaattaccgacgctaacgcattcacgaaacaaaacgcgacccttcaataaaaaatcaaaaataacctaaacccaacgattcgttaacaattctctatcctaaaatatccgcgttacaaactttcgacga

SEQ ID NO: 7767 - DNA, 503 bp, Artificial Sequence
  chemically treated genomic DNA (Homo sapiens) CpG-island No: 7767
ttatcgttaaatacggttagggcgtagagtatatttttttttgttagagacgtatattattagttagatttagttgcgcggttaatttttgttttacgcgcgttttaaaaagttttgcggtcggagatcggttaaatttagggtaaattattaaattattgttcgtcgttatttgcgtttgttatcgataatttttttgcggttagtataatcggatgtcggcgaatttatgcgtttttcggtatcgtttattcgttagacgggaatacgtttaatttcgcgataggacgtagtagtgtatatcgcgttgttcgtgttttattaaagcgaattttcgattttttttggtataaggcgtgagaacgtcgtttgattgattgtcgacgttggcgtatttacggggtagaacgcggttttttagtaaaagattagaagtagtttggatttagcggttcgttgatagttttttgttttgggatattcgcgttgtagattttcgacgg

SEQ ID NO: 7768 - DNA, 503 bp, Artificial Sequence
  chemically treated genomic DNA (Homo sapiens) CpG-island No: 7768
ccgtcgaaaatctacaacgcgaatatcccaaaacaaaaaactatcaacgaaccgctaaatccaaactacttctaatcttttactaaaaaaccgcgttctaccccgtaaatacgccaacgtcgacaatcaatcaaacgacgttctcacgccttataccaaaaaaaatcgaaaattcgctttaataaaacacgaacaacgcgatatacactactacgtcctatcgcgaaattaaacgtattcccgtctaacgaataaacgataccgaaaaacgcataaattcgccgacatccgattatactaaccgcaaaaaaattatcgataacaaacgcaaataacgacgaacaataatttaataatttaccctaaatttaaccgatctccgaccgcaaaactttttaaaacgcgcgtaaaacaaaaattaaccgcgcaactaaatctaactaataatatacgtctctaacaaaaaaaaatatactctacgccctaaccgtatttaacgataa

SEQ ID NO: 7769 - DNA, 584 bp, Artificial Sequence
  chemically treated genomic DNA (Homo sapiens) CpG-island No: 7769
gcgtttggattaatttattgtcgtcgttgcgcggcggtatcgtaggacgtggtaacgtggtataggttttttacgcgtattttttttaaggaatacgggttcgagtattcgtttgttaggggtaattagtgtatagtttaatgtcgggttattatgtatcgagtgcgttttgttggtttagttaatgatggcgcgtaacgagttgttttatcggttatgtcggtaggtcgggtgggtataaagtttagaaattgtgtcgatattagttttgaagattgtcgcgttgtttttatacggattttaagagtttagatcgcgtattgagcgtcggtcgtggtgttaggaagtttattttcgattggcggtaattattgtggcggggaaatttacgttgcgattgtaaacgttgtcgtaaattggttagtagatgtttacgttgtatgttatcggcgaagagtcgttgtaatacggcggtaaatgcgcgtttatcgttttggtttgtcgattgataattttaatagttgtcggaaattagtatcgaatagatttgtttgattgtcgaagaagagaatcgaagttgatgg

SEQ ID NO: 7770 - DNA, 584 bp, Artificial Sequence
  chemically treated genomic DNA (Homo sapiens) CpG-island No: 7770
ccatcaacttcgattctcttcttcgacaatcaaacaaatctattcgatactaatttccgacaactattaaaattatcaatcgacaaaccaaaacgataaacgcgcatttaccgccgtattacaacgactcttcgccgataacatacaacgtaaacatctactaaccaatttacgacaacgtttacaatcgcaacgtaaatttccccgccacaataattaccgccaatcgaaaataaacttcctaacaccacgaccgacgctcaatacgcgatctaaactcttaaaatccgtataaaaacaacgcgacaatcttcaaaactaatatcgacacaatttctaaactttatacccacccgacctaccgacataaccgataaaacaactcgttacgcgccatcattaactaaaccaacaaaacgcactcgatacataataacccgacattaaactatacactaattacccctaacaaacgaatactcgaacccgtattccttaaaaaaaatacgcgtaaaaaacctataccacgttaccacgtcctacgataccgccgcgcaacgacgacaataaattaatccaaacgc

SEQ ID NO: 7771 - DNA, 584 bp, Artificial Sequence
  chemically treated genomic DNA (Homo sapiens) CpG-island No: 7771
ttattagtttcggttttttttttcggtaattaggtagatttgttcgatgttggttttcgataattattgagattgttagtcggtaggttaaggcgatgagcgcgtatttgtcgtcgtgttgtagcgatttttcgtcggtgatatatagcgtggatatttgttggttagtttgcgatagcgtttgtagtcgtagcgtggattttttcgttatagtggttatcgttaatcgagaatggattttttggtattacggtcggcgtttagtacgcggtttgaatttttaaaattcgtgtggaaataacgcggtagtttttaaggttgatatcggtatagtttttggattttatgtttattcggtttatcggtatagtcggtgaagtagttcgttacgcgttattattggttgagttagtaagacgtattcggtgtatggtgattcggtattgaattgtgtattgattgtttttgataagcggatattcgggttcgtattttttaaaaaaaatgcgcgtaaggagtttgtgttacgttattacgttttgcggtgtcgtcgcgtagcggcgataataaattgatttaggcgt

SEQ ID NO: 7772 - DNA, 584 bp, Artificial Sequence
  chemically treated genomic DNA (Homo sapiens) CpG-island No: 7772
acgcctaaatcaatttattatcgccgctacgcgacgacaccgcaaaacgtaataacgtaacacaaactccttacgcgcattttttttaaaaaatacgaacccgaatatccgcttatcaaaaacaatcaatacacaattcaataccgaatcaccatacaccgaatacgtcttactaactcaaccaataataacgcgtaacgaactacttcaccgactataccgataaaccgaataaacataaaatccaaaaactataccgatatcaaccttaaaaactaccgcgttatttccacacgaattttaaaaattcaaaccgcgtactaaacgccgaccgtaataccaaaaaatccattctcgattaacgataaccactataacgaaaaaatccacgctacgactacaaacgctatcgcaaactaaccaacaaatatccacgctatatatcaccgacgaaaaatcgctacaacacgacgacaaatacgcgctcatcgccttaacctaccgactaacaatctcaataattatcgaaaaccaacatcgaacaaatctacctaattaccgaaaaaaaaaaccgaaactaataa

SEQ ID NO: 7773 - DNA, 860 bp, Artificial Sequence
  chemically treated genomic DNA (Homo sapiens) CpG-island No: 7773
cgtttggtagcgtggcgtaggtgcgtgaaacggcggttttttgatacgtttcgttaaaacgcgcggtgtggcgattgttatggtggggacgtaattaaagatggttcgttggttggttcgaaagtgttggaatattgatcgattgttcggtgtttttggatggcgatgtcgattttcgttttcgtatttgcgtagttataaaaatcgtttcggcgcggtgaatgagttgggcgtttcgcgatgatcgaataggggttgcgtgaagttagtaatttttcggtaattttttaagtcgcggcgatgaagtgattttcggtagtttagtgatggtggatgggaaggaacgcgtttattgttggtggagatttaggcgttggtcgatattcgatgatggcgaatttacgtcgtgtggtagtggggttggaataaaacgttatgggaattttgttggttgtgttgtatcgttaaggtggttttgaatgggcgattaagatgtgtttgtgaacgtggtcggcggcgtgaaggtgacgaaattagtggcgatttagagttattgttggcgatggtttttatatcggcgaaagaacgttggcgtaggaatttggggtggttggggaatttcgtcggagcggaaaatttcgggcggttacggttaataaagatttttgacggggcgcgggttttcgggaaatatcgcgcggttaggtcgaaaaaggcggggagagttgtgaattttgcgtagtgtgttagttttagtgtaagtgttacgggaatattatagttagcgaacgtttgggtcgtttatgttttacggttggcgacgttagtaaagtgcggataacggtagaatttttacgtta

SEQ ID NO: 7774 - DNA, 860 bp, Artificial Sequence
  chemically treated genomic DNA (Homo sapiens) CpG-island No: 7774
taacgtaaaaattctaccgttatccgcactttactaacgtcgccaaccgtaaaacataaacgacccaaacgttcgctaactataatattcccgtaacacttacactaaaactaacacactacgcaaaattcacaactctccccgcctttttcgacctaaccgcgcgatatttcccgaaaacccgcgccccgtcaaaaatctttattaaccgtaaccgcccgaaattttccgctccgacgaaattccccaaccaccccaaattcctacgccaacgttctttcgccgatataaaaaccatcgccaacaataactctaaatcgccactaatttcgtcaccttcacgccgccgaccacgttcacaaacacatcttaatcgcccattcaaaaccaccttaacgatacaacacaaccaacaaaattcccataacgttttattccaaccccactaccacacgacgtaaattcgccatcatcgaatatcgaccaacgcctaaatctccaccaacaataaacgcgttccttcccatccaccatcactaaactaccgaaaatcacttcatcgccgcgacttaaaaaattaccgaaaaattactaacttcacgcaacccctattcgatcatcgcgaaacgcccaactcattcaccgcgccgaaacgatttttataactacgcaaatacgaaaacgaaaatcgacatcgccatccaaaaacaccgaacaatcgatcaatattccaacactttcgaaccaaccaacgaaccatctttaattacgtccccaccataacaatcgccacaccgcgcgttttaacgaaacgtatcaaaaaaccgccgtttcacgcacctacgccacgctaccaaacg

SEQ ID NO: 7775 - DNA, 860 bp, Artificial Sequence
  chemically treated genomic DNA (Homo sapiens) CpG-island No: 7775
tggcgtaaaaattttatcgttattcgtattttgttgacgtcgttagtcgtgaaatataaacggtttagacgttcgttggttgtaatattttcgtagtatttgtattaaaattgatatattgcgtagggtttatagtttttttcgtttttttcggtttgatcgcgcgatatttttcggagattcgcgtttcgttaagagtttttgttagtcgtggtcgttcgggatttttcgtttcggcggggttttttaattattttaggtttttgcgttagcgttttttcgtcggtgtggaaattatcgttagtagtaattttaagtcgttattggtttcgttatttttacgtcgtcgattacgtttataaatatattttgatcgtttatttaagattattttgacggtgtaatatagttagtaggatttttatgacgttttgttttagttttattgttatacggcgtgggttcgttattatcgagtatcgattagcgtttgaatttttattagtagtggacgcgtttttttttatttattattattgagttatcggaggttattttatcgtcgcgatttaagaaattgtcgaagggttgttgattttacgtagtttttgttcggttatcgcgagacgtttagtttatttatcgcgtcgaagcggtttttatggttgcgtaagtgcgaaaacgggagtcggtatcgttatttaaaagtatcgaatagtcgattagtgttttagtattttcgggttagttagcgaattatttttggttacgtttttattatgataatcgttatatcgcgcgttttggcgaagcgtgttaaaaagtcgtcgttttacgtatttgcgttacgttattaggcg

SEQ ID NO: 7776 - DNA, 860 bp, Artificial Sequence
  chemically treated genomic DNA (Homo sapiens) CpG-island No: 7776
cgcctaataacgtaacgcaaatacgtaaaacgacgactttttaacacgcttcgccaaaacgcgcgatataacgattatcataataaaaacgtaaccaaaaataattcgctaactaacccgaaaatactaaaacactaatcgactattcgatacttttaaataacgataccgactcccgttttcgcacttacgcaaccataaaaaccgcttcgacgcgataaataaactaaacgtctcgcgataaccgaacaaaaactacgtaaaatcaacaacccttcgacaatttcttaaatcgcgacgataaaataacctccgataactcaataataataaataaaaaaaaacgcgtccactactaataaaaattcaaacgctaatcgatactcgataataacgaacccacgccgtataacaataaaactaaaacaaaacgtcataaaaatcctactaactatattacaccgtcaaaataatcttaaataaacgatcaaaatatatttataaacgtaatcgacgacgtaaaaataacgaaaccaataacgacttaaaattactactaacgataatttccacaccgacgaaaaaacgctaacgcaaaaacctaaaataattaaaaaaccccgccgaaacgaaaaatcccgaacgaccacgactaacaaaaactcttaacgaaacgcgaatctccgaaaaatatcgcgcgatcaaaccgaaaaaaacgaaaaaaactataaaccctacgcaatatatcaattttaatacaaatactacgaaaatattacaaccaacgaacgtctaaaccgtttatatttcacgactaacgacgtcaacaaaatacgaataacgataaaatttttacgcca

SEQ ID NO: 7777 - DNA, 1509 bp, Artificial Sequence
  chemically treated genomic DNA (Homo sapiens) CpG-island No: 7777
cgttatcggcgaattaaagtcgacgcggtgcgcggtttcggcggcgaagtgttgttttacgcgcgaatttgatgaagcgaaagttaaagcgatcgaattgttatagtagcggggtttatttgggtgtcgtcgttcgattattcgatggtgattgtcgggaaggtacgttggcgttggaattgttttagtaggacgtttatttcgatcggtatttgtgttagtcggcggcggcggtttggttgttggcgtggcggtgcgattaaataattgatgtcgtaaattaaagtgatcgtcgtagaagcggaaatttcgtttgtttgaaagtagcgttggatgcgggttattcggttgattttcgcgcgtagggttatttgttgaaggcgtagcggtaaaacgtatcggtgcgaaatttttcgtttatgttaggagtatttcgacgatattattatcgttatagcgatgcgatttgtgcggcgatgaaggatttattcgaagatgtgcggcggtggcggaattttttggcgcgttggcgttggcgggaatgaaaaaattatcgttttgtataatattcgcggcgaacggttggcgtatatttttttcgtgttaacgtgaatttttacgatttgcgatacgttttagtacgttgcgtttgggcgaatagcgtgaagcgttgttgtcggtgattatttcggaagaaaagttagtttttttagattttgttaattgtttggcgggcgttcggttattagtttaattatcgttttgtcgatgttaaaaaacgtttgtatttttttcgtgtgcgtttgagtcgcggtttcgaagagcgtaaagaaattttgtagatgttaacgacggcggttatagcgtggttgattttttcgacgacgaaatggtaagttatacgtgcgttatatggtcggcggacgtttatcgtattcgttgcggaacgtttttatagtttcgaattttcggaattatcgggcgcgttgttggtttttttaatacgttgggtacgtattggaatatttttttgttttattacgtagttatggtatcgattacgggcgcgtattggcggcgttcgaatttgcgattatgaatcggatttcgaaattcggttgaatgagttgggttacgatgttacgacgaaattatatattcggcgtttaggttttttttggcgggttaggaaaaatgtttgatacgcgtttcgtttattacggtttattcgcgcgatcgttatttgtgtttcggcgaattttttagaatatatttaattggcgggttagttagtattttgtttaatagtttgcgtatattgtgcggtttacgtagttgttttcggtttttttcggtattattataaatttaaagcgacgtatcgtatgggtagcgcggtagaaatatacgggcgtatcggatcgtaatataaatagaatgcggcgtatttaacggatcgttggcgatatttattataatttattgatgggcgtagttttatttttaaat

SEQ ID NO: 7778 - DNA, 1509 bp, Artificial Sequence
  chemically treated genomic DNA (Homo sapiens) CpG-island No: 7778
atttaaaaataaaactacgcccatcaataaattataataaatatcgccaacgatccgttaaatacgccgcattctatttatattacgatccgatacgcccgtatatttctaccgcgctacccatacgatacgtcgctttaaatttataataataccgaaaaaaaccgaaaacaactacgtaaaccgcacaatatacgcaaactattaaacaaaatactaactaacccgccaattaaatatattctaaaaaattcgccgaaacacaaataacgatcgcgcgaataaaccgtaataaacgaaacgcgtatcaaacatttttcctaacccgccaaaaaaaacctaaacgccgaatatataatttcgtcgtaacatcgtaacccaactcattcaaccgaatttcgaaatccgattcataatcgcaaattcgaacgccgccaatacgcgcccgtaatcgataccataactacgtaataaaacaaaaaaatattccaatacgtacccaacgtattaaaaaaaccaacaacgcgcccgataattccgaaaattcgaaactataaaaacgttccgcaacgaatacgataaacgtccgccgaccatataacgcacgtataacttaccatttcgtcgtcgaaaaaatcaaccacgctataaccgccgtcgttaacatctacaaaatttctttacgctcttcgaaaccgcgactcaaacgcacacgaaaaaaatacaaacgttttttaacatcgacaaaacgataattaaactaataaccgaacgcccgccaaacaattaacaaaatctaaaaaaactaacttttcttccgaaataatcaccgacaacaacgcttcacgctattcgcccaaacgcaacgtactaaaacgtatcgcaaatcgtaaaaattcacgttaacacgaaaaaaatatacgccaaccgttcgccgcgaatattatacaaaacgataattttttcattcccgccaacgccaacgcgccaaaaaattccgccaccgccgcacatcttcgaataaatccttcatcgccgcacaaatcgcatcgctataacgataataatatcgtcgaaatactcctaacataaacgaaaaatttcgcaccgatacgttttaccgctacgccttcaacaaataaccctacgcgcgaaaatcaaccgaataacccgcatccaacgctactttcaaacaaacgaaatttccgcttctacgacgatcactttaatttacgacatcaattatttaatcgcaccgccacgccaacaaccaaaccgccgccgccgactaacacaaataccgatcgaaataaacgtcctactaaaacaattccaacgccaacgtaccttcccgacaatcaccatcgaataatcgaacgacgacacccaaataaaccccgctactataacaattcgatcgctttaactttcgcttcatcaaattcgcgcgtaaaacaacacttcgccgccgaaaccgcgcaccgcgtcgactttaattcgccgataacg

SEQ ID NO: 7779 - DNA, 1509 bp, Artificial Sequence
  chemically treated genomic DNA (Homo sapiens) CpG-island No: 7779
gtttgaaggtaaaattgcgtttattagtggattgtggtagatatcgttaacgattcgttaagtacgtcgtattttatttgtgttgcgattcggtgcgttcgtatgtttttgtcgcgttgtttatgcggtacgtcgttttgaatttatggtgatgtcgggagaaatcgaaggtagttgcgtgagtcgtataatatgcgtaagttgttaagtaaagtgttggttgattcgttaattgagtgtattttggaagattcgtcgaagtataaatgacggtcgcgcgggtaggtcgtgataagcgaagcgcgtattaggtattttttttaattcgttaaaaagaatttgaacgtcgggtgtatggtttcgtcgtggtatcgtagtttagtttatttagtcgggtttcgaaattcggtttatggtcgtaagttcgaacgtcgttagtacgcgttcgtagtcggtgttatggttgcgtagtggaataaagaaatgttttagtacgtatttagcgtgttgaggaagttagtagcgcgttcggtgatttcgggaattcgaagttgtagaggcgtttcgtaacggatgcgatggacgttcgtcgattatatagcgtacgtgtagtttgttatttcgtcgtcggagagattaattacgttgtagtcgtcgtcgttgatatttgtaaaatttttttgcgtttttcgaggtcgcggtttaggcgtatacgagaaagatgtaggcgttttttggtatcggtaaaacggtagttgaattggtgatcgaacgttcgttaagtagttggtagaatttgaggaagttgatttttttttcggaatggttatcggtaataacgttttacgttgttcgtttaggcgtagcgtattgagacgtatcgtaggtcgtggaagtttacgttggtacggaaagaatatgcgttagtcgttcgtcgcgaatgttgtgtagggcgataatttttttattttcgttagcgttagcgcgttagagggtttcgttatcgtcgtatattttcgaataaattttttatcgtcgtatagatcgtatcgttatgacggtgatgatgtcgtcgagatatttttggtataaacggaaggtttcgtatcgatgcgttttatcgttacgtttttagtaaatagttttacgcgcggagattaatcggatgattcgtatttagcgttgtttttaggtaggcggagttttcgtttttacggcgattattttgatttgcggtattagttgtttgatcgtatcgttacgttagtagttagatcgtcgtcgtcgattggtataaatatcggtcgagatgggcgttttgttggagtagttttagcgttagcgtgttttttcggtaattattatcggatggtcgaacggcggtatttaggtgaatttcgttgttgtgatagttcgatcgttttggttttcgttttattaagttcgcgcgtggagtagtatttcgtcgtcgaagtcgcgtatcgcgtcgattttgattcgtcggtggcg

SEQ ID NO: 7780 - DNA, 1509 bp, Artificial Sequence
  chemically treated genomic DNA (Homo sapiens) CpG-island No: 7780
cgccaccgacgaatcaaaatcgacgcgatacgcgacttcgacgacgaaatactactccacgcgcgaacttaataaaacgaaaaccaaaacgatcgaactatcacaacaacgaaattcacctaaataccgccgttcgaccatccgataataattaccgaaaaaacacgctaacgctaaaactactccaacaaaacgcccatctcgaccgatatttataccaatcgacgacgacgatctaactactaacgtaacgatacgatcaaacaactaataccgcaaatcaaaataatcgccgtaaaaacgaaaactccgcctacctaaaaacaacgctaaatacgaatcatccgattaatctccgcgcgtaaaactatttactaaaaacgtaacgataaaacgcatcgatacgaaaccttccgtttataccaaaaatatctcgacgacatcatcaccgtcataacgatacgatctatacgacgataaaaaatttattcgaaaatatacgacgataacgaaaccctctaacgcgctaacgctaacgaaaataaaaaaattatcgccctacacaacattcgcgacgaacgactaacgcatattctttccgtaccaacgtaaacttccacgacctacgatacgtctcaatacgctacgcctaaacgaacaacgtaaaacgttattaccgataaccattccgaaaaaaaaatcaacttcctcaaattctaccaactacttaacgaacgttcgatcaccaattcaactaccgttttaccgataccaaaaaacgcctacatctttctcgtatacgcctaaaccgcgacctcgaaaaacgcaaaaaaattttacaaatatcaacgacgacgactacaacgtaattaatctctccgacgacgaaataacaaactacacgtacgctatataatcgacgaacgtccatcgcatccgttacgaaacgcctctacaacttcgaattcccgaaatcaccgaacgcgctactaacttcctcaacacgctaaatacgtactaaaacatttctttattccactacgcaaccataacaccgactacgaacgcgtactaacgacgttcgaacttacgaccataaaccgaatttcgaaacccgactaaataaactaaactacgataccacgacgaaaccatacacccgacgttcaaattctttttaacgaattaaaaaaaatacctaatacgcgcttcgcttatcacgacctacccgcgcgaccgtcatttatacttcgacgaatcttccaaaatacactcaattaacgaatcaaccaacactttacttaacaacttacgcatattatacgactcacgcaactaccttcgatttctcccgacatcaccataaattcaaaacgacgtaccgcataaacaacgcgacaaaaacatacgaacgcaccgaatcgcaacacaaataaaatacgacgtacttaacgaatcgttaacgatatctaccacaatccactaataaacgcaattttaccttcaaac

SEQ ID NO: 7781 - DNA, 580 bp, Artificial Sequence
  chemically treated genomic DNA (Homo sapiens) CpG-island No: 7781
atttcggtttggtggaagcgtaacgtgagcgtatagttaacgcgttagtattatttatgtagttggaattattattcgatagtgtgtatggtcgcggcgtaaaattttttattatataagtatatcgttgcgttttaattcggtttcggttcgcgattttttgacgaattgttggcgttggtggtatatttattacgttaaacgaaacggaagttagtaaaagtttatcggtattcgtgttgaaattgatgaatatgtagcgtaaggcggcgtaggtattgtatgttttcggtattcgtttttattgatttattttaggtatagtcgaggtagttatgggtttagcgtcgttggtgaaggttagcgcgtatttgaatttcgggtgtaggttgtcgatatttagttgtcggagatatttttatcggtgcgtaaattacggtatagttggagtaaacgtataggtagaggagtatcgatagtttagttgacgttgagatgtcgaattagtaaagggtataatattcgaacgaggcgtgatagtatcgagaaataaataagcgatataggaagttgttgagta

SEQ ID NO: 7782 - DNA, 580 bp, Artificial Sequence
  chemically treated genomic DNA (Homo sapiens) CpG-island No: 7782
tactcaacaacttcctatatcgcttatttatttctcgatactatcacgcctcgttcgaatattataccctttactaattcgacatctcaacgtcaactaaactatcgatactcctctacctatacgtttactccaactataccgtaatttacgcaccgataaaaatatctccgacaactaaatatcgacaacctacacccgaaattcaaatacgcgctaaccttcaccaacgacgctaaacccataactacctcgactatacctaaaataaatcaataaaaacgaataccgaaaacatacaatacctacgccgccttacgctacatattcatcaatttcaacacgaataccgataaacttttactaacttccgtttcgtttaacgtaataaatataccaccaacgccaacaattcgtcaaaaaatcgcgaaccgaaaccgaattaaaacgcaacgatatacttatataataaaaaattttacgccgcgaccatacacactatcgaataataattccaactacataaataatactaacgcgttaactatacgctcacgttacgcttccaccaaaccgaaat

SEQ ID NO: 7783 - DNA, 580 bp, Artificial Sequence
  chemically treated genomic DNA (Homo sapiens) CpG-island No: 7783
tgtttaataattttttgtatcgtttgtttatttttcgatgttgttacgtttcgttcggatgttgtgttttttattggttcggtattttagcgttagttgggttgtcggtgtttttttgtttatgcgtttgttttagttatgtcgtgatttacgtatcggtaaaggtattttcggtagttaggtatcgatagtttgtattcggaatttaggtacgcgttgatttttattagcgacgttgagtttatgattatttcgattgtgtttgaagtgaattagtaaggacggatatcgggggtatgtagtatttgcgtcgttttgcgttgtatgtttattagttttaatacgaatatcggtgagtttttgttggttttcgtttcgtttggcgtaatgaatgtgttattagcgttagtagttcgttaggaagtcgcgagtcggagtcgggttgaagcgtaacgatatgtttatgtgatgggggattttgcgtcgcggttatgtatattgtcgagtggtgattttagttgtatgaataatgttgacgcgttggttatacgtttacgttgcgtttttattaggtcggggt

SEQ ID NO: 7784 - DNA, 580 bp, Artificial Sequence
  chemically treated genomic DNA (Homo sapiens) CpG-island No: 7784
accccgacctaataaaaacgcaacgtaaacgtataaccaacgcgtcaacattattcatacaactaaaatcaccactcgacaatatacataaccgcgacgcaaaatcccccatcacataaacatatcgttacgcttcaacccgactccgactcgcgacttcctaacgaactactaacgctaataacacattcattacgccaaacgaaacgaaaaccaacaaaaactcaccgatattcgtattaaaactaataaacatacaacgcaaaacgacgcaaatactacatacccccgatatccgtccttactaattcacttcaaacacaatcgaaataatcataaactcaacgtcgctaataaaaatcaacgcgtacctaaattccgaatacaaactatcgatacctaactaccgaaaatacctttaccgatacgtaaatcacgacataactaaaacaaacgcataaacaaaaaaacaccgacaacccaactaacgctaaaataccgaaccaataaaaaacacaacatccgaacgaaacgtaacaacatcgaaaaataaacaaacgatacaaaaaattattaaaca

SEQ ID NO: 7785 - DNA, 923 bp, Artificial Sequence
  chemically treated genomic DNA (Homo sapiens) CpG-island No: 7785
  unsure (835..836, 848..849, 856..857, 863, 870..871, 880..881, 890..891)
  unsure (893, 895, 899, 903..904, 917)
gcgtagggattaggattacggttcggagggtttagtggttataattcgggttggtttaattgtcgggtattaatatgtttggacgaaaattgtgggtggtcgatagtggttttggttgcggtttcgtttgtgttttgagttgttaggcgttaattgattttgcgtgacgttgtcgttcgttgtgttttttttttttattcgttttagttcggtttcgttttgcgtgtgtagtattttacggcgtttaggttgtcggtgatggtgatgcggttttttttatattgatacgtgtgtttaagtttgtcgggtttagttgttttgttattcgttcgtcgttgtcgaacggtaacggattttcggtcggttcgtgtgacggtgcgttattattcgtttcggtatttattatcgtaagtaaagttgcgtatttgtttgttattacgttatatattatcgttagttcgtcgcgtggcgtttagttatagcgtatcgcggcgcggtaggtaaatttttcgggtatttcgggtcgtgcgttagttaacggtagatagacggatgtcgttgtttcggttatattcggtgtaattcgtagggtattaggaaaagcggacggtttcgtttcgtcggaaatggtttgcgtcgggttttttttgttcgttgcgtttgcgtggttagtattagtcggaatgacgttaggtattattcgttacgtcggtgatttcgtcgttgaatttacggcggtttcgcggtggaacgtttgtgtgcgttcgaagcggtttattagtcggttagtattcggtacggcggtagcggcgtaggtagtatcgttatgtttttnntcggtatatcgnntttatannnttaantcgagtnnagttattanncggtttttnngntngganttgnntttgtttcgttangataat

SEQ ID NO: 7786 - DNA, 923 bp, Artificial Sequence
  chemically treated genomic DNA (Homo sapiens) CpG-island No: 7786
  unsure (7, 20..21, 25, 29, 31, 33..34, 43..44, 53..54, 61, 66..67)
  unsure (75..76, 88..)
attatcntaacgaaacaaanncaantccnancnnaaaaaccgnntaataactnnactcganttaannntataaanncgatataccgannaaaaacataacgatactacctacgccgctaccgccgtaccgaatactaaccgactaataaaccgcttcgaacgcacacaaacgttccaccgcgaaaccgccgtaaattcaacgacgaaatcaccgacgtaacgaataatacctaacgtcattccgactaatactaaccacgcaaacgcaacgaacaaaaaaaacccgacgcaaaccatttccgacgaaacgaaaccgtccgcttttcctaataccctacgaattacaccgaatataaccgaaacaacgacatccgtctatctaccgttaactaacgcacgacccgaaatacccgaaaaatttacctaccgcgccgcgatacgctataactaaacgccacgcgacgaactaacgataatatataacgtaataacaaacaaatacgcaactttacttacgataataaataccgaaacgaataataacgcaccgtcacacgaaccgaccgaaaatccgttaccgttcgacaacgacgaacgaataacaaaacaactaaacccgacaaacttaaacacacgtatcaatataaaaaaaaccgcatcaccatcaccgacaacctaaacgccgtaaaatactacacacgcaaaacgaaaccgaactaaaacgaataaaaaaaaaaaacacaacgaacgacaacgtcacgcaaaatcaattaacgcctaacaactcaaaacacaaacgaaaccgcaaccaaaaccactatcgaccacccacaattttcgtccaaacatattaatacccgacaattaaaccaacccgaattataaccactaaaccctccgaaccgtaatcctaatccctacgc

SEQ ID NO: 7787 - DNA, 923 bp, Artificial Sequence
  chemically treated genomic DNA (Homo sapiens) CpG-island No: 7787
  unsure (7, 20..21, 25, 29, 31, 33..34, 43..44, 53..54, 61, 66..67)
  unsure (75..76, 88..)
gttattntggcgaaataaanntagntttngntnnaggggtcgnntggtggttnngttcggnttggnnntgtgagnncggtgtgtcggnnaagggtatgacggtgttgtttgcgtcgttgtcgtcgtatcgggtattgatcggttggtggatcgtttcgggcgtatatagacgttttatcgcgaagtcgtcgtgaatttagcggcgaaattatcggcgtgacggatggtgtttggcgttatttcggttggtattgattacgtaggcgtagcgggtagaagaagttcggcgtaggttattttcggcgggacggaatcgttcgttttttttgatattttgcgggttatatcgaatatggtcgggataacggtattcgtttgtttgtcgttggttgacgtacgattcggaatattcggagaatttatttgtcgcgtcgcggtgcgttatggttggacgttacgcggcgaattggcggtggtgtatgacgtagtggtaaataggtgcgtagttttatttacgatgataaatatcggggcggatggtggcgtatcgttatacgggtcggtcggaaattcgttatcgttcgatagcgacgggcgggtgatagaatagttaaattcggtaggtttaagtatacgtattagtatgagaaagatcgtattattattatcgatagtttggacgtcgtgaagtgttgtatacgtagggcgaagtcgggttgaagcgggtgggaaaaaggaatatagcggacggtagcgttacgtagagttagttgacgtttggtagtttagggtatagacgaagtcgtagttaggattattatcggttatttataattttcgtttaaatatgttgatattcggtaattggattagttcgaattgtggttattgaatttttcgaatcgtgattttgatttttgcgt

SEQ ID NO: 7788 - DNA, 923 bp, Artificial Sequence
  chemically treated genomic DNA (Homo sapiens) CpG-island No: 7788
  unsure (835..836, 848..849, 856..857, 863, 870..871, 880..881, 890..891)
  unsure (893, 895, 899, 903..904, 917)
acgcaaaaatcaaaatcacgattcgaaaaattcaataaccacaattcgaactaatccaattaccgaatatcaacatatttaaacgaaaattataaataaccgataataatcctaactacgacttcgtctataccctaaactaccaaacgtcaactaactctacgtaacgctaccgtccgctatattcctttttcccacccgcttcaacccgacttcgccctacgtatacaacacttcacgacgtccaaactatcgataataataatacgatctttctcatactaatacgtatacttaaacctaccgaatttaactattctatcacccgcccgtcgctatcgaacgataacgaatttccgaccgacccgtataacgatacgccaccatccgccccgatatttatcatcgtaaataaaactacgcacctatttaccactacgtcatacaccaccgccaattcgccgcgtaacgtccaaccataacgcaccgcgacgcgacaaataaattctccgaatattccgaatcgtacgtcaaccaacgacaaacaaacgaataccgttatcccgaccatattcgatataacccgcaaaatatcaaaaaaaacgaacgattccgtcccgccgaaaataacctacgccgaacttcttctacccgctacgcctacgtaatcaataccaaccgaaataacgccaaacaccatccgtcacgccgataatttcgccgctaaattcacgacgacttcgcgataaaacgtctatatacgcccgaaacgatccaccaaccgatcaatacccgatacgacgacaacgacgcaaacaacaccgtcatacccttnnccgacacaccgnnctcacannnccaanccgaacnnaaccaccanncgacccctnnancnaaanctanntttatttcgccanaataac

SEQ ID NO: 7789 - DNA, 1233 bp, Artificial Sequence
  chemically treated genomic DNA (Homo sapiens) CpG-island No: 7789
taacgtggtgcggttttcgttgaatatagtttgttcgttgttggtaattataaaacggttatcggaaatcgtttggttttatataatgatataattagtaagtttatgttgtgttagtacggattcgatcgttttacgttagcggtacgaatttgaattatcgtatttagtttttcgttaaataattcgttaggcgatcgttatttagagtggcgatattcgcgttaatgttatatgattagtaaaggttattttcgatagcgttattagtaggtcgatattaggcggtcgtgatacgttagtagtttacgttgtgtaattagcgtttgaattcgttatagaagttttttagttgcgcgatatcgcgtatatttgtcggttttcgttaagttgacgataaatttgcgttagcgtcgttgcgtttagcgcgtattgtttttgtttaaattaattagtagtagtgcgttattttcggtagaagttgcggtcgtgatggtgtgacgtatattttttacgcgggtaaatgtagaattattagcgatagcggcgacgttatttcgcgtttttcgttatttttcgttagcgggtttttatcgatatggagtttttatttatcgggatcgttagtttagcgtcggataaagtttttcgtttacggttttaacggttttatatagttcgtatttttattagggtggtttgtcgtcgttatttagttggcggaagtttgatgcgtttgatatcgttaatttgtgttgcggcgatgttggttaagttttatcgatcgttagacgggtagaggcggcgaaatttagtagcgtaacggcgtacgttcgttaatcgttatcgttttatcgtagtagttgtcgaggtggcggtagtgatcgcgtagttagcgatcggtatttgttacggttttatatttgatcgcgcgttattatgtcggttacgttgcggtcgttaatggttataggaaggtttttttcgttatagtcggtagatgtagtatacgttttattcgtttgtaatggtgatttttttacgggttagcgcgtcgtttttcgttttagcgtttgtatatcgcgggttattttcggcgttttattaagtaggacgttagcggtagatcgatcggttgattattaaaatgacgatcgtgtagagaagatgtagtttttcggtcgttttattaattatcgcgtagggtgcgcgtttcgttatatagtaagtaat

SEQ ID NO: 7790 - DNA, 1233 bp, Artificial Sequence
  chemically treated genomic DNA (Homo sapiens) CpG-island No: 7790
attacttactatataacgaaacgcgcaccctacgcgataattaataaaacgaccgaaaaactacatcttctctacacgatcgtcattttaataatcaaccgatcgatctaccgctaacgtcctacttaataaaacgccgaaaataacccgcgatatacaaacgctaaaacgaaaaacgacgcgctaacccgtaaaaaaatcaccattacaaacgaataaaacgtatactacatctaccgactataacgaaaaaaaccttcctataaccattaacgaccgcaacgtaaccgacataataacgcgcgatcaaatataaaaccgtaacaaataccgatcgctaactacgcgatcactaccgccacctcgacaactactacgataaaacgataacgattaacgaacgtacgccgttacgctactaaatttcgccgcctctacccgtctaacgatcgataaaacttaaccaacatcgccgcaacacaaattaacgatatcaaacgcatcaaacttccgccaactaaataacgacgacaaaccaccctaataaaaatacgaactatataaaaccgttaaaaccgtaaacgaaaaactttatccgacgctaaactaacgatcccgataaataaaaactccatatcgataaaaacccgctaacgaaaaataacgaaaaacgcgaaataacgtcgccgctatcgctaataattctacatttacccgcgtaaaaaatatacgtcacaccatcacgaccgcaacttctaccgaaaataacgcactactactaattaatttaaacaaaaacaatacgcgctaaacgcaacgacgctaacgcaaatttatcgtcaacttaacgaaaaccgacaaatatacgcgatatcgcgcaactaaaaaacttctataacgaattcaaacgctaattacacaacgtaaactactaacgtatcacgaccgcctaatatcgacctactaataacgctatcgaaaataacctttactaatcatataacattaacgcgaatatcgccactctaaataacgatcgcctaacgaattatttaacgaaaaactaaatacgataattcaaattcgtaccgctaacgtaaaacgatcgaatccgtactaacacaacataaacttactaattatatcattatataaaaccaaacgatttccgataaccgttttataattaccaacaacgaacaaactatattcaacgaaaaccgcaccacgtta

SEQ ID NO: 7791 - DNA, 1233 bp, Artificial Sequence
  chemically treated genomic DNA (Homo sapiens) CpG-island No: 7791
gttatttattgtgtagcggagcgcgtattttacgcggtgattggtgaagcgatcgaagaattgtattttttttgtacgatcgttattttgataattagtcgatcgatttgtcgttgacgttttgtttggtaaaacgtcgaagatgattcgcgatgtataaacgttaaagcgaaaggcgacgcgttggttcgtgaagggattattattgtagacgggtgaaacgtgtgttgtatttgtcgattgtggcggaaaaaatttttttgtgattattggcgatcgtagcgtaatcggtatggtagcgcgcgattagatgtggggtcgtggtaggtgtcggtcgttaattgcgcggttattatcgttatttcgatagttattacggtgaagcgatggcgattggcgagcgtgcgtcgttgcgttgttggatttcgtcgtttttgttcgtttggcggtcggtgaagtttaattaatatcgtcgtaatataaattggcgatattaaacgtattaaattttcgttaattggatggcggcggtaggttattttggtgaagatgcgggttgtatgaagtcgttaaagtcgtgggcgaagagttttgttcggcgttgggttgacgatttcggtgggtaaagattttatgtcgatgaaaattcgttggcggaaggtaacgaagagcgcgaaatgacgtcgtcgttgtcgttggtgattttgtatttgttcgcgtggaagatgtacgttatattattacggtcgtagtttttatcgaagataacgtattgttgttgattgatttgggtaaaggtaatacgcgttgggcgtaacggcgttggcgtaggtttatcgttagtttggcgaaaatcggtagatgtacgcgatgtcgcgtaattgaaaggtttttatgacggatttaggcgttggttgtatagcgtaagttgttggcgtattacgatcgtttgatgtcggtttgttggtaacgttgtcggaaatggtttttgttggttatgtggtattgacgcggatatcgttattttgggtgacgatcgtttggcgggttgtttaacgaagaattgggtgcggtgatttaggttcgtgtcgttgacgtgaagcggtcgagttcgtattggtatagtatgggtttgttgattgtgttattatgtagggttaggcggttttcggtgatcgttttgtgattattagtaacgggtagattgtatttagcgaaagtcgtattacgttg

SEQ ID NO: 7792 - DNA, 1233 bp, Artificial Sequence
  chemically treated genomic DNA (Homo sapiens) CpG-island No: 7792
caacgtaatacgactttcgctaaatacaatctacccgttactaataatcacaaaacgatcaccgaaaaccgcctaaccctacataataacacaatcaacaaacccatactataccaatacgaactcgaccgcttcacgtcaacgacacgaacctaaatcaccgcacccaattcttcgttaaacaacccgccaaacgatcgtcacccaaaataacgatatccgcgtcaataccacataaccaacaaaaaccatttccgacaacgttaccaacaaaccgacatcaaacgatcgtaatacgccaacaacttacgctatacaaccaacgcctaaatccgtcataaaaacctttcaattacgcgacatcgcgtacatctaccgattttcgccaaactaacgataaacctacgccaacgccgttacgcccaacgcgtattacctttacccaaatcaatcaacaacaatacgttatcttcgataaaaactacgaccgtaataatataacgtacatcttccacgcgaacaaatacaaaatcaccaacgacaacgacgacgtcatttcgcgctcttcgttaccttccgccaacgaattttcatcgacataaaatctttacccaccgaaatcgtcaacccaacgccgaacaaaactcttcgcccacgactttaacgacttcatacaacccgcatcttcaccaaaataacctaccgccgccatccaattaacgaaaatttaatacgtttaatatcgccaatttatattacgacgatattaattaaacttcaccgaccgccaaacgaacaaaaacgacgaaatccaacaacgcaacgacgcacgctcgccaatcgccatcgcttcaccgtaataactatcgaaataacgataataaccgcgcaattaacgaccgacacctaccacgaccccacatctaatcgcgcgctaccataccgattacgctacgatcgccaataatcacaaaaaaattttttccgccacaatcgacaaatacaacacacgtttcacccgtctacaataataatcccttcacgaaccaacgcgtcgcctttcgctttaacgtttatacatcgcgaatcatcttcgacgttttaccaaacaaaacgtcaacgacaaatcgatcgactaattatcaaaataacgatcgtacaaaaaaaatacaattcttcgatcgcttcaccaatcaccgcgtaaaatacgcgctccgctacacaataaataac

SEQ ID NO: 7793 - DNA, 608 bp, Artificial Sequence
  chemically treated genomic DNA (Homo sapiens) CpG-island No: 7793
gaatcgtcgtatagttattcgttgcgaatacgtttttacgttggtttcgtatttcgtattaatgataatttcgtttatgcggtacgttcgattgcgttttcgagttagttggtgttcggtagtagattaatcggacgaaaatatcggttagttcgatgttgtgaatatcgtcgttgatacgtttcgatattttagattaacgattttgttgtcgtcgttttttattttcgggtttgcgtatttagaataatgtcgacgttttttaggttgcgtagtttgtttgtagaatttggtcggtttttatttttggcgtaaattttagtagcgtacgtgtttaacgatattcgttaggttaattgtcgtttttacgtcggagtatcgtcgtcgataatcgttacgcgtttatttttaaatagcgggtcgtcgagtgcgggtagtaggttacgtttttggtgcgatattgattttcgttcggacgtttatgttgcgttattttgtatcggtcgttacgataatgttgcgtgttttagtatcgcgttagaagttatcgtatcgatttggatattattatattatttttaatattatttcggtagttaaagtttgtt

SEQ ID NO: 7794 - DNA, 608 bp, Artificial Sequence
  chemically treated genomic DNA (Homo sapiens) CpG-island No: 7794
aacaaactttaactaccgaaataatattaaaaataatataataatatccaaatcgatacgataacttctaacgcgatactaaaacacgcaacattatcgtaacgaccgatacaaaataacgcaacataaacgtccgaacgaaaatcaatatcgcaccaaaaacgtaacctactacccgcactcgacgacccgctatttaaaaataaacgcgtaacgattatcgacgacgatactccgacgtaaaaacgacaattaacctaacgaatatcgttaaacacgtacgctactaaaatttacgccaaaaataaaaaccgaccaaattctacaaacaaactacgcaacctaaaaaacgtcgacattattctaaatacgcaaacccgaaaataaaaaacgacgacaacaaaatcgttaatctaaaatatcgaaacgtatcaacgacgatattcacaacatcgaactaaccgatattttcgtccgattaatctactaccgaacaccaactaactcgaaaacgcaatcgaacgtaccgcataaacgaaattatcattaatacgaaatacgaaaccaacgtaaaaacgtattcgcaacgaataactatacgacgattc

SEQ ID NO: 7795 - DNA, 608 bp, Artificial Sequence
  chemically treated genomic DNA (Homo sapiens) CpG-island No: 7795
aataggttttagttgtcggagtaatgttggggatggtgtgatggtatttaaatcgatgcgatagtttttggcgcggtattgaaatacgtagtattatcgtggcgatcggtgtaaaatggcgtaatatgaacgttcgggcgaagattagtatcgtattaaaggcgtgatttattgttcgtattcgacggttcgttgtttaaaggtaaacgcgtagcggttatcggcggcggtatttcggcgtggaagcggtaattgatttggcgggtatcgttgagtacgtacgttgttggaatttgcgttagaaatgaaagtcgattaggttttgtaggtaaattgcgtagtttgaaaaacgtcgatattattttgaatgcgtaaattcggaagtgaaaggcgacggtagtaaagtcgttggtttggaatatcgagacgtgttagcggcgatatttataatatcgaattggtcggtattttcgttcgattggtttgttgtcgaatattaattggttcgaaggcgtagtcgaacgtatcgtatgggcgagattattattgatgcgaaatgcgaaattaacgtgaaggcgtgttcgtagcgggtgattgtacgacggttt

SEQ ID NO: 7796 - DNA, 608 bp, Artificial Sequence
  chemically treated genomic DNA (Homo sapiens) CpG-island No: 7796
aaaccgtcgtacaatcacccgctacgaacacgccttcacgttaatttcgcatttcgcatcaataataatctcgcccatacgatacgttcgactacgccttcgaaccaattaatattcgacaacaaaccaatcgaacgaaaataccgaccaattcgatattataaatatcgccgctaacacgtctcgatattccaaaccaacgactttactaccgtcgcctttcacttccgaatttacgcattcaaaataatatcgacgtttttcaaactacgcaatttacctacaaaacctaatcgactttcatttctaacgcaaattccaacaacgtacgtactcaacgatacccgccaaatcaattaccgcttccacgccgaaataccgccgccgataaccgctacgcgtttacctttaaacaacgaaccgtcgaatacgaacaataaatcacgcctttaatacgatactaatcttcgcccgaacgttcatattacgccattttacaccgatcgccacgataatactacgtatttcaataccgcgccaaaaactatcgcatcgatttaaataccatcacaccatccccaacattactccgacaactaaaacctatt

SEQ ID NO: 7797 - DNA, 532 bp, Artificial Sequence
  chemically treated genomic DNA (Homo sapiens) CpG-island No: 7797
tggtatttattacggtttgcggtttagatttattggtagtacgtatataatcgttaatatcggcgagaagtcgttgatattttgacgtacgatttgaaagtgtcgataatgatggtattcggattagtgattttattttagttttatttttataggatgtcgtatcgcgtagcgtttttagtatatgttttttcgacgaaatttaatttggtcggatttttttatcggttcgcgattttagattcgttattgttcgtattttattgtataatgatatagttattttgttcgaaatttttagtttttcgtcggtatagatgttatgataataattcgttttcggagatgtttcgcgacggtaaatattcgtagttagattttattttttaggttagtttacgggtgttcgttaaatttttacgttgtaacgtaggtagaagcgtgtcgtttttagtaataatacgttattgatcgttatagtaattaattttttagtagagaaaaattttgtttttttataggtatttttttg

SEQ ID NO: 7798 - DNA, 532 bp, Artificial Sequence
  chemically treated genomic DNA (Homo sapiens) CpG-island No: 7798
caaaaaaatacctataaaaaaacaaaatttttctctactaaaaaattaattactataacgatcaataacgtattattactaaaaacgacacgcttctacctacgttacaacgtaaaaatttaacgaacacccgtaaactaacctaaaaaataaaatctaactacgaatatttaccgtcgcgaaacatctccgaaaacgaattattatcataacatctataccgacgaaaaactaaaaatttcgaacaaaataactatatcattatacaataaaatacgaacaataacgaatctaaaatcgcgaaccgataaaaaaatccgaccaaattaaatttcgtcgaaaaaacatatactaaaaacgctacgcgatacgacatcctataaaaataaaactaaaataaaatcactaatccgaataccatcattatcgacactttcaaatcgtacgtcaaaatatcaacgacttctcgccgatattaacgattatatacgtactaccaataaatctaaaccgcaaaccgtaataaatacca

SEQ ID NO: 7799 - DNA, 532 bp, Artificial Sequence
  chemically treated genomic DNA (Homo sapiens) CpG-island No: 7799
tagaaggatgtttgtaaaagagtaaggtttttttttgttggaaggttgattgttatggcgattagtagcgtattgttgttgggggcggtacgtttttgtttgcgttatagcgtgaaagtttaacgagtattcgtaagttggtttggaagatgaaatttggttgcgggtatttatcgtcgcgaagtattttcgagggcgggttattgttatggtatttgtatcggcgaagggttggaaatttcggatagggtgattgtgttattgtgtagtgggatgcgaatagtaacggatttgggatcgcgaatcggtaaaagagttcgattagattggatttcgtcgaaggagtatgtgttggaaacgttacgcggtgcgatattttgtgaaggtagggttgggataaagttattaattcggatgttattattatcgatatttttaggtcgtacgttaggatgttagcggtttttcgtcggtgttgacggttatatgcgtgttgttagtaagtttgaatcgtaaatcgtggtgaatgtta

SEQ ID NO: 7800 - DNA, 532 bp, Artificial Sequence
  chemically treated genomic DNA (Homo sapiens) CpG-island No: 7800
taacattcaccacgatttacgattcaaacttactaacaacacgcatataaccgtcaacaccgacgaaaaaccgctaacatcctaacgtacgacctaaaaatatcgataataataacatccgaattaataactttatcccaaccctaccttcacaaaatatcgcaccgcgtaacgtttccaacacatactccttcgacgaaatccaatctaatcgaactcttttaccgattcgcgatcccaaatccgttactattcgcatcccactacacaataacacaatcaccctatccgaaatttccaacccttcgccgatacaaataccataacaataacccgccctcgaaaatacttcgcgacgataaatacccgcaaccaaatttcatcttccaaaccaacttacgaatactcgttaaactttcacgctataacgcaaacaaaaacgtaccgcccccaacaacaatacgctactaatcgccataacaatcaaccttccaacaaaaaaaaaccttactcttttacaaacatccttcta

SEQ ID NO: 7801 - DNA, 516 bp, Artificial Sequence
  chemically treated genomic DNA (Homo sapiens) CpG-island No: 7801
gtagggttcgtttgatcgcggatgtcgggacgttttcgtgtaagtttcgaggggggttgttatttcgaatattcgttagaacgaaagcggtagttagggaagttttcgtaggtgttgtagggatttaagcgtttgagttgagttcgaattcgtatagtaatttcgggaggataaattttagtaattagaatcgggtggcgtcgtttagtaattaggagttaaatgcgcggacgttaggtattggttgtacgtgttacgtgagttagcgtcgttgtttagtgggagattacgtcgaggtacgtgatgcggcgtaatcgttttttggtagagtttttcgcgaaggagttgtggttttgagcgtataggcgaggtatttttggggtttgcgtcgttttttttataaagttttggttttggttggtgcgattaaagaaaggaaacggcgtttgagatttgtttgggttggttatggtgaagtagtgaaacggtgagaattgtgttaatgaggttagttta

SEQ ID NO: 7802 - DNA, 516 bp, Artificial Sequence
  chemically treated genomic DNA (Homo sapiens) CpG-island No: 7802
taaactaacctcattaacacaattctcaccgtttcactacttcaccataaccaacccaaacaaatctcaaacgccgtttcctttctttaatcgcaccaaccaaaaccaaaactttataaaaaaaacgacgcaaaccccaaaaatacctcgcctatacgctcaaaaccacaactccttcgcgaaaaactctaccaaaaaacgattacgccgcatcacgtacctcgacgtaatctcccactaaacaacgacgctaactcacgtaacacgtacaaccaatacctaacgtccgcgcatttaactcctaattactaaacgacgccacccgattctaattactaaaatttatcctcccgaaattactatacgaattcgaactcaactcaaacgcttaaatccctacaacacctacgaaaacttccctaactaccgctttcgttctaacgaatattcgaaataacaacccccctcgaaacttacacgaaaacgtcccgacatccgcgatcaaacgaaccctac

SEQ ID NO: 7803 - DNA, 516 bp, Artificial Sequence
  chemically treated genomic DNA (Homo sapiens) CpG-island No: 7803
tgaattagttttattgatataatttttatcgttttattgttttattatagttagtttagataagttttaagcgtcgttttttttttttggtcgtattagttaaagttaggattttgtaaaaggaacggcgtaaattttaggaatgtttcgtttatgcgtttagagttataattttttcgcgaaaagttttgttaaagggcggttgcgtcgtattacgtgtttcggcgtaattttttattgggtagcggcgttggtttacgtgatacgtgtagttaatgtttggcgttcgcgtatttggtttttggttgttaggcgacgttattcgattttggttgttggagtttattttttcgaggttgttgtgcgagttcggatttagtttaagcgtttggatttttatagtatttgcgagggtttttttggttgtcgttttcgttttggcgaatgttcggggtggtagtttttttcgaggtttgtacgagggcgtttcggtattcgcgattaagcgggttttgt

SEQ ID NO: 7804 - DNA, 516 bp, Artificial Sequence
  chemically treated genomic DNA (Homo sapiens) CpG-island No: 7804
acaaaacccgcttaatcgcgaataccgaaacgccctcgtacaaacctcgaaaaaaactaccaccccgaacattcgccaaaacgaaaacgacaaccaaaaaaaccctcgcaaatactataaaaatccaaacgcttaaactaaatccgaactcgcacaacaacctcgaaaaaataaactccaacaaccaaaatcgaataacgtcgcctaacaaccaaaaaccaaatacgcgaacgccaaacattaactacacgtatcacgtaaaccaacgccgctacccaataaaaaattacgccgaaacacgtaatacgacgcaaccgccctttaacaaaacttttcgcgaaaaaattataactctaaacgcataaacgaaacattcctaaaatttacgccgttccttttacaaaatcctaactttaactaatacgaccaaaaaaaaaaaacgacgcttaaaacttatctaaactaactataataaaacaataaaacgataaaaattatatcaataaaactaattca

SEQ ID NO: 7805 - DNA, 720 bp, Artificial Sequence
  chemically treated genomic DNA (Homo sapiens) CpG-island No: 7805
gtaaaagcggggttatagtgaattttggcgaagggttcgcgtggattaggaattggtgttagaattgtaaaagggtatttgcgttcggatggggaggtgatgcgggggcggggcggggttttgggggcggggcgagttcggaggtgtcgttttggggcggggcggtgatagaaggatggattttggggtgaggattgattttgggggcggggcgagagtgcgaattggagtttgagttgagcggtgacgtaaggacgattttgagggtggagcgaggggaggggatggtttttggaggcggggcggtggtacgaggttagtttttgggggcgggcggtggcgtaagattgattttgggggcggggtgggggcgtgggttgaatttgggggcggggcggtggcgcggaatggattttggggtcggcgcgaggtttgaggtgcgttttgagggcggggcgatgacgtagagcgaattttggggcggggcgagattttttagatgcgtttcggggagtgggcggtgacgcggtgtaggttttggggataggcggtgattttagaattgattttggggataggcgaggcgcggaggcgttttgaaggcgaggcggtgacgtaagagcgatttttggggcggggcgaggcgttggagatgcgttttgcgggcgggatcgaagaaaagagaagaaaattaggttcgatttttttttttattttata

SEQ ID NO: 7806 - DNA, 720 bp, Artificial Sequence
  chemically treated genomic DNA (Homo sapiens) CpG-island No: 7806
tataaaataaaaaaaaaaatcgaacctaattttcttctcttttcttcgatcccgcccgcaaaacgcatctccaacgcctcgccccgccccaaaaatcgctcttacgtcaccgcctcgccttcaaaacgcctccgcgcctcgcctatccccaaaatcaattctaaaatcaccgcctatccccaaaacctacaccgcgtcaccgcccactccccgaaacgcatctaaaaaatctcgccccgccccaaaattcgctctacgtcatcgccccgccctcaaaacgcacctcaaacctcgcgccgaccccaaaatccattccgcgccaccgccccgcccccaaattcaacccacgcccccaccccgcccccaaaatcaatcttacgccaccgcccgcccccaaaaactaacctcgtaccaccgccccgcctccaaaaaccatcccctcccctcgctccaccctcaaaatcgtccttacgtcaccgctcaactcaaactccaattcgcactctcgccccgcccccaaaatcaatcctcaccccaaaatccatccttctatcaccgccccgccccaaaacgacacctccgaactcgccccgcccccaaaaccccgccccgcccccgcatcacctccccatccgaacgcaaatacccttttacaattctaacaccaattcctaatccacgcgaacccttcgccaaaattcactataaccccgcttttac

SEQ ID NO: 7807 - DNA, 720 bp, Artificial Sequence
  chemically treated genomic DNA (Homo sapiens) CpG-island No: 7807
tataaaatgagaggaaaggtcgagtttagtttttttttttttttttcggtttcgttcgtagaacgtatttttaacgtttcgtttcgttttaagaatcgtttttgcgttatcgtttcgtttttaggacgttttcgcgtttcgtttgtttttagggttaattttggggttatcgtttgtttttagaatttgtatcgcgttatcgtttatttttcgggacgtatttagaaggtttcgtttcgttttaggattcgttttgcgttatcgtttcgtttttaggacgtattttaggtttcgcgtcgattttagaatttatttcgcgttatcgtttcgtttttagatttaatttacgtttttatttcgtttttaaggttaattttgcgttatcgttcgtttttaagggttagtttcgtgttatcgtttcgtttttaagagttatttttttttttcgttttatttttagaatcgtttttgcgttatcgtttagtttagattttagttcgtattttcgtttcgtttttaaagttaatttttattttaggatttatttttttgttatcgtttcgttttaaggcggtattttcggattcgtttcgtttttagggtttcgtttcgttttcgtattatttttttattcgggcgtaggtgtttttttgtaattttggtattagtttttggtttacgcgggtttttcgttagaatttattatagtttcgtttttat

SEQ ID NO: 7808 - DNA, 720 bp, Artificial Sequence
  chemically treated genomic DNA (Homo sapiens) CpG-island No: 7808
ataaaaacgaaactataataaattctaacgaaaaacccgcgtaaaccaaaaactaataccaaaattacaaaaaaacacctacgcccgaataaaaaaataatacgaaaacgaaacgaaaccctaaaaacgaaacgaatccgaaaataccgccttaaaacgaaacgataacaaaaaaataaatcctaaaataaaaattaactttaaaaacgaaacgaaaatacgaactaaaatctaaactaaacgataacgcaaaaacgattctaaaaataaaacgaaaaaaaaaaataactcttaaaaacgaaacgataacacgaaactaacccttaaaaacgaacgataacgcaaaattaaccttaaaaacgaaataaaaacgtaaattaaatctaaaaacgaaacgataacgcgaaataaattctaaaatcgacgcgaaacctaaaatacgtcctaaaaacgaaacgataacgcaaaacgaatcctaaaacgaaacgaaaccttctaaatacgtcccgaaaaataaacgataacgcgatacaaattctaaaaacaaacgataaccccaaaattaaccctaaaaacaaacgaaacgcgaaaacgtcctaaaaacgaaacgataacgcaaaaacgattcttaaaacgaaacgaaacgttaaaaatacgttctacgaacgaaaccgaaaaaaaaaaaaaaaaactaaactcgacctttcctctcattttata

SEQ ID NO: 7809 - DNA, 962 bp, Artificial Sequence
  chemically treated genomic DNA (Homo sapiens) CpG-island No: 7809
atttggcgcgtttaggtttatcgcgcgcggcggtacggttaggtcgtcgtcgggtgtttttaggttcgcggggtcgtcgtttttggttcgggtttcgtcgggttcgggcgcgatgagggggttttttttttggtcgtcggatacgttatagatgtcgttttcggcgttttttttcgttatggtttttgcgggttttacggtcgggttggggtcgcggtattttgcggggggttgcggttaggcgcggggtatcggcggtatcggggagggtttcgagggcgcgggtcggtcgggggtcggggggcggtcgggtcgggggacggggcggcgggagagcggcggggtgcgggttataggcggcgtagttagaagtagtttacgaagtatttgaaagtgagtttgaagaattttttgtgtgttaggggttcgggggcgcgcgggcgtcggcggggttcggttaggcgttcgcggtagcggtttcggaggtttttgttcgcggttcgggcggtggcggttgttacggtttttcggtcgattcgaggtttagtttagcggggtacgggcgatatcggcgttcgtagtttgtaagcggcggttggagtagggtttgtggttcgcgttttcggtttcggtcggggttcgcggcggttgttcggtttattcgagatttcggtggcggcggcggcggtttaggcgcgtttcgttttttttttttgggcggcggcggttgtagtcgttttcggggtcgcggcgggtttagcgattcgttatcgcgtttcgattgttttttttttttcggttttcggtcggtagtcgtttaaaaatcgatttcggggtgatgttattatcgttttatttttacggttggtcggtttttttttttttttcgttttgttcgttatagttcgtttattttgtttttgtttttttttcggggaggagtcgtcgttttagcgggaggt

SEQ ID NO: 7810 - DNA, 962 bp, Artificial Sequence
  chemically treated genomic DNA (Homo sapiens) CpG-island No: 7810
acctcccgctaaaacgacgactcctccccgaaaaaaaaacaaaaacaaaataaacgaactataacgaacaaaacgaaaaaaaaaaaaaaaccgaccaaccgtaaaaataaaacgataataacatcaccccgaaatcgatttttaaacgactaccgaccgaaaaccgaaaaaaaaaaaacaatcgaaacgcgataacgaatcgctaaacccgccgcgaccccgaaaacgactacaaccgccgccgcccaaaaaaaaaaaacgaaacgcgcctaaaccgccgccgccgccaccgaaatctcgaataaaccgaacaaccgccgcgaaccccgaccgaaaccgaaaacgcgaaccacaaaccctactccaaccgccgcttacaaactacgaacgccgatatcgcccgtaccccgctaaactaaacctcgaatcgaccgaaaaaccgtaacaaccgccaccgcccgaaccgcgaacaaaaacctccgaaaccgctaccgcgaacgcctaaccgaaccccgccgacgcccgcgcgcccccgaacccctaacacacaaaaaattcttcaaactcactttcaaatacttcgtaaactacttctaactacgccgcctataacccgcaccccgccgctctcccgccgccccgtcccccgacccgaccgccccccgacccccgaccgacccgcgccctcgaaaccctccccgataccgccgataccccgcgcctaaccgcaaccccccgcaaaataccgcgaccccaacccgaccgtaaaacccgcaaaaaccataacgaaaaaaaacgccgaaaacgacatctataacgtatccgacgaccaaaaaaaaaaccccctcatcgcgcccgaacccgacgaaacccgaaccaaaaacgacgaccccgcgaacctaaaaacacccgacgacgacctaaccgtaccgccgcgcgcgataaacctaaacgcgccaaat

SEQ ID NO: 7811 - DNA, 962 bp, Artificial Sequence
  chemically treated genomic DNA (Homo sapiens) CpG-island No: 7811
gtttttcgttggagcggcgattttttttcgggaggagggtagggataaggtgggcggattgtgacgagtagggcgggagggagaggggggtcggttagtcgtgggggtggggcgatagtgatattatttcggagtcggtttttaagcggttgtcggtcgggaatcgggaagagaggaatagtcggaacgcggtggcgagtcgttgagttcgtcgcggtttcgagagcggttgtagtcgtcgtcgtttagaaggagagggcgaggcgcgtttgagtcgtcgtcgtcgttatcggagtttcgggtgagtcgggtagtcgtcgcgggtttcggtcggggtcgggggcgcgggttataggttttgttttagtcgtcgtttgtagattgcgagcgtcgatatcgttcgtgtttcgttaggttgagtttcgggtcggtcgaggagtcgtggtagtcgttatcgttcgagtcgcgggtaagagttttcggaatcgttgtcgcggacgtttggtcgggtttcgtcgacgttcgcgcgttttcgggtttttgatatataggagattttttaggtttatttttaagtgtttcgtggattgtttttgattgcgtcgtttgtgattcgtatttcgtcgttttttcgtcgtttcgtttttcggttcggtcgtttttcggttttcggtcggttcgcgttttcggggtttttttcggtgtcgtcggtgtttcgcgtttgatcgtagtttttcgtagggtgtcgcgattttagttcggtcgtgaggttcgtaggggttatggcgaagaagagcgtcgagaacggtatttgtagcgtgttcggcgattagaagaagggtttttttatcgcgttcgggttcgacggggttcgggttaagggcgacggtttcgcgggtttggggatattcggcggcggtttggtcgtgtcgtcgcgcgcgatagatttggacgcgttagat

SEQ ID NO: 7812 - DNA, 962 bp, Artificial Sequence
  chemically treated genomic DNA (Homo sapiens) CpG-island No: 7812
atctaacgcgtccaaatctatcgcgcgcgacgacacgaccaaaccgccgccgaatatccccaaacccgcgaaaccgtcgcccttaacccgaaccccgtcgaacccgaacgcgataaaaaaacccttcttctaatcgccgaacacgctacaaataccgttctcgacgctcttcttcgccataacccctacgaacctcacgaccgaactaaaatcgcgacaccctacgaaaaactacgatcaaacgcgaaacaccgacgacaccgaaaaaaaccccgaaaacgcgaaccgaccgaaaaccgaaaaacgaccgaaccgaaaaacgaaacgacgaaaaaacgacgaaatacgaatcacaaacgacgcaatcaaaaacaatccacgaaacacttaaaaataaacctaaaaaatctcctatatatcaaaaacccgaaaacgcgcgaacgtcgacgaaacccgaccaaacgtccgcgacaacgattccgaaaactcttacccgcgactcgaacgataacgactaccacgactcctcgaccgacccgaaactcaacctaacgaaacacgaacgatatcgacgctcgcaatctacaaacgacgactaaaacaaaacctataacccgcgcccccgaccccgaccgaaacccgcgacgactacccgactcacccgaaactccgataacgacgacgacgactcaaacgcgcctcgccctctccttctaaacgacgacgactacaaccgctctcgaaaccgcgacgaactcaacgactcgccaccgcgttccgactattcctctcttcccgattcccgaccgacaaccgcttaaaaaccgactccgaaataatatcactatcgccccacccccacgactaaccgacccccctctccctcccgccctactcgtcacaatccgcccaccttatccctaccctcctcccgaaaaaaaatcgccgctccaacgaaaaac

SEQ ID NO: 7813 - DNA, 573 bp, Artificial Sequence
  chemically treated genomic DNA (Homo sapiens) CpG-island No: 7813
gcgatcgatatttgattgtttgtagttattaaacgtcgtatgcgtcgggtaagcgtgataatagttggtttatacgcgtttagtttgtatgtcgcgttttattttataggttagattatcgttgcggttttagacgttcgcgtttaggttatattgcgtatcgttcgttagttttagcgttttttttatcgttttgaaggtggttatcgttagtatcgggttaaaaatttttttttggaatattcgtatattgttttgattaaatagaatcgtcggttcgaggtagtagtcgttttttagtttattttttagtagtttgcgtcgttcgtttgtgagtacgttagcgtttttttttttatcgatattaatgtagttgaggatggtttttagttgttcgtgagaaatttgcgcgtttatttgcgttacgttgtcgagcgggttatcgttacgaatgttttcgatacggcggatggcgcgttttataaagcgttcgtagatagatttttgtattaaagtacgattcggataggtgtaaatttcgttcgtggttaaaggtaaatagtgtaaagtttt

SEQ ID NO: 7814 - DNA, 573 bp, Artificial Sequence
  chemically treated genomic DNA (Homo sapiens) CpG-island No: 7814
aaaactttacactatttacctttaaccacgaacgaaatttacacctatccgaatcgtactttaatacaaaaatctatctacgaacgctttataaaacgcgccatccgccgtatcgaaaacattcgtaacgataacccgctcgacaacgtaacgcaaataaacgcgcaaatttctcacgaacaactaaaaaccatcctcaactacattaatatcgataaaaaaaaaaacgctaacgtactcacaaacgaacgacgcaaactactaaaaaataaactaaaaaacgactactacctcgaaccgacgattctatttaatcaaaacaatatacgaatattccaaaaaaaaatttttaacccgatactaacgataaccaccttcaaaacgataaaaaaaacgctaaaactaacgaacgatacgcaatataacctaaacgcgaacgtctaaaaccgcaacgataatctaacctataaaataaaacgcgacatacaaactaaacgcgtataaaccaactattatcacgcttacccgacgcatacgacgtttaataactacaaacaatcaaatatcgatcgc

SEQ ID NO: 7815 - DNA, 573 bp, Artificial Sequence
  chemically treated genomic DNA (Homo sapiens) CpG-island No: 7815
aaggttttgtattgtttgtttttaattacgggcgaagtttgtatttgttcgagtcgtgttttagtgtaggaatttatttacgaacgttttatggaacgcgttattcgtcgtgtcgaaagtattcgtagcggtaattcgttcgatagcgtgacgtaaatgggcgcgtaggttttttacgggtaattggaaattatttttaattatattgatatcggtaaaaaagagggcgttgacgtgtttataggcgggcggcgtaagttgttggaaggtgaattgaaagacggttattatttcgaatcgacgattttgtttggttagaataatatgcgggtgttttaggaggagatttttggttcggtgttggcggtgattatttttaaaacgatggaagaagcgttggagttggcgaacgatacgtaatatggtttgggcgcgggcgtttggagtcgtaacggtaatttggtttataagatggggcgcggtatataggttgggcgcgtgtggattaattgttattacgtttattcggcgtatgcggcgtttggtggttataaataattaggtatcggtcgt

SEQ ID NO: 7816 - DNA, 573 bp, Artificial Sequence
  chemically treated genomic DNA (Homo sapiens) CpG-island No: 7816
acgaccgatacctaattatttataaccaccaaacgccgcatacgccgaataaacgtaataacaattaatccacacgcgcccaacctatataccgcgccccatcttataaaccaaattaccgttacgactccaaacgcccgcgcccaaaccatattacgtatcgttcgccaactccaacgcttcttccatcgttttaaaaataatcaccgccaacaccgaaccaaaaatctcctcctaaaacacccgcatattattctaaccaaacaaaatcgtcgattcgaaataataaccgtctttcaattcaccttccaacaacttacgccgcccgcctataaacacgtcaacgccctcttttttaccgatatcaatataattaaaaataatttccaattacccgtaaaaaacctacgcgcccatttacgtcacgctatcgaacgaattaccgctacgaatactttcgacacgacgaataacgcgttccataaaacgttcgtaaataaattcctacactaaaacacgactcgaacaaatacaaacttcgcccgtaattaaaaacaaacaatacaaaacctt

SEQ ID NO: 7817 - DNA, 788 bp, Artificial Sequence
  chemically treated genomic DNA (Homo sapiens) CpG-island No: 7817
ttcggttttacgtgtagaaatttcgtcggttcgaggtttcggttttaaaacggttttaagagttaaggtttttatagttcgtttttgagggtggtaaagaggtcgcgggggcggtgtttcgcgagatttaaataagtttacgtgggtaggggcggggtttcgcgaaggcgttacggcgcgttcgtgcgttgttgaggttacgcgtcggtagtatttttgttcgggggtcgtaaagcgcggaaggtcgcggtttcggttttttcggaattttttgttcgtttcgtttcgttttttttttattttcgaatttcgtttttcggttcgcggcgattttaggtaattgttgtggttgtcgtattgttttcgtcgggttgtagttgagcgcggagttcgtggggatcggtgaggtaaggagatagtttcggggtaattttggttttttcgttcgcgcgggtttaagcgtttcgggatttttgggttttttttttttttttttggtttcgttcgggggtggttttcgttagtttacgtttttagtgggtttcgtttggtttttcgcgaagtcgcgttcgggcgttagtattcgttttcgtaaggttgttcgttcgtgttttggtttgtgttttcggttatttttgggcgtgcgtatcgtttttttaggagtttgtattttagtttcgatgttagggcggtcggggtgatttcgggttttttcgtttcgggtttgtatatttttgcggcgtagagttaattttagtttgtttagttcggttttttatttttgtaga

SEQ ID NO: 7818 - DNA, 788 bp, Artificial Sequence
  chemically treated genomic DNA (Homo sapiens) CpG-island No: 7818
tctacaaaaataaaaaaccgaactaaacaaactaaaattaactctacgccgcaaaaatatacaaacccgaaacgaaaaaacccgaaatcaccccgaccgccctaacatcgaaactaaaatacaaactcctaaaaaaacgatacgcacgcccaaaaataaccgaaaacacaaaccaaaacacgaacgaacaaccttacgaaaacgaatactaacgcccgaacgcgacttcgcgaaaaaccaaacgaaacccactaaaaacgtaaactaacgaaaaccacccccgaacgaaaccaaaaaaaaaaaaaaaaaacccaaaaatcccgaaacgcttaaacccgcgcgaacgaaaaaaccaaaattaccccgaaactatctccttacctcaccgatccccacgaactccgcgctcaactacaacccgacgaaaacaatacgacaaccacaacaattacctaaaatcgccgcgaaccgaaaaacgaaattcgaaaataaaaaaaaaacgaaacgaaacgaacaaaaaattccgaaaaaaccgaaaccgcgaccttccgcgctttacgacccccgaacaaaaatactaccgacgcgtaacctcaacaacgcacgaacgcgccgtaacgccttcgcgaaaccccgcccctacccacgtaaacttatttaaatctcgcgaaacaccgcccccgcgacctctttaccaccctcaaaaacgaactataaaaaccttaactcttaaaaccgttttaaaaccgaaacctcgaaccgacgaaatttctacacgtaaaaccgaa

SEQ ID NO: 7819 - DNA, 788 bp, Artificial Sequence
  chemically treated genomic DNA (Homo sapiens) CpG-island No: 7819
tttgtagggatggaggatcgggttagataagttggagttggttttgcgtcgtaggggtgtgtaagttcgagacgggggagttcgaggttatttcggtcgttttggtatcggggttgaagtgtaggtttttggaggagcggtgcgtacgtttaggggtagtcgagaatataagttaaggtacgagcggataattttacggggacgagtattggcgttcggacgcgatttcgcgagaggttaggcggaatttattggaagcgtgagttagcggggattattttcgggcgaaattaaaggagaaagaggggaatttaggggtttcggggcgtttaggttcgcgcggacggggaggttagagttgtttcgaagttatttttttattttatcggtttttacgggtttcgcgtttagttatagttcggcgggagtaatgcggtagttataatagttgtttggggtcgtcgcgggtcggaaagcggggttcggggatgggaagggggcggggcgaagcgagtaaaaagtttcggggaagtcgagatcgcgatttttcgcgttttacggttttcgggtaagggtattgtcggcgcgtgattttagtagcgtacgagcgcgtcgtgacgttttcgcggagtttcgtttttgtttacgtgggtttgtttgggtttcgcgaggtatcgttttcgcggtttttttgttatttttagaggcgagttgtggaagttttgatttttagggtcgttttagaatcggggtttcggatcggcggggtttttgtacgtggaatcgga

SEQ ID NO: 7820 - DNA, 788 bp, Artificial Sequence
  chemically treated genomic DNA (Homo sapiens) CpG-island No: 7820
tccgattccacgtacaaaaaccccgccgatccgaaaccccgattctaaaacgaccctaaaaatcaaaacttccacaactcgcctctaaaaataacaaaaaaaccgcgaaaacgatacctcgcgaaacccaaacaaacccacgtaaacaaaaacgaaactccgcgaaaacgtcacgacgcgctcgtacgctactaaaatcacgcgccgacaatacccttacccgaaaaccgtaaaacgcgaaaaatcgcgatctcgacttccccgaaactttttactcgcttcgccccgcccccttcccatccccgaaccccgctttccgacccgcgacgaccccaaacaactattataactaccgcattactcccgccgaactataactaaacgcgaaacccgtaaaaaccgataaaataaaaaaataacttcgaaacaactctaacctccccgtccgcgcgaacctaaacgccccgaaacccctaaattcccctctttctcctttaatttcgcccgaaaataatccccgctaactcacgcttccaataaattccgcctaacctctcgcgaaatcgcgtccgaacgccaatactcgtccccgtaaaattatccgctcgtaccttaacttatattctcgactacccctaaacgtacgcaccgctcctccaaaaacctacacttcaaccccgataccaaaacgaccgaaataacctcgaactcccccgtctcgaacttacacacccctacgacgcaaaaccaactccaacttatctaacccgatcctccatccctacaaa

SEQ ID NO: 7821 - DNA, 1080 bp, Artificial Sequence
  chemically treated genomic DNA (Homo sapiens) CpG-island No: 7821
ggttttttcgtggacggcggtagtacggttttcggtttgcgttcgtagttgtttaggtttttggtttagggttgggcggcggcgtttttgcggcgggcggttcgtattaggttttgttgtagtacggggtagaggcgttggtagttttcgaggtttaggcgtacggttttcgtttagttttttgttaggtcgttttcgtcgttgtttagtagttcggttatttgatttagtataggtatgagcgttacggtgaggtcggcggcggcgcgttttttttcgagtcgcgtggggtttaggagttaggtgggcgcgggtttcggcgcgaggttgaggtcgtagtttattattaggtcgtatatttttacgttcgcgtcggttagggcgagcgcggcggcggtgagcgcggcggttagggtcgagttatcgttttttagtagtagcgtcgatatttcgagttgcgcgcgcgggtagcggtttaggcgtatagtcggttttagcgttttttgtagcgttagcgttagtttacgtttttcgtagtcgttcgggggagcgcggcgtcggcggttcgcgaagggtgcgcggcggaagtcgtagagtaggcgatcgcgtagcgcggtcggggtttcgtcgtttgtttcggtcgggtcgtcgtcgcgttcgtcgttttcggtttgtcgcgggttcgatacggtatatagtattttggtgtttttcgtttttaggtaggtcgagtttttggtttggtttagtagttcggcgcgcgcgtatacgggtcgtagtcgcgttgggtcgcgggtgtcgggcgtttttttttcgtcggtcgcgtatagttgcggcggttgcgattttttagggtcgcggatgcggcggtgatttttaggtatggcggtttttggcgtgcgaatttttttcgtttaacgttttgtcgtatttattggttttttcgttgtttaaagacgcgcggttgcgtatgggttgtcgagagagcggcgggaggtattatagcgtttttggaggttcggagggagaacggttcggttttagttgtgtagggtagtcggatttatttattttgttgga

SEQ ID NO: 7822 - DNA, 1080 bp, Artificial Sequence
  chemically treated genomic DNA (Homo sapiens) CpG-island No: 7822
tccaacaaaataaataaatccgactaccctacacaactaaaaccgaaccgttctccctccgaacctccaaaaacgctataatacctcccgccgctctctcgacaacccatacgcaaccgcgcgtctttaaacaacgaaaaaaccaataaatacgacaaaacgttaaacgaaaaaaattcgcacgccaaaaaccgccatacctaaaaatcaccgccgcatccgcgaccctaaaaaatcgcaaccgccgcaactatacgcgaccgacgaaaaaaaaacgcccgacacccgcgacccaacgcgactacgacccgtatacgcgcgcgccgaactactaaaccaaaccaaaaactcgacctacctaaaaacgaaaaacaccaaaatactatataccgtatcgaacccgcgacaaaccgaaaacgacgaacgcgacgacgacccgaccgaaacaaacgacgaaaccccgaccgcgctacgcgatcgcctactctacgacttccgccgcgcacccttcgcgaaccgccgacgccgcgctcccccgaacgactacgaaaaacgtaaactaacgctaacgctacaaaaaacgctaaaaccgactatacgcctaaaccgctacccgcgcgcgcaactcgaaatatcgacgctactactaaaaaacgataactcgaccctaaccgccgcgctcaccgccgccgcgctcgccctaaccgacgcgaacgtaaaaatatacgacctaataataaactacgacctcaacctcgcgccgaaacccgcgcccacctaactcctaaaccccacgcgactcgaaaaaaaacgcgccgccgccgacctcaccgtaacgctcatacctatactaaatcaaataaccgaactactaaacaacgacgaaaacgacctaacaaaaaactaaacgaaaaccgtacgcctaaacctcgaaaactaccaacgcctctaccccgtactacaacaaaacctaatacgaaccgcccgccgcaaaaacgccgccgcccaaccctaaaccaaaaacctaaacaactacgaacgcaaaccgaaaaccgtactaccgccgtccacgaaaaaacc

SEQ ID NO: 7823 - DNA, 1080 bp, Artificial Sequence
  chemically treated genomic DNA (Homo sapiens) CpG-island No: 7823
tttagtaagatggatggattcggttattttgtataattgggatcgggtcgtttttttttcgggtttttaggggcgttgtagtgtttttcgtcgttttttcgatagtttatgcgtagtcgcgcgtttttaaataacggaagaattagtggatgcggtagggcgttgggcggaaggggttcgtacgttaagaatcgttatgtttggggattatcgtcgtattcgcggttttgaagaatcgtagtcgtcgtagttgtacgcggtcgacgaggaggaggcgttcggtattcgcgatttaacgcggttacggttcgtgtacgcgcgcgtcgggttgttgagttaggttaagggttcggtttatttggaggcgggaggtattaaggtgttgtgtgtcgtgtcgggttcgcgataggtcgagggcggcgagcgcggcggcggttcggtcggagtaggcggcgaggtttcggtcgcgttgcgcggtcgtttgttttgcgattttcgtcgcgtatttttcgcgggtcgtcggcgtcgcgttttttcgggcggttgcgaggagcgtgagttggcgttggcgttgtaggaggcgttggagtcggttgtgcgtttgggtcgttattcgcgcgcgtagttcgaggtgtcggcgttgttgttggaggacggtggttcggttttggtcgtcgcgtttatcgtcgtcgcgttcgttttggtcgacgcgggcgtggagatgtacgatttggtggtgggttgcggttttagtttcgcgtcggggttcgcgtttatttggtttttggattttacgcggttcgaggaagagcgcgtcgtcgtcggttttatcgtggcgtttatgtttgtgttgaattaggtggtcgggttgttgggtagcggcgagggcggtttgatagagagttgggcggaggtcgtacgtttgggtttcgagggttgttagcgtttttatttcgtgttgtagtagagtttggtgcgggtcgttcgtcgtaggggcgtcgtcgtttagttttgaattagaagtttgagtaattacggacgtaagtcgaggatcgtgttgtcgtcgtttacgaaaagatt

SEQ ID NO: 7824 - DNA, 1080 bp, Artificial Sequence
  chemically treated genomic DNA (Homo sapiens) CpG-island No: 7824
aatcttttcgtaaacgacgacaacacgatcctcgacttacgtccgtaattactcaaacttctaattcaaaactaaacgacgacgcccctacgacgaacgacccgcaccaaactctactacaacacgaaataaaaacgctaacaaccctcgaaacccaaacgtacgacctccgcccaactctctatcaaaccgccctcgccgctacccaacaacccgaccacctaattcaacacaaacataaacgccacgataaaaccgacgacgacgcgctcttcctcgaaccgcgtaaaatccaaaaaccaaataaacgcgaaccccgacgcgaaactaaaaccgcaacccaccaccaaatcgtacatctccacgcccgcgtcgaccaaaacgaacgcgacgacgataaacgcgacgaccaaaaccgaaccaccgtcctccaacaacaacgccgacacctcgaactacgcgcgcgaataacgacccaaacgcacaaccgactccaacgcctcctacaacgccaacgccaactcacgctcctcgcaaccgcccgaaaaaacgcgacgccgacgacccgcgaaaaatacgcgacgaaaatcgcaaaacaaacgaccgcgcaacgcgaccgaaacctcgccgcctactccgaccgaaccgccgccgcgctcgccgccctcgacctatcgcgaacccgacacgacacacaacaccttaatacctcccgcctccaaataaaccgaacccttaacctaactcaacaacccgacgcgcgcgtacacgaaccgtaaccgcgttaaatcgcgaataccgaacgcctcctcctcgtcgaccgcgtacaactacgacgactacgattcttcaaaaccgcgaatacgacgataatccccaaacataacgattcttaacgtacgaaccccttccgcccaacgccctaccgcatccactaattcttccgttatttaaaaacgcgcgactacgcataaactatcgaaaaaacgacgaaaaacactacaacgcccctaaaaacccgaaaaaaaaacgacccgatcccaattatacaaaataaccgaatccatccatcttactaaa

SEQ ID NO: 7825 - DNA, 501 bp, Artificial Sequence
  chemically treated genomic DNA (Homo sapiens) CpG-island No: 7825
ggtaaggttttcggtttattcgtaatcgttagattcgttttattagtgattattttttttatcgtatttgtcgtattattagtagtaagtttaatttttatcgacgggtgtttcgcgcggaagcgatttagaatcggcggtagatggttgtaggtagcggttatcgagtagaagatatgtaattcgttagagagcgacggtttttgttgatcgatggtgtggcgtaattgttgatattgtaatagcgtttgttgggcgaaaacgcgtagtttttcgttcgttttagttagcgttatcgtgcggttatcgcgtataaatagcggttgatcgagatttttttttaggcgttgaatttgtcgtgagagcgtggatgggttaacgtgtatcgttcgcgcgttgcggttaaaatggcggtttttcgttagatgtaggaaggtttttagatcgcgtaaatttatagggatagttttcgatgttgacgttgtaaaaaaagtaatgtga

SEQ ID NO: 7826 - DNA, 501 bp, Artificial Sequence
  chemically treated genomic DNA (Homo sapiens) CpG-island No: 7826
tcacattactttttttacaacgtcaacatcgaaaactatccctataaatttacgcgatctaaaaaccttcctacatctaacgaaaaaccgccattttaaccgcaacgcgcgaacgatacacgttaacccatccacgctctcacgacaaattcaacgcctaaaaaaaaatctcgatcaaccgctatttatacgcgataaccgcacgataacgctaactaaaacgaacgaaaaactacgcgttttcgcccaacaaacgctattacaatatcaacaattacgccacaccatcgatcaacaaaaaccgtcgctctctaacgaattacatatcttctactcgataaccgctacctacaaccatctaccgccgattctaaatcgcttccgcgcgaaacacccgtcgataaaaattaaacttactactaataatacgacaaatacgataaaaaaaataatcactaataaaacgaatctaacgattacgaataaaccgaaaaccttacc

SEQ ID NO: 7827 - DNA, 501 bp, Artificial Sequence
  chemically treated genomic DNA (Homo sapiens) CpG-island No: 7827
ttatattgttttttttgtaacgttaatatcgagggttgtttttgtggatttacgcgatttgaaaatttttttgtatttggcggaaagtcgttattttggtcgtagcgcgcgggcgatgtacgttagtttatttacgtttttacggtagatttagcgtttggaagaagatttcggttagtcgttgtttgtgcgcgataatcgtacggtgacgttgattgaagcgggcgaagagttgcgcgttttcgtttagtaaacgttgttgtagtattagtagttgcgttatattatcgattagtaagggtcgtcgttttttggcgaattatatattttttgttcggtgatcgttgtttatagttatttgtcgtcgattttggatcgttttcgcgcggaatattcgtcggtggagattaaatttattattggtgatgcggtagatgcgatggaaaaggtggttattggtgaagcggatttggcgattgcgggtaaatcggaaattttgtt

SEQ ID NO: 7828 - DNA, 501 bp, Artificial Sequence
  chemically treated genomic DNA (Homo sapiens) CpG-island No: 7828
aacaaaatttccgatttacccgcaatcgccaaatccgcttcaccaataaccaccttttccatcgcatctaccgcatcaccaataataaatttaatctccaccgacgaatattccgcgcgaaaacgatccaaaatcgacgacaaataactataaacaacgatcaccgaacaaaaaatatataattcgccaaaaaacgacgacccttactaatcgataatataacgcaactactaatactacaacaacgtttactaaacgaaaacgcgcaactcttcgcccgcttcaatcaacgtcaccgtacgattatcgcgcacaaacaacgactaaccgaaatcttcttccaaacgctaaatctaccgtaaaaacgtaaataaactaacgtacatcgcccgcgcgctacgaccaaaataacgactttccgccaaatacaaaaaaattttcaaatcgcgtaaatccacaaaaacaaccctcgatattaacgttacaaaaaaaacaatataa

SEQ ID NO: 7829 - DNA, 519 bp, Artificial Sequence
  chemically treated genomic DNA (Homo sapiens) CpG-island No: 7829
  unsure (487..)
tgattgcgtcgtttgtcgcgttggttacggttttttcgtggttggggacgttcggtatagtaggaatcggaatgatattcgtattgattgcgttggtgttttatgttttgttgtcgttggtgcgcggcgtggtagtcggtttgaattagatttcgcgcgatgtgttggaaagcgttagagcgatggggatgagcggggcgtagcgttttttgtatgtttagttatcgttggcgttatcggtatttttgcgtagtttgcgggtggtgatggtgtaaattgtaggtatggcggtgattgcggcgttaatcggcgtaggcggttttggtgcgttgggttttttttacggggttggttaagtacgcgttattgatttagtgttgttgggggtgatttcggtaattgttttggcggtgtttatcgacgcggttgtttcggaatttgggtttaatttcggtatttttgggttttttgggtatagggtggaaanncggtagagtgatttgaatttagttatgttag

SEQ ID NO: 7830 - DNA, 519 bp, Artificial Sequence
  chemically treated genomic DNA (Homo sapiens) CpG-island No: 7830
  unsure (32..)
ctaacataactaaattcaaatcactctaccgnntttccaccctatacccaaaaaacccaaaaataccgaaattaaacccaaattccgaaacaaccgcgtcgataaacaccgccaaaacaattaccgaaatcacccccaacaacactaaatcaataacgcgtacttaaccaaccccgtaaaaaaaacccaacgcaccaaaaccgcctacgccgattaacgccgcaatcaccgccatacctacaatttacaccatcaccacccgcaaactacgcaaaaataccgataacgccaacgataactaaacatacaaaaaacgctacgccccgctcatccccatcgctctaacgctttccaacacatcgcgcgaaatctaattcaaaccgactaccacgccgcgcaccaacgacaacaaaacataaaacaccaacgcaatcaatacgaatatcattccgattcctactataccgaacgtccccaaccacgaaaaaaccgtaaccaacgcgacaaacgacgcaatca

SEQ ID NO: 7831 - DNA, 519 bp, Artificial Sequence
  chemically treated genomic DNA (Homo sapiens) CpG-island No: 7831
  unsure (32..)
ttgatatggttaaatttaagttattttatcgnntttttattttgtgtttaaaaggtttaagggtgtcggagttaagtttaaatttcgaaatagtcgcgtcggtaagtatcgttagaataattatcgggattatttttagtaatattaaattaatggcgcgtgtttagttagtttcgtgggaaaaatttagcgtattaaaatcgtttgcgtcgattaacgtcgtaattatcgttatatttatagtttgtattattattattcgtaggttgcgtagaaatatcggtaacgttagcggtaattgaatatgtaggaaacgttgcgtttcgtttatttttatcgttttggcgttttttagtatatcgcgcgggatttggtttaaatcgattattacgtcgcgtattagcggtagtaaggtatagagtattagcgtaattagtgcgggtgttatttcggtttttgttatgtcgagcgtttttagttacggaaaggtcgtaattagcgcggtaagcggcgtaatta

SEQ ID NO: 7832 - DNA, 519 bp, Artificial Sequence
  chemically treated genomic DNA (Homo sapiens) CpG-island No: 7832
  unsure (487..)
taattacgccgcttaccgcgctaattacgacctttccgtaactaaaaacgctcgacataacaaaaaccgaaataacacccgcactaattacgctaatactctataccttactaccgctaatacgcgacgtaataatcgatttaaaccaaatcccgcgcgatatactaaaaaacgccaaaacgataaaaataaacgaaacgcaacgtttcctacatattcaattaccgctaacgttaccgatatttctacgcaacctacgaataataataatacaaactataaatataacgataattacgacgttaatcgacgcaaacgattttaatacgctaaatttttcccacgaaactaactaaacacgcgccattaatttaatattactaaaaataatcccgataattattctaacgatacttaccgacgcgactatttcgaaatttaaacttaactccgacacccttaaaccttttaaacacaaaataaaaanncgataaaataacttaaatttaaccatatcaa

SEQ ID NO: 7833 - DNA, 706 bp, Artificial Sequence
  chemically treated genomic DNA (Homo sapiens) CpG-island No: 7833
acgtatttattggtgattttgatatagttgttgacgattagagagcgtacgttatgggattagttcgtgaacgttggtgtaatcggcgttgtaagaaacgtgtttattttttagattagattaggtcgggttggagataattttgcgcggttgtgtttgaatatcgcggaagcggattttttcgttttttttatttagcgttagatgcgtatggttacgatcggtaaattcgtttagggtagtttaggtttttacggttatttgatcgttggttttcggtgttagtgttaggattatttttgtcgtattaattgcggtgtttagtatcggttggtttttcgtcggatttttcgttttggtgtagttgagtttacgtagtagatttatttcgttttgggtgttttaggtaatttttttatcgttattatcgattttttttattagcgggtcgatagaggtaaagcgttcgtaagtcgtcggataatcgcgttttacgattataatgtgtggcgcggttttatacgtgggattaggtcgtattcgttttttttttagttttttatatttagcggttgcgttagtttagcggtagagttatgttggataggtagcgtgacgatgtcggtttttttatttagatggtttaacgttaatatatttcggagaaattttttcgcgatggttttgtagattttttagtcgtttt

SEQ ID NO: 7834 - DNA, 706 bp, Artificial Sequence
  chemically treated genomic DNA (Homo sapiens) CpG-island No: 7834
aaaacgactaaaaaatctacaaaaccatcgcgaaaaaatttctccgaaatatattaacgttaaaccatctaaataaaaaaaccgacatcgtcacgctacctatccaacataactctaccgctaaactaacgcaaccgctaaatataaaaaactaaaaaaaaaacgaatacgacctaatcccacgtataaaaccgcgccacacattataatcgtaaaacgcgattatccgacgacttacgaacgctttacctctatcgacccgctaataaaaaaaatcgataataacgataaaaaaattacctaaaacacccaaaacgaaataaatctactacgtaaactcaactacaccaaaacgaaaaatccgacgaaaaaccaaccgatactaaacaccgcaattaatacgacaaaaataatcctaacactaacaccgaaaaccaacgatcaaataaccgtaaaaacctaaactaccctaaacgaatttaccgatcgtaaccatacgcatctaacgctaaataaaaaaaacgaaaaaatccgcttccgcgatattcaaacacaaccgcgcaaaattatctccaacccgacctaatctaatctaaaaaataaacacgtttcttacaacgccgattacaccaacgttcacgaactaatcccataacgtacgctctctaatcgtcaacaactatatcaaaatcaccaataaatacgt

SEQ ID NO: 7835 - DNA, 706 bp, Artificial Sequence
  chemically treated genomic DNA (Homo sapiens) CpG-island No: 7835
aaagcgattgggaaatttataaagttatcgcgaagaaattttttcgaagtgtgttggcgttgggttatttgggtaaagaaatcgatatcgttacgttgtttatttagtatgattttgtcgttgaattggcgtagtcgttggatgtgaaagattggaaaaaaggcgagtgcgatttgattttacgtgtaaaatcgcgttatatattatggtcgtagagcgcgattattcggcgatttacgaacgttttatttttatcggttcgttgatggagaaaatcggtaatggcggtaaagggattgtttggaatatttagagcgagatggatttgttgcgtaagtttaattatattaaagcggaaggttcggcgaaaggttagtcgatgttgaatatcgtaattgatgcggtagagatgattttgatattggtatcggaaattaacggttaggtagtcgtgaaagtttgggttgttttgagcgaatttatcggtcgtgattatacgtatttggcgttgaataaagaagacgagaagattcgttttcgcgatatttaggtatagtcgcgtaaaattatttttagttcgatttggtttggtttggaagatgaatacgttttttataacgtcggttatattaacgtttacgagttgattttatggcgtacgttttttggtcgttagtaattgtattaggattattagtggatgcgt

SEQ ID NO: 7836 - DNA, 706 bp, Artificial Sequence
  chemically treated genomic DNA (Homo sapiens) CpG-island No: 7836
acgcatccactaataatcctaatacaattactaacgaccaaaaaacgtacgccataaaatcaactcgtaaacgttaatataaccgacgttataaaaaacgtattcatcttccaaaccaaaccaaatcgaactaaaaataattttacgcgactatacctaaatatcgcgaaaacgaatcttctcgtcttctttattcaacgccaaatacgtataatcacgaccgataaattcgctcaaaacaacccaaactttcacgactacctaaccgttaatttccgataccaatatcaaaatcatctctaccgcatcaattacgatattcaacatcgactaacctttcgccgaaccttccgctttaatataattaaacttacgcaacaaatccatctcgctctaaatattccaaacaatccctttaccgccattaccgattttctccatcaacgaaccgataaaaataaaacgttcgtaaatcgccgaataatcgcgctctacgaccataatatataacgcgattttacacgtaaaatcaaatcgcactcgccttttttccaatctttcacatccaacgactacgccaattcaacgacaaaatcatactaaataaacaacgtaacgatatcgatttctttacccaaataacccaacgccaacacacttcgaaaaaatttcttcgcgataactttataaatttcccaatcgcttt

SEQ ID NO: 7837 - DNA, 579 bp, Artificial Sequence
  chemically treated genomic DNA (Homo sapiens) CpG-island No: 7837
gagtcgcgggcgttgtaattgttggtacgcgtcgttgaaggtagtttgcgagatgttttaagtttgatcgattaggcgattgttagcggtgacggttaggttttaatttaggcggttagtgcgatgttgggtacgtttgacgacgattaggcgttgtcgttggttgaagcgatggtcgaggttaacggcgagcgcgtaatggcgttgattaatgaagtcgttgttcgtggtatcgagtgggaagcgttgttggtggaaatgttcggtttgttgtatcgtattgcgatggtataattttcgtttgttgtatttggtaacgatatggtcgttatcgagttgcggatgcgtgaattggcgcgtattatatcgtcgacggatatttagttttattattagacgttgttgattggtcgtaaagaattatcgtatgcgtcggatcgtcgtatgggcgttgagatgacgttgttgcgcgcgttggtattttattcgcgtatgtcgttgtttgagttagaagtgttacgatagttttttgtattcgtcgcgttaacggtagtaatgacgttaatttaggtgtcgtcg

SEQ ID NO: 7838 - DNA, 579 bp, Artificial Sequence
  chemically treated genomic DNA (Homo sapiens) CpG-island No: 7838
cgacgacacctaaattaacgtcattactaccgttaacgcgacgaatacaaaaaactatcgtaacacttctaactcaaacaacgacatacgcgaataaaataccaacgcgcgcaacaacgtcatctcaacgcccatacgacgatccgacgcatacgataattctttacgaccaatcaacaacgtctaataataaaactaaatatccgtcgacgatataatacgcgccaattcacgcatccgcaactcgataacgaccatatcgttaccaaatacaacaaacgaaaattataccatcgcaatacgatacaacaaaccgaacatttccaccaacaacgcttcccactcgataccacgaacaacgacttcattaatcaacgccattacgcgctcgccgttaacctcgaccatcgcttcaaccaacgacaacgcctaatcgtcgtcaaacgtacccaacatcgcactaaccgcctaaattaaaacctaaccgtcaccgctaacaatcgcctaatcgatcaaacttaaaacatctcgcaaactaccttcaacgacgcgtaccaacaattacaacgcccgcgactc

SEQ ID NO: 7839 - DNA, 579 bp, Artificial Sequence
  chemically treated genomic DNA (Homo sapiens) CpG-island No: 7839
cggcggtatttgggttggcgttattattgtcgttggcgcgacgggtgtaaaggattgtcgtggtatttttggtttaggtagcggtatacgcggatggaatgttagcgcgcgtagtagcgttattttaacgtttatgcgacggttcggcgtatacggtaattttttgcgattaattaatagcgtttgatagtaaagttgaatattcgtcggcggtatggtgcgcgttagtttacgtattcgtagttcgatggcggttatgtcgttgttaagtgtagtaggcgaaagttgtattatcgtaatacgatgtaataggtcgagtatttttattagtaacgttttttattcgatattacgggtagcggttttattaattagcgttattacgcgttcgtcgttggtttcgattatcgttttaattagcgatagcgtttgatcgtcgttaagcgtatttagtatcgtattgatcgtttgggttgaaatttggtcgttatcgttggtaatcgtttggtcggttagatttaaggtatttcgtaggttgtttttagcggcgcgtgttagtaattgtagcgttcgcggttt

SEQ ID NO: 7840 - DNA, 579 bp, Artificial Sequence
  chemically treated genomic DNA (Homo sapiens) CpG-island No: 7840
aaaccgcgaacgctacaattactaacacgcgccgctaaaaacaacctacgaaataccttaaatctaaccgaccaaacgattaccaacgataacgaccaaatttcaacccaaacgatcaatacgatactaaatacgcttaacgacgatcaaacgctatcgctaattaaaacgataatcgaaaccaacgacgaacgcgtaataacgctaattaataaaaccgctacccgtaatatcgaataaaaaacgttactaataaaaatactcgacctattacatcgtattacgataatacaactttcgcctactacacttaacaacgacataaccgccatcgaactacgaatacgtaaactaacgcgcaccataccgccgacgaatattcaactttactatcaaacgctattaattaatcgcaaaaaattaccgtatacgccgaaccgtcgcataaacgttaaaataacgctactacgcgcgctaacattccatccgcgtataccgctacctaaaccaaaaataccacgacaatcctttacacccgtcgcgccaacgacaataataacgccaacccaaataccgccg

SEQ ID NO: 7841 - DNA, 673 bp, Artificial Sequence
  chemically treated genomic DNA (Homo sapiens) CpG-island No: 7841
gtttttcgttacgttagttgttaaacgtagaaatagcggtaaaagcggcgaattaggtttcgattttatgtgtcgatttttcggtaatggcggaaagtttttcgttattgacggtatttagtttttgtatgcgtttttgttttagtaaagttatgaattggttattttaaatcgggttgagcggatgtagcgttttttgatttttaataaattttttagcggcgttaattattcgttgttgacgtaattcgcgtttattggcgggtaaatttttttcgttttttaatagacggtcgcgtatatgggtatcggttttcgttagttcgggtatcggcggttgatgggaaagtttatcggaatttaggaatagtacgcgtttattgagagtgttggtgaaacgtttaatggttttatttaatatgcgggtacgttggaaatcgggtagcggcgtggcgatatcgttgatgaatataggtagaattggtattttatttagtttatcgagtaggaattttagcggttgggcgaattcgtggtttatttgtatatagtaagaaacggtaagatcgatttcgttttttatgacggtatgcgtataggttttcgttagttttataggtacgggtagtttttttgtcgtattgtcgaaattattaattgtcgtcgttttaat

SEQ ID NO: 7842 - DNA, 673 bp, Artificial Sequence
  chemically treated genomic DNA (Homo sapiens) CpG-island No: 7842
attaaaacgacgacaattaataatttcgacaatacgacaaaaaaactacccgtacctataaaactaacgaaaacctatacgcataccgtcataaaaaacgaaatcgatcttaccgtttcttactatatacaaataaaccacgaattcgcccaaccgctaaaattcctactcgataaactaaataaaataccaattctacctatattcatcaacgatatcgccacgccgctacccgatttccaacgtacccgcatattaaataaaaccattaaacgtttcaccaacactctcaataaacgcgtactattcctaaattccgataaactttcccatcaaccgccgatacccgaactaacgaaaaccgatacccatatacgcgaccgtctattaaaaaacgaaaaaaatttacccgccaataaacgcgaattacgtcaacaacgaataattaacgccgctaaaaaatttattaaaaatcaaaaaacgctacatccgctcaacccgatttaaaataaccaattcataactttactaaaacaaaaacgcatacaaaaactaaataccgtcaataacgaaaaactttccgccattaccgaaaaatcgacacataaaatcgaaacctaattcgccgcttttaccgctatttctacgtttaacaactaacgtaacgaaaaac

SEQ ID NO: 7843 - DNA, 673 bp, Artificial Sequence
  chemically treated genomic DNA (Homo sapiens) CpG-island No: 7843
gttggagcgacggtaattggtgatttcggtagtgcggtaggagagttgttcgtgtttgtggagttggcggaggtttgtgcgtatgtcgttatgaagagcgggatcgattttgtcgttttttattgtatgtaggtggattacgggttcgtttagtcgttggagtttttgttcggtgggttggataaggtgttagttttgtttgtgtttattaacggtgtcgttacgtcgttgttcggtttttagcgtattcgtatgttgggtgaagttattggacgttttattagtatttttaataaacgcgtgttgtttttgggtttcggtgggtttttttattagtcgtcggtgttcgaattggcgaaagtcgatgtttatatgcgcgatcgtttgttggggagcgggaaagatttattcgttagtgagcgcgaattgcgttagtaacgggtgattagcgtcgttgagaagtttgttgaggattagagaacgttgtattcgtttaattcgatttgggataattagtttatgattttgttggagtagggacgtatataggaattggatgtcgttagtaacgaagagtttttcgttattgtcggaaagtcgatatatgaaatcgaaatttggttcgtcgtttttgtcgttatttttgcgtttggtaattggcgtagcgaagggt

SEQ ID NO: 7844 - DNA, 673 bp, Artificial Sequence
  chemically treated genomic DNA (Homo sapiens) CpG-island No: 7844
acccttcgctacgccaattaccaaacgcaaaaataacgacaaaaacgacgaaccaaatttcgatttcatatatcgactttccgacaataacgaaaaactcttcgttactaacgacatccaattcctatatacgtccctactccaacaaaatcataaactaattatcccaaatcgaattaaacgaatacaacgttctctaatcctcaacaaacttctcaacgacgctaatcacccgttactaacgcaattcgcgctcactaacgaataaatctttcccgctccccaacaaacgatcgcgcatataaacatcgactttcgccaattcgaacaccgacgactaataaaaaaacccaccgaaacccaaaaacaacacgcgtttattaaaaatactaataaaacgtccaataacttcacccaacatacgaatacgctaaaaaccgaacaacgacgtaacgacaccgttaataaacacaaacaaaactaacaccttatccaacccaccgaacaaaaactccaacgactaaacgaacccgtaatccacctacatacaataaaaaacgacaaaatcgatcccgctcttcataacgacatacgcacaaacctccgccaactccacaaacacgaacaactctcctaccgcactaccgaaatcaccaattaccgtcgctccaac

SEQ ID NO: 7845 - DNA, 693 bp, Artificial Sequence
  chemically treated genomic DNA (Homo sapiens) CpG-island No: 7845
ggaataggaattttagcggttcggtagtgtcgttaacgacgtaggcgattaggttagaaattagtagatttttaattttatggcgatttttcgggcgcgcgtagtgatatatagttaacgttgtatttggtagatcgtcgagaaacgtaggtattttattttgcgaaaggaaacgcgtggcgtttttagaaaaatcgtgagtggtcgggtaatttaattgcgtttggaagatggttagtgcgtcgttgacggtttgatcgtagattttttgcgtgtcgtttgcgtcggtaaagcgaattaatgttattagaatgtgatgtagattaaacggtaatagtagacgtttatcggtattaaatagtatcggttcgaaattattcgcgttgtttattatatggtttaagtcgttaatatttatggcgaaaatcggttagattaatggaattattaggtcgataaggtttattattagcgaggagataattggtacgaagcgcgtatcgtcgaagaatgttagcgtattcggtaggcggatattatggaaacgtttatgtagtatttagacgataatatcggcgattatcgtatcgaggatttcggtatcgatcgattggattttaagaatgttttggatgttattggtttttagaatcgcggtattcgtggttggtagaatgtttttattggttaatt

SEQ ID NO: 7846 - DNA, 693 bp, Artificial Sequence
  chemically treated genomic DNA (Homo sapiens) CpG-island No: 7846
aattaaccaataaaaacattctaccaaccacgaataccgcgattctaaaaaccaataacatccaaaacattcttaaaatccaatcgatcgataccgaaatcctcgatacgataatcgccgatattatcgtctaaatactacataaacgtttccataatatccgcctaccgaatacgctaacattcttcgacgatacgcgcttcgtaccaattatctcctcgctaataataaaccttatcgacctaataattccattaatctaaccgattttcgccataaatattaacgacttaaaccatataataaacaacgcgaataatttcgaaccgatactatttaataccgataaacgtctactattaccgtttaatctacatcacattctaataacattaattcgctttaccgacgcaaacgacacgcaaaaaatctacgatcaaaccgtcaacgacgcactaaccatcttccaaacgcaattaaattacccgaccactcacgatttttctaaaaacgccacgcgtttcctttcgcaaaataaaatacctacgtttctcgacgatctaccaaatacaacgttaactatatatcactacgcgcgcccgaaaaatcgccataaaattaaaaatctactaatttctaacctaatcgcctacgtcgttaacgacactaccgaaccgctaaaattcctattcc

SEQ ID NO: 7847 - DNA, 693 bp, Artificial Sequence
  chemically treated genomic DNA (Homo sapiens) CpG-island No: 7847
ggttgattaataaaggtattttgttaattacggatgtcgcggttttgaaagttaataatatttagagtatttttgggatttagtcgatcgatatcgggattttcggtgcggtgatcgtcggtattatcgtttggatgttgtatgagcgtttttataatattcgtttgtcggatgcgttggtatttttcggcggtacgcgtttcgtattaattattttttcgttggtgatgggttttgtcggtttggtgattttattagtttggtcgattttcgttatgggtattagcggtttgggttatatgataaatagcgcgggtgatttcggatcgatgttgtttggtatcggtgaacgtttgttgttgtcgtttggtttgtattatattttggtggtattaattcgttttatcgacgtaggcggtacgtaggaagtttgcggttaaatcgttagcggcgtattgattattttttaggcgtaattgagttgttcgattatttacggtttttttgaaagcgttacgcgttttttttcgtaaggtaaaatgtttgcgtttttcggcggtttgttaggtgtagcgttagttatgtattattgcgcgcgttcggaaaatcgttataaaattaaaggtttgttgatttttggtttgatcgtttgcgtcgttggcggtattatcgaatcgttggaatttttgtttt

SEQ ID NO: 7848 - DNA, 693 bp, Artificial Sequence
  chemically treated genomic DNA (Homo sapiens) CpG-island No: 7848
aaaacaaaaattccaacgattcgataataccgccaacgacgcaaacgatcaaaccaaaaatcaacaaacctttaattttataacgattttccgaacgcgcgcaataatacataactaacgctacacctaacaaaccgccgaaaaacgcaaacattttaccttacgaaaaaaaacgcgtaacgctttcaaaaaaaccgtaaataatcgaacaactcaattacgcctaaaaaataatcaatacgccgctaacgatttaaccgcaaacttcctacgtaccgcctacgtcgataaaacgaattaataccaccaaaatataatacaaaccaaacgacaacaacaaacgttcaccgataccaaacaacatcgatccgaaatcacccgcgctatttatcatataacccaaaccgctaatacccataacgaaaatcgaccaaactaataaaatcaccaaaccgacaaaacccatcaccaacgaaaaaataattaatacgaaacgcgtaccgccgaaaaataccaacgcatccgacaaacgaatattataaaaacgctcatacaacatccaaacgataataccgacgatcaccgcaccgaaaatcccgatatcgatcgactaaatcccaaaaatactctaaatattattaactttcaaaaccgcgacatccgtaattaacaaaatacctttattaatcaacc

SEQ ID NO: 7849 - DNA, 659 bp, Artificial Sequence
  chemically treated genomic DNA (Homo sapiens) CpG-island No: 7849
  unsure (428)
gtaggtcggggcgattattatgttgatcgtgcgtttggggtcggtgatttcgtttatgattggcggtttattgttggcgatcggtggcgtagtttggaattacgggttggcggcggcgggtacgtttattattttgttatcgttgttaagtttttcggcgttgttatcgttatcgtagtcgcgtgagtattcgttgaaattattattggtaggatttcgttttttgtttgttagttcgttggtgggcgggattgcgttgttgggtggtttattgacgatggcgagcgcggtgcgggtattgtattcggcgttggttgataattggtagatgttagcggtatagattggttttttttacgcggcgatttcgttcggcgcggttattggtgcgttaattagcgggaagttggtatatagtgcgcgattanggttattgatgttgttttttacgttgggatcgtttttcgttattggtttgtttggtttgatgtcgatgtggattttaggcgtggtttgtttggcgttgttcggttggttgagtgcggttagttcgttgttgtaatatataatgttgtaaacgtaagattcgggaagcgatgttagggcggattaacgggttgtggacggggtaaaagtgacggcgatgttattgggtcggg

SEQ ID NO: 7850 - DNA, 659 bp, Artificial Sequence
  chemically treated genomic DNA (Homo sapiens) CpG-island No: 7850
  unsure (232)
cccgacccaataacatcgccgtcacttttaccccgtccacaacccgttaatccgccctaacatcgcttcccgaatcttacgtttacaacattatatattacaacaacgaactaaccgcactcaaccaaccgaacaacgccaaacaaaccacgcctaaaatccacatcgacatcaaaccaaacaaaccaataacgaaaaacgatcccaacgtaaaaaacaacatcaataaccntaatcgcgcactatataccaacttcccgctaattaacgcaccaataaccgcgccgaacgaaatcgccgcgtaaaaaaaaccaatctataccgctaacatctaccaattatcaaccaacgccgaatacaatacccgcaccgcgctcgccatcgtcaataaaccacccaacaacgcaatcccgcccaccaacgaactaacaaacaaaaaacgaaatcctaccaataataatttcaacgaatactcacgcgactacgataacgataacaacgccgaaaaacttaacaacgataacaaaataataaacgtacccgccgccgccaacccgtaattccaaactacgccaccgatcgccaacaataaaccgccaatcataaacgaaatcaccgaccccaaacgcacgatcaacataataatcgccccgacctac

SEQ ID NO: 7851 - DNA, 659 bp, Artificial Sequence
  chemically treated genomic DNA (Homo sapiens) CpG-island No: 7851
  unsure (232)
ttcggtttaatggtatcgtcgttatttttgtttcgtttataattcgttaattcgttttaatatcgtttttcgggttttgcgtttgtagtattgtgtattgtagtaacgagttgatcgtatttaattagtcgaatagcgttagataaattacgtttaaaatttatatcggtattaggttaaatagattaatggcgaggaacgattttagcgtggagagtagtattaataattntggtcgcgtattatgtgttagtttttcgttggttaacgtattaatagtcgcgtcgagcgggatcgtcgcgtagagaaaattaatttgtgtcgttgatatttgttagttgttagttagcgtcggatatagtattcgtatcgcgttcgttatcgttaataaattatttagtagcgtaatttcgtttattagcgggttggtaagtagaaaacgaaattttgttagtaatgattttaacggatgtttacgcggttgcggtggcggtggtaacgtcggaaggtttaataacggtagtaaggtaataaacgtgttcgtcgtcgttagttcgtagttttaggttacgttatcggtcgttagtaataaatcgttaattatgggcgaaattatcgattttagacgtacggttaatatggtgatcgtttcggtttgt

SEQ ID NO: 7852 - DNA, 659 bp, Artificial Sequence
  chemically treated genomic DNA (Homo sapiens) CpG-island No: 7852
  unsure (428)
acaaaccgaaacgatcaccatattaaccgtacgtctaaaatcgataatttcgcccataattaacgatttattactaacgaccgataacgtaacctaaaactacgaactaacgacgacgaacacgtttattaccttactaccgttattaaaccttccgacgttaccaccgccaccgcaaccgcgtaaacatccgttaaaatcattactaacaaaatttcgttttctacttaccaacccgctaataaacgaaattacgctactaaataatttattaacgataacgaacgcgatacgaatactatatccgacgctaactaacaactaacaaatatcaacgacacaaattaattttctctacgcgacgatcccgctcgacgcgactattaatacgttaaccaacgaaaaactaacacataatacgcgaccanaattattaatactactctccacgctaaaatcgttcctcgccattaatctatttaacctaataccgatataaattttaaacgtaatttatctaacgctattcgactaattaaatacgatcaactcgttactacaatacacaatactacaaacgcaaaacccgaaaaacgatattaaaacgaattaacgaattataaacgaaacaaaaataacgacgataccattaaaccgaa

SEQ ID NO: 7853 - DNA, 641 bp, Artificial Sequence
  chemically treated genomic DNA (Homo sapiens) CpG-island No: 7853
ttgcgtaaattcgcgattggttataagtcggatagcggaggcgaagtgttgttgatgaacggcgacgacgcgcgttcggtgcgtgtttcggagattagtgtgttggtgcgtagtcggtaggaggtcgattaggtgcgcgatgttttaacgttgttggaaatttttttcgtttatttttcgaatcgcgatagtgttttagaaattttggacgcgtaggaaatgttatggtggttgtaggcggtgatgacgttcgaacgtgagaatattttgcgtagtgcgttggtaacgttaatgatggggttgaaagtattggatatcgaaacgttgaatattgacgaatatgcgtgggattgtggtattcgaagtagttcgatggttatcggtaaatttggcgtaaacgtggcgttatgtcgatgttgcgggcgttgatgtcggcgcgtaaattgtcgtgtagttggaaggtgaacggatgttggtacgtttcgggcgtagtcgtttttcgttgtttattttgttagcggcggatttttcgaatttcgatgattggtagagtgaagtcgaatttattttgtcgtaggtaacgatgaagcgtttgattgaagcgatttagttttttatggcgtattaggacgttcgttatt

SEQ ID NO: 7854 - DNA, 641 bp, Artificial Sequence
  chemically treated genomic DNA (Homo sapiens) CpG-island No: 7854
aataacgaacgtcctaatacgccataaaaaactaaatcgcttcaatcaaacgcttcatcgttacctacgacaaaataaattcgacttcactctaccaatcatcgaaattcgaaaaatccgccgctaacaaaataaacaacgaaaaacgactacgcccgaaacgtaccaacatccgttcaccttccaactacacgacaatttacgcgccgacatcaacgcccgcaacatcgacataacgccacgtttacgccaaatttaccgataaccatcgaactacttcgaataccacaatcccacgcatattcgtcaatattcaacgtttcgatatccaatactttcaaccccatcattaacgttaccaacgcactacgcaaaatattctcacgttcgaacgtcatcaccgcctacaaccaccataacatttcctacgcgtccaaaatttctaaaacactatcgcgattcgaaaaataaacgaaaaaaatttccaacaacgttaaaacatcgcgcacctaatcgacctcctaccgactacgcaccaacacactaatctccgaaacacgcaccgaacgcgcgtcgtcgccgttcatcaacaacacttcgcctccgctatccgacttataaccaatcgcgaatttacgcaa

SEQ ID NO: 7855 - DNA, 641 bp, Artificial Sequence
  chemically treated genomic DNA (Homo sapiens) CpG-island No: 7855
aatagcgaacgttttgatgcgttatagaaaattgggtcgttttaattagacgttttatcgttgtttgcggtagggtaaattcgattttattttgttagttatcgaggttcgggaaattcgtcgttggtagggtagatagcgaaaaacggttacgttcggagcgtattagtattcgtttattttttagttgtacggtaatttacgcgtcgatattagcgttcgtagtatcggtataacgttacgtttgcgttagatttgtcgataattatcgaattgtttcgagtattatagttttacgtatgttcgttagtgtttagcgtttcgatatttagtgtttttagttttattattgacgttattagcgtattacgtagggtgtttttacgttcgggcgttattatcgtttgtaattattatagtattttttgcgcgtttagagtttttaaaatattgtcgcggttcgaaaggtaaacggaagggatttttagtaacgttaaggtatcgcgtatttggtcggttttttgtcggttgcgtattagtatattgattttcgaagtacgtatcggacgcgcgtcgtcgtcgtttattagtaatatttcgttttcgttgttcggtttgtagttagtcgcggatttgcgtag

SEQ ID NO: 7856 - DNA, 641 bp, Artificial Sequence
  chemically treated genomic DNA (Homo sapiens) CpG-island No: 7856
ctacgcaaatccgcgactaactacaaaccgaacaacgaaaacgaaatattactaataaacgacgacgacgcgcgtccgatacgtacttcgaaaatcaatatactaatacgcaaccgacaaaaaaccgaccaaatacgcgataccttaacgttactaaaaatcccttccgtttacctttcgaaccgcgacaatattttaaaaactctaaacgcgcaaaaaatactataataattacaaacgataataacgcccgaacgtaaaaacaccctacgtaatacgctaataacgtcaataataaaactaaaaacactaaatatcgaaacgctaaacactaacgaacatacgtaaaactataatactcgaaacaattcgataattatcgacaaatctaacgcaaacgtaacgttataccgatactacgaacgctaatatcgacgcgtaaattaccgtacaactaaaaaataaacgaatactaatacgctccgaacgtaaccgtttttcgctatctaccctaccaacgacgaatttcccgaacctcgataactaacaaaataaaatcgaatttaccctaccgcaaacaacgataaaacgtctaattaaaacgacccaattttctataacgcatcaaaacgttcgctatt

SEQ ID NO: 7857 - DNA, 564 bp, Artificial Sequence
  chemically treated genomic DNA (Homo sapiens) CpG-island No: 7857
ggtcgaaaaatgttggattgtggtgaaggcgttggtcgatgtcgatagtcgggagttttcgttagttatatcgcgcgtttttgtcgcggtttggggcgagcgagaaattcgcgatatgtacgggttgatttcggttggtttgtcggattagcgtcgtttggtgttgttcgatgattggtcggaagatatgtattcgttgcgtaaagatgcgatggattatcgattgcgttttgaatcgacgattgatttcgaaacgtattcgtttattaatgagggtaatagcgatgcgcgggtgatttttgtcggttcgttgtatattattttcgatgaatcgggttattttcgtttgtttgtggatggcgagtaaattgtcgatgttgattatcgtttgttttatgtttatcgcggtatggagaaattggtagaaacgcggatgggttataacgaagtgatttttttatcggatcgcgtgtgttggatttgcgggtttgtttatagtgtggtttatattaattcggttgtaaatgttttggggattgagtgtttaaagagttttatattcgt

SEQ ID NO: 7858 - DNA, 564 bp, Artificial Sequence
  chemically treated genomic DNA (Homo sapiens) CpG-island No: 7858
acgaatataaaactctttaaacactcaatccccaaaacatttacaaccgaattaatataaaccacactataaacaaacccgcaaatccaacacacgcgatccgataaaaaaatcacttcgttataacccatccgcgtttctaccaatttctccataccgcgataaacataaaacaaacgataatcaacatcgacaatttactcgccatccacaaacaaacgaaaataacccgattcatcgaaaataatatacaacgaaccgacaaaaatcacccgcgcatcgctattaccctcattaataaacgaatacgtttcgaaatcaatcgtcgattcaaaacgcaatcgataatccatcgcatctttacgcaacgaatacatatcttccgaccaatcatcgaacaacaccaaacgacgctaatccgacaaaccaaccgaaatcaacccgtacatatcgcgaatttctcgctcgccccaaaccgcgacaaaaacgcgcgatataactaacgaaaactcccgactatcgacatcgaccaacgccttcaccacaatccaacatttttcgacc

SEQ ID NO: 7859 - DNA, 564 bp, Artificial Sequence
  chemically treated genomic DNA (Homo sapiens) CpG-island No: 7859
gcgaatataaggttttttgggtatttaatttttagggtatttataatcgaattggtataggttatattgtgggtaaattcgtaaatttaatatacgcggttcgataagaaggttatttcgttgtagtttattcgcgtttttgttagtttttttatgtcgcgatggatataaaataggcggtaattagtatcgataatttgttcgttatttataaataagcggaagtgattcggtttatcggaggtgatatgtagcgggtcgatagggattattcgcgtatcgttgttgtttttattgataaacggatacgtttcggaattagtcgtcggtttagggcgtagtcgataatttatcgtatttttgcgtagcggatgtatatttttcggttagttatcgggtaatattaggcgacgttgattcggtaggttaatcggaattagttcgtatatatcgcgaatttttcgttcgttttagatcgcggtagggacgcgcggtgtgattgacggaaattttcgattgtcggtatcgattagcgtttttattataatttagtatttttcggtt

SEQ ID NO: 7860 - DNA, 564 bp, Artificial Sequence
  chemically treated genomic DNA (Homo sapiens) CpG-island No: 7860
aaccgaaaaatactaaattataataaaaacgctaatcgataccgacaatcgaaaatttccgtcaatcacaccgcgcgtccctaccgcgatctaaaacgaacgaaaaattcgcgatatatacgaactaattccgattaacctaccgaatcaacgtcgcctaatattacccgataactaaccgaaaaatatacatccgctacgcaaaaatacgataaattatcgactacgccctaaaccgacgactaattccgaaacgtatccgtttatcaataaaaacaacaacgatacgcgaataatccctatcgacccgctacatatcacctccgataaaccgaatcacttccgcttatttataaataacgaacaaattatcgatactaattaccgcctattttatatccatcgcgacataaaaaaactaacaaaaacgcgaataaactacaacgaaataaccttcttatcgaaccgcgtatattaaatttacgaatttacccacaatataacctataccaattcgattataaataccctaaaaattaaatacccaaaaaaccttatattcgc

SEQ ID NO: 7861 - DNA, 570 bp, Artificial Sequence
  chemically treated genomic DNA (Homo sapiens) CpG-island No: 7861
gcggcgtggcgtaattgattatcgtcgggtagatcgttacgtttaattcgtcggattttttatggttcggtagtggatcgttgttgtttttgttaacgtcggttattatcgcggtgttgacgtttattttgttttggttgttgattcgtaaaacggcgttggggatgtttatcgaagtcgttggtattaatattcgggcggtaaaaaatgtcggggtaaatacgcgaattatcgttatgtttatttatgtgttgagcgggttgtgtgcggcgattgcgggtattatcgtggcggcggatattcgcggtgtcgatgttaataacgttgggttatggttggagttggacgttattttcgcggtggtgattggcggcggatcgttgatgggcgggcgttttaatttgttattttcggtggtgggggcgttgattatttaggggatgaatatcggaattttgttttcgggtttttcgttagagatgaattaggtggtgaaagcggtggtggtgttttgcgtgttgattgtttagtcgtaacgttttattagtttgattaaaggagtacgtagtt

SEQ ID NO: 7862 - DNA, 570 bp, Artificial Sequence
  chemically treated genomic DNA (Homo sapiens) CpG-island No: 7862
aactacgtactcctttaatcaaactaataaaacgttacgactaaacaatcaacacgcaaaacaccaccaccgctttcaccacctaattcatctctaacgaaaaacccgaaaacaaaattccgatattcatcccctaaataatcaacgcccccaccaccgaaaataacaaattaaaacgcccgcccatcaacgatccgccgccaatcaccaccgcgaaaataacgtccaactccaaccataacccaacgttattaacatcgacaccgcgaatatccgccgccacgataatacccgcaatcgccgcacacaacccgctcaacacataaataaacataacgataattcgcgtatttaccccgacattttttaccgcccgaatattaataccaacgacttcgataaacatccccaacgccgttttacgaatcaacaaccaaaacaaaataaacgtcaacaccgcgataataaccgacgttaacaaaaacaacaacgatccactaccgaaccataaaaaatccgacgaattaaacgtaacgatctacccgacgataatcaattacgccacgccgc

SEQ ID NO: 7863 - DNA, 570 bp, Artificial Sequence
  chemically treated genomic DNA (Homo sapiens) CpG-island No: 7863
ggttacgtatttttttaattagattgataaagcgttgcgattgaataattagtacgtaaagtattattatcgtttttattatttggtttatttttggcggaaagttcgaaagtaaaatttcggtgtttattttttgaataattagcgtttttattatcgaaagtagtaggttaaagcgttcgtttattagcgattcgtcgttaattattatcgcgagaatggcgtttagttttagttataatttagcgttgttggtatcggtatcgcgaatattcgtcgttacgataatgttcgtaatcgtcgtatatagttcgtttaatatataagtgagtatgacgatgattcgcgtgtttatttcggtattttttgtcgttcgaatgttgatattaacggtttcgataaatatttttagcgtcgttttgcgggttaatagttagaataggataagcgttagtatcgcgataatgatcggcgttggtaggaataatagcgatttattgtcgaattatgagagattcggcgagttaaacgtgacgatttgttcggcggtgattagttgcgttacgtcgt

SEQ ID NO: 7864 - DNA, 570 bp, Artificial Sequence
  chemically treated genomic DNA (Homo sapiens) CpG-island No: 7864
acgacgtaacgcaactaatcaccgccgaacaaatcgtcacgtttaactcgccgaatctctcataattcgacaataaatcgctattattcctaccaacgccgatcattatcgcgatactaacgcttatcctattctaactattaacccgcaaaacgacgctaaaaatatttatcgaaaccgttaatatcaacattcgaacgacaaaaaataccgaaataaacacgcgaatcatcgtcatactcacttatatattaaacgaactatatacgacgattacgaacattatcgtaacgacgaatattcgcgataccgataccaacaacgctaaattataactaaaactaaacgccattctcgcgataataattaacgacgaatcgctaataaacgaacgctttaacctactactttcgataataaaaacgctaattattcaaaaaataaacaccgaaattttactttcgaactttccgccaaaaataaaccaaataataaaaacgataataatactttacgtactaattattcaatcgcaacgctttatcaatctaattaaaaaaatacgtaacc

SEQ ID NO: 7865 - DNA, 687 bp, Artificial Sequence
  chemically treated genomic DNA (Homo sapiens) CpG-island No: 7865
gttattggatattttcgggttaaatgaagtcgggtaatcgtatttgtaaaaaatgtttaattagtagttggtacgcgtttcggcggtattggcggtgttggattatacgtaattgaaatcgattttcgatgaagaggttcgtgaggcgattttggcggtggggtaatcggtgtcgttgtacgtgttggttaataagttcgattaataggatcgtaatagtgacgacgtcgattaggtgcgggtattgattttcgggacgttgatgaaaggttgtattacgttatagtagatattttcggtgtcgtcgatgtggggttatttggcgaatcgggcgcgttatgagttagttaataacggtaagttattatcgttagagtaataacgttgggtggaagattttgtttatgtcgcgtttggtaggcgttggcgttatgtcgatttggcggatttcgaatatattcgttatgttgtcgattagttgtgggaagattcgttgttcgtttagttaatttaggcgttgttttatgtcgtttacgttaacgtttcgttgtatgttttgcgatttgtcgcgtataaattgttgaattacgcgtagtaggcgcgggaatatttggattttcgtgcgtacgggttaaacgtcgtttgtgaataattgcggtaaaatatttattagatcgaaaaagttgt

SEQ ID NO: 7866 - DNA, 687 bp, Artificial Sequence
  chemically treated genomic DNA (Homo sapiens) CpG-island No: 7866
acaactttttcgatctaataaatattttaccgcaattattcacaaacgacgtttaacccgtacgcacgaaaatccaaatattcccgcgcctactacgcgtaattcaacaatttatacgcgacaaatcgcaaaacatacaacgaaacgttaacgtaaacgacataaaacaacgcctaaattaactaaacgaacaacgaatcttcccacaactaatcgacaacataacgaatatattcgaaatccgccaaatcgacataacgccaacgcctaccaaacgcgacataaacaaaatcttccacccaacgttattactctaacgataataacttaccgttattaactaactcataacgcgcccgattcgccaaataaccccacatcgacgacaccgaaaatatctactataacgtaatacaacctttcatcaacgtcccgaaaatcaatacccgcacctaatcgacgtcgtcactattacgatcctattaatcgaacttattaaccaacacgtacaacgacaccgattaccccaccgccaaaatcgcctcacgaacctcttcatcgaaaatcgatttcaattacgtataatccaacaccgccaataccgccgaaacgcgtaccaactactaattaaacattttttacaaatacgattacccgacttcatttaacccgaaaatatccaataac

SEQ ID NO: 7867 - DNA, 687 bp, Artificial Sequence
  chemically treated genomic DNA (Homo sapiens) CpG-island No: 7867
gtaattttttcgatttggtggatattttgtcgtaattgtttataagcgacgtttaattcgtgcgtacgaaaatttaggtattttcgcgtttgttgcgcgtaatttaatagtttatgcgcggtagatcgtagagtatataacgaggcgttagcgtaagcggtatgaagtaacgtttgaattggttgggcgaatagcgaatttttttataattgatcggtagtatgacgaatatgttcgaggttcgttagatcggtatgacgttagcgtttgttaagcgcggtatgggtaaaattttttatttagcgttgttgttttggcggtggtaatttatcgttgttggttaatttatagcgcgttcgattcgttaggtagttttatatcgacgatatcggaaatatttgttgtggcgtaatatagttttttattagcgtttcggaaattagtgttcgtatttggtcggcgtcgttattgttacgattttgttgatcgaatttattgattagtacgtatagcggtatcgattgttttatcgttaaaatcgttttacggatttttttatcggagatcgattttagttgcgtataatttagtatcgttagtatcgtcgaggcgcgtgttagttgttggttaagtattttttgtagatgcggttgttcggttttatttggttcgggggtatttagtaat

SEQ ID NO: 7868 - DNA, 687 bp, Artificial Sequence
  chemically treated genomic DNA (Homo sapiens) CpG-island No: 7868
attactaaatacccccgaaccaaataaaaccgaacaaccgcatctacaaaaaatacttaaccaacaactaacacgcgcctcgacgatactaacgatactaaattatacgcaactaaaatcgatctccgataaaaaaatccgtaaaacgattttaacgataaaacaatcgataccgctatacgtactaatcaataaattcgatcaacaaaatcgtaacaataacgacgccgaccaaatacgaacactaatttccgaaacgctaataaaaaactatattacgccacaacaaatatttccgatatcgtcgatataaaactacctaacgaatcgaacgcgctataaattaaccaacaacgataaattaccaccgccaaaacaacaacgctaaataaaaaattttacccataccgcgcttaacaaacgctaacgtcataccgatctaacgaacctcgaacatattcgtcatactaccgatcaattataaaaaaattcgctattcgcccaaccaattcaaacgttacttcataccgcttacgctaacgcctcgttatatactctacgatctaccgcgcataaactattaaattacgcgcaacaaacgcgaaaatacctaaattttcgtacgcacgaattaaacgtcgcttataaacaattacgacaaaatatccaccaaatcgaaaaaattac

SEQ ID NO: 7869 - DNA, 537 bp, Artificial Sequence
  chemically treated genomic DNA (Homo sapiens) CpG-island No: 7869
  unsure (485)
tttcgcgaggaaatcgcgagaatgtagtatatttaggttgtgtaaagtgagtagagtttgattgcgacgaagcgttagagcgcggaatagcggcggatttttagttttattgtatattagcgtattatttgcgcgtgggtttttgttggagtcgataaagatcgggatatcgttgcgtattgcgggtagtaacgttggcggatgtagtatttttgtattaaaagttgttatttttgtcgtttcggtaaaacgcgatttattaatgcgttttgttgcggaattacgttggatcgggggttaatgttcggatttgtttaaattatcgagaggttaagtttttatagtgttataattgtttcgtatttttttgattttttgtttaaattcgggtataattttaagggtcggcggatattttgaacgcggataggcgttttttacggacgtttttattttcgtttttttttcgataataattaattttntatagtaatagtataaatatacgaagaaaataatagagtaacggagaatagt

SEQ ID NO: 7870 - DNA, 537 bp, Artificial Sequence
  chemically treated genomic DNA (Homo sapiens) CpG-island No: 7870
  unsure (53)
actattctccgttactctattattttcttcgtatatttatactattactatanaaaattaattattatcgaaaaaaaaacgaaaataaaaacgtccgtaaaaaacgcctatccgcgttcaaaatatccgccgacccttaaaattatacccgaatttaaacaaaaaatcaaaaaaatacgaaacaattataacactataaaaacttaacctctcgataatttaaacaaatccgaacattaacccccgatccaacgtaattccgcaacaaaacgcattaataaatcgcgttttaccgaaacgacaaaaataacaacttttaatacaaaaatactacatccgccaacgttactacccgcaatacgcaacgatatcccgatctttatcgactccaacaaaaacccacgcgcaaataatacgctaatatacaataaaactaaaaatccgccgctattccgcgctctaacgcttcgtcgcaatcaaactctactcactttacacaacctaaatatactacattctcgcgatttcctcgcgaaa

SEQ ID NO: 7871 - DNA, 537 bp, Artificial Sequence
  chemically treated genomic DNA (Homo sapiens) CpG-island No: 7871
  unsure (53)
gttgtttttcgttgttttgttgtttttttcgtgtgtttgtgttgttgttatanagagttgattgttgtcgaggggagggcggagatgagggcgttcgtgaagagcgtttgttcgcgtttagggtgttcgtcggtttttagggttgtattcgggtttgggtaaaaagttaaaagggtgcggagtagttatgatattgtgggagtttaatttttcggtaatttggataagttcgggtattgattttcgatttagcgtagtttcgtagtaaaacgtattgatgaatcgcgttttgtcgaagcggtagagatggtaatttttggtgtaaaagtattgtattcgttaacgttgttattcgtagtacgtagcgatatttcggtttttgtcggttttagtaaagatttacgcgtaggtggtacgttggtgtgtaataaaattgaaaattcgtcgttgtttcgcgttttggcgtttcgtcgtaattagattttgtttattttgtatagtttgaatatgttgtattttcgcggttttttcgcggaa

SEQ ID NO: 7872 - DNA, 537 bp, Artificial Sequence
  chemically treated genomic DNA (Homo sapiens) CpG-island No: 7872
  unsure (485)
ttccgcgaaaaaaccgcgaaaatacaacatattcaaactatacaaaataaacaaaatctaattacgacgaaacgccaaaacgcgaaacaacgacgaattttcaattttattacacaccaacgtaccacctacgcgtaaatctttactaaaaccgacaaaaaccgaaatatcgctacgtactacgaataacaacgttaacgaatacaatacttttacaccaaaaattaccatctctaccgcttcgacaaaacgcgattcatcaatacgttttactacgaaactacgctaaatcgaaaatcaatacccgaacttatccaaattaccgaaaaattaaactcccacaatatcataactactccgcacccttttaactttttacccaaacccgaatacaaccctaaaaaccgacgaacaccctaaacgcgaacaaacgctcttcacgaacgccctcatctccgccctcccctcgacaacaatcaactctntataacaacaacacaaacacacgaaaaaaacaacaaaacaacgaaaaacaac

SEQ ID NO: 7873 - DNA, 798 bp, Artificial Sequence
  chemically treated genomic DNA (Homo sapiens) CpG-island No: 7873
gtcgcggattagtagcgtttcggtagtcgcgatattgtttttgcggttaatgttttttagtagatcgtttttggtaatatcggtggtagagaagatgacgttatcgttgcgcgttatatcgtttaggcgtaatattttatcggtttcgatgtttatcgttttgtagcgtgttagtttttgttcgttaatgcgacgatttttttcgttgtcgtttttgacgttatgacgcgttagtagacgatcgtttatgtcgttatttaatgcgcggattatcgtcgtagaaattacgtttttcggcgcgttattaatatcgtatagtacgttaatttcgttgtttggtatataggtgagaattgaggtcgtaacgtcgtcgttcggaatagtaaatacgcgtacgtcgagttgttgtattttagcgataacggtatcgtggcgtggtttagttagaatcgttatcgttagttcgtttaacggtttgtcgagcgtcgtcgttatattgcgtaggttattcgttagcggtaggtttagattaatggtgtttttggttttcggttcgataattagtttttttatatatatattcggcgtattgaggaagtagtttttatcgtttattgttagtatcgttagcgcgttagtttggtttatcgtcgttatgcgcgtgtttttaatcggattaatagtaatatttatcgcgtcgtcgcgattagtatcgatttttttattaatgtagagtatcggtgtttcgtcgattttatttttattaatgacgatggtgtcgttaatgttgatttggtt

SEQ ID NO: 7874 - DNA, 798 bp, Artificial Sequence
  chemically treated genomic DNA (Homo sapiens) CpG-island No: 7874
aaccaaatcaacattaacgacaccatcgtcattaataaaaataaaatcgacgaaacaccgatactctacattaataaaaaaatcgatactaatcgcgacgacgcgataaatattactattaatccgattaaaaacacgcgcataacgacgataaaccaaactaacgcgctaacgatactaacaataaacgataaaaactacttcctcaatacgccgaatatatatataaaaaaactaattatcgaaccgaaaaccaaaaacaccattaatctaaacctaccgctaacgaataacctacgcaatataacgacgacgctcgacaaaccgttaaacgaactaacgataacgattctaactaaaccacgccacgataccgttatcgctaaaatacaacaactcgacgtacgcgtatttactattccgaacgacgacgttacgacctcaattctcacctatataccaaacaacgaaattaacgtactatacgatattaataacgcgccgaaaaacgtaatttctacgacgataatccgcgcattaaataacgacataaacgatcgtctactaacgcgtcataacgtcaaaaacgacaacgaaaaaaatcgtcgcattaacgaacaaaaactaacacgctacaaaacgataaacatcgaaaccgataaaatattacgcctaaacgatataacgcgcaacgataacgtcatcttctctaccaccgatattaccaaaaacgatctactaaaaaacattaaccgcaaaaacaatatcgcgactaccgaaacgctactaatccgcgac

SEQ ID NO: 7875 - DNA, 798 bp, Artificial Sequence
  chemically treated genomic DNA (Homo sapiens) CpG-island No: 7875
aattaggttaatattgacggtattatcgttattggtgaaggtgaaatcgacgaagtatcgatgttttatattggtgaaaaagtcggtattggtcgcggcgacgcggtagatattgttgttgattcgattgaaggtacgcgtatgacggcgatgggttaggttaacgcgttggcggtgttggtagtaggcgataaaggttgtttttttaatgcgtcggatatgtatatggagaagttgattgtcgggtcgggagttaaaggtattattgatttgaatttgtcgttggcggataatttgcgtaatgtagcggcggcgttcggtaaatcgttgagcgaattgacggtaacgattttggttaaattacgttacgatgtcgttatcgttgaaatgtagtaattcggcgtacgcgtatttgttatttcggacggcgacgttgcggttttaatttttatttgtatgttagatagcgaagttgacgtgttgtacggtattggtggcgcgtcggaaggcgtagtttttgcggcggtgattcgcgtattagatggcgatatgaacggtcgtttgttggcgcgttatgacgttaaaggcgataacgaagagaatcgtcgtattggcgagtaggagttggtacgttgtaaagcgatgggtatcgaagtcggtaaagtattgcgtttgggcgatatggcgcgtagcgataacgttattttttttgttatcggtattattaaaggcgatttgttggaaggtattagtcgtaaaggtaatatcgcgattatcgaaacgttgttgattcgcggt

SEQ ID NO: 7876 - DNA, 798 bp, Artificial Sequence
  chemically treated genomic DNA (Homo sapiens) CpG-island No: 7876
accgcgaatcaacaacgtttcgataatcgcgatattacctttacgactaataccttccaacaaatcgcctttaataataccgataacaaaaaaaataacgttatcgctacgcgccatatcgcccaaacgcaatactttaccgacttcgatacccatcgctttacaacgtaccaactcctactcgccaatacgacgattctcttcgttatcgcctttaacgtcataacgcgccaacaaacgaccgttcatatcgccatctaatacgcgaatcaccgccgcaaaaactacgccttccgacgcgccaccaataccgtacaacacgtcaacttcgctatctaacatacaaataaaaattaaaaccgcaacgtcgccgtccgaaataacaaatacgcgtacgccgaattactacatttcaacgataacgacatcgtaacgtaatttaaccaaaatcgttaccgtcaattcgctcaacgatttaccgaacgccgccgctacattacgcaaattatccgccaacgacaaattcaaatcaataatacctttaactcccgacccgacaatcaacttctccatatacatatccgacgcattaaaaaaacaacctttatcgcctactaccaacaccgccaacgcgttaacctaacccatcgccgtcatacgcgtaccttcaatcgaatcaacaacaatatctaccgcgtcgccgcgaccaataccgactttttcaccaatataaaacatcgatacttcgtcgatttcaccttcaccaataacgataataccgtcaatattaacctaatt

SEQ ID NO: 7877 - DNA, 792 bp, Artificial Sequence
  chemically treated genomic DNA (Homo sapiens) CpG-island No: 7877
  unsure (569)
ggagtaatcggtatcgtaaattcgatattcgttttttttagtagtaggtggatagttagtacgtcggacggcgttttcgttatcgagattacgtaggcggtaatggagttttgcggtgtttcggtaattatttggtaggtatcgagtatttcgcgcgtttcggcgtttggttgttagttgcgcggtagaagcggacgtttggagtttagttcgcggattaggaacgtttgtttgtcggtttttgattagttttcgtagtcgtcgatatcgaggtagcgggttagttcgtttagcgtttcggtatgacgcgtgtttttttgacggatattaatacggattagcggtacgtcgaaatattttacgcggcgtagggtgtcgagtagatcgtcgttggcgataatatttatgttatacgtttgaagtgattggtagtaagcgtagagcggtttttatagtttttcgttttgtgttagtaggttttttggttttggtagtttttcgttttttaggcgcgtttttagttatgtttgtgtcgttattaggcgagaacgtaggtttttattagatancgatacggttttgcggtattttttttgttaattagcgttagtagtttaagtgtcgcgtttatttttcgacgtttcgaaattcggatttgatattttttcggtttattcgggggttttatcggttgttatcggatttgggggtgtttcgggtgttttcggttgttttcggttcggttttttaattatagggcgataatttcgggggttgggtcggttttttcgt

SEQ ID NO: 7878 - DNA, 792 bp, Artificial Sequence
  chemically treated genomic DNA (Homo sapiens) CpG-island No: 7878
  unsure (224)
acgaaaaaaccgacccaacccccgaaattatcgccctataattaaaaaaccgaaccgaaaacaaccgaaaacacccgaaacacccccaaatccgataacaaccgataaaacccccgaataaaccgaaaaaatatcaaatccgaatttcgaaacgtcgaaaaataaacgcgacacttaaactactaacgctaattaacaaaaaaaataccgcaaaaccgtatcgntatctaataaaaacctacgttctcgcctaataacgacacaaacataactaaaaacgcgcctaaaaaacgaaaaactaccaaaaccaaaaaacctactaacacaaaacgaaaaactataaaaaccgctctacgcttactaccaatcacttcaaacgtataacataaatattatcgccaacgacgatctactcgacaccctacgccgcgtaaaatatttcgacgtaccgctaatccgtattaatatccgtcaaaaaaacacgcgtcataccgaaacgctaaacgaactaacccgctacctcgatatcgacgactacgaaaactaatcaaaaaccgacaaacaaacgttcctaatccgcgaactaaactccaaacgtccgcttctaccgcgcaactaacaaccaaacgccgaaacgcgcgaaatactcgatacctaccaaataattaccgaaacaccgcaaaactccattaccgcctacgtaatctcgataacgaaaacgccgtccgacgtactaactatccacctactactaaaaaaaacgaatatcgaatttacgataccgattactcc

SEQ ID NO: 7879 - DNA, 792 bp, Artificial Sequence
  chemically treated genomic DNA (Homo sapiens) CpG-island No: 7879
  unsure (224)
gcgggagaatcggtttaattttcggaattgtcgttttataattggaaggtcggatcggaggtaatcgaaggtattcgaaatatttttaagttcggtaatagtcggtggaattttcggatgggtcggaaagatattaggttcgggtttcggaacgtcggagggtgaacgcgatatttgaattgttggcgttgattgataaagaaggtgtcgtagaatcgtatcgntatttgatgaaaatttgcgttttcgtttgatggcgatataggtatggttggaagcgcgtttgaaaggcgaagaattgttaaaattagaaggtttgttgatataaaacgaagaattgtgggaatcgttttacgtttgttattagttattttaggcgtgtggtatgggtattatcgttaacggcgatttgttcgatattttgcgtcgcgtgaaatgtttcggcgtatcgttggttcgtattgatattcgttaggagagtacgcgttatatcgaagcgttgggcgagttgattcgttatttcggtatcggcgattacgaaagttggttagaggtcgataaataggcgtttttgattcgcgaattgaattttaaacgttcgtttttgtcgcgtaattggtaattaagcgtcgaaacgcgcgaagtgttcgatatttgttaggtgattgtcgaagtatcgtaaggttttattgtcgtttacgtgatttcgatggcgaaaacgtcgttcgacgtattggttgtttatttgttgttgaaagaagcgggtatcgggtttgcgatgtcggttgtttt

SEQ ID NO: 7880 - DNA, 792 bp, Artificial Sequence
  chemically treated genomic DNA (Homo sapiens) CpG-island No: 7880
  unsure (569)
aaaacaaccgacatcgcaaacccgatacccgcttctttcaacaacaaataaacaaccaatacgtcgaacgacgttttcgccatcgaaatcacgtaaacgacaataaaaccttacgatacttcgacaatcacctaacaaatatcgaacacttcgcgcgtttcgacgcttaattaccaattacgcgacaaaaacgaacgtttaaaattcaattcgcgaatcaaaaacgcctatttatcgacctctaaccaactttcgtaatcgccgataccgaaataacgaatcaactcgcccaacgcttcgatataacgcgtactctcctaacgaatatcaatacgaaccaacgatacgccgaaacatttcacgcgacgcaaaatatcgaacaaatcgccgttaacgataatacccataccacacgcctaaaataactaataacaaacgtaaaacgattcccacaattcttcgttttatatcaacaaaccttctaattttaacaattcttcgcctttcaaacgcgcttccaaccatacctatatcgccatcaaacgaaaacgcaaattttcatcaaatancgatacgattctacgacaccttctttatcaatcaacgccaacaattcaaatatcgcgttcaccctccgacgttccgaaacccgaacctaatatctttccgacccatccgaaaattccaccgactattaccgaacttaaaaatatttcgaataccttcgattacctccgatccgaccttccaattataaaacgacaattccgaaaattaaaccgattctcccgc

SEQ ID NO: 7881 - DNA, 936 bp, Artificial Sequence
  chemically treated genomic DNA (Homo sapiens) CpG-island No: 7881
ggacgtacgttaacgtcgagattcgcgtcgcgtttgttttaaatcgtattatttcggtataggcgattatcgcgtcgttattagtataaaatttcggacgcgcgtagaatatttcgtcgcggcgtttttttattattttagttagtttcgttcgtaacgtacggttagtatttacgtcgttcgttatgattagtcgtttaaagttcgtttgatttagcgttcgtttgtatttaattattagcgtatcgattatcgtatttttaaaggcgcgggcgatattagtacgcgtttggtcgtcggtgtcgttgttatagaatggtatttgtcgcgaaggtttttaggtcggagaagttgaaatttagtttcggacggtcggttatcggacgcgggaagataaagcgttcggtagtattttgaagtcgtatttacgatagtaacggttcgttaggataatttagttttagtagtttcgcgtttttattaaacgttttttcggcggtattatcgatagattcgtcgagtagttcgtattgattaatgttagttacgttgattaattgcgtatgatcgtcggaaataagtagcgtaataaacggaaatttcggcgggttattttttagtatcggcgttaatagatgtttttttatatggtgtatagggatcgtcggaacgttttaggtaaacgttagagaacgttttacggtcgcgttaattagtagcgcgtcgattaatttagggtttgcggtataggttatagtattaatgttttttgtcgttaaattagatttttttagcgtcgtttggattaacggtacggttttacgtatatgatcgcgggaggttagtttaggtacgacgtcgtcgtagttagcgtgtaattttatttgattatataattggttggttaataaattttttttatcgtcgtaaatggcg

SEQ ID NO: 7882 - DNA, 936 bp, Artificial Sequence
  chemically treated genomic DNA (Homo sapiens) CpG-island No: 7882
cgccatttacgacgataaaaaaaatttattaaccaaccaattatataatcaaataaaattacacgctaactacgacgacgtcgtacctaaactaacctcccgcgatcatatacgtaaaaccgtaccgttaatccaaacgacgctaaaaaaatctaatttaacgacaaaaaacattaatactataacctataccgcaaaccctaaattaatcgacgcgctactaattaacgcgaccgtaaaacgttctctaacgtttacctaaaacgttccgacgatccctatacaccatataaaaaaacatctattaacgccgatactaaaaaataacccgccgaaatttccgtttattacgctacttatttccgacgatcatacgcaattaatcaacgtaactaacattaatcaatacgaactactcgacgaatctatcgataataccgccgaaaaaacgtttaataaaaacgcgaaactactaaaactaaattatcctaacgaaccgttactatcgtaaatacgacttcaaaatactaccgaacgctttatcttcccgcgtccgataaccgaccgtccgaaactaaatttcaacttctccgacctaaaaaccttcgcgacaaataccattctataacaacgacaccgacgaccaaacgcgtactaatatcgcccgcgcctttaaaaatacgataatcgatacgctaataattaaatacaaacgaacgctaaatcaaacgaactttaaacgactaatcataacgaacgacgtaaatactaaccgtacgttacgaacgaaactaactaaaataataaaaaaacgccgcgacgaaatattctacgcgcgtccgaaattttatactaataacgacgcgataatcgcctataccgaaataatacgatttaaaacaaacgcgacgcgaatctcgacgttaacgtacgtcc

SEQ ID NO: 7883 - DNA, 936 bp, Artificial Sequence
  chemically treated genomic DNA (Homo sapiens) CpG-island No: 7883
cgttatttacgacgatgaaaaaggtttgttagttaattaattgtatagttaggtgaaattgtacgttgattacggcggcgtcgtgtttgaattggtttttcgcgattatgtgcgtaaaatcgtatcgttgatttaggcggcgttaaaggagtttggtttaacggtaaaagatattgatgttgtggtttatatcgtaggttttggattagtcggcgcgttattggttggcgcgatcgtggggcgttttttggcgtttgtttgggacgtttcggcgatttttgtatattatatggaagggtatttgttagcgtcgatgttggaagataattcgtcggaattttcgtttgttgcgttgtttgttttcggcggttatacgtagttaattagcgtgattggtattggttagtacgagttgttcggcgagtttatcgatgatgtcgtcggggaagcgtttgataaaagcgcgaagttgttggggttggattattttggcgggtcgttattgtcgtaaatgcggttttagggtattgtcgggcgttttgttttttcgcgttcgatgatcgatcgttcggggttggattttagttttttcggtttgaaaattttcgcggtaaatattattttgtgataacggtatcgacgattagacgcgtgttgatatcgttcgcgtttttgaagatgcggtggtcgatacgttgatgattaagtgtaagcgggcgttggattagacgggttttaagcgattggttatggcgggcggcgtgagtgttaatcgtacgttacgggcgaagttggttgaaatgatgaaaaaacgtcgcggcgaagtgttttacgcgcgttcggaattttgtattgataacggcgcgatgatcgtttatgtcggaatggtgcggtttaaagtaggcgcgacgcggatttcggcgttagcgtgcgttt

SEQ ID NO: 7884 - DNA, 936 bp, Artificial Sequence
  chemically treated genomic DNA (Homo sapiens) CpG-island No: 7884
aaacgcacgctaacgccgaaatccgcgtcgcgcctactttaaaccgcaccattccgacataaacgatcatcgcgccgttatcaatacaaaattccgaacgcgcgtaaaacacttcgccgcgacgttttttcatcatttcaaccaacttcgcccgtaacgtacgattaacactcacgccgcccgccataaccaatcgcttaaaacccgtctaatccaacgcccgcttacacttaatcatcaacgtatcgaccaccgcatcttcaaaaacgcgaacgatatcaacacgcgtctaatcgtcgataccgttatcacaaaataatatttaccgcgaaaattttcaaaccgaaaaaactaaaatccaaccccgaacgatcgatcatcgaacgcgaaaaaacaaaacgcccgacaataccctaaaaccgcatttacgacaataacgacccgccaaaataatccaaccccaacaacttcgcgcttttatcaaacgcttccccgacgacatcatcgataaactcgccgaacaactcgtactaaccaataccaatcacgctaattaactacgtataaccgccgaaaacaaacaacgcaacaaacgaaaattccgacgaattatcttccaacatcgacgctaacaaatacccttccatataatatacaaaaatcgccgaaacgtcccaaacaaacgccaaaaaacgccccacgatcgcgccaaccaataacgcgccgactaatccaaaacctacgatataaaccacaacatcaatatcttttaccgttaaaccaaactcctttaacgccgcctaaatcaacgatacgattttacgcacataatcgcgaaaaaccaattcaaacacgacgccgccgtaatcaacgtacaatttcacctaactatacaattaattaactaacaaacctttttcatcgtcgtaaataacg

SEQ ID NO: 7885 - DNA, 571 bp, Artificial Sequence
  chemically treated genomic DNA (Homo sapiens) CpG-island No: 7885
cgcgtcgtattcggcgttgttgttaaattttagtgtcgtaataatgtcggatgcgatgtttgcgtattttattcgatttatagtgatttaaacgatgtttaatcgtaggtcggataaggcgttcgcgtcgtattcggtattgttgttaaattttagtgtcgtaataatgtcggatgcgatatttgcgtattttattcgatcgatagtgatttaaacgatgtttaattgtaggtcggataaggcgtttacgtcgtattcggtaatcggtgtacgatgtttgatgcgttacgttttattaggtttataaaattaatcgttttttagtaatattttttttagttattggcgtagttcgacgggcgcggtttttaggttgttagatttacgcgtaatcgtcgcgatgtttgcgtcgagtttattttttaatttacgttggtttatttcgtcgcgtaatagtttttcgataatacgtacgcgagtttttaacgtttcgcgtttatttggcgttagtattaggtttaataacggtaaatggagatcgttttggtaggtatttttaagtaggtcgata

SEQ ID NO: 7886 - DNA, 571 bp, Artificial Sequence
  chemically treated genomic DNA (Homo sapiens) CpG-island No: 7886
tatcgacctacttaaaaatacctaccaaaacgatctccatttaccgttattaaacctaatactaacgccaaataaacgcgaaacgttaaaaactcgcgtacgtattatcgaaaaactattacgcgacgaaataaaccaacgtaaattaaaaaataaactcgacgcaaacatcgcgacgattacgcgtaaatctaacaacctaaaaaccgcgcccgtcgaactacgccaataactaaaaaaaatattactaaaaaacgattaattttataaacctaataaaacgtaacgcatcaaacatcgtacaccgattaccgaatacgacgtaaacgccttatccgacctacaattaaacatcgtttaaatcactatcgatcgaataaaatacgcaaatatcgcatccgacattattacgacactaaaatttaacaacaataccgaatacgacgcgaacgccttatccgacctacgattaaacatcgtttaaatcactataaatcgaataaaatacgcaaacatcgcatccgacattattacgacactaaaatttaacaacaacgccgaatacgacgcg

SEQ ID NO: 7887 - DNA, 571 bp, Artificial Sequence
  chemically treated genomic DNA (Homo sapiens) CpG-island No: 7887
tgtcgatttgtttaagaatgtttattaaaacgatttttatttatcgttgttaaatttgatgttgacgttagatgagcgcgaagcgttggggattcgcgtgcgtattgtcgaagagttgttgcgcggcgaaatgagttagcgtgagttaaaaaatgaattcggcgtaggtatcgcgacgattacgcgtggatttaatagtttgaaagtcgcgttcgtcgagttgcgttagtggttggaagaggtgttgttgaaaagcgattgattttgtaggtttgataagacgtggcgtattaggtatcgtgtatcgattgtcggatgcggcgtgaacgttttattcggtttatagttgggtatcgtttgagttattgtcggtcggataagatgcgtaagtatcgtattcgatattattgcggtattggagtttggtaatagtgtcggatgcggcgcgagcgttttattcggtttacggttgggtatcgtttgagttattgtaggtcggataagatgcgtaagtatcgtattcgatattattgcggtattggagtttggtaatagcgtcggatgcggcgcg

SEQ ID NO: 7888 - DNA, 571 bp, Artificial Sequence
  chemically treated genomic DNA (Homo sapiens) CpG-island No: 7888
cgcgccgcatccgacgctattaccaaactccaataccgcaataatatcgaatacgatacttacgcatcttatccgacctacaataactcaaacgatacccaaccgtaaaccgaataaaacgctcgcgccgcatccgacactattaccaaactccaataccgcaataatatcgaatacgatacttacgcatcttatccgaccgacaataactcaaacgatacccaactataaaccgaataaaacgttcacgccgcatccgacaatcgatacacgatacctaatacgccacgtcttatcaaacctacaaaatcaatcgcttttcaacaacacctcttccaaccactaacgcaactcgacgaacgcgactttcaaactattaaatccacgcgtaatcgtcgcgatacctacgccgaattcattttttaactcacgctaactcatttcgccgcgcaacaactcttcgacaatacgcacgcgaatccccaacgcttcgcgctcatctaacgtcaacatcaaatttaacaacgataaataaaaatcgttttaataaacattcttaaacaaatcgaca

SEQ ID NO: 7889 - DNA, 509 bp, Artificial Sequence
  chemically treated genomic DNA (Homo sapiens) CpG-island No: 7889
tttgttttggattttggagttggttaggttggtatggattatatgcggtagtacgaatagggcgattattaacgttggcgtatagatgatgtaggtatgaagtagtaggaacgttagcggcgtagttaggaagattagtcgtggaatgttcgataagaagtggaatatggcgttgacgtaatatagtcgttgagtaaattttagttttttatcggtgagcgggttatcgagacggaagatttgtattatttcgcgcgtttagcgaatacgttgatcgatatgcgtcgatagattttcggtcgttagtttttgcgtttgtggaatacgtatatacgcggaggtatagttacgacggtgtaatcgtagagaagtatgcgtatttttagttacggtttcgatagtaatgtcgttaattttatttagcggtttacgacgaattatcgtataggaatcgtagaagaaagtggcggattatatatcgatagaatttttgtattagattatagaat

SEQ ID NO: 7890 - DNA, 509 bp, Artificial Sequence
  chemically treated genomic DNA (Homo sapiens) CpG-island No: 7890
attctataatctaatacaaaaattctatcgatatataatccgccactttcttctacgattcctatacgataattcgtcgtaaaccgctaaataaaattaacgacattactatcgaaaccgtaactaaaaatacgcatacttctctacgattacaccgtcgtaactatacctccgcgtatatacgtattccacaaacgcaaaaactaacgaccgaaaatctatcgacgcatatcgatcaacgtattcgctaaacgcgcgaaataatacaaatcttccgtctcgataacccgctcaccgataaaaaactaaaatttactcaacgactatattacgtcaacgccatattccacttcttatcgaacattccacgactaatcttcctaactacgccgctaacgttcctactacttcatacctacatcatctatacgccaacgttaataatcgccctattcgtactaccgcatataatccataccaacctaaccaactccaaaatccaaaacaaa

SEQ ID NO: 7891 - DNA, 509 bp, Artificial Sequence
  chemically treated genomic DNA (Homo sapiens) CpG-island No: 7891
gttttatggtttggtgtagaagttttatcgatatgtagttcgttatttttttttgcggtttttgtgcggtgattcgtcgtaagtcgttggatgaaattggcggtattgttgtcgaaatcgtgattgaagatgcgtatatttttttgcggttgtatcgtcgtggttatattttcgcgtatatgcgtattttatagacgtaggggttggcgatcgaaagtttgtcggcgtatatcggttagcgtattcgttgggcgcgcgggatggtataaatttttcgtttcgataattcgtttatcggtaaagggttgaagtttgtttagcggttatgttacgttaacgttatgttttattttttgtcgggtattttacggttgatttttttgattgcgtcgttggcgtttttgttgttttatgtttatattatttatgcgttagcgttgatgatcgttttattcgtgttgtcgtatatgatttatgttagtttgattaattttaagatttagggtaaa

SEQ ID NO: 7892 - DNA, 509 bp, Artificial Sequence
  chemically treated genomic DNA (Homo sapiens) CpG-island No: 7892
tttaccctaaatcttaaaattaatcaaactaacataaatcatatacgacaacacgaataaaacgatcatcaacgctaacgcataaataatataaacataaaacaacaaaaacgccaacgacgcaatcaaaaaaatcaaccgtaaaatacccgacaaaaaataaaacataacgttaacgtaacataaccgctaaacaaacttcaaccctttaccgataaacgaattatcgaaacgaaaaatttataccatcccgcgcgcccaacgaatacgctaaccgatatacgccgacaaactttcgatcgccaacccctacgtctataaaatacgcatatacgcgaaaatataaccacgacgatacaaccgcaaaaaaatatacgcatcttcaatcacgatttcgacaacaataccgccaatttcatccaacgacttacgacgaatcaccgcacaaaaaccgcaaaaaaaaataacgaactacatatcgataaaacttctacaccaaaccataaaac

SEQ ID NO: 7893 - DNA, 532 bp, Artificial Sequence
  chemically treated genomic DNA (Homo sapiens) CpG-island No: 7893
  unsure (406)
tggcggcgttatttaaagttttttttttttaaggcgcgtttttcgcggtcggtagggggcgtcgcggtcgtttgggttcgtcggatgttaataagtttggcggtttcgttttttgtcggaagtggttgcggcgggggcggggtttacgagttgggtcgggcggtcgtgcgggagttatggcggtttcggaggcggcggcggcggcggggttcgcggttttggcggcgggtgttcgggtcgtttcggcggttacgataggagtcgtcgtcgtcgtttcgggttcgtgggtgttttcgggatttcgattgagggtgtagcggtcgcgggtcgcgggggcgacgtagtaagtcgtttgtttcgcgtcggtcggcgtggaattgatttacgcgtttgtgaacgagttttntcgggttttgcggattatatttgttgttcggtgcggttgtggaaattttgttaaagatcgcgtttaatggttaatagagtacgttttgttatttacgcggttcggtggggtttttttataaatcgg

SEQ ID NO: 7894 - DNA, 532 bp, Artificial Sequence
  chemically treated genomic DNA (Homo sapiens) CpG-island No: 7894
  unsure (127)
ccgatttataaaaaaaccccaccgaaccgcgtaaataacaaaacgtactctattaaccattaaacgcgatctttaacaaaatttccacaaccgcaccgaacaacaaatataatccgcaaaacccganaaaactcgttcacaaacgcgtaaatcaattccacgccgaccgacgcgaaacaaacgacttactacgtcgcccccgcgacccgcgaccgctacaccctcaatcgaaatcccgaaaacacccacgaacccgaaacgacgacgacgactcctatcgtaaccgccgaaacgacccgaacacccgccgccaaaaccgcgaaccccgccgccgccgccgcctccgaaaccgccataactcccgcacgaccgcccgacccaactcgtaaaccccgcccccgccgcaaccacttccgacaaaaaacgaaaccgccaaacttattaacatccgacgaacccaaacgaccgcgacgccccctaccgaccgcgaaaaacgcgccttaaaaaaaaaaaactttaaataacgccgcca

SEQ ID NO: 7895 - DNA, 532 bp, Artificial Sequence
  chemically treated genomic DNA (Homo sapiens) CpG-island No: 7895
  unsure (127)
tcggtttgtgaaaagattttatcgggtcgcgtggataataaagcgtgttttattagttattggacgcggtttttgatagaatttttataatcgtatcgggtaatagatgtggttcgtaaggttcggnaaagttcgtttataaacgcgtggattagttttacgtcggtcggcgcgggataagcggtttgttgcgtcgttttcgcggttcgcggtcgttgtatttttagtcggggtttcgggggtatttacgggttcgaggcggcggcggcggtttttgtcgtggtcgtcgggacggttcgggtattcgtcgttagagtcgcggatttcgtcgtcgtcgtcgttttcgaggtcgttatggttttcgtacggtcgttcggtttagttcgtaggtttcgttttcgtcgtagttattttcggtagggggcgaggtcgttaggtttgttagtattcggcgggtttaggcggtcgcggcgttttttgtcggtcgcggagggcgcgttttggagggagaggattttaggtgacgtcgtta

SEQ ID NO: 7896 - DNA, 532 bp, Artificial Sequence
  chemically treated genomic DNA (Homo sapiens) CpG-island No: 7896
  unsure (406)
taacgacgtcacctaaaatcctctccctccaaaacgcgccctccgcgaccgacaaaaaacgccgcgaccgcctaaacccgccgaatactaacaaacctaacgacctcgccccctaccgaaaataactacgacgaaaacgaaacctacgaactaaaccgaacgaccgtacgaaaaccataacgacctcgaaaacgacgacgacgacgaaatccgcgactctaacgacgaatacccgaaccgtcccgacgaccacgacaaaaaccgccgccgccgcctcgaacccgtaaatacccccgaaaccccgactaaaaatacaacgaccgcgaaccgcgaaaacgacgcaacaaaccgcttatcccgcgccgaccgacgtaaaactaatccacgcgtttataaacgaactttnccgaaccttacgaaccacatctattacccgatacgattataaaaattctatcaaaaaccgcgtccaataactaataaaacacgctttattatccacgcgacccgataaaatcttttcacaaaccga

SEQ ID NO: 7897 - DNA, 514 bp, Artificial Sequence
  chemically treated genomic DNA (Homo sapiens) CpG-island No: 7897
tcgtcgttatcgtgggcgagttggatattatttacgttttatttttttgttgacgatattgatattacgcggcgtacgttttttcggaggaaattattagcgtattaaacgcggtttgaggattataggtgttattaaatagcgggtattgatgcggtttatatttgttcgttaatattttattataacgcgcgcgcgggttatcgtagatttgttgcggtgtcgggcggaaatgtgtttcggtatcgaatcgttgataattcggcgttaggtgtacgttagaagatttaattacgtttaagtcgcgttattcgttgtcgtcgttgatatagaatatatcggtaatcgtttgttgcgttagtaggttatcggtattcggtattattcgacgatattgattttttattttgttgtgggtcgttattttttgttgtattagtatgattacgttttgtagtagattaagggttcgaatttagtaattattagcggacgatgaaaatcgttggcgata

SEQ ID NO: 7898 - DNA, 514 bp, Artificial Sequence
  chemically treated genomic DNA (Homo sapiens) CpG-island No: 7898
tatcgccaacgattttcatcgtccgctaataattactaaattcgaacccttaatctactacaaaacgtaatcatactaatacaacaaaaaataacgacccacaacaaaataaaaaatcaatatcgtcgaataataccgaataccgataacctactaacgcaacaaacgattaccgatatattctatatcaacgacgacaacgaataacgcgacttaaacgtaattaaatcttctaacgtacacctaacgccgaattatcaacgattcgataccgaaacacatttccgcccgacaccgcaacaaatctacgataacccgcgcgcgcgttataataaaatattaacgaacaaatataaaccgcatcaatacccgctatttaataacacctataatcctcaaaccgcgtttaatacgctaataatttcctccgaaaaaacgtacgccgcgtaatatcaatatcgtcaacaaaaaaataaaacgtaaataatatccaactcgcccacgataacgacga

SEQ ID NO: 7899 - DNA, 514 bp, Artificial Sequence
  chemically treated genomic DNA (Homo sapiens) CpG-island No: 7899
tatcgttagcgatttttatcgttcgttggtggttgttggattcgaatttttgatttattataaggcgtggttatgttggtgtagtagaaaatagcggtttatagtaaggtagagaattagtatcgtcgagtggtatcggatgtcggtaatttgttggcgtaataggcgattgtcgatgtgttttgtgttaacggcgatagcgaatggcgcggtttaggcgtgattgaattttttggcgtgtatttgacgtcggattattaacgattcgatgtcgaagtatattttcgttcggtatcgtagtaggtttgcgatgattcgcgcgcgcgttgtggtgaggtattaacgggtaaatgtaagtcgtattaatgttcgttgtttggtaatatttgtaatttttaaatcgcgtttggtgcgttgatggtttttttcgaaggagcgtgcgtcgcgtggtattagtatcgttagtaggagagtgaagcgtgaataatatttaattcgtttacggtagcggcgg

SEQ ID NO: 7900 - DNA, 514 bp, Artificial Sequence
  chemically treated genomic DNA (Homo sapiens) CpG-island No: 7900
ccgccgctaccgtaaacgaattaaatattattcacgcttcactctcctactaacgatactaataccacgcgacgcacgctccttcgaaaaaaaccatcaacgcaccaaacgcgatttaaaaattacaaatattaccaaacaacgaacattaatacgacttacatttacccgttaatacctcaccacaacgcgcgcgcgaatcatcgcaaacctactacgataccgaacgaaaatatacttcgacatcgaatcgttaataatccgacgtcaaatacacgccaaaaaattcaatcacgcctaaaccgcgccattcgctatcgccgttaacacaaaacacatcgacaatcgcctattacgccaacaaattaccgacatccgataccactcgacgatactaattctctaccttactataaaccgctattttctactacaccaacataaccacgccttataataaatcaaaaattcgaatccaacaaccaccaacgaacgataaaaatcgctaacgata

SEQ ID NO: 7901 - DNA, 578 bp, Artificial Sequence
  chemically treated genomic DNA (Homo sapiens) CpG-island No: 7901
gcggttgcgtggtgcgttttgttaataaaaaatcgtttttggcgatgacgtcgattttaatcgtatttttattatgatttgttggtcggaagatgtcgcgtcgttgattatttgggggttgatagtgacgcgcggtttatataaagagcggtagaatttgggtatttatcgttagtagttgattggtaaaaataaattgattatgcgttggttgtcgtatcgcggcggcgcgttggattattaggagtggtgtgcggcgtattcgggcgaacgtttttcggtttttgtggcgttgggtgtcgatttcgttacgattttcggtgtagttattttcgtttcggatacgtttttagagtatgcgtttgtcggattgttacgtggtattaagatcgaagtggtgaagtgtatttttaatgattttgaagtgttcgttagtgcggagattgtgttggaagggtatatcgaataaggcgaaattgcgtcggaagggtcgtatggcgattatatcggttattataatgaagtcgatagtttttcggtatttatcgtgacgtatattatttagcgtgaagatgcga

SEQ ID NO: 7902 - DNA, 578 bp, Artificial Sequence
  chemically treated genomic DNA (Homo sapiens) CpG-island No: 7902
tcgcatcttcacgctaaataatatacgtcacgataaataccgaaaaactatcgacttcattataataaccgatataatcgccatacgacccttccgacgcaatttcgccttattcgatatacccttccaacacaatctccgcactaacgaacacttcaaaatcattaaaaatacacttcaccacttcgatcttaataccacgtaacaatccgacaaacgcatactctaaaaacgtatccgaaacgaaaataactacaccgaaaatcgtaacgaaatcgacacccaacgccacaaaaaccgaaaaacgttcgcccgaatacgccgcacaccactcctaataatccaacgcgccgccgcgatacgacaaccaacgcataatcaatttatttttaccaatcaactactaacgataaatacccaaattctaccgctctttatataaaccgcgcgtcactatcaacccccaaataatcaacgacgcgacatcttccgaccaacaaatcataataaaaatacgattaaaatcgacgtcatcgccaaaaacgattttttattaacaaaacgcaccacgcaaccgc

SEQ ID NO: 7903 - DNA, 578 bp, Artificial Sequence
  chemically treated genomic DNA (Homo sapiens) CpG-island No: 7903
tcgtatttttacgttgggtaatatgcgttacggtaaatatcgggaaattatcgattttattatagtaatcggtgtggtcgttatacggttttttcggcgtagtttcgttttgttcgatatatttttttagtataattttcgtattggcgggtattttaagattattggagatatattttattatttcggttttggtgttacgtagtaattcggtaaacgtatattttgaaagcgtattcggaacgggagtgattgtatcgagaatcgtggcgggatcggtatttagcgttatagaaatcgggaaacgttcgttcggatgcgtcgtatattatttttgataatttagcgcgtcgtcgcgatgcgatagttagcgtataattagtttgtttttattaattagttgttggcgataaatgtttagattttgtcgttttttatgtgggtcgcgcgttattgttagtttttaggtaattagcggcgcggtatttttcggttagtaggttataatgggaatgcgattgagatcgacgttatcgttagagacgattttttgttggtagggcgtattacgtagtcgt

SEQ ID NO: 7904 - DNA, 578 bp, Artificial Sequence
  chemically treated genomic DNA (Homo sapiens) CpG-island No: 7904
acgactacgtaatacgccctaccaacaaaaaatcgtctctaacgataacgtcgatctcaatcgcattcccattataacctactaaccgaaaaataccgcgccgctaattacctaaaaactaacaataacgcgcgacccacataaaaaacgacaaaatctaaacatttatcgccaacaactaattaataaaaacaaactaattatacgctaactatcgcatcgcgacgacgcgctaaattatcaaaaataatatacgacgcatccgaacgaacgtttcccgatttctataacgctaaataccgatcccgccacgattctcgatacaatcactcccgttccgaatacgctttcaaaatatacgtttaccgaattactacgtaacaccaaaaccgaaataataaaatatatctccaataatcttaaaatacccgccaatacgaaaattatactaaaaaaatatatcgaacaaaacgaaactacgccgaaaaaaccgtataacgaccacaccgattactataataaaatcgataatttcccgatatttaccgtaacgcatattacccaacgtaaaaatacga

SEQ ID NO: 7905 - DNA, 867 bp, Artificial Sequence
  chemically treated genomic DNA (Homo sapiens) CpG-island No: 7905
  unsure (850)
agcgacgcgttagttttagattcggcgtggaggttttatattagattaggttagtatatggcgtatacgttaggttacggttgatcgtttgtttaatgttcgtatgagtacggaagaagtttttattggtacgttcgtcggtaataaattcgttgttatacgggtcgtaatcggaggtgattagattcgtcgtattagtatcggtacgggtaattagtagggttggaacgttcgttacgttagttgttagacgcgtcgcgattagtttttgaatagttttttgagttggtattaaaattttgtcgtttatgtgatcgtatttttttattgacgttagttgattttcgaagtgaattgtcgttgtatcggttttaattatcgtttttattagtttaaaggtatttaggatatcgttaaaatcggttttcgtatcggtaacgatcggtaggaagtaatcgatatagcgcggatcgttcggtttaatgttcgcggattattggatttgatcggtacgacggaaggtgttgttgattcgttttattatagttggtatcgagtttgtcggatagagcgattgattcggatatatgttggtcgttaggttagcgttcgtcgttatttgttatttcgatagatagattgttttaatattcgttttcgtttgttgtagcgtttgatcgttagttagtgcgtcgaggttgttgatgtagttttttttcgatttatcgtgtagtagacgttatattttcgttgcgtttagttgcgttagcgtgtatttaggattgattgaatcgcgtaattttattatatttttcgtattgtatgggcgtagtaatgtttttttaacgtnggttgagtttatttttt

SEQ ID NO: 7906 - DNA, 867 bp, Artificial Sequence
  chemically treated genomic DNA (Homo sapiens) CpG-island No: 7906
  unsure (18)
aaaaaataaactcaaccnacgttaaaaaaacattactacgcccatacaatacgaaaaatataataaaattacgcgattcaatcaatcctaaatacacgctaacgcaactaaacgcaacgaaaatataacgtctactacacgataaatcgaaaaaaaactacatcaacaacctcgacgcactaactaacgatcaaacgctacaacaaacgaaaacgaatattaaaacaatctatctatcgaaataacaaataacgacgaacgctaacctaacgaccaacatatatccgaatcaatcgctctatccgacaaactcgataccaactataataaaacgaatcaacaacaccttccgtcgtaccgatcaaatccaataatccgcgaacattaaaccgaacgatccgcgctatatcgattacttcctaccgatcgttaccgatacgaaaaccgattttaacgatatcctaaatacctttaaactaataaaaacgataattaaaaccgatacaacgacaattcacttcgaaaatcaactaacgtcaataaaaaaatacgatcacataaacgacaaaattttaataccaactcaaaaaactattcaaaaactaatcgcgacgcgtctaacaactaacgtaacgaacgttccaaccctactaattacccgtaccgatactaatacgacgaatctaatcacctccgattacgacccgtataacaacgaatttattaccgacgaacgtaccaataaaaacttcttccgtactcatacgaacattaaacaaacgatcaaccgtaacctaacgtatacgccatatactaacctaatctaatataaaacctccacgccgaatctaaaactaacgcgtcgct

SEQ ID NO: 7907 - DNA, 867 bp, Artificial Sequence
  chemically treated genomic DNA (Homo sapiens) CpG-island No: 7907
  unsure (18)
aaagagtggatttaattngcgttgggaaggtattattgcgtttatatagtgcggaagatgtggtgaaattacgcggtttagttaattttgaatgtacgttggcgtaattgggcgtagcgaaaatgtggcgtttgttgtacggtgagtcgaaaaaaggttatattaatagtttcggcgtattgattggcggttaggcgttgtaataggcgaaagcgggtattgaagtagtttatttgtcgggatggtaggtagcggcggacgttaatttggcggttagtatgtattcggattagtcgttttattcggtaaattcggtgttagttgtggtggagcggattaataatatttttcgtcgtgtcgattagatttaatggttcgcgggtattgagtcgggcgattcgcgttatgtcgattattttttgtcgatcgttgtcgatgcggaagtcggttttggcggtgttttgaatgtttttgaattgatgaaagcgatgattgaagtcggtgtagcggtagtttatttcgaagattagttggcgttagtgaagaaatgcggttatatgggcggtaaagttttagtgttaatttaggaagttatttagaaattggtcgcggcgcgtttggtagttgacgtgacgggcgttttaattttgttggttgttcgtatcgatgttgatgcggcggatttgattattttcgattgcgattcgtatgatagcgaatttattatcggcgagcgtattagtgaaggtttttttcgtatttatgcgggtattgagtaagcgattagtcgtggtttggcgtatgcgttatatgttgatttggtttggtgtgaaatttttacgtcggatttggaattggcgcgtcgtt

SEQ ID NO: 7908 - DNA, 867 bp, Artificial Sequence
  chemically treated genomic DNA (Homo sapiens) CpG-island No: 7908
  unsure (850)
aacgacgcgccaattccaaatccgacgtaaaaatttcacaccaaaccaaatcaacatataacgcatacgccaaaccacgactaatcgcttactcaatacccgcataaatacgaaaaaaaccttcactaatacgctcgccgataataaattcgctatcatacgaatcgcaatcgaaaataatcaaatccgccgcatcaacatcgatacgaacaaccaacaaaattaaaacgcccgtcacgtcaactaccaaacgcgccgcgaccaatttctaaataacttcctaaattaacactaaaactttaccgcccatataaccgcatttcttcactaacgccaactaatcttcgaaataaactaccgctacaccgacttcaatcatcgctttcatcaattcaaaaacattcaaaacaccgccaaaaccgacttccgcatcgacaacgatcgacaaaaaataatcgacataacgcgaatcgcccgactcaatacccgcgaaccattaaatctaatcgacacgacgaaaaatattattaatccgctccaccacaactaacaccgaatttaccgaataaaacgactaatccgaatacatactaaccgccaaattaacgtccgccgctacctaccatcccgacaaataaactacttcaatacccgctttcgcctattacaacgcctaaccgccaatcaatacgccgaaactattaatataaccttttttcgactcaccgtacaacaaacgccacattttcgctacgcccaattacgccaacgtacattcaaaattaactaaaccgcgtaatttcaccacatcttccgcactatataaacgcaataataccttcccaacgcnaattaaatccactcttt

SEQ ID NO: 7909 - DNA, 920 bp, Artificial Sequence
  chemically treated genomic DNA (Homo sapiens) CpG-island No: 7909
tattgtcgggttggggttgggcggggaaggttggattattatgattattattacgttaatcggtgaaggggtaattagcgcgcgtacgtttgttcgtttgcgtcgttgtgtattagtcgatgcgtttcgtattgtttaaggagtaatagatgcgtacgacgaataatggtttattttacgtttgtaaacggcggtaacgttgtgtaattagacgttcgtcgcgacggaattttcgttgtggttgggggtggatttgggtatttgcgatgtggtgtcgatgttgtcgatcgcgacggttagttagtggcggtatgtttcgattgggtcgatgtggttcgcgacggtatcgtttgggattttttcggcgttgttattattgttcgtcgttatttcgatacgttcgagtagtaattcggtcgtcgttttagttatgcggcgattttattttttttaggtacggattcgcgtatttttattaacgtgttggaatttgtcggattggaagtgagttatgtgttggatgagttaatcgtagttgcggatttgttgtaattggataacgtcggtgtagtggatatcggcggcggtattatcggtattgttatcgtgaaaaagggtaaggtgacgtattcggcggatgaagttatcggcggatattatatttttttgattttcgtcggaaatcgtcgtatttcgttggaagaggcggagtagtataagcgcggttacggtgaagagatttggtttgcggtgaaatcggtgtacgaaaaaatggcggatattgtcgttcggtatattgaagggtagggtattattgatttatggttggcgggcggtttttgtatgtaatcgggcgtggcggaattgtttcgtaaataattttcggcgttataggtgtatttatcgtagtatagtttgtt

SEQ ID NO: 7910 - DNA, 920 bp, Artificial Sequence
  chemically treated genomic DNA (Homo sapiens) CpG-island No: 7910
aacaaactatactacgataaatacacctataacgccgaaaattatttacgaaacaattccgccacgcccgattacatacaaaaaccgcccgccaaccataaatcaataataccctacccttcaatataccgaacgacaatatccgccattttttcgtacaccgatttcaccgcaaaccaaatctcttcaccgtaaccgcgcttatactactccgcctcttccaacgaaatacgacgatttccgacgaaaatcaaaaaaatataatatccgccgataacttcatccgccgaatacgtcaccttaccctttttcacgataacaataccgataataccgccgccgatatccactacaccgacgttatccaattacaacaaatccgcaactacgattaactcatccaacacataactcacttccaatccgacaaattccaacacgttaataaaaatacgcgaatccgtacctaaaaaaaataaaatcgccgcataactaaaacgacgaccgaattactactcgaacgtatcgaaataacgacgaacaataataacaacgccgaaaaaatcccaaacgataccgtcgcgaaccacatcgacccaatcgaaacataccgccactaactaaccgtcgcgatcgacaacatcgacaccacatcgcaaatacccaaatccacccccaaccacaacgaaaattccgtcgcgacgaacgtctaattacacaacgttaccgccgtttacaaacgtaaaataaaccattattcgtcgtacgcatctattactccttaaacaatacgaaacgcatcgactaatacacaacgacgcaaacgaacaaacgtacgcgcgctaattaccccttcaccgattaacgtaataataatcataataatccaaccttccccgcccaaccccaacccgacaata

SEQ ID NO: 7911 - DNA, 920 bp, Artificial Sequence
  chemically treated genomic DNA (Homo sapiens) CpG-island No: 7911
aataaattgtgttgcggtaaatgtatttgtaacgtcgggaattgtttgcgaaatagtttcgttacgttcggttgtatataagagtcgttcgttagttataaattagtaatgttttgttttttaatatgtcgggcgataatgttcgttattttttcgtatatcggttttatcgtaggttaaatttttttatcgtgatcgcgtttgtattgtttcgttttttttagcgaaatacggcgattttcggcgagagttagagagatgtgatgttcgtcggtggttttattcgtcgagtacgttattttgtttttttttacgatggtaatgtcggtagtgtcgtcgtcgatatttattatatcggcgttgtttagttgtagtagattcgtaattgcggttggtttatttagtatatggtttatttttagttcggtagattttagtacgttgatggaaatacgcgggttcgtatttggaggaaatgaagtcgtcgtatggttaaaacgacgatcgaattgttgttcgagcgtgtcgagatggcgacgaataatggtgatagcgtcgaagaaattttagacgatgtcgtcgcgaattatatcggtttagtcgaggtatatcgttattggttgatcgtcgcggtcgataatatcgatattatatcgtaggtgtttagatttatttttagttatagcggagatttcgtcgcggcgggcgtttggttatatagcgttgtcgtcgtttgtagacgtggggtgagttattgttcgtcgtgcgtatttgttattttttaaataatgcgaaacgtatcgattaatatatagcgacgtagacggataaacgtacgcgcgttggttatttttttatcggttggcgtggtgatggttatggtggtttagtttttttcgtttagttttagttcggtaatg

SEQ ID NO: 7912 - DNA, 920 bp, Artificial Sequence
  chemically treated genomic DNA (Homo sapiens) CpG-island No: 7912
cattaccgaactaaaactaaacgaaaaaaactaaaccaccataaccatcaccacgccaaccgataaaaaaataaccaacgcgcgtacgtttatccgtctacgtcgctatatattaatcgatacgtttcgcattatttaaaaaataacaaatacgcacgacgaacaataactcaccccacgtctacaaacgacgacaacgctatataaccaaacgcccgccgcgacgaaatctccgctataactaaaaataaatctaaacacctacgatataatatcgatattatcgaccgcgacgatcaaccaataacgatatacctcgactaaaccgatataattcgcgacgacatcgtctaaaatttcttcgacgctatcaccattattcgtcgccatctcgacacgctcgaacaacaattcgatcgtcgttttaaccatacgacgacttcatttcctccaaatacgaacccgcgtatttccatcaacgtactaaaatctaccgaactaaaaataaaccatatactaaataaaccaaccgcaattacgaatctactacaactaaacaacgccgatataataaatatcgacgacgacactaccgacattaccatcgtaaaaaaaaacaaaataacgtactcgacgaataaaaccaccgacgaacatcacatctctctaactctcgccgaaaatcgccgtatttcgctaaaaaaaacgaaacaatacaaacgcgatcacgataaaaaaatttaacctacgataaaaccgatatacgaaaaaataacgaacattatcgcccgacatattaaaaaacaaaacattactaatttataactaacgaacgactcttatatacaaccgaacgtaacgaaactatttcgcaaacaattcccgacgttacaaatacatttaccgcaacacaatttatt

SEQ ID NO: 7913 - DNA, 510 bp, Artificial Sequence
  chemically treated genomic DNA (Homo sapiens) CpG-island No: 7913
agcgggttttcgtagtaatatttcgatttttttcgtttttaaatataatttttatttattataatttaaatttattcgtattttgttatgtcggaaatttttttttatattttcgtaatgttgttatcgatagtttcgtattaatgcgcgttgtttgatgcgcgtcggtagtagcgataatttttttttgcggattaattattcggttgttatcgcgataatggtagtcgttgttatcgttgtcgacgcgattgtatttcgttatatacgtttgatttttaatcgcgcgggtcgttagtaatgtttgttagtgtagagagcgcggagtaggttagttggcgacgtatagggcgaggttataatcgttgagattgcgcgattatataggaaaacgtaagtcgtagtatattagcggtaaaatacgttagtcgcgttattttataattattcgcgtattgttcgttttataatgtagatgtttatttgttatgcggaatagatgacgtttat

SEQ ID NO: 7914 - DNA, 510 bp, Artificial Sequence
  chemically treated genomic DNA (Homo sapiens) CpG-island No: 7914
ataaacgtcatctattccgcataacaaataaacatctacattataaaacgaacaatacgcgaataattataaaataacgcgactaacgtattttaccgctaatatactacgacttacgttttcctatataatcgcgcaatctcaacgattataacctcgccctatacgtcgccaactaacctactccgcgctctctacactaacaaacattactaacgacccgcgcgattaaaaatcaaacgtatataacgaaatacaatcgcgtcgacaacgataacaacgactaccattatcgcgataacaaccgaataattaatccgcaaaaaaaaattatcgctactaccgacgcgcatcaaacaacgcgcattaatacgaaactatcgataacaacattacgaaaatataaaaaaaaatttccgacataacaaaatacgaataaatttaaattataataaataaaaattatatttaaaaacgaaaaaaatcgaaatattactacgaaaacccgct

SEQ ID NO: 7915 - DNA, 510 bp, Artificial Sequence
  chemically treated genomic DNA (Homo sapiens) CpG-island No: 7915
ataagcgttatttgtttcgtatggtagatgagtatttatattataaagcgggtaatgcgcgagtgattgtggaatggcgcggttggcgtattttgtcgttggtgtgttacgatttacgtttttttgtgtggtcgcgtaattttaacgattatgatttcgttttgtacgtcgttaattggtttgtttcgcgttttttgtattggtaggtattgttgacggttcgcgcgattgagaattaggcgtatgtggcgggatgtaatcgcgtcggtagcgatggtaacggttgttattatcgcggtgatagtcgggtgattaattcgtaaggagagattatcgttattgtcgacgcgtattaggtaacgcgtattgatgcggagttgtcgatggtagtattgcgggaatatagagaaaagttttcggtatggtaggatgcggatgagtttaggttgtggtgagtgggggttgtgtttaaggacggggagagtcggggtattattacgaaagttcgtt

SEQ ID NO: 7916 - DNA, 510 bp, Artificial Sequence
  chemically treated genomic DNA (Homo sapiens) CpG-island No: 7916
aacgaactttcgtaataataccccgactctccccgtccttaaacacaacccccactcaccacaacctaaactcatccgcatcctaccataccgaaaacttttctctatattcccgcaatactaccatcgacaactccgcatcaatacgcgttacctaatacgcgtcgacaataacgataatctctccttacgaattaatcacccgactatcaccgcgataataacaaccgttaccatcgctaccgacgcgattacatcccgccacatacgcctaattctcaatcgcgcgaaccgtcaacaatacctaccaatacaaaaaacgcgaaacaaaccaattaacgacgtacaaaacgaaatcataatcgttaaaattacgcgaccacacaaaaaaacgtaaatcgtaacacaccaacgacaaaatacgccaaccgcgccattccacaatcactcgcgcattacccgctttataatataaatactcatctaccatacgaaacaaataacgcttat

SEQ ID NO: 7917 - DNA, 526 bp, Artificial Sequence
  chemically treated genomic DNA (Homo sapiens) CpG-island No: 7917
tgggtatggtgggtggtatggtcgtcgtttgtcggtttgtttttggcgcgtatttcgcgtgggcgtattattcgttagttcgtgttgggtacgttgattatttcgtttatttttacgttgttatggttttcggtgttcggtaatagcgcgttgtatgaaattatttacggcggcgcggtatttgtcgaggaagcgatggtttattcggagcgcggtttttatagtttgttggcgtagtattcggcgtttatttttagcgttttcgtcgttattattattggtttgttgttttatgtgatttcggcggatttcggggcgttggtgttggggaattttatttcgtagtttaaagatattaatagcgacgttttcggttggttgcgcgttttttggtcggtggcgattggtttgttgacgttcggtatgttgatgattaacgggatattcgcgttgtaaaatattacggtgattatggggttgtcgtttagttttgtgatttttttcgtgatggcggggttgtataaat

SEQ ID NO: 7918 - DNA, 526 bp, Artificial Sequence
  chemically treated genomic DNA (Homo sapiens) CpG-island No: 7918
atttatacaaccccgccatcacgaaaaaaatcacaaaactaaacgacaaccccataatcaccgtaatattttacaacgcgaatatcccgttaatcatcaacataccgaacgtcaacaaaccaatcgccaccgaccaaaaaacgcgcaaccaaccgaaaacgtcgctattaatatctttaaactacgaaataaaattccccaacaccaacgccccgaaatccgccgaaatcacataaaacaacaaaccaataataataacgacgaaaacgctaaaaataaacgccgaatactacgccaacaaactataaaaaccgcgctccgaataaaccatcgcttcctcgacaaataccgcgccgccgtaaataatttcatacaacgcgctattaccgaacaccgaaaaccataacaacgtaaaaataaacgaaataatcaacgtacccaacacgaactaacgaataatacgcccacgcgaaatacgcgccaaaaacaaaccgacaaacgacgaccataccacccaccataccca

SEQ ID NO: 7919 - DNA, 526 bp, Artificial Sequence
  chemically treated genomic DNA (Homo sapiens) CpG-island No: 7919
atttatataatttcgttattacgaagaagattataaagttgaacggtagttttataattatcgtggtgttttgtagcgcggatatttcgttagttattagtatgtcgagcgttagtaggttaatcgttatcgattagaagacgcgtagttagtcgggggcgtcgttgttgatatttttaagttgcgaggtgaaattttttagtattagcgtttcggagttcgtcgaggttatataaaatagtaggttagtaatggtggcgacggaggcgttaaaggtaaacgtcggatattgcgttagtaggttgtagaagtcgcgtttcggatggattatcgttttttcggtaaatgtcgcgtcgtcgtggatgattttatatagcgcgttattgtcgaatatcgagagttataatagcgtgaaggtaaacggaataattaacgtgtttagtacgaattggcgaatggtacgtttacgcgagatacgcgttaggaataagtcgataaacggcgattatgttatttattatgttta

SEQ ID NO: 7920 - DNA, 526 bp, Artificial Sequence
  chemically treated genomic DNA (Homo sapiens) CpG-island No: 7920
taaacataataaataacataatcgccgtttatcgacttattcctaacgcgtatctcgcgtaaacgtaccattcgccaattcgtactaaacacgttaattattccgtttaccttcacgctattataactctcgatattcgacaataacgcgctatataaaatcatccacgacgacgcgacatttaccgaaaaaacgataatccatccgaaacgcgacttctacaacctactaacgcaatatccgacgtttacctttaacgcctccgtcgccaccattactaacctactattttatataacctcgacgaactccgaaacgctaatactaaaaaatttcacctcgcaacttaaaaatatcaacaacgacgcccccgactaactacgcgtcttctaatcgataacgattaacctactaacgctcgacatactaataactaacgaaatatccgcgctacaaaacaccacgataattataaaactaccgttcaactttataatcttcttcgtaataacgaaattatataaat

SEQ ID NO: 7921 - DNA, 526 bp, Artificial Sequence
  chemically treated genomic DNA (Homo sapiens) CpG-island No: 7921
aataaacggacgttcgtgcggtcgggattacggtttggggggaatttcgtatcggtaagggtttttatttttagtaagttttgtttcgtcgttagtcgcgggttagatatttgaaaacggtgacgggtagaggttttattattaaacgataggttcgcgtaatgatgcgttagttttattagttcgtcgaaattgattttttaggcgtttatcgtattattttatcggaaaaatttagttcggggttaagcgtggcgggtaatgttaacgagttcgattttaggttcgttatcggttatgcgtagtaatttgcggtatattaggcgttggggcgatggttatcggaagtattaatgtcgtcgaatggcgcggtattggtagtatcggtaagcggtttgttttagttaataattttcgttcgcgtttttagtaatagttgatcgaatttttttcgttcgggggaaattagatcgtaagagagttcgaagcgagtgttattcgttattcgaatcgttttatcgaaagt

SEQ ID NO: 7922 - DNA, 526 bp, Artificial Sequence
  chemically treated genomic DNA (Homo sapiens) CpG-island No: 7922
actttcgataaaacgattcgaataacgaataacactcgcttcgaactctcttacgatctaatttcccccgaacgaaaaaaattcgatcaactattactaaaaacgcgaacgaaaattattaactaaaacaaaccgcttaccgatactaccaataccgcgccattcgacgacattaatacttccgataaccatcgccccaacgcctaatataccgcaaattactacgcataaccgataacgaacctaaaatcgaactcgttaacattacccgccacgcttaaccccgaactaaatttttccgataaaataatacgataaacgcctaaaaaatcaatttcgacgaactaataaaactaacgcatcattacgcgaacctatcgtttaataataaaacctctacccgtcaccgttttcaaatatctaacccgcgactaacgacgaaacaaaacttactaaaaataaaaacccttaccgatacgaaattccccccaaaccgtaatcccgaccgcacgaacgtccgtttatt

SEQ ID NO: 7923 - DNA, 526 bp, Artificial Sequence
  chemically treated genomic DNA (Homo sapiens) CpG-island No: 7923
attttcgatgaagcgattcgaatggcgaataatattcgtttcggatttttttgcggtttggtttttttcgagcgggaaaagttcgattaattgttgttggaggcgcgggcggggattgttaattggaataaatcgtttatcggtgttgttagtatcgcgttattcggcggtattggtgttttcggtaattatcgttttagcgtttggtatgtcgtagattattgcgtatggtcgatggcgagtttggagtcggattcgttaatattgttcgttacgtttaatttcgggttggattttttcgatgaggtggtgcgatgaacgtttgggaagttaatttcgacgggttggtagggttgacgtattattacgcgggtttgtcgtttggtaatgaagtttttattcgttatcgtttttaggtgtttaattcgcgattggcggcgaagtagggtttattgaaaatgaaagtttttgtcgatgcgggattttttttaggtcgtgatttcggtcgtacgaacgttcgtttatt

SEQ ID NO: 7924 - DNA, 526 bp, Artificial Sequence
  chemically treated genomic DNA (Homo sapiens) CpG-island No: 7924
aataaacgaacgttcgtacgaccgaaatcacgacctaaaaaaaatcccgcatcgacaaaaactttcattttcaataaaccctacttcgccgccaatcgcgaattaaacacctaaaaacgataacgaataaaaacttcattaccaaacgacaaacccgcgtaataatacgtcaaccctaccaacccgtcgaaattaacttcccaaacgttcatcgcaccacctcatcgaaaaaatccaacccgaaattaaacgtaacgaacaatattaacgaatccgactccaaactcgccatcgaccatacgcaataatctacgacataccaaacgctaaaacgataattaccgaaaacaccaataccgccgaataacgcgatactaacaacaccgataaacgatttattccaattaacaatccccgcccgcgcctccaacaacaattaatcgaacttttcccgctcgaaaaaaaccaaaccgcaaaaaaatccgaaacgaatattattcgccattcgaatcgcttcatcgaaaat

SEQ ID NO: 7925 - DNA, 529 bp, Artificial Sequence
  chemically treated genomic DNA (Homo sapiens) CpG-island No: 7925
aatcggtgcgttcgggtcgttttgataggttattatacgtttttgttgcgtttcgattagaacgtcgtaattagtatcgtagaaacggtacggcgttttattttatttgatggttttttgttgattaataacggcgcgggtaacgttcggtacgttgagatcggtagtcgtcgtagcggtcgtaacggcgttagtttttataaagttacgacgattgagttttatggtgtttttttattttgttttttttgttggtgataaattagcgatatcgttagtacgttttttacgttgcgtattgatttaatggtattggattagcgtttcgttgttttttgtttttattattataattaattgatcgttcggcgcgtcgttgatagtaattttatagtcgggaaaggcgtttagttgggtgttgatgtttgaaattcgttcgtttttggtttgtacgattaggttgtaaatttgttagttagtgtgtatggagatatttcgtagttatggttgatatcggatagttggttgt

SEQ ID NO: 7926 - DNA, 529 bp, Artificial Sequence
  chemically treated genomic DNA (Homo sapiens) CpG-island No: 7926
acaaccaactatccgatatcaaccataactacgaaatatctccatacacactaactaacaaatttacaacctaatcgtacaaaccaaaaacgaacgaatttcaaacatcaacacccaactaaacgcctttcccgactataaaattactatcaacgacgcgccgaacgatcaattaattataataataaaaacaaaaaacaacgaaacgctaatccaataccattaaatcaatacgcaacgtaaaaaacgtactaacgatatcgctaatttatcaccaacaaaaaaaacaaaataaaaaaacaccataaaactcaatcgtcgtaactttataaaaactaacgccgttacgaccgctacgacgactaccgatctcaacgtaccgaacgttacccgcgccgttattaatcaacaaaaaaccatcaaataaaataaaacgccgtaccgtttctacgatactaattacgacgttctaatcgaaacgcaacaaaaacgtataataacctatcaaaacgacccgaacgcaccgatt

SEQ ID NO: 7927 - DNA, 529 bp, Artificial Sequence
  chemically treated genomic DNA (Homo sapiens) CpG-island No: 7927
gtagttagttgttcggtattagttataattgcggagtatttttatgtatattaattggtaagtttgtagtttggtcgtgtaggttaaaagcgaacgaattttagatattagtatttaattgaacgtttttttcggttgtgaagttgttgttagcgacgcgtcgagcggttagttgattgtggtggtggaagtagaagatagcgaaacgttgatttaatattattgagttagtacgtaacgtagagggcgtgttggcggtgtcgttggtttattattagtaggaagagtaaggtgaggaaatattatgaaatttagtcgtcgtagttttatgaaagttaacgtcgttgcggtcgttgcggcggttgtcggttttagcgtgtcgggcgttgttcgcgtcgttgttggttagtaggaagttattaaatgggataaagcgtcgtgtcgtttttgcggtattggttgcggcgttttggtcggaacgtagtagggacgtgtggtggtttgttagggcgattcggacgtatcggtt

SEQ ID NO: 7928 - DNA, 529 bp, Artificial Sequence
  chemically treated genomic DNA (Homo sapiens) CpG-island No: 7928
aaccgatacgtccgaatcgccctaacaaaccaccacacgtccctactacgttccgaccaaaacgccgcaaccaataccgcaaaaacgacacgacgctttatcccatttaataacttcctactaaccaacaacgacgcgaacaacgcccgacacgctaaaaccgacaaccgccgcaacgaccgcaacgacgttaactttcataaaactacgacgactaaatttcataatatttcctcaccttactcttcctactaataataaaccaacgacaccgccaacacgccctctacgttacgtactaactcaataatattaaatcaacgtttcgctatcttctacttccaccaccacaatcaactaaccgctcgacgcgtcgctaacaacaacttcacaaccgaaaaaaacgttcaattaaatactaatatctaaaattcgttcgcttttaacctacacgaccaaactacaaacttaccaattaatatacataaaaatactccgcaattataactaataccgaacaactaactac

SEQ ID NO: 7929 - DNA, 802 bp, Artificial Sequence
  chemically treated genomic DNA (Homo sapiens) CpG-island No: 7929
ttcgttgggtttttgttagtattttataattaattataaatttacgtacggtggcggagcgtagtagaggcggatataaagtgcgcgtgtagttgttagtgttgatttttttcgttattaaatggcgcgtcgtgttagtttatagagtaggggaaggagtattggacgaggttgttataacgattggttagtttttttaacgttagacgttagatcgttgcgttgggcgtcggttaaatcggtgattcgtaaaatcgtgggttttgggtagtagtagcgtttcgaataagttaggcgtatatatttataatttcggcgttggcgtaggtaatagcgtgttggacgtggttaatgtttttagtaaagtttgcggtaaatcggttaattattattttgtatcgcgtcgcgagggcgatttttcggtttattgggcggacgttagtaaagtcgatcgtgaattgaattggcgcgtaacgcgtatattcgatgaaatggcgtaggatatttggtattggtagttacgttatttatagggatatttcgattaaggaacgattatgacgtaatttaatttcgttgattatttatatcgtcgttataattcgtttatcgggtaatggattttggttttatcgtatcgcgttaagcgtttttggtagggggcgtaggaaacgttagttaaataggtgttatttgcgtacgatttagattgttttttttgcgtaggtaatgtgcgggtgataggcgataaaaatttcgattatatcgggatttacgtttttattaatgattttgcggtttt

SEQ ID NO: 7930 - DNA, 802 bp, Artificial Sequence
  chemically treated genomic DNA (Homo sapiens) CpG-island No: 7930
aaaaccgcaaaatcattaataaaaacgtaaatcccgatataatcgaaatttttatcgcctatcacccgcacattacctacgcaaaaaaaacaatctaaatcgtacgcaaataacacctatttaactaacgtttcctacgccccctaccaaaaacgcttaacgcgatacgataaaaccaaaatccattacccgataaacgaattataacgacgatataaataatcaacgaaattaaattacgtcataatcgttccttaatcgaaatatccctataaataacgtaactaccaataccaaatatcctacgccatttcatcgaatatacgcgttacgcgccaattcaattcacgatcgactttactaacgtccgcccaataaaccgaaaaatcgccctcgcgacgcgatacaaaataataattaaccgatttaccgcaaactttactaaaaacattaaccacgtccaacacgctattacctacgccaacgccgaaattataaatatatacgcctaacttattcgaaacgctactactacccaaaacccacgattttacgaatcaccgatttaaccgacgcccaacgcaacgatctaacgtctaacgttaaaaaaactaaccaatcgttataacaacctcgtccaatactccttcccctactctataaactaacacgacgcgccatttaataacgaaaaaaatcaacactaacaactacacgcgcactttatatccgcctctactacgctccgccaccgtacgtaaatttataattaattataaaatactaacaaaaacccaacgaa

SEQ ID NO: 7931 - DNA, 802 bp, Artificial Sequence
  chemically treated genomic DNA (Homo sapiens) CpG-island No: 7931
agagtcgtaaagttattagtgaaaacgtaagtttcggtgtaatcggggtttttatcgtttgttattcgtatattatttgcgtagaggaagtaatttggatcgtgcgtaggtaatatttgtttggttggcgttttttgcgttttttgttaggggcgtttagcgcggtgcggtgaaattagaatttattgttcggtgagcgggttgtagcggcgatgtggatgattaacgggattaaattgcgttatggtcgttttttaatcgggatatttttgtggatggcgtgattgttagtgttaggtgttttgcgttattttatcgagtgtgcgcgttacgcgttagtttagtttacggtcggttttgttggcgttcgtttagtaggtcggaaggtcgttttcgcgacgcggtgtaaaatgataattaatcggtttgtcgtaggttttgttgaaggtattaattacgtttagtacgttgttgtttacgttagcgtcgaggttgtagatgtgtacgtttggtttgttcgaaacgttattgttgtttaaagtttacggttttacggattatcgatttgatcgacgtttagcgtagcgatttggcgtttggcgttgaaaaagttgattagtcgttatgataatttcgtttagtgtttttttttttattttatgggttggtacggcgcgttatttaatggcgaagagaattaatattggtagttgtacgcgtattttgtattcgtttttgttgcgtttcgttatcgtacgtaaatttatggttggttatgaaatgttggtagagatttagcgag

SEQ ID NO: 7932 - DNA, 802 bp, Artificial Sequence
  chemically treated genomic DNA (Homo sapiens) CpG-island No: 7932
ctcgctaaatctctaccaacatttcataaccaaccataaatttacgtacgataacgaaacgcaacaaaaacgaatacaaaatacgcgtacaactaccaatattaattctcttcgccattaaataacgcgccgtaccaacccataaaataaaaaaaaaaacactaaacgaaattatcataacgactaatcaactttttcaacgccaaacgccaaatcgctacgctaaacgtcgatcaaatcgataatccgtaaaaccgtaaactttaaacaacaataacgtttcgaacaaaccaaacgtacacatctacaacctcgacgctaacgtaaacaacaacgtactaaacgtaattaataccttcaacaaaacctacgacaaaccgattaattatcattttacaccgcgtcgcgaaaacgaccttccgacctactaaacgaacgccaacaaaaccgaccgtaaactaaactaacgcgtaacgcgcacactcgataaaataacgcaaaacacctaacactaacaatcacgccatccacaaaaatatcccgattaaaaaacgaccataacgcaatttaatcccgttaatcatccacatcgccgctacaacccgctcaccgaacaataaattctaatttcaccgcaccgcgctaaacgcccctaacaaaaaacgcaaaaaacgccaaccaaacaaatattacctacgcacgatccaaattacttcctctacgcaaataatatacgaataacaaacgataaaaaccccgattacaccgaaacttacgttttcactaataactttacgactct

SEQ ID NO: 7933 - DNA, 659 bp, Artificial Sequence
  chemically treated genomic DNA (Homo sapiens) CpG-island No: 7933
cggttcgattcgatcgtattcggcgtttgttttcgttcggcgttttcggttagttatgggtttttggagtcgtagtttttcggcgttgttgttgttgttgtaggtatttcggattttttgatttgcgagggacgtattcgggtcgtaagtttcgcgttttagttttgcgtttttttttttttcgtcgttatcgtttttttttttttaagaaagttcgggttttgaggagcggagcggtttggaagtttcgcgcgtttcggattttttagtgatgggagtggggggtgggtggtgaggggcgagcgcggtttttttgttttttttagcgtagatcgaggcgggggcgtttggtcgcggagttcgcggggtgggttcgcgcgggcggtgggggcgtgaagcggggtgtagggggtggggtgtggagaaggggtgttttggtgtaagtcgagggggagttaggagtcgtggggacgattttcgagggaaggagaggggtattcgtagaaataaaggtattatgttatgttaagaaaggtcgtaaataggagtgagggtttcggggataagaaagtgaggtcggaggaggtgggagcgtttttcgttttgaggagtggtgtattttcggtttaaggaaagtggggtattggagaataaagata

SEQ ID NO: 7934 - DNA, 659 bp, Artificial Sequence
  chemically treated genomic DNA (Homo sapiens) CpG-island No: 7934
tatctttattctccaataccccactttccttaaaccgaaaatacaccactcctcaaaacgaaaaacgctcccacctcctccgacctcactttcttatccccgaaaccctcactcctatttacgacctttcttaacataacataatacctttatttctacgaatacccctctccttccctcgaaaatcgtccccacgactcctaactccccctcgacttacaccaaaacaccccttctccacaccccaccccctacaccccgcttcacgcccccaccgcccgcgcgaacccaccccgcgaactccgcgaccaaacgcccccgcctcgatctacgctaaaaaaaacaaaaaaaccgcgctcgcccctcaccacccaccccccactcccatcactaaaaaatccgaaacgcgcgaaacttccaaaccgctccgctcctcaaaacccgaactttcttaaaaaaaaaaaaacgataacgacgaaaaaaaaaaaaacgcaaaactaaaacgcgaaacttacgacccgaatacgtccctcgcaaatcaaaaaatccgaaatacctacaacaacaacaacaacgccgaaaaactacgactccaaaaacccataactaaccgaaaacgccgaacgaaaacaaacgccgaatacgatcgaatcgaaccg

SEQ ID NO: 7935 - DNA, 659 bp, Artificial Sequence
  chemically treated genomic DNA (Homo sapiens) CpG-island No: 7935
tgtttttattttttagtattttattttttttagatcgggaatgtattattttttagagcgaggggcgtttttatttttttcgattttatttttttattttcgggatttttatttttatttacgattttttttggtatggtatggtgtttttatttttacggatgtttttttttttttttcgaagatcgtttttacgatttttggttttttttcgatttgtattagggtattttttttttatattttattttttatatttcgttttacgtttttatcgttcgcgcgagtttatttcgcggatttcgcggttagacgttttcgtttcggtttgcgttggagggggtaggaaagtcgcgttcgttttttattatttattttttatttttattattggggggttcggagcgcgcgaggtttttaggtcgtttcgttttttaggattcgaatttttttggaagaagggaagcggtgacgacgggagaggaaggggcgtagggttggggcgcggagtttgcggttcgaatgcgtttttcgtaagttaggggattcggggtatttgtagtagtagtagtagcgtcgagaggttgcggttttaagggtttatggttggtcggggacgtcgagcgagggtaggcgtcgggtgcggtcgggtcgggtcg

SEQ ID NO: 7936 - DNA, 659 bp, Artificial Sequence
  chemically treated genomic DNA (Homo sapiens) CpG-island No: 7936
cgacccgacccgaccgcacccgacgcctaccctcgctcgacgtccccgaccaaccataaacccttaaaaccgcaacctctcgacgctactactactactacaaataccccgaatcccctaacttacgaaaaacgcattcgaaccgcaaactccgcgccccaaccctacgccccttcctctcccgtcgtcaccgcttcccttcttccaaaaaaattcgaatcctaaaaaacgaaacgacctaaaaacctcgcgcgctccgaaccccccaataataaaaataaaaaataaataataaaaaacgaacgcgactttcctaccccctccaacgcaaaccgaaacgaaaacgtctaaccgcgaaatccgcgaaataaactcgcgcgaacgataaaaacgtaaaacgaaatataaaaaataaaatataaaaaaaaaataccctaatacaaatcgaaaaaaaaccaaaaatcgtaaaaacgatcttcgaaaaaaaaaaaaaaacatccgtaaaaataaaaacaccataccataccaaaaaaaatcgtaaataaaaataaaaatcccgaaaataaaaaaataaaatcgaaaaaaataaaaacgcccctcgctctaaaaaataatacattcccgatctaaaaaaaataaaatactaaaaaataaaaaca

SEQ ID NO: 7937 - DNA, 535 bp, Artificial Sequence
  chemically treated genomic DNA (Homo sapiens) CpG-island No: 7937
gttcgaacgtcgttgttagttgtgttattttgtcgtttttgtttttttcggtaaggtttagttttagtatggcgtttatttcgtaattttgaatatgtagtacggtacgcgtattagagagtttcgttagtaggcgtattttcggcgcgtaaaatagcgttggtattacgttaataatgcgattcggtttttagcgacgttgcgttattagcggaaagaaattgttgacggtaaaattgtttagatgtaataggcgttttagggtgttcggttgttttggtatatatagcgggtagcgttatatcgtggcggtttttttttttcgtttgtagcgttaggcggaatagttttcgtttatttgttattgcgggtagtaaggcggtgcggtaatgattcgtattttatgattttgtgtcgttagttattttattatttcgtcggtgtatttgtcgatgtcggttaatttcggcgagtagttaatgtcgtagattagtatttttataattcgggtatttcggtacgttttttagcgaga

SEQ ID NO: 7938 - DNA, 535 bp, Artificial Sequence
  chemically treated genomic DNA (Homo sapiens) CpG-island No: 7938
tctcgctaaaaaacgtaccgaaatacccgaattataaaaatactaatctacgacattaactactcgccgaaattaaccgacatcgacaaatacaccgacgaaataataaaataactaacgacacaaaatcataaaatacgaatcattaccgcaccgccttactacccgcaataacaaataaacgaaaactattccgcctaacgctacaaacgaaaaaaaaaaaccgccacgatataacgctacccgctatatataccaaaacaaccgaacaccctaaaacgcctattacatctaaacaattttaccgtcaacaatttctttccgctaataacgcaacgtcgctaaaaaccgaatcgcattattaacgtaataccaacgctattttacgcgccgaaaatacgcctactaacgaaactctctaatacgcgtaccgtactacatattcaaaattacgaaataaacgccatactaaaactaaaccttaccgaaaaaaacaaaaacgacaaaataacacaactaacaacgacgttcgaac

SEQ ID NO: 7939 - DNA, 535 bp, Artificial Sequence
  chemically treated genomic DNA (Homo sapiens) CpG-island No: 7939
tttcgttgagaagcgtatcggagtattcggattatgaaaatattggtttacggtattaattattcgtcggagttaatcggtatcggtaaatatatcggcgagatggtggaatggttggcggtataaggttatgaggtgcgggttattatcgtatcgttttattattcgtaatggtaggtgggcgagaattatttcgtttggcgttataaacgagaagagggggtcgttacggtgtggcgttgttcgttgtatgtgttaaaatagtcgagtattttgaaacgtttgttgtatttgggtagttttgtcgttagtagttttttttcgttgatggcgtaacgtcgttggaagtcggatcgtattattggcgtggtgttaacgttgttttgcgcgtcgggaatgcgtttgttggcgaaattttttggtgcgcgtatcgtgttgtatatttaggattacgaagtggacgttatgttggggttgggttttgtcggaaaaggtaaaggcggtaaagtggtatagttggtaacggcgttcgaat

SEQ ID NO: 7940 - DNA, 535 bp, Artificial Sequence
  chemically treated genomic DNA (Homo sapiens) CpG-island No: 7940
attcgaacgccgttaccaactataccactttaccgcctttaccttttccgacaaaacccaaccccaacataacgtccacttcgtaatcctaaatatacaacacgatacgcgcaccaaaaaatttcgccaacaaacgcattcccgacgcgcaaaacaacgttaacaccacgccaataatacgatccgacttccaacgacgttacgccatcaacgaaaaaaaactactaacgacaaaactacccaaatacaacaaacgtttcaaaatactcgactattttaacacatacaacgaacaacgccacaccgtaacgaccccctcttctcgtttataacgccaaacgaaataattctcgcccacctaccattacgaataataaaacgatacgataataacccgcacctcataaccttataccgccaaccattccaccatctcgccgatatatttaccgataccgattaactccgacgaataattaataccgtaaaccaatattttcataatccgaatactccgatacgcttctcaacgaaa

SEQ ID NO: 7941 - DNA, 688 bp, Artificial Sequence
  chemically treated genomic DNA (Homo sapiens) CpG-island No: 7941
ttgtattttttttagttcgattcgtttttttttgaacgttttgtttgcgtttagatttattttttttacgtttagtttttcgttgatatttatttttttgattattatttttttatcgtatttcgggggcgttgtgttgtcgttgtattgtcgcgttgtacggttgatatcgcgagttcggtatcgttatatttagcgtttcgtgcgggcgtttaaggttatagatcgttcgttagtggtcgaaggcgcgttgttagtttatcgttgtttgcgaattattttttttgtagtattttcgtttttaggttgcggtgaaaacgttttagcgtttttttgcgtttgcggatgataggtcggagtgttttattcggatatttaggcgtattagttatagttttagcgtcgtttaggtgttcggtggtgtcgttttacggtgagtcgttatttatggttattcggttcggtaggtcgttacgtttaaatatcgttgattagttgttgttgtttcggtttcgcgtcgtttatcggtatatgtgcgttacggttattagggataaaatcgggagtggtcgtttacgtagggtgagcggatggtagcgtagttttgaaatttttttggagaatattaggggcggtttgttttattttttttttgtaagagcggtatcgtttgattttaatcgttgtt

SEQ ID NO: 7942 - DNA, 688 bp, Artificial Sequence
  chemically treated genomic DNA (Homo sapiens) CpG-island No: 7942
aacaacgattaaaatcaaacgataccgctcttacaaaaaaaaaataaaacaaaccgcccctaatattctccaaaaaaatttcaaaactacgctaccatccgctcaccctacgtaaacgaccactcccgattttatccctaataaccgtaacgcacatataccgataaacgacgcgaaaccgaaacaacaacaactaatcaacgatatttaaacgtaacgacctaccgaaccgaataaccataaataacgactcaccgtaaaacgacaccaccgaacacctaaacgacgctaaaactataactaatacgcctaaatatccgaataaaacactccgacctatcatccgcaaacgcaaaaaaacgctaaaacgttttcaccgcaacctaaaaacgaaaatactacaaaaaaaataattcgcaaacaacgataaactaacaacgcgccttcgaccactaacgaacgatctataaccttaaacgcccgcacgaaacgctaaatataacgataccgaactcgcgatatcaaccgtacaacgcgacaatacaacgacaacacaacgcccccgaaatacgataaaaaaataataatcaaaaaaataaatatcaacgaaaaactaaacgtaaaaaaaataaatctaaacgcaaacaaaacgttcaaaaaaaaacgaatcgaactaaaaaaaatacaa

SEQ ID NO: 7943 - DNA, 688 bp, Artificial Sequence
  chemically treated genomic DNA (Homo sapiens) CpG-island No: 7943
agtagcgattaaggttaagcgatatcgtttttatagaggagaggtagggtaaatcgtttttaatgttttttaaagagattttaaggttacgttgttattcgtttattttgcgtggacgattattttcgattttatttttgatgatcgtggcgtatatgtatcgatgaacggcgcgagatcgggatagtagtagttggttagcgatgtttgagcgtaacggtttgtcggatcggatgattatggataacggtttatcgtggggcgatattatcggatatttgaacggcgttggagttgtggttgatgcgtttgggtattcgggtggggtatttcggtttattattcgtagacgtaggggaacgttggagcgtttttatcgtagtttgaaggcggaagtgttgtagggaaaatggttcgtagatagcggtgaattggtagcgcgttttcgattattggcggacggtttataattttgaacgttcgtacgaggcgttggatatggcggtatcgggttcgcggtattagtcgtatagcgcggtagtatagcggtaatataacgttttcggaatacgatgaaggggtgatggttaggaaagtggatattagcggaaagttgagcgtgaaaggggtaagtttgagcgtaggtaaggcgtttaggggagaacgggtcgggttgaaggagatgtag

SEQ ID NO: 7944 - DNA, 688 bp, Artificial Sequence
  chemically treated genomic DNA (Homo sapiens) CpG-island No: 7944
ctacatctccttcaacccgacccgttctcccctaaacgccttacctacgctcaaacttacccctttcacgctcaactttccgctaatatccactttcctaaccatcaccccttcatcgtattccgaaaacgttatattaccgctatactaccgcgctatacgactaataccgcgaacccgataccgccatatccaacgcctcgtacgaacgttcaaaattataaaccgtccgccaataatcgaaaacgcgctaccaattcaccgctatctacgaaccattttccctacaacacttccgccttcaaactacgataaaaacgctccaacgttcccctacgtctacgaataataaaccgaaataccccacccgaatacccaaacgcatcaaccacaactccaacgccgttcaaatatccgataatatcgccccacgataaaccgttatccataatcatccgatccgacaaaccgttacgctcaaacatcgctaaccaactactactatcccgatctcgcgccgttcatcgatacatatacgccacgatcatcaaaaataaaatcgaaaataatcgtccacgcaaaataaacgaataacaacgtaaccttaaaatctctttaaaaaacattaaaaacgatttaccctacctctcctctataaaaacgatatcgcttaaccttaatcgctact

SEQ ID NO: 7945 - DNA, 682 bp, Artificial Sequence
  chemically treated genomic DNA (Homo sapiens) CpG-island No: 7945
gacgtcgtcgttgaagatttgttggtagaagtgagttagtcgaagcgcgattttagcgaagaagagattatcgttcgtatgatgatttcgatggttaacgaagtggtgcgttgtttggaggaaggtattatcgttatttcggcggaagcggatatggcgttggtttacggtttgggttttttttcgttttacggcggcgcgtttcgttggttggatattttcggtagcgtaaaatatttcgatatggtatagtaatattagtatttcggttcgttgtatgaagtgtcggaaggtttgcgtaataaagcgcgttataacgaatcgtattatttttcggttgagttagttcgttcggttggcgatttgaaaacggtttaaggagttataatggaataggttgttattgtcgatgtaattcgtatttcgatgggtcgttcgaagggcggtgtttttcgtaacgtgcgtgtagaagattttttcgtttatttaatgcgtagtttgttggcgcgtaattcggcgttggaagcggcggttttcgacgatatttattggggttgtgtgtagtagacgttggagtagggttttaatatcgttcgtaacgcggcgttgttggtagaagtattatattttgtttcggcggttatcgttaatcgtttgtgtggtttatttatgtaggtattgt

SEQ ID NO: 7946 - DNA, 682 bp, Artificial Sequence
  chemically treated genomic DNA (Homo sapiens) CpG-island No: 7946
acaatacctacataaataaaccacacaaacgattaacgataaccgccgaaacaaaatataatacttctaccaacaacgccgcgttacgaacgatattaaaaccctactccaacgtctactacacacaaccccaataaatatcgtcgaaaaccgccgcttccaacgccgaattacgcgccaacaaactacgcattaaataaacgaaaaaatcttctacacgcacgttacgaaaaacaccgcccttcgaacgacccatcgaaatacgaattacatcgacaataacaacctattccattataactccttaaaccgttttcaaatcgccaaccgaacgaactaactcaaccgaaaaataatacgattcgttataacgcgctttattacgcaaaccttccgacacttcatacaacgaaccgaaatactaatattactataccatatcgaaatattttacgctaccgaaaatatccaaccaacgaaacgcgccgccgtaaaacgaaaaaaaacccaaaccgtaaaccaacgccatatccgcttccgccgaaataacgataataccttcctccaaacaacgcaccacttcgttaaccatcgaaatcatcatacgaacgataatctcttcttcgctaaaatcgcgcttcgactaactcacttctaccaacaaatcttcaacgacgacgtc

SEQ ID NO: 7947 - DNA, 682 bp, Artificial Sequence
  chemically treated genomic DNA (Homo sapiens) CpG-island No: 7947
gtagtgtttgtatggatgaattatataagcgattaacggtaatcgtcgggatagagtgtggtatttttgttagtagcgtcgcgttacgggcgatattaaaattttgttttagcgtttgttgtatataattttagtaaatatcgtcgagggtcgtcgtttttagcgtcgggttacgcgttagtaggttacgtattaaatgagcggagagattttttgtacgtacgttacgaaaagtatcgtttttcgaacggtttatcggggtgcgaattgtatcgataatgataatttgttttattgtgattttttaagtcgtttttaggtcgttaatcggacgggttggtttaatcggaggatagtacggttcgttatgacgcgttttattacgtagatttttcggtattttatatagcgggtcgaggtgttgatattgttgtgttatatcgaggtattttgcgttatcgagggtgtttagttagcggaacgcgtcgtcgtggaacggagggaagtttaggtcgtagattagcgttatattcgttttcgtcggagtggcgataatgtttttttttagatagcgtattatttcgttgattatcgggattattatgcgggcgataatttttttttcgttgaaatcgcgtttcggttggtttatttttgttagtaggtttttaacggcggcgtt

SEQ ID NO: 7948 - DNA, 682 bp, Artificial Sequence
  chemically treated genomic DNA (Homo sapiens) CpG-island No: 7948
aacgccgccgttaaaaacctactaacaaaaataaaccaaccgaaacgcgatttcaacgaaaaaaaaattatcgcccgcataataatcccgataatcaacgaaataatacgctatctaaaaaaaaacattatcgccactccgacgaaaacgaatataacgctaatctacgacctaaacttccctccgttccacgacgacgcgttccgctaactaaacaccctcgataacgcaaaatacctcgatataacacaacaatatcaacacctcgacccgctatataaaataccgaaaaatctacgtaataaaacgcgtcataacgaaccgtactatcctccgattaaaccaacccgtccgattaacgacctaaaaacgacttaaaaaatcacaataaaacaaattatcattatcgatacaattcgcaccccgataaaccgttcgaaaaacgatacttttcgtaacgtacgtacaaaaaatctctccgctcatttaatacgtaacctactaacgcgtaacccgacgctaaaaacgacgaccctcgacgatatttactaaaattatatacaacaaacgctaaaacaaaattttaatatcgcccgtaacgcgacgctactaacaaaaataccacactctatcccgacgattaccgttaatcgcttatataattcatccatacaaacactac

SEQ ID NO: 7949 - DNA, 687 bp, Artificial Sequence
  chemically treated genomic DNA (Homo sapiens) CpG-island No: 7949
tatttagtattattaagtaatgtatcgaatagggaatcgcgatcgtcggaaagtgtcgttatcgtcgtagttacgtatcgcgggcgatgacgttagaatttttagatcgttttgtcgcgtatttgttttgtttattaggaattcgagggcgcgatacgtttaataagaatggtcggttatcgtcgtataagtaatttcgtaaagggtaaagataagaatgcgtattcgacgaacgattgatgtcgtataatcgtgtttcgtcgtagtattatcgttaacggtaaaaatcgagcgttcgaaggcggttttgcggttgatgaatataaatagcgtaaataatataattatgattagcgcggatatcggtatatcgagaaattcgttcgtttagttagtttagtatttcgtttttattaatcggtattggtagtgcgttcgtttataaatagttttatttcgcgtagggcgttttatagttttagtgtggtaatcgaaatttggtattattaaattacgtttgcgtacgttatttcggtttatgcgtttttattagtcgcgtttaatttagtaatattagtaggtacgttatcgttattcggaatttttaaattgtagttaataaatgttaggtatatcggagataaaagttattatcggtttaacgttgatattaatttttatcggatg

SEQ ID NO: 7950 - DNA, 687 bp, Artificial Sequence
  chemically treated genomic DNA (Homo sapiens) CpG-island No: 7950
catccgataaaaattaatatcaacgttaaaccgataataacttttatctccgatatacctaacatttattaactacaatttaaaaattccgaataacgataacgtacctactaatattactaaattaaacgcgactaataaaaacgcataaaccgaaataacgtacgcaaacgtaatttaataataccaaatttcgattaccacactaaaactataaaacgccctacgcgaaataaaactatttataaacgaacgcactaccaataccgattaataaaaacgaaatactaaactaactaaacgaacgaatttctcgatataccgatatccgcgctaatcataattatattatttacgctatttatattcatcaaccgcaaaaccgccttcgaacgctcgatttttaccgttaacgataatactacgacgaaacacgattatacgacatcaatcgttcgtcgaatacgcattcttatctttaccctttacgaaattacttatacgacgataaccgaccattcttattaaacgtatcgcgccctcgaattcctaataaacaaaacaaatacgcgacaaaacgatctaaaaattctaacgtcatcgcccgcgatacgtaactacgacgataacgacactttccgacgatcgcgattccctattcgatacattacttaataatactaaata

SEQ ID NO: 7951 - DNA, 687 bp, Artificial Sequence
  chemically treated genomic DNA (Homo sapiens) CpG-island No: 7951
tattcggtgagaattgatgttagcgttgggtcgatggtggtttttgttttcggtgtgtttggtatttgttgattgtaatttgaagatttcgagtggcggtggcgtgtttgttggtgttgttggattaggcgcgattgatgggaacgtatggatcggggtgacgtgcgtaggcgtgatttaatgatattaagtttcggttgttatattggggttgtggagcgttttgcgcggaatggggttgtttatagacgaacgtattgttagtgtcgattgatgaaaacgaggtgttggattggttgggcggacgaatttttcggtgtgtcggtattcgcgttgattatgattgtgttgtttgcgttgtttgtgtttattagtcgtaaaatcgttttcgggcgttcggtttttgtcgttggcggtaatgttacggcggggtacgattgtgcggtattaatcgttcgtcgggtgcgtatttttatttttattttttacgggattatttatgcggcggtgatcggttatttttgttgagcgtgtcgcgttttcgggtttttggtaagtaagataggtgcgcgataaaacggtttggagattttgacgttatcgttcgcggtgcgtggttacggcggtagcggtatttttcggcggtcgcggttttttgttcggtatattgtttggtgatgttgggtg

SEQ ID NO: 7952 - DNA, 687 bp, Artificial Sequence
  chemically treated genomic DNA (Homo sapiens) CpG-island No: 7952
cacccaacatcaccaaacaatataccgaacaaaaaaccgcgaccgccgaaaaataccgctaccgccgtaaccacgcaccgcgaacgataacgtcaaaatctccaaaccgttttatcgcgcacctatcttacttaccaaaaacccgaaaacgcgacacgctcaacaaaaataaccgatcaccgccgcataaataatcccgtaaaaaataaaaataaaaatacgcacccgacgaacgattaataccgcacaatcgtaccccgccgtaacattaccgccaacgacaaaaaccgaacgcccgaaaacgattttacgactaataaacacaaacaacgcaaacaacacaatcataatcaacgcgaataccgacacaccgaaaaattcgtccgcccaaccaatccaacacctcgttttcatcaatcgacactaacaatacgttcgtctataaacaaccccattccgcgcaaaacgctccacaaccccaatataacaaccgaaacttaatatcattaaatcacgcctacgcacgtcaccccgatccatacgttcccatcaatcgcgcctaatccaacaacaccaacaaacacgccaccgccactcgaaatcttcaaattacaatcaacaaataccaaacacaccgaaaacaaaaaccaccatcgacccaacgctaacatcaattctcaccgaata

SEQ ID NO: 7953 - DNA, 559 bp, Artificial Sequence
  chemically treated genomic DNA (Homo sapiens) CpG-island No: 7953
ttttgtttgtattaggcgacgaattggttcggttgacggtaggaatgggcgtttttggcggcgggtaatgttgttatgttcggtatcgatttgagttatggtgtggatttcgtttttttgaaacgttagtagttattgacggcggaattcgtttaggtttttttgggtgcggaagttcgttatgttggtcgggaacgcggcgcgtagttcgtttgaatagtttgttgaatatttgcgttatttgttcgatcggcgcgtatttttggtattgttttggtaggttatgggttatgcggtttatttgttcgcggatcgtggttacgtatttgttttgtaagagattttatcggattattttataggtttagttagtgttgttgaagtttagatttggtttgatagcgcgttgtttattttcggcgttacgttgtattgttagtttgttttacggcgttacgtaggttttcgggatttaggatgttggtttgttagaagtggtgtttgttagtttagttatatagcgcgtagatgttttggtgcgattaggtatgtttatttg

SEQ ID NO: 7954 - DNA, 559 bp, Artificial Sequence
  chemically treated genomic DNA (Homo sapiens) CpG-island No: 7954
caaataaacatacctaatcgcaccaaaacatctacgcgctatataactaaactaacaaacaccacttctaacaaaccaacatcctaaatcccgaaaacctacgtaacgccgtaaaacaaactaacaatacaacgtaacgccgaaaataaacaacgcgctatcaaaccaaatctaaacttcaacaacactaactaaacctataaaataatccgataaaatctcttacaaaacaaatacgtaaccacgatccgcgaacaaataaaccgcataacccataacctaccaaaacaataccaaaaatacgcgccgatcgaacaaataacgcaaatattcaacaaactattcaaacgaactacgcgccgcgttcccgaccaacataacgaacttccgcacccaaaaaaacctaaacgaattccgccgtcaataactactaacgtttcaaaaaaacgaaatccacaccataactcaaatcgataccgaacataacaacattacccgccgccaaaaacgcccattcctaccgtcaaccgaaccaattcgtcgcctaatacaaacaaaa

SEQ ID NO: 7955 - DNA, 559 bp, Artificial Sequence
  chemically treated genomic DNA (Homo sapiens) CpG-island No: 7955
tagatagatatatttggtcgtattaggatatttgcgcgttgtatgattgggttagtaaatattatttttggtagattaatattttgagtttcgaaagtttgcgtaacgtcgtgggataagttgataatgtagcgtaacgtcggaggtgagtagcgcgttgttaagttagatttggattttaataatattgattgggtttatggggtgattcgatgaaattttttgtagagtagatgcgtaattacgattcgcgagtagatgagtcgtatggtttataatttgttagagtagtattaggagtgcgcgtcggtcgagtaggtggcgtaggtatttaataagttgtttaaacgagttgcgcgtcgcgttttcggttagtatggcgaattttcgtatttaggaagatttgaacgaatttcgtcgttagtggttgttggcgttttaggagaacgggatttatattatggtttaggtcgatgtcgggtatagtagtattgttcgtcgttaggagcgtttatttttgtcgttagtcgggttagttcgtcgtttggtgtaagtagag

SEQ ID NO: 7956 - DNA, 559 bp, Artificial Sequence
  chemically treated genomic DNA (Homo sapiens) CpG-island No: 7956
ctctacttacaccaaacgacgaactaacccgactaacgacaaaaataaacgctcctaacgacgaacaatactactatacccgacatcgacctaaaccataatataaatcccgttctcctaaaacgccaacaaccactaacgacgaaattcgttcaaatcttcctaaatacgaaaattcgccatactaaccgaaaacgcgacgcgcaactcgtttaaacaacttattaaatacctacgccacctactcgaccgacgcgcactcctaatactactctaacaaattataaaccatacgactcatctactcgcgaatcgtaattacgcatctactctacaaaaaatttcatcgaatcaccccataaacccaatcaatattattaaaatccaaatctaacttaacaacgcgctactcacctccgacgttacgctacattatcaacttatcccacgacgttacgcaaactttcgaaactcaaaatattaatctaccaaaaataatatttactaacccaatcatacaacgcgcaaatatcctaatacgaccaaatatatctatcta

SEQ ID NO: 7957 - DNA, 509 bp, Artificial Sequence
  chemically treated genomic DNA (Homo sapiens) CpG-island No: 7957
gttcgtacgatttagcgtcgtcgtggtttttttttagcgttttttgttttagcgattattatgttttcgggttcgagtagttagggtcgcggttatcgtttttttcgtattttaggtcgagaatttataacgcggcgtgtttttcgcgcgatttcgtcgttacgttacgtttttttttcgtttttcggaagtgcgcgggttggagcggaagcgtacgtttgttaggattagcggtggtggtttcgcgatggtaggcggcggcggggtcggcggcggttttttggagaatgttaatttttttatttattagcgttttggggagcggtttgtgacggtaggcgaggaggacgagtaggttttcgatagtatcgacgtacgcgagattttcgatattcgtcgttgttgggcgcgggcgggtttcgggggtttgcggtggggggagtagtgatatcgagtagttggtggagtcgtattttagtagggcgtttttggtagagggttttaagtgg

SEQ ID NO: 7958 - DNA, 509 bp, Artificial Sequence
  chemically treated genomic DNA (Homo sapiens) CpG-island No: 7958
ccacttaaaaccctctaccaaaaacgccctactaaaatacgactccaccaactactcgatatcactactccccccaccgcaaacccccgaaacccgcccgcgcccaacaacgacgaatatcgaaaatctcgcgtacgtcgatactatcgaaaacctactcgtcctcctcgcctaccgtcacaaaccgctccccaaaacgctaataaataaaaaaattaacattctccaaaaaaccgccgccgaccccgccgccgcctaccatcgcgaaaccaccaccgctaatcctaacaaacgtacgcttccgctccaacccgcgcacttccgaaaaacgaaaaaaaaacgtaacgtaacgacgaaatcgcgcgaaaaacacgccgcgttataaattctcgacctaaaatacgaaaaaaacgataaccgcgaccctaactactcgaacccgaaaacataataatcgctaaaacaaaaaacgctaaaaaaaaaccacgacgacgctaaatcgtacgaac

SEQ ID NO: 7959 - DNA, 509 bp, Artificial Sequence
  chemically treated genomic DNA (Homo sapiens) CpG-island No: 7959
ttatttagaattttttgttaggaacgttttgttgggatgcggttttattagttgttcgatattattgttttttttatcgtaagttttcggaattcgttcgcgtttagtagcggcggatatcgaagatttcgcgtgcgtcgatgttgtcgggaatttgttcgtttttttcgtttgtcgttataggtcgttttttagagcgttggtagatgagggggttggtattttttaggaggtcgtcgtcgatttcgtcgtcgtttattatcgcggaattattatcgttgattttagtaggcgtgcgttttcgttttaattcgcgtattttcggagaacgggaagggggcgtggcgtggcgacggagtcgcgcgagggatacgtcgcgttgtgggttttcggtttgaggtgcgagagaagcggtgatcgcggttttggttgttcggattcgggaatatgatggtcgttggagtagaaggcgttgagaagggattacggcggcgttgggtcgtgcgagt

SEQ ID NO: 7960 - DNA, 509 bp, Artificial Sequence
  chemically treated genomic DNA (Homo sapiens) CpG-island No: 7960
actcgcacgacccaacgccgccgtaatcccttctcaacgccttctactccaacgaccatcatattcccgaatccgaacaaccaaaaccgcgatcaccgcttctctcgcacctcaaaccgaaaacccacaacgcgacgtatccctcgcgcgactccgtcgccacgccacgcccccttcccgttctccgaaaatacgcgaattaaaacgaaaacgcacgcctactaaaatcaacgataataattccgcgataataaacgacgacgaaatcgacgacgacctcctaaaaaataccaaccccctcatctaccaacgctctaaaaaacgacctataacgacaaacgaaaaaaacgaacaaattcccgacaacatcgacgcacgcgaaatcttcgatatccgccgctactaaacgcgaacgaattccgaaaacttacgataaaaaaaacaataatatcgaacaactaataaaaccgcatcccaacaaaacgttcctaacaaaaaattctaaataa

SEQ ID NO: 7961 - DNA, 708 bp, Artificial Sequence
  chemically treated genomic DNA (Homo sapiens) CpG-island No: 7961
gtagcgtggatcgggggcgggagcgggggcgggtggaggtttaaataggcggttttggagttagagtttagtgcgggttgagaaggcggtggttgtagtagtagcggcggcggaaattttaaagttcgagttcggattacgagtgcgtggttttttaattcggattttagttttgagcgtgtttgtgtgcgagtgggtgagtgttttggcggagcggggtcggggcggttgtagatggatgcgttaggttcggaggggtttcgggtgagggcgtcgcgatttgggggttgggggagggttgcggcgggatttcggtcggagtatttcgtttgatttcgggttgggtaggtgcgtttcgggtttcgtttttttcgcggtttatacggttattcgggtttttgattttttagacggtttcggacgcgatgattttgaacggcggcggtagcggagcgggcgggagtcgcggtgggggttaggagcgcgagcgtcgtcggggtagtatattttggggtttcgtttcgtcgttgtatcgtcgtagtatgtcggtggacgagcgcgatttgtaggcggcgttgatttcgggtgttttgacggcggtcgcggtcgggacggggatttagggttttaggttggattggttcgaggatttcgaggattcgtttagtttagggggtagcgatttagacgagagcgtttataaggtgt

SEQ ID NO: 7962 - DNA, 708 bp, Artificial Sequence
  chemically treated genomic DNA (Homo sapiens) CpG-island No: 7962
acaccttataaacgctctcgtctaaatcgctaccccctaaactaaacgaatcctcgaaatcctcgaaccaatccaacctaaaaccctaaatccccgtcccgaccgcgaccgccgtcaaaacacccgaaatcaacgccgcctacaaatcgcgctcgtccaccgacatactacgacgatacaacgacgaaacgaaaccccaaaatatactaccccgacgacgctcgcgctcctaacccccaccgcgactcccgcccgctccgctaccgccgccgttcaaaatcatcgcgtccgaaaccgtctaaaaaatcaaaaacccgaataaccgtataaaccgcgaaaaaaacgaaacccgaaacgcacctacccaacccgaaatcaaacgaaatactccgaccgaaatcccgccgcaaccctcccccaacccccaaatcgcgacgccctcacccgaaacccctccgaacctaacgcatccatctacaaccgccccgaccccgctccgccaaaacactcacccactcgcacacaaacacgctcaaaactaaaatccgaattaaaaaaccacgcactcgtaatccgaactcgaactttaaaatttccgccgccgctactactacaaccaccgccttctcaacccgcactaaactctaactccaaaaccgcctatttaaacctccacccgcccccgctcccgcccccgatccacgctac

SEQ ID NO: 7963 - DNA, 708 bp, Artificial Sequence
  chemically treated genomic DNA (Homo sapiens) CpG-island No: 7963
gtattttgtaaacgttttcgtttgagtcgttgttttttgagttgagcgagttttcggagttttcgggttagtttagtttgggattttgggttttcgtttcggtcgcggtcgtcgttagggtattcggggttagcgtcgtttgtaggtcgcgttcgtttatcggtatgttgcggcggtgtagcggcggggcggggttttagggtgtgttgtttcgacggcgttcgcgtttttggtttttatcgcggttttcgttcgtttcgttgtcgtcgtcgtttagggttatcgcgttcgggatcgtttaggggattaggaattcgagtggtcgtgtaagtcgcgagggaggcgggattcggggcgtatttgtttaattcggagttaggcgggatgtttcggtcgaggtttcgtcgtagtttttttttagtttttaggtcgcggcgtttttattcgggattttttcggatttggcgtatttatttgtagtcgtttcgatttcgtttcgttaggatatttatttattcgtatatagatacgtttaggattaggattcggattaggaggttacgtattcgtagttcggattcggattttagggttttcgtcgtcgttgttgttgtagttatcgtttttttagttcgtattgggttttggttttagagtcgtttatttaagtttttattcgttttcgttttcgttttcggtttacgttgt

SEQ ID NO: 7964 - DNA, 708 bp, Artificial Sequence
  chemically treated genomic DNA (Homo sapiens) CpG-island No: 7964
acaacgtaaaccgaaaacgaaaacgaaaacgaataaaaacttaaataaacgactctaaaaccaaaacccaatacgaactaaaaaaacgataactacaacaacaacgacgacgaaaaccctaaaatccgaatccgaactacgaatacgtaacctcctaatccgaatcctaatcctaaacgtatctatatacgaataaataaatatcctaacgaaacgaaatcgaaacgactacaaataaatacgccaaatccgaaaaaatcccgaataaaaacgccgcgacctaaaaactaaaaaaaaactacgacgaaacctcgaccgaaacatcccgcctaactccgaattaaacaaatacgccccgaatcccgcctccctcgcgacttacacgaccactcgaattcctaatcccctaaacgatcccgaacgcgataaccctaaacgacgacgacaacgaaacgaacgaaaaccgcgataaaaaccaaaaacgcgaacgccgtcgaaacaacacaccctaaaaccccgccccgccgctacaccgccgcaacataccgataaacgaacgcgacctacaaacgacgctaaccccgaataccctaacgacgaccgcgaccgaaacgaaaacccaaaatcccaaactaaactaacccgaaaactccgaaaactcgctcaactcaaaaaacaacgactcaaacgaaaacgtttacaaaatac

SEQ ID NO: 7965 - DNA, 1427 bp, Artificial Sequence
  chemically treated genomic DNA (Homo sapiens) CpG-island No: 7965
ggttcgggttcgagttttattcgcggtgtttcgttggtcgatacgcgttatcgcggcgagttttaggaaaagcgttttttcgcgagtatcggttcgcggtatttggtttcgtattttgaatttcgagtaggaagtgagacggcgtttatttagtttcgggagtcgtagtagtcgcgtcgtcgttcggaatcggtttgggtcgtcgcggtttcgcgtaataagtgattcgcgcgcgtttcgggttagtcgatttacgattttcgagcggtcgtcgcggtaggcgttttggaagcgtgtttggcgtttttcgtggggtcggtttttgaagttcgtgtatttaatttgtaaggtaagacggttcgaaattaggagttaaattcgcggcgtcgttcgcgcgttcgtttttttagcgtagcgtcgataagggtaagtagaggttgcgggcgatggtcgtttcggcgagattgttttttcgcgggcgtatcgatcgggattttcggggatcgtgtcgtttaaattttttttcgttcgggtttattcggggcgcgttgcggttttttagtcgttcgttcgtttgttttattttatattcgcggtttagttttttaaaaaatttttcgttttcgaatttgtttttttggtcgggtacgacgcgcggtattttttcgttttgaggtcgcgtcggtcggtcgcgttcggggtttgcgcgggtattcgttggttggtttcgcgttgatcgattgatcgtttattcgcggcgttcggacgttcgtttttttttgttttaggcgttcgttcgcgtgggttttcgtttcggggagtttgaggcgtcgtcgttcgttcgagtttaatttacgtcgtcgtcgtcgtcgtcgtcgttttagtcgttgtttgtcgttcgcgtagttttagcgtttatcgttttcggtcgtcgtcgtcgtcgtcgtcgttatttttttttatcgtttatttcgttttcgtcggttttatttttttttttcgcgcgttcgttcgtttttaatttcggtaaataagacgtattatttataatttcgcggtttacgtcgcgtatgcgttattcgttcgttggcggagcggtttggttgtggcgtttcggggtttttttcgtattagggtttttttttttttgttcgttcgcggttattcggcgtggagttgtcgttgggggattcgtttggtttttagtagacgggagtagttagcgtaggttttttttatcgttttttttcggttatttggaatttttgggttttttaggtgcgcggagtaattttagattgttatttgaacgcgaggaaatttaagtttttggggatttttcgtttttaaatcgatcggtaggggtgtaggttttgtacgttgaagattgaggtggaaacggattaaagaatttaatcgagttatgg

SEQ ID NO: 7966 - DNA, 1427 bp, Artificial Sequence
  chemically treated genomic DNA (Homo sapiens) CpG-island No: 7966
ccataactcgattaaattctttaatccgtttccacctcaatcttcaacgtacaaaacctacacccctaccgatcgatttaaaaacgaaaaatccccaaaaacttaaatttcctcgcgttcaaataacaatctaaaattactccgcgcacctaaaaaacccaaaaattccaaataaccgaaaaaaaacgataaaaaaaacctacgctaactactcccgtctactaaaaaccaaacgaatcccccaacgacaactccacgccgaataaccgcgaacgaacaaaaaaaaaaaaaccctaatacgaaaaaaaccccgaaacgccacaaccaaaccgctccgccaacgaacgaataacgcatacgcgacgtaaaccgcgaaattataaataatacgtcttatttaccgaaattaaaaacgaacgaacgcgcgaaaaaaaaaaataaaaccgacgaaaacgaaataaacgataaaaaaaaataacgacgacgacgacgacgacgaccgaaaacgataaacgctaaaactacgcgaacgacaaacaacgactaaaacgacgacgacgacgacgacgacgtaaattaaactcgaacgaacgacgacgcctcaaactccccgaaacgaaaacccacgcgaacgaacgcctaaaacaaaaaaaaacgaacgtccgaacgccgcgaataaacgatcaatcgatcaacgcgaaaccaaccaacgaatacccgcgcaaaccccgaacgcgaccgaccgacgcgacctcaaaacgaaaaaataccgcgcgtcgtacccgaccaaaaaaacaaattcgaaaacgaaaaattttttaaaaaactaaaccgcgaatataaaataaaacaaacgaacgaacgactaaaaaaccgcaacgcgccccgaataaacccgaacgaaaaaaaatttaaacgacacgatccccgaaaatcccgatcgatacgcccgcgaaaaaacaatctcgccgaaacgaccatcgcccgcaacctctacttacccttatcgacgctacgctaaaaaaacgaacgcgcgaacgacgccgcgaatttaactcctaatttcgaaccgtcttaccttacaaattaaatacacgaacttcaaaaaccgaccccacgaaaaacgccaaacacgcttccaaaacgcctaccgcgacgaccgctcgaaaatcgtaaatcgactaacccgaaacgcgcgcgaatcacttattacgcgaaaccgcgacgacccaaaccgattccgaacgacgacgcgactactacgactcccgaaactaaataaacgccgtctcacttcctactcgaaattcaaaatacgaaaccaaataccgcgaaccgatactcgcgaaaaaacgcttttcctaaaactcgccgcgataacgcgtatcgaccaacgaaacaccgcgaataaaactcgaacccgaacc

SEQ ID NO: 7967 - DNA, 1427 bp, Artificial Sequence
  chemically treated genomic DNA (Homo sapiens) CpG-island No: 7967
ttatgattcggttggattttttggttcgtttttattttagtttttaacgtgtagagtttatatttttgtcggtcggtttagggacgaaaagtttttaaggatttaggttttttcgcgtttaagtgataatttggggttatttcgcgtatttggggaatttagaagttttagatgatcgaggaagggcggtagaaaaggtttgcgttggttattttcgtttgttaaaggttaggcggattttttaacgatagttttacgtcgagtggtcgcgggcgagtagggggaaaagggttttgatgcggaaggagtttcggggcgttatagttaggtcgtttcgttagcgggcgggtggcgtatgcgcggcgtgggtcgcggagttgtgaatggtgcgttttgtttgtcggagttggaggcgggcgggcgcgcgaggaggaggggtggggtcggcgggggcggggtgggcggtgagaggaagtggcggcggcggcggcggcggcggtcgggggcggtgagcgttggggttgcgcgggcggtaggtaacggttgaggcggcggcggcggcggcggcggcgtgggttgggttcgagcgggcggcggcgttttagatttttcggaacgggagtttacgcgggcgggcgtttgaaataaagggaagcgggcgttcgggcgtcgcgggtgggcggttagtcggttagcgcggagttagttagcgggtgttcgcgtaagtttcgagcgcggtcggtcggcgcggttttagggcgggaagatgtcgcgcgtcgtgttcgattagagaagtaagttcgagaacgaggagttttttaggaagttgagtcgcgagtgtgaggtgaggtaggcgggcgggcggttaggaggtcgtagcgcgtttcgagtgggttcgggcggagaaaagtttgggcggtacggttttcgggagtttcggtcggtgcgttcgcggaggggtaatttcgtcggggcggttatcgttcgtagtttttgtttgtttttatcggcgttgcgttgggagggcgggcgcgcgggcggcgtcgcggatttggtttttgatttcgggtcgttttgttttgtagattaagtatacgggttttagggatcggttttacgaggaacgttaggtacgtttttagaacgtttgtcgcgacggtcgttcggaaatcgtaagtcggttggttcggggcgcgcgcgggttatttgttgcgcggggtcgcggcggtttaggtcggtttcggacggcggcgcggttgttgcggttttcggaattgagtgggcgtcgttttattttttattcgggatttaaaatgcgaaattagatgtcgcgggtcggtattcgcggggagacgttttttttggggttcgtcgcggtggcgcgtgtcggttaacggagtatcgcgagtggagttcgaattcgagtt

SEQ ID NO: 7968 - DNA, 1427 bp, Artificial Sequence
  chemically treated genomic DNA (Homo sapiens) CpG-island No: 7968
aactcgaattcgaactccactcgcgatactccgttaaccgacacgcgccaccgcgacgaaccccaaaaaaaacgtctccccgcgaataccgacccgcgacatctaatttcgcattttaaatcccgaataaaaaataaaacgacgcccactcaattccgaaaaccgcaacaaccgcgccgccgtccgaaaccgacctaaaccgccgcgaccccgcgcaacaaataacccgcgcgcgccccgaaccaaccgacttacgatttccgaacgaccgtcgcgacaaacgttctaaaaacgtacctaacgttcctcgtaaaaccgatccctaaaacccgtatacttaatctacaaaacaaaacgacccgaaatcaaaaaccaaatccgcgacgccgcccgcgcgcccgccctcccaacgcaacgccgataaaaacaaacaaaaactacgaacgataaccgccccgacgaaattacccctccgcgaacgcaccgaccgaaactcccgaaaaccgtaccgcccaaacttttctccgcccgaacccactcgaaacgcgctacgacctcctaaccgcccgcccgcctacctcacctcacactcgcgactcaacttcctaaaaaactcctcgttctcgaacttacttctctaatcgaacacgacgcgcgacatcttcccgccctaaaaccgcgccgaccgaccgcgctcgaaacttacgcgaacacccgctaactaactccgcgctaaccgactaaccgcccacccgcgacgcccgaacgcccgcttccctttatttcaaacgcccgcccgcgtaaactcccgttccgaaaaatctaaaacgccgccgcccgctcgaacccaacccacgccgccgccgccgccgccgccgcctcaaccgttacctaccgcccgcgcaaccccaacgctcaccgcccccgaccgccgccgccgccgccgccgccacttcctctcaccgcccaccccgcccccgccgaccccacccctcctcctcgcgcgcccgcccgcctccaactccgacaaacaaaacgcaccattcacaactccgcgacccacgccgcgcatacgccacccgcccgctaacgaaacgacctaactataacgccccgaaactccttccgcatcaaaacccttttccccctactcgcccgcgaccactcgacgtaaaactatcgttaaaaaatccgcctaacctttaacaaacgaaaataaccaacgcaaaccttttctaccgcccttcctcgatcatctaaaacttctaaattccccaaatacgcgaaataaccccaaattatcacttaaacgcgaaaaaacctaaatccttaaaaacttttcgtccctaaaccgaccgacaaaaatataaactctacacgttaaaaactaaaataaaaacgaaccaaaaaatccaaccgaatcataa

SEQ ID NO: 7969 - DNA, 697 bp, Artificial Sequence
  chemically treated genomic DNA (Homo sapiens) CpG-island No: 7969
gtatacgtacgcgtatagacgttgtttggattttgttttgggtttcgtttttttattgcggattttggattgaaacgattttttcgcggtcgtcgtcgttatttggtgttcgtaggtgtttgtaggagttttggggttagttggtttcgatgtacgttagtacgcgggaacggtataagtggttgcgttttagcgaggattgtttgtatttgaacgtgtacgcgtcggcgcgcgcgttcggggatttttagttgttagtgagtgttaggtttttcgcgttcgcggttttatcgtcgtttatcgtttcgtttagatttcggtttttttcgtttaggtgatggtttggttttcgggaggcgtttttatcgtgggcgttgttttttcgtacgagggttttgatttggtcgttcgcgagaaagtggtgttggtgtttttgtagtataggttcggtattttcggttttttgaggtggcggggtcggtattttttgggatcgtagttgtggttagagcggcggggattgggtgggaagggaggggcggggtttggggcggggatggggggggtggggtcgcgaggcgggggcggtgtttggcgttcggtggaaggggcgggcgttttatattatttggatggggcgagttaattttaaagaacggggtgtggtcgtaggattaggttttagaggggttaagtt

SEQ ID NO: 7970 - DNA, 697 bp, Artificial Sequence
  chemically treated genomic DNA (Homo sapiens) CpG-island No: 7970
aacttaacccctctaaaacctaatcctacgaccacaccccgttctttaaaattaactcgccccatccaaataatataaaacgcccgccccttccaccgaacgccaaacaccgcccccgcctcgcgaccccaccccccccatccccgccccaaaccccgcccctcccttcccacccaatccccgccgctctaaccacaactacgatcccaaaaaataccgaccccgccacctcaaaaaaccgaaaataccgaacctatactacaaaaacaccaacaccactttctcgcgaacgaccaaatcaaaaccctcgtacgaaaaaacaacgcccacgataaaaacgcctcccgaaaaccaaaccatcacctaaacgaaaaaaaccgaaatctaaacgaaacgataaacgacgataaaaccgcgaacgcgaaaaacctaacactcactaacaactaaaaatccccgaacgcgcgcgccgacgcgtacacgttcaaatacaaacaatcctcgctaaaacgcaaccacttataccgttcccgcgtactaacgtacatcgaaaccaactaaccccaaaactcctacaaacacctacgaacaccaaataacgacgacgaccgcgaaaaaatcgtttcaatccaaaatccgcaataaaaaaacgaaacccaaaacaaaatccaaacaacgtctatacgcgtacgtatac

SEQ ID NO: 7971 - DNA, 697 bp, Artificial Sequence
  chemically treated genomic DNA (Homo sapiens) CpG-island No: 7971
agtttggtttttttaagatttagttttgcgattatatttcgttttttggagttagttcgttttatttagatggtatggagcgttcgttttttttatcgagcgttaggtatcgttttcgtttcgcggttttattttttttattttcgttttaggtttcgtttttttttttttatttagttttcgtcgttttggttatagttgcggttttaaagggtatcggtttcgttattttaggaagtcgaagatgtcgagtttgtgttgtagaaatattagtattattttttcgcgggcggttaagttagagttttcgtacgaagaagtagcgtttacgatgaaggcgtttttcgggaattagattattatttggacgaagaaggtcgggatttgagcggggcggtgggcggcggtgggatcgcgggcgcgggagatttggtatttattggtagttggggattttcgggcgcgcgcgtcggcgcgtatacgtttaggtatagatagttttcgttgaagcgtagttatttgtatcgttttcgcgtgttgacgtatatcgaggttagttggttttaggatttttgtaggtatttgcgggtattaggtagcggcggcggtcgcggggagatcgttttaatttagggttcgtagtgagaagacggaatttaaagtaaaatttaggtagcgtttgtgcgcgtgcgtgtgt

SEQ ID NO: 7972 - DNA, 697 bp, Artificial Sequence
  chemically treated genomic DNA (Homo sapiens) CpG-island No: 7972
acacacgcacgcgcacaaacgctacctaaattttactttaaattccgtcttctcactacgaaccctaaattaaaacgatctccccgcgaccgccgccgctacctaatacccgcaaatacctacaaaaatcctaaaaccaactaacctcgatatacgtcaacacgcgaaaacgatacaaataactacgcttcaacgaaaactatctatacctaaacgtatacgcgccgacgcgcgcgcccgaaaatccccaactaccaataaataccaaatctcccgcgcccgcgatcccaccgccgcccaccgccccgctcaaatcccgaccttcttcgtccaaataataatctaattcccgaaaaacgccttcatcgtaaacgctacttcttcgtacgaaaactctaacttaaccgcccgcgaaaaaataatactaatatttctacaacacaaactcgacatcttcgacttcctaaaataacgaaaccgataccctttaaaaccgcaactataaccaaaacgacgaaaactaaataaaaaaaaaaaaacgaaacctaaaacgaaaataaaaaaaataaaaccgcgaaacgaaaacgatacctaacgctcgataaaaaaaacgaacgctccataccatctaaataaaacgaactaactccaaaaaacgaaatataatcgcaaaactaaatcttaaaaaaaccaaact

SEQ ID NO: 7973 - DNA, 854 bp, Artificial Sequence
  chemically treated genomic DNA (Homo sapiens) CpG-island No: 7973
atgaaggtcggatgacgagtagttcgatttaaagtttgaggaaagcgggtagcgagtcgtagacgtttagtatgtaggcgtagtcgtcgttcgatttggagatggtggtgtttagtttcgcgtagtagagcgcgtttacgatggagaagacgtcgtacgcgggttatattattagcgttagtttcggcgagtttgtttttttaagtacgttcgtgggcgttacgaagatgttcgagtcgatgatggcgtttacgatgatggttacgtcgttgagtagcgtgatgtttcgttgtagggttacgttttcgttttcgtttgtcggcgtcgcgtcgttcgcgcgtttggaggttagtattttttttcgcgttttttgttttttttcggttatcggggtcgttagcgttcgtcgtttcgggttcgtattcgttatgttttgtttatcggtcgggtttgggatattcgagagtcgtagtcgagcgaggattgtgcgcgtcgttcgtcgttcgtagttgcgttaagaatttcgttcgcgtcgtattttaggtttcggttcgttggtttcgtttatcgttcgcggttttttttcgtatcgtggttcggtcgcggttattagtttcgttttttcgatttagttcggagtacgtgcgtttttcggtttagtatggtaggcgatttttaggttcgcgtggttttcgaaggttttcgtttttatgcgttatggagatttcggtttcgcgatttattttttcggcgttcgcgttattttatttcgttttttcgggtgcgtttgggcggggtttggtagttagggcgagtttttttatttattggttcgtagtttttcgttaagtttg

SEQ ID NO: 7974 - DNA, 854 bp, Artificial Sequence
  chemically treated genomic DNA (Homo sapiens) CpG-island No: 7974
caaacttaacgaaaaactacgaaccaataaataaaaaaactcgccctaactaccaaaccccgcccaaacgcacccgaaaaaacgaaataaaataacgcgaacgccgaaaaaataaatcgcgaaaccgaaatctccataacgcataaaaacgaaaaccttcgaaaaccacgcgaacctaaaaatcgcctaccatactaaaccgaaaaacgcacgtactccgaactaaatcgaaaaaacgaaactaataaccgcgaccgaaccacgatacgaaaaaaaaccgcgaacgataaacgaaaccaacgaaccgaaacctaaaatacgacgcgaacgaaattcttaacgcaactacgaacgacgaacgacgcgcacaatcctcgctcgactacgactctcgaatatcccaaacccgaccgataaacaaaacataacgaatacgaacccgaaacgacgaacgctaacgaccccgataaccgaaaaaaaacaaaaaacgcgaaaaaaaatactaacctccaaacgcgcgaacgacgcgacgccgacaaacgaaaacgaaaacgtaaccctacaacgaaacatcacgctactcaacgacgtaaccatcatcgtaaacgccatcatcgactcgaacatcttcgtaacgcccacgaacgtacttaaaaaaacaaactcgccgaaactaacgctaataatataacccgcgtacgacgtcttctccatcgtaaacgcgctctactacgcgaaactaaacaccaccatctccaaatcgaacgacgactacgcctacatactaaacgtctacgactcgctacccgctttcctcaaactttaaatcgaactactcgtcatccgaccttcat

SEQ ID NO: 7975 - DNA, 854 bp, Artificial Sequence
  chemically treated genomic DNA (Homo sapiens) CpG-island No: 7975
taggtttgacgagaggttgcgggttagtgggtgaaggggttcgttttgattgttaggtttcgtttaggcgtattcgggaggacggggtgggatgacgcgggcgtcgggggggtaggtcgcgaggtcggggtttttatggcgtatgaggacgggggttttcgaggattacgcgggtttgggaatcgtttgttatgttaggtcggaggacgtacgtgtttcgagttgggtcgagggggcggggttgatagtcgcggtcgggttacggtgcggggaggagtcgcggacggtgggcggggttaacgggtcggggtttaaaatgcggcgcgggcggggtttttgacgtagttgcgggcggcgagcggcgcgtataattttcgttcggttgcggttttcgggtgttttaggttcggtcggtaagtagagtatggcgggtgcgggttcgaagcggcgggcgttagcggtttcggtggtcgaggagaagtaagaggcgcgggagaagatgttggtttttaagcgcgcggacggcgcggcgtcggtaggcgagggcgagggcgtgattttgtagcggaatattacgttatttaacggcgtggttattatcgtgggcgttattatcggttcgggtattttcgtgacgtttacgggcgtgtttaaggaggtaggttcgtcggggttggcgttggtgatgtggttcgcgtgcggcgttttttttatcgtgggcgcgttttgttacgcggagttgggtattattatttttaaatcgggcggcgattacgtttatatgttggacgtttacggttcgttgttcgttttttttaagttttggatcgagttgttcgttattcggtttttat

SEQ ID NO: 7976 - DNA, 854 bp, Artificial Sequence
  chemically treated genomic DNA (Homo sapiens) CpG-island No: 7976
ataaaaaccgaataacgaacaactcgatccaaaacttaaaaaaaacgaacaacgaaccgtaaacgtccaacatataaacgtaatcgccgcccgatttaaaaataataatacccaactccgcgtaacaaaacgcgcccacgataaaaaaaacgccgcacgcgaaccacatcaccaacgccaaccccgacgaacctacctccttaaacacgcccgtaaacgtcacgaaaatacccgaaccgataataacgcccacgataataaccacgccgttaaataacgtaatattccgctacaaaatcacgccctcgccctcgcctaccgacgccgcgccgtccgcgcgcttaaaaaccaacatcttctcccgcgcctcttacttctcctcgaccaccgaaaccgctaacgcccgccgcttcgaacccgcacccgccatactctacttaccgaccgaacctaaaacacccgaaaaccgcaaccgaacgaaaattatacgcgccgctcgccgcccgcaactacgtcaaaaaccccgcccgcgccgcattttaaaccccgacccgttaaccccgcccaccgtccgcgactcctccccgcaccgtaacccgaccgcgactatcaaccccgccccctcgacccaactcgaaacacgtacgtcctccgacctaacataacaaacgattcccaaacccgcgtaatcctcgaaaacccccgtcctcatacgccataaaaaccccgacctcgcgacctacccccccgacgcccgcgtcatcccaccccgtcctcccgaatacgcctaaacgaaacctaacaatcaaaacgaaccccttcacccactaacccgcaacctctcgtcaaaccta

SEQ ID NO: 7977 - DNA, 648 bp, Artificial Sequence
  chemically treated genomic DNA (Homo sapiens) CpG-island No: 7977
  unsure (597)
tcgtatcgtcgtgtttttcggtttaagttttaatattcgggcgaattggcgtgttttattagttcggtagtatgaattattattcgttagttattttattggagacgacggaagatcgttgtcgaagcggcgttttatcgtttttagtatgacgttttgtattgttttattgttgaagtcgtcggtagtgatcgtttagtgtagtgttttacgattatagtagtttagcgcgaacgtgatacgtagttttttttcgttattatagtagaattcgaattcgttagagtattatcgttgattgtttttttttacggttattttgtttgtatgtgttcgtttcgatggcggtatagtaggttttcgtttaagtaatagcgtattttggcgtatgattcggtaaatacgtttggtattgatcgtaggtatattattaagttttgtttgtttgcgaagtagcgtttatattcgacgataattatacgttggtagtttttcgataatatggtgtatacggagaagtatattcgtattattagtgtgacgattgcggcggttatttatttagttatcggttcgtttgagaatgacgtgtatatnttttttgaagagattattagttaagttgtgtgtgttgcgtttttttgatag

SEQ ID NO: 7978 - DNA, 648 bp, Artificial Sequence
  chemically treated genomic DNA (Homo sapiens) CpG-island No: 7978
  unsure (52)
ctatcaaaaaaacgcaacacacacaacttaactaataatctcttcaaaaaanatatacacgtcattctcaaacgaaccgataactaaataaataaccgccgcaatcgtcacactaataatacgaatatacttctccgtatacaccatattatcgaaaaactaccaacgtataattatcgtcgaatataaacgctacttcgcaaacaaacaaaacttaataatatacctacgatcaataccaaacgtatttaccgaatcatacgccaaaatacgctattacttaaacgaaaacctactataccgccatcgaaacgaacacatacaaacaaaataaccgtaaaaaaaaacaatcaacgataatactctaacgaattcgaattctactataataacgaaaaaaaactacgtatcacgttcgcgctaaactactataatcgtaaaacactacactaaacgatcactaccgacgacttcaacaataaaacaatacaaaacgtcatactaaaaacgataaaacgccgcttcgacaacgatcttccgtcgtctccaataaaataactaacgaataataattcatactaccgaactaataaaacacgccaattcgcccgaatattaaaacttaaaccgaaaaacacgacgatacga

SEQ ID NO: 7979 - DNA, 648 bp, Artificial Sequence
  chemically treated genomic DNA (Homo sapiens) CpG-island No: 7979
  unsure (52)
ttgttagaaagacgtagtatatatagtttgattggtggtttttttagagaanatatgtacgttatttttagacgaatcgatgattggatggatggtcgtcgtagtcgttatattgatgatacggatgtgttttttcgtatatattatgttatcggagagttgttaacgtatggttatcgtcgggtatgggcgttgtttcgtagataggtagaatttgatggtatgtttgcgattaatgttaaacgtgtttatcggattatgcgttagaatgcgttgttgtttgagcgaaaatttgttgtatcgttatcgaaacgggtatatataggtagagtggtcgtgaaagaaagtaattagcgatggtgttttgacgggttcgagttttgttgtgataacggagagagattgcgtgttacgttcgcgttggattgttgtgatcgtgaggtattgtattgggcggttattatcggcggttttaatagtgaaatagtataggacgttatgttgggagcggtggaacgtcgtttcggtaacgatttttcgtcgtttttagtggagtggttgacggataatggtttatgttatcgggttaatgaaatacgttagttcgttcggatgttgggatttgaatcgaagaatacggcggtgcgg

SEQ ID NO: 7980 - DNA, 648 bp, Artificial Sequence
  chemically treated genomic DNA (Homo sapiens) CpG-island No: 7980
  unsure (597)
ccgcaccgccgtattcttcgattcaaatcccaacatccgaacgaactaacgtatttcattaacccgataacataaaccattatccgtcaaccactccactaaaaacgacgaaaaatcgttaccgaaacgacgttccaccgctcccaacataacgtcctatactatttcactattaaaaccgccgataataaccgcccaatacaatacctcacgatcacaacaatccaacgcgaacgtaacacgcaatctctctccgttatcacaacaaaactcgaacccgtcaaaacaccatcgctaattactttctttcacgaccactctacctatatatacccgtttcgataacgatacaacaaattttcgctcaaacaacaacgcattctaacgcataatccgataaacacgtttaacattaatcgcaaacataccatcaaattctacctatctacgaaacaacgcccatacccgacgataaccatacgttaacaactctccgataacataatatatacgaaaaaacacatccgtatcatcaatataacgactacgacgaccatccatccaatcatcgattcgtctaaaaataacgtacatatnttctctaaaaaaaccaccaatcaaactatatatactacgtctttctaacaa

SEQ ID NO: 7981 - DNA, 596 bp, Artificial Sequence
  chemically treated genomic DNA (Homo sapiens) CpG-island No: 7981
aagcgtcgtattttttcgtattttttttcgggattttttttttttgttttgtttcgtttcggtatcggtaacgttcgtttgtgattggatgtcggtcggtcgtgaggcggtggaaggggttgcggtggttatggtgataggaggcggggcgtcgcgttttttcggtagttatcgaggttcggatttgcggcgtcggcggcgcgcgtagagggttaggcgggcgtagaggtcggatcgacgcgtggcggtagagggtatttaaggtcggatttggcgcgtaggcgttgattcgatttggtagtgagttggtcgcggttttggttgagaggttttaatttcgtcgggcggtcgcgttttgtatgcgagttgggtcgcgggcggggttggagtttattcggggcgattgcgatggacgttttagaaggagagagttttgcgttgtttttgtgagtagtttttttagggcgtaggcgatttggggtcggaggtagcgggcgttcgtttcggggtttgattttataaaataggtgtttttaggggtcgggtcgggtcgggtcgggtagggtgggggtcgttaaggcgtcgttttagtttta

SEQ ID NO: 7982 - DNA, 596 bp, Artificial Sequence
  chemically treated genomic DNA (Homo sapiens) CpG-island No: 7982
taaaactaaaacgacgccttaacgacccccaccctacccgacccgacccgacccgacccctaaaaacacctattttataaaatcaaaccccgaaacgaacgcccgctacctccgaccccaaatcgcctacgccctaaaaaaactactcacaaaaacaacgcaaaactctctccttctaaaacgtccatcgcaatcgccccgaataaactccaaccccgcccgcgacccaactcgcatacaaaacgcgaccgcccgacgaaattaaaacctctcaaccaaaaccgcgaccaactcactaccaaatcgaatcaacgcctacgcgccaaatccgaccttaaataccctctaccgccacgcgtcgatccgacctctacgcccgcctaaccctctacgcgcgccgccgacgccgcaaatccgaacctcgataactaccgaaaaaacgcgacgccccgcctcctatcaccataaccaccgcaaccccttccaccgcctcacgaccgaccgacatccaatcacaaacgaacgttaccgataccgaaacgaaacaaaacaaaaaaaaaaaatcccgaaaaaaaatacgaaaaaatacgacgctt

SEQ ID NO: 7983 - DNA, 596 bp, Artificial Sequence
  chemically treated genomic DNA (Homo sapiens) CpG-island No: 7983
tggagttgggacggcgttttggcggtttttattttgttcggttcggttcggttcggtttttaaggatatttgttttatagggttaggtttcggggcgaacgttcgttgttttcggttttaagtcgtttgcgttttggaggagttatttataaagatagcgtaaagttttttttttttaaggcgtttatcgtagtcgtttcgagtaggttttaatttcgttcgcggtttaattcgtatgtagggcgcggtcgttcggcggggttaaggttttttagttaaggtcgcggttagtttattgttaggtcgggttagcgtttgcgcgttaggttcggttttggatattttttgtcgttacgcgtcggttcggtttttacgttcgtttggttttttgcgcgcgtcgtcgacgtcgtaggttcgggtttcggtgattgtcggaggggcgcggcgtttcgttttttgttattatggttatcgtaattttttttatcgttttacggtcggtcggtatttaattataggcgagcgttatcgatgtcggggcggggtaagatagggagaggaagtttcggaagggagtgcggagggatgcggcgttt

SEQ ID NO: 7984 - DNA, 596 bp, Artificial Sequence
  chemically treated genomic DNA (Homo sapiens) CpG-island No: 7984
aaacgccgcatccctccgcactcccttccgaaacttcctctccctatcttaccccgccccgacatcgataacgctcgcctataattaaataccgaccgaccgtaaaacgataaaaaaaattacgataaccataataacaaaaaacgaaacgccgcgcccctccgacaatcaccgaaacccgaacctacgacgtcgacgacgcgcgcaaaaaaccaaacgaacgtaaaaaccgaaccgacgcgtaacgacaaaaaatatccaaaaccgaacctaacgcgcaaacgctaacccgacctaacaataaactaaccgcgaccttaactaaaaaaccttaaccccgccgaacgaccgcgccctacatacgaattaaaccgcgaacgaaattaaaacctactcgaaacgactacgataaacgccttaaaaaaaaaaaactttacgctatctttataaataactcctccaaaacgcaaacgacttaaaaccgaaaacaacgaacgttcgccccgaaacctaaccctataaaacaaatatccttaaaaaccgaaccgaaccgaaccgaacaaaataaaaaccgccaaaacgccgtcccaactcca

SEQ ID NO: 7985 - DNA, 657 bp, Artificial Sequence
  chemically treated genomic DNA (Homo sapiens) CpG-island No: 7985
gttagtcgacgttagttcgataagtagttttcgttagttaagttagatcgttagttagtttacgttagttcgtcgttcgtttagttaagttagttatacgattaatttattttagtaagttcgtttcgttagttaattcgagtagtcgattacgttagtttatttttttttttcgtagtttaatttaacggttaatttatttacgttagtaaggttattcgtttagttaaatttatttaacgattatattacgtcgatttttcgtttttttatttagatttacgtagacggtaacgttaggttagtaagtacgtttgttttatgtaagcgtacgtagtcgattaacgttagtttcgattttcgttttcgtcgtagttaaggttaggcggtcgacgcgagtcgtcgagaggcgcgatttcggagttaagtttagttagtttattaatgttaagttcgacggggggtacgtcgtattataggtaggattcgtagttagggttacggtagggtatagtttcgtcgatttgaggaaggtcgcgggggaatgtttatttaggggcgggtgtgcgtaatttattcgaagtaggagttaggggaaggaaggtgtcgagatatcgcggtaaggtaagaacggaggattgagtaggagtgagagga

SEQ ID NO: 7986 - DNA, 657 bp, Artificial Sequence
  chemically treated genomic DNA (Homo sapiens) CpG-island No: 7986
tcctctcactcctactcaatcctccgttcttaccttaccgcgatatctcgacaccttccttcccctaactcctacttcgaataaattacgcacacccgcccctaaataaacattcccccgcgaccttcctcaaatcgacgaaactataccctaccgtaaccctaactacgaatcctacctataatacgacgtaccccccgtcgaacttaacattaataaactaactaaacttaactccgaaatcgcgcctctcgacgactcgcgtcgaccgcctaaccttaactacgacgaaaacgaaaatcgaaactaacgttaatcgactacgtacgcttacataaaacaaacgtacttactaacctaacgttaccgtctacgtaaatctaaataaaaaaacgaaaaatcgacgtaatataatcgttaaataaatttaactaaacgaataaccttactaacgtaaataaattaaccgttaaattaaactacgaaaaaaaaaaataaactaacgtaatcgactactcgaattaactaacgaaacgaacttactaaaataaattaatcgtataactaacttaactaaacgaacgacgaactaacgtaaactaactaacgatctaacttaactaacgaaaactacttatcgaactaacgtcgactaac

SEQ ID NO: 7987 - DNA, 657 bp, Artificial Sequence
  chemically treated genomic DNA (Homo sapiens) CpG-island No: 7987
tttttttatttttgtttaatttttcgtttttgttttatcgcgatatttcggtatttttttttttttggtttttgtttcgggtaaattgcgtatattcgtttttgagtagatattttttcgcgattttttttaaatcggcggaattgtgttttgtcgtgattttggttgcggattttgtttataatgcggcgtatttttcgtcgagtttgatattggtggattggttgggtttaatttcgggatcgcgtttttcgacgattcgcgtcgatcgtttggttttaattgcggcgaaagcgggggtcgaagttgacgttggtcgattgcgtgcgtttatatggggtagacgtgtttgttgatttgacgttgtcgtttgcgtgggtttaaatgggggaacggaagatcgacgtgatgtggtcgttgggtgggtttaattgggcgaatggttttgttgacgtgagtgggttggtcgttgggttaaattgcgggaagggggggtgagttgacgtggtcgattgttcgggttaattggcggaacgagtttgttgaggtgagttggtcgtgtggttggtttaattgggcgaacggcgggttgacgtgagttggttggcggtttggtttaattggcggaagttgtttgtcgagttgacgtcggttgat

SEQ ID NO: 7988 - DNA, 657 bp, Artificial Sequence
  chemically treated genomic DNA (Homo sapiens) CpG-island No: 7988
atcaaccgacgtcaactcgacaaacaacttccgccaattaaaccaaaccgccaaccaactcacgtcaacccgccgttcgcccaattaaaccaaccacacgaccaactcacctcaacaaactcgttccgccaattaacccgaacaatcgaccacgtcaactcacccccccttcccgcaatttaacccaacgaccaacccactcacgtcaacaaaaccattcgcccaattaaacccacccaacgaccacatcacgtcgatcttccgttcccccatttaaacccacgcaaacgacaacgtcaaatcaacaaacacgtctaccccatataaacgcacgcaatcgaccaacgtcaacttcgacccccgctttcgccgcaattaaaaccaaacgatcgacgcgaatcgtcgaaaaacgcgatcccgaaattaaacccaaccaatccaccaatatcaaactcgacgaaaaatacgccgcattataaacaaaatccgcaaccaaaatcacgacaaaacacaattccgccgatttaaaaaaaatcgcgaaaaaatatctactcaaaaacgaatatacgcaatttacccgaaacaaaaaccaaaaaaaaaaaaataccgaaatatcgcgataaaacaaaaacgaaaaattaaacaaaaataaaaaaa

SEQ ID NO: 7989 - DNA, 677 bp, Artificial Sequence
  chemically treated genomic DNA (Homo sapiens) CpG-island No: 7989
gtttatcgcgttaaagttggttgaaatttatagcgaagcgggtttgtcggacggcgtatttaacgtgttgtcgggcgtgggcgcggagatcgggtaatatttgatcgagtattcgggtattgttaaagtgttatttatcggcggtgtcgttagcggtaaaaaagtgatggttaattcggcggttttttttttgaaagaagtgattatggaattgggcggtaaattatcgttgatcgttttcgatgatgcggatttcgatttcgtcgtcgatatcgttatgatggtaaatttttttagtttcggttaggtgtgtattaatggtattcgcgttttcgtttcggcgaaatgtaaagtcgtatttgagtagaaaattttggcgcgcgttgagcgtattcgcgcgggcgacgttttcgattcgtaaattaatttcggttcgttggttagtttttcgtatcgcgataacgtgttgcgttatatcgttaaaggtaaagaggaaggcgcgcgcgtattgtgcggcggcgatgtattgaaaggcgatggtttcgataacggcgtatgggttgtatcgatagtgtttatcgattgtagcgacgatatgattatcgtgcgtgaagagattttcgggtagtgatgtttttttgagttaagatcggaagagaagtattcgcgcgttaaga

SEQ ID NO: 7990 - DNA, 677 bp, Artificial Sequence
  chemically treated genomic DNA (Homo sapiens) CpG-island No: 7990
tcttaacgcgcgaatacttctcttccgatcttaactcaaaaaaacatcactacccgaaaatctcttcacgcacgataatcatatcgtcgctacaatcgataaacactatcgatacaacccatacgccgttatcgaaaccatcgcctttcaatacatcgccgccgcacaatacgcgcgcgccttcctctttacctttaacgatataacgcaacacgttatcgcgatacgaaaaactaaccaacgaaccgaaattaatttacgaatcgaaaacgtcgcccgcgcgaatacgctcaacgcgcgccaaaattttctactcaaatacgactttacatttcgccgaaacgaaaacgcgaataccattaatacacacctaaccgaaactaaaaaaatttaccatcataacgatatcgacgacgaaatcgaaatccgcatcatcgaaaacgatcaacgataatttaccgcccaattccataatcacttctttcaaaaaaaaaaccgccgaattaaccatcacttttttaccgctaacgacaccgccgataaataacactttaacaatacccgaatactcgatcaaatattacccgatctccgcgcccacgcccgacaacacgttaaatacgccgtccgacaaacccgcttcgctataaatttcaaccaactttaacgcgataaac

SEQ ID NO: 7991 - DNA, 677 bp, Artificial Sequence
  chemically treated genomic DNA (Homo sapiens) CpG-island No: 7991
ttttagcgcgcgaatatttttttttcgattttagtttagaaggatattattgttcgaagatttttttacgtacgatggttatatcgtcgttgtaatcggtgaatattgtcggtgtaatttatgcgtcgttatcgaagttatcgttttttagtatatcgtcgtcgtatagtacgcgcgcgtttttttttttgtttttggcgatatagcgtagtacgttatcgcgatgcgggaagttgattagcgggtcgaagttagtttgcggatcgaaaacgtcgttcgcgcgaatgcgtttaacgcgcgttagaattttttgtttaaatgcggttttgtatttcgtcggaacgaagacgcgggtgttattggtatatatttgatcggagttgaagaagtttgttattatggcgatatcggcggcgagatcgagattcgtattatcgaaaacgattagcggtgatttatcgtttagttttatggttattttttttagggaagaggtcgtcgagttagttattatttttttgtcgttggcgatatcgtcggtaaatgatattttggtaatgttcggatgttcggttagatattgttcggttttcgcgtttacgttcggtaatacgttaaatacgtcgttcggtaggttcgtttcgttgtaaattttagttagttttaacgcggtaagt

SEQ ID NO: 7992 - DNA, 677 bp, Artificial Sequence
  chemically treated genomic DNA (Homo sapiens) CpG-island No: 7992
acttaccgcgttaaaactaactaaaatttacaacgaaacgaacctaccgaacgacgtatttaacgtattaccgaacgtaaacgcgaaaaccgaacaatatctaaccgaacatccgaacattaccaaaatatcatttaccgacgatatcgccaacgacaaaaaaataataactaactcgacgacctcttccctaaaaaaaataaccataaaactaaacgataaatcaccgctaatcgttttcgataatacgaatctcgatctcgccgccgatatcgccataataacaaacttcttcaactccgatcaaatatataccaataacacccgcgtcttcgttccgacgaaatacaaaaccgcatttaaacaaaaaattctaacgcgcgttaaacgcattcgcgcgaacgacgttttcgatccgcaaactaacttcgacccgctaatcaacttcccgcatcgcgataacgtactacgctatatcgccaaaaacaaaaaaaaaaacgcgcgcgtactatacgacgacgatatactaaaaaacgataacttcgataacgacgcataaattacaccgacaatattcaccgattacaacgacgatataaccatcgtacgtaaaaaaatcttcgaacaataatatccttctaaactaaaatcgaaaaaaaaatattcgcgcgctaaaa

SEQ ID NO: 7993 - DNA, 865 bp, Artificial Sequence
  chemically treated genomic DNA (Homo sapiens) CpG-island No: 7993
tttgtttttcggtgaggacggttatagtcgtagcgagttattgtggttggtgcgcggcggcgtggcgaaattggatgaaggttatcggttggtcgtattttggtaggcgttgtcggaagaatttcgtttaagttcgtatcgttatttggcgataaatagttcgtaggggtcgtggtggttgttcggttggtgtgagcgggtgtcggaagcggatgaggtgttgtttgcgtcgttgtcgtcgtatcgggtattgatcgggttggtggatcgtttcgggcgtatatagacgttttatcgcgaagtcgtcggtgaatttagcggcgaaattatcggcgtgacggatggtgtttggcgttattttcggttggtattgattacgtaggcgtagcgggtagaagaagttcggtagtaggttattttcggcgggacggaatcgttcgttttttttgatattttgtcgggttatatcgaatatggtcgggataacggtattcgtttgtttgtcgtgtggttgacgtacgattcggaatattcggagaatttatttgtcgcgtcgttggtgcgttatggttggacgttacgcgtcgaattggcggtggtgtatgattgtagtggttaataggtgagtatattttatttacgatgataaatatcggggtcggatggtggcgtatcgttataaggatcggtcggaaattcgttatcgttacgataattgtcggtcggttgatacgaatagttaaattcggtaggcgtaagtaatacgtattacgatgaagaaaggtagtattattattatcgatagtcgtaggtttttcgtgaaatgtagtatataatagagttagaagttagggttgaagcggat

SEQ ID NO: 7994 - DNA, 865 bp, Artificial Sequence
  chemically treated genomic DNA (Homo sapiens) CpG-island No: 7994
atccgcttcaaccctaacttctaactctattatatactacatttcacgaaaaacctacgactatcgataataataatactacctttcttcatcgtaatacgtattacttacgcctaccgaatttaactattcgtatcaaccgaccgacaattatcgtaacgataacgaatttccgaccgatccttataacgatacgccaccatccgaccccgatatttatcatcgtaaataaaatatactcacctattaaccactacaatcatacaccaccgccaattcgacgcgtaacgtccaaccataacgcaccaacgacgcgacaaataaattctccgaatattccgaatcgtacgtcaaccacacgacaaacaaacgaataccgttatcccgaccatattcgatataacccgacaaaatatcaaaaaaaacgaacgattccgtcccgccgaaaataacctactaccgaacttcttctacccgctacgcctacgtaatcaataccaaccgaaaataacgccaaacaccatccgtcacgccgataatttcgccgctaaattcaccgacgacttcgcgataaaacgtctatatacgcccgaaacgatccaccaacccgatcaatacccgatacgacgacaacgacgcaaacaacacctcatccgcttccgacacccgctcacaccaaccgaacaaccaccacgacccctacgaactatttatcgccaaataacgatacgaacttaaacgaaattcttccgacaacgcctaccaaaatacgaccaaccgataaccttcatccaatttcgccacgccgccgcgcaccaaccacaataactcgctacgactataaccgtcctcaccgaaaaacaaa

SEQ ID NO: 7995 - DNA, 865 bp, Artificial Sequence
  chemically treated genomic DNA (Homo sapiens) CpG-island No: 7995
attcgttttagttttggtttttggttttgttgtgtgttgtattttacgggggatttacggttgtcggtgatggtgatgttgtttttttttatcgtgatacgtgttgtttacgtttgtcgggtttagttgttcgtgttagtcgatcgatagttgtcgtaacggtaacggattttcggtcggtttttgtgacggtgcgttattattcggtttcggtatttattatcgtaagtaaagtgtgtttatttgttggttattatagttatatattatcgttagttcgacgcgtggcgtttagttatagcgtattagcggcgcggtaggtaaatttttcgggtatttcgggtcgtgcgttagttatacggtagatagacggatgtcgttgtttcggttatattcggtgtaattcggtagggtattaggaaaagcggacggtttcgtttcgtcggaaatggtttgttgtcgggttttttttgttcgttgcgtttgcgtggttagtattagtcggaagtgacgttaggtattattcgttacgtcggtgatttcgtcgttgaatttatcggcggtttcgcggtggaacgtttgtgtgcgttcgaagcggtttattagttcggttagtattcggtacggcggtagcggcgtaggtagtattttattcgttttcggtattcgtttatattaatcgagtagttattacggtttttgcggattgtttgtcgttagataacgatgcggatttaagcggagttttttcggtagcgtttgttagagtgcggttagtcggtgatttttatttagtttcgttacgtcgtcgcgtattagttatagtgattcgttgcggttgtaatcgtttttatcgggaaatagg

SEQ ID NO: 7996 - DNA, 865 bp, Artificial Sequence
  chemically treated genomic DNA (Homo sapiens) CpG-island No: 7996
cctatttcccgataaaaacgattacaaccgcaacgaatcactataactaatacgcgacgacgtaacgaaactaaataaaaatcaccgactaaccgcactctaacaaacgctaccgaaaaaactccgcttaaatccgcatcgttatctaacgacaaacaatccgcaaaaaccgtaataactactcgattaatataaacgaataccgaaaacgaataaaatactacctacgccgctaccgccgtaccgaatactaaccgaactaataaaccgcttcgaacgcacacaaacgttccaccgcgaaaccgccgataaattcaacgacgaaatcaccgacgtaacgaataatacctaacgtcacttccgactaatactaaccacgcaaacgcaacgaacaaaaaaaacccgacaacaaaccatttccgacgaaacgaaaccgtccgcttttcctaataccctaccgaattacaccgaatataaccgaaacaacgacatccgtctatctaccgtataactaacgcacgacccgaaatacccgaaaaatttacctaccgcgccgctaatacgctataactaaacgccacgcgtcgaactaacgataatatataactataataaccaacaaataaacacactttacttacgataataaataccgaaaccgaataataacgcaccgtcacaaaaaccgaccgaaaatccgttaccgttacgacaactatcgatcgactaacacgaacaactaaacccgacaaacgtaaacaacacgtatcacgataaaaaaaaacaacatcaccatcaccgacaaccgtaaatcccccgtaaaatacaacacacaacaaaaccaaaaaccaaaactaaaacgaat

SEQ ID NO: 7997 - DNA, 868 bp, Artificial Sequence
  chemically treated genomic DNA (Homo sapiens) CpG-island No: 7997
ttttcgcgggtgtcgtttattatttcggtggattttagtttttaggtttcgttttacggggattggggggaggggggaggcgtcgcgcgtattaggcgttgatagtatatcgatttttttttcggtgcgtataggttaatatttatatatatttttatatattcgtatatattttcgtggaaattgaggtaggtaggcggcggattaggtttcgtcgtttgacggttagcggttgggatggaattcggattgttagacgtttttcgttttataggtattttttagtcgttgaggttcggttcggtttttatcgtcggagttttataaagaaagtttttcggttcgagttttttacgtatttatcggcgtcgacgttcgcggcgattggggtttttattttttttagttttttgcgggggtcggttttggggtcggtttgggcgtcggtagcggcgattgttttatatttatcgggttcgggtcgcgttcgtttcgagttaacggtttcgttagttaggcgcgcgcgttagtttcgggcgttatgttttcgtcgtgttgttcgtcgtcgaggcgatttttattgttttttagtcgcgcgcgttttcgcgggtttatatacgaatcgcgtacgcgcgcgttcgtcgcgttttttttttttttcgcgcgtttttgtttcgtttttttggagttggtcgttgtttttagtgtttcgtttattttcgtcgggttcgttcgatttcgcgggtgagcgcgtggttttcggttgggtatcgtcgtttgtttttttgtagattatttcggattcgattttttcgttatttttttatattgtttttttcgttttttttattacgtggggtttaggaag

SEQ ID NO: 7998 - DNA, 868 bp, Artificial Sequence
  chemically treated genomic DNA (Homo sapiens) CpG-island No: 7998
cttcctaaaccccacgtaataaaaaaaacgaaaaaaacaatataaaaaaataacgaaaaaatcgaatccgaaataatctacaaaaaaacaaacgacgatacccaaccgaaaaccacgcgctcacccgcgaaatcgaacgaacccgacgaaaataaacgaaacactaaaaacaacgaccaactccaaaaaaacgaaacaaaaacgcgcgaaaaaaaaaaaaaacgcgacgaacgcgcgcgtacgcgattcgtatataaacccgcgaaaacgcgcgcgactaaaaaacaataaaaatcgcctcgacgacgaacaacacgacgaaaacataacgcccgaaactaacgcgcgcgcctaactaacgaaaccgttaactcgaaacgaacgcgacccgaacccgataaatataaaacaatcgccgctaccgacgcccaaaccgaccccaaaaccgacccccgcaaaaaactaaaaaaaataaaaaccccaatcgccgcgaacgtcgacgccgataaatacgtaaaaaactcgaaccgaaaaactttctttataaaactccgacgataaaaaccgaaccgaacctcaacgactaaaaaatacctataaaacgaaaaacgtctaacaatccgaattccatcccaaccgctaaccgtcaaacgacgaaacctaatccgccgcctacctacctcaatttccacgaaaatatatacgaatatataaaaatatatataaatattaacctatacgcaccgaaaaaaaaatcgatatactatcaacgcctaatacgcgcgacgcctcccccctccccccaatccccgtaaaacgaaacctaaaaactaaaatccaccgaaataataaacgacacccgcgaaaa

SEQ ID NO: 7999 - DNA, 868 bp, Artificial Sequence
  chemically treated genomic DNA (Homo sapiens) CpG-island No: 7999
ttttttaggttttacgtggtgggggaagcgaaaggggtagtgtggggaagtggcggaggggtcgggttcggggtggtttgtagagaggtaggcggcggtgtttagtcgggaattacgcgtttattcgcggagtcggacgggttcggcgggggtgggcgagatattgggaatagcggttagttttagaggggcgaggtaggggcgcgcggggagggaggggggcgcggcgaacgcgcgcgtgcgcggttcgtgtgtgggttcgcgggggcgcgcgcggttggggggtagtgagggtcgtttcggcggcgagtagtacggcgggaatatggcgttcggaattggcgcgcgcgtttagttggcgggatcgttagttcgaggcggacgcggttcggattcggtggatgtggagtagtcgtcgttgtcggcgtttaagtcgattttagggtcgattttcgtaaggagttgaaggaggtgggagttttagtcgtcgcgggcgtcggcgtcggtgagtgcgtgaggggttcgggtcgggagattttttttgtgaaatttcggcggtgggagtcgggtcgggttttagcggttgaggagtgtttgtgaggcggaaggcgtttggtagttcgggttttattttagtcgttagtcgttaggcggcgggatttggttcgtcgtttgtttgttttagtttttacgggagtgtgtgcgggtgtgtgagggtgtgtatgggtgttggtttgtgcgtatcggagggggggtcggtatattgttagcgtttaatgcgcgcggcgttttttttttttttttagttttcgtggggcggaatttggggattggagtttatcggagtagtaggcggtattcgcgggga

SEQ ID NO: 8000 - DNA, 868 bp, Artificial Sequence
  chemically treated genomic DNA (Homo sapiens) CpG-island No: 8000
tccccgcgaataccgcctactactccgataaactccaatccccaaattccgccccacgaaaactaaaaaaaaaaaaaaaacgccgcgcgcattaaacgctaacaatataccgaccccccctccgatacgcacaaaccaacacccatacacaccctcacacacccgcacacactcccgtaaaaactaaaacaaacaaacgacgaaccaaatcccgccgcctaacgactaacgactaaaataaaacccgaactaccaaacgccttccgcctcacaaacactcctcaaccgctaaaacccgacccgactcccaccgccgaaatttcacaaaaaaaatctcccgacccgaacccctcacgcactcaccgacgccgacgcccgcgacgactaaaactcccacctccttcaactccttacgaaaatcgaccctaaaatcgacttaaacgccgacaacgacgactactccacatccaccgaatccgaaccgcgtccgcctcgaactaacgatcccgccaactaaacgcgcgcgccaattccgaacgccatattcccgccgtactactcgccgccgaaacgaccctcactaccccccaaccgcgcgcgcccccgcgaacccacacacgaaccgcgcacgcgcgcgttcgccgcgcccccctccctccccgcgcgcccctacctcgcccctctaaaactaaccgctattcccaatatctcgcccacccccgccgaacccgtccgactccgcgaataaacgcgtaattcccgactaaacaccgccgcctacctctctacaaaccaccccgaacccgacccctccgccacttccccacactacccctttcgcttcccccaccacgtaaaacctaaaaaa

SEQ ID NO: 8001 - DNA, 722 bp, Artificial Sequence
  chemically treated genomic DNA (Homo sapiens) CpG-island No: 8001
ggtataggttagcgtacggtgttttcgattagtttcggtttggtttcgttttttaatttcgatgtagtgaaaacggtcggacgtgtttttgtttatgaagcggtagatgatggtttgaatatgatttgggtatcgatggtcgatgtttcgcgcgattcgcgttggggacgtgttttcgaaggttttggcgaagatacgtattttattttaataatgggtaaaattatggtggaagcgatgtagggtaaaagttcggtagatcgttattcggtgatgattagcgttaaatattttgtcgtatacggcgcggtagaaggcggtaaagagtataatatcgtcgatatgagttcgtagcgtttgtttaatgattatatgtcgtcgtataaagcggggttggacgtaggtagcggcgcggtgatggtggcgttgaattcgttgaacggtacgttagttattttcgatttttggttgttgaaagatgttttgcgcgattagtggggttttaaaggtattatcgttttcgattacggtgtaattaaagagttgattaaatatggtacggcggtagattcggaagatgcggtgcgcgtggcgttgaaattcggaattaatatgagtatgagcgacgagtattattcgaagtatttgtttgggtggattaaattcggtaaagtgacgatggtagagttggacgatgttgttcggtatgtattgaacgttaa

SEQ ID NO: 8002 - DNA, 722 bp, Artificial Sequence
  chemically treated genomic DNA (Homo sapiens) CpG-island No: 8002
ttaacgttcaatacataccgaacaacatcgtccaactctaccatcgtcactttaccgaatttaatccacccaaacaaatacttcgaataatactcgtcgctcatactcatattaattccgaatttcaacgccacgcgcaccgcatcttccgaatctaccgccgtaccatatttaatcaactctttaattacaccgtaatcgaaaacgataatacctttaaaaccccactaatcgcgcaaaacatctttcaacaaccaaaaatcgaaaataactaacgtaccgttcaacgaattcaacgccaccatcaccgcgccgctacctacgtccaaccccgctttatacgacgacatataatcattaaacaaacgctacgaactcatatcgacgatattatactctttaccgccttctaccgcgccgtatacgacaaaatatttaacgctaatcatcaccgaataacgatctaccgaacttttaccctacatcgcttccaccataattttacccattattaaaataaaatacgtatcttcgccaaaaccttcgaaaacacgtccccaacgcgaatcgcgcgaaacatcgaccatcgatacccaaatcatattcaaaccatcatctaccgcttcataaacaaaaacacgtccgaccgttttcactacatcgaaattaaaaaacgaaaccaaaccgaaactaatcgaaaacaccgtacgctaacctatacc

SEQ ID NO: 8003 - DNA, 722 bp, Artificial Sequence
  chemically treated genomic DNA (Homo sapiens) CpG-island No: 8003
ttaacgtttagtatatgtcgggtagtatcgtttagttttgttatcgttattttgtcggatttaatttatttaggtagatatttcgagtagtattcgtcgtttatgtttatgttgatttcggattttagcgttacgcgtatcgtatttttcgggtttgtcgtcgtgttatgtttaattagttttttgattgtatcgtgatcggaaacggtgatgtttttaaagttttattggtcgcgtagaatattttttagtagttaggaatcggaggtggttggcgtgtcgtttagcgagtttagcgttattattatcgcgtcgttgtttgcgtttagtttcgttttgtacggcggtatataattattaaataggcgttgcggatttatatcgacggtgttgtattttttatcgttttttatcgcgtcgtatgcggtaaagtgtttgacgttggttattatcgagtagcgatttgtcgggtttttattttgtatcgtttttattatggttttatttattgttgaggtgagatacgtattttcgttaaaattttcggaagtacgtttttagcgcggatcgcgcgagatatcgattatcggtgtttaggttatatttaggttattatttgtcgttttataagtagagatacgttcgatcgtttttattgtatcgaggttaaaagacgaggttagatcgaggttaatcgggaatatcgtgcgttgatttgtgtt

SEQ ID NO: 8004 - DNA, 722 bp, Artificial Sequence
  chemically treated genomic DNA (Homo sapiens) CpG-island No: 8004
aacacaaatcaacgcacgatattcccgattaacctcgatctaacctcgtcttttaacctcgatacaataaaaacgatcgaacgtatctctacttataaaacgacaaataataacctaaatataacctaaacaccgataatcgatatctcgcgcgatccgcgctaaaaacgtacttccgaaaattttaacgaaaatacgtatctcacctcaacaataaataaaaccataataaaaacgatacaaaataaaaacccgacaaatcgctactcgataataaccaacgtcaaacactttaccgcatacgacgcgataaaaaacgataaaaaatacaacaccgtcgatataaatccgcaacgcctatttaataattatataccgccgtacaaaacgaaactaaacgcaaacaacgacgcgataataataacgctaaactcgctaaacgacacgccaaccacctccgattcctaactactaaaaaatattctacgcgaccaataaaactttaaaaacatcaccgtttccgatcacgatacaatcaaaaaactaattaaacataacacgacgacaaacccgaaaaatacgatacgcgtaacgctaaaatccgaaatcaacataaacataaacgacgaatactactcgaaatatctacctaaataaattaaatccgacaaaataacgataacaaaactaaacgatactacccgacatatactaaacgttaa

SEQ ID NO: 8005 - DNA, 763 bp, Artificial Sequence
  chemically treated genomic DNA (Homo sapiens) CpG-island No: 8005
gaacggttgcggcgtttatattttagtcgcgttgcggtattaatgttagacgcgtatcgttggtattatcgcgtttgtcgttattacggaaggtagaagtagatgtttaggttatcgatattagtttattaatagatagattagaattcgtaatcgcgaattttagatcgataatgttttgttcggtcgggttgtagatcggttgcggtagcggattttgttagattagattttttttcggtattttcggttcgatgtagcgagatttcggttttatatttttgtgcgttagtttgaattaggtacgggtaaaggtttcgttgaacgtttgcggatcgttgaggaaacgacgagagattttttcgaatttaggattaaaacgtagcgttaggtcggttattagtattgtcggtttacgttttttcgacggattaaacggattcgggataattttcggtgcgtttatcgtttcgaattggattgcgttagtcgggttgcgggtttgtatttatttatatttgaataggttttcgaagaaatagttgttttattgggttcgcgtttgggtttcgattattttagaatcgagttatggatttggttaacgtcgttgcgtaattgtcggttaatttaatttgttttttattcgtgtatttcggatcgggttttttgatgtgatcgacgcggtttttacggtttgtttcgcgatagtttcggtttcgtttttatttttaggtggtattgttcgtcgacgggtgcgcga

SEQ ID NO: 8006 - DNA, 763 bp, Artificial Sequence
  chemically treated genomic DNA (Homo sapiens) CpG-island No: 8006
tcgcgcacccgtcgacgaacaataccacctaaaaataaaaacgaaaccgaaactatcgcgaaacaaaccgtaaaaaccgcgtcgatcacatcaaaaaacccgatccgaaatacacgaataaaaaacaaattaaattaaccgacaattacgcaacgacgttaaccaaatccataactcgattctaaaataatcgaaacccaaacgcgaacccaataaaacaactatttcttcgaaaacctattcaaatataaataaatacaaacccgcaacccgactaacgcaatccaattcgaaacgataaacgcaccgaaaattatcccgaatccgtttaatccgtcgaaaaaacgtaaaccgacaatactaataaccgacctaacgctacgttttaatcctaaattcgaaaaaatctctcgtcgtttcctcaacgatccgcaaacgttcaacgaaacctttacccgtacctaattcaaactaacgcacaaaaatataaaaccgaaatctcgctacatcgaaccgaaaataccgaaaaaaaatctaatctaacaaaatccgctaccgcaaccgatctacaacccgaccgaacaaaacattatcgatctaaaattcgcgattacgaattctaatctatctattaataaactaatatcgataacctaaacatctacttctaccttccgtaataacgacaaacgcgataataccaacgatacgcgtctaacattaataccgcaacgcgactaaaatataaacgccgcaaccgttc

SEQ ID NO: 8007 - DNA, 763 bp, Artificial Sequence
  chemically treated genomic DNA (Homo sapiens) CpG-island No: 8007
tcgcgtattcgtcggcgagtaatgttatttggaaatggaagcggaatcggggttatcgcggggtaaatcgtgaaaatcgcgtcggttatattaagaggttcgattcgaagtgtacggatgaagaataggttaagttggtcgataattacgtagcggcgttggttaaatttataattcggttttggaatagtcgggatttagacgcggatttagtggagtaattattttttcgagaatttgtttaagtatgagtgggtatagattcgtagttcggttggcgtaatttagttcgaagcggtagacgtatcggaaattatttcggattcgtttgattcgtcgaagaaacgtaaatcgataatgttggtgatcgatttgacgttgcgttttgattttgagttcgagaagatttttcgtcgtttttttaacgattcgtaggcgtttaacgaagtttttgttcgtgtttggtttaaattgacgtatagggatatggggtcgaaatttcgttatatcgggtcggaagtgtcgaaagaagatttgatttggtaagattcgttgtcgtagtcgatttataattcgatcgagtaggatattatcgatttgaaattcgcgattgcggattttggtttgtttgttagtgagttggtatcggtggtttgggtatttgtttttatttttcgtggtggcgataaacgcggtggtgttaacggtgcgcgtttggtattaatgtcgtagcgcgattgggatgtgaacgtcgtagtcgttt

SEQ ID NO: 8008 - DNA, 763 bp, Artificial Sequence
  chemically treated genomic DNA (Homo sapiens) CpG-island No: 8008
aaacgactacgacgttcacatcccaatcgcgctacgacattaataccaaacgcgcaccgttaacaccaccgcgtttatcgccaccacgaaaaataaaaacaaatacccaaaccaccgataccaactcactaacaaacaaaccaaaatccgcaatcgcgaatttcaaatcgataatatcctactcgatcgaattataaatcgactacgacaacgaatcttaccaaatcaaatcttctttcgacacttccgacccgatataacgaaatttcgaccccatatccctatacgtcaatttaaaccaaacacgaacaaaaacttcgttaaacgcctacgaatcgttaaaaaaacgacgaaaaatcttctcgaactcaaaatcaaaacgcaacgtcaaatcgatcaccaacattatcgatttacgtttcttcgacgaatcaaacgaatccgaaataatttccgatacgtctaccgcttcgaactaaattacgccaaccgaactacgaatctatacccactcatacttaaacaaattctcgaaaaaataattactccactaaatccgcgtctaaatcccgactattccaaaaccgaattataaatttaaccaacgccgctacgtaattatcgaccaacttaacctattcttcatccgtacacttcgaatcgaacctcttaatataaccgacgcgattttcacgatttaccccgcgataaccccgattccgcttccatttccaaataacattactcgccgacgaatacgcga

SEQ ID NO: 8009 - DNA, 540 bp, Artificial Sequence
  chemically treated genomic DNA (Homo sapiens) CpG-island No: 8009
cgttcgcgtgggtttttattttgtattacgaatattttcgatattgattttttttttatgttcgtattcgtttttttttttgcgtggcgttttcggttcggtttttattttttttttttgtggttttttcgggcggcgtttttgcgttttttcggattatcgtttcgttgcggttttcgtttttttttttttttttcgttttgcgcgtcgtttcgggttttttttttatttcggttttttttttttttttggcgtttattttttcgttcgcgtggttcgttatgtttttcgcgggtttttattttcgtttttatttttgcggtttttttttttcgttgtagtgtattcgtgtttttttttatttgtttttttcgtttttgtggtttatacggtgtttttttcgggtgtgatttattatataatttttatttttcgtcgtttcgttttttttcggttgggttgcgtcgtcgcggtcgtcgcgtttcggtcgtttttcgtcgtcggttttttttttttttttttttgttgttcgtttttcgt

SEQ ID NO: 8010 - DNA, 540 bp, Artificial Sequence
  chemically treated genomic DNA (Homo sapiens) CpG-island No: 8010
acgaaaaacgaacaacaaaaaaaaaaaaaaaaaaaaccgacgacgaaaaacgaccgaaacgcgacgaccgcgacgacgcaacccaaccgaaaaaaaacgaaacgacgaaaaataaaaattatataataaatcacacccgaaaaaaacaccgtataaaccacaaaaacgaaaaaaacaaataaaaaaaaacacgaatacactacaacgaaaaaaaaaaaccgcaaaaataaaaacgaaaataaaaacccgcgaaaaacataacgaaccacgcgaacgaaaaaataaacgccaaaaaaaaaaaaaaaaccgaaataaaaaaaaaacccgaaacgacgcgcaaaacgaaaaaaaaaaaaaaaaacgaaaaccgcaacgaaacgataatccgaaaaaacgcaaaaacgccgcccgaaaaaaccacaaaaaaaaaaaataaaaaccgaaccgaaaacgccacgcaaaaaaaaaaacgaatacgaacataaaaaaaaaatcaatatcgaaaatattcgtaatacaaaataaaaacccacgcgaacg

SEQ ID NO: 8011 - DNA, 540 bp, Artificial Sequence
  chemically treated genomic DNA (Homo sapiens) CpG-island No: 8011
gcgggaggcggatagtagggagggggggggggagggtcggcggcggggggcggtcggggcgcggcggtcgcggcgacgtagtttagtcgggggggagcggggcggcgggagataaaaattatataataaattatattcggggggggtatcgtgtagattataggagcggagggagtagataagggaggatacgggtgtattatagcggggagagaaagtcgtaggggtgaaggcgaaggtgggggttcgcggggggtataacgagttacgcggacgagaaggtagacgttaggggggagagagaggtcgaggtggagggagaattcgaggcggcgcgtaaggcgagagagaggggggggggcgggggtcgtagcggggcggtggttcgaagggacgtaagggcgtcgttcgggggggttatagggaaggaggatagaggtcgagtcggggacgttacgtagaggagggggcgggtgcgaatatggagagggagttagtatcgggaatattcgtggtgtagggtaggaatttacgcgggcg

SEQ ID NO: 8012 - DNA, 540 bp, Artificial Sequence
  chemically treated genomic DNA (Homo sapiens) CpG-island No: 8012
cgcccgcgtaaattcctaccctacaccacgaatattcccgatactaactccctctccatattcgcacccgccccctcctctacgtaacgtccccgactcgacctctatcctccttccctataacccccccgaacgacgcccttacgtcccttcgaaccaccgccccgctacgacccccgcccccccccctctctctcgccttacgcgccgcctcgaattctccctccacctcgacctctctctcccccctaacgtctaccttctcgtccgcgtaactcgttataccccccgcgaacccccaccttcgccttcacccctacgactttctctccccgctataatacacccgtatcctcccttatctactccctccgctcctataatctacacgataccccccccgaatataatttattatataatttttatctcccgccgccccgctcccccccgactaaactacgtcgccgcgaccgccgcgccccgaccgccccccgccgccgaccctccccccccccctccctactatccgcctcccgc

SEQ ID NO: 8013 - DNA, 666 bp, Artificial Sequence
  chemically treated genomic DNA (Homo sapiens) CpG-island No: 8013
tggtttgacgtaatacggtcgcggtttttaattagtgtaaagcgaatatgcgtattattatagtcgttaaagttaattttcggcgagatataaattttcgtttcgttaaggagttttttggtaaagttttagcgattttatggtcgtatatggtttcgggattttcgtttagatatatatggaagttttcggtattttaattatttagttcgttttatgtagttttgttaattaatatattacggcggcgtttgtattgttcggtaatgtcgcgtacgtattgttgatcgttttttagcgtcgtaatcgtcgttatttgtaacggcgtaaaggtgtcgtaatcgtgatagtttttaatacgagttagggcgttgattagcgttttgttgttaattataaagtcgatacgttagttcgttatgttgtagtttttcgatagcgtaaagaattcgattgttatatcgcgtgtattcggtatttgtataattgacggcgttttttagttatcgtagacgatatcggtataggttaggttatggattattagtatatcgtagcgtttcgttagcgttattattttttcgaagaattttagttttacgtattgcgcggttgggtttgacgggaagtcgaggattattattttcggtttcggataatttttat

SEQ ID NO: 8014 - DNA, 666 bp, Artificial Sequence
  chemically treated genomic DNA (Homo sapiens) CpG-island No: 8014
ataaaaattatccgaaaccgaaaataataatcctcgacttcccgtcaaacccaaccgcgcaatacgtaaaactaaaattcttcgaaaaaataataacgctaacgaaacgctacgatatactaataatccataacctaacctataccgatatcgtctacgataactaaaaaacgccgtcaattatacaaataccgaatacacgcgatataacaatcgaattctttacgctatcgaaaaactacaacataacgaactaacgtatcgactttataattaacaacaaaacgctaatcaacgccctaactcgtattaaaaactatcacgattacgacacctttacgccgttacaaataacgacgattacgacgctaaaaaacgatcaacaatacgtacgcgacattaccgaacaatacaaacgccgccgtaatatattaattaacaaaactacataaaacgaactaaataattaaaataccgaaaacttccatatatatctaaacgaaaatcccgaaaccatatacgaccataaaatcgctaaaactttaccaaaaaactccttaacgaaacgaaaatttatatctcgccgaaaattaactttaacgactataataatacgcatattcgctttacactaattaaaaaccgcgaccgtattacgtcaaacca

SEQ ID NO: 8015 - DNA, 666 bp, Artificial Sequence
  chemically treated genomic DNA (Homo sapiens) CpG-island No: 8015
gtgaaagttattcgaaatcgaagatgatgattttcggtttttcgttaaatttaatcgcgtaatgcgtggaattggagtttttcgaaaaagtagtggcgttggcgaaacgttacgatgtgttggtggtttatgatttggtttatgtcgatatcgtttacgatggttggaaagcgtcgttaattatgtaggtatcgggtgtacgcgatgtggtagtcgagttttttacgttgtcgaaaagttataatatggcgggttggcgtatcggttttatggttggtaataaaacgttggttagcgttttggttcgtattaaaagttattacgattacggtatttttacgtcgttgtaggtggcggcgattgcggcgttggagggcgattaatagtgcgtgcgcgatattgtcgaatagtataaacgtcgtcgtgatgtattggttaatagggttgtatgaagcgggttggatggttgaaatgtcgaaggtttttatgtatgtttgggcgaaaatttcggaattatatgcggttatgggatcgttggaattttgttaagaagttttttaacgaagcgaaggtttgtgtttcgtcggggattggttttggcgattatggtgatacgtatgttcgttttgtattgattgaaaatcgcgatcgtattgcgttaggtta

SEQ ID NO: 8016 - DNA, 666 bp, Artificial Sequence
  chemically treated genomic DNA (Homo sapiens) CpG-island No: 8016
taacctaacgcaatacgatcgcgattttcaatcaatacaaaacgaacatacgtatcaccataatcgccaaaaccaatccccgacgaaacacaaaccttcgcttcgttaaaaaacttcttaacaaaattccaacgatcccataaccgcatataattccgaaattttcgcccaaacatacataaaaaccttcgacatttcaaccatccaacccgcttcatacaaccctattaaccaatacatcacgacgacgtttatactattcgacaatatcgcgcacgcactattaatcgccctccaacgccgcaatcgccgccacctacaacgacgtaaaaataccgtaatcgtaataacttttaatacgaaccaaaacgctaaccaacgttttattaccaaccataaaaccgatacgccaacccgccatattataacttttcgacaacgtaaaaaactcgactaccacatcgcgtacacccgatacctacataattaacgacgctttccaaccatcgtaaacgatatcgacataaaccaaatcataaaccaccaacacatcgtaacgtttcgccaacgccactactttttcgaaaaactccaattccacgcattacgcgattaaatttaacgaaaaaccgaaaatcatcatcttcgatttcgaataactttcac

SEQ ID NO: 8017 - DNA, 926 bp, Artificial Sequence
  chemically treated genomic DNA (Homo sapiens) CpG-island No: 8017
tataggggcgttcgttgattgatatcgttattgacgttttagaagtgattttggtattggtatcggaaattaacggttatgttgtagttaaagcgtggtaggcgttgggcgagattatcgggcgcgaatatatttatttggcgttgtataaagaggacgagaagattcgttttcgcgatatttaggcgtagtcgcgtaaaattatttttagttttatttggttcggtttggaaagcgattacgttttttataacgcgggatatattaacgtttatgagttaatttcgtggcgtacgttgtcgggacgttagtagttttattaggattattcgtggatgcgtgtttttggtgaaagtttggtggtttatcgttcgtttatcgatattcgtagcgttagtgagatgcgttagtatatcgtttaagacgggtttttcgagaaatatgtagtttaattttttgacgtcgtattagaaatggggtatttatttaatttatagtgaaaatttgttaatgttgacgttttttcgcggtggatcgattgtttggattagcgaaatagatgttcgagaattgattattgtcgataacgattgggtggaagtatttaacgttaacggcgcgttgattgttcgcgcggtggttagttaacgtgtatcgtcgggtatgattatgatgtattacgtttaggaacgtattatgaatatttttggttcggaagtaattggtatgcgcggcggtatttataattcggttattcgcgtttgttcgaaattaacgtatatgattggcggttacgcgtagttggtttggggttttaattattacggtatcgtcggatcgaatcgcgatgagtttattatgattcgtaagatgaagaacgttaattggttggatgatgaaggtcgcgattaggtataggaggcgaa

SEQ ID NO: 8018 - DNA, 926 bp, Artificial Sequence
  chemically treated genomic DNA (Homo sapiens) CpG-island No: 8018
ttcgcctcctatacctaatcgcgaccttcatcatccaaccaattaacgttcttcatcttacgaatcataataaactcatcgcgattcgatccgacgataccgtaataattaaaaccccaaaccaactacgcgtaaccgccaatcatatacgttaatttcgaacaaacgcgaataaccgaattataaataccgccgcgcataccaattacttccgaaccaaaaatattcataatacgttcctaaacgtaatacatcataatcatacccgacgatacacgttaactaaccaccgcgcgaacaatcaacgcgccgttaacgttaaatacttccacccaatcgttatcgacaataatcaattctcgaacatctatttcgctaatccaaacaatcgatccaccgcgaaaaaacgtcaacattaacaaattttcactataaattaaataaataccccatttctaatacgacgtcaaaaaattaaactacatatttctcgaaaaacccgtcttaaacgatatactaacgcatctcactaacgctacgaatatcgataaacgaacgataaaccaccaaactttcaccaaaaacacgcatccacgaataatcctaataaaactactaacgtcccgacaacgtacgccacgaaattaactcataaacgttaatatatcccgcgttataaaaaacgtaatcgctttccaaaccgaaccaaataaaactaaaaataattttacgcgactacgcctaaatatcgcgaaaacgaatcttctcgtcctctttatacaacgccaaataaatatattcgcgcccgataatctcgcccaacgcctaccacgctttaactacaacataaccgttaatttccgataccaataccaaaatcacttctaaaacgtcaataacgatatcaatcaacgaacgcccctata

SEQ ID NO: 8019 - DNA, 926 bp, Artificial Sequence
  chemically treated genomic DNA (Homo sapiens) CpG-island No: 8019
ttcgttttttgtatttgatcgcgatttttattatttagttagttaacgttttttattttgcggattatgatgaatttatcgcggttcgattcgacggtgtcgtagtagttaaagttttaggttagttgcgcgtaatcgttaattatatgcgttggtttcgggtaaacgcgggtaatcgagttatgaatgtcgtcgcgtatgttagttattttcgaattaggaatatttataatgcgtttttgggcgtgatatattatggttatgttcggcggtatacgttggttgattatcgcgcgggtagttagcgcgtcgttggcgttgaatatttttatttagtcgttatcgataatggttagttttcgggtatttgtttcgttgatttagataatcggtttatcgcgagagagcgttagtattagtaggtttttattgtaggttgagtgaatgttttatttttggtgcggcgttaggaagttaagttgtatgtttttcgggaagttcgttttggacggtatattggcgtattttattgacgttacgggtgtcgataggcgggcgataagttattaggtttttattaaaagtacgtatttacggatgattttgatagagttgttggcgtttcgatagcgtgcgttacggaattaatttatgaacgttggtgtatttcgcgttataggagacgtgatcgttttttagatcggattaggtggggttggagataattttacgcggttgcgtttgaatatcgcgaaagcgaattttttcgttttttttgtgtagcgttagatgggtatgttcgcgttcggtgatttcgtttagcgtttgttacgttttgattgtaatatgatcgttggttttcggtgttagtgttagaattatttttgaagcgttaatggcggtgttaattagcggacgtttttgtg

SEQ ID NO: 8020 - DNA, 926 bp, Artificial Sequence
  chemically treated genomic DNA (Homo sapiens) CpG-island No: 8020
cacaaaaacgtccgctaattaacaccgccattaacgcttcaaaaataattctaacactaacaccgaaaaccaacgatcatattacaatcaaaacgtaacaaacgctaaacgaaatcaccgaacgcgaacatacccatctaacgctacacaaaaaaaacgaaaaaattcgctttcgcgatattcaaacgcaaccgcgtaaaattatctccaaccccacctaatccgatctaaaaaacgatcacgtctcctataacgcgaaatacaccaacgttcataaattaattccgtaacgcacgctatcgaaacgccaacaactctatcaaaatcatccgtaaatacgtacttttaataaaaacctaataacttatcgcccgcctatcgacacccgtaacgtcaataaaatacgccaatataccgtccaaaacgaacttcccgaaaaacatacaacttaacttcctaacgccgcaccaaaaataaaacattcactcaacctacaataaaaacctactaatactaacgctctctcgcgataaaccgattatctaaatcaacgaaacaaatacccgaaaactaaccattatcgataacgactaaataaaaatattcaacgccaacgacgcgctaactacccgcgcgataatcaaccaacgtataccgccgaacataaccataatatatcacgcccaaaaacgcattataaatattcctaattcgaaaataactaacatacgcgacgacattcataactcgattacccgcgtttacccgaaaccaacgcatataattaacgattacgcgcaactaacctaaaactttaactactacgacaccgtcgaatcgaaccgcgataaattcatcataatccgcaaaataaaaaacgttaactaactaaataataaaaatcgcgatcaaatacaaaaaacgaa

SEQ ID NO: 8021 - DNA, 512 bp, Artificial Sequence
  chemically treated genomic DNA (Homo sapiens) CpG-island No: 8021
aaagtcgttggcggaaattggttggcgggtaatggtgttgttatatggcggagcggattgtgttagtttcgtcgattttttcgtttgtaaggtttgcgtattaatcggttcgttttttattagtatttgttgtatcgtgattttacgcgtatcgtttaataggacgatatcggtttgtttgtcgggtgttagtaagtcgaggtgatttagattaaagtggcgcgtcgtcgattagttggcgacgcgatatgttatatgtagcggtatattgtgttgttcgattaggcggcgaattaaggtatcgatgtgttttttatgggcgattttttacgggttacggttatcggtatagagtatgtattgcgggttgttaaattcgttgattaacggtgttagcgcgttgagattgcgggtagcggatttttcgcggattattaacgatatgtcgagttgtaattttcggcgttttttttttagttgataattttcgtggtagtttttaatattcgtag

SEQ ID NO: 8022 - DNA, 512 bp, Artificial Sequence
  chemically treated genomic DNA (Homo sapiens) CpG-island No: 8022
ctacgaatattaaaaactaccacgaaaattatcaactaaaaaaaaaacgccgaaaattacaactcgacatatcgttaataatccgcgaaaaatccgctacccgcaatctcaacgcgctaacaccgttaatcaacgaatttaacaacccgcaatacatactctataccgataaccgtaacccgtaaaaaatcgcccataaaaaacacatcgataccttaattcgccgcctaatcgaacaacacaatataccgctacatataacatatcgcgtcgccaactaatcgacgacgcgccactttaatctaaatcacctcgacttactaacacccgacaaacaaaccgatatcgtcctattaaacgatacgcgtaaaatcacgatacaacaaatactaataaaaaacgaaccgattaatacgcaaaccttacaaacgaaaaaatcgacgaaactaacacaatccgctccgccatataacaacaccattacccgccaaccaatttccgccaacgacttt

SEQ ID NO: 8023 - DNA, 512 bp, Artificial Sequence
  chemically treated genomic DNA (Homo sapiens) CpG-island No: 8023
ttgcgggtattgaaaattgttacgaaagttattagttggaagaaggacgtcggaaattataattcggtatgtcgttgatgattcgcgaagggttcgttgttcgtaattttaacgcgttggtatcgttgattaacgaatttaatagttcgtaatgtatgttttgtatcgatgatcgtaattcgtgggagatcgtttatgaaggatatatcgatgttttaattcgtcgtttgatcgaataatataatgtgtcgttgtatgtggtatatcgcgtcgttagttggtcgacggcgcgttattttggtttgaattatttcggtttattggtattcggtaagtaggtcgatatcgttttgttgagcgatgcgcgtaaggttacggtgtagtaggtattggtgaaaggcgagtcgattgatgcgtaaattttataggcggaagagtcggcgagattggtataattcgtttcgttatatggtaatattattgttcgttagttagttttcgttagcgatttt

SEQ ID NO: 8024 - DNA, 512 bp, Artificial Sequence
  chemically treated genomic DNA (Homo sapiens) CpG-island No: 8024
aaaatcgctaacgaaaactaactaacgaacaataatattaccatataacgaaacgaattataccaatctcgccgactcttccgcctataaaatttacgcatcaatcgactcgcctttcaccaatacctactacaccgtaaccttacgcgcatcgctcaacaaaacgatatcgacctacttaccgaataccaataaaccgaaataattcaaaccaaaataacgcgccgtcgaccaactaacgacgcgatataccacatacaacgacacattatattattcgatcaaacgacgaattaaaacatcgatatatccttcataaacgatctcccacgaattacgatcatcgatacaaaacatacattacgaactattaaattcgttaatcaacgataccaacgcgttaaaattacgaacaacgaacccttcgcgaatcatcaacgacataccgaattataatttccgacgtccttcttccaactaataactttcgtaacaattttcaatacccgcaa

SEQ ID NO: 8025 - DNA, 538 bp, Artificial Sequence
  chemically treated genomic DNA (Homo sapiens) CpG-island No: 8025
cgatcgttacgatcgtagatgatcgttattattatcgcgttagggttagtttttgttattcgtagtgtttcggtaaacgcgtcgtcggagttgacgttatagaatattttttttcgtatcggtagttcgcgtatggtgtttttcgtatcgcgttgatgaatatttagtattttatttattagagaagcgttgaaaattttcggtagatatttcgtaggttagcggcgaatgtcgggaatgttgttggtttttttcggttgtagggcgataatggttatcggtttggattgttcgcgtataaagcgtgagacgtcggtgatagtggcggtcgtttttatgttggagataaaatgagtgatgcgttcggcggtttgttggtagattttcggtttagtggtggtgtaatgcgtataagggtaatcgggattattgaattggtcgagtagattttttcggtacgattcggtatttttaggttagattgagcgtatattttatggtttggatattgggggaaagaattaagttcggagtaaaa

SEQ ID NO: 8026 - DNA, 538 bp, Artificial Sequence
  chemically treated genomic DNA (Homo sapiens) CpG-island No: 8026
ttttactccgaacttaattctttcccccaatatccaaaccataaaatatacgctcaatctaacctaaaaataccgaatcgtaccgaaaaaatctactcgaccaattcaataatcccgattacccttatacgcattacaccaccactaaaccgaaaatctaccaacaaaccgccgaacgcatcactcattttatctccaacataaaaacgaccgccactatcaccgacgtctcacgctttatacgcgaacaatccaaaccgataaccattatcgccctacaaccgaaaaaaaccaacaacattcccgacattcgccgctaacctacgaaatatctaccgaaaattttcaacgcttctctaataaataaaatactaaatattcatcaacgcgatacgaaaaacaccatacgcgaactaccgatacgaaaaaaaatattctataacgtcaactccgacgacgcgtttaccgaaacactacgaataacaaaaactaaccctaacgcgataataataacgatcatctacgatcgtaacgatcg

SEQ ID NO: 8027 - DNA, 538 bp, Artificial Sequence
  chemically treated genomic DNA (Homo sapiens) CpG-island No: 8027
ttttgtttcgaatttaatttttttttttaatgtttaggttatggaatgtgcgtttaatttggtttggagatgtcgaatcgtgtcgaagaaatttgttcgattagtttaataatttcgattatttttatgcgtattatattattattgggtcggaaatttgttagtaaatcgtcgggcgtattatttattttgtttttagtatggggacgatcgttattattatcggcgttttacgttttatgcgcgaataatttaaatcggtgattattgtcgttttgtaatcggaagaggttagtagtattttcggtattcgtcgttggtttacggaatatttgtcggggatttttaacgtttttttggtggatgaggtgttggatatttattagcgcgatgcggaaaatattatgcgcgaattgtcggtgcgggaaggaatattttgtggcgttagtttcggcggcgcgtttgtcggagtattgcgggtggtaaaagttaattttgacgcggtggtggtggcgattatttgcgatcgtggcgatcg

SEQ ID NO: 8028 - DNA, 538 bp, Artificial Sequence
  chemically treated genomic DNA (Homo sapiens) CpG-island No: 8028
cgatcgccacgatcgcaaataatcgccaccaccaccgcgtcaaaattaacttttaccacccgcaatactccgacaaacgcgccgccgaaactaacgccacaaaatattccttcccgcaccgacaattcgcgcataatattttccgcatcgcgctaataaatatccaacacctcatccaccaaaaaaacgttaaaaatccccgacaaatattccgtaaaccaacgacgaataccgaaaatactactaacctcttccgattacaaaacgacaataatcaccgatttaaattattcgcgcataaaacgtaaaacgccgataataataacgatcgtccccatactaaaaacaaaataaataatacgcccgacgatttactaacaaatttccgacccaataataatataatacgcataaaaataatcgaaattattaaactaatcgaacaaatttcttcgacacgattcgacatctccaaaccaaattaaacgcacattccataacctaaacattaaaaaaaaaaattaaattcgaaacaaaa

SEQ ID NO: 8029 - DNA, 762 bp, Artificial Sequence
  chemically treated genomic DNA (Homo sapiens) CpG-island No: 8029
acggtacgcggtatagtttcggtttggtttttagcgttagtttgtagcggtaagtgggtttttggcgtagtagttgcgaaattttattgttgggatcgtttagattgttaaacgttagcgttttggtcgggtaagttttaacgtacgcgggtaatttatcggtttgtaaattggttttacggtagaaatcgtatttgttcgtcgttttcgtgatcggatggataaagcgtacgcggtacggataggcggcgatgtagtattgataatcgacgtagagattcggattaatatcgataattttattggtagtatcgcgaaaagacgtatcggtcgggtagacgttaacgtacggcgtatgatcgtagtgttggtaagatttacggaagaagcgatattttatattaggaaattcgttttgcggttcgttacgaataatcgttaggcgcgagacgtttttcggtattttgtttatttttcgataagtatttatataggcggtatagtcgatgtataacgattcgttatgtattatgtcgtaacgtattttattgatatttaacgttttcgttattacgcgttttgcggtgtcgttgacggttgttagtacgtcgacgtcggtgagaaattggcgacgagattaggttatggttgttttttaagtaacggaatagacgtcgggttaaagttcggattggtgcgttgatcgttgtggtaatcgacgtaaattttaattcgttttttgttatttaacgtttgtatcgt

SEQ ID NO: 8030 - DNA, 762 bp, Artificial Sequence
  chemically treated genomic DNA (Homo sapiens) CpG-island No: 8030
acgatacaaacgttaaataacaaaaaacgaattaaaatttacgtcgattaccacaacgatcaacgcaccaatccgaactttaacccgacgtctattccgttacttaaaaaacaaccataacctaatctcgtcgccaatttctcaccgacgtcgacgtactaacaaccgtcaacgacaccgcaaaacgcgtaataacgaaaacgttaaatatcaataaaatacgttacgacataatacataacgaatcgttatacatcgactataccgcctatataaatacttatcgaaaaataaacaaaataccgaaaaacgtctcgcgcctaacgattattcgtaacgaaccgcaaaacgaatttcctaatataaaatatcgcttcttccgtaaatcttaccaacactacgatcatacgccgtacgttaacgtctacccgaccgatacgtcttttcgcgatactaccaataaaattatcgatattaatccgaatctctacgtcgattatcaatactacatcgccgcctatccgtaccgcgtacgctttatccatccgatcacgaaaacgacgaacaaatacgatttctaccgtaaaaccaatttacaaaccgataaattacccgcgtacgttaaaacttacccgaccaaaacgctaacgtttaacaatctaaacgatcccaacaataaaatttcgcaactactacgccaaaaacccacttaccgctacaaactaacgctaaaaaccaaaccgaaactataccgcgtaccgt

SEQ ID NO: 8031 - DNA, 762 bp, Artificial Sequence
  chemically treated genomic DNA (Homo sapiens) CpG-island No: 8031
acgatgtagacgttaagtgataaaggacggattaagatttgcgtcgattgttatagcgattagcgtattaattcgaattttaattcggcgtttgtttcgttgtttaaggagtagttatgatttggtttcgtcgttagttttttatcggcgtcggcgtgttggtagtcgttagcggtatcgtagggcgcgtggtggcgaaaacgttgaatattaatggggtgcgttacggtatggtgtatgacgagtcgttatgtatcggttgtatcgtttgtatggatgtttgtcgggaagtgaataaggtgtcggaaggcgtttcgcgtttgacgattattcgtagcgagtcgtagggcgaattttttgatgtgaaatatcgtttttttcgtaagttttgttagtattgcgattatgcgtcgtgcgttgacgtttgttcgatcggtgcgttttttcgcgatgttgttagtgggattgtcgatgttaattcggatttttgcgtcggttgttagtattgtatcgtcgtttgttcgtatcgcgtgcgttttatttattcggttacgaagacggcggataaatgcgatttttgtcgtaagattaatttgtaggtcggtaagttgttcgcgtgcgttgaagtttgttcgattaaggcgttgacgtttggtaatttggacgattttaatagtgagatttcgtaattgttgcgttagaagtttatttatcgttataagttggcgttgggaattaaatcgaagttgtatcgcgtatcgt

SEQ ID NO: 8032 - DNA, 762 bp, Artificial Sequence
  chemically treated genomic DNA (Homo sapiens) CpG-island No: 8032
acgatacgcgatacaacttcgatttaattcccaacgccaacttataacgataaataaacttctaacgcaacaattacgaaatctcactattaaaatcgtccaaattaccaaacgtcaacgccttaatcgaacaaacttcaacgcacgcgaacaacttaccgacctacaaattaatcttacgacaaaaatcgcatttatccgccgtcttcgtaaccgaataaataaaacgcacgcgatacgaacaaacgacgatacaatactaacaaccgacgcaaaaatccgaattaacatcgacaatcccactaacaacatcgcgaaaaaacgcaccgatcgaacaaacgtcaacgcacgacgcataatcgcaatactaacaaaacttacgaaaaaaacgatatttcacatcaaaaaattcgccctacgactcgctacgaataatcgtcaaacgcgaaacgccttccgacaccttattcacttcccgacaaacatccatacaaacgatacaaccgatacataacgactcgtcatacaccataccgtaacgcaccccattaatattcaacgttttcgccaccacgcgccctacgataccgctaacgactaccaacacgccgacgccgataaaaaactaacgacgaaaccaaatcataactactccttaaacaacgaaacaaacgccgaattaaaattcgaattaatacgctaatcgctataacaatcgacgcaaatcttaatccgtcctttatcacttaacgtctacatcgt

SEQ ID NO: 8033 - DNA, 538 bp, Artificial Sequence
  chemically treated genomic DNA (Homo sapiens) CpG-island No: 8033
tggttgtcgggtagagttttggtgggtttttcgcgttgtatgtcggattgtattggtttgaacgttttggttgtgtattaagttagttaggatcgtattggtggtcgtatcggggcgggtagtaagagggcgtgttatttgaaaagttaaaagttggtgatagttagcgtcgaaggtttgcgtattgtgttggaagcgggttttcgcgagtcgatgattatgcgggttaattaggcgttgtatgcgtaattatattttataaaagaatttattttttggcgttaggttgacggcggatatgatgcgttttgttggcgcggtggtttgatgtaggggttaatcgatttttggtaattatttttttatgataggagtcgatatatggtatttagtaattttttcgatgattcgtagggagcgtgcgatatattgcgtaatgcgtaggggtaatttagtttgtggtcgtaataatgcgttttatcggtaggttgggatatagtgtgttagacgaagttataggcgttttgttagtagtggt

SEQ ID NO: 8034 - DNA, 538 bp, Artificial Sequence
  chemically treated genomic DNA (Homo sapiens) CpG-island No: 8034
accactactaacaaaacgcctataacttcgtctaacacactatatcccaacctaccgataaaacgcattattacgaccacaaactaaattacccctacgcattacgcaatatatcgcacgctccctacgaatcatcgaaaaaattactaaataccatatatcgactcctatcataaaaaaataattaccaaaaatcgattaacccctacatcaaaccaccgcgccaacaaaacgcatcatatccgccgtcaacctaacgccaaaaaataaattcttttataaaatataattacgcatacaacgcctaattaacccgcataatcatcgactcgcgaaaacccgcttccaacacaatacgcaaaccttcgacgctaactatcaccaacttttaacttttcaaataacacgccctcttactacccgccccgatacgaccaccaatacgatcctaactaacttaatacacaaccaaaacgttcaaaccaatacaatccgacatacaacgcgaaaaacccaccaaaactctacccgacaacca

SEQ ID NO: 8035 - DNA, 538 bp, Artificial Sequence
  chemically treated genomic DNA (Homo sapiens) CpG-island No: 8035
gttattgttggtaggacgtttgtgatttcgtttgatatattatgttttagtttgtcggtaagacgtattgttgcggttatagattgaattgtttttgcgtattgcgtaatatgtcgtacgttttttgcggattatcgaagggattattgaatgttatatgtcgatttttgttatggaaaagtggttgttagaggtcgattagtttttgtattaagttatcgcgttaataaagcgtattatgttcgtcgttaatttgacgttagaaaatggatttttttatggggtgtaattgcgtatatagcgtttgattggttcgtatgattatcggttcgcgaagattcgtttttagtataatgcgtagattttcggcgttaattgttattagtttttagttttttaagtaatacgtttttttgttgttcgtttcgatgcggttattagtacgattttgattggtttaatatatagttaaagcgtttaggttagtgtagttcggtatatagcgcggaaagtttattaaaattttgttcggtaatta

SEQ ID NO: 8036 - DNA, 538 bp, Artificial Sequence
  chemically treated genomic DNA (Homo sapiens) CpG-island No: 8036
taattaccgaacaaaattttaataaactttccgcgctatataccgaactacactaacctaaacgctttaactatatattaaaccaatcaaaatcgtactaataaccgcatcgaaacgaacaacaaaaaaacgtattacttaaaaaactaaaaactaataacaattaacgccgaaaatctacgcattatactaaaaacgaatcttcgcgaaccgataatcatacgaaccaatcaaacgctatatacgcaattacaccccataaaaaaatccattttctaacgtcaaattaacgacgaacataatacgctttattaacgcgataacttaatacaaaaactaatcgacctctaacaaccacttttccataacaaaaatcgacatataacattcaataatcccttcgataatccgcaaaaaacgtacgacatattacgcaatacgcaaaaacaattcaatctataaccgcaacaatacgtcttaccgacaaactaaaacataatatatcaaacgaaatcacaaacgtcctaccaacaataac

SEQ ID NO: 8037 - DNA, 963 bp, Artificial Sequence
  chemically treated genomic DNA (Homo sapiens) CpG-island No: 8037
ggacgggttattcgtttgattagtgaaaacggtagttatattatttttcgttacgatgtatttgatcggttgatataggaaatcggttttgacggtcgtatatagcgttattattacgatttgatcggtaaatttattcgtagcgaggatgagggtttggttatttattggtattatgacgaagtagatcgttttacgtatcgtatcgtgaagggtgaaatcgtagagcggtggtagtatgacgaacgtggttggttgatagatattagttatattagcgaagggtatcgggtggcggtgtattataggtatgatgagaaaggtcggttgatcggtgagcgttagacggtgtattattcgtagacggaagtattgttttggtagtatgagattagatatgcgtataacgcgtaggggttggcgaatcgttgtatatcggatagtttgttcgtcgtggaatggttgatttacggtagcggttatttggtaggtatgaaattcggcgatatatcgttggtggagtatattcgcgatcgtttgtatcgggaaacgttgcgtagtttcggtcgttatgaatttattatcgtttatatttttgtcgggtagttatagagttagtatttgaatagtttgttgtttgatcgcgattatatttggaacgataacggcgaatttattcgtattagtagttcgcgttagattcggagttatagttatagtattatcggtaggttgatcggcgtttatattatcgtagcgaatttggatattcgtatttcgtatgttatagattcggtaggtaatcgttgttcgatcggagttgtattcggatagattttagtatgtggtcggataatcgtatcgtcgtgacgcgtattatttttacggtatgacgttacgaggttgatagagaaaacgatttattcggaaagggtttcgacgatatagcgatttcgtttatat

SEQ ID NO: 8038 - DNA, 963 bp, Artificial Sequence
  chemically treated genomic DNA (Homo sapiens) CpG-island No: 8038
atataaacgaaatcgctatatcgtcgaaaccctttccgaataaatcgttttctctatcaacctcgtaacgtcataccgtaaaaataatacgcgtcacgacgatacgattatccgaccacatactaaaatctatccgaatacaactccgatcgaacaacgattacctaccgaatctataacatacgaaatacgaatatccaaattcgctacgataatataaacgccgatcaacctaccgataatactataactataactccgaatctaacgcgaactactaatacgaataaattcgccgttatcgttccaaatataatcgcgatcaaacaacaaactattcaaatactaactctataactacccgacaaaaatataaacgataataaattcataacgaccgaaactacgcaacgtttcccgatacaaacgatcgcgaatatactccaccaacgatatatcgccgaatttcatacctaccaaataaccgctaccgtaaatcaaccattccacgacgaacaaactatccgatatacaacgattcgccaacccctacgcgttatacgcatatctaatctcatactaccaaaacaatacttccgtctacgaataatacaccgtctaacgctcaccgatcaaccgacctttctcatcatacctataatacaccgccacccgatacccttcgctaatataactaatatctatcaaccaaccacgttcgtcatactaccaccgctctacgatttcacccttcacgatacgatacgtaaaacgatctacttcgtcataataccaataaataaccaaaccctcatcctcgctacgaataaatttaccgatcaaatcgtaataataacgctatatacgaccgtcaaaaccgatttcctatatcaaccgatcaaatacatcgtaacgaaaaataatataactaccgttttcactaatcaaacgaataacccgtcc

SEQ ID NO: 8039 - DNA, 963 bp, Artificial Sequence
  chemically treated genomic DNA (Homo sapiens) CpG-island No: 8039
gtatgaacgggatcgttatatcgtcggaatttttttcggatgagtcgttttttttgttagtttcgtgacgttatatcgtaaagatagtgcgcgttacggcgatacggttattcggttatatgttgaggtttgttcgggtgtagtttcggtcgggtagcggttatttgtcgggtttgtggtatacgggatgcggatatttagattcgttgcggtggtgtgaacgtcggttagtttgtcggtggtgttgtagttgtaatttcgggtttggcgcgggttgttgatgcggatgagttcgtcgttgtcgttttaggtgtaatcgcggttagatagtaggttgtttaggtgttggttttgtaattgttcggtaggggtataagcggtggtgagtttataacggtcgaagttgcgtagcgtttttcggtgtaggcggtcgcgggtgtattttattagcggtgtgtcgtcgagttttatgtttgttaggtaatcgttgtcgtaggttagttattttacggcgggtaggttgttcggtatatagcggttcgttagtttttgcgcgttgtacgtatgtttggttttatgttgttagagtagtgttttcgtttgcgggtgatgtatcgtttgacgtttatcggttagtcggttttttttattatatttgtaatgtatcgttattcggtgtttttcgttgatatggttgatgtttgttagttagttacgttcgttatattgttatcgttttgcggttttattttttacggtgcggtgcgtgaggcggtttgtttcgttatagtgttagtgggtgattagatttttattttcgttgcggataagtttgtcggttaggtcgtggtgataacgttgtgtgcggtcgttaaagtcggttttttgtattagtcggttaagtatatcgtaacggaaggtggtgtggttgtcgtttttattggttaggcggatgattcgttt

SEQ ID NO: 8040 - DNA, 963 bp, Artificial Sequence
  chemically treated genomic DNA (Homo sapiens) CpG-island No: 8040
aaacgaatcatccgcctaaccaataaaaacgacaaccacaccaccttccgttacgatatacttaaccgactaatacaaaaaaccgactttaacgaccgcacacaacgttatcaccacgacctaaccgacaaacttatccgcaacgaaaataaaaatctaatcacccactaacactataacgaaacaaaccgcctcacgcaccgcaccgtaaaaaataaaaccgcaaaacgataacaatataacgaacgtaactaactaacaaacatcaaccatatcaacgaaaaacaccgaataacgatacattacaaatataataaaaaaaaccgactaaccgataaacgtcaaacgatacatcacccgcaaacgaaaacactactctaacaacataaaaccaaacatacgtacaacgcgcaaaaactaacgaaccgctatataccgaacaacctacccgccgtaaaataactaacctacgacaacgattacctaacaaacataaaactcgacgacacaccgctaataaaatacacccgcgaccgcctacaccgaaaaacgctacgcaacttcgaccgttataaactcaccaccgcttatacccctaccgaacaattacaaaaccaacacctaaacaacctactatctaaccgcgattacacctaaaacgacaacgacgaactcatccgcatcaacaacccgcgccaaacccgaaattacaactacaacaccaccgacaaactaaccgacgttcacaccaccgcaacgaatctaaatatccgcatcccgtataccacaaacccgacaaataaccgctacccgaccgaaactacacccgaacaaacctcaacatataaccgaataaccgtatcgccgtaacgcgcactatctttacgatataacgtcacgaaactaacaaaaaaaacgactcatccgaaaaaaattccgacgatataacgatcccgttcatac

SEQ ID NO: 8041 - DNA, 1044 bp, Artificial Sequence
  chemically treated genomic DNA (Homo sapiens) CpG-island No: 8041
  unsure (650)
taaaacggcgtgcgtttgttcgtttttaatcgcgtttcgtttatcgttaacgcgggcgaatgcgtggtgttttacggttatttcggtagcggtaaattaattttgttacgttcgttgtacgttaattatttgttcgacgaaggttaaatttagattaaatacggtgacgagtgggtagatttggttatcgcgttagcgcgtaaagtggtggaaattcgtaaaattatcgtcggttgggtgagttagtttttgcgcgttatttcgcgtattttagtattggaagtggtgatgtagtcgttgttcgatatcggcgtttcgcgtgaagtttgcgtcgttaaagtcgcgcgtttttttattcgtttgaacgtgtcggaacgtttgtggtatttggtattatcgatatttttcggtggcgaatagtagcgcgttaatatcgttcgcggttttatcgtcgattattttattttgttgtttgacgaatttatcgtttcgttggacgttaaaaatagcgtcgcggtggtggaattgattcgcgaagttaaaattcgtggcgtagttatcgtaggtattttttatgacgaagttgtacgtaatgacgtcgtcgatcgtttgtatttaatgggagtttttttatgattattaataacgtntagttggtgttggaaaacgaggtggtaagcggttcgttggaggtgtagaacggcgaaattcgcgtttttgtcgaaagttagagtcgtttgtcggaggcgatggacggcgaaggcggttggttgttgtcggggttgattgagttgtatatcgataatttggataaattttttatttcgcgttcgaaagttgattggtttgtttattcggcgatgagtagttacgacgcgttgatggtggcgagcggtattattatcgtattggatgtcgtggtaattggcgacgtgcgcgacggcggcgatcggttggagaatttggagaagatgattaacgttatcgaagagacgtagaaacgcggcgttaatcgcgtcgagtatcgtttgtatttgcgttgcg

SEQ ID NO: 8042 - DNA, 1044 bp, Artificial Sequence
  chemically treated genomic DNA (Homo sapiens) CpG-island No: 8042
  unsure (395)
cgcaacgcaaatacaaacgatactcgacgcgattaacgccgcgtttctacgtctcttcgataacgttaatcatcttctccaaattctccaaccgatcgccgccgtcgcgcacgtcgccaattaccacgacatccaatacgataataataccgctcgccaccatcaacgcgtcgtaactactcatcgccgaataaacaaaccaatcaactttcgaacgcgaaataaaaaatttatccaaattatcgatatacaactcaatcaaccccgacaacaaccaaccgccttcgccgtccatcgcctccgacaaacgactctaactttcgacaaaaacgcgaatttcgccgttctacacctccaacgaaccgcttaccacctcgttttccaacaccaactanacgttattaataatcataaaaaaactcccattaaatacaaacgatcgacgacgtcattacgtacaacttcgtcataaaaaatacctacgataactacgccacgaattttaacttcgcgaatcaattccaccaccgcgacgctatttttaacgtccaacgaaacgataaattcgtcaaacaacaaaataaaataatcgacgataaaaccgcgaacgatattaacgcgctactattcgccaccgaaaaatatcgataataccaaataccacaaacgttccgacacgttcaaacgaataaaaaaacgcgcgactttaacgacgcaaacttcacgcgaaacgccgatatcgaacaacgactacatcaccacttccaatactaaaatacgcgaaataacgcgcaaaaactaactcacccaaccgacgataattttacgaatttccaccactttacgcgctaacgcgataaccaaatctacccactcgtcaccgtatttaatctaaatttaaccttcgtcgaacaaataattaacgtacaacgaacgtaacaaaattaatttaccgctaccgaaataaccgtaaaacaccacgcattcgcccgcgttaacgataaacgaaacgcgattaaaaacgaacaaacgcacgccgtttta

SEQ ID NO: 8043 - DNA, 1044 bp, Artificial Sequence
  chemically treated genomic DNA (Homo sapiens) CpG-island No: 8043
  unsure (395)
cgtagcgtagatgtagacggtgttcggcgcggttgacgtcgcgtttttgcgttttttcgatggcgttgattattttttttagattttttagtcgatcgtcgtcgtcgcgtacgtcgttaattgttacggtatttagtacggtggtgatgtcgttcgttattattagcgcgtcgtggttgtttatcgtcgagtgggtaggttagttaattttcgggcgcggggtgaagaatttatttagattatcggtatgtagtttaattagtttcggtagtagttagtcgttttcgtcgtttatcgttttcggtaggcggttttggttttcggtaaaggcgcggatttcgtcgttttgtatttttagcgaatcgtttattatttcgttttttagtattagttanacgttattgataattatgaagaggtttttattgggtgtaggcggtcggcgacgttattacgtatagtttcgttatggaagatgtttacgatggttgcgttacgggttttggtttcgcgaattagttttattatcgcggcgttgtttttggcgtttagcgaggcggtaggttcgttaagtagtagaatggggtagtcgacgataaagtcgcgggcgatgttgacgcgttgttgttcgttatcggaaaatgtcgatggtgttaggtgttataggcgtttcggtacgtttaggcgggtgagaagacgcgcggttttagcggcgtaggttttacgcggaacgtcggtatcgagtagcggttgtattattatttttagtgttgagatacgcgggatgacgcgtagaaattggtttatttagtcgacggtggttttgcggatttttattattttgcgcgttggcgcggtgattaggtttatttattcgttatcgtgtttgatttggatttgattttcgtcgggtagatagttggcgtatagcgagcgtagtagagttgatttgtcgttgtcggaatggtcgtggagtattacgtattcgttcgcgttgacggtgagcgaggcgcgattgaggacgggtaggcgtacgtcgttttg

SEQ ID NO: 8044 - DNA, 1044 bp, Artificial Sequence
  chemically treated genomic DNA (Homo sapiens) CpG-island No: 8044
  unsure (650)
caaaacgacgtacgcctacccgtcctcaatcgcgcctcgctcaccgtcaacgcgaacgaatacgtaatactccacgaccattccgacaacgacaaatcaactctactacgctcgctatacgccaactatctacccgacgaaaatcaaatccaaatcaaacacgataacgaataaataaacctaatcaccgcgccaacgcgcaaaataataaaaatccgcaaaaccaccgtcgactaaataaaccaatttctacgcgtcatcccgcgtatctcaacactaaaaataataatacaaccgctactcgataccgacgttccgcgtaaaacctacgccgctaaaaccgcgcgtcttctcacccgcctaaacgtaccgaaacgcctataacacctaacaccatcgacattttccgataacgaacaacaacgcgtcaacatcgcccgcgactttatcgtcgactaccccattctactacttaacgaacctaccgcctcgctaaacgccaaaaacaacgccgcgataataaaactaattcgcgaaaccaaaacccgtaacgcaaccatcgtaaacatcttccataacgaaactatacgtaataacgtcgccgaccgcctacacccaataaaaacctcttcataattatcaataacgtntaactaatactaaaaaacgaaataataaacgattcgctaaaaatacaaaacgacgaaatccgcgcctttaccgaaaaccaaaaccgcctaccgaaaacgataaacgacgaaaacgactaactactaccgaaactaattaaactacataccgataatctaaataaattcttcaccccgcgcccgaaaattaactaacctacccactcgacgataaacaaccacgacgcgctaataataacgaacgacatcaccaccgtactaaataccgtaacaattaacgacgtacgcgacgacgacgatcgactaaaaaatctaaaaaaaataatcaacgccatcgaaaaaacgcaaaaacgcgacgtcaaccgcgccgaacaccgtctacatctacgctacg

SEQ ID NO: 8045 - DNA, 507 bp, Artificial Sequence
  chemically treated genomic DNA (Homo sapiens) CpG-island No: 8045
gtataacgtattgcggggtaaaatcgtagatgttttgtattaggcgtaacgtttcgcgttattgtatttggatgttatcgttatttaaatcgtttagatgttgatttaatatcgtttgtttatcgcgtattaggtagaaggtattttttagattcgcgtcgagatatagtataggcggaatatttttaaagttcggaggtaaagttagcgtattcggtatatattttcgcgaacggcgtagtatttcgtcgttttcgcgtattatcgaattatttattcgttgtacgatgtcgcggttatgtattaagaattcgtcggtaatgttttgtaaattcgttagcgtttgttcgttgttgatagttggtggtttatcgtttaggttgtcggaggttattattagcgggtattgtagtttttgtaatagtaaatgttggagcgggttcgtaggtaatattatttcgatttcgttaaggttaggggcgatattattataaagtttaggaacgt

SEQ ID NO: 8046 - DNA, 507 bp, Artificial Sequence
  chemically treated genomic DNA (Homo sapiens) CpG-island No: 8046
acgttcctaaactttataataatatcgcccctaaccttaacgaaatcgaaataatattacctacgaacccgctccaacatttactattacaaaaactacaatacccgctaataataacctccgacaacctaaacgataaaccaccaactatcaacaacgaacaaacgctaacgaatttacaaaacattaccgacgaattcttaatacataaccgcgacatcgtacaacgaataaataattcgataatacgcgaaaacgacgaaatactacgccgttcgcgaaaatatataccgaatacgctaactttacctccgaactttaaaaatattccgcctatactatatctcgacgcgaatctaaaaaataccttctacctaatacgcgataaacaaacgatattaaatcaacatctaaacgatttaaataacgataacatccaaatacaataacgcgaaacgttacgcctaatacaaaacatctacgattttaccccgcaatacgttatac

SEQ ID NO: 8047 - DNA, 507 bp, Artificial Sequence
  chemically treated genomic DNA (Homo sapiens) CpG-island No: 8047
acgtttttgagttttgtgatgatatcgtttttgattttaacgaagtcggggtaatgttgtttgcgaattcgttttagtatttgttgttataggaattgtaatgttcgttggtgatgattttcggtaatttgagcggtaaattattagttattagtaacgaataggcgttggcggatttgtagggtattgtcgacggatttttgatatataatcgcgatatcgtgtagcggatggatgattcggtggtgcgcgaaagcggcgaaatgttgcgtcgttcgcgggggtatgtgtcggatgcgttggttttgttttcgggttttaaaaatgtttcgtttgtgttgtgtttcggcgcggatttgaaaaatattttttgtttggtgcgcggtgaataagcggtgttgagttagtatttgggcgatttaagtgacgatggtatttagatgtagtggcgcgaagcgttacgtttgatgtaaaatatttacgattttatttcgtaatacgttgtgt

SEQ ID NO: 8048 - DNA, 507 bp, Artificial Sequence
  chemically treated genomic DNA (Homo sapiens) CpG-island No: 8048
acacaacgtattacgaaataaaatcgtaaatattttacatcaaacgtaacgcttcgcgccactacatctaaataccatcgtcacttaaatcgcccaaatactaactcaacaccgcttattcaccgcgcaccaaacaaaaaatatttttcaaatccgcgccgaaacacaacacaaacgaaacatttttaaaacccgaaaacaaaaccaacgcatccgacacatacccccgcgaacgacgcaacatttcgccgctttcgcgcaccaccgaatcatccatccgctacacgatatcgcgattatatatcaaaaatccgtcgacaataccctacaaatccgccaacgcctattcgttactaataactaataatttaccgctcaaattaccgaaaatcatcaccaacgaacattacaattcctataacaacaaatactaaaacgaattcgcaaacaacattaccccgacttcgttaaaatcaaaaacgatatcatcacaaaactcaaaaacgt

SEQ ID NO: 8049 - DNA, 1003 bp, Artificial Sequence
  chemically treated genomic DNA (Homo sapiens) CpG-island No: 8049
tagtttaacgttttttttatcggtatcgtcgttgcgtcggaagcgggtgcgacgttgattttataggtcgttagtttgagcggcggacgtatgttgcgttttattggtgcgggtattgtcgaagaacgaatgatcgtttcgtagttgtcggagtgtattttgtacgaatttatcgagcgttcgtattcgttttcgttcggtatcgatttgattttgatttgtggcgagcgtttgttggttatttcgcgaattatttatgtggaggtgtgttgatgtacgttgtcgtgaaagggggcgagaaggcgatcgacgtcgtttacgttttgtaagagagtcgacgtcgaggcgatatcgatttgttcgaattgagcgtcgtttagattgaatagtagtttaatttcgcggtagatcgcgtgatgatcgaaggcggtattgtcgatcgcgaattggcggcgttggcgttgaaataggttagcggcgataacgttgaagcgatttttttgttgcgcgtttatcgtattacgttggcgaagttggcggtaagcgagtcgttcgatattatcgggatgcgtttcgaacgtcgtattttcgtcgtttataaagatattttcggcggttagttgtttggtttaatttacgattatatttatcgtttgttcgattttattttgttggtaaacggcgaagcgtcgacgttgattatcgtcgatagcgaatagtagtcgtcgtcgtacgtttttagtttgttggcgcgttaggggttggcgaagtttgaagaggatagcggcgtatagtcggagatattattcgtacgtcgtcggttatttttgtttacgtttttttcgtttagcgatgcgggacgaaggttatttgttggcgttggtttacgtttatttaacgcggttacgggtaattacgttcgtaggcgaattcgtagcggtatgacgtgtggtcggaggttggtttgcggtgaacgtcggcgaatttgtttgattgattgagt

SEQ ID NO: 8050 - DNA, 1003 bp, Artificial Sequence
  chemically treated genomic DNA (Homo sapiens) CpG-island No: 8050
actcaatcaatcaaacaaattcgccgacgttcaccgcaaaccaacctccgaccacacgtcataccgctacgaattcgcctacgaacgtaattacccgtaaccgcgttaaataaacgtaaaccaacgccaacaaataaccttcgtcccgcatcgctaaacgaaaaaaacgtaaacaaaaataaccgacgacgtacgaataatatctccgactatacgccgctatcctcttcaaacttcgccaacccctaacgcgccaacaaactaaaaacgtacgacgacgactactattcgctatcgacgataatcaacgtcgacgcttcgccgtttaccaacaaaataaaatcgaacaaacgataaatataatcgtaaattaaaccaaacaactaaccgccgaaaatatctttataaacgacgaaaatacgacgttcgaaacgcatcccgataatatcgaacgactcgcttaccgccaacttcgccaacgtaatacgataaacgcgcaacaaaaaaatcgcttcaacgttatcgccgctaacctatttcaacgccaacgccgccaattcgcgatcgacaataccgccttcgatcatcacgcgatctaccgcgaaattaaactactattcaatctaaacgacgctcaattcgaacaaatcgatatcgcctcgacgtcgactctcttacaaaacgtaaacgacgtcgatcgccttctcgccccctttcacgacaacgtacatcaacacacctccacataaataattcgcgaaataaccaacaaacgctcgccacaaatcaaaatcaaatcgataccgaacgaaaacgaatacgaacgctcgataaattcgtacaaaatacactccgacaactacgaaacgatcattcgttcttcgacaatacccgcaccaataaaacgcaacatacgtccgccgctcaaactaacgacctataaaatcaacgtcgcacccgcttccgacgcaacgacgataccgataaaaaaaacgttaaacta

SEQ ID NO: 8051 - DNA, 1003 bp, Artificial Sequence
  chemically treated genomic DNA (Homo sapiens) CpG-island No: 8051
atttagttaattaagtaggttcgtcgacgtttatcgtaaattagttttcggttatacgttatgtcgttgcggattcgtttgcgaacgtgattgttcgtaatcgcgttgggtggacgtaggttagcgttagtaaatagttttcgtttcgtatcgttgaacgggaggagcgtgagtaggggtaatcggcggcgtgcgggtgatgttttcggttgtgcgtcgttattttttttaaatttcgttagtttttgacgcgttagtaggttgaaaacgtgcggcgacggttgttgttcgttgtcggcggtggttagcgtcggcgtttcgtcgtttgttagtagggtaaaatcgagtaggcgatgggtgtagtcgtaggttgggttaagtagttggtcgtcgggaatgtttttataaacggcggagatacggcgttcgagacgtatttcggtggtgtcgagcggttcgtttatcgttagtttcgttaacgtggtgcggtaggcgcgtagtaggaaaatcgttttaacgttatcgtcgttggtttgttttagcgttagcgtcgttagttcgcggtcggtaatgtcgttttcggttattacgcgatttatcgcgaggttaagttgttgtttaatttgggcgacgtttagttcgggtaaatcggtatcgtttcggcgtcggtttttttgtagggcgtgggcggcgtcgatcgttttttcgtttttttttacggtaacgtatattagtatatttttatatgagtggttcgcggaatagttagtaggcgttcgttataggttaggattaggtcgatgtcgagcgggaacggatgcgggcgttcggtgagttcgtgtagaatgtatttcggtagttgcggagcgattattcgtttttcggtaatattcgtattagtaaggcgtaatatgcgttcgtcgtttaggttggcgatttgtaaaattagcgtcgtattcgttttcggcgtaacggcggtgtcggtggaaagggcgttgagttg

SEQ ID NO: 8052 - DNA, 1003 bp, Artificial Sequence
  chemically treated genomic DNA (Homo sapiens) CpG-island No: 8052
caactcaacgccctttccaccgacaccgccgttacgccgaaaacgaatacgacgctaattttacaaatcgccaacctaaacgacgaacgcatattacgccttactaatacgaatattaccgaaaaacgaataatcgctccgcaactaccgaaatacattctacacgaactcaccgaacgcccgcatccgttcccgctcgacatcgacctaatcctaacctataacgaacgcctactaactattccgcgaaccactcatataaaaatatactaatatacgttaccgtaaaaaaaaacgaaaaaacgatcgacgccgcccacgccctacaaaaaaaccgacgccgaaacgataccgatttacccgaactaaacgtcgcccaaattaaacaacaacttaacctcgcgataaatcgcgtaataaccgaaaacgacattaccgaccgcgaactaacgacgctaacgctaaaacaaaccaacgacgataacgttaaaacgattttcctactacgcgcctaccgcaccacgttaacgaaactaacgataaacgaaccgctcgacaccaccgaaatacgtctcgaacgccgtatctccgccgtttataaaaacattcccgacgaccaactacttaacccaacctacgactacacccatcgcctactcgattttaccctactaacaaacgacgaaacgccgacgctaaccaccgccgacaacgaacaacaaccgtcgccgcacgttttcaacctactaacgcgtcaaaaactaacgaaatttaaaaaaaataacgacgcacaaccgaaaacatcacccgcacgccgccgattacccctactcacgctcctcccgttcaacgatacgaaacgaaaactatttactaacgctaacctacgtccacccaacgcgattacgaacaatcacgttcgcaaacgaatccgcaacgacataacgtataaccgaaaactaatttacgataaacgtcgacgaacctacttaattaactaaat

SEQ ID NO: 8053 - DNA, 646 bp, Artificial Sequence
  chemically treated genomic DNA (Homo sapiens) CpG-island No: 8053
ttgttcgcgttaattttacgttttttttcgttcgtacgttgtaatttcgtttcgttaatgaattggcgcggcgtgaagattggcgtggtttgttagtttttagttcggaaaagttcggaattatcgaagcgtaatgtaattattattatgcgaaatggaatatcgggtagagtgaagaagtttggtaaggggcgaaagagttgtggttaatcggtaagagttagtttaacgtttgtgataagttatttagcgtttggcgtgcgttaggtaaataagattcgttggcgtatttagagcgtattcgtttggcgatgaaagcgggtaatataggtttggtaatagtgttggtagggtagatgtttgtcgattattagattatcgtttcggtaattattttattggcgaataattttaatacggtattgattttcgcgcgtataattggcgcgaacgattttattcgttaaatggcggcggtggcgtttgttagtgtggcgcggtaggatgttgagaatgtacggttgatgattttatcgtttgtttaggcgtagtagtttaatgaagattagatttaggagttgcgcgatatcgtcgtttggcgtttgatgggtaacgatgttatcgacgagtaggcgaattggcgcga

SEQ ID NO: 8054 - DNA, 646 bp, Artificial Sequence
  chemically treated genomic DNA (Homo sapiens) CpG-island No: 8054
tcgcgccaattcgcctactcgtcgataacatcgttacccatcaaacgccaaacgacgatatcgcgcaactcctaaatctaatcttcattaaactactacgcctaaacaaacgataaaatcatcaaccgtacattctcaacatcctaccgcgccacactaacaaacgccaccgccgccatttaacgaataaaatcgttcgcgccaattatacgcgcgaaaatcaataccgtattaaaattattcgccaataaaataattaccgaaacgataatctaataatcgacaaacatctaccctaccaacactattaccaaacctatattacccgctttcatcgccaaacgaatacgctctaaatacgccaacgaatcttatttacctaacgcacgccaaacgctaaataacttatcacaaacgttaaactaactcttaccgattaaccacaactctttcgccccttaccaaacttcttcactctacccgatattccatttcgcataataataattacattacgcttcgataattccgaacttttccgaactaaaaactaacaaaccacgccaatcttcacgccgcgccaattcattaacgaaacgaaattacaacgtacgaacgaaaaaaaacgtaaaattaacgcgaacaa

SEQ ID NO: 8055 - DNA, 646 bp, Artificial Sequence
  chemically treated genomic DNA (Homo sapiens) CpG-island No: 8055
tcgcgttagttcgtttgttcgtcggtgatatcgttgtttattagacgttaggcgacgatatcgcgtagtttttgaatttgatttttattaagttgttgcgtttgggtaagcgatgggattattagtcgtgtatttttagtattttgtcgcgttatattggtaaacgttatcgtcgttatttgacgggtaaaatcgttcgcgttagttgtacgcgcgaaggttagtatcgtattagggttgttcgttagtgaaatgattgtcgaggcgatagtttggtaatcggtaggtatttgttttgttagtattgttattaggtttgtgttattcgtttttatcgttagacggatacgttttaaatacgttagcggattttgtttatttgacgtacgttagacgttaaataatttgttataggcgttaggttggtttttgtcggttagttatagttttttcgttttttgttaggtttttttattttgttcggtgttttatttcgtatagtagtaattatattgcgtttcggtagtttcgggttttttcgggttaaaggttaataagttacgttagtttttacgtcgcgttagtttattgacgaaacgagattgtagcgtgcgagcgggaggaagcgtggggttagcgcgaataa

SEQ ID NO: 8056 - DNA, 646 bp, Artificial Sequence
  chemically treated genomic DNA (Homo sapiens) CpG-island No: 8056
ttattcgcgctaaccccacgcttcctcccgctcgcacgctacaatctcgtttcgtcaataaactaacgcgacgtaaaaactaacgtaacttattaacctttaacccgaaaaaacccgaaactaccgaaacgcaatataattactactatacgaaataaaacaccgaacaaaataaaaaaacctaacaaaaaacgaaaaaactataactaaccgacaaaaaccaacctaacgcctataacaaattatttaacgtctaacgtacgtcaaataaacaaaatccgctaacgtatttaaaacgtatccgtctaacgataaaaacgaataacacaaacctaataacaatactaacaaaacaaatacctaccgattaccaaactatcgcctcgacaatcatttcactaacgaacaaccctaatacgatactaaccttcgcgcgtacaactaacgcgaacgattttacccgtcaaataacgacgataacgtttaccaatataacgcgacaaaatactaaaaatacacgactaataatcccatcgcttacccaaacgcaacaacttaataaaaatcaaattcaaaaactacgcgatatcgtcgcctaacgtctaataaacaacgatatcaccgacgaacaaacgaactaacgcga

SEQ ID NO: 8057 - DNA, 524 bp, Artificial Sequence
  chemically treated genomic DNA (Homo sapiens) CpG-island No: 8057
tggtaatcggtgttagtgtttttgtttcgtttgtgtttgggcgtgagttaatgttgacgttaaatagttagtaagagtatcgcgtttgtgaaacgtaattgcgggatgttcgacgcgtgttgattgttggcggtggtttgattggtagcgaattggcgatggatttttgtcgtgtaggtaaagcggttacgttaatcgataacgttgttagtattttggcgtcgttaatgttatcggaagtaagtagtcgtttgtagtatcggttgacggagatgggcgtttatttgttgttgaaattttagttataggggttggaaaaaacggattttggtatttaggtaacgttggatcgttagcgtaatatcgaagtggatgcggtaattgtcgttatcggattgcgttcggaaatcgttttggtacgacgcgtcgggttgacgattaatcgcggcgtttgcgtcgatagttatttgtaaattagtaatatcgatatttacgcgttgggcgattgcgcggaaattaacggt

SEQ ID NO: 8058 - DNA, 524 bp, Artificial Sequence
  chemically treated genomic DNA (Homo sapiens) CpG-island No: 8058
accgttaatttccgcgcaatcgcccaacgcgtaaatatcgatattactaatttacaaataactatcgacgcaaacgccgcgattaatcgtcaacccgacgcgtcgtaccaaaacgatttccgaacgcaatccgataacgacaattaccgcatccacttcgatattacgctaacgatccaacgttacctaaataccaaaatccgttttttccaacccctataactaaaatttcaacaacaaataaacgcccatctccgtcaaccgatactacaaacgactacttacttccgataacattaacgacgccaaaatactaacaacgttatcgattaacgtaaccgctttacctacacgacaaaaatccatcgccaattcgctaccaatcaaaccaccgccaacaatcaacacgcgtcgaacatcccgcaattacgtttcacaaacgcgatactcttactaactatttaacgtcaacattaactcacgcccaaacacaaacgaaacaaaaacactaacaccgattacca

SEQ ID NO: 8059 - DNA, 524 bp, Artificial Sequence
  chemically treated genomic DNA (Homo sapiens) CpG-island No: 8059
atcgttaattttcgcgtaatcgtttagcgcgtaaatatcggtattattggtttgtagataattatcgacgtaaacgtcgcgattaatcgttagttcggcgcgtcgtgttagggcggttttcgggcgtagttcggtggcggtaattatcgtatttatttcgatattgcgttggcggtttagcgttgtttgaatgttagaattcgttttttttagtttttgtaattgagattttaatagtagatgaacgtttattttcgttaatcgatgttgtaagcggttgtttattttcggtggtattaacgacgttagaatattggtagcgttgtcgattagcgtgatcgttttgtttgtacgataaaaatttatcgttagttcgttattaattaaattatcgttaataattaatacgcgtcgggtatttcgtagttgcgttttataggcgcgatatttttgttgattatttaacgttagtattaatttacgtttaggtataggcgggataaaggtattggtatcggttgtta

SEQ ID NO: 8060 - DNA, 524 bp, Artificial Sequence
  chemically treated genomic DNA (Homo sapiens) CpG-island No: 8060
taacaaccgataccaatacctttatcccgcctatacctaaacgtaaattaatactaacgttaaataatcaacaaaaatatcgcgcctataaaacgcaactacgaaatacccgacgcgtattaattattaacgataatttaattaataacgaactaacgataaatttttatcgtacaaacaaaacgatcacgctaatcgacaacgctaccaatattctaacgtcgttaataccaccgaaaataaacaaccgcttacaacatcgattaacgaaaataaacgttcatctactattaaaatctcaattacaaaaactaaaaaaaacgaattctaacattcaaacaacgctaaaccgccaacgcaatatcgaaataaatacgataattaccgccaccgaactacgcccgaaaaccgccctaacacgacgcgccgaactaacgattaatcgcgacgtttacgtcgataattatctacaaaccaataataccgatatttacgcgctaaacgattacgcgaaaattaacgat

SEQ ID NO: 8061 - DNA, 638 bp, Artificial Sequence
  chemically treated genomic DNA (Homo sapiens) CpG-island No: 8061
tcggttagcggatcggagagaagttaagtttaggaaattgtcgttttcgtcgtcggaaatgaataatttgagttttttagttaggttgtttaagtttcgtttttaaaaagcgagtatgcgtagttttcggttacggttttttttagcgtaggtttattttcgttatggagtatgcgtagtttttttgtcgtttcgtttttttttttttagagtttttagttttttagaaattaggcggcgcgttttcggtggcggcgttttggattttcgggttcgcgtattttcgttagttttttttaaggcggatgggtggttttcgagatttcgtcggatttatggtttttagtgtagcgcggagtgggcgatgttagcgtgttaggtgagaggcggttatcggtggcgggtgagggcgaaagagggtatggcgcggtcgggagcgggcgtcgatagggtttttttcgcggttcggcgtcggaggttggaggcgtggattcgtagagtcggggttggagggggtttgttttaattgtttgtaggcgcgtggagtggagggtcgttttgggattcgttttttttatcgtagaaataggattcgtaggtttggtggtagaattataggatttgggattttggaagaa

SEQ ID NO: 8062 - DNA, 638 bp, Artificial Sequence
  chemically treated genomic DNA (Homo sapiens) CpG-island No: 8062
ttcttccaaaatcccaaatcctataattctaccaccaaacctacgaatcctatttctacgataaaaaaaacgaatcccaaaacgaccctccactccacgcgcctacaaacaattaaaacaaaccccctccaaccccgactctacgaatccacgcctccaacctccgacgccgaaccgcgaaaaaaaccctatcgacgcccgctcccgaccgcgccataccctctttcgccctcacccgccaccgataaccgcctctcacctaacacgctaacatcgcccactccgcgctacactaaaaaccataaatccgacgaaatctcgaaaaccacccatccgccttaaaaaaaactaacgaaaatacgcgaacccgaaaatccaaaacgccgccaccgaaaacgcgccgcctaatttctaaaaaactaaaaactctaaaaaaaaaaaaacgaaacgacaaaaaaactacgcatactccataacgaaaataaacctacgctaaaaaaaaccgtaaccgaaaactacgcatactcgctttttaaaaacgaaacttaaacaacctaactaaaaaactcaaattattcatttccgacgacgaaaacgacaatttcctaaacttaacttctctccgatccgctaaccga

SEQ ID NO: 8063 - DNA, 638 bp, Artificial Sequence
  chemically treated genomic DNA (Homo sapiens) CpG-island No: 8063
tttttttaggattttaaattttataattttattattaagtttgcgggttttatttttgcggtggaaagggcgaattttaaggcgattttttattttacgcgtttgtaggtagttggaataagttttttttaatttcggttttgcgggtttacgtttttaattttcggcgtcgggtcgcggagaaggttttgtcggcgttcgttttcggtcgcgttatgttttttttcgtttttattcgttatcggtggtcgttttttatttggtacgttggtatcgtttatttcgcgttgtattggaaattatgggttcgacggggtttcgggggttatttattcgttttaaggaaggttggcggggatgcgcgggttcgggagtttagggcgtcgttatcgggaacgcgtcgtttggtttttaaggaattgggggttttggaaagggaggggcgggacggtaggaggattgcgtatgttttataacggggatgggtttgcgttgggaggggtcgtagtcgggagttgcgtatgttcgttttttgggggcggagtttaagtagtttggttaggaggtttaggttatttattttcggcggcggaggcggtagttttttaagtttggttttttttcggttcgttgatcgg

SEQ ID NO: 8064 - DNA, 638 bp, Artificial Sequence
  chemically treated genomic DNA (Homo sapiens) CpG-island No: 8064
ccgatcaacgaaccgaaaaaaaaccaaacttaaaaaactaccgcctccgccgccgaaaataaataacctaaacctcctaaccaaactacttaaactccgcccccaaaaaacgaacatacgcaactcccgactacgacccctcccaacgcaaacccatccccgttataaaacatacgcaatcctcctaccgtcccgcccctccctttccaaaacccccaattccttaaaaaccaaacgacgcgttcccgataacgacgccctaaactcccgaacccgcgcatccccgccaaccttccttaaaacgaataaataacccccgaaaccccgtcgaacccataatttccaatacaacgcgaaataaacgataccaacgtaccaaataaaaaacgaccaccgataacgaataaaaacgaaaaaaaacataacgcgaccgaaaacgaacgccgacaaaaccttctccgcgacccgacgccgaaaattaaaaacgtaaacccgcaaaaccgaaattaaaaaaaacttattccaactacctacaaacgcgtaaaataaaaaatcgccttaaaattcgccctttccaccgcaaaaataaaacccgcaaacttaataataaaattataaaatttaaaatcctaaaaaaa

SEQ ID NO: 8065 - DNA, 511 bp, Artificial Sequence
  chemically treated genomic DNA (Homo sapiens) CpG-island No: 8065
  unsure (222..)
tgggttttcgttcgtggttgtcgagggacgtttgcgaaggattggtttttattgattcgggcgttgagtagacggcgttgcggtcgtatcgatagggatattatagagtgagttcgcgcggggtttttttgcgggtgatcgggggggtgtttagtattagtcggtattttcgaagtttttttttacgtagcgggatttagaggtttggcgtaggtttttttnntgtcgttagggtatacgttgttattagttgggtttgtcggtattagtggatcgcgacgttaagtcgtcgcgtagatttcgcggtatataatgtatacggatacgtcggtagagtagagttcgtgtattcggtacgttagacgtaggtatttaggtatcggtttatttacgtttttgttagaggtgtcgggttttcgttatcgatcgacgcggtaggaaggggggtcgcgcggggattttttattcggttgggaaggggtaggaaaggggcggcgcgcgcgaagaatgt

SEQ ID NO: 8066 - DNA, 511 bp, Artificial Sequence
  chemically treated genomic DNA (Homo sapiens) CpG-island No: 8066
  unsure (289..)
acattcttcgcgcgcgccgcccctttcctaccccttcccaaccgaataaaaaatccccgcgcgaccccccttcctaccgcgtcgatcgataacgaaaacccgacacctctaacaaaaacgtaaataaaccgatacctaaatacctacgtctaacgtaccgaatacacgaactctactctaccgacgtatccgtatacattatataccgcgaaatctacgcgacgacttaacgtcgcgatccactaataccgacaaacccaactaataacaacgtataccctaacgacannaaaaaaacctacgccaaacctctaaatcccgctacgtaaaaaaaaacttcgaaaataccgactaatactaaacacccccccgatcacccgcaaaaaaaccccgcgcgaactcactctataatatccctatcgatacgaccgcaacgccgtctactcaacgcccgaatcaataaaaaccaatccttcgcaaacgtccctcgacaaccacgaacgaaaaccca

SEQ ID NO: 8067 - DNA, 511 bp, Artificial Sequence
  chemically treated genomic DNA (Homo sapiens) CpG-island No: 8067
  unsure (289..)
atatttttcgcgcgcgtcgttttttttttgtttttttttagtcggatggagggttttcgcgcgatttttttttttgtcgcgtcggtcgatggcgagagttcggtatttttggtaggaacgtgggtggatcgatgtttgagtgtttacgtttgacgtatcgagtgtacgagttttgttttgtcggcgtgttcgtgtatattatgtgtcgcggagtttgcgcggcgatttagcgtcgcgatttattggtatcggtagatttagttggtggtagcgtgtgttttagcgatannggaaagatttgcgttagatttttggatttcgttgcgtgggagagggtttcggggatatcgattggtattggatattttttcgattattcgtagggaagtttcgcgcggatttattttatgatgtttttgtcggtgcggtcgtagcgtcgtttgtttagcgttcgggttaataggagttagtttttcgtaggcgtttttcggtagttacgagcgggggttta

SEQ ID NO: 8068 - DNA, 511 bp, Artificial Sequence
  chemically treated genomic DNA (Homo sapiens) CpG-island No: 8068
  unsure (222..)
taaacccccgctcgtaactaccgaaaaacgcctacgaaaaactaactcctattaacccgaacgctaaacaaacgacgctacgaccgcaccgacaaaaacatcataaaataaatccgcgcgaaacttccctacgaataatcgaaaaaatatccaataccaatcgatatccccgaaaccctctcccacgcaacgaaatccaaaaatctaacgcaaatctttccnntatcgctaaaacacacgctaccaccaactaaatctaccgataccaataaatcgcgacgctaaatcgccgcgcaaactccgcgacacataatatacacgaacacgccgacaaaacaaaactcgtacactcgatacgtcaaacgtaaacactcaaacatcgatccacccacgttcctaccaaaaataccgaactctcgccatcgaccgacgcgacaaaaaaaaaaatcgcgcgaaaaccctccatccgactaaaaaaaaacaaaaaaaaaacgacgcgcgcgaaaaatat

SEQ ID NO: 8069 - DNA, 578 bp, Artificial Sequence
  chemically treated genomic DNA (Homo sapiens) CpG-island No: 8069
  unsure (515)
cggttttcgtttaggaagttttatttagcgggagttaggacgtcgcggcgtcggtagagtttacgagcgattcggcgagggcgcgtgcggcgtgacgacgcgattcgcggcgcgtttcgtgacgttatcgcgttcgtttttgaaagttggcgttcggggtcgttttttatgttgttttgcgttaatttttttttttattttttttttttcgttttttattcgtcgttcggtcggtttttttattcgtttttttttttattagtattcgcggtttcggtagcgtcgacgtaggcgtattgtatcgcgtcgtcgttattttgtgtttgagtttgtggagcgattaaatcgtgcgcggagttgtttttttggcggtagcggcggcggcggtggtcggtgcgacgcgcggagttcgtcggagacgtcgggtggtcggagtcgtggagcggcggcggagcgggcgtcgcggtggggtgtggttgcggaggtaagggggttcggggttggacggaggtttncgcggtgtttgtttttacggtgttatcgattgggtgtttgtttttgagtttggttgttaggtt

SEQ ID NO: 8070 - DNA, 578 bp, Artificial Sequence
  chemically treated genomic DNA (Homo sapiens) CpG-island No: 8070
  unsure (64)
aacctaacaaccaaactcaaaaacaaacacccaatcgataacaccgtaaaaacaaacaccgcgnaaacctccgtccaaccccgaacccccttacctccgcaaccacaccccaccgcgacgcccgctccgccgccgctccacgactccgaccacccgacgtctccgacgaactccgcgcgtcgcaccgaccaccgccgccgccgctaccgccaaaaaaacaactccgcgcacgatttaatcgctccacaaactcaaacacaaaataacgacgacgcgatacaatacgcctacgtcgacgctaccgaaaccgcgaatactaataaaaaaaaaaacgaataaaaaaaccgaccgaacgacgaataaaaaacgaaaaaaaaaaaataaaaaaaaaaattaacgcaaaacaacataaaaaacgaccccgaacgccaactttcaaaaacgaacgcgataacgtcacgaaacgcgccgcgaatcgcgtcgtcacgccgcacgcgccctcgccgaatcgctcgtaaactctaccgacgccgcgacgtcctaactcccgctaaataaaacttcctaaacgaaaaccg

SEQ ID NO: 8071 - DNA, 578 bp, Artificial Sequence
  chemically treated genomic DNA (Homo sapiens) CpG-island No: 8071
  unsure (64)
agtttagtagttagatttaggagtaggtatttagtcggtgatatcgtagaggtaggtatcgcgnaaattttcgtttaatttcgggtttttttattttcgtagttatattttatcgcggcgttcgtttcgtcgtcgttttacggtttcggttattcggcgttttcggcgagtttcgcgcgtcgtatcggttatcgtcgtcgtcgttgtcgttaaagaagtagtttcgcgtacggtttaatcgttttataggtttagatataaaatggcggcggcgcggtgtagtgcgtttgcgtcggcgttgtcggggtcgcgggtgttgataagggaagggacgggtggggggatcggtcgggcggcgagtagagggcgggggaggaaaggtgaggggaggggttggcgtagggtagtatgggaggcggtttcgggcgttaatttttaaaagcgggcgcgatggcgttacgggacgcgtcgcgagtcgcgtcgttacgtcgtacgcgttttcgtcgggtcgttcgtgggttttgtcggcgtcgcggcgttttggttttcgttgggtggggttttttgggcggaggtcg

SEQ ID NO: 8072 - DNA, 578 bp, Artificial Sequence
  chemically treated genomic DNA (Homo sapiens) CpG-island No: 8072
  unsure (515)
cgacctccgcccaaaaaaccccacccaacgaaaaccaaaacgccgcgacgccgacaaaacccacgaacgacccgacgaaaacgcgtacgacgtaacgacgcgactcgcgacgcgtcccgtaacgccatcgcgcccgcttttaaaaattaacgcccgaaaccgcctcccatactaccctacgccaacccctcccctcacctttcctcccccgccctctactcgccgcccgaccgatccccccacccgtcccttcccttatcaacacccgcgaccccgacaacgccgacgcaaacgcactacaccgcgccgccgccattttatatctaaacctataaaacgattaaaccgtacgcgaaactacttctttaacgacaacgacgacgacgataaccgatacgacgcgcgaaactcgccgaaaacgccgaataaccgaaaccgtaaaacgacgacgaaacgaacgccgcgataaaatataactacgaaaataaaaaaacccgaaattaaacgaaaatttncgcgatacctacctctacgatatcaccgactaaatacctactcctaaatctaactactaaact

SEQ ID NO: 8073 - DNA, 511 bp, Artificial Sequence
  chemically treated genomic DNA (Homo sapiens) CpG-island No: 8073
tggttgatgtgttggtgagtaagtagttttacgaagtaaataatatgattgatgcgttggcggcgttttttgcggcggttgtcgtatagttgttttgtcgtgacgcgttgatgtaggagtacgacgataagtggtattagaacggtttggtgatggataaatggtttattttgtaagttattagttcggcggcgaatgtgttggagacggtgcgcggtttgttgtagtatcgtttatttattatgagtaattcgaatcgtattcgttcgttgattggcgcgtttgcgggtagtaattcggtagcgttttatgtcgaagatggtagcggttatttgtttttggtggaaatgtttatcgattttaatagtcgtaattcgtaggtggttttacgtttgattgaatcgttgattcgtttgaaacgttacgatgttaaacgttaggagaaaatgcgcgcggcgttggaatagttgaaagggttggaaaatttttttggcgatttgtacgagaagat

SEQ ID NO: 8074 - DNA, 511 bp, Artificial Sequence
  chemically treated genomic DNA (Homo sapiens) CpG-island No: 8074
atcttctcgtacaaatcgccaaaaaaattttccaaccctttcaactattccaacgccgcgcgcattttctcctaacgtttaacatcgtaacgtttcaaacgaatcaacgattcaatcaaacgtaaaaccacctacgaattacgactattaaaatcgataaacatttccaccaaaaacaaataaccgctaccatcttcgacataaaacgctaccgaattactacccgcaaacgcgccaatcaacgaacgaatacgattcgaattactcataataaataaacgatactacaacaaaccgcgcaccgtctccaacacattcgccgccgaactaataacttacaaaataaaccatttatccatcaccaaaccgttctaataccacttatcgtcgtactcctacatcaacgcgtcacgacaaaacaactatacgacaaccgccgcaaaaaacgccgccaacgcatcaatcatattatttacttcgtaaaactacttactcaccaacacatcaacca

SEQ ID NO: 8075 - DNA, 511 bp, Artificial Sequence
  chemically treated genomic DNA (Homo sapiens) CpG-island No: 8075
attttttcgtatagatcgttagagagattttttagtttttttaattgttttagcgtcgcgcgtatttttttttgacgtttggtatcgtaacgttttaggcgaattagcggtttaattagacgtgaagttatttgcgggttacggttgttgaggtcggtaagtatttttattaggaataggtaatcgttgttattttcggtatggaacgttgtcggattgttgttcgtaaacgcgttaattaacgaacgaatacggttcgggttgtttatggtaaatgagcgatgttgtaataggtcgcgtatcgtttttagtatattcgtcgtcgggttggtggtttgtaggataaattatttatttattattagatcgttttgatgttatttgtcgtcgtatttttgtattagcgcgttacggtaaggtagttgtgcggtaatcgtcgtagaaagcgtcgttagcgtattagttatattgtttgtttcgtggaattgtttgtttattagtatattagtta

SEQ ID NO: 8076 - DNA, 511 bp, Artificial Sequence
  chemically treated genomic DNA (Homo sapiens) CpG-island No: 8076
taactaatatactaataaacaaacaattccacgaaacaaacaatataactaatacgctaacgacgctttctacgacgattaccgcacaactaccttaccgtaacgcgctaatacaaaaatacgacgacaaataacatcaaaacgatctaataataaataaataatttatcctacaaaccaccaacccgacgacgaatatactaaaaacgatacgcgacctattacaacatcgctcatttaccataaacaacccgaaccgtattcgttcgttaattaacgcgtttacgaacaacaatccgacaacgttccataccgaaaataacaacgattacctattcctaataaaaatacttaccgacctcaacaaccgtaacccgcaaataacttcacgtctaattaaaccgctaattcgcctaaaacgttacgataccaaacgtcaaaaaaaaatacgcgcgacgctaaaacaattaaaaaaactaaaaaatctctctaacgatctatacgaaaaaat

SEQ ID NO: 8077 - DNA, 646 bp, Artificial Sequence
  chemically treated genomic DNA (Homo sapiens) CpG-island No: 8077
cggattagcgcgtatgcgtataggtgagtgttcgtttcgttttcgggtttggttatttgtttaagaaatttgttggttgttgtttttaggtcgttttcgggcggggatacggaattcggttatggaagattcgtcgggggttcgcgagtttcgggttcggtcgagagagcgggattcgggacggcgtttttatttagattaaggtcgtatttacgatcgatcgcgggatcgattcggggattcgcgtaggaagcgaagtagcgacgggaatcggcgaagggacggggatcgggattcggagagagattaggagagggacgggaatcgcgatcggaatcgggatcgggagagggagagagagagggaaagagattttggatttgatgtgttttcgtcgggatatatatagggacgcgggttttcgcgtaggtaatacggagtttgggaaaaatcgcgttaaagtcggacgcgggacggagttcggggattgatttgggacgtagtcgcgttttttgggttcgcgttttggtggaagtttcggagtcgtcgtagtcgtagaggaagggagatttttgggcgtcgtagattcgaaaggtgacgacggggtttggtgtgtttgttgttgattttttgttgtcgtggtgat

SEQ ID NO: 8078 - DNA, 646 bp, Artificial Sequence
  chemically treated genomic DNA (Homo sapiens) CpG-island No: 8078
atcaccacgacaacaaaaaatcaacaacaaacacaccaaaccccgtcgtcacctttcgaatctacgacgcccaaaaatctcccttcctctacgactacgacgactccgaaacttccaccaaaacgcgaacccaaaaaacgcgactacgtcccaaatcaatccccgaactccgtcccgcgtccgactttaacgcgatttttcccaaactccgtattacctacgcgaaaacccgcgtccctatatatatcccgacgaaaacacatcaaatccaaaatctctttccctctctctctccctctcccgatcccgattccgatcgcgattcccgtccctctcctaatctctctccgaatcccgatccccgtcccttcgccgattcccgtcgctacttcgcttcctacgcgaatccccgaatcgatcccgcgatcgatcgtaaatacgaccttaatctaaataaaaacgccgtcccgaatcccgctctctcgaccgaacccgaaactcgcgaacccccgacgaatcttccataaccgaattccgtatccccgcccgaaaacgacctaaaaacaacaaccaacaaatttcttaaacaaataaccaaacccgaaaacgaaacgaacactcacctatacgcatacgcgctaatccg

SEQ ID NO: 8079 - DNA, 646 bp, Artificial Sequence
  chemically treated genomic DNA (Homo sapiens) CpG-island No: 8079
gttattacggtagtaggaggttagtagtaggtatattaggtttcgtcgttatttttcgggtttgcggcgtttaggggtttttttttttttgcggttgcggcggtttcggggtttttattagggcgcgggtttaggaggcgcggttgcgttttaggttagttttcgggtttcgtttcgcgttcggttttggcgcggttttttttaaatttcgtgttatttgcgcgagggttcgcgtttttgtgtgtgtttcggcgggggtatattaggtttagggtttttttttttttttttttttttttttcggtttcggtttcggtcgcggttttcgttttttttttggttttttttcgggtttcggttttcgttttttcgtcggttttcgtcgttgtttcgttttttgcgcgggttttcgggtcggtttcgcggtcgatcgtgggtgcggttttggtttgggtgggggcgtcgtttcgggtttcgttttttcggtcgggttcggggttcgcgagttttcgacggattttttatggtcgggtttcgtgttttcgttcgggagcgatttgagggtaataattaataagttttttgggtaggtggttaagttcgggggcggggcgggtatttatttgtgcgtatgcgcgttagttcg

SEQ ID NO: 8080 - DNA, 646 bp, Artificial Sequence
  chemically treated genomic DNA (Homo sapiens) CpG-island No: 8080
cgaactaacgcgcatacgcacaaataaatacccgccccgcccccgaacttaaccacctacccaaaaaacttattaattattaccctcaaatcgctcccgaacgaaaacacgaaacccgaccataaaaaatccgtcgaaaactcgcgaaccccgaacccgaccgaaaaaacgaaacccgaaacgacgcccccacccaaaccaaaaccgcacccacgatcgaccgcgaaaccgacccgaaaacccgcgcaaaaaacgaaacaacgacgaaaaccgacgaaaaaacgaaaaccgaaacccgaaaaaaaaccaaaaaaaaaacgaaaaccgcgaccgaaaccgaaaccgaaaaaaaaaaaaaaaaaaaaaaaaaaaccctaaacctaatatacccccgccgaaacacacacaaaaacgcgaaccctcgcgcaaataacacgaaatttaaaaaaaaccgcgccaaaaccgaacgcgaaacgaaacccgaaaactaacctaaaacgcaaccgcgcctcctaaacccgcgccctaataaaaaccccgaaaccgccgcaaccgcaaaaaaaaaaaaacccctaaacgccgcaaacccgaaaaataacgacgaaacctaatatacctactactaacctcctactaccgtaataac

SEQ ID NO: 8081 - DNA, 634 bp, Artificial Sequence
  chemically treated genomic DNA (Homo sapiens) CpG-island No: 8081
tgtcgtcgtggtcgttgtacgagtagtttatttcggtgtcggaatatgcggagagcgtttggttgcgggtggacgtggatacgttggtttatcgttatagttattcgtttgatggcgagacgtggtatatcgtgtcggtgacgtatgaggcgtggaagttgtcggacgattatatcggcgggcgcggtttttttatcggcgcgtttgtgggtttgtattgcgaggatattagcggcgacggttgttacgcggatttcgattattttatttacgagtcggtttaacggtttaggtcgggtagtttagcgcgcgcgagagcgcgagttcggtttgttgaagttgttcgcggaaattagttagtttcgcgtcgtttacgcgggaggttagcgtcgataggtttagggcggcgatgacgcgggattcgtggttttatatcggtatcgttacgtagcgtacgttttgttcgtttttttcgttgtttagggcgtagttttgttcgcgggtttgcgttagggcgtttattaaggtttcgcgagacgcgagggtggcgggcgtaaaggtagtgtattgatagttttttagtgtattgtatttattttgttggacgatgaaatggaatagtttttaatatgtt

SEQ ID NO: 8082 - DNA, 634 bp, Artificial Sequence
  chemically treated genomic DNA (Homo sapiens) CpG-island No: 8082
aacatattaaaaactattccatttcatcgtccaacaaaataaatacaatacactaaaaaactatcaatacactacctttacgcccgccaccctcgcgtctcgcgaaaccttaataaacgccctaacgcaaacccgcgaacaaaactacgccctaaacaacgaaaaaaacgaacaaaacgtacgctacgtaacgataccgatataaaaccacgaatcccgcgtcatcgccgccctaaacctatcgacgctaacctcccgcgtaaacgacgcgaaactaactaatttccgcgaacaacttcaacaaaccgaactcgcgctctcgcgcgcgctaaactacccgacctaaaccgttaaaccgactcgtaaataaaataatcgaaatccgcgtaacaaccgtcgccgctaatatcctcgcaatacaaacccacaaacgcgccgataaaaaaaccgcgcccgccgatataatcgtccgacaacttccacgcctcatacgtcaccgacacgatataccacgtctcgccatcaaacgaataactataacgataaaccaacgtatccacgtccacccgcaaccaaacgctctccgcatattccgacaccgaaataaactactcgtacaacgaccacgacgaca

SEQ ID NO: 8083 - DNA, 634 bp, Artificial Sequence
  chemically treated genomic DNA (Homo sapiens) CpG-island No: 8083
gatatattaggggttattttattttatcgtttaataaaatgggtgtagtatattggagggttattagtatattatttttacgttcgttattttcgcgtttcgcgaagttttaatgagcgttttggcgtagattcgcgagtaaggttacgttttggatagcgaagagaacgagtagggcgtgcgttgcgtggcggtgtcggtgtggaattacgagtttcgcgttatcgtcgttttgagtttgtcgacgttgatttttcgcgtggacgacgcggagttggttaattttcgcgagtagttttagtaggtcgggttcgcgttttcgcgcgcgttgggttattcggtttgagtcgttagatcggttcgtaggtgaagtagtcgaagttcgcgtagtagtcgtcgtcgttgatgttttcgtagtgtaggtttataaacgcgtcggtgaagaagtcgcgttcgtcgatgtagtcgttcgatagtttttacgttttatacgttatcggtacggtgtgttacgtttcgttattaaacgagtagttgtagcggtagattagcgtatttacgtttattcgtagttagacgtttttcgtatgtttcggtatcggaatgggttgttcgtgtagcggttacgacggta

SEQ ID NO: 8084 - DNA, 634 bp, Artificial Sequence
  chemically treated genomic DNA (Homo sapiens) CpG-island No: 8084
taccgtcgtaaccgctacacgaacaacccattccgataccgaaacatacgaaaaacgtctaactacgaataaacgtaaatacgctaatctaccgctacaactactcgtttaataacgaaacgtaacacaccgtaccgataacgtataaaacgtaaaaactatcgaacgactacatcgacgaacgcgacttcttcaccgacgcgtttataaacctacactacgaaaacatcaacgacgacgactactacgcgaacttcgactacttcacctacgaaccgatctaacgactcaaaccgaataacccaacgcgcgcgaaaacgcgaacccgacctactaaaactactcgcgaaaattaaccaactccgcgtcgtccacgcgaaaaatcaacgtcgacaaactcaaaacgacgataacgcgaaactcgtaattccacaccgacaccgccacgcaacgcacgccctactcgttctcttcgctatccaaaacgtaaccttactcgcgaatctacgccaaaacgctcattaaaacttcgcgaaacgcgaaaataacgaacgtaaaaataatatactaataaccctccaatatactacacccattttattaaacgataaaataaaataacccctaatatatc

SEQ ID NO: 8085 - DNA, 869 bp, Artificial Sequence
  chemically treated genomic DNA (Homo sapiens) CpG-island No: 8085
  unsure (53, 62, 65, 74..75, 821, 831, 845..846, 854..855, 857..)
agtttatacgtttaaatcgggataatcgtcgtcggggggatttttagagtggnttgttcgantgntgttaaggnnattaatagtagatattcgtgttagtattttgtcgcgtattatggttgaagtattcgacgttgtttgtttaggtcgttttggttcggttttggtcgatattttaaaagatatttagttaggtagcggtgatttggaatcgtggtttattatcgttgaaaacgaagtgatttttttatatgtcgaagttgagtaagcgcgttagatgttggtaaaagcgtaaaaatcgatgttgtacgttggcggtggcgtgggtatggcgtaggtagtttcggttttatttgaattagggttgatttgttgtatagcgtacgaacgtcggacgtttcgaggttatcgcgttcgtttagcgcgttggtttcggtagacgatagttttttatgtagcgttgtatttacgttagcgcgttgtttacgttgattcgatggtcggtagcgataaataacgggttatagcgcgttttgttgcgttagatttaggttagttgttcgtttttatttattagtggggttagcgcgttcggttcgttggagagcggttcgaatttatcgtagagtcgttttttcgttacgttaatggtcggtatatttattaataagttaaaatggttggcgacgttaagacggcgaggatgcgagattttatgattatcgataaatattaaattcggtttttgcgatagtattttttacgttgttagtagcgtaggatattcgcggaaggaaagaaaggggattttttagagtggnttgtcgcgantgtagatttatggnnattagttnnnnnngggatttttt

SEQ ID NO: 8086 - DNA, 869 bp, Artificial Sequence
  chemically treated genomic DNA (Homo sapiens) CpG-island No: 8086
  unsure (11..12, 14..15, 24..25, 39, 49, 795..796, 805, 808, 817)
aaaaaatcccnnnnnnaactaatnnccataaatctacantcgcgacaanccactctaaaaaatcccctttctttccttccgcgaatatcctacgctactaacaacgtaaaaaatactatcgcaaaaaccgaatttaatatttatcgataatcataaaatctcgcatcctcgccgtcttaacgtcgccaaccattttaacttattaataaatataccgaccattaacgtaacgaaaaaacgactctacgataaattcgaaccgctctccaacgaaccgaacgcgctaaccccactaataaataaaaacgaacaactaacctaaatctaacgcaacaaaacgcgctataacccgttatttatcgctaccgaccatcgaatcaacgtaaacaacgcgctaacgtaaatacaacgctacataaaaaactatcgtctaccgaaaccaacgcgctaaacgaacgcgataacctcgaaacgtccgacgttcgtacgctatacaacaaatcaaccctaattcaaataaaaccgaaactacctacgccatacccacgccaccgccaacgtacaacatcgatttttacgcttttaccaacatctaacgcgcttactcaacttcgacatataaaaaaatcacttcgttttcaacgataataaaccacgattccaaatcaccgctacctaactaaatatcttttaaaatatcgaccaaaaccgaaccaaaacgacctaaacaaacaacgtcgaatacttcaaccataatacgcgacaaaatactaacacgaatatctactattaatnnccttaacancantcgaacaanccactctaaaaatccccccgacgacgattatcccgatttaaacgtataaact

SEQ ID NO: 8087 - DNA, 869 bp, Artificial Sequence
  chemically treated genomic DNA (Homo sapiens) CpG-island No: 8087
  unsure (11..12, 14..15, 24..25, 39, 49, 795..796, 805, 808, 817)
gaggggttttnnnnnnaattgatnnttatgagtttgtantcgcgatagnttattttagaggatttttttttttttttttcgcgaatattttgcgttgttggtagcgtgggagatgttgtcgtaaaagtcggatttagtgtttgtcgatggttatgggatttcgtattttcgtcgttttggcgtcgttagttattttggtttattggtggatgtgtcgattattggcgtggcgaaaaaacggttttgcggtaaattcgaatcgttttttagcgaatcgggcgcgttggttttattgatggataaaggcgagtagttggtttgggtttggcgtagtaaagcgcgttgtaattcgttgtttatcgttatcggttatcgggttagcgtggatagcgcgttggcgtgggtataacgttgtatgaaaggttatcgtttgtcggagttaacgcgttgggcggacgcggtggtttcggaacgttcggcgttcgtgcgttatatagtaaattagttttaatttaggtaaagtcggaattgtttgcgttatatttacgttatcgttaacgtatagtatcggtttttgcgtttttgttagtatttggcgcgtttgtttaatttcggtatgtgggaaagttatttcgtttttaacggtggtgaattacggttttaggttatcgttgtttaattggatattttttgggatatcgattagaatcggattaggacgatttgagtaggtaacgtcgaatgttttagttatgatgcgcggtagggtattagtacggatatttattattgatnnttttgatantantcggatagnttattttgaggattttttcggcgacggttgtttcggtttaagcgtgtaggtt

SEQ ID NO: 8088 - DNA, 869 bp, Artificial Sequence
  chemically treated genomic DNA (Homo sapiens) CpG-island No: 8088
  unsure (53, 62, 65, 74..75, 821, 831, 845..846, 854..855, 857..)
aacctacacgcttaaaccgaaacaaccgtcgccgaaaaaatcctcaaaataanctatccgantantatcaaaannatcaataataaatatccgtactaataccctaccgcgcatcataactaaaacattcgacgttacctactcaaatcgtcctaatccgattctaatcgatatcccaaaaaatatccaattaaacaacgataacctaaaaccgtaattcaccaccgttaaaaacgaaataactttcccacataccgaaattaaacaaacgcgccaaatactaacaaaaacgcaaaaaccgatactatacgttaacgataacgtaaatataacgcaaacaattccgactttacctaaattaaaactaatttactatataacgcacgaacgccgaacgttccgaaaccaccgcgtccgcccaacgcgttaactccgacaaacgataacctttcatacaacgttatacccacgccaacgcgctatccacgctaacccgataaccgataacgataaacaacgaattacaacgcgctttactacgccaaacccaaaccaactactcgcctttatccatcaataaaaccaacgcgcccgattcgctaaaaaacgattcgaatttaccgcaaaaccgttttttcgccacgccaataatcgacacatccaccaataaaccaaaataactaacgacgccaaaacgacgaaaatacgaaatcccataaccatcgacaaacactaaatccgacttttacgacaacatctcccacgctaccaacaacgcaaaatattcgcgaaaaaaaaaaaaaaaaatcctctaaaataanctatcgcgantacaaactcataannatcaattnnnnnnaaaacccctc

SEQ ID NO: 8089 - DNA, 862 bp, Artificial Sequence
  chemically treated genomic DNA (Homo sapiens) CpG-island No: 8089
  unsure (697, 737)
cgttgcgggaggggttgtgggttagaagtgcgtcggatagtataattgataggatatttatacgttattatttatcggattttagtttaacgatatttttcggcggtcggggaggcgcggacgcggcggttgggttattttatatttgttgtttttcgtttgtcgtaatatggttatcgtttatttttttgtatttgttcgtttataattggcgtatattataacgcgtggatttttgtatttatttttattatatcgaaaagggtggttggtttatttacgaatacgattacgacgtttattgcgaattgtaatagcgggaatttcgtagtttcggcgtatgttggtatttttgtgtggagttataatcgacggagaaacgacgtatcgtttgatagttattcggacggaggggtgattatggttaggatcgacgttgtgtgcgcggacggaatttgcgtcgcggtgatttttcggcggtttgattaatcggacgtattgatatattttttttcgtatagattgttattcgtttgacggttatattttttattttgaattgttttgtcgtttcgatcgttgttttatattgcgtttttaaatgacggcgttagtattattttttatttattacggttttaggcgtttaatggcgttttttaaggcgtgaaaagttacgatttgtttatgtaaagtnttcgtattttcgtgatttgatatatggttgatttgaagtngcgggttttattaatttttggttcgatttttgtttttgggcgtgttttgtagatacggtaatgttttggcgatattttttgcgatcgagtcgtttaatagttgatttttgttaattgggtcggcg

SEQ ID NO: 8090 - DNA, 862 bp, Artificial Sequence
  chemically treated genomic DNA (Homo sapiens) CpG-island No: 8090
  unsure (126, 166)
cgccgacccaattaacaaaaatcaactattaaacgactcgatcgcaaaaaatatcgccaaaacattaccgtatctacaaaacacgcccaaaaacaaaaatcgaaccaaaaattaataaaacccgcnacttcaaatcaaccatatatcaaatcacgaaaatacgaanactttacataaacaaatcgtaacttttcacgccttaaaaaacgccattaaacgcctaaaaccgtaataaataaaaaataatactaacgccgtcatttaaaaacgcaatataaaacaacgatcgaaacgacaaaacaattcaaaataaaaaatataaccgtcaaacgaataacaatctatacgaaaaaaaatatatcaatacgtccgattaatcaaaccgccgaaaaatcaccgcgacgcaaattccgtccgcgcacacaacgtcgatcctaaccataatcacccctccgtccgaataactatcaaacgatacgtcgtttctccgtcgattataactccacacaaaaataccaacatacgccgaaactacgaaattcccgctattacaattcgcaataaacgtcgtaatcgtattcgtaaataaaccaaccacccttttcgatataataaaaataaatacaaaaatccacgcgttataatatacgccaattataaacgaacaaatacaaaaaaataaacgataaccatattacgacaaacgaaaaacaacaaatataaaataacccaaccgccgcgtccgcgcctccccgaccgccgaaaaatatcgttaaactaaaatccgataaataataacgtataaatatcctatcaattatactatccgacgcacttctaacccacaacccctcccgcaacg

SEQ ID NO: 8091 - DNA, 862 bp, Artificial Sequence
  chemically treated genomic DNA (Homo sapiens) CpG-island No: 8091
  unsure (126, 166)
cgtcggtttaattaataaaggttaattgttaggcggttcggtcgtaaagggtatcgttaaagtattatcgtgtttgtagggtacgtttaaaagtaaaagtcgggttaaggattaataaagttcgtnattttaggttaattatgtgttaggttacgggggtgcgggnattttgtataggtaggtcgtagttttttacgttttaaggggcgttattaaacgtttagggtcgtggtaagtgggggatagtgttggcgtcgttatttgggggcgtaatatggggtagcggtcggggcggtagggtagtttagggtggggggtgtaatcgttaggcgggtggtagtttgtacgagggaaagtgtgttagtgcgttcggttaattaggtcgtcggggagttatcgcggcgtagatttcgttcgcgtatatagcgtcggttttagttatagttattttttcgttcgggtgattgttaggcggtgcgtcgttttttcgtcgattgtggttttatatagggatgttagtatgcgtcggggttacggggttttcgttattatagttcgtagtaaacgtcgtagtcgtattcgtgggtaagttagttatttttttcggtatagtagggatgggtgtaggggtttacgcgttatagtgtgcgttaattgtaagcgggtaagtgtagaagagtaggcgatagttatattgcggtaagcgggaagtagtaagtataaggtagtttagtcgtcgcgttcgcgttttttcggtcgtcggggggtgtcgttgggttaaaattcggtaaataatagcgtataggtgttttgttaattatgttattcggcgtatttttagtttataatttttttcgtagcg

SEQ ID NO: 8092 - DNA, 862 bp, Artificial Sequence
  chemically treated genomic DNA (Homo sapiens) CpG-island No: 8092
  unsure (697, 737)
cgctacgaaaaaaattataaactaaaaatacgccgaataacataattaacaaaacacctatacgctattatttaccgaattttaacccaacgacaccccccgacgaccgaaaaaacgcgaacgcgacgactaaactaccttatacttactacttcccgcttaccgcaatataactatcgcctactcttctacacttacccgcttacaattaacgcacactataacgcgtaaacccctacacccatccctactataccgaaaaaaataactaacttacccacgaatacgactacgacgtttactacgaactataataacgaaaaccccgtaaccccgacgcatactaacatccctatataaaaccacaatcgacgaaaaaacgacgcaccgcctaacaatcacccgaacgaaaaaataactataactaaaaccgacgctatatacgcgaacgaaatctacgccgcgataactccccgacgacctaattaaccgaacgcactaacacactttccctcgtacaaactaccacccgcctaacgattacaccccccaccctaaactaccctaccgccccgaccgctaccccatattacgcccccaaataacgacgccaacactatcccccacttaccacgaccctaaacgtttaataacgccccttaaaacgtaaaaaactacgacctacctatacaaaatncccgcacccccgtaacctaacacataattaacctaaaatnacgaactttattaatccttaacccgacttttacttttaaacgtaccctacaaacacgataatactttaacgataccctttacgaccgaaccgcctaacaattaacctttattaattaaaccgacg

SEQ ID NO: 8093 - DNA, 559 bp, Artificial Sequence
  chemically treated genomic DNA (Homo sapiens) CpG-island No: 8093
agaggcgagacgcgtcgagtcgcggcggcgggattcgagatcgagaaagagaggaatatggaacggagacggcgcggcgttcggggtggcggacgcgtacgtaggaagacgagaataagaagataaagtagaagagcgggacgagcggacgaaaggtcgagaggtaaagcgtttagcgtatttagagaaaggtaggagggacggtgacggggataggagaggacggaagaggaggtggaggataggacgttgagagaattcgaggagtagagatgagaaagtaggcgaatagaacgaagacggtttacgagagagtaacgcgatagtaaagaagttagaaagtagggtaaaggacgagaatcgatcgagcgtaataacgagaaagaggaattacgacgagagagaggagggtagcggcgcgaggagagtagagagaacgtattaggtacgcgtagatagtatcgaagtaagcgacgtagggggggtcgaggataatcgttagaggataagagtaataataggggtaatagagtataaacgatgagtagttagagagagt

SEQ ID NO: 8094 - DNA, 559 bp, Artificial Sequence
  chemically treated genomic DNA (Homo sapiens) CpG-island No: 8094
actctctctaactactcatcgtttatactctattacccctattattactcttatcctctaacgattatcctcgaccccccctacgtcgcttacttcgatactatctacgcgtacctaatacgttctctctactctcctcgcgccgctaccctcctctctctcgtcgtaattcctctttctcgttattacgctcgatcgattctcgtcctttaccctactttctaacttctttactatcgcgttactctctcgtaaaccgtcttcgttctattcgcctactttctcatctctactcctcgaattctctcaacgtcctatcctccacctcctcttccgtcctctcctatccccgtcaccgtccctcctacctttctctaaatacgctaaacgctttacctctcgacctttcgtccgctcgtcccgctcttctactttatcttcttattctcgtcttcctacgtacgcgtccgccaccccgaacgccgcgccgtctccgttccatattcctctctttctcgatctcgaatcccgccgccgcgactcgacgcgtctcgcctct

SEQ ID NO: 8095 - DNA, 559 bp, Artificial Sequence
  chemically treated genomic DNA (Homo sapiens) CpG-island No: 8095
attttttttggttgtttatcgtttgtgttttgttgtttttgttgttgtttttattttttggcggttgttttcggttttttttgcgtcgtttgtttcggtgttgtttgcgcgtgtttggtgcgttttttttgtttttttcgcgtcgttgtttttttttttttcgtcgtggtttttttttttcgttgttgcgttcggtcggttttcgttttttgttttgttttttgatttttttgttgtcgcgttgttttttcgtgggtcgttttcgttttgttcgtttgtttttttatttttgtttttcgagtttttttagcgttttgttttttattttttttttcgtttttttttattttcgttatcgttttttttgtttttttttaggtgcgttggacgttttgtttttcggtttttcgttcgttcgtttcgtttttttgttttgtttttttgttttcgtttttttgcgtgcgcgttcgttatttcgagcgtcgcgtcgttttcgttttatgtttttttttttttcggtttcggatttcgtcgtcgcgattcgacgcgtttcgttttt

SEQ ID NO: 8096 - DNA, 559 bp, Artificial Sequence
  chemically treated genomic DNA (Homo sapiens) CpG-island No: 8096
aaaaacgaaacgcgtcgaatcgcgacgacgaaatccgaaaccgaaaaaaaaaaaaacataaaacgaaaacgacgcgacgctcgaaataacgaacgcgcacgcaaaaaaacgaaaacaaaaaaacaaaacaaaaaaacgaaacgaacgaacgaaaaaccgaaaaacaaaacgtccaacgcacctaaaaaaaaacaaaaaaaacgataacgaaaataaaaaaaaacgaaaaaaaaaataaaaaacaaaacgctaaaaaaactcgaaaaacaaaaataaaaaaacaaacgaacaaaacgaaaacgacccacgaaaaaacaacgcgacaacaaaaaaatcaaaaaacaaaacaaaaaacgaaaaccgaccgaacgcaacaacgaaaaaaaaaaaccacgacgaaaaaaaaaaaaacaacgacgcgaaaaaaacaaaaaaaacgcaccaaacacgcgcaaacaacaccgaaacaaacgacgcaaaaaaaaccgaaaacaaccgccaaaaaataaaaacaacaacaaaaacaacaaaacacaaacgataaacaaccaaaaaaaat

SEQ ID NO: 8097 - DNA, 668 bp, Artificial Sequence
  chemically treated genomic DNA (Homo sapiens) CpG-island No: 8097
tcgtttaggtttcgtggtagtattagattaagggcgaggttgcgttgttcgtttttagagtatataggtcggtagtttagtagttgtagcgtattagcgtatagtttttgtacgcggcggattttggtaaagggtagcgtatggcgttaggtttgggagacgttgagcgtatttttggacgaagttttgaaggtttcgcggcgcgtattaggtttagattcgtgggtgatgttatggatttaggtttcgagttgtggcgtgagattgagtttagtgaaggcgtagagcgtacggatttttgttagcggttttcgcgttaggttttcgaagcgtattaggcggtagcggtcgcgtagaaagggtggcggtttgagtgtggcggtttcggcgatgcgtacgtggttacggtatatttcgcgtattacgcgtaggtcggggtcggtttttatttacgtgtcgttggtgtttagtacgatgtcgttgttacgcgttagagttttggttgtttgttttcgggagcgtagtacggttcgcgggtcgcgtattaggtgtacgatgcgtaggttgagcgcggggtcgttgagtagcgggtagagtatttgtaggttgaagaagcgtatttttttgagtattacgtggttgtaggagcggtaggtttttcgggttag

SEQ ID NO: 8098 - DNA, 668 bp, Artificial Sequence
  chemically treated genomic DNA (Homo sapiens) CpG-island No: 8098
ctaacccgaaaaacctaccgctcctacaaccacgtaatactcaaaaaaatacgcttcttcaacctacaaatactctacccgctactcaacgaccccgcgctcaacctacgcatcgtacacctaatacgcgacccgcgaaccgtactacgctcccgaaaacaaacaaccaaaactctaacgcgtaacaacgacatcgtactaaacaccaacgacacgtaaataaaaaccgaccccgacctacgcgtaatacgcgaaatataccgtaaccacgtacgcatcgccgaaaccgccacactcaaaccgccaccctttctacgcgaccgctaccgcctaatacgcttcgaaaacctaacgcgaaaaccgctaacaaaaatccgtacgctctacgccttcactaaactcaatctcacgccacaactcgaaacctaaatccataacatcacccacgaatctaaacctaatacgcgccgcgaaaccttcaaaacttcgtccaaaaatacgctcaacgtctcccaaacctaacgccatacgctaccctttaccaaaatccgccgcgtacaaaaactatacgctaatacgctacaactactaaactaccgacctatatactctaaaaacgaacaacgcaacctcgcccttaatctaatactaccacgaaacctaaacga

SEQ ID NO: 8099 - DNA, 668 bp, Artificial Sequence
  chemically treated genomic DNA (Homo sapiens) CpG-island No: 8099
ttggttcgggaggtttgtcgtttttatagttacgtggtgtttaaggaggtgcgtttttttaatttgtaggtgttttattcgttgtttagcgatttcgcgtttaatttacgtatcgtgtatttggtgcgcgattcgcgggtcgtgttgcgttttcgggagtagatagttaaggttttggcgcgtgataacggtatcgtgttgggtattaacggtacgtgggtggaggtcgatttcggtttgcgcgtggtgcgcgaggtgtgtcgtagttacgtacgtatcgtcgaggtcgttatatttaagtcgttattttttttgcgcggtcgttatcgtttggtgcgtttcgaggatttggcgcgggagtcgttggtagaaattcgtgcgttttacgtttttattgggtttagttttacgttatagttcgaggtttggatttataatattatttacggatttggatttggtgcgcgtcgcgaagtttttaagatttcgtttaggaatgcgtttaacgttttttaggtttggcgttatgcgttgttttttgttaagattcgtcgcgtgtaggaattgtgcgttggtgcgttgtagttgttgggttatcggtttgtgtattttgaggacgagtagcgtaatttcgtttttgatttggtgttgttacgaggtttgaacgg

SEQ ID NO: 8100 - DNA, 668 bp, Artificial Sequence
  chemically treated genomic DNA (Homo sapiens) CpG-island No: 8100
ccgttcaaacctcgtaacaacaccaaatcaaaaacgaaattacgctactcgtcctcaaaatacacaaaccgataacccaacaactacaacgcaccaacgcacaattcctacacgcgacgaatcttaacaaaaaacaacgcataacgccaaacctaaaaaacgttaaacgcattcctaaacgaaatcttaaaaacttcgcgacgcgcaccaaatccaaatccgtaaataatattataaatccaaacctcgaactataacgtaaaactaaacccaataaaaacgtaaaacgcacgaatttctaccaacgactcccgcgccaaatcctcgaaacgcaccaaacgataacgaccgcgcaaaaaaaataacgacttaaatataacgacctcgacgatacgtacgtaactacgacacacctcgcgcaccacgcgcaaaccgaaatcgacctccacccacgtaccgttaatacccaacacgataccgttatcacgcgccaaaaccttaactatctactcccgaaaacgcaacacgacccgcgaatcgcgcaccaaatacacgatacgtaaattaaacgcgaaatcgctaaacaacgaataaaacacctacaaattaaaaaaacgcacctccttaaacaccacgtaactataaaaacgacaaacctcccgaaccaa

SEQ ID NO: 8101 - DNA, 524 bp, Artificial Sequence
  chemically treated genomic DNA (Homo sapiens) CpG-island No: 8101
cgcgcgtatagtggtttgtatacggtttcgttgttgatggcgtttcggggaaaggtattgtaggcgggtggcgagtatagtgtacggtttacggtttattggaagaggtcggataggttgcggcgttaaggtagataggtattaaatacgtttatgtcgtataggaagacggagcgtattaggtcgcgtatagttatgtgtagcgttgcggcgttgttttgcgatagggtggtttatacgtgttacgcgggttttattaggtagaagacgtcggggtgttggttgaagagttggtttacgaaggacgagttcgagcgttacgaggatagtattagtatatgtacgcgcgtttcgtcgtttgttggggacgagggttttggtcgggaaattagaaagaggaggaggaaggtttgcgttaggaggagcgcggttattgttgtgttggagacgcgcggtagttatatgttgattgttgggggttttagggaggagagcgtagcggttaggggttgtagtttgtacgt

SEQ ID NO: 8102 - DNA, 524 bp, Artificial Sequence
  chemically treated genomic DNA (Homo sapiens) CpG-island No: 8102
acgtacaaactacaacccctaaccgctacgctctcctccctaaaacccccaacaatcaacatataactaccgcgcgtctccaacacaacaataaccgcgctcctcctaacgcaaaccttcctcctcctctttctaatttcccgaccaaaaccctcgtccccaacaaacgacgaaacgcgcgtacatatactaatactatcctcgtaacgctcgaactcgtccttcgtaaaccaactcttcaaccaacaccccgacgtcttctacctaataaaacccgcgtaacacgtataaaccaccctatcgcaaaacaacgccgcaacgctacacataactatacgcgacctaatacgctccgtcttcctatacgacataaacgtatttaatacctatctaccttaacgccgcaacctatccgacctcttccaataaaccgtaaaccgtacactatactcgccacccgcctacaatacctttccccgaaacgccatcaacaacgaaaccgtatacaaaccactatacgcgcg

SEQ ID NO: 8103 - DNA, 524 bp, Artificial Sequence
  chemically treated genomic DNA (Homo sapiens) CpG-island No: 8103
gcgtgtaggttgtagtttttaatcgttgcgtttttttttttaaggtttttagtagttagtatgtggttgtcgcgcgtttttagtatagtagtgatcgcgttttttttggcgtagatttttttttttttttttttggtttttcggttagggttttcgtttttagtaggcggcgaggcgcgcgtgtatgtgttggtgttgttttcgtggcgttcgggttcgtttttcgtgggttaattttttaattagtatttcgacgttttttatttaatggagttcgcgtggtacgtgtggattattttgtcgtagggtagcgtcgtaacgttgtatatggttgtgcgcgatttggtgcgtttcgtttttttgtgcgatatggacgtgtttgatgtttatttgttttggcgtcgtaatttgttcgattttttttagtgggtcgtgagtcgtgtattgtgttcgttattcgtttgtagtgttttttttcgaggcgttattagtagcgaggtcgtgtgtaagttattgtgcgcgcg

SEQ ID NO: 8104 - DNA, 524 bp, Artificial Sequence
  chemically treated genomic DNA (Homo sapiens) CpG-island No: 8104
cgcgcgcacaataacttacacacgacctcgctactaataacgcctcgaaaaaaaacactacaaacgaataacgaacacaatacacgactcacgacccactaaaaaaaatcgaacaaattacgacgccaaaacaaataaacatcaaacacgtccatatcgcacaaaaaaacgaaacgcaccaaatcgcgcacaaccatatacaacgttacgacgctaccctacgacaaaataatccacacgtaccacgcgaactccattaaataaaaaacgtcgaaatactaattaaaaaattaacccacgaaaaacgaacccgaacgccacgaaaacaacaccaacacatacacgcgcgcctcgccgcctactaaaaacgaaaaccctaaccgaaaaaccaaaaaaaaaaaaaaaaaaatctacgccaaaaaaaacgcgatcactactatactaaaaacgcgcgacaaccacatactaactactaaaaaccttaaaaaaaaaaacgcaacgattaaaaactacaacctacacgc

SEQ ID NO: 8105 - DNA, 686 bp, Artificial Sequence
  chemically treated genomic DNA (Homo sapiens) CpG-island No: 8105
agcggtgtcgttcggggttgatcgacgagcgtttttagcgataaggggtcgtgtttatgtgtcggttttcgcgttgtaagagggggcggcggtcggagttgtttaacgggaggggagtatagaatcgttacgcgtatacgtttcgggtcggagcggtcgaggatgaggggtttgagggagcggacgttcgagaataggagtttttttggattatttgggttatagggtagacgttcgcgggggtagagcgcgttttacgtgaggcgtggggcggggtaattcgtttttcgttttaggcggaatcgtttattcgacggtacgtagttttcgttttttttcgacgtagagaagttttcggagtcgaatttttttatgttgttgtcgttcgacgttggttaaatttataagatcgtagtagtcgtttttaacggtaaagttttagggagagattatagagtttcggcggcggcgacggtagttagggcggttttcgatagcgttttgtatatgcgtagagagtattacgtggttgttttacgatattttcggtcgatgttttcgggttggcgtttttgaagttttcgttgggagttcgaattcgttcggacgcggtgtatgttggaatttgtagttttcggcgttgtttcgtcgttttaatataataaatttgtttaaataaaattata

SEQ ID NO: 8106 - DNA, 686 bp, Artificial Sequence
  chemically treated genomic DNA (Homo sapiens) CpG-island No: 8106
tataattttatttaaacaaatttattatattaaaacgacgaaacaacgccgaaaactacaaattccaacatacaccgcgtccgaacgaattcgaactcccaacgaaaacttcaaaaacgccaacccgaaaacatcgaccgaaaatatcgtaaaacaaccacgtaatactctctacgcatatacaaaacgctatcgaaaaccgccctaactaccgtcgccgccgccgaaactctataatctctccctaaaactttaccgttaaaaacgactactacgatcttataaatttaaccaacgtcgaacgacaacaacataaaaaaattcgactccgaaaacttctctacgtcgaaaaaaaacgaaaactacgtaccgtcgaataaacgattccgcctaaaacgaaaaacgaattaccccgccccacgcctcacgtaaaacgcgctctacccccgcgaacgtctaccctataacccaaataatccaaaaaaactcctattctcgaacgtccgctccctcaaacccctcatcctcgaccgctccgacccgaaacgtatacgcgtaacgattctatactcccctcccgttaaacaactccgaccgccgccccctcttacaacgcgaaaaccgacacataaacacgaccccttatcgctaaaaacgctcgtcgatcaaccccgaacgacaccgct

SEQ ID NO: 8107 - DNA, 686 bp, Artificial Sequence
  chemically treated genomic DNA (Homo sapiens) CpG-island No: 8107
tgtaattttatttaagtaggtttattatattaaggcggcgaggtagcgtcgaagattataagttttagtatgtatcgcgttcgggcgggttcgggtttttagcgagggttttagggacgttagttcggaggtatcggtcggaagtgtcgtagggtaattacgtagtattttttgcgtatgtgtaaagcgttgtcgggggtcgttttagttgtcgtcgtcgtcgtcggggttttatggtttttttttagagttttgtcgttggaggcggttgttgcggttttgtgagtttgattagcgtcgagcggtagtaatatggaggaattcgatttcgaagatttttttacgtcggaggaggacgaggattacgtgtcgtcgggtgagcgatttcgtttgaggcgagaagcgaattgtttcgttttacgttttacgtgaggcgcgttttgttttcgcgggcgtttgttttgtggtttaggtggtttaggggggtttttgttttcgaacgttcgtttttttaggttttttattttcggtcgtttcggttcgaggcgtgtgcgcgtggcggttttgtgtttttttttcgttgggtagtttcggtcgtcgtttttttttgtagcgcgggaatcggtatatggatacggttttttgtcgttagggacgttcgtcggttagtttcgaacgatatcgtt

SEQ ID NO: 8108 - DNA, 686 bp, Artificial Sequence
  chemically treated genomic DNA (Homo sapiens) CpG-island No: 8108
aacgatatcgttcgaaactaaccgacgaacgtccctaacgacaaaaaaccgtatccatataccgattcccgcgctacaaaaaaaaacgacgaccgaaactacccaacgaaaaaaaaacacaaaaccgccacgcgcacacgcctcgaaccgaaacgaccgaaaataaaaaacctaaaaaaacgaacgttcgaaaacaaaaacccccctaaaccacctaaaccacaaaacaaacgcccgcgaaaacaaaacgcgcctcacgtaaaacgtaaaacgaaacaattcgcttctcgcctcaaacgaaatcgctcacccgacgacacgtaatcctcgtcctcctccgacgtaaaaaaatcttcgaaatcgaattcctccatattactaccgctcgacgctaatcaaactcacaaaaccgcaacaaccgcctccaacgacaaaactctaaaaaaaaaccataaaaccccgacgacgacgacgacaactaaaacgacccccgacaacgctttacacatacgcaaaaaatactacgtaattaccctacgacacttccgaccgatacctccgaactaacgtccctaaaaccctcgctaaaaacccgaacccgcccgaacgcgatacatactaaaacttataatcttcgacgctacctcgccgccttaatataataaacctacttaaataaaattaca

SEQ ID NO: 8109 - DNA, 527 bp, Artificial Sequence
  chemically treated genomic DNA (Homo sapiens) CpG-island No: 8109
tgcggtgttttacgtatttatttttgtattagcgtcgtaattagtaatattattattagttcggttattagacgaatcgtcgtaaaattttagtcgaggataaagtttataaatattagcgtcgtcgggtttaatatcggattgtttatttagaatgttagcgtatcgtttatcgatatttgttggcgacgtattttcgtcgcgatcggagtcgtatagtaggtatatattatgttcggtaacgaaaatagcgtttttagtagcgtgtcgcgaaagcgcgattgtttaagcgtacgtaataattagttacgcgggtattagtattttgaattaacgaatcgaggattatttttagtatcgtcgttttttatatcgcgaggaaatagattatcgcgtaatttaacgtcgtttgtttatgggttagtattcgtttgcgtaagggatagatttatcgatattgtgggtttcggtagtagtaaacgttttgtcgtagtaaggtttttattttatatattagagatcggtaa

SEQ ID NO: 8110 - DNA, 527 bp, Artificial Sequence
  chemically treated genomic DNA (Homo sapiens) CpG-island No: 8110
ttaccgatctctaatatataaaataaaaaccttactacgacaaaacgtttactactaccgaaacccacaatatcgataaatctatcccttacgcaaacgaatactaacccataaacaaacgacgttaaattacgcgataatctatttcctcgcgatataaaaaacgacgatactaaaaataatcctcgattcgttaattcaaaatactaatacccgcgtaactaattattacgtacgcttaaacaatcgcgctttcgcgacacgctactaaaaacgctattttcgttaccgaacataatatatacctactatacgactccgatcgcgacgaaaatacgtcgccaacaaatatcgataaacgatacgctaacattctaaataaacaatccgatattaaacccgacgacgctaatatttataaactttatcctcgactaaaattttacgacgattcgtctaataaccgaactaataataatattactaattacgacgctaatacaaaaataaatacgtaaaacaccgca

SEQ ID NO: 8111 - DNA, 527 bp, Artificial Sequence
  chemically treated genomic DNA (Homo sapiens) CpG-island No: 8111
ttgtcggtttttggtatgtgaaatgggaattttattacggtaaagcgtttattgttgtcgaaatttatagtatcggtaaatttattttttgcgtaggcggatgttaatttatgggtaggcggcgttggattacgcgatgatttattttttcgcggtatggaaagcggcggtgttgggggtgattttcggttcgttgatttagggtgttgatgttcgcgtgattggttgttgcgtacgtttgggtaatcgcgttttcgcggtacgttgttgggaacgttgttttcgttgtcgggtatgatgtgtatttgttgtgcggtttcggtcgcggcgggaatgcgtcgttaataggtgtcgatgggcggtgcgttggtattttggatgggtaattcggtgttaaattcggcgacgttggtgtttatgggttttgttttcggttggggttttgcggcgattcgtttggtggtcgggttggtgatggtgttgttgattgcgacgttggtgtaaaaatgggtgcgtgaaatatcgta

SEQ ID NO: 8112 - DNA, 527 bp, Artificial Sequence
  chemically treated genomic DNA (Homo sapiens) CpG-island No: 8112
tacgatatttcacgcacccatttttacaccaacgtcgcaatcaacaacaccatcaccaacccgaccaccaaacgaatcgccgcaaaaccccaaccgaaaacaaaacccataaacaccaacgtcgccgaatttaacaccgaattacccatccaaaataccaacgcaccgcccatcgacacctattaacgacgcattcccgccgcgaccgaaaccgcacaacaaatacacatcatacccgacaacgaaaacaacgttcccaacaacgtaccgcgaaaacgcgattacccaaacgtacgcaacaaccaatcacgcgaacatcaacaccctaaatcaacgaaccgaaaatcacccccaacaccgccgctttccataccgcgaaaaaataaatcatcgcgtaatccaacgccgcctacccataaattaacatccgcctacgcaaaaaataaatttaccgatactataaatttcgacaacaataaacgctttaccgtaataaaattcccatttcacataccaaaaaccgacaa

SEQ ID NO: 8113 - DNA, 634 bp, Artificial Sequence
  chemically treated genomic DNA (Homo sapiens) CpG-island No: 8113
  unsure (427)
gttcgtagcgacgtagttgttcgatttgtcggtttaggtcgttgattttcgttatggtttattttcggcgcgggttagagtcggggtcgcgtttttttcgtacgtataggggttttttgggaaaggttaagacgagttcgcggattagtgttcgttcggggttcggagcggataattcgattttagagtcggttcggtttttttattttcgtttttttttatattggttttaggatttttcggcgtttaacggtttggtcgtattttcgttaattttcgtcgaatttcgcggtttcgcgttaaggacggtgatttagaggagtttcgtattattatcgtcgttgcgatttcggtttcggtttttcggttttttgttttttttttttatttcgttttcgatcgtcgtcgtcgtcgtcgtcgtcgtttntattttcggtttcgtcgcggaagtaaaggaggttagtttcgtcgcgcgtcggatgtggcgttatatacgttttttttttttcgtagcgatttttgattatttttttagtcgagatcgggaaggaggtggaggaattcggtggcggttagtggtagttttgtgggttttgtcgttgggcgatgtggaggttattagaaattttagatt

SEQ ID NO: 8114 - DNA, 634 bp, Artificial Sequence
  chemically treated genomic DNA (Homo sapiens) CpG-island No: 8114
  unsure (208)
aatctaaaatttctaataacctccacatcgcccaacgacaaaacccacaaaactaccactaaccgccaccgaattcctccacctccttcccgatctcgactaaaaaaataatcaaaaatcgctacgaaaaaaaaaaaacgtatataacgccacatccgacgcgcgacgaaactaacctcctttacttccgcgacgaaaccgaaaatanaaacgacgacgacgacgacgacgacgatcgaaaacgaaataaaaaaaaaaaacaaaaaaccgaaaaaccgaaaccgaaatcgcaacgacgataataatacgaaactcctctaaatcaccgtccttaacgcgaaaccgcgaaattcgacgaaaattaacgaaaatacgaccaaaccgttaaacgccgaaaaatcctaaaaccaatataaaaaaaaacgaaaataaaaaaaccgaaccgactctaaaatcgaattatccgctccgaaccccgaacgaacactaatccgcgaactcgtcttaacctttcccaaaaaacccctatacgtacgaaaaaaacgcgaccccgactctaacccgcgccgaaaataaaccataacgaaaatcaacgacctaaaccgacaaatcgaacaactacgtcgctacgaac

SEQ ID NO: 8115 - DNA, 634 bp, Artificial Sequence
  chemically treated genomic DNA (Homo sapiens) CpG-island No: 8115
  unsure (208)
ggtttagggtttttaatagtttttatatcgtttagcggtagagtttataaaattgttattggtcgttatcgggtttttttatttttttttcgatttcggttggagaagtggttaggggtcgttgcgaaaggagaggagcgtgtatgacgttatattcggcgcgcggcggaattggttttttttgttttcgcggcggggtcggaagtangagcggcggcggcggcggcggcggcggtcgaaagcggagtgaaagaaggaggtagggagtcggagagtcggaatcggagtcgtagcggcggtaatagtgcgagatttttttaagttatcgtttttagcgcgggatcgcggggttcgacgggagttagcgggggtgcggttaggtcgttggacgtcggggggttttggggttaatgtgaggggaggcgggggtgggggagtcgggtcggttttagaatcgagttgttcgtttcgagtttcggacggatattgattcgcgggttcgttttggttttttttaggagatttttgtgcgtgcggagggggcgcggtttcgattttgattcgcgtcgggggtgggttatggcggagattagcgatttggatcggtagatcgagtagttgcgtcgttgcgagt

SEQ ID NO: 8116 - DNA, 634 bp, Artificial Sequence
  chemically treated genomic DNA (Homo sapiens) CpG-island No: 8116
  unsure (427)
actcgcaacgacgcaactactcgatctaccgatccaaatcgctaatctccgccataacccacccccgacgcgaatcaaaatcgaaaccgcgccccctccgcacgcacaaaaatctcctaaaaaaaaccaaaacgaacccgcgaatcaatatccgtccgaaactcgaaacgaacaactcgattctaaaaccgacccgactcccccacccccgcctcccctcacattaaccccaaaaccccccgacgtccaacgacctaaccgcacccccgctaactcccgtcgaaccccgcgatcccgcgctaaaaacgataacttaaaaaaatctcgcactattaccgccgctacgactccgattccgactctccgactccctacctccttctttcactccgctttcgaccgccgccgccgccgccgccgccgctcntacttccgaccccgccgcgaaaacaaaaaaaaccaattccgccgcgcgccgaatataacgtcatacacgctcctctcctttcgcaacgacccctaaccacttctccaaccgaaatcgaaaaaaaaataaaaaaacccgataacgaccaataacaattttataaactctaccgctaaacgatataaaaactattaaaaaccctaaacc

SEQ ID NO: 8117 - DNA, 533 bp, Artificial Sequence
  chemically treated genomic DNA (Homo sapiens) CpG-island No: 8117
agtcgtgcgttgggagtattggcgtgatattatagagtagttgcgttttggcgaatggtagtacgggtgtttagttagcgtttggcgatattattcgtgtcggatcgttattagcgggtttggtatttgtagtttaggttatcgttattgagatatttttgttaggcggttgttgtaaataagtttaatatcgtcgtttttttagcgcggatagtttggcgttttaggatatacgagttattttgatttcgttaaacgcgacggcgcggtagtttattggtttgtaaattgagttatgtgcgtcgttgttatagtgtataaatacgcggtatgttttacgggcgtagtagttaacgtttagattgggttgtggataacgggagtgttaacgttttttgatatgtcgttagatgtaggttttttgggagcgtaggtcgacgttgggtcgattattttaagggggttgtatattaatgatagatttttgattattaaaggtgtaagtttttcgatatgtttgaattgaatttgag

SEQ ID NO: 8118 - DNA, 533 bp, Artificial Sequence
  chemically treated genomic DNA (Homo sapiens) CpG-island No: 8118
ctcaaattcaattcaaacatatcgaaaaacttacacctttaataatcaaaaatctatcattaatatacaacccccttaaaataatcgacccaacgtcgacctacgctcccaaaaaacctacatctaacgacatatcaaaaaacgttaacactcccgttatccacaacccaatctaaacgttaactactacgcccgtaaaacataccgcgtatttatacactataacaacgacgcacataactcaatttacaaaccaataaactaccgcgccgtcgcgtttaacgaaatcaaaataactcgtatatcctaaaacgccaaactatccgcgctaaaaaaacgacgatattaaacttatttacaacaaccgcctaacaaaaatatctcaataacgataacctaaactacaaataccaaacccgctaataacgatccgacacgaataatatcgccaaacgctaactaaacacccgtactaccattcgccaaaacgcaactactctataatatcacgccaatactcccaacgcacgact

SEQ ID NO: 8119 - DNA, 533 bp, Artificial Sequence
  chemically treated genomic DNA (Homo sapiens) CpG-island No: 8119
tttaggtttaatttaggtatatcgggagatttgtatttttagtagttaagggtttgttattggtgtgtaatttttttagaatagtcgatttaacgtcggtttacgtttttagggagtttatatttaacgatatattagaggacgttagtattttcgttgtttatagtttagtttgagcgttaattattacgttcgtggggtatatcgcgtgtttatgtattgtaataacggcgtatatggtttagtttatagattagtggattatcgcgtcgtcgcgtttggcggaattaaagtggttcgtgtattttggggcgttagattattcgcgttggaagggcgacgatgttaagtttatttatagtaatcgtttgatagaaatgttttaatgacggtggtttgggttataggtattaggttcgttgatggcggttcggtacggatgatgtcgttaaacgttgattgggtattcgtattgttattcgttagaacgtagttattttgtggtattacgttaatatttttaacgtacggtt

SEQ ID NO: 8120 - DNA, 533 bp, Artificial Sequence
  chemically treated genomic DNA (Homo sapiens) CpG-island No: 8120
aaccgtacgttaaaaatattaacgtaataccacaaaataactacgttctaacgaataacaatacgaatacccaatcaacgtttaacgacatcatccgtaccgaaccgccatcaacgaacctaatacctataacccaaaccaccgtcattaaaacatttctatcaaacgattactataaataaacttaacatcgtcgcccttccaacgcgaataatctaacgccccaaaatacacgaaccactttaattccgccaaacgcgacgacgcgataatccactaatctataaactaaaccatatacgccgttattacaatacataaacacgcgatataccccacgaacgtaataattaacgctcaaactaaactataaacaacgaaaatactaacgtcctctaatatatcgttaaatataaactccctaaaaacgtaaaccgacgttaaatcgactattctaaaaaaattacacaccaataacaaacccttaactactaaaaatacaaatctcccgatatacctaaattaaacctaaa

SEQ ID NO: 8121 - DNA, 543 bp, Artificial Sequence
  chemically treated genomic DNA (Homo sapiens) CpG-island No: 8121
cgttaggtaggtcgataattaagtgggaatatattttagttcgcgttgacgtgttagttgggttgtacgttgataataggtaaaatatggtcgcggttgatgcgatgtagtgttttgtcgtgggcggtttgtagtttagttttagttatatttcgtaattttggtttttatattcgtaaagtagtttagtatcgtattcggtacgtagttcgggcgggtatttatatataaacgataatattggtttggtttatcgtttgttgatatatagaacgtagtatcgaattttcgtaaaggtgttggtatacgtttgaaagtaggttagatagcgttagcgcggttaattaaattcgtttggtgcgttagttgttcggtaatggacgatgttgttgcgttttatcggtaaacgaggtaatattatagaatgtgagttattacgttcgatggtatcgttacggttagggtagttaaaatcgtttgtagcgttagtttatgtattttttgtttataacgacgggtgagattatattaaatatattgatt

SEQ ID NO: 8122 - DNA, 543 bp, Artificial Sequence
  chemically treated genomic DNA (Homo sapiens) CpG-island No: 8122
aatcaatatatttaatataatctcacccgtcgttataaacaaaaaatacataaactaacgctacaaacgattttaactaccctaaccgtaacgataccatcgaacgtaataactcacattctataatattacctcgtttaccgataaaacgcaacaacatcgtccattaccgaacaactaacgcaccaaacgaatttaattaaccgcgctaacgctatctaacctactttcaaacgtataccaacacctttacgaaaattcgatactacgttctatatatcaacaaacgataaaccaaaccaatattatcgtttatatataaatacccgcccgaactacgtaccgaatacgatactaaactactttacgaatataaaaaccaaaattacgaaatataactaaaactaaactacaaaccgcccacgacaaaacactacatcgcatcaaccgcgaccatattttacctattatcaacgtacaacccaactaacacgtcaacgcgaactaaaatatattcccacttaattatcgacctacctaacg

SEQ ID NO: 8123 - DNA, 543 bp, Artificial Sequence
  chemically treated genomic DNA (Homo sapiens) CpG-island No: 8123
agttaatatgtttggtgtgattttattcgtcgttatgggtaaaaggtgtataagttgacgttgtaggcggttttagttgttttaatcgtgacggtattatcgggcgtggtggtttatattttgtaatgttgtttcgtttgtcgatgaagcgtagtagtatcgtttattgtcgagtaattggcgtattaggcgaatttagttaatcgcgttaacgttatttggtttatttttaggcgtatattagtatttttgcggaagttcggtgttgcgttttatgtattagtaggcggtgagttaggttaatattgtcgtttgtgtgtgggtattcgttcggattgcgtgtcggatgcggtgttggattgttttgcgaatataaggattagggttacgaagtgtggttggagttgggttataaatcgtttacgataaaatattgtatcgtattaatcgcggttatattttgtttgttattagcgtataatttagttggtacgttagcgcgggttaaggtgtgtttttatttaattgtcggtttgtttggcg

SEQ ID NO: 8124 - DNA, 543 bp, Artificial Sequence
  chemically treated genomic DNA (Homo sapiens) CpG-island No: 8124
cgccaaacaaaccgacaattaaataaaaacacaccttaacccgcgctaacgtaccaactaaattatacgctaataacaaacaaaatataaccgcgattaatacgatacaatattttatcgtaaacgatttataacccaactccaaccacacttcgtaaccctaatccttatattcgcaaaacaatccaacaccgcatccgacacgcaatccgaacgaatacccacacacaaacgacaatattaacctaactcaccgcctactaatacataaaacgcaacaccgaacttccgcaaaaatactaatatacgcctaaaaataaaccaaataacgttaacgcgattaactaaattcgcctaatacgccaattactcgacaataaacgatactactacgcttcatcgacaaacgaaacaacattacaaaatataaaccaccacgcccgataataccgtcacgattaaaacaactaaaaccgcctacaacgtcaacttatacaccttttacccataacgacgaataaaatcacaccaaacatattaact

SEQ ID NO: 8125 - DNA, 608 bp, Artificial Sequence
  chemically treated genomic DNA (Homo sapiens) CpG-island No: 8125
  unsure (108, 327, 344, 396, 430, 470)
gtggaagtttgtttgatttagcgttgatttttgagttaggcgcgttatttcgtttaaagggaagagttacgattcgttggatatcgatgaaattcgttggtttttagncgggtgtaaagttatttaacgtggtgttgacggacgtttgtaggttattttgtaggcgttgaaaatgaattgggcgatttcgtgttgtatatggatgggttgtgttgatgatttttttttatgacgttggtcgttggtagtggcgttattggggaaagggagttttatacgcgtatgtaatgttatttggcgatgtcgtaggataaggtgagtggtatngatagttagcgattatngttgatcgagtttttttacgggtttcgtatttagttataagtagcggtacgnatgacgcgtagtaagagtcgcgtttaagtttttngagtaagcgttatacgtttgggttattgttgttgtatagntatttcgtttcgtttagacgcgcgtcgttgttattggtattcgggtgtaaacgttgtttattggcggtagtgtgttatcgttattaatttaaaatttagcgtcgatgggcgcgattttatttattttttttttaaagg

SEQ ID NO: 8126 - DNA, 608 bp, Artificial Sequence
  chemically treated genomic DNA (Homo sapiens) CpG-island No: 8126
  unsure (139, 179, 213, 265, 282, 501)
cctttaaaaaaaaaataaataaaatcgcgcccatcgacgctaaattttaaattaataacgataacacactaccgccaataaacaacgtttacacccgaataccaataacaacgacgcgcgtctaaacgaaacgaaatanctatacaacaacaataacccaaacgtataacgcttactcnaaaaacttaaacgcgactcttactacgcgtcatncgtaccgctacttataactaaatacgaaacccgtaaaaaaactcgatcaacnataatcgctaactatcnataccactcaccttatcctacgacatcgccaaataacattacatacgcgtataaaactccctttccccaataacgccactaccaacgaccaacgtcataaaaaaaaatcatcaacacaacccatccatatacaacacgaaatcgcccaattcattttcaacgcctacaaaataacctacaaacgtccgtcaacaccacgttaaataactttacacccgnctaaaaaccaacgaatttcatcgatatccaacgaatcgtaactcttccctttaaacgaaataacgcgcctaactcaaaaatcaacgctaaatcaaacaaacttccac

SEQ ID NO: 8127 - DNA, 608 bp, Artificial Sequence
  chemically treated genomic DNA (Homo sapiens) CpG-island No: 8127
  unsure (139, 179, 213, 265, 282, 501)
tttttaaagaggaaataggtaggatcgcgtttatcgacgttaaattttaggttgatggcggtaatatattgtcgttagtgaatagcgtttgtattcgggtattagtgatagcggcgcgcgtttaaacggagcggaatgnttgtgtagtaatagtagtttagacgtatggcgtttgtttngagaatttaagcgcggtttttgttacgcgttatncgtatcgttatttgtaattaggtacgaaattcgtggagagattcggttagtngtaatcgttgattgttnatgttatttattttgttttgcgatatcgttaggtggtattgtatacgcgtgtaaaattttttttttttagtagcgttattgttagcggttagcgttatgggagaaaattattagtatagtttatttatatgtagtacgaaatcgtttagtttatttttagcgtttgtaagatggtttgtaaacgttcgttaatattacgttgggtgattttatattcgnttaaaggttagcggattttatcgatgtttagcgaatcgtgatttttttttttgaacgaagtaacgcgtttggtttaaaggttagcgttgggttagatagatttttat

SEQ ID NO: 8128 - DNA, 608 bp, Artificial Sequence
  chemically treated genomic DNA (Homo sapiens) CpG-island No: 8128
  unsure (108, 327, 344, 396, 430, 470)
ataaaaatctatctaacccaacgctaacctttaaaccaaacgcgttacttcgttcaaaaaaaaaaatcacgattcgctaaacatcgataaaatccgctaacctttaancgaatataaaatcacccaacgtaatattaacgaacgtttacaaaccatcttacaaacgctaaaaataaactaaacgatttcgtactacatataaataaactatactaataattttctcccataacgctaaccgctaacaataacgctactaaaaaaaaaaaattttacacgcgtatacaataccacctaacgatatcgcaaaacaaaataaataacatnaacaatcaacgattacnactaaccgaatctctccacgaatttcgtacctaattacaaataacgatacgnataacgcgtaacaaaaaccgcgcttaaattctcnaaacaaacgccatacgtctaaactactattactacacaancattccgctccgtttaaacgcgcgccgctatcactaatacccgaatacaaacgctattcactaacgacaatatattaccgccatcaacctaaaatttaacgtcgataaacgcgatcctacctatttcctctttaaaaa

SEQ ID NO: 8129 - DNA, 507 bp, Artificial Sequence
  chemically treated genomic DNA (Homo sapiens) CpG-island No: 8129
  unsure (178, 182)
tggcgttcggtcgaggcggtgtatttgacgttcgggagaagtagagcgcgttttttttggcgtggatttgggattttcgcgggttttaggggcggtacgttttggggtcggtattgggatttggttgcgaggtagttcggcggttaggaaggcgtcggcggcggcgggagggtgttangtantttcggttggtaattgttgttttagttttgtaatcgagcgtttttttttatcgcggtttgggttaatgatgggttttgtcggcgtgaacgtcgtgtttattatatttttattagtttaggggaggggtgcgcgtttgagcgttcggggtttaggaacgttagagttgtaacgtcgaaaattttttaggttgggaaaaggttttggggttttttatatacgtttttttcgtattcgtttggtttcgatttggttaagggcggattcggtttgtttttaggttggggggtttcggggtatcggggtgtattcggggttcgttttttt

SEQ ID NO: 8130 - DNA, 507 bp, Artificial Sequence
  chemically treated genomic DNA (Homo sapiens) CpG-island No: 8130
  unsure (326, 330)
aaaaaaacgaaccccgaatacaccccgataccccgaaaccccccaacctaaaaacaaaccgaatccgcccttaaccaaatcgaaaccaaacgaatacgaaaaaaacgtatataaaaaaccccaaaaccttttcccaacctaaaaaattttcgacgttacaactctaacgttcctaaaccccgaacgctcaaacgcgcacccctcccctaaactaataaaaatataataaacacgacgttcacgccgacaaaacccatcattaacccaaaccgcgataaaaaaaaacgctcgattacaaaactaaaacaacaattaccaaccgaaantacntaacaccctcccgccgccgccgacgccttcctaaccgccgaactacctcgcaaccaaatcccaataccgaccccaaaacgtaccgcccctaaaacccgcgaaaatcccaaatccacgccaaaaaaaacgcgctctacttctcccgaacgtcaaatacaccgcctcgaccgaacgcca

SEQ ID NO: 8131 - DNA, 507 bp, Artificial Sequence
  chemically treated genomic DNA (Homo sapiens) CpG-island No: 8131
  unsure (326, 330)
aagggggcgggtttcgggtgtatttcggtgtttcgaggttttttagtttgaaggtaggtcgaattcgtttttgattaagtcgaggttaagcgagtgcgaaaaaggcgtgtatgaggggttttaagatttttttttagtttgaaaagttttcggcgttgtagttttggcgtttttggatttcgggcgtttaggcgcgtattttttttttgggttggtgaaggtataataaatacggcgtttacgtcggtaggatttattattagtttaaatcgcggtggaaaggagcgttcggttgtagagttagaatagtagttattagtcggggntgtntggtattttttcgtcgtcgtcggcgtttttttggtcgtcgagttgtttcgtagttaggttttaatgtcgattttaaggcgtgtcgtttttggaattcgcgggggttttaggtttacgttaaaagaaacgcgttttgtttttttcgggcgttagatgtatcgtttcggtcggacgtta

SEQ ID NO: 8132 - DNA, 507 bp, Artificial Sequence
  chemically treated genomic DNA (Homo sapiens) CpG-island No: 8132
  unsure (178, 182)
taacgtccgaccgaaacgatacatctaacgcccgaaaaaaacaaaacgcgtttcttttaacgtaaacctaaaacccccgcgaattccaaaaacgacacgccttaaaatcgacattaaaacctaactacgaaacaactcgacgaccaaaaaaacgccgacgacgacgaaaaaataccanacanccccgactaataactactattctaactctacaaccgaacgctcctttccaccgcgatttaaactaataataaatcctaccgacgtaaacgccgtatttattataccttcaccaacccaaaaaaaaaatacgcgcctaaacgcccgaaatccaaaaacgccaaaactacaacgccgaaaacttttcaaactaaaaaaaaatcttaaaacccctcatacacgcctttttcgcactcgcttaacctcgacttaatcaaaaacgaattcgacctaccttcaaactaaaaaacctcgaaacaccgaaatacacccgaaacccgccccctt

SEQ ID NO: 8133 - DNA, 580 bp, Artificial Sequence
  chemically treated genomic DNA (Homo sapiens) CpG-island No: 8133
  unsure (287, 347)
gttggtttttcgggagggtttttgcggcgcggggcgtagtgtttatgtcgttcgggttttttgcgttgcggggagcgtagcgtaagttttcgtttgttatgagttattttttcgattttcggttgtttgttttggtcgtttcgtttatgttgtatttgtacggtttcgagagattcggtttttttttggttttcgttttcgcggttgttttagttgtttcgggtcgggtcgagatttcgtaaaagtttttttatagttatatcgcgtttatcggtatggcgatttangacgcgttcgagtagaaggttacgtttaacggtatttattaatttattatggatcggttntttttttattacgaatattcgtagggttggtagataagattcggtataattttttgtttaacgattggtttgttaaggtgttcgcgagaaaagggcggcgggtgtagtaaatagaatggcggtgtcggtggtagagaattagttaaatttaaatacggcggtatagtttaaaaaaataatatttttatgttttgcgtatcggagatgaggtttcgatttagtttttgaagaaa

SEQ ID NO: 8134 - DNA, 580 bp, Artificial Sequence
  chemically treated genomic DNA (Homo sapiens) CpG-island No: 8134
  unsure (234, 294)
tttcttcaaaaactaaatcgaaacctcatctccgatacgcaaaacataaaaatattatttttttaaactataccgccgtatttaaatttaactaattctctaccaccgacaccgccattctatttactacacccgccgcccttttctcgcgaacaccttaacaaaccaatcgttaaacaaaaaattataccgaatcttatctaccaaccctacgaatattcgtaataaaaaaanaaccgatccataataaattaataaataccgttaaacgtaaccttctactcgaacgcgtcntaaatcgccataccgataaacgcgatataactataaaaaaacttttacgaaatctcgacccgacccgaaacaactaaaacaaccgcgaaaacgaaaaccaaaaaaaaaccgaatctctcgaaaccgtacaaatacaacataaacgaaacgaccaaaacaaacaaccgaaaatcgaaaaaataactcataacaaacgaaaacttacgctacgctccccgcaacgcaaaaaacccgaacgacataaacactacgccccgcgccgcaaaaaccctcccgaaaaaccaac

SEQ ID NO: 8135 - DNA, 580 bp, Artificial Sequence
  chemically treated genomic DNA (Homo sapiens) CpG-island No: 8135
  unsure (234, 294)
tttttttagaggttgagtcggggttttattttcggtgcgtagagtatgaagatgttgtttttttggattatgtcgtcgtgtttaagtttgattggttttttgttatcggtatcgttattttgtttgttgtattcgtcgtttttttttcgcgggtattttaataaattagtcgttgagtaaaaggttgtgtcgaattttgtttgttagttttgcgggtgttcgtggtagaagggnaatcggtttatgatgaattggtagatgtcgttgagcgtgattttttgttcgggcgcgttntggatcgttatgtcgatgagcgcgatgtagttgtaggagggtttttgcggggtttcggttcggttcgaggtagttagagtagtcgcgggggcgaaggttagagggaggtcgggtttttcgggatcgtatagatatagtatgggcgaggcggttagggtaggtagtcggggatcgaagaggtgatttatggtaagcgagagtttgcgttgcgtttttcgtaacgtaggagattcgggcggtataggtattgcgtttcgcgtcgtaagggttttttcggggagttagt

SEQ ID NO: 8136 - DNA, 580 bp, Artificial Sequence
  chemically treated genomic DNA (Homo sapiens) CpG-island No: 8136
  unsure (287, 347)
actaactccccgaaaaaacccttacgacgcgaaacgcaatacctataccgcccgaatctcctacgttacgaaaaacgcaacgcaaactctcgcttaccataaatcacctcttcgatccccgactacctaccctaaccgcctcgcccatactatatctatacgatcccgaaaaacccgacctccctctaaccttcgcccccgcgactactctaactacctcgaaccgaaccgaaaccccgcaaaaaccctcctacaactacatcgcgctcatcgacataacgatccanaacgcgcccgaacaaaaaatcacgctcaacgacatctaccaattcatcataaaccgattncccttctaccacgaacacccgcaaaactaacaaacaaaattcgacacaaccttttactcaacgactaatttattaaaatacccgcgaaaaaaaaacgacgaatacaacaaacaaaataacgataccgataacaaaaaaccaatcaaacttaaacacgacgacataatccaaaaaaacaacatcttcatactctacgcaccgaaaataaaaccccgactcaacctctaaaaaaa

SEQ ID NO: 8137 - DNA, 638 bp, Artificial Sequence
  chemically treated genomic DNA (Homo sapiens) CpG-island No: 8137
ttcggtacggtttcggtttcgtggtgtttcgtgtttcgcgttagggttttttcgatgtttttttgacgtttttaatttttttttatttcgtttgttttttttggatttttcggattttttttaatcgttttaaatatttttttggtttttttaacgtggtgttatcgcggtcgttttttatttatatttaaaatattatatcgtcgggtttcgcgtttaattggtggttttcggtcggggttatcgttttcgttatttttagtttcgaggtttttatttggtagggatttttcgtttttttcggtttcgttattttcgcgcgtttatttttacggtaacgttttttttagatggtgtcggtgtggaggatgcgtcggaatttcgtgtagatttgggttaagttgggtaggttcgtgttcggtagcgacgcgaagatttttattagtagttcgggcggtagttttagtagcgagtagcgcgggggcggcggcgaggggttcgcgtataagtcgttttcgatttcggcgttagtttcgatgcgttttttttcggggtttgtgttcggttcgttgtcggtcgtcgtcgtttcggtcgggtttcggcgttgttggcggcgttagatattcgcgcgacgggtt

SEQ ID NO: 8138 - DNA, 638 bp, Artificial Sequence
  chemically treated genomic DNA (Homo sapiens) CpG-island No: 8138
aacccgtcgcgcgaatatctaacgccgccaacaacgccgaaacccgaccgaaacgacgacgaccgacaacgaaccgaacacaaaccccgaaaaaaaacgcatcgaaactaacgccgaaatcgaaaacgacttatacgcgaacccctcgccgccgcccccgcgctactcgctactaaaactaccgcccgaactactaataaaaatcttcgcgtcgctaccgaacacgaacctacccaacttaacccaaatctacacgaaattccgacgcatcctccacaccgacaccatctaaaaaaaacgttaccgtaaaaataaacgcgcgaaaataacgaaaccgaaaaaaacgaaaaatccctaccaaataaaaacctcgaaactaaaaataacgaaaacgataaccccgaccgaaaaccaccaattaaacgcgaaacccgacgatataatattttaaatataaataaaaaacgaccgcgataacaccacgttaaaaaaaccaaaaaaatatttaaaacgattaaaaaaaatccgaaaaatccaaaaaaaacaaacgaaataaaaaaaaattaaaaacgtcaaaaaaacatcgaaaaaaccctaacgcgaaacacgaaacaccacgaaaccgaaaccgtaccgaa

SEQ ID NO: 8139 - DNA, 638 bp, Artificial Sequence
  chemically treated genomic DNA (Homo sapiens) CpG-island No: 8139
ggttcgtcgcgcggatgtttggcgtcgttagtagcgtcggggttcggtcgagacggcggcggtcgatagcgagtcggatatagatttcgaggaggagcgtatcgaggttagcgtcggggtcgggggcggtttgtgcgcgggtttttcgtcgtcgttttcgcgttgttcgttgttggagttgtcgttcgagttgttggtggagattttcgcgtcgttgtcgggtacggatttatttagtttggtttaggtttgtacgaagtttcggcgtattttttatatcgatattatttggaggaggcgttgtcgtgagggtgagcgcgcgggggtggcggggtcgggaggggcggggggtttttgttaggtggaggtttcggagttgggagtggcgggggcggtggtttcggtcgggggttattagttgggcgcggggttcggcgatgtggtgttttgggtgtgggtggggagcggtcgcggtgatattacgttgagggggttagggaggtatttgaggcggttagggagggttcgaggggtttaagagaggtagacggggtagggaggggttgagggcgttagggaggtatcgaagaggttttgacgcggggtacgggatattacggggtcgaggtcgtgtcggg

SEQ ID NO: 8140 - DNA, 638 bp, Artificial Sequence
  chemically treated genomic DNA (Homo sapiens) CpG-island No: 8140
cccgacacgacctcgaccccgtaatatcccgtaccccgcgtcaaaacctcttcgatacctccctaacgccctcaacccctccctaccccgtctacctctcttaaacccctcgaaccctccctaaccgcctcaaatacctccctaaccccctcaacgtaatatcaccgcgaccgctccccacccacacccaaaacaccacatcgccgaaccccgcgcccaactaataacccccgaccgaaaccaccgcccccgccactcccaactccgaaacctccacctaacaaaaaccccccgcccctcccgaccccgccacccccgcgcgctcaccctcacgacaacgcctcctccaaataatatcgatataaaaaatacgccgaaacttcgtacaaacctaaaccaaactaaataaatccgtacccgacaacgacgcgaaaatctccaccaacaactcgaacgacaactccaacaacgaacaacgcgaaaacgacgacgaaaaacccgcgcacaaaccgcccccgaccccgacgctaacctcgatacgctcctcctcgaaatctatatccgactcgctatcgaccgccgccgtctcgaccgaaccccgacgctactaacgacgccaaacatccgcgcgacgaacc

SEQ ID NO: 8141 - DNA, 622 bp, Artificial Sequence
  chemically treated genomic DNA (Homo sapiens) CpG-island No: 8141
ttttcgttagatggacgttggacgcgtgagtatttagtcgtaaagtttatacggttttatatggttattgtattagttagtagagagttcgtgtcgatttttaagttttcggattcgttcgttgttgcgtatcgttgaataagtggacgtttatattattttgtgcgatggtagtgattgattaacgtttcggttcgggtatggggattcgcgttaagtttattaattattatatgagtatcgcgtttaatgcgttttcggtagaagtcgtcgttttgtgcgaagttttgaatttttttttcgatgttgtcgttaaagtgatgagcggtatcgtcgtcggtaaaggttattttattattttttggttaaataaagtttttagcggagatttttttttcgtttttatgatcgattttgtttataaggattttggtatcgtttttgatgtcgttaattagttgtatgtgttaatgtcgttggggttcgttttacgggaggtttatagttaggcgcgcgtagcgggtcgcggtcgttaggattggttcgttattttggaataggttcgtgttagtgtcgggatgattgttaaagtaaaaatgtaacgattggataaaggaataaa

SEQ ID NO: 8142 - DNA, 622 bp, Artificial Sequence
  chemically treated genomic DNA (Homo sapiens) CpG-island No: 8142
tttattcctttatccaatcgttacatttttactttaacaatcatcccgacactaacacgaacctattccaaaataacgaaccaatcctaacgaccgcgacccgctacgcgcgcctaactataaacctcccgtaaaacgaaccccaacgacattaacacatacaactaattaacgacatcaaaaacgataccaaaatccttataaacaaaatcgatcataaaaacgaaaaaaaaatctccgctaaaaactttatttaaccaaaaaataataaaataacctttaccgacgacgataccgctcatcactttaacgacaacatcgaaaaaaaaattcaaaacttcgcacaaaacgacgacttctaccgaaaacgcattaaacgcgatactcatataataattaataaacttaacgcgaatccccatacccgaaccgaaacgttaatcaatcactaccatcgcacaaaataatataaacgtccacttattcaacgatacgcaacaacgaacgaatccgaaaacttaaaaatcgacacgaactctctactaactaatacaataaccatataaaaccgtataaactttacgactaaatactcacgcgtccaacgtccatctaacgaaaa

SEQ ID NO: 8143 - DNA, 622 bp, Artificial Sequence
  chemically treated genomic DNA (Homo sapiens) CpG-island No: 8143
tttatttttttatttagtcgttatatttttattttggtagttatttcggtattgatacggatttgttttagaatggcggattagttttggcgatcgcgattcgttgcgcgcgtttggttataaatttttcgtgaggcggattttagcggtattggtatatgtagttggttggcgatattaagggcgatgttaagatttttatgggtaagatcgattatgaaggcgggagaaagattttcgttgaggattttgtttggttaggaagtggtgaagtgatttttatcggcggcggtatcgtttattattttgacggtaatatcgaagggaagatttagggtttcgtataaaacggcggtttttgtcgaaagcgtattgagcgcgatgtttatgtagtagttgatgagtttaacgcggatttttatgttcggatcgaagcgttgattaattattgttatcgtataggatggtgtggacgtttatttgtttagcggtgcgtagtagcgaacgagttcgaaggtttgagaatcggtacggattttttgttagttggtgtaatggttatatagagtcgtgtgggttttacggttagatatttacgcgtttaacgtttatttgacggaga

SEQ ID NO: 8144 - DNA, 622 bp, Artificial Sequence
  chemically treated genomic DNA (Homo sapiens) CpG-island No: 8144
tctccgtcaaataaacgttaaacgcgtaaatatctaaccgtaaaacccacacgactctatataaccattacaccaactaacaaaaaatccgtaccgattctcaaaccttcgaactcgttcgctactacgcaccgctaaacaaataaacgtccacaccatcctatacgataacaataattaatcaacgcttcgatccgaacataaaaatccgcgttaaactcatcaactactacataaacatcgcgctcaatacgctttcgacaaaaaccgccgttttatacgaaaccctaaatcttcccttcgatattaccgtcaaaataataaacgataccgccgccgataaaaatcacttcaccacttcctaaccaaacaaaatcctcaacgaaaatctttctcccgccttcataatcgatcttacccataaaaatcttaacatcgcccttaatatcgccaaccaactacatataccaataccgctaaaatccgcctcacgaaaaatttataaccaaacgcgcgcaacgaatcgcgatcgccaaaactaatccgccattctaaaacaaatccgtatcaataccgaaataactaccaaaataaaaatataacgactaaataaaaaaataaa

SEQ ID NO: 8145 - DNA, 571 bp, Artificial Sequence
  chemically treated genomic DNA (Homo sapiens) CpG-island No: 8145
atagttttgttataacggatgtattttgtagttcgtcgagattattagcgattttattgaagattggtgtatggtcggtagtagcgtatcgagcgcgatgatgaagaatattattttgtttagtcgttgtagcgatattttttattttagacgtttaaatagtgtcggagtaaattttagtgttattacgtcgatatagatggttatatagatcgtcgtttcgaatagtatcgagtttacgttgaagtgattcggaatgtagaagtacggtaggttttagtagcgatttacgtcgatagtgatcgataagttatttagtgagtaattaaatagattcgttaatagcgtcggacgtattagcggatggtattgtttacggttaaagacgtatatcgtttacgttagcgtttagtcgttataggtaaagtcggtgttaattagtaggttaaacgcgatttatacgttttacgggaagtcgcgtttagggttagagatagagttagacgaatattagaagttttataattaggagtatatagatgacgatagacggtttaaaaattatgatcgg

SEQ ID NO: 8146 - DNA, 571 bp, Artificial Sequence
  chemically treated genomic DNA (Homo sapiens) CpG-island No: 8146
ccgatcataatttttaaaccgtctatcgtcatctatatactcctaattataaaacttctaatattcgtctaactctatctctaaccctaaacgcgacttcccgtaaaacgtataaatcgcgtttaacctactaattaacaccgactttacctataacgactaaacgctaacgtaaacgatatacgtctttaaccgtaaacaataccatccgctaatacgtccgacgctattaacgaatctatttaattactcactaaataacttatcgatcactatcgacgtaaatcgctactaaaacctaccgtacttctacattccgaatcacttcaacgtaaactcgatactattcgaaacgacgatctatataaccatctatatcgacgtaataacactaaaatttactccgacactatttaaacgtctaaaataaaaaatatcgctacaacgactaaacaaaataatattcttcatcatcgcgctcgatacgctactaccgaccatacaccaatcttcaataaaatcgctaataatctcgacgaactacaaaatacatccgttataacaaaactat

SEQ ID NO: 8147 - DNA, 571 bp, Artificial Sequence
  chemically treated genomic DNA (Homo sapiens) CpG-island No: 8147
tcggttatgatttttggatcgtttatcgttatttgtatgtttttgattgtgaagtttttggtgttcgtttggttttgtttttgattttgaacgcggtttttcgtggggcgtgtggatcgcgtttgatttgttgattggtatcggttttgtttgtggcggttgggcgttggcgtgggcggtatacgtttttaatcgtgggtaatattattcgttggtgcgttcggcgttgttggcgagtttgtttggttatttattgggtggtttgtcgattattatcgacgtgggtcgttattggaatttgtcgtatttttatatttcgggttattttaacgtgaattcggtattgttcgagacggcggtttgtatgattatttatatcggcgtgatggtattggagtttgtttcggtattgtttgaacgtttggggtggaaggtgtcgttatagcgattaaataaggtgatgttttttattatcgcgttcggtgcgttgttgtcgattatgtattagtttttaatggggtcgttgatgatttcggcgggttataaggtgtattcgttgtggtagagttat

SEQ ID NO: 8148 - DNA, 571 bp, Artificial Sequence
  chemically treated genomic DNA (Homo sapiens) CpG-island No: 8148
ataactctaccacaacgaatacaccttataacccgccgaaatcatcaacgaccccattaaaaactaatacataatcgacaacaacgcaccgaacgcgataataaaaaacatcaccttatttaatcgctataacgacaccttccaccccaaacgttcaaacaataccgaaacaaactccaataccatcacgccgatataaataatcatacaaaccgccgtctcgaacaataccgaattcacgttaaaataacccgaaatataaaaatacgacaaattccaataacgacccacgtcgataataatcgacaaaccacccaataaataaccaaacaaactcgccaacaacgccgaacgcaccaacgaataatattacccacgattaaaaacgtataccgcccacgccaacgcccaaccgccacaaacaaaaccgataccaatcaacaaatcaaacgcgatccacacgccccacgaaaaaccgcgttcaaaatcaaaaacaaaaccaaacgaacaccaaaaacttcacaatcaaaaacatacaaataacgataaacgatccaaaaatcataaccga

SEQ ID NO: 8149 - DNA, 1366 bp, Artificial Sequence
  chemically treated genomic DNA (Homo sapiens) CpG-island No: 8149
acggttagttcgatagtcgggtatcgtcgcgttgatcgacgatttgattaaagtaggcgttgacggtttgttttttttgggtagcggtggcgagtttttttagttcggcgtcgaagagcgtaaagttattgttcgttttgttatcgattatgtcgatcgtcgcgtgtcggtgttgatcggtatcggcggtattaacgttcgggaaattatcgaatttagttagtacgcgtagtaggcgggcgcggacggtatcgtggtgattaatttttattattggaaagtgtcggaagcgaatttgattcgttatttcgagtaggtggtcgatagcgttacgttgtcggtgatgttttataatttttcggcgttgatcgggtaggatttgatttcggcgttggtgaaaattttcgtcgattcgcgtagtaatattatcggtattaaagatattatcgatttcgtcgtttatttgcgtagtatgatttatatcgttaaaggtgtttattcgtattttatcgtgttttgcggttacgacgattatttgtttaatattttgttgttcggcggcgacggggcgatatcggcgagcggtaattttgtttcgtaggtgtcggtgaattttttgaaagtttggcgcgacggggacgtggcgaaagcggtcgggtattattagattttgttgtaaatttcgtagatgtattagttggatacgtcgttggtgaacgtgattaaagaggcgatcgtgttttgcggtcgttttgtttttacgtacgtgttgtcgttcgtttcgtcgttggacgagtcgcgtaaggcgtagttgaaaattttgttgtaatagtttaagttttgttgagtcggacgataacgatgattattgagaaaatttttatttcgtaggacgacgcgttttatgcggtgattatttacgcggcggggtcgtagggcgttttgtcgttgatttcgtagatgttgatggaattttttagcggtaatttgttcggtatgacgtagaacgtcgggatgggttgggacgttaataagtttatcggtaaagaggtgttgattatcggtatttagggcggtattcgcgtcggagacggacgttaatcggcgggttatatatcggtatgggagaacgggtggtaaagatagggcgggaagagaaatttcgaagggggaattcgtcgcggtttcgtagagaatcgcgaggggtttataggatagttacggattagatacggtggacgaaaatcggaagagttcggcggatttttcgttataggggggaaatggttatacgtaagggtttttaattcgtgcgaaaatcgtataatgtgcggagattacggaatagagatgttttataacgttg

SEQ ID NO: 8150 - DNA, 1366 bp, Artificial Sequence
  chemically treated genomic DNA (Homo sapiens) CpG-island No: 8150
caacgttataaaacatctctattccgtaatctccgcacattatacgattttcgcacgaattaaaaacccttacgtataaccatttcccccctataacgaaaaatccgccgaactcttccgattttcgtccaccgtatctaatccgtaactatcctataaacccctcgcgattctctacgaaaccgcgacgaattcccccttcgaaatttctcttcccgccctatctttaccacccgttctcccataccgatatataacccgccgattaacgtccgtctccgacgcgaataccgccctaaataccgataatcaacacctctttaccgataaacttattaacgtcccaacccatcccgacgttctacgtcataccgaacaaattaccgctaaaaaattccatcaacatctacgaaatcaacgacaaaacgccctacgaccccgccgcgtaaataatcaccgcataaaacgcgtcgtcctacgaaataaaaattttctcaataatcatcgttatcgtccgactcaacaaaacttaaactattacaacaaaattttcaactacgccttacgcgactcgtccaacgacgaaacgaacgacaacacgtacgtaaaaacaaaacgaccgcaaaacacgatcgcctctttaatcacgttcaccaacgacgtatccaactaatacatctacgaaatttacaacaaaatctaataatacccgaccgctttcgccacgtccccgtcgcgccaaactttcaaaaaattcaccgacacctacgaaacaaaattaccgctcgccgatatcgccccgtcgccgccgaacaacaaaatattaaacaaataatcgtcgtaaccgcaaaacacgataaaatacgaataaacacctttaacgatataaatcatactacgcaaataaacgacgaaatcgataatatctttaataccgataatattactacgcgaatcgacgaaaattttcaccaacgccgaaatcaaatcctacccgatcaacgccgaaaaattataaaacatcaccgacaacgtaacgctatcgaccacctactcgaaataacgaatcaaattcgcttccgacactttccaataataaaaattaatcaccacgataccgtccgcgcccgcctactacgcgtactaactaaattcgataatttcccgaacgttaataccgccgataccgatcaacaccgacacgcgacgatcgacataatcgataacaaaacgaacaataactttacgctcttcgacgccgaactaaaaaaactcgccaccgctacccaaaaaaaacaaaccgtcaacgcctactttaatcaaatcgtcgatcaacgcgacgatacccgactatcgaactaaccgt

SEQ ID NO: 8151 - DNA, 1366 bp, Artificial Sequence
  chemically treated genomic DNA (Homo sapiens) CpG-island No: 8151
tagcgttgtagggtatttttatttcgtggttttcgtatattgtgcggttttcgtacgagttggggatttttacgtgtagttattttttttttgtggcggggagttcgtcgaattttttcggttttcgtttatcgtgtttaattcgtggttattttgtgggtttttcgcggttttttgcgaggtcgcgacgggtttttttttcggggttttttttttcgttttgtttttgttattcgtttttttatgtcggtgtgtagttcgtcgattggcgttcgttttcggcgcggatgtcgttttgagtgtcgataattagtatttttttgtcggtgagtttgttggcgttttagtttatttcggcgttttgcgttatgtcgaataggttgtcgttgggagattttattagtatttgcggggttagcggtagagcgttttgcggtttcgtcgcgtgggtgattatcgtataaaacgcgtcgttttgcggggtgaaaatttttttaatggttatcgttatcgttcggtttagtaaagtttgagttgttgtagtagggtttttagttgcgttttgcgcggttcgtttagcggcgaggcgggcggtagtacgtgcgtggagataggacgatcgtagagtacgatcgtttttttaattacgtttattaacggcgtatttagttgatatatttgcggaatttgtagtaaggtttgatgatattcggtcgttttcgttacgttttcgtcgcgttaggtttttagaagatttatcgatatttgcggggtaaagttgtcgttcgtcgatatcgtttcgtcgtcgtcgagtagtagggtattgaatagatgatcgtcgtagtcgtagagtacggtgaagtgcggatgggtatttttgacggtatggattatgttgcgtaggtgggcgacggagtcgatggtgtttttgatgtcgataatattgttgcgcgagtcggcgagggtttttattagcgtcggagttagattttgttcggttagcgtcgggaagttatagagtattatcggtagcgtgacgttgtcggttatttgttcgaaatagcggattaggttcgttttcgatattttttagtagtaggggttgattattacgatgtcgttcgcgttcgtttgttgcgcgtgttggttgagttcgatggtttttcgggcgttggtgtcgtcggtgtcgattagtatcggtacgcgacgatcgatatgatcgatagtaaagcgggtaatggttttacgtttttcggcgtcgagttgggagaattcgttatcgttgtttaggaagaataggtcgttaacgtttgttttgattagatcgtcgattagcgcggcggtgttcggttatcgagttggtcgt

SEQ ID NO: 8152 - DNA, 1366 bp, Artificial Sequence
  chemically treated genomic DNA (Homo sapiens) CpG-island No: 8152
acgaccaactcgataaccgaacaccgccgcgctaatcgacgatctaatcaaaacaaacgttaacgacctattcttcctaaacaacgataacgaattctcccaactcgacgccgaaaaacgtaaaaccattacccgctttactatcgatcatatcgatcgtcgcgtaccgatactaatcgacaccgacgacaccaacgcccgaaaaaccatcgaactcaaccaacacgcgcaacaaacgaacgcgaacgacatcgtaataatcaacccctactactaaaaaatatcgaaaacgaacctaatccgctatttcgaacaaataaccgacaacgtcacgctaccgataatactctataacttcccgacgctaaccgaacaaaatctaactccgacgctaataaaaaccctcgccgactcgcgcaacaatattatcgacatcaaaaacaccatcgactccgtcgcccacctacgcaacataatccataccgtcaaaaatacccatccgcacttcaccgtactctacgactacgacgatcatctattcaataccctactactcgacgacgacgaaacgatatcgacgaacgacaactttaccccgcaaatatcgataaatcttctaaaaacctaacgcgacgaaaacgtaacgaaaacgaccgaatatcatcaaaccttactacaaattccgcaaatatatcaactaaatacgccgttaataaacgtaattaaaaaaacgatcgtactctacgatcgtcctatctccacgcacgtactaccgcccgcctcgccgctaaacgaaccgcgcaaaacgcaactaaaaaccctactacaacaactcaaactttactaaaccgaacgataacgataaccattaaaaaaattttcaccccgcaaaacgacgcgttttatacgataatcacccacgcgacgaaaccgcaaaacgctctaccgctaaccccgcaaatactaataaaatctcccaacgacaacctattcgacataacgcaaaacgccgaaataaactaaaacgccaacaaactcaccgacaaaaaaatactaattatcgacactcaaaacgacatccgcgccgaaaacgaacgccaatcgacgaactacacaccgacataaaaaaacgaataacaaaaacaaaacgaaaaaaaaaaccccgaaaaaaaaacccgtcgcgacctcgcaaaaaaccgcgaaaaacccacaaaataaccacgaattaaacacgataaacgaaaaccgaaaaaattcgacgaactccccgccacaaaaaaaaaataactacacgtaaaaatccccaactcgtacgaaaaccgcacaatatacgaaaaccacgaaataaaaataccctacaacgcta

SEQ ID NO: 8153 - DNA, 916 bp, Artificial Sequence
  chemically treated genomic DNA (Homo sapiens) CpG-island No: 8153
tatggtttatttttttatttgatgtataatatcgattatcgagttatcgcggtaacgtataacggtaacgacgcggtttgtgaatttaatcggttgtggtttatcggttagtagacgcgtacgttcgcgtagttatttaatggaaattattttaatgttcgttttttgtagacgttttgttagtttcggacgtgtcgggttaattgcgatatcgtggtttgtgattagaatatcgatattggagtttggggtgatgtaggttagtacgttatttattagagtcggaatacgatcgcgtattagcggcgcgacgatgatggaaagcgtagaggtaatcgcggtatcgtagtgattatcggaagtattacgtagtacgtcgttagagtcggttagtacgttaacgttgaattgggtgttaatttttagcgcgtttagtattattacgtcgagacgattaatcgatgcgtttttcgaattttagttagcgtattggttggcgttgatttcgatgtgattggggttacgggttagcgattgcgtagtatggttgttaaagttttgtatatttagtagtttgcggattagatttttttcgtgtaggttaattatcgtcgcggtaatatcgttaagggcgaagtcggcgcgaatatcgcggttacgtattttgttttttaggaaacgggttatcgttagcgatgcgtcgtcggtgtcggtttgtatggagaaattttttttgaagtagttagagttgataattatattcgtagcgttacgggtaataagtagttcgcgcgggttagtggttatacgggtcgcgttagcgtcgatttttgtagtatcgttaacgcggttaattttgacgattaaattaatttgattttgtttaatgtttgtcggattatgcggataaggtagt

SEQ ID NO: 8154 - DNA, 916 bp, Artificial Sequence
  chemically treated genomic DNA (Homo sapiens) CpG-island No: 8154
actaccttatccgcataatccgacaaacattaaacaaaatcaaattaatttaatcgtcaaaattaaccgcgttaacgatactacaaaaatcgacgctaacgcgacccgtataaccactaacccgcgcgaactacttattacccgtaacgctacgaatataattatcaactctaactacttcaaaaaaaatttctccatacaaaccgacaccgacgacgcatcgctaacgataacccgtttcctaaaaaacaaaatacgtaaccgcgatattcgcgccgacttcgcccttaacgatattaccgcgacgataattaacctacacgaaaaaaatctaatccgcaaactactaaatatacaaaactttaacaaccatactacgcaatcgctaacccgtaaccccaatcacatcgaaatcaacgccaaccaatacgctaactaaaattcgaaaaacgcatcgattaatcgtctcgacgtaataatactaaacgcgctaaaaattaacacccaattcaacgttaacgtactaaccgactctaacgacgtactacgtaatacttccgataatcactacgataccgcgattacctctacgctttccatcatcgtcgcgccgctaatacgcgatcgtattccgactctaataaataacgtactaacctacatcaccccaaactccaatatcgatattctaatcacaaaccacgatatcgcaattaacccgacacgtccgaaactaacaaaacgtctacaaaaaacgaacattaaaataatttccattaaataactacgcgaacgtacgcgtctactaaccgataaaccacaaccgattaaattcacaaaccgcgtcgttaccgttatacgttaccgcgataactcgataatcgatattatacatcaaataaaaaaataaaccata

SEQ ID NO: 8155 - DNA, 916 bp, Artificial Sequence
  chemically treated genomic DNA (Homo sapiens) CpG-island No: 8155
gttgttttattcgtataattcggtaagtattgagtaagattaggttgatttgatcgttaaagttgatcgcgttggcgatgttgtaaaaatcggcgttggcgcgattcgtatgattattaattcgcgcgaattgtttattgttcgtagcgttgcggatgtgattgttaattttggttattttaaagaaggtttttttatgtaaatcggtatcggcggcgtatcgttggcggtaattcgttttttggaagataaaatgcgtagtcgcgatattcgcgtcgatttcgtttttggcggtattatcgcgacgatggttgatttgtacgaaaaaggtttgattcgtaaattgttggatgtgtagagttttgatagttatgttgcgtaatcgttggttcgtaattttaattatatcgaaattagcgttaattagtacgttaattggggttcgaaaggcgtatcggttgatcgtttcgacgtggtggtattgagcgcgttggaaattgatatttagtttaacgttaacgtgttgatcggttttgacggcgtattgcgtggtgttttcggtggttattgcgatatcgcgattgtttttgcgttttttattatcgtcgcgtcgttggtacgcggtcgtatttcgattttggtggataacgtattgatttgtattattttaggttttagtgtcgatattttggttatagattacggtatcgtagttaattcggtacgttcggaattggtagaacgtttgtaggaagcgggtattaaagtggtttttattgagtggttgcgcgaacgtgcgcgtttgttgatcggtgaattatagtcgattgaatttatagatcgcgtcgttgtcgttgtgcgttatcgcgatggttcggtgatcgatgttgtgtattaggtgaaggaataagttatg

SEQ ID NO: 8156 - DNA, 916 bp, Artificial Sequence
  chemically treated genomic DNA (Homo sapiens) CpG-island No: 8156
cataacttattccttcacctaatacacaacatcgatcaccgaaccatcgcgataacgcacaacgacaacgacgcgatctataaattcaatcgactataattcaccgatcaacaaacgcgcacgttcgcgcaaccactcaataaaaaccactttaatacccgcttcctacaaacgttctaccaattccgaacgtaccgaattaactacgataccgtaatctataaccaaaatatcgacactaaaacctaaaataatacaaatcaatacgttatccaccaaaatcgaaatacgaccgcgtaccaacgacgcgacgataataaaaaacgcaaaaacaatcgcgatatcgcaataaccaccgaaaacaccacgcaatacgccgtcaaaaccgatcaacacgttaacgttaaactaaatatcaatttccaacgcgctcaataccaccacgtcgaaacgatcaaccgatacgcctttcgaaccccaattaacgtactaattaacgctaatttcgatataattaaaattacgaaccaacgattacgcaacataactatcaaaactctacacatccaacaatttacgaatcaaacctttttcgtacaaatcaaccatcgtcgcgataataccgccaaaaacgaaatcgacgcgaatatcgcgactacgcattttatcttccaaaaaacgaattaccgccaacgatacgccgccgataccgatttacataaaaaaaccttctttaaaataaccaaaattaacaatcacatccgcaacgctacgaacaataaacaattcgcgcgaattaataatcatacgaatcgcgccaacgccgatttttacaacatcgccaacgcgatcaactttaacgatcaaatcaacctaatcttactcaatacttaccgaattatacgaataaaacaac

SEQ ID NO: 8157 - DNA, 892 bp, Artificial Sequence
  chemically treated genomic DNA (Homo sapiens) CpG-island No: 8157
tatcgttaggttatgtcggtatcgggttttgtttcggtgttagttatagatcgtatagtttggcgattttagcgtagtttggtgtgacggtaatagttttggtttttttgtaacgtattttagtaaagaagtgagtattcggggtacgcgtttgcggtacgtttgatttttaggcgatgatgtagttggagttgtattagttagtagatttcggtacgttagtttgttcgttttaggtttgcggagacgtaggaggtaagtcgtagtattagtcgtagaagtttaagtaagtatcgttaattagcgagagatagcgtgtattcgatgcgtaagaaattatcgatattgtcggaattggcgagaaattagtaatacggttcgggtcgtagtttttgatggtgtaaacgttagatgcggcgattagttcgtttattttttgttaggaagaacgaataaatttatcgcgtttacgcgtttgtttaaagtttttcgttttatcggcgtttttaatgatagaagtttatgttttaatcggatcgttatgtagcgttttcgttttacgttatatttttattaggcgtttgcgtattatcgggtattttaggcggttggtattgtaaagatattaggagtagttggtatcgcgcgggtagtcgcgaggtttatggtttggtagattcggacgggtacgcggatagttagtttgttgggttttttaggtgattagatcgtttttgacgtagattttttagttgtaggagtcggtgtagtttatttcgtgggtagagcggacgattttgttatgttgttaacgttggcgatatttatttttttagttacggttggtattgagaagttggttatgtttatcggtaaaggttttatttttttg

SEQ ID NO: 8158 - DNA, 892 bp, Artificial Sequence
  chemically treated genomic DNA (Homo sapiens) CpG-island No: 8158
caaaaaaataaaacctttaccgataaacataaccaacttctcaataccaaccgtaactaaaaaaataaatatcgccaacgttaacaacataacaaaatcgtccgctctacccacgaaataaactacaccgactcctacaactaaaaaatctacgtcaaaaacgatctaatcacctaaaaaacccaacaaactaactatccgcgtacccgtccgaatctaccaaaccataaacctcgcgactacccgcgcgataccaactactcctaatatctttacaataccaaccgcctaaaatacccgataatacgcaaacgcctaataaaaatataacgtaaaacgaaaacgctacataacgatccgattaaaacataaacttctatcattaaaaacgccgataaaacgaaaaactttaaacaaacgcgtaaacgcgataaatttattcgttcttcctaacaaaaaataaacgaactaatcgccgcatctaacgtttacaccatcaaaaactacgacccgaaccgtattactaatttctcgccaattccgacaatatcgataatttcttacgcatcgaatacacgctatctctcgctaattaacgatacttacttaaacttctacgactaatactacgacttacctcctacgtctccgcaaacctaaaacgaacaaactaacgtaccgaaatctactaactaatacaactccaactacatcatcgcctaaaaatcaaacgtaccgcaaacgcgtaccccgaatactcacttctttactaaaatacgttacaaaaaaaccaaaactattaccgtcacaccaaactacgctaaaatcgccaaactatacgatctataactaacaccgaaacaaaacccgataccgacataacctaacgata

SEQ ID NO: 8159 - DNA, 892 bp, Artificial Sequence
  chemically treated genomic DNA (Homo sapiens) CpG-island No: 8159
tagaagggtgaaatttttgtcgatgggtatggttagttttttaatattaatcgtgattgggaggatggatatcgttagcgttggtagtatgataaaatcgttcgttttatttacggggtaaattgtatcggtttttgtagttggaaaatttacgttaaaaacggtttggttatttgggaaatttagtagattgattattcgcgtattcgttcggatttgttaaattatgaatttcgcggttgttcgcgcggtgttagttatttttggtatttttatagtgttaatcgtttgaaatattcgatgatgcgtaaacgtttgatgaaaatgtggcgtgaagcgaaggcgttgtatagcgattcggttgaggtatgggtttttattattgaagacgtcgataaagcgaaaagttttaagtaggcgcgtggacgcggtggatttgttcgttttttttggtaggaggtgaacgaattgatcgtcgtatttaacgtttatattattaaaaattacggttcggatcgtgttgttggtttttcgttaatttcggtaatgtcgatggttttttacgtatcgggtgtacgttatttttcgttgattggcggtatttgtttaagtttttacgattggtattgcgatttgttttttgcgttttcgtaaatttggggcgagtaaattgacgtatcggaatttgttgattggtataattttagttatattatcgtttgggggttaaacgtgtcgtagacgcgtatttcggatgtttatttttttattgaagtgcgttataaagggattaaaattgttgtcgttatattagattacgttgaaatcgttaaattgtgcgatttgtggttggtatcgaaatagggttcgatgtcggtatggtttggcgatg

SEQ ID NO: 8160 - DNA, 892 bp, Artificial Sequence
  chemically treated genomic DNA (Homo sapiens) CpG-island No: 8160
catcgccaaaccataccgacatcgaaccctatttcgataccaaccacaaatcgcacaatttaacgatttcaacgtaatctaatataacgacaacaattttaatccctttataacgcacttcaataaaaaaataaacatccgaaatacgcgtctacgacacgtttaacccccaaacgataatataactaaaattataccaatcaacaaattccgatacgtcaatttactcgccccaaatttacgaaaacgcaaaaaacaaatcgcaataccaatcgtaaaaacttaaacaaataccgccaatcaacgaaaaataacgtacacccgatacgtaaaaaaccatcgacattaccgaaattaacgaaaaaccaacaacacgatccgaaccgtaatttttaataatataaacgttaaatacgacgatcaattcgttcacctcctaccaaaaaaaacgaacaaatccaccgcgtccacgcgcctacttaaaacttttcgctttatcgacgtcttcaataataaaaacccatacctcaaccgaatcgctatacaacgccttcgcttcacgccacattttcatcaaacgtttacgcatcatcgaatatttcaaacgattaacactataaaaataccaaaaataactaacaccgcgcgaacaaccgcgaaattcataatttaacaaatccgaacgaatacgcgaataatcaatctactaaatttcccaaataaccaaaccgtttttaacgtaaattttccaactacaaaaaccgatacaatttaccccgtaaataaaacgaacgattttatcatactaccaacgctaacgatatccatcctcccaatcacgattaatattaaaaaactaaccatacccatcgacaaaaatttcacccttcta

SEQ ID NO: 8161 - DNA, 1066 bp, Artificial Sequence
  chemically treated genomic DNA (Homo sapiens) CpG-island No: 8161
ttttgtcgtttatttttttcgttatttatagtagttatcgtacgagtacgtttgtatcgttgggcgttttcggtttcggttggaaagcgttttttgatattcgtttatagttacgtgatgacggattgatatttaacgataacggcgggcggagtatttattttgagtcgttgttgtcgggggagtcggtgtatagtcgtagtgagttaatgtggttggtgcgcggtggtaaggtagtatagtcggacggttatacgttggcgcggttgtggggggcgttgtcgtcggatattcggttaagttcgtatttttatttggcgattaatagcgtataggggtcgtggtggatattggggtggtttgagcgggtgtcgggtgttgaggacgtattgttagcgtcgttgtcgtcgtatcgggtgtttatcgggatggcggatcgtttcgggcggacgttgacgtatcggcgtgaggtcgtcggtgatttggtcggggaaattatcggcgtgacggacggtgtcgggcgggagtttcgtttggtgttgattacgtaggcgtagcgtgcggaagaggttcgtattttttcgttatttttttttgatagttttcgtttttttttagttttagcgtttttcgatatattgttcggtatcgaatacggtttcgataggggtattcgtttttcggcggtgtggttgatgtacgattcggtatattcggagagtttgttcgttgcgttattggtgcggtatacgtatacggaagtcggtgaattgttggcggtatatgatcgtagtaatacgtaggtgcgcgtttttacgtatgacgcgtagtattcgggtcggatggtggcgtatcgttacgcgggaaggtcggagatgcgttatcgttacgacgatacggggcgggtggtggagtaattgaattcggtagggttaagttatcgttatttttatgagtaggatcgtattatcgttatcgatagtttgaatcggcgtgaggtgttgtatatagaaggcggggtcgggttgaaacgggtggtgaaaaaagaattggcggacggtagcgt

SEQ ID NO: 8162 - DNA, 1066 bp, Artificial Sequence
  chemically treated genomic DNA (Homo sapiens) CpG-island No: 8162
acgctaccgtccgccaattcttttttcaccacccgtttcaacccgaccccgccttctatatacaacacctcacgccgattcaaactatcgataacgataatacgatcctactcataaaaataacgataacttaaccctaccgaattcaattactccaccacccgccccgtatcgtcgtaacgataacgcatctccgaccttcccgcgtaacgatacgccaccatccgacccgaatactacgcgtcatacgtaaaaacgcgcacctacgtattactacgatcatataccgccaacaattcaccgacttccgtatacgtataccgcaccaataacgcaacgaacaaactctccgaatataccgaatcgtacatcaaccacaccgccgaaaaacgaatacccctatcgaaaccgtattcgataccgaacaatatatcgaaaaacgctaaaactaaaaaaaaacgaaaactatcaaaaaaaaataacgaaaaaatacgaacctcttccgcacgctacgcctacgtaatcaacaccaaacgaaactcccgcccgacaccgtccgtcacgccgataatttccccgaccaaatcaccgacgacctcacgccgatacgtcaacgtccgcccgaaacgatccgccatcccgataaacacccgatacgacgacaacgacgctaacaatacgtcctcaacacccgacacccgctcaaaccaccccaatatccaccacgacccctatacgctattaatcgccaaataaaaatacgaacttaaccgaatatccgacgacaacgccccccacaaccgcgccaacgtataaccgtccgactatactaccttaccaccgcgcaccaaccacattaactcactacgactatacaccgactcccccgacaacaacgactcaaaataaatactccgcccgccgttatcgttaaatatcaatccgtcatcacgtaactataaacgaatatcaaaaaacgctttccaaccgaaaccgaaaacgcccaacgatacaaacgtactcgtacgataactactataaataacgaaaaaaataaacgacaaaa

SEQ ID NO: 8163 - DNA, 1066 bp, Artificial Sequence
  chemically treated genomic DNA (Homo sapiens) CpG-island No: 8163
acgttgtcgttcgttagttttttttttattattcgttttagttcggtttcgttttttgtatgtagtattttacgtcggtttaggttgtcggtgacggtgatgcggttttgtttataaagatagcggtagtttaattttgtcgggtttagttgttttattattcgtttcgtatcgtcgtagcggtagcgtattttcggttttttcgcgtaacggtgcgttattattcggttcgggtgttgcgcgttatacgtgaaagcgcgtatttgcgtattgttgcggttatatatcgttagtagtttatcggttttcgtatacgtgtatcgtattagtggcgtagcgggtaggtttttcgggtatgtcgggtcgtgtattagttatatcgtcgaaaggcggatatttttgtcggggtcgtattcggtatcgggtagtgtgtcggggaacgttgaggttgagagagggcgggaattgttagaagaagatagcgaagaggtgcgggtttttttcgtacgttgcgtttgcgtggttagtattagacggaattttcgttcggtatcgttcgttacgtcggtgattttttcggttaggttatcggcggttttacgtcggtacgttagcgttcgttcgaagcggttcgttatttcggtaagtattcggtacggcggtagcggcgttggtagtacgtttttagtattcggtattcgtttagattattttagtatttattacggtttttgtgcgttgttggtcgttaggtaaagatgcgggtttaatcggatattcggcggtagcgttttttatagtcgcgttagcgtatggtcgttcggttgtgttgttttattatcgcgtattagttatattgatttattgcggttgtatatcggttttttcggtagtagcggtttaaagtgaatgtttcgttcgtcgttgtcgttgagtattagttcgttattacgtagttgtaagcggatattagaaggcgttttttagtcggggtcgaaaacgtttaacggtgtaggcgtattcgtacggtaattgttgtaagtagcggagagaatgaacggtagag

SEQ ID NO: 8164 - DNA, 1066 bp, Artificial Sequence
  chemically treated genomic DNA (Homo sapiens) CpG-island No: 8164
ctctaccgttcattctctccgctacttacaacaattaccgtacgaatacgcctacaccgttaaacgttttcgaccccgactaaaaaacgccttctaatatccgcttacaactacgtaataacgaactaatactcaacgacaacgacgaacgaaacattcactttaaaccgctactaccgaaaaaaccgatatacaaccgcaataaatcaatataactaatacgcgataataaaacaacacaaccgaacgaccatacgctaacgcgactataaaaaacgctaccgccgaatatccgattaaacccgcatctttacctaacgaccaacaacgcacaaaaaccgtaataaatactaaaataatctaaacgaataccgaatactaaaaacgtactaccaacgccgctaccgccgtaccgaatacttaccgaaataacgaaccgcttcgaacgaacgctaacgtaccgacgtaaaaccgccgataacctaaccgaaaaaatcaccgacgtaacgaacgataccgaacgaaaattccgtctaatactaaccacgcaaacgcaacgtacgaaaaaaacccgcacctcttcgctatcttcttctaacaattcccgccctctctcaacctcaacgttccccgacacactacccgataccgaatacgaccccgacaaaaatatccgcctttcgacgatataactaatacacgacccgacatacccgaaaaacctacccgctacgccactaatacgatacacgtatacgaaaaccgataaactactaacgatatataaccgcaacaatacgcaaatacgcgctttcacgtataacgcgcaacacccgaaccgaataataacgcaccgttacgcgaaaaaaccgaaaatacgctaccgctacgacgatacgaaacgaataataaaacaactaaacccgacaaaattaaactaccgctatctttataaacaaaaccgcatcaccgtcaccgacaacctaaaccgacgtaaaatactacatacaaaaaacgaaaccgaactaaaacgaataataaaaaaaaaactaacgaacgacaacgt

SEQ ID NO: 8165 - DNA, 1229 bp, Artificial Sequence
  chemically treated genomic DNA (Homo sapiens) CpG-island No: 8165
  unsure (533)
agggtgtcgtcgaacggaatgcgtagggtttgtagtttcgggttaagcgaattggcgtcgaaatcgtttcgttagttgttcggaacggttgtaggttgttcggttatttgcgggttttttacggttagttgcgcgtgtttgtcgttttttacgtacggttagtcgtcgcgttatttaatgcgggcgatgtcggtttcgcgttttagcgggtagtagtcgcgttcgtcggaggttagtagcggtacgtcgggtaggcgtagcgggcggttggtgaggtaggttatgtattatttattcgtatgcgtttgtagtagcgagtcgtggtcgtttttttgtagcgggtttttcggtaggtgttagttggttattatcgttacgttcgggtgtagttcgtacggttcgtcgatatttttggaacgtagtattacgacggcgtgttcgtagttggtgtcgttttcggcggttattaggtagtattatttcgcgtggcgatataggtgcgcgttttcggtgtagtagagcggcgtgtcggntaatagcgttttgcgttcgggcgagagcgtgtcggtttgcgggttaaacgtttgtaatacgatggtgttgtgcgggttgttgtggtggcgcggtttttacgggcggtagatatagtatttgcggttatcgtcgtcgtggaatagggacgggttaaattcgtcgttgtttatcgggattggttcgttttatggtttttcgatggagggcgcggtgacgaggaagttgcggtcgtttttttacggcgagtcgataatttttacgtcggtgtagagtagttagaatttatcgtcggcgtagtttaggtacggcgtttagatgtcgtcggagttcgggttgttttttatgtttagtatcgatacgcggtttaacggggtgttgattagcgattagttttttaggttacgggagtggtagatgcgtacgttcgggaattattcgaaggtcgaggtggcgatgtagtagttttcgttttggcggtatagggacgggttcgggttgaaagtcggtgagtatcgggttagtgatttttatattgttttcggttaatgggattgcggttgttcgttggcgtcgggaacggtttcgttttgcgtcgggcggtgtttaattagtttgtcggttgatggtttttacgcgggtatttcgtgagtttgtaagcgatagtattgattgatataattgtcgcgtttgaagta

SEQ ID NO: 8166 - DNA, 1229 bp, Artificial Sequence
  chemically treated genomic DNA (Homo sapiens) CpG-island No: 8166
  unsure (697)
tacttcaaacgcgacaattatatcaatcaatactatcgcttacaaactcacgaaatacccgcgtaaaaaccatcaaccgacaaactaattaaacaccgcccgacgcaaaacgaaaccgttcccgacgccaacgaacaaccgcaatcccattaaccgaaaacaatataaaaatcactaacccgatactcaccgactttcaacccgaacccgtccctataccgccaaaacgaaaactactacatcgccacctcgaccttcgaataattcccgaacgtacgcatctaccactcccgtaacctaaaaaactaatcgctaatcaacaccccgttaaaccgcgtatcgatactaaacataaaaaacaacccgaactccgacgacatctaaacgccgtacctaaactacgccgacgataaattctaactactctacaccgacgtaaaaattatcgactcgccgtaaaaaaacgaccgcaacttcctcgtcaccgcgccctccatcgaaaaaccataaaacgaaccaatcccgataaacaacgacgaatttaacccgtccctattccacgacgacgataaccgcaaatactatatctaccgcccgtaaaaaccgcgccaccacaacaacccgcacaacaccatcgtattacaaacgtttaacccgcaaaccgacacgctctcgcccgaacgcaaaacgctattanccgacacgccgctctactacaccgaaaacgcgcacctatatcgccacgcgaaataatactacctaataaccgccgaaaacgacaccaactacgaacacgccgtcgtaatactacgttccaaaaatatcgacgaaccgtacgaactacacccgaacgtaacgataataaccaactaacacctaccgaaaaacccgctacaaaaaaacgaccacgactcgctactacaaacgcatacgaataaataatacataacctacctcaccaaccgcccgctacgcctacccgacgtaccgctactaacctccgacgaacgcgactactacccgctaaaacgcgaaaccgacatcgcccgcattaaataacgcgacgactaaccgtacgtaaaaaacgacaaacacgcgcaactaaccgtaaaaaacccgcaaataaccgaacaacctacaaccgttccgaacaactaacgaaacgatttcgacgccaattcgcttaacccgaaactacaaaccctacgcattccgttcgacgacaccct

SEQ ID NO: 8167 - DNA, 1229 bp, Artificial Sequence
  chemically treated genomic DNA (Homo sapiens) CpG-island No: 8167
  unsure (697)
tgttttaaacgcggtaattgtattaattaatgttgtcgtttataagtttacgagatgttcgcgtggaggttattagtcggtaagttgattaagtatcgttcggcgtagggcgaggtcgttttcgacgttagcggatagtcgtaattttattaatcggaggtaatatggaaattattaattcgatatttatcggtttttaattcggattcgtttttgtgtcgttagggcgaggattattatatcgttatttcgattttcgagtggttttcgggcgtgcgtatttattattttcgtgatttgaaaaattggtcgttggttagtatttcgttggatcgcgtgtcgatgttggatatgaagggtaattcggatttcggcggtatttgggcgtcgtgtttgagttacgtcgacggtaaattttggttgttttatatcgacgtgaagattgtcgattcgtcgtggaaaaacggtcgtaattttttcgttatcgcgttttttatcgaggggttatggagcgagttaatttcgatgggtaacggcgggtttgattcgtttttgttttacgacgacgatggtcgtaaatattatatttatcgttcgtgggggtcgcgttattatagtaattcgtataatattatcgtgttataggcgtttgattcgtagatcggtacgttttcgttcgagcgtaaaacgttgttantcggtacgtcgttttgttatatcgaaggcgcgtatttgtatcgttacgcgggatggtattatttgatggtcgtcgagggcggtattagttacgagtacgtcgtcgtggtgttgcgttttaaaaatatcgacgggtcgtacgagttgtattcggacgtaacgatgatgattagttggtatttgtcggagaattcgttgtagaagagcggttacggttcgttgttgtagacgtatacgggtgaatggtatatggtttattttattagtcgttcgttgcgtttgttcggcgtgtcgttgttggttttcggcggacgcggttattgttcgttggggcgcgagatcggtatcgttcgtattgaatggcgcgacggttggtcgtacgtggaaggcggtaagtacgcgtagttgatcgtgaaaggttcgtaagtagtcgagtagtttgtagtcgtttcgggtaattggcgggacgatttcgacgttagttcgtttgattcggagttgtagattttgcgtatttcgttcgacgatatttt

SEQ ID NO: 8168 - DNA, 1229 bp, Artificial Sequence
  chemically treated genomic DNA (Homo sapiens) CpG-island No: 8168
  unsure (533)
aaaatatcgtcgaacgaaatacgcaaaatctacaactccgaatcaaacgaactaacgtcgaaatcgtcccgccaattacccgaaacgactacaaactactcgactacttacgaacctttcacgatcaactacgcgtacttaccgccttccacgtacgaccaaccgtcgcgccattcaatacgaacgataccgatctcgcgccccaacgaacaataaccgcgtccgccgaaaaccaacaacgacacgccgaacaaacgcaacgaacgactaataaaataaaccatataccattcacccgtatacgtctacaacaacgaaccgtaaccgctcttctacaacgaattctccgacaaataccaactaatcatcatcgttacgtccgaatacaactcgtacgacccgtcgatatttttaaaacgcaacaccacgacgacgtactcgtaactaataccgccctcgacgaccatcaaataataccatcccgcgtaacgatacaaatacgcgccttcgatataacaaaacgacgtaccgantaacaacgttttacgctcgaacgaaaacgtaccgatctacgaatcaaacgcctataacacgataatattatacgaattactataataacgcgacccccacgaacgataaatataatatttacgaccatcgtcgtcgtaaaacaaaaacgaatcaaacccgccgttacccatcgaaattaactcgctccataacccctcgataaaaaacgcgataacgaaaaaattacgaccgtttttccacgacgaatcgacaatcttcacgtcgatataaaacaaccaaaatttaccgtcgacgtaactcaaacacgacgcccaaataccgccgaaatccgaattacccttcatatccaacatcgacacgcgatccaacgaaatactaaccaacgaccaatttttcaaatcacgaaaataataaatacgcacgcccgaaaaccactcgaaaatcgaaataacgatataataatcctcgccctaacgacacaaaaacgaatccgaattaaaaaccgataaatatcgaattaataatttccatattacctccgattaataaaattacgactatccgctaacgtcgaaaacgacctcgccctacgccgaacgatacttaatcaacttaccgactaataacctccacgcgaacatctcgtaaacttataaacgacaacattaattaatacaattaccgcgtttaaaaca

SEQ ID NO: 8169 - DNA, 539 bp, Artificial Sequence
  chemically treated genomic DNA (Homo sapiens) CpG-island No: 8169
cggtacgcgttagtacgttcgttttgtcggttatttttatatataaggtgtcgaaatagtgcgtatggcgtagttttagatttttttgttgtaggttcgtcgttaggatatcggttagacggtgaatgcggttagcgatacgttttaggttaatcgggtcgtgataaacggtatataaggttggcgatgtttgttagtagtattttgggaagtataaatgttggagttcgtttttttacggcggatatgttgttcgcgagtttgtatcgttatgcgtagcgcggtattgttagttgtatttttcgatatatcgatatacggttcggtattgagcgtttgtatttatttttcgtcgtaaagaatgtcgcgtgtgggttatcgtagtttatcggtacgtcgaagcgttgcgtcgaattaaaaataatattcgcgttttgtttattcggcgtagttaatagtattagcgttataatatcggcggtaacgttgattataattttgcgtgattttagttcgttaataagcgtagtgtagtcgtg

SEQ ID NO: 8170 - DNA, 539 bp, Artificial Sequence
  chemically treated genomic DNA (Homo sapiens) CpG-island No: 8170
cacgactacactacgcttattaacgaactaaaatcacgcaaaattataatcaacgttaccgccgatattataacgctaatactattaactacgccgaataaacaaaacgcgaatattatttttaattcgacgcaacgcttcgacgtaccgataaactacgataacccacacgcgacattctttacgacgaaaaataaatacaaacgctcaataccgaaccgtatatcgatatatcgaaaaatacaactaacaataccgcgctacgcataacgatacaaactcgcgaacaacatatccgccgtaaaaaaacgaactccaacatttatacttcccaaaatactactaacaaacatcgccaaccttatataccgtttatcacgacccgattaacctaaaacgtatcgctaaccgcattcaccgtctaaccgatatcctaacgacgaacctacaacaaaaaaatctaaaactacgccatacgcactatttcgacaccttatatataaaaataaccgacaaaacgaacgtactaacgcgtaccg

SEQ ID NO: 8171 - DNA, 539 bp, Artificial Sequence
  chemically treated genomic DNA (Homo sapiens) CpG-island No: 8171
tacgattatattgcgtttattagcgaattgaaattacgtaaaattgtggttagcgttgtcgtcgatattatggcgttggtgttgttaattgcgtcgggtaaatagggcgcggatattgtttttggttcggcgtaacgtttcggcgtgtcgatgggttacggtggtttatacgcggtattttttgcggcgaaagatgaatataaacgtttaatgtcgggtcgtatatcggtgtatcgaaagatgtagttggtaatatcgcgttgcgtatggcgatgtagattcgcgagtaatatattcgtcgtgagaaagcgaattttaatatttgtattttttagggtattgttggtaaatatcgttagttttgtatgtcgtttattacggttcggttggtttgaaacgtatcgttaatcgtatttatcgtttgatcgatattttggcggcgggtttgtaataaaaaggtttgaaattgcgttatgcgtattatttcgatattttgtgtgtggaagtggtcgataaagcgggcgtattgacgcgtgtcg

SEQ ID NO: 8172 - DNA, 539 bp, Artificial Sequence
  chemically treated genomic DNA (Homo sapiens) CpG-island No: 8172
cgacacgcgtcaatacgcccgctttatcgaccacttccacacacaaaatatcgaaataatacgcataacgcaatttcaaacctttttattacaaacccgccgccaaaatatcgatcaaacgataaatacgattaacgatacgtttcaaaccaaccgaaccgtaataaacgacatacaaaactaacgatatttaccaacaataccctaaaaaatacaaatattaaaattcgctttctcacgacgaatatattactcgcgaatctacatcgccatacgcaacgcgatattaccaactacatctttcgatacaccgatatacgacccgacattaaacgtttatattcatctttcgccgcaaaaaataccgcgtataaaccaccgtaacccatcgacacgccgaaacgttacgccgaaccaaaaacaatatccgcgccctatttacccgacgcaattaacaacaccaacgccataatatcgacgacaacgctaaccacaattttacgtaatttcaattcgctaataaacgcaatataatcgta

SEQ ID NO: 8173 - DNA, 695 bp, Artificial Sequence
  chemically treated genomic DNA (Homo sapiens) CpG-island No: 8173
  unsure (8)
tgggttanggcgtgggaggattttagcgtcgggatgattttttcgtgtaggtatagcgttttgaaggttttaagggttttattatcggtaatagatacgtaattagcgcgtttagtgttgttaagatacgcgtgttgtgggtcgatagacgggaaatttagttcggcggagatggagtaagattttttaatttgttcgttttcggtttgtattatcggcgtttttatatcgaaatagatatttacgcgattatgttttagcggtgcgtcgtgttcgttagtttcgatatcgtgattatttggttttatattaattaggtcgacgttggttttattgatgaaattagtaaatatgtcgatggtattcgaatcgtcgttaatataggcgataacggtattcggtaggcgattttttttttttagaatttgcgttttggttttttcgttaattattcgttgaaatttacgtataatggtcggataaggatgcgggttagttgcggtgtttagtatatagtgcgcggtttcgtaattatcggattagtcgcgtagagtttcgattataggtatttattagacgtcgcggaatcgttatgtttcgggattattttcgtaattattaagcgtatacgaaaaacgttaggcgattggcgtttaacgtttttggaatttatatatatacggtatattaggtta

SEQ ID NO: 8174 - DNA, 695 bp, Artificial Sequence
  chemically treated genomic DNA (Homo sapiens) CpG-island No: 8174
  unsure (688)
taacctaatataccgtatatatataaattccaaaaacgttaaacgccaatcgcctaacgtttttcgtatacgcttaataattacgaaaataatcccgaaacataacgattccgcgacgtctaataaatacctataatcgaaactctacgcgactaatccgataattacgaaaccgcgcactatatactaaacaccgcaactaacccgcatccttatccgaccattatacgtaaatttcaacgaataattaacgaaaaaaccaaaacgcaaattctaaaaaaaaaaaatcgcctaccgaataccgttatcgcctatattaacgacgattcgaataccatcgacatatttactaatttcatcaataaaaccaacgtcgacctaattaatataaaaccaaataatcacgatatcgaaactaacgaacacgacgcaccgctaaaacataatcgcgtaaatatctatttcgatataaaaacgccgataatacaaaccgaaaacgaacaaattaaaaaatcttactccatctccgccgaactaaatttcccgtctatcgacccacaacacgcgtatcttaacaacactaaacgcgctaattacgtatctattaccgataataaaacccttaaaaccttcaaaacgctatacctacacgaaaaaatcatcccgacgctaaaatcctcccacgccntaaccca

SEQ ID NO: 8175 - DNA, 695 bp, Artificial Sequence
  chemically treated genomic DNA (Homo sapiens) CpG-island No: 8175
  unsure (688)
tggtttgatatgtcgtatgtatatgggttttaaagacgttgaacgttagtcgtttaacgtttttcgtatgcgtttaatggttgcggaagtgatttcggggtatagcggtttcgcgacgtttgatagatgtttgtaatcgaggttttgcgcgattggttcggtagttacgaaatcgcgtattatatgttgggtatcgtagttggttcgtatttttattcgattattgtgcgtgagttttagcggatgattggcgaagaaattaaagcgtagattttggaaagagaaggtcgtttgtcggatgtcgttatcgtttgtgttggcggcggttcgaatgttatcggtatgtttgttgattttattaatgaaattaacgtcggtttgattggtgtggagttaggtggttacggtatcgaaattggcgagtacggcgtatcgttaaaatatggtcgcgtgggtatttatttcggtatgaaagcgtcgatgatgtaaatcgaagacgggtagattgaagaattttattttattttcgtcggattggatttttcgtttgtcggtttataatacgcgtattttaatagtattggacgcgttgattacgtgtttattatcgatgatgaagtttttgaagtttttaaaacgttgtgtttgtacgaagggattatttcggcgttggaatttttttacgttntggttta

SEQ ID NO: 8176 - DNA, 695 bp, Artificial Sequence
  chemically treated genomic DNA (Homo sapiens) CpG-island No: 8176
  unsure (8)
taaaccanaacgtaaaaaaattccaacgccgaaataatcccttcgtacaaacacaacgttttaaaaacttcaaaaacttcatcatcgataataaacacgtaatcaacgcgtccaatactattaaaatacgcgtattataaaccgacaaacgaaaaatccaatccgacgaaaataaaataaaattcttcaatctacccgtcttcgatttacatcatcgacgctttcataccgaaataaatacccacgcgaccatattttaacgatacgccgtactcgccaatttcgataccgtaaccacctaactccacaccaatcaaaccgacgttaatttcattaataaaatcaacaaacataccgataacattcgaaccgccgccaacacaaacgataacgacatccgacaaacgaccttctctttccaaaatctacgctttaatttcttcgccaatcatccgctaaaactcacgcacaataatcgaataaaaatacgaaccaactacgatacccaacatataatacgcgatttcgtaactaccgaaccaatcgcgcaaaacctcgattacaaacatctatcaaacgtcgcgaaaccgctataccccgaaatcacttccgcaaccattaaacgcatacgaaaaacgttaaacgactaacgttcaacgtctttaaaacccatatacatacgacatatcaaacca

SEQ ID NO: 8177 - DNA, 519 bp, Artificial Sequence
  chemically treated genomic DNA (Homo sapiens) CpG-island No: 8177
ttggaagtatttagacgttgacgcgaataaaacgtaaagtgcgtttggttgttggtttgaatagcgaaaatgttttttttaatgaagtaatggagcgcggttggtaatgtttgcgtttgtttgttgaacgtttgtaagatatttttttttcgtaaattcgcgttgtcgttacggcgacgttacgttttgtcgttaagtgcgggtgattttattgttaaagcgtaggaaattttcggttgttcggtataggtgattagcggtgaagaggaagtacgtttgatttattagggcgtttgtttatattattggtggtgtcgattagcgtttggtggtggatataggcggagttagtattgaattggtaatcggtacgggtgtataaattatttcgttgtttagtttgtcgatgggttgcgttatttggttggaacgttattttgtcgatcgtaatttggggtaggaaaattttgatgttgtagaaaaagcggtacgcgaagtgttacgttcggttgtcgatga

SEQ ID NO: 8178 - DNA, 519 bp, Artificial Sequence
  chemically treated genomic DNA (Homo sapiens) CpG-island No: 8178
tcatcgacaaccgaacgtaacacttcgcgtaccgctttttctacaacatcaaaattttcctaccccaaattacgatcgacaaaataacgttccaaccaaataacgcaacccatcgacaaactaaacaacgaaataatttatacacccgtaccgattaccaattcaatactaactccgcctatatccaccaccaaacgctaatcgacaccaccaataatataaacaaacgccctaataaatcaaacgtacttcctcttcaccgctaatcacctataccgaacaaccgaaaatttcctacgctttaacaataaaatcacccgcacttaacgacaaaacgtaacgtcgccgtaacgacaacgcgaatttacgaaaaaaaaatatcttacaaacgttcaacaaacaaacgcaaacattaccaaccgcgctccattacttcattaaaaaaaacattttcgctattcaaaccaacaaccaaacgcactttacgttttattcgcgtcaacgtctaaatacttccaa

SEQ ID NO: 8179 - DNA, 519 bp, Artificial Sequence
  chemically treated genomic DNA (Homo sapiens) CpG-island No: 8179
ttatcggtaatcggacgtaatatttcgcgtgtcgttttttttgtagtattaaaatttttttgttttagattacgatcggtaaaatagcgttttagttaggtgacgtagtttatcgataggttgaataacgaggtggtttgtgtattcgtgtcggttattagtttagtattggtttcgtttatatttattattaggcgttgatcggtattattagtggtgtgagtaagcgttttgataaattagacgtgttttttttttatcgttgattatttgtatcggataatcgagaattttttgcgttttggtaataaaattattcgtatttgacggtaaggcgtaacgtcgtcgtagcgataacgcgaatttgcgagggaggaatattttgtagacgtttagtaaataggcgtaaatattgttaatcgcgttttattgttttattggagagggtattttcgttatttaggttagtagttagacgtattttgcgttttattcgcgttagcgtttggatgtttttag

SEQ ID NO: 8180 - DNA, 519 bp, Artificial Sequence
  chemically treated genomic DNA (Homo sapiens) CpG-island No: 8180
ctaaaaacatccaaacgctaacgcgaataaaacgcaaaatacgtctaactactaacctaaataacgaaaataccctctccaataaaacaataaaacgcgattaacaatatttacgcctatttactaaacgtctacaaaatattcctccctcgcaaattcgcgttatcgctacgacgacgttacgccttaccgtcaaatacgaataattttattaccaaaacgcaaaaaattctcgattatccgatacaaataatcaacgataaaaaaaaaacacgtctaatttatcaaaacgcttactcacaccactaataataccgatcaacgcctaataataaatataaacgaaaccaatactaaactaataaccgacacgaatacacaaaccacctcgttattcaacctatcgataaactacgtcacctaactaaaacgctattttaccgatcgtaatctaaaacaaaaaaattttaatactacaaaaaaaacgacacgcgaaatattacgtccgattaccgataa

SEQ ID NO: 8181 - DNA, 542 bp, Artificial Sequence
  chemically treated genomic DNA (Homo sapiens) CpG-island No: 8181
ggcgttgttgcgttagttcgttgatgttattttagtatggatgatgcgttaggcgggtcgttatttatcggaatataaagttacgcgcgtttaggtaggcgattttatgtcgttgtgtaaaaacgtcgagttggcgtgcgaagtgattttgtaatcgttgcgtcgttattcgttggatgcggcgattttttttttcgatatttttatcgtgtcggacgcgatggggttagggttttattttgaagtcggagaaggttcgcgttttatttcgttagttatttgtaaagttgacgtcgataaattgttaatttcggattcggaagatgaattgggttacgtgatgaacgcggtgcgtattattcgtcgcgaattgaaaggcgaagtgtcgttgattggttttttcggtagttcgtggacgttggcgatttatatggtggaaggcggtagtagtaaagtttttatcgtgattaaaaaaatgatgtatgtcgattcgtaggcgttgtacgttttgttcgataaattggcgaaaagcgttattttgt

SEQ ID NO: 8182 - DNA, 542 bp, Artificial Sequence
  chemically treated genomic DNA (Homo sapiens) CpG-island No: 8182
acaaaataacgcttttcgccaatttatcgaacaaaacgtacaacgcctacgaatcgacatacatcatttttttaatcacgataaaaactttactactaccgccttccaccatataaatcgccaacgtccacgaactaccgaaaaaaccaatcaacgacacttcgcctttcaattcgcgacgaataatacgcaccgcgttcatcacgtaacccaattcatcttccgaatccgaaattaacaatttatcgacgtcaactttacaaataactaacgaaataaaacgcgaaccttctccgacttcaaaataaaaccctaaccccatcgcgtccgacacgataaaaatatcgaaaaaaaaaatcgccgcatccaacgaataacgacgcaacgattacaaaatcacttcgcacgccaactcgacgtttttacacaacgacataaaatcgcctacctaaacgcgcgtaactttatattccgataaataacgacccgcctaacgcatcatccatactaaaataacatcaacgaactaacgcaacaacgcc

SEQ ID NO: 8183 - DNA, 542 bp, Artificial Sequence
  chemically treated genomic DNA (Homo sapiens) CpG-island No: 8183
ataaagtgacgtttttcgttagtttatcgagtagagcgtgtagcgtttgcggatcggtatatattatttttttgattacggtgaaggttttgttgttgtcgttttttattatgtaggtcgttagcgtttacgggttgtcggaaaaattaattagcggtatttcgttttttagttcgcgacgaatggtacgtatcgcgtttattacgtaatttagtttatttttcgggttcggaattggtagtttatcgacgttagttttgtaggtgattggcgaggtaaaacgcggatttttttcggttttaaaatagagttttaattttatcgcgttcggtacggtgaggatatcggaaaagaggatcgtcgtatttagcgggtagcgacgtagcggttgtaaagttatttcgtacgttagttcggcgtttttgtatagcgatataaaatcgtttgtttgggcgcgcgtggttttatatttcggtagatagcgattcgtttggcgtattatttatattggagtgatattaacgggttggcgtagtagcgtt

SEQ ID NO: 8184 - DNA, 542 bp, Artificial Sequence
  chemically treated genomic DNA (Homo sapiens) CpG-island No: 8184
aacgctactacgccaacccgttaatatcactccaatataaataatacgccaaacgaatcgctatctaccgaaatataaaaccacgcgcgcccaaacaaacgattttatatcgctatacaaaaacgccgaactaacgtacgaaataactttacaaccgctacgtcgctacccgctaaatacgacgatcctcttttccgatatcctcaccgtaccgaacgcgataaaattaaaactctattttaaaaccgaaaaaaatccgcgttttacctcgccaatcacctacaaaactaacgtcgataaactaccaattccgaacccgaaaaataaactaaattacgtaataaacgcgatacgtaccattcgtcgcgaactaaaaaacgaaataccgctaattaatttttccgacaacccgtaaacgctaacgacctacataataaaaaacgacaacaacaaaaccttcaccgtaatcaaaaaaataatatataccgatccgcaaacgctacacgctctactcgataaactaacgaaaaacgtcactttat

SEQ ID NO: 8185 - DNA, 525 bp, Artificial Sequence
  chemically treated genomic DNA (Homo sapiens) CpG-island No: 8185
gtttgcggtaaggggtttagttagagttcgtatttgtcggcgttggtgtagttatatcggttttattagtatagtcggagaagtttgcgttgtattttagatatgggcgtgttgcgtattgtggttttatgtgatattgggaacgttacgagtagggtcgaaattgtttacgtggaattagcggaatggtagtttggagatgtttttaagtttgttaatttgtaagtagtcgaatgtaatcgtatattttgcgtacgggtcgtcgatttattaattatgttatgggcgagaaaaagtggtttgaattcgtgttgttaatttttaaacgtgttcgcgcgttttattgcgtttttttcgtgttatatgcgttatattatggattgttgttcggtttcgggtaatggataggggttaatttaattggttcgttggattaaatttggtttcgtttggttggttattcgggcgtaattcgtaaaaggaggaatatatcgggatttgtattatacgaaaaggtgagtaaaa

SEQ ID NO: 8186 - DNA, 525 bp, Artificial Sequence
  chemically treated genomic DNA (Homo sapiens) CpG-island No: 8186
ttttactcaccttttcgtataatacaaatcccgatatattcctccttttacgaattacgcccgaataaccaaccaaacgaaaccaaatttaatccaacgaaccaattaaattaacccctatccattacccgaaaccgaacaacaatccataatataacgcatataacacgaaaaaaacgcaataaaacgcgcgaacacgtttaaaaattaacaacacgaattcaaaccactttttctcgcccataacataattaataaatcgacgacccgtacgcaaaatatacgattacattcgactacttacaaattaacaaacttaaaaacatctccaaactaccattccgctaattccacgtaaacaatttcgaccctactcgtaacgttcccaatatcacataaaaccacaatacgcaacacgcccatatctaaaatacaacgcaaacttctccgactatactaataaaaccgatataactacaccaacgccgacaaatacgaactctaactaaaccccttaccgcaaac

SEQ ID NO: 8187 - DNA, 525 bp, Artificial Sequence
  chemically treated genomic DNA (Homo sapiens) CpG-island No: 8187
ttttgtttattttttcgtgtggtataaatttcggtgtatttttttttttgcggattacgttcgggtaattaattaggcgaaattaggtttggtttaacggattaattgggttaatttttgtttattgttcggagtcgggtagtaatttatggtataacgtatgtgatacgggaaggacgtaatggagcgcgcgaatacgtttaagaattggtaatacgagtttaggttattttttttcgtttatggtataattgatgaatcggcgattcgtgcgtaggatgtgcgattgtattcggttgtttgtaaattgatagatttggagatatttttaagttgttatttcgttagttttacgtgggtaatttcgattttgttcgtgacgtttttagtgttatataaggttataatacgtagtacgtttatgtttagaatgtaacgtagattttttcggttatgttaatagagtcggtatggttgtattagcgtcgataggtgcgggttttaattaggttttttgtcgtaagt

SEQ ID NO: 8188 - DNA, 525 bp, Artificial Sequence
  chemically treated genomic DNA (Homo sapiens) CpG-island No: 8188
acttacgacaaaaaacctaattaaaacccgcacctatcgacgctaatacaaccataccgactctattaacataaccgaaaaaatctacgttacattctaaacataaacgtactacgtattataaccttatataacactaaaaacgtcacgaacaaaatcgaaattacccacgtaaaactaacgaaataacaacttaaaaatatctccaaatctatcaatttacaaacaaccgaatacaatcgcacatcctacgcacgaatcgccgattcatcaattataccataaacgaaaaaaaataacctaaactcgtattaccaattcttaaacgtattcgcgcgctccattacgtccttcccgtatcacatacgttataccataaattactacccgactccgaacaataaacaaaaattaacccaattaatccgttaaaccaaacctaatttcgcctaattaattacccgaacgtaatccgcaaaaaaaaaaatacaccgaaatttataccacacgaaaaaataaacaaaa

SEQ ID NO: 8189 - DNA, 737 bp, Artificial Sequence
  chemically treated genomic DNA (Homo sapiens) CpG-island No: 8189
agcgtttgtgtatcggtgatgcgtttgatcgtgaaaaatttgacgtttgggcggcgattgtttcgtatattatcggtaattcgttatattattggacgtatttcgaattgcgtcgttcgtttggtattattggtaaattgtttttttcgttaattgtcgatgaaatttggaacgaatgtaacgaattgttggcgtaggataattttttcgcgcgcggtattatgtagtagatgaacgtgaaaatggtcggtattatcgatgattcgatcgattttttggagtattacgtagagatcgttaaagacggtttttttattattaaagtgttgtcgagttggcgttcggataaagtttttaatatcgaataggcgatttttaacgattatatggcgaagttgggcgaagttttcgatatcgatattcgtcgttttgttgatttgtaaattgttttgattaaacgtttggattatttcgtcgtttacggttgtaaagtgtttgattacgcgttggatgtggtgatgtttgttgaagcgaacgaagcggaattggatagtattttggcgcgtcgtttggttggcgaaattttgagcgagtacgaagtggcgtagtttaaaattgcggtattggtgttttttggtgtcgaatatgtacgtcgcggttgggtatagtagtattatattggcgcgttgcgtaataataattgcgttagtttaaattgttggggtcggatgtaggtt

SEQ ID NO: 8190 - DNA, 737 bp, Artificial Sequence
  chemically treated genomic DNA (Homo sapiens) CpG-island No: 8190
aacctacatccgaccccaacaatttaaactaacgcaattattattacgcaacgcgccaatataatactactatacccaaccgcgacgtacatattcgacaccaaaaaacaccaataccgcaattttaaactacgccacttcgtactcgctcaaaatttcgccaaccaaacgacgcgccaaaatactatccaattccgcttcgttcgcttcaacaaacatcaccacatccaacgcgtaatcaaacactttacaaccgtaaacgacgaaataatccaaacgtttaatcaaaacaatttacaaatcaacaaaacgacgaatatcgatatcgaaaacttcgcccaacttcgccatataatcgttaaaaatcgcctattcgatattaaaaactttatccgaacgccaactcgacaacactttaataataaaaaaaccgtctttaacgatctctacgtaatactccaaaaaatcgatcgaatcatcgataataccgaccattttcacgttcatctactacataataccgcgcgcgaaaaaattatcctacgccaacaattcgttacattcgttccaaatttcatcgacaattaacgaaaaaaacaatttaccaataataccaaacgaacgacgcaattcgaaatacgtccaataatataacgaattaccgataatatacgaaacaatcgccgcccaaacgtcaaatttttcacgatcaaacgcatcaccgatacacaaacgct

SEQ ID NO: 8191 - DNA, 737 bp, Artificial Sequence
  chemically treated genomic DNA (Homo sapiens) CpG-island No: 8191
agtttatattcggttttagtagtttgaattgacgtagttgttattacgtagcgcgttaatgtggtattgttgtatttagtcgcgacgtgtatattcggtattaaggaatattagtatcgtagttttgaattgcgttatttcgtgttcgtttagggtttcgttagttagacggcgcgttagaatgttgtttagtttcgtttcgttcgttttagtaaatattattatatttagcgcgtggttagatattttatagtcgtgagcggcgaagtgatttagacgtttggttagggtagtttgtaggttagtaaagcggcgaatgtcggtatcggaaatttcgtttagtttcgttatgtagtcgttaaaggtcgtttgttcgatgttgaaggttttgttcggacgttagttcggtagtattttgatggtgaaagagtcgtttttggcgatttttgcgtgatgttttagagaatcgatcgggttatcggtggtgtcgattatttttacgtttatttgttgtatgatgtcgcgcgcggagaagttattttgcgttagtagttcgttatattcgttttagattttatcggtagttgacggagaaagtaatttgttagtgatattaaacggacggcgtagttcgaggtgcgtttagtggtataacgggttgtcgatagtgtgcggaatagtcgtcgtttaggcgttaaattttttacggttagacgtattatcggtatatagacgtt

SEQ ID NO: 8192 - DNA, 737 bp, Artificial Sequence
  chemically treated genomic DNA (Homo sapiens) CpG-island No: 8192
aacgtctatataccgataatacgtctaaccgtaaaaaatttaacgcctaaacgacgactattccgcacactatcgacaacccgttataccactaaacgcacctcgaactacgccgtccgtttaatatcactaacaaattactttctccgtcaactaccgataaaatctaaaacgaatataacgaactactaacgcaaaataacttctccgcgcgcgacatcatacaacaaataaacgtaaaaataatcgacaccaccgataacccgatcgattctctaaaacatcacgcaaaaatcgccaaaaacgactctttcaccatcaaaatactaccgaactaacgtccgaacaaaaccttcaacatcgaacaaacgacctttaacgactacataacgaaactaaacgaaatttccgataccgacattcgccgctttactaacctacaaactaccctaaccaaacgtctaaatcacttcgccgctcacgactataaaatatctaaccacgcgctaaatataataatatttactaaaacgaacgaaacgaaactaaacaacattctaacgcgccgtctaactaacgaaaccctaaacgaacacgaaataacgcaattcaaaactacgatactaatattccttaataccgaatatacacgtcgcgactaaatacaacaataccacattaacgcgctacgtaataacaactacgtcaattcaaactactaaaaccgaatataaact

SEQ ID NO: 8193 - DNA, 853 bp, Artificial Sequence
  chemically treated genomic DNA (Homo sapiens) CpG-island No: 8193
  unsure (247, 267, 720, 722..723, 740, 753, 769..)
ataaattatcgtcgattagtgcgttacgttcgtttagtttatgggtttgcgatatattgtttgcggataggagtcgatattggtgacgtggtcgtgttttagtttatttatcgtttagttggacgatatagcggcggattgtcgttagtagaaggtagaattatacgttgtgtatagacgttttacggcgttttatttttacggtttagcgattcgatttgtataagagcgagcgggtttatgttgntttataggttttgttattgncgttgatatggttcgtaatttttgagagggaatcgtcgcgatattatttggtttattacgtaattgatgtttgggatcgagttagtagagtgtatattcgtatcgcgtagtatttatgttaagtatcgttcggattacgcgttgatgatagtttatagcgttcgcgttgcgagtagtgtcgttatcgattttttatcggtcgaacggtggatttagattagttcggtatggtttcgtaaatcggttttatatttttttagtcgttagttgttagcggagtggtagttatttcgcgattattcggtatacggtaagttacgtagagtttaattttttttaggttatttagtaacgtttacgtttagttaggtagaagttagatagggagtttagttgtatcgtacgacgaacggtaacggtgtttagttagtcggtacgacgacgacgtttcgntnnagttgttgtcgaagtgntcgttgattttgncgttgtacgaggaatnntcgttagttttatttaaatagttcggtcgggaacggatttgtatttatacgagtggagtaagttttgaggatatttagaacgt

SEQ ID NO: 8194 - DNA, 853 bp, Artificial Sequence
  chemically treated genomic DNA (Homo sapiens) CpG-island No: 8194
  unsure (84..85, 101, 114, 131..132, 134, 587, 607)
acgttctaaatatcctcaaaacttactccactcgtataaatacaaatccgttcccgaccgaactatttaaataaaactaacgannattcctcgtacaacgncaaaatcaacgancacttcgacaacaactnnancgaaacgtcgtcgtcgtaccgactaactaaacaccgttaccgttcgtcgtacgatacaactaaactccctatctaacttctacctaactaaacgtaaacgttactaaataacctaaaaaaaattaaactctacgtaacttaccgtataccgaataatcgcgaaataactaccactccgctaacaactaacgactaaaaaaatataaaaccgatttacgaaaccataccgaactaatctaaatccaccgttcgaccgataaaaaatcgataacgacactactcgcaacgcgaacgctataaactatcatcaacgcgtaatccgaacgatacttaacataaatactacgcgatacgaatatacactctactaactcgatcccaaacatcaattacgtaataaaccaaataatatcgcgacgattccctctcaaaaattacgaaccatatcaacgncaataacaaaacctataaancaacataaacccgctcgctcttatacaaatcgaatcgctaaaccgtaaaaataaaacgccgtaaaacgtctatacacaacgtataattctaccttctactaacgacaatccgccgctatatcgtccaactaaacgataaataaactaaaacacgaccacgtcaccaatatcgactcctatccgcaaacaatatatcgcaaacccataaactaaacgaacgtaacgcactaatcgacgataatttat

SEQ ID NO: 8195 - DNA, 853 bp, Artificial Sequence
  chemically treated genomic DNA (Homo sapiens) CpG-island No: 8195
  unsure (84..85, 101, 114, 131..132, 134, 587, 607)
acgttttgggtatttttaaagtttattttattcgtgtaggtgtaggttcgttttcgatcgaattgtttagatgaaattggcganngtttttcgtgtaacgntagggttaacgantatttcggtagtaattnnancggggcgtcgtcgtcgtatcggttggttggatatcgttgtcgttcgtcgtgcggtatagttgaattttttgtttggtttttgtttgattaaacgtggacgttgttggatggtttgaaagaggttaaattttgcgtggtttatcgtatgtcggatggtcgcgaagtgattattatttcgttggtagttgacgattggaaaggtgtagagtcgatttacgaaattatgtcgggttggtttgaatttatcgttcggtcggtgaaagatcggtagcggtattgttcgtagcgcggacgttgtagattattattagcgcgtgattcgaacgatgtttgatatgggtgttgcgcgatgcgaatatatattttgttagttcggttttaggtattagttacgtgataagttaagtgatatcgcggcgatttttttttaggagttgcgagttatgttagcgntaatgatagagtttgtgagntagtatgggttcgttcgtttttatatagatcggatcgttagatcgtggagatgagacgtcgtggggcgtttatgtataacgtgtaattttgttttttgttagcgataattcgtcgttgtgtcgtttagttaggcggtaaataggttgaagtacggttacgttattagtatcggtttttgttcgtaagtagtatgtcgtaagtttatgaattggacgaacgtggcgtattgatcggcggtaatttgt

SEQ ID NO: 8196 - DNA, 853 bp, Artificial Sequence
  chemically treated genomic DNA (Homo sapiens) CpG-island No: 8196
  unsure (247, 267, 720, 722..723, 740, 753, 769..)
acaaattaccgccgatcaatacgccacgttcgtccaattcataaacttacgacatactacttacgaacaaaaaccgatactaataacgtaaccgtacttcaacctatttaccgcctaactaaacgacacaacgacgaattatcgctaacaaaaaacaaaattacacgttatacataaacgccccacgacgtctcatctccacgatctaacgatccgatctatataaaaacgaacgaacccatactanctcacaaactctatcattancgctaacataactcgcaactcctaaaaaaaaatcgccgcgatatcacttaacttatcacgtaactaatacctaaaaccgaactaacaaaatatatattcgcatcgcgcaacacccatatcaaacatcgttcgaatcacgcgctaataataatctacaacgtccgcgctacgaacaataccgctaccgatctttcaccgaccgaacgataaattcaaaccaacccgacataatttcgtaaatcgactctacacctttccaatcgtcaactaccaacgaaataataatcacttcgcgaccatccgacatacgataaaccacgcaaaatttaacctctttcaaaccatccaacaacgtccacgtttaatcaaacaaaaaccaaacaaaaaattcaactataccgcacgacgaacgacaacgatatccaaccaaccgatacgacgacgacgccccgntnnaattactaccgaaatantcgttaaccctancgttacacgaaaaacnntcgccaatttcatctaaacaattcgatcgaaaacgaacctacacctacacgaataaaataaactttaaaaatacccaaaacgt

SEQ ID NO: 8197 - DNA, 647 bp, Artificial Sequence
  chemically treated genomic DNA (Homo sapiens) CpG-island No: 8197
agatcggtcgttagtagtaatagcgtttcgtatagcgtcgtttgggttagtttttagcgagcggtgtcgttaatgcgtcgggtaatgtgcggtgcgattaaagtaataaaggaaatcggttcggtaagcgttgttgtcgtagcggtaagtattattgtaattagtattattaatagacgcgaacgttcgacgttgacgtttagcgtatacgcggtattatcgtttatttttagtaagcgtattcggcgtattagtaaggcggcggtaatgagtattaatataatgatgggtgcggaaggcgaggttttgtttacgttaggtcgtttgagcgattcggtattttataaatttgttgttacgcgtcgttttttaaacgacgttttttacgtaatacgttagttattaaacggttattagtatggcgcgaacgtcgatatcgattaataattaatcgtaaaggtgtttattgtcgtgcgttaggcgagtagttagattagtagcgaagttgataatgtcgtttattattgttgatagcgcgatattcgttaggttttgattaaatagtattatcgttattagtacgtcgttttacgtttcggttgttaaagtttattacgtttagggttgtcgagacgggttacgtatta

SEQ ID NO: 8198 - DNA, 647 bp, Artificial Sequence
  chemically treated genomic DNA (Homo sapiens) CpG-island No: 8198
taatacgtaacccgtctcgacaaccctaaacgtaataaactttaacaaccgaaacgtaaaacgacgtactaataacgataatactatttaatcaaaacctaacgaatatcgcgctatcaacaataataaacgacattatcaacttcgctactaatctaactactcgcctaacgcacgacaataaacacctttacgattaattattaatcgatatcgacgttcgcgccatactaataaccgtttaataactaacgtattacgtaaaaaacgtcgtttaaaaaacgacgcgtaacaacaaatttataaaataccgaatcgctcaaacgacctaacgtaaacaaaacctcgccttccgcacccatcattatattaatactcattaccgccgccttactaatacgccgaatacgcttactaaaaataaacgataataccgcgtatacgctaaacgtcaacgtcgaacgttcgcgtctattaataatactaattacaataatacttaccgctacgacaacaacgcttaccgaaccgatttcctttattactttaatcgcaccgcacattacccgacgcattaacgacaccgctcgctaaaaactaacccaaacgacgctatacgaaacgctattactactaacgaccgatct

SEQ ID NO: 8199 - DNA, 647 bp, Artificial Sequence
  chemically treated genomic DNA (Homo sapiens) CpG-island No: 8199
tgatgcgtaattcgtttcggtagttttgagcgtaatgggttttaatagtcggggcgtggagcggcgtgttggtggcgatggtgttgtttggttaggatttgacgggtatcgcgttgttagtaatggtgggcggtattgttagtttcgttgttggtttggttgttcgtttggcgtacggtagtggatatttttgcggttgattattagtcggtatcggcgttcgcgttatgttggtggtcgtttaatagttggcgtgttgcgtggagagcgtcgtttagagagcggcgcgtaatagtaggtttgtggaatgtcggatcgtttaagcggtttgacgtgggtaaaatttcgtttttcgtatttattattatattgatgtttattgtcgtcgttttattggtacgtcggatgcgtttgttggaaatgggcgatgatatcgcgtgtgcgttgggcgttagcgtcgaacgttcgcgtttgttaatgatgttggttgtagtggtgtttatcgttgcggtaatagcgtttgtcgggtcgattttttttattgttttagtcgtatcgtatattgttcgacgtattagcggtatcgttcgttgggggttaatttaggcggcgttatgcggggcgttgttattgttggcggtcgattt

SEQ ID NO: 8200 - DNA, 647 bp, Artificial Sequence
  chemically treated genomic DNA (Homo sapiens) CpG-island No: 8200
aaatcgaccgccaacaataacaacgccccgcataacgccgcctaaattaacccccaacgaacgataccgctaatacgtcgaacaatatacgatacgactaaaacaataaaaaaaatcgacccgacaaacgctattaccgcaacgataaacaccactacaaccaacatcattaacaaacgcgaacgttcgacgctaacgcccaacgcacacgcgatatcatcgcccatttccaacaaacgcatccgacgtaccaataaaacgacgacaataaacatcaatataataataaatacgaaaaacgaaattttacccacgtcaaaccgcttaaacgatccgacattccacaaacctactattacgcgccgctctctaaacgacgctctccacgcaacacgccaactattaaacgaccaccaacataacgcgaacgccgataccgactaataatcaaccgcaaaaatatccactaccgtacgccaaacgaacaaccaaaccaacaacgaaactaacaataccgcccaccattactaacaacgcgatacccgtcaaatcctaaccaaacaacaccatcgccaccaacacgccgctccacgccccgactattaaaacccattacgctcaaaactaccgaaacgaattacgcatca

SEQ ID NO: 8201 - DNA, 894 bp, Artificial Sequence
  chemically treated genomic DNA (Homo sapiens) CpG-island No: 8201
  unsure (608)
gttagattcgttaatttgtagtcgataaatgttataatatcggattagacgatcgtaatggcgatgttttttagttgtattagtaattgatggtttatcgttatatttttagcgaagtttacgtcgtttagcgagttggcggtaaaaatttcggttatgatatagtcgataatgttataaacgtcgtgtatatcgaagatatcgtagggattatttattcgtagtaagcgtttgagtatggtaacgttttataagttcgttagattagttattacgtcgataattaacgcgtcgttaattttaatgtagtcgtaggttggcgttacgtcgattagatcggtaatcgcgttagaatacgtttttagtagtgaaggtttattacgtagcgtttatttatcgaagatttagttaagaattgtcgtcgtcgttgcgattatagtatttataaatgttagtgtcgcgattttattcgtcgtgttcgttgattcggcgttaaagttaaattaatcgatatagagaatggtagtttcggtgaagattatcggtaggttgtgcggtttaaacgtttttttatcgaagtttacgcgtttttttattagatacgcgtntattagaacggcgatagcggcgtttatgtgtattaggtgttatcgggaaattagcgtacgcgagaagttaggaaatatcggttaattatatggtaatcgagggaaaaagggtgttaatataggaaatattcggttaaacggatcgtcgttaggcgtaaaaatggcgcgagaacgggaaatttcgagatcggtatggtatttttttttttttcgttttttttttttgtgttacgaggtttttatagtaggtttcgaaaaaaagatgcgacgtatatagggaatatag

SEQ ID NO: 8202 - DNA, 894 bp, Artificial Sequence
  chemically treated genomic DNA (Homo sapiens) CpG-island No: 8202
  unsure (287)
ctatattccctatatacgtcgcatctttttttcgaaacctactataaaaacctcgtaacacaaaaaaaaaaaacgaaaaaaaaaaaaataccataccgatctcgaaatttcccgttctcgcgccatttttacgcctaacgacgatccgtttaaccgaatatttcctatattaacaccctttttccctcgattaccatataattaaccgatatttcctaacttctcgcgtacgctaatttcccgataacacctaatacacataaacgccgctatcgccgttctaatanacgcgtatctaataaaaaaacgcgtaaacttcgataaaaaaacgtttaaaccgcacaacctaccgataatcttcaccgaaactaccattctctatatcgattaatttaactttaacgccgaatcaacgaacacgacgaataaaatcgcgacactaacatttataaatactataatcgcaacgacgacgacaattcttaactaaatcttcgataaataaacgctacgtaataaaccttcactactaaaaacgtattctaacgcgattaccgatctaatcgacgtaacgccaacctacgactacattaaaattaacgacgcgttaattatcgacgtaataactaatctaacgaacttataaaacgttaccatactcaaacgcttactacgaataaataatccctacgatatcttcgatatacacgacgtttataacattatcgactatatcataaccgaaatttttaccgccaactcgctaaacgacgtaaacttcgctaaaaatataacgataaaccatcaattactaatacaactaaaaaacatcgccattacgatcgtctaatccgatattataacatttatcgactacaaattaacgaatctaac

SEQ ID NO: 8203 - DNA, 894 bp, Artificial Sequence
  chemically treated genomic DNA (Homo sapiens) CpG-island No: 8203
  unsure (287)
ttgtgttttttgtatacgtcgtatttttttttcggaatttgttgtgggaatttcgtgatataagggagggaaacgagggggggggggatgttatatcggtttcggggtttttcgttttcgcgttatttttgcgtttggcggcgattcgtttaatcgggtattttttgtgttggtattttttttttttcggttgttatatggttggtcggtgttttttggtttttcgcgtgcgttgatttttcggtggtatttggtgtatatagacgtcgttatcgtcgttttggtgngcgcgtatttgataggaaaacgcgtgggtttcggtaaagaggcgtttaaatcgtataatttgtcgatggtttttatcgggattgttattttttatatcggttggtttggttttaacgtcgggttagcgggtacggcgaatgaaatcgcggtattggtatttgtgaatattgtggtcgtaacggcggcggtaatttttggttggattttcggtgaatgggcgttgcgtggtaagtttttattgttgggggcgtgttttggcgcgattgtcggtttggtcggcgtgacgttagtttgcggttatattggggttggcggcgcgttgattatcggcgtggtagttggtttggcgggtttgtggggcgttattatgtttaaacgtttgttgcgggtggatgatttttgcgatgttttcggtgtgtacggcgtttgtggtattgtcggttgtattatgatcgggatttttgtcgttagttcgttgggcggcgtgggtttcgttgaaggtgtgacgatgggttattagttgttggtatagttggaaagtatcgttattacgatcgtttggttcggtgttgtggtatttatcggttataaattggcggatttgat

SEQ ID NO: 8204 - DNA, 894 bp, Artificial Sequence
  chemically treated genomic DNA (Homo sapiens) CpG-island No: 8204
  unsure (608)
atcaaatccgccaatttataaccgataaataccacaacaccgaaccaaacgatcgtaataacgatactttccaactataccaacaactaataacccatcgtcacaccttcaacgaaacccacgccgcccaacgaactaacgacaaaaatcccgatcataatacaaccgacaataccacaaacgccgtacacaccgaaaacatcgcaaaaatcatccacccgcaacaaacgtttaaacataataacgccccacaaacccgccaaaccaactaccacgccgataatcaacgcgccgccaaccccaatataaccgcaaactaacgtcacgccgaccaaaccgacaatcgcgccaaaacacgcccccaacaataaaaacttaccacgcaacgcccattcaccgaaaatccaaccaaaaattaccgccgccgttacgaccacaatattcacaaataccaataccgcgatttcattcgccgtacccgctaacccgacgttaaaaccaaaccaaccgatataaaaaataacaatcccgataaaaaccatcgacaaattatacgatttaaacgcctctttaccgaaacccacgcgttttcctatcaaatacgcgcncaccaaaacgacgataacgacgtctatatacaccaaataccaccgaaaaatcaacgcacgcgaaaaaccaaaaaacaccgaccaaccatataacaaccgaaaaaaaaaaaataccaacacaaaaaatacccgattaaacgaatcgccgccaaacgcaaaaataacgcgaaaacgaaaaaccccgaaaccgatataacatccccccccccctcgtttccctcccttatatcacgaaattcccacaacaaattccgaaaaaaaaatacgacgtatacaaaaaacacaa

SEQ ID NO: 8205 - DNA, 526 bp, Artificial Sequence
  chemically treated genomic DNA (Homo sapiens) CpG-island No: 8205
atcgtcggagtaattgcgttattattgagtcgcgcgttgaatagtttgagtttcggtagtcgatatcgcgacggcgttgggtagtcgttgtggcgcgtatatagttgattggtttgttggcgattttcgtgttttgtggtcgtgttgttgtgttttcgttggttcgattgtttttattggtttgatgatgtcgtatatggcgcgttggttggtgggtgtcgattatcgttggtcgttgttcgttacgttatttgttatttttgttttgttgttgtttgtcgatattatcgggcgggtgattgtgttcggcgaattgcgcgtttttgtggttagtgcgtttattggtgtatcggtgttgatttttttcgtgcgacgtaaaacgcgaggtggtgtatgatttacgtttttcgtcgattatttattatttgtttgttgttggttttcgtttgtgtggttgtaggtatttggggattacgtaagcggatgttcgttacgttggaaatttcgtaggtattcgtcgcgttga

SEQ ID NO: 8206 - DNA, 526 bp, Artificial Sequence
  chemically treated genomic DNA (Homo sapiens) CpG-island No: 8206
tcaacgcgacgaatacctacgaaatttccaacgtaacgaacatccgcttacgtaatccccaaatacctacaaccacacaaacgaaaaccaacaacaaacaaataataaataatcgacgaaaaacgtaaatcatacaccacctcgcgttttacgtcgcacgaaaaaaatcaacaccgatacaccaataaacgcactaaccacaaaaacgcgcaattcgccgaacacaatcacccgcccgataatatcgacaaacaacaacaaaacaaaaataacaaataacgtaacgaacaacgaccaacgataatcgacacccaccaaccaacgcgccatatacgacatcatcaaaccaataaaaacaatcgaaccaacgaaaacacaacaacacgaccacaaaacacgaaaatcgccaacaaaccaatcaactatatacgcgccacaacgactacccaacgccgtcgcgatatcgactaccgaaactcaaactattcaacgcgcgactcaataataacgcaattactccgacgat

SEQ ID NO: 8207 - DNA, 526 bp, Artificial Sequence
  chemically treated genomic DNA (Homo sapiens) CpG-island No: 8207
ttagcgcggcgaatatttgcgaggtttttagcgtgacgggtattcgtttgcgtaatttttagatatttgtaattatataggcggaaattagtagtaaataggtgatgagtaatcggcgagagacgtaaattatgtattatttcgcgttttacgtcgtacgaggaagattagtatcggtgtattaataaacgtattgattatagaaacgcgtagttcgtcgggtataattattcgttcgatgatatcggtaaatagtagtagggtaggggtagtaagtagcgtgacgggtagcgattagcgatgatcggtatttattagttaacgcgttatatgcggtattattaggttaataaaggtaatcgggttaacgaggatatagtagtacgattataaagtacgggaatcgttagtagattaattaattgtgtgcgcgttatagcgattgtttagcgtcgtcgcggtatcgattgtcgaggtttaaattgtttagcgcgcgatttagtaatagcgtagttgtttcggcgat

SEQ ID NO: 8208 - DNA, 526 bp, Artificial Sequence
  chemically treated genomic DNA (Homo sapiens) CpG-island No: 8208
atcgccgaaacaactacgctattactaaatcgcgcgctaaacaatttaaacctcgacaatcgataccgcgacgacgctaaacaatcgctataacgcgcacacaattaattaatctactaacgattcccgtactttataatcgtactactatatcctcgttaacccgattacctttattaacctaataataccgcatataacgcgttaactaataaataccgatcatcgctaatcgctacccgtcacgctacttactacccctaccctactactatttaccgatatcatcgaacgaataattatacccgacgaactacgcgtttctataatcaatacgtttattaatacaccgatactaatcttcctcgtacgacgtaaaacgcgaaataatacataatttacgtctctcgccgattactcatcacctatttactactaatttccgcctatataattacaaatatctaaaaattacgcaaacgaatacccgtcacgctaaaaacctcgcaaatattcgccgcgctaa

SEQ ID NO: 8209 - DNA, 761 bp, Artificial Sequence
  chemically treated genomic DNA (Homo sapiens) CpG-island No: 8209
ggtgatggtcgagtattaaattttgtcgcgtttgcgcgagcgtttttttttatcgtagtcgtcggtttgtttgcgtttgattatttttggtcgttcggaaagcgatttggtataaagtttggatattttataattgtcgtcgggcgtaataatgggttatcgttttttaatgtttattatcgaattgaaatttatcggatcggtaagcgagtaataggcgatggaaaaattgtggttggatgttaaacgtgttgtcggatagagcgtgattttcgaaggtattgaaggattgttcgcgtagattagtcgcgaattgtaaaatcgttagtttagtttgacgttgagcgagtaatttatcggtggtttattggttttgtaattttttcgcgtaggtgttttattgttggcgtgtgaagtggtttttttataggaggaaattttggcgtaaattgcgtattggattatagaacggcgggttaattattttgtcgggttggtattggttgtttcgggtttcgagaacgagtattttaattttgcgttagttacgttagacggtattttcgttttgcgtgtgcgttttagtattacgcgttatagtttggttattcgttaggaagtgtgcgtaatgatggtattgaatatgttgcgtcgttggttaaacggttaggatatcgttagtgagtatggttggattgaggttgttgagtttatgattttatttgtttgatttcgttattttgtgtcggtttattgtatcg

SEQ ID NO: 8210 - DNA, 761 bp, Artificial Sequence
  chemically treated genomic DNA (Homo sapiens) CpG-island No: 8210
cgatacaataaaccgacacaaaataacgaaatcaaacaaataaaatcataaactcaacaacctcaatccaaccatactcactaacgatatcctaaccgtttaaccaacgacgcaacatattcaataccatcattacgcacacttcctaacgaataaccaaactataacgcgtaatactaaaacgcacacgcaaaacgaaaataccgtctaacgtaactaacgcaaaattaaaatactcgttctcgaaacccgaaacaaccaataccaacccgacaaaataattaacccgccgttctataatccaatacgcaatttacgccaaaatttcctcctataaaaaaaccacttcacacgccaacaataaaacacctacgcgaaaaaattacaaaaccaataaaccaccgataaattactcgctcaacgtcaaactaaactaacgattttacaattcgcgactaatctacgcgaacaatccttcaataccttcgaaaatcacgctctatccgacaacacgtttaacatccaaccacaatttttccatcgcctattactcgcttaccgatccgataaatttcaattcgataataaacattaaaaaacgataacccattattacgcccgacgacaattataaaatatccaaactttataccaaatcgctttccgaacgaccaaaaataatcaaacgcaaacaaaccgacgactacgataaaaaaaaacgctcgcgcaaacgcgacaaaatttaatactcgaccatcacc

SEQ ID NO: 8211 - DNA, 761 bp, Artificial Sequence
  chemically treated genomic DNA (Homo sapiens) CpG-island No: 8211
cggtgtagtaaatcggtatagagtggcggaattagatagataaggttatggatttaataattttaatttagttatgtttattggcgatattttggtcgtttaattaacggcgtagtatatttagtgttattattgcgtatattttttgacggatagttaggttgtagcgcgtagtgttgaaacgtatacgtagagcgaaagtgtcgtttggcgtggttagcgtaaagttgagatgttcgttttcgaaattcgaaatagttagtgttagttcggtaaaatggttggttcgtcgttttgtaatttagtgcgtagtttgcgttagggtttttttttgtgaaggaattattttatacgttagtaatggagtatttgcgcgagaaagttgtaaagttaataaattatcggtgaattgttcgtttaacgttaggttgaattggcggttttgtaattcgcgattgatttgcgcgggtagttttttagtgttttcgaaaattacgttttgttcggtaatacgtttaatatttagttatagtttttttatcgtttgttgttcgtttgtcggttcggtgagttttagttcgatgataggtattgaggagcgatagtttattgttacgttcggcggtagttgtagagtgtttaggttttgtgttagatcgtttttcgaacgattaaaagtagttaaacgtagataaatcggcggttgcggtaaagaaaaacgttcgcgtaggcgcggtaggatttggtgttcgattattatt

SEQ ID NO: 8212 - DNA, 761 bp, Artificial Sequence
  chemically treated genomic DNA (Homo sapiens) CpG-island No: 8212
aataataatcgaacaccaaatcctaccgcgcctacgcgaacgtttttctttaccgcaaccgccgatttatctacgtttaactacttttaatcgttcgaaaaacgatctaacacaaaacctaaacactctacaactaccgccgaacgtaacaataaactatcgctcctcaatacctatcatcgaactaaaactcaccgaaccgacaaacgaacaacaaacgataaaaaaactataactaaatattaaacgtattaccgaacaaaacgtaattttcgaaaacactaaaaaactacccgcgcaaatcaatcgcgaattacaaaaccgccaattcaacctaacgttaaacgaacaattcaccgataatttattaactttacaactttctcgcgcaaatactccattactaacgtataaaataattccttcacaaaaaaaaaccctaacgcaaactacgcactaaattacaaaacgacgaaccaaccattttaccgaactaacactaactatttcgaatttcgaaaacgaacatctcaactttacgctaaccacgccaaacgacactttcgctctacgtatacgtttcaacactacgcgctacaacctaactatccgtcaaaaaatatacgcaataataacactaaatatactacgccgttaattaaacgaccaaaatatcgccaataaacataactaaattaaaattattaaatccataaccttatctatctaattccgccactctataccgatttactacaccg

SEQ ID NO: 8213 - DNA, 649 bp, Artificial Sequence
  chemically treated genomic DNA (Homo sapiens) CpG-island No: 8213
  unsure (598)
gtatatttattacgtcgttagttacgttacgggacgcgttttattgttggaagataattttgttgaattggttttcgatatttcgttatggttggtagataacgatcgtttggtattgcgcgatatttttgttcgtaatacgttggtcggagcgcgcgtcgtgatgtttaattcgtcgcgtcgcggtaaacgtaagtcggaatatttgtaatggttggcgttttttgtacgggcgtagagcgatgtcgatgcgttatttgtttatttggaacgcggcgcggttaattttgcggatttcgtttgggcgcgttagtttaacggcgaagggatgcgcgaattgttgtaatagtttggttatatttaggttggttatagtttgttgaatgcgtcggttgtcgttcgttggtagcggaaaattttcgatatattagcgatttattatgagtaatatcgcgatgaatttggttttgggcgcgaacgtttgcgacgtatggcgttgttaatggaagatgaagcgttggtattgttgttgattgaaaagatgcgcgaaagcggcgatatttatagttattacggttggttgtatttgttagattantaagcgggttttagcgaagagtagaaggtatttggtaaaagcgagttttgt

SEQ ID NO: 8214 - DNA, 649 bp, Artificial Sequence
  chemically treated genomic DNA (Homo sapiens) CpG-island No: 8214
  unsure (52)
acaaaactcgcttttaccaaataccttctactcttcgctaaaacccgcttantaatctaacaaatacaaccaaccgtaataactataaatatcgccgctttcgcgcatcttttcaatcaacaacaataccaacgcttcatcttccattaacaacgccatacgtcgcaaacgttcgcgcccaaaaccaaattcatcgcgatattactcataataaatcgctaatatatcgaaaattttccgctaccaacgaacgacaaccgacgcattcaacaaactataaccaacctaaatataaccaaactattacaacaattcgcgcatcccttcgccgttaaactaacgcgcccaaacgaaatccgcaaaattaaccgcgccgcgttccaaataaacaaataacgcatcgacatcgctctacgcccgtacaaaaaacgccaaccattacaaatattccgacttacgtttaccgcgacgcgacgaattaaacatcacgacgcgcgctccgaccaacgtattacgaacaaaaatatcgcgcaataccaaacgatcgttatctaccaaccataacgaaatatcgaaaaccaattcaacaaaattatcttccaacaataaaacgcgtcccgtaacgtaactaacgacgtaataaatatac

SEQ ID NO: 8215 - DNA, 649 bp, Artificial Sequence
  chemically treated genomic DNA (Homo sapiens) CpG-island No: 8215
  unsure (52)
atagggttcgtttttgttagatgttttttgtttttcgttgaagttcgtttgntgatttggtagatgtagttagtcgtgatggttgtggatgtcgtcgttttcgcgtatttttttaattagtaatagtattagcgttttattttttattggtaacgttatacgtcgtagacgttcgcgtttagggttaggtttatcgcgatgttgtttatgataagtcgttaatgtgtcgagaatttttcgttgttagcgggcggtaatcggcgtatttaataagttataattagtttgaatataattaggttgttgtagtaattcgcgtattttttcgtcgttgagttggcgcgtttaggcgaaattcgtaaggttaatcgcgtcgcgttttagatgaatagataacgtatcggtatcgttttgcgttcgtgtaagagacgttagttattgtagatatttcggtttacgtttatcgcgacgcggcgggttaagtattacgacgcgcgtttcggttagcgtgttgcgggtagagatatcgcgtaatattaggcggtcgttatttgttagttataacggggtgtcgaagattagtttagtaaggttattttttagtagtgaaacgcgtttcgtgacgtggttggcggcgtggtgaatatgt

SEQ ID NO: 8216 - DNA, 649 bp, Artificial Sequence
  chemically treated genomic DNA (Homo sapiens) CpG-island No: 8216
  unsure (598)
acatattcaccacgccgccaaccacgtcacgaaacgcgtttcactactaaaaaataaccttactaaactaatcttcgacaccccgttataactaacaaataacgaccgcctaatattacgcgatatctctacccgcaacacgctaaccgaaacgcgcgtcgtaatacttaacccgccgcgtcgcgataaacgtaaaccgaaatatctacaataactaacgtctcttacacgaacgcaaaacgataccgatacgttatctattcatctaaaacgcgacgcgattaaccttacgaatttcgcctaaacgcgccaactcaacgacgaaaaaatacgcgaattactacaacaacctaattatattcaaactaattataacttattaaatacgccgattaccgcccgctaacaacgaaaaattctcgacacattaacgacttatcataaacaacatcgcgataaacctaaccctaaacgcgaacgtctacgacgtataacgttaccaataaaaaataaaacgctaatactattactaattaaaaaaatacgcgaaaacgacgacatccacaaccatcacgactaactacatctaccaaatcancaaacgaacttcaacgaaaaacaaaaaacatctaacaaaaacgaaccctat

SEQ ID NO: 8217 - DNA, 545 bp, Artificial Sequence
  chemically treated genomic DNA (Homo sapiens) CpG-island No: 8217
tacgcggtcgggtttacgagttttttttaatcgtcgtttcgggtttcggggttgtcgttttttttagcgtcggttttgtttttagaagcgaaggtcgttttgcgttcggtttcggtttttttttgttttttggtcggtttttttttcgcggtcgtttcgggatttgtgtttagatttttggggttacgattacgttttagtcgtttaagttatcgtttttttttttttttttagcgttttcgttcgggcggtgtatggtggtttcggtgtatggtggttttcgtacgtatagtcgtaggggtttttttttttagattcgaggcggtggcgtatttgtattttttaaaattttttcgtcggttttcgcggtttagcgggaggcgcggagggtcgagcgaggcgatgggagagtcgagttggggtgcgtgcgagcgggcgttaggaaagcgcggggtcgttttaggggttaggtttttttttaaatagtgggaggtttacgaagtgtttgaagttcgaggtttttttttttgttttagttcgttttt

SEQ ID NO: 8218 - DNA, 545 bp, Artificial Sequence
  chemically treated genomic DNA (Homo sapiens) CpG-island No: 8218
aaaaacgaactaaaacaaaaaaaaaaacctcgaacttcaaacacttcgtaaacctcccactatttaaaaaaaaacctaacccctaaaacgaccccgcgctttcctaacgcccgctcgcacgcaccccaactcgactctcccatcgcctcgctcgaccctccgcgcctcccgctaaaccgcgaaaaccgacgaaaaaattttaaaaaatacaaatacgccaccgcctcgaatctaaaaaaaaaaacccctacgactatacgtacgaaaaccaccatacaccgaaaccaccatacaccgcccgaacgaaaacgctaaaaaaaaaaaaaaaaacgataacttaaacgactaaaacgtaatcgtaaccccaaaaatctaaacacaaatcccgaaacgaccgcgaaaaaaaaaccgaccaaaaaacaaaaaaaaaccgaaaccgaacgcaaaacgaccttcgcttctaaaaacaaaaccgacgctaaaaaaaacgacaaccccgaaacccgaaacgacgattaaaaaaaactcgtaaacccgaccgcgta

SEQ ID NO: 8219 - DNA, 545 bp, Artificial Sequence
  chemically treated genomic DNA (Homo sapiens) CpG-island No: 8219
gagagcgaattaaaataaaaaggggagtttcgggttttagatatttcgtgggttttttattgtttaaagaaaggtttagtttttagggcggtttcgcgtttttttggcgttcgttcgtacgtattttagttcggtttttttatcgtttcgttcggtttttcgcgtttttcgttagatcgcgagggtcgacgggggagttttagagggtgtaggtgcgttatcgtttcgagtttaggagaggaaatttttgcggttgtgcgtgcgagaattattatatatcggagttattatatatcgttcgggcgggaacgttggaagggaggggaggggcggtgatttgggcggttggggcgtgatcgtggttttaggggtttgggtataggtttcgggacggtcgcgggaggaggatcggttagagggtagggaaaggtcgggatcgggcgtagggcggttttcgtttttgggggtagagtcgacgttgaggggagcggtagtttcgaggttcggggcggcggttggaggaggttcgtgggttcggtcgcgtg

SEQ ID NO: 8220 - DNA, 545 bp, Artificial Sequence
  chemically treated genomic DNA (Homo sapiens) CpG-island No: 8220
cacgcgaccgaacccacgaacctcctccaaccgccgccccgaacctcgaaactaccgctcccctcaacgtcgactctacccccaaaaacgaaaaccgccctacgcccgatcccgacctttccctaccctctaaccgatcctcctcccgcgaccgtcccgaaacctatacccaaacccctaaaaccacgatcacgccccaaccgcccaaatcaccgcccctcccctcccttccaacgttcccgcccgaacgatatataataactccgatatataataattctcgcacgcacaaccgcaaaaatttcctctcctaaactcgaaacgataacgcacctacaccctctaaaactcccccgtcgaccctcgcgatctaacgaaaaacgcgaaaaaccgaacgaaacgataaaaaaaccgaactaaaatacgtacgaacgaacgccaaaaaaacgcgaaaccgccctaaaaactaaacctttctttaaacaataaaaaacccacgaaatatctaaaacccgaaactcccctttttattttaattcgctctc

SEQ ID NO: 8221 - DNA, 543 bp, Artificial Sequence
  chemically treated genomic DNA (Homo sapiens) CpG-island No: 8221
gtgggcgcgcgacgggggcggttatttattcgtcggcgttagtttcgggatttggtagtcgagaagtcgtatagttgcgggtagtgtggaaagcgttttcgttggggttcggatttggcgcggtattagcgtacgtatacgggcgagaagttatataagtgttttgagtgcgataagagttttcgtagtttttcggatttggtgcgttattaaggcgtgtatacgggcgagaagttttttttttgtttcgagtgcggtaagagttttagtcgtagcgtttatttggtcgattattagcgtatatatacgggcgagaagtttttcggttgtagcgattgcggtaagagtttttcgttgcgtttttatttgttggattatcggcgtgtgtatatcggtgagcggtttttcggttgcggagagtgcgataagagttttaagtagcgcgcgtattttatcgcgtattagagtttgtacgttaagatggtttagttcgtggggtgagtagttggtttggtcggaaattcgggggaggtttagttacgg

SEQ ID NO: 8222 - DNA, 543 bp, Artificial Sequence
  chemically treated genomic DNA (Homo sapiens) CpG-island No: 8222
ccgtaactaaacctcccccgaatttccgaccaaaccaactactcaccccacgaactaaaccatcttaacgtacaaactctaatacgcgataaaatacgcgcgctacttaaaactcttatcgcactctccgcaaccgaaaaaccgctcaccgatatacacacgccgataatccaacaaataaaaacgcaacgaaaaactcttaccgcaatcgctacaaccgaaaaacttctcgcccgtatatatacgctaataatcgaccaaataaacgctacgactaaaactcttaccgcactcgaaacaaaaaaaaaacttctcgcccgtatacacgccttaataacgcaccaaatccgaaaaactacgaaaactcttatcgcactcaaaacacttatataacttctcgcccgtatacgtacgctaataccgcgccaaatccgaaccccaacgaaaacgctttccacactacccgcaactatacgacttctcgactaccaaatcccgaaactaacgccgacgaataaataaccgcccccgtcgcgcgcccac

SEQ ID NO: 8223 - DNA, 543 bp, Artificial Sequence
  chemically treated genomic DNA (Homo sapiens) CpG-island No: 8223
tcgtggttgggtttttttcgggttttcggttaagttagttgtttattttacgggttgggttattttggcgtgtaggttttgatgcgcgatgaggtgcgcgcgttgtttgaagtttttgtcgtatttttcgtagtcgaagggtcgtttatcggtgtgtatacgtcgatggtttagtaggtaggagcgtagcgagaagtttttgtcgtagtcgttgtagtcgaaaggtttttcgttcgtgtgtatgcgttggtggtcggttaggtaggcgttgcggttgaagtttttgtcgtattcggaataggagaagggtttttcgttcgtgtgtacgttttggtggcgtattaggttcgaggagttgcggaagtttttgtcgtatttagggtatttgtgtggtttttcgttcgtgtgcgtgcgttggtgtcgcgttaggttcgagttttagcggaagcgttttttatattgttcgtagttgtgcggtttttcggttgttaggtttcggaattggcgtcggcgagtgggtggtcgttttcgtcgcgcgtttat

SEQ ID NO: 8224 - DNA, 543 bp, Artificial Sequence
  chemically treated genomic DNA (Homo sapiens) CpG-island No: 8224
ataaacgcgcgacgaaaacgaccacccactcgccgacgccaattccgaaacctaacaaccgaaaaaccgcacaactacgaacaatataaaaaacgcttccgctaaaactcgaacctaacgcgacaccaacgcacgcacacgaacgaaaaaccacacaaataccctaaatacgacaaaaacttccgcaactcctcgaacctaatacgccaccaaaacgtacacacgaacgaaaaacccttctcctattccgaatacgacaaaaacttcaaccgcaacgcctacctaaccgaccaccaacgcatacacacgaacgaaaaacctttcgactacaacgactacgacaaaaacttctcgctacgctcctacctactaaaccatcgacgtatacacaccgataaacgacccttcgactacgaaaaatacgacaaaaacttcaaacaacgcgcgcacctcatcgcgcatcaaaacctacacgccaaaataacccaacccgtaaaataaacaactaacttaaccgaaaacccgaaaaaaacccaaccacga

SEQ ID NO: 8225 - DNA, 660 bp, Artificial Sequence
  chemically treated genomic DNA (Homo sapiens) CpG-island No: 8225
ggcgtacgtatacgggcgagaagttttacgtttgtattgattgcgggaagcgtttcggtcgtagttcgtattttatttagtattagattatttatacgggcgagaagttttatatttgtttcgtttgtcggaagagttttagttattattttacgttgatttagtattagcgtatttatatcggagagaagttttacgtgtgcgatcgttgcgttaagcgttttattcgtcgttcggatttggttatttattagggtatttatacgggcgttaagtcgtataagtgttttatttgcgttaagtgttttacgtagagttcggcgttagttatttattagcgtatttatattggggttaagttttattcgtgtttcgagtgcggtaagtgttttagttagcgttttaattttatcgcgtataatcgtatatatataggcgagaagttttattattgtttcgattgcggtaagagttttagttatagttcgtattttatcgcgtattagcgtatttatcgtggcgtgcggttttacgtttgttcgttgtgcggtaagagttttagtcggcgttttaatttgtatcggtacgagaagatttatattatcgggtttaaggttttggttatgttgatgttgggggcggcggcggcgggggttttgg

SEQ ID NO: 8226 - DNA, 660 bp, Artificial Sequence
  chemically treated genomic DNA (Homo sapiens) CpG-island No: 8226
ccaaaacccccgccgccgccgcccccaacatcaacataaccaaaaccttaaacccgataatataaatcttctcgtaccgatacaaattaaaacgccgactaaaactcttaccgcacaacgaacaaacgtaaaaccgcacgccacgataaatacgctaatacgcgataaaatacgaactataactaaaactcttaccgcaatcgaaacaataataaaacttctcgcctatatatatacgattatacgcgataaaattaaaacgctaactaaaacacttaccgcactcgaaacacgaataaaacttaaccccaatataaatacgctaataaataactaacgccgaactctacgtaaaacacttaacgcaaataaaacacttatacgacttaacgcccgtataaataccctaataaataaccaaatccgaacgacgaataaaacgcttaacgcaacgatcgcacacgtaaaacttctctccgatataaatacgctaatactaaatcaacgtaaaataataactaaaactcttccgacaaacgaaacaaatataaaacttctcgcccgtataaataatctaatactaaataaaatacgaactacgaccgaaacgcttcccgcaatcaatacaaacgtaaaacttctcgcccgtatacgtacgcc

SEQ ID NO: 8227 - DNA, 660 bp, Artificial Sequence
  chemically treated genomic DNA (Homo sapiens) CpG-island No: 8227
ttagagttttcgtcgtcgtcgtttttagtattagtatggttagggttttgggttcggtggtgtggattttttcgtgtcggtgtaggttggagcgtcggttgaagtttttgtcgtataacgggtaggcgtagggtcgtacgttacggtgggtgcgttggtgcgcggtgaggtgcgagttgtggttgaagtttttgtcgtagtcgaggtagtggtagggtttttcgtttgtgtgtgtgcggttgtgcgcgatgaggttggaacgttggttgaagtatttgtcgtattcggggtacggatagggtttgattttagtgtgggtgcgttggtgggtgattagcgtcgagttttgcgtgaagtatttggcgtagatggggtatttgtgcggtttggcgttcgtgtgggtgttttggtgggtgattaagttcgagcggcgggtgaagcgtttggcgtagcggtcgtatacgtagggttttttttcggtgtggatgcgttggtgttgaattagcgtggagtggtggttgaagttttttcggtaggcggggtaggtgtagggtttttcgttcgtgtggatgatttggtgttggatgaggtgcgagttgcggtcgaagcgtttttcgtagttagtgtaggcgtagggtttttcgttcgtgtgcgtgcgtt

SEQ ID NO: 8228 - DNA, 660 bp, Artificial Sequence
  chemically treated genomic DNA (Homo sapiens) CpG-island No: 8228
aacgcacgcacacgaacgaaaaaccctacgcctacactaactacgaaaaacgcttcgaccgcaactcgcacctcatccaacaccaaatcatccacacgaacgaaaaaccctacacctaccccgcctaccgaaaaaacttcaaccaccactccacgctaattcaacaccaacgcatccacaccgaaaaaaaaccctacgtatacgaccgctacgccaaacgcttcacccgccgctcgaacttaatcacccaccaaaacacccacacgaacgccaaaccgcacaaataccccatctacgccaaatacttcacgcaaaactcgacgctaatcacccaccaacgcacccacactaaaatcaaaccctatccgtaccccgaatacgacaaatacttcaaccaacgttccaacctcatcgcgcacaaccgcacacacacaaacgaaaaaccctaccactacctcgactacgacaaaaacttcaaccacaactcgcacctcaccgcgcaccaacgcacccaccgtaacgtacgaccctacgcctacccgttatacgacaaaaacttcaaccgacgctccaacctacaccgacacgaaaaaatccacaccaccgaacccaaaaccctaaccatactaatactaaaaacgacgacgacgaaaactctaa

SEQ ID NO: 8229 - DNA, 655 bp, Artificial Sequence
  chemically treated genomic DNA (Homo sapiens) CpG-island No: 8229
gggggcgtgtgtgtgtgggggagtggggtgtggtgggtggtggggcggggtgatgggttgggggtgatgtggtgtatgtgtggtggtgtgtggtgtggtgtggtggtgttggttggggggtggtggggttatgtggtgtagcgtgtttgttgtggttgggtttgtgtgtgtggtttagttgatgtgcgtgggtggtgtggggcgtggtttggtgtgtgttggttgttgggtgttgtcgtgtggtgtagttgtgttggtggggtggttgttgtgggtggggtagtgtgcgttgtgtcggtgttcgggtggtgtggtggttggagtgcggtggcgagggcgatgcgcggggttttgggtgtgggttagttgattgttttgttgtggggttgtgtggttgtggtgtggggcgttgtcgagcgtgcggtacgtgtgtttgtagttttttttattcgcgcgttagtgtgtattcgatacgattcgtgatttttcgttacgttttttgtacgttttcgttattttttcgtatttttcgtatttttcgttagtttcgtattattttcgttattttcgttatattttattatttttttattttttttattttttattttttttatttttttattttttttatttttttatttcgaggtttaaa

SEQ ID NO: 8230 - DNA, 655 bp, Artificial Sequence
  chemically treated genomic DNA (Homo sapiens) CpG-island No: 8230
tttaaacctcgaaataaaaaaataaaaaaaataaaaaaataaaaaaaataaaaaataaaaaaaataaaaaaataataaaatataacgaaaataacgaaaataatacgaaactaacgaaaaatacgaaaaatacgaaaaaataacgaaaacgtacaaaaaacgtaacgaaaaatcacgaatcgtatcgaatacacactaacgcgcgaataaaaaaaactacaaacacacgtaccgcacgctcgacaacgccccacaccacaaccacacaaccccacaacaaaacaatcaactaacccacacccaaaaccccgcgcatcgccctcgccaccgcactccaaccaccacaccacccgaacaccgacacaacgcacactaccccacccacaacaaccaccccaccaacacaactacaccacacgacaacacccaacaaccaacacacaccaaaccacgccccacaccacccacgcacatcaactaaaccacacacacaaacccaaccacaacaaacacgctacaccacataaccccaccaccccccaaccaacaccaccacaccacaccacacaccaccacacatacaccacatcacccccaacccatcaccccgccccaccacccaccacaccccactcccccacacacacacgccccc

SEQ ID NO: 8231 - DNA, 655 bp, Artificial Sequence
  chemically treated genomic DNA (Homo sapiens) CpG-island No: 8231
tttaagtttcggggtaggggggtggggagggtaggggggtggggagggtagggggtggggagggtaggggggtggtggggtgtggcgagggtagcgggggtggtgcggggttggcgaagggtacgaggggtgcggaggagtggcggagacgtatagagggcgtggcgaagagttacggatcgtgtcgggtgtatattaacgcgcgagtgaaagaggttgtaagtatacgtatcgtacgttcgataacgttttatattataattatataattttataataaaataattaattaatttatatttagaatttcgcgtatcgttttcgttatcgtattttaattattatattattcgagtatcgatataacgtatattattttatttataataattattttattaatataattatattatacgataatatttaataattaatatatattaaattacgttttatattatttacgtatattaattaaattatatatatagatttaattataatagatacgttatattatataattttattattttttaattaatattattatattatattatatattattatatatatattatattatttttaatttattatttcgttttattatttattatattttatttttttatatatatacgttttt

SEQ ID NO: 8232 - DNA, 655 bp, Artificial Sequence
  chemically treated genomic DNA (Homo sapiens) CpG-island No: 8232
aaaaacgtatatatataaaaaaataaaatataataaataataaaacgaaataataaattaaaaataatataatatatatataataatatataatataatataataatattaattaaaaaataataaaattatataatataacgtatctattataattaaatctatatatataatttaattaatatacgtaaataatataaaacgtaatttaatatatattaattattaaatattatcgtataatataattatattaataaaataattattataaataaaataatatacgttatatcgatactcgaataatataataattaaaatacgataacgaaaacgatacgcgaaattctaaatataaattaattaattattttattataaaattatataattataatataaaacgttatcgaacgtacgatacgtatacttacaacctctttcactcgcgcgttaatatacacccgacacgatccgtaactcttcgccacgccctctatacgtctccgccactcctccgcacccctcgtacccttcgccaaccccgcaccacccccgctaccctcgccacaccccaccacccccctaccctccccaccccctaccctccccacccccctaccctccccacccccctaccccgaaacttaaa

SEQ ID NO: 8233 - DNA, 859 bp, Artificial Sequence
  chemically treated genomic DNA (Homo sapiens) CpG-island No: 8233
tagttgttgaaagtgtatcgggcgttgttgatcgaaggcgtttttttgcgcgatatcgttattatcgttatcgtgttggtcgttagtagtacggtgacgaaagattatattttgttggcggtcgatgtgcgtttggtattgcggcgtagtattatttattcgttcgttcgtaagtaggagttgacggtgtatacgttgaataatgagttggaaaatttgttgattaacgtggtgaattaggcgtaatagggcgggaaagtgatgttcgatagcgtgtcggtcgattcgaatatgtttaattagttttagagtacgatgttataggtgaaagagtagatgaaagcggcggggaaagattcggtgttgttggtgttatcgtagttgcgttttttgttggcgcgttatgtaaggttgtttgcgtcggggttgtatgtgttgtcgtataacgaagtgtcggatgagttggagttgaagattatgggggcgttgatgtaagtatttagtattggtgtataattgtcggatgcggcgtgaacgttttattcgttttatcgtttaggtataagtttgtaggtatgataagacgcgttagcgtcgtattaggtatttgcgtataattgtcggatgcggtataaacgttttattcggtttatcgattcggtataagtttgtaggtatgataagacgcgttagcgtcgtattaggtatttgcgtataattatgaaatgatacgtttttcggtattaaaattcgttacgtttttcgtttaatcgatgggatataattttcgcgcgatatcgcgatggaacgttgagaatggttaattatttatttgttttatttaattatgttttattgg

SEQ ID NO: 8234 - DNA, 859 bp, Artificial Sequence
  chemically treated genomic DNA (Homo sapiens) CpG-island No: 8234
ccaataaaacataattaaataaaacaaataaataattaaccattctcaacgttccatcgcgatatcgcgcgaaaattatatcccatcgattaaacgaaaaacgtaacgaattttaataccgaaaaacgtatcatttcataattatacgcaaatacctaatacgacgctaacgcgtcttatcatacctacaaacttataccgaatcgataaaccgaataaaacgtttataccgcatccgacaattatacgcaaatacctaatacgacgctaacgcgtcttatcatacctacaaacttatacctaaacgataaaacgaataaaacgttcacgccgcatccgacaattatacaccaatactaaatacttacatcaacgcccccataatcttcaactccaactcatccgacacttcgttatacgacaacacatacaaccccgacgcaaacaaccttacataacgcgccaacaaaaaacgcaactacgataacaccaacaacaccgaatctttccccgccgctttcatctactctttcacctataacatcgtactctaaaactaattaaacatattcgaatcgaccgacacgctatcgaacatcactttcccgccctattacgcctaattcaccacgttaatcaacaaattttccaactcattattcaacgtatacaccgtcaactcctacttacgaacgaacgaataaataatactacgccgcaataccaaacgcacatcgaccgccaacaaaatataatctttcgtcaccgtactactaacgaccaacacgataacgataataacgatatcgcgcaaaaaaacgccttcgatcaacaacgcccgatacactttcaacaacta

SEQ ID NO: 8235 - DNA, 859 bp, Artificial Sequence
  chemically treated genomic DNA (Homo sapiens) CpG-island No: 8235
ttagtaaagtatggttgggtaaagtaagtgagtgattggttatttttaacgttttatcgcgatgtcgcgcgagggttatattttatcgattgggcgggggacgtaacggattttagtgtcggggagcgtattattttataattgtgcgtagatgtttgatgcgacgttagcgcgttttattatgtttataaatttgtgtcggatcggtaggtcggataaggcgtttatgtcgtattcggtagttatgcgtagatgtttgatgcgacgttggcgcgttttattatgtttataaatttgtgtttgaacggtaggacggataaggcgtttacgtcgtattcggtagttgtgtattaatgttggatatttatattaacgtttttataatttttaattttagtttattcggtatttcgttatacgatagtatatgtagtttcggcgtaaataattttgtataacgcgttagtaaagggcgtagttgcggtggtattagtagtatcgggttttttttcgtcgtttttatttgtttttttatttgtggtatcgtattttggaattggttgagtatattcggatcgatcggtacgttgtcgagtattattttttcgttttgttgcgtttgatttattacgttggttagtagattttttagtttattatttagcgtatatatcgttagtttttgtttgcgaacgaacggatgggtaatgttgcgtcgtaatgttaggcgtatatcggtcgttagtagaatatgatttttcgttatcgtgttattggcgattagtacggtggcgatggtgacgatatcgcgtagggaaacgttttcggttagtagcgttcggtatatttttagtaattg

SEQ ID NO: 8236 - DNA, 859 bp, Artificial Sequence
  chemically treated genomic DNA (Homo sapiens) CpG-island No: 8236
caattactaaaaatataccgaacgctactaaccgaaaacgtttccctacgcgatatcgtcaccatcgccaccgtactaatcgccaataacacgataacgaaaaatcatattctactaacgaccgatatacgcctaacattacgacgcaacattacccatccgttcgttcgcaaacaaaaactaacgatatatacgctaaataataaactaaaaaatctactaaccaacgtaataaatcaaacgcaacaaaacgaaaaaataatactcgacaacgtaccgatcgatccgaatatactcaaccaattccaaaatacgataccacaaataaaaaaacaaataaaaacgacgaaaaaaaacccgatactactaataccaccgcaactacgccctttactaacgcgttatacaaaattatttacgccgaaactacatatactatcgtataacgaaataccgaataaactaaaattaaaaattataaaaacgttaatataaatatccaacattaatacacaactaccgaatacgacgtaaacgccttatccgtcctaccgttcaaacacaaatttataaacataataaaacgcgccaacgtcgcatcaaacatctacgcataactaccgaatacgacataaacgccttatccgacctaccgatccgacacaaatttataaacataataaaacgcgctaacgtcgcatcaaacatctacgcacaattataaaataatacgctccccgacactaaaatccgttacgtcccccgcccaatcgataaaatataaccctcgcgcgacatcgcgataaaacgttaaaaataaccaatcactcacttactttacccaaccatactttactaa

SEQ ID NO: 8237 - DNA, 650 bp, Artificial Sequence
  chemically treated genomic DNA (Homo sapiens) CpG-island No: 8237
  unsure (300, 306..307, 324)
attattcggtttaggttgggaatattgagcgtttcgcgattaattattattgcgtcgtagtcgttgatcgttatgtattgttgcgcgttttgttagttttagattttatcgttggtaattatcggaatatttagtcgttggcgaatatcgttaatcgtttgttagttaatatgtttcgcgcggtaattttgttttttcgttcgtttatgtattattagtttcgtagcgttagtttgttgaatcgtatcggcgattttaaatttttttttatcgttgttttagtttagacgtatttttatngttgannttgggtaaatgcgtcgngtatagttttacgtatcgtttttgtattttggtagatgagtttaggatttttgagtaacgtcgtttcgtcgtcgttatcgttatcgttttcgacgggtagtcgtaattgagatttacgttttaggaatttaattttatcgtacgggcggcgttttttgttagttattgtgggaattgatttaataattgtacgcgtattagcgttttagatggtgttcggttggcgttttggtagttttagggtaaatgcgatgaaagatttttatcgggtagttagtttgaattttattacgtcggaataaattcggtgatgtatagatcgtagt

SEQ ID NO: 8238 - DNA, 650 bp, Artificial Sequence
  chemically treated genomic DNA (Homo sapiens) CpG-island No: 8238
  unsure (327, 344..345, 351)
actacgatctatacatcaccgaatttattccgacgtaataaaattcaaactaactacccgataaaaatctttcatcgcatttaccctaaaactaccaaaacgccaaccgaacaccatctaaaacgctaatacgcgtacaattattaaatcaattcccacaataactaacaaaaaacgccgcccgtacgataaaattaaattcctaaaacgtaaatctcaattacgactacccgtcgaaaacgataacgataacgacgacgaaacgacgttactcaaaaatcctaaactcatctaccaaaatacaaaaacgatacgtaaaactatacncgacgcatttacccaanntcaacnataaaaatacgtctaaactaaaacaacgataaaaaaaaatttaaaatcgccgatacgattcaacaaactaacgctacgaaactaataatacataaacgaacgaaaaaacaaaattaccgcgcgaaacatattaactaacaaacgattaacgatattcgccaacgactaaatattccgataattaccaacgataaaatctaaaactaacaaaacgcgcaacaatacataacgatcaacgactacgacgcaataataattaatcgcgaaacgctcaatattcccaacctaaaccgaataat

SEQ ID NO: 8239 - DNA, 650 bp, Artificial Sequence
  chemically treated genomic DNA (Homo sapiens) CpG-island No: 8239
  unsure (327, 344..345, 351)
attacgatttgtgtattatcgagtttgtttcggcgtggtggaatttaaattggttgttcggtaaaagttttttatcgtatttgttttgaagttattaaaacgttagtcggatattatttggaacgttggtgcgcgtgtagttgttaggttagtttttataatggttggtagagaacgtcgttcgtgcggtggagttaggtttttggggcgtggattttaattgcggttgttcgtcgaaaacggtaacggtagcggcggcggggcgacgttatttaaagattttgaatttatttattagggtgtaaaagcgatgcgtgaagttgtatncggcgtatttgtttagnnttagtngtgaaagtgcgtttgggttgggatagcggtgagaagaaatttgaaatcgtcgatgcggtttaataggttggcgttacggagttggtggtgtatgggcggacgaaagagtagggttatcgcgcggagtatattgattggtaggcgattggcgatattcgttagcggttgaatatttcggtgattgttaacggtgaaatttgggattggtagagcgcgtaataatgtatggcgattagcggttgcgacgtagtgatgattggtcgcggggcgtttaatatttttaatttgagtcgggtggt

SEQ ID NO: 8240 - DNA, 650 bp, Artificial Sequence
  chemically treated genomic DNA (Homo sapiens) CpG-island No: 8240
  unsure (300, 306..307, 324)
accacccgactcaaattaaaaatattaaacgccccgcgaccaatcatcactacgtcgcaaccgctaatcgccatacattattacgcgctctaccaatcccaaatttcaccgttaacaatcaccgaaatattcaaccgctaacgaatatcgccaatcgcctaccaatcaatatactccgcgcgataaccctactctttcgtccgcccatacaccaccaactccgtaacgccaacctattaaaccgcatcgacgatttcaaatttcttctcaccgctatcccaacccaaacgcactttcacnactaannctaaacaaatacgccgnatacaacttcacgcatcgcttttacaccctaataaataaattcaaaatctttaaataacgtcgccccgccgccgctaccgttaccgttttcgacgaacaaccgcaattaaaatccacgccccaaaaacctaactccaccgcacgaacgacgttctctaccaaccattataaaaactaacctaacaactacacgcgcaccaacgttccaaataatatccgactaacgttttaataacttcaaaacaaatacgataaaaaacttttaccgaacaaccaatttaaattccaccacgccgaaacaaactcgataatacacaaatcgtaat

SEQ ID NO: 8241 - DNA, 533 bp, Artificial Sequence
  chemically treated genomic DNA (Homo sapiens) CpG-island No: 8241
ttgtagcgaattgatcgtaatgttaagttgttgtaatatcgggttatgtatcgattgtagtatcgtttcgtggtagcgaatattcgtttcgttaaacgtttcgcggttttgattgttggtaattatttcgtttagcgtcgatttaatttgcgttagatcgttggaagtcgcgcgttttgttgtttaacgggtaatcgtcggttttattagatttcgtatttcgtttatggtattgataagtcgtgggtcgtagttattttttagtatttattgtagtacgttagtgtcgaggtaattttattggttacgcggtgttataaacgtttcgcgataacgttttattttaattagtcgtttcgttattagcgaacggaatattttacggatgatgttgcgcgaggttgtaaattttttatagagtttcgttttagtcggaagcggcgagtttggtacgtatttgtcgtgaacgatttgtttatttagcgtaatgataatgcgatcggttttattgagagttatggagagtttttgtg

SEQ ID NO: 8242 - DNA, 533 bp, Artificial Sequence
  chemically treated genomic DNA (Homo sapiens) CpG-island No: 8242
cacaaaaactctccataactctcaataaaaccgatcgcattatcattacgctaaataaacaaatcgttcacgacaaatacgtaccaaactcgccgcttccgactaaaacgaaactctataaaaaatttacaacctcgcgcaacatcatccgtaaaatattccgttcgctaataacgaaacgactaattaaaataaaacgttatcgcgaaacgtttataacaccgcgtaaccaataaaattacctcgacactaacgtactacaataaatactaaaaaataactacgacccacgacttatcaataccataaacgaaatacgaaatctaataaaaccgacgattacccgttaaacaacaaaacgcgcgacttccaacgatctaacgcaaattaaatcgacgctaaacgaaataattaccaacaatcaaaaccgcgaaacgtttaacgaaacgaatattcgctaccacgaaacgatactacaatcgatacataacccgatattacaacaacttaacattacgatcaattcgctacaa

SEQ ID NO: 8243 - DNA, 533 bp, Artificial Sequence
  chemically treated genomic DNA (Homo sapiens) CpG-island No: 8243
tataaggattttttatgatttttaataaaatcgatcgtattgttattacgttgggtaaatagatcgtttacggtaaatacgtgttaggttcgtcgttttcggttgaggcggaattttgtgaggagtttgtaatttcgcgtaatattattcgtgaggtgtttcgttcgttgatggcgaagcggttgattgaaatgaaacgttatcgcggggcgtttgtggtatcgcgtaattagtggaattatttcgatattgacgtattgtaatgggtgttggaaaatgattacgatttacggtttattagtgttatgagcgaagtgcgaaatttggtggaatcggcgattgttcgttgggtagtagagcgcgcgatttttagcgatttggcgtagattgaatcggcgttgaacgagatgattgttaataattaggatcgcgaagcgtttaacgaagcggatattcgttattacgaggcggtgttgtagtcggtgtataattcggtgttatagtaatttagtattgcgattagttcgttgtag

SEQ ID NO: 8244 - DNA, 533 bp, Artificial Sequence
  chemically treated genomic DNA (Homo sapiens) CpG-island No: 8244
ctacaacgaactaatcgcaatactaaattactataacaccgaattatacaccgactacaacaccgcctcgtaataacgaatatccgcttcgttaaacgcttcgcgatcctaattattaacaatcatctcgttcaacgccgattcaatctacgccaaatcgctaaaaatcgcgcgctctactacccaacgaacaatcgccgattccaccaaatttcgcacttcgctcataacactaataaaccgtaaatcgtaatcattttccaacacccattacaatacgtcaatatcgaaataattccactaattacgcgataccacaaacgccccgcgataacgtttcatttcaatcaaccgcttcgccatcaacgaacgaaacacctcacgaataatattacgcgaaattacaaactcctcacaaaattccgcctcaaccgaaaacgacgaacctaacacgtatttaccgtaaacgatctatttacccaacgtaataacaatacgatcgattttattaaaaatcataaaaaatccttata

SEQ ID NO: 8245 - DNA, 886 bp, Artificial Sequence
  chemically treated genomic DNA (Homo sapiens) CpG-island No: 8245
  unsure (776)
tttgtatttttgtcggtgtgcgtttgagtcgcggtttcgaagagcgtaaagaaattttgtagatgtttaacgacggcggttatagcgtggttgattttttcgacgacgaaatggcgaagttatacgtgcgttatatggtcggcggacgtttatcgtattcgttgtaggaacgtttttatagtttcgaattttcggaattatcgggcgcgttgttgcgtttttttaatacgttgggtacgtattggaatatttttttgttttattatcgtagttatggtatcgattacgggcgcgtattggcggcgttcgaatttggcgattatgaatcggatttcgaaattcggttgaatgagttgggttacgattgttacgacgaaattaataattcggcgtttaggttttttttggcgggttagggaaaaatgtttgatagcgtttcgtttattaggtttattcgcgcgataacgttatttgtggttcggtaaaattttttagaatgttttaattagcggtttatgtagtcgttttttttgcgtatatacgtttagtttaaacggcgtttttttatcgttgcgttttaaaattattacgcggttacgtatcggttcggggttgttttttagtattattttcggtaataatgttacgttatagtcgagtgttattatcgatattatcgttttatgttcgttaatcgtggcgtaaattatcgggttattgattttattgcgtcgaaattatagtttaatgcggcggcgtatcggtttttgatcggntataataaacggtatcgttgattagttcggtttttttatcgatattgtattacgtatcgggtagggtaacgcgggggttattagatttattggtcgaattttttagattt

SEQ ID NO: 8246 - DNA, 886 bp, Artificial Sequence
  chemically treated genomic DNA (Homo sapiens) CpG-island No: 8246
  unsure (111)
aaatctaaaaaattcgaccaataaatctaataacccccgcgttaccctacccgatacgtaatacaatatcgataaaaaaaccgaactaatcaacgataccgtttattatanccgatcaaaaaccgatacgccgccgcattaaactataatttcgacgcaataaaatcaataacccgataatttacgccacgattaacgaacataaaacgataatatcgataataacactcgactataacgtaacattattaccgaaaataatactaaaaaacaaccccgaaccgatacgtaaccgcgtaataattttaaaacgcaacgataaaaaaacgccgtttaaactaaacgtatatacgcaaaaaaaacgactacataaaccgctaattaaaacattctaaaaaattttaccgaaccacaaataacgttatcgcgcgaataaacctaataaacgaaacgctatcaaacatttttccctaacccgccaaaaaaaacctaaacgccgaattattaatttcgtcgtaacaatcgtaacccaactcattcaaccgaatttcgaaatccgattcataatcgccaaattcgaacgccgccaatacgcgcccgtaatcgataccataactacgataataaaacaaaaaaatattccaatacgtacccaacgtattaaaaaaacgcaacaacgcgcccgataattccgaaaattcgaaactataaaaacgttcctacaacgaatacgataaacgtccgccgaccatataacgcacgtataacttcgccatttcgtcgtcgaaaaaatcaaccacgctataaccgccgtcgttaaacatctacaaaatttctttacgctcttcgaaaccgcgactcaaacgcacaccgacaaaaatacaaa

SEQ ID NO: 8247 - DNA, 886 bp, Artificial Sequence
  chemically treated genomic DNA (Homo sapiens) CpG-island No: 8247
  unsure (111)
agatttggaaaattcggttagtaggtttgatggttttcgcgttgttttgttcggtgcgtaatatagtgtcggtagagaagtcggattggttaacggtgtcgtttattatgntcgattaggggtcggtacgtcgtcgtattgaattgtggtttcgacgtaataaaattagtaattcgatgatttacgttacggttggcgggtatgaagcgatggtatcgatggtggtattcggttgtggcgtggtattgttgtcggaagtggtgttggaaaatagtttcgaatcggtgcgtaatcgcgtgatgattttagagcgtagcgatgagaaaacgtcgtttgagttgggcgtgtgtgcgtagaaaaagcggttatatgagtcgttaattgaggtattttggaagattttgtcgaattataaatgacgttgtcgcgcgggtaggtttgataagcgaagcgttattaggtatttttttttaattcgttaaaaagaatttgaacgtcgggttattggtttcgtcgtggtaatcgtagtttagtttatttagtcgggtttcgaaattcggtttatggtcgttaagttcgaacgtcgttagtacgcgttcgtagtcggtgttatggttgcgatagtggaataaagaaatgttttagtacgtatttagcgtgttgaggaagcgtagtagcgcgttcggtgatttcgggaattcgaagttgtagaggcgtttttgtaacggatgcgatggacgttcgtcgattatatagcgtacgtgtagtttcgttatttcgtcgtcggagagattaattacgttgtagtcgtcgtcgttgagtatttgtaaaatttttttgcgtttttcgaggtcgcggtttaggcgtatatcgataaagatgtagg

SEQ ID NO: 8248 - DNA, 886 bp, Artificial Sequence
  chemically treated genomic DNA (Homo sapiens) CpG-island No: 8248
  unsure (776)
cctacatctttatcgatatacgcctaaaccgcgacctcgaaaaacgcaaaaaaattttacaaatactcaacgacgacgactacaacgtaattaatctctccgacgacgaaataacgaaactacacgtacgctatataatcgacgaacgtccatcgcatccgttacaaaaacgcctctacaacttcgaattcccgaaatcaccgaacgcgctactacgcttcctcaacacgctaaatacgtactaaaacatttctttattccactatcgcaaccataacaccgactacgaacgcgtactaacgacgttcgaacttaacgaccataaaccgaatttcgaaacccgactaaataaactaaactacgattaccacgacgaaaccaataacccgacgttcaaattctttttaacgaattaaaaaaaaatacctaataacgcttcgcttatcaaacctacccgcgcgacaacgtcatttataattcgacaaaatcttccaaaatacctcaattaacgactcatataaccgctttttctacgcacacacgcccaactcaaacgacgttttctcatcgctacgctctaaaatcatcacgcgattacgcaccgattcgaaactattttccaacaccacttccgacaacaataccacgccacaaccgaataccaccatcgataccatcgcttcatacccgccaaccgtaacgtaaatcatcgaattactaattttattacgtcgaaaccacaattcaatacgacgacgtaccgacccctaatcgancataataaacgacaccgttaaccaatccgacttctctaccgacactatattacgcaccgaacaaaacaacgcgaaaaccatcaaacctactaaccgaattttccaaatct

SEQ ID NO: 8249 - DNA, 724 bp, Artificial Sequence
  chemically treated genomic DNA (Homo sapiens) CpG-island No: 8249
cgaagggattttcgcggagttttcgagaagtcgttagcgttttcggttttggtttttcgaaaattataaattttaaagggtagcgcgtttcgatgcggcgttttagggtcgaggggttcgtcgggagttgtagttttttcgggtaggatttcgtatttaaaggtttatttgtgggatcgcgttgttagtttcggcgtttgcgtttcgttttaggaagaaagcgttaaggcgaggtatggcggttttcgtgcgtatcggtagtttttcgtgggatattaggatgtcgtttaaagaaagaaagttttttttaggttttagcgtattcgattttattcggaaataagtttttgatatggcggttatttgagttttttcgtttttattcgcgtgattcggaggagttttaggagttaggggtgtataagacggggaagcggagattgggtaggatggttggggttaggaaagtggattgaaattcgtttttcgcgttcggggacgtattagataggagtagttaattcgggcggtatcgtttaggtagaagtaatcgattaagtttgtagatttagagtagcgggatacggttggggagcggtaggtgggggcgtcggaagttttttttttttcgtttgttgtacggtgtgggaacgttacgaagaagttggaacgttcgttgaagtttttggatttatttgtattggattgtgtttatgtgattttt

SEQ ID NO: 8250 - DNA, 724 bp, Artificial Sequence
  chemically treated genomic DNA (Homo sapiens) CpG-island No: 8250
aaaaatcacataaacacaatccaatacaaataaatccaaaaacttcaacgaacgttccaacttcttcgtaacgttcccacaccgtacaacaaacgaaaaaaaaaaaacttccgacgcccccacctaccgctccccaaccgtatcccgctactctaaatctacaaacttaatcgattacttctacctaaacgataccgcccgaattaactactcctatctaatacgtccccgaacgcgaaaaacgaatttcaatccactttcctaaccccaaccatcctacccaatctccgcttccccgtcttatacacccctaactcctaaaactcctccgaatcacgcgaataaaaacgaaaaaactcaaataaccgccatatcaaaaacttatttccgaataaaatcgaatacgctaaaacctaaaaaaaactttctttctttaaacgacatcctaatatcccacgaaaaactaccgatacgcacgaaaaccgccatacctcgccttaacgctttcttcctaaaacgaaacgcaaacgccgaaactaacaacgcgatcccacaaataaacctttaaatacgaaatcctacccgaaaaaactacaactcccgacgaacccctcgaccctaaaacgccgcatcgaaacgcgctaccctttaaaatttataattttcgaaaaaccaaaaccgaaaacgctaacgacttctcgaaaactccgcgaaaatcccttcg

SEQ ID NO: 8251 - DNA, 724 bp, Artificial Sequence
  chemically treated genomic DNA (Homo sapiens) CpG-island No: 8251
aaggattatatgaatataatttagtataaatgggtttaggagttttaacgagcgttttagttttttcgtaacgtttttatatcgtgtagtaagcggagggaagagaattttcggcgtttttatttatcgttttttagtcgtgtttcgttgttttaaatttgtagatttgatcgattgtttttgtttgggcggtatcgttcgaattgattgtttttgtttgatgcgttttcgggcgcgggaaacgagttttaatttatttttttgattttaattattttgtttagttttcgttttttcgttttgtatatttttaatttttgaggttttttcgaattacgcgagtggaagcggagaagtttaagtggtcgttatgttagaggtttattttcgagtggagtcgggtgcgttggggtttgaggagaattttttttttttggacgatattttgatgttttacgagaagttgtcggtgcgtacggagatcgttatgtttcgttttggcgttttttttttggagcggagcgtaggcgtcgagattgataacgcggttttataggtgagtttttgggtgcggggttttgttcggaaagattgtagttttcggcgggtttttcggttttgggacgtcgtatcggggcgcgttgttttttgggatttgtagttttcgaggagttagggtcgaaggcgttaacgatttttcggaaatttcgcgggggttttttcg

SEQ ID NO: 8252 - DNA, 724 bp, Artificial Sequence
  chemically treated genomic DNA (Homo sapiens) CpG-island No: 8252
cgaaaaaacccccgcgaaatttccgaaaaatcgttaacgccttcgaccctaactcctcgaaaactacaaatcccaaaaaacaacgcgccccgatacgacgtcccaaaaccgaaaaacccgccgaaaactacaatctttccgaacaaaaccccgcacccaaaaactcacctataaaaccgcgttatcaatctcgacgcctacgctccgctccaaaaaaaaaacgccaaaacgaaacataacgatctccgtacgcaccgacaacttctcgtaaaacatcaaaatatcgtccaaaaaaaaaaaattctcctcaaaccccaacgcacccgactccactcgaaaataaacctctaacataacgaccacttaaacttctccgcttccactcgcgtaattcgaaaaaacctcaaaaattaaaaatatacaaaacgaaaaaacgaaaactaaacaaaataattaaaatcaaaaaaataaattaaaactcgtttcccgcgcccgaaaacgcatcaaacaaaaacaatcaattcgaacgataccgcccaaacaaaaacaatcgatcaaatctacaaatttaaaacaacgaaacacgactaaaaaacgataaataaaaacgccgaaaattctcttccctccgcttactacacgatataaaaacgttacgaaaaaactaaaacgctcgttaaaactcctaaacccatttatactaaattatattcatataatcctt

SEQ ID NO: 8253 - DNA, 732 bp, Artificial Sequence
  chemically treated genomic DNA (Homo sapiens) CpG-island No: 8253
ttcgtagcgcgtgagtgtaattggagattttggatttaagatgtttttatgaggaacgattttagttcgcggtaatttcggttagtttgtagcgtggacgataaaataggtattacgtggtttcggcgtcggggcggggttagagacgtcggaagtgatcgcgcggtgcgtcggttcgcgaggaaacgcgtttttagattatggcgatttaggcgaagcgtttacgggtgagtggcgggcgcggggtttagttttttttttcgcgttttatttttttttcgttcgtagaatcgttcgtttgcgtttttttcgtttttttttcgcgggtttcgcgttttttttcgttcgtttttttttttatttaaagttcgttttgcgttcgcgtcgcggttttttgtagtttttagcggtttttttgggggtcggatttggttattgcgcgtatttattttaggtggcggggttcgtggacggcggcgatttgtattttgtggtttgttttttgagttggtgtcggcggttcgcgttggagttgagttttaacgtgcgcgagcgagtcgtcgggcggatgattcgcggcgcggcgcgcgttgtttgtttagtttttttgtttaggtggcggttagtcgttttgtcggttgtcggtacggtttggttgtcgggttatgtgttgtttttatttgtgtcgggtttcgggttcgttttttggcgttcgtttttcgcggtttttgt

SEQ ID NO: 8254 - DNA, 732 bp, Artificial Sequence
  chemically treated genomic DNA (Homo sapiens) CpG-island No: 8254
acaaaaaccgcgaaaaacgaacgccaaaaaacgaacccgaaacccgacacaaataaaaacaacacataacccgacaaccaaaccgtaccgacaaccgacaaaacgactaaccgccacctaaacaaaaaaactaaacaaacaacgcgcgccgcgccgcgaatcatccgcccgacgactcgctcgcgcacgttaaaactcaactccaacgcgaaccgccgacaccaactcaaaaaacaaaccacaaaatacaaatcgccgccgtccacgaaccccgccacctaaaataaatacgcgcaataaccaaatccgacccccaaaaaaaccgctaaaaactacaaaaaaccgcgacgcgaacgcaaaacgaactttaaataaaaaaaaaaacgaacgaaaaaaaacgcgaaacccgcgaaaaaaaaacgaaaaaaacgcaaacgaacgattctacgaacgaaaaaaaaataaaacgcgaaaaaaaaaactaaaccccgcgcccgccactcacccgtaaacgcttcgcctaaatcgccataatctaaaaacgcgtttcctcgcgaaccgacgcaccgcgcgatcacttccgacgtctctaaccccgccccgacgccgaaaccacgtaatacctattttatcgtccacgctacaaactaaccgaaattaccgcgaactaaaatcgttcctcataaaaacatcttaaatccaaaatctccaattacactcacgcgctacgaa

SEQ ID NO: 8255 - DNA, 732 bp, Artificial Sequence
  chemically treated genomic DNA (Homo sapiens) CpG-island No: 8255
gtaagagtcgcgaggaacgggcgttaagaggcggattcgggattcgatataagtgagagtaatatataattcggtaattaagtcgtgtcggtagtcggtaagacggttgatcgttatttgagtaggagggttggataggtagcgcgcgtcgcgtcgcgggttattcgttcgacggttcgttcgcgtacgttgggatttagttttagcgcgagtcgtcggtattagtttaggaagtaggttataggatgtagatcgtcgtcgtttacgggtttcgttatttgagataagtgcgcgtagtgattaggttcgatttttagagaggtcgttgggaattgtaggagatcgcggcgcgagcgtagaacgggttttggatggaggaggggacgagcggagaggggcgcgggattcgcgggagggagacggagggggcgtaggcggacggttttgcgaacggagaaggggtgaggcgcggaggaaaaggttggatttcgcgttcgttatttattcgtggacgtttcgtttgggtcgttatggtttaagagcgcgttttttcgcgggtcggcgtatcgcgcggttattttcggcgtttttggtttcgtttcggcgtcggaattacgtggtgtttgttttgtcgtttacgttgtagattggtcggagttatcgcgggttggaatcgttttttatgaaaatattttgagtttaggatttttaattgtatttacgcgttgcgag

SEQ ID NO: 8256 - DNA, 732 bp, Artificial Sequence
  chemically treated genomic DNA (Homo sapiens) CpG-island No: 8256
ctcgcaacgcgtaaatacaattaaaaatcctaaactcaaaatattttcataaaaaacgattccaacccgcgataactccgaccaatctacaacgtaaacgacaaaacaaacaccacgtaattccgacgccgaaacgaaaccaaaaacgccgaaaataaccgcgcgatacgccgacccgcgaaaaaacgcgctcttaaaccataacgacccaaacgaaacgtccacgaataaataacgaacgcgaaatccaaccttttcctccgcgcctcaccccttctccgttcgcaaaaccgtccgcctacgccccctccgtctccctcccgcgaatcccgcgcccctctccgctcgtcccctcctccatccaaaacccgttctacgctcgcgccgcgatctcctacaattcccaacgacctctctaaaaatcgaacctaatcactacgcgcacttatctcaaataacgaaacccgtaaacgacgacgatctacatcctataacctacttcctaaactaataccgacgactcgcgctaaaactaaatcccaacgtacgcgaacgaaccgtcgaacgaataacccgcgacgcgacgcgcgctacctatccaaccctcctactcaaataacgatcaaccgtcttaccgactaccgacacgacttaattaccgaattatatattactctcacttatatcgaatcccgaatccgcctcttaacgcccgttcctcgcgactcttac

SEQ ID NO: 8257 - DNA, 1163 bp, Artificial Sequence
  chemically treated genomic DNA (Homo sapiens) CpG-island No: 8257
ggtcgtcgcgttcggagttcgttttaattcggaaagtggcggtcggttgcggggtaggcgggcggtatttgtgagtagttttagtcggtgttttagtatttttatttcggcgttcggcgcggttcggttttgggtggcggcgtcggggtagcgcgttcggtcgagtcggggagaggagcgcgggagattcggagcggagcggtaggagagcgcggagcgaagcggtaggagtagtttatagttaggagcgttttttcgtttttaacgtcgcgtttttttttttaaaacggtttaaaaaaatttattaattgtatggtcgcgtatttttaaaaaggtattcgtcgttatttggtttcggtgaattttaggaggcggaggaagggcgcggggtgggtgcggtgatatcgtgggaggtggtttttcgtgttcgtcgttcgaataaagagatttcgtcgttttcgggcgtcgcggtggggggtcgcggacggcggttgggggtttttagcgcggtcgggaaggcgaggaaggagagcgggagtcgcggggaggagggggcgtcgttttcgcggaggcgaaatggggcgggagcgagtcggtgcgggattcgcggggttagggtcgtgcgtggggttggggtcgtgttcggggttgggttgggttgggcggggacgcgcgtagtagtcgcggcggcgagagaagttggttttgggtttaggggcgagggcgtcgtcgatttatcgcggagatgcggacgagatagacgcgtaggcggggagcggggtttcggcgtcgtcgacgcgcgggtgtaggtgcgggtagttaggagttttttcgcgtgttcgcggttgtaggggcggaggtcgggttgggggcggtgcgtcgcgggggcgtgttcgcgtgggtttggcgggtgtgggcgttcggttcgcggggcggtgtcgggtttggggttagtttcggacggatcgcggtttttcgcgcgtggttttcgttttttgcgcggttggggtgttcggtgggcgggcgggagggcgagcggggatcgcgacgcggagtttgggggatatttcggtcgattcgcgttttcgtcgattttttattcgtttcgtcgcgcggattgtgttgggtgcgttgcgaggttttgttcgtttttttaggttttt

SEQ ID NO: 8258 - DNA, 1163 bp, Artificial Sequence
  chemically treated genomic DNA (Homo sapiens) CpG-island No: 8258
aaaaacctaaaaaaacgaacaaaacctcgcaacgcacccaacacaatccgcgcgacgaaacgaataaaaaatcgacgaaaacgcgaatcgaccgaaatatcccccaaactccgcgtcgcgatccccgctcgccctcccgcccgcccaccgaacaccccaaccgcgcaaaaaacgaaaaccacgcgcgaaaaaccgcgatccgtccgaaactaaccccaaacccgacaccgccccgcgaaccgaacgcccacacccgccaaacccacgcgaacacgcccccgcgacgcaccgcccccaacccgacctccgcccctacaaccgcgaacacgcgaaaaaactcctaactacccgcacctacacccgcgcgtcgacgacgccgaaaccccgctccccgcctacgcgtctatctcgtccgcatctccgcgataaatcgacgacgccctcgcccctaaacccaaaaccaacttctctcgccgccgcgactactacgcgcgtccccgcccaacccaacccaaccccgaacacgaccccaaccccacgcacgaccctaaccccgcgaatcccgcaccgactcgctcccgccccatttcgcctccgcgaaaacgacgccccctcctccccgcgactcccgctctccttcctcgccttcccgaccgcgctaaaaacccccaaccgccgtccgcgaccccccaccgcgacgcccgaaaacgacgaaatctctttattcgaacgacgaacacgaaaaaccacctcccacgatatcaccgcacccaccccgcgcccttcctccgcctcctaaaattcaccgaaaccaaataacgacgaatacctttttaaaaatacgcgaccatacaattaataaatttttttaaaccgttttaaaaaaaaaaacgcgacgttaaaaacgaaaaaacgctcctaactataaactactcctaccgcttcgctccgcgctctcctaccgctccgctccgaatctcccgcgctcctctccccgactcgaccgaacgcgctaccccgacgccgccacccaaaaccgaaccgcgccgaacgccgaaataaaaatactaaaacaccgactaaaactactcacaaataccgcccgcctaccccgcaaccgaccgccactttccgaattaaaacgaactccgaacgcgacgacc

SEQ ID NO: 8259 - DNA, 1163 bp, Artificial Sequence
  chemically treated genomic DNA (Homo sapiens) CpG-island No: 8259
gggggtttggaggggcgggtagggtttcgtagcgtatttagtatagttcgcgcggcggagcgggtgagaagtcggcgggggcgcggatcgatcggggtgttttttaggtttcgcgtcgcggttttcgttcgttttttcgttcgtttatcgggtattttagtcgcgtagaaggcggaagttacgcgcgagggatcgcggttcgttcgggattagttttaggttcggtatcgtttcgcgggtcgagcgtttatattcgttaaatttacgcgggtacgttttcgcggcgtatcgtttttagttcggttttcgtttttgtagtcgcgggtacgcggaggggtttttggttgttcgtatttgtattcgcgcgtcggcggcgtcgaagtttcgtttttcgtttgcgcgtttgtttcgttcgtattttcgcggtgagtcggcggcgttttcgtttttgagtttagggttagtttttttcgtcgtcgcggttgttgcgcgcgttttcgtttagtttagtttagtttcgagtacgattttagttttacgtacgattttagtttcgcgagtttcgtatcgattcgttttcgttttatttcgttttcgcgggggcggcgttttttttttttcgcggttttcgtttttttttttcgttttttcggtcgcgttggggatttttagtcgtcgttcgcgattttttatcgcgacgttcggaggcggcggggtttttttgttcgggcggcgggtacgggggattattttttacggtgttatcgtatttatttcgcgtttttttttcgttttttggagtttatcgggattaggtggcggcgggtgtttttttgggggtgcgcggttatgtaattggtggatttttttaaatcgttttggaggggggagcgcggcgttgggggcgggagagcgtttttggttgtgagttgtttttgtcgtttcgtttcgcgtttttttgtcgtttcgtttcgggtttttcgcgttttttttttcggttcggtcgagcgcgttgtttcgacgtcgttatttagagtcgggtcgcgtcgggcgtcgagatgaaggtgttgggatatcggttggagttgtttataggtatcgttcgtttgtttcgtagtcggtcgttatttttcgagttggagcggatttcgggcgcggcggtt

SEQ ID NO: 8260 - DNA, 1163 bp, Artificial Sequence
  chemically treated genomic DNA (Homo sapiens) CpG-island No: 8260
aaccgccgcgcccgaaatccgctccaactcgaaaaataacgaccgactacgaaacaaacgaacgatacctataaacaactccaaccgatatcccaacaccttcatctcgacgcccgacgcgacccgactctaaataacgacgtcgaaacaacgcgctcgaccgaaccgaaaaaaaaaacgcgaaaaacccgaaacgaaacgacaaaaaaacgcgaaacgaaacgacaaaaacaactcacaaccaaaaacgctctcccgcccccaacgccgcgctcccccctccaaaacgatttaaaaaaatccaccaattacataaccgcgcacccccaaaaaaacacccgccgccacctaatcccgataaactccaaaaaacgaaaaaaaaacgcgaaataaatacgataacaccgtaaaaaataatcccccgtacccgccgcccgaacaaaaaaaccccgccgcctccgaacgtcgcgataaaaaatcgcgaacgacgactaaaaatccccaacgcgaccgaaaaaacgaaaaaaaaaaacgaaaaccgcgaaaaaaaaaaaacgccgcccccgcgaaaacgaaataaaacgaaaacgaatcgatacgaaactcgcgaaactaaaatcgtacgtaaaactaaaatcgtactcgaaactaaactaaactaaacgaaaacgcgcgcaacaaccgcgacgacgaaaaaaactaaccctaaactcaaaaacgaaaacgccgccgactcaccgcgaaaatacgaacgaaacaaacgcgcaaacgaaaaacgaaacttcgacgccgccgacgcgcgaatacaaatacgaacaaccaaaaacccctccgcgtacccgcgactacaaaaacgaaaaccgaactaaaaacgatacgccgcgaaaacgtacccgcgtaaatttaacgaatataaacgctcgacccgcgaaacgataccgaacctaaaactaatcccgaacgaaccgcgatccctcgcgcgtaacttccgccttctacgcgactaaaatacccgataaacgaacgaaaaaacgaacgaaaaccgcgacgcgaaacctaaaaaacaccccgatcgatccgcgcccccgccgacttctcacccgctccgccgcgcgaactatactaaatacgctacgaaaccctacccgcccctccaaaccccc

SEQ ID NO: 8261 - DNA, 1206 bp, Artificial Sequence
  chemically treated genomic DNA (Homo sapiens) CpG-island No: 8261
cggattgttggtcgttcgaagagggtagatgtttcgttttatttcgggagtttcgttagcgtttgtttcgagattttcgtcgtagagttattatttcgttacgtaggcggtacgaaatggaatacgttcggcgatgaataatcggtcggaattttcgttagtattttttcgcgtaaatcgcggttagtcgtcgttagtacgcgttatcgattcgtatataacgtttatcgttaacgcgttgaatatcgttatatgtaatatttttagtagtttggtttgtaatgttaacgattattcgtcgatttatttagaaatagcgtgtcgttattcgttattttaaatttttcgttggattattgatagcgttagtaaacgttttttttatatgttcgaataattttttttcgttatatttttcggtagtgtagtatagttgagatagattagcgatttatcgttcgtggcgaggttttatgaatcgttttcgttattagtttttatcggttttagttttatcgttgattaggacgttgagatcggacgtcgtataattttaatttttttttttagttgcgttatgttaggggataagttaatatttgcgtttgttttatcgttttaaacggcgtggtatcgtttggtagttattttggttttttagttgtttaattagtaacgtattgtttaacgtttcgtcgttagcgtagtaattagtcgtagtttttcgtcgttgaaaatatcgattgatcgggttgtatttcgtcgagcgttagtgcgtcgattaggttttgtcggtaaataatggtagattaacgtaggcgtgaatttttagatttttttgttaggaattaaatcgttatagggatcgggtaattcgttgtttgcgggaagcgtattatattttcggcgcgggtaatcgtttttagtcgtggatgttttttagcgtaaagcgtttatcgagtatattttttgttagatcgtcgatggtagcggaataaattgtcgcgaatcgtaacgtagtaacgtagacgtatcgtttttagtatttgacgtagcgtggtgattaggcgttgaaaacgattttgggattaattttacgttggtattcgatggcgatttcgttagtaattaaggatatttttttggtttcgtttatggttatgtattggttttcgtttttgttgttttttcggatttttaggggtt

SEQ ID NO: 8262 - DNA, 1206 bp, Artificial Sequence
  chemically treated genomic DNA (Homo sapiens) CpG-island No: 8262
aacccctaaaaatccgaaaaaacaacaaaaacgaaaaccaatacataaccataaacgaaaccaaaaaaatatccttaattactaacgaaatcgccatcgaataccaacgtaaaattaatcccaaaatcgttttcaacgcctaatcaccacgctacgtcaaatactaaaaacgatacgtctacgttactacgttacgattcgcgacaatttattccgctaccatcgacgatctaacaaaaaatatactcgataaacgctttacgctaaaaaacatccacgactaaaaacgattacccgcgccgaaaatataatacgcttcccgcaaacaacgaattacccgatccctataacgatttaattcctaacaaaaaaatctaaaaattcacgcctacgttaatctaccattatttaccgacaaaacctaatcgacgcactaacgctcgacgaaatacaacccgatcaatcgatattttcaacgacgaaaaactacgactaattactacgctaacgacgaaacgttaaacaatacgttactaattaaacaactaaaaaaccaaaataactaccaaacgataccacgccgtttaaaacgataaaacaaacgcaaatattaacttatcccctaacataacgcaactaaaaaaaaaaattaaaattatacgacgtccgatctcaacgtcctaatcaacgataaaactaaaaccgataaaaactaataacgaaaacgattcataaaacctcgccacgaacgataaatcgctaatctatctcaactatactacactaccgaaaaatataacgaaaaaaaattattcgaacatataaaaaaaacgtttactaacgctatcaataatccaacgaaaaatttaaaataacgaataacgacacgctatttctaaataaatcgacgaataatcgttaacattacaaaccaaactactaaaaatattacatataacgatattcaacgcgttaacgataaacgttatatacgaatcgataacgcgtactaacgacgactaaccgcgatttacgcgaaaaaatactaacgaaaattccgaccgattattcatcgccgaacgtattccatttcgtaccgcctacgtaacgaaataataactctacgacgaaaatctcgaaacaaacgctaacgaaactcccgaaataaaacgaaacatctaccctcttcgaacgaccaacaatccg

SEQ ID NO: 8263 - DNA, 1206 bp, Artificial Sequence
  chemically treated genomic DNA (Homo sapiens) CpG-island No: 8263
agtttttagggattcgaagggatagtaagggcgaaggttaatgtatggttatggacggagttaagagagtgtttttgattgttggcgaaatcgttatcgaatgttagcgtgggattggttttaggatcgtttttagcgtttgattattacgttacgttaggtgttggaggcgatgcgtttgcgttgttacgttacgattcgcggtagtttatttcgttgttatcgacggtttggtaaaggatgtattcggtagacgttttgcgttggagggtatttacggttggaagcgattgttcgcgtcggggatgtggtgcgtttttcgtagatagcgaattgttcgatttttatgacggtttgatttttggtaggagagtttgaaggtttacgtttgcgttggtttgttattgtttgtcggtaaaatttgatcggcgtattgacgttcgacgggatgtagttcgattagtcgatgtttttagcgacgaagagttacggttgattgttgcgttggcggcggagcgttaagtaatgcgttgttgattgaataattggaaagttagaatagttgttaggcgatgttacgtcgtttgaagcggtgaaatagacgtagatgttggtttgttttttggtatgacgtaattgaaaaaagagattgagattgtgcggcgttcgattttaacgttttgattagcggtgagattggaatcggtaggagttggtggcgaaagcgatttatgaagtttcgttacgggcggtgaatcgttggtttattttaattgtgttgtattgtcggaaagtgtggcggaaaggagttgttcgggtatgtgaaaggagcgtttattggcgttattagtaatttagcgggaagtttgaaatggcggataacggtacgttgtttttggatgagtcggcgagtagtcgttggtattgtaggttaagttgttgagggtgttgtatatggcgatatttagcgcgttggcgatgaacgttgtatgcgggtcgatggcgcgtgttggcggcgattaatcgcgatttacgcgaagaggtgttggcggagatttcggtcgattgtttatcgtcgagcgtgttttatttcgtgtcgtttgcgtgacgaggtgatgattttgcggcggggatttcggagtaggcgttggcggggttttcgagataaggcggggtatttgtttttttcggacggttagtagttcg

SEQ ID NO: 8264 - DNA, 1206 bp, Artificial Sequence
  chemically treated genomic DNA (Homo sapiens) CpG-island No: 8264
cgaactactaaccgtccgaaaaaaacaaataccccgccttatctcgaaaaccccgccaacgcctactccgaaatccccgccgcaaaatcatcacctcgtcacgcaaacgacacgaaataaaacacgctcgacgataaacaatcgaccgaaatctccgccaacacctcttcgcgtaaatcgcgattaatcgccgccaacacgcgccatcgacccgcatacaacgttcatcgccaacgcgctaaatatcgccatatacaacaccctcaacaacttaacctacaataccaacgactactcgccgactcatccaaaaacaacgtaccgttatccgccatttcaaacttcccgctaaattactaataacgccaataaacgctcctttcacatacccgaacaactcctttccgccacactttccgacaatacaacacaattaaaataaaccaacgattcaccgcccgtaacgaaacttcataaatcgctttcgccaccaactcctaccgattccaatctcaccgctaatcaaaacgttaaaatcgaacgccgcacaatctcaatctcttttttcaattacgtcataccaaaaaacaaaccaacatctacgtctatttcaccgcttcaaacgacgtaacatcgcctaacaactattctaactttccaattattcaatcaacaacgcattacttaacgctccgccgccaacgcaacaatcaaccgtaactcttcgtcgctaaaaacatcgactaatcgaactacatcccgtcgaacgtcaatacgccgatcaaattttaccgacaaacaataacaaaccaacgcaaacgtaaaccttcaaactctcctaccaaaaatcaaaccgtcataaaaatcgaacaattcgctatctacgaaaaacgcaccacatccccgacgcgaacaatcgcttccaaccgtaaataccctccaacgcaaaacgtctaccgaatacatcctttaccaaaccgtcgataacaacgaaataaactaccgcgaatcgtaacgtaacaacgcaaacgcatcgcctccaacacctaacgtaacgtaataatcaaacgctaaaaacgatcctaaaaccaatcccacgctaacattcgataacgatttcgccaacaatcaaaaacactctcttaactccgtccataaccatacattaaccttcgcccttactatcccttcgaatccctaaaaact

SEQ ID NO: 8265 - DNA, 577 bp, Artificial Sequence
  chemically treated genomic DNA (Homo sapiens) CpG-island No: 8265
acgaatacgtatgtcgttacggttgattcgataattttcgttgcgaaacgggtgtcggtttcggttttgttttttagaagcgtgcgtataattagttattaatattacgttttgttattcggttggacggcgacgttcggttatttggatcgtgattttttttgtgggcgcgtttagtttcggttttgattaatcggttttagtagatcggggttgatttggtggttattatcggttcgcgtaagtttcgtggggtttgtttcgatcggggttaacgatatttcgggggtatttgacgttgttaatttaatgttggtttaaattcggaagttaaatattggttgatcgtcggtatgaacgatagtatcgtttgggcggcgtacgcgcgacggaaggttagggttttaaagcggtcgatatatcggtatgggtattaacggtgtggatgcggtgagcgaattgttttaatataggtaatcggtttttacggttttttgttgttaagttcggacgtataggttataaatttagcgaaatgttttataattgggtagtaaaagacgttgatcgttaaaat

SEQ ID NO: 8266 - DNA, 577 bp, Artificial Sequence
  chemically treated genomic DNA (Homo sapiens) CpG-island No: 8266
attttaacgatcaacgtcttttactacccaattataaaacatttcgctaaatttataacctatacgtccgaacttaacaacaaaaaaccgtaaaaaccgattacctatattaaaacaattcgctcaccgcatccacaccgttaatacccataccgatatatcgaccgctttaaaaccctaaccttccgtcgcgcgtacgccgcccaaacgatactatcgttcataccgacgatcaaccaatatttaacttccgaatttaaaccaacattaaattaacaacgtcaaatacccccgaaatatcgttaaccccgatcgaaacaaaccccacgaaacttacgcgaaccgataataaccaccaaatcaaccccgatctactaaaaccgattaatcaaaaccgaaactaaacgcgcccacaaaaaaaatcacgatccaaataaccgaacgtcgccgtccaaccgaataacaaaacgtaatattaataactaattatacgcacgcttctaaaaaacaaaaccgaaaccgacacccgtttcgcaacgaaaattatcgaatcaaccgtaacgacatacgtattcgt

SEQ ID NO: 8267 - DNA, 577 bp, Artificial Sequence
  chemically treated genomic DNA (Homo sapiens) CpG-island No: 8267
attttggcggttaacgttttttgttatttagttgtaaagtatttcgttggatttatagtttgtacgttcgggtttggtagtagggaatcgtagaagtcggttgtttgtgttgagatagttcgtttatcgtatttatatcgttaatgtttatgtcgatgtatcggtcgttttaaagttttgatttttcgtcgcgcgtacgtcgtttagacggtgttgtcgtttatatcgacgattagttaatgtttaattttcggatttgaattagtattgagttggtagcgttaaatgttttcgggatgtcgttagtttcggtcggaataaattttacggggtttgcgcgaatcgataatagttattaggttaatttcggtttgttgaaatcggttaattaaagtcgaaattggacgcgtttataggaggaattacggtttaaatggtcgagcgtcgtcgtttaatcggatggtagaacgtgatgttggtgattggttatacgtacgtttttgaaagataaagtcgggatcgatattcgtttcgtagcggaaattgtcgaattagtcgtggcggtatgcgtgttcgt

SEQ ID NO: 8268 - DNA, 577 bp, Artificial Sequence
  chemically treated genomic DNA (Homo sapiens) CpG-island No: 8268
acgaacacgcataccgccacgactaattcgacaatttccgctacgaaacgaatatcgatcccgactttatctttcaaaaacgtacgtataaccaatcaccaacatcacgttctaccatccgattaaacgacgacgctcgaccatttaaaccgtaattcctcctataaacgcgtccaatttcgactttaattaaccgatttcaacaaaccgaaattaacctaataactattatcgattcgcgcaaaccccgtaaaatttattccgaccgaaactaacgacatcccgaaaacatttaacgctaccaactcaatactaattcaaatccgaaaattaaacattaactaatcgtcgatataaacgacaacaccgtctaaacgacgtacgcgcgacgaaaaatcaaaactttaaaacgaccgatacatcgacataaacattaacgatataaatacgataaacgaactatctcaacacaaacaaccgacttctacgattccctactaccaaacccgaacgtacaaactataaatccaacgaaatactttacaactaaataacaaaaaacgttaaccgccaaaat

SEQ ID NO: 8269 - DNA, 735 bp, Artificial Sequence
  chemically treated genomic DNA (Homo sapiens) CpG-island No: 8269
gtttttggttaaaatgtttttttttaaatatttcggtagaaaggtagcgatcgtacgatcgtagatgatcgttattattatcgcgttagggttagtttttgttttcgtagtgtttcggtaatcgcgtcgtcggagttgacgttatagaatatttttttcggtatcgttagttcgcgtatggtgttttcgtatcgcgttggagaatatttaggtatttttatttattagagaagcgttgaaaattttcggcgatatttcgtaggttagcggcgaatgtcgggaatgttgttgtttttttcggttgtaggtcgatatggttatcggtttggattgttcgcgtataaagcggagacgtcggtgatagtgtcggtcgtttttatgttggagataaatgagtatgcgttcgtcggtttgttgttaagatttttcgggttttagggtggggaggggtggtaatggcgtatagggttcgggatttgacgtcgagcgttttttttacgattcgtatttcgcgtttaggatcgcgtcgtatttttttatgttcgttttttttgggtggaatttacggtaaaatttttaggttttttcgatttttttatttttttgattaaggttaggggtttacgtcggtattattgttacgtgatatttgttgttaacggcgttattattgttattagcgacgatttattaacgattttgttaatttatatttcgtaaaaattgttagttatt

SEQ ID NO: 8270 - DNA, 735 bp, Artificial Sequence
  chemically treated genomic DNA (Homo sapiens) CpG-island No: 8270
aataactaacaatttttacgaaatataaattaacaaaatcgttaataaatcgtcgctaataacaataataacgccgttaacaacaaatatcacgtaacaataataccgacgtaaacccctaaccttaatcaaaaaaataaaaaaatcgaaaaaacctaaaaattttaccgtaaattccacccaaaaaaaacgaacataaaaaaatacgacgcgatcctaaacgcgaaatacgaatcgtaaaaaaaacgctcgacgtcaaatcccgaaccctatacgccattaccacccctccccaccctaaaacccgaaaaatcttaacaacaaaccgacgaacgcatactcatttatctccaacataaaaacgaccgacactatcaccgacgtctccgctttatacgcgaacaatccaaaccgataaccatatcgacctacaaccgaaaaaaacaacaacattcccgacattcgccgctaacctacgaaatatcgccgaaaattttcaacgcttctctaataaataaaaatacctaaatattctccaacgcgatacgaaaacaccatacgcgaactaacgataccgaaaaaaatattctataacgtcaactccgacgacgcgattaccgaaacactacgaaaacaaaaactaaccctaacgcgataataataacgatcatctacgatcgtacgatcgctacctttctaccgaaatatttaaaaaaaaacattttaaccaaaaac

SEQ ID NO: 8271 - DNA, 735 bp, Artificial Sequence
  chemically treated genomic DNA (Homo sapiens) CpG-island No: 8271
aatagttggtaatttttacgaggtgtaagttagtagggtcgttggtggatcgtcgttggtagtagtaatgacgtcgttggtagtaggtattacgtagtagtaatatcgacgtaggtttttggttttggttaaggaaatggaaggatcggggaaatttgggaattttgtcgtgggttttatttaaaaggagcgggtatggaagggtgcggcgcgattttgggcgcgggatgcgaatcgtgggaggaacgttcgacgttaaatttcgaattttatgcgttattattatttttttttattttggggttcgggaaattttggtagtaaatcggcgggcgtatatttatttgtttttagtatggggacgatcggtattattatcggcgttttcgttttatgcgcgaataatttaaatcggtgattatgtcggtttgtaatcgaagagggtagtagtattttcggtattcgtcgttggtttacggaatatcgtcggggatttttaacgtttttttggtggatgaaggtgtttggatattttttagcgcgatgcggaaatattatgcgcgaattggcggtgtcgggaaggatattttgtggcgttagtttcggcggcgcggttgtcggagtattgcgggggtaaaagttaattttgacgcggtggtggtggcgattatttgcgatcgtgcgatcgttatttttttatcggggtgtttggggaagagtattttagttaggggt

SEQ ID NO: 8272 - DNA, 735 bp, Artificial Sequence
  chemically treated genomic DNA (Homo sapiens) CpG-island No: 8272
acccctaactaaaatactcttccccaaacaccccgataaaaaaataacgatcgcacgatcgcaaataatcgccaccaccaccgcgtcaaaattaacttttacccccgcaatactccgacaaccgcgccgccgaaactaacgccacaaaatatccttcccgacaccgccaattcgcgcataatatttccgcatcgcgctaaaaaatatccaaacaccttcatccaccaaaaaaacgttaaaaatccccgacgatattccgtaaaccaacgacgaataccgaaaatactactaccctcttcgattacaaaccgacataatcaccgatttaaattattcgcgcataaaacgaaaacgccgataataataccgatcgtccccatactaaaaacaaataaatatacgcccgccgatttactaccaaaatttcccgaaccccaaaataaaaaaaaataataataacgcataaaattcgaaatttaacgtcgaacgttcctcccacgattcgcatcccgcgcccaaaatcgcgccgcacccttccatacccgctccttttaaataaaacccacgacaaaattcccaaatttccccgatccttccatttccttaaccaaaaccaaaaacctacgtcgatattactactacgtaatacctactaccaacgacgtcattactactaccaacgacgatccaccaacgaccctactaacttacacctcgtaaaaattaccaactatt

SEQ ID NO: 8273 - DNA, 524 bp, Artificial Sequence
  chemically treated genomic DNA (Homo sapiens) CpG-island No: 8273
gacgggggttaaaggaatttatgtgtaatattgtttatagtgcggtttgattatttttgatacgatatttcgtttaatgcgggttaaaagtatgtgtttcggtttggttgtcgtagtttgtattagatttcgggttggtgttggcgcgcgcgtatttttgtcggttattggtgtgtaaaagggacgttgcgatatgtcgcggttgtatgtagatgtgggcgtattgtgggtttgacgtcggattgattttgaagagggcgggacgcgtaaggaatttatgattaaaattgtttatagtgtcgttgacgattatttggtattaacgtaataattcgttttatgtcgggtaatggatgatttgcggtttgggttcgcgttattcgttatgttattttgtcgtggcgtcggcgcgcgcgtatttttttattagtgtgtaatagggtggtacgatttgacgcggtatagatgacgcggatttgtttgtttttcggatatttttgacgttggatgtatttgggtttttt

SEQ ID NO: 8274 - DNA, 524 bp, Artificial Sequence
  chemically treated genomic DNA (Homo sapiens) CpG-island No: 8274
aaaaaacccaaatacatccaacgtcaaaaatatccgaaaaacaaacaaatccgcgtcatctataccgcgtcaaatcgtaccaccctattacacactaataaaaaaatacgcgcgcgccgacgccacgacaaaataacataacgaataacgcgaacccaaaccgcaaatcatccattacccgacataaaacgaattattacgttaataccaaataatcgtcaacgacactataaacaattttaatcataaattccttacgcgtcccgccctcttcaaaatcaatccgacgtcaaacccacaatacgcccacatctacatacaaccgcgacatatcgcaacgtcccttttacacaccaataaccgacaaaaatacgcgcgcgccaacaccaacccgaaatctaatacaaactacgacaaccaaaccgaaacacatacttttaacccgcattaaacgaaatatcgtatcaaaaataatcaaaccgcactataaacaatattacacataaattcctttaacccccgtc

SEQ ID NO: 8275 - DNA, 524 bp, Artificial Sequence
  chemically treated genomic DNA (Homo sapiens) CpG-island No: 8275
aaaaggtttaaatatatttaacgttagaggtattcggggggtaaataggttcgcgttatttatatcgcgttaaatcgtattattttattatatattagtgggggggtacgcgcgcgtcggcgttacggtaaggtgatataacgggtagcgcgggtttaggtcgtaggttatttattattcggtataaggcgggttattacgttagtattaggtggtcgttagcggtattgtaggtagttttggttataggttttttacgcgtttcgttttttttaaaattaattcggcgttaagtttatagtacgtttatatttatatataatcgcgatatatcgtaacgttttttttatatattagtggtcggtaagggtgcgcgcgcgttagtattagttcgaggtttaatataggttgcggtagttaggtcgaagtatatatttttagttcgtattaggcggggtatcgtattagaagtggttaggtcgtattgtaggtagtattgtatataggtttttttggttttcgtt

SEQ ID NO: 8276 - DNA, 524 bp, Artificial Sequence
  chemically treated genomic DNA (Homo sapiens) CpG-island No: 8276
aacgaaaaccaaaaaaacctatatacaatactacctacaatacgacctaaccacttctaatacgataccccgcctaatacgaactaaaaatatatacttcgacctaactaccgcaacctatattaaacctcgaactaatactaacgcgcgcgcacccttaccgaccactaatatataaaaaaaacgttacgatatatcgcgattatatataaatataaacgtactataaacttaacgccgaattaattttaaaaaaaacgaaacgcgtaaaaaacctataaccaaaactacctacaataccgctaacgaccacctaatactaacgtaataacccgccttataccgaataataaataacctacgacctaaacccgcgctacccgttatatcaccttaccgtaacgccgacgcgcgcgtacccccccactaatatataataaaataatacgatttaacgcgatataaataacgcgaacctatttaccccccgaatacctctaacgttaaatatatttaaacctttt

SEQ ID NO: 8277 - DNA, 544 bp, Artificial Sequence
  chemically treated genomic DNA (Homo sapiens) CpG-island No: 8277
gggtttgacgtttgttagtttttattattaatgacggtttttgtggttatcgttttttttgtatttattgttcgttattatttagcgtggtgtttatagttcgtttttaaggttttgttcgttttcggtattgataatcgtgtttgagatatttttacggggtttattttttgaagattattattggtgatagtcgttttgttggcgtttcgttattttgtatttattgttcgtcggtattggtttcgttattcgtttatattttagttcggtattgatggttatttcgttggtcgtatcgaagtaatttggttgttatgatttgttagtgtttcgtcgtttacggttttttcgggtgtataacgatgttagtagttagtatcgggagtgacgtgattgcggaagagatagtgtaatcgttatatcgttacgtttatttcgtgcgcgggtcgttcggaggtaattacgaaagcgttcgttatgtgattttatattagttttagtaggtatttagatgtcgttttattagtttttttttagattg

SEQ ID NO: 8278 - DNA, 544 bp, Artificial Sequence
  chemically treated genomic DNA (Homo sapiens) CpG-island No: 8278
caatctaaaaaaaaactaataaaacgacatctaaatacctactaaaactaatataaaatcacataacgaacgctttcgtaattacctccgaacgacccgcgcacgaaataaacgtaacgatataacgattacactatctcttccgcaatcacgtcactcccgatactaactactaacatcgttatacacccgaaaaaaccgtaaacgacgaaacactaacaaatcataacaaccaaattacttcgatacgaccaacgaaataaccatcaataccgaactaaaatataaacgaataacgaaaccaataccgacgaacaataaatacaaaataacgaaacgccaacaaaacgactatcaccaataataatcttcaaaaaataaaccccgtaaaaatatctcaaacacgattatcaataccgaaaacgaacaaaaccttaaaaacgaactataaacaccacgctaaataataacgaacaataaatacaaaaaaaacgataaccacaaaaaccgtcattaataataaaaactaacaaacgtcaaaccc

SEQ ID NO: 8279 - DNA, 544 bp, Artificial Sequence
  chemically treated genomic DNA (Homo sapiens) CpG-island No: 8279
taatttaaggaaaagttgatgaaacgatatttgaatatttgttaaggttggtatggaattatatgacgggcgttttcgtggttgttttcgaacggttcgcgtacggggtaaacgtggcggtgtggcggttgtattgtttttttcgtagttacgttattttcggtgttggttgttgatatcgttgtgtattcggagaaatcgtgaacggcggaatattggtaaattatgataattagattgtttcggtacgattaacggaatgattattagtatcgggttggagtatgggcggataacgaggttaatatcggcgggtaatgggtataggatggcggaacgttaataaaacgattgttattagtggtggtttttagagagtgaatttcgtggaagtgttttagatacggttattagtgtcggaggcggatagagttttagggacgggttgtgaatattacgttgaatggtggcgaatagtggatgtagagggggcgatagttataggaatcgttattaatgataagggttggtaggcgttaagttt

SEQ ID NO: 8280 - DNA, 544 bp, Artificial Sequence
  chemically treated genomic DNA (Homo sapiens) CpG-island No: 8280
aaacttaacgcctaccaacccttatcattaataacgattcctataactatcgccccctctacatccactattcgccaccattcaacgtaatattcacaacccgtccctaaaactctatccgcctccgacactaataaccgtatctaaaacacttccacgaaattcactctctaaaaaccaccactaataacaatcgttttattaacgttccgccatcctatacccattacccgccgatattaacctcgttatccgcccatactccaacccgatactaataatcattccgttaatcgtaccgaaacaatctaattatcataatttaccaatattccgccgttcacgatttctccgaatacacaacgatatcaacaaccaacaccgaaaataacgtaactacgaaaaaaacaatacaaccgccacaccgccacgtttaccccgtacgcgaaccgttcgaaaacaaccacgaaaacgcccgtcatataattccataccaaccttaacaaatattcaaatatcgtttcatcaacttttccttaaatta

SEQ ID NO: 8281 - DNA, 575 bp, Artificial Sequence
  chemically treated genomic DNA (Homo sapiens) CpG-island No: 8281
ttgcgttaacgttagtcgagcgtcgtttttagtttttgttttatatcggtttttgtcgtaatattaaaatggtggtcggtttgattttacgcgtcggattgttttgcgttagagatagttacgcgtcgttttgtttaggttgttttggcgtaattcggtttggatattagttggttcgttagttttagtatcgcgcgcgtgtcgtcgttaatagttttagttttagtttatagataggtttagtaaatttattcgttttttttttttttggtcgagggcgattttaatttggttattatcgatcgttatagttatttttcgcgataaaaatcggtgttgaatagcggttgtacgcgggggcgagatcggcgggtaattcgtcgttcggttagattttcgtcggtaacgcgttaggtcgagcgtcggttcgtttaacgttacgttatatttcgggcgtgatgtaagtcgtttgttattttttttgtaatttttatggttattttatgcgatcgttttcgttacgaatacgtaagtttatatcgtgtttacgtagtagttattcggcgtttcgtagt

SEQ ID NO: 8282 - DNA, 575 bp, Artificial Sequence
  chemically treated genomic DNA (Homo sapiens) CpG-island No: 8282
actacgaaacgccgaataactactacgtaaacacgatataaacttacgtattcgtaacgaaaacgatcgcataaaataaccataaaaattacaaaaaaaataacaaacgacttacatcacgcccgaaatataacgtaacgttaaacgaaccgacgctcgacctaacgcgttaccgacgaaaatctaaccgaacgacgaattacccgccgatctcgcccccgcgtacaaccgctattcaacaccgatttttatcgcgaaaaataactataacgatcgataataaccaaattaaaatcgccctcgaccaaaaaaaaaaaaaacgaataaatttactaaacctatctataaactaaaactaaaactattaacgacgacacgcgcgcgatactaaaactaacgaaccaactaatatccaaaccgaattacgccaaaacaacctaaacaaaacgacgcgtaactatctctaacgcaaaacaatccgacgcgtaaaatcaaaccgaccaccattttaatattacgacaaaaaccgatataaaacaaaaactaaaaacgacgctcgactaacgttaacgcaa

SEQ ID NO: 8283 - DNA, 575 bp, Artificial Sequence
  chemically treated genomic DNA (Homo sapiens) CpG-island No: 8283
attacgaaacgtcggataattgttgcgtgggtacgatatgggtttacgtattcgtggcgaaaacggtcgtatgagatgattatgaaagttgtaggaagagtgataggcggtttatattacgttcggaatataacgtggcgttgagcgaatcgacgttcgatttggcgcgttatcgacggaagtttggtcgaacggcgaattgttcgtcgatttcgttttcgcgtgtagtcgttgtttagtatcgatttttatcgcgaaaaatggttgtggcggtcgatggtagttaaattgaaatcgttttcgattagggggaaggaaagcgggtgaatttgttgaatttatttgtgagttggaattggaattgttagcggcgatacgcgcgcggtgttgaaattggcgaattaattggtatttaaatcggattacgttagggtagtttgagtaaagcggcgcgtggttatttttggcgtagggtaattcggcgcgtgaaattaaatcgattattattttgatgttgcggtaaaagtcgatgtggaataggggttggaagcggcgttcgattggcgttagcgtaa

SEQ ID NO: 8284 - DNA, 575 bp, Artificial Sequence
  chemically treated genomic DNA (Homo sapiens) CpG-island No: 8284
ttacgctaacgccaatcgaacgccgcttccaacccctattccacatcgacttttaccgcaacatcaaaataataatcgatttaatttcacgcgccgaattaccctacgccaaaaataaccacgcgccgctttactcaaactaccctaacgtaatccgatttaaataccaattaattcgccaatttcaacaccgcgcgcgtatcgccgctaacaattccaattccaactcacaaataaattcaacaaattcacccgctttccttccccctaatcgaaaacgatttcaatttaactaccatcgaccgccacaaccatttttcgcgataaaaatcgatactaaacaacgactacacgcgaaaacgaaatcgacgaacaattcgccgttcgaccaaacttccgtcgataacgcgccaaatcgaacgtcgattcgctcaacgccacgttatattccgaacgtaatataaaccgcctatcactcttcctacaactttcataatcatctcatacgaccgttttcgccacgaatacgtaaacccatatcgtacccacgcaacaattatccgacgtttcgtaat

SEQ ID NO: 8285 - DNA, 718 bp, Artificial Sequence
  chemically treated genomic DNA (Homo sapiens) CpG-island No: 8285
tatgattcgtacggacgcgaagttatttcggggtacggagttaagggcgttttgcgtttatttttgtgtttgcgttatggttgcggggcgtaggtattgtggggcgttttggcggtttgtgtttgttcgttagtcgttcgggtttcgcgcgtatacgatatgtggggtttgggttcgtgggagtataaatggcgttttcggtattatgttagtgttcgggttgtaacggggtatcgtcggatcgtcgtgagcgggaggttgtattttatcgggatgtacgttaataattattgaagcggaaatgtatcgtatcgcgtcgtgcggcgatcgtggtttataagcgcggacgcggtaggtcggtagcgggtgttatttgatgttggtaaaagcgaaagggaaattattacgttttgtttgttgatttatgatttagaggattgttgtaaacgtgttaacgttagtcgtcgatgtgacgttttgtcgtaaagcgttgttttagttggtgagcgtgggttttgatataaggggggagggggagggaaggaaggagtttgttagatgtttgttagtaattcgtttatcgcgttcgtcgttttaacgtttattcgcgatggtttattgtacgttttacgatttttgtattttatttgtttattatatcggtttcggtttttaaattggaggggaggaagaagtgaagttatggcgttttaaggtt

SEQ ID NO: 8286 - DNA, 718 bp, Artificial Sequence
  chemically treated genomic DNA (Homo sapiens) CpG-island No: 8286
aaccttaaaacgccataacttcacttcttcctcccctccaatttaaaaaccgaaaccgatataataaacaaataaaatacaaaaatcgtaaaacgtacaataaaccatcgcgaataaacgttaaaacgacgaacgcgataaacgaattactaacaaacatctaacaaactccttccttccctccccctccccccttatatcaaaacccacgctcaccaactaaaacaacgctttacgacaaaacgtcacatcgacgactaacgttaacacgtttacaacaatcctctaaatcataaatcaacaaacaaaacgtaataatttccctttcgcttttaccaacatcaaataacacccgctaccgacctaccgcgtccgcgcttataaaccacgatcgccgcacgacgcgatacgatacatttccgcttcaataattattaacgtacatcccgataaaatacaacctcccgctcacgacgatccgacgataccccgttacaacccgaacactaacataataccgaaaacgccatttatactcccacgaacccaaaccccacatatcgtatacgcgcgaaacccgaacgactaacgaacaaacacaaaccgccaaaacgccccacaatacctacgccccgcaaccataacgcaaacacaaaaataaacgcaaaacgcccttaactccgtaccccgaaataacttcgcgtccgtacgaatcata

SEQ ID NO: 8287 - DNA, 718 bp, Artificial Sequence
  chemically treated genomic DNA (Homo sapiens) CpG-island No: 8287
ggttttagaacgttatgattttattttttttttttttttaatttgagaatcgagatcgatgtggtgaataaatggggtataagaatcgtgaagcgtgtagtaggttatcgcgggtaagcgttagagcggcgggcgcgataggcgggttattagtaaatatttaataagttttttttttttttttttttttttttttatattaaaatttacgtttattagttaaaataacgttttgcggtaaagcgttatatcggcggttggcgttggtacgtttatagtaattttttaagttataggttaataggtaaggcgtggtagtttttttttcgtttttattagtattaggtagtattcgttgtcggtttgtcgcgttcgcgtttgtgaattacggtcgtcgtacggcgcggtgcggtgtattttcgttttagtggttgttggcgtatatttcggtggggtataatttttcgtttacggcggttcggcgatgtttcgttatagttcgggtattagtatggtgtcgggggcgttatttgtgtttttacgggtttaagttttatatgtcgtgtgcgcgcggaattcgggcggttggcgaataagtataagtcgttaaagcgttttataatgtttacgtttcgtagttatggcgtagatataaaaataggcgtaaaacgtttttggtttcgtgtttcggggtagtttcgcgttcgtacgggttatg

SEQ ID NO: 8288 - DNA, 718 bp, Artificial Sequence
  chemically treated genomic DNA (Homo sapiens) CpG-island No: 8288
cataacccgtacgaacgcgaaactaccccgaaacacgaaaccaaaaacgttttacgcctatttttatatctacgccataactacgaaacgtaaacattataaaacgctttaacgacttatacttattcgccaaccgcccgaattccgcgcgcacacgacatataaaacttaaacccgtaaaaacacaaataacgcccccgacaccatactaatacccgaactataacgaaacatcgccgaaccgccgtaaacgaaaaattataccccaccgaaatatacgccaacaaccactaaaacgaaaatacaccgcaccgcgccgtacgacgaccgtaattcacaaacgcgaacgcgacaaaccgacaacgaatactacctaatactaataaaaacgaaaaaaaaactaccacgccttacctattaacctataacttaaaaaattactataaacgtaccaacgccaaccgccgatataacgctttaccgcaaaacgttattttaactaataaacgtaaattttaatataaaaaaaaaaaaaaaaaaaaaaaaaaaacttattaaatatttactaataacccgcctatcgcgcccgccgctctaacgcttacccgcgataacctactacacgcttcacgattcttataccccatttattcaccacatcgatctcgattctcaaattaaaaaaaaaaaaaaaataaaatcataacgttctaaaacc

SEQ ID NO: 8289 - DNA, 690 bp, Artificial Sequence
  chemically treated genomic DNA (Homo sapiens) CpG-island No: 8289
  unsure (29)
tcgtcgcggagggtggtatgcgagacgtntttttgttgatttatttacgtgtcgtttgagacggtgagggtggcgtggttattggtcgggatggtgtgggggcgcgcggggacgtcgtgcggttaggcgggggcggggcgcgtagcgttgggggagtaggtggtagatgtgaggtcgcgcgtaggtgttagacgtcgtatttaagggttttcgttggggcgagaagggtaaatggaattttgagtagcgcgacggaaaattggcgaagaaatcgagttgtaattgagtttgttgggtagttaggtgagatcgttgaggtaggtttttcgtattttggtggcgacggtacggaaattttaataaagtggaattggaaaacgtgttgttgtataaattgtcggtaaacgtttgtaattggttgatggtagtatcgttttggtgattatcgttttgatttgacgttggtaaattacggtttggaacgtggtttgaacgacgttattgtgtaattagttatgacgatgtgaaagtttatatttcggtttgggcgagtagattatcggcgtttttcgtagttagattattcgtatcgttcgtgatttgtcgataacgttgataaaacgtacggtcgttcgatgattatcgtcgtgcggggttgaattattggtattatttcgatatgaattatcg

SEQ ID NO: 8290 - DNA, 690 bp, Artificial Sequence
  chemically treated genomic DNA (Homo sapiens) CpG-island No: 8290
  unsure (662)
cgataattcatatcgaaataataccaataattcaaccccgcacgacgataatcatcgaacgaccgtacgttttatcaacgttatcgacaaatcacgaacgatacgaataatctaactacgaaaaacgccgataatctactcgcccaaaccgaaatataaactttcacatcgtcataactaattacacaataacgtcgttcaaaccacgttccaaaccgtaatttaccaacgtcaaatcaaaacgataatcaccaaaacgatactaccatcaaccaattacaaacgtttaccgacaatttatacaacaacacgttttccaattccactttattaaaatttccgtaccgtcgccaccaaaatacgaaaaacctacctcaacgatctcacctaactacccaacaaactcaattacaactcgatttcttcgccaattttccgtcgcgctactcaaaattccatttacccttctcgccccaacgaaaacccttaaatacgacgtctaacacctacgcgcgacctcacatctaccacctactcccccaacgctacgcgccccgcccccgcctaaccgcacgacgtccccgcgcgcccccacaccatcccgaccaataaccacgccaccctcaccgtctcaaacgacacgtaaataaatcaacaaaaanacgtctcgcataccaccctccgcgacga

SEQ ID NO: 8291 - DNA, 690 bp, Artificial Sequence
  chemically treated genomic DNA (Homo sapiens) CpG-island No: 8291
  unsure (662)
cgatagtttatatcgaggtgatattagtggtttagtttcgtacgacgataattatcgaacgatcgtgcgttttattagcgttatcggtaaattacgggcgatgcgaataatttggttgcgagaaacgtcggtaatttgttcgtttaggtcggggtataagtttttatatcgttatagttggttgtatagtaacgtcgtttaggttacgttttagatcgtagtttgttagcgttagattaaaacggtggttattagggcggtgttgttattagttagttgtaggcgtttatcggtagtttgtgtagtagtacgttttttagttttattttgttgaagttttcgtgtcgtcgttattaaagtacgggaagtttattttagcgattttatttggttatttagtaggtttagttgtagttcggttttttcgttagtttttcgtcgcgttgtttaagattttatttgtttttttcgttttagcggaagtttttaaatacgacgtttaatatttgcgcgcggttttatatttattatttatttttttagcgttgcgcgtttcgttttcgtttgatcgtacgacgttttcgcgcgtttttatattatttcggttagtgattacgttatttttatcgttttaggcgatacgtgagtggattagtagaggnacgtttcgtatattatttttcgcgacgg

SEQ ID NO: 8292 - DNA, 690 bp, Artificial Sequence
  chemically treated genomic DNA (Homo sapiens) CpG-island No: 8292
  unsure (29)
ccgtcgcgaaaaataatatacgaaacgtncctctactaatccactcacgtatcgcctaaaacgataaaaataacgtaatcactaaccgaaataatataaaaacgcgcgaaaacgtcgtacgatcaaacgaaaacgaaacgcgcaacgctaaaaaaataaataataaatataaaaccgcgcgcaaatattaaacgtcgtatttaaaaacttccgctaaaacgaaaaaaacaaataaaatcttaaacaacgcgacgaaaaactaacgaaaaaaccgaactacaactaaacctactaaataaccaaataaaatcgctaaaataaacttcccgtactttaataacgacgacacgaaaacttcaacaaaataaaactaaaaaacgtactactacacaaactaccgataaacgcctacaactaactaataacaacaccgccctaataaccaccgttttaatctaacgctaacaaactacgatctaaaacgtaacctaaacgacgttactatacaaccaactataacgatataaaaacttataccccgacctaaacgaacaaattaccgacgtttctcgcaaccaaattattcgcatcgcccgtaatttaccgataacgctaataaaacgcacgatcgttcgataattatcgtcgtacgaaactaaaccactaatatcacctcgatataaactatcg

SEQ ID NO: 8293 - DNA, 522 bp, Artificial Sequence
  chemically treated genomic DNA (Homo sapiens) CpG-island No: 8293
cgaggtagcggggtaaaatcggggtcgttaagttcgaaggaggggttcgagaagtggtcggaaggcgtagggtcggggttagagtttttcgagaggcgggtgttggggtaggtgcgaataggcgggtagagggtttcgcgggagggtttagaagagagggaaatagggtcgaagcggttttcgtcggacgttatcgcggaaagagaaattaaaagtggagttgggggcggggtcggtagggggcggggtttttcgtcgtcgttagtttcgttttcgagtcggtttaaaagattggcgtaggggcgggcgtcgaatagagcgagttgcggtcgtggtagttgtacggtttttggtttcggagtatgcgcgagagtcgtttcggagcgtttcggagtttttcgtcgtttcgttcgcggcgtttcgcgtttcgtcgttaggtgagtcgggttttgggcgaggaggcgggagggaggagggaggggagtttagggtagttaggagtcgggcgagtttcgggggttg

SEQ ID NO: 8294 - DNA, 522 bp, Artificial Sequence
  chemically treated genomic DNA (Homo sapiens) CpG-island No: 8294
caacccccgaaactcgcccgactcctaactaccctaaactcccctccctcctccctcccgcctcctcgcccaaaacccgactcacctaacgacgaaacgcgaaacgccgcgaacgaaacgacgaaaaactccgaaacgctccgaaacgactctcgcgcatactccgaaaccaaaaaccgtacaactaccacgaccgcaactcgctctattcgacgcccgcccctacgccaatcttttaaaccgactcgaaaacgaaactaacgacgacgaaaaaccccgccccctaccgaccccgcccccaactccacttttaatttctctttccgcgataacgtccgacgaaaaccgcttcgaccctatttccctctcttctaaaccctcccgcgaaaccctctacccgcctattcgcacctaccccaacacccgcctctcgaaaaactctaaccccgaccctacgccttccgaccacttctcgaacccctccttcgaacttaacgaccccgattttaccccgctacctcg

SEQ ID NO: 8295 - DNA, 522 bp, Artificial Sequence
  chemically treated genomic DNA (Homo sapiens) CpG-island No: 8295
tagttttcgaggttcgttcgatttttggttgttttggattttttttttttttttttttcgttttttcgtttagggttcggtttatttggcggcggggcgcgggacgtcgcgggcgggacggcggggggtttcggggcgtttcggggcggttttcgcgtatgtttcggggttaggagtcgtgtagttgttacggtcgtagttcgttttgttcggcgttcgtttttgcgttagttttttaaatcggttcggaggcggggttggcgacggcgggaggtttcgttttttgtcggtttcgtttttagttttatttttggttttttttttcgcggtggcgttcggcgaggatcgtttcggttttgttttttttttttttggattttttcgcggggttttttgttcgtttgttcgtatttgttttagtattcgtttttcgaggggttttggtttcgattttgcgtttttcggttatttttcggatttttttttcggatttggcgatttcgattttgtttcgttatttcg

SEQ ID NO: 8296 - DNA, 522 bp, Artificial Sequence
  chemically treated genomic DNA (Homo sapiens) CpG-island No: 8296
cgaaataacgaaacaaaatcgaaatcgccaaatccgaaaaaaaaatccgaaaaataaccgaaaaacgcaaaatcgaaaccaaaacccctcgaaaaacgaatactaaaacaaatacgaacaaacgaacaaaaaaccccgcgaaaaaatccaaaaaaaaaaaaaacaaaaccgaaacgatcctcgccgaacgccaccgcgaaaaaaaaaaccaaaaataaaactaaaaacgaaaccgacaaaaaacgaaacctcccgccgtcgccaaccccgcctccgaaccgatttaaaaaactaacgcaaaaacgaacgccgaacaaaacgaactacgaccgtaacaactacacgactcctaaccccgaaacatacgcgaaaaccgccccgaaacgccccgaaaccccccgccgtcccgcccgcgacgtcccgcgccccgccgccaaataaaccgaaccctaaacgaaaaaacgaaaaaaaaaaaaaaaaaaaatccaaaacaaccaaaaatcgaacgaacctcgaaaacta

SEQ ID NO: 8297 - DNA, 521 bp, Artificial Sequence
  chemically treated genomic DNA (Homo sapiens) CpG-island No: 8297
ggggtcgcggtcgcgatgtttttgattttcgtcggttttatttaggtcgtttttcgcgcgcggggttttcgtagtatagttttttttcggttttagtttaaatcgtttagattaggcgcggattttagtttggttagtaggcggcgggcgcggggcggcgagtcggggtcggacggttggagttagaatcggttgttttttacgtttttttttcggtgttgttcggaggtcggatttcgtttttatcgagtttttattcgtcgggaagagtttcgcggagtatagagtttattttttagttgtgtttattgaggttgaacggattcgcgcggatttggtgtttcgtgttcgttttttagggtcgggttcgtcgggagcgtcgtttttcggagttgttcggtcggcgtatatttgttcggtttcgtagcgttttagtttatttttttgtttttttcgtagcgtattttcggacgttatggtttattttttcggttggttttttttgtaggatggtagtatat

SEQ ID NO: 8298 - DNA, 521 bp, Artificial Sequence
  chemically treated genomic DNA (Homo sapiens) CpG-island No: 8298
atatactaccatcctacaaaaaaaaccaaccgaaaaaataaaccataacgtccgaaaatacgctacgaaaaaaacaaaaaaataaactaaaacgctacgaaaccgaacaaatatacgccgaccgaacaactccgaaaaacgacgctcccgacgaacccgaccctaaaaaacgaacacgaaacaccaaatccgcgcgaatccgttcaacctcaataaacacaactaaaaaataaactctatactccgcgaaactcttcccgacgaataaaaactcgataaaaacgaaatccgacctccgaacaacaccgaaaaaaaaacgtaaaaaacaaccgattctaactccaaccgtccgaccccgactcgccgccccgcgcccgccgcctactaaccaaactaaaatccgcgcctaatctaaacgatttaaactaaaaccgaaaaaaaactatactacgaaaaccccgcgcgcgaaaaacgacctaaataaaaccgacgaaaatcaaaaacatcgcgaccgcgacccc

SEQ ID NO: 8299 - DNA, 521 bp, Artificial Sequence
  chemically treated genomic DNA (Homo sapiens) CpG-island No: 8299
gtgtgttattattttatagaaggggttagtcggaggggtgggttatagcgttcgggggtgcgttgcgggagagataaagaggtgagttggggcgttgcggggtcgggtaggtgtgcgtcggtcggataatttcggagggcggcgttttcggcggattcggttttagggggcgagtacggagtattaagttcgcgcggattcgtttagttttagtggatatagttagaaaatgggttttgtatttcgcggagtttttttcggcgggtgggggttcggtggaggcggagttcggttttcgggtagtatcgagaggggggcgtggagagtagtcggttttggttttagtcgttcggtttcggttcgtcgtttcgcgttcgtcgtttgttggttaggttgggattcgcgtttggtttgggcgatttgggttagggtcggagaaaggttgtgttgcgggagtttcgcgcgcggggggcggtttgggtggggtcggcgagggttaggggtatcgcggtcgcgatttt

SEQ ID NO: 8300 - DNA, 521 bp, Artificial Sequence
  chemically treated genomic DNA (Homo sapiens) CpG-island No: 8300
aaaatcgcgaccgcgatacccctaaccctcgccgaccccacccaaaccgccccccgcgcgcgaaactcccgcaacacaacctttctccgaccctaacccaaatcgcccaaaccaaacgcgaatcccaacctaaccaacaaacgacgaacgcgaaacgacgaaccgaaaccgaacgactaaaaccaaaaccgactactctccacgcccccctctcgatactacccgaaaaccgaactccgcctccaccgaacccccacccgccgaaaaaaactccgcgaaatacaaaacccattttctaactatatccactaaaactaaacgaatccgcgcgaacttaatactccgtactcgccccctaaaaccgaatccgccgaaaacgccgccctccgaaattatccgaccgacgcacacctacccgaccccgcaacgccccaactcacctctttatctctcccgcaacgcacccccgaacgctataacccacccctccgactaaccccttctataaaataataacacac

SEQ ID NO: 8301 - DNA, 615 bp, Artificial Sequence
  chemically treated genomic DNA (Homo sapiens) CpG-island No: 8301
ttcggcggtttcgttttttgacgtcgattattggtcggttttgttagcgcgtttttgattggtggttgagggtcgggtttcgttgttttttaaagttggcgggaaagcggaggcggggcggaagggtgcggcgaggcggaatggcggcggttgcggattcgtttttaggcggtttcgcgggggtgcggttttcgaggtcgtcgttatttaaggtgttggcggagtagttgcggcgcgacgcggagggcggttcgggcgcgtggcggttgttacgggcggcggcgggtcgcgggtcgttggatttggcggtcgtgtggatgtagggtagggtagtgatggcggatcgcggcgaggttcggttgagggattcgagcggggatttttcggttcgcggtttggagcgggtgtcgcgcgggcggttttgtttagttttaggtaatgttcgggttttatcgggcgtttttttttttgttgttcgtcgagaagttgtcgaggttagattcgattttgttgttgatattcgaacgggggcggggcgggtttggttttttttcgggtttttgtttttgcgggttttcgtttgggtatttttgtttcggtttttttttggtgaag

SEQ ID NO: 8302 - DNA, 615 bp, Artificial Sequence
  chemically treated genomic DNA (Homo sapiens) CpG-island No: 8302
cttcaccaaaaaaaaaccgaaacaaaaatacccaaacgaaaacccgcaaaaacaaaaacccgaaaaaaaaccaaacccgccccgcccccgttcgaatatcaacaacaaaatcgaatctaacctcgacaacttctcgacgaacaacaaaaaaaaaaacgcccgataaaacccgaacattacctaaaactaaacaaaaccgcccgcgcgacacccgctccaaaccgcgaaccgaaaaatccccgctcgaatccctcaaccgaacctcgccgcgatccgccatcactaccctaccctacatccacacgaccgccaaatccaacgacccgcgacccgccgccgcccgtaacaaccgccacgcgcccgaaccgccctccgcgtcgcgccgcaactactccgccaacaccttaaataacgacgacctcgaaaaccgcacccccgcgaaaccgcctaaaaacgaatccgcaaccgccgccattccgcctcgccgcacccttccgccccgcctccgctttcccgccaactttaaaaaacaacgaaacccgaccctcaaccaccaatcaaaaacgcgctaacaaaaccgaccaataatcgacgtcaaaaaacgaaaccgccgaa

SEQ ID NO: 8303 - DNA, 615 bp, Artificial Sequence
  chemically treated genomic DNA (Homo sapiens) CpG-island No: 8303
ttttattaaggagggatcggagtaagggtatttaagcggggattcgtaggggtagaggttcggaggagggttagattcgtttcgttttcgttcgagtgttaataataagatcgaatttggtttcggtaatttttcggcgggtagtagggaagagggcgttcggtaaggttcgggtattatttgggattagatagggtcgttcgcgcggtattcgttttaggtcgcggatcgagaagttttcgttcgggttttttagtcgagtttcgtcgcggttcgttattattattttgttttgtatttatacggtcgttaggtttagcggttcgcggttcgtcgtcgttcgtgatagtcgttacgcgttcgggtcgtttttcgcgtcgcgtcgtagttgtttcgttagtattttgagtggcggcgatttcggaagtcgtattttcgcggggtcgtttgagaacgagttcgtagtcgtcgttatttcgtttcgtcgtattttttcgtttcgttttcgttttttcgttaattttgagaagtagcggggttcggtttttagttattaattaggagcgcgttggtagagtcggttaatggtcgacgttagaaggcgggatcgtcggg

SEQ ID NO: 8304 - DNA, 615 bp, Artificial Sequence
  chemically treated genomic DNA (Homo sapiens) CpG-island No: 8304
cccgacgatcccgccttctaacgtcgaccattaaccgactctaccaacgcgctcctaattaataactaaaaaccgaaccccgctacttctcaaaattaacgaaaaaacgaaaacgaaacgaaaaaatacgacgaaacgaaataacgacgactacgaactcgttctcaaacgaccccgcgaaaatacgacttccgaaatcgccgccactcaaaatactaacgaaacaactacgacgcgacgcgaaaaacgacccgaacgcgtaacgactatcacgaacgacgacgaaccgcgaaccgctaaacctaacgaccgtataaatacaaaacaaaataataataacgaaccgcgacgaaactcgactaaaaaacccgaacgaaaacttctcgatccgcgacctaaaacgaataccgcgcgaacgaccctatctaatcccaaataatacccgaaccttaccgaacgccctcttccctactacccgccgaaaaattaccgaaaccaaattcgatcttattattaacactcgaacgaaaacgaaacgaatctaaccctcctccgaacctctacccctacgaatccccgcttaaatacccttactccgatccctccttaataaaa

SEQ ID NO: 8305 - DNA, 568 bp, Artificial Sequence
  chemically treated genomic DNA (Homo sapiens) CpG-island No: 8305
  unsure (531)
ttcggtagatgtgcgttaaagtttattttcggatgttggtggcgtaaaatttcgttacggatgcgttcgcggtttatattttcgcggatggcgatgaattttattttcggcgtgatgatgttttggcgggcgtagtgtagttgggtgatacggcgttttgttttggcgcgttttggtgttagtacgtcgttaaaacgtagttcgtcgaggttattatttgttagtcgcgttttagtgtaatcggaattgcgtacggtaagtttttcggtatcgtcgcgcgtatcgatttacggttggcgtagttttgttagtttttgttgtacgttaatggtaatttgcggattattatacgggtcggaggtgtcgtagatcggaatcgtttcgtttttttcgtattgcgggtgttttttgttatcgttaattagcgtcgggttaagttggattttacgtattggtacgcgtacgtcggggtgtgtgttagtgatataaatgcggtttgagttaggaaaggcggtgttttttatggtgtanataaaatggtgggtttcgtcgcgttgttttcggaagt

SEQ ID NO: 8306 - DNA, 568 bp, Artificial Sequence
  chemically treated genomic DNA (Homo sapiens) CpG-island No: 8306
  unsure (38)
acttccgaaaacaacgcgacgaaacccaccattttatntacaccataaaaaacaccgcctttcctaactcaaaccgcatttatatcactaacacacaccccgacgtacgcgtaccaatacgtaaaatccaacttaacccgacgctaattaacgataacaaaaaacacccgcaatacgaaaaaaacgaaacgattccgatctacgacacctccgacccgtataataatccgcaaattaccattaacgtacaacaaaaactaacaaaactacgccaaccgtaaatcgatacgcgcgacgataccgaaaaacttaccgtacgcaattccgattacactaaaacgcgactaacaaataataacctcgacgaactacgttttaacgacgtactaacaccaaaacgcgccaaaacaaaacgccgtatcacccaactacactacgcccgccaaaacatcatcacgccgaaaataaaattcatcgccatccgcgaaaatataaaccgcgaacgcatccgtaacgaaattttacgccaccaacatccgaaaataaactttaacgcacatctaccgaa

SEQ ID NO: 8307 - DNA, 568 bp, Artificial Sequence
  chemically treated genomic DNA (Homo sapiens) CpG-island No: 8307
  unsure (38)
attttcgggaataacgcgacggggtttattattttatntatattatggaaggtatcgttttttttaatttaaatcgtatttatattattggtatatatttcggcgtgcgcgtgttaatgcgtgagatttagtttagttcgacgttaattggcggtagtaaagaatattcgtagtacgaagaaaacgaagcgatttcggtttacgatattttcggttcgtatggtgattcgtagattgttattaacgtgtagtaagggttggtaaaattacgttagtcgtggatcgatgcgcgcggcgatatcgaagaatttatcgtgcgtagtttcgattatattaaagcgcggttggtagatgatggtttcgacgaattgcgttttagcggcgtattaatattaaaacgcgttaaagtaggacgtcgtgttatttaattgtattacgttcgttagggtattattacgtcggaaatggaatttatcgttattcgcgagaatatgggtcgcgagcgtattcgtagcgaggttttacgttattagtattcgggaatgagttttggcgtatatttgtcgga

SEQ ID NO: 8308 - DNA, 568 bp, Artificial Sequence
  chemically treated genomic DNA (Homo sapiens) CpG-island No: 8308
  unsure (531)
tccgacaaatatacgccaaaactcattcccgaatactaataacgtaaaacctcgctacgaatacgctcgcgacccatattctcgcgaataacgataaattccatttccgacgtaataataccctaacgaacgtaatacaattaaataacacgacgtcctactttaacgcgttttaatattaatacgccgctaaaacgcaattcgtcgaaaccatcatctaccaaccgcgctttaatataatcgaaactacgcacgataaattcttcgatatcgccgcgcgcatcgatccacgactaacgtaattttaccaacccttactacacgttaataacaatctacgaatcaccatacgaaccgaaaatatcgtaaaccgaaatcgcttcgttttcttcgtactacgaatattctttactaccgccaattaacgtcgaactaaactaaatctcacgcattaacacgcgcacgccgaaatatataccaataatataaatacgatttaaattaaaaaaaacgataccttccataatatanataaaataataaaccccgtcgcgttattcccgaaaat

SEQ ID NO: 8309 - DNA, 552 bp, Artificial Sequence
  chemically treated genomic DNA (Homo sapiens) CpG-island No: 8309
ggacgttttcgcgaatagtagttggttatattttatattgaatttggtcgatatgcggtagttgtagtagtagtatagttaaacgagattggtcgatatcgtcgtcgatggtttgcggtattttatcgcgtagtagcgtttgatgttattttagttttaggcgattttcgttatcggttagcgttagttgatgttttagcgtgtcggtatttatacggatttttatggaggaaagtttaaacgtattttttagtatcgggttttatattagaatatcgtcgtttagattcgtatggtttagttttgacggggtgttttagttattataattcggtgcgcgtacgtcgtggcgatgattatcgtttagtttgtcgttaatttcgataaggaatatcgcgttaagatttttcgttatcgttcgtttacgttttttggtattaagattcggataacgagatagtaatttttggttgtgtacgaagtggatttgatttgatttgtatttttgcgattgaattttattggatttttatttcgtgtcgtaatagtttg

SEQ ID NO: 8310 - DNA, 552 bp, Artificial Sequence
  chemically treated genomic DNA (Homo sapiens) CpG-island No: 8310
caaactattacgacacgaaataaaaatccaataaaattcaatcgcaaaaatacaaatcaaatcaaatccacttcgtacacaaccaaaaattactatctcgttatccgaatcttaataccaaaaaacgtaaacgaacgataacgaaaaatcttaacgcgatattccttatcgaaattaacgacaaactaaacgataatcatcgccacgacgtacgcgcaccgaattataataactaaaacaccccgtcaaaactaaaccatacgaatctaaacgacgatattctaatataaaacccgatactaaaaaatacgtttaaactttcctccataaaaatccgtataaataccgacacgctaaaacatcaactaacgctaaccgataacgaaaatcgcctaaaactaaaataacatcaaacgctactacgcgataaaataccgcaaaccatcgacgacgatatcgaccaatctcgtttaactatactactactacaactaccgcatatcgaccaaattcaatataaaatataaccaactactattcgcgaaaacgtcc

SEQ ID NO: 8311 - DNA, 552 bp, Artificial Sequence
  chemically treated genomic DNA (Homo sapiens) CpG-island No: 8311
taaattgttgcgatacgggatggggatttagtggaatttagtcgtaggaatgtagattaggttagatttatttcgtatatagttaggagttattgtttcgttattcggattttgatgttaaagggcgtgagcgggcgatagcgaaagattttggcgcggtattttttgtcgggattggcggtaagttgagcgatggttatcgttacgacgtgcgcgtatcggattatgatgattggagtatttcgttagagttgggttatgcgggtttgaacggcgatattttggtgtggaattcggtattggaagatgcgtttgagtttttttttatggggattcgtgtagatgtcgatacgttgaagtattaattggcgttgatcggtgacgaagatcgtttggagttggagtggtattaggcgttgttgcgcggtgaaatgtcgtagattatcggcggcggtatcggttagtttcgtttgattatgttgttgttgtaattgtcgtatatcggttaggtttagtgtggagtatggttagttgttgttcgcgagagcgttt

SEQ ID NO: 8312 - DNA, 552 bp, Artificial Sequence
  chemically treated genomic DNA (Homo sapiens) CpG-island No: 8312
aaacgctctcgcgaacaacaactaaccatactccacactaaacctaaccgatatacgacaattacaacaacaacataatcaaacgaaactaaccgataccgccgccgataatctacgacatttcaccgcgcaacaacgcctaataccactccaactccaaacgatcttcgtcaccgatcaacgccaattaatacttcaacgtatcgacatctacacgaatccccataaaaaaaaactcaaacgcatcttccaataccgaattccacaccaaaatatcgccgttcaaacccgcataacccaactctaacgaaatactccaatcatcataatccgatacgcgcacgtcgtaacgataaccatcgctcaacttaccgccaatcccgacaaaaaataccgcgccaaaatctttcgctatcgcccgctcacgccctttaacatcaaaatccgaataacgaaacaataactcctaactatatacgaaataaatctaacctaatctacattcctacgactaaattccactaaatccccatcccgtatcgcaacaattta

SEQ ID NO: 8313 - DNA, 526 bp, Artificial Sequence
  chemically treated genomic DNA (Homo sapiens) CpG-island No: 8313
attcggttatttttcgggttttgttggttggttgcgcggtgatggggattgttaatttgttcggcggatatgttgttattatcggttcgtaattttattacgttttggtcgatggtttttagggtaacggtatttcgtaattgttgtcgtaattggtgttgtcgtgggatttgtttaatttagaatttacgttaatttgggattttattcgtatattgttgtttggcggtatttttaatggtaatgttcggcgtaatcgaatttttgttttgcgtcgtggtgttggatggtatgatcgggacgaaatataaggcgaatagcgaattggttggatagggattggggaatattatcgtttcgttttttggtggtattatcgttatagttgttatcgcgcgttttgtcgttaacgttcgtgtcggggtaacgttttttatttcggcggtgatttattttattttggttatttttgttttgttggtattggtatcgttgtttttttggttgtcgtttttcgttatggtag

SEQ ID NO: 8314 - DNA, 526 bp, Artificial Sequence
  chemically treated genomic DNA (Homo sapiens) CpG-island No: 8314
ctaccataacgaaaaacgacaaccaaaaaaacaacgataccaataccaacaaaacaaaaataaccaaaataaaataaatcaccgccgaaataaaaaacgttaccccgacacgaacgttaacgacaaaacgcgcgataacaactataacgataataccaccaaaaaacgaaacgataatattccccaatccctatccaaccaattcgctattcgccttatatttcgtcccgatcataccatccaacaccacgacgcaaaacaaaaattcgattacgccgaacattaccattaaaaataccgccaaacaacaatatacgaataaaatcccaaattaacgtaaattctaaattaaacaaatcccacgacaacaccaattacgacaacaattacgaaataccgttaccctaaaaaccatcgaccaaaacgtaataaaattacgaaccgataataacaacatatccgccgaacaaattaacaatccccatcaccgcgcaaccaaccaacaaaacccgaaaaataaccgaat

SEQ ID NO: 8315 - DNA, 526 bp, Artificial Sequence
  chemically treated genomic DNA (Homo sapiens) CpG-island No: 8315
ttgttatggcggaaagcggtagttaggagagtagcggtgttagtattagtagggtaagaataattagaatagagtggattatcgtcgagataggggacgttgtttcggtacggacgttagcggtagaacgcgcgatggtagttgtagcggtaatattattaaagaacggagcgataatattttttagtttttgtttaattagttcgttgttcgttttgtgtttcgtttcggttatattatttagtattacggcgtagagtagagattcgattgcgtcgagtattgttattgagaatgtcgttaggtagtagtgtgcgaatagaattttaggttagcgtgaattttgaattaggtagattttacggtagtattagttgcggtagtagttgcggaatatcgttattttgagaattatcggttaggacgtagtggaattgcgaatcgatggtagtaatatgttcgtcgagtaggttaataatttttattatcgcgtaattagttagtaaggttcggaaggtgatcgggt

SEQ ID NO: 8316 - DNA, 526 bp, Artificial Sequence
  chemically treated genomic DNA (Homo sapiens) CpG-island No: 8316
acccgatcaccttccgaaccttactaactaattacgcgataataaaaattattaacctactcgacgaacatattactaccatcgattcgcaattccactacgtcctaaccgataattctcaaaataacgatattccgcaactactaccgcaactaatactaccgtaaaatctacctaattcaaaattcacgctaacctaaaattctattcgcacactactacctaacgacattctcaataacaatactcgacgcaatcgaatctctactctacgccgtaatactaaataatataaccgaaacgaaacacaaaacgaacaacgaactaattaaacaaaaactaaaaaatattatcgctccgttctttaataatattaccgctacaactaccatcgcgcgttctaccgctaacgtccgtaccgaaacaacgtcccctatctcgacgataatccactctattctaattattcttaccctactaatactaacaccgctactctcctaactaccgctttccgccataacaa

SEQ ID NO: 8317 - DNA, 749 bp, Artificial Sequence
  chemically treated genomic DNA (Homo sapiens) CpG-island No: 8317
  unsure (269)
atgacgattgggtatacggcgattattattgtgaatatttttataggtattagacgagatttgaattttcggtttatgcgttgagtattgttagcgagacgttatggagatttttttttttagttaaatttggttttttcgtgattatacggttttgtcgtgatcgtttcgcgaaggtgtaggtcgtagaagtattattatgggagcgtacgtgataattttttcggtgattcgtaggggaagtttttattattcgtgtggttattagnggtgtattagcgtgttacgtgcgggttttattattcggcgttgttatgtatacggtgagcgttagaattcgaaatcgtagagtaattgtatattattagttagtgtacgattttaattggtaattggggattaggtcggcgtcggtacgtgattttgaattgttcggtagtatgttgtgtgaagttaggttcgattatgtaggcgtgtcgtacgtttatttattttatgtgtcggtggtagcgattagtggggcgttgaagtgaattagttgttttatttcgagtttataggcgtatttgttgaggcggatggagtatggtaattattttgattggtatgtattaacgcgagtgattcgcgggatagtggtatagggtgatcgtgttggtttttttttttgttgtcgtttggcgttaaaaaaggttttttattgatttagtaaagtaggggatacgcgtaggtgtttgtatattatttta

SEQ ID NO: 8318 - DNA, 749 bp, Artificial Sequence
  chemically treated genomic DNA (Homo sapiens) CpG-island No: 8318
  unsure (481)
taaaataatatacaaacacctacgcgtatcccctactttactaaatcaataaaaaaccttttttaacgccaaacgacaacaaaaaaaaaaaccaacacgatcaccctataccactatcccgcgaatcactcgcgttaatacataccaatcaaaataattaccatactccatccgcctcaacaaatacgcctataaactcgaaataaaacaactaattcacttcaacgccccactaatcgctaccaccgacacataaaataaataaacgtacgacacgcctacataatcgaacctaacttcacacaacatactaccgaacaattcaaaatcacgtaccgacgccgacctaatccccaattaccaattaaaatcgtacactaactaataatatacaattactctacgatttcgaattctaacgctcaccgtatacataacaacgccgaataataaaacccgcacgtaacacgctaatacaccnctaataaccacacgaataataaaaacttcccctacgaatcaccgaaaaaattatcacgtacgctcccataataatacttctacgacctacaccttcgcgaaacgatcacgacaaaaccgtataatcacgaaaaaaccaaatttaactaaaaaaaaaaatctccataacgtctcgctaacaatactcaacgcataaaccgaaaattcaaatctcgtctaatacctataaaaatattcacaataataatcgccgtatacccaatcgtcat

SEQ ID NO: 8319 - DNA, 749 bp, Artificial Sequence
  chemically treated genomic DNA (Homo sapiens) CpG-island No: 8319
  unsure (481)
tgggataatatataagtatttacgcgtgttttttgttttattgggttaatggaaggttttttttggcgttaggcgataataggaaagaagattaatacgattattttatgttattgtttcgcggattattcgcgttagtatatattaattaaagtggttgttatgttttattcgttttaataagtacgtttatggattcgaggtagagtagttggtttattttagcgttttattggtcgttgttatcgatatatggaatgggtgaacgtacgatacgtttgtatagtcgaatttggttttatataatatgttatcgagtaatttagggttacgtatcggcgtcgatttagtttttagttattagttgaggtcgtgtattagttaatgatgtatagttgttttgcgatttcgggttttaacgtttatcgtgtatatggtagcgtcgaatggtgggattcgtacgtgatacgttggtgtattnttagtagttatacgaatgatggggattttttttgcgaattatcgagggaattattacgtgcgtttttatgatagtatttttgcggtttatattttcgcgggacgattacggtaagatcgtatggttacgaagggattaggtttgattggggaaaggggtttttatagcgtttcgttgatagtgtttaacgtatgggtcgagagtttagatttcgtttagtgtttgtggggatatttatagtgatagtcgtcgtatatttagtcgttat

SEQ ID NO: 8320 - DNA, 749 bp, Artificial Sequence
  chemically treated genomic DNA (Homo sapiens) CpG-island No: 8320
  unsure (269)
ataacgactaaatatacgacgactatcactataaatatccccacaaacactaaacgaaatctaaactctcgacccatacgttaaacactatcaacgaaacgctataaaaacccctttccccaatcaaacctaatcccttcgtaaccatacgatcttaccgtaatcgtcccgcgaaaatataaaccgcaaaaatactatcataaaaacgcacgtaataattccctcgataattcgcaaaaaaaatccccatcattcgtataactactaanaatacaccaacgtatcacgtacgaatcccaccattcgacgctaccatatacacgataaacgttaaaacccgaaatcgcaaaacaactatacatcattaactaatacacgacctcaactaataactaaaaactaaatcgacgccgatacgtaaccctaaattactcgataacatattatataaaaccaaattcgactatacaaacgtatcgtacgttcacccattccatatatcgataacaacgaccaataaaacgctaaaataaaccaactactctacctcgaatccataaacgtacttattaaaacgaataaaacataacaaccactttaattaatatatactaacgcgaataatccgcgaaacaataacataaaataatcgtattaatcttctttcctattatcgcctaacgccaaaaaaaaccttccattaacccaataaaacaaaaaacacgcgtaaatacttatatattatccca

SEQ ID NO: 8321 - DNA, 625 bp, Artificial Sequence
  chemically treated genomic DNA (Homo sapiens) CpG-island No: 8321
tcggttggcgttgaggggatcgaggaggggtttggggcgaaaggatcgcgagagggcgtttagggcgcggggggcgcggtatttgtaggtcggtaaagttttttaaatcggtttcgttagattcgcgcggtcgtcgttttcgtttcggtcgtcggagttgttgtcgcgtcgcgtttttacgtgattcgcgtacgcgtcgggggcggagtcgttttagattcgtttttatttttcggcgtttttagcgcgtcggttcgtttcgagtgcgcgtgcgtagcggttgtttgggcgatcggggaagcgttgggttgtaaagattagggcgttagcggttggcgaagaaggaaagagggtattttttggttgggttggggtcgtagcgacgttcgtcgcgaatttgggttttttaaagttgcggggcgttcggtgtcgtcgaagtaaatatgtattttgagttttcggagtttgcgataggtggtgtagtagagttggattgcgcgtaggagttcggcgtggaggagtttgcgggtgattacgggagcgtaggtcgagggggttgtaaggaaggtgtcgattgttttttagggagggcggtgggcgaggggtaatacggtaggcgttttag

SEQ ID NO: 8322 - DNA, 625 bp, Artificial Sequence
  chemically treated genomic DNA (Homo sapiens) CpG-island No: 8322
ctaaaacgcctaccgtattacccctcgcccaccgccctccctaaaaaacaatcgacaccttccttacaaccccctcgacctacgctcccgtaatcacccgcaaactcctccacgccgaactcctacgcgcaatccaactctactacaccacctatcgcaaactccgaaaactcaaaatacatatttacttcgacgacaccgaacgccccgcaactttaaaaaacccaaattcgcgacgaacgtcgctacgaccccaacccaaccaaaaaataccctctttccttcttcgccaaccgctaacgccctaatctttacaacccaacgcttccccgatcgcccaaacaaccgctacgcacgcgcactcgaaacgaaccgacgcgctaaaaacgccgaaaaataaaaacgaatctaaaacgactccgcccccgacgcgtacgcgaatcacgtaaaaacgcgacgcgacaacaactccgacgaccgaaacgaaaacgacgaccgcgcgaatctaacgaaaccgatttaaaaaactttaccgacctacaaataccgcgccccccgcgccctaaacgccctctcgcgatcctttcgccccaaacccctcctcgatcccctcaacgccaaccga

SEQ ID NO: 8323 - DNA, 625 bp, Artificial Sequence
  chemically treated genomic DNA (Homo sapiens) CpG-island No: 8323
ttggagcgtttatcgtgttgtttttcgtttatcgttttttttggggggtagtcggtattttttttgtagttttttcggtttgcgttttcgtggttattcgtagatttttttacgtcgggtttttgcgcgtaatttagttttgttgtattatttgtcgtaggtttcgagggtttagggtgtatgtttatttcggcgatatcgaacgtttcgtagttttggggggtttaggttcgcggcggacgtcgttacggttttagtttagttagagagtatttttttttttttttcgttagtcgttggcgttttagtttttatagtttaacgttttttcggtcgtttaggtaatcgttgcgtacgcgtattcgggacggatcggcgcgttggggacgtcggggggtgggggcgggtttgagacggtttcgttttcggcgcgtacgcgggttacgtgagggcgcggcgcggtagtagtttcggcggtcgagacgggggcggcggtcgcgcgggtttggcgggatcggtttggaagattttgtcggtttgtaggtatcgcgtttttcgcgttttgggcgttttttcgcggttttttcgttttagattttttttcggtttttttagcgttagtcgg

SEQ ID NO: 8324 - DNA, 625 bp, Artificial Sequence
  chemically treated genomic DNA (Homo sapiens) CpG-island No: 8324
ccgactaacgctaaaaaaaccgaaaaaaaatctaaaacgaaaaaaccgcgaaaaaacgcccaaaacgcgaaaaacgcgatacctacaaaccgacaaaatcttccaaaccgatcccgccaaacccgcgcgaccgccgcccccgtctcgaccgccgaaactactaccgcgccgcgccctcacgtaacccgcgtacgcgccgaaaacgaaaccgtctcaaacccgcccccaccccccgacgtccccaacgcgccgatccgtcccgaatacgcgtacgcaacgattacctaaacgaccgaaaaaacgttaaactataaaaactaaaacgccaacgactaacgaaaaaaaaaaaaaaatactctctaactaaactaaaaccgtaacgacgtccgccgcgaacctaaaccccccaaaactacgaaacgttcgatatcgccgaaataaacatacaccctaaaccctcgaaacctacgacaaataatacaacaaaactaaattacgcgcaaaaacccgacgtaaaaaaatctacgaataaccacgaaaacgcaaaccgaaaaaactacaaaaaaaataccgactaccccccaaaaaaaacgataaacgaaaaacaacacgataaacgctccaa

SEQ ID NO: 8325 - DNA, 854 bp, Artificial Sequence
  chemically treated genomic DNA (Homo sapiens) CpG-island No: 8325
gcgttcggttttcgggggtggagggtttaggtcgcgttttttagtttcgcggttttaggttttcgttcgttcgaggcggagttcgggaggtcggggcggggtttcgggtcggttatttatttgggttgttagttattttagtttcgcgaatagttggtgtcgttggtgtcgtcgtcgtcgtcgtcgtcgtttagtcgagatttcggggttttgcggtttattatttttttcgatacgatatggttaagcgtcgtcgtttagagaagcgcgagtcgttattcgaatcggtcgtcgttaatatttcgtttcggttcggggttgagaaggaagtcgagaaggaggaggaggaggaggcggcggcgggcgggggaagaggacgatcgtttcgggtttcgtttgagttcgtagtataggacgaggaggcgggagcggcgcggtgagagagaggcggatgaaggggaggcgacgttttttttagggttttgcgcggtttacgtcgtcggggttttcgaggaggaggacgacgaggaataggcggtggcggtagtatttttacgtttatacggttattgttttttcgtttttcggtttcgttcgtcgcgtcgtcgttgtcgtacggtatgttgggagcgagaggcggggtcggtttcgtcgtgtttgcggagagaggcgggttttgtcggcggggcggggtcgatagtaggtcgtttcgttttttacggttttaggtttttggacggcgaagaggtttgggcgtagcggtgacgaattttaagataggggatttttattattgcggttatatattttttttttaaatgtttttcggaaagtatcggagggttaggtagtta

SEQ ID NO: 8326 - DNA, 854 bp, Artificial Sequence
  chemically treated genomic DNA (Homo sapiens) CpG-island No: 8326
taactacctaaccctccgatactttccgaaaaacatttaaaaaaaaaatatataaccgcaataataaaaatcccctatcttaaaattcgtcaccgctacgcccaaacctcttcgccgtccaaaaacctaaaaccgtaaaaaacgaaacgacctactatcgaccccgccccgccgacaaaacccgcctctctccgcaaacacgacgaaaccgaccccgcctctcgctcccaacataccgtacgacaacgacgacgcgacgaacgaaaccgaaaaacgaaaaaacaataaccgtataaacgtaaaaatactaccgccaccgcctattcctcgtcgtcctcctcctcgaaaaccccgacgacgtaaaccgcgcaaaaccctaaaaaaaacgtcgcctccccttcatccgcctctctctcaccgcgccgctcccgcctcctcgtcctatactacgaactcaaacgaaacccgaaacgatcgtcctcttcccccgcccgccgccgcctcctcctcctcctccttctcgacttccttctcaaccccgaaccgaaacgaaatattaacgacgaccgattcgaataacgactcgcgcttctctaaacgacgacgcttaaccatatcgtatcgaaaaaaataataaaccgcaaaaccccgaaatctcgactaaacgacgacgacgacgacgacgacaccaacgacaccaactattcgcgaaactaaaataactaacaacccaaataaataaccgacccgaaaccccgccccgacctcccgaactccgcctcgaacgaacgaaaacctaaaaccgcgaaactaaaaaacgcgacctaaaccctccacccccgaaaaccgaacgc

SEQ ID NO: 8327 - DNA, 854 bp, Artificial Sequence
  chemically treated genomic DNA (Homo sapiens) CpG-island No: 8327
tgattgtttggtttttcggtgtttttcgggaagtatttgggagaaaagtgtgtggtcgtagtagtggagattttttgttttaggattcgttatcgttacgtttagattttttcgtcgtttaagagtttggggtcgtggggggcggggcggtttgttatcggtttcgtttcgtcgataggattcgttttttttcgtaggtacggcggggtcgatttcgtttttcgtttttagtatgtcgtgcgatagcggcggcgcggcgagcggagtcgggaggcggggaagtagtggtcgtgtgagcgtgaggatgttgtcgttatcgtttgtttttcgtcgttttttttttcgggggtttcggcgacgtgggtcgcgtagggttttggaagagacgtcgttttttttttattcgttttttttttatcgcgtcgttttcgttttttcgttttgtgttgcgggtttaggcggaattcggaacggtcgtttttttttttcgttcgtcgtcgtttttttttttttttttttttcggttttttttttagtttcgggtcggagcggggtgttggcggcggtcggttcgggtggcgattcgcgtttttttgggcggcggcgtttggttatatcgtgtcggggaaggtaatgagtcgtagagtttcggggtttcggttgagcggcggcggcggcggcggcggtattaacggtattaattattcgcggagttggaatgattggtaatttaggtgggtgatcggttcgggatttcgtttcgatttttcgggtttcgtttcgggcgggcggaggtttagggtcgcggggttgggaggcgcggtttaggttttttattttcgggagtcgggcgt

SEQ ID NO: 8328 - DNA, 854 bp, Artificial Sequence
  chemically treated genomic DNA (Homo sapiens) CpG-island No: 8328
acgcccgactcccgaaaataaaaaacctaaaccgcgcctcccaaccccgcgaccctaaacctccgcccgcccgaaacgaaacccgaaaaatcgaaacgaaatcccgaaccgatcacccacctaaattaccaatcattccaactccgcgaataattaataccgttaataccgccgccgccgccgccgccgctcaaccgaaaccccgaaactctacgactcattaccttccccgacacgatataaccaaacgccgccgcccaaaaaaacgcgaatcgccacccgaaccgaccgccgccaacaccccgctccgacccgaaactaaaaaaaaaaccgaaaaaaaaaaaaaaaaaaaaacgacgacgaacgaaaaaaaaaaacgaccgttccgaattccgcctaaacccgcaacacaaaacgaaaaaacgaaaacgacgcgataaaaaaaaaacgaataaaaaaaaaacgacgtctcttccaaaaccctacgcgacccacgtcgccgaaacccccgaaaaaaaaaacgacgaaaaacaaacgataacgacaacatcctcacgctcacacgaccactacttccccgcctcccgactccgctcgccgcgccgccgctatcgcacgacatactaaaaacgaaaaacgaaatcgaccccgccgtacctacgaaaaaaaacgaatcctatcgacgaaacgaaaccgataacaaaccgccccgccccccacgaccccaaactcttaaacgacgaaaaaatctaaacgtaacgataacgaatcctaaaacaaaaaatctccactactacgaccacacacttttctcccaaatacttcccgaaaaacaccgaaaaaccaaacaatca

SEQ ID NO: 8329 - DNA, 917 bp, Artificial Sequence
  chemically treated genomic DNA (Homo sapiens) CpG-island No: 8329
tgtagtttcgggtgcgtttgttcgtcgcgttagttcgcgcgcgttttttttcgtttttagcgggttgttcgcggtgtcgatgaagtttacgttgttaggggtaacgttagagcgatttacggtaatgttcgatgatgtcgtgtatcgcgtagttgtgttaatcggttcgttcgttagcgttttcggcgatacgtggtcgaagtaggcgttcggcgagtacgttcgagaagcgcgtatcggtgatgagcgatagtcgttttgtttttatcgagatatgttttagtcgcggaggtgagttggtaggttttttttatgtcggtgttcggacggttcgtcgtcgattattattatgatatcgttttgtataattttttttcgtttgatcgttttgatcgtttgcgttttcgagataaatattcgtattcggtcggtgtggtggtatacgttattttcgtttattatcgacgggtcgatcgtcgtggttttgattatcgaatttttcggcgcgatgttgttcgtcgggaagtagatcgtcgaggttagttttttcgtttttgtttttttcggcggtaggattacgttattcggttttacgtcgttttgttcgcgtaggtattggcggaagcgcgttcggcgttcggacgtttgttattatttaaggttttcgtttatcgtttggtcggttacggttatggcgtttagatgtagtaggtcgaggtcgcgtaggtggagtattattttcggtacgtcgttcgcgaggaaggcgcgtacggtcgggtgatagttcgggtcgttgggtagtacgtttattagacgcggtattttacggttgatgcgcgtttagttttaacgttcgggatcgtgtagttcgtcgcgtggcgatggtcggaatgttagtataattggtggatcgttaa

SEQ ID NO: 8330 - DNA, 917 bp, Artificial Sequence
  chemically treated genomic DNA (Homo sapiens) CpG-island No: 8330
ttaacgatccaccaattatactaacattccgaccatcgccacgcgacgaactacacgatcccgaacgttaaaactaaacgcgcatcaaccgtaaaataccgcgtctaataaacgtactacccaacgacccgaactatcacccgaccgtacgcgccttcctcgcgaacgacgtaccgaaaataatactccacctacgcgacctcgacctactacatctaaacgccataaccgtaaccgaccaaacgataaacgaaaaccttaaataataacaaacgtccgaacgccgaacgcgcttccgccaatacctacgcgaacaaaacgacgtaaaaccgaataacgtaatcctaccgccgaaaaaaacaaaaacgaaaaaactaacctcgacgatctacttcccgacgaacaacatcgcgccgaaaaattcgataatcaaaaccacgacgatcgacccgtcgataataaacgaaaataacgtataccaccacaccgaccgaatacgaatatttatctcgaaaacgcaaacgatcaaaacgatcaaacgaaaaaaaattatacaaaacgatatcataataataatcgacgacgaaccgtccgaacaccgacataaaaaaaacctaccaactcacctccgcgactaaaacatatctcgataaaaacaaaacgactatcgctcatcaccgatacgcgcttctcgaacgtactcgccgaacgcctacttcgaccacgtatcgccgaaaacgctaacgaacgaaccgattaacacaactacgcgatacacgacatcatcgaacattaccgtaaatcgctctaacgttacccctaacaacgtaaacttcatcgacaccgcgaacaacccgctaaaaacgaaaaaaaacgcgcgcgaactaacgcgacgaacaaacgcacccgaaactaca

SEQ ID NO: 8331 - DNA, 917 bp, Artificial Sequence
  chemically treated genomic DNA (Homo sapiens) CpG-island No: 8331
ttggcggtttattaattatgttgatatttcggttatcgttacgcggcgggttgtacgatttcggacgttgagattggacgcgtattaatcgtaaagtgtcgcgtttggtgagcgtgttgtttaacggttcggattattattcgatcgtgcgcgtttttttcgcgggcggcgtgtcggaggtgatgttttatttgcgcgatttcggtttgttgtatttggacgttatgatcgtgatcggttagacggtgggcgagaattttgaatggtggtaggcgttcgagcgtcgggcgcgttttcgttagtgtttgcgcgagtaggacggcgtagagtcggatgacgtgattttgtcgtcggagaaggtaaaagcgaaagggttgatttcgacggtttgtttttcgacgggtaatatcgcgtcggaaggttcggtgattaaggttacggcgatcgattcgtcggtggtgggcgaagatggcgtatattattatatcggtcgggtgcgggtgtttgtttcggaagcgtaggcgattaaggcgattaagcgggaagagattgtgtagggcgatattatggtggtgatcggcggcgggtcgttcggatatcggtatggaagagatttattagtttattttcgcgattaaagtatatttcgatggggataagacggttgtcgtttattatcgatgcgcgtttttcgggcgtgttcgtcgggcgtttgtttcggttacgtgtcgtcggaggcgttggcgggcgggtcgattggtatagttgcgcgatatacgatattatcgagtattgtcgtggatcgttttgacgttatttttggtagcgtgaattttatcggtatcgcggataattcgttgaagacggaagagggcgcgcgcgagttggcgcggcggatagacgtattcgagattgta

SEQ ID NO: 8332 - DNA, 917 bp, Artificial Sequence
  chemically treated genomic DNA (Homo sapiens) CpG-island No: 8332
tacaatctcgaatacgtctatccgccgcgccaactcgcgcgcgccctcttccgtcttcaacgaattatccgcgataccgataaaattcacgctaccaaaaataacgtcaaaacgatccacgacaatactcgataatatcgtatatcgcgcaactataccaatcgacccgcccgccaacgcctccgacgacacgtaaccgaaacaaacgcccgacgaacacgcccgaaaaacgcgcatcgataataaacgacaaccgtcttatccccatcgaaatatactttaatcgcgaaaataaactaataaatctcttccataccgatatccgaacgacccgccgccgatcaccaccataatatcgccctacacaatctcttcccgcttaatcgccttaatcgcctacgcttccgaaacaaacacccgcacccgaccgatataataatatacgccatcttcgcccaccaccgacgaatcgatcgccgtaaccttaatcaccgaaccttccgacgcgatattacccgtcgaaaaacaaaccgtcgaaatcaaccctttcgcttttaccttctccgacgacaaaatcacgtcatccgactctacgccgtcctactcgcgcaaacactaacgaaaacgcgcccgacgctcgaacgcctaccaccattcaaaattctcgcccaccgtctaaccgatcacgatcataacgtccaaatacaacaaaccgaaatcgcgcaaataaaacatcacctccgacacgccgcccgcgaaaaaaacgcgcacgatcgaataataatccgaaccgttaaacaacacgctcaccaaacgcgacactttacgattaatacgcgtccaatctcaacgtccgaaatcgtacaacccgccgcgtaacgataaccgaaatatcaacataattaataaaccgccaa

SEQ ID NO: 8333 - DNA, 723 bp, Artificial Sequence
  chemically treated genomic DNA (Homo sapiens) CpG-island No: 8333
tgcgggacgcggggaggcgggagagatcgagtgggaggtttcgcgaaggagtgggagtgggagtgggagtgtcggcgggagatttgcgggggcgcgttcgggttgacgcgtgcgcgttagtgcgcgtgagtgcgggcgcgcgtcgtcgtttttcgtcggggtcggagtcggttgttatgggaacgcgtcgcggttcgagttaattattttttgtggaaagtgtgcgggaggggcgcgagcgggttggtcgaggaggaggcggcggcgtggagttgttttttgtcggcgggtcgggtcgggtcgagtttcgggcgttgcggcgacgtttggattttgttttcgttaggtcggtgagtggggggttcgggcgggttgggtgcgagcggggcgttgggttttgttcggttcgtcgtttggggcgtcgcgttcgggtcggttttgttttcgggatttttttgttcggattcgttatgggcgcggggagggaaaggttcgggagatttagttttgcgaggttttttttagcgtcgtttagttcgagtcgaggattttgttgggagttgggtataggggcggcgtgttttacgggattcgagtagtttcgggatttcgtttggattttattgaacgagaagagcgtagattttattcgggattgggtttgttaatcggcgtcgtttttttttttttttggcgttttttttatttttagggttttttgga

SEQ ID NO: 8334 - DNA, 723 bp, Artificial Sequence
  chemically treated genomic DNA (Homo sapiens) CpG-island No: 8334
tccaaaaaaccctaaaaataaaaaaaacgccaaaaaaaaaaaaaaacgacgccgattaacaaacccaatcccgaataaaatctacgctcttctcgttcaataaaatccaaacgaaatcccgaaactactcgaatcccgtaaaacacgccgcccctatacccaactcccaacaaaatcctcgactcgaactaaacgacgctaaaaaaaacctcgcaaaactaaatctcccgaacctttccctccccgcgcccataacgaatccgaacaaaaaaatcccgaaaacaaaaccgacccgaacgcgacgccccaaacgacgaaccgaacaaaacccaacgccccgctcgcacccaacccgcccgaaccccccactcaccgacctaacgaaaacaaaatccaaacgtcgccgcaacgcccgaaactcgacccgacccgacccgccgacaaaaaacaactccacgccgccgcctcctcctcgaccaacccgctcgcgcccctcccgcacactttccacaaaaaataattaactcgaaccgcgacgcgttcccataacaaccgactccgaccccgacgaaaaacgacgacgcgcgcccgcactcacgcgcactaacgcgcacgcgtcaacccgaacgcgcccccgcaaatctcccgccgacactcccactcccactcccactccttcgcgaaacctcccactcgatctctcccgcctccccgcgtcccgca

SEQ ID NO: 8335 - DNA, 723 bp, Artificial Sequence
  chemically treated genomic DNA (Homo sapiens) CpG-island No: 8335
tttagggagttttgggggtggggaagacgttaggaaggggagagggcggcgtcgattgataagtttagtttcgggtagggtttgcgtttttttcgtttaataaaatttaaacggggtttcgaggttgttcggatttcgtgggatacgtcgtttttgtgtttagtttttagtaaggttttcgattcgggttgaacggcgttggaggggatttcgtagggttgggtttttcgggttttttttttttcgcgtttatagcgggttcgggtagaggggtttcgagggtagggtcggttcggacgcggcgttttaaacggcgggtcgggtagagtttagcgtttcgttcgtatttagttcgttcgggttttttatttatcggtttggcggaggtaggatttaggcgtcgtcgtagcgttcggggttcggttcggttcggttcgtcggtaggaggtagttttacgtcgtcgtttttttttcggttagttcgttcgcgtttttttcgtatattttttataggaaatgattaattcgggtcgcggcgcgtttttatggtaatcggtttcgatttcggcggggggcggcggcgcgcgttcgtatttacgcgtattggcgcgtacgcgttagttcgggcgcgttttcgtaggtttttcgtcggtatttttatttttatttttattttttcgcggggttttttattcggtttttttcgttttttcgcgtttcgta

SEQ ID NO: 8336 - DNA, 723 bp, Artificial Sequence
  chemically treated genomic DNA (Homo sapiens) CpG-island No: 8336
tacgaaacgcgaaaaaacgaaaaaaaccgaataaaaaaccccgcgaaaaaataaaaataaaaataaaaataccgacgaaaaacctacgaaaacgcgcccgaactaacgcgtacgcgccaatacgcgtaaatacgaacgcgcgccgccgccccccgccgaaatcgaaaccgattaccataaaaacgcgccgcgacccgaattaatcatttcctataaaaaatatacgaaaaaaacgcgaacgaactaaccgaaaaaaaaacgacgacgtaaaactacctcctaccgacgaaccgaaccgaaccgaaccccgaacgctacgacgacgcctaaatcctacctccgccaaaccgataaataaaaaacccgaacgaactaaatacgaacgaaacgctaaactctacccgacccgccgtttaaaacgccgcgtccgaaccgaccctaccctcgaaacccctctacccgaacccgctataaacgcgaaaaaaaaaaaacccgaaaaacccaaccctacgaaatcccctccaacgccgttcaacccgaatcgaaaaccttactaaaaactaaacacaaaaacgacgtatcccacgaaatccgaacaacctcgaaaccccgtttaaattttattaaacgaaaaaaacgcaaaccctacccgaaactaaacttatcaatcgacgccgccctctccccttcctaacgtcttccccacccccaaaactccctaaa

SEQ ID NO: 8337 - DNA, 552 bp, Artificial Sequence
  chemically treated genomic DNA (Homo sapiens) CpG-island No: 8337
  unsure (161, 322)
cggtatcgtagcgttcgcgattatttcgagttgtagaattttttcgtcgagcgatagttaggtttagatattcgtagatttagaggtgatgggtatcgtagtttcgatattttgtatacgtttacgagggacggtacgaggtgggtaaattgaatattagntcgagtgttttcgtagataagtaacgcgagataaaggttatgcgagagagatagttaggcgcgcgtgtcgttggcgttaggagtggtattcgaatcgaattaatttttttacgttttaattttagagaatgtgttttgaagagatatcgcgatcgattatnatagtttagaatacgtggcgtaatacgacgtttcgaggtgtaggtttttagagcgttttggaagtatttggttgttttttcgtagtattttttttaagtcgtttggcgataatcgaggatagcggaggtaacgcgttgatttttttttaaggtttttgatgattaacgaattttatatggttaattttaagatatttgatatgagttagaggacgtattacggtagatgt

SEQ ID NO: 8338 - DNA, 552 bp, Artificial Sequence
  chemically treated genomic DNA (Homo sapiens) CpG-island No: 8338
  unsure (231, 392)
acatctaccgtaatacgtcctctaactcatatcaaatatcttaaaattaaccatataaaattcgttaatcatcaaaaaccttaaaaaaaaatcaacgcgttacctccgctatcctcgattatcgccaaacgacttaaaaaaaatactacgaaaaaacaaccaaatacttccaaaacgctctaaaaacctacacctcgaaacgtcgtattacgccacgtattctaaactatnataatcgatcgcgatatctcttcaaaacacattctctaaaattaaaacgtaaaaaaattaattcgattcgaataccactcctaacgccaacgacacgcgcgcctaactatctctctcgcataacctttatctcgcgttacttatctacgaaaacactcganctaatattcaatttacccacctcgtaccgtccctcgtaaacgtatacaaaatatcgaaactacgatacccatcacctctaaatctacgaatatctaaacctaactatcgctcgacgaaaaaattctacaactcgaaataatcgcgaacgctacgataccg

SEQ ID NO: 8339 - DNA, 552 bp, Artificial Sequence
  chemically treated genomic DNA (Homo sapiens) CpG-island No: 8339
  unsure (231, 392)
gtatttatcgtggtgcgttttttagtttatgttaagtgttttggggttggttatatggggttcgttggttattaagggttttggagagaggttaacgcgttgttttcgttattttcgattgtcgttaaacgatttggggaagatattacgggggggtaattaagtgtttttaggacgttttaggagtttatatttcggaacgtcgtgttgcgttacgtgttttagattgtnatggtcgatcgcggtgtttttttagggtatattttttggagttaaggcgtaggggagttgattcggttcgagtgttatttttagcgttaacgatacgcgcgtttgattgtttttttcgtatggtttttgtttcgcgttgtttgtttacggaggtattcganttgatgtttaatttgtttatttcgtatcgtttttcgtggacgtatgtaaggtgtcgagattgcgatgtttattatttttgggtttacggatgtttaaatttagttgtcgttcggcgagaaggttttatagttcgaggtggtcgcggacgttacgatgtcg

SEQ ID NO: 8340 - DNA, 552 bp, Artificial Sequence
  chemically treated genomic DNA (Homo sapiens) CpG-island No: 8340
  unsure (161, 322)
cgacatcgtaacgtccgcgaccacctcgaactataaaaccttctcgccgaacgacaactaaatttaaacatccgtaaacccaaaaataataaacatcgcaatctcgacaccttacatacgtccacgaaaaacgatacgaaataaacaaattaaacatcaantcgaatacctccgtaaacaaacaacgcgaaacaaaaaccatacgaaaaaaacaatcaaacgcgcgtatcgttaacgctaaaaataacactcgaaccgaatcaactcccctacgccttaactccaaaaaatataccctaaaaaaacaccgcgatcgaccatnacaatctaaaacacgtaacgcaacacgacgttccgaaatataaactcctaaaacgtcctaaaaacacttaattacccccccgtaatatcttccccaaatcgtttaacgacaatcgaaaataacgaaaacaacgcgttaacctctctccaaaacccttaataaccaacgaaccccatataaccaaccccaaaacacttaacataaactaaaaaacgcaccacgataaatac

SEQ ID NO: 8341 - DNA, 564 bp, Artificial Sequence
  chemically treated genomic DNA (Homo sapiens) CpG-island No: 8341
atatgggtaattcgatgttggaagcggcggcgttgatcgggttggatttgcgtttgttggtttcgaaagtttgttggtcggaagagagtttggtggcggagtgtagcgcgttggcggagaagtacggcgggaaaattattttgacggaagacgtggcggtaggcgttaagggcgcggattttatttatatcgacgtgtgggttcgatgggcgaggttaaagagaagtgggtagagcggattgcgttgttgcgcgggtattaggtgaacgcgtagatatggcgttgatcgataattcgaacgtgaagtttttgtattgtttgtcggcgttttatgacgattagattacgttcggtaagtagatggcgaaggagttcgatttgtacggcgggatggaggtgacggacgaggtgtttgagtcggcggcgagtatcgtgttcgattaggcggaaaatcggatgtatacgattaaggcggtgatgatggtaacgtttggaggagtgattgggttcgttgcgcgttgatgtttttatttcggtttttttttataggggagagggagaaaa

SEQ ID NO: 8342 - DNA, 564 bp, Artificial Sequence
  chemically treated genomic DNA (Homo sapiens) CpG-island No: 8342
ttttctccctctcccctataaaaaaaaaccgaaataaaaacatcaacgcgcaacgaacccaatcactcctccaaacgttaccatcatcaccgccttaatcgtatacatccgattttccgcctaatcgaacacgatactcgccgccgactcaaacacctcgtccgtcacctccatcccgccgtacaaatcgaactccttcgccatctacttaccgaacgtaatctaatcgtcataaaacgccgacaaacaatacaaaaacttcacgttcgaattatcgatcaacgccatatctacgcgttcacctaatacccgcgcaacaacgcaatccgctctacccacttctctttaacctcgcccatcgaacccacacgtcgatataaataaaatccgcgcccttaacgcctaccgccacgtcttccgtcaaaataattttcccgccgtacttctccgccaacgcgctacactccgccaccaaactctcttccgaccaacaaactttcgaaaccaacaaacgcaaatccaacccgatcaacgccgccgcttccaacatcgaattacccatat

SEQ ID NO: 8343 - DNA, 564 bp, Artificial Sequence
  chemically treated genomic DNA (Homo sapiens) CpG-island No: 8343
tttttttttttttttttgtgggagagggtcggggtgagggtattagcgcgtagcggatttaattatttttttaagcgttgttattattatcgttttaatcgtatgtattcggtttttcgtttggtcgaatacgatgttcgtcgtcgatttaaatatttcgttcgttatttttatttcgtcgtgtagatcgaattttttcgttatttgtttgtcgagcgtagtttggtcgttatggaacgtcggtagatagtgtaggaattttacgttcgggttgtcggttagcgttatatttgcgcgtttatttgatattcgcgtagtagcgtaattcgttttgtttatttttttttggtttcgtttatcgaatttatacgtcggtatagataaagttcgcgtttttaacgtttgtcgttacgtttttcgttagagtaattttttcgtcgtgttttttcgttagcgcgttgtatttcgttattaggttttttttcggttagtaggttttcggggttaataggcgtagatttagttcggttagcgtcgtcgtttttagtatcgagttgtttatgt

SEQ ID NO: 8344 - DNA, 564 bp, Artificial Sequence
  chemically treated genomic DNA (Homo sapiens) CpG-island No: 8344
acataaacaactcgatactaaaaacgacgacgctaaccgaactaaatctacgcctattaaccccgaaaacctactaaccgaaaaaaaacctaataacgaaatacaacgcgctaacgaaaaaacacgacgaaaaaattactctaacgaaaaacgtaacgacaaacgttaaaaacgcgaactttatctataccgacgtataaattcgataaacgaaaccaaaaaaaaataaacaaaacgaattacgctactacgcgaatatcaaataaacgcgcaaatataacgctaaccgacaacccgaacgtaaaattcctacactatctaccgacgttccataacgaccaaactacgctcgacaaacaaataacgaaaaaattcgatctacacgacgaaataaaaataacgaacgaaatatttaaatcgacgacgaacatcgtattcgaccaaacgaaaaaccgaatacatacgattaaaacgataataataacaacgcttaaaaaaataattaaatccgctacgcgctaataccctcaccccgaccctctcccacaaaaaaaaaaaaaaaaa

SEQ ID NO: 8345 - DNA, 1026 bp, Artificial Sequence
  chemically treated genomic DNA (Homo sapiens) CpG-island No: 8345
  unsure (24)
tcggggtacgtattggtgttttantcggcgtggtttgttcggtgtgtttcggcggagtgacgttcggttattcggttaatttttttgttcggtgtaaaggtttttttcggtgaaatcgatatcgttttgttcggttcgttgtcgtttattttttttcgtatttatagtagttatcggataaaaacgttcgcgtcggtggggagtttcggtttcggttggaaaatgtttgcggatattcgtttatagttgcgcgataatatattgatatttagtgataacggcggtagaagtttgtattttgagtatttgtttttcggtgaggacggttatagtcgtagcgagttattgtggttggtgcgcggcggcgtggcgaaattggatgaaggttatcggttggtcgtattttggtaggcgttgtcggaagaatttcgtttaagttcgtatcgttatttggcgataaatagttcgtaggggtcgtggtggttgttcggttggtgtgagcgggtgtcggaagcggatgaggtgttgtttgcgtcgttgtcgtcgtatcgggtattgatcgggttggtggatcgtttcgggcgtatatagacgttttatcgcgaagtcgtcggtgaatttagcggcgaaattatcggcgtgacggatggtgtttggcgttattttcggttggtattgattacgtaggcgtagcgggtagaagaagttcggtagtaggttattttcggcgggacggaatcgttcgttttttttgatattttgtcgggttatatcgaatatggtcgggataacggtattcgtttgtttgtcgtgtggttgacgtacgattcggaatattcggagaatttatttgtcgcgtcgttggtgcgttatggttggacgttacgcggcgaattggcggtggtgtatgatcgtagtggtaaataggtgcgtagttttatttacgatgataaatatcggggtcggattgtggcgtaacgttatacggggcgggcggaaaattcggtatcgtaataatagtaaacg

SEQ ID NO: 8346 - DNA, 1026 bp, Artificial Sequence
  chemically treated genomic DNA (Homo sapiens) CpG-island No: 8346
  unsure (1003)
cgtttactattattacgataccgaattttccgcccgccccgtataacgttacgccacaatccgaccccgatatttatcatcgtaaataaaactacgcacctatttaccactacgatcatacaccaccgccaattcgccgcgtaacgtccaaccataacgcaccaacgacgcgacaaataaattctccgaatattccgaatcgtacgtcaaccacacgacaaacaaacgaataccgttatcccgaccatattcgatataacccgacaaaatatcaaaaaaaacgaacgattccgtcccgccgaaaataacctactaccgaacttcttctacccgctacgcctacgtaatcaataccaaccgaaaataacgccaaacaccatccgtcacgccgataatttcgccgctaaattcaccgacgacttcgcgataaaacgtctatatacgcccgaaacgatccaccaacccgatcaatacccgatacgacgacaacgacgcaaacaacacctcatccgcttccgacacccgctcacaccaaccgaacaaccaccacgacccctacgaactatttatcgccaaataacgatacgaacttaaacgaaattcttccgacaacgcctaccaaaatacgaccaaccgataaccttcatccaatttcgccacgccgccgcgcaccaaccacaataactcgctacgactataaccgtcctcaccgaaaaacaaatactcaaaatacaaacttctaccgccgttatcactaaatatcaatatattatcgcgcaactataaacgaatatccgcaaacattttccaaccgaaaccgaaactccccaccgacgcgaacgtttttatccgataactactataaatacgaaaaaaaataaacgacaacgaaccgaacaaaacgatatcgatttcaccgaaaaaaacctttacaccgaacaaaaaaattaaccgaataaccgaacgtcactccgccgaaacacaccgaacaaaccacgccgantaaaacaccaatacgtaccccga

SEQ ID NO: 8347 - DNA, 1026 bp, Artificial Sequence
  chemically treated genomic DNA (Homo sapiens) CpG-island No: 8347
  unsure (1003)
cgtttgttgttgttacggtatcggatttttcgttcgtttcgtgtgacgttgcgttataattcggtttcggtatttattatcgtaagtaaagttgcgtatttgtttgttattacggttatatattatcgttagttcgtcgcgtggcgtttagttatagcgtattagcggcgcggtaggtaaatttttcgggtatttcgggtcgtgcgttagttatacggtagatagacggatgtcgttgtttcggttatattcggtgtaattcggtagggtattaggaaaagcggacggtttcgtttcgtcggaaatggtttgttgtcgggttttttttgttcgttgcgtttgcgtggttagtattagtcggaagtgacgttaggtattattcgttacgtcggtgatttcgtcgttgaatttatcggcggtttcgcggtggaacgtttgtgtgcgttcgaagcggtttattagttcggttagtattcggtacggcggtagcggcgtaggtagtattttattcgttttcggtattcgtttatattaatcgagtagttattacggtttttgcggattgtttgtcgttagataacgatgcggatttaagcggagttttttcggtagcgtttgttagagtgcggttagtcggtgatttttatttagtttcgttacgtcgtcgcgtattagttatagtgattcgttgcggttgtaatcgtttttatcgggaaataggtgtttaaaatataggtttttgtcgtcgttattattgagtattagtgtgttatcgcgtagttgtaagcggatattcgtaggtattttttagtcggggtcgaggttttttatcggcgcgggcgtttttgttcggtaattgttgtaggtgcgggagaggatgaacggtagcgggtcgggtagggcgatgtcggttttatcgggaaggatttttgtatcgagtagggggattgatcggatggtcggacgttatttcgtcggggtatatcgaataggttacgtcggntggggtattaatacgtatttcgg

SEQ ID NO: 8348 - DNA, 1026 bp, Artificial Sequence
  chemically treated genomic DNA (Homo sapiens) CpG-island No: 8348
  unsure (24)
ccgaaatacgtattaataccccanccgacgtaacctattcgatataccccgacgaaataacgtccgaccatccgatcaatccccctactcgatacaaaaatccttcccgataaaaccgacatcgccctacccgacccgctaccgttcatcctctcccgcacctacaacaattaccgaacaaaaacgcccgcgccgataaaaaacctcgaccccgactaaaaaatacctacgaatatccgcttacaactacgcgataacacactaatactcaataataacgacgacaaaaacctatattttaaacacctatttcccgataaaaacgattacaaccgcaacgaatcactataactaatacgcgacgacgtaacgaaactaaataaaaatcaccgactaaccgcactctaacaaacgctaccgaaaaaactccgcttaaatccgcatcgttatctaacgacaaacaatccgcaaaaaccgtaataactactcgattaatataaacgaataccgaaaacgaataaaatactacctacgccgctaccgccgtaccgaatactaaccgaactaataaaccgcttcgaacgcacacaaacgttccaccgcgaaaccgccgataaattcaacgacgaaatcaccgacgtaacgaataatacctaacgtcacttccgactaatactaaccacgcaaacgcaacgaacaaaaaaaacccgacaacaaaccatttccgacgaaacgaaaccgtccgcttttcctaataccctaccgaattacaccgaatataaccgaaacaacgacatccgtctatctaccgtataactaacgcacgacccgaaatacccgaaaaatttacctaccgcgccgctaatacgctataactaaacgccacgcgacgaactaacgataatatataaccgtaataacaaacaaatacgcaactttacttacgataataaataccgaaaccgaattataacgcaacgtcacacgaaacgaacgaaaaatccgataccgtaacaacaacaaacg

SEQ ID NO: 8349 - DNA, 1209 bp, Artificial Sequence
  chemically treated genomic DNA (Homo sapiens) CpG-island No: 8349
  unsure (925)
gtcggatgtgtggacgattttttgatttgttacgattattatttatatcgcgtcgggtaatatgtatggttagcgtgcgaaatttagcggaaacgttgcgtgtttatattatttttttacgttaggcgtgagtgaatatattattttgatcgtgcggcggattgtgacggtgtcggtttttagtggttgacgcgcgatgtaaaacgcggtgatatttttggttttcggacgcgatgggggaatttatttgcgacgataaagcgaagataaatttttgttgttggcggtaggttgcggcgttacgtcgattagtcgatgcgtcgttggtttgcgaagaatcgtttataggtcgatgtgcggtgatttataacgtgcgtacgtcgtaggatgttattttcgtcgatgagtgcgtaattattcggtaacgttggtggtagaaaataacgttatcgaaggtttatcgttggtcgttttattcgcgaattgttggtaggtgtatttgatttattttacgtatcgtgatgatttgcggttcggtttcgtatatggattgggtgagtaggaagtgaaagcgttcggcgtgacgcgtttttttaaagagaaatttttattttagtagtagaagcggcgattagcggtttgaaatttattaaatgtaatcggtacgagaattttacgtttcggttggtattacgttattggagcgttggaaagtaataacgtttcggttgtcgttgtttgtcgtgcgggtgttgcggttgttgtaagataaaagtggttttcggtgaatatacggtgagcgtataatgacgttgatcgacgtcgaaatcgttgaaggttacgtattggttgtttttgttattggatatacgtaggtttagtttttcgttttagtttgtcgttgagtttttcgacgtcgggattntcgttatcggtaaggttgtataaaggtcggattttgtcggcgtaattataaattggtcgttgggtttatttatgtcggaggcgttttggcgagaaattttattggtgttacgttcgtagacgtcgttagttgagttcgttgaagattgtttggcggattttttgggcgatgagggtcgtagatcgtggtaatggacgttatcggtgatatcgagataagttttatttagtataacggtttaatgcgcgaggtgtagcgcgagaagattttacggatatgtttga

SEQ ID NO: 8350 - DNA, 1209 bp, Artificial Sequence
  chemically treated genomic DNA (Homo sapiens) CpG-island No: 8350
  unsure (285)
tcaaacatatccgtaaaatcttctcgcgctacacctcgcgcattaaaccgttatactaaataaaacttatctcgatatcaccgataacgtccattaccacgatctacgaccctcatcgcccaaaaaatccgccaaacaatcttcaacgaactcaactaacgacgtctacgaacgtaacaccaataaaatttctcgccaaaacgcctccgacataaataaacccaacgaccaatttataattacgccgacaaaatccgacctttatacaaccttaccgataacganaatcccgacgtcgaaaaactcaacgacaaactaaaacgaaaaactaaacctacgtatatccaataacaaaaacaaccaatacgtaaccttcaacgatttcgacgtcgatcaacgtcattatacgctcaccgtatattcaccgaaaaccacttttatcttacaacaaccgcaacacccgcacgacaaacaacgacaaccgaaacgttattactttccaacgctccaataacgtaataccaaccgaaacgtaaaattctcgtaccgattacatttaataaatttcaaaccgctaatcgccgcttctactactaaaataaaaatttctctttaaaaaaacgcgtcacgccgaacgctttcacttcctactcacccaatccatatacgaaaccgaaccgcaaatcatcacgatacgtaaaataaatcaaatacacctaccaacaattcgcgaataaaacgaccaacgataaaccttcgataacgttattttctaccaccaacgttaccgaataattacgcactcatcgacgaaaataacatcctacgacgtacgcacgttataaatcaccgcacatcgacctataaacgattcttcgcaaaccaacgacgcatcgactaatcgacgtaacgccgcaacctaccgccaacaacaaaaatttatcttcgctttatcgtcgcaaataaattcccccatcgcgtccgaaaaccaaaaatatcaccgcgttttacatcgcgcgtcaaccactaaaaaccgacaccgtcacaatccgccgcacgatcaaaataatatattcactcacgcctaacgtaaaaaaataatataaacacgcaacgtttccgctaaatttcgcacgctaaccatacatattacccgacgcgatataaataataatcgtaacaaatcaaaaaatcgtccacacatccgac

SEQ ID NO: 8351 - DNA, 1209 bp, Artificial Sequence
  chemically treated genomic DNA (Homo sapiens) CpG-island No: 8351
  unsure (285)
ttaaatatattcgtgaaattttttcgcgttatatttcgcgtattgaatcgttgtattggatgaggtttatttcgatgttatcgatagcgtttattgttacggtttgcgatttttatcgtttaggaaattcgttagataatttttaacgagtttaattgacggcgtttgcgggcgtggtattagtaaagtttttcgttagaacgttttcgatatgaataagtttaacggttagtttgtgattacgtcggtaaagttcggtttttgtatagttttatcggtggcganaatttcggcgtcggaaagtttagcggtaaattggagcgaggggttgggtttgcgtgtgtttaatggtaggagtagttagtacgtaatttttagcgatttcggcgtcggttagcgttattgtgcgtttatcgtatatttatcggaaattatttttgttttatagtagtcgtaatattcgtacggtaggtagcgataatcggaacgttattgttttttagcgttttagtagcgtggtgttaatcggggcgtaaaattttcgtgtcggttgtatttggtgaattttagatcgttggtcgtcgtttttgttattggggtgaagatttttttttaaagaaacgcgttacgtcgagcgtttttattttttgtttatttaatttatatacggagtcgggtcgtaggttattacggtacgtgaagtaagttaggtatatttgttagtagttcgcgagtgagacgattagcgataagttttcggtaacgttattttttgttattagcgttatcggatagttacgtatttatcggcgaaaataatattttgcggcgtacgtacgttgtagattatcgtatatcggtttgtggacggtttttcgtaagttagcgacgtatcgattaatcggcgtgacgtcgtagtttgtcgttagtaataggaatttattttcgttttatcgtcgtaggtaaatttttttatcgcgttcgaaagttagagatattatcgcgttttatatcgcgcgttagttattgggagtcgatatcgttataattcgtcgtacggttagggtgatatatttatttacgtttggcgtggagaaatggtgtaagtacgtagcgttttcgttgagtttcgtacgttgattatgtatattgttcggcgcgatatgggtagtaatcgtggtaaattagggaatcgtttatatattcggt

SEQ ID NO: 8352 - DNA, 1209 bp, Artificial Sequence
  chemically treated genomic DNA (Homo sapiens) CpG-island No: 8352
  unsure (925)
accgaatatataaacgattccctaatttaccacgattactacccatatcgcgccgaacaatatacataatcaacgtacgaaactcaacgaaaacgctacgtacttacaccatttctccacgccaaacgtaaataaatatatcaccctaaccgtacgacgaattataacgatatcgactcccaataactaacgcgcgatataaaacgcgataatatctctaactttcgaacgcgataaaaaaatttacctacgacgataaaacgaaaataaattcctattactaacgacaaactacgacgtcacgccgattaatcgatacgtcgctaacttacgaaaaaccgtccacaaaccgatatacgataatctacaacgtacgtacgccgcaaaatattattttcgccgataaatacgtaactatccgataacgctaataacaaaaaataacgttaccgaaaacttatcgctaatcgtctcactcgcgaactactaacaaatatacctaacttacttcacgtaccgtaataacctacgacccgactccgtatataaattaaataaacaaaaaataaaaacgctcgacgtaacgcgtttctttaaaaaaaaatcttcaccccaataacaaaaacgacgaccaacgatctaaaattcaccaaatacaaccgacacgaaaattttacgccccgattaacaccacgctactaaaacgctaaaaaacaataacgttccgattatcgctacctaccgtacgaatattacgactactataaaacaaaaataatttccgataaatatacgataaacgcacaataacgctaaccgacgccgaaatcgctaaaaattacgtactaactactcctaccattaaacacacgcaaacccaacccctcgctccaatttaccgctaaactttccgacgccgaaattntcgccaccgataaaactatacaaaaaccgaactttaccgacgtaatcacaaactaaccgttaaacttattcatatcgaaaacgttctaacgaaaaactttactaataccacgcccgcaaacgccgtcaattaaactcgttaaaaattatctaacgaatttcctaaacgataaaaatcgcaaaccgtaacaataaacgctatcgataacatcgaaataaacctcatccaatacaacgattcaatacgcgaaatataacgcgaaaaaatttcacgaatatatttaa

SEQ ID NO: 8353 - DNA, 708 bp, Artificial Sequence
  chemically treated genomic DNA (Homo sapiens) CpG-island No: 8353
cgttggaatagagtgcgtaacggcgcgtattatcgttcgtgatagtggtgatggtaaagtatagacgttggcgcggtagagtatagttcgttgtatatttcggtagattcgttgtaaatatgagtcgtgaagagaagttggatattttgcgtcgcgtcgataaggttttcgcgaagcggataagcgcgtataggaagtgattgttagttttagtgggtttatgaattaattttggttgcggttatcgacggtacgttagcggcggtgttcgttcgttggtgcgttttttcgtgagcgttttcgtcgaagaagatgtaaacgcgaacgcggtgttagtggcggcggcggtcgttttggttatgatttttttttgtcgatttcgacggcgaagttcgtgcggatgtatgggtaaagaagtagtgcgtatggcgttggttaatttttttgtcgttgttgtattacgggtattatgtcggtagtatttggcgtaggttggtcgggcgtgttgtttatgaagcggttggttacggtttggaaggcgattttaatcgtcgtggtatttagtatttagtggataggtcggggagttggtggttttagaattgtgttcgtggttgatgatggtacgatggtcgatcggcgaagatcgggggggatgagagaaagtattttagtagtaaagtgttgatacggttaagtttttaggta

SEQ ID NO: 8354 - DNA, 708 bp, Artificial Sequence
  chemically treated genomic DNA (Homo sapiens) CpG-island No: 8354
tacctaaaaacttaaccgtatcaacactttactactaaaatactttctctcatcccccccgatcttcgccgatcgaccatcgtaccatcatcaaccacgaacacaattctaaaaccaccaactccccgacctatccactaaatactaaataccacgacgattaaaatcgccttccaaaccgtaaccaaccgcttcataaacaacacgcccgaccaacctacgccaaatactaccgacataatacccgtaatacaacaacgacaaaaaaattaaccaacgccatacgcactacttctttacccatacatccgcacgaacttcgccgtcgaaatcgacaaaaaaaaatcataaccaaaacgaccgccgccgccactaacaccgcgttcgcgtttacatcttcttcgacgaaaacgctcacgaaaaaacgcaccaacgaacgaacaccgccgctaacgtaccgtcgataaccgcaaccaaaattaattcataaacccactaaaactaacaatcacttcctatacgcgcttatccgcttcgcgaaaaccttatcgacgcgacgcaaaatatccaacttctcttcacgactcatatttacaacgaatctaccgaaatatacaacgaactatactctaccgcgccaacgtctatactttaccatcaccactatcacgaacgataatacgcgccgttacgcactctattccaacg

SEQ ID NO: 8355 - DNA, 708 bp, Artificial Sequence
  chemically treated genomic DNA (Homo sapiens) CpG-island No: 8355
tatttgaaaatttaatcgtattagtattttattgttggggtatttttttttatttttttcgattttcgtcgatcgattatcgtgttattattaattacggatatagttttgaagttattagtttttcgatttgtttattaaatattgaatgttacggcggttgaagtcgttttttagatcgtgattaatcgttttatgaatagtacgttcggttaatttgcgttaagtattatcggtatggtgttcgtggtgtagtaacggtagaaagattgattagcgttatacgtattgtttttttgtttatgtattcgtacggatttcgtcgtcgagatcggtaaggaagaattataattaaaacgatcgtcgtcgttattggtatcgcgttcgcgtttgtatttttttcgacgagaacgtttacggaaagacgtattagcggacggatatcgtcgttagcgtgtcgtcggtggtcgtaattaaaattaatttatagatttattgaggttggtagttattttttgtacgcgtttgttcgtttcgcgggaattttatcgacgcgacgtaggatatttagtttttttttacggtttatgtttgtagcggatttatcgaggtatataacgggttatgttttatcgcgttagcgtttgtattttattattattattattacggacgatggtgcgcgtcgttgcgtattttgttttagcg

SEQ ID NO: 8356 - DNA, 708 bp, Artificial Sequence
  chemically treated genomic DNA (Homo sapiens) CpG-island No: 8356
cgctaaaacaaaatacgcaacgacgcgcaccatcgtccgtaataataataataataaaatacaaacgctaacgcgataaaacataacccgttatatacctcgataaatccgctacaaacataaaccgtaaaaaaaaactaaatatcctacgtcgcgtcgataaaattcccgcgaaacgaacaaacgcgtacaaaaaataactaccaacctcaataaatctataaattaattttaattacgaccaccgacgacacgctaacgacgatatccgtccgctaatacgtctttccgtaaacgttctcgtcgaaaaaaatacaaacgcgaacgcgataccaataacgacgacgatcgttttaattataattcttccttaccgatctcgacgacgaaatccgtacgaatacataaacaaaaaaacaatacgtataacgctaatcaatctttctaccgttactacaccacgaacaccataccgataatacttaacgcaaattaaccgaacgtactattcataaaacgattaatcacgatctaaaaaacgacttcaaccgccgtaacattcaatatttaataaacaaatcgaaaaactaataacttcaaaactatatccgtaattaataataacacgataatcgatcgacgaaaatcgaaaaaaataaaaaaaaataccccaacaataaaatactaatacgattaaattttcaaata

SEQ ID NO: 8357 - DNA, 656 bp, Artificial Sequence
  chemically treated genomic DNA (Homo sapiens) CpG-island No: 8357
acgtttcgtttcgttttacggtgtagtatagatttcgcggagacgcgagtatggtcggaaattatcgtttttattttttggcgggtttcgaggaaggtcgggaacgggcgggttttgttggtttagagggcgttaggggcgttatcggcggttcgggatttttttcgtcgcgagcgcgggggagtttagttcggtttgtcgggggttgggtgaggttgcggattaggtttttacgttttcgcgttcgttcgcgtttgttttaggtttttatcgcggttttttttgtttcggggtcgttttgttttttatagattttattttcgggggtcgtttttagattttcgttcgtttttttttgattcggtttttgttcgtttcgttttttttttcgggttttttatttttttttcgtcggtttcgatttcgggggcgttcggatttgtttttcgaatatttttagtttcgtttttagtttgcggagaagggtcgaggagataggaggaagagagcgagagtttaggggacgaggaggagttatcgagacgcggagattcgacgacgtcgagggaggtataggtcgggaagcggtagtcgggggcggagcgggggatttgggcgggttttttttcgtttgtttttgtttttttcgtttattt

SEQ ID NO: 8358 - DNA, 656 bp, Artificial Sequence
  chemically treated genomic DNA (Homo sapiens) CpG-island No: 8358
aaataaacgaaaaaaacaaaaacaaacgaaaaaaaacccgcccaaatcccccgctccgcccccgactaccgcttcccgacctatacctccctcgacgtcgtcgaatctccgcgtctcgataactcctcctcgtcccctaaactctcgctctcttcctcctatctcctcgacccttctccgcaaactaaaaacgaaactaaaaatattcgaaaaacaaatccgaacgcccccgaaatcgaaaccgacgaaaaaaaaataaaaaacccgaaaaaaaaaacgaaacgaacaaaaaccgaatcaaaaaaaaacgaacgaaaatctaaaaacgacccccgaaaataaaatctataaaaaacaaaacgaccccgaaacaaaaaaaaccgcgataaaaacctaaaacaaacgcgaacgaacgcgaaaacgtaaaaacctaatccgcaacctcacccaacccccgacaaaccgaactaaactcccccgcgctcgcgacgaaaaaaatcccgaaccgccgataacgcccctaacgccctctaaaccaacaaaacccgcccgttcccgaccttcctcgaaacccgccaaaaaataaaaacgataatttccgaccatactcgcgtctccgcgaaatctatactacaccgtaaaacgaaacgaaacgt

SEQ ID NO: 8359 - DNA, 656 bp, Artificial Sequence
  chemically treated genomic DNA (Homo sapiens) CpG-island No: 8359
gagtgggcgaggagggtaggggtaggcggaggggaattcgtttaggtttttcgtttcgttttcgattgtcgtttttcggtttgtgtttttttcggcgtcgtcgggttttcgcgtttcggtggttttttttcgttttttggattttcgtttttttttttttgttttttcggttttttttcgtaggttgaaggcggagttggagatattcggggagtaggttcgagcgttttcgaggtcggggtcggcgagggagaggtagggagttcgaggagggaggcggggcgggtagggatcgagttaggagagagcgggcgggggtttgggagcggttttcgagagtggggtttgtggggagtagggcggtttcgggatagaggaagtcgcggtggaggtttagggtagacgcgggcggacgcgagagcgtaggaatttggttcgtagttttatttagttttcggtaggtcggattgagttttttcgcgttcgcgacgaggaggatttcgagtcgtcggtggcgtttttgacgttttttaggttagtaggattcgttcgttttcgatttttttcgagattcgttaagaaataaaggcgatgattttcgattatgttcgcgttttcgcggagtttgtgttatatcgtggagcggggcggggcgt

SEQ ID NO: 8360 - DNA, 656 bp, Artificial Sequence
  chemically treated genomic DNA (Homo sapiens) CpG-island No: 8360
acgccccgccccgctccacgatataacacaaactccgcgaaaacgcgaacataatcgaaaatcatcgcctttatttcttaacgaatctcgaaaaaaatcgaaaacgaacgaatcctactaacctaaaaaacgtcaaaaacgccaccgacgactcgaaatcctcctcgtcgcgaacgcgaaaaaactcaatccgacctaccgaaaactaaataaaactacgaaccaaattcctacgctctcgcgtccgcccgcgtctaccctaaacctccaccgcgacttcctctatcccgaaaccgccctactccccacaaaccccactctcgaaaaccgctcccaaacccccgcccgctctctcctaactcgatccctacccgccccgcctccctcctcgaactccctacctctccctcgccgaccccgacctcgaaaacgctcgaacctactccccgaatatctccaactccgccttcaacctacgaaaaaaaaccgaaaaaacaaaaaaaaaaaaacgaaaatccaaaaaacgaaaaaaaaccaccgaaacgcgaaaacccgacgacgccgaaaaaaacacaaaccgaaaaacgacaatcgaaaacgaaacgaaaaacctaaacgaattcccctccgcctacccctaccctcctcgcccactc

SEQ ID NO: 8361 - DNA, 720 bp, Artificial Sequence
  chemically treated genomic DNA (Homo sapiens) CpG-island No: 8361
  unsure (586..587, 597..598, 608..609, 614..615, 619, 623..624, 629..630)
  unsure (633..634, 639..640, 647..648, 659..)
gaaggcgcgaatttgttttttataggggacgtcgatttcgtttgcgtcgattatgtcgacgacggtcgtcgagcggcgttggattcgaagcgatagagggagtaggagattagtagtggtattattgtggtagtacgtcgtagaggattttttcgagtttgttggtatcggtgggcgaatgttttttatcgggtcgggtttaatcgtttttatcgtttcggacgtagtttggagagtacgtcggtggtgtggataaatagcgttagtacgtcgtacgttagcgaacgggtcgaggtcgacggcgattacgaatagtatggtaagattatttcgttaatggcgcggtaggcgtttattaggcggcgaacggttggtaaatttattacggtattaggttttcggcgtttattaggttaaagggatggagagaattatcgttagcgcggtgttttagacggcgatttgtaggtgacggttatttcggtgaggtaattttgttattggttgaaatcgggcggaagaagtcggcggcgaacgtcgttatgttgtcgtcgtttttgattagttaagcggggttattttcgtnnngttttgttnnacgacgacgnnattannntancggnncgagnntanntaatnnggtttanngtttagaagtnngagattagttgcgtttgggtggggcgatggtgatggtttgtatgtttggtttcgtttgta

SEQ ID NO: 8362 - DNA, 720 bp, Artificial Sequence
  chemically treated genomic DNA (Homo sapiens) CpG-island No: 8362
  unsure (61..62, 73..74, 81..82, 87..88, 91..92, 97..98, 102, 105..106)
  unsure (112..113, 123..124, 133..)
tacaaacgaaaccaaacatacaaaccatcaccatcgccccacccaaacgcaactaatctcnnacttctaaacnntaaaccnnattanntannctcgnnccgntannntaatnncgtcgtcgtnnaacaaaacnnnacgaaaataaccccgcttaactaatcaaaaacgacgacaacataacgacgttcgccgccgacttcttccgcccgatttcaaccaataacaaaattacctcaccgaaataaccgtcacctacaaatcgccgtctaaaacaccgcgctaacgataattctctccatccctttaacctaataaacgccgaaaacctaataccgtaataaatttaccaaccgttcgccgcctaataaacgcctaccgcgccattaacgaaataatcttaccatactattcgtaatcgccgtcgacctcgacccgttcgctaacgtacgacgtactaacgctatttatccacaccaccgacgtactctccaaactacgtccgaaacgataaaaacgattaaacccgacccgataaaaaacattcgcccaccgataccaacaaactcgaaaaaatcctctacgacgtactaccacaataataccactactaatctcctactccctctatcgcttcgaatccaacgccgctcgacgaccgtcgtcgacataatcgacgcaaacgaaatcgacgtcccctataaaaaacaaattcgcgccttc

SEQ ID NO: 8363 - DNA, 720 bp, Artificial Sequence
  chemically treated genomic DNA (Homo sapiens) CpG-island No: 8363
  unsure (61..62, 73..74, 81..82, 87..88, 91..92, 97..98, 102, 105..106)
  unsure (112..113, 123..124, 133..)
tatagacggagttaaatatgtaaattattattatcgttttatttaagcgtagttggttttnngtttttgagtnntgggttnngttgnntannttcgnntcgntgnnntggtnncgtcgtcgtnnggtagggtnnngcggaaatggtttcgtttagttgattaaagacggcggtaatatggcgacgttcgtcgtcgatttttttcgttcgattttagttagtggtaggattattttatcgaaatggtcgttatttgtaaatcgtcgtttggggtatcgcgttggcggtggttttttttatttttttggtttgatgagcgtcgaaaatttggtgtcgtggtgggtttattagtcgttcgtcgtttgatggacgtttgtcgcgttattaacgaaatggttttgttatgttgttcgtggtcgtcgtcggtttcggttcgttcgttggcgtgcggcgtgttggcgttgtttatttatattatcggcgtgttttttaagttgcgttcgaagcggtggaagcgattgagttcggttcggtggaaggtattcgtttatcggtgttaataagttcgaagagattttttacggcgtgttgttatagtgatgttattgttgattttttattttttttatcgtttcgaatttaacgtcgttcggcgatcgtcgtcggtatggtcggcgtaggcgggatcggcgttttttgtgggaagtagattcgcgttttt

SEQ ID NO: 8364 - DNA, 720 bp, Artificial Sequence
  chemically treated genomic DNA (Homo sapiens) CpG-island No: 8364
  unsure (586..587, 597..598, 608..609, 614..615, 619, 623..624, 629..630)
  unsure (633..634, 639..640, 647..648, 659..)
aaaaacgcgaatctacttcccacaaaaaacgccgatcccgcctacgccgaccataccgacgacgatcgccgaacgacgttaaattcgaaacgataaaaaaaataaaaaatcaacaataacatcactataacaacacgccgtaaaaaatctcttcgaacttattaacaccgataaacgaataccttccaccgaaccgaactcaatcgcttccaccgcttcgaacgcaacttaaaaaacacgccgataatataaataaacaacgccaacacgccgcacgccaacgaacgaaccgaaaccgacgacgaccacgaacaacataacaaaaccatttcgttaataacgcgacaaacgtccatcaaacgacgaacgactaataaacccaccacgacaccaaattttcgacgctcatcaaaccaaaaaaataaaaaaaaccaccgccaacgcgataccccaaacgacgatttacaaataacgaccatttcgataaaataatcctaccactaactaaaatcgaacgaaaaaaatcgacgacgaacgtcgccatattaccgccgtctttaatcaactaaacgaaaccatttccgcnnnaccctaccnnacgacgacgnnaccannncancganncgaanntanncaacnnaacccannactcaaaaacnnaaaaccaactacgcttaaataaaacgataataataatttacatatttaactccgtctata

SEQ ID NO: 8365 - DNA, 515 bp, Artificial Sequence
  chemically treated genomic DNA (Homo sapiens) CpG-island No: 8365
gttcgcggttttcgcgcgttcgcggtcgtgtttcgcggtttcggtttcggttttcggcgatacgtattttcgtatatttcgttcgtacgtcgattatcggcgtattacgcgcgttagcgcgtttttggacgtttgcggattttattgggggtttttgagcgtgtacggggcgtacgagcggttgcgcgtcgagttcgtgggtatttttttggtgcgcgatagtcgttagcggaattgttttttcgtttttagcgtgaagatggtttcgggatttacgagtattcgcgtgtatttttaggtcggtcgtttttatttggatgggtagtcgcgagagtttcgattgttttttcgagttgttggagtattacgtggcggggtcgcgtcgtatgttggggggttttcgtgtattagcgtcgcgtgcgggtcgtgtatgagttgtgtcgttagtttattttggttattcggggtttgaagattttggtgtgatacgattttagttttgatttacgattggt

SEQ ID NO: 8366 - DNA, 515 bp, Artificial Sequence
  chemically treated genomic DNA (Homo sapiens) CpG-island No: 8366
accaatcgtaaatcaaaactaaaatcgtatcacaccaaaatcttcaaaccccgaataaccaaaataaactaacgacacaactcatacacgacccgcacgcgacgctaatacacgaaaaccccccaacatacgacgcgaccccgccacgtaatactccaacaactcgaaaaaacaatcgaaactctcgcgactacccatccaaataaaaacgaccgacctaaaaatacacgcgaatactcgtaaatcccgaaaccatcttcacgctaaaaacgaaaaaacaattccgctaacgactatcgcgcaccaaaaaaatacccacgaactcgacgcgcaaccgctcgtacgccccgtacacgctcaaaaacccccaataaaatccgcaaacgtccaaaaacgcgctaacgcgcgtaatacgccgataatcgacgtacgaacgaaatatacgaaaatacgtatcgccgaaaaccgaaaccgaaaccgcgaaacacgaccgcgaacgcgcgaaaaccgcgaac

SEQ ID NO: 8367 - DNA, 515 bp, Artificial Sequence
  chemically treated genomic DNA (Homo sapiens) CpG-island No: 8367
attaatcgtgggttagagttagagtcgtattatattaggatttttaggtttcgggtggttaagatgggttggcggtatagtttatgtacggttcgtacgcggcgttggtgtacgggggttttttagtatgcggcgcggtttcgttacgtagtgttttagtagttcgaagaggtagtcgaagttttcgcggttgtttatttaggtgaaagcggtcggtttgaaagtgtacgcggatgttcgtgggtttcgaggttatttttacgttaagggcgaaaaagtagtttcgttggcggttgtcgcgtattaggaaggtgtttacgggttcggcgcgtagtcgttcgtgcgtttcgtgtacgtttaggggtttttagtagaattcgtaggcgtttaggagcgcgttggcgcgcgtgatgcgtcggtaatcggcgtgcgaacggaatgtgcggaagtgcgtgtcgtcgggggtcggggtcgggatcgcggggtacggtcgcgggcgcgcgggggtcgcgggt

SEQ ID NO: 8368 - DNA, 515 bp, Artificial Sequence
  chemically treated genomic DNA (Homo sapiens) CpG-island No: 8368
acccgcgacccccgcgcgcccgcgaccgtaccccgcgatcccgaccccgacccccgacgacacgcacttccgcacattccgttcgcacgccgattaccgacgcatcacgcgcgccaacgcgctcctaaacgcctacgaattctactaaaaacccctaaacgtacacgaaacgcacgaacgactacgcgccgaacccgtaaacaccttcctaatacgcgacaaccgccaacgaaactactttttcgcccttaacgtaaaaataacctcgaaacccacgaacatccgcgtacactttcaaaccgaccgctttcacctaaataaacaaccgcgaaaacttcgactacctcttcgaactactaaaacactacgtaacgaaaccgcgccgcatactaaaaaacccccgtacaccaacgccgcgtacgaaccgtacataaactataccgccaacccatcttaaccacccgaaacctaaaaatcctaatataatacgactctaactctaacccacgattaat

SEQ ID NO: 8369 - DNA, 767 bp, Artificial Sequence
  chemically treated genomic DNA (Homo sapiens) CpG-island No: 8369
taacgtatgtttagttttgtcgttcgatcgagttttggtttttcgtgcgtattttttcgtagttatttcgcgatataattatacgtagtggtttcgtatggtttaatatttttgttatttgttatcgttcgtaatgttcgcgtcgcgattttcgtcgggtaaggtgggggagagtatagggttaggggttttcgggtcggtttaattttgcgggcgcggtttttttttttatttcgttgttttgtttttttttcgggttttttcgcgagttttcgtaggattttttcggttatgcgtttcgtttaatttttggttttcggtatttcgcgcgttcgcggtacgggttttacgcgttttgtcgattttacgagttgtttatcgttttaacgttatagcgttcgtttcgtttattcggggttttagtttcgattatcgatcggtttcggggggttttaatcgttatcgtatcgggatattattggcgattacgaataacggtcgatgttttttagggttttaggaaaattcgttaatttttcgggttagtcgtcggttatcggcgattcgttttttttatttcgttacgtttttttcgagaatcgaggttatttcgatatattttgcgatcgacgtatcggtttcgatcggcgggttataagagcgcgattacggatattttttaacggaatattttcgcggcggatttttcgtttacgaaagcgttttttatcggcgcgttttttttcgggaggcggtacgcgagtcgt

SEQ ID NO: 8370 - DNA, 767 bp, Artificial Sequence
  chemically treated genomic DNA (Homo sapiens) CpG-island No: 8370
acgactcgcgtaccgcctcccgaaaaaaaacgcgccgataaaaaacgctttcgtaaacgaaaaatccgccgcgaaaatattccgttaaaaaatatccgtaatcgcgctcttataacccgccgatcgaaaccgatacgtcgatcgcaaaatatatcgaaataacctcgattctcgaaaaaaacgtaacgaaataaaaaaaacgaatcgccgataaccgacgactaacccgaaaaattaacgaattttcctaaaaccctaaaaaacatcgaccgttattcgtaatcgccaataatatcccgatacgataacgattaaaaccccccgaaaccgatcgataatcgaaactaaaaccccgaataaacgaaacgaacgctataacgttaaaacgataaacaactcgtaaaatcgacaaaacgcgtaaaacccgtaccgcgaacgcgcgaaataccgaaaaccaaaaattaaacgaaacgcataaccgaaaaaatcctacgaaaactcgcgaaaaaacccgaaaaaaaaacaaaacaacgaaataaaaaaaaaaaccgcgcccgcaaaattaaaccgacccgaaaacccctaaccctatactctcccccaccttacccgacgaaaatcgcgacgcgaacattacgaacgataacaaataacaaaaatattaaaccatacgaaaccactacgtataattatatcgcgaaataactacgaaaaaatacgcacgaaaaaccaaaactcgatcgaacgacaaaactaaacatacgtta

SEQ ID NO: 8371 - DNA, 767 bp, Artificial Sequence
  chemically treated genomic DNA (Homo sapiens) CpG-island No: 8371
gcggttcgcgtgtcgtttttcgggggggggcgcgtcggtgggggacgttttcgtgggcggggaattcgtcgcgggggtgtttcgttgaggggtgttcgtgatcgcgtttttgtggttcgtcggtcggggtcggtgcgtcggtcgtagggtgtgtcgaggtggtttcggttttcggggggggcgtgacggggtgggggggacgggtcgtcgatggtcggcggttggttcgggggattggcgggtttttttggggttttgaggggtatcggtcgttgttcgtagtcgttaatggtgtttcggtgcggtgacgattagggtttttcgggatcgatcggtgatcgggattgaagtttcgggtaggcgaagcgggcgttgtggcgttggagcggtgagtagttcgtgaggtcggtagggcgcgtagggttcgtgtcgcgggcgcgcgagatgtcggaagttagggattgggcggggcgtatggtcgggaaggttttacgagggttcgcggaagggttcgggaaggaagtaaggtagcggggtgaaaggaaggatcgcgttcgtaaagttgagtcggttcggaggtttttggttttatatttttttttattttgttcgacggagatcgcggcgcggatattgcgagcggtgataggtggtaaaggtgttgagttatgcggagttattgcgtgtgattgtgtcgcgggatggttgcgagaggatacgtacggggagttagggttcgatcgagcgatagagttggatatacgttg

SEQ ID NO: 8372 - DNA, 767 bp, Artificial Sequence
  chemically treated genomic DNA (Homo sapiens) CpG-island No: 8372
caacgtatatccaactctatcgctcgatcgaaccctaactccccgtacgtatcctctcgcaaccatcccgcgacacaatcacacgcaataactccgcataactcaacacctttaccacctatcaccgctcgcaatatccgcgccgcgatctccgtcgaacaaaataaaaaaaaatataaaaccaaaaacctccgaaccgactcaactttacgaacgcgatccttcctttcaccccgctaccttacttccttcccgaacccttccgcgaaccctcgtaaaaccttcccgaccatacgccccgcccaatccctaacttccgacatctcgcgcgcccgcgacacgaaccctacgcgccctaccgacctcacgaactactcaccgctccaacgccacaacgcccgcttcgcctacccgaaacttcaatcccgatcaccgatcgatcccgaaaaaccctaatcgtcaccgcaccgaaacaccattaacgactacgaacaacgaccgatacccctcaaaaccccaaaaaaacccgccaatcccccgaaccaaccgccgaccatcgacgacccgtcccccccaccccgtcacgccccccccgaaaaccgaaaccacctcgacacaccctacgaccgacgcaccgaccccgaccgacgaaccacaaaaacgcgatcacgaacacccctcaacgaaacacccccgcgacgaattccccgcccacgaaaacgtcccccaccgacgcgcccccccccgaaaaacgacacgcgaaccgc

SEQ ID NO: 8373 - DNA, 811 bp, Artificial Sequence
  chemically treated genomic DNA (Homo sapiens) CpG-island No: 8373
  unsure (5, 14, 17, 30)
ttcgncgttttatnttntcgaattaagtgnacgataggagtagttggatattacggttttttatagatcgtgaaacgttttagttaagttttaagttttaggtgatttagggattttcgcgtatcggatcgttggtttggttgcgtatttgttaagaggtttttgtgaaaagtgtaagataagtttttcgttgcgggtcgcgataataggcgtaggttaggtggcgataaggtttatgtttcgtattattgtattcgtaacgatttggaattggtgttgtttgtgatagtcgttttttttaggcgtaggcgttggtagaaaaatcgggaatgtattcgtgtgggacgattcgtaggttatgttgttggcggtgaatttgatgtggttagcgtttgtttatttaatcgtttttattacgaataattttgatggtattggaagcgggttgttatgtgatgtgcgaaaaatcgtcgttatgacgttagaataggcgcgggaaatgtgcgatatcgcgcgtaaatgggtaaggtgttggtttacgatttttattatcgttttgcgttcgatattaatagttgcgtgaataggtgattaacggcgttttgggagagatttacgtattatcgttcgcgttttgcgtcgttgcggcgttttcggttggggtgttttattaataaagaattgtagggtggtggttcgttgatcgatatcggtattatatgttggatgttgcgatgtatgtgttgggtttttcggcggtgaaaacgtgaatgcgtatagtttttaaaagatcggtacgtaaaagagttgt

SEQ ID NO: 8374 - DNA, 811 bp, Artificial Sequence
  chemically treated genomic DNA (Homo sapiens) CpG-island No: 8374
  unsure (782, 795, 798, 807)
acaactcttttacgtaccgatcttttaaaaactatacgcattcacgttttcaccgccgaaaaacccaacacatacatcgcaacatccaacatataataccgatatcgatcaacgaaccaccaccctacaattctttattaataaaacaccccaaccgaaaacgccgcaacgacgcaaaacgcgaacgataatacgtaaatctctcccaaaacgccgttaatcacctattcacgcaactattaatatcgaacgcaaaacgataataaaaatcgtaaaccaacaccttacccatttacgcgcgatatcgcacatttcccgcgcctattctaacgtcataacgacgatttttcgcacatcacataacaacccgcttccaataccatcaaaattattcgtaataaaaacgattaaataaacaaacgctaaccacatcaaattcaccgccaacaacataacctacgaatcgtcccacacgaatacattcccgatttttctaccaacgcctacgcctaaaaaaaacgactatcacaaacaacaccaattccaaatcgttacgaatacaataatacgaaacataaaccttatcgccacctaacctacgcctattatcgcgacccgcaacgaaaaacttatcttacacttttcacaaaaacctcttaacaaatacgcaaccaaaccaacgatccgatacgcgaaaatccctaaatcacctaaaacttaaaacttaactaaaacgtttcacgatctataaaaaaccgtaatatccaactactcctatcgtncacttaattcganaanataaaacgncgaa

SEQ ID NO: 8375 - DNA, 811 bp, Artificial Sequence
  chemically treated genomic DNA (Homo sapiens) CpG-island No: 8375
  unsure (782, 795, 798, 807)
atagtttttttgcgtgtcgattttttgaaagttatgcgtatttacgtttttatcgtcggaaagtttagtatatatatcgtagtatttagtatatgatgtcgatgtcgattagcgggttattattttgtagttttttattggtaagatattttagtcgggaacgtcgtagcgacgtagggcgcgggcggtggtacgtaaattttttttaaaacgtcgttggttatttgtttacgtagttgttggtatcgagcgtaaaacgatggtgaaagtcgtaggttagtattttgtttatttgcgcgcggtatcgtatatttttcgcgtttgttttggcgttatggcggcggtttttcgtatattatatggtagttcgtttttagtgttattagggttgttcgtaatgaaaacggttaggtgagtagacgttaattatattaggtttatcgttagtagtatggtttgcggatcgttttatacggatgtattttcgatttttttgttagcgtttgcgtttgggaaaggcggttgttatagatagtattagttttagatcgttgcgggtgtagtagtacgaagtatgaattttatcgttatttggtttgcgtttattatcgcgattcgtagcggagagtttgttttgtattttttataaagattttttagtaggtacgtaattaggttaacgattcggtacgcggggatttttgagttatttggggtttgaagtttggttggggcgttttacggtttgtggggaatcgtggtgtttagttatttttgtcgtntatttagttcggnaangtaaggcgncgag

SEQ ID NO: 8376 - DNA, 811 bp, Artificial Sequence
  chemically treated genomic DNA (Homo sapiens) CpG-island No: 8376
  unsure (5, 14, 17, 30)
ctcgncgccttacnttnccgaactaaatanacgacaaaaataactaaacaccacgattccccacaaaccgtaaaacgccccaaccaaacttcaaaccccaaataactcaaaaatccccgcgtaccgaatcgttaacctaattacgtacctactaaaaaatctttataaaaaatacaaaacaaactctccgctacgaatcgcgataataaacgcaaaccaaataacgataaaattcatacttcgtactactacacccgcaacgatctaaaactaatactatctataacaaccgcctttcccaaacgcaaacgctaacaaaaaaatcgaaaatacatccgtataaaacgatccgcaaaccatactactaacgataaacctaatataattaacgtctactcacctaaccgttttcattacgaacaaccctaataacactaaaaacgaactaccatataatatacgaaaaaccgccgccataacgccaaaacaaacgcgaaaaatatacgataccgcgcgcaaataaacaaaatactaacctacgactttcaccatcgttttacgctcgataccaacaactacgtaaacaaataaccaacgacgttttaaaaaaaatttacgtaccaccgcccgcgccctacgtcgctacgacgttcccgactaaaatatcttaccaataaaaaactacaaaataataacccgctaatcgacatcgacatcatatactaaatactacgatatatatactaaactttccgacgataaaaacgtaaatacgcataactttcaaaaaatcgacacgcaaaaaaactat

SEQ ID NO: 8377 - DNA, 605 bp, Artificial Sequence
  chemically treated genomic DNA (Homo sapiens) CpG-island No: 8377
aattagttttcggtcgggtaataacgcgcgtcgttttagcgcgtttgtggttgattcgtgttacgatatatggatttcgacgagttttttatcgcgattgacgttaacggtgtcgatcgtttgattagcgtatggcgtagtatacggagtagggggggattgtgattttgattattattagtcgtttaacgttgttgaaagtaaaattcgtcgtattttattgcgtaaacgagggtcgtatgatgttttggcgtatttttcgttttgagttggtgtagcgtttcgttatagcgtcgaaatcgttaattcgttgtggtttttttgattgtaattatttttttttcgtttagtatcggttcggagtcgtaacgttggcgcgtattgtatcgggtattatttgggttgttgcgttgtttttattttgttggcgttggaacgattgtttcgtgacgatttgtaggacggtagtttgaataattgatgttgttgtcgttatttttgttcgtcgttgtgttgggaaggtgatggcgtattggatggtaatcggtttgtcgttatttatttttcgttattggtagtaatgttattgggaatggatgtttatg

SEQ ID NO: 8378 - DNA, 605 bp, Artificial Sequence
  chemically treated genomic DNA (Homo sapiens) CpG-island No: 8378
cataaacatccattcccaataacattactaccaataacgaaaaataaataacgacaaaccgattaccatccaatacgccatcaccttcccaacacaacgacgaacaaaaataacgacaacaacatcaattattcaaactaccgtcctacaaatcgtcacgaaacaatcgttccaacgccaacaaaataaaaacaacgcaacaacccaaataatacccgatacaatacgcgccaacgttacgactccgaaccgatactaaacgaaaaaaaaataattacaatcaaaaaaaccacaacgaattaacgatttcgacgctataacgaaacgctacaccaactcaaaacgaaaaatacgccaaaacatcatacgaccctcgtttacgcaataaaatacgacgaattttactttcaacaacgttaaacgactaataataatcaaaatcacaatccccccctactccgtatactacgccatacgctaatcaaacgatcgacaccgttaacgtcaatcgcgataaaaaactcgtcgaaatccatatatcgtaacacgaatcaaccacaaacgcgctaaaacgacgcgcgttattacccgaccgaaaactaatt

SEQ ID NO: 8379 - DNA, 605 bp, Artificial Sequence
  chemically treated genomic DNA (Homo sapiens) CpG-island No: 8379
tataaatatttatttttagtagtattgttattagtggcgaaggatgagtaacggtagatcggttattatttagtgcgttattatttttttagtataacggcgggtaagggtaacggtaataatattaattgtttaagttgtcgttttgtaaatcgttacggaatagtcgttttagcgttagtaaggtgaaagtagcgtagtaatttagataatgttcggtgtaatacgcgttagcgttgcggtttcggatcgatattgagcggaaaaagggtaattataattagaagaattatagcgggttggcgatttcggcgttatggcgaaacgttatattagtttaagacggaaaatgcgttagaatattatgcggttttcgtttgcgtagtgaaatgcggcgaattttatttttagtaacgttgagcggttggtggtagttagaattataatttttttttgtttcgtatgttgcgttatacgttggttagacgatcgatatcgttaacgttaatcgcggtaaaaggttcgtcgagatttatatatcgtggtacgggttagttatagacgcgttaaagcgacgcgcgttgttgttcggtcgagagttgatt

SEQ ID NO: 8380 - DNA, 605 bp, Artificial Sequence
  chemically treated genomic DNA (Homo sapiens) CpG-island No: 8380
aatcaactctcgaccgaacaacaacgcgcgtcgctttaacgcgtctataactaacccgtaccacgatatataaatctcgacgaaccttttaccgcgattaacgttaacgatatcgatcgtctaaccaacgtataacgcaacatacgaaacaaaaaaaaattataattctaactaccaccaaccgctcaacgttactaaaaataaaattcgccgcatttcactacgcaaacgaaaaccgcataatattctaacgcattttccgtcttaaactaatataacgtttcgccataacgccgaaatcgccaacccgctataattcttctaattataattaccctttttccgctcaatatcgatccgaaaccgcaacgctaacgcgtattacaccgaacattatctaaattactacgctactttcaccttactaacgctaaaacgactattccgtaacgatttacaaaacgacaacttaaacaattaatattattaccgttacccttacccgccgttatactaaaaaaataataacgcactaaataataaccgatctaccgttactcatccttcgccactaataacaatactactaaaaataaatatttata

SEQ ID NO: 8381 - DNA, 506 bp, Artificial Sequence
  chemically treated genomic DNA (Homo sapiens) CpG-island No: 8381
agtcgggcgtttttataatcgattagtaattggcgtcgattttaaataaaacgttacggcgtggataataggggtacgtattgcgtttttcgttgtatttatgatttataggatttgttgtaaattggttttcgtttttattgatgtcgttatgtcgtaatggcgttgtttacgttgacgattcgggtttatatatagaacggggtgtgggggaagtaattttgattatttgtatttatatgatttgcgagtatgtcgtttacgtttggtcggtagtaacgttattcgttatcgttaattgtacgtttggcgaatatttgaattgtattttaatttaggtgcgtacgcgtattgttatgggggggggggggggcggcggggcgggagggttatacgacgattaattgacgtattcggagagtagggggtggacggaatagtgtaaatggatttacggaatatattatatacggaagaataaggaggtttataaaggggttataggt

SEQ ID NO: 8382 - DNA, 506 bp, Artificial Sequence
  chemically treated genomic DNA (Homo sapiens) CpG-island No: 8382
acctataacccctttataaacctccttattcttccgtatataatatattccgtaaatccatttacactattccgtccaccccctactctccgaatacgtcaattaatcgtcgtataaccctcccgccccgccgcccccccccccccccataacaatacgcgtacgcacctaaattaaaatacaattcaaatattcgccaaacgtacaattaacgataacgaataacgttactaccgaccaaacgtaaacgacatactcgcaaatcatataaatacaaataatcaaaattacttcccccacaccccgttctatatataaacccgaatcgtcaacgtaaacaacgccattacgacataacgacatcaataaaaacgaaaaccaatttacaacaaatcctataaatcataaatacaacgaaaaacgcaatacgtacccctattatccacgccgtaacgttttatttaaaatcgacgccaattactaatcgattataaaaacgcccgact

SEQ ID NO: 8383 - DNA, 506 bp, Artificial Sequence
  chemically treated genomic DNA (Homo sapiens) CpG-island No: 8383
gtttataatttttttgtaggtttttttattttttcgtgtgtggtgtgtttcgtgggtttatttatattgtttcgtttattttttatttttcgggtacgttagttggtcgtcgtgtaattttttcgtttcgtcgtttttttttttttttataataatacgcgtgcgtatttgggttagaatatagtttaagtgttcgttaaacgtgtagttggcggtggcgggtaacgttattatcggttaggcgtaggcggtatattcgtagattatgtaagtgtaggtggttagggttgttttttttatatttcgttttatatgtaaattcgggtcgttaacgtaagtaacgttattgcggtatggcgatattagtgggagcgaaggttagtttatagtaaattttgtaagttataggtgtagcgggaagcgtagtacgtatttttattgtttacgtcgtggcgttttatttggggtcggcgttaattattagtcggttgtgggggcgttcggtt

SEQ ID NO: 8384 - DNA, 506 bp, Artificial Sequence
  chemically treated genomic DNA (Homo sapiens) CpG-island No: 8384
aaccgaacgcccccacaaccgactaataattaacgccgaccccaaataaaacgccacgacgtaaacaataaaaatacgtactacgcttcccgctacacctataacttacaaaatttactataaactaaccttcgctcccactaatatcgccataccgcaataacgttacttacgttaacgacccgaatttacatataaaacgaaatataaaaaaaacaaccctaaccacctacacttacataatctacgaatataccgcctacgcctaaccgataataacgttacccgccaccgccaactacacgtttaacgaacacttaaactatattctaacccaaatacgcacgcgtattattataaaaaaaaaaaaaaacgacgaaacgaaaaaattacacgacgaccaactaacgtacccgaaaaataaaaaataaacgaaacaatataaataaacccacgaaacacaccacacacgaaaaaataaaaaaacctacaaaaaaattataaac

SEQ ID NO: 8385 - DNA, 595 bp, Artificial Sequence
  chemically treated genomic DNA (Homo sapiens) CpG-island No: 8385
gcgacggtcgaggatcgggggcggggatattagagattgtgtggacggtagacgacgaataacgggggcggcggggattatatgagacgcgtagtgagcgacggtatggtattgaagattgggtacgggaggtttgtatgagcggtcgtgggagatagacggattgtgtgaatgggtagatagggttgtatggcgatgtgcggtgcgggtacgcggcgattaattaggcgatgcgtttaattttcggcgcggagtataaaggatttagagggtaaaagtagaattggcgacggcgttattacgcgaaatatgtgtggtggatacgtatcgtaaggattagtaaagtattggtaagagggattaaggcggttagtttgtgcgttattgtgttatagttttgttaataattttcgtacgcgtgtcgtcgatgtaacgttgtgtcgtaagcgtttgttaatcgtggtgtgtacgggttaataaatatgggggggggggggggggggggggggcgaaggcgtgtagggaaagggtatgataaaaaaaaaaaaaaaagtagaaaggggggtaacgggagaaaggggggataatttgtagt

SEQ ID NO: 8386 - DNA, 595 bp, Artificial Sequence
  chemically treated genomic DNA (Homo sapiens) CpG-island No: 8386
actacaaattatcccccctttctcccgttacccccctttctacttttttttttttttttatcataccctttccctacacgccttcgcccccccccccccccccccccccccatatttattaacccgtacacaccacgattaacaaacgcttacgacacaacgttacatcgacgacacgcgtacgaaaattattaacaaaactataacacaataacgcacaaactaaccgccttaatccctcttaccaatactttactaatccttacgatacgtatccaccacacatatttcgcgtaataacgccgtcgccaattctacttttaccctctaaatcctttatactccgcgccgaaaattaaacgcatcgcctaattaatcgccgcgtacccgcaccgcacatcgccatacaaccctatctacccattcacacaatccgtctatctcccacgaccgctcatacaaacctcccgtacccaatcttcaataccataccgtcgctcactacgcgtctcatataatccccgccgcccccgttattcgtcgtctaccgtccacacaatctctaatatccccgcccccgatcctcgaccgtcgc

SEQ ID NO: 8387 - DNA, 595 bp, Artificial Sequence
  chemically treated genomic DNA (Homo sapiens) CpG-island No: 8387
attataaattattttttttttttttcgttgtttttttttttatttttttttttttttttgttatgttttttttttgtacgttttcgtttttttttttttttttttttttttatatttgttaattcgtgtatattacggttagtaagcgtttgcggtatagcgttatatcggcggtacgcgtacgggggttattagtaaggttgtaatataatggcgtataggttagtcgttttggttttttttattagtattttattagtttttacggtgcgtgtttattatatatgtttcgcgtaatggcgtcgtcgttagttttatttttgttttttgggttttttgtgtttcgcgtcgggggttgggcgtatcgtttagttggtcgtcgcgtgttcgtatcgtatatcgttatgtagttttatttgtttatttatataattcgtttgttttttacggtcgtttatgtaagtttttcgtgtttagtttttagtgttatatcgtcgtttattacgcgttttatgtaattttcgtcgttttcgttattcgtcgtttatcgtttatataatttttggtgttttcgttttcggttttcggtcgtcgt

SEQ ID NO: 8388 - DNA, 595 bp, Artificial Sequence
  chemically treated genomic DNA (Homo sapiens) CpG-island No: 8388
acgacgaccgaaaaccgaaaacgaaaacaccaaaaattatataaacgataaacgacgaataacgaaaacgacgaaaattacataaaacgcgtaataaacgacgatataacactaaaaactaaacacgaaaaacttacataaacgaccgtaaaaaacaaacgaattatataaataaacaaataaaactacataacgatatacgatacgaacacgcgacgaccaactaaacgatacgcccaacccccgacgcgaaacacaaaaaacccaaaaaacaaaaataaaactaacgacgacgccattacgcgaaacatatataataaacacgcaccgtaaaaactaataaaatactaataaaaaaaaccaaaacgactaacctatacgccattatattacaaccttactaataacccccgtacgcgtaccgccgatataacgctataccgcaaacgcttactaaccgtaatatacacgaattaacaaatataaaaaaaaaaaaaaaaaaaaaaaaacgaaaacgtacaaaaaaaaaacataacaaaaaaaaaaaaaaaaataaaaaaaaaaacaacgaaaaaaaaaaaaaataatttataat

SEQ ID NO: 8389 - DNA, 500 bp, Artificial Sequence
  chemically treated genomic DNA (Homo sapiens) CpG-island No: 8389
tcggttaacggttattgtcgttatacgaatattggtattgtatagtttagttacgtgcgttcgcgatatatatatatatatatatatatatatatatatacgcgcgcgcgcgcgtcgcgttcgcgggttcgcgcgttcgcgagttcgcgcgtttttcgcgcgcgtcgcgcgcgcgcgggtcgtcggcgggcgcgcgggtgcgcgcgcgcgtgttgcgtgcgggcgtagttgacgtaagagatttgatatttagtttttggagggatgacgtattaaggcgttcgtcggcggttcggttatgcgtacgatttagatacggtcgtgacggtgttataattatttaaacgtcgatcgcgggtcgttgacgttttgtcggatatttattttaaagcggttagcggggtttggcgggatttaaaaattttggcgttaattgtcgtacggttagttttatttcggttaacgaaaagtttacgtgtgataatcgaatatgttaagtg

SEQ ID NO: 8390 - DNA, 500 bp, Artificial Sequence
  chemically treated genomic DNA (Homo sapiens) CpG-island No: 8390
cacttaacatattcgattatcacacgtaaacttttcgttaaccgaaataaaactaaccgtacgacaattaacgccaaaatttttaaatcccgccaaaccccgctaaccgctttaaaataaatatccgacaaaacgtcaacgacccgcgatcgacgtttaaataattataacaccgtcacgaccgtatctaaatcgtacgcataaccgaaccgccgacgaacgccttaatacgtcatccctccaaaaactaaatatcaaatctcttacgtcaactacgcccgcacgcaacacgcgcgcgcgcacccgcgcgcccgccgacgacccgcgcgcgcgcgacgcgcgcgaaaaacgcgcgaactcgcgaacgcgcgaacccgcgaacgcgacgcgcgcgcgcgcgtatatatatatatatatatatatatatatatatatcgcgaacgcacgtaactaaactatacaataccaatattcgtataacgacaataaccgttaaccga

SEQ ID NO: 8391 - DNA, 500 bp, Artificial Sequence
  chemically treated genomic DNA (Homo sapiens) CpG-island No: 8391
tatttagtatattcggttgttatacgtaaatttttcgttaatcggagtaaagttggtcgtgcggtaattagcgttaaaatttttgggtttcgttaggtttcgttagtcgttttaaggtgagtgttcggtaaggcgttaacggttcgcggtcggcgtttaggtagttgtagtatcgttacggtcgtgtttgggtcgtgcgtatggtcgagtcgtcggcgggcgttttgatgcgttatttttttaaaggttaggtattaggttttttgcgttagttacgttcgtacgtagtacgcgcgcgcgtattcgcgcgttcgtcggcggttcgcgcgcgcgcggcgcgcgcggggggcgcgcgggttcgcgggcgcgcgggttcgcgggcgcggcgcgcgcgcgcgcgtgtgtgtgtgtgtgtgtgtgtgtgtgtgtgtgtatcgcgggcgtacgtggttaagttatatagtattagtgttcgtgtagcggtagtagtcgttggtcgg

SEQ ID NO: 8392 - DNA, 500 bp, Artificial Sequence
  chemically treated genomic DNA (Homo sapiens) CpG-island No: 8392
ccgaccaacgactactaccgctacacgaacactaatactatataacttaaccacgtacgcccgcgatacacacacacacacacacacacacacacacacacgcgcgcgcgcgcgccgcgcccgcgaacccgcgcgcccgcgaacccgcgcgccccccgcgcgcgccgcgcgcgcgcgaaccgccgacgaacgcgcgaatacgcgcgcgcgtactacgtacgaacgtaactaacgcaaaaaacctaatacctaacctttaaaaaaataacgcatcaaaacgcccgccgacgactcgaccatacgcacgacccaaacacgaccgtaacgatactacaactacctaaacgccgaccgcgaaccgttaacgccttaccgaacactcaccttaaaacgactaacgaaacctaacgaaacccaaaaattttaacgctaattaccgcacgaccaactttactccgattaacgaaaaatttacgtataacaaccgaatatactaaata

SEQ ID NO: 8393 - DNA, 745 bp, Artificial Sequence
  chemically treated genomic DNA (Homo sapiens) CpG-island No: 8393
gaggattttcgatttgcggttttgtttatagtatcgtttatattacgtcggtggaaaacgcgatgggtatttaggtgttagaacgtgcgtagatgattcgcgttattttgttggaggtagaacgtttgtattcgtatttgtttaattttggtttggtttgttattttatcggtttcgatttcggttttatgtagttttttcgcgtgcgtgaaatttttatgaaaatggtagagatttttatcggtgcgcgtaaaatttacggtttgaatttgatcggcgggattcgtcgcgatttgttgaaagacgatatgatttagattcgttagttggtataatagatgcgtcgtgaagtgtacgagttggtggatgtgttgttgagtattattattatggaatagcgtattgtcggtattggtcgtttggattcggaaatcgttcgcgattttagtaacgtcggttcgatgggattcgttagcggttacgttcgtgatattcgcgtcgattattcgtttgtcggttatggtttgttgttaatggaagtttataacgagtagggttgcgacgttatttttcgtttgaaagtgcgtattaacgaagtttatatcgcgtttgatatgatttcggggatgacggtttttttcgttgttcgtaattatggtgtagtagttagttagttatttttttggcgtaagtaatattaggaaggaagttttattgttgtcgtcgtcggagaataggttgtttt

SEQ ID NO: 8394 - DNA, 745 bp, Artificial Sequence
  chemically treated genomic DNA (Homo sapiens) CpG-island No: 8394
aaaacaacctattctccgacgacgacaacaataaaacttccttcctaatattacttacgccaaaaaaataactaactaactactacaccataattacgaacaacgaaaaaaaccgtcatccccgaaatcatatcaaacgcgatataaacttcgttaatacgcactttcaaacgaaaaataacgtcgcaaccctactcgttataaacttccattaacaacaaaccataaccgacaaacgaataatcgacgcgaatatcacgaacgtaaccgctaacgaatcccatcgaaccgacgttactaaaatcgcgaacgatttccgaatccaaacgaccaataccgacaatacgctattccataataataatactcaacaacacatccaccaactcgtacacttcacgacgcatctattataccaactaacgaatctaaatcatatcgtctttcaacaaatcgcgacgaatcccgccgatcaaattcaaaccgtaaattttacgcgcaccgataaaaatctctaccattttcataaaaatttcacgcacgcgaaaaaactacataaaaccgaaatcgaaaccgataaaataacaaaccaaaccaaaattaaacaaatacgaatacaaacgttctacctccaacaaaataacgcgaatcatctacgcacgttctaacacctaaatacccatcgcgttttccaccgacgtaatataaacgatactataaacaaaaccgcaaatcgaaaatcctc

SEQ ID NO: 8395 - DNA, 745 bp, Artificial Sequence
  chemically treated genomic DNA (Homo sapiens) CpG-island No: 8395
ggaataatttgtttttcggcggcgatagtagtaagattttttttttggtattgtttacgttagagaaataattggttggttgttatattatggttgcgggtaacgaaggagatcgttattttcgggattatgttaagcgcggtatagatttcgttgatacgtatttttagacgggaaataacgtcgtagttttgttcgttgtggatttttattggtagtaggttatagtcgataaacgggtgatcggcgcgggtattacgggcgtgatcgttggcgggttttatcgggtcgacgttattgaagtcgcgagcgattttcgggtttagacgattaatgtcgatagtgcgttgttttatgatagtagtgtttagtagtatatttattagttcgtgtattttacgacgtatttgttgtgttagttggcgggtttggattatgtcgttttttagtagatcgcgacgaatttcgtcgattaagtttaggtcgtaggttttacgcgtatcggtaaggatttttgttatttttatggaggttttacgtacgcggaagaattgtataaagtcggagtcgaagtcggtaaagtgataggttaggttaaggttgagtagatgcgagtgtaagcgttttatttttagtagaatggcgcggattatttgcgtacgttttggtatttgaatatttatcgcgttttttatcgacgtggtgtaggcggtgttgtgggtaaagtcgtagatcggggattttt

SEQ ID NO: 8396 - DNA, 745 bp, Artificial Sequence
  chemically treated genomic DNA (Homo sapiens) CpG-island No: 8396
aaaaatccccgatctacgactttacccacaacaccgcctacaccacgtcgataaaaaacgcgataaatattcaaataccaaaacgtacgcaaataatccgcgccattctactaaaaataaaacgcttacactcgcatctactcaaccttaacctaacctatcactttaccgacttcgactccgactttatacaattcttccgcgtacgtaaaacctccataaaaataacaaaaatccttaccgatacgcgtaaaacctacgacctaaacttaatcgacgaaattcgtcgcgatctactaaaaaacgacataatccaaacccgccaactaacacaacaaatacgtcgtaaaatacacgaactaataaatatactactaaacactactatcataaaacaacgcactatcgacattaatcgtctaaacccgaaaatcgctcgcgacttcaataacgtcgacccgataaaacccgccaacgatcacgcccgtaatacccgcgccgatcacccgtttatcgactataacctactaccaataaaaatccacaacgaacaaaactacgacgttatttcccgtctaaaaatacgtatcaacgaaatctataccgcgcttaacataatcccgaaaataacgatctccttcgttacccgcaaccataatataacaaccaaccaattatttctctaacgtaaacaataccaaaaaaaaaatcttactactatcgccgccgaaaaacaaattattcc

SEQ ID NO: 8397 - DNA, 533 bp, Artificial Sequence
  chemically treated genomic DNA (Homo sapiens) CpG-island No: 8397
aatcgtttgtattatcgtgttgtcgtttatcgtttggttgtattatttttttacgatgggtgcgggcgcgaacgtaaacgttttttttggtattattataatgattatcgttatttcgatcggggtgaagatttttaattggttgtttattatgtattaggtcgtatcgtgttttattttgcgatgttgtggattatcggttttatcgttattttttcggtgggcgggatgattggcgtgttgttggtcgtatcgggcgcggatttcgttttgtataatagtttgtttttgattgcgtatttttataacgtgattatcggcggcgtggttttcggttgtttcgtagggatgatttattggtggtttaaagcgttcggttttaaattgaacgaaatttggggtaaacgcgcgttttggttttggattatcggttttttcgttgtttttatgttattgtatgcgttgggttttatgggtatgattcgtcgtttgagttagtagattgattcgtagttttatattatgttgatgat

SEQ ID NO: 8398 - DNA, 533 bp, Artificial Sequence
  chemically treated genomic DNA (Homo sapiens) CpG-island No: 8398
atcatcaacataatataaaactacgaatcaatctactaactcaaacgacgaatcatacccataaaacccaacgcatacaataacataaaaacaacgaaaaaaccgataatccaaaaccaaaacgcgcgtttaccccaaatttcgttcaatttaaaaccgaacgctttaaaccaccaataaatcatccctacgaaacaaccgaaaaccacgccgccgataatcacgttataaaaatacgcaatcaaaaacaaactattatacaaaacgaaatccgcgcccgatacgaccaacaacacgccaatcatcccgcccaccgaaaaaataacgataaaaccgataatccacaacatcgcaaaataaaacacgatacgacctaatacataataaacaaccaattaaaaatcttcaccccgatcgaaataacgataatcattataataataccaaaaaaaacgtttacgttcgcgcccgcacccatcgtaaaaaaataatacaaccaaacgataaacgacaacacgataatacaaacgatt

SEQ ID NO: 8399 - DNA, 533 bp, Artificial Sequence
  chemically treated genomic DNA (Homo sapiens) CpG-island No: 8399
attattagtatggtgtggaattgcgggttaatttgttggtttaaacgacgggttatgtttatgaagtttagcgtatatagtggtataaaggtaacgaagaagtcgatgatttagaattagaacgcgcgtttattttaggtttcgtttagtttgaaatcgaacgttttaggttattagtaggttatttttgcgaagtagtcgaagattacgtcgtcgatgattacgttatggaagtgcgtaattaggaataggttgttatgtagaacgaagttcgcgttcggtacggttagtagtacgttagttatttcgtttatcgagaaggtgacgataaaatcgatggtttatagtatcgtagaatggaatacgatgcggtttgatatatggtgaatagttagttgaagatttttatttcggtcgggatggcgataattattgtggtgatattaaagaaggcgtttacgttcgcgttcgtatttatcgtaaagaagtggtgtagttaaacgatgaacgatagtacggtgatatagacggtt

SEQ ID NO: 8400 - DNA, 533 bp, Artificial Sequence
  chemically treated genomic DNA (Homo sapiens) CpG-island No: 8400
aaccgtctatatcaccgtactatcgttcatcgtttaactacaccacttctttacgataaatacgaacgcgaacgtaaacgccttctttaatatcaccacaataattatcgccatcccgaccgaaataaaaatcttcaactaactattcaccatatatcaaaccgcatcgtattccattctacgatactataaaccatcgattttatcgtcaccttctcgataaacgaaataactaacgtactactaaccgtaccgaacgcgaacttcgttctacataacaacctattcctaattacgcacttccataacgtaatcatcgacgacgtaatcttcgactacttcgcaaaaataacctactaataacctaaaacgttcgatttcaaactaaacgaaacctaaaataaacgcgcgttctaattctaaatcatcgacttcttcgttacctttataccactatatacgctaaacttcataaacataacccgtcgtttaaaccaacaaattaacccgcaattccacaccatactaataat

SEQ ID NO: 8401 - DNA, 651 bp, Artificial Sequence
  chemically treated genomic DNA (Homo sapiens) CpG-island No: 8401
cgtttcgtattcggtaacggttttagatgtttgatgcgacgtttgcgcgttttattaggtttataaattttcgtatttttcgtagatcggataaggcgtttacgtcgtattcggtaacggtatcgattgtttgatgcgacgtttgcgcgttttattaggtttataaattttcgtatttttcgtagggcggataaggcgtttacgtcgtattcggtaatagtgttaattgtttgatgcgacgtttgcgcgttttattaggtttataaattttcgtattattcgtaggtcggataaggcgtttacgtcgtattcggtaacggtgtcgattgtttgatgcgacgtttgcgcgttttattaggtttataaattttcgtatttttcgtaggtcggataaggcgtttacgtcgtattcggtaatggtgtcgattgtttgatgcgacgtttgcgcgttttattaggtttataaatttgtgtcggatcggtaggtcggataaggcgtttatgtcgtattcggtagttttatattagaagaaatatttcgtttcgatacggatttggtttgttcgcggtggtacggttcgacgttgcggtttaattagcgtaattcgaaataagggagttagtgtttattaatacggtaacggaaggtgt

SEQ ID NO: 8402 - DNA, 651 bp, Artificial Sequence
  chemically treated genomic DNA (Homo sapiens) CpG-island No: 8402
acaccttccgttaccgtattaataaacactaactcccttatttcgaattacgctaattaaaccgcaacgtcgaaccgtaccaccgcgaacaaaccaaatccgtatcgaaacgaaatatttcttctaatataaaactaccgaatacgacataaacgccttatccgacctaccgatccgacacaaatttataaacctaataaaacgcgcaaacgtcgcatcaaacaatcgacaccattaccgaatacgacgtaaacgccttatccgacctacgaaaaatacgaaaatttataaacctaataaaacgcgcaaacgtcgcatcaaacaatcgacaccgttaccgaatacgacgtaaacgccttatccgacctacgaataatacgaaaatttataaacctaataaaacgcgcaaacgtcgcatcaaacaattaacactattaccgaatacgacgtaaacgccttatccgccctacgaaaaatacgaaaatttataaacctaataaaacgcgcaaacgtcgcatcaaacaatcgataccgttaccgaatacgacgtaaacgccttatccgatctacgaaaaatacgaaaatttataaacctaataaaacgcgcaaacgtcgcatcaaacatctaaaaccgttaccgaatacgaaacg

SEQ ID NO: 8403 - DNA, 651 bp, Artificial Sequence
  chemically treated genomic DNA (Homo sapiens) CpG-island No: 8403
atatttttcgttatcgtattaatgaatattggtttttttatttcgaattgcgttggttagatcgtaacgtcgaatcgtattatcgcgagtaaattagattcgtatcgggacgaagtattttttttgatgtgaaattgtcggatgcggtataaacgttttattcggtttatcgattcggtataagtttgtaggtttgataagacgcgtaagcgtcgtattaggtagtcggtattattgtcggatgcggcgtaaacgttttattcggtttacggagggtgcgggaatttgtaggtttgataagacgcgtaagcgtcgtattaggtagtcggtatcgttgtcggatgcggcgtaaacgttttattcggtttacggatggtgcgggaatttgtaggtttgataagacgcgtaagcgtcgtattaggtagttggtattgttgtcggatgcggcgtaaacgttttattcgttttacggagggtgcgggaatttgtaggtttgataagacgcgtaagcgtcgtattaggtagtcggtatcgttgtcggatgcggcgtaaacgttttattcggtttacggagggtgcgggaatttgtaggtttgataagacgcgtaagcgtcgtattaggtatttgggatcgttgtcggatgcggggcg

SEQ ID NO: 8404 - DNA, 651 bp, Artificial Sequence
  chemically treated genomic DNA (Homo sapiens) CpG-island No: 8404
cgccccgcatccgacaacgatcccaaatacctaatacgacgcttacgcgtcttatcaaacctacaaattcccgcaccctccgtaaaccgaataaaacgtttacgccgcatccgacaacgataccgactacctaatacgacgcttacgcgtcttatcaaacctacaaattcccgcaccctccgtaaaacgaataaaacgtttacgccgcatccgacaacaataccaactacctaatacgacgcttacgcgtcttatcaaacctacaaattcccgcaccatccgtaaaccgaataaaacgtttacgccgcatccgacaacgataccgactacctaatacgacgcttacgcgtcttatcaaacctacaaattcccgcaccctccgtaaaccgaataaaacgtttacgccgcatccgacaataataccgactacctaatacgacgcttacgcgtcttatcaaacctacaaacttataccgaatcgataaaccgaataaaacgtttataccgcatccgacaatttcacatcaaaaaaaatacttcgtcccgatacgaatctaatttactcgcgataatacgattcgacgttacgatctaaccaacgcaattcgaaataaaaaaaccaatattcattaatacgataacgaaaaatat

SEQ ID NO: 8405 - DNA, 605 bp, Artificial Sequence
  chemically treated genomic DNA (Homo sapiens) CpG-island No: 8405
gtagattcgcgatattttggcgcgttcggcgttttattttatcgtttcgtagtaacgttgggaagaatatttgaagaaagggttaattaattcggatgcgacgtcggaatagacgcgcgtcgcggtgaaagcgatcgatacgtttaacggtaattggcgtttatcgggcggtgcggtgaaatttaatatcgttatattagtcggtgatcgggcgttggtttttcggtaattagatttggtcgtgggatatttggaagtaggcgtttgcgatggcgtatattaattcggatatcgataaagagaatattcgcgcggtttttttttggtagatttagtttggcgatagcgtgcgttcgaaggatgtgggttttgttttcgatttgatagcgtggaattttagtttcgagcgtggtggcgatggcgtgtattggaacgaacgtaatattaaagttagttttgtcgattgatcggtgatggtagtgtataacgttattaagattaaattttagtggtttagatgtttcgatatttggggttattcgattggaggaacgaaacggattataaggaatagcgtgtcgaatagggcgaacgaattagttata

SEQ ID NO: 8406 - DNA, 605 bp, Artificial Sequence
  chemically treated genomic DNA (Homo sapiens) CpG-island No: 8406
tataactaattcgttcgccctattcgacacgctattccttataatccgtttcgttcctccaatcgaataaccccaaatatcgaaacatctaaaccactaaaatttaatcttaataacgttatacactaccatcaccgatcaatcgacaaaactaactttaatattacgttcgttccaatacacgccatcgccaccacgctcgaaactaaaattccacgctatcaaatcgaaaacaaaacccacatccttcgaacgcacgctatcgccaaactaaatctaccaaaaaaaaaccgcgcgaatattctctttatcgatatccgaattaatatacgccatcgcaaacgcctacttccaaatatcccacgaccaaatctaattaccgaaaaaccaacgcccgatcaccgactaatataacgatattaaatttcaccgcaccgcccgataaacgccaattaccgttaaacgtatcgatcgctttcaccgcgacgcgcgtctattccgacgtcgcatccgaattaattaaccctttcttcaaatattcttcccaacgttactacgaaacgataaaataaaacgccgaacgcgccaaaatatcgcgaatctac

SEQ ID NO: 8407 - DNA, 605 bp, Artificial Sequence
  chemically treated genomic DNA (Homo sapiens) CpG-island No: 8407
tgtggttggttcgttcgttttattcggtacgttgttttttgtggttcgtttcgtttttttagtcgggtagttttaggtgtcgggatatttgggttattaaggtttgattttggtgacgttatatattgttattatcgattagtcggtaaggttggttttggtattacgttcgttttagtgtacgttatcgttattacgttcggggttaaggttttacgttattaggtcggggataaagtttatatttttcggacgtacgttatcgttaggttggatttgttaggagaagatcgcgcggatattttttttgtcgatgttcggattgatatgcgttatcgtaaacgtttgtttttaggtattttacggttaggtttgattgtcggagaattagcgttcggttatcgattggtgtaacggtgttaaattttatcgtatcgttcggtgagcgttagttatcgttgagcgtgtcgatcgtttttatcgcgacgcgcgtttgtttcggcgtcgtattcggattggttaattttttttttaggtattttttttagcgttgttgcgaggcggtgagataaaacgtcggacgcgttagaatatcgcggatttgt

SEQ ID NO: 8408 - DNA, 605 bp, Artificial Sequence
  chemically treated genomic DNA (Homo sapiens) CpG-island No: 8408
acaaatccgcgatattctaacgcgtccgacgttttatctcaccgcctcgcaacaacgctaaaaaaaatacctaaaaaaaaaattaaccaatccgaatacgacgccgaaacaaacgcgcgtcgcgataaaaacgatcgacacgctcaacgataactaacgctcaccgaacgatacgataaaatttaacaccgttacaccaatcgataaccgaacgctaattctccgacaatcaaacctaaccgtaaaatacctaaaaacaaacgtttacgataacgcatatcaatccgaacatcgacaaaaaaaatatccgcgcgatcttctcctaacaaatccaacctaacgataacgtacgtccgaaaaatataaactttatccccgacctaataacgtaaaaccttaaccccgaacgtaataacgataacgtacactaaaacgaacgtaataccaaaaccaaccttaccgactaatcgataataacaatatataacgtcaccaaaatcaaaccttaataacccaaatatcccgacacctaaaactacccgactaaaaaaacgaaacgaaccacaaaaaacaacgtaccgaataaaacgaacgaaccaaccaca

SEQ ID NO: 8409 - DNA, 937 bp, Artificial Sequence
  chemically treated genomic DNA (Homo sapiens) CpG-island No: 8409
ttttaattttttttaggtagttttcgtcgtttgcgtttttagtaatttcgattttttaattaacgtataaatttagtatgtttgacgatttttagttatgtaggcgtggtgtacgcggttaatgatgtcggtacggcgggtattaggaatagcgatcgtagttattggcgtgcggtttggcggtagtttatttattatcgaggtatcgagatcggtatacgtagttattgttagcgtgcgggggatcggcgtggcggttatgattaattgatgcggatggaagttttgttgttggttttttttttataatgttagacgttgatgtacgttaaaacgatgttgttcgtcgataattattagcgttaggtcgttaaattgtatttgtttttggaagatggcgtgtgtatcgataattatttgtatttgatcgttggcgatggttttttgttgtgttagtcgtgttttatttttttgtttatcggcgagttagtttatttcgatatcgagcggtgtaaattagttgcggaagttattggcgtgttgttcggcgagtaattcggttggtgttattaatgttatttgtttgtcgtgggtaatcgtacgtaacgcggcgagggcggcgattagcgttttatcggaatttatatcgttttgtattagacgtattatcggtatatttagcgttatatcgcgttcgattttcgttattacgcgtgtttgtgcgttcgttggtttgaacggtaaggcggcgaggagtttattttttagcgtgttattggcgtttagcggttgggtatgaaaacgttgtgtttcggtacgtaaggttaatatgttgaggttgtgcgttagtagtttttttagaattagacgacgttgcgtcggatgttgttcggtttttagatcgttaagttgtagcgtcggtggcgggcggtgtaaa

SEQ ID NO: 8410 - DNA, 937 bp, Artificial Sequence
  chemically treated genomic DNA (Homo sapiens) CpG-island No: 8410
tttacaccgcccgccaccgacgctacaacttaacgatctaaaaaccgaacaacatccgacgcaacgtcgtctaattctaaaaaaactactaacgcacaacctcaacatattaaccttacgtaccgaaacacaacgttttcatacccaaccgctaaacgccaataacacgctaaaaaataaactcctcgccgccttaccgttcaaaccaacgaacgcacaaacacgcgtaataacgaaaatcgaacgcgatataacgctaaatataccgataatacgtctaatacaaaacgatataaattccgataaaacgctaatcgccgccctcgccgcgttacgtacgattacccacgacaaacaaataacattaataacaccaaccgaattactcgccgaacaacacgccaataacttccgcaactaatttacaccgctcgatatcgaaataaactaactcgccgataaacaaaaaaataaaacacgactaacacaacaaaaaaccatcgccaacgatcaaatacaaataattatcgatacacacgccatcttccaaaaacaaatacaatttaacgacctaacgctaataattatcgacgaacaacatcgttttaacgtacatcaacgtctaacattataaaaaaaaaaccaacaacaaaacttccatccgcatcaattaatcataaccgccacgccgatcccccgcacgctaacaataactacgtataccgatctcgatacctcgataataaataaactaccgccaaaccgcacgccaataactacgatcgctattcctaatacccgccgtaccgacatcattaaccgcgtacaccacgcctacataactaaaaatcgtcaaacatactaaatttatacgttaattaaaaaatcgaaattactaaaaacgcaaacgacgaaaactacctaaaaaaaattaaaa

SEQ ID NO: 8411 - DNA, 937 bp, Artificial Sequence
  chemically treated genomic DNA (Homo sapiens) CpG-island No: 8411
tttgtatcgttcgttatcgacgttatagtttagcgatttggagatcgggtagtattcggcgtaacgtcgtttgattttggaagaattgttggcgtataattttagtatgttagttttacgtgtcggagtatagcgtttttatgtttagtcgttgagcgttaatgatacgttgaaaaataaatttttcgtcgttttatcgtttaagttaacgggcgtataggtacgcgtagtggcggagatcgagcgcgatatggcgttggatgtgtcgatgatgcgtttggtgtagggcgatgtaggtttcggtaaaacgttggtcgtcgttttcgtcgcgttgcgtgcgattgtttacggtaaataggtagtattgatggtattaatcgaattattcgtcgagtagtacgttaataattttcgtaattggtttgtatcgttcggtatcgaagtgggttggttcgtcggtaagtagaaaggtaaagtacggttggtatagtaggaagttatcgttagcggttaggtgtagatgattgtcggtatatacgttattttttaggaataggtgtagtttaacggtttggcgttggtgattatcgacgaatagtatcgttttggcgtgtattagcgtttggtattgtgggagaaaggttagtagtagggtttttattcgtattagttgattatgatcgttacgtcgatttttcgtacgttggtaatgattgcgtatgtcgatttcgatatttcggtgatagatgagttgtcgttaggtcgtacgttagtgattacggtcgttatttttgatattcgtcgtatcgatattattgatcgcgtgtattacgtttgtataattgaaggtcgttaggtatattgggtttgtacgttgattgaagagtcggaattgttggaagcgtaggcggcggaagttatttgggaagagttgaaa

SEQ ID NO: 8412 - DNA, 937 bp, Artificial Sequence
  chemically treated genomic DNA (Homo sapiens) CpG-island No: 8412
tttcaactcttcccaaataacttccgccgcctacgcttccaacaattccgactcttcaatcaacgtacaaacccaatatacctaacgaccttcaattatacaaacgtaatacacgcgatcaataatatcgatacgacgaatatcaaaaataacgaccgtaatcactaacgtacgacctaacgacaactcatctatcaccgaaatatcgaaatcgacatacgcaatcattaccaacgtacgaaaaatcgacgtaacgatcataatcaactaatacgaataaaaaccctactactaacctttctcccacaataccaaacgctaatacacgccaaaacgatactattcgtcgataatcaccaacgccaaaccgttaaactacacctattcctaaaaaataacgtatataccgacaatcatctacacctaaccgctaacgataacttcctactataccaaccgtactttacctttctacttaccgacgaaccaacccacttcgataccgaacgatacaaaccaattacgaaaattattaacgtactactcgacgaataattcgattaataccatcaatactacctatttaccgtaaacaatcgcacgcaacgcgacgaaaacgacgaccaacgttttaccgaaacctacatcgccctacaccaaacgcatcatcgacacatccaacgccatatcgcgctcgatctccgccactacgcgtacctatacgcccgttaacttaaacgataaaacgacgaaaaatttatttttcaacgtatcattaacgctcaacgactaaacataaaaacgctatactccgacacgtaaaactaacatactaaaattatacgccaacaattcttccaaaatcaaacgacgttacgccgaatactacccgatctccaaatcgctaaactataacgtcgataacgaacgatacaaa

SEQ ID NO: 8413 - DNA, 640 bp, Artificial Sequence
  chemically treated genomic DNA (Homo sapiens) CpG-island No: 8413
tacgttcggttcggtcgtttcgttttcggtttcgggtagtatcgtcgcgttcgttcgtcgtagttttttttttatttgatgtacgggttggtcgtcgttaggatgtttttttgtatcgggatttttttttcgtcgaggattaggtgcgcgtcgtagaagcgagatttttcgcggaaagagttgagcgttcgtagtagacgcgcggcgtgttgagggttagatacggtattgtttttagttatcgcggcgttcgtttttttgtcgacgggttcggttttcgatatcgttcggtcggatttttcgagcggttcgagttttgcgcgcgcgttcgttcggttcggtttttcgcgttttgagtagaagttggagttttcgggacgtgtttgtgttattcgcggcgcgttgggtcggcgtttttaagaagtcgcgttatgaagttattttttcgcgacgttttcgtatcgtcgtttttcgttttttcgttttcgttgttggagatggttaattagaagtttttttttttcgttcgtttgattagttgcggttgggtgtagcggaaggtgtttacggatgagataggtcgttttcgcgatggagggatgtgcgggcgggttaggatttcgtggttaagtttgtggtt

SEQ ID NO: 8414 - DNA, 640 bp, Artificial Sequence
  chemically treated genomic DNA (Homo sapiens) CpG-island No: 8414
aaccacaaacttaaccacgaaatcctaacccgcccgcacatccctccatcgcgaaaacgacctatctcatccgtaaacaccttccgctacacccaaccgcaactaatcaaacgaacgaaaaaaaaaaacttctaattaaccatctccaacaacgaaaacgaaaaaacgaaaaacgacgatacgaaaacgtcgcgaaaaaataacttcataacgcgacttcttaaaaacgccgacccaacgcgccgcgaataacacaaacacgtcccgaaaactccaacttctactcaaaacgcgaaaaaccgaaccgaacgaacgcgcgcgcaaaactcgaaccgctcgaaaaatccgaccgaacgatatcgaaaaccgaacccgtcgacaaaaaaacgaacgccgcgataactaaaaacaataccgtatctaaccctcaacacgccgcgcgtctactacgaacgctcaactctttccgcgaaaaatctcgcttctacgacgcgcacctaatcctcgacgaaaaaaaaatcccgatacaaaaaaacatcctaacgacgaccaacccgtacatcaaataaaaaaaaaactacgacgaacgaacgcgacgatactacccgaaaccgaaaacgaaacgaccgaaccgaacgta

SEQ ID NO: 8415 - DNA, 640 bp, Artificial Sequence
  chemically treated genomic DNA (Homo sapiens) CpG-island No: 8415
ggttataggtttaattacggaattttagttcgttcgtatatttttttatcgcgggagcgatttattttattcgtagatatttttcgttgtatttagtcgtagttggttaggcgggcggaggaaggaggtttttgattggttatttttagtagcggaggcgagaaggcggggagcgacggtgcgggggcgtcgcggagaaatgattttatgacgcggttttttaaaggcgtcggtttagcgcgtcgcggatagtataggtacgtttcgggggttttagtttttgtttagagcgcggagagtcgggtcgggcgggcgcgcgcgtaggattcgggtcgttcgaggggttcggtcggacggtgtcgggagtcggattcgtcggtagaggagcgggcgtcgcgatggttgagggtagtgtcgtgtttgatttttagtacgtcgcgcgtttgttgcgagcgtttagtttttttcgcgaggagtttcgtttttgcgacgcgtatttggttttcgacggggaggagatttcggtgtagaagaatattttggcggcggttagttcgtatattaggtggggagggggttacggcgggcgggcgcggcggtgttgttcggagtcggaggcggggcggtcgggtcgggcgtg

SEQ ID NO: 8416 - DNA, 640 bp, Artificial Sequence
  chemically treated genomic DNA (Homo sapiens) CpG-island No: 8416
cacgcccgacccgaccgccccgcctccgactccgaacaacaccgccgcgcccgcccgccgtaaccccctccccacctaatatacgaactaaccgccgccaaaatattcttctacaccgaaatctcctccccgtcgaaaaccaaatacgcgtcgcaaaaacgaaactcctcgcgaaaaaaactaaacgctcgcaacaaacgcgcgacgtactaaaaatcaaacacgacactaccctcaaccatcgcgacgcccgctcctctaccgacgaatccgactcccgacaccgtccgaccgaacccctcgaacgacccgaatcctacgcgcgcgcccgcccgacccgactctccgcgctctaaacaaaaactaaaacccccgaaacgtacctatactatccgcgacgcgctaaaccgacgcctttaaaaaaccgcgtcataaaatcatttctccgcgacgcccccgcaccgtcgctccccgccttctcgcctccgctactaaaaataaccaatcaaaaacctccttcctccgcccgcctaaccaactacgactaaatacaacgaaaaatatctacgaataaaataaatcgctcccgcgataaaaaaatatacgaacgaactaaaattccgtaattaaacctataacc

SEQ ID NO: 8417 - DNA, 508 bp, Artificial Sequence
  chemically treated genomic DNA (Homo sapiens) CpG-island No: 8417
agacggcgtttttaacgttcgattcgcgtggtcgtggtagcgttacgcgagttttttaggcgatcgtagggttatagtagtttagtcgtcggtgttttttcggaaattatgattttcggcgcgggtttatggagttatggtttatagggttttgggtcgcgcggggttattttagtcgcggagggcgcgtaggttgtttttcgtttttacgttttcgtttttttgtatttatttgtgttatagttttttgtgttgttgcgacgatttgggtcggagtcgttttttcggcgcgtttcgttgttttcgcggttttagcgcgggcggttagaaatttttttagaagtttcgtttttgtgattttttcgggtcgacgtttagcgagtttagcgtttttagcgcgttcgtcgtcgtcgtgttcgtttttcgttttttcggttttaattatttcggtttatttaagttgggtattaagcggttgttttaagtttttattgtgggcgtgaagaag

SEQ ID NO: 8418 - DNA, 508 bp, Artificial Sequence
  chemically treated genomic DNA (Homo sapiens) CpG-island No: 8418
cttcttcacgcccacaataaaaacttaaaacaaccgcttaatacccaacttaaataaaccgaaataattaaaaccgaaaaaacgaaaaacgaacacgacgacgacgaacgcgctaaaaacgctaaactcgctaaacgtcgacccgaaaaaatcacaaaaacgaaacttctaaaaaaatttctaaccgcccgcgctaaaaccgcgaaaacaacgaaacgcgccgaaaaaacgactccgacccaaatcgtcgcaacaacacaaaaaactataacacaaataaatacaaaaaaacgaaaacgtaaaaacgaaaaacaacctacgcgccctccgcgactaaaataaccccgcgcgacccaaaaccctataaaccataactccataaacccgcgccgaaaatcataatttccgaaaaaacaccgacgactaaactactataaccctacgatcgcctaaaaaactcgcgtaacgctaccacgaccacgcgaatcgaacgttaaaaacgccgtct

SEQ ID NO: 8419 - DNA, 508 bp, Artificial Sequence
  chemically treated genomic DNA (Homo sapiens) CpG-island No: 8419
tttttttacgtttataatgagggtttggggtaatcgtttggtatttagtttgggtgagtcggagtggttggaatcggagaggcgaggggcgggtacggcggcggcgggcgcgttgggagcgttgggttcgttgggcgtcggttcggagggattataggggcgggatttttggagaagtttttggtcgttcgcgttggggtcgcggaggtagcgaggcgcgtcgaggaggcggtttcgatttaggtcgtcgtagtagtataggaagttgtaatataggtaagtgtaggagagcgagagcgtgaaggcgaagagtagtttgcgcgtttttcgcggttgaggtggtttcgcgcggtttaggattttataggttatggttttatgggttcgcgtcgggggttatggttttcgagggggtatcggcggttgagttgttgtggttttgcggtcgtttagagggttcgcgtggcgttgttacggttacgcgggtcgggcgttgggggcgtcgttt

SEQ ID NO: 8420 - DNA, 508 bp, Artificial Sequence
  chemically treated genomic DNA (Homo sapiens) CpG-island No: 8420
aaacgacgcccccaacgcccgacccgcgtaaccgtaacaacgccacgcgaaccctctaaacgaccgcaaaaccacaacaactcaaccgccgataccccctcgaaaaccataacccccgacgcgaacccataaaaccataacctataaaatcctaaaccgcgcgaaaccacctcaaccgcgaaaaacgcgcaaactactcttcgccttcacgctctcgctctcctacacttacctatattacaacttcctatactactacgacgacctaaatcgaaaccgcctcctcgacgcgcctcgctacctccgcgaccccaacgcgaacgaccaaaaacttctccaaaaatcccgcccctataatccctccgaaccgacgcccaacgaacccaacgctcccaacgcgcccgccgccgccgtacccgcccctcgcctctccgattccaaccactccgactcacccaaactaaataccaaacgattaccccaaaccctcattataaacgtaaaaaaa

SEQ ID NO: 8421 - DNA, 535 bp, Artificial Sequence
  chemically treated genomic DNA (Homo sapiens) CpG-island No: 8421
  unsure (313..314, 326, 337, 354, 410)
tattagatgtatacgagcgcgtgagagtggattttgtatcggtttttggtagtagattacgggagatttttttcgttagtggattacgtagggcggaggtataaatgcgggtaattacgttttggcgaatgtgttttattagcggcgtatggtaattatttagggagttggacgttaggttaggtttttaaagtttattttcgcgatgacgtttattattatattgacggttaggttatcgttacggaaagcgtgatggaaggaaatcgttatgtcgttttgtaaattagagcgacgaatcgttttttttagnngttggcggtatnaggggttattnttgggcgttcggttaanttttcgggcgttttggtgtatttcggggatttttttatttttagttttcgttaggnttatttcgggttttttacggcgttgtttttcgtggggatattatttttcgggcggtttcgggtataggggtttttttttatttgggggggtaaaaaataaagggggttcgggggggtaaaagtaa

SEQ ID NO: 8422 - DNA, 535 bp, Artificial Sequence
  chemically treated genomic DNA (Homo sapiens) CpG-island No: 8422
  unsure (126, 182, 199, 210, 222..)
ttacttttacccccccgaaccccctttattttttacccccccaaataaaaaaaaacccctatacccgaaaccgcccgaaaaataatatccccacgaaaaacaacgccgtaaaaaacccgaaataancctaacgaaaactaaaaataaaaaaatccccgaaatacaccaaaacgcccgaaaanttaaccgaacgcccaanaataacccctnataccgccaacnnctaaaaaaaacgattcgtcgctctaatttacaaaacgacataacgatttccttccatcacgctttccgtaacgataacctaaccgtcaatataataataaacgtcatcgcgaaaataaactttaaaaacctaacctaacgtccaactccctaaataattaccatacgccgctaataaaacacattcgccaaaacgtaattacccgcatttatacctccgccctacgtaatccactaacgaaaaaaatctcccgtaatctactaccaaaaaccgatacaaaatccactctcacgcgctcgtatacatctaata

SEQ ID NO: 8423 - DNA, 535 bp, Artificial Sequence
  chemically treated genomic DNA (Homo sapiens) CpG-island No: 8423
  unsure (126, 182, 199, 210, 222..)
ttatttttgttttttcgggttttttttgttttttgtttttttaaatgggaaaaaatttttgtgttcggggtcgttcgagaagtaatgtttttacgaagaatagcgtcgtggaaagttcgaggtggntttggcgaggattgagaatgaaggggttttcggggtgtattagggcgttcggaaanttggtcgggcgtttaangataatttttngtgtcgttaatnnttggaagaagcgattcgtcgttttggtttataggacggtatgacggtttttttttattacgtttttcgtggcggtgatttgatcgttaatatggtgatggacgttatcgcgaagatgggttttaaaaatttgatttggcgtttagttttttgagtgattgttatgcgtcgttggtagaatatattcgttagggcgtggttattcgtatttatattttcgttttgcgtggtttattggcggaagagatttttcgtggtttgttgttaagaatcggtgtaagatttatttttacgcgttcgtgtgtatttggta

SEQ ID NO: 8424 - DNA, 535 bp, Artificial Sequence
  chemically treated genomic DNA (Homo sapiens) CpG-island No: 8424
  unsure (313..314, 326, 337, 354, 410)
taccaaatacacacgaacgcgtaaaaataaatcttacaccgattcttaacaacaaaccacgaaaaatctcttccgccaataaaccacgcaaaacgaaaatataaatacgaataaccacgccctaacgaatatattctaccaacgacgcataacaatcactcaaaaaactaaacgccaaatcaaatttttaaaacccatcttcgcgataacgtccatcaccatattaacgatcaaatcaccgccacgaaaaacgtaataaaaaaaaaccgtcataccgtcctataaaccaaaacgacgaatcgcttcttccaannattaacgacacnaaaaattatcnttaaacgcccgaccaantttccgaacgccctaatacaccccgaaaaccccttcattctcaatcctcgccaaanccacctcgaactttccacgacgctattcttcgtaaaaacattacttctcgaacgaccccgaacacaaaaattttttcccatttaaaaaaacaaaaaacaaaaaaaacccgaaaaaacaaaaataa

SEQ ID NO: 8425 - DNA, 1094 bp, Artificial Sequence
  chemically treated genomic DNA (Homo sapiens) CpG-island No: 8425
  unsure (138, 220..)
cgataatcggatcgtttattattttgtcgtttagggaaattacgtcgaggttttcgcgagcggcggttttagcggtttttacgacgcggcgggcgtgatttatttttttttgggtcggtgcgtagaggttgtgtagtnagattaatttgacgcgggttgattagcgatttgtcgttaaagtttagttgtttgatgtgggcggttttttgtagaaattcgnngtttcgttgttagcgtcggaatagacggtatcgaacgtttgaatattcgtagagcgcgcggtttgtaaaatggaatagcgtgcgaatagtagtttagtttttttcggggagcgttttgtacgtaggttgcgtatatagttttttgtatcgagggcgatatcgattaaacgttcggaagcgtgagcgatttttattgcgcgggtaatttttagcggagatttaatcgtcgttagtaggtcggtgttgtcgggtttacgattataggttttttcgatacgtaggattttttttttaatatttagaatattttgagcggtatcggttttcggtagacgtataacgttcgtattatcgcgaacgacggtttttaggtcgttaatattttattcggaatttagcgcgttgatacgtataatggttttaatatcgcgatatagcggatgttgtagcgcgtggtaaattatgcggcgggcggtgttttttttacgtaatgttacggagttttcgaggttaaatattagggtattagtcgggtagatgaaggagttgttgattatcgcggtattggtattaggtataaataatatgttgcggcgggtgcgagttttacgttgttgtagcgaagcggaaattattggtaatttttttatggtagagtcgggatatcgttggcgcgtgttagtagggtttttagtcgtgtacgtaaaatgtagtttagtgcgtttttgttatcgatatttagttgtacgtcgcgtacgttgtagcgggcgagaacgtttagaatggtggtgcgaattgtatcgttaaattgttttttaacgttgttattgatttgtaggtcgatattttgcgtatcgagtggggcgatgcgta

SEQ ID NO: 8426 - DNA, 1094 bp, Artificial Sequence
  chemically treated genomic DNA (Homo sapiens) CpG-island No: 8426
  unsure (874..875, 957)
tacgcatcgccccactcgatacgcaaaatatcgacctacaaatcaataacaacgttaaaaaacaatttaacgatacaattcgcaccaccattctaaacgttctcgcccgctacaacgtacgcgacgtacaactaaatatcgataacaaaaacgcactaaactacattttacgtacacgactaaaaaccctactaacacgcgccaacgatatcccgactctaccataaaaaaattaccaataatttccgcttcgctacaacaacgtaaaactcgcacccgccgcaacatattatttatacctaataccaataccgcgataatcaacaactccttcatctacccgactaataccctaatatttaacctcgaaaactccgtaacattacgtaaaaaaaacaccgcccgccgcataatttaccacgcgctacaacatccgctatatcgcgatattaaaaccattatacgtatcaacgcgctaaattccgaataaaatattaacgacctaaaaaccgtcgttcgcgataatacgaacgttatacgtctaccgaaaaccgataccgctcaaaatattctaaatattaaaaaaaaaatcctacgtatcgaaaaaacctataatcgtaaacccgacaacaccgacctactaacgacgattaaatctccgctaaaaattacccgcgcaataaaaatcgctcacgcttccgaacgtttaatcgatatcgccctcgatacaaaaaactatatacgcaacctacgtacaaaacgctccccgaaaaaaactaaactactattcgcacgctattccattttacaaaccgcgcgctctacgaatattcaaacgttcgataccgtctattccgacgctaacaacgaaacnncgaatttctacaaaaaaccgcccacatcaaacaactaaactttaacgacaaatcgctaatcaacccgcgtcaaattaatctnactacacaacctctacgcaccgacccaaaaaaaaataaatcacgcccgccgcgtcgtaaaaaccgctaaaaccgccgctcgcgaaaacctcgacgtaatttccctaaacgacaaaataataaacgatccgattatcg

SEQ ID NO: 8427 - DNA, 1094 bp, Artificial Sequence
  chemically treated genomic DNA (Homo sapiens) CpG-island No: 8427
  unsure (874..875, 957)
tacgtatcgttttattcgatacgtaggatatcgatttgtaaattaatagtagcgttgagaaatagtttggcgatgtaattcgtattattattttggacgttttcgttcgttataacgtgcgcggcgtatagttgaatgtcgatgataaaggcgtattggattgtattttacgtgtacgattggaagttttgttggtacgcgttagcggtatttcggttttgttatgggaggattgttaatgattttcgtttcgttgtaataacgtaaaattcgtattcgtcgtagtatgttgtttgtgtttggtgttaatgtcgcgatggttagtaatttttttatttattcggttgatgttttgatgtttgatttcgaagatttcgtagtattgcgtgaaaaagatatcgttcgtcgtatggtttattacgcgttgtaatattcgttgtatcgcgatattgaaattattgtgcgtgttaacgcgttggatttcgaatggggtgttaacgatttggaagtcgtcgttcgcggtggtgcggacgttgtgcgtttgtcgaaaatcgatatcgtttaggatgttttggatattgaaaaagagattttgcgtatcgaaaaagtttgtggtcgtgaattcggtagtatcggtttgttggcggcgattgaattttcgttggggattattcgcgtagtggaaatcgtttacgttttcgagcgtttgatcggtatcgttttcggtgtagaagattatgtgcgtaatttgcgtatagaacgtttttcggaaggaattgaattgttgttcgtacgttgttttattttgtaggtcgcgcgttttgcgggtatttaggcgttcgatatcgtttatttcgacgttaataacgaagtnncggatttttgtaagaagtcgtttatattaaatagttgggttttgacggtaaatcgttgattaattcgcgttagattgatttngttgtataatttttacgtatcgatttagaaagaagtggattacgttcgtcgcgtcgtagaagtcgttgaagtcgtcgttcgcgaaggtttcggcgtggtttttttgaacggtaagatggtggacggttcggttatcg

SEQ ID NO: 8428 - DNA, 1094 bp, Artificial Sequence
  chemically treated genomic DNA (Homo sapiens) CpG-island No: 8428
  unsure (138, 220..)
cgataaccgaaccgtccaccatcttaccgttcaaaaaaaccacgccgaaaccttcgcgaacgacgacttcaacgacttctacgacgcgacgaacgtaatccacttctttctaaatcgatacgtaaaaattatacaacnaaatcaatctaacgcgaattaatcaacgatttaccgtcaaaacccaactatttaatataaacgacttcttacaaaaatccgnnacttcgttattaacgtcgaaataaacgatatcgaacgcctaaatacccgcaaaacgcgcgacctacaaaataaaacaacgtacgaacaacaattcaattccttccgaaaaacgttctatacgcaaattacgcacataatcttctacaccgaaaacgataccgatcaaacgctcgaaaacgtaaacgatttccactacgcgaataatccccaacgaaaattcaatcgccgccaacaaaccgatactaccgaattcacgaccacaaactttttcgatacgcaaaatctctttttcaatatccaaaacatcctaaacgatatcgattttcgacaaacgcacaacgtccgcaccaccgcgaacgacgacttccaaatcgttaacaccccattcgaaatccaacgcgttaacacgcacaataatttcaatatcgcgatacaacgaatattacaacgcgtaataaaccatacgacgaacgatatctttttcacgcaatactacgaaatcttcgaaatcaaacatcaaaacatcaaccgaataaataaaaaaattactaaccatcgcgacattaacaccaaacacaaacaacatactacgacgaatacgaattttacgttattacaacgaaacgaaaatcattaacaatcctcccataacaaaaccgaaataccgctaacgcgtaccaacaaaacttccaatcgtacacgtaaaatacaatccaatacgcctttatcatcgacattcaactatacgccgcgcacgttataacgaacgaaaacgtccaaaataataatacgaattacatcgccaaactatttctcaacgctactattaatttacaaatcgatatcctacgtatcgaataaaacgatacgta

SEQ ID NO: 8429 - DNA, 568 bp, Artificial Sequence
  chemically treated genomic DNA (Homo sapiens) CpG-island No: 8429
cggataggtcgttacgtagacgatagttggcgcgttggaaaaagaggtagaaggttgcgtgtttttttgttattttagcgtcgagagtaatttattaggcgtcgtcgtcgattgtatacgcgttcgaattttattattcgtaaggcgcgtggttagcgttgttagtagttgtatatgcgtagtattcgttttattggggggaatcgttagtagtattattaaattaattgttttcgggttattaacgtttttttattgaagcggttcgttgagtgtggcgatcgtaaacgtcgttttttttatcgtagtagttttgttatgcggtatagttaaaattttttatttaaggcggtcgggttaaggtttttacggcgatatattttttttagaaattgtttagtattggaaattttttttagagtagtaagacgttgagttaacgcgtggatggtttttttacggttggtaaagcgcgtatttagatataacgtatcgcggtgggttagagtcgttagatttattatgatttttatttgatcgtttttatagtcgcgttagtgtgttcgat

SEQ ID NO: 8430 - DNA, 568 bp, Artificial Sequence
  chemically treated genomic DNA (Homo sapiens) CpG-island No: 8430
atcgaacacactaacgcgactataaaaacgatcaaataaaaatcataataaatctaacgactctaacccaccgcgatacgttatatctaaatacgcgctttaccaaccgtaaaaaaaccatccacgcgttaactcaacgtcttactactctaaaaaaaatttccaatactaaacaatttctaaaaaaaatatatcgccgtaaaaaccttaacccgaccgccttaaataaaaaattttaactataccgcataacaaaactactacgataaaaaaaacgacgtttacgatcgccacactcaacgaaccgcttcaataaaaaaacgttaataacccgaaaacaattaatttaataatactactaacgattccccccaataaaacgaatactacgcatatacaactactaacaacgctaaccacgcgccttacgaataataaaattcgaacgcgtatacaatcgacgacgacgcctaataaattactctcgacgctaaaataacaaaaaaacacgcaaccttctacctctttttccaacgcgccaactatcgtctacgtaacgacctatccg

SEQ ID NO: 8431 - DNA, 568 bp, Artificial Sequence
  chemically treated genomic DNA (Homo sapiens) CpG-island No: 8431
atcgggtatattggcgcgattataaaaacgattaagtgaggattatgatgaatttgacgattttgatttatcgcgatgcgttgtgtttgaatgcgcgttttattagtcgtgaagaggttatttacgcgttgatttaacgttttgttgttttggggaaaatttttagtattgagtaatttttggaagaagtgtatcgtcgtgaaagttttggttcgatcgttttaggtgaagggttttggttgtgtcgtatggtaaaattgttgcggtaaaagaagcggcgtttgcggtcgttatatttagcgagtcgttttagtgggaaggcgttgatggttcggaagtagttgatttagtggtgttgttggcgattttttttaatgaagcgggtattacgtatatgtaattgttgatagcgttgattacgcgttttgcggatgatgagattcgggcgcgtatatagtcggcgacgacgtttgatgagttgttttcggcgttgggatgatagggaggtacgtaattttttgtttttttttttaacgcgttaattatcgtttgcgtaacggtttgttcg

SEQ ID NO: 8432 - DNA, 568 bp, Artificial Sequence
  chemically treated genomic DNA (Homo sapiens) CpG-island No: 8432
cgaacaaaccgttacgcaaacgataattaacgcgttaaaaaaaaaaacaaaaaattacgtacctccctatcatcccaacgccgaaaacaactcatcaaacgtcgtcgccgactatatacgcgcccgaatctcatcatccgcaaaacgcgtaatcaacgctatcaacaattacatatacgtaatacccgcttcattaaaaaaaatcgccaacaacaccactaaatcaactacttccgaaccatcaacgccttcccactaaaacgactcgctaaatataacgaccgcaaacgccgcttcttttaccgcaacaattttaccatacgacacaaccaaaacccttcacctaaaacgatcgaaccaaaactttcacgacgatacacttcttccaaaaattactcaatactaaaaattttccccaaaacaacaaaacgttaaatcaacgcgtaaataacctcttcacgactaataaaacgcgcattcaaacacaacgcatcgcgataaatcaaaatcgtcaaattcatcataatcctcacttaatcgtttttataatcgcgccaatatacccgat

SEQ ID NO: 8433 - DNA, 752 bp, Artificial Sequence
  chemically treated genomic DNA (Homo sapiens) CpG-island No: 8433
gttaagacgggatttattgattggcgtttagtcgcgcgttagtattcgttgttataacgtattaaatggcgtgtcgttgtttatttttgttttttttgtgttattcggtattggcgtaagcgaacgttttcgtaattttttatcgatagatagttataattgagatagcgcgatttattagtcggttgcggtataattttttacgtagtaagttgcgttagcgtcgtttgtttcgtagcgggtagttgttttcgtgttagttcgtttaggttatcgtcgtagtcgtcgagtattgcgggttgtagatcgacgagggtaatatgtgttggtagatgttcgcggatattcgttagcgttaatatttcggagaaattgttttgatgtaggtttatttttttcgcgttgagataagtcggaatgcgtttttcggtataggttcgtagcgttttaggttttagttcgtagttaatggtatcgagaattaatagatggttggcgttttcgatatattttagtaagtttagtttttgagtatcgttatcgataatttttatatattcgggttagtggtaatgggtatatagtcgtttcgttattcgtacgtcgaagtttttatcggtttatagtaggttgtttagttttatgattattacgcgttgttcgtttatgaacgttttttgttatttattttgttaaatttgtggttacggtagtcgttgattatggtggagattatcgtgtcgtcggatatg

SEQ ID NO: 8434 - DNA, 752 bp, Artificial Sequence
  chemically treated genomic DNA (Homo sapiens) CpG-island No: 8434
catatccgacgacacgataatctccaccataatcaacgactaccgtaaccacaaatttaacaaaataaataacaaaaaacgttcataaacgaacaacgcgtaataatcataaaactaaacaacctactataaaccgataaaaacttcgacgtacgaataacgaaacgactatatacccattaccactaacccgaatatataaaaattatcgataacgatactcaaaaactaaacttactaaaatatatcgaaaacgccaaccatctattaattctcgataccattaactacgaactaaaacctaaaacgctacgaacctataccgaaaaacgcattccgacttatctcaacgcgaaaaaaataaacctacatcaaaacaatttctccgaaatattaacgctaacgaatatccgcgaacatctaccaacacatattaccctcgtcgatctacaacccgcaatactcgacgactacgacgataacctaaacgaactaacacgaaaacaactacccgctacgaaacaaacgacgctaacgcaacttactacgtaaaaaattataccgcaaccgactaataaatcgcgctatctcaattataactatctatcgataaaaaattacgaaaacgttcgcttacgccaataccgaataacacaaaaaaaacaaaaataaacaacgacacgccatttaatacgttataacaacgaatactaacgcgcgactaaacgccaatcaataaatcccgtcttaac

SEQ ID NO: 8435 - DNA, 752 bp, Artificial Sequence
  chemically treated genomic DNA (Homo sapiens) CpG-island No: 8435
tatgttcgacgatacggtgatttttattatggttaacggttatcgtagttataaatttggtaaaataagtaataaggagcgtttatgagcgagtaacgcgtggtggttatggggttgggtaatttgttgtgggtcgatgaaggtttcggcgtgcgggtggcggaacggttgtatgtttattattattggttcgagtatgtggagattgtcgatggcggtatttagggattgaatttgttggggtatgtcgaaagcgttagttatttgttgattttcgatgttattgattacgggttggaatttggaacgttgcgaatttatgtcggagaacgtatttcggtttattttagcgcgaagaaaatgagtttgtattagaatagttttttcgaagtgttggcgttggcggatattcgcggatatttgttagtatatattgttttcgtcggtttgtaattcgtaatgttcgacgattacggcggtagtttgagcgaattggtacgggagtaattgttcgttgcggaataggcggcgttggcgtagtttgttgcgtggggaattgtgtcgtaatcggttaatgaatcgcgttgttttaattatgattgtttgtcgatggaaaattacgaaggcgttcgtttgcgttagtatcggatgatataggaggagtagggatgagtaacgatacgttatttgatgcgttgtggtaacgaatgttggcgcgcggttggacgttagttagtgaatttcgttttgat

SEQ ID NO: 8436 - DNA, 752 bp, Artificial Sequence
  chemically treated genomic DNA (Homo sapiens) CpG-island No: 8436
atcaaaacgaaattcactaactaacgtccaaccgcgcgccaacattcgttaccacaacgcatcaaataacgtatcgttactcatccctactcctcctatatcatccgatactaacgcaaacgaacgccttcgtaattttccatcgacaaacaatcataattaaaacaacgcgattcattaaccgattacgacacaattccccacgcaacaaactacgccaacgccgcctattccgcaacgaacaattactcccgtaccaattcgctcaaactaccgccgtaatcgtcgaacattacgaattacaaaccgacgaaaacaatatatactaacaaatatccgcgaatatccgccaacgccaacacttcgaaaaaactattctaatacaaactcattttcttcgcgctaaaataaaccgaaatacgttctccgacataaattcgcaacgttccaaattccaacccgtaatcaataacatcgaaaatcaacaaataactaacgctttcgacataccccaacaaattcaatccctaaataccgccatcgacaatctccacatactcgaaccaataataataaacatacaaccgttccgccacccgcacgccgaaaccttcatcgacccacaacaaattacccaaccccataaccaccacgcgttactcgctcataaacgctccttattacttattttaccaaatttataactacgataaccgttaaccataataaaaatcaccgtatcgtcgaacata

SEQ ID NO: 8437 - DNA, 1002 bp, Artificial Sequence
  chemically treated genomic DNA (Homo sapiens) CpG-island No: 8437
gacggcgtgatggtatagattcgtgagtatttggcgattttgtagttgatcggtaattcgatgttgatagtggcgttgattaaagtcgatcgcgtggacgaagcgcgtgttgatgaggttgaacgttaggtaaaggaggttttgcgggaatacggttttgttgaggtaaaattgtttattatcgtagtaatcgaaggtcggggaatggatgttttgcgcgagtatttgttttagttgtcggaacgcgagtacgttagttaatatagttttcgtttcgcgattgatcgcgtatttatcgtaaaaggtgtcgggttggtcgttatcggtacggcgttaagcggggaagtgaaggtaggcgatttattttggttgattggtgtaaataaatcgatgcgtgtacgtgcgttgtatgcgtaaaattagttaatagaaatcgttaatgtcgggtagcgtatcgcgtttaatattcgcgggtgatgcggaaaaagagtagattaatcgtggcgattggttgtttgtcgatgtgtcgttagagtcgtttatacgggtgattgtcgagttttaaatttatatatcgttgatttagtggtagtcgttgtatatttattacgtcgttagttacgttacgggacgcgttttattgttggaagataattttgttgaattggttttcgatatttcgttatggttggtagataacgatcgtttggtattgcgcgatatttttgttcgtaatacgttggtcggagcgcgcgtcgtgatgtttaattcgtcgcgtcgcggtaaacgtaagtcggaatatttgtaatggttggcgttttttgtacgggcgtagagcgatgtcgatgcgttatttgtttatttggaacgcggcgcggttaattttgcggatttcgtttgggcgcgttagtttaacggcgaagggatgcgcgaattgttgtaatagtttggttatatttaggttggttatagtttgttgaatgcgtcggttgtcgttcgttg

SEQ ID NO: 8438 - DNA, 1002 bp, Artificial Sequence
  chemically treated genomic DNA (Homo sapiens) CpG-island No: 8438
caacgaacgacaaccgacgcattcaacaaactataaccaacctaaatataaccaaactattacaacaattcgcgcatcccttcgccgttaaactaacgcgcccaaacgaaatccgcaaaattaaccgcgccgcgttccaaataaacaaataacgcatcgacatcgctctacgcccgtacaaaaaacgccaaccattacaaatattccgacttacgtttaccgcgacgcgacgaattaaacatcacgacgcgcgctccgaccaacgtattacgaacaaaaatatcgcgcaataccaaacgatcgttatctaccaaccataacgaaatatcgaaaaccaattcaacaaaattatcttccaacaataaaacgcgtcccgtaacgtaactaacgacgtaataaatatacaacgactaccactaaatcaacgatatataaatttaaaactcgacaatcacccgtataaacgactctaacgacacatcgacaaacaaccaatcgccacgattaatctactctttttccgcatcacccgcgaatattaaacgcgatacgctacccgacattaacgatttctattaactaattttacgcatacaacgcacgtacacgcatcgatttatttacaccaatcaaccaaaataaatcgcctaccttcacttccccgcttaacgccgtaccgataacgaccaacccgacaccttttacgataaatacgcgatcaatcgcgaaacgaaaactatattaactaacgtactcgcgttccgacaactaaaacaaatactcgcgcaaaacatccattccccgaccttcgattactacgataataaacaattttacctcaacaaaaccgtattcccgcaaaacctcctttacctaacgttcaacctcatcaacacgcgcttcgtccacgcgatcgactttaatcaacgccactatcaacatcgaattaccgatcaactacaaaatcgccaaatactcacgaatctataccatcacgccgtc

SEQ ID NO: 8439 - DNA, 1002 bp, Artificial Sequence
  chemically treated genomic DNA (Homo sapiens) CpG-island No: 8439
tagcgggcggtaatcggcgtatttaataagttataattagtttgaatataattaggttgttgtagtaattcgcgtattttttcgtcgttgagttggcgcgtttaggcgaaattcgtaaggttaatcgcgtcgcgttttagatgaatagataacgtatcggtatcgttttgcgttcgtgtaagagacgttagttattgtagatatttcggtttacgtttatcgcgacgcggcgggttaagtattacgacgcgcgtttcggttagcgtgttgcgggtagagatatcgcgtaatattaggcggtcgttatttgttagttataacggggtgtcgaagattagtttagtaaggttattttttagtagtgaaacgcgtttcgtgacgtggttggcggcgtggtgaatatgtagcggttgttattgggttagcggtgtatgggtttgaagttcgataattattcgtgtgaacggttttggcggtatatcggtaagtagttagtcgttacggttaatttgtttttttttcgtattattcgcggatgttaagcgcgatacgttgttcggtattggcggtttttgttggttggttttgcgtatgtagcgtacgtatacgtatcggtttatttatattagttagttagagtgaatcgtttatttttattttttcgtttaacgtcgtatcggtgacgattagttcggtattttttacggtaaatgcgcggttaatcgcgaggcggaaattatgttggttggcgtgttcgcgtttcggtaattgaagtagatgttcgcgtagggtatttatttttcgattttcggttgttgcggtgataaatagttttgttttagtaaaatcgtattttcgtagaattttttttatttggcgtttaattttattaatacgcgtttcgtttacgcgatcggttttggttagcgttattgttagtatcgggttatcggttagttgtaaaatcgttagatgtttacgggtttgtgttattacgtcgtt

SEQ ID NO: 8440 - DNA, 1002 bp, Artificial Sequence
  chemically treated genomic DNA (Homo sapiens) CpG-island No: 8440
aacgacgtaataacacaaacccgtaaacatctaacgattttacaactaaccgataacccgatactaacaataacgctaaccaaaaccgatcgcgtaaacgaaacgcgtattaataaaattaaacgccaaataaaaaaaattctacgaaaatacgattttactaaaacaaaactatttatcaccgcaacaaccgaaaatcgaaaaataaataccctacgcgaacatctacttcaattaccgaaacgcgaacacgccaaccaacataatttccgcctcgcgattaaccgcgcatttaccgtaaaaaataccgaactaatcgtcaccgatacgacgttaaacgaaaaaataaaaataaacgattcactctaactaactaatataaataaaccgatacgtatacgtacgctacatacgcaaaaccaaccaacaaaaaccgccaataccgaacaacgtatcgcgcttaacatccgcgaataatacgaaaaaaaaacaaattaaccgtaacgactaactacttaccgatataccgccaaaaccgttcacacgaataattatcgaacttcaaacccatacaccgctaacccaataacaaccgctacatattcaccacgccgccaaccacgtcacgaaacgcgtttcactactaaaaaataaccttactaaactaatcttcgacaccccgttataactaacaaataacgaccgcctaatattacgcgatatctctacccgcaacacgctaaccgaaacgcgcgtcgtaatacttaacccgccgcgtcgcgataaacgtaaaccgaaatatctacaataactaacgtctcttacacgaacgcaaaacgataccgatacgttatctattcatctaaaacgcgacgcgattaaccttacgaatttcgcctaaacgcgccaactcaacgacgaaaaaatacgcgaattactacaacaacctaattatattcaaactaattataacttattaaatacgccgattaccgcccgcta

SEQ ID NO: 8441 - DNA, 529 bp, Artificial Sequence
  chemically treated genomic DNA (Homo sapiens) CpG-island No: 8441
gcgtagtagtagttcggcgaagtttattaggttcgcgcggttatacgttttttgatacgtttgatatattttttgttaggtttgttttatcggattatcgtagttttgaatatgatgcggacgtaggtttttatttttttggttgttgatgtattatattgtttgtcgcggcggatattgtttttcgtcgaggtttatggttttgattagacgtttaagtaggcgtagttggtttttattgtcgaggatttggaaattttgcggtagattggcgattatatatggttgcgtacgtagataaacggtgcgttagttcgtggaaggtgtcgattaatatcggtttggttcgtgttattagttgttcgatacgatgacgtattttcgtcgacgtttggttggtaaaacgtatcgttataatcgagtatggcgagtagtttttacgtttattaaataggcgatacgatgtatagtacgcgcgtattatacggtcgcgtcgttatatagaagtgttgcgtgggcggtacgttcg

SEQ ID NO: 8442 - DNA, 529 bp, Artificial Sequence
  chemically treated genomic DNA (Homo sapiens) CpG-island No: 8442
cgaacgtaccgcccacgcaacacttctatataacgacgcgaccgtataatacgcgcgtactatacatcgtatcgcctatttaataaacgtaaaaactactcgccatactcgattataacgatacgttttaccaaccaaacgtcgacgaaaatacgtcatcgtatcgaacaactaataacacgaaccaaaccgatattaatcgacaccttccacgaactaacgcaccgtttatctacgtacgcaaccatatataatcgccaatctaccgcaaaatttccaaatcctcgacaataaaaaccaactacgcctacttaaacgtctaatcaaaaccataaacctcgacgaaaaacaatatccgccgcgacaaacaatataatacatcaacaaccaaaaaaataaaaacctacgtccgcatcatattcaaaactacgataatccgataaaacaaacctaacaaaaaatatatcaaacgtatcaaaaaacgtataaccgcgcgaacctaataaacttcgccgaactactactacgc

SEQ ID NO: 8443 - DNA, 529 bp, Artificial Sequence
  chemically treated genomic DNA (Homo sapiens) CpG-island No: 8443
cgaacgtgtcgtttacgtagtatttttgtgtggcggcgcggtcgtgtaatacgcgcgtattgtgtatcgtatcgtttgtttgatgagcgtggaaattgttcgttatattcgattatggcggtacgttttattaattaagcgtcggcggagatgcgttatcgtatcgggtaattgatggtacgagttaggtcggtattggtcggtattttttacgggttggcgtatcgtttgtttgcgtgcgtagttatatgtgatcgttaatttgtcgtaggatttttagattttcgatagtgaagattagttacgtttgtttaagcgtttgattaaagttatgaatttcgacgagaagtagtgttcgtcgcggtaggtaatgtggtatattaatagttagaaagatgaaggtttgcgttcgtattatatttaaagttacggtaattcggtggagtagatttggtagaaggtgtattaggcgtattaggaagcgtgtgatcgcgcgggtttggtggatttcgtcgagttgttgttgcgt

SEQ ID NO: 8444 - DNA, 529 bp, Artificial Sequence
  chemically treated genomic DNA (Homo sapiens) CpG-island No: 8444
acgcaacaacaactcgacgaaatccaccaaacccgcgcgatcacacgcttcctaatacgcctaatacaccttctaccaaatctactccaccgaattaccgtaactttaaatataatacgaacgcaaaccttcatctttctaactattaatataccacattacctaccgcgacgaacactacttctcgtcgaaattcataactttaatcaaacgcttaaacaaacgtaactaatcttcactatcgaaaatctaaaaatcctacgacaaattaacgatcacatataactacgcacgcaaacaaacgatacgccaacccgtaaaaaataccgaccaataccgacctaactcgtaccatcaattacccgatacgataacgcatctccgccgacgcttaattaataaaacgtaccgccataatcgaatataacgaacaatttccacgctcatcaaacaaacgatacgatacacaatacgcgcgtattacacgaccgcgccgccacacaaaaatactacgtaaacgacacgttcg

SEQ ID NO: 8445 - DNA, 605 bp, Artificial Sequence
  chemically treated genomic DNA (Homo sapiens) CpG-island No: 8445
gggtttttggtgtgtatcgttcggtcgttttcgttcgagggtcgcggggtttagagttcggtaggtttaggcggggtaggggatgttcgcggttcggtaggcgtacgtttattttcggtcgcgtaggcgtagtagcgggtcggttttttcgcgtttcgcggcggcggttagtgcgtaggcgcggcggtcgatgcgagtgtgtatgtgcgggtagaagatggcggcggcgggggaagtagcgtgagtagtcggaggatcgcgagttttaatgaaacgggtagttatggttttttatagttcgtaggtagtttcggtttgcgttttcggtcggaaggggttcgagtttcgggcgggcggattcgcggcgggcgggcgttcgcgttttgttcggagcgagcgtgtgggagtggggagggcgttgggatacgttgttcgggtttaggtcggagttattcgcggtttcgcgttcgcgcgtttttttttttgggttatcggaatttttagttcggggaggttaaggcggggcgtcggggtcggttgggaggttttggggcgttaaggttatttttcgggttgaatcgggggattagggttgtgtggggttt

SEQ ID NO: 8446 - DNA, 605 bp, Artificial Sequence
  chemically treated genomic DNA (Homo sapiens) CpG-island No: 8446
aaaccccacacaaccctaatcccccgattcaacccgaaaaataaccttaacgccccaaaacctcccaaccgaccccgacgccccgccttaacctccccgaactaaaaattccgataacccaaaaaaaaaaacgcgcgaacgcgaaaccgcgaataactccgacctaaacccgaacaacgtatcccaacgccctccccactcccacacgctcgctccgaacaaaacgcgaacgcccgcccgccgcgaatccgcccgcccgaaactcgaaccccttccgaccgaaaacgcaaaccgaaactacctacgaactataaaaaaccataactacccgtttcattaaaactcgcgatcctccgactactcacgctacttcccccgccgccgccatcttctacccgcacatacacactcgcatcgaccgccgcgcctacgcactaaccgccgccgcgaaacgcgaaaaaaccgacccgctactacgcctacgcgaccgaaaataaacgtacgcctaccgaaccgcgaacatcccctaccccgcctaaacctaccgaactctaaaccccgcgaccctcgaacgaaaacgaccgaacgatacacaccaaaaaccc

SEQ ID NO: 8447 - DNA, 605 bp, Artificial Sequence
  chemically treated genomic DNA (Homo sapiens) CpG-island No: 8447
gggttttatataattttggtttttcggtttaattcggggagtaattttggcgttttaaggttttttaatcggtttcgacgtttcgttttgattttttcggattaggggtttcggtggtttagggaagaaggcgcgcgggcgcgaagtcgcgggtggtttcggtttaggttcgggtagcgtgttttagcgttttttttatttttatacgttcgtttcgggtagggcgcggacgttcgttcgtcgcgggttcgttcgttcggggttcgggtttttttcggtcgaaggcgtagatcggggttatttgcgggttgtggagggttatggttgttcgttttattgggattcgcgatttttcggttgtttacgttgtttttttcgtcgtcgttattttttgttcgtatatatatattcgtatcggtcgtcgcgtttgcgtattggtcgtcgtcgcggggcgcggggaggtcggttcgttgttgcgtttgcgcggtcgaaggtgggcgtgcgtttgtcgggtcgcggatattttttgtttcgtttggatttgtcggattttgagtttcgcgattttcgggcggaagcggtcgggcggtgtatattaggagttt

SEQ ID NO: 8448 - DNA, 605 bp, Artificial Sequence
  chemically treated genomic DNA (Homo sapiens) CpG-island No: 8448
aaactcctaatatacaccgcccgaccgcttccgcccgaaaatcgcgaaactcaaaatccgacaaatccaaacgaaacaaaaaatatccgcgacccgacaaacgcacgcccaccttcgaccgcgcaaacgcaacaacgaaccgacctccccgcgccccgcgacgacgaccaatacgcaaacgcgacgaccgatacgaatatatatatacgaacaaaaaataacgacgacgaaaaaaacaacgtaaacaaccgaaaaatcgcgaatcccaataaaacgaacaaccataaccctccacaacccgcaaataaccccgatctacgccttcgaccgaaaaaaacccgaaccccgaacgaacgaacccgcgacgaacgaacgtccgcgccctacccgaaacgaacgtataaaaataaaaaaaacgctaaaacacgctacccgaacctaaaccgaaaccacccgcgacttcgcgcccgcgcgccttcttccctaaaccaccgaaacccctaatccgaaaaaatcaaaacgaaacgtcgaaaccgattaaaaaaccttaaaacgccaaaattactccccgaattaaaccgaaaaaccaaaattatataaaaccc

SEQ ID NO: 8449 - DNA, 1299 bp, Artificial Sequence
  chemically treated genomic DNA (Homo sapiens) CpG-island No: 8449
tcgtgaatgtgcgaaatcgtagagcggtggtagtatgacgaacgtgttggttgatagatattagttatattagcgaagggtatcgggtggcggttattataggtatgatgagaaaggtcggttgatcggtgagcgttagacgggtattattcgtagacggaagtattgttttggtagtatgagattagatatcgtataacgcgtaggggttggcgaatcgttgtatatcggatagtttgtcgtcgtggaatggttgatttacggtagcggttatttggtaggtatgaaatcggcgatatatcgttggtggagtatattcgcgatcgtttgtatcgggaacgttgcgtagtttcggtcgttatgaatttattatcgtttatatttttgcgggtagttatagagttagtatttgaatagtttgttgtttgatcgcgatttatttggaacgataacggcgaatttattcgtattagtagttcgcgttagttcggagttatagttatagtattatcggtaggttgatcggcgtttatatatcgtagcgaatttggatattcgtatttcgtatgttatagattcggtagtaatcgtttgttcgattcggagttgtattcggatagtatttttagtatggggcggataatcgtatcgttcgtgacgcgtattatttttatcggtatgacgttacggtaggttgacggagaaaatcgattttatttcggaaggggttatcgtacggatgatgagcgtatttatcggtattattacgatagttagtacggttggtgtattatacgcggatataatatgtagagtcgttggtcgaaagcgttatttttacgattcgttgggtcgtagggtggttaaacgggtgtggtacgtgaacgggatttgacgggttggatgtcgttgttacggaaatcgtaatgatttggtacggttgggacggcgatcgtttgattacgatatagaaagaagaattcgtatttagacgatgtattagtcggggagttttacgttatttatagggttgaaatcgttatcggtgagtaggcgaaaatatagcgttatagttggcggatattttttagtagttcgacggcgaagacggaggtagtgttcgtgtttttatacggtgttaggtgtagatgtttagatcggattggaaagtgaattatcggttgatcgggtgagtgaggaaagtcgtcgcgtgttaatatttgcggtttgacggtggagatagataataattcgatgtttttagaatattaagttatagagggttagtatatttaaaga

SEQ ID NO: 8450 - DNA, 1299 bp, Artificial Sequence
  chemically treated genomic DNA (Homo sapiens) CpG-island No: 8450
tctttaaatatactaaccctctataacttaatattctaaaaacatcgaattattatctatctccaccgtcaaaccgcaaatattaacacgcgacgactttcctcactcacccgatcaaccgataattcactttccaatccgatctaaacatctacacctaacaccgtataaaaacacgaacactacctccgtcttcgccgtcgaactactaaaaaatatccgccaactataacgctatattttcgcctactcaccgataacgatttcaaccctataaataacgtaaaactccccgactaatacatcgtctaaatacgaattcttctttctatatcgtaatcaaacgatcgccgtcccaaccgtaccaaatcattacgatttccgtaacaacgacatccaacccgtcaaatcccgttcacgtaccacacccgtttaaccaccctacgacccaacgaatcgtaaaaataacgctttcgaccaacgactctacatattatatccgcgtataatacaccaaccgtactaactatcgtaataataccgataaatacgctcatcatccgtacgataaccccttccgaaataaaatcgattttctccgtcaacctaccgtaacgtcataccgataaaaataatacgcgtcacgaacgatacgattatccgccccatactaaaaatactatccgaatacaactccgaatcgaacaaacgattactaccgaatctataacatacgaaatacgaatatccaaattcgctacgatatataaacgccgatcaacctaccgataatactataactataactccgaactaacgcgaactactaatacgaataaattcgccgttatcgttccaaataaatcgcgatcaaacaacaaactattcaaatactaactctataactacccgcaaaaatataaacgataataaattcataacgaccgaaactacgcaacgttcccgatacaaacgatcgcgaatatactccaccaacgatatatcgccgatttcatacctaccaaataaccgctaccgtaaatcaaccattccacgacgacaaactatccgatatacaacgattcgccaacccctacgcgttatacgatatctaatctcatactaccaaaacaatacttccgtctacgaataatacccgtctaacgctcaccgatcaaccgacctttctcatcatacctataataaccgccacccgatacccttcgctaatataactaatatctatcaaccaacacgttcgtcatactaccaccgctctacgatttcgcacattcacga

SEQ ID NO: 8451 - DNA, 1299 bp, Artificial Sequence
  chemically treated genomic DNA (Homo sapiens) CpG-island No: 8451
tttttgagtatgttgattttttgtggtttaatattttgggaatatcggattattatttgtttttatcgttaggtcgtagatgttagtacgcggcggttttttttatttattcggttagtcgatgatttattttttagttcggtttgagtatttgtatttagtatcgtgtgggaatacgagtattgttttcgttttcgtcgtcggattgttgaagggtattcgttagttgtggcgttgtgttttcgtttgtttatcggtggcggttttaattttgtgagtggcgtgaagtttttcggttgatatatcgtttggatgcgggtttttttttttgtatcgtggttaggcggtcgtcgttttagtcgtattaggttattgcggttttcgtgatagcgatatttagttcgttaggtttcgtttacgtgttatattcgtttggttattttgcggtttagcgggtcgtaaagatagcgttttcgattagcggttttgtatattgtgttcgcgtgtagtgtattagtcgtgttgattgtcgtaatggtatcggtgggtgcgtttattattcgtgcggtaatttttttcgggatgaggtcggtttttttcgttagtttgtcgtgacgttatatcggtaaagatagtgcgcgttacgggcgatacggttattcgttttatgttgagggtgttgttcgggtgtagtttcgggtcgggtaggcggttattgtcgggtttgtggtatacgggatgcggatatttagattcgttgcggtgtgtgaacgtcggttagtttgtcggtggtgttgtagttgtaatttcgggttggcgcgggttgttgatgcggatgagttcgtcgttgtcgttttaggtgaatcgcggttagatagtaggttgtttaggtgttggttttgtaattgttcgtaggggtataagcggtggtgagtttataacggtcgaagttgcgtagcgttttcggtgtaggcggtcgcgggtgtattttattagcggtgtgtcgtcggttttatgtttgttaggtaatcgttgtcgtaggttagttattttacggcggtaggttgttcggtatatagcggttcgttagtttttgcgcgttgtacgatgtttggttttatgttgttagagtagtgttttcgtttgcgggtgatgttcgtttgacgtttatcggttagtcggttttttttattatatttgtaatgatcgttattcggtgtttttcgttgatatggttgatgtttgttagttagtacgttcgttatattgttatcgttttgcggtttcgtatatttacgg

SEQ ID NO: 8452 - DNA, 1299 bp, Artificial Sequence
  chemically treated genomic DNA (Homo sapiens) CpG-island No: 8452
ccgtaaatatacgaaaccgcaaaacgataacaatataacgaacgtactaactaacaaacatcaaccatatcaacgaaaaacaccgaataacgatcattacaaatataataaaaaaaaccgactaaccgataaacgtcaaacgaacatcacccgcaaacgaaaacactactctaacaacataaaaccaaacatcgtacaacgcgcaaaaactaacgaaccgctatataccgaacaacctaccgccgtaaaataactaacctacgacaacgattacctaacaaacataaaaccgacgacacaccgctaataaaatacacccgcgaccgcctacaccgaaaacgctacgcaacttcgaccgttataaactcaccaccgcttatacccctacgaacaattacaaaaccaacacctaaacaacctactatctaaccgcgattcacctaaaacgacaacgacgaactcatccgcatcaacaacccgcgccaacccgaaattacaactacaacaccaccgacaaactaaccgacgttcacacaccgcaacgaatctaaatatccgcatcccgtataccacaaacccgacaataaccgcctacccgacccgaaactacacccgaacaacaccctcaacataaaacgaataaccgtatcgcccgtaacgcgcactatctttaccgatataacgtcacgacaaactaacgaaaaaaaccgacctcatcccgaaaaaaattaccgcacgaataataaacgcacccaccgataccattacgacaatcaacacgactaatacactacacgcgaacacaatatacaaaaccgctaatcgaaaacgctatctttacgacccgctaaaccgcaaaataaccaaacgaatataacacgtaaacgaaacctaacgaactaaatatcgctatcacgaaaaccgcaataacctaatacgactaaaacgacgaccgcctaaccacgatacaaaaaaaaaaacccgcatccaaacgatatatcaaccgaaaaacttcacgccactcacaaaattaaaaccgccaccgataaacaaacgaaaacacaacgccacaactaacgaatacccttcaacaatccgacgacgaaaacgaaaacaatactcgtattcccacacgatactaaatacaaatactcaaaccgaactaaaaaataaatcatcgactaaccgaataaataaaaaaaaccgccgcgtactaacatctacgacctaacgataaaaacaaataataatccgatattcccaaaatattaaaccacaaaaaatcaacatactcaaaaa

SEQ ID NO: 8453 - DNA, 579 bp, Artificial Sequence
  chemically treated genomic DNA (Homo sapiens) CpG-island No: 8453
cggacgtggggttttcgggaagggatagcgtagttggttaagttggggttcgaatttcgcggttaggagtggggatgtttaggattcgggtttgcgtgaggagaggtttcgcgcgttttttacgattcggttggggaggtttcgtagaagggattttcgtttcgttttttatattatttttcgatattaagttcgagtcgtttttttagtattttttagtcgtgtcgcggtttattattttattcgtttcgggttaatcgggttattatttttagtatagatttcgcgggagtagaggaagagggagaggtttcgttatcggaagtaataagatagagtgggggaagcgtgtttcggtttcgtgattatagaggagaggtcgttttttttttataattttttttaatttcgcgattttttcgttgtttagagcggttatttttagtcggaggaagtgggcgtatgcgtaatatcgtcggtttcgtttttttttttttatttagagatcgagtattcgggttcggtagttatagtttaaggggtgacgggtgtgtgttagttttcgttttttttgggcgg

SEQ ID NO: 8454 - DNA, 579 bp, Artificial Sequence
  chemically treated genomic DNA (Homo sapiens) CpG-island No: 8454
ccgcccaaaaaaaacgaaaactaacacacacccgtcaccccttaaactataactaccgaacccgaatactcgatctctaaataaaaaaaaaaaaacgaaaccgacgatattacgcatacgcccacttcctccgactaaaaataaccgctctaaacaacgaaaaaatcgcgaaattaaaaaaaattataaaaaaaaaacgacctctcctctataatcacgaaaccgaaacacgcttcccccactctatcttattacttccgataacgaaacctctccctcttcctctactcccgcgaaatctatactaaaaataataacccgattaacccgaaacgaataaaataataaaccgcgacacgactaaaaaatactaaaaaaacgactcgaacttaatatcgaaaaataatataaaaaacgaaacgaaaatcccttctacgaaacctccccaaccgaatcgtaaaaaacgcgcgaaacctctcctcacgcaaacccgaatcctaaacatccccactcctaaccgcgaaattcgaaccccaacttaaccaactacgctatcccttcccgaaaaccccacgtccg

SEQ ID NO: 8455 - DNA, 579 bp, Artificial Sequence
  chemically treated genomic DNA (Homo sapiens) CpG-island No: 8455
tcgtttaggaggagcggaaattgatatatattcgttattttttgggttgtgattgtcgagttcgggtattcggtttttgggtgaagaggaaggggcgggatcggcggtattacgtatgcgtttatttttttcggttgggagtggtcgttttaggtagcggggaggtcgcggggttgaggggggttgtgaaaggagagcggttttttttttatggttacggggtcggggtacgttttttttattttgttttgttattttcggtagcgaagtttttttttttttttttgttttcgcggggtttgtgttgagaataatggttcggttggttcgggacgagtggaatggtaagtcgcgatacggttggggggtgttgagggggcgattcgggtttgatatcggggagtgatgtggaagacggagcgggaattttttttgcggagtttttttagtcgggtcgtaggaggcgcgcggggtttttttttacgtaggttcgagttttgagtatttttatttttggtcgcggggttcggattttagtttggttaattgcgttattttttttcgagagttttacgttcg

SEQ ID NO: 8456 - DNA, 579 bp, Artificial Sequence
  chemically treated genomic DNA (Homo sapiens) CpG-island No: 8456
cgaacgtaaaactctcgaaaaaaaataacgcaattaaccaaactaaaatccgaaccccgcgaccaaaaataaaaatactcaaaactcgaacctacgtaaaaaaaaaccccgcgcgcctcctacgacccgactaaaaaaactccgcaaaaaaaattcccgctccgtcttccacatcactccccgatatcaaacccgaatcgccccctcaacaccccccaaccgtatcgcgacttaccattccactcgtcccgaaccaaccgaaccattattctcaacacaaaccccgcgaaaacaaaaaaaaaaaaaaaaacttcgctaccgaaaataacaaaacaaaataaaaaaaacgtaccccgaccccgtaaccataaaaaaaaaaccgctctcctttcacaacccccctcaaccccgcgacctccccgctacctaaaacgaccactcccaaccgaaaaaaataaacgcatacgtaataccgccgatcccgccccttcctcttcacccaaaaaccgaatacccgaactcgacaatcacaacccaaaaaataacgaatatatatcaatttccgctcctcctaaacga

SEQ ID NO: 8457 - DNA, 541 bp, Artificial Sequence
  chemically treated genomic DNA (Homo sapiens) CpG-island No: 8457
  unsure (398, 465, 515)
tcgtttagcgtttgaattatagtggtgaaggtaacgaatcggtcgagcggatgatgaaggattattttcgcgttatacgtcgcgttagtgaatttaattagatgttgttgtaattgttcgatgaagttattttcgtttttttcgtcgacgaaaaattacgtttaatcgacgatgagttttagttacgcggtacgttaatcgatttgcgtgatgaaatattatttatgcgttagtcggaagttattttgcgtatgttttatattatggtgtataatagtgcgattatcggtatttattttattacgttgcgttagttacgttatgttcgtcgttatttgtaataatcgttgtgtaatatttcggaagtacgaaaattgtttttgagtattttgcgttanttcggagcggtgcggcgtcggttattgttaatgtatcggtataacgtgttcggcgcgtatatgtcgnaatggtttatatcgtcgggtaaatttagttgatttgtttacgttatacgngggtgagatataattcgagggagtat

SEQ ID NO: 8458 - DNA, 541 bp, Artificial Sequence
  chemically treated genomic DNA (Homo sapiens) CpG-island No: 8458
  unsure (27, 77, 144)
atactccctcgaattatatctcacccncgtataacgtaaacaaatcaactaaatttacccgacgatataaaccattncgacatatacgcgccgaacacgttataccgatacattaacaataaccgacgccgcaccgctccgaantaacgcaaaatactcaaaaacaattttcgtacttccgaaatattacacaacgattattacaaataacgacgaacataacgtaactaacgcaacgtaataaaataaataccgataatcgcactattatacaccataatataaaacatacgcaaaataacttccgactaacgcataaataatatttcatcacgcaaatcgattaacgtaccgcgtaactaaaactcatcgtcgattaaacgtaatttttcgtcgacgaaaaaaacgaaaataacttcatcgaacaattacaacaacatctaattaaattcactaacgcgacgtataacgcgaaaataatccttcatcatccgctcgaccgattcgttaccttcaccactataattcaaacgctaaacga

SEQ ID NO: 8459 - DNA, 541 bp, Artificial Sequence
  chemically treated genomic DNA (Homo sapiens) CpG-island No: 8459
  unsure (27, 77, 144)
atattttttcggattgtattttatttncgtgtagcgtgaatagattaattgaatttgttcgacgatatggattattncggtatatacgcgtcgagtacgttatgtcgatgtattggtaatagtcggcgtcgtatcgtttcgggntgacgtagaatgtttaaaaatagttttcgtgttttcggaatattatatagcggttgttgtagatggcgacgggtatggcgtaattggcgtagcgtggtggagtaaatgtcggtgatcgtattgttgtgtattatggtgtagaatatacgtaagatggttttcggttggcgtataaatagtgttttattacgtaggtcgattagcgtatcgcgtagttgaaatttatcgtcgattggacgtggtttttcgtcggcgggaagggcgaggatggttttatcgaatagttgtagtagtatttggttgagtttattgacgcggcgtgtaacgcggaagtaattttttattattcgttcgatcggttcgttatttttattattgtaatttagacgttgggcga

SEQ ID NO: 8460 - DNA, 541 bp, Artificial Sequence
  chemically treated genomic DNA (Homo sapiens) CpG-island No: 8460
  unsure (398, 465, 515)
tcgcccaacgtctaaattacaataataaaaataacgaaccgatcgaacgaataataaaaaattacttccgcgttacacgccgcgtcaataaactcaaccaaatactactacaactattcgataaaaccatcctcgcccttcccgccgacgaaaaaccacgtccaatcgacgataaatttcaactacgcgatacgctaatcgacctacgtaataaaacactatttatacgccaaccgaaaaccatcttacgtatattctacaccataatacacaacaatacgatcaccgacatttactccaccacgctacgccaattacgccatacccgtcgccatctacaacaaccgctatataatattccgaaaacacgaaaactatttttaaacattctacgtcancccgaaacgatacgacgccgactattaccaatacatcgacataacgtactcgacgcgtatataccgnaataatccatatcgtcgaacaaattcaattaatctattcacgctacacgnaaataaaatacaatccgaaaaaatat

SEQ ID NO: 8461 - DNA, 516 bp, Artificial Sequence
  chemically treated genomic DNA (Homo sapiens) CpG-island No: 8461
atcggtacgattttttcggtgggtaaaatattcgacgaaggggtttcgcggcgcgagtaggaggtcgcgttgggagagggcgtcgggtgcggagttcgcgagttttcggtaagtcgtcgtcgttttggggttatttgatttcgtttttgaacgcggggttttagaggcgagttttgggtttatatagtaaaatgtggttcgttagaaagcgtttttttttatcgcgtttagaataagaagcggcgttgtttggcgagttttcgttcggttttttcgttttgtttagagtattagcgcgtagttcgcgttcgttattatttttaatatagataaagttttcgcgagatggagcggcggtgtataaaatttatttcgatcggatttgggatgcgtcgtatttttagtagggttaagttttacgagaagaaattaggattttcgagttatagttatagatatttacgcgttttttaagtcggtgattgtattaggtgtttattcggttttgagtttgga

SEQ ID NO: 8462 - DNA, 516 bp, Artificial Sequence
  chemically treated genomic DNA (Homo sapiens) CpG-island No: 8462
tccaaactcaaaaccgaataaacacctaatacaatcaccgacttaaaaaacgcgtaaatatctataactataactcgaaaatcctaatttcttctcgtaaaacttaaccctactaaaaatacgacgcatcccaaatccgatcgaaataaattttatacaccgccgctccatctcgcgaaaactttatctatattaaaaataataacgaacgcgaactacgcgctaatactctaaacaaaacgaaaaaaccgaacgaaaactcgccaaacaacgccgcttcttattctaaacgcgataaaaaaaaacgctttctaacgaaccacattttactatataaacccaaaactcgcctctaaaaccccgcgttcaaaaacgaaatcaaataaccccaaaacgacgacgacttaccgaaaactcgcgaactccgcacccgacgccctctcccaacgcgacctcctactcgcgccgcgaaaccccttcgtcgaatattttacccaccgaaaaaatcgtaccgat

SEQ ID NO: 8463 - DNA, 516 bp, Artificial Sequence
  chemically treated genomic DNA (Homo sapiens) CpG-island No: 8463
tttaggtttagaatcgggtgggtatttggtgtagttatcggtttaggggacgcgtgggtgtttatggttgtgattcgggggttttggttttttttcgtggaatttaattttattaggggtgcggcgtattttagattcgatcggagtgggttttgtatatcgtcgttttatttcgcgggggttttgtttgtgttgggggtggtggcgggcgcgggttgcgcgttggtgttttgggtagggcggggaggtcgggcgaggattcgttaggtagcgtcgttttttgttttgggcgcggtgaggaaggacgttttttaacgggttatattttgttgtgtagatttaaaattcgtttttgaggtttcgcgtttaggagcggggttaggtggttttagggcggcggcggtttgtcggagattcgcgagtttcgtattcgacgtttttttttaacgcggttttttgttcgcgtcgcggaattttttcgtcgggtgttttatttatcggaggggtcgtgtcggt

SEQ ID NO: 8464 - DNA, 516 bp, Artificial Sequence
  chemically treated genomic DNA (Homo sapiens) CpG-island No: 8464
accgacacgacccctccgataaataaaacacccgacgaaaaaattccgcgacgcgaacaaaaaaccgcgttaaaaaaaaacgtcgaatacgaaactcgcgaatctccgacaaaccgccgccgccctaaaaccacctaaccccgctcctaaacgcgaaacctcaaaaacgaattttaaatctacacaacaaaatataacccgttaaaaaacgtccttcctcaccgcgcccaaaacaaaaaacgacgctacctaacgaatcctcgcccgacctccccgccctacccaaaacaccaacgcgcaacccgcgcccgccaccacccccaacacaaacaaaacccccgcgaaataaaacgacgatatacaaaacccactccgatcgaatctaaaatacgccgcacccctaataaaattaaattccacgaaaaaaaaccaaaacccccgaatcacaaccataaacacccacgcgtcccctaaaccgataactacaccaaatacccacccgattctaaacctaaa

SEQ ID NO: 8465 - DNA, 737 bp, Artificial Sequence
  chemically treated genomic DNA (Homo sapiens) CpG-island No: 8465
tttcgcgcgttgaatggaagaaatttcgttcgggtatttcggaaggaaagtttcgagtttattcgttttggagtcgatattaatcgttaggggttttttaggttcgtttcgggaaatggtttttttaggcgagtgcgaggcgggtttttcggtttcgatgtagcgtattaatgtcggtaaggcggggattaggtttaggggatttcggtcgtttcgaggtcgcggagattttaaggttacggaaggattcgcgttttcgtagttcgtacgtcgggaagcgtgtagagttttcggcggggtttcgagttcgttggttagagcgtggagcggcggggtgggagggacgtggtttttagagcgcggggttatcgtagggtttttgattgggagggagggaagggtcggttcgacggggttttagtagtttttcgcgcgtagtcgttcggtttttttttcgtttagttgggagtcgttagttttgggcgttcgaagatagcgggtgttcggggtagtttttaggggtgcgggcgagggcgtagggcggtttagatagttttcgcgtggaaggcgttcgtttagattcgcgacgtttcggatttttaggttttcgtatttcgtgttcgaggtttcgggacgcgtaggatagtggagtcgtggtcgtcgtttgtttttattattttgcgttcgggagcgggggcggggcgtcgtcggggacgtgcgacgaggagttcgacgcg

SEQ ID NO: 8466 - DNA, 737 bp, Artificial Sequence
  chemically treated genomic DNA (Homo sapiens) CpG-island No: 8466
cgcgtcgaactcctcgtcgcacgtccccgacgacgccccgcccccgctcccgaacgcaaaataataaaaacaaacgacgaccacgactccactatcctacgcgtcccgaaacctcgaacacgaaatacgaaaacctaaaaatccgaaacgtcgcgaatctaaacgaacgccttccacgcgaaaactatctaaaccgccctacgccctcgcccgcacccctaaaaactaccccgaacacccgctatcttcgaacgcccaaaactaacgactcccaactaaacgaaaaaaaaaccgaacgactacgcgcgaaaaactactaaaaccccgtcgaaccgacccttccctccctcccaatcaaaaaccctacgataaccccgcgctctaaaaaccacgtccctcccaccccgccgctccacgctctaaccaacgaactcgaaaccccgccgaaaactctacacgcttcccgacgtacgaactacgaaaacgcgaatccttccgtaaccttaaaatctccgcgacctcgaaacgaccgaaatcccctaaacctaatccccgccttaccgacattaatacgctacatcgaaaccgaaaaacccgcctcgcactcgcctaaaaaaaccatttcccgaaacgaacctaaaaaacccctaacgattaatatcgactccaaaacgaataaactcgaaactttccttccgaaatacccgaacgaaatttcttccattcaacgcgcgaaa

SEQ ID NO: 8467 - DNA, 737 bp, Artificial Sequence
  chemically treated genomic DNA (Homo sapiens) CpG-island No: 8467
cgcgtcgggtttttcgtcgtacgttttcggcggcgtttcgttttcgttttcggacgtaagatggtgggagtaagcggcggttacggttttattgttttgcgcgtttcggagtttcggatacggggtgcgggggtttgggggttcgagacgtcgcggatttagacgggcgttttttacgcgggaattgtttgggtcgttttgcgttttcgttcgtatttttgggggttgtttcgggtattcgttattttcggacgtttagggttggcggtttttagttggacggggagggagtcgagcggttgcgcgcggggaattgttgggatttcgtcgggtcgattttttttttttttttaattaggggttttacggtggtttcgcgttttggggattacgttttttttatttcgtcgttttacgttttgattagcgggttcgggatttcgtcgaggattttgtacgtttttcggcgtgcgggttgcggagacgcgggttttttcgtggttttggggttttcgcgatttcgaggcgatcgaggttttttaggtttagttttcgttttgtcggtattagtgcgttgtatcggaatcgaggggttcgtttcgtattcgtttaagaaaattatttttcgggacgggtttggaaagtttttggcggttggtatcggttttagggcgaatggattcgaggtttttttttcgagatgttcgggcgggattttttttatttagcgcgcggag

SEQ ID NO: 8468 - DNA, 737 bp, Artificial Sequence
  chemically treated genomic DNA (Homo sapiens) CpG-island No: 8468
ctccgcgcgctaaataaaaaaaatcccgcccgaacatctcgaaaaaaaaacctcgaatccattcgccctaaaaccgataccaaccgccaaaaactttccaaacccgtcccgaaaaataattttcttaaacgaatacgaaacgaacccctcgattccgatacaacgcactaataccgacaaaacgaaaactaaacctaaaaaacctcgatcgcctcgaaatcgcgaaaaccccaaaaccacgaaaaaacccgcgtctccgcaacccgcacgccgaaaaacgtacaaaatcctcgacgaaatcccgaacccgctaatcaaaacgtaaaacgacgaaataaaaaaaacgtaatccccaaaacgcgaaaccaccgtaaaacccctaattaaaaaaaaaaaaaaaatcgacccgacgaaatcccaacaattccccgcgcgcaaccgctcgactccctccccgtccaactaaaaaccgccaaccctaaacgtccgaaaataacgaatacccgaaacaacccccaaaaatacgaacgaaaacgcaaaacgacccaaacaattcccgcgtaaaaaacgcccgtctaaatccgcgacgtctcgaacccccaaacccccgcaccccgtatccgaaactccgaaacgcgcaaaacaataaaaccgtaaccgccgcttactcccaccatcttacgtccgaaaacgaaaacgaaacgccgccgaaaacgtacgacgaaaaacccgacgcg

SEQ ID NO: 8469 - DNA, 743 bp, Artificial Sequence
  chemically treated genomic DNA (Homo sapiens) CpG-island No: 8469
ggtttcgatcgaggatttggagatttcggggttttcggtcgtttgttttatagtttacgaggcggatcgatttgcggggtgaggatcgggagcgtatggtagtttcggtttcggttttttggcgtttttttagtacgcggtgaatgtttgagaggatagaggttcgcggttttttttatttttcggtagcgatcgtaaagttcgggagttgagttcgcggcgtgaagcggcgaggttagtagcgagggggtagggtcggcgttggcggttacggagtttggcgtcgttgggttcggaatttagggacgcgagttagcgttgggagttggggagagacggttttgttattcggtttaggtagtgggcgttcgtttcgttttagcgtttacgcgatttcggtttcgaggttttttcgagcgtagcgttcggaagcgtcgtcgttaagcgtttgcgtttgcgtttgcgttgattttagttcggattcggttcgaggcgcgtagttcggagggggcggggtcgagttcgagggaaggtagtgcgtatgcgcggggcgagtcggtcggtattgttatagtgagcggtcgcgagatcggtttttgttcgtagggtcgggtagtggtttttcggggatagcgtgtgaggattcgggcgcgaaggacggggttagatttattaggtgtttattttttttacggttacgattttggtttagaattgtttttttcgggttttagtttttttat

SEQ ID NO: 8470 - DNA, 743 bp, Artificial Sequence
  chemically treated genomic DNA (Homo sapiens) CpG-island No: 8470
ataaaaaaactaaaacccgaaaaaaacaattctaaaccaaaatcgtaaccgtaaaaaaaataaacacctaataaatctaaccccgtccttcgcgcccgaatcctcacacgctatccccgaaaaaccactacccgaccctacgaacaaaaaccgatctcgcgaccgctcactataacaataccgaccgactcgccccgcgcatacgcactaccttccctcgaactcgaccccgccccctccgaactacgcgcctcgaaccgaatccgaactaaaatcaacgcaaacgcaaacgcaaacgcttaacgacgacgcttccgaacgctacgctcgaaaaaacctcgaaaccgaaatcgcgtaaacgctaaaacgaaacgaacgcccactacctaaaccgaataacaaaaccgtctctccccaactcccaacgctaactcgcgtccctaaattccgaacccaacgacgccaaactccgtaaccgccaacgccgaccctaccccctcgctactaacctcgccgcttcacgccgcgaactcaactcccgaactttacgatcgctaccgaaaaataaaaaaaaccgcgaacctctatcctctcaaacattcaccgcgtactaaaaaaacgccaaaaaaccgaaaccgaaactaccatacgctcccgatcctcaccccgcaaatcgatccgcctcgtaaactataaaacaaacgaccgaaaaccccgaaatctccaaatcctcgatcgaaacc

SEQ ID NO: 8471 - DNA, 743 bp, Artificial Sequence
  chemically treated genomic DNA (Homo sapiens) CpG-island No: 8471
gtggggaaattgaggttcggggagggtagttttggattagggtcgtgatcgtggggaaagtgggtatttggtgaatttgatttcgtttttcgcgttcgaatttttatacgttgttttcgaggggttattattcgattttgcggatagggatcgatttcgcggtcgtttattgtgatagtgtcggtcggttcgtttcgcgtatgcgtattgttttttttcgggttcggtttcgtttttttcgggttgcgcgtttcggatcgagttcggattggggttagcgtaggcgtagacgtagacgtttagcggcggcgttttcgaacgttgcgttcgggagagtttcggggtcggagtcgcgtgggcgttggggcggggcgggcgtttattgtttgagtcggatggtagagtcgtttttttttagtttttagcgttggttcgcgtttttgggtttcgagtttagcgacgttaagtttcgtggtcgttagcgtcggttttgttttttcgttgttgatttcgtcgttttacgtcgcggatttagttttcgggttttgcggtcgttgtcgggggatggggagggtcgcgaatttttgtttttttaggtatttatcgcgtgttgggagggcgttaggaggtcgaggtcggggttgttatgcgttttcggtttttatttcgtaggtcggttcgtttcgtgggttgtggggtagacgatcggaagtttcgagatttttagattttcgatcgggatt

SEQ ID NO: 8472 - DNA, 743 bp, Artificial Sequence
  chemically treated genomic DNA (Homo sapiens) CpG-island No: 8472
aatcccgatcgaaaatctaaaaatctcgaaacttccgatcgtctaccccacaacccacgaaacgaaccgacctacgaaataaaaaccgaaaacgcataacaaccccgacctcgacctcctaacgccctcccaacacgcgataaatacctaaaaaaacaaaaattcgcgaccctccccatcccccgacaacgaccgcaaaacccgaaaactaaatccgcgacgtaaaacgacgaaatcaacaacgaaaaaacaaaaccgacgctaacgaccacgaaacttaacgtcgctaaactcgaaacccaaaaacgcgaaccaacgctaaaaactaaaaaaaaacgactctaccatccgactcaaacaataaacgcccgccccgccccaacgcccacgcgactccgaccccgaaactctcccgaacgcaacgttcgaaaacgccgccgctaaacgtctacgtctacgcctacgctaaccccaatccgaactcgatccgaaacgcgcaacccgaaaaaaacgaaaccgaacccgaaaaaaaacaatacgcatacgcgaaacgaaccgaccgacactatcacaataaacgaccgcgaaatcgatccctatccgcaaaatcgaataataacccctcgaaaacaacgtataaaaattcgaacgcgaaaaacgaaatcaaattcaccaaatacccactttccccacgatcacgaccctaatccaaaactaccctccccgaacctcaatttccccac

SEQ ID NO: 8473 - DNA, 587 bp, Artificial Sequence
  chemically treated genomic DNA (Homo sapiens) CpG-island No: 8473
attatagttttcgcgaggtcgcgcgtagaggttcgtttattttagagggttgtagagttacgtttaggtttcgttagtaaatagcgttcgggtcgggcgggcgagcgagcggtagttaacgtgtttcgggtcgcggcgttttatcggtcgcgcgggtttttcggggttcgtttatttttaatatttatacggagtacgttttcgatttcgttgtagtttcgttttgtaaatacgtatagtttcggtttttcgtttttatttcgcgtcgggagtcgcggtatggttgtatgtagtcgttttagttatatttttacgcgcgtttcgggtttttagattttttggatggggacgattttagatttcgaggaaggaaggagaggaaggaagcgtcgtaggagggggaaagaggaagcgcgggggggaaggttattagtataagtatggtcgggattgttgtagaattacgtgggtttgtttgtaatttaaaacgtcgcgattcgttcgtattgtagcggataaaaagtggtcgggttatttggggtttttatgttttaaggaaggagggttttaggggcggcgtaggttta

SEQ ID NO: 8474 - DNA, 587 bp, Artificial Sequence
  chemically treated genomic DNA (Homo sapiens) CpG-island No: 8474
taaacctacgccgcccctaaaaccctccttccttaaaacataaaaaccccaaataacccgaccactttttatccgctacaatacgaacgaatcgcgacgttttaaattacaaacaaacccacgtaattctacaacaatcccgaccatacttatactaataaccttcccccccgcgcttcctctttccccctcctacgacgcttccttcctctccttccttcctcgaaatctaaaatcgtccccatccaaaaaatctaaaaacccgaaacgcgcgtaaaaatataactaaaacgactacatacaaccataccgcgactcccgacgcgaaataaaaacgaaaaaccgaaactatacgtatttacaaaacgaaactacaacgaaatcgaaaacgtactccgtataaatattaaaaataaacgaaccccgaaaaacccgcgcgaccgataaaacgccgcgacccgaaacacgttaactaccgctcgctcgcccgcccgacccgaacgctatttactaacgaaacctaaacgtaactctacaaccctctaaaataaacgaacctctacgcgcgacctcgcgaaaactataat

SEQ ID NO: 8475 - DNA, 587 bp, Artificial Sequence
  chemically treated genomic DNA (Homo sapiens) CpG-island No: 8475
tgggtttgcgtcgtttttgggattttttttttttggagtatgggggttttaagtggttcggttattttttgttcgttgtagtgcgggcgagtcgcgacgttttaaattgtaaatagatttacgtggttttgtagtagtttcggttatgtttgtgttggtggttttttttttcgcgtttttttttttttttttttgcggcgtttttttttttttttttttttttcgggatttgaggtcgtttttatttaaggggtttgggggttcggggcgcgcgtgggggtgtagttagggcggttatatgtagttatgtcgcggttttcggcgcggggtgggggcggggagtcgggattgtgcgtgtttgtagagcggggttgtagcggggtcgggggcgtgtttcgtgtgggtgttgggggtgggcggatttcgaggggttcgcgcggtcggtggggcgtcgcggttcggggtacgttggttgtcgttcgttcgttcgttcggttcgggcgttgtttattagcgaggtttggacgtgattttgtagttttttggagtaggcggatttttgcgcgcggtttcgcgggagttgtagt

SEQ ID NO: 8476 - DNA, 587 bp, Artificial Sequence
  chemically treated genomic DNA (Homo sapiens) CpG-island No: 8476
actacaactcccgcgaaaccgcgcgcaaaaatccgcctactccaaaaaactacaaaatcacgtccaaacctcgctaataaacaacgcccgaaccgaacgaacgaacgaacgacaaccaacgtaccccgaaccgcgacgccccaccgaccgcgcgaacccctcgaaatccgcccacccccaacacccacacgaaacacgcccccgaccccgctacaaccccgctctacaaacacgcacaatcccgactccccgcccccaccccgcgccgaaaaccgcgacataactacatataaccgccctaactacacccccacgcgcgccccgaacccccaaaccccttaaataaaaacgacctcaaatcccgaaaaaaaaaaaaaaaaaaaaaaacgccgcaaaaaaaaaaaaaaaaaaacgcgaaaaaaaaaaccaccaacacaaacataaccgaaactactacaaaaccacgtaaatctatttacaatttaaaacgtcgcgactcgcccgcactacaacgaacaaaaaataaccgaaccacttaaaacccccatactccaaaaaaaaaaaatcccaaaaacgacgcaaaccca

SEQ ID NO: 8477 - DNA, 574 bp, Artificial Sequence
  chemically treated genomic DNA (Homo sapiens) CpG-island No: 8477
agcgcggtcgtattttttcggtcggttgcgtgttgagtattagtattaggtaggttgggtggtagtgtagttggagaaagtggtagaggagtcggttcgcgtcgagttcgcgggcgtatattattagttcgttagtgtcgagtagttttagtattagttgtcgttcgtattttagtagcggcgttatggtaattcgtcgagtcggttgttttgattttatggaagttttttcgggtcgtagtcgaacgtagtcgaaggaagtcgatttttagtggagagtaggtcgaatttaatcgaagagagtcgagttcgagaggacggtagttagtcgaacgtagtcgaggagagttgagattgagatgatcgtgggtcgaacgtagtcgaagaggagtcgaggttacgataggcgcgtttttagaaagtcgaagagagtcgagtttgagaaggtaagcgttggtcgaatttagtcgaagaagagtcgagtggagtcgaagatttatggagttatttgtaggggttggcgttttttgtcggtgtagtttgtagatattaggttttatttacgttttttttg

SEQ ID NO: 8478 - DNA, 574 bp, Artificial Sequence
  chemically treated genomic DNA (Homo sapiens) CpG-island No: 8478
caaaaaaaacgtaaataaaacctaatatctacaaactacaccgacaaaaaacgccaacccctacaaataactccataaatcttcgactccactcgactcttcttcgactaaattcgaccaacgcttaccttctcaaactcgactctcttcgactttctaaaaacgcgcctatcgtaacctcgactcctcttcgactacgttcgacccacgatcatctcaatctcaactctcctcgactacgttcgactaactaccgtcctctcgaactcgactctcttcgattaaattcgacctactctccactaaaaatcgacttccttcgactacgttcgactacgacccgaaaaaacttccataaaatcaaaacaaccgactcgacgaattaccataacgccgctactaaaatacgaacgacaactaatactaaaactactcgacactaacgaactaataatatacgcccgcgaactcgacgcgaaccgactcctctaccactttctccaactacactaccacccaacctacctaatactaatactcaacacgcaaccgaccgaaaaaatacgaccgcgct

SEQ ID NO: 8479 - DNA, 574 bp, Artificial Sequence
  chemically treated genomic DNA (Homo sapiens) CpG-island No: 8479
taaaagagacgtgaatggagtttgatatttgtaagttatatcgatagggggcgttagtttttataggtgattttatgaattttcggttttattcggttttttttcggttgagttcggttaacgtttgtttttttaggttcggtttttttcggttttttgagagcgcgtttgtcgtggtttcggttttttttcggttgcgttcggtttacgattattttagttttagtttttttcggttacgttcggttggttgtcgttttttcggattcggtttttttcggttgagttcggtttattttttattaggagtcggtttttttcggttgcgttcggttgcgattcggaagagtttttatggagttagggtagtcggttcgacggattgttatggcgtcgttgttggagtacgagcgatagttggtgttggaattgttcgatattgacgggttagtagtgtgcgttcgcgggttcggcgcggatcggtttttttattattttttttagttgtattgttatttagtttgtttggtgttggtgtttaatacgtagtcggtcgaggaggtgcggtcgcgtt

SEQ ID NO: 8480 - DNA, 574 bp, Artificial Sequence
  chemically treated genomic DNA (Homo sapiens) CpG-island No: 8480
aacgcgaccgcacctcctcgaccgactacgtattaaacaccaacaccaaacaaactaaataacaatacaactaaaaaaaataataaaaaaaccgatccgcgccgaacccgcgaacgcacactactaacccgtcaatatcgaacaattccaacaccaactatcgctcgtactccaacaacgacgccataacaatccgtcgaaccgactaccctaactccataaaaactcttccgaatcgcaaccgaacgcaaccgaaaaaaaccgactcctaataaaaaataaaccgaactcaaccgaaaaaaaccgaatccgaaaaaacgacaaccaaccgaacgtaaccgaaaaaaactaaaactaaaataatcgtaaaccgaacgcaaccgaaaaaaaaccgaaaccacgacaaacgcgctctcaaaaaaccgaaaaaaaccgaacctaaaaaaacaaacgttaaccgaactcaaccgaaaaaaaaccgaataaaaccgaaaattcataaaatcacctataaaaactaacgccccctatcgatataacttacaaatatcaaactccattcacgtctctttta

SEQ ID NO: 8481 - DNA, 758 bp, Artificial Sequence
  chemically treated genomic DNA (Homo sapiens) CpG-island No: 8481
ggggagcgcggaggggggggggggcgggaagagagaggagagagagggacgagtaagtagagcgagcgtacgaataggggataggcggtagcggggaggagattggatgaatgaatatgtgagagaggggggggcgtgagtgtggtggatggggagtggcgagacggtgtagagagtcgagtgaaggtgagagtggtggagtgatgttagttaaagagggggaggtaggatgtgagcggatagtagttgggagaggagagtaggagtagtcgtagcgttgcgggttttgtagggagtgcggagacgagtggaggtagagtgtagggggacgacgggcgttatgacgtcgtagggaggggttgagagtaggatgcgtagcgtgcgagttgagacgtaagcggagagagaggatagttaggatttgatggataggagtgagatagagtagaattggggagtgtgtcgagtaggagtgaacgatgaggggttgcgggcgagatagcgagagcgacgcgagcgatcgatagtagcgagtagtgagttcgttgtagttgcgatagtagtagtagaatgcgagtgagacgattgcggagcggaggttagtgaggtacggacgtgaagtggagataatggaagcgataggatagaggtacgtagtgtggagtagagaagaaagcgagcgaatatttatgaagagtagagcgagagattcgagagattagagtggtagagatagagtaggataaacgagtttaacg

SEQ ID NO: 8482 - DNA, 758 bp, Artificial Sequence
  chemically treated genomic DNA (Homo sapiens) CpG-island No: 8482
cgttaaactcgtttatcctactctatctctaccactctaatctctcgaatctctcgctctactcttcataaatattcgctcgctttcttctctactccacactacgtacctctatcctatcgcttccattatctccacttcacgtccgtacctcactaacctccgctccgcaatcgtctcactcgcattctactactactatcgcaactacaacgaactcactactcgctactatcgatcgctcgcgtcgctctcgctatctcgcccgcaacccctcatcgttcactcctactcgacacactccccaattctactctatctcactcctatccatcaaatcctaactatcctctctctccgcttacgtctcaactcgcacgctacgcatcctactctcaacccctccctacgacgtcataacgcccgtcgtccccctacactctacctccactcgtctccgcactccctacaaaacccgcaacgctacgactactcctactctcctctcccaactactatccgctcacatcctacctccccctctttaactaacatcactccaccactctcaccttcactcgactctctacaccgtctcgccactccccatccaccacactcacgcccccccctctctcacatattcattcatccaatctcctccccgctaccgcctatcccctattcgtacgctcgctctacttactcgtccctctctctcctctctcttcccgcccccccccccctccgcgctcccc

SEQ ID NO: 8483 - DNA, 758 bp, Artificial Sequence
  chemically treated genomic DNA (Homo sapiens) CpG-island No: 8483
cgttggattcgtttgttttgttttatttttgttattttgatttttcgagtttttcgttttattttttatgagtattcgttcgtttttttttttgttttatattgcgtgtttttgttttgtcgtttttattatttttattttacgttcgtattttattgattttcgtttcgtagtcgttttattcgtattttgttgttattatcgtagttgtagcgggtttattgttcgttgttgtcgatcgttcgcgtcgttttcgttgtttcgttcgtagttttttatcgtttatttttgttcgatatattttttagttttattttattttatttttatttattagattttagttgtttttttttttcgtttgcgttttagttcgtacgttgcgtattttatttttaatttttttttacgacgttatgacgttcgtcgtttttttatattttatttttattcgttttcgtattttttgtagagttcgtaacgttacgattatttttattttttttttttagttattattcgtttatattttgtttttttttttttaattagtattattttattatttttatttttattcgattttttatatcgtttcgttattttttatttattatatttacgttttttttttttttatatatttatttatttagtttttttttcgttgtcgtttgttttttgttcgtgcgttcgttttatttattcgtttttttttttttttttttttttcgttttttttttttttcgcgtttttt

SEQ ID NO: 8484 - DNA, 758 bp, Artificial Sequence
  chemically treated genomic DNA (Homo sapiens) CpG-island No: 8484
aaaaaacgcgaaaaaaaaaaaaaacgaaaaaaaaaaaaaaaaaaaaaaacgaataaataaaacgaacgcacgaacaaaaaacaaacgacaacgaaaaaaaaactaaataaataaatatataaaaaaaaaaaaaacgtaaatataataaataaaaaataacgaaacgatataaaaaatcgaataaaaataaaaataataaaataatactaattaaaaaaaaaaaaacaaaatataaacgaataataactaaaaaaaaaaaataaaaataatcgtaacgttacgaactctacaaaaaatacgaaaacgaataaaaataaaatataaaaaaacgacgaacgtcataacgtcgtaaaaaaaaattaaaaataaaatacgcaacgtacgaactaaaacgcaaacgaaaaaaaaaaacaactaaaatctaataaataaaaataaaataaaataaaactaaaaaatatatcgaacaaaaataaacgataaaaaactacgaacgaaacaacgaaaacgacgcgaacgatcgacaacaacgaacaataaacccgctacaactacgataataacaacaaaatacgaataaaacgactacgaaacgaaaatcaataaaatacgaacgtaaaataaaaataataaaaacgacaaaacaaaaacacgcaatataaaacaaaaaaaaaaacgaacgaatactcataaaaaataaaacgaaaaactcgaaaaatcaaaataacaaaaataaaacaaaacaaacgaatccaacg

SEQ ID NO: 8485 - DNA, 838 bp, Artificial Sequence
  chemically treated genomic DNA (Homo sapiens) CpG-island No: 8485
  unsure (292, 463, 564)
agagagcgattgaggatgagtcgatgcgcggtcgaatagatcggagttgaattagaagagtaattagacgaagcgtgtagatgcgcgagagttagatagtagagttatgcgagtagaagagcgcgagagtagttgagacgcgtaagcgagataatcgagtagcgagcgatagtaggagcgtgagaaggagagtattagataagcgacgatcggacgattaggttgacgttagtagtatttaagtacgagagcgtagatgacgaaatgtcgagcgtatgagtagacgttacgngtaagtatatagtatggatagagtacgcgaagtagagtagtgagtcgagtattgagagatgagatcgtagttatacgtatagtaggcgagcgagcgagagcgagcgtgtgtaggtagaggtagcgagggttagtaattgcggtatgagtggaagtgtcgttatgagatatngcgcgagttggcgcgttagcgcggtggtgggcggtcgagagacgtgagcgagtagagatataggatgagcgttgtagagcgttgagaacgcggagttgagnagagttgtgaacgttaggtaggagcgcgttcggtaggagaatagagagtgagtaagtttgagagtagtagcgtcgtagtatagtggcggtaggagcgtagttgtgagtatgataggtacgtatgagagttgtggacgtattgagaggagtgtagatgtagtggcgtacggagacgagagacgaagggagcgaatacgagaggagttgaatgtagtacgaagattgattagacggtcggatagtgagtagcggttgttgacgtagttagtagatt

SEQ ID NO: 8486 - DNA, 838 bp, Artificial Sequence
  chemically treated genomic DNA (Homo sapiens) CpG-island No: 8486
  unsure (275, 376, 547)
aatctactaactacgtcaacaaccgctactcactatccgaccgtctaatcaatcttcgtactacattcaactcctctcgtattcgctcccttcgtctctcgtctccgtacgccactacatctacactcctctcaatacgtccacaactctcatacgtacctatcatactcacaactacgctcctaccgccactatactacgacgctactactctcaaacttactcactctctattctcctaccgaacgcgctcctacctaacgttcacaactctnctcaactccgcgttctcaacgctctacaacgctcatcctatatctctactcgctcacgtctctcgaccgcccaccaccgcgctaacgcgccaactcgcgcnatatctcataacgacacttccactcataccgcaattactaaccctcgctacctctacctacacacgctcgctctcgctcgctcgcctactatacgtataactacgatctcatctctcaatactcgactcactactctacttcgcgtactctatccatactatatacttacncgtaacgtctactcatacgctcgacatttcgtcatctacgctctcgtacttaaatactactaacgtcaacctaatcgtccgatcgtcgcttatctaatactctccttctcacgctcctactatcgctcgctactcgattatctcgcttacgcgtctcaactactctcgcgctcttctactcgcataactctactatctaactctcgcgcatctacacgcttcgtctaattactcttctaattcaactccgatctattcgaccgcgcatcgactcatcctcaatcgctctct

SEQ ID NO: 8487 - DNA, 838 bp, Artificial Sequence
  chemically treated genomic DNA (Homo sapiens) CpG-island No: 8487
  unsure (275, 376, 547)
agtttgttagttgcgttagtagtcgttatttattattcgatcgtttagttagttttcgtattatatttagtttttttcgtgttcgtttttttcgtttttcgttttcgtacgttattgtatttgtattttttttagtacgtttatagtttttatgcgtgtttgttatgtttatagttacgtttttatcgttattatgttgcggcgttgttatttttagatttatttattttttgtttttttgtcgagcgcgtttttgtttggcgtttatagttttntttagtttcgcgtttttagcgttttatagcgtttattttgtatttttgttcgtttacgtttttcgatcgtttattatcgcgttgacgcgttaattcgcgtngtattttataacgatatttttatttatgtcgtagttgttagttttcgttgtttttatttgtatacgttcgttttcgttcgttcgtttgttgtacgtatgattgcggttttattttttagtgttcggtttattgttttgtttcgcgtattttgtttatgttgtgtgtttgtncgtagcgtttgtttatgcgttcgatatttcgttatttgcgttttcgtgtttgagtattgttagcgttagtttggtcgttcgatcgtcgtttatttaatatttttttttttacgtttttgttgtcgttcgttattcgattatttcgtttgcgcgttttagttgttttcgcgtttttttgttcgtatgattttattgtttgattttcgcgtatttgtacgtttcgtttggttatttttttggtttagtttcgatttgttcgatcgcgtatcggtttatttttagtcgtttttt

SEQ ID NO: 8488 - DNA, 838 bp, Artificial Sequence
  chemically treated genomic DNA (Homo sapiens) CpG-island No: 8488
  unsure (292, 463, 564)
aaaaaacgactaaaaataaaccgatacgcgatcgaacaaatcgaaactaaaccaaaaaaataaccaaacgaaacgtacaaatacgcgaaaatcaaacaataaaatcatacgaacaaaaaaacgcgaaaacaactaaaacgcgcaaacgaaataatcgaataacgaacgacaacaaaaacgtaaaaaaaaaaatattaaataaacgacgatcgaacgaccaaactaacgctaacaatactcaaacacgaaaacgcaaataacgaaatatcgaacgcataaacaaacgctacgnacaaacacacaacataaacaaaatacgcgaaacaaaacaataaaccgaacactaaaaaataaaaccgcaatcatacgtacaacaaacgaacgaacgaaaacgaacgtatacaaataaaaacaacgaaaactaacaactacgacataaataaaaatatcgttataaaatacnacgcgaattaacgcgtcaacgcgataataaacgatcgaaaaacgtaaacgaacaaaaatacaaaataaacgctataaaacgctaaaaacgcgaaactaaanaaaactataaacgccaaacaaaaacgcgctcgacaaaaaaacaaaaaataaataaatctaaaaataacaacgccgcaacataataacgataaaaacgtaactataaacataacaaacacgcataaaaactataaacgtactaaaaaaaatacaaatacaataacgtacgaaaacgaaaaacgaaaaaaacgaacacgaaaaaaactaaatataatacgaaaactaactaaacgatcgaataataaataacgactactaacgcaactaacaaact

SEQ ID NO: 8489 - DNA, 918 bp, Artificial Sequence
  chemically treated genomic DNA (Homo sapiens) CpG-island No: 8489
tcgatagtcgagagattagtaggaggacgcgggcgggggtcgttttcgtcgttacggggtgttttttttttttcgtataagttcggttatttggtttttttttcggtttcggtcgttttaggtacgcgggcgtagtttttagcgggcgcggggagggtgttatgtcgttggcgtcgttattagtcggtttcgttgtattttattggggttttggcgttcgcggtttcgtattttgttgtagggttcggcgcgggcgtttgtttgtttttattgttcgcgtcgggaaagttaagtttgttcgcggggaagggatcgttgggttagggttcggtagggttatttcggttaaggttaggattcgaggagaggttgggacgtcgaggttcgtggtcggggtttacggtggggatcggagtgattcggttggtacgcggggcgttacgtagaagcgttcgggtcgagttcgtagttcgcgttcggtttcgaaattttgtaggcgtcgtttttgggtttaggatttcgagcggtttcggcggagttaggcgagcgcggtttttcggttcgggttcggtgtttttggtttcgggttggggcgtcgggtaggtatttttagtatttttttttcgcggttttgcggggaaatttgcgttttttcgttgtagtttaaagggttcgttgcgtttcgtttggttttggttttttcggggttcgtcgtatgtgaggttggggaggaaggaattagggtacgattcgattttaggtagtttgcggcgttgtttgtgcgtagtcggtcgcggtttagagtgagcggttcggggtattcgtttgaacgtgtttaggggtttgagggttaatgaacggagcgtcgttgagggttatataggttggatttagtgttttatttatgttcgttttagt

SEQ ID NO: 8490 - DNA, 918 bp, Artificial Sequence
  chemically treated genomic DNA (Homo sapiens) CpG-island No: 8490
actaaaacgaacataaataaaacactaaatccaacctatataaccctcaacgacgctccgttcattaaccctcaaacccctaaacacgttcaaacgaataccccgaaccgctcactctaaaccgcgaccgactacgcacaaacaacgccgcaaactacctaaaatcgaatcgtaccctaattccttcctccccaacctcacatacgacgaaccccgaaaaaaccaaaaccaaacgaaacgcaacgaaccctttaaactacaacgaaaaaacgcaaatttccccgcaaaaccgcgaaaaaaaaatactaaaaatacctacccgacgccccaacccgaaaccaaaaacaccgaacccgaaccgaaaaaccgcgctcgcctaactccgccgaaaccgctcgaaatcctaaacccaaaaacgacgcctacaaaatttcgaaaccgaacgcgaactacgaactcgacccgaacgcttctacgtaacgccccgcgtaccaaccgaatcactccgatccccaccgtaaaccccgaccacgaacctcgacgtcccaacctctcctcgaatcctaaccttaaccgaaataaccctaccgaaccctaacccaacgatcccttccccgcgaacaaacttaactttcccgacgcgaacaataaaaacaaacaaacgcccgcgccgaaccctacaacaaaatacgaaaccgcgaacgccaaaaccccaataaaatacaacgaaaccgactaataacgacgccaacgacataacaccctccccgcgcccgctaaaaactacgcccgcgtacctaaaacgaccgaaaccgaaaaaaaaaccaaataaccgaacttatacgaaaaaaaaaaaacaccccgtaacgacgaaaacgacccccgcccgcgtcctcctactaatctctcgactatcga

SEQ ID NO: 8491 - DNA, 918 bp, Artificial Sequence
  chemically treated genomic DNA (Homo sapiens) CpG-island No: 8491
gttggggcgggtataggtgagatattgggtttagtttatgtagtttttaacgacgtttcgtttattggtttttaaatttttagatacgtttaagcgggtatttcgggtcgtttattttggatcgcggtcggttacgtataagtagcgtcgtaggttgtttggagtcgggtcgtgttttgatttttttttttttagttttatatgcggcggatttcggggaagttagggttaggcgaagcgtagcgggttttttgggttgtagcgaggagacgtaagttttttcgtaaagtcgcggggaggaggtgttgagaatgtttgttcggcgttttaattcggagttaagggtatcgggttcgggtcgaggggtcgcgttcgtttggtttcgtcggggtcgttcggggttttgaatttaagaacggcgtttgtaggatttcggagtcgggcgcgagttgcgggttcggttcgagcgtttttgcgtggcgtttcgcgtgttaatcgggttatttcggtttttatcgtagatttcggttacgagtttcggcgttttagttttttttcgagttttggttttggtcggggtagttttgtcgagttttggtttagcggtttttttttcgcgggtaaatttggttttttcggcgcgggtagtaaggataagtaagcgttcgcgtcgggttttgtagtaagatgcggggtcgcgggcgttaggattttagtggggtgtagcgggatcggttggtggcggcgttagcgatatggtatttttttcgcgttcgttgggagttgcgttcgcgtatttgagacggtcggggtcgaggggaagattaggtggtcggatttgtgcgggagggagggagtatttcgtggcggcggaggcgattttcgttcgcgtttttttgttggtttttcggttgtcgg

SEQ ID NO: 8492 - DNA, 918 bp, Artificial Sequence
  chemically treated genomic DNA (Homo sapiens) CpG-island No: 8492
ccgacaaccgaaaaaccaacaaaaaaacgcgaacgaaaatcgcctccgccgccacgaaatactccctccctcccgcacaaatccgaccacctaatcttcccctcgaccccgaccgtctcaaatacgcgaacgcaactcccaacgaacgcgaaaaaaataccatatcgctaacgccgccaccaaccgatcccgctacaccccactaaaatcctaacgcccgcgaccccgcatcttactacaaaacccgacgcgaacgcttacttatccttactacccgcgccgaaaaaaccaaatttacccgcgaaaaaaaaaccgctaaaccaaaactcgacaaaactaccccgaccaaaaccaaaactcgaaaaaaaactaaaacgccgaaactcgtaaccgaaatctacgataaaaaccgaaataacccgattaacacgcgaaacgccacgcaaaaacgctcgaaccgaacccgcaactcgcgcccgactccgaaatcctacaaacgccgttcttaaattcaaaaccccgaacgaccccgacgaaaccaaacgaacgcgacccctcgacccgaacccgatacccttaactccgaattaaaacgccgaacaaacattctcaacacctcctccccgcgactttacgaaaaaacttacgtctcctcgctacaacccaaaaaacccgctacgcttcgcctaaccctaacttccccgaaatccgccgcatataaaactaaaaaaaaaaaaatcaaaacacgacccgactccaaacaacctacgacgctacttatacgtaaccgaccgcgatccaaaataaacgacccgaaatacccgcttaaacgtatctaaaaatttaaaaaccaataaacgaaacgtcgttaaaaactacataaactaaacccaatatctcacctatacccgccccaac

SEQ ID NO: 8493 - DNA, 725 bp, Artificial Sequence
  chemically treated genomic DNA (Homo sapiens) CpG-island No: 8493
gcgagtcgcgcgggggtagggtcgcgtgttgatggggtgggtggcggcggggtgggtttaatgttacgttttggcgttcgtcgttcgtgtttttttttttagtcggttttcgtaaaatgttagttattgattttggaaaacggggtcggagaaggttggttttttttgcggtcgggtttttttttcgttcgggagtttggcggttttaatatcgcggttagtgcggggtaagttttagattcggtcggtaaggatgtaggggtagggagtaaggttcggttgcgagtgcgcgcgtagttttttttttgagcgtttttcgtagcgcgcggggaggcgggagttgcggggtcggagggcgggggttaaaaatattcggtagcggcggcggcggcgcggatattgttggggtatgttgggttgtggggttgcgggggatgcgggtcggggaggtcgggtcgggcggggtcgggtttcgttgatcgttatgttgattttttttttcgtgtcggggggttttttttggttattcgtaggtaagtgttcgttttgttcgcgttcgcggatttttatttttcgtaggttatgaggttttcgttcgaggtggaggtgttatattttcgcggtcgtcgagtttttattttttgttgttgagttgtttcgttaaggtttttagggtcgtttaagtatatttttcgtttttagttttcgcgggtttcgggtcgggt

SEQ ID NO: 8494 - DNA, 725 bp, Artificial Sequence
  chemically treated genomic DNA (Homo sapiens) CpG-island No: 8494
acccgacccgaaacccgcgaaaactaaaaacgaaaaatatacttaaacgaccctaaaaaccttaacgaaacaactcaacaacaaaaaataaaaactcgacgaccgcgaaaatataacacctccacctcgaacgaaaacctcataacctacgaaaaataaaaatccgcgaacgcgaacaaaacgaacacttacctacgaataaccaaaaaaaaccccccgacacgaaaaaaaaaatcaacataacgatcaacgaaacccgaccccgcccgacccgacctccccgacccgcatcccccgcaaccccacaacccaacataccccaacaatatccgcgccgccgccgccgctaccgaatatttttaacccccgccctccgaccccgcaactcccgcctccccgcgcgctacgaaaaacgctcaaaaaaaaaactacgcgcgcactcgcaaccgaaccttactccctacccctacatccttaccgaccgaatctaaaacttaccccgcactaaccgcgatattaaaaccgccaaactcccgaacgaaaaaaaaacccgaccgcaaaaaaaaccaaccttctccgaccccgttttccaaaatcaataactaacattttacgaaaaccgactaaaaaaaaaaacacgaacgacgaacgccaaaacgtaacattaaacccaccccgccgccacccaccccatcaacacgcgaccctacccccgcgcgactcgc

SEQ ID NO: 8495 - DNA, 725 bp, Artificial Sequence
  chemically treated genomic DNA (Homo sapiens) CpG-island No: 8495
attcggttcggagttcgcgagaattgggggcggagggtgtatttaggcggttttggggattttgacgggatagtttagtagtaggggatgggggttcggcggtcgcggagatgtaatatttttatttcgggcgaagattttatagtttgcgggagatgggagttcgcggacgcggataggacgggtatttatttacgaatagttagagggagtttttcgatacgaggaagaaggttagtatggcggttagcggggttcggtttcgttcggttcggttttttcgattcgtatttttcgtagttttatagtttaatatgttttagtagtattcgcgtcgtcgtcgtcgttgtcgggtatttttagttttcgtttttcggtttcgtaattttcgttttttcgcgcgttgcggaaaacgtttaaggggaaggttgcgcgcgtattcgtaatcgagttttattttttgtttttgtatttttgtcggtcgggtttggggtttgtttcgtattgatcgcggtgttggaatcgttaagttttcgggcgggggaggggttcggtcgtagagagaattagtttttttcggtttcgttttttaaagttagtaattggtattttgcggaaatcggttggaagggggagtacgggcgacgagcgttagagcgtgatattgagtttatttcgtcgttatttattttattaatacgcgattttgttttcgcgcgattcgt

SEQ ID NO: 8496 - DNA, 725 bp, Artificial Sequence
  chemically treated genomic DNA (Homo sapiens) CpG-island No: 8496
acgaatcgcgcgaaaacaaaatcgcgtattaataaaataaataacgacgaaataaactcaatatcacgctctaacgctcgtcgcccgtactcccccttccaaccgatttccgcaaaataccaattactaactttaaaaaacgaaaccgaaaaaaactaattctctctacgaccgaacccctcccccgcccgaaaacttaacgattccaacaccgcgatcaatacgaaacaaaccccaaacccgaccgacaaaaatacaaaaacaaaaaataaaactcgattacgaatacgcgcgcaaccttccccttaaacgttttccgcaacgcgcgaaaaaacgaaaattacgaaaccgaaaaacgaaaactaaaaatacccgacaacgacgacgacgacgcgaatactactaaaacatattaaactataaaactacgaaaaatacgaatcgaaaaaaccgaaccgaacgaaaccgaaccccgctaaccgccatactaaccttcttcctcgtatcgaaaaactccctctaactattcgtaaataaatacccgtcctatccgcgtccgcgaactcccatctcccgcaaactataaaatcttcgcccgaaataaaaatattacatctccgcgaccgccgaacccccatcccctactactaaactatcccgtcaaaatccccaaaaccgcctaaatacaccctccgcccccaattctcgcgaactccgaaccgaat

SEQ ID NO: 8497 - DNA, 610 bp, Artificial Sequence
  chemically treated genomic DNA (Homo sapiens) CpG-island No: 8497
  unsure (89, 111)
tcggtacgtaatatatattacgttcgatcgattaaaatagcgatttattatagattaagagtttattatatagttttaatttatatttngatattgtatattttttcgganatatttttttcgatttttaagacggcgttcgttttattttggcgagtttaacggttttgattatgaagcggtttttaacgttatcgtcgataaattgattgcgatgggcgttggcgagcgtaaagtgaattatcgtttgcgcgattggggtgtttttcgttagcgttattggggcgcgtcgatttcgatggtgacgttggaagacggtatcgtaatgtcgatttcggacgattagttgtcggtgattttgtcggaagatgtggtaatggacggtattattagttcgattaaagtagattcggagtgggcgaaaattatcgttaacggtatgttagtattgcgtgaaatcgatattttcgatatttttatggagtttttttggtattatgcgcgttatatttgttcgtagtataaagaaggtatgttggatttcgaagcggttaattattggttgtcggtggatatttatattggtggtattgaatacgttattatgtat

SEQ ID NO: 8498 - DNA, 610 bp, Artificial Sequence
  chemically treated genomic DNA (Homo sapiens) CpG-island No: 8498
  unsure (500, 522)
atacataataacgtattcaataccaccaatataaatatccaccgacaaccaataattaaccgcttcgaaatccaacataccttctttatactacgaacaaatataacgcgcataataccaaaaaaactccataaaaatatcgaaaatatcgatttcacgcaatactaacataccgttaacgataattttcgcccactccgaatctactttaatcgaactaataataccgtccattaccacatcttccgacaaaatcaccgacaactaatcgtccgaaatcgacattacgataccgtcttccaacgtcaccatcgaaatcgacgcgccccaataacgctaacgaaaaacaccccaatcgcgcaaacgataattcactttacgctcgccaacgcccatcgcaatcaatttatcgacgataacgttaaaaaccgcttcataatcaaaaccgttaaactcgccaaaataaaacgaacgccgtcttaaaaatcgaaaaaaatatntccgaaaaaatatacaatatcnaaatataaattaaaactatataataaactcttaatctataataaatcgctattttaatcgatcgaacgtaatatatattacgtaccga

SEQ ID NO: 8499 - DNA, 610 bp, Artificial Sequence
  chemically treated genomic DNA (Homo sapiens) CpG-island No: 8499
  unsure (500, 522)
gtgtataatggcgtgtttaatattattaatgtagatatttatcggtagttagtagttagtcgtttcggaatttagtatattttttttgtattgcgggtaagtgtagcgcgtatagtattaggaggattttataaaggtgtcgaaagtgtcggttttacgtagtgttggtatatcgttaacggtagttttcgtttatttcggatttgttttaatcgggttggtaatgtcgtttattattatatttttcggtaggattatcggtagttggtcgttcggggtcggtattacggtatcgttttttagcgttattatcggaatcggcgcgttttagtaacgttgacgggaaatattttagtcgcgtaggcggtagtttattttacgttcgttaacgtttatcgtagttagtttatcggcgatggcgttgaaggtcgttttatggttaagatcgttgaattcgttagagtgaggcgggcgtcgttttgggggtcggaggaggtgtnttcggaagagtgtgtagtgttngagtgtgagttggggttgtgtggtgagtttttagtttgtggtagatcgttgttttggtcggtcgagcgtggtgtgtgttgcgtgtcgg

SEQ ID NO: 8500 - DNA, 610 bp, Artificial Sequence
  chemically treated genomic DNA (Homo sapiens) CpG-island No: 8500
  unsure (89, 111)
ccgacacgcaacacacaccacgctcgaccgaccaaaacaacgatctaccacaaactaaaaactcaccacacaaccccaactcacactcnaacactacacactcttccgaanacacctcctccgacccccaaaacgacgcccgcctcactctaacgaattcaacgatcttaaccataaaacgaccttcaacgccatcgccgataaactaactacgataaacgttaacgaacgtaaaataaactaccgcctacgcgactaaaatatttcccgtcaacgttactaaaacgcgccgattccgataataacgctaaaaaacgataccgtaataccgaccccgaacgaccaactaccgataatcctaccgaaaaatataataataaacgacattaccaacccgattaaaacaaatccgaaataaacgaaaactaccgttaacgatataccaacactacgtaaaaccgacactttcgacacctttataaaatcctcctaatactatacgcgctacacttacccgcaatacaaaaaaaatatactaaattccgaaacgactaactactaactaccgataaatatctacattaataatattaaacacgccattatacac

SEQ ID NO: 8501 - DNA, 577 bp, Artificial Sequence
  chemically treated genomic DNA (Homo sapiens) CpG-island No: 8501
ttaacgttttatcgtttattcgtaggtttatcgtcgcgtttatttttttttattcgttcgttgcgtggtttcgtaggttgtcgttagtttattatcgtcgtgttttatgtttcgtaataatatcgatttattatttatttcgatagtatattttattagcgtttatatcgtattaatttgtcgtcgattttttttttttattcgttcgtatttattagtatattttcgttttatatcgtcgtagtaattagcgttatacgtatacgtttattaatttttacggagttttgtattagtttttttttatacgttattatttttattttattatttttttagtatatttattttttcgtcgacgttcgacgtattacgtttatttagatatagtaatataatatattatagtagttaatttatatttttataacgagttatacgcgattattattaattcgacgcgataatttttatattacgtatacgtttttttaagtatttatttaatatatttaattagacgattagatattatataatataagaatatatttatataatttattttagtagataa

SEQ ID NO: 8502 - DNA, 577 bp, Artificial Sequence
  chemically treated genomic DNA (Homo sapiens) CpG-island No: 8502
ttatctactaaaataaattatataaatatattcttatattatataatatctaatcgtctaattaaatatattaaataaatacttaaaaaaacgtatacgtaatataaaaattatcgcgtcgaattaataataatcgcgtataactcgttataaaaatataaattaactactataatatattatattactatatctaaataaacgtaatacgtcgaacgtcgacgaaaaaataaatatactaaaaaaataataaaataaaaataataacgtataaaaaaaaactaatacaaaactccgtaaaaattaataaacgtatacgtataacgctaattactacgacgatataaaacgaaaatatactaataaatacgaacgaataaaaaaaaaaaatcgacgacaaattaatacgatataaacgctaataaaatatactatcgaaataaataataaatcgatattattacgaaacataaaacacgacgataataaactaacgacaacctacgaaaccacgcaacgaacgaataaaaaaaaataaacgcgacgataaacctacgaataaacgataaaacgttaa

SEQ ID NO: 8503 - DNA, 577 bp, Artificial Sequence
  chemically treated genomic DNA (Homo sapiens) CpG-island No: 8503
ttatttgttgaagtagattgtgtaaatgtgtttttgtgttgtgtggtgtttggtcgtttggttgggtgtgttgggtgggtgtttgggggggcgtgtgcgtagtgtggaggttgtcgcgtcgggttggtggtagtcgcgtgtggttcgttgtggggatgtgggttggttgttgtggtgtgttgtgttgttgtgtttgggtgggcgtggtgcgtcgggcgtcggcggggaggtgggtgtgttgaggaggtggtgggatgggggtggtggcgtgtgggggggggttggtataggatttcgtgggggttggtgggcgtgtgcgtgtggcgttggttgttgcggcggtgtggagcgggagtgtattggtgagtgcggacgagtggggaggagaggtcggcggtaggttggtgcggtatgagcgttggtggagtgtgttgtcggggtaagtgatgagtcggtgttgttgcgaggtatggggtacggcggtggtgagttggcggtagtttgcggggttacgtagcgagcgggtggggaggggtgggcgcggcggtgagtttgcgggtgggcggtggggcgttga

SEQ ID NO: 8504 - DNA, 577 bp, Artificial Sequence
  chemically treated genomic DNA (Homo sapiens) CpG-island No: 8504
tcaacgccccaccgcccacccgcaaactcaccgccgcgcccacccctccccacccgctcgctacgtaaccccgcaaactaccgccaactcaccaccgccgtaccccatacctcgcaacaacaccgactcatcacttaccccgacaacacactccaccaacgctcataccgcaccaacctaccgccgacctctcctccccactcgtccgcactcaccaatacactcccgctccacaccgccgcaacaaccaacgccacacgcacacgcccaccaacccccacgaaatcctataccaacccccccccacacgccaccacccccatcccaccacctcctcaacacacccacctccccgccgacgcccgacgcaccacgcccacccaaacacaacaacacaacacaccacaacaaccaacccacatccccacaacgaaccacacgcgactaccaccaacccgacgcgacaacctccacactacgcacacgcccccccaaacacccacccaacacacccaaccaaacgaccaaacaccacacaacacaaaaacacatttacacaatctacttcaacaaataa

SEQ ID NO: 8505 - DNA, 842 bp, Artificial Sequence
  chemically treated genomic DNA (Homo sapiens) CpG-island No: 8505
  unsure (380)
tttcggtcgttagcgggtaaaggtttgagcgtcgtagttttagtcgttggagttgattagttttttttttttttttaacgtgttacgtatcgcgttatcgaaagcgattagtcgttgtgggatgagtgtacgtagcgcggtattattcgttagtagatcgtgttttagtttttgaattaacgttttggcggtggtgggcggtacggaagtaattatattgagaaattatatcgaaatttagcgggtggggagggggatggggattaattagcggcgtttatcgtttatcgttataaaatgttttaattgttgttgataattgagtatttttggttcggcggtttcgaagatgcggtgttcgttggtcggatgatttaatnacgtaattagatagtgtagtaagttttttagcgtaatgggcgtggtgcgtgaacgaatttagcgcggaggcgttaagattggtaggttgtagattatatcgcgtatgatttcgaacgtcgcggaatttgcgttaacgataatttcggttcgtagttcggttatcggttacgttggcgtagattttattattttcgtttttatgttgcgtatttcggtatgtatgtataacgttgaagagattaaagtgtatcgtttttttgtttgggttgcgtacggtatggatattgaaggttaggattatcgcgtttgttagaattacggttcgttgtataagcgttaatatattattttttgatgtgatgttcggtcgtttcggttatcgggtttgaataagtaagagtggttagtcggataagtaatgttattcggttatattgtaggagcgattatgaaataagaag

SEQ ID NO: 8506 - DNA, 842 bp, Artificial Sequence
  chemically treated genomic DNA (Homo sapiens) CpG-island No: 8506
  unsure (463)
cttcttatttcataatcgctcctacaatataaccgaataacattacttatccgactaaccactcttacttattcaaacccgataaccgaaacgaccgaacatcacatcaaaaaataatatattaacgcttatacaacgaaccgtaattctaacaaacgcgataatcctaaccttcaatatccataccgtacgcaacccaaacaaaaaaacgatacactttaatctcttcaacgttatacatacataccgaaatacgcaacataaaaacgaaaataataaaatctacgccaacgtaaccgataaccgaactacgaaccgaaattatcgttaacgcaaattccgcgacgttcgaaatcatacgcgatataatctacaacctaccaatcttaacgcctccgcgctaaattcgttcacgcaccacgcccattacgctaaaaaacttactacactatctaattacgtnattaaatcatccgaccaacgaacaccgcatcttcgaaaccgccgaaccaaaaatactcaattatcaacaacaattaaaacattttataacgataaacgataaacgccgctaattaatccccatccccctccccacccgctaaatttcgatataatttctcaatataattacttccgtaccgcccaccaccgccaaaacgttaattcaaaaactaaaacacgatctactaacgaataataccgcgctacgtacactcatcccacaacgactaatcgctttcgataacgcgatacgtaacacgttaaaaaaaaaaaaaaaactaatcaactccaacgactaaaactacgacgctcaaacctttacccgctaacgaccgaaa

SEQ ID NO: 8507 - DNA, 842 bp, Artificial Sequence
  chemically treated genomic DNA (Homo sapiens) CpG-island No: 8507
  unsure (463)
ttttttgttttataatcgtttttgtaatatagtcggataatattgtttattcggttaattatttttgtttgtttaggttcggtagtcggagcgatcgggtattatattagggagtaatgtattaacgtttgtataacggatcgtagttttggtaagcgcggtaattttggtttttaatatttatgtcgtgcgtagtttaggtagaaggacgatatattttggtttttttaacgttgtgtatatatatcgggatacgtagtatggaggcgagagtgataaagtttgcgttaacgtggtcgatggtcgaattgcgggtcggaattatcgttggcgtaggtttcgcggcgttcgaagttatgcgcgatatggtttataatttgttagttttaacgttttcgcgttgggttcgtttacgtattacgtttattgcgttggaaaatttgttgtattatttggttgcgtngttagattattcggttagcgaatatcgtattttcgaagtcgtcggattagaggtgtttagttattagtaatagttggaatattttatggcggtgagcggtaagcgtcgttggttgatttttatttttttttttattcgttggatttcggtgtggttttttaatgtgattattttcgtatcgtttattatcgttagggcgttgatttaggggttgaaatacgatttgttggcggatgatatcgcgttacgtgtatttattttataacggttgatcgttttcgatgacgcggtacgtagtacgttgaaagaggaggaaaaattggttaattttagcgattggggttacgacgtttaggtttttgttcgttggcgatcggag

SEQ ID NO: 8508 - DNA, 842 bp, Artificial Sequence
  chemically treated genomic DNA (Homo sapiens) CpG-island No: 8508
  unsure (380)
ctccgatcgccaacgaacaaaaacctaaacgtcgtaaccccaatcgctaaaattaaccaatttttcctcctctttcaacgtactacgtaccgcgtcatcgaaaacgatcaaccgttataaaataaatacacgtaacgcgatatcatccgccaacaaatcgtatttcaacccctaaatcaacgccctaacgataataaacgatacgaaaataatcacattaaaaaaccacaccgaaatccaacgaataaaaaaaaaaataaaaatcaaccaacgacgcttaccgctcaccgccataaaatattccaactattactaataactaaacacctctaatccgacgacttcgaaaatacgatattcgctaaccgaataatctaacnacgcaaccaaataatacaacaaattttccaacgcaataaacgtaatacgtaaacgaacccaacgcgaaaacgttaaaactaacaaattataaaccatatcgcgcataacttcgaacgccgcgaaacctacgccaacgataattccgacccgcaattcgaccatcgaccacgttaacgcaaactttatcactctcgcctccatactacgtatcccgatatatatacacaacgttaaaaaaaccaaaatatatcgtccttctacctaaactacgcacgacataaatattaaaaaccaaaattaccgcgcttaccaaaactacgatccgttatacaaacgttaatacattactccctaatataatacccgatcgctccgactaccgaacctaaacaaacaaaaataattaaccgaataaacaatattatccgactatattacaaaaacgattataaaacaaaaaa

SEQ ID NO: 8509 - DNA, 836 bp, Artificial Sequence
  chemically treated genomic DNA (Homo sapiens) CpG-island No: 8509
  unsure (228)
acgtttcgtttatatcgtagggtagtgcgtcgttgtaatttttataatcgtattatacggtttatattatttttatttttggttttatcggtaggtcgaaaggggtaatggtcgggtagacggttatcgttaatcgtttgttttggatgtaaaattattattcgtttataggcgaagatgtcgttgtttaaaaaacgcgtgtagtttgatgtttcgcgtggggggttnttggtcgggaacgatgcgtttagattttatttaggtttgtcgtcgtttgtatggggttattggggcgcggtgattgaatgtcgataatcgattattgtggatcgagataacgcgagagtacgttgaattgttaggtaaaatcggacgtaggatggaaataaaatagcgtcgggttattatttttacgtaacggtagaatggtttcgaattttatacgtcgggtgttgttttttttagtattaataatcgttgttagttgggcgatagttgacgcgattattatttgtttcggcgttatttggcgggtaatttgtcgatttaattgcgttgttagttttattgttagtagcgaatgatcgttaagcgcgaagaaattagtatcggtattttgtacgttatattttagtaacgacgagaatgtcgcggcgataatcgttttattgttcgttttcggcgtacgttttggcgtttgtgtttttagtttaggtaacggtaaggttttgcgatttagtttgtcgttggcgttaagtggtaattgtggaagttgtagtagaattatcggtattatatgtggtggtaatgttttacgaagttgcggtaaatcgtat

SEQ ID NO: 8510 - DNA, 836 bp, Artificial Sequence
  chemically treated genomic DNA (Homo sapiens) CpG-island No: 8510
  unsure (609)
atacgatttaccgcaacttcgtaaaacattaccaccacatataataccgataattctactacaacttccacaattaccacttaacgccaacgacaaactaaatcgcaaaaccttaccgttacctaaactaaaaacacaaacgccaaaacgtacgccgaaaacgaacaataaaacgattatcgccgcgacattctcgtcgttactaaaatataacgtacaaaataccgatactaatttcttcgcgcttaacgatcattcgctactaacaataaaactaacaacgcaattaaatcgacaaattacccgccaaataacgccgaaacaaataataatcgcgtcaactatcgcccaactaacaacgattattaatactaaaaaaaacaacacccgacgtataaaattcgaaaccattctaccgttacgtaaaaataataacccgacgctattttatttccatcctacgtccgattttacctaacaattcaacgtactctcgcgttatctcgatccacaataatcgattatcgacattcaatcaccgcgccccaataaccccatacaaacgacgacaaacctaaataaaatctaaacgcatcgttcccgaccaanaaccccccacgcgaaacatcaaactacacgcgttttttaaacaacgacatcttcgcctataaacgaataataattttacatccaaaacaaacgattaacgataaccgtctacccgaccattacccctttcgacctaccgataaaaccaaaaataaaaataatataaaccgtataatacgattataaaaattacaacgacgcactaccctacgatataaacgaaacgt

SEQ ID NO: 8511 - DNA, 836 bp, Artificial Sequence
  chemically treated genomic DNA (Homo sapiens) CpG-island No: 8511
  unsure (609)
atacgatttatcgtagtttcgtgaaatattgttattatatatggtatcggtggttttgttgtaatttttatagttattatttagcgttaacggtaagttggatcgtaaagttttatcgttgtttgaattgaaggtataagcgttagggcgtgcgtcgaaagcgggtagtgaaacgattatcgtcgcggtattttcgtcgttgttggggtgtgacgtgtaggatgtcgatgttgattttttcgcgtttggcggttattcgttattggtaatgaaattggtagcgtagttaagtcggtaggttgttcgttaggtgacgtcggggtaagtgatggtcgcgttaattgtcgtttaattggtaacgattattgatgttgaagaagatagtattcggcgtatgggattcgaaattattttgtcgttgcgtgaaggtaatggttcgacgttgttttgtttttattttgcgttcggttttgtttggtagtttagcgtgttttcgcgttatttcgatttataatggtcgattatcggtatttagttatcgcgttttaatggttttatgtagacggcggtaaatttggatgaagtttgagcgtatcgttttcggttagnaattttttacgcgggatattaaattgtacgcgttttttgggtaacgatattttcgtttgtaagcggataatgattttgtatttaaagtaggcggttgacgatagtcgtttgttcgattattatttttttcggtttgtcggtggagttagaggtaaagatgatataagtcgtgtgatgcggttgtgaaagttgtagcggcgtattgttttgcggtgtaagcggggcgt

SEQ ID NO: 8512 - DNA, 836 bp, Artificial Sequence
  chemically treated genomic DNA (Homo sapiens) CpG-island No: 8512
  unsure (228)
acgccccgcttacaccgcaaaacaatacgccgctacaactttcacaaccgcatcacacgacttatatcatctttacctctaactccaccgacaaaccgaaaaaaataataatcgaacaaacgactatcgtcaaccgcctactttaaatacaaaatcattatccgcttacaaacgaaaatatcgttacccaaaaaacgcgtacaatttaatatcccgcgtaaaaaattnctaaccgaaaacgatacgctcaaacttcatccaaatttaccgccgtctacataaaaccattaaaacgcgataactaaataccgataatcgaccattataaatcgaaataacgcgaaaacacgctaaactaccaaacaaaaccgaacgcaaaataaaaacaaaacaacgtcgaaccattaccttcacgcaacgacaaaataatttcgaatcccatacgccgaatactatcttcttcaacatcaataatcgttaccaattaaacgacaattaacgcgaccatcacttaccccgacgtcacctaacgaacaacctaccgacttaactacgctaccaatttcattaccaataacgaataaccgccaaacgcgaaaaaatcaacatcgacatcctacacgtcacaccccaacaacgacgaaaataccgcgacgataatcgtttcactacccgctttcgacgcacgccctaacgcttataccttcaattcaaacaacgataaaactttacgatccaacttaccgttaacgctaaataataactataaaaattacaacaaaaccaccgataccatatataataacaatatttcacgaaactacgataaatcgtat

SEQ ID NO: 8513 - DNA, 501 bp, Artificial Sequence
  chemically treated genomic DNA (Homo sapiens) CpG-island No: 8513
ggttaatattagtagtttttgtcgtttcgtttatttgtatatggtaggtttcgtttttagcgtttagtttcgttatatcgtttattattagtacgcggtagttcggtattttagttagtatttggattgttgtagttattgaatcgatattggcgttgtaggagtcgtcgagtagtaattggttttttgttagttggatggggaatagacggtttggaatagtttttagatttgttagtttcgttttgatagtattaagcgttgcgtttacggatatggagagcgtagcggttgttagcgtattcgtaatattgtgacgtttcggtaacggtagtagaatatcgacgttatcggttggggtttgtagggtaaatttcgtatcgtgcgaggttatatggatattggtggcggtgaaatcgttgttggcggtattgggtgagaaacgttatattttgcgtgagttaattacgttttgttagtttagttagtcgttgtttagta

SEQ ID NO: 8514 - DNA, 501 bp, Artificial Sequence
  chemically treated genomic DNA (Homo sapiens) CpG-island No: 8514
tactaaacaacgactaactaaactaacaaaacgtaattaactcacgcaaaatataacgtttctcacccaataccgccaacaacgatttcaccgccaccaatatccatataacctcgcacgatacgaaatttaccctacaaaccccaaccgataacgtcgatattctactaccgttaccgaaacgtcacaatattacgaatacgctaacaaccgctacgctctccatatccgtaaacgcaacgcttaatactatcaaaacgaaactaacaaatctaaaaactattccaaaccgtctattccccatccaactaacaaaaaaccaattactactcgacgactcctacaacgccaatatcgattcaataactacaacaatccaaatactaactaaaataccgaactaccgcgtactaataataaacgatataacgaaactaaacgctaaaaacgaaacctaccatatacaaataaacgaaacgacaaaaactactaatattaacc

SEQ ID NO: 8515 - DNA, 501 bp, Artificial Sequence
  chemically treated genomic DNA (Homo sapiens) CpG-island No: 8515
tgttaaataacgattggttgaattggtagagcgtaattggtttacgtaaagtgtggcgttttttatttaatgtcgttaatagcgattttatcgttattaatatttatgtgatttcgtacggtacggaatttattttataaattttaatcggtagcgtcgatgttttgttgtcgttgtcggggcgttataatattgcgaatgcgttggtagtcgttgcgttttttatgttcgtgggcgtaacgtttgatgttattaaagcggggttggtaaatttgaaagttgttttaggtcgtttgttttttatttaattggtagaaaattagttgttgttcgacgatttttataacgttaatgtcggtttaatgattgtagtagtttaggtattggttgaaatgtcgggttatcgcgtgttggtggtgggcgatatggcggaattgggcgttgaaagcgaagtttgttatgtataggtgggcgaggcggtaaaagttgttggtattgatt

SEQ ID NO: 8516 - DNA, 501 bp, Artificial Sequence
  chemically treated genomic DNA (Homo sapiens) CpG-island No: 8516
aatcaataccaacaacttttaccgcctcgcccacctatacataacaaacttcgctttcaacgcccaattccgccatatcgcccaccaccaacacgcgataacccgacatttcaaccaatacctaaactactacaatcattaaaccgacattaacgttataaaaatcgtcgaacaacaactaattttctaccaattaaataaaaaacaaacgacctaaaacaactttcaaatttaccaaccccgctttaataacatcaaacgttacgcccacgaacataaaaaacgcaacgactaccaacgcattcgcaatattataacgccccgacaacgacaacaaaacatcgacgctaccgattaaaatttataaaataaattccgtaccgtacgaaatcacataaatattaataacgataaaatcgctattaacgacattaaataaaaaacgccacactttacgtaaaccaattacgctctaccaattcaaccaatcgttatttaaca

SEQ ID NO: 8517 - DNA, 702 bp, Artificial Sequence
  chemically treated genomic DNA (Homo sapiens) CpG-island No: 8517
cgaggatgtcgtcgttgtcgggttcgcggtcgttgtaggtgttttcggtttttgagattagtatcgttttttttcgggttggcggtttcggtttaggtcgcgtatttgttgttgcggttttttcgtcgtcgcgtcggagtttcgcgatgtgttcgcgtttttcgggtagagggttcgtgtcgcgggacgtacggtgggttcgagggggaaaggggtcgcgtggggtttgaggtcgggtttcgggttagttcgggtatagcgtcgagcgtttttcgcgggtcgggagagggggcggtttttcgcgtatttttacggttttattttcgttttcggcggtattttagttttcgtgttcggttcgaggtttgcgagggtcgtttatttggttttgcggcgggtttaggggaggggtttgaggttatcgtagggtttcgcgtcggggcgtaggatgttttgtttcgtttcgttgcgtcgcgttcggtttcgtttcggtttcgttgtttcgttcgtcgcggtttcgtttttatttagcgttcgttttttcgtcgtagcggttgttatataaagggtaggaaatggttgcggcgagggtttttttacgtttttcgttgtatcgtcggcgtatttaggatttgtttttcggtttcggaggatcgtttagtttttaggttttttgttttgggggcgggaaagggagggaag

SEQ ID NO: 8518 - DNA, 702 bp, Artificial Sequence
  chemically treated genomic DNA (Homo sapiens) CpG-island No: 8518
cttccctccctttcccgcccccaaaacaaaaaacctaaaaactaaacgatcctccgaaaccgaaaaacaaatcctaaatacgccgacgatacaacgaaaaacgtaaaaaaaccctcgccgcaaccatttcctaccctttatataacaaccgctacgacgaaaaaacgaacgctaaataaaaacgaaaccgcgacgaacgaaacaacgaaaccgaaacgaaaccgaacgcgacgcaacgaaacgaaacaaaacatcctacgccccgacgcgaaaccctacgataacctcaaacccctcccctaaacccgccgcaaaaccaaataaacgaccctcgcaaacctcgaaccgaacacgaaaactaaaataccgccgaaaacgaaaataaaaccgtaaaaatacgcgaaaaaccgccccctctcccgacccgcgaaaaacgctcgacgctatacccgaactaacccgaaacccgacctcaaaccccacgcgacccctttccccctcgaacccaccgtacgtcccgcgacacgaaccctctacccgaaaaacgcgaacacatcgcgaaactccgacgcgacgacgaaaaaaccgcaacaacaaatacgcgacctaaaccgaaaccgccaacccgaaaaaaaacgatactaatctcaaaaaccgaaaacacctacaacgaccgcgaacccgacaacgacgacatcctcg

SEQ ID NO: 8519 - DNA, 702 bp, Artificial Sequence
  chemically treated genomic DNA (Homo sapiens) CpG-island No: 8519
tttttttttttttttcgtttttagggtaggaagtttgggggttgagcggtttttcgaaatcgagaggtaggttttgggtgcgtcggcggtatagcggagagcgtggagagattttcgtcgtagttattttttgttttttgtgtgatagtcgttgcggcgaaggggcgggcgttgggtgggggcggagtcgcggcgggcggagtagcggggtcggggcggggtcgagcgcggcgtagcggagcggggtagagtattttgcgtttcggcgcggggttttgcggtagttttaggttttttttttggattcgtcgtagagttaggtaagcggttttcgtaggtttcgggtcgggtacggggattaggatgtcgtcggggacggggatgaggtcgtgaggatgcgcgaagggtcgttttttttttcggttcgcggggggcgttcggcgttgtgttcgggttagttcgaggttcggttttaggttttacgcggtttttttttttttcggatttatcgtgcgtttcgcggtacggattttttgttcgggaggcgcgggtatatcgcggagtttcggcgcggcggcgggggagtcgtagtagtaggtgcgcggtttgggtcggagtcgttagttcgggaggaggcggtgttaattttagggatcggagatatttgtagcggtcgcgagttcggtagcggcgatattttcg

SEQ ID NO: 8520 - DNA, 702 bp, Artificial Sequence
  chemically treated genomic DNA (Homo sapiens) CpG-island No: 8520
cgaaaatatcgccgctaccgaactcgcgaccgctacaaatatctccgatccctaaaattaacaccgcctcctcccgaactaacgactccgacccaaaccgcgcacctactactacgactcccccgccgccgcgccgaaactccgcgatatacccgcgcctcccgaacaaaaaatccgtaccgcgaaacgcacgataaatccgaaaaaaaaaaaaaccgcgtaaaacctaaaaccgaacctcgaactaacccgaacacaacgccgaacgccccccgcgaaccgaaaaaaaaaacgacccttcgcgcatcctcacgacctcatccccgtccccgacgacatcctaatccccgtacccgacccgaaacctacgaaaaccgcttacctaactctacgacgaatccaaaaaaaaaacctaaaactaccgcaaaaccccgcgccgaaacgcaaaatactctaccccgctccgctacgccgcgctcgaccccgccccgaccccgctactccgcccgccgcgactccgcccccacccaacgcccgccccttcgccgcaacgactatcacacaaaaaacaaaaaataactacgacgaaaatctctccacgctctccgctataccgccgacgcacccaaaacctacctctcgatttcgaaaaaccgctcaacccccaaacttcctaccctaaaaacgaaaaaaaaaaaaaaa

SEQ ID NO: 8521 - DNA, 547 bp, Artificial Sequence
  chemically treated genomic DNA (Homo sapiens) CpG-island No: 8521
tcgttcgcggattttcgggtttttcgcggagggagaggaggggtcgcgagtgtagcggcgacgggaggggatttggttgttttggtttagcgggtttttagttagcggatagggttcgggtatttcgaggcggtttgtcggcgcgtgtcggcgtttcggttattcgttatttgtttcgggcgcgggttaggtcgtcgggcgttttgagtgtcgtatcgcggggtttgggcgcgtgtcggggcgtattggggttttcgcgtggaagttcgtcggtttttcggttgtttcggattttgtttgtattaggaatttcgaaatttcgttagcgttttgtttgatagagagaaattcgatcgcgttttgatttaggtttaattttcgcgatttttcgcgtatagtcggtttgttagggttcggcgtttttgggcgttgtttagtaaggtattgtgttcgagggttttaggggcgttgggaggtgcgcgggtcgtttgggtttgtcggtttttttcgcggggtgcggtttgttatttttatttttatttttatt

SEQ ID NO: 8522 - DNA, 547 bp, Artificial Sequence
  chemically treated genomic DNA (Homo sapiens) CpG-island No: 8522
aataaaaataaaaataaaaataacaaaccgcaccccgcgaaaaaaaccgacaaacccaaacgacccgcgcacctcccaacgcccctaaaaccctcgaacacaataccttactaaacaacgcccaaaaacgccgaaccctaacaaaccgactatacgcgaaaaatcgcgaaaattaaacctaaatcaaaacgcgatcgaatttctctctatcaaacaaaacgctaacgaaatttcgaaattcctaatacaaacaaaatccgaaacaaccgaaaaaccgacgaacttccacgcgaaaaccccaatacgccccgacacgcgcccaaaccccgcgatacgacactcaaaacgcccgacgacctaacccgcgcccgaaacaaataacgaataaccgaaacgccgacacgcgccgacaaaccgcctcgaaatacccgaaccctatccgctaactaaaaacccgctaaaccaaaacaaccaaatcccctcccgtcgccgctacactcgcgacccctcctctccctccgcgaaaaacccgaaaatccgcgaacga

SEQ ID NO: 8523 - DNA, 547 bp, Artificial Sequence
  chemically treated genomic DNA (Homo sapiens) CpG-island No: 8523
gataggggtaggggtgagggtggtaagtcgtatttcgcggaggaagtcggtaggtttagacggttcgcgtattttttagcgtttttggggttttcgagtataatgttttgttgagtagcgtttaggaacgtcgggttttggtaggtcggttgtgcgcgggagatcgcggagattgggtttgagttagggcgcgatcgggtttttttttgttaggtagagcgttggcgagatttcgagatttttgatataggtaaggttcgaggtagtcggggaatcggcgggtttttacgcgggggttttagtgcgtttcgatacgcgtttaggtttcgcggtgcggtatttagggcgttcggcggtttggttcgcgttcggggtagataacgagtaatcggagcgtcggtacgcgtcggtaggtcgtttcggagtgttcgggttttgttcgttggttgggggttcgttggattagggtagttaggttttttttcgtcgtcgttatattcgcgatttttttttttttttcgcgagaaattcgaggattcgcggacga

SEQ ID NO: 8524 - DNA, 547 bp, Artificial Sequence
  chemically treated genomic DNA (Homo sapiens) CpG-island No: 8524
tcgtccgcgaatcctcgaatttctcgcgaaaaaaaaaaaaaaatcgcgaatataacgacgacgaaaaaaaacctaactaccctaatccaacgaacccccaaccaacgaacaaaacccgaacactccgaaacgacctaccgacgcgtaccgacgctccgattactcgttatctaccccgaacgcgaaccaaaccgccgaacgccctaaataccgcaccgcgaaacctaaacgcgtatcgaaacgcactaaaacccccgcgtaaaaacccgccgattccccgactacctcgaaccttacctatatcaaaaatctcgaaatctcgccaacgctctacctaacaaaaaaaaacccgatcgcgccctaactcaaacccaatctccgcgatctcccgcgcacaaccgacctaccaaaacccgacgttcctaaacgctactcaacaaaacattatactcgaaaaccccaaaaacgctaaaaaatacgcgaaccgtctaaacctaccgacttcctccgcgaaatacgacttaccaccctcacccctacccctatc

SEQ ID NO: 8525 - DNA, 596 bp, Artificial Sequence
  chemically treated genomic DNA (Homo sapiens) CpG-island No: 8525
  unsure (33, 194, 319, 338, 355, 369, 376, 432)
gtattcgacgattcggttcgcgagattttcggncgtgacgtcgggtaggatcgggtcgattggtaatgggggaggttttttatcgcgattggattggatattcggcgggggttttggagaaaggaagggtcggtcggcgggcgttttatagtcggaaggggcgagttcgtaaatagggtttatttttaggtcgnttttttggtaggtatttgtatagtcgcgttatttttatatatttgtttaggtttagcggcgttattttaagaataataagtcgcggtaatagcggcggcggcggttgtagtagcggcggcggtangcggcggaggtcgaagttnggaattttttttgcgtntacgttcggttcgntgagtgngcgtttgcgtagcgtcgttaaagcgcgattcgttttttttcgttacgtcggtacgnttcggcgttttttttggttgaatttcgattgtaggttttaagagagttcgtttcggtttatttcgcgaaatttgttgggattcgtagtcgtttgtcgcgggggtgttgggatgtgtagttttttgttgtggatagttatttttttttttttttttcgttttttt

SEQ ID NO: 8526 - DNA, 596 bp, Artificial Sequence
  chemically treated genomic DNA (Homo sapiens) CpG-island No: 8526
  unsure (165, 221, 228, 242, 259, 278, 403, 564)
aaaaaaacgaaaaaaaaaaaaaaaaataactatccacaacaaaaaactacacatcccaacacccccgcgacaaacgactacgaatcccaacaaatttcgcgaaataaaccgaaacgaactctcttaaaacctacaatcgaaattcaaccaaaaaaaacgccgaancgtaccgacgtaacgaaaaaaaacgaatcgcgctttaacgacgctacgcaaacgcncactcancgaaccgaacgtanacgcaaaaaaaattccnaacttcgacctccgccgcntaccgccgccgctactacaaccgccgccgccgctattaccgcgacttattattcttaaaataacgccgctaaacctaaacaaatatataaaaataacgcgactatacaaatacctaccaaaaaancgacctaaaaataaaccctatttacgaactcgccccttccgactataaaacgcccgccgaccgacccttcctttctccaaaacccccgccgaatatccaatccaatcgcgataaaaaacctcccccattaccaatcgacccgatcctacccgacgtcacgnccgaaaatctcgcgaaccgaatcgtcgaatac

SEQ ID NO: 8527 - DNA, 596 bp, Artificial Sequence
  chemically treated genomic DNA (Homo sapiens) CpG-island No: 8527
  unsure (165, 221, 228, 242, 259, 278, 403, 564)
ggaggaacgggaggaaaagagaggggtggttgtttataatagaaaattatatattttagtattttcgcggtagacgattacgggttttagtaggtttcgcggggtggatcgaagcgggtttttttggggtttgtagtcggggtttagttagagggggcgtcgggncgtatcgacgtagcggggagaaacgggtcgcgttttaacggcgttgcgtaggcgtntatttancgggtcggacgtgnacgtagggaaagttttnggtttcggttttcgtcgtntgtcgtcgtcgttgttatagtcgtcgtcgtcgttgttgtcgcggtttgttatttttaaaatggcgtcgttagatttggataagtatgtggaaatagcgcggttgtgtaagtatttgttagagaancgatttgaaggtgagttttatttgcgggttcgtttttttcggttgtggggcgttcgtcggtcggttttttttttttttaggattttcgtcgggtatttagtttagtcgcggtggagggttttttttattgttagtcgattcggttttattcggcgttacgntcgagggtttcgcgagtcgagtcgtcgaatgt

SEQ ID NO: 8528 - DNA, 596 bp, Artificial Sequence
  chemically treated genomic DNA (Homo sapiens) CpG-island No: 8528
  unsure (33, 194, 319, 338, 355, 369, 376, 432)
acattcgacgactcgactcgcgaaaccctcgancgtaacgccgaataaaaccgaatcgactaacaataaaaaaaaccctccaccgcgactaaactaaatacccgacgaaaatcctaaaaaaaaaaaaaaccgaccgacgaacgccccacaaccgaaaaaaacgaacccgcaaataaaactcaccttcaaatcgnttctctaacaaatacttacacaaccgcgctatttccacatacttatccaaatctaacgacgccattttaaaaataacaaaccgcgacaacaacgacgacgacgactataacaacgacgacgacanacgacgaaaaccgaaaccnaaaactttccctacgtncacgtccgacccgntaaatanacgcctacgcaacgccgttaaaacgcgacccgtttctccccgctacgtcgatacgncccgacgccccctctaactaaaccccgactacaaaccccaaaaaaacccgcttcgatccaccccgcgaaacctactaaaacccgtaatcgtctaccgcgaaaatactaaaatatataattttctattataaacaaccacccctctcttttcctcccgttcctcc

SEQ ID NO: 8529 - DNA, 620 bp, Artificial Sequence
  chemically treated genomic DNA (Homo sapiens) CpG-island No: 8529
ttacgtcgtattcggtatttagtgtttgatgcgacgtttgcgcgttttattaggtttataattagtgcgggtttggtaggttggataaggcgtttacgtcgtattcggtaaatattgcgagagtagattatttcgttttaatcgttttattttttaataattttcgtatttataatcgattcgggtttaacgtcgttagcgtattggtatttatcggaatcggttcgtcgtttatttgcgtcgttagaatttcggtatatagcggggtagaatataaatcgcgagaatttaaagtcgtaaatataaagagatcgttaaaaatcggcgcgtttatcgttttatttttttgttcgttaacgacgtatattttacgagtgttgttttataatcgggaatattgtttattattggtagatgatcgcgggtggtataacgtatatcgtagcgcgtttttttattattgatattaattttttttgtttattgtgtttgcgggaaataattaattaatcgttggcgattttgttgttgatcgtttttattgtacgtcgtattatgtgtcgcgatgataattggtattaatgacggtgattttttgagagtttaatagttaggtatgt

SEQ ID NO: 8530 - DNA, 620 bp, Artificial Sequence
  chemically treated genomic DNA (Homo sapiens) CpG-island No: 8530
acatacctaactattaaactctcaaaaaatcaccgtcattaataccaattatcatcgcgacacataatacgacgtacaataaaaacgatcaacaacaaaatcgccaacgattaattaattatttcccgcaaacacaataaacaaaaaaaattaatatcaataataaaaaaacgcgctacgatatacgttataccacccgcgatcatctaccaataataaacaatattcccgattataaaacaacactcgtaaaatatacgtcgttaacgaacaaaaaaataaaacgataaacgcgccgatttttaacgatctctttatatttacgactttaaattctcgcgatttatattctaccccgctatataccgaaattctaacgacgcaaataaacgacgaaccgattccgataaataccaatacgctaacgacgttaaacccgaatcgattataaatacgaaaattattaaaaaataaaacgattaaaacgaaataatctactctcgcaatatttaccgaatacgacgtaaacgccttatccaacctaccaaacccgcactaattataaacctaataaaacgcgcaaacgtcgcatcaaacactaaataccgaatacgacgtaa

SEQ ID NO: 8531 - DNA, 620 bp, Artificial Sequence
  chemically treated genomic DNA (Homo sapiens) CpG-island No: 8531
gtatgtttaattattagatttttagaggattatcgttattggtgttagttattatcgcggtatatgatacggcgtatagtgaggacgattagtagtagaatcgttagcggttgattgattgtttttcgtaggtatagtgggtaaaagaggttgatgttagtgataaagaggcgcgttgcggtgtgcgttgtgttattcgcgattatttgttaatggtaggtaatgttttcgattatgaggtaatattcgtggaatatgcgtcgttggcggatagaaagatgaggcggtaagcgcgtcggtttttgacgatttttttatgtttgcggttttaggttttcgcggtttgtgttttgtttcgttgtgtgtcgagattttggcggcgtagatgagcgacgaatcgatttcgatggatgttagtacgttggcggcgttaaattcgaatcggttatgggtgcggaaattgttgaagggtaaagcggttaaggcggggtaatttgttttcgtagtgtttgtcggatgcggcgtgaacgttttatttagtttattaaattcgtattgattgtaggtttgataagacgcgtaagcgtcgtattaggtattgaatgtcggatgcggcgtga

SEQ ID NO: 8532 - DNA, 620 bp, Artificial Sequence
  chemically treated genomic DNA (Homo sapiens) CpG-island No: 8532
tcacgccgcatccgacattcaatacctaatacgacgcttacgcgtcttatcaaacctacaatcaatacgaatttaataaactaaataaaacgttcacgccgcatccgacaaacactacgaaaacaaattaccccgccttaaccgctttacccttcaacaatttccgcacccataaccgattcgaatttaacgccgccaacgtactaacatccatcgaaatcgattcgtcgctcatctacgccgccaaaatctcgacacacaacgaaacaaaacacaaaccgcgaaaacctaaaaccgcaaacataaaaaaatcgtcaaaaaccgacgcgcttaccgcctcatctttctatccgccaacgacgcatattccacgaatattacctcataatcgaaaacattacctaccattaacaaataatcgcgaataacacaacgcacaccgcaacgcgcctctttatcactaacatcaacctcttttacccactatacctacgaaaaacaatcaatcaaccgctaacgattctactactaatcgtcctcactatacgccgtatcatataccgcgataataactaacaccaataacgataatcctctaaaaatctaataattaaacatac

SEQ ID NO: 8533 - DNA, 572 bp, Artificial Sequence
  chemically treated genomic DNA (Homo sapiens) CpG-island No: 8533
gatcgcggcgttcgatatcggtcgttcgtattaggtttttgtcgggtttagtttttttgtttgttcgcgggggttcggaggattcggtttagcgtttatacgcggcgtttcgcgtttcgggtttttggttttagaagattggtcgcgcgcggacggtagttcgggatttataaggattttaggtgtttgagttgttgtagttgtgcgcgtcgtgtcgtcgaagtttttgttttcgacgtcgttgtagtttttgtttcggcggtttacgcggtcgtcgcgcgttcgtagtttttacgttttcgcgtttaggtcgggacgatatgttagttttacgtagcgtcgttcgggtaattttcgcggcgcggtttcggcggcggcggcggcggcggcggtagttaagagagtatttttatcgcgcggcggtcgcggggtcgtagcgtttattttcgtcgtcgttttttaatttatttcggcggtttcgaagttttagtttcggttattcgatttaattttgcgtttattgattttattgataaaaatggcgatgtttagtttatgtataatattattcg

SEQ ID NO: 8534 - DNA, 572 bp, Artificial Sequence
  chemically treated genomic DNA (Homo sapiens) CpG-island No: 8534
cgaataatattatacataaactaaacatcgccatttttatcaataaaatcaataaacgcaaaattaaatcgaataaccgaaactaaaacttcgaaaccgccgaaataaattaaaaaacgacgacgaaaataaacgctacgaccccgcgaccgccgcgcgataaaaatactctcttaactaccgccgccgccgccgccgccgccgaaaccgcgccgcgaaaattacccgaacgacgctacgtaaaactaacatatcgtcccgacctaaacgcgaaaacgtaaaaactacgaacgcgcgacgaccgcgtaaaccgccgaaacaaaaactacaacgacgtcgaaaacaaaaacttcgacgacacgacgcgcacaactacaacaactcaaacacctaaaatccttataaatcccgaactaccgtccgcgcgcgaccaatcttctaaaaccaaaaacccgaaacgcgaaacgccgcgtataaacgctaaaccgaatcctccgaacccccgcgaacaaacaaaaaaactaaacccgacaaaaacctaatacgaacgaccgatatcgaacgccgcgatc

SEQ ID NO: 8535 - DNA, 572 bp, Artificial Sequence
  chemically treated genomic DNA (Homo sapiens) CpG-island No: 8535
cgggtgatgttatatataggttgaatatcgttatttttattaatgaaattaatgggcgtaaaattggatcgggtggtcgaggttgagatttcggggtcgtcggggtgagttggggggcggcggcgggagtgggcgttgcgatttcgcgatcgtcgcgcgatggaagtgtttttttggttgtcgtcgtcgtcgtcgtcgtcgtcggagtcgcgtcgcgggggttgttcgagcggcgttgcgtggggttgatatgtcgtttcggtttgggcgcgaggacgtgggggttgcgggcgcgcggcggtcgcgtgagtcgtcggagtaggagttgtagcgacgtcgggagtagaagtttcggcgatacgacgcgtatagttgtagtagtttaagtatttggagtttttgtgagtttcgagttgtcgttcgcgcgcggttagttttttgaagttaggggttcggggcgcgggacgtcgcgtgtgggcgttaggtcgggtttttcgagttttcgcgagtaggtaggggggttgggttcggtaggagtttggtgcgggcgatcgatgtcgggcgtcgcggtt

SEQ ID NO: 8536 - DNA, 572 bp, Artificial Sequence
  chemically treated genomic DNA (Homo sapiens) CpG-island No: 8536
aaccgcgacgcccgacatcgatcgcccgcaccaaactcctaccgaacccaacccccctacctactcgcgaaaactcgaaaaacccgacctaacgcccacacgcgacgtcccgcgccccgaacccctaacttcaaaaaactaaccgcgcgcgaacgacaactcgaaactcacaaaaactccaaatacttaaactactacaactatacgcgtcgtatcgccgaaacttctactcccgacgtcgctacaactcctactccgacgactcacgcgaccgccgcgcgcccgcaacccccacgtcctcgcgcccaaaccgaaacgacatatcaaccccacgcaacgccgctcgaacaacccccgcgacgcgactccgacgacgacgacgacgacgacgacaaccaaaaaaacacttccatcgcgcgacgatcgcgaaatcgcaacgcccactcccgccgccgccccccaactcaccccgacgaccccgaaatctcaacctcgaccacccgatccaattttacgcccattaatttcattaataaaaataacgatattcaacctatatataacatcacccg

SEQ ID NO: 8537 - DNA, 586 bp, Artificial Sequence
  chemically treated genomic DNA (Homo sapiens) CpG-island No: 8537
cgtgggggcggattgcgcggggcggggcgtcgttgcgcggggcggggcgtcgcgggttcgttcgtgatgttttgggatttcgcgttttcgagattcgtagtttacgcgagttgtttgttttttttttgtttggacgcgtatgagggtttcgtttatggatcgcgcggtcgtggcgagggtgggcgcggtagcgagcgttacgtggtgcgttttggtggcgggggtggtgttggtttagtatatatttattttgaagaggaagacggggcggaagattaagattatcgagatggtgagtgtggaggttcggcgcgtttagagtacgcgaagagtcggttgggtcgttcgttggtttcggtagtttgtattgggtcgttgttcggtcgcgacggggagttgtcggtatcgtttgtaaagttgggatttcgttagttcggggattcgtattttgggaggatcgggttcgtttttcgatgcgagttaattttcgcgggtttttggtgattaaagggttgggttttttcggtttgtaagttttttggtttgtttcgtaagttttttggttagggtttttcggtttttaaag

SEQ ID NO: 8538 - DNA, 586 bp, Artificial Sequence
  chemically treated genomic DNA (Homo sapiens) CpG-island No: 8538
ctttaaaaaccgaaaaaccctaaccaaaaaacttacgaaacaaaccaaaaaacttacaaaccgaaaaaacccaaccctttaatcaccaaaaacccgcgaaaattaactcgcatcgaaaaacgaacccgatcctcccaaaatacgaatccccgaactaacgaaatcccaactttacaaacgataccgacaactccccgtcgcgaccgaacaacgacccaatacaaactaccgaaaccaacgaacgacccaaccgactcttcgcgtactctaaacgcgccgaacctccacactcaccatctcgataatcttaatcttccgccccgtcttcctcttcaaaataaatatatactaaaccaacaccacccccgccaccaaaacgcaccacgtaacgctcgctaccgcgcccaccctcgccacgaccgcgcgatccataaacgaaaccctcatacgcgtccaaacaaaaaaaaaacaaacaactcgcgtaaactacgaatctcgaaaacgcgaaatcccaaaacatcacgaacgaacccgcgacgccccgccccgcgcaacgacgccccgccccgcgcaatccgcccccacg

SEQ ID NO: 8539 - DNA, 586 bp, Artificial Sequence
  chemically treated genomic DNA (Homo sapiens) CpG-island No: 8539
ttttaaaaatcgaaaaattttaattaaaagatttacggggtaagttaaagggtttgtaagtcgggggaatttaattttttggttattaaaagttcgcggaagttggttcgtatcgggaggcgggttcggtttttttaaagtgcgggttttcgagttagcgaaattttagttttataggcgatgtcggtagtttttcgtcgcgatcgaatagcggtttagtataggttgtcgaggttagcggacggtttagtcggtttttcgcgtgttttgggcgcgtcgagtttttatatttattatttcgatgattttggtttttcgtttcgtttttttttttaaggtgaatatgtattgagttagtattattttcgttattagggcgtattacgtggcgttcgttatcgcgtttattttcgttacggtcgcgcggtttatggacggggtttttatgcgcgtttaagtaggaaaaaaataggtagttcgcgtagattgcgagtttcggaagcgcgggattttagagtattacggacgagttcgcgacgtttcgtttcgcgtagcgacgtttcgtttcgcgtagttcgtttttacg

SEQ ID NO: 8540 - DNA, 586 bp, Artificial Sequence
  chemically treated genomic DNA (Homo sapiens) CpG-island No: 8540
cgtaaaaacgaactacgcgaaacgaaacgtcgctacgcgaaacgaaacgtcgcgaactcgtccgtaatactctaaaatcccgcgcttccgaaactcgcaatctacgcgaactacctatttttttcctacttaaacgcgcataaaaaccccgtccataaaccgcgcgaccgtaacgaaaataaacgcgataacgaacgccacgtaatacgccctaataacgaaaataatactaactcaatacatattcaccttaaaaaaaaaaacgaaacgaaaaaccaaaatcatcgaaataataaatataaaaactcgacgcgcccaaaacacgcgaaaaaccgactaaaccgtccgctaacctcgacaacctatactaaaccgctattcgatcgcgacgaaaaactaccgacatcgcctataaaactaaaatttcgctaactcgaaaacccgcactttaaaaaaaccgaacccgcctcccgatacgaaccaacttccgcgaacttttaataaccaaaaaattaaattcccccgacttacaaaccctttaacttaccccgtaaatcttttaattaaaatttttcgatttttaaaa

SEQ ID NO: 8541 - DNA, 556 bp, Artificial Sequence
  chemically treated genomic DNA (Homo sapiens) CpG-island No: 8541
  unsure (324, 398)
tcgtacgcgatttggttgggtatttcgttattgcggtacgtttatcgtaatcgttttgcgttgcggtgaggattgcgttatcgttacgaggtacgattagagagacgattttatcgtttttatttaagcgaatatcgcgaatatcggtggtgttgtagtttatcgtacggatagaagattttttaaagcgtattattttatttttagcggagaatagtattatttcgttttcgtcgttggttaggttaacgtcgattagtttatcgtcgttaattagtttgatcgttattttatcggcggtattagacggtttgattcggtgangatagttttttttacgggtacgtagcggtcgttatgaagatttttacgttttttttaaattcggttattggtangattttagtgatacgttcgttttgtttagcggtataggttacgatcgacgatcgcgcgtttaacgatgtttcggtattgataattttatcgatagagcgataacgttcgagaatataaatatggtttgagttttcgtattagtagtcggtcgataagt

SEQ ID NO: 8542 - DNA, 556 bp, Artificial Sequence
  chemically treated genomic DNA (Homo sapiens) CpG-island No: 8542
  unsure (159, 233)
acttatcgaccgactactaatacgaaaactcaaaccatatttatattctcgaacgttatcgctctatcgataaaattatcaataccgaaacatcgttaaacgcgcgatcgtcgatcgtaacctataccgctaaacaaaacgaacgtatcactaaaatcntaccaataaccgaatttaaaaaaaacgtaaaaatcttcataacgaccgctacgtacccgtaaaaaaaactatcntcaccgaatcaaaccgtctaataccgccgataaaataacgatcaaactaattaacgacgataaactaatcgacgttaacctaaccaacgacgaaaacgaaataatactattctccgctaaaaataaaataatacgctttaaaaaatcttctatccgtacgataaactacaacaccaccgatattcgcgatattcgcttaaataaaaacgataaaatcgtctctctaatcgtacctcgtaacgataacgcaatcctcaccgcaacgcaaaacgattacgataaacgtaccgcaataacgaaatacccaaccaaatcgcgtacga

SEQ ID NO: 8543 - DNA, 556 bp, Artificial Sequence
  chemically treated genomic DNA (Homo sapiens) CpG-island No: 8543
  unsure (159, 233)
gtttatcgatcgattgttggtgcgaaaatttaggttatatttgtgttttcgagcgttgtcgttttatcgatgaagttattagtgtcgaagtatcgttgggcgcgcggtcgtcgatcgtaatttgtgtcgttgagtaagacgaacgtattattgggattntgttagtgatcgagtttgaagaaggcgtgaaagtttttatggcgatcgttacgtattcgtgaagaaaattgttnttatcgagttaaatcgtttggtatcgtcggtaaagtggcgattaaattggttgacggcgatgagttgatcggcgttgatttgattagcggcgaagacgaagtaatgttgtttttcgttgaaggtaaagtggtgcgttttaaagagttttttgttcgtgcgatgggttgtaatattatcggtgttcgcggtattcgtttaggtgaaggcgataaagtcgtttttttgatcgtgtttcgtggcgatggcgtaatttttatcgtaacgtaaaacggttacggtaaacgtatcgtagtggcggaatatttaattaagtcgcgtgcga

SEQ ID NO: 8544 - DNA, 556 bp, Artificial Sequence
  chemically treated genomic DNA (Homo sapiens) CpG-island No: 8544
  unsure (324, 398)
tcgcacgcgacttaattaaatattccgccactacgatacgtttaccgtaaccgttttacgttacgataaaaattacgccatcgccacgaaacacgatcaaaaaaacgactttatcgccttcacctaaacgaataccgcgaacaccgataatattacaacccatcgcacgaacaaaaaactctttaaaacgcaccactttaccttcaacgaaaaacaacattacttcgtcttcgccgctaatcaaatcaacgccgatcaactcatcgccgtcaaccaatttaatcgccactttaccgacgataccaaacgatttaactcgataanaacaattttcttcacgaatacgtaacgatcgccataaaaactttcacgccttcttcaaactcgatcactaacanaatcccaataatacgttcgtcttactcaacgacacaaattacgatcgacgaccgcgcgcccaacgatacttcgacactaataacttcatcgataaaacgacaacgctcgaaaacacaaatataacctaaattttcgcaccaacaatcgatcgataaac

SEQ ID NO: 8545 - DNA, 807 bp, Artificial Sequence
  chemically treated genomic DNA (Homo sapiens) CpG-island No: 8545
tttcgcgtaatacggtgttttttcgttattttttttcggcgggatttttcgggtgtgcgcgaatatggagttttttttgttgtttttttttggcgcgtgtttagttatttcgaaattgtacgtttattttacgtaggcgcggatggttatgtagcgtagttgttagtagcgggttaatatcggtaaaatagatcgggtcggcgggttggtggtgataatattcgtttacgtcgttagatagcgtaatgatttcgggcgtaatatttgcgggtagtaaatcggtttgtattaatgtttgcgcgagcggtgagagcgtttcgttaattatttcgataattagttttgttattcgtcgggttatttgtattagttgcgcgtcggttagcgaacgggcgtcggtgtttgtatcgaagtatttatttataattatttgtttcggtttatgagcgtaaattacgcgttcgtggttgtcggtttttagtaggcgattatcgacgttgaggtaggtagtgtcgttgattttttcggtatcgaatagggcgtagttcgcggtgttatcgtcgatgtcgatatttagtattcgatatagtcgttgtttagaaagggtttgtgtttcggtttcgtgatcggcgattacggattcgacgtgtagttcggcgttggtaacgataaaatcgtttagcgattgagagagcgttattatcgtcgggcgagtattgcgggttttcgcgtttttataggtgatgatgatggtattagaattaacgtttttcggtttaatattcgtagtatgatattgttcgagta

SEQ ID NO: 8546 - DNA, 807 bp, Artificial Sequence
  chemically treated genomic DNA (Homo sapiens) CpG-island No: 8546
tactcgaacaatatcatactacgaatattaaaccgaaaaacgttaattctaataccatcatcatcacctataaaaacgcgaaaacccgcaatactcgcccgacgataataacgctctctcaatcgctaaacgattttatcgttaccaacgccgaactacacgtcgaatccgtaatcgccgatcacgaaaccgaaacacaaaccctttctaaacaacgactatatcgaatactaaatatcgacatcgacgataacaccgcgaactacgccctattcgataccgaaaaaatcaacgacactacctacctcaacgtcgataatcgcctactaaaaaccgacaaccacgaacgcgtaatttacgctcataaaccgaaacaaataattataaataaatacttcgatacaaacaccgacgcccgttcgctaaccgacgcgcaactaatacaaataacccgacgaataacaaaactaattatcgaaataattaacgaaacgctctcaccgctcgcgcaaacattaatacaaaccgatttactacccgcaaatattacgcccgaaatcattacgctatctaacgacgtaaacgaatattatcaccaccaacccgccgacccgatctattttaccgatattaacccgctactaacaactacgctacataaccatccgcgcctacgtaaaataaacgtacaatttcgaaataactaaacacgcgccaaaaaaaaacaacaaaaaaaactccatattcgcgcacacccgaaaaatcccgccgaaaaaaaataacgaaaaaacaccgtattacgcgaaa

SEQ ID NO: 8547 - DNA, 807 bp, Artificial Sequence
  chemically treated genomic DNA (Homo sapiens) CpG-island No: 8547
tattcgagtaatattatgttgcgggtattgagtcggaaagcgttgattttggtgttattattattatttgtgaaagcgcgaaaattcgtaatgttcgttcggcggtgatggcgtttttttagtcgttgggcgattttgtcgttgttagcgtcgggttgtacgtcgaattcgtgatcgtcggttacggagtcggggtataaattttttttgaataacggttgtgtcgggtattgaatatcgatatcggcggtggtatcgcgaattacgttttgttcgatgtcggaaaaattagcggtattgtttgttttaacgtcggtggtcgtttgttggaaatcgatagttacgggcgcgtggtttacgtttataaatcggggtagatgattgtggatgagtgtttcggtgtaggtatcgacgttcgttcgttgatcggcgcgtagttggtgtaggtgattcggcggatggtagaattgattgtcgaagtgattgacggaacgtttttatcgttcgcgtaggtattgatgtaaatcggtttgttgttcgtaggtgttacgttcgaaattattacgttgtttggcggcgtgggcgaatgttattattattagttcgtcgattcgatttgttttgtcgatattggttcgttgttggtaattgcgttgtatgattattcgcgtttgcgtgagatgaacgtatagtttcgaagtggttaaatacgcgttaaaaagaggtaataaaagagattttatattcgcgtatattcgaaggatttcgtcgggaaaaagtgacgagaaaatatcgtgttacgcggga

SEQ ID NO: 8548 - DNA, 807 bp, Artificial Sequence
  chemically treated genomic DNA (Homo sapiens) CpG-island No: 8548
tcccgcgtaacacgatattttctcgtcactttttcccgacgaaatccttcgaatatacgcgaatataaaatctcttttattacctctttttaacgcgtatttaaccacttcgaaactatacgttcatctcacgcaaacgcgaataatcatacaacgcaattaccaacaacgaaccaatatcgacaaaacaaatcgaatcgacgaactaataataataacattcgcccacgccgccaaacaacgtaataatttcgaacgtaacacctacgaacaacaaaccgatttacatcaatacctacgcgaacgataaaaacgttccgtcaatcacttcgacaatcaattctaccatccgccgaatcacctacaccaactacgcgccgatcaacgaacgaacgtcgatacctacaccgaaacactcatccacaatcatctaccccgatttataaacgtaaaccacgcgcccgtaactatcgatttccaacaaacgaccaccgacgttaaaacaaacaataccgctaatttttccgacatcgaacaaaacgtaattcgcgataccaccgccgatatcgatattcaatacccgacacaaccgttattcaaaaaaaatttataccccgactccgtaaccgacgatcacgaattcgacgtacaacccgacgctaacaacgacaaaatcgcccaacgactaaaaaaacgccatcaccgccgaacgaacattacgaattttcgcgctttcacaaataataataataacaccaaaatcaacgctttccgactcaatacccgcaacataatattactcgaata

SEQ ID NO: 8549 - DNA, 659 bp, Artificial Sequence
  chemically treated genomic DNA (Homo sapiens) CpG-island No: 8549
  unsure (419)
cgggtattttcgttgttttttcgtatcgtttggaatatcggacggtttttgttacgtatggtttgaatatggcgtttaatattggttttcgtttcgttattaattattggatcgatatcggtggttaggcgattcggattatttattcggtattcggttattgcgtcgcgtatattttttaacgtgtggtcggtaattttattttgtaggtatagtacgcgtacgtcgaataacgttgattcgtattgtcgaacgtcgaggttagtatatttacgacgatttgttcggttagtgttgaagaatcgataattatcgcgtttatgtcgtcggttttagcgatgagcggaatagggcgattttgagcgtttaggcggttggcgatattgcgttgtagtaacgtagcgatttcggttgaattngtaaatattatttcgcgtacgcgattattattcgttatttgcgcgtttacgggttttttatcggatttcgtagtatatattatatatttttcgggggaaatatttttttataaaaaaagcgattttttgcgcgggtattatcggcggttgtttttttcggttttttaattagtttttattttgcgttaatttagggggcgattattcggttaaaaaaaatagcgggaggttttatggatt

SEQ ID NO: 8550 - DNA, 659 bp, Artificial Sequence
  chemically treated genomic DNA (Homo sapiens) CpG-island No: 8550
  unsure (241)
aatccataaaacctcccgctattttttttaaccgaataatcgccccctaaattaacgcaaaataaaaactaattaaaaaaccgaaaaaaacaaccgccgataatacccgcgcaaaaaatcgctttttttataaaaaaatatttcccccgaaaaatatataatatatactacgaaatccgataaaaaacccgtaaacgcgcaaataacgaataataatcgcgtacgcgaaataatatttacnaattcaaccgaaatcgctacgttactacaacgcaatatcgccaaccgcctaaacgctcaaaatcgccctattccgctcatcgctaaaaccgacgacataaacgcgataattatcgattcttcaacactaaccgaacaaatcgtcgtaaatatactaacctcgacgttcgacaatacgaatcaacgttattcgacgtacgcgtactatacctacaaaataaaattaccgaccacacgttaaaaaatatacgcgacgcaataaccgaataccgaataaataatccgaatcgcctaaccaccgatatcgatccaataattaataacgaaacgaaaaccaatattaaacgccatattcaaaccatacgtaacaaaaaccgtccgatattccaaacgatacgaaaaaacaacgaaaatacccg

SEQ ID NO: 8551 - DNA, 659 bp, Artificial Sequence
  chemically treated genomic DNA (Homo sapiens) CpG-island No: 8551
  unsure (241)
agtttatggaatttttcgttgttttttttggtcgggtagtcgttttttgaattggcgtaagataaaagttggttgaaaaatcggaagaaataatcgtcgataatgttcgcgtaaggggtcgttttttttgtggaagggtgtttttttcgaggggtgtgtaatatgtgttgcgaggttcggtgaaaaattcgtgggcgcgtaagtgacgggtgatgatcgcgtgcgcggggtgatgtttatnggtttaatcgaagtcgttacgttattgtagcgtaatatcgttagtcgtttggacgtttagggtcgttttatttcgtttatcgttgaaatcggcggtatgaacgcgatgattgtcgattttttagtattgatcgaataggtcgtcgtggatgtattggtttcggcgttcgatagtgcgggttagcgttgttcggcgtgcgcgtgttgtgtttgtaagatgagattgtcgattatacgttgaaaaatgtgcgcggcgtaatggtcgaatgtcggatgggtaattcgggtcgtttgattatcgatatcggtttagtgattgatagcgaagcgaaagttaatattgagcgttatatttagattatgcgtagtaaaggtcgttcggtgttttaggcggtgcgggaaaatagcgaagatgttcg

SEQ ID NO: 8552 - DNA, 659 bp, Artificial Sequence
  chemically treated genomic DNA (Homo sapiens) CpG-island No: 8552
  unsure (419)
cgaacatcttcgctattttcccgcaccgcctaaaacaccgaacgacctttactacgcataatctaaatataacgctcaatattaactttcgcttcgctatcaatcactaaaccgatatcgataatcaaacgacccgaattacccatccgacattcgaccattacgccgcgcacatttttcaacgtataatcgacaatctcatcttacaaacacaacacgcgcacgccgaacaacgctaacccgcactatcgaacgccgaaaccaatacatccacgacgacctattcgatcaatactaaaaaatcgacaatcatcgcgttcataccgccgatttcaacgataaacgaaataaaacgaccctaaacgtccaaacgactaacgatattacgctacaataacgtaacgacttcgattaaaccnataaacatcaccccgcgcacgcgatcatcacccgtcacttacgcgcccacgaatttttcaccgaacctcgcaacacatattacacacccctcgaaaaaaacacccttccacaaaaaaaacgaccccttacgcgaacattatcgacgattatttcttccgatttttcaaccaacttttatcttacgccaattcaaaaaacgactacccgaccaaaaaaaacaacgaaaaattccataaact

SEQ ID NO: 8553 - DNA, 1736 bp, Artificial Sequence
  chemically treated genomic DNA (Homo sapiens) CpG-island No: 8553
cgaaattggatgaaggttatcggttggtcgtattttagtaagcgttgtcggaagaatttcgtttaagttcgtatcgttatttggcgataaatagttcgtaggggtcgtggtggttgttcggttggtgtgagcgggtgtcggaagcggatgaggtgttgtttgcgtcgttgtcgtcgtatcgggtattgatcgggttggtggatcgtttcgggcgtatatagacgttttatcgcgaagtcgtcggtgaatttagcggcgaaattatcggcgtgacggatggtgtcgggcgttattttcggttggtattgattacgtaggcgtagcgggtagaagaagttcggtagtaggttattttcggcgggacggaatcgttcgttttttttgatattttgtcgggtatatcgaatatggtcgggataacggtattcgtttgtttgtcgtgtgttgacgtacgattcggaatattcggagaatttatttgtcgcgtcgttggtgcgttatggttggacgtttcgcggcgaattggcggcggtgtatgatcgtagtaatatataggtgcgtagttttatttacgatgataaatatcggggtcggatggtggcgtatcgttatacgggtcgatcggaaatttgttatcgttacgatagcgacgggcgggtgatagaatagttaaattcggtaggtttaagttatacgtattagtatgagaaggatcgtattattattatcgatagtttggatcgtcgtgaagtgttgtatacgtaggcgaagcgggttgaagcgggtggtgaaaaaggaatacgcggacggtagcgttacgtagagttagtttgacgtcgtgggtaggtttagggtatagacggatgtcgtagtaggataatagagtatagttcggatgtggtgacgggttttattacgcgtataattacgtcggatggtagggtatcggcgttttattataattattataattagttaacgttagttatcgggtttgacgggttggaattgcgtcgggaatatgatgaattgggtcgtttgatttaggaaattgtttttgacggcgatattattcgttatcgttatgataatttatatagtgatttattttgcgtaacggaagatgttatcggtagtcggaaaattatgacgtggagtcgttacggttagttgttgagttttatcgattgtttcggttatgtaattcgttatgattatgatcgttttcggtagatgacggcggtgtatcgcgagaagggttgagttagtatcgcgtatacgatagtcgttgatagttaattgtcgtaaagatacgtaggtttatgaacgtcgtatgaatataatatcgcgggtggatttgacgtcggtattttttcggacggtagtagaaacggatttagtacgatgtttgggaaaagtcgttcgtattagtaaggcgggtttaatcgttattatgaatacgatgttgttcgaaggttaatggtttgatttatgaaatacgtagtatattatttttcggtattatgatttgatcggttgtataggaatcggtttgaaagtcgggataaggtattattaagatttgtcgtaaattattcgtacgaggtttaagtcggttatttttggtttttgcgaataatcgttttaagtcgatttttagggtgtatttaacggtggtcgttttttatatggtggtttaagaatttttaatttcgaaggatcggttgggtgtttaa

SEQ ID NO: 8554 - DNA, 1736 bp, Artificial Sequence
  chemically treated genomic DNA (Homo sapiens) CpG-island No: 8554
ttaaacacccaaccgatccttcgaaattaaaaattcttaaaccaccatataaaaaacgaccaccgttaaatacaccctaaaaatcgacttaaaacgattattcgcaaaaaccaaaaataaccgacttaaacctcgtacgaataatttacgacaaatcttaataataccttatcccgactttcaaaccgattcctatacaaccgatcaaatcataataccgaaaaataatatactacgtatttcataaatcaaaccattaaccttcgaacaacatcgtattcataataacgattaaacccgccttactaatacgaacgacttttcccaaacatcgtactaaatccgtttctactaccgtccgaaaaaataccgacgtcaaatccacccgcgatattatattcatacgacgttcataaacctacgtatctttacgacaattaactatcaacgactatcgtatacgcgatactaactcaacccttctcgcgatacaccgccgtcatctaccgaaaacgatcataatcataacgaattacataaccgaaacaatcgataaaactcaacaactaaccgtaacgactccacgtcataattttccgactaccgataacatcttccgttacgcaaaataaatcactatataaattatcataacgataacgaataatatcgccgtcaaaaacaatttcctaaatcaaacgacccaattcatcatattcccgacgcaattccaacccgtcaaacccgataactaacgttaactaattataataattataataaaacgccgataccctaccatccgacgtaattatacgcgtaataaaacccgtcaccacatccgaactatactctattatcctactacgacatccgtctataccctaaacctacccacgacgtcaaactaactctacgtaacgctaccgtccgcgtattcctttttcaccacccgcttcaacccgcttcgcctacgtatacaacacttcacgacgatccaaactatcgataataataatacgatccttctcatactaatacgtataacttaaacctaccgaatttaactattctatcacccgcccgtcgctatcgtaacgataacaaatttccgatcgacccgtataacgatacgccaccatccgaccccgatatttatcatcgtaaataaaactacgcacctatatattactacgatcatacaccgccgccaattcgccgcgaaacgtccaaccataacgcaccaacgacgcgacaaataaattctccgaatattccgaatcgtacgtcaacacacgacaaacaaacgaataccgttatcccgaccatattcgatatacccgacaaaatatcaaaaaaaacgaacgattccgtcccgccgaaaataacctactaccgaacttcttctacccgctacgcctacgtaatcaataccaaccgaaaataacgcccgacaccatccgtcacgccgataatttcgccgctaaattcaccgacgacttcgcgataaaacgtctatatacgcccgaaacgatccaccaacccgatcaatacccgatacgacgacaacgacgcaaacaacacctcatccgcttccgacacccgctcacaccaaccgaacaaccaccacgacccctacgaactatttatcgccaaataacgatacgaacttaaacgaaattcttccgacaacgcttactaaaatacgaccaaccgataaccttcatccaatttcg

SEQ ID NO: 8555 - DNA, 1736 bp, Artificial Sequence
  chemically treated genomic DNA (Homo sapiens) CpG-island No: 8555
ttaaatatttaatcggtttttcggaattggagatttttaaattattatgtgggaaacggttatcgttgggtatattttaaaggtcggtttaaggcggttgttcgtaaaggttaagggtgatcgatttaaatttcgtgcgaatagtttgcggtaagttttggtaatattttgtttcggtttttaagtcggtttttgtatagtcggttaggttatggtatcgaaaggtggtgtgttgcgtgttttatgggttaggttattgattttcgggtagtatcgtatttataatggcggttaagttcgttttgttggtacggacggttttttttaagtatcgtattgggttcgtttttgttgtcgttcggggaaatatcggcgttaagtttattcgcgatgttgtatttatacggcgtttatgggtttgcgtgtttttacggtaattaattgttaacggttgtcgtatgcgcggtattgatttagtttttttcgcggtgtatcgtcgttatttgtcgaaagcggttatggttataacgggttatataatcggaatagtcggtgaagtttagtaattgatcgtaacggttttacgttatggtttttcggttgtcggtggtatttttcgttgcgtagggtaagttattgtgtggattattataacggtagcgggtgatatcgtcgttaggggtagttttttgaattagacggtttaatttattatattttcggcgtaattttagttcgttaggttcggtggttgacgttaattggttgtggtggttatagtaaaacgtcgatgttttgttattcggcgtggttatgcgcgtgatgaggttcgttattatattcgggttgtattttgttgttttgttgcggtattcgtttgtgttttgagtttgtttacggcgttaaattgattttgcgtgacgttgtcgttcgcgtgttttttttttattattcgttttagttcgtttcgtttgcgtgtgtagtattttacggcggtttaggttgtcggtgatggtgatgcggttttttttatattgatacgtgtagtttaagtttgtcgggtttagttgttttgttattcgttcgtcgttgtcgtaacggtaatagattttcggtcggttcgtgtgacggtgcgttattattcggtttcggtatttattatcgtaagtaaagttgcgtatttgtgtattgttgcggttatatatcgtcgttagttcgtcgcggggcgtttagttatagcgtattagcggcgcggtaggtaaatttttcgggtatttcgggtcgtgcgttagtatacggtagatagacggatgtcgttgtttcggttatattcggtgtattcggtagggtattaggaaaagcggacggtttcgtttcgtcggaaatggtttgttgtcgggttttttttgttcgttgcgtttgcgtggttagtattagtcggaagtgacgttcggtattattcgttacgtcggtgatttcgtcgttgaatttatcggcggtttcgcggtggaacgtttgtatgcgttcgaagcggtttattagttcggttagtattcggtacggcggtagcggcgtaggtagtattttattcgttttcggtattcgtttatattagtcgagtagttattacggtttttgcggattgtttgtcgttagataacgatgcggatttaagcggagttttttcggtagcgtttgttagagtgcggttagtcggtgatttttatttagtttcg

SEQ ID NO: 8556 - DNA, 1736 bp, Artificial Sequence
  chemically treated genomic DNA (Homo sapiens) CpG-island No: 8556
cgaaactaaataaaaatcaccgactaaccgcactctaacaaacgctaccgaaaaaactccgcttaaatccgcatcgttatctaacgacaaacaatccgcaaaaaccgtaataactactcgactaatataaacgaataccgaaaacgaataaaatactacctacgccgctaccgccgtaccgaatactaaccgaactaataaaccgcttcgaacgcatacaaacgttccaccgcgaaaccgccgataaattcaacgacgaaatcaccgacgtaacgaataataccgaacgtcacttccgactaatactaaccacgcaaacgcaacgaacaaaaaaaacccgacaacaaaccatttccgacgaaacgaaaccgtccgcttttcctaataccctaccgaatacaccgaatataaccgaaacaacgacatccgtctatctaccgtatactaacgcacgacccgaaatacccgaaaaatttacctaccgcgccgctaatacgctataactaaacgccccgcgacgaactaacgacgatatataaccgcaacaatacacaaatacgcaactttacttacgataataaataccgaaaccgaataataacgcaccgtcacacgaaccgaccgaaaatctattaccgttacgacaacgacgaacgaataacaaaacaactaaacccgacaaacttaaactacacgtatcaatataaaaaaaaccgcatcaccatcaccgacaacctaaaccgccgtaaaatactacacacgcaaacgaaacgaactaaaacgaataataaaaaaaaaacacgcgaacgacaacgtcacgcaaaatcaatttaacgccgtaaacaaactcaaaacacaaacgaataccgcaacaaaacaacaaaatacaacccgaatataataacgaacctcatcacgcgcataaccacgccgaataacaaaacatcgacgttttactataaccaccacaaccaattaacgtcaaccaccgaacctaacgaactaaaattacgccgaaaatataataaattaaaccgtctaattcaaaaaactacccctaacgacgatatcacccgctaccgttataataatccacacaataacttaccctacgcaacgaaaaataccaccgacaaccgaaaaaccataacgtaaaaccgttacgatcaattactaaacttcaccgactattccgattatataacccgttataaccataaccgctttcgacaaataacgacgatacaccgcgaaaaaaactaaatcaataccgcgcatacgacaaccgttaacaattaattaccgtaaaaacacgcaaacccataaacgccgtataaatacaacatcgcgaataaacttaacgccgatatttccccgaacgacaacaaaaacgaacccaatacgatacttaaaaaaaaccgtccgtaccaacaaaacgaacttaaccgccattataaatacgatactacccgaaaatcaataacctaacccataaaacacgcaacacaccacctttcgataccataacctaaccgactatacaaaaaccgacttaaaaaccgaaacaaaatattaccaaaacttaccgcaaactattcgcacgaaatttaaatcgatcacccttaacctttacgaacaaccgccttaaaccgacctttaaaatatacccaacgataaccgtttcccacataataatttaaaaatctccaattccgaaaaaccgattaaatatttaa

SEQ ID NO: 8557 - DNA, 517 bp, Artificial Sequence
  chemically treated genomic DNA (Homo sapiens) CpG-island No: 8557
  unsure (353)
gatggggtattcggcgtattgtttatgtgtagcgattgtattagtgtaaacgtttgggcgtatattaggaagtaaaatgtttgtttaacgtcgataaagtgacgtgacggtggtaggatgatatgtggatcggtagcgacgatgtcgtttttttcgcggcgatggcgattatacgtattgtttggttgttacggcgaagtttagttagtagattaagattatattgacgggtgtaagggtggttggagataaatattattattagcgtttcgttatcgattagcgattttggtttatgacggaattcggttggagaattataaaaggtcgttagtttatttcgcgttagtttnagtattttttagcgcgattcgcgtgttggttaatttgggggttataggtaaattttaggtagaaaaaattttcgtcggtgcggatagtacgttgttgataaattgcgttttatgttgtcggatgcggcgtaaacgtttattcggtttataaaaatgtgtaaatt

SEQ ID NO: 8558 - DNA, 517 bp, Artificial Sequence
  chemically treated genomic DNA (Homo sapiens) CpG-island No: 8558
  unsure (165)
aatttacacatttttataaaccgaataaacgtttacgccgcatccgacaacataaaacgcaatttatcaacaacgtactatccgcaccgacgaaaattttttctacctaaaatttacctataacccccaaattaaccaacacgcgaatcgcgctaaaaaatactnaaactaacgcgaaataaactaacgaccttttataattctccaaccgaattccgtcataaaccaaaatcgctaatcgataacgaaacgctaataataatatttatctccaaccacccttacacccgtcaatataatcttaatctactaactaaacttcgccgtaacaaccaaacaatacgtataatcgccatcgccgcgaaaaaaacgacatcgtcgctaccgatccacatatcatcctaccaccgtcacgtcactttatcgacgttaaacaaacattttacttcctaatatacgcccaaacgtttacactaatacaatcgctacacataaacaatacgccgaataccccatc

SEQ ID NO: 8559 - DNA, 517 bp, Artificial Sequence
  chemically treated genomic DNA (Homo sapiens) CpG-island No: 8559
  unsure (165)
aatttgtatatttttgtaggtcggataagcgtttacgtcgtattcggtaatataaagcgtaatttgttagtaacgtgttattcgtatcggcggggattttttttgtttggaatttatttgtaatttttaaattaattagtacgcgagtcgcgttgaaaagtgttnggattgacgcggggtaaattggcggttttttatgattttttaatcggatttcgttatggattaaaatcgttggtcgatgacgaaacgttggtggtggtatttgtttttagttatttttatattcgttagtatgattttgatttgttggttgaatttcgtcgtgataattaggtaatgcgtgtaatcgttatcgtcgcggaaagagcgatatcgtcgttgtcggtttatatattattttgttatcgttacgttattttatcgacgttgagtaggtattttgttttttgatgtacgtttagacgtttgtattgatgtagtcgttgtatatgggtaatacgtcggatattttatt

SEQ ID NO: 8560 - DNA, 517 bp, Artificial Sequence
  chemically treated genomic DNA (Homo sapiens) CpG-island No: 8560
  unsure (353)
aataaaatatccgacgtattacccatatacaacgactacatcaatacaaacgtctaaacgtacatcaaaaaacaaaatacctactcaacgtcgataaaataacgtaacgataacaaaataatatataaaccgacaacgacgatatcgctctttccgcgacgataacgattacacgcattacctaattatcacgacgaaattcaaccaacaaatcaaaatcatactaacgaatataaaaataactaaaaacaaataccaccaccaacgtttcgtcatcgaccaacgattttaatccataacgaaatccgattaaaaaatcataaaaaaccgccaatttaccccgcgtcaatccnaacacttttcaacgcgactcgcgtactaattaatttaaaaattacaaataaattccaaacaaaaaaaatccccgccgatacgaataacacgttactaacaaattacgctttatattaccgaatacgacgtaaacgcttatccgacctacaaaaatatacaaatt

SEQ ID NO: 8561 - DNA, 503 bp, Artificial Sequence
  chemically treated genomic DNA (Homo sapiens) CpG-island No: 8561
cggttatcgttgatggcggtattcgttttttcggcgatatcgttaaagttatcgtcgttggcgtaacgcggtgatggtaggttttatgttggcgggtattgaagaattttcgggtgaaatcgaattttattagggtcgtttttataaattttatcgtggtatgggttttttgggcgcgatgtttaaaggtttttttgatcgttatttttagagcgataacgttgtcgataaattggtgtcggaaggtatcgaaggtcgcgtatttataaaggtcgtttgaaagagattatttattagtagatgggcggtttgcgtttttgtatgggtttgatcggttgtggtattatcgacgaattgcgtattaaagcggagtttgtacgtattagcggtgcgggtatttaggaaagttacgtttacgacgtgattattattaaagagttttcgaattatcgtttgggtttttgatttttttcgttcgattttatgtcgggcgatttatatta

SEQ ID NO: 8562 - DNA, 503 bp, Artificial Sequence
  chemically treated genomic DNA (Homo sapiens) CpG-island No: 8562
taatataaatcgcccgacataaaatcgaacgaaaaaaatcaaaaacccaaacgataattcgaaaactctttaataataatcacgtcgtaaacgtaactttcctaaatacccgcaccgctaatacgtacaaactccgctttaatacgcaattcgtcgataataccacaaccgatcaaacccatacaaaaacgcaaaccgcccatctactaataaataatctctttcaaacgacctttataaatacgcgaccttcgataccttccgacaccaatttatcgacaacgttatcgctctaaaaataacgatcaaaaaaacctttaaacatcgcgcccaaaaaacccataccacgataaaatttataaaaacgaccctaataaaattcgatttcacccgaaaattcttcaatacccgccaacataaaacctaccatcaccgcgttacgccaacgacgataactttaacgatatcgccgaaaaaacgaataccgccatcaacgataaccg

SEQ ID NO: 8563 - DNA, 503 bp, Artificial Sequence
  chemically treated genomic DNA (Homo sapiens) CpG-island No: 8563
taatataaatcgttcgatatgaagtcgggcgaagagaattaggagtttagacggtagttcggggattttttagtaatggttacgtcgtgaacgtggtttttttgaatgttcgtatcgttgatacgtataaatttcgttttagtacgtagttcgtcgatagtattatagtcggttagatttatataggagcgtaggtcgtttatttgttggtgaatgattttttttaggcgatttttataggtacgcgattttcgatatttttcggtattagtttgtcggtagcgttatcgttttggaaataacggttagaggaatttttggatatcgcgtttagggaatttatattacggtaagatttgtaagaacggttttggtagagttcgattttattcggagattttttagtattcgttagtatggaatttattattatcgcgttgcgttagcggcgatagttttggcgatgtcgtcggagaagcgaatatcgttattagcgataatcg

SEQ ID NO: 8564 - DNA, 503 bp, Artificial Sequence
  chemically treated genomic DNA (Homo sapiens) CpG-island No: 8564
cgattatcgctaataacgatattcgcttctccgacgacatcgccaaaactatcgccgctaacgcaacgcgataataataaattccatactaacgaatactaaaaaatctccgaataaaatcgaactctaccaaaaccgttcttacaaatcttaccgtaatataaattccctaaacgcgatatccaaaaattcctctaaccgttatttccaaaacgataacgctaccgacaaactaataccgaaaaatatcgaaaatcgcgtacctataaaaatcgcctaaaaaaaatcattcaccaacaaataaacgacctacgctcctatataaatctaaccgactataatactatcgacgaactacgtactaaaacgaaatttatacgtatcaacgatacgaacattcaaaaaaaccacgttcacgacgtaaccattactaaaaaatccccgaactaccgtctaaactcctaattctcttcgcccgacttcatatcgaacgatttatatta

SEQ ID NO: 8565 - DNA, 931 bp, Artificial Sequence
  chemically treated genomic DNA (Homo sapiens) CpG-island No: 8565
cgtttatggtcgtagttgttgggcggtgtgatgttgacgttgttgttatttcgttcgttaattttgatggggtttgatgatggcgtggcgcgtaatttcgggttggttttgttttttgcgcgtttggtagcgttgtcgttggcgattgttattagtgcgttgttggtgaacgttgtggggattatcggttttatcgggttgttcgcgtcgttgttggtaaaaatgttgggggcgcggcgtttgttgttacgattgatgttggcgtcgttgattgtgcgttgattttttggtttttcgattaaattattttttggttgattcgcgtgtggatggaagtgtttatcggttcggttattgcgttgatcggtgcgtcgttgttattgtggttgttgtcgcgtttacgtagtattagcgcgtcggatatgaaggttaacgatcgtgtcgcggtgaacgttaatatgtgttggcgttatgtttcgcgggcggcgtgttgttgttgatggttgtggtggtggcgttgtcgtttggtcgtgatgcgtacggttggacgtgggcgagcggggcgttgttcgaggatttaatgttttggcgttggtcgcgaattatggcggcgttgtttgcgggcgttatgttggcggtggcgggttgtattatttagcgattgatcggaaattcgatggtaagttcggaagtgttggggattagtttcggcgcggcgtttggcgtggtgttgatgttgtttttggtgtcgggtaatgtttttggttggttgttatttgcgtggtagtttcggcgcggcggtgacgttgttgattattatgatcgtcgtcggtcgcggtggattttttttatatcgtatgttattggcggggatggcgttaagtatcgcgattagtaattaacgtgtagtattttttgatagtataatttt

SEQ ID NO: 8566 - DNA, 931 bp, Artificial Sequence
  chemically treated genomic DNA (Homo sapiens) CpG-island No: 8566
aaaattatactatcaaaaaatactacacgttaattactaatcgcgatacttaacgccatccccgccaataacatacgatataaaaaaaatccaccgcgaccgacgacgatcataataatcaacaacgtcaccgccgcgccgaaactaccacgcaaataacaaccaaccaaaaacattacccgacaccaaaaacaacatcaacaccacgccaaacgccgcgccgaaactaatccccaacacttccgaacttaccatcgaatttccgatcaatcgctaaataatacaacccgccaccgccaacataacgcccgcaaacaacgccgccataattcgcgaccaacgccaaaacattaaatcctcgaacaacgccccgctcgcccacgtccaaccgtacgcatcacgaccaaacgacaacgccaccaccacaaccatcaacaacaacacgccgcccgcgaaacataacgccaacacatattaacgttcaccgcgacacgatcgttaaccttcatatccgacgcgctaatactacgtaaacgcgacaacaaccacaataacaacgacgcaccgatcaacgcaataaccgaaccgataaacacttccatccacacgcgaatcaaccaaaaaataatttaatcgaaaaaccaaaaaatcaacgcacaatcaacgacgccaacatcaatcgtaacaacaaacgccgcgcccccaacatttttaccaacaacgacgcgaacaacccgataaaaccgataatccccacaacgttcaccaacaacgcactaataacaatcgccaacgacaacgctaccaaacgcgcaaaaaacaaaaccaacccgaaattacgcgccacgccatcatcaaaccccatcaaaattaacgaacgaaataacaacaacgtcaacatcacaccgcccaacaactacgaccataaacg

SEQ ID NO: 8567 - DNA, 931 bp, Artificial Sequence
  chemically treated genomic DNA (Homo sapiens) CpG-island No: 8567
aggattatattattaagagatgttatacgttaattgttgatcgcggtgtttaacgttattttcgttagtaatatacggtgtggggaaaatttatcgcggtcggcggcgattataatgattaatagcgttatcgtcgcgtcgagattgttacgtaggtaatagttagttaaaggtattattcggtattagaaatagtattaatattacgttaaacgtcgcgtcggagttaatttttagtattttcgggtttgttatcgggttttcggttagtcgttgaataatatagttcgttatcgttagtatgacgttcgtaaatagcgtcgttataattcgcggttagcgttagggtattaaattttcgagtaacgtttcgttcgtttacgtttagtcgtgcgtattacgattaaacgatagcgttattattatagttattaatagtagtacgtcgttcgcgaggtataacgttagtatatgttggcgtttatcgcgatacgatcgttgatttttatattcggcgcgttaatgttgcgtaaacgcggtaatagttatagtagtagcggcgtatcgattaacgtagtgatcgaatcggtggatatttttatttatacgcgagttagttagaggatgatttgatcggaaagttagaggattagcgtataattaacgacgttagtattagtcgtggtagtagacgtcgcgtttttagtatttttgttagtagcggcgcgaataattcgataaagtcgataatttttatagcgtttattagtagcgtattgatgataatcgttagcgatagcgttgttagacgcgtaagagataaggttagttcgagattgcgcgttacgttattattaagttttattagggttaacggacgaagtagtagtaacgttagtattatatcgtttagtagttgcggttataaacg

SEQ ID NO: 8568 - DNA, 931 bp, Artificial Sequence
  chemically treated genomic DNA (Homo sapiens) CpG-island No: 8568
cgtttataaccgcaactactaaacgatataatactaacgttactactacttcgtccgttaaccctaataaaacttaataataacgtaacgcgcaatctcgaactaaccttatctcttacgcgtctaacaacgctatcgctaacgattatcatcaatacgctactaataaacgctataaaaattatcgactttatcgaattattcgcgccgctactaacaaaaatactaaaaacgcgacgtctactaccacgactaatactaacgtcgttaattatacgctaatcctctaactttccgatcaaatcatcctctaactaactcgcgtataaataaaaatatccaccgattcgatcactacgttaatcgatacgccgctactactataactattaccgcgtttacgcaacattaacgcgccgaatataaaaatcaacgatcgtatcgcgataaacgccaacatatactaacgttatacctcgcgaacgacgtactactattaataactataataataacgctatcgtttaatcgtaatacgcacgactaaacgtaaacgaacgaaacgttactcgaaaatttaataccctaacgctaaccgcgaattataacgacgctatttacgaacgtcatactaacgataacgaactatattattcaacgactaaccgaaaacccgataacaaacccgaaaatactaaaaattaactccgacgcgacgtttaacgtaatattaatactatttctaataccgaataatacctttaactaactattacctacgtaacaatctcgacgcgacgataacgctattaatcattataatcgccgccgaccgcgataaattttccccacaccgtatattactaacgaaaataacgttaaacaccgcgatcaacaattaacgtataacatctcttaataatataatcct

SEQ ID NO: 8569 - DNA, 570 bp, Artificial Sequence
  chemically treated genomic DNA (Homo sapiens) CpG-island No: 8569
attcgcgatatttgttcgcgtttgggttggaggggtatttggttatcgtatttgaattttattttcgcgaaggcgattcgaatgattttgtcgatatttttacgttgttttagcggtttggtagtaaaagtgtttgattcgtaggtgttggtcgatttcgattatgttgttagttgggttttacgtaacggcggcgatttttattcgttaatgtttatcgatttgttcgggttgtcgtatattttgttgtattcgttataatttatagtaaagttttatttgttggtacgtaaatttaggtataagtgtttaattatcgaatatttgtgtatttaacgatttaagttcggtttcgtgtacgaatggcgtattgtaaaattgcggtattggtgttttttcgtgtcgaatatgtacgtcgcggttgggtatagtagtattatattcggcgcgttgcgtatatgataatttgcgttagtttaaattgttggggtcggatgtatgtttttattttatttacgttcgttttttggcggatgagttgtttaaggggttgattaagtattatgatgg

SEQ ID NO: 8570 - DNA, 570 bp, Artificial Sequence
  chemically treated genomic DNA (Homo sapiens) CpG-island No: 8570
ccatcataatacttaatcaaccccttaaacaactcatccgccaaaaaacgaacgtaaataaaataaaaacatacatccgaccccaacaatttaaactaacgcaaattatcatatacgcaacgcgccgaatataatactactatacccaaccgcgacgtacatattcgacacgaaaaaacaccaataccgcaattttacaatacgccattcgtacacgaaaccgaacttaaatcgttaaatacacaaatattcgataattaaacacttatacctaaatttacgtaccaacaaataaaactttactataaattataacgaatacaacaaaatatacgacaacccgaacaaatcgataaacattaacgaataaaaatcgccgccgttacgtaaaacccaactaacaacataatcgaaatcgaccaacacctacgaatcaaacacttttactaccaaaccgctaaaacaacgtaaaaatatcgacaaaatcattcgaatcgccttcgcgaaaataaaattcaaatacgataaccaaatacccctccaacccaaacgcgaacaaatatcgcgaat

SEQ ID NO: 8571 - DNA, 570 bp, Artificial Sequence
  chemically treated genomic DNA (Homo sapiens) CpG-island No: 8571
ttattatggtgtttgattagttttttagatagtttattcgttagaggacgaacgtagatggagtaaaagtatatattcggttttagtagtttgaattgacgtaggttgttatgtacgtaacgcgtcgaatgtggtattgttgtatttagtcgcgacgtgtatattcggtacgaaggaatattagtatcgtagttttgtaatgcgttattcgtgtacgagatcgggtttagatcgttgggtatataggtgttcggtaattgagtatttgtgtttgagtttgcgtattagtagatggggttttattgtggattatggcggatatagtagggtatacggtagttcgagtagatcggtgagtattaacgagtgaagatcgtcgtcgttgcgtgaagtttaattggtaatatgatcgagatcggttagtatttgcgagttaggtatttttgttattagatcgttaaggtaacgtggggatatcggtaaaattattcggatcgttttcgcggaagtaaagtttaggtgcgatagttagatatttttttagtttagacgcggataaatgtcgcggat

SEQ ID NO: 8572 - DNA, 570 bp, Artificial Sequence
  chemically treated genomic DNA (Homo sapiens) CpG-island No: 8572
atccgcgacatttatccgcgtctaaactaaaaaaatatctaactatcgcacctaaactttacttccgcgaaaacgatccgaataattttaccgatatccccacgttaccttaacgatctaataacaaaaatacctaactcgcaaatactaaccgatctcgatcatattaccaattaaacttcacgcaacgacgacgatcttcactcgttaatactcaccgatctactcgaactaccgtataccctactatatccgccataatccacaataaaaccccatctactaatacgcaaactcaaacacaaatactcaattaccgaacacctatatacccaacgatctaaacccgatctcgtacacgaataacgcattacaaaactacgatactaatattccttcgtaccgaatatacacgtcgcgactaaatacaacaataccacattcgacgcgttacgtacataacaacctacgtcaattcaaactactaaaaccgaatatatacttttactccatctacgttcgtcctctaacgaataaactatctaaaaaactaatcaaacaccataataa

SEQ ID NO: 8573 - DNA, 699 bp, Artificial Sequence
  chemically treated genomic DNA (Homo sapiens) CpG-island No: 8573
tcgttagtaggatcgttagattcgggaaggttacgatttattaggcgttttgcgcgaattgtaatacgtcggagagtatggtgttttatttaggcgttggcggttgtgtttttatgtcgaggaaattaagagtagttatatcgagaatggcgttagagaaatcgagcgacgtttgaataattagcggcgtaaggtagttcgggaagatgttaataaatatttgacgtatcgttcggtattcgtacgcgagacgcggtgacgtaatcgcggttaaattttatagtacggcgcgcgtaagtcgtgggtatgtgcggattaaatcgcgcgattcgtattagtattcggcgattttgtttaattatatgtcgtacgagtaggattggtaggagtttcgtgttggtaattcgtattattcgcgagattatgtattaattcgcgttggattagtatcgtggtcgcgaaattagtttcggtgtcgaatgttagacggatgaatagttcgatgagttcgtgcgtaattacgtcgaaatcgttttttattcgtgcggtatttgtaaaatgggttacgacgagatgttcgtggttgacggcgaaggtcgcgtatacgggttagaaggtttgcgtgtggtggatgcgtcgattatgtcgtagattattatcgggaatttgaacgttacgataattatgattggcgagaaa

SEQ ID NO: 8574 - DNA, 699 bp, Artificial Sequence
  chemically treated genomic DNA (Homo sapiens) CpG-island No: 8574
tttctcgccaatcataattatcgtaacgttcaaattcccgataataatctacgacataatcgacgcatccaccacacgcaaaccttctaacccgtatacgcgaccttcgccgtcaaccacgaacatctcgtcgtaacccattttacaaataccgcacgaataaaaaacgatttcgacgtaattacgcacgaactcatcgaactattcatccgtctaacattcgacaccgaaactaatttcgcgaccacgatactaatccaacgcgaattaatacataatctcgcgaataatacgaattaccaacacgaaactcctaccaatcctactcgtacgacatataattaaacaaaatcgccgaatactaatacgaatcgcgcgatttaatccgcacatacccacgacttacgcgcgccgtactataaaatttaaccgcgattacgtcaccgcgtctcgcgtacgaataccgaacgatacgtcaaatatttattaacatcttcccgaactaccttacgccgctaattattcaaacgtcgctcgatttctctaacgccattctcgatataactactcttaatttcctcgacataaaaacacaaccgccaacgcctaaataaaacaccatactctccgacgtattacaattcgcgcaaaacgcctaataaatcgtaaccttcccgaatctaacgatcctactaacga

SEQ ID NO: 8575 - DNA, 699 bp, Artificial Sequence
  chemically treated genomic DNA (Homo sapiens) CpG-island No: 8575
tttttcgttaattataattgtcgtggcgtttaaattttcggtgataatttgcggtataatcgacgtatttattatacgtaggttttttaattcgtgtacgcggttttcgtcgttaattacggatatttcgtcgtaatttattttgtaggtatcgtacggatggaaggcggtttcggcgtggttacgtacgaatttatcgagttgtttattcgtttggtattcgatatcggggttgatttcgcggttacgatattgatttagcgcgggttgatgtatgatttcgcgggtgatgcgaattgttaatacggaatttttgttagttttgttcgtgcgatatgtagttaaatagaatcgtcggatgttggtgcgggtcgcgcgatttaattcgtatatgtttacggtttgcgcgcgtcgtgttgtgaagtttaatcgcgattacgttatcgcgtttcgcgtgcgggtgtcgggcgatgcgttagatgtttattaatattttttcgaattgttttgcgtcgttgattgtttaggcgtcgttcggtttttttaacgttattttcgatatggttgtttttggttttttcggtatgggggtatagtcgttaacgtttgagtggggtattatgtttttcgacgtgttgtagttcgcgtaaagcgtttggtgggtcgtgattttttcgggtttggcgattttgttgacgg

SEQ ID NO: 8576 - DNA, 699 bp, Artificial Sequence
  chemically treated genomic DNA (Homo sapiens) CpG-island No: 8576
ccgtcaacaaaatcgccaaacccgaaaaaatcacgacccaccaaacgctttacgcgaactacaacacgtcgaaaaacataataccccactcaaacgttaacgactatacccccataccgaaaaaaccaaaaacaaccatatcgaaaataacgttaaaaaaaccgaacgacgcctaaacaatcaacgacgcaaaacaattcgaaaaaatattaataaacatctaacgcatcgcccgacacccgcacgcgaaacgcgataacgtaatcgcgattaaacttcacaacacgacgcgcgcaaaccgtaaacatatacgaattaaatcgcgcgacccgcaccaacatccgacgattctatttaactacatatcgcacgaacaaaactaacaaaaattccgtattaacaattcgcatcacccgcgaaatcatacatcaacccgcgctaaatcaatatcgtaaccgcgaaatcaaccccgatatcgaataccaaacgaataaacaactcgataaattcgtacgtaaccacgccgaaaccgccttccatccgtacgatacctacaaaataaattacgacgaaatatccgtaattaacgacgaaaaccgcgtacacgaattaaaaaacctacgtataataaatacgtcgattataccgcaaattatcaccgaaaatttaaacgccacgacaattataattaacgaaaaa

SEQ ID NO: 8577 - DNA, 781 bp, Artificial Sequence
  chemically treated genomic DNA (Homo sapiens) CpG-island No: 8577
tcgcgttttttttcgatgtgtttttattcgatacgttttattttgaaagtaatttcgttattgcgttggtagttagtcgtaatattttcgtcgtcgtatttagttatgtttttggtgaagtgttgcgttagattaaattattgatgcgttttgatgcgcgtttggtgtgggcgattaaagggttggaagcggaaatcggacgtttgttataggacgtggcgcgtgatgttttaggcgattaaatttcgttggcggttatttttggtttaacgtttgcgaaagaattggcggtaggtttatcgatagttatttcgttggtttcgatcgattagatttttgtcgatgatttttagtagttgttgtattgcggtaaaagttttcgcgtttatagtaattcggattttattggcgtgtagtttggcggcgcggtgaaaaacgttattgttattggtgcggggatgttcgacggtatcggttttggtgcgaatgcgcgtacggcgttgattattcgtgggttggttgaaatgtcgcgttttggtgcggcgttgggtgtcgattttgttatttttatgggtatggcggggtttggcgatttggtgtttatttgtatcgataattagtcgcgtaatcgtcgttttggtatgatgttcggttagggtatggatgtataaagcgcgtaggagaagattggttaggtggtggaaggttatcgtaatacgaaagaagttcgcgaattggcgtatcgtttcggcgttgaaatgttaataatcgaggaaattta

SEQ ID NO: 8578 - DNA, 781 bp, Artificial Sequence
  chemically treated genomic DNA (Homo sapiens) CpG-island No: 8578
taaatttcctcgattattaacatttcaacgccgaaacgatacgccaattcgcgaacttctttcgtattacgataaccttccaccacctaaccaatcttctcctacgcgctttatacatccataccctaaccgaacatcataccaaaacgacgattacgcgactaattatcgatacaaataaacaccaaatcgccaaaccccgccatacccataaaaataacaaaatcgacacccaacgccgcaccaaaacgcgacatttcaaccaacccacgaataatcaacgccgtacgcgcattcgcaccaaaaccgataccgtcgaacatccccgcaccaataacaataacgtttttcaccgcgccgccaaactacacgccaataaaatccgaattactataaacgcgaaaacttttaccgcaatacaacaactactaaaaatcatcgacaaaaatctaatcgatcgaaaccaacgaaataactatcgataaacctaccgccaattctttcgcaaacgttaaaccaaaaataaccgccaacgaaatttaatcgcctaaaacatcacgcgccacgtcctataacaaacgtccgatttccgcttccaaccctttaatcgcccacaccaaacgcgcatcaaaacgcatcaataatttaatctaacgcaacacttcaccaaaaacataactaaatacgacgacgaaaatattacgactaactaccaacgcaataacgaaattactttcaaaataaaacgtatcgaataaaaacacatcgaaaaaaaacgcga

SEQ ID NO: 8579 - DNA, 781 bp, Artificial Sequence
  chemically treated genomic DNA (Homo sapiens) CpG-island No: 8579
taaattttttcggttattggtattttaacgtcgaagcgatgcgttagttcgcggatttttttcgtattgcggtagttttttattatttgattaatttttttttgcgcgttttgtatatttatgttttgatcgagtattatgttaaaacggcggttacgcgattggttgtcggtataggtaagtattagatcgttaagtttcgttatgtttataaaggtggtagggtcggtatttagcgtcgtattaagacgcgatattttagttagtttacgggtgattagcgtcgtacgcgtattcgtattaaaatcgatatcgtcggatattttcgtattaatggtaataacgttttttatcgcgtcgttaagttgtacgttaatgaaattcggattgttgtaaacgcggaaatttttgtcgtagtgtagtagttgttggagattatcggtaaaggtttgatcggtcgaggttagcgaaatagttgtcggtaaatttgtcgttagttttttcgtaaacgttgggttagagataatcgttagcggaatttgatcgtttaaggtattacgcgttacgttttgtaatagacgttcggttttcgtttttagttttttggtcgtttatattagacgcgtattaggacgtattagtggtttaatttggcgtagtattttattaaagatatggttgggtacgacgacgagaatattacggttggttgttagcgtagtggcgagattgtttttaagatggagcgtatcgggtaaaggtatatcggggagaaacgcgg

SEQ ID NO: 8580 - DNA, 781 bp, Artificial Sequence
  chemically treated genomic DNA (Homo sapiens) CpG-island No: 8580
ccgcgtttctccccgatatacctttacccgatacgctccatcttaaaaacaatctcgccactacgctaacaaccaaccgtaatattctcgtcgtcgtacccaaccatatctttaataaaatactacgccaaattaaaccactaatacgtcctaatacgcgtctaatataaacgaccaaaaaactaaaaacgaaaaccgaacgtctattacaaaacgtaacgcgtaataccttaaacgatcaaattccgctaacgattatctctaacccaacgtttacgaaaaaactaacgacaaatttaccgacaactatttcgctaacctcgaccgatcaaacctttaccgataatctccaacaactactacactacgacaaaaatttccgcgtttacaacaatccgaatttcattaacgtacaacttaacgacgcgataaaaaacgttattaccattaatacgaaaatatccgacgatatcgattttaatacgaatacgcgtacgacgctaatcacccgtaaactaactaaaatatcgcgtcttaatacgacgctaaataccgaccctaccacctttataaacataacgaaacttaacgatctaatacttacctataccgacaaccaatcgcgtaaccgccgttttaacataatactcgatcaaaacataaatatacaaaacgcgcaaaaaaaaattaatcaaataataaaaaactaccgcaatacgaaaaaaatccgcgaactaacgcatcgcttcgacgttaaaataccaataaccgaaaaaattta

SEQ ID NO: 8581 - DNA, 532 bp, Artificial Sequence
  chemically treated genomic DNA (Homo sapiens) CpG-island No: 8581
gtttgcgggttgaattcgtacgcgggttgaagcggttatatcggtacggaagatatagatattattatttcggtgtttaatgagttgcgggcgtagcggatgaaatttaacggagcgttgtttgtcgataatttgtattagtcgaaatattttgatgacgtcgacgtcgtgttggcgatgtagtacgattagggttttttcgtgttagaatatttaggtttcgggcgcggtataacgtcgaagaagcggttttggtagcgcgcgaatttattgcgtaagggttataaattgtgttggttaaatatttggcgcgagttggttatagtcgtgatcgttttgaaatgttgttggttatcgtcgatgaagtttggtatattagtcgttcgttggtggattttggtatgcgttatcggtaggtgttggtgatgtgacgagcggtttattgttggtgaaattgttttagggggtaacgttgtaggaggcgttggaatatgtgatcgttgtagtttacgaaattatggtgattattaaa

SEQ ID NO: 8582 - DNA, 532 bp, Artificial Sequence
  chemically treated genomic DNA (Homo sapiens) CpG-island No: 8582
tttaataatcaccataatttcgtaaactacaacgatcacatattccaacgcctcctacaacgttaccccctaaaacaatttcaccaacaataaaccgctcgtcacatcaccaacacctaccgataacgcataccaaaatccaccaacgaacgactaatataccaaacttcatcgacgataaccaacaacatttcaaaacgatcacgactataaccaactcgcgccaaatatttaaccaacacaatttataacccttacgcaataaattcgcgcgctaccaaaaccgcttcttcgacgttataccgcgcccgaaacctaaatattctaacacgaaaaaaccctaatcgtactacatcgccaacacgacgtcgacgtcatcaaaatatttcgactaatacaaattatcgacaaacaacgctccgttaaatttcatccgctacgcccgcaactcattaaacaccgaaataataatatctatatcttccgtaccgatataaccgcttcaacccgcgtacgaattcaacccgcaaac

SEQ ID NO: 8583 - DNA, 532 bp, Artificial Sequence
  chemically treated genomic DNA (Homo sapiens) CpG-island No: 8583
tttggtggttattatgatttcgtagattgtagcggttatatgttttagcgttttttgtagcgttgttttttgaagtagttttattagtagtaaatcgttcgttatattattaatatttatcggtggcgtatattaaaatttattagcggacggttgatatgttaggttttatcggcggtgattagtagtattttaaaacggttacggttgtagttagttcgcgttaggtgtttaattaatataatttgtggtttttgcgtaatgagttcgcgcgttgttagaatcgttttttcgacgttatatcgcgttcgaagtttgggtattttagtacgggaagattttgatcgtgttatatcgttagtacggcgtcggcgttattaagatatttcggttgatataggttatcggtaggtagcgtttcgttgagttttattcgttgcgttcgtagtttattgagtatcggaataatggtgtttatgtttttcgtatcgatatgatcgttttagttcgcgtgcggatttagttcgtagat

SEQ ID NO: 8584 - DNA, 532 bp, Artificial Sequence
  chemically treated genomic DNA (Homo sapiens) CpG-island No: 8584
atctacgaactaaatccgcacgcgaactaaaacgatcatatcgatacgaaaaacataaacaccattattccgatactcaataaactacgaacgcaacgaataaaactcaacgaaacgctacctaccgataacctatatcaaccgaaatatcttaataacgccgacgccgtactaacgatataacacgatcaaaatcttcccgtactaaaatacccaaacttcgaacgcgatataacgtcgaaaaaacgattctaacaacgcgcgaactcattacgcaaaaaccacaaattatattaattaaacacctaacgcgaactaactacaaccgtaaccgttttaaaatactactaatcaccgccgataaaacctaacatatcaaccgtccgctaataaattttaatatacgccaccgataaatattaataatataacgaacgatttactactaataaaactacttcaaaaaacaacgctacaaaaaacgctaaaacatataaccgctacaatctacgaaatcataataaccaccaaa

SEQ ID NO: 8585 - DNA, 648 bp, Artificial Sequence
  chemically treated genomic DNA (Homo sapiens) CpG-island No: 8585
tgacggcgaaaggggaagaagtggatcgtatcgtaggtttggagattggcgttgacgattatattttaaaatcgtttaattcgcgtgaattgttggttcgtattcgtgcggtgttgcgtcgttaggcgaacgaattgttaggcgtatcgttataggaagaggcggtaattgttttcggtaagtttaaatttaatttcggtacgcgcgaaatgtttcgcgaagacgagtcgatgtcgtttattagcggtgagtttgcggtattgaaggtattggttagttattcgcgtgagtcgttttttcgcgataagttgatgaattttgttcgtggtcgtgaatatttcgtaatggaacgttttatcgacgtgtagatttcgcgtttgcgtcgtatggtggaagaagatttagcgtattcgcgttatatttagatcgtttggggtttgggttacgtttttgtatcggacggttttaaagtatgaggcgattgcgtttttcgttacgaagtttatttgttcgtacgttattgtttatcgttattttgttgttcgttagtttggtgacgatttatttggtggtgttgaatttcgcgattttgtcgagtttttagtagtttaataaagttttcgcgtacgaagtgcgtatgttgatgat

SEQ ID NO: 8586 - DNA, 648 bp, Artificial Sequence
  chemically treated genomic DNA (Homo sapiens) CpG-island No: 8586
atcatcaacatacgcacttcgtacgcgaaaactttattaaactactaaaaactcgacaaaatcgcgaaattcaacaccaccaaataaatcgtcaccaaactaacgaacaacaaaataacgataaacaataacgtacgaacaaataaacttcgtaacgaaaaacgcaatcgcctcatactttaaaaccgtccgatacaaaaacgtaacccaaaccccaaacgatctaaatataacgcgaatacgctaaatcttcttccaccatacgacgcaaacgcgaaatctacacgtcgataaaacgttccattacgaaatattcacgaccacgaacaaaattcatcaacttatcgcgaaaaaacgactcacgcgaataactaaccaataccttcaataccgcaaactcaccgctaataaacgacatcgactcgtcttcgcgaaacatttcgcgcgtaccgaaattaaatttaaacttaccgaaaacaattaccgcctcttcctataacgatacgcctaacaattcgttcgcctaacgacgcaacaccgcacgaatacgaaccaacaattcacgcgaattaaacgattttaaaatataatcgtcaacgccaatctccaaacctacgatacgatccacttcttcccctttcgccgtca

SEQ ID NO: 8587 - DNA, 648 bp, Artificial Sequence
  chemically treated genomic DNA (Homo sapiens) CpG-island No: 8587
gttattaatatacgtatttcgtacgcgaggattttattaaattgttggaggttcggtaaaatcgcgaagtttagtattattagataagtcgttattaggttggcgaatagtaaggtgacgatgagtaataacgtacgggtaaatgaatttcgtggcgagaagcgtaatcgttttatgttttagagtcgttcggtataaagacgtagtttagattttagacggtttgaatgtaacgcggatgcgttggatttttttttattatgcggcgtagacgcgaaatttgtacgtcgatggagcgttttattgcggaatatttacgattacgggtaaggtttattagtttatcgcgggagagcggtttacgcggatggttgattagtgtttttagtatcgtaaatttatcgttggtgagcggtatcggttcgttttcgcggaatatttcgcgcgtatcgaggttaagtttgaatttatcgaaagtaattatcgtttttttttgtgacggtgcgtttggtagttcgttcgtttgacgacgtagtatcgtacggatacgggttagtagtttacgcgggttaaacggttttggaatgtagtcgttagcgttaatttttaggtttacgatacggtttatttttttttttttcgtcgtta

SEQ ID NO: 8588 - DNA, 648 bp, Artificial Sequence
  chemically treated genomic DNA (Homo sapiens) CpG-island No: 8588
taacgacgaaaaaaaaaaaaataaaccgtatcgtaaacctaaaaattaacgctaacgactacattccaaaaccgtttaacccgcgtaaactactaacccgtatccgtacgatactacgtcgtcaaacgaacgaactaccaaacgcaccgtcacaaaaaaaaacgataattactttcgataaattcaaacttaacctcgatacgcgcgaaatattccgcgaaaacgaaccgataccgctcaccaacgataaatttacgatactaaaaacactaatcaaccatccgcgtaaaccgctctcccgcgataaactaataaaccttacccgtaatcgtaaatattccgcaataaaacgctccatcgacgtacaaatttcgcgtctacgccgcataataaaaaaaaatccaacgcatccgcgttacattcaaaccgtctaaaatctaaactacgtctttataccgaacgactctaaaacataaaacgattacgcttctcgccacgaaattcatttacccgtacgttattactcatcgtcaccttactattcgccaacctaataacgacttatctaataatactaaacttcgcgattttaccgaacctccaacaatttaataaaatcctcgcgtacgaaatacgtatattaataac

SEQ ID NO: 8589 - DNA, 962 bp, Artificial Sequence
  chemically treated genomic DNA (Homo sapiens) CpG-island No: 8589
  unsure (794, 833)
agtgggtagatttggttatcgcgttagcgtaaagtggtggaaattcgtaaaattatcgtcggttgggtgagttagtttttgcgcgttatttcgcgtattttagtattggaagtggtgatgtagtcgttgttcgatatcggcgtttcgcgtgaagtttgcgtcgttaaagtcgcgcgtttttttattcgtttgaacgtgtcggaacgtttgtggtatttggtattatcgatatttttcggtggcgaatagtagcgcgttaatatcgttcgcggttttatcgtcgattattttattttgttgtttgacgaatttatcgtttcgttggacgttaaaaatagcgtcgcggtggtggaattgattcgcgaattaaaattcgtggcgtagtatcgtaggtattttttatgacgaagttgtacgtaatgacgtcgtcgatcgtttgtatttaatgggagtttttttatgattattaataacgttaagttggtgttggaaaacgaggtggtaagcggttcgttggaggtgtagaacggcgaaattcgcgtttttgtcgaaagttagagtcgtttgtcggatgcgatggacggcgaaggcggttggttgttgtcggggttgattgagttgtatatcgataatttggataaattttttatttcgcgttcgaaagttgattggtttgtttattcggcgatgagtagttacgacgcgttgattgtggcgaacggtatttatatcggtaattggatgtcgtgggtaatttggcgacgtgcgtcgatcggcgggcgatttcggttggnagaaatttgggagaaagatggattttaacgtttattcgnaagaagatcgtaagaaaacggcgggcgtttaaatcgggggttcgaagtaaatcgtttttgtaatttttgggtttgtcggaaatttgtcggtaattaaaaaattaaggtttgttcggtttggtttgaaaa

SEQ ID NO: 8590 - DNA, 962 bp, Artificial Sequence
  chemically treated genomic DNA (Homo sapiens) CpG-island No: 8590
  unsure (130, 169)
ttttcaaaccaaaccgaacaaaccttaattttttaattaccgacaaatttccgacaaacccaaaaattacaaaaacgatttacttcgaacccccgatttaaacgcccgccgttttcttacgatcttcttncgaataaacgttaaaatccatctttctcccaaatttctnccaaccgaaatcgcccgccgatcgacgcacgtcgccaaattacccacgacatccaattaccgatataaataccgttcgccacaatcaacgcgtcgtaactactcatcgccgaataaacaaaccaatcaactttcgaacgcgaaataaaaaatttatccaaattatcgatatacaactcaatcaaccccgacaacaaccaaccgccttcgccgtccatcgcatccgacaaacgactctaactttcgacaaaaacgcgaatttcgccgttctacacctccaacgaaccgcttaccacctcgttttccaacaccaacttaacgttattaataatcataaaaaaactcccattaaatacaaacgatcgacgacgtcattacgtacaacttcgtcataaaaaatacctacgatactacgccacgaattttaattcgcgaatcaattccaccaccgcgacgctatttttaacgtccaacgaaacgataaattcgtcaaacaacaaaataaaataatcgacgataaaaccgcgaacgatattaacgcgctactattcgccaccgaaaaatatcgataataccaaataccacaaacgttccgacacgttcaaacgaataaaaaaacgcgcgactttaacgacgcaaacttcacgcgaaacgccgatatcgaacaacgactacatcaccacttccaatactaaaatacgcgaaataacgcgcaaaaactaactcacccaaccgacgataattttacgaatttccaccactttacgctaacgcgataaccaaatctacccact

SEQ ID NO: 8591 - DNA, 962 bp, Artificial Sequence
  chemically treated genomic DNA (Homo sapiens) CpG-island No: 8591
  unsure (130, 169)
tttttaaattaagtcgggtaaattttggttttttaattgtcggtaaattttcggtaggtttaaagattgtaagaacggtttgtttcgggttttcggtttgaacgttcgtcgtttttttgcggtttttttncgaatgggcgttggaatttattttttttttagatttttnttagtcggaatcgttcgtcggtcggcgtacgtcgttaaattgtttacggtatttagttatcggtgtgaatgtcgttcgttataattagcgcgtcgtggttgtttatcgtcgagtgggtaggttagttaattttcgggcgcggggtgaagaatttatttagattatcggtatgtagtttaattagtttcggtagtagttagtcgttttcgtcgtttatcgtattcggtaggcggttttggttttcggtaaaggcgcggatttcgtcgttttgtatttttagcgaatcgtttattatttcgttttttagtattagtttaacgttattgataattatgaagaggtttttattgggtgtaggcggtcggcgacgttattacgtatagtttcgttatggaagatgtttacgatgttgcgttacgggttttggttcgcgaattagttttattatcgcggcgttgtttttggcgtttagcgaggcggtaggttcgttaagtagtagaatggggtagtcgacgataaagtcgcgggcgatgttgacgcgttgttgttcgttatcggaaaatgtcgatggtgttaggtgttataggcgtttcggtacgtttaggcgggtgagaagacgcgcggttttagcggcgtaggttttacgcggaacgtcggtatcgagtagcggttgtattattatttttagtgttgagatacgcgggatgacgcgtagaaattggtttatttagtcgacggtggttttgcggatttttattattttgcgttggcgcggtgattaggtttatttatt

SEQ ID NO: 8592 - DNA, 962 bp, Artificial Sequence
  chemically treated genomic DNA (Homo sapiens) CpG-island No: 8592
  unsure (794, 833)
aataaataaacctaatcaccgcgccaacgcaaaataataaaaatccgcaaaaccaccgtcgactaaataaaccaatttctacgcgtcatcccgcgtatctcaacactaaaaataataatacaaccgctactcgataccgacgttccgcgtaaaacctacgccgctaaaaccgcgcgtcttctcacccgcctaaacgtaccgaaacgcctataacacctaacaccatcgacattttccgataacgaacaacaacgcgtcaacatcgcccgcgactttatcgtcgactaccccattctactacttaacgaacctaccgcctcgctaaacgccaaaaacaacgccgcgataataaaactaattcgcgaaccaaaacccgtaacgcaacatcgtaaacatcttccataacgaaactatacgtaataacgtcgccgaccgcctacacccaataaaaacctcttcataattatcaataacgttaaactaatactaaaaaacgaaataataaacgattcgctaaaaatacaaaacgacgaaatccgcgcctttaccgaaaaccaaaaccgcctaccgaatacgataaacgacgaaaacgactaactactaccgaaactaattaaactacataccgataatctaaataaattcttcaccccgcgcccgaaaattaactaacctacccactcgacgataaacaaccacgacgcgctaattataacgaacgacattcacaccgataactaaataccgtaaacaatttaacgacgtacgccgaccgacgaacgattccgactaanaaaaatctaaaaaaaaaataaattccaacgcccattcgnaaaaaaaccgcaaaaaaacgacgaacgttcaaaccgaaaacccgaaacaaaccgttcttacaatctttaaacctaccgaaaatttaccgacaattaaaaaaccaaaatttacccgacttaatttaaaaa

SEQ ID NO: 8593 - DNA, 543 bp, Artificial Sequence
  chemically treated genomic DNA (Homo sapiens) CpG-island No: 8593
tatcggtaacgatgatcgattggcgttttgttgtttatgaaatgcgtttgtttaaatcgttagaagagattgtcgtatttcgtcgcgcgggagaaattatcgttatggtatatatacgggcgatggaaaaatgtcgttcgggaatgttcgagtattatttggaaggcgaaatttattacgaatttaatcgttacggtgcgcgttattcgttttataatattattgtcggtagcggtgaaaacggtattattttgtattatatcgaaaacgagtgtgaaatgcgcgacggcgatttggtgttgattgacgcgggttgtgaatataaaggttacgttggcgatattattcgtattttttcggttaacggtaaatttatttaggtttagcgtgaaatttacgatattgtgttggagtttttcgaaattagtttgcgtttgtatcgttcgggaatttttattttggaagttattggtgaagtggtgcgtattatggttagcggtttggtaaaattcggtattttgaaaggtgatgttgatgaattga

SEQ ID NO: 8594 - DNA, 543 bp, Artificial Sequence
  chemically treated genomic DNA (Homo sapiens) CpG-island No: 8594
tcaattcatcaacatcacctttcaaaataccgaattttaccaaaccgctaaccataatacgcaccacttcaccaataacttccaaaataaaaattcccgaacgatacaaacgcaaactaatttcgaaaaactccaacacaatatcgtaaatttcacgctaaacctaaataaatttaccgttaaccgaaaaaatacgaataatatcgccaacgtaacctttatattcacaacccgcgtcaatcaacaccaaatcgccgtcgcgcatttcacactcgttttcgatataatacaaaataataccgttttcaccgctaccgacaataatattataaaacgaataacgcgcaccgtaacgattaaattcgtaataaatttcgccttccaaataatactcgaacattcccgaacgacatttttccatcgcccgtatatataccataacgataatttctcccgcgcgacgaaatacgacaatctcttctaacgatttaaacaaacgcatttcataaacaacaaaacgccaatcgatcatcgttaccgata

SEQ ID NO: 8595 - DNA, 543 bp, Artificial Sequence
  chemically treated genomic DNA (Homo sapiens) CpG-island No: 8595
ttagtttattaatattattttttaggatgtcgagttttattaggtcgttaattatgatgcgtattattttattagtgatttttagaatggaagttttcggacgatataggcgtaggttggtttcgagagattttagtataatgtcgtagattttacgttgggtttgggtgaatttgtcgttgatcgggaaggtgcgggtaatatcgttagcgtaatttttgtatttataattcgcgttaattaatattaggtcgtcgtcgcgtattttatattcgttttcggtgtagtgtagaatgatgtcgtttttatcgttgtcgataatggtgttataggacggatagcgcgtatcgtggcggttaaattcgtggtgaatttcgttttttagatggtattcgaatattttcggacggtatttttttatcgttcgtgtatgtgttatggcggtgatttttttcgcgcggcggagtacggtaattttttttggcgatttgaataggcgtattttatgaataataggacgttagtcgattatcgttgtcggtg

SEQ ID NO: 8596 - DNA, 543 bp, Artificial Sequence
  chemically treated genomic DNA (Homo sapiens) CpG-island No: 8596
caccgacaacgataatcgactaacgtcctattattcataaaatacgcctattcaaatcgccaaaaaaaattaccgtactccgccgcgcgaaaaaaatcaccgccataacacatacacgaacgataaaaaaataccgtccgaaaatattcgaataccatctaaaaaacgaaattcaccacgaatttaaccgccacgatacgcgctatccgtcctataacaccattatcgacaacgataaaaacgacatcattctacactacaccgaaaacgaatataaaatacgcgacgacgacctaatattaattaacgcgaattataaatacaaaaattacgctaacgatattacccgcaccttcccgatcaacgacaaattcacccaaacccaacgtaaaatctacgacattatactaaaatctctcgaaaccaacctacgcctatatcgtccgaaaacttccattctaaaaatcactaataaaataatacgcatcataattaacgacctaataaaactcgacatcctaaaaaataatattaataaactaa

SEQ ID NO: 8597 - DNA, 687 bp, Artificial Sequence
  chemically treated genomic DNA (Homo sapiens) CpG-island No: 8597
  unsure (263)
gttgtatagttaggagttgttcgattcgttacgggcgatgttggcgaaaatttttgttgcgttaacgttcggtaaattgaaatatagttttttttgtaatagcggtatcgagttcgttgaagtagcgttgaagttggcgaaagtttatagttagtcgcgcggttaggtttatttttattagtaatagcggcgcgttttacggtaaattatttggcgcgttgtcggttacggcgaaattcgattttcgtaaatcgtttatgttngtattgtcgggttacgttatgtgtcgtttggtaatatcgaagtatgcgtacggttttttttataggattcggtatcggcgttcggttatatttttacgtacgtttttgttttcggtcgaaataggtagtagttttcggtgacgtttatcggtgatgtacgtattatatgcggtattacgagattaataaagttaatcgggtcgtagggttacgtcggtagatgttatggcgatagttagtaataaagtttagaatcgggtatggggtatcgatatatcgagcgtggtggcgtacgtatcgtcgagtgtaaggaggtcgagatcgcggtaaaaatttaggtttagcggtagaaataaaattattagcgggatggtaatttttataaagttttagttacggttttataagttgtcggttagttata

SEQ ID NO: 8598 - DNA, 687 bp, Artificial Sequence
  chemically treated genomic DNA (Homo sapiens) CpG-island No: 8598
  unsure (425)
tataactaaccgacaacttataaaaccgtaactaaaactttataaaaattaccatcccgctaataattttatttctaccgctaaacctaaatttttaccgcgatctcgacctccttacactcgacgatacgtacgccaccacgctcgatatatcgataccccatacccgattctaaactttattactaactatcgccataacatctaccgacgtaaccctacgacccgattaactttattaatctcgtaataccgcatataatacgtacatcaccgataaacgtcaccgaaaactactacctatttcgaccgaaaacaaaaacgtacgtaaaaatataaccgaacgccgataccgaatcctataaaaaaaaccgtacgcatacttcgatattaccaaacgacacataacgtaacccgacaatacnaacataaacgatttacgaaaatcgaatttcgccgtaaccgacaacgcgccaaataatttaccgtaaaacgcgccgctattactaataaaaataaacctaaccgcgcgactaactataaactttcgccaacttcaacgctacttcaacgaactcgataccgctattacaaaaaaaactatatttcaatttaccgaacgttaacgcaacaaaaattttcgccaacatcgcccgtaacgaatcgaacaactcctaactatacaac

SEQ ID NO: 8599 - DNA, 687 bp, Artificial Sequence
  chemically treated genomic DNA (Homo sapiens) CpG-island No: 8599
  unsure (425)
tgtggttgatcggtagtttatggggtcgtgattggagttttgtgaagattgttatttcgttgatgattttatttttgtcgttgagtttgagtttttgtcgcgatttcgatttttttgtattcggcgatgcgtgcgttattacgttcggtgtgtcggtgttttatattcgattttgggttttgttattagttgtcgttatgatatttatcggcgtggttttgcggttcgattagttttattggtttcgtggtgtcgtatatgatgcgtatattatcggtggacgttatcggagattgttgtttgtttcggtcggggataggggcgtgcgtgggagtatgatcgagcgtcggtatcggattttgtggaaagagtcgtgcgtatgtttcgatattgttaaacggtatatgacgtagttcggtagtatnggtataaacggtttgcggaagtcggatttcgtcgtggtcgatagcgcgttaagtgatttatcgtggaacgcgtcgttgttgttaataaaagtaaatttggtcgcgcggttgattgtaagttttcgttagttttagcgttgttttaacggattcggtgtcgttattatagaagaagttgtattttagtttatcgggcgttagcgtagtaagggttttcgttaatatcgttcgtaacggatcgagtagtttttggttgtgtagt

SEQ ID NO: 8600 - DNA, 687 bp, Artificial Sequence
  chemically treated genomic DNA (Homo sapiens) CpG-island No: 8600
  unsure (263)
actacacaaccaaaaactactcgatccgttacgaacgatattaacgaaaacccttactacgctaacgcccgataaactaaaatacaacttcttctataataacgacaccgaatccgttaaaacaacgctaaaactaacgaaaacttacaatcaaccgcgcgaccaaatttacttttattaacaacaacgacgcgttccacgataaatcacttaacgcgctatcgaccacgacgaaatccgacttccgcaaaccgtttataccnatactaccgaactacgtcatataccgtttaacaatatcgaaacatacgcacgactctttccacaaaatccgataccgacgctcgatcatactcccacgcacgcccctatccccgaccgaaacaaacaacaatctccgataacgtccaccgataatatacgcatcatatacgacaccacgaaaccaataaaactaatcgaaccgcaaaaccacgccgataaatatcataacgacaactaataacaaaacccaaaatcgaatataaaacaccgacacaccgaacgtaataacgcacgcatcgccgaatacaaaaaaatcgaaatcgcgacaaaaactcaaactcaacgacaaaaataaaatcatcaacgaaataacaatcttcacaaaactccaatcacgaccccataaactaccgatcaaccaca

SEQ ID NO: 8601 - DNA, 884 bp, Artificial Sequence
  chemically treated genomic DNA (Homo sapiens) CpG-island No: 8601
gcggtaatgcgatgattagtcgtggtagaggatttttaagtatggcgatatgacgtatatggcggtagtattgtttagggtttagtcggggttgcgtattgcgtgtttttatcggcgtggttgttcggtgtgtttcggcggagtgacgttcggttattcggttaattttttgttcggtgtaaaggtttttttcggtgaaatcgatatcgttttgttcggttcgttgtcgtttattttttttcgtatttatagtagttatcggataaaaacgttcgcgtcggtggggagtttcggtttcggttggaaaatgtttgcggatattcgtttatagttgcgcgataatatattgatatttagtgataacggcggtagaagtttgtattttgagtatttgtttttcggtgaggacggttatagtcgtagcgagttattgtggttggtgcgcggcggcgtggcgaaattggatgaaggttatcggttggtcgtattttggtatgcgttgtcggaagaatttcgtttaagttcgtatcgttatttggcgataaatagttcgtatgggtcgtggtggttgttcggttggtgtgagcgggtgtcggaagcggatgaggtgttgtttgcgtcgttgtcgtcgtatcgggtattgatcgggttggtggattttttcgggcgatatagacgttttaacgcgaacgtcggtgaatttacggcgaattacggcgtgacgatgtgttggcgtatttcggttgtattatattagttagggtagagattcgtatagtatttcgcggacgacgtcgtttttatatttcggtaacgatatgcggaacgtaacgaagaaaaaatgcgtttgttgtaaacgttgatcgaagaagagtggttagata

SEQ ID NO: 8602 - DNA, 884 bp, Artificial Sequence
  chemically treated genomic DNA (Homo sapiens) CpG-island No: 8602
tatctaaccactcttcttcgatcaacgtttacaacaaacgcattttttcttcgttacgttccgcatatcgttaccgaaatataaaaacgacgtcgtccgcgaaatactatacgaatctctaccctaactaatataatacaaccgaaatacgccaacacatcgtcacgccgtaattcgccgtaaattcaccgacgttcgcgttaaaacgtctatatcgcccgaaaaaatccaccaacccgatcaatacccgatacgacgacaacgacgcaaacaacacctcatccgcttccgacacccgctcacaccaaccgaacaaccaccacgacccatacgaactatttatcgccaaataacgatacgaacttaaacgaaattcttccgacaacgcataccaaaatacgaccaaccgataaccttcatccaatttcgccacgccgccgcgcaccaaccacaataactcgctacgactataaccgtcctcaccgaaaaacaaatactcaaaatacaaacttctaccgccgttatcactaaatatcaatatattatcgcgcaactataaacgaatatccgcaaacattttccaaccgaaaccgaaactccccaccgacgcgaacgtttttatccgataactactataaatacgaaaaaaaataaacgacaacgaaccgaacaaaacgatatcgatttcaccgaaaaaaacctttacaccgaacaaaaaattaaccgaataaccgaacgtcactccgccgaaacacaccgaacaaccacgccgataaaaacacgcaatacgcaaccccgactaaaccctaaacaatactaccgccatatacgtcatatcgccatacttaaaaatcctctaccacgactaatcatcgcattaccgc

SEQ ID NO: 8603 - DNA, 884 bp, Artificial Sequence
  chemically treated genomic DNA (Homo sapiens) CpG-island No: 8603
tgtttggttattttttttcgattagcgtttgtagtaaacgtatttttttttcgttgcgtttcgtatatcgttatcggagtatagaagcgacgtcgttcgcggaatgttgtgcgggtttttgttttggttggtgtagtatagtcgaagtacgttagtatatcgttacgtcgtgattcgtcgtgaatttatcggcgttcgcgttgaaacgtttgtgtcgttcgaaggggtttattagttcggttagtattcggtacggcggtagcggcgtaggtagtattttattcgttttcggtattcgtttatattaatcgagtagttattacggtttatgcggattgtttgtcgttagataacgatgcggatttaagcggagttttttcggtagcgtatgttagagtgcggttagtcggtgatttttatttagtttcgttacgtcgtcgcgtattagttatagtgattcgttgcggttgtaatcgtttttatcgggaaataggtgtttaaaatataggtttttgtcgtcgttattattgagtattagtgtgttatcgcgtagttgtaagcggatattcgtaggtattttttagtcggggtcgaggttttttatcggcgcgagcgtttttgttcggtaattgttgtaggtgcgggagaggatgaacggtagcgggtcgggtagggcgatgtcggttttatcgggaaggatttttgtatcgagtaggggattgatcggatggtcggacgttatttcgtcggggtatatcgaatagttacgtcggtgggggtacgtaatgcgtagtttcggttgaattttgaataatgttatcgttatatgcgttatgtcgttatgtttggggattttttgttacggttggttatcgtattgtcgt

SEQ ID NO: 8604 - DNA, 884 bp, Artificial Sequence
  chemically treated genomic DNA (Homo sapiens) CpG-island No: 8604
acgacaatacgataaccaaccgtaacaaaaaatccccaaacataacgacataacgcatataacgataacattattcaaaattcaaccgaaactacgcattacgtacccccaccgacgtaactattcgatataccccgacgaaataacgtccgaccatccgatcaatcccctactcgatacaaaaatccttcccgataaaaccgacatcgccctacccgacccgctaccgttcatcctctcccgcacctacaacaattaccgaacaaaaacgctcgcgccgataaaaaacctcgaccccgactaaaaaatacctacgaatatccgcttacaactacgcgataacacactaatactcaataataacgacgacaaaaacctatattttaaacacctatttcccgataaaaacgattacaaccgcaacgaatcactataactaatacgcgacgacgtaacgaaactaaataaaaatcaccgactaaccgcactctaacatacgctaccgaaaaaactccgcttaaatccgcatcgttatctaacgacaaacaatccgcataaaccgtaataactactcgattaatataaacgaataccgaaaacgaataaaatactacctacgccgctaccgccgtaccgaatactaaccgaactaataaaccccttcgaacgacacaaacgtttcaacgcgaacgccgataaattcacgacgaatcacgacgtaacgatatactaacgtacttcgactatactacaccaaccaaaacaaaaacccgcacaacattccgcgaacgacgtcgcttctatactccgataacgatatacgaaacgcaacgaaaaaaaaatacgtttactacaaacgctaatcgaaaaaaaataaccaaaca

SEQ ID NO: 8605 - DNA, 524 bp, Artificial Sequence
  chemically treated genomic DNA (Homo sapiens) CpG-island No: 8605
tttcggcgtgaatatttgcgcgaaggttagattaaatggtgtcgttgaatttgttagttttatatttggtataatttcggtaattacgttggtggagacgatataaattatcgtcgtatttaacgtatcgtcgagtatcgcgattggtatattacgtttcgggttttttattatattagtattcgtatacgtagattttagattaagaaaagtttatagcgttatagcgatggaagaatttatcgtattgaagaacggtgtatgatgcggattttaggaattaacgtatagcgtcgggttaaattagaattagttaataatgtatagatcgacgatcggaataatgattttttatacggtaatgttattgatttgttcggtaatgcgcgtattatttaagtagttacgggtataattatagtattcgatggtcgtagataatttgtattggcgataattcgcgtcgagtagtcggttcgtaataatttatttatttattaaataggtatggattatatttataa

SEQ ID NO: 8606 - DNA, 524 bp, Artificial Sequence
  chemically treated genomic DNA (Homo sapiens) CpG-island No: 8606
ttataaatataatccatacctatttaataaataaataaattattacgaaccgactactcgacgcgaattatcgccaatacaaattatctacgaccatcgaatactataattatacccgtaactacttaaataatacgcgcattaccgaacaaatcaataacattaccgtataaaaaatcattattccgatcgtcgatctatacattattaactaattctaatttaacccgacgctatacgttaattcctaaaatccgcatcatacaccgttcttcaatacgataaattcttccatcgctataacgctataaacttttcttaatctaaaatctacgtatacgaatactaatataataaaaaacccgaaacgtaatataccaatcgcgatactcgacgatacgttaaatacgacgataatttatatcgtctccaccaacgtaattaccgaaattataccaaatataaaactaacaaattcaacgacaccatttaatctaaccttcgcgcaaatattcacgccgaaa

SEQ ID NO: 8607 - DNA, 524 bp, Artificial Sequence
  chemically treated genomic DNA (Homo sapiens) CpG-island No: 8607
ttgtggatatggtttatgtttatttgataagtgaataagttgttacggatcgattgttcggcgcgagttgtcgttagtgtagattgtttgcgattatcgggtgttgtgattgtattcgtggttatttgggtggtgcgcgtattatcgggtaaattagtagtattatcgtgtggggggttattatttcggtcgtcggtttgtgtattattggttggttttggtttagttcgacgttgtacgttgatttttggaattcgtattatgtatcgttttttagtgcggtaggtttttttatcgttatgacgttgtgggttttttttggtttggagtttgcgtgtgcgaatattgatgtagtggaaaattcggaacgtaatgtgttaatcgcggtattcggcggtacgttaggtgcggcggtgatttatatcgtttttattaacgtgattgtcgggattgtgttaaatatggagttggtaaatttaacggtattatttggtttggttttcgcgtagatgtttacgtcggaa

SEQ ID NO: 8608 - DNA, 524 bp, Artificial Sequence
  chemically treated genomic DNA (Homo sapiens) CpG-island No: 8608
ttccgacgtaaacatctacgcgaaaaccaaaccaaataataccgttaaatttaccaactccatatttaacacaatcccgacaatcacgttaataaaaacgatataaatcaccgccgcacctaacgtaccgccgaataccgcgattaacacattacgttccgaattttccactacatcaatattcgcacacgcaaactccaaaccaaaaaaaacccacaacgtcataacgataaaaaaacctaccgcactaaaaaacgatacataatacgaattccaaaaatcaacgtacaacgtcgaactaaaccaaaaccaaccaataatacacaaaccgacgaccgaaataataaccccccacacgataatactactaatttacccgataatacgcgcaccacccaaataaccacgaatacaatcacaacacccgataatcgcaaacaatctacactaacgacaactcgcgccgaacaatcgatccgtaacaacttattcacttatcaaataaacataaaccatatccacaa

SEQ ID NO: 8609 - DNA, 1140 bp, Artificial Sequence
  chemically treated genomic DNA (Homo sapiens) CpG-island No: 8609
ttttcgtcggtggggtttttaagtattagttttaggcgtatcgtttttttcggcggtcgcggcggttgtttagttcgggaagtcgattttcgcggcgggggcggttgtaagggtagcggcgggaacggcggcggcggttcgggtcgcgggggttttcgttgtagcgatatgggcggttcggcgcggttgatttcgcgttgggggagcggtttttttcgcgacgggggttgcgcgttcgagcggggggtaggttttcgcggggtcggcggtttcgttcgggtcggttcgcggtacggttgcggttttagtcgggggggttcgcgggggtattcgggtttacgttcgggtttcgggtattcggtttcgcgtcgtcgtatcggtgataagttaatgaacgttattttgcgcggtttcgttatttttattgttttggtttttcgtttttgttcgagtcggcgttcgtttttacggcgcgttgcgtgtttgttcgtttttttttttgttttttgtcgttttttttttttttattatttttagtcgttttcgtcggcgttacggtgagtgcggatcgtgttttttttttcgttattacgttttgatgggttttatcgttatcgttagggtcgtcgcggtcgttatgttggattttttatataaatagaagtaggtcgttgagcgggcgtatgcgtatagaggagacgttcgcgtttattgtcgtggttgttgtttagttttttttttttttttttaatagtttggagtttagataggtcggcggaagtgacgatatggttcggtttgttttcgtggaaacggagacgtcgtttgtatttttttttaaagggagggttttggggtttttcgagtagtttattattcgtattcggaaattagaggcgttttaggagtttttcggggttagtatcgggatgggattgagatcgatttagttattggcgtcgggtttttcgtgttgggtttaagggaattggggttgttagttgattatttaaggcggattttgggtaagggtagagagacgcgttagtcgttgtgtttgttcgttttgtgttttcgtagttttaagtatcgagggaaaaaaggaagtgtttagttttagttagattagttttagcggtt

SEQ ID NO: 8610 - DNA, 1140 bp, Artificial Sequence
  chemically treated genomic DNA (Homo sapiens) CpG-island No: 8610
aaccgctaaaactaatctaactaaaactaaacacttccttttttccctcgatacttaaaactacgaaaacacaaaacgaacaaacacaacgactaacgcgtctctctacccttacccaaaatccgccttaaataatcaactaacaaccccaattcccttaaacccaacacgaaaaacccgacgccaataactaaatcgatctcaatcccatcccgatactaaccccgaaaaactcctaaaacgcctctaatttccgaatacgaataataaactactcgaaaaaccccaaaaccctccctttaaaaaaaaatacaaacgacgtctccgtttccacgaaaacaaaccgaaccatatcgtcacttccgccgacctatctaaactccaaactattaaaaaaaaaaaaaaaaaactaaacaacaaccacgacaataaacgcgaacgtctcctctatacgcatacgcccgctcaacgacctacttctatttatataaaaaatccaacataacgaccgcgacgaccctaacgataacgataaaacccatcaaaacgtaataacgaaaaaaaaaacacgatccgcactcaccgtaacgccgacgaaaacgactaaaaataataaaaaaaaaaaaaacgacaaaaaacaaaaaaaaaaacgaacaaacacgcaacgcgccgtaaaaacgaacgccgactcgaacaaaaacgaaaaaccaaaacaataaaaataacgaaaccgcgcaaaataacgttcattaacttatcaccgatacgacgacgcgaaaccgaatacccgaaacccgaacgtaaacccgaatacccccgcgaacccccccgactaaaaccgcaaccgtaccgcgaaccgacccgaacgaaaccgccgaccccgcgaaaacctaccccccgctcgaacgcgcaacccccgtcgcgaaaaaaaccgctcccccaacgcgaaatcaaccgcgccgaaccgcccatatcgctacaacgaaaacccccgcgacccgaaccgccgccgccgttcccgccgctacccttacaaccgcccccgccgcgaaaatcgacttcccgaactaaacaaccgccgcgaccgccgaaaaaaacgatacgcctaaaactaatacttaaaaaccccaccgacgaaaa

SEQ ID NO: 8611 - DNA, 1140 bp, Artificial Sequence
  chemically treated genomic DNA (Homo sapiens) CpG-island No: 8611
agtcgttggggttagtttggttgaagttgggtatttttttttttttttcgatatttaaggttacggggatatagggcgggtaggtataacggttggcgcgtttttttatttttgtttagagttcgttttgaataattagttaataattttaatttttttgaatttagtacgggagattcggcgttaatggttaggtcggttttagttttatttcgatgttagtttcgggaagtttttggagcgtttttggttttcgggtgcgaatagtaaattgttcgggaaattttagaattttttttttgaggaagggtgtagacggcgttttcgtttttacggaaataggtcgagttatgtcgttattttcgtcgatttgtttggattttagattgttgggaggaaaagaggaaaattgagtaatagttacgatagtggacgcgagcgttttttttgtgcgtatgcgttcgtttagcggtttgtttttatttatgtgggggatttaatatggcggtcgcggcgattttggcgatggcggtgaagtttattagaacgtagtagcggggaaggggatacggttcgtatttatcgtggcgtcggcggagacggttgagggtggtggagggaagaaaagcgatagagagtaagaggaagggcgggtaggtacgtagcgcgtcgtagaagcgagcgtcggttcgagtaaaagcggagggttagaatagtggggatggcggagtcgcgtagagtagcgtttattagtttgttatcggtgcggcggcgcgaggtcgagtattcggggttcgagcgtgagttcgagtattttcgcgagttttttcggttggagtcgtagtcgtatcgcgagtcggttcgggcggagtcgtcggtttcgcgggagtttgtttttcgttcggacgcgtagttttcgtcgcgggagaagtcgtttttttagcgcgaggttagtcgcgtcgagtcgtttatgtcgttgtagcgggagttttcgcggttcgagtcgtcgtcgtcgttttcgtcgttgtttttgtagtcgttttcgtcgcgggagtcggtttttcgggttgagtagtcgtcgcggtcgtcgagggagacggtgcgtttggagttggtgtttaaggattttatcgacgagag

SEQ ID NO: 8612 - DNA, 1140 bp, Artificial Sequence
  chemically treated genomic DNA (Homo sapiens) CpG-island No: 8612
ctctcgtcgataaaatccttaaacaccaactccaaacgcaccgtctccctcgacgaccgcgacgactactcaacccgaaaaaccgactcccgcgacgaaaacgactacaaaaacaacgacgaaaacgacgacgacgactcgaaccgcgaaaactcccgctacaacgacataaacgactcgacgcgactaacctcgcgctaaaaaaacgacttctcccgcgacgaaaactacgcgtccgaacgaaaaacaaactcccgcgaaaccgacgactccgcccgaaccgactcgcgatacgactacgactccaaccgaaaaaactcgcgaaaatactcgaactcacgctcgaaccccgaatactcgacctcgcgccgccgcaccgataacaaactaataaacgctactctacgcgactccgccatccccactattctaaccctccgcttttactcgaaccgacgctcgcttctacgacgcgctacgtacctacccgcccttcctcttactctctatcgcttttcttccctccaccaccctcaaccgtctccgccgacgccacgataaatacgaaccgtatccccttccccgctactacgttctaataaacttcaccgccatcgccaaaatcgccgcgaccgccatattaaatcccccacataaataaaaacaaaccgctaaacgaacgcatacgcacaaaaaaaacgctcgcgtccactatcgtaactattactcaattttcctcttttcctcccaacaatctaaaatccaaacaaatcgacgaaaataacgacataactcgacctatttccgtaaaaacgaaaacgccgtctacacccttcctcaaaaaaaaaattctaaaatttcccgaacaatttactattcgcacccgaaaaccaaaaacgctccaaaaacttcccgaaactaacatcgaaataaaactaaaaccgacctaaccattaacgccgaatctcccgtactaaattcaaaaaaattaaaattattaactaattattcaaaacgaactctaaacaaaaataaaaaaacgcgccaaccgttatacctacccgccctatatccccgtaaccttaaatatcgaaaaaaaaaaaaaaatacccaacttcaaccaaactaaccccaacgact

SEQ ID NO: 8613 - DNA, 603 bp, Artificial Sequence
  chemically treated genomic DNA (Homo sapiens) CpG-island No: 8613
  unsure (9)
tttataggngttcgttaggtgttgttcgacggtattgaagcgatagttatgttgatattttggttatcgtcgattataataaggcgttggcgatgggcggtattttcggtggcgaatattttggcgtgaatgacgaaatataaaacgtgttgttggaatgcgcgttttttagttcgttgtttattatcggtcgtgttcgtcgttatggtttgtatatcgatgcgttttatcgttatgagcgtggcgttgattcggtattgtagtataaagcgatggaacgtgcgattcgtttgttgatcgatatttgcggtggtgaggttggttcggtaattgatattattaacgaagtaacgttgtcgaagcgtgtaattattattttacgtcgtagtaaattggatcgtttgatcggttattatattgcggatgagtaggtaattgatattttgcgtcgtttcggttgcgaagtgatcgaagtaaagacgaatggtaggtagttgcgtcgagttggcgtttcgatatggagattgaagaagatttggttgaagaagtcgcgcgtgtatacggttataataatatttcggatgagtcggtataggtaagttt

SEQ ID NO: 8614 - DNA, 603 bp, Artificial Sequence
  chemically treated genomic DNA (Homo sapiens) CpG-island No: 8614
  unsure (595)
aaacttacctataccgactcatccgaaatattattataaccgtatacacgcgcgacttcttcaaccaaatcttcttcaatctccatatcgaaacgccaactcgacgcaactacctaccattcgtctttacttcgatcacttcgcaaccgaaacgacgcaaaatatcaattacctactcatccgcaatataataaccgatcaaacgatccaatttactacgacgtaaaataataattacacgcttcgacaacgttacttcgttaataatatcaattaccgaaccaacctcaccaccgcaaatatcgatcaacaaacgaatcgcacgttccatcgctttatactacaataccgaatcaacgccacgctcataacgataaaacgcatcgatatacaaaccataacgacgaacacgaccgataataaacaacgaactaaaaaacgcgcattccaacaacacgttttatatttcgtcattcacgccaaaatattcgccaccgaaaataccgcccatcgccaacgccttattataatcgacgataaccaaaatatcaacataactatcgcttcaataccgtcgaacaacacctaacgaacncctataaa

SEQ ID NO: 8615 - DNA, 603 bp, Artificial Sequence
  chemically treated genomic DNA (Homo sapiens) CpG-island No: 8615
  unsure (595)
aggtttgtttgtatcggtttattcgggatgttgttgtagtcgtatatacgcgcgatttttttaattagattttttttaatttttatatcgaaacgttagttcggcgtaattgtttgttattcgtttttgtttcggttatttcgtagtcgagacgacgtagaatgttagttatttgtttattcgtaatatgatggtcgattaggcgatttagtttgttacgacgtagagtgatggttgtacgtttcggtagcgttgtttcgttggtgatattaattatcgggttagttttattatcgtagatgtcgattagtagacgggtcgtacgttttatcgttttgtgttgtagtgtcggattaacgttacgtttataacggtgagacgtatcggtatgtaggttatgacgacgagtacgatcggtgatagatagcgggttaaagaacgcgtattttagtagtacgttttgtgtttcgttatttacgttagagtgttcgttatcgaagatgtcgtttatcgttagcgttttgttgtggtcggcgatgattagagtgttagtataattgtcgttttagtatcgtcgagtagtatttagcgagtntttgtgga

SEQ ID NO: 8616 - DNA, 603 bp, Artificial Sequence
  chemically treated genomic DNA (Homo sapiens) CpG-island No: 8616
  unsure (9)
tccacaaanactcgctaaatactactcgacgatactaaaacgacaattatactaacactctaatcatcgccgaccacaacaaaacgctaacgataaacgacatcttcgataacgaacactctaacgtaaataacgaaacacaaaacgtactactaaaatacgcgttctttaacccgctatctatcaccgatcgtactcgtcgtcataacctacataccgatacgtctcaccgttataaacgtaacgttaatccgacactacaacacaaaacgataaaacgtacgacccgtctactaatcgacatctacgataataaaactaacccgataattaatatcaccaacgaaacaacgctaccgaaacgtacaaccatcactctacgtcgtaacaaactaaatcgcctaatcgaccatcatattacgaataaacaaataactaacattctacgtcgtctcgactacgaaataaccgaaacaaaaacgaataacaaacaattacgccgaactaacgtttcgatataaaaattaaaaaaaatctaattaaaaaaatcgcgcgtatatacgactacaacaacatcccgaataaaccgatacaaacaaacct

SEQ ID NO: 8617 - DNA, 539 bp, Artificial Sequence
  chemically treated genomic DNA (Homo sapiens) CpG-island No: 8617
ttattgcgagtaagtcggttgtgtaaaaggaattagtatatgtttaaggcgaaggagcgttttagtcgagttatttgtttttgcggaatgtcgatggggcggtgagcgttagggttgaggaatttaaagatttcggttaagtttttttttttttcgatcgtgatttcgttatattggcgtagaaatgtaattatcgagttttagtttgtcgggttgtatgtggcgatatttggatgttgttgtgttacgttagcggcgatatttatagttagggtttcgagagcgattcgcgtattcgttaaagttgcgttgtagttcggaggattggtacggaaagttttagtcgaattattgattttgtcgatgatggttttatattgcggcggagcgattgacggagggttcgtacgagattattttttatgggggtcgtatcggcgatggatggatcggtttgtagtagttttttgtcgtggattatatatttatttagtaataggtattgcgagaggttatgtaagcgtttatcgaatacgttg

SEQ ID NO: 8618 - DNA, 539 bp, Artificial Sequence
  chemically treated genomic DNA (Homo sapiens) CpG-island No: 8618
caacgtattcgataaacgcttacataacctctcgcaatacctattactaaataaatatataatccacgacaaaaaactactacaaaccgatccatccatcgccgatacgacccccataaaaaataatctcgtacgaaccctccgtcaatcgctccgccgcaatataaaaccatcatcgacaaaatcaataattcgactaaaactttccgtaccaatcctccgaactacaacgcaactttaacgaatacgcgaatcgctctcgaaaccctaactataaatatcgccgctaacgtaacacaacaacatccaaatatcgccacatacaacccgacaaactaaaactcgataattacatttctacgccaatataacgaaatcacgatcgaaaaaaaaaaaaacttaaccgaaatctttaaattcctcaaccctaacgctcaccgccccatcgacattccgcaaaaacaaataactcgactaaaacgctccttcgccttaaacatatactaattccttttacacaaccgacttactcgcaataa

SEQ ID NO: 8619 - DNA, 539 bp, Artificial Sequence
  chemically treated genomic DNA (Homo sapiens) CpG-island No: 8619
taacgtattcgatgagcgtttgtatgatttttcgtagtgtttgttgttggatgggtatatggtttacgataagaaattgttgtaagtcgatttatttatcgtcgatgcggtttttatggaggatgatttcgtgcgagtttttcgttaatcgtttcgtcgtagtatgaggttattatcgataagattaatgattcggttgaagtttttcgtgttagtttttcggattataacgtagttttaacgaatgcgcgggtcgttttcgaaattttggttgtggatgtcgtcgttggcgtggtatagtagtatttaggtgtcgttatatataattcgataagttggggttcggtgattgtatttttacgttagtgtggcgaaattacggtcgaagaggagaaaggtttggtcggggtttttggattttttagttttggcgtttatcgttttatcggtatttcgtaagagtaaatggttcggttgggacgttttttcgttttgaatatgtgttggttttttttgtataatcggtttgttcgtagtgg

SEQ ID NO: 8620 - DNA, 539 bp, Artificial Sequence
  chemically treated genomic DNA (Homo sapiens) CpG-island No: 8620
ccactacgaacaaaccgattatacaaaaaaaaccaacacatattcaaaacgaaaaaacgtcccaaccgaaccatttactcttacgaaataccgataaaacgataaacgccaaaactaaaaaatccaaaaaccccgaccaaacctttctcctcttcgaccgtaatttcgccacactaacgtaaaaatacaatcaccgaaccccaacttatcgaattatatataacgacacctaaatactactataccacgccaacgacgacatccacaaccaaaatttcgaaaacgacccgcgcattcgttaaaactacgttataatccgaaaaactaacacgaaaaacttcaaccgaatcattaatcttatcgataataacctcatactacgacgaaacgattaacgaaaaactcgcacgaaatcatcctccataaaaaccgcatcgacgataaataaatcgacttacaacaatttcttatcgtaaaccatatacccatccaacaacaaacactacgaaaaatcatacaaacgctcatcgaatacgtta

SEQ ID NO: 8621 - DNA, 764 bp, Artificial Sequence
  chemically treated genomic DNA (Homo sapiens) CpG-island No: 8621
  unsure (249, 417, 636)
attcgtttagttatttattatttttttcgtttttatttcgttttgtttttattattttttatatcgtttcgtttatttatattttcgttatttgtttttttttatttattacgtgtatattttcgttatacgtatttcgtatttttattgtcgtattgtttttatttacgtgtattcgttttttattaagtttttatttagtttatttttcgtttttttttattgttacgtattgtttattttttgttnttttatttatttagtttatttatataatgcgattttattatttcgcgtgtgtattttgttttttttcgtatatttttttattattttttatttttttcgcgtattatgtatttcgttatttatattttatatttacgtatttagtattttatatacgatgttgtttgncgtatattttatcgttttattttattatattagtttcgcgttattcgtattttttatttatcgttttcgtatatttttattatttgtttgttattatttttacgtgttattgttcgtcgtttttatttttgtatattttatttatttttcgttttagtattttttttttacgcgttacgtgtttatacgtattcgcgtttttcgtttattttttcgtantatcgtttttatagttatatatatttgtagcgtttttttagtatatttcgcgattattcgtattatattttttttattatttttttatttatttattatattttttattatttgttttatatttttta

SEQ ID NO: 8622 - DNA, 764 bp, Artificial Sequence
  chemically treated genomic DNA (Homo sapiens) CpG-island No: 8622
  unsure (129, 348, 516)
taaaaaatataaaacaaataataaaaaatataataaataaataaaaaaataataaaaaaaatataatacgaataatcgcgaaatatactaaaaaaacgctacaaatatatataactataaaaacgatantacgaaaaaataaacgaaaaacgcgaatacgtataaacacgtaacgcgtaaaaaaaaaatactaaaacgaaaaataaataaaatatacaaaaataaaaacgacgaacaataacacgtaaaaataataacaaacaaataataaaaatatacgaaaacgataaataaaaaatacgaataacgcgaaactaatataataaaataaaacgataaaatatacgncaaacaacatcgtatataaaatactaaatacgtaaatataaaatataaataacgaaatacataatacgcgaaaaaaataaaaaataataaaaaaatatacgaaaaaaaacaaaatacacacgcgaaataataaaatcgcattatataaataaactaaataaataaaanaacaaaaaataaacaatacgtaacaataaaaaaaaacgaaaaataaactaaataaaaacttaataaaaaacgaatacacgtaaataaaaacaatacgacaataaaaatacgaaatacgtataacgaaaatatacacgtaataaataaaaaaaaacaaataacgaaaatataaataaacgaaacgatataaaaaataataaaaacaaaacgaaataaaaacgaaaaaaataataaataactaaacgaat

SEQ ID NO: 8623 - DNA, 764 bp, Artificial Sequence
  chemically treated genomic DNA (Homo sapiens) CpG-island No: 8623
  unsure (129, 348, 516)
tgagagatgtgagatagatagtagagagtgtggtgagtgagtgagagagtgatgagagagatgtagtgcgagtgatcgcgagatgtgttgaggagacgttgtaggtgtgtgtagttgtgggagcggtgntacgagagagtgggcgagagacgcgagtgcgtgtgagtacgtagcgcgtgaggagagagtattgagacgagagatgagtggggtgtgtagaagtgagagcgacgaatagtgatacgtgaggatggtagtagataggtagtagagatgtacgaggacgatgagtggaggatgcgagtgacgcgaggttagtgtagtagagtgagacgatagagtgtgcgntagatagtatcgtgtgtggagtgttggatgcgtggatgtggagtgtggatggcgagatgtatggtgcgcggagagggtggaaggtggtgagagagtgtgcgagagagagtagagtgtatacgcgagatggtggggtcgtattgtgtaggtgagttgagtgggtgaggnagtagagagtagataatgcgtgatagtgaggagagacggaggatagattagatgagagtttagtaggggacgagtgtacgtggatgagagtagtgcgatagtgagagtgcggagtgcgtgtagcgagagtgtgtacgtggtgagtggagagaggtagatggcgagggtataggtgagcgaggcgatgtgagagatgatgaagatagaacggagtagagacggaggaggtagtgagtgattaggcggat

SEQ ID NO: 8624 - DNA, 764 bp, Artificial Sequence
  chemically treated genomic DNA (Homo sapiens) CpG-island No: 8624
  unsure (249, 417, 636)
atccgcctaatcactcactacctcctccgtctctactccgttctatcttcatcatctctcacatcgcctcgctcacctataccctcgccatctacctctctccactcaccacgtacacactctcgctacacgcactccgcactctcactatcgcactactctcatccacgtacactcgtcccctactaaactctcatctaatctatcctccgtctctcctcactatcacgcattatctactctctactncctcacccactcaactcacctacacaatacgaccccaccatctcgcgtatacactctactctctctcgcacactctctcaccaccttccaccctctccgcgcaccatacatctcgccatccacactccacatccacgcatccaacactccacacacgatactatctancgcacactctatcgtctcactctactacactaacctcgcgtcactcgcatcctccactcatcgtcctcgtacatctctactacctatctactaccatcctcacgtatcactattcgtcgctctcacttctacacaccccactcatctctcgtctcaatactctctcctcacgcgctacgtactcacacgcactcgcgtctctcgcccactctctcgtancaccgctcccacaactacacacacctacaacgtctcctcaacacatctcgcgatcactcgcactacatctctctcatcactctctcactcactcaccacactctctactatctatctcacatctctca

SEQ ID NO: 8625 - DNA, 523 bp, Artificial Sequence
  chemically treated genomic DNA (Homo sapiens) CpG-island No: 8625
tcgtgttagtagtattcgattttcgtttttatagagcgcgtttttttagttcgcgtatacgttatcgtgtcgtatgtatgtgtgtttttacgagcgatagtagatcgcgttttatgcgtatagagtttcgttttttacgtgtatagagcgagtagcgttcgtattatttatcgtttttgcgataatgtttagtgcgttacgatatcgtagattgtttgtatttagtttttacgtttgtcgtttattcggttttattggagttttattttacgttagattgtttgttgttttgtgttagtttttcgtttatttgggttcggaacgttgtatcgtttcgagttgttttttttttataattttatcgatcgtttttgtatgttttattaggtgtacgggtatcggagatttttatttttttcgtggggggggggttaaaaaaaaaaaacgttttttttttttcgcgagcgtcgtattaaagttattcggatgtgttaatagttgatcgtatgtattagtcgtagag

SEQ ID NO: 8626 - DNA, 523 bp, Artificial Sequence
  chemically treated genomic DNA (Homo sapiens) CpG-island No: 8626
ctctacgactaatacatacgatcaactattaacacatccgaataactttaatacgacgctcgcgaaaaaaaaaaaacgttttttttttttaaccccccccccacgaaaaaaataaaaatctccgatacccgtacacctaataaaacatacaaaaacgatcgataaaattataaaaaaaaaacaactcgaaacgatacaacgttccgaacccaaataaacgaaaaactaacacaaaacaacaaacaatctaacgtaaaataaaactccaataaaaccgaataaacgacaaacgtaaaaactaaatacaaacaatctacgatatcgtaacgcactaaacattatcgcaaaaacgataaataatacgaacgctactcgctctatacacgtaaaaaacgaaactctatacgcataaaacgcgatctactatcgctcgtaaaaacacacatacatacgacacgataacgtatacgcgaactaaaaaaacgcgctctataaaaacgaaaatcgaatactactaacacga

SEQ ID NO: 8627 - DNA, 523 bp, Artificial Sequence
  chemically treated genomic DNA (Homo sapiens) CpG-island No: 8627
ttttgcgattgatgtatgcgattaattgttgatatattcgggtggttttggtacggcgttcgcgggaaaaaaaaaacgttttttttttttggttttttttttacgaggggggtggaagttttcgatgttcgtgtatttagtgaagtatgtaggaacggtcggtagggttgtgaaaaaagaataattcggggcgatgtaacgtttcgagtttaagtggacgagagattgatataaagtagtaggtagtttagcgtgagatggaattttagtggaatcgagtggacgataggcgtgagagttgagtataggtagtttgcggtgtcgtgacgtattagatattatcgtagagacgatgaatgatgcgggcgttgttcgttttgtatacgtagagagcggagttttgtgcgtatagagcgcgatttattatcgttcgtagaggtatatatatatgcgatacgatgacgtgtgcgcgagttgagagagcgcgttttgtagagacggaggtcggatgttgttagtacga

SEQ ID NO: 8628 - DNA, 523 bp, Artificial Sequence
  chemically treated genomic DNA (Homo sapiens) CpG-island No: 8628
tcgtactaacaacatccgacctccgtctctacaaaacgcgctctctcaactcgcgcacacgtcatcgtatcgcatatatatatacctctacgaacgataataaatcgcgctctatacgcacaaaactccgctctctacgtatacaaaacgaacaacgcccgcatcattcatcgtctctacgataatatctaatacgtcacgacaccgcaaactacctatactcaactctcacgcctatcgtccactcgattccactaaaattccatctcacgctaaactacctactactttatatcaatctctcgtccacttaaactcgaaacgttacatcgccccgaattattcttttttcacaaccctaccgaccgttcctacatacttcactaaatacacgaacatcgaaaacttccacccccctcgtaaaaaaaaaaccaaaaaaaaaaaacgttttttttttcccgcgaacgccgtaccaaaaccacccgaatatatcaacaattaatcgcatacatcaatcgcaaaa

SEQ ID NO: 8629 - DNA, 821 bp, Artificial Sequence
  chemically treated genomic DNA (Homo sapiens) CpG-island No: 8629
  unsure (660)
ttgagcgggtaatcgttataaaggagattgtaggttattttagaaggattttcggcggtgttttacggtaattttgcggaaaacggttgtatcgtgaaaacggtaggcgtcgatgatagtatttttaaatttatcggttcggcgaaagtgtacgaaagttaggacgatgcggtagaagcgattttcggcggtaaagttgtcgtcggagatgtggtagtaattcgttatgaaggttcgaaaggcggttcggggatgtaggaaatgttttatttaattagttttttgaaattaatgggtttcggtaaagtttgtgcgttgattatcgacggtcgtttttttggtggtatttttggtttttttatcggttacgttttatcggaagcggtaagcggcggtagtattggtttgattgaagatggtgatttgatcgttatcgatatttcgaatcgtggtatttagttataggtaagcgatgtcgaattggcggcgcgtcgtgaagcgtaggacgttcgaggtgataaagtttggacgtcgaaaaatcgtgaacgttaggttttttttgttttgcgtgtttatgttagtttggtaattagcgtcgataaaggcgcggtgcgtgataaatcgaaattggggggttaataatggttgattcgtaatttnttgttcggtgtttcggaaggtgtcgaataattaagagtagtgttgcgcgcgtcggtttacgaggcggcgtaggttaacgcgttataaaaaattggaaaattgtcgtcgcgttttgataacgttatttttgtggagcggcgagattcgtagttagtgtaata

SEQ ID NO: 8630 - DNA, 821 bp, Artificial Sequence
  chemically treated genomic DNA (Homo sapiens) CpG-island No: 8630
  unsure (162)
tattacactaactacgaatctcgccgctccacaaaaataacgttatcaaaacgcgacgacaattttccaattttttataacgcgttaacctacgccgcctcgtaaaccgacgcgcgcaacactactcttaattattcgacaccttccgaaacaccgaacaanaaattacgaatcaaccattattaaccccccaatttcgatttatcacgcaccgcgcctttatcgacgctaattaccaaactaacataaacacgcaaaacaaaaaaaacctaacgttcacgatttttcgacgtccaaactttatcacctcgaacgtcctacgcttcacgacgcgccgccaattcgacatcgcttacctataactaaataccacgattcgaaatatcgataacgatcaaatcaccatcttcaatcaaaccaatactaccgccgcttaccgcttccgataaaacgtaaccgataaaaaaaccaaaaataccaccaaaaaaacgaccgtcgataatcaacgcacaaactttaccgaaacccattaatttcaaaaaactaattaaataaaacatttcctacatccccgaaccgcctttcgaaccttcataacgaattactaccacatctccgacgacaactttaccgccgaaaatcgcttctaccgcatcgtcctaactttcgtacactttcgccgaaccgataaatttaaaaatactatcatcgacgcctaccgttttcacgatacaaccgttttccgcaaaattaccgtaaaacaccgccgaaaatccttctaaaataacctacaatctcctttataacgattacccgctcaa

SEQ ID NO: 8631 - DNA, 821 bp, Artificial Sequence
  chemically treated genomic DNA (Homo sapiens) CpG-island No: 8631
  unsure (162)
tgttgtattggttgcgaatttcgtcgttttataagaatgacgttattaagacgcgacgatagttttttaattttttgtagcgcgttaatttgcgtcgtttcgtaaatcggcgcgcgtagtattgtttttaattattcggtatttttcggagtatcggatagngggttgcgagttagttattattaattttttagtttcgatttattacgtatcgcgtttttgtcggcgttggttgttaggttggtataagtacgtagggtaaaggagatttgacgtttacgatttttcggcgtttaggttttgttatttcgagcgttttgcgttttacgacgcgtcgttagttcggtatcgtttatttgtaattgaatgttacggttcgggatgtcgatagcgattaggttattatttttaattaggttaatgttgtcgtcgtttgtcgttttcggtgagacgtggtcgatggaaagattagaggtgttattagagaaacgatcgtcggtgattagcgtataggttttgtcgagatttattgattttaggaagttggttgggtagagtattttttgtattttcggatcgtttttcgggtttttatagcgaattattattatattttcggcgataattttatcgtcgagaatcgtttttatcgtatcgttttggttttcgtatattttcgtcgggtcggtgaatttgaggatgttgttatcgacgtttgtcgtttttacgatgtagtcgtttttcgtaaagttatcgtagagtatcgtcggggatttttttagagtgatttgtagttttttttataacggttattcgtttag

SEQ ID NO: 8632 - DNA, 821 bp, Artificial Sequence
  chemically treated genomic DNA (Homo sapiens) CpG-island No: 8632
  unsure (660)
ctaaacgaataaccgttataaaaaaaactacaaatcactctaaaaaaatccccgacgatactctacgataactttacgaaaaacgactacatcgtaaaaacgacaaacgtcgataacaacatcctcaaattcaccgacccgacgaaaatatacgaaaaccaaaacgatacgataaaaacgattctcgacgataaaattatcgccgaaaatataataataattcgctataaaaacccgaaaaacgatccgaaaatacaaaaaatactctacccaaccaacttcctaaaatcaataaatctcgacaaaacctatacgctaatcaccgacgatcgtttctctaataacacctctaatctttccatcgaccacgtctcaccgaaaacgacaaacgacgacaacattaacctaattaaaaataataacctaatcgctatcgacatcccgaaccgtaacattcaattacaaataaacgataccgaactaacgacgcgtcgtaaaacgcaaaacgctcgaaataacaaaacctaaacgccgaaaaatcgtaaacgtcaaatctcctttaccctacgtacttataccaacctaacaaccaacgccgacaaaaacgcgatacgtaataaatcgaaactaaaaaattaataataactaactcgcaacccnctatccgatactccgaaaaataccgaataattaaaaacaatactacgcgcgccgatttacgaaacgacgcaaattaacgcgctacaaaaaattaaaaaactatcgtcgcgtcttaataacgtcattcttataaaacgacgaaattcgcaaccaatacaaca

SEQ ID NO: 8633 - DNA, 725 bp, Artificial Sequence
  chemically treated genomic DNA (Homo sapiens) CpG-island No: 8633
tttttcgtattcgtagttttttatttttatttcgttgttttatcgtatttttcgtcgagcgatttcgtatcgttttcgttgcgttatatttttgtgattttgtttttttattttttacgttcgttttagtttcgtgtgttttagagtcgcgtaggtttacgttttgtgttttttacgcgttttcgttttttcgtacgtgtatttttcgtatattcgcgcgttatatcgcgattttttttgtcggcgttatttattagatttatatatttgattgattttcgcgtatttattttttttttgtttgacgtttttattttttagtgttcgtttcgttgatttatttcgattttttacgcgcgtttattttttcgtttagttttggtatttattacgcgcgttttattcgttatttattcgttttattttttttacgcgtatttttgttcgtcgtttttattttcgtttcgtgttttatcgcgtggttttttatttattatttttattcgttttattttttttttcgatcgtttttcggtatcgtttttttttgtgtgtttttttttgttttttttcgtcgttttttttttcgttagtttttcgcgtgttttttttattgtgcgtttatttttcggtcgttttttttttttcgttttatgtatttatttaggttgattttagaggattcgtaattttttgttattttaaggcgtgaaggtaaagggttt

SEQ ID NO: 8634 - DNA, 725 bp, Artificial Sequence
  chemically treated genomic DNA (Homo sapiens) CpG-island No: 8634
aaaccctttaccttcacgccttaaaataacaaaaaattacgaatcctctaaaatcaacctaaataaatacataaaacgaaaaaaaaaaaacgaccgaaaaataaacgcacaataaaaaaaacacgcgaaaaactaacgaaaaaaaaaacgacgaaaaaaaacaaaaaaaaacacacaaaaaaaaacgataccgaaaaacgatcgaaaaaaaaaataaaacgaataaaaataataaataaaaaaccacgcgataaaacacgaaacgaaaataaaaacgacgaacaaaaatacgcgtaaaaaaaataaaacgaataaataacgaataaaacgcgcgtaataaataccaaaactaaacgaaaaaataaacgcgcgtaaaaaatcgaaataaatcaacgaaacgaacactaaaaaataaaaacgtcaaacaaaaaaaaaataaatacgcgaaaatcaatcaaatatataaatctaataaataacgccgacaaaaaaaatcgcgatataacgcgcgaatatacgaaaaatacacgtacgaaaaaacgaaaacgcgtaaaaaacacaaaacgtaaacctacgcgactctaaaacacacgaaactaaaacgaacgtaaaaaataaaaaaacaaaatcacaaaaatataacgcaacgaaaacgatacgaaatcgctcgacgaaaaatacgataaaacaacgaaataaaaataaaaaactacgaatacgaaaaa

SEQ ID NO: 8635 - DNA, 725 bp, Artificial Sequence
  chemically treated genomic DNA (Homo sapiens) CpG-island No: 8635
gaattttttgtttttacgttttggaatggtagaaggttgcggattttttagagttagtttggatggatgtataaagcggaggggagaaggcgatcggagagtgggcgtatagtgagggagatacgcgggaagttagcggagagaaaagcgacgaggaaaggtagaggaggatatatagaaaagggcggtgtcgaagggcgatcggagagaggggtggagcgggtgaggatggtggatgaggagttacgcggtgagatacggagcgggagtggaggcggcgagtagaagtgcgcgtgaaggagatgggacgagtgggtggcgagtgaggcgcgcgtgatgggtgttaaggttgaacggggaggtgagcgcgcgtgagaggtcgaggtgagttagcgaggcggatattggagaatggagacgttagatagaagaagagtggatgcgcgaggattagttaagtgtgtgagtttaatgaatgacgtcgatagaagaggtcgcggtgtgacgcgcgagtgtgcgaagagtgtacgtgcggagaggcgggaacgcgtgagagatatagagcgtgagtttgcgcgattttggagtatacggagttagagcgggcgtggaaggtggagaggtagagttatagaagtgtgacgtagcggagacggtgcgaaatcgttcggcgaaaagtgcggtggagtagcgagatgaaggtgagagattgcgagtgcgaaggg

SEQ ID NO: 8636 - DNA, 725 bp, Artificial Sequence
  chemically treated genomic DNA (Homo sapiens) CpG-island No: 8636
cccttcgcactcgcaatctctcaccttcatctcgctactccaccgcacttttcgccgaacgatttcgcaccgtctccgctacgtcacacttctataactctacctctccaccttccacgcccgctctaactccgtatactccaaaatcgcgcaaactcacgctctatatctctcacgcgttcccgcctctccgcacgtacactcttcgcacactcgcgcgtcacaccgcgacctcttctatcgacgtcattcattaaactcacacacttaactaatcctcgcgcatccactcttcttctatctaacgtctccattctccaatatccgcctcgctaactcacctcgacctctcacgcgcgctcacctccccgttcaaccttaacacccatcacgcgcgcctcactcgccacccactcgtcccatctccttcacgcgcacttctactcgccgcctccactcccgctccgtatctcaccgcgtaactcctcatccaccatcctcacccgctccacccctctctccgatcgcccttcgacaccgcccttttctatatatcctcctctacctttcctcgtcgcttttctctccgctaacttcccgcgtatctccctcactatacgcccactctccgatcgccttctcccctccgctttatacatccatccaaactaactctaaaaaatccgcaaccttctaccattccaaaacgtaaaaacaaaaaattc

SEQ ID NO: 8637 - DNA, 732 bp, Artificial Sequence
  chemically treated genomic DNA (Homo sapiens) CpG-island No: 8637
  unsure (590, 644, 705)
gacgcgttagtcgtattcgatattcgaattacgaggcgaaaaatgattaacgtataaaacgttagtaaaatttttattttgtattagtaaaacggcgtgcgtttgttcgtttttaatcgcgtttcgtttatcgttaacgcgggcgaatgcgtggtgttttacggttatttcggtagcggtaaattaattttgttacgttcgttgtacgttaattatttgttcgacgaaggttaaatttagattaaatacggtgacgagtgggtagatttggttatcgcgttagcgcgtaaagtggtggaaattcgtaaaattatcgtcggttgggtgagttagtttttgcgcgttatttcgcgtattttagtattggaagtggtgatgtagtcgttgttcgatatcggcgtttcgcgtgaagtttgcgtcgttaaagtcgcgcgtttttttattcgtttgaacgtgtcggaacgtttgtggtatttggtattatcgatatttttcggtggcgaatagtagcgcgttaatatcgttcgcggttttatcgtcgattattttattttgttgtttgacgaatttatcgtttcgttggacgttanaaatagcgtcgcggtggtggaattgattcgcgacgtaaaattcgtggcgtatantcgtaggtattttttatgacgaattgtacgtaatgacgtcgtcgatcgttgtaattatggnagttttttatgatattataacgtaagt

SEQ ID NO: 8638 - DNA, 732 bp, Artificial Sequence
  chemically treated genomic DNA (Homo sapiens) CpG-island No: 8638
  unsure (28, 89, 143)
acttacgttataatatcataaaaaactnccataattacaacgatcgacgacgtcattacgtacaattcgtcataaaaaatacctacgantatacgccacgaattttacgtcgcgaatcaattccaccaccgcgacgctatttntaacgtccaacgaaacgataaattcgtcaaacaacaaaataaaataatcgacgataaaaccgcgaacgatattaacgcgctactattcgccaccgaaaaatatcgataataccaaataccacaaacgttccgacacgttcaaacgaataaaaaaacgcgcgactttaacgacgcaaacttcacgcgaaacgccgatatcgaacaacgactacatcaccacttccaatactaaaatacgcgaaataacgcgcaaaaactaactcacccaaccgacgataattttacgaatttccaccactttacgcgctaacgcgataaccaaatctacccactcgtcaccgtatttaatctaaatttaaccttcgtcgaacaaataattaacgtacaacgaacgtaacaaaattaatttaccgctaccgaaataaccgtaaaacaccacgcattcgcccgcgttaacgataaacgaaacgcgattaaaaacgaacaaacgcacgccgttttactaatacaaaataaaaattttactaacgttttatacgttaatcatttttcgcctcgtaattcgaatatcgaatacgactaacgcgtc

SEQ ID NO: 8639 - DNA, 732 bp, Artificial Sequence
  chemically treated genomic DNA (Homo sapiens) CpG-island No: 8639
  unsure (28, 89, 143)
gtttacgttatgatattatgaagagttnttatggttgtagcggtcggcgacgttattacgtatagttcgttatggaagatgtttacgantgtgcgttacgggttttgcgtcgcgaattagttttattatcgcggcgttgtttntggcgtttagcgaggcggtaggttcgttaagtagtagaatggggtagtcgacgataaagtcgcgggcgatgttgacgcgttgttgttcgttatcggaaaatgtcgatggtgttaggtgttataggcgtttcggtacgtttaggcgggtgagaagacgcgcggttttagcggcgtaggttttacgcggaacgtcggtatcgagtagcggttgtattattatttttagtgttgagatacgcgggatgacgcgtagaaattggtttatttagtcgacggtggttttgcggatttttattattttgcgcgttggcgcggtgattaggtttatttattcgttatcgtgtttgatttggatttgattttcgtcgggtagatagttggcgtatagcgagcgtagtagagttgatttgtcgttgtcggaatggtcgtggagtattacgtattcgttcgcgttgacggtgagcgaggcgcgattgaggacgggtaggcgtacgtcgttttgttggtgtaggatgaaggttttattgacgttttgtacgttaattatttttcgtttcgtggttcgggtgtcggatgcggttgacgcgtt

SEQ ID NO: 8640 - DNA, 732 bp, Artificial Sequence
  chemically treated genomic DNA (Homo sapiens) CpG-island No: 8640
  unsure (590, 644, 705)
aacgcgtcaaccgcatccgacacccgaaccacgaaacgaaaaataattaacgtacaaaacgtcaataaaaccttcatcctacaccaacaaaacgacgtacgcctacccgtcctcaatcgcgcctcgctcaccgtcaacgcgaacgaatacgtaatactccacgaccattccgacaacgacaaatcaactctactacgctcgctatacgccaactatctacccgacgaaaatcaaatccaaatcaaacacgataacgaataaataaacctaatcaccgcgccaacgcgcaaaataataaaaatccgcaaaaccaccgtcgactaaataaaccaatttctacgcgtcatcccgcgtatctcaacactaaaaataataatacaaccgctactcgataccgacgttccgcgtaaaacctacgccgctaaaaccgcgcgtcttctcacccgcctaaacgtaccgaaacgcctataacacctaacaccatcgacattttccgataacgaacaacaacgcgtcaacatcgcccgcgactttatcgtcgactaccccattctactacttaacgaacctaccgcctcgctaaacgccanaaacaacgccgcgataataaaactaattcgcgacgcaaaacccgtaacgcacantcgtaaacatcttccataacgaactatacgtaataacgtcgccgaccgctacaaccataanaactcttcataatatcataacgtaaac

SEQ ID NO: 8641 - DNA, 571 bp, Artificial Sequence
  chemically treated genomic DNA (Homo sapiens) CpG-island No: 8641
acgttacgggttgtattattagttagattggcgacgtattcgcggggggtttgtaaaaaaggagtattttttagtagtaattcgtaattaggattatttcgtacggcgacgttatttcgatttatagtatacgacgtcgcgtttatatttgtatttttcgagtattgatggattcgtattttaaagatggtcgtttaatggattatgttagtgcggtcgtggttatttattcgtttaagtagtacgttaattattttagcgttagtagtacggaacgatatttttatatcggcgatacgagtggattcgtagttatattttattggttagatcggcggtacgtattggaacgacgtttttgttaggtcggcgcgatcgcgattacggtgtgagcgaggatttttattgattaattagtgtagttattacgtgtatcgattttggtatttgtatcgattatttttgtatacggcgatacgatttagggaatttaggggtttaggtgtttagatttagttaagattcgaagtgttttatcgattagagagttttcgtgggttcgtagtttttt

SEQ ID NO: 8642 - DNA, 571 bp, Artificial Sequence
  chemically treated genomic DNA (Homo sapiens) CpG-island No: 8642
aaaaaactacgaacccacgaaaactctctaatcgataaaacacttcgaatcttaactaaatctaaacacctaaacccctaaattccctaaatcgtatcgccgtatacaaaaataatcgatacaaataccaaaatcgatacacgtaataactacactaattaatcaataaaaatcctcgctcacaccgtaatcgcgatcgcgccgacctaacaaaaacgtcgttccaatacgtaccgccgatctaaccaataaaatataactacgaatccactcgtatcgccgatataaaaatatcgttccgtactactaacgctaaaataattaacgtactacttaaacgaataaataaccacgaccgcactaacataatccattaaacgaccatctttaaaatacgaatccatcaatactcgaaaaatacaaatataaacgcgacgtcgtatactataaatcgaaataacgtcgccgtacgaaataatcctaattacgaattactactaaaaaatactccttttttacaaaccccccgcgaatacgtcgccaatctaactaataatacaacccgtaacgt

SEQ ID NO: 8643 - DNA, 571 bp, Artificial Sequence
  chemically treated genomic DNA (Homo sapiens) CpG-island No: 8643
gaagggttgcggatttacggggattttttagtcggtaggatatttcgggttttggttaaatttaggtatttgggtttttgagttttttagatcgtatcgtcgtgtatagaggtaatcggtataggtattagggtcgatgtacgtagtgattgtattgattagttagtgagggttttcgtttatatcgtgatcgcggtcgcgtcgatttgataggaacgtcgttttaatacgtatcgtcggtttgattaatagggtgtgattacgggtttattcgtatcgtcgatgtggaaatgtcgtttcgtattgttagcgttaaggtagttgacgtgttgtttgagcgggtgagtgattacgatcgtattagtatagtttattggacggttatttttagagtgcgagtttattagtgttcgggaagtgtaagtgtgggcgcgacgtcgtatgttgtagatcggagtgacgtcgtcgtgcgagatgattttggttgcggattgttgttaaaaaatgttttttttttgtaagtttttcgcggatacgtcgttagtttagttgatgatgtagttcgtggcgt

SEQ ID NO: 8644 - DNA, 571 bp, Artificial Sequence
  chemically treated genomic DNA (Homo sapiens) CpG-island No: 8644
acgccacgaactacatcatcaactaaactaacgacgtatccgcgaaaaacttacaaaaaaaaaacattttttaacaacaatccgcaaccaaaatcatctcgcacgacgacgtcactccgatctacaacatacgacgtcgcgcccacacttacacttcccgaacactaataaactcgcactctaaaaataaccgtccaataaactatactaatacgatcgtaatcactcacccgctcaaacaacacgtcaactaccttaacgctaacaatacgaaacgacatttccacatcgacgatacgaataaacccgtaatcacaccctattaatcaaaccgacgatacgtattaaaacgacgttcctatcaaatcgacgcgaccgcgatcacgatataaacgaaaaccctcactaactaatcaatacaatcactacgtacatcgaccctaatacctataccgattacctctatacacgacgatacgatctaaaaaactcaaaaacccaaatacctaaatttaaccaaaacccgaaatatcctaccgactaaaaaatccccgtaaatccgcaacccttc

SEQ ID NO: 8645 - DNA, 624 bp, Artificial Sequence
  chemically treated genomic DNA (Homo sapiens) CpG-island No: 8645
  unsure (13, 26, 29, 35, 38, 47, 56, 63..64, 72, 75, 79..80, 96, 98)
  unsure (103, 111..112, 130..131, 142, 150..151, 169, 171, 190, 194)
  unsure (235, 244, 249..250, 254, 261, 269, 277, 287, 299, 315, 322)
  unsure (332..333, 340, 359, 362, 373..374, 376..377, 392, 406, 430)
  unsure (460, 462, 464, 467, 469, 475, 478, 480, 490, 496, 513..514)
  unsure (525, 532, 542, 546, 548, 553, 571, 585, 588)
gacgcgttgggtnatgagtcgcgcgnagncgagtngtntagtagagngagggggtncgagagnnnggtgganggncggnngagtgcgagcgcgtgngnagagngtgcgagnnngaagggtgtgcgagagnnnagtgcgaggncgcgtggnnggcgcgagagcgagtggngntgggagagatcgcgcgagntgtntgcgtgagcgtgagagagcgagcgagagagagagtggtagngcgcgaggnggttnngtgnggatggngcgagttnagtggcgnttgattgagnggtcgcgcgggngcgcgagcgtgggggngggaganagcgtggagnnngcgagnagagagagaggcgagcgtntgngagacgcgcgnngnngagggtgaaggaggngtgtggcgaggggngagggcgcgagaggattgcgagtngcgtagcgtggcgatggcgcggggcgcgtngngngtngnagcggnggnancggaggagtngcgcgngtcgtgcggagaggggnngtacgcgaggngcgtcgnagagggtcgngtangntcgantggggtcggataggtatngtggttcgtgagtnggnagagatgtagtgtatcgcggcgtgtataggtgtcgt

SEQ ID NO: 8646 - DNA, 624 bp, Artificial Sequence
  chemically treated genomic DNA (Homo sapiens) CpG-island No: 8646
  unsure (37, 40, 54, 72, 77, 79, 83, 93, 100, 111..112, 129, 135, 145)
  unsure (147, 150, 156, 158, 161, 163, 165, 195, 219, 233, 248..249)
  unsure (251..252, 263, 266, 285, 291..292, 303, 310, 326, 338, 348)
  unsure (356, 364, 371, 375..376, 381, 390, 431, 435, 454, 456, 474..475)
  unsure (483, 493..494, 512..513, 522, 527, 529, 545..546, 550, 553)
  unsure (560..561, 569, 578, 587, 590, 596, 599, 612)
acgacacctatacacgccgcgatacactacatctctnccnactcacgaaccacnatacctatccgaccccantcgancntacncgaccctctncgacgcncctcgcgtacnncccctctccgcacgacncgcgcnactcctccgntnccnccgctncnacncncnacgcgccccgcgccatcgccacgctacgcnactcgcaatcctctcgcgccctcncccctcgccacacncctccttcaccctcnncnncgcgcgtctcncanacgctcgcctctctctctnctcgcnnnctccacgctntctcccncccccacgctcgcgcncccgcgcgaccnctcaatcaancgccactnaactcgcnccatccncacnnaaccncctcgcgcnctaccactctctctctcgctcgctctctcacgctcacgcanacanctcgcgcgatctctcccancnccactcgctctcgcgccnnccacgcgncctcgcactnnnctctcgcacacccttcnnnctcgcacnctctncncacgcgctcgcactcnnccgnccntccaccnnnctctcgnaccccctcnctctactanacnactcgnctncgcgcgactcatnacccaacgcgtc

SEQ ID NO: 8647 - DNA, 624 bp, Artificial Sequence
  chemically treated genomic DNA (Homo sapiens) CpG-island No: 8647
  unsure (37, 40, 54, 72, 77, 79, 83, 93, 100, 111..112, 129, 135, 145)
  unsure (147, 150, 156, 158, 161, 163, 165, 195, 219, 233, 248..249)
  unsure (251..252, 263, 266, 285, 291..292, 303, 310, 326, 338, 348)
  unsure (356, 364, 371, 375..376, 381, 390, 431, 435, 454, 456, 474..475)
  unsure (483, 493..494, 512..513, 522, 527, 529, 545..546, 550, 553)
  unsure (560..561, 569, 578, 587, 590, 596, 599, 612)
gcgatatttgtgtacgtcgcgatatattatatttttnttnatttacggattatnatgtttattcgattttantcgantntatncgattttttncgacgtntttcgcgtatnnttttttttcgtacgatncgcgtngttttttcgntnttntcgttntnatntntnacgcgtttcgcgttatcgttacgttgcgtnattcgtaattttttcgcgtttttntttttcgttatatnttttttttatttttnntnncgcgcgttttntanacgttcgtttttttttttnttcgtnnnttttacgttnttttttntttttacgttcgcgtnttcgcgcgattntttaattaancgttattnaattcgtnttatttntatnnaattntttcgcgtnttattattttttttttcgttcgtttttttacgtttacgtangtanttcgcgcggttttttttantnttattcgttttcgcgttnnttacgcgntttcgtattnnnttttcgtatattttttnnnttcgtatnttttntntacgcgttcgtatttnntcgnttntttattnnnttttcgngtttttttnttttattanatngttcgnttncgcgcgatttatnatttaacgcgtt

SEQ ID NO: 8648 - DNA, 624 bp, Artificial Sequence
  chemically treated genomic DNA (Homo sapiens) CpG-island No: 8648
  unsure (13, 26, 29, 35, 38, 47, 56, 63..64, 72, 75, 79..80, 96, 98)
  unsure (103, 111..112, 130..131, 142, 150..151, 169, 171, 190, 194)
  unsure (235, 244, 249..250, 254, 261, 269, 277, 287, 299, 315, 322)
  unsure (332..333, 340, 359, 362, 373..374, 376..377, 392, 406, 430)
  unsure (460, 462, 464, 467, 469, 475, 478, 480, 490, 496, 513..514)
  unsure (525, 532, 542, 546, 548, 553, 571, 585, 588)
aacgcgttaaatnataaatcgcgcgnaancgaacnatntaataaaanaaaaaaacncgaaaannnaataaanaancgannaaatacgaacgcgtananaaaanatacgaannnaaaaaatatacgaaaannnaatacgaaancgcgtaannaacgcgaaaacgaataanantaaaaaaaaccgcgcgaantacntacgtaaacgtaaaaaaacgaacgaaaaaaaaaataataanacgcgaaanaattnnatanaaataanacgaattnaataacgnttaattaaanaatcgcgcgaanacgcgaacgtaaaaanaaaaaanaacgtaaaannnacgaanaaaaaaaaaaacgaacgtntanaaaacgcgcgnnannaaaaataaaaaaaanatataacgaaaaanaaaaacgcgaaaaaattacgaatnacgcaacgtaacgataacgcgaaacgcgtnananatnanaacganaanancgaaaaaacnacgcgnatcgtacgaaaaaaaannatacgcgaaanacgtcgnaaaaaatcgnatanantcgantaaaatcgaataaacatnataatccgtaaatnaanaaaaatataatatatcgcgacgtacacaaatatcgc

SEQ ID NO: 8649 - DNA, 835 bp, Artificial Sequence
  chemically treated genomic DNA (Homo sapiens) CpG-island No: 8649
ggagtatacggattcgcgcgtttttcgtttttttttgtagggtttcgcgggaaagttaacgtaaagggtacggggttatatttatcgttgggcgtagtagttttttaggcgcggggtcgggacgaggcggcgagcggaggtagtaggagaaggacgagaagtaggcggtagggcggcgtgcgggtcggggcgttggtaggtatcgagtcggcggggtcgcgttgggggtcgtaggaagcgtcggtaaggttgtagttcgttaggggcggttgtcgcgagttgttgtcgggcggttttatggtttatagttttcgggcgtcgtttcgtgtggtcggcgagagcgtcgggttagttgcggggcggtcgcgggcggagtcggttacgtcggttcggcgcgtatggtgtcgcggcgggtagggggtttcgggttcggggtacggggcgcggggttcggggttgggcggcgttttttttttcggttcgtttagtttcgtagttattttcggggcgggacgtagaggagtttaggggttttcgtcgtttcgttaatttggagtttttttagcggttattttttttttcggcgggcgcggtcgttttagcgattgcgggggttgtcgtcgggtttgaggatgttgaggcggcgcgcgggagcgagcggcgcggggacgcgcgggagcgagcggcgcggggacgcgcggagcgggcgtgcgtttcgtttttcgagagcgcgttcgagcggggtttcgggtgttgatgttgttgttggatgttgtgttgttgttgttgtttggttcggaacgtattgcgtatgttttgttggggggcggggaag

SEQ ID NO: 8650 - DNA, 835 bp, Artificial Sequence
  chemically treated genomic DNA (Homo sapiens) CpG-island No: 8650
cttccccgccccccaacaaaacatacgcaatacgttccgaaccaaacaacaacaacaacacaacatccaacaacaacatcaacacccgaaaccccgctcgaacgcgctctcgaaaaacgaaacgcacgcccgctccgcgcgtccccgcgccgctcgctcccgcgcgtccccgcgccgctcgctcccgcgcgccgcctcaacatcctcaaacccgacgacaacccccgcaatcgctaaaacgaccgcgcccgccgaaaaaaaaaataaccgctaaaaaaactccaaattaacgaaacgacgaaaacccctaaactcctctacgtcccgccccgaaaataactacgaaactaaacgaaccgaaaaaaaaaacgccgcccaaccccgaaccccgcgccccgtaccccgaacccgaaaccccctacccgccgcgacaccatacgcgccgaaccgacgtaaccgactccgcccgcgaccgccccgcaactaacccgacgctctcgccgaccacacgaaacgacgcccgaaaactataaaccataaaaccgcccgacaacaactcgcgacaaccgcccctaacgaactacaaccttaccgacgcttcctacgacccccaacgcgaccccgccgactcgatacctaccaacgccccgacccgcacgccgccctaccgcctacttctcgtccttctcctactacctccgctcgccgcctcgtcccgaccccgcgcctaaaaaactactacgcccaacgataaatataaccccgtaccctttacgttaactttcccgcgaaaccctacaaaaaaaaacgaaaaacgcgcgaatccgtatactcc

SEQ ID NO: 8651 - DNA, 835 bp, Artificial Sequence
  chemically treated genomic DNA (Homo sapiens) CpG-island No: 8651
ttttttcgttttttaataaagtatgcgtagtgcgtttcgggttaggtaatagtagtagtatagtatttagtaatagtattagtattcgaagtttcgttcgggcgcgttttcggggggcggggcgtacgttcgtttcgcgcgttttcgcgtcgttcgttttcgcgcgttttcgcgtcgttcgttttcgcgcgtcgttttagtatttttaggttcggcggtagttttcgtagtcgttgaagcggtcgcgttcgtcgggggagggagtagtcgttggggaggttttaagttggcggagcggcgaggatttttggatttttttgcgtttcgtttcgggagtggttgcgaggttaggcgagtcgggaaagggggcgtcgtttagtttcgagtttcgcgtttcgtgtttcgagttcggagttttttgttcgtcgcggtattatgcgcgtcgagtcggcgtgatcggtttcgttcgcggtcgtttcgtagttagttcggcgttttcgtcggttatacggagcggcgttcgggagttatgagttatgaagtcgttcggtagtagttcgcggtagtcgtttttggcgggttgtagttttgtcggcgttttttgcggtttttaacgcggtttcgtcggttcggtgtttgttagcgtttcggttcgtacgtcgttttgtcgtttgtttttcgttttttttttgttgttttcgttcgtcgtttcgtttcggtttcgcgtttggggggttgttgcgtttagcggtgggtatggtttcgtgttttttgcgttggttttttcgcggggttttgtagaggaaagcgaagggcgcgcgggttcgtgtgtttt

SEQ ID NO: 8652 - DNA, 835 bp, Artificial Sequence
  chemically treated genomic DNA (Homo sapiens) CpG-island No: 8652
aaaacacacgaacccgcgcgcccttcgctttcctctacaaaaccccgcgaaaaaaccaacgcaaaaaacacgaaaccatacccaccgctaaacgcaacaaccccccaaacgcgaaaccgaaacgaaacgacgaacgaaaacaacaaaaaaaaaacgaaaaacaaacgacaaaacgacgtacgaaccgaaacgctaacaaacaccgaaccgacgaaaccgcgttaaaaaccgcaaaaaacgccgacaaaactacaacccgccaaaaacgactaccgcgaactactaccgaacgacttcataactcataactcccgaacgccgctccgtataaccgacgaaaacgccgaactaactacgaaacgaccgcgaacgaaaccgatcacgccgactcgacgcgcataataccgcgacgaacaaaaaactccgaactcgaaacacgaaacgcgaaactcgaaactaaacgacgccccctttcccgactcgcctaacctcgcaaccactcccgaaacgaaacgcaaaaaaatccaaaaatcctcgccgctccgccaacttaaaacctccccaacgactactccctcccccgacgaacgcgaccgcttcaacgactacgaaaactaccgccgaacctaaaaatactaaaacgacgcgcgaaaacgaacgacgcgaaaacgcgcgaaaacgaacgacgcgaaaacgcgcgaaacgaacgtacgccccgccccccgaaaacgcgcccgaacgaaacttcgaatactaatactattactaaatactatactactactattacctaacccgaaacgcactacgcatactttattaaaaaacgaaaaaa

SEQ ID NO: 8653 - DNA, 870 bp, Artificial Sequence
  chemically treated genomic DNA (Homo sapiens) CpG-island No: 8653
aggcggggttaggttcgttaatagtcgggcggggttttttttttcgggtttcgtttcggtcgattttattttttcgcgcggtttcgtttcgtcgtttttttgttagtggttttttttcgcgtaggtttcgattttagtcgtatttttttcggttttgtagtggcggcgaggaggcgagtcggagcgacggcggggttggggtcggagtcgagtcggggtcgggtagtagtagggattttttagaggcggggtttgtgggatcgttatgggcgtggagatcgagattatttttttcggagacggtatcgggtttttttcggagttaggggaggggaggggtttcggggcggagttcggagggcgggggtttgattcggaggtggcgtggagggtgttgaagggtcggggggttggatggggaaggtaggcggagacgttacgggatttttgggggtttaggagattatttttcgttattttttttcgcgtttatttaggggaatgtaggcggtattcggaggcgggggtttgcggttcggaggcgggggtttgcggttcgttatcgtttcgggttttttttgtcgcggttgtagtcgttcggttattcgttgttgttgatattttagtttgggtttcggtttcgttttttttgttttattcggcgagttttggaaagtaggatttgttttcggatattcgttgttcggggatttttttttagcgcgtttttcgtcgggttttttttcggtcgtttttttgcgggtcgggttgtgagcggttgtggggatagatttaggttggggaagggggaagcgtttttttgttcgttttcggatttcgttttattttgtcgtcgtttttagatttttt

SEQ ID NO: 8654 - DNA, 870 bp, Artificial Sequence
  chemically treated genomic DNA (Homo sapiens) CpG-island No: 8654
aaaaaatctaaaaacgacgacaaaataaaacgaaatccgaaaacgaacaaaaaaacgcttcccccttccccaacctaaatctatccccacaaccgctcacaacccgacccgcaaaaaaacgaccgaaaaaaaacccgacgaaaaacgcgctaaaaaaaaatccccgaacaacgaatatccgaaaacaaatcctactttccaaaactcgccgaataaaacaaaaaaaacgaaaccgaaacccaaactaaaatatcaacaacaacgaataaccgaacgactacaaccgcgacaaaaaaaacccgaaacgataacgaaccgcaaacccccgcctccgaaccgcaaacccccgcctccgaataccgcctacattcccctaaataaacgcgaaaaaaaataacgaaaaataatctcctaaacccccaaaaatcccgtaacgtctccgcctaccttccccatccaaccccccgacccttcaacaccctccacgccacctccgaatcaaacccccgccctccgaactccgccccgaaacccctcccctcccctaactccgaaaaaaacccgataccgtctccgaaaaaaataatctcgatctccacgcccataacgatcccacaaaccccgcctctaaaaaatccctactactacccgaccccgactcgactccgaccccaaccccgccgtcgctccgactcgcctcctcgccgccactacaaaaccgaaaaaaatacgactaaaatcgaaacctacgcgaaaaaaaaccactaacaaaaaaacgacgaaacgaaaccgcgcgaaaaaataaaatcgaccgaaacgaaacccgaaaaaaaaaaccccgcccgactattaacgaacctaaccccgcct

SEQ ID NO: 8655 - DNA, 870 bp, Artificial Sequence
  chemically treated genomic DNA (Homo sapiens) CpG-island No: 8655
agggagtttgaaagcggcggtaggataaagcgagattcggaagcgggtaagggagcgttttttttttttttagtttgggtttgtttttatagtcgtttatagttcggttcgtagggaagcgatcgaggggaggttcggcgggggacgcgttaggaggaggttttcgagtagcgggtattcgagagtaggttttgttttttagagttcgtcgagtagggtagggaaagcgaagtcgaaatttaggttggggtattagtagtagcggataatcgaacgattgtagtcgcgataggagaagttcggggcggtggcgggtcgtagattttcgttttcgggtcgtagattttcgttttcgagtgtcgtttatatttttttaggtgagcgcggaagaggatggcggaggatggttttttagatttttaagaatttcgtgacgttttcgtttgttttttttatttagtttttcgattttttagtattttttacgttattttcgaattagattttcgtttttcgggtttcgtttcgggatttttttttttttttggtttcggagggagttcggtatcgttttcgggggagatggtttcgatttttacgtttatagcggttttataggtttcgtttttggggggtttttgttgttgttcgatttcggttcggtttcggttttagtttcgtcgtcgtttcggttcgttttttcgtcgttattgtagagtcggaggaggtgcggttggagtcgggatttgcgcggggaggggttattggtaagggggcggcggggcggagtcgcgcggaaaggtggggtcggtcggggcggggttcgggggaagggatttcgttcggttgttagcgagtttggtttcgttt

SEQ ID NO: 8656 - DNA, 870 bp, Artificial Sequence
  chemically treated genomic DNA (Homo sapiens) CpG-island No: 8656
aaacgaaaccaaactcgctaacaaccgaacgaaatcccttcccccgaaccccgccccgaccgaccccacctttccgcgcgactccgccccgccgcccccttaccaataacccctccccgcgcaaatcccgactccaaccgcacctcctccgactctacaataacgacgaaaaaacgaaccgaaacgacgacgaaactaaaaccgaaaccgaaccgaaatcgaacaacaacaaaaaccccccaaaaacgaaacctataaaaccgctataaacgtaaaaatcgaaaccatctcccccgaaaacgataccgaactccctccgaaaccaaaaaaaaaaaaaaatcccgaaacgaaacccgaaaaacgaaaatctaattcgaaaataacgtaaaaaatactaaaaaatcgaaaaactaaataaaaaaaacaaacgaaaacgtcacgaaattcttaaaaatctaaaaaaccatcctccgccatcctcttccgcgctcacctaaaaaaatataaacgacactcgaaaacgaaaatctacgacccgaaaacgaaaatctacgacccgccaccgccccgaacttctcctatcgcgactacaatcgttcgattatccgctactactaataccccaacctaaatttcgacttcgctttccctaccctactcgacgaactctaaaaaacaaaacctactctcgaatacccgctactcgaaaacctcctcctaacgcgtcccccgccgaacctcccctcgatcgcttccctacgaaccgaactataaacgactataaaaacaaacccaaactaaaaaaaaaaaaaacgctcccttacccgcttccgaatctcgctttatcctaccgccgctttcaaactccct

SEQ ID NO: 8657 - DNA, 747 bp, Artificial Sequence
  chemically treated genomic DNA (Homo sapiens) CpG-island No: 8657
gagcggttcgaagtttttttcgaggtacgggtgcgacggggatgtcgtaggcgttcgtattcgttttcgtttatcgcgtttattttcggtttttttttttatttattaggtcgggcgtttgcggtttttacgttagtttcgggtcgggggtttttcgcgtaggcgcgtcgtgcgcggggatcgttcggtttggcggggaggtcgtcggtcgcgataggtatttttttgtttttttaaggttagtaggttcgcggtcgttttgttatatattcgggttcggttcgacgatttcggagtcgttcgattgcgggtggaagggagttcgttcgcgtttgcggaacgcgcgaatgttggcgtttatcgtttttcggacgtagcgtcgcgcgagtattttcgttttttgcgtcgcgggttttatagcgagttcgcgcgggcgtgtcggggcggcggaggacggttttaggtttaaagggattgggcggcggttttaggtggcgggttttggtttgcggaaggggttggagtcgttgtttttcggtgatcggcgcgtggttcggttaattttgtcgtcgttatttattcgtaatcgcgttcgttgacggtcgggtttttggtcgtcgggtttttgcgggtattatagagcggggtggcgttcgttttttcgagttttcggtgttagggaatttatcgtttattattttttgtttcgttttgggttttgttcggggattaaattattggaaggta

SEQ ID NO: 8658 - DNA, 747 bp, Artificial Sequence
  chemically treated genomic DNA (Homo sapiens) CpG-island No: 8658
taccttccaataatttaatccccgaacaaaacccaaaacgaaacaaaaaataataaacgataaattccctaacaccgaaaactcgaaaaaacgaacgccaccccgctctataatacccgcaaaaacccgacgaccaaaaacccgaccgtcaacgaacgcgattacgaataaataacgacgacaaaattaaccgaaccacgcgccgatcaccgaaaaacaacgactccaaccccttccgcaaaccaaaacccgccacctaaaaccgccgcccaatccctttaaacctaaaaccgtcctccgccgccccgacacgcccgcgcgaactcgctataaaacccgcgacgcaaaaaacgaaaatactcgcgcgacgctacgtccgaaaaacgataaacgccaacattcgcgcgttccgcaaacgcgaacgaactcccttccacccgcaatcgaacgactccgaaatcgtcgaaccgaacccgaatatataacaaaacgaccgcgaacctactaaccttaaaaaaacaaaaaaatacctatcgcgaccgacgacctccccgccaaaccgaacgatccccgcgcacgacgcgcctacgcgaaaaacccccgacccgaaactaacgtaaaaaccgcaaacgcccgacctaataaataaaaaaaaaaaccgaaaataaacgcgataaacgaaaacgaatacgaacgcctacgacatccccgtcgcacccgtacctcgaaaaaaacttcgaaccgctc

SEQ ID NO: 8659 - DNA, 747 bp, Artificial Sequence
  chemically treated genomic DNA (Homo sapiens) CpG-island No: 8659
tgttttttagtggtttggttttcgagtaggatttaaggcggggtagggggtggtgagcggtgaattttttggtatcgaggattcgagggagcggacgttatttcgttttgtggtgttcgtaaggattcggcgattaaggattcgatcgttaacggacgcggttgcgggtgggtggcggcggtaggattggtcgggttacgcgtcggttatcgagaagtagcgattttagtttttttcgtaaattaagattcgttatttagagtcgtcgtttaatttttttgggtttgaagtcgtttttcgtcgtttcggtacgttcgcgcggattcgttgtggaattcgcggcgtagggggcgggagtgttcgcgcggcgttgcgttcgggagacggtgggcgttaatattcgcgcgtttcgtagacgcgggcgggtttttttttattcgtagtcggacggtttcggggtcgtcgggtcgggttcgagtgtgtagtaggacggtcgcgggtttgttggttttgggagggtagagaggtgtttgtcgcggtcggcgattttttcgttaggtcgggcggttttcgcgtacgacgcgtttgcgcgggaggttttcggttcggggttggcgtggaggtcgtaggcgttcggtttagtgggtgggaggaagggtcgggagtgggcgcgatgagcgagagcgggtgcggacgtttacgatattttcgtcgtattcgtgtttcggggaggatttcgagtcgttt

SEQ ID NO: 8660 - DNA, 747 bp, Artificial Sequence
  chemically treated genomic DNA (Homo sapiens) CpG-island No: 8660
aaacgactcgaaatcctccccgaaacacgaatacgacgaaaatatcgtaaacgtccgcacccgctctcgctcatcgcgcccactcccgacccttcctcccacccactaaaccgaacgcctacgacctccacgccaaccccgaaccgaaaacctcccgcgcaaacgcgtcgtacgcgaaaaccgcccgacctaacgaaaaaatcgccgaccgcgacaaacacctctctaccctcccaaaaccaacaaacccgcgaccgtcctactacacactcgaacccgacccgacgaccccgaaaccgtccgactacgaataaaaaaaaacccgcccgcgtctacgaaacgcgcgaatattaacgcccaccgtctcccgaacgcaacgccgcgcgaacactcccgccccctacgccgcgaattccacaacgaatccgcgcgaacgtaccgaaacgacgaaaaacgacttcaaacccaaaaaaattaaacgacgactctaaataacgaatcttaatttacgaaaaaaactaaaatcgctacttctcgataaccgacgcgtaacccgaccaatcctaccgccgccacccacccgcaaccgcgtccgttaacgatcgaatccttaatcgccgaatccttacgaacaccacaaaacgaaataacgtccgctccctcgaatcctcgataccaaaaaattcaccgctcaccaccccctaccccgccttaaatcctactcgaaaaccaaaccactaaaaaaca

SEQ ID NO: 8661 - DNA, 510 bp, Artificial Sequence
  chemically treated genomic DNA (Homo sapiens) CpG-island No: 8661
ttttcgatcggaatatttcgttttttggaggttacgtttcgttttttacggtatagagttcggaagtgttttggattttcgtttttttatttttcggtttcgagtttcgtttaggttcggttttatttcggagtttattcgaagggggttgttacgttagcgcgttttagcgtaagacggcgttatttcgttgtaatagttttcggcgggttttggatgttgatgttttgtatttaacgcggtgtaattttcgaagtcgagcgagtttcggaggaattttagtatttgttacggtaattttattagttcgttaagatggcgatgtaagcggttaagagggcgaacgtgagtatcgggtgttttgcggagggtgggagaatttcgggtttgatttttttagcggcgtggatcggagtatttttgtttttttttcgtttttagagcggagaattttagaatttttattttgttagcgaagatattattcggttttatttttagagatatgtt

SEQ ID NO: 8662 - DNA, 510 bp, Artificial Sequence
  chemically treated genomic DNA (Homo sapiens) CpG-island No: 8662
aacatatctctaaaaataaaaccgaataatatcttcgctaacaaaataaaaattctaaaattctccgctctaaaaacgaaaaaaaaacaaaaatactccgatccacgccgctaaaaaaatcaaacccgaaattctcccaccctccgcaaaacacccgatactcacgttcgccctcttaaccgcttacatcgccatcttaacgaactaataaaattaccgtaacaaatactaaaattcctccgaaactcgctcgacttcgaaaattacaccgcgttaaatacaaaacatcaacatccaaaacccgccgaaaactattacaacgaaataacgccgtcttacgctaaaacgcgctaacgtaacaacccccttcgaataaactccgaaataaaaccgaacctaaacgaaactcgaaaccgaaaaataaaaaaacgaaaatccaaaacacttccgaactctataccgtaaaaaacgaaacgtaacctccaaaaaacgaaatattccgatcgaaaa

SEQ ID NO: 8663 - DNA, 510 bp, Artificial Sequence
  chemically treated genomic DNA (Homo sapiens) CpG-island No: 8663
agtatatttttgaggatggggtcggatagtgttttcgttgataggataggaattttggagtttttcgttttggggacggaggaggagtaagaatgtttcgatttacgtcgttaagaaagttaaattcgaagtttttttatttttcgtagaatattcgatatttacgttcgtttttttggtcgtttgtatcgttattttggcgggttgatgaagttatcgtagtagatattgaaattttttcggagttcgttcggtttcgggggttatatcgcgttagatgtaggatattaatatttaggattcgtcggaagttgttatagcggaatagcgtcgttttacgttgagacgcgttgacgtagtagtttttttcgaatagatttcggggtaaaatcgagtttgagcgagattcgaggtcggaagatggaaaggcgagagtttaagatattttcgggttttgtatcgtaaagggcggggcgtagtttttaaaaggcgagatgtttcggtcgggga

SEQ ID NO: 8664 - DNA, 510 bp, Artificial Sequence
  chemically treated genomic DNA (Homo sapiens) CpG-island No: 8664
tccccgaccgaaacatctcgccttttaaaaactacgccccgccctttacgatacaaaacccgaaaatatcttaaactctcgcctttccatcttccgacctcgaatctcgctcaaactcgattttaccccgaaatctattcgaaaaaaactactacgtcaacgcgtctcaacgtaaaacgacgctattccgctataacaacttccgacgaatcctaaatattaatatcctacatctaacgcgatataacccccgaaaccgaacgaactccgaaaaaatttcaatatctactacgataacttcatcaacccgccaaaataacgatacaaacgaccaaaaaaacgaacgtaaatatcgaatattctacgaaaaataaaaaaacttcgaatttaactttcttaacgacgtaaatcgaaacattcttactcctcctccgtccccaaaacgaaaaactccaaaattcctatcctatcaacgaaaacactatccgaccccatcctcaaaaatatact

SEQ ID NO: 8665 - DNA, 1438 bp, Artificial Sequence
  chemically treated genomic DNA (Homo sapiens) CpG-island No: 8665
tacggtttttcgggggcggcgacggtttatatgttttcggtaggcggggttgttgggttggttgggtcggggtttcgtggagggcggcggcggcggcgagcgggttaggtcggaggttggacgcggggatcggacgcggcggtcgagttcgagcgtaatttttcgagttagtcggtaaatttcgaggcgcggcggcggcggcggcgcgaaacgtagcgcggacggttagcgcgggttagcggcgtttttatgttcggcgcggcggttgcgtttttgtcgttttttttttagtttcgcgcgttcgggcgcgggggcgcggcggcggcggcgtggcggcgggggtttcgggcgttttcggtcgttttagtttttatcgtcgtttttcgcgcgtttattggtttaggcgcggcggttatttcgggaggcgtttttgcggttttttcgcgtttgttcgggaaggtcggagggagtcggtttcgttcgttcggtacgggttagtttaggacggagtattggcgcgtcgttatcgttgtttcgttagtttttggaggtcgcgcggtcggcggttttttttacgcgtaggatgggggtcgaggggttggggaggggtcgggagttcgagaggagggggcggcgttgcgttttttcggggaggcgttgatttcggttcgttcgtttttggttcgcgcggagtcggcggcgggggattcgggaagtttttatttttcggcgtatttttcgtaatttcggttttcgtcggagattaaattgggtttaggttggttttttttgaaaatgtagaagttggtttttaaagttttttcgttttggaaacgcgcgtgtattcggggttttagggaaagtgtgggttttggtttggcgtttgcggaatagagtttggtcgttgattttgttgcgtgattttggtcgagttacggattcgtagtcgtcgtcgtttgtttcgtagagagggggagacgttcgttttcggcggggtgtaagagttaagcggatcgtaagtgttacgtacgggtagggtaagggtatgtttattcgtttgtgggtggttttttttttgtcgggtttggtagaggagggaaagtcgcgaaaaggaaggagaaaataggggaggacgaggcgtggcggagttcggggtttttggagtcgcgaggtcggagatttgagtcgggagtttggttttttgttgttttttagcgggcgcggcgtattgtgggtattttcgtcggacggatttagcgcggtagcgcggttacggttcgtattttatttttttcgttgtgttagttaagggagaaatttagtttcgttttacgtttataagcgcgagttttgtttggatttacggtttgagtaattgtagtttttatttagggagtttttgttatttattcggttatttatttagttgatgttgagt

SEQ ID NO: 8666 - DNA, 1438 bp, Artificial Sequence
  chemically treated genomic DNA (Homo sapiens) CpG-island No: 8666
actcaacatcaactaaataaataaccgaataaataacaaaaactccctaaataaaaactacaattactcaaaccgtaaatccaaacaaaactcgcgcttataaacgtaaaacgaaactaaatttctcccttaactaacacaacgaaaaaaataaaatacgaaccgtaaccgcgctaccgcgctaaatccgtccgacgaaaatacccacaatacgccgcgcccgctaaaaaacaacaaaaaaccaaactcccgactcaaatctccgacctcgcgactccaaaaaccccgaactccgccacgcctcgtcctcccctattttctccttccttttcgcgactttccctcctctaccaaacccgacaaaaaaaaaaccacccacaaacgaataaacatacccttaccctacccgtacgtaacacttacgatccgcttaactcttacaccccgccgaaaacgaacgtctccccctctctacgaaacaaacgacgacgactacgaatccgtaactcgaccaaaatcacgcaacaaaatcaacgaccaaactctattccgcaaacgccaaaccaaaacccacactttccctaaaaccccgaatacacgcgcgtttccaaaacgaaaaaactttaaaaaccaacttctacattttcaaaaaaaaccaacctaaacccaatttaatctccgacgaaaaccgaaattacgaaaaatacgccgaaaaataaaaacttcccgaatcccccgccgccgactccgcgcgaaccaaaaacgaacgaaccgaaatcaacgcctccccgaaaaaacgcaacgccgccccctcctctcgaactcccgacccctccccaacccctcgacccccatcctacgcgtaaaaaaaaccgccgaccgcgcgacctccaaaaactaacgaaacaacgataacgacgcgccaatactccgtcctaaactaacccgtaccgaacgaacgaaaccgactccctccgaccttcccgaacaaacgcgaaaaaaccgcaaaaacgcctcccgaaataaccgccgcgcctaaaccaataaacgcgcgaaaaacgacgataaaaactaaaacgaccgaaaacgcccgaaacccccgccgccacgccgccgccgccgcgcccccgcgcccgaacgcgcgaaactaaaaaaaaaacgacaaaaacgcaaccgccgcgccgaacataaaaacgccgctaacccgcgctaaccgtccgcgctacgtttcgcgccgccgccgccgccgcgcctcgaaatttaccgactaactcgaaaaattacgctcgaactcgaccgccgcgtccgatccccgcgtccaacctccgacctaacccgctcgccgccgccgccgccctccacgaaaccccgacccaaccaacccaacaaccccgcctaccgaaaacatataaaccgtcgccgcccccgaaaaaccgta

SEQ ID NO: 8667 - DNA, 1438 bp, Artificial Sequence
  chemically treated genomic DNA (Homo sapiens) CpG-island No: 8667
gtttaatattagttgaatgaatggtcgagtgagtggtagaggttttttagatggaagttgtaattgtttaggtcgtgagtttaaataggattcgcgtttataggcgtggagcggagttggattttttttttggttaatatagcgggaaggatgaggtgcgggtcgtagtcgcgttgtcgcgttgagttcgttcggcggggatgtttatagtgcgtcgcgttcgttggagggtagtagagggttaggttttcggtttaggttttcggtttcgcggttttaaggatttcgggtttcgttacgtttcgtttttttttattttttttttttttttcgcggtttttttttttttattagattcggtaggaagaaagttatttataaacgaataagtatgtttttgttttgttcgtgcgtggtatttacgattcgtttagtttttatatttcgtcgaaggcgggcgtttttttttttttgcggagtaggcggcggcggttgcgagttcgtgattcgattaaggttacgtagtaaagttagcgattaagttttgtttcgtagacgttaggttaaagtttatattttttttaaagtttcgagtgtacgcgcgtttttagaacgggagaattttggagattaatttttgtatttttaaagggggttagtttgggtttagtttaattttcggcggggatcggggttgcgggaaatgcgtcggggagtgagggtttttcggatttttcgtcgtcgatttcgcgcgggttaggggcgggcgggtcgggattagcgttttttcgggagagcgtagcgtcgtttttttttttcgggttttcggtttttttttagtttttcggtttttattttgcgcgtgggagaaatcgtcgatcgcgcggtttttaggggttggcggagtagcggtggcgacgcgttagtatttcgttttgggttggttcgtgtcgggcgggcggggtcggtttttttcgattttttcgggtaggcgcgggggggtcgtagggacgtttttcggagtggtcgtcgcgtttaggttaatgagcgcgcggggagcggcgatggaggttggggcggtcgggagcgttcgggattttcgtcgttacgtcgtcgtcgtcgcgttttcgcgttcgagcgcgcggggttggagagggggcgatagaggcgtagtcgtcgcgtcgggtatggaggcgtcgttggttcgcgttggtcgttcgcgttgcgtttcgcgtcgtcgtcgtcgtcgcgtttcgaagtttgtcggttgattcggaaagttgcgttcgggttcggtcgtcgcgttcggttttcgcgtttagttttcggtttgattcgttcgtcgtcgtcgtcgttttttacggggtttcggtttagttaatttagtagtttcgtttgtcgggggtatgtgagtcgtcgtcgttttcgagaggtcgtg

SEQ ID NO: 8668 - DNA, 1438 bp, Artificial Sequence
  chemically treated genomic DNA (Homo sapiens) CpG-island No: 8668
cacgacctctcgaaaacgacgacgactcacatacccccgacaaacgaaactactaaattaactaaaccgaaaccccgtaaaaaacgacgacgacgacgaacgaatcaaaccgaaaactaaacgcgaaaaccgaacgcgacgaccgaacccgaacgcaactttccgaatcaaccgacaaacttcgaaacgcgacgacgacgacgacgcgaaacgcaacgcgaacgaccaacgcgaaccaacgacgcctccatacccgacgcgacgactacgcctctatcgccccctctccaaccccgcgcgctcgaacgcgaaaacgcgacgacgacgacgtaacgacgaaaatcccgaacgctcccgaccgccccaacctccatcgccgctccccgcgcgctcattaacctaaacgcgacgaccactccgaaaaacgtccctacgacccccccgcgcctacccgaaaaaatcgaaaaaaaccgaccccgcccgcccgacacgaaccaacccaaaacgaaatactaacgcgtcgccaccgctactccgccaacccctaaaaaccgcgcgatcgacgatttctcccacgcgcaaaataaaaaccgaaaaactaaaaaaaaaccgaaaacccgaaaaaaaaaaacgacgctacgctctcccgaaaaaacgctaatcccgacccgcccgcccctaacccgcgcgaaatcgacgacgaaaaatccgaaaaaccctcactccccgacgcatttcccgcaaccccgatccccgccgaaaattaaactaaacccaaactaaccccctttaaaaatacaaaaattaatctccaaaattctcccgttctaaaaacgcgcgtacactcgaaactttaaaaaaaatataaactttaacctaacgtctacgaaacaaaacttaatcgctaactttactacgtaaccttaatcgaatcacgaactcgcaaccgccgccgcctactccgcaaaaaaaaaaaaacgcccgccttcgacgaaatataaaaactaaacgaatcgtaaataccacgcacgaacaaaacaaaaacatacttattcgtttataaataactttcttcctaccgaatctaataaaaaaaaaaaaaccgcgaaaaaaaaaaaaaaaataaaaaaaaacgaaacgtaacgaaacccgaaatccttaaaaccgcgaaaccgaaaacctaaaccgaaaacctaaccctctactaccctccaacgaacgcgacgcactataaacatccccgccgaacgaactcaacgcgacaacgcgactacgacccgcacctcatccttcccgctatattaaccaaaaaaaaaatccaactccgctccacgcctataaacgcgaatcctatttaaactcacgacctaaacaattacaacttccatctaaaaaacctctaccactcactcgaccattcattcaactaatattaaac

SEQ ID NO: 8669 - DNA, 583 bp, Artificial Sequence
  chemically treated genomic DNA (Homo sapiens) CpG-island No: 8669
cgagtttcgtttcggtcggtcgagtagttaatcgtttcgcggggcggggttgcggcgagttgtcgtaattaatagaggtggagggggcggggtttggttttcggcgcgcggcggtagggtcgttttcggtaaagcgagttgaattttgaggggagtcgttgattagtagtatggaggatttcgtcgcgtttgggatcgggggttcgttcgtaaatggtaatggtaacggcggcggtaaagggaagtaggcggcgtttaagggtcgcgaagcgtttcgaagttagtagcggtgagttagaggtgaggagttcggaaagtttcggttggggttcggagacgttcgtcggcgggaagcggcggttgaggtgattcggtttcggtttcggagttttcggcgcgttcgattagtttcgcgtagtgggcgtttgcggggttttagcggttgaattttgggttttttggttcggattagtgttcgttcgttttttgtcgcgggttgggggttttttagttttttggttttcgtttttgcgcgaagatgagcgcggtattgagcggattagatattttttaaatatttatt

SEQ ID NO: 8670 - DNA, 583 bp, Artificial Sequence
  chemically treated genomic DNA (Homo sapiens) CpG-island No: 8670
aataaatatttaaaaaatatctaatccgctcaataccgcgctcatcttcgcgcaaaaacgaaaaccaaaaaactaaaaaacccccaacccgcgacaaaaaacgaacgaacactaatccgaaccaaaaaacccaaaattcaaccgctaaaaccccgcaaacgcccactacgcgaaactaatcgaacgcgccgaaaactccgaaaccgaaaccgaatcacctcaaccgccgcttcccgccgacgaacgtctccgaaccccaaccgaaactttccgaactcctcacctctaactcaccgctactaacttcgaaacgcttcgcgacccttaaacgccgcctacttccctttaccgccgccgttaccattaccatttacgaacgaacccccgatcccaaacgcgacgaaatcctccatactactaatcaacgactcccctcaaaattcaactcgctttaccgaaaacgaccctaccgccgcgcgccgaaaaccaaaccccgccccctccacctctattaattacgacaactcgccgcaaccccgccccgcgaaacgattaactactcgaccgaccgaaacgaaactcg

SEQ ID NO: 8671 - DNA, 583 bp, Artificial Sequence
  chemically treated genomic DNA (Homo sapiens) CpG-island No: 8671
gataaatatttggaaagtatttggttcgtttaatatcgcgtttattttcgcgtaggggcgaaagttagagggttagaaagtttttaattcgcggtaggagacgggcggatattggttcgggttaaagagtttagagtttagtcgttaggatttcgtaggcgtttattgcgcggggttgatcgagcgcgtcgagggtttcggggtcgaggtcgaattattttagtcgtcgtttttcgtcggcgggcgttttcgggttttagtcgaagtttttcgggttttttatttttgatttatcgttgttggtttcggaacgtttcgcggtttttgggcgtcgtttgtttttttttgtcgtcgtcgttgttattgttatttgcgggcgggttttcggttttaggcgcggcggggttttttatgttgttggttagcggttttttttagggtttagttcgttttgtcggaggcgattttatcgtcgcgcgtcgggagttaggtttcgttttttttatttttattggttacggtagttcgtcgtaatttcgtttcgcgaggcgattggttgttcgatcggtcggagcgggattcg

SEQ ID NO: 8672 - DNA, 583 bp, Artificial Sequence
  chemically treated genomic DNA (Homo sapiens) CpG-island No: 8672
cgaatcccgctccgaccgatcgaacaaccaatcgcctcgcgaaacgaaattacgacgaactaccgtaaccaataaaaataaaaaaaacgaaacctaactcccgacgcgcgacgataaaatcgcctccgacaaaacgaactaaaccctaaaaaaaaccgctaaccaacaacataaaaaaccccgccgcgcctaaaaccgaaaacccgcccgcaaataacaataacaacgacgacgacaaaaaaaaacaaacgacgcccaaaaaccgcgaaacgttccgaaaccaacaacgataaatcaaaaataaaaaacccgaaaaacttcgactaaaacccgaaaacgcccgccgacgaaaaacgacgactaaaataattcgacctcgaccccgaaaccctcgacgcgctcgatcaaccccgcgcaataaacgcctacgaaatcctaacgactaaactctaaactctttaacccgaaccaatatccgcccgtctcctaccgcgaattaaaaactttctaaccctctaactttcgcccctacgcgaaaataaacgcgatattaaacgaaccaaatactttccaaatatttatc

SEQ ID NO: 8673 - DNA, 965 bp, Artificial Sequence
  chemically treated genomic DNA (Homo sapiens) CpG-island No: 8673
tttttttttcgttcgtgtttttttttttattggtcgtttttttgtcgatttgtgttcgttatttttttttttttcgtttttttcgtttttttttttttttttcgttttttgttttatttattttcgtttgtttcgttcgcgtttttttcgtattttttgttttttttttttttattagttgcggtttgtttttttttttgcgtttcgttttcgttttcgcgtatgttcgtttttattttttttttggtgtcgtttttttgttttgtgcgcgtcgtttttcgtttcgtttttgttatcgttgatgcgtattttatttcgttcgcgtggattgtttgtttttggcgtttatttatttcgttttttatttgttcgatttatttatacggtttgttttttattttatgcgtagttgttagtttcgttagtttcgtgcgtgtcgtagtgttcgcgtacgttgtttgtattttttgattgttttttgcgtttttttgttttcgcggtttgtttcgttttttgtacgacgtagtattttatttgtagtatgtacgtatatcggttttcgatatcgttattcgttttttttgtttatttttgaagtcgcgttcgcgtcgttttttgtgtttatgttttgatcgtttttatgtgcgtattgtatttcgatttcggatttttcgtttattcgtcgtattttgtttttatagcgcgtttgtttattttcgcgtatcgtcgtttttttgtgcgtgtttgttgtttttatacgtttcgcgtacgtcgttttagcgtgttcgatttgttcgttgttttacgtgtgcgtgattttttttgcgtttttttttttcgtacgttttcgatattcgttagttttttttttatcgtcgtcgttttgcgtcgacgttttttttttcgtgtttcgtatattgttcgatgcgtttcgtgtttgttatatatgtttttttttttgtttt

SEQ ID NO: 8674 - DNA, 965 bp, Artificial Sequence
  chemically treated genomic DNA (Homo sapiens) CpG-island No: 8674
aaaacaaaaaaaaaaacatatataacaaacacgaaacgcatcgaacaatatacgaaacacgaaaaaaaaaacgtcgacgcaaaacgacgacgataaaaaaaaaactaacgaatatcgaaaacgtacgaaaaaaaaaaacgcaaaaaaaatcacgcacacgtaaaacaacgaacaaatcgaacacgctaaaacgacgtacgcgaaacgtataaaaacaacaaacacgcacaaaaaaacgacgatacgcgaaaataaacaaacgcgctataaaaacaaaatacgacgaataaacgaaaaatccgaaatcgaaatacaatacgcacataaaaacgatcaaaacataaacacaaaaaacgacgcgaacgcgacttcaaaaataaacaaaaaaaacgaataacgatatcgaaaaccgatatacgtacatactacaaataaaatactacgtcgtacaaaaaacgaaacaaaccgcgaaaacaaaaaaacgcaaaaaacaatcaaaaaatacaaacaacgtacgcgaacactacgacacgcacgaaactaacgaaactaacaactacgcataaaataaaaaacaaaccgtataaataaatcgaacaaataaaaaacgaaataaataaacgccaaaaacaaacaatccacgcgaacgaaataaaatacgcatcaacgataacaaaaacgaaacgaaaaacgacgcgcacaaaacaaaaaaacgacaccaaaaaaaaaataaaaacgaacatacgcgaaaacgaaaacgaaacgcaaaaaaaaaaacaaaccgcaactaataaaaaaaaaaaaaacaaaaaatacgaaaaaaacgcgaacgaaacaaacgaaaataaataaaacaaaaaacgaaaaaaaaaaaaaaaaacgaaaaaaacgaaaaaaaaaaaaataacgaacacaaatcgacaaaaaaacgaccaataaaaaaaaaaacacgaacgaaaaaaaaa

SEQ ID NO: 8675 - DNA, 965 bp, Artificial Sequence
  chemically treated genomic DNA (Homo sapiens) CpG-island No: 8675
aagataaaagagagagtatgtgtgatagatacgaggcgtatcgagtagtgtacggaatacggagagagagacgtcgacgtagagcgacgacggtgaggagagagttgacgagtgtcgagagcgtgcgagagagaggagcgtagagagagttacgtatacgtgagatagcgagtagatcgagtacgttgaggcgacgtacgcgagacgtatgagagtagtagatacgtatagagagacgacgatgcgcgagagtaagtagacgcgttatgaggatagagtacgacgagtagacgagagattcgagatcgaagtgtaatgcgtatatgagagcgattagagtataagtatagagaacgacgcggacgcgattttaggagtaagtagagagagcgagtgacggtatcgggagtcgatgtacgtatatgttataagtgagatattgcgtcgtataggagacgagatagatcgcgaggataagaggacgtagaggatagttagagaatgtagatagcgtgcgcgagtattgcggtacgtacgaagttaacgagattgatagttacgtatgagataggaagtaagtcgtatgagtagatcggatagatgagagacgaggtggatgagcgttagagataagtagtttacgcggacgaaatgagatgcgtattagcgatggtagagacggagcgaagagcgacgcgtataaagtaaaaaagcgatattagaggagaggtgaaggcgagtatgcgcgagagcgaggacggaacgtaaagagagggataggtcgtagttgataggagagaaagagatagagagtgcggaaggagcgcgaacgaggtagacggaggtggatgaaataggagacgagggaaagagaaggagacgaagagggcggaggagagagggatggcggatataagtcgataggaggacgattaataggaaaggagatacgagcgaggggaaag

SEQ ID NO: 8676 - DNA, 965 bp, Artificial Sequence
  chemically treated genomic DNA (Homo sapiens) CpG-island No: 8676
ctttcccctcgctcgtatctcctttcctattaatcgtcctcctatcgacttatatccgccatccctctctcctccgccctcttcgtctccttctctttccctcgtctcctatttcatccacctccgtctacctcgttcgcgctccttccgcactctctatctctttctctcctatcaactacgacctatccctctctttacgttccgtcctcgctctcgcgcatactcgccttcacctctcctctaatatcgcttttttactttatacgcgtcgctcttcgctccgtctctaccatcgctaatacgcatctcatttcgtccgcgtaaactacttatctctaacgctcatccacctcgtctctcatctatccgatctactcatacgacttacttcctatctcatacgtaactatcaatctcgttaacttcgtacgtaccgcaatactcgcgcacgctatctacattctctaactatcctctacgtcctcttatcctcgcgatctatctcgtctcctatacgacgcaatatctcacttataacatatacgtacatcgactcccgataccgtcactcgctctctctacttactcctaaaatcgcgtccgcgtcgttctctatacttatactctaatcgctctcatatacgcattacacttcgatctcgaatctctcgtctactcgtcgtactctatcctcataacgcgtctacttactctcgcgcatcgtcgtctctctatacgtatctactactctcatacgtctcgcgtacgtcgcctcaacgtactcgatctactcgctatctcacgtatacgtaactctctctacgctcctctctctcgcacgctctcgacactcgtcaactctctcctcaccgtcgtcgctctacgtcgacgtctctctctccgtattccgtacactactcgatacgcctcgtatctatcacacatactctctcttttatctt

SEQ ID NO: 8677 - DNA, 516 bp, Artificial Sequence
  chemically treated genomic DNA (Homo sapiens) CpG-island No: 8677
tataggcgtcgatttttatttgtcgtttgtacgtagagattgatagttttttcgttgcggtcgtaattatcggtagtttacggtgttagggttagttttcgcggcgtttatttggtcgttttgtattttgggaggtatgggcgtttggcggtttttgcgttttgagtcgaacgatagttgttttagagtggtgaaattcggttatttatgggtattacgttaaattagtcgggtatgggcggtttatgttgatatgtcgaggttttttttggttgtcgttcgtatcgggtttttcgcgtttttggtttggggcgggtttttattatattggttaggtcgcgttgttgtgttcgttgggttcggtgttttggggtttcgttggtttcgtttagtgttttttgggattacggatgtggcggcgttcgtcgttttgtgtgtgttagtaggatgagtttagttttgtatcgttagagttgtgtttgtgggattgttatagtcgttaatggattaggtgtg

SEQ ID NO: 8678 - DNA, 516 bp, Artificial Sequence
  chemically treated genomic DNA (Homo sapiens) CpG-island No: 8678
cacacctaatccattaacgactataacaatcccacaaacacaactctaacgatacaaaactaaactcatcctactaacacacacaaaacgacgaacgccgccacatccgtaatcccaaaaaacactaaacgaaaccaacgaaaccccaaaacaccgaacccaacgaacacaacaacgcgacctaaccaatataataaaaacccgccccaaaccaaaaacgcgaaaaacccgatacgaacgacaaccaaaaaaaacctcgacatatcaacataaaccgcccatacccgactaatttaacgtaatacccataaataaccgaatttcaccactctaaaacaactatcgttcgactcaaaacgcaaaaaccgccaaacgcccatacctcccaaaatacaaaacgaccaaataaacgccgcgaaaactaaccctaacaccgtaaactaccgataattacgaccgcaacgaaaaaactatcaatctctacgtacaaacgacaaataaaaatcgacgcctata

SEQ ID NO: 8679 - DNA, 516 bp, Artificial Sequence
  chemically treated genomic DNA (Homo sapiens) CpG-island No: 8679
tatatttagtttattggcgattatgatagttttataggtataattttagcggtgtagagttgggtttattttattaatatatatagaacggcgaacgtcgttatattcgtggttttaagaagtattgaacggggttagcgaggttttagaatatcgaatttaacggatataatagcgcgatttagttaatgtggtgagaattcgttttagattaagggcgcgaagaattcgatacgaacgataattagaaaggatttcggtatattagtatggatcgtttatgttcggttaatttgacgtagtgtttataagtgatcgggttttattattttgagatagttgtcgttcgatttaagacgtaaggatcgttaagcgtttatgttttttaaagtgtaaggcggttaggtgagcgtcgcgaagattagttttaatatcgtgggttatcggtgattacgatcgtagcgagaggattgttagtttttacgtgtaagcggtaggtgagagtcgacgtttgtg

SEQ ID NO: 8680 - DNA, 516 bp, Artificial Sequence
  chemically treated genomic DNA (Homo sapiens) CpG-island No: 8680
cacaaacgtcgactctcacctaccgcttacacgtaaaaactaacaatcctctcgctacgatcgtaatcaccgataacccacgatattaaaactaatcttcgcgacgctcacctaaccgccttacactttaaaaaacataaacgcttaacgatccttacgtcttaaatcgaacgacaactatctcaaaataataaaacccgatcacttataaacactacgtcaaattaaccgaacataaacgatccatactaatataccgaaatcctttctaattatcgttcgtatcgaattcttcgcgcccttaatctaaaacgaattctcaccacattaactaaatcgcgctattatatccgttaaattcgatattctaaaacctcgctaaccccgttcaatacttcttaaaaccacgaatataacgacgttcgccgttctatatatattaataaaataaacccaactctacaccgctaaaattatacctataaaactatcataatcgccaataaactaaatata

SEQ ID NO: 8681 - DNA, 578 bp, Artificial Sequence
  chemically treated genomic DNA (Homo sapiens) CpG-island No: 8681
ttcggcggttcgggtgtaagtgggcgagggtcggatttacgcgtgtcgtcgaagcgcgtagcgatggtgtttaggaaggtgttttgcggcgttaggaggtttcgtatggtcggtattttaggcgttcgcggttgttcgttttattttttcggggtgcggggatttcgcgtcgggggagggcgtttagttcggtcgtttttcgtcgggtttcgcgttttttagcgtagtcgtcggggggtaatgcgtagatcgggattcggggtcgcgtcggacgttggcgcgcgagggggcgttcgcgtcgtcggggttcggagtatggcgcgcggtttttcgcgttttcgtcgtttataaatttcgggttttaggtttcgcggtcgtcgcgtttttagtatttttcgtcgcggtagcggttcgcgtgtcggttgcgggtgggttttcgttcggtttcgttcggcgtcggttttcggtagtttttttcgtttgtcggggagaagttgtagtttttttttttttttttcgcgttcgtcgtttgtatcggggtaattatggagacggggtatatttagttagggtcgttt

SEQ ID NO: 8682 - DNA, 578 bp, Artificial Sequence
  chemically treated genomic DNA (Homo sapiens) CpG-island No: 8682
aaacgaccctaactaaatataccccgtctccataattaccccgatacaaacgacgaacgcgaaaaaaaaaaaaaaaaactacaacttctccccgacaaacgaaaaaaactaccgaaaaccgacgccgaacgaaaccgaacgaaaacccacccgcaaccgacacgcgaaccgctaccgcgacgaaaaatactaaaaacgcgacgaccgcgaaacctaaaacccgaaatttataaacgacgaaaacgcgaaaaaccgcgcgccatactccgaaccccgacgacgcgaacgccccctcgcgcgccaacgtccgacgcgaccccgaatcccgatctacgcattaccccccgacgactacgctaaaaaacgcgaaacccgacgaaaaacgaccgaactaaacgccctcccccgacgcgaaatccccgcaccccgaaaaaataaaacgaacaaccgcgaacgcctaaaataccgaccatacgaaacctcctaacgccgcaaaacaccttcctaaacaccatcgctacgcgcttcgacgacacgcgtaaatccgaccctcgcccacttacacccgaaccgccgaa

SEQ ID NO: 8683 - DNA, 578 bp, Artificial Sequence
  chemically treated genomic DNA (Homo sapiens) CpG-island No: 8683
aggcggttttggttgggtgtgtttcgtttttatggttatttcggtgtaggcggcgggcgcgggagggagggagggaggttgtagttttttttcgatagacggagggagttgtcgagagtcggcgtcgagcgaagtcgagcggaagtttattcgtagtcgatacgcgagtcgttgtcgcggcgggaggtgttgagagcgcggcggtcgcggggtttggagttcgggatttgtgggcggcgagggcgcgaggggtcgcgcgttatgtttcgggtttcgacggcgcggacgttttttcgcgcgttagcgttcggcgcgatttcggatttcggtttgcgtattgtttttcgacggttgcgttagggagcgcggggttcggcggggggcggtcgagttgggcgttttttttcggcgcggagttttcgtatttcggagggatggggcgggtagtcgcgggcgtttaagatgtcggttatgcggggttttttggcgtcgtagaatatttttttggatattatcgttacgcgtttcgacggtacgcgtgagttcgattttcgtttatttgtattcgggtcgtcgga

SEQ ID NO: 8684 - DNA, 578 bp, Artificial Sequence
  chemically treated genomic DNA (Homo sapiens) CpG-island No: 8684
tccgacgacccgaatacaaataaacgaaaatcgaactcacgcgtaccgtcgaaacgcgtaacgataatatccaaaaaaatattctacgacgccaaaaaaccccgcataaccgacatcttaaacgcccgcgactacccgccccatccctccgaaatacgaaaactccgcgccgaaaaaaaacgcccaactcgaccgccccccgccgaaccccgcgctccctaacgcaaccgtcgaaaaacaatacgcaaaccgaaatccgaaatcgcgccgaacgctaacgcgcgaaaaaacgtccgcgccgtcgaaacccgaaacataacgcgcgacccctcgcgccctcgccgcccacaaatcccgaactccaaaccccgcgaccgccgcgctctcaacacctcccgccgcgacaacgactcgcgtatcgactacgaataaacttccgctcgacttcgctcgacgccgactctcgacaactccctccgtctatcgaaaaaaaactacaacctccctccctccctcccgcgcccgccgcctacaccgaaataaccataaaaacgaaacacacccaaccaaaaccgcct

SEQ ID NO: 8685 - DNA, 581 bp, Artificial Sequence
  chemically treated genomic DNA (Homo sapiens) CpG-island No: 8685
atcggcggttcgggagtttgagggcgtgggacggttattcgcgagtcgacgttgcgcgatgcgtaggagatttggttggagaatagcggcgtttggtggtttcgttaggtcggttataatggcgttcgcggtagttcgtttttatttatcggggagcggggttatcgcgtcgggggtgggcgttttgtacggtcgtttttcgtcgggtttcgcgtatttatgcgttgtcgacggggggtttagcgttgttcgggtatcggggacgcgtcggtacgaggcgcgcgtggggcgatcgcgtcgacggggttcggtgttaggcgcgcggtttatacgcgtttacgtcgttttttttattcgggtatttggtttcgcggtcgtcgcgtatattgttttattcgtcgcggttgcggtacgcgagacggtagcgggagggtaatcgtacgcgaacgtacggcgtcggtatacggttgtatttatcgatagacggggtgttgtagttgttatttatttatttattcgcgttcgtcgttagtttcggggatttttaggtgtcgggttttttttgtttgggtcgttattaa

SEQ ID NO: 8686 - DNA, 581 bp, Artificial Sequence
  chemically treated genomic DNA (Homo sapiens) CpG-island No: 8686
ttaataacgacccaaacaaaaaaaacccgacacctaaaaatccccgaaactaacgacgaacgcgaataaataaataaataacaactacaacaccccgtctatcgataaatacaaccgtataccgacgccgtacgttcgcgtacgattaccctcccgctaccgtctcgcgtaccgcaaccgcgacgaataaaacaatatacgcgacgaccgcgaaaccaaatacccgaataaaaaaaacgacgtaaacgcgtataaaccgcgcgcctaacaccgaaccccgtcgacgcgatcgccccacgcgcgcctcgtaccgacgcgtccccgatacccgaacaacgctaaaccccccgtcgacaacgcataaatacgcgaaacccgacgaaaaacgaccgtacaaaacgcccacccccgacgcgataaccccgctccccgataaataaaaacgaactaccgcgaacgccattataaccgacctaacgaaaccaccaaacgccgctattctccaaccaaatctcctacgcatcgcgcaacgtcgactcgcgaataaccgtcccacgccctcaaactcccgaaccgccgat

SEQ ID NO: 8687 - DNA, 581 bp, Artificial Sequence
  chemically treated genomic DNA (Homo sapiens) CpG-island No: 8687
ttggtggcggtttaggtagggagagttcgatatttaggaattttcggagttggcggcgggcgcgggtgggtgggtgggtggtagttgtaatatttcgtttgtcggtgggtgtagtcgtgtgtcggcgtcgtgcgttcgcgtgcggttgttttttcgttgtcgtttcgcgtgtcgtagtcgcggcgggtggagtagtgtgcgcggcggtcgcggggttaggtgttcgggtaaagagggcggcgtgggcgcgtgtgggtcgcgcgtttagtatcgggtttcgtcggcgcggtcgttttacgcgcgtttcgtatcggcgcgttttcggtattcggatagcgttaagtttttcgtcggtagcgtatgggtgcgcggggttcggcggggggcggtcgtgtagggcgtttattttcggcgcggtgatttcgtttttcggtgggtaggggcgggttgtcgcgggcgttattgtagtcggtttagcggggttattaggcgtcgttgttttttaattaggttttttacgtatcgcgtaacgtcggttcgcgagtgatcgttttacgtttttaagttttcgggtcgtcggt

SEQ ID NO: 8688 - DNA, 581 bp, Artificial Sequence
  chemically treated genomic DNA (Homo sapiens) CpG-island No: 8688
accgacgacccgaaaacttaaaaacgtaaaacgatcactcgcgaaccgacgttacgcgatacgtaaaaaacctaattaaaaaacaacgacgcctaataaccccgctaaaccgactacaataacgcccgcgacaacccgcccctacccaccgaaaaacgaaatcaccgcgccgaaaataaacgccctacacgaccgccccccgccgaaccccgcgcacccatacgctaccgacgaaaaacttaacgctatccgaataccgaaaacgcgccgatacgaaacgcgcgtaaaacgaccgcgccgacgaaacccgatactaaacgcgcgacccacacgcgcccacgccgccctctttacccgaacacctaaccccgcgaccgccgcgcacactactccacccgccgcgactacgacacgcgaaacgacaacgaaaaaacaaccgcacgcgaacgcacgacgccgacacacgactacacccaccgacaaacgaaatattacaactaccacccacccacccacccgcgcccgccgccaactccgaaaattcctaaatatcgaactctccctacctaaaccgccaccaa

SEQ ID NO: 8689 - DNA, 538 bp, Artificial Sequence
  chemically treated genomic DNA (Homo sapiens) CpG-island No: 8689
tcgttttatagaggttcgtgaatgggggtggggttttgcgaggggcggggttacgttattttttgtgcgggacgcgttgtagttggagaggaaaggtagagcgaggaggggcgaggttaagaaagcgcgcgtttttgggaggggaggagtttggttaaggagcgtcgcgttatattcggtagagttagagttcgtgcggaggcggtgcggagtatttcggttttgagcggttgggcgatcggcgcgtcgtgcggggttgcggcggagtttttttaaggaaggtgtaagaggttggtagtttcgattgaagtatatcgatcggcgatagtagttaggagttatgagcgatagcggcgagtagaattacggcgagcgggtacgtagagttgcggtagggggtggttgtgtggttttagttttttgtatttttttttaggttcgtcggtttcgggttaggaggtaggggcgttttaggtttcgaagtttgaagtcgggagggtaggtaagggagatagtatttaattaaaaaaagtttttg

SEQ ID NO: 8690 - DNA, 538 bp, Artificial Sequence
  chemically treated genomic DNA (Homo sapiens) CpG-island No: 8690
caaaaactttttttaattaaatactatctcccttacctaccctcccgacttcaaacttcgaaacctaaaacgcccctacctcctaacccgaaaccgacgaacctaaaaaaaaatacaaaaaactaaaaccacacaaccaccccctaccgcaactctacgtacccgctcgccgtaattctactcgccgctatcgctcataactcctaactactatcgccgatcgatatacttcaatcgaaactaccaacctcttacaccttccttaaaaaaactccgccgcaaccccgcacgacgcgccgatcgcccaaccgctcaaaaccgaaatactccgcaccgcctccgcacgaactctaactctaccgaatataacgcgacgctccttaaccaaactcctcccctcccaaaaacgcgcgctttcttaacctcgcccctcctcgctctacctttcctctccaactacaacgcgtcccgcacaaaaaataacgtaaccccgcccctcgcaaaaccccacccccattcacgaacctctataaaacga

SEQ ID NO: 8691 - DNA, 538 bp, Artificial Sequence
  chemically treated genomic DNA (Homo sapiens) CpG-island No: 8691
taaaggttttttttggttaaatgttgttttttttgtttgttttttcggttttagatttcggagtttaaaacgtttttgttttttggttcgaggtcgacgggtttagaaaaagatgtaaggagttaggattatatagttattttttatcgtagttttacgtattcgttcgtcgtagttttgttcgtcgttgtcgtttatgatttttggttgttgtcgtcggtcgatgtgttttaatcgaagttgttaattttttgtattttttttaaggaggtttcgtcgtagtttcgtacgacgcgtcggtcgtttagtcgtttagagtcgaaatgtttcgtatcgttttcgtacgggttttaattttatcggatgtgacgcggcgttttttagttaggtttttttttttttagaaacgcgcgtttttttggtttcgttttttttcgttttgttttttttttttagttgtagcgcgtttcgtataggaagtgacgtgatttcgtttttcgtagggttttatttttatttacgagtttttatgaggcgg

SEQ ID NO: 8692 - DNA, 538 bp, Artificial Sequence
  chemically treated genomic DNA (Homo sapiens) CpG-island No: 8692
ccgcctcataaaaactcgtaaataaaaataaaaccctacgaaaaacgaaatcacgtcacttcctatacgaaacgcgctacaactaaaaaaaaaaaacaaaacgaaaaaaaacgaaaccaaaaaaacgcgcgtttctaaaaaaaaaaaaacctaactaaaaaacgccgcgtcacatccgataaaattaaaacccgtacgaaaacgatacgaaacatttcgactctaaacgactaaacgaccgacgcgtcgtacgaaactacgacgaaacctccttaaaaaaaatacaaaaaattaacaacttcgattaaaacacatcgaccgacgacaacaaccaaaaatcataaacgacaacgacgaacaaaactacgacgaacgaatacgtaaaactacgataaaaaataactatataatcctaactccttacatctttttctaaacccgtcgacctcgaaccaaaaaacaaaaacgttttaaactccgaaatctaaaaccgaaaaaacaaacaaaaaaaacaacatttaaccaaaaaaaaccttta

SEQ ID NO: 8693 - DNA, 1404 bp, Artificial Sequence
  chemically treated genomic DNA (Homo sapiens) CpG-island No: 8693
cggtcgcgtagtcgggcggcgattattcgtttttcggtcgttgattttagcgtttcggtttcgtcgtagtttttggtttttcggcgttcgtttttttattcgttatttggttttcgtcgtcgtcgttcgggaagttttcggtattttttagaatagagagtagttgttaacgttaggttgtcgtttgtcgcggggtttcggatacgcggggtttgggcggagaggacgtgatttcgcgttggtttttcgtttttttttttcggtcgggaaattgaggttcgggatcgggaattattttttcgcgagtacggttcgcgagggttcggttaatttcggttttaggcgtttcgattttcgcgcgcgatttttcgattatacgcgtcgttcggttattttagagagcgtggcggggagcgggttttagagcgagcgtacggttcgggaacgcgtagggcgttagtattggttaagtcgttgcgaaagttgttgttttttagtttgttttcgttttttattttcgggatatattttttcgtttgttttggtagtagcgtatttatattcggtttattttgcgtatattttttttcgcgtttattcgtagttttttttttttttacgttcgcggtttttcgtcgttttttcgcgcgtttttattcgcgttcggggcgcgtttttttcgtttcgtcgttcgttcggtttcggcgtcgcgttcgttcggggtttcggcgttcggagttttagttcggggtcgcgattcgttttcgttcgtttggcgcggggtcggagttcgagtagttattgtcgagcgcggtgggcgcgaggcgaggggcgtagcggcgcggggcggggagggggcgttcgttcgttttttttcggttgcgtatacgttcgtataaatttttatatagatatacgcggggtgcgttgtcgtcgttcgtcgttgttttttttttcgttatcgttttgagagggagagagagggaggtagagagagcgttttgttcgcgcgtcgtcgttcggttcgggattttgtttcgaggaggtagtcgcgtcgagttttcgttttcgtttttgttttcgggcgggtcgggtcggtcgcggtggggggagttaggttgagggtgggggtgggtggcgggcgggcggagggcggggagggggggcggaggaggaggagagacgagggtagcggaggaggcgaggagcgtcgggtatcgggtcgggggagtcgcgggttttcggggaagagacggatgatgaataagttttatatcgggaatttgagtttcgtcgttatcgtcgacgattttcggtagttttttggggataggaagttgtttttggcgggataggttttgttgaagttcggttacgttttcgtggattatttcgattagaatt

SEQ ID NO: 8694 - DNA, 1404 bp, Artificial Sequence
  chemically treated genomic DNA (Homo sapiens) CpG-island No: 8694
aattctaatcgaaataatccacgaaaacgtaaccgaacttcaacaaaacctatcccgccaaaaacaacttcctatccccaaaaaactaccgaaaatcgtcgacgataacgacgaaactcaaattcccgatataaaacttattcatcatccgtctcttccccgaaaacccgcgactcccccgacccgatacccgacgctcctcgcctcctccgctaccctcgtctctcctcctcctccgccccccctccccgccctccgcccgcccgccacccacccccaccctcaacctaactccccccaccgcgaccgacccgacccgcccgaaaacaaaaacgaaaacgaaaactcgacgcgactacctcctcgaaacaaaatcccgaaccgaacgacgacgcgcgaacaaaacgctctctctacctccctctctctccctctcaaaacgataacgaaaaaaaaaacaacgacgaacgacgacaacgcaccccgcgtatatctatataaaaatttatacgaacgtatacgcaaccgaaaaaaaacgaacgaacgccccctccccgccccgcgccgctacgcccctcgcctcgcgcccaccgcgctcgacaataactactcgaactccgaccccgcgccaaacgaacgaaaacgaatcgcgaccccgaactaaaactccgaacgccgaaaccccgaacgaacgcgacgccgaaaccgaacgaacgacgaaacgaaaaaaacgcgccccgaacgcgaataaaaacgcgcgaaaaaacgacgaaaaaccgcgaacgtaaaaaaaaaaaaaactacgaataaacgcgaaaaaaaatatacgcaaaataaaccgaatataaatacgctactaccaaaacaaacgaaaaaatatatcccgaaaataaaaaacgaaaacaaactaaaaaacaacaactttcgcaacgacttaaccaatactaacgccctacgcgttcccgaaccgtacgctcgctctaaaacccgctccccgccacgctctctaaaataaccgaacgacgcgtataatcgaaaaatcgcgcgcgaaaatcgaaacgcctaaaaccgaaattaaccgaaccctcgcgaaccgtactcgcgaaaaaataattcccgatcccgaacctcaatttcccgaccgaaaaaaaaaaacgaaaaaccaacgcgaaatcacgtcctctccgcccaaaccccgcgtatccgaaaccccgcgacaaacgacaacctaacgttaacaactactctctattctaaaaaataccgaaaacttcccgaacgacgacgacgaaaaccaaataacgaataaaaaaacgaacgccgaaaaaccaaaaactacgacgaaaccgaaacgctaaaatcaacgaccgaaaaacgaataatcgccgcccgactacgcgaccg

SEQ ID NO: 8695 - DNA, 1404 bp, Artificial Sequence
  chemically treated genomic DNA (Homo sapiens) CpG-island No: 8695
agttttggtcggggtagtttacgaaggcgtagtcggattttagtaggatttgtttcgttaggggtagttttttgtttttaaagagttgtcggaggtcgtcggcggtgacggcggggtttaggttttcgatgtaaagtttgtttattattcgtttttttttcgagagttcgcggttttttcggttcggtattcggcgtttttcgtttttttcgttgttttcgtttttttttttttttcgtttttttttttcgtttttcgttcgttcgttatttatttttatttttagtttggttttttttatcgcggtcggttcggttcgttcgggggtagaggcggaggcggggattcggcgcggttgttttttcggggtagagtttcgggtcgggcggcggcgcgcggataaagcgttttttttgttttttttttttttttttttaaggcggtggcgggaggaggagtagcggcgggcggcggtagcgtatttcgcgtgtgtttgtgtgagagtttgtacgggcgtgtgcgtagtcgagagggagcgagcgagcgtttttttttcgtttcgcgtcgttgcgtttttcgtttcgcgtttatcgcgttcggtagtggttgttcgggtttcggtttcgcgttaggcgggcggaagcgggtcgcggtttcgggttggggtttcgggcgtcggaatttcgggcgggcgcggcgtcgaggtcgggcgagcggcggggcggggaaggcgcgtttcgggcgcgggtgggagcgcgcgagggggcgacggggagtcgcgggcgtgggagggagaggggttgcgagtgagcgcggagaggggtgtgcgtaaggtggatcggatgtgagtgcgttgttgttagagtaagcgggaaggtgtgtttcggaggtgagaggcgagggtaggttgggagataataattttcgtagcgatttggttagtgttggcgttttgcgcgttttcgggtcgtgcgttcgttttgagattcgtttttcgttacgttttttgaggtgatcgagcggcgcgtgtggtcgaaggatcgcgcgcgggagtcgggacgtttaggatcggggttggtcgggttttcgcggatcgtgttcgcggggaagtggttttcggtttcgggttttagtttttcgatcggggagggaaggcggaaggttagcgcggagttacgtttttttcgtttagatttcgcgtgttcggaatttcgcggtaggcggtagtttgacgttggtagttgttttttattttgggaagtgtcgagggtttttcgggcggcggcggcgaaagttaggtggcgggtggggaaacgaacgtcgaggggttagggattgcggcgaggtcggagcgttggggttagcggtcgggggacggatggtcgtcgttcggttgcgcggtcg

SEQ ID NO: 8696 - DNA, 1404 bp, Artificial Sequence
  chemically treated genomic DNA (Homo sapiens) CpG-island No: 8696
cgaccgcgcaaccgaacgacgaccatccgtcccccgaccgctaaccccaacgctccgacctcgccgcaatccctaacccctcgacgttcgtttccccacccgccacctaactttcgccgccgccgcccgaaaaaccctcgacacttcccaaaataaaaaacaactaccaacgtcaaactaccgcctaccgcgaaattccgaacacgcgaaatctaaacgaaaaaaacgtaactccgcgctaaccttccgccttccctccccgatcgaaaaactaaaacccgaaaccgaaaaccacttccccgcgaacacgatccgcgaaaacccgaccaaccccgatcctaaacgtcccgactcccgcgcgcgatccttcgaccacacgcgccgctcgatcacctcaaaaaacgtaacgaaaaacgaatctcaaaacgaacgcacgacccgaaaacgcgcaaaacgccaacactaaccaaatcgctacgaaaattattatctcccaacctaccctcgcctctcacctccgaaacacaccttcccgcttactctaacaacaacgcactcacatccgatccaccttacgcacacccctctccgcgctcactcgcaacccctctccctcccacgcccgcgactccccgtcgccccctcgcgcgctcccacccgcgcccgaaacgcgccttccccgccccgccgctcgcccgacctcgacgccgcgcccgcccgaaattccgacgcccgaaaccccaacccgaaaccgcgacccgcttccgcccgcctaacgcgaaaccgaaacccgaacaaccactaccgaacgcgataaacgcgaaacgaaaaacgcaacgacgcgaaacgaaaaaaaaacgctcgctcgctccctctcgactacgcacacgcccgtacaaactctcacacaaacacacgcgaaatacgctaccgccgcccgccgctactcctcctcccgccaccgccttaaaaaaaaaaaaaaaaaaaacaaaaaaaacgctttatccgcgcgccgccgcccgacccgaaactctaccccgaaaaaacaaccgcgccgaatccccgcctccgcctctacccccgaacgaaccgaaccgaccgcgataaaaaaaaccaaactaaaaataaaaataaataacgaacgaacgaaaaacgaaaaaaaaaaacgaaaaaaaaaaaaaaacgaaaacaacgaaaaaaacgaaaaacgccgaataccgaaccgaaaaaaccgcgaactctcgaaaaaaaaacgaataataaacaaactttacatcgaaaacctaaaccccgccgtcaccgccgacgacctccgacaactctttaaaaacaaaaaactacccctaacgaaacaaatcctactaaaatccgactacgccttcgtaaactaccccgaccaaaact

SEQ ID NO: 8697 - DNA, 584 bp, Artificial Sequence
  chemically treated genomic DNA (Homo sapiens) CpG-island No: 8697
ttcgtcgttcgttttttcgtttttcgttcggttagaagtatttttttacgaggtgttttgttttaattcggtgggggttagggttgagaatcgggaaagaggcgatcggggggttcgcgagcgcgttggagtttagataggagacggagagcgatatatatatatattcgcgcgcgcgtattttttaattttttttagtatacgtttcgtttttagtcgcgcgggttttcgggtttcggtcggcgtttttcgaatttcggttcggcgggagttttttttttatcggcgtgtggagtgggggcggggcggcggcgaggttaaggtgatatttaggagcgggtagggatagggttgtcgttgcggcggatttcggggggtttcggttcgttttttcggggttatcgggaggagagggtagggaggggagttcggtggagtttcgggtttcggattagcggaatggagaggtgggggtcgggagagtagcggggtcgcgttagttttgtagtttgagttttaaatgagtttatttttttaaattggcgtcgttttttattaaatttgttttttcggtaatgttattt

SEQ ID NO: 8698 - DNA, 584 bp, Artificial Sequence
  chemically treated genomic DNA (Homo sapiens) CpG-island No: 8698
aaataacattaccgaaaaaacaaatttaataaaaaacgacgccaatttaaaaaaataaactcatttaaaactcaaactacaaaactaacgcgaccccgctactctcccgacccccacctctccattccgctaatccgaaacccgaaactccaccgaactcccctccctaccctctcctcccgataaccccgaaaaaacgaaccgaaaccccccgaaatccgccgcaacgacaaccctatccctacccgctcctaaatatcaccttaacctcgccgccgccccgcccccactccacacgccgataaaaaaaaaactcccgccgaaccgaaattcgaaaaacgccgaccgaaacccgaaaacccgcgcgactaaaaacgaaacgtatactaaaaaaaattaaaaaatacgcgcgcgcgaatatatatatatatcgctctccgtctcctatctaaactccaacgcgctcgcgaaccccccgatcgcctctttcccgattctcaaccctaacccccaccgaattaaaacaaaacacctcgtaaaaaaatacttctaaccgaacgaaaaacgaaaaaacgaacgacgaa

SEQ ID NO: 8699 - DNA, 584 bp, Artificial Sequence
  chemically treated genomic DNA (Homo sapiens) CpG-island No: 8699
gggtggtattatcggaaaaataaatttaataaagagcggcgttaatttgaaaggatgagtttatttgaaatttaagttgtagggttggcgcggtttcgttgttttttcggtttttatttttttatttcgttaattcggggttcgaagttttatcgggtttttttttttgtttttttttttcggtggtttcgagaaaacgagtcgaagtttttcggagttcgtcgtagcgatagttttgtttttgttcgtttttgggtgttattttggtttcgtcgtcgtttcgtttttattttatacgtcggtggggaaggggttttcgtcgggtcggggttcggggggcgtcggtcggggttcgggggttcgcgcggttgggagcggagcgtgtgttggggagagttggggagtgcgcgcgcgcgagtgtgtgtgtgtgtcgtttttcgttttttgtttgggttttagcgcgttcgcgggtttttcggtcgtttttttttcggtttttaattttggtttttatcgagttgagatagggtatttcgtaaaaaggtgtttttggtcgagcgggaggcggggggacgggcggcgga

SEQ ID NO: 8700 - DNA, 584 bp, Artificial Sequence
  chemically treated genomic DNA (Homo sapiens) CpG-island No: 8700
tccgccgcccgtccccccgcctcccgctcgaccaaaaacacctttttacgaaataccctatctcaactcgataaaaaccaaaattaaaaaccgaaaaaaaaacgaccgaaaaacccgcgaacgcgctaaaacccaaacaaaaaacgaaaaacgacacacacacacactcgcgcgcgcgcactccccaactctccccaacacacgctccgctcccaaccgcgcgaacccccgaaccccgaccgacgccccccgaaccccgacccgacgaaaaccccttccccaccgacgtataaaataaaaacgaaacgacgacgaaaccaaaataacacccaaaaacgaacaaaaacaaaactatcgctacgacgaactccgaaaaacttcgactcgttttctcgaaaccaccgaaaaaaaaaaacaaaaaaaaaaacccgataaaacttcgaaccccgaattaacgaaataaaaaaataaaaaccgaaaaaacaacgaaaccgcgccaaccctacaacttaaatttcaaataaactcatcctttcaaattaacgccgctctttattaaatttatttttccgataataccaccc

SEQ ID NO: 8701 - DNA, 511 bp, Artificial Sequence
  chemically treated genomic DNA (Homo sapiens) CpG-island No: 8701
tagcgtagcggtttcgggttttttttttaagagttcgaaggcgtcgagggtttatttatgtttatttttacgtttgttatatcggggaagttattttcggggcgtttatagatagggcgttttgtcgggaattttaggtttaattagaattgtttttttagatggcgcgggtatcgtcggtttggtttggtttgggagcgttgcggtagggcggaggttttagggagtaaggtggttttcgtcgggtaggtttggaaaggaaggcgggatttggagagttcggttatagacggtttttcgtttgtttcgtcgttattcgaaaggagggagtttcgttcgtattttttgttcggtttattttagttcgagaggggttaaggattcgtcgggtttcggttggggcgttcgacgttcgggttacggttggtaaggttttttagcggttttagtttttatagcgtattttttgtttgggttatagacgacgttgtaaattgtagaatattttttg

SEQ ID NO: 8702 - DNA, 511 bp, Artificial Sequence
  chemically treated genomic DNA (Homo sapiens) CpG-island No: 8702
caaaaaatattctacaatttacaacgtcgtctataacccaaacaaaaaatacgctataaaaactaaaaccgctaaaaaaccttaccaaccgtaacccgaacgtcgaacgccccaaccgaaacccgacgaatccttaacccctctcgaactaaaataaaccgaacaaaaaatacgaacgaaactccctcctttcgaataacgacgaaacaaacgaaaaaccgtctataaccgaactctccaaatcccgccttcctttccaaacctacccgacgaaaaccaccttactccctaaaacctccgccctaccgcaacgctcccaaaccaaaccaaaccgacgatacccgcgccatctaaaaaaacaattctaattaaacctaaaattcccgacaaaacgccctatctataaacgccccgaaaataacttccccgatataacaaacgtaaaaataaacataaataaaccctcgacgccttcgaactcttaaaaaaaaaacccgaaaccgctacgcta

SEQ ID NO: 8703 - DNA, 511 bp, Artificial Sequence
  chemically treated genomic DNA (Homo sapiens) CpG-island No: 8703
taaagagtgttttgtaatttgtagcgtcgtttgtagtttaagtaggaggtgcgttgtggaaattgaggtcgttgggaggttttgttaatcgtgattcggacgtcggacgttttagtcgaggttcggcgagtttttagtttttttcgaattaaaatggatcgaatagaaaatgcggacggggtttttttttttcgggtagcggcggggtagacgggaggtcgtttgtgatcgagttttttaagtttcgtttttttttttaagtttgttcggcggagattattttattttttgagattttcgttttgtcgtagcgtttttaggttaggttaggtcggcggtgttcgcgttatttaaagggataattttggttgaatttgggattttcggtagggcgttttgtttgtgagcgtttcggaggtaattttttcggtgtggtaggcgtggaaatgggtatggatgaattttcggcgttttcgagtttttgaggaaagagttcgggatcgttgcgtta

SEQ ID NO: 8704 - DNA, 511 bp, Artificial Sequence
  chemically treated genomic DNA (Homo sapiens) CpG-island No: 8704
taacgcaacgatcccgaactctttcctcaaaaactcgaaaacgccgaaaattcatccatacccatttccacgcctaccacaccgaaaaaattacctccgaaacgctcacaaacaaaacgccctaccgaaaatcccaaattcaaccaaaattatccctttaaataacgcgaacaccgccgacctaacctaacctaaaaacgctacgacaaaacgaaaatctcaaaaaataaaataatctccgccgaacaaacttaaaaaaaaaaacgaaacttaaaaaactcgatcacaaacgacctcccgtctaccccgccgctacccgaaaaaaaaaaaccccgtccgcattttctattcgatccattttaattcgaaaaaaactaaaaactcgccgaacctcgactaaaacgtccgacgtccgaatcacgattaacaaaacctcccaacgacctcaatttccacaacgcacctcctacttaaactacaaacgacgctacaaattacaaaacactcttta

SEQ ID NO: 8705 - DNA, 506 bp, Artificial Sequence
  chemically treated genomic DNA (Homo sapiens) CpG-island No: 8705
tagcggtcgcgataggcgttatcgtggggtttcgggggtgtagacgtaggaggtcgcgggttttagcgttatcgtcgcgttttttacgtgtttatttttttcgggcgcgaatatttgcgacggtcgagaaatgataggcgattagggtggcgttttgcggcggtttaaagacgtttagttttatttcgcggttaagagggaaagtcgacggagtggtaaaggttggtgcgttcgttggatttgagcgggtatagtgacgtacgcggcgtatttttgtttttttgtagatttagggtaattgttagcgttttcgggaaaattattttaaatataaagcggtttttaagtcgaggggcgtttaaagtgttttttattttttgtattcgtttttttttaggtatttttttttttcgttagtgtttcgttcgcggtataaatgacgtttttcgtattcggttaatgattcgtgttttaatgaatcgaatgtataggtatgcgtatttatt

SEQ ID NO: 8706 - DNA, 506 bp, Artificial Sequence
  chemically treated genomic DNA (Homo sapiens) CpG-island No: 8706
aataaatacgcatacctatacattcgattcattaaaacacgaatcattaaccgaatacgaaaaacgtcatttataccgcgaacgaaacactaacgaaaaaaaaaaatacctaaaaaaaaacgaatacaaaaaataaaaaacactttaaacgcccctcgacttaaaaaccgctttatatttaaaataattttcccgaaaacgctaacaattaccctaaatctacaaaaaaacaaaaatacgccgcgtacgtcactatacccgctcaaatccaacgaacgcaccaacctttaccactccgtcgactttccctcttaaccgcgaaataaaactaaacgtctttaaaccgccgcaaaacgccaccctaatcgcctatcatttctcgaccgtcgcaaatattcgcgcccgaaaaaaataaacacgtaaaaaacgcgacgataacgctaaaacccgcgacctcctacgtctacacccccgaaaccccacgataacgcctatcgcgaccgcta

SEQ ID NO: 8707 - DNA, 506 bp, Artificial Sequence
  chemically treated genomic DNA (Homo sapiens) CpG-island No: 8707
agtgagtgcgtatatttgtatattcggtttattaaaatacgaattattaatcggatgcgaaaggcgttatttatgtcgcggacggggtattggcgggagggaaaagtgtttaaaaggaggcgggtgtagagggtggaggatattttgaacgtttttcggtttgggagtcgttttgtgtttagagtaattttttcgagggcgttaataattattttgaatttataagggggtaagggtgcgtcgcgtgcgttattgtgttcgtttaagtttagcgggcgtattaatttttgttatttcgtcggtttttttttttggtcgcggggtagggttgggcgtttttgggtcgtcgtagggcgttattttaatcgtttgttatttttcggtcgtcgtaggtgttcgcgttcgagagggatgagtacgtgaagagcgcggcggtggcgttggggttcgcggttttttacgtttgtattttcgaggttttacggtaacgtttgtcgcggtcgttg

SEQ ID NO: 8708 - DNA, 506 bp, Artificial Sequence
  chemically treated genomic DNA (Homo sapiens) CpG-island No: 8708
caacgaccgcgacaaacgttaccgtaaaacctcgaaaatacaaacgtaaaaaaccgcgaaccccaacgccaccgccgcgctcttcacgtactcatccctctcgaacgcgaacacctacgacgaccgaaaaataacaaacgattaaaataacgccctacgacgacccaaaaacgcccaaccctaccccgcgaccaaaaaaaaaaaccgacgaaataacaaaaattaatacgcccgctaaacttaaacgaacacaataacgcacgcgacgcacccttacccccttataaattcaaaataattattaacgccctcgaaaaaattactctaaacacaaaacgactcccaaaccgaaaaacgttcaaaatatcctccaccctctacacccgcctccttttaaacacttttccctcccgccaataccccgtccgcgacataaataacgcctttcgcatccgattaataattcgtattttaataaaccgaatatacaaatatacgcactcact

SEQ ID NO: 8709 - DNA, 1103 bp, Artificial Sequence
  chemically treated genomic DNA (Homo sapiens) CpG-island No: 8709
ttttacgtttgcgcggaataaaattttcgtttttcgttcggtttcgtagttttgtcgcgtatagggtaggtgggaaggcgttattggcggggcgggcgcggggtttattttggtcggcgcggggttttttaggggttcgtaaggttttcgtagttcgtagtcgtcgtcgtcgtttggcgggttttttttaggttttcgtattaagttttcggttgttaagtttttaaatgcgggtcggttagttgggggtggttcgaggcggcgtcgggggcgggggttgtcgtcgtcgggagagtttgcgggatcgttcgcgttagaggaggtggcggaagggggtttagtgggttgtttatcgtttgggtcgttttttgcgttgggtgcgttgggttcggtttttttttgggcgttttcgtcgtcggggaagcggttggattttacgtttatttcgggttcgttcgcggtgtttacgtcgggcgaggcggaattgtagttggagttgttttcgtttagaaagttcgggtttacgtagtcgtcgtttttagcgtcgggtttcggttttcgagtaggtttcgcgtcgtacgtttttcgggcgttttcgtagagtttagcgatgttttcggtgtttttgattatcggtcggaaggtcgatacgtaggagtttttgcgtgcgggcggcgggggcggcgtacgtaacggggttaggggcggtggtagcgtttcgttcgtgtcgttttcgtttaggggttcgcgggatagagcgttcgggtagcgttttttcgcgtcgaggttattttttttggttggttcggtatcgtttaggggttttggggtatcgttgttagtagttgtcgttgtcgtcgtcgttgtcgtcgttacggttgtcgttacggttttggtttggttttgagtagcggggtaggacggtatcgggaggttgtttgttgttggttagaatatgggaaacgtcgggtatatagtggcggcggcggtcgttgtagttattgtcgttgcgtttttggttgtttcggagggttgatgtttttagaatatggcgtcgtcgttcgggttcgtttttgttttcgggggtaagtggttggttttcg

SEQ ID NO: 8710 - DNA, 1103 bp, Artificial Sequence
  chemically treated genomic DNA (Homo sapiens) CpG-island No: 8710
cgaaaaccaaccacttacccccgaaaacaaaaacgaacccgaacgacgacgccatattctaaaaacatcaaccctccgaaacaaccaaaaacgcaacgacaataactacaacgaccgccgccgccactatatacccgacgtttcccatattctaaccaacaacaaacaacctcccgataccgtcctaccccgctactcaaaaccaaaccaaaaccgtaacgacaaccgtaacgacgacaacgacgacgacaacgacaactactaacaacgataccccaaaacccctaaacgataccgaaccaaccaaaaaaaataacctcgacgcgaaaaaacgctacccgaacgctctatcccgcgaacccctaaacgaaaacgacacgaacgaaacgctaccaccgcccctaaccccgttacgtacgccgcccccgccgcccgcacgcaaaaactcctacgtatcgaccttccgaccgataatcaaaaacaccgaaaacatcgctaaactctacgaaaacgcccgaaaaacgtacgacgcgaaacctactcgaaaaccgaaacccgacgctaaaaacgacgactacgtaaacccgaactttctaaacgaaaacaactccaactacaattccgcctcgcccgacgtaaacaccgcgaacgaacccgaaataaacgtaaaatccaaccgcttccccgacgacgaaaacgcccaaaaaaaaaccgaacccaacgcacccaacgcaaaaaacgacccaaacgataaacaacccactaaacccccttccgccacctcctctaacgcgaacgatcccgcaaactctcccgacgacgacaacccccgcccccgacgccgcctcgaaccacccccaactaaccgacccgcatttaaaaacttaacaaccgaaaacttaatacgaaaacctaaaaaaaacccgccaaacgacgacgacgactacgaactacgaaaaccttacgaacccctaaaaaaccccgcgccgaccaaaataaaccccgcgcccgccccgccaataacgccttcccacctaccctatacgcgacaaaactacgaaaccgaacgaaaaacgaaaattttattccgcgcaaacgtaaaa

SEQ ID NO: 8711 - DNA, 1103 bp, Artificial Sequence
  chemically treated genomic DNA (Homo sapiens) CpG-island No: 8711
cgggagttagttatttgttttcgggggtaggggcgggttcgggcggcggcgttatgttttgggggtattaatttttcggggtagttaaggacgtagcggtagtggttgtagcggtcgtcgtcgttattgtgtattcgacgttttttatgttttggttagtagtaggtagtttttcggtatcgttttatttcgttgtttagagttaagttaaggtcgtggcggtagtcgtggcggcggtagcggcggcggtagcggtagttgttggtagcggtgttttagagtttttggacggtgtcgagttagttaaagagagtggtttcggcgcggaggagcgttgttcgagcgttttgtttcgcgggtttttggacgaagacggtacggacgaggcgttgttatcgtttttggtttcgttgcgtgcgtcgttttcgtcgttcgtacgtaaaggtttttacgtgtcggtttttcggtcggtggttaaggatatcgagagtatcgttaagttttacgggagcgttcgggaggcgtacggcgcggggtttgttcgggggtcgggattcggcgttgggagcggcggttacgtgagttcggattttttgagcgagggtagttttagttataatttcgtttcgttcgacgtggatatcgcggacgagttcgaggtggacgtggaatttaatcgttttttcgacgacgaggacgtttaagaggagatcgagtttagcgtatttagcgtagggggcggtttagacggtgaatagtttattggattttttttcgttattttttttggcgcggacggtttcgtaaattttttcgacggcggtagttttcgttttcggcgtcgtttcgggttatttttagttggtcggttcgtatttggggatttggtagtcgaagatttggtgcggagatttgagaggagttcgttaagcggcggcggcggttacgagttgcgagagttttgcgggtttttaggaggtttcgcgtcggttaaggtgagtttcgcgttcgtttcgttagtggcgtttttttatttattttgtgcgcggtagggttgcggggtcgggcggagaacgggaattttgtttcgcgtaggcgtggga

SEQ ID NO: 8712 - DNA, 1103 bp, Artificial Sequence
  chemically treated genomic DNA (Homo sapiens) CpG-island No: 8712
tcccacgcctacgcgaaacaaaattcccgttctccgcccgaccccgcaaccctaccgcgcacaaaataaataaaaaaacgccactaacgaaacgaacgcgaaactcaccttaaccgacgcgaaacctcctaaaaacccgcaaaactctcgcaactcgtaaccgccgccgccgcttaacgaactcctctcaaatctccgcaccaaatcttcgactaccaaatccccaaatacgaaccgaccaactaaaaataacccgaaacgacgccgaaaacgaaaactaccgccgtcgaaaaaatttacgaaaccgtccgcgccaaaaaaaataacgaaaaaaaatccaataaactattcaccgtctaaaccgccccctacgctaaatacgctaaactcgatctcctcttaaacgtcctcgtcgtcgaaaaaacgattaaattccacgtccacctcgaactcgtccgcgatatccacgtcgaacgaaacgaaattataactaaaactaccctcgctcaaaaaatccgaactcacgtaaccgccgctcccaacgccgaatcccgacccccgaacaaaccccgcgccgtacgcctcccgaacgctcccgtaaaacttaacgatactctcgatatccttaaccaccgaccgaaaaaccgacacgtaaaaacctttacgtacgaacgacgaaaacgacgcacgcaacgaaaccaaaaacgataacaacgcctcgtccgtaccgtcttcgtccaaaaacccgcgaaacaaaacgctcgaacaacgctcctccgcgccgaaaccactctctttaactaactcgacaccgtccaaaaactctaaaacaccgctaccaacaactaccgctaccgccgccgctaccgccgccacgactaccgccacgaccttaacttaactctaaacaacgaaataaaacgataccgaaaaactacctactactaaccaaaacataaaaaacgtcgaatacacaataacgacgacgaccgctacaaccactaccgctacgtccttaactaccccgaaaaattaatacccccaaaacataacgccgccgcccgaacccgcccctacccccgaaaacaaataactaactcccg

SEQ ID NO: 8713 - DNA, 1002 bp, Artificial Sequence
  chemically treated genomic DNA (Homo sapiens) CpG-island No: 8713
cgtcgttatcgtcgttagtattattttttttttgtttattcgattcgttattggtatcgttttcgtcgtttttttgtaaggagaaggttcgtttgcgcgtgtcgttattaaatatggttttgacgtttttttaagtatggtttagttcgtttgtggtcgatttgttattgagtttgaggtgattacgttaggagttgaagttggcggtatcgggttgcgtgtatttggcgtcgggagttcggtgcgagtggaagatgaatttgttgggcgagaagatatgttgtagtagtcgtatttgatgtatttggtacgagagttgttgtaacgcgtagggatgaagttattacgcgagttttacgcgtattcgtgtattatatcgaaggcgaagttttcgggtagtttgggtggtttgtgttcgtttaggaacgatttgtataggcgttcggtttttcgtttagtgattatgtcgtagcggcgcgacgagatgggtatggtttcggttcgacgtagaatttttagttgtatcggcgtgtattgtacgtacgtgatgtttagggttacgcggcggttgtggattttattatagttgtagtttttgaggagggtgttggagatttgcgttaggtataggcgtttttggtcgtcgatgattagcgatataatgggtatttcgtatagcgacgtttcgtttatttggttgggtttgagagcgttggagttcgagtacggttgtagtttttgtttggagttgggcgaggaattgttttcgcgtttcggttttagttgagtggtgagagtttttatgtcgtcgtttttgcgaaatagagaaagtagagagtagatgagttatttttagcgtcgtcgtcgaggttcgggttcgtttagtagggcgtttcgagttgggcgcgcgggggatatttggtagtggggagtttaaatttatttattttttggataggcgttttttgttatttagatttatgttggcgtcgttaataatag

SEQ ID NO: 8714 - DNA, 1002 bp, Artificial Sequence
  chemically treated genomic DNA (Homo sapiens) CpG-island No: 8714
ctattattaacgacgccaacataaatctaaataacaaaaaacgcctatccaaaaaataaataaatttaaactccccactaccaaatatcccccgcgcgcccaactcgaaacgccctactaaacgaacccgaacctcgacgacgacgctaaaaataactcatctactctctactttctctatttcgcaaaaacgacgacataaaaactctcaccactcaactaaaaccgaaacgcgaaaacaattcctcgcccaactccaaacaaaaactacaaccgtactcgaactccaacgctctcaaacccaaccaaataaacgaaacgtcgctatacgaaatacccattatatcgctaatcatcgacgaccaaaaacgcctatacctaacgcaaatctccaacaccctcctcaaaaactacaactataataaaatccacaaccgccgcgtaaccctaaacatcacgtacgtacaatacacgccgatacaactaaaaattctacgtcgaaccgaaaccatacccatctcgtcgcgccgctacgacataatcactaaacgaaaaaccgaacgcctatacaaatcgttcctaaacgaacacaaaccacccaaactacccgaaaacttcgccttcgatataatacacgaatacgcgtaaaactcgcgtaataacttcatccctacgcgttacaacaactctcgtaccaaatacatcaaatacgactactacaacatatcttctcgcccaacaaattcatcttccactcgcaccgaactcccgacgccaaatacacgcaacccgataccgccaacttcaactcctaacgtaatcacctcaaactcaataacaaatcgaccacaaacgaactaaaccatacttaaaaaaacgtcaaaaccatatttaataacgacacgcgcaaacgaaccttctccttacaaaaaaacgacgaaaacgataccaataacgaatcgaataaacaaaaaaaaaataatactaacgacgataacgacg

SEQ ID NO: 8715 - DNA, 1002 bp, Artificial Sequence
  chemically treated genomic DNA (Homo sapiens) CpG-island No: 8715
ttgttgttaacggcgttaatatgggtttgagtaataaaagacgtttgtttagggggtgaatgagtttggattttttattgttaagtatttttcgcgcgtttaattcggagcgttttgttgggcgggttcgagtttcggcggcggcgttgaaaatggtttatttgttttttgttttttttatttcgtaggagcggcggtatggaggtttttattatttagttggggtcggggcgcgagggtagtttttcgtttaattttaagtaggagttgtagtcgtattcgggttttagcgtttttaaatttaattaggtgggcgagacgtcgttgtacggggtgtttattgtgtcgttggttatcgacggttaggagcgtttatgtttggcgtagatttttaatattttttttaagaattatagttataatgagatttataatcgtcgcgtggttttgggtattacgtgcgtgtagtgtacgtcggtatagttggagattttgcgtcgggtcggggttatgtttatttcgtcgcgtcgttgcggtatgattattaagcgagaggtcgaacgtttgtgtaagtcgtttttgggcgagtataaattatttaagttgttcgagaatttcgttttcgatgtggtgtacgagtgcgcgtggggttcgcgtggtagttttatttttgcgcgttataatagttttcgtgttaagtgtattaagtgcggttattgtagtatgttttttcgtttaataagtttattttttattcgtatcgaattttcgacgttaagtatacgtagttcgatgtcgttaattttaatttttggcgtggttattttaaatttagtgataagtcggttatagacgaattgagttatgtttgggaggacgttaaggttatgtttaatggcggtacgcgtaagcggattttttttttataaggaggcggcggaggcggtgttaatggcgggtcgggtgggtaggggaagggtggtgttggcggcggtggcggcg

SEQ ID NO: 8716 - DNA, 1002 bp, Artificial Sequence
  chemically treated genomic DNA (Homo sapiens) CpG-island No: 8716
cgccgccaccgccgccaacaccacccttcccctacccacccgacccgccattaacaccgcctccgccgcctccttataaaaaaaaaatccgcttacgcgtaccgccattaaacataaccttaacgtcctcccaaacataactcaattcgtctataaccgacttatcactaaatttaaaataaccacgccaaaaattaaaattaacgacatcgaactacgtatacttaacgtcgaaaattcgatacgaataaaaaataaacttattaaacgaaaaaacatactacaataaccgcacttaatacacttaacacgaaaactattataacgcgcaaaaataaaactaccacgcgaaccccacgcgcactcgtacaccacatcgaaaacgaaattctcgaacaacttaaataatttatactcgcccaaaaacgacttacacaaacgttcgacctctcgcttaataatcataccgcaacgacgcgacgaaataaacataaccccgacccgacgcaaaatctccaactataccgacgtacactacacgcacgtaatacccaaaaccacgcgacgattataaatctcattataactataattcttaaaaaaaatattaaaaatctacgccaaacataaacgctcctaaccgtcgataaccaacgacacaataaacaccccgtacaacgacgtctcgcccacctaattaaatttaaaaacgctaaaacccgaatacgactacaactcctacttaaaattaaacgaaaaactaccctcgcgccccgaccccaactaaataataaaaacctccataccgccgctcctacgaaataaaaaaaacaaaaaacaaataaaccattttcaacgccgccgccgaaactcgaacccgcccaacaaaacgctccgaattaaacgcgcgaaaaatacttaacaataaaaaatccaaactcattcaccccctaaacaaacgtcttttattactcaaacccatattaacgccgttaacaacaa

SEQ ID NO: 8717 - DNA, 545 bp, Artificial Sequence
  chemically treated genomic DNA (Homo sapiens) CpG-island No: 8717
  unsure (457, 488, 532)
tatcggacgtgggtatttatagtgcggcggcggttggagtcgggcgagcggtgagcggaggtgcgcggcgggaggagcggcgggcgggagttcgggattcgtcgggtttttcgggtgacggcgcggttttttttcgcgcgcgcgtatagtcgtgttttttggtttttcgcgtttttattcgcggtttttttcgtttttagcgggtacggggcgtcgggatttcgggcgcggagatgcgaattttgagtcgttgatttcgaggtcggggattggttcgaagaagaggtcgaagtttggagcgtatggggtcggcggcggggatcgcgcggttattattttagtggcggggtaggcgcgtttgatagttgagagtcggggcgttatatttatcggtcgcgtagtcggtagcgtttttttcgggttcgttcgttcgcgggttacgcgcggggttcggcgntttttcgtaggttaagggttgtacgttttanggtaagcgggcgtatatttgcgtgtagtattttgcgtttgcgtntcgttttagttgg

SEQ ID NO: 8718 - DNA, 545 bp, Artificial Sequence
  chemically treated genomic DNA (Homo sapiens) CpG-island No: 8718
  unsure (14, 58, 89)
ccaactaaaacganacgcaaacgcaaaatactacacgcaaatatacgcccgcttaccntaaaacgtacaacccttaacctacgaaaaancgccgaaccccgcgcgtaacccgcgaacgaacgaacccgaaaaaaacgctaccgactacgcgaccgataaatataacgccccgactctcaactatcaaacgcgcctaccccgccactaaaataataaccgcgcgatccccgccgccgaccccatacgctccaaacttcgacctcttcttcgaaccaatccccgacctcgaaatcaacgactcaaaattcgcatctccgcgcccgaaatcccgacgccccgtacccgctaaaaacgaaaaaaaccgcgaataaaaacgcgaaaaaccaaaaaacacgactatacgcgcgcgcgaaaaaaaaccgcgccgtcacccgaaaaacccgacgaatcccgaactcccgcccgccgctcctcccgccgcgcacctccgctcaccgctcgcccgactccaaccgccgccgcactataaatacccacgtccgata

SEQ ID NO: 8719 - DNA, 545 bp, Artificial Sequence
  chemically treated genomic DNA (Homo sapiens) CpG-island No: 8719
  unsure (14, 58, 89)
ttagttagagcggnacgtaggcgtagggtgttgtacgtaggtgtgcgttcgtttattntggggcgtgtagtttttggtttgcgggaagncgtcgggtttcgcgcgtggttcgcgggcgggcggattcggggagggcgttatcgattgcgcggtcggtgggtgtggcgtttcggtttttagttgttaggcgcgtttgtttcgttattggggtggtgatcgcgcggttttcgtcgtcggttttatgcgttttaggtttcggtttttttttcgggttagttttcgatttcggggttaacggtttagggttcgtattttcgcgttcggggtttcggcgtttcgtgttcgttgagagcgggaggggtcgcgggtgggagcgcggagaattagggagtacggttgtgcgcgcgcgcggggaggggtcgcgtcgttattcggagagttcggcggatttcggattttcgttcgtcgtttttttcgtcgcgtattttcgtttatcgttcgttcggttttagtcgtcgtcgtattgtgagtatttacgttcggta

SEQ ID NO: 8720 - DNA, 545 bp, Artificial Sequence
  chemically treated genomic DNA (Homo sapiens) CpG-island No: 8720
  unsure (457, 488, 532)
taccgaacgtaaatactcacaatacgacgacgactaaaaccgaacgaacgataaacgaaaatacgcgacgaaaaaaacgacgaacgaaaatccgaaatccgccgaactctccgaataacgacgcgacccctccccgcgcgcgcgcacaaccgtactccctaattctccgcgctcccacccgcgacccctcccgctctcaacgaacacgaaacgccgaaaccccgaacgcgaaaatacgaaccctaaaccgttaaccccgaaatcgaaaactaacccgaaaaaaaaaccgaaacctaaaacgcataaaaccgacgacgaaaaccgcgcgatcaccaccccaataacgaaacaaacgcgcctaacaactaaaaaccgaaacgccacacccaccgaccgcgcaatcgataacgccctccccgaatccgcccgcccgcgaaccacgcgcgaaacccgacgncttcccgcaaaccaaaaactacacgccccanaataaacgaacgcacacctacgtacaacaccctacgcctacgtnccgctctaactaa

SEQ ID NO: 8721 - DNA, 718 bp, Artificial Sequence
  chemically treated genomic DNA (Homo sapiens) CpG-island No: 8721
  unsure (41, 99, 141, 151, 252, 262, 273, 428, 610, 634, 654, 661)
  unsure (686)
agacgtcgtagggaacggtttggttattgtttcgggggcgncgaaagttagggagagcgggagagcgggagagcgggagagcgggagagcgggagtttngggttgagggggttggacgcggggagcgggtttcgaggttgnaggaaaaggntcgtttcgggattttgaggggcggggaacgggatttcgcggggtagcgacgttcgggtaggtcgcggcgggttcggttttcgttaggcggtagttcggggntttcgggttnggaggtcgggntttaagcgataattcggtttcgcgagggggagggggcgtttatttatacgtgttgataggtcgtggttcgtacgggcgttttgagtattttttgatagacggggtagtagaaattattttcggtgtaggacgtggtcgtagagaggttttcggtntatggcgggggatggggaaataaggcgatggcgatagcggtagcggtcgaggtgacggtggcggttcggggttcgattttttatatgaattcggaggggggagggggatcgtattaggatatagcgcgcgttaggaagggggcggggttttgggtagggcggggtcgaacgtagagacgttnattgtcgtacgcgtcgggtaaganggcgattttttttacggttnttttttnatagggggttggatgggggacggtngtttggcgggaggttgggttcgtagtatgtcg

SEQ ID NO: 8722 - DNA, 718 bp, Artificial Sequence
  chemically treated genomic DNA (Homo sapiens) CpG-island No: 8722
  unsure (33, 58, 65, 85, 109, 291, 446, 457, 467, 568, 578, 620, 678)
cgacatactacgaacccaacctcccgccaaacnaccgtcccccatccaaccccctatnaaaaaanaaccgtaaaaaaaatcgccntcttacccgacgcgtacgacaatnaacgtctctacgttcgaccccgccctacccaaaaccccgcccccttcctaacgcgcgctatatcctaatacgatccccctcccccctccgaattcatataaaaaatcgaaccccgaaccgccaccgtcacctcgaccgctaccgctatcgccatcgccttatttccccatcccccgccatanaccgaaaacctctctacgaccacgtcctacaccgaaaataatttctactaccccgtctatcaaaaaatactcaaaacgcccgtacgaaccacgacctatcaacacgtataaataaacgccccctccccctcgcgaaaccgaattatcgcttaaancccgacctccnaacccgaaanccccgaactaccgcctaacgaaaaccgaacccgccgcgacctacccgaacgtcgctaccccgcgaaatcccgttccccgcccctcaaaatcccgaaacganccttttcctncaacctcgaaacccgctccccgcgtccaaccccctcaacccnaaactcccgctctcccgctctcccgctctcccgctctcccgctctccctaactttcgncgcccccgaaacaataaccaaaccgttccctacgacgtct

SEQ ID NO: 8723 - DNA, 718 bp, Artificial Sequence
  chemically treated genomic DNA (Homo sapiens) CpG-island No: 8723
  unsure (33, 58, 65, 85, 109, 291, 446, 457, 467, 568, 578, 620, 678)
cggtatgttgcgagtttagtttttcgttaagtnatcgttttttatttagttttttgtngggaggnagtcgtgggaggggtcgttnttttgttcggcgcgtgcggtagtnagcgtttttgcgttcggtttcgttttatttagggtttcgttttttttttggcgcgcgttgtattttgatgcgatttttttttttttttcgggtttatgtagggagtcgggtttcgggtcgttatcgttatttcggtcgttgtcgttgtcgttatcgttttgtttttttatttttcgttatgngtcgaggatttttttgcggttacgttttatatcgaagatgatttttattgtttcgtttgttaggaggtgtttaaaacgttcgtgcggattacggtttgttagtacgtgtgagtagacgttttttttttttcgcggagtcgggttgtcgtttaggnttcggtttttnggttcgggantttcgggttgtcgtttggcgggaatcgagttcgtcgcggtttgttcgagcgtcgttgtttcgcgaggtttcgtttttcgttttttagagtttcggggcggntttttttttntagtttcggggttcgtttttcgcgtttagtttttttagtttnaagttttcgttttttcgttttttcgttttttcgttttttcgttttttttggttttcgncgttttcggggtagtggttaggtcgttttttgcggcgttt

SEQ ID NO: 8724 - DNA, 718 bp, Artificial Sequence
  chemically treated genomic DNA (Homo sapiens) CpG-island No: 8724
  unsure (41, 99, 141, 151, 252, 262, 273, 428, 610, 634, 654, 661)
  unsure (686)
aaacgccgcaaaaaacgacctaaccactaccccgaaaacgncgaaaaccaaaaaaaacgaaaaaacgaaaaaacgaaaaaacgaaaaaacgaaaacttnaaactaaaaaaactaaacgcgaaaaacgaaccccgaaactanaaaaaaaaanccgccccgaaactctaaaaaacgaaaaacgaaacctcgcgaaacaacgacgctcgaacaaaccgcgacgaactcgattcccgccaaacgacaacccgaaantcccgaaccnaaaaaccgaancctaaacgacaacccgactccgcgaaaaaaaaaaaacgtctactcacacgtactaacaaaccgtaatccgcacgaacgttttaaacacctcctaacaaacgaaacaataaaaatcatcttcgatataaaacgtaaccgcaaaaaaatcctcgacncataacgaaaaataaaaaaacaaaacgataacgacaacgacaacgaccgaaataacgataacgacccgaaacccgactccctacataaacccgaaaaaaaaaaaaaaatcgcatcaaaatacaacgcgcgccaaaaaaaaaacgaaaccctaaataaaacgaaaccgaacgcaaaaacgctnactaccgcacgcgccgaacaaaanaacgacccctcccacgactncctcccnacaaaaaactaaataaaaaacgatnacttaacgaaaaactaaactcgcaacataccg

SEQ ID NO: 8725 - DNA, 754 bp, Artificial Sequence
  chemically treated genomic DNA (Homo sapiens) CpG-island No: 8725
  unsure (82, 186, 364, 385, 392, 598, 605, 658)
ttttaggacgcggttttacgttttaggttacgtttttatcgggttttaggcgcgggttcgcgtttcgtttttagttttcgtntttcgtttaaggtttttttttttattgttttttcgtttttatttatttcgatttcgagtttcgagtgtttagttcgtgttcgcggtttttttttcgtttcgttntttcggtatttcggtttttttacgttttcgtcggggagatttttatttaggagtttcgaagcggcgttgtggacggagttgttttttttttacgtgttcgtagagattcggtttagcgtttttttcgagttttttgttcggtcgtcgttattttcgtagtcgaggtttcggggtaaantggagggcggcgtgcgttgtngtttatncggtttttaacggggtcggagtcgaggtttatggtgtagggagattcgttcgtcgtcgttagtagttttgttttggtattgcgttgtttatagtttattcggtcgttatcgaacgcgggagcgtcggggatttgggcggaggagttaggagaggcggggaggtacggggtgtgaagtgcggtttgtatagtaatcggcgtacggtngtttttncgcgggttgtgacgtaagtagttgggcgttcgcggtgatatttgcgttttttncgtttcgtttcgttaggttcgggattttagttattttttttgttaaatatattgggttttttaggaagttttcgttaatgtttaagatttagtttt

SEQ ID NO: 8726 - DNA, 754 bp, Artificial Sequence
  chemically treated genomic DNA (Homo sapiens) CpG-island No: 8726
  unsure (97, 150, 157, 363, 370, 391, 569, 673)
aaaactaaatcttaaacattaacgaaaacttcctaaaaaacccaatatatttaacaaaaaaaataactaaaatcccgaacctaacgaaacgaaacgnaaaaaacgcaaatatcaccgcgaacgcccaactacttacgtcacaacccgcgnaaaaacnaccgtacgccgattactatacaaaccgcacttcacaccccgtacctccccgcctctcctaactcctccgcccaaatccccgacgctcccgcgttcgataacgaccgaataaactataaacaacgcaataccaaaacaaaactactaacgacgacgaacgaatctccctacaccataaacctcgactccgaccccgttaaaaaccgnataaacnacaacgcacgccgccctccantttaccccgaaacctcgactacgaaaataacgacgaccgaacaaaaaactcgaaaaaaacgctaaaccgaatctctacgaacacgtaaaaaaaaaacaactccgtccacaacgccgcttcgaaactcctaaataaaaatctccccgacgaaaacgtaaaaaaaccgaaataccgaaanaacgaaacgaaaaaaaaaccgcgaacacgaactaaacactcgaaactcgaaatcgaaataaataaaaacgaaaaaacaataaaaaaaaaaaccttaaacgaaanacgaaaactaaaaacgaaacgcgaacccgcgcctaaaacccgataaaaacgtaacctaaaacgtaaaaccgcgtcctaaaa

SEQ ID NO: 8727 - DNA, 754 bp, Artificial Sequence
  chemically treated genomic DNA (Homo sapiens) CpG-island No: 8727
  unsure (97, 150, 157, 363, 370, 391, 569, 673)
aagattaaattttgaatattgacgaaaattttttgaaaggtttaatgtatttgataggagaggtaattggggtttcgggtttagcgaggcggggcgngggaggcgtaggtgttatcgcgggcgtttagttgtttacgttataattcgcgngaaggtngtcgtgcgtcggttgttatataggtcgtattttatatttcgtgttttttcgttttttttggttttttcgtttagattttcggcgttttcgcgttcggtgacggtcgggtaggttgtaggtagcgtaatgttaagatagagttgttggcggcggcgggcgaatttttttgtattatgagtttcggtttcggtttcgttaggggtcgnataagtnatagcgtacgtcgttttttantttgtttcggggtttcggttgcgaagatagcggcggtcggataggaagttcgaggaaagcgttgggtcgggtttttacgaatacgtgaaggaaaagtagtttcgtttataacgtcgtttcggggtttttaggtgagagttttttcggcggaagcgtggaggggtcggggtgtcggganagcggggcggggaggaagtcgcggatacgggttgggtattcggggttcggggtcggggtgagtagaggcggaaaagtagtgaaaagggaggttttgggcgaagnacgggggttgagggcggggcgcgagttcgcgtttggagttcggtgagggcgtggtttagagcgtgaggtcgcgttttgggg

SEQ ID NO: 8728 - DNA, 754 bp, Artificial Sequence
  chemically treated genomic DNA (Homo sapiens) CpG-island No: 8728
  unsure (82, 186, 364, 385, 392, 598, 605, 658)
ccccaaaacgcgacctcacgctctaaaccacgccctcaccgaactccaaacgcgaactcgcgccccgccctcaacccccgtncttcgcccaaaacctcccttttcactacttttccgcctctactcaccccgaccccgaaccccgaatacccaacccgtatccgcgacttcctccccgccccgctntcccgacaccccgacccctccacgcttccgccgaaaaaactctcacctaaaaaccccgaaacgacgttataaacgaaactacttttccttcacgtattcgtaaaaacccgacccaacgctttcctcgaacttcctatccgaccgccgctatcttcgcaaccgaaaccccgaaacaaantaaaaaacgacgtacgctatnacttatncgacccctaacgaaaccgaaaccgaaactcataatacaaaaaaattcgcccgccgccgccaacaactctatcttaacattacgctacctacaacctacccgaccgtcaccgaacgcgaaaacgccgaaaatctaaacgaaaaaaccaaaaaaaacgaaaaaacacgaaatataaaatacgacctatataacaaccgacgcacgacnaccttcncgcgaattataacgtaaacaactaaacgcccgcgataacacctacgcctcccncgccccgcctcgctaaacccgaaaccccaattacctctcctatcaaatacattaaacctttcaaaaaattttcgtcaatattcaaaatttaatctt

SEQ ID NO: 8729 - DNA, 992 bp, Artificial Sequence
  chemically treated genomic DNA (Homo sapiens) CpG-island No: 8729
agggtcgtcgacgttagttatggttcgggtagagtttcgtaaggtgttatagtatcggggttagcgtttttcggaaaagtatgtttcgttggcggtcgttaggttttttcgcggagtttcggaaaggaaaattcgtttttacgggggttttacgacgttttcgggttttaggtttcgggacgttggtagaggcgtagtagatttttttttttagttcgtacggttttagcggttcggtcgcgttttagttcgggttgttcgtttttcgtttttcggcggcgtcggaaagttttcggggttggcggcggttaagagtagagttagggtagtcgtagtcgttttttagttcgtcgtttatcgtcgtaggggtaggtttgagcgggggtttttattaagtcgtcgatatttttcgggaatttttttattgggttatatataaatttcgtttttttttttaaattttcgttgtcggttttatcgatgcgaaagtcgcggtggagtttagattatttttttcggcgtcgggtttagttcgttttcgtttttttttttttcgcggaattttttttcgtcgttcgaagaaattcgaaggttttcggtaagtttcgtttttagcgcgggggcggggtcgttcgagttgtttcgggtttagttcggttgttttcgtgcgcggtcgttgcgtattcggtattgggcggcgttggttggttttttggttgcggttttttagtcggcggcggttgttgttgtttgtggttcgggcggttgggagaagcggagtgttggtgagtgacgcggcggaggtgtagtttgacgcggtgtgttacgtgggggagagaataaaattttagcgagattcgggtcgtgaacgaaagtagtgacggaggagtttgtattatcggtaagaggagtaggaggaggaggtaggagttagagagagtcggggggacggagggggacggggaggttcggatattcgcgtttggggtttt

SEQ ID NO: 8730 - DNA, 992 bp, Artificial Sequence
  chemically treated genomic DNA (Homo sapiens) CpG-island No: 8730
aaaaccccaaacgcgaatatccgaacctccccgtccccctccgtccccccgactctctctaactcctacctcctcctcctactcctcttaccgataatacaaactcctccgtcactactttcgttcacgacccgaatctcgctaaaattttattctctcccccacgtaacacaccgcgtcaaactacacctccgccgcgtcactcaccaacactccgcttctcccaaccgcccgaaccacaaacaacaacaaccgccgccgactaaaaaaccgcaaccaaaaaaccaaccaacgccgcccaataccgaatacgcaacgaccgcgcacgaaaacaaccgaactaaacccgaaacaactcgaacgaccccgcccccgcgctaaaaacgaaacttaccgaaaaccttcgaatttcttcgaacgacgaaaaaaaattccgcgaaaaaaaaaaaaacgaaaacgaactaaacccgacgccgaaaaaaataatctaaactccaccgcgactttcgcatcgataaaaccgacaacgaaaatttaaaaaaaaaaacgaaatttatatataacccaataaaaaaattcccgaaaaatatcgacgacttaataaaaacccccgctcaaacctacccctacgacgataaacgacgaactaaaaaacgactacgactaccctaactctactcttaaccgccgccaaccccgaaaactttccgacgccgccgaaaaacgaaaaacgaacaacccgaactaaaacgcgaccgaaccgctaaaaccgtacgaactaaaaaaaaaaatctactacgcctctaccaacgtcccgaaacctaaaacccgaaaacgtcgtaaaacccccgtaaaaacgaattttcctttccgaaactccgcgaaaaaacctaacgaccgccaacgaaacatacttttccgaaaaacgctaaccccgatactataacaccttacgaaactctacccgaaccataactaacgtcgacgaccct

SEQ ID NO: 8731 - DNA, 992 bp, Artificial Sequence
  chemically treated genomic DNA (Homo sapiens) CpG-island No: 8731
aaggttttaagcgcgggtgttcgggttttttcgttttttttcgttttttcggttttttttggtttttgttttttttttttgttttttttatcggtggtataagttttttcgttattgttttcgtttacggttcggatttcgttggagttttatttttttttttacgtaatatatcgcgttaaattatattttcgtcgcgttatttattaatatttcgttttttttagtcgttcgggttataggtagtagtagtcgtcgtcgattgaggagtcgtagttagggagttagttagcgtcgtttagtgtcgagtgcgtagcggtcgcgtacggaaatagtcgagttaggttcggagtagttcgagcggtttcgttttcgcgttggggacggaatttgtcgaagattttcgggttttttcgggcgacgagaaggggtttcgcggggagagggaaggcgaaggcgggttgagttcggcgtcgggaggagtggtttaaattttatcgcggttttcgtatcggtaaagtcggtagcggaaatttgaaggaggaagcggggtttgtgtgtggtttagtgggggaattttcgaggggtgtcggcgatttggtggaaattttcgtttaggtttgtttttgcggcggtgagcggcgggttagaaggcggttgcggttgttttggttttgtttttgatcgtcgttagtttcgggaatttttcgacgtcgtcgggagacgggggacgggtagttcgggttgggacgcggtcggatcgttggagtcgtgcgggttggggaagaaggtttgttgcgtttttgttaacgtttcggggtttgggattcgggggcgtcgtgggattttcgtggggacgggttttttttttcgagatttcgcggagaaatttggcggtcgttagcggagtatgttttttcggggggcgttggtttcgatattgtggtattttgcggggttttgttcggattatggttgacgtcgacggtttt

SEQ ID NO: 8732 - DNA, 992 bp, Artificial Sequence
  chemically treated genomic DNA (Homo sapiens) CpG-island No: 8732
aaaaccgtcgacgtcaaccataatccgaacaaaaccccgcaaaataccacaatatcgaaaccaacgccccccgaaaaaacatactccgctaacgaccgccaaatttctccgcgaaatctcgaaaaaaaaaacccgtccccacgaaaatcccacgacgcccccgaatcccaaaccccgaaacgttaacaaaaacgcaacaaaccttcttccccaacccgcacgactccaacgatccgaccgcgtcccaacccgaactacccgtcccccgtctcccgacgacgtcgaaaaattcccgaaactaacgacgatcaaaaacaaaaccaaaacaaccgcaaccgccttctaacccgccgctcaccgccgcaaaaacaaacctaaacgaaaatttccaccaaatcgccgacacccctcgaaaattcccccactaaaccacacacaaaccccgcttcctccttcaaatttccgctaccgactttaccgatacgaaaaccgcgataaaatttaaaccactcctcccgacgccgaactcaacccgccttcgccttccctctccccgcgaaaccccttctcgtcgcccgaaaaaacccgaaaatcttcgacaaattccgtccccaacgcgaaaacgaaaccgctcgaactactccgaacctaactcgactatttccgtacgcgaccgctacgcactcgacactaaacgacgctaactaactccctaactacgactcctcaatcgacgacgactactactacctataacccgaacgactaaaaaaaacgaaatattaataaataacgcgacgaaaatataatttaacgcgatatattacgtaaaaaaaaaaataaaactccaacgaaatccgaaccgtaaacgaaaacaataacgaaaaaacttataccaccgataaaaaaaacaaaaaaaaaaaacaaaaaccaaaaaaaaccgaaaaaacgaaaaaaaacgaaaaaacccgaacacccgcgcttaaaacctt

SEQ ID NO: 8733 - DNA, 651 bp, Artificial Sequence
  chemically treated genomic DNA (Homo sapiens) CpG-island No: 8733
tcgacgcggtcgatttattagatagcgagtgggcgtgagaacgtagtttttcggtcgtttttttagtacgtggatttcggagcgcgggttttcgttttatcgtttcggggagtggcgcgcgcgtaggtcgagttttcgggcgagttcgcgcggggttgtattttatcgggtcggcgttgggggtcgcgcggggtttttggttcgttagggattcggtggcggtggttgggttttattcgttagcggcgggaaggacgcgcgggaaagcgagggagtaggaagcgggtggcggcggcggtcggggttcgttggaaaggagggagcgtcgtaggcgggaggagggagcgcggaggagggaggtcgggaggaaggagggagcgcggtaggtaggcggagggagggttgattagtatgtagtagcgttcgcgttcggttttattgttttaatattttttttttttttcgcgttaatttgttatcgtttagtaggcgaacgttgttgttttaaatgttgttttttttaaatgagacggataattagttgtttcgtacgaatgtcgtattttttttatttttgattgttattatttttttgtttttggtagttttgatatttcgtaattagtttgttgtttttttttttttttttcg

SEQ ID NO: 8734 - DNA, 651 bp, Artificial Sequence
  chemically treated genomic DNA (Homo sapiens) CpG-island No: 8734
cgaaaaaaaaaaaaaaaaacaacaaactaattacgaaatatcaaaactaccaaaaacaaaaaaataataacaatcaaaaataaaaaaaatacgacattcgtacgaaacaactaattatccgtctcatttaaaaaaaacaacatttaaaacaacaacgttcgcctactaaacgataacaaattaacgcgaaaaaaaaaaaaaatattaaaacaataaaaccgaacgcgaacgctactacatactaatcaaccctccctccgcctacctaccgcgctccctccttcctcccgacctccctcctccgcgctccctcctcccgcctacgacgctccctcctttccaacgaaccccgaccgccgccgccacccgcttcctactccctcgctttcccgcgcgtccttcccgccgctaacgaataaaacccaaccaccgccaccgaatccctaacgaaccaaaaaccccgcgcgacccccaacgccgacccgataaaatacaaccccgcgcgaactcgcccgaaaactcgacctacgcgcgcgccactccccgaaacgataaaacgaaaacccgcgctccgaaatccacgtactaaaaaaacgaccgaaaaactacgttctcacgcccactcgctatctaataaatcgaccgcgtcga

SEQ ID NO: 8735 - DNA, 651 bp, Artificial Sequence
  chemically treated genomic DNA (Homo sapiens) CpG-island No: 8735
cgggaagaaaagagaaaagtagtaggttgattacgaggtgttaaaattgttaggagtaagaaggtgatagtaattaggggtgagaagagtgcggtattcgtgcggggtaattaattattcgttttatttgagaagagtagtatttgaggtagtagcgttcgtttgttgaacggtgatagattggcgcggaggagaggggaggtgttaaaataatggagtcgggcgcgagcgttgttgtatgttaattagtttttttttcgtttgtttgtcgcgtttttttttttttttcggtttttttttttcgcgtttttttttttcgtttgcggcgtttttttttttttagcgggtttcggtcgtcgtcgttattcgttttttgttttttcgttttttcgcgcgtttttttcgtcgttggcgagtggaatttagttatcgttatcgagtttttagcgggttaggagtttcgcgcggtttttagcgtcggttcggtggagtgtagtttcgcgcgggttcgttcgagggttcggtttgcgcgcgcgttatttttcggggcggtggggcgaggattcgcgtttcgggatttacgtattggggaagcggtcgaagagttgcgtttttacgtttattcgttgtttggtgaatcgatcgcgtcgg

SEQ ID NO: 8736 - DNA, 651 bp, Artificial Sequence
  chemically treated genomic DNA (Homo sapiens) CpG-island No: 8736
ccgacgcgatcgattcaccaaacaacgaataaacgtaaaaacgcaactcttcgaccgcttccccaatacgtaaatcccgaaacgcgaatcctcgccccaccgccccgaaaaataacgcgcgcgcaaaccgaaccctcgaacgaacccgcgcgaaactacactccaccgaaccgacgctaaaaaccgcgcgaaactcctaacccgctaaaaactcgataacgataactaaattccactcgccaacgacgaaaaaaacgcgcgaaaaaacgaaaaaacaaaaaacgaataacgacgacgaccgaaacccgctaaaaaaaaaaaaacgccgcaaacgaaaaaaaaaaacgcgaaaaaaaaaaaccgaaaaaaaaaaaaaaacgcgacaaacaaacgaaaaaaaaactaattaacatacaacaacgctcgcgcccgactccattattttaacacctcccctctcctccgcgccaatctatcaccgttcaacaaacgaacgctactacctcaaatactactcttctcaaataaaacgaataattaattaccccgcacgaataccgcactcttctcacccctaattactatcaccttcttactcctaacaattttaacacctcgtaatcaacctactacttttctcttttcttcccg

SEQ ID NO: 8737 - DNA, 591 bp, Artificial Sequence
  chemically treated genomic DNA (Homo sapiens) CpG-island No: 8737
acgagtataggttgtttttcgaaagatcgagataaagaggcgtttttcgttcgaataaatcggcggtatttacgtaagtgttatttagtttgtggttttttattacggcggttttggtatttagttcggtcgttttgcgcgcgttggttagttcgttcgagtcgttttcgattattaggtagttataggaggttacggcgttagtagcgggcggcgggttttgcggttgcggtttttgtttgtaggttatggtacgggagagggcgcgcgtgagggtcgcgggttcgggtagaagtagtaggaagtttcggaaggcgcgcgtcgttcgtcgttagttcggtttcgcgtcggcgtttagggttcggggtagtagggttatgtacgcggaagtggcgcgttaagtggggcgggcggttcggggacggttttcggggtaggggggcgcgggtttcgggtaagcgtagttttacggtgattaagtatgcgttcgtcgttaggtaagatttaggaggatgtttagaggcggggtcgttttttagtttttcgtttcggtggcggagtttgaggggttttttcgttttcgtttttatt

SEQ ID NO: 8738 - DNA, 591 bp, Artificial Sequence
  chemically treated genomic DNA (Homo sapiens) CpG-island No: 8738
aataaaaacgaaaacgaaaaaacccctcaaactccgccaccgaaacgaaaaactaaaaaacgaccccgcctctaaacatcctcctaaatcttacctaacgacgaacgcatacttaatcaccgtaaaactacgcttacccgaaacccgcgcccccctaccccgaaaaccgtccccgaaccgcccgccccacttaacgcgccacttccgcgtacataaccctactaccccgaaccctaaacgccgacgcgaaaccgaactaacgacgaacgacgcgcgccttccgaaacttcctactacttctacccgaacccgcgaccctcacgcgcgccctctcccgtaccataacctacaaacaaaaaccgcaaccgcaaaacccgccgcccgctactaacgccgtaacctcctataactacctaataatcgaaaacgactcgaacgaactaaccaacgcgcgcaaaacgaccgaactaaataccaaaaccgccgtaataaaaaaccacaaactaaataacacttacgtaaataccgccgatttattcgaacgaaaaacgcctctttatctcgatctttcgaaaaacaacctatactcgt

SEQ ID NO: 8739 - DNA, 591 bp, Artificial Sequence
  chemically treated genomic DNA (Homo sapiens) CpG-island No: 8739
ggtgagaacggaggcggagaaattttttaggtttcgttatcggggcggggaattgggaggcggtttcgtttttgggtatttttttgggttttgtttagcggcgggcgtatgtttagttatcgtgaggttgcgtttgttcggggttcgcgtttttttatttcggggatcgttttcgggtcgttcgttttatttggcgcgttattttcgcgtgtatggttttgttgtttcgagttttgagcgtcggcgcgggatcgagttggcggcgggcggcgcgcgtttttcgaggttttttgttgtttttgttcgagttcgcggtttttacgcgcgttttttttcgtgttatggtttgtaggtaggagtcgtagtcgtagggttcgtcgttcgttgttggcgtcgtggttttttatgattatttggtgatcgggggcggttcgggcgggttggttagcgcgcgtagggcggtcgagttgggtgttagggtcgtcgtggtggagagttataagttgggtggtatttgcgtgagtatcgtcggtttgttcgggcggggggcgtttttttgtttcggtttttcgggggatagtttgtgttcgt

SEQ ID NO: 8740 - DNA, 591 bp, Artificial Sequence
  chemically treated genomic DNA (Homo sapiens) CpG-island No: 8740
acgaacacaaactatcccccgaaaaaccgaaacaaaaaaacgccccccgcccgaacaaaccgacgatactcacgcaaataccacccaacttataactctccaccacgacgaccctaacacccaactcgaccgccctacgcgcgctaaccaacccgcccgaaccgcccccgatcaccaaataatcataaaaaaccacgacgccaacaacgaacgacgaaccctacgactacgactcctacctacaaaccataacacgaaaaaaaacgcgcgtaaaaaccgcgaactcgaacaaaaacaacaaaaaacctcgaaaaacgcgcgccgcccgccgccaactcgatcccgcgccgacgctcaaaactcgaaacaacaaaaccatacacgcgaaaataacgcgccaaataaaacgaacgacccgaaaacgatccccgaaataaaaaaacgcgaaccccgaacaaacgcaacctcacgataactaaacatacgcccgccgctaaacaaaacccaaaaaaatacccaaaaacgaaaccgcctcccaattccccgccccgataacgaaacctaaaaaatttctccgcctccgttctcacc

SEQ ID NO: 8741 - DNA, 957 bp, Artificial Sequence
  chemically treated genomic DNA (Homo sapiens) CpG-island No: 8741
agggcgtcgtgtttcggcggcgtcgtttgttcgttttttttcggcggaaatgttcgagcgatgacggaaattcggagggaggggagagaaagagcgagagaaggggaaagataagtcgggagaggtcggtaggcgtgaggcgggtttgaagcggtagcgggcggttttcgttcggcgagagttaggtcgaggattcgcgtcgcgtttttcggtattttatcgcgttttttatcgattttcgcggcgcgcggtcgggcggggaagggcgggcgggggttttttttaggttgcgcgttcggagtcgtttgttgggtttgggcggggcgcggggttcgcggtcgttttattcggtttagttttttttttgtgggatttggcgacggcggcggagggagaggggagcggcgttcggtcggggtcgggggcgggtggggaggggggagggcggcggtcgggttggggttcgggattcgtatcgggatcgggtcgttatggacgataaggcgtttattaaggagttggattagtgggtcgagtagttgaacgagtgtaagtagttgaacgagaattaagtgcggacgttgtgcgagaaggtgagggcgtcgcgggggcgagtgcgggagcgcggggttgggacgggtcgtcgtttttttgttcgtttcggtttcgttcgtttttggttcggcgcgtttatcgggggtttgcggggttgtgggttcggtttcggcgtttatttaggcggtcggtttatcggtttagggttcggggcgttgggttgttttcgtttgttttttttattttcgttttacgttttcggtcggttgtttagatttcgggcgtggggggttcgggtgcggacgggcggggaaacgtagttttttgagttaagtaggaggttggtcggggtcgtttgcgttttattggggagtttttgttattttagtatttttcgagtgg

SEQ ID NO: 8742 - DNA, 957 bp, Artificial Sequence
  chemically treated genomic DNA (Homo sapiens) CpG-island No: 8742
ccactcgaaaaatactaaaataacaaaaactccccaataaaacgcaaacgaccccgaccaacctcctacttaactcaaaaaactacgtttccccgcccgtccgcacccgaaccccccacgcccgaaatctaaacaaccgaccgaaaacgtaaaacgaaaataaaaaaaacaaacgaaaacaacccaacgccccgaaccctaaaccgataaaccgaccgcctaaataaacgccgaaaccgaacccacaaccccgcaaacccccgataaacgcgccgaaccaaaaacgaacgaaaccgaaacgaacaaaaaaacgacgacccgtcccaaccccgcgctcccgcactcgcccccgcgacgccctcaccttctcgcacaacgtccgcacttaattctcgttcaactacttacactcgttcaactactcgacccactaatccaactccttaataaacgccttatcgtccataacgacccgatcccgatacgaatcccgaaccccaacccgaccgccgccctcccccctccccacccgcccccgaccccgaccgaacgccgctcccctctccctccgccgccgtcgccaaatcccacaaaaaaaaaactaaaccgaataaaacgaccgcgaaccccgcgccccgcccaaacccaacaaacgactccgaacgcgcaacctaaaaaaaacccccgcccgcccttccccgcccgaccgcgcgccgcgaaaatcgataaaaaacgcgataaaataccgaaaaacgcgacgcgaatcctcgacctaactctcgccgaacgaaaaccgcccgctaccgcttcaaacccgcctcacgcctaccgacctctcccgacttatctttccccttctctcgctctttctctcccctccctccgaatttccgtcatcgctcgaacatttccgccgaaaaaaaacgaacaaacgacgccgccgaaacacgacgccct

SEQ ID NO: 8743 - DNA, 957 bp, Artificial Sequence
  chemically treated genomic DNA (Homo sapiens) CpG-island No: 8743
ttattcgggaaatgttagagtggtaggaattttttagtggagcgtaggcgatttcgattaattttttgtttggtttagggggttacgttttttcgttcgttcgtattcgagttttttacgttcgggatttgggtagtcggtcgggggcgtgaggcggaggtggaaggggtaggcgagggtagtttaacgtttcgggttttgaatcgatgggtcggtcgtttaggtggacgtcggagtcggatttatagtttcgtaggttttcggtgggcgcgtcgggttaggggcggacgggatcggggcgggtaggaaagcggcggttcgttttagtttcgcgttttcgtattcgttttcgcggcgtttttattttttcgtatagcgttcgtatttggttttcgtttagttgtttatattcgtttagttgttcgatttattggtttagttttttggtgaacgttttgtcgtttatggcggttcgatttcgatgcggatttcgagttttagttcggtcgtcgtttttttttttttttattcgttttcggtttcggtcgggcgtcgttttttttttttttcgtcgtcgtcgttaggttttatagggggaggattgagtcgggtagggcggtcgcgggtttcgcgtttcgtttaagtttagtaggcggtttcgagcgcgtagtttggaggagattttcgttcgttttttttcgttcggtcgcgcgtcgcgggagtcggtgaaggacgcggtgaggtgtcggggagcgcggcgcgggttttcggtttagttttcgtcggacgaaggtcgttcgttgtcgttttaggttcgttttacgtttatcggtttttttcgatttgtttttttttttttttcgttttttttttttttttttttcgggttttcgttatcgttcgggtattttcgtcgggaaaaggcgagtaggcggcgtcgtcgggatacggcgtttt

SEQ ID NO: 8744 - DNA, 957 bp, Artificial Sequence
  chemically treated genomic DNA (Homo sapiens) CpG-island No: 8744
aaaacgccgtatcccgacgacgccgcctactcgccttttcccgacgaaaatacccgaacgataacgaaaacccgaaaaaaaaaaaaaaaaaaaacgaaaaaaaaaaaaaaacaaatcgaaaaaaaccgataaacgtaaaacgaacctaaaacgacaacgaacgaccttcgtccgacgaaaactaaaccgaaaacccgcgccgcgctccccgacacctcaccgcgtccttcaccgactcccgcgacgcgcgaccgaacgaaaaaaaacgaacgaaaatctcctccaaactacgcgctcgaaaccgcctactaaacttaaacgaaacgcgaaacccgcgaccgccctacccgactcaatcctccccctataaaacctaacgacgacgacgaaaaaaaaaaaaaacgacgcccgaccgaaaccgaaaacgaataaaaaaaaaaaaaaacgacgaccgaactaaaactcgaaatccgcatcgaaatcgaaccgccataaacgacaaaacgttcaccaaaaaactaaaccaataaatcgaacaactaaacgaatataaacaactaaacgaaaaccaaatacgaacgctatacgaaaaaataaaaacgccgcgaaaacgaatacgaaaacgcgaaactaaaacgaaccgccgctttcctacccgccccgatcccgtccgcccctaacccgacgcgcccaccgaaaacctacgaaactataaatccgactccgacgtccacctaaacgaccgacccatcgattcaaaacccgaaacgttaaactaccctcgcctaccccttccacctccgcctcacgcccccgaccgactacccaaatcccgaacgtaaaaaactcgaatacgaacgaacgaaaaaacgtaaccccctaaaccaaacaaaaaattaatcgaaatcgcctacgctccactaaaaaattcctaccactctaacatttcccgaataa

SEQ ID NO: 8745 - DNA, 682 bp, Artificial Sequence
  chemically treated genomic DNA (Homo sapiens) CpG-island No: 8745
cgatggtgacggtgttagggatggtggtaggtgacgatggtgacggtgttagggatggtggtaggtgacgatggtgacggtgttagggatggtggtaggtgacgatggtgacggtgttagggatggtggtaggtgacgatggtgacggtgttagggatggtggtaggtgacgatggtgacggtgttagggatggtggtaggtgacgatggtgacggtgttagggatggtggtaggtgacgatggtgacggtgttagggatggtggtaggtgatgatggtgacggtgttagggatggtggtaggtgatgatggtgacggtgttagggatggtggtaggtgatgatggtgacggtgttagggatggtggtaggtgatgacggtgacggtgttagggatggtggtaggtgatgacggtgacggtgttagggatggtggtaggtgatgacggtgacggtgttagggatggtggtaggtgatgacggtgacggtgttagggatggtggtaggtgatgacggtgacggtgttagggatggtggtaggtgatgacggtgacggtgttagggatggtggtaggtgatgacgttgacggtgttagggatggtggtaggtgatgacggtgatagtgttagggatggtggtaggtgatgacggtgatggtgttagggatggttgtaggtaatg

SEQ ID NO: 8746 - DNA, 682 bp, Artificial Sequence
  chemically treated genomic DNA (Homo sapiens) CpG-island No: 8746
cattacctacaaccatccctaacaccatcaccgtcatcacctaccaccatccctaacactatcaccgtcatcacctaccaccatccctaacaccgtcaacgtcatcacctaccaccatccctaacaccgtcaccgtcatcacctaccaccatccctaacaccgtcaccgtcatcacctaccaccatccctaacaccgtcaccgtcatcacctaccaccatccctaacaccgtcaccgtcatcacctaccaccatccctaacaccgtcaccgtcatcacctaccaccatccctaacaccgtcaccgtcatcacctaccaccatccctaacaccgtcaccatcatcacctaccaccatccctaacaccgtcaccatcatcacctaccaccatccctaacaccgtcaccatcatcacctaccaccatccctaacaccgtcaccatcgtcacctaccaccatccctaacaccgtcaccatcgtcacctaccaccatccctaacaccgtcaccatcgtcacctaccaccatccctaacaccgtcaccatcgtcacctaccaccatccctaacaccgtcaccatcgtcacctaccaccatccctaacaccgtcaccatcgtcacctaccaccatccctaacaccgtcaccatcgtcacctaccaccatccctaacaccgtcaccatcg

SEQ ID NO: 8747 - DNA, 682 bp, Artificial Sequence
  chemically treated genomic DNA (Homo sapiens) CpG-island No: 8747
tattatttataattatttttaatattattatcgttattatttattattatttttaatattgttatcgttattatttattattatttttaatatcgttagcgttattatttattattatttttaatatcgttatcgttattatttattattatttttaatatcgttatcgttattatttattattatttttaatatcgttatcgttattatttattattatttttaatatcgttatcgttattatttgttattatttttaatatcgttatcgttattatttgttattatttttaatatcgttatcgttattatttgttattatttttaatatcgttattattattatttgttattatttttaatatcgttattattattatttgttattatttttaatatcgttattattattatttgttattatttttaatatcgttattatcgttatttgttattatttttaatatcgttattatcgttatttgttattatttttaatatcgttattatcgttatttgttattatttttaatatcgttattatcgttatttgttattatttttaatatcgttattatcgttatttgttattatttttaatatcgttattatcgttatttgttattatttttaatatcgttattatcgttatttgttattatttttaatatcgttattatcg

SEQ ID NO: 8748 - DNA, 682 bp, Artificial Sequence
  chemically treated genomic DNA (Homo sapiens) CpG-island No: 8748
cgataataacgatattaaaaataataacaaataacgataataacgatattaaaaataataacaaataacgataataacgatattaaaaataataacaaataacgataataacgatattaaaaataataacaaataacgataataacgatattaaaaataataacaaataacgataataacgatattaaaaataataacaaataacgataataacgatattaaaaataataacaaataacgataataacgatattaaaaataataacaaataataataataacgatattaaaaataataacaaataataataataacgatattaaaaataataacaaataataataataacgatattaaaaataataacaaataataacgataacgatattaaaaataataacaaataataacgataacgatattaaaaataataacaaataataacgataacgatattaaaaataataataaataataacgataacgatattaaaaataataataaataataacgataacgatattaaaaataataataaataataacgataacgatattaaaaataataataaataataacgctaacgatattaaaaataataataaataataacgataacaatattaaaaataataataaataataacgataataatattaaaaataattataaataata

SEQ ID NO: 8749 - DNA, 509 bp, Artificial Sequence
  chemically treated genomic DNA (Homo sapiens) CpG-island No: 8749
  unsure (206)
ggatagcggttttcggtaaatcggtagaattcgaggttaacgttattgagtatagacgcgtcggttgttacgtagcggtatgtgcgtttttaattagttgaatgtgtagcgacgttaatgtcggaaacgtgttttttttattcggtattagagtaaattgtagcgttagattgggtagtaattttttaagtaacggttgcggtatntgagggtttacgggtaatattcgcgtttcgtattgtagtaacgttagttaggcgagtagcgtttgcggcgtattttacgttcgtaatattacgtcgttgtttttaattattttttgtatcgtaaattcggaagttaatttatcgacgcgagtataaagttcgcgttagttgagttgttcgttattaagacgtaaggcgatggtttttttcgtatttgtcgtagtgacgttacgttagttagagagattttagaggatttttatgcgtgttattttttgattttttattttgttttaatgaaat

SEQ ID NO: 8750 - DNA, 509 bp, Artificial Sequence
  chemically treated genomic DNA (Homo sapiens) CpG-island No: 8750
  unsure (304)
atttcattaaaacaaaataaaaaatcaaaaaataacacgcataaaaatcctctaaaatctctctaactaacgtaacgtcactacgacaaatacgaaaaaaaccatcgccttacgtcttaataacgaacaactcaactaacgcgaactttatactcgcgtcgataaattaacttccgaatttacgatacaaaaaataattaaaaacaacgacgtaatattacgaacgtaaaatacgccgcaaacgctactcgcctaactaacgttactacaatacgaaacgcgaatattacccgtaaaccctcanataccgcaaccgttacttaaaaaattactacccaatctaacgctacaatttactctaataccgaataaaaaaaacacgtttccgacattaacgtcgctacacattcaactaattaaaaacgcacataccgctacgtaacaaccgacgcgtctatactcaataacgttaacctcgaattctaccgatttaccgaaaaccgctatcc

SEQ ID NO: 8751 - DNA, 509 bp, Artificial Sequence
  chemically treated genomic DNA (Homo sapiens) CpG-island No: 8751
  unsure (304)
attttattgagataagatgaggaattaaaagatggtacgtatggggattttttagaatttttttgattggcgtggcgttattgcggtaagtgcgggagaaattatcgttttacgttttaatgacgagtaatttaattggcgcgagttttgtgttcgcgtcgatgaattagttttcggatttgcggtgtagggggtggttgagggtagcggcgtgatgttgcgggcgtggaatacgtcgtaaacgttgttcgtttggttggcgttattgtaatgcggggcgcgggtgttgttcgtgaatttttangtgtcgtaatcgttgtttgaagaattgttgtttaatttgacgttgtaatttgttttggtgtcggatggggaaaatacgttttcggtattaacgtcgttgtatatttagttggttgaaggcgtatatgtcgttacgtggtagtcgacgcgtttgtgtttaatgacgttgatttcgggttttatcggtttgtcgaaagtcgttgttt

SEQ ID NO: 8752 - DNA, 509 bp, Artificial Sequence
  chemically treated genomic DNA (Homo sapiens) CpG-island No: 8752
  unsure (206)
aaacaacgactttcgacaaaccgataaaacccgaaatcaacgtcattaaacacaaacgcgtcgactaccacgtaacgacatatacgccttcaaccaactaaatatacaacgacgttaataccgaaaacgtattttccccatccgacaccaaaacaaattacaacgtcaaattaaacaacaattcttcaaacaacgattacgacacntaaaaattcacgaacaacacccgcgccccgcattacaataacgccaaccaaacgaacaacgtttacgacgtattccacgcccgcaacatcacgccgctaccctcaaccaccccctacaccgcaaatccgaaaactaattcatcgacgcgaacacaaaactcgcgccaattaaattactcgtcattaaaacgtaaaacgataatttctcccgcacttaccgcaataacgccacgccaatcaaaaaaattctaaaaaatccccatacgtaccatcttttaattcctcatcttatctcaataaaat

SEQ ID NO: 8753 - DNA, 512 bp, Artificial Sequence
  chemically treated genomic DNA (Homo sapiens) CpG-island No: 8753
gattcgcgaattggcggtataggttgttgaagtaatgacggatttttttaaatatatgcgcggcgtaaatgtggttgttttgtacggcggttagcgttatgacgtgtaattacgcgttttgcgttaggggtcgtagatcgttgtcggtatttcgggtcgtttgttggattatttgaaacgtggtattttggatttttttaaattgagcggtttggttttggatgaagttgacgaaatgttgcgtatgggttttatcgaagacgttgaaattattatggcgtagatttcggaaggttattagatcgttttgttttttgtaattatgtcggaagcgattcgtcgtattattcgtcgttttatgaaagagtcgtaggaagtgcgtatttagtttagcgtgattattcgttttgatattagttagagttattggattgtttggggtatgcgtaaaaacgaagtattggtacgttttttggaagcggaagattttgatgcggcgattattttcgttt

SEQ ID NO: 8754 - DNA, 512 bp, Artificial Sequence
  chemically treated genomic DNA (Homo sapiens) CpG-island No: 8754
aaacgaaaataatcgccgcatcaaaatcttccgcttccaaaaaacgtaccaatacttcgtttttacgcataccccaaacaatccaataactctaactaatatcaaaacgaataatcacgctaaactaaatacgcacttcctacgactctttcataaaacgacgaataatacgacgaatcgcttccgacataattacaaaaaacaaaacgatctaataaccttccgaaatctacgccataataatttcaacgtcttcgataaaacccatacgcaacatttcgtcaacttcatccaaaaccaaaccgctcaatttaaaaaaatccaaaataccacgtttcaaataatccaacaaacgacccgaaataccgacaacgatctacgacccctaacgcaaaacgcgtaattacacgtcataacgctaaccgccgtacaaaacaaccacatttacgccgcgcatatatttaaaaaaatccgtcattacttcaacaacctataccgccaattcgcgaatc

SEQ ID NO: 8755 - DNA, 512 bp, Artificial Sequence
  chemically treated genomic DNA (Homo sapiens) CpG-island No: 8755
gaacgaagataatcgtcgtattaaaatttttcgtttttaggaaacgtattagtgtttcgtttttgcgtatattttagatagtttagtagttttggttgatgttaggacgggtagttacgttggattgaatgcgtattttttgcggtttttttataaagcggcgggtaatgcgacgaatcgttttcggtatggttgtagagaatagagcggtttgatgatttttcgggatttgcgttataatggttttaacgttttcgatgaagtttatgcgtagtatttcgttagttttatttagaattagatcgtttagtttagagaggtttagagtgttacgttttaggtggtttagtagacggttcggagtatcgataacgatttgcggtttttgacgtagggcgcgtaattgtacgttataacgttggtcgtcgtatagagtaattatatttacgtcgcgtatgtgtttagagaaattcgttattgttttagtaatttgtatcgttagttcgcgggtt

SEQ ID NO: 8756 - DNA, 512 bp, Artificial Sequence
  chemically treated genomic DNA (Homo sapiens) CpG-island No: 8756
aacccgcgaactaacgatacaaattactaaaacaataacgaatttctctaaacacatacgcgacgtaaatataattactctatacgacgaccaacgttataacgtacaattacgcgccctacgtcaaaaaccgcaaatcgttatcgatactccgaaccgtctactaaaccacctaaaacgtaacactctaaacctctctaaactaaacgatctaattctaaataaaactaacgaaatactacgcataaacttcatcgaaaacgttaaaaccattataacgcaaatcccgaaaaatcatcaaaccgctctattctctacaaccataccgaaaacgattcgtcgcattacccgccgctttataaaaaaaccgcaaaaaatacgcattcaatccaacgtaactacccgtcctaacatcaaccaaaactactaaactatctaaaatatacgcaaaaacgaaacactaatacgtttcctaaaaacgaaaaattttaatacgacgattatcttcgttc

SEQ ID NO: 8757 - DNA, 1007 bp, Artificial Sequence
  chemically treated genomic DNA (Homo sapiens) CpG-island No: 8757
gagtcgggcgggtacgtgttaggcgtttggttgcgggaaatcgacgttgttgcgtatggttgtcgggttggagcgggtgatagaaggcgatatttggattaacgattagcgcgtgattgaaatggagttaaaagatcgcgggattgcgatggtgttttagaattacgcgttttattcgtatatgagtgtcgaagaaaatatggcgtgggggttgaaaattcgcggtatgggtaagtagtaaattgtcgagcgcgttaaagaagcggcgcgtattttggagttggacggtttgtttaaacgtcgttcgcgcgagtttttcggcggttagcgttagcgtgtggcgatgggtcgcgcgattgtgcgcgattcggcggtgtttttgtttgatgagtcgttttttaatttcgatgttaagttgcgcgtgtagatgcgttttgaattgtaatagttgtatcgtcgtttgaaaacgattttattttacgttatttacgattaggttgaagcgatgacgttcgtttagcgagtaatggtgatgaacggcggtgttgtcgaatagaattgtatattagttgaagtttacgaaaattcgttagtttgttgtagcgagtttattcgtattcgcgataatcgttgatagttcgtgatacgaaggtagtattcgacggtagtttaagtgttcgtaatcggtggatttatagtcggcgaaaagattcggatcgtcggataatgttaattttatagagcggggttattttaggattcggaaattcggtaaaattggtacgatcggggataaacggggtttaggttatagagtttaggtagaaatcgtgggtatcgggaaatacggatttttaagggaatagaacgttggaaaaggttaatttttaaagcgtaatcgggggggtaattggtttgaaaattttggtgaaagggcgcgtcgtaataggtagaaaggcggcggtttaaaagtagcgcgtcgttttaaataacgagtatattaatga

SEQ ID NO: 8758 - DNA, 1007 bp, Artificial Sequence
  chemically treated genomic DNA (Homo sapiens) CpG-island No: 8758
tcattaatatactcgttatttaaaacgacgcgctacttttaaaccgccgcctttctacctattacgacgcgccctttcaccaaaattttcaaaccaattacccccccgattacgctttaaaaattaaccttttccaacgttctattcccttaaaaatccgtatttcccgatacccacgatttctacctaaactctataacctaaaccccgtttatccccgatcgtaccaattttaccgaatttccgaatcctaaaataaccccgctctataaaattaacattatccgacgatccgaatcttttcgccgactataaatccaccgattacgaacacttaaactaccgtcgaatactaccttcgtatcacgaactatcaacgattatcgcgaatacgaataaactcgctacaacaaactaacgaattttcgtaaacttcaactaatatacaattctattcgacaacaccgccgttcatcaccattactcgctaaacgaacgtcatcgcttcaacctaatcgtaaataacgtaaaataaaatcgttttcaaacgacgatacaactattacaattcaaaacgcatctacacgcgcaacttaacatcgaaattaaaaaacgactcatcaaacaaaaacaccgccgaatcgcgcacaatcgcgcgacccatcgccacacgctaacgctaaccgccgaaaaactcgcgcgaacgacgtttaaacaaaccgtccaactccaaaatacgcgccgcttctttaacgcgctcgacaatttactacttacccataccgcgaattttcaacccccacgccatattttcttcgacactcatatacgaataaaacgcgtaattctaaaacaccatcgcaatcccgcgatcttttaactccatttcaatcacgcgctaatcgttaatccaaatatcgccttctatcacccgctccaacccgacaaccatacgcaacaacgtcgatttcccgcaaccaaacgcctaacacgtacccgcccgactc

SEQ ID NO: 8759 - DNA, 1007 bp, Artificial Sequence
  chemically treated genomic DNA (Homo sapiens) CpG-island No: 8759
ttattaatgtattcgttgtttaaaacgacgcgttatttttgaatcgtcgtttttttgtttattgcgacgcgtttttttattagggtttttaggttagttattttttcggttgcgttttgggggttggttttttttaacgttttgtttttttaaaagttcgtgtttttcggtgtttacggtttttgtttaggttttatggtttggatttcgtttgttttcggtcgtgttagttttgtcgggttttcgggttttaaaatggtttcgttttgtggggttggtattgttcggcgattcgggttttttcgtcggttatgagtttatcgattacgggtatttaagttgtcgtcgaatgttgttttcgtattacgggttgttagcggttatcgcggatgcgagtaaattcgttataataggttggcgggttttcgtagattttaattggtgtgtaattttgttcggtaatatcgtcgtttattattattattcgttgggcgagcgttatcgttttaatttgatcgtgagtaacgtagagtgaagtcgtttttaggcgacggtgtaattgttgtagtttaagacgtatttgtacgcgtagtttggtatcgaggttagagagcggtttattaaataggaatatcgtcggatcgcgtataatcgcgcggtttatcgttatacgttggcgttgatcgtcggaaagttcgcgcgggcgacgtttgagtagatcgtttagttttagaatgcgcgtcgtttttttaacgcgttcggtaatttgttgtttgtttatgtcgcgaatttttagtttttacgttatgtttttttcgatatttatatgcggataaagcgcgtagttttggaatattatcgtaatttcgcgattttttggttttattttagttacgcgttggtcgttgatttagatatcgttttttgttattcgttttagttcggtaattatgcgtagtagcgtcgatttttcgtagttagacgtttggtacgtattcgttcggttt

SEQ ID NO: 8760 - DNA, 1007 bp, Artificial Sequence
  chemically treated genomic DNA (Homo sapiens) CpG-island No: 8760
aaaccgaacgaatacgtaccaaacgtctaactacgaaaaatcgacgctactacgcataattaccgaactaaaacgaataacaaaaaacgatatctaaatcaacgaccaacgcgtaactaaaataaaaccaaaaaatcgcgaaattacgataatattccaaaactacgcgctttatccgcatataaatatcgaaaaaaacataacgtaaaaactaaaaattcgcgacataaacaaacaacaaattaccgaacgcgttaaaaaaacgacgcgcattctaaaactaaacgatctactcaaacgtcgcccgcgcgaactttccgacgatcaacgccaacgtataacgataaaccgcgcgattatacgcgatccgacgatattcctatttaataaaccgctctctaacctcgataccaaactacgcgtacaaatacgtcttaaactacaacaattacaccgtcgcctaaaaacgacttcactctacgttactcacgatcaaattaaaacgataacgctcgcccaacgaataataataataaacgacgatattaccgaacaaaattacacaccaattaaaatctacgaaaacccgccaacctattataacgaatttactcgcatccgcgataaccgctaacaacccgtaatacgaaaacaacattcgacgacaacttaaatacccgtaatcgataaactcataaccgacgaaaaaacccgaatcgccgaacaataccaaccccacaaaacgaaaccattttaaaacccgaaaacccgacaaaactaacacgaccgaaaacaaacgaaatccaaaccataaaacctaaacaaaaaccgtaaacaccgaaaaacacgaacttttaaaaaaacaaaacgttaaaaaaaaccaacccccaaaacgcaaccgaaaaaataactaacctaaaaaccctaataaaaaaacgcgtcgcaataaacaaaaaaacgacgattcaaaaataacgcgtcgttttaaacaacgaatacattaataa

SEQ ID NO: 8761 - DNA, 503 bp, Artificial Sequence
  chemically treated genomic DNA (Homo sapiens) CpG-island No: 8761
agaaaagcgacggtgtcgtgtattagggtattatcgttcgcgtgaagttaggacgttagtattaggaaaacgatttgtcggatttgatcgtttcgttcgattaatcgtttttgttgattttcgacggcgtaatcgattcgtataatttcggcgcgtgtttgcgtagtgcggacgtcgtagttttatgcggtgattgtgtcgaaagatcgtttcgtatagtttaacgttacggcgaaaaaagtagtttgcggcgcggtagaaagcgtttcgttgattcgggtgattaattttgcgcgtattatgcgtatgttgtaggaagagaatatttggatcgtcggtacggtaggcgaggcggattatatattttattagagtaaaatgatcggatcgttggcgttggtgatggggtcggaaagtgaaggtatgcgttcgttgattcgtgaatattgcgattagttgattagtatttcgatggttggaaacgttttttttttgaacgtttt

SEQ ID NO: 8762 - DNA, 503 bp, Artificial Sequence
  chemically treated genomic DNA (Homo sapiens) CpG-island No: 8762
aaaacgttcaaaaaaaaaacgtttccaaccatcgaaatactaatcaactaatcgcaatattcacgaatcaacgaacgcataccttcactttccgaccccatcaccaacgccaacgatccgatcattttactctaataaaatatataatccgcctcgcctaccgtaccgacgatccaaatattctcttcctacaacatacgcataatacgcgcaaaattaatcacccgaatcaacgaaacgctttctaccgcgccgcaaactacttttttcgccgtaacgttaaactatacgaaacgatctttcgacacaatcaccgcataaaactacgacgtccgcactacgcaaacacgcgccgaaattatacgaatcgattacgccgtcgaaaatcaacaaaaacgattaatcgaacgaaacgatcaaatccgacaaatcgttttcctaatactaacgtcctaacttcacgcgaacgataataccctaatacacgacaccgtcgcttttct

SEQ ID NO: 8763 - DNA, 503 bp, Artificial Sequence
  chemically treated genomic DNA (Homo sapiens) CpG-island No: 8763
gaaacgtttagggaagaaacgtttttagttatcgggatgttgattaattaatcgtaatgtttacgagttagcggacgtatatttttatttttcgattttattattagcgttagcgattcggttattttgttttgatagagtgtatgattcgtttcgtttgtcgtatcgacgatttagatattttttttttgtaatatacgtatggtgcgcgtaaggttagttattcgaattagcggaacgttttttgtcgcgtcgtaggttatttttttcgtcgtagcgttgagttgtgcggagcgatttttcggtataattatcgtatgaagttgcggcgttcgtattacgtaggtacgcgtcgaggttgtgcggatcggttacgtcgtcgaggattagtaggaacggttgatcgagcgaagcgattagattcggtagatcgtttttttgatattgacgttttggttttacgcgggcgataatgttttgatgtacggtatcgtcgttttttt

SEQ ID NO: 8764 - DNA, 503 bp, Artificial Sequence
  chemically treated genomic DNA (Homo sapiens) CpG-island No: 8764
aaaaaaacgacgataccgtacatcaaaacattatcgcccgcgtaaaaccaaaacgtcaatatcaaaaaaacgatctaccgaatctaatcgcttcgctcgatcaaccgttcctactaatcctcgacgacgtaaccgatccgcacaacctcgacgcgtacctacgtaatacgaacgccgcaacttcatacgataattataccgaaaaatcgctccgcacaactcaacgctacgacgaaaaaaataacctacgacgcgacaaaaaacgttccgctaattcgaataactaaccttacgcgcaccatacgtatattacaaaaaaaaaatatctaaatcgtcgatacgacaaacgaaacgaatcatacactctatcaaaacaaaataaccgaatcgctaacgctaataataaaatcgaaaaataaaaatatacgtccgctaactcgtaaacattacgattaattaatcaacatcccgataactaaaaacgtttcttccctaaacgtttc

SEQ ID NO: 8765 - DNA, 560 bp, Artificial Sequence
  chemically treated genomic DNA (Homo sapiens) CpG-island No: 8765
  unsure (243, 492)
ttaacgtcgcggcgagtggcgttataattacgtattggtgtttaaagatcgttcggattatcgttttattttcggtgaaaaaggtgaagtgttggatatcgtcgtcgagtttcgtcgtattgttaatcgtatcgtcgaagaagcgatgattgtcgttaatatttgtgcggttcgcgtattgcgcgataagttcggttttggtatttataacgtgtatatgggttttgattcggcgaatgcgancgcgttggtagcgttgttgaaaacgtacggtttgtatgtcgatgtcgaagaagtgtttacgttggacggtttttgtaaattgcgtcgtgaattggacgcgtaattaattggttttttcgatagtcgtattcgtcgtttttagttatttgttgaaattagtattgaattcggtttttattttggtttcggtttggaagtatacgttatttggatttcgtcgattcgtaaatatggcgatatgattaattnacgtttgttgaaagcggttattaaagggcgaattgcgacgcgtttataggatgaataagttattcgtt

SEQ ID NO: 8766 - DNA, 560 bp, Artificial Sequence
  chemically treated genomic DNA (Homo sapiens) CpG-island No: 8766
  unsure (69, 318)
aacgaataacttattcatcctataaacgcgtcgcaattcgccctttaataaccgctttcaacaaacgtnaattaatcatatcgccatatttacgaatcgacgaaatccaaataacgtatacttccaaaccgaaaccaaaataaaaaccgaattcaatactaatttcaacaaataactaaaaacgacgaatacgactatcgaaaaaaccaattaattacgcgtccaattcacgacgcaatttacaaaaaccgtccaacgtaaacacttcttcgacatcgacatacaaaccgtacgttttcaacaacgctaccaacgcgntcgcattcgccgaatcaaaacccatatacacgttataaataccaaaaccgaacttatcgcgcaatacgcgaaccgcacaaatattaacgacaatcatcgcttcttcgacgatacgattaacaatacgacgaaactcgacgacgatatccaacacttcacctttttcaccgaaaataaaacgataatccgaacgatctttaaacaccaatacgtaattataacgccactcgccgcgacgttaa

SEQ ID NO: 8767 - DNA, 560 bp, Artificial Sequence
  chemically treated genomic DNA (Homo sapiens) CpG-island No: 8767
  unsure (69, 318)
agcggatgatttgtttattttgtgggcgcgtcgtagttcgttttttgataatcgtttttagtagacgtnggttgattatgtcgttatatttacggatcggcgaagtttaggtggcgtatgtttttagatcgaggttaaagtgaggatcgggtttagtgttaattttagtaaatgattggaagcgacgaatgcggttgtcgaggaaattagttggttgcgcgtttagtttacgacgtagtttgtagaaatcgtttagcgtgagtattttttcggtatcgatatgtagatcgtgcgtttttagtaacgttgttagcgcgntcgtattcgtcggattaaagtttatatgtacgttatagatgttaaaatcgagtttatcgcgtagtacgcgggtcgtataaatgttagcggtaattatcgttttttcgacgatacggttggtaatgcgacgaggttcggcgacgatatttagtattttattttttttatcgagaataaagcggtaattcgggcgatttttaaatattagtgcgtggttatgacgttattcgtcgcggcgttgg

SEQ ID NO: 8768 - DNA, 560 bp, Artificial Sequence
  chemically treated genomic DNA (Homo sapiens) CpG-island No: 8768
  unsure (243, 492)
ccaacgccgcgacgaataacgtcataaccacgcactaatatttaaaaatcgcccgaattaccgctttattctcgataaaaaaaataaaatactaaatatcgtcgccgaacctcgtcgcattaccaaccgtatcgtcgaaaaaacgataattaccgctaacatttatacgacccgcgtactacgcgataaactcgattttaacatctataacgtacatataaactttaatccgacgaatacgancgcgctaacaacgttactaaaaacgcacgatctacatatcgataccgaaaaaatactcacgctaaacgatttctacaaactacgtcgtaaactaaacgcgcaaccaactaatttcctcgacaaccgcattcgtcgcttccaatcatttactaaaattaacactaaacccgatcctcactttaacctcgatctaaaaacatacgccacctaaacttcgccgatccgtaaatataacgacataatcaaccnacgtctactaaaaacgattatcaaaaaacgaactacgacgcgcccacaaaataaacaaatcatccgct

SEQ ID NO: 8769 - DNA, 573 bp, Artificial Sequence
  chemically treated genomic DNA (Homo sapiens) CpG-island No: 8769
cgttatttacggtgcggtgcgtgaggcggtttgtttcgttatagtgttagtgggtgattagttttttattttcgttgcggataagtttgtcggttaggtcgtggtgataacgttgtgtgcggtcgttaaagtcggttttttgtattagtcggttaagtatatcgtaacggaaggtggtgtggttgtcgtttttattggttaggcggatgattcgttcggtagtatcgtattttatattgcgcgttagatcgttttgcgtggtacggacggtttttttttacgtatcgtattgtgtttcgtttttgttgtcgttcggggtaatgacggcggttaggttatcggcgatgttgtatttatatcgcgttttatggttttgcgtgttttttacggtaattaattgtttacggttgtcgtatgcgcggtattgatttagttttttttcgcggtgtatcgtcgttatttgttcgaagcggttatggttataacgggttatataatcggaatagtcggtgaagtttagtaattgatcgtaacggttttacgttatggtttacgtattttataggaacggga

SEQ ID NO: 8770 - DNA, 573 bp, Artificial Sequence
  chemically treated genomic DNA (Homo sapiens) CpG-island No: 8770
tcccgttcctataaaatacgtaaaccataacgtaaaaccgttacgatcaattactaaacttcaccgactattccgattatataacccgttataaccataaccgcttcgaacaaataacgacgatacaccgcgaaaaaaaactaaatcaataccgcgcatacgacaaccgtaaacaattaattaccgtaaaaaacacgcaaaaccataaaacgcgatataaatacaacatcgccgataacctaaccgccgtcattaccccgaacgacaacaaaaacgaaacacaatacgatacgtaaaaaaaaaccgtccgtaccacgcaaaacgatctaacgcgcaatataaaatacgatactaccgaacgaatcatccgcctaaccaataaaaacgacaaccacaccaccttccgttacgatatacttaaccgactaatacaaaaaaccgactttaacgaccgcacacaacgttatcaccacgacctaaccgacaaacttatccgcaacgaaaataaaaaactaatcacccactaacactataacgaaacaaaccgcctcacgcaccgcaccgtaaataacg

SEQ ID NO: 8771 - DNA, 573 bp, Artificial Sequence
  chemically treated genomic DNA (Homo sapiens) CpG-island No: 8771
tttcgtttttgtagaatgcgtaaattatgacgtggagtcgttacggttagttgttgagttttatcgattgtttcggttatgtaattcgttatgattatgatcgtttcgggtagatgacggcggtgtatcgcgaggaagggttgagttagtatcgcgtatacgatagtcgtggatagttaattgtcgtgaaagatacgtagggttatgaaacgcggtatgaatataatatcgtcggtgatttgatcgtcgttattgtttcggacggtagtagaaacgggatatagtacgatgcgtggggaaaggtcgttcgtattacgtagggcggtttgacgcgtagtatggaatacgatgttgtcggacgggttattcgtttgattagtgaaaacggtagttatattatttttcgttacgatgtatttgatcggttgatataggaaatcggttttgacggtcgtatatagcgttattattacgatttgatcggtaaatttattcgtagcgaggatgaggggttggttatttattggtattatgacgaagtagatcgttttacgtatcgtatcgtgaatggcg

SEQ ID NO: 8772 - DNA, 573 bp, Artificial Sequence
  chemically treated genomic DNA (Homo sapiens) CpG-island No: 8772
cgccattcacgatacgatacgtaaaacgatctacttcgtcataataccaataaataaccaacccctcatcctcgctacgaataaatttaccgatcaaatcgtaataataacgctatatacgaccgtcaaaaccgatttcctatatcaaccgatcaaatacatcgtaacgaaaaataatataactaccgttttcactaatcaaacgaataacccgtccgacaacatcgtattccatactacgcgtcaaaccgccctacgtaatacgaacgacctttccccacgcatcgtactatatcccgtttctactaccgtccgaaacaataacgacgatcaaatcaccgacgatattatattcataccgcgtttcataaccctacgtatctttcacgacaattaactatccacgactatcgtatacgcgatactaactcaacccttcctcgcgatacaccgccgtcatctacccgaaacgatcataatcataacgaattacataaccgaaacaatcgataaaactcaacaactaaccgtaacgactccacgtcataatttacgcattctacaaaaacgaaa

SEQ ID NO: 8773 - DNA, 801 bp, Artificial Sequence
  chemically treated genomic DNA (Homo sapiens) CpG-island No: 8773
tcgcgttcgcggatcgattttagttttattttagtcgttttttgtttgggtagaatgggggtttcgcgggaacgcgatgtgttgttagtttatagttcgttttttttttgcgggtcggtattcgtcgttggcggcgtcgatttgtgggaggtttagagggcgggtgagtgcggagcggaaggcgcgggcgaagtatcgtaggggtttcgttgatttcgttatacgtcgggtagggttgtaacggtttttttcgattggagcggtcgcgcgttttttcggtcggttattggtttttttgtttttaggttttcgttttcggttttcgtgtttttttttagtttttagagcggagtcgggaggtaaattttaagcggttgtgggatttacgttttattcggaattttaagttttgtcgtttcgtttggcgtttaaattttgcggatttttattggtcgttcgtttttttcggtttcgcgcgttttagggtttcgcgggttttcggtttcgggatattttcggttttggggaattttcggttttttcgtagtttcggcgttcgggatattttcggttttcggtagttgttttagtcggaggttcgcgggcgttttatgttggtagtgttaatgtcgtcggttggtattcggttggttgcgcgttgggaacgttagcgaggtagcgttatcggtttgaggagggtgaaagtttaatttttggtttttgaagttagcggaagggaacgggtatgttttggaaaggttcgtcgggaatttttttagaaattaggcgaagttttttgtt

SEQ ID NO: 8774 - DNA, 801 bp, Artificial Sequence
  chemically treated genomic DNA (Homo sapiens) CpG-island No: 8774
aacaaaaaacttcgcctaatttctaaaaaaattcccgacgaacctttccaaaacatacccgttcccttccgctaacttcaaaaaccaaaaattaaactttcaccctcctcaaaccgataacgctacctcgctaacgttcccaacgcgcaaccaaccgaataccaaccgacgacattaacactaccaacataaaacgcccgcgaacctccgactaaaacaactaccgaaaaccgaaaatatcccgaacgccgaaactacgaaaaaaccgaaaattccccaaaaccgaaaatatcccgaaaccgaaaacccgcgaaaccctaaaacgcgcgaaaccgaaaaaaacgaacgaccaataaaaatccgcaaaatttaaacgccaaacgaaacgacaaaacttaaaattccgaataaaacgtaaatcccacaaccgcttaaaatttacctcccgactccgctctaaaaactaaaaaaaaacacgaaaaccgaaaacgaaaacctaaaaacaaaaaaaccaataaccgaccgaaaaaacgcgcgaccgctccaatcgaaaaaaaccgttacaaccctacccgacgtataacgaaatcaacgaaacccctacgatacttcgcccgcgccttccgctccgcactcacccgccctctaaacctcccacaaatcgacgccgccaacgacgaataccgacccgcaaaaaaaaaacgaactataaactaacaacacatcgcgttcccgcgaaacccccattctacccaaacaaaaaacgactaaaataaaactaaaatcgatccgcgaacgcga

SEQ ID NO: 8775 - DNA, 801 bp, Artificial Sequence
  chemically treated genomic DNA (Homo sapiens) CpG-island No: 8775
agtagggagtttcgtttggtttttgagggaattttcggcgggtttttttaaaatatgttcgttttttttcgttaattttaggggttaagaattgaatttttattttttttaagtcggtggcgttgtttcgttggcgtttttagcgcgtagttaatcggatgttagtcggcggtattagtattgttagtatggggcgttcgcggattttcgattgaggtagttgtcgggagtcggaagtgtttcgggcgtcgggattgcgagggggtcgggagttttttaagatcggaagtgtttcgaggtcgggagttcgcgggattttggagcgcgcggggtcggaagaggcgggcggttagtggaggttcgtagagtttgggcgttaggcgagacggtagggtttaaagtttcgggtgaggcgtgggttttataatcgtttggaatttgtttttcggtttcgttttggaagttaagaaggggtacgagagtcggagacgggaatttgagagtagggaagttagtagtcggtcggaggagcgcgcggtcgttttagtcggaaggagtcgttgtagttttgttcggcgtgtggcggggttagcgaggtttttgcggtgtttcgttcgcgtttttcgtttcgtatttattcgttttttgggttttttataggtcggcgtcgttagcggcgggtatcggttcgtagagggagggcgggttgtgaattggtagtatatcgcgttttcgcggggtttttattttgtttaggtagggagcggttgggatgggattgaggtcggttcgcgagcgcgg

SEQ ID NO: 8776 - DNA, 801 bp, Artificial Sequence
  chemically treated genomic DNA (Homo sapiens) CpG-island No: 8776
ccgcgctcgcgaaccgacctcaatcccatcccaaccgctccctacctaaacaaaataaaaaccccgcgaaaacgcgatatactaccaattcacaacccgccctccctctacgaaccgatacccgccgctaacgacgccgacctataaaaaacccaaaaaacgaataaatacgaaacgaaaaacgcgaacgaaacaccgcaaaaacctcgctaaccccgccacacgccgaacaaaactacaacgactccttccgactaaaacgaccgcgcgctcctccgaccgactactaacttccctactctcaaattcccgtctccgactctcgtaccccttcttaacttccaaaacgaaaccgaaaaacaaattccaaacgattataaaacccacgcctcacccgaaactttaaaccctaccgtctcgcctaacgcccaaactctacgaacctccactaaccgcccgcctcttccgaccccgcgcgctccaaaatcccgcgaactcccgacctcgaaacacttccgatcttaaaaaactcccgaccccctcgcaatcccgacgcccgaaacacttccgactcccgacaactacctcaatcgaaaatccgcgaacgccccatactaacaatactaataccgccgactaacatccgattaactacgcgctaaaaacgccaacgaaacaacgccaccgacttaaaaaaaataaaaattcaattcttaacccctaaaattaacgaaaaaaaacgaacatattttaaaaaaacccgccgaaaattccctcaaaaaccaaacgaaactccctact

SEQ ID NO: 8777 - DNA, 732 bp, Artificial Sequence
  chemically treated genomic DNA (Homo sapiens) CpG-island No: 8777
tttttattcgttaagttggggtcggacgcgttgaggttttcggcgtttcggcgcgagtgatagcgtcgttttcgtttcggaggtagtgttggggggaagttcgtttttcggttttttcgggtcgtttttgttcgcgtcgttttcgtcggttttttattcggaattttttttttttgttcgttttgatttcggcgtttagttgtcgtagtgtgtgcgtgaattcgcggaagagtaggtattttcggattagttcgttagtgcgttttacggttttcgttatcgtagcgttagcgtttttaggggtggtgcggtgagggacggaggggcggggtttgggagaaatggggcggggtcggacgcgggcgtcgagtacgttacgtcgcgataggtttattagttcgtacgtatcgggcgattagtttgaggtttcgtttttcggtcggtttttcgttcgaggtttcgtttttgagttagttttagttcgtttggtcgttcgagttatttttatttttttcgaggagtggcgaggggaggttttggcggcgtcggcggcggttttgtttgaattattgaaagtggcggttgttatttacgttaaataagattggattttaagaatattttaggtagtttcgaggcgggtagggggtgcggcgttttgttggttggcgttatatcgtagagttttcggttttttgttttttttttatacggaggaagttggagttttaa

SEQ ID NO: 8778 - DNA, 732 bp, Artificial Sequence
  chemically treated genomic DNA (Homo sapiens) CpG-island No: 8778
ttaaaactccaacttcctccgtataaaaaaaaaacaaaaaaccgaaaactctacgatataacgccaaccaacaaaacgccgcaccccctacccgcctcgaaactacctaaaatattcttaaaatccaatcttatttaacgtaaataacaaccgccactttcaataattcaaacaaaaccgccgccgacgccgccaaaacctcccctcgccactcctcgaaaaaaataaaaataactcgaacgaccaaacgaactaaaactaactcaaaaacgaaacctcgaacgaaaaaccgaccgaaaaacgaaacctcaaactaatcgcccgatacgtacgaactaataaacctatcgcgacgtaacgtactcgacgcccgcgtccgaccccgccccatttctcccaaaccccgcccctccgtccctcaccgcaccacccctaaaaacgctaacgctacgataacgaaaaccgtaaaacgcactaacgaactaatccgaaaatacctactcttccgcgaattcacgcacacactacgacaactaaacgccgaaatcaaaacgaacaaaaaaaaaaaattccgaataaaaaaccgacgaaaacgacgcgaacaaaaacgacccgaaaaaaccgaaaaacgaacttccccccaacactacctccgaaacgaaaacgacgctatcactcgcgccgaaacgccgaaaacctcaacgcgtccgaccccaacttaacgaataaaaa

SEQ ID NO: 8779 - DNA, 732 bp, Artificial Sequence
  chemically treated genomic DNA (Homo sapiens) CpG-island No: 8779
ttagggttttagtttttttcgtgtaggaggagggtaggggatcgggagttttgcgatgtaacgttaattaatagggcgtcgtattttttgttcgtttcgggattatttgggatgtttttaagatttagttttgtttgacgtgggtggtagtcgttatttttagtaatttagataaagtcgtcgtcggcgtcgttaggattttttttcgttatttttcgggaggggtaagggtgattcgagcggttaggcgggttggggttggtttaggggcggggtttcgggcggggagtcggtcgaggggcggggttttaggttggtcgttcggtgcgtgcgggttggtaggtttgtcgcggcgtgacgtgttcggcgttcgcgttcggtttcgttttattttttttaggtttcgttttttcgttttttatcgtattatttttaaagacgttagcgttgcgatggcggaggtcgtggagcgtattgacgagttggttcgggagtatttgttttttcgcgggtttacgtatatattgcggtagttggacgtcgagattaaggcggataaggagaaggggtttcgggtgagaggtcggcgggagcggcgcgggtagaggcggttcgagggagtcggggagcgggtttttttttagtattgttttcggggcgagagcggcgttgttattcgcgtcggggcgtcggagattttagcgcgttcgattttagtttgacggatgagga

SEQ ID NO: 8780 - DNA, 732 bp, Artificial Sequence
  chemically treated genomic DNA (Homo sapiens) CpG-island No: 8780
tcctcatccgtcaaactaaaatcgaacgcgctaaaatctccgacgccccgacgcgaataacaacgccgctctcgccccgaaaacaatactaaaaaaaaacccgctccccgactccctcgaaccgcctctacccgcgccgctcccgccgacctctcacccgaaaccccttctccttatccgccttaatctcgacgtccaactaccgcaatatatacgtaaacccgcgaaaaaacaaatactcccgaaccaactcgtcaatacgctccacgacctccgccatcgcaacgctaacgtctttaaaaataatacgataaaaaacgaaaaaacgaaacctaaaaaaaataaaacgaaaccgaacgcgaacgccgaacacgtcacgccgcgacaaacctaccaacccgcacgcaccgaacgaccaacctaaaaccccgcccctcgaccgactccccgcccgaaaccccgcccctaaaccaaccccaacccgcctaaccgctcgaatcacccttacccctcccgaaaaataacgaaaaaaaatcctaacgacgccgacgacgactttatctaaattactaaaaataacgactaccacccacgtcaaacaaaactaaatcttaaaaacatcccaaataatcccgaaacgaacaaaaaatacgacgccctattaattaacgttacatcgcaaaactcccgatcccctaccctcctcctacacgaaaaaaactaaaaccctaa

SEQ ID NO: 8781 - DNA, 502 bp, Artificial Sequence
  chemically treated genomic DNA (Homo sapiens) CpG-island No: 8781
cgaggcggtgggaagtgggttgcgtcgagtatatgttttaggcggtgggtagtgcgggttatgcgtaggttaggcggggggcgggggtagttagtttcggggttgattatcgcgggaataacgggatggtttagttcggcgtaattgttgatcgcgagagaattaatttagcgttgggggttaaaggttgtgatttgttttaggatttggattaagtgtcgtttgttgcggtttgggaacggtttatatagcgcgtcgttgggattgtgtagtattaatttcggttaagtgggaggaaaatatggacgtggaggtggtcggttgtttgtgaaggttgggtgtgggcgggagtggtggtgacgttggtggaggttgcgggagagttttgtgcgtaatgtttgtatcggaagtatcgtgggcgataaaaaggggggaggattaagatataaaggggggagagaggttacggggagttagtgttttagaggaggtatagaaaagg

SEQ ID NO: 8782 - DNA, 502 bp, Artificial Sequence
  chemically treated genomic DNA (Homo sapiens) CpG-island No: 8782
ccttttctatacctcctctaaaacactaactccccgtaacctctctcccccctttatatcttaatcctcccccctttttatcgcccacgatacttccgatacaaacattacgcacaaaactctcccgcaacctccaccaacgtcaccaccactcccgcccacacccaaccttcacaaacaaccgaccacctccacgtccatattttcctcccacttaaccgaaattaatactacacaatcccaacgacgcgctatataaaccgttcccaaaccgcaacaaacgacacttaatccaaatcctaaaacaaatcacaacctttaacccccaacgctaaattaattctctcgcgatcaacaattacgccgaactaaaccatcccgttattcccgcgataatcaaccccgaaactaactacccccgccccccgcctaacctacgcataacccgcactacccaccgcctaaaacatatactcgacgcaacccacttcccaccgcctcg

SEQ ID NO: 8783 - DNA, 502 bp, Artificial Sequence
  chemically treated genomic DNA (Homo sapiens) CpG-island No: 8783
ttttttttatgttttttttggggtattaatttttcgtaattttttttttttttttgtattttagtttttttttttttttgtcgtttacggtattttcggtataagtattacgtataaagttttttcgtagtttttattagcgttattattattttcgtttatatttaatttttataagtagtcggttatttttacgtttatattttttttttatttaatcggggttaatgttatataattttagcggcgcgttatataagtcgtttttaagtcgtagtaaacggtatttagtttaagttttaaagtaggttatagtttttaatttttaacgttaggttagttttttcgcggttagtagttgcgtcgggttaaattatttcgttgttttcgcggtaattaatttcggggttggttgttttcgtttttcgtttggtttacgtatggttcgtattatttatcgtttggggtatatgttcggcgtaatttattttttatcgtttcg

SEQ ID NO: 8784 - DNA, 502 bp, Artificial Sequence
  chemically treated genomic DNA (Homo sapiens) CpG-island No: 8784
cgaaacgataaaaaataaattacgccgaacatataccccaaacgataaataatacgaaccatacgtaaaccaaacgaaaaacgaaaacaaccaaccccgaaattaattaccgcgaaaacaacgaaataatttaacccgacgcaactactaaccgcgaaaaaactaacctaacgttaaaaattaaaaactataacctactttaaaacttaaactaaataccgtttactacgacttaaaaacgacttatataacgcgccgctaaaattatataacattaaccccgattaaataaaaaaaaaatataaacgtaaaaataaccgactacttataaaaattaaatataaacgaaaataataataacgctaataaaaactacgaaaaaactttatacgtaatacttataccgaaaataccgtaaacgacaaaaaaaaaaaaaaactaaaatacaaaaaaaaaaaaaaaattacgaaaaattaataccccaaaaaaaacataaaaaaaa

SEQ ID NO: 8785 - DNA, 656 bp, Artificial Sequence
  chemically treated genomic DNA (Homo sapiens) CpG-island No: 8785
  unsure (572)
attggcggtatttgtttaagtttttacgattggtattgcgatttgttttttgcgttttcgtaaatttggggcgagtaaattgacgtatcggaatttgttgattggtataattttagttatattatcgtttgggggttaaacgtgtcgtagacgcgtatttcggatgtttatttttttattgaagtgcgttataaagggattaaaattgttgtcgttatattagattacgttgaaatcgttaaattgtgcgatttgtggttggtatcgaaatagggtatcgatgcggtaatggcgttggcgatgggttacgtagttttgcgtgaattttatttcgataatttaagttagtattttatttattatgtgcgtcgttatatcgatatgtcgatgttggtgatgttggaagaacgcgacggttattacgttgtaggtcgtatgttgcgcgttgttgatttggttgatgcgttgggttaggaaaataattcggaatggaaaattgtcgtttttaatattaatggcgatatggttgcgtcgaacggttttattggttttcgttggggcgagaagggtanatggtattttgagtagttagcggtaatattggcgaagaaatcgagttgtaattgatttgttgggtagttaggatgagatcgttg

SEQ ID NO: 8786 - DNA, 656 bp, Artificial Sequence
  chemically treated genomic DNA (Homo sapiens) CpG-island No: 8786
  unsure (85)
caacgatctcatcctaactacccaacaaatcaattacaactcgatttcttcgccaatattaccgctaactactcaaaataccatntacccttctcgccccaacgaaaaccaataaaaccgttcgacgcaaccatatcgccattaatattaaaaacgacaattttccattccgaattattttcctaacccaacgcatcaaccaaatcaacaacgcgcaacatacgacctacaacgtaataaccgtcgcgttcttccaacatcaccaacatcgacatatcgatataacgacgcacataataaataaaatactaacttaaattatcgaaataaaattcacgcaaaactacgtaacccatcgccaacgccattaccgcatcgataccctatttcgataccaaccacaaatcgcacaatttaacgatttcaacgtaatctaatataacgacaacaattttaatccctttataacgcacttcaataaaaaaataaacatccgaaatacgcgtctacgacacgtttaacccccaaacgataatataactaaaattataccaatcaacaaattccgatacgtcaatttactcgccccaaatttacgaaaacgcaaaaaacaaatcgcaataccaatcgtaaaaacttaaacaaataccgccaat

SEQ ID NO: 8787 - DNA, 656 bp, Artificial Sequence
  chemically treated genomic DNA (Homo sapiens) CpG-island No: 8787
  unsure (85)
tagcgattttattttggttatttagtagattagttgtagttcggttttttcgttagtattgtcgttggttgtttaagatgttatntgtttttttcgttttagcggaagttaatagaatcgttcggcgtaattatgtcgttattggtattaaaggcgatagttttttatttcggattgtttttttggtttagcgtattaattagattagtagcgcgtagtatacgatttgtagcgtagtaatcgtcgcgtttttttagtattattagtatcggtatgtcggtgtagcgacgtatatagtgggtgaaatattggtttgggttgtcgaggtggaatttacgtagaattacgtggtttatcgttagcgttattgtcgtatcggtgttttgtttcggtgttagttatagatcgtatagtttggcgattttagcgtagtttggtgtgacggtaatagttttggtttttttgtaacgtattttagtaaagaagtgagtattcggggtacgcgtttgcggtacgtttgatttttaggcgatgatgtagttggagttgtattagttagtagatttcggtacgttagtttgttcgttttaggtttgcggagacgtaggaggtaagtcgtagtattagtcgtagaagtttaagtaagtatcgttaat

SEQ ID NO: 8788 - DNA, 656 bp, Artificial Sequence
  chemically treated genomic DNA (Homo sapiens) CpG-island No: 8788
  unsure (572)
attaacgatacttacttaaacttctacgactaatactacgacttacctcctacgtctccgcaaacctaaaacgaacaaactaacgtaccgaaatctactaactaatacaactccaactacatcatcgcctaaaaatcaaacgtaccgcaaacgcgtaccccgaatactcacttctttactaaaatacgttacaaaaaaaccaaaactattaccgtcacaccaaactacgctaaaatcgccaaactatacgatctataactaacaccgaaacaaaacaccgatacgacaataacgctaacgataaaccacgtaattctacgtaaattccacctcgacaacccaaaccaatatttcacccactatatacgtcgctacaccgacataccgatactaataatactaaaaaaacgcgacgattactacgctacaaatcgtatactacgcgctactaatctaattaatacgctaaaccaaaaaaacaatccgaaataaaaaactatcgcctttaataccaataacgacataattacgccgaacgattctattaacttccgctaaaacgaaaaaaacanataacatcttaaacaaccaacgacaatactaacgaaaaaaccgaactacaactaatctactaaataaccaaaataaaatcgcta

SEQ ID NO: 8789 - DNA, 543 bp, Artificial Sequence
  chemically treated genomic DNA (Homo sapiens) CpG-island No: 8789
ttagtaatttatggcgttatgttcgcgcggtaacggtaatagaaattagttagtatggtaattttggtttttgtttcgttaagtcggataataatggcggtgttgtgatttcgtttcgaaagatatgtttttcgagttgatgaaatttcggtcggaaaacgcggtaagaatgcggatattaagcgtatattcgataaagagggtgagtagatgttggcggtcgtaggtaaaaatcgtatgttattttcgatattttaggtaagttttgggatacgtcgtagttagtcgttgagttggaacgttggaagttggatggtcgcgacgttagtttattgattggcgggtttgaagggttgtcgtttgtttgtaaagcggcggttgagtagagttggtcgttgtcggcgtttatttttttttattcgttggttcgcgtgttggtcgtagagagtttgtatcgggcgtggagtattattattaattatttttattatcgtgagtgataagggagttttgagtagaaaacgtagcggatgaaattataga

SEQ ID NO: 8790 - DNA, 543 bp, Artificial Sequence
  chemically treated genomic DNA (Homo sapiens) CpG-island No: 8790
tctataatttcatccgctacgttttctactcaaaactcccttatcactcacgataataaaaataattaataataatactccacgcccgatacaaactctctacgaccaacacgcgaaccaacgaataaaaaaaaataaacgccgacaacgaccaactctactcaaccgccgctttacaaacaaacgacaacccttcaaacccgccaatcaataaactaacgtcgcgaccatccaacttccaacgttccaactcaacgactaactacgacgtatcccaaaacttacctaaaatatcgaaaataacatacgatttttacctacgaccgccaacatctactcaccctctttatcgaatatacgcttaatatccgcattcttaccgcgttttccgaccgaaatttcatcaactcgaaaaacatatctttcgaaacgaaatcacaacaccgccattattatccgacttaacgaaacaaaaaccaaaattaccatactaactaatttctattaccgttaccgcgcgaacataacgccataaattactaa

SEQ ID NO: 8791 - DNA, 543 bp, Artificial Sequence
  chemically treated genomic DNA (Homo sapiens) CpG-island No: 8791
tttgtagttttattcgttgcgttttttatttaaagtttttttattatttacggtgataaggatggttggtggtgatgttttacgttcggtatagattttttgcgattagtacgcgaattagcggatgggggagggtaagcgtcgatagcgattagttttgtttagtcgtcgttttataggtaggcgataattttttaggttcgttaattagtagattgacgtcgcgattatttagtttttagcgttttagtttagcggttaattgcggcgtattttagggtttgtttggaatatcgagggtgatatgcggtttttgtttgcggtcgttaatatttgtttattttttttgtcgagtatgcgtttgatgttcgtatttttgtcgcgtttttcggtcggaattttattagttcgaagggtatatttttcggaacggagttatagtatcgttattattattcggtttaacggaataggagttagggttattatattggttgatttttgttgtcgttgtcgcgcgaatataacgttatgggttattgg

SEQ ID NO: 8792 - DNA, 543 bp, Artificial Sequence
  chemically treated genomic DNA (Homo sapiens) CpG-island No: 8792
ccaataacccataacgttatattcgcgcgacaacgacaacaaaaatcaaccaatataataaccctaactcctattccgttaaaccgaataataataacgatactataactccgttccgaaaaatatacccttcgaactaataaaattccgaccgaaaaacgcgacaaaaatacgaacatcaaacgcatactcgacaaaaaaaataaacaaatattaacgaccgcaaacaaaaaccgcatatcaccctcgatattccaaacaaaccctaaaatacgccgcaattaaccgctaaactaaaacgctaaaaactaaataatcgcgacgtcaatctactaattaacgaacctaaaaaattatcgcctacctataaaacgacgactaaacaaaactaatcgctatcgacgcttaccctcccccatccgctaattcgcgtactaatcgcaaaaaatctataccgaacgtaaaacatcaccaccaaccatccttatcaccgtaaataataaaaaaactttaaataaaaaacgcaacgaataaaactacaaa

SEQ ID NO: 8793 - DNA, 500 bp, Artificial Sequence
  chemically treated genomic DNA (Homo sapiens) CpG-island No: 8793
cgttaagaaagatgcgatggtgtcgatgggcggtttgttgtgtatgaaagacgatagtttttttgatgtgtatatcgagtgtagaattttttgcgtggtgtaggaaggtttttcgatatatggcggtttggaaggaagcgcgatggattttttggcggtaggtttgtatgacggtatgaatttcgattggttggtttatttttacgcgtaggtatagtatttggtcgatggtttggaagagattggcgttgtttgttagtaggcgggcggttacgtcgtattcgttgatgtcggtaaattgttgtcgtatatttcggtagattagttttcggtataggcgttggtttgcgagttgtataaagtcgtcggtattcgtgcggtagaaattggtttttttttgttaggtcgcgattcgaaaatcggtaaataattgttatgttcggttgaattgttgcgtttaattatttcgcgcgtaatatatatttaaatatatatggatt

SEQ ID NO: 8794 - DNA, 500 bp, Artificial Sequence
  chemically treated genomic DNA (Homo sapiens) CpG-island No: 8794
aatccatatatatttaaatatatattacgcgcgaaataattaaacgcaacaattcaaccgaacataacaattatttaccgattttcgaatcgcgacctaacaaaaaaaaaccaatttctaccgcacgaataccgacgactttatacaactcgcaaaccaacgcctataccgaaaactaatctaccgaaatatacgacaacaatttaccgacatcaacgaatacgacgtaaccgcccgcctactaacaaacaacgccaatctcttccaaaccatcgaccaaatactatacctacgcgtaaaaataaaccaaccaatcgaaattcataccgtcatacaaacctaccgccaaaaaatccatcgcgcttccttccaaaccgccatatatcgaaaaaccttcctacaccacgcaaaaaattctacactcgatatacacatcaaaaaaactatcgtctttcatacacaacaaaccgcccatcgacaccatcgcatctttcttaacg

SEQ ID NO: 8795 - DNA, 500 bp, Artificial Sequence
  chemically treated genomic DNA (Homo sapiens) CpG-island No: 8795
agtttatatgtgtttgagtatatgttgcgcgcggaatggttaaacgtagtagtttagtcgggtatggtagttgtttatcggttttcggatcgcggtttaataggaaagagttaatttttatcgtacggatatcggcgattttatatagttcgtaggttagcgtttgtgtcgggaattggtttgtcgggatatgcggtaatagtttatcggtattaacgaatgcggcgtgatcgttcgtttgttggtagataacgttaattttttttagattatcgattagatattgtatttgcgcgtagagataagttagttagtcgagatttatgtcgttatatagatttatcgttagaaaatttatcgcgtttttttttaggtcgttatatgtcgggaagtttttttgtattacgtaaagggttttgtattcggtgtatatattaaagaagttgtcgttttttatgtatagtaggtcgtttatcggtattatcgtattttttttggcg

SEQ ID NO: 8796 - DNA, 500 bp, Artificial Sequence
  chemically treated genomic DNA (Homo sapiens) CpG-island No: 8796
cgccaaaaaaaatacgataataccgataaacgacctactatacataaaaaacgacaacttctttaatatatacaccgaatacaaaaccctttacgtaatacaaaaaaacttcccgacatataacgacctaaaaaaaaacgcgataaattttctaacgataaatctatataacgacataaatctcgactaactaacttatctctacgcgcaaatacaatatctaatcgataatctaaaaaaaattaacgttatctaccaacaaacgaacgatcacgccgcattcgttaataccgataaactattaccgcatatcccgacaaaccaattcccgacacaaacgctaacctacgaactatataaaatcgccgatatccgtacgataaaaattaactctttcctattaaaccgcgatccgaaaaccgataaacaactaccatacccgactaaactactacgtttaaccattccgcgcgcaacatatactcaaacacatataaact

SEQ ID NO: 8797 - DNA, 543 bp, Artificial Sequence
  chemically treated genomic DNA (Homo sapiens) CpG-island No: 8797
  unsure (79, 161)
ttttggacgcgtttcgagggggttgtttatattcgcgcgcgggttttttcggggttcggcgggaggtttcgggagaggnaggtcgagggaattataggtttttgtgtcgcgtgtagtagtagttggcggcgtgaggattatatcggcgttagagtcgtttntttaaggttcggagatttttatttcgaatttttttttcgcgtttggttgtatcgggttgggtttttttcgcggatattcggggtttcggtcgggcgtttatttattcggagcgggattacgcgcgggtttcgtttgtagcgcggtgttcgcggggggcggttaggtcgagcggtatcgtttcgtatcggggcgcgggtcgggttcgggtgtaaacgcgcgtttcgtgtttttttcgtcgttcgcggggttttcgcgtttcgttatcggtttcgtttcgcgtcgcgtttttcgtttatgtagggttagattacgcgggtttgggggcgtaagcggattttttttcggttttggacgtcgggggtttttgtttcgttttttggg

SEQ ID NO: 8798 - DNA, 543 bp, Artificial Sequence
  chemically treated genomic DNA (Homo sapiens) CpG-island No: 8798
  unsure (383, 465)
cccaaaaaacgaaacaaaaacccccgacgtccaaaaccgaaaaaaaatccgcttacgcccccaaacccgcgtaatctaaccctacataaacgaaaaacgcgacgcgaaacgaaaccgataacgaaacgcgaaaaccccgcgaacgacgaaaaaaacacgaaacgcgcgtttacacccgaacccgacccgcgccccgatacgaaacgataccgctcgacctaaccgccccccgcgaacaccgcgctacaaacgaaacccgcgcgtaatcccgctccgaataaataaacgcccgaccgaaaccccgaatatccgcgaaaaaaacccaacccgatacaaccaaacgcgaaaaaaaaattcgaaataaaaatctccgaaccttaaanaaacgactctaacgccgatataatcctcacgccgccaactactactacacgcgacacaaaaacctataattccctcgacctncctctcccgaaacctcccgccgaaccccgaaaaaacccgcgcgcgaatataaacaaccccctcgaaacgcgtccaaaa

SEQ ID NO: 8799 - DNA, 543 bp, Artificial Sequence
  chemically treated genomic DNA (Homo sapiens) CpG-island No: 8799
  unsure (383, 465)
tttagggggcggagtagaagttttcggcgtttagggtcgggggagggttcgtttgcgtttttaggttcgcgtggtttggttttgtatgggcgggaggcgcggcgcggggcggggtcggtgacgggacgcggagatttcgcgggcggcgggaggggtacgaggcgcgcgtttgtattcgagttcggttcgcgtttcgatgcggagcgatgtcgttcggtttggtcgtttttcgcgagtatcgcgttgtagacgaagttcgcgcgtgatttcgtttcgggtaagtgggcgttcggtcggagtttcgggtgttcgcggggagagtttagttcggtgtagttagacgcggaagggaaattcggggtgaaagttttcggattttaggnagacggttttggcgtcggtgtggtttttacgtcgttagttgttgttgtacgcgatataaagatttgtggttttttcggtttntttttttcgggatttttcgtcgggtttcggggaagttcgcgcgcgggtgtggatagttttttcggagcgcgtttaggg

SEQ ID NO: 8800 - DNA, 543 bp, Artificial Sequence
  chemically treated genomic DNA (Homo sapiens) CpG-island No: 8800
  unsure (79, 161)
ccctaaacgcgctccgaaaaaactatccacacccgcgcgcgaacttccccgaaacccgacgaaaaatcccgaaaaaaanaaaccgaaaaaaccacaaatctttatatcgcgtacaacaacaactaacgacgtaaaaaccacaccgacgccaaaaccgtctncctaaaatccgaaaactttcaccccgaatttcccttccgcgtctaactacaccgaactaaactctccccgcgaacacccgaaactccgaccgaacgcccacttacccgaaacgaaatcacgcgcgaacttcgtctacaacgcgatactcgcgaaaaacgaccaaaccgaacgacatcgctccgcatcgaaacgcgaaccgaactcgaatacaaacgcgcgcctcgtacccctcccgccgcccgcgaaatctccgcgtcccgtcaccgaccccgccccgcgccgcgcctcccgcccatacaaaaccaaaccacgcgaacctaaaaacgcaaacgaaccctcccccgaccctaaacgccgaaaacttctactccgccccctaaa

SEQ ID NO: 8801 - DNA, 1006 bp, Artificial Sequence
  chemically treated genomic DNA (Homo sapiens) CpG-island No: 8801
  unsure (131..132, 135..136, 138..139, 149..150, 161, 170, 189, 192)
  unsure (198, 201, 212, 218, 223..224, 235, 240, 243, 247, 251, 259)
  unsure (269, 277, 280, 289, 296, 301, 309..310, 319, 333, 336..337)
  unsure (910, 935)
cggtttttcgcgtttcggggcgttttttggcggtagcggtagtagcgggtaacgcgcggagggtttagggggcgtataggggattttcgggtatatttagagaggcgggcgcggttttcgggcgggggcgnnatnngnntagttatttnnnggggagcggnagtttcgtntttttttggttcggcgggnttntacggnttngttttattaangtattngcggnnttaagtagggntaggnaangttngttnttcggaancgcggcgttngtcgcgtntgnaagtcgaangttcgangtttnttttcggnntttcggcgnttttcgtcgtcgtncgnnttattattattatcgtcgtcgttatcgttatttcgggaatttagggttgcggtagttgttgtcgcggttgtcgtcgtcgattgattgttgtggtaaatgaggtacgagtagggtgtagagtcgtcgttggggggcgcgtcggtcgtcgtcgtcgaggaggtcgtagtcgttgcggttgtcgcggttgtcgcggtagaggtcgcgttgttgagtttcgcggcggtcgcgggagtttggtagagattagggtggcggaagttatatagtagtttcggtcgagagtaggggtgcgagagggcgtcgaacgtgtttagtggtcggatggaagtagcgaagggcgacgaagtcgcggtcgtcgcgtttgaggttgtagtcgcggttcgtcgttcgtcgtgacgtttacgtgcgggtagtagtgtagcggtacgtgcgagtggaaggggtagggtaggttttcggtggcggtcgcgtgcgttattatgtaggtgtagaagttggggtcggttgggtgcggttaggatatggttaggcgttgtcgtttgttttttatgcgtcggttttggaattatattntgcggggagagacgcgtcgtagttntgggttagggagcgtttcgtgtttttagtttttgttttaggatttttgtttttttcggatttttgaatggt

SEQ ID NO: 8802 - DNA, 1006 bp, Artificial Sequence
  chemically treated genomic DNA (Homo sapiens) CpG-island No: 8802
  unsure (72, 97, 670..671, 674, 688, 697..698, 706, 711, 718, 727)
  unsure (730, 738, 748, 756, 760, 764, 767, 772, 783..784, 789, 795)
  unsure (806, 809, 815, 818, 837, 846, 856..857, 868..869, 871..872)
  unsure (875..)
accattcaaaaatccgaaaaaaacaaaaatcctaaaacaaaaactaaaaacacgaaacgctccctaacccanaactacgacgcgtctctccccgcanaatataattccaaaaccgacgcataaaaaacaaacgacaacgcctaaccatatcctaaccgcacccaaccgaccccaacttctacacctacataataacgcacgcgaccgccaccgaaaacctaccctaccccttccactcgcacgtaccgctacactactacccgcacgtaaacgtcacgacgaacgacgaaccgcgactacaacctcaaacgcgacgaccgcgacttcgtcgcccttcgctacttccatccgaccactaaacacgttcgacgccctctcgcacccctactctcgaccgaaactactatataacttccgccaccctaatctctaccaaactcccgcgaccgccgcgaaactcaacaacgcgacctctaccgcgacaaccgcgacaaccgcaacgactacgacctcctcgacgacgacgaccgacgcgccccccaacgacgactctacaccctactcgtacctcatttaccacaacaatcaatcgacgacgacaaccgcgacaacaactaccgcaaccctaaattcccgaaataacgataacgacgacgataataataataanncgnacgacgacgaaaancgccgaaannccgaaaanaaacntcgaacnttcgacttncanacgcgacnaacgccgcgnttccgaanaacnaacnttncctanccctacttaannccgcnaatacnttaataaaacnaanccgtanaancccgccgaaccaaaaaaanacgaaactnccgctccccnnnaaataactanncnnatnncgcccccgcccgaaaaccgcgcccgcctctctaaatatacccgaaaatcccctatacgccccctaaaccctccgcgcgttacccgctactaccgctaccgccaaaaaacgccccgaaacgcgaaaaaccg

SEQ ID NO: 8803 - DNA, 1006 bp, Artificial Sequence
  chemically treated genomic DNA (Homo sapiens) CpG-island No: 8803
  unsure (72, 97, 670..671, 674, 688, 697..698, 706, 711, 718, 727)
  unsure (730, 738, 748, 756, 760, 764, 767, 772, 783..784, 789, 795)
  unsure (806, 809, 815, 818, 837, 846, 856..857, 868..869, 871..872)
  unsure (875..)
gttatttagaggttcggaaggggtagaggttttgggataggagttgggaatacggggcgttttttaatttanggttgcggcgcgttttttttcgtanggtgtggttttagaatcggcgtatgaaggataagcggtagcgtttggttatgttttggtcgtatttagtcgattttagtttttatatttatatgatgacgtacgcggtcgttatcggaagtttgttttattttttttattcgtacgtgtcgttgtattattattcgtacgtgggcgttacggcgggcggcgggtcgcggttgtagttttaggcgcggcggtcgcggtttcgtcgtttttcgttatttttattcggttattggatacgttcggcgttttttcgtatttttattttcggtcggagttgttgtgtagttttcgttattttggtttttattaggttttcgcggtcgtcgcggggtttaatagcgcggtttttgtcgcggtagtcgcggtagtcgtagcggttgcggttttttcggcggcggcggtcggcgcgttttttagcggcggttttgtattttgttcgtgttttatttgttatagtagttagtcggcggcggtagtcgcggtagtagttgtcgtagttttgggttttcggggtggcggtggcggcggcggtggtggtggtggnncgngcggcggcgggggncgtcggggnntcgggggnaggtntcggatnttcggtttntangcgcggtnggcgtcgcgntttcgagnagtnggtnttntttgnttttatttggnntcgtnggtgtnttagtaagatnggntcgtgnagnttcgtcggattaagagggnacgaggttntcgttttttnnnagataattanntnngtnncgttttcgttcgggggtcgcgttcgtttttttgagtgtgttcgggagttttttgtgcgttttttgagtttttcgcgcgttgttcgttgttgtcgttgtcgttagggggcgtttcggggcgcgggaggtcg

SEQ ID NO: 8804 - DNA, 1006 bp, Artificial Sequence
  chemically treated genomic DNA (Homo sapiens) CpG-island No: 8804
  unsure (131..132, 135..136, 138..139, 149..150, 161, 170, 189, 192)
  unsure (198, 201, 212, 218, 223..224, 235, 240, 243, 247, 251, 259)
  unsure (269, 277, 280, 289, 296, 301, 309..310, 319, 333, 336..337)
  unsure (910, 935)
cgacctcccgcgccccgaaacgccccctaacgacaacgacaacaacgaacaacgcgcgaaaaactcaaaaaacgcacaaaaaactcccgaacacactcaaaaaaacgaacgcgacccccgaacgaaaacgnnacnnanntaattatctnnnaaaaaacganaacctcgtnccctcttaatccgacgaanctncacganccnatcttactaanacaccnacgannccaaataaaancaaanaanaccnactnctcgaaancgcgacgccnaccgcgcntanaaaccgaanatccganacctncccccgannccccgacgncccccgccgccgcncgnnccaccaccaccaccgccgccgccaccgccaccccgaaaacccaaaactacgacaactactaccgcgactaccgccgccgactaactactataacaaataaaacacgaacaaaatacaaaaccgccgctaaaaaacgcgccgaccgccgccgccgaaaaaaccgcaaccgctacgactaccgcgactaccgcgacaaaaaccgcgctattaaaccccgcgacgaccgcgaaaacctaataaaaaccaaaataacgaaaactacacaacaactccgaccgaaaataaaaatacgaaaaaacgccgaacgtatccaataaccgaataaaaataacgaaaaacgacgaaaccgcgaccgccgcgcctaaaactacaaccgcgacccgccgcccgccgtaacgcccacgtacgaataataatacaacgacacgtacgaataaaaaaaataaaacaaacttccgataacgaccgcgtacgtcatcatataaatataaaaactaaaatcgactaaatacgaccaaaacataaccaaacgctaccgcttatccttcatacgccgattctaaaaccacaccntacgaaaaaaaacgcgccgcaaccntaaattaaaaaacgccccgtattcccaactcctatcccaaaacctctaccccttccgaacctctaaataac

SEQ ID NO: 8805 - DNA, 755 bp, Artificial Sequence
  chemically treated genomic DNA (Homo sapiens) CpG-island No: 8805
  unsure (152, 229, 474, 592)
attcgtattttcgcggtttcggggtatacggagtttttggtagtgcgtttttatgggttttttttaaggtcggcggaggtatttcgggtcgggcgcggcgtttcgttcgtcggtcgtagcgattgaattgcgcgcggattttttcgcggggntttttcgttttcgttacgttgatttttcgtgtagtgttgtggtgcgaaaatgtttcgtcggtgcgtatcgggtcggntagtttcggcggcgggggcgagattggcgggaggggggcgcggggggggcgcggtaagaggtggcggcgggtagagggtgtttttttttttttttttttagagtcggggtttgtaaatcgaggttagagtgttttcgtgggtcgagcgtattttttttttgttcgggtgcgtttagttattggtgtttgagaggaaatagtggaggtagcggggtaggtcgtttggggcgtcggcgattatattngcggtcgagtcggggcgcgtcgggaaaggtcgggagggcggcggcgcgcgggggttgggcgaagtttcgcgattcgcgagggaggtcgcgcgaagtcgatgcggcgggtcgtaagagntcgggtatgatttttttagtagtagatttttcgcggtcgtcggttcgtagaagtaatttataagttttcggcggaaagattaaaaataattttttttcgaaattcggaggagagaaatcgttttatagtttttaaggtattttcgaaaaatgtagggtagtat

SEQ ID NO: 8806 - DNA, 755 bp, Artificial Sequence
  chemically treated genomic DNA (Homo sapiens) CpG-island No: 8806
  unsure (164, 282, 527, 604)
atactaccctacatttttcgaaaataccttaaaaactataaaacgatttctctcctccgaatttcgaaaaaaaattatttttaatctttccgccgaaaacttataaattacttctacgaaccgacgaccgcgaaaaatctactactaaaaaaatcatacccganctcttacgacccgccgcatcgacttcgcgcgacctccctcgcgaatcgcgaaacttcgcccaacccccgcgcgccgccgccctcccgacctttcccgacgcgccccgactcgaccgcnaatataatcgccgacgccccaaacgacctaccccgctacctccactatttcctctcaaacaccaataactaaacgcacccgaacaaaaaaaaaatacgctcgacccacgaaaacactctaacctcgatttacaaaccccgactctaaaaaaaaaaaaaaaaaaacaccctctacccgccgccacctcttaccgcgccccccccgcgcccccctcccgccaatctcgcccccgccgccgaaactanccgacccgatacgcaccgacgaaacattttcgcaccacaacactacacgaaaaatcaacgtaacgaaaacgaaaaanccccgcgaaaaaatccgcgcgcaattcaatcgctacgaccgacgaacgaaacgccgcgcccgacccgaaatacctccgccgaccttaaaaaaaacccataaaaacgcactaccaaaaactccgtataccccgaaaccgcgaaaatacgaat

SEQ ID NO: 8807 - DNA, 755 bp, Artificial Sequence
  chemically treated genomic DNA (Homo sapiens) CpG-island No: 8807
  unsure (164, 282, 527, 604)
gtgttgttttgtatttttcgggggtgttttgggggttgtggggcggtttttttttttcgggtttcgggggggggttgtttttaattttttcgtcgggggtttgtgggttgtttttgcgggtcggcggtcgcggggggtttgttattaggggggttatgttcggntttttgcggttcgtcgtatcggtttcgcgcggtttttttcgcgggtcgcggggtttcgtttagttttcgcgcgtcgtcgttttttcggtttttttcggcgcgtttcggttcggtcgtnaatataatcgtcgacgttttaggcgatttgtttcgttgtttttattgtttttttttaggtattagtgattgagcgtattcggataagaaaaaagtgcgttcggtttacggggatattttggtttcggtttataaatttcggttttggagggaaaagaaaaaaaatattttttgttcgtcgttattttttatcgcgtttttttcgcgtttttttttcgttaatttcgttttcgtcgtcgaggttgntcgattcggtgcgtatcggcgaggtattttcgtattatagtattgtacggaaagttagcgtgacggggacgaggagntttcgcggagggattcgcgcgtagtttagtcgttacggtcgacggacggagcgtcgcgttcggttcgagatgttttcgtcggttttaaagggggtttataaagacgtattgttaagggtttcgtgtgtttcggggtcgcgggaatgcggat

SEQ ID NO: 8808 - DNA, 755 bp, Artificial Sequence
  chemically treated genomic DNA (Homo sapiens) CpG-island No: 8808
  unsure (152, 229, 474, 592)
atccgcattcccgcgaccccgaaacacacgaaacccttaacaatacgtctttataaaccccctttaaaaccgacgaaaacatctcgaaccgaacgcgacgctccgtccgtcgaccgtaacgactaaactacgcgcgaatccctccgcgaaanctcctcgtccccgtcacgctaactttccgtacaatactataatacgaaaatacctcgccgatacgcaccgaatcgancaacctcgacgacgaaaacgaaattaacgaaaaaaaaacgcgaaaaaaacgcgataaaaaataacgacgaacaaaaaatattttttttcttttccctccaaaaccgaaatttataaaccgaaaccaaaatatccccgtaaaccgaacgcacttttttcttatccgaatacgctcaatcactaatacctaaaaaaaaacaataaaaacaacgaaacaaatcgcctaaaacgtcgacgattatattnacgaccgaaccgaaacgcgccgaaaaaaaccgaaaaaacgacgacgcgcgaaaactaaacgaaaccccgcgacccgcgaaaaaaaccgcgcgaaaccgatacgacgaaccgcaaaaanccgaacataacccccctaataacaaaccccccgcgaccgccgacccgcaaaaacaacccacaaacccccgacgaaaaaattaaaaacaacccccccccgaaacccgaaaaaaaaaaaccgccccacaacccccaaaacacccccgaaaaatacaaaacaacac

SEQ ID NO: 8809 - DNA, 1005 bp, Artificial Sequence
  chemically treated genomic DNA (Homo sapiens) CpG-island No: 8809
  unsure (18, 32, 62..63, 352, 626, 633, 710)
tacgttttcggcgggggnttttcggggcgggnaggcggtttttcgatcggtttaggtttttnnttttaatttgaatttcgtttttataaacgtttcgcgatgagttaatttgttggagggtaggcgggtcggaggcgggaggtttatagagggagagagggttagaggaagagggcgggagcgagcgaattagagagaaaggagaggagggaggaggcgcgtcgcgttatggtgttttgcgcggggttagggttagggtcggggtcgggttaggtcgggttatgagtcgcgtcgggagttgggatatggacgggttgcgggtagacggcgggggcgtcggtggcgtttcggnttttttttttttttttatcggtggcggcggcggcggcgttaggttagtgtcgcggtttttttttcgcgtttgtgttcgtcgggacgtattcggggcgggcggcggcggcggtagcggcggttgcggcggcggcggcggtagttttcggttttgcgtatttcgggatttttgagcgtacgggttttttttcgtcgtcgtttttttttgtcgttgtagcggcgcgttcggaggtttttttagttaaagagtgtttagtatttacgtttgtagcggntcgttgntagcgttttcgagcgttttagcgttgggttacggttattatttcggtaacggttattatagttgtcgtatgtcgtancggcgtgggtttataatagaatgcgtttaagttaacgtcgaacgtttcgatgggaggttttttttcggagaatatatggacgtgttaggtttggcgagtagtagcgtatcggttaattaggtgttagcgcgatttaaggaggtatttttttattagggttatacgagtttttattagtacgtgttcggttatatcgatatggtgtttattttcggtttcggggagtttcggtacgaggtttatatttttatggaggggtattagttttggacgttggttaacgggtggaatagtt

SEQ ID NO: 8810 - DNA, 1005 bp, Artificial Sequence
  chemically treated genomic DNA (Homo sapiens) CpG-island No: 8810
  unsure (296, 373, 380, 654, 943..944, 974, 988)
aactattccacccgttaaccaacgtccaaaactaatacccctccataaaaatataaacctcgtaccgaaactccccgaaaccgaaaataaacaccatatcgatataaccgaacacgtactaataaaaactcgtataaccctaataaaaaaatacctccttaaatcgcgctaacacctaattaaccgatacgctactactcgccaaacctaacacgtccatatattctccgaaaaaaaacctcccatcgaaacgttcgacgttaacttaaacgcattctattataaacccacgccgntacgacatacgacaactataataaccgttaccgaaataataaccgtaacccaacgctaaaacgctcgaaaacgctancaacganccgctacaaacgtaaatactaaacactctttaactaaaaaaacctccgaacgcgccgctacaacgacaaaaaaaaacgacgacgaaaaaaaacccgtacgctcaaaaatcccgaaatacgcaaaaccgaaaactaccgccgccgccgccgcaaccgccgctaccgccgccgccgcccgccccgaatacgtcccgacgaacacaaacgcgaaaaaaaaaccgcgacactaacctaacgccgccgccgccgccaccgataaaaaaaaaaaaaaaanccgaaacgccaccgacgcccccgccgtctacccgcaacccgtccatatcccaactcccgacgcgactcataacccgacctaacccgaccccgaccctaaccctaaccccgcgcaaaacaccataacgcgacgcgcctcctccctcctctcctttctctctaattcgctcgctcccgccctcttcctctaaccctctctccctctataaacctcccgcctccgacccgcctaccctccaacaaattaactcatcgcgaaacgtttataaaaacgaaattcaaattaaaannaaaaacctaaaccgatcgaaaaaccgcctncccgccccgaaaancccccgccgaaaacgta

SEQ ID NO: 8811 - DNA, 1005 bp, Artificial Sequence
  chemically treated genomic DNA (Homo sapiens) CpG-island No: 8811
  unsure (296, 373, 380, 654, 943..944, 974, 988)
ggttgttttattcgttagttagcgtttaggattggtatttttttatggagatgtaggtttcgtgtcgaggtttttcggagtcgaaagtggatattatgtcgatatagtcgggtacgtgttggtaagggttcgtatagttttggtagaaggatatttttttgggtcgcgttggtatttggttggtcggtacgttgttgttcgttaggtttgatacgtttatgtatttttcgggggaaagttttttatcgaggcgttcggcgttgatttgagcgtattttgttgtaagtttacgtcgntgcgatatacggtagttgtagtagtcgttgtcgaagtggtagtcgtagtttagcgttggagcgttcgggggcgttgntagcggntcgttgtaggcgtgggtgttgggtattttttggttgggggagttttcgggcgcgtcgttataacggtagaagaggacgacgacgaggaagagttcgtgcgtttagaggtttcggggtacgtaaagtcggaggttgtcgtcgtcgtcgtcgtagtcgtcgttgtcgtcgtcgtcgttcgtttcgaatgcgtttcggcgaatataggcgcggagagaaagtcgcggtattggtttgacgtcgtcgtcgtcgttatcgatgaggaggaggaagaggntcggggcgttatcggcgttttcgtcgtttgttcgtagttcgtttatgttttagttttcggcgcggtttatggttcggtttggttcggtttcggttttggttttggtttcgcgtaggatattatggcgcggcgcgttttttttttttttttttttttttttggttcgttcgttttcgttttttttttttagttttttttttttttgtgagtttttcgttttcggttcgtttgttttttaataggttagtttatcgcgggacgtttataaaaacgaagtttaggttggganngggggtttgggtcggtcggggggtcgtttnttcgtttcgagggnttttcgtcgggggcgtg

SEQ ID NO: 8812 - DNA, 1005 bp, Artificial Sequence
  chemically treated genomic DNA (Homo sapiens) CpG-island No: 8812
  unsure (18, 32, 62..63, 352, 626, 633, 710)
cacgcccccgacgaaaanccctcgaaacgaanaaacgaccccccgaccgacccaaacccccnntcccaacctaaacttcgtttttataaacgtcccgcgataaactaacctattaaaaaacaaacgaaccgaaaacgaaaaactcacaaaaaaaaaaaaaactaaaaaaaaaaaacgaaaacgaacgaaccaaaaaaaaaaaaaaaaaaaaaaaaaacgcgccgcgccataatatcctacgcgaaaccaaaaccaaaaccgaaaccgaaccaaaccgaaccataaaccgcgccgaaaactaaaacataaacgaactacgaacaaacgacgaaaacgccgataacgccccgancctcttcctcctcctcatcgataacgacgacgacgacgtcaaaccaataccgcgactttctctccgcgcctatattcgccgaaacgcattcgaaacgaacgacgacgacgacaacgacgactacgacgacgacgacgacaacctccgactttacgtaccccgaaacctctaaacgcacgaactcttcctcgtcgtcgtcctcttctaccgttataacgacgcgcccgaaaactcccccaaccaaaaaatacccaacacccacgcctacaacganccgctancaacgcccccgaacgctccaacgctaaactacgactaccacttcgacaacgactactacaactaccgtatatcgcancgacgtaaacttacaacaaaatacgctcaaatcaacgccgaacgcctcgataaaaaactttcccccgaaaaatacataaacgtatcaaacctaacgaacaacaacgtaccgaccaaccaaataccaacgcgacccaaaaaaatatccttctaccaaaactatacgaacccttaccaacacgtacccgactatatcgacataatatccactttcgactccgaaaaacctcgacacgaaacctacatctccataaaaaaataccaatcctaaacgctaactaacgaataaaacaacc

SEQ ID NO: 8813 - DNA, 613 bp, Artificial Sequence
  chemically treated genomic DNA (Homo sapiens) CpG-island No: 8813
  unsure (118, 134..135, 404)
ttttgtcgcgagttcgggttggcggcggtcgttatagatgcgttagtttgggagttttcggtagtcgtttttgagacgagtggtgggtcgagagatttgtgtaggtgggatgagggtncgtaaggtttatggtnnggtggttgtttggaatttgcgcggcgtaattgtagtttacgttggtcgacgacgggtgcgagaggtggtttaggttgaagataggttcggacgcgggcgttatggattcgacgaagttgtcgtttacgtatatcgggttgttttgtaagttggcgttggcgaagtcgtcgtcgttgttcgttatgggatggggttcgaatttcggcgttgcgtagcgtttttgttgtggtaggtagttgttgagtggcgtcgtgtaggcggttaggttngtatatattgggttgtgatttggcgaaagtaggcggcgagggcgcgtcgtaggttaggtcgggtattggcggtagttggtcggagtaggttacgtggttagcggcgtcgtcgagcggtgggttgcgtttaggggattggttagtcggcgagtgtaggatgtttttggttttttggttttttttgtattttatgcgtcggttttggaatt

SEQ ID NO: 8814 - DNA, 613 bp, Artificial Sequence
  chemically treated genomic DNA (Homo sapiens) CpG-island No: 8814
  unsure (210, 479..480, 496)
aattccaaaaccgacgcataaaatacaaaaaaaaccaaaaaaccaaaaacatcctacactcgccgactaaccaatcccctaaacgcaacccaccgctcgacgacgccgctaaccacgtaacctactccgaccaactaccgccaatacccgacctaacctacgacgcgccctcgccgcctactttcgccaaatcacaacccaatatatacnaacctaaccgcctacacgacgccactcaacaactacctaccacaacaaaaacgctacgcaacgccgaaattcgaaccccatcccataacgaacaacgacgacgacttcgccaacgccaacttacaaaacaacccgatatacgtaaacgacaacttcgtcgaatccataacgcccgcgtccgaacctatcttcaacctaaaccacctctcgcacccgtcgtcgaccaacgtaaactacaattacgccgcgcaaattccaaacaaccaccnnaccataaaccttacgnaccctcatcccacctacacaaatctctcgacccaccactcgtctcaaaaacgactaccgaaaactcccaaactaacgcatctataacgaccgccgccaacccgaactcgcgacaaaa

SEQ ID NO: 8815 - DNA, 613 bp, Artificial Sequence
  chemically treated genomic DNA (Homo sapiens) CpG-island No: 8815
  unsure (210, 479..480, 496)
ggttttagaatcggcgtatgaagtataagaaggattagaaggttaagggtattttgtattcgtcggttagttagttttttgagcgtagtttatcgttcggcggcgtcgttggttacgtggtttatttcggttagttgtcgttagtgttcggtttggtttacgacgcgttttcgtcgtttgttttcgttaaattatagtttaatatgtatnggtttggtcgtttatacggcgttatttagtagttgtttgttataatagaagcgttacgtagcgtcggagttcgagttttattttatggcgagtaacggcggcggtttcgttagcgttaatttgtagggtagttcggtgtacgtgggcggtaatttcgtcgagtttatggcgttcgcgttcgggtttgtttttaatttgggttatttttcgtattcgtcgtcggttagcgtggattatagttgcgtcgcgtagattttaggtaattattnnattatggattttgcgnatttttattttatttatatagatttttcggtttattattcgttttagggacgattgtcggaggtttttaaattgacgtatttgtagcggtcgtcgttagttcgaattcgcggtaaaa

SEQ ID NO: 8816 - DNA, 613 bp, Artificial Sequence
  chemically treated genomic DNA (Homo sapiens) CpG-island No: 8816
  unsure (118, 134..135, 404)
ttttaccgcgaattcgaactaacgacgaccgctacaaatacgtcaatttaaaaacctccgacaatcgtccctaaaacgaataataaaccgaaaaatctatataaataaaataaaaatncgcaaaatccataatnnaataattacctaaaatctacgcgacgcaactataatccacgctaaccgacgacgaatacgaaaaataacccaaattaaaaacaaacccgaacgcgaacgccataaactcgacgaaattaccgcccacgtacaccgaactaccctacaaattaacgctaacgaaaccgccgccgttactcgccataaaataaaactcgaactccgacgctacgtaacgcttctattataacaaacaactactaaataacgccgtataaacgaccaaaccnatacatattaaactataatttaacgaaaacaaacgacgaaaacgcgtcgtaaaccaaaccgaacactaacgacaactaaccgaaataaaccacgtaaccaacgacgccgccgaacgataaactacgctcaaaaaactaactaaccgacgaatacaaaatacccttaaccttctaatccttcttatacttcatacgccgattctaaaacc

SEQ ID NO: 8817 - DNA, 541 bp, Artificial Sequence
  chemically treated genomic DNA (Homo sapiens) CpG-island No: 8817
  unsure (359)
cgggaagtcgggtagcggttttatttagggagcgtacgtagcggtcgggttcggaggtagaggcggttaggggcggcgggggaacgtacgggtggtagaggtcgtttatcgtcgtcgttgtcgggggttgggagggtatcgcggattacgaggtagagaatacggtcgatttgggggtaaaattatacgaggcgaattcggcggcggtggcggtcgggttattagttatatttgtaggtcggttttgcgcgtttggtttcggcggttcgaagcgcgtcgcgaatatttcgtcgtttttatggtttataagcgagtttacgtagtagttgttgagggtgttattggaagatattttgagngcgtttcgtatttttatttaatattatattgttcgtcgtcgagtagtttttcgtcggcgttcgagttatcgattagttcgtaggttgtagtttttattattggtcgcgcggtttacgtgattatatttattaatatcgggagtaaattagttcgttaaattgggggttgttgtgattaaaaa

SEQ ID NO: 8818 - DNA, 541 bp, Artificial Sequence
  chemically treated genomic DNA (Homo sapiens) CpG-island No: 8818
  unsure (183)
tttttaatcacaacaacccccaatttaacgaactaatttactcccgatattaataaatataatcacgtaaaccgcgcgaccaataataaaaactacaacctacgaactaatcgataactcgaacgccgacgaaaaactactcgacgacgaacaatataatattaaataaaaatacgaaacgcnctcaaaatatcttccaataacaccctcaacaactactacgtaaactcgcttataaaccataaaaacgacgaaatattcgcgacgcgcttcgaaccgccgaaaccaaacgcgcaaaaccgacctacaaatataactaataacccgaccgccaccgccgccgaattcgcctcgtataattttacccccaaatcgaccgtattctctacctcgtaatccgcgataccctcccaacccccgacaacgacgacgataaacgacctctaccacccgtacgttcccccgccgcccctaaccgcctctacctccgaacccgaccgctacgtacgctccctaaataaaaccgctacccgacttcccg

SEQ ID NO: 8819 - DNA, 541 bp, Artificial Sequence
  chemically treated genomic DNA (Homo sapiens) CpG-island No: 8819
  unsure (183)
tttttaattatagtagtttttagtttagcggattgatttattttcggtattggtaaatatgattacgtgggtcgcgcgattaatggtggaggttgtagtttgcgaattagtcggtggttcgggcgtcggcggggagttgttcggcggcggatagtgtaatgttgggtgggagtgcgggacgtntttaaaatgttttttagtggtatttttagtaattattacgtggattcgtttataggttatgagggcgacgaggtgttcgcggcgcgtttcgggtcgtcggggttaggcgcgtagggtcggtttgtaggtgtggttgatggttcggtcgttatcgtcgtcgagttcgtttcgtgtagttttgtttttagatcggtcgtgttttttgtttcgtggttcgcggtgtttttttagttttcggtagcggcggcgatgagcggtttttattattcgtacgttttttcgtcgtttttggtcgtttttgttttcgagttcggtcgttacgtgcgttttttggatggagtcgttgttcggtttttcg

SEQ ID NO: 8820 - DNA, 541 bp, Artificial Sequence
  chemically treated genomic DNA (Homo sapiens) CpG-island No: 8820
  unsure (359)
cgaaaaaccgaacaacgactccatccaaaaaacgcacgtaacgaccgaactcgaaaacaaaaacgaccaaaaacgacgaaaaaacgtacgaataataaaaaccgctcatcgccgccgctaccgaaaactaaaaaaacaccgcgaaccacgaaacaaaaaacacgaccgatctaaaaacaaaactacacgaaacgaactcgacgacgataacgaccgaaccatcaaccacacctacaaaccgaccctacgcgcctaaccccgacgacccgaaacgcgccgcgaacacctcgtcgccctcataacctataaacgaatccacgtaataattactaaaaataccactaaaaaacattttaaanacgtcccgcactcccacccaacattacactatccgccgccgaacaactccccgccgacgcccgaaccaccgactaattcgcaaactacaacctccaccattaatcgcgcgacccacgtaatcatatttaccaataccgaaaataaatcaatccgctaaactaaaaactactataattaaaaa

SEQ ID NO: 8821 - DNA, 1435 bp, Artificial Sequence
  chemically treated genomic DNA (Homo sapiens) CpG-island No: 8821
  unsure (126, 307, 385, 420, 436, 541, 571, 681, 701, 779, 985, 1045)
  unsure (1048, 1327, 1367, 1371)
cgaagagtagtttttatcggtcgcgcgttacgtttttatttaattttttttatgtcgcgacgtttatatttcgttttcgagggattagttttttttacgatttagagtagaagcggttcgtttcgnttgtatttacgggtttttatttaagcgtttagttttgtttttttttttttatttcgtttaatatttgttcgagagtaggcgttttgttttttcgtttcgtttttgtttaggtagttttcggtcgcgacggtttttttcggggttcgggggcgttgggcggcggttttgggttgttttggtntaatttggttgcggggtaggcgcgaggagcggcgcgtcgatcgggtcgagcggagaggtcgtttattggtcggttagncgttacgtggtcgttttcgtcggtatattaggttnattatttattttcggntttattcgttatgggttggagagggtagttcgggtagagagggttggcggagcggcgtaaacggcggtagttttgtttagtttttgttcggtttcgtatttcggntttcggtttgcgtttttagaaaggtggggnttcgaattatgagtttttatttggagtacgtgttatgtagtagtagcggcggggtcggcggcgacgtgtttagtttggtatttaagttttgtcgtttcgacgttcggttncgtggttttgtagttcgttnttttttttgggtaacggcgacggcgttttcgttagttgtttgtttttggtcgtcgttcgattttcgttttcgtttttnggtcgttttcgcgcggtcgttcgtatcgttttcggtcgcgttttagtacgcgtagtgtattttggagggggtttacgaatttggtgtcgtatttgtcgcggtagttgggggcgcggattacggttttttggggttcgggtcggcgtacgatttttcgggcgtgttggggcgggcggtcgacgacggcgggttttacgtttattatngttatttcggtcgttttttcgggcggcggtttttttttttttagcggttaggtggattancgncggttttcggcgaattcggttttttttcggtttgttttaaagcgttagtcgacggttattttggtgttttttagatcgtattttcggttttaggtatttattttaagttcgtttttttcgttttcggtttttttgtcgtttttagtacgttcgagtggatgaaagtgaagaggaatgtttttaagaaaggtaagttcgcgggttttggatggggttatttggggttggggacggagtttttttcgcggaaatgcgttgggagcgtggtgtcgttgtttnttttagatagcggtttgggttttgtggaggagacgcgttntttngggcgaattttatggagtttgtttcgagtatagattcggaaaatgtgttaggtattgagaaaat

SEQ ID NO: 8822 - DNA, 1435 bp, Artificial Sequence
  chemically treated genomic DNA (Homo sapiens) CpG-island No: 8822
  unsure (65, 69, 109, 388, 391, 451, 657, 735, 755, 865, 895, 1000)
  unsure (1016, 1051, 1129, 1310)
attttctcaatacctaacacattttccgaatctatactcgaaacaaactccataaaattcgcccnaaanaacgcgtctcctccacaaaacccaaaccgctatctaaaanaaacaacgacaccacgctcccaacgcatttccgcgaaaaaaactccgtccccaaccccaaataaccccatccaaaacccgcgaacttacctttcttaaaaacattcctcttcactttcatccactcgaacgtactaaaaacgacaaaaaaaccgaaaacgaaaaaaacgaacttaaaataaatacctaaaaccgaaaatacgatctaaaaaacaccaaaataaccgtcgactaacgctttaaaacaaaccgaaaaaaaaccgaattcgccgaaaaccgncgntaatccacctaaccgctaaaaaaaaaaaaaccgccgcccgaaaaaacgaccgaaataacnataataaacgtaaaacccgccgtcgtcgaccgcccgccccaacacgcccgaaaaatcgtacgccgacccgaaccccaaaaaaccgtaatccgcgcccccaactaccgcgacaaatacgacaccaaattcgtaaaccccctccaaaatacactacgcgtactaaaacgcgaccgaaaacgatacgaacgaccgcgcgaaaacgaccnaaaaacgaaaacgaaaatcgaacgacgaccaaaaacaaacaactaacgaaaacgccgtcgccgttacccaaaaaaaanaacgaactacaaaaccacgnaaccgaacgtcgaaacgacaaaacttaaataccaaactaaacacgtcgccgccgaccccgccgctactactacataacacgtactccaaataaaaactcataattcgaanccccacctttctaaaaacgcaaaccgaaanccgaaatacgaaaccgaacaaaaactaaacaaaactaccgccgtttacgccgctccgccaaccctctctacccgaactaccctctccaacccataacgaataaanccgaaaataaataatnaacctaatataccgacgaaaacgaccacgtaacgnctaaccgaccaataaacgacctctccgctcgacccgatcgacgcgccgctcctcgcgcctaccccgcaaccaaattanaccaaaacaacccaaaaccgccgcccaacgcccccgaaccccgaaaaaaaccgtcgcgaccgaaaactacctaaacaaaaacgaaacgaaaaaacaaaacgcctactctcgaacaaatattaaacgaaataaaaaaaaaaaaacaaaactaaacgcttaaataaaaacccgtaaatacaancgaaacgaaccgcttctactctaaatcgtaaaaaaaactaatccctcgaaaacgaaatataaacgtcgcgacataaaaaaaattaaataaaaacgtaacgcgcgaccgataaaaactactcttcg

SEQ ID NO: 8823 - DNA, 1435 bp, Artificial Sequence
  chemically treated genomic DNA (Homo sapiens) CpG-island No: 8823
  unsure (65, 69, 109, 388, 391, 451, 657, 735, 755, 865, 895, 1000)
  unsure (1016, 1051, 1129, 1310)
atttttttaatgtttggtatatttttcgaatttgtattcgaggtagattttatggaattcgtttngggnaacgcgttttttttataaaatttaaatcgttgtttggaanaggtagcgatattacgtttttagcgtattttcgcgggggaggtttcgtttttaattttaggtggttttatttaaggttcgcggatttattttttttagaggtatttttttttatttttatttattcgaacgtgttgaaggcggtagggaggtcggaggcgggagagacggatttggggtaggtgtttggggtcggggatgcggtttggaaagtattagggtggtcgtcggttgacgttttgagataagtcggaaaagggtcgggttcgtcgaaggtcgncgntaatttatttggtcgttgaggaggaaagagtcgtcgttcgagaagacggtcgaggtggtngtagtggacgtgagattcgtcgtcgtcggtcgttcgttttagtacgttcgggaagtcgtacgtcggttcggattttaggaagtcgtagttcgcgtttttagttgtcgcggtaggtgcggtattaggttcgtaggttttttttagggtgtattgcgcgtattggggcgcggtcggaggcggtacggacggtcgcgcgggggcggttngggggcgaaggcgagggtcgggcggcggttaggggtagatagttgacgaaggcgtcgtcgtcgttgtttagagggaanggcgggttgtagagttacgnggtcgggcgtcggagcggtagaatttgggtgttaagttgagtacgtcgtcgtcgatttcgtcgttgttgttgtatgatacgtattttaggtaggagtttatggttcgggnttttatttttttgagggcgtaggtcggggntcggagtacggagtcgggtagaggttgagtaggattgtcgtcgtttgcgtcgtttcgttagttttttttattcgagttgttttttttaatttatggcgagtgagntcggaggtaaatagtnggtttaatatatcggcgggggcggttacgtggcgnttggtcggttaatgggcggttttttcgttcggttcggtcggcgcgtcgtttttcgcgtttgtttcgtagttaagttangttaaagtagtttagggtcgtcgtttagcgttttcgagtttcgaggagagtcgtcgcgatcgggggttgtttgggtaagggcggggcgagagggtagaacgtttgttttcggataggtattgggcgaggtggggggagaaaggtaggattggacgtttgggtgagggttcgtggatgtagncggggcgagtcgtttttgttttggatcgtggggggggttagtttttcgagggcggagtgtgggcgtcgcggtatggaaaaggttaaatgggagcgtgacgcgcggtcggtggagattgtttttcg

SEQ ID NO: 8824 - DNA, 1435 bp, Artificial Sequence
  chemically treated genomic DNA (Homo sapiens) CpG-island No: 8824
  unsure (126, 307, 385, 420, 436, 541, 571, 681, 701, 779, 985, 1045)
  unsure (1048, 1327, 1367, 1371)
cgaaaaacaatctccaccgaccgcgcgtcacgctcccatttaaccttttccataccgcgacgcccacactccgccctcgaaaaactaaccccccccacgatccaaaacaaaaacgactcgccccgnctacatccacgaaccctcacccaaacgtccaatcctacctttctccccccacctcgcccaatacctatccgaaaacaaacgttctaccctctcgccccgcccttacccaaacaacccccgatcgcgacgactctcctcgaaactcgaaaacgctaaacgacgaccctaaactactttaacntaacttaactacgaaacaaacgcgaaaaacgacgcgccgaccgaaccgaacgaaaaaaccgcccattaaccgaccaancgccacgtaaccgcccccgccgatatattaaaccnactatttacctccganctcactcgccataaattaaaaaaaacaactcgaataaaaaaaactaacgaaacgacgcaaacgacgacaatcctactcaacctctacccgactccgtactccganccccgacctacgccctcaaaaaaataaaancccgaaccataaactcctacctaaaatacgtatcatacaacaacaacgacgaaatcgacgacgacgtactcaacttaacacccaaattctaccgctccgacgcccgaccncgtaactctacaacccgccnttccctctaaacaacgacgacgacgccttcgtcaactatctacccctaaccgccgcccgaccctcgccttcgcccccnaaccgcccccgcgcgaccgtccgtaccgcctccgaccgcgccccaatacgcgcaatacaccctaaaaaaaacctacgaacctaataccgcacctaccgcgacaactaaaaacgcgaactacgacttcctaaaatccgaaccgacgtacgacttcccgaacgtactaaaacgaacgaccgacgacgacgaatctcacgtccactacnaccacctcgaccgtcttctcgaacgacgactctttcctcctcaacgaccaaataaattancgncgaccttcgacgaacccgacccttttccgacttatctcaaaacgtcaaccgacgaccaccctaatactttccaaaccgcatccccgaccccaaacacctaccccaaatccgtctctcccgcctccgacctccctaccgccttcaacacgttcgaataaataaaaataaaaaaaaatacctctaaaaaaaataaatccgcgaaccttaaataaaaccacctaaaattaaaaacgaaacctcccccgcgaaaatacgctaaaaacgtaatatcgctacctnttccaaacaacgatttaaattttataaaaaaaacgcgttncccnaaacgaattccataaaatctacctcgaatacaaattcgaaaaatataccaaacattaaaaaaat

SEQ ID NO: 8825 - DNA, 813 bp, Artificial Sequence
  chemically treated genomic DNA (Homo sapiens) CpG-island No: 8825
tggcgaacggggtgggtggtgttggcgagggtggtgttggattggtggggttggggaggtgttgtgcggttcgggtggggcgcggttggggtagcgcgggtgtgagggtgcggcgggggtggcggttttgggcgtgggtgtagggtgggtgttggagttttgggtggtggaggtttcgcgagggatagcgacgcggaagggtgttgttggagtttggggtgggtgtgcgcgttttaggaggttggtgttgaggtttggcgtttcgcggggcggtgttgttgttgaggtcggtggcggtgttgggtcgggtgtggtttgtgtggcgcgtgttgtgtgatacgtgttttgttgtgcgcgcggtgtgggtgtggggtgtgtagtggtggtgtgcgttgttgcggggcgtgtgacgttttgtgtgtgcgggtgtgagcggaggtggagagcgtggggtgtcgcgtgtgtggcgcgggtgtgggttggtgtcgtggtttttgcggcgtgttgtgtggtggggcgtgtgagagtttcgtggggaggtcgcgttgcggggtggtgggagagagttgttggcgtggacgagtgtggtggtgcggcgcgattgtgtttttggggtgtgtggttgttggggggtgttggtgttggaggatgtcgttgggagtgcgtttgggcgtggaggtgtggtggtgggtcggggttgtgcgcgcggggtgtggtgtcggtgaggggtgagcgatgtgtcgtggtgtgggtgaacgatatagttattattagtgttttagtaattgtttttggtgttattattataaataa

SEQ ID NO: 8826 - DNA, 813 bp, Artificial Sequence
  chemically treated genomic DNA (Homo sapiens) CpG-island No: 8826
ttatttataataataacaccaaaaacaattactaaaacactaataataactatatcgttcacccacaccacgacacatcgctcacccctcaccgacaccacaccccgcgcgcacaaccccgacccaccaccacacctccacgcccaaacgcactcccaacgacatcctccaacaccaacaccccccaacaaccacacaccccaaaaacacaatcgcgccgcaccaccacactcgtccacgccaacaactctctcccaccaccccgcaacgcgacctccccacgaaactctcacacgccccaccacacaacacgccgcaaaaaccacgacaccaacccacacccgcgccacacacgcgacaccccacgctctccacctccgctcacacccgcacacacaaaacgtcacacgccccgcaacaacgcacaccaccactacacaccccacacccacaccgcgcgcacaacaaaacacgtatcacacaacacgcgccacacaaaccacacccgacccaacaccgccaccgacctcaacaacaacaccgccccgcgaaacgccaaacctcaacaccaacctcctaaaacgcgcacacccaccccaaactccaacaacacccttccgcgtcgctatccctcgcgaaacctccaccacccaaaactccaacacccaccctacacccacgcccaaaaccgccacccccgccgcaccctcacacccgcgctaccccaaccgcgccccacccgaaccgcacaacacctccccaaccccaccaatccaacaccaccctcgccaacaccacccaccccgttcgcca

SEQ ID NO: 8827 - DNA, 813 bp, Artificial Sequence
  chemically treated genomic DNA (Homo sapiens) CpG-island No: 8827
ttgtttgtggtggtagtattaaaagtagttattggagtattagtggtaattgtatcgtttatttatattacgatatatcgtttattttttatcgatattatatttcgcgcgtataatttcgatttattattatatttttacgtttaaacgtatttttaacgatattttttagtattagtattttttaatagttatatattttaagaatatagtcgcgtcgtattattatattcgtttacgttaatagtttttttttattatttcgtagcgcggtttttttacgaagtttttatacgttttattatataatacgtcgtagagattacgatattagtttatattcgcgttatatacgcggtattttacgttttttattttcgtttatattcgtatatataaggcgttatacgtttcgtagtaacgtatattattattatatattttatatttatatcgcgcgtataataaaatacgtgttatataatacgcgttatataagttatattcggtttaatatcgttatcgattttaataataatatcgtttcgcggaacgttagattttaatattaattttttaaaacgcgtatatttattttagattttaatagtattttttcgcgtcgttgtttttcgcgaaatttttattatttaaaattttaatatttattttatatttacgtttaaaatcgttattttcgtcgtatttttatattcgcgttattttaatcgcgttttattcgaatcgtatagtatttttttaattttattaatttaatattattttcgttaatattatttatttcgttcgtta

SEQ ID NO: 8828 - DNA, 813 bp, Artificial Sequence
  chemically treated genomic DNA (Homo sapiens) CpG-island No: 8828
taacgaacgaaataaataatattaacgaaaataatattaaattaataaaattaaaaaaatactatacgattcgaataaaacgcgattaaaataacgcgaatataaaaatacgacgaaaataacgattttaaacgtaaatataaaataaatattaaaattttaaataataaaaatttcgcgaaaaacaacgacgcgaaaaaatactattaaaatctaaaataaatatacgcgttttaaaaaattaatattaaaatctaacgttccgcgaaacgatattattattaaaatcgataacgatattaaaccgaatataacttatataacgcgtattatataacacgtattttattatacgcgcgatataaatataaaatatataataataatatacgttactacgaaacgtataacgccttatatatacgaatataaacgaaaataaaaaacgtaaaataccgcgtatataacgcgaatataaactaatatcgtaatctctacgacgtattatataataaaacgtataaaaacttcgtaaaaaaaccgcgctacgaaataataaaaaaaaactattaacgtaaacgaatataataatacgacgcgactatattcttaaaatatataactattaaaaaatactaatactaaaaaatatcgttaaaaatacgtttaaacgtaaaaatataataataaatcgaaattatacgcgcgaaatataatatcgataaaaaataaacgatatatcgtaatataaataaacgatacaattaccactaatactccaataactacttttaatactaccaccacaaacaa

SEQ ID NO: 8829 - DNA, 503 bp, Artificial Sequence
  chemically treated genomic DNA (Homo sapiens) CpG-island No: 8829
gttcgttcggtttttcgcgttttttcgtttttttttttgattttttttcgcgtcgttttttcgtcggttttttagttttttagttatcgtcgttttacgtagtcgtcgcgttcgtttttattttcgatttcgatttttaggtcggcgtcgtcgtttttatgtttttttgttttcgcgttttcgtttttatattttttgttttttttgttttattcggtatcgttttttcgttcgtttaggtttcgcgacgtttattggcgtttttttttcggttgtttgcgtttttcgtacgtgtttgttttttgtggattttttagtcgtttcgtttttcgtttgtcgcgttttcgttattcgtttttttcgttttcgttttttcgttgttcggttttcgcgttcgtttcgcgtattacgttttattttttgtttatacgtttaagttttttggtttttttatttttttttttgtttttattgtttttgttttcggttcgtttatatttttt

SEQ ID NO: 8830 - DNA, 503 bp, Artificial Sequence
  chemically treated genomic DNA (Homo sapiens) CpG-island No: 8830
aaaaaatataaacgaaccgaaaacaaaaacaataaaaacaaaaaaaaaaataaaaaaaccaaaaaacttaaacgtataaacaaaaaataaaacgtaatacgcgaaacgaacgcgaaaaccgaacaacgaaaaaacgaaaacgaaaaaaacgaataacgaaaacgcgacaaacgaaaaacgaaacgactaaaaaatccacaaaaaacaaacacgtacgaaaaacgcaaacaaccgaaaaaaaaacgccaataaacgtcgcgaaacctaaacgaacgaaaaaacgataccgaataaaacaaaaaaaacaaaaaatataaaaacgaaaacgcgaaaacaaaaaaacataaaaacgacgacgccgacctaaaaatcgaaatcgaaaataaaaacgaacgcgacgactacgtaaaacgacgataactaaaaaactaaaaaaccgacgaaaaaacgacgcgaaaaaaaatcaaaaaaaaaaacgaaaaaacgcgaaaaaccgaacgaac

SEQ ID NO: 8831 - DNA, 503 bp, Artificial Sequence
  chemically treated genomic DNA (Homo sapiens) CpG-island No: 8831
gaggagtgtgagcgagtcggaggtagaggtagtggggatagaggagggagtagaggagttagaggatttgggcgtatgagtaggaggtgagacgtagtgcgcgggacggacgcgagagtcgagtagcgagggagcggaggcgaggggagcgagtggcggaagcgcggtaagcgggagacggagcgattagagggtttatagaggatagatacgtgcgaggaacgtaggtagtcgaggagggagcgttagtgaacgtcgcggagtttgagcgagcgagaaggcgatgtcgagtggagtaggggggatagaggatgtaggggcgagagcgcgggagtagggaagtatgggggcggcggcgtcggtttgggggtcgaggtcgggggtgggggcgggcgcggcggttgcgtggggcggcggtggttggggggttggggggtcggcgggggggcggcgcgggggggggttaggggggggggcgggggggcgcggagggtcgggcgggt

SEQ ID NO: 8832 - DNA, 503 bp, Artificial Sequence
  chemically treated genomic DNA (Homo sapiens) CpG-island No: 8832
acccgcccgaccctccgcgcccccccgcccccccccctaacccccccccgcgccgcccccccgccgaccccccaaccccccaaccaccgccgccccacgcaaccgccgcgcccgcccccacccccgacctcgacccccaaaccgacgccgccgcccccatacttccctactcccgcgctctcgcccctacatcctctatcccccctactccactcgacatcgccttctcgctcgctcaaactccgcgacgttcactaacgctccctcctcgactacctacgttcctcgcacgtatctatcctctataaaccctctaatcgctccgtctcccgcttaccgcgcttccgccactcgctcccctcgcctccgctccctcgctactcgactctcgcgtccgtcccgcgcactacgtctcacctcctactcatacgcccaaatcctctaactcctctactccctcctctatccccactacctctacctccgactcgctcacactcctc

SEQ ID NO: 8833 - DNA, 804 bp, Artificial Sequence
  chemically treated genomic DNA (Homo sapiens) CpG-island No: 8833
agtaatatcgtcgtttataagatttatatttttatatttacgtaaatataattttattattcgatcgtatagttattagtatacgcgtatcggataatagatttattatacgtaatatatattatcgatttataagtatagataattatattatatttttacgtatatatttataatttttatatatcgattatataattttatattaaatattatttcgtataattataatatatagtatttttaatattatatatttatttacgatatatcggtttttttataaaacgtatatataatttataaattattatatagtacgtttattatatagattatcgtatatcgcgtatttatataatattatatattttacgacgagtaatattttttcgagatattataatacgttcgtatacgtattagattttttatagtttatttcgcgataacgcgttacgttatattatatataaatatattatacgttcgatatattttatatataatcgttaaatttagttattttcgtatataattttaagacgagattcgtacgtatttaatatcgtaattatatattttatatatttaaattttaaatcgttatttcgaaaaatttagtatagtaacgattaaataattatattaagttagatataaaagttacggatttaatcgatagttaaataattttgttatttaatttacgttatatattgattttatttttcgatatttcgttagaaatttatttatatttttattatgagataataaattagttagtttttatatttatta

SEQ ID NO: 8834 - DNA, 804 bp, Artificial Sequence
  chemically treated genomic DNA (Homo sapiens) CpG-island No: 8834
taataaatataaaaactaactaatttattatctcataataaaaatataaataaatttctaacgaaatatcgaaaaataaaatcaatatataacgtaaattaaataacaaaattatttaactatcgattaaatccgtaacttttatatctaacttaatataattatttaatcgttactatactaaatttttcgaaataacgatttaaaatttaaatatataaaatatataattacgatattaaatacgtacgaatctcgtcttaaaattatatacgaaaataactaaatttaacgattatatataaaatatatcgaacgtataatatatttatatataatataacgtaacgcgttatcgcgaaataaactataaaaaatctaatacgtatacgaacgtattataatatctcgaaaaaatattactcgtcgtaaaatatataatattatataaatacgcgatatacgataatctatataataaacgtactatataataatttataaattatatatacgttttataaaaaaaccgatatatcgtaaataaatatataatattaaaaatactatatattataattatacgaaataatatttaatataaaattatataatcgatatataaaaattataaatatatacgtaaaaatataatataattatctatacttataaatcgataatatatattacgtataataaatctattatccgatacgcgtatactaataactatacgatcgaataataaaattatatttacgtaaatataaaaatataaatcttataaacgacgatattact

SEQ ID NO: 8835 - DNA, 804 bp, Artificial Sequence
  chemically treated genomic DNA (Homo sapiens) CpG-island No: 8835
tggtgggtgtggaggttgattagtttgttgttttatgatggaggtgtgggtgggtttttggcggggtgtcggggggtggggttagtgtgtgacgtgggttgagtggtaaggttgtttggttatcggttgggttcgtggtttttgtgtttggtttggtgtggttgtttagtcgttgttgtgttgggtttttcggggtggcggtttggaatttgggtgtgtaaggtgtgtggttgcgatgttgggtgcgtgcgggtttcgttttggggttgtgtgcggagatggttgggtttggcggttgtgtgtggggtgtgtcgggcgtgtggtgtgtttgtgtgtagtgtggcgtggcgcgttgtcgcgagatgggttgtggagagtttggtgcgtgtacggacgtgttgtggtgtttcgagggggtgttgttcgtcgtggggtgtgtggtgttgtgtgggtgcgcggtgtgcggtggtttgtgtggtgggcgtgttgtgtagtggtttgtgggttgtgtgtacgttttgtgagggggtcggtgtgtcgtaggtgggtgtgtggtgttgggggtgttgtgtgttgtggttgtgcggggtggtgtttggtgtggggttgtgtggtcggtgtgtgggggttgtgggtgtgtgcgtgggggtgtggtgtggttgtttgtgtttgtgggtcggtggtgtgtgttgcgtgtggtgggtttgttgttcggtgcgcgtgtgttggtggttgtgcggtcgggtggtggggttgtgtttgcgtgggtgtgggggtgtgagttttgtgggcggcggtgttgtt

SEQ ID NO: 8836 - DNA, 804 bp, Artificial Sequence
  chemically treated genomic DNA (Homo sapiens) CpG-island No: 8836
aacaacaccgccgcccacaaaactcacacccccacacccacgcaaacacaaccccaccacccgaccgcacaaccaccaacacacgcgcaccgaacaacaaacccaccacacgcaacacacaccaccgacccacaaacacaaacaaccacaccacacccccacgcacacacccacaacccccacacaccgaccacacaaccccacaccaaacaccaccccgcacaaccacaacacacaacacccccaacaccacacacccacctacgacacaccgaccccctcacaaaacgtacacacaacccacaaaccactacacaacacgcccaccacacaaaccaccgcacaccgcgcacccacacaacaccacacaccccacgacgaacaacaccccctcgaaacaccacaacacgtccgtacacgcaccaaactctccacaacccatctcgcgacaacgcgccacgccacactacacacaaacacaccacacgcccgacacaccccacacacaaccgccaaacccaaccatctccgcacacaaccccaaaacgaaacccgcacgcacccaacatcgcaaccacacaccttacacacccaaattccaaaccgccaccccgaaaaacccaacacaacaacgactaaacaaccacaccaaaccaaacacaaaaaccacgaacccaaccgataaccaaacaaccttaccactcaacccacgtcacacactaaccccaccccccgacaccccgccaaaaacccacccacacctccatcataaaacaacaaactaatcaacctccacacccacca

SEQ ID NO: 8837 - DNA, 553 bp, Artificial Sequence
  chemically treated genomic DNA (Homo sapiens) CpG-island No: 8837
cgtatcgtcgtgtttttcggtttaagttttaatattcgggcgaattggcgtgttttattagttcggtagtatgaattattattcgttagttattttattggagacgacggaagatcgttgtcgaagcggcgttttatcgtttttagtatgacgttttgtattgttttattgttgaagtcgtcggtagtgatcgtttagtgtagtgttttacgattatagtagtttagcgcgaacgtgatacgtagttttttttcgttattatagtagaattcgaattcgttagagtattatcgttgattgtttttttttacggttattttgtttgtatgtgttcgtttcgatggcggtatagtaggttttcgtttaagtaatagcgtattttggcgtatgattcggtaaatacgtttggtattgatcgtaggtatattattaagttttgtcggagtaacgtgggtcgagttatcggaggtcgacgggatttgagtaagcgttgatgtcgaggtttcgtgaagttatattttgttttgttgttttgatatttgtattataaaag

SEQ ID NO: 8838 - DNA, 553 bp, Artificial Sequence
  chemically treated genomic DNA (Homo sapiens) CpG-island No: 8838
cttttataatacaaatatcaaaacaacaaaacaaaatataacttcacgaaacctcgacatcaacgcttactcaaatcccgtcgacctccgataactcgacccacgttactccgacaaaacttaataatatacctacgatcaataccaaacgtatttaccgaatcatacgccaaaatacgctattacttaaacgaaaacctactataccgccatcgaaacgaacacatacaaacaaaataaccgtaaaaaaaaacaatcaacgataatactctaacgaattcgaattctactataataacgaaaaaaaactacgtatcacgttcgcgctaaactactataatcgtaaaacactacactaaacgatcactaccgacgacttcaacaataaaacaatacaaaacgtcatactaaaaacgataaaacgccgcttcgacaacgatcttccgtcgtctccaataaaataactaacgaataataattcatactaccgaactaataaaacacgccaattcgcccgaatattaaaacttaaaccgaaaaacacgacgatacg

SEQ ID NO: 8839 - DNA, 553 bp, Artificial Sequence
  chemically treated genomic DNA (Homo sapiens) CpG-island No: 8839
tttttgtggtataggtgttagagtaataaagtaggatgtggttttacggaatttcgatattaacgtttatttagatttcgtcgattttcgataattcggtttacgttatttcggtagaatttgatggtatgtttgcgattaatgttaaacgtgtttatcggattatgcgttagaatgcgttgttgtttgagcgaaaatttgttgtatcgttatcgaaacgggtatatataggtagagtggtcgtgaaagaaagtaattagcgatggtgttttgacgggttcgagttttgttgtgataacggagagagattgcgtgttacgttcgcgttggattgttgtgatcgtgaggtattgtattgggcggttattatcggcggttttaatagtgaaatagtataggacgttatgttgggagcggtggaacgtcgtttcggtaacgatttttcgtcgtttttagtggagtggttgacggataatggtttatgttatcgggttaatgaaatacgttagttcgttcggatgttgggatttgaatcgaagaatacggcggtgcg

SEQ ID NO: 8840 - DNA, 553 bp, Artificial Sequence
  chemically treated genomic DNA (Homo sapiens) CpG-island No: 8840
cgcaccgccgtattcttcgattcaaatcccaacatccgaacgaactaacgtatttcattaacccgataacataaaccattatccgtcaaccactccactaaaaacgacgaaaaatcgttaccgaaacgacgttccaccgctcccaacataacgtcctatactatttcactattaaaaccgccgataataaccgcccaatacaatacctcacgatcacaacaatccaacgcgaacgtaacacgcaatctctctccgttatcacaacaaaactcgaacccgtcaaaacaccatcgctaattactttctttcacgaccactctacctatatatacccgtttcgataacgatacaacaaattttcgctcaaacaacaacgcattctaacgcataatccgataaacacgtttaacattaatcgcaaacataccatcaaattctaccgaaataacgtaaaccgaattatcgaaaatcgacgaaatctaaataaacgttaatatcgaaattccgtaaaaccacatcctactttattactctaacacctataccacaaaaa

SEQ ID NO: 8841 - DNA, 842 bp, Artificial Sequence
  chemically treated genomic DNA (Homo sapiens) CpG-island No: 8841
gtcgagcgcgttaaagaagcggcgcgtattttggagttggacggtttgtttaaagggcgcgggcgtacgtttatcggcggttagcgttatatgatggcgatgggtcgcgcgattgtgcgcgattcggcggtatttttgtttgatgagtcgttttttaatttcgatgttaagttgcgcgtgtagatgcgttttgaattgtaataattgtatcgtcgtttgaaaacgattttattttacgtgatttacgattaggttgaagcgatgacgttcgtttagcgagtaatggtgatgaacggcggtgttgtcgaatagattggtatattagttgaagtttacgaaaagttcgttaatttgtttatagcgagtttgatttgtagttcggcgatgaatttgttgatatgtcgcgtgaataacgaaggtacgtatttcgaatttgacggtagtatttttttattataaacggtggttattattagtatgttaggcgtaaaatgattttcggtattttttcggaatatattgcgcgaaattcgtaggtagaaagttgcgtatcgattgtgattgatacgttggaaatttttcgggtaatgatttggcgtacggatttttgggcgattagaaacgtgtgttgcgattggcgtttttagaacgttcgacggtaagtataacgttggtacgtgtatttggcggaaattaattgtatttttttaaggtggaattagttatcgagtattagaacgggtttattttcgaattcgtttaatcgtgtggcggaaatggtttcggaataatttggggtaaatacgttcggtataaatttgttaaatgattgaattgattga

SEQ ID NO: 8842 - DNA, 842 bp, Artificial Sequence
  chemically treated genomic DNA (Homo sapiens) CpG-island No: 8842
tcaatcaattcaatcatttaacaaatttataccgaacgtatttaccccaaattattccgaaaccatttccgccacacgattaaacgaattcgaaaataaacccgttctaatactcgataactaattccaccttaaaaaaatacaattaatttccgccaaatacacgtaccaacgttatacttaccgtcgaacgttctaaaaacgccaatcgcaacacacgtttctaatcgcccaaaaatccgtacgccaaatcattacccgaaaaatttccaacgtatcaatcacaatcgatacgcaactttctacctacgaatttcgcgcaatatattccgaaaaaataccgaaaatcattttacgcctaacatactaataataaccaccgtttataataaaaaaatactaccgtcaaattcgaaatacgtaccttcgttattcacgcgacatatcaacaaattcatcgccgaactacaaatcaaactcgctataaacaaattaacgaacttttcgtaaacttcaactaatataccaatctattcgacaacaccgccgttcatcaccattactcgctaaacgaacgtcatcgcttcaacctaatcgtaaatcacgtaaaataaaatcgttttcaaacgacgatacaattattacaattcaaaacgcatctacacgcgcaacttaacatcgaaattaaaaaacgactcatcaaacaaaaataccgccgaatcgcgcacaatcgcgcgacccatcgccatcatataacgctaaccgccgataaacgtacgcccgcgccctttaaacaaaccgtccaactccaaaatacgcgccgcttctttaacgcgctcgac

SEQ ID NO: 8843 - DNA, 842 bp, Artificial Sequence
  chemically treated genomic DNA (Homo sapiens) CpG-island No: 8843
ttagttaatttagttatttaataagtttgtgtcggacgtgtttgttttaggttgtttcggagttattttcgttatacgattggacgagttcggggataagttcgttttaatattcggtggttggttttattttaaaaaggtgtagttgattttcgttagatgtacgtattagcgttgtgtttatcgtcgggcgttttggaggcgttagtcgtaatatacgtttttggtcgtttaagagttcgtgcgttaggttattgttcgagggatttttagcgtgttaattataatcggtacgtagttttttgtttgcgagtttcgcgtaatatgtttcggggaaatgtcgagagttattttacgtttggtatattgatggtagttatcgtttatggtaggagggtattgtcgttaagttcgaaatgcgtgttttcgttatttacgcggtatgttagtaggtttatcgtcggattgtagattaaattcgttataaataggttggcgggtttttcgtagattttaattggtgtgttaatttgttcggtaatatcgtcgtttattattattattcgttgggcgagcgttatcgttttaatttgatcgtgagttacgtagagtgaagtcgtttttaggcgacggtgtaattgttgtagtttaagacgtatttgtacgcgtagtttggtatcgaggttagagagcggtttattaaataggaatatcgtcggatcgcgtataatcgcgcggtttatcgttattatgtgacgttgatcgtcggtaagcgtgcgttcgcgttttttgagtagatcgtttagttttagaatgcgcgtcgtttttttaacgcgttcggt

SEQ ID NO: 8844 - DNA, 842 bp, Artificial Sequence
  chemically treated genomic DNA (Homo sapiens) CpG-island No: 8844
accgaacgcgttaaaaaaacgacgcgcattctaaaactaaacgatctactcaaaaaacgcgaacgcacgcttaccgacgatcaacgtcacataataacgataaaccgcgcgattatacgcgatccgacgatattcctatttaataaaccgctctctaacctcgataccaaactacgcgtacaaatacgtcttaaactacaacaattacaccgtcgcctaaaaacgacttcactctacgtaactcacgatcaaattaaaacgataacgctcgcccaacgaataataataataaacgacgatattaccgaacaaattaacacaccaattaaaatctacgaaaaacccgccaacctatttataacgaatttaatctacaatccgacgataaacctactaacataccgcgtaaataacgaaaacacgcatttcgaacttaacgacaataccctcctaccataaacgataactaccatcaatataccaaacgtaaaataactctcgacatttccccgaaacatattacgcgaaactcgcaaacaaaaaactacgtaccgattataattaacacgctaaaaatccctcgaacaataacctaacgcacgaactcttaaacgaccaaaaacgtatattacgactaacgcctccaaaacgcccgacgataaacacaacgctaatacgtacatctaacgaaaatcaactacacctttttaaaataaaaccaaccaccgaatattaaaacgaacttatccccgaactcgtccaatcgtataacgaaaataactccgaaacaacctaaaacaaacacgtccgacacaaacttattaaataactaaattaactaa

SEQ ID NO: 8845 - DNA, 665 bp, Artificial Sequence
  chemically treated genomic DNA (Homo sapiens) CpG-island No: 8845
  unsure (322, 333..)
cgttttaatatcgcgaaattcgtttatttttacgaaggtatggttcgatatcggttaatgtatttgcgtttaataggtttgttcgattggaaaggtgagtacgagggaagggcgggggcgtcggagagtcgggtcgtttatatttttcgtagttatttcggtcgtggtaggaatcgaaattcggagcggtcgaagtttagcgtttcgttggggtagagggtcgcggcggttgggaacgtcgtttttcgacgtatcggtcgtttttagcgtagcgcgtttcgcggggtgttggtaacgcggggggttcggggcgggggcgggnacggggcgggnntcgcggggcgaggattaatttagttcgtcgcgtttatttcgcgttcgtaggggcgtcgaggattttcggggcgcggggcgcgggttggggtttagtgaggtttggtaggttgtgcgcggatcgcgttttggacggcgaaagtaggttcggagggggcggttagttcggcgttttagcgttcgaggcgagttagaaggcggtttacggtcgtcgtttttcggtttcggttcggttattgcgttgcgtttatttcgttttggagtttgggcgcgggttttgattttttcggtttttttttgatatttggtggatggcgttattagaattttta

SEQ ID NO: 8846 - DNA, 665 bp, Artificial Sequence
  chemically treated genomic DNA (Homo sapiens) CpG-island No: 8846
  unsure (332..333, 344)
taaaaattctaataacgccatccaccaaatatcaaaaaaaaaccgaaaaaatcaaaacccgcgcccaaactccaaaacgaaataaacgcaacgcaataaccgaaccgaaaccgaaaaacgacgaccgtaaaccgccttctaactcgcctcgaacgctaaaacgccgaactaaccgccccctccgaacctactttcgccgtccaaaacgcgatccgcgcacaacctaccaaacctcactaaaccccaacccgcgccccgcgccccgaaaatcctcgacgcccctacgaacgcgaaataaacgcgacgaactaaattaatcctcgccccgcganncccgccccgtncccgcccccgccccgaaccccccgcgttaccaacaccccgcgaaacgcgctacgctaaaaacgaccgatacgtcgaaaaacgacgttcccaaccgccgcgaccctctaccccaacgaaacgctaaacttcgaccgctccgaatttcgattcctaccacgaccgaaataactacgaaaaatataaacgacccgactctccgacgcccccgcccttccctcgtactcacctttccaatcgaacaaacctattaaacgcaaatacattaaccgatatcgaaccataccttcgtaaaaataaacgaatttcgcgatattaaaacg

SEQ ID NO: 8847 - DNA, 665 bp, Artificial Sequence
  chemically treated genomic DNA (Homo sapiens) CpG-island No: 8847
  unsure (332..333, 344)
taggagttttggtgacgttatttattaggtgttaggagagggtcgggaaggttaggattcgcgtttaggttttagagcggagtgggcgtagcgtagtagtcgggtcgggatcgggaggcgacggtcgtgggtcgttttttggttcgtttcggacgttgggacgtcggattggtcgtttttttcgggtttgttttcgtcgtttagggcgcggttcgcgtatagtttgttaagttttattgggttttagttcgcgtttcgcgtttcggagattttcgacgtttttgcgaacgcggggtggacgcgacgggttgggttggttttcgtttcgcggnnttcgtttcgtnttcgttttcgtttcgagtttttcgcgttattagtatttcgcggagcgcgttgcgttgggggcggtcggtgcgtcggggagcggcgtttttagtcgtcgcgattttttgttttagcggagcgttgagtttcggtcgtttcgggtttcggtttttgttacggtcgaggtggttgcggggaatgtgggcgattcggtttttcggcgttttcgtttttttttcgtgtttatttttttagtcgggtaagtttgttgggcgtaggtgtattaatcgatatcgggttatattttcgtgaaaataagcgggtttcgcggtattggggcg

SEQ ID NO: 8848 - DNA, 665 bp, Artificial Sequence
  chemically treated genomic DNA (Homo sapiens) CpG-island No: 8848
  unsure (322, 333..)
cgccccaataccgcgaaacccgcttattttcacgaaaatataacccgatatcgattaatacacctacgcccaacaaacttacccgactaaaaaaataaacacgaaaaaaaaacgaaaacgccgaaaaaccgaatcgcccacattccccgcaaccacctcgaccgtaacaaaaaccgaaacccgaaacgaccgaaactcaacgctccgctaaaacaaaaaatcgcgacgactaaaaacgccgctccccgacgcaccgaccgcccccaacgcaacgcgctccgcgaaatactaataacgcgaaaaactcgaaacgaaaacgaanacgaaacgaannccgcgaaacgaaaaccaacccaacccgtcgcgtccaccccgcgttcgcaaaaacgtcgaaaatctccgaaacgcgaaacgcgaactaaaacccaataaaacttaacaaactatacgcgaaccgcgccctaaacgacgaaaacaaacccgaaaaaaacgaccaatccgacgtcccaacgtccgaaacgaaccaaaaaacgacccacgaccgtcgcctcccgatcccgacccgactactacgctacgcccactccgctctaaaacctaaacgcgaatcctaaccttcccgaccctctcctaacacctaataaataacgtcaccaaaactccta

SEQ ID NO: 8849 - DNA, 526 bp, Artificial Sequence
  chemically treated genomic DNA (Homo sapiens) CpG-island No: 8849
gtttggggaatattttttatggggaaatttcggacgggggggcggggagaggatcggcgtggtcggtcgttagaggtagggagacgtcggacgacgtcggaggtgcgggggtgcgacggtaggatggatcggggttcgtgggttcgcgcgggagaggtggggtagagcgcgtgggcggttggcgcgggagtggggagtgagaggggtgtggaagtagaggtggtcggcgcgagaggacggaggagagggacgggtgggtgtttcggggtagcgtcgaggtagagcgagtaggcgacgtgagggatggcggagttgttcgaggaggattgggtggtagggtcgaagtggtcggagggagtagggtttcggtagagtcggttcggggtgggttaggggaggtttggggcgtgttagggacgcgcgggagagagggggattggggcgttgagaggtggcggggtgtttgggtgagagcgtggggggagtgggggtaagggtatagggtaggtggaggagtggggggggt

SEQ ID NO: 8850 - DNA, 526 bp, Artificial Sequence
  chemically treated genomic DNA (Homo sapiens) CpG-island No: 8850
accccccccactcctccacctaccctatacccttacccccactccccccacgctctcacccaaacaccccgccacctctcaacgccccaatccccctctctcccgcgcgtccctaacacgccccaaacctcccctaacccaccccgaaccgactctaccgaaaccctactccctccgaccacttcgaccctaccacccaatcctcctcgaacaactccgccatccctcacgtcgcctactcgctctacctcgacgctaccccgaaacacccacccgtccctctcctccgtcctctcgcgccgaccacctctacttccacacccctctcactccccactcccgcgccaaccgcccacgcgctctaccccacctctcccgcgcgaacccacgaaccccgatccatcctaccgtcgcacccccgcacctccgacgtcgtccgacgtctccctacctctaacgaccgaccacgccgatcctctccccgcccccccgtccgaaatttccccataaaaaatattccccaaac

SEQ ID NO: 8851 - DNA, 526 bp, Artificial Sequence
  chemically treated genomic DNA (Homo sapiens) CpG-island No: 8851
gttttttttatttttttatttattttatgtttttgtttttattttttttacgtttttatttaggtatttcgttattttttaacgttttaatttttttttttttcgcgcgtttttgatacgttttaggttttttttgatttatttcgaatcgattttgtcgagattttgtttttttcggttatttcggttttgttatttagtttttttcgagtagtttcgttattttttacgtcgtttgttcgttttgtttcggcgttatttcgggatatttattcgtttttttttttcgttttttcgcgtcggttatttttgtttttatattttttttattttttattttcgcgttagtcgtttacgcgttttattttatttttttcgcgcgggtttacgggtttcggtttattttgtcgtcgtattttcgtattttcggcgtcgttcggcgtttttttgtttttggcgatcgattacgtcggtttttttttcgttttttcgttcggaatttttttataaagagtgttttttaggt

SEQ ID NO: 8852 - DNA, 526 bp, Artificial Sequence
  chemically treated genomic DNA (Homo sapiens) CpG-island No: 8852
acctaaaaaacactctttataaaaaaattccgaacgaaaaaacgaaaaaaaaaccgacgtaatcgatcgccaaaaacaaaaaaacgccgaacgacgccgaaaatacgaaaatacgacgacaaaataaaccgaaacccgtaaacccgcgcgaaaaaaataaaataaaacgcgtaaacgactaacgcgaaaataaaaaataaaaaaaatataaaaacaaaaataaccgacgcgaaaaaacgaaaaaaaaaaacgaataaatatcccgaaataacgccgaaacaaaacgaacaaacgacgtaaaaaataacgaaactactcgaaaaaaactaaataacaaaaccgaaataaccgaaaaaaacaaaatctcgacaaaatcgattcgaaataaatcaaaaaaaacctaaaacgtatcaaaaacgcgcgaaaaaaaaaaaaattaaaacgttaaaaaataacgaaatacctaaataaaaacgtaaaaaaaataaaaacaaaaacataaaataaataaaaaaataaaaaaaac

SEQ ID NO: 8853 - DNA, 638 bp, Artificial Sequence
  chemically treated genomic DNA (Homo sapiens) CpG-island No: 8853
  unsure (162, 225, 311, 405)
ggcgggtacgtagggagtaagaagggacggggggtgataggaggagtaaagaacgaggtagtaatgcgggagggggcggaggtaacgagggggagaaggtttataggcgggggggcgaaaagttcgcggcgaagtaaatagcgaggggagagataaggcggncgttaggtagggtgagtggaggaaggaggaggatagaagaacgggcggtggtagtttcggggnggatagtcgagcgagcgttggggacggtgggtcggcgaggacgggtgaggaggtaaagggagtgagcggagattgacggagatagngatagatatgaggaagcgtaagcgggtaataaaattgggggtaggaattagcggaggtggggtagggaaggtagcggtgagcgagaatgtgggngtatagacgaaggtgaagatatggggagatagcgagagggaaggttgatgcgaaggttcggtacgggggacgagaggatgcgaaggtgggacgatcgttaagtatgggagggtgacggtcgacgatagaggtaaggatgcggagtaagttaggtaggagggagcggagggttaaggtaaaagggatagggaaagttacggaagaatgagggataggaatagggggtaaagatt

SEQ ID NO: 8854 - DNA, 638 bp, Artificial Sequence
  chemically treated genomic DNA (Homo sapiens) CpG-island No: 8854
  unsure (234, 328, 414, 477)
aatctttaccccctattcctatccctcattcttccgtaactttccctatcccttttaccttaaccctccgctccctcctacctaacttactccgcatccttacctctatcgtcgaccgtcaccctcccatacttaacgatcgtcccaccttcgcatcctctcgtcccccgtaccgaaccttcgcatcaaccttccctctcgctatctccccatatcttcaccttcgtctatacncccacattctcgctcaccgctaccttccctaccccacctccgctaattcctacccccaattttattacccgcttacgcttcctcatatctatcnctatctccgtcaatctccgctcactccctttacctcctcacccgtcctcgccgacccaccgtccccaacgctcgctcgactatccnccccgaaactaccaccgcccgttcttctatcctcctccttcctccactcaccctacctaacgnccgccttatctctcccctcgctatttacttcgccgcgaacttttcgcccccccgcctataaaccttctccccctcgttacctccgccccctcccgcattactacctcgttctttactcctcctatcaccccccgtcccttcttactccctacgtacccgcc

SEQ ID NO: 8855 - DNA, 638 bp, Artificial Sequence
  chemically treated genomic DNA (Homo sapiens) CpG-island No: 8855
  unsure (234, 328, 414, 477)
agtttttgttttttatttttattttttattttttcgtgattttttttgttttttttgttttagtttttcgtttttttttgtttaatttatttcgtatttttgtttttgtcgtcgatcgttatttttttatgtttagcgatcgttttattttcgtattttttcgtttttcgtatcgggttttcgtattagttttttttttcgttgtttttttatatttttattttcgtttatgtntttatattttcgtttatcgttattttttttgttttattttcgttggtttttatttttaattttgttattcgtttacgtttttttatatttattnttgttttcgttagttttcgtttattttttttgtttttttattcgttttcgtcgatttatcgtttttagcgttcgttcgattatttntttcggggttattatcgttcgtttttttgttttttttttttttttatttattttgtttggcgntcgttttattttttttttcgttatttatttcgtcgcgggtttttcgttttttcgtttatggattttttttttttcgttattttcgttttttttcgtattattatttcgttttttattttttttgttatttttcgtttttttttattttttgcgtattcgtt

SEQ ID NO: 8856 - DNA, 638 bp, Artificial Sequence
  chemically treated genomic DNA (Homo sapiens) CpG-island No: 8856
  unsure (162, 225, 311, 405)
aacgaatacgcaaaaaataaaaaaaaacgaaaaataacaaaaaaaataaaaaacgaaataataatacgaaaaaaaacgaaaataacgaaaaaaaaaaaatccataaacgaaaaaacgaaaaacccgcgacgaaataaataacgaaaaaaaaaataaaacgancgccaaacaaaataaataaaaaaaaaaaaaaaacaaaaaaacgaacgataataaccccgaaanaaataatcgaacgaacgctaaaaacgataaatcgacgaaaacgaataaaaaaacaaaaaaaataaacgaaaactaacgaaaacaanaataaatataaaaaaacgtaaacgaataacaaaattaaaaataaaaaccaacgaaaataaaacaaaaaaaataacgataaacgaaaatataaanacataaacgaaaataaaaatataaaaaaacaacgaaaaaaaaaactaatacgaaaacccgatacgaaaaacgaaaaaatacgaaaataaaacgatcgctaaacataaaaaaataacgatcgacgacaaaaacaaaaatacgaaataaattaaacaaaaaaaaacgaaaaactaaaacaaaaaaaacaaaaaaaatcacgaaaaaataaaaaataaaaataaaaaacaaaaact

SEQ ID NO: 8857 - DNA, 565 bp, Artificial Sequence
  chemically treated genomic DNA (Homo sapiens) CpG-island No: 8857
  unsure (10, 133, 144, 221, 234, 239, 288, 333)
gcggggtggnaggtgttgggagggggtgtttcgagggttgttagggtggtgtggtgtggtgcggtgaggttgtggtgtgtgtgggcggaggttgagtcgcgttgggatgtgggtgtgtggtgataggggtagngtaggtgtggnggtggggttgtggagtgtgtggcgtagtagtggcgcgggtgcgttgtgtggggcggtgggtggcgcgagacgtgggntgcggagggaggntcgangtgcgggagggtttggagtgaggatgagggagggttttgtagtgggggngggtgtggtggacggaggggttggagagtaggtgaggggggcggngcgagtgtgtgaggtaggtgagggaggtgcgagggatgagggtgtgggagggcgggagggatgtcggtgtgagcgagggtgaggagggggggggggggtggtggggtgcggggtggaggcgaggtgggttgtgaggggcgaggtgaggggaggaggggggaggaggtgtgtgagggggggtgatgtgtaggggagggggggaggagggggaggcggtagatgggggaggggg

SEQ ID NO: 8858 - DNA, 565 bp, Artificial Sequence
  chemically treated genomic DNA (Homo sapiens) CpG-island No: 8858
  unsure (233, 278, 327, 332, 345, 422, 433, 556)
ccccctcccccatctaccgcctccccctcctccccccctcccctacacatcaccccccctcacacacctcctcccccctcctcccctcacctcgcccctcacaacccacctcgcctccaccccgcaccccaccaccccccccccccctcctcaccctcgctcacaccgacatccctcccgccctcccacaccctcatccctcgcacctccctcacctacctcacacactcgcnccgcccccctcacctactctccaacccctccgtccaccacacccncccccactacaaaaccctccctcatcctcactccaaaccctcccgcacntcgancctccctccgcancccacgtctcgcgccacccaccgccccacacaacgcacccgcgccactactacgccacacactccacaaccccaccnccacacctacnctacccctatcaccacacacccacatcccaacgcgactcaacctccgcccacacacaccacaacctcaccgcaccacaccacaccaccctaacaaccctcgaaacaccccctcccaacacctnccaccccgc

SEQ ID NO: 8859 - DNA, 565 bp, Artificial Sequence
  chemically treated genomic DNA (Homo sapiens) CpG-island No: 8859
  unsure (233, 278, 327, 332, 345, 422, 433, 556)
tttttttttttatttgtcgtttttttttttttttttttttttttgtatattatttttttttatatattttttttttttttttttttttatttcgttttttataatttatttcgtttttatttcgtattttattattttttttttttttttttattttcgtttatatcggtatttttttcgtttttttatatttttatttttcgtattttttttatttattttatatattcgtntcgttttttttatttgttttttagttttttcgtttattatatttntttttattgtaaaatttttttttatttttattttaaattttttcgtatntcggnttttttttcgtantttacgtttcgcgttatttatcgttttatatagcgtattcgcgttattattgcgttatatattttataattttattnttatatttgtnttgtttttgttattatatatttatattttaacgcggtttaattttcgtttatatatattatagttttatcgtattatattatattattttggtaattttcggggtatttttttttagtatttnttatttcgt

SEQ ID NO: 8860 - DNA, 565 bp, Artificial Sequence
  chemically treated genomic DNA (Homo sapiens) CpG-island No: 8860
  unsure (10, 133, 144, 221, 234, 239, 288, 333)
acgaaataanaaatactaaaaaaaaataccccgaaaattaccaaaataatataatataatacgataaaactataatatatataaacgaaaattaaaccgcgttaaaatataaatatataataacaaaaacaanacaaatataanaataaaattataaaatatataacgcaataataacgcgaatacgctatataaaacgataaataacgcgaaacgtaaantacgaaaaaaaanccganatacgaaaaaatttaaaataaaaataaaaaaaaattttacaataaaaanaaatataataaacgaaaaaactaaaaaacaaataaaaaaaacganacgaatatataaaataaataaaaaaaatacgaaaaataaaaatataaaaaaacgaaaaaaataccgatataaacgaaaataaaaaaaaaaaaaaaaaataataaaatacgaaataaaaacgaaataaattataaaaaacgaaataaaaaaaaaaaaaaaaaaaaaatatataaaaaaaaataatatacaaaaaaaaaaaaaaaaaaaaaaaaacgacaaataaaaaaaaaaa

SEQ ID NO: 8861 - DNA, 1564 bp, Artificial Sequence
  chemically treated genomic DNA (Homo sapiens) CpG-island No: 8861
  unsure (217, 284..285, 315, 343, 353..354, 361, 366, 457, 496, 575)
  unsure (1223, 1237, 1277, 1300, 1404, 1511, 1527, 1534, 1544, 1556)
gcgtgtttcgggggggagagacgggtggtaggggagggggggtgatagagggcgaaggggcgcgggtgaaagggttcggaggcgaggtagtaagtaagggggaggaagaggaggaggagtggggggaagcggtggttggcgcgacgcgtaggtaacgttggatggaagtagagcgggggagatagagtcggtcgtagtggtgggggaggaagtcggngttgaaggttcgggatgtcgtagagaggtttaggatggttgagggggagagagtagaggtcgcgagnngatggaggttgtcggtcggtggcgtggtgnggtcggtaggagtgggagcgaggtcgangcgttgcgannggtggtngatangggagcgaggggcgtgtgtcgggttgggtgtcgagaggcgattgtgggcgagggggtgtttgcgaggtggtgggtttggtttcgtagggangttgtagggtgtatacggattggtcgtggatcgaggcgnggagttcgggattgtacggtgggggagtggttggggcgtgtacgagggtaagggggaagtcggttgttaggcgagacgngggagggacgggaggacgatggggtgttacggttggtggcggatgcgagcggacgcggacgatcgtagtcggagcggagcggtaggtcgtggcgtaatacgcgttaatcggggtggggagaggggggggggggggggtagtcggtggggggtgggtgcgggttttagaagtagtttgtgggggagttgagtagagaaaagaaagggcgggggaaagggcggggaggggagtggagggggaggcggggttgtagaacgtgacggcgtagggggaggtaggggcggtgtgaagatacgggataggtggtgtagggagtgcgggggagggggggggttgtgtagtgagaggtgttgcggggtaggcggtgggggggggtgcggggaggtttgtggagggggagaaagggggtgttaggagaagggagtggggggggcgagggtggggcgagggcgggagggttagggagggtgggagggcgggggtggggggggtagcgggaggttaggagggcgagattagtcggggggaacgagggggaacgcgtggcgcgagggaagggtgggggaggggtcgagcgttggtggtacgggtcgggaggtttagggagggggggagattggaggtaggagaggcggcggggaacgtggngaggttaggggtgngcgggggggggagaggtggggggcgagtggtagcgtcganggcgtggggcgacggaggggggnggagcgcgcgagcggtcggagggaggagaggaggatgaggggggatagggagagtaaggagggggattgagtggttcgaggcgatgcggggcggagcgagtggngcggagagttgtgggtgtttgtgagtagcggaggagtaattgtgacgttgtgcgtggtcgagtcggtggtgagagttgggggttggtagtgtgaagaggttcgaagngttgtagatgcgaggnggagagntttgaggagntgagaggagagnagattttg

SEQ ID NO: 8862 - DNA, 1564 bp, Artificial Sequence
  chemically treated genomic DNA (Homo sapiens) CpG-island No: 8862
  unsure (9, 21, 31, 38, 54, 161, 265, 288, 328, 342, 990, 1069, 1108)
  unsure (1199, 1204, 1211..1212, 1222, 1250, 1280..1281, 1348)
caaaatctnctctcctctcanctcctcaaanctctccncctcgcatctacaacncttcgaacctcttcacactaccaacccccaactctcaccaccgactcgaccacgcacaacgtcacaattactcctccgctactcacaaacacccacaactctccgcnccactcgctccgccccgcatcgcctcgaaccactcaatccccctccttactctccctatcccccctcatcctcctctcctccctccgaccgctcgcgcgctccncccccctccgtcgccccacgccntcgacgctaccactcgccccccacctctcccccccccgcncacccctaacctcnccacgttccccgccgcctctcctacctccaatctccccccctccctaaacctcccgacccgtaccaccaacgctcgacccctcccccacccttccctcgcgccacgcgttccccctcgttccccccgactaatctcgccctcctaacctcccgctaccccccccacccccgccctcccaccctccctaaccctcccgccctcgccccaccctcgccccccccactcccttctcctaacaccccctttctccccctccacaaacctccccgcacccccccccaccgcctaccccgcaacacctctcactacacaaccccccccctcccccgcactccctacaccacctatcccgtatcttcacaccgcccctacctccccctacgccgtcacgttctacaaccccgcctccccctccactcccctccccgccctttcccccgccctttcttttctctactcaactcccccacaaactacttctaaaacccgcacccaccccccaccgactacccccccccccccccctctccccaccccgattaacgcgtattacgccacgacctaccgctccgctccgactacgatcgtccgcgtccgctcgcatccgccaccaaccgtaacaccccatcgtcctcccgtccctcccncgtctcgcctaacaaccgacttcccccttaccctcgtacacgccccaaccactcccccaccgtacaatcccgaactccncgcctcgatccacgaccaatccgtatacaccctacaacntccctacgaaaccaaacccaccacctcgcaaacaccccctcgcccacaatcgcctctcgacacccaacccgacacacgcccctcgctcccntatcnaccaccnntcgcaacgcntcgacctcgctcccactcctaccgaccncaccacgccaccgaccgacaacctccatcnnctcgcgacctctactctctccccctcaaccatcctaaacctctctacgacatcccgaaccttcaacnccgacttcctcccccaccactacgaccgactctatctcccccgctctacttccatccaacgttacctacgcgtcgcgccaaccaccgcttccccccactcctcctcctcttcctcccccttacttactacctcgcctccgaaccctttcacccgcgccccttcgccctctatcaccccccctcccctaccacccgtctctcccccccgaaacacgc

SEQ ID NO: 8863 - DNA, 1564 bp, Artificial Sequence
  chemically treated genomic DNA (Homo sapiens) CpG-island No: 8863
  unsure (9, 21, 31, 38, 54, 161, 265, 288, 328, 342, 990, 1069, 1108)
  unsure (1199, 1204, 1211..1212, 1222, 1250, 1280..1281, 1348)
taggatttnttttttttttanttttttaggnttttttntttcgtatttataatntttcggatttttttatattgttaatttttaatttttattatcggttcggttacgtatagcgttataattgttttttcgttatttataggtatttatagtttttcgtnttattcgtttcgtttcgtatcgtttcgggttatttaatttttttttttattttttttatttttttttatttttttttttttttttcgatcgttcgcgcgttttnttttttttcgtcgttttacgttntcggcgttgttattcgttttttatttttttttttttcgtntatttttggttttnttacgtttttcgtcgttttttttgtttttagtttttttttttttttgggtttttcggttcgtgttattagcgttcggttttttttttatttttttttcgcgttacgcgttttttttcgtttttttcggttggtttcgtttttttgatttttcgttgttttttttattttcgtttttttattttttttggttttttcgttttcgttttattttcgttttttttattttttttttttaatattttttttttttttttttataaattttttcgtatttttttttatcgtttatttcgtaatattttttattgtataattttttttttttttcgtattttttgtattatttgtttcgtgtttttatatcgtttttatttttttttacgtcgttacgttttgtaatttcgtttttttttttattttttttttcgttttttttttcgtttttttttttttttatttaatttttttataaattatttttaaaattcgtatttattttttatcgattatttttttttttttttttttttttatttcggttggcgcgtgttacgttacgatttgtcgtttcgtttcggttgcgatcgttcgcgttcgttcgtattcgttattagtcgtagtattttatcgttttttcgttttttttncgtttcgtttgatagtcgattttttttttgttttcgtgtacgttttagttatttttttatcgtgtagtttcggattttncgtttcggtttacgattagttcgtgtatattttgtagtntttttgcgaggttagatttattatttcgtaaatattttttcgtttatagtcgtttttcgatatttagttcgatatacgtttttcgtttttntgttnattattnntcgtaacgtntcgatttcgtttttatttttgtcggttntattacgttatcgatcgataatttttattnnttcgcgatttttatttttttttttttaattattttggatttttttacgatatttcggatttttaatntcgatttttttttttattattgcgatcggttttgtttttttcgttttatttttatttagcgttatttgcgcgtcgcgttaattatcgtttttttttattttttttttttttttttttttttatttattgtttcgttttcggatttttttattcgcgttttttcgttttttattatttttttttttttattattcgtttttttttttcggaatacgt

SEQ ID NO: 8864 - DNA, 1564 bp, Artificial Sequence
  chemically treated genomic DNA (Homo sapiens) CpG-island No: 8864
  unsure (217, 284..285, 315, 343, 353..354, 361, 366, 457, 496, 575)
  unsure (1223, 1237, 1277, 1300, 1404, 1511, 1527, 1534, 1544, 1556)
acgtattccgaaaaaaaaaaacgaataataaaaaaaaaaaaataataaaaaacgaaaaaacgcgaataaaaaaatccgaaaacgaaacaataaataaaaaaaaaaaaaaaaaaaaaaaataaaaaaaaacgataattaacgcgacgcgcaaataacgctaaataaaaataaaacgaaaaaaacaaaaccgatcgcaataataaaaaaaaaaatcganattaaaaatccgaaatatcgtaaaaaaatccaaaataattaaaaaaaaaaaaataaaaatcgcgaannaataaaaattatcgatcgataacgtaatanaaccgacaaaaataaaaacgaaatcganacgttacgannaataatnaacanaaaaacgaaaaacgtatatcgaactaaatatcgaaaaacgactataaacgaaaaaatatttacgaaataataaatctaacctcgcaaaaanactacaaaatatacacgaactaatcgtaaaccgaaacgnaaaatccgaaactacacgataaaaaaataactaaaacgtacacgaaaacaaaaaaaaaatcgactatcaaacgaaacgnaaaaaaaacgaaaaaacgataaaatactacgactaataacgaatacgaacgaacgcgaacgatcgcaaccgaaacgaaacgacaaatcgtaacgtaacacgcgccaaccgaaataaaaaaaaaaaaaaaaaaaaaaataatcgataaaaaataaatacgaattttaaaaataatttataaaaaaattaaataaaaaaaaaaaaaaacgaaaaaaaaaacgaaaaaaaaaataaaaaaaaaaacgaaattacaaaacgtaacgacgtaaaaaaaaataaaaacgatataaaaacacgaaacaaataatacaaaaaatacgaaaaaaaaaaaaaattatacaataaaaaatattacgaaataaacgataaaaaaaaatacgaaaaaatttataaaaaaaaaaaaaaaaaatattaaaaaaaaaaaataaaaaaaacgaaaataaaacgaaaacgaaaaaaccaaaaaaaataaaaaaacgaaaataaaaaaaacaacgaaaaatcaaaaaaacgaaaccaaccgaaaaaaacgaaaaaaaacgcgtaacgcgaaaaaaaaataaaaaaaaaaccgaacgctaataacacgaaccgaaaaacccaaaaaaaaaaaaaaactaaaaacaaaaaaaacgacgaaaaacgtaanaaaaccaaaaatanacgaaaaaaaaaaaaataaaaaacgaataacaacgccganaacgtaaaacgacgaaaaaaaanaaaacgcgcgaacgatcgaaaaaaaaaaaaaaaaataaaaaaaaataaaaaaaataaaaaaaaaaattaaataacccgaaacgatacgaaacgaaacgaataanacgaaaaactataaatacctataaataacgaaaaaacaattataacgctatacgtaaccgaaccgataataaaaattaaaaattaacaatataaaaaaatccgaaanattataaatacgaaanaaaaaancctaaaaaantaaaaaaaaaanaaatccta

SEQ ID NO: 8865 - DNA, 604 bp, Artificial Sequence
  chemically treated genomic DNA (Homo sapiens) CpG-island No: 8865
agagcgggatgaggtttaaagcgtgaggaatgacgaatgaaagagacgaagcggaaagagagtaagatgaagggggagtggatgagcgagcgtcgaagaagagataaagtggaagagtagtcggggtcgggggacggagcggaggagggtgaggaggtggggggagggcgagaataataatgatcgattaatgatcgggggcgggagtgtgtgttagtgagtggtgttggaatgagggaggcggggagattgtcgagttatgaattggaagtggggcggaagtgtgcgaggtgttcggggatcggtaatgggttcgattcggtcgtgtaggcggttcgaagagaatacggagaagatagcgggataatgggggatacgacgtgcgtcgagcgaggagggagtgacgagtgggttggatatttattgtcgggttagtggaggaggacgatgatggatggcgttgtcgtgtggttagggcggagtgaagacggatggggtgagttgacgggagagcggagacggggacgaggagatattgtttattattagagaggaagagattaggagttcgtgaaataggcgagagagcgtgggagatagcgaa

SEQ ID NO: 8866 - DNA, 604 bp, Artificial Sequence
  chemically treated genomic DNA (Homo sapiens) CpG-island No: 8866
ttcgctatctcccacgctctctcgcctatttcacgaactcctaatctcttcctctctaataataaacaatatctcctcgtccccgtctccgctctcccgtcaactcaccccatccgtcttcactccgccctaaccacacgacaacgccatccatcatcgtcctcctccactaacccgacaataaatatccaacccactcgtcactccctcctcgctcgacgcacgtcgtatcccccattatcccgctatcttctccgtattctcttcgaaccgcctacacgaccgaatcgaacccattaccgatccccgaacacctcgcacacttccgccccacttccaattcataactcgacaatctccccgcctccctcattccaacaccactcactaacacacactcccgcccccgatcattaatcgatcattattattctcgccctccccccacctcctcaccctcctccgctccgtcccccgaccccgactactcttccactttatctcttcttcgacgctcgctcatccactcccccttcatcttactctctttccgcttcgtctctttcattcgtcattcctcacgctttaaacctcatcccgctct

SEQ ID NO: 8867 - DNA, 604 bp, Artificial Sequence
  chemically treated genomic DNA (Homo sapiens) CpG-island No: 8867
ttcgttattttttacgttttttcgtttattttacgagtttttgatttttttttttttaataataaataatattttttcgttttcgttttcgttttttcgttaatttattttattcgtttttatttcgttttgattatacgataacgttatttattatcgtttttttttattggttcgataataaatatttaatttattcgttatttttttttcgttcggcgtacgtcgtattttttattgtttcgttatttttttcgtatttttttcggatcgtttgtacggtcgggtcggatttattatcggttttcggatatttcgtatattttcgttttatttttaatttatggttcgataattttttcgttttttttattttaatattatttattaatatatattttcgttttcggttattggtcggttattgttgttttcgttttttttttatttttttattttttttcgtttcgtttttcggtttcggttgtttttttattttgtttttttttcggcgttcgtttatttattttttttttattttgtttttttttcgtttcgttttttttattcgttattttttacgttttgggttttatttcgtttt

SEQ ID NO: 8868 - DNA, 604 bp, Artificial Sequence
  chemically treated genomic DNA (Homo sapiens) CpG-island No: 8868
aaaacgaaataaaacccaaaacgtaaaaaataacgaataaaaaaaacgaaacgaaaaaaaaacaaaataaaaaaaaaataaataaacgaacgccgaaaaaaaaacaaaataaaaaaacaaccgaaaccgaaaaacgaaacgaaaaaaaataaaaaaataaaaaaaaaacgaaaacaacaataaccgaccaataaccgaaaacgaaaatatatattaataaataatattaaaataaaaaaaacgaaaaaattatcgaaccataaattaaaaataaaacgaaaatatacgaaatatccgaaaaccgataataaatccgacccgaccgtacaaacgatccgaaaaaaatacgaaaaaaataacgaaacaataaaaaatacgacgtacgccgaacgaaaaaaaaataacgaataaattaaatatttattatcgaaccaataaaaaaaaacgataataaataacgttatcgtataatcaaaacgaaataaaaacgaataaaataaattaacgaaaaaacgaaaacgaaaacgaaaaaatattatttattattaaaaaaaaaaaaatcaaaaactcgtaaaataaacgaaaaaacgtaaaaaataacgaa

SEQ ID NO: 8869 - DNA, 510 bp, Artificial Sequence
  chemically treated genomic DNA (Homo sapiens) CpG-island No: 8869
  unsure (25, 41, 150, 174, 202, 479, 507)
gcggtatagaagacgttcgtagagngagatattagtgaggngggtgttacgagagagagtgatagtgagagtatagcgcggatgtaggtatagaagagtcggtagagttgattgagaaaaagacgggtcgtatgtatgtcgcgttgagangggcgttgttaagattcgcggagnaagggtcgtaagtaggaaggcgtatganaagaagaagaagggaggtttgacgtatcgatcgaatgttgaggggaggagaagaagaaggcgaaggaatataagggagggaggaggaggaagttttttcgtgtatgatgaggatgtagaacggagacgtatgtagagaggaaggcgaggcgcgaggaagaggtaaagatattatgtacgtatagcgaggcgattaggagtattgatgtgagagtggagagagaaggtacgaagatgagaaggatggacggcgaggagagagatgatcgagagggagngagattagattgtagaggacgcgtttantta

SEQ ID NO: 8870 - DNA, 510 bp, Artificial Sequence
  chemically treated genomic DNA (Homo sapiens) CpG-island No: 8870
  unsure (4, 32, 309, 337, 361, 470, 486)
taantaaacgcgtcctctacaatctaatctcnctccctctcgatcatctctctcctcgccgtccatccttctcatcttcgtaccttctctctccactctcacatcaatactcctaatcgcctcgctatacgtacataatatctttacctcttcctcgcgcctcgccttcctctctacatacgtctccgttctacatcctcatcatacacgaaaaaacttcctcctcctccctcccttatattccttcgccttcttcttctcctcccctcaacattcgatcgatacgtcaaacctcccttcttcttcttntcatacgccttcctacttacgacccttnctccgcgaatcttaacaacgcccntctcaacgcgacatacatacgacccgtctttttctcaatcaactctaccgactcttctatacctacatccgcgctatactctcactatcactctctctcgtaacacccncctcactaatatctcnctctacgaacgtcttctataccgc

SEQ ID NO: 8871 - DNA, 510 bp, Artificial Sequence
  chemically treated genomic DNA (Homo sapiens) CpG-island No: 8871
  unsure (4, 32, 309, 337, 361, 470, 486)
taantgagcgcgttttttgtagtttaattttnttttttttcgattattttttttttcgtcgtttattttttttattttcgtattttttttttttatttttatattaatatttttggtcgtttcgttatgcgtatatggtgtttttatttttttttcgcgtttcgtttttttttttatatgcgttttcgttttatatttttattatatacgggggagtttttttttttttttttttttatattttttcgtttttttttttttttttttttaatattcggtcgatgcgttaaatttttttttttttttttnttatgcgtttttttatttgcggtttttntttcgcgaattttaataacgtttnttttaacgcgatatatatgcggttcgttttttttttaattaattttgtcggtttttttgtgtttatattcgcgttgtgtttttattattattttttttcgtaatatttnttttattggtattttnttttgcgggcgttttttgtgtcgt

SEQ ID NO: 8872 - DNA, 510 bp, Artificial Sequence
  chemically treated genomic DNA (Homo sapiens) CpG-island No: 8872
  unsure (25, 41, 150, 174, 202, 479, 507)
acgacacaaaaaacgcccgcaaaanaaaataccaataaaanaaatattacgaaaaaaaataataataaaaacacaacgcgaatataaacacaaaaaaaccgacaaaattaattaaaaaaaaaacgaaccgcatatatatcgcgttaaaanaaacgttattaaaattcgcgaaanaaaaaccgcaaataaaaaaacgcataanaaaaaaaaaaaaaaaaatttaacgcatcgaccgaatattaaaaaaaaaaaaaaaaaaaaacgaaaaaatataaaaaaaaaaaaaaaaaaaaactcccccgtatataataaaaatataaaacgaaaacgcatataaaaaaaaaaacgaaacgcgaaaaaaaaataaaaacaccatatacgcataacgaaacgaccaaaaatattaatataaaaataaaaaaaaaaaatacgaaaataaaaaaaataaacgacgaaaaaaaaaataatcgaaaaaaaanaaaattaaactacaaaaaacgcgctcantta

SEQ ID NO: 8873 - DNA, 522 bp, Artificial Sequence
  chemically treated genomic DNA (Homo sapiens) CpG-island No: 8873
tcgtttgcggtttttcgtgggttcgtttacgtcgcgttgcggttttcgttttcgggtgtttttttgtgttcgggtttcgtttttcgttgttttggttgtgttggtttgcgcgcgtcggtgacgggttcgtgttcgttttttttttcggggtttcgttgttttgggtgttgttggtttttgcgtggtttgttttttcggtgggcggtttttgggttgtttcggtcggttcgttggttcgtttcgcggttgtcggggttcggtttttgttcggtgcgttttcgttcgcgggcgggttcgatttgcgggtgttcggtcgggggtttgtgcgtgcggtcgggtcgtttttgttttggttggtgtttggtgtggcggtttttgtttgcggttgtttgcgggtttggtttgggtggcgggtggtgtcgtttcgttggtggggggtttgtttgtttcggttttggttaaaggttgatttggattcggttggttgtattgtatgttcggcggagggttttggtttaaagt

SEQ ID NO: 8874 - DNA, 522 bp, Artificial Sequence
  chemically treated genomic DNA (Homo sapiens) CpG-island No: 8874
actttaaaccaaaaccctccgccgaacatacaatacaaccaaccgaatccaaatcaacctttaaccaaaaccgaaacaaacaaaccccccaccaacgaaacgacaccacccgccacccaaaccaaacccgcaaacaaccgcaaacaaaaaccgccacaccaaacaccaaccaaaacaaaaacgacccgaccgcacgcacaaacccccgaccgaacacccgcaaatcgaacccgcccgcgaacgaaaacgcaccgaacaaaaaccgaaccccgacaaccgcgaaacgaaccaacgaaccgaccgaaacaacccaaaaaccgcccaccgaaaaaacaaaccacgcaaaaaccaacaacacccaaaacaacgaaaccccgaaaaaaaaaacgaacacgaacccgtcaccgacgcgcgcaaaccaacacaaccaaaacaacgaaaaacgaaacccgaacacaaaaaaacacccgaaaacgaaaaccgcaacgcgacgtaaacgaacccacgaaaaaccgcaaacga

SEQ ID NO: 8875 - DNA, 522 bp, Artificial Sequence
  chemically treated genomic DNA (Homo sapiens) CpG-island No: 8875
attttaagttaagatttttcgtcgaatatatagtgtagttaatcgaatttaaattagtttttagttaaaatcgaaatagataaattttttattaacgaagcgatattattcgttatttagattaaattcgtaaataatcgtaaataaaggtcgttatattaaatattaattaaaataaagacgattcgatcgtacgtataagttttcgatcgggtattcgtaagtcgagttcgttcgcgggcgagagcgtatcgagtagggatcggatttcgatagtcgcgagacggattaacgggtcgatcggaatagtttaaaaatcgtttatcgagagggtagattacgtaagagttaatagtatttaaagtaacgagatttcgaaaggggaggcgggtacggattcgttatcggcgcgcgtaagttaatatagttaaagtagcgagaagcgagattcgagtatagaaagatattcgaaggcggaggtcgtagcgcgacgtgaacgagtttacgaaaaatcgtaagcga

SEQ ID NO: 8876 - DNA, 522 bp, Artificial Sequence
  chemically treated genomic DNA (Homo sapiens) CpG-island No: 8876
tcgcttacgatttttcgtaaactcgttcacgtcgcgctacgacctccgccttcgaatatctttctatactcgaatctcgcttctcgctactttaactatattaacttacgcgcgccgataacgaatccgtacccgcctcccctttcgaaatctcgttactttaaatactattaactcttacgtaatctaccctctcgataaacgatttttaaactattccgatcgacccgttaatccgtctcgcgactatcgaaatccgatccctactcgatacgctctcgcccgcgaacgaactcgacttacgaatacccgatcgaaaacttatacgtacgatcgaatcgtctttattttaattaatatttaatataacgacctttatttacgattatttacgaatttaatctaaataacgaataatatcgcttcgttaataaaaaatttatctatttcgattttaactaaaaactaatttaaattcgattaactacactatatattcgacgaaaaatcttaacttaaaat

SEQ ID NO: 8877 - DNA, 524 bp, Artificial Sequence
  chemically treated genomic DNA (Homo sapiens) CpG-island No: 8877
gattttatggttaatcgttatcgttagcgtcgtatttagacggttgttcgttttatcgatattttcgaattttatcggtagattaaggtgcgtttcggttaggaagttagttttcgcgttgtttggttgttaggttttaaattttagattattacgtatattatcggcgtaattttcgaggatttcgcgtgcggtgttgtcgaacggagtttttatagtttcggattttttattcgatcggagaagtttattagtttggtgttagtatttttatttttcgagatgttttgatattattttacgtcgttagcgaggatcgtcggaacgttatatagggtttcgacgttgttgatataggtcggtttattttatgcgtcggaggttgtcgggaaaggtggtttcgagcgtgggttagtacgacgtttttttagggagttgattaacgttgtttttttttcgtagatgtagcgttttgtttcggtatggacgaatagttcgaaatcgaaatttgtttttataatgtt

SEQ ID NO: 8878 - DNA, 524 bp, Artificial Sequence
  chemically treated genomic DNA (Homo sapiens) CpG-island No: 8878
aacattataaaaacaaatttcgatttcgaactattcgtccataccgaaacaaaacgctacatctacgaaaaaaaaacaacgttaatcaactccctaaaaaaacgtcgtactaacccacgctcgaaaccacctttcccgacaacctccgacgcataaaataaaccgacctatatcaacaacgtcgaaaccctatataacgttccgacgatcctcgctaacgacgtaaaataatatcaaaacatctcgaaaaataaaaatactaacaccaaactaataaacttctccgatcgaataaaaaatccgaaactataaaaactccgttcgacaacaccgcacgcgaaatcctcgaaaattacgccgataatatacgtaataatctaaaatttaaaacctaacaaccaaacaacgcgaaaactaacttcctaaccgaaacgcaccttaatctaccgataaaattcgaaaatatcgataaaacgaacaaccgtctaaatacgacgctaacgataacgattaaccataaaatc

SEQ ID NO: 8879 - DNA, 524 bp, Artificial Sequence
  chemically treated genomic DNA (Homo sapiens) CpG-island No: 8879
aatattatgggaataggtttcgatttcgaattgttcgtttatatcggggtagggcgttatatttgcggggaagaaatagcgttaattaattttttggaaggacgtcgtgttaatttacgttcgaagttatttttttcggtaattttcggcgtatggggtaaatcgatttgtgttaataacgtcgaaattttgtgtaacgtttcggcgattttcgttaacggcgtggagtggtattagaatatttcgaaaagtaaagatgttggtattaagttgatgggttttttcggtcgggtgaaaaattcgggattgtgggaatttcgttcggtaatatcgtacgcgagattttcgaagattacgtcggtggtatgcgtgatggtttgaaatttaaagtttggtagttaggtagcgcggggattgattttttgatcgaagcgtattttgatttgtcgatagaattcgaaagtatcggtaaagcgggtagtcgtttgggtacggcgttggcgatggcggttgattatgagatt

SEQ ID NO: 8880 - DNA, 524 bp, Artificial Sequence
  chemically treated genomic DNA (Homo sapiens) CpG-island No: 8880
aatctcataatcaaccgccatcgccaacgccgtacccaaacgactacccgctttaccgatactttcgaattctatcgacaaatcaaaatacgcttcgatcaaaaaatcaatccccgcgctacctaactaccaaactttaaatttcaaaccatcacgcataccaccgacgtaatcttcgaaaatctcgcgtacgatattaccgaacgaaattcccacaatcccgaatttttcacccgaccgaaaaaacccatcaacttaataccaacatctttacttttcgaaatattctaataccactccacgccgttaacgaaaatcgccgaaacgttacacaaaatttcgacgttattaacacaaatcgatttaccccatacgccgaaaattaccgaaaaaaataacttcgaacgtaaattaacacgacgtccttccaaaaaattaattaacgctatttcttccccgcaaatataacgccctaccccgatataaacgaacaattcgaaatcgaaacctattcccataatatt

SEQ ID NO: 8881 - DNA, 658 bp, Artificial Sequence
  chemically treated genomic DNA (Homo sapiens) CpG-island No: 8881
ttttaggcggttgagcgcgttaatggtatcgacggatggtagtggaatttcgtaggttgcgttgtcgtaagtttcggaagtcggtattatttgttcggaacgggaattttgtttaattatcgtagatttcgttttaagtaaagtttcgacgttgttgatggtattacgggtacgggtgatttcgtagttagtggtatatatgtttattacgaagttttttggcgtaacgttatttaattttaatatatcgagttaagtgtttttcgattaatttttcgtttcgtgcgaaaacgttacgtcgataggggaaaggattagcgttatacgcgtttaaaacggcgggttttttttgtcgttttttttttacgttttcgtggggttaggtgatacgggcgttttttttgtcgtttttttaggtgcgacgtaaaaagaattgcgtttatttcggtttgttaggagatgtttatcgtttttacgattacgaaggtaaagaaggcgtttattttattgtcggagttagcgttacgggtaagttagtaaatatttttatcgtaatattgtcgatatcggtaattaaataggtggtaataaatattattttcgggtttatttgtgtcgcgtcgaggatttgcgggtttataaaaacgatgtatattat

SEQ ID NO: 8882 - DNA, 658 bp, Artificial Sequence
  chemically treated genomic DNA (Homo sapiens) CpG-island No: 8882
ataatatacatcgtttttataaacccgcaaatcctcgacgcgacacaaataaacccgaaaataatatttattaccacctatttaattaccgatatcgacaatattacgataaaaatatttactaacttacccgtaacgctaactccgacaataaaataaacgccttctttaccttcgtaatcgtaaaaacgataaacatctcctaacaaaccgaaataaacgcaattctttttacgtcgcacctaaaaaaacgacaaaaaaaacgcccgtatcacctaaccccacgaaaacgtaaaaaaaaaacgacaaaaaaaacccgccgttttaaacgcgtataacgctaatcctttcccctatcgacgtaacgttttcgcacgaaacgaaaaattaatcgaaaaacacttaactcgatatattaaaattaaataacgttacgccaaaaaacttcgtaataaacatatataccactaactacgaaatcacccgtacccgtaataccatcaacaacgtcgaaactttacttaaaacgaaatctacgataattaaacaaaattcccgttccgaacaaataataccgacttccgaaacttacgacaacgcaacctacgaaattccactaccatccgtcgataccattaacgcgctcaaccgcctaaaa

SEQ ID NO: 8883 - DNA, 658 bp, Artificial Sequence
  chemically treated genomic DNA (Homo sapiens) CpG-island No: 8883
atggtgtatatcgtttttgtgaattcgtaaattttcggcgcggtataaatggattcgaaagtggtgtttgttattatttgtttgattgtcggtatcggtagtattgcgatggggatatttgttaatttattcgtggcgttggtttcggtaatggggtgaacgttttttttgttttcgtggtcgtgggggcgatgggtattttttggtagatcgggatgggcgtaattttttttgcgtcgtatttggaggggcggtaagaaaaacgttcgtattatttgattttacgggagcgtgaaaaaaaaacggtaagaaaaattcgtcgttttggacgcgtatggcgttgatttttttttttatcggcgtggcgttttcgtacggggcgaaagattggtcgaaaagtatttggttcggtatattgggattgagtggcgttgcgttagaaggtttcgtggtgaatatgtatgttattggttacgaaattattcgtattcgtgatgttattaataacgtcgaagttttatttggagcggaatttgcggtggttaaataaggttttcgtttcgaataggtaatatcggttttcgaaatttgcggtaacgtaatttgcggagttttattgttattcgtcgatattattaacgcgtttaatcgtttgaaa

SEQ ID NO: 8884 - DNA, 658 bp, Artificial Sequence
  chemically treated genomic DNA (Homo sapiens) CpG-island No: 8884
tttcaaacgattaaacgcgttaataatatcgacgaataacaataaaactccgcaaattacgttaccgcaaatttcgaaaaccgatattacctattcgaaacgaaaaccttatttaaccaccgcaaattccgctccaaataaaacttcgacgttattaataacatcacgaatacgaataatttcgtaaccaataacatacatattcaccacgaaaccttctaacgcaacgccactcaatcccaatataccgaaccaaatacttttcgaccaatctttcgccccgtacgaaaacgccacgccgataaaaaaaaaaatcaacgccatacgcgtccaaaacgacgaatttttcttaccgtttttttttcacgctcccgtaaaatcaaataatacgaacgtttttcttaccgcccctccaaatacgacgcaaaaaaaattacgcccatcccgatctaccaaaaaatacccatcgcccccacgaccacgaaaacaaaaaaaacgttcaccccattaccgaaaccaacgccacgaataaattaacaaatatccccatcgcaatactaccgataccgacaatcaaacaaataataacaaacaccactttcgaatccatttataccgcgccgaaaatttacgaattcacaaaaacgatatacaccat

SEQ ID NO: 8885 - DNA, 588 bp, Artificial Sequence
  chemically treated genomic DNA (Homo sapiens) CpG-island No: 8885
gcggcggcgatagttatcgttatttttcggtaaagattgttcgttcggttagtagataacgttacgagtgattgagttcgggcgcgggtttttcggtagattcgtattgcgcgatagtaagatattattgatttgatttaataatggtacggtattggtaaagttaaattgattaataacgggcgtgtcgttcggtttgttagtttagattttaatgatatagcgagcgttaattttaatcgtttaggcgttacgatagttatagttggtgttcgttttttatgttagtggggcgacgcgcggtaaggtattattcggtaagggttgcgttttattagttataattcggcgaatgatttacgtcgttttcgacgatattaaaggtcgtttaagtagcggatcgttaggttgtaagcgtaatttgtttgttttgtcgtggcgagtaaacgcggtatacgttgtcgttatattttttagttttgtattagcgtcgtcgagaatgagtgaaagattcggcgtatattcgttgggtaaatataacggtaatttaatattgcgtaattttgtcgtaaatcgtttcggtttata

SEQ ID NO: 8886 - DNA, 588 bp, Artificial Sequence
  chemically treated genomic DNA (Homo sapiens) CpG-island No: 8886
tataaaccgaaacgatttacgacaaaattacgcaatattaaattaccgttatatttacccaacgaatatacgccgaatctttcactcattctcgacgacgctaatacaaaactaaaaaatataacgacaacgtataccgcgtttactcgccacgacaaaacaaacaaattacgcttacaacctaacgatccgctacttaaacgacctttaatatcgtcgaaaacgacgtaaatcattcgccgaattataactaataaaacgcaacccttaccgaataataccttaccgcgcgtcgccccactaacataaaaaacgaacaccaactataactatcgtaacgcctaaacgattaaaattaacgctcgctatatcattaaaatctaaactaacaaaccgaacgacacgcccgttattaatcaatttaactttaccaataccgtaccattattaaatcaaatcaataatatcttactatcgcgcaatacgaatctaccgaaaaacccgcgcccgaactcaatcactcgtaacgttatctactaaccgaacgaacaatctttaccgaaaaataacgataactatcgccgccgc

SEQ ID NO: 8887 - DNA, 588 bp, Artificial Sequence
  chemically treated genomic DNA (Homo sapiens) CpG-island No: 8887
tatggatcgaaacggtttgcggtaaagttacgtaatgttggattgtcgttatatttgtttaacgggtgtgcgtcgaattttttatttattttcggcggcgttggtgtaaaattggaagatatggcggtagcgtatatcgcgtttgttcgttacggtaaggtaggtaaattgcgtttatagtttgacgattcgttgtttgaacggtttttaatgtcgtcgggggcggcgtggattattcgtcggattatggttgatgaagcgtaatttttgtcggatagtgttttgtcgcgcgtcgttttattggtatggaaaacgggtattagttatggttatcgtgacgtttgggcgattggggttaacgttcgttatgttattgggatttggattggtagatcggacggtacgttcgttgttggttagtttggttttgttagtgtcgtattattgttgaattaggttaataatattttattgtcgcgtagtgcgaatttgtcggaagattcgcgttcgaatttagttattcgtggcgttatttgttggtcgggcggatagtttttgtcggaaggtgacggtaattgtcgtcgtcgt

SEQ ID NO: 8888 - DNA, 588 bp, Artificial Sequence
  chemically treated genomic DNA (Homo sapiens) CpG-island No: 8888
acgacgacgacaattaccgtcaccttccgacaaaaactatccgcccgaccaacaaataacgccacgaataactaaattcgaacgcgaatcttccgacaaattcgcactacgcgacaataaaatattattaacctaattcaacaataatacgacactaacaaaaccaaactaaccaacaacgaacgtaccgtccgatctaccaatccaaatcccaataacataacgaacgttaaccccaatcgcccaaacgtcacgataaccataactaatacccgttttccataccaataaaacgacgcgcgacaaaacactatccgacaaaaattacgcttcatcaaccataatccgacgaataatccacgccgcccccgacgacattaaaaaccgttcaaacaacgaatcgtcaaactataaacgcaatttacctaccttaccgtaacgaacaaacgcgatatacgctaccgccatatcttccaattttacaccaacgccgccgaaaataaataaaaaattcgacgcacacccgttaaacaaatataacgacaatccaacattacgtaactttaccgcaaaccgtttcgatccata

SEQ ID NO: 8889 - DNA, 727 bp, Artificial Sequence
  chemically treated genomic DNA (Homo sapiens) CpG-island No: 8889
ttcgattacgatatacgtttagatatattatattagcgtagtaattatcgttgttagtatatatcgagtacgtattttcgcgacgtttatgtattttagatattagattatagttgtattttacgcgtatagcgatttacgtcgatataatatagtttatatacgagagattatttaatatatttgtacgatgtatagatagtatacgttgtttagtgatatgattgatgttttatttacgttaatatttagagattttagagcgcgcgtattgatcgtaatcgtgagatagatatcgcgatcggatatatagacgtttatattgagagttatgcgttatattttatagcgagatatcgttcgatattatagacgtacgtatatattagcgtgtacgtgtattagcgatcgttagcgattataatacgtagcgtatatcgtcgacgaatattgagttattagtattattattagatacgcgttcgtacgagatttagtatgcgtgtacgttgtattagtgagtcgtcgtcgatacgagtttcgagtagttttgttatattatacgttgtagatagcgtagttacgtttacgtagttgaacgatcgtattgatttattatcgtagtatattatagattaatcgtgattagcgattatagattatatcgattgcggttattgtagtttgatttagtagttgtataggttatttgttatattatgtagat

SEQ ID NO: 8890 - DNA, 727 bp, Artificial Sequence
  chemically treated genomic DNA (Homo sapiens) CpG-island No: 8890
atctacataatataacaaataacctatacaactactaaatcaaactacaataaccgcaatcgatataatctataatcgctaatcacgattaatctataatatactacgataataaatcaatacgatcgttcaactacgtaaacgtaactacgctatctacaacgtataatataacaaaactactcgaaactcgtatcgacgacgactcactaatacaacgtacacgcatactaaatctcgtacgaacgcgtatctaataataatactaataactcaatattcgtcgacgatatacgctacgtattataatcgctaacgatcgctaatacacgtacacgctaatatatacgtacgtctataatatcgaacgatatctcgctataaaatataacgcataactctcaatataaacgtctatatatccgatcgcgatatctatctcacgattacgatcaatacgcgcgctctaaaatctctaaatattaacgtaaataaaacatcaatcatatcactaaacaacgtatactatctatacatcgtacaaatatattaaataatctctcgtatataaactatattatatcgacgtaaatcgctatacgcgtaaaatacaactataatctaatatctaaaatacataaacgtcgcgaaaatacgtactcgatatatactaacaacgataattactacgctaatataatatatctaaacgtatatcgtaatcgaa

SEQ ID NO: 8891 - DNA, 727 bp, Artificial Sequence
  chemically treated genomic DNA (Homo sapiens) CpG-island No: 8891
atttgtatgatgtggtagatagtttgtatagttgttagattaggttgtagtagtcgtagtcgatgtggtttatagtcgttagttacggttggtttatagtgtgttacgatgatgagttagtgcgatcgtttagttgcgtgagcgtagttacgttatttgtagcgtgtgatgtgatagagttattcggagttcgtatcgacgacggtttattgatgtagcgtgtacgtatgttgagtttcgtgcgagcgcgtatttaatagtgatgttggtgatttagtattcgtcgacggtatgcgttgcgtgttgtggtcgttagcgatcgttagtgtacgtgtacgttagtatgtgcgtgcgtttgtagtgtcggacgatatttcgttatagagtgtgacgtatagtttttagtgtagacgtttgtgtgttcgatcgcgatgtttgttttacgattacggttagtgcgcgcgttttgaggtttttggatgttgacgtgagtgaagtattagttatgttattggatagcgtatgttgtttgtatatcgtgtaggtgtgttgagtggtttttcgtgtgtggattgtgttgtgtcgacgtgagtcgttgtgcgcgtgggatatagttgtggtttgatatttggagtatatgggcgtcgcgagagtacgtgttcgatgtgtgttggtagcgatggttgttgcgttgatgtgatgtgtttgagcgtgtgtcgtaatcgga

SEQ ID NO: 8892 - DNA, 727 bp, Artificial Sequence
  chemically treated genomic DNA (Homo sapiens) CpG-island No: 8892
tccgattacgacacacgctcaaacacatcacatcaacgcaacaaccatcgctaccaacacacatcgaacacgtactctcgcgacgcccatatactccaaatatcaaaccacaactatatcccacgcgcacaacgactcacgtcgacacaacacaatccacacacgaaaaaccactcaacacacctacacgatatacaaacaacatacgctatccaataacataactaatacttcactcacgtcaacatccaaaaacctcaaaacgcgcgcactaaccgtaatcgtaaaacaaacatcgcgatcgaacacacaaacgtctacactaaaaactatacgtcacactctataacgaaatatcgtccgacactacaaacgcacgcacatactaacgtacacgtacactaacgatcgctaacgaccacaacacgcaacgcataccgtcgacgaatactaaatcaccaacatcactattaaatacgcgctcgcacgaaactcaacatacgtacacgctacatcaataaaccgtcgtcgatacgaactccgaataactctatcacatcacacgctacaaataacgtaactacgctcacgcaactaaacgatcgcactaactcatcatcgtaacacactataaaccaaccgtaactaacgactataaaccacatcgactacgactactacaacctaatctaacaactatacaaactatctaccacatcatacaaat

SEQ ID NO: 8893 - DNA, 600 bp, Artificial Sequence
  chemically treated genomic DNA (Homo sapiens) CpG-island No: 8893
ggtattattagatacgtttcgcgatacgattattttatattatttcgattagtagtagcgatttattaacgtttatatttcgtataatatacgtattacgagtagtataacgtttttatttaagttttatattagtttttttatagtcgtaatttagacgttaatacgttatattagtgtatagttttaatcgatatacgtagcgttacgaataatattagtatgtttttcgtattatttttagtatattatacgtatttgtatatttacgttttgacggatgagagattttacgatatagataagacgcgcgtaatacgtacgattagagatatttaattatttcgacgtagttagttatattttcgaatattttatagcgatttttatattatgttacgttagattattattgcgattatattatattatatcgtagagatattacgatattttttgtacgtatttgttatatattttagttaattagagtatacgaacgtttattattattatacgatagttttattttatacgagatgagattatattagatatatagttatatagacgacgatattattttcgttacgtgttggt

SEQ ID NO: 8894 - DNA, 600 bp, Artificial Sequence
  chemically treated genomic DNA (Homo sapiens) CpG-island No: 8894
accaacacgtaacgaaaataatatcgtcgtctatataactatatatctaatataatctcatctcgtataaaataaaactatcgtataataataataaacgttcgtatactctaattaactaaaatatataacaaatacgtacaaaaaatatcgtaatatctctacgatataatataatataatcgcaataataatctaacgtaacataatataaaaatcgctataaaatattcgaaaatataactaactacgtcgaaataattaaatatctctaatcgtacgtattacgcgcgtcttatctatatcgtaaaatctctcatccgtcaaaacgtaaatatacaaatacgtataatatactaaaaataatacgaaaaacatactaatattattcgtaacgctacgtatatcgattaaaactatacactaatataacgtattaacgtctaaattacgactataaaaaaactaatataaaacttaaataaaaacgttatactactcgtaatacgtatattatacgaaatataaacgttaataaatcgctactactaatcgaaataatataaaataatcgtatcgcgaaacgtatctaataatacc

SEQ ID NO: 8895 - DNA, 600 bp, Artificial Sequence
  chemically treated genomic DNA (Homo sapiens) CpG-island No: 8895
attaatacgtagcggaggtgatgtcgtcgtttgtgtggttgtatgtttggtatggttttatttcgtgtgggatggagttgtcgtgtggtggtggtggacgttcgtgtattttggttggttgaggtatgtggtaggtgcgtgtaagagatgtcgtggtgtttttacggtgtggtgtgatgtgatcgtagtggtgatttgacgtgatatgatgtgggggtcgttgtggagtgttcgagagtgtagttggttacgtcggagtggttggatgtttttagtcgtgcgtgttgcgcgcgttttgtttgtgtcgtggggttttttattcgttagagcgtgagtgtgtaggtgcgtgtggtgtgttaagagtgatacgaggaatatgttgatgttgttcgtagcgttacgtgtgtcgattggagttatgtattagtgtggcgtgttagcgtttgggttgcgattgtgaggagattagtgtgaggtttgggtgaaggcgttgtattgttcgtagtgcgtgtgttgtgcggagtgtgggcgttgatgagtcgttgttgttagtcgagatgatgtaggatagtcgtgtcgcggagcgtgtttggtggtgtt

SEQ ID NO: 8896 - DNA, 600 bp, Artificial Sequence
  chemically treated genomic DNA (Homo sapiens) CpG-island No: 8896
aacaccaccaaacacgctccgcgacacgactatcctacatcatctcgactaacaacaacgactcatcaacgcccacactccgcacaacacacgcactacgaacaatacaacgccttcacccaaacctcacactaatctcctcacaatcgcaacccaaacgctaacacgccacactaatacataactccaatcgacacacgtaacgctacgaacaacatcaacatattcctcgtatcactcttaacacaccacacgcacctacacactcacgctctaacgaataaaaaaccccacgacacaaacaaaacgcgcgcaacacgcacgactaaaaacatccaaccactccgacgtaaccaactacactctcgaacactccacaacgacccccacatcatatcacgtcaaatcaccactacgatcacatcacaccacaccgtaaaaacaccacgacatctcttacacgcacctaccacatacctcaaccaaccaaaatacacgaacgtccaccaccaccacacgacaactccatcccacacgaaataaaaccataccaaacatacaaccacacaaacgacgacatcacctccgctacgtattaat

SEQ ID NO: 8897 - DNA, 509 bp, Artificial Sequence
  chemically treated genomic DNA (Homo sapiens) CpG-island No: 8897
cgatagttaaggttttttcggatcgtacgttggattttgttttttcggtttttaacgggagacgggttgtcgtaaagtttcgttttgtcgattgttgtaaagcgttttacgattgaattcggaatcgatttatggttagtagtcgttttcgttttgttttaaatatttgggttttaggagtcgggcggaggtgattgtcgcgtgtttgcgttgtacgtttatcgttcgaaatacggcggcggttttagggttgttgcggtttcggcgggggtaggtttcggcgttcgttcgtttttcggtttttattattttagggtgtatcgcggcgggcgcgggcgcgcggttatgttgcggtagtttgttgttttttttttgcggaggcgaagggttagttgtggatcgcgaagcgttcggtttcgtttttgttttttgtagtttttttttttttttgtttttcgttattcgtattcgggttcggattaggtacgtcggtttattagttggtttgg

SEQ ID NO: 8898 - DNA, 509 bp, Artificial Sequence
  chemically treated genomic DNA (Homo sapiens) CpG-island No: 8898
ccaaaccaactaataaaccgacgtacctaatccgaacccgaatacgaataacgaaaaacaaaaaaaaaaaaaaactacaaaaaacaaaaacgaaaccgaacgcttcgcgatccacaactaacccttcgcctccgcaaaaaaaaaacaacaaactaccgcaacataaccgcgcgcccgcgcccgccgcgatacaccctaaaataataaaaaccgaaaaacgaacgaacgccgaaacctacccccgccgaaaccgcaacaaccctaaaaccgccgccgtatttcgaacgataaacgtacaacgcaaacacgcgacaatcacctccgcccgactcctaaaacccaaatatttaaaacaaaacgaaaacgactactaaccataaatcgattccgaattcaatcgtaaaacgctttacaacaatcgacaaaacgaaactttacgacaacccgtctcccgttaaaaaccgaaaaaacaaaatccaacgtacgatccgaaaaaaccttaactatcg

SEQ ID NO: 8899 - DNA, 509 bp, Artificial Sequence
  chemically treated genomic DNA (Homo sapiens) CpG-island No: 8899
ttaagttagttggtgggtcgacgtgtttggttcgggttcgggtacgggtgacggaggatagagaagggagggggttgtaggaggtagaggcgaagtcgggcgtttcgcggtttatagttggtttttcgttttcgtaggaagaaaataataaattatcgtaatatggtcgcgcgttcgcgttcgtcgcggtgtattttgggatgatggaggtcgggaggcgggcgggcgtcggggtttgttttcgtcgaggtcgtagtagttttgaggtcgtcgtcgtgtttcgggcggtgggcgtgtaacgtaaatacgcggtagttattttcgttcggtttttgaaatttaaatgtttgaagtagggcggggacgattgttggttataggtcgatttcgggtttagtcgtaaggcgttttgtagtagtcggtaaagcgaagttttacggtagttcgtttttcgttaggagtcggggaggtaaggtttagcgtacggttcgggggaattttaattgtcg

SEQ ID NO: 8900 - DNA, 509 bp, Artificial Sequence
  chemically treated genomic DNA (Homo sapiens) CpG-island No: 8900
cgacaattaaaattcccccgaaccgtacgctaaaccttacctccccgactcctaacgaaaaacgaactaccgtaaaacttcgctttaccgactactacaaaacgccttacgactaaacccgaaatcgacctataaccaacaatcgtccccgccctacttcaaacatttaaatttcaaaaaccgaacgaaaataactaccgcgtatttacgttacacgcccaccgcccgaaacacgacgacgacctcaaaactactacgacctcgacgaaaacaaaccccgacgcccgcccgcctcccgacctccatcatcccaaaatacaccgcgacgaacgcgaacgcgcgaccatattacgataatttattattttcttcctacgaaaacgaaaaaccaactataaaccgcgaaacgcccgacttcgcctctacctcctacaaccccctcccttctctatcctccgtcacccgtacccgaacccgaaccaaacacgtcgacccaccaactaacttaa

SEQ ID NO: 8901 - DNA, 655 bp, Artificial Sequence
  chemically treated genomic DNA (Homo sapiens) CpG-island No: 8901
gttataattacgttgtttttttttatatatatttcgcgtttcgtttttattttttatattgtgattcgttttttcgtttttcgtgttttattgttttatttttttatatattgcgcgatttgcgttttttagcgtcgttttttcgatttgttttttatttttgtcggatgacgttttacgtatttagttttagttttattgtttgtttttttgaggtatcgtgtcggttttttcgaggttttttgtatatttttacgtggcggcgtgtttgttttttcgggttttcgtgtagtttttttcggcgtcgcgtgtacgtttttacggggtatcgtgtaggttttttcgaggtcgcgtgtagatttttacggggtagcgtgtaggtttttacggggtatcgtgtaggtttttacgaggtagcgtgtaggtttttacggggtatcgtgtagttttttacggcgcggcgtgatattttttacggcgcggcgtttaggtttttacggggtatcgtgtcgatttttacggggtagtttgtaggtttttacggggtagcgtgtaggtttttacgaggtatcgtgtaggtttttacgaggtagcgtgtaggtttttgagaggtatcgtgtaggtttttatggggtagtatggaattaattataag

SEQ ID NO: 8902 - DNA, 655 bp, Artificial Sequence
  chemically treated genomic DNA (Homo sapiens) CpG-island No: 8902
cttataattaattccatactaccccataaaaacctacacgatacctctcaaaaacctacacgctacctcgtaaaaacctacacgatacctcgtaaaaacctacacgctaccccgtaaaaacctacaaactaccccgtaaaaatcgacacgataccccgtaaaaacctaaacgccgcgccgtaaaaaatatcacgccgcgccgtaaaaaactacacgataccccgtaaaaacctacacgctacctcgtaaaaacctacacgataccccgtaaaaacctacacgctaccccgtaaaaatctacacgcgacctcgaaaaaacctacacgataccccgtaaaaacgtacacgcgacgccgaaaaaaactacacgaaaacccgaaaaaacaaacacgccgccacgtaaaaatatacaaaaaacctcgaaaaaaccgacacgatacctcaaaaaaacaaacaataaaactaaaactaaatacgtaaaacgtcatccgacaaaaataaaaaacaaatcgaaaaaacgacgctaaaaaacgcaaatcgcgcaatatataaaaaaataaaacaataaaacacgaaaaacgaaaaaacgaatcacaatataaaaaataaaaacgaaacgcgaaatatatataaaaaaaaacaacgtaattataac

SEQ ID NO: 8903 - DNA, 655 bp, Artificial Sequence
  chemically treated genomic DNA (Homo sapiens) CpG-island No: 8903
tttgtgattgattttatgttgttttatgaagatttgtacggtgttttttaaagatttgtacgttgtttcgtgaagatttgtacggtgtttcgtgaagatttgtacgttgtttcgtgaagatttgtaagttgtttcgtgaagatcggtacggtgtttcgtgaagatttggacgtcgcgtcgtgaagagtgttacgtcgcgtcgtggaagattatacggtgtttcgtgaagatttgtacgttgtttcgtgaagatttgtacggtatttcgtgaagatttgtacgttgtttcgtgaagatttgtacgcggtttcgagaagatttgtacggtgtttcgtgaagacgtgtacgcggcgtcgggagagattgtacggagattcgggaggataggtacgtcgttacgtgaggatgtgtagggagtttcgggaagatcgatacggtgttttaggaggataggtagtggggttggagttagatgcgtggagcgttattcggtagaggtagagagtaggtcggaggagcgacgttagagaacgtagatcgcgtagtgtgtagggagatagggtagtaggatacggaagacgggaaagcggattatagtgtaagagatggagacgggacgcgaggtgtgtgtaagaggaagtagcgtgattgtgat

SEQ ID NO: 8904 - DNA, 655 bp, Artificial Sequence
  chemically treated genomic DNA (Homo sapiens) CpG-island No: 8904
atcacaatcacgctacttcctcttacacacacctcgcgtcccgtctccatctcttacactataatccgctttcccgtcttccgtatcctactaccctatctccctacacactacgcgatctacgttctctaacgtcgctcctccgacctactctctacctctaccgaataacgctccacgcatctaactccaaccccactacctatcctcctaaaacaccgtatcgatcttcccgaaactccctacacatcctcacgtaacgacgtacctatcctcccgaatctccgtacaatctctcccgacgccgcgtacacgtcttcacgaaacaccgtacaaatcttctcgaaaccgcgtacaaatcttcacgaaacaacgtacaaatcttcacgaaataccgtacaaatcttcacgaaacaacgtacaaatcttcacgaaacaccgtataatcttccacgacgcgacgtaacactcttcacgacgcgacgtccaaatcttcacgaaacaccgtaccgatcttcacgaaacaacttacaaatcttcacgaaacaacgtacaaatcttcacgaaacaccgtacaaatcttcacgaaacaacgtacaaatctttaaaaaacaccgtacaaatcttcataaaacaacataaaatcaatcacaaa

SEQ ID NO: 8905 - DNA, 849 bp, Artificial Sequence
  chemically treated genomic DNA (Homo sapiens) CpG-island No: 8905
ttcgcgtttagtcggtttcgcgtagttttatttggatgttcgttttcggcggtttgtagggttttgtaggcggtcgttggacggtaggtaggaggcgtggagtggttagtaggcggtcgttgtacgggttttttcgtttggcgtcgaatacgggcgtaatagcgtttttagtagtcgtagtttcggcgttatcgcgttttttggttcggtttcggtattagtatttcgattagcgtcgtttcggtcgtcgtcggtcgcgtacgtttcgtagtatttttcgtagcggcgcgcggttttcgggcggttagcgacgacgcgcggtatagtacgaagattagcggcgagcggatggcgcggtcgtcgtcgtcgcgttttcgtcgttttagtcgttttcgtcgttttttgcgtttcgcgtcgtttcgggtttcgcgttttttgtcgtcgcgtcgttcggtttggtcgcgtttggtttcggcgggaatatcgttcgtgcgaagtttcgtagtagcgcgcgttttgttcgcgtttttatagttcgtttattagtagtatttgttcgcggtttttcgtcgtttttattaacgtttggaagggcggttcggtagggcgcgtaagtcgggtcgttagcgtttttagttcgcgttttatgttggtcgtcggtcgttttttgcgtcgtcgcggtcgggcgtattcgttgttcgtttttcgggcggtggcgtttcggtatagaggatacgttttcgaggtcgagtttagtcggatttttcggtttcggcggggtttttgtgtgtttatttttttgggcgattatatcgcgggttcgggtgggaggaagagggtttttttttt

SEQ ID NO: 8906 - DNA, 849 bp, Artificial Sequence
  chemically treated genomic DNA (Homo sapiens) CpG-island No: 8906
aaaaaaaaaaccctcttcctcccacccgaacccgcgatataatcgcccaaaaaaataaacacacaaaaaccccgccgaaaccgaaaaatccgactaaactcgacctcgaaaacgtatcctctataccgaaacgccaccgcccgaaaaacgaacaacgaatacgcccgaccgcgacgacgcaaaaaacgaccgacgaccaacataaaacgcgaactaaaaacgctaacgacccgacttacgcgccctaccgaaccgcccttccaaacgttaataaaaacgacgaaaaaccgcgaacaaatactactaataaacgaactataaaaacgcgaacaaaacgcgcgctactacgaaacttcgcacgaacgatattcccgccgaaaccaaacgcgaccaaaccgaacgacgcgacgacaaaaaacgcgaaacccgaaacgacgcgaaacgcaaaaaacgacgaaaacgactaaaacgacgaaaacgcgacgacgacgaccgcgccatccgctcgccgctaatcttcgtactataccgcgcgtcgtcgctaaccgcccgaaaaccgcgcgccgctacgaaaaatactacgaaacgtacgcgaccgacgacgaccgaaacgacgctaatcgaaatactaataccgaaaccgaaccaaaaaacgcgataacgccgaaactacgactactaaaaacgctattacgcccgtattcgacgccaaacgaaaaaacccgtacaacgaccgcctactaaccactccacgcctcctacctaccgtccaacgaccgcctacaaaaccctacaaaccgccgaaaacgaacatccaaataaaactacgcgaaaccgactaaacgcgaa

SEQ ID NO: 8907 - DNA, 849 bp, Artificial Sequence
  chemically treated genomic DNA (Homo sapiens) CpG-island No: 8907
gaggagaaagtttttttttttttattcgggttcgcgatgtggtcgtttagaggggtaagtatatagaggtttcgtcggggtcgaggggttcggttgggttcggtttcgggggcgtgttttttgtgtcggggcgttatcgttcgagaggcgggtagcgggtgcgttcggtcgcggcggcgtagagggcggtcggcggttagtatggagcgcgagttggaggcgttggcggttcggtttgcgcgttttgtcgagtcgtttttttaggcgttggtggaagcggcggggggtcgcgggtaggtgttgttggtgggcgagttgtgggagcgcgaatagagcgcgcgttgttgcgggatttcgtacgggcggtgttttcgtcggagttaggcgcggttaagtcgggcggcgcggcggtagagggcgcggggttcggggcggcgcggggcgtagagggcggcgagggcggttggggcggcgggggcgcggcggcggcggtcgcgttattcgttcgtcgttggttttcgtgttgtgtcgcgcgtcgtcgttggtcgttcgggagtcgcgcgtcgttgcgggagatgttgcgggacgtgcgcggtcggcggcggtcggggcggcgttggtcggggtgttggtgtcgaggtcgggttagaggacgcggtggcgtcggggttgcggttgttggaggcgttgttgcgttcgtgttcggcgttaggcgggggggttcgtgtagcggtcgtttattgattattttacgttttttgtttgtcgtttagcggtcgtttgtagggttttgtaagtcgtcggagacgggtatttaggtgagattgcgcggggtcggttgggcgcggg

SEQ ID NO: 8908 - DNA, 849 bp, Artificial Sequence
  chemically treated genomic DNA (Homo sapiens) CpG-island No: 8908
cccgcgcccaaccgaccccgcgcaatctcacctaaatacccgtctccgacgacttacaaaaccctacaaacgaccgctaaacgacaaacaaaaaacgtaaaataatcaataaacgaccgctacacgaacccccccgcctaacgccgaacacgaacgcaacaacgcctccaacaaccgcaaccccgacgccaccgcgtcctctaacccgacctcgacaccaacaccccgaccaacgccgccccgaccgccgccgaccgcgcacgtcccgcaacatctcccgcaacgacgcgcgactcccgaacgaccaacgacgacgcgcgacacaacacgaaaaccaacgacgaacgaataacgcgaccgccgccgccgcgcccccgccgccccaaccgccctcgccgccctctacgccccgcgccgccccgaaccccgcgccctctaccgccgcgccgcccgacttaaccgcgcctaactccgacgaaaacaccgcccgtacgaaatcccgcaacaacgcgcgctctattcgcgctcccacaactcgcccaccaacaacacctacccgcgaccccccgccgcttccaccaacgcctaaaaaaacgactcgacaaaacgcgcaaaccgaaccgccaacgcctccaactcgcgctccatactaaccgccgaccgccctctacgccgccgcgaccgaacgcacccgctacccgcctctcgaacgataacgccccgacacaaaaaacacgcccccgaaaccgaacccaaccgaacccctcgaccccgacgaaacctctatatacttacccctctaaacgaccacatcgcgaacccgaataaaaaaaaaaaaactttctcctc

SEQ ID NO: 8909 - DNA, 637 bp, Artificial Sequence
  chemically treated genomic DNA (Homo sapiens) CpG-island No: 8909
ttaggcggtcgttcggttttgtcgaagaaagatttttggatcgtagcgagaagtggtagtattcggcggcggcggagcgggcgcgtcgggttttttttcggaataagaggttcgtagagtttcggttttttaaacgtatcgttgttttttttagtattaggacggcgggcggagggtggttcggttgtattcggggacgcgtttatttgttgttcggtcgcggatattcgcgttattttagttcggtcgttattttcgtagtcgttattcgggtaatcgtcgtcgttatttcggcgttacgtgggggcggttagtaatcgcgcggggtcgtcgacgcgagagtagatttgggagggaaggtgggcgatttcgaaattttttggcggcggaagtgagggtttatagtttagtagtggtgaaggtttacgcgttggatgatcgcgttttttgtggtttttttattattttattttcgttcgtttatttattcgtttatttttttttcgttgcgttagtcgttgcgtcggttttcgggatgagtcggagtaggtttaattttttgttttaaggagttcgtggtcgcgtagagaatataaattaggatagtgtggtgttcgtggggaaagagttaggtatg

SEQ ID NO: 8910 - DNA, 637 bp, Artificial Sequence
  chemically treated genomic DNA (Homo sapiens) CpG-island No: 8910
catacctaactctttccccacgaacaccacactatcctaatttatattctctacgcgaccacgaactccttaaaacaaaaaattaaacctactccgactcatcccgaaaaccgacgcaacgactaacgcaacgaaaaaaaaataaacgaataaataaacgaacgaaaataaaataataaaaaaaccacaaaaaacgcgatcatccaacgcgtaaaccttcaccactactaaactataaaccctcacttccgccgccaaaaaatttcgaaatcgcccaccttccctcccaaatctactctcgcgtcgacgaccccgcgcgattactaaccgcccccacgtaacgccgaaataacgacgacgattacccgaataacgactacgaaaataacgaccgaactaaaataacgcgaatatccgcgaccgaacaacaaataaacgcgtccccgaatacaaccgaaccaccctccgcccgccgtcctaatactaaaaaaaacaacgatacgtttaaaaaaccgaaactctacgaacctcttattccgaaaaaaaacccgacgcgcccgctccgccgccgccgaatactaccacttctcgctacgatccaaaaatctttcttcgacaaaaccgaacgaccgcctaa

SEQ ID NO: 8911 - DNA, 637 bp, Artificial Sequence
  chemically treated genomic DNA (Homo sapiens) CpG-island No: 8911
tatgtttgattttttttttacggatattatattgttttagtttgtgttttttacgcgattacgagttttttgagataaggggttgagtttgtttcggtttatttcgagagtcggcgtagcgattggcgtaacgaaagggaaatgaacgaatgaatgaacgaacgaaagtggagtggtggagagattatagaagacgcggttatttagcgcgtgaatttttattattgttgggttgtggatttttattttcgtcgttaggaagtttcggggtcgtttatttttttttttaggtttgttttcgcgtcggcggtttcgcgcgattgttggtcgtttttacgtgacgtcggggtggcggcggcggttgttcgggtgacggttgcggaggtggcggtcgggttgggatagcgcgagtgttcgcggtcgagtagtaggtaagcgcgttttcggatgtagtcgggttatttttcgttcgtcgttttggtgttgggaggagtagcggtgcgtttggagggtcgaggttttgcggattttttgtttcgaggaaaaattcgacgcgttcgtttcgtcgtcgtcggatgttattatttttcgttgcggtttagggattttttttcggtaaggtcgagcggtcgtttgg

SEQ ID NO: 8912 - DNA, 637 bp, Artificial Sequence
  chemically treated genomic DNA (Homo sapiens) CpG-island No: 8912
ccaaacgaccgctcgaccttaccgaaaaaaaatccctaaaccgcaacgaaaaataataacatccgacgacgacgaaacgaacgcgtcgaatttttcctcgaaacaaaaaatccgcaaaacctcgaccctccaaacgcaccgctactcctcccaacaccaaaacgacgaacgaaaaataacccgactacatccgaaaacgcgcttacctactactcgaccgcgaacactcgcgctatcccaacccgaccgccacctccgcaaccgtcacccgaacaaccgccgccgccaccccgacgtcacgtaaaaacgaccaacaatcgcgcgaaaccgccgacgcgaaaacaaacctaaaaaaaaaaataaacgaccccgaaacttcctaacgacgaaaataaaaatccacaacccaacaataataaaaattcacgcgctaaataaccgcgtcttctataatctctccaccactccactttcgttcgttcattcattcgttcatttccctttcgttacgccaatcgctacgccgactctcgaaataaaccgaaacaaactcaaccccttatctcaaaaaactcgtaatcgcgtaaaaaacacaaactaaaacaatataatatccgtaaaaaaaaaatcaaacata

SEQ ID NO: 8913 - DNA, 515 bp, Artificial Sequence
  chemically treated genomic DNA (Homo sapiens) CpG-island No: 8913
tcgggtgcgcgcgtttttatagcgttcggttttagtggttcgggttattaatattcggcgtagttaaatttagtaggtatagtagtcgtcgaggaatttgcgggcggacgggcggcgtaggacgcggttcgtgtttaggaggtagtcggcgtcggcggtcgtttgcggggggttgggtcgggacggcgagggttggggcgttcgggggtttcgtgggggttgcgtttcgtcgcgcgttggtcgttttgttttttagttcggtcgatttgtagaggtttcgaatgggcgtatcgcggatacgcgttttttttttttggtagaaatgtgaggtcgttcggcgtcgcgtttcgtcgttttagtttttgttaggtggaaaggatagcgtagacgaattaggggcgttgtttggagggttagcgcggaacgggtggagaggtagaggcggggtttttagtggggttggaaaaatttttttttttaggtgtttgtatcgatagcggtaaaggtagttggga

SEQ ID NO: 8914 - DNA, 515 bp, Artificial Sequence
  chemically treated genomic DNA (Homo sapiens) CpG-island No: 8914
tcccaactacctttaccgctatcgatacaaacacctaaaaaaaaaaatttttccaaccccactaaaaaccccgcctctacctctccacccgttccgcgctaaccctccaaacaacgcccctaattcgtctacgctatcctttccacctaacaaaaactaaaacgacgaaacgcgacgccgaacgacctcacatttctaccaaaaaaaaaaaacgcgtatccgcgatacgcccattcgaaacctctacaaatcgaccgaactaaaaaacaaaacgaccaacgcgcgacgaaacgcaacccccacgaaacccccgaacgccccaaccctcgccgtcccgacccaaccccccgcaaacgaccgccgacgccgactacctcctaaacacgaaccgcgtcctacgccgcccgtccgcccgcaaattcctcgacgactactatacctactaaatttaactacgccgaatattaataacccgaaccactaaaaccgaacgctataaaaacgcgcgcacccga

SEQ ID NO: 8915 - DNA, 515 bp, Artificial Sequence
  chemically treated genomic DNA (Homo sapiens) CpG-island No: 8915
ttttagttgtttttgtcgttgtcgatgtagatatttaaaaaggaggatttttttaattttattgggagtttcgtttttgtttttttattcgtttcgcgttgattttttaggtagcgtttttggttcgtttgcgttgttttttttatttgataaaagttggggcggcggggcgcggcgtcgggcgattttatatttttgttaaaggagagagacgcgtgttcgcggtgcgtttattcggggtttttgtaaatcgatcgagttgaggaataaagcggttagcgcgcggcgagacgtagtttttacggaattttcgagcgttttagttttcgtcgtttcggtttagtttttcgtaagcggtcgtcggcgtcggttgttttttgggtacgagtcgcgttttgcgtcgttcgttcgttcgtaggtttttcggcggttattgtatttgttaaatttagttgcgtcgggtattaatagttcgagttattgggatcgggcgttgtaggggcgcgcgtattcgg

SEQ ID NO: 8916 - DNA, 515 bp, Artificial Sequence
  chemically treated genomic DNA (Homo sapiens) CpG-island No: 8916
ccgaatacgcgcgcccctacaacgcccgatcccaataactcgaactattaatacccgacgcaactaaatttaacaaatacaataaccgccgaaaaacctacgaacgaacgaacgacgcaaaacgcgactcgtacccaaaaaacaaccgacgccgacgaccgcttacgaaaaactaaaccgaaacgacgaaaactaaaacgctcgaaaattccgtaaaaactacgtctcgccgcgcgctaaccgctttattcctcaactcgatcgatttacaaaaaccccgaataaacgcaccgcgaacacgcgtctctctcctttaacaaaaatataaaatcgcccgacgccgcgccccgccgccccaacttttatcaaataaaaaaaacaacgcaaacgaaccaaaaacgctacctaaaaaatcaacgcgaaacgaataaaaaaacaaaaacgaaactcccaataaaattaaaaaaatcctcctttttaaatatctacatcgacaacgacaaaaacaactaaaa

SEQ ID NO: 8917 - DNA, 786 bp, Artificial Sequence
  chemically treated genomic DNA (Homo sapiens) CpG-island No: 8917
agttggagatacgtttttttcgttaatagaaaaaggattttcgcggtcggcgtgcggtttacggtgttatattgcgttagtgcggggagggcggtagggtcgggtttttcgaggggttcgcgcgcggtagaatttgtagtgtttttcgttcgcggcgtttttatttcggggagtaaggtcgggttatttagttttagtaggaacggttatacgtgtgcgcgtttgcgcggggataggggcgattttttattcgttcgtttttatttattatatttaatttcgttcgcgattgtttaagcgtcggggggaataaggagagggaacgtagggtcgcgggggtatttttttgggggcggcggtcgttttttttttcgtagagtttttttttttttagaaagtttcgtttaaattttgttcggtataattagcgtcgagggggcggcgtaggttaggtgggagggggttcgtagcgggcggtcgtattttcgtaaacgttcgtttcgtattcggtgagggagtcgttattgagcggggggcggatgatataacgtagttttcggtcgtaggtttcgtaaatttcgaaggtgtcgtcgtagttttcgtttttttggttggcgtacgtgtagtagtagtcgtagacgttttgtacgatgtttttcgggtagtttttgggtttttcgtatttggattcgttatagggtaggtagattagcgttcgggtgtcggagcgcgttagtagtagtagtagttttagtagcgagattaggaggtgttcgtagtcggtta

SEQ ID NO: 8918 - DNA, 786 bp, Artificial Sequence
  chemically treated genomic DNA (Homo sapiens) CpG-island No: 8918
taaccgactacgaacacctcctaatctcgctactaaaactactactactactaacgcgctccgacacccgaacgctaatctacctaccctataacgaatccaaatacgaaaaacccaaaaactacccgaaaaacatcgtacaaaacgtctacgactactactacacgtacgccaaccaaaaaaacgaaaactacgacgacaccttcgaaatttacgaaacctacgaccgaaaactacgttatatcatccgccccccgctcaataacgactccctcaccgaatacgaaacgaacgtttacgaaaatacgaccgcccgctacgaaccccctcccacctaacctacgccgccccctcgacgctaattataccgaacaaaatttaaacgaaactttctaaaaaaaaaaaaactctacgaaaaaaaaaacgaccgccgcccccaaaaaaatacccccgcgaccctacgttccctctccttattccccccgacgcttaaacaatcgcgaacgaaattaaatataataaataaaaacgaacgaataaaaaatcgcccctatccccgcgcaaacgcgcacacgtataaccgttcctactaaaactaaataacccgaccttactccccgaaataaaaacgccgcgaacgaaaaacactacaaattctaccgcgcgcgaacccctcgaaaaacccgaccctaccgccctccccgcactaacgcaatataacaccgtaaaccgcacgccgaccgcgaaaatcctttttctattaacgaaaaaaacgtatctccaact

SEQ ID NO: 8919 - DNA, 786 bp, Artificial Sequence
  chemically treated genomic DNA (Homo sapiens) CpG-island No: 8919
tggtcggttgcgggtattttttggtttcgttgttggggttgttgttgttgttggcgcgtttcggtattcgggcgttggtttgtttgttttgtgacgagtttaagtgcgaggagtttaggaattgttcggggagtatcgtgtagggcgtttgcggttgttgttatacgtgcgttagttagaggaacgagagttgcggcggtattttcgggatttacggaatttgcgatcgggggttgcgttgtgttattcgtttttcgtttaatggcgatttttttatcgagtacgaagcgggcgtttgcgaaggtacggtcgttcgttgcgggtttttttttatttggtttgcgtcgttttttcggcgttggttgtgtcgaataaagtttgggcgagattttttggaggaaagagggttttgcgggaagaggggcggtcgtcgtttttaggagagtgttttcgcggttttgcgttttttttttttgtttttttcgacgtttaggtagtcgcgggcgaggttgggtatggtgggtgggggcgagcgagtggaggatcgtttttgttttcgcgtagacgcgtatacgtgtggtcgtttttgttgggattgggtggttcggttttgtttttcgaggtgggggcgtcgcgggcggggggtattgtagattttgtcgcgcgcgagtttttcggggagttcggttttatcgtttttttcgtattggcgtagtgtggtatcgtgagtcgtacgtcggtcgcgaaagttttttttttgttggcggaggagacgtgtttttagtt

SEQ ID NO: 8920 - DNA, 786 bp, Artificial Sequence
  chemically treated genomic DNA (Homo sapiens) CpG-island No: 8920
aactaaaaacacgtctcctccgccaacaaaaaaaaaactttcgcgaccgacgtacgactcacgataccacactacgccaatacgaaaaaaacgataaaaccgaactccccgaaaaactcgcgcgcgacaaaatctacaataccccccgcccgcgacgcccccacctcgaaaaacaaaaccgaaccacccaatcccaacaaaaacgaccacacgtatacgcgtctacgcgaaaacaaaaacgatcctccactcgctcgcccccacccaccatacccaacctcgcccgcgactacctaaacgtcgaaaaaaacaaaaaaaaaaaacgcaaaaccgcgaaaacactctcctaaaaacgacgaccgcccctcttcccgcaaaaccctctttcctccaaaaaatctcgcccaaactttattcgacacaaccaacgccgaaaaaacgacgcaaaccaaataaaaaaaaacccgcaacgaacgaccgtaccttcgcaaacgcccgcttcgtactcgataaaaaaatcgccattaaacgaaaaacgaataacacaacgcaacccccgatcgcaaattccgtaaatcccgaaaataccgccgcaactctcgttcctctaactaacgcacgtataacaacaaccgcaaacgccctacacgatactccccgaacaattcctaaactcctcgcacttaaactcgtcacaaaacaaacaaaccaacgcccgaataccgaaacgcgccaacaacaacaacaaccccaacaacgaaaccaaaaaatacccgcaaccgacca

SEQ ID NO: 8921 - DNA, 804 bp, Artificial Sequence
  chemically treated genomic DNA (Homo sapiens) CpG-island No: 8921
  unsure (37, 108, 114, 347, 459, 466, 472, 605)
cgagtgaggagtttcgaggttattatcgagtatgaancgcgggaacgtttgggaaggaaatttgaggttttgttttgacggttataataaaggttttcgagttaattnggcgtngtttaaatttattacggtttttttcgcgttttttttttcggaaatttgattatttagtttagaaagtcgtagtagtttttttagggacgttattttttattttaaatatttaatcgagaaagtagcgtcgtagcgcgtttttcgttacgtttaggttcgtaggttttcgttcggggcggaaaagaatttttttcgcgtatttttagttaggaggaacgttagaggtttcgttntaatttttgtcgttttattggttttggtgatcggtttttcgaaagtcggttttttattggtcgtcgtggtcgtcgttttgcgtttttatcggggtacgcggcgagcgtgatntacgttnttttancgttcggacgttcggtcgtttttcggggcgcggtaattatcgtttagagggaaggaggtcggtagtgtgaggagttgttatggtgttgagttttttggtagagtcggtcgagttgaggcggtcgcggttatgnaaggtgaggggtcggtggagtcggatagatttttttcgttaattttattttgttagggtatttgaagcgtttttttttttttcgttttagcggttatttagtcgttatttcggagagttgcgttgaggggggtcgtttgttcggttttaggtgttttaatcgagttagggtaggttgtcggattttttcgagttttttt

SEQ ID NO: 8922 - DNA, 804 bp, Artificial Sequence
  chemically treated genomic DNA (Homo sapiens) CpG-island No: 8922
  unsure (200, 333, 339, 346, 458, 691, 697, 768)
aaaaaaactcgaaaaaatccgacaacctaccctaactcgattaaaacacctaaaaccgaacaaacgacccccctcaacgcaactctccgaaataacgactaaataaccgctaaaacgaaaaaaaaaaaaacgcttcaaataccctaacaaaataaaattaacgaaaaaaatctatccgactccaccgacccctcaccttncataaccgcgaccgcctcaactcgaccgactctaccaaaaaactcaacaccataacaactcctcacactaccgacctccttccctctaaacgataattaccgcgccccgaaaaacgaccgaacgtccgaacgntaaaanaacgtanatcacgctcgccgcgtaccccgataaaaacgcaaaacgacgaccacgacgaccaataaaaaaccgactttcgaaaaaccgatcaccaaaaccaataaaacgacaaaaattanaacgaaacctctaacgttcctcctaactaaaaatacgcgaaaaaaattcttttccgccccgaacgaaaacctacgaacctaaacgtaacgaaaaacgcgctacgacgctactttctcgattaaatatttaaaataaaaaataacgtccctaaaaaaactactacgactttctaaactaaataatcaaatttccgaaaaaaaaaacgcgaaaaaaaccgtaataaatttaaacnacgccnaattaactcgaaaacctttattataaccgtcaaaacaaaacctcaaatttccttcccaaacgttcccgcgnttcatactcgataataacctcgaaactcctcactcg

SEQ ID NO: 8923 - DNA, 804 bp, Artificial Sequence
  chemically treated genomic DNA (Homo sapiens) CpG-island No: 8923
  unsure (200, 333, 339, 346, 458, 691, 697, 768)
ggaggagttcgagagggttcggtagtttgttttggttcggttggggtatttgaagtcgggtaagcgattttttttagcgtagtttttcgagatgacgattaggtaatcgttaaggcggaaagaaaggaggcgttttaggtgttttggtaggataggattggcgaggagggtttgttcggttttatcggttttttattttntatggtcgcgatcgttttagttcggtcggttttattaggaaatttagtattatagtagttttttatattgtcgatttttttttttttgggcggtgattatcgcgtttcgggaggcgatcgagcgttcggacgntaaggnggcgtgngttacgttcgtcgcgtgtttcggtaaaagcgtagagcggcggttacgacgattaataggaagtcgattttcgggaggtcggttattagagttaatgaagcgatagggattgnggcggggtttttggcgttttttttggttgggagtgcgcggggaggattttttttcgtttcgagcgaagatttgcggatttgggcgtggcggaaggcgcgttgcggcgttgttttttcggttgggtgtttgaaatgggagatagcgtttttgaggaagttgttgcggttttttgggttaggtggttaagttttcggggaggggagcgcgggaagggtcgtggtgaatttgaatnacgttnggttggttcgaaggtttttgttatgatcgttagagtagggttttagattttttttttagacgttttcgcgntttatgttcggtgatgatttcggggttttttattcg

SEQ ID NO: 8924 - DNA, 804 bp, Artificial Sequence
  chemically treated genomic DNA (Homo sapiens) CpG-island No: 8924
  unsure (37, 108, 114, 347, 459, 466, 472, 605)
cgaataaaaaaccccgaaatcatcaccgaacataaancgcgaaaacgtctaaaaaaaaaatctaaaaccctactctaacgatcataacaaaaaccttcgaaccaaccnaacgtnattcaaattcaccacgacccttcccgcgctcccctccccgaaaacttaaccacctaacccaaaaaaccgcaacaacttcctcaaaaacgctatctcccatttcaaacacccaaccgaaaaaacaacgccgcaacgcgccttccgccacgcccaaatccgcaaatcttcgctcgaaacgaaaaaaaatcctccccgcgcactcccaaccaaaaaaaacgccaaaaaccccgccncaatccctatcgcttcattaactctaataaccgacctcccgaaaatcgacttcctattaatcgtcgtaaccgccgctctacgcttttaccgaaacacgcgacgaacgtaacncacgccnccttancgtccgaacgctcgatcgcctcccgaaacgcgataatcaccgcccaaaaaaaaaaaaatcgacaatataaaaaactactataatactaaatttcctaataaaaccgaccgaactaaaacgatcgcgaccatanaaaataaaaaaccgataaaaccgaacaaaccctcctcgccaatcctatcctaccaaaacacctaaaacgcctcctttctttccgccttaacgattacctaatcgtcatctcgaaaaactacgctaaaaaaaatcgcttacccgacttcaaataccccaaccgaaccaaaacaaactaccgaaccctctcgaactcctcc

SEQ ID NO: 8925 - DNA, 689 bp, Artificial Sequence
  chemically treated genomic DNA (Homo sapiens) CpG-island No: 8925
  unsure (75, 98, 131)
atattggaggacgggttgaaagcgtcgagttcgatataaaagaggcgttagataaaacgttaagaggttgggganttgggaacgaaggaagaggtttntgttagaggcgatttgttatttgcgcgaggaangcggagtaggacggcggtcgttggtgggcgtggtcgcgttagtttcgcgggagcggtcgttgggcgggtcgttgtttttgcgggcggggcgagttgttaaggaaatgattgttcgtagcgtttggtttcgtcgcgtaggtcgggcggggtttggagcggcgtcgttttcgttttcgtttttttatagttttcgtttcgttatcgttttttggtcggtttcgcgttttttatcggtattttgcgtcggtcgcgtcgcggggtttgtttttgtcgcgcgtattttcggggtttcggtttcggtacgggtcgcgtttagtttttttgtatttgaggtcgtcggttagtcgtcgttatgggtgtttattttttttagtttaatacggtgaagtgtttcggggacggggtcggcgtttcgcgtttgtcgttgttttacggttttttcgttatgtaaggttggcgcgtttttatggaggtgaggaggtaggggtttatacgttggtcgttgcggggcgggaatttgacggagaaagagagcgggggatggggtttttttttggg

SEQ ID NO: 8926 - DNA, 689 bp, Artificial Sequence
  chemically treated genomic DNA (Homo sapiens) CpG-island No: 8926
  unsure (559, 592, 615)
cccaaaaaaaaaccccatcccccgctctctttctccgtcaaattcccgccccgcaacgaccaacgtataaacccctacctcctcacctccataaaaacgcgccaaccttacataacgaaaaaaccgtaaaacaacgacaaacgcgaaacgccgaccccgtccccgaaacacttcaccgtattaaactaaaaaaaataaacacccataacgacgactaaccgacgacctcaaatacaaaaaaactaaacgcgacccgtaccgaaaccgaaaccccgaaaatacgcgcgacaaaaacaaaccccgcgacgcgaccgacgcaaaataccgataaaaaacgcgaaaccgaccaaaaaacgataacgaaacgaaaactataaaaaaacgaaaacgaaaacgacgccgctccaaaccccgcccgacctacgcgacgaaaccaaacgctacgaacaatcatttccttaacaactcgccccgcccgcaaaaacaacgacccgcccaacgaccgctcccgcgaaactaacgcgaccacgcccaccaacgaccgccgtcctactccgcnttcctcgcgcaaataacaaatcgcctctaacanaaacctcttccttcgttcccaantccccaacctcttaacgttttatctaacgcctcttttatatcgaactcgacgctttcaacccgtcctccaatat

SEQ ID NO: 8927 - DNA, 689 bp, Artificial Sequence
  chemically treated genomic DNA (Homo sapiens) CpG-island No: 8927
  unsure (559, 592, 615)
tttaggggaggattttatttttcgtttttttttttcgttagattttcgtttcgtagcggttagcgtatgggtttttgtttttttatttttatggagacgcgttagttttgtatggcggagaagtcgtagggtagcggtaggcgcggggcgtcgatttcgttttcggagtattttatcgtgttgggttgggagaggtaggtatttatggcggcggttggtcggcggttttaggtgtaggaaagttgggcgcgattcgtgtcggagtcgaagtttcgggggtgcgcgcggtaggagtaggtttcgcggcgcgatcgacgtaaggtgtcggtgaaaggcgcgaggtcggttaggaggcggtaacgggacgggagttgtgagggagcggaagcggaaacggcgtcgttttagatttcgttcggtttgcgcggcggggttaggcgttgcgggtagttatttttttagtaattcgtttcgttcgtagggataacggttcgtttaacggtcgttttcgcgagattagcgcgattacgtttattaacggtcgtcgttttatttcgtntttttcgcgtaggtggtaggtcgtttttggtangaattttttttttcgtttttagntttttagttttttggcgttttgtttgacgttttttttgtgtcggattcgacgtttttagttcgttttttagtgt

SEQ ID NO: 8928 - DNA, 689 bp, Artificial Sequence
  chemically treated genomic DNA (Homo sapiens) CpG-island No: 8928
  unsure (75, 98, 131)
acactaaaaaacgaactaaaaacgtcgaatccgacacaaaaaaaacgtcaaacaaaacgccaaaaaactaaaaanctaaaaacgaaaaaaaaaattcntaccaaaaacgacctaccacctacgcgaaaaanacgaaataaaacgacgaccgttaataaacgtaatcgcgctaatctcgcgaaaacgaccgttaaacgaaccgttatccctacgaacgaaacgaattactaaaaaaataactacccgcaacgcctaaccccgccgcgcaaaccgaacgaaatctaaaacgacgccgtttccgcttccgctccctcacaactcccgtcccgttaccgcctcctaaccgacctcgcgcctttcaccgacaccttacgtcgatcgcgccgcgaaacctactcctaccgcgcgcacccccgaaacttcgactccgacacgaatcgcgcccaactttcctacacctaaaaccgccgaccaaccgccgccataaatacctacctctcccaacccaacacgataaaatactccgaaaacgaaatcgacgccccgcgcctaccgctaccctacgacttctccgccatacaaaactaacgcgtctccataaaaataaaaaaacaaaaacccatacgctaaccgctacgaaacgaaaatctaacgaaaaaaaaaaacgaaaaataaaatcctcccctaaa

SEQ ID NO: 8929 - DNA, 656 bp, Artificial Sequence
  chemically treated genomic DNA (Homo sapiens) CpG-island No: 8929
  unsure (4, 31, 58, 106, 162, 177, 188, 214, 238, 250, 269)
cggnttcgttttgtttatatttattttcgtncggttttcgcggttggttaggtttcgngggggttgttcggtgtttagagggcggtttatcgttcgattcggtggncgttgtttttattttatttcggcgcgggttcggcgacgcgggtagcgcggggtcgnagttgcgggcggagncgggcgcgggntttgcggagtttttagggttcgagtngggttacggagtttgttcgggagntagggggcgttngttcggacgttggtttggngttttcggtgcgggaggtagtgcggcggttttcgttcgtttttgtagcgggatgtgatcgtttcggagagttagtcgtcgttttttgtagcgttggtttcgttcgtttcgtcgtagttcggtcgggacgcgcgggttcgtttcgtttagtcggggttttcgtcgtcgttatttttttttcgtttttttattttcgttttttcggggttttttttacgatttttttaatggcgttttcggagtttttattttttatttttttttttttttagttgaagcggacgagtcggcgggggcgtggggggtgagacgcgggtgttagggttttcggtatttgggagatttttttttttttcgcgtggaagagttaagttgggaagaggaattt

SEQ ID NO: 8930 - DNA, 656 bp, Artificial Sequence
  chemically treated genomic DNA (Homo sapiens) CpG-island No: 8930
  unsure (388, 407, 419, 443, 469, 480, 495, 551, 599, 626, 653)
aaattcctcttcccaacttaactcttccacgcgaaaaaaaaaaaaatctcccaaataccgaaaaccctaacacccgcgtctcaccccccacgcccccgccgactcgtccgcttcaactaaaaaaaaaaaaaaataaaaaataaaaactccgaaaacgccattaaaaaaatcgtaaaaaaaaccccgaaaaaacgaaaataaaaaaacgaaaaaaaaataacgacgacgaaaaccccgactaaacgaaacgaacccgcgcgtcccgaccgaactacgacgaaacgaacgaaaccaacgctacaaaaaacgacgactaactctccgaaacgatcacatcccgctacaaaaacgaacgaaaaccgccgcactacctcccgcaccgaaaacnccaaaccaacgtccgaacnaacgccccctanctcccgaacaaactccgtaacccnactcgaaccctaaaaactccgcaaancccgcgcccgnctccgcccgcaactncgaccccgcgctacccgcgtcgccgaacccgcgccgaaataaaataaaaacaacgnccaccgaatcgaacgataaaccgccctctaaacaccgaacaacccccncgaaacctaaccaaccgcgaaaaccgnacgaaaataaatataaacaaaacgaanccg

SEQ ID NO: 8931 - DNA, 656 bp, Artificial Sequence
  chemically treated genomic DNA (Homo sapiens) CpG-island No: 8931
  unsure (388, 407, 419, 443, 469, 480, 495, 551, 599, 626, 653)
gaatttttttttttaatttggtttttttacgcggggaggaaggggattttttaggtgtcggagattttagtattcgcgttttattttttacgttttcgtcgattcgttcgttttagttgggagagagaagggataagggatgggggtttcggaggcgttattgggagggtcgtgggaggagtttcgagaggacgggagtgagggggcgggaggggaatgacggcggcgagaatttcggttgggcggggcgggttcgcgcgtttcggtcgggttgcggcggagcgagcggggttagcgttgtagaaggcggcggttggtttttcgggacggttatatttcgttgtaggggcgggcggaggtcgtcgtattgtttttcgtatcggggatnttaggttagcgttcgggtnaacgttttttgnttttcggatagatttcgtggtttngttcgagttttgggggtttcgtaganttcgcgttcgntttcgttcgtagttncggtttcgcgttgttcgcgtcgtcgggttcgcgtcgggatggggtaggggtagcgnttatcgagtcgggcgatgggtcgttttttgggtatcgagtagtttttncgaggtttgattaatcgcggggatcgngcggaggtgggtgtgggtagggcggantcg

SEQ ID NO: 8932 - DNA, 656 bp, Artificial Sequence
  chemically treated genomic DNA (Homo sapiens) CpG-island No: 8932
  unsure (4, 31, 58, 106, 162, 177, 188, 214, 238, 250, 269)
cgantccgccctacccacacccacctccgcncgatccccgcgattaatcaaacctcgnaaaaactactcgatacccaaaaaacgacccatcgcccgactcgataancgctacccctaccccatcccgacgcgaacccgacgacgcgaacaacgcgaaaccgnaactacgaacgaaancgaacgcgaantctacgaaacccccaaaactcgaacnaaaccacgaaatctatccgaaaancaaaaaacgttnacccgaacgctaacctaanatccccgatacgaaaaacaatacgacgacctccgcccgcccctacaacgaaatataaccgtcccgaaaaaccaaccgccgccttctacaacgctaaccccgctcgctccgccgcaacccgaccgaaacgcgcgaacccgccccgcccaaccgaaattctcgccgccgtcattcccctcccgccccctcactcccgtcctctcgaaactcctcccacgaccctcccaataacgcctccgaaacccccatcccttatcccttctctctcccaactaaaacgaacgaatcgacgaaaacgtaaaaaataaaacgcgaatactaaaatctccgacacctaaaaaatccccttcctccccgcgtaaaaaaaccaaattaaaaaaaaaaattc

SEQ ID NO: 8933 - DNA, 680 bp, Artificial Sequence
  chemically treated genomic DNA (Homo sapiens) CpG-island No: 8933
  unsure (232, 238, 242, 252, 280, 291, 295, 307, 320, 333, 337, 348)
  unsure (375)
gttcgggtcgtttgtcgcgtttattagtagtttcgagtcgatagagatgatattggttacggtgtatttcggcgtgatagcgtcgcggggattggttacgtgtcgtaggacggtgttatgtagtacggtttttagtagtaggtttacgtggtttattaagattagcgcgaggtttatacgtattagtcgtttgggttttcgggcggcgtttgtaaagtacgggggagggtanaggttngagntcggtcgggnaagggaaaagtcggttttcggcgggttnaattcgcgggntagntaggatcgggtnaagggtagttttnagggtaaggagancgangattttagggnttcggaagttatcgaaagcgtagaganttgtagcgttttatttcgttcgtcgcgttagtcgtagggtcgttgtatttgggttcggtttcgttttaatttgggtttcgttttcgtttcgggttttttttttatttgggtttcgttttcgtttcgggttcgttttttttggcgggaaaggcgcgaatatacgacgtttttagtaaaaagtagatttttattatagtagtaattgaggcgaatcgaatggttttttagggttattattgtagtattatttttttttttcgtttcggtcgttttagcgggattgtagaattcggtttttttagtgt

SEQ ID NO: 8934 - DNA, 680 bp, Artificial Sequence
  chemically treated genomic DNA (Homo sapiens) CpG-island No: 8934
  unsure (306, 333, 344, 348, 361, 374, 386, 390, 401, 429, 439, 443)
  unsure (449)
acactaaaaaaaccgaattctacaatcccgctaaaacgaccgaaacgaaaaaaaaaaataatactacaataataaccctaaaaaaccattcgattcgcctcaattactactataataaaaatctactttttactaaaaacgtcgtatattcgcgcctttcccgccaaaaaaaacgaacccgaaacgaaaacgaaacccaaataaaaaaaaaacccgaaacgaaaacgaaacccaaattaaaacgaaaccgaacccaaatacaacgaccctacgactaacgcgacgaacgaaataaaacgctacaantctctacgctttcgataacttccgaanccctaaaatcntcgntctccttaccctnaaaactacccttnacccgatcctanctancccgcgaattnaacccgccgaaaaccgacttttcccttncccgaccganctcnaacctntaccctcccccgtactttacaaacgccgcccgaaaacccaaacgactaatacgtataaacctcgcgctaatcttaataaaccacgtaaacctactactaaaaaccgtactacataacaccgtcctacgacacgtaaccaatccccgcgacgctatcacgccgaaatacaccgtaaccaatatcatctctatcgactcgaaactactaataaacgcgacaaacgacccgaac

SEQ ID NO: 8935 - DNA, 680 bp, Artificial Sequence
  chemically treated genomic DNA (Homo sapiens) CpG-island No: 8935
  unsure (306, 333, 344, 348, 361, 374, 386, 390, 401, 429, 439, 443)
  unsure (449)
gtattaggggagtcgaattttataatttcgttggggcggtcggggcgggagagaaaggtggtgttgtagtggtggttttggggggttattcgattcgttttagttgttgttgtaataaaagtttattttttgttaaaagcgtcgtgtgttcgcgtttttttcgttagggggagcgggttcggggcggaggcggggtttaggtgggagggggattcgggacggaggcggggtttaggttggggcggggtcgggtttaggtatagcggttttgcggttggcgcggcggacgggatgaggcgttgtagntttttgcgttttcggtaattttcgggnttttggggttntcgntttttttattttnggggttatttttngttcggttttanttgnttcgcgggttnaattcgtcgggagtcggttttttttttnttcggtcgantttnaatttntgttttttttcgtgttttgtagacgtcgttcgggggtttaggcggttgatgcgtgtgggtttcgcgttgattttggtgggttacgtgaatttgttgttgggggtcgtgttgtatggtatcgttttgcggtacgtggttaattttcgcggcgttgttacgtcggagtatatcgtagttaatgttatttttgtcggttcggggttgttggtgagcgcggtaggcgattcgggt

SEQ ID NO: 8936 - DNA, 680 bp, Artificial Sequence
  chemically treated genomic DNA (Homo sapiens) CpG-island No: 8936
  unsure (232, 238, 242, 252, 280, 291, 295, 307, 320, 333, 337, 348)
  unsure (375)
acccgaatcgcctaccgcgctcaccaacaaccccgaaccgacaaaaataacattaactacgatatactccgacgtaacaacgccgcgaaaattaaccacgtaccgcaaaacgataccatacaacacgacccccaacaacaaattcacgtaacccaccaaaatcaacgcgaaacccacacgcatcaaccgcctaaacccccgaacgacgtctacaaaacacgaaaaaaaacanaaattnaaantcgaccgaanaaaaaaaaaaccgactcccgacgaattnaacccgcgaancaantaaaaccgaacnaaaaataaccccnaaaataaaaaaancganaaccccaaaancccgaaaattaccgaaaacgcaaaaanctacaacgcctcatcccgtccgccgcgccaaccgcaaaaccgctatacctaaacccgaccccgccccaacctaaaccccgcctccgtcccgaatccccctcccacctaaaccccgcctccgccccgaacccgctccccctaacgaaaaaaacgcgaacacacgacgcttttaacaaaaaataaacttttattacaacaacaactaaaacgaatcgaataaccccccaaaaccaccactacaacaccacctttctctcccgccccgaccgccccaacgaaattataaaattcgactcccctaatac

SEQ ID NO: 8937 - DNA, 619 bp, Artificial Sequence
  chemically treated genomic DNA (Homo sapiens) CpG-island No: 8937
  unsure (65, 87, 166, 194, 544, 605)
tcgaggcggttgtcgcgtcgcgtcgggatattttttttttcgtttgggtcgacgtaagatggcgngttcggtcgtcgtcgcgtagtncggttttttttttcgcgttttgggcgttttcgacgattcgcgtcggttttaagatttttagtttagcgttttcggagtngaggcggcgtaggtcgcgcgggagggtnttttgtttgttgtagcgtagggcgggcgggggcgggggggcgtttatcgtgagcggagcggatcggtttgattggagttttgaggaggaggagaaagaggaggaggaaaaggaggagtacgaaaaattatattgcggcgacggcggcggtttttattgcggagttggtagtcgagtcgtggaaaggggggggttttcgtgtagtcggcgcgttgttttatgggtaggtttcgggttagttttttcgtgttcgagttttttgttttttcgtcgacgcgggaggcgggtatcggtatgtgcgtcgcgtcgcgggttttcgaagatttacgcgtttcgttacgcgtcggtttnggggcgagggttagggttttgtttttatgtgggtgcgagttgttggttggtgtggtcgggnaggtagttttaaaa

SEQ ID NO: 8938 - DNA, 619 bp, Artificial Sequence
  chemically treated genomic DNA (Homo sapiens) CpG-island No: 8938
  unsure (15, 76, 426, 454, 533, 555)
ttttaaaactacctncccgaccacaccaaccaacaactcgcacccacataaaaacaaaaccctaaccctcgccccnaaaccgacgcgtaacgaaacgcgtaaatcttcgaaaacccgcgacgcgacgcacataccgatacccgcctcccgcgtcgacgaaaaaacaaaaaactcgaacacgaaaaaactaacccgaaacctacccataaaacaacgcgccgactacacgaaaacccccccctttccacgactcgactaccaactccgcaataaaaaccgccgccgtcgccgcaatataatttttcgtactcctccttttcctcctcctctttctcctcctcctcaaaactccaatcaaaccgatccgctccgctcacgataaacgcccccccgcccccgcccgccctacgctacaacaaacaaaanaccctcccgcgcgacctacgccgcctcnactccgaaaacgctaaactaaaaatcttaaaaccgacgcgaatcgtcgaaaacgcccaaaacgcgaaaaaaaaaaccgnactacgcgacgacgaccgaacncgccatcttacgtcgacccaaacgaaaaaaaaaatatcccgacgcgacgcgacaaccgcctcga

SEQ ID NO: 8939 - DNA, 619 bp, Artificial Sequence
  chemically treated genomic DNA (Homo sapiens) CpG-island No: 8939
  unsure (15, 76, 426, 454, 533, 555)
ttttggggttgtttnttcggttatattagttagtagttcgtatttatatggaggtagggttttggttttcgttttnggatcggcgcgtggcggggcgcgtgggttttcgagggttcgcgacgcggcgtatatgtcggtgttcgtttttcgcgtcggcgagaagatagggagttcggatacggggaggttgattcggagtttatttatgaggtagcgcgtcggttgtacgagagtttttttttttttacggttcggttgttagtttcgtaatgggagtcgtcgtcgtcgtcgtagtgtagtttttcgtgttttttttttttttttttttttttttttttttttttagggttttagttaggtcgattcgtttcgtttacggtaagcgttttttcgttttcgttcgttttgcgttgtagtaggtagagngttttttcgcgcggtttgcgtcgttttnatttcgggggcgttggattgggggttttgaggtcggcgcgggtcgtcgggagcgtttagagcgcgggggaggagatcgngttgcgcggcggcggtcggatncgttattttgcgtcggtttaggcgggggaggaggtatttcggcgcgacgcggtagtcgtttcgg

SEQ ID NO: 8940 - DNA, 619 bp, Artificial Sequence
  chemically treated genomic DNA (Homo sapiens) CpG-island No: 8940
  unsure (65, 87, 166, 194, 544, 605)
ccgaaacgactaccgcgtcgcgccgaaatacctcctcccccgcctaaaccgacgcaaaataacgnatccgaccgccgccgcgcaacncgatctcctcccccgcgctctaaacgctcccgacgacccgcgccgacctcaaaacccccaatccaacgcccccgaaatnaaaacgacgcaaaccgcgcgaaaaaacnctctacctactacaacgcaaaacgaacgaaaacgaaaaaacgcttaccgtaaacgaaacgaatcgacctaactaaaaccctaaaaaaaaaaaaaaaaaaaaaaaaaaaaaaaaaaaacacgaaaaactacactacgacgacgacgacgactcccattacgaaactaacaaccgaaccgtaaaaaaaaaaaaactctcgtacaaccgacgcgctacctcataaataaactccgaatcaacctccccgtatccgaactccctatcttctcgccgacgcgaaaaacgaacaccgacatatacgccgcgtcgcgaaccctcgaaaacccacgcgccccgccacgcgccgatccnaaaacgaaaaccaaaaccctacctccatataaatacgaactactaactaatataaccgaanaaacaaccccaaaa

SEQ ID NO: 8941 - DNA, 1080 bp, Artificial Sequence
  chemically treated genomic DNA (Homo sapiens) CpG-island No: 8941
  unsure (74, 299, 992, 1079)
gggtgagagagaataggtaataggatgaagtttgagttaaaataagtattagtagagtggagcgagggattcgnaatcgtagagcggtaaaagggaaatagtattcggtttttattacgggattggggaaaggagaattattcgttggggtagggttgacgatcgttgaaatcgaaaagaaggaatttacggcggttaggtttatcgaggttgagagagcgggttgcggggatcgtagagttcgagggcgtagggtcgggggcggaaggggcggcggttgggcgttaggtatcggggantcgcggtttcgagttgagtggtcgtttttaattcgtttcgagttttggcggtcgtggattttcggtttttattcgtcgttcgtttttaaggtttatgggtttcgtcgcggttggaagattcggttcggaggagaaatagggttttaatatttttttcgttttcggttttttttttttagaggttattttttttttttatttcgttggtacggtattttcggtttcgtagggatcggtgtttttcgtatttattcgcgagttcggtgttcgttattatcgtcgtcgttgttatcgtcgtttttcggtagtgtcgttttgttttagagaagtagcgcgcggttttcgtacgttttacgttcgtttcgttgtcgcgcgttttcgttaggcgtcgttcgtttcggagtcggcgcgcggtcgttgtttttagtgtcgggtttcgaatttttttagcgtttttattggttttttagttcgggttcgcgcgacgtttcgcgcggcgtacgtttgttttatttatgcggttcgcgttgtcgcgtttaatttcgtttatttttttatttatttatagtttttatttcgatttcgatttggggcgtgcgcgcgaattttggcgatcgcggcgatttcgcggtttgattggttgtagtaatataacgacgtacgtacgcgagaagacgagagcgcgtacgtaanggtcgtggggttgcggggataattaagagataaggattggtttaatgtataggagttaggaatgaggaaatggttaggcgagttttnt

SEQ ID NO: 8942 - DNA, 1080 bp, Artificial Sequence
  chemically treated genomic DNA (Homo sapiens) CpG-island No: 8942
  unsure (2, 89, 782, 1007)
anaaaactcgcctaaccatttcctcattcctaactcctatacattaaaccaatccttatctcttaattatccccgcaaccccacgaccnttacgtacgcgctctcgtcttctcgcgtacgtacgtcgttatattactacaaccaatcaaaccgcgaaatcgccgcgatcgccaaaattcgcgcgcacgccccaaatcgaaatcgaaataaaaactataaataaataaaaaaataaacgaaattaaacgcgacaacgcgaaccgcataaataaaacaaacgtacgccgcgcgaaacgtcgcgcgaacccgaactaaaaaaccaataaaaacgctaaaaaaattcgaaacccgacactaaaaacaacgaccgcgcgccgactccgaaacgaacgacgcctaacgaaaacgcgcgacaacgaaacgaacgtaaaacgtacgaaaaccgcgcgctacttctctaaaacaaaacgacactaccgaaaaacgacgataacaacgacgacgataataacgaacaccgaactcgcgaataaatacgaaaaacaccgatccctacgaaaccgaaaataccgtaccaacgaaataaaaaaaaaaaataacctctaaaaaaaaaaaaccgaaaacgaaaaaaatattaaaaccctatttctcctccgaaccgaatcttccaaccgcgacgaaacccataaaccttaaaaacgaacgacgaataaaaaccgaaaatccacgaccgccaaaactcgaaacgaattaaaaacgaccactcaactcgaaaccgcgantccccgatacctaacgcccaaccgccgccccttccgcccccgaccctacgccctcgaactctacgatccccgcaacccgctctctcaacctcgataaacctaaccgccgtaaattccttcttttcgatttcaacgatcgtcaaccctaccccaacgaataattctcctttccccaatcccgtaataaaaaccgaatactatttcccttttaccgctctacgattncgaatccctcgctccactctactaatacttattttaactcaaacttcatcctattacctattctctctcaccc

SEQ ID NO: 8943 - DNA, 1080 bp, Artificial Sequence
  chemically treated genomic DNA (Homo sapiens) CpG-island No: 8943
  unsure (2, 89, 782, 1007)
gnaagattcgtttggttatttttttatttttgatttttgtgtattaggttaatttttgttttttagttgttttcgtaattttacggttnttacgtgcgcgttttcgttttttcgcgtgcgtacgtcgttgtgttgttgtagttaattaggtcgcgaggtcgtcgcggtcgttagggttcgcgcgtacgttttagatcggagtcggggtgggggttatgggtgaatgggagagtgagcggggttgggcgcggtagcgcgagtcgtatgaatgagataaacgtgcgtcgcgcgagacgtcgcgcgagttcggattagggagttaatgggaacgttggaagggttcgagattcggtattgagggtaacggtcgcgcgtcggtttcgagacgagcgacgtttggcgggagcgcgcggtagcggggcgggcgtggagcgtgcgggggtcgcgcgttgtttttttgaggtaggacggtattgtcgggaggcggcggtgataacgacggcggtggtgacgggtatcgggttcgcgggtgagtgcggaggatatcggtttttgcggaatcggaagtgtcgtattagcgaggtgggaggggagggtgatttttagggaagggggatcgaagacggggagggtattaaggttttatttttttttcgggtcgggttttttaatcgcggcgggatttatgggttttggaaacggacgacgagtagaggtcggggatttacgatcgttagggttcggaacgggttagagacggttatttagttcgagatcgcggnttttcggtgtttggcgtttagtcgtcgtttttttcgttttcggttttgcgttttcgggttttgcggttttcgtagttcgtttttttaatttcggtgggtttggtcgtcgtggatttttttttttcggttttagcggtcgttagttttgttttaacgggtgatttttttttttttagtttcgtggtggggatcgggtgttgttttttttttatcgttttgcggttncgagtttttcgttttattttgttgatatttattttggtttaagttttattttgttatttgtttttttttattt

SEQ ID NO: 8944 - DNA, 1080 bp, Artificial Sequence
  chemically treated genomic DNA (Homo sapiens) CpG-island No: 8944
  unsure (74, 299, 992, 1079)
aaataaaaaaaaacaaataacaaaataaaacttaaaccaaaataaatatcaacaaaataaaacgaaaaactcgnaaccgcaaaacgataaaaaaaaaacaacacccgatccccaccacgaaactaaaaaaaaaaaaatcacccgttaaaacaaaactaacgaccgctaaaaccgaaaaaaaaaaatccacgacgaccaaacccaccgaaattaaaaaaacgaactacgaaaaccgcaaaacccgaaaacgcaaaaccgaaaacgaaaaaaacgacgactaaacgccaaacaccgaaaanccgcgatctcgaactaaataaccgtctctaacccgttccgaaccctaacgatcgtaaatccccgacctctactcgtcgtccgtttccaaaacccataaatcccgccgcgattaaaaaacccgacccgaaaaaaaaataaaaccttaataccctccccgtcttcgatcccccttccctaaaaatcaccctcccctcccacctcgctaatacgacacttccgattccgcaaaaaccgatatcctccgcactcacccgcgaacccgatacccgtcaccaccgccgtcgttatcaccgccgcctcccgacaataccgtcctacctcaaaaaaacaacgcgcgacccccgcacgctccacgcccgccccgctaccgcgcgctcccgccaaacgtcgctcgtctcgaaaccgacgcgcgaccgttaccctcaataccgaatctcgaacccttccaacgttcccattaactccctaatccgaactcgcgcgacgtctcgcgcgacgcacgtttatctcattcatacgactcgcgctaccgcgcccaaccccgctcactctcccattcacccataacccccaccccgactccgatctaaaacgtacgcgcgaaccctaacgaccgcgacgacctcgcgacctaattaactacaacaacacaacgacgtacgcacgcgaaaaaacgaaaacgcgcacgtaanaaccgtaaaattacgaaaacaactaaaaaacaaaaattaacctaatacacaaaaatcaaaaataaaaaaataaccaaacgaatcttnc

SEQ ID NO: 8945 - DNA, 1497 bp, Artificial Sequence
  chemically treated genomic DNA (Homo sapiens) CpG-island No: 8945
cggacgcgggtttttttcggttcggtacgggtggcgtaggatttcgagttcgtcgataagagagagagcgggagtgggagaaggaagatcgggagaggaggaggtcgggcggtaagagcggaagaagaggaggagaattgaggcggaggagggcgagagggaggagagtcgggcgtaggaaggggaggaaagaaaaaggcggcggaggagcgcggattcgttattttcggttttttttttcgtatttttattcgggtcggttttttttcggtcgtcgtcgtcgtcgtcgtcgtcgtcgtcgtcgtcgtcgtcgtttttttttgtttagtgtttttagtatcgtaaggtattcgttgtttttttcgtattcggttcggttcgtttagcgtcgtcgtcgtcgtattttcgtcgtattttcgcgcgcgttcggttcgcgcgttttcgtcgttcgttttcgcggtttcgcgttcggggtatgcgcggtgggcggtgtcgtttcgggtcgtttttgtcgtcgcgagtaggaagcgcgagcgtcgggtatcgggttgttagtgagtttggggttagcgggcgagttagcggtttcggttttcgttttcgtttcgcgtagtattagttcgatttttttcggttttcgtcgcgttttttcgtcgcgatttcggttatcggttcgcgtttcgcgttcggggtcgtttcgagttcgtatttttttttcgtcgttttcgtttattcggtttttcgcggtcgtagtttttcggcggaggtaagaggtggttgggggggattatggttgacgttttttcgggtaacgattttacggcgttttaggacgtggttaatcgtttcgttcgtaaaggggcgttgaggtagaagaacgtgtacgaggtgaaggattataaatttatcgcgcgtttttttaagtagtttattttttgtagttattgtatcgattttatttggtaggtgtcgggtcgggtatttttgtttcgttttttttcgttttcgggtttcggtattcggcgtttcggcgcgttcgtttcggggttggtttatttcgataatttggaatcggcgggagttcgaatttttcgttcggagtgatacgcgcgttcggttttgatatcggcgggtaggattttcgggacgtcgtcgtttcgttatatatattttttggcgcgagagggaggttggtttcgtacggtggcgaaggggattttttttcgggtcgggttttttattttttcgggcgcgtttattcgtacgtatttagcggagcggtcgtttgtcggggtgtgagtttaggggataggggaggaggagaggttttaagggggtaaaggttttcggagaaacgcgtttcggagtaacgggggagcggcggcgattgtattgcgcgcggtttaagttgttggcgagttaggttgggcgcgttcggggtgggggggttgtgtttgtgttttttatcgggttggattgcgttggtattttgggttt

SEQ ID NO: 8946 - DNA, 1497 bp, Artificial Sequence
  chemically treated genomic DNA (Homo sapiens) CpG-island No: 8946
aaacccaaaataccaacgcaatccaacccgataaaaaacacaaacacaacccccccaccccgaacgcgcccaacctaactcgccaacaacttaaaccgcgcgcaatacaatcgccgccgctcccccgttactccgaaacgcgtttctccgaaaacctttacccccttaaaacctctcctcctcccctatcccctaaactcacaccccgacaaacgaccgctccgctaaatacgtacgaataaacgcgcccgaaaaaataaaaaacccgacccgaaaaaaaatccccttcgccaccgtacgaaaccaacctccctctcgcgccaaaaaatatatataacgaaacgacgacgtcccgaaaatcctacccgccgatatcaaaaccgaacgcgcgtatcactccgaacgaaaaattcgaactcccgccgattccaaattatcgaaataaaccaaccccgaaacgaacgcgccgaaacgccgaataccgaaacccgaaaacgaaaaaaaacgaaacaaaaatacccgacccgacacctaccaaataaaatcgatacaataactacaaaaaataaactacttaaaaaaacgcgcgataaatttataatccttcacctcgtacacgttcttctacctcaacgcccctttacgaacgaaacgattaaccacgtcctaaaacgccgtaaaatcgttacccgaaaaaacgtcaaccataatcccccccaaccacctcttacctccgccgaaaaactacgaccgcgaaaaaccgaataaacgaaaacgacgaaaaaaaaatacgaactcgaaacgaccccgaacgcgaaacgcgaaccgataaccgaaatcgcgacgaaaaaacgcgacgaaaaccgaaaaaaatcgaactaatactacgcgaaacgaaaacgaaaaccgaaaccgctaactcgcccgctaaccccaaactcactaacaacccgatacccgacgctcgcgcttcctactcgcgacgacaaaaacgacccgaaacgacaccgcccaccgcgcataccccgaacgcgaaaccgcgaaaacgaacgacgaaaacgcgcgaaccgaacgcgcgcgaaaatacgacgaaaatacgacgacgacgacgctaaacgaaccgaaccgaatacgaaaaaaacaacgaataccttacgatactaaaaacactaaacaaaaaaaaacgacgacgacgacgacgacgacgacgacgacgacgacgacgaccgaaaaaaaaccgacccgaataaaaatacgaaaaaaaaaaccgaaaataacgaatccgcgctcctccgccgcctttttctttcctccccttcctacgcccgactctcctccctctcgccctcctccgcctcaattctcctcctcttcttccgctcttaccgcccgacctcctcctctcccgatcttccttctcccactcccgctctctctcttatcgacgaactcgaaatcctacgccacccgtaccgaaccgaaaaaaacccgcgtccg

SEQ ID NO: 8947 - DNA, 1497 bp, Artificial Sequence
  chemically treated genomic DNA (Homo sapiens) CpG-island No: 8947
gggtttaagatgttagcgtagtttagttcgatgggaagtataaatataatttttttatttcgaacgcgtttagtttggttcgttagtaatttggatcgcgcgtagtgtaatcgtcgtcgttttttcgttatttcggggcgcgttttttcgggaatttttgtttttttagggttttttttttttttttgttttttgggtttatatttcggtaagcggtcgtttcgttgggtgcgtgcgggtgggcgcgttcggggaggtgaggggttcggttcggagagggatttttttcgttatcgtacggggttagtttttttttcgcgttagggggtgtgtgtggcgggacggcgacgtttcgggagttttgttcgtcggtgttagggtcgggcgcgcgtgttatttcgggcgaagagttcggattttcgtcggttttaagttatcggagtgagttagtttcggggcggacgcgtcggagcgtcgggtgtcgggattcggaggcggggaggagcggggtaggagtgttcggttcggtatttattagatgaagtcggtgtagtggttgtagaaggtgggttgtttgaagaagcgcgcgatgaatttgtggttttttatttcgtgtacgtttttttgttttagcgtttttttgcgggcgaagcggttggttacgttttgagacgtcgtggagtcgttgttcgggaaaacgttagttatggttttttttaattattttttgttttcgtcggggagttgcggtcgcggagggtcgggtgggcgggggcggcgggggagaggtgcgggttcggggcgatttcgggcgcggggcgcgggtcggtggtcgaggtcgcggcgagggggcgcggcgggggtcggggagagtcgggttggtgttgcgcggagcgggagcgggagtcggagtcgttggttcgttcgttggttttaggtttattgatagttcggtgttcggcgttcgcgttttttattcgcggcggtagaggcggttcggagcggtatcgtttatcgcgtatgtttcgagcgcgaggtcgcgaggacgagcggcgggggcgcgcgggtcgggcgcgcgcgggggtgcggcgagggtgcggcggcggcggcgttgagcggatcggatcgagtgcggaggaggtagcgagtgttttgcggtgttgggaatattgggtaaggggaggcggcggcggcggcggcggcggcggcggcggcggcggcggcggtcgggggagggtcggttcgagtggggatgcgggggaggaggtcgggagtggcgggttcgcgttttttcgtcgtttttttttttttttttttttttgcgttcggtttttttttttttcgttttttttcgttttagtttttttttttttttttcgtttttgtcgttcggtttttttttttttcggtttttttttttttattttcgtttttttttttgtcgacgggttcggagttttgcgttattcgtgtcgggtcgagaggagttcgcgttcg

SEQ ID NO: 8948 - DNA, 1497 bp, Artificial Sequence
  chemically treated genomic DNA (Homo sapiens) CpG-island No: 8948
cgaacgcgaactcctctcgacccgacacgaataacgcaaaactccgaacccgtcgacaaaaaaaaaaacgaaaataaaaaaaaaaaaaccgaaaaaaaaaaaaaccgaacgacaaaaacgaaaaaaaaaaaaaaaaactaaaacgaaaaaaaacgaaaaaaaaaaaaaccgaacgcaaaaaaaaaaaaaaaaaaaaaaacgacgaaaaaacgcgaacccgccactcccgacctcctcccccgcatccccactcgaaccgaccctcccccgaccgccgccgccgccgccgccgccgccgccgccgccgccgccgcctccccttacccaatattcccaacaccgcaaaacactcgctacctcctccgcactcgatccgatccgctcaacgccgccgccgccgcaccctcgccgcacccccgcgcgcgcccgacccgcgcgcccccgccgctcgtcctcgcgacctcgcgctcgaaacatacgcgataaacgataccgctccgaaccgcctctaccgccgcgaataaaaaacgcgaacgccgaacaccgaactatcaataaacctaaaaccaacgaacgaaccaacgactccgactcccgctcccgctccgcgcaacaccaacccgactctccccgacccccgccgcgccccctcgccgcgacctcgaccaccgacccgcgccccgcgcccgaaatcgccccgaacccgcacctctcccccgccgcccccgcccacccgaccctccgcgaccgcaactccccgacgaaaacaaaaaataattaaaaaaaaccataactaacgttttcccgaacaacgactccacgacgtctcaaaacgtaaccaaccgcttcgcccgcaaaaaaacgctaaaacaaaaaaacgtacacgaaataaaaaaccacaaattcatcgcgcgcttcttcaaacaacccaccttctacaaccactacaccgacttcatctaataaataccgaaccgaacactcctaccccgctcctccccgcctccgaatcccgacacccgacgctccgacgcgtccgccccgaaactaactcactccgataacttaaaaccgacgaaaatccgaactcttcgcccgaaataacacgcgcgcccgaccctaacaccgacgaacaaaactcccgaaacgtcgccgtcccgccacacacaccccctaacgcgaaaaaaaaactaaccccgtacgataacgaaaaaaatccctctccgaaccgaacccctcacctccccgaacgcgcccacccgcacgcacccaacgaaacgaccgcttaccgaaatataaacccaaaaaacaaaaaaaaaaaaaaaaccctaaaaaaacaaaaattcccgaaaaaacgcgccccgaaataacgaaaaaacgacgacgattacactacgcgcgatccaaattactaacgaaccaaactaaacgcgttcgaaataaaaaaattatatttatacttcccatcgaactaaactacgctaacatcttaaaccc

SEQ ID NO: 8949 - DNA, 511 bp, Artificial Sequence
  chemically treated genomic DNA (Homo sapiens) CpG-island No: 8949
  unsure (288, 310)
agtacggggattttttatacgcgggtttttggttggaggagttcgtttcggtcgtcgtttgggtttcgcggtttagaggtgcgcgcgattttcgttcggttttgttcgtttagtttggcgttcgtcgtttttggttgtgcgtttcgttggggtcgggagtcgtcgcgcgtttttcggttttatttaggagtagtaggcggtgggtagttttgtaagttaggcgttttttttgtaattgtttttcgatttttttgttggtttcgcgtcgtttttttttatcgacgtttntggtttttcgtcgttttgttgnttgtcgtttaaatattttatgtttgttcgttgggatggacgttaggaagttaggaatgtgcgtaaaaagtaatagagagttggagacgtgtgcggtttttgcgacggttttttttttttttgttgttgaaagagatggtttggttttttcggtgtttttcgatttagagtaggcgttttttttttttttttttgtttatcg

SEQ ID NO: 8950 - DNA, 511 bp, Artificial Sequence
  chemically treated genomic DNA (Homo sapiens) CpG-island No: 8950
  unsure (202, 224)
cgataaacaaaaaaaaaaaaaaaaaacgcctactctaaatcgaaaaacaccgaaaaaaccaaaccatctctttcaacaacaaaaaaaaaaaaaaccgtcgcaaaaaccgcacacgtctccaactctctattactttttacgcacattcctaacttcctaacgtccatcccaacgaacaaacataaaatatttaaacgacaancaacaaaacgacgaaaaaccanaaacgtcgataaaaaaaaacgacgcgaaaccaacaaaaaaatcgaaaaacaattacaaaaaaaacgcctaacttacaaaactacccaccgcctactactcctaaataaaaccgaaaaacgcgcgacgactcccgaccccaacgaaacgcacaaccaaaaacgacgaacgccaaactaaacgaacaaaaccgaacgaaaatcgcgcgcacctctaaaccgcgaaacccaaacgacgaccgaaacgaactcctccaaccaaaaacccgcgtataaaaaatccccgtact

SEQ ID NO: 8951 - DNA, 511 bp, Artificial Sequence
  chemically treated genomic DNA (Homo sapiens) CpG-island No: 8951
  unsure (202, 224)
cggtgggtagggggagggagaagaaacgtttgttttgaatcggaaaatatcgaagagattagattattttttttagtagtaggaaagagaggagtcgtcgtaggagtcgtatacgtttttaattttttattgttttttgcgtatatttttaattttttgacgtttattttagcgggtaggtatggggtgtttgggcggtaantagtaagacgacggaagattangggcgtcgatgaaaaagaacgacgcgaggttaataaaaagatcgagaagtagttgtagaaagagcgtttggtttataaggttatttatcgtttgttgtttttgggtaaggtcgaggggcgcgcggcggttttcggttttagcggagcgtatagttaggagcggcgagcgttaggttgggcgggtagggtcgggcgagggtcgcgcgtatttttgggtcgcggagtttagacggcggtcggggcgagtttttttagttaggaattcgcgtgtaggaaattttcgtgtt

SEQ ID NO: 8952 - DNA, 511 bp, Artificial Sequence
  chemically treated genomic DNA (Homo sapiens) CpG-island No: 8952
  unsure (288, 310)
aacacgaaaatttcctacacgcgaattcctaactaaaaaaactcgccccgaccgccgtctaaactccgcgacccaaaaatacgcgcgaccctcgcccgaccctacccgcccaacctaacgctcgccgctcctaactatacgctccgctaaaaccgaaaaccgccgcgcgcccctcgaccttacccaaaaacaacaaacgataaataaccttataaaccaaacgctctttctacaactacttctcgatctttttattaacctcgcgtcgttctttttcatcgacgcccntaatcttccgtcgtcttactanttaccgcccaaacaccccatacctacccgctaaaataaacgtcaaaaaattaaaaatatacgcaaaaaacaataaaaaattaaaaacgtatacgactcctacgacgactcctctctttcctactactaaaaaaaataatctaatctcttcgatattttccgattcaaaacaaacgtttcttctccctccccctacccaccg

SEQ ID NO: 8953 - DNA, 666 bp, Artificial Sequence
  chemically treated genomic DNA (Homo sapiens) CpG-island No: 8953
  unsure (93, 143, 252, 327)
gcgtcggttttcgttggagatagtcgaggtggcgtagcgtttcgggttcgttttacgttttttcgttcgtattttaagtttcgtttagttttngtttagcgggttttcgagggggcggcgcgttcggttgggtgtcgggtttntaaatagtcggggtggtggttgagcgtggcgcggaggatagagcgcgttatcggggttttagagggcgacgatgggtatttgtcgggtcggttcgcgttttgttatttntttagtcgtcggacgtgcgttttttttttggtttgggatttcggtgcggggaagggagagggaggttggttttgnggggcggtcgggtcgttggtttcggagttttcggagaggcgttatcgcgttgtaggggttagggagttgattttttacggagttcggtcggttggggcgtttatacgttgatcggtttgggtttcgggttcgtagttttttcgttgcgtcgcggtcgtttggtttttttgtatttcgagtcgggaaagtgcgtttgggcgcgcgtttcgtgttggttcggacgcgtttttgtttttggcgggcgaagattcgcggaggattatgtatattttagtagggaggaggattttttcgaggtttattagttatatcgtttttgttttgtttagtttttagatt

SEQ ID NO: 8954 - DNA, 666 bp, Artificial Sequence
  chemically treated genomic DNA (Homo sapiens) CpG-island No: 8954
  unsure (340, 415, 524, 574)
aatctaaaaactaaacaaaacaaaaacgatataactaataaacctcgaaaaaatcctcctccctactaaaatatacataatcctccgcgaatcttcgcccgccaaaaacaaaaacgcgtccgaaccaacacgaaacgcgcgcccaaacgcactttcccgactcgaaatacaaaaaaaccaaacgaccgcgacgcaacgaaaaaactacgaacccgaaacccaaaccgatcaacgtataaacgccccaaccgaccgaactccgtaaaaaatcaactccctaacccctacaacgcgataacgcctctccgaaaactccgaaaccaacgacccgaccgccccncaaaaccaacctccctctcccttccccgcaccgaaatcccaaaccaaaaaaaaaacgcacgtccgacgactaaanaaataacaaaacgcgaaccgacccgacaaatacccatcgtcgccctctaaaaccccgataacgcgctctatcctccgcgccacgctcaaccaccaccccgactatttanaaacccgacacccaaccgaacgcgccgccccctcgaaaacccgctaaacnaaaactaaacgaaacttaaaatacgaacgaaaaaacgtaaaacgaacccgaaacgctacgccacctcgactatctccaacgaaaaccgacgc

SEQ ID NO: 8955 - DNA, 666 bp, Artificial Sequence
  chemically treated genomic DNA (Homo sapiens) CpG-island No: 8955
  unsure (340, 415, 524, 574)
agtttagaagttgagtagaataaaggcggtgtgattggtgagtttcggagggatttttttttttgttagaatatgtatgatttttcgcgagttttcgttcgttaggagtagggacgcgttcgagttaatacggggcgcgcgtttagacgtattttttcggttcggggtgtaagagagttaggcggtcgcggcgtagcggaggggttgcgggttcggaatttaggtcggttagcgtgtaagcgttttagtcggtcgggtttcgtggggggttagttttttgatttttatagcgcggtagcgttttttcgagagtttcgggattagcggttcggtcgttttntaaagttagtttttttttttttttttcgtatcgggattttagattagggagggggcgtacgttcgacggttgagngaatagtagggcgcgagtcggttcggtaggtgtttatcgtcgttttttgggatttcggtggcgcgttttgtttttcgcgttacgtttagttattatttcggttgtttgnggattcggtatttagtcgagcgcgtcgttttttcggggattcgttgggtnggggttgagcgaggtttggagtgcgggcgaagggacgtggggcgaattcggggcgttgcgttatttcggttgtttttagcggagatcggcgt

SEQ ID NO: 8956 - DNA, 666 bp, Artificial Sequence
  chemically treated genomic DNA (Homo sapiens) CpG-island No: 8956
  unsure (93, 143, 252, 327)
acgccgatctccgctaaaaacaaccgaaataacgcaacgccccgaattcgccccacgtcccttcgcccgcactccaaacctcgctcaaccccnacccaacgaatccccgaaaaaacgacgcgctcgactaaataccgaatccncaaacaaccgaaataataactaaacgtaacgcgaaaaacaaaacgcgccaccgaaatcccaaaaaacgacgataaacacctaccgaaccgactcgcgccctactattcnctcaaccgtcgaacgtacgccccctccctaatctaaaatcccgatacgaaaaaaaaaaaaaaaaactaactttanaaaacgaccgaaccgctaatcccgaaactctcgaaaaaacgctaccgcgctataaaaatcaaaaaactaaccccccacgaaacccgaccgactaaaacgcttacacgctaaccgacctaaattccgaacccgcaacccctccgctacgccgcgaccgcctaactctcttacaccccgaaccgaaaaaatacgtctaaacgcgcgccccgtattaactcgaacgcgtccctactcctaacgaacgaaaactcgcgaaaaatcatacatattctaacaaaaaaaaaaatccctccgaaactcaccaatcacaccgcctttattctactcaacttctaaact

SEQ ID NO: 8957 - DNA, 966 bp, Artificial Sequence
  chemically treated genomic DNA (Homo sapiens) CpG-island No: 8957
tcgtgttattttgtgggagtagaaacggaggttagttttttgttcgtgagggttggggcggggcgcgggttttggtaggtgcgttagttcgtaggggaattcggggttttatttgggcgcggcgaggaagttatattatgtatgggtagttacgttaggggggcgggttcgtagtcgtcggggaacgcgagtcgggtttatttcggtgaaaaggttgtagtcggatttggggagcgtcgttaagttcgggatcgacgggttaaggcggcgcgtttcgggggtggagtttggaggtgatcgcgtcgttgtaacgtttttatttttcgcggtcgtagtggtttagttcgagaattttttatttataaaaagaaaagattcgtacggcgcgggtgagttagaatttagtagtcgtgtatttcgtagagtcgttagtttcgggtatgtttcgagatttcggggaattcggttcgagtttcgggaacggcggcgggtacggcggtttcgcgtattttcggtcgtagcgtaggtagtttagtaggtgagtggggttcgacgtcggtggttttacgggaggatcgcgcgtgggaggtcggggttaattttcgtacgtttcgggattggagcggggaatcggagtcggggtcgggttgggggttggggcgaggattttgttttcgtcgttcggggttagttgtttttcgcgcgtagtagagatcgcgaatttttttttttttagtcgtttttttttttttcgtcgttcgcgttcgttttttcgttttcgtgttcgttttttttttttttgtttatttttgatttttgcgtttattttgttttagaaggggcgtgggcgtagggtggtcgttcgaagttaggagggttttttcgtttcgggttgaatttttgggatttggagtttgggttggggtgagggttttatacgggagggaggcgggattcgtcgggaga

SEQ ID NO: 8958 - DNA, 966 bp, Artificial Sequence
  chemically treated genomic DNA (Homo sapiens) CpG-island No: 8958
tctcccgacgaatcccgcctccctcccgtataaaaccctcaccccaacccaaactccaaatcccaaaaattcaacccgaaacgaaaaaaccctcctaacttcgaacgaccaccctacgcccacgccccttctaaaacaaaataaacgcaaaaatcaaaaataaacaaaaaaaaaaaaaacgaacacgaaaacgaaaaaacgaacgcgaacgacgaaaaaaaaaaaaacgactaaaaaaaaaaaaattcgcgatctctactacgcgcgaaaaacaactaaccccgaacgacgaaaacaaaatcctcgccccaacccccaacccgaccccgactccgattccccgctccaatcccgaaacgtacgaaaattaaccccgacctcccacgcgcgatcctcccgtaaaaccaccgacgtcgaaccccactcacctactaaactacctacgctacgaccgaaaatacgcgaaaccgccgtacccgccgccgttcccgaaactcgaaccgaattccccgaaatctcgaaacatacccgaaactaacgactctacgaaatacacgactactaaattctaactcacccgcgccgtacgaatcttttctttttataaataaaaaattctcgaactaaaccactacgaccgcgaaaaataaaaacgttacaacgacgcgatcacctccaaactccacccccgaaacgcgccgccttaacccgtcgatcccgaacttaacgacgctccccaaatccgactacaaccttttcaccgaaataaacccgactcgcgttccccgacgactacgaacccgcccccctaacgtaactacccatacataatataacttcctcgccgcgcccaaataaaaccccgaattcccctacgaactaacgcacctaccaaaacccgcgccccgccccaaccctcacgaacaaaaaactaacctccgtttctactcccacaaaataacacga

SEQ ID NO: 8959 - DNA, 966 bp, Artificial Sequence
  chemically treated genomic DNA (Homo sapiens) CpG-island No: 8959
tttttcgacggatttcgtttttttttcgtgtgggatttttattttagtttagattttagattttaggaatttagttcgaagcggagagatttttttagtttcgagcgattattttacgtttacgttttttttgaagtagggtggacgtagaagttagaggtgggtaggaggagagaaagcgggtacggagacggagggacggacgcggacggcgagggagaagggggcggttgggagaaggggagttcgcggtttttgttgcgcgcggggggtaattggtttcggacggcgagggtaggattttcgttttagtttttagttcggtttcgatttcggtttttcgttttagtttcggagcgtgcgggagttgatttcggttttttacgcgcggttttttcgtgggattatcggcgtcgggttttatttatttgttgggttgtttgcgttgcggtcgggggtgcgcggggtcgtcgtattcgtcgtcgttttcggagttcgggtcgggtttttcgaagtttcggaatatgttcggggttggcggttttgcggggtatacggttgttgggttttgatttattcgcgtcgtgcgagttttttttttttatgaatgaaaagttttcgggttgaattattgcgatcgcggggggtgggggcgttgtagcggcgcggttatttttaggttttattttcgagacgcgtcgttttggttcgtcggtttcgaatttggcgacgttttttaagttcggttgtagtttttttatcgggatgggttcggttcgcgtttttcggcggttgcgggttcgtttttttgacgtagttgtttatatatggtgtaattttttcgtcgcgtttaggtggagtttcgggtttttttgcggattgacgtatttgttagagttcgcgtttcgttttagtttttacgagtaaagggttaattttcgtttttgtttttataaaatagtacga

SEQ ID NO: 8960 - DNA, 966 bp, Artificial Sequence
  chemically treated genomic DNA (Homo sapiens) CpG-island No: 8960
tcgtactattttataaaaacaaaaacgaaaattaaccctttactcgtaaaaactaaaacgaaacgcgaactctaacaaatacgtcaatccgcaaaaaaacccgaaactccacctaaacgcgacgaaaaaattacaccatatataaacaactacgtcaaaaaaacgaacccgcaaccgccgaaaaacgcgaaccgaacccatcccgataaaaaaactacaaccgaacttaaaaaacgtcgccaaattcgaaaccgacgaaccaaaacgacgcgtctcgaaaataaaacctaaaaataaccgcgccgctacaacgcccccaccccccgcgatcgcaataattcaacccgaaaacttttcattcataaaaaaaaaaaactcgcacgacgcgaataaatcaaaacccaacaaccgtataccccgcaaaaccgccaaccccgaacatattccgaaacttcgaaaaacccgacccgaactccgaaaacgacgacgaatacgacgaccccgcgcacccccgaccgcaacgcaaacaacccaacaaataaataaaacccgacgccgataatcccacgaaaaaaccgcgcgtaaaaaaccgaaatcaactcccgcacgctccgaaactaaaacgaaaaaccgaaatcgaaaccgaactaaaaactaaaacgaaaatcctaccctcgccgtccgaaaccaattaccccccgcgcgcaacaaaaaccgcgaactccccttctcccaaccgcccccttctccctcgccgtccgcgtccgtccctccgtctccgtacccgctttctctcctcctacccacctctaacttctacgtccaccctacttcaaaaaaaacgtaaacgtaaaataatcgctcgaaactaaaaaaatctctccgcttcgaactaaattcctaaaatctaaaatctaaactaaaataaaaatcccacacgaaaaaaaaacgaaatccgtcgaaaaa

SEQ ID NO: 8961 - DNA, 585 bp, Artificial Sequence
  chemically treated genomic DNA (Homo sapiens) CpG-island No: 8961
tttttcgcgtgttcgttcgtttgtttgtttttcgttttttcgtcgttaagtttttatcgtttttcggtttggggagtttaggggggttcgggtagtggaatttgttaggttttcggagatcggttttcgatttttttgtcgaatgcgggaatagagatttcgaggtttcgggacgtgcgcggggttaggttgcgggcgattttcgcgattttatttttagtttttaacggcgttcgttgttcgtcggggtattcgggaggttgtaggtgtttattttttgtcgaggggttgcgagtacgtgtcgataggggagggaaggaggggcgttcgttcgagttatcggttcgagttacggcggttgagttattcggggcgtttttttttttttgtttggagcggtcgggtcgggagtgggagatgtcgtcgcggtgtttcggattcggaattggggttattgggacgtcgggttcgtagcgtttgggttcggttatcgttgtcgggatttgtttgggtttgtgggcgtttttcggacgattgggcgtttatatttagggtttagcggtagagttagaatttatttttttt

SEQ ID NO: 8962 - DNA, 585 bp, Artificial Sequence
  chemically treated genomic DNA (Homo sapiens) CpG-island No: 8962
aaaaaaaataaattctaactctaccgctaaaccctaaatataaacgcccaatcgtccgaaaaacgcccacaaacccaaacaaatcccgacaacgataaccgaacccaaacgctacgaacccgacgtcccaataaccccaattccgaatccgaaacaccgcgacgacatctcccactcccgacccgaccgctccaaacaaaaaaaaaaaaacgccccgaataactcaaccgccgtaactcgaaccgataactcgaacgaacgcccctccttccctcccctatcgacacgtactcgcaacccctcgacaaaaaataaacacctacaacctcccgaataccccgacgaacaacgaacgccgttaaaaactaaaaataaaatcgcgaaaatcgcccgcaacctaaccccgcgcacgtcccgaaacctcgaaatctctattcccgcattcgacaaaaaaatcgaaaaccgatctccgaaaacctaacaaattccactacccgaacccccctaaactccccaaaccgaaaaacgataaaaacttaacgacgaaaaaacgaaaaacaaacaaacgaacgaacacgcgaaaaa

SEQ ID NO: 8963 - DNA, 585 bp, Artificial Sequence
  chemically treated genomic DNA (Homo sapiens) CpG-island No: 8963
gggagaagtgggttttagttttgtcgttgggttttgggtgtgggcgtttaatcgttcgggaagcgtttataagtttaggtaagtttcgatagcggtagtcgagtttaagcgttgcgggttcggcgttttagtgattttagtttcgggttcgaggtatcgcggcggtattttttattttcggttcggtcgttttaggtaggaagggagggacgtttcgggtgatttagtcgtcgtgattcgggtcgatgattcgaacggacgttttttttttttttttttgtcgatacgtgttcgtagtttttcgataggaaatgggtatttgtagtttttcgggtgtttcggcgggtagcgggcgtcgttaggggttgagagtggggtcgcgagagtcgttcgtagtttgatttcgcgtacgtttcggaatttcgaggtttttattttcgtattcggtaaagggatcgagggtcggttttcggggatttggtaggttttattgttcggatttttttggattttttaggtcgagaaacgatagggatttggcgacggaggggcgaaggatagatagacggacggatacgcggaggg

SEQ ID NO: 8964 - DNA, 585 bp, Artificial Sequence
  chemically treated genomic DNA (Homo sapiens) CpG-island No: 8964
ccctccgcgtatccgtccgtctatctatccttcgcccctccgtcgccaaatccctatcgtttctcgacctaaaaaatccaaaaaaatccgaacaataaaacctaccaaatccccgaaaaccgaccctcgatccctttaccgaatacgaaaataaaaacctcgaaattccgaaacgtacgcgaaatcaaactacgaacgactctcgcgaccccactctcaacccctaacgacgcccgctacccgccgaaacacccgaaaaactacaaatacccatttcctatcgaaaaactacgaacacgtatcgacaaaaaaaaaaaaaaaaaacgtccgttcgaatcatcgacccgaatcacgacgactaaatcacccgaaacgtccctcccttcctacctaaaacgaccgaaccgaaaataaaaaataccgccgcgatacctcgaacccgaaactaaaatcactaaaacgccgaacccgcaacgcttaaactcgactaccgctatcgaaacttacctaaacttataaacgcttcccgaacgattaaacgcccacacccaaaacccaacgacaaaactaaaacccacttctccc

SEQ ID NO: 8965 - DNA, 578 bp, Artificial Sequence
  chemically treated genomic DNA (Homo sapiens) CpG-island No: 8965
aagtataacgtcggttttcgtcggtgagtacgtgtagagttcggtaggagtgggttcggttttcgggtggtttgggtttagttatcgttgggtaggcggggcgtcgcggtgttcggggtttggacgtttcgttttttttatgtttttttcgcgttcgtgtttttcgttttttttttcgggatgttttttttttttttagtatttttttagggacggtggcgacggggtttgaattttgtttttttatcgtaggcgcggattaagaagattatgtagacggacgaagagattgggaaggtggcggcgcggtgtttgttattatttgtatttgtcgggggcggatcgggtcgaggggcgtgggggagggaggtagcgggtttttttttttgtttcggagttttttttgacgttttttagttcgggcgttcgagttttttttagagtcgttgttgaagaaggtttgttaggtgatttagtcgcggaagcgaagattatgattatattttatttgtgagcgggaggagcgggaggggtcggcgggtttggtcggggagtttatatattgaggaaggtagagt

SEQ ID NO: 8966 - DNA, 578 bp, Artificial Sequence
  chemically treated genomic DNA (Homo sapiens) CpG-island No: 8966
actctaccttcctcaatatataaactccccgaccaaacccgccgacccctcccgctcctcccgctcacaaataaaatataatcataatcttcgcttccgcgactaaatcacctaacaaaccttcttcaacaacgactctaaaaaaaactcgaacgcccgaactaaaaaacgtcaaaaaaaactccgaaacaaaaaaaaaaacccgctacctccctcccccacgcccctcgacccgatccgcccccgacaaatacaaataataacaaacaccgcgccgccaccttcccaatctcttcgtccgtctacataatcttcttaatccgcgcctacgataaaaaaacaaaattcaaaccccgtcgccaccgtccctaaaaaaatactaaaaaaaaaaaaaacatcccgaaaaaaaaaacgaaaaacacgaacgcgaaaaaaacataaaaaaaacgaaacgtccaaaccccgaacaccgcgacgccccgcctacccaacgataactaaacccaaaccacccgaaaaccgaacccactcctaccgaactctacacgtactcaccgacgaaaaccgacgttatactt

SEQ ID NO: 8967 - DNA, 578 bp, Artificial Sequence
  chemically treated genomic DNA (Homo sapiens) CpG-island No: 8967
gttttgttttttttagtgtgtgaatttttcggttaaattcgtcggtttttttcgtttttttcgtttataggtgggatgtggttatggttttcgttttcgcgattgggttatttggtaggttttttttaatagcgattttaggaagagttcgagcgttcgggttgaggagcgttaaggagaatttcggggtaggagaggggattcgttgttttttttttttacgtttttcgattcggttcgttttcggtagatatagatgatgataggtatcgcgtcgttatttttttaattttttcgttcgtttgtatgatttttttgattcgcgtttgcggtgggggagtagagtttagatttcgtcgttatcgtttttaagggggtgttgggggaggaaggggtatttcgagaaagggggcgggggatacggacgcggggagggtatggagggggcggggcgtttaggtttcgaatatcgcggcgtttcgtttgtttagcggtaattgggtttaagttattcgggagtcgggtttatttttgtcgggttttgtacgtgtttatcggcgggaatcggcgttgtattt

SEQ ID NO: 8968 - DNA, 578 bp, Artificial Sequence
  chemically treated genomic DNA (Homo sapiens) CpG-island No: 8968
aaatacaacgccgattcccgccgataaacacgtacaaaacccgacaaaaataaacccgactcccgaataacttaaacccaattaccgctaaacaaacgaaacgccgcgatattcgaaacctaaacgccccgccccctccataccctccccgcgtccgtatcccccgccccctttctcgaaataccccttcctcccccaacacccccttaaaaacgataacgacgaaatctaaactctactcccccaccgcaaacgcgaatcaaaaaaatcatacaaacgaacgaaaaaattaaaaaaataacgacgcgatacctatcatcatctatatctaccgaaaacgaaccgaatcgaaaaacgtaaaaaaaaaaaacaacgaatcccctctcctaccccgaaattctccttaacgctcctcaacccgaacgctcgaactcttcctaaaatcgctattaaaaaaaacctaccaaataacccaatcgcgaaaacgaaaaccataaccacatcccacctataaacgaaaaaaacgaaaaaaaccgacgaatttaaccgaaaaattcacacactaaaaaaaacaaaac

SEQ ID NO: 8969 - DNA, 1129 bp, Artificial Sequence
  chemically treated genomic DNA (Homo sapiens) CpG-island No: 8969
aggagcggaggaggggagcgaataggacgaggaacggggcggagggggttgggaggacggagggggttgtttcgcgttcggggagcggagggggaacgaggggttttgagcgggggaaaggtgagcggaggaggggtcgcgaattagggggaagcgggaggtcggcggagtatgagagggggcggcgggaggcgagcggggggtttttcggaggttttaataattttttagttttgcggggatttcgagtttcgaataaaggcggttacgaaggtcggcgtatagcgttttgtttcgtttttcggcgtttttcgtagggcgaataaaggtttagcggttttcgcgtttaggtttttttacgttttttttcggaggtttttttttgcgttttaagtttttaggtttttcgcgcgttcgatgttttttttatttttcgcgttttttattttcgattatttttgcgttttcggatttttacgaagtttcggatttcgcgttttcggcgtttttcgcggtatttataggatggaggtttgcggcgttacggcgggtacggtttttagtagtagatgtatgtagcgtacggtggtgcggaagtataggtagcggttcggatattttgcgttcggtttttgggttattacggttagcgttttttaggcgtagaatagtacgagcgttaataggtagcggcgttcggggtttttggagcgtttggttatggtcgacggcgcggacggacgttcggacgtacggagttattacggtcggttttcgattgcgttcgttcggtcgcggtttacgttttagttgtgcgcggggggcggggggcgttagttgtgtatatgcgcgaggtttttttcggtttttttgaattttcgagggcggggcggggcgagaattcggggttttagcgttcggtttgagcgtttttatttcggtggggcggttcgtatggttaaggcgagcgttcgggggcgcggaggagagtattggtatttttgattttgcgttcgagattcggggttcgggattttggggtttacgcgaagtttttttattttttttattcgtggtttttgtttgcgtttattacgggttttttagttggcgttttaatgtttgtaat

SEQ ID NO: 8970 - DNA, 1129 bp, Artificial Sequence
  chemically treated genomic DNA (Homo sapiens) CpG-island No: 8970
attacaaacattaaaacgccaactaaaaaacccgtaataaacgcaaacaaaaaccacgaataaaaaaaataaaaaaacttcgcgtaaaccccaaaatcccgaaccccgaatctcgaacgcaaaatcaaaaataccaatactctcctccgcgcccccgaacgctcgccttaaccatacgaaccgccccaccgaaataaaaacgctcaaaccgaacgctaaaaccccgaattctcgccccgccccgccctcgaaaattcaaaaaaaccgaaaaaaacctcgcgcatatacacaactaacgccccccgccccccgcgcacaactaaaacgtaaaccgcgaccgaacgaacgcaatcgaaaaccgaccgtaataactccgtacgtccgaacgtccgtccgcgccgtcgaccataaccaaacgctccaaaaaccccgaacgccgctacctattaacgctcgtactattctacgcctaaaaaacgctaaccgtaataacccaaaaaccgaacgcaaaatatccgaaccgctacctatacttccgcaccaccgtacgctacatacatctactactaaaaaccgtacccgccgtaacgccgcaaacctccatcctataaataccgcgaaaaacgccgaaaacgcgaaatccgaaacttcgtaaaaatccgaaaacgcaaaaataatcgaaaataaaaaacgcgaaaaataaaaaaaacatcgaacgcgcgaaaaacctaaaaacttaaaacgcaaaaaaaaacctccgaaaaaaaacgtaaaaaaacctaaacgcgaaaaccgctaaacctttattcgccctacgaaaaacgccgaaaaacgaaacaaaacgctatacgccgaccttcgtaaccgcctttattcgaaactcgaaatccccgcaaaactaaaaaattattaaaacctccgaaaaaccccccgctcgcctcccgccgccccctctcatactccgccgacctcccgcttccccctaattcgcgacccctcctccgctcacctttcccccgctcaaaacccctcgttccccctccgctccccgaacgcgaaacaaccccctccgtcctcccaaccccctccgccccgttcctcgtcctattcgctcccctcctccgctcct

SEQ ID NO: 8971 - DNA, 1129 bp, Artificial Sequence
  chemically treated genomic DNA (Homo sapiens) CpG-island No: 8971
gttataaatattaaggcgttaattaaaaaattcgtagtgagcgtaggtagaaattacgggtaagagaagtggagaagtttcgcgtaggttttagggtttcgagtttcgagtttcgagcgtagaattaggggtgttaatgttttttttcgcgttttcgagcgttcgttttggttatgcgggtcgttttatcgggatgagggcgtttaggtcggacgttggggtttcgggttttcgtttcgtttcgttttcggggatttagaggggtcgggaggagtttcgcgtatgtgtatagttggcgtttttcgtttttcgcgtatagttgggacgtgggtcgcggtcgggcgggcgtagtcgggagtcggtcgtggtggtttcgtgcgttcgagcgttcgttcgcgtcgtcggttatggttaagcgttttaggggtttcgggcgtcgttgtttgttggcgttcgtgttgttttgcgtttgggggacgttggtcgtggtggtttagaagtcgggcgtagggtgttcgagtcgttgtttgtgttttcgtattatcgtgcgttgtatgtatttgttgttggaggtcgtgttcgtcgtggcgtcgtagatttttattttgtgagtgtcgcgggggacgtcgggggcgcggggttcggggtttcgtggagattcgggagcgtaggggtgatcggaggtggggggcgcggagggtggagggggtatcgggcgcgcggggggtttggggatttgggacgtagaagggaattttcgaagggggacgtggggggatttgggcgcggggatcgttgggtttttgttcgttttgcgggagacgtcgaggggcggaatagagcgttgtgcgtcggttttcgtagtcgtttttgttcggaattcggaattttcgtaggattgggaagttgttggagttttcgggaaatttttcgttcgtttttcgtcgtttttttttatgtttcgtcggtttttcgtttttttttggttcgcggtttttttttcgtttatttttttttcgtttaggatttttcgtttttttttcgtttttcgagcgcggagtagtttttttcgtttttttagtttttttcgtttcgtttttcgttttgttcgtttttttttttcgttttt

SEQ ID NO: 8972 - DNA, 1129 bp, Artificial Sequence
  chemically treated genomic DNA (Homo sapiens) CpG-island No: 8972
aaaaacgaaaaaaaaaaacgaacaaaacgaaaaacgaaacgaaaaaaactaaaaaaacgaaaaaaactactccgcgctcgaaaaacgaaaaaaaaacgaaaaatcctaaacgaaaaaaaaataaacgaaaaaaaaaccgcgaaccaaaaaaaaacgaaaaaccgacgaaacataaaaaaaaacgacgaaaaacgaacgaaaaatttcccgaaaactccaacaacttcccaatcctacgaaaattccgaattccgaacaaaaacgactacgaaaaccgacgcacaacgctctattccgcccctcgacgtctcccgcaaaacgaacaaaaacccaacgatccccgcgcccaaatccccccacgtcccccttcgaaaattcccttctacgtcccaaatccccaaaccccccgcgcgcccgataccccctccaccctccgcgccccccacctccgatcacccctacgctcccgaatctccacgaaaccccgaaccccgcgcccccgacgtcccccgcgacactcacaaaataaaaatctacgacgccacgacgaacacgacctccaacaacaaatacatacaacgcacgataatacgaaaacacaaacaacgactcgaacaccctacgcccgacttctaaaccaccacgaccaacgtcccccaaacgcaaaacaacacgaacgccaacaaacaacgacgcccgaaacccctaaaacgcttaaccataaccgacgacgcgaacgaacgctcgaacgcacgaaaccaccacgaccgactcccgactacgcccgcccgaccgcgacccacgtcccaactatacgcgaaaaacgaaaaacgccaactatacacatacgcgaaactcctcccgacccctctaaatccccgaaaacgaaacgaaacgaaaacccgaaaccccaacgtccgacctaaacgccctcatcccgataaaacgacccgcataaccaaaacgaacgctcgaaaacgcgaaaaaaaacattaacacccctaattctacgctcgaaactcgaaactcgaaaccctaaaacctacgcgaaacttctccacttctcttacccgtaatttctacctacgctcactacgaattttttaattaacgccttaatatttataac

SEQ ID NO: 8973 - DNA, 722 bp, Artificial Sequence
  chemically treated genomic DNA (Homo sapiens) CpG-island No: 8973
tgtgatttcgatttttaggagaacgtttcggtcgcgaagttatttcggttatttaggcggtaggttcgcgtcgttcggatcgtatttgtacgcgtacgtgttcggtcgagtttcgttttcggttttcgttcggttttgttcgcggtataaagcgtagtttaggtcggtttagacgtttagcgatttcgagtcgcgggtcgattttggcgtcgtttcgagtcggtcgtataaagcgtcgtattttcggtttggacgcgtagtcgttcgttgttcgtttttatttatcgcgtcggcggcgatttgggttttagtgattagcgtacgtcggttcgcggcgggtttggtcgtggggcgaaataaggggggcgtgtcgaggagatttgttacgataagaggttgatttttcgagtttcgcgttttcgtcgtttttcggacgtcgcgttttcgttcgttcggtttcgtttggttcggttcgttttttcgtagttcgcgtttttcgtcgacgttgcgtagttatcggagtcgtcgattttattttcgtttgagcgcgtcgcgacgggggcgcgtcgggtacgtgattgcgtagcgtgttcgttttcgtcggcgttttcgagacgttcggatggacgagcgcgacgagcgcggagtgggtcggttttagttggcgaaagggtcgggtgtagttgtagtttttttattaattgtttgtgaaaaaagtattt

SEQ ID NO: 8974 - DNA, 722 bp, Artificial Sequence
  chemically treated genomic DNA (Homo sapiens) CpG-island No: 8974
aaatacttttttcacaaacaattaataaaaaaactacaactacacccgaccctttcgccaactaaaaccgacccactccgcgctcgtcgcgctcgtccatccgaacgtctcgaaaacgccgacgaaaacgaacacgctacgcaatcacgtacccgacgcgcccccgtcgcgacgcgctcaaacgaaaataaaatcgacgactccgataactacgcaacgtcgacgaaaaacgcgaactacgaaaaaacgaaccgaaccaaacgaaaccgaacgaacgaaaacgcgacgtccgaaaaacgacgaaaacgcgaaactcgaaaaatcaacctcttatcgtaacaaatctcctcgacacgccccccttatttcgccccacgaccaaacccgccgcgaaccgacgtacgctaatcactaaaacccaaatcgccgccgacgcgataaataaaaacgaacaacgaacgactacgcgtccaaaccgaaaatacgacgctttatacgaccgactcgaaacgacgccaaaatcgacccgcgactcgaaatcgctaaacgtctaaaccgacctaaactacgctttataccgcgaacaaaaccgaacgaaaaccgaaaacgaaactcgaccgaacacgtacgcgtacaaatacgatccgaacgacgcgaacctaccgcctaaataaccgaaataacttcgcgaccgaaacgttctcctaaaaatcgaaatcaca

SEQ ID NO: 8975 - DNA, 722 bp, Artificial Sequence
  chemically treated genomic DNA (Homo sapiens) CpG-island No: 8975
aaatattttttttatagatagttaataaaaaaattatagttatattcggttttttcgttaattgggatcggtttatttcgcgttcgtcgcgttcgtttattcgggcgtttcgagggcgtcggcgggagcgagtacgttgcgtagttacgtgttcggcgcgttttcgtcgcggcgcgtttaggcggaagtgaggtcggcggtttcggtggttgcgtagcgtcggcggggagcgcgggttgcggagaggcgggtcgggttaagcggagtcgagcgagcgggagcgcggcgttcgggaggcggcggagacgcggggttcggagggttagttttttatcgtagtaggttttttcggtacgttttttttgtttcgttttacggttaagttcgtcgcgggtcggcgtgcgttggttattgaggtttaggtcgtcgtcggcgcggtgagtgggggcgggtagcgggcgattgcgcgtttaggtcggaagtgcggcgttttgtgcggtcggttcggggcggcgttaaggtcggttcgcggttcggggtcgttgggcgtttggatcggtttgggttgcgttttgtgtcgcgggtaaggtcgggcgggggtcgggggcggagttcggtcggatacgtacgcgtgtaggtgcggttcgggcggcgcgggtttgtcgtttaggtggtcgaggtggtttcgcggtcggggcgtttttttaaaggtcggggttata

SEQ ID NO: 8976 - DNA, 722 bp, Artificial Sequence
  chemically treated genomic DNA (Homo sapiens) CpG-island No: 8976
tataaccccgacctttaaaaaaacgccccgaccgcgaaaccacctcgaccacctaaacgacaaacccgcgccgcccgaaccgcacctacacgcgtacgtatccgaccgaactccgcccccgacccccgcccgaccttacccgcgacacaaaacgcaacccaaaccgatccaaacgcccaacgaccccgaaccgcgaaccgaccttaacgccgccccgaaccgaccgcacaaaacgccgcacttccgacctaaacgcgcaatcgcccgctacccgcccccactcaccgcgccgacgacgacctaaacctcaataaccaacgcacgccgacccgcgacgaacttaaccgtaaaacgaaacaaaaaaaacgtaccgaaaaaacctactacgataaaaaactaaccctccgaaccccgcgtctccgccgcctcccgaacgccgcgctcccgctcgctcgactccgcttaacccgacccgcctctccgcaacccgcgctccccgccgacgctacgcaaccaccgaaaccgccgacctcacttccgcctaaacgcgccgcgacgaaaacgcgccgaacacgtaactacgcaacgtactcgctcccgccgacgccctcgaaacgcccgaataaacgaacgcgacgaacgcgaaataaaccgatcccaattaacgaaaaaaccgaatataactataatttttttattaactatctataaaaaaaatattt

SEQ ID NO: 8977 - DNA, 593 bp, Artificial Sequence
  chemically treated genomic DNA (Homo sapiens) CpG-island No: 8977
cgttcgagtcgtcgcggtttttttgagtttttttagttcgtcgtcgtcgtcgttttcgttcgtatagtcggtttggttgttagggttgttagggtttggggtttgggaggcgtcgcgcgacggcgtcgcgtcgcgggaggagttttaggttcgcgagcgtaggcgtttcgttttttttcgggcgttgcgggttatcgttcggttttgtgcggcgggatttcggggtcgtacggagcgggaggtcgggcgttatggtatgggtttcgtagtttcggcgcgtttcgcgcgtcggggaaacgttttggcgttttgttgtttgtaatttgtttttcggcgtttagcgttggtggttttcgtcgtgttgggtttttggtttttattaacgtcgtattgatttttttgttggtttttcgttgagcgtcgcgtagggtcgcggtcggggtgagtggcgcggcgacggtattttagtcgttgttattcgcggttttcgtattggtcgcggagggaaggtttttttttattttatgtgtttattattagggtttggttcgggggtgtcgtcgagcgggtgtttgaggggcgtggtggtacgt

SEQ ID NO: 8978 - DNA, 593 bp, Artificial Sequence
  chemically treated genomic DNA (Homo sapiens) CpG-island No: 8978
acgtaccaccacgcccctcaaacacccgctcgacgacacccccgaaccaaaccctaataataaacacataaaataaaaaaaaaccttccctccgcgaccaatacgaaaaccgcgaataacaacgactaaaataccgtcgccgcgccactcaccccgaccgcgaccctacgcgacgctcaacgaaaaaccaacaaaaaaatcaatacgacgttaataaaaaccaaaaacccaacacgacgaaaaccaccaacgctaaacgccgaaaaacaaattacaaacaacaaaacgccaaaacgtttccccgacgcgcgaaacgcgccgaaactacgaaacccataccataacgcccgacctcccgctccgtacgaccccgaaatcccgccgcacaaaaccgaacgataacccgcaacgcccgaaaaaaaacgaaacgcctacgctcgcgaacctaaaactcctcccgcgacgcgacgccgtcgcgcgacgcctcccaaaccccaaaccctaacaaccctaacaaccaaaccgactatacgaacgaaaacgacgacgacgacgaactaaaaaaactcaaaaaaaccgcgacgactcgaacg

SEQ ID NO: 8979 - DNA, 593 bp, Artificial Sequence
  chemically treated genomic DNA (Homo sapiens) CpG-island No: 8979
acgtgttattacgttttttaggtattcgttcggcgatattttcggattaggttttggtagtgagtatatggggtggaaggaggtttttttttcgcgattagtgcggaggtcgcgggtggtaacggttggagtgtcgtcgtcgcgttatttatttcggtcgcggttttgcgcggcgtttagcggaaggttagtaggaagattagtacgacgttgatgagaattaggagtttagtacggcggagattattaacgttgggcgtcggggggtaggttgtaggtagtagggcgttagggcgttttttcggcgcgcggggcgcgtcggggttgcggggtttatgttatggcgttcggtttttcgtttcgtgcggtttcgagatttcgtcgtatagggtcgagcggtggttcgtagcgttcggggagaggcggggcgtttgcgttcgcgggtttggggtttttttcgcgacgcggcgtcgtcgcgcggcgttttttaggttttaagttttggtaattttggtaattaagtcggttgtgcgggcgggggcggcggcggcggcgggttggagaggtttagagggatcgcggcggttcgggcg

SEQ ID NO: 8980 - DNA, 593 bp, Artificial Sequence
  chemically treated genomic DNA (Homo sapiens) CpG-island No: 8980
cgcccgaaccgccgcgatccctctaaacctctccaacccgccgccgccgccgcccccgcccgcacaaccgacttaattaccaaaattaccaaaacttaaaacctaaaaaacgccgcgcgacgacgccgcgtcgcgaaaaaaaccccaaacccgcgaacgcaaacgccccgcctctccccgaacgctacgaaccaccgctcgaccctatacgacgaaatctcgaaaccgcacgaaacgaaaaaccgaacgccataacataaaccccgcaaccccgacgcgccccgcgcgccgaaaaaacgccctaacgccctactacctacaacctaccccccgacgcccaacgttaataatctccgccgtactaaactcctaattctcatcaacgtcgtactaatcttcctactaaccttccgctaaacgccgcgcaaaaccgcgaccgaaataaataacgcgacgacgacactccaaccgttaccacccgcgacctccgcactaatcgcgaaaaaaaaacctccttccaccccatatactcactaccaaaacctaatccgaaaatatcgccgaacgaatacctaaaaaacgtaataacacgt

SEQ ID NO: 8981 - DNA, 620 bp, Artificial Sequence
  chemically treated genomic DNA (Homo sapiens) CpG-island No: 8981
cggcggttgcgggcgtcggagtcgttatttttcggtttaggatttgcgtgggtggcgtggtggggggagttggtcggttagtttttagttttgcgtttcgtatattttgcgggttttcgaggttcggttttcgtcgttgcgcgtagggcgcggggcgttgtttcgagggatgcggggtattgatcggttacgtatggtttgtagttgagggtgaattaggacgagttcgcggatgacgacgtttttttggtcgggaatagcggagcggaggacggcggggcggaggcgtagagtagtaaggattagatgcggattaacgttattaacgagatttttagtattgagcgggattatattaagtatttgcgcgatatttgcgaggtgaggttcggtcggcgggcggtgattggggattcggtcgggggaggtttaattacgttcgcgtagggttacgttcggtagtgcgttaagcgcgtagatatgtttagcgaggagtagttgcgtattattttcgggaatatcgaggatatttatcgttgttagaaggttttcgtgaaggttttggagtagaggtttaatcgcgagcgtttatatttgagcgagttgggtgtttgtttttt

SEQ ID NO: 8982 - DNA, 620 bp, Artificial Sequence
  chemically treated genomic DNA (Homo sapiens) CpG-island No: 8982
aaaaaacaaacacccaactcgctcaaatataaacgctcgcgattaaacctctactccaaaaccttcacgaaaaccttctaacaacgataaatatcctcgatattcccgaaaataatacgcaactactcctcgctaaacatatctacgcgcttaacgcactaccgaacgtaaccctacgcgaacgtaattaaacctcccccgaccgaatccccaatcaccgcccgccgaccgaacctcacctcgcaaatatcgcgcaaatacttaatataatcccgctcaatactaaaaatctcgttaataacgttaatccgcatctaatccttactactctacgcctccgccccgccgtcctccgctccgctattcccgaccaaaaaaacgtcgtcatccgcgaactcgtcctaattcaccctcaactacaaaccatacgtaaccgatcaataccccgcatccctcgaaacaacgccccgcgccctacgcgcaacgacgaaaaccgaacctcgaaaacccgcaaaatatacgaaacgcaaaactaaaaactaaccgaccaactccccccaccacgccacccacgcaaatcctaaaccgaaaaataacgactccgacgcccgcaaccgccg

SEQ ID NO: 8983 - DNA, 620 bp, Artificial Sequence
  chemically treated genomic DNA (Homo sapiens) CpG-island No: 8983
aggaagtaggtatttagttcgtttaggtgtgggcgttcgcggttgaatttttgttttagggtttttacgaaggttttttggtagcggtagatgttttcgatgttttcgaagatggtacgtagttgtttttcgttgaatatgtttgcgcgtttggcgtattgtcggacgtagttttgcgcggacgtggttaggtttttttcgatcgggtttttagttatcgttcgtcggtcgggttttatttcgtagatgtcgcgtaggtgtttgatgtagtttcgtttagtgttgaggatttcgttgatgacgttggttcgtatttggtttttgttgttttgcgttttcgtttcgtcgtttttcgtttcgttgttttcggttagaggggcgtcgttattcgcgggttcgttttgatttatttttagttgtaggttatgcgtggtcggttagtgtttcgtatttttcggagtaacgtttcgcgttttgcgcgtagcggcgggaatcgggtttcggaggttcgtagggtgtacggggcgtagggttgaggattggtcggttagttttttttattacgttatttacgtaagttttggatcgaggaatgacgatttcgacgttcgtagtcgtcg

SEQ ID NO: 8984 - DNA, 620 bp, Artificial Sequence
  chemically treated genomic DNA (Homo sapiens) CpG-island No: 8984
cgacgactacgaacgtcgaaatcgtcattcctcgatccaaaacttacgtaaataacgtaataaaaaaaactaaccgaccaatcctcaaccctacgccccgtacaccctacgaacctccgaaacccgattcccgccgctacgcgcaaaacgcgaaacgttactccgaaaaatacgaaacactaaccgaccacgcataacctacaactaaaaataaatcaaaacgaacccgcgaataacgacgcccctctaaccgaaaacaacgaaacgaaaaacgacgaaacgaaaacgcaaaacaacaaaaaccaaatacgaaccaacgtcatcaacgaaatcctcaacactaaacgaaactacatcaaacacctacgcgacatctacgaaataaaacccgaccgacgaacgataactaaaaacccgatcgaaaaaaacctaaccacgtccgcgcaaaactacgtccgacaatacgccaaacgcgcaaacatattcaacgaaaaacaactacgtaccatcttcgaaaacatcgaaaacatctaccgctaccaaaaaaccttcgtaaaaaccctaaaacaaaaattcaaccgcgaacgcccacacctaaacgaactaaatacctacttcct

SEQ ID NO: 8985 - DNA, 767 bp, Artificial Sequence
  chemically treated genomic DNA (Homo sapiens) CpG-island No: 8985
cgcgatttggaaacgggtcgtgttcggtttagttcgtatttattcgttcggttatagtttagttatagtttagggattttgaggcgttcgcgtttttttgtcgcggtatttttagtttaagtaggtcggacgtcgaggtttcgcggtatcgagttttcgttcgtttcgttttttcgttttttatttcgtttcgttttcgtttttttatttttttttcgttttcgtttcgttttttcgataattttttcgcgttttcggttcggtacgcgcgttgcgttcggtcgtcgttgtcgtcgtcgtcgtcgtcgtcgttgtcgtcgagcgttttttcgttgcgtttggtttttagtttcgggtcggaatcggaagtttggggggcggagttcggcggaggttaggagatcgaaaacgcggtcgagttcggagttcggagttggagttagagtttggattagaatttggtcgtcgtttgtatcgtcgtcgtcgttgtcgttcgtcgtttttttttcgcgtcgtagtcgtttcgtcgttatcgtcgcgagttcggtcgttagtggttttcggattttaggtgtttgggttgaaggtcggttcggatatcggatttagttagtttttagattgttcgggcggtagcggacgtcgttgtcgtcgtcgttttttcgtcgttttagtttggcgttttgtttcgagagacgggagaggcgagcggagttgatagtgattttgatagtgatttaaattcgtttttgttgttgttggttttt

SEQ ID NO: 8986 - DNA, 767 bp, Artificial Sequence
  chemically treated genomic DNA (Homo sapiens) CpG-island No: 8986
aaaaaccaacaacaacaaaaacgaatttaaatcactatcaaaatcactatcaactccgctcgcctctcccgtctctcgaaacaaaacgccaaactaaaacgacgaaaaaacgacgacgacaacgacgtccgctaccgcccgaacaatctaaaaactaactaaatccgatatccgaaccgaccttcaacccaaacacctaaaatccgaaaaccactaacgaccgaactcgcgacgataacgacgaaacgactacgacgcgaaaaaaaaacgacgaacgacaacgacgacgacgatacaaacgacgaccaaattctaatccaaactctaactccaactccgaactccgaactcgaccgcgttttcgatctcctaacctccgccgaactccgccccccaaacttccgattccgacccgaaactaaaaaccaaacgcaacgaaaaaacgctcgacgacaacgacgacgacgacgacgacgacaacgacgaccgaacgcaacgcgcgtaccgaaccgaaaacgcgaaaaaattatcgaaaaaacgaaacgaaaacgaaaaaaaaataaaaaaacgaaaacgaaacgaaataaaaaacgaaaaaacgaaacgaacgaaaactcgataccgcgaaacctcgacgtccgacctacttaaactaaaaataccgcgacaaaaaaacgcgaacgcctcaaaatccctaaactataactaaactataaccgaacgaataaatacgaactaaaccgaacacgacccgtttccaaatcgcg

SEQ ID NO: 8987 - DNA, 767 bp, Artificial Sequence
  chemically treated genomic DNA (Homo sapiens) CpG-island No: 8987
aaaagttaataataataaaagcgggtttaaattattgttaaaattattgttagtttcgttcgtttttttcgtttttcggaataaaacgttaggttgaggcgacgaagaggcggcggcggtagcggcgttcgttgtcgttcggatagtttgggaattgattgggttcgatgttcggatcgatttttaatttagatatttaaagttcgaggattattggcggtcgagttcgcggcggtggcggcgaggcggttgcggcgcggggaaggggcggcgggcggtagcggcggcggcggtgtaggcggcggttaagttttggtttaggttttggttttagtttcgggtttcgggttcggtcgcgttttcggttttttggttttcgtcgggtttcgttttttaaattttcggtttcggttcgaagttggaagttaggcgtagcggaggaacgttcggcggtagcggcggcggcggcggcggcggtagcggcggtcgggcgtagcgcgcgtgtcgggtcgggagcgcgaggagattgtcggggaagcgaggcgggagcgggggaggggtgagagagcgagggcggggcggagtggagggcgaggaggcggggcggacggaggttcgatatcgcgaggtttcggcgttcggtttgtttgggttagagatatcgcgataaaggggcgcgggcgttttaaagtttttaagttgtggttgggttgtggtcgggcgagtagatgcgggttaggtcgggtacgattcgtttttaaatcgcg

SEQ ID NO: 8988 - DNA, 767 bp, Artificial Sequence
  chemically treated genomic DNA (Homo sapiens) CpG-island No: 8988
cgcgatttaaaaacgaatcgtacccgacctaacccgcatctactcgcccgaccacaacccaaccacaacttaaaaactttaaaacgcccgcgcccctttatcgcgatatctctaacccaaacaaaccgaacgccgaaacctcgcgatatcgaacctccgtccgccccgcctcctcgccctccactccgccccgccctcgctctctcacccctcccccgctcccgcctcgcttccccgacaatctcctcgcgctcccgacccgacacgcgcgctacgcccgaccgccgctaccgccgccgccgccgccgccgctaccgccgaacgttcctccgctacgcctaacttccaacttcgaaccgaaaccgaaaatttaaaaaacgaaacccgacgaaaaccaaaaaaccgaaaacgcgaccgaacccgaaacccgaaactaaaaccaaaacctaaaccaaaacttaaccgccgcctacaccgccgccgccgctaccgcccgccgccccttccccgcgccgcaaccgcctcgccgccaccgccgcgaactcgaccgccaataatcctcgaactttaaatatctaaattaaaaatcgatccgaacatcgaacccaatcaattcccaaactatccgaacgacaacgaacgccgctaccgccgccgcctcttcgtcgcctcaacctaacgttttattccgaaaaacgaaaaaaacgaacgaaactaacaataattttaacaataatttaaacccgcttttattattattaactttt

SEQ ID NO: 8989 - DNA, 718 bp, Artificial Sequence
  chemically treated genomic DNA (Homo sapiens) CpG-island No: 8989
acgggttttcgaaatgacgtattttcgcgcgtcgtaagttttgatgttaaggggttagtcgcgaggtaaaggaggggtttttgaagtgggcgtggcgtcgttggaggttatttaggcgcgggattcgttttcgaggcgggatatgaggtgcggggtggggtttttaatcgtgtagttcgtttttgacgtcgtcggtaattgcgatagtcggggtcggtgcggtttgttaagtggtcggtttttggagttgcggttttttgttagtttgattcgtagttttagttttcgtcgtttttttaggtttcggggtcgtttttgattcgtagtcgtcgcggggcgtagagttatgaggcgcgggtattcgtcgttttcggggcggtcgtttgtttcggagcgtttcgagttggcgcggtatgggcgcggtatgagcgtggagtcgtcgtcggagttggaggagaaggcggcgtcggagttcgaggcgggagtatgtcggagaagcgcgcgggcgtgttcgcgggggaggtatttgggtgagcggcgggtcgtggtttcgcggcgttggaatgtcggggtagcgtgggtggggtcgtatttaggttacgcgagttttcgtttcgggtaggggtttcggtttttggaaagtcggtttttttttgggggggaggcgaatttattacgaatataggttttttttagtgtacgtttatcgtagataaaa

SEQ ID NO: 8990 - DNA, 718 bp, Artificial Sequence
  chemically treated genomic DNA (Homo sapiens) CpG-island No: 8990
ttttatctacgataaacgtacactaaaaaaaacctatattcgtaataaattcgcctcccccccaaaaaaaaaccgactttccaaaaaccgaaacccctacccgaaacgaaaactcgcgtaacctaaatacgaccccacccacgctaccccgacattccaacgccgcgaaaccacgacccgccgctcacccaaatacctcccccgcgaacacgcccgcgcgcttctccgacatactcccgcctcgaactccgacgccgccttctcctccaactccgacgacgactccacgctcataccgcgcccataccgcgccaactcgaaacgctccgaaacaaacgaccgccccgaaaacgacgaatacccgcgcctcataactctacgccccgcgacgactacgaatcaaaaacgaccccgaaacctaaaaaaacgacgaaaactaaaactacgaatcaaactaacaaaaaaccgcaactccaaaaaccgaccacttaacaaaccgcaccgaccccgactatcgcaattaccgacgacgtcaaaaacgaactacacgattaaaaaccccaccccgcacctcatatcccgcctcgaaaacgaatcccgcgcctaaataacctccaacgacgccacgcccacttcaaaaacccctcctttacctcgcgactaaccccttaacatcaaaacttacgacgcgcgaaaatacgtcatttcgaaaacccgt

SEQ ID NO: 8991 - DNA, 718 bp, Artificial Sequence
  chemically treated genomic DNA (Homo sapiens) CpG-island No: 8991
ttttgtttgcgatgagcgtatattaggaaaaatttgtattcgtgatgaattcgttttttttttagaaaaggatcgattttttaagagtcgaagtttttgttcggagcgggggttcgcgtggtttgggtgcgattttatttacgttatttcggtattttagcgtcgcgggattacggttcgtcgtttatttaggtgtttttttcgcggatacgttcgcgcgttttttcggtatgttttcgtttcgggtttcgacgtcgtttttttttttagtttcggcggcggttttacgtttatgtcgcgtttatgtcgcgttagttcggggcgtttcgggatagacggtcgtttcggaggcggcgggtgttcgcgttttatggttttgcgtttcgcggcggttgcgggttaagggcggtttcgaggtttgaggaggcggcggaggttgaagttgcggattaggttagtagaagatcgtagttttaggaatcgattatttagtaaatcgtatcgatttcgattgtcgtagttatcggcggcgttaggggcgggttgtacggttggaggttttatttcgtattttatgtttcgtttcgagaacgagtttcgcgtttgagtagtttttagcgacgttacgtttattttagagattttttttttatttcgcgattggttttttggtattaggatttgcggcgcgcggaagtacgttatttcgagagttcgt

SEQ ID NO: 8992 - DNA, 718 bp, Artificial Sequence
  chemically treated genomic DNA (Homo sapiens) CpG-island No: 8992
acgaactctcgaaataacgtacttccgcgcgccgcaaatcctaataccaaaaaaccaatcgcgaaataaaaaaaaaatctctaaaataaacgtaacgtcgctaaaaactactcaaacgcgaaactcgttctcgaaacgaaacataaaatacgaaataaaacctccaaccgtacaacccgcccctaacgccgccgataactacgacaatcgaaatcgatacgatttactaaataatcgattcctaaaactacgatcttctactaacctaatccgcaacttcaacctccgccgcctcctcaaacctcgaaaccgcccttaacccgcaaccgccgcgaaacgcaaaaccataaaacgcgaacacccgccgcctccgaaacgaccgtctatcccgaaacgccccgaactaacgcgacataaacgcgacataaacgtaaaaccgccgccgaaactaaaaaaaaaaacgacgtcgaaacccgaaacgaaaacataccgaaaaaacgcgcgaacgtatccgcgaaaaaaacacctaaataaacgacgaaccgtaatcccgcgacgctaaaataccgaaataacgtaaataaaatcgcacccaaaccacgcgaacccccgctccgaacaaaaacttcgactcttaaaaaatcgatccttttctaaaaaaaaaacgaattcatcacgaatacaaatttttcctaatatacgctcatcgcaaacaaaa

SEQ ID NO: 8993 - DNA, 623 bp, Artificial Sequence
  chemically treated genomic DNA (Homo sapiens) CpG-island No: 8993
gagtgcggttgtaggcgtttcggtgttattgattttaaaagggagcgagaggggaggggatagaagaggggttgcgtggagaaagagttagaagtttttaaatgggcgtcgtcggatatttcgtttgtttcgagttcggttttcgggggttttcggtcggtaggtaattcgggtttttttgttattttaaagtagtcggcgatgtgtagaatcgtcgtatttttagttattttgtgtgtgtgttttcggcgtggatttggatgagtattcgggttgttaaggtgcggagttgtagcgttagggttttcgacgcgatttttaggtcggttttcgaatcgtagacggggcggaggagttcgcggtagtttgtgtagttttcggggagtttacggcggcgatttagttttaacgcgttagaagttaaataaaaagagaaaggaaataagtacgggtttatcggttggcgacgtacggtagttagaattcgcgttgtattttttttttttggtggaaagggtggggggcgtgtaaggggggggtgcgggagagggtagttatttacgttttaattgtagatggcgtttgaggtttttttaagatcgcgagttttttaaaaattaaat

SEQ ID NO: 8994 - DNA, 623 bp, Artificial Sequence
  chemically treated genomic DNA (Homo sapiens) CpG-island No: 8994
atttaatttttaaaaaactcgcgatcttaaaaaaacctcaaacgccatctacaattaaaacgtaaataactaccctctcccgcaccccccccttacacgccccccaccctttccaccaaaaaaaaaaaatacaacgcgaattctaactaccgtacgtcgccaaccgataaacccgtacttatttcctttctctttttatttaacttctaacgcgttaaaactaaatcgccgccgtaaactccccgaaaactacacaaactaccgcgaactcctccgccccgtctacgattcgaaaaccgacctaaaaatcgcgtcgaaaaccctaacgctacaactccgcaccttaacaacccgaatactcatccaaatccacgccgaaaacacacacacaaaataactaaaaatacgacgattctacacatcgccgactactttaaaataacaaaaaaacccgaattacctaccgaccgaaaacccccgaaaaccgaactcgaaacaaacgaaatatccgacgacgcccatttaaaaacttctaactctttctccacgcaacccctcttctatcccctcccctctcgctcccttttaaaatcaataacaccgaaacgcctacaaccgcactc

SEQ ID NO: 8995 - DNA, 623 bp, Artificial Sequence
  chemically treated genomic DNA (Homo sapiens) CpG-island No: 8995
gtttaatttttggagagttcgcgattttggaaaagttttagacgttatttatagttaaaacgtaggtaattgttttttttcgtattttttttttatacgttttttattttttttattaaaaaaagggggtgtagcgcggattttggttgtcgtgcgtcgttagtcggtagattcgtgtttgttttttttttttttttgtttggtttttaacgcgttgggattgagtcgtcgtcgtgagtttttcgaagattgtataaattatcgcgggttttttcgtttcgtttgcgattcggaagtcggtttgggggtcgcgtcgggagttttggcgttgtagtttcgtattttagtagttcgggtatttatttagatttacgtcggggatatatatatagagtaattaaaagtgcggcgattttgtatatcgtcgattgttttggggtaataaaaagattcgagttgtttgtcgatcgaggattttcgggagtcgggttcggagtagacgaggtattcggcggcgtttatttgggggtttttaattttttttttacgtagttttttttttgtttttttttttttcgtttttttttaaaattagtggtatcgaggcgtttgtagtcgtattt

SEQ ID NO: 8996 - DNA, 623 bp, Artificial Sequence
  chemically treated genomic DNA (Homo sapiens) CpG-island No: 8996
aaatacgactacaaacgcctcgataccactaattttaaaaaaaaacgaaaaaaaaaaaaacaaaaaaaaaactacgtaaaaaaaaaattaaaaacccccaaataaacgccgccgaatacctcgtctactccgaacccgactcccgaaaatcctcgatcgacaaacaactcgaatctttttattaccccaaaacaatcgacgatatacaaaatcgccgcacttttaattactctatatatatatccccgacgtaaatctaaataaatacccgaactactaaaatacgaaactacaacgccaaaactcccgacgcgacccccaaaccgacttccgaatcgcaaacgaaacgaaaaaacccgcgataatttatacaatcttcgaaaaactcacgacgacgactcaatcccaacgcgttaaaaaccaaacaaaaaaaaaaaaaaaacaaacacgaatctaccgactaacgacgcacgacaaccaaaatccgcgctacaccccctttttttaataaaaaaaataaaaaacgtataaaaaaaaaatacgaaaaaaaacaattacctacgttttaactataaataacgtctaaaacttttccaaaatcgcgaactctccaaaaattaaac

SEQ ID NO: 8997 - DNA, 638 bp, Artificial Sequence
  chemically treated genomic DNA (Homo sapiens) CpG-island No: 8997
cggtgttcgaggttaattttcgcgtttagtacgttcgtatttttcggcgaggcggtattaatagttatttacgtggtcggggatttcggagcgagcggggtcgtgagtgcgcgtgtgcgcgcgcgcgtttcgttcgcgttcggtttttttatttaatgttatcgatatatttttacggagttttcgtttttttttcgtcgttttcgcgattggtttagtttagagtcggtttcgtttcgttttcgttcgggttttttttattgcgtcgggcgtttattaattagtttcgtcgttgttagttttcgggcggtttttcgcgtcgttgttattgtagtttcgtgtcgggggcgttagtatcggtttcgtagttttttcgttcggtcggggaggtaaataaagtgaaatattttttcgcggttcggggtttcgggcgtagtattttgggtgtcggttgcgagtcggttgcgagtttagttgcgggcggttgggtcggggttattagtagcgattttcgagtcgttttttatacgttgttttcgtagcgttcgttttagtttttcgtagttcgtttatgtttttggcgtttttttttagaaagttaggtacgttttgagtattgggtttttaggtttagatgt

SEQ ID NO: 8998 - DNA, 638 bp, Artificial Sequence
  chemically treated genomic DNA (Homo sapiens) CpG-island No: 8998
acatctaaacctaaaaacccaatactcaaaacgtacctaactttctaaaaaaaaacgccaaaaacataaacgaactacgaaaaactaaaacgaacgctacgaaaacaacgtataaaaaacgactcgaaaatcgctactaataaccccgacccaaccgcccgcaactaaactcgcaaccgactcgcaaccgacacccaaaatactacgcccgaaaccccgaaccgcgaaaaaatatttcactttatttacctccccgaccgaacgaaaaaactacgaaaccgatactaacgcccccgacacgaaactacaataacaacgacgcgaaaaaccgcccgaaaactaacaacgacgaaactaattaataaacgcccgacgcaataaaaaaaacccgaacgaaaacgaaacgaaaccgactctaaactaaaccaatcgcgaaaacgacgaaaaaaaaacgaaaactccgtaaaaatatatcgataacattaaataaaaaaaccgaacgcgaacgaaacgcgcgcgcgcacacgcgcactcacgaccccgctcgctccgaaatccccgaccacgtaaataactattaataccgcctcgccgaaaaatacgaacgtactaaacgcgaaaattaacctcgaacaccg

SEQ ID NO: 8999 - DNA, 638 bp, Artificial Sequence
  chemically treated genomic DNA (Homo sapiens) CpG-island No: 8999
atatttgagtttgggggtttaatgtttagagcgtgtttggttttttggggaaaagcgttaggaatatgaacgagttacgaagagttggagcgggcgttgcgggagtagcgtgtggggaacggttcgggagtcgttgttggtaatttcggtttagtcgttcgtagttgggttcgtagtcggttcgtagtcgatatttagggtgttgcgttcggggtttcgggtcgcggaaggatattttattttgtttattttttcggtcgggcgagggagttgcgaggtcggtgttggcgttttcggtacggagttgtaatggtagcggcgcggggagtcgttcgaggattggtagcggcggggttgattgatgggcgttcggcgtaatgaggggggttcgggcgggggcggggcggggtcggttttgggttgagttagtcgcgggggcggcggggggggggcggaggtttcgtggaaatgtgtcggtgatattgaatggggagatcgagcgcgagcgaggcgcgcgcgcgtatacgcgtatttacggtttcgttcgtttcgagattttcggttacgtaagtaattattaatatcgtttcgtcgggggatgcgggcgtgttgagcgcggggattggtttcgggtatcg

SEQ ID NO: 9000 - DNA, 638 bp, Artificial Sequence
  chemically treated genomic DNA (Homo sapiens) CpG-island No: 9000
cgatacccgaaaccaatccccgcgctcaacacgcccgcatcccccgacgaaacgatattaataattacttacgtaaccgaaaatctcgaaacgaacgaaaccgtaaatacgcgtatacgcgcgcgcgcctcgctcgcgctcgatctccccattcaatatcaccgacacatttccacgaaacctccgccccccccccgccgcccccgcgactaactcaacccaaaaccgaccccgccccgcccccgcccgaacccccctcattacgccgaacgcccatcaatcaaccccgccgctaccaatcctcgaacgactccccgcgccgctaccattacaactccgtaccgaaaacgccaacaccgacctcgcaactccctcgcccgaccgaaaaaataaacaaaataaaatatccttccgcgacccgaaaccccgaacgcaacaccctaaatatcgactacgaaccgactacgaacccaactacgaacgactaaaccgaaattaccaacaacgactcccgaaccgttccccacacgctactcccgcaacgcccgctccaactcttcgtaactcgttcatattcctaacgcttttccccaaaaaaccaaacacgctctaaacattaaacccccaaactcaaatat

SEQ ID NO: 9001 - DNA, 1026 bp, Artificial Sequence
  chemically treated genomic DNA (Homo sapiens) CpG-island No: 9001
taaggaggagtgtggggaggcggagttggggaagagttgtgaggggttggttgggggttcgggtcgcggcggggtcgggcgggtaggggcggtttagttgtgcgagtagaagttatagtagtcgttaatgtttttggcgtagtttttttcgtagtttcgttgggttagtatttcgtttttgagcggggacgaattttcggatacgggcgtgtcggtcggcgagattcgttttcgtttggtttgttcgtaaattttcgagtcgttggagtcgatggatttgatcgaggagggcgtttcgatttagttggaatcggataggtttttgggtttggcgttttcggcggcgcgggcggtagcggcgagcgttcggcggttaggttttcggttttttcgtttaggtagggattggcgtcggttatgcgcgcggcggtcgcggcgttgttgggttagtagggagtatcgagttcgatttggtgtcgtagtattgcgggggattgcgggcgttttagttcgacgggtcggcgtagtagtcgagcgggcggttagtgtagtttgtagtttgtagcgtagcgtttttacgttcgtcgtcgcgtaagagagtagcgtggtcgcgttgttcgcgaagttcgtggtcgtgttataggtcgaggtcgcgaagtttagtcggttgttggtcggcgttataaattagcgttgcggcgaggcgcgttcgggttttcggtttgttgcggcgatagtagttcgttggtgtgcggtacgttgcggttcgtattcggttcgggttcgcgtcgcgttcgggtggaagcgggttttggcgtagttgtttacgaattggttttgtaggaaagagtcggttatggcgtagcgggtttcgggtacgatttgcgagcgcggcgagtcgttgggcgagggggttaggcggtttatgttatagtcggtgtagattttgcggggtagggagagagagagagagagtcgaggggtggcgcggaggttttttggggtgggggtgggggtagaagggaa

SEQ ID NO: 9002 - DNA, 1026 bp, Artificial Sequence
  chemically treated genomic DNA (Homo sapiens) CpG-island No: 9002
ttcccttctacccccacccccaccccaaaaaacctccgcgccacccctcgactctctctctctctctccctaccccgcaaaatctacaccgactataacataaaccgcctaaccccctcgcccaacgactcgccgcgctcgcaaatcgtacccgaaacccgctacgccataaccgactctttcctacaaaaccaattcgtaaacaactacgccaaaacccgcttccacccgaacgcgacgcgaacccgaaccgaatacgaaccgcaacgtaccgcacaccaacgaactactatcgccgcaacaaaccgaaaacccgaacgcgcctcgccgcaacgctaatttataacgccgaccaacaaccgactaaacttcgcgacctcgacctataacacgaccacgaacttcgcgaacaacgcgaccacgctactctcttacgcgacgacgaacgtaaaaacgctacgctacaaactacaaactacactaaccgcccgctcgactactacgccgacccgtcgaactaaaacgcccgcaatcccccgcaatactacgacaccaaatcgaactcgatactccctactaacccaacaacgccgcgaccgccgcgcgcataaccgacgccaatccctacctaaacgaaaaaaccgaaaacctaaccgccgaacgctcgccgctaccgcccgcgccgccgaaaacgccaaacccaaaaacctatccgattccaactaaatcgaaacgccctcctcgatcaaatccatcgactccaacgactcgaaaatttacgaacaaaccaaacgaaaacgaatctcgccgaccgacacgcccgtatccgaaaattcgtccccgctcaaaaacgaaatactaacccaacgaaactacgaaaaaaactacgccaaaaacattaacgactactataacttctactcgcacaactaaaccgcccctacccgcccgaccccgccgcgacccgaacccccaaccaacccctcacaactcttccccaactccgcctccccacactcctcctta

SEQ ID NO: 9003 - DNA, 1026 bp, Artificial Sequence
  chemically treated genomic DNA (Homo sapiens) CpG-island No: 9003
tttttttttgtttttatttttattttaagggattttcgcgttatttttcggttttttttttttttttttttatttcgtaggatttatatcggttgtgatatggatcgtttgattttttcgtttaacgattcgtcgcgttcgtagatcgtgttcggggttcgttacgttatggtcggtttttttttgtaggattagttcgtgagtaattacgttaaggttcgtttttattcgggcgcggcgcgggttcgggtcgggtacggatcgtagcgtgtcgtatattaacgggttgttgtcgtcgtagtaggtcgaggattcgggcgcgtttcgtcgtaacgttggtttgtgacgtcggttaataatcggttggatttcgcggtttcggtttatgatacggttacggatttcgcgggtaacgcggttacgttgtttttttacgcggcggcgggcgtgaaggcgttgcgttgtaggttgtaggttgtattggtcgttcgttcggttattacgtcgattcgtcgggttggggcgttcgtagtttttcgtagtattgcggtattaagtcgggttcggtgttttttgttggtttaatagcgtcgcggtcgtcgcgcgtatggtcggcgttaatttttatttgggcgaggaggtcgagggtttggtcgtcgagcgttcgtcgttgtcgttcgcgtcgtcgaggacgttaagtttaaggatttgttcgattttagttggatcgagacgtttttttcgattaagtttatcgattttagcgattcggggatttacgagtaggttaagcggaggcggatttcgtcggtcgatacgttcgtgttcgagagttcgttttcgtttaagagcgaggtgttggtttagcgggattgcgagaagaattgcgttaaggatattagcggttattatggtttttattcgtatagttaggtcgtttttgttcgttcggtttcgtcgcggttcggatttttagttagttttttatagtttttttttagtttcgtttttttatatttttttttg

SEQ ID NO: 9004 - DNA, 1026 bp, Artificial Sequence
  chemically treated genomic DNA (Homo sapiens) CpG-island No: 9004
caaaaaaaaatataaaaaaacgaaactaaaaaaaaactataaaaaactaactaaaaatccgaaccgcgacgaaaccgaacgaacaaaaacgacctaactatacgaataaaaaccataataaccgctaatatccttaacgcaattcttctcgcaatcccgctaaaccaacacctcgctcttaaacgaaaacgaactctcgaacacgaacgtatcgaccgacgaaatccgcctccgcttaacctactcgtaaatccccgaatcgctaaaatcgataaacttaatcgaaaaaaacgtctcgatccaactaaaatcgaacaaatccttaaacttaacgtcctcgacgacgcgaacgacaacgacgaacgctcgacgaccaaaccctcgacctcctcgcccaaataaaaattaacgccgaccatacgcgcgacgaccgcgacgctattaaaccaacaaaaaacaccgaacccgacttaataccgcaatactacgaaaaactacgaacgccccaacccgacgaatcgacgtaataaccgaacgaacgaccaatacaacctacaacctacaacgcaacgccttcacgcccgccgccgcgtaaaaaaacaacgtaaccgcgttacccgcgaaatccgtaaccgtatcataaaccgaaaccgcgaaatccaaccgattattaaccgacgtcacaaaccaacgttacgacgaaacgcgcccgaatcctcgacctactacgacgacaacaacccgttaatatacgacacgctacgatccgtacccgacccgaacccgcgccgcgcccgaataaaaacgaaccttaacgtaattactcacgaactaatcctacaaaaaaaaaccgaccataacgtaacgaaccccgaacacgatctacgaacgcgacgaatcgttaaacgaaaaaatcaaacgatccatatcacaaccgatataaatcctacgaaataaaaaaaaaaaaaaaaaaaaccgaaaaataacgcgaaaatcccttaaaataaaaataaaaacaaaaaaaaa

SEQ ID NO: 9005 - DNA, 742 bp, Artificial Sequence
  chemically treated genomic DNA (Homo sapiens) CpG-island No: 9005
tatcgttacggcgtatatttgggcggtttcggggttttttattcgtcgttttttttttttttttaaatttttttttaatttttcgatttgttttattcggtgttttttttcgttttttttatgaattatttagtagcgtgacgtttaattagcgcgttcggggtttattcgcggagttttcgcgttgggagagttgttttcgtttttcgcgcgtttttttttttcgggttcggcgtcgttcgtttagttttagcgtagtttagtttttgttcggttcggttcgttcggtttcgcgtcgtagtttttttttttttcgtttcgttttcgttcgggtttttattattttcgttcgcgaggagagtattcggttcggcggcgcgagtagagttattttagggagggggggagatcgcgagcggtcggtttagttttcgttattcggggcggatttcgaggttcggagggattttaattttagttacgttttgttgcgcgttcgttcggcgttattgttagtacgtttcgggttcgtcgttcgcgcgcggtatagacgcggggttatatttggcgtcgtcgttcgtgtttcgtacgttcgtatgggttcgcgttgagggtttcgacgaggagtttcgcgcggagtatcggcgtttattcgtttagggagagttagatttgggggggcgagggttttttaaatttagttcggattttattcgagtgaggcggcgttatggagtttcgg

SEQ ID NO: 9006 - DNA, 742 bp, Artificial Sequence
  chemically treated genomic DNA (Homo sapiens) CpG-island No: 9006
ccgaaactccataacgccgcctcactcgaataaaatccgaactaaatttaaaaaaccctcgcccccccaaatctaactctccctaaacgaataaacgccgatactccgcgcgaaactcctcgtcgaaaccctcaacgcgaacccatacgaacgtacgaaacacgaacgacgacgccaaatataaccccgcgtctataccgcgcgcgaacgacgaacccgaaacgtactaacaataacgccgaacgaacgcgcaacaaaacgtaactaaaattaaaatccctccgaacctcgaaatccgccccgaataacgaaaactaaaccgaccgctcgcgatctccccccctccctaaaataactctactcgcgccgccgaaccgaatactctcctcgcgaacgaaaataataaaaacccgaacgaaaacgaaacgaaaaaaaaaaaaactacgacgcgaaaccgaacgaaccgaaccgaacaaaaactaaactacgctaaaactaaacgaacgacgccgaacccgaaaaaaaaaaacgcgcgaaaaacgaaaacaactctcccaacgcgaaaactccgcgaataaaccccgaacgcgctaattaaacgtcacgctactaaataattcataaaaaaaacgaaaaaaaacaccgaataaaacaaatcgaaaaattaaaaaaaaatttaaaaaaaaaaaaaaaacgacgaataaaaaaccccgaaaccgcccaaatatacgccgtaacgata

SEQ ID NO: 9007 - DNA, 742 bp, Artificial Sequence
  chemically treated genomic DNA (Homo sapiens) CpG-island No: 9007
tcggagttttatggcgtcgttttattcgggtaggattcgaattgagtttggggggttttcgtttttttaggtttgattttttttgggcgggtggacgtcgatatttcgcgcgggatttttcgtcggggtttttagcgcgggtttatgcgagcgtgcggggtacgggcggcggcgttaagtgtggtttcgcgtttgtgtcgcgcgcgggcggcgggttcggagcgtgttggtagtggcgtcgggcgggcgcgtagtaagacgtggttggagttggggttttttcgggtttcggggttcgtttcgggtggcgggggttgagtcggtcgttcgcggtttttttttttttttggagtggttttgttcgcgtcgtcgggtcgagtgtttttttcgcgggcggggatggtgggagttcgagcggggacggagcgggagggagggagattgcggcgcggagtcgggcgggtcgggtcgggtaggggttgagttgcgttggaattgggcgggcggcgtcgggttcgggagggaggggcgcgcggggggcgggggtagtttttttaacgcgggggtttcgcgagtgagtttcgggcgcgttgattggacgttacgttattgaataatttatgagggaagcggagaggggtatcgagtggagtaggtcgggaagttgagagaaagtttggagaagggggaggggcggcgggtgaggaatttcgggatcgtttagatgtgcgtcgtggcggtg

SEQ ID NO: 9008 - DNA, 742 bp, Artificial Sequence
  chemically treated genomic DNA (Homo sapiens) CpG-island No: 9008
caccgccacgacgcacatctaaacgatcccgaaattcctcacccgccgcccctcccccttctccaaactttctctcaacttcccgacctactccactcgatacccctctccgcttccctcataaattattcaataacgtaacgtccaatcaacgcgcccgaaactcactcgcgaaacccccgcgttaaaaaaactacccccgccccccgcgcgcccctccctcccgaacccgacgccgcccgcccaattccaacgcaactcaacccctacccgacccgacccgcccgactccgcgccgcaatctccctccctcccgctccgtccccgctcgaactcccaccatccccgcccgcgaaaaaaacactcgacccgacgacgcgaacaaaaccactccaaaaaaaaaaaaaaaccgcgaacgaccgactcaacccccgccacccgaaacgaaccccgaaacccgaaaaaaccccaactccaaccacgtcttactacgcgcccgcccgacgccactaccaacacgctccgaacccgccgcccgcgcgcgacacaaacgcgaaaccacacttaacgccgccgcccgtaccccgcacgctcgcataaacccgcgctaaaaaccccgacgaaaaatcccgcgcgaaatatcgacgtccacccgcccaaaaaaaatcaaacctaaaaaaacgaaaaccccccaaactcaattcgaatcctacccgaataaaacgacgccataaaactccga

SEQ ID NO: 9009 - DNA, 730 bp, Artificial Sequence
  chemically treated genomic DNA (Homo sapiens) CpG-island No: 9009
tttttatacgttatattaattatatatatttatatatattacgtattcgtattatatagtaataatagtttattttatttatatataacgataattgttcgaatcgggtatttattttttttattaatataaataatataggaacgtttattatcgagagttatatatattatatatacgtttttaatcgttatttatttatagtataacgtacgataaattattttattattattatataattattagttcgtattatttaagtttttatttgtttatcggtttcggttcgtagtatagttatcggtaggatcgatttcgtacgatcggggacgcgtcgagttcgcgagttagagaagcgtcggagttagcggcgggcgttagcgaggatttttttcgtttttttttcgaggtcgtcgtagttcggtgcgttttttcgttttttcgttagtttcggtttattatcgtcgtcgggatttttttttagagtaggttacgtatcggggaggtttcgggaggtcggcgttcggtatttaggcgatcgttcgtttttttcgtatttggcgtttttttttgaagggtagtcgttttttcgggtcggcgcgttgttttttattttcgcgtttttaacggtcgttttcgggtttttgttaagttttgttttgggtcgtttggggttttcgattttagcgttttagggtggtcgggtttcgcgtttttcggagttttt

SEQ ID NO: 9010 - DNA, 730 bp, Artificial Sequence
  chemically treated genomic DNA (Homo sapiens) CpG-island No: 9010
aaaaactccgaaaaacgcgaaacccgaccaccctaaaacgctaaaatcgaaaaccccaaacgacccaaaacaaaacttaacaaaaacccgaaaacgaccgttaaaaacgcgaaaataaaaaacaacgcgccgacccgaaaaaacgactacccttcaaaaaaaaacgccaaatacgaaaaaaacgaacgatcgcctaaataccgaacgccgacctcccgaaacctccccgatacgtaacctactctaaaaaaaaatcccgacgacgataataaaccgaaactaacgaaaaaacgaaaaaacgcaccgaactacgacgacctcgaaaaaaaaacgaaaaaaatcctcgctaacgcccgccgctaactccgacgcttctctaactcgcgaactcgacgcgtccccgatcgtacgaaatcgatcctaccgataactatactacgaaccgaaaccgataaacaaataaaaacttaaataatacgaactaataattatataataataataaaataatttatcgtacgttatactataaataaataacgattaaaaacgtatatataatatatataactctcgataataaacgttcctatattatttatattaataaaaaaaataaatacccgattcgaacaattatcgttatatataaataaaataaactattattactatataatacgaatacgtaatatatataaatatatataattaatataacgtataaaaa

SEQ ID NO: 9011 - DNA, 730 bp, Artificial Sequence
  chemically treated genomic DNA (Homo sapiens) CpG-island No: 9011
gagaatttcgggaagcgcggggttcggttattttaggacgttagggtcgggggttttaggcggtttagggtagggtttggtaggggttcgggggcgatcgttaggagcgcgggggtggaaggtagcgcgtcggttcgggaggacggttgttttttagggaggggcgttaggtgcgaggggggcgagcggtcgtttgaatgtcgggcgtcggtttttcggggttttttcgatgcgtggtttgttttgggggagggtttcggcggcggtgatgggtcggagttggcgggagagcgggaggacgtatcgggttgcggcggtttcggggaggagacgggggaggttttcgttggcgttcgtcgttggtttcggcgtttttttagttcgcgggttcggcgcgttttcggtcgtacggggtcggttttgtcggtggttgtgttgcgggtcggggtcgatgggtaggtgggggtttaggtggtgcgggttagtggttgtgtggtggtggtgaggtggtttgtcgtgcgttgtgttgtgagtggatggcggttgagagcgtgtgtatggtgtgtgtggttttcggtggtgggcgtttttgtgttgtttgtgttggtaggaagagtgggtgttcggttcgagtagttgtcgttgtgtgtgggtggggtgggttgttgttgttatgtggtgcgggtgcgtggtgtgtgtaggtgtgtgtgattggtgtgacgtgtgagga

SEQ ID NO: 9012 - DNA, 730 bp, Artificial Sequence
  chemically treated genomic DNA (Homo sapiens) CpG-island No: 9012
tcctcacacgtcacaccaatcacacacacctacacacaccacgcacccgcaccacataacaacaacaacccaccccacccacacacaacgacaactactcgaaccgaacacccactcttcctaccaacacaaacaacacaaaaacgcccaccaccgaaaaccacacacaccatacacacgctctcaaccgccatccactcacaacacaacgcacgacaaaccacctcaccaccaccacacaaccactaacccgcaccacctaaacccccacctacccatcgaccccgacccgcaacacaaccaccgacaaaaccgaccccgtacgaccgaaaacgcgccgaacccgcgaactaaaaaaacgccgaaaccaacgacgaacgccaacgaaaacctcccccgtctcctccccgaaaccgccgcaacccgatacgtcctcccgctctcccgccaactccgacccatcaccgccgccgaaaccctcccccaaaacaaaccacgcatcgaaaaaaccccgaaaaaccgacgcccgacattcaaacgaccgctcgcccccctcgcacctaacgcccctccctaaaaaacaaccgtcctcccgaaccgacgcgctaccttccacccccgcgctcctaacgatcgcccccgaacccctaccaaaccctaccctaaaccgcctaaaacccccgaccctaacgtcctaaaataaccgaaccccgcgcttcccgaaattctc

SEQ ID NO: 9013 - DNA, 606 bp, Artificial Sequence
  chemically treated genomic DNA (Homo sapiens) CpG-island No: 9013
gagatcgtttttaatcggttatttggatcgtagttttgttttttaatacgtgaattttgcggtcgttttttcgtttgttttaacgtagtttaggggtatcgcgttttttttcgttttcgtcggtttatttggcgggtgggtagggtagggtggcgggaagcggcggtcgggtaggcgttggacgtgggttaggcgttaggtgtaggtggcggcggttgcgatttcggttgtgtcgttatagttgcggtttagtagagtttttttttcgtcgtcgttttttgtttttcgttgggtttttcgcgttgtttggagaggtagaatcgaggttcggtttttatttggagttttttaggtgagttttagtttgcgacgtcggtagggcgaggttttatttttcggttgcgcgttagtttttcgtttcgttttagttttatttgagcgttttaggtgagaattttggatcgcgcgcgtagggtgggggcgtcgttcggttaagtttgcgtgatgcgcggtttttttttgagtggtcggcgaggttgtttttcgcgtaagttgtgttttcggtttatttatattggaggaattttgtattgatttggtggtagt

SEQ ID NO: 9014 - DNA, 606 bp, Artificial Sequence
  chemically treated genomic DNA (Homo sapiens) CpG-island No: 9014
actaccaccaaatcaatacaaaattcctccaatataaataaaccgaaaacacaacttacgcgaaaaacaacctcgccgaccactcaaaaaaaaaccgcgcatcacgcaaacttaaccgaacgacgcccccaccctacgcgcgcgatccaaaattctcacctaaaacgctcaaataaaactaaaacgaaacgaaaaactaacgcgcaaccgaaaaataaaacctcgccctaccgacgtcgcaaactaaaactcacctaaaaaactccaaataaaaaccgaacctcgattctacctctccaaacaacgcgaaaaacccaacgaaaaacaaaaaacgacgacgaaaaaaaaactctactaaaccgcaactataacgacacaaccgaaatcgcaaccgccgccacctacacctaacgcctaacccacgtccaacgcctacccgaccgccgcttcccgccaccctaccctacccacccgccaaataaaccgacgaaaacgaaaaaaaacgcgatacccctaaactacgttaaaacaaacgaaaaaacgaccgcaaaattcacgtattaaaaaacaaaactacgatccaaataaccgattaaaaacgatctc

SEQ ID NO: 9015 - DNA, 606 bp, Artificial Sequence
  chemically treated genomic DNA (Homo sapiens) CpG-island No: 9015
attgttattaggttagtgtaggatttttttaatgtagatgggtcgggagtataatttgcgcggagagtagtttcgtcgattatttagagagaagtcgcgtattacgtaggtttggtcggacggcgtttttattttgcgcgcgcgatttaaggtttttatttggagcgtttaggtagggttggggcggggcgggaggttggcgcgtagtcggaaagtggggtttcgttttgtcgacgtcgtaggttggagtttatttgggagattttaagtggaagtcgagtttcggttttgtttttttaggtaacgcgggaggtttagcggaaggtaggaggcggcggcggaggaggagttttattgagtcgtaattgtggcgatataatcggagtcgtagtcgtcgttatttgtatttggcgtttagtttacgtttagcgtttgttcggtcgtcgtttttcgttattttgttttgtttattcgttaggtaagtcggcggaggcggagggagacgcggtatttttgggttgcgttagagtaggcgggaggacggtcgtagggtttacgtgttgggggatagggttacggtttaggtggtcggttggagacggtttt

SEQ ID NO: 9016 - DNA, 606 bp, Artificial Sequence
  chemically treated genomic DNA (Homo sapiens) CpG-island No: 9016
aaaaccgtctccaaccgaccacctaaaccgtaaccctatcccccaacacgtaaaccctacgaccgtcctcccgcctactctaacgcaacccaaaaataccgcgtctccctccgcctccgccgacttacctaacgaataaacaaaacaaaataacgaaaaacgacgaccgaacaaacgctaaacgtaaactaaacgccaaatacaaataacgacgactacgactccgattatatcgccacaattacgactcaataaaactcctcctccgccgccgcctcctaccttccgctaaacctcccgcgttacctaaaaaaacaaaaccgaaactcgacttccacttaaaatctcccaaataaactccaacctacgacgtcgacaaaacgaaaccccactttccgactacgcgccaacctcccgccccgccccaaccctacctaaacgctccaaataaaaaccttaaatcgcgcgcgcaaaataaaaacgccgtccgaccaaacctacgtaatacgcgacttctctctaaataatcgacgaaactactctccgcgcaaattatactcccgacccatctacattaaaaaaatcctacactaacctaataacaat

SEQ ID NO: 9017 - DNA, 581 bp, Artificial Sequence
  chemically treated genomic DNA (Homo sapiens) CpG-island No: 9017
agtcggtggaaatagtagcggagaaattgcgttcgggtaagcgggggatttcggagttgttgcgtggaggcgttcgtttcgtcgttttttcgtttttcgtcgttgtttattttcgtcggtcggtgcggttttttgttgtggtggtcggaaggttggggtggttttcggggtttcgagtggagtttgggggaggaggatacggagatgtgtcgttttgggtgggaggtggggggtgcggttttaggagaacgtaaattttatttttagaagtcggtgcgggatttcgttggagtagggtcgtgggttgtgttttcggtcgggtaggcgttgtcgtcgcgagttcgtcgtttttgtgtcggtcgttttggtttcgcgtttttttttttttttttttcggtttttagcgtttaggtcgtcgttaatagttttgttttttaaaaaataatttttgttagcgttgcgatggtcgtttttatttcggaatattcgttgtttttttattttttgtcggggtagtttttggattattttttattttcgttcgttttttgttgtttttttttgttttcgttttttttttt

SEQ ID NO: 9018 - DNA, 581 bp, Artificial Sequence
  chemically treated genomic DNA (Homo sapiens) CpG-island No: 9018
aaaaaaaaaaacgaaaacaaaaaaaaacaacaaaaaacgaacgaaaataaaaaataatccaaaaactaccccgacaaaaaataaaaaaacaacgaatattccgaaataaaaacgaccatcgcaacgctaacaaaaattattttttaaaaaacaaaactattaacgacgacctaaacgctaaaaaccgaaaaaaaaaaaaaaaaaaacgcgaaaccaaaacgaccgacacaaaaacgacgaactcgcgacgacaacgcctacccgaccgaaaacacaacccacgaccctactccaacgaaatcccgcaccgacttctaaaaataaaatttacgttctcctaaaaccgcaccccccacctcccacccaaaacgacacatctccgtatcctcctcccccaaactccactcgaaaccccgaaaaccaccccaaccttccgaccaccacaacaaaaaaccgcaccgaccgacgaaaataaacaacgacgaaaaacgaaaaaacgacgaaacgaacgcctccacgcaacaactccgaaatcccccgcttacccgaacgcaatttctccgctactatttccaccgact

SEQ ID NO: 9019 - DNA, 581 bp, Artificial Sequence
  chemically treated genomic DNA (Homo sapiens) CpG-island No: 9019
ggaagagggggcggaggtaaaaaagggtagtaggaggcggacgggggtggggggtgatttagaaattatttcggtagggagtgggggagtagcggatatttcggggtaggaacggttatcgtaacgttgatagaggttgttttttaagaagtaaaattgttggcggcgatttgagcgttggaagtcgaaggggaagaggaaggagacgcgaagttagggcggtcggtataaaggcggcggattcgcggcggtagcgtttgttcggtcgggagtataatttacggttttattttagcgaagtttcgtatcggtttttaggaataaagtttacgtttttttgaggtcgtattttttattttttatttaggacggtatattttcgtgttttttttttttaaattttattcgggatttcgagaattattttagtttttcggttattataataaagagtcgtatcgatcggcgaggataaatagcggcggagggcgagagggcggcggggcgagcgtttttacgtagtaatttcggagtttttcgtttgttcgagcgtagttttttcgttgttgtttttatcggtt

SEQ ID NO: 9020 - DNA, 581 bp, Artificial Sequence
  chemically treated genomic DNA (Homo sapiens) CpG-island No: 9020
aaccgataaaaacaacaacgaaaaaactacgctcgaacaaacgaaaaactccgaaattactacgtaaaaacgctcgccccgccgccctctcgccctccgccgctatttatcctcgccgatcgatacgactctttattataataaccgaaaaactaaaataattctcgaaatcccgaataaaatttaaaaaaaaaaaacacgaaaatataccgtcctaaataaaaaataaaaaatacgacctcaaaaaaacgtaaactttattcctaaaaaccgatacgaaacttcgctaaaataaaaccgtaaattatactcccgaccgaacaaacgctaccgccgcgaatccgccgcctttataccgaccgccctaacttcgcgtctccttcctcttccccttcgacttccaacgctcaaatcgccgccaacaattttacttcttaaaaaacaacctctatcaacgttacgataaccgttcctaccccgaaatatccgctactcccccactccctaccgaaataatttctaaatcaccccccacccccgtccgcctcctactacccttttttacctccgccccctcttcc

SEQ ID NO: 9021 - DNA, 749 bp, Artificial Sequence
  chemically treated genomic DNA (Homo sapiens) CpG-island No: 9021
  unsure (197)
tcggtttttatttaggtcgaggtggttcggttttatgtatcgcgacgtaacgcgggggaggtagataaggtataggggcggcgtttataatttatgtttatttcgttttatgtgttcgtcgaggcggtataaatcgtcgtgacgattagcggtttaatgatcgaagttaggttggtaagagtcgcgagcgattttgnaagttgtttttgatggtcgttatttatttgtttggatagtatggtttgtaacgcgggtatttcgatgtcgtcggaagcgagaagaattataatggggaaggttatttagtttcgcgtcgcgaacgttagtaagacgtagtttagcgcgtcggtcgttatgtcggcgataatggtttgtttttcgtcgaaacgtttggtggcgggattagtgacgaaggtttgagcgagggcgtgtaagatttcgaatatcgtaagcgataggtcgattatcgtcgcgttttagcgaaagcggttttcgtcgaaaatgatttagagcgttgtcggtatttgttttacgagttgtatgataaagaagatagttataagtgcggcgacgatagttatgtttcgcgtttatcggaaggagttgattgggttgaaggtttttaagggtatcggtcgacgtttttttttatgcgatttttgtattaggaagtagtttagtagtaggttgaggtcgttgagtatcgtcgtcgtaaggaatggtgtatgtaaggagatgatgaattattg

SEQ ID NO: 9022 - DNA, 749 bp, Artificial Sequence
  chemically treated genomic DNA (Homo sapiens) CpG-island No: 9022
  unsure (553)
caataattcatcatctccttacatacaccattccttacgacgacgatactcaacgacctcaacctactactaaactacttcctaatacaaaaatcgcataaaaaaaaacgtcgaccgatacccttaaaaaccttcaacccaatcaactccttccgataaacgcgaaacataactatcgtcgccgcacttataactatcttctttatcatacaactcgtaaaacaaataccgacaacgctctaaatcattttcgacgaaaaccgctttcgctaaaacgcgacgataatcgacctatcgcttacgatattcgaaatcttacacgccctcgctcaaaccttcgtcactaatcccgccaccaaacgtttcgacgaaaaacaaaccattatcgccgacataacgaccgacgcgctaaactacgtcttactaacgttcgcgacgcgaaactaaataaccttccccattataattcttctcgcttccgacgacatcgaaatacccgcgttacaaaccatactatccaaacaaataaataacgaccatcaaaaacaacttncaaaatcgctcgcgactcttaccaacctaacttcgatcattaaaccgctaatcgtcacgacgatttataccgcctcgacgaacacataaaacgaaataaacataaattataaacgccgcccctataccttatctacctcccccgcgttacgtcgcgatacataaaaccgaaccacctcgacctaaataaaaaccga

SEQ ID NO: 9023 - DNA, 749 bp, Artificial Sequence
  chemically treated genomic DNA (Homo sapiens) CpG-island No: 9023
  unsure (553)
tagtagtttattatttttttgtatgtattattttttgcggcggcggtgtttaacggttttaatttattattgggttgttttttaatgtaggagtcgtataagggagagcgtcgatcgatgtttttgagagtttttaatttagttagtttttttcggtgggcgcggggtatgattatcgtcgtcgtatttatgattgttttttttattatgtaattcgtaggataggtgtcggtagcgttttgggttattttcggcgaggatcgttttcgttggagcgcgacgatgatcggtttgtcgtttgcggtattcggaattttgtacgttttcgtttaagttttcgttattggtttcgttattaaacgtttcggcgagaagtaggttattatcgtcggtatggcggtcgacgcgttgggttacgttttgttggcgttcgcgacgcgaggttggatggttttttttattatgatttttttcgttttcggcggtatcgggatgttcgcgttgtaggttatgttgtttaggtaggtagatgacgattattagggatagtttntaggatcgttcgcggtttttattagtttaatttcgattattggatcgttgatcgttacggcgatttatgtcgtttcggcgagtatatggaacggggtgggtatggattgtaggcgtcgtttttatattttgtttgtttttttcgcgttgcgtcgcggtgtatggagtcgggttatttcgatttgaatggaagtcgg

SEQ ID NO: 9024 - DNA, 749 bp, Artificial Sequence
  chemically treated genomic DNA (Homo sapiens) CpG-island No: 9024
  unsure (197)
ccgacttccattcaaatcgaaataacccgactccatacaccgcgacgcaacgcgaaaaaaacaaacaaaatataaaaacgacgcctacaatccatacccaccccgttccatatactcgccgaaacgacataaatcgccgtaacgatcaacgatccaataatcgaaattaaactaataaaaaccgcgaacgatcctanaaactatccctaataatcgtcatctacctacctaaacaacataacctacaacgcgaacatcccgataccgccgaaaacgaaaaaaatcataataaaaaaaaccatccaacctcgcgtcgcgaacgccaacaaaacgtaacccaacgcgtcgaccgccataccgacgataataacctacttctcgccgaaacgtttaataacgaaaccaataacgaaaacttaaacgaaaacgtacaaaattccgaataccgcaaacgacaaaccgatcatcgtcgcgctccaacgaaaacgatcctcgccgaaaataacccaaaacgctaccgacacctatcctacgaattacataataaaaaaaacaatcataaatacgacgacgataatcataccccgcgcccaccgaaaaaaactaactaaattaaaaactctcaaaaacatcgatcgacgctctcccttatacgactcctacattaaaaaacaacccaataataaattaaaaccgttaaacaccgccgccgcaaaaaataatacatacaaaaaaataataaactacta

SEQ ID NO: 9025 - DNA, 902 bp, Artificial Sequence
  chemically treated genomic DNA (Homo sapiens) CpG-island No: 9025
cgtcgttttttttttcgcgcgggtttaggagttagttttcgcgggtttcgtcggcgttgatgaagtttagtattagtcgtaggttcggcgcgttgaggtcgcgtagttgttgtattttcgggtcgtcggttttttggtttagggtttcgcgtatgtcggagcggtagagggcgcggaagtagtcgttttgttcgatgagtttttttttgtttatcgggtagtagcggttttttaggcggatttgtattattttttcggtcgatatggttgggggtttcggggcggtagcgtttatcgttagatttgcgcgtcggttttttagtttttacgcgcgcgtcggtttcgggcggggcgtcgagggatggcggttcgggaggagcggcgaggtgagggtcgttcgcgttcgttcggttttttcggcggttttttttttcggggttcgttttcgcgaggcggcggttttgtttttttttttttttttagcgttaaaaaagggtcggcggagcgcggcgggcgttttcgcgcgggttttttcgggcggcgttaggcgggaagggaattttagtttttagttagtagttttttttttcgtcgttttttttattttcgttcgcgggattttagtcgtcggtttgatttgtcggttggattcggttttcggggaggttcgggaagttgcgggttcgggcgtttcggttgcggacgcgtagttgcgggaggcggagggcgcgcgttttcgtagttttttcgttcgttcggggcgcgtcggtttcgtcgtttgttgggggttgtagtgatgtttcggggtattttagggagaagaaattcgtttttttttttacgttgttttatacgggttaaagaaaaagaaatgagcgtgggaggaaagggaaggatggagt

SEQ ID NO: 9026 - DNA, 902 bp, Artificial Sequence
  chemically treated genomic DNA (Homo sapiens) CpG-island No: 9026
actccatccttccctttcctcccacgctcatttctttttctttaacccgtataaaacaacgtaaaaaaaaaaacgaatttcttctccctaaaataccccgaaacatcactacaacccccaacaaacgacgaaaccgacgcgccccgaacgaacgaaaaaactacgaaaacgcgcgccctccgcctcccgcaactacgcgtccgcaaccgaaacgcccgaacccgcaacttcccgaacctccccgaaaaccgaatccaaccgacaaatcaaaccgacgactaaaatcccgcgaacgaaaataaaaaaaacgacgaaaaaaaaaactactaactaaaaactaaaattcccttcccgcctaacgccgcccgaaaaaacccgcgcgaaaacgcccgccgcgctccgccgacccttttttaacgctaaaaaaaaaaaaaaaaacaaaaccgccgcctcgcgaaaacgaaccccgaaaaaaaaaaccgccgaaaaaaccgaacgaacgcgaacgaccctcacctcgccgctcctcccgaaccgccatccctcgacgccccgcccgaaaccgacgcgcgcgtaaaaactaaaaaaccgacgcgcaaatctaacgataaacgctaccgccccgaaacccccaaccatatcgaccgaaaaaataatacaaatccgcctaaaaaaccgctactacccgataaacaaaaaaaaactcatcgaacaaaacgactacttccgcgccctctaccgctccgacatacgcgaaaccctaaaccaaaaaaccgacgacccgaaaatacaacaactacgcgacctcaacgcgccgaacctacgactaatactaaacttcatcaacgccgacgaaacccgcgaaaactaactcctaaacccgcgcgaaaaaaaaaacgacg

SEQ ID NO: 9027 - DNA, 902 bp, Artificial Sequence
  chemically treated genomic DNA (Homo sapiens) CpG-island No: 9027
attttatttttttttttttttttacgtttatttttttttttttagttcgtgtaaagtagcgtgggagagaaaacgaattttttttttttggggtatttcggagtattattgtagtttttaataagcggcggagtcggcgcgtttcgggcgggcggagaggttgcggggacgcgcgtttttcgtttttcgtagttgcgcgttcgtagtcgaggcgttcgggttcgtagtttttcgggttttttcgagagtcggatttagtcggtaggttaggtcggcggttggggtttcgcgggcggaagtgagaagggcggcgggggaggaggttgttggttgggagttggaatttttttttcgtttggcgtcgttcgggagagttcgcgcgaggacgttcgtcgcgtttcgtcggtttttttttggcgttgagggaaaggagaagggtagggtcgtcgtttcgcgggagcgggtttcgggaggaggggtcgtcggagaggtcgggcgagcgcgggcggtttttatttcgtcgtttttttcgggtcgttatttttcggcgtttcgttcggaatcggcgcgcgcgtaggggttgggaggtcggcgcgtagatttggcggtgagcgttgtcgtttcggggtttttagttatgtcggtcgaggagatggtgtagattcgtttggaggatcgttgttattcggtgagtaagaggaagtttatcgagtagagcgattattttcgcgttttttatcgtttcggtatgcgcgaggttttgagttaggaggtcggcggttcggaggtgtagtagttgcgcggttttagcgcgtcgggtttgcggttggtgttggattttattaacgtcggcggggttcgcgaaggttggtttttgggttcgcgcggggaaaagggcggcg

SEQ ID NO: 9028 - DNA, 902 bp, Artificial Sequence
  chemically treated genomic DNA (Homo sapiens) CpG-island No: 9028
cgccgcccttttccccgcgcgaacccaaaaaccaaccttcgcgaaccccgccgacgttaataaaatccaacaccaaccgcaaacccgacgcgctaaaaccgcgcaactactacacctccgaaccgccgacctcctaactcaaaacctcgcgcataccgaaacgataaaaaacgcgaaaataatcgctctactcgataaacttcctcttactcaccgaataacaacgatcctccaaacgaatctacaccatctcctcgaccgacataactaaaaaccccgaaacgacaacgctcaccgccaaatctacgcgccgacctcccaacccctacgcgcgcgccgattccgaacgaaacgccgaaaaataacgacccgaaaaaaacgacgaaataaaaaccgcccgcgctcgcccgacctctccgacgacccctcctcccgaaacccgctcccgcgaaacgacgaccctacccttctcctttccctcaacgccaaaaaaaaaccgacgaaacgcgacgaacgtcctcgcgcgaactctcccgaacgacgccaaacgaaaaaaaaattccaactcccaaccaacaacctcctcccccgccgcccttctcacttccgcccgcgaaaccccaaccgccgacctaacctaccgactaaatccgactctcgaaaaaacccgaaaaactacgaacccgaacgcctcgactacgaacgcgcaactacgaaaaacgaaaaacgcgcgtccccgcaacctctccgcccgcccgaaacgcgccgactccgccgcttattaaaaactacaataatactccgaaataccccaaaaaaaaaaaattcgttttctctcccacgctactttacacgaactaaaaaaaaaaaaataaacgtaaaaaaaaaaaaaaaaataaaat

SEQ ID NO: 9029 - DNA, 550 bp, Artificial Sequence
  chemically treated genomic DNA (Homo sapiens) CpG-island No: 9029
ggcgatttattaatataattatacgcgcggcgcgtttttaattattttttaattttaatttcgtttcgtcgggggcggtgtttatcgtcgtattattttggacgagagggggcgttcgcgtttttttttggcgttcgcgtgttttttgttttttttaatttatgttcgatttttttatattttattttcgtgttatcgttttttcgcggcgtatgtatatcgcgttacgttatcgtttcgttagtaattgttttatgacgttttttattgttacgttttttgtcgtattggtattgcgtatagtatttatcgaattttttagttttattttttcgtaatcgatcgacgttttttcgttttatatattagtcgtatttatagtttcgtttattatgtcgtatgttgtacggaatgttaattaatttacgttttttcgtgagagcgttatgcgtttatatttttattattcggacgcgttaatatttatgcgacgtcgatgttatatttcgttcgtaaattttcgtaacgttattttatatatattacgttt

SEQ ID NO: 9030 - DNA, 550 bp, Artificial Sequence
  chemically treated genomic DNA (Homo sapiens) CpG-island No: 9030
aaacgtaatatatataaaataacgttacgaaaatttacgaacgaaatataacatcgacgtcgcataaatattaacgcgtccgaataataaaaatataaacgcataacgctctcacgaaaaaacgtaaattaattaacattccgtacaacatacgacataataaacgaaactataaatacgactaatatataaaacgaaaaaacgtcgatcgattacgaaaaaataaaactaaaaaattcgataaatactatacgcaataccaatacgacaaaaaacgtaacaataaaaaacgtcataaaacaattactaacgaaacgataacgtaacgcgatatacatacgccgcgaaaaaacgataacacgaaaataaaatataaaaaaatcgaacataaattaaaaaaaacaaaaaacacgcgaacgccaaaaaaaaacgcgaacgccccctctcgtccaaaataatacgacgataaacaccgcccccgacgaaacgaaattaaaattaaaaaataattaaaaacgcgccgcgcgtataattatattaataaatcgcc

SEQ ID NO: 9031 - DNA, 550 bp, Artificial Sequence
  chemically treated genomic DNA (Homo sapiens) CpG-island No: 9031
gagcgtgatatatgtggaatagcgttgcgagggtttacggacgggatatgatatcgacgtcgtatgggtattggcgcgttcgaatagtggggatgtgagcgtatgacgtttttacgagggggcgtgggttagttagtatttcgtatagtatacgatatggtgaacgaagttgtgaatgcggttagtgtataaggcgagaagacgtcgatcggttgcggaggggtggagttggagggttcgatgagtgttatgcgtagtgttagtacggtaggaagcgtagtagtgaaggacgttataagatagttattgacggagcggtgacgtggcgcggtatatatgcgtcgcgagaagacggtagtacggaggtggggtgtggggaggtcggatatgagttggagagggtagaggatacgcgggcgttaggaagaggcgcggacgttttttttcgtttaaagtggtacggcggtggatatcgttttcggcgggacgagattgagattaagaggtggttaggggcgcgtcgcgcgtgtggttgtgttggtagatcgtt

SEQ ID NO: 9032 - DNA, 550 bp, Artificial Sequence
  chemically treated genomic DNA (Homo sapiens) CpG-island No: 9032
aacgatctaccaacacaaccacacgcgcgacgcgcccctaaccacctcttaatctcaatctcgtcccgccgaaaacgatatccaccgccgtaccactttaaacgaaaaaaaacgtccgcgcctcttcctaacgcccgcgtatcctctaccctctccaactcatatccgacctccccacaccccacctccgtactaccgtcttctcgcgacgcatatataccgcgccacgtcaccgctccgtcaataactatcttataacgtccttcactactacgcttcctaccgtactaacactacgcataacactcatcgaaccctccaactccacccctccgcaaccgatcgacgtcttctcgccttatacactaaccgcattcacaacttcgttcaccatatcgtatactatacgaaatactaactaacccacgccccctcgtaaaaacgtcatacgctcacatccccactattcgaacgcgccaatacccatacgacgtcgatatcatatcccgtccgtaaaccctcgcaacgctattccacatatatcacgctc

SEQ ID NO: 9033 - DNA, 512 bp, Artificial Sequence
  chemically treated genomic DNA (Homo sapiens) CpG-island No: 9033
  unsure (269, 429, 476, 481)
atgcgttagtatcgtattcggtacgatttttaaaatttggcgtttatttggttttgttcgttataatttcgataatttgtcgattcgtttgttgtatcgaatggtttgttaacgtatataggttggtaatcgattgtttaatattatgcgttataatttttttattgtcggttacggcggtattatttagcgttattaatatcgttttttacgtagtcgaagtattggtcgaaatttttatcgcgtagttgttcgacgtattatcgtanattatgtcgttgatatcgtcgattatattgttgatcgttatcgagatggttttataacgtttatttattagttatgttatttcggcggcggtttttattgttgcggtcgttgcggtatatagcgtagataaacgcgggtattggggtatggatgtaaatngcgtttaaatgcgaaagtattagcgtacgcgttagtcggttattatncggtncgaagtgttttgttattatttatataggtat

SEQ ID NO: 9034 - DNA, 512 bp, Artificial Sequence
  chemically treated genomic DNA (Homo sapiens) CpG-island No: 9034
  unsure (32, 37, 84, 244)
atacctatataaataataacaaaacacttcgnaccgnataataaccgactaacgcgtacgctaatactttcgcatttaaacgcnatttacatccataccccaatacccgcgtttatctacgctatataccgcaacgaccgcaacaataaaaaccgccgccgaaataacataactaataaataaacgttataaaaccatctcgataacgatcaacaatataatcgacgatatcaacgacataatntacgataatacgtcgaacaactacgcgataaaaatttcgaccaatacttcgactacgtaaaaaacgatattaataacgctaaataataccgccgtaaccgacaataaaaaaattataacgcataatattaaacaatcgattaccaacctatatacgttaacaaaccattcgatacaacaaacgaatcgacaaattatcgaaattataacgaacaaaaccaaataaacgccaaattttaaaaatcgtaccgaatacgatactaacgcat

SEQ ID NO: 9035 - DNA, 512 bp, Artificial Sequence
  chemically treated genomic DNA (Homo sapiens) CpG-island No: 9035
  unsure (32, 37, 84, 244)
atgtttgtgtgggtggtagtagaatatttcgnatcgnatgatgatcggttggcgcgtgcgttgatgttttcgtatttgagcgtnatttatatttatattttagtattcgcgtttgtttgcgttgtgtgtcgtaacgatcgtagtaatgggggtcgtcgtcgggatggtatggttggtggatgggcgttatgaaattatttcgatggcgattagtagtatgatcggcgatgttagcggtatgatntgcgatggtgcgtcgaatagttgcgcgatgaaggtttcgattagtgtttcggttgcgtggaaagcggtgttaatggcgttggatgatatcgtcgtgatcggtaatgaagggattgtggcgtatgatgttgagtagtcgattgttaatttgtgtgcgttagtaagttattcgatgtagtaaacggatcggtagattatcgagattatggcgagtaaggttagataaacgttaggttttggggatcgtgtcggatgcgatgttggcgtat

SEQ ID NO: 9036 - DNA, 512 bp, Artificial Sequence
  chemically treated genomic DNA (Homo sapiens) CpG-island No: 9036
  unsure (269, 429, 476, 481)
atacgccaacatcgcatccgacacgatccccaaaacctaacgtttatctaaccttactcgccataatctcgataatctaccgatccgtttactacatcgaataacttactaacgcacacaaattaacaatcgactactcaacatcatacgccacaatcccttcattaccgatcacgacgatatcatccaacgccattaacaccgctttccacgcaaccgaaacactaatcgaaaccttcatcgcgcaactattcgacgcaccatcgcanatcataccgctaacatcgccgatcatactactaatcgccatcgaaataatttcataacgcccatccaccaaccataccatcccgacgacgacccccattactacgatcgttacgacacacaacgcaaacaaacgcgaatactaaaatataaatataaatnacgctcaaatacgaaaacatcaacgcacgcgccaaccgatcatcatncgatncgaaatattctactaccacccacacaaacat

SEQ ID NO: 9037 - DNA, 851 bp, Artificial Sequence
  chemically treated genomic DNA (Homo sapiens) CpG-island No: 9037
taaaggcgtttttgagttttaatattttttttttttttacgtttttaatgttcggttttgtcgggtcgtttattcgttttttttaggtaattttcgtcgttcgcgggggagtaggtgttcgcgtaataggtgttaggagggagggttcgggcggcggcgcggggtatcgagaggatttcgggagggagcgtaggataaagttacgtcgaagggaaggaggtcgggggcggacgtagaggaagatagttcgggggataaggatgtcgtcgtttgttttcgtttttcgcgcgattttcgtttcggcggttttatttataatttttaggtagacgaaggcgttcgagtaggttcgtaggatgtcggggtcggcgggtagggtgattcggggcggcgggaaggatacggcggggttcgggggcggcgggattgacgtttcgtcggtcgatatgttgtcgttgtcgttgttgcgttttcgcgcgtcgtcgtcgtttttcgttttcgtttttcgggtttttgtcgtcgtcgtcgtcgtcgtttagtttcgcgggtttcgggcgcgtcgcgcgggaggaggcgtggtcgtggggtttttcgagtttcgtttcgttacgtgggtttaggtgagcgtcgtttcgttttggcgttcgagtcgttcgcgattacgtgtataggtgcggttattgtagtcgttaggcgcggtttttttagtttcgtcgattttattttttgtttcgttggttagcgttagcgtttcgcgggcgtttttatgcgtatttttatatttttgatcgttatttttattttttagttttttttttagtttgtatttgtgttttttatttgtttttttt

SEQ ID NO: 9038 - DNA, 851 bp, Artificial Sequence
  chemically treated genomic DNA (Homo sapiens) CpG-island No: 9038
aaaaaaaacaaataaaaaacacaaatacaaactaaaaaaaaaactaaaaaataaaaataacgatcaaaaatataaaaatacgcataaaaacgcccgcgaaacgctaacgctaaccaacgaaacaaaaaataaaatcgacgaaactaaaaaaaccgcgcctaacgactacaataaccgcacctatacacgtaatcgcgaacgactcgaacgccaaaacgaaacgacgctcacctaaacccacgtaacgaaacgaaactcgaaaaaccccacgaccacgcctcctcccgcgcgacgcgcccgaaacccgcgaaactaaacgacgacgacgacgacgacaaaaacccgaaaaacgaaaacgaaaaacgacgacgacgcgcgaaaacgcaacaacgacaacgacaacatatcgaccgacgaaacgtcaatcccgccgcccccgaaccccgccgtatccttcccgccgccccgaatcaccctacccgccgaccccgacatcctacgaacctactcgaacgccttcgtctacctaaaaattataaataaaaccgccgaaacgaaaatcgcgcgaaaaacgaaaacaaacgacgacatccttatcccccgaactatcttcctctacgtccgcccccgacctccttcccttcgacgtaactttatcctacgctccctcccgaaatcctctcgataccccgcgccgccgcccgaaccctccctcctaacacctattacgcgaacacctactcccccgcgaacgacgaaaattacctaaaaaaaacgaataaacgacccgacaaaaccgaacattaaaaacgtaaaaaaaaaaaaaatattaaaactcaaaaacgccttta

SEQ ID NO: 9039 - DNA, 851 bp, Artificial Sequence
  chemically treated genomic DNA (Homo sapiens) CpG-island No: 9039
ggagaagataggtggagagtataggtgtaaattaaggggagggttagaaggtaaaaatagcgattaggggtatgggggtgcgtatggagacgttcgcggagcgttggcgttggttagcggagtaggaggtgaggtcggcggagttgggaggatcgcgtttggcggttgtaatagtcgtatttgtgtacgtgatcgcgagcggttcgggcgttagggcggagcggcgtttatttgggtttacgtgacggggcggggttcgaggagttttacggttacgttttttttcgcgcggcgcgttcggagttcgcggagttgagcggcggcggcggcggcggtaggagttcgggaggcggaggcgggaggcggcggcggcgcgcggagacgtagtagcggtagcggtagtatgtcggtcggcggagcgttagtttcgtcgttttcgaatttcgtcgtgtttttttcgtcgtttcgggttattttgttcgtcggtttcgatattttgcggatttattcgggcgttttcgtttgtttggagattgtaagtggggtcgtcggagcgagggtcgcgcggggagcgaggataggcggcggtatttttgtttttcgggttgtttttttttgcgttcgttttcggttttttttttttcgacgtggttttgttttgcgttttttttcggggttttttcggtgtttcgcgtcgtcgttcgggtttttttttttagtatttgttacgcgggtatttgttttttcgcgggcgacggaaattgtttggggagggcgagtaggcggttcggtagggtcgaatattggggacgtggaggaaagaaaggtgttggggtttagaggcgttttta

SEQ ID NO: 9040 - DNA, 851 bp, Artificial Sequence
  chemically treated genomic DNA (Homo sapiens) CpG-island No: 9040
taaaaacgcctctaaaccccaacacctttctttcctccacgtccccaatattcgaccctaccgaaccgcctactcgccctccccaaacaatttccgtcgcccgcgaaaaaacaaatacccgcgtaacaaatactaaaaaaaaaaacccgaacgacgacgcgaaacaccgaaaaaaccccgaaaaaaaacgcaaaacaaaaccacgtcgaaaaaaaaaaaaccgaaaacgaacgcaaaaaaaaacaacccgaaaaacaaaaataccgccgcctatcctcgctccccgcgcgaccctcgctccgacgaccccacttacaatctccaaacaaacgaaaacgcccgaataaatccgcaaaatatcgaaaccgacgaacaaaataacccgaaacgacgaaaaaaacacgacgaaattcgaaaacgacgaaactaacgctccgccgaccgacatactaccgctaccgctactacgtctccgcgcgccgccgccgcctcccgcctccgcctcccgaactcctaccgccgccgccgccgccgctcaactccgcgaactccgaacgcgccgcgcgaaaaaaaacgtaaccgtaaaactcctcgaaccccgccccgtcacgtaaacccaaataaacgccgctccgccctaacgcccgaaccgctcgcgatcacgtacacaaatacgactattacaaccgccaaacgcgatcctcccaactccgccgacctcacctcctactccgctaaccaacgccaacgctccgcgaacgtctccatacgcacccccatacccctaatcgctatttttaccttctaaccctccccttaatttacacctatactctccacctatcttctcc

SEQ ID NO: 9041 - DNA, 582 bp, Artificial Sequence
  chemically treated genomic DNA (Homo sapiens) CpG-island No: 9041
  unsure (464, 506)
atttcgttgattatcgtcggtgttagcggtgacgatattcgtcgtcgggtgtcggcggcgttggataaagtcgggttattggataaagcgaagaatttttttatttagttttcgggcggtgaataatagcgtgttggtattgttcgcgcggtggtgaataagttcgcggtattgttggcggacgaatcgattggtaatttggacgacgcgttgtcggaaggtattttacgtttgtttgaagagtttaatcgcgttggggtaatcgtattgatggtaacgtacgatattaatttgatttcgcggcgtttttatcgtatgtttattttgagcgatggttatttgtatggaggcgtgggttatgaataagcgcgatgtaattaattatattcggtagtttggcgggcgttttgatcgttttcgtaaatcggtcggcggtttaggcgacggcggtcgtaacgtattanaacgcgcgaaattttcgttaaatcggtaaatcgttaaattancgtttttaacgaataggtgcgttatgttttttacggcgtattgtaggatttgaaaagtaaatcgttcgttacgttt

SEQ ID NO: 9042 - DNA, 582 bp, Artificial Sequence
  chemically treated genomic DNA (Homo sapiens) CpG-island No: 9042
  unsure (77, 119)
aaacgtaacgaacgatttacttttcaaatcctacaatacgccgtaaaaaacataacgcacctattcgttaaaaacgntaatttaacgatttaccgatttaacgaaaatttcgcgcgttntaatacgttacgaccgccgtcgcctaaaccgccgaccgatttacgaaaacgatcaaaacgcccgccaaactaccgaatataattaattacatcgcgcttattcataacccacgcctccatacaaataaccatcgctcaaaataaacatacgataaaaacgccgcgaaatcaaattaatatcgtacgttaccatcaatacgattaccccaacgcgattaaactcttcaaacaaacgtaaaataccttccgacaacgcgtcgtccaaattaccaatcgattcgtccgccaacaataccgcgaacttattcaccaccgcgcgaacaataccaacacgctattattcaccgcccgaaaactaaataaaaaaattcttcgctttatccaataacccgactttatccaacgccgccgacacccgacgacgaatatcgtcaccgctaacaccgacgataatcaacgaaat

SEQ ID NO: 9043 - DNA, 582 bp, Artificial Sequence
  chemically treated genomic DNA (Homo sapiens) CpG-island No: 9043
  unsure (77, 119)
aaacgtggcgaacggtttgttttttagattttgtaatgcgtcgtggaaggtatagcgtatttgttcgttgaaaacgntggtttggcgatttatcggtttggcgaggatttcgcgcgttntggtgcgttacgatcgtcgtcgtttgagtcgtcgatcgatttacggaagcgattaagacgttcgttaaattgtcgaatatgattgattgtatcgcgtttatttatggtttacgtttttatgtaagtgattatcgtttagggtgagtatgcgataggaacgtcgcgagattaggttgatgtcgtgcgttgttattaatacggttattttaacgcggttaaattttttaaatagacgtaaaatgtttttcgatagcgcgtcgtttaggttattagtcggttcgttcgttagtagtatcgcgggtttgtttattatcgcgcgggtaatgttaatacgttgttgtttatcgttcgaaagttgaatagggaagtttttcgttttgtttagtagttcgattttatttagcgtcgtcgatattcggcgacgaatatcgttatcgttggtatcggcgataattagcgggat

SEQ ID NO: 9044 - DNA, 582 bp, Artificial Sequence
  chemically treated genomic DNA (Homo sapiens) CpG-island No: 9044
  unsure (464, 506)
atcccgctaattatcgccgataccaacgataacgatattcgtcgccgaatatcgacgacgctaaataaaatcgaactactaaacaaaacgaaaaacttccctattcaactttcgaacgataaacaacaacgtattaacattacccgcgcgataataaacaaacccgcgatactactaacgaacgaaccgactaataacctaaacgacgcgctatcgaaaaacattttacgtctatttaaaaaatttaaccgcgttaaaataaccgtattaataacaacgcacgacatcaacctaatctcgcgacgttcctatcgcatactcaccctaaacgataatcacttacataaaaacgtaaaccataaataaacgcgatacaatcaatcatattcgacaatttaacgaacgtcttaatcgcttccgtaaatcgatcgacgactcaaacgacgacgatcgtaacgcaccanaacgcgcgaaatcctcgccaaaccgataaatcgccaaaccancgttttcaacgaacaaatacgctataccttccacgacgcattacaaaatctaaaaaacaaaccgttcgccacgttt

SEQ ID NO: 9045 - DNA, 543 bp, Artificial Sequence
  chemically treated genomic DNA (Homo sapiens) CpG-island No: 9045
cgaattcgtggtgattatcgggtcgttcggtttcggtaaatcgattttgttgcgttgtattaataattggaagaaattattttcggcgatttgattgtcgatggtttgaaggttaacgattcgaaagttgacgagcgtttgattcgttaggaagtaggtatggtgttttagtagttttattttttttcgtatttgatagcgttggaaaacgttatgtttggttcgttacgcgtgcgtggcgcgaataaagaagaggcggaaaaattggtacgtgagttgttggcgaaagtcggtttggtagaacgtgtatattattattttttcgaattttttggtggttaatagtagcgtgtggcgattgttcgcgcgttggcggtgaagtcgaaaatgatgttgtttgatgaatcgattttcgtttttgattcggaattgcgttatgaagtgttgaaggttatgtaggatttggttgaagaagggatgacgatggtgatcgtgatttacgaaatcggttttgtcgagaaagtagtttcgcggttgattttt

SEQ ID NO: 9046 - DNA, 543 bp, Artificial Sequence
  chemically treated genomic DNA (Homo sapiens) CpG-island No: 9046
aaaaatcaaccgcgaaactactttctcgacaaaaccgatttcgtaaatcacgatcaccatcgtcatcccttcttcaaccaaatcctacataaccttcaacacttcataacgcaattccgaatcaaaaacgaaaatcgattcatcaaacaacatcattttcgacttcaccgccaacgcgcgaacaatcgccacacgctactattaaccaccaaaaaattcgaaaaaataataatatacacgttctaccaaaccgactttcgccaacaactcacgtaccaatttttccgcctcttctttattcgcgccacgcacgcgtaacgaaccaaacataacgttttccaacgctatcaaatacgaaaaaaaataaaactactaaaacaccatacctacttcctaacgaatcaaacgctcgtcaactttcgaatcgttaaccttcaaaccatcgacaatcaaatcgccgaaaataatttcttccaattattaatacaacgcaacaaaatcgatttaccgaaaccgaacgacccgataatcaccacgaattcg

SEQ ID NO: 9047 - DNA, 543 bp, Artificial Sequence
  chemically treated genomic DNA (Homo sapiens) CpG-island No: 9047
aaagattagtcgcgaagttattttttcggtaaaatcgatttcgtgggttacgattattatcgttattttttttttagttagattttgtataatttttagtattttatggcgtagtttcgggttaagagcggaagtcggtttattaaatagtattattttcggttttatcgttagcgcgcgggtaatcgttatacgttgttgttgattattagaaagttcggaagggtagtgatgtgtacgttttgttagatcgattttcgttagtagtttacgtgttagttttttcgttttttttttgttcgcgttacgtacgcgtagcgggttaaatatgacgttttttagcgttgttagatgcgggaagaggtaaaattgttggaatattatatttgttttttggcgaattaggcgttcgttaattttcggatcgttaatttttaggttatcgataattagatcgtcggaggtgattttttttagttgttgatgtagcgtagtagggtcgatttatcggaatcggacggttcgataattattacgagttcg

SEQ ID NO: 9048 - DNA, 543 bp, Artificial Sequence
  chemically treated genomic DNA (Homo sapiens) CpG-island No: 9048
cgaactcgtaataattatcgaaccgtccgattccgataaatcgaccctactacgctacatcaacaactaaaaaaaatcacctccgacgatctaattatcgataacctaaaaattaacgatccgaaaattaacgaacgcctaattcgccaaaaaacaaatataatattccaacaattttacctcttcccgcatctaacaacgctaaaaaacgtcatatttaacccgctacgcgtacgtaacgcgaacaaaaaaaaaacgaaaaaactaacacgtaaactactaacgaaaatcgatctaacaaaacgtacacatcactacccttccgaactttctaataatcaacaacaacgtataacgattacccgcgcgctaacgataaaaccgaaaataatactatttaataaaccgacttccgctcttaacccgaaactacgccataaaatactaaaaattatacaaaatctaactaaaaaaaaaataacgataataatcgtaacccacgaaatcgattttaccgaaaaaataacttcgcgactaatcttt

SEQ ID NO: 9049 - DNA, 549 bp, Artificial Sequence
  chemically treated genomic DNA (Homo sapiens) CpG-island No: 9049
ttcgggcgcgattttttttaagattataaagtttaatttcgttttgtttagaatttttatacgttaaattatcgtaatcgtttatacgtagaaacgttcgttagcgtaaaaggtataatagttcgtaacggttttttcgtttaagtcggttgaattttcgatattcgtttttatatcgtaacgtaggatttagatcgcgtatattcggatatttttttacgcgtcgcgtcgatgaaacgcgtattatatttagtttataatacgcgtatcgacgcgcgcgacgtcgtcgcgaatattttagttaagaatttttcgttattcgttttcgcgcgatagtttacgttcgtgttttttatattcgcgtgtagtatcgtggcgttaattatcgttttaattgtatcgtcgcggatagagttttcgtaattatcgtttgtatcgaaggtcgtttttttcggcggtaaatattggcgtgtttttatgtttattacgattgttatttttttattcgttttataagcgcgtttaattacggtcgtttgcgtcgtcgat

SEQ ID NO: 9050 - DNA, 549 bp, Artificial Sequence
  chemically treated genomic DNA (Homo sapiens) CpG-island No: 9050
atcgacgacgcaaacgaccgtaattaaacgcgcttataaaacgaataaaaaaataacaatcgtaataaacataaaaacacgccaatatttaccgccgaaaaaaacgaccttcgatacaaacgataattacgaaaactctatccgcgacgatacaattaaaacgataattaacgccacgatactacacgcgaatataaaaaacacgaacgtaaactatcgcgcgaaaacgaataacgaaaaattcttaactaaaatattcgcgacgacgtcgcgcgcgtcgatacgcgtattataaactaaatataatacgcgtttcatcgacgcgacgcgtaaaaaaatatccgaatatacgcgatctaaatcctacgttacgatataaaaacgaatatcgaaaattcaaccgacttaaacgaaaaaaccgttacgaactattataccttttacgctaacgaacgtttctacgtataaacgattacgataatttaacgtataaaaattctaaacaaaacgaaattaaactttataatcttaaaaaaaatcgcgcccgaa

SEQ ID NO: 9051 - DNA, 549 bp, Artificial Sequence
  chemically treated genomic DNA (Homo sapiens) CpG-island No: 9051
gtcggcgacgtaggcggtcgtggttaagcgcgtttgtggggcggataaggaggtgatagtcgtggtgggtatgagggtacgttagtatttgtcgtcggaaggagcggttttcggtgtagacggtagttgcgagggttttgttcgcggcggtgtagttggggcgatggttagcgttacggtgttatacgcggatgtagagggtacggacgtgagttgtcgcgcgggggcgagtagcgagagatttttgattgaagtgttcgcggcggcgtcgcgcgcgtcggtgcgcgtgttgtaggttagatataatgcgcgttttatcgacgcggcgcgtgaggaggtgttcgggtatgcgcggtttgggttttacgttgcggtgtgagagcgagtgtcgggagtttaatcgatttaagcgggaaggtcgttacgggttgttatgttttttgcgttgacgggcgtttttgcgtatgagcggttgcggtggtttggcgtgtggggattttgagtaaagcggaattgagttttgtagttttagggagaatcgcgttcggg

SEQ ID NO: 9052 - DNA, 549 bp, Artificial Sequence
  chemically treated genomic DNA (Homo sapiens) CpG-island No: 9052
cccgaacgcgattctccctaaaactacaaaactcaattccgctttactcaaaatccccacacgccaaaccaccgcaaccgctcatacgcaaaaacgcccgtcaacgcaaaaaacataacaacccgtaacgaccttcccgcttaaatcgattaaactcccgacactcgctctcacaccgcaacgtaaaacccaaaccgcgcatacccgaacacctcctcacgcgccgcgtcgataaaacgcgcattatatctaacctacaacacgcgcaccgacgcgcgcgacgccgccgcgaacacttcaatcaaaaatctctcgctactcgcccccgcgcgacaactcacgtccgtaccctctacatccgcgtataacaccgtaacgctaaccatcgccccaactacaccgccgcgaacaaaaccctcgcaactaccgtctacaccgaaaaccgctccttccgacgacaaatactaacgtaccctcatacccaccacgactatcacctccttatccgccccacaaacgcgcttaaccacgaccgcctacgtcgccgac

SEQ ID NO: 9053 - DNA, 506 bp, Artificial Sequence
  chemically treated genomic DNA (Homo sapiens) CpG-island No: 9053
  unsure (7..8, 58..59, 80, 226, 320, 386..387, 470)
ggcggtnngggggggggggcggcgtttcgttcgcgtcgggggcgcgggcgcgcgcgtnnncggttttcgcgcgggggggnggttcgcggggcgcgcgcggcgcggcggcgcggggggtcggcgtttttcgggcggcgggggcggttcggggggcgggggttcgggttttatcgttttcgggcgggcggcgtttcggcgggcggcgcggggttcgtcggttcgggtncggggcgtcggggcgggcgcgtcgggggggggtcggttcgggttcggcgcggcgcggggcgcggcggcgggcgtcgcggtcgcgcgcgcgcgtncgcgttaaggttcgggttcggtcgtcgcggaggcgcggcgggggcgggcggagggcgtcgcggggnntcgcgggcgcggcggcggcggcgggcgcgcggtatacgcgcgagttcgtcgtcgttcgtcggtcgcgcgtcgttagcggcggncgttagttcgtacggtagaggcgcgcgcgcggacgt

SEQ ID NO: 9054 - DNA, 506 bp, Artificial Sequence
  chemically treated genomic DNA (Homo sapiens) CpG-island No: 9054
  unsure (37, 120..121, 187, 281, 427, 447..448, 499..)
acgtccgcgcgcgcgcctctaccgtacgaactaacgnccgccgctaacgacgcgcgaccgacgaacgacgacgaactcgcgcgtataccgcgcgcccgccgccgccgccgcgcccgcgannccccgcgacgccctccgcccgcccccgccgcgcctccgcgacgaccgaacccgaaccttaacgcgnacgcgcgcgcgcgaccgcgacgcccgccgccgcgccccgcgccgcgccgaacccgaaccgacccccccccgacgcgcccgccccgacgccccgnacccgaaccgacgaaccccgcgccgcccgccgaaacgccgcccgcccgaaaacgataaaacccgaacccccgccccccgaaccgcccccgccgcccgaaaaacgccgaccccccgcgccgccgcgccgcgcgcgccccgcgaaccncccccccgcgcgaaaaccgnnnacgcgcgcgcccgcgcccccgacgcgaacgaaacgccgcccccccccccnnaccgcc

SEQ ID NO: 9055 - DNA, 506 bp, Artificial Sequence
  chemically treated genomic DNA (Homo sapiens) CpG-island No: 9055
  unsure (37, 120..121, 187, 281, 427, 447..448, 499..)
gcgttcgcgcgcgcgtttttgtcgtgcgggttggcgntcgtcgttggcggcgcgcggtcggcgggcggcggcgggttcgcgcgtgtgtcgcgcgttcgtcgtcgtcgtcgcgttcgcggnntttcgcggcgtttttcgttcgttttcgtcgcgttttcgcggcggtcgggttcgggttttggcgcgngcgcgcgcgcgcggtcgcggcgttcgtcgtcgcgtttcgcgtcgcgtcgggttcgggtcggttttttttcggcgcgttcgtttcggcgtttcgngttcgggtcggcgggtttcgcgtcgttcgtcggggcgtcgttcgttcgggggcggtggggttcgggttttcgtttttcgggtcgttttcgtcgttcggggggcgtcggtttttcgcgtcgtcgcgtcgcgcgcgtttcgcgggttnttttttcgcgcgggggtcgnnngcgcgcgcgttcgcgttttcggcgcgggcggggcgtcgtttttttttttnngtcgtt

SEQ ID NO: 9056 - DNA, 506 bp, Artificial Sequence
  chemically treated genomic DNA (Homo sapiens) CpG-island No: 9056
  unsure (7..8, 58..59, 80, 226, 320, 386..387, 470)
aacgacnnaaaaaaaaaaacgacgccccgcccgcgccgaaaacgcgaacgcgcgcgcnnncgacccccgcgcgaaaaaanaacccgcgaaacgcgcgcgacgcgacgacgcgaaaaaccgacgccccccgaacgacgaaaacgacccgaaaaacgaaaacccgaaccccaccgcccccgaacgaacgacgccccgacgaacgacgcgaaacccgccgacccgaacncgaaacgccgaaacgaacgcgccgaaaaaaaaccgacccgaacccgacgcgacgcgaaacgcgacgacgaacgccgcgaccgcgcgcgcgcgcncgcgccaaaacccgaacccgaccgccgcgaaaacgcgacgaaaacgaacgaaaaacgccgcgaaannccgcgaacgcgacgacgacgacgaacgcgcgacacacgcgcgaacccgccgccgcccgccgaccgcgcgccgccaacgacgancgccaacccgcacgacaaaaacgcgcgcgcgaacgc

SEQ ID NO: 9057 - DNA, 820 bp, Artificial Sequence
  chemically treated genomic DNA (Homo sapiens) CpG-island No: 9057
  unsure (19, 55, 58, 114..115, 179, 198..199, 222, 247, 251, 308, 334..335)
  unsure (340, 344, 350, 353..354, 362, 366, 369, 375, 565, 629, 656)
  unsure (681, 693..694, 736, 762)
cggcggtcgcgcgggagtnggtcgtcggggggggggggtcggggggcggcgtcgncgnggggggatcgaaaaaaaaaaaaaaaaaaattttggttgtttatcggggggggggtnntaatagtttcgtcggtcgcgtcgtatatttttttttttcgtttcgtcgcgcgggcgcgggcggngcgggggcgttcgcgggtnngggcggcgtcgttcgttcgcggncgcgtcgttttttttcgtttcgcgngcgngaaagtagaaattagcggcgggcgcgcgcggggcgggggcggcggtttcgttcgggncgggcgcggtcgcgcgcgtcgcgttnntcggncggngcggtngtnnntcgtcgngcgncgngcggtncggtcgcgcgcgcgcgcggcgcgtttcggtcgttcggcgcgtttcgttcggtcgtcgttcgttttcgtttttcgtttcgcggtcgggtcgtcgttcgtcgtcgcgcgggttcgtcgcgttcggcgtttcgttcggcgttcgtcgttttcgtcgggggcgtcggcgtcgtttcggtcgcgcgttcgcgggncgcggcggcgggtttcggcgggggggggcggcggttcgttcggggttcggcgcgcgggcgggtngcgggcggtcgggggttcgcgcgtttnggcgcgcgcgcggtcgtcgttcggncgcgttcgcgtnncgcgttcgcgtcggtacggcggttcgtcggagttcgcgcgtnggcgtttacgatcgttcgacgacgtntttcggttttcgcgcgttcggcgtcggtcgtcgtcgtttcgcggtcggcgcgcgttcg

SEQ ID NO: 9058 - DNA, 820 bp, Artificial Sequence
  chemically treated genomic DNA (Homo sapiens) CpG-island No: 9058
  unsure (59, 85, 127..128, 140, 165, 192, 256, 446, 452, 455, 459)
  unsure (466..467, 471, 477, 481, 486..487, 513, 570, 574, 599, 622..623)
  unsure (642, 706..707, 763, 766, 802)
cgaacgcgcgccgaccgcgaaacgacgacgaccgacgccgaacgcgcgaaaaccgaaanacgtcgtcgaacgatcgtaaacgccnacgcgcgaactccgacgaaccgccgtaccgacgcgaacgcgnnacgcgaacgcgnccgaacgacgaccgcgcgcgcgccnaaacgcgcgaacccccgaccgcccgcnacccgcccgcgcgccgaaccccgaacgaaccgccgcccccccccgccgaaacccgccgccgcgncccgcgaacgcgcgaccgaaacgacgccgacgcccccgacgaaaacgacgaacgccgaacgaaacgccgaacgcgacgaacccgcgcgacgacgaacgacgacccgaccgcgaaacgaaaaacgaaaacgaacgacgaccgaacgaaacgcgccgaacgaccgaaacgcgccgcgcgcgcgcgcgaccgnaccgcncgncgcncgacgannnacnaccgcnccgnccgannaacgcgacgcgcgcgaccgcgcccgncccgaacgaaaccgccgcccccgccccgcgcgcgcccgccgctaatttctactttcncgcncgcgaaacgaaaaaaaacgacgcgnccgcgaacgaacgacgccgcccnnacccgcgaacgcccccgcnccgcccgcgcccgcgcgacgaaacgaaaaaaaaaaatatacgacgcgaccgacgaaactattannaccccccccccgataaacaaccaaaatttttttttttttttttttcgatccccccncgncgacgccgccccccgaccccccccccccgacgaccnactcccgcgcgaccgccg

SEQ ID NO: 9059 - DNA, 820 bp, Artificial Sequence
  chemically treated genomic DNA (Homo sapiens) CpG-island No: 9059
  unsure (59, 85, 127..128, 140, 165, 192, 256, 446, 452, 455, 459)
  unsure (466..467, 471, 477, 481, 486..487, 513, 570, 574, 599, 622..623)
  unsure (642, 706..707, 763, 766, 802)
cgggcgcgcgtcggtcgcggggcggcggcggtcggcgtcgggcgcgcgggggtcggggngcgtcgtcgggcggtcgtggacgttngcgcgcgagtttcggcgggtcgtcgtgtcggcgcgggcgcgnngcgcgggcgcgntcgggcggcggtcgcgcgcgcgttngggcgcgcgggttttcggtcgttcgtngttcgttcgcgcgtcgggtttcgggcgggtcgtcgttttttttcgtcggggttcgtcgtcgcgnttcgcgggcgcgcggtcggggcggcgtcggcgttttcggcgggggcggcgggcgtcgggcggggcgtcgggcgcggcgggttcgcgcggcggcgggcggcggttcggtcgcggggcggggggcgggggcgggcggcggtcgggcggggcgcgtcgggcggtcggggcgcgtcgcgcgcgcgcgcggtcgngtcgtncgncgtncggcggnnngtngtcgtntcgntcggnnggcgcggcgcgcgcggtcgcgttcgnttcgggcggggtcgtcgttttcgtttcgcgcgcgttcgtcgttggtttttgtttttncgtncgcggggcgggggggggcggcgcgntcgcgggcgggcggcgtcgtttnngttcgcgggcgttttcgtntcgttcgcgttcgcgcggcggggcgagagagaaaggtgtgcggcgcggtcggcggggttgttgnngtttttttttcggtgagtagttagggtttttttttttttttttttcggtttttttncgncggcgtcgtttttcggtttttttttttcggcggttngttttcgcgcggtcgtcg

SEQ ID NO: 9060 - DNA, 820 bp, Artificial Sequence
  chemically treated genomic DNA (Homo sapiens) CpG-island No: 9060
  unsure (19, 55, 58, 114..115, 179, 198..199, 222, 247, 251, 308, 334..335)
  unsure (340, 344, 350, 353..354, 362, 366, 369, 375, 565, 629, 656)
  unsure (681, 693..694, 736, 762)
cgacgaccgcgcgaaaacnaaccgccgaaaaaaaaaaaccgaaaaacgacgccgncgnaaaaaaaccgaaaaaaaaaaaaaaaaaaaccctaactactcaccgaaaaaaaaacnncaacaaccccgccgaccgcgccgcacacctttctctctcgccccgccgcgcgaacgcgaacganacgaaaacgcccgcgaacnnaaacgacgccgcccgcccgcgancgcgccgcccccccccgccccgcgnacgnaaaaacaaaaaccaacgacgaacgcgcgcgaaacgaaaacgacgaccccgcccgaancgaacgcgaccgcgcgcgccgcgccnnccgancganacgacnacnnnccgccgnacgncgnacgacncgaccgcgcgcgcgcgcgacgcgccccgaccgcccgacgcgccccgcccgaccgccgcccgcccccgccccccgccccgcgaccgaaccgccgcccgccgccgcgcgaacccgccgcgcccgacgccccgcccgacgcccgccgcccccgccgaaaacgccgacgccgccccgaccgcgcgcccgcgaancgcgacgacgaaccccgacgaaaaaaaacgacgacccgcccgaaacccgacgcgcgaacgaacnacgaacgaccgaaaacccgcgcgcccnaacgcgcgcgcgaccgccgcccgancgcgcccgcgcnncgcgcccgcgccgacacgacgacccgccgaaactcgcgcgcnaacgtccacgaccgcccgacgacgcnccccgacccccgcgcgcccgacgccgaccgccgccgccccgcgaccgacgcgcgcccg

SEQ ID NO: 9061 - DNA, 557 bp, Artificial Sequence
  chemically treated genomic DNA (Homo sapiens) CpG-island No: 9061
  unsure (5, 21, 27, 59)
tcgtncggaatttattagagngagatnatatcgggacgggtttacggagattttatttnaagaattaggtcgaacgttttagtcgcgggggtcgtaataatttagaagggacgttattgttaaggtcgtcgttagagcgtcgtatttttttcggatcggtattaataaattataaagcgtataaaatgttattatttcgttgcgggatttattattaaggagttatatagttatacggaatcgcgttcgttcgattagaggaatcggattagtacggttttttttaggttttattttttagcgaggttgtacgttacgtcggatagttatattttttcgggggtattaatcgcgagaatcgtttcgaattttatagataaaaaagattagttttttcgattcggggcgggtcgattagagttataatttatagcgtcggggaggggagatcggaaaaaagagtatcgggttatttaaacggttacgagagcgtaatttcggataggtaagtatacgttaattattcgaggggtttttcgtcggttttacggtatatt

SEQ ID NO: 9062 - DNA, 557 bp, Artificial Sequence
  chemically treated genomic DNA (Homo sapiens) CpG-island No: 9062
  unsure (499, 531, 537, 553)
aatataccgtaaaaccgacgaaaaacccctcgaataattaacgtatacttacctatccgaaattacgctctcgtaaccgtttaaataacccgatactcttttttccgatctcccctccccgacgctataaattataactctaatcgacccgccccgaatcgaaaaaactaatcttttttatctataaaattcgaaacgattctcgcgattaatacccccgaaaaaatataactatccgacgtaacgtacaacctcgctaaaaaataaaacctaaaaaaaaccgtactaatccgattcctctaatcgaacgaacgcgattccgtataactatataactccttaataataaatcccgcaacgaaataataacattttatacgctttataatttattaataccgatccgaaaaaaatacgacgctctaacgacgaccttaacaataacgtcccttctaaattattacgacccccgcgactaaaacgttcgacctaattcttnaaataaaatctccgtaaacccgtcccgatatnatctcnctctaataaattccgnacga

SEQ ID NO: 9063 - DNA, 557 bp, Artificial Sequence
  chemically treated genomic DNA (Homo sapiens) CpG-island No: 9063
  unsure (499, 531, 537, 553)
ggtgtgtcgtggggtcggcggggggtttttcgggtggttggcgtgtgtttgtttgttcggggttgcgttttcgtggtcgtttgggtggttcggtgttttttttttcggtttttttttttcggcgttgtgggttgtggttttggtcggttcgtttcgggtcgggggggttggttttttttgtttgtggggttcggggcggttttcgcggttggtgttttcgggggagtgtggttgttcggcgtgacgtgtagtttcgttggggggtggggtttggggggggtcgtgttggttcggtttttttggtcgggcgggcgcggtttcgtgtggttgtgtggttttttggtggtaggtttcgtaacggggtggtggtattttgtgcgttttgtggtttgttagtgtcggttcggggggggtgcggcgttttggcggcggttttagtagtggcgttttttttgggttgttgcgattttcgcgattggaacgttcggtttggtttttngggtggggttttcgtgggttcgtttcggtgtngttttnttttggtgggtttcgngcgg

SEQ ID NO: 9064 - DNA, 557 bp, Artificial Sequence
  chemically treated genomic DNA (Homo sapiens) CpG-island No: 9064
  unsure (5, 21, 27, 59)
ccgcncgaaacccaccaaaanaaaacnacaccgaaacgaacccacgaaaaccccacccnaaaaaccaaaccgaacgttccaatcgcgaaaatcgcaacaacccaaaaaaaacgccactactaaaaccgccgccaaaacgccgcaccccccccgaaccgacactaacaaaccacaaaacgcacaaaataccaccaccccgttacgaaacctaccaccaaaaaaccacacaaccacacgaaaccgcgcccgcccgaccaaaaaaaccgaaccaacacgaccccccccaaaccccaccccccaacgaaactacacgtcacgccgaacaaccacactcccccgaaaacaccaaccgcgaaaaccgccccgaaccccacaaacaaaaaaaaccaacccccccgacccgaaacgaaccgaccaaaaccacaacccacaacgccgaaaaaaaaaaaccgaaaaaaaaaacaccgaaccacccaaacgaccacgaaaacgcaaccccgaacaaacaaacacacgccaaccacccgaaaaaccccccgccgaccccacgacacacc

SEQ ID NO: 9065 - DNA, 1050 bp, Artificial Sequence
  chemically treated genomic DNA (Homo sapiens) CpG-island No: 9065
taaggttattacgcgtcgtggcgggggcgatcggtggcggtatgggttgtggcgcggtcgaggcggtttcgtgaagtcgaagatttgcgggtgtagattagaagttttaataagttttatttttcgggttcggagtagcgatttttagattgattcggcgttgaggtgtacggcgagaagttcgtttatttttataatttttcggtaagaggtaatttgcgaggggtttcgatcgttttcgttagtttttttcgaattcggcgtaattcgttgcgtatttagttattaggattttcgtcgcgacgttcgattttcgtgtttcgtttggtttttttcgtaggtgatttgtttcggcgttttcggtcgggggcgggcgcgtcgtttatttatttcgttttgtagtgggaattatttttcgtggggaaggaaagttaggttgcgggagggtcgcggggcgttaaggggtagcgggaaacgtagaggatgggggtttcgtttttagcgcgttcgtagtcggttcgtagggttcggggcgttacgcggaggtgtagttgtatttcggggatggggcggttaaggagtcgagaggttcggcgtttattagtcggggttttttatttacgttgtattgcgaggaggcggcggcggtagcgaaggaggaggaggcggcgttcggtcgttttcgtttagagttcggtagttatcgagtggtcgttcgcgttttcgtaggattcgttttttcggtttcgtagagcggtatatagggcgcgtcgcgttcgttcggtacgggtagtttagtcggttttacgtcgtcgttcgtaatagtagtcgcgggcggggtgtagttattttcgtgagcgtcgtagtcgttttattcggggcggggttcgcgggtatcggagagcggacggtcgagtacgaggggcgtgcgcgtagtttcgggtagggatttcgtttgtatcggggtggtttgtaagattgtcggggtaggtagtggggaggagaacgtttatatcgtttcgtgtttggcgtttgatgaattatttgtat

SEQ ID NO: 9066 - DNA, 1050 bp, Artificial Sequence
  chemically treated genomic DNA (Homo sapiens) CpG-island No: 9066
atacaaataattcatcaaacgccaaacacgaaacgatataaacgttctcctccccactacctaccccgacaatcttacaaaccaccccgatacaaacgaaatccctacccgaaactacgcgcacgcccctcgtactcgaccgtccgctctccgatacccgcgaaccccgccccgaataaaacgactacgacgctcacgaaaataactacaccccgcccgcgactactattacgaacgacgacgtaaaaccgactaaactacccgtaccgaacgaacgcgacgcgccctatataccgctctacgaaaccgaaaaaacgaatcctacgaaaacgcgaacgaccactcgataactaccgaactctaaacgaaaacgaccgaacgccgcctcctcctccttcgctaccgccgccgcctcctcgcaatacaacgtaaataaaaaaccccgactaataaacgccgaacctctcgactccttaaccgccccatccccgaaatacaactacacctccgcgtaacgccccgaaccctacgaaccgactacgaacgcgctaaaaacgaaacccccatcctctacgtttcccgctaccccttaacgccccgcgaccctcccgcaacctaactttccttccccacgaaaaataattcccactacaaaacgaaataaataaacgacgcgcccgcccccgaccgaaaacgccgaaacaaatcacctacgaaaaaaaccaaacgaaacacgaaaatcgaacgtcgcgacgaaaatcctaataactaaatacgcaacgaattacgccgaattcgaaaaaaactaacgaaaacgatcgaaacccctcgcaaattacctcttaccgaaaaattataaaaataaacgaacttctcgccgtacacctcaacgccgaatcaatctaaaaatcgctactccgaacccgaaaaataaaacttattaaaacttctaatctacacccgcaaatcttcgacttcacgaaaccgcctcgaccgcgccacaacccataccgccaccgatcgcccccgccacgacgcgtaataacctta

SEQ ID NO: 9067 - DNA, 1050 bp, Artificial Sequence
  chemically treated genomic DNA (Homo sapiens) CpG-island No: 9067
gtataagtagtttattaagcgttagatacggaacggtgtgagcgtttttttttttattgtttatttcggtaattttgtaggttatttcggtgtagacggggtttttgttcggagttgcgcgtacgtttttcgtgttcggtcgttcgtttttcggtgttcgcgggtttcgtttcgagtggggcggttgcggcgtttacggaggtggttgtatttcgttcgcggttgttgttgcggacggcggcgtgaggtcggttgagttgttcgtgtcgagcgagcgcggcgcgttttgtgtgtcgttttgcggagtcgaggaggcgggttttgcggggacgcgggcggttattcggtggttgtcgggttttgggcggggacggtcgggcgtcgtttttttttttttcgttgtcgtcgtcgttttttcgtagtgtagcgtgagtagggagtttcggttggtggacgtcgagtttttcggttttttggtcgttttattttcgaggtgtagttgtattttcgcgtggcgtttcgagttttgcgagtcggttgcggacgcgttgaggacggagtttttattttttgcgtttttcgttgttttttaacgtttcgcgattttttcgtagtttggttttttttttttacggaaaatggtttttattgtagggcgaggtgagtgggcggcgcgttcgttttcggtcgggggcgtcggggtaggttatttgcgggggaggttaggcggagtacggaggtcgggcgtcgcggcggggattttgatagttgggtgcgtagcgggttgcgtcggattcgggagaagttgacgggggcggtcggggtttttcgtaggttgttttttgtcgggagattgtgaaggtgagcgggtttttcgtcgtgtattttagcgtcgggttagtttgggagtcgttgtttcgggttcgagggatggggtttgttggggtttttggtttatattcgtaggttttcggttttacgaagtcgtttcggtcgcgttatagtttatatcgttatcggtcgttttcgttacggcgcgtggtgattttg

SEQ ID NO: 9068 - DNA, 1050 bp, Artificial Sequence
  chemically treated genomic DNA (Homo sapiens) CpG-island No: 9068
caaaatcaccacgcgccgtaacgaaaacgaccgataacgatataaactataacgcgaccgaaacgacttcgtaaaaccgaaaacctacgaatataaaccaaaaaccccaacaaaccccatccctcgaacccgaaacaacgactcccaaactaacccgacgctaaaatacacgacgaaaaacccgctcaccttcacaatctcccgacaaaaaacaacctacgaaaaaccccgaccgcccccgtcaacttctcccgaatccgacgcaacccgctacgcacccaactatcaaaatccccgccgcgacgcccgacctccgtactccgcctaacctcccccgcaaataacctaccccgacgcccccgaccgaaaacgaacgcgccgcccactcacctcgccctacaataaaaaccattttccgtaaaaaaaaaaaaccaaactacgaaaaaatcgcgaaacgttaaaaaacaacgaaaaacgcaaaaaataaaaactccgtcctcaacgcgtccgcaaccgactcgcaaaactcgaaacgccacgcgaaaatacaactacacctcgaaaataaaacgaccaaaaaaccgaaaaactcgacgtccaccaaccgaaactccctactcacgctacactacgaaaaaacgacgacgacaacgaaaaaaaaaaaaacgacgcccgaccgtccccgcccaaaacccgacaaccaccgaataaccgcccgcgtccccgcaaaacccgcctcctcgactccgcaaaacgacacacaaaacgcgccgcgctcgctcgacacgaacaactcaaccgacctcacgccgccgtccgcaacaacaaccgcgaacgaaatacaaccacctccgtaaacgccgcaaccgccccactcgaaacgaaacccgcgaacaccgaaaaacgaacgaccgaacacgaaaaacgtacgcgcaactccgaacaaaaaccccgtctacaccgaaataacctacaaaattaccgaaataaacaataaaaaaaaaaacgctcacaccgttccgtatctaacgcttaataaactacttatac

SEQ ID NO: 9069 - DNA, 729 bp, Artificial Sequence
  chemically treated genomic DNA (Homo sapiens) CpG-island No: 9069
gtcgtgatcgtgattttggtcggtcgttgtggttggggtcggttaagtcgaatatcggttatacgtaagcggcggcgggtgtggttggtgtgattaagatggtgatggcgatgcggtacgggtagttgttacgtacgttgtacgtggaatcgtcgtcgtcggaggtggattggtcggcggggacggtttaattttttacggagaatacgttttggtttaggagtggtcgtgttcgtcgggtgggggtgtcgtcgttcgggattagtggtattaacgcgtacgttattttcgaatagttttcgggagtgtcgagttagtttgcggggtcgggttcgggttttgtcgtggatgtttcggtggtgtcgtggatggtgtcgggtaaaatattcgaagcgttattcgcgtaggtaacggcgttgatgatttatttggacgagcgatttgatgttttttcgttggatgttgggtattcgttggcgttgatacggtcggcgttggatgagcgagcggtggtgttggggtcggatcgtgaaacgttgttgtgcggtgtgaaagcgttgtttgtcggttatgaggtttttgggttggtgatcggatttgttgcgggttgcgggtcgtatcgggttttgtgtttttcggttatggttggtagttggttgcggaattggtttggggtttttatcggttttttttcggtgttttttgttgttttttaaggagtttgtttcg

SEQ ID NO: 9070 - DNA, 729 bp, Artificial Sequence
  chemically treated genomic DNA (Homo sapiens) CpG-island No: 9070
cgaaacaaactccttaaaaaacaacaaaaaacaccgaaaaaaaaccgataaaaaccccaaaccaattccgcaaccaactaccaaccataaccgaaaaacacaaaacccgatacgacccgcaacccgcaacaaatccgatcaccaacccaaaaacctcataaccgacaaacaacgctttcacaccgcacaacaacgtttcacgatccgaccccaacaccaccgctcgctcatccaacgccgaccgtatcaacgccaacgaatacccaacatccaacgaaaaaacatcaaatcgctcgtccaaataaatcatcaacgccgttacctacgcgaataacgcttcgaatattttacccgacaccatccacgacaccaccgaaacatccacgacaaaacccgaacccgaccccgcaaactaactcgacactcccgaaaactattcgaaaataacgtacgcgttaataccactaatcccgaacgacgacacccccacccgacgaacacgaccactcctaaaccaaaacgtattctccgtaaaaaattaaaccgtccccgccgaccaatccacctccgacgacgacgattccacgtacaacgtacgtaacaactacccgtaccgcatcgccatcaccatcttaatcacaccaaccacacccgccgccgcttacgtataaccgatattcgacttaaccgaccccaaccacaacgaccgaccaaaatcacgatcacgac

SEQ ID NO: 9071 - DNA, 729 bp, Artificial Sequence
  chemically treated genomic DNA (Homo sapiens) CpG-island No: 9071
cggaataagttttttaaaaggtagtagggaatatcgggaaaaggtcggtaaaagttttaggttaatttcgtagttaattattaattatgatcggaaaatataaaattcgatgcggttcgtagttcgtaatagattcggttattaatttagaagttttatgatcggtagatagcgtttttatatcgtataataacgttttacggttcgattttagtattatcgttcgtttatttagcgtcgatcgtgttaacgttagcgagtatttaatatttagcgaggagatattaggtcgttcgtttagataggttattaacgtcgttgtttgcgcggatagcgtttcgggtgttttgttcgatattatttacggtattatcggaatatttacgatagaattcgaattcggtttcgtagattgattcggtattttcgggggttgttcgaggatgacgtgcgcgttagtattattgatttcgaacgacgatatttttattcgacgaatacgattatttttgggttagggcgtgtttttcgtaaggagttgaatcgttttcgtcgattaatttattttcggcgacggcgattttacgtgtaacgtgcgtggtagttgttcgtgtcgtatcgttattattattttgattatattagttatattcgtcgtcgtttgcgtatgatcgatgttcgatttgatcgattttaattataacggtcggttaggattacgattacggt

SEQ ID NO: 9072 - DNA, 729 bp, Artificial Sequence
  chemically treated genomic DNA (Homo sapiens) CpG-island No: 9072
accgtaatcgtaatcctaaccgaccgttataattaaaatcgatcaaatcgaacatcgatcatacgcaaacgacgacgaatataactaatataatcaaaataataataacgatacgacacgaacaactaccacgcacgttacacgtaaaatcgccgtcgccgaaaataaattaatcgacgaaaacgattcaactccttacgaaaaacacgccctaacccaaaaataatcgtattcgtcgaataaaaatatcgtcgttcgaaatcaataatactaacgcgcacgtcatcctcgaacaacccccgaaaataccgaatcaatctacgaaaccgaattcgaattctatcgtaaatattccgataataccgtaaataatatcgaacaaaacacccgaaacgctatccgcgcaaacaacgacgttaataacctatctaaacgaacgacctaatatctcctcgctaaatattaaatactcgctaacgttaacacgatcgacgctaaataaacgaacgataatactaaaatcgaaccgtaaaacgttattatacgatataaaaacgctatctaccgatcataaaacttctaaattaataaccgaatctattacgaactacgaaccgcatcgaattttatattttccgatcataattaataattaactacgaaattaacctaaaacttttaccgaccttttcccgatattccctactaccttttaaaaaacttattccg

SEQ ID NO: 9073 - DNA, 1065 bp, Artificial Sequence
  chemically treated genomic DNA (Homo sapiens) CpG-island No: 9073
tttgcgtcgtttttttaagggttcgcggggcgtgttatacgttattttcggggcggggcgagtaaggcggaggcggggtcggggtcggcgggggaggggagcgttaggttcgcgtaggttcgtcgggatcgtagtcgtcgagtcgagcgtttgattatatatggttaaagttgggggcgagtcgcgcgcgggatcgcgttttcgggttcggggcgttcgtaattatagcgcgtagggtaggcgcgagttggtttttgagtttcggtttcggatcgtttattttattttcggtacgttcggtgtcgtttttcggttttagttttcgggttcggtttcggcgaggtgtaattcgtagcgcgggtcggtttcggaggttttcggcgagcgcggcgcggtaataagtgggcgaggatgtcgtacgagattagtaagtgtcgcggcgcggggttttcgagcggtcgtcgcgttgtttcggtttcggttttcggtttttaggcgtcgtgcgggtggcgggggagttttcggcgcgggggaggggtgcgggcgtcggtcggaggcgtggcggggtcgttttcggtggtgtagggcgggattttcgacggggggtgcgtttttaagttggcgtcgtgggtcgagtcggaggagtttcgttgtttttaagggtttggttcggggcgcggattaggaagtcgcgcggtttttggcgttcgtggaaagtggaggtcgttttttcggcgtagttaataggtgatcggtcgagatcggttcggggtttttttttttttttgttttcgtcgttttcgttttgttttgatatgtttcgtcgtatttgtgttttcgtagagaaggtgttcgttagtttttcgtaggtggagaggggcgtttttaagattatcggcggcgattttaagggtaataattttttgtatattaatggaaagtgcgttattttaaggaatatcgacgtgagtattttttatttcgggcgcggttttgtttcggagttattttgggatgggataattcgtttttttttttattttttattttttgtttattggttcg

SEQ ID NO: 9074 - DNA, 1065 bp, Artificial Sequence
  chemically treated genomic DNA (Homo sapiens) CpG-island No: 9074
cgaaccaataaacaaaaaataaaaaataaaaaaaaaaacgaattatcccatcccaaaataactccgaaacaaaaccgcgcccgaaataaaaaatactcacgtcgatattccttaaaataacgcactttccattaatatacaaaaaattattacccttaaaatcgccgccgataatcttaaaaacgcccctctccacctacgaaaaactaacgaacaccttctctacgaaaacacaaatacgacgaaacatatcaaaacaaaacgaaaacgacgaaaacaaaaaaaaaaaaaaaccccgaaccgatctcgaccgatcacctattaactacgccgaaaaaacgacctccactttccacgaacgccaaaaaccgcgcgacttcctaatccgcgccccgaaccaaacccttaaaaacaacgaaactcctccgactcgacccacgacgccaacttaaaaacgcaccccccgtcgaaaatcccgccctacaccaccgaaaacgaccccgccacgcctccgaccgacgcccgcacccctcccccgcgccgaaaactcccccgccacccgcacgacgcctaaaaaccgaaaaccgaaaccgaaacaacgcgacgaccgctcgaaaaccccgcgccgcgacacttactaatctcgtacgacatcctcgcccacttattaccgcgccgcgctcgccgaaaacctccgaaaccgacccgcgctacgaattacacctcgccgaaaccgaacccgaaaactaaaaccgaaaaacgacaccgaacgtaccgaaaataaaataaacgatccgaaaccgaaactcaaaaaccaactcgcgcctaccctacgcgctataattacgaacgccccgaacccgaaaacgcgatcccgcgcgcgactcgcccccaactttaaccatatataatcaaacgctcgactcgacgactacgatcccgacgaacctacgcgaacctaacgctcccctcccccgccgaccccgaccccgcctccgccttactcgccccgccccgaaaataacgtataacacgccccgcgaacccttaaaaaaacgacgcaaa

SEQ ID NO: 9075 - DNA, 1065 bp, Artificial Sequence
  chemically treated genomic DNA (Homo sapiens) CpG-island No: 9075
cgggttaatgggtaggaggtgagaagtggagaggaaggcgaattattttattttaaggtggtttcggagtagaatcgcgttcggggtagggggtatttacgtcgatgttttttaggatgacgtattttttattggtgtatagaaaattgttgtttttagggtcgtcgtcgatgattttggagacgtttttttttatttgcgggaggttggcgaatattttttttgcggagatataaatgcggcggggtatgttagggtagggcggggacggcggggatagaagggagaaggagtttcggatcggtttcggtcggttatttgttgattgcgtcgggagggcggtttttattttttacgagcgttaggaatcgcgcgattttttggttcgcgtttcgggttaggtttttgggggtagcggggttttttcggttcggtttacggcgttaatttgggggcgtatttttcgtcgggggtttcgttttgtattatcgagggcggtttcgttacgttttcggtcggcgttcgtatttttttttcgcgtcgaggattttttcgttattcgtacggcgtttaggggtcggggatcggggtcggggtagcgcggcggtcgttcgggggtttcgcgtcgcggtatttattgatttcgtacggtattttcgtttatttgttatcgcgtcgcgttcgtcgagagttttcggggtcggttcgcgttgcgaattatatttcgtcgaggtcgagttcggggattggagtcggaaggcggtatcgggcgtgtcgggagtggagtgggcggttcgaggtcggggtttagaggttagttcgcgtttgttttgcgcgttgtggttgcggacgtttcgaattcggaagcgcggtttcgcgcgcggttcgtttttagttttgattatatatagttaagcgttcggttcggcggttgcggtttcggcgagtttgcgcggatttggcgtttttttttttcgtcggtttcggtttcgttttcgttttgttcgtttcgtttcggaagtgacgtatagtacgtttcgcgggtttttgaaaaggcggcgtaga

SEQ ID NO: 9076 - DNA, 1065 bp, Artificial Sequence
  chemically treated genomic DNA (Homo sapiens) CpG-island No: 9076
tctacgccgccttttcaaaaacccgcgaaacgtactatacgtcacttccgaaacgaaacgaacaaaacgaaaacgaaaccgaaaccgacgaaaaaaaaaaacgccaaatccgcgcaaactcgccgaaaccgcaaccgccgaaccgaacgcttaactatatataatcaaaactaaaaacgaaccgcgcgcgaaaccgcgcttccgaattcgaaacgtccgcaaccacaacgcgcaaaacaaacgcgaactaacctctaaaccccgacctcgaaccgcccactccactcccgacacgcccgataccgccttccgactccaatccccgaactcgacctcgacgaaatataattcgcaacgcgaaccgaccccgaaaactctcgacgaacgcgacgcgataacaaataaacgaaaataccgtacgaaatcaataaataccgcgacgcgaaacccccgaacgaccgccgcgctaccccgaccccgatccccgacccctaaacgccgtacgaataacgaaaaaatcctcgacgcgaaaaaaaaatacgaacgccgaccgaaaacgtaacgaaaccgccctcgataatacaaaacgaaacccccgacgaaaaatacgcccccaaattaacgccgtaaaccgaaccgaaaaaaccccgctacccccaaaaacctaacccgaaacgcgaaccaaaaaatcgcgcgattcctaacgctcgtaaaaaataaaaaccgccctcccgacgcaatcaacaaataaccgaccgaaaccgatccgaaactccttctcccttctatccccgccgtccccgccctaccctaacataccccgccgcatttatatctccgcaaaaaaaatattcgccaacctcccgcaaataaaaaaaaacgtctccaaaatcatcgacgacgaccctaaaaacaacaattttctatacaccaataaaaaatacgtcatcctaaaaaacatcgacgtaaataccccctaccccgaacgcgattctactccgaaaccaccttaaaataaaataattcgccttcctctccacttctcacctcctacccattaacccg

SEQ ID NO: 9077 - DNA, 635 bp, Artificial Sequence
  chemically treated genomic DNA (Homo sapiens) CpG-island No: 9077
acgtcggaatagatggttggtgtcgttgttttggtggggatggtggtagtagaaaatatcgattttttcgatcgtatgtaattggaatacgttatcgttatttgtcgttaggtaaagtcgtttttcgtagtcggacgttagttttttgacgtttcgcgttaggtaaagttagcgttaatgacgcggatcggttacgtaaatatttggcgcgttttggtttgacgtgggaagtcgtgtaggattagtatagttttagttgaatatggtggttcgttagtatttgtattacgtttattggcggcggggcgtcggtgtagacggtatttattatgttgatgttgtttatattgattatcgcgttacggttaaatttcgagtgatcgataattagtataacgtggcgcgagtttttaataatggcgcgtttggtgcgaatttcgtggtaatcgaattttagtagcgagtcgtcgttatcgatgtcgtttatttttagaatgtcgaaattaaggcggaattgggagataaaatcgagcgtcgtttcgttaatgatttcgttatcgcggttgcgtaattcgttatcggcgagaatgatgcgaaaatttttttttattattaattttacgatttaataagga

SEQ ID NO: 9078 - DNA, 635 bp, Artificial Sequence
  chemically treated genomic DNA (Homo sapiens) CpG-island No: 9078
tccttattaaatcgtaaaattaataataaaaaaaaattttcgcatcattctcgccgataacgaattacgcaaccgcgataacgaaatcattaacgaaacgacgctcgattttatctcccaattccgccttaatttcgacattctaaaaataaacgacatcgataacgacgactcgctactaaaattcgattaccacgaaattcgcaccaaacgcgccattattaaaaactcgcgccacgttatactaattatcgatcactcgaaatttaaccgtaacgcgataatcaatataaacaacatcaacataataaataccgtctacaccgacgccccgccgccaataaacgtaatacaaatactaacgaaccaccatattcaactaaaactatactaatcctacacgacttcccacgtcaaaccaaaacgcgccaaatatttacgtaaccgatccgcgtcattaacgctaactttacctaacgcgaaacgtcaaaaaactaacgtccgactacgaaaaacgactttacctaacgacaaataacgataacgtattccaattacatacgatcgaaaaaatcgatattttctactaccaccatccccaccaaaacaacgacaccaaccatctattccgacgt

SEQ ID NO: 9079 - DNA, 635 bp, Artificial Sequence
  chemically treated genomic DNA (Homo sapiens) CpG-island No: 9079
tttttgttgaatcgtgaggttgatggtaaaagaagattttcgtattattttcgtcggtggcgaattacgtagtcgcgatggcgggattattggcgaagcgacgttcgattttattttttagtttcgttttgatttcggtattttggggataagcggtatcgatagcgacggttcgttgttggagttcgattattacgaagttcgtattaaacgcgttattattgagaattcgcgttacgttatgttggttgtcgattattcgaaatttggtcgtaacgcgatggttaatatgggtagtattagtatggtagatgtcgtttatatcgacgtttcgtcgttagtaagcgtgatgtaggtgttgacggattattatatttaattggagttgtgttgattttgtacggttttttacgttagattaaaacgcgttaggtatttgcgtagtcgattcgcgttattgacgttggttttgtttggcgcgaaacgttaaaaagttggcgttcggttgcggaaagcgattttgtttggcggtagatagcgataacgtgttttagttgtatacggtcgaagagatcgatgttttttattgttattatttttattaaaatagcgatattagttatttgtttcggcgt

SEQ ID NO: 9080 - DNA, 635 bp, Artificial Sequence
  chemically treated genomic DNA (Homo sapiens) CpG-island No: 9080
acgccgaaacaaataactaatatcgctattttaataaaaataataacaataaaaaacatcgatctcttcgaccgtatacaactaaaacacgttatcgctatctaccgccaaacaaaatcgctttccgcaaccgaacgccaactttttaacgtttcgcgccaaacaaaaccaacgtcaataacgcgaatcgactacgcaaatacctaacgcgttttaatctaacgtaaaaaaccgtacaaaatcaacacaactccaattaaatataataatccgtcaacacctacatcacgcttactaacgacgaaacgtcgatataaacgacatctaccatactaatactacccatattaaccatcgcgttacgaccaaatttcgaataatcgacaaccaacataacgtaacgcgaattctcaataataacgcgtttaatacgaacttcgtaataatcgaactccaacaacgaaccgtcgctatcgataccgcttatccccaaaataccgaaatcaaaacgaaactaaaaaataaaatcgaacgtcgcttcgccaataatcccgccatcgcgactacgtaattcgccaccgacgaaaataatacgaaaatcttcttttaccatcaacctcacgattcaacaaaaa

SEQ ID NO: 9081 - DNA, 522 bp, Artificial Sequence
  chemically treated genomic DNA (Homo sapiens) CpG-island No: 9081
aagtgcgtgtgttggggcgagcgggagcgtgcgaggatgggtataggatagaggtagagttatttacgtcgtcgcggttttacgttgggcgatagagtttttagtttttttttaatggtggcgggtcgtcggagttttgattttcgggaatttttgtcgttgttgttttgcgattttaagtaggttcgtaaagttttttgggttggcgtcgcgtttcgattcgttgatttcggcgcggtaagggagggggtcgggattggggtcgggaggacgtcgtttgtttcgggggatttcgggcgtcgcggagatatttttgtttttttttgggggcgcgcggtttcggcgggggtggtttcgcgttcgtagggtgaaggttcggtacgtcgggcgttttgtagtttgggagttttatttcggggatgtcggatttgaattgaatttaagaaagggttttgaagtttcgtttttcgatgtaattaaggtttcggttcggaagtttttaaaaatttataagggtttttg

SEQ ID NO: 9082 - DNA, 522 bp, Artificial Sequence
  chemically treated genomic DNA (Homo sapiens) CpG-island No: 9082
caaaaacccttataaatttttaaaaacttccgaaccgaaaccttaattacatcgaaaaacgaaacttcaaaaccctttcttaaattcaattcaaatccgacatccccgaaataaaactcccaaactacaaaacgcccgacgtaccgaaccttcaccctacgaacgcgaaaccacccccgccgaaaccgcgcgcccccaaaaaaaaacaaaaatatctccgcgacgcccgaaatcccccgaaacaaacgacgtcctcccgaccccaatcccgaccccctcccttaccgcgccgaaatcaacgaatcgaaacgcgacgccaacccaaaaaactttacgaacctacttaaaatcgcaaaacaacaacgacaaaaattcccgaaaatcaaaactccgacgacccgccaccattaaaaaaaaactaaaaactctatcgcccaacgtaaaaccgcgacgacgtaaataactctacctctatcctatacccatcctcgcacgctcccgctcgccccaacacacgcactt

SEQ ID NO: 9083 - DNA, 522 bp, Artificial Sequence
  chemically treated genomic DNA (Homo sapiens) CpG-island No: 9083
tagaagtttttgtaaatttttgggggttttcggatcggggttttggttatatcggggggcggaattttaaggtttttttttaggtttaatttaaattcggtattttcgaagtgagatttttaaattgtagagcgttcgacgtgtcgaatttttattttgcgagcgcggggttattttcgtcggagtcgcgcgtttttaggaggaaataaaagtgttttcgcggcgttcggagtttttcggagtagacggcgttttttcggttttagtttcggtttttttttttgtcgcgtcgaggttagcgagtcggggcgcggcgttagtttaggaaattttacgaatttgtttggggtcgtaggatagtagcggtaagggttttcggagattagagtttcggcgattcgttattattgaaggggaattggaggttttgtcgtttagcgtggggtcgcggcggcgtgggtggttttgtttttattttgtgtttattttcgtacgttttcgttcgttttagtatacgtattt

SEQ ID NO: 9084 - DNA, 522 bp, Artificial Sequence
  chemically treated genomic DNA (Homo sapiens) CpG-island No: 9084
aaatacgtatactaaaacgaacgaaaacgtacgaaaataaacacaaaataaaaacaaaaccacccacgccgccgcgaccccacgctaaacgacaaaacctccaattccccttcaataataacgaatcgccgaaactctaatctccgaaaacccttaccgctactatcctacgaccccaaacaaattcgtaaaatttcctaaactaacgccgcgccccgactcgctaacctcgacgcgacaaaaaaaaaaaccgaaactaaaaccgaaaaaacgccgtctactccgaaaaactccgaacgccgcgaaaacacttttatttcctcctaaaaacgcgcgactccgacgaaaataaccccgcgctcgcaaaataaaaattcgacacgtcgaacgctctacaatttaaaaatctcacttcgaaaataccgaatttaaattaaacctaaaaaaaaaccttaaaattccgccccccgatataaccaaaaccccgatccgaaaacccccaaaaatttacaaaaacttcta

SEQ ID NO: 9085 - DNA, 606 bp, Artificial Sequence
  chemically treated genomic DNA (Homo sapiens) CpG-island No: 9085
gggggtagcgaggttgcgggcgtgatttcggaagatttaaatcgttaaggtgatcggagtaatttgaaaaaggaaataaatttttttcgagtcgtgttcgcgtggttttggggcggacggttgcgttcgaaagggtattttttaaaagaagggttttaggaacgtaggggtgtgggttttttcgggaggcgcgcggtcggggtagtgtcgtaaagcggttattagttcgttttgtattcgcggttaagcgcggttttagagtttcggcggcggttagagtttaggttatattttttttgtagtgagattcgcggtcgttgattggcgtatcgtggattaatgggcgcgtcggggcggtttcggttgttagcgcgcgtcgtagtagcgtcggtagtagtttgtttttttttgcgttgagtttcgtagttagcgtagttttttcgggaagcgcggcggtcgttttcgagcgtagttttgttcggttcgttagtcgcgcgtttcggcgttcgcgttttacggttatagttttgtttttatttagtttacggagtatgtgtagattcgtaggcgttaaggtgtttttagttcgggggttttttgggtagt

SEQ ID NO: 9086 - DNA, 606 bp, Artificial Sequence
  chemically treated genomic DNA (Homo sapiens) CpG-island No: 9086
actacccaaaaaacccccgaactaaaaacaccttaacgcctacgaatctacacatactccgtaaactaaataaaaacaaaactataaccgtaaaacgcgaacgccgaaacgcgcgactaacgaaccgaacaaaactacgctcgaaaacgaccgccgcgcttcccgaaaaaactacgctaactacgaaactcaacgcaaaaaaaaacaaactactaccgacgctactacgacgcgcgctaacaaccgaaaccgccccgacgcgcccattaatccacgatacgccaatcaacgaccgcgaatctcactacaaaaaaaatataacctaaactctaaccgccgccgaaactctaaaaccgcgcttaaccgcgaatacaaaacgaactaataaccgctttacgacactaccccgaccgcgcgcctcccgaaaaaacccacacccctacgttcctaaaacccttcttttaaaaaataccctttcgaacgcaaccgtccgccccaaaaccacgcgaacacgactcgaaaaaaatttatttcctttttcaaattactccgatcaccttaacgatttaaatcttccgaaatcacgcccgcaacctcgctaccccc

SEQ ID NO: 9087 - DNA, 606 bp, Artificial Sequence
  chemically treated genomic DNA (Homo sapiens) CpG-island No: 9087
gttgtttagaaggttttcggattgagagtattttagcgtttgcgggtttgtatatgtttcgtgagttagatagaggtaaggttgtggtcgtggggcgcgggcgtcgggacgcgcggttggcgggtcgggtagggttgcgttcgggagcggtcgtcgcgtttttcgggaaggttgcgttggttgcggggtttagcgtaggggaggataggttgttgtcggcgttgttgcggcgcgcgttgatagtcggggtcgtttcggcgcgtttattggtttacggtgcgttaattagcggtcgcgggttttattgtaaagagggtgtggtttaaattttggtcgtcgtcgaaattttggggtcgcgtttggtcgcgagtataaagcgggttggtggtcgttttgcggtattgtttcggtcgcgcgtttttcgggggggtttatatttttgcgtttttgaaattttttttttgaaaaatgttttttcgaacgtaatcgttcgttttagagttacgcgggtacggttcgagggaagtttgtttttttttttaaattgtttcggttattttaacggtttgagtttttcggagttacgttcgtagtttcgttgttttt

SEQ ID NO: 9088 - DNA, 606 bp, Artificial Sequence
  chemically treated genomic DNA (Homo sapiens) CpG-island No: 9088
aaaaacaacgaaactacgaacgtaactccgaaaaactcaaaccgttaaaataaccgaaacaatttaaaaaaaaaaacaaacttccctcgaaccgtacccgcgtaactctaaaacgaacgattacgttcgaaaaaacatttttcaaaaaaaaaatttcaaaaacgcaaaaatataaacccccccgaaaaacgcgcgaccgaaacaataccgcaaaacgaccaccaacccgctttatactcgcgaccaaacgcgaccccaaaatttcgacgacgaccaaaatttaaaccacaccctctttacaataaaacccgcgaccgctaattaacgcaccgtaaaccaataaacgcgccgaaacgaccccgactatcaacgcgcgccgcaacaacgccgacaacaacctatcctcccctacgctaaaccccgcaaccaacgcaaccttcccgaaaaacgcgacgaccgctcccgaacgcaaccctacccgacccgccaaccgcgcgtcccgacgcccgcgccccacgaccacaaccttacctctatctaactcacgaaacatatacaaacccgcaaacgctaaaatactctcaatccgaaaaccttctaaacaac

SEQ ID NO: 9089 - DNA, 544 bp, Artificial Sequence
  chemically treated genomic DNA (Homo sapiens) CpG-island No: 9089
aaatagttaagtatttttttattaatttcgattattttttttttttcgcgtttatcggcggtagtggcgaagggtttattgaagcgtcgggtgttacgcggggcggttcgcgggttagttagggggcggggaatttattagtcgtcgatttttttttttatttcgttttcggtcgtcgcggttttagcggttttcgcgttgcgaggagcgggcgtttggatatagggcgagttgtttgatttggcggaggcggggaggtcggcggggagcgagcgagggaggtacgagagttgggtagcgcgggcgtcggtttttagggtagggttttcgcgcgtagtagcggtttcggggcgggggcgaggcgatcgcgggcgtcggggatgtttggaggggtcgcggtcgagaggagattcgggattggacggttagatttgtcgggcgcgcgggtaggtgtttcggttttttttttttttttttttttttttttttttttgtttttttttttttcgttttgaagtaagatgagcgtgatgttgtggcgttg

SEQ ID NO: 9090 - DNA, 544 bp, Artificial Sequence
  chemically treated genomic DNA (Homo sapiens) CpG-island No: 9090
caacgccacaacatcacgctcatcttacttcaaaacgaaaaaaaaaaaaacaaaaaaaaaaaaaaaaaaaaaaaaaaaaaaaaaaccgaaacacctacccgcgcgcccgacaaatctaaccgtccaatcccgaatctcctctcgaccgcgacccctccaaacatccccgacgcccgcgatcgcctcgcccccgccccgaaaccgctactacgcgcgaaaaccctaccctaaaaaccgacgcccgcgctacccaactctcgtacctccctcgctcgctccccgccgacctccccgcctccgccaaatcaaacaactcgccctatatccaaacgcccgctcctcgcaacgcgaaaaccgctaaaaccgcgacgaccgaaaacgaaataaaaaaaaaaatcgacgactaataaattccccgccccctaactaacccgcgaaccgccccgcgtaacacccgacgcttcaataaacccttcgccactaccgccgataaacgcgaaaaaaaaaaaataatcgaaattaataaaaaaatacttaactattt

SEQ ID NO: 9091 - DNA, 544 bp, Artificial Sequence
  chemically treated genomic DNA (Homo sapiens) CpG-island No: 9091
tagcgttatagtattacgtttattttattttagggcgaggaaggaaggggtagaggaaaaaggaggaggggaaaaaaaaaaaaagtcgaagtatttgttcgcgcgttcggtaggtttggtcgtttagtttcgggttttttttcggtcgcggtttttttaggtattttcggcgttcgcggtcgtttcgttttcgtttcggggtcgttgttgcgcgcggggattttattttggagatcggcgttcgcgttgtttagttttcgtgtttttttcgttcgtttttcgtcggttttttcgttttcgttaaattaaataattcgttttgtgtttaagcgttcgtttttcgtagcgcggaggtcgttggggtcgcggcggtcgagggcggggtgggggggggggtcggcggttggtgagtttttcgttttttagttggttcgcgggtcgtttcgcgtggtattcggcgttttagtgggtttttcgttattgtcgtcggtgggcgcgaagggggaaagatggtcggagttggtgggaggatatttaattattt

SEQ ID NO: 9092 - DNA, 544 bp, Artificial Sequence
  chemically treated genomic DNA (Homo sapiens) CpG-island No: 9092
aaataattaaatatcctcccaccaactccgaccatctttcccccttcgcgcccaccgacgacaataacgaaaaacccactaaaacgccgaataccacgcgaaacgacccgcgaaccaactaaaaaacgaaaaactcaccaaccgccgacccccccccccaccccgccctcgaccgccgcgaccccaacgacctccgcgctacgaaaaacgaacgcttaaacacaaaacgaattatttaatttaacgaaaacgaaaaaaccgacgaaaaacgaacgaaaaaaacacgaaaactaaacaacgcgaacgccgatctccaaaataaaatccccgcgcgcaacaacgaccccgaaacgaaaacgaaacgaccgcgaacgccgaaaatacctaaaaaaaccgcgaccgaaaaaaaacccgaaactaaacgaccaaacctaccgaacgcgcgaacaaatacttcgactttttttttttttcccctcctcctttttcctctaccccttccttcctcgccctaaaataaaataaacgtaatactataacgcta

SEQ ID NO: 9093 - DNA, 502 bp, Artificial Sequence
  chemically treated genomic DNA (Homo sapiens) CpG-island No: 9093
gcggcggttgtttcgtggtatttcggaaatttgcgttagtttttggcgagtacgcgtttcgtgcgcgtttaggtttacgtttaggtttagagattatttcgcgtagggtcgttagggcggtttttcgttagtagagggcgtcgggtagcgtcgtttttcggggcgcgcgcggacgtttttttagtatgtttcgttttcgtcgacgtcgattcggaagttgtcgtcggcggtcggtcggcggttagtttttatataggttcggttgcggagcgtagtcgtttaggtttacggcggtagagggtcgaggttttcggagaggatcgcgatgagtttattttaggtcggggttgagtgtgggcgcgcggttttcggcggcgtgtgatttagttttcgtcggtcgttgttcgttgcgtgtgtaagtgttcgtgggttttagggttttgtagcgttcgtttcgaggtttcgaagaggtttttcgtttggggtagtgtgaaggttatag

SEQ ID NO: 9094 - DNA, 502 bp, Artificial Sequence
  chemically treated genomic DNA (Homo sapiens) CpG-island No: 9094
ctataaccttcacactaccccaaacgaaaaacctcttcgaaacctcgaaacgaacgctacaaaaccctaaaacccacgaacacttacacacgcaacgaacaacgaccgacgaaaactaaatcacacgccgccgaaaaccgcgcgcccacactcaaccccgacctaaaataaactcatcgcgatcctctccgaaaacctcgaccctctaccgccgtaaacctaaacgactacgctccgcaaccgaacctatataaaaactaaccgccgaccgaccgccgacgacaacttccgaatcgacgtcgacgaaaacgaaacatactaaaaaaacgtccgcgcgcgccccgaaaaacgacgctacccgacgccctctactaacgaaaaaccgccctaacgaccctacgcgaaataatctctaaacctaaacgtaaacctaaacgcgcacgaaacgcgtactcgccaaaaactaacgcaaatttccgaaataccacgaaacaaccgccgc

SEQ ID NO: 9095 - DNA, 502 bp, Artificial Sequence
  chemically treated genomic DNA (Homo sapiens) CpG-island No: 9095
ttgtggtttttatattgttttaggcggaaggttttttcggggtttcggggcgggcgttgtaaggttttggggtttacggatatttatatacgtagcgggtagcggtcggcgaagattgggttatacgtcgtcgggaatcgcgcgtttatatttagtttcgatttgaagtggatttatcgcggtttttttcgggagtttcggttttttgtcgtcgtaaatttgggcgattgcgtttcgtagtcgggtttgtgtgaaggttgatcgtcggtcggtcgtcggcgatagttttcgggtcgacgtcgacgggagcgaggtatgttgggagagcgttcgcgcgcgtttcgaggagcggcgttgttcggcgttttttgttggcgaggagtcgttttgacggttttgcgcgaggtagtttttgagtttgagcgtgagtttgagcgcgtacggggcgcgtgttcgttaagagttggcgtagattttcgaagtgttacgaaatagtcgtcgt

SEQ ID NO: 9096 - DNA, 502 bp, Artificial Sequence
  chemically treated genomic DNA (Homo sapiens) CpG-island No: 9096
acgacgactatttcgtaacacttcgaaaatctacgccaactcttaacgaacacgcgccccgtacgcgctcaaactcacgctcaaactcaaaaactacctcgcgcaaaaccgtcaaaacgactcctcgccaacaaaaaacgccgaacaacgccgctcctcgaaacgcgcgcgaacgctctcccaacatacctcgctcccgtcgacgtcgacccgaaaactatcgccgacgaccgaccgacgatcaaccttcacacaaacccgactacgaaacgcaatcgcccaaatttacgacgacaaaaaaccgaaactcccgaaaaaaaccgcgataaatccacttcaaatcgaaactaaatataaacgcgcgattcccgacgacgtataacccaatcttcgccgaccgctacccgctacgtatataaatatccgtaaaccccaaaaccttacaacgcccgccccgaaaccccgaaaaaaccttccgcctaaaacaatataaaaaccacaa

SEQ ID NO: 9097 - DNA, 950 bp, Artificial Sequence
  chemically treated genomic DNA (Homo sapiens) CpG-island No: 9097
  unsure (26, 386, 433, 471, 768, 860, 915, 919)
gtttcgttttttacggtttagaagtngggtcgtatttttcgattagagttggggtattttaggaaatgcgggtgatcgtagttttttagattaaatttgttttttttattaacgagttggcgtatttatcgttttcgagtgtttcggtaagttagcgggagagtggcgtcgggttgcgagttttttgttttatcgagtgggggtagaaagtggttagaggcgcgtttcgcggggcgttgtaaatagattagagagcgttgcggaaagattattcgagaaaagagacggaaggcgggcgttcgggcgagggttcggggcgcgggagggtaagttcggtcggggcgggttagtagagtaataattgttatttatttgttcgtaaaggnaatcgcggggtcgcggcgtaggtacgtatttatttttcgtttttcgntttttcgtttttcgtttcgggaggaagcggaggggcgncggtgtaaatagagcggcggtcgtgatgttagtcggttatatggagttttttatggttcgggatggttttcggcgggcgggtagttgcggtagttgttgttgtggttcgggcggcggcggcgcggcggcggtagagggggtttcggggtcggattattcgttttttttgcgtttttcgtatcgcggtttaaatgatgtattttgtgatcgtagcgatgaaaggtgagttcgggcgtttcgtcggggtcgggtgggttggcggtttcggggggcggggaggagggcgcgtaggggganggggtgggcgcgtttgttcgaacgtacgtattgttcggggttcggcgcgggggttttgttagggttttttgggttatcgtcgcggcgttatnttgagttcggttacgggatcggtttgttttcgattggggggtaaaggcgtacggnggtnggatttttttttgttgtttttttcggttttt

SEQ ID NO: 9098 - DNA, 950 bp, Artificial Sequence
  chemically treated genomic DNA (Homo sapiens) CpG-island No: 9098
  unsure (32, 36, 91, 183, 480, 518, 565, 925)
aaaaaccgaaaaaaacaacaaaaaaaaatccnaccnccgtacgcctttaccccccaatcgaaaacaaaccgatcccgtaaccgaactcaanataacgccgcgacgataacccaaaaaaccctaacaaaacccccgcgccgaaccccgaacaatacgtacgttcgaacaaacgcgcccaccccntccccctacgcgccctcctccccgccccccgaaaccgccaacccacccgaccccgacgaaacgcccgaactcacctttcatcgctacgatcacaaaatacatcatttaaaccgcgatacgaaaaacgcaaaaaaaacgaataatccgaccccgaaaccccctctaccgccgccgcgccgccgccgcccgaaccacaacaacaactaccgcaactacccgcccgccgaaaaccatcccgaaccataaaaaactccatataaccgactaacatcacgaccgccgctctatttacaccgncgcccctccgcttcctcccgaaacgaaaaacgaaaaancgaaaaacgaaaaataaatacgtacctacgccgcgaccccgcgattncctttacgaacaaataaataacaattattactctactaacccgccccgaccgaacttaccctcccgcgccccgaaccctcgcccgaacgcccgccttccgtctcttttctcgaataatctttccgcaacgctctctaatctatttacaacgccccgcgaaacgcgcctctaaccactttctacccccactcgataaaacaaaaaactcgcaacccgacgccactctcccgctaacttaccgaaacactcgaaaacgataaatacgccaactcgttaataaaaaaaacaaatttaatctaaaaaactacgatcacccgcatttcctaaaataccccaactctaatcgaaaaatacgacccnacttctaaaccgtaaaaaacgaaac

SEQ ID NO: 9099 - DNA, 950 bp, Artificial Sequence
  chemically treated genomic DNA (Homo sapiens) CpG-island No: 9099
  unsure (32, 36, 91, 183, 480, 518, 565, 925)
aggagtcggagggggtagtagagggggatttnattntcgtgcgtttttgttttttaatcggaggtaggtcgatttcgtggtcgggtttagngtggcgtcgcggcggtggtttagaaggttttggtagggttttcgcgtcgagtttcgggtagtacgtgcgttcgggtaggcgcgtttattttntttttttgcgcgttttttttttcgtttttcggagtcgttagtttattcggtttcggcggggcgttcgggtttattttttatcgttgcgattataaaatatattatttaagtcgcggtgcggagagcgtagggagagcggatggttcgatttcggagttttttttgtcgtcgtcgcgtcgtcgtcgttcgagttatagtagtagttgtcgtagttgttcgttcgtcgagagttatttcgagttataagaggttttatgtgatcggttgatattacggtcgtcgttttgtttatatcgncgttttttcgttttttttcggggcgggaggcgggaggncgggaggcgggaggtaggtgcgtgtttgcgtcgcggtttcgcggttntttttgcgggtaggtgagtagtagttgttgttttgttggttcgtttcggtcgggtttgttttttcgcgtttcgggttttcgttcgggcgttcgtttttcgttttttttttcgagtaattttttcgtagcgttttttagtttgtttgtagcgtttcgcggaacgcgtttttgattattttttgtttttattcggtggggtaagaggttcgtaattcgacgttattttttcgttggtttgtcggagtattcgggggcgataaatgcgttagttcgttggtggaaaagataggtttggtttggggagttacggttattcgtattttttagagtgttttagttttaatcggaaggtacggtttnatttttgggtcgtggagaacgaagt

SEQ ID NO: 9100 - DNA, 950 bp, Artificial Sequence
  chemically treated genomic DNA (Homo sapiens) CpG-island No: 9100
  unsure (26, 386, 433, 471, 768, 860, 915, 919)
acttcgttctccacgacccaaaaatnaaaccgtaccttccgattaaaactaaaacactctaaaaaatacgaataaccgtaactccccaaaccaaacctatcttttccaccaacgaactaacgcatttatcgcccccgaatactccgacaaaccaacgaaaaaataacgtcgaattacgaacctcttaccccaccgaataaaaacaaaaaataatcaaaaacgcgttccgcgaaacgctacaaacaaactaaaaaacgctacgaaaaaattactcgaaaaaaaaaacgaaaaacgaacgcccgaacgaaaacccgaaacgcgaaaaaacaaacccgaccgaaacgaaccaacaaaacaacaactactactcacctacccgcaaaaanaaccgcgaaaccgcgacgcaaacacgcacctacctcccgcctcccgncctcccgcctcccgccccgaaaaaaaacgaaaaaacgncgatataaacaaaacgacgaccgtaatatcaaccgatcacataaaacctcttataactcgaaataactctcgacgaacgaacaactacgacaactactactataactcgaacgacgacgacgcgacgacgacaaaaaaaactccgaaatcgaaccatccgctctccctacgctctccgcaccgcgacttaaataatatattttataatcgcaacgataaaaaataaacccgaacgccccgccgaaaccgaataaactaacgactccgaaaaacgaaaaaaaaaacgcgcaaaaaaanaaaataaacgcgcctacccgaacgcacgtactacccgaaactcgacgcgaaaaccctaccaaaaccttctaaaccaccgccgcgacgccacnctaaacccgaccacgaaatcgacctacctccgattaaaaaacaaaaacgcacganaatnaaatccccctctactaccccctccgactcct

SEQ ID NO: 9101 - DNA, 602 bp, Artificial Sequence
  chemically treated genomic DNA (Homo sapiens) CpG-island No: 9101
  unsure (360, 435, 453, 461, 474, 480, 507, 516, 528, 550, 574, 592)
agtcgtcgcgtttcggaaaggaaggggagggtttgcggagtttagaggaagtcggggacgttcgcggtcggtttttagggttcgtattcgggatagtttcggtttaggtcggggaggcgtcgcggtcgggtagggtcgtgcgtgcgcgttgtcgcgatgttattttcggggattggttagcgttttaggttttgcgttttgtttttgcgttttcgagcgttttagcggtcgtcggtcgggtaagtgtcgtaggttcgcgttgtgtttcgcgttgtgtttcgtcgcggttattttcgaaagcgcgcgggtcggagcgagacgggcgtttcgagcgtgttaagacgttttgggcggtttagnggagtcgcggcgtatttcgtttgatattttggttggtggatggaggtggggaggaattcggtagtttacgggatntcgcgggtaggggcgganggttagantcgtggtgagggntcgatngggcgcgggttagtcgcggttaatttntgtcgggtnggttcggttttntcgtttttattaggatttcgtnattcgggtcgggggcgggaggggnagggggatttggttggangggaggattg

SEQ ID NO: 9102 - DNA, 602 bp, Artificial Sequence
  chemically treated genomic DNA (Homo sapiens) CpG-island No: 9102
  unsure (11, 29, 53, 75, 87, 96, 123, 129, 142, 150, 168, 243)
caatcctcccntccaaccaaatccccctncccctcccgcccccgacccgaatnacgaaatcctaataaaaacganaaaaccgaaccnacccgacanaaattaaccgcgactaacccgcgcccnatcganccctcaccacgantctaaccntccgcccctacccgcganatcccgtaaactaccgaattcctccccacctccatccaccaaccaaaatatcaaacgaaatacgccgcgactccnctaaaccgcccaaaacgtcttaacacgctcgaaacgcccgtctcgctccgacccgcgcgctttcgaaaataaccgcgacgaaacacaacgcgaaacacaacgcgaacctacgacacttacccgaccgacgaccgctaaaacgctcgaaaacgcaaaaacaaaacgcaaaacctaaaacgctaaccaatccccgaaaataacatcgcgacaacgcgcacgcacgaccctacccgaccgcgacgcctccccgacctaaaccgaaactatcccgaatacgaaccctaaaaaccgaccgcgaacgtccccgacttcctctaaactccgcaaaccctccccttcctttccgaaacgcgacgact

SEQ ID NO: 9103 - DNA, 602 bp, Artificial Sequence
  chemically treated genomic DNA (Homo sapiens) CpG-island No: 9103
  unsure (11, 29, 53, 75, 87, 96, 123, 129, 142, 150, 168, 243)
tagtttttttntttaattaaatttttttntttttttcgttttcggttcgggtnacggagttttgatgagggcggnaaggtcgggttngttcggtanggattggtcgcgattaattcgcgtttngtcggntttttattacggntttaattnttcgtttttgttcgcggnatttcgtgggttgtcgagtttttttttatttttatttattagttaaagtgttaagcggggtgcgtcgcggttttnttgggtcgtttagagcgttttggtacgttcgaggcgttcgtttcgtttcggttcgcgcgttttcggaagtggtcgcggcgggatatagcgcgggatatagcgcggatttgcggtatttgttcggtcggcggtcgttgaggcgttcggggacgtaggggtagggcgtaaggtttggggcgttgattagttttcggggatgatatcgcgataacgcgtacgtacggttttgttcggtcgcggcgttttttcgatttaggtcggagttgtttcgggtgcgggttttggggatcggtcgcgggcgttttcggttttttttgaatttcgtagattttttttttttttttcgaagcgcggcgatt

SEQ ID NO: 9104 - DNA, 602 bp, Artificial Sequence
  chemically treated genomic DNA (Homo sapiens) CpG-island No: 9104
  unsure (360, 435, 453, 461, 474, 480, 507, 516, 528, 550, 574, 592)
aatcgccgcgcttcgaaaaaaaaaaaaaaaatctacgaaattcaaaaaaaaccgaaaacgcccgcgaccgatccccaaaacccgcacccgaaacaactccgacctaaatcgaaaaaacgccgcgaccgaacaaaaccgtacgtacgcgttatcgcgatatcatccccgaaaactaatcaacgccccaaaccttacgccctacccctacgtccccgaacgcctcaacgaccgccgaccgaacaaataccgcaaatccgcgctatatcccgcgctatatcccgccgcgaccacttccgaaaacgcgcgaaccgaaacgaaacgaacgcctcgaacgtaccaaaacgctctaaacgacccaanaaaaccgcgacgcaccccgcttaacactttaactaataaataaaaataaaaaaaaactcgacaacccacgaaatnccgcgaacaaaaacgaanaattaaanccgtaataaaaanccgacnaaacgcgaattaatcgcgaccaatccntaccgaacnaacccgaccttnccgccctcatcaaaactccgtnacccgaaccgaaaacgaaaaaaanaaaaaaatttaattaaanaaaaaaacta

SEQ ID NO: 9105 - DNA, 841 bp, Artificial Sequence
  chemically treated genomic DNA (Homo sapiens) CpG-island No: 9105
gttttcgtcgagttagtgggggttttcgagaaggcgtatttcgcggcgtcgggaattaggtagtcgcgttgttgtgggtagggagacgcgcgtagttttttggggttttttagttttcgggggtcggtttggaggttttacggaagcgtagaggagagtcgggcgttcgcggggaggggttgtttatttggggcggtggtaggaggtaggatttgaaggtgggtttgggcggtttgagggagaatatggtgtcgtcgttttttcgtttcgttttcgtcgcgggttagtggtagcgtcgacgttttcgggcgtaaagtttttagtgcggtcgtttaggttttttttgcggttagtcgagtcgggcggattgacgggcggggatacggcgtagcgttcgttcgagcggggaggggtcgggtatagttaggtcgacgcgggcgtcggggtttattttcggaaggggttcggtgtttcgtttcgagagacggcgcgcgtaaggtcgcggttcgtcgttttttgatcgtgtttcgtgttagtgtcggaacgtagcggtggcgttaggtgttcgttggcgggtttttagtcggggcgtcgcggggagcggagttcgacggttattttaagagcgcggtttttggagggtttttttacggcggttcgtaggggttaggcggttcgcgggggtttacggcggtttgcgggggttacggcggtagcggtggttgtttgggacggcggcgcggggcgttttttggtcgggttgtagttttgggatagtttttttgatttatatatgggtcgatttcgtttttcggtttgggcgagtattgttttgaagttt

SEQ ID NO: 9106 - DNA, 841 bp, Artificial Sequence
  chemically treated genomic DNA (Homo sapiens) CpG-island No: 9106
aaacttcaaaacaatactcgcccaaaccgaaaaacgaaatcgacccatatataaatcaaaaaaactatcccaaaactacaacccgaccaaaaaacgccccgcgccgccgtcccaaacaaccaccgctaccgccgtaacccccgcaaaccgccgtaaacccccgcgaaccgcctaacccctacgaaccgccgtaaaaaaaccctccaaaaaccgcgctcttaaaataaccgtcgaactccgctccccgcgacgccccgactaaaaacccgccaacgaacacctaacgccaccgctacgttccgacactaacacgaaacacgatcaaaaaacgacgaaccgcgaccttacgcgcgccgtctctcgaaacgaaacaccgaaccccttccgaaaataaaccccgacgcccgcgtcgacctaactatacccgacccctccccgctcgaacgaacgctacgccgtatccccgcccgtcaatccgcccgactcgactaaccgcaaaaaaaacctaaacgaccgcactaaaaactttacgcccgaaaacgtcgacgctaccactaacccgcgacgaaaacgaaacgaaaaaacgacgacaccatattctccctcaaaccgcccaaacccaccttcaaatcctacctcctaccaccgccccaaataaacaacccctccccgcgaacgcccgactctcctctacgcttccgtaaaacctccaaaccgacccccgaaaactaaaaaaccccaaaaaactacgcgcgtctccctacccacaacaacgcgactacctaattcccgacgccgcgaaatacgccttctcgaaaacccccactaactcgacgaaaac

SEQ ID NO: 9107 - DNA, 841 bp, Artificial Sequence
  chemically treated genomic DNA (Homo sapiens) CpG-island No: 9107
gagttttaaaataatgttcgtttaggtcggagggcgaagtcggtttatgtgtaagttaagggaattgttttaggattgtagttcggttagaagacgtttcgcgtcgtcgttttaggtagttatcgttgtcgtcgtggttttcgtaggtcgtcgtaggttttcgcgggtcgtttgatttttgcgggtcgtcgtagaaggattttttagaggtcgcgtttttgagatggtcgtcgggtttcgtttttcgcggcgtttcggttgagggttcgttagcgggtatttggcgttatcgttgcgtttcggtattagtacgggatacggttagggagcggcgggtcgcggttttgcgcgcgtcgtttttcggggcggggtatcgggtttttttcggggatgggtttcggcgttcgcgtcggtttggttgtgttcggttttttttcgttcgggcgggcgttgcgtcgtattttcgttcgttagttcgttcggttcggttggtcgtagaaagggtttgggcggtcgtattgagagttttacgttcggaggcgtcggcgttgttattggttcgcgacgggaacggggcgaaaaggcggcggtattatgtttttttttaagtcgtttaaatttatttttaggttttattttttgttatcgttttaggtaaataattttttttcgcgagcgttcgatttttttttgcgttttcgtggagtttttaggtcgattttcgggaattggaggattttaggaggttgcgcgcgtttttttgtttatagtagcgcggttgtttgattttcggcgtcgcgaaatgcgttttttcgggagtttttattggttcggcgaaaat

SEQ ID NO: 9108 - DNA, 841 bp, Artificial Sequence
  chemically treated genomic DNA (Homo sapiens) CpG-island No: 9108
attttcgccgaaccaataaaaactcccgaaaaaacgcatttcgcgacgccgaaaatcaaacaaccgcgctactataaacaaaaaaacgcgcgcaacctcctaaaatcctccaattcccgaaaatcgacctaaaaactccacgaaaacgcaaaaaaaaatcgaacgctcgcgaaaaaaaattatttacctaaaacgataacaaaaaataaaacctaaaaataaatttaaacgacttaaaaaaaaacataataccgccgccttttcgccccgttcccgtcgcgaaccaataacaacgccgacgcctccgaacgtaaaactctcaatacgaccgcccaaaccctttctacgaccaaccgaaccgaacgaactaacgaacgaaaatacgacgcaacgcccgcccgaacgaaaaaaaaccgaacacaaccaaaccgacgcgaacgccgaaacccatccccgaaaaaaacccgataccccgccccgaaaaacgacgcgcgcaaaaccgcgacccgccgctccctaaccgtatcccgtactaataccgaaacgcaacgataacgccaaatacccgctaacgaaccctcaaccgaaacgccgcgaaaaacgaaacccgacgaccatctcaaaaacgcgacctctaaaaaatccttctacgacgacccgcaaaaatcaaacgacccgcgaaaacctacgacgacctacgaaaaccacgacgacaacgataactacctaaaacgacgacgcgaaacgtcttctaaccgaactacaatcctaaaacaattcccttaacttacacataaaccgacttcgccctccgacctaaacgaacattattttaaaactc

SEQ ID NO: 9109 - DNA, 619 bp, Artificial Sequence
  chemically treated genomic DNA (Homo sapiens) CpG-island No: 9109
  unsure (487, 509, 541)
gtttttttcgttttagcgtcggttggggcgtcgggaatttcgttttgtagttttttagttgatagttcgaggggtttttcgagtttcgggtagggtggggacggaggcgcggcgggtattgtgttcgggttgcggggattttaattcgtcggcgttcgttcgggattttcgagcgagattagagttcgatttatatcgcgtatttattcggttcggtgcgggagtaatacggcgaggaaaggtagagttagtatttatcgcggtttggcgttttagttgtttcggcggtcgtcggttttttagtggcgttcgggggtgtatcgttcgttagcggtagttcgggtttttggagtttcgcgatttcggtgttgttttgaggtcgtatttcgcggtacgcgttttattagcggtcggtgtcgtttggcgttagtagtagcgtttgggttgtcgttttttcggcgggcgatggcgtttatgcgtatgcgtngttcggtttattcgtatttttnttttaaggagatcgcgcgcgtttttcgttggnttttttaatttggggagattcgttgtttttttggtcgggttgtggtgtttatagttggttttaaggcgtttaattttt

SEQ ID NO: 9110 - DNA, 619 bp, Artificial Sequence
  chemically treated genomic DNA (Homo sapiens) CpG-island No: 9110
  unsure (79, 111, 133)
aaaaattaaacgccttaaaaccaactataaacaccacaacccgaccaaaaaaacaacgaatctccccaaattaaaaaanccaacgaaaaacgcgcgcgatctccttaaaanaaaaatacgaataaaccgaacnacgcatacgcataaacgccatcgcccgccgaaaaaacgacaacccaaacgctactactaacgccaaacgacaccgaccgctaataaaacgcgtaccgcgaaatacgacctcaaaacaacaccgaaatcgcgaaactccaaaaacccgaactaccgctaacgaacgatacacccccgaacgccactaaaaaaccgacgaccgccgaaacaactaaaacgccaaaccgcgataaatactaactctacctttcctcgccgtattactcccgcaccgaaccgaataaatacgcgatataaatcgaactctaatctcgctcgaaaatcccgaacgaacgccgacgaattaaaatccccgcaacccgaacacaatacccgccgcgcctccgtccccaccctacccgaaactcgaaaaacccctcgaactatcaactaaaaaactacaaaacgaaattcccgacgccccaaccgacgctaaaacgaaaaaaac

SEQ ID NO: 9111 - DNA, 619 bp, Artificial Sequence
  chemically treated genomic DNA (Homo sapiens) CpG-island No: 9111
  unsure (79, 111, 133)
gagggttggacgttttagagttagttgtgggtattatagttcgattagggaggtagcgggtttttttaggttaagaggnttagcggaggacgcgcgcggtttttttggggngagggtgcgggtgggtcgggtngcgtatgcgtatgggcgttatcgttcgtcggaagagcggtagtttaggcgttgttgttggcgttagacggtatcggtcgttggtagagcgcgtgtcgcgagatgcggttttaggatagtatcggggtcgcggagttttaggagttcgggttgtcgttaacggacgatgtattttcgggcgttattgaggagtcggcggtcgtcgaggtagttggggcgttagatcgcggtaggtgttggttttgttttttttcgtcgtgttgttttcgtatcgagtcgggtgagtgcgcggtgtggatcgggttttggtttcgttcgggggtttcgagcgggcgtcggcgggttggggttttcgtaattcgggtatagtgttcgtcgcgttttcgtttttattttgttcggggttcgggaaatttttcgagttgttagttggggggttgtaaagcggaattttcggcgttttagtcggcgttaagacggaagaaat

SEQ ID NO: 9112 - DNA, 619 bp, Artificial Sequence
  chemically treated genomic DNA (Homo sapiens) CpG-island No: 9112
  unsure (487, 509, 541)
atttcttccgtcttaacgccgactaaaacgccgaaaattccgctttacaaccccccaactaacaactcgaaaaatttcccgaaccccgaacaaaataaaaacgaaaacgcgacgaacactatacccgaattacgaaaaccccaacccgccgacgcccgctcgaaacccccgaacgaaaccaaaacccgatccacaccgcgcactcacccgactcgatacgaaaacaacacgacgaaaaaaaacaaaaccaacacctaccgcgatctaacgccccaactacctcgacgaccgccgactcctcaataacgcccgaaaatacatcgtccgttaacgacaacccgaactcctaaaactccgcgaccccgatactatcctaaaaccgcatctcgcgacacgcgctctaccaacgaccgataccgtctaacgccaacaacaacgcctaaactaccgctcttccgacgaacgataacgcccatacgcatacgcnacccgacccacccgcaccctcnccccaaaaaaaccgcgcgcgtcctccgctaancctcttaacctaaaaaaacccgctacctccctaatcgaactataatacccacaactaactctaaaacgtccaaccctc

SEQ ID NO: 9113 - DNA, 566 bp, Artificial Sequence
  chemically treated genomic DNA (Homo sapiens) CpG-island No: 9113
ttggcggcggtggttgcggggtttattttcgtttttttttagtttcgtcgagtagtgggagggtaagtgttcgagacgttgttttttgtttcggtagtattcggttagaaggcgttttcgtcgttatttaggcgttgtatggtgagggtttagcggttagtttttttggggcgtttggcggtttttttcgtttcgcggcgttttgcgtttttcgttttattttcgttttttttcgttgtttttcggtcgttttttatttgtgttgtatttcgtgttatttttttgatacgtttacgtcgacgattaacgatcgttgtaggttcgggtcgttgtttggtcgttgtagggttcgcgcgttttttggaggttttggacgtcgtttggggcgtttcgacggttgggtgagatttagtagtttggttttagaattgaatttaggttgggtgagttttagcgggtttttagtcgtttgcgtggagttttagtcgggattgagtttcgaattttattttgtttttgtttttttgtttttttttcgagtatttcgtgtgtgttgggttgtgggt

SEQ ID NO: 9114 - DNA, 566 bp, Artificial Sequence
  chemically treated genomic DNA (Homo sapiens) CpG-island No: 9114
acccacaacccaacacacacgaaatactcgaaaaaaaaacaaaaaaacaaaaacaaaataaaattcgaaactcaatcccgactaaaactccacgcaaacgactaaaaacccgctaaaactcacccaacctaaattcaattctaaaaccaaactactaaatctcacccaaccgtcgaaacgccccaaacgacgtccaaaacctccaaaaaacgcgcgaaccctacaacgaccaaacaacgacccgaacctacaacgatcgttaatcgtcgacgtaaacgtatcaaaaaaataacacgaaatacaacacaaataaaaaacgaccgaaaaacaacgaaaaaaaacgaaaataaaacgaaaaacgcaaaacgccgcgaaacgaaaaaaaccgccaaacgccccaaaaaaactaaccgctaaaccctcaccatacaacgcctaaataacgacgaaaacgccttctaaccgaatactaccgaaacaaaaaacaacgtctcgaacacttaccctcccactactcgacgaaactaaaaaaaaacgaaaataaaccccgcaaccaccgccgccaa

SEQ ID NO: 9115 - DNA, 566 bp, Artificial Sequence
  chemically treated genomic DNA (Homo sapiens) CpG-island No: 9115
gtttatagtttagtatatacgaggtattcggggaagaaatagggagataaaggtaaagtaaagttcgaggtttagtttcggttagaattttacgtaaacgattaggagttcgttaaagtttatttagtttgaatttaattttgaaattagattgttgaattttatttagtcgtcgggacgttttagacggcgtttaaagtttttaggggacgcgcggattttataacggttaggtagcggttcgggtttgtagcggtcgttggtcgtcggcgtaagcgtgttaggaaaataatacgaaatgtagtataggtgggaagcggtcggaaggtagcgggggagagcggaaataaggcggagagcgtagggcgtcgcggggcggaagaggtcgttagacgttttaaagagattggtcgttgggtttttattatgtagcgtttgggtgacggcgagggcgttttttggtcggatgttgtcggggtaggaagtagcgtttcggatatttgtttttttattgttcgacggggttggggaaggacgagggtgaatttcgtagttatcgtcgttag

SEQ ID NO: 9116 - DNA, 566 bp, Artificial Sequence
  chemically treated genomic DNA (Homo sapiens) CpG-island No: 9116
ctaacgacgataactacgaaattcaccctcgtccttccccaaccccgtcgaacaataaaaaaacaaatatccgaaacgctacttcctaccccgacaacatccgaccaaaaaacgccctcgccgtcacccaaacgctacataataaaaacccaacgaccaatctctttaaaacgtctaacgacctcttccgccccgcgacgccctacgctctccgccttatttccgctctcccccgctaccttccgaccgcttcccacctatactacatttcgtattattttcctaacacgcttacgccgacgaccaacgaccgctacaaacccgaaccgctacctaaccgttataaaatccgcgcgtcccctaaaaactttaaacgccgtctaaaacgtcccgacgactaaataaaattcaacaatctaatttcaaaattaaattcaaactaaataaactttaacgaactcctaatcgtttacgtaaaattctaaccgaaactaaacctcgaactttactttacctttatctccctatttcttccccgaatacctcgtatatactaaactataaac

SEQ ID NO: 9117 - DNA, 518 bp, Artificial Sequence
  chemically treated genomic DNA (Homo sapiens) CpG-island No: 9117
  unsure (126, 461)
gggcgtttgtttacgggtttgtacgggagcgtatcgtcgttcggttcgggggcgttcgtggcgttgggagcgagagtttcggcggcggttgcgggtagggcgcgcggagcgggttgtaggtgcggngcggaggtcggcggggggcgtcgggggcgttgcgcggtttttggcggcgggggcgcgcggggtggcgggggaggtcgaggcgtcggtagtttcgcgtcggcggttggaagcgggcgggttgtacgggcggttcgagtgcggggattttagtttttcgttttcgtgagcgtcgtttttgttatttgttgttaagttatcggattggggatgcggggggcggggtgcggggagaggaaagcgtcgcgggtggtacggtgtttttggcgatagagtagatggattcgaaagagattcgaggtgatttcgggttgggtaggatattttcgggagttgtntagcggtttttagcgggcgtttttaggattttttgttattgcgagtagcgtttgttt

SEQ ID NO: 9118 - DNA, 518 bp, Artificial Sequence
  chemically treated genomic DNA (Homo sapiens) CpG-island No: 9118
  unsure (58, 393)
aaacaaacgctactcgcaataacaaaaaatcctaaaaacgcccgctaaaaaccgctanacaactcccgaaaatatcctacccaacccgaaatcacctcgaatctctttcgaatccatctactctatcgccaaaaacaccgtaccacccgcgacgctttcctctccccgcaccccgccccccgcatccccaatccgataacttaacaacaaataacaaaaacgacgctcacgaaaacgaaaaactaaaatccccgcactcgaaccgcccgtacaacccgcccgcttccaaccgccgacgcgaaactaccgacgcctcgacctcccccgccaccccgcgcgcccccgccgccaaaaaccgcgcaacgcccccgacgccccccgccgacctccgcnccgcacctacaacccgctccgcgcgccctacccgcaaccgccgccgaaactctcgctcccaacgccacgaacgcccccgaaccgaacgacgatacgctcccgtacaaacccgtaaacaaacgccc

SEQ ID NO: 9119 - DNA, 518 bp, Artificial Sequence
  chemically treated genomic DNA (Homo sapiens) CpG-island No: 9119
  unsure (58, 393)
gagtaggcgttgttcgtagtgataaggggttttagaggcgttcgttgagagtcgttgngtaattttcgggggtgttttgtttagttcgaagttatttcgggtttttttcgggtttatttattttgtcgttagaggtatcgtgttattcgcggcgttttttttttttcgtatttcgtttttcgtatttttagttcggtgatttggtagtaggtggtaggggcggcgtttacgagggcgaggggttggggttttcgtattcgagtcgttcgtgtagttcgttcgtttttagtcgtcggcgcgaagttgtcggcgtttcggtttttttcgttatttcgcgcgttttcgtcgttaagggtcgcgtagcgttttcggcgtttttcgtcggttttcgtntcgtatttgtagttcgtttcgcgcgttttgttcgtagtcgtcgtcgaagttttcgtttttagcgttacggacgttttcgggtcgagcggcggtgcgttttcgtgtagattcgtggatagacgttt

SEQ ID NO: 9120 - DNA, 518 bp, Artificial Sequence
  chemically treated genomic DNA (Homo sapiens) CpG-island No: 9120
  unsure (126, 461)
aaacgtctatccacgaatctacacgaaaacgcaccgccgctcgacccgaaaacgtccgtaacgctaaaaacgaaaacttcgacgacgactacgaacaaaacgcgcgaaacgaactacaaatacganacgaaaaccgacgaaaaacgccgaaaacgctacgcgacccttaacgacgaaaacgcgcgaaataacgaaaaaaaccgaaacgccgacaacttcgcgccgacgactaaaaacgaacgaactacacgaacgactcgaatacgaaaaccccaacccctcgccctcgtaaacgccgcccctaccacctactaccaaatcaccgaactaaaaatacgaaaaacgaaatacgaaaaaaaaaaaacgccgcgaataacacgatacctctaacgacaaaataaataaacccgaaaaaaacccgaaataacttcgaactaaacaaaacacccccgaaaattacncaacgactctcaacgaacgcctctaaaaccccttatcactacgaacaacgcctactc

SEQ ID NO: 9121 - DNA, 840 bp, Artificial Sequence
  chemically treated genomic DNA (Homo sapiens) CpG-island No: 9121
  unsure (21, 221, 275, 286, 373, 435, 456, 463, 490, 592..593, 607)
  unsure (609, 612, 633, 655, 657, 662, 667, 698, 705, 707, 716, 742)
  unsure (750, 754, 776, 800, 812)
tcggggcgtttttttttcgtntcgttttttcgtttttttcgttttcgcgtttcgtttcgttttcgcgtttttcgttttttttcgttttttttttttttttttttttgtcgtttttttagttaacgattttttttttttcgtttcgtttttttttttttttcgttttttttttttcgtgttcggggtcgttatttttttttttttttttcgttcgcgcgttntgtttttttttttttttttatcgtttttagcggttagcgattcgttatcgattntttcgattttngttcgttgtttgggtttggtcgtcgttcgttcgttttcgttgtgtggcgtttttcgtatatatacgtgcgcgcgttcggttcgtcgntgcgttcggtatttgcgggacgtttttttcgtcgttttttcgtcggttttttcgcgatattntttttacgtcgtttttttcgntcgtttntcgtattcgttacgaaaatacgtacgntagttgttttttttttttcggggttttcgtcgtgttcgttcgtgtcgcgttcgtttcgtaagttaattcgcgtatcgtagtatagagcgatacgttatattnncgaagaaagtttgngncgncgcgtagtgagtgcgacgagntagtttttttggtgatttaatntnttgtncgatnttttttcgcgtacgagcggcggtagtttttntaggtgntntcgtttcgnttttatcgtaacgcggcgtttcgcgngaatttantggntcgttagcgatatttttatatntatattaatgtagagattattgtnttttcgcgtttnttcgcgttcgcgaggtagtttttagtta

SEQ ID NO: 9122 - DNA, 840 bp, Artificial Sequence
  chemically treated genomic DNA (Homo sapiens) CpG-island No: 9122
  unsure (29, 41, 65, 87, 91, 99, 125, 134, 136, 143, 174, 179, 184)
  unsure (186, 208, 229, 232, 234, 248..249, 351, 378, 385, 406, 468)
  unsure (555, 566, 620, 820)
taactaaaaactacctcgcgaacgcgaanaaacgcgaaaanacaataatctctacattaatatanatataaaaatatcgctaacganccantaaattcncgcgaaacgccgcgttacgataaaancgaaacganancacctanaaaaactaccgccgctcgtacgcgaaaaaanatcgnacaananattaaatcaccaaaaaaactanctcgtcgcactcactacgcgncgncncaaactttcttcgnnaatataacgtatcgctctatactacgatacgcgaattaacttacgaaacgaacgcgacacgaacgaacacgacgaaaaccccgaaaaaaaaaaaacaactancgtacgtattttcgtaacgaatacganaaacgancgaaaaaaacgacgtaaaaanaatatcgcgaaaaaaccgacgaaaaaacgacgaaaaaaacgtcccgcaaataccgaacgcancgacgaaccgaacgcgcgcacgtatatatacgaaaaacgccacacaacgaaaacgaacgaacgacgaccaaacccaaacaacgaacnaaaatcgaaanaatcgataacgaatcgctaaccgctaaaaacgataaaaaaaaaaaaaaaaacanaacgcgcgaacgaaaaaaaaaaaaaaaaataacgaccccgaacacgaaaaaaaaaaaacgaaaaaaaaaaaaaaacgaaacgaaaaaaaaaaaatcgttaactaaaaaaacgacaaaaaaaaaaaaaaaaaaaaaacgaaaaaaaacgaaaaacgcgaaaacgaaacgaaacgcgaaaacgaaaaaaacgaaaaaacganacgaaaaaaaaacgccccga

SEQ ID NO: 9123 - DNA, 840 bp, Artificial Sequence
  chemically treated genomic DNA (Homo sapiens) CpG-island No: 9123
  unsure (29, 41, 65, 87, 91, 99, 125, 134, 136, 143, 174, 179, 184)
  unsure (186, 208, 229, 232, 234, 248..249, 351, 378, 385, 406, 468)
  unsure (555, 566, 620, 820)
tgattgggggttgtttcgcgggcgcggangggcgcggaagngtagtagtttttgtattagtgtgngtgtgggggtgtcgttggcggnttantagatttncgcggggcgtcgcgttacgatggagncggagcganantatttgngggggttgtcgtcgttcgtgcgcgggaggangtcgngtaangngttgggttattaggagagttanttcgtcgtatttattgcgcgncgntntagatttttttcgnnggtgtggcgtgtcgttttatgttgcgatgcgcgggttaatttgcgagacgaacgcggtacgagcgagtacggcggagatttcgggggagaggaggtaattgncgtgcgtattttcgtgacgggtacganagacggncgggggaggcgacgtggagangatgtcgcgagagggtcggcggagaggcggcggaaggggcgtttcgtaggtgtcgagcgtancggcgggtcgggcgcgcgtacgtatgtgtgcgggaggcgttatatagcgggggcgggcgagcggcggttaggtttaggtagcggatnaggatcgaagnaatcggtggcgggtcgttggtcgttagagacggtggggagagaggggggggtanggcgcgcgagcgggaggagggaggaagagtggcggtttcgggtacggggaggggggggcggggaagggggggggacgaggcgagggggaggaggtcgttggttgggagggcggtaggaggggggaaggggggggggcgaggaggaacgaggaacgcgggaacggggcggggcgcgggggcgggaggaacgggggggcganacgggggggggacgtttcgg

SEQ ID NO: 9124 - DNA, 840 bp, Artificial Sequence
  chemically treated genomic DNA (Homo sapiens) CpG-island No: 9124
  unsure (21, 221, 275, 286, 373, 435, 456, 463, 490, 592..593, 607)
  unsure (609, 612, 633, 655, 657, 662, 667, 698, 705, 707, 716, 742)
  unsure (750, 754, 776, 800, 812)
ccgaaacgtcccccccccgtntcgcccccccgttcctcccgcccccgcgccccgccccgttcccgcgttcctcgttcctcctcgccccccccccttcccccctcctaccgccctcccaaccaacgacctcctccccctcgcctcgtcccccccccttccccgcccccccctccccgtacccgaaaccgccactcttcctccctcctcccgctcgcgcgccntacccccccctctctccccaccgtctctaacgaccaacgacccgccaccgattncttcgatcctnatccgctacctaaacctaaccgccgctcgcccgcccccgctatataacgcctcccgcacacatacgtacgcgcgcccgacccgccgntacgctcgacacctacgaaacgccccttccgccgcctctccgccgaccctctcgcgacatcntctccacgtcgcctcccccgnccgtctntcgtacccgtcacgaaaatacgcacgncaattacctcctctcccccgaaatctccgccgtactcgctcgtaccgcgttcgtctcgcaaattaacccgcgcatcgcaacataaaacgacacgccacaccnncgaaaaaaatctanancgncgcgcaataaatacgacgaantaactctcctaataacccaacncnttacncgacntcctcccgcgcacgaacgacgacaacccccncaaatantntcgctccgnctccatcgtaacgcgacgccccgcgnaaatctantaanccgccaacgacacccccacacncacactaatacaaaaactactacncttccgcgcccntccgcgcccgcgaaacaacccccaatca

SEQ ID NO: 9125 - DNA, 1057 bp, Artificial Sequence
  chemically treated genomic DNA (Homo sapiens) CpG-island No: 9125
  unsure (89)
ggttttcggcgcgggcggacgggcggtttatttggaggcgttggtttcggttagtcggttgtttatgatgtttagcgcgtttacgtcgntcgagaagtcgttttggcgcgtgttgacgtatacgttgcgcgggtagtcgttggtcgttttcgatagttgtttttgtagtagcgttagcgatattttgttggaggtcgtgaggtcgcgtatggagatgagttcgttcgagaggcggcggttttcggcgtcgttgtcgcggttcgcggggtcggtatcgagcgcggttaggcggcgcgtagtcgtgagtttggggtgatggtattgcgtcgggttaggggcgcgttaggagtcgggtagtagcgcgcgtagtagcggtagtttagtttgcgtagtatttagttgagtatttgtttgatgaggatggagatgacgttgaagagcgagtaaatgtagtatacgtcgagtaggatgaagaggaagttgtttaggcggtagagtttttggtttcggtaggcggcgtgttggttgtttattaggttttcgaagtcgatggtgttgaaggtgacgaagtagaagtagagcgagtttacgtagttttagttttttacgttggtgtatatggtcgaggcgtagtaggatagtagtacggcgaataggtttaggatgagtagtacgtggtatatcgagggtttttagttcgttaggttgtcggttttcgagagcgcggagtcgcggcggaaggtggcgggtagtaggtcgttgcggcgtagttggcgttttcggtaggcgcgtatgatgaaggttagtagcgagatgatgcgttttaggaagaggttgaagaataggatggttttagcgtagtcgaatagttcgtaggcgatgaggaaggttttttcgtttatcgtcgcgggggtggttatgtcgaaatttgtggagatagggtagggttagcgcggttttggtcgcgtaggtggtttttattgggcgagggtggggggtgtgggggcgggtgtatgtaggttttgcgcggtttttatttcgagtggtattatttagg

SEQ ID NO: 9126 - DNA, 1057 bp, Artificial Sequence
  chemically treated genomic DNA (Homo sapiens) CpG-island No: 9126
  unsure (969)
cctaaataataccactcgaaataaaaaccgcgcaaaacctacatacacccgcccccacaccccccaccctcgcccaataaaaaccacctacgcgaccaaaaccgcgctaaccctaccctatctccacaaatttcgacataaccacccccgcgacgataaacgaaaaaaccttcctcatcgcctacgaactattcgactacgctaaaaccatcctattcttcaacctcttcctaaaacgcatcatctcgctactaaccttcatcatacgcgcctaccgaaaacgccaactacgccgcaacgacctactacccgccaccttccgccgcgactccgcgctctcgaaaaccgacaacctaacgaactaaaaaccctcgatataccacgtactactcatcctaaacctattcgccgtactactatcctactacgcctcgaccatatacaccaacgtaaaaaactaaaactacgtaaactcgctctacttctacttcgtcaccttcaacaccatcgacttcgaaaacctaataaacaaccaacacgccgcctaccgaaaccaaaaactctaccgcctaaacaacttcctcttcatcctactcgacgtatactacatttactcgctcttcaacgtcatctccatcctcatcaaacaaatactcaactaaatactacgcaaactaaactaccgctactacgcgcgctactacccgactcctaacgcgcccctaacccgacgcaataccatcaccccaaactcacgactacgcgccgcctaaccgcgctcgataccgaccccgcgaaccgcgacaacgacgccgaaaaccgccgcctctcgaacgaactcatctccatacgcgacctcacgacctccaacaaaatatcgctaacgctactacaaaaacaactatcgaaaacgaccaacgactacccgcgcaacgtatacgtcaacacgcgccaaaacgacttctcgancgacgtaaacgcgctaaacatcataaacaaccgactaaccgaaaccaacgcctccaaataaaccgcccgtccgcccgcgccgaaaacc

SEQ ID NO: 9127 - DNA, 1057 bp, Artificial Sequence
  chemically treated genomic DNA (Homo sapiens) CpG-island No: 9127
  unsure (969)
tttgagtggtgttattcgagataggagtcgcgtaagatttgtatgtattcgtttttatattttttattttcgtttagtgaggattatttgcgcggttaggatcgcgttgattttgttttgtttttataggtttcggtatgattattttcgcgacggtgggcgggaaggttttttttatcgtttacgggttgttcggttgcgttgggattattttgttttttaatttttttttggagcgtattatttcgttgttggtttttattatgcgcgtttgtcgggagcgttagttgcgtcgtagcggtttgttgttcgttatttttcgtcgcggtttcgcgttttcggaggtcgatagtttggcgggttggaagttttcggtgtattacgtgttgtttattttgggtttgttcgtcgtgttgttgttttgttgcgtttcggttatgtatattagcgtggagggttgggattacgtggattcgttttatttttgtttcgttatttttagtattatcggtttcggggatttggtgagtagttagtacgtcgtttatcggaattaggggttttatcgtttgggtaattttttttttattttgttcggcgtgtgttgtatttattcgttttttaacgttatttttatttttattaagtaggtgtttaattggatgttgcgtaagttgagttgtcgttgttgcgcgcgttgttgttcggtttttggcgcgtttttggttcggcgtaatgttattattttaggtttacggttgcgcgtcgtttggtcgcgttcggtgtcgatttcgcgggtcgcgatagcgacgtcgagggtcgtcgtttttcgggcgagtttatttttatgcgcgattttacggtttttaataaggtgtcgttggcgttgttgtagaagtagttgtcggagacggttaacggttattcgcgtagcgtgtgcgttaatacgcgttagaacggtttttcggncggcgtgggcgcgttgggtattatgaataatcggttggtcgagattagcgtttttaggtagatcgttcgttcgttcgcgtcggggatt

SEQ ID NO: 9128 - DNA, 1057 bp, Artificial Sequence
  chemically treated genomic DNA (Homo sapiens) CpG-island No: 9128
  unsure (89)
aatccccgacgcgaacgaacgaacgatctacctaaaaacgctaatctcgaccaaccgattattcataatacccaacgcgcccacgccgnccgaaaaaccgttctaacgcgtattaacgcacacgctacgcgaataaccgttaaccgtctccgacaactacttctacaacaacgccaacgacaccttattaaaaaccgtaaaatcgcgcataaaaataaactcgcccgaaaaacgacgaccctcgacgtcgctatcgcgacccgcgaaatcgacaccgaacgcgaccaaacgacgcgcaaccgtaaacctaaaataataacattacgccgaaccaaaaacgcgccaaaaaccgaacaacaacgcgcgcaacaacgacaactcaacttacgcaacatccaattaaacacctacttaataaaaataaaaataacgttaaaaaacgaataaatacaacacacgccgaacaaaataaaaaaaaaattacccaaacgataaaacccctaattccgataaacgacgtactaactactcaccaaatccccgaaaccgataatactaaaaataacgaaacaaaaataaaacgaatccacgtaatcccaaccctccacgctaatatacataaccgaaacgcaacaaaacaacaacacgacgaacaaacccaaaataaacaacacgtaatacaccgaaaacttccaacccgccaaactatcgacctccgaaaacgcgaaaccgcgacgaaaaataacgaacaacaaaccgctacgacgcaactaacgctcccgacaaacgcgcataataaaaaccaacaacgaaataatacgctccaaaaaaaaattaaaaaacaaaataatcccaacgcaaccgaacaacccgtaaacgataaaaaaaaccttcccgcccaccgtcgcgaaaataatcataccgaaacctataaaaacaaaacaaaatcaacgcgatcctaaccgcgcaaataatcctcactaaacgaaaataaaaaatataaaaacgaatacatacaaatcttacgcgactcctatctcgaataacaccactcaaa

SEQ ID NO: 9129 - DNA, 1307 bp, Artificial Sequence
  chemically treated genomic DNA (Homo sapiens) CpG-island No: 9129
tttcgtttcgggcgttagtgatttcgtttttttttgtcgggcggtttttcggttggagttgagaaaggagcgttttttcggattcggttcggtttcgaggttttgaagtcgacgtcgttagtttagtttcgggggcgggagtaggattgttcgtatagttcgtatttaggaggcgtcgatttcgaacgttttatgggacgttttcgggggttttttttacgttttgttgtcgcgtttcggttttaggcgttcgggatttacggtttatttcgttcgtagttcgcggtttgtttggagaggagtatgaggttcggggtttcgcggacgtcggttatcgggcggtaggggtttagttgcggagtttcgcgttcgagagcggcgggtaaggagtcgcgggagtcggcgaggcgtcggggcgcgtagaggagcgtttttgttcgggtattcgttgggttacgggattcgcgtgtggtttgagcgtcggggaggaggcggaggcgtttttttgttcgggttttgggaaggcgacgagggggttttgcgaaggcggcgagggcgttcgcggcggtttcggatttttggttattatttttacgtttttgttttcgtcggggggatgtcgtggttcgggtttcgagcgtcgttttggtttcggggttgagtttcggattatgttttttcgtagttttcggttttcgtttcgtcgtagtcgtcgtcgtttgtcgcgttttttttgttgttgttgttgttgtcgtcgttcgtattttaacgaggatatcggtcgtttcgtgttgttggcggcgtttatcggtttttattttggtggcgggtgttatagttttttcggcgttcgagagtttcggcgaggcggaggcgcgggcgcgttggggcgttatcgtgcgtaattttaagcgtgcgtacggcgtggtcgagttagtagtgcgcgttttttttcggtattacgaggtcgcgttggtcgtcggcgttcgcgtcgacgcgtgcgttcgcgttgggattttttcggcgttttttatttcgtgggtatcgtggtgttaattataggtgagcggcgcgtttttcgcgtattttttttttttgtgttttttatttgtcgttttttttattgttcggtcgttcggttcgcgtttttcggttttgtttttttttttaatgtttttttgtttattttcgtttcgttttttttttcgtcggttttcgttttttttttttttttttttttcggtttttagtgagggaagaaagtttatttttggcgtttatttcgggtcgtttgtgttttaatattg

SEQ ID NO: 9130 - DNA, 1307 bp, Artificial Sequence
  chemically treated genomic DNA (Homo sapiens) CpG-island No: 9130
caatattaaaacacaaacgacccgaaataaacgccaaaaataaactttcttccctcactaaaaaccgaaaaaaaaaaaaaaaaaaaaaacgaaaaccgacgaaaaaaaaaacgaaacgaaaataaacaaaaaaacattaaaaaaaaaaacaaaaccgaaaaacgcgaaccgaacgaccgaacaataaaaaaaacgacaaataaaaaacacaaaaaaaaaaaatacgcgaaaaacgcgccgctcacctataattaacaccacgatacccacgaaataaaaaacgccgaaaaaatcccaacgcgaacgcacgcgtcgacgcgaacgccgacgaccaacgcgacctcgtaataccgaaaaaaaacgcgcactactaactcgaccacgccgtacgcacgcttaaaattacgcacgataacgccccaacgcgcccgcgcctccgcctcgccgaaactctcgaacgccgaaaaaactataacacccgccaccaaaataaaaaccgataaacgccgccaacaacacgaaacgaccgatatcctcgttaaaatacgaacgacgacaacaacaacaacaacaaaaaaaacgcgacaaacgacgacgactacgacgaaacgaaaaccgaaaactacgaaaaaacataatccgaaactcaaccccgaaaccaaaacgacgctcgaaacccgaaccacgacatccccccgacgaaaacaaaaacgtaaaaataataaccaaaaatccgaaaccgccgcgaacgccctcgccgccttcgcaaaaccccctcgtcgccttcccaaaacccgaacaaaaaaacgcctccgcctcctccccgacgctcaaaccacacgcgaatcccgtaacccaacgaatacccgaacaaaaacgctcctctacgcgccccgacgcctcgccgactcccgcgactccttacccgccgctctcgaacgcgaaactccgcaactaaacccctaccgcccgataaccgacgtccgcgaaaccccgaacctcatactcctctccaaacaaaccgcgaactacgaacgaaataaaccgtaaatcccgaacgcctaaaaccgaaacgcgacaacaaaacgtaaaaaaaacccccgaaaacgtcccataaaacgttcgaaatcgacgcctcctaaatacgaactatacgaacaatcctactcccgcccccgaaactaaactaacgacgtcgacttcaaaacctcgaaaccgaaccgaatccgaaaaaacgctcctttctcaactccaaccgaaaaaccgcccgacaaaaaaaaacgaaatcactaacgcccgaaacgaaa

SEQ ID NO: 9131 - DNA, 1307 bp, Artificial Sequence
  chemically treated genomic DNA (Homo sapiens) CpG-island No: 9131
tagtgttggagtataggcggttcggggtgagcgttagaggtgggttttttttttttattgaaagtcgggagggagagagagagagagaacgggggtcggcggagaagagggcgagacgaaagtaagtaaagggatattagaagggaaggtagagtcgagggacgcggatcgagcggtcgagtagtggaaagggcggtaggtgaaaggtatagagaggaaagatgcgcgggggacgcgtcgtttatttatggttgatattacggtgtttacgaagtagaaggcgtcggggaagttttagcgcgggcgtacgcgtcggcgcggacgtcggcggttagcgcggtttcgtagtgtcggaggaaggcgcgtattattggttcggttacgtcgtgcgtacgtttgaagttgcgtacgatggcgttttagcgcgttcgcgttttcgtttcgtcggggttttcgagcgtcgagaagattgtggtattcgttattaaggtagaggtcgatgagcgtcgttagtagtacgaagcggtcggtgttttcgttgaggtgcgaacggcggtagtagtagtagtagtaggaggggcgcggtaggcggcggcggttacggcggggcgggggtcgggggttgcgggaggatatggttcggagtttagtttcggggttagggcggcgttcggggttcgggttacgatattttttcggcgggagtaggagcgtgaggatggtggttaggggttcggggtcgtcgcggacgttttcgtcgttttcgtagagttttttcgtcgtttttttagagttcggatagaggggcgttttcgtttttttttcggcgtttaggttatacgcgagtttcgtggtttagcgggtgttcgggtaggggcgtttttttgcgcgtttcgacgtttcgtcggttttcgcggttttttattcgtcgttttcgggcgcggggtttcgtagttaggtttttgtcgttcggtggtcggcgttcgcggggtttcgggttttatatttttttttagataggtcgcgggttgcgggcggggtgggtcgtggatttcgggcgtttaggatcgggacgcggtagtaaggcgtggagagagttttcgggggcgttttatgaggcgttcgggatcggcgttttttaggtgcgggttgtgcgggtagttttgttttcgttttcggggttgagttggcggcgtcggttttagagtttcggagtcgagtcgagttcggggaagcgttttttttttagttttagtcgaagagtcgttcggtagggagaggcggagttattggcgttcggggcgggg

SEQ ID NO: 9132 - DNA, 1307 bp, Artificial Sequence
  chemically treated genomic DNA (Homo sapiens) CpG-island No: 9132
ccccgccccgaacgccaataactccgcctctccctaccgaacgactcttcgactaaaactaaaaaaaaaacgcttccccgaactcgactcgactccgaaactctaaaaccgacgccgccaactcaaccccgaaaacgaaaacaaaactacccgcacaacccgcacctaaaaaacgccgatcccgaacgcctcataaaacgcccccgaaaactctctccacgccttactaccgcgtcccgatcctaaacgcccgaaatccacgacccaccccgcccgcaacccgcgacctatctaaaaaaaaatataaaacccgaaaccccgcgaacgccgaccaccgaacgacaaaaacctaactacgaaaccccgcgcccgaaaacgacgaataaaaaaccgcgaaaaccgacgaaacgtcgaaacgcgcaaaaaaacgcccctacccgaacacccgctaaaccacgaaactcgcgtataacctaaacgccgaaaaaaaaacgaaaacgcccctctatccgaactctaaaaaaacgacgaaaaaactctacgaaaacgacgaaaacgtccgcgacgaccccgaacccctaaccaccatcctcacgctcctactcccgccgaaaaaatatcgtaacccgaaccccgaacgccgccctaaccccgaaactaaactccgaaccatatcctcccgcaacccccgacccccgccccgccgtaaccgccgccgcctaccgcgcccctcctactactactactactaccgccgttcgcacctcaacgaaaacaccgaccgcttcgtactactaacgacgctcatcgacctctaccttaataacgaataccacaatcttctcgacgctcgaaaaccccgacgaaacgaaaacgcgaacgcgctaaaacgccatcgtacgcaacttcaaacgtacgcacgacgtaaccgaaccaataatacgcgccttcctccgacactacgaaaccgcgctaaccgccgacgtccgcgccgacgcgtacgcccgcgctaaaacttccccgacgccttctacttcgtaaacaccgtaatatcaaccataaataaacgacgcgtcccccgcgcatctttcctctctatacctttcacctaccgccctttccactactcgaccgctcgatccgcgtccctcgactctaccttcccttctaatatccctttacttactttcgtctcgccctcttctccgccgacccccgttctctctctctctctccctcccgactttcaataaaaaaaaaaaacccacctctaacgctcaccccgaaccgcctatactccaacacta

SEQ ID NO: 9133 - DNA, 754 bp, Artificial Sequence
  chemically treated genomic DNA (Homo sapiens) CpG-island No: 9133
agaggtacgggttttagggttgaggggggcgttttttcggagttaagtagaatttggggacggcggaattcgtataagtattaacgtttcgttttcgtgttttcgtattggagaggttgtttatcgtttattttttgaggcgggaaaggagtcgcgttataaggtttcgggtttttttttagtacgcgtcgtttcggtttttatttgtcggttttatgtatttgattattttttgggttttgaatatttttcgggcggttagtagcgcgttttcgtcgtgcgtcgtatagaagtcgtttcggtcgaaaaggcgtattgtggtggtcggttttttcggtatgtattgaaagaagcgtacgaagtcgatttcggtcgcgttttttaattgtagcgtttttttcggttgtatcgttatgtcgaaatttttttaattttttggttgaagaaaatgcgcgattttatatttattaagttgtttttcgtttttttttttacgtttttcgagcggcgttcggttacgggcgattatatttaattagtttttagggttgcgtttcggtggtgggagtttgtcgcgtatattaattataagtagacgcgttttagtttttcgcgtacgttggtgattttagttattgcgtatgtttgcgtttaggtcgcgcggaaattcgtagacgcgtatttttagtagagtttttttttgtgtttatttagttgtaaggtttgaagtttttgggtggggtgtatgtaaggg

SEQ ID NO: 9134 - DNA, 754 bp, Artificial Sequence
  chemically treated genomic DNA (Homo sapiens) CpG-island No: 9134
cccttacatacaccccacccaaaaacttcaaaccttacaactaaataaacacaaaaaaaaactctactaaaaatacgcgtctacgaatttccgcgcgacctaaacgcaaacatacgcaataactaaaatcaccaacgtacgcgaaaaactaaaacgcgtctacttataattaatatacgcgacaaactcccaccaccgaaacgcaaccctaaaaactaattaaatataatcgcccgtaaccgaacgccgctcgaaaaacgtaaaaaaaaaaacgaaaaacaacttaataaatataaaatcgcgcattttcttcaaccaaaaaattaaaaaaatttcgacataacgatacaaccgaaaaaaacgctacaattaaaaaacgcgaccgaaatcgacttcgtacgcttctttcaatacataccgaaaaaaccgaccaccacaatacgccttttcgaccgaaacgacttctatacgacgcacgacgaaaacgcgctactaaccgcccgaaaaatattcaaaacccaaaaaataatcaaatacataaaaccgacaaataaaaaccgaaacgacgcgtactaaaaaaaaacccgaaaccttataacgcgactcctttcccgcctcaaaaaataaacgataaacaacctctccaatacgaaaacacgaaaacgaaacgttaatacttatacgaattccgccgtccccaaattctacttaactccgaaaaaacgcccccctcaaccctaaaacccgtacctct

SEQ ID NO: 9135 - DNA, 754 bp, Artificial Sequence
  chemically treated genomic DNA (Homo sapiens) CpG-island No: 9135
tttttgtatatattttatttaggggttttaagttttgtagttgagtaaatatagaaaggagttttattaaggatgcgcgtttgcgggttttcgcgcgatttaggcgtaggtatgcgtagtagttaaagttattagcgtgcgcgggaagttggggcgcgtttgtttatgattggtatgcgcggtagatttttattatcgaaacgtagttttggaagttgattgggtgtggtcgttcgtggtcggacgtcgttcgggggacgtgggaggggaagcgggaaatagtttagtgggtgtagggtcgcgtattttttttaattaggaagttgaggaggtttcgatatggcggtgtagtcgaaggagacgttgtagttggagagcgcggtcgaggtcggtttcgtgcgttttttttagtgtatgtcggagaagtcgattattatagtgcgttttttcgatcggggcgatttttatacggcgtacggcgaggacgcgttgttggtcgttcgggaggtgtttaagatttagggggtgattaagtatatggggtcggtaggtgagggtcgggacggcgcgtgttggggagggattcggggttttgtggcgcggtttttttttcgttttagagagtgggcggtgagtagtttttttagtgcggaggtacgggggcggaacgttggtgtttgtgcggatttcgtcgtttttaggttttgtttggtttcggagggacgttttttttagttttgaaattcgtgttttt

SEQ ID NO: 9136 - DNA, 754 bp, Artificial Sequence
  chemically treated genomic DNA (Homo sapiens) CpG-island No: 9136
aaaaacacgaatttcaaaactaaaaaaaacgtccctccgaaaccaaacaaaacctaaaaacgacgaaatccgcacaaacaccaacgttccgcccccgtacctccgcactaaaaaaactactcaccgcccactctctaaaacgaaaaaaaaaccgcgccacaaaaccccgaatccctccccaacacgcgccgtcccgaccctcacctaccgaccccatatacttaatcaccccctaaatcttaaacacctcccgaacgaccaacaacgcgtcctcgccgtacgccgtataaaaatcgccccgatcgaaaaaacgcactataataatcgacttctccgacatacactaaaaaaaacgcacgaaaccgacctcgaccgcgctctccaactacaacgtctccttcgactacaccgccatatcgaaacctcctcaacttcctaattaaaaaaaatacgcgaccctacacccactaaactatttcccgcttcccctcccacgtcccccgaacgacgtccgaccacgaacgaccacacccaatcaacttccaaaactacgtttcgataataaaaatctaccgcgcataccaatcataaacaaacgcgccccaacttcccgcgcacgctaataactttaactactacgcatacctacgcctaaatcgcgcgaaaacccgcaaacgcgcatccttaataaaactcctttctatatttactcaactacaaaacttaaaacccctaaataaaatatatacaaaaa

SEQ ID NO: 9137 - DNA, 733 bp, Artificial Sequence
  chemically treated genomic DNA (Homo sapiens) CpG-island No: 9137
atttacgttcgggagaggttcggagtttcggtcgcgggcggcgggggatttttgtaggaaggggtaggaaggtaagtagttcggcgcgttttggcggtttcgagggatttgggttcgggtttgcggtcgcgtcgtttgggttttttttgggttgggagcgcgtcgggttttcgttttgtacgttgttatcgcgggagacgtttcggtttcgtcgcgcgtagaggggacgcgcggagaggttggtttttgggcgagcggagagttttgtttattaagttgtcggaagaagttaaattaaaaagttaatttttaagtttttaaacggaacgttattcgtattagttgggagatagcgtcgtattgattgataagtcgcgtatattattttcgcgcgcggaggggagatttttagaacgtttttcgattagtagcgaggaagtcgagttcgtatttcgtatttcgtatttcgtatttagagttttcgagggacgaatttagatttaatttttgtttcgcggttatttattttagtcgttggagtttggcgttcgcgtttttcggtcggtagtacgttaaaacggcggcgcgttttgatttggatttcgtcgagttgggagttttaggtagtaggcgggcgcgcggtatcggttttttttttgtttttaggagacgttgtttgtaatttcgaaattaagtttttattaaatatatttgtggtttttaaatatagtag

SEQ ID NO: 9138 - DNA, 733 bp, Artificial Sequence
  chemically treated genomic DNA (Homo sapiens) CpG-island No: 9138
ctactatatttaaaaaccacaaatatatttaataaaaacttaatttcgaaattacaaacaacgtctcctaaaaacaaaaaaaaaaccgataccgcgcgcccgcctactacctaaaactcccaactcgacgaaatccaaatcaaaacgcgccgccgttttaacgtactaccgaccgaaaaacgcgaacgccaaactccaacgactaaaataaataaccgcgaaacaaaaattaaatctaaattcgtccctcgaaaactctaaatacgaaatacgaaatacgaaatacgaactcgacttcctcgctactaatcgaaaaacgttctaaaaatctcccctccgcgcgcgaaaataatatacgcgacttatcaatcaatacgacgctatctcccaactaatacgaataacgttccgtttaaaaacttaaaaattaactttttaatttaacttcttccgacaacttaataaacaaaactctccgctcgcccaaaaaccaacctctccgcgcgtcccctctacgcgcgacgaaaccgaaacgtctcccgcgataacaacgtacaaaacgaaaacccgacgcgctcccaacccaaaaaaaacccaaacgacgcgaccgcaaacccgaacccaaatccctcgaaaccgccaaaacgcgccgaactacttaccttcctaccccttcctacaaaaatcccccgccgcccgcgaccgaaactccgaacctctcccgaacgtaaat

SEQ ID NO: 9139 - DNA, 733 bp, Artificial Sequence
  chemically treated genomic DNA (Homo sapiens) CpG-island No: 9139
ttgttatatttaaaaattatagatgtgtttggtggagatttaatttcggaattgtaggtagcgttttttgaggataaggggaaagtcggtgtcgcgcgttcgtttgttgtttggagtttttaattcggcggaatttaggttaggacgcgtcgtcgttttgacgtgttgtcggtcgggaggcgcgggcgttaggttttaacgattagggtgggtggtcgcggggtaggggttggatttgaattcgtttttcgggggttttggatgcgggatgcgggatgcgggatgcgggttcgattttttcgttgttggtcgaggagcgttttgagagtttttttttcgcgcgcgaggataatatgcgcggtttgttagttagtgcggcgttgttttttagttgatacgggtgacgtttcgtttggaggtttggagattggttttttgatttggtttttttcggtagtttaatgggtaaagtttttcgttcgtttagaaattagttttttcgcgcgttttttttgcgcgcggcgaggtcgagacgtttttcgcggtgatagcgtgtaaggcggagattcggcgcgtttttagtttagggaaagtttaggcgacgcgatcgtaagttcgagtttaggtttttcggagtcgttagggcgcgtcgggttgtttgtttttttgtttttttttgtaggaatttttcgtcgttcgcggtcgggatttcgggtttttttcgggcgtagat

SEQ ID NO: 9140 - DNA, 733 bp, Artificial Sequence
  chemically treated genomic DNA (Homo sapiens) CpG-island No: 9140
atctacgcccgaaaaaaacccgaaatcccgaccgcgaacgacgaaaaattcctacaaaaaaaaacaaaaaaacaaacaacccgacgcgccctaacgactccgaaaaacctaaactcgaacttacgatcgcgtcgcctaaactttccctaaactaaaaacgcgccgaatctccgccttacacgctatcaccgcgaaaaacgtctcgacctcgccgcgcgcaaaaaaaacgcgcgaaaaaactaatttctaaacgaacgaaaaactttacccattaaactaccgaaaaaaaccaaatcaaaaaaccaatctccaaacctccaaacgaaacgtcacccgtatcaactaaaaaacaacgccgcactaactaacaaaccgcgcatattatcctcgcgcgcgaaaaaaaaactctcaaaacgctcctcgaccaacaacgaaaaaatcgaacccgcatcccgcatcccgcatcccgcatccaaaacccccgaaaaacgaattcaaatccaacccctaccccgcgaccacccaccctaatcgttaaaacctaacgcccgcgcctcccgaccgacaacacgtcaaaacgacgacgcgtcctaacctaaattccgccgaattaaaaactccaaacaacaaacgaacgcgcgacaccgactttccccttatcctcaaaaaacgctacctacaattccgaaattaaatctccaccaaacacatctataatttttaaatataacaa

SEQ ID NO: 9141 - DNA, 658 bp, Artificial Sequence
  chemically treated genomic DNA (Homo sapiens) CpG-island No: 9141
  unsure (393)
gggatagcgttgtagtttatggtgtggagcgcggttgggggattagggggaggtggggagaggggagcgtggaggggagcgtggaggggggcgcgcgaaggggttgcggggcgtaggaggcgggttgggttcggttggagatcggatttcggtgttggtttatagtatagggagtcggtcgaatgcgcgtgattattggacggcgttgttttgggagagagtcggggttagatttggcgcggcggtgaggcggttgcgggataagtagaggcgcgcgggcgtgggtaagggtttggggcgttttggagcggtttgttgggttagtgaggtgttagggagagcgggtgtttgtcgggtagtgtgttcgggttgtacgttttagcgcgggggcgnatagcggcggcgcgggcgggcggtttggaataatgataaatatatttggttttgagtgaagaagtcgtcgtcgtttcgttttttagtaattgggatttgaggaatttcgaatcgtatattaaggggtttttattgtgtttcgtggttttcgttttcgtttgttttttcgcgtttttttttcggtggaattatttttgtattgttcgggggttttgttttcgtttatttttggtcgtaggtagaaaaaaaggaaaggtttttagga

SEQ ID NO: 9142 - DNA, 658 bp, Artificial Sequence
  chemically treated genomic DNA (Homo sapiens) CpG-island No: 9142
  unsure (266)
tcctaaaaacctttcctttttttctacctacgaccaaaaataaacgaaaacaaaacccccgaacaatacaaaaataattccaccgaaaaaaaaacgcgaaaaaacaaacgaaaacgaaaaccacgaaacacaataaaaaccccttaatatacgattcgaaattcctcaaatcccaattactaaaaaacgaaacgacgacgacttcttcactcaaaaccaaatatatttatcattattccaaaccgcccgcccgcgccgccgctatncgcccccgcgctaaaacgtacaacccgaacacactacccgacaaacacccgctctccctaacacctcactaacccaacaaaccgctccaaaacgccccaaacccttacccacgcccgcgcgcctctacttatcccgcaaccgcctcaccgccgcgccaaatctaaccccgactctctcccaaaacaacgccgtccaataatcacgcgcattcgaccgactccctatactataaaccaacaccgaaatccgatctccaaccgaacccaacccgcctcctacgccccgcaaccccttcgcgcgcccccctccacgctcccctccacgctcccctctccccacctccccctaatcccccaaccgcgctccacaccataaactacaacgctatccc

SEQ ID NO: 9143 - DNA, 658 bp, Artificial Sequence
  chemically treated genomic DNA (Homo sapiens) CpG-island No: 9143
  unsure (266)
ttttggagattttttttttttttttgtttgcggttagaagtgagcgaaagtagagttttcgggtaatgtagaaatgattttatcgaggagggggcgcgggaagataggcgggggcgggggttacggagtataatgagggttttttggtgtgcggttcgaaattttttaaattttagttgttggaaggcgaggcgacgacgatttttttatttagggttaaatgtgtttgttattattttagatcgttcgttcgcgtcgtcgttgtncgttttcgcgttagggcgtgtaattcgagtatattgttcggtaggtattcgttttttttggtattttattgatttaataaatcgttttagagcgttttaaatttttgtttacgttcgcgcgtttttgtttgtttcgtagtcgttttatcgtcgcgttaaatttggtttcgatttttttttagagtagcgtcgtttagtaattacgcgtattcggtcggttttttgtgttgtaggttaatatcgaggttcggtttttagtcgagtttagttcgttttttgcgtttcgtaattttttcgcgcgtttttttttacgtttttttttacgtttttttttttttatttttttttggttttttagtcgcgttttatattatgggttgtagcgttgtttt

SEQ ID NO: 9144 - DNA, 658 bp, Artificial Sequence
  chemically treated genomic DNA (Homo sapiens) CpG-island No: 9144
  unsure (393)
aaaacaacgctacaacccataatataaaacgcgactaaaaaaccaaaaaaaaataaaaaaaaaaaaacgtaaaaaaaaacgtaaaaaaaaacgcgcgaaaaaattacgaaacgcaaaaaacgaactaaactcgactaaaaaccgaacctcgatattaacctacaacacaaaaaaccgaccgaatacgcgtaattactaaacgacgctactctaaaaaaaaatcgaaaccaaatttaacgcgacgataaaacgactacgaaacaaacaaaaacgcgcgaacgtaaacaaaaatttaaaacgctctaaaacgatttattaaatcaataaaataccaaaaaaaacgaatacctaccgaacaatatactcgaattacacgccctaacgcgaaaacgnacaacgacgacgcgaacgaacgatctaaaataataacaaacacatttaaccctaaataaaaaaatcgtcgtcgcctcgccttccaacaactaaaatttaaaaaatttcgaaccgcacaccaaaaaaccctcattatactccgtaacccccgcccccgcctatcttcccgcgccccctcctcgataaaatcatttctacattacccgaaaactctactttcgctcacttctaaccgcaaacaaaaaaaaaaaaaaaatctccaaaa

SEQ ID NO: 9145 - DNA, 513 bp, Artificial Sequence
  chemically treated genomic DNA (Homo sapiens) CpG-island No: 9145
  unsure (152, 195)
cgagtgcgaggggattggggagattttgttcgggaagttcggggttcgggaatgaaagcgggcgtatttttttagcgagttttaaagcgtttgggagacgatcgtttcgtttttgggagcggtatttggtggggttgggcggagggaggttnttgtaagagaaattcggagttcgggaaatttagtaggtacggntgattattgaaggattcgttttcgttgagtagggcgttggttgcgggatgggggatggagggtgttgggttcggtgggcgtggttattgcggttgttaaggaacgcgcggttttcgttttgttagcgtgtttggcgttagtcgttgggttttggatacgttagtttcgtttattttttaaggttttttacgcggttcgggattggtttttttgtgttgatcgattattcgcggtcgtttatttgttagtgtagttttttgggttttgtcgtttttttttggggtttttttttttatggtatttttttttatttttttt

SEQ ID NO: 9146 - DNA, 513 bp, Artificial Sequence
  chemically treated genomic DNA (Homo sapiens) CpG-island No: 9146
  unsure (319, 362)
aaaaaaaataaaaaaaaataccataaaaaaaaaaaccccaaaaaaaaacgacaaaacccaaaaaactacactaacaaataaacgaccgcgaataatcgatcaacacaaaaaaaccaatcccgaaccgcgtaaaaaaccttaaaaaataaacgaaactaacgtatccaaaacccaacgactaacgccaaacacgctaacaaaacgaaaaccgcgcgttccttaacaaccgcaataaccacgcccaccgaacccaacaccctccatcccccatcccgcaaccaacgccctactcaacgaaaacgaatccttcaataatcanccgtacctactaaatttcccgaactccgaatttctcttacaanaacctccctccgcccaaccccaccaaataccgctcccaaaaacgaaacgatcgtctcccaaacgctttaaaactcgctaaaaaaatacgcccgctttcattcccgaaccccgaacttcccgaacaaaatctccccaatcccctcgcactcg

SEQ ID NO: 9147 - DNA, 513 bp, Artificial Sequence
  chemically treated genomic DNA (Homo sapiens) CpG-island No: 9147
  unsure (319, 362)
aaaaagagtgaagaggagtattatgggaaagggggttttaaaagggaacggtagaatttagagagttgtattgataagtaagcggtcgcgagtaatcggttagtataaaggagttaatttcgagtcgcgtggaagattttgggaggtgggcgggattaacgtgtttagggtttagcggttggcgttagatacgttggtagggcgggaatcgcgcgttttttagtaatcgtaatggttacgtttatcgaatttagtattttttattttttatttcgtagttagcgttttatttaacgggaacgggttttttagtgattantcgtatttattgggtttttcggatttcgggttttttttgtagnagttttttttcgtttagttttattaagtgtcgtttttagggacggaacgatcgttttttaaacgttttagggttcgttaaagaggtgcgttcgtttttattttcggatttcgagtttttcgggtagggtttttttaattttttcgtattcg

SEQ ID NO: 9148 - DNA, 513 bp, Artificial Sequence
  chemically treated genomic DNA (Homo sapiens) CpG-island No: 9148
  unsure (152, 195)
cgaatacgaaaaaattaaaaaaaccctacccgaaaaactcgaaatccgaaaataaaaacgaacgcacctctttaacgaaccctaaaacgtttaaaaaacgatcgttccgtccctaaaaacgacacttaataaaactaaacgaaaaaaaactnctacaaaaaaaacccgaaatccgaaaaacccaataaatacgantaatcactaaaaaacccgttcccgttaaataaaacgctaactacgaaataaaaaataaaaaatactaaattcgataaacgtaaccattacgattactaaaaaacgcgcgattcccgccctaccaacgtatctaacgccaaccgctaaaccctaaacacgttaatcccgcccacctcccaaaatcttccacgcgactcgaaattaactcctttatactaaccgattactcgcgaccgcttacttatcaatacaactctctaaattctaccgttcccttttaaaaccccctttcccataatactcctcttcactcttttt

SEQ ID NO: 9149 - DNA, 750 bp, Artificial Sequence
  chemically treated genomic DNA (Homo sapiens) CpG-island No: 9149
gttataattattagggaagtgatatagtcgggaaatttcgttttttatattttcgcgcgttcgcgtcggtcgtagttttatagttcgtttcggtcgtagttttatagttcgtttcgttttttttttttcggaaataattttcgcgcgggcggaaggcggggtcggttttggtttcgtttatattatttttttttttcggtttagcgtttatagcgcgtagtttcggtagggtggttttacggtcggaggagagggtgggttttagatttgaggtaggaggtcgagttgaggggcggggaagaggttttttgcggtaggacgtaagtgacggcgaaggcggtgcgatagtagttggagggtagaggaggcgggtttgtgtttttcgggtcgaatcgggttgtggggggcgcggggtttgggttaggcggtagttaaggttcgcggtgatagtatgggtgaaggggagcggggtagaggaggttttgggttgttttcggcggcgggtgggggcgaggggttggcgggttagagtttcgggtttaggtcggggttttgattcgcggttggtgttttttcgatttcgtagcgcggggtgttttgttttcgttatgaggtcgtagtaggcgtcggtgttcggaaaggtgtttatttagcgagattatagtagtggtatacgttgttagttttagattaagttttttgcggagttggagaatcgggtacgtaatttggttttttacgtttgttttg

SEQ ID NO: 9150 - DNA, 750 bp, Artificial Sequence
  chemically treated genomic DNA (Homo sapiens) CpG-island No: 9150
caaaacaaacgtaaaaaaccaaattacgtacccgattctccaactccgcaaaaaacttaatctaaaactaacaacgtataccactactataatctcgctaaataaacacctttccgaacaccgacgcctactacgacctcataacgaaaacaaaacaccccgcgctacgaaatcgaaaaaacaccaaccgcgaatcaaaaccccgacctaaacccgaaactctaacccgccaacccctcgcccccacccgccgccgaaaacaacccaaaacctcctctaccccgctccccttcacccatactatcaccgcgaaccttaactaccgcctaacccaaaccccgcgccccccacaacccgattcgacccgaaaaacacaaacccgcctcctctaccctccaactactatcgcaccgccttcgccgtcacttacgtcctaccgcaaaaaacctcttccccgcccctcaactcgacctcctacctcaaatctaaaacccaccctctcctccgaccgtaaaaccaccctaccgaaactacgcgctataaacgctaaaccgaaaaaaaaaaataatataaacgaaaccaaaaccgaccccgccttccgcccgcgcgaaaattatttccgaaaaaaaaaaaacgaaacgaactataaaactacgaccgaaacgaactataaaactacgaccgacgcgaacgcgcgaaaatataaaaaacgaaatttcccgactatatcacttccctaataattataac

SEQ ID NO: 9151 - DNA, 750 bp, Artificial Sequence
  chemically treated genomic DNA (Homo sapiens) CpG-island No: 9151
tagagtaggcgtggggagttaggttgcgtattcggttttttagtttcgtagggaatttggtttggaattggtagcgtgtgttattgttgtagtttcgttgaatgaatattttttcggatatcggcgtttgttgcggttttatggcgaggataggatatttcgcgttgcggggtcgggggaatattaatcgcgagttagagtttcggtttggattcgggattttgattcgttagtttttcgtttttattcgtcgtcgaaaatagtttaaggttttttttgtttcgtttttttttatttatgttgttatcgcgggttttagttgtcgtttggtttaggtttcgcgttttttataattcggttcggttcgggaaatataaattcgttttttttgttttttagttgttgtcgtatcgttttcgtcgttatttacgttttgtcgtaaaaagtttttttttcgttttttagttcggttttttattttaggtttgggatttattttttttttcggtcgtaaagttattttgtcgaagttgcgcgttgtgggcgttgggtcgaggaagggaaatgatgtgggcggggttagggtcgatttcgtttttcgttcgcgcggggattgttttcggaaggagagaggcggggcgagttgtggggttgcggtcggggcgagttgtggggttgcggtcggcgcgagcgcgcgggggtgtgaggggcggagtttttcggttgtgttatttttttagtgattgtggt

SEQ ID NO: 9152 - DNA, 750 bp, Artificial Sequence
  chemically treated genomic DNA (Homo sapiens) CpG-island No: 9152
accacaatcactaaaaaaataacacaaccgaaaaactccgcccctcacacccccgcgcgctcgcgccgaccgcaaccccacaactcgccccgaccgcaaccccacaactcgccccgcctctctccttccgaaaacaatccccgcgcgaacgaaaaacgaaatcgaccctaaccccgcccacatcatttcccttcctcgacccaacgcccacaacgcgcaacttcgacaaaataactttacgaccgaaaaaaaaaataaatcccaaacctaaaataaaaaaccgaactaaaaaacgaaaaaaaaactttttacgacaaaacgtaaataacgacgaaaacgatacgacaacaactaaaaaacaaaaaaaacgaatttatatttcccgaaccgaaccgaattataaaaaacgcgaaacctaaaccaaacgacaactaaaacccgcgataacaacataaataaaaaaaaacgaaacaaaaaaaaccttaaactattttcgacgacgaataaaaacgaaaaactaacgaatcaaaatcccgaatccaaaccgaaactctaactcgcgattaatattcccccgaccccgcaacgcgaaatatcctatcctcgccataaaaccgcaacaaacgccgatatccgaaaaaatattcattcaacgaaactacaacaataacacacgctaccaattccaaaccaaattccctacgaaactaaaaaaccgaatacgcaacctaactccccacgcctactcta

SEQ ID NO: 9153 - DNA, 601 bp, Artificial Sequence
  chemically treated genomic DNA (Homo sapiens) CpG-island No: 9153
cgggttcggagagtaggcgagcggagaggcgggcggtcggggttcggggcgggcgcggatcgttttatttcggacggggggtattcgttttattcgtcggggattttcggggcgcggcgatggtgttttttgacgtcggcgtagcgtcgtcggggcgttttagatcgtaggtttcgcgcggtcgtttaagttcggtttttacgtttcgttttcggtttttcggaggtcggagattttgaggtaaggggttagtttttttttatttatcgatcgcgaggttaggtagttttaaatttcgcggcgatcgttttttttcgtttttgtcgtcgtcgcgggtttaagttgcgttaggacgtgcgcgcgttcgtttttgtttgcgtcgtttaacgtgattttgcgtttatcgtttcgtacgttttcgtcgggcgcgcgcgggtcggtagggcgggggtttagggagaggcgggtgtcgcgtggatcggtcgcgggttgggcgattcgcggagtcgttttttggcggattagggggtattgtcgggggcggggcggggtaggagtaggagaggtcgggttttggttgttttttcgttggcgcgttttt

SEQ ID NO: 9154 - DNA, 601 bp, Artificial Sequence
  chemically treated genomic DNA (Homo sapiens) CpG-island No: 9154
aaaaacgcgccaacgaaaaaacaaccaaaacccgacctctcctactcctaccccgccccgcccccgacaataccccctaatccgccaaaaaacgactccgcgaatcgcccaacccgcgaccgatccacgcgacacccgcctctccctaaacccccgccctaccgacccgcgcgcgcccgacgaaaacgtacgaaacgataaacgcaaaatcacgttaaacgacgcaaacaaaaacgaacgcgcgcacgtcctaacgcaacttaaacccgcgacgacgacaaaaacgaaaaaaaacgatcgccgcgaaatttaaaactacctaacctcgcgatcgataaataaaaaaaaactaaccccttacctcaaaatctccgacctccgaaaaaccgaaaacgaaacgtaaaaaccgaacttaaacgaccgcgcgaaacctacgatctaaaacgccccgacgacgctacgccgacgtcaaaaaacaccatcgccgcgccccgaaaatccccgacgaataaaacgaataccccccgtccgaaataaaacgatccgcgcccgccccgaaccccgaccgcccgcctctccgctcgcctactctccgaacccg

SEQ ID NO: 9155 - DNA, 601 bp, Artificial Sequence
  chemically treated genomic DNA (Homo sapiens) CpG-island No: 9155
agggacgcgttagcggagggatagttagggttcggttttttttgtttttgtttcgtttcgttttcggtagtgttttttagttcgttagagggcgatttcgcgggtcgtttaattcgcgatcggtttacgcggtattcgtttttttttaggttttcgttttgtcggttcgcgcgcgttcgacgggagcgtgcggggcggtgggcgtagggttacgttgggcggcgtagataaaggcgggcgcgcgtacgttttgacgtagtttgggttcgcggcggcggtaagggcgggagggagcggtcgtcgcgggatttggagttgtttagtttcgcggtcggtgagtaggagggagttggttttttattttaaagttttcgattttcggggagtcgagagcgggacgtgggagtcgggtttgggcggtcgcgcggggtttgcggtttgggacgtttcggcgacgttgcgtcggcgttaggaggtattatcgtcgcgtttcggggattttcggcgggtggagcgggtgtttttcgttcgggatggaacggttcgcgttcgtttcgaatttcggtcgttcgttttttcgttcgtttgtttttcgagttcg

SEQ ID NO: 9156 - DNA, 601 bp, Artificial Sequence
  chemically treated genomic DNA (Homo sapiens) CpG-island No: 9156
cgaactcgaaaaacaaacgaacgaaaaaacgaacgaccgaaattcgaaacgaacgcgaaccgttccatcccgaacgaaaaacacccgctccacccgccgaaaatccccgaaacgcgacgataatacctcctaacgccgacgcaacgtcgccgaaacgtcccaaaccgcaaaccccgcgcgaccgcccaaacccgactcccacgtcccgctctcgactccccgaaaatcgaaaactttaaaataaaaaaccaactccctcctactcaccgaccgcgaaactaaacaactccaaatcccgcgacgaccgctccctcccgcccttaccgccgccgcgaacccaaactacgtcaaaacgtacgcgcgcccgcctttatctacgccgcccaacgtaaccctacgcccaccgccccgcacgctcccgtcgaacgcgcgcgaaccgacaaaacgaaaacctaaaaaaaaacgaataccgcgtaaaccgatcgcgaattaaacgacccgcgaaatcgccctctaacgaactaaaaaacactaccgaaaacgaaacgaaacaaaaacaaaaaaaaccgaaccctaactatccctccgctaacgcgtccct

SEQ ID NO: 9157 - DNA, 756 bp, Artificial Sequence
  chemically treated genomic DNA (Homo sapiens) CpG-island No: 9157
  unsure (417, 438, 629, 643, 665, 680, 713)
ggcgaggggcggggaaaggggcggcgggttttattcgtagttttaggacgacgtagttatagttttttagagagcgatttcggtagaacggtaggaagtatgcggagaggaaggcggggaggcggtacgtgtttttcgtgttgggttcgtcgggtcggtcgggtgattttcgttagttgtgggggagcggagaggttcgcgttttcgggagttcgggtggacgtcgagattcgggagcgggaggcggtttatttggatttcggtgtaattttcgaagaagaagagtattatgttatggtagacgtagtagagtcggtcgtttagcgtttggtagaagcgggcgggtaggaaggcggagagtagtcgttagattttttaagttaatacgtaggtgggcgtcgtgtttaggagtacgancgttggatagtaggtagcgtnatcgagtacgtgtagagaaatagggatagtagtatttttttagttcggcggtatttagttacgtttgcgtttttcgttcgtttttcgggtcgtagtcgcggttagtaggcggttaattatcgttcgggttcgggtcggcgcgttcgttattcgtttttagtttacgtttttagtcgtatgggtcgcgtcgntcgttcggggtcgnggtaggcgagtaaaggggcgtnggtgcgtcgtttttnggcggaaaagtaagggaattcgcggtttttttnggatcgaaggtttagggatgtttatattttatgatttttattt

SEQ ID NO: 9158 - DNA, 756 bp, Artificial Sequence
  chemically treated genomic DNA (Homo sapiens) CpG-island No: 9158
  unsure (44, 77, 92, 114, 128, 319, 340)
aaataaaaatcataaaatataaacatccctaaaccttcgatccnaaaaaaaccgcgaattcccttacttttccgccnaaaaacgacgcaccnacgcccctttactcgcctaccncgaccccgaacgancgacgcgacccatacgactaaaaacgtaaactaaaaacgaataacgaacgcgccgacccgaacccgaacgataattaaccgcctactaaccgcgactacgacccgaaaaacgaacgaaaaacgcaaacgtaactaaataccgccgaactaaaaaaatactactatccctatttctctacacgtactcgatnacgctacctactatccaacgntcgtactcctaaacacgacgcccacctacgtattaacttaaaaaatctaacgactactctccgccttcctacccgcccgcttctaccaaacgctaaacgaccgactctactacgtctaccataacataatactcttcttcttcgaaaattacaccgaaatccaaataaaccgcctcccgctcccgaatctcgacgtccacccgaactcccgaaaacgcgaacctctccgctcccccacaactaacgaaaatcacccgaccgacccgacgaacccaacacgaaaaacacgtaccgcctccccgccttcctctccgcatacttcctaccgttctaccgaaatcgctctctaaaaaactataactacgtcgtcctaaaactacgaataaaacccgccgcccctttccccgcccctcgcc

SEQ ID NO: 9159 - DNA, 756 bp, Artificial Sequence
  chemically treated genomic DNA (Homo sapiens) CpG-island No: 9159
  unsure (44, 77, 92, 114, 128, 319, 340)
gggtgagggttatggggtgtgagtatttttgagttttcgatttngggagggtcgcgggtttttttgttttttcgttngggagcggcgtattnacgtttttttattcgtttattncggtttcgggcggncggcgcggtttatgcggttgggggcgtaggttgggagcgggtggcgggcgcgtcggttcgggttcgggcggtgattggtcgtttgttggtcgcgattgcggttcgggaggcgggcggggagcgtaggcgtagttgggtgtcgtcgggttggaaagatgttgttgtttttgtttttttatacgtattcgatngcgttatttgttgtttagcgntcgtgtttttgggtacggcgtttatttacgtgttggtttggggggtttggcggttgtttttcgtttttttgttcgttcgtttttattaagcgttggacgatcggttttattgcgtttattatagtatggtgtttttttttttcgagaattatatcggggtttaggtgagtcgtttttcgttttcgggtttcggcgtttattcgagttttcgggggcgcggattttttcgtttttttatagttggcgagggttattcggtcggttcggcggatttagtacggagagtacgtgtcgttttttcgttttttttttcgtatgttttttgtcgttttgtcgagatcgttttttaggaagttgtggttgcgtcgttttgaggttacgagtgggattcgtcgttttttttttcgtttttcgtt

SEQ ID NO: 9160 - DNA, 756 bp, Artificial Sequence
  chemically treated genomic DNA (Homo sapiens) CpG-island No: 9160
  unsure (417, 438, 629, 643, 665, 680, 713)
aacgaaaaacgaaaaaaaaaacgacgaatcccactcgtaacctcaaaacgacgcaaccacaacttcctaaaaaacgatctcgacaaaacgacaaaaaacatacgaaaaaaaaaacgaaaaaacgacacgtactctccgtactaaatccgccgaaccgaccgaataaccctcgccaactataaaaaaacgaaaaaatccgcgcccccgaaaactcgaataaacgccgaaacccgaaaacgaaaaacgactcacctaaaccccgatataattctcgaaaaaaaaaaacaccatactataataaacgcaataaaaccgatcgtccaacgcttaataaaaacgaacgaacaaaaaaacgaaaaacaaccgccaaaccccccaaaccaacacgtaaataaacgccgtacccaaaaacacgancgctaaacaacaaataacgcnatcgaatacgtataaaaaaacaaaaacaacaacatctttccaacccgacgacacccaactacgcctacgctccccgcccgcctcccgaaccgcaatcgcgaccaacaaacgaccaatcaccgcccgaacccgaaccgacgcgcccgccacccgctcccaacctacgcccccaaccgcataaaccgcgccgnccgcccgaaaccgnaataaacgaataaaaaaacgtnaatacgccgctcccnaacgaaaaaacaaaaaaacccgcgaccctcccnaaatcgaaaactcaaaaatactcacaccccataaccctcaccc

SEQ ID NO: 9161 - DNA, 1692 bp, Artificial Sequence
  chemically treated genomic DNA (Homo sapiens) CpG-island No: 9161
  unsure (667, 741, 755, 1452, 1539, 1568)
ttcgacgtttttgataggcgttcgtttttcgcgtatttttatcgttagcggtgttttgtattcgaaacggggttttcgggcgtttttcgtattttttttacgtttttttataggtttttttagttttcgggtcggagtcgggttcgtttttcgcgaacgcggtaataaaggcgaggagcggcggcgggttttggacgcggggtagttaggttcggttatttttagagcgtagcgtagttttagttgcgagtagtcgtacggattttagagtcgttcgtcgcgtttttagtttagtttcggtcggggttcgttcggaatagcgacgttttaggttcggtaagtttttttcggattttgggtcgagttttttcgtttcgttcgttttaggtttcggatgtgacggtatcgtcgttcgtagcgttcgttttacgggtcgcgcgtggagggtttcggtaggtggcggggggagggggttttttcgtcggttcgcggtttttacgtatttaagtgaggaggttttcgtatagtttcgttcgttttagcgattttacgttgaatatttttttcgtcgcggttaggtagcgtttatcgtttggttagatatcgtcgtcgttttgtcgggggattcgggggttcgcgtagttgattcggttttaggttcgtttgntttttcggattcggtcgtcgattttcgtttagcgttggtagcggtttcgtatcgttatttttagcgtttttttnttttttttttattncgggatcgcgcgttagtcgcgcgcgatttcggatacgttcgtcgtttcgcgttttcgttttcggtcgtttatatcgtttttttttagcgtcgtcgttttggttggagtcgaggtcgaggagttattgcgtacgttcgcgtttcggtcgattcgcgtcgtcgcgtcgtcgtcgtcgtcgtcgtcgtcgtcgttgtcgtcgggcgcgttttcgttattagttcgttgcgtgtcgaggcgagtacgcgtttcgttttggaggttgcggcgacgggttttttttcgtcgttcggtcgcgttttcgcggaagttcggtagtgcgcgtgcgttcgtattcgtattttaaattagaaaggggacgtttagtgggttgttcgggaggggtggcgggagcggttttggaaataatttgttttttgtcgtcgggaattggcgaggtagttttttcgcggtggagaggtacgttcggcgcgcggcggttacgtttattttatcggggttcgcggagtcgcggacggcggggtttggtttttttggggtagttttggtcgtcgaggttttgcggggcggcgggagtcgtcgttttttttttttcgggtttttttttcgtttggaagttttagaatcgtttcgcggttgttcggagtcgtcggcgacggtggaggggtcgacgcggagagcggttttaggtgggtttggncggcggcgaggatatcgtcgttttttttagggtcgttcggagcgtgattttgagaattttttttaatgtaggaggggtgtgcgtttngttcgttaattcgtaaggatatcggtcgnatttcgggtttgcgttttttagcgttcggagttgttttcgtttaatggcgaggcggatcgttttggagtttttatttttttagaggtacgaatttgtttgttgggttgtcgataaatttttaat

SEQ ID NO: 9162 - DNA, 1692 bp, Artificial Sequence
  chemically treated genomic DNA (Homo sapiens) CpG-island No: 9162
  unsure (125, 154, 241, 938, 952, 1026)
attaaaaatttatcgacaacccaacaaacaaattcgtacctctaaaaaaataaaaactccaaaacgatccgcctcgccattaaacgaaaacaactccgaacgctaaaaaacgcaaacccgaaatncgaccgatatccttacgaattaacgaacnaaacgcacacccctcctacattaaaaaaaattctcaaaatcacgctccgaacgaccctaaaaaaaacgacgatatcctcgccgccgnccaaacccacctaaaaccgctctccgcgtcgacccctccaccgtcgccgacgactccgaacaaccgcgaaacgattctaaaacttccaaacgaaaaaaaaacccgaaaaaaaaaaaacgacgactcccgccgccccgcaaaacctcgacgaccaaaactaccccaaaaaaaccaaaccccgccgtccgcgactccgcgaaccccgataaaataaacgtaaccgccgcgcgccgaacgtacctctccaccgcgaaaaaactacctcgccaattcccgacgacaaaaaacaaattatttccaaaaccgctcccgccacccctcccgaacaacccactaaacgtcccctttctaatttaaaatacgaatacgaacgcacgcgcactaccgaacttccgcgaaaacgcgaccgaacgacgaaaaaaaacccgtcgccgcaacctccaaaacgaaacgcgtactcgcctcgacacgcaacgaactaataacgaaaacgcgcccgacgacaacgacgacgacgacgacgacgacgacgacgcgacgacgcgaatcgaccgaaacgcgaacgtacgcaataactcctcgacctcgactccaaccaaaacgacgacgctaaaaaaaaacgatataaacgaccgaaaacgaaaacgcgaaacgacgaacgtatccgaaatcgcgcgcgactaacgcgcgatcccgnaataaaaaaaaaanaaaaaaacgctaaaaataacgatacgaaaccgctaccaacgctaaacgaaaatcgacgaccgaatccgaaaaancaaacgaacctaaaaccgaatcaactacgcgaacccccgaatcccccgacaaaacgacgacgatatctaaccaaacgataaacgctacctaaccgcgacgaaaaaaatattcaacgtaaaatcgctaaaacgaacgaaactatacgaaaacctcctcacttaaatacgtaaaaaccgcgaaccgacgaaaaaaccccctccccccgccacctaccgaaaccctccacgcgcgacccgtaaaacgaacgctacgaacgacgataccgtcacatccgaaacctaaaacgaacgaaacgaaaaaactcgacccaaaatccgaaaaaaacttaccgaacctaaaacgtcgctattccgaacgaaccccgaccgaaactaaactaaaaacgcgacgaacgactctaaaatccgtacgactactcgcaactaaaactacgctacgctctaaaaataaccgaacctaactaccccgcgtccaaaacccgccgccgctcctcgcctttattaccgcgttcgcgaaaaacgaacccgactccgacccgaaaactaaaaaaacctataaaaaaacgtaaaaaaaatacgaaaaacgcccgaaaaccccgtttcgaatacaaaacaccgctaacgataaaaatacgcgaaaaacgaacgcctatcaaaaacgtcgaa

SEQ ID NO: 9163 - DNA, 1692 bp, Artificial Sequence
  chemically treated genomic DNA (Homo sapiens) CpG-island No: 9163
  unsure (125, 154, 241, 938, 952, 1026)
gttaaaaatttatcggtagtttagtagatagattcgtgtttttaaagaggtggaagttttagaacgattcgtttcgttattaagcgaaggtaatttcgaacgttgagaaacgtaggttcggggtncggtcggtgtttttacggattggcgagtngggcgtatattttttttgtattaaggagagtttttagggttacgtttcgagcgattttagagggagcggcggtgttttcgtcgtcgnttaaatttatttagagtcgtttttcgcgtcggtttttttatcgtcgtcggcgatttcggatagtcgcggggcgattttggggtttttagacgagggaggggttcggggggaaggaggcggcgattttcgtcgtttcgtagagtttcggcggttagagttattttaagaaggttagatttcgtcgttcgcggtttcgcgggtttcgatagggtgggcgtggtcgtcgcgcgtcggacgtatttttttatcgcgaaggaattatttcgttagttttcggcgatagaggatagattatttttaggatcgttttcgttatttttttcgggtaatttattagacgttttttttttaatttggagtgcgggtgcgggcgtacgcgtattgtcgagttttcgcgagggcgcgatcggacggcggaggaggattcgtcgtcgtagtttttagggcggagcgcgtgttcgtttcgatacgtagcgaattggtggcgggggcgcgttcggcggtagcggcggcggcggcggcggcggcggcggcgcggcggcgcgggtcggtcggggcgcgagcgtgcgtagtggtttttcggtttcggttttagttagggcggcggcgttggggaggagcggtgtgggcggtcgggggcggggacgcggggcggcgggcgtgttcgaagtcgcgcgcggttggcgcgcggtttcgnagtgaaaggagaanggaggggcgttgggggtgacggtgcggagtcgttgttagcgttgggcgagagtcggcggtcggattcgaggagntaggcgggtttgaggtcgagttagttgcgcgggttttcggatttttcgatagagcggcggcggtgtttggttaggcggtaggcgttgtttggtcgcggcggggaagatgtttagcgtagagtcgttggagcgggcggagttgtgcgagagtttttttatttgggtacgtgggggtcgcgggtcggcgggaagatttttttttttcgttatttatcgggattttttacgcgcggttcgtggggcgagcgttgcgggcgacggtgtcgttatattcggggtttggggcgggcggggcgaggaggttcggtttagggttcgagagagatttgtcgggtttgaggcgtcgttgtttcgggcggatttcggtcggggttgggttgggaacgcggcgggcgattttgggattcgtgcggttgttcgtagttggggttgcgttgcgttttgggggtggtcgagtttgattgtttcgcgtttaggattcgtcgtcgtttttcgtttttgttgtcgcgttcgcggaggacgggttcggtttcggttcgggaattgaaaggatttgtgagggagcgtggggagaatgcgggaggcgttcggggatttcgtttcggatgtaaggtatcgttggcggtgggagtgcgcgaggggcggacgtttgttagaggcgtcggg

SEQ ID NO: 9164 - DNA, 1692 bp, Artificial Sequence
  chemically treated genomic DNA (Homo sapiens) CpG-island No: 9164
  unsure (667, 741, 755, 1452, 1539, 1568)
cccgacgcctctaacaaacgtccgcccctcgcgcactcccaccgccaacgataccttacatccgaaacgaaatccccgaacgcctcccgcattctccccacgctccctcacaaatcctttcaattcccgaaccgaaaccgaacccgtcctccgcgaacgcgacaacaaaaacgaaaaacgacgacgaatcctaaacgcgaaacaatcaaactcgaccacccccaaaacgcaacgcaaccccaactacgaacaaccgcacgaatcccaaaatcgcccgccgcgttcccaacccaaccccgaccgaaatccgcccgaaacaacgacgcctcaaacccgacaaatctctctcgaaccctaaaccgaacctcctcgccccgcccgccccaaaccccgaatataacgacaccgtcgcccgcaacgctcgccccacgaaccgcgcgtaaaaaatcccgataaataacgaaaaaaaaaaatcttcccgccgacccgcgacccccacgtacccaaataaaaaaactctcgcacaactccgcccgctccaacgactctacgctaaacatcttccccgccgcgaccaaacaacgcctaccgcctaaccaaacaccgccgccgctctatcgaaaaatccgaaaacccgcgcaactaactcgacctcaaacccgcctanctcctcgaatccgaccgccgactctcgcccaacgctaacaacgactccgcaccgtcacccccaacgcccctccnttctcctttcactncgaaaccgcgcgccaaccgcgcgcgacttcgaacacgcccgccgccccgcgtccccgcccccgaccgcccacaccgctcctccccaacgccgccgccctaactaaaaccgaaaccgaaaaaccactacgcacgctcgcgccccgaccgacccgcgccgccgcgccgccgccgccgccgccgccgccgccgctaccgccgaacgcgcccccgccaccaattcgctacgtatcgaaacgaacacgcgctccgccctaaaaactacgacgacgaatcctcctccgccgtccgatcgcgccctcgcgaaaactcgacaatacgcgtacgcccgcacccgcactccaaattaaaaaaaaaacgtctaataaattacccgaaaaaaataacgaaaacgatcctaaaaataatctatcctctatcgccgaaaactaacgaaataattccttcgcgataaaaaaatacgtccgacgcgcgacgaccacgcccaccctatcgaaacccgcgaaaccgcgaacgacgaaatctaaccttcttaaaataactctaaccgccgaaactctacgaaacgacgaaaatcgccgcctccttccccccgaacccctccctcgtctaaaaaccccaaaatcgccccgcgactatccgaaatcgccgacgacgataaaaaaaccgacgcgaaaaacgactctaaataaatttaancgacgacgaaaacaccgccgctccctctaaaatcgctcgaaacgtaaccctaaaaactctccttaatacaaaaaaaatatacgcccnactcgccaatccgtaaaaacaccgaccgnaccccgaacctacgtttctcaacgttcgaaattaccttcgcttaataacgaaacgaatcgttctaaaacttccacctctttaaaaacacgaatctatctactaaactaccgataaatttttaac

SEQ ID NO: 9165 - DNA, 861 bp, Artificial Sequence
  chemically treated genomic DNA (Homo sapiens) CpG-island No: 9165
  unsure (323, 819)
gtcggttgcggaggtggggacgcggtcgcgcggacgagtgataggttggttcggcgtagtaaagggagcgggtgcggcggtagggttttttcgggggtagcgcgagggtttttttcggggtagcgcgggttaaggcggggtttttagagcgggggtagtagaggagggagcggaacgggagtcgggcggaggcggttgcggtagggggaggcgggaggcgggcgcgttagtttttatgttggtttcggtgttattcgcgcgtcggtcgcgtttcgggtttttttttttttttcgacgcgttacggttgtttagatatttcggnttgtcgggtttggagagtttttcgaattttttcgcggagaggagcgaggcggcgttagggtggttttcggggcgcgtttggtttcggagaagcggggacgaggtcggaggatgagcgattgagggcgacgcgggtattgacgcgagttggggtcgcgattatcggtagttgatagcgcgatgagcgattttttagagacgttttagttcggtgtgcgcgttaggcggagcgcgtaggtggggttgggttgttagtggttcgttttacgcgggtcgtcggtcggtttaggatgggcgttggtaattcgggttcgcgttcgtcgttgttatttttgcgttcgttgcgagttcggcgttcggttcgcgttttgcgtttatgtatgtaggtttggcgtcggtttttagggttgagggtgtatgttgggtgttttcgcgcggtcggacgcgttttagttgggtttagtcgtttagttgtttcggaggaatttttttttttngtttaagtttgtgaatatgggcgtttcgtttagtgttgaggt

SEQ ID NO: 9166 - DNA, 861 bp, Artificial Sequence
  chemically treated genomic DNA (Homo sapiens) CpG-island No: 9166
  unsure (43, 539)
acctcaacactaaacgaaacgcccatattcacaaacttaaacnaaaaaaaaaaattcctccgaaacaactaaacgactaaacccaactaaaacgcgtccgaccgcgcgaaaacacccaacatacaccctcaaccctaaaaaccgacgccaaacctacatacataaacgcaaaacgcgaaccgaacgccgaactcgcaacgaacgcaaaaataacaacgacgaacgcgaacccgaattaccaacgcccatcctaaaccgaccgacgacccgcgtaaaacgaaccactaacaacccaaccccacctacgcgctccgcctaacgcgcacaccgaactaaaacgtctctaaaaaatcgctcatcgcgctatcaactaccgataatcgcgaccccaactcgcgtcaatacccgcgtcgccctcaatcgctcatcctccgacctcgtccccgcttctccgaaaccaaacgcgccccgaaaaccaccctaacgccgcctcgctcctctccgcgaaaaaattcgaaaaactctccaaacccgacaanccgaaatatctaaacaaccgtaacgcgtcgaaaaaaaaaaaaaaacccgaaacgcgaccgacgcgcgaataacaccgaaaccaacataaaaactaacgcgcccgcctcccgcctccccctaccgcaaccgcctccgcccgactcccgttccgctccctcctctactacccccgctctaaaaaccccgccttaacccgcgctaccccgaaaaaaaccctcgcgctacccccgaaaaaaccctaccgccgcacccgctccctttactacgccgaaccaacctatcactcgtccgcgcgaccgcgtccccacctccgcaaccgac

SEQ ID NO: 9167 - DNA, 861 bp, Artificial Sequence
  chemically treated genomic DNA (Homo sapiens) CpG-island No: 9167
  unsure (43, 539)
attttaatattgggcgaagcgtttatatttataaatttgggtngggggagggggttttttcggagtagttgagcggttgaatttagttggagcgcgttcggtcgcgcggggatatttagtatgtatttttagttttgaagatcggcgttaaatttatatatatgagcgtagggcgcgggtcggacgtcgggttcgtagcgggcgtaggggtagtagcggcgggcgcgggttcgggttgttagcgtttattttgggtcggtcggcgattcgcgtggggcggattattaatagtttagttttatttgcgcgtttcgtttggcgcgtatatcgggttagggcgtttttggggagtcgtttatcgcgttgttagttgtcggtagtcgcggttttaattcgcgttagtgttcgcgtcgtttttagtcgtttatttttcggtttcgttttcgttttttcgagattaagcgcgtttcgggggttattttggcgtcgtttcgttttttttcgcggaggggttcggggagttttttagattcggtagntcggaatgtttgggtagtcgtggcgcgtcggagggaaaagagaagttcggagcgcggtcggcgcgcgagtggtatcgaggttagtatgggagttagcgcgttcgtttttcgtttttttttgtcgtagtcgttttcgttcggttttcgtttcgtttttttttttgttgttttcgttttggaggtttcgttttggttcgcgttgtttcgggggaggttttcgcgttgttttcggagaggttttatcgtcgtattcgttttttttgttgcgtcggattaatttgttattcgttcgcgcggtcgcgtttttattttcgtagtcggt

SEQ ID NO: 9168 - DNA, 861 bp, Artificial Sequence
  chemically treated genomic DNA (Homo sapiens) CpG-island No: 9168
  unsure (323, 819)
accgactacgaaaataaaaacgcgaccgcgcgaacgaataacaaattaatccgacgcaacaaaaaaaacgaatacgacgataaaacctctccgaaaacaacgcgaaaacctcccccgaaacaacgcgaaccaaaacgaaacctccaaaacgaaaacaacaaaaaaaaaaacgaaacgaaaaccgaacgaaaacgactacgacaaaaaaaaacgaaaaacgaacgcgctaactcccatactaacctcgataccactcgcgcgccgaccgcgctccgaacttctcttttccctccgacgcgccacgactacccaaacattccganctaccgaatctaaaaaactccccgaacccctccgcgaaaaaaaacgaaacgacgccaaaataacccccgaaacgcgcttaatctcgaaaaaacgaaaacgaaaccgaaaaataaacgactaaaaacgacgcgaacactaacgcgaattaaaaccgcgactaccgacaactaacaacgcgataaacgactccccaaaaacgccctaacccgatatacgcgccaaacgaaacgcgcaaataaaactaaactattaataatccgccccacgcgaatcgccgaccgacccaaaataaacgctaacaacccgaacccgcgcccgccgctactacccctacgcccgctacgaacccgacgtccgacccgcgccctacgctcatatatataaatttaacgccgatcttcaaaactaaaaatacatactaaatatccccgcgcgaccgaacgcgctccaactaaattcaaccgctcaactactccgaaaaaaccccctcccccnacccaaatttataaatataaacgcttcgcccaatattaaaat

SEQ ID NO: 9169 - DNA, 540 bp, Artificial Sequence
  chemically treated genomic DNA (Homo sapiens) CpG-island No: 9169
aaaggtagcgagaagttcgttttttttgttttgttttcggcgatttgcggttcgggtgggagttcgtaggtttcgggtttttagcgtcgttggttagggcgcgggtaaagtttgttttttcgcgtttagtcggttttttcgttttcgtagcgtcgtaggtgtcgtttgttttcgtttttttgttgtaatcgttttattatggatttttcgatttagatttttcgcggggagtcgggttttatttgcgtttcgagcgtttgtttgttttttaatagtagcgtttggtttttcggttgggtcgagttcgatagtaacggtagcgtcggttcggaggacgcgtagttggagttcgcgtatattttttcggttatttcggttattattacggcggtttatttcgtagtgttcgtcgtgggtttggtgggtaattcgttggttatgttcgtgattattcggtgagcgcggggatagcgtagcgttgggggttgggcggggtagggagtgagggttaggtttcgttattggagtagtagtgggggt

SEQ ID NO: 9170 - DNA, 540 bp, Artificial Sequence
  chemically treated genomic DNA (Homo sapiens) CpG-island No: 9170
acccccactactactccaataacgaaacctaaccctcactccctaccccgcccaacccccaacgctacgctatccccgcgctcaccgaataatcacgaacataaccaacgaattacccaccaaacccacgacgaacactacgaaataaaccgccgtaataataaccgaaataaccgaaaaaatatacgcgaactccaactacgcgtcctccgaaccgacgctaccgttactatcgaactcgacccaaccgaaaaaccaaacgctactattaaaaaacaaacaaacgctcgaaacgcaaataaaacccgactccccgcgaaaaatctaaatcgaaaaatccataataaaacgattacaacaaaaaaacgaaaacaaacgacacctacgacgctacgaaaacgaaaaaaccgactaaacgcgaaaaaacaaactttacccgcgccctaaccaacgacgctaaaaacccgaaacctacgaactcccacccgaaccgcaaatcgccgaaaacaaaacaaaaaaaacgaacttctcgctaccttt

SEQ ID NO: 9171 - DNA, 540 bp, Artificial Sequence
  chemically treated genomic DNA (Homo sapiens) CpG-island No: 9171
gtttttattgttgttttagtggcggggtttgatttttattttttgtttcgtttagtttttagcgttgcgttgttttcgcgtttatcggatgattacgaatatgattagcgagttgtttattaagtttacgacgaatattacggagtagatcgtcgtgatgatgatcgggatggtcggggagatgtgcgcgggttttagttgcgcgtttttcgagtcggcgttgtcgttgttgtcgggttcggtttagtcgggaaattaggcgttgttgttggggggtaggtaggcgttcggggcgtaggtagggttcggtttttcgcggaagatttggatcggggagtttatggtggggcgattgtagtaggaaggcgaggataggcggtatttgcggcgttgcgggagcgaaagaatcggttggacgcggagaggtaaattttgttcgcgttttggttagcggcgttggggattcggagtttgcggatttttattcgggtcgtaagtcgtcgggggtaggatagggagaacggatttttcgttgttttt

SEQ ID NO: 9172 - DNA, 540 bp, Artificial Sequence
  chemically treated genomic DNA (Homo sapiens) CpG-island No: 9172
aaaaacaacgaaaaatccgttctccctatcctacccccgacgacttacgacccgaataaaaatccgcaaactccgaatccccaacgccgctaaccaaaacgcgaacaaaatttacctctccgcgtccaaccgattctttcgctcccgcaacgccgcaaataccgcctatcctcgccttcctactacaatcgccccaccataaactccccgatccaaatcttccgcgaaaaaccgaaccctacctacgccccgaacgcctacctaccccccaacaacaacgcctaatttcccgactaaaccgaacccgacaacaacgacaacgccgactcgaaaaacgcgcaactaaaacccgcgcacatctccccgaccatcccgatcatcatcacgacgatctactccgtaatattcgtcgtaaacttaataaacaactcgctaatcatattcgtaatcatccgataaacgcgaaaacaacgcaacgctaaaaactaaacgaaacaaaaaataaaaatcaaaccccgccactaaaacaacaataaaaac

SEQ ID NO: 9173 - DNA, 638 bp, Artificial Sequence
  chemically treated genomic DNA (Homo sapiens) CpG-island No: 9173
atgtacgtgtgtatacggcgcggtatgtttacgcgtttttacgggcggattggtatttaggcgtggtcgtgcgtatatatacgtatatgtatatagttattagcgtttattcgcgttttttcgtaggtatatataaatagaattcgtattcgcgttttcgtttatacgtttttcgtagggtgtcgggtggaattcgggtttttttaatttttttattcgagaatttcgcgcggagtcgagggtagttttggggcggcgttcgacggggtttggcgaggggatttcgcgttattttttcgggaggttgtgtttgagggtttttttgggttcgtagtcgtattggagttgggggcggtggttaacggcggtcgtacggtttaggttcggagcgggtattagggatcgatattgttatttagcggtgcgtatagtttcggcggcggcggttcgttttttagatgttaggcgtatttggattttagggaaggcgttagagggggtcggaatgtttgcgggtgatttcgaggtgtttaaaacgacgatagttggggcggggcggagtcggggagattttgagtttcgttttgttagtatttggtagtttttttacgcgggttaagagtaggatttaattatcg

SEQ ID NO: 9174 - DNA, 638 bp, Artificial Sequence
  chemically treated genomic DNA (Homo sapiens) CpG-island No: 9174
cgataattaaatcctactcttaacccgcgtaaaaaaactaccaaatactaacaaaacgaaactcaaaatctccccgactccgccccgccccaactatcgtcgttttaaacacctcgaaatcacccgcaaacattccgaccccctctaacgccttccctaaaatccaaatacgcctaacatctaaaaaacgaaccgccgccgccgaaactatacgcaccgctaaataacaatatcgatccctaatacccgctccgaacctaaaccgtacgaccgccgttaaccaccgcccccaactccaatacgactacgaacccaaaaaaaccctcaaacacaacctcccgaaaaaataacgcgaaatcccctcgccaaaccccgtcgaacgccgccccaaaactaccctcgactccgcgcgaaattctcgaataaaaaaattaaaaaaacccgaattccacccgacaccctacgaaaaacgtataaacgaaaacgcgaatacgaattctatttatatatacctacgaaaaaacgcgaataaacgctaataactatatacatatacgtatatatacgcacgaccacgcctaaataccaatccgcccgtaaaaacgcgtaaacataccgcgccgtatacacacgtacat

SEQ ID NO: 9175 - DNA, 638 bp, Artificial Sequence
  chemically treated genomic DNA (Homo sapiens) CpG-island No: 9175
cggtgattaagttttgtttttggttcgcgtgagggagttgttaggtgttgatagggcgaggtttagggttttttcgatttcgtttcgttttagttgtcgtcgttttggatatttcggggttattcgtagatatttcgattttttttggcgttttttttggaatttagatacgtttggtatttggggagcgagtcgtcgtcgtcggggttgtgcgtatcgttagatggtaatgtcggtttttggtgttcgtttcggatttagatcgtgcggtcgtcgttggttatcgtttttaattttaatgcgattgcgaatttagaggagtttttaggtatagtttttcggggaagtgacgcggggttttttcgttaggtttcgtcggacgtcgttttagagttgttttcggtttcgcgcggggttttcgggtgggaaagttgagggagttcggattttattcggtattttgcgaggaacgtgtgggcgggagcgcgagtgcgagttttgtttgtgtgtgtttacgggggagcgcgagtagacgttagtagttgtatgtatgtgcgtgtgtgtgcgtacggttacgtttggatattagttcgttcgtgagagcgcgtgagtatgtcgcgtcgtgtgtatacgtgtat

SEQ ID NO: 9176 - DNA, 638 bp, Artificial Sequence
  chemically treated genomic DNA (Homo sapiens) CpG-island No: 9176
atacacgtatacacacgacgcgacatactcacgcgctctcacgaacgaactaatatccaaacgtaaccgtacgcacacacacgcacatacatacaactactaacgtctactcgcgctcccccgtaaacacacacaaacaaaactcgcactcgcgctcccgcccacacgttcctcgcaaaataccgaataaaatccgaactccctcaactttcccacccgaaaaccccgcgcgaaaccgaaaacaactctaaaacgacgtccgacgaaacctaacgaaaaaaccccgcgtcacttccccgaaaaactatacctaaaaactcctctaaattcgcaatcgcattaaaattaaaaacgataaccaacgacgaccgcacgatctaaatccgaaacgaacaccaaaaaccgacattaccatctaacgatacgcacaaccccgacgacgacgactcgctccccaaataccaaacgtatctaaattccaaaaaaaacgccaaaaaaaatcgaaatatctacgaataaccccgaaatatccaaaacgacgacaactaaaacgaaacgaaatcgaaaaaaccctaaacctcgccctatcaacacctaacaactccctcacgcgaaccaaaaacaaaacttaatcaccg

SEQ ID NO: 9177 - DNA, 935 bp, Artificial Sequence
  chemically treated genomic DNA (Homo sapiens) CpG-island No: 9177
ttttcgcgagtgtatatttgtgagcgtgtagttgtttggtagcggagggatcgggggaggaaagatgcgcgtttggatgcgcgtagtgcgagtgtgttaggtcgggagatttagttttatttaggcgggtcgggtcgggttgggggtagggttttttgttgtttcgtttattcgtcgtttcgtttttcggatcgttttagcgggttgtagcgtagcgggcgttcggtagagggcgttgcgggttcggtgttatcgtgcggtcgagggggcgtgttcggcggcgggtaggtagcggttcggttagttatgcggggttttgcggtcgcggttggcggtattttttggagcggcggcggtagcggtttttcgggtatttgggcgtggggagcgggggcgcgcggcgcggggcgggcggagcgagcgcgcgttatggaggtggcgggcggcgcggagcgggcgtgttgaatttcggtcgtcggttcggtatgggcgtttttcgcgggtttttcgtcggtcggggttagggtcggatggagtcgcgggacggtagtttcgaggttcggagtagcgatttcgagtcggttttcgtttcgtttagcggtttcgagcgcgacgtcggtttcgagtcggataaggcgtcgcggcgatttaataagcggcgtttttcggggttgcggtttttcgggtataggtgagcggggcggcggcggggtaggtatcgaggtatcggtaggttatcgtttttttatcgggggatatttttcggttattgggggtgtcgggttatttcggtattgatattgagtcggggagaggttggtatcggcggtacgagtcgttttggcgtgggtatttattggggagttattttttagggtcgggatacgggcgggatcggtcggtttggtattgttatcgggtgggggttatttttt

SEQ ID NO: 9178 - DNA, 935 bp, Artificial Sequence
  chemically treated genomic DNA (Homo sapiens) CpG-island No: 9178
aaaaaataacccccacccgataacaataccaaaccgaccgatcccgcccgtatcccgaccctaaaaaataactccccaataaatacccacgccaaaacgactcgtaccgccgataccaacctctccccgactcaatatcaataccgaaataacccgacacccccaataaccgaaaaatatcccccgataaaaaaacgataacctaccgatacctcgatacctaccccgccgccgccccgctcacctatacccgaaaaaccgcaaccccgaaaaacgccgcttattaaatcgccgcgacgccttatccgactcgaaaccgacgtcgcgctcgaaaccgctaaacgaaacgaaaaccgactcgaaatcgctactccgaacctcgaaactaccgtcccgcgactccatccgaccctaaccccgaccgacgaaaaacccgcgaaaaacgcccataccgaaccgacgaccgaaattcaacacgcccgctccgcgccgcccgccacctccataacgcgcgctcgctccgcccgccccgcgccgcgcgcccccgctccccacgcccaaatacccgaaaaaccgctaccgccgccgctccaaaaaataccgccaaccgcgaccgcaaaaccccgcataactaaccgaaccgctacctacccgccgccgaacacgccccctcgaccgcacgataacaccgaacccgcaacgccctctaccgaacgcccgctacgctacaacccgctaaaacgatccgaaaaacgaaacgacgaataaacgaaacaacaaaaaaccctacccccaacccgacccgacccgcctaaataaaactaaatctcccgacctaacacactcgcactacgcgcatccaaacgcgcatctttcctcccccgatccctccgctaccaaacaactacacgctcacaaatatacactcgcgaaaa

SEQ ID NO: 9179 - DNA, 935 bp, Artificial Sequence
  chemically treated genomic DNA (Homo sapiens) CpG-island No: 9179
agggaatgatttttattcggtgatagtgttaagtcgatcgatttcgttcgtgtttcggttttgggggatgattttttagtgggtgtttacgttaagacggttcgtgtcgtcggtgttagttttttttcgatttagtgttagtatcgaagtggttcggtatttttagtggtcgaggaatgtttttcggtgagggagcggtaatttgtcggtgtttcggtgtttgtttcgtcgtcgtttcgtttatttgtgttcgaagagtcgtagtttcgggaagcgtcgtttgttgagtcgtcgcggcgttttgttcggttcgggatcggcgtcgcgttcggagtcgttggacgaggcggaagtcgattcggagtcgttgtttcgggtttcggggttatcgtttcgcggttttattcggttttagtttcggtcggcggagggttcgcgggagacgtttatgtcgggtcggcggtcggggtttagtacgttcgtttcgcgtcgttcgttatttttatggcgcgcgttcgtttcgttcgtttcgcgtcgcgcgttttcgttttttacgtttaggtgttcgggaagtcgttgtcgtcgtcgttttaggaagtgtcgttagtcgcggtcgtaggatttcgtatagttggtcgggtcgttgtttgttcgtcgtcgagtacgttttttcggtcgtacggtggtatcgggttcgtagcgttttttgtcggacgttcgttgcgttgtagttcgttggggcggttcgaggggcggggcgacgaatgggcggggtagtagaaagttttgtttttagttcggttcggttcgtttggatgggattgaatttttcggtttggtatattcgtattgcgcgtatttagacgcgtattttttttttttcgattttttcgttattaaataattgtacgtttataagtgtatattcgcgaggg

SEQ ID NO: 9180 - DNA, 935 bp, Artificial Sequence
  chemically treated genomic DNA (Homo sapiens) CpG-island No: 9180
ccctcgcgaatatacacttataaacgtacaattatttaataacgaaaaaatcgaaaaaaaaaaaatacgcgtctaaatacgcgcaatacgaatataccaaaccgaaaaattcaatcccatccaaacgaaccgaaccgaactaaaaacaaaactttctactaccccgcccattcgtcgccccgcccctcgaaccgccccaacgaactacaacgcaacgaacgtccgacaaaaaacgctacgaacccgataccaccgtacgaccgaaaaaacgtactcgacgacgaacaaacaacgacccgaccaactatacgaaatcctacgaccgcgactaacgacacttcctaaaacgacgacgacaacgacttcccgaacacctaaacgtaaaaaacgaaaacgcgcgacgcgaaacgaacgaaacgaacgcgcgccataaaaataacgaacgacgcgaaacgaacgtactaaaccccgaccgccgacccgacataaacgtctcccgcgaaccctccgccgaccgaaactaaaaccgaataaaaccgcgaaacgataaccccgaaacccgaaacaacgactccgaatcgacttccgcctcgtccaacgactccgaacgcgacgccgatcccgaaccgaacaaaacgccgcgacgactcaacaaacgacgcttcccgaaactacgactcttcgaacacaaataaacgaaacgacgacgaaacaaacaccgaaacaccgacaaattaccgctccctcaccgaaaaacattcctcgaccactaaaaataccgaaccacttcgatactaacactaaatcgaaaaaaaactaacaccgacgacacgaaccgtcttaacgtaaacacccactaaaaaatcatcccccaaaaccgaaacacgaacgaaatcgatcgacttaacactatcaccgaataaaaatcattccct

SEQ ID NO: 9181 - DNA, 824 bp, Artificial Sequence
  chemically treated genomic DNA (Homo sapiens) CpG-island No: 9181
gttttcgtaggtgtagttggcggaaacgtttttttatcgggggtttagcggtcgtgtttcgggaattttcgggttagggttgcgcgatttgggtttttttttcgcgtcggtatcgtcgtcgtattatttttttttcggttgttcggtcgtcgttagtttagttttagcgttgtttttcgtcgttttgtttttcggttatcgtgcggtcgtttttcgttcgcggtttttgcggtttttcgggtattcgtttaagttcgagtttttagttcgttcgggtcggggacgcgaggcggggagggaggggagcgtcgggtttcgttggtttttagcgacgtcgacgtttagacgataggagtagcgagatgttgggcgttgcgtttgggagaggcgggtcggggtttttttgcgtttcgggggggcgggggtttttggttggagtcggggtgttgcgttttgcgcgtcgcggcgtttttcggacggttggagcggagtcggagttcgggcggagagcgagtttttgtaatcgtcgttgttgtcgcgtattcgagtgttattttagagatattttttagtcggtggggttcggaggggagggcgtcgtttcgtttagttcgttcgtttagggtacgaagggagcgagttcggtttagtttattacgggtacgaatttagtttagggcgtaaggttcggggtgtggggcgttttttgcgattatttatgcgttttcgttcgggttttagtttaggtagttcggtagttgttaattattatttcgtcgtttgttatttagttattgcgatgtgttttttttatttttacggtt

SEQ ID NO: 9182 - DNA, 824 bp, Artificial Sequence
  chemically treated genomic DNA (Homo sapiens) CpG-island No: 9182
aaccgtaaaaataaaaaaaacacatcgcaataactaaataacaaacgacgaaataataattaacaactaccgaactacctaaactaaaacccgaacgaaaacgcataaataatcgcaaaaaacgccccacaccccgaaccttacgccctaaactaaattcgtacccgtaataaactaaaccgaactcgctcccttcgtaccctaaacgaacgaactaaacgaaacgacgccctcccctccgaaccccaccgactaaaaaatatctctaaaataacactcgaatacgcgacaacaacgacgattacaaaaactcgctctccgcccgaactccgactccgctccaaccgtccgaaaaacgccgcgacgcgcaaaacgcaacaccccgactccaaccaaaaacccccgcccccccgaaacgcaaaaaaaccccgacccgcctctcccaaacgcaacgcccaacatctcgctactcctatcgtctaaacgtcgacgtcgctaaaaaccaacgaaacccgacgctcccctccctccccgcctcgcgtccccgacccgaacgaactaaaaactcgaacttaaacgaatacccgaaaaaccgcaaaaaccgcgaacgaaaaacgaccgcacgataaccgaaaaacaaaacgacgaaaaacaacgctaaaactaaactaacgacgaccgaacaaccgaaaaaaaaataatacgacgacgataccgacgcgaaaaaaaaacccaaatcgcgcaaccctaacccgaaaattcccgaaacacgaccgctaaacccccgataaaaaaacgtttccgccaactacacctacgaaaac

SEQ ID NO: 9183 - DNA, 824 bp, Artificial Sequence
  chemically treated genomic DNA (Homo sapiens) CpG-island No: 9183
agtcgtgggggtggaggggatatatcgtagtagttgagtgataggcggcggggtgatgattggtagttgtcgagttgtttggattaggattcgggcgggggcgtataggtggtcgtaggaggcgttttatatttcgggttttgcgttttgagttaggttcgtgttcgtggtgggttgggtcgggttcgtttttttcgtgttttgagcgggcgggttgggcggagcggcgttttttttttcggattttatcggttggagagtgtttttaaggtgatattcgggtgcgcggtagtagcggcggttgtaggagttcgtttttcgttcgggtttcggtttcgttttagtcgttcggggggcgtcgcggcgcgtagagcgtagtatttcgattttagttaggagttttcgttttttcggagcgtaggaggatttcggttcgttttttttaggcgtagcgtttagtatttcgttgtttttgtcgtttaagcgtcggcgtcgttagggattagcggaattcggcgttttttttttttttcgtttcgcgttttcggttcgggcggattggagattcgaatttgagcgggtgttcgaaaggtcgtaggagtcgcgggcggaaggcggtcgtacgatggtcgaggggtagggcggcggagggtagcgttgggattgggttggcggcggtcgggtagtcgaggaggaggtggtgcggcggcgatgtcggcgcggggaggaggtttaggtcgcgtagttttggttcgagggttttcggggtacggtcgttgggttttcggtggaggagcgttttcgttagttgtatttacgaaagt

SEQ ID NO: 9184 - DNA, 824 bp, Artificial Sequence
  chemically treated genomic DNA (Homo sapiens) CpG-island No: 9184
actttcgtaaatacaactaacgaaaacgctcctccaccgaaaacccaacgaccgtaccccgaaaaccctcgaaccaaaactacgcgacctaaacctcctccccgcgccgacatcgccgccgcaccacctcctcctcgactacccgaccgccgccaacccaatcccaacgctaccctccgccgccctacccctcgaccatcgtacgaccgccttccgcccgcgactcctacgacctttcgaacacccgctcaaattcgaatctccaatccgcccgaaccgaaaacgcgaaacgaaaaaaaaaaaaaacgccgaattccgctaatccctaacgacgccgacgcttaaacgacaaaaacaacgaaatactaaacgctacgcctaaaaaaaacgaaccgaaatcctcctacgctccgaaaaaacgaaaactcctaactaaaatcgaaatactacgctctacgcgccgcgacgccccccgaacgactaaaacgaaaccgaaacccgaacgaaaaacgaactcctacaaccgccgctactaccgcgcacccgaatatcaccttaaaaacactctccaaccgataaaatccgaaaaaaaaaacgccgctccgcccaacccgcccgctcaaaacacgaaaaaaacgaacccgacccaacccaccacgaacacgaacctaactcaaaacgcaaaacccgaaatataaaacgcctcctacgaccacctatacgcccccgcccgaatcctaatccaaacaactcgacaactaccaatcatcaccccgccgcctatcactcaactactacgatatatcccctccacccccacgact

SEQ ID NO: 9185 - DNA, 704 bp, Artificial Sequence
  chemically treated genomic DNA (Homo sapiens) CpG-island No: 9185
aacgcggcgttttttcgcgggttgggaaagaagttggtagttgggtataggtcggcgttttcgttttcgttttgattatattggggggattttgagttattttcgcgttttttcgggattttagcgttttgcgtggtttcgttggcggtttggtcgcgaggcgcgggagtttgattttagcgggaggttgcgggtgggtggggcgggttgcgtcgttagggattcgtcggggtcgagggtcgggagttttagtcgcgtcgttgcgtgtcggtcgggtcgttcgcgaggaggggcgtcgtcggggtttggggaagcgtaggagcgggtggattggagaggttcggtcggggagagaagagtttatcgcggattattcgttcgtattcgttcggttgtttgtttagcgtttcgggtcggggaaggggcgcgtttttgtttttttagttttgggatgggacgcgtcgttagtttaggcgtagtttggatcgttagtttatcgtcgtttgtgagggatagtcggttgtttaaggtcgtcggggtcggagttcgggataagatttcggagagcgggtagttaattttagaggtcgttgggaatcgtacgggtcgtagttttaggatttcgggtttcgtttaggttgggcggattttggggcggttttagtatttcggagagtttttcgcgttttggtttagtagtttcg

SEQ ID NO: 9186 - DNA, 704 bp, Artificial Sequence
  chemically treated genomic DNA (Homo sapiens) CpG-island No: 9186
cgaaactactaaaccaaaacgcgaaaaactctccgaaatactaaaaccgccccaaaatccgcccaacctaaacgaaacccgaaatcctaaaactacgacccgtacgattcccaacgacctctaaaattaactacccgctctccgaaatcttatcccgaactccgaccccgacgaccttaaacaaccgactatccctcacaaacgacgataaactaacgatccaaactacgcctaaactaacgacgcgtcccatcccaaaactaaaaaaacaaaaacgcgccccttccccgacccgaaacgctaaacaaacaaccgaacgaatacgaacgaataatccgcgataaactcttctctccccgaccgaacctctccaatccacccgctcctacgcttccccaaaccccgacgacgcccctcctcgcgaacgacccgaccgacacgcaacgacgcgactaaaactcccgaccctcgaccccgacgaatccctaacgacgcaacccgccccacccacccgcaacctcccgctaaaatcaaactcccgcgcctcgcgaccaaaccgccaacgaaaccacgcaaaacgctaaaatcccgaaaaaacgcgaaaataactcaaaatccccccaatataatcaaaacgaaaacgaaaacgccgacctatacccaactaccaacttctttcccaacccgcgaaaaaacgccgcgtt

SEQ ID NO: 9187 - DNA, 704 bp, Artificial Sequence
  chemically treated genomic DNA (Homo sapiens) CpG-island No: 9187
cgaggttgttgggttagggcgcggggagtttttcgaggtgttgaagtcgttttaaggttcgtttagtttgggcgaggttcggagttttgaggttacggttcgtgcggtttttagcgatttttgagattggttgttcgtttttcgggattttgtttcgggtttcggtttcggcgattttgggtaatcgattgttttttataggcggcggtgaattggcggtttaggttgcgtttggattggcggcgcgttttattttagggttgggagagtaggggcgcgtttttttttcggttcggaacgttgagtaggtagtcgagcgggtgcgggcgagtggttcgcggtgggttttttttttttcggtcgaatttttttagtttattcgtttttgcgtttttttaggtttcgacggcgttttttttcgcgggcggttcggtcggtacgtagcggcgcggttggagttttcggttttcgatttcgacggatttttggcggcgtagttcgttttatttattcgtagtttttcgttggggttagattttcgcgtttcgcggttaaatcgttagcggggttacgtagggcgttgaggtttcggagaggcgcgaaaatagtttagggtttttttagtatggttagggcggaggcgggagcgtcggtttgtatttagttgttagttttttttttagttcgcgagggggcgtcgcgtt

SEQ ID NO: 9188 - DNA, 704 bp, Artificial Sequence
  chemically treated genomic DNA (Homo sapiens) CpG-island No: 9188
aacgcgacgccccctcgcgaactaaaaaaaaaactaacaactaaatacaaaccgacgctcccgcctccgccctaaccatactaaaaaaaccctaaactattttcgcgcctctccgaaacctcaacgccctacgtaaccccgctaacgatttaaccgcgaaacgcgaaaatctaaccccaacgaaaaactacgaataaataaaacgaactacgccgccaaaaatccgtcgaaatcgaaaaccgaaaactccaaccgcgccgctacgtaccgaccgaaccgcccgcgaaaaaaaacgccgtcgaaacctaaaaaaacgcaaaaacgaataaactaaaaaaattcgaccgaaaaaaaaaaaacccaccgcgaaccactcgcccgcacccgctcgactacctactcaacgttccgaaccgaaaaaaaaacgcgcccctactctcccaaccctaaaataaaacgcgccgccaatccaaacgcaacctaaaccgccaattcaccgccgcctataaaaaacaatcgattacccaaaatcgccgaaaccgaaacccgaaacaaaatcccgaaaaacgaacaaccaatctcaaaaatcgctaaaaaccgcacgaaccgtaacctcaaaactccgaacctcgcccaaactaaacgaaccttaaaacgacttcaacacctcgaaaaactccccgcgccctaacccaacaacctcg

SEQ ID NO: 9189 - DNA, 723 bp, Artificial Sequence
  chemically treated genomic DNA (Homo sapiens) CpG-island No: 9189
  unsure (93)
cggtcgggcgattttaaaagttgtagtagtaagcggtttcgcggcgtggttttagaattgggggtttagtcgtatagtgttcggatttcgttnatattttgtagttacgttgttgcgacgagcgggagtcgggttagatcgcgaggttattcgtggagtttcgggtattttttgtaaggtcgtttatcgagtttcgagtttcgtttatggggttatattttgagttcgtcgcgtatagacgcgttatatagtgttattaattttttatattttaaaattaacgtcgttttcggagtgatttttttaagagtagcggcgttgtcgttagttatatcgtatagtcgtacgttgtcgtaaaatggttttcgtaggtttattttattcgttttttaggttagaaatgcgcggtacgtacgttttttttttacggagcggggacgaggggtattacggggtaggagtgttttagaggggtttgtgcgggcgtaagtttgggagaaataatagacggaaaggggtggaaagtggtagggttttaggggaggtattcgaaagggtgagacggggtttaagagatgataagggtacgatcgagggggaggggtttaaaaaggcgtagagacgcgggttaattgcggtcgagtggtttgagagtttgggtcgaggggcgtggttaagttttttggaaaagttggaagtgagttcgggaattggttagggtag

SEQ ID NO: 9190 - DNA, 723 bp, Artificial Sequence
  chemically treated genomic DNA (Homo sapiens) CpG-island No: 9190
  unsure (631)
ctaccctaaccaattcccgaactcacttccaacttttccaaaaaacttaaccacgcccctcgacccaaactctcaaaccactcgaccgcaattaacccgcgtctctacgcctttttaaacccctccccctcgatcgtacccttatcatctcttaaaccccgtctcaccctttcgaatacctcccctaaaaccctaccactttccacccctttccgtctattatttctcccaaacttacgcccgcacaaacccctctaaaacactcctaccccgtaatacccctcgtccccgctccgtaaaaaaaaaacgtacgtaccgcgcatttctaacctaaaaaacgaataaaataaacctacgaaaaccattttacgacaacgtacgactatacgatataactaacgacaacgccgctactcttaaaaaaatcactccgaaaacgacgttaattttaaaatataaaaaattaataacactatataacgcgtctatacgcgacgaactcaaaatataaccccataaacgaaactcgaaactcgataaacgaccttacaaaaaatacccgaaactccacgaataacctcgcgatctaacccgactcccgctcgtcgcaacaacgtaactacaaaatatnaacgaaatccgaacactatacgactaaacccccaattctaaaaccacgccgcgaaaccgcttactactacaacttttaaaatcgcccgaccg

SEQ ID NO: 9191 - DNA, 723 bp, Artificial Sequence
  chemically treated genomic DNA (Homo sapiens) CpG-island No: 9191
  unsure (631)
ttgttttagttagttttcgggtttatttttagtttttttagaaagtttggttacgtttttcggtttagatttttaggttattcggtcgtaattaattcgcgtttttgcgtttttttaggtttttttttttcggtcgtgtttttgttattttttaggtttcgttttattttttcggatgttttttttagaattttattattttttattttttttcgtttgttattttttttaaatttgcgttcgtataggtttttttggaatatttttgtttcgtagtgtttttcgttttcgtttcgtagagaaagagcgtgcgtgtcgcgtatttttggtttggggagcgggtggagtaaatttgcgggaattattttacgataacgtgcggttgtgcggtgtggttgacggtaacgtcgttgtttttggagaggttatttcggagacggcgttggttttggggtgtggggggttggtggtattatgtggcgcgtttgtgcgcgacgggtttagaatgtagttttatgggcgggattcgaggttcggtggacggttttgtaggaggtattcggaattttacgagtgatttcgcgatttggttcggttttcgttcgtcgtaatagcgtgattatagggtatnggcggggttcgggtattgtgcggttggatttttagttttggggttacgtcgcggaatcgtttattgttgtagtttttggggtcgttcggtcg

SEQ ID NO: 9192 - DNA, 723 bp, Artificial Sequence
  chemically treated genomic DNA (Homo sapiens) CpG-island No: 9192
  unsure (93)
cgaccgaacgaccccaaaaactacaacaataaacgattccgcgacgtaaccccaaaactaaaaatccaaccgcacaatacccgaaccccgccnataccctataatcacgctattacgacgaacgaaaaccgaaccaaatcgcgaaatcactcgtaaaattccgaatacctcctacaaaaccgtccaccgaacctcgaatcccgcccataaaactacattctaaacccgtcgcgcacaaacgcgccacataataccaccaaccccccacaccccaaaaccaacgccgtctccgaaataacctctccaaaaacaacgacgttaccgtcaaccacaccgcacaaccgcacgttatcgtaaaataattcccgcaaatttactccacccgctccccaaaccaaaaatacgcgacacgcacgctctttctctacgaaacgaaaacgaaaaacactacgaaacaaaaatattccaaaaaaacctatacgaacgcaaatttaaaaaaaataacaaacgaaaaaaaataaaaaataataaaattctaaaaaaaacatccgaaaaaataaaacgaaacctaaaaaataacaaaaacacgaccgaaaaaaaaaaacctaaaaaaacgcaaaaacgcgaattaattacgaccgaataacctaaaaatctaaaccgaaaaacgtaaccaaactttctaaaaaaactaaaaataaacccgaaaactaactaaaacaa

SEQ ID NO: 9193 - DNA, 845 bp, Artificial Sequence
  chemically treated genomic DNA (Homo sapiens) CpG-island No: 9193
  unsure (85, 316, 712, 718, 828, 835)
gcggttacggtcgggaggttcggattggcgttcgggggtcggggtcggggtaagcgggcgtgggggaggggagcggttttttttngttcgcggtatcggttcgcgtcgggagcgggttaattttaaatcgggggtttggttgtttttggacggttacgttttttttgttcgttagtcggttcgttagtttcggtttcggcgttttttttcggtatttatttcggcgttgcggaaagattgattgttaggtacgcgggttttcgggtttgagaggggtagcggtgttgacgagtttcggtttagttttcgtcggttnttcgtcgtgaggtggattgataggttagcgggacgtagaggggcgcggcgttcgggcgatacggtatcgggagagggttcgggagggtggcggcggcggcggcggcggtcgtttttcgtttttcgtttcgtcgggggtcgtgagggaggagttgagttttcgcgtagaggggcgggggcgaacgagggggaggggcggggttgtcgtggtttcgggcgcgggtttgttcgcgtttaggtttcgcgtagttaaggggaggcgtcggttacggttcgatttttcgcgttaaatttttaaatcgaaggcggaaggttcggtttcgtttttggcgtcgtcggttaatcgtaggttcgttttcggttttttgattggtcgggaattgttgttttggaaatntacgantgatgttgttcgggaattgtcgggattgcggcgggcggatagggtttgggggaggggtttttggtcgaaagttgggggaagtgtattgagcgagtggcggtcgggggatnagtattntgtttgtttt

SEQ ID NO: 9194 - DNA, 845 bp, Artificial Sequence
  chemically treated genomic DNA (Homo sapiens) CpG-island No: 9194
  unsure (11, 18, 128, 134, 530, 761)
aaaacaaacanaatactnatcccccgaccgccactcgctcaatacacttcccccaactttcgaccaaaaacccctcccccaaaccctatccgcccgccgcaatcccgacaattcccgaacaacatcantcgtanatttccaaaacaacaattcccgaccaatcaaaaaaccgaaaacgaacctacgattaaccgacgacgccaaaaacgaaaccgaaccttccgccttcgatttaaaaatttaacgcgaaaaatcgaaccgtaaccgacgcctccccttaactacgcgaaacctaaacgcgaacaaacccgcgcccgaaaccacgacaaccccgcccctccccctcgttcgcccccgcccctctacgcgaaaactcaactcctccctcacgacccccgacgaaacgaaaaacgaaaaacgaccgccgccgccgccgccgccaccctcccgaaccctctcccgataccgtatcgcccgaacgccgcgcccctctacgtcccgctaacctatcaatccacctcacgacgaanaaccgacgaaaactaaaccgaaactcgtcaacaccgctacccctctcaaacccgaaaacccgcgtacctaacaatcaatctttccgcaacgccgaaataaataccgaaaaaaaacgccgaaaccgaaactaacgaaccgactaacgaacaaaaaaaacgtaaccgtccaaaaacaaccaaacccccgatttaaaattaacccgctcccgacgcgaaccgataccgcgaacnaaaaaaaaccgctcccctcccccacgcccgcttaccccgaccccgacccccgaacgccaatccgaacctcccgaccgtaaccgc

SEQ ID NO: 9195 - DNA, 845 bp, Artificial Sequence
  chemically treated genomic DNA (Homo sapiens) CpG-island No: 9195
  unsure (11, 18, 128, 134, 530, 761)
aaggtaagtanggtattngtttttcggtcgttattcgtttagtgtattttttttaattttcggttaaaggttttttttttaggttttgttcgttcgtcgtagtttcgatagttttcggatagtattantcgtgngtttttaggataataattttcgattaattagagggtcggaagcgggtttgcgattggtcgacggcgttaggggcggggtcggatttttcgttttcgatttaaaaatttggcgcggaaagtcggatcgtggtcggcgtttttttttagttgcgcggggtttgagcgcgggtaaattcgcgttcggaattacggtaatttcgtttttttttttcgttcgttttcgtttttttgcgcgggagtttagttttttttttacggttttcggcgaagcgggaggcgggaaacggtcgtcgtcgtcgtcgtcgttattttttcgagttttttttcggtgtcgtgtcgttcgggcgtcgcgtttttttgcgtttcgttgatttgttagtttattttacggcgggnagtcggcgggggttgagtcgggattcgttagtatcgttgttttttttaggttcgggagttcgcgtatttggtagttagttttttcgtagcgtcgaggtgggtgtcggagagagacgtcgggatcgggattggcgggtcggttggcgggtagagggagcgtgatcgtttaggagtagttaagttttcgatttgaaattaattcgttttcggcgcgagtcgatatcgcgggtnggggagggtcgttttttttttttacgttcgtttgtttcggtttcggttttcgagcgttaattcgagtttttcgatcgtagtcgt

SEQ ID NO: 9196 - DNA, 845 bp, Artificial Sequence
  chemically treated genomic DNA (Homo sapiens) CpG-island No: 9196
  unsure (85, 316, 712, 718, 828, 835)
acgactacgatcgaaaaactcgaattaacgctcgaaaaccgaaaccgaaacaaacgaacgtaaaaaaaaaaaacgaccctccccnacccgcgatatcgactcgcgccgaaaacgaattaatttcaaatcgaaaacttaactactcctaaacgatcacgctccctctacccgccaaccgacccgccaatcccgatcccgacgtctctctccgacacccacctcgacgctacgaaaaaactaactaccaaatacgcgaactcccgaacctaaaaaaaacaacgatactaacgaatcccgactcaacccccgccgactncccgccgtaaaataaactaacaaatcaacgaaacgcaaaaaaacgcgacgcccgaacgacacgacaccgaaaaaaaactcgaaaaaataacgacgacgacgacgacgaccgtttcccgcctcccgcttcgccgaaaaccgtaaaaaaaaaactaaactcccgcgcaaaaaaacgaaaacgaacgaaaaaaaaaaacgaaattaccgtaattccgaacgcgaatttacccgcgctcaaaccccgcgcaactaaaaaaaaacgccgaccacgatccgactttccgcgccaaatttttaaatcgaaaacgaaaaatccgaccccgcccctaacgccgtcgaccaatcgcaaacccgcttccgaccctctaattaatcgaaaattattatcctaaaaacncacgantaatactatccgaaaactatcgaaactacgacgaacgaacaaaacctaaaaaaaaaacctttaaccgaaaattaaaaaaaatacactaaacgaataacgaccgaaaaacnaataccntacttacctt

SEQ ID NO: 9197 - DNA, 1237 bp, Artificial Sequence
  chemically treated genomic DNA (Homo sapiens) CpG-island No: 9197
gtttagcggagacgcggagtttatagtagcgtttttcggagttttaatacgtcgttgttattattcgcgtcgggatttcgtagtcgagttcggtcgttcgtaggacgttttaggagcgtcgcggatcgggcggtacgggacgttgcggggttgagtttaagagtttaggttcgcgtcgagtttaatcggattcggacgttgcgcgcggagtgcgcgtcgagtgcgcgtcgagagagaagcggcgcgtagcggcgttttttcggatgcggacgcgtaatttgaagtaattttaaggtgagtagttttttgtttcgtttttgttttttattttggttttagtatcgatttatttttcggttattttcgcgtcgttcgtcggttttttttttcgcgtttattaagttcgtaaagttgttggcgaaagagttcgggcgttggttgatcgagcgtcgtaggttttattttcgattttcgaagtttgttattcggtttggttgatttcgtcggtgtttttgtgtatttatgttatttttttttattatttattttttttttagattcgagtagttcgtcggttcgcgcggatttagagtaagaagagggcgaggaagaagatgtttcggttcggtcgtaatacgtatagcgattagaagtcgttttattcgtatatttcgttgatcgttatggttatttagagttttttcgagaagatgttgtcgttgagcgagatttataagtttattatggatcgttttttttattatagggagaatacgtagcgttggtagaatagtttgcgttataattttttttttaacgattgttttattaagatttcgcggcggtcggattagttaggtaagggtagtttttgggcgttgtatttaagttgcggggatatgttcgagaacggtagttttttgcggcgtcgtaagcgttttaaggtgtttaagttcgattatttggcgtttagtaagttagtcgacgcggcgtagtatttgtagtagtaggttaagttgcggtttagcgcgttggcggtttcgggtacgtatttgttatagatgttcgtcgtcgtttataatttgggcggcgtggcgtagttttcgggttttaagtattttttcgttatcgagaatattatcgcgcgggaatataagatgtttggggggttggtttttttcgttatgtagtcggtgttcgttgtttattcgttttttaattagttgattattatggg

SEQ ID NO: 9198 - DNA, 1237 bp, Artificial Sequence
  chemically treated genomic DNA (Homo sapiens) CpG-island No: 9198
cccataataatcaactaattaaaaaacgaataaacaacgaacaccgactacataacgaaaaaaaccaaccccccaaacatcttatattcccgcgcgataatattctcgataacgaaaaaatacttaaaacccgaaaactacgccacgccgcccaaattataaacgacgacgaacatctataacaaatacgtacccgaaaccgccaacgcgctaaaccgcaacttaacctactactacaaatactacgccgcgtcgactaacttactaaacgccaaataatcgaacttaaacaccttaaaacgcttacgacgccgcaaaaaactaccgttctcgaacatatccccgcaacttaaatacaacgcccaaaaactacccttacctaactaatccgaccgccgcgaaatcttaataaaacaatcgttaaaaaaaaaattataacgcaaactattctaccaacgctacgtattctccctataataaaaaaaacgatccataataaacttataaatctcgctcaacgacaacatcttctcgaaaaaactctaaataaccataacgatcaacgaaatatacgaataaaacgacttctaatcgctatacgtattacgaccgaaccgaaacatcttcttcctcgccctcttcttactctaaatccgcgcgaaccgacgaactactcgaatctaaaaaaaaaataaataataaaaaaaaataacataaatacacaaaaacaccgacgaaatcaaccaaaccgaataacaaacttcgaaaatcgaaaataaaacctacgacgctcgatcaaccaacgcccgaactctttcgccaacaactttacgaacttaataaacgcgaaaaaaaaaaccgacgaacgacgcgaaaataaccgaaaaataaatcgatactaaaaccaaaataaaaaacaaaaacgaaacaaaaaactactcaccttaaaattacttcaaattacgcgtccgcatccgaaaaaacgccgctacgcgccgcttctctctcgacgcgcactcgacgcgcactccgcgcgcaacgtccgaatccgattaaactcgacgcgaacctaaactcttaaactcaaccccgcaacgtcccgtaccgcccgatccgcgacgctcctaaaacgtcctacgaacgaccgaactcgactacgaaatcccgacgcgaataataacaacgacgtattaaaactccgaaaaacgctactataaactccgcgtctccgctaaac

SEQ ID NO: 9199 - DNA, 1237 bp, Artificial Sequence
  chemically treated genomic DNA (Homo sapiens) CpG-island No: 9199
tttatggtagttaattggttggggagcgggtaggtagcgggtatcggttgtatggcggagaaggttagttttttaggtattttgtattttcgcgcgatgatgttttcgatggcgaaggggtgtttgaagttcgagggttgcgttacgtcgtttaagttgtaggcggcggcgggtatttgtggtaggtgcgtgttcgaggtcgttagcgcgttgagtcgtagtttggtttgttgttgtaggtattgcgtcgcgtcggttggtttgttgggcgttaggtggtcggatttaagtattttgaagcgtttgcggcgtcgtaggaagttgtcgttttcgaatatgttttcgtagtttgggtgtagcgtttagaagttgtttttgtttggttggttcggtcgtcgcgggattttgatgaagtagtcgttgaaggagaggttgtggcgtagattgttttgttagcgttgcgtgttttttttgtagtaggggaagcggtttatgatgaatttgtagatttcgtttagcggtagtattttttcgggagagttttggatggttatagcggttagcgagatgtacgagtagggcggtttttggtcgttgtacgtgttgcggtcgggtcgaggtattttttttttcgttttttttttgttttgggttcgcgcgggtcggcggattgttcggatttgggaagggggtgggtaatagggaaaggtagtatggatgtatagagatatcggcggggttagttagatcgagtaatagatttcgggggtcgggggtggggtttgcggcgttcgattagttagcgttcggattttttcgttagtaattttgcgggtttagtgggcgcgggaggggaagtcggcgaacggcgcgaggatagtcgggaagtaagtcggtattggggttagaatagggggtagggacggaatagagagttgtttattttaaagttgttttaagttgcgcgttcgtattcgggaggacgtcgttgcgcgtcgtttttttttcggcgcgtattcgacgcgtatttcgcgcgtagcgttcgggttcggttggattcggcgcgaatttgggtttttgagtttagtttcgtagcgtttcgtgtcgttcggttcgcgacgtttttggagcgttttgcgggcggtcgagttcggttgcggagtttcggcgcggatggtggtagcgacgtgttagggtttcggagggcgttgttgtgggtttcgcgttttcgttgagt

SEQ ID NO: 9200 - DNA, 1237 bp, Artificial Sequence
  chemically treated genomic DNA (Homo sapiens) CpG-island No: 9200
actcaacgaaaacgcgaaacccacaacaacgccctccgaaaccctaacacgtcgctaccaccatccgcgccgaaactccgcaaccgaactcgaccgcccgcaaaacgctccaaaaacgtcgcgaaccgaacgacacgaaacgctacgaaactaaactcaaaaacccaaattcgcgccgaatccaaccgaacccgaacgctacgcgcgaaatacgcgtcgaatacgcgccgaaaaaaaaacgacgcgcaacgacgtcctcccgaatacgaacgcgcaacttaaaacaactttaaaataaacaactctctattccgtccctaccccctattctaaccccaataccgacttacttcccgactatcctcgcgccgttcgccgacttcccctcccgcgcccactaaacccgcaaaattactaacgaaaaaatccgaacgctaactaatcgaacgccgcaaaccccacccccgacccccgaaatctattactcgatctaactaaccccgccgatatctctatacatccatactacctttccctattacccacccccttcccaaatccgaacaatccgccgacccgcgcgaacccaaaacaaaaaaaaaacgaaaaaaaaaatacctcgacccgaccgcaacacgtacaacgaccaaaaaccgccctactcgtacatctcgctaaccgctataaccatccaaaactctcccgaaaaaatactaccgctaaacgaaatctacaaattcatcataaaccgcttcccctactacaaaaaaaacacgcaacgctaacaaaacaatctacgccacaacctctccttcaacgactacttcatcaaaatcccgcgacgaccgaaccaaccaaacaaaaacaacttctaaacgctacacccaaactacgaaaacatattcgaaaacgacaacttcctacgacgccgcaaacgcttcaaaatacttaaatccgaccacctaacgcccaacaaaccaaccgacgcgacgcaatacctacaacaacaaaccaaactacgactcaacgcgctaacgacctcgaacacgcacctaccacaaatacccgccgccgcctacaacttaaacgacgtaacgcaaccctcgaacttcaaacaccccttcgccatcgaaaacatcatcgcgcgaaaatacaaaatacctaaaaaactaaccttctccgccatacaaccgatacccgctacctacccgctccccaaccaattaactaccataaa

SEQ ID NO: 9201 - DNA, 769 bp, Artificial Sequence
  chemically treated genomic DNA (Homo sapiens) CpG-island No: 9201
gggaacggtgttttcgattagcgggaagcgagaggataggggcggcgttttcgattcgtgggaagtaagcgggtaggggcggcgtttttgatttgtgaaaagcgaagggataggggaggcgttttcgattggtgggaagcgaggggatagggattgcgttttcgatttgtcgagagcgaaggggcggggggcggcgtttttgatcgttgggaagcgaggcggcggtcgttaggaggaggcgtttgaaggagatttatcgttttagtgcgcggggaggtcgaattaggagggtagggtttttttattaatcgtacgatttcgtttagttaaggcgttggtagaggacggatatagatattgcgcgtcgagacgaggttgtttggacggtaaattttggatttagtgggagttttcgttattttcgttggtcgttcgtaggttaagttttagttgcggacgttattgttttcgttttttttgttggttgcggggagcgaggggtagggagcgcgtcggggaggagatagagcggtcgagttcggagagagtgttttttggcggtgattttttaggcggattgtggcgcgggtcgggcggcgtttttagtttcgtagtttggttttttttttgttcgggtgttttatttgggaattcgttgtatcgtatagtcgaattcgagtgtgttaatgggtgtgtgttggaatgaggatggcgacgagaagatttttttcggaataatttaatttggtgagtagtggcgatagtagta

SEQ ID NO: 9202 - DNA, 769 bp, Artificial Sequence
  chemically treated genomic DNA (Homo sapiens) CpG-island No: 9202
tactactatcgccactactcaccaaattaaattattccgaaaaaaatcttctcgtcgccatcctcattccaacacacacccattaacacactcgaattcgactatacgatacaacgaattcccaaataaaacacccgaacaaaaaaaaaaccaaactacgaaactaaaaacgccgcccgacccgcgccacaatccgcctaaaaaatcaccgccaaaaaacactctctccgaactcgaccgctctatctcctccccgacgcgctccctacccctcgctccccgcaaccaacaaaaaaaacgaaaacaataacgtccgcaactaaaacttaacctacgaacgaccaacgaaaataacgaaaactcccactaaatccaaaatttaccgtccaaacaacctcgtctcgacgcgcaatatctatatccgtcctctaccaacgccttaactaaacgaaatcgtacgattaataaaaaaaccctaccctcctaattcgacctccccgcgcactaaaacgataaatctccttcaaacgcctcctcctaacgaccgccgcctcgcttcccaacgatcaaaaacgccgccccccgccccttcgctctcgacaaatcgaaaacgcaatccctatcccctcgcttcccaccaatcgaaaacgcctcccctatcccttcgcttttcacaaatcaaaaacgccgcccctacccgcttacttcccacgaatcgaaaacgccgcccctatcctctcgcttcccgctaatcgaaaacaccgttccc

SEQ ID NO: 9203 - DNA, 769 bp, Artificial Sequence
  chemically treated genomic DNA (Homo sapiens) CpG-island No: 9203
tattattgtcgttattgtttattaaattaagttatttcgggagggattttttcgtcgttatttttattttaatatatatttattgatatattcgggttcggttgtgcggtgtaacgaatttttaggtgggatattcgagtaggaagaaagttaggttgcggggttgggggcgtcgttcggttcgcgttatagttcgtttggaggattatcgttagggggtatttttttcgaattcggtcgttttgtttttttttcggcgcgttttttgtttttcgtttttcgtagttagtagagaaggcggaagtagtggcgttcgtagttggggtttggtttgcgggcggttagcgaaggtggcgaaggtttttattggatttagagtttgtcgtttaagtagtttcgtttcggcgcgtagtgtttgtgttcgttttttattagcgttttggttgagcggagtcgtgcggttggtgggggagttttgtttttttggttcggttttttcgcgtattagaacggtgagttttttttaggcgtttttttttggcggtcgtcgtttcgttttttagcggttagggacgtcgtttttcgttttttcgttttcggtaggtcggggacgtagtttttgttttttcgttttttattagtcggggacgttttttttgttttttcgttttttataggttagggacgtcgtttttattcgtttgttttttacgggtcggggacgtcgtttttgttttttcgtttttcgttggtcgaggatatcgttttt

SEQ ID NO: 9204 - DNA, 769 bp, Artificial Sequence
  chemically treated genomic DNA (Homo sapiens) CpG-island No: 9204
aaaaacgatatcctcgaccaacgaaaaacgaaaaaacaaaaacgacgtccccgacccgtaaaaaacaaacgaataaaaacgacgtccctaacctataaaaaacgaaaaaacaaaaaaaacgtccccgactaataaaaaacgaaaaaacaaaaactacgtccccgacctaccgaaaacgaaaaaacgaaaaacgacgtccctaaccgctaaaaaacgaaacgacgaccgccaaaaaaaaacgcctaaaaaaaactcaccgttctaatacgcgaaaaaaccgaaccaaaaaaacaaaactcccccaccaaccgcacgactccgctcaaccaaaacgctaataaaaaacgaacacaaacactacgcgccgaaacgaaactacttaaacgacaaactctaaatccaataaaaaccttcgccaccttcgctaaccgcccgcaaaccaaaccccaactacgaacgccactacttccgccttctctactaactacgaaaaacgaaaaacaaaaaacgcgccgaaaaaaaaacaaaacgaccgaattcgaaaaaaataccccctaacgataatcctccaaacgaactataacgcgaaccgaacgacgcccccaaccccgcaacctaactttcttcctactcgaatatcccacctaaaaattcgttacaccgcacaaccgaacccgaatatatcaataaatatatattaaaataaaaataacgacgaaaaaatccctcccgaaataacttaatttaataaacaataacgacaataata

SEQ ID NO: 9205 - DNA, 874 bp, Artificial Sequence
  chemically treated genomic DNA (Homo sapiens) CpG-island No: 9205
  unsure (6, 37, 68, 132, 259, 803, 829)
tcgcgntattcggacgagaaagttttgaaaatagggnttcgagtggagtagttgttttacgttttttngtgcgttttagcgttttggattcgtatttcgaatttgaggcgcgatttttatttgtattgggantttcggggtatcgggagcggggtttcggcgcggttttgtaggttgtgtagtatcggggtttcgaagggttcggcgggttaggtaggcgttagtggcgtttttacgtagggcgagtaggggttcggantggtggtggtggtggtggtggtggttggtggtacgtttcgtttagcggtcgcgcggtcgatagcgagttgtattggggttcgcggtcgtttatggtcgttaggttattgtcgtcgtcgtttacgtttttcgcgtttttattgttcgtcgtcgcgtagtttttcggttttcgcgcggcgtcgttggttatgggcgggttgggagagtaggggaagcgcgtcgagacgtgcgtcgcggttgagttagcgtcgttaggtttcgcggtttcgtcgttagtcgcgtcgttttcgttgtcgtatggagggttgtcggtcgaggtttgaggttagtcggggtgcgcgttcgcgtcgttcgcgtggttggttggtttattgttcgatttttgtaggtggtacggtaggtcgggtagtatggaatttacgcgggtggtgggtacgtagatcggggagttggtcgtcgtcgcggttgttgtcgtcgcggtcgtagagtgtacgaagtcgtcgggcgcgtcgtcgtaggcggtcggattttggttggagagagtnggcgagggtttggtatattttttttnggttgttcgggtgcgaaggggtttagtttggcgtcgcggttggat

SEQ ID NO: 9206 - DNA, 874 bp, Artificial Sequence
  chemically treated genomic DNA (Homo sapiens) CpG-island No: 9206
  unsure (46, 72, 616, 743, 807, 838, 869)
atccaaccgcgacgccaaactaaaccccttcgcacccgaacaaccnaaaaaaaatataccaaaccctcgccnactctctccaaccaaaatccgaccgcctacgacgacgcgcccgacgacttcgtacactctacgaccgcgacgacaacaaccgcgacgacgaccaactccccgatctacgtacccaccacccgcgtaaattccatactacccgacctaccgtaccacctacaaaaatcgaacaataaaccaaccaaccacgcgaacgacgcgaacgcgcaccccgactaacctcaaacctcgaccgacaaccctccatacgacaacgaaaacgacgcgactaacgacgaaaccgcgaaacctaacgacgctaactcaaccgcgacgcacgtctcgacgcgcttcccctactctcccaacccgcccataaccaacgacgccgcgcgaaaaccgaaaaactacgcgacgacgaacaataaaaacgcgaaaaacgtaaacgacgacgacaataacctaacgaccataaacgaccgcgaaccccaatacaactcgctatcgaccgcgcgaccgctaaacgaaacgtaccaccaaccaccaccaccaccaccaccaccantccgaacccctactcgccctacgtaaaaacgccactaacgcctacctaacccgccgaacccttcgaaaccccgatactacacaacctacaaaaccgcgccgaaaccccgctcccgataccccgaaantcccaatacaaataaaaatcgcgcctcaaattcgaaatacgaatccaaaacgctaaaacgcacnaaaaaacgtaaaacaactactccactcgaanccctattttcaaaactttctcgtccgaatancgcga

SEQ ID NO: 9207 - DNA, 874 bp, Artificial Sequence
  chemically treated genomic DNA (Homo sapiens) CpG-island No: 9207
  unsure (46, 72, 616, 743, 807, 838, 869)
gtttagtcgcggcgttaagttgagttttttcgtattcgagtagttnggaggagatgtattagattttcgttngttttttttagttagggttcggtcgtttacgacggcgcgttcggcggtttcgtgtattttgcggtcgcggcggtagtagtcgcggcggcggttagtttttcggtttacgtgtttattattcgcgtgggttttatgttgttcggtttatcgtattatttgtaggggtcgggtagtgggttagttaattacgcgggcggcgcgggcgcgtatttcggttggttttaggtttcggtcgatagttttttatacggtagcggaggcggcgcggttggcggcggggtcgcggggtttggcggcgttggtttagtcgcggcgtacgtttcggcgcgttttttttatttttttagttcgtttatggttaacggcgtcgcgcgggagtcgggaggttacgcggcggcgggtagtgggggcgcgggaggcgtgagcggcggcggtagtagtttggcggttatgggcggtcgcgagttttagtatagttcgttgtcggtcgcgcggtcgttgaacgggacgtattattaattattattattattattattattanttcgagtttttattcgttttacgtgggggcgttattgacgtttgtttggttcgtcggatttttcgagatttcggtgttgtatagtttgtagagtcgcgtcggagtttcgttttcggtgtttcggggnttttagtgtaggtaagggtcgcgttttaggttcggggtgcgggtttaaagcgttggggcgtatngggggacgtggagtagttgttttattcgggnttttgtttttaggattttttcgttcgggtgncgcgg

SEQ ID NO: 9208 - DNA, 874 bp, Artificial Sequence
  chemically treated genomic DNA (Homo sapiens) CpG-island No: 9208
  unsure (6, 37, 68, 132, 259, 803, 829)
ccgcgncacccgaacgaaaaaatcctaaaaacaaaancccgaataaaacaactactccacgtcccccnatacgccccaacgctttaaacccgcaccccgaacctaaaacgcgacccttacctacactaaaanccccgaaacaccgaaaacgaaactccgacgcgactctacaaactatacaacaccgaaatctcgaaaaatccgacgaaccaaacaaacgtcaataacgcccccacgtaaaacgaataaaaactcgaantaataataataataataataataattaataatacgtcccgttcaacgaccgcgcgaccgacaacgaactatactaaaactcgcgaccgcccataaccgccaaactactaccgccgccgctcacgcctcccgcgcccccactacccgccgccgcgtaacctcccgactcccgcgcgacgccgttaaccataaacgaactaaaaaaataaaaaaaacgcgccgaaacgtacgccgcgactaaaccaacgccgccaaaccccgcgaccccgccgccaaccgcgccgcctccgctaccgtataaaaaactatcgaccgaaacctaaaaccaaccgaaatacgcgcccgcgccgcccgcgtaattaactaacccactacccgacccctacaaataatacgataaaccgaacaacataaaacccacgcgaataataaacacgtaaaccgaaaaactaaccgccgccgcgactactaccgccgcgaccgcaaaatacacgaaaccgccgaacgcgccgtcgtaaacgaccgaaccctaactaaaaaaaacnaacgaaaatctaatacatctcctccnaactactcgaatacgaaaaaactcaacttaacgccgcgactaaac

SEQ ID NO: 9209 - DNA, 692 bp, Artificial Sequence
  chemically treated genomic DNA (Homo sapiens) CpG-island No: 9209
  unsure (226, 251, 267, 275, 307, 326)
tatttcggtgtgatcgcgtttcggcgacgttgggtagggtgtagggagttagttcggtcgcggtttaacgggaggggagggggtcggtttcgaattcgggcgttcgggtcgcgggtgatttattgggaacgttaggttcgcgcgtttagatcggcgggcgacgtttagcgcgttttatttttttcgttcgggtcgttcgcgtagaagtagttttcgcgtatttttngtttttcgagacgggatttttcggngaaggagtttggagtncggtcggntcggggggtagtaatttttttttttttagttnattatggtcggtgcgattnttttattcgcgttcgtagacggattttttggaaagtatcgggttgggtttatttgattggcgttcgtaggggtcgtcgatttttttatagatttacggaaattgtcggtcgtaagtcgaggttcggtttttagtattcgtcggttcgttcgcgtcggttttttaaagagttgttagatttattcgttagtagtttttttattcgatcgttttgtaggtgcggtgggtttttttttcgttttcgacgcgcgtgcgtattttcgtgtcgcggggtattttgggagttgtagttttagtaagaagggcgaggtttaacgttgattttggtttttataatgggtagaacgtaggaaggggattgcgaata

SEQ ID NO: 9210 - DNA, 692 bp, Artificial Sequence
  chemically treated genomic DNA (Homo sapiens) CpG-island No: 9210
  unsure (367, 386, 418, 426, 442, 467)
tattcgcaatccccttcctacgttctacccattataaaaaccaaaatcaacgttaaacctcgcccttcttactaaaactacaactcccaaaataccccgcgacacgaaaatacgcacgcgcgtcgaaaacgaaaaaaaaacccaccgcacctacaaaacgatcgaataaaaaaactactaacgaataaatctaacaactctttaaaaaaccgacgcgaacgaaccgacgaatactaaaaaccgaacctcgacttacgaccgacaatttccgtaaatctataaaaaaatcgacgacccctacgaacgccaatcaaataaacccaacccgatactttccaaaaaatccgtctacgaacgcgaataaaanaatcgcaccgaccataatnaactaaaaaaaaaaaaattactaccccccganccgaccgnactccaaactccttcnccgaaaaatcccgtctcgaaaaacnaaaaatacgcgaaaactacttctacgcgaacgacccgaacgaaaaaaataaaacgcgctaaacgtcgcccgccgatctaaacgcgcgaacctaacgttcccaataaatcacccgcgacccgaacgcccgaattcgaaaccgaccccctcccctcccgttaaaccgcgaccgaactaactccctacaccctacccaacgtcgccgaaacgcgatcacaccgaaata

SEQ ID NO: 9211 - DNA, 692 bp, Artificial Sequence
  chemically treated genomic DNA (Homo sapiens) CpG-island No: 9211
  unsure (367, 386, 418, 426, 442, 467)
tattcgtagttttttttttacgttttgtttattgtaaagattagggttagcgttgagtttcgttttttttgttagaattataatttttaggatgtttcgcggtacgggagtgcgtacgcgcgtcggaggcgaaggaggaatttatcgtatttatagggcggtcgagtgagggagttgttggcgggtgggtttggtaattttttgggaggtcgacgcgggcggatcggcgggtgttgggaatcgagtttcggtttgcggtcggtagttttcgtgggtttgtgaagaggtcggcggtttttgcgggcgttagttaggtaagtttagttcggtgttttttaggaagttcgtttgcgggcgcgggtagggnagtcgtatcggttatggtnggttgaggagggagaggttgttgtttttcggntcggtcgnattttaggtttttttntcgaggggtttcgtttcggggagtnaggggtgcgcgggggttgtttttgcgcgaacggttcgggcgggggaggtggggcgcgttgggcgtcgttcgtcggtttaggcgcgcgaatttggcgtttttagtgaattattcgcggttcgggcgttcgggttcgggatcggtttttttttttttcgttgagtcgcggtcgagttggttttttgtattttatttagcgtcgtcgggacgcgattatatcgagatg

SEQ ID NO: 9212 - DNA, 692 bp, Artificial Sequence
  chemically treated genomic DNA (Homo sapiens) CpG-island No: 9212
  unsure (226, 251, 267, 275, 307, 326)
catctcgatataatcgcgtcccgacgacgctaaataaaatacaaaaaaccaactcgaccgcgactcaacgaaaaaaaaaaaaaccgatcccgaacccgaacgcccgaaccgcgaataattcactaaaaacgccaaattcgcgcgcctaaaccgacgaacgacgcccaacgcgccccacctcccccgcccgaaccgttcgcgcaaaaacaacccccgcgcacccctnactccccgaaacgaaacccctcganaaaaaaacctaaaatncgaccganccgaaaaacaacaacctctccctcctcaaccnaccataaccgatacgactnccctacccgcgcccgcaaacgaacttcctaaaaaacaccgaactaaacttacctaactaacgcccgcaaaaaccgccgacctcttcacaaacccacgaaaactaccgaccgcaaaccgaaactcgattcccaacacccgccgatccgcccgcgtcgacctcccaaaaaattaccaaacccacccgccaacaactccctcactcgaccgccctataaatacgataaattcctccttcgcctccgacgcgcgtacgcactcccgtaccgcgaaacatcctaaaaattataattctaacaaaaaaaacgaaactcaacgctaaccctaatctttacaataaacaaaacgtaaaaaaaaaactacgaata

SEQ ID NO: 9213 - DNA, 895 bp, Artificial Sequence
  chemically treated genomic DNA (Homo sapiens) CpG-island No: 9213
  unsure (56, 66, 86, 117, 132, 165, 182, 190)
ttttcgggcgttcgtattttcggttagcgatttttttagggtgatttggtggcggntcgatcgcgnaatattcggatttttacggnacgagtcgtcggagtcgtagtcggtttcggntttcggtttcgttangtttcgttattcgtcgtttcgtcgtcgttgttngtttttcgatttgggtnattcgagnagaatttttttatggtttcgtcggcgagttggagggcgtagggagcgtgtaagggtaagttttcggttcggcgcgtagtcgggcgttcgcgaggggtcgtcgtttttggttcgttcgagcgtgttgcggttcgttaagttttatatttcgcgttttttaagcgtatagtttgggtttcgtcgttcgtttcgcggtttcgttgtagttgttcggttttcgtaaagggcggtggggagggcggggacggggtcgggcgcgagggggcgggttcgaatttaggggcgacgtcgtcgttttcgttagtgtttcgggcgtttcgtcgttttattaagcgtttggagcgcgagtcggggtagaggaagagagcgaaagaggttgggcggtcggtttttttagggagtgggttagacgttttaggttataaattcgtaggatcgtagttcgtcgcgtcgtcgtcgtttcggtcgaattcgcgtcgttcgttattcgtggtcgttggcggggggggggggggggcgttgttgttaatcgtttattgaggtcgggcgattcgcgtaggcgcgttgttcgcgtcgtcggaagtgacggtttcggtttttgttacgtggagggggattaagggaggtgattgtgggggttggggattagggtaaagtcgggggtttcgggttcggggttgcgtcgggagggtattggttaggttcg

SEQ ID NO: 9214 - DNA, 895 bp, Artificial Sequence
  chemically treated genomic DNA (Homo sapiens) CpG-island No: 9214
  unsure (706, 714, 731, 764, 779, 810, 830, 840)
cgaacctaaccaataccctcccgacgcaaccccgaacccgaaacccccgactttaccctaatccccaacccccacaatcacctcccttaatccccctccacgtaacaaaaaccgaaaccgtcacttccgacgacgcgaacaacgcgcctacgcgaatcgcccgacctcaataaacgattaacaacaacgccccccccccccccccgccaacgaccacgaataacgaacgacgcgaattcgaccgaaacgacgacgacgcgacgaactacgatcctacgaatttataacctaaaacgtctaacccactccctaaaaaaaccgaccgcccaacctctttcgctctcttcctctaccccgactcgcgctccaaacgcttaataaaacgacgaaacgcccgaaacactaacgaaaacgacgacgtcgcccctaaattcgaacccgccccctcgcgcccgaccccgtccccgccctccccaccgccctttacgaaaaccgaacaactacaacgaaaccgcgaaacgaacgacgaaacccaaactatacgcttaaaaaacgcgaaatataaaacttaacgaaccgcaacacgctcgaacgaaccaaaaacgacgacccctcgcgaacgcccgactacgcgccgaaccgaaaacttacccttacacgctccctacgccctccaactcgccgacgaaaccataaaaaaattctnctcgaatnacccaaatcgaaaaacnaacaacgacgacgaaacgacgaataacgaaacntaacgaaaccgaaanccgaaaccgactacgactccgacgactcgtnccgtaaaaatccgaatattncgcgatcganccgccaccaaatcaccctaaaaaaatcgctaaccgaaaatacgaacgcccgaaaa

SEQ ID NO: 9215 - DNA, 895 bp, Artificial Sequence
  chemically treated genomic DNA (Homo sapiens) CpG-island No: 9215
  unsure (706, 714, 731, 764, 779, 810, 830, 840)
cgggtttggttagtattttttcggcgtaatttcggattcgggattttcgattttgttttagtttttaatttttataattattttttttggtttttttttacgtgataagagtcggaatcgttattttcggcggcgcgggtagcgcgtttgcgcgggtcgttcggttttagtgaacggttggtagtagcgtttttttttttttttcgttaacggttacgagtggcgggcggcgcgggttcggtcggggcggcggcggcgcgacgggttgcggttttgcgggtttgtggtttgagacgtttagtttattttttggaggggtcggtcgtttagtttttttcgttttttttttttatttcggttcgcgttttaggcgtttagtgaggcggcgggacgttcggggtattggcggaggcggcggcgtcgtttttggattcggattcgttttttcgcgttcggtttcgttttcgttttttttatcgttttttgcgggagtcgggtagttgtagcggagtcgcggagcgggcggcggggtttaggttgtgcgtttggggagcgcggaatgtgaggtttggcgggtcgtagtacgttcggacgggttaggggcggcgatttttcgcggacgttcggttgcgcgtcgggtcggggatttgtttttgtacgttttttgcgttttttagttcgtcggcgggattatgaagaagttttnttcggatngtttaagtcggagggtnggtagcggcggcggagcggcgggtggcggggtntggcggggtcggggntcggggtcggttgcggtttcggcggttcgtntcgtgggggttcgggtgttncgcggtcggntcgttattaggttattttggaagagtcgttggtcgaaggtacgggcgttcgggga

SEQ ID NO: 9216 - DNA, 895 bp, Artificial Sequence
  chemically treated genomic DNA (Homo sapiens) CpG-island No: 9216
  unsure (56, 66, 86, 117, 132, 165, 182, 190)
tccccgaacgcccgtaccttcgaccaacgactcttccaaaataacctaataacganccgaccgcgnaacacccgaacccccacganacgaaccgccgaaaccgcaaccgaccccganccccgaccccgccanaccccgccacccgccgctccgccgccgctaccnaccctccgacttaaacnatccgaanaaaacttcttcataatcccgccgacgaactaaaaaacgcaaaaaacgtacaaaaacaaatccccgacccgacgcgcaaccgaacgtccgcgaaaaatcgccgcccctaacccgtccgaacgtactacgacccgccaaacctcacattccgcgctccccaaacgcacaacctaaaccccgccgcccgctccgcgactccgctacaactacccgactcccgcaaaaaacgataaaaaaaacgaaaacgaaaccgaacgcgaaaaaacgaatccgaatccaaaaacgacgccgccgcctccgccaataccccgaacgtcccgccgcctcactaaacgcctaaaacgcgaaccgaaataaaaaaaaaaaacgaaaaaaactaaacgaccgacccctccaaaaaataaactaaacgtctcaaaccacaaacccgcaaaaccgcaacccgtcgcgccgccgccgccccgaccgaacccgcgccgcccgccactcgtaaccgttaacgaaaaaaaaaaaaaaacgctactaccaaccgttcactaaaaccgaacgacccgcgcaaacgcgctacccgcgccgccgaaaataacgattccgactcttatcacgtaaaaaaaaaccaaaaaaaataattataaaaattaaaaactaaaacaaaatcgaaaatcccgaatccgaaattacgccgaaaaaatactaaccaaacccg

SEQ ID NO: 9217 - DNA, 588 bp, Artificial Sequence
  chemically treated genomic DNA (Homo sapiens) CpG-island No: 9217
gcgtcggtttaggaggttcggtatttgttcgagtcgtcgggtcgcgtttagtttcgcgtcgagttaaagttcgagtttaagttcgagtttaagttcgagtttaagttcgttgggttcgcgtttttattttgttcgtcgcggtttatgtttttagttcgtcgtttcgtgttttttgtagtattttcgtttgtagttcgtttcggttcggatcgttcgtcgcgtcgcgtagagttttttttcgttttcgtcggcgattttcgcgaagtttttatttttagaggcgtcgggcgcggcggcgtcgttcgttttcggtttggagcgtttttttggggcgttatttaattatttgattcggtcgatttgtgcgtttcgttacgtcggcgcgggcggcgtagcgttaggagggtcgggcgtatttcgattttcgtatcggttggaagtcggtcgggaggagggaagaggacggcgaggagatggattcggttatggaggttgcgtggagtttgtttgggaatcgggatggcgtttgttttttattattaagttatttataaaattaaaagtttttttcgaggttttggagatgtt

SEQ ID NO: 9218 - DNA, 588 bp, Artificial Sequence
  chemically treated genomic DNA (Homo sapiens) CpG-island No: 9218
aacatctccaaaacctcgaaaaaaacttttaattttataaataacttaataataaaaaacaaacgccatcccgattcccaaacaaactccacgcaacctccataaccgaatccatctcctcgccgtcctcttccctcctcccgaccgacttccaaccgatacgaaaatcgaaatacgcccgaccctcctaacgctacgccgcccgcgccgacgtaacgaaacgcacaaatcgaccgaatcaaataattaaataacgccccaaaaaaacgctccaaaccgaaaacgaacgacgccgccgcgcccgacgcctctaaaaataaaaacttcgcgaaaatcgccgacgaaaacgaaaaaaaactctacgcgacgcgacgaacgatccgaaccgaaacgaactacaaacgaaaatactacaaaaaacacgaaacgacgaactaaaaacataaaccgcgacgaacaaaataaaaacgcgaacccaacgaacttaaactcgaacttaaactcgaacttaaactcgaactttaactcgacgcgaaactaaacgcgacccgacgactcgaacaaataccgaacctcctaaaccgacgc

SEQ ID NO: 9219 - DNA, 588 bp, Artificial Sequence
  chemically treated genomic DNA (Homo sapiens) CpG-island No: 9219
ggtatttttaaggtttcggaggaaatttttgattttataaataatttgatggtggaaggtaaacgttatttcggtttttaagtaggttttacgtagtttttatggtcgagtttattttttcgtcgttttttttttttttttcggtcgatttttagtcggtgcgggagtcggggtgcgttcggtttttttagcgttgcgtcgttcgcgtcgacgtggcggagcgtataggtcgatcgggttaggtggttgggtgacgttttaggaaagcgttttaggtcgagggcgggcggcgtcgtcgcgttcgacgtttttgggggtggggatttcgcgggagtcgtcggcggaggcgaggaggagttttgcgcggcgcggcgggcgattcgagtcgggacgggttgtaggcgggggtgttgtagaggatacgaggcggcgggttggagatatggatcgcggcgagtaaggtgagggcgcggatttagcgggtttgggttcgggtttggattcgggtttggattcgggttttggttcggcgcggggttgagcgcggttcggcggttcgagtaggtgtcgagttttttgggtcggcgt

SEQ ID NO: 9220 - DNA, 588 bp, Artificial Sequence
  chemically treated genomic DNA (Homo sapiens) CpG-island No: 9220
acgccgacccaaaaaactcgacacctactcgaaccgccgaaccgcgctcaaccccgcgccgaaccaaaacccgaatccaaacccgaatccaaacccgaacccaaacccgctaaatccgcgccctcaccttactcgccgcgatccatatctccaacccgccgcctcgtatcctctacaacacccccgcctacaacccgtcccgactcgaatcgcccgccgcgccgcgcaaaactcctcctcgcctccgccgacgactcccgcgaaatccccacccccaaaaacgtcgaacgcgacgacgccgcccgccctcgacctaaaacgctttcctaaaacgtcacccaaccacctaacccgatcgacctatacgctccgccacgtcgacgcgaacgacgcaacgctaaaaaaaccgaacgcaccccgactcccgcaccgactaaaaatcgaccgaaaaaaaaaaaaaaaacgacgaaaaaataaactcgaccataaaaactacgtaaaacctacttaaaaaccgaaataacgtttaccttccaccatcaaattatttataaaatcaaaaatttcctccgaaaccttaaaaatacc

SEQ ID NO: 9221 - DNA, 727 bp, Artificial Sequence
  chemically treated genomic DNA (Homo sapiens) CpG-island No: 9221
gacggtatttttgtttcggtttcggttgaggcggggcggttaggttggtttgcggcgtagcggtcgtttttttttagtgcgtttgtcggcggcggcggtggcggcgtcggtaatttcggtttttggtataacgtttggcggtcggtttagggcgaggagtggtttttaggaagcgggcggaggagcgttttagtcgagtttcgtcgtcgtcgcggtttcgcgcgtttcgagcggttcgggtttggttttatacggcgttttttcgcgttttcggcgtttttagtttaagtcgagggcgcggtgtcggcgcgtaggttgacgggcgtttgggcgcgtcgtgtatttgtcgggcggtgtaggtggcggcgcgcgtttttcgtttttgggtcggggttagcgtagcgttttgcgcgttcggagggggcgggagaggcggggtagttttcgttttagttttatttaatttcgcggcggcggcggcgattgcggcgtcgcgggttggaggtcggcgtcggggaaggttttggtgtcggatttcgtacgaggtgttgacgggcggtttttgttaatttttttttagcgcgcgtcgagttcgcgcggtttcggggttgtacgttttagatatttttgcggcgtaaggtgggtgtatcgagttcggcgtagggcggttttttaggggtcgggggaaggcgttttttagagggagtaagatttggagtagtggttt

SEQ ID NO: 9222 - DNA, 727 bp, Artificial Sequence
  chemically treated genomic DNA (Homo sapiens) CpG-island No: 9222
aaaccactactccaaatcttactccctctaaaaaacgccttcccccgacccctaaaaaaccgccctacgccgaactcgatacacccaccttacgccgcaaaaatatctaaaacgtacaaccccgaaaccgcgcgaactcgacgcgcgctaaaaaaaaattaacaaaaaccgcccgtcaacacctcgtacgaaatccgacaccaaaaccttccccgacgccgacctccaacccgcgacgccgcaatcgccgccgccgccgcgaaattaaataaaactaaaacgaaaactaccccgcctctcccgccccctccgaacgcgcaaaacgctacgctaaccccgacccaaaaacgaaaaacgcgcgccgccacctacaccgcccgacaaatacacgacgcgcccaaacgcccgtcaacctacgcgccgacaccgcgccctcgacttaaactaaaaacgccgaaaacgcgaaaaaacgccgtataaaaccaaacccgaaccgctcgaaacgcgcgaaaccgcgacgacgacgaaactcgactaaaacgctcctccgcccgcttcctaaaaaccactcctcgccctaaaccgaccgccaaacgttataccaaaaaccgaaattaccgacgccgccaccgccgccgccgacaaacgcactaaaaaaaaacgaccgctacgccgcaaaccaacctaaccgccccgcctcaaccgaaaccgaaacaaaaataccgtc

SEQ ID NO: 9223 - DNA, 727 bp, Artificial Sequence
  chemically treated genomic DNA (Homo sapiens) CpG-island No: 9223
aggttattgttttaagttttattttttttggggagcgttttttttcgatttttgaggggtcgttttgcgtcgagttcggtgtatttattttgcgtcgtagaagtatttgggacgtgtagtttcggggtcgcgcgggttcggcgcgcgttggggagaagttggtagaagtcgttcgttaatatttcgtgcggaattcggtattaggatttttttcgacgtcggtttttagttcgcggcgtcgtagtcgtcgtcgtcgtcgcgaagttaaatggggttgggacgggggttgtttcgtttttttcgtttttttcgggcgcgtagagcgttgcgttggtttcggtttagaggcggagggcgcgcgtcgttatttgtatcgttcggtaagtgtacggcgcgtttaggcgttcgttagtttgcgcgtcggtatcgcgttttcggtttgagttggaggcgtcgggggcgcgaagagacgtcgtgtggggttaggttcgggtcgttcggagcgcgcggggtcgcggcgacggcgggattcggttggaacgttttttcgttcgttttttggaagttatttttcgttttgggtcggtcgttaggcgttgtgttaagagtcgggattgtcgacgtcgttatcgtcgtcgtcggtaggcgtattggggaaaggcggtcgttgcgtcgtaagttagtttggtcgtttcgttttagtcggagtcggagtagggatgtcgtt

SEQ ID NO: 9224 - DNA, 727 bp, Artificial Sequence
  chemically treated genomic DNA (Homo sapiens) CpG-island No: 9224
aacgacatccctactccgactccgactaaaacgaaacgaccaaactaacttacgacgcaacgaccgcctttccccaatacgcctaccgacgacgacgataacgacgtcgacaatcccgactcttaacacaacgcctaacgaccgacccaaaacgaaaaataacttccaaaaaacgaacgaaaaaacgttccaaccgaatcccgccgtcgccgcgaccccgcgcgctccgaacgacccgaacctaaccccacacgacgtctcttcgcgcccccgacgcctccaactcaaaccgaaaacgcgataccgacgcgcaaactaacgaacgcctaaacgcgccgtacacttaccgaacgatacaaataacgacgcgcgccctccgcctctaaaccgaaaccaacgcaacgctctacgcgcccgaaaaaaacgaaaaaaacgaaacaacccccgtcccaaccccatttaacttcgcgacgacgacgacgactacgacgccgcgaactaaaaaccgacgtcgaaaaaaatcctaataccgaattccgcacgaaatattaacgaacgacttctaccaacttctccccaacgcgcgccgaacccgcgcgaccccgaaactacacgtcccaaatacttctacgacgcaaaataaatacaccgaactcgacgcaaaacgacccctcaaaaatcgaaaaaaaacgctccccaaaaaaaataaaacttaaaacaataacct

SEQ ID NO: 9225 - DNA, 544 bp, Artificial Sequence
  chemically treated genomic DNA (Homo sapiens) CpG-island No: 9225
  unsure (34, 107, 382)
cgggggcgggtttcgttgtttcgtcgcgtttttnattggttattaggttttttaaaatgtgattttgaatttgtgttttttcgtcgtagaatttagttttatcgaanagggtaatttgttcgcgcgtttcgtcgtcgtcgtcgcgtttttttttgaaggtgattgcgttcgcggggacgtagggggcggggttcgggtcgttcggagtcgggattgggtagagggcggggcggcggagggattgcggcggttcgtagcgggataattttgaggttgaggtagtggttttttgtatagtagttgtacgcgtcgtggtttcggattttttcgtttttgtagcgtagttcgagtcggttagcgtcggaggtgagcggtgtagganggttacgttattagtttttattaagggttagtcgttcggttagtgcggaatttcggcgcgtcggtcggtttcgggtacgtaggtagggcggcgtaggatttagggcgtttgggatgtagtggagtttagagagaggagaacggttttttacgtttggggttt

SEQ ID NO: 9226 - DNA, 544 bp, Artificial Sequence
  chemically treated genomic DNA (Homo sapiens) CpG-island No: 9226
  unsure (163, 438, 511)
aaaccccaaacgtaaaaaaccgttctcctctctctaaactccactacatcccaaacgccctaaatcctacgccgccctacctacgtacccgaaaccgaccgacgcgccgaaattccgcactaaccgaacgactaacccttaataaaaactaataacgtaaccntcctacaccgctcacctccgacgctaaccgactcgaactacgctacaaaaacgaaaaaatccgaaaccacgacgcgtacaactactatacaaaaaaccactacctcaacctcaaaattatcccgctacgaaccgccgcaatccctccgccgccccgccctctacccaatcccgactccgaacgacccgaaccccgccccctacgtccccgcgaacgcaatcaccttcaaaaaaaaacgcgacgacgacgacgaaacgcgcgaacaaattaccctnttcgataaaactaaattctacgacgaaaaaacacaaattcaaaatcacattttaaaaaacctaataaccaatnaaaaacgcgacgaaacaacgaaacccgcccccg

SEQ ID NO: 9227 - DNA, 544 bp, Artificial Sequence
  chemically treated genomic DNA (Homo sapiens) CpG-island No: 9227
  unsure (163, 438, 511)
aggttttaggcgtgaggagtcgtttttttttttttgagttttattgtattttagacgttttggattttgcgtcgttttgtttgcgtgttcggggtcggtcggcgcgtcgggatttcgtattagtcgggcgattggtttttggtggggattgatggcgtagttnttttgtatcgtttattttcggcgttgatcgattcgggttacgttgtaaagacgaagagattcggagttacggcgcgtgtagttgttgtgtaaggagttattgttttagttttaaggttatttcgttgcgggtcgtcgtaattttttcgtcgtttcgttttttgtttaatttcggtttcgggcgattcgggtttcgttttttgcgttttcgcgggcgtagttatttttaggaggaagcgcggcggcggcggcggaacgcgcgggtaggttgttttnttcggtgggattaaattttgcggcggaaggatatagatttagagttatattttaagaaatttgatgattaatnggggacgcggcggggtaacggggttcgttttcg

SEQ ID NO: 9228 - DNA, 544 bp, Artificial Sequence
  chemically treated genomic DNA (Homo sapiens) CpG-island No: 9228
  unsure (34, 107, 382)
cgaaaacgaaccccgttaccccgccgcgtccccnattaatcatcaaatttcttaaaatataactctaaatctatatccttccgccgcaaaatttaatcccaccgaanaaaacaacctacccgcgcgttccgccgccgccgccgcgcttcctcctaaaaataactacgcccgcgaaaacgcaaaaaacgaaacccgaatcgcccgaaaccgaaattaaacaaaaaacgaaacgacgaaaaaattacgacgacccgcaacgaaataaccttaaaactaaaacaataactccttacacaacaactacacgcgccgtaactccgaatctcttcgtctttacaacgtaacccgaatcgatcaacgccgaaaataaacgatacaaaanaactacgccatcaatccccaccaaaaaccaatcgcccgactaatacgaaatcccgacgcgccgaccgaccccgaacacgcaaacaaaacgacgcaaaatccaaaacgtctaaaatacaataaaactcaaaaaaaaaaaaacgactcctcacgcctaaaacct

SEQ ID NO: 9229 - DNA, 555 bp, Artificial Sequence
  chemically treated genomic DNA (Homo sapiens) CpG-island No: 9229
gaggggttcggagattcgtttattagtaggcggcgtcgggggtttcggggtttcgattcgaataaggcggtgtgggggagagtcgtggcgcgggggcggcgtgggttcgggggcgataggggtggcgagggcggcggagtcggacgatttttcggagtaggggttttcgaagtcgcgttttcgttgtagtttgtatgcggttaggatgttcgggggcggcgcggggggcgcggtcggagagggcgtaggggggcggtagtcgggttcggggggcgtcggtttgttgtttttttcgtcgtcgtttttttcgcggaagtttaggtgttttcggagttatttggttatttcgtcgttgtcgtttttttttgggtcggttttcgtattttcggcgtttcggcgggattttttcgggtcgtttttagcgtttttttgcgttcgcggtttcgggcgggagttagtcggaggagtttcgtttagtaatatggggttagttagattgagcgaggggagcgtagcggcgtgtggggggcgggggtcggggtgggaagggggttt

SEQ ID NO: 9230 - DNA, 555 bp, Artificial Sequence
  chemically treated genomic DNA (Homo sapiens) CpG-island No: 9230
aaacccccttcccaccccgacccccgccccccacacgccgctacgctcccctcgctcaatctaactaaccccatattactaaacgaaactcctccgactaactcccgcccgaaaccgcgaacgcaaaaaaacgctaaaaacgacccgaaaaaatcccgccgaaacgccgaaaatacgaaaaccgacccaaaaaaaaacgacaacgacgaaataaccaaataactccgaaaacacctaaacttccgcgaaaaaaacgacgacgaaaaaaacaacaaaccgacgccccccgaacccgactaccgcccccctacgccctctccgaccgcgccccccgcgccgcccccgaacatcctaaccgcatacaaactacaacgaaaacgcgacttcgaaaacccctactccgaaaaatcgtccgactccgccgccctcgccacccctatcgcccccgaacccacgccgcccccgcgccacgactctcccccacaccgccttattcgaatcgaaaccccgaaacccccgacgccgcctactaataaacgaatctccgaacccctc

SEQ ID NO: 9231 - DNA, 555 bp, Artificial Sequence
  chemically treated genomic DNA (Homo sapiens) CpG-island No: 9231
aggttttttttttatttcggttttcgttttttatacgtcgttgcgtttttttcgtttagtttggttggttttatgttattgagcggagttttttcggttggttttcgttcggggtcgcgaacgtaggggagcgttgggggcggttcgggggggtttcgtcggggcgtcgggggtgcgggagtcggtttaggagggggcggtagcggcggagtagttaagtggtttcgggagtatttgggttttcgcggggggggcggcggcggagggggtagtaagtcggcgtttttcgagttcgattatcgtttttttgcgtttttttcggtcgcgtttttcgcgtcgttttcggatattttggtcgtatataggttgtagcgggagcgcgatttcgaagatttttatttcggggggtcgttcggtttcgtcgttttcgttatttttgtcgttttcggatttacgtcgttttcgcgttacggtttttttttatatcgttttattcgggtcgagatttcggggttttcggcgtcgtttgttgatgagcggattttcggatttttt

SEQ ID NO: 9232 - DNA, 555 bp, Artificial Sequence
  chemically treated genomic DNA (Homo sapiens) CpG-island No: 9232
aaaaaatccgaaaatccgctcatcaacaaacgacgccgaaaaccccgaaatctcgacccgaataaaacgatataaaaaaaaaccgtaacgcgaaaacgacgtaaatccgaaaacgacaaaaataacgaaaacgacgaaaccgaacgaccccccgaaataaaaatcttcgaaatcgcgctcccgctacaacctatatacgaccaaaatatccgaaaacgacgcgaaaaacgcgaccgaaaaaaacgcaaaaaaacgataatcgaactcgaaaaacgccgacttactaccccctccgccgccgccccccccgcgaaaacccaaatactcccgaaaccacttaactactccgccgctaccgccccctcctaaaccgactcccgcacccccgacgccccgacgaaacccccccgaaccgcccccaacgctcccctacgttcgcgaccccgaacgaaaaccaaccgaaaaaactccgctcaataacataaaaccaaccaaactaaacgaaaaaaacgcaacgacgtataaaaaacgaaaaccgaaataaaaaaaaaacct

SEQ ID NO: 9233 - DNA, 534 bp, Artificial Sequence
  chemically treated genomic DNA (Homo sapiens) CpG-island No: 9233
  unsure (285, 304, 320..321, 331, 337, 345, 364, 374, 388, 406, 411..412)
  unsure (428..429, 510, 518)
gggcgcgcggggtgttgttgttgttggacgtttttttcgtattttcgttttaggcgcggggtttgttttaattttcgcgcggtttttttttcgttttttttttttatcgagcgggtttgagtcgcggagtagttacgcgagtgcggaattcggggcgcgggcggcggtggggttcgggcgcgggtagggttggttatggcgcgggcggcgggcgcgcggggttttgtcgggtggtgtacgaggcgcgggcgttgcgggcggggtacgtttttttttttcgtcgtngtggatcgcgggttgggtngttggcggtcgcgttnngttgtttcgncgcgtnattcgggntgttttttttaagcgttgntatcgacgangaagagtcggcgtnattttggtttcgttggtnaggtnnttcgtcgtcgttttgnntttcgcgtcgcgcgttcggggaggggggattatattcgttttcggtttttagttttttcggggatttgggtggcggtggtnattcgttnggggatatgggttttt

SEQ ID NO: 9234 - DNA, 534 bp, Artificial Sequence
  chemically treated genomic DNA (Homo sapiens) CpG-island No: 9234
  unsure (17, 25, 106..107, 123..124, 129, 147, 161, 171, 190, 198)
  unsure (204, 214..215, 231, 250)
aaaaacccatatccccnaacgaatnaccaccgccacccaaatccccgaaaaaactaaaaaccgaaaacgaatataatcccccctccccgaacgcgcgacgcgaaanncaaaacgacgacgaannacctnaccaacgaaaccaaaatnacgccgactcttcntcgtcgatancaacgcttaaaaaaaacancccgaatnacgcgncgaaacaacnnaacgcgaccgccaacnacccaacccgcgatccacnacgacgaaaaaaaaaaacgtaccccgcccgcaacgcccgcgcctcgtacaccacccgacaaaaccccgcgcgcccgccgcccgcgccataaccaaccctacccgcgcccgaaccccaccgccgcccgcgccccgaattccgcactcgcgtaactactccgcgactcaaacccgctcgataaaaaaaaaaaacgaaaaaaaaaccgcgcgaaaattaaaacaaaccccgcgcctaaaacgaaaatacgaaaaaaacgtccaacaacaacaacaccccgcgcgccc

SEQ ID NO: 9235 - DNA, 534 bp, Artificial Sequence
  chemically treated genomic DNA (Homo sapiens) CpG-island No: 9235
  unsure (17, 25, 106..107, 123..124, 129, 147, 161, 171, 190, 198)
  unsure (204, 214..215, 231, 250)
gggaatttatgtttttnggcgggtngttatcgttatttaagttttcgggaaggttggggatcgggagcgggtgtgatttttttttttcggacgcgcggcgcggggnntagaacggcggcgggnnatttnattagcggggttaggatngcgtcggttttttntcgtcggtgntagcgtttggagaggatanttcgggtngcgcgncggagtagtnnagcgcggtcgttagtnatttagttcgcggtttatngcggcgaaggggaggagcgtgtttcgttcgtagcgttcgcgtttcgtgtattattcggtagggtttcgcgcgttcgtcgttcgcgttatggttagttttgttcgcgttcgggttttatcgtcgttcgcgtttcgagtttcgtattcgcgtagttgtttcgcggtttaggttcgttcggtggggagggggaacgggggaggggtcgcgcgagggttggggtaggtttcgcgtttggggcggaggtgcggggagggcgtttagtagtagtaatatttcgcgcgttt

SEQ ID NO: 9236 - DNA, 534 bp, Artificial Sequence
  chemically treated genomic DNA (Homo sapiens) CpG-island No: 9236
  unsure (285, 304, 320..321, 331, 337, 345, 364, 374, 388, 406, 411..412)
  unsure (428..429, 510, 518)
aaacgcgcgaaatattactactactaaacgccctccccgcacctccgccccaaacgcgaaacctaccccaaccctcgcgcgacccctcccccgttccccctccccaccgaacgaacctaaaccgcgaaacaactacgcgaatacgaaactcgaaacgcgaacgacgataaaacccgaacgcgaacaaaactaaccataacgcgaacgacgaacgcgcgaaaccctaccgaataatacacgaaacgcgaacgctacgaacgaaacacgctcctccccttcgccgcnataaaccgcgaactaaatnactaacgaccgcgctnnactactccgncgcgcnacccgaantatcctctccaaacgctancaccgacganaaaaaaccgacgcnatcctaaccccgctaatnaaatnncccgccgccgttctannccccgcgccgcgcgtccgaaaaaaaaaaatcacacccgctcccgatccccaaccttcccgaaaacttaaataacgataacnacccgccnaaaaacataaattccc

SEQ ID NO: 9237 - DNA, 804 bp, Artificial Sequence
  chemically treated genomic DNA (Homo sapiens) CpG-island No: 9237
  unsure (323, 412)
gcgttcggattggtataatcgtcgttgttttatttttttcggggcggtaatatcgtagtgttaggtttgggattgaggcgtggggttttttttcgtttcgttttggcgtcgttcgtcgtttcgttttttggggggtttcgtggcgtatttttgtgacgtagcgtttgtgtcgatatcggcgcgcgtcgagttcggaagaggcgcgggttaggaaaggagttggttcgcgtaggtgcggcgtttgggtttttatggcgttgtggcgcggtttcgcgtacgcgggttttttggcgttggtcgtgggttgcgtttttttgttggangttagagttgttaggttcggcgttgcgttttttttggagttcgttgtgtttggggttcgcgtttgcgttttcgggattcgttttttttngagggtcggttggcggtagtttgggacgcgtttatcgtgcggttagttcggcgttggcgtcgcgtggtagtggggtgagtgttaacggggtttgggtttttgagttttcgaggtcggttttggaggtcgggcggagtcgcgtagaaatagggttttttagaggttttcgggaggcgttgttgttcgcgttggttttttggcgagaagtgtcggacgtttgagtggaattcggttcgttatcgttgttttttttattcggttggtttttgcgttttttttttatttcggtaggattagttttaatagttttttgttaatttcgttttgtttgatattttttttcgagttttttttttcgttttaatttttagtttttttttttttggcgattg

SEQ ID NO: 9238 - DNA, 804 bp, Artificial Sequence
  chemically treated genomic DNA (Homo sapiens) CpG-island No: 9238
  unsure (393, 482)
caatcgccaaaaaaaaaaaaactaaaaattaaaacgaaaaaaaaaactcgaaaaaaaatatcaaacaaaacgaaattaacaaaaaactattaaaactaatcctaccgaaataaaaaaaaaacgcaaaaaccaaccgaataaaaaaaacaacgataacgaaccgaattccactcaaacgtccgacacttctcgccaaaaaaccaacgcgaacaacaacgcctcccgaaaacctctaaaaaaccctatttctacgcgactccgcccgacctccaaaaccgacctcgaaaactcaaaaacccaaaccccgttaacactcaccccactaccacgcgacgccaacgccgaactaaccgcacgataaacgcgtcccaaactaccgccaaccgaccctcnaaaaaaaacgaatcccgaaaacgcaaacgcgaaccccaaacacaacgaactccaaaaaaaacgcaacgccgaacctaacaactctaacntccaacaaaaaaacgcaacccacgaccaacgccaaaaaacccgcgtacgcgaaaccgcgccacaacgccataaaaacccaaacgccgcacctacgcgaaccaactcctttcctaacccgcgcctcttccgaactcgacgcgcgccgatatcgacacaaacgctacgtcacaaaaatacgccacgaaaccccccaaaaaacgaaacgacgaacgacgccaaaacgaaacgaaaaaaaaccccacgcctcaatcccaaacctaacactacgatattaccgccccgaaaaaaataaaacaacgacgattataccaatccgaacgc

SEQ ID NO: 9239 - DNA, 804 bp, Artificial Sequence
  chemically treated genomic DNA (Homo sapiens) CpG-island No: 9239
  unsure (393, 482)
tagtcgttagaagagaaggggttaaaagttggaacgaggaagaaggttcggagaaaggtgttagataaagcgggattagtaagaagttgttagggttggttttatcgggatgagagaaaggcgtagaggttagtcgagtggaaagagtagcggtgacgaatcgggttttatttagacgttcgatatttttcgttaaggggttagcgcggatagtagcgtttttcggggatttttgagaagttttgtttttgcgcggtttcgttcgatttttaaggtcgatttcggaggtttagagatttaggtttcgttggtatttattttattgttacgcggcgttagcgtcggattggtcgtacgataagcgcgttttaggttgtcgttaatcggtttttngggggagacgggtttcgggggcgtaggcgcgggttttagatatagcgagttttagagagagcgtagcgtcgagtttggtagttttggtntttagtaggaagacgtagtttacggttagcgttaggaagttcgcgtacgcggagtcgcgttatagcgttatggggatttaggcgtcgtatttgcgcgaattaattttttttttagttcgcgtttttttcgggttcggcgcgcgtcgatgtcgatataagcgttacgttataagggtgcgttacggggttttttaaggggcggggcgacgggcggcgttaggacggagcgaggggggattttacgttttagttttaggtttggtattgcggtgttgtcgtttcggaggaggtgggataacggcggttgtgttagttcgggcgt

SEQ ID NO: 9240 - DNA, 804 bp, Artificial Sequence
  chemically treated genomic DNA (Homo sapiens) CpG-island No: 9240
  unsure (323, 412)
acgcccgaactaacacaaccgccgttatcccacctcctccgaaacgacaacaccgcaataccaaacctaaaactaaaacgtaaaatcccccctcgctccgtcctaacgccgcccgtcgccccgccccttaaaaaaccccgtaacgcacccttataacgtaacgcttatatcgacatcgacgcgcgccgaacccgaaaaaaacgcgaactaaaaaaaaaattaattcgcgcaaatacgacgcctaaatccccataacgctataacgcgactccgcgtacgcgaacttcctaacgctaaccgtaaactacgtcttcctactaaanaccaaaactaccaaactcgacgctacgctctctctaaaactcgctatatctaaaacccgcgcctacgcccccgaaacccgtctcccccnaaaaaccgattaacgacaacctaaaacgcgcttatcgtacgaccaatccgacgctaacgccgcgtaacaataaaataaataccaacgaaacctaaatctctaaacctccgaaatcgaccttaaaaatcgaacgaaaccgcgcaaaaacaaaacttctcaaaaatccccgaaaaacgctactatccgcgctaaccccttaacgaaaaatatcgaacgtctaaataaaacccgattcgtcaccgctactctttccactcgactaacctctacgcctttctctcatcccgataaaaccaaccctaacaacttcttactaatcccgctttatctaacacctttctccgaaccttcttcctcgttccaacttttaaccccttctcttctaacgacta

SEQ ID NO: 9241 - DNA, 1013 bp, Artificial Sequence
  chemically treated genomic DNA (Homo sapiens) CpG-island No: 9241
  unsure (472, 564, 703, 922)
tttcgtcgttatttagttgtcgggttaattagtagtcgaggtgtgcggttaggcgcgagttttgcgggagtttagttttcgggagagattcggtagcggcgcggcgaggacggcggcgcggcgaggacggcggcgcggcgaggacggcggcgcggcgaggacggcggcgcggcgaggacgcgcggcgcggcgaggacggcggcgcggcgaggacggcggcgcggcgaggacggcggaacggcgaggacggcggcgcggcgaggattacggcgcgtcgagaacggcggttcggcgaagaacgcggcgcggcgaggacggcggttcggcgaggacggcggttcggtaaggacggcgggttcggtaaggacgtcggtacggttaggacggcggcgcggatagaacgttcggttcggtaagtacggcggttttgtaaaaacgtcggttcggtaagaacggcggcgaatcggggtangtttcgcgttttggttaggtaagttcggggaatttcggttgtttgattcgttggcggcggtagttttggtttcgttcgcggcgtcgcggggnattcggacgcgtggggggcggcgcgtaagttgcgggttaagagttttcgagcgttgtttttcggattcggcggggttgcggggaggtcgtcgttgggatttaggggtgtagttcggcggttttacgtttttcggatcgngattattttttttttacgatgggcgggcgggtgcggcggggattaggcgatggttttcgtatttcgggaggggtttatcgcggcgaggggttattttcggcgtcggtaagtggcgttgtttggcgggttcgttcgttcgcgtttcgtcgggttggtcgggtcgttggtgcgtttcgttgttcggtttggcgtcggtattaagttttcgtgttgggcggntaattattgagtttgggatcgtttttgggtttatttttttgggagaattcgagttcggattttcggtttttttttttttttgtataataag

SEQ ID NO: 9242 - DNA, 1013 bp, Artificial Sequence
  chemically treated genomic DNA (Homo sapiens) CpG-island No: 9242
  unsure (92, 311, 450, 542)
cttattatacaaaaaaaaaaaaaaaccgaaaatccgaactcgaattctcccaaaaaaataaacccaaaaacgatcccaaactcaataattanccgcccaacacgaaaacttaataccgacgccaaaccgaacaacgaaacgcaccaacgacccgaccaacccgacgaaacgcgaacgaacgaacccgccaaacaacgccacttaccgacgccgaaaataacccctcgccgcgataaacccctcccgaaatacgaaaaccatcgcctaatccccgccgcacccgcccgcccatcgtaaaaaaaaaataatcncgatccgaaaaacgtaaaaccgccgaactacacccctaaatcccaacgacgacctccccgcaaccccgccgaatccgaaaaacaacgctcgaaaactcttaacccgcaacttacgcgccgccccccacgcgtccgaatnccccgcgacgccgcgaacgaaaccaaaactaccgccgccaacgaatcaaacaaccgaaattccccgaacttacctaaccaaaacgcgaaacntaccccgattcgccgccgttcttaccgaaccgacgtttttacaaaaccgccgtacttaccgaaccgaacgttctatccgcgccgccgtcctaaccgtaccgacgtccttaccgaacccgccgtccttaccgaaccgccgtcctcgccgaaccgccgtcctcgccgcgccgcgttcttcgccgaaccgccgttctcgacgcgccgtaatcctcgccgcgccgccgtcctcgccgttccgccgtcctcgccgcgccgccgtcctcgccgcgccgccgtcctcgccgcgccgcgcgtcctcgccgcgccgccgtcctcgccgcgccgccgtcctcgccgcgccgccgtcctcgccgcgccgccgtcctcgccgcgccgctaccgaatctctcccgaaaactaaactcccgcaaaactcgcgcctaaccgcacacctcgactactaattaacccgacaactaaataacgacgaaa

SEQ ID NO: 9243 - DNA, 1013 bp, Artificial Sequence
  chemically treated genomic DNA (Homo sapiens) CpG-island No: 9243
  unsure (92, 311, 450, 542)
tttattatatagggaaagggaagggtcgaagattcgggttcgagtttttttagggaagtgaatttagaggcgattttaaatttagtagttgntcgtttagtacggggatttgatgtcggcgttaagtcgggtagcggaacgtattagcggttcgattagttcggcgagacgcgagcgggcgggttcgttagatagcgttatttgtcggcgtcgagagtggtttttcgtcgcggtgagtttttttcgggatgcgaaagttatcgtttagttttcgtcgtattcgttcgtttatcgtgggaggaggatggttncggttcgagaggcgtaaggtcgtcgggttgtatttttagattttagcggcggttttttcgtagtttcgtcgagttcggggggtagcgttcgggagtttttggttcgtagtttacgcgtcgttttttacgcgttcgggtntttcgcggcgtcgcgggcggggttaaggttgtcgtcgttagcgagttaggtagtcgaggtttttcgagtttatttggttagggcgcggggtntgtttcggttcgtcgtcgtttttgtcgggtcggcgtttttgtagggtcgtcgtgtttgtcgggtcgggcgttttattcgcgtcgtcgttttagtcgtgtcggcgtttttgtcgggttcgtcgtttttgtcgggtcgtcgttttcgtcgggtcgtcgttttcgtcgcgtcgcgtttttcgtcgagtcgtcgttttcggcgcgtcgtagttttcgtcgcgtcgtcgttttcgtcgtttcgtcgttttcgtcgcgtcgtcgttttcgtcgcgtcgtcgttttcgtcgcgtcgcgcgttttcgtcgcgtcgtcgttttcgtcgcgtcgtcgttttcgtcgcgtcgtcgttttcgtcgcgtcgtcgttttcgtcgcgtcgttgtcgggtttttttcgggggttgagttttcgtagagttcgcgtttagtcgtatatttcgattgttgattagttcgatagttgaatagcggcggga

SEQ ID NO: 9244 - DNA, 1013 bp, Artificial Sequence
  chemically treated genomic DNA (Homo sapiens) CpG-island No: 9244
  unsure (472, 564, 703, 922)
tcccgccgctattcaactatcgaactaatcaacaatcgaaatatacgactaaacgcgaactctacgaaaactcaacccccgaaaaaaacccgacaacgacgcgacgaaaacgacgacgcgacgaaaacgacgacgcgacgaaaacgacgacgcgacgaaaacgacgacgcgacgaaaacgcgcgacgcgacgaaaacgacgacgcgacgaaaacgacgacgcgacgaaaacgacgaaacgacgaaaacgacgacgcgacgaaaactacgacgcgccgaaaacgacgactcgacgaaaaacgcgacgcgacgaaaacgacgacccgacgaaaacgacgacccgacaaaaacgacgaacccgacaaaaacgccgacacgactaaaacgacgacgcgaataaaacgcccgacccgacaaacacgacgaccctacaaaaacgccgacccgacaaaaacgacgacgaaccgaaacanaccccgcgccctaaccaaataaactcgaaaaacctcgactacctaactcgctaacgacgacaaccttaaccccgcccgcgacgccgcgaaanacccgaacgcgtaaaaaacgacgcgtaaactacgaaccaaaaactcccgaacgctaccccccgaactcgacgaaactacgaaaaaaccgccgctaaaatctaaaaatacaacccgacgaccttacgcctctcgaaccgnaaccatcctcctcccacgataaacgaacgaatacgacgaaaactaaacgataactttcgcatcccgaaaaaaactcaccgcgacgaaaaaccactctcgacgccgacaaataacgctatctaacgaacccgcccgctcgcgtctcgccgaactaatcgaaccgctaatacgttccgctacccgacttaacgccgacatcaaatccccgtactaaacgancaactactaaatttaaaatcgcctctaaattcacttccctaaaaaaactcgaacccgaatcttcgacccttccctttccctatataataaa

SEQ ID NO: 9245 - DNA, 1198 bp, Artificial Sequence
  chemically treated genomic DNA (Homo sapiens) CpG-island No: 9245
  unsure (734, 941, 1164)
tagagcgagtagggcgtagcgtcgcggtcggggtaggatgcggagtttcgcgtttatcggttttattcgcgagattagatttttgtaattttttagttagtaaggtcgggacgtgtttcgggtatttgtgtgttttttagggttcgggacgttcggggcgttgagtcgtttaacgtttgggttttagtttcggtttcgtagattttttcggttggattcgggttttgggtgtattcgttcgttttgtcgatgttttagtgtcggggttaggggtcgtagggtttcgtgaacgttcggtacggacgtattttttttttttttttttttttcgcgcgcggtgtcgtcgggaagcgtttttcggttttagtgatttaagagcgggtgaggtaaagcggtagggatcggggtacgggttcggtagtcgtagtttagtgcgcgtgcgttaggtagcggtagttttgcgtgtttttcgtatttcgtttgcggtatgtattcgtcgttatttagttttcgggttaattagtagtcgcggtgtgtcgttaagtgcgggtttttaaggagtttagtttttcggacggagtcggcggttgcggggcgaggacggcggcggatcggggtagtttcgcgttttggttaggtaagttggggaattttggttgtttgattttttggcggcggtaatttggggtcgttcgcggcgtcgcggggatttcgacgcgtggggggcggcgcgngaagttgtaggttaagagttttcgagcgttgtttttcggattcggcggggttgcggggaggtcgtcgttgggatttaggggtgtagttcggttggtttacgtttttcggatcggtttattttttttttataaaaggcggtcgggtgcggcggggattaattaaaattttcgtatttcgggaggggtttatcgcggtaaggggttatntttcggcgcgggtaagtggcgttgtttgtttttttcgttagataagaaatcgttgggttggtcgggtcgttggtgcgtttcgttgtttcgtttgacgtcggtattaagttttcgagttgggcggtaattattgagtttggggtcgtttttgggttcgttttttcgggagaattcgagttcggattttcgttttttttttttttttgtataataaggtttagangagaaaaattttttaattaaaaattttatatttt

SEQ ID NO: 9246 - DNA, 1198 bp, Artificial Sequence
  chemically treated genomic DNA (Homo sapiens) CpG-island No: 9246
  unsure (35, 258, 465)
aaaatataaaatttttaattaaaaaatttttctcntctaaaccttattatacaaaaaaaaaaaaaaaacgaaaatccgaactcgaattctcccgaaaaaacgaacccaaaaacgaccccaaactcaataattaccgcccaactcgaaaacttaataccgacgtcaaacgaaacaacgaaacgcaccaacgacccgaccaacccaacgatttcttatctaacgaaaaaaacaaacaacgccacttacccgcgccgaaanataaccccttaccgcgataaacccctcccgaaatacgaaaattttaattaatccccgccgcacccgaccgccttttataaaaaaaaaataaaccgatccgaaaaacgtaaaccaaccgaactacacccctaaatcccaacgacgacctccccgcaaccccgccgaatccgaaaaacaacgctcgaaaactcttaacctacaacttcncgcgccgccccccacgcgtcgaaatccccgcgacgccgcgaacgaccccaaattaccgccgccaaaaaatcaaacaaccaaaattccccaacttacctaaccaaaacgcgaaactaccccgatccgccgccgtcctcgccccgcaaccgccgactccgtccgaaaaactaaactccttaaaaacccgcacttaacgacacaccgcgactactaattaacccgaaaactaaataacgacgaatacataccgcaaacgaaatacgaaaaacacgcaaaactaccgctacctaacgcacgcgcactaaactacgactaccgaacccgtaccccgatccctaccgctttacctcacccgctcttaaatcactaaaaccgaaaaacgcttcccgacgacaccgcgcgcgaaaaaaaaaaaaaaaaaaaaaatacgtccgtaccgaacgttcacgaaaccctacgacccctaaccccgacactaaaacatcgacaaaacgaacgaatacacccaaaacccgaatccaaccgaaaaaatctacgaaaccgaaactaaaacccaaacgttaaacgactcaacgccccgaacgtcccgaaccctaaaaaacacacaaatacccgaaacacgtcccgaccttactaactaaaaaattacaaaaatctaatctcgcgaataaaaccgataaacgcgaaactccgcatcctaccccgaccgcgacgctacgccctactcgctcta

SEQ ID NO: 9247 - DNA, 1198 bp, Artificial Sequence
  chemically treated genomic DNA (Homo sapiens) CpG-island No: 9247
  unsure (35, 258, 465)
aaggtgtggggtttttaattgagaagttttttttntttgggttttattatataggaaaagggaaggggcgaagattcgggttcgggttttttcggggaagcgaatttagaggcgattttaaatttagtagttgtcgtttagttcggggatttgatgtcggcgttaagcggggtagcggaacgtattagcggttcggttagtttagcgattttttatttggcggggggggtagatagcgttatttgttcgcgtcgagangtggttttttatcgcggtgagtttttttcgggatgcgagagttttggttggttttcgtcgtattcggtcgttttttgtgggaggaggatgggtcggttcgagaggcgtaggttagtcgggttgtatttttagattttagcggcggttttttcgtagtttcgtcgagttcggggggtagcgttcgggagtttttggtttgtagttttncgcgtcgttttttacgcgtcggggttttcgcggcgtcgcgggcggttttaggttgtcgtcgttagggagttaggtagttaaggttttttagtttatttggttagggcgcggggttgtttcggttcgtcgtcgttttcgtttcgtagtcgtcggtttcgttcgggaggttgagttttttgagagttcgtatttagcggtatatcgcgattgttaattagttcggaagttgaatagcggcgggtatatatcgtaagcggagtacggaaagtacgtagggttgtcgttatttggcgtacgcgtattgagttgcggttgtcgagttcgtgtttcggtttttgtcgttttattttattcgtttttggattattggggtcgggaaacgtttttcggcgatatcgcgcgcggggaagagagggaagaaaaagatgcgttcgtgtcgggcgtttacgaggttttgcggtttttggtttcggtattgggatatcggtagggcgggcgggtgtatttaggattcgggtttagtcgggaggatttacgggatcggggttggaatttagacgttggacggtttagcgtttcgaacgtttcgggttttggggagtatatagatgttcgaagtacgtttcggttttgttggttggggagttgtaggggtttggtttcgcgggtaaagtcggtgaacgcgaggtttcgtattttgtttcggtcgcggcgttgcgttttgttcgttttg

SEQ ID NO: 9248 - DNA, 1198 bp, Artificial Sequence
  chemically treated genomic DNA (Homo sapiens) CpG-island No: 9248
  unsure (734, 941, 1164)
caaaacgaacaaaacgcaacgccgcgaccgaaacaaaatacgaaacctcgcgttcaccgactttacccgcgaaaccaaacccctacaactccccaaccaacaaaaccgaaacgtacttcgaacatctatatactccccaaaacccgaaacgttcgaaacgctaaaccgtccaacgtctaaattccaaccccgatcccgtaaatcctcccgactaaacccgaatcctaaatacacccgcccgccctaccgatatcccaataccgaaaccaaaaaccgcaaaacctcgtaaacgcccgacacgaacgcatctttttcttccctctcttccccgcgcgcgatatcgccgaaaaacgtttcccgaccccaataatccaaaaacgaataaaataaaacgacaaaaaccgaaacacgaactcgacaaccgcaactcaatacgcgtacgccaaataacgacaaccctacgtactttccgtactccgcttacgatatatacccgccgctattcaacttccgaactaattaacaatcgcgatataccgctaaatacgaactctcaaaaaactcaacctcccgaacgaaaccgacgactacgaaacgaaaacgacgacgaaccgaaacaaccccgcgccctaaccaaataaactaaaaaaccttaactacctaactccctaacgacgacaacctaaaaccgcccgcgacgccgcgaaaaccccgacgcgtaaaaaacgacgcgnaaaactacaaaccaaaaactcccgaacgctaccccccgaactcgacgaaactacgaaaaaaccgccgctaaaatctaaaaatacaacccgactaacctacgcctctcgaaccgacccatcctcctcccacaaaaaacgaccgaatacgacgaaaaccaaccaaaactctcgcatcccgaaaaaaactcaccgcgataaaaaaccacntctcgacgcgaacaaataacgctatctaccccccccgccaaataaaaaatcgctaaactaaccgaaccgctaatacgttccgctaccccgcttaacgccgacatcaaatccccgaactaaacgacaactactaaatttaaaatcgcctctaaattcgcttccccgaaaaaacccgaacccgaatcttcgccccttcccttttcctatataataaaacccaaanaaaaaaaacttctcaattaaaaaccccacacctt

SEQ ID NO: 9249 - DNA, 590 bp, Artificial Sequence
  chemically treated genomic DNA (Homo sapiens) CpG-island No: 9249
  unsure (117)
ttcgacggcgttaggtaacggttttcgtagtcgcggaaggttatattgtcggagcggaattgtagcgtgtagttagtggtcggttcggggcgcgttattaggcgtttgttatggcgntaggaagcggtggttcgcggtttgtacgttgtagcgttgtttttggaaggcgagggtgacgagcgagtcgacgttttagggtacgtcgcggtttattgcgatttcgtcggtcggcggcgcgtttaggtgcgtttagcgtttaggggtgacgcggtagatgttgatttgagggtgtatggcgatgtgtacgttttatttttcggcgggggatatcgtttgcgcgaagtacgataggcggtttttcgtgtcgtcgaaggagcgtcggtgcgtttcggattgtagcgattagcggtcgtcgtcgtgcgttacggtgaggaagcggtagtcgggatcgggtatttcgcgttcgtaggttatattgtcgtttttgttcgtcgttaggtagcggtttaggtggttgcgtaggtatacggtcgcgttgttcgtttagttagggggttgttttagcgtttagatttgttgtttttttaggt

SEQ ID NO: 9250 - DNA, 590 bp, Artificial Sequence
  chemically treated genomic DNA (Homo sapiens) CpG-island No: 9250
  unsure (474)
acctaaaaaaacaacaaatctaaacgctaaaacaaccccctaactaaacgaacaacgcgaccgtatacctacgcaaccacctaaaccgctacctaacgacgaacaaaaacgacaatataacctacgaacgcgaaatacccgatcccgactaccgcttcctcaccgtaacgcacgacgacgaccgctaatcgctacaatccgaaacgcaccgacgctccttcgacgacacgaaaaaccgcctatcgtacttcgcgcaaacgatatcccccgccgaaaaataaaacgtacacatcgccatacaccctcaaatcaacatctaccgcgtcacccctaaacgctaaacgcacctaaacgcgccgccgaccgacgaaatcgcaataaaccgcgacgtaccctaaaacgtcgactcgctcgtcaccctcgccttccaaaaacaacgctacaacgtacaaaccgcgaaccaccgcttcctancgccataacaaacgcctaataacgcgccccgaaccgaccactaactacacgctacaattccgctccgacaatataaccttccgcgactacgaaaaccgttacctaacgccgtcgaa

SEQ ID NO: 9251 - DNA, 590 bp, Artificial Sequence
  chemically treated genomic DNA (Homo sapiens) CpG-island No: 9251
  unsure (474)
gtttgaagaagtagtagatttggacgttggagtagttttttgattaggcgggtagcgcggtcgtgtgtttgcgtagttatttgggtcgttatttggcggcggataaggacggtaatgtgatttgcgagcgcgaggtgttcggtttcgattgtcgtttttttatcgtggcgtacgacgacggtcgttggtcgttgtagttcgaggcgtatcggcgttttttcggcggtacggaggatcgtttgtcgtgtttcgcgtagacggtgtttttcgtcgagaagtggagcgtgtatatcgttatgtatttttaggttaatatttatcgcgttatttttaagcgttaggcgtatttgagcgcgtcgtcggtcgacgagatcgtagtggatcgcgacgtgttttggggcgtcgattcgttcgttattttcgttttttaggagtagcgttatagcgtgtagatcgcggattatcgttttttgncgttatgataggcgtttggtggcgcgtttcgagtcggttattggttatacgttgtagtttcgtttcggtaatgtggtttttcgcgattgcgagggtcgttatttggcgtcgtcggg

SEQ ID NO: 9252 - DNA, 590 bp, Artificial Sequence
  chemically treated genomic DNA (Homo sapiens) CpG-island No: 9252
  unsure (117)
cccgacgacgccaaataacgaccctcgcaatcgcgaaaaaccacattaccgaaacgaaactacaacgtataaccaataaccgactcgaaacgcgccaccaaacgcctatcataacgncaaaaaacgataatccgcgatctacacgctataacgctactcctaaaaaacgaaaataacgaacgaatcgacgccccaaaacacgtcgcgatccactacgatctcgtcgaccgacgacgcgctcaaatacgcctaacgcttaaaaataacgcgataaatattaacctaaaaatacataacgatatacacgctccacttctcgacgaaaaacaccgtctacgcgaaacacgacaaacgatcctccgtaccgccgaaaaaacgccgatacgcctcgaactacaacgaccaacgaccgtcgtcgtacgccacgataaaaaaacgacaatcgaaaccgaacacctcgcgctcgcaaatcacattaccgtccttatccgccgccaaataacgacccaaataactacgcaaacacacgaccgcgctacccgcctaatcaaaaaactactccaacgtccaaatctactacttcttcaaac

SEQ ID NO: 9253 - DNA, 775 bp, Artificial Sequence
  chemically treated genomic DNA (Homo sapiens) CpG-island No: 9253
  unsure (306, 534, 555, 569, 571)
gatcgtcgtcggtttgagtttttacgaggtttgcgttaagtgcgggaatttgtttataaatttggatagtttgaacgtttataatgttatttatcgtagagtcgaggttagtcgtacgcgcgtttcggtcgaggagggggcggaggggttttcggatattaagtagttttttttttagtgtttgaatttgaggtcgtcggcggtcggcgattcgtgttttggtacgtaggtcggacggcgggtggttgagttggattcggttaatagttattaggtttggtagttggttacgcggggtaaggtggntcgagtcggtcgagtattttaagtacggggtttgggacgaggcgttggtcggggacgtggttttcgataaggataggcgcgagtacgttttggtgagttaggagaagcgtaagcgtgagtaggatgtattagtcgcgtaggggttttcgcggaagcgcgcgagcgggtttggggatttcgcgttcgtcggttatttcgattttcgttcggtcgcgcgttttaatcgtnagggtcgtagttattatcggnttagggtaagtttntntcgagtgtttcgagtgcggtaagatttttcgtatttattattagatggtgttgtatttacgcgtgtatcgtcgcgcgcgtcgcgagagggatagtgacggggatagggcggcgcgggttcgttgcggattatttagtgagggtgattcggttttttagtttagtagttttggtttcgtttgtgtcgttgttgatttttcgggtt

SEQ ID NO: 9254 - DNA, 775 bp, Artificial Sequence
  chemically treated genomic DNA (Homo sapiens) CpG-island No: 9254
  unsure (205, 207, 221, 242, 470)
aacccgaaaaatcaacaacgacacaaacgaaaccaaaactactaaactaaaaaaccgaatcaccctcactaaataatccgcaacgaacccgcgccgccctatccccgtcactatccctctcgcgacgcgcgcgacgatacacgcgtaaatacaacaccatctaataataaatacgaaaaatcttaccgcactcgaaacactcgananaaacttaccctaanccgataataactacgaccctnacgattaaaacgcgcgaccgaacgaaaatcgaaataaccgacgaacgcgaaatccccaaacccgctcgcgcgcttccgcgaaaacccctacgcgactaatacatcctactcacgcttacgcttctcctaactcaccaaaacgtactcgcgcctatccttatcgaaaaccacgtccccgaccaacgcctcgtcccaaaccccgtacttaaaatactcgaccgactcganccaccttaccccgcgtaaccaactaccaaacctaataactattaaccgaatccaactcaaccacccgccgtccgacctacgtaccaaaacacgaatcgccgaccgccgacgacctcaaattcaaacactaaaaaaaaaactacttaatatccgaaaacccctccgccccctcctcgaccgaaacgcgcgtacgactaacctcgactctacgataaataacattataaacgttcaaactatccaaatttataaacaaattcccgcacttaacgcaaacctcgtaaaaactcaaaccgacgacgatc

SEQ ID NO: 9255 - DNA, 775 bp, Artificial Sequence
  chemically treated genomic DNA (Homo sapiens) CpG-island No: 9255
  unsure (205, 207, 221, 242, 470)
agttcggggagttagtagcggtataggcggagttagggttgttgggttgggaggtcgagttatttttattgagtgattcgtagcgggttcgcgtcgttttgttttcgttattgtttttttcgcggcgcgcgcggcgatgtacgcgtgagtgtagtattatttgatgataggtgcggaagattttgtcgtattcgaagtattcggnanggatttgttttggntcggtggtggttgcggttttngcggttggggcgcgcggtcgagcggggatcgaggtggtcggcgggcgcggggtttttaggttcgttcgcgcgttttcgcgggggtttttgcgcggttggtgtattttgtttacgtttgcgttttttttggtttattaggacgtattcgcgtttgtttttgtcgaaggttacgttttcggttagcgtttcgttttaggtttcgtatttgaggtattcggtcggttcggnttattttatttcgcgtggttagttgttaggtttggtagttgttgatcgggtttagtttagttattcgtcgttcggtttgcgtgttagggtacgagtcgtcggtcgtcgacggttttaggtttaggtattggaggaagaattgtttggtgttcgagggttttttcgtttttttttcggtcggggcgcgcgtgcggttggtttcgattttgcggtggatggtattgtgggcgtttaagttgtttaggtttgtaaataggttttcgtatttggcgtagatttcgtagaggtttaggtcggcgacgatt

SEQ ID NO: 9256 - DNA, 775 bp, Artificial Sequence
  chemically treated genomic DNA (Homo sapiens) CpG-island No: 9256
  unsure (306, 534, 555, 569, 571)
aatcgtcgccgacctaaacctctacgaaatctacgccaaatacgaaaacctatttacaaacctaaacaacttaaacgcccacaataccatccaccgcaaaatcgaaaccaaccgcacgcgcgccccgaccgaaaaaaaaacgaaaaaaccctcgaacaccaaacaattcttcctccaatacctaaacctaaaaccgtcgacgaccgacgactcgtaccctaacacgcaaaccgaacgacgaataactaaactaaacccgatcaacaactaccaaacctaacaactaaccacgcgaaataaaataanccgaaccgaccgaatacctcaaatacgaaacctaaaacgaaacgctaaccgaaaacgtaaccttcgacaaaaacaaacgcgaatacgtcctaataaaccaaaaaaaacgcaaacgtaaacaaaatacaccaaccgcgcaaaaacccccgcgaaaacgcgcgaacgaacctaaaaaccccgcgcccgccgaccacctcgatccccgctcgaccgcgcgccccaaccgcnaaaaccgcaaccaccaccganccaaaacaaatccntnccgaatacttcgaatacgacaaaatcttccgcacctatcatcaaataatactacactcacgcgtacatcgccgcgcgcgccgcgaaaaaaacaataacgaaaacaaaacgacgcgaacccgctacgaatcactcaataaaaataactcgacctcccaacccaacaaccctaactccgcctataccgctactaactccccgaact

SEQ ID NO: 9257 - DNA, 885 bp, Artificial Sequence
  chemically treated genomic DNA (Homo sapiens) CpG-island No: 9257
  unsure (30, 68, 114, 355, 483, 502, 697)
ggcggcgtcgttttagacgggcgacgtttntagtttcgcggatttggttcgggcgaggaatcgcggtncggtttttttttcgttttcgaatagcgttttttggggataatgggnttttttttttcgttttcgggaggagagatataaaggaagagaggagtcgtcgggcgcgaagttaggcgtcgggaaaagtgaaggtggaggagggagaaggaataagaggggattacggcgtacgtaggagttcgcgggttgttttttcggtcgtttcgggcgtcgttcgagttgtattacggcggtaaaggcgggagtacggattagcggttttttagattttcggtcgagaagggaaganggagtttgtatataaagacgagcgggatttttatttttcgttagcgtcggatcgaggacggcggagcgcgtttttatcgtcgagggttcgcggcgttcgtttaattcgcgttttttaggggtcggggnttcgtgcgggggcgttttnttttttcgatttatttatagtttcgtgttttagtttatggcgggaattttttggtcgtttggcggtgtcgttgttttttagtttgtcggttttatagtttgttcgattttttattcgttggtcggcgggttagtagtttagcgggtttatttcgaaaggtgtcgttatcgtcgggttttttagtgagtgagaaangacgcgattggagaagttttcgtcgtcgacgcgttttcgttttttcgcgttgggcgggagggggtcggggtcgaggggaggcggaacgcggcgcggggagggggcggggcgtagtgtattttgggatcggggaggatttgggttagtttggttatcgtcggcggggtttttaagcgggtatttggtta

SEQ ID NO: 9258 - DNA, 885 bp, Artificial Sequence
  chemically treated genomic DNA (Homo sapiens) CpG-island No: 9258
  unsure (189, 384, 403, 531, 772, 818, 856)
taaccaaatacccgcttaaaaaccccgccgacgataaccaaactaacccaaatcctccccgatcccaaaatacactacgccccgccccctccccgcgccgcgttccgcctcccctcgaccccgaccccctcccgcccaacgcgaaaaaacgaaaacgcgtcgacgacgaaaacttctccaatcgcgtcntttctcactcactaaaaaacccgacgataacgacacctttcgaaataaacccgctaaactactaacccgccgaccaacgaataaaaaatcgaacaaactataaaaccgacaaactaaaaaacaacgacaccgccaaacgaccaaaaaattcccgccataaactaaaacacgaaactataaataaatcgaaaaaanaaaacgcccccgcacgaanccccgacccctaaaaaacgcgaattaaacgaacgccgcgaaccctcgacgataaaaacgcgctccgccgtcctcgatccgacgctaacgaaaaataaaaatcccgctcgtctttatatacaaactccntcttcccttctcgaccgaaaatctaaaaaaccgctaatccgtactcccgcctttaccgccgtaatacaactcgaacgacgcccgaaacgaccgaaaaaacaacccgcgaactcctacgtacgccgtaatcccctcttattccttctccctcctccaccttcacttttcccgacgcctaacttcgcgcccgacgactcctctcttcctttatatctctcctcccgaaaacgaaaaaaaaaancccattatccccaaaaaacgctattcgaaaacgaaaaaaaaaccgnaccgcgattcctcgcccgaaccaaatccgcgaaactanaaacgtcgcccgtctaaaacgacgccgcc

SEQ ID NO: 9259 - DNA, 885 bp, Artificial Sequence
  chemically treated genomic DNA (Homo sapiens) CpG-island No: 9259
  unsure (189, 384, 403, 531, 772, 818, 856)
tgattaggtgttcgtttggggatttcgtcggcggtggttaggttagtttaggtttttttcgattttaggatgtattgcgtttcgtttttttttcgcgtcgcgtttcgttttttttcggtttcggttttttttcgtttagcgcggggaggcggggacgcgtcggcggcggaggtttttttagtcgcgttnttttttatttattggggagttcggcggtggcggtatttttcgaggtagattcgttgagttgttagttcgtcggttagcgagtgagaggtcggatagattgtggagtcgatagattgaaggatagcggtatcgttagacggttagaaagttttcgttatgagttggggtacggagttgtgggtgagtcggggaganggggcgttttcgtacggantttcggtttttgagaagcgcgggttgggcgggcgtcgcggattttcggcggtgaaagcgcgtttcgtcgttttcggttcggcgttggcggagggtgagggtttcgttcgtttttgtgtgtagattttntttttttttttcggtcgggggtttagggggtcgttagttcgtgttttcgtttttgtcgtcgtggtgtagttcgggcggcgttcgggacggtcgggggagtagttcgcgggtttttgcgtgcgtcgtgatttttttttgtttttttttttttttttatttttatttttttcgacgtttggtttcgcgttcggcggtttttttttttttttgtattttttttttcggaggcgggggagggggntttattgtttttaaggggcgttgttcgagggcggggaggggatcgngtcgcgatttttcgttcgggttaggttcgcggggttangggcgtcgttcgtttggggcggcgtcgtt

SEQ ID NO: 9260 - DNA, 885 bp, Artificial Sequence
  chemically treated genomic DNA (Homo sapiens) CpG-island No: 9260
  unsure (30, 68, 114, 355, 483, 502, 697)
aacgacgccgccccaaacgaacgacgcccntaaccccgcgaacctaacccgaacgaaaaatcgcgacncgatcccctccccgccctcgaacaacgccccttaaaaacaataaanccccctcccccgcctccgaaaaaaaaaatacaaaaaaaaaaaaaaaccgccgaacgcgaaaccaaacgtcgaaaaaaataaaaataaaaaaaaaaaaaaaaacaaaaaaaaatcacgacgcacgcaaaaacccgcgaactactcccccgaccgtcccgaacgccgcccgaactacaccacgacgacaaaaacgaaaacacgaactaacgaccccctaaacccccgaccgaaaaaaaaaaanaaaatctacacacaaaaacgaacgaaaccctcaccctccgccaacgccgaaccgaaaacgacgaaacgcgctttcaccgccgaaaatccgcgacgcccgcccaacccgcgcttctcaaaaaccgaaantccgtacgaaaacgccccntctccccgactcacccacaactccgtaccccaactcataacgaaaactttctaaccgtctaacgataccgctatccttcaatctatcgactccacaatctatccgacctctcactcgctaaccgacgaactaacaactcaacgaatctacctcgaaaaataccgccaccgccgaactccccaataaataaaaaanaacgcgactaaaaaaacctccgccgccgacgcgtccccgcctccccgcgctaaacgaaaaaaaaccgaaaccgaaaaaaaacgaaacgcgacgcgaaaaaaaaacgaaacgcaatacatcctaaaatcgaaaaaaacctaaactaacctaaccaccgccgacgaaatccccaaacgaacacctaatca

SEQ ID NO: 9261 - DNA, 673 bp, Artificial Sequence
  chemically treated genomic DNA (Homo sapiens) CpG-island No: 9261
  unsure (218, 268, 317, 335, 346, 461, 475, 508)
atggtttcgatttcgttagcgttagagtcgttttgtatgaggtaggatgtggtgggcgtatagtagggacgaggcggggggtacggggtagaaaggagagggcgacgggaagaaggtagagaaaatttaaaaggttcggaaggttgggagggaggtagggtataggttggaaatcgcggttatttgtagcgtcgttttcgggttgcggttaggttggncgttggtagttttggcggtcgagttcgtcgtttttttcggtgttttcggnttattcgggtacggttttggtcggtgcgtttagtttcgttcggtttttngcggtttcggcggcgggntgggttgcggncgttgtcgttagaggagggattcggtcgattcggggtgggttggggtagggtcgtgcgtaagtcggggtgcgattttcggcggggtatgtcgcggcggtggcgttttcgcgggangtcgggtcgggggncgggtcgcggtcgcggcgaggtttttagggcgntcgggtgggcgtaggattgttaaacgttgcggtttggttaagattgcggagtcgagaagagaaagggcgtaggagggagggatttaaaataaaattaaaaggaggggggaagtagagggaaacgtgagatgagggcggatgagggtaggaagttgatattttttg

SEQ ID NO: 9262 - DNA, 673 bp, Artificial Sequence
  chemically treated genomic DNA (Homo sapiens) CpG-island No: 9262
  unsure (166, 199, 213, 328, 339, 357, 406, 456)
caaaaaatatcaacttcctaccctcatccgccctcatctcacgtttccctctacttcccccctccttttaattttattttaaatccctccctcctacgccctttctcttctcgactccgcaatcttaaccaaaccgcaacgtttaacaatcctacgcccacccgancgccctaaaaacctcgccgcgaccgcgacccgncccccgacccgacntcccgcgaaaacgccaccgccgcgacataccccgccgaaaatcgcaccccgacttacgcacgaccctaccccaacccaccccgaatcgaccgaatccctcctctaacgacaacgnccgcaacccancccgccgccgaaaccgcnaaaaaccgaacgaaactaaacgcaccgaccaaaaccgtacccgaataanccgaaaacaccgaaaaaaacgacgaactcgaccgccaaaactaccaacgnccaacctaaccgcaacccgaaaacgacgctacaaataaccgcgatttccaacctataccctacctccctcccaaccttccgaaccttttaaattttctctaccttcttcccgtcgccctctcctttctaccccgtaccccccgcctcgtccctactatacgcccaccacatcctacctcatacaaaacgactctaacgctaacgaaatcgaaaccat

SEQ ID NO: 9263 - DNA, 673 bp, Artificial Sequence
  chemically treated genomic DNA (Homo sapiens) CpG-island No: 9263
  unsure (166, 199, 213, 328, 339, 357, 406, 456)
taggaaatgttagttttttgtttttattcgtttttattttacgtttttttttgttttttttttttttttagttttgttttaaattttttttttttgcgtttttttttttttcggtttcgtaattttagttaaatcgtagcgtttagtaattttgcgtttattcggncgttttgggagtttcgtcgcggtcgcgattcgnttttcggttcggtntttcgcgggggcgttatcgtcgcgatatatttcgtcgggggtcgtatttcgatttgcgtacggttttgttttagtttatttcggatcggtcgggttttttttttggcggtagcgntcgtagtttanttcgtcgtcggggtcgtnggggatcgggcggagttggacgtatcggttagggtcgtgttcgggtggntcgagggtatcgggaggggcggcgggttcggtcgttaggattgttagcgnttagtttgatcgtagttcgagggcgacgttgtaaatagtcgcggtttttagtttgtgttttgttttttttttagtttttcggattttttgggttttttttgtttttttttcgtcgtttttttttttttgtttcgtgtttttcgtttcgtttttgttgtgcgtttattatattttgttttatgtaggacggttttggcgttgacgaggtcgggattat

SEQ ID NO: 9264 - DNA, 673 bp, Artificial Sequence
  chemically treated genomic DNA (Homo sapiens) CpG-island No: 9264
  unsure (218, 268, 317, 335, 346, 461, 475, 508)
ataatcccgacctcgtcaacgccaaaaccgtcctacataaaacaaaatataataaacgcacaacaaaaacgaaacgaaaaacacgaaacaaaaaaaaaaaaacgacgaaaaaaaaacaaaaaaaacccaaaaaatccgaaaaactaaaaaaaaaacaaaacacaaactaaaaaccgcgactatttacaacgtcgccctcgaactacgatcaaactaancgctaacaatcctaacgaccgaacccgccgcccctcccgataccctcganccacccgaacacgaccctaaccgatacgtccaactccgcccgatccccnacgaccccgacgacgaantaaactacgancgctaccgccaaaaaaaaaacccgaccgatccgaaataaactaaaacaaaaccgtacgcaaatcgaaatacgacccccgacgaaatatatcgcgacgataacgcccccgcgaaanaccgaaccgaaaancgaatcgcgaccgcgacgaaactcccaaaacgnccgaataaacgcaaaattactaaacgctacgatttaactaaaattacgaaaccgaaaaaaaaaaaaacgcaaaaaaaaaaaatttaaaacaaaactaaaaaaaaaaaaaaaacaaaaaaaaacgtaaaataaaaacgaataaaaacaaaaaactaacatttccta

SEQ ID NO: 9265 - DNA, 587 bp, Artificial Sequence
  chemically treated genomic DNA (Homo sapiens) CpG-island No: 9265
  unsure (21, 391)
ttgtgtgcgttagtgtacgtnattgttttcgatgttgtcgttagaggaattttttaatttttattatttttattttcggtttttattttgtattcggcgatgaagacgtcggcgaaacgtttattttttatgtttaggtttgggaaggtttgaagatttcggcggagttgttttcgttcggggtcgggtaaattcgttgtagtcgggttggttttagggtttttcgtcggttcgttatgttttttcggggcgttttggtaggttagtcggcggtttgttagtttagtttttggtgcgggcgtttcgttttggtttatcgggttcggggttgggatatcgagggaaaattttagagtttcgggttatcgagtttggaagttacgcgtttttntagtttacgcgtttttaatttcggggtattttttgtttttttatttagcgaagtttagcgtcgcgtgtttttttagcggcgtagtttgtttttaagatatttttaaaatcgttttattttttgttaatcgttttttttttttttttttttttgttttttttttttttttttcgtttttttatttcgtgttttaaga

SEQ ID NO: 9266 - DNA, 587 bp, Artificial Sequence
  chemically treated genomic DNA (Homo sapiens) CpG-island No: 9266
  unsure (197, 567)
tcttaaaacacgaaataaaaaaacgaaaaaaaaaaaaaaaaaacaaaaaaaaaaaaaaaaaaaaaacgattaacaaaaaataaaacgattttaaaaatatcttaaaaacaaactacgccgctaaaaaaacacgcgacgctaaacttcgctaaataaaaaaacaaaaaataccccgaaattaaaaacgcgtaaactanaaaaacgcgtaacttccaaactcgataacccgaaactctaaaattttccctcgatatcccaaccccgaacccgataaaccaaaacgaaacgcccgcaccaaaaactaaactaacaaaccgccgactaacctaccaaaacgccccgaaaaaacataacgaaccgacgaaaaaccctaaaaccaacccgactacaacgaatttacccgaccccgaacgaaaacaactccgccgaaatcttcaaaccttcccaaacctaaacataaaaaataaacgtttcgccgacgtcttcatcgccgaatacaaaataaaaaccgaaaataaaaataataaaaattaaaaaattcctctaacgacaacatcgaaaacaatnacgtacactaacgcacacaa

SEQ ID NO: 9267 - DNA, 587 bp, Artificial Sequence
  chemically treated genomic DNA (Homo sapiens) CpG-island No: 9267
  unsure (197, 567)
ttttgggatacggggtggggggacggaggaagagagagagagatagagagagagagagagagaaaacggttaataaaaaatgaggcggttttgagggtgttttggaggtaggttgcgtcgttggggagatacgcgacgttgaatttcgttggatgagggagtaggaaatatttcgggattggggacgcgtgggttgnggggacgcgtaatttttaggttcggtggttcggagttttgaagttttttttcggtgttttagtttcggattcggtggattaaaacgaggcgttcgtattaggagttggattgatagatcgtcggttggtttgttagggcgtttcggggaaatatagcgagtcggcgagaggttttgaggttaattcggttgtaacgaatttgttcggtttcgaacgaaggtagtttcgtcgggatttttagatttttttagatttaggtatggaaagtaggcgtttcgtcgacgtttttatcgtcgggtgtagggtgaaagtcggaggtgggagtagtgggagttggaaggtttttttagcggtaatatcgaagataatngcgtgtattagcgtatataa

SEQ ID NO: 9268 - DNA, 587 bp, Artificial Sequence
  chemically treated genomic DNA (Homo sapiens) CpG-island No: 9268
  unsure (21, 391)
ttatatacgctaatacacgcnattatcttcgatattaccgctaaaaaaaccttccaactcccactactcccacctccgactttcaccctacacccgacgataaaaacgtcgacgaaacgcctactttccatacctaaatctaaaaaaatctaaaaatcccgacgaaactaccttcgttcgaaaccgaacaaattcgttacaaccgaattaacctcaaaacctctcgccgactcgctatatttccccgaaacgccctaacaaaccaaccgacgatctatcaatccaactcctaatacgaacgcctcgttttaatccaccgaatccgaaactaaaacaccgaaaaaaaacttcaaaactccgaaccaccgaacctaaaaattacgcgtccccncaacccacgcgtccccaatcccgaaatatttcctactccctcatccaacgaaattcaacgtcgcgtatctccccaacgacgcaacctacctccaaaacaccctcaaaaccgcctcattttttattaaccgttttctctctctctctctctctatctctctctctcttcctccgtccccccaccccgtatcccaaaa

SEQ ID NO: 9269 - DNA, 766 bp, Artificial Sequence
  chemically treated genomic DNA (Homo sapiens) CpG-island No: 9269
  unsure (146, 195, 320, 540)
cggttagtagtcgggcggcgaggagtttcgaggttgggaggcgagtcgggaaggcgtcgtgagcgaagtcgaggcggttttggcgtaggcggcggttggcgtcggggatagtgttgcggcggtcgggcgcggagttgggagcgttngcgttgtgggtcgcggttagttttggttttggggtcgcggttttttttntgggtcgcgggtagcggagcgcgcggtcgggaatttcgcggcgagtcggtgggcggaagcgaggggcgttcggcggggttttggagggtcgtaggagtcgtaggtcgaggttgaatcgttttttnttttcgttcggtgcgtttttcgtagtgtcggtgaaggaggagtcggaagtagaggtgcgtatggtgaatgggaagtttaagaaggttcgaaagtcgcgtacgatttattttagttattagttggtcgttttgtagcgtcgtttttagaaggtttagtatttggcgttgttcgagcgcgtcgagttggtcgcgtagttgggttttacgtagatataggttnggtgtttggttgtttagggtcgcgggggcgcgcgggatttcgtagtttttcgcgcgttgtcgagtttggttggttattgaagggttttgcgggtttttggaattttcgtcgttacgatgggggtttgcgaaggggaatttcggtgggaagaatttgcgttagtacgtgtataagtgagtatagtggtttattcgtgtaattgtgtatgtttttttattttagaatt

SEQ ID NO: 9270 - DNA, 766 bp, Artificial Sequence
  chemically treated genomic DNA (Homo sapiens) CpG-island No: 9270
  unsure (227, 447, 572, 621)
aattctaaaataaaaaaacatacacaattacacgaataaaccactatactcacttatacacgtactaacgcaaattcttcccaccgaaattccccttcgcaaacccccatcgtaacgacgaaaattccaaaaacccgcaaaacccttcaataaccaaccaaactcgacaacgcgcgaaaaactacgaaatcccgcgcgcccccgcgaccctaaacaaccaaacaccnaacctatatctacgtaaaacccaactacgcgaccaactcgacgcgctcgaacaacgccaaatactaaaccttctaaaaacgacgctacaaaacgaccaactaataactaaaataaatcgtacgcgactttcgaaccttcttaaacttcccattcaccatacgcacctctacttccgactcctccttcaccgacactacgaaaaacgcaccgaacgaaaanaaaaaacgattcaacctcgacctacgactcctacgaccctccaaaaccccgccgaacgcccctcgcttccgcccaccgactcgccgcgaaattcccgaccgcgcgctccgctacccgcgacccanaaaaaaaaccgcgaccccaaaaccaaaactaaccgcgacccacaacgcnaacgctcccaactccgcgcccgaccgccgcaacactatccccgacgccaaccgccgcctacgccaaaaccgcctcgacttcgctcacgacgccttcccgactcgcctcccaacctcgaaactcctcgccgcccgactactaaccg

SEQ ID NO: 9271 - DNA, 766 bp, Artificial Sequence
  chemically treated genomic DNA (Homo sapiens) CpG-island No: 9271
  unsure (227, 447, 572, 621)
aattttggagtaggggaatatatatagttgtacgggtggattattatgtttatttgtatacgtgttaacgtagattttttttatcgaggttttttttcgtaggtttttatcgtaacggcgagagttttaggagttcgtagggttttttagtggttagttaggttcggtagcgcgcggggaattacggggtttcgcgcgttttcgcggttttggatagttaaatattnaatttgtgtttgcgtgaggtttagttgcgcggttagttcggcgcgttcgggtagcgttaggtattgggttttttggaagcggcgttgtagggcggttagttggtagttggagtagatcgtacgcggttttcggatttttttgggttttttatttattatgcgtatttttgttttcggttttttttttatcgatattgcggggaacgtatcgggcggaagnagggggcggtttagtttcggtttgcgatttttgcgattttttagggtttcgtcggacgtttttcgttttcgtttatcgattcgtcgcgggattttcggtcgcgcgtttcgttgttcgcggtttanggggggagtcgcggttttagagttagaattggtcgcggtttataacgtnggcgtttttagtttcgcgttcggtcgtcgtagtattgttttcggcgttagtcgtcgtttgcgttaggatcgtttcggtttcgtttacgacgttttttcggttcgttttttagtttcggggtttttcgtcgttcggttgttagtcg

SEQ ID NO: 9272 - DNA, 766 bp, Artificial Sequence
  chemically treated genomic DNA (Homo sapiens) CpG-island No: 9272
  unsure (146, 195, 320, 540)
cgactaacaaccgaacgacgaaaaaccccgaaactaaaaaacgaaccgaaaaaacgtcgtaaacgaaaccgaaacgatcctaacgcaaacgacgactaacgccgaaaacaatactacgacgaccgaacgcgaaactaaaaacgccnacgttataaaccgcgaccaattctaactctaaaaccgcgactccccccntaaaccgcgaacaacgaaacgcgcgaccgaaaatcccgcgacgaatcgataaacgaaaacgaaaaacgtccgacgaaaccctaaaaaatcgcaaaaatcgcaaaccgaaactaaaccgccccctncttccgcccgatacgttccccgcaatatcgataaaaaaaaaaccgaaaacaaaaatacgcataataaataaaaaacccaaaaaaatccgaaaaccgcgtacgatctactccaactaccaactaaccgccctacaacgccgcttccaaaaaacccaatacctaacgctacccgaacgcgccgaactaaccgcgcaactaaacctcacgcaaacacaaattnaatatttaactatccaaaaccgcgaaaacgcgcgaaaccccgtaattccccgcgcgctaccgaacctaactaaccactaaaaaaccctacgaactcctaaaactctcgccgttacgataaaaacctacgaaaaaaaacctcgataaaaaaaatctacgttaacacgtatacaaataaacataataatccacccgtacaactatatatattcccctactccaaaatt

SEQ ID NO: 9273 - DNA, 1195 bp, Artificial Sequence
  chemically treated genomic DNA (Homo sapiens) CpG-island No: 9273
gtcgcggcggtagtaggtagttcgggagtttcggcggcggtcgagttagcggcggtttcgttttttgttttttgtaaattttgcgagtagttcgttcggggggtcgggggcgcgttcgggaggttcggttcggttcgcggtcgagtttttcgtcgtcgtagcgttagtcgtcgtagttattatcgtcgtagtttcgcgttttttcggggagtagtcggcggttttcgcggttttttagtttcggttttagggtattgttcggcgagtgtttcggtaagggtgggggttgtcgcggcgcggtcggtcgcgggttgtcggggggcggtcgtcgttatttagagaggcgcgtagaggcgtcgagagcgtttttcggcgggtttttcgcgtattcgtcgcgttcgggtagcggttcgatcgggcgagtatgggcggcgcggagtgacgtcgttgtgttcgtttggtattaaggatatttagttcgcgggggtggggacgaaggggggtagttcggcgtcgttatcgtagttttcgagagtcgtcgtcgttgttcgggtttcggggttgggtggaggaaaggggtgttcggaatcgatttttatttttcgatttttttgttggatattacgtttattttggacgtcgtaagagaagttgttaagtttcgtaggttttgattcggcgtttttcgcgtttttcggttgttttcggtttttttgtgtttcggtggagtatttgcgttcggggttggggttggaggaggtagttatacgcgcgtatacgtatacgtttagaggagggcgagaggtagcggtataggttttatttgtagtgttaatgcggcgttttcgttgaaggagggaaacgcggcgcgtttaggtaaggagtcggttcgtcggggagtggggtcgggcgggcggcgagggtagtaaggtcggatagatttgggttcgattcgggagtttttagtgtttcggagttagttcgcggtatacgtatacgtatatacgtaggtatatatatagatttatatcggtatatacggcgttcgcgtatttgtttacgttttatttggacgttcgcggaggtgtagcggtcggagtagggatttttcgggtgtgttttttttttacgtttttggatttagatttttttttttcgggattttcggggtgggattttgtgtattttcggtttt

SEQ ID NO: 9274 - DNA, 1195 bp, Artificial Sequence
  chemically treated genomic DNA (Homo sapiens) CpG-island No: 9274
aaaaccgaaaatacacaaaatcccaccccgaaaatcccgaaaaaaaaaaatctaaatccaaaaacgtaaaaaaaaaacacacccgaaaaatccctactccgaccgctacacctccgcgaacgtccaaataaaacgtaaacaaatacgcgaacgccgtatataccgatataaatctatatatatacctacgtatatacgtatacgtataccgcgaactaactccgaaacactaaaaactcccgaatcgaacccaaatctatccgaccttactaccctcgccgcccgcccgaccccactccccgacgaaccgactccttacctaaacgcgccgcgtttccctccttcaacgaaaacgccgcattaacactacaaataaaacctataccgctacctctcgccctcctctaaacgtatacgtatacgcgcgtataactacctcctccaaccccaaccccgaacgcaaatactccaccgaaacacaaaaaaaccgaaaacaaccgaaaaacgcgaaaaacgccgaatcaaaacctacgaaacttaacaacttctcttacgacgtccaaaataaacgtaatatccaacaaaaaaatcgaaaaataaaaatcgattccgaacacccctttcctccacccaaccccgaaacccgaacaacgacgacgactctcgaaaactacgataacgacgccgaactaccccccttcgtccccacccccgcgaactaaatatccttaataccaaacgaacacaacgacgtcactccgcgccgcccatactcgcccgatcgaaccgctacccgaacgcgacgaatacgcgaaaaacccgccgaaaaacgctctcgacgcctctacgcgcctctctaaataacgacgaccgccccccgacaacccgcgaccgaccgcgccgcgacaacccccacccttaccgaaacactcgccgaacaataccctaaaaccgaaactaaaaaaccgcgaaaaccgccgactactccccgaaaaaacgcgaaactacgacgataataactacgacgactaacgctacgacgacgaaaaactcgaccgcgaaccgaaccgaacctcccgaacgcgcccccgaccccccgaacgaactactcgcaaaatttacaaaaaacaaaaaacgaaaccgccgctaactcgaccgccgccgaaactcccgaactacctactaccgccgcgac

SEQ ID NO: 9275 - DNA, 1195 bp, Artificial Sequence
  chemically treated genomic DNA (Homo sapiens) CpG-island No: 9275
agagtcgggaatatatagaattttatttcgaaagtttcgggaaagagaagtttgagtttaggagcgtgagaggagaatatattcgggaaatttttgtttcggtcgttgtattttcgcgggcgtttaggtgggacgtgggtaggtgcgcgagcgtcgtgtgtgtcggtgtggatttgtgtgtgtgtttgcgtgtgtgcgtgtgcgtgtgtcgcgggttggtttcgggatattgaggattttcgggtcgggtttaggtttgttcgattttgttgttttcgtcgttcgttcggttttatttttcggcgggtcggttttttatttggacgcgtcgcgttttttttttttagcgggagcgtcgtattgatattgtagatggagtttatgtcgttgtttttcgtttttttttgaacgtgtgcgtgtgcgcgcgtgtggttgttttttttagttttagtttcgaacgtaaatattttatcgaggtatagggaagtcgggagtagtcgaggaacgcggagggcgtcgaattagagtttgcggggtttgatagttttttttgcggcgtttaaggtgggcgtaatgtttaataaaaaggtcggaaaatggggatcgatttcgaatattttttttttttatttagtttcggagttcgagtagcggcggcggttttcgggggttgcggtggcgacgtcgggttgttttttttcgtttttattttcgcgggttgaatgtttttgatgttaagcgggtatagcggcgttatttcgcgtcgtttatgttcgttcggtcgggtcgttgttcgggcgcggcgagtgcgcgggggattcgtcggggagcgttttcggcgtttttgcgcgtttttttgggtagcggcggtcgtttttcggtagttcgcggtcggtcgcgtcgcggtagtttttatttttgtcgagatattcgtcgggtagtgttttggggtcggggttggggggtcgcgggagtcgtcggttgtttttcggggaggcgcggggttgcggcggtggtggttgcggcggttggcgttgcggcggcggagagttcggtcgcgggtcgagtcgggtttttcgggcgcgttttcggtttttcgggcgggttgttcgtaaagtttgtagggggtagggagcggggtcgtcgttggttcggtcgtcgtcggagttttcgggttgtttgttgtcgtcgcggt

SEQ ID NO: 9276 - DNA, 1195 bp, Artificial Sequence
  chemically treated genomic DNA (Homo sapiens) CpG-island No: 9276
accgcgacgacaacaaacaacccgaaaactccgacgacgaccgaaccaacgacgaccccgctccctaccccctacaaactttacgaacaacccgcccgaaaaaccgaaaacgcgcccgaaaaacccgactcgacccgcgaccgaactctccgccgccgcaacgccaaccgccgcaaccaccaccgccgcaaccccgcgcctccccgaaaaacaaccgacgactcccgcgaccccccaaccccgaccccaaaacactacccgacgaatatctcgacaaaaataaaaactaccgcgacgcgaccgaccgcgaactaccgaaaaacgaccgccgctacccaaaaaaacgcgcaaaaacgccgaaaacgctccccgacgaatcccccgcgcactcgccgcgcccgaacaacgacccgaccgaacgaacataaacgacgcgaaataacgccgctatacccgcttaacatcaaaaacattcaacccgcgaaaataaaaacgaaaaaaaacaacccgacgtcgccaccgcaacccccgaaaaccgccgccgctactcgaactccgaaactaaataaaaaaaaaaaatattcgaaatcgatccccattttccgacctttttattaaacattacgcccaccttaaacgccgcaaaaaaaactatcaaaccccgcaaactctaattcgacgccctccgcgttcctcgactactcccgacttccctatacctcgataaaatatttacgttcgaaactaaaactaaaaaaaacaaccacacgcgcgcacacgcacacgttcaaaaaaaaacgaaaaacaacgacataaactccatctacaatatcaatacgacgctcccgctaaaaaaaaaaaacgcgacgcgtccaaataaaaaaccgacccgccgaaaaataaaaccgaacgaacgacgaaaacaacaaaatcgaacaaacctaaacccgacccgaaaatcctcaatatcccgaaaccaacccgcgacacacgcacacgcacacacgcaaacacacacacaaatccacaccgacacacacgacgctcgcgcacctacccacgtcccacctaaacgcccgcgaaaatacaacgaccgaaacaaaaatttcccgaatatattctcctctcacgctcctaaactcaaacttctctttcccgaaactttcgaaataaaattctatatattcccgactct

SEQ ID NO: 9277 - DNA, 657 bp, Artificial Sequence
  chemically treated genomic DNA (Homo sapiens) CpG-island No: 9277
  unsure (334, 451, 454, 460..461, 472, 493, 535)
cggttgatcgaggcgtcgggttttgcggcggtcgcgttcgtttaaagtaggcgataagtgaggtagcgtttttcgcggggagttcggcgcgcgtttcggcggcgaaagagaaagagaaagagtttgggtcgggatcggggttatttttaatcgttatcgtttttatcggttcggttttcgtcgcgggagtcgtgtaggtttttttatttgttcggggatggggttatttcgcgcggcggcggtcgtgggtatttacgcgggttcgcgattattttacgcgggcggcggcgttttttttatttttagcggagcggcgtttgttcgtaacgtcgantcgagttataggcggggggcgagtcggagcgcgaggtttcgttagtttaggttgcggcgtcgttgtttcgcggtgttcggcgggaggggcgcgagggtgtacgcgcggggtgggggncgncggganngtcgttttttngttcgtttcgcgcgtatgttnttcgtcgtatttgtttcgtttagtgttttatatttcggggangtcgggtggcgttgggttcgtcgaggtcggggtttttttatgggagggaggtggttgcggcggaatttttagatgcgtttttttttgtattcgttttttgggaaggatttttttaaattttg

SEQ ID NO: 9278 - DNA, 657 bp, Artificial Sequence
  chemically treated genomic DNA (Homo sapiens) CpG-island No: 9278
  unsure (123, 165, 186, 197..198, 204, 207, 324)
caaaatttaaaaaaatccttcccaaaaaacgaatacaaaaaaaaacgcatctaaaaattccgccgcaaccacctccctcccataaaaaaaccccgacctcgacgaacccaacgccacccgacntccccgaaatataaaacactaaacgaaacaaatacgacgaanaacatacgcgcgaaacgaacnaaaaaacgacnntcccgncgncccccaccccgcgcgtacaccctcgcgcccctcccgccgaacaccgcgaaacaacgacgccgcaacctaaactaacgaaacctcgcgctccgactcgccccccgcctataactcgantcgacgttacgaacaaacgccgctccgctaaaaataaaaaaaacgccgccgcccgcgtaaaataatcgcgaacccgcgtaaatacccacgaccgccgccgcgcgaaataaccccatccccgaacaaataaaaaaacctacacgactcccgcgacgaaaaccgaaccgataaaaacgataacgattaaaaataaccccgatcccgacccaaactctttctctttctctttcgccgccgaaacgcgcgccgaactccccgcgaaaaacgctacctcacttatcgcctactttaaacgaacgcgaccgccgcaaaacccgacgcctcgatcaaccg

SEQ ID NO: 9279 - DNA, 657 bp, Artificial Sequence
  chemically treated genomic DNA (Homo sapiens) CpG-island No: 9279
  unsure (123, 165, 186, 197..198, 204, 207, 324)
taagatttgggggaattttttttagggaacgaatatagagaaggacgtatttgaaaatttcgtcgtagttattttttttttatgggaaagtttcgatttcggcgggtttagcgttattcggtnttttcggggtgtggaatattgagcgaggtaggtgcggcgggnagtatgcgcgcggggcgggtnagggggcggtnntttcgncgntttttatttcgcgcgtgtattttcgcgtttttttcgtcgggtatcgcggggtagcggcgtcgtagtttgggttggcggaatttcgcgtttcgattcgtttttcgtttgtagttcggntcggcgttgcgggtaggcgtcgtttcgttgggggtaagaaggacgtcgtcgttcgcgtgggatggtcgcgagttcgcgtgggtgtttacggtcgtcgtcgcgcggggtggttttattttcgggtaggtagaggggtttgtacgattttcgcggcgagggtcgggtcggtgggggcggtggcggttggggatagtttcggtttcggtttaggttttttttttttttttttcgtcgtcggggcgcgcgtcgggtttttcgcgagaggcgttgttttatttgtcgtttattttggacgggcgcggtcgtcgtagagttcggcgtttcggttagtcg

SEQ ID NO: 9280 - DNA, 657 bp, Artificial Sequence
  chemically treated genomic DNA (Homo sapiens) CpG-island No: 9280
  unsure (334, 451, 454, 460..461, 472, 493, 535)
cgactaaccgaaacgccgaactctacgacgaccgcgcccgtccaaaataaacgacaaataaaacaacgcctctcgcgaaaaacccgacgcgcgccccgacgacgaaaaaaaaaaaaaaaaaacctaaaccgaaaccgaaactatccccaaccgccaccgcccccaccgacccgaccctcgccgcgaaaatcgtacaaacccctctacctacccgaaaataaaaccaccccgcgcgacgacgaccgtaaacacccacgcgaactcgcgaccatcccacgcgaacgacgacgtccttcttacccccaacgaaacgacgcctacccgcaacgccganccgaactacaaacgaaaaacgaatcgaaacgcgaaattccgccaacccaaactacgacgccgctaccccgcgatacccgacgaaaaaaacgcgaaaatacacgcgcgaaataaaaancgncgaaannaccgccccctnacccgccccgcgcgcatactncccgccgcacctacctcgctcaatattccacaccccgaaaanaccgaataacgctaaacccgccgaaatcgaaactttcccataaaaaaaaaataactacgacgaaattttcaaatacgtccttctctatattcgttccctaaaaaaaattcccccaaatctta

SEQ ID NO: 9281 - DNA, 720 bp, Artificial Sequence
  chemically treated genomic DNA (Homo sapiens) CpG-island No: 9281
  unsure (386, 470, 473, 545)
atttacggtcgtgatcgtgattttggtcggtcgttgtggttggggtcggttaagtcgaatatcggttatacgtaagcggcggcgggtgtggttggtgtgattaagatggtgatggcgatgcggtacgggtagttgttacgtacgttgtacgtggaatcgtcgtcgtcggaggtggattggtcggcggggacggtttaattttttacggagaatacgttttggtttaggagtggtcgtgttcgtcgggtgggggtgtcgtcgttcgggattagtggtattaacgcgtacgttattttcgaatagttttcgggagtgtcgagttagtttgcggagtcgggttcgggttttgtcgtggatgtttcggtggtgtcgtggatggtgtcggntaaaatattcgaagcgttattcgcgtaggtaacggcgttgatgatttatttggacgagcgatttgatgttttttcgttggatgntgngtattcgttggcgttgatacggtcgtcgttggatgagcgagcgggggtgttggggtcggattcgtgaaacgntgttggcggtgtgaaagttttttttgtcggtatgaggtttttgggtggtgtcggatttgggcgtttgcgttcgatcgtttgtgttttcgttatggcgttattgtttggattggtcgatttttatcgtttttcgcggtattgttttttttataattgatcgtttgattttattgtt

SEQ ID NO: 9282 - DNA, 720 bp, Artificial Sequence
  chemically treated genomic DNA (Homo sapiens) CpG-island No: 9282
  unsure (176, 248, 251, 335)
aacaataaaatcaaacgatcaattataaaaaaaacaataccgcgaaaaacgataaaaatcgaccaatccaaacaataacgccataacgaaaacacaaacgatcgaacgcaaacgcccaaatccgacaccacccaaaaacctcataccgacaaaaaaaactttcacaccgccaacancgtttcacgaatccgaccccaacacccccgctcgctcatccaacgacgaccgtatcaacgccaacgaatacncancatccaacgaaaaaacatcaaatcgctcgtccaaataaatcatcaacgccgttacctacgcgaataacgcttcgaatattttanccgacaccatccacgacaccaccgaaacatccacgacaaaacccgaacccgactccgcaaactaactcgacactcccgaaaactattcgaaaataacgtacgcgttaataccactaatcccgaacgacgacacccccacccgacgaacacgaccactcctaaaccaaaacgtattctccgtaaaaaattaaaccgtccccgccgaccaatccacctccgacgacgacgattccacgtacaacgtacgtaacaactacccgtaccgcatcgccatcaccatcttaatcacaccaaccacacccgccgccgcttacgtataaccgatattcgacttaaccgaccccaaccacaacgaccgaccaaaatcacgatcacgaccgtaaat

SEQ ID NO: 9283 - DNA, 720 bp, Artificial Sequence
  chemically treated genomic DNA (Homo sapiens) CpG-island No: 9283
  unsure (176, 248, 251, 335)
ggtagtggaattaggcggttagttgtgaaaagagtagtatcgcgaaaagcggtaaagatcggttaatttaagtagtggcgttatggcgaaaatataagcgatcgggcgtaggcgtttagattcggtattatttagaagttttatgtcggtagaaagggtttttatatcgttaatancgttttacgggttcgattttagtattttcgttcgtttatttagcggcgatcgtgttaacgttagcgagtatntantatttagcgaggagatattaggtcgttcgtttagataggttattaacgtcgttgtttgcgcggatagcgtttcgggtgttttgntcgatattatttacggtattatcggaatatttacgatagaattcgaattcggtttcgtagattgattcggtattttcgggggttgttcgaggatgacgtgcgcgttagtattattgatttcgaacgacgatatttttattcgacgaatacgattatttttgggttagggcgtgtttttcgtaaggagttgaatcgttttcgtcgattaatttattttcggcgacggcgattttacgtgtaacgtgcgtggtagttgttcgtgtcgtatcgttattattattttgattatattagttatattcgtcgtcgtttgcgtatgatcgatgttcgatttgatcgattttaattataacggtcggttaggattacgattacggtcgtaggt

SEQ ID NO: 9284 - DNA, 720 bp, Artificial Sequence
  chemically treated genomic DNA (Homo sapiens) CpG-island No: 9284
  unsure (386, 470, 473, 545)
acctacgaccgtaatcgtaatcctaaccgaccgttataattaaaatcgatcaaatcgaacatcgatcatacgcaaacgacgacgaatataactaatataatcaaaataataataacgatacgacacgaacaactaccacgcacgttacacgtaaaatcgccgtcgccgaaaataaattaatcgacgaaaacgattcaactccttacgaaaaacacgccctaacccaaaaataatcgtattcgtcgaataaaaatatcgtcgttcgaaatcaataatactaacgcgcacgtcatcctcgaacaacccccgaaaataccgaatcaatctacgaaaccgaattcgaattctatcgtaaatattccgataataccgtaaataatatcgancaaaacacccgaaacgctatccgcgcaaacaacgacgttaataacctatctaaacgaacgacctaatatctcctcgctaaatantanatactcgctaacgttaacacgatcgccgctaaataaacgaacgaaaatactaaaatcgaacccgtaaaacgntattaacgatataaaaaccctttctaccgacataaaacttctaaataataccgaatctaaacgcctacgcccgatcgcttatattttcgccataacgccactacttaaattaaccgatctttaccgcttttcgcgatactactcttttcacaactaaccgcctaattccactacc

SEQ ID NO: 9285 - DNA, 625 bp, Artificial Sequence
  chemically treated genomic DNA (Homo sapiens) CpG-island No: 9285
  unsure (523)
tttacggtcgtgatcgtgattttggtcggtcgttgtggttggggtcggttaagtcgaatatcggttatacgtaagcggcggcgggtgtggttggtgtgattaagatggtgatggcgatgcggtacgggtagttgttacgtacgttgtacgtggaatcgtcgtcgtcggaggtggattggtcggcggggacggtttaattttttacggagaatacgttttggtttaggagtggtcgtgttcgtcgggtgggggtgtcgtcgttcgggattagtggtattaacgcgtacgttattttcgaatagttttcgggagtgtcgagttagtttgcggcgtcgggttcgggttttgtcgtggatgtttcggtggtgtcgtggatggtgtcgggtaaaatattcgaagcgttattcgcgtaggtaacggcgttgatgatttatttggacgagcgatttgatgttttttcgttggaggtgggtattcgttggcgttgatacggtcggcgttggatgagcgagcgtggtgttgngtcgatacggatacgtgtgtgcggggaaagcgtgttgcggtatgagttttggtgtgacgtttggggttgtttttatttttggttgtatattagttaatagcg

SEQ ID NO: 9286 - DNA, 625 bp, Artificial Sequence
  chemically treated genomic DNA (Homo sapiens) CpG-island No: 9286
  unsure (103)
cgctattaactaatatacaaccaaaaataaaaacaaccccaaacgtcacaccaaaactcataccgcaacacgctttccccgcacacacgtatccgtatcgacncaacaccacgctcgctcatccaacgccgaccgtatcaacgccaacgaatacccacctccaacgaaaaaacatcaaatcgctcgtccaaataaatcatcaacgccgttacctacgcgaataacgcttcgaatattttacccgacaccatccacgacaccaccgaaacatccacgacaaaacccgaacccgacgccgcaaactaactcgacactcccgaaaactattcgaaaataacgtacgcgttaataccactaatcccgaacgacgacacccccacccgacgaacacgaccactcctaaaccaaaacgtattctccgtaaaaaattaaaccgtccccgccgaccaatccacctccgacgacgacgattccacgtacaacgtacgtaacaactacccgtaccgcatcgccatcaccatcttaatcacaccaaccacacccgccgccgcttacgtataaccgatattcgacttaaccgaccccaaccacaacgaccgaccaaaatcacgatcacgaccgtaaa

SEQ ID NO: 9287 - DNA, 625 bp, Artificial Sequence
  chemically treated genomic DNA (Homo sapiens) CpG-island No: 9287
  unsure (103)
cgttattaattaatgtgtaattaaaaataggagtagttttaaacgttatattaaagtttatgtcgtaatacgtttttttcgtatatacgtattcgtgtcgatntagtattacgttcgtttatttagcgtcgatcgtgttaacgttagcgagtatttatttttagcgaggagatattaggtcgttcgtttagataggttattaacgtcgttgtttgcgcggatagcgtttcgggtgttttgttcgatattatttacggtattatcggaatatttacgatagaattcgaattcggcgtcgtagattgattcggtattttcgggggttgttcgaggatgacgtgcgcgttagtattattgatttcgaacgacgatatttttattcgacgaatacgattatttttgggttagggcgtgtttttcgtaaggagttgaatcgttttcgtcgattaatttattttcggcgacggcgattttacgtgtaacgtgcgtggtagttgttcgtgtcgtatcgttattattattttgattatattagttatattcgtcgtcgtttgcgtatgatcgatgttcgatttgatcgattttaattataacggtcggttaggattacgattacggtcgtagg

SEQ ID NO: 9288 - DNA, 625 bp, Artificial Sequence
  chemically treated genomic DNA (Homo sapiens) CpG-island No: 9288
  unsure (523)
cctacgaccgtaatcgtaatcctaaccgaccgttataattaaaatcgatcaaatcgaacatcgatcatacgcaaacgacgacgaatataactaatataatcaaaataataataacgatacgacacgaacaactaccacgcacgttacacgtaaaatcgccgtcgccgaaaataaattaatcgacgaaaacgattcaactccttacgaaaaacacgccctaacccaaaaataatcgtattcgtcgaataaaaatatcgtcgttcgaaatcaataatactaacgcgcacgtcatcctcgaacaacccccgaaaataccgaatcaatctacgacgccgaattcgaattctatcgtaaatattccgataataccgtaaataatatcgaacaaaacacccgaaacgctatccgcgcaaacaacgacgttaataacctatctaaacgaacgacctaatatctcctcgctaaaaataaatactcgctaacgttaacacgatcgacgctaaataaacgaacgtaatactanatcgacacgaatacgtatatacgaaaaaaacgtattacgacataaactttaatataacgtttaaaactactcctatttttaattacacattaattaataacg

SEQ ID NO: 9289 - DNA, 557 bp, Artificial Sequence
  chemically treated genomic DNA (Homo sapiens) CpG-island No: 9289
ggaggtggattgttcggcggggacggtttaattttttacggagaatacgttttggtttaggagtggtcgtgttcgtcgggtgggggtgtcgtcgttcgggattagtggtattaacgcgtacgttattttcgaataggcggcgggagtgtcgagttagtttgtcgcgtttcggttcgggtttttgttcgcgaatgttttcgggggtgtttcggggattggtgttcgggtaataaataattcgaaagtcgtttaatttcgcgggagggtatatcgggacgtttgtatgaatttatagttttgggatcgaagtcggaaacgtggatcgtttttttttatcgttggtgatggagtggggttaatttcggtttggtcgtttggattacggtttttattcgtttgatattgaagtcgaagtcgggtgggtgtttcgggagttcgttattcggtgaataacgtttgtttgtggtaggtgtagaaaattttttggttggtcgtatatgaagtttttttggttgggcgatcggattcgagggggtttggagttagaatcgtttttt

SEQ ID NO: 9290 - DNA, 557 bp, Artificial Sequence
  chemically treated genomic DNA (Homo sapiens) CpG-island No: 9290
aaaaaacgattctaactccaaaccccctcgaatccgatcgcccaaccaaaaaaacttcatatacgaccaaccaaaaaattttctacacctaccacaaacaaacgttattcaccgaataacgaactcccgaaacacccacccgacttcgacttcaatatcaaacgaataaaaaccgtaatccaaacgaccaaaccgaaattaaccccactccatcaccaacgataaaaaaaaacgatccacgtttccgacttcgatcccaaaactataaattcatacaaacgtcccgatataccctcccgcgaaattaaacgactttcgaattatttattacccgaacaccaatccccgaaacacccccgaaaacattcgcgaacaaaaacccgaaccgaaacgcgacaaactaactcgacactcccgccgcctattcgaaaataacgtacgcgttaataccactaatcccgaacgacgacacccccacccgacgaacacgaccactcctaaaccaaaacgtattctccgtaaaaaattaaaccgtccccgccgaacaatccacctcc

SEQ ID NO: 9291 - DNA, 557 bp, Artificial Sequence
  chemically treated genomic DNA (Homo sapiens) CpG-island No: 9291
aaagggcgattttggttttaggttttttcggattcggtcgtttaattaagaaagttttatgtacggttagttaaggggttttttatatttgttataaataaacgttatttatcgggtgacggattttcgaggtatttattcggtttcggttttaatattaagcggatggaaatcgtggtttaaacggttaagtcgaagttagttttattttattattagcggtaggaaggagcgatttacgttttcggtttcggttttaggattatgggtttatgtaaacgtttcggtatgttttttcgcggaattaggcggttttcgggttgtttattgttcgaatattaattttcggggtattttcgggaatattcgcgaataagagttcgaatcggagcgcggtaggttgattcggtattttcgtcgtttgttcgaggatgacgtgcgcgttagtattattgatttcgaacgacgatatttttattcgacgaatacgattatttttgggttagggcgtgtttttcgtaaggagttgaatcgttttcgtcgagtaatttattttt

SEQ ID NO: 9292 - DNA, 557 bp, Artificial Sequence
  chemically treated genomic DNA (Homo sapiens) CpG-island No: 9292
aaaaataaattactcgacgaaaacgattcaactccttacgaaaaacacgccctaacccaaaaataatcgtattcgtcgaataaaaatatcgtcgttcgaaatcaataatactaacgcgcacgtcatcctcgaacaaacgacgaaaataccgaatcaacctaccgcgctccgattcgaactcttattcgcgaatattcccgaaaataccccgaaaattaatattcgaacaataaacaacccgaaaaccgcctaattccgcgaaaaaacataccgaaacgtttacataaacccataatcctaaaaccgaaaccgaaaacgtaaatcgctccttcctaccgctaataataaaataaaactaacttcgacttaaccgtttaaaccacgatttccatccgcttaatattaaaaccgaaaccgaataaatacctcgaaaatccgtcacccgataaataacgtttatttataacaaatataaaaaaccccttaactaaccgtacataaaactttcttaattaaacgaccgaatccgaaaaaacctaaaaccaaaatcgcccttt

SEQ ID NO: 9293 - DNA, 727 bp, Artificial Sequence
  chemically treated genomic DNA (Homo sapiens) CpG-island No: 9293
  unsure (104)
attacgtttattttttagcgcgtatatttttaatatcgtcgacgtttttattatttttaaaatgtatatttgttttaatgcgtttattttcgttattattatancgtgattttttcgattttatttttgatttttcgttagttattttttattcggtacgttgtacgttttttcgttatcgcgttttttttttttatttttatcgcgtttttttttgttttttttttttattgttttttatttttaattatattcgtttgttttttcgattattttttttttttatttttattttatcgtattttttttttcgttttatattttattttaagttttttttatcgtcgttatttttttatttcgtttcgttttatttgttattttattcgtttttatcgtttttgttttaattttttttttaatatttcgtattttttcgcgtcgattttatttgttttagattaattttttattttttcgcgttttatttttattttttttattttgattataattgtttttcgtatttcgatcgcgtattatacggatttgttattttatttttttcgttattgtttttttacgtatatttattttttttttcgatttttttttttatattattttttattttgatttttatttattttttcgatatttaataattcggtttttatttttaattttattatcgtttcgtcgtatcgttcgttttttgcgttcgttt

SEQ ID NO: 9294 - DNA, 727 bp, Artificial Sequence
  chemically treated genomic DNA (Homo sapiens) CpG-island No: 9294
  unsure (624)
aaacgaacgcaaaaaacgaacgatacgacgaaacgataataaaattaaaaataaaaaccgaattattaaatatcgaaaaaataaataaaaatcaaaataaaaaataatataaaaaaaaaaatcgaaaaaaaaaataaatatacgtaaaaaaacaataacgaaaaaaataaaataacaaatccgtataatacgcgatcgaaatacgaaaaacaattataatcaaaataaaaaaaataaaaataaaacgcgaaaaaataaaaaattaatctaaaacaaataaaatcgacgcgaaaaaatacgaaatattaaaaaaaaaattaaaacaaaaacgataaaaacgaataaaataacaaataaaacgaaacgaaataaaaaaataacgacgataaaaaaaacttaaaataaaatataaaacgaaaaaaaaaatacgataaaataaaaataaaaaaaaaaaataatcgaaaaaacaaacgaatataattaaaaataaaaaacaataaaaaaaaaaaacaaaaaaaaacgcgataaaaataaaaaaaaaaaacgcgataacgaaaaaacgtacaacgtaccgaataaaaaataactaacgaaaaatcaaaaataaaatcgaaaaaatcacgntataataataacgaaaataaacgcattaaaacaaatatacattttaaaaataataaaaacgtcgacgatattaaaaatatacgcgctaaaaaataaacgtaat

SEQ ID NO: 9295 - DNA, 727 bp, Artificial Sequence
  chemically treated genomic DNA (Homo sapiens) CpG-island No: 9295
  unsure (624)
gggcgggcgtaggaggcgggcggtacggcgaggcggtggtggagttagagatgggaatcggattgttggatatcgaggaggtgggtggagattagaatgagaggtgatatgagggggaaggtcgagggaaaggatgagtgtgcgtgggaagatagtgacgggaagagtaagatggtagattcgtgtgatgcgcgatcggagtgcgaggagtagttgtggttagggtgggagaggtgggagtgaggcgcgaggaagtgggagattagtttgggataggtggagtcggcgcgaggggatacgagatgttagaagggagattgaagtagagacgatgagaacggatggaataatagatggagcgaagcgggatgagggggtggcggcggtgggggaggtttagggtggggtgtggagcgaagaaagaggtacggtaggataggagtgggagagggaagtagtcgaaggagtaggcgggtatgattaggaatggagagtaatgagaagaaggagtagagagaagcgcgatgagaataggagggagagacgcggtgacgggaggacgtataacgtgtcgagtagggggtggttagcgagagattagaagtgggatcgaggaggttacgntgtgatgatagcgaggatgagcgtattaaggtagatgtgtattttgagggtggtgagaacgtcgacgatgttgggggtgtacgcgttgagaaatgggcgtggt

SEQ ID NO: 9296 - DNA, 727 bp, Artificial Sequence
  chemically treated genomic DNA (Homo sapiens) CpG-island No: 9296
  unsure (104)
accacgcccatttctcaacgcgtacacccccaacatcgtcgacgttctcaccaccctcaaaatacacatctaccttaatacgctcatcctcgctatcatcacancgtaacctcctcgatcccacttctaatctctcgctaaccaccccctactcgacacgttatacgtcctcccgtcaccgcgtctctccctcctattctcatcgcgcttctctctactccttcttctcattactctccattcctaatcatacccgcctactccttcgactacttccctctcccactcctatcctaccgtacctctttcttcgctccacaccccaccctaaacctcccccaccgccgccaccccctcatcccgcttcgctccatctattattccatccgttctcatcgtctctacttcaatctcccttctaacatctcgtatcccctcgcgccgactccacctatcccaaactaatctcccacttcctcgcgcctcactcccacctctcccaccctaaccacaactactcctcgcactccgatcgcgcatcacacgaatctaccatcttactcttcccgtcactatcttcccacgcacactcatcctttccctcgaccttccccctcatatcacctctcattctaatctccacccacctcctcgatatccaacaatccgattcccatctctaactccaccaccgcctcgccgtaccgcccgcctcctacgcccgccc

SEQ ID NO: 9297 - DNA, 788 bp, Artificial Sequence
  chemically treated genomic DNA (Homo sapiens) CpG-island No: 9297
  unsure (247)
cgtttacgtagtacggattgttttttttatattttttatatttttttttgtacgatttatttttatttttttttcgatttttcgtgtttttattcgacgttcgattttttttttttttttaatttttcgtttcgtttcgttttttttttatcggtattcgtatttattttattatttattttatatatttttttattttcgtcgtcgattattatttttaaatcgatttttcgtatcgtttcgtatntcgttattttattttcgcgtcgtcgattttcgtatttttttatttatttatttatttcgattattttacggcgtcgcgttttgcgttttttattttattttttttcgttttttttattttttttttatttatttttacggtattgattttatttcggattattttcgtttgtcgttatcgtatcgtttttttttttatcgtatttcgttttaatcgatcgattttttcgtatttttttttttatttttttttttttatttttttgttcgttcgtaatttttcgttttatttttttttttcgtcgttttatcgtttttatcgtttttttttttttttcgttttttttttttttttttagtattttattttttattcgtcgtttcgttttattttttgttcgtattcgtttttttttcgggttcggaggatcgtttcgtttttttttttttattttatttatttttattttttttattttatttcgtttttcgtttgttatttttatcgtttttacgtaatacgtttgtatttattcgttacg

SEQ ID NO: 9298 - DNA, 788 bp, Artificial Sequence
  chemically treated genomic DNA (Homo sapiens) CpG-island No: 9298
  unsure (542)
cgtaacgaataaatacaaacgtattacgtaaaaacgataaaaataacaaacgaaaaacgaaataaaataaaaaaaataaaaataaataaaataaaaaaaaaaaaacgaaacgatcctccgaacccgaaaaaaaaacgaatacgaacaaaaaataaaacgaaacgacgaataaaaaataaaatactaaaaaaaaaaaaaaaaaacgaaaaaaaaaaaaaaacgataaaaacgataaaacgacgaaaaaaaaaaataaaacgaaaaattacgaacgaacaaaaaaataaaaaaaaaaaaataaaaaaaaaaatacgaaaaaatcgatcgattaaaacgaaatacgataaaaaaaaaaacgatacgataacgacaaacgaaaataatccgaaataaaatcaataccgtaaaaataaataaaaaaaaaataaaaaaaacgaaaaaaaataaaataaaaaacgcaaaacgcgacgccgtaaaataatcgaaataaataaataaataaaaaaatacgaaaatcgacgacgcgaaaataaaataacganatacgaaacgatacgaaaaatcgatttaaaaataataatcgacgacgaaaataaaaaaatatataaaataaataataaaataaatacgaataccgataaaaaaaaaacgaaacgaaacgaaaaattaaaaaaaaaaaaaaaatcgaacgtcgaataaaaacacgaaaaatcgaaaaaaaaataaaaataaatcgtacaaaaaaaaatataaaaaatataaaaaaaacaatccgtactacgtaaacg

SEQ ID NO: 9299 - DNA, 788 bp, Artificial Sequence
  chemically treated genomic DNA (Homo sapiens) CpG-island No: 9299
  unsure (542)
cgtggcgagtgagtataagcgtattgcgtgagagcggtggggatagtaggcgaggagcgaggtgaggtgagaagggtagaagtgggtggggtggagggaagggaacggaacgatttttcgagttcgggaggaagacgggtgcggataggggatggggcggggcggcgggtgggaggtggggtgttggggagagggaggaggagcggggggagagggagggcgatggaggcggtgggacgacggggggagaaggtgggacggagggttgcgagcgggtaggggaatggggaggaaggggtagagggggaagtacgggagggtcggtcggttggggcggagtgcgatggagagggaggcggtgcggtggcggtaggcgggggtggttcggagtagagttaatatcgtgggaatagatagaggaagggtggggagggcgaaaagaggtaaggtgaggagcgtagagcgcggcgtcgtgggatgatcggagtagatgagtgggtggagggatgcggagatcgacgacgcggaagtggaatggcggnatgcgagacggtgcggaagatcggtttgaggatggtggtcggcgacgaaggtgggaaagtgtataaggtgggtggtgagataggtgcgaatgtcgataggaggggaacggagcggagcgaagggttggggggggggagggagtcgagcgtcgggtggaggtacggaggatcgggggggaggtaggggtgggtcgtgtagagaggagtgtggagggtgtgaggaaagtagttcgtgttgcgtaggcg

SEQ ID NO: 9300 - DNA, 788 bp, Artificial Sequence
  chemically treated genomic DNA (Homo sapiens) CpG-island No: 9300
  unsure (247)
cgcctacgcaacacgaactactttcctcacaccctccacactcctctctacacgacccacccctacctcccccccgatcctccgtacctccacccgacgctcgactccctccccccccccaacccttcgctccgctccgttcccctcctatcgacattcgcacctatctcaccacccaccttatacactttcccaccttcgtcgccgaccaccatcctcaaaccgatcttccgcaccgtctcgcatnccgccattccacttccgcgtcgtcgatctccgcatccctccacccactcatctactccgatcatcccacgacgccgcgctctacgctcctcaccttacctcttttcgccctccccacccttcctctatctattcccacgatattaactctactccgaaccacccccgcctaccgccaccgcaccgcctccctctccatcgcactccgccccaaccgaccgaccctcccgtacttccccctctaccccttcctccccattcccctacccgctcgcaaccctccgtcccaccttctccccccgtcgtcccaccgcctccatcgccctccctctccccccgctcctcctccctctccccaacaccccacctcccacccgccgccccgccccatcccctatccgcacccgtcttcctcccgaactcgaaaaatcgttccgttcccttccctccaccccacccacttctacccttctcacctcacctcgctcctcgcctactatccccaccgctctcacgcaatacgcttatactcactcgccacg

SEQ ID NO: 9301 - DNA, 528 bp, Artificial Sequence
  chemically treated genomic DNA (Homo sapiens) CpG-island No: 9301
  unsure (389)
tatcgattattttttttttttttaatagatttaattttttatttattacgtcggttatataaagcggaattttatatttttatttataattaattatgcgaatatcggttagtattttattttattttcgattttaatataatatttgtataaattttttttttattcgtttatttttttataattttttacggttttatttatttattttttaaattcgtttcgaagtattttcgtattttttttttatattaatcgtataagttagtcggttttataatcgatattcgtatatttttttaattacgtaattattttacgttttttatttacgcgattcgatatttttaattatatatatttattttttttttatttttatttcgttntttttttttttaattttattattttattcgatatcgatatcgttttttcgaaacgtttatatttattatataacgtaaattcgtaatttattatcgtaaatcgcgttagtatttgtatacgcgatacgttattgcgttt

SEQ ID NO: 9302 - DNA, 528 bp, Artificial Sequence
  chemically treated genomic DNA (Homo sapiens) CpG-island No: 9302
  unsure (140)
aaacgcaataacgtatcgcgtatacaaatactaacgcgatttacgataataaattacgaatttacgttatataataaatataaacgtttcgaaaaaacgatatcgatatcgaataaaataataaaattaaaaaaaaaaanaacgaaataaaaataaaaaaaaaataaatatatataattaaaaatatcgaatcgcgtaaataaaaaacgtaaaataattacgtaattaaaaaaatatacgaatatcgattataaaaccgactaacttatacgattaatataaaaaaaaaatacgaaaatacttcgaaacgaatttaaaaaataaataaataaaaccgtaaaaaattataaaaaaataaacgaataaaaaaaaaatttatacaaatattatattaaaatcgaaaataaaataaaatactaaccgatattcgcataattaattataaataaaaatataaaattccgctttatataaccgacgtaataaataaaaaattaaatctattaaaaaaaaaaaaaataatcgata

SEQ ID NO: 9303 - DNA, 528 bp, Artificial Sequence
  chemically treated genomic DNA (Homo sapiens) CpG-island No: 9303
  unsure (140)
gggcgtagtggcgtgtcgcgtgtgtaggtgttggcgcggtttgcggtggtgggttgcggatttgcgttgtgtgatgggtgtgagcgtttcgagagggcggtgtcggtgtcgagtggggtgatggagttggaggaaggaanggcggggtggaaatggaggggaggtgggtgtgtgtggttgagggtgtcgagtcgcgtgggtgggagacgtggagtagttgcgtagttaagagggtgtgcgagtgtcggttgtggggtcgattggtttgtgcggttggtgtggagaaggggtgcggaggtgtttcggagcggatttggggggtgagtgagtggggtcgtagaaagttgtggaggggtaggcgggtggggaaggggtttgtgtaggtgttgtgttggagtcgagaatagggtgaggtgttggtcggtgttcgtatggttggttatgggtgggggtataaggtttcgttttgtgtggtcggcgtggtgggtagagggttgggtttgttggaagggggagaggtggtcggta

SEQ ID NO: 9304 - DNA, 528 bp, Artificial Sequence
  chemically treated genomic DNA (Homo sapiens) CpG-island No: 9304
  unsure (389)
taccgaccacctctcccccttccaacaaacccaaccctctacccaccacgccgaccacacaaaacgaaaccttatacccccacccataaccaaccatacgaacaccgaccaacacctcaccctattctcgactccaacacaacacctacacaaaccccttccccacccgcctacccctccacaactttctacgaccccactcactcaccccccaaatccgctccgaaacacctccgcaccccttctccacaccaaccgcacaaaccaatcgaccccacaaccgacactcgcacaccctcttaactacgcaactactccacgtctcccacccacgcgactcgacaccctcaaccacacacacccacctcccctccatttccaccccgccnttccttcctccaactccatcaccccactcgacaccgacaccgccctctcgaaacgctcacacccatcacacaacgcaaatccgcaacccaccaccgcaaaccgcgccaacacctacacacgcgacacgccactacgccc

SEQ ID NO: 9305 - DNA, 711 bp, Artificial Sequence
  chemically treated genomic DNA (Homo sapiens) CpG-island No: 9305
gagcgtagcggttttcgcggttgttttaggtgatcgtggggattcgagacgattagttcgaagcggtttttcggcgtttttgtggttatttattcgcgttttagttatcgtttcgtttcgttttttgcgtttagttttttcgttttgtttgattggtattcgagtttcgcgattttcgggtttttttcgttcgtagtttcggtcggtttttttgtttagcgtttttgttagttttttgttcgttcgttgtttttagttttggcgtttcggtttttcgtttttttcgttcggttagttttttttttgttgtttgttttgttaaaatattgtttaggttacgtgttttaataatagttaatttatttcggtcgttatttttttttcggcggttttcgcggttttggcgttcggttattatggtaatgtcgtcgttcgtttcggggcgttagtttggggtcgggttttcggtgtaggtgttcggcgggtgcgagggcgttggagatggcggttgggagatattagtagagtttcggaagttcgagacgttttaggtatttcggttgcgtttttagtcggtagaggcgcgtttggattttgagattaggaatcggagttgcgttattagagcgtagggtaattggggagatgttatttaaaggtttgttttagacgtggaggataattatagtcgtcgttttttttttttttttt

SEQ ID NO: 9306 - DNA, 711 bp, Artificial Sequence
  chemically treated genomic DNA (Homo sapiens) CpG-island No: 9306
aaaaaaaaaaaaaaaaacgacgactataattatcctccacgtctaaaacaaacctttaaataacatctccccaattaccctacgctctaataacgcaactccgattcctaatctcaaaatccaaacgcgcctctaccgactaaaaacgcaaccgaaatacctaaaacgtctcgaacttccgaaactctactaatatctcccaaccgccatctccaacgccctcgcacccgccgaacacctacaccgaaaacccgaccccaaactaacgccccgaaacgaacgacgacattaccataataaccgaacgccaaaaccgcgaaaaccgccgaaaaaaaaataacgaccgaaataaattaactattattaaaacacgtaacctaaacaatattttaacaaaacaaacaacaaaaaaaaaactaaccgaacgaaaaaaacgaaaaaccgaaacgccaaaactaaaaacaacgaacgaacaaaaaactaacaaaaacgctaaacaaaaaaaccgaccgaaactacgaacgaaaaaaacccgaaaatcgcgaaactcgaataccaatcaaacaaaacgaaaaaactaaacgcaaaaaacgaaacgaaacgataactaaaacgcgaataaataaccacaaaaacgccgaaaaaccgcttcgaactaatcgtctcgaatccccacgatcacctaaaacaaccgcgaaaaccgctacgctc

SEQ ID NO: 9307 - DNA, 711 bp, Artificial Sequence
  chemically treated genomic DNA (Homo sapiens) CpG-island No: 9307
ggaggaggaggaggagacgacgattataattattttttacgtttggggtaggtttttggatgatatttttttagttattttgcgttttaatagcgtagtttcgatttttggttttagaatttaggcgcgtttttgtcggttgggagcgtaatcgaagtgtttgggacgtttcgggttttcgggattttgttggtgttttttagtcgttatttttagcgttttcgtattcgtcgggtatttgtatcgaaaattcggttttaaattagcgtttcggggcgagcggcggtattgttatagtaatcgggcgttagggtcgcggaggtcgtcggggaggaagtgacgatcggggtgggttggttgttgttgggatacgtgatttaggtagtgttttgatagggtaaatagtagagaaagaattggtcgagcgagggggacggggagtcggggcgttagagttagagatagcgggcgggtaaggagttggtagaggcgttgggtaagagggtcggtcggggttacgggcggggaaagttcgggggtcgcggggttcgggtgttagttaggtagggcggaggggttgagcgtagggagcggagcgaggcggtggttgaggcgcgggtggatggttataggggcgtcggggagtcgtttcgggttggtcgtttcgggtttttacggttatttgaggtagtcgcgggggtcgttgcgttt

SEQ ID NO: 9308 - DNA, 711 bp, Artificial Sequence
  chemically treated genomic DNA (Homo sapiens) CpG-island No: 9308
aaacgcaacgacccccgcgactacctcaaataaccgtaaaaacccgaaacgaccaacccgaaacgactccccgacgcccctataaccatccacccgcgcctcaaccaccgcctcgctccgctccctacgctcaacccctccgccctacctaactaacacccgaaccccgcgacccccgaactttccccgcccgtaaccccgaccgaccctcttacccaacgcctctaccaactccttacccgcccgctatctctaactctaacgccccgactccccgtccccctcgctcgaccaattctttctctactatttaccctatcaaaacactacctaaatcacgtatcccaacaacaaccaacccaccccgatcgtcacttcctccccgacgacctccgcgaccctaacgcccgattactataacaataccgccgctcgccccgaaacgctaatttaaaaccgaattttcgatacaaatacccgacgaatacgaaaacgctaaaaataacgactaaaaaacaccaacaaaatcccgaaaacccgaaacgtcccaaacacttcgattacgctcccaaccgacaaaaacgcgcctaaattctaaaaccaaaaatcgaaactacgctattaaaacgcaaaataactaaaaaaatatcatccaaaaacctaccccaaacgtaaaaaataattataatcgtcgtctcctcctcctcctcc

SEQ ID NO: 9309 - DNA, 660 bp, Artificial Sequence
  chemically treated genomic DNA (Homo sapiens) CpG-island No: 9309
cgatttacggaggtgttataaaaggtacgattcggagtaaacgcggggtacgttggaatttttaattcgtcggcgtattagttagcgacggcgggaagttaaaggtggggcgtaggagtttcggttttatgcgtttcggtttcgtatttcgggcgcggtttttcgtttggcgggagtaggtcgttcgttagattcggttttgggtagggtttagggtttacgtttcgcgcgtttattttttgttttttcgcggaggttgtttcggggattttcgtagatatagtgttttttttgtagacgagacgtcgggaaaagatgtaattagcgggtggtcgaggttattcggtcgtcgttcgttttagtttttttagggttcgtcgggtcgttttcgttcgcgaaaatggtcgtcgttttatgacgatacggagtcgcgaaacgtttcgttggttaaggttttcgtacgtcggagttcgtttgtttttttcgtatcgtatttttatttatttgatttcgtttttttcgttcgttgtcgtttaaatattttttttttttttttaaaggtcgtcgtttttgttttattttatattcgtttgtggttgtcgagtgttttttgggaattgtagtttttaagtggaatcgttttttttcgtttttttttgt

SEQ ID NO: 9310 - DNA, 660 bp, Artificial Sequence
  chemically treated genomic DNA (Homo sapiens) CpG-island No: 9310
acaaaaaaaaacgaaaaaaaacgattccacttaaaaactacaattcccaaaaaacactcgacaaccacaaacgaatataaaataaaacaaaaacgacgacctttaaaaaaaaaaaaaaaatatttaaacgacaacgaacgaaaaaaacgaaatcaaataaataaaaatacgatacgaaaaaaacaaacgaactccgacgtacgaaaaccttaaccaacgaaacgtttcgcgactccgtatcgtcataaaacgacgaccattttcgcgaacgaaaacgacccgacgaaccctaaaaaaactaaaacgaacgacgaccgaataacctcgaccacccgctaattacatcttttcccgacgtctcgtctacaaaaaaaacactatatctacgaaaatccccgaaacaacctccgcgaaaaaacaaaaaataaacgcgcgaaacgtaaaccctaaaccctacccaaaaccgaatctaacgaacgacctactcccgccaaacgaaaaaccgcgcccgaaatacgaaaccgaaacgcataaaaccgaaactcctacgccccacctttaacttcccgccgtcgctaactaatacgccgacgaattaaaaattccaacgtaccccgcgtttactccgaatcgtaccttttataacacctccgtaaatcg

SEQ ID NO: 9311 - DNA, 660 bp, Artificial Sequence
  chemically treated genomic DNA (Homo sapiens) CpG-island No: 9311
ataggaaagggcggggaggggcggttttatttagaaattataatttttaggaagtattcggtagttataaacggatgtgaggtgaggtaggagcggcgatttttgaaggaaaaaaggaagtgtttggacgatagcgagcgggagaagcggggttaagtaggtaggggtgcggtgcgggaggggtaggcgggtttcggcgtgcgagggttttggttagcggagcgtttcgcggtttcgtgtcgttataaggcggcggttattttcgcgggcggaggcggttcggcgggttttgggagagttgggacgggcggcggtcgggtggtttcggttattcgttaattgtattttttttcggcgtttcgtttgtagagggagtattatgtttgcggaagttttcgaggtagttttcgcggaggagtagaaggtgagcgcgcggggcgtgagttttgggttttgtttaaggtcgggtttggcgggcggtttgttttcgttaggcggagggtcgcgttcgagatgcggggtcgaggcgtatgaggtcgaggtttttgcgttttatttttggtttttcgtcgtcgttggttggtgcgtcgacgaattgggagttttaacgtgtttcgcgtttatttcgaatcgtgttttttgtaatattttcgtgggtcg

SEQ ID NO: 9312 - DNA, 660 bp, Artificial Sequence
  chemically treated genomic DNA (Homo sapiens) CpG-island No: 9312
cgacccacgaaaatattacaaaaaacacgattcgaaataaacgcgaaacacgttaaaactcccaattcgtcgacgcaccaaccaacgacgacgaaaaaccaaaaataaaacgcaaaaacctcgacctcatacgcctcgaccccgcatctcgaacgcgaccctccgcctaacgaaaacaaaccgcccgccaaacccgaccttaaacaaaacccaaaactcacgccccgcgcgctcaccttctactcctccgcgaaaactacctcgaaaacttccgcaaacataatactccctctacaaacgaaacgccgaaaaaaaatacaattaacgaataaccgaaaccacccgaccgccgcccgtcccaactctcccaaaacccgccgaaccgcctccgcccgcgaaaataaccgccgccttataacgacacgaaaccgcgaaacgctccgctaaccaaaaccctcgcacgccgaaacccgcctacccctcccgcaccgcacccctacctacttaaccccgcttctcccgctcgctatcgtccaaacacttccttttttccttcaaaaatcgccgctcctacctcacctcacatccgtttataactaccgaatacttcctaaaaattataatttctaaataaaaccgcccctccccgccctttcctat

SEQ ID NO: 9313 - DNA, 952 bp, Artificial Sequence
  chemically treated genomic DNA (Homo sapiens) CpG-island No: 9313
gtttcgtttggtagtagtttcgtcgtttagaggcgttcgagatttttcgattcgtgggtacgtataggtttcgttagcgagttttgtttaggtaacgagtcgttagttcgttttttcgtcgcgggttaggttttatttcgttattagtacgttttggataagtagtgttaggtttgatgtcgggtgtggtgagtgtcgtcgggatttaggtgcgtcgtttcgatgaggtttcggcgtcgtttcggttgtagtattatttttagtttcgcgaaggttttgcggtgtcgttgtcgtcgttggtaatatagagtttcgtcgcgtattacgtagtaggcggtagtttttcggattttacgtttgatattgttttcggtgttcggcgtatacggttcgcgttcgttcgttaggtaacgtaggatggttcggtagtttttttcgtttgatatcgcggatcgcggttttttgagggcgtttgttagggataggtgaggaaaacggttcgttatttacgggcggttgtaggaggagcggcggtatcgtagggagaaacggttgcgtttttggcgagcgtttttcgacggtttttttagttcgaaggaaaagcgggcgagttggtaattagggggaattgtatttttttagcgcgcgggattcgttggcgattgataaaatggttgttgtattatcggaagtgacgtaaggtaagggcggggattgagttttgattggagcgtattttcgttttttggtttgatggagtcgatttagtgacgttaggaatgcgggtggatattttggaagcgggtaggattttttattgtagttcgagggatttttaagtagatttttggggcgtttcggtcggttcgtttgggggggttttttttttttttttaagggtcgtgttttgttcggggtttgtggtggttcgttttgttttttttttttttgg

SEQ ID NO: 9314 - DNA, 952 bp, Artificial Sequence
  chemically treated genomic DNA (Homo sapiens) CpG-island No: 9314
ccaaaaaaaaaaaaaacaaaacgaaccaccacaaaccccgaacaaaacacgacccttaaaaaaaaaaaaaaaacccccccaaacgaaccgaccgaaacgccccaaaaatctacttaaaaatccctcgaactacaataaaaaatcctacccgcttccaaaatatccacccgcattcctaacgtcactaaatcgactccatcaaaccaaaaaacgaaaatacgctccaatcaaaactcaatccccgcccttaccttacgtcacttccgataatacaacaaccattttatcaatcgccaacgaatcccgcgcgctaaaaaaatacaattccccctaattaccaactcgcccgcttttccttcgaactaaaaaaaccgtcgaaaaacgctcgccaaaaacgcaaccgtttctccctacgataccgccgctcctcctacaaccgcccgtaaataacgaaccgttttcctcacctatccctaacaaacgccctcaaaaaaccgcgatccgcgatatcaaacgaaaaaaactaccgaaccatcctacgttacctaacgaacgaacgcgaaccgtatacgccgaacaccgaaaacaatatcaaacgtaaaatccgaaaaactaccgcctactacgtaatacgcgacgaaactctatattaccaacgacgacaacgacaccgcaaaaccttcgcgaaactaaaaataatactacaaccgaaacgacgccgaaacctcatcgaaacgacgcacctaaatcccgacgacactcaccacacccgacatcaaacctaacactacttatccaaaacgtactaataacgaaataaaacctaacccgcgacgaaaaaacgaactaacgactcgttacctaaacaaaactcgctaacgaaacctatacgtacccacgaatcgaaaaatctcgaacgcctctaaacgacgaaactactaccaaacgaaac

SEQ ID NO: 9315 - DNA, 952 bp, Artificial Sequence
  chemically treated genomic DNA (Homo sapiens) CpG-island No: 9315
ttaaaagagggggaaatagggcgggttattataaatttcgggtaaaatacgatttttaaaaaaaagaagggagtttttttagacgggtcggtcgggacgttttaagagtttgtttaaagatttttcgaattgtagtgaagggttttattcgtttttaaaatgtttattcgtatttttgacgttattggatcggttttattaagttagaaaacgagagtgcgttttaattagggtttagttttcgtttttgttttgcgttattttcggtggtgtagtagttattttgttagtcgttagcggatttcgcgcgttggagaagtgtagttttttttggttattaattcgttcgtttttttttcggattaagggagtcgtcgaagagcgttcgttaaaggcgtagtcgtttttttttacggtgtcgtcgttttttttgtagtcgttcgtaggtagcgggtcgttttttttatttgtttttgataggcgtttttagggagtcgcggttcgcgatgttaagcgaggaaagttatcgggttattttgcgttatttgacgaacgagcgcgagtcgtatgcgtcgggtatcgagggtaatgttaagcgtaaaattcgaaaagttgtcgtttgttacgtggtgcgcggcgggattttgtattattagcggcggtagcggtatcgtaagattttcgcggagttggaggtggtgttgtagtcggagcgacgtcgggattttatcgaggcggcgtatttgggtttcggcggtatttattatattcggtattagatttggtattatttgtttaagacgtattggtggcgaggtgagatttagttcgcggcgagggggcgggttggcgattcgttgtttgggtaaggttcgttggcgaggtttatgcgtatttacgagtcggagggtttcggacgtttttgggcggcggagttgttgttaggcggagt

SEQ ID NO: 9316 - DNA, 952 bp, Artificial Sequence
  chemically treated genomic DNA (Homo sapiens) CpG-island No: 9316
actccgcctaacaacaactccgccgcccaaaaacgtccgaaaccctccgactcgtaaatacgcataaacctcgccaacgaaccttacccaaacaacgaatcgccaacccgccccctcgccgcgaactaaatctcacctcgccaccaatacgtcttaaacaaataataccaaatctaataccgaatataataaataccgccgaaacccaaatacgccgcctcgataaaatcccgacgtcgctccgactacaacaccacctccaactccgcgaaaatcttacgataccgctaccgccgctaataatacaaaatcccgccgcgcaccacgtaacaaacgacaacttttcgaattttacgcttaacattaccctcgatacccgacgcatacgactcgcgctcgttcgtcaaataacgcaaaataacccgataactttcctcgcttaacatcgcgaaccgcgactccctaaaaacgcctatcaaaaacaaataaaaaaaacgacccgctacctacgaacgactacaaaaaaaacgacgacaccgtaaaaaaaaacgactacgcctttaacgaacgctcttcgacgactcccttaatccgaaaaaaaaacgaacgaattaataaccaaaaaaaactacacttctccaacgcgcgaaatccgctaacgactaacaaaataactactacaccaccgaaaataacgcaaaacaaaaacgaaaactaaaccctaattaaaacgcactctcgttttctaacttaataaaaccgatccaataacgtcaaaaatacgaataaacattttaaaaacgaataaaacccttcactacaattcgaaaaatctttaaacaaactcttaaaacgtcccgaccgacccgtctaaaaaaactcccttcttttttttaaaaatcgtattttacccgaaatttataataacccgccctatttccccctcttttaa

SEQ ID NO: 9317 - DNA, 527 bp, Artificial Sequence
  chemically treated genomic DNA (Homo sapiens) CpG-island No: 9317
aataattcggtattcgcggtcgttttagcgttgggcgggggaagttcggggatttcgcgtacgcgtatatttttgtttcggtagtcgcgtaagcgtaatcgttcggaatatggttgtcgtcggtcgttaatcgtaagtgtcgacgtatttttgagttttgcgttgttttcgttttttgcggagggaagttttggcgggtggaggttcgtcgggtttttgtggggcggcgaggggcgcgttcgcgggtgggttttatttgggtggtgggtatgtcgggttcgttagggcgagggtttggttaggggcgtagtttttttggtgggtggggacgtttcgtggcgattggggttatttttttgaggacgaggtcgtttcggggttggtttggacgttttcgttttttttttagcgttattcgtgagtttcgcgttcgtatttttagttcgtttttttatagagattgttttgttacgtttgttgggtgttttggttcgttttcgggggtaattttcgagtttgtagttttt

SEQ ID NO: 9318 - DNA, 527 bp, Artificial Sequence
  chemically treated genomic DNA (Homo sapiens) CpG-island No: 9318
aaaaactacaaactcgaaaattacccccgaaaacgaaccaaaacacccaacaaacgtaacaaaacaatctctataaaaaaacgaactaaaaatacgaacgcgaaactcacgaataacgctaaaaaaaaaacgaaaacgtccaaaccaaccccgaaacgacctcgtcctcaaaaaaataaccccaatcgccacgaaacgtccccacccaccaaaaaaactacgcccctaaccaaaccctcgccctaacgaacccgacatacccaccacccaaataaaacccacccgcgaacgcgcccctcgccgccccacaaaaacccgacgaacctccacccgccaaaacttccctccgcaaaaaacgaaaacaacgcaaaactcaaaaatacgtcgacacttacgattaacgaccgacgacaaccatattccgaacgattacgcttacgcgactaccgaaacaaaaatatacgcgtacgcgaaatccccgaacttcccccgcccaacgctaaaacgaccgcgaataccgaattatt

SEQ ID NO: 9319 - DNA, 527 bp, Artificial Sequence
  chemically treated genomic DNA (Homo sapiens) CpG-island No: 9319
aaaagttgtagattcgggggttattttcggagacggattaggatatttagtaggcgtggtaaaatagtttttatgggagggcgggttagagatgcgagcgcggaatttacgggtgacgttaaggaaagagcgggggcgtttagattagtttcggagcgatttcgtttttagaggagtgattttaatcgttacggagcgtttttatttattaggagaattacgtttttggttagattttcgttttagcgggttcgatatgtttattatttaggtgaaatttattcgcggacgcgtttttcgtcgttttataaggattcggcggatttttattcgttaagattttttttcgtaggaaacggaggtagcgtagggtttagggatgcgtcggtatttacggttggcggtcggcggtagttatgtttcgggcgattgcgtttgcgcggttgtcgggataaggatgtgcgcgtgcgcggagttttcgagtttttttcgtttaacgttggggcggtcgcgggtatcgggttatt

SEQ ID NO: 9320 - DNA, 527 bp, Artificial Sequence
  chemically treated genomic DNA (Homo sapiens) CpG-island No: 9320
aataacccgatacccgcgaccgccccaacgttaaacgaaaaaaactcgaaaactccgcgcacgcgcacatccttatcccgacaaccgcgcaaacgcaatcgcccgaaacataactaccgccgaccgccaaccgtaaataccgacgcatccctaaaccctacgctacctccgtttcctacgaaaaaaaatcttaacgaataaaaatccgccgaatccttataaaacgacgaaaaacgcgtccgcgaataaatttcacctaaataataaacatatcgaacccgctaaaacgaaaatctaaccaaaaacgtaattctcctaataaataaaaacgctccgtaacgattaaaatcactcctctaaaaacgaaatcgctccgaaactaatctaaacgcccccgctctttccttaacgtcacccgtaaattccgcgctcgcatctctaacccgccctcccataaaaactattttaccacgcctactaaatatcctaatccgtctccgaaaataacccccgaatctacaactttt

SEQ ID NO: 9321 - DNA, 554 bp, Artificial Sequence
  chemically treated genomic DNA (Homo sapiens) CpG-island No: 9321
tgatatcgtagttcgcgagaggcgaggaggatttttggattgtgggtaggatcgtaggtagcggaggttttgttcggaaggcgggatttggggacgatttttattttttttagtcgtagacgcggagtttataggagttttcgtagttttagttcgtgtatttacggcggagtcgaggtcgcgatttcgggtttgttggttggaattcgtagtcgtgtttcgggtcgtttcggtagcggttatttttgagagtattcggtttcgttttatttcgtagtggtttggggagtgtaggttattatttttattcgttaaggcggacgtcggattttttattgcgtatgagcgtttattgcggcgtcgttgttgcgtatgagtgtgtttttatcgtttatattttttagaaaatttcgcggcgcggcgttttatcgttttcgttttcgggttgcgttagtcgcgacgatggcgttttttagtggtagtagggaggttgtgggggtgttgggcgttgcggtgtgtaggttttttgggaggatatttggcgtcgattttga

SEQ ID NO: 9322 - DNA, 554 bp, Artificial Sequence
  chemically treated genomic DNA (Homo sapiens) CpG-island No: 9322
tcaaaatcgacgccaaatatcctcccaaaaaacctacacaccgcaacgcccaacacccccacaacctccctactaccactaaaaaacgccatcgtcgcgactaacgcaacccgaaaacgaaaacgataaaacgccgcgccgcgaaattttctaaaaaatataaacgataaaaacacactcatacgcaacaacgacgccgcaataaacgctcatacgcaataaaaaatccgacgtccgccttaacgaataaaaataataacctacactccccaaaccactacgaaataaaacgaaaccgaatactctcaaaaataaccgctaccgaaacgacccgaaacacgactacgaattccaaccaacaaacccgaaatcgcgacctcgactccgccgtaaatacacgaactaaaactacgaaaactcctataaactccgcgtctacgactaaaaaaaataaaaatcgtccccaaatcccgccttccgaacaaaacctccgctacctacgatcctacccacaatccaaaaatcctcctcgcctctcgcgaactacgatatca

SEQ ID NO: 9323 - DNA, 554 bp, Artificial Sequence
  chemically treated genomic DNA (Homo sapiens) CpG-island No: 9323
ttaaggtcggcgttaggtatttttttagaaaatttgtatatcgtaacgtttagtatttttatagtttttttgttgttattggggggcgttatcgtcgcggttaacgtaattcgagggcggaagcggtggagcgtcgcgtcgcggggttttttgggagatgtaggcggtggaagtatatttatgcgtagtaacggcgtcgtagtgggcgtttatgcgtaatggagggttcggcgttcgttttggcgggtgggagtgatgatttgtattttttaaattattgcgggatagaacggggtcgagtgtttttaggggtggtcgttatcggggcggttcgagatacggttgcgggttttagttaataggttcggagtcgcggtttcggtttcgtcgtgggtgtacgggttagggttgcggggatttttgtgggtttcgcgtttgcggttgggaggaatggggatcgtttttagatttcgtttttcgggtagggttttcgttgtttgcgattttgtttatagtttaaggatttttttcgtttttcgcggattgcggtgtta

SEQ ID NO: 9324 - DNA, 554 bp, Artificial Sequence
  chemically treated genomic DNA (Homo sapiens) CpG-island No: 9324
taacaccgcaatccgcgaaaaacgaaaaaaatccttaaactataaacaaaatcgcaaacaacgaaaaccctacccgaaaaacgaaatctaaaaacgatccccattcctcccaaccgcaaacgcgaaacccacaaaaatccccgcaaccctaacccgtacacccacgacgaaaccgaaaccgcgactccgaacctattaactaaaacccgcaaccgtatctcgaaccgccccgataacgaccacccctaaaaacactcgaccccgttctatcccgcaataatttaaaaaatacaaatcatcactcccacccgccaaaacgaacgccgaaccctccattacgcataaacgcccactacgacgccgttactacgcataaatatacttccaccgcctacatctcccaaaaaaccccgcgacgcgacgctccaccgcttccgccctcgaattacgttaaccgcgacgataacgccccccaataacaacaaaaaaactataaaaatactaaacgttacgatatacaaattttctaaaaaaatacctaacgccgaccttaa

SEQ ID NO: 9325 - DNA, 625 bp, Artificial Sequence
  chemically treated genomic DNA (Homo sapiens) CpG-island No: 9325
attttcgtagtcgttatcgtttttatttttcgtagtagcgtttttgacgttgcgcgattcgttgttaaggcgattggaatcgcggttcgaggtaattggagggtacggcgggggcggggcgtttattttaggcggtttttgattggtttcggtcgtttcgtgcgttatagtttcgtttttgttcgggagtttcgtagcggtgatttgttatcgacgttcggcgtgatttagcggattaatggcggtcgttcgcggcgcgtagcgtgcggggatggggtttcgttcgcggcgttgggcgcgttcgttagtttaggggtcgttatgatcgagcggtttaggttcgagcgaagttcgcgcgcggtgagttcgtcgcggtttattcgttttttcgttcgttagagcgtttatcgggacgtttattcgggagggtttcggcgtcgcgtcggcgggagttggttcgggatcgcggtttaggggcgcgcgtcgggggaggcgggttcgggttcgggagggggcgggtcgggtcggggttttagagtttatcgggagttttgaggtcgtcgtaggggagggaaggggaaggttagaggttacgcggggcggggattgggggggttggggtcgt

SEQ ID NO: 9326 - DNA, 625 bp, Artificial Sequence
  chemically treated genomic DNA (Homo sapiens) CpG-island No: 9326
acgaccccaacccccccaatccccgccccgcgtaacctctaaccttccccttccctcccctacgacgacctcaaaactcccgataaactctaaaaccccgacccgacccgccccctcccgaacccgaacccgcctcccccgacgcgcgcccctaaaccgcgatcccgaaccaactcccgccgacgcgacgccgaaaccctcccgaataaacgtcccgataaacgctctaacgaacgaaaaaacgaataaaccgcgacgaactcaccgcgcgcgaacttcgctcgaacctaaaccgctcgatcataacgacccctaaactaacgaacgcgcccaacgccgcgaacgaaaccccatccccgcacgctacgcgccgcgaacgaccgccattaatccgctaaatcacgccgaacgtcgataacaaatcaccgctacgaaactcccgaacaaaaacgaaactataacgcacgaaacgaccgaaaccaatcaaaaaccgcctaaaataaacgccccgcccccgccgtaccctccaattacctcgaaccgcgattccaatcgccttaacaacgaatcgcgcaacgtcaaaaacgctactacgaaaaataaaaacgataacgactacgaaaat

SEQ ID NO: 9327 - DNA, 625 bp, Artificial Sequence
  chemically treated genomic DNA (Homo sapiens) CpG-island No: 9327
gcggttttagtttttttagttttcgtttcgcgtggtttttagtttttttttttttttttttacggcgattttaggattttcgatgggttttggaatttcggttcggttcgttttttttcgggttcgggttcgtttttttcgacgcgcgtttttggatcgcgatttcgggttagttttcgtcgacgcggcgtcgagattttttcgggtgggcgtttcgatggacgttttggcgggcggagggacggatgggtcgcggcggatttatcgcgcgcgggtttcgttcgggtttgggtcgttcggttatggcgatttttgggttggcgagcgcgtttaacgtcgcgggcgggattttattttcgtacgttgcgcgtcgcgggcggtcgttattggttcgttggattacgtcgggcgtcggtgataagttatcgttgcgggattttcgggtaggggcggggttgtgacgtacgaggcggtcgaggttaattagaagtcgtttgggatgagcgtttcgttttcgtcgtgttttttagttatttcgggtcgcggttttagtcgttttggtaacgggtcgcgtagcgttagggacgttgttgcggaaagtggagacggtggcggttgcggggat

SEQ ID NO: 9328 - DNA, 625 bp, Artificial Sequence
  chemically treated genomic DNA (Homo sapiens) CpG-island No: 9328
atccccgcaaccgccaccgtctccactttccgcaacaacgtccctaacgctacgcgacccgttaccaaaacgactaaaaccgcgacccgaaataactaaaaaacacgacgaaaacgaaacgctcatcccaaacgacttctaattaacctcgaccgcctcgtacgtcacaaccccgcccctacccgaaaatcccgcaacgataacttatcaccgacgcccgacgtaatccaacgaaccaataacgaccgcccgcgacgcgcaacgtacgaaaataaaatcccgcccgcgacgttaaacgcgctcgccaacccaaaaatcgccataaccgaacgacccaaacccgaacgaaacccgcgcgcgataaatccgccgcgacccatccgtccctccgcccgccaaaacgtccatcgaaacgcccacccgaaaaaatctcgacgccgcgtcgacgaaaactaacccgaaatcgcgatccaaaaacgcgcgtcgaaaaaaacgaacccgaacccgaaaaaaaacgaaccgaaccgaaattccaaaacccatcgaaaatcctaaaatcgccgtaaaaaaaaaaaaaaaaaaactaaaaaccacgcgaaacgaaaactaaaaaaactaaaaccgc

SEQ ID NO: 9329 - DNA, 637 bp, Artificial Sequence
  chemically treated genomic DNA (Homo sapiens) CpG-island No: 9329
ttggtttcgcgatcggtgggcgggaacggaggaaatagattcgagaggtcgcgagaggacggaatttatttttcgtcgtcgtagcgttttcgttagttcgtttttcgatttttcgtatgggcgcgtagagttttcggatgcgatatttcggtgatatcggacgttgggggcggggtttagtgcgacgagggcggggtcggggtcggttcggggcggggtcgtggtcgtagttgtttggtagttagaatttgggagcgttcgtagtgttgtttttcggggttttttgtttttcgtttttgttggtaggtgaggtttaatagacggaaagacgtcgggagcgtacgtgggttgttttgagtcgttgcggacgagtattttgttttttaggttgattagtcgtatattcgtttgcgagtttgtattattttgggcgcgcgtggtttcggtagaatttcgtttatacgggttttattcgtaggttgttgtgtttttttttttttacggcgtcggggattggggtttggagttatttttttataggggtgtggaacgcgttaatggacgttgatatttttatgcggtcgtttaacgtttcgtgtataataattattttatttagttgtgtgatgttttatcg

SEQ ID NO: 9330 - DNA, 637 bp, Artificial Sequence
  chemically treated genomic DNA (Homo sapiens) CpG-island No: 9330
cgataaaacatcacacaactaaataaaataattattatacacgaaacgttaaacgaccgcataaaaatatcaacgtccattaacgcgttccacacccctataaaaaaataactccaaaccccaatccccgacgccgtaaaaaaaaaaaaacacaacaacctacgaataaaacccgtataaacgaaattctaccgaaaccacgcgcgcccaaaataatacaaactcgcaaacgaatatacgactaatcaacctaaaaaacaaaatactcgtccgcaacgactcaaaacaacccacgtacgctcccgacgtctttccgtctattaaacctcacctaccaacaaaaacgaaaaacaaaaaaccccgaaaaacaacactacgaacgctcccaaattctaactaccaaacaactacgaccacgaccccgccccgaaccgaccccgaccccgccctcgtcgcactaaaccccgcccccaacgtccgatatcaccgaaatatcgcatccgaaaactctacgcgcccatacgaaaaatcgaaaaacgaactaacgaaaacgctacgacgacgaaaaataaattccgtcctctcgcgacctctcgaatctatttcctccgttcccgcccaccgatcgcgaaaccaa

SEQ ID NO: 9331 - DNA, 637 bp, Artificial Sequence
  chemically treated genomic DNA (Homo sapiens) CpG-island No: 9331
cgatggagtattatataattgagtaaaatggttattgtgtacggagcgttaaacgatcgtatgaaggtgttagcgtttattggcgcgttttatatttttgtagaggagtgattttaggttttagttttcgacgtcgtgagaggaaggagatatagtagtttacgagtgggattcgtgtgaacgagattttgtcgagattacgcgcgtttagggtggtgtaggttcgtaagcggatatacggttggttaatttgagagataaggtgttcgttcgtagcggtttaaggtagtttacgtgcgttttcggcgttttttcgtttgttaaattttatttattagtagaagcgaaggataaagaatttcgaaaggtagtattgcgagcgtttttaggttttggttgttaggtagttgcggttacggtttcgtttcgggtcggtttcggtttcgttttcgtcgtattaggtttcgtttttagcgttcggtgttatcggaatatcgtattcgggaattttgcgcgtttatgcggagagtcggagggcgagttgacgaggacgttacggcggcgggaagtgagtttcgttttttcgcggtttttcgggtttgtttttttcgttttcgtttatcggtcgcggagttaa

SEQ ID NO: 9332 - DNA, 637 bp, Artificial Sequence
  chemically treated genomic DNA (Homo sapiens) CpG-island No: 9332
ttaactccgcgaccgataaacgaaaacgaaaaaaacaaacccgaaaaaccgcgaaaaaacgaaactcacttcccgccgccgtaacgtcctcgtcaactcgccctccgactctccgcataaacgcgcaaaattcccgaatacgatattccgataacaccgaacgctaaaaacgaaacctaatacgacgaaaacgaaaccgaaaccgacccgaaacgaaaccgtaaccgcaactacctaacaaccaaaacctaaaaacgctcgcaatactacctttcgaaattctttatccttcgcttctactaataaataaaatttaacaaacgaaaaaacgccgaaaacgcacgtaaactaccttaaaccgctacgaacgaacaccttatctctcaaattaaccaaccgtatatccgcttacgaacctacaccaccctaaacgcgcgtaatctcgacaaaatctcgttcacacgaatcccactcgtaaactactatatctccttcctctcacgacgtcgaaaactaaaacctaaaatcactcctctacaaaaatataaaacgcgccaataaacgctaacaccttcatacgatcgtttaacgctccgtacacaataaccattttactcaattatataatactccatcg

SEQ ID NO: 9333 - DNA, 528 bp, Artificial Sequence
  chemically treated genomic DNA (Homo sapiens) CpG-island No: 9333
gttttgggagttttggtggtggattttttttattatcgaattttgcgcggaagtcgggggcgcgaaggttagcgtatatcgttcggaattttttggggggtagtttggttaacgtttttttggattttacgtcgcgttttttttaagcgatttttgtcgggtttttattcgcgtttacgattatgcgcgggtcggggcgttttttatcgttcgttcggttatttcgcgttcgggtatttcgtgtagtttttcgtttattttcgtattcgcgtttcgcggcgttttgcgttaggtattttgttcgttaggggagggggggcgggtgttgtttttttttcgtttcgggggtattttattttcgcggcgttttgcgtagagagcgcgggtcggttcgcggtttattgattttcgttattttcgtcgttcgtcgttttagttttagtttcgttcgatggtattttatcgcgtgtcgcgggcgaacggcgtcgcgtacggttgtggtatgcgcgtacgcgttattcgttcgcg

SEQ ID NO: 9334 - DNA, 528 bp, Artificial Sequence
  chemically treated genomic DNA (Homo sapiens) CpG-island No: 9334
cgcgaacgaataacgcgtacgcgcataccacaaccgtacgcgacgccgttcgcccgcgacacgcgataaaataccatcgaacgaaactaaaactaaaacgacgaacgacgaaaataacgaaaatcaataaaccgcgaaccgacccgcgctctctacgcaaaacgccgcgaaaataaaatacccccgaaacgaaaaaaaaacaacacccgccccccctcccctaacgaacaaaatacctaacgcaaaacgccgcgaaacgcgaatacgaaaataaacgaaaaactacacgaaatacccgaacgcgaaataaccgaacgaacgataaaaaacgccccgacccgcgcataatcgtaaacgcgaataaaaacccgacaaaaatcgcttaaaaaaaacgcgacgtaaaatccaaaaaaacgttaaccaaactaccccccaaaaaattccgaacgatatacgctaaccttcgcgcccccgacttccgcgcaaaattcgataataaaaaaaatccaccaccaaaactcccaaaac

SEQ ID NO: 9335 - DNA, 528 bp, Artificial Sequence
  chemically treated genomic DNA (Homo sapiens) CpG-island No: 9335
cgcgggcgggtggcgcgtacgcgtatgttatagtcgtgcgcggcgtcgttcgttcgcgatacgcgatgaagtattatcgagcgaggttgaagttggggcggcgagcgacggaggtggcgagagttaatggatcgcgggtcggttcgcgttttttgcgtagggcgtcgcgggggtggggtattttcgagacgaggagagaataatattcgtttttttttttttgacgaatagggtatttggcgtagagcgtcgcgagacgcggatgcgggggtgggcggagggttatacgaggtattcgaacgcgggatggtcgggcgggcggtagagaacgtttcggttcgcgtatggtcgtgagcgcggatgggggttcggtaaaggtcgtttgaggagaacgcggcgtgggatttaaaagggcgttagttaagttgttttttaaaaggtttcgagcggtatgcgttgattttcgcgttttcggttttcgcgtagggttcggtggtaaaggggatttattattagaatttttaaggt

SEQ ID NO: 9336 - DNA, 528 bp, Artificial Sequence
  chemically treated genomic DNA (Homo sapiens) CpG-island No: 9336
accttaaaaattctaataataaatcccctttaccaccgaaccctacgcgaaaaccgaaaacgcgaaaatcaacgcataccgctcgaaaccttttaaaaaacaacttaactaacgcccttttaaatcccacgccgcgttctcctcaaacgacctttaccgaacccccatccgcgctcacgaccatacgcgaaccgaaacgttctctaccgcccgcccgaccatcccgcgttcgaatacctcgtataaccctccgcccacccccgcatccgcgtctcgcgacgctctacgccaaataccctattcgtcaaaaaaaaaaaaacgaatattattctctcctcgtctcgaaaataccccacccccgcgacgccctacgcaaaaaacgcgaaccgacccgcgatccattaactctcgccacctccgtcgctcgccgccccaacttcaacctcgctcgataatacttcatcgcgtatcgcgaacgaacgacgccgcgcacgactataacatacgcgtacgcgccacccgcccgcg

SEQ ID NO: 9337 - DNA, 670 bp, Artificial Sequence
  chemically treated genomic DNA (Homo sapiens) CpG-island No: 9337
ttttcgtcggttttttttcgagggaaatacggttcgttattttcgggtagttgacgcgtcggcggttacgttaatagttatagaacggtttatatttatggtagttcgatcgttatatcgcggcggttttcgtttagtaaagttcgcggttttttaacggaggcgattggcgtatatttacgcggttatcgtcgcgcgttttttttcgcgcgacgaggtcgttgcggtttcgtcgtacgttcgttacgcgtcgttagggcgttcggagcggatggattttattcgcgcgatttgttcgtgttttgtgtttattttcgggtcgcgttgcggtcgcgcggtttgagatttttttagtttttgtcgagaagtacgaattatacgacgttatattaatacgcgcgagagggggagtttgttttatagtcgtatgcgatagggttagagcgcgttagttacgagaattatcgatagatacgaggagacgcgcgtattatcgtgatcgacgtagatagagagtgaatcgtttcgcgtcgttcgtagtcggcgttacgttagattatacgtcgtattgcgagttcgtttttttcgggttagtttgcgaaggtattcgatcgagattatattgcgtatcggacggagttattcgtcgttagtcgggtcgcgggatgta

SEQ ID NO: 9338 - DNA, 670 bp, Artificial Sequence
  chemically treated genomic DNA (Homo sapiens) CpG-island No: 9338
tacatcccgcgacccgactaacgacgaataactccgtccgatacgcaatataatctcgatcgaataccttcgcaaactaacccgaaaaaaacgaactcgcaatacgacgtataatctaacgtaacgccgactacgaacgacgcgaaacgattcactctctatctacgtcgatcacgataatacgcgcgtctcctcgtatctatcgataattctcgtaactaacgcgctctaaccctatcgcatacgactataaaacaaactccccctctcgcgcgtattaatataacgtcgtataattcgtacttctcgacaaaaactaaaaaaatctcaaaccgcgcgaccgcaacgcgacccgaaaataaacacaaaacacgaacaaatcgcgcgaataaaatccatccgctccgaacgccctaacgacgcgtaacgaacgtacgacgaaaccgcaacgacctcgtcgcgcgaaaaaaaacgcgcgacgataaccgcgtaaatatacgccaatcgcctccgttaaaaaaccgcgaactttactaaacgaaaaccgccgcgatataacgatcgaactaccataaatataaaccgttctataactattaacgtaaccgccgacgcgtcaactacccgaaaataacgaaccgtatttccctcgaaaaaaaaccgacgaaaa

SEQ ID NO: 9339 - DNA, 670 bp, Artificial Sequence
  chemically treated genomic DNA (Homo sapiens) CpG-island No: 9339
tgtatttcgcggttcggttggcggcgggtagtttcgttcggtgcgtagtgtggtttcggtcggatgttttcgtaggttgattcgaggggagcgagttcgtagtgcggcgtgtggtttggcgtggcgtcggttgcggacggcgcggggcggtttattttttgtttgcgtcggttacggtagtgcgcgcgttttttcgtgtttgtcggtggttttcgtagttggcgcgttttggttttgtcgtatgcgattgtgaggtaggttttttttttcgcgcgtgttagtgtgacgtcgtgtggttcgtgtttttcggtaggagttgaaagggttttagatcgcgcgatcgtaacgcgattcggaggtgagtataaggtacgagtagatcgcgcgaatggagtttattcgtttcgagcgttttgacggcgcgtgacgaacgtacggcggagtcgtagcgatttcgtcgcgcgagaggaagcgcgcggcgatgatcgcgtgggtatacgttagtcgttttcgttgggggatcgcgagttttgttgggcgggggtcgtcgcgatatggcggtcggattgttatgggtgtaggtcgttttgtggttattaacgtggtcgtcggcgcgttagttgttcgaagatggcggatcgtgtttttttcgaggaaagatcggcgaggg

SEQ ID NO: 9340 - DNA, 670 bp, Artificial Sequence
  chemically treated genomic DNA (Homo sapiens) CpG-island No: 9340
ccctcgccgatctttcctcgaaaaaaacacgatccgccatcttcgaacaactaacgcgccgacgaccacgttaataaccacaaaacgacctacacccataacaatccgaccgccatatcgcgacgacccccgcccaacaaaactcgcgatcccccaacgaaaacgactaacgtatacccacgcgatcatcgccgcgcgcttcctctcgcgcgacgaaatcgctacgactccgccgtacgttcgtcacgcgccgtcaaaacgctcgaaacgaataaactccattcgcgcgatctactcgtaccttatactcacctccgaatcgcgttacgatcgcgcgatctaaaaccctttcaactcctaccgaaaaacacgaaccacacgacgtcacactaacacgcgcgaaaaaaaaaacctacctcacaatcgcatacgacaaaaccaaaacgcgccaactacgaaaaccaccgacaaacacgaaaaaacgcgcgcactaccgtaaccgacgcaaacaaaaaataaaccgccccgcgccgtccgcaaccgacgccacgccaaaccacacgccgcactacgaactcgctcccctcgaatcaacctacgaaaacatccgaccgaaaccacactacgcaccgaacgaaactacccgccgccaaccgaaccgcgaaataca

SEQ ID NO: 9341 - DNA, 759 bp, Artificial Sequence
  chemically treated genomic DNA (Homo sapiens) CpG-island No: 9341
  unsure (357, 395, 546, 603)
gcgcgggtacgttatcggttttatagtcgcggtgcggtgtacgttgagtttcgttttattatttagtacgcgtatcgaggtacgatttcgttggagagcgagttttgagtgcgtgtgacgattgagattcgtagttagtcgtacgcgcgtttcgtgttatagcgcgattacgtcggcgttatttagcgcgcgattaacgtgcgtacgttcgcgcggcgagtttttgcggagcgatcgattgaatgttagcgagtacgttacgtagcgtttgtcggcgttcgagttcgcgcgtcgcgtcggtatcgcggagtgcgcgcgcgtttatcggcgtggtggtcgcgttgtattgatcgtcgntatttttagttcgttacgaatatcgagcgtataatagnacgcgcgcgtagcgaggggtgcgttcgcgagtgcggcggcgttttcggtgattattcgatgacgcgacgcgtatcgcgcgatgtggatacggagagttttatttatagcgacgtcgcgtatcgtgagtcgcgcggcgttcgagttttcggngttcgtcgcgtttacgcgcgaggcgagttgttcggtcggttagttcgtcgagcggangcgtatttagttcggtagcgtttatcgaacggcgttcgtacgtcgcggttatcgttcggattgattgtagagatgtatagcgtacggatttcgtcgagcggagtacgcgcgaatagttagcgcgtcgcgcgttgtcggggattacgagttttattt

SEQ ID NO: 9342 - DNA, 759 bp, Artificial Sequence
  chemically treated genomic DNA (Homo sapiens) CpG-island No: 9342
  unsure (157, 214, 365, 403)
aaataaaactcgtaatccccgacaacgcgcgacgcgctaactattcgcgcgtactccgctcgacgaaatccgtacgctatacatctctacaatcaatccgaacgataaccgcgacgtacgaacgccgttcgataaacgctaccgaactaaatacgcntccgctcgacgaactaaccgaccgaacaactcgcctcgcgcgtaaacgcgacgaacnccgaaaactcgaacgccgcgcgactcacgatacgcgacgtcgctataaataaaactctccgtatccacatcgcgcgatacgcgtcgcgtcatcgaataatcaccgaaaacgccgccgcactcgcgaacgcacccctcgctacgcgcgcgtnctattatacgctcgatattcgtaacgaactaaaaatancgacgatcaatacaacgcgaccaccacgccgataaacgcgcgcgcactccgcgataccgacgcgacgcgcgaactcgaacgccgacaaacgctacgtaacgtactcgctaacattcaatcgatcgctccgcaaaaactcgccgcgcgaacgtacgcacgttaatcgcgcgctaaataacgccgacgtaatcgcgctataacacgaaacgcgcgtacgactaactacgaatctcaatcgtcacacgcactcaaaactcgctctccaacgaaatcgtacctcgatacgcgtactaaataataaaacgaaactcaacgtacaccgcaccgcgactataaaaccgataacgtacccgcgc

SEQ ID NO: 9343 - DNA, 759 bp, Artificial Sequence
  chemically treated genomic DNA (Homo sapiens) CpG-island No: 9343
  unsure (157, 214, 365, 403)
aggtgagattcgtagttttcggtagcgcgcggcgcgttgattgttcgcgcgtgtttcgttcgacgaagttcgtgcgttgtgtatttttgtagttagttcgggcggtggtcgcggcgtgcggacgtcgttcggtgagcgttatcgggttggatgcgtnttcgttcggcgaattgatcgatcgagtagttcgtttcgcgcgtgagcgcggcgagtntcggaagttcggacgtcgcgcggtttacggtacgcggcgtcgttgtgagtgaagtttttcgtgtttatatcgcgcggtgcgcgtcgcgttatcgagtggttatcgaggacgtcgtcgtattcgcggacgtatttttcgttacgcgcgcgtnttgttgtgcgttcggtgttcgtggcgagttgagggtgncgacgattagtatagcgcggttattacgtcggtaggcgcgcgcgtatttcgcggtgtcgacgcggcgcgcggattcgggcgtcggtaagcgttgcgtgacgtattcgttgatatttagtcgatcgtttcgtaggggttcgtcgcgcgggcgtacgtacgttgatcgcgcgttaagtgacgtcgacgtggtcgcgttgtagtacggaacgcgcgtgcggttgattgcgggttttagtcgttatacgtatttagagttcgttttttaacgaggtcgtatttcggtgcgcgtgttaggtggtggggcggagtttagcgtgtatcgtatcgcggttgtggggtcggtagcgtgttcgcgt

SEQ ID NO: 9344 - DNA, 759 bp, Artificial Sequence
  chemically treated genomic DNA (Homo sapiens) CpG-island No: 9344
  unsure (357, 395, 546, 603)
acgcgaacacgctaccgaccccacaaccgcgatacgatacacgctaaactccgccccaccacctaacacgcgcaccgaaatacgacctcgttaaaaaacgaactctaaatacgtataacgactaaaacccgcaatcaaccgcacgcgcgttccgtactacaacgcgaccacgtcgacgtcacttaacgcgcgatcaacgtacgtacgcccgcgcgacgaacccctacgaaacgatcgactaaatatcaacgaatacgtcacgcaacgcttaccgacgcccgaatccgcgcgccgcgtcgacaccgcgaaatacgcgcgcgcctaccgacgtaataaccgcgctatactaatcgtcgncaccctcaactcgccacgaacaccgaacgcacaacaanacgcgcgcgtaacgaaaaatacgtccgcgaatacgacgacgtcctcgataaccactcgataacgcgacgcgcaccgcgcgatataaacacgaaaaacttcactcacaacgacgccgcgtaccgtaaaccgcgcgacgtccgaacttccganactcgccgcgctcacgcgcgaaacgaactactcgatcgatcaattcgccgaacgaanacgcatccaacccgataacgctcaccgaacgacgtccgcacgccgcgaccaccgcccgaactaactacaaaaatacacaacgcacgaacttcgtcgaacgaaacacgcgcgaacaatcaacgcgccgcgcgctaccgaaaactacgaatctcacct

SEQ ID NO: 9345 - DNA, 549 bp, Artificial Sequence
  chemically treated genomic DNA (Homo sapiens) CpG-island No: 9345
cggtcgtgatcgtgattttggtcggtcgttgtggttggggtcggttaagtcgaatatcggttatacgtaagcggcggcgggtgtggttggtgtgattaagatggtgatggcgatgcggtacgggtagttgttacgtacgttgtacgtggaatcgtcgtcgtcggaggtggattggtcggcggggacggtttaattttttacggagaatacgttttggtttaggagtggtcgtgttcgtcgggtgggggtgtcgtcgttcgggattagtggtattaacgcgtacgttattttcgaatagttttcgggagtgtcgagttagtttgcggggtcgggttcgggttttgtcgtggatgtttcggtggtgtcgtggatggtgtcgggtaaaatattcgaagcgttattcgcgtaggtaacggcgttgatgatttatttggacgagcgatttgatgttttttcgttggatgttgggtattcgtttggcgttaaaatgtatgcgtttgatgaacgaacggtggtgttggggtcgatttttaaacgtttttttgtcgt

SEQ ID NO: 9346 - DNA, 549 bp, Artificial Sequence
  chemically treated genomic DNA (Homo sapiens) CpG-island No: 9346
acgacaaaaaaacgtttaaaaatcgaccccaacaccaccgttcgttcatcaaacgcatacattttaacgccaaacgaatacccaacatccaacgaaaaaacatcaaatcgctcgtccaaataaatcatcaacgccgttacctacgcgaataacgcttcgaatattttacccgacaccatccacgacaccaccgaaacatccacgacaaaacccgaacccgaccccgcaaactaactcgacactcccgaaaactattcgaaaataacgtacgcgttaataccactaatcccgaacgacgacacccccacccgacgaacacgaccactcctaaaccaaaacgtattctccgtaaaaaattaaaccgtccccgccgaccaatccacctccgacgacgacgattccacgtacaacgtacgtaacaactacccgtaccgcatcgccatcaccatcttaatcacaccaaccacacccgccgccgcttacgtataaccgatattcgacttaaccgaccccaaccacaacgaccgaccaaaatcacgatcacgaccg

SEQ ID NO: 9347 - DNA, 549 bp, Artificial Sequence
  chemically treated genomic DNA (Homo sapiens) CpG-island No: 9347
acggtaaaaaaacgtttaggggtcgattttaatattatcgttcgtttattaagcgtatatattttaacgttaagcgagtatttaatatttagcgaggagatattaggtcgttcgtttagataggttattaacgtcgttgtttgcgcggatagcgtttcgggtgttttgttcgatattatttacggtattatcggaatatttacgatagaattcgaattcggtttcgtagattgattcggtattttcgggggttgttcgaggatgacgtgcgcgttagtattattgatttcgaacgacgatatttttattcgacgaatacgattatttttgggttagggcgtgtttttcgtaaggagttgaatcgttttcgtcgattaatttattttcggcgacggcgattttacgtgtaacgtgcgtggtagttgttcgtgtcgtatcgttattattattttgattatattagttatattcgtcgtcgtttgcgtatgatcgatgttcgatttgatcgattttaattataacggtcggttaggattacgattacggtcg

SEQ ID NO: 9348 - DNA, 549 bp, Artificial Sequence
  chemically treated genomic DNA (Homo sapiens) CpG-island No: 9348
cgaccgtaatcgtaatcctaaccgaccgttataattaaaatcgatcaaatcgaacatcgatcatacgcaaacgacgacgaatataactaatataatcaaaataataataacgatacgacacgaacaactaccacgcacgttacacgtaaaatcgccgtcgccgaaaataaattaatcgacgaaaacgattcaactccttacgaaaaacacgccctaacccaaaaataatcgtattcgtcgaataaaaatatcgtcgttcgaaatcaataatactaacgcgcacgtcatcctcgaacaacccccgaaaataccgaatcaatctacgaaaccgaattcgaattctatcgtaaatattccgataataccgtaaataatatcgaacaaaacacccgaaacgctatccgcgcaaacaacgacgttaataacctatctaaacgaacgacctaatatctcctcgctaaatattaaatactcgcttaacgttaaaatatatacgcttaataaacgaacgataatattaaaatcgacccctaaacgtttttttaccgt

SEQ ID NO: 9349 - DNA, 819 bp, Artificial Sequence
  chemically treated genomic DNA (Homo sapiens) CpG-island No: 9349
  unsure (91, 97, 99, 105..106, 124, 145, 211, 235, 243, 255, 274, 295)
  unsure (297, 305, 344, 364, 373, 509, 518, 531, 561, 600, 607, 662)
  unsure (667, 688, 690, 755..756, 760, 784)
gtacgcgtaaaatcggggaaacgtatagaaaaagaatcgcggggttatcgtcgttttttttttcgtaattagaaatatataacgataaaantttcgntncgtagnnaatcgttcgagattagangagaataaaataaacgattanattagatcgttttacggtttttttagattttttttaagcgaaaatatttatttttatttatcgtantttcggtttttttacgtttttatngattttantttaaaataaanatatataaatatcgttttncgtttcggtcgcgttatttantnatataatngagatagaaatttatattcgcgttttcgaagcgcgcganttttttttttcgcggttttngttaattanattattttagattagacgaaaagacgtcgtaaatattattatacgcgcgtttttcgagtaatatatacgcgaatagttaaatcgatatatagtaaaataaattaggatttcgacggcgcgagcgtaagttttttanggattcgtnttacggttttttnaacgtttttaagttaaaatatattcggganacgaagtaagcgtagtagaagtttaggtagggttacgantaaattntcgcggttatatatacgtagatacgcggtagacgtataaagtcggttatttcggngtagngtaacgtacgcgtaattacgnangataatatagtatagcgtataaacgtaggcgtaaataatcgaatagatattttcgtagtatattnnnttnttatatatataaaaatagataatntattacgcgtcgtattttcgtaatttttatcgtta

SEQ ID NO: 9350 - DNA, 819 bp, Artificial Sequence
  chemically treated genomic DNA (Homo sapiens) CpG-island No: 9350
  unsure (36, 60, 63..64, 130, 132, 153, 158, 213, 220, 259, 289, 302)
  unsure (311, 447, 456, 476, 515, 523, 525, 546, 565, 577, 585, 609)
  unsure (675, 696, 714..715, 721, 723, 729)
taacgataaaaattacgaaaatacgacgcgtaatanattatctatttttatatatataanaannnaatatactacgaaaatatctattcgattatttacgcctacgtttatacgctatactatattatcntncgtaattacgcgtacgttacnctacnccgaaataaccgactttatacgtctaccgcgtatctacgtatatataaccgcganaatttantcgtaaccctacctaaacttctactacgcttacttcgtntcccgaatatattttaacttaaaaacgttnaaaaaaccgtaanacgaatccntaaaaaacttacgctcgcgccgtcgaaatcctaatttattttactatatatcgatttaactattcgcgtatatattactcgaaaaacgcgcgtataataatatttacgacgtcttttcgtctaatctaaaataatntaattaacnaaaaccgcgaaaaaaaaaantcgcgcgcttcgaaaacgcgaatataaatttctatctcnattatatnantaaataacgcgaccgaaacgnaaaacgatatttatatatntttattttaaantaaaatcnataaaaacgtaaaaaaaccgaaantacgataaataaaaataaatattttcgcttaaaaaaaatctaaaaaaaccgtaaaacgatctaatntaatcgtttattttattctcntctaatctcgaacgattnnctacgnancgaaanttttatcgttatatatttctaattacgaaaaaaaaaacgacgataaccccgcgattctttttctatacgtttccccgattttacgcgtac

SEQ ID NO: 9351 - DNA, 819 bp, Artificial Sequence
  chemically treated genomic DNA (Homo sapiens) CpG-island No: 9351
  unsure (36, 60, 63..64, 130, 132, 153, 158, 213, 220, 259, 289, 302)
  unsure (311, 447, 456, 476, 515, 523, 525, 546, 565, 577, 585, 609)
  unsure (675, 696, 714..715, 721, 723, 729)
tggcggtgggggttgcgggggtgcggcgcgtggtgngttgtttgtttttgtgtgtgtggnggnnnggtgtgttgcgggggtgtttgttcggttgtttgcgtttgcgtttgtgcgttgtgttgtgttgttntncgtggttgcgcgtgcgttgtnttgtntcggggtggtcggttttgtgcgtttgtcgcgtgtttgcgtgtgtgtggtcgcggnggtttgntcgtggttttgtttgggtttttgttgcgtttgtttcgtntttcgggtgtgttttggtttgggggcgttnggggggtcgtggngcgggtttntggggggtttgcgttcgcgtcgtcggggttttggtttgttttgttgtgtgtcggtttggttgttcgcgtgtgtgttgttcggggggcgcgcgtgtggtggtgtttgcggcgttttttcgtttggtttggggtggtntggttggtnggggtcgcgggggggggggntcgcgcgtttcgggggcgcgggtgtgggtttttgttttngttgtgtngntgggtggcgcggtcggggcgnggggcggtgtttgtgtgtntttgttttgggntggggttngtgagggcgtgggggggtcggggntgcggtgggtgggggtgggtgttttcgtttggggggggtttgggggggtcgtggggcggtttggtntggtcgtttgttttgtttttntttggtttcgggcggttnnttgcgngncggggnttttgtcgttgtgtgtttttggttgcgggggggggggcggcggtggtttcgcggttttttttttgtgcgttttttcggttttgcgcgtgt

SEQ ID NO: 9352 - DNA, 819 bp, Artificial Sequence
  chemically treated genomic DNA (Homo sapiens) CpG-island No: 9352
  unsure (91, 97, 99, 105..106, 124, 145, 211, 235, 243, 255, 274, 295)
  unsure (297, 305, 344, 364, 373, 509, 518, 531, 561, 600, 607, 662)
  unsure (667, 688, 690, 755..756, 760, 784)
acacgcgcaaaaccgaaaaaacgcacaaaaaaaaaaccgcgaaaccaccgccgcccccccccccgcaaccaaaaacacacaacgacaaaanccccgncncgcaannaaccgcccgaaaccaaanaaaaacaaaacaaacgaccanaccaaaccgccccacgacccccccaaaccccccccaaacgaaaacacccacccccacccaccgcanccccgacccccccacgccctcacnaaccccancccaaaacaaanacacacaaacaccgccccncgccccgaccgcgccacccancnacacaacnaaaacaaaaacccacacccgcgcccccgaaacgcgcgancccccccccccgcgaccccnaccaaccanaccaccccaaaccaaacgaaaaaacgccgcaaacaccaccacacgcgcgccccccgaacaacacacacgcgaacaaccaaaccgacacacaacaaaacaaaccaaaaccccgacgacgcgaacgcaaaccccccanaaacccgcnccacgaccccccnaacgcccccaaaccaaaacacacccgaaanacgaaacaaacgcaacaaaaacccaaacaaaaccacgancaaaccnccgcgaccacacacacgcaaacacgcgacaaacgcacaaaaccgaccaccccganacaanacaacgcacgcgcaaccacgnanaacaacacaacacaacgcacaaacgcaaacgcaaacaaccgaacaaacacccccgcaacacaccnnnccnccacacacacaaaaacaaacaacncaccacgcgccgcacccccgcaacccccaccgcca

SEQ ID NO: 9353 - DNA, 525 bp, Artificial Sequence
  chemically treated genomic DNA (Homo sapiens) CpG-island No: 9353
acgatcgaaggatatagtcgagcgcgttcgttcgagttatcgtggcgtcgcgttagagaacgttatcggtattagttacgtttttatggcggggttttcgtcgggtcgcgatatcgtttcgtttatttatttttttggtttgttttgttgcggtcgtcgtattatttagggatattcgtgtagaggtgtttacgtggaggcgaagaagcgttcgttttttcgcggtaggttgcggtcgtagtttagttttacgttcgtttttcgtggtttttcgtatttttttttttagtttacgtttatgtttcgtttggttcggttttttgtttgttcggtttcgtcgaattttcgtttttgtcgttgtggtttatttagtcgacgattggttcggtgtggggttttcgtcggtgtttttgcgcggcgtttgggtcgtttttcgtatttcgttttttttacggtgggtcgattatttttttgtacggcgtatttgtcgcgtgttttattatttatgttttgtttttatttttt

SEQ ID NO: 9354 - DNA, 525 bp, Artificial Sequence
  chemically treated genomic DNA (Homo sapiens) CpG-island No: 9354
aaaaaataaaaacaaaacataaataataaaacacgcgacaaatacgccgtacaaaaaaataatcgacccaccgtaaaaaaaacgaaatacgaaaaacgacccaaacgccgcgcaaaaacaccgacgaaaaccccacaccgaaccaatcgtcgactaaataaaccacaacgacaaaaacgaaaattcgacgaaaccgaacaaacaaaaaaccgaaccaaacgaaacataaacgtaaactaaaaaaaaaaatacgaaaaaccacgaaaaacgaacgtaaaactaaactacgaccgcaacctaccgcgaaaaaacgaacgcttcttcgcctccacgtaaacacctctacacgaatatccctaaataatacgacgaccgcaacaaaacaaaccaaaaaaataaataaacgaaacgatatcgcgacccgacgaaaaccccgccataaaaacgtaactaataccgataacgttctctaacgcgacgccacgataactcgaacgaacgcgctcgactatatccttcgatcgt

SEQ ID NO: 9355 - DNA, 525 bp, Artificial Sequence
  chemically treated genomic DNA (Homo sapiens) CpG-island No: 9355
gggagatagaggtagaatatagatgatgaggtacgcgataagtgcgtcgtataaggaggtgatcgatttatcgtgagggaggcggagtacgaaggacgatttaggcgtcgcgtaaaagtatcggcgaaggttttatatcgagttaatcgtcgattgggtgaattatagcgataggggcgagagttcggcgagatcggatagataaaagatcgggttaagcgaggtatggacgtgagttgagaagaaaggtgcgaggagttacgagaagcgaacgtgaggttaggttacggtcgtaatttgtcgcgaagaggcgggcgttttttcgtttttacgtgggtatttttatacgggtgtttttagatgatacgacggtcgtagtaggataagttaggggagtggatagacggggcgatgtcgcggttcggcgggggtttcgttatgagggcgtagttggtgtcgatagcgttttttggcgcggcgttacggtagttcgggcggacgcgttcggttatgtttttcgatcgt

SEQ ID NO: 9356 - DNA, 525 bp, Artificial Sequence
  chemically treated genomic DNA (Homo sapiens) CpG-island No: 9356
acgatcgaaaaacataaccgaacgcgtccgcccgaactaccgtaacgccgcgccaaaaaacgctatcgacaccaactacgccctcataacgaaacccccgccgaaccgcgacatcgccccgtctatccactcccctaacttatcctactacgaccgtcgtatcatctaaaaacacccgtataaaaatacccacgtaaaaacgaaaaaacgcccgcctcttcgcgacaaattacgaccgtaacctaacctcacgttcgcttctcgtaactcctcgcacctttcttctcaactcacgtccatacctcgcttaacccgatcttttatctatccgatctcgccgaactctcgcccctatcgctataattcacccaatcgacgattaactcgatataaaaccttcgccgatacttttacgcgacgcctaaatcgtccttcgtactccgcctccctcacgataaatcgatcacctccttatacgacgcacttatcgcgtacctcatcatctatattctacctctatctccc

SEQ ID NO: 9357 - DNA, 748 bp, Artificial Sequence
  chemically treated genomic DNA (Homo sapiens) CpG-island No: 9357
gatcgtgattttggtcggtcgttgtggttggggtcggttaagtcgaatatcggttatacgtaagcggcggcgggtgtggttggtgtgattaagatggtgatggcgatgcggtacgggtagttgttacgtacgttgtacgtggaatcgtcgtcgtcggaggtggattggtcggcggggacggtttaattttttacggagaatacgttttggtttaggagtggtcgtgttcgtcgggtgggggtgtcgtcgttcgggattagtggtattaacgcgtacgttattttcgaatagttttcgggagtgtcgagttagtttgcggggtcgggttcgggttttgtcgtggatgtttcggtggtgtcgtggatggtgtcgggtaaaatattcgaagcgttattcgcgtaggtaacggcgttgatgatttatttggacgagcgatttgatgttttttcgttggatgttgggtattcgttggcgttgatacggtcggcgttggatgagcgagcggtggtgttggggtcggatcgtgaaacgttgttgtgcggtgtgaagcgttgtttgtcggttatgaggtttttaggttggtgaacggatttgtaggggttgggggttcgtatcgggtttgtgtttttcggttagggtggttagtggttggggatgggtcggggttttatcgggtttttacggtgttcgttgttgttttttgacgaattttgtgtcgagttggatgtatatttgggttaggaaattg

SEQ ID NO: 9358 - DNA, 748 bp, Artificial Sequence
  chemically treated genomic DNA (Homo sapiens) CpG-island No: 9358
caatttcctaacccaaatatacatccaactcgacacaaaattcgtcaaaaaacaacaacgaacaccgtaaaaacccgataaaaccccgacccatccccaaccactaaccaccctaaccgaaaaacacaaacccgatacgaacccccaacccctacaaatccgttcaccaacctaaaaacctcataaccgacaaacaacgcttcacaccgcacaacaacgtttcacgatccgaccccaacaccaccgctcgctcatccaacgccgaccgtatcaacgccaacgaatacccaacatccaacgaaaaaacatcaaatcgctcgtccaaataaatcatcaacgccgttacctacgcgaataacgcttcgaatattttacccgacaccatccacgacaccaccgaaacatccacgacaaaacccgaacccgaccccgcaaactaactcgacactcccgaaaactattcgaaaataacgtacgcgttaataccactaatcccgaacgacgacacccccacccgacgaacacgaccactcctaaaccaaaacgtattctccgtaaaaaattaaaccgtccccgccgaccaatccacctccgacgacgacgattccacgtacaacgtacgtaacaactacccgtaccgcatcgccatcaccatcttaatcacaccaaccacacccgccgccgcttacgtataaccgatattcgacttaaccgaccccaaccacaacgaccgaccaaaatcacgatc

SEQ ID NO: 9359 - DNA, 748 bp, Artificial Sequence
  chemically treated genomic DNA (Homo sapiens) CpG-island No: 9359
taattttttggtttagatgtgtatttagttcggtataaggttcgttaaagggtagtagcgaatatcgtaaaagttcggtaaagtttcggtttatttttagttattgattattttgatcggaaaatataaattcgatgcgggtttttagtttttatagattcgtttattaatttagaagttttatgatcggtagatagcgttttatatcgtataataacgttttacggttcgattttagtattatcgttcgtttatttagcgtcgatcgtgttaacgttagcgagtatttaatatttagcgaggagatattaggtcgttcgtttagataggttattaacgtcgttgtttgcgcggatagcgtttcgggtgttttgttcgatattatttacggtattatcggaatatttacgatagaattcgaattcggtttcgtagattgattcggtattttcgggggttgttcgaggatgacgtgcgcgttagtattattgatttcgaacgacgatatttttattcgacgaatacgattatttttgggttagggcgtgtttttcgtaaggagttgaatcgttttcgtcgattaatttattttcggcgacggcgattttacgtgtaacgtgcgtggtagttgttcgtgtcgtatcgttattattattttgattatattagttatattcgtcgtcgtttgcgtatgatcgatgttcgatttgatcgattttaattataacggtcggttaggattacgatt

SEQ ID NO: 9360 - DNA, 748 bp, Artificial Sequence
  chemically treated genomic DNA (Homo sapiens) CpG-island No: 9360
aatcgtaatcctaaccgaccgttataattaaaatcgatcaaatcgaacatcgatcatacgcaaacgacgacgaatataactaatataatcaaaataataataacgatacgacacgaacaactaccacgcacgttacacgtaaaatcgccgtcgccgaaaataaattaatcgacgaaaacgattcaactccttacgaaaaacacgccctaacccaaaaataatcgtattcgtcgaataaaaatatcgtcgttcgaaatcaataatactaacgcgcacgtcatcctcgaacaacccccgaaaataccgaatcaatctacgaaaccgaattcgaattctatcgtaaatattccgataataccgtaaataatatcgaacaaaacacccgaaacgctatccgcgcaaacaacgacgttaataacctatctaaacgaacgacctaatatctcctcgctaaatattaaatactcgctaacgttaacacgatcgacgctaaataaacgaacgataatactaaaatcgaaccgtaaaacgttattatacgatataaaacgctatctaccgatcataaaacttctaaattaataaacgaatctataaaaactaaaaacccgcatcgaatttatattttccgatcaaaataatcaataactaaaaataaaccgaaactttaccgaacttttacgatattcgctactaccctttaacgaaccttataccgaactaaatacacatctaaaccaaaaaatta

SEQ ID NO: 9361 - DNA, 664 bp, Artificial Sequence
  chemically treated genomic DNA (Homo sapiens) CpG-island No: 9361
tcgttgtggttggggtcggttaagtcgaatatcggttatacgtaagcggcggcgggtgtggttggtgtgattaagatggtgatggcgatgcggtacgggtagttgttacgtacgttgtacgtggaatcgtcgtcgtcggaggtggattggtcggcggggacggtttaattttttacggagaatacgttttggtttaggagtggtcgtgttcgtcgggtgggggtgtcgtcgttcgggattagtggtattaacgcgtacgttattttcgaatagttttcgggagtgtcgagttagtttgcggggtcgggttcgggttttgtcgtggatgtttcggtggtgtcgtggatggtgtcgggtaaaatattcgaagcgttattcgcgtaggtaacggcgttgatgatttatttggacgagcgatttgatgttttttcgttgggatgttggtattcgttggcgttgatacggtcggcgttggattagttatcggtggtgttggggtcggatcgtgaaagattgttgtgcggtgtgaaagttttgttttgtcggttatgaggtttttaggtttgtgatcggatttttgggggtttggtggtcgtatcggggtttgtagttttcggtttaaggtgttagttgtttgggaatggtcgggggttttaacgggttt

SEQ ID NO: 9362 - DNA, 664 bp, Artificial Sequence
  chemically treated genomic DNA (Homo sapiens) CpG-island No: 9362
aaacccgttaaaacccccgaccattcccaaacaactaacaccttaaaccgaaaactacaaaccccgatacgaccaccaaacccccaaaaatccgatcacaaacctaaaaacctcataaccgacaaaacaaaactttcacaccgcacaacaatctttcacgatccgaccccaacaccaccgataactaatccaacgccgaccgtatcaacgccaacgaataccaacatcccaacgaaaaaacatcaaatcgctcgtccaaataaatcatcaacgccgttacctacgcgaataacgcttcgaatattttacccgacaccatccacgacaccaccgaaacatccacgacaaaacccgaacccgaccccgcaaactaactcgacactcccgaaaactattcgaaaataacgtacgcgttaataccactaatcccgaacgacgacacccccacccgacgaacacgaccactcctaaaccaaaacgtattctccgtaaaaaattaaaccgtccccgccgaccaatccacctccgacgacgacgattccacgtacaacgtacgtaacaactacccgtaccgcatcgccatcaccatcttaatcacaccaaccacacccgccgccgcttacgtataaccgatattcgacttaaccgaccccaaccacaacga

SEQ ID NO: 9363 - DNA, 664 bp, Artificial Sequence
  chemically treated genomic DNA (Homo sapiens) CpG-island No: 9363
aggttcgttaaagttttcggttatttttaagtaattgatattttggatcggaaattataaatttcgatgcggttattaagtttttaaagattcggttataaatttagaagttttatgatcggtaagatagggtttttatatcgtataataattttttacggttcgattttagtattatcgatggttaatttagcgtcgatcgtgttaacgttagcgagtattaatattttagcgaggagatattaggtcgttcgtttagataggttattaacgtcgttgtttgcgcggatagcgtttcgggtgttttgttcgatattatttacggtattatcggaatatttacgatagaattcgaattcggtttcgtagattgattcggtattttcgggggttgttcgaggatgacgtgcgcgttagtattattgatttcgaacgacgatatttttattcgacgaatacgattatttttgggttagggcgtgtttttcgtaaggagttgaatcgttttcgtcgattaatttattttcggcgacggcgattttacgtgtaacgtgcgtggtagttgttcgtgtcgtatcgttattattattttgattatattagttatattcgtcgtcgtttgcgtatgatcgatgttcgatttgatcgattttaattataacgg

SEQ ID NO: 9364 - DNA, 664 bp, Artificial Sequence
  chemically treated genomic DNA (Homo sapiens) CpG-island No: 9364
ccgttataattaaaatcgatcaaatcgaacatcgatcatacgcaaacgacgacgaatataactaatataatcaaaataataataacgatacgacacgaacaactaccacgcacgttacacgtaaaatcgccgtcgccgaaaataaattaatcgacgaaaacgattcaactccttacgaaaaacacgccctaacccaaaaataatcgtattcgtcgaataaaaatatcgtcgttcgaaatcaataatactaacgcgcacgtcatcctcgaacaacccccgaaaataccgaatcaatctacgaaaccgaattcgaattctatcgtaaatattccgataataccgtaaataatatcgaacaaaacacccgaaacgctatccgcgcaaacaacgacgttaataacctatctaaacgaacgacctaatatctcctcgctaaaatattaatactcgctaacgttaacacgatcgacgctaaattaaccatcgataatactaaaatcgaaccgtaaaaaattattatacgatataaaaaccctatcttaccgatcataaaacttctaaatttataaccgaatctttaaaaacttaataaccgcatcgaaatttataatttccgatccaaaatatcaattacttaaaaataaccgaaaactttaacgaacct

SEQ ID NO: 9365 - DNA, 873 bp, Artificial Sequence
  chemically treated genomic DNA (Homo sapiens) CpG-island No: 9365
gggtaggcgattgtcggattcgcgcgaagtcgcggggcgagcgcggtttttatttttttttttttttttttttcgtggttcggttttcgttcgttttttagcgtcgtcggttgaggtagtttagttcggggacgcgatttaatatggtgttgttgtcgggggcgcgcgagcgggcgacgggtaaggcgagtcgatggtgaggggtttgggcggttagaggtttaagagtttcggcggcggcggcggcggggttagggtaggcggggttgggggtggggagggggaggtttgtgtggtggtttgtggaaagcgcggtgatagcgtgtatttcggtttcggtttcgcggggttttcgtatatatttacgcgcggtttcggtcgttgaggtcgggcgttttcgggtagaagtatcggcggtagttgagtcgttgcgcgtcgttcgtttgttttttttttcgttagtttttttttttgtcgtcgttacggtttggtagttagtgttatatagcgattttcgagggttggtcgcggtattgcgtttggttttatatcgtttcggtagattttcgcggggaataatagattcgattcgtcgggtttagggttcgtttgtaatgtgtcgtatattttatacgtatataaagtcggcggaaaggggggcggtgcggggaaacggttattatcggttgttttagggttaggggtggaggcgatgtcgcgttttcggttcggttgttggaagggtcgtttcggagttttcgttcgttcgatagaatcggtgtggcgttttgaagggaaaggaagtttatcggggtagttttttatcgtacgtaatatttatagatcggaataaagttaatttgttattttttg

SEQ ID NO: 9366 - DNA, 873 bp, Artificial Sequence
  chemically treated genomic DNA (Homo sapiens) CpG-island No: 9366
caaaaaataacaaattaactttattccgatctataaatattacgtacgataaaaaactaccccgataaacttcctttcccttcaaaacgccacaccgattctatcgaacgaacgaaaactccgaaacgacccttccaacaaccgaaccgaaaacgcgacatcgcctccacccctaaccctaaaacaaccgataataaccgtttccccgcaccgcccccctttccgccgactttatatacgtataaaatatacgacacattacaaacgaaccctaaacccgacgaatcgaatctattattccccgcgaaaatctaccgaaacgatataaaaccaaacgcaataccgcgaccaaccctcgaaaatcgctatataacactaactaccaaaccgtaacgacgacaaaaaaaaaaactaacgaaaaaaaaaacaaacgaacgacgcgcaacgactcaactaccgccgatacttctacccgaaaacgcccgacctcaacgaccgaaaccgcgcgtaaatatatacgaaaaccccgcgaaaccgaaaccgaaatacacgctatcaccgcgctttccacaaaccaccacacaaacctccccctccccacccccaaccccgcctaccctaaccccgccgccgccgccgccgaaactcttaaacctctaaccgcccaaacccctcaccatcgactcgccttacccgtcgcccgctcgcgcgcccccgacaacaacaccatattaaatcgcgtccccgaactaaactacctcaaccgacgacgctaaaaaacgaacgaaaaccgaaccacgaaaaaaaaaaaaaaaaaaaaataaaaaccgcgctcgccccgcgacttcgcgcgaatccgacaatcgcctaccc

SEQ ID NO: 9367 - DNA, 873 bp, Artificial Sequence
  chemically treated genomic DNA (Homo sapiens) CpG-island No: 9367
tagaaggtaataaattgattttatttcgatttgtgaatgttgcgtacggtgaggggttatttcggtgagttttttttttttttagagcgttatatcggttttgtcgggcgggcggggatttcgaggcggtttttttaatagtcgggtcggggacgcgatatcgtttttatttttaattttggaataatcggtagtggtcgttttttcgtatcgttttttttttcgtcggttttgtgtgcgtgtgaaatgtgcggtatattgtagacgaattttaagttcggcgagtcgagtttattgtttttcgcgaggatttgtcggggcggtgtggagttaggcgtagtgtcgcggttagttttcgggggtcgttgtgtggtattggttgttaggtcgtggcggcggtagagagggaggttggcggggagggaagtaggcgggcggcgcgtagcggtttagttgtcgtcggtgtttttgttcggggacgttcggttttagcggtcgaggtcgcgcgtgaatgtgtgcgagggtttcgcggagtcggggtcgaaatatacgttgttatcgcgttttttataaattattatatagatttttttttttttatttttagtttcgtttgttttagtttcgtcgtcgtcgtcgtcgaaatttttgggtttttggtcgtttagattttttattatcggttcgttttgttcgtcgttcgttcgcgcgttttcggtagtagtattatgttgaatcgcgttttcgggttgagttgttttagtcggcggcgttgagaggcgggcgagagtcgggttacggggagggagggaaggaaggggtgggggtcgcgttcgtttcgcggtttcgcgcggattcggtagtcgtttgttt

SEQ ID NO: 9368 - DNA, 873 bp, Artificial Sequence
  chemically treated genomic DNA (Homo sapiens) CpG-island No: 9368
aaacaaacgactaccgaatccgcgcgaaaccgcgaaacgaacgcgacccccaccccttccttccctccctccccgtaacccgactctcgcccgcctctcaacgccgccgactaaaacaactcaacccgaaaacgcgattcaacataatactactaccgaaaacgcgcgaacgaacgacgaacaaaacgaaccgataataaaaaatctaaacgaccaaaaacccaaaaatttcgacgacgacgacgacgaaactaaaacaaacgaaactaaaaataaaaaaaaaaaaatctatataataatttataaaaaacgcgataacaacgtatatttcgaccccgactccgcgaaaccctcgcacacattcacgcgcgacctcgaccgctaaaaccgaacgtccccgaacaaaaacaccgacgacaactaaaccgctacgcgccgcccgcctacttccctccccgccaacctccctctctaccgccgccacgacctaacaaccaataccacacaacgacccccgaaaactaaccgcgacactacgcctaactccacaccgccccgacaaatcctcgcgaaaaacaataaactcgactcgccgaacttaaaattcgtctacaatataccgcacatttcacacgcacacaaaaccgacgaaaaaaaaaacgatacgaaaaaacgaccactaccgattattccaaaattaaaaataaaaacgatatcgcgtccccgacccgactattaaaaaaaccgcctcgaaatccccgcccgcccgacaaaaccgatataacgctctaaaaaaaaaaaaaactcaccgaaataacccctcaccgtacgcaacattcacaaatcgaaataaaatcaatttattaccttcta

SEQ ID NO: 9369 - DNA, 667 bp, Artificial Sequence
  chemically treated genomic DNA (Homo sapiens) CpG-island No: 9369
tacggtcgtgatcgtgattttggtcggtcgttgtggttggggtcggttaagtcgaatatcggttatacgtaagcggcggcgggtgtggttggtgtgattaagatggtgatggcgatgcggtacgggtagttgttacgtacgttgtacgtggaatcgtcgtcgtcggaggtggattggtcggcggggacggtttaattttttacggagaatacgttttggtttaggagtggtcgtgttcgtcgggtgggggtgtcgtcgttcgggattagtggtattaacgcgtacgttattttcgaatagttttcgggagtgtcgagttagtttgcggggtcgggttcgggttttgtcgtggatgtttcggtggtgtcgtggatggtgtcgggtaaaatattcgaagcgttattcgcgtaggtaacggcgttgatgatttatttggacgagcgatttgatgttttttcgttggatgttgggtattcgttggcgttgatacggtcggcgttggatgatcgagcggtggtgttggggtcggatcgttaaagattttttgtgcggtgtgaaagcgttgtttgtcggttatgaggtttttcggtttggtgatcggatttgttcggggttgggggtcgtatcgggtttgtgttttttaggtaaggtggttagtggttgggga

SEQ ID NO: 9370 - DNA, 667 bp, Artificial Sequence
  chemically treated genomic DNA (Homo sapiens) CpG-island No: 9370
tccccaaccactaaccaccttacctaaaaaacacaaacccgatacgacccccaaccccgaacaaatccgatcaccaaaccgaaaaacctcataaccgacaaacaacgctttcacaccgcacaaaaaatctttaacgatccgaccccaacaccaccgctcgatcatccaacgccgaccgtatcaacgccaacgaatacccaacatccaacgaaaaaacatcaaatcgctcgtccaaataaatcatcaacgccgttacctacgcgaataacgcttcgaatattttacccgacaccatccacgacaccaccgaaacatccacgacaaaacccgaacccgaccccgcaaactaactcgacactcccgaaaactattcgaaaataacgtacgcgttaataccactaatcccgaacgacgacacccccacccgacgaacacgaccactcctaaaccaaaacgtattctccgtaaaaaattaaaccgtccccgccgaccaatccacctccgacgacgacgattccacgtacaacgtacgtaacaactacccgtaccgcatcgccatcaccatcttaatcacaccaaccacacccgccgccgcttacgtataaccgatattcgacttaaccgaccccaaccacaacgaccgaccaaaatcacgatcacgaccgta

SEQ ID NO: 9371 - DNA, 667 bp, Artificial Sequence
  chemically treated genomic DNA (Homo sapiens) CpG-island No: 9371
tttttagttattgattattttatttggaaagtataaattcgatgcggtttttagtttcgagtagattcggttattaagtcgagaagttttatgatcggtagatagcgtttttatatcgtataaaaaatttttaacggttcgattttagtattatcgttcggttatttagcgtcgatcgtgttaacgttagcgagtatttaatatttagcgaggagatattaggtcgttcgtttagataggttattaacgtcgttgtttgcgcggatagcgtttcgggtgttttgttcgatattatttacggtattatcggaatatttacgatagaattcgaattcggtttcgtagattgattcggtattttcgggggttgttcgaggatgacgtgcgcgttagtattattgatttcgaacgacgatatttttattcgacgaatacgattatttttgggttagggcgtgtttttcgtaaggagttgaatcgttttcgtcgattaatttattttcggcgacggcgattttacgtgtaacgtgcgtggtagttgttcgtgtcgtatcgttattattattttgattatattagttatattcgtcgtcgtttgcgtatgatcgatgttcgatttgatcgattttaattataacggtcggttaggattacgattacggtcgta

SEQ ID NO: 9372 - DNA, 667 bp, Artificial Sequence
  chemically treated genomic DNA (Homo sapiens) CpG-island No: 9372
tacgaccgtaatcgtaatcctaaccgaccgttataattaaaatcgatcaaatcgaacatcgatcatacgcaaacgacgacgaatataactaatataatcaaaataataataacgatacgacacgaacaactaccacgcacgttacacgtaaaatcgccgtcgccgaaaataaattaatcgacgaaaacgattcaactccttacgaaaaacacgccctaacccaaaaataatcgtattcgtcgaataaaaatatcgtcgttcgaaatcaataatactaacgcgcacgtcatcctcgaacaacccccgaaaataccgaatcaatctacgaaaccgaattcgaattctatcgtaaatattccgataataccgtaaataatatcgaacaaaacacccgaaacgctatccgcgcaaacaacgacgttaataacctatctaaacgaacgacctaatatctcctcgctaaatattaaatactcgctaacgttaacacgatcgacgctaaataaccgaacgataatactaaaatcgaaccgttaaaaattttttatacgatataaaaacgctatctaccgatcataaaacttctcgacttaataaccgaatctactcgaaactaaaaaccgcatcgaatttatactttccaaataaaataatcaataactaaaaa

SEQ ID NO: 9373 - DNA, 569 bp, Artificial Sequence
  chemically treated genomic DNA (Homo sapiens) CpG-island No: 9373
  unsure (151, 248, 308)
ttttgtttgcgtcgttttattttttcggttttttcgagtttttgtcgttttatttcgtttttcgcggtcgtcgttttttgtattcgttttttttcggtttttttcgtttttttttttttttgtttttttttattatttcgttttttttttnttttcgttcgttcgcgtttatatttttttttcgtttttttttcgtttttttttcgcgtttgattttttagtttttttacgttttttcgtatatttanacgttttttttttcgcgtttttttatttttttttttcgagttttcgttgatttcgcgttntcgtacgttcggggttttttcgttatttcgtagtgtttttttcgcgtttatatttttattcgtcgggatttttatatattcgtttttttgcgtttgtcgatggttttcgacgttagttggcgtagtcgggttatttttcgggcgcggttcgttttttcgttgtcggcgttttttttatatattcgttgatgacgggtttttttttaatcgcgttttttatttttatttttttatttttattaatagagcgtaagaacgtat

SEQ ID NO: 9374 - DNA, 569 bp, Artificial Sequence
  chemically treated genomic DNA (Homo sapiens) CpG-island No: 9374
  unsure (262, 322, 419)
atacgttcttacgctctattaataaaaataaaaaaataaaaataaaaaacgcgattaaaaaaaaacccgtcatcaacgaatatataaaaaaaacgccgacaacgaaaaaacgaaccgcgcccgaaaaataacccgactacgccaactaacgtcgaaaaccatcgacaaacgcaaaaaaacgaatatataaaaatcccgacgaataaaaatataaacgcgaaaaaaacactacgaaataacgaaaaaaccccgaacgtacganaacgcgaaatcaacgaaaactcgaaaaaaaaaaataaaaaaacgcgaaaaaaaaaacgtntaaatatacgaaaaaacgtaaaaaaactaaaaaatcaaacgcgaaaaaaaaacgaaaaaaaaacgaaaaaaaaatataaacgcgaacgaacgaaaanaaaaaaaaaacgaaataataaaaaaaaacaaaaaaaaaaaaaaacgaaaaaaaccgaaaaaaaacgaatacaaaaaacgacgaccgcgaaaaacgaaataaaacgacaaaaactcgaaaaaaccgaaaaaataaaacgacgcaaacaaaa

SEQ ID NO: 9375 - DNA, 569 bp, Artificial Sequence
  chemically treated genomic DNA (Homo sapiens) CpG-island No: 9375
  unsure (262, 322, 419)
gtgcgtttttacgttttgttgatgagagtaggggggtgggagtgagaaacgcggttgggggggagttcgttattagcggatgtgtaggaaaggcgtcgataacggaggggcgggtcgcgttcgaagggtggttcgattgcgttagttggcgtcgagggttatcggtaggcgtaagggggcgggtatgtgaggatttcggcgggtgggggtgtgggcgcgggggagatattacgggatggcgggggaatttcgggcgtgcggnagcgcggggttagcggaggttcggggggggaaggtaggggggcgcggggggggggacgtntgggtatgcgggaggacgtgggggagttagaagattaggcgcgggggagggacggggggggggcggggggggggtgtgggcgcgggcgagcgagggnggggagggggcggagtgatggaagggggtaggaaggggggaaagcggggggagtcggggaaggacggatgtaaagagcggcggtcgcggggggcgggataaagcggtaggggttcgagagggtcggggagatagggcgacgtagatagga

SEQ ID NO: 9376 - DNA, 569 bp, Artificial Sequence
  chemically treated genomic DNA (Homo sapiens) CpG-island No: 9376
  unsure (151, 248, 308)
tcctatctacgtcgccctatctccccgaccctctcgaacccctaccgctttatcccgccccccgcgaccgccgctctttacatccgtccttccccgactccccccgctttccccccttcctacccccttccatcactccgccccctccccnccctcgctcgcccgcgcccacaccccccccccgccccccccccgtccctcccccgcgcctaatcttctaactcccccacgtcctcccgcatacccanacgtccccccccccgcgcccccctaccttccccccccgaacctccgctaaccccgcgctnccgcacgcccgaaattcccccgccatcccgtaatatctcccccgcgcccacacccccacccgccgaaatcctcacatacccgcccccttacgcctaccgataaccctcgacgccaactaacgcaatcgaaccacccttcgaacgcgacccgcccctccgttatcgacgcctttcctacacatccgctaataacgaactcccccccaaccgcgtttctcactcccacccccctactctcatcaacaaaacgtaaaaacgcac

SEQ ID NO: 9377 - DNA, 563 bp, Artificial Sequence
  chemically treated genomic DNA (Homo sapiens) CpG-island No: 9377
gtcgcgtcgtttaaagttttttaggttcgcgcgttatagttcgaagtttttagtttttaaatttttggttttgtggggttttcgcgatgtgtgtaggaatgcgagttgaacgtttggtttcgaaacgatttagtttttatttacgtttcgtagttgttgttgttgttgttgttgtttttttattacgttatcggcgtatgtcgtacgttattttcgttttagtttttcggtgtcgtttcggaagtaatttttcgttgatttcgagagttagttcgagtatcgttttgttttggttgcgacgttagtttcgtttttataatttgcgacgtggtcggttttttttgttcggagaggacgttattttcgtcgagtttttgatttgttgttaggatcgcgacgggaattggagttcgaggttttcgcgcggttcgggtttggcgttttgaggggaagagcggttcggttcgaggtgagaggaatatgtttgggcgacgggaagttgaacgtataaatttgtttagagggtaagatgtttcgagtttcggggaaggatgaggatatat

SEQ ID NO: 9378 - DNA, 563 bp, Artificial Sequence
  chemically treated genomic DNA (Homo sapiens) CpG-island No: 9378
atatatcctcatccttccccgaaactcgaaacatcttaccctctaaacaaatttatacgttcaacttcccgtcgcccaaacatattcctctcacctcgaaccgaaccgctcttcccctcaaaacgccaaacccgaaccgcgcgaaaacctcgaactccaattcccgtcgcgatcctaacaacaaatcaaaaactcgacgaaaataacgtcctctccgaacaaaaaaaaccgaccacgtcgcaaattataaaaacgaaactaacgtcgcaaccaaaacaaaacgatactcgaactaactctcgaaatcaacgaaaaattacttccgaaacgacaccgaaaaactaaaacgaaaataacgtacgacatacgccgataacgtaataaaaaaacaacaacaacaacaacaacaactacgaaacgtaaataaaaactaaatcgtttcgaaaccaaacgttcaactcgcattcctacacacatcgcgaaaaccccacaaaaccaaaaatttaaaaactaaaaacttcgaactataacgcgcgaacctaaaaaactttaaacgacgcgac

SEQ ID NO: 9379 - DNA, 563 bp, Artificial Sequence
  chemically treated genomic DNA (Homo sapiens) CpG-island No: 9379
gtgtgtttttattttttttcggggttcggggtattttgttttttggataggtttgtgcgtttaatttttcgtcgtttaagtatgttttttttatttcgggtcgggtcgtttttttttttagggcgttaggttcgggtcgcgcggggatttcgggttttagttttcgtcgcgattttagtagtaggttagggattcggcggaaatgacgtttttttcgggtagaagaagtcggttacgtcgtagattataagggcggagttgacgtcgtagttagggtagggcgatattcgagttagttttcgagattagcgagaggttattttcggggcggtatcgagaagttgaaacggaagtggcgtacggtatgcgtcggtggcgtgatggagaggtagtagtagtagtaatagtaattgcgaaacgtaagtgagaattaagtcgtttcgaggttagacgtttagttcgtatttttgtatatatcgcgggaattttatagggttagggatttgagggttggaaatttcgggttatggcgcgcgggtttgggaaattttgggcggcgcgat

SEQ ID NO: 9380 - DNA, 563 bp, Artificial Sequence
  chemically treated genomic DNA (Homo sapiens) CpG-island No: 9380
atcgcgccgcccaaaatttcccaaacccgcgcgccataacccgaaatttccaaccctcaaatccctaaccctataaaattcccgcgatatatacaaaaatacgaactaaacgtctaacctcgaaacgacttaattctcacttacgtttcgcaattactattactactactactacctctccatcacgccaccgacgcataccgtacgccacttccgtttcaacttctcgataccgccccgaaaataacctctcgctaatctcgaaaactaactcgaatatcgccctaccctaactacgacgtcaactccgcccttataatctacgacgtaaccgacttcttctacccgaaaaaaacgtcatttccgccgaatccctaacctactactaaaatcgcgacgaaaactaaaacccgaaatccccgcgcgacccgaacctaacgccctaaaaaaaaaaacgacccgacccgaaataaaaaaaacatacttaaacgacgaaaaattaaacgcacaaacctatccaaaaaacaaaataccccgaaccccgaaaaaaaataaaaacacac

SEQ ID NO: 9381 - DNA, 525 bp, Artificial Sequence
  chemically treated genomic DNA (Homo sapiens) CpG-island No: 9381
tttcggagtcggaggtagttggcggagattcgggattcgagattcgggattcggttcgtcggttcgtcggttttttagtagtattaaggaggtagcgttcgtaggaggtggaggcgttggcgggggggcgtgcgggtgcggtaggggtgggtaggcggggtgggcggggttttcgcggcggcgggcggggcgtgggtgggttttttttattggagttattttttttttcggtcggttcgtagtttcgtttcggttttttttttcggtttgtgcggttagttcggcggcggcgtcggcgcggggataggcggaggcgcgggtagggtcgggcggacgggcgttggtagtagtagtagcgtcgcgggttttttagagtggtcgtagttcgagttttgttttcgtattttgttttaacgcggtgagtgcgacgggcgggttttaagggtgcgtttgtatttttgttagttcgggtttgggtcggagcgtttgtgggtgggggtatagatgatttttaaaagttgtgtt

SEQ ID NO: 9382 - DNA, 525 bp, Artificial Sequence
  chemically treated genomic DNA (Homo sapiens) CpG-island No: 9382
aacacaacttttaaaaatcatctatacccccacccacaaacgctccgacccaaacccgaactaacaaaaatacaaacgcacccttaaaacccgcccgtcgcactcaccgcgttaaaacaaaatacgaaaacaaaactcgaactacgaccactctaaaaaacccgcgacgctactactactaccaacgcccgtccgcccgaccctacccgcgcctccgcctatccccgcgccgacgccgccgccgaactaaccgcacaaaccgaaaaaaaaaaccgaaacgaaactacgaaccgaccgaaaaaaaaaataactccaataaaaaaaacccacccacgccccgcccgccgccgcgaaaaccccgcccaccccgcctacccacccctaccgcacccgcacgcccccccgccaacgcctccacctcctacgaacgctacctccttaatactactaaaaaaccgacgaaccgacgaaccgaatcccgaatctcgaatcccgaatctccgccaactacctccgactccgaaa

SEQ ID NO: 9383 - DNA, 525 bp, Artificial Sequence
  chemically treated genomic DNA (Homo sapiens) CpG-island No: 9383
ggtatagtttttgaaaattatttgtgtttttatttatagacgtttcgatttagattcgggttgataggaatataaacgtatttttggggttcgttcgtcgtatttatcgcgttggaataggatgcgagggtaaagttcggattgcggttattttgaagggttcgcggcgttgttattgttgttagcgttcgttcgttcggttttgttcgcgttttcgtttgttttcgcgtcggcgtcgtcgtcggattagtcgtataggtcggagggaggggtcggggcggggttgcggatcggtcgggggagggggtgattttagtagggaagatttatttacgtttcgttcgtcgtcgcggaggtttcgtttatttcgtttgtttatttttatcgtattcgtacgttttttcgttaacgtttttattttttgcggacgttgtttttttggtgttgttagggagtcggcgagtcggcgagtcggatttcggatttcggatttcggattttcgttagttgttttcggtttcggga

SEQ ID NO: 9384 - DNA, 525 bp, Artificial Sequence
  chemically treated genomic DNA (Homo sapiens) CpG-island No: 9384
tcccgaaaccgaaaacaactaacgaaaatccgaaatccgaaatccgaaatccgactcgccgactcgccgactccctaacaacaccaaaaaaacaacgtccgcaaaaaataaaaacgttaacgaaaaaacgtacgaatacgataaaaataaacaaacgaaataaacgaaacctccgcgacgacgaacgaaacgtaaataaatcttccctactaaaatcaccccctcccccgaccgatccgcaaccccgccccgacccctccctccgacctatacgactaatccgacgacgacgccgacgcgaaaacaaacgaaaacgcgaacaaaaccgaacgaacgaacgctaacaacaataacaacgccgcgaacccttcaaaataaccgcaatccgaactttaccctcgcatcctattccaacgcgataaatacgacgaacgaaccccaaaaatacgtttatattcctatcaacccgaatctaaatcgaaacgtctataaataaaaacacaaataattttcaaaaactatacc

SEQ ID NO: 9385 - DNA, 515 bp, Artificial Sequence
  chemically treated genomic DNA (Homo sapiens) CpG-island No: 9385
gcgcggcgggagtcgagattcgggggcgcgggggttcggggtcggaggcggcggaggtcggcgtcgtttcggggttcgcgtcggagtcgttgtagtttatcgggtcggtgggagaggcggcgaatagagtcgttttcgttttcgttcgcgtcgcgtatatttcggggtgacgttacgcgtttacgattcgtttcgtttgtttttgttagtgttttttagttcgtttttcgtttttttttatagtggatttgcgggttagaggaaataggttgtagggcggagatcgatttttggcgaattgcgttgtcgtagttatttcgttttagtttttgtcgtgtttcgcggcgatttcgtttagatcggaattagcgtgcgtttggttttttttcgtcgttttgggatattttattttgtttgacgtttaagatttggtttcgatatttatggttttatgtttttcgattacgggttgtttgtttgtttgtatcgttttaagtttttttatttagtttttt

SEQ ID NO: 9386 - DNA, 515 bp, Artificial Sequence
  chemically treated genomic DNA (Homo sapiens) CpG-island No: 9386
aaaaaactaaataaaaaaacttaaaacgatacaaacaaacaaacaacccgtaatcgaaaaacataaaaccataaatatcgaaaccaaatcttaaacgtcaaacaaaataaaatatcccaaaacgacgaaaaaaaaccaaacgcacgctaattccgatctaaacgaaatcgccgcgaaacacgacaaaaactaaaacgaaataactacgacaacgcaattcgccaaaaatcgatctccgccctacaacctatttcctctaacccgcaaatccactataaaaaaaaacgaaaaacgaactaaaaaacactaacaaaaacaaacgaaacgaatcgtaaacgcgtaacgtcaccccgaaatatacgcgacgcgaacgaaaacgaaaacgactctattcgccgcctctcccaccgacccgataaactacaacgactccgacgcgaaccccgaaacgacgccgacctccgccgcctccgaccccgaacccccgcgcccccgaatctcgactcccgccgcgc

SEQ ID NO: 9387 - DNA, 515 bp, Artificial Sequence
  chemically treated genomic DNA (Homo sapiens) CpG-island No: 9387
aaaaggttgaataagggaatttgaaacgatgtagataggtaggtaattcgtagtcgagggatatagggttataaatgtcgaagttaggttttgagcgttagatagaatgaggtgttttagagcggcggaggagagttagacgtacgttggtttcggtttggacggaatcgtcgcggagtacggtagaggttagggcggaatggttacggtagcgtagttcgttaaggatcggttttcgttttgtagtttattttttttaattcgtagatttattatgggaggaggcggggagcgggttggagagtattaatagagataggcggggcgagtcgtgggcgcgtgacgttatttcggggtgtgcgcggcgcgagcggaagcggaagcggttttgttcgtcgttttttttatcggttcgatgagttgtagcggtttcggcgcggatttcgaggcggcgtcggttttcgtcgttttcggtttcgggttttcgcgttttcgggtttcggttttcgtcgcgt

SEQ ID NO: 9388 - DNA, 515 bp, Artificial Sequence
  chemically treated genomic DNA (Homo sapiens) CpG-island No: 9388
acgcgacgaaaaccgaaacccgaaaacgcgaaaacccgaaaccgaaaacgacgaaaaccgacgccgcctcgaaatccgcgccgaaaccgctacaactcatcgaaccgataaaaaaaacgacgaacaaaaccgcttccgcttccgctcgcgccgcgcacaccccgaaataacgtcacgcgcccacgactcgccccgcctatctctattaatactctccaacccgctccccgcctcctcccataataaatctacgaattaaaaaaaataaactacaaaacgaaaaccgatccttaacgaactacgctaccgtaaccattccgccctaacctctaccgtactccgcgacgattccgtccaaaccgaaaccaacgtacgtctaactctcctccgccgctctaaaacacctcattctatctaacgctcaaaacctaacttcgacatttataaccctatatccctcgactacgaattacctacctatctacatcgtttcaaattcccttattcaacctttt

SEQ ID NO: 9389 - DNA, 534 bp, Artificial Sequence
  chemically treated genomic DNA (Homo sapiens) CpG-island No: 9389
ttcgcggtttgaaatagtttttattgttttcgcgagttatttattttgttttgcgaggaggtcgtaggcgaaggtcgtgagattacgggtttaaggttcgcggttattggggtcgtttcggtttatttaggtttttcgaatatgagggtcgggagggtagggtcgtcgagttttcgtttttttttacgtgtatagcgtttttttggaagtcggagcgtttagatttgttagaatcgattcggaaattaaagcgtgatagttaggggttgttagagcggtcggcgcggcgtagcgaattatcgagtttaattaggcgcggttagaagggtagggaggcggtgggaggggagggacggaggttcgcgttgtttaagagcgttacgggcggggcggggtcggcggcgggttgcgggcgcggtcggacgggagtttttcggagaaggattttgtagttcgagtttcggtgagtgcgagaggattcgcgttttttgttattttttattttttttgagttttaagtaaggaacggagtta

SEQ ID NO: 9390 - DNA, 534 bp, Artificial Sequence
  chemically treated genomic DNA (Homo sapiens) CpG-island No: 9390
taactccgttccttacttaaaactcaaaaaaaataaaaaataacaaaaaacgcgaatcctctcgcactcaccgaaactcgaactacaaaatccttctccgaaaaactcccgtccgaccgcgcccgcaacccgccgccgaccccgccccgcccgtaacgctcttaaacaacgcgaacctccgtccctcccctcccaccgcctccctacccttctaaccgcgcctaattaaactcgataattcgctacgccgcgccgaccgctctaacaacccctaactatcacgctttaatttccgaatcgattctaacaaatctaaacgctccgacttccaaaaaaacgctatacacgtaaaaaaaaacgaaaactcgacgaccctaccctcccgaccctcatattcgaaaaacctaaataaaccgaaacgaccccaataaccgcgaaccttaaacccgtaatctcacgaccttcgcctacgacctcctcgcaaaacaaaataaataactcgcgaaaacaataaaaactatttcaaaccgcgaa

SEQ ID NO: 9391 - DNA, 534 bp, Artificial Sequence
  chemically treated genomic DNA (Homo sapiens) CpG-island No: 9391
tggtttcgttttttatttgggatttaggagaagtgaggggtgatagggggcgcgggttttttcgtatttatcgggattcgggttgtaggattttttttcggggaattttcgttcggtcgcgttcgtagttcgtcgtcggtttcgtttcgttcgtggcgtttttgggtagcgcgggttttcgtttttttttttttatcgtttttttgtttttttagtcgcgtttggttaaattcgatggttcgttgcgtcgcgtcggtcgttttagtaatttttggttgttacgttttggttttcgggtcggttttggtaggtttgagcgtttcgatttttagaggagcgttgtgtacgtggagaagagcggggattcggcgattttgttttttcgatttttatgttcgaagagtttgagtgggtcgaggcggttttagtagtcgcgggttttgggttcgtaattttacgattttcgtttgcggttttttcgtaaaataaggtgagtgattcgcgggagtaatgggagttgttttaggtcgcgaa

SEQ ID NO: 9392 - DNA, 534 bp, Artificial Sequence
  chemically treated genomic DNA (Homo sapiens) CpG-island No: 9392
ttcgcgacctaaaacaactcccattactcccgcgaatcactcaccttattttacgaaaaaaccgcaaacgaaaatcgtaaaattacgaacccaaaacccgcgactactaaaaccgcctcgacccactcaaactcttcgaacataaaaatcgaaaaaacaaaatcgccgaatccccgctcttctccacgtacacaacgctcctctaaaaatcgaaacgctcaaacctaccaaaaccgacccgaaaaccaaaacgtaacaaccaaaaattactaaaacgaccgacgcgacgcaacgaaccatcgaatttaaccaaacgcgactaaaaaaacaaaaaaacgataaaaaaaaaaaaacgaaaacccgcgctacccaaaaacgccacgaacgaaacgaaaccgacgacgaactacgaacgcgaccgaacgaaaattccccgaaaaaaaatcctacaacccgaatcccgataaatacgaaaaaacccgcgccccctatcacccctcacttctcctaaatcccaaataaaaaacgaaacca

SEQ ID NO: 9393 - DNA, 819 bp, Artificial Sequence
  chemically treated genomic DNA (Homo sapiens) CpG-island No: 9393
gatagtagttgagggattgcggttcggttttttgttgggttcggtggtagcgttagatttcgcgggtgtgggtgtatttatttatatattggtgggcggtgtcgatttcgagggtattttcgcgttggatgcggttttagggcgtttgtatttggcgcggtttttggatttcgaagttggttcgtcgtggcgcgcgtttacggtacgcgttgaggggtcgggaggcgcgggcgcgcggttgttgcgagtgtaggtgtaagtgtaggacgagaatgagtatgcgttcgtttttgcgcgcgattcgttggcgttggcgttgttagagaattcggagttcggcgtagcgttgtatatttttcgcgcgtcggacgtcgacggtttcggttttaatagcgacgtgcgttatcgtttgttgcgttaggagtcgttcgtgtcggcgtttcgtttggacgcgcgtatcggggcgtttagcgtttcgcgcggtttggatcgagagattattttcgcgttgttgttgttggtggaagttatcgatcggttcgttaacgttagtcgtcgtcgtgtagcgcgcgttttagcgcgcgttttcgttacggatgagaatgataacgcgtttgttttcgtttcgtcgttacgcgtgcgttttttagaggattagtcgtttgggttcgcggttttgtacgtggtagttcgggattcggatttgggcgaggttgtacgcgtgttttatcggttggtatttggcggggacggttattttcggttgtatttaagtattggtgagagttaggtttgggagtgagggcgaggaaggtgttg

SEQ ID NO: 9394 - DNA, 819 bp, Artificial Sequence
  chemically treated genomic DNA (Homo sapiens) CpG-island No: 9394
caacaccttcctcgccctcactcccaaacctaactctcaccaatacttaaatacaaccgaaaataaccgtccccgccaaataccaaccgataaaacacgcgtacaacctcgcccaaatccgaatcccgaactaccacgtacaaaaccgcgaacccaaacgactaatcctctaaaaaacgcacgcgtaacgacgaaacgaaaacaaacgcgttatcattctcatccgtaacgaaaacgcgcgctaaaacgcgcgctacacgacgacgactaacgttaacgaaccgatcgataacttccaccaacaacaacaacgcgaaaataatctctcgatccaaaccgcgcgaaacgctaaacgccccgatacgcgcgtccaaacgaaacgccgacacgaacgactcctaacgcaacaaacgataacgcacgtcgctattaaaaccgaaaccgtcgacgtccgacgcgcgaaaaatatacaacgctacgccgaactccgaattctctaacaacgccaacgccaacgaatcgcgcgcaaaaacgaacgcatactcattctcgtcctacacttacacctacactcgcaacaaccgcgcgcccgcgcctcccgacccctcaacgcgtaccgtaaacgcgcgccacgacgaaccaacttcgaaatccaaaaaccgcgccaaatacaaacgccctaaaaccgcatccaacgcgaaaataccctcgaaatcgacaccgcccaccaatatataaataaatacacccacacccgcgaaatctaacgctaccaccgaacccaacaaaaaaccgaaccgcaatccctcaactactatc

SEQ ID NO: 9395 - DNA, 819 bp, Artificial Sequence
  chemically treated genomic DNA (Homo sapiens) CpG-island No: 9395
tagtatttttttcgtttttatttttagatttaatttttattagtgtttgagtgtagtcggaagtggtcgttttcgttagatgttagtcgataggatacgcgtgtagtttcgtttagattcgggtttcgggttattacgtgtagggtcgcgggtttaggcggttggttttttgggaggcgtacgcgtgacggcgaggcgaagataggcgcgttgttatttttattcgtgacgaagacgcgcgttgaaacgcgcgttgtacgacggcggttggcgttggcgggtcggtcggtggtttttattagtagtagtagcgcgggagtggtttttcggtttaggtcgcgcggagcgttgagcgtttcggtgcgcgcgtttaggcgaagcgtcggtacgggcggtttttggcgtagtaggcggtagcgtacgtcgttattggggtcggggtcgtcggcgttcgacgcgcggaaagtgtatagcgttgcgtcgggtttcgggttttttggtagcgttagcgttagcgggtcgcgcgtaaaggcgggcgtatgtttattttcgttttgtatttgtatttgtattcgtagtagtcgcgcgttcgcgtttttcggttttttagcgcgtatcgtgagcgcgcgttacggcgggttagtttcgaagtttaggggtcgcgttaggtataagcgttttgaggtcgtatttagcgcgaaggtgttttcgggatcggtatcgtttattagtgtgtaggtgagtgtatttatattcgcgggatttggcgttgttatcgagtttaatagagagtcgggtcgtagttttttagttgttgtt

SEQ ID NO: 9396 - DNA, 819 bp, Artificial Sequence
  chemically treated genomic DNA (Homo sapiens) CpG-island No: 9396
aacaacaactaaaaaactacgacccgactctctattaaactcgataacaacgccaaatcccgcgaatataaatacactcacctacacactaataaacgataccgatcccgaaaacaccttcgcgctaaatacgacctcaaaacgcttatacctaacgcgacccctaaacttcgaaactaacccgccgtaacgcgcgctcacgatacgcgctaaaaaaccgaaaaacgcgaacgcgcgactactacgaatacaaatacaaatacaaaacgaaaataaacatacgcccgcctttacgcgcgacccgctaacgctaacgctaccaaaaaacccgaaacccgacgcaacgctatacactttccgcgcgtcgaacgccgacgaccccgaccccaataacgacgtacgctaccgcctactacgccaaaaaccgcccgtaccgacgcttcgcctaaacgcgcgcaccgaaacgctcaacgctccgcgcgacctaaaccgaaaaaccactcccgcgctactactactaataaaaaccaccgaccgacccgccaacgccaaccgccgtcgtacaacgcgcgtttcaacgcgcgtcttcgtcacgaataaaaataacaacgcgcctatcttcgcctcgccgtcacgcgtacgcctcccaaaaaaccaaccgcctaaacccgcgaccctacacgtaataacccgaaacccgaatctaaacgaaactacacgcgtatcctatcgactaacatctaacgaaaacgaccacttccgactacactcaaacactaataaaaattaaatctaaaaataaaaacgaaaaaaatacta

SEQ ID NO: 9397 - DNA, 651 bp, Artificial Sequence
  chemically treated genomic DNA (Homo sapiens) CpG-island No: 9397
gcgagagcggttggttgtattggcggtataggttttttcggagcggttatatgagaatgtatagttggaattggtttttgaggtggacggtttgcggcgatcggtgtttaatttgggcgtattgtttattacgagcgttattgtatacgaaacggtggttacgggagagggtttgcgttaggcgttagtgggttagtttgtttcgtttattgttattattaaagataaggacgggcggttggtgcgtataggtagcgttgagttgcgtgtagagattatcggttcggacggtacgcgtttttcggtgttagtggtggattataagaatggtatatatgagttagtgtatatagcgcgtacggaaggcgagttgtttttttcggtgttgttttacggatagatagtgcgcggtagtttttttcgcgtgcgtgttttgcgttcggggggatttgttatttttttcggacgatgtgaagcgtcgtgttaagttttttggcggtttcgatagttatgtgcgttagaaggtagtgcgtaggtttagttttatgtatagtataggcggtaaacgaaaggataatttaattgaggatgagttcgtttttcgtgttggtatagatagtcgagggtagagttagatgggttaggtttagg

SEQ ID NO: 9398 - DNA, 651 bp, Artificial Sequence
  chemically treated genomic DNA (Homo sapiens) CpG-island No: 9398
cctaaacctaacccatctaactctaccctcgactatctataccaacacgaaaaacgaactcatcctcaattaaattatcctttcgtttaccgcctatactatacataaaactaaacctacgcactaccttctaacgcacataactatcgaaaccgccaaaaaacttaacacgacgcttcacatcgtccgaaaaaaataacaaatccccccgaacgcaaaacacgcacgcgaaaaaaactaccgcgcactatctatccgtaaaacaacaccgaaaaaaacaactcgccttccgtacgcgctatatacactaactcatatataccattcttataatccaccactaacaccgaaaaacgcgtaccgtccgaaccgataatctctacacgcaactcaacgctacctatacgcaccaaccgcccgtccttatctttaataataacaataaacgaaacaaactaacccactaacgcctaacgcaaaccctctcccgtaaccaccgtttcgtatacaataacgctcgtaataaacaatacgcccaaattaaacaccgatcgccgcaaaccgtccacctcaaaaaccaattccaactatacattctcatataaccgctccgaaaaaacctataccgccaatacaaccaaccgctctcgc

SEQ ID NO: 9399 - DNA, 651 bp, Artificial Sequence
  chemically treated genomic DNA (Homo sapiens) CpG-island No: 9399
tttgagtttggtttatttggttttgttttcggttgtttgtattaatacggaagacgagtttatttttaattgggttgttttttcgtttgtcgtttgtgttgtatatggagttgggtttacgtattgttttttggcgtatatggttgtcggggtcgttaggggatttgatacggcgttttatatcgttcggggaaggtggtaggttttttcggacgtagggtacgtacgcggaaggggttgtcgcgtattgtttgttcgtagagtagtatcgagaggagtagttcgtttttcgtgcgcgttgtgtatattagtttatatgtgttatttttgtggtttattattggtatcggaaggcgcgtgtcgttcgggtcggtgatttttgtacgtagtttagcgttgtttgtgcgtattaatcgttcgtttttgtttttggtagtgatagtgagcgaggtaggttggtttattagcgtttggcgtaggttttttttcgtggttatcgtttcgtgtgtagtggcgttcgtggtgagtagtgcgtttagattgagtatcgatcgtcgtagatcgtttattttaaggattagttttagttgtgtatttttatgtggtcgtttcgggaaggtttgtgtcgttaatgtagttagtcgttttcgt

SEQ ID NO: 9400 - DNA, 651 bp, Artificial Sequence
  chemically treated genomic DNA (Homo sapiens) CpG-island No: 9400
acgaaaacgactaactacattaacgacacaaaccttcccgaaacgaccacataaaaatacacaactaaaactaatccttaaaataaacgatctacgacgatcgatactcaatctaaacgcactactcaccacgaacgccactacacacgaaacgataaccacgaaaaaaaacctacgccaaacgctaataaaccaacctacctcgctcactatcactaccaaaaacaaaaacgaacgattaatacgcacaaacaacgctaaactacgtacaaaaatcaccgacccgaacgacacgcgccttccgataccaataataaaccacaaaaataacacatataaactaatatacacaacgcgcacgaaaaacgaactactcctctcgatactactctacgaacaaacaatacgcgacaaccccttccgcgtacgtaccctacgtccgaaaaaacctaccaccttccccgaacgatataaaacgccgtatcaaatcccctaacgaccccgacaaccatatacgccaaaaaacaatacgtaaacccaactccatatacaacacaaacgacaaacgaaaaaacaacccaattaaaaataaactcgtcttccgtattaatacaaacaaccgaaaacaaaaccaaataaaccaaactcaaa

SEQ ID NO: 9401 - DNA, 529 bp, Artificial Sequence
  chemically treated genomic DNA (Homo sapiens) CpG-island No: 9401
  unsure (294)
atattttttttatacgttttcgtacgcgtttttagagatgacgttagtcggaatattttttcgtcgtttttatatgtttaaattacgatagtagtttagattttatatattatcgagtcgatcgacgttcgttatttttcggcgtaatcggtttttttttatgacgggtagtcgtattttttttattttgatttttatttcgtcgtcggtaacgatagttatagtttttcgtttttataaaacgattttaaaatgaattattttaacgattttttttcgttcgtattacgattntttttttttttattatatatatttatttttattattattttttttcgtttcggaattatgttttagatattttttcgattatatttagttagagattttattattatcgaaaaagtatttaatttttaattattattaattattgatttatatcggtttttttcgcgtcgttcgttattttattattattttttatattatcgatattacgggtagttagaaaatattatagttt

SEQ ID NO: 9402 - DNA, 529 bp, Artificial Sequence
  chemically treated genomic DNA (Homo sapiens) CpG-island No: 9402
  unsure (236)
aaactataatattttctaactacccgtaatatcgataatataaaaaataataataaaataacgaacgacgcgaaaaaaaccgatataaatcaataattaataataattaaaaattaaatactttttcgataataataaaatctctaactaaatataatcgaaaaaatatctaaaacataattccgaaacgaaaaaaaataataataaaaataaatatatataataaaaaaaaaaanaatcgtaatacgaacgaaaaaaaatcgttaaaataattcattttaaaatcgttttataaaaacgaaaaactataactatcgttaccgacgacgaaataaaaatcaaaataaaaaaaatacgactacccgtcataaaaaaaaaccgattacgccgaaaaataacgaacgtcgatcgactcgataatatataaaatctaaactactatcgtaatttaaacatataaaaacgacgaaaaaatattccgactaacgtcatctctaaaaacgcgtacgaaaacgtataaaaaaaatat

SEQ ID NO: 9403 - DNA, 529 bp, Artificial Sequence
  chemically treated genomic DNA (Homo sapiens) CpG-island No: 9403
  unsure (236)
gggttgtagtgttttttggttattcgtagtgtcggtggtgtgagaggtggtaatggagtagcgagcggcgcgagggggatcggtatgggttagtggttagtagtggttgaaggttggatattttttcggtggtaatggagtttttgattgggtgtagtcggggggatgtttgaggtatagtttcggggcggaggggggtagtgatggaggtggatgtgtgtggtggggaggggggngatcgtagtgcgggcgagggggaatcgttagagtgatttattttgaagtcgttttgtggaagcggggggttgtgattatcgttgtcggcggcggggtgggagttaagatgggggggatgcggttgttcgttatgggaggagatcggttgcgtcgaggagtggcggacgtcggtcgattcggtggtgtgtgaggtttaggttgttgtcgtggtttgggtatgtgggggcggcgagggggtgtttcgattaacgttatttttgggggcgcgtacgggggcgtatagggggaatgt

SEQ ID NO: 9404 - DNA, 529 bp, Artificial Sequence
  chemically treated genomic DNA (Homo sapiens) CpG-island No: 9404
  unsure (294)
acattccccctatacgcccccgtacgcgcccccaaaaataacgttaatcgaaacaccccctcgccgcccccacatacccaaaccacgacaacaacctaaacctcacacaccaccgaatcgaccgacgtccgccactcctcgacgcaaccgatctcctcccataacgaacaaccgcatcccccccatcttaactcccaccccgccgccgacaacgataatcacaaccccccgcttccacaaaacgacttcaaaataaatcactctaacgattccccctcgcccgcactacgatcncccccctccccaccacacacatccacctccatcactacccccctccgccccgaaactatacctcaaacatccccccgactacacccaatcaaaaactccattaccaccgaaaaaatatccaaccttcaaccactactaaccactaacccataccgatccccctcgcgccgctcgctactccattaccacctctcacaccaccgacactacgaataaccaaaaaacactacaaccc

SEQ ID NO: 9405 - DNA, 749 bp, Artificial Sequence
  chemically treated genomic DNA (Homo sapiens) CpG-island No: 9405
  unsure (663..)
acggtcgtgatcgtgattttggtcggtcgttgtggttggggtcggttaagtcgaatatcggttatacgtaagcggcggcgggtgtggttggtgtgattaagatggtgatggcgatgcggtacgggtagttgttacgtacgttgtacgtggaatcgtcgtcgtcggaggtggattggtcggcggggacggtttaattttttacggagaatacgttttggtttaggagtggtcgtgttcgtcgggtgggggtgtcgtcgttcgggattagtggtattaacgcgtacgttattttcgaatagttttcgggagtgtcgagttagtttgcggggtcgggttcgggttttgtcgtggatgtttcggtggtgtcgtggatggtgtcgggtaaaatattcgaagcgttattcgcgtaggtaacggcgttgatgatttatttggacgagcgatttgatgttttttcgttggatgttgggtattcgttggcgttgatacggtcggcgttggatgagcgagcggtggtgtttgggtcggatcgtgaaacgttgttgtgcggtgtgaaagcgttgtttgtcggttatgaggtttttgggtttggtgatcggatttgtgtggggtttgggggcgtatcggggtttgtgtttttcggttagggttgttagtggtttnnggattggtcggggtttttaacgggtttttttggtgttcgtttttttatttgacgagtttttgtcgagtttgatttatattttggg

SEQ ID NO: 9406 - DNA, 749 bp, Artificial Sequence
  chemically treated genomic DNA (Homo sapiens) CpG-island No: 9406
  unsure (86..)
cccaaaatataaatcaaactcgacaaaaactcgtcaaataaaaaaacgaacaccaaaaaaacccgttaaaaaccccgaccaatccnnaaaccactaacaaccctaaccgaaaaacacaaaccccgatacgcccccaaaccccacacaaatccgatcaccaaacccaaaaacctcataaccgacaaacaacgctttcacaccgcacaacaacgtttcacgatccgacccaaacaccaccgctcgctcatccaacgccgaccgtatcaacgccaacgaatacccaacatccaacgaaaaaacatcaaatcgctcgtccaaataaatcatcaacgccgttacctacgcgaataacgcttcgaatattttacccgacaccatccacgacaccaccgaaacatccacgacaaaacccgaacccgaccccgcaaactaactcgacactcccgaaaactattcgaaaataacgtacgcgttaataccactaatcccgaacgacgacacccccacccgacgaacacgaccactcctaaaccaaaacgtattctccgtaaaaaattaaaccgtccccgccgaccaatccacctccgacgacgacgattccacgtacaacgtacgtaacaactacccgtaccgcatcgccatcaccatcttaatcacaccaaccacacccgccgccgcttacgtataaccgatattcgacttaaccgaccccaaccacaacgaccgaccaaaatcacgatcacgaccgt

SEQ ID NO: 9407 - DNA, 749 bp, Artificial Sequence
  chemically treated genomic DNA (Homo sapiens) CpG-island No: 9407
  unsure (86..)
tttaagatgtgaattaagttcggtaaaagttcgttaaatggagaagcgaatattagaaaagttcgttaaagatttcggttaatttnnaagttattgataattttgatcggaaaatataaatttcgatgcgtttttaagttttatatagattcggttattaaatttagaagttttatgatcggtagatagcgtttttatatcgtataataacgttttacggttcgatttaagtattatcgttcgtttatttagcgtcgatcgtgttaacgttagcgagtatttaatatttagcgaggagatattaggtcgttcgtttagataggttattaacgtcgttgtttgcgcggatagcgtttcgggtgttttgttcgatattatttacggtattatcggaatatttacgatagaattcgaattcggtttcgtagattgattcggtattttcgggggttgttcgaggatgacgtgcgcgttagtattattgatttcgaacgacgatatttttattcgacgaatacgattatttttgggttagggcgtgtttttcgtaaggagttgaatcgttttcgtcgattaatttattttcggcgacggcgattttacgtgtaacgtgcgtggtagttgttcgtgtcgtatcgttattattattttgattatattagttatattcgtcgtcgtttgcgtatgatcgatgttcgatttgatcgattttaattataacggtcggttaggattacgattacggtcgt

SEQ ID NO: 9408 - DNA, 749 bp, Artificial Sequence
  chemically treated genomic DNA (Homo sapiens) CpG-island No: 9408
  unsure (663..)
acgaccgtaatcgtaatcctaaccgaccgttataattaaaatcgatcaaatcgaacatcgatcatacgcaaacgacgacgaatataactaatataatcaaaataataataacgatacgacacgaacaactaccacgcacgttacacgtaaaatcgccgtcgccgaaaataaattaatcgacgaaaacgattcaactccttacgaaaaacacgccctaacccaaaaataatcgtattcgtcgaataaaaatatcgtcgttcgaaatcaataatactaacgcgcacgtcatcctcgaacaacccccgaaaataccgaatcaatctacgaaaccgaattcgaattctatcgtaaatattccgataataccgtaaataatatcgaacaaaacacccgaaacgctatccgcgcaaacaacgacgttaataacctatctaaacgaacgacctaatatctcctcgctaaatattaaatactcgctaacgttaacacgatcgacgctaaataaacgaacgataatacttaaatcgaaccgtaaaacgttattatacgatataaaaacgctatctaccgatcataaaacttctaaatttaataaccgaatctatataaaacttaaaaacgcatcgaaatttatattttccgatcaaaattatcaataacttnnaaattaaccgaaatctttaacgaacttttctaatattcgcttctccatttaacgaacttttaccgaacttaattcacatcttaaa

SEQ ID NO: 9409 - DNA, 932 bp, Artificial Sequence
  chemically treated genomic DNA (Homo sapiens) CpG-island No: 9409
  unsure (425, 510, 729)
cgtgcgcggcggggagggggtagttcggggcgtttcggcgggttttaagggttgattttcgtttcggaagtgcgcgtaaggtttacggttcgtagggggcgttgtcgcgtcgtttagtcgtcgtcgttcgggtcgtttatttcgcgggcgcgtttttacgtagattaacgtcgttcggatcgggattcgttcgcgtagatttttcgggcggattgaggacgtcgtcgttcggggtcgtttttgtgttcgtttttagcgttcgtttagttcgtcgttcgcgtttcggtggcgggttcgacgttcgtatttcgttcgtgtttaggcgtagagttttcgtttcggggagttttttggtcgtcggcgggtttcgcggttcgcgcgttcggcgttttgttcgtcgggtagaggggaaggcggcggtcggnttggggatgggcggttcggttgcgtcgaggggcgtcgggaggtttcgcgcgttgttgttggcgttggtggtcgcggggatttttngcgggcgtttataatttcgattcgtagcgtttcgtgtatttttagggtttcgttgattcgtttttcggttacgtagttttggagtatttttacgataatacgcgttggtgagtgttcgttcgatttcgcgattttggttcgcgcggttatcgtttcggtttttaggttagcgtcgtcgtcgttttttcggttttttttacgtcgtcgtttcgagggggncgatttaaatgttttcgttgcgcgcggttcggtcgtcgggggacggcgggagaagggaggacgtcgttcggggttcgttaaggtcggggtcggcgtttggaggcgggcgggggcgttcgggtgtttttttggggttttagtttagagcgtggggggagagtcgttagagttgtttttttcgtcgtttagttagattcggtttt

SEQ ID NO: 9410 - DNA, 932 bp, Artificial Sequence
  chemically treated genomic DNA (Homo sapiens) CpG-island No: 9410
  unsure (204, 423, 508)
aaaaccgaatctaactaaacgacgaaaaaaacaactctaacgactctccccccacgctctaaactaaaaccccaaaaaaacacccgaacgcccccgcccgcctccaaacgccgaccccgaccttaacgaaccccgaacgacgtcctcccttctcccgccgtcccccgacgaccgaaccgcgcgcaacgaaaacatttaaatcgnccccctcgaaacgacgacgtaaaaaaaaccgaaaaaacgacgacgacgctaacctaaaaaccgaaacgataaccgcgcgaaccaaaatcgcgaaatcgaacgaacactcaccaacgcgtattatcgtaaaaatactccaaaactacgtaaccgaaaaacgaatcaacgaaaccctaaaaatacacgaaacgctacgaatcgaaattataaacgcccgcnaaaaatccccgcgaccaccaacgccaacaacaacgcgcgaaacctcccgacgcccctcgacgcaaccgaaccgcccatccccaanccgaccgccgccttcccctctacccgacgaacaaaacgccgaacgcgcgaaccgcgaaacccgccgacgaccaaaaaactccccgaaacgaaaactctacgcctaaacacgaacgaaatacgaacgtcgaacccgccaccgaaacgcgaacgacgaactaaacgaacgctaaaaacgaacacaaaaacgaccccgaacgacgacgtcctcaatccgcccgaaaaatctacgcgaacgaatcccgatccgaacgacgttaatctacgtaaaaacgcgcccgcgaaataaacgacccgaacgacgacgactaaacgacgcgacaacgccccctacgaaccgtaaaccttacgcgcacttccgaaacgaaaatcaacccttaaaacccgccgaaacgccccgaactaccccctccccgccgcgcacg

SEQ ID NO: 9411 - DNA, 932 bp, Artificial Sequence
  chemically treated genomic DNA (Homo sapiens) CpG-island No: 9411
  unsure (204, 423, 508)
gaagtcgagtttagttgggcggcggaggagataattttagcggttttttttttacgttttgggttgggattttagggaggtattcggacgttttcgttcgtttttaggcgtcgatttcgattttagcgggtttcggacggcgtttttttttttttcgtcgtttttcggcggtcgagtcgcgcgtaacggagatatttaaatcgnttttttcgggacggcggcgtggaagagatcggaaaggcggcggcggcgttggtttgggggtcggggcggtggtcgcgcgggttagggtcgcggagtcgggcgggtatttattagcgcgtgttgtcgtggaaatgttttagaattgcgtagtcgaagaacgagttagcggggttttggaagtgtacggggcgttgcgggtcgaggttgtaggcgttcgtnggggattttcgcgattattagcgttagtagtagcgcgcggagtttttcggcgtttttcggcgtagtcgggtcgtttatttttagntcggtcgtcgtttttttttttgttcggcgagtagggcgtcgagcgcgcgggtcgcggggttcgtcgacggttaggaagtttttcggggcgggagttttgcgtttggatacgggcggaatgcgggcgtcgggttcgttatcggggcgcggacggcgggttgagcgggcgttgaaggcgagtataggggcggtttcgagcggcggcgtttttagttcgttcgagaagtttgcgcgagcgggtttcggttcgggcggcgttggtttgcgtaggggcgcgttcgcgaggtgggcggttcgggcggcggcggttggacggcgcggtagcgttttttgcgggtcgtgagttttgcgcgtattttcggggcgggagttagtttttgggattcgtcggggcgtttcgaattgtttttttttcgtcgcgtacg

SEQ ID NO: 9412 - DNA, 932 bp, Artificial Sequence
  chemically treated genomic DNA (Homo sapiens) CpG-island No: 9412
  unsure (425, 510, 729)
cgtacgcgacgaaaaaaaaacaattcgaaacgccccgacgaatcccaaaaactaactcccgccccgaaaatacgcgcaaaactcacgacccgcaaaaaacgctaccgcgccgtccaaccgccgccgcccgaaccgcccacctcgcgaacgcgcccctacgcaaaccaacgccgcccgaaccgaaacccgctcgcgcaaacttctcgaacgaactaaaaacgccgccgctcgaaaccgcccctatactcgccttcaacgcccgctcaacccgccgtccgcgccccgataacgaacccgacgcccgcattccgcccgtatccaaacgcaaaactcccgccccgaaaaacttcctaaccgtcgacgaaccccgcgacccgcgcgctcgacgccctactcgccgaacaaaaaaaaaaacgacgaccganctaaaaataaacgacccgactacgccgaaaaacgccgaaaaactccgcgcgctactactaacgctaataatcgcgaaaatccccnacgaacgcctacaacctcgacccgcaacgccccgtacacttccaaaaccccgctaactcgttcttcgactacgcaattctaaaacatttccacgacaacacgcgctaataaatacccgcccgactccgcgaccctaacccgcgcgaccaccgccccgacccccaaaccaacgccgccgccgcctttccgatctcttccacgccgccgtcccgaaaaaancgatttaaatatctccgttacgcgcgactcgaccgccgaaaaacgacgaaaaaaaaaaaaacgccgtccgaaacccgctaaaatcgaaatcgacgcctaaaaacgaacgaaaacgtccgaatacctccctaaaatcccaacccaaaacgtaaaaaaaaaaccgctaaaattatctcctccgccgcccaactaaactcgacttc

SEQ ID NO: 9413 - DNA, 1013 bp, Artificial Sequence
  chemically treated genomic DNA (Homo sapiens) CpG-island No: 9413
  unsure (566)
cgtacgttcgtttcgcgtttagttttcgttttatttttttatacgcggagataaaaggtttttatagttaagtagcggttacggtcgtcgggttcgggttagacgtttttttgcgtcgtttttttttaagattttcgtagttatcgtttcgattttcgttcgtcgcgtttattaagttcgtcgcgtagatttcggggtttatcgtaggggtatatacgttcggcggggtagggacgacgttcgggtcggcgttttttttcgcgggattgcgcggcggcgatagtggtttcgcgttcgtttattttcgggcggtcgtggcggtagttttagcggttttttcgtgttttttcgtttttagtagtttcgtatcgtcgtcgtcgtcgttttttttcgcgtttcggtcgagttttcgtttttttttatcgtcgtcgtcgcgggttcggttgcgcgttacgtgatcgcgttacgtgattcggcgcggcgagcggcgtttttttcggcggcgttatcgtttcggtttttatcgtcggtcgttggcgtttttcggtcgtttttttttttcggtntagggttcgcgtttttaacgttatttcgcgggtcgtcgcgtcgttcgttatcggagtcgtcgtttggttcgggttatttgttcgtattttcggcgtcgttatttcgggagattttcgttttcggttcgtatcgcgttacggtgtttaagatgtttatagtgtcgggtttaggtttttagttttttggttcgggacggttttagtattcgggtatcgcgcggtttgcgcgtcgtttgaatttcgtttgagtcggaagtggacgttttagttttattatgttttatagggaaagtcgtcgggagtatagaagcgttgttattatcgattcgcgtagtttttcgggaaaacggttattcgagtggtcgcgatggtaatattttagaggattttttttttagttgtttatggagaaaggatcggatagcgttattttaatttagggaagaa

SEQ ID NO: 9414 - DNA, 1013 bp, Artificial Sequence
  chemically treated genomic DNA (Homo sapiens) CpG-island No: 9414
  unsure (448)
ttcttccctaaattaaaataacgctatccgatcctttctccataaacaactaaaaaaaaaatcctctaaaatattaccatcgcgaccactcgaataaccgttttcccgaaaaactacgcgaatcgataataacaacgcttctatactcccgacgactttccctataaaacataataaaactaaaacgtccacttccgactcaaacgaaattcaaacgacgcgcaaaccgcgcgatacccgaatactaaaaccgtcccgaaccaaaaaactaaaaacctaaacccgacactataaacatcttaaacaccgtaacgcgatacgaaccgaaaacgaaaatctcccgaaataacgacgccgaaaatacgaacaaataacccgaaccaaacgacgactccgataacgaacgacgcgacgacccgcgaaataacgttaaaaacgcgaaccctanaccgaaaaaaaaaaacgaccgaaaaacgccaacgaccgacgataaaaaccgaaacgataacgccgccgaaaaaaacgccgctcgccgcgccgaatcacgtaacgcgatcacgtaacgcgcaaccgaacccgcgacgacgacgataaaaaaaaacgaaaactcgaccgaaacgcgaaaaaaaacgacgacgacgacgatacgaaactactaaaaacgaaaaaacacgaaaaaaccgctaaaactaccgccacgaccgcccgaaaataaacgaacgcgaaaccactatcgccgccgcgcaatcccgcgaaaaaaaacgccgacccgaacgtcgtccctaccccgccgaacgtatatacccctacgataaaccccgaaatctacgcgacgaacttaataaacgcgacgaacgaaaatcgaaacgataactacgaaaatcttaaaaaaaaacgacgcaaaaaaacgtctaacccgaacccgacgaccgtaaccgctacttaactataaaaaccttttatctccgcgtataaaaaaataaaacgaaaactaaacgcgaaacgaacgtacg

SEQ ID NO: 9415 - DNA, 1013 bp, Artificial Sequence
  chemically treated genomic DNA (Homo sapiens) CpG-island No: 9415
  unsure (448)
tttttttttgagttaaaatgacgttattcggttttttttttatggataattgaagaagagattttttgggatgttattatcgcggttattcgggtgatcgttttttcggggagttgcgcgggtcggtggtgatagcgtttttgtgttttcggcggttttttttgtaagatataatgggattgggacgtttattttcggtttaaacgaagtttagacggcgcgtaagtcgcgcggtgttcgggtgttgaggtcgtttcgagttaggagattggaggtttaggttcggtattgtgggtattttgggtatcgtggcgcggtgcgggtcgggggcgggggtttttcggggtggcgacgtcgggggtgcgagtaggtggttcgggttaggcggcggtttcggtggcgggcggcgcggcggttcgcggggtggcgttggggacgcgagttttgngtcggggagggagggcggtcggggggcgttaacggtcggcggtgggggtcggggcggtagcgtcgtcgggggaggcgtcgttcgtcgcgtcgggttacgtggcgcggttacgtggcgcgtagtcgggttcgcggcggcggcggtgaaggaaggcggagattcggtcgagacgcggggggaggcggcggcggcggcgatgcggggttgttggaggcggagaggtacggaggagtcgttggggttgtcgttacggtcgttcggaggtgagcgggcgcggggttattgtcgtcgtcgcgtagtttcgcgggagggggcgtcggttcgagcgtcgtttttgtttcgtcgggcgtgtgtgtttttgcggtgggtttcggggtttgcgcggcgggtttggtgggcgcggcgggcgggggtcggggcggtggttgcgggagttttgggagggggcggcgtaagggggcgtttgattcgggttcggcggtcgtggtcgttgtttggttgtgggagttttttgttttcgcgtgtgagaaaatggggcgaaagttgagcgcggggcgggcgtgcg

SEQ ID NO: 9416 - DNA, 1013 bp, Artificial Sequence
  chemically treated genomic DNA (Homo sapiens) CpG-island No: 9416
  unsure (566)
cgcacgcccgccccgcgctcaactttcgccccattttctcacacgcgaaaacaaaaaactcccacaaccaaacaacgaccacgaccgccgaacccgaatcaaacgcccccttacgccgccccctcccaaaactcccgcaaccaccgccccgacccccgcccgccgcgcccaccaaacccgccgcgcaaaccccgaaacccaccgcaaaaacacacacgcccgacgaaacaaaaacgacgctcgaaccgacgccccctcccgcgaaactacgcgacgacgacaataaccccgcgcccgctcacctccgaacgaccgtaacgacaaccccaacgactcctccgtacctctccgcctccaacaaccccgcatcgccgccgccgccgcctccccccgcgtctcgaccgaatctccgccttccttcaccgccgccgccgcgaacccgactacgcgccacgtaaccgcgccacgtaacccgacgcgacgaacgacgcctcccccgacgacgctaccgccccgacccccaccgccgaccgttaacgccccccgaccgccctccctccccgacncaaaactcgcgtccccaacgccaccccgcgaaccgccgcgccgcccgccaccgaaaccgccgcctaacccgaaccacctactcgcacccccgacgtcgccaccccgaaaaacccccgcccccgacccgcaccgcgccacgatacccaaaatacccacaataccgaacctaaacctccaatctcctaactcgaaacgacctcaacacccgaacaccgcgcgacttacgcgccgtctaaacttcgtttaaaccgaaaataaacgtcccaatcccattatatcttacaaaaaaaaccgccgaaaacacaaaaacgctatcaccaccgacccgcgcaactccccgaaaaaacgatcacccgaataaccgcgataataacatcccaaaaaatctcttcttcaattatccataaaaaaaaaaccgaataacgtcattttaactcaaaaaaaaa

SEQ ID NO: 9417 - DNA, 505 bp, Artificial Sequence
  chemically treated genomic DNA (Homo sapiens) CpG-island No: 9417
cgtttagtcgagcgttagttggtcggttcggttcgcgcgttagacggcggtgttcggtcgtgttcggtttttgttttttttatttttcgttttttatcgcgtttagttgcgtcgacgttttcgttcgtttttatattatttttgtttttacgttttatttgtcggtaggcggatttagttcgtgtttaattgttcgtcggatttcgttgtttggggagttttatttttttcgcggttttcggtcgggattttttattcggcggttggcggttcgtgatttcgttttttcggttcgttttgggttcgtttttcgtcggttggttttatttataatagcgtttttagcgcgatggcgtatcggcgtaggcgtattttgtcggtaacgtcgaggcgtttttgtatttgtgggtcgaggtgtgtggcgagcgttcgagcggttggggaaagtggggtgtgggaatattgaggggttttaaagaaaggggagaggaagagaaaagtttta

SEQ ID NO: 9418 - DNA, 505 bp, Artificial Sequence
  chemically treated genomic DNA (Homo sapiens) CpG-island No: 9418
taaaacttttctcttcctctcccctttctttaaaacccctcaatattcccacaccccactttccccaaccgctcgaacgctcgccacacacctcgacccacaaatacaaaaacgcctcgacgttaccgacaaaatacgcctacgccgatacgccatcgcgctaaaaacgctattataaataaaaccaaccgacgaaaaacgaacccaaaacgaaccgaaaaaacgaaatcacgaaccgccaaccgccgaataaaaaatcccgaccgaaaaccgcgaaaaaaataaaactccccaaacaacgaaatccgacgaacaattaaacacgaactaaatccgcctaccgacaaataaaacgtaaaaacaaaaataatataaaaacgaacgaaaacgtcgacgcaactaaacgcgataaaaaacgaaaaataaaaaaaacaaaaaccgaacacgaccgaacaccgccgtctaacgcgcgaaccgaaccgaccaactaacgctcgactaaacg

SEQ ID NO: 9419 - DNA, 505 bp, Artificial Sequence
  chemically treated genomic DNA (Homo sapiens) CpG-island No: 9419
tggggttttttttttttttttttttttttttgggattttttagtgtttttatattttattttttttagtcgttcggacgttcgttatatatttcggtttatagatgtagaagcgtttcggcgttgtcggtagagtgcgtttgcgtcgatacgttatcgcgttagggacgttattgtgggtggagttagtcggcgggaggcgggtttagagcgggtcgagggggcggggttacgagtcgttagtcgtcgggtggagggtttcggtcgggagtcgcggaaagagtagggttttttagataacggggttcgacgagtagttgggtacgggttgagttcgtttgtcggtaggtaggacgtgaaggtaggggtggtgtgggggcggacgggggcgtcggcgtagttgggcgcggtggggagcggagaatggggagggtagggatcgggtacggtcgagtatcgtcgtttggcgcgcggatcggatcgattagttgacgttcggttgggcg

SEQ ID NO: 9420 - DNA, 505 bp, Artificial Sequence
  chemically treated genomic DNA (Homo sapiens) CpG-island No: 9420
cgcccaaccgaacgtcaactaatcgatccgatccgcgcgccaaacgacgatactcgaccgtacccgatccctaccctccccattctccgctccccaccgcgcccaactacgccgacgcccccgtccgcccccacaccacccctaccttcacgtcctacctaccgacaaacgaactcaacccgtacccaactactcgtcgaaccccgttatctaaaaaaccctactctttccgcgactcccgaccgaaaccctccacccgacgactaacgactcgtaaccccgccccctcgacccgctctaaacccgcctcccgccgactaactccacccacaataacgtccctaacgcgataacgtatcgacgcaaacgcactctaccgacaacgccgaaacgcttctacatctataaaccgaaatatataacgaacgtccgaacgactaaaaaaaataaaatataaaaacactaaaaaatcccaaaaaaaaaaaaaaaaaaaaaaaaaacccca

SEQ ID NO: 9421 - DNA, 915 bp, Artificial Sequence
  chemically treated genomic DNA (Homo sapiens) CpG-island No: 9421
gggtattgttttatatcgtaattttcgttagagtagtcgttttcgtatatatatcgtttatttaggtattggtcgcggtttcggtagttttcggggtagttgcgcgtgttgtagtttttttttgagtagtttgcgttatatacgtatacgttattttcgtaaaggtcgtgtttacggtagttttcgggatagcgacggtttttatagtttttatcggtgaagttcgggttgtatacgtagtggttatttacgtagcgttcgcgttcgcgatagtcgttaggataggcgcgcgtgtcgtagtttcggtttgtgtatttcggttaatatatgtagcggttatttttatagcggtttcggttacgatagtttttaggatagttgcgtatatcgtagttttcgtcgttgtagttcgtattgtaaatatatacgtcgttttcgtagcgttcgcgatttttatagtcgcgtgggtaggcgcgcgagtcgtaatcggttttagtgtatttcggttagtatacgtagcggtcgttttcgtagcggtttttttggttgtagtcgttagggtagttgcgtacgtcgtagtcgttttcgttgtagttcgtgtcgtaaatgtattcgtcgttttcgtagcgttcgcggtttcggtagtttttcggatatgttcgcgtgttgtagttttcgtttgtgtattcgggttagtatacgtagcggtcgtttacgtagcgttcgttttcgttatagttttaggggtagtttcgcgtattatagttttcgttagtgtagtcggggttatatacgtagcgttcgtttttgtagcgttttcgttggttgtagtttcgagggtagttttttattttatagttttcgttagtgtagtcggggttatatacgtagcgtttatttttatagcgttttttt

SEQ ID NO: 9422 - DNA, 915 bp, Artificial Sequence
  chemically treated genomic DNA (Homo sapiens) CpG-island No: 9422
aaaaaaacgctataaaaataaacgctacgtatataaccccgactacactaacgaaaactataaaataaaaaactaccctcgaaactacaaccaacgaaaacgctacaaaaacgaacgctacgtatataaccccgactacactaacgaaaactataatacgcgaaactacccctaaaactataacgaaaacgaacgctacgtaaacgaccgctacgtatactaacccgaatacacaaacgaaaactacaacacgcgaacatatccgaaaaactaccgaaaccgcgaacgctacgaaaacgacgaatacatttacgacacgaactacaacgaaaacgactacgacgtacgcaactaccctaacgactacaaccaaaaaaaccgctacgaaaacgaccgctacgtatactaaccgaaatacactaaaaccgattacgactcgcgcgcctacccacgcgactataaaaatcgcgaacgctacgaaaacgacgtatatatttacaatacgaactacaacgacgaaaactacgatatacgcaactatcctaaaaactatcgtaaccgaaaccgctataaaaataaccgctacatatattaaccgaaatacacaaaccgaaactacgacacgcgcgcctatcctaacgactatcgcgaacgcgaacgctacgtaaataaccactacgtatacaacccgaacttcaccgataaaaactataaaaaccgtcgctatcccgaaaactaccgtaaacacgacctttacgaaaataacgtatacgtatataacgcaaactactcaaaaaaaaactacaacacgcgcaactaccccgaaaactaccgaaaccgcgaccaatacctaaataaacgatatatatacgaaaacgactactctaacgaaaattacgatataaaacaataccc

SEQ ID NO: 9423 - DNA, 915 bp, Artificial Sequence
  chemically treated genomic DNA (Homo sapiens) CpG-island No: 9423
gagggggcgttgtgagaatgggcgttgcgtgtgtaatttcggttatattggcgaggattgtggggtgaggagttgttttcggggttgtagttagcggggacgttgtaaggacgggcgttgcgtgtgtgatttcggttatattggcgaggattgtggtacgcggagttgtttttgggattgtggcgagggcgggcgttgcgtggacggtcgttgcgtgtgttggttcgggtatataggcgaggattgtagtacgcggatatgttcgagggattgtcggggtcgcgggcgttgcgaggacggcgaatgtatttgcgatacgggttatagcggggacgattgcggcgtgcgtagttgttttggcgattgtaattaaaggggtcgttgcgaggacggtcgttgcgtgtgttggtcggggtatattggaatcgattgcggttcgcgcgtttgtttacgcgattgtagaggtcgcgggcgttgcgagaacggcgtgtgtgtttgtaatgcgggttatagcggcgaggattgcggtgtgcgtagttgttttggggattgtcgtggtcggggtcgttgtgagagtggtcgttgtatgtgttggtcggggtatataggtcgggattgcggtacgcgcgtttgttttggcgattgtcgcgggcgcgggcgttgcgtggatggttattgcgtgtgtaattcgggttttatcggtgaggattgtgggagtcgtcgttgtttcggggattgtcgtgggtacggtttttgcgaggatggcgtgtgcgtgtgtgacgtaggttatttaggggaagattgtagtacgcgtagttgtttcgggggttgtcgaggtcgcggttagtgtttagatgggcggtgtgtgtgcgaggacggttattttggcgaggattgcggtgtgaggtagtgttt

SEQ ID NO: 9424 - DNA, 915 bp, Artificial Sequence
  chemically treated genomic DNA (Homo sapiens) CpG-island No: 9424
aaacactacctcacaccgcaatcctcgccaaaataaccgtcctcgcacacacaccgcccatctaaacactaaccgcgacctcgacaacccccgaaacaactacgcgtactacaatcttcccctaaataacctacgtcacacacgcacacgccatcctcgcaaaaaccgtacccacgacaatccccgaaacaacgacgactcccacaatcctcaccgataaaacccgaattacacacgcaataaccatccacgcaacgcccgcgcccgcgacaatcgccaaaacaaacgcgcgtaccgcaatcccgacctatataccccgaccaacacatacaacgaccactctcacaacgaccccgaccacgacaatccccaaaacaactacgcacaccgcaatcctcgccgctataacccgcattacaaacacacacgccgttctcgcaacgcccgcgacctctacaatcgcgtaaacaaacgcgcgaaccgcaatcgattccaatataccccgaccaacacacgcaacgaccgtcctcgcaacgacccctttaattacaatcgccaaaacaactacgcacgccgcaatcgtccccgctataacccgtatcgcaaatacattcgccgtcctcgcaacgcccgcgaccccgacaatccctcgaacatatccgcgtactacaatcctcgcctatatacccgaaccaacacacgcaacgaccgtccacgcaacgcccgccctcgccacaatcccaaaaacaactccgcgtaccacaatcctcgccaatataaccgaaatcacacacgcaacgcccgtccttacaacgtccccgctaactacaaccccgaaaacaactcctcaccccacaatcctcgccaatataaccgaaattacacacgcaacgcccattctcacaacgccccctc

SEQ ID NO: 9425 - DNA, 685 bp, Artificial Sequence
  chemically treated genomic DNA (Homo sapiens) CpG-island No: 9425
gcggagaagaaaagaaggcggagtttgtcgatttggaggcggggttttgttagagttggggcggtgtttatagaggaggcggggttttagggattaaatcgaggttgttcggttgggggcgttatattttgagggtgagggggtttggagcgattgagggttcggcgtttggtcgggatttcggaaagcggcgtttttgggggtgtgggttttggaggggtttttgaggaattggatttcgagtttgttcgtaaggcgagacgtttcgtggaggcggagtttacgatgtatttaagtttgacggttttagaaacgggtgtgtagggcgtttattgggttcgcggtatgattgtagaaagagtttgggagatcgaggggcgtagagtggggtcggattaggggcgtttttagggattttagtagttttcgtggtgttgcgcggcgatgatgatgattacggtgaggatggtatagagtattatggtcgcgatgtttacggttagggagatgaaggagaagtttcgggtttcgcgtgaagcgatttcggtcgatattatgttttcgcgggttaaggtcgtgcgtatttacggaggaggggtgggggaaggaggttaaagagttgcggtttcgttcgaacgttttagtttttttttaagatggtttttagaacgtttagaattttttg

SEQ ID NO: 9426 - DNA, 685 bp, Artificial Sequence
  chemically treated genomic DNA (Homo sapiens) CpG-island No: 9426
caaaaaattctaaacgttctaaaaaccatcttaaaaaaaaactaaaacgttcgaacgaaaccgcaactctttaacctccttcccccacccctcctccgtaaatacgcacgaccttaacccgcgaaaacataatatcgaccgaaatcgcttcacgcgaaacccgaaacttctccttcatctccctaaccgtaaacatcgcgaccataatactctataccatcctcaccgtaatcatcatcatcgccgcgcaacaccacgaaaactactaaaatccctaaaaacgcccctaatccgaccccactctacgcccctcgatctcccaaactctttctacaatcataccgcgaacccaataaacgccctacacacccgtttctaaaaccgtcaaacttaaatacatcgtaaactccgcctccacgaaacgtctcgccttacgaacaaactcgaaatccaattcctcaaaaacccctccaaaacccacacccccaaaaacgccgctttccgaaatcccgaccaaacgccgaaccctcaatcgctccaaaccccctcaccctcaaaatataacgcccccaaccgaacaacctcgatttaatccctaaaaccccgcctcctctataaacaccgccccaactctaacaaaaccccgcctccaaatcgacaaactccgccttcttttcttctccgc

SEQ ID NO: 9427 - DNA, 685 bp, Artificial Sequence
  chemically treated genomic DNA (Homo sapiens) CpG-island No: 9427
tagggagttttgggcgttttggggattattttagagaaaggttgaggcgttcgaacgaggtcgtagttttttgattttttttttttatttttttttcgtaggtgcgtacggttttggttcgcggagatatggtgtcggtcgagatcgttttacgcgaggttcggaattttttttttatttttttggtcgtgggtatcgcggttatggtgttttgtattatttttatcgtagttattattatcgtcgcgtagtattacgagaattattgggatttttaaaaacgtttttggttcggttttattttgcgtttttcgattttttaggttttttttgtagttatatcgcggatttaatgggcgttttgtatattcgtttttggggtcgttagatttggatatatcgtaaatttcgtttttacggaacgtttcgttttgcgagtaagttcggaatttagttttttaggaatttttttaaaatttatatttttagggacgtcgtttttcgggatttcggttaaacgtcggatttttagtcgttttaggtttttttatttttaaagtgtagcgtttttaatcgagtaatttcggtttggtttttaaaatttcgttttttttataagtatcgttttagttttgataaaatttcgtttttaggtcggtaggtttcgtttttttttttttttcgt

SEQ ID NO: 9428 - DNA, 685 bp, Artificial Sequence
  chemically treated genomic DNA (Homo sapiens) CpG-island No: 9428
acgaaaaaaaaaaaaaaacgaaacctaccgacctaaaaacgaaattttatcaaaactaaaacgatacttataaaaaaaacgaaattttaaaaaccaaaccgaaattactcgattaaaaacgctacactttaaaaataaaaaaacctaaaacgactaaaaatccgacgtttaaccgaaatcccgaaaaacgacgtccctaaaaatataaattttaaaaaaattcctaaaaaactaaattccgaacttactcgcaaaacgaaacgttccgtaaaaacgaaatttacgatatatccaaatctaacgaccccaaaaacgaatatacaaaacgcccattaaatccgcgatataactacaaaaaaaacctaaaaaatcgaaaaacgcaaaataaaaccgaaccaaaaacgtttttaaaaatcccaataattctcgtaatactacgcgacgataataataactacgataaaaataatacaaaacaccataaccgcgatacccacgaccaaaaaaataaaaaaaaaattccgaacctcgcgtaaaacgatctcgaccgacaccatatctccgcgaaccaaaaccgtacgcacctacgaaaaaaaaataaaaaaaaaaaatcaaaaaactacgacctcgttcgaacgcctcaacctttctctaaaataatccccaaaacgcccaaaactcccta

SEQ ID NO: 9429 - DNA, 534 bp, Artificial Sequence
  chemically treated genomic DNA (Homo sapiens) CpG-island No: 9429
cgcggtacggtgtaggatttggagcgttatttgcgggtttacggttatttattgcgggttaattagatttatacgtcggtggcgcgttatatttatgaatatttgtagcggcgtttgttggtcgtcgttttagtcggttttttcgtattttcgtttcgttattttcgttttatcgttagttttgatttcggtattaggaaacgggattttaattagggaatttacggtttttcgtttgaaggcgtcgatcgggtggttgcgtttcgttattttaagttagaggtgttgggtagtttcgtcgatggcgcgtttttcgtgtttttcgacgggtttcgcggttagttcgagcgcgtggtgttgcgttggcggttttagtcgtttgtagagggtttcggcggtgagttgattgtgtcgggtattacgcgtatcgttagtttgttcgattttaggttcggtattatttattacgtggaggtttacggggtgcgggcggggtagatttttaagttttacgtttttattattattataggt

SEQ ID NO: 9430 - DNA, 534 bp, Artificial Sequence
  chemically treated genomic DNA (Homo sapiens) CpG-island No: 9430
acctataataataataaaaacgtaaaacttaaaaatctaccccgcccgcaccccgtaaacctccacgtaataaataataccgaacctaaaatcgaacaaactaacgatacgcgtaatacccgacacaatcaactcaccgccgaaaccctctacaaacgactaaaaccgccaacgcaacaccacgcgctcgaactaaccgcgaaacccgtcgaaaaacacgaaaaacgcgccatcgacgaaactacccaacacctctaacttaaaataacgaaacgcaaccacccgatcgacgccttcaaacgaaaaaccgtaaattccctaattaaaatcccgtttcctaataccgaaatcaaaactaacgataaaacgaaaataacgaaacgaaaatacgaaaaaaccgactaaaacgacgaccaacaaacgccgctacaaatattcataaatataacgcgccaccgacgtataaatctaattaacccgcaataaataaccgtaaacccgcaaataacgctccaaatcctacaccgtaccgcg

SEQ ID NO: 9431 - DNA, 534 bp, Artificial Sequence
  chemically treated genomic DNA (Homo sapiens) CpG-island No: 9431
atttgtggtggtgatgaaggcgtaggatttggaggtttgtttcgttcgtatttcgtggatttttacgtggtaggtggtgtcgggtttgaggtcgggtaggttgacggtgcgcgtggtgttcggtatagttagtttatcgtcggggttttttgtaggcggttgaggtcgttagcgtagtattacgcgttcgaattggtcgcggagttcgtcgagagatacgagaagcgcgttatcggcggaattgtttagtatttttggtttggggtggcgggacgtagttattcggtcgacgtttttaggcgagaggtcgtagattttttggttggagtttcgttttttggtgtcgggattagggttggcggtggggcgggggtggcggggcgggggtgcgggggagtcggttggggcggcggttaatagacgtcgttgtaagtatttatggatgtggcgcgttatcgacgtgtaagtttggttggttcgtagtgggtagtcgtgagttcgtaggtggcgttttaggttttgtatcgtgtcgcg

SEQ ID NO: 9432 - DNA, 534 bp, Artificial Sequence
  chemically treated genomic DNA (Homo sapiens) CpG-island No: 9432
cgcgacacgatacaaaacctaaaacgccacctacgaactcacgactacccactacgaaccaaccaaacttacacgtcgataacgcgccacatccataaatacttacaacgacgtctattaaccgccgccccaaccgactcccccgcacccccgccccgccacccccgccccaccgccaaccctaatcccgacaccaaaaaacgaaactccaaccaaaaaatctacgacctctcgcctaaaaacgtcgaccgaataactacgtcccgccaccccaaaccaaaaatactaaacaattccgccgataacgcgcttctcgtatctctcgacgaactccgcgaccaattcgaacgcgtaatactacgctaacgacctcaaccgcctacaaaaaaccccgacgataaactaactataccgaacaccacgcgcaccgtcaacctacccgacctcaaacccgacaccacctaccacgtaaaaatccacgaaatacgaacgaaacaaacctccaaatcctacgccttcatcaccaccacaaat

SEQ ID NO: 9433 - DNA, 601 bp, Artificial Sequence
  chemically treated genomic DNA (Homo sapiens) CpG-island No: 9433
gttatttttggcggcgcgggaaggagcggtggaagtagtttagttattgttggggttgggggtagttcgagagttgcgggattaggttgggttagcgtcggcggacgtcgtttattaacgtaattattgggatttgttgacgttgttggaaggggttgggttattagaggttcgttataaagttacgtcgggtcgcgaggttgggtttttttcgcgcgtacggacggtgttagtaagcgtgttttcgtatgggggcggggttttgtcgcgttgtcggacgttgttagtcggagtaggttttcgtgggggcggagtttgtttgtaggttcggatttggttcgtagatttggttgcgcgggggggcggggtttatttttattgtcggagtttttcgggagtaggagtaggaggaggttcgatttttcgcggtcgtaggttttttgtaggtatgcgcgggtttcggtttaattttgcgataatgcgaggaagatacggagtggttgtcgggcgcggaggtagggttttaacggatgattggttttgtgattgggtggttttgggagtttgcggttttgtttttaatatttcgatttcgtttttt

SEQ ID NO: 9434 - DNA, 601 bp, Artificial Sequence
  chemically treated genomic DNA (Homo sapiens) CpG-island No: 9434
aaaaaacgaaatcgaaatattaaaaacaaaaccgcaaactcccaaaaccacccaatcacaaaaccaatcatccgttaaaaccctacctccgcgcccgacaaccactccgtatcttcctcgcattatcgcaaaattaaaccgaaacccgcgcatacctacaaaaaacctacgaccgcgaaaaatcgaacctcctcctactcctactcccgaaaaactccgacaataaaaataaaccccgcccccccgcgcaaccaaatctacgaaccaaatccgaacctacaaacaaactccgcccccacgaaaacctactccgactaacaacgtccgacaacgcgacaaaaccccgcccccatacgaaaacacgcttactaacaccgtccgtacgcgcgaaaaaaacccaacctcgcgacccgacgtaactttataacgaacctctaataacccaaccccttccaacaacgtcaacaaatcccaataattacgttaataaacgacgtccgccgacgctaacccaacctaatcccgcaactctcgaactacccccaaccccaacaataactaaactacttccaccgctccttcccgcgccgccaaaaataac

SEQ ID NO: 9435 - DNA, 601 bp, Artificial Sequence
  chemically treated genomic DNA (Homo sapiens) CpG-island No: 9435
aggaggcgggatcggaatgttggaggtagaatcgtaagtttttagggttatttaattatagggttagttattcgttgagattttgttttcgcgttcggtagttatttcgtatttttttcgtattatcgtagggttgggtcgaggttcgcgtatgtttgtagaaaatttacggtcgcgaggggtcgggtttttttttgtttttattttcgagaggtttcggtaatgagaataggtttcgttttttcgcgtagttaagtttacggattaagttcgagtttgtagataagtttcgtttttacgagggtttgtttcggttgatagcgttcggtagcgcggtagagtttcgtttttatgcgggggtacgtttattgatatcgttcgtgcgcgcgggaagggtttagtttcgcggttcggcgtggttttgtgacgggtttttggtggtttagttttttttagtagcgttagtagattttagtggttacgttggtgagcgacgttcgtcggcgttagtttagtttggtttcgtagttttcgggttgtttttagttttagtagtagttgggttatttttatcgttttttttcgcgtcgttaggaatagt

SEQ ID NO: 9436 - DNA, 601 bp, Artificial Sequence
  chemically treated genomic DNA (Homo sapiens) CpG-island No: 9436
actattcctaacgacgcgaaaaaaaacgataaaaataacccaactactactaaaactaaaaacaacccgaaaactacgaaaccaaactaaactaacgccgacgaacgtcgctcaccaacgtaaccactaaaatctactaacgctactaaaaaaaactaaaccaccaaaaacccgtcacaaaaccacgccgaaccgcgaaactaaacccttcccgcgcgcacgaacgatatcaataaacgtacccccgcataaaaacgaaactctaccgcgctaccgaacgctatcaaccgaaacaaaccctcgtaaaaacgaaacttatctacaaactcgaacttaatccgtaaacttaactacgcgaaaaaacgaaacctattctcattaccgaaacctctcgaaaataaaaacaaaaaaaaacccgacccctcgcgaccgtaaattttctacaaacatacgcgaacctcgacccaaccctacgataatacgaaaaaaatacgaaataactaccgaacgcgaaaacaaaatctcaacgaataactaaccctataattaaataaccctaaaaacttacgattctacctccaacattccgatcccgcctcct

SEQ ID NO: 9437 - DNA, 608 bp, Artificial Sequence
  chemically treated genomic DNA (Homo sapiens) CpG-island No: 9437
ttcgcgcgtagaaggatcgttcgttattttattttttttatagttttaagtcgcgtggattttttttagacggtcggagtttttttttcgttttttttattcggtttcggcgtcgggttttttttcgttttaggaagttcgtttttttagttagcggtttcgattgtattggtttcgcggtagttttggtttaggcggttagcgttggatagcggtcggggaatttcgtgttgcgcggcgcggtcgaggggcgggtttggttcggagagtatcgcggtttcggttttttgtcgtgcgtttcgcgcgttttgtatcgttgagcgaagtagagacgtaaggaaatggtagtagagcgcggggcgagggtagaggggagttattttttttagagtttgggttggttgggttttcggtattttcggacgtgcgttaggtttttattttgaagacgcgttcgttttgggaatatgatttcggaagtagtcgtagtcgtcgtcggacgaggggcgtggagaggcggtgtttcggtagtttagggatggcgtaggttttggggttttaggaagacggcgtcgttggcgttttgagttttgttgtcgtttttggtt

SEQ ID NO: 9438 - DNA, 608 bp, Artificial Sequence
  chemically treated genomic DNA (Homo sapiens) CpG-island No: 9438
aaccaaaaacgacaacaaaactcaaaacgccaacgacgccgtcttcctaaaaccccaaaacctacgccatccctaaactaccgaaacaccgcctctccacgcccctcgtccgacgacgactacgactacttccgaaatcatattcccaaaacgaacgcgtcttcaaaataaaaacctaacgcacgtccgaaaataccgaaaacccaaccaacccaaactctaaaaaaaataactcccctctaccctcgccccgcgctctactaccatttccttacgtctctacttcgctcaacgatacaaaacgcgcgaaacgcacgacaaaaaaccgaaaccgcgatactctccgaaccaaacccgcccctcgaccgcgccgcgcaacacgaaattccccgaccgctatccaacgctaaccgcctaaaccaaaactaccgcgaaaccaatacaatcgaaaccgctaactaaaaaaacgaacttcctaaaacgaaaaaaaacccgacgccgaaaccgaataaaaaaaacgaaaaaaaaactccgaccgtctaaaaaaaatccacgcgacttaaaactataaaaaaaataaaataacgaacgatccttctacgcgcgaa

SEQ ID NO: 9439 - DNA, 608 bp, Artificial Sequence
  chemically treated genomic DNA (Homo sapiens) CpG-island No: 9439
agttagaggcggtagtaagatttaagacgttaacggcgtcgtttttttggggttttagggtttgcgttatttttgggttgtcggggtatcgtttttttacgtttttcgttcggcggcggttgcgattgttttcgaggttatgtttttaggacgggcgcgtttttagggtggaagtttggcgtacgttcggaggtgtcgaggatttaattagtttaaattttgggggaaatgatttttttttgttttcgtttcgcgttttgttattatttttttacgtttttgtttcgtttagcgatgtaaaacgcgcgaggcgtacggtagagggtcgaagtcgcggtatttttcgggttaggttcgtttttcggtcgcgtcgcgtagtacgggatttttcggtcgttgtttagcgttggtcgtttgagttaaggttgtcgcggagttagtatagtcggggtcgttggttggaagggcgagttttttaaggcggggggaagttcggcgtcggggtcgggtaggaaaggcgggggaggggtttcggtcgtttggaaggaatttacgcggtttgaggttgtgggggaagtagggtggcgagcggtttttttgcgcgcggg

SEQ ID NO: 9440 - DNA, 608 bp, Artificial Sequence
  chemically treated genomic DNA (Homo sapiens) CpG-island No: 9440
cccgcgcgcaaaaaaaccgctcgccaccctacttcccccacaacctcaaaccgcgtaaattccttccaaacgaccgaaacccctcccccgcctttcctacccgaccccgacgccgaacttccccccgccttaaaaaactcgcccttccaaccaacgaccccgactatactaactccgcgacaaccttaactcaaacgaccaacgctaaacaacgaccgaaaaatcccgtactacgcgacgcgaccgaaaaacgaacctaacccgaaaaataccgcgacttcgaccctctaccgtacgcctcgcgcgttttacatcgctaaacgaaacaaaaacgtaaaaaaataataacaaaacgcgaaacgaaaacaaaaaaaaatcatttcccccaaaatttaaactaattaaatcctcgacacctccgaacgtacgccaaacttccaccctaaaaacgcgcccgtcctaaaaacataacctcgaaaacaatcgcaaccgccgccgaacgaaaaacgtaaaaaaacgataccccgacaacccaaaaataacgcaaaccctaaaaccccaaaaaaacgacgccgttaacgtcttaaatcttactaccgcctctaact

SEQ ID NO: 9441 - DNA, 562 bp, Artificial Sequence
  chemically treated genomic DNA (Homo sapiens) CpG-island No: 9441
  unsure (358, 449, 509)
gttattcggcggtattggtgttttcggtaattatcgttttagcgtttggtatgtcgtagattattgcgtatggtcgatggcgagtttggagtcggattcgttaatattgttcgttacgtttaatttcgggttggattttttcgatgaggtggtgcgatgaacgtttgggaagttaatttcgacgggttggtagggttgacgtattattacgcgggtttgtcgtttggtaatgaagtttttattcgttatcgtttttaggtgtttaattcgcgattggcggcgaagtagggtttattgaaaatgaaagtttttgtcgatgcgggatttttttaggtcgtgatttcgtcgtacgagcgtncgtttatttcggtgttgcgttagttgggatttagtggtagcgatgagtaggtattggaaaaaagtgtacgttaggtatcgtattggttttntagcgttaagttcgtttcggtaatgtgggtagttaatgcggtaacgatcgcgttatttgncgatacgtttgatggtaaaagtgtattttatcggttgttaatttgaataaata

SEQ ID NO: 9442 - DNA, 562 bp, Artificial Sequence
  chemically treated genomic DNA (Homo sapiens) CpG-island No: 9442
  unsure (54, 114, 205)
tatttattcaaattaacaaccgataaaatacacttttaccatcaaacgtatcgncaaataacgcgatcgttaccgcattaactacccacattaccgaaacgaacttaacgctanaaaaccaatacgatacctaacgtacacttttttccaatacctactcatcgctaccactaaatcccaactaacgcaacaccgaaataaacgnacgctcgtacgacgaaatcacgacctaaaaaaatcccgcatcgacaaaaactttcattttcaataaaccctacttcgccgccaatcgcgaattaaacacctaaaaacgataacgaataaaaacttcattaccaaacgacaaacccgcgtaataatacgtcaaccctaccaacccgtcgaaattaacttcccaaacgttcatcgcaccacctcatcgaaaaaatccaacccgaaattaaacgtaacgaacaatattaacgaatccgactccaaactcgccatcgaccatacgcaataatctacgacataccaaacgctaaaacgataattaccgaaaacaccaataccgccgaataac

SEQ ID NO: 9443 - DNA, 562 bp, Artificial Sequence
  chemically treated genomic DNA (Homo sapiens) CpG-island No: 9443
  unsure (54, 114, 205)
tatttgtttaggttggtaatcggtaagatgtatttttgttattaagcgtatcgntagatggcgcgatcgttgtcgtattggttatttatattgtcgaagcgaatttgacgttgnaaagttagtgcggtgtttggcgtgtatttttttttagtatttgtttatcgttattattgaattttaattgacgtagtatcggaataaacgnacgttcgtgcggcgggattacggtttgggggaatttcgtatcggtaagggtttttatttttagtaagttttgtttcgtcgttagtcgcgggttagatatttgaaaacggtgacgggtagaggttttattattaaacgataggttcgcgtaatgatgcgttagttttattagttcgtcgaaattgattttttaggcgtttatcgtattattttatcggaaaaatttagttcggggttaagcgtggcgggtaatgttaacgagttcgattttaggttcgttatcggttatgcgtagtaatttgcggtatattaggcgttggggcgatggttatcggaagtattaatgtcgtcgaatggt

SEQ ID NO: 9444 - DNA, 562 bp, Artificial Sequence
  chemically treated genomic DNA (Homo sapiens) CpG-island No: 9444
  unsure (358, 449, 509)
accattcgacgacattaatacttccgataaccatcgccccaacgcctaatataccgcaaattactacgcataaccgataacgaacctaaaatcgaactcgttaacattacccgccacgcttaaccccgaactaaatttttccgataaaataatacgataaacgcctaaaaaatcaatttcgacgaactaataaaactaacgcatcattacgcgaacctatcgtttaataataaaacctctacccgtcaccgttttcaaatatctaacccgcgactaacgacgaaacaaaacttactaaaaataaaaacccttaccgatacgaaattcccccaaaccgtaatcccgccgcacgaacgtncgtttattccgatactacgtcaattaaaattcaataataacgataaacaaatactaaaaaaaaatacacgccaaacaccgcactaactttncaacgtcaaattcgcttcgacaatataaataaccaatacgacaacgatcgcgccatctancgatacgcttaataacaaaaatacatcttaccgattaccaacctaaacaaata

SEQ ID NO: 9445 - DNA, 806 bp, Artificial Sequence
  chemically treated genomic DNA (Homo sapiens) CpG-island No: 9445
tcgttggcggtggcggtgatttatcgttcggagatgttaattttcgatgagtttatttttggtgtcgattcggtggcgagggatatgttttggtagttgatggtcgatttttcgcgttaggataaagtgattatttttatttttatttattttatgaacgaagcggaacgttgcgatcgtattttattgatgtacgtcggaaaagtgtttgttagcggtatatcgtaggaattggttgagaaacgcggagtcgttagtttggaagaggtatttatcgtttatttgtaggaagcggtagggtagagtaacgaagtcgaagcgtcgttcgtggtatacgatattatttacgcgtcgcgttagggatttagtttgcgtcgtttgtttagttatagtcgtcgcgaagcgttggaattgcgacgcgatttagtacgttcgacgttggcgttgatgggaacggtgattttgatgttgataatgggttacggtattagtatggatgtggaaaatttgcgttttgcggtgttcgatcgcgattagatcgttagtagttaggcgtggatatttaagtttttcggttttcgttattttatcgaatagtcgtcggttattagttatgacgagtttgatcgtcggatgcgtgcgggcgatattacggtggcgattgatatttcgtttaatttcggggtcgataatcgggttggtaagtttgtggaaattcgcgtttgggatcgacgggacgattgtcgaattcgtgttgaaatcgttaaaaggatgattataattcgagttcggtattttgagttaaa

SEQ ID NO: 9446 - DNA, 806 bp, Artificial Sequence
  chemically treated genomic DNA (Homo sapiens) CpG-island No: 9446
tttaactcaaaataccgaactcgaattataatcatccttttaacgatttcaacacgaattcgacaatcgtcccgtcgatcccaaacgcgaatttccacaaacttaccaacccgattatcgaccccgaaattaaacgaaatatcaatcgccaccgtaatatcgcccgcacgcatccgacgatcaaactcgtcataactaataaccgacgactattcgataaaataacgaaaaccgaaaaacttaaatatccacgcctaactactaacgatctaatcgcgatcgaacaccgcaaaacgcaaattttccacatccatactaataccgtaacccattatcaacatcaaaatcaccgttcccatcaacgccaacgtcgaacgtactaaatcgcgtcgcaattccaacgcttcgcgacgactataactaaacaaacgacgcaaactaaatccctaacgcgacgcgtaaataatatcgtataccacgaacgacgcttcgacttcgttactctaccctaccgcttcctacaaataaacgataaatacctcttccaaactaacgactccgcgtttctcaaccaattcctacgatataccgctaacaaacacttttccgacgtacatcaataaaatacgatcgcaacgttccgcttcgttcataaaataaataaaaataaaaataatcactttatcctaacgcgaaaaatcgaccatcaactaccaaaacatatccctcgccaccgaatcgacaccaaaaataaactcatcgaaaattaacatctccgaacgataaatcaccgccaccgccaacga

SEQ ID NO: 9447 - DNA, 806 bp, Artificial Sequence
  chemically treated genomic DNA (Homo sapiens) CpG-island No: 9447
tttagtttagggtatcgagttcgaattataattatttttttaacggttttagtacgggttcggtaatcgtttcgtcgattttagacgcggatttttataggtttattaattcgattatcggtttcgaaattgggcgggatgttaatcgttatcgtgatatcgttcgtacgtattcgacgattaagttcgttataattggtgatcggcggttgttcgataaagtaacgggaatcggagagtttgagtgtttacgtttggttattgacggtttggtcgcggtcgagtatcgtaaagcgtaggttttttatatttatattgatgtcgtaatttattattagtattaggattatcgtttttattagcgttagcgtcgaacgtattggatcgcgtcgtagttttagcgtttcgcggcggttgtagttaaatagacggcgtaggttaaatttttgacgcggcgcgtgggtggtgtcgtgtattacgggcggcgtttcggtttcgttgttttgttttgtcgttttttgtaaataggcgataaatgttttttttagattggcggtttcgcgttttttaattagtttttgcggtgtatcgttggtaagtattttttcggcgtgtattagtgagatgcggtcgtaacgtttcgtttcgtttataaagtgggtggagatgaagatagttattttgttttggcgcgagagatcgattattaattgttagaatatatttttcgttatcggatcgatattagaagtaggtttatcgaggattaatattttcgggcgatgaattatcgttatcgttagcga

SEQ ID NO: 9448 - DNA, 806 bp, Artificial Sequence
  chemically treated genomic DNA (Homo sapiens) CpG-island No: 9448
tcgctaacgataacgataattcatcgcccgaaaatattaatcctcgataaacctacttctaatatcgatccgataacgaaaaatatattctaacaattaataatcgatctctcgcgccaaaacaaaataactatcttcatctccacccactttataaacgaaacgaaacgttacgaccgcatctcactaatacacgccgaaaaaatacttaccaacgatacaccgcaaaaactaattaaaaaacgcgaaaccgccaatctaaaaaaaacatttatcgcctatttacaaaaaacgacaaaacaaaacaacgaaaccgaaacgccgcccgtaatacacgacaccacccacgcgccgcgtcaaaaatttaacctacgccgtctatttaactacaaccgccgcgaaacgctaaaactacgacgcgatccaatacgttcgacgctaacgctaataaaaacgataatcctaatactaataataaattacgacatcaatataaatataaaaaacctacgctttacgatactcgaccgcgaccaaaccgtcaataaccaaacgtaaacactcaaactctccgattcccgttactttatcgaacaaccgccgatcaccaattataacgaacttaatcgtcgaatacgtacgaacgatatcacgataacgattaacatcccgcccaatttcgaaaccgataatcgaattaataaacctataaaaatccgcgtctaaaatcgacgaaacgattaccgaacccgtactaaaaccgttaaaaaaataattataattcgaactcgataccctaaactaaa

SEQ ID NO: 9449 - DNA, 677 bp, Artificial Sequence
  chemically treated genomic DNA (Homo sapiens) CpG-island No: 9449
gtgagcgtcgggtaggcgcggtatagaatattaacgatagtagcgtttttagtaagcgttttttggtcgcgcgcgggtacgtgtaggatttttttgtcgcgttgttggtttcgggcgcggcgcgtcgcgtatcgtttatttatcgaggttattacgttcgcgtacgcgtcgtgaggtattgcgtgcgcgtttttttggagtagattggcgcgttttaggtcgcgtttcgcgcgtagattttgtttttcggcgttggtttcgattcgttttattttcgtttaaaaatcgcgggtcgtttggttcgggttgtagtttgggaggtggatttttcggacgtggcgcggcgtaaagtagaaaggattggagagacgttagagttgtgcgcgttaatcgggtttttcgagaggggggagttcgcgttcgcgttgtgttttgagagcgtagattattgtattttgggtttggatttgcggtagttttagcgagtggaggaggttttgggcgtcgcggggttcgacgtagttttatttattttgtttttggtcgaggcggtgttgatttatttcgagtcggagagtgtcgcggtttttatcgtttgggtagtttagcgtttttttaatgtttttttcgtggtttatgagtagatgaggttttaagacgtttttggttagtttatg

SEQ ID NO: 9450 - DNA, 677 bp, Artificial Sequence
  chemically treated genomic DNA (Homo sapiens) CpG-island No: 9450
cataaactaaccaaaaacgtcttaaaacctcatctactcataaaccacgaaaaaaacattaaaaaaacgctaaactacccaaacgataaaaaccgcgacactctccgactcgaaataaatcaacaccgcctcgaccaaaaacaaaataaataaaactacgtcgaaccccgcgacgcccaaaacctcctccactcgctaaaactaccgcaaatccaaacccaaaatacaataatctacgctctcaaaacacaacgcgaacgcgaactcccccctctcgaaaaacccgattaacgcgcacaactctaacgtctctccaatcctttctactttacgccgcgccacgtccgaaaaatccacctcccaaactacaacccgaaccaaacgacccgcgatttttaaacgaaaataaaacgaatcgaaaccaacgccgaaaaacaaaatctacgcgcgaaacgcgacctaaaacgcgccaatctactccaaaaaaacgcgcacgcaatacctcacgacgcgtacgcgaacgtaataacctcgataaataaacgatacgcgacgcgccgcgcccgaaaccaacaacgcgacaaaaaaatcctacacgtacccgcgcgcgaccaaaaaacgcttactaaaaacgctactatcgttaatattctataccgcgcctacccgacgctcac

SEQ ID NO: 9451 - DNA, 677 bp, Artificial Sequence
  chemically treated genomic DNA (Homo sapiens) CpG-island No: 9451
tatgaattggttaaaggcgttttgaggttttatttgtttatagattacgaaaagggtattaggaaaacgttgggttgtttaggcgatgagggtcgcggtatttttcggttcgaggtaggttagtatcgtttcggttaggagtagagtgggtgaggttgcgtcgagtttcgcggcgtttagggttttttttattcgttggagttgtcgtaagtttagatttaggatgtagtagtttgcgtttttaaagtatagcgcggacgcgggtttttttttttcgaaaggttcggttaacgcgtatagttttggcgtttttttaattttttttgttttgcgtcgcgttacgttcggaaaatttattttttagattgtagttcgggttaggcggttcgcggtttttaagcgaaaatagagcgagtcgaagttagcgtcgagagataagatttgcgcgcgaagcgcggtttggggcgcgttaatttgttttaaaaaagcgcgtacgtagtgttttacggcgcgtgcgcggacgtagtagtttcggtgaatgagcggtgcgcggcgcgtcgcgttcggaattagtaacgcggtaaaggggttttgtacgtattcgcgcgcggttagggaacgtttgttgagggcgttgttgtcgttggtgttttgtatcgcgtttgttcgacgtttat

SEQ ID NO: 9452 - DNA, 677 bp, Artificial Sequence
  chemically treated genomic DNA (Homo sapiens) CpG-island No: 9452
ataaacgtcgaacaaacgcgatacaaaacaccaacgacaacaacgccctcaacaaacgttccctaaccgcgcgcgaatacgtacaaaacccctttaccgcgttactaattccgaacgcgacgcgccgcgcaccgctcattcaccgaaactactacgtccgcgcacgcgccgtaaaacactacgtacgcgcttttttaaaacaaattaacgcgccccaaaccgcgcttcgcgcgcaaatcttatctctcgacgctaacttcgactcgctctattttcgcttaaaaaccgcgaaccgcctaacccgaactacaatctaaaaaataaattttccgaacgtaacgcgacgcaaaacaaaaaaaattaaaaaaacgccaaaactatacgcgttaaccgaacctttcgaaaaaaaaaaacccgcgtccgcgctatactttaaaaacgcaaactactacatcctaaatctaaacttacgacaactccaacgaataaaaaaaaccctaaacgccgcgaaactcgacgcaacctcacccactctactcctaaccgaaacgatactaacctacctcgaaccgaaaaataccgcgaccctcatcgcctaaacaacccaacgttttcctaatacccttttcgtaatctataaacaaataaaacctcaaaacgcctttaaccaattcata

SEQ ID NO: 9453 - DNA, 596 bp, Artificial Sequence
  chemically treated genomic DNA (Homo sapiens) CpG-island No: 9453
  unsure (11, 83, 96, 113, 324, 353, 456)
tgttacgcgancggttcgtttttcgtcgtttcgtggagggcgtcggcgttttttgttaggcgggtaaaggatatagtttcggnttttagaacgttngcggtattggggcgggnaggggttcgttacgttcgttattttgaaataatcgttattcggggcgtcgcgtttgggtcgttacgtttcggtttgtaggttcggtttttattggtcgtattacgtagaggttcgttttcgtttgcgcggtcggtttttgcggggcgagagggtgggggcgaaggggaagttacgtttcggaggtgcggtgtggggtatcgggcggggttngcgggaatcggcgttttacggagttgttngttgttagattaatttcgggtttttattattattgcgtcgcgtttttaggcgtcgagaattatcgttttcggtatgttatgaaattggtttcggcgttgaggncggggttcggttttttattcgttttcgtcgcgcgcgaatcgcggtcgcgagttatggaggaggaggtatcgttttcggggttgggttgtagtaagtcgtatttggagaagttgattttgggtattacgcgtattttaggt

SEQ ID NO: 9454 - DNA, 596 bp, Artificial Sequence
  chemically treated genomic DNA (Homo sapiens) CpG-island No: 9454
  unsure (141, 244, 273, 484, 501, 514, 586)
acctaaaatacgcgtaatacccaaaatcaacttctccaaatacgacttactacaacccaaccccgaaaacgatacctcctcctccataactcgcgaccgcgattcgcgcgcgacgaaaacgaataaaaaaccgaaccccgncctcaacgccgaaaccaatttcataacataccgaaaacgataattctcgacgcctaaaaacgcgacgcaataataataaaaacccgaaattaatctaacaacnaacaactccgtaaaacgccgattcccgcnaaccccgcccgataccccacaccgcacctccgaaacgtaacttccccttcgcccccaccctctcgccccgcaaaaaccgaccgcgcaaacgaaaacgaacctctacgtaatacgaccaataaaaaccgaacctacaaaccgaaacgtaacgacccaaacgcgacgccccgaataacgattatttcaaaataacgaacgtaacgaacccctncccgccccaataccgcnaacgttctaaaanccgaaactatatcctttacccgcctaacaaaaaacgccgacgccctccacgaaacgacgaaaaacgaaccgntcgcgtaaca

SEQ ID NO: 9455 - DNA, 596 bp, Artificial Sequence
  chemically treated genomic DNA (Homo sapiens) CpG-island No: 9455
  unsure (141, 244, 273, 484, 501, 514, 586)
atttaggatgcgcgtgatgtttagggttagtttttttaggtgcggtttgttgtagtttagtttcggggacgatgtttttttttttatggttcgcgatcgcgattcgcgcgcggcgggagcgggtggagggtcggatttcgnttttagcgtcgaggttaattttatggtatgtcgggaacggtagttttcggcgtttgaaagcgcggcgtagtgatgatgggggttcggggttggtttgatagtnagtagtttcgtggggcgtcggttttcgtnggtttcgttcggtgttttatatcgtattttcgggacgtagtttttttttcgtttttattttttcgtttcgtaggggtcggtcgcgtaggcgggggcgggtttttgcgtggtgcggttaatggggatcgagtttgtaggtcgaggcgtggcggtttaggcgcgacgtttcgagtggcggttgttttaagatggcggacgtggcgggtttttnttcgttttagtgtcgtnggcgttttggagntcgggattgtattttttgttcgtttgatagggggcgtcggcgttttttacgggacggcgaggggcgagtcgntcgcgtggta

SEQ ID NO: 9456 - DNA, 596 bp, Artificial Sequence
  chemically treated genomic DNA (Homo sapiens) CpG-island No: 9456
  unsure (11, 83, 96, 113, 324, 353, 456)
taccacgcgancgactcgcccctcgccgtcccgtaaaaaacgccgacgccccctatcaaacgaacaaaaaatacaatcccganctccaaaacgccnacgacactaaaacgaanaaaaacccgccacgtccgccatcttaaaacaaccgccactcgaaacgtcgcgcctaaaccgccacgcctcgacctacaaactcgatccccattaaccgcaccacgcaaaaacccgcccccgcctacgcgaccgacccctacgaaacgaaaaaataaaaacgaaaaaaaaactacgtcccgaaaatacgatataaaacaccgaacgaaaccnacgaaaaccgacgccccacgaaactactnactatcaaaccaaccccgaacccccatcatcactacgccgcgctttcaaacgccgaaaactaccgttcccgacataccataaaattaacctcgacgctaaaancgaaatccgaccctccacccgctcccgccgcgcgcgaatcgcgatcgcgaaccataaaaaaaaaaacatcgtccccgaaactaaactacaacaaaccgcacctaaaaaaactaaccctaaacatcacgcgcatcctaaat

SEQ ID NO: 9457 - DNA, 1163 bp, Artificial Sequence
  chemically treated genomic DNA (Homo sapiens) CpG-island No: 9457
gaggggcgggtacggggagtgaggggtttttaggtttagcgggtgcggggtcgggtgaggagacggagtttattttcgttcggaatttagaagtatggcgggtttttacgcgtagttttttaggggtttcgggagttcgcggtttgggttattttcggttttttttaggcggggggcggttgttgtcgttaggttcgggcgtgggtgcgggcggtgggtattttacgggggtaggggaggcgagagtttgaggagattcgggagggggttcgtggacgcggttggttcgggatggagttggcgcggttatagtgggggacgaggtagggtacgcggcgtttttcgggttcggttttttttttagcgtacgggcggtcggaggaattggagtttttatttcggatacggtttcgcgggcgaaggttttttttcgtcgtttcggttcggtttttttttcgtcgtcgttagtagaggtcgttgttttacgcgtcgggtttcgttggcgtcggggttttttgggacggtttggtcgcggtttgcgggtgtaggcgtttcggcggttatcgcgtttttagggggtttcgcggacgggggcgcggggttgcggggaggaggcgggcgggtttttcgggcgatatcgcggggcgggcggcgggaagttcggatttagcggttttttgggtaatcggtttttttcggcgcggttcgcgcggttttaggtggcgggaggcggcggttggcgggaagggtcgcgcgggttcgggggcggcgttttaggtagtagcgttaggtggcgttcgtgggcggcggggttttcggggaggcgtttgttttcgtttacgtcgggttcggttttcgcgagtttttttttggattttagcgcgaagtcgtcgcggaaatttttcgggcgggtatcggagttttggggcggggcggtcgggtttagagggcgggcgggagtaggcgggcggcgagggcgggtagtagtagcgggagtaggggcgtttcgggcgtcggggtcgttggggacgaacgcggcgggttaggtttcgaagttcgggtcgcggtggtcgttttaggcgttcgttttggggtgggggtgggggtatttttcgggatcgaattcgtcgtagtttttttttttgtgttttttttttttgttg

SEQ ID NO: 9458 - DNA, 1163 bp, Artificial Sequence
  chemically treated genomic DNA (Homo sapiens) CpG-island No: 9458
caacaaaaaaaaaaaacacaaaaaaaaaaactacgacgaattcgatcccgaaaaatacccccacccccaccccaaaacgaacgcctaaaacgaccaccgcgacccgaacttcgaaacctaacccgccgcgttcgtccccaacgaccccgacgcccgaaacgcccctactcccgctactactacccgccctcgccgcccgcctactcccgcccgccctctaaacccgaccgccccgccccaaaactccgatacccgcccgaaaaatttccgcgacgacttcgcgctaaaatccaaaaaaaaactcgcgaaaaccgaacccgacgtaaacgaaaacaaacgcctccccgaaaaccccgccgcccacgaacgccacctaacgctactacctaaaacgccgcccccgaacccgcgcgacccttcccgccaaccgccgcctcccgccacctaaaaccgcgcgaaccgcgccgaaaaaaaccgattacccaaaaaaccgctaaatccgaacttcccgccgcccgccccgcgatatcgcccgaaaaacccgcccgcctcctccccgcaaccccgcgcccccgtccgcgaaaccccctaaaaacgcgataaccgccgaaacgcctacacccgcaaaccgcgaccaaaccgtcccaaaaaaccccgacgccaacgaaacccgacgcgtaaaacaacgacctctactaacgacgacgaaaaaaaaaccgaaccgaaacgacgaaaaaaaaccttcgcccgcgaaaccgtatccgaaataaaaactccaattcctccgaccgcccgtacgctaaaaaaaaaaccgaacccgaaaaacgccgcgtaccctacctcgtcccccactataaccgcgccaactccatcccgaaccaaccgcgtccacgaaccccctcccgaatctcctcaaactctcgcctcccctacccccgtaaaatacccaccgcccgcacccacgcccgaacctaacgacaacaaccgccccccgcctaaaaaaaaccgaaaataacccaaaccgcgaactcccgaaacccctaaaaaactacgcgtaaaaacccgccatacttctaaattccgaacgaaaataaactccgtctcctcacccgaccccgcacccgctaaacctaaaaacccctcactccccgtacccgcccctc

SEQ ID NO: 9459 - DNA, 1163 bp, Artificial Sequence
  chemically treated genomic DNA (Homo sapiens) CpG-island No: 9459
tagtaggggaaaggagtataaagagggaggttgcggcgagttcggtttcgaaagatgtttttatttttattttagagcgggcgtttgaggcggttatcgcggttcgggtttcggggtttgattcgtcgcgttcgtttttagcggtttcggcgttcggggcgtttttgttttcgttgttgttgttcgttttcgtcgttcgtttgttttcgttcgttttttgagttcggtcgtttcgttttagagtttcgatgttcgttcggggagttttcgcggcggtttcgcgttggaatttagaaggaagttcgcgaaggtcgggttcggcgtgggcgggagtaggcgttttttcgggagtttcgtcgtttacgggcgttatttggcgttgttatttgaggcgtcgttttcgggttcgcgcggtttttttcgttaatcgtcgtttttcgttatttggagtcgcgcgggtcgcgtcggaggaggtcggttgtttaggaaatcgttgagttcgggtttttcgtcgttcgtttcgcggtgtcgttcgaggggttcgttcgtttttttttcgtagtttcgcgttttcgttcgcgaggttttttggggacgcggtggtcgtcgaggcgtttatattcgtaggtcgcggttaggtcgttttaggaggtttcggcgttaacgggattcggcgcgtgggatagcggtttttgttggcggcggcgggagggaggtcggatcggggcgacggggagaagttttcgttcgcgggatcgtgttcggggtgggggttttagttttttcgatcgttcgtgcgttgggagggaggtcgagttcggggaacgtcgcgtgttttgtttcgttttttattgtggtcgcgttagttttatttcgggttagtcgcgtttacgggttttttttcgagtttttttaggttttcgttttttttattttcgtgggatgtttatcgttcgtatttacgttcgagtttggcggtagtagtcgtttttcgtttgaagggagtcggaggtgatttaggtcgcgggttttcgaggtttttgaagggttgcgcgtggggattcgttatgtttttgggtttcgaacgggggtgagtttcgtttttttattcggtttcgtattcgttgggtttggggattttttatttttcgtgttcgtttttt

SEQ ID NO: 9460 - DNA, 1163 bp, Artificial Sequence
  chemically treated genomic DNA (Homo sapiens) CpG-island No: 9460
aaaaaacgaacacgaaaaataaaaaatccccaaacccaacgaatacgaaaccgaataaaaaaacgaaactcacccccgttcgaaacccaaaaacataacgaatccccacgcgcaacccttcaaaaacctcgaaaacccgcgacctaaatcacctccgactcccttcaaacgaaaaacgactactaccgccaaactcgaacgtaaatacgaacgataaacatcccacgaaaataaaaaaaacgaaaacctaaaaaaactcgaaaaaaaacccgtaaacgcgactaacccgaaataaaactaacgcgaccacaataaaaaacgaaacaaaacacgcgacgttccccgaactcgacctccctcccaacgcacgaacgatcgaaaaaactaaaacccccaccccgaacacgatcccgcgaacgaaaacttctccccgtcgccccgatccgacctccctcccgccgccgccaacaaaaaccgctatcccacgcgccgaatcccgttaacgccgaaacctcctaaaacgacctaaccgcgacctacgaatataaacgcctcgacgaccaccgcgtccccaaaaaacctcgcgaacgaaaacgcgaaactacgaaaaaaaaacgaacgaacccctcgaacgacaccgcgaaacgaacgacgaaaaacccgaactcaacgatttcctaaacaaccgacctcctccgacgcgacccgcgcgactccaaataacgaaaaacgacgattaacgaaaaaaaccgcgcgaacccgaaaacgacgcctcaaataacaacgccaaataacgcccgtaaacgacgaaactcccgaaaaaacgcctactcccgcccacgccgaacccgaccttcgcgaacttccttctaaattccaacgcgaaaccgccgcgaaaactccccgaacgaacatcgaaactctaaaacgaaacgaccgaactcaaaaaacgaacgaaaacaaacgaacgacgaaaacgaacaacaacaacgaaaacaaaaacgccccgaacgccgaaaccgctaaaaacgaacgcgacgaatcaaaccccgaaacccgaaccgcgataaccgcctcaaacgcccgctctaaaataaaaataaaaacatctttcgaaaccgaactcgccgcaacctccctctttatactcctttcccctacta

SEQ ID NO: 9461 - DNA, 1027 bp, Artificial Sequence
  chemically treated genomic DNA (Homo sapiens) CpG-island No: 9461
  unsure (965, 1015)
tttcggcggcggcgcgggagtgcgaggtcggcggggaggtcgggttttgcggtttcgtcggggtttttgtagcgttttttcgttagggggtagcgtcgggtcggcggcgcgggcgggaagttttagcggtcgggacgcggtggtgtcgttttttttttgcggtgagggatcgcgtcgcgttatttcgtttttagcgtagttcgtagcggcgaggttatcgggtgggatacgggtgttcgcgcgtcgcgtcgtagttcgcggggatttggcgtttcgtttcgggaggggatttggttttcgggcgtcggtttttcgtttacgcggcgttttttttgtagttcgttagggtcgttcgttcgtcgtcgtttgcggaacgcggaggggtagtacggttacgttcggttattcgaatttgtttttcggcgtcgcgtgatcgtgttaggttttcgtcggtttcgtcgtgtcgatttcgggcgtttttatagtggttcggaggtcgttgttgttcggatgttcgggttttacgaggtttttttagttcgataagttcgtcgattttacgggtacgggcggaggagagggaatcgtcgcgttcgtttcgcgcgtcgtcgtcgatttcggtgggtcgcgttttttcgcgtacgtcgcgttttggcgcggggagaggtttttcggggttcgttcgggttagcgtttcgcgggggtggcggtcgttcgtttagttttttttcgattttttttttttgttagggttgttggggttgataggttttcgggtaattacgtcggggaattttttacgttcgtcgatcgttgcggggtttagtagtcgtttcgtgcgttgagttttttgttatgagtgattttattgcgaggcgtttcgggttacgaagtaagatcgggggtcgtatttcgggttttcgttttgtttttattaatttttcgcgcgtggaaaggggatagtngtttaaaaatttttttttaaaaaaaatttttaaatattagggcgaattanaataaaatattt

SEQ ID NO: 9462 - DNA, 1027 bp, Artificial Sequence
  chemically treated genomic DNA (Homo sapiens) CpG-island No: 9462
  unsure (13, 63)
aaatattttattntaattcgccctaatatttaaaaattttttttaaaaaaaaatttttaaacnactatcccctttccacgcgcgaaaaattaataaaaacaaaacgaaaacccgaaatacgacccccgatcttacttcgtaacccgaaacgcctcgcaataaaatcactcataacaaaaaactcaacgcacgaaacgactactaaaccccgcaacgatcgacgaacgtaaaaaattccccgacgtaattacccgaaaacctatcaaccccaacaaccctaacaaaaaaaaaaaatcgaaaaaaaactaaacgaacgaccgccacccccgcgaaacgctaacccgaacgaaccccgaaaaacctctccccgcgccaaaacgcgacgtacgcgaaaaaacgcgacccaccgaaatcgacgacgacgcgcgaaacgaacgcgacgattccctctcctccgcccgtacccgtaaaatcgacgaacttatcgaactaaaaaaacctcgtaaaacccgaacatccgaacaacaacgacctccgaaccactataaaaacgcccgaaatcgacacgacgaaaccgacgaaaacctaacacgatcacgcgacgccgaaaaacaaattcgaataaccgaacgtaaccgtactacccctccgcgttccgcaaacgacgacgaacgaacgaccctaacgaactacaaaaaaaacgccgcgtaaacgaaaaaccgacgcccgaaaaccaaatcccctcccgaaacgaaacgccaaatccccgcgaactacgacgcgacgcgcgaacacccgtatcccacccgataacctcgccgctacgaactacgctaaaaacgaaataacgcgacgcgatccctcaccgcaaaaaaaaaacgacaccaccgcgtcccgaccgctaaaacttcccgcccgcgccgccgacccgacgctaccccctaacgaaaaaacgctacaaaaaccccgacgaaaccgcaaaacccgacctccccgccgacctcgcactcccgcgccgccgccgaaa

SEQ ID NO: 9463 - DNA, 1027 bp, Artificial Sequence
  chemically treated genomic DNA (Homo sapiens) CpG-island No: 9463
  unsure (13, 63)
gggtgttttgttntggttcgttttggtatttgggggttttttttgaaaaggagtttttaagtngttgttttttttttacgcgcgggaggttggtgagggtagggcggggattcggagtgcggttttcggttttgtttcgtggttcgaaacgtttcgtaatggagttatttatgataggggatttagcgtacggggcggttgttgagtttcgtagcgatcggcgggcgtgaggggtttttcggcgtggttgttcgggagtttgttagttttagtagttttgataggaaagggaagtcgagaggaggttgagcgaacggtcgttattttcgcgggacgttgattcgggcggatttcgaggggttttttttcgcgttagagcgcggcgtgcgcggggaagcgcgatttatcggggtcggcgacggcgcgcggggcgggcgcggcggttttttttttttcgttcgtgttcgtgggatcggcgggtttgtcgggttgggagagtttcgtggaattcgggtattcgggtagtagcggttttcgagttattgtggaggcgttcggggtcggtacggcgaggtcgacggggatttgatacggttacgcggcgtcggggagtaggttcgagtggtcgggcgtggtcgtgttgttttttcgcgtttcgtaggcggcgacgggcgagcggttttagcgggttgtagggaggacgtcgcgtggacggagagtcggcgttcgggggttagattttttttcgggacggggcgttaggttttcgcgagttgcggcgcgacgcgcgggtattcgtgttttattcggtggtttcgtcgttgcgggttgcgttgagagcggggtggcgcgacgcggttttttatcgtagggggaagacggtattatcgcgtttcggtcgttggagtttttcgttcgcgtcgtcggttcgacgttgttttttggcgggagagcgttgtaggggtttcggcgaggtcgtaggattcgattttttcgtcggtttcgtattttcgcgtcgtcgtcgagg

SEQ ID NO: 9464 - DNA, 1027 bp, Artificial Sequence
  chemically treated genomic DNA (Homo sapiens) CpG-island No: 9464
  unsure (965, 1015)
cctcgacgacgacgcgaaaatacgaaaccgacgaaaaaatcgaatcctacgacctcgccgaaacccctacaacgctctcccgccaaaaaacaacgtcgaaccgacgacgcgaacgaaaaactccaacgaccgaaacgcgataataccgtcttccccctacgataaaaaaccgcgtcgcgccaccccgctctcaacgcaacccgcaacgacgaaaccaccgaataaaacacgaatacccgcgcgtcgcgccgcaactcgcgaaaacctaacgccccgtcccgaaaaaaaatctaacccccgaacgccgactctccgtccacgcgacgtcctccctacaacccgctaaaaccgctcgcccgtcgccgcctacgaaacgcgaaaaaacaacacgaccacgcccgaccactcgaacctactccccgacgccgcgtaaccgtatcaaatccccgtcgacctcgccgtaccgaccccgaacgcctccacaataactcgaaaaccgctactacccgaatacccgaattccacgaaactctcccaacccgacaaacccgccgatcccacgaacacgaacgaaaaaaaaaaaaccgccgcgcccgccccgcgcgccgtcgccgaccccgataaatcgcgcttccccgcgcacgccgcgctctaacgcgaaaaaaaacccctcgaaatccgcccgaatcaacgtcccgcgaaaataacgaccgttcgctcaacctcctctcgacttccctttcctatcaaaactactaaaactaacaaactcccgaacaaccacgccgaaaaacccctcacgcccgccgatcgctacgaaactcaacaaccgccccgtacgctaaatcccctatcataaataactccattacgaaacgtttcgaaccacgaaacaaaaccgaaaaccgcactccgaatccccgccctaccctcaccaacctcccgcgcgtaaaaaaaaaacaacnacttaaaaactccttttcaaaaaaaacccccaaataccaaaacgaaccanaacaaaacaccc

SEQ ID NO: 9465 - DNA, 695 bp, Artificial Sequence
  chemically treated genomic DNA (Homo sapiens) CpG-island No: 9465
aaatcgttttttagcgtttttgtttagggttttttcgtttcgcggttcggttttttttattcggaagtgttggtttcggtattggtttagttttacgtaggagtcgttgcgtagcgtttttaggaggttattcgatatagtgtagagaagcggattataatgcggcgattttcggtacgaggttgcgttcgcgatggcggaagcggaaacgcgcggaggcgagtattttattggatttaattcgagggcggcgtgtcgttattaagttgcgcgggggtatagacgttcgggtcgggcgtcgcggggcggaagacgagggcggcgaggtcgggtttcgggcgtttggagaagatggtgttgcggcggttgttggtcgttttgttgtatagttcgtagttggtggaacgtttgttagagtcgcggtttattcgacgtgcggcgtagtttacggttttcgtattgttgtaggtttagttgcggggttaggacgcggttcgtcgtttgtaggatttcgcggttgggttcgtgggttttttgtgtcgtcgcgttgagcgatttagagacgtttttatttaggagttacgtcgcggttttcgaggtcgttcggggttattattaggtagttagaggggttttggcgtaaatatttaattttgggttgtgcggggtcgaggtcgtttgttttttttttcggg

SEQ ID NO: 9466 - DNA, 695 bp, Artificial Sequence
  chemically treated genomic DNA (Homo sapiens) CpG-island No: 9466
cccgaaaaaaaaaacaaacgacctcgaccccgcacaacccaaaattaaatatttacgccaaaacccctctaactacctaataataaccccgaacgacctcgaaaaccgcgacgtaactcctaaataaaaacgtctctaaatcgctcaacgcgacgacacaaaaaacccacgaacccaaccgcgaaatcctacaaacgacgaaccgcgtcctaaccccgcaactaaacctacaacaatacgaaaaccgtaaactacgccgcacgtcgaataaaccgcgactctaacaaacgttccaccaactacgaactatacaacaaaacgaccaacaaccgccgcaacaccatcttctccaaacgcccgaaacccgacctcgccgccctcgtcttccgccccgcgacgcccgacccgaacgtctatacccccgcgcaacttaataacgacacgccgccctcgaattaaatccaataaaatactcgcctccgcgcgtttccgcttccgccatcgcgaacgcaacctcgtaccgaaaatcgccgcattataatccgcttctctacactatatcgaataacctcctaaaaacgctacgcaacgactcctacgtaaaactaaaccaataccgaaaccaacacttccgaataaaaaaaaccgaaccgcgaaacgaaaaaaccctaaacaaaaacgctaaaaaacgattt

SEQ ID NO: 9467 - DNA, 695 bp, Artificial Sequence
  chemically treated genomic DNA (Homo sapiens) CpG-island No: 9467
ttcggaaggaaaagtaagcggtttcggtttcgtatagtttaggattaaatgtttgcgttagggtttttttggttatttggtggtggtttcgagcggtttcggaggtcgcggcgtagtttttgggtgaaggcgtttttaaatcgtttagcgcggcggtatagggagtttacgggtttagtcgcgaggttttgtaggcggcgggtcgcgttttggtttcgtagttgggtttgtagtagtgcgaaggtcgtgagttgcgtcgtacgtcggataggtcgcgattttgatagacgttttattagttgcgggttgtgtagtagggcggttagtagtcgtcgtagtattattttttttaagcgttcggaattcgatttcgtcgttttcgtttttcgtttcgcggcgttcgattcggacgtttatgttttcgcgtagtttgatgacgatacgtcgttttcggattgggtttaatgagatgttcgttttcgcgcgttttcgttttcgttatcgcggacgtagtttcgtgtcgggagtcgtcgtattgtggttcgtttttttgtattatgtcgggtggttttttgaaggcgttgcgtagcgatttttacgtggagttgagttagtatcgggattagtattttcgggtgagggaggtcgggtcgcgagacgggaaggttttgggtaagaacgttgagaaacggttt

SEQ ID NO: 9468 - DNA, 695 bp, Artificial Sequence
  chemically treated genomic DNA (Homo sapiens) CpG-island No: 9468
aaaccgtttctcaacgttcttacccaaaaccttcccgtctcgcgacccgacctccctcacccgaaaatactaatcccgatactaactcaactccacgtaaaaatcgctacgcaacgccttcaaaaaaccacccgacataatacaaaaaaacgaaccacaatacgacgactcccgacacgaaactacgtccgcgataacgaaaacgaaaacgcgcgaaaacgaacatctcattaaacccaatccgaaaacgacgtatcgtcatcaaactacgcgaaaacataaacgtccgaatcgaacgccgcgaaacgaaaaacgaaaacgacgaaatcgaattccgaacgcttaaaaaaaataatactacgacgactactaaccgccctactacacaacccgcaactaataaaacgtctatcaaaatcgcgacctatccgacgtacgacgcaactcacgaccttcgcactactacaaacccaactacgaaaccaaaacgcgacccgccgcctacaaaacctcgcgactaaacccgtaaactccctataccgccgcgctaaacgatttaaaaacgccttcacccaaaaactacgccgcgacctccgaaaccgctcgaaaccaccaccaaataaccaaaaaaaccctaacgcaaacatttaatcctaaactatacgaaaccgaaaccgcttacttttccttccgaa

SEQ ID NO: 9469 - DNA, 793 bp, Artificial Sequence
  chemically treated genomic DNA (Homo sapiens) CpG-island No: 9469
ttcgacggcgttatgcggggttcgagcggggttttgtggttgtttttggttttgcgtatcggtgaggtttcgttgtgagagttaaaggcgggcgggggtttcggggcgtcgcggttcggttgagtaggtttcggggttggaaatgtgtttgagtttgcggtttcggggtagtgagacgggggaggtaggggttcggggtcgagtgaggacggcggagggaattagtattgaagcgtagacggggaagtttggaaggttttttggaggaggcggtttcgaatattcgaggttttcgacgttttaaggagaagcgcgggttgaggcgtggtggggaggtttcggggtgtggagaggagttttcggagggcggtttttttcgacgggcgtaggaatttaggaagattttgggggttcggagtagttttttttttcgagttttcgcgggagaagatttagagggattgatcggtaggcgcgggagttcgttcgggggtttttggtatatgtagggatggaggtggagacggaggtcgggttttttcgcgtcggcgtttcggggagttagggttcgggatggtgggacgggaggcgggatttcggggagcggttcgcggggatcgcgggcggcgatcgtcgaggggatggagttcgtggtatcgttgtggtcgtaggcgacgtatttattaatgtaaacgatgaagttatcgttattttcgtttcgtttgaattttgtagtttttcgtttgggtggtggggggtttggagcgttgcggaggggagggtagttcgattt

SEQ ID NO: 9470 - DNA, 793 bp, Artificial Sequence
  chemically treated genomic DNA (Homo sapiens) CpG-island No: 9470
aaatcgaactaccctcccctccgcaacgctccaaaccccccaccacccaaacgaaaaactacaaaattcaaacgaaacgaaaataacgataacttcatcgtttacattaataaatacgtcgcctacgaccacaacgataccacgaactccatcccctcgacgatcgccgcccgcgatccccgcgaaccgctccccgaaatcccgcctcccgtcccaccatcccgaaccctaactccccgaaacgccgacgcgaaaaaacccgacctccgtctccacctccatccctacatataccaaaaacccccgaacgaactcccgcgcctaccgatcaatccctctaaatcttctcccgcgaaaactcgaaaaaaaaaactactccgaacccccaaaatcttcctaaattcctacgcccgtcgaaaaaaaccgccctccgaaaactcctctccacaccccgaaacctccccaccacgcctcaacccgcgcttctccttaaaacgtcgaaaacctcgaatattcgaaaccgcctcctccaaaaaaccttccaaacttccccgtctacgcttcaatactaattccctccgccgtcctcactcgaccccgaacccctacctcccccgtctcactaccccgaaaccgcaaactcaaacacatttccaaccccgaaacctactcaaccgaaccgcgacgccccgaaacccccgcccgcctttaactctcacaacgaaacctcaccgatacgcaaaaccaaaaacaaccacaaaaccccgctcgaaccccgcataacgccgtcgaa

SEQ ID NO: 9471 - DNA, 793 bp, Artificial Sequence
  chemically treated genomic DNA (Homo sapiens) CpG-island No: 9471
aagtcgaattgttttttttttcgtagcgttttaagttttttattatttaggcgggaaattgtaaagtttagacggggcgggggtggcggtggttttatcgtttgtattgatgagtgcgtcgtttgcggttatagcggtgttacgaattttattttttcggcggtcgtcgttcgcgattttcgcgagtcgtttttcgaggtttcgtttttcgttttattatttcgggttttgatttttcggggcgtcgacgcgaggggattcggttttcgtttttatttttatttttgtatgtgttagaaattttcgggcggattttcgcgtttgtcggttagtttttttgaattttttttcgcgggggttcgggagaaagagttgtttcgagtttttaaagtttttttgagtttttgcgttcgtcgggaggggtcgtttttcgggagtttttttttatatttcgaggtttttttattacgttttagttcgcgtttttttttggagcgtcggaagtttcgggtgttcgaggtcgttttttttaagaagttttttagattttttcgtttgcgttttagtgttagtttttttcgtcgtttttattcgatttcgagtttttgtttttttcgttttattgtttcggagtcgtaggtttaggtatatttttagtttcgggatttgtttagtcgggtcgcggcgtttcgggattttcgttcgtttttggtttttatagcggggttttatcggtgcgtagagttaggagtagttatagagtttcgttcggatttcgtatggcgtcgtcggg

SEQ ID NO: 9472 - DNA, 793 bp, Artificial Sequence
  chemically treated genomic DNA (Homo sapiens) CpG-island No: 9472
cccgacgacgccatacgaaatccgaacgaaactctataactactcctaactctacgcaccgataaaaccccgctataaaaaccaaaaacgaacgaaaatcccgaaacgccgcgacccgactaaacaaatcccgaaactaaaaatatacctaaacctacgactccgaaacaataaaacgaaaaaaacaaaaactcgaaatcgaataaaaacgacgaaaaaaactaacactaaaacgcaaacgaaaaaatctaaaaaacttcttaaaaaaaacgacctcgaacacccgaaacttccgacgctccaaaaaaaaacgcgaactaaaacgtaataaaaaaacctcgaaatataaaaaaaaactcccgaaaaacgacccctcccgacgaacgcaaaaactcaaaaaaactttaaaaactcgaaacaactctttctcccgaacccccgcgaaaaaaaattcaaaaaaactaaccgacaaacgcgaaaatccgcccgaaaatttctaacacatacaaaaataaaaataaaaacgaaaaccgaatcccctcgcgtcgacgccccgaaaaatcaaaacccgaaataataaaacgaaaaacgaaacctcgaaaaacgactcgcgaaaatcgcgaacgacgaccgccgaaaaaataaaattcgtaacaccgctataaccgcaaacgacgcactcatcaatacaaacgataaaaccaccgccacccccgccccgtctaaactttacaatttcccgcctaaataataaaaaacttaaaacgctacgaaaaaaaaaacaattcgactt

SEQ ID NO: 9473 - DNA, 573 bp, Artificial Sequence
  chemically treated genomic DNA (Homo sapiens) CpG-island No: 9473
ggaggcgtggttttcgcgagcgtttgttttcgttcgtcgcgttcgcgtaggcgtattaggggttttcgtttcgcgaggtttttcgtcgggcggcgggagttagacgagtacgtagggtatttttcgggttttcgggaggcggttttgggcgttttttttttgtcgtcgtcgcggtttcggttgttttttgcgtagttgggtagggttcgggtttttatatcgtttttttcgggaatgcgggcgttttggagtcggggagtcggggcgatcgtagggagggtagtttttcggggtggaggttttcgggcgtcgcgttttcgtttggaaattagtcgtcgttttcgtaggagttagtcggcgtggacgttttagtacgtttttttttggtgttgtcggtcgttttgtaatttcgagaagaaagttagagacgtcgtggtttatagaggcgtttagtttttttcgtttatatttacgttgtttttttatcgcgtttttttttttttttttgggtgtttttttttttttttaggaaagcggatttggaggaataggtttcgtgattgttatttaatt

SEQ ID NO: 9474 - DNA, 573 bp, Artificial Sequence
  chemically treated genomic DNA (Homo sapiens) CpG-island No: 9474
aattaaataacaatcacgaaacctattcctccaaatccgctttcctaaaaaaaaaaaaaaacacccaaaaaaaaaaaaaaaaacgcgataaaaaaacaacgtaaatataaacgaaaaaaactaaacgcctctataaaccacgacgtctctaactttcttctcgaaattacaaaacgaccgacaacaccaaaaaaaaacgtactaaaacgtccacgccgactaactcctacgaaaacgacgactaatttccaaacgaaaacgcgacgcccgaaaacctccaccccgaaaaactaccctccctacgatcgccccgactccccgactccaaaacgcccgcattcccgaaaaaaacgatataaaaacccgaaccctacccaactacgcaaaaaacaaccgaaaccgcgacgacgacaaaaaaaaaacgcccaaaaccgcctcccgaaaacccgaaaaataccctacgtactcgtctaactcccgccgcccgacgaaaaacctcgcgaaacgaaaacccctaatacgcctacgcgaacgcgacgaacgaaaacaaacgctcgcgaaaaccacgcctcc

SEQ ID NO: 9475 - DNA, 573 bp, Artificial Sequence
  chemically treated genomic DNA (Homo sapiens) CpG-island No: 9475
agttggatgatagttacgaaatttgtttttttaaattcgtttttttggagaggagagaaagtatttagggagaaaaagaagaacgcgatgaggaagtaacgtgagtgtgagcgaggaaaattaagcgtttttgtgggttacggcgtttttgatttttttttcggaattgtagggcgatcggtagtattaagaaggagcgtgttggggcgtttacgtcggttgatttttgcgggggcgacggttggtttttaggcgagggcgcggcgttcgaggatttttatttcggagagttgttttttttgcggtcgtttcggtttttcggttttagagcgttcgtattttcgagagaggcgatgtgggggttcgggttttgtttagttacgtagaaagtagtcggggtcgcggcggcggtagaaaggggacgtttagggtcgtttttcgggagttcgaggggtgttttgcgtgttcgtttagttttcgtcgttcggcgaaggatttcgcgggacggggatttttagtgcgtttgcgcgagcgcggcgggcggaggtagacgttcgcggaggttacgttttt

SEQ ID NO: 9476 - DNA, 573 bp, Artificial Sequence
  chemically treated genomic DNA (Homo sapiens) CpG-island No: 9476
aaaaacgtaacctccgcgaacgtctacctccgcccgccgcgctcgcgcaaacgcactaaaaatccccgtcccgcgaaatccttcgccgaacgacgaaaactaaacgaacacgcaaaacacccctcgaactcccgaaaaacgaccctaaacgtcccctttctaccgccgccgcgaccccgactactttctacgtaactaaacaaaacccgaacccccacatcgcctctctcgaaaatacgaacgctctaaaaccgaaaaaccgaaacgaccgcaaaaaaaacaactctccgaaataaaaatcctcgaacgccgcgccctcgcctaaaaaccaaccgtcgcccccgcaaaaatcaaccgacgtaaacgccccaacacgctccttcttaatactaccgatcgccctacaattccgaaaaaaaaatcaaaaacgccgtaacccacaaaaacgcttaattttcctcgctcacactcacgttacttcctcatcgcgttcttctttttctccctaaatactttctctcctctccaaaaaaacgaatttaaaaaaacaaatttcgtaactatcatccaact

SEQ ID NO: 9477 - DNA, 627 bp, Artificial Sequence
  chemically treated genomic DNA (Homo sapiens) CpG-island No: 9477
cgtcgcgattacggttaagacggtatcgggttttgggaataacgtgaatagaattatttaggaagtcgcgggagcgcgcgaatacgggagaagggaagtaggttgttatagaagagtaattcgagcggggttttagggtagtcgtatatacgaggtttcgagttttcggtgttagcggtattttagggtttttttcgtgttcggaaatcgtcgtagtttgtgggagagttatttattttttgtagcggtcgggaattttcgtaattcgtttcgtacggtttttaaagtcgttttcgttatggttgcgttagcgtcggtcgagatttcgttttttttcgacgtttcgtcgtaggttatattttaagtattcgtttcgttttttttagagttttcgtcgtaggttatatttttagattttcgtttcgtttttttagaggtattcgtcgtaggttatatttttagtatttcgtttcgttttgtttttggatatatatcgggttttgttatcgaagcggtggagcgattggtagcgttcgtttcggtttgttttattggtcggtattttagggttaataaataattgtgtttattgataagtttatatattagtataaacgggtacgttaa

SEQ ID NO: 9478 - DNA, 627 bp, Artificial Sequence
  chemically treated genomic DNA (Homo sapiens) CpG-island No: 9478
ttaacgtacccgtttatactaatatataaacttatcaataaacacaattatttattaaccctaaaataccgaccaataaaacaaaccgaaacgaacgctaccaatcgctccaccgcttcgataacaaaacccgatatatatccaaaaacaaaacgaaacgaaatactaaaaatataacctacgacgaatacctctaaaaaaacgaaacgaaaatctaaaaatataacctacgacgaaaactctaaaaaaaacgaaacgaatacttaaaatataacctacgacgaaacgtcgaaaaaaaacgaaatctcgaccgacgctaacgcaaccataacgaaaacgactttaaaaaccgtacgaaacgaattacgaaaattcccgaccgctacaaaaaataaataactctcccacaaactacgacgatttccgaacacgaaaaaaaccctaaaataccgctaacaccgaaaactcgaaacctcgtatatacgactaccctaaaaccccgctcgaattactcttctataacaacctacttcccttctcccgtattcgcgcgctcccgcgacttcctaaataattctattcacgttattcccaaaacccgataccgtcttaaccgtaatcgcgacg

SEQ ID NO: 9479 - DNA, 627 bp, Artificial Sequence
  chemically treated genomic DNA (Homo sapiens) CpG-island No: 9479
ttaacgtgttcgtttgtattgatgtatgaatttgttaataaatataattgtttgttaattttgggatgtcggttagtggggtaggtcgaagcgggcgttgttagtcgttttatcgtttcggtggtagaattcggtgtgtgtttaggggtaggacggggcggggtgttgggggtgtggtttgcggcgggtgtttttggaagggcggggcgagggtttgggggtgtggtttgcggcggggattttggggagggcggggcgagtgtttggggtgtggtttgcggcggggcgtcggggaaaggcggggtttcggtcggcgttgacgtagttatggcggaggcggttttggaagtcgtgcggagcgagttacgagaattttcggtcgttgtaaggggtgagtggtttttttataggttgcggcgattttcgaatacgggaggggttttgggatgtcgttgatatcgggggttcggaatttcgtgtgtgcgattgttttgaggtttcgttcgggttgtttttttgtggtaatttgttttttttttttcgtgttcgcgcgttttcgcggttttttgggtgattttgtttacgttgtttttaaggttcggtgtcgttttgatcgtggtcgcggcg

SEQ ID NO: 9480 - DNA, 627 bp, Artificial Sequence
  chemically treated genomic DNA (Homo sapiens) CpG-island No: 9480
cgccgcgaccacgatcaaaacgacaccgaaccttaaaaacaacgtaaacaaaatcacccaaaaaaccgcgaaaacgcgcgaacacgaaaaaaaaaaaacaaattaccacaaaaaaacaacccgaacgaaacctcaaaacaatcgcacacacgaaattccgaacccccgatatcaacgacatcccaaaacccctcccgtattcgaaaatcgccgcaacctataaaaaaaccactcaccccttacaacgaccgaaaattctcgtaactcgctccgcacgacttccaaaaccgcctccgccataactacgtcaacgccgaccgaaaccccgcctttccccgacgccccgccgcaaaccacaccccaaacactcgccccgccctccccaaaatccccgccgcaaaccacacccccaaaccctcgccccgcccttccaaaaacacccgccgcaaaccacacccccaacaccccgccccgtcctacccctaaacacacaccgaattctaccaccgaaacgataaaacgactaacaacgcccgcttcgacctaccccactaaccgacatcccaaaattaacaaacaattatatttattaacaaattcatacatcaatacaaacgaacacgttaa

SEQ ID NO: 9481 - DNA, 511 bp, Artificial Sequence
  chemically treated genomic DNA (Homo sapiens) CpG-island No: 9481
cgttggggtagttggcgttttggttttttatttcgtggggaaaatggttttgagttcgattggtttgaggtttagataggtgatttcgcgaagcgggtgggtaggcgcggttttaggggcgggaggcgggtagttttcgtgattggtcggcggagggggcggtgtagcgattcgaggagggaagaggattttaagcgttatggtcgttgtcgttcgagttcgggtcgcgtatttgttgaggtaattgtaacgcgtagcgtgagtgcggggtcggcgggcgggtaggggatcgtagggtgtttacgtagttttttgggtgtgattcgtttagattttgcgtagtttttttcgtttatttttaagaattcggagaatttggatatcgttttgggtttttatcgcgcgttaggcggaatagcgaggttatagagtgcgcgatgtagttttttagggcgtagtgaggtagtttttattttgtttgtttatcgttaaagaaattgaggtttagaga

SEQ ID NO: 9482 - DNA, 511 bp, Artificial Sequence
  chemically treated genomic DNA (Homo sapiens) CpG-island No: 9482
tctctaaacctcaatttctttaacgataaacaaacaaaataaaaactacctcactacgccctaaaaaactacatcgcgcactctataacctcgctattccgcctaacgcgcgataaaaacccaaaacgatatccaaattctccgaattcttaaaaataaacgaaaaaaactacgcaaaatctaaacgaatcacacccaaaaaactacgtaaacaccctacgatcccctacccgcccgccgaccccgcactcacgctacgcgttacaattacctcaacaaatacgcgacccgaactcgaacgacaacgaccataacgcttaaaatcctcttccctcctcgaatcgctacaccgccccctccgccgaccaatcacgaaaactacccgcctcccgcccctaaaaccgcgcctacccacccgcttcgcgaaatcacctatctaaacctcaaaccaatcgaactcaaaaccattttccccacgaaataaaaaaccaaaacgccaactaccccaacg

SEQ ID NO: 9483 - DNA, 511 bp, Artificial Sequence
  chemically treated genomic DNA (Homo sapiens) CpG-island No: 9483
tttttgggttttagtttttttaacggtagataagtagagtaaaggttgttttattgcgttttgagaggttgtatcgcgtattttgtgatttcgttgtttcgtttggcgcgcggtgggagtttagggcggtatttaaatttttcgaatttttgaaagtaagcggagaagattgcgtaggatttgagcgggttatatttagggggttgcgtgggtattttgcggttttttgttcgttcgtcggtttcgtatttacgttgcgcgttgtagttgttttagtaagtacgcgattcgggttcgggcggtagcggttatggcgtttggagttttttttttttttcgggtcgttatatcgtttttttcgtcggttaattacggaggttgttcgtttttcgtttttggggtcgcgtttgtttattcgtttcgcggggttatttgtttaaattttaagttagtcgggtttaaggttattttttttacggagtaaagaattagaacgttagttgttttagcg

SEQ ID NO: 9484 - DNA, 511 bp, Artificial Sequence
  chemically treated genomic DNA (Homo sapiens) CpG-island No: 9484
cgctaaaacaactaacgttctaattctttactccgtaaaaaaaataaccttaaacccgactaacttaaaatttaaacaaataaccccgcgaaacgaataaacaaacgcgaccccaaaaacgaaaaacgaacaacctccgtaattaaccgacgaaaaaaacgatataacgacccgaaaaaaaaaaaaaactccaaacgccataaccgctaccgcccgaacccgaatcgcgtacttactaaaacaactacaacgcgcaacgtaaatacgaaaccgacgaacgaacaaaaaaccgcaaaatacccacgcaaccccctaaatataacccgctcaaatcctacgcaatcttctccgcttactttcaaaaattcgaaaaatttaaataccgccctaaactcccaccgcgcgccaaacgaaacaacgaaatcacaaaatacgcgatacaacctctcaaaacgcaataaaacaacctttactctacttatctaccgttaaaaaaactaaaacccaaaaa

SEQ ID NO: 9485 - DNA, 1078 bp, Artificial Sequence
  chemically treated genomic DNA (Homo sapiens) CpG-island No: 9485
  unsure (407, 544, 655, 737, 927, 946, 959)
agcgggcggggagtagcgattcgacgcggttgggttttttagtagggcgcgtcgggtgtggggagggggcgcggcgtgagatagtgggggatattgcgtgaggaaagttttgcgttttttttcggggtattaggatttgcgtttttttttcgggtttaggtcgcgcgcgggattcgataattcggtcgagggtttcgcgatttatttgcggttagagcgttgtttatttgggcgtcgtcgaagtcgtttagacgcgagggcgcggtcgttggcgggcggggagcggggaggcgggattcggcgcgacggggttgtttcgtttttcgatgatgcggcggtcgtcgattcgtttttacgttgttatttattttttattatggttgtagtataaagtaataagtttcggnaggtcgttttttttttgaggagcggtttcggcggtcggagaaggcgtaggaggaggaagaggcggaggaagaggaggggaatcgtcgttttttaaatatttttttcgagggggttgtgcgcggttttcggttttcgngttttcggacgttcgcgtcgggagttcgaattcgggttgttcgcggtttttttttttttttttttcgtttcgcgtagacgaggaataaagttgtcgagagcgattgggttnggagggttgtagttcgggtcgggtgttttggtcgcggcggcgtcggcgtcggggtagtttcgtttcgggcgcgttgatgggngggaggcggcggcggcggagtttatagcggcggttcgagtagtagaggcggcggcggcggcggttgggcggttcgaggggatgtagtagtagtcgggagggacggtcgagtttagtagatagagattaggagcggcggtcgaggcgatcgggtttcgtagcgttcggatttgagttagatttatttggtntcgttttttcgatcggcgngtcgaggcgtttngaggattggggacgcggaagatttaagtgattttcggagatttttgggcggcggttgcgtaagtttttgagaggagggggcgatttttagcgtcgtgggggaggaggtttcgtttgttt

SEQ ID NO: 9486 - DNA, 1078 bp, Artificial Sequence
  chemically treated genomic DNA (Homo sapiens) CpG-island No: 9486
  unsure (120, 133, 152, 342, 424, 535, 672)
aaacaaacgaaacctcctcccccacgacgctaaaaatcgccccctcctctcaaaaacttacgcaaccgccgcccaaaaatctccgaaaatcacttaaatcttccgcgtccccaatcctcnaaacgcctcgacncgccgatcgaaaaaacganaccaaataaatctaactcaaatccgaacgctacgaaacccgatcgcctcgaccgccgctcctaatctctatctactaaactcgaccgtccctcccgactactactacatcccctcgaaccgcccaaccgccgccgccgccgcctctactactcgaaccgccgctataaactccgccgccgccgcctcccncccatcaacgcgcccgaaacgaaactaccccgacgccgacgccgccgcgaccaaaacacccgacccgaactacaaccctccnaacccaatcgctctcgacaactttattcctcgtctacgcgaaacgaaaaaaaaaaaaaaaaaaaccgcgaacaacccgaattcgaactcccgacgcgaacgtccgaaaacncgaaaaccgaaaaccgcgcacaaccccctcgaaaaaaatatttaaaaaacgacgattcccctcctcttcctccgcctcttcctcctcctacgccttctccgaccgccgaaaccgctcctcaaaaaaaaaacgacctnccgaaacttattactttatactacaaccataataaaaaataaataacaacgtaaaaacgaatcgacgaccgccgcatcatcgaaaaacgaaacaaccccgtcgcgccgaatcccgcctccccgctccccgcccgccaacgaccgcgccctcgcgtctaaacgacttcgacgacgcccaaataaacaacgctctaaccgcaaataaatcgcgaaaccctcgaccgaattatcgaatcccgcgcgcgacctaaacccgaaaaaaaaacgcaaatcctaataccccgaaaaaaaacgcaaaactttcctcacgcaatatcccccactatctcacgccgcgccccctccccacacccgacgcgccctactaaaaaacccaaccgcgtcgaatcgctactccccgcccgct

SEQ ID NO: 9487 - DNA, 1078 bp, Artificial Sequence
  chemically treated genomic DNA (Homo sapiens) CpG-island No: 9487
  unsure (120, 133, 152, 342, 424, 535, 672)
gggtaggcggagtttttttttttacggcgttgagggtcgttttttttttttaggggtttgcgtagtcgtcgtttaggggttttcgagaattatttggatttttcgcgtttttagtttttngggcgtttcggtncgtcggtcgggaggacggnattaggtgggtttggtttaggttcgggcgttgcgaagttcgatcgtttcggtcgtcgtttttggtttttgtttattgggttcggtcgtttttttcgattgttgttgtattttttcgggtcgtttagtcgtcgtcgtcgtcgtttttgttgttcgggtcgtcgttgtgggtttcgtcgtcgtcgttttttntttattagcgcgttcggagcggagttgtttcggcgtcggcgtcgtcgcggttagagtattcggttcgggttgtagttttttnggtttagtcgttttcggtaattttgtttttcgtttgcgcggggcggaggagggggaagagggggtcgcggatagttcgggttcggattttcggcgcgggcgttcgagggtncgaaagtcgagagtcgcgtatagttttttcggagagagtgtttgggaagcggcgatttttttttttttttttcgtttttttttttttttgcgtttttttcggtcgtcggagtcgttttttagggaggaagcggtttntcggggtttgttgttttgtgttgtaattatggtgaggaatgagtgatagcgtgggggcgagtcggcggtcgtcgtattatcggggggcggggtagtttcgtcgcgtcgggtttcgttttttcgtttttcgttcgttagcggtcgcgttttcgcgtttgagcggtttcggcggcgtttaggtgagtagcgttttggtcgtaagtgggtcgcggagttttcggtcgggttgtcgggtttcgcgcgcggtttggattcgaagagggggcgtaagttttggtgtttcggagagaagcgtagggttttttttacgtagtgttttttattgttttacgtcgcgttttttttttatattcgacgcgttttattaggagatttagtcgcgtcgggtcgttgtttttcgttcgtt

SEQ ID NO: 9488 - DNA, 1078 bp, Artificial Sequence
  chemically treated genomic DNA (Homo sapiens) CpG-island No: 9488
  unsure (407, 544, 655, 737, 927, 946, 959)
aacgaacgaaaaacaacgacccgacgcgactaaatctcctaataaaacgcgtcgaatataaaaaaaaaacgcgacgtaaaacaataaaaaacactacgtaaaaaaaaccctacgcttctctccgaaacaccaaaacttacgccccctcttcgaatccaaaccgcgcgcgaaacccgacaacccgaccgaaaactccgcgacccacttacgaccaaaacgctactcacctaaacgccgccgaaaccgctcaaacgcgaaaacgcgaccgctaacgaacgaaaaacgaaaaaacgaaacccgacgcgacgaaactaccccgccccccgataatacgacgaccgccgactcgcccccacgctatcactcattcctcaccataattacaacacaaaacaacaaaccccganaaaccgcttcctccctaaaaaacgactccgacgaccgaaaaaaacgcaaaaaaaaaaaaaaacgaaaaaaaaaaaaaaaaatcgccgcttcccaaacactctctccgaaaaaactatacgcgactctcgactttcgnaccctcgaacgcccgcgccgaaaatccgaacccgaactatccgcgaccccctcttccccctcctccgccccgcgcaaacgaaaaacaaaattaccgaaaacgactaaaccnaaaaaactacaacccgaaccgaatactctaaccgcgacgacgccgacgccgaaacaactccgctccgaacgcgctaataaanaaaaaacgacgacgacgaaacccacaacgacgacccgaacaacaaaaacgacgacgacgacgactaaacgacccgaaaaaatacaacaacaatcgaaaaaaacgaccgaacccaataaacaaaaaccaaaaacgacgaccgaaacgatcgaacttcgcaacgcccgaacctaaaccaaacccacctaatnccgtcctcccgaccgacgnaccgaaacgcccnaaaaactaaaaacgcgaaaaatccaaataattctcgaaaacccctaaacgacgactacgcaaacccctaaaaaaaaaaaacgaccctcaacgccgtaaaaaaaaaaactccgcctaccc

SEQ ID NO: 9489 - DNA, 523 bp, Artificial Sequence
  chemically treated genomic DNA (Homo sapiens) CpG-island No: 9489
  unsure (60)
gcgtgtcgagttagggtcggaggaagtcggcggagcggcgaggaagaggaggaggagganggaaggggagtttcgtttgcgggtcgtatcgtacggtagtttaggggcgtcgcgattttttcggttgcgtttagtttttcgcgtttgtatcgcgttttcggtcgtcgggtttagtcgagtcgttttttcgcgggtttcgcgtcgtcgtcgtcgcggtttggttgattagtcgcgggcgggcgggcgggcgtagcgcgtagggcggaggtagtagcggcgttgggtcgggaggaggtcggttagggtgcggagcggtttcggttcgtttttagaggggagatggcgttttacgtagataatagttttcgttaggcggtgatgaagaattttttcgaaaggattttttaggtgagaacgcggcggtcgtttgtttttggtcggatttttgtttcgtaggttgcgtttttttttgtttttttattttttttttgatatagttcgtttcgagtattttattttttgt

SEQ ID NO: 9490 - DNA, 523 bp, Artificial Sequence
  chemically treated genomic DNA (Homo sapiens) CpG-island No: 9490
  unsure (464)
acaaaaaataaaatactcgaaacgaactatatcaaaaaaaaaataaaaaaacaaaaaaaaacgcaacctacgaaacaaaaatccgaccaaaaacaaacgaccgccgcgttctcacctaaaaaatcctttcgaaaaaattcttcatcaccgcctaacgaaaactattatctacgtaaaacgccatctcccctctaaaaacgaaccgaaaccgctccgcaccctaaccgacctcctcccgacccaacgccgctactacctccgccctacgcgctacgcccgcccgcccgcccgcgactaatcaaccaaaccgcgacgacgacgacgcgaaacccgcgaaaaaacgactcgactaaacccgacgaccgaaaacgcgatacaaacgcgaaaaactaaacgcaaccgaaaaaatcgcgacgcccctaaactaccgtacgatacgacccgcaaacgaaactccccttccntcctcctcctcctcttcctcgccgctccgccgacttcctccgaccctaactcgacacgc

SEQ ID NO: 9491 - DNA, 523 bp, Artificial Sequence
  chemically treated genomic DNA (Homo sapiens) CpG-island No: 9491
  unsure (464)
gtaagaagtggggtgttcggggcgaattgtgttaggaaggaggtggggggataggggaagacgtagtttgcgaggtagaaattcggttaagggtaggcggtcgtcgcgtttttatttggggggttttttcggggggattttttattatcgtttggcggaagttgttatttacgtaggacgttattttttttttgggagcgggtcggggtcgtttcgtattttggtcggttttttttcggtttagcgtcgttgttgttttcgttttgcgcgttgcgttcgttcgttcgttcgcgattaattagttaaatcgcggcggcggcggcgcggggttcgcgggggggcggttcggttgggttcggcggtcgagagcgcggtataggcgcgaggggttggacgtagtcgggagggtcgcggcgtttttaggttgtcgtgcgatgcggttcgtaggcggaattttttttttntttttttttttttttttttcgtcgtttcgtcggtttttttcggttttggttcgatacgt

SEQ ID NO: 9492 - DNA, 523 bp, Artificial Sequence
  chemically treated genomic DNA (Homo sapiens) CpG-island No: 9492
  unsure (60)
acgtatcgaaccaaaaccgaaaaaaaccgacgaaacgacgaaaaaaaaaaaaaaaaaaanaaaaaaaaaattccgcctacgaaccgcatcgcacgacaacctaaaaacgccgcgaccctcccgactacgtccaacccctcgcgcctataccgcgctctcgaccgccgaacccaaccgaaccgcccccccgcgaaccccgcgccgccgccgccgcgatttaactaattaatcgcgaacgaacgaacgaacgcaacgcgcaaaacgaaaacaacaacgacgctaaaccgaaaaaaaaccgaccaaaatacgaaacgaccccgacccgctcccaaaaaaaaaataacgtcctacgtaaataacaacttccgccaaacgataataaaaaatccccccgaaaaaaccccccaaataaaaacgcgacgaccgcctacccttaaccgaatttctacctcgcaaactacgtcttcccctatccccccacctccttcctaacacaattcgccccgaacaccccacttcttac

SEQ ID NO: 9493 - DNA, 579 bp, Artificial Sequence
  chemically treated genomic DNA (Homo sapiens) CpG-island No: 9493
  unsure (252)
cggtttcgggtagggagcgagcgagtgttttacgtcgttcgtaggatcgagtgagttacgcggtcgttagacgaggtcggtggcgtacgtattcgagattcgatgtagtgtatcgtttcggcgtcgcggttttcgtcgcgtagatatcgtattcgtagtatcgttttggttcggttggtttacgcgcggattgtttttggtttttgggtcgcgtcggtttaagttttttcgagagcgcgttcggagcggggntgggcgggcgcgcggggttcgaggttttttgtagtcgcgtttcgtttcggtcgtttttcgcggttttattggttgtcgggaataggtggtggggtcggcgtagcgtttcgaattaggaattgtcgggaagcgtcgcggtcgttggttcgagttttcgatgtttgtttttttttagttagcggggttattgacggtttttgttgtacgttcggattcggatttagattcgagcgtcgtaagaaggttcgttgggagtttcgcgtaattgggtagtgattcgatttttgacgaagtgataatgggttatgtatatattaagtgaatatt

SEQ ID NO: 9494 - DNA, 579 bp, Artificial Sequence
  chemically treated genomic DNA (Homo sapiens) CpG-island No: 9494
  unsure (328)
aatattcacttaatatatacataacccattatcacttcgtcaaaaatcgaatcactacccaattacgcgaaactcccaacgaaccttcttacgacgctcgaatctaaatccgaatccgaacgtacaacaaaaaccgtcaataaccccgctaactaaaaaaaaacaaacatcgaaaactcgaaccaacgaccgcgacgcttcccgacaattcctaattcgaaacgctacgccgaccccaccacctattcccgacaaccaataaaaccgcgaaaaacgaccgaaacgaaacgcgactacaaaaaacctcgaaccccgcgcgcccgcccanccccgctccgaacgcgctctcgaaaaaacttaaaccgacgcgacccaaaaaccaaaaacaatccgcgcgtaaaccaaccgaaccaaaacgatactacgaatacgatatctacgcgacgaaaaccgcgacgccgaaacgatacactacatcgaatctcgaatacgtacgccaccgacctcgtctaacgaccgcgtaactcactcgatcctacgaacgacgtaaaacactcgctcgctccctacccgaaaccg

SEQ ID NO: 9495 - DNA, 579 bp, Artificial Sequence
  chemically treated genomic DNA (Homo sapiens) CpG-island No: 9495
  unsure (328)
aatatttatttaatatatgtatagtttattgttatttcgttagaagtcgggttattgtttagttgcgcgagatttttaacgggtttttttgcgacgttcgggtttgggttcgggttcggacgtgtaatagaagtcgttagtggtttcgttggttaaaaaagggtaagtatcggaggttcgagttagcggtcgcggcgtttttcgatagtttttaattcggggcgttacgtcggttttattatttgttttcggtagttaatggggtcgcggggggcggtcggggcggagcgcggttataaaaggtttcgggtttcgcgcgttcgtttantttcgtttcgggcgcgttttcgggaaggtttggatcgacgcggtttagaggttaggaatagttcgcgcgtggattagtcgggttagggcgatgttgcgggtgcggtgtttgcgcggcgggagtcgcggcgtcgaggcggtgtattatatcggatttcgggtgcgtgcgttatcggtttcgtttggcggtcgcgtgatttattcgattttgcgggcggcgtggagtattcgttcgttttttgttcggagtcg

SEQ ID NO: 9496 - DNA, 579 bp, Artificial Sequence
  chemically treated genomic DNA (Homo sapiens) CpG-island No: 9496
  unsure (252)
cgactccgaacaaaaaacgaacgaatactccacgccgcccgcaaaatcgaataaatcacgcgaccgccaaacgaaaccgataacgcacgcacccgaaatccgatataatacaccgcctcgacgccgcgactcccgccgcgcaaacaccgcacccgcaacatcgccctaacccgactaatccacgcgcgaactattcctaacctctaaaccgcgtcgatccaaaccttcccgaaaacgcgcccgaaacgaaantaaacgaacgcgcgaaacccgaaaccttttataaccgcgctccgccccgaccgccccccgcgaccccattaactaccgaaaacaaataataaaaccgacgtaacgccccgaattaaaaactatcgaaaaacgccgcgaccgctaactcgaacctccgatacttacccttttttaaccaacgaaaccactaacgacttctattacacgtccgaacccgaacccaaacccgaacgtcgcaaaaaaacccgttaaaaatctcgcgcaactaaacaataacccgacttctaacgaaataacaataaactatacatatattaaataaatatt

SEQ ID NO: 9497 - DNA, 1478 bp, Artificial Sequence
  chemically treated genomic DNA (Homo sapiens) CpG-island No: 9497
  unsure (306, 317, 417, 524, 636, 668, 910, 917, 1470)
aaacgttttcggggtagttaaatggcgttagaagcggtcgaggttttatcgatagtgggtaaattcgttaagtttatttatttttcggttaaatttttcgggtttacgtagcgttgggtttagagcgttcggtcggttagtggtttttataattacgatttcgcggtttttattggcgtcgtttaatagcgttaatatttgggttattacgcggttttcgggtgttcgattgtttcgttggggatataaggcgtttatttcgtttaggaagaggaggttgggttcgcggttggttagttttcgggncgcgttggaangattcgtcgtacgtttttttcggtttttttaggtcgggaattttgtagcgtcggggcgttgattgttagtagtttcgcgttcgtttcgcgcgttacggtntcgtattagttgggttttgtttatttcggggggtttcgttagtagtatttcgcgaggtatcgttaagtttagcgcggttagggcgcgcgggtagcggagcgggaggncggaggagttttcgtagcgagtcggtcgttttcgaaagattttttaggggtatttcgggttgcggttgggttttcgacggaggtttttcgttaaggttgacgcgggtacganggggtgattagtttagcgggatcgggattggngcgtttcgtcgacgatgtgtaaggtagttattaggttaggagcgtttggcggagcgattattacgtggtttagggagatcggtcggttttttagtagtttttgtgtcgtttttagtatcgcggttgtatttcgggtatcgggcgcgtttgtcggttttcgtaatatcggttatacggcgacgcgtcgtaggggcggatagggtattaggaggaggcgatttaggttgagattttttcgggantttcgancgtttcgatcgtcgtttcggggttcgcgtatagcgggtttagttgtataaagtcgttcgtttcgtttcgtcgaggttaggtagtgtagaggtaggagtcgtcgtcgggtagcgagattttaattgtcgagtttaagcgcgcgtttagggcgtggagggcggtcgggtttaggcggtagcgttgggtgtttcggtttttagcgtttaagggtagtagttttaagagcggttttttagggaagggattcgagttcggagttatcgtatatagatgaattaggtagacgaaattagattaggaaatttattcggtttataaaaagcggaatatcgagttcgtaggtcggaagtagattgcgcgtatgcgttagggaagattgcgttgttagtagttgagtgaaggtcgaaagggttaatggaaacgttagacgacgttcgggtttttgggtagagcgttggtgttcgttttcgtgaaatcgagttgtttaatttagagttttttcgagatggttttcgttataggtgtttgggaggcggtttaagtttattttatntaggttat

SEQ ID NO: 9498 - DNA, 1478 bp, Artificial Sequence
  chemically treated genomic DNA (Homo sapiens) CpG-island No: 9498
  unsure (9, 562, 569, 811, 843, 955, 1062, 1162, 1173)
ataacctanataaaataaacttaaaccgcctcccaaacacctataacgaaaaccatctcgaaaaaactctaaattaaacaactcgatttcacgaaaacgaacaccaacgctctacccaaaaacccgaacgtcgtctaacgtttccattaaccctttcgaccttcactcaactactaacaacgcaatcttccctaacgcatacgcgcaatctacttccgacctacgaactcgatattccgctttttataaaccgaataaatttcctaatctaatttcgtctacctaattcatctatatacgataactccgaactcgaatcccttccctaaaaaaccgctcttaaaactactacccttaaacgctaaaaaccgaaacacccaacgctaccgcctaaacccgaccgccctccacgccctaaacgcgcgcttaaactcgacaattaaaatctcgctacccgacgacgactcctacctctacactacctaacctcgacgaaacgaaacgaacgactttatacaactaaacccgctatacgcgaaccccgaaacgacgatcgaaacgntcgaaantcccgaaaaaatctcaacctaaatcgcctcctcctaataccctatccgcccctacgacgcgtcgccgtataaccgatattacgaaaaccgacaaacgcgcccgatacccgaaatacaaccgcgatactaaaaacgacacaaaaactactaaaaaaccgaccgatctccctaaaccacgtaataatcgctccgccaaacgctcctaacctaataactaccttacacatcgtcgacgaaacgcnccaatcccgatcccgctaaactaatcaccccntcgtacccgcgtcaaccttaacgaaaaacctccgtcgaaaacccaaccgcaacccgaaatacccctaaaaaatctttcgaaaacgaccgactcgctacgaaaactcctccgncctcccgctccgctacccgcgcgccctaaccgcgctaaacttaacgatacctcgcgaaatactactaacgaaaccccccgaaataaacaaaacccaactaatacganaccgtaacgcgcgaaacgaacgcgaaactactaacaatcaacgccccgacgctacaaaattcccgacctaaaaaaaccgaaaaaaacgtacgacgaatcnttccaacgcgncccgaaaactaaccaaccgcgaacccaacctcctcttcctaaacgaaataaacgccttatatccccaacgaaacaatcgaacacccgaaaaccgcgtaataacccaaatattaacgctattaaacgacgccaataaaaaccgcgaaatcgtaattataaaaaccactaaccgaccgaacgctctaaacccaacgctacgtaaacccgaaaaatttaaccgaaaaataaataaacttaacgaatttacccactatcgataaaacctcgaccgcttctaacgccatttaactaccccgaaaacgttt

SEQ ID NO: 9499 - DNA, 1478 bp, Artificial Sequence
  chemically treated genomic DNA (Homo sapiens) CpG-island No: 9499
  unsure (9, 562, 569, 811, 843, 955, 1062, 1162, 1173)
atgatttangtgaagtgagtttaagtcgttttttagatatttgtaacgaagattatttcgggaaagttttgggttaggtaattcgattttacgaaagcggatattaacgttttatttagaggttcgagcgtcgtttaacgtttttattggttttttcggtttttatttagttgttagtaacgtagttttttttagcgtatgcgcgtaatttgttttcggtttgcgagttcggtgtttcgttttttgtgggtcgggtgggttttttaatttggtttcgtttgtttggtttatttgtgtgcgatggtttcggattcggattttttttttgaagggtcgtttttaaagttgttatttttagacgttagagatcggggtatttagcgttgtcgtttgggttcggtcgttttttacgttttgggcgcgcgtttgggttcggtagttaagatttcgttattcgacggcggtttttgtttttgtattgtttggtttcggcgggacggagcggacggttttgtgtagttggattcgttgtgcgcgagtttcggggcggcggtcggggcgntcgagantttcggaggagttttagtttgaatcgtttttttttagtgttttgttcgtttttgcggcgcgtcgtcgtgtggtcggtgttgcgagagtcggtaggcgcgttcggtgttcggaatatagtcgcggtgttggaggcggtataggagttgttgagaaatcgatcgatttttttgggttacgtggtggtcgtttcgttaggcgtttttggtttggtggttgttttgtatatcgtcggcgggacgtnttagtttcgatttcgttgggttggttattttntcgtattcgcgttagttttggcggggagttttcgtcggaagtttagtcgtagttcgaggtgtttttgggaggtttttcggaggcggtcgattcgttgcgggagttttttcgntttttcgtttcgttattcgcgcgttttgatcgcgttgggtttagcggtgtttcgcggggtgttattggcggggtttttcggagtgggtaagatttagttggtgcggngtcgtggcgcgcgaggcgggcgcggagttgttggtagttagcgtttcggcgttgtagggttttcggtttggggagatcgaggagaacgtgcggcgggttnttttagcgcgnttcgggaattggttagtcgcggatttagttttttttttttggacgagatggacgttttgtgtttttagcggggtagtcgagtattcgagagtcgcgtagtggtttaggtgttgacgttgttggacggcgttagtggggatcgcgaggtcgtggttgtgggagttattaatcggtcggacgttttagatttagcgttgcgtagattcgggagatttgatcgagaggtgaatgggtttggcgggtttgtttattgtcggtggaatttcggtcgtttttggcgttatttggttgtttcggaggcgttt

SEQ ID NO: 9500 - DNA, 1478 bp, Artificial Sequence
  chemically treated genomic DNA (Homo sapiens) CpG-island No: 9500
  unsure (306, 317, 417, 524, 636, 668, 910, 917, 1470)
aaacgcctccgaaacaaccaaataacgccaaaaacgaccgaaattccaccgacaataaacaaacccgccaaacccattcacctctcgatcaaatctcccgaatctacgcaacgctaaatctaaaacgtccgaccgattaataactcccacaaccacgacctcgcgatccccactaacgccgtccaacaacgtcaacacctaaaccactacgcgactctcgaatactcgactaccccgctaaaaacacaaaacgtccatctcgtccaaaaaaaaaaaactaaatccgcgactaaccaattcccgaancgcgctaaaanaacccgccgcacgttctcctcgatctccccaaaccgaaaaccctacaacgccgaaacgctaactaccaacaactccgcgcccgcctcgcgcgccacgacnccgcaccaactaaatcttacccactccgaaaaaccccgccaataacaccccgcgaaacaccgctaaacccaacgcgatcaaaacgcgcgaataacgaaacgaaaaancgaaaaaactcccgcaacgaatcgaccgcctccgaaaaacctcccaaaaacacctcgaactacgactaaacttccgacgaaaactccccgccaaaactaacgcgaatacganaaaataaccaacccaacgaaatcgaaactaanacgtcccgccgacgatatacaaaacaaccaccaaaccaaaaacgcctaacgaaacgaccaccacgtaacccaaaaaaatcgatcgatttctcaacaactcctataccgcctccaacaccgcgactatattccgaacaccgaacgcgcctaccgactctcgcaacaccgaccacacgacgacgcgccgcaaaaacgaacaaaacactaaaaaaaaacgattcaaactaaaactcctccgaaantctcgancgccccgaccgccgccccgaaactcgcgcacaacgaatccaactacacaaaaccgtccgctccgtcccgccgaaaccaaacaatacaaaaacaaaaaccgccgtcgaataacgaaatcttaactaccgaacccaaacgcgcgcccaaaacgtaaaaaacgaccgaacccaaacgacaacgctaaataccccgatctctaacgtctaaaaataacaactttaaaaacgacccttcaaaaaaaaaatccgaatccgaaaccatcgcacacaaataaaccaaacaaacgaaaccaaattaaaaaacccacccgacccacaaaaaacgaaacaccgaactcgcaaaccgaaaacaaattacgcgcatacgctaaaaaaaactacgttactaacaactaaataaaaaccgaaaaaaccaataaaaacgttaaacgacgctcgaacctctaaataaaacgttaatatccgctttcgtaaaatcgaattacctaacccaaaactttcccgaaataatcttcgttacaaatatctaaaaaacgacttaaactcacttcacntaaatcat

SEQ ID NO: 9501 - DNA, 638 bp, Artificial Sequence
  chemically treated genomic DNA (Homo sapiens) CpG-island No: 9501
gtttttgggtttcgcggggatcgcgtcgtcgttttcgtgagttatttttacgtttttcggggttcgtttgtcgttttcgtcgacgtttagagttcggttcgggtttaatttttttacgggtttttcggcggtagcggcggcgagcggcggcgtgtagcggcgagagtttttatcgttcgggtttcgatgagtaattttcggaataatcgggtgatggtggaaggggttggcgttcgggtagtgcgcggttcggattggaagtgggggaagtaggacggcggcgagggttatgtgggtatcgttcggagtttcgagagtttcgaggaggtggtggtagtgtgggataacggtatagttgttaattatcgttgtttcggggtttacgattttcgtattttggatagcgcgtttatcggtaagtcgcggttatttggttagggtttgcgcgcgcggggggaaggggcgagttgcggtgggcgtcggtgtcgcggggagaggtttgtagtgggatatttggtgggtagcgttcggttggagcgagcggaaaggtaaagcgttaaaggaattttaggtttcgaacgggtgaataaatatttttagaaaagattttttatttttaagggaaatgatggtagtat

SEQ ID NO: 9502 - DNA, 638 bp, Artificial Sequence
  chemically treated genomic DNA (Homo sapiens) CpG-island No: 9502
atactaccatcatttcccttaaaaataaaaaatcttttctaaaaatatttattcacccgttcgaaacctaaaattcctttaacgctttacctttccgctcgctccaaccgaacgctacccaccaaatatcccactacaaacctctccccgcgacaccgacgcccaccgcaactcgccccttccccccgcgcgcgcaaaccctaaccaaataaccgcgacttaccgataaacgcgctatccaaaatacgaaaatcgtaaaccccgaaacaacgataattaacaactataccgttatcccacactaccaccacctcctcgaaactctcgaaactccgaacgatacccacataaccctcgccgccgtcctacttcccccacttccaatccgaaccgcgcactacccgaacgccaaccccttccaccatcacccgattattccgaaaattactcatcgaaacccgaacgataaaaactctcgccgctacacgccgccgctcgccgccgctaccgccgaaaaacccgtaaaaaaattaaacccgaaccgaactctaaacgtcgacgaaaacgacaaacgaaccccgaaaaacgtaaaaataactcacgaaaacgacgacgcgatccccgcgaaacccaaaaac

SEQ ID NO: 9503 - DNA, 638 bp, Artificial Sequence
  chemically treated genomic DNA (Homo sapiens) CpG-island No: 9503
gtgttgttattattttttttgggggtagagggttttttttgaaagtgtttgtttattcgttcggaatttagaatttttttggcgttttgttttttcgttcgttttagtcgggcgttgtttattaggtgttttattgtagattttttttcgcgatatcgacgtttatcgtagttcgtttttttttttcgcgcgcgtaagttttggttaggtggtcgcggtttatcggtgggcgcgttgtttaggatgcggaggtcgtaagtttcggagtagcggtagttggtagttgtgtcgttgttttatattattattattttttcggggttttcgaagtttcggacggtgtttatatggttttcgtcgtcgttttgttttttttatttttagttcgggtcgcgtattattcgagcgttaattttttttattattattcggttatttcgggagttatttatcggggttcgggcggtaggggttttcgtcgttgtacgtcgtcgttcgtcgtcgttgtcgtcggggggttcgtgagggagttgggttcgggtcggattttaggcgtcggcgggggcggtaggcgagtttcgggggacgtgagaataatttacgggggcggcggcgcggttttcgcggagtttaaagat

SEQ ID NO: 9504 - DNA, 638 bp, Artificial Sequence
  chemically treated genomic DNA (Homo sapiens) CpG-island No: 9504
atctttaaactccgcgaaaaccgcgccgccgcccccgtaaattattctcacgtcccccgaaactcgcctaccgcccccgccgacgcctaaaatccgacccgaacccaactccctcacgaaccccccgacgacaacgacgacgaacgacgacgtacaacgacgaaaacccctaccgcccgaaccccgataaataactcccgaaataaccgaataataataaaaaaaattaacgctcgaataatacgcgacccgaactaaaaataaaaaaaacaaaacgacgacgaaaaccatataaacaccgtccgaaacttcgaaaaccccgaaaaaataataataatataaaacaacgacacaactaccaactaccgctactccgaaacttacgacctccgcatcctaaacaacgcgcccaccgataaaccgcgaccacctaaccaaaacttacgcgcgcgaaaaaaaaaaacgaactacgataaacgtcgatatcgcgaaaaaaaatctacaataaaacacctaataaacaacgcccgactaaaacgaacgaaaaaacaaaacgccaaaaaaattctaaattccgaacgaataaacaaacactttcaaaaaaaaccctctacccccaaaaaaaataataacaacac

SEQ ID NO: 9505 - DNA, 576 bp, Artificial Sequence
  chemically treated genomic DNA (Homo sapiens) CpG-island No: 9505
  unsure (249)
gttttcgtgttcgtgtttgttcgaattggcggcggtttgggtagaaaacgttttttttttttttttttttttttttttttttttttttttttttttttttttttttttttttcgcgggtttcggcgaagatttcgtcgttattgtttttgttttcgttgttttttagggaggtatcgtcggcgttcggttcggcgttgttatttcgggtttggatcgcgcggcgtagagcgcgtggggtcggattcggngtggtcgcgcggggacgtcggcgtcggggattttcggcgtttttgggtcgttggttgtttataaaagtcgcgcgagtagaggtggcggcggcgcgtaggggcggggggtcgcgtgggggtttttacgtcggtagtgggtaattttaggagatggcgaagaacgtttttttttcgcgcggggaaagtacgttagttttagttagtcggttcgggaacggtagttcggcgttcgcggtcgggagaagagaattggacgtgttattagtaggataggtaatggttttaaagttttaggttaatggttattagtagaggtagagttcgttt

SEQ ID NO: 9506 - DNA, 576 bp, Artificial Sequence
  chemically treated genomic DNA (Homo sapiens) CpG-island No: 9506
  unsure (328)
aaacgaactctacctctactaataaccattaacctaaaactttaaaaccattacctatcctactaataacacgtccaattctcttctcccgaccgcgaacgccgaactaccgttcccgaaccgactaactaaaactaacgtactttccccgcgcgaaaaaaaaacgttcttcgccatctcctaaaattacccactaccgacgtaaaaacccccacgcgaccccccgcccctacgcgccgccgccacctctactcgcgcgacttttataaacaaccaacgacccaaaaacgccgaaaatccccgacgccgacgtccccgcgcgaccacnccgaatccgaccccacgcgctctacgccgcgcgatccaaacccgaaataacaacgccgaaccgaacgccgacgatacctccctaaaaaacaacgaaaacaaaaacaataacgacgaaatcttcgccgaaacccgcgaaaaaaaaaaaaaaaaaaaaaaaaaaaaaaaaaaaaaaaaaaaaaaaaaaaaaaaaaaaaaacgttttctacccaaaccgccgccaattcgaacaaacacgaacacgaaaac

SEQ ID NO: 9507 - DNA, 576 bp, Artificial Sequence
  chemically treated genomic DNA (Homo sapiens) CpG-island No: 9507
  unsure (328)
gagcgagttttgtttttgttaatggttattggtttggggttttgaaattattgtttgttttgttaatgatacgtttagtttttttttttcggtcgcggacgtcgggttgtcgttttcgggtcggttgattgggattggcgtatttttttcgcgcgggggaggggcgtttttcgttattttttggggttgtttattgtcggcgtgggggtttttacgcggtttttcgtttttgcgcgtcgtcgttatttttgttcgcgcgatttttgtaggtagttagcggtttaggggcgtcgggggttttcggcgtcgacgttttcgcgcggttatntcgggttcggttttacgcgttttgcgtcgcgcggtttaagttcggaatggtagcgtcgggtcgggcgtcggcggtgtttttttggggggtagcggaggtagaggtagtggcggcgggattttcgtcggggttcgcgggaggaggaggaggagagggagaaggaggaggggaagaaggaggaagaggaggagagggaggcgttttttgtttagatcgtcgttagttcgagtaggtacgggtacggggat

SEQ ID NO: 9508 - DNA, 576 bp, Artificial Sequence
  chemically treated genomic DNA (Homo sapiens) CpG-island No: 9508
  unsure (249)
atccccgtacccgtacctactcgaactaacgacgatctaaacaaaaaacgcctccctctcctcctcttcctccttcttcccctcctccttctccctctcctcctcctcctcccgcgaaccccgacgaaaatcccgccgccactacctctacctccgctaccccccaaaaaaacaccgccgacgcccgacccgacgctaccattccgaacttaaaccgcgcgacgcaaaacgcgtaaaaccgaacccganataaccgcgcgaaaacgtcgacgccgaaaacccccgacgcccctaaaccgctaactacctacaaaaatcgcgcgaacaaaaataacgacgacgcgcaaaaacgaaaaaccgcgtaaaaacccccacgccgacaataaacaaccccaaaaaataacgaaaaacgcccctcccccgcgcgaaaaaaatacgccaatcccaatcaaccgacccgaaaacgacaacccgacgtccgcgaccgaaaaaaaaaaactaaacgtatcattaacaaaacaaacaataatttcaaaaccccaaaccaataaccattaacaaaaacaaaactcgctc

SEQ ID NO: 9509 - DNA, 569 bp, Artificial Sequence
  chemically treated genomic DNA (Homo sapiens) CpG-island No: 9509
gtcgggtagcgtaaaggtttcgtcgggttttagaaaggtcgggtaggttacgtcgggttggtttttgtcgtcgtggtagaggcggttgcggtttaggttttagttttacgattcggcgttattgtttattagcgtcgtgtagtttacggagtgtaggggagtacgggtcgtggttatattaattatagcgtgggtgtcgcgttgtcgagtcggttagttgatttgttaggcgtgtaggtcgcgggcgtggtttattttgtcgcggatgtcgtcggtgttttgggttacggggtgtcggtggaaggtgagtcggtcgtcgtttttgacgaagacgttgagcgagcggttttcggggttttacgcgtgtcgtagttgtatagttagtttcgtcgttggtatgtttaatagttggtttagtcgcgtcggtcgttcgggttttgtatttcgtagttttcgtttggtcggtcgtagcgtcggttttcgtatttttattgatttgaggtttttcgagagtttttggtttatgttttattgcggggaggaggtcgttgtaggttatcgttatttcg

SEQ ID NO: 9510 - DNA, 569 bp, Artificial Sequence
  chemically treated genomic DNA (Homo sapiens) CpG-island No: 9510
cgaaataacgataacctacaacgacctcctccccgcaataaaacataaaccaaaaactctcgaaaaacctcaaatcaataaaaatacgaaaaccgacgctacgaccgaccaaacgaaaactacgaaatacaaaacccgaacgaccgacgcgactaaaccaactattaaacataccaacgacgaaactaactatacaactacgacacgcgtaaaaccccgaaaaccgctcgctcaacgtcttcgtcaaaaacgacgaccgactcaccttccaccgacaccccgtaacccaaaacaccgacgacatccgcgacaaaataaaccacgcccgcgacctacacgcctaacaaatcaactaaccgactcgacaacgcgacacccacgctataattaatataaccacgacccgtactcccctacactccgtaaactacacgacgctaataaacaataacgccgaatcgtaaaactaaaacctaaaccgcaaccgcctctaccacgacgacaaaaaccaacccgacgtaacctacccgacctttctaaaacccgacgaaacctttacgctacccgac

SEQ ID NO: 9511 - DNA, 569 bp, Artificial Sequence
  chemically treated genomic DNA (Homo sapiens) CpG-island No: 9511
cgaggtagcggtggtttgtagcggtttttttttcgtagtgaagtatgggttagaagttttcggggagttttaagttagtggaggtgcgagagtcggcgttgcggtcggttaagcgggagttgcggggtgtagagttcgggcggtcggcgcggttggattagttgttggatatgttagcggcggggttggttgtgtagttgcggtacgcgtggaatttcgaggatcgttcgtttaacgttttcgttaaggacgacgatcggtttattttttatcggtatttcgtggtttagagtatcgacggtattcgcggtaaggtgggttacgttcgcggtttgtacgtttggtagattaattggtcggttcggtagcgcggtatttacgttgtagttggtgtggttacggttcgtgtttttttgtatttcgtgggttatacggcgttggtaggtagtgacgtcgagtcgtggggttgggatttgggtcgtagtcgtttttattacgacggtaagaattagttcggcgtggtttattcggtttttttggggttcgacgaggtttttgcgttgttcgat

SEQ ID NO: 9512 - DNA, 569 bp, Artificial Sequence
  chemically treated genomic DNA (Homo sapiens) CpG-island No: 9512
atcgaacaacgcaaaaacctcgtcgaaccccaaaaaaaccgaataaaccacgccgaactaattcttaccgtcgtaataaaaacgactacgacccaaatcccaaccccacgactcgacgtcactacctaccaacgccgtataacccacgaaatacaaaaaaacacgaaccgtaaccacaccaactacaacgtaaataccgcgctaccgaaccgaccaattaatctaccaaacgtacaaaccgcgaacgtaacccaccttaccgcgaataccgtcgatactctaaaccacgaaataccgataaaaaataaaccgatcgtcgtccttaacgaaaacgttaaacgaacgatcctcgaaattccacgcgtaccgcaactacacaaccaaccccgccgctaacatatccaacaactaatccaaccgcgccgaccgcccgaactctacaccccgcaactcccgcttaaccgaccgcaacgccgactctcgcacctccactaacttaaaactccccgaaaacttctaacccatacttcactacgaaaaaaaaaccgctacaaaccaccgctacctcg

SEQ ID NO: 9513 - DNA, 610 bp, Artificial Sequence
  chemically treated genomic DNA (Homo sapiens) CpG-island No: 9513
ttatcgcgattgtatttttttatcgataaaaggtggtttttagggtattttttttagatggcggcggcggttttcgacggtttttttattagtatttttcgcgggcggcggttttcgttagcgcggcgcggttttagtaattagagtaatcgtcgtacgtttttattcgtcgttaggttttacgcgttttagttagttgggcgggttcggtttagacgagggatcgggggcggggtttaggcgcgagttcgtttatatcgcgcgtttcgcgtgttgtttcgttttttatttttgtttttgtcgtcgtcggttaatgagggcgcgtatcgcgcggtaggtcgagatggcgttatgtcgcgtttggttaatcggaggcggcgtaatttgcgcggcgacgtttcgaaaggcgttagggcgatgttgcgtggtgcgggttggggcgtggggatgggcgcgggtcggtttcggcgtgggtggggttaggggtcgtttaggaggcgttttggggtcgggatcggcgtcggggtcggggttggggttggtttatcgtagtagttttagtttttgcgttttttttggattgaggtgtgttcgttttgaggagaagttt

SEQ ID NO: 9514 - DNA, 610 bp, Artificial Sequence
  chemically treated genomic DNA (Homo sapiens) CpG-island No: 9514
aaacttctcctcaaaacgaacacacctcaatccaaaaaaaacgcaaaaactaaaactactacgataaaccaaccccaaccccgaccccgacgccgatcccgaccccaaaacgcctcctaaacgacccctaaccccacccacgccgaaaccgacccgcgcccatccccacgccccaacccgcaccacgcaacatcgccctaacgcctttcgaaacgtcgccgcgcaaattacgccgcctccgattaaccaaacgcgacataacgccatctcgacctaccgcgcgatacgcgccctcattaaccgacgacgacaaaaacaaaaataaaaaacgaaacaacacgcgaaacgcgcgatataaacgaactcgcgcctaaaccccgcccccgatccctcgtctaaaccgaacccgcccaactaactaaaacgcgtaaaacctaacgacgaataaaaacgtacgacgattactctaattactaaaaccgcgccgcgctaacgaaaaccgccgcccgcgaaaaatactaataaaaaaaccgtcgaaaaccgccgccgccatctaaaaaaaataccctaaaaaccaccttttatcgataaaaaaatacaatcgcgataa

SEQ ID NO: 9515 - DNA, 610 bp, Artificial Sequence
  chemically treated genomic DNA (Homo sapiens) CpG-island No: 9515
aggtttttttttaaagcgagtatattttagtttagggagggcgtaggagttggggttgttgcggtgaattaattttaatttcgatttcgacgtcgatttcggttttagagcgttttttaggcgatttttggttttatttacgtcggagtcggttcgcgtttatttttacgttttaattcgtattacgtaatatcgttttagcgtttttcggggcgtcgtcgcgtaggttgcgtcgttttcgattggttaaacgcggtatagcgttatttcggtttatcgcgcggtgcgcgtttttattggtcggcggcggtaggagtaggggtagggggcggggtagtacgcggggcgcgcggtatgggcggattcgcgtttgagtttcgttttcggtttttcgtttgggtcgagttcgtttagttggttgagacgcgtggagtttggcggcgagtgggggcgtgcgacggttattttggttattggggtcgcgtcgcgttggcgagagtcgtcgttcgcgagggatgttggtgaggaagtcgtcgggagtcgtcgtcgttatttgagggaggtattttggaaattattttttatcggtggggaagtgtagtcgcggtgg

SEQ ID NO: 9516 - DNA, 610 bp, Artificial Sequence
  chemically treated genomic DNA (Homo sapiens) CpG-island No: 9516
ccaccgcgactacacttccccaccgataaaaaataatttccaaaatacctccctcaaataacgacgacgactcccgacgacttcctcaccaacatccctcgcgaacgacgactctcgccaacgcgacgcgaccccaataaccaaaataaccgtcgcacgcccccactcgccgccaaactccacgcgtctcaaccaactaaacgaactcgacccaaacgaaaaaccgaaaacgaaactcaaacgcgaatccgcccataccgcgcgccccgcgtactaccccgccccctacccctactcctaccgccgccgaccaataaaaacgcgcaccgcgcgataaaccgaaataacgctataccgcgtttaaccaatcgaaaacgacgcaacctacgcgacgacgccccgaaaaacgctaaaacgatattacgtaatacgaattaaaacgtaaaaataaacgcgaaccgactccgacgtaaataaaaccaaaaatcgcctaaaaaacgctctaaaaccgaaatcgacgtcgaaatcgaaattaaaattaattcaccgcaacaaccccaactcctacgccctccctaaactaaaatatactcgctttaaaaaaaaacct

SEQ ID NO: 9517 - DNA, 921 bp, Artificial Sequence
  chemically treated genomic DNA (Homo sapiens) CpG-island No: 9517
tataaacgcgtttcgagatcgtttggtattaataaagggtgcgtcgtttgttagggtcggggtcgtttgtgtttagtcgggttcgtttcgattttttgtaattttcgtttttaggacgggaacgcgtttacgtttagttcgcggtttcggttttaggttttcggtacgcgtcgttttttttagttgcgacgttgcggtttttcggacgtcgggatttatagttgcgcggtggggacggttcgcgtcggatcggttcgtttgatcgtgcgcggtgggtacggggtgatgtggaggttgggtattgttttgggcgcgagatttgcggagttgtttttttcggattttgatgatcgcgcgtgtttttagaaagggggcgtggatgtggcgtgatcggtaattgttttttgtttcgtttcgtttacgtttcgagtttcgtttagtagcgtattgtggcggtatttttcgagttgcggtcggtgagcgtttcgcgaaggcgacggcgttacgttcgagtgtatcgtgtcggaggtcgagattacggggcgttgggagttcggaggtcgttcgttgagattcggagcgcggttcgtattcgataggaaggtttgttcgtttggttattttttcgggtttttcgttgtttcgtttaggttcgaatagatttcgtttatcgggataagtttcgttttggtttcgacgggtttcgttttacggttttgtgagtttcgtttttgttttttttttcgtttttagtttttagtttcggatttttaggtttttcgttcgtatttttgtttcgtttattttagtatatattaacggcgttcgaatcgatttagggtttgttgggtttttattttcgtttttaacgttttttagaggtggtttcggtttcgttagcgatttttttatttttaggga

SEQ ID NO: 9518 - DNA, 921 bp, Artificial Sequence
  chemically treated genomic DNA (Homo sapiens) CpG-island No: 9518
tccctaaaaataaaaaaatcgctaacgaaaccgaaaccacctctaaaaaacgttaaaaacgaaaataaaaacccaacaaaccctaaatcgattcgaacgccgttaatatatactaaaataaacgaaacaaaaatacgaacgaaaaacctaaaaatccgaaactaaaaactaaaaacgaaaaaaaaaacaaaaacgaaactcacaaaaccgtaaaacgaaacccgtcgaaaccaaaacgaaacttatcccgataaacgaaatctattcgaacctaaacgaaacaacgaaaaacccgaaaaaataaccaaacgaacaaaccttcctatcgaatacgaaccgcgctccgaatctcaacgaacgacctccgaactcccaacgccccgtaatctcgacctccgacacgatacactcgaacgtaacgccgtcgccttcgcgaaacgctcaccgaccgcaactcgaaaaataccgccacaatacgctactaaacgaaactcgaaacgtaaacgaaacgaaacaaaaaacaattaccgatcacgccacatccacgccccctttctaaaaacacgcgcgatcatcaaaatccgaaaaaaacaactccgcaaatctcgcgcccaaaacaatacccaacctccacatcaccccgtacccaccgcgcacgatcaaacgaaccgatccgacgcgaaccgtccccaccgcgcaactataaatcccgacgtccgaaaaaccgcaacgtcgcaactaaaaaaaacgacgcgtaccgaaaacctaaaaccgaaaccgcgaactaaacgtaaacgcgttcccgtcctaaaaacgaaaattacaaaaaatcgaaacgaacccgactaaacacaaacgaccccgaccctaacaaacgacgcaccctttattaataccaaacgatctcgaaacgcgtttata

SEQ ID NO: 9519 - DNA, 921 bp, Artificial Sequence
  chemically treated genomic DNA (Homo sapiens) CpG-island No: 9519
tttttgggggtgagggggtcgttagcgaggtcggagttatttttgaggagcgttggggacgaaggtgggggtttagtaggttttgggtcggttcggacgtcgttagtgtatgttagggtgggcggaatagggatgcggacgggaagtttagaggttcgggattaggggttgggggcgggggaaagaatagggacgaggtttatagggtcgtggggcggggttcgtcggagttagggcggggtttgtttcggtgggcgggatttgttcgagtttgggcggggtagcgaggggttcgaaaaggtaattaggcgggtagatttttttgtcggatgcggatcgcgtttcgggttttagcgggcggttttcgagtttttagcgtttcgtggtttcgattttcgatacggtgtattcgaacgtagcgtcgtcgttttcgcgggacgtttatcgatcgtagttcggagagtatcgttatagtacgttattgggcggagttcggagcgtgagcggagcggggtagagggtagttatcggttacgttatatttacgttttttttttagaagtacgcgcggttattagggttcggggaagatagtttcgtaagtttcgcgtttaaagtagtgtttagtttttatattatttcgtatttatcgcgtacggttaggcggatcggttcggcgcgggtcgtttttatcgcgtagttgtaggtttcggcgttcgaggggtcgtagcgtcgtagttggagaaggcggcgcgtgtcgagggtttggagtcggagtcgcgggttaggcgtaagcgcgttttcgttttaggggcgggagttgtagagggtcggggcgagttcggttgggtataggcgatttcggttttggtaggcggcgtattttttgttgatgttaagcggtttcgaggcgcgtttatg

SEQ ID NO: 9520 - DNA, 921 bp, Artificial Sequence
  chemically treated genomic DNA (Homo sapiens) CpG-island No: 9520
cataaacgcgcctcgaaaccgcttaacatcaacaaaaaatacgccgcctaccaaaaccgaaatcgcctatacccaaccgaactcgccccgaccctctacaactcccgcccctaaaacgaaaacgcgcttacgcctaacccgcgactccgactccaaaccctcgacacgcgccgccttctccaactacgacgctacgacccctcgaacgccgaaacctacaactacgcgataaaaacgacccgcgccgaaccgatccgcctaaccgtacgcgataaatacgaaataatataaaaactaaacactactttaaacgcgaaacttacgaaactatcttccccgaaccctaataaccgcgcgtacttctaaaaaaaaaacgtaaatataacgtaaccgataactaccctctaccccgctccgctcacgctccgaactccgcccaataacgtactataacgatactctccgaactacgatcgataaacgtcccgcgaaaacgacgacgctacgttcgaatacaccgtatcgaaaatcgaaaccacgaaacgctaaaaactcgaaaaccgcccgctaaaacccgaaacgcgatccgcatccgacaaaaaaatctacccgcctaattaccttttcgaacccctcgctaccccgcccaaactcgaacaaatcccgcccaccgaaacaaaccccgccctaactccgacgaaccccgccccacgaccctataaacctcgtccctattctttcccccgcccccaacccctaatcccgaacctctaaacttcccgtccgcatccctattccgcccaccctaacatacactaacgacgtccgaaccgacccaaaacctactaaacccccaccttcgtccccaacgctcctcaaaaataactccgacctcgctaacgaccccctcacccccaaaaa

SEQ ID NO: 9521 - DNA, 582 bp, Artificial Sequence
  chemically treated genomic DNA (Homo sapiens) CpG-island No: 9521
ggcgtttggagaagaggcgtacgggtaggtgaggtgttgcggggtttcgcgtgggggtacgtcgcggggttgagtgagttacggttcgttcgttcgtattgtgcggttcggcgcggcgcggcggcggcggcgtaggggaggtgcggaggagtaggaggagggagcgcgggtgcggcgtcgggcgtgttggcggttgcggagggaggttgttagggagagtcgggcgagtcgcggtgcgttcgggagaacgcgggggatatggggcggcggcgcggggggcgtagacgcgggggaggaggagcggggagggtaggcgggtagggggagaggggcgtgttagggtgcgtggcgtggagggggcgagacgggaggtgagtgcggtcgggtgggggggaggagaggagtgaggcgagtgtcgttaggtggcgtaagggcggaggggggaggatacggaggtgcgagcgagataggagaggtgtaggggaggtgtgggtgaaggagatgtggggcggggaggcgggtgatagagagtgcgcgcggggggggggagagggagaaggggagcgtagggggagagagttg

SEQ ID NO: 9522 - DNA, 582 bp, Artificial Sequence
  chemically treated genomic DNA (Homo sapiens) CpG-island No: 9522
caactctctccccctacgctccccttctccctctccccccccccgcgcgcactctctatcacccgcctccccgccccacatctccttcacccacacctcccctacacctctcctatctcgctcgcacctccgtatcctcccccctccgcccttacgccacctaacgacactcgcctcactcctctcctcccccccacccgaccgcactcacctcccgtctcgccccctccacgccacgcaccctaacacgcccctctccccctacccgcctaccctccccgctcctcctcccccgcgtctacgccccccgcgccgccgccccatatcccccgcgttctcccgaacgcaccgcgactcgcccgactctccctaacaacctccctccgcaaccgccaacacgcccgacgccgcacccgcgctccctcctcctactcctccgcacctcccctacgccgccgccgccgcgccgcgccgaaccgcacaatacgaacgaacgaaccgtaactcactcaaccccgcgacgtacccccacgcgaaaccccgcaacacctcacctacccgtacgcctcttctccaaacgcc

SEQ ID NO: 9523 - DNA, 582 bp, Artificial Sequence
  chemically treated genomic DNA (Homo sapiens) CpG-island No: 9523
taattttttttttttacgtttttttttttttttttttttttttcgcgcgtattttttgttattcgttttttcgttttatattttttttatttatattttttttgtattttttttatttcgttcgtattttcgtattttttttttttcgtttttacgttatttagcgatattcgttttatttttttttttttttttattcggtcgtatttatttttcgtttcgttttttttacgttacgtattttggtacgtttttttttttttgttcgtttgtttttttcgttttttttttttcgcgtttgcgtttttcgcgtcgtcgttttatgtttttcgcgttttttcgagcgtatcgcgattcgttcggttttttttgatagttttttttcgtagtcgttagtacgttcgacgtcgtattcgcgttttttttttttgttttttcgtattttttttgcgtcgtcgtcgtcgcgtcgcgtcgggtcgtataatgcgagcgggcggatcgtgatttatttagtttcgcggcgtgtttttacgcggggtttcgtagtattttatttgttcgtgcgttttttttttaggcgtt

SEQ ID NO: 9524 - DNA, 582 bp, Artificial Sequence
  chemically treated genomic DNA (Homo sapiens) CpG-island No: 9524
aacgcctaaaaaaaaaacgcacgaacaaataaaatactacgaaaccccgcgtaaaaacacgccgcgaaactaaataaatcacgatccgcccgctcgcattatacgacccgacgcgacgcgacgacgacgacgcaaaaaaaatacgaaaaaacaaaaaaaaaaaacgcgaatacgacgtcgaacgtactaacgactacgaaaaaaaactatcaaaaaaaaccgaacgaatcgcgatacgctcgaaaaaacgcgaaaaacataaaacgacgacgcgaaaaacgcaaacgcgaaaaaaaaaaaacgaaaaaaacaaacgaacaaaaaaaaaaaaacgtaccaaaatacgtaacgtaaaaaaaacgaaacgaaaaataaatacgaccgaataaaaaaaaaaaaaaaaataaaacgaatatcgctaaataacgtaaaaacgaaaaaaaaaaaatacgaaaatacgaacgaaataaaaaaaatacaaaaaaaatataaataaaaaaaatataaaacgaaaaaacgaataacaaaaaatacgcgcgaaaaaaaaaaaaaaaaaaaaaaaaacgtaaaaaaaaaaaatta

SEQ ID NO: 9525 - DNA, 712 bp, Artificial Sequence
  chemically treated genomic DNA (Homo sapiens) CpG-island No: 9525
acgagtacgagtaaggcgacgatttcgaagggggtttacgtaggtattaaggtagtaacgaaagcgttaatgtacgtcgcgacgtttgattggtagcgaggtaagcgagcgaagtagggaagcgtatcgtaacggttgttagggtcggaaatcgacggtaacgtatcggtttcgtacgtcggtaatgtatatgaagcgtatcgtagatagatgttatgcgagggacggaacgcgattcgtagttatcggaacgggaggatatttacgttacgtaatcgacggaacgtatcgcgatgtcgtagcgaacgtacgtgtaggagcggtacgcgaacgcgatgggaacggtcggttaggtaaggtaacgttagtttttgcgatcgttgcgttaaacgtaacgcgaaggtaaggttacgtgtaagtaatcggcgagcgacgcgtaacggtacggtaacggttacgcgtatgtacgggcgaagcgtacgcgatgtggaatcggaatcggtaagcgataggtattttataggcgtaaaggtatgggtaagcggagacgtaaacgggaaacgaacgcgttacgcgacggttggtcggatagggtaaagttataagtattagtgtacgcgttgacggcgtaggttttagtttaaacgaatacggtatatcggtaagcggatacgtgcgatacgggaaaggcgtaataggagaggtgttatcg

SEQ ID NO: 9526 - DNA, 712 bp, Artificial Sequence
  chemically treated genomic DNA (Homo sapiens) CpG-island No: 9526
cgataacacctctcctattacgcctttcccgtatcgcacgtatccgcttaccgatataccgtattcgtttaaactaaaacctacgccgtcaacgcgtacactaatacttataactttaccctatccgaccaaccgtcgcgtaacgcgttcgtttcccgtttacgtctccgcttacccatacctttacgcctataaaatacctatcgcttaccgattccgattccacatcgcgtacgcttcgcccgtacatacgcgtaaccgttaccgtaccgttacgcgtcgctcgccgattacttacacgtaaccttaccttcgcgttacgtttaacgcaacgatcgcaaaaactaacgttaccttacctaaccgaccgttcccatcgcgttcgcgtaccgctcctacacgtacgttcgctacgacatcgcgatacgttccgtcgattacgtaacgtaaatatcctcccgttccgataactacgaatcgcgttccgtccctcgcataacatctatctacgatacgcttcatatacattaccgacgtacgaaaccgatacgttaccgtcgatttccgaccctaacaaccgttacgatacgcttccctacttcgctcgcttacctcgctaccaatcaaacgtcgcgacgtacattaacgctttcgttactaccttaatacctacgtaaacccccttcgaaatcgtcgccttactcgtactcgt

SEQ ID NO: 9527 - DNA, 712 bp, Artificial Sequence
  chemically treated genomic DNA (Homo sapiens) CpG-island No: 9527
cgataatattttttttgttgcgtttttttcgtgtcgtacgtgttcgtttatcggtatgtcgtgttcgtttgggttagagtttacgtcgttagcgcgtatattagtgtttatgattttgttttgttcgattagtcgtcgcgtagcgcgttcgtttttcgtttacgttttcgtttatttatgtttttacgtttgtgggatgtttgtcgtttgtcgatttcgattttatatcgcgtgcgtttcgttcgtgtatacgcgtggtcgttatcgtgtcgttacgcgtcgttcgtcgattgtttatacgtagttttgttttcgcgttgcgtttagcgtagcgatcgtaggagttagcgttgttttgtttgatcgatcgtttttatcgcgttcgcgtatcgtttttgtacgtacgttcgttacggtatcgcgatgcgtttcgtcgattgcgtgacgtgggtattttttcgtttcgatagttacgagtcgcgtttcgtttttcgtatagtatttatttgcggtacgttttatgtgtattgtcggcgtgcggagtcggtgcgttgtcgtcggttttcgattttagtagtcgttacggtacgtttttttatttcgttcgtttatttcgttattaattaagcgtcgcggcgtatattggcgttttcgttgttattttggtgtttgcgtgggtttttttcgaggtcgtcgttttattcgtattcgt

SEQ ID NO: 9528 - DNA, 712 bp, Artificial Sequence
  chemically treated genomic DNA (Homo sapiens) CpG-island No: 9528
acgaatacgaataaaacgacgacctcgaaaaaaacccacgcaaacaccaaaataacaacgaaaacgccaatatacgccgcgacgcttaattaataacgaaataaacgaacgaaataaaaaaacgtaccgtaacgactactaaaatcgaaaaccgacgacaacgcaccgactccgcacgccgacaatacacataaaacgtaccgcaaataaatactatacgaaaaacgaaacgcgactcgtaactatcgaaacgaaaaaatacccacgtcacgcaatcgacgaaacgcatcgcgataccgtaacgaacgtacgtacaaaaacgatacgcgaacgcgataaaaacgatcgatcaaacaaaacaacgctaactcctacgatcgctacgctaaacgcaacgcgaaaacaaaactacgtataaacaatcgacgaacgacgcgtaacgacacgataacgaccacgcgtatacacgaacgaaacgcacgcgatataaaatcgaaatcgacaaacgacaaacatcccacaaacgtaaaaacataaataaacgaaaacgtaaacgaaaaacgaacgcgctacgcgacgactaatcgaacaaaacaaaatcataaacactaatatacgcgctaacgacgtaaactctaacccaaacgaacacgacataccgataaacgaacacgtacgacacgaaaaaaacgcaacaaaaaaaatattatcg

SEQ ID NO: 9529 - DNA, 511 bp, Artificial Sequence
  chemically treated genomic DNA (Homo sapiens) CpG-island No: 9529
  unsure (168)
aacgacggggagtatcgttcgttattttttgtgagtttcgacgcgatagcgatattttcgttagtcgagggtatttttatggttaacgcgattttaggttagagcgaagggtatcgcgtgggcgaattttaacggttagcgtcgttttacgttatagggaattttcgnttagtttaggacggagttgttgcgtgtttatcgtcgcggcggtatcggcgggatgggtatgatacgtgggaatcgttcgtagtggatgaggcgattaagtattggaagtaatcgaggatcgacgtatttcgttatattgatcgttttaatcgcgggttagttcgatttatcgacgtattcgttagatcgtattaatcgatacggttttattgggttaattaaacgattttgtgagattgtgtatcgcgtcgcgtattgttcgcgttaatgtaggcgcgcgaaattatcgacggggattttttattcgtagaaagtattagttgtaatttacggtatcgcggcg

SEQ ID NO: 9530 - DNA, 511 bp, Artificial Sequence
  chemically treated genomic DNA (Homo sapiens) CpG-island No: 9530
  unsure (344)
cgccgcgataccgtaaattacaactaatactttctacgaataaaaaatccccgtcgataatttcgcgcgcctacattaacgcgaacaatacgcgacgcgatacacaatctcacaaaatcgtttaattaacccaataaaaccgtatcgattaatacgatctaacgaatacgtcgataaatcgaactaacccgcgattaaaacgatcaatataacgaaatacgtcgatcctcgattacttccaatacttaatcgcctcatccactacgaacgattcccacgtatcatacccatcccgccgataccgccgcgacgataaacacgcaacaactccgtcctaaactaancgaaaattccctataacgtaaaacgacgctaaccgttaaaattcgcccacgcgatacccttcgctctaacctaaaatcgcgttaaccataaaaataccctcgactaacgaaaatatcgctatcgcgtcgaaactcacaaaaaataacgaacgatactccccgtcgtt

SEQ ID NO: 9531 - DNA, 511 bp, Artificial Sequence
  chemically treated genomic DNA (Homo sapiens) CpG-island No: 9531
  unsure (344)
cgtcgcggtgtcgtgggttgtagttggtgttttttgcgggtggagagttttcgtcgatgatttcgcgcgtttatattagcgcggatagtgcgcgacgcgatgtatagttttataggatcgtttagttggtttagtgggatcgtatcggttaatgcggtttgacgagtgcgtcgatgggtcgggttagttcgcggttggagcgattagtatagcgaggtgcgtcgattttcgattgtttttagtgtttagtcgttttatttattacggacggtttttacgtattatatttatttcgtcggtgtcgtcgcgacggtaggtacgtagtagtttcgttttggattggncgagagttttttgtgacgtaggacggcgttgatcgttgaggttcgtttacgcggtatttttcgttttagtttagggtcgcgttgattatagaggtgttttcgattaacgggaatatcgttgtcgcgtcgaagtttatagagagtggcgagcggtatttttcgtcgtt

SEQ ID NO: 9532 - DNA, 511 bp, Artificial Sequence
  chemically treated genomic DNA (Homo sapiens) CpG-island No: 9532
  unsure (168)
aacgacgaaaaataccgctcgccactctctataaacttcgacgcgacaacgatattcccgttaatcgaaaacacctctataatcaacgcgaccctaaactaaaacgaaaaataccgcgtaaacgaacctcaacgatcaacgccgtcctacgtcacaaaaaactctcgnccaatccaaaacgaaactactacgtacctaccgtcgcgacgacaccgacgaaataaatataatacgtaaaaaccgtccgtaataaataaaacgactaaacactaaaaacaatcgaaaatcgacgcacctcgctatactaatcgctccaaccgcgaactaacccgacccatcgacgcactcgtcaaaccgcattaaccgatacgatcccactaaaccaactaaacgatcctataaaactatacatcgcgtcgcgcactatccgcgctaatataaacgcgcgaaatcatcgacgaaaactctccacccgcaaaaaacaccaactacaacccacgacaccgcgacg

SEQ ID NO: 9533 - DNA, 689 bp, Artificial Sequence
  chemically treated genomic DNA (Homo sapiens) CpG-island No: 9533
  unsure (654)
ttgtatgtttcgttattttataaatattaacgtagggttcgggattttagatttttttttatcgtatttcgtagatgatttttatagaattatttttttcgcgttgtcgtattatttttcgttacgaggataagggaattgggacgacgggttcgtacgtagaatatgagtacgagttatcgatgttattgggtacgatagtatttagaagaaattacgtatagtattatgaagcggtacgcggacgagacgtagtattggtattaaatttagttttcgtttcgtacgtatttcggtattttgacgttgtagttattgtttttattgtaacgttagaagattatcgattagttattattgcgttatacgcggtggtggatcgttcgattagttattagtcgtgtacgttatacgtttttcgtaacgtcgcgtttatttttatttatatacgttacgtgcgtattgattcgataattgtcgttaacgtatataagattaattttttttatttcgttttatattcgaggcgttttcgacgttgtttcgattttgtaggtattaacgaggtgtttttattgtttgtattatttaacgcgattacgcgttaggatatatcgtatgatatttgatcgatttatcgcgcgcgtattgatnttagcgagtttcgttgtcggattcgtattatcgtt

SEQ ID NO: 9534 - DNA, 689 bp, Artificial Sequence
  chemically treated genomic DNA (Homo sapiens) CpG-island No: 9534
  unsure (36)
aacgataatacgaatccgacaacgaaactcgctaanatcaatacgcgcgcgataaatcgatcaaatatcatacgatatatcctaacgcgtaatcgcgttaaataatacaaacaataaaaacacctcgttaatacctacaaaatcgaaacaacgtcgaaaacgcctcgaatataaaacgaaataaaaaaaattaatcttatatacgttaacgacaattatcgaatcaatacgcacgtaacgtatataaataaaaataaacgcgacgttacgaaaaacgtataacgtacacgactaataactaatcgaacgatccaccaccgcgtataacgcaataataactaatcgataatcttctaacgttacaataaaaacaataactacaacgtcaaaataccgaaatacgtacgaaacgaaaactaaatttaataccaatactacgtctcgtccgcgtaccgcttcataatactatacgtaatttcttctaaatactatcgtacccaataacatcgataactcgtactcatattctacgtacgaacccgtcgtcccaattcccttatcctcgtaacgaaaaataatacgacaacgcgaaaaaaataattctataaaaatcatctacgaaatacgataaaaaaaaatctaaaatcccgaaccctacgttaatatttataaaataacgaaacatacaa

SEQ ID NO: 9535 - DNA, 689 bp, Artificial Sequence
  chemically treated genomic DNA (Homo sapiens) CpG-island No: 9535
  unsure (36)
agcgatagtgcgagttcgataacgggattcgttagngttaatgcgcgcgcgatgagtcgattaaatattatgcgatgtgttttagcgcgtgatcgcgttgaatagtgtagataatggaagtatttcgttggtgtttgtaggatcgaggtaacgtcggaagcgtttcgaatatgagacggggtgagaggagttggttttgtgtacgttggcgatagttgtcgggttaatgcgtacgtaacgtgtgtgagtggaggtgggcgcgacgttacgggaagcgtgtgacgtgtacgattggtggttgatcggacgatttattatcgcgtatggcgtagtagtggttagtcggtggttttttagcgttatagtggaggtagtggttatagcgttaaggtatcggaatgcgtacggaacgaggattgagtttaatattaatgttgcgtttcgttcgcgtgtcgttttatggtattgtacgtagttttttttggatattatcgtatttagtggtatcggtggttcgtatttatattttacgtgcgagttcgtcgttttagtttttttgttttcgtgacggagaatagtgcgataacgcgagggaggtagttttataagaattatttgcgagatacggtgggaagggatttggagtttcgagttttacgttagtgtttgtggaatggcgggatatgtag

SEQ ID NO: 9536 - DNA, 689 bp, Artificial Sequence
  chemically treated genomic DNA (Homo sapiens) CpG-island No: 9536
  unsure (654)
ctacatatcccgccattccacaaacactaacgtaaaactcgaaactccaaatcccttcccaccgtatctcgcaaataattcttataaaactacctccctcgcgttatcgcactattctccgtcacgaaaacaaaaaaactaaaacgacgaactcgcacgtaaaatataaatacgaaccaccgataccactaaatacgataatatccaaaaaaaactacgtacaataccataaaacgacacgcgaacgaaacgcaacattaatattaaactcaatcctcgttccgtacgcattccgataccttaacgctataaccactacctccactataacgctaaaaaaccaccgactaaccactactacgccatacgcgataataaatcgtccgatcaaccaccaatcgtacacgtcacacgcttcccgtaacgtcgcgcccacctccactcacacacgttacgtacgcattaacccgacaactatcgccaacgtacacaaaaccaactcctctcaccccgtctcatattcgaaacgcttccgacgttacctcgatcctacaaacaccaacgaaatacttccattatctacactattcaacgcgatcacgcgctaaaacacatcgcataatatttaatcgactcatcgcgcgcgcattaacnctaacgaatcccgttatcgaactcgcactatcgct

SEQ ID NO: 9537 - DNA, 504 bp, Artificial Sequence
  chemically treated genomic DNA (Homo sapiens) CpG-island No: 9537
gttatacgtcgttatttattattttcgtcgtcgatattttttttaattcgacgattattacgtttatagttacgtttatgttgtcgtagaatattatatttttatcgaagtacgtatgacgtttcgtcgtacgaagtacgcgtaagttttttcgttttatcgattgttagtatgatatattgttattaattatttatcgttcgtattatcgtttttcgattcgtagtttgttaggttcgttcgttcgtcgttgtttagacgtatcgaataagtaagttattatattttatattatgaacgttcgtatattcgttttttttttaattttatcgtttcgttacgtttttacgtacgacgtcgacgtagtacgtttatttcgtttttatcgattttttagtcgtattattatttcgtcgagttcgtttttcgagtaataagtatatttttcgtagtaatgcgatcgagtttttttttcgttaattcgtattattttatcgattattg

SEQ ID NO: 9538 - DNA, 504 bp, Artificial Sequence
  chemically treated genomic DNA (Homo sapiens) CpG-island No: 9538
caataatcgataaaataatacgaattaacgaaaaaaaaactcgatcgcattactacgaaaaatatacttattactcgaaaaacgaactcgacgaaataataatacgactaaaaaatcgataaaaacgaaataaacgtactacgtcgacgtcgtacgtaaaaacgtaacgaaacgataaaattaaaaaaaaaacgaatatacgaacgttcataatataaaatataataacttacttattcgatacgtctaaacaacgacgaacgaacgaacctaacaaactacgaatcgaaaaacgataatacgaacgataaataattaataacaatatatcatactaacaatcgataaaacgaaaaaacttacgcgtacttcgtacgacgaaacgtcatacgtacttcgataaaaatataatattctacgacaacataaacgtaactataaacgtaataatcgtcgaattaaaaaaaatatcgacgacgaaaataataaataacgacgtataac

SEQ ID NO: 9539 - DNA, 504 bp, Artificial Sequence
  chemically treated genomic DNA (Homo sapiens) CpG-island No: 9539
tagtggtcggtggggtagtgcgaattgacgaggggaggattcgatcgtattattgcggggggtgtgtttgttattcgaagggcgggttcgacggggtgatgatgcggttaggagatcgatggggacggagtgggcgtgttgcgtcgacgtcgtgcgtgggggcgtaacgagacggtgaagttggagggggagcgagtgtgcgaacgtttatgatgtagaatgtagtagtttgtttgttcgatacgtttgggtaacgacgagcgagcgggtttagtagattgcgggtcggagggcggtagtgcggacgatgaatggttagtagtagtgtgttatgttagtagtcgatgaaacggaggagtttacgcgtgtttcgtacgacggagcgttatgcgtgtttcgatagaagtgtaatgttttacgataatataggcgtggttatggacgtggtggtcgtcgggttgaagaagatgtcgacggcgggagtggtgaatagcggcgtgtggt

SEQ ID NO: 9540 - DNA, 504 bp, Artificial Sequence
  chemically treated genomic DNA (Homo sapiens) CpG-island No: 9540
accacacgccgctattcaccactcccgccgtcgacatcttcttcaacccgacgaccaccacgtccataaccacgcctatattatcgtaaaacattacacttctatcgaaacacgcataacgctccgtcgtacgaaacacgcgtaaactcctccgtttcatcgactactaacataacacactactactaaccattcatcgtccgcactaccgccctccgacccgcaatctactaaacccgctcgctcgtcgttacccaaacgtatcgaacaaacaaactactacattctacatcataaacgttcgcacactcgctccccctccaacttcaccgtctcgttacgcccccacgcacgacgtcgacgcaacacgcccactccgtccccatcgatctcctaaccgcatcatcaccccgtcgaacccgcccttcgaataacaaacacaccccccgcaataatacgatcgaatcctcccctcgtcaattcgcactaccccaccgaccacta

SEQ ID NO: 9541 - DNA, 549 bp, Artificial Sequence
  chemically treated genomic DNA (Homo sapiens) CpG-island No: 9541
  unsure (114, 275, 521)
tatacgcgcgtatatgcgtaagttttcgttaatatgaatgcgaacgttatcgttttaggatagatatacggtacgttgattgtatgcggatcgttttcgtaagttacgtttatngttacggttcggcgtcggttatgttacgtgatttgtttcgagggtaacgttcgttttcgtttatttattgttagggttacgcgtttcgttcgtatttgataggttttcgatgcgttatacgggaacgtatgcgacgttgtcgttgttggtcgcgtcggttnttttttttgcgatattcgttcgttatttatttgaacgttattttagttatcgtttgtagttatgtttttatcgttcgcgtttgttatacgcgtttattatttatttttcgtttaggttacgtcgcggcgcgattcgttgttatttcgacgtagcgtatattagttgtacgcgatcgtacgcgtagatatttttgtgcggggtgttaatttcgcgcggttttcgatgttacgtatgttttttcgttnttttattttgcgcgttatcgtattcgtt

SEQ ID NO: 9542 - DNA, 549 bp, Artificial Sequence
  chemically treated genomic DNA (Homo sapiens) CpG-island No: 9542
  unsure (29, 275, 436)
aacgaatacgataacgcgcaaaataaaanaacgaaaaaacatacgtaacatcgaaaaccgcgcgaaattaacaccccgcacaaaaatatctacgcgtacgatcgcgtacaactaatatacgctacgtcgaaataacaacgaatcgcgccgcgacgtaacctaaacgaaaaataaataataaacgcgtataacaaacgcgaacgataaaaacataactacaaacgataactaaaataacgttcaaataaataacgaacgaatatcgcaaaaaaaanaaccgacgcgaccaacaacgacaacgtcgcatacgttcccgtataacgcatcgaaaacctatcaaatacgaacgaaacgcgtaaccctaacaataaataaacgaaaacgaacgttaccctcgaaacaaatcacgtaacataaccgacgccgaaccgtaacnataaacgtaacttacgaaaacgatccgcatacaatcaacgtaccgtatatctatcctaaaacgataacgttcgcattcatattaacgaaaacttacgcatatacgcgcgtata

SEQ ID NO: 9543 - DNA, 549 bp, Artificial Sequence
  chemically treated genomic DNA (Homo sapiens) CpG-island No: 9543
  unsure (29, 275, 436)
agcgagtgcgatagcgcgtagagtagganagcgagaggatatgcgtagtatcgagagtcgcgcgagattgatatttcgtatagagatgtttgcgcgtgcgatcgcgtatagttgatgtacgttacgtcggggtagtaacgagtcgcgtcgcggcgtggtttggacggagggtgagtagtggacgcgtatagtaagcgcggacgatgagagtatgattataagcggtagttggagtagcgtttaagtaggtgacggacgagtgtcgtaggagaggnggtcgacgcggttagtagcgatagcgtcgtatgcgttttcgtatggcgtatcgaaagtttgttaggtgcgagcgagacgcgtgattttgataatagatagacgaggacggacgttgttttcggaataggttacgtggtatagtcggcgtcgagtcgtagtngtgagcgtagtttacgagagcgattcgtatgtagttagcgtgtcgtatgtttattttaaaacgatagcgttcgtatttatattagcgagagtttacgtatgtgcgcgcgtgtg

SEQ ID NO: 9544 - DNA, 549 bp, Artificial Sequence
  chemically treated genomic DNA (Homo sapiens) CpG-island No: 9544
  unsure (114, 275, 521)
cacacgcgcgcacatacgtaaactctcgctaatataaatacgaacgctatcgttttaaaataaacatacgacacgctaactacatacgaatcgctctcgtaaactacgctcacnactacgactcgacgccgactataccacgtaacctattccgaaaacaacgtccgtcctcgtctatctattatcaaaatcacgcgtctcgctcgcacctaacaaactttcgatacgccatacgaaaacgcatacgacgctatcgctactaaccgcgtcgaccncctctcctacgacactcgtccgtcacctacttaaacgctactccaactaccgcttataatcatactctcatcgtccgcgcttactatacgcgtccactactcaccctccgtccaaaccacgccgcgacgcgactcgttactaccccgacgtaacgtacatcaactatacgcgatcgcacgcgcaaacatctctatacgaaatatcaatctcgcgcgactctcgatactacgcatatcctctcgctntcctactctacgcgctatcgcactcgct

SEQ ID NO: 9545 - DNA, 640 bp, Artificial Sequence
  chemically treated genomic DNA (Homo sapiens) CpG-island No: 9545
  unsure (247)
cgcgtagcgttatatggttacgtgtttttgaatcggaacgtgtaggttaacggtatcgtataacggttacgtaagcgtgatttttttaattatgacgcggaagcgtaacgcgcggcgtggtagtataacgtgtgcggtagtatcgtatagttttcggtatacgtggaacgttatcgtttagagtgattagttaaaattatattgtttattcgttatgcgatcggcgaggtgttataggagtgttttnggtgattattttatcgggtggcgcgatcgcgtatgcgatattagattagcgatacgtttgcgcggagtgtaacgtcgcggtattttatgacgaaggtttttagttgtcgcgtagttatcggagcggtaagtagtgtgtttcgttgtgagttttattttattcgtcgaaagcgttgtgatggatttgtacggggggtaaggtagcgatatgacggtaaagaacgtacgagagagacggcggtagtggcggatcgaggtagcgtagcgattagggtagtaggcgagttagaaacgagcgagggagttcggaggaacgaacgaaggttgttcgtagaaacggtcgcggatcgaggtatgacgtaagacggaggggcgcgacgatttacgagggacg

SEQ ID NO: 9546 - DNA, 640 bp, Artificial Sequence
  chemically treated genomic DNA (Homo sapiens) CpG-island No: 9546
  unsure (394)
cgtccctcgtaaatcgtcgcgcccctccgtcttacgtcatacctcgatccgcgaccgtttctacgaacaaccttcgttcgttcctccgaactccctcgctcgtttctaactcgcctactaccctaatcgctacgctacctcgatccgccactaccgccgtctctctcgtacgttctttaccgtcatatcgctaccttaccccccgtacaaatccatcacaacgctttcgacgaataaaataaaactcacaacgaaacacactacttaccgctccgataactacgcgacaactaaaaaccttcgtcataaaataccgcgacgttacactccgcgcaaacgtatcgctaatctaatatcgcatacgcgatcgcgccacccgataaaataatcaccnaaaacactcctataacacctcgccgatcgcataacgaataaacaatataattttaactaatcactctaaacgataacgttccacgtataccgaaaactatacgatactaccgcacacgttatactaccacgccgcgcgttacgcttccgcgtcataattaaaaaaatcacgcttacgtaaccgttatacgataccgttaacctacacgttccgattcaaaaacacgtaaccatataacgctacgcg

SEQ ID NO: 9547 - DNA, 640 bp, Artificial Sequence
  chemically treated genomic DNA (Homo sapiens) CpG-island No: 9547
  unsure (394)
cgtttttcgtagatcgtcgcgttttttcgttttacgttatatttcggttcgcggtcgtttttacgagtaattttcgttcgttttttcgagttttttcgttcgtttttagttcgtttattgttttagtcgttacgttgtttcgattcgttattgtcgtcgtttttttcgtacgttttttatcgttatgtcgttattttatttttcgtataggtttattataacgttttcggcgggtaggataaggtttataacgagatatattgtttatcgtttcggtggttacgcggtagttaagagttttcgttataagatatcgcgacgttatatttcgcgtaagcgtgtcgttagtttggtatcgtatacgcggtcgcgttattcggtagagtagttattnaggatatttttgtagtatttcgtcgatcgtatgacggatgaatagtgtaattttggttaattattttagacggtggcgttttacgtgtgtcgggagttatacggtattatcgtatacgttgtattgttacgtcgcgcgttacgttttcgcgttatagttaaagaggttacgtttacgtagtcgttgtgcggtatcgttgatttatacgtttcgatttagggatacgtgattatgtaacgttacgcg

SEQ ID NO: 9548 - DNA, 640 bp, Artificial Sequence
  chemically treated genomic DNA (Homo sapiens) CpG-island No: 9548
  unsure (247)
cgcgtaacgttacataatcacgtatccctaaatcgaaacgtataaatcaacgataccgcacaacgactacgtaaacgtaacctctttaactataacgcgaaaacgtaacgcgcgacgtaacaatacaacgtatacgataataccgtataactcccgacacacgtaaaacgccaccgtctaaaataattaaccaaaattacactattcatccgtcatacgatcgacgaaatactacaaaaatatcctnaataactactctaccgaataacgcgaccgcgtatacgataccaaactaacgacacgcttacgcgaaatataacgtcgcgatatcttataacgaaaactcttaactaccgcgtaaccaccgaaacgataaacaatatatctcgttataaaccttatcctacccgccgaaaacgttataataaacctatacgaaaaataaaataacgacataacgataaaaaacgtacgaaaaaaacgacgacaataacgaatcgaaacaacgtaacgactaaaacaataaacgaactaaaaacgaacgaaaaaactcgaaaaaacgaacgaaaattactcgtaaaaacgaccgcgaaccgaaatataacgtaaaacgaaaaaacgcgacgatctacgaaaaacg

SEQ ID NO: 9549 - DNA, 521 bp, Artificial Sequence
  chemically treated genomic DNA (Homo sapiens) CpG-island No: 9549
  unsure (102, 213, 329)
tacgtcgcgcgggattaaggagcgggaagaacgtattaggggcgtacgtagggtaaaggttttaatttttttatttttttggtatttaaaaaagagcgcganggaacgttgttacgcgatattatgttattcgaggcgtttaaatttttcgggcgattgttttaattttataacgaagtaacgtatcgtattatgtatgacgaggtgggagtngtatcgtagggttatgttttttttgaaaggagcgttacggacgttcgttagcgatttattttcgttattttacgcgggtatcgtatgtaaacgacgtcggcgacgtacgtattgantttaagtatggttgatattttgcgtgcgtaagtttttacgtacgcgtcgttatttagagtcggagggatcgttttaatttagtatagttgtgtatttacgttcgttcgtagcgtacggggacgtgcgttgtattatattaattttgtatcgatacgaatgttgacgggatcgtagcgacgtattttcgtacg

SEQ ID NO: 9550 - DNA, 521 bp, Artificial Sequence
  chemically treated genomic DNA (Homo sapiens) CpG-island No: 9550
  unsure (193, 309, 420)
cgtacgaaaatacgtcgctacgatcccgtcaacattcgtatcgatacaaaattaatataatacaacgcacgtccccgtacgctacgaacgaacgtaaatacacaactatactaaattaaaacgatccctccgactctaaataacgacgcgtacgtaaaaacttacgcacgcaaaatatcaaccatacttaaantcaatacgtacgtcgccgacgtcgtttacatacgatacccgcgtaaaataacgaaaataaatcgctaacgaacgtccgtaacgctcctttcaaaaaaaacataaccctacgatacnactcccacctcgtcatacataatacgatacgttacttcgttataaaattaaaacaatcgcccgaaaaatttaaacgcctcgaataacataatatcgcgtaacaacgttccntcgcgctcttttttaaataccaaaaaaataaaaaaattaaaacctttaccctacgtacgcccctaatacgttcttcccgctccttaatcccgcgcgacgta

SEQ ID NO: 9551 - DNA, 521 bp, Artificial Sequence
  chemically treated genomic DNA (Homo sapiens) CpG-island No: 9551
  unsure (193, 309, 420)
cgtgcgaaggtacgtcgttacgatttcgttagtattcgtgtcggtgtaagattggtatggtgtagcgtacgttttcgtacgttacgagcgaacgtgagtatataattatgttaggttgaggcgattttttcgattttgagtgacggcgcgtgcgtgaggatttacgtacgtagggtattaattatatttaagnttagtgcgtgcgtcgtcggcgtcgtttgtatgcggtgttcgcgtagggtgacggaggtgggtcgttagcgagcgttcgtagcgttttttttaaaggaaatatgattttgcgatgtngtttttatttcgttatatatggtgcggtgcgttatttcgttatggggttgaggtagtcgttcgagaggtttgagcgtttcggatgatatagtatcgcgtaatagcgttttntcgcgtttttttttaggtattagagaagtgggagggttgggatttttgttttacgtgcgtttttagtgcgtttttttcgttttttgatttcgcgcggcgta

SEQ ID NO: 9552 - DNA, 521 bp, Artificial Sequence
  chemically treated genomic DNA (Homo sapiens) CpG-island No: 9552
  unsure (102, 213, 329)
tacgccgcgcgaaatcaaaaaacgaaaaaaacgcactaaaaacgcacgtaaaacaaaaatcccaaccctcccacttctctaatacctaaaaaaaaacgcganaaaacgctattacgcgatactatatcatccgaaacgctcaaacctctcgaacgactacctcaaccccataacgaaataacgcaccgcaccatatataacgaaataaaaacnacatcgcaaaatcatatttcctttaaaaaaaacgctacgaacgctcgctaacgacccacctccgtcaccctacgcgaacaccgcatacaaacgacgccgacgacgcacgcactaancttaaatataattaataccctacgtacgtaaatcctcacgcacgcgccgtcactcaaaatcgaaaaaatcgcctcaacctaacataattatatactcacgttcgctcgtaacgtacgaaaacgtacgctacaccataccaatcttacaccgacacgaatactaacgaaatcgtaacgacgtaccttcgcacg

SEQ ID NO: 9553 - DNA, 528 bp, Artificial Sequence
  chemically treated genomic DNA (Homo sapiens) CpG-island No: 9553
agtttagtcgagacgtcgttaatatttggtttgtatcgttacgaattcgatttttgtcgtttaattaggatggttttcgtttaacgattttttacgtacgaacgattagtatgtttgttacggatttcgtttgttaataacgttttttacgttcgtttgttacgcgattattttaggtattgacgttttgaacgttagttgttgatttcggtatcgaattttagttggttacgaagcgttcgtcgatcggtcgcgtatttaatttcggtagcgagtttcgttacggtcgtagcgatttttcgtcgttagtatttagcgtttttttttaggtatttagtacgtcgtgtttttatggagttacgttttaattgtttattttttttttttcgtttcgtttattttcgtattagtgatatagttgcgagaacgatgttagtacgttagttttatcgtagtattttggtagttacgtattagttataacgttttacgacgtatttatatacgttcgttttaggtttattttta

SEQ ID NO: 9554 - DNA, 528 bp, Artificial Sequence
  chemically treated genomic DNA (Homo sapiens) CpG-island No: 9554
taaaaataaacctaaaacgaacgtatataaatacgtcgtaaaacgttataactaatacgtaactaccaaaatactacgataaaactaacgtactaacatcgttctcgcaactatatcactaatacgaaaataaacgaaacgaaaaaaaaaaaataaacaattaaaacgtaactccataaaaacacgacgtactaaatacctaaaaaaaaacgctaaatactaacgacgaaaaatcgctacgaccgtaacgaaactcgctaccgaaattaaatacgcgaccgatcgacgaacgcttcgtaaccaactaaaattcgataccgaaatcaacaactaacgttcaaaacgtcaatacctaaaataatcgcgtaacaaacgaacgtaaaaaacgttattaacaaacgaaatccgtaacaaacatactaatcgttcgtacgtaaaaaatcgttaaacgaaaaccatcctaattaaacgacaaaaatcgaattcgtaacgatacaaaccaaatattaacgacgtctcgactaaact

SEQ ID NO: 9555 - DNA, 528 bp, Artificial Sequence
  chemically treated genomic DNA (Homo sapiens) CpG-island No: 9555
tgagaatgagtttggaacggacgtatgtaagtgcgtcgtggggcgttgtggttagtgcgtagttattaggatgttacgatggagttggcgtattagtatcgttttcgtagttatgttattggtacgaggatagacggagcggaagagaaaaggtaggtagttagagcgtagttttatgaggatacgacgtattaagtgtttgaggagagacgttggatgttagcggcggggggtcgttacggtcgtagcgagattcgttgtcgaggttaaatacgcgatcggtcgacgggcgtttcgtagttagttagagttcgatatcgggattagtaattggcgtttagagcgttagtatttaaggtaatcgcgtagtaaacgagcgtagagaacgttgttaataggcgaggttcgtgataggtatgttgatcgttcgtacgtgagaagtcgttggacggggattattttagttggacggtaggggtcgaattcgtgacgatgtagattaggtgttggcgacgtttcgattgggtt

SEQ ID NO: 9556 - DNA, 528 bp, Artificial Sequence
  chemically treated genomic DNA (Homo sapiens) CpG-island No: 9556
aacccaatcgaaacgtcgccaacacctaatctacatcgtcacgaattcgacccctaccgtccaactaaaataatccccgtccaacgacttctcacgtacgaacgatcaacatacctatcacgaacctcgcctattaacaacgttctctacgctcgtttactacgcgattaccttaaatactaacgctctaaacgccaattactaatcccgatatcgaactctaactaactacgaaacgcccgtcgaccgatcgcgtatttaacctcgacaacgaatctcgctacgaccgtaacgaccccccgccgctaacatccaacgtctctcctcaaacacttaatacgtcgtatcctcataaaactacgctctaactacctaccttttctcttccgctccgtctatcctcgtaccaataacataactacgaaaacgatactaatacgccaactccatcgtaacatcctaataactacgcactaaccacaacgccccacgacgcacttacatacgtccgttccaaactcattctca

SEQ ID NO: 9557 - DNA, 504 bp, Artificial Sequence
  chemically treated genomic DNA (Homo sapiens) CpG-island No: 9557
  unsure (133, 174, 199, 202, 303, 341, 351, 388, 475)
ggttttcgtgtataacgaggttttagagttcgtcgttttcgtaggttttttttttttatcggataatttcgtattagtcggttttatcgtcgtcgtaggtcgttatatatcgaagatgatttattttttttantcgcgcgcgaagtatcgaattttcgtaatgtagtttagttntcgacgtttttttcgttattttttntancgatacgaatttttcgatagcgattttgtttaatggtacgtattttttcgtacgttatttttcgttagttcgaggtatacgtatttttcgttaaagttagnttttacgtaacggtatattatatttacgtcgttcgttnattttatttntttcgtaattatatcgttattttttattcgcgcgtangttatttttattcgatttttacgtttacgtatacgtatgcgattttttacgttattttttatgttagtaacgtatagttatgtttangcgcgttttattttattttttatatattt

SEQ ID NO: 9558 - DNA, 504 bp, Artificial Sequence
  chemically treated genomic DNA (Homo sapiens) CpG-island No: 9558
  unsure (30, 117, 154, 164, 202, 303, 306, 331, 372)
aaatatataaaaaataaaataaaacgcgcntaaacataactatacgttactaacataaaaaataacgtaaaaaatcgcatacgtatacgtaaacgtaaaaatcgaataaaaataacntacgcgcgaataaaaaataacgatataattacgaaanaaataaaatnaacgaacgacgtaaatataatataccgttacgtaaaanctaactttaacgaaaaatacgtatacctcgaactaacgaaaaataacgtacgaaaaaatacgtaccattaaacaaaatcgctatcgaaaaattcgtatcgntanaaaaaataacgaaaaaaacgtcganaactaaactacattacgaaaattcgatacttcgcgcgcgantaaaaaaaataaatcatcttcgatatataacgacctacgacgacgataaaaccgactaatacgaaattatccgataaaaaaaaaaaacctacgaaaacgacgaactctaaaacctcgttatacacgaaaacc

SEQ ID NO: 9559 - DNA, 504 bp, Artificial Sequence
  chemically treated genomic DNA (Homo sapiens) CpG-island No: 9559
  unsure (30, 117, 154, 164, 202, 303, 306, 331, 372)
agatatgtgagagatggagtaggacgcgtntgagtatagttatgcgttgttgatataggagataacgtagagggtcgtatgcgtatgcgtagacgtgagggtcggatgaagatgatntacgcgcgagtgaagagtgacggtatgattgcgagangagtgaggtnggcgagcggcgtaggtatggtatgtcgttacgtagaanttggttttggcggggagtacgtgtgtttcgggttagcgaggagtggcgtacgaaggagtgcgtgttattagataaggtcgttatcgaagggttcgtatcgntgnggagggtgacgagaagggcgtcganggttagattgtattgcgagagttcggtgtttcgcgcgcggntggaaaggatggattattttcggtgtgtggcggtttgcggcgacgatggggtcggttgatgcgggattgttcgatggagggagaggatttgcgggggcgacgggttttagggtttcgttgtgtacgagaatt

SEQ ID NO: 9560 - DNA, 504 bp, Artificial Sequence
  chemically treated genomic DNA (Homo sapiens) CpG-island No: 9560
  unsure (133, 174, 199, 202, 303, 341, 351, 388, 475)
aattctcgtacacaacgaaaccctaaaacccgtcgcccccgcaaatcctctccctccatcgaacaatcccgcatcaaccgaccccatcgtcgccgcaaaccgccacacaccgaaaataatccatcctttccanccgcgcgcgaaacaccgaactctcgcaatacaatctaaccntcgacgcccttctcgtcaccctccncancgatacgaacccttcgataacgaccttatctaataacacgcactccttcgtacgccactcctcgctaacccgaaacacacgtactccccgccaaaaccaanttctacgtaacgacataccatacctacgccgctcgccnacctcactcntctcgcaatcataccgtcactcttcactcgcgcgtanatcatcttcatccgaccctcacgtctacgcatacgcatacgaccctctacgttatctcctatatcaacaacgcataactatactcanacgcgtcctactccatctctcacatatct

SEQ ID NO: 9561 - DNA, 689 bp, Artificial Sequence
  chemically treated genomic DNA (Homo sapiens) CpG-island No: 9561
acgttcggggtttgttttttgattcgcggaacgagaggaataattgatttaggtttggcgttgtttttattaaattttgttcgcgagttgcgaaggtttagagcgcgtaggtaagttgcggtttcggggttttcggggttcgcggtcggttttcgttagttcggagagtagtcgtcgcgtcgggttaggtacgtcgtatgtagtttcgcggcgttcgagttttgtggcggtcgcgcgcgttttttcgttcgtttcgtattcgtcgttcgttcgttcggttttttatcgcgtttttttttagtcgtcgttcgcgtcgtcgtcgtcgttttcgttttttcgcggtgggttacgtttttattgaaattcgagtcgttttttggacggcggcgttttttttgttaattagcgtcgcgcgttcgggtcgtttcgagtttcgcgcggttttcgacgttttcgagtagtcggagatatcggttcgggaggcgaaggttcggtcgcgatgcggtcgtagggatgtagcgatagttttcgaataaggtttggtttcgcgtttcgcgttattttttttttatttttcggcgagcgaagttggttaatcggtcgttgagcgattgcgttacgttggtttatgtttagtaagaaaataaatggatcgaggttttaattttgttttttcgttaaagatattt

SEQ ID NO: 9562 - DNA, 689 bp, Artificial Sequence
  chemically treated genomic DNA (Homo sapiens) CpG-island No: 9562
aaatatctttaacgaaaaaacaaaattaaaacctcgatccatttattttcttactaaacataaaccaacgtaacgcaatcgctcaacgaccgattaaccaacttcgctcgccgaaaaataaaaaaaaaataacgcgaaacgcgaaaccaaaccttattcgaaaactatcgctacatccctacgaccgcatcgcgaccgaaccttcgcctcccgaaccgatatctccgactactcgaaaacgtcgaaaaccgcgcgaaactcgaaacgacccgaacgcgcgacgctaattaacaaaaaaaacgccgccgtccaaaaaacgactcgaatttcaataaaaacgtaacccaccgcgaaaaaacgaaaacgacgacgacgacgcgaacgacgactaaaaaaaaacgcgataaaaaaccgaacgaacgaacgacgaatacgaaacgaacgaaaaaacgcgcgcgaccgccacaaaactcgaacgccgcgaaactacatacgacgtacctaacccgacgcgacgactactctccgaactaacgaaaaccgaccgcgaaccccgaaaaccccgaaaccgcaacttacctacgcgctctaaaccttcgcaactcgcgaacaaaatttaataaaaacaacgccaaacctaaatcaattattcctctcgttccgcgaatcaaaaaacaaaccccgaacgt

SEQ ID NO: 9563 - DNA, 689 bp, Artificial Sequence
  chemically treated genomic DNA (Homo sapiens) CpG-island No: 9563
aagtgtttttagcgggagggtagggttagagtttcggtttatttgtttttttattgaatataaattaacgtaacgtagtcgtttagcgatcggttggttagtttcgttcgtcggggagtagggaggaggtggcgcggggcgcgggattaggttttattcgaaggttgtcgttgtatttttacggtcgtatcgcggtcgagttttcgtttttcgggtcggtgttttcggttgttcgaaggcgtcgggagtcgcgcggaattcggggcggttcgggcgcgcggcgttgattggtagagagggcgtcgtcgtttaggaaacggttcgggttttagtgggggcgtgatttatcgcgagaaggcgggggcggcggcggcggcgcgggcggcggttggaggagagcgcggtggagagtcgagcgggcgggcggcgggtgcggagcgggcgagggagcgcgcgcggtcgttataaagttcgggcgtcgcggggttgtatgcggcgtatttggttcggcgcggcgattgtttttcgggttggcgggggtcggtcgcgagtttcgggggtttcgaggtcgtagtttgtttgcgcgttttgagttttcgtaattcgcgagtaaagtttggtggaggtaacgttaagtttgagttagttatttttttcgtttcgcgagttagagggtaggtttcgggcgt

SEQ ID NO: 9564 - DNA, 689 bp, Artificial Sequence
  chemically treated genomic DNA (Homo sapiens) CpG-island No: 9564
acgcccgaaacctaccctctaactcgcgaaacgaaaaaaataactaactcaaacttaacgttacctccaccaaactttactcgcgaattacgaaaactcaaaacgcgcaaacaaactacgacctcgaaacccccgaaactcgcgaccgacccccgccaacccgaaaaacaatcgccgcgccgaaccaaatacgccgcatacaaccccgcgacgcccgaactttataacgaccgcgcgcgctccctcgcccgctccgcacccgccgcccgcccgctcgactctccaccgcgctctcctccaaccgccgcccgcgccgccgccgccgcccccgccttctcgcgataaatcacgcccccactaaaacccgaaccgtttcctaaacgacgacgccctctctaccaatcaacgccgcgcgcccgaaccgccccgaattccgcgcgactcccgacgccttcgaacaaccgaaaacaccgacccgaaaaacgaaaactcgaccgcgatacgaccgtaaaaatacaacgacaaccttcgaataaaacctaatcccgcgccccgcgccacctcctccctactccccgacgaacgaaactaaccaaccgatcgctaaacgactacgttacgttaatttatattcaataaaaaaacaaataaaccgaaactctaaccctaccctcccgctaaaaacactt

SEQ ID NO: 9565 - DNA, 577 bp, Artificial Sequence
  chemically treated genomic DNA (Homo sapiens) CpG-island No: 9565
gtttttcgggggcgaatttacgtagcgaatggagaattagtttgaggtagtcgtacgttaggtttaggtagaggtcgttgtagtattacgtttttgtaaggtttcgcgttttagtcgtcggggtaatagatatttcgtttagttgtgtttgggtaagtatttgggtttttgattcgtttcgatttgggtcgtttattatttgtatagtcgaaacgattttagggttgggttcggcgttggcggggttgttttttttttttgttcggtcgttttttattttgatgttagtttcgttatttacgtttcgggcggcgttcgttttcgttttgcgcgcgcggtgttcgcggttatacgggggcgttggcgttcgatgcgtttttttttgcgtagaattcggagaataaagggcgtttcgggatttcggttttttttatttggagttatttgtttttcgggcgttgttttagcgttaggttagtattcggttttcgcgaaggagttaatttttgtttagcgttgtttttagaaatttgttaaagaaatcgttttttatttgatggtttttttttttagtttg

SEQ ID NO: 9566 - DNA, 577 bp, Artificial Sequence
  chemically treated genomic DNA (Homo sapiens) CpG-island No: 9566
caaactaaaaaaaaaaaccatcaaataaaaaacgatttctttaacaaatttctaaaaacaacgctaaacaaaaattaactccttcgcgaaaaccgaatactaacctaacgctaaaacaacgcccgaaaaacaaataactccaaataaaaaaaaccgaaatcccgaaacgccctttattctccgaattctacgcaaaaaaaaacgcatcgaacgccaacgcccccgtataaccgcgaacaccgcgcgcgcaaaacgaaaacgaacgccgcccgaaacgtaaataacgaaactaacatcaaaataaaaaacgaccgaacaaaaaaaaaaaacaaccccgccaacgccgaacccaaccctaaaatcgtttcgactatacaaataataaacgacccaaatcgaaacgaatcaaaaacccaaatacttacccaaacacaactaaacgaaatatctattaccccgacgactaaaacgcgaaaccttacaaaaacgtaatactacaacgacctctacctaaacctaacgtacgactacctcaaactaattctccattcgctacgtaaattcgcccccgaaaaac

SEQ ID NO: 9567 - DNA, 577 bp, Artificial Sequence
  chemically treated genomic DNA (Homo sapiens) CpG-island No: 9567
taagttggggagaaagattattaagtggggagcgatttttttaatagatttttaagagtagcgttgagtaaaaattaattttttcgcggaggtcggatgttggtttggcgttggggtagcgttcgggaagtaggtggttttaggtgagggaggtcgaggtttcggggcgttttttgtttttcgggttttgcgtagggaggagcgtatcgggcgttagcgttttcgtgtggtcgcgagtatcgcgcgcgtaaagcgggggcgagcgtcgttcggggcgtgggtgacggggttggtattaaggtagagggcggtcgggtagggaggaggggtagtttcgttagcgtcgagtttagttttgaagtcgtttcggttgtgtagatgatgagcgatttaggtcgaggcgaattaggagtttaggtgtttgtttaagtatagttggacgaaatgtttgttatttcgacggttggggcgcgggattttgtagggacgtggtgttgtagcggtttttgtttgggtttggcgtgcggttattttaggttaattttttattcgttgcgtggattcgttttcgggaggt

SEQ ID NO: 9568 - DNA, 577 bp, Artificial Sequence
  chemically treated genomic DNA (Homo sapiens) CpG-island No: 9568
acctcccgaaaacgaatccacgcaacgaataaaaaattaacctaaaataaccgcacgccaaacccaaacaaaaaccgctacaacaccacgtccctacaaaatcccgcgccccaaccgtcgaaataacaaacatttcgtccaactatacttaaacaaacacctaaactcctaattcgcctcgacctaaatcgctcatcatctacacaaccgaaacgacttcaaaactaaactcgacgctaacgaaactacccctcctccctacccgaccgccctctaccttaataccaaccccgtcacccacgccccgaacgacgctcgcccccgctttacgcgcgcgatactcgcgaccacacgaaaacgctaacgcccgatacgctcctccctacgcaaaacccgaaaaacaaaaaacgccccgaaacctcgacctccctcacctaaaaccacctacttcccgaacgctaccccaacgccaaaccaacatccgacctccgcgaaaaaattaatttttactcaacgctactcttaaaaatctattaaaaaaatcgctccccacttaataatctttctccccaactta

SEQ ID NO: 9569 - DNA, 859 bp, Artificial Sequence
  chemically treated genomic DNA (Homo sapiens) CpG-island No: 9569
  unsure (719)
atcgtgtatcgttatatgattaatttttcgcgcggtttttgcgcggcgtattatattttgcgcgagttagtttatattgtgtggtttttttcgtattatagttaagttttttatcgtttttattgcgcgtcggcgtttattcgtttgttttcggattagtttttatttttaatacgatacgcgttcgagcgattagtcgagtatttcgacgagtttttttttacgcgatcggattagcgacgagagtgaaatatagtttatcgcgaagtatagacgttttcgatataagttatttgatggttatagattgtagatcggtacgtttagcgttagttttatgtatttttattttgattttatttcgattatagttcgtcgcgggtttagagtcgtttgttatgtatcgcgcgaatcgcgacggaacggtttattgcgaattttcgtcgatcgtagggtttcggaggtgttcgatttacggttcggatcgtgatagtcgcgcggttatggtattattttgttcgcggacggtgttttcgattacgacgtggaagtatttgatttatgtatttttgcggtataagcgagtttgtttgtggaacgtcggtttgaacgtcgattcgtatacgttatggttttagttacgagattatttgtggtgcgttgaaacgatatatattcgcgatagttggtgtcgttgcgtgcgaacgcggattgagcgntatgacgacgttgatatatattttagagggtcgcggttttttcgtttcgtggtgaagattagatatagagaatagaatgtttgtgttacgaaagggtttgtaagtttacggagcgatggttttagagtaataggagtata

SEQ ID NO: 9570 - DNA, 859 bp, Artificial Sequence
  chemically treated genomic DNA (Homo sapiens) CpG-island No: 9570
  unsure (141)
tatactcctattactctaaaaccatcgctccgtaaacttacaaaccctttcgtaacacaaacattctattctctatatctaatcttcaccacgaaacgaaaaaaccgcgaccctctaaaatatatatcaacgtcgtcatancgctcaatccgcgttcgcacgcaacgacaccaactatcgcgaatatatatcgtttcaacgcaccacaaataatctcgtaactaaaaccataacgtatacgaatcgacgttcaaaccgacgttccacaaacaaactcgcttataccgcaaaaatacataaatcaaatacttccacgtcgtaatcgaaaacaccgtccgcgaacaaaataataccataaccgcgcgactatcacgatccgaaccgtaaatcgaacacctccgaaaccctacgatcgacgaaaattcgcaataaaccgttccgtcgcgattcgcgcgatacataacaaacgactctaaacccgcgacgaactataatcgaaataaaatcaaaataaaaatacataaaactaacgctaaacgtaccgatctacaatctataaccatcaaataacttatatcgaaaacgtctatacttcgcgataaactatatttcactctcgtcgctaatccgatcgcgtaaaaaaaaactcgtcgaaatactcgactaatcgctcgaacgcgtatcgtattaaaaataaaaactaatccgaaaacaaacgaataaacgccgacgcgcaataaaaacgataaaaaacttaactataatacgaaaaaaaccacacaatataaactaactcgcgcaaaatataatacgccgcgcaaaaaccgcgcgaaaaattaatcatataacgatacacgat

SEQ ID NO: 9571 - DNA, 859 bp, Artificial Sequence
  chemically treated genomic DNA (Homo sapiens) CpG-island No: 9571
  unsure (141)
tatgtttttgttgttttgaaattatcgtttcgtggatttgtaggttttttcgtgatataagtattttgttttttatatttagtttttattacggggcggaaggatcgcgattttttggagtgtgtattagcgtcgttatgncgtttagttcgcgttcgtacgtagcgatattagttatcgcgagtgtgtgtcgttttagcgtattataggtggtttcgtggttgaggttatgacgtgtgcgaatcgacgtttaagtcggcgttttataggtaagttcgtttgtgtcgtagaggtgtatgagttagatgtttttacgtcgtgatcgagagtatcgttcgcggataaggtgatgttatggtcgcgcgattgttacggttcgagtcgtagatcgaatattttcggaattttacggtcggcggaagttcgtagtgagtcgtttcgtcgcgattcgcgcgatgtatggtagacgattttagattcgcggcgggttatagtcgggatgaggttagggtaggagtgtatgaggttggcgttgggcgtatcgatttgtagtttgtgattattaagtggtttgtatcggggacgtttgtatttcgcgatgaattgtgttttattttcgtcgttagttcgatcgcgtgagaagagattcgtcgggatgttcggttagtcgttcgggcgcgtgtcgtgttggaggtggggattaattcggagatagacgaatgggcgtcggcgcgtagtggagacgatgaggagtttggttgtggtgcgaagaggattatataatgtgaattggttcgcgtagggtgtgatgcgtcgcgtagaggtcgcgcgagggattgattatgtggcgatgtacgat

SEQ ID NO: 9572 - DNA, 859 bp, Artificial Sequence
  chemically treated genomic DNA (Homo sapiens) CpG-island No: 9572
  unsure (719)
atcgtacatcgccacataatcaatccctcgcgcgacctctacgcgacgcatcacaccctacgcgaaccaattcacattatataatcctcttcgcaccacaaccaaactcctcatcgtctccactacgcgccgacgcccattcgtctatctccgaattaatccccacctccaacacgacacgcgcccgaacgactaaccgaacatcccgacgaatctcttctcacgcgatcgaactaacgacgaaaataaaacacaattcatcgcgaaatacaaacgtccccgatacaaaccacttaataatcacaaactacaaatcgatacgcccaacgccaacctcatacactcctaccctaacctcatcccgactataacccgccgcgaatctaaaatcgtctaccatacatcgcgcgaatcgcgacgaaacgactcactacgaacttccgccgaccgtaaaattccgaaaatattcgatctacgactcgaaccgtaacaatcgcgcgaccataacatcaccttatccgcgaacgatactctcgatcacgacgtaaaaacatctaactcatacacctctacgacacaaacgaacttacctataaaacgccgacttaaacgtcgattcgcacacgtcataacctcaaccacgaaaccacctataatacgctaaaacgacacacactcgcgataactaatatcgctacgtacgaacgcgaactaaacgncataacgacgctaatacacactccaaaaaatcgcgatccttccgccccgtaataaaaactaaatataaaaaacaaaatacttatatcacgaaaaaacctacaaatccacgaaacgataatttcaaaacaacaaaaacata

SEQ ID NO: 9573 - DNA, 503 bp, Artificial Sequence
  chemically treated genomic DNA (Homo sapiens) CpG-island No: 9573
  unsure (52)
tgatttttttttttttttaagttcgcgtttttttacgcgtggtttttttttnttgtcgggagggtcgcgatggaggtttcgtttaggtttttttatgtgtcgtcgttattgttttttttcgttttcgttattttagtttttcgtagttttttttattggcggtcgcggtcgtcgcggtagttagtttcgttttttttttcgttcgtttttagtttcgttcggtagggggcgcgtcgggtttagcgttacgttatcgtttagtagttttttcgattggcgggcggggcggttataaagggagggcgtaggcggcgttcggatttttttcgtcgttattttaaatttagttttatataacgtttcgtcgtcgttgttgtcgcgattcggattgcgcgttagtatttttttgtcgatagtttcgttattatggaggatatgaacgagtatagtaatatagaggaattcgtagagggatttaagattaacgcgagtaagaattagta

SEQ ID NO: 9574 - DNA, 503 bp, Artificial Sequence
  chemically treated genomic DNA (Homo sapiens) CpG-island No: 9574
  unsure (452)
tactaattcttactcgcgttaatcttaaatccctctacgaattcctctatattactatactcgttcatatcctccataataacgaaactatcgacaaaaaaatactaacgcgcaatccgaatcgcgacaacaacgacgacgaaacgttatataaaactaaatttaaaataacgacgaaaaaaatccgaacgccgcctacgccctccctttataaccgccccgcccgccaatcgaaaaaactactaaacgataacgtaacgctaaacccgacgcgccccctaccgaacgaaactaaaaacgaacgaaaaaaaaaacgaaactaactaccgcgacgaccgcgaccgccaataaaaaaaactacgaaaaactaaaataacgaaaacgaaaaaaaacaataacgacgacacataaaaaaacctaaacgaaacctccatcgcgaccctcccgacaanaaaaaaaaaccacgcgtaaaaaaacgcgaacttaaaaaaaaaaaaaaatca

SEQ ID NO: 9575 - DNA, 503 bp, Artificial Sequence
  chemically treated genomic DNA (Homo sapiens) CpG-island No: 9575
  unsure (452)
tgttgatttttgttcgcgttgattttggatttttttgcgaatttttttatattgttgtattcgtttatattttttatagtgacggagttgtcggtaggggggtgttggcgcgtagttcgggtcgcggtagtagcggcggcggagcgttgtatggagttggatttaaaatggcggcggaagagattcgggcgtcgtttgcgttttttttttatagtcgtttcgttcgttaatcgggagggttgttgggcggtgacgtggcgttgggttcggcgcgttttttgtcgggcggagttgggagcgagcgaagggaggagcggggttagttgtcgcggcggtcgcggtcgttaatgggagaggttgcgggaggttaaagtagcgggagcggaggggaataatggcggcggtatatgggaaagtttgggcgggatttttatcgcggttttttcggtaanggagagaggttacgcgtgaggggacgcgggtttgggagaagagaagaatta

SEQ ID NO: 9576 - DNA, 503 bp, Artificial Sequence
  chemically treated genomic DNA (Homo sapiens) CpG-island No: 9576
  unsure (52)
taattcttctcttctcccaaacccgcgtcccctcacgcgtaacctctctccnttaccgaaaaaaccgcgataaaaatcccgcccaaactttcccatataccgccgccattattcccctccgctcccgctactttaacctcccgcaacctctcccattaacgaccgcgaccgccgcgacaactaaccccgctcctcccttcgctcgctcccaactccgcccgacaaaaaacgcgccgaacccaacgccacgtcaccgcccaacaaccctcccgattaacgaacgaaacgactataaaaaaaaaacgcaaacgacgcccgaatctcttccgccgccattttaaatccaactccatacaacgctccgccgccgctactaccgcgacccgaactacgcgccaacacccccctaccgacaactccgtcactataaaaaatataaacgaatacaacaatataaaaaaattcgcaaaaaaatccaaaatcaacgcgaacaaaaatcaaca

SEQ ID NO: 9577 - DNA, 800 bp, Artificial Sequence
  chemically treated genomic DNA (Homo sapiens) CpG-island No: 9577
  unsure (522)
tggttttcgcgcgattgttttagtttacgatattttcggttttttttaaaggtttttaaggttgtgtaacgcggagcgtgagaggaaggtataaagggtagcgagagggcgggatcgaggaggaaagggaaaaaaaaaaaattagggggataggggtggggggacgcgcgaagggcgcgttttcgcgttacgtgatcgggacgcgtcgttttttcgtcggttattttaggtggttcgcggcggcgttattaaagcgaggaggaggcgagagcggtcgtcgttggtgtttatttttttttagtgtagcgggagagagcgggagtgtgcgtcgcgcgagagtgggaggcgaagggggtagtttagggagaggcgtaggagtttttgtagttacgcgcgcgttttttttgttttgtgtgtttcgcgaggtagagcgggcgcgcggtagcggcggggattattttgttgttagtttcggttcgcggtagcggcgggtgtagtttcggcggtagcggcggagatatntagtattatgtcggaggagtagttcggcggggacggggcggcggtagcggtaacggcggcggtaggcggttcggcgggcgagtaggagggagttatggtggcggcgatatagggggtagcggcggcggcgggaagcggagtcgggatcgggggcggaatcgcgtttggaggtatcgaagggggtagcgtcgagtcggagggggcgaagattgacgttagtaagaattaggaggatgaagggtgagtaagaggtattttaggatagttaggtttaatta

SEQ ID NO: 9578 - DNA, 800 bp, Artificial Sequence
  chemically treated genomic DNA (Homo sapiens) CpG-island No: 9578
  unsure (279)
taattaaacctaactatcctaaaatacctcttactcacccttcatcctcctaattcttactaacgtcaatcttcgccccctccgactcgacgctacccccttcgatacctccaaacgcgattccgcccccgatcccgactccgcttcccgccgccgccgctaccccctatatcgccgccaccataactccctcctactcgcccgccgaaccgcctaccgccgccgttaccgctaccgccgccccgtccccgccgaactactcctccgacataatactanatatctccgccgctaccgccgaaactacacccgccgctaccgcgaaccgaaactaacaacaaaataatccccgccgctaccgcgcgcccgctctacctcgcgaaacacacaaaacaaaaaaaacgcgcgcgtaactacaaaaactcctacgcctctccctaaactacccccttcgcctcccactctcgcgcgacgcacactcccgctctctcccgctacactaaaaaaaaataaacaccaacgacgaccgctctcgcctcctcctcgctttaataacgccgccgcgaaccacctaaaataaccgacgaaaaaacgacgcgtcccgatcacgtaacgcgaaaacgcgcccttcgcgcgtccccccacccctatccccctaattttttttttttccctttcctcctcgatcccgccctctcgctaccctttataccttcctctcacgctccgcgttacacaaccttaaaaacctttaaaaaaaaccgaaaatatcgtaaactaaaacaatcgcgcgaaaacca

SEQ ID NO: 9579 - DNA, 800 bp, Artificial Sequence
  chemically treated genomic DNA (Homo sapiens) CpG-island No: 9579
  unsure (279)
tagttgggtttgattattttgggatgttttttatttattttttatttttttggtttttattggcgttaattttcgtttttttcgattcggcgttgtttttttcggtgtttttagacgcggtttcgttttcggtttcggtttcgtttttcgtcgtcgtcgttgttttttgtgtcgtcgttattatggtttttttttgttcgttcgtcgagtcgtttatcgtcgtcgttgtcgttgtcgtcgtttcgttttcgtcgaattgttttttcgatatagtgttangtgttttcgtcgttgtcgtcgagattatattcgtcgttgtcgcgaatcgaaattagtagtaaagtaattttcgtcgttgtcgcgcgttcgttttatttcgcgaagtatataagatagggaaggcgcgcgcgtggttgtaaaggtttttgcgtttttttttgggttgtttttttcgttttttattttcgcgcggcgtatattttcgttttttttcgttgtattaaaaaagaataagtattagcggcggtcgttttcgtttttttttcgttttaatggcgtcgtcgcggattatttaaaatggtcgacggaagaacggcgcgtttcggttacgtgacgcgagagcgcgtttttcgcgcgtttttttatttttatttttttagttttttttttttttttttttttttcggtttcgttttttcgttattttttatattttttttttacgtttcgcgttgtatagttttgggggtttttaaaaggaatcggaagtgtcgtgagttaagatagtcgcgcggggatta

SEQ ID NO: 9580 - DNA, 800 bp, Artificial Sequence
  chemically treated genomic DNA (Homo sapiens) CpG-island No: 9580
  unsure (522)
taatccccgcgcgactatcttaactcacgacacttccgattccttttaaaaacccccaaaactatacaacgcgaaacgtaaaaaaaaaatataaaaaataacgaaaaaacgaaaccgaaaaaaaaaaaaaaaaaaaaaaaactaaaaaaataaaaataaaaaaacgcgcgaaaaacgcgctctcgcgtcacgtaaccgaaacgcgccgttcttccgtcgaccattttaaataatccgcgacgacgccattaaaacgaaaaaaaaacgaaaacgaccgccgctaatacttattcttttttaatacaacgaaaaaaaacgaaaatatacgccgcgcgaaaataaaaaacgaaaaaaacaacccaaaaaaaaacgcaaaaacctttacaaccacgcgcgcgccttccctatcttatatacttcgcgaaataaaacgaacgcgcgacaacgacgaaaattactttactactaatttcgattcgcgacaacgacgaatataatctcgacgacaacgacgaaaacacntaacactatatcgaaaaaacaattcgacgaaaacgaaacgacgacaacgacaacgacgacgataaacgactcgacgaacgaacaaaaaaaaaccataataacgacgacacaaaaaacaacgacgacgacgaaaaacgaaaccgaaaccgaaaacgaaaccgcgtctaaaaacaccgaaaaaaacaacgccgaatcgaaaaaaacgaaaattaacgccaataaaaaccaaaaaaataaaaaataaataaaaaacatcccaaaataatcaaacccaacta

SEQ ID NO: 9581 - DNA, 531 bp, Artificial Sequence
  chemically treated genomic DNA (Homo sapiens) CpG-island No: 9581
gtcgtaaagttttcgtcggtcgttattttgattcgtttttttatttttttattcgttaggtttgatagttcggtttttaaatttattttcggtttcggtcgcggtttcggttattcgaataattcgatatggcgttaatggttgcggttggcggggaacgaagtatatagaaaagcgtgcgataagtcgttggaaatggtttcgatgacggcgaagttttgcgggggcggtagcggaggaaggatatcgatgatattagtcgaagttgtattattagagatcggtagaaatgaatgaggtgtcggtcgtttttcggtagtcgtttttatagtttggatcgttttttacgtcgtagggaacgttgggagtcgttttatgatttaatcgtttcgtttttcgcgtataggtcgtaacgttcgttggcgttttaggatcgtcgcgtttttattttttttcgcgttatttttttaggttagggtttatttattattggaatgttttattttgtatttttttgattttatttttttt

SEQ ID NO: 9582 - DNA, 531 bp, Artificial Sequence
  chemically treated genomic DNA (Homo sapiens) CpG-island No: 9582
aaaaaaaataaaatcaaaaaaatacaaaataaaacattccaataataaataaaccctaacctaaaaaaataacgcgaaaaaaaataaaaacgcgacgatcctaaaacgccaacgaacgttacgacctatacgcgaaaaacgaaacgattaaatcataaaacgactcccaacgttccctacgacgtaaaaaacgatccaaactataaaaacgactaccgaaaaacgaccgacacctcattcatttctaccgatctctaataatacaacttcgactaatatcatcgatatccttcctccgctaccgcccccgcaaaacttcgccgtcatcgaaaccatttccaacgacttatcgcacgcttttctatatacttcgttccccgccaaccgcaaccattaacgccatatcgaattattcgaataaccgaaaccgcgaccgaaaccgaaaataaatttaaaaaccgaactatcaaacctaacgaataaaaaaataaaaaaacgaatcaaaataacgaccgacgaaaactttacgac

SEQ ID NO: 9583 - DNA, 531 bp, Artificial Sequence
  chemically treated genomic DNA (Homo sapiens) CpG-island No: 9583
gaagaaggtgaggttaagagagtgtagaatgaggtattttaatggtgggtgggttttgatttgagagagtggcgcggggaggggtgaaagcgcggcgattttggaacgttagcgggcgttgcggtttatgcgcgaggggcggggcgattaggttatagagcggtttttagcgttttttgcggcgtaggaggcggtttagattataaaagcggttgtcggaaagcggtcggtattttatttatttttatcggtttttagtagtgtagtttcggttggtgttatcggtgtttttttttcgttgtcgttttcgtaaggtttcgtcgttatcgaggttatttttagcgatttgtcgtacgtttttttatatatttcgtttttcgttaatcgtaattattgacgttatgtcgggttattcgagtgatcgagatcgcggtcgggatcgagggtgagtttgggagtcgagttgttaggtttggcgggtggggggatgggagggcgggttagggtggcggtcggcgggggttttgcggt

SEQ ID NO: 9584 - DNA, 531 bp, Artificial Sequence
  chemically treated genomic DNA (Homo sapiens) CpG-island No: 9584
accgcaaaacccccgccgaccgccaccctaacccgccctcccatccccccacccgccaaacctaacaactcgactcccaaactcaccctcgatcccgaccgcgatctcgatcactcgaataacccgacataacgtcaataattacgattaacgaaaaacgaaatatataaaaaaacgtacgacaaatcgctaaaaataacctcgataacgacgaaaccttacgaaaacgacaacgaaaaaaaaacaccgataacaccaaccgaaactacactactaaaaaccgataaaaataaataaaataccgaccgctttccgacaaccgcttttataatctaaaccgcctcctacgccgcaaaaaacgctaaaaaccgctctataacctaatcgccccgcccctcgcgcataaaccgcaacgcccgctaacgttccaaaatcgccgcgctttcacccctccccgcgccactctctcaaatcaaaacccacccaccattaaaatacctcattctacactctcttaacctcaccttcttc

SEQ ID NO: 9585 - DNA, 576 bp, Artificial Sequence
  chemically treated genomic DNA (Homo sapiens) CpG-island No: 9585
ttcggagatgtttacgtttttaaagagtttttacgtttgtaattaaaagagggggaaggcggggtttggcgttgttacgtggttgtattatttcggattatcgagagagcggttcgtattattttttcgttgacgtcggcggagggatataaaacgaaatagtttatcggaagtgcgttgttcgtatttcgggattcgttcgggttgtcggttgatgtggatcgttcgattcgcgtgtttgataattttttgaggggttttggtcggcggagaatggtttttaaattttttaaatcgttttcgttttacgttttgtgaaaggaagtgtttttttgatgattaattagcggcgagaagtttttttaacgttcgttttttttttacgttttttttttcgcgttttggttcgtgcgttcgcgttttagtgtcgggtttgcgtggatcggtttttttaggatatcgtcgttttttcggtcgcgtcggagttcggcggcgatttgtttttgaaatatggtaggttcggatgttggtgagtgtttttttggggttttagtatgtgtggattgaaatcgttta

SEQ ID NO: 9586 - DNA, 576 bp, Artificial Sequence
  chemically treated genomic DNA (Homo sapiens) CpG-island No: 9586
taaacgatttcaatccacacatactaaaaccccaaaaaaacactcaccaacatccgaacctaccatatttcaaaaacaaatcgccgccgaactccgacgcgaccgaaaaaacgacgatatcctaaaaaaaccgatccacgcaaacccgacactaaaacgcgaacgcacgaaccaaaacgcgaaaaaaaaaacgtaaaaaaaaaacgaacgttaaaaaaacttctcgccgctaattaatcatcaaaaaaacacttcctttcacaaaacgtaaaacgaaaacgatttaaaaaatttaaaaaccattctccgccgaccaaaacccctcaaaaaattatcaaacacgcgaatcgaacgatccacatcaaccgacaacccgaacgaatcccgaaatacgaacaacgcacttccgataaactatttcgttttatatccctccgccgacgtcaacgaaaaaataatacgaaccgctctctcgataatccgaaataatacaaccacgtaacaacgccaaaccccgccttccccctcttttaattacaaacgtaaaaactctttaaaaacgtaaacatctccgaa

SEQ ID NO: 9587 - DNA, 576 bp, Artificial Sequence
  chemically treated genomic DNA (Homo sapiens) CpG-island No: 9587
tggacggttttagtttatatatattgggattttagggagatatttattagtattcgagtttgttatgttttagaggtaggtcgtcgtcggatttcgacgcggtcgggaaggcgacggtgttttggaaggatcgatttacgtagattcgatattggggcgcggacgtacgaattaaagcgcggggaaggaggcgtgaaagaaggacggacgttaaaagagtttttcgtcgttgattggttattagaggagtatttttttttataggacgtgaaacgggggcggtttgggaagtttagagattatttttcgtcgattaaaattttttaaaggattattagatacgcgggtcggacggtttatattagtcggtagttcgggcgggtttcggggtgcgagtagcgtattttcggtgagttatttcgttttgtattttttcgtcgacgttaacgggaaagtagtgcggatcgttttttcggtggttcggggtggtatagttacgtgataacgttaggtttcgtttttttttttttttggttatagacgtgagggttttttggagacgtaaatattttcgag

SEQ ID NO: 9588 - DNA, 576 bp, Artificial Sequence
  chemically treated genomic DNA (Homo sapiens) CpG-island No: 9588
ctcgaaaatatttacgtctccaaaaaaccctcacgtctataaccaaaaaaaaaaaaaaacgaaacctaacgttatcacgtaactataccaccccgaaccaccgaaaaaacgatccgcactactttcccgttaacgtcgacgaaaaaatacaaaacgaaataactcaccgaaaatacgctactcgcaccccgaaacccgcccgaactaccgactaatataaaccgtccgacccgcgtatctaataatcctttaaaaaattttaatcgacgaaaaataatctctaaacttcccaaaccgcccccgtttcacgtcctataaaaaaaaatactcctctaataaccaatcaacgacgaaaaactcttttaacgtccgtccttctttcacgcctccttccccgcgctttaattcgtacgtccgcgccccaatatcgaatctacgtaaatcgatccttccaaaacaccgtcgccttcccgaccgcgtcgaaatccgacgacgacctacctctaaaacataacaaactcgaatactaataaatatctccctaaaatcccaatatatataaactaaaaccgtcca

SEQ ID NO: 9589 - DNA, 841 bp, Artificial Sequence
  chemically treated genomic DNA (Homo sapiens) CpG-island No: 9589
cgagaggtttcggatcgcgaagtttgtacgtgggtcgattcggtcgatgttgttatttttcgtcgttagtcggcgggtgggatttacgtcggagagtagatttttaatcggcgagggagttcgggaggttacgttgttagttttcggtttatatatggtcggtaagcggaggggaagagagtatcgttaggttttatgttcgcgtttggatttacggttcgtaggtttcggtagcgattcggggtttagagtcggtcggtaatagcgttagttcgttttcgcgttgttcggcgttttagttcgtatttattttgacgttttcgttttcgttttcgtttttttagcggttttcgtcggtagtgtcgtcgttttttatttttcgtattgggttttttacggagaaagcgtcggcgtttacggaagaaagcgagtcgtgttagtgtttgttattgcgtggggtcggcgtcggttcgggttttgttttagtaatttttttttattttaggagttcgagtttttcgtcgtcgtcgtcgtcgtcgttatttcgagtcgggtgtgagcgtgtgtgagagggagagttagcgaggagttagtacggcggaggtgagttattgggtttgttttcgttgatcggcgcggagtaggatgggatcgtggttgattgtgcgtcgagtcgaggttacgtttttttaggcggcggcggcgacgcgcgcgggtaagaagtgggcggggaacgcggtcggtggcgttgcggggttgagggagaggcggaggggggggcggaggggggcggaaggatgttttgtatatgtagtttatagaaattttatggttttattaa

SEQ ID NO: 9590 - DNA, 841 bp, Artificial Sequence
  chemically treated genomic DNA (Homo sapiens) CpG-island No: 9590
ttaataaaaccataaaatttctataaactacatatacaaaacatccttccgcccccctccgcccccccctccgcctctccctcaaccccgcaacgccaccgaccgcgttccccgcccacttcttacccgcgcgcgtcgccgccgccgcctaaaaaaacgtaacctcgactcgacgcacaatcaaccacgatcccatcctactccgcgccgatcaacgaaaacaaacccaataactcacctccgccgtactaactcctcgctaactctccctctcacacacgctcacacccgactcgaaataacgacgacgacgacgacgacgaaaaactcgaactcctaaaataaaaaaaaattactaaaacaaaacccgaaccgacgccgaccccacgcaataacaaacactaacacgactcgctttcttccgtaaacgccgacgctttctccgtaaaaaacccaatacgaaaaataaaaaacgacgacactaccgacgaaaaccgctaaaaaaacgaaaacgaaaacgaaaacgtcaaaataaatacgaactaaaacgccgaacaacgcgaaaacgaactaacgctattaccgaccgactctaaaccccgaatcgctaccgaaacctacgaaccgtaaatccaaacgcgaacataaaacctaacgatactctcttcccctccgcttaccgaccatatataaaccgaaaactaacaacgtaacctcccgaactccctcgccgattaaaaatctactctccgacgtaaatcccacccgccgactaacgacgaaaaataacaacatcgaccgaatcgacccacgtacaaacttcgcgatccgaaacctctcg

SEQ ID NO: 9591 - DNA, 841 bp, Artificial Sequence
  chemically treated genomic DNA (Homo sapiens) CpG-island No: 9591
ttagtggagttatgaggtttttataaattgtatatataggatattttttcgttttttttcgttttttttttcgttttttttttagtttcgtagcgttatcgatcgcgtttttcgtttattttttattcgcgcgcgtcgtcgtcgtcgtttgagggggcgtggtttcggttcggcgtatagttagttacggttttattttgtttcgcgtcggttaacgagagtaaatttagtgatttattttcgtcgtgttaatttttcgttagtttttttttttatatacgtttatattcggttcgagatggcggcggcggcggcggcggcgggggattcggatttttggggtgaggagaagttgttggggtagggttcgggtcggcgtcggttttacgtagtggtaggtattaatacggttcgttttttttcgtagacgtcgacgtttttttcgtggaagatttagtgcggaaggtggggggcggcggtattgtcggcggggatcgttgggaaggcgaggacgaggacgaggacgttaaggtgggtgcgggttagggcgtcgggtagcgcggaagcgggttggcgttgttgtcggtcgattttgggtttcgggtcgttgtcggggtttgcgggtcgtgggtttaggcgcgagtatagggtttggcggtgtttttttttttttcgtttgtcggttatgtgtgggtcgaagattggtagcgtggtttttcggattttttcgtcggttgagagtttgtttttcggcgtggattttattcgtcggttggcgacgaaaggtgatagtatcggtcgggtcggtttacgtgtaagtttcgcggttcggagtttttcg

SEQ ID NO: 9592 - DNA, 841 bp, Artificial Sequence
  chemically treated genomic DNA (Homo sapiens) CpG-island No: 9592
cgaaaaactccgaaccgcgaaacttacacgtaaaccgacccgaccgatactatcacctttcgtcgccaaccgacgaataaaatccacgccgaaaaacaaactctcaaccgacgaaaaaatccgaaaaaccacgctaccaatcttcgacccacacataaccgacaaacgaaaaaaaaaaaaacaccgccaaaccctatactcgcgcctaaacccacgacccgcaaaccccgacaacgacccgaaacccaaaatcgaccgacaacaacgccaacccgcttccgcgctacccgacgccctaacccgcacccaccttaacgtcctcgtcctcgtcctcgccttcccaacgatccccgccgacaataccgccgccccccaccttccgcactaaatcttccacgaaaaaaacgtcgacgtctacgaaaaaaaacgaaccgtattaatacctaccactacgtaaaaccgacgccgacccgaaccctaccccaacaacttctcctcaccccaaaaatccgaatcccccgccgccgccgccgccgccgccatctcgaaccgaatataaacgtatataaaaaaaaaaactaacgaaaaattaacacgacgaaaataaatcactaaatttactctcgttaaccgacgcgaaacaaaataaaaccgtaactaactatacgccgaaccgaaaccacgccccctcaaacgacgacgacgacgcgcgcgaataaaaaataaacgaaaaacgcgatcgataacgctacgaaactaaaaaaaaaacgaaaaaaaaaacgaaaaaaaacgaaaaaatatcctatatatacaatttataaaaacctcataactccactaa

SEQ ID NO: 9593 - DNA, 1003 bp, Artificial Sequence
  chemically treated genomic DNA (Homo sapiens) CpG-island No: 9593
agcgttttttttcgtcggtcgcgtcgatttttttggtttagattaagggttagatgtagaaagtagttttaggttcgcggtcgcggcgttgtttatttcgtcgttttcgttttttgtagtcgtcgttttatttcgtttttagtcggatttttaggttttttgtttttcgcgagcggtcgttcgagtattagtttcgtcgtcgtagagacgttcgttacgtcggtgtcggagtcggagcggggagttaggttgcgtgcgattagtcgtagagtagagagcgttcggggcgggggtcgtagacggataggggttttgggcggtcggggagtatgttcgcgcggttacgttgaatggcgttttttttgcgatttttcgttcggttgcgatcgtcggggatgttgtttcgcgcgtttttgtttttgttgttgtttagttttttgttaggtgggcgcgtttttttttgtttttttttatcgttgtggggcgggagcgggcgcgagtgggatggggaaagaggaaacgatggggcgtggggagcgcgcggcggggtttttcgtggtggcgttgattttcggttttcgttttcgttttgcggtttgttcggaatcgttagttgtagatattagttgtttgcggtttttgcgttgtttgggtagggttgcgggagttttttcgggcgtacgttttttcgcgtcgcgcgttcgtggttgcggagttttggcggtcgttgtttattttggttttttttttttcgcgttattgtttcggtttcggtcgcgttcgcgttttcgcgatcggtcggatttcgggtcgttagttcgtcggggtcgtcgcggttgtacgtggttttatttatattgtttttttagtggtagtttcgtcgtgtagggggcgtcgcggtttttcgcggtttttcgtgtttgttgtgggagtttttttattttttagggttgcgagagggaataggtgaatttataattttaatcggtattagtttgtcgga

SEQ ID NO: 9594 - DNA, 1003 bp, Artificial Sequence
  chemically treated genomic DNA (Homo sapiens) CpG-island No: 9594
tccgacaaactaataccgattaaaattataaattcacctattccctctcgcaaccctaaaaaataaaaaaactcccacaacaaacacgaaaaaccgcgaaaaaccgcgacgccccctacacgacgaaactaccactaaaaaaacaatataaataaaaccacgtacaaccgcgacgaccccgacgaactaacgacccgaaatccgaccgatcgcgaaaacgcgaacgcgaccgaaaccgaaacaataacgcgaaaaaaaaaaaaccaaaataaacaacgaccgccaaaactccgcaaccacgaacgcgcgacgcgaaaaaacgtacgcccgaaaaaactcccgcaaccctacccaaacaacgcaaaaaccgcaaacaactaatatctacaactaacgattccgaacaaaccgcaaaacgaaaacgaaaaccgaaaatcaacgccaccacgaaaaaccccgccgcgcgctccccacgccccatcgtttcctctttccccatcccactcgcgcccgctcccgccccacaacgataaaaaaaaacaaaaaaaaacgcgcccacctaacaaaaaactaaacaacaacaaaaacaaaaacgcgcgaaacaacatccccgacgatcgcaaccgaacgaaaaatcgcaaaaaaaacgccattcaacgtaaccgcgcgaacatactccccgaccgcccaaaacccctatccgtctacgacccccgccccgaacgctctctactctacgactaatcgcacgcaacctaactccccgctccgactccgacaccgacgtaacgaacgtctctacgacgacgaaactaatactcgaacgaccgctcgcgaaaaacaaaaaacctaaaaatccgactaaaaacgaaataaaacgacgactacaaaaaacgaaaacgacgaaataaacaacgccgcgaccgcgaacctaaaactactttctacatctaacccttaatctaaaccaaaaaaatcgacgcgaccgacgaaaaaaaacgct

SEQ ID NO: 9595 - DNA, 1003 bp, Artificial Sequence
  chemically treated genomic DNA (Homo sapiens) CpG-island No: 9595
ttcggtaagttggtgtcgattggggttatgagtttatttattttttttcgtagttttaaaaagtgggggaatttttataatagatacgggaagtcgcgaggaatcgcggcgttttttgtacggcgaggttgttattaaggaaataatataaataaagttacgtgtagtcgcggcggtttcggcgggttggcgattcggagttcggtcggtcgcggaggcgcggacgcggtcggagtcgggataatggcgcgagaaggaagagattagagtggatagcggtcgttagaatttcgtagttacgggcgcgcggcgcggaggggcgtgcgttcggagaagttttcgtagttttgtttaagtagcgtagaggtcgtaagtaattagtgtttgtagttggcggtttcggataggtcgtagggcgagagcgggggtcgggggttagcgttattacggaggatttcgtcgcgcgttttttacgttttatcgttttttttttttttattttattcgcgttcgttttcgttttatagcggtaagagaaagtagaagaaagcgcgtttatttggtaaaggattgagtagtagtaggagtaggagcgcgcggagtagtattttcggcggtcgtagtcgggcgaggggtcgtagaggaggcgttatttagcgtagtcgcgcgggtatgtttttcggtcgtttagagtttttgttcgtttgcggttttcgtttcgggcgttttttgttttgcggttggtcgtacgtagtttggtttttcgtttcggtttcggtatcggcgtggcgagcgtttttgcggcggcgaggttggtgttcggacggtcgttcgcgagaagtaaggggtttgagagttcggttgggggcggagtgaggcggcggttgtagagggcgggggcggcggagtggatagcgtcgcggtcgcgggtttgggattattttttatatttggtttttggtttgggttagggaggtcggcgcggtcggcggagggagacgtt

SEQ ID NO: 9596 - DNA, 1003 bp, Artificial Sequence
  chemically treated genomic DNA (Homo sapiens) CpG-island No: 9596
aacgtctccctccgccgaccgcgccgacctccctaacccaaaccaaaaaccaaatataaaaaataatcccaaacccgcgaccgcgacgctatccactccgccgcccccgccctctacaaccgccgcctcactccgcccccaaccgaactctcaaaccccttacttctcgcgaacgaccgtccgaacaccaacctcgccgccgcaaaaacgctcgccacgccgataccgaaaccgaaacgaaaaaccaaactacgtacgaccaaccgcaaaacaaaaaacgcccgaaacgaaaaccgcaaacgaacaaaaactctaaacgaccgaaaaacatacccgcgcgactacgctaaataacgcctcctctacgacccctcgcccgactacgaccgccgaaaatactactccgcgcgctcctactcctactactactcaatcctttaccaaataaacgcgctttcttctactttctcttaccgctataaaacgaaaacgaacgcgaataaaataaaaaaaaaaaaaacgataaaacgtaaaaaacgcgcgacgaaatcctccgtaataacgctaacccccgacccccgctctcgccctacgacctatccgaaaccgccaactacaaacactaattacttacgacctctacgctacttaaacaaaactacgaaaacttctccgaacgcacgcccctccgcgccgcgcgcccgtaactacgaaattctaacgaccgctatccactctaatctcttccttctcgcgccattatcccgactccgaccgcgtccgcgcctccgcgaccgaccgaactccgaatcgccaacccgccgaaaccgccgcgactacacgtaactttatttatattatttccttaataacaacctcgccgtacaaaaaacgccgcgattcctcgcgacttcccgtatctattataaaaattcccccactttttaaaactacgaaaaaaaataaataaactcataaccccaatcgacaccaacttaccgaa

SEQ ID NO: 9597 - DNA, 653 bp, Artificial Sequence
  chemically treated genomic DNA (Homo sapiens) CpG-island No: 9597
gtttgaatagcgtttagttgtttcgtttttaaaatgttaggacggtcgcggtttcgtttagagttttttttcggttgttggttcgggttcgttcgcgtcgttgggggttttgatttttgtcgagtcgggtttgggtagcgtttttcgcgtttcgcgagttcgcgttttcgttatcgggaaacgtcgtagtcggcgattcgcggtcgttttgggttcggcgtcggtttagttaggatttcgggagcgtacgggacgggtttcgttaggtaaggatcgcgggagtatttcgggattcgttgtcgcggcgtttgcggggttggagtatagtattgtcggtgtcgtcggggcgtcgcgcgggttatcggtcgtaggcggaggatttgttcgttgaagtcgggtcgagttttgtcgcggcggcgaggagattcgcgtggatattgggatcgatttttttttcggcggtattgcgttcggggcgcgtttcggtcggcggggagggtcggattcgcgcggtaggggatagtagtttcggtgggagtcgtacgggagtcgcgtcgtagcggttcgagttttattgcggggttcggggtttagaaatcgggagagtgtggtgttgtgtttaggtattttcgttgttttgagttttatttttt

SEQ ID NO: 9598 - DNA, 653 bp, Artificial Sequence
  chemically treated genomic DNA (Homo sapiens) CpG-island No: 9598
aaaaaataaaactcaaaacaacgaaaatacctaaacacaacaccacactctcccgatttctaaaccccgaaccccgcaataaaactcgaaccgctacgacgcgactcccgtacgactcccaccgaaactactatcccctaccgcgcgaatccgaccctccccgccgaccgaaacgcgccccgaacgcaataccgccgaaaaaaaaatcgatcccaatatccacgcgaatctcctcgccgccgcgacaaaactcgacccgacttcaacgaacaaatcctccgcctacgaccgataacccgcgcgacgccccgacgacaccgacaatactatactccaaccccgcaaacgccgcgacaacgaatcccgaaatactcccgcgatccttacctaacgaaacccgtcccgtacgctcccgaaatcctaactaaaccgacgccgaacccaaaacgaccgcgaatcgccgactacgacgtttcccgataacgaaaacgcgaactcgcgaaacgcgaaaaacgctacccaaacccgactcgacaaaaatcaaaacccccaacgacgcgaacgaacccgaaccaacaaccgaaaaaaaactctaaacgaaaccgcgaccgtcctaacattttaaaaacgaaacaactaaacgctattcaaac

SEQ ID NO: 9599 - DNA, 653 bp, Artificial Sequence
  chemically treated genomic DNA (Homo sapiens) CpG-island No: 9599
gggaggtgaggtttagaatagcgagggtgtttgagtatagtattatattttttcggtttttgagtttcgagtttcgtagtggaattcgggtcgttgcgacgcggttttcgtgcggtttttatcgaggttgttgttttttgtcgcgcgggttcggtttttttcgtcgatcgaggcgcgtttcgggcgtagtgtcgtcgaggaggggatcggttttagtgtttacgcgggttttttcgtcgtcgcggtagggttcggttcgattttagcgagtagatttttcgtttgcggtcggtgattcgcgcgacgtttcggcggtatcgataatgttgtgttttagtttcgtaggcgtcgcggtagcgggtttcgggatgttttcgcggtttttatttggcgaggttcgtttcgtgcgttttcggggttttggttgggtcggcgtcgagtttagggcgatcgcggatcgtcggttacggcgtttttcggtgacgggggcgcgggttcgcggggcgcggggggcgttgtttaggttcggttcggtaggagttagagtttttagcggcgcgggcgagttcgggttagtagtcgagagggggttttgagcggagtcgcggtcgttttggtattttaaaggcgaggtagttggacgttgtttaagt

SEQ ID NO: 9600 - DNA, 653 bp, Artificial Sequence
  chemically treated genomic DNA (Homo sapiens) CpG-island No: 9600
acttaaacaacgtccaactacctcgcctttaaaataccaaaacgaccgcgactccgctcaaaaccccctctcgactactaacccgaactcgcccgcgccgctaaaaactctaactcctaccgaaccgaacctaaacaacgccccccgcgccccgcgaacccgcgcccccgtcaccgaaaaacgccgtaaccgacgatccgcgatcgccctaaactcgacgccgacccaaccaaaaccccgaaaacgcacgaaacgaacctcgccaaataaaaaccgcgaaaacatcccgaaacccgctaccgcgacgcctacgaaactaaaacacaacattatcgataccgccgaaacgtcgcgcgaatcaccgaccgcaaacgaaaaatctactcgctaaaatcgaaccgaaccctaccgcgacgacgaaaaaacccgcgtaaacactaaaaccgatcccctcctcgacgacactacgcccgaaacgcgcctcgatcgacgaaaaaaaccgaacccgcgcgacaaaaaacaacaacctcgataaaaaccgcacgaaaaccgcgtcgcaacgacccgaattccactacgaaactcgaaactcaaaaaccgaaaaaatataatactatactcaaacaccctcgctattctaaacctcacctccc

SEQ ID NO: 9601 - DNA, 719 bp, Artificial Sequence
  chemically treated genomic DNA (Homo sapiens) CpG-island No: 9601
tcgtatcgtcgtgtttttcggtttaagttttaatattcgggcgaattggcgtgttttattagttcggtagtatgaattattattcgttagttattttattggagacgacggaagatcgttgtcgaagcggcgttttatcgtttttagtatgacgttttgtattgttttattgttgaagtcgtcggtagtgatcgtttagtgtagtgttttacgattatagtagtttagcgcgaacgtgatacgtagttttttttcgttattatagtagaattcgaattcgttagagtattatcgttgattgtttttttttacggttattttgtttgtatgtgttcgtttcgatggcggtatagtaggttttcgtttaagtaatagcgtattttggcgtatgattcggtaaatacgtttggtattgatcgtaggtatattattaagttttgtttgtttgcgaagtagcgtttatattcgacgataattatacgttggtagtttttcgataatatggtgtatacggagaagtatattcgtattattagtgtgacgattgcggcggttatttatttagttatcggttcgtttgagaatgacgtgtaattgcgtacgcgatattcggagataacggttgattgcgtgcgttatttatttttttgttcgtttatatttaacggtttttttgaggagtttattttttatcgtttttttgtcgagtaggcgttgga

SEQ ID NO: 9602 - DNA, 719 bp, Artificial Sequence
  chemically treated genomic DNA (Homo sapiens) CpG-island No: 9602
tccaacgcctactcgacaaaaaaacgataaaaaataaactcctcaaaaaaaccgttaaatataaacgaacaaaaaaataaataacgcacgcaatcaaccgttatctccgaatatcgcgtacgcaattacacgtcattctcaaacgaaccgataactaaataaataaccgccgcaatcgtcacactaataatacgaatatacttctccgtatacaccatattatcgaaaaactaccaacgtataattatcgtcgaatataaacgctacttcgcaaacaaacaaaacttaataatatacctacgatcaataccaaacgtatttaccgaatcatacgccaaaatacgctattacttaaacgaaaacctactataccgccatcgaaacgaacacatacaaacaaaataaccgtaaaaaaaaacaatcaacgataatactctaacgaattcgaattctactataataacgaaaaaaaactacgtatcacgttcgcgctaaactactataatcgtaaaacactacactaaacgatcactaccgacgacttcaacaataaaacaatacaaaacgtcatactaaaaacgataaaacgccgcttcgacaacgatcttccgtcgtctccaataaaataactaacgaataataattcatactaccgaactaataaaacacgccaattcgcccgaatattaaaacttaaaccgaaaaacacgacgatacga

SEQ ID NO: 9603 - DNA, 719 bp, Artificial Sequence
  chemically treated genomic DNA (Homo sapiens) CpG-island No: 9603
tttagcgtttgttcggtaagaaaacgatggaaaatgaattttttaaagaagtcgttgaatatggacgggtaaaaaagtggatagcgtacgtagttagtcgttgttttcgggtgtcgcgtgcgtagttgtacgttatttttagacgaatcgatgattggatggatggtcgtcgtagtcgttatattgatgatacggatgtgttttttcgtatatattatgttatcggagagttgttaacgtatggttatcgtcgggtatgggcgttgtttcgtagataggtagaatttgatggtatgtttgcgattaatgttaaacgtgtttatcggattatgcgttagaatgcgttgttgtttgagcgaaaatttgttgtatcgttatcgaaacgggtatatataggtagagtggtcgtgaaagaaagtaattagcgatggtgttttgacgggttcgagttttgttgtgataacggagagagattgcgtgttacgttcgcgttggattgttgtgatcgtgaggtattgtattgggcggttattatcggcggttttaatagtgaaatagtataggacgttatgttgggagcggtggaacgtcgtttcggtaacgatttttcgtcgtttttagtggagtggttgacggataatggtttatgttatcgggttaatgaaatacgttagttcgttcggatgttgggatttgaatcgaagaatacggcggtgcgg

SEQ ID NO: 9604 - DNA, 719 bp, Artificial Sequence
  chemically treated genomic DNA (Homo sapiens) CpG-island No: 9604
ccgcaccgccgtattcttcgattcaaatcccaacatccgaacgaactaacgtatttcattaacccgataacataaaccattatccgtcaaccactccactaaaaacgacgaaaaatcgttaccgaaacgacgttccaccgctcccaacataacgtcctatactatttcactattaaaaccgccgataataaccgcccaatacaatacctcacgatcacaacaatccaacgcgaacgtaacacgcaatctctctccgttatcacaacaaaactcgaacccgtcaaaacaccatcgctaattactttctttcacgaccactctacctatatatacccgtttcgataacgatacaacaaattttcgctcaaacaacaacgcattctaacgcataatccgataaacacgtttaacattaatcgcaaacataccatcaaattctacctatctacgaaacaacgcccatacccgacgataaccatacgttaacaactctccgataacataatatatacgaaaaaacacatccgtatcatcaatataacgactacgacgaccatccatccaatcatcgattcgtctaaaaataacgtacaactacgcacgcgacacccgaaaacaacgactaactacgtacgctatccacttttttacccgtccatattcaacgacttctttaaaaaattcattttccatcgttttcttaccgaacaaacgctaaa

SEQ ID NO: 9605 - DNA, 935 bp, Artificial Sequence
  chemically treated genomic DNA (Homo sapiens) CpG-island No: 9605
cggcggttcggtcggaaggggtcgttgtttgtttagcgtagttatttcgtcgttgtagtcgtcgcggttcgtattttttacggtcgggttggtttagtttcgttaagttttaatagttttttttcgagcgagcgtcgggaacgagtattattagggttggagcggacggttttagaagagtttagttgttgcgcgcgtcggagaggtttttgggaaatttttacggtttagggattttcgaaagtagagcgaggagttttcgtacgcgttagtttgcgagtgagcgtttagttcggtatttgtttttttagcgtcgtcgtttttttatttttcggattcgcgtcgttcgcgcgttcgttcgtttttgcgatgaattcggttttaggtaattagacggacgtggcgggtttgtttttggttaatagtagcgaggcgttggagcgagtcgtgcgttgttgtatttaggcgttcgtggtgatcgacgacggtttcgcggagggaggttcggacgagcgtagtttgtatataatgcgcgtggtgtagatcgcggttatgtgcgtgtttttatttatcgtggttttcggtattttttttttcggttgtaatttgtttattaagttcgagggtatgattaattttttcgtgaaggatcggaggtcgtttaaggaggtggaggcggtggtcgtggggttttattgattcgttttttgttttcgcggtaatcgtttttacgtttgtttattttgttagttcggttgtgttttttattattagagattgggcgaagtaaatttgtcggagttaattatttttttcgatttcggtttttcggaaagaagcgatcggtttttttttcgttttttgaaagtttttatgtttggtagtcggaggagagcgtttagattttgaatttagtagaaagtggtaagaagagg

SEQ ID NO: 9606 - DNA, 935 bp, Artificial Sequence
  chemically treated genomic DNA (Homo sapiens) CpG-island No: 9606
cctcttcttaccactttctactaaattcaaaatctaaacgctctcctccgactaccaaacataaaaactttcaaaaaacgaaaaaaaaaccgatcgcttctttccgaaaaaccgaaatcgaaaaaaataattaactccgacaaatttacttcgcccaatctctaataataaaaaacacaaccgaactaacaaaataaacaaacgtaaaaacgattaccgcgaaaacaaaaaacgaatcaataaaaccccacgaccaccgcctccacctccttaaacgacctccgatccttcacgaaaaaattaatcataccctcgaacttaataaacaaattacaaccgaaaaaaaaaataccgaaaaccacgataaataaaaacacgcacataaccgcgatctacaccacgcgcattatatacaaactacgctcgtccgaacctccctccgcgaaaccgtcgtcgatcaccacgaacgcctaaatacaacaacgcacgactcgctccaacgcctcgctactattaaccaaaaacaaacccgccacgtccgtctaattacctaaaaccgaattcatcgcaaaaacgaacgaacgcgcgaacgacgcgaatccgaaaaataaaaaaacgacgacgctaaaaaaacaaataccgaactaaacgctcactcgcaaactaacgcgtacgaaaactcctcgctctactttcgaaaatccctaaaccgtaaaaatttcccaaaaacctctccgacgcgcgcaacaactaaactcttctaaaaccgtccgctccaaccctaataatactcgttcccgacgctcgctcgaaaaaaaactattaaaacttaacgaaactaaaccaacccgaccgtaaaaaatacgaaccgcgacgactacaacgacgaaataactacgctaaacaaacaacgaccccttccgaccgaaccgccg

SEQ ID NO: 9607 - DNA, 935 bp, Artificial Sequence
  chemically treated genomic DNA (Homo sapiens) CpG-island No: 9607
tttttttttgttattttttgttgagtttagagtttgggcgttttttttcgattgttaggtatgaggatttttagagggcgagggagaaatcggtcgttttttttcgaaaggtcgaagtcgagagaaataattgatttcgataggtttgtttcgtttagtttttgatagtgaggggtatagtcgggttagtaaagtgggtaggcgtgggagcggttgtcgcgggggtagagggcgggttagtagggttttacgattatcgtttttatttttttagacggttttcggttttttacgaggaagttgattatgttttcggatttgatgagtagattgtagtcgaggaagaagatgtcgaagattacggtgagtgagagtacgtatatgatcgcgatttgtattacgcgtattatgtataggttacgttcgttcgggttttttttcgcgaagtcgtcgtcggttattacggacgtttgggtgtagtagcgtacggttcgttttagcgtttcgttgttgttggttaggaataggttcgttacgttcgtttggttgtttagggtcggatttatcgtaggaacgggcgggcgcgcgagcggcgcgggttcgaggggtgggaaggcggcggcgttggaggaataggtgtcgggttgagcgtttattcgtagattagcgcgtgcgagggtttttcgttttgttttcgaaagtttttgggtcgtgggagttttttaggagttttttcgacgcgcgtagtagttaggtttttttaaagtcgttcgttttagttttggtggtgttcgttttcggcgttcgttcgagggggggttgttggaatttggcggggttggattagttcggtcgtgggaggtgcgggtcgcggcggttgtagcggcggggtggttgcgttgagtaaatagcggtttttttcggtcgagtcgtcg

SEQ ID NO: 9608 - DNA, 935 bp, Artificial Sequence
  chemically treated genomic DNA (Homo sapiens) CpG-island No: 9608
cgacgactcgaccgaaaaaaaccgctatttactcaacgcaaccaccccgccgctacaaccgccgcgacccgcacctcccacgaccgaactaatccaaccccgccaaattccaacaaccccccctcgaacgaacgccgaaaacgaacaccaccaaaactaaaacgaacgactttaaaaaaacctaactactacgcgcgtcgaaaaaactcctaaaaaactcccacgacccaaaaactttcgaaaacaaaacgaaaaaccctcgcacgcgctaatctacgaataaacgctcaacccgacacctattcctccaacgccgccgccttcccacccctcgaacccgcgccgctcgcgcgcccgcccgttcctacgataaatccgaccctaaacaaccaaacgaacgtaacgaacctattcctaaccaacaacaacgaaacgctaaaacgaaccgtacgctactacacccaaacgtccgtaataaccgacgacgacttcgcgaaaaaaaacccgaacgaacgtaacctatacataatacgcgtaatacaaatcgcgatcatatacgtactctcactcaccgtaatcttcgacatcttcttcctcgactacaatctactcatcaaatccgaaaacataatcaacttcctcgtaaaaaaccgaaaaccgtctaaaaaaataaaaacgataatcgtaaaaccctactaacccgccctctacccccgcgacaaccgctcccacgcctacccactttactaacccgactatacccctcactatcaaaaactaaacgaaacaaacctatcgaaatcaattatttctctcgacttcgacctttcgaaaaaaaacgaccgatttctccctcgccctctaaaaatcctcatacctaacaatcgaaaaaaaacgcccaaactctaaactcaacaaaaaataacaaaaaaaaa

SEQ ID NO: 9609 - DNA, 594 bp, Artificial Sequence
  chemically treated genomic DNA (Homo sapiens) CpG-island No: 9609
ttgcgatcgagtggtcgacgtttttagtgggagtgaggtttagtacgcgagttcggtttttttttttggagttaggtgggtgcgcgtttttaggtttattcggcggcgtaaggcgggagaagttaggtgtttttaataaatatggtcgttacgttagcgttaattcggttcgggagtcgcgttgtcgtttgggaatcgtaggtttggcgttattcggttcggaattacgtgatgtaggaggtgttcgaggcggcggggttcgcgcgggtggagtttttcggcgttcgagcggggtgggggttgttcggttgagattttcggcgggtttcggtttttgcgtgtatcgtttgcgtgttcgcgttcgcggttttggcgttgttggtgaggagtcggggagcgaggcggggaggttgggagcggggcgttttttttgaggttagagggggttgggtagggtcggttcggcgggaagggggtcggtcgcgcgttattagcgtttggtttttgagtcgcggcgttggcggtgggggtttttcggtttcggttttttttggtagggttcggttgtgtaggtggtcgggtagggtcgagggt

SEQ ID NO: 9610 - DNA, 594 bp, Artificial Sequence
  chemically treated genomic DNA (Homo sapiens) CpG-island No: 9610
accctcgaccctacccgaccacctacacaaccgaaccctaccaaaaaaaaccgaaaccgaaaaacccccaccgccaacgccgcgactcaaaaaccaaacgctaataacgcgcgaccgacccccttcccgccgaaccgaccctacccaaccccctctaacctcaaaaaaaacgccccgctcccaacctccccgcctcgctccccgactcctcaccaacaacgccaaaaccgcgaacgcgaacacgcaaacgatacacgcaaaaaccgaaacccgccgaaaatctcaaccgaacaacccccaccccgctcgaacgccgaaaaactccacccgcgcgaaccccgccgcctcgaacacctcctacatcacgtaattccgaaccgaataacgccaaacctacgattcccaaacgacaacgcgactcccgaaccgaattaacgctaacgtaacgaccatatttattaaaaacacctaacttctcccgccttacgccgccgaataaacctaaaaacgcgcacccacctaactccaaaaaaaaaaaccgaactcgcgtactaaacctcactcccactaaaaacgtcgaccactcgatcgcaa

SEQ ID NO: 9611 - DNA, 594 bp, Artificial Sequence
  chemically treated genomic DNA (Homo sapiens) CpG-island No: 9611
gttttcggttttgttcggttatttgtatagtcgggttttgttaggaggggtcggggtcgaaaagtttttatcgttagcgtcgcggtttagggattaggcgttgatagcgcgcggtcgatttttttttcgtcgggtcggttttgtttagttttttttggttttagaagaggcgtttcgtttttagttttttcgtttcgtttttcggttttttattagtagcgttagaatcgcgagcgcgagtacgtaggcggtgtacgtagaggtcgggattcgtcggaaattttaatcgggtagtttttatttcgttcgaacgtcgaggggttttattcgcgcgagtttcgtcgtttcgggtattttttgtattacgtggtttcgggtcgggtgacgttaaatttgcgatttttaagcggtagcgcggttttcgagtcgggttgacgttggcgtggcggttatgtttattgagggtatttggtttttttcgttttgcgtcgtcgggtgagtttgaaagcgcgtatttatttggttttaggaagagggatcgagttcgcgtgttgggttttatttttattgggggcgtcggttattcgatcgtaa

SEQ ID NO: 9612 - DNA, 594 bp, Artificial Sequence
  chemically treated genomic DNA (Homo sapiens) CpG-island No: 9612
ttacgatcgaataaccgacgcccccaataaaaataaaacccaacacgcgaactcgatccctcttcctaaaaccaaataaatacgcgctttcaaactcacccgacgacgcaaaacgaaaaaaaccaaataccctcaataaacataaccgccacgccaacgtcaacccgactcgaaaaccgcgctaccgcttaaaaatcgcaaatttaacgtcacccgacccgaaaccacgtaatacaaaaaatacccgaaacgacgaaactcgcgcgaataaaacccctcgacgttcgaacgaaataaaaactacccgattaaaatttccgacgaatcccgacctctacgtacaccgcctacgtactcgcgctcgcgattctaacgctactaataaaaaaccgaaaaacgaaacgaaaaaactaaaaacgaaacgcctcttctaaaaccaaaaaaaactaaacaaaaccgacccgacgaaaaaaaaatcgaccgcgcgctatcaacgcctaatccctaaaccgcgacgctaacgataaaaacttttcgaccccgacccctcctaacaaaacccgactatacaaataaccgaacaaaaccgaaaac

SEQ ID NO: 9613 - DNA, 529 bp, Artificial Sequence
  chemically treated genomic DNA (Homo sapiens) CpG-island No: 9613
ggcggtcggcggcggggttaggtttggggtttgtcggcgatttcgcgtttggttcgcgagtttaggtgttcggagttagggagggagcggggcgcggattcgggcggggagggtaggggttatcgggcggggtaggagtagcgatgggatacgttcgtttcgggggagtgtttcggtttggtcgtcgtagttttaagggtcgggcggcgtagggttttaaagtgcggggtcgttcggttgttagttcgggttcgaggtcgaggtcgggcgggatttagagcgggagtcggcgcgggatttgggattcggagcgggattcggagcgggatttaggagtcggcgcggggttatggcgaggcgcgggttagggtggcggacgtttttgttgttcgtgttgttggcgggcgcggttagggcggtttttattttcgtcggggatagatttgttatcggtttttgcggggggacgggttgcgtttttggggcgtaggtgggtatcggcggggaggtagttttggggggacgggag

SEQ ID NO: 9614 - DNA, 529 bp, Artificial Sequence
  chemically treated genomic DNA (Homo sapiens) CpG-island No: 9614
ctcccgtccccccaaaactacctccccgccgatacccacctacgccccaaaaacgcaacccgtccccccgcaaaaaccgataacaaatctatccccgacgaaaataaaaaccgccctaaccgcgcccgccaacaacacgaacaacaaaaacgtccgccaccctaacccgcgcctcgccataaccccgcgccgactcctaaatcccgctccgaatcccgctccgaatcccaaatcccgcgccgactcccgctctaaatcccgcccgacctcgacctcgaacccgaactaacaaccgaacgaccccgcactttaaaaccctacgccgcccgacccttaaaactacgacgaccaaaccgaaacactcccccgaaacgaacgtatcccatcgctactcctaccccgcccgataacccctaccctccccgcccgaatccgcgccccgctccctccctaactccgaacacctaaactcgcgaaccaaacgcgaaatcgccgacaaaccccaaacctaaccccgccgccgaccgcc

SEQ ID NO: 9615 - DNA, 529 bp, Artificial Sequence
  chemically treated genomic DNA (Homo sapiens) CpG-island No: 9615
ttttcgtttttttagggttgttttttcgtcggtgtttatttgcgttttagggacgtagttcgttttttcgtagaggtcggtagtaggtttgttttcggcggaagtagaggtcgttttggtcgcgttcgttagtagtacgagtagtagaagcgttcgttattttggttcgcgtttcgttatggtttcgcgtcggtttttgggtttcgtttcggatttcgtttcgagttttagatttcgcgtcggttttcgttttggatttcgttcggtttcggtttcgagttcgggttagtaatcgggcgatttcgtattttggggttttgcgtcgttcggtttttaaggttgcggcggttaggtcgggatattttttcggggcgggcgtgttttatcgttgtttttgtttcgttcggtgatttttgtttttttcgttcggattcgcgtttcgttttttttttggtttcgggtatttgaattcgcgggttaggcgcgaggtcgtcggtagattttaagtttgatttcgtcgtcggtcgtt

SEQ ID NO: 9616 - DNA, 529 bp, Artificial Sequence
  chemically treated genomic DNA (Homo sapiens) CpG-island No: 9616
aacgaccgacgacgaaatcaaacttaaaatctaccgacgacctcgcgcctaacccgcgaattcaaatacccgaaaccaaaaaaaaaacgaaacgcgaatccgaacgaaaaaaacaaaaatcaccgaacgaaacaaaaacaacgataaaacacgcccgccccgaaaaaatatcccgacctaaccgccgcaaccttaaaaaccgaacgacgcaaaaccccaaaatacgaaatcgcccgattactaacccgaactcgaaaccgaaaccgaacgaaatccaaaacgaaaaccgacgcgaaatctaaaactcgaaacgaaatccgaaacgaaacccaaaaaccgacgcgaaaccataacgaaacgcgaaccaaaataacgaacgcttctactactcgtactactaacgaacgcgaccaaaacgacctctacttccgccgaaaacaaacctactaccgacctctacgaaaaaacgaactacgtccctaaaacgcaaataaacaccgacgaaaaaacaaccctaaaaaaacgaaaa

SEQ ID NO: 9617 - DNA, 717 bp, Artificial Sequence
  chemically treated genomic DNA (Homo sapiens) CpG-island No: 9617
cgtcgcgggggtcgtagggtcggcgtcgggtttggtcggagcgagggggtattgggggtttcgggtcgtttcgcgttagagttttcggcgttttatttttattttaaggttttgtaggcgaggaggcggggatttcggcggtcgcgtcgcgggatttcgggcgggcgggggcggggcgggttgtgtttgaattatacggtgatcgcgcgggtcgtgcgcgcgtatatttttcgtacgttcgtagtttcgcgtcgcgcggttttttcgggagtggggtcggttcgtcggcggcggagacgaacgattttttttagggtgcgtttagtgtttcgttttatttggtcgtcgttagtttcgtcgttttattcggtcgcgttttcgtagtagttttcgtttatgatggcgttcggtacggttttcgttatgttttttcgcgagcgagcgcgcgtatgcgcgaggcggggataggcgggcgggcgtacgcgcggcgcgtttcggttcgggcgggaggcggggtttggaagaaggggcggggtttggaggaagggtagggtcgcgggttcggtattgggaataaaggggatcggcggaaggaacgtttttagtcgatttcggagcgatgttcgggtggattaggggtttagtttcggagagaggttttttattggattcgtgtatagttttttttttgcggcgtcggttttgcgagttttagtt

SEQ ID NO: 9618 - DNA, 717 bp, Artificial Sequence
  chemically treated genomic DNA (Homo sapiens) CpG-island No: 9618
aactaaaactcgcaaaaccgacgccgcaaaaaaaaaactatacacgaatccaataaaaaacctctctccgaaactaaacccctaatccacccgaacatcgctccgaaatcgactaaaaacgttccttccgccgatcccctttattcccaataccgaacccgcgaccctacccttcctccaaaccccgccccttcttccaaaccccgcctcccgcccgaaccgaaacgcgccgcgcgtacgcccgcccgcctatccccgcctcgcgcatacgcgcgctcgctcgcgaaaaaacataacgaaaaccgtaccgaacgccatcataaacgaaaactactacgaaaacgcgaccgaataaaacgacgaaactaacgacgaccaaataaaacgaaacactaaacgcaccctaaaaaaaatcgttcgtctccgccgccgacgaaccgaccccactcccgaaaaaaccgcgcgacgcgaaactacgaacgtacgaaaaatatacgcgcgcacgacccgcgcgatcaccgtataattcaaacacaacccgccccgcccccgcccgcccgaaatcccgcgacgcgaccgccgaaatccccgcctcctcgcctacaaaaccttaaaataaaaataaaacgccgaaaactctaacgcgaaacgacccgaaacccccaataccccctcgctccgaccaaacccgacgccgaccctacgacccccgcgacg

SEQ ID NO: 9619 - DNA, 717 bp, Artificial Sequence
  chemically treated genomic DNA (Homo sapiens) CpG-island No: 9619
aattggggttcgtagagtcggcgtcgtaggggaggggttgtgtacgaatttagtgggaaattttttttcggagttaagtttttggtttattcgggtatcgtttcgggatcgattgggggcgtttttttcgtcggttttttttgtttttagtgtcgagttcgcggttttgttttttttttaggtttcgtttttttttttaggtttcgtttttcgttcgggtcgaagcgcgtcgcgcgtgcgttcgttcgtttgttttcgtttcgcgtatgcgcgcgttcgttcgcgggagggtatggcgggggtcgtgtcgggcgttattatggacgaggattattacgggagcgcggtcgagtggggcgacgaggttgacggcggttaggtgaggcggggtattgggcgtattttagagagaatcgttcgttttcgtcgtcggcgggtcggttttattttcggagaggtcgcgcggcgcgaggttgcgggcgtgcggggggtgtgcgcgcgtacggttcgcgcggttatcgtgtggtttaagtatagttcgtttcgttttcgttcgttcggggtttcgcggcgcggtcgtcggggttttcgttttttcgtttgtaggattttggggtgggggtgaggcgtcggaggttttggcgcggggcggttcgaggtttttagtattttttcgtttcggttaggttcggcgtcggttttgcgattttcgcggcg

SEQ ID NO: 9620 - DNA, 717 bp, Artificial Sequence
  chemically treated genomic DNA (Homo sapiens) CpG-island No: 9620
cgccgcgaaaatcgcaaaaccgacgccgaacctaaccgaaacgaaaaaatactaaaaacctcgaaccgccccgcgccaaaacctccgacgcctcacccccaccccaaaatcctacaaacgaaaaaacgaaaaccccgacgaccgcgccgcgaaaccccgaacgaacgaaaacgaaacgaactatacttaaaccacacgataaccgcgcgaaccgtacgcgcgcacaccccccgcacgcccgcaacctcgcgccgcgcgacctctccgaaaataaaaccgacccgccgacgacgaaaacgaacgattctctctaaaatacgcccaataccccgcctcacctaaccgccgtcaacctcgtcgccccactcgaccgcgctcccgtaataatcctcgtccataataacgcccgacacgacccccgccataccctcccgcgaacgaacgcgcgcatacgcgaaacgaaaacaaacgaacgaacgcacgcgcgacgcgcttcgacccgaacgaaaaacgaaacctaaaaaaaaaaacgaaacctaaaaaaaaaacaaaaccgcgaactcgacactaaaaacaaaaaaaaccgacgaaaaaaacgcccccaatcgatcccgaaacgatacccgaataaaccaaaaacttaactccgaaaaaaaatttcccactaaattcgtacacaacccctcccctacgacgccgactctacgaaccccaatt

SEQ ID NO: 9621 - DNA, 553 bp, Artificial Sequence
  chemically treated genomic DNA (Homo sapiens) CpG-island No: 9621
  unsure (375)
aggagacgcgtgtcgagttgcgacggatagaaataggatgggagatgaaataaatgtcgggtcgcgcgtgtgaatttagtatagggaagggttggcgaatttatgcgcgagttatagatttgggagtgggggaatgggatacgacgagaatgattgcgtaaggcgttggggacgtttttcgaattgatgacgggggagtacggcggtagggaattgtatatgttacgagagttattatggcgtgtgtagtgatgtgggcgcgtgaggggagtggcgcgtgttttatggagatatggtgagtacgtgtgacgggatgatttatgacggcgatatagaggatgttatttggcgtgtcgtatacgagatttcgaggtnaggttggatcggcgatttatcgatgcgaggtgtttatgatcggacggtatagtgtaaggcggtcggtgatattttcgttttgcgttagcgcggatttttttagtcgcgtggtgaagatttgagtgggtttttttacgtgattaaaggagttatatttatattttttggtattggtttg

SEQ ID NO: 9622 - DNA, 553 bp, Artificial Sequence
  chemically treated genomic DNA (Homo sapiens) CpG-island No: 9622
  unsure (179)
caaaccaataccaaaaaatataaatataactcctttaatcacgtaaaaaaacccactcaaatcttcaccacgcgactaaaaaaatccgcgctaacgcaaaacgaaaatatcaccgaccgccttacactataccgtccgatcataaacacctcgcatcgataaatcgccgatccaacctnacctcgaaatctcgtatacgacacgccaaataacatcctctatatcgccgtcataaatcatcccgtcacacgtactcaccatatctccataaaacacgcgccactcccctcacgcgcccacatcactacacacgccataataactctcgtaacatatacaattccctaccgccgtactcccccgtcatcaattcgaaaaacgtccccaacgccttacgcaatcattctcgtcgtatcccattcccccactcccaaatctataactcgcgcataaattcgccaacccttccctatactaaattcacacgcgcgacccgacatttatttcatctcccatcctatttctatccgtcgcaactcgacacgcgtctcct

SEQ ID NO: 9623 - DNA, 553 bp, Artificial Sequence
  chemically treated genomic DNA (Homo sapiens) CpG-island No: 9623
  unsure (179)
taagttagtgttaggggatatgggtgtggtttttttaattacgtggggaagtttatttaggtttttattacgcggttggaaggattcgcgttggcgtaaggcgaggatattatcgatcgttttatattatatcgttcgattatggatatttcgtatcggtgagtcgtcgatttaatttngtttcggagtttcgtatacggtacgttagatagtattttttatgtcgtcgttatagattatttcgttatacgtatttattatgtttttatggaatacgcgttattttttttacgcgtttatattattatatacgttatgatgattttcgtaatatgtgtagttttttatcgtcgtgttttttcgttattaattcgaaaagcgtttttaacgttttgcgtaattattttcgtcgtattttatttttttatttttaggtttgtgattcgcgtatgggttcgttaatttttttttatgttgagtttatacgcgcgattcggtatttgttttattttttattttgtttttgttcgtcgtaattcgatacgcgtttttt

SEQ ID NO: 9624 - DNA, 553 bp, Artificial Sequence
  chemically treated genomic DNA (Homo sapiens) CpG-island No: 9624
  unsure (375)
aaaaaacgcgtatcgaattacgacgaacaaaaacaaaataaaaaataaaacaaataccgaatcgcgcgtataaactcaacataaaaaaaaattaacgaacccatacgcgaatcacaaacctaaaaataaaaaaataaaatacgacgaaaataattacgcaaaacgttaaaaacgcttttcgaattaataacgaaaaaacacgacgataaaaaactacacatattacgaaaatcatcataacgtatataataatataaacgcgtaaaaaaaataacgcgtattccataaaaacataataaatacgtataacgaaataatctataacgacgacataaaaaatactatctaacgtaccgtatacgaaactccgaaacnaaattaaatcgacgactcaccgatacgaaatatccataatcgaacgatataatataaaacgatcgataatatcctcgccttacgccaacgcgaatccttccaaccgcgtaataaaaacctaaataaacttccccacgtaattaaaaaaaccacacccatatcccctaacactaactta

SEQ ID NO: 9625 - DNA, 666 bp, Artificial Sequence
  chemically treated genomic DNA (Homo sapiens) CpG-island No: 9625
  unsure (603)
cgacgcgtttagaagtttttatcgtatttaatttagagtacgatcgttcgggaggagcgggtttatttagtttaggggagggattaggtcgattttcgcgtaatgagttttaggcggtcgcgtagcggtgtagtgggcgcggagttggtaattagcgacgattcgcggttgcggttttgcgggagttgtattatgcggttcggggcgagtcggttgatacgcgcgtttacggcgagtggagtcgggaatttagattttagacgtacggtcgaggatcggtagaattcgttggattggtagtttaggagcgggagggcggaggcggcgggcggggtcgttggaggtttgtaattttagcgtatttcggggaagatcgttcgtcggtgttcgtgtggtttcgcgtttttggggtggggttcgtttcgttatttcgtttcgtttgttttttggtttcggttcgtcgtcgttttcgatgaattttttcggtttttcgtcgagttcgtttgagcgcgtttttaatttggttttgggtttcgtcgttggtcgtacggagattgtgtcggtttcgttttttttcgttttttttatatttttattttttangcggggaggaagggttgtagttttacggtcgtcggaacgttttttcgatttagggagaattaa

SEQ ID NO: 9626 - DNA, 666 bp, Artificial Sequence
  chemically treated genomic DNA (Homo sapiens) CpG-island No: 9626
  unsure (64)
ttaattctccctaaatcgaaaaaacgttccgacgaccgtaaaactacaacccttcctccccgcntaaaaaataaaaatataaaaaaaacgaaaaaaaacgaaaccgacacaatctccgtacgaccaacgacgaaacccaaaaccaaattaaaaacgcgctcaaacgaactcgacgaaaaaccgaaaaaattcatcgaaaacgacgacgaaccgaaaccaaaaaacaaacgaaacgaaataacgaaacgaaccccaccccaaaaacgcgaaaccacacgaacaccgacgaacgatcttccccgaaatacgctaaaattacaaacctccaacgaccccgcccgccgcctccgccctcccgctcctaaactaccaatccaacgaattctaccgatcctcgaccgtacgtctaaaatctaaattcccgactccactcgccgtaaacgcgcgtatcaaccgactcgccccgaaccgcataatacaactcccgcaaaaccgcaaccgcgaatcgtcgctaattaccaactccgcgcccactacaccgctacgcgaccgcctaaaactcattacgcgaaaatcgacctaatccctcccctaaactaaataaacccgctcctcccgaacgatcgtactctaaattaaatacgataaaaacttctaaacgcgtcg

SEQ ID NO: 9627 - DNA, 666 bp, Artificial Sequence
  chemically treated genomic DNA (Homo sapiens) CpG-island No: 9627
  unsure (64)
ttgattttttttgggtcgggagggcgtttcggcggtcgtggggttgtagtttttttttttcgtntggaaggtgagggtgtgggaggagcgggagggggcgaggtcgatataattttcgtgcgattagcggcggagtttagagttaggttaggagcgcgtttaggcgagttcggcggaaggtcgagaaggtttatcggaggcggcggcgagtcgagattaggagatagacggggcggggtgacgaggcgggttttattttaggagcgcggggttatacggatatcggcgggcggtttttttcgggatgcgttgggattgtaggtttttagcggtttcgttcgtcgttttcgttttttcgtttttgagttgttaatttagcgggttttgtcggttttcggtcgtgcgtttggggtttggattttcggttttattcgtcgtgagcgcgcgtgttagtcgattcgtttcggatcgtatggtgtagttttcgtagggtcgtagtcgcgggtcgtcgttgattgttagtttcgcgtttattgtatcgttgcgcggtcgtttagggtttattgcgcggaagtcggtttggttttttttttgggttggatgggttcgtttttttcgagcggtcgtgttttgagttgaatgcgatagaggtttttgggcgcgtcg

SEQ ID NO: 9628 - DNA, 666 bp, Artificial Sequence
  chemically treated genomic DNA (Homo sapiens) CpG-island No: 9628
  unsure (603)
cgacgcgcccaaaaacctctatcgcattcaactcaaaacacgaccgctcgaaaaaaacgaacccatccaacccaaaaaaaaaaccaaaccgacttccgcgcaataaaccctaaacgaccgcgcaacgatacaataaacgcgaaactaacaatcaacgacgacccgcgactacgaccctacgaaaactacaccatacgatccgaaacgaatcgactaacacgcgcgctcacgacgaataaaaccgaaaatccaaaccccaaacgcacgaccgaaaaccgacaaaacccgctaaattaacaactcaaaaacgaaaaaacgaaaacgacgaacgaaaccgctaaaaacctacaatcccaacgcatcccgaaaaaaaccgcccgccgatatccgtataaccccgcgctcctaaaataaaacccgcctcgtcaccccgccccgtctatctcctaatctcgactcgccgccgcctccgataaaccttctcgaccttccgccgaactcgcctaaacgcgctcctaacctaactctaaactccgccgctaatcgcacgaaaattatatcgacctcgccccctcccgctcctcccacaccctcaccttccanacgaaaaaaaaaaactacaaccccacgaccgccgaaacgccctcccgacccaaaaaaaatcaa

SEQ ID NO: 9629 - DNA, 550 bp, Artificial Sequence
  chemically treated genomic DNA (Homo sapiens) CpG-island No: 9629
  unsure (300..301, 305)
tttttcgtttgtcgcgtcgcgttttcgtttgttacgcgttagtagtagttttacgtcgttatcgcgcgtttatggttatgtttttcgtggttacgtattagtttttttagcgtttttgttgcgtgtttcgtcgtttgcgatcgagtttttattacgtttttgtttttttttatcgtattcgtagtatcgtttttgtttttcgatttagtttttcggttttcgttacgcgagttttttcgtatcggttttcgatcgtcgcgtttcgtcgatgatagagtatggttgagatatgatattttnntgangttacgtcgttttcgtatttttcgtttacggattcgtttttttttttttagacgtcgattcgtgcgttttgttttcgatcgtttttacgtatgtttttttttcgttttcgacgttttatttattatttcgatcgcgtttatttcgttttatattttgttttttcgttcggtacgacgattattatatgtattgagttagttagtcgtagtcgttagtttattaggaacgttgagtataacgattt

SEQ ID NO: 9630 - DNA, 550 bp, Artificial Sequence
  chemically treated genomic DNA (Homo sapiens) CpG-island No: 9630
  unsure (246, 250..)
aaatcgttatactcaacgttcctaataaactaacgactacgactaactaactcaatacatataataatcgtcgtaccgaacgaaaaaacaaaatataaaacgaaataaacgcgatcgaaataataaataaaacgtcgaaaacgaaaaaaaaacatacgtaaaaacgatcgaaaacaaaacgcacgaatcgacgtctaaaaaaaaaaaaacgaatccgtaaacgaaaaatacgaaaacgacgtaacntcannaaaatatcatatctcaaccatactctatcatcgacgaaacgcgacgatcgaaaaccgatacgaaaaaactcgcgtaacgaaaaccgaaaaactaaatcgaaaaacaaaaacgatactacgaatacgataaaaaaaaacaaaaacgtaataaaaactcgatcgcaaacgacgaaacacgcaacaaaaacgctaaaaaaactaatacgtaaccacgaaaaacataaccataaacgcgcgataacgacgtaaaactactactaacgcgtaacaaacgaaaacgcgacgcgacaaacgaaaaa

SEQ ID NO: 9631 - DNA, 550 bp, Artificial Sequence
  chemically treated genomic DNA (Homo sapiens) CpG-island No: 9631
  unsure (246, 250..)
gagtcgttatatttaacgtttttagtggattgacgattacgattaattaatttaatgtatgtaatagtcgtcgtgtcgagcggagggatagggtgtggggcgaggtagacgcggtcgaggtggtgagtggggcgtcggagacgaggagggggtatgcgtgggaacgatcgggagtagggcgtacgagtcggcgtttgagggagggagggcggattcgtggacgggaggtacgggagcggcgtggtnttannagaatgttatattttaattatattttattatcggcggagcgcgacggtcgagagtcggtgcgggagggttcgcgtgacgggagtcgagaggttgagtcggggggtaggggcggtattgcgagtgcgatgagagaaggtaggagcgtggtgagggttcggtcgtaggcggcggaatacgtaataggagcgttgaggaggttggtgcgtggttacggggagtatggttatgggcgcgcggtgacggcgtgaggttgttgttagcgcgtgataggcgaggacgcggcgcggtaggcgaggag

SEQ ID NO: 9632 - DNA, 550 bp, Artificial Sequence
  chemically treated genomic DNA (Homo sapiens) CpG-island No: 9632
  unsure (300..301, 305)
ctcctcgcctaccgcgccgcgtcctcgcctatcacgcgctaacaacaacctcacgccgtcaccgcgcgcccataaccatactccccgtaaccacgcaccaacctcctcaacgctcctattacgtattccgccgcctacgaccgaaccctcaccacgctcctaccttctctcatcgcactcgcaataccgcccctaccccccgactcaacctctcgactcccgtcacgcgaaccctcccgcaccgactctcgaccgtcgcgctccgccgataataaaatataattaaaatataacattctnntaanaccacgccgctcccgtacctcccgtccacgaatccgccctccctccctcaaacgccgactcgtacgccctactcccgatcgttcccacgcataccccctcctcgtctccgacgccccactcaccacctcgaccgcgtctacctcgccccacaccctatccctccgctcgacacgacgactattacatacattaaattaattaatcgtaatcgtcaatccactaaaaacgttaaatataacgactc

SEQ ID NO: 9633 - DNA, 729 bp, Artificial Sequence
  chemically treated genomic DNA (Homo sapiens) CpG-island No: 9633
cggtagtcgcggtgttatgcgcggtggcgcgtttttttcggtttatttaggtagcggcgtcgggattgttttgcgttgcgggtcggtacggagagtttgcgagcgcggggagttggtgtttttgcgggttgcgtggcgtttttcgggttgtgtgggcgcgggtgtgcgtttagcgttggtcgcgtaggcgtgcgtggttcggggtagtttttgtttttcggtgtttgggggtgggcgtgtttgcgtgtcgggtatttgtatcgggcgtattttttttgattttagtggttcggtgtttttttcgtttcgaggtgaggagcgtttagcggttggagttcgatttgtttttttttttcgggtataatttggtaggcgcggcgtttcgcgtttcgcggtttttagagttttagttcggcgtttttttgtagcgtttttttattaggtttggaggagtcggtttttttttcgttgttcgcgtcgcgggcggaggcgtcgtcgtttgggtcggaggtgggcgttgttcgtttaggaaaggagcggagttgggtcggttcggttgcggggaaattttggtttacgtcggggtcgtttttgtttatagttattgttttcggtcgggtttcgcggtaggcgttataggtgcgaggcgagggcgtttacgatagtaattttttttgtttttttttttttttgttagttttttttttttaattttttagttcgggaatt

SEQ ID NO: 9634 - DNA, 729 bp, Artificial Sequence
  chemically treated genomic DNA (Homo sapiens) CpG-island No: 9634
aattcccgaactaaaaaattaaaaaaaaaaaactaacaaaaaaaaaaaaaaacaaaaaaaattactatcgtaaacgccctcgcctcgcacctataacgcctaccgcgaaacccgaccgaaaacaataactataaacaaaaacgaccccgacgtaaaccaaaatttccccgcaaccgaaccgacccaactccgctcctttcctaaacgaacaacgcccacctccgacccaaacgacgacgcctccgcccgcgacgcgaacaacgaaaaaaaaaccgactcctccaaacctaataaaaaaacgctacaaaaaaacgccgaactaaaactctaaaaaccgcgaaacgcgaaacgccgcgcctaccaaattatacccgaaaaaaaaaaacaaatcgaactccaaccgctaaacgctcctcacctcgaaacgaaaaaaacaccgaaccactaaaatcaaaaaaaatacgcccgatacaaatacccgacacgcaaacacgcccacccccaaacaccgaaaaacaaaaactaccccgaaccacgcacgcctacgcgaccaacgctaaacgcacacccgcgcccacacaacccgaaaaacgccacgcaacccgcaaaaacaccaactccccgcgctcgcaaactctccgtaccgacccgcaacgcaaaacaatcccgacgccgctacctaaataaaccgaaaaaaacgcgccaccgcgcataacaccgcgactaccg

SEQ ID NO: 9635 - DNA, 729 bp, Artificial Sequence
  chemically treated genomic DNA (Homo sapiens) CpG-island No: 9635
ggttttcgagttgaaaggttgaaggggagggattagtagagaggagggaaagtagagggggttgttgtcgtgaacgttttcgtttcgtatttgtggcgtttgtcgcggggttcgatcggaggtagtggttgtggataagggcggtttcggcgtaggttaggattttttcgtagtcggatcggtttagtttcgttttttttttgggcgaatagcgtttattttcggtttaggcggcggcgttttcgttcgcggcgcggatagcgagagagaaatcggtttttttaaatttggtggaggagcgttgtagagaagcgtcgggttgaggttttgggggtcgcggggcgcgaaacgtcgcgtttattaggttatgttcgggagaaggagataggtcgggttttagtcgttgggcgttttttatttcgaagcgaggaaaatatcgggttattgagattaggggaggtgcgttcgatataggtattcggtacgtagatacgtttatttttaaatatcgagaaataaagattgtttcgagttacgtacgtttgcgcggttagcgttgggcgtatattcgcgtttatatagttcgaagggcgttacgtaattcgtaagaatattagtttttcgcgttcgtaggtttttcgtgtcggttcgtagcgtagagtagtttcggcgtcgttgtttaggtgggtcggggaaggcgcgttatcgcgtatggtatcgcggttgtcg

SEQ ID NO: 9636 - DNA, 729 bp, Artificial Sequence
  chemically treated genomic DNA (Homo sapiens) CpG-island No: 9636
cgacaaccgcgataccatacgcgataacgcgccttccccgacccacctaaacaacgacgccgaaactactctacgctacgaaccgacacgaaaaacctacgaacgcgaaaaactaatattcttacgaattacgtaacgcccttcgaactatataaacgcgaatatacgcccaacgctaaccgcgcaaacgtacgtaactcgaaacaatctttatttctcgatatttaaaaataaacgtatctacgtaccgaatacctatatcgaacgcacctcccctaatctcaataacccgatattttcctcgcttcgaaataaaaaacgcccaacgactaaaacccgacctatctccttctcccgaacataacctaataaacgcgacgtttcgcgccccgcgacccccaaaacctcaacccgacgcttctctacaacgctcctccaccaaatttaaaaaaaccgatttctctctcgctatccgcgccgcgaacgaaaacgccgccgcctaaaccgaaaataaacgctattcgcccaaaaaaaaaacgaaactaaaccgatccgactacgaaaaaatcctaacctacgccgaaaccgcccttatccacaaccactacctccgatcgaaccccgcgacaaacgccacaaatacgaaacgaaaacgttcacgacaacaaccccctctactttccctcctctctactaatccctccccttcaacctttcaactcgaaaacc

SEQ ID NO: 9637 - DNA, 797 bp, Artificial Sequence
  chemically treated genomic DNA (Homo sapiens) CpG-island No: 9637
ggttttagagcgtaatttatgttttcgaatgtttagagttttttagtttacggggaacggtgttttttttacgttcgagatcgcgtacgtaggtttcgtcgcgggttcgaattttgagggcggaattttttcgtcgcgtttcgtttcgggggaaggcgtttggtttcgggacgtcgagggcgcgtgtttataaataagggggcgggacgcggggagggggcgcgaggggcgtcggttcgggtttacgggatatttatttcgttcgttgtcgtttatttcgtttcggttagtttttttcggtttcggttttagggtttgttgtttttcggtcgtcgtcgtcgtcgtcgcgggatttagttagggtcgtcgtcgtcgttatcgggacgcgattttataatgtatttttttttttatttttatcggtttatattgtttcgcggtatgtcgcgtagggaggaagggcggacgagtggtttaagatatgacgttcgggtcgagggcggggaagtcggagaggcgttatggacgcgtaggggggatagcgggggattcgggggtcgcgacgaagtcgcggaggcgagtatgtcgcggtttgtggtagcgcgatttaagagtcgcgttcggttcggtattgagatgatagtatcggcgcggtcgttatttttgtatagacgggaagtttcgatttgaagttttcgttttttcgtcgaagttgaaacggataatgcggttttatttaaattttcgtttttttacggattattttattagttttgtgtaattcgtttttaaggtat

SEQ ID NO: 9638 - DNA, 797 bp, Artificial Sequence
  chemically treated genomic DNA (Homo sapiens) CpG-island No: 9638
ataccttaaaaacgaattacacaaaactaataaaataatccgtaaaaaaacgaaaatttaaataaaaccgcattatccgtttcaacttcgacgaaaaaacgaaaacttcaaatcgaaacttcccgtctatacaaaaataacgaccgcgccgatactatcatctcaataccgaaccgaacgcgactcttaaatcgcgctaccacaaaccgcgacatactcgcctccgcgacttcgtcgcgacccccgaatcccccgctatcccccctacgcgtccataacgcctctccgacttccccgccctcgacccgaacgtcatatcttaaaccactcgtccgcccttcctccctacgcgacataccgcgaaacaatataaaccgataaaaataaaaaaaaaaatacattataaaatcgcgtcccgataacgacgacgacgaccctaactaaatcccgcgacgacgacgacgacgaccgaaaaacaacaaaccctaaaaccgaaaccgaaaaaaactaaccgaaacgaaataaacgacaacgaacgaaataaatatcccgtaaacccgaaccgacgcccctcgcgccccctccccgcgtcccgcccccttatttataaacacgcgccctcgacgtcccgaaaccaaacgccttcccccgaaacgaaacgcgacgaaaaaattccgccctcaaaattcgaacccgcgacgaaacctacgtacgcgatctcgaacgtaaaaaaaacaccgttccccgtaaactaaaaaactctaaacattcgaaaacataaattacgctctaaaacc

SEQ ID NO: 9639 - DNA, 797 bp, Artificial Sequence
  chemically treated genomic DNA (Homo sapiens) CpG-island No: 9639
atgttttaaggacgaattgtataaagttggtgaggtaattcgtaggagaacggaggtttgggtggaatcgtattattcgttttaatttcggcgaaggggcgggaattttaagtcgagatttttcgtttgtataaagatggcggtcgcgtcggtgttgttattttagtgtcgagtcgagcgcggtttttgagtcgcgttgttataggtcgcggtatgttcgttttcgcggtttcgtcgcggttttcgagtttttcgttgttttttttgcgcgtttatggcgttttttcggttttttcgttttcggttcgggcgttatgttttgggttattcgttcgttttttttttttgcgcggtatgtcgcggggtagtgtgggtcggtgggggtgagaaaagagatgtattgtggggtcgcgtttcggtggcggcggcggcggttttggttggatttcgcggcggcggcggcggcggtcggagagtagtaagttttggagtcggagtcgggggaggttggtcgggacgggatgggcgatagcgggcggggtgagtgtttcgtgggttcgggtcggcgtttttcgcgtttttttttcgcgtttcgtttttttgtttgtaaatacgcgttttcgacgtttcgaggttaagcgttttttttcggggcggggcgcggcgggggagtttcgtttttagggttcgggttcgcggcggggtttgcgtgcgcggtttcgggcgtgggaaggatatcgtttttcgtgggttggaggattttgggtattcgaaggtatgagttacgttttgggatt

SEQ ID NO: 9640 - DNA, 797 bp, Artificial Sequence
  chemically treated genomic DNA (Homo sapiens) CpG-island No: 9640
aatcccaaaacgtaactcataccttcgaatacccaaaatcctccaacccacgaaaaacgatatccttcccacgcccgaaaccgcgcacgcaaaccccgccgcgaacccgaaccctaaaaacgaaactcccccgccgcgccccgccccgaaaaaaaacgcttaacctcgaaacgtcgaaaacgcgtatttacaaacaaaaaaacgaaacgcgaaaaaaaaacgcgaaaaacgccgacccgaacccacgaaacactcaccccgcccgctatcgcccatcccgtcccgaccaacctcccccgactccgactccaaaacttactactctccgaccgccgccgccgccgccgcgaaatccaaccaaaaccgccgccgccgccaccgaaacgcgaccccacaatacatctcttttctcacccccaccgacccacactaccccgcgacataccgcgcaaaaaaaaaaaacgaacgaataacccaaaacataacgcccgaaccgaaaacgaaaaaaccgaaaaaacgccataaacgcgcaaaaaaaacaacgaaaaactcgaaaaccgcgacgaaaccgcgaaaacgaacataccgcgacctataacaacgcgactcaaaaaccgcgctcgactcgacactaaaataacaacaccgacgcgaccgccatctttatacaaacgaaaaatctcgacttaaaattcccgccccttcgccgaaattaaaacgaataatacgattccacccaaacctccgttctcctacgaattacctcaccaactttatacaattcgtccttaaaacat

SEQ ID NO: 9641 - DNA, 909 bp, Artificial Sequence
  chemically treated genomic DNA (Homo sapiens) CpG-island No: 9641
aaatcgaagattatttatgttgttgtttaggtcgtagacgttttgtagtagtagtgttttacgttcgttcgcgtatcggtgatttattttgttaattagtaaggtaatttcgttagtttagtcgggtttttaacgataggagtacgattatgcgtattcgtggttaggatttaacgttgatcgagatgcgtcgcgtgcggatgttggagatggcggacgcgatggatatgttttgttaagggttggtttgcgtatttatagatttgcgtaagaattgattggtttcgatttttggagtggtgaattacgtagcgaggtgacgtcggtttttatttacgtagacgtggtttagttgtatgtatcgagacgttacgtcgtgaggtagataaagtatagggcggcgtttataatttatggtaatttcgtttatgtgttcgtcgaagcggtataaatcgtcgtgacgattagcggtttaatgatcgaagttaggttggtaagaatcgcgagcgatttttgaagttgtttttgatggtcgttatttatttgtttggatagtatggtttgtaacgcgggatttcgatgcgtcggaagcgagaagaattataatggggaaggttatttagtttcgcgtcgtaacgttagtaagacgtagtttagcgcgtcgggcgttatgtcggcgataatggtttgtttttcgtcgaaacgtttggtggcggaattaatgaataaagtttgaattacggcgtgtaagaatttcgaataatcgtagcgatacggcgattatcgtcgcgttttaacgaaagcggttttcgtcggaaattatttaaaacgttggcggattttttgttaagaatttggtggtgaaaaagaacggtttaagttacggcgaaatagttttgtcgcgcgtaa

SEQ ID NO: 9642 - DNA, 909 bp, Artificial Sequence
  chemically treated genomic DNA (Homo sapiens) CpG-island No: 9642
ttacgcgcgacaaaactatttcgccgtaacttaaaccgttctttttcaccaccaaattcttaacaaaaaatccgccaacgttttaaataatttccgacgaaaaccgctttcgttaaaacgcgacgataatcgccgtatcgctacgattattcgaaattcttacacgccgtaattcaaactttattcattaattccgccaccaaacgtttcgacgaaaaacaaaccattatcgccgacataacgcccgacgcgctaaactacgtcttactaacgttacgacgcgaaactaaataaccttccccattataattcttctcgcttccgacgcatcgaaatcccgcgttacaaaccatactatccaaacaaataaataacgaccatcaaaaacaacttcaaaaatcgctcgcgattcttaccaacctaacttcgatcattaaaccgctaatcgtcacgacgatttataccgcttcgacgaacacataaacgaaattaccataaattataaacgccgccctatactttatctacctcacgacgtaacgtctcgatacatacaactaaaccacgtctacgtaaataaaaaccgacgtcacctcgctacgtaattcaccactccaaaaatcgaaaccaatcaattcttacgcaaatctataaatacgcaaaccaacccttaacaaaacatatccatcgcgtccgccatctccaacatccgcacgcgacgcatctcgatcaacgttaaatcctaaccacgaatacgcataatcgtactcctatcgttaaaaacccgactaaactaacgaaattaccttactaattaacaaaataaatcaccgatacgcgaacgaacgtaaaacactactactacaaaacgtctacgacctaaacaacaacataaataatcttcgattt

SEQ ID NO: 9643 - DNA, 909 bp, Artificial Sequence
  chemically treated genomic DNA (Homo sapiens) CpG-island No: 9643
ttgcgcgcggtaggattatttcgtcgtaatttagatcgtttttttttattattaaatttttggtaaagggttcgttagcgttttgggtaattttcggcgaggatcgttttcgttggagcgcgacgatgatcgtcgtgtcgttgcggttattcggaatttttgtacgtcgtggtttaagttttgtttattggtttcgttattaaacgtttcggcgagaagtaggttattatcgtcggtatggcgttcgacgcgttgggttacgttttgttggcgttgcgacgcgaggttggatggttttttttattatgatttttttcgttttcggcgtatcgggatttcgcgttgtaggttatgttgtttaggtaggtagatgacgattattagggatagttttaaggatcgttcgcggtttttattagtttaatttcgattattggatcgttgatcgttacggcgatttatgtcgtttcggcgagtatatggacggggttgttatgaattgtaggcgtcgttttatattttgtttgttttacggcgtagcgtttcggtgtatgtagttgggttacgtttacgtgaatgaaggtcggcgttatttcgttacgtgatttattattttaagaatcggagttaattaatttttgcgtagatttgtgaatgcgtaaattaatttttggtagaatatatttatcgcgttcgttatttttagtattcgtacgcggcgtatttcggttagcgttgggttttggttacgggtgcgtatgatcgtgtttttgtcgttgaggattcggttaggttggcggggttgttttattggttagtagaatgaattatcgatacgcgagcgaacgtgaagtattgttgttgtaaaacgtttgcgatttgagtaataatatgaatggttttcggttt

SEQ ID NO: 9644 - DNA, 909 bp, Artificial Sequence
  chemically treated genomic DNA (Homo sapiens) CpG-island No: 9644
aaaccgaaaaccattcatattattactcaaatcgcaaacgttttacaacaacaatacttcacgttcgctcgcgtatcgataattcattctactaaccaataaaacaaccccgccaacctaaccgaatcctcaacgacaaaaacacgatcatacgcacccgtaaccaaaacccaacgctaaccgaaatacgccgcgtacgaatactaaaaataacgaacgcgataaatatattctaccaaaaattaatttacgcattcacaaatctacgcaaaaattaattaactccgattcttaaaataataaatcacgtaacgaaataacgccgaccttcattcacgtaaacgtaacccaactacatacaccgaaacgctacgccgtaaaacaaacaaaatataaaacgacgcctacaattcataacaaccccgtccatatactcgccgaaacgacataaatcgccgtaacgatcaacgatccaataatcgaaattaaactaataaaaaccgcgaacgatccttaaaactatccctaataatcgtcatctacctacctaaacaacataacctacaacgcgaaatcccgatacgccgaaaacgaaaaaaatcataataaaaaaaaccatccaacctcgcgtcgcaacgccaacaaaacgtaacccaacgcgtcgaacgccataccgacgataataacctacttctcgccgaaacgtttaataacgaaaccaataaacaaaacttaaaccacgacgtacaaaaattccgaataaccgcaacgacacgacgatcatcgtcgcgctccaacgaaaacgatcctcgccgaaaattacccaaaacgctaacgaaccctttaccaaaaatttaataataaaaaaaaacgatctaaattacgacgaaataatcctaccgcgcgcaa

SEQ ID NO: 9645 - DNA, 1048 bp, Artificial Sequence
  chemically treated genomic DNA (Homo sapiens) CpG-island No: 9645
cgcgcgcgtcgtggcgtgtttttattttggttataacgtttcggtggtggatattaacgtgcgtcgcgtttatgttcgcgtcgaggagggtcgttttttcgcgtcgttttttataaaacgcgagttggtataggtggaagtattgttttcggaggagaatgggttacgttttttcgtcgcgtttatggagttcggtgtattggtgtgtatagttaagaatttcgattgcgtcgtttgttttattaaagtttcgtgcgcgtggtagttcgcgggttgttcggaatttagcgaagaggaggtagcgcgggtaaagaagcgcgtgtagaagtttatcggtacggatcgttaggtgcgcgggttgtttttcgacgtttttcgcggtttattttattagttttttaagtcgatttggatgttgtgtgttcggacgcgacgtagcgttcgcgggcgtagttttcgttaatcgaggatggtttaatggatattaacgagtagggtttgttttatttgtcgtattaggtacgtgcgagaaatcgatgaggtgatcgaaggtttaatcgcggttagttagtaggcgggcgaggatgagttcgtaataaatggtcgttacggttatcgaggtagtggcgaagttgtttaacgtttggtttatgttgttaatattaaggtgataagtcgtgcggaatatggaggttttcgggattatgatgacggacgtcggtatcgtcgtggtgatgcgcggtagatgcgcgcgtttggaggttatcgcgtttaagagttttacgatgagatcgtcggcgaacgcgtcgacgtagtttgtggtttcgatttcgataaggataaggcgaacgaggttggttatcgtttttatcgcggtcgttacgagtattattcggcgcgaggaattaaagaggaacgcgaattcggaaacgtttaagaagttggtcgtcgcggcggcgaggtattatatcggcgtatagtcggggatgttcggtttcggagttagtttcgtggtataagggtatcgagttcgaattcgtgattatgt

SEQ ID NO: 9646 - DNA, 1048 bp, Artificial Sequence
  chemically treated genomic DNA (Homo sapiens) CpG-island No: 9646
acataatcacgaattcgaactcgatacccttataccacgaaactaactccgaaaccgaacatccccgactatacgccgatataatacctcgccgccgcgacgaccaacttcttaaacgtttccgaattcgcgttcctctttaattcctcgcgccgaataatactcgtaacgaccgcgataaaaacgataaccaacctcgttcgccttatccttatcgaaatcgaaaccacaaactacgtcgacgcgttcgccgacgatctcatcgtaaaactcttaaacgcgataacctccaaacgcgcgcatctaccgcgcatcaccacgacgataccgacgtccgtcatcataatcccgaaaacctccatattccgcacgacttatcaccttaatattaacaacataaaccaaacgttaaacaacttcgccactacctcgataaccgtaacgaccatttattacgaactcatcctcgcccgcctactaactaaccgcgattaaaccttcgatcacctcatcgatttctcgcacgtacctaatacgacaaataaaacaaaccctactcgttaatatccattaaaccatcctcgattaacgaaaactacgcccgcgaacgctacgtcgcgtccgaacacacaacatccaaatcgacttaaaaaactaataaaataaaccgcgaaaaacgtcgaaaaacaacccgcgcacctaacgatccgtaccgataaacttctacacgcgcttctttacccgcgctacctcctcttcgctaaattccgaacaacccgcgaactaccacgcgcacgaaactttaataaaacaaacgacgcaatcgaaattcttaactatacacaccaatacaccgaactccataaacgcgacgaaaaaacgtaacccattctcctccgaaaacaatacttccacctataccaactcgcgttttataaaaaacgacgcgaaaaaacgaccctcctcgacgcgaacataaacgcgacgcacgttaatatccaccaccgaaacgttataaccaaaataaaaacacgccacgacgcgcgcg

SEQ ID NO: 9647 - DNA, 1048 bp, Artificial Sequence
  chemically treated genomic DNA (Homo sapiens) CpG-island No: 9647
atatgattacgaattcgagttcggtatttttgtattacggagttaatttcggaatcgggtattttcgattatgcgtcggtgtggtatttcgtcgtcgcggcggttagttttttgggcgttttcggattcgcgtttttttttaatttttcgcgtcggatggtgttcgtggcggtcgcggtgggaacggtggttaatttcgttcgttttatttttatcggggtcggggttataagttacgtcggcgcgttcgtcggcggttttatcgtggggtttttgggcgcggtggtttttaagcgcgcgtatttatcgcgtattattacgacggtgtcggcgttcgttattatgatttcgggaatttttatgtttcgtacggtttattattttaatgttggtaatatggattaggcgttgaataatttcgttattgtttcgatggtcgtggcggttatttgttgcgggtttattttcgttcgtttgttgattgatcgcgattggattttcggttattttatcgatttttcgtacgtgtttagtgcggtaggtgaaataggttttgttcgttgatgtttattaagttattttcgattagcgagggttgcgttcgcgagcgttgcgtcgcgttcgggtatatagtatttaggtcggtttgggaaattggtggggtgagtcgcggaagacgtcgagaaatagttcgcgtatttggcggttcgtgtcggtgaatttttgtacgcgtttttttgttcgcgttgtttttttttcgttgggtttcggatagttcgcgagttgttacgcgtacgaggttttgatggggtaggcggcgtagtcggggtttttggttgtgtatattagtgtatcgagttttatgagcgcggcggaaaaacgtggtttattttttttcggaagtagtgtttttatttgtgttagttcgcgttttgtgggaggcggcgcgaggaagcggtttttttcggcgcgggtatagacgcggcgtacgttggtatttattatcgggacgttgtagttaaaatggaagtacgttacggcgcgcgcg

SEQ ID NO: 9648 - DNA, 1048 bp, Artificial Sequence
  chemically treated genomic DNA (Homo sapiens) CpG-island No: 9648
cgcgcgcgccgtaacgtacttccattttaactacaacgtcccgataataaataccaacgtacgccgcgtctatacccgcgccgaaaaaaaccgcttcctcgcgccgcctcccacaaaacgcgaactaacacaaataaaaacactacttccgaaaaaaaataaaccacgtttttccgccgcgctcataaaactcgatacactaatatacacaaccaaaaaccccgactacgccgcctaccccatcaaaacctcgtacgcgtaacaactcgcgaactatccgaaacccaacgaaaaaaaaacaacgcgaacaaaaaaacgcgtacaaaaattcaccgacacgaaccgccaaatacgcgaactatttctcgacgtcttccgcgactcaccccaccaatttcccaaaccgacctaaatactatatacccgaacgcgacgcaacgctcgcgaacgcaaccctcgctaatcgaaaataacttaataaacatcaacgaacaaaacctatttcacctaccgcactaaacacgtacgaaaaatcgataaaataaccgaaaatccaatcgcgatcaatcaacaaacgaacgaaaataaacccgcaacaaataaccgccacgaccatcgaaacaataacgaaattattcaacgcctaatccatattaccaacattaaaataataaaccgtacgaaacataaaaattcccgaaatcataataacgaacgccgacaccgtcgtaataatacgcgataaatacgcgcgcttaaaaaccaccgcgcccaaaaaccccacgataaaaccgccgacgaacgcgccgacgtaacttataaccccgaccccgataaaaataaaacgaacgaaattaaccaccgttcccaccgcgaccgccacgaacaccatccgacgcgaaaaattaaaaaaaaacgcgaatccgaaaacgcccaaaaaactaaccgccgcgacgacgaaataccacaccgacgcataatcgaaaatacccgattccgaaattaactccgtaatacaaaaataccgaactcgaattcgtaatcatat

SEQ ID NO: 9649 - DNA, 1175 bp, Artificial Sequence
  chemically treated genomic DNA (Homo sapiens) CpG-island No: 9649
acgcgatttattcggagcgcgggggcgttcgggcgcgttcgtaggttttttcgttcgttcgtacgtatttcgggcgattcgtttttcgtcgcgttttcgtatttagtttcgtttcggcgattttttttttagtttcggcgcgtggaatttcgtttttttttgagttttcgagtttggcgagcggagggcggggcggggcggggtacgcgggaggcggagtcgagtcggggaattttgttttgggatagtattcggtttcgtagagtagcgcggtagtttaagggtttcggcgtcgggggcggcggggaattttaaacgtaatcgggtttggagggattttcgcgtcgagttagtcgtcgttatcgttttcgcgtcgtttttgcgggtttggtaggcgttcggcgcgttcgtattgcgttcggtcgtcggttttcgcggttttatcgtgagttcgtcggttcgtcgttcgttcgttatgtaatcgtcgtcggtttcgcgcgcgtaggcgttcgtcgtaggttatgttgtttttgttcgtcgcgtttttggtcgtcgtttgttcgttgtcgttcgttcgcggcggggtcgcggacgcgttcggttttttcggggtgttttttaatgttttagttaacgcgtttttcgcggaagagtttatcgtttcgcggttgttggtttcggcggttttcgggtttttcgagcgttcgggttcggaggaggcggcggcggcggcggcgtcgtgtaatattagcgtgtagcggtagatgttgagttcgttgttcgtgcgttggggtcgttcgcggggtttttagtgcgatttattgtttttttttattaacgcgtacggtcgcgtttttttcgtcgtcgttttttatcgcgtcgggtcgtcgttgtttatcgagtatttggggttggcggcgggcggcgcgtagtaggatttgcgtttttgcgtgggttgcggttgggtgcgcggtcgtcgtatcggtcgttttcggttcgtcgtcgtttttagcgtcgtcgtcgttatcgtcggggcgtttatcgcgttgttagtttatttcgcggtcgagtcgttcgggtcgttgtggttgtagggcgagtcgttgtatttttgttgtttagattttagtttggaggagttgtagggcgagtcgggttggcggttgaatcgtaag

SEQ ID NO: 9650 - DNA, 1175 bp, Artificial Sequence
  chemically treated genomic DNA (Homo sapiens) CpG-island No: 9650
cttacgattcaaccgccaacccgactcgccctacaactcctccaaactaaaatctaaacaacaaaaatacaacgactcgccctacaaccacaacgacccgaacgactcgaccgcgaaataaactaacaacgcgataaacgccccgacgataacgacgacgacgctaaaaacgacgacgaaccgaaaacgaccgatacgacgaccgcgcacccaaccgcaacccacgcaaaaacgcaaatcctactacgcgccgcccgccgccaaccccaaatactcgataaacaacgacgacccgacgcgataaaaaacgacgacgaaaaaaacgcgaccgtacgcgttaataaaaaaaaacaataaatcgcactaaaaaccccgcgaacgaccccaacgcacgaacaacgaactcaacatctaccgctacacgctaatattacacgacgccgccgccgccgccgcctcctccgaacccgaacgctcgaaaaacccgaaaaccgccgaaaccaacaaccgcgaaacgataaactcttccgcgaaaaacgcgttaactaaaacattaaaaaacaccccgaaaaaaccgaacgcgtccgcgaccccgccgcgaacgaacgacaacgaacaaacgacgaccaaaaacgcgacgaacaaaaacaacataacctacgacgaacgcctacgcgcgcgaaaccgacgacgattacataacgaacgaacgacgaaccgacgaactcacgataaaaccgcgaaaaccgacgaccgaacgcaatacgaacgcgccgaacgcctaccaaacccgcaaaaacgacgcgaaaacgataacgacgactaactcgacgcgaaaatccctccaaacccgattacgtttaaaattccccgccgcccccgacgccgaaacccttaaactaccgcgctactctacgaaaccgaatactatcccaaaacaaaattccccgactcgactccgcctcccgcgtaccccgccccgccccgccctccgctcgccaaactcgaaaactcaaaaaaaaacgaaattccacgcgccgaaactaaaaaaaaaatcgccgaaacgaaactaaatacgaaaacgcgacgaaaaacgaatcgcccgaaatacgtacgaacgaacgaaaaaacctacgaacgcgcccgaacgcccccgcgctccgaataaatcgcgt

SEQ ID NO: 9651 - DNA, 1175 bp, Artificial Sequence
  chemically treated genomic DNA (Homo sapiens) CpG-island No: 9651
tttacggtttagtcgttagttcggttcgttttgtagtttttttaggttgaagtttaggtagtagaaatgtagcggttcgttttgtagttatagcggttcgggcggttcggtcgcggggtaggttggtagcgcggtgggcgtttcggcggtggcggcggcggcgttgggggcggcggcgggtcggaggcggtcggtgcggcgatcgcgtatttagtcgtagtttacgtagaggcgtaggttttgttgcgcgtcgttcgtcgttagttttaggtgttcgatgagtagcggcggttcgacgcggtggaaggcggcggcgaagaaagcgcggtcgtgcgcgttggtggagaagagtagtaggtcgtattggaagtttcgcgggcggttttagcgtacgagtagcgagtttagtatttgtcgttgtacgttgatgttgtacggcgtcgtcgtcgtcgtcgtttttttcgggttcgggcgttcggggggttcgggggtcgtcgaggttagtagtcgcggggcgatgggttttttcgcggaggacgcgttgattgaagtattggagggtatttcgaggaggtcgggcgcgttcgcggtttcgtcgcggacgggcggtagcgggtaggcggcggttaggagcgcggcgagtaggggtagtatggtttgcggcgggcgtttacgcgcgcgaggtcggcggcggttgtatggcgagcgggcgacgggtcggcgagtttacggtgggatcgcgggagtcggcggtcgggcgtagtgcgggcgcgtcgggcgtttgttaagttcgtaggggcggcgcggaggcggtgacggcggttggttcggcgcggggatttttttagattcggttgcgtttggggtttttcgtcgttttcggcgtcggggtttttgggttgtcgcgttgttttgcggggtcgggtgttattttagagtaggatttttcggttcggtttcgtttttcgcgtgtttcgtttcgtttcgtttttcgttcgttaggttcggggatttaggggagggcggggttttacgcgtcggggttgggagaggaatcgtcggggcggggttgggtgcgggggcgcggcggagagcggatcgttcggggtgcgtgcgggcgggcggggaagtttgcggacgcgttcgggcgttttcgcgtttcgggtgaatcgcgt

SEQ ID NO: 9652 - DNA, 1175 bp, Artificial Sequence
  chemically treated genomic DNA (Homo sapiens) CpG-island No: 9652
acgcgattcacccgaaacgcgaaaacgcccgaacgcgtccgcaaacttccccgcccgcccgcacgcaccccgaacgatccgctctccgccgcgcccccgcacccaaccccgccccgacgattcctctcccaaccccgacgcgtaaaaccccgccctcccctaaatccccgaacctaacgaacgaaaaacgaaacgaaacgaaacacgcgaaaaacgaaaccgaaccgaaaaatcctactctaaaataacacccgaccccgcaaaacaacgcgacaacccaaaaaccccgacgccgaaaacgacgaaaaaccccaaacgcaaccgaatctaaaaaaatccccgcgccgaaccaaccgccgtcaccgcctccgcgccgcccctacgaacttaacaaacgcccgacgcgcccgcactacgcccgaccgccgactcccgcgatcccaccgtaaactcgccgacccgtcgcccgctcgccatacaaccgccgccgacctcgcgcgcgtaaacgcccgccgcaaaccatactacccctactcgccgcgctcctaaccgccgcctacccgctaccgcccgtccgcgacgaaaccgcgaacgcgcccgacctcctcgaaataccctccaatacttcaatcaacgcgtcctccgcgaaaaaacccatcgccccgcgactactaacctcgacgacccccgaaccccccgaacgcccgaacccgaaaaaaacgacgacgacgacgacgccgtacaacatcaacgtacaacgacaaatactaaactcgctactcgtacgctaaaaccgcccgcgaaacttccaatacgacctactactcttctccaccaacgcgcacgaccgcgctttcttcgccgccgccttccaccgcgtcgaaccgccgctactcatcgaacacctaaaactaacgacgaacgacgcgcaacaaaacctacgcctctacgtaaactacgactaaatacgcgatcgccgcaccgaccgcctccgacccgccgccgcccccaacgccgccgccgccaccgccgaaacgcccaccgcgctaccaacctaccccgcgaccgaaccgcccgaaccgctataactacaaaacgaaccgctacatttctactacctaaacttcaacctaaaaaaactacaaaacgaaccgaactaacgactaaaccgtaaa

SEQ ID NO: 9653 - DNA, 681 bp, Artificial Sequence
  chemically treated genomic DNA (Homo sapiens) CpG-island No: 9653
agttcgcgattttgttgcgtagggcggggttcgggtcggttcgttcgcgcgtaggtgagtgagttagggcggagcgtagttgcgtcgggtttgggcgtttggggtcgtcgttttttatcgtcgttttttttatcgaggtcgaggcgtttcggagttatggtcggtttgaattgcggggtttttatcgtattgttaggggttttgttgttgggtgcggcgcgtttgtcgcgcggggtaggtgagtgtcgggttttggaggcggatggcgtggagtggtgagttagttagttagcggacgttcggcggagatgcggtcgagggacgtagggtgcggagggtgcggagggtgcggagagagggcggggacggcgtagttaaaatgcgcgggtggtttcgggattttcggattgttcggtttttgcgcgcgtcgcgtcgggcgcgtgggttttgtttttttggagttaattttgttttcggtacgtgagagtgttttcgatcggggagtttttcggttcgggaggatgagttcggtgttggtcgagaaggcgggaaaaggagttttcggtagtcgattttaggcgatatgtttaaggtggcgcgtcgtgcgttttagggtttttgtcgggatttttgaaagtatttaggtagggtgtgggaagagattttttttttttaggttcg

SEQ ID NO: 9654 - DNA, 681 bp, Artificial Sequence
  chemically treated genomic DNA (Homo sapiens) CpG-island No: 9654
cgaacctaaaaaaaaaaaatctcttcccacaccctacctaaatactttcaaaaatcccgacaaaaaccctaaaacgcacgacgcgccaccttaaacatatcgcctaaaatcgactaccgaaaactccttttcccgccttctcgaccaacaccgaactcatcctcccgaaccgaaaaactccccgatcgaaaacactctcacgtaccgaaaacaaaattaactccaaaaaaacaaaacccacgcgcccgacgcgacgcgcgcaaaaaccgaacaatccgaaaatcccgaaaccacccgcgcattttaactacgccgtccccgccctctctccgcaccctccgcaccctccgcaccctacgtccctcgaccgcatctccgccgaacgtccgctaactaactaactcaccactccacgccatccgcctccaaaacccgacactcacctaccccgcgcgacaaacgcgccgcacccaacaacaaaacccctaacaatacgataaaaaccccgcaattcaaaccgaccataactccgaaacgcctcgacctcgataaaaaaaacgacgataaaaaacgacgaccccaaacgcccaaacccgacgcaactacgctccgccctaactcactcacctacgcgcgaacgaaccgacccgaaccccgccctacgcaacaaaatcgcgaact

SEQ ID NO: 9655 - DNA, 681 bp, Artificial Sequence
  chemically treated genomic DNA (Homo sapiens) CpG-island No: 9655
cgagtttggagaggaaagatttttttttatattttgtttgggtgtttttaagaatttcggtaaagattttggggcgtacggcgcgttattttggatatgtcgtttgggatcggttatcgggagttttttttttcgttttttcggttagtatcgggtttattttttcggatcgggaggtttttcgatcggggatatttttacgtgtcgagggtaaggttgattttaggagggtaaggtttacgcgttcgacgcggcgcgcgtaggaatcgaatagttcgggggtttcggagttattcgcgtattttgattacgtcgttttcgtttttttttcgtatttttcgtatttttcgtattttgcgtttttcggtcgtattttcgtcgggcgttcgttggttggttagtttattattttacgttattcgtttttaaagttcggtatttatttgtttcgcgcggtaggcgcgtcgtatttagtagtagaatttttagtagtgcgatagagatttcgtagtttaggtcggttatgatttcgggacgtttcggtttcggtggggaaaacgacggtggggagcggcggttttaggcgtttaagttcggcgtagttgcgtttcgttttggtttatttatttgcgcgcgggcggatcggttcgagtttcgttttgcgtagtaggatcgcgagtt

SEQ ID NO: 9656 - DNA, 681 bp, Artificial Sequence
  chemically treated genomic DNA (Homo sapiens) CpG-island No: 9656
aactcgcgatcctactacgcaaaacgaaactcgaaccgatccgcccgcgcgcaaataaataaaccaaaacgaaacgcaactacgccgaacttaaacgcctaaaaccgccgctccccaccgtcgttttccccaccgaaaccgaaacgtcccgaaatcataaccgacctaaactacgaaatctctatcgcactactaaaaattctactactaaatacgacgcgcctaccgcgcgaaacaaataaataccgaactttaaaaacgaataacgtaaaataataaactaaccaaccaacgaacgcccgacgaaaatacgaccgaaaaacgcaaaatacgaaaaatacgaaaaatacgaaaaaaaaacgaaaacgacgtaatcaaaatacgcgaataactccgaaacccccgaactattcgattcctacgcgcgccgcgtcgaacgcgtaaaccttaccctcctaaaatcaaccttaccctcgacacgtaaaaatatccccgatcgaaaaacctcccgatccgaaaaaataaacccgatactaaccgaaaaaacgaaaaaaaaaactcccgataaccgatcccaaacgacatatccaaaataacgcgccgtacgccccaaaatctttaccgaaattcttaaaaacacccaaacaaaatataaaaaaaaatctttcctctccaaactcg

SEQ ID NO: 9657 - DNA, 522 bp, Artificial Sequence
  chemically treated genomic DNA (Homo sapiens) CpG-island No: 9657
aagtttacgcgttgcgtatgcgtattattcgtagtgtgggcgaagggcggtgttggaaggacgttttttagaaggtttttttagcgtagttgttttttttttcgtttataggtcgcgtgacgtgattttatttattacgtttttcggttttaaatagtagtttgttagcgtttttttgcggtttaattgggtattacgaatatgtatttagggttagagcgagcgagtaagtagaatgtggcgagttcggttgtcgtcgtcgttattttagcgcgtcgatagcgagggaagggaggaggagggagacgcgtagggaggggaggggagggaggaggttagataaggcgggggaagggggagtagcggtggtttaagtcgcgcggagtagcgtaatttgggtcgttttttgtttcgtcgtcgttttcggatcgagttagcggagttagtgttttagagattttgtaatattataaagcggacgaaggagtttatgttggggaatttggtagcggagtgattggg

SEQ ID NO: 9658 - DNA, 522 bp, Artificial Sequence
  chemically treated genomic DNA (Homo sapiens) CpG-island No: 9658
cccaatcactccgctaccaaattccccaacataaactccttcgtccgctttataatattacaaaatctctaaaacactaactccgctaactcgatccgaaaacgacgacgaaacaaaaaacgacccaaattacgctactccgcgcgacttaaaccaccgctactcccccttcccccgccttatctaacctcctccctcccctcccctccctacgcgtctccctcctcctcccttccctcgctatcgacgcgctaaaataacgacgacgacaaccgaactcgccacattctacttactcgctcgctctaaccctaaatacatattcgtaatacccaattaaaccgcaaaaaaacgctaacaaactactatttaaaaccgaaaaacgtaataaataaaatcacgtcacgcgacctataaacgaaaaaaaaaacaactacgctaaaaaaaccttctaaaaaacgtccttccaacaccgcccttcgcccacactacgaataatacgcatacgcaacgcgtaaactt

SEQ ID NO: 9659 - DNA, 522 bp, Artificial Sequence
  chemically treated genomic DNA (Homo sapiens) CpG-island No: 9659
tttagttatttcgttgttaagttttttaatatggattttttcgttcgttttgtggtgttatagggtttttaggatattgatttcgttggttcggttcggaggcggcggcgaagtagggagcgatttaggttgcgttgtttcgcgcggtttaagttatcgttatttttttttttttcgttttgtttagttttttttttttttttttttttttgcgcgttttttttttttttttttttttcgttgtcggcgcgttaaggtgacgacggcggtagtcggattcgttatattttgtttattcgttcgttttggttttgagtgtatgttcgtagtatttagttgggtcgtaggggggcgttggtaaattgttgtttgagatcgagaagcgtggtgggtggagttacgttacgcggtttgtgagcgggaggaagggtagttgcgttggaggggttttttgggaaacgtttttttagtatcgtttttcgtttatattgcggatggtgcgtatgcgtagcgcgtggattt

SEQ ID NO: 9660 - DNA, 522 bp, Artificial Sequence
  chemically treated genomic DNA (Homo sapiens) CpG-island No: 9660
aaatccacgcgctacgcatacgcaccatccgcaatataaacgaaaaacgatactaaaaaaacgtttcccaaaaaacccctccaacgcaactacccttcctcccgctcacaaaccgcgtaacgtaactccacccaccacgcttctcgatctcaaacaacaatttaccaacgcccccctacgacccaactaaatactacgaacatacactcaaaaccaaaacgaacgaataaacaaaatataacgaatccgactaccgccgtcgtcaccttaacgcgccgacaacgaaaaaaaaaaaaaaaaaaaaaacgcgcaaaaaaaaaaaaaaaaaaaaaaaactaaacaaaacgaaaaaaaaaaaaataacgataacttaaaccgcgcgaaacaacgcaacctaaatcgctccctacttcgccgccgcctccgaaccgaaccaacgaaatcaatatcctaaaaaccctataacaccacaaaacgaacgaaaaaatccatattaaaaaacttaacaacgaaataactaaa

SEQ ID NO: 9661 - DNA, 541 bp, Artificial Sequence
  chemically treated genomic DNA (Homo sapiens) CpG-island No: 9661
ttgcgtcgttttgatattcgttgtcgggggtttcggtagaaatttattatgttttttcgggaatgtgtgggtatttttttaaaacgttaaagatcgcggagggtttttttacgttaattttaggttgcgttttgttttcgtttttttttttacgttttttagttcgtttaacgttttcgttttttttgggtgtttttttttttttcggtttttagagaataacgcgagatagaaagtggttttttagtattagcgaaatcgtgcgtatagatacggggtttagtcgggacgttttagatttttcggtcgcggtagacgggttgttcgcggttttcgaaagtttttcggataatataggcgtttaggcgtcgtttttgtttttttttagcgttttgttgcgttttgggcgtagtattggttcggtttttgtattcgtattgcggcggcggcggggtttgaggatttggggttaagttaaattttataaaatatattattattttcgtttagagagtttacgaaagaaaagagtttaaaggtt

SEQ ID NO: 9662 - DNA, 541 bp, Artificial Sequence
  chemically treated genomic DNA (Homo sapiens) CpG-island No: 9662
aacctttaaactcttttctttcgtaaactctctaaacgaaaataataatatattttataaaatttaacttaaccccaaatcctcaaaccccgccgccgccgcaatacgaatacaaaaaccgaaccaatactacgcccaaaacgcaacaaaacgctaaaaaaaaacaaaaacgacgcctaaacgcctatattatccgaaaaactttcgaaaaccgcgaacaacccgtctaccgcgaccgaaaaatctaaaacgtcccgactaaaccccgtatctatacgcacgatttcgctaatactaaaaaaccactttctatctcgcgttattctctaaaaaccgaaaaaaaaaaaaacacccaaaaaaaacgaaaacgttaaacgaactaaaaaacgtaaaaaaaaaaacgaaaacaaaacgcaacctaaaattaacgtaaaaaaaccctccgcgatctttaacgttttaaaaaaatacccacacattcccgaaaaaacataataaatttctaccgaaacccccgacaacgaatatcaaaacgacgcaa

SEQ ID NO: 9663 - DNA, 541 bp, Artificial Sequence
  chemically treated genomic DNA (Homo sapiens) CpG-island No: 9663
aatttttaagtttttttttttcgtaagttttttgggcgagggtggtggtatgttttgtgaggtttagtttagttttaaatttttaagtttcgtcgtcgtcgtagtgcgggtgtaggaatcgggttagtattgcgtttagggcgtagtagagcgttggggaggaataaaggcggcgtttaggcgtttgtgttattcgagagattttcgggggtcgcgggtagttcgtttgtcgcgatcgaggggtttggggcgtttcggttgggtttcgtgtttgtgcgtacggtttcgttgatgttgaggggttattttttgtttcgcgttgttttttggggatcgggagaggaggaggtatttaaaaagagcgggggcgttgggcgagttgggggacgtgggagggggaacgggaataaagcgtagtttagggttagcgtgggaagatttttcgcggtttttggcgttttggaaagatatttatatattttcgggaaaatatggtgagtttttgtcggagttttcggtagcgggtgttagggcggcgtag

SEQ ID NO: 9664 - DNA, 541 bp, Artificial Sequence
  chemically treated genomic DNA (Homo sapiens) CpG-island No: 9664
ctacgccgccctaacacccgctaccgaaaactccgacaaaaactcaccatattttcccgaaaatatataaatatctttccaaaacgccaaaaaccgcgaaaaatcttcccacgctaaccctaaactacgctttattcccgttccccctcccacgtcccccaactcgcccaacgcccccgctctttttaaatacctcctcctctcccgatccccaaaaaacaacgcgaaacaaaaaataacccctcaacatcaacgaaaccgtacgcacaaacacgaaacccaaccgaaacgccccaaacccctcgatcgcgacaaacgaactacccgcgacccccgaaaatctctcgaataacacaaacgcctaaacgccgcctttattcctccccaacgctctactacgccctaaacgcaatactaacccgattcctacacccgcactacgacgacgacgaaacttaaaaatttaaaactaaactaaacctcacaaaacataccaccaccctcgcccaaaaaacttacgaaaaaaaaaaacttaaaaatt

SEQ ID NO: 9665 - DNA, 712 bp, Artificial Sequence
  chemically treated genomic DNA (Homo sapiens) CpG-island No: 9665
tttgcgaacggtgattgtttatttttggtcgtaatgagttattattcgtcgggttttcgggtcggttttagttttattttatatcgtcgtattttcggtttatcgtttttattatttttcggggtttttttttattcgtttagttttcgtttttttagtagtcgtttgttgggtttcgcgttttcgagtttttcggtgcgtttgggtagttttcgtagttttcgagcgggagcgggcgtttttttgcgtttgttttcggagcgtttcgatttttttatggtcgaggtttttaattaggagtttttggttacgcgtagtaacgagaagtaggagttgtaggagtttaacgatcgtttcgttaattttatcgagaaggtacgttttttggagtagtagaacgcggttttgcgcggggagttgagttaagttcggggttaggagtcggcgcgcgtcgattagttgtgttagtaggagttgcgcgagttgcggcgagagttggagttgttgggtcgcgagcgtgatcgggtgtaggtggagcgcgacgggttggcggaggatttggcggcgtttaagtagaggttagggggtagggttgggtcgttgtcgtcgaggcgaggtcgaagcggtcgtcgaggcggttgttttttttttttttcgttttttttttttattagtagtttaagggtgtggttttttttattaatttaggtgt

SEQ ID NO: 9666 - DNA, 712 bp, Artificial Sequence
  chemically treated genomic DNA (Homo sapiens) CpG-island No: 9666
acacctaaattaataaaaaaaaccacacccttaaactactaataaaaaaaaaaaacgaaaaaaaaaaaaaacaaccgcctcgacgaccgcttcgacctcgcctcgacgacaacgacccaaccctaccccctaacctctacttaaacgccgccaaatcctccgccaacccgtcgcgctccacctacacccgatcacgctcgcgacccaacaactccaactctcgccgcaactcgcgcaactcctactaacacaactaatcgacgcgcgccgactcctaaccccgaacttaactcaactccccgcgcaaaaccgcgttctactactccaaaaaacgtaccttctcgataaaattaacgaaacgatcgttaaactcctacaactcctacttctcgttactacgcgtaaccaaaaactcctaattaaaaacctcgaccataaaaaaatcgaaacgctccgaaaacaaacgcaaaaaaacgcccgctcccgctcgaaaactacgaaaactacccaaacgcaccgaaaaactcgaaaacgcgaaacccaacaaacgactactaaaaaaacgaaaactaaacgaataaaaaaaaaccccgaaaaataataaaaacgataaaccgaaaatacgacgatataaaataaaactaaaaccgacccgaaaacccgacgaataataactcattacgaccaaaaataaacaatcaccgttcgcaaa

SEQ ID NO: 9667 - DNA, 712 bp, Artificial Sequence
  chemically treated genomic DNA (Homo sapiens) CpG-island No: 9667
atatttgggttggtaaggggagttatatttttgggttgttgatggagaggggaagcgaggggagggaagagtagtcgtttcgacggtcgtttcgatttcgtttcgacggtagcggtttagttttgttttttgatttttgtttgagcgtcgttaggtttttcgttagttcgtcgcgttttatttgtattcggttacgttcgcggtttaatagttttagttttcgtcgtagttcgcgtagtttttgttggtatagttggtcggcgcgcgtcggtttttggtttcgggtttggtttagtttttcgcgtagggtcgcgttttgttgttttagaaagcgtattttttcgatgaagttggcgaagcggtcgttgagtttttgtagtttttgtttttcgttgttgcgcgtggttaggaatttttggttgagggtttcggttatggagaagtcgaggcgtttcgagggtaggcgtaggagggcgttcgttttcgttcgggggttacggaagttgtttaggcgtatcgaggagttcggggacgcggagtttagtaggcggttgttggagaagcgggagttggacgagtaggagaaggtttcgggggatagtgagggcggtggatcgaaggtacggcggtatgaggtggagttgaagtcggttcggaggttcgacgggtggtggtttattgcggttaaggatgggtagttatcgttcgtaga

SEQ ID NO: 9668 - DNA, 712 bp, Artificial Sequence
  chemically treated genomic DNA (Homo sapiens) CpG-island No: 9668
tctacgaacgataactacccatccttaaccgcaataaaccaccacccgtcgaacctccgaaccgacttcaactccacctcataccgccgtaccttcgatccaccgccctcactatcccccgaaaccttctcctactcgtccaactcccgcttctccaacaaccgcctactaaactccgcgtccccgaactcctcgatacgcctaaacaacttccgtaacccccgaacgaaaacgaacgccctcctacgcctaccctcgaaacgcctcgacttctccataaccgaaaccctcaaccaaaaattcctaaccacgcgcaacaacgaaaaacaaaaactacaaaaactcaacgaccgcttcgccaacttcatcgaaaaaatacgctttctaaaacaacaaaacgcgaccctacgcgaaaaactaaaccaaacccgaaaccaaaaaccgacgcgcgccgaccaactataccaacaaaaactacgcgaactacgacgaaaactaaaactattaaaccgcgaacgtaaccgaatacaaataaaacgcgacgaactaacgaaaaacctaacgacgctcaaacaaaaatcaaaaaacaaaactaaaccgctaccgtcgaaacgaaatcgaaacgaccgtcgaaacgactactcttccctcccctcgcttcccctctccatcaacaacccaaaaatataactccccttaccaacccaaatat

SEQ ID NO: 9669 - DNA, 782 bp, Artificial Sequence
  chemically treated genomic DNA (Homo sapiens) CpG-island No: 9669
gggattgggggaagttaaagttttaagttttaagttcgtttgtttttttcgggggtgttcggtcgtggcgttaagtttggttacggttattttttttaatacgaattcgatgaatttggaatgatatggtttttcgttagttcgtttttattattgatttcggatgtgtttttttcgtatattttatgtttatcggaaagttgttaacgtatggttatcgtcgggtatgggcgttgtttcgtagataggtagaatttgatgggtatgtttgcgattaatgttaaacgtgtttatcggattatgcgttagaatgcgttgttgtttgagcgaaaatttgttgtatcgttatcgaaacgggtatatataggtagagtggtcgtgaaagaaagtaattagcgatggtgttttgacgggttcgagttttgttgtgataacggagagagattgcgtgttacgttcgcgttggattgttgtgatcgtgaggtattgtattgggcggttattatcggcggttttaatagtgaaatagtataggacgttatgttgggagcggtggaacgtcgtttcggtaacgatttttcgtcgtttttagtggagtggttgacggataatggtttatgttatcgggttaatgaaatacgttagttcgttcggatgttgggatttgaatcgaagaatacggcggtgcggagttcggagagtaacggaatagtagagagtttcgtgaaaacgataaagcgtgattatattagtattatgtttaaattagacgggttaacggt

SEQ ID NO: 9670 - DNA, 782 bp, Artificial Sequence
  chemically treated genomic DNA (Homo sapiens) CpG-island No: 9670
accgttaacccgtctaatttaaacataatactaatataatcacgctttatcgttttcacgaaactctctactattccgttactctccgaactccgcaccgccgtattcttcgattcaaatcccaacatccgaacgaactaacgtatttcattaacccgataacataaaccattatccgtcaaccactccactaaaaacgacgaaaaatcgttaccgaaacgacgttccaccgctcccaacataacgtcctatactatttcactattaaaaccgccgataataaccgcccaatacaatacctcacgatcacaacaatccaacgcgaacgtaacacgcaatctctctccgttatcacaacaaaactcgaacccgtcaaaacaccatcgctaattactttctttcacgaccactctacctatatatacccgtttcgataacgatacaacaaattttcgctcaaacaacaacgcattctaacgcataatccgataaacacgtttaacattaatcgcaaacatacccatcaaattctacctatctacgaaacaacgcccatacccgacgataaccatacgttaacaactttccgataaacataaaatatacgaaaaaaacacatccgaaatcaataataaaaacgaactaacgaaaaaccatatcattccaaattcatcgaattcgtattaaaaaaaataaccgtaaccaaacttaacgccacgaccgaacacccccgaaaaaaacaaacgaacttaaaacttaaaactttaacttcccccaatccc

SEQ ID NO: 9671 - DNA, 782 bp, Artificial Sequence
  chemically treated genomic DNA (Homo sapiens) CpG-island No: 9671
gtcgttaattcgtttggtttgggtatgatattgatgtagttacgttttatcgtttttacgaagttttttgttatttcgttatttttcggatttcgtatcgtcgtgtttttcggtttaagttttaatattcgggcgaattggcgtgttttattagttcggtagtatgaattattattcgttagttattttattggagacgacggaagatcgttgtcgaagcggcgttttatcgtttttagtatgacgttttgtattgttttattgttgaagtcgtcggtagtgatcgtttagtgtagtgttttacgattatagtagtttagcgcgaacgtgatacgtagttttttttcgttattatagtagaattcgaattcgttagagtattatcgttgattgtttttttttacggttattttgtttgtatgtgttcgtttcgatggcggtatagtaggttttcgtttaagtaatagcgtattttggcgtatgattcggtaaatacgtttggtattgatcgtaggtatatttattaagttttgtttgtttgcgaagtaacgtttatattcgacgataattatacgttggtagtttttcgataaatatggggtatacggagaaggtatattcggaattaatagtggggacgaattggcggggggttatattattttaagtttatcgggttcgtgttgggaaaagtgatcgtggttaaatttggcgttacggtcgaatattttcgggaggaataaacgggtttggaatttaaagttttaattttttttaatttt

SEQ ID NO: 9672 - DNA, 782 bp, Artificial Sequence
  chemically treated genomic DNA (Homo sapiens) CpG-island No: 9672
aaaattaaaaaaaattaaaactttaaattccaaacccgtttattcctcccgaaaatattcgaccgtaacgccaaatttaaccacgatcacttttcccaacacgaacccgataaacttaaaataatataaccccccgccaattcgtccccactattaattccgaatataccttctccgtataccccatatttatcgaaaaactaccaacgtataattatcgtcgaatataaacgttacttcgcaaacaaacaaaacttaataaatatacctacgatcaataccaaacgtatttaccgaatcatacgccaaaatacgctattacttaaacgaaaacctactataccgccatcgaaacgaacacatacaaacaaaataaccgtaaaaaaaaacaatcaacgataatactctaacgaattcgaattctactataataacgaaaaaaaactacgtatcacgttcgcgctaaactactataatcgtaaaacactacactaaacgatcactaccgacgacttcaacaataaaacaatacaaaacgtcatactaaaaacgataaaacgccgcttcgacaacgatcttccgtcgtctccaataaaataactaacgaataataattcatactaccgaactaataaaacacgccaattcgcccgaatattaaaacttaaaccgaaaaacacgacgatacgaaatccgaaaaataacgaaataacaaaaaacttcgtaaaaacgataaaacgtaactacatcaatatcatacccaaaccaaacgaattaacgac

SEQ ID NO: 9673 - DNA, 1026 bp, Artificial Sequence
  chemically treated genomic DNA (Homo sapiens) CpG-island No: 9673
tgtcgtcggtttttatttaggtcgaggtggttcggttttatgtatcgcgacgtaacgcggggaggtagataaggtatagggcggcgtttataatttatgttaattcgttttatgtgttcgtcgaggcggtataaatcgtcgtgacgattagcggtttaatgatcgaagttaggttggtaagagtcgcgagcgatttttgaagttgtttttgatggtcgttatttatttgtttggatagtatggtttgtaacgcgggtatttcgatgtcgtcggaagcgagaagaattataatggggaaggttatttagtttcgcgtcgcgaacgttagtaagacgtagtttagcgcgtcggtcgttatgtcggcgataatggtttgtttttcgtcgaaacgtttggtggcgggattagtgacgaaggtttgagcgagggcgtgtaagatttcgaatatcgtaagcgataggtcgattatcgtcgcgttttagcgaaagcggttttcgtcgaaaatgatttagagcgttgtcggtatttgttttacgagttgtatgataaagaagatagttataagtgcggcgacgatagttatgtttcgcgtttatcggaaggagttgattgggttgaaggtttttaagggtatcggtcgacgtttttttttatgcgatttttgtattaggaagtagtttagtagtaggttgaggtcgttgagtatcgtcgtcgtaaggaatggtgtatgtaaggagatggcgtttaatagtttttcggttacggggtttgttattatatttacgtcgaaataagcgtttatgagttcgaagtggcgagttcgattttttttatcggtgatgtcggcgatataggcgttagtaatcgtatttgtggcgtcggtgatgtcggttacgatgcgttcggcgtagaggattttggtagttatagtatgcgtatatttatgtttcgattatgcgtttataaagtaggtgaatgcgtaatgtagtatttatatcgttatcgttttttattgttttcgcgaat

SEQ ID NO: 9674 - DNA, 1026 bp, Artificial Sequence
  chemically treated genomic DNA (Homo sapiens) CpG-island No: 9674
attcgcgaaaacaataaaaaacgataacgatataaatactacattacgcattcacctactttataaacgcataatcgaaacataaatatacgcatactataactaccaaaatcctctacgccgaacgcatcgtaaccgacatcaccgacgccacaaatacgattactaacgcctatatcgccgacatcaccgataaaaaaaatcgaactcgccacttcgaactcataaacgcttatttcgacgtaaatataataacaaaccccgtaaccgaaaaactattaaacgccatctccttacatacaccattccttacgacgacgatactcaacgacctcaacctactactaaactacttcctaatacaaaaatcgcataaaaaaaaacgtcgaccgatacccttaaaaaccttcaacccaatcaactccttccgataaacgcgaaacataactatcgtcgccgcacttataactatcttctttatcatacaactcgtaaaacaaataccgacaacgctctaaatcattttcgacgaaaaccgctttcgctaaaacgcgacgataatcgacctatcgcttacgatattcgaaatcttacacgccctcgctcaaaccttcgtcactaatcccgccaccaaacgtttcgacgaaaaacaaaccattatcgccgacataacgaccgacgcgctaaactacgtcttactaacgttcgcgacgcgaaactaaataaccttccccattataattcttctcgcttccgacgacatcgaaatacccgcgttacaaaccatactatccaaacaaataaataacgaccatcaaaaacaacttcaaaaatcgctcgcgactcttaccaacctaacttcgatcattaaaccgctaatcgtcacgacgatttataccgcctcgacgaacacataaaacgaattaacataaattataaacgccgccctataccttatctacctccccgcgttacgtcgcgatacataaaaccgaaccacctcgacctaaataaaaaccgacgaca

SEQ ID NO: 9675 - DNA, 1026 bp, Artificial Sequence
  chemically treated genomic DNA (Homo sapiens) CpG-island No: 9675
attcgcgagagtagtggaaagcgatgacgatgtgggtattatattgcgtatttatttattttgtgagcgtatggtcgaagtatggatatgcgtatgttgtgattgttaagattttttacgtcggacgtatcgtggtcggtattatcggcgttataggtgcggttgttggcgtttatatcgtcgatattatcgatggggaagatcgggttcgttatttcgggtttatgagcgtttgtttcggcgtgggtatggtggtaggtttcgtggtcgggggattgttgggcgttatttttttgtatgtattattttttgcggcggcggtgtttaacggttttaatttattattgggttgttttttaatgtaggagtcgtataagggagagcgtcgatcgatgtttttgagagtttttaatttagttagtttttttcggtgggcgcggggtatgattatcgtcgtcgtatttatgattgttttttttattatgtaattcgtaggataggtgtcggtagcgttttgggttattttcggcgaggatcgttttcgttggagcgcgacgatgatcggtttgtcgtttgcggtattcggaattttgtacgttttcgtttaagttttcgttattggtttcgttattaaacgtttcggcgagaagtaggttattatcgtcggtatggcggtcgacgcgttgggttacgttttgttggcgttcgcgacgcgaggttggatggttttttttattatgatttttttcgttttcggcggtatcgggatgttcgcgttgtaggttatgttgtttaggtaggtagatgacgattattagggatagttttaaggatcgttcgcggtttttattagtttaatttcgattattggatcgttgatcgttacggcgatttatgtcgtttcggcgagtatatggaacgggttggtatggattgtaggcgtcgttttatattttgtttgttttttcgcgttgcgtcgcggtgtatggagtcgggttatttcgatttgaatggaagtcggcggta

SEQ ID NO: 9676 - DNA, 1026 bp, Artificial Sequence
  chemically treated genomic DNA (Homo sapiens) CpG-island No: 9676
taccgccgacttccattcaaatcgaaataacccgactccatacaccgcgacgcaacgcgaaaaaacaaacaaaatataaaacgacgcctacaatccataccaacccgttccatatactcgccgaaacgacataaatcgccgtaacgatcaacgatccaataatcgaaattaaactaataaaaaccgcgaacgatccttaaaactatccctaataatcgtcatctacctacctaaacaacataacctacaacgcgaacatcccgataccgccgaaaacgaaaaaaatcataataaaaaaaaccatccaacctcgcgtcgcgaacgccaacaaaacgtaacccaacgcgtcgaccgccataccgacgataataacctacttctcgccgaaacgtttaataacgaaaccaataacgaaaacttaaacgaaaacgtacaaaattccgaataccgcaaacgacaaaccgatcatcgtcgcgctccaacgaaaacgatcctcgccgaaaataacccaaaacgctaccgacacctatcctacgaattacataataaaaaaaacaatcataaatacgacgacgataatcataccccgcgcccaccgaaaaaaactaactaaattaaaaactctcaaaaacatcgatcgacgctctcccttatacgactcctacattaaaaaacaacccaataataaattaaaaccgttaaacaccgccgccgcaaaaaataatacatacaaaaaaataacgcccaacaatcccccgaccacgaaacctaccaccatacccacgccgaaacaaacgctcataaacccgaaataacgaacccgatcttccccatcgataatatcgacgatataaacgccaacaaccgcacctataacgccgataataccgaccacgatacgtccgacgtaaaaaatcttaacaatcacaacatacgcatatccatacttcgaccatacgctcacaaaataaataaatacgcaatataatacccacatcgtcatcgctttccactactctcgcgaat

SEQ ID NO: 9677 - DNA, 769 bp, Artificial Sequence
  chemically treated genomic DNA (Homo sapiens) CpG-island No: 9677
ttgatcgttatttacggtcgtgatcgtgattttggtcggtcgttgtggttggggtcggttaagtcgaatatcggttatacgtaagcggcggcgggtgtggttggtgtgattaagatggtgatggcgatgcggtacgggtagttgttacgtacgttgtacgtggaatcgtcgtcgtcggaggtggattggtcggcggggacggtttaattttttacggagaatacgttttggtttaggagtggtcgtgttcgtcgggtgggggtgtcgtcgttcgggattagtggtattaacgcgtacgttattttcgaatagttttcgggagtgtcgagttagtttgcggggtcgggttcgggttttgtcgtggatgtttcggtggtgtcgtggatggtgtcgggtaaaatattcgaagcgttattcgcgtaggtaacggcgttgatgatttatttggacgagcgatttgatgttttttcgttggatgttgggtattcgttggcgttgatacggtcggcgttggatgatcgagcggtggtgttggggtcggacgtgaaacgttgttgtgcggtgtgaaagcgttgtttgtcgggttattgaggtttttggggtttggtgatcggatttgttgggggttttggggtcgtattcgggttttgtgtttttcggtttaagggtggttagttggttggtggatggtgtcgggggttttatcgggttttttattggtgttcgttgtttttttttgacgaattttgttgttgatttggatgtatat

SEQ ID NO: 9678 - DNA, 769 bp, Artificial Sequence
  chemically treated genomic DNA (Homo sapiens) CpG-island No: 9678
atatacatccaaatcaacaacaaaattcgtcaaaaaaaaacaacgaacaccaataaaaaacccgataaaacccccgacaccatccaccaaccaactaaccacccttaaaccgaaaaacacaaaacccgaatacgaccccaaaacccccaacaaatccgatcaccaaaccccaaaaacctcaataacccgacaaacaacgctttcacaccgcacaacaacgtttcacgtccgaccccaacaccaccgctcgatcatccaacgccgaccgtatcaacgccaacgaatacccaacatccaacgaaaaaacatcaaatcgctcgtccaaataaatcatcaacgccgttacctacgcgaataacgcttcgaatattttacccgacaccatccacgacaccaccgaaacatccacgacaaaacccgaacccgaccccgcaaactaactcgacactcccgaaaactattcgaaaataacgtacgcgttaataccactaatcccgaacgacgacacccccacccgacgaacacgaccactcctaaaccaaaacgtattctccgtaaaaaattaaaccgtccccgccgaccaatccacctccgacgacgacgattccacgtacaacgtacgtaacaactacccgtaccgcatcgccatcaccatcttaatcacaccaaccacacccgccgccgcttacgtataaccgatattcgacttaaccgaccccaaccacaacgaccgaccaaaatcacgatcacgaccgtaaataacgatcaa

SEQ ID NO: 9679 - DNA, 769 bp, Artificial Sequence
  chemically treated genomic DNA (Homo sapiens) CpG-island No: 9679
atgtgtatttagattagtaataagattcgttaaaaggaagtagcgaatattagtaaaagattcggtaaagttttcggtattatttattagttaattgattatttttgaatcggaaaatataaaattcgaatgcggttttaaagtttttaatagattcggttattaaattttagaagttttaatgattcggtagatagcgtttttatatcgtataataacgttttacgttcgattttagtattatcgttcgattatttagcgtcgatcgtgttaacgttagcgagtatttaatatttagcgaggagatattaggtcgttcgtttagataggttattaacgtcgttgtttgcgcggatagcgtttcgggtgttttgttcgatattatttacggtattatcggaatatttacgatagaattcgaattcggtttcgtagattgattcggtattttcgggggttgttcgaggatgacgtgcgcgttagtattattgatttcgaacgacgatatttttattcgacgaatacgattatttttgggttagggcgtgtttttcgtaaggagttgaatcgttttcgtcgattaatttattttcggcgacggcgattttacgtgtaacgtgcgtggtagttgttcgtgtcgtatcgttattattattttgattatattagttatattcgtcgtcgtttgcgtatgatcgatgttcgatttgatcgattttaattataacggtcggttaggattacgattacggtcgtaggtggcgattag

SEQ ID NO: 9680 - DNA, 769 bp, Artificial Sequence
  chemically treated genomic DNA (Homo sapiens) CpG-island No: 9680
ctaatcgccacctacgaccgtaatcgtaatcctaaccgaccgttataattaaaatcgatcaaatcgaacatcgatcatacgcaaacgacgacgaatataactaatataatcaaaataataataacgatacgacacgaacaactaccacgcacgttacacgtaaaatcgccgtcgccgaaaataaattaatcgacgaaaacgattcaactccttacgaaaaacacgccctaacccaaaaataatcgtattcgtcgaataaaaatatcgtcgttcgaaatcaataatactaacgcgcacgtcatcctcgaacaacccccgaaaataccgaatcaatctacgaaaccgaattcgaattctatcgtaaatattccgataataccgtaaataatatcgaacaaaacacccgaaacgctatccgcgcaaacaacgacgttaataacctatctaaacgaacgacctaatatctcctcgctaaatattaaatactcgctaacgttaacacgatcgacgctaaataatcgaacgataatactaaaatcgaacgtaaaacgttattatacgatataaaaacgctatctaccgaatcattaaaacttctaaaatttaataaccgaatctattaaaaactttaaaaccgcattcgaattttatattttccgattcaaaaataatcaattaactaataaataataccgaaaactttaccgaatcttttactaatattcgctacttccttttaacgaatcttattactaatctaaatacacat

SEQ ID NO: 9681 - DNA, 540 bp, Artificial Sequence
  chemically treated genomic DNA (Homo sapiens) CpG-island No: 9681
tacgaagtttttcgggagttgtatttttaagggtaggggcggggcgagtttcgagggggcgtgttttgagggcgtggtcgagatcggggcggggcgagtcggggcgggttcggacgggaagagtaggggttcggacgttgtagtaggcggggtattcggattggcggtttcgttggcgtaaggtcggttcggcggttagggatttggaaggttgcgaggttttgcgaggtcgaggttcggagtttgttggttttaggttcggttcgaggtaagaaagagtcgttttttcgtacggtcggaggattcgggcgtttcgagttcgattttttagttttcgttcggacgggaaacggagtacggagatgtttttgaggttttttttttgggaagcgtagtttcgatttttcgtttttgttttttagtaggtcggcgattattcgagcgttgggtatcggtttacgcgtatagaaggcgtttaataaatgtttattagtgaattagtaaaataaatcggtagtaaagagagacgagacgtatgtt

SEQ ID NO: 9682 - DNA, 540 bp, Artificial Sequence
  chemically treated genomic DNA (Homo sapiens) CpG-island No: 9682
aacatacgtctcgtctctctttactaccgatttattttactaattcactaataaacatttattaaacgccttctatacgcgtaaaccgatacccaacgctcgaataatcgccgacctactaaaaaacaaaaacgaaaaatcgaaactacgcttcccaaaaaaaaaacctcaaaaacatctccgtactccgtttcccgtccgaacgaaaactaaaaaatcgaactcgaaacgcccgaatcctccgaccgtacgaaaaaacgactctttcttacctcgaaccgaacctaaaaccaacaaactccgaacctcgacctcgcaaaacctcgcaaccttccaaatccctaaccgccgaaccgaccttacgccaacgaaaccgccaatccgaataccccgcctactacaacgtccgaacccctactcttcccgtccgaacccgccccgactcgccccgccccgatctcgaccacgccctcaaaacacgccccctcgaaactcgccccgcccctacccttaaaaatacaactcccgaaaaacttcgta

SEQ ID NO: 9683 - DNA, 540 bp, Artificial Sequence
  chemically treated genomic DNA (Homo sapiens) CpG-island No: 9683
agtatgcgtttcgtttttttttgttgtcgatttattttattgatttattagtgagtatttattgagcgttttttgtacgcgtgggtcgatgtttagcgttcggatggtcgtcgatttgttaagggataggggcgggaaatcggggttgcgttttttaggaaagagattttaggaatattttcgtgtttcgtttttcgttcggacggaggttgagaagtcgaattcggggcgttcgggtttttcggtcgtgcggggaggcggtttttttttatttcgggtcgggtttgggattagtaaatttcgaatttcgatttcgtagggtttcgtagttttttaggtttttggtcgtcggatcgattttgcgttagcgaagtcgttagttcgggtgtttcgtttgttgtagcgttcgggtttttatttttttcgttcgggttcgtttcggttcgtttcgtttcggtttcggttacgtttttaggatacgttttttcggggttcgtttcgtttttgtttttaaaggtatagttttcggggagtttcgta

SEQ ID NO: 9684 - DNA, 540 bp, Artificial Sequence
  chemically treated genomic DNA (Homo sapiens) CpG-island No: 9684
tacgaaactccccgaaaactatacctttaaaaacaaaaacgaaacgaaccccgaaaaaacgtatcctaaaaacgtaaccgaaaccgaaacgaaacgaaccgaaacgaacccgaacgaaaaaaataaaaacccgaacgctacaacaaacgaaacacccgaactaacgacttcgctaacgcaaaatcgatccgacgaccaaaaacctaaaaaactacgaaaccctacgaaatcgaaattcgaaatttactaatcccaaacccgacccgaaataaaaaaaaaccgcctccccgcacgaccgaaaaacccgaacgccccgaattcgacttctcaacctccgtccgaacgaaaaacgaaacacgaaaatattcctaaaatctctttcctaaaaaacgcaaccccgatttcccgcccctatcccttaacaaatcgacgaccatccgaacgctaaacatcgacccacgcgtacaaaaaacgctcaataaatactcactaataaatcaataaaataaatcgacaacaaaaaaaaacgaaacgcatact

SEQ ID NO: 9685 - DNA, 730 bp, Artificial Sequence
  chemically treated genomic DNA (Homo sapiens) CpG-island No: 9685
gcgattcgttttttgtgcggcgcggcgtaggttacggcggcggcggcggcggcggttaggagtgttttgttttcgttgggtcggaagggatcgggaaattttaagtcgggcgtttttttttcgggcgttttcgggttcgttagtcgtagttatcgcgggtttttcgtcgtttcgggtttcggggtcggtcgttcggtttggatttttgttggcgtcggggcggcggttgcggttggtcgagtttcggggtcggggaagaaagagcgtcgcgagtcgggggtcgtcgggatttgttcgcgatacggtcggggtcgtcgcgggtttgggcgttttttatttttttgtaggtgtcgtcgtagtttggcggtcggagttgggggagggggtagggaggtttggtgttcggttataggcggtgatttacggattttgttcgttcgaggttggtatttcgcgggggtagagttgcgttcgtttggggtaatttcgagtttaggagaattttaagagcggcgttttggtttcggttttcgcgtttttttcgaagaaaggagagttagggacggagggaggtcgggaggttgaatttcgggttcgtcgtcgaatcgtcggtttttcgatattatttggatttcggcggggatagtcgtttggaaggggaggaaggttagggacgtggaagagatggggttttaaaggcgtcgggacggagttggttttttagaggcgt

SEQ ID NO: 9686 - DNA, 730 bp, Artificial Sequence
  chemically treated genomic DNA (Homo sapiens) CpG-island No: 9686
acgcctctaaaaaaccaactccgtcccgacgcctttaaaaccccatctcttccacgtccctaaccttcctccccttccaaacgactatccccgccgaaatccaaataatatcgaaaaaccgacgattcgacgacgaacccgaaattcaacctcccgacctccctccgtccctaactctcctttcttcgaaaaaaacgcgaaaaccgaaaccaaaacgccgctcttaaaattctcctaaactcgaaattaccccaaacgaacgcaactctacccccgcgaaataccaacctcgaacgaacaaaatccgtaaatcaccgcctataaccgaacaccaaacctccctaccccctcccccaactccgaccgccaaactacgacgacacctacaaaaaaataaaaaacgcccaaacccgcgacgaccccgaccgtatcgcgaacaaatcccgacgacccccgactcgcgacgctctttcttccccgaccccgaaactcgaccaaccgcaaccgccgccccgacgccaacaaaaatccaaaccgaacgaccgaccccgaaacccgaaacgacgaaaaacccgcgataactacgactaacgaacccgaaaacgcccgaaaaaaaaacgcccgacttaaaatttcccgatcccttccgacccaacgaaaacaaaacactcctaaccgccgccgccgccgccgccgtaacctacgccgcgccgcacaaaaaacgaatcgc

SEQ ID NO: 9687 - DNA, 730 bp, Artificial Sequence
  chemically treated genomic DNA (Homo sapiens) CpG-island No: 9687
gcgtttttggggagttagtttcgtttcggcgtttttagagttttattttttttacgtttttggtttttttttttttttaggcggttgttttcgtcggggtttagatggtgtcggagggtcggcggttcgacggcgggttcggggtttagtttttcggttttttttcgtttttgattttttttttttcggagagggcgcgggggtcggggttaaagcgtcgtttttggggtttttttggattcggagttgttttaggcgggcgtagttttgttttcgcggggtgttagtttcgggcgggtaaggttcgtgagttatcgtttgtaatcgaatattaggtttttttgtttttttttttagtttcggtcgttaggttgcggcgatatttataagaaaatgaagggcgtttaggttcgcggcggtttcggtcgtatcgcgagtaggtttcggcggttttcggttcgcggcgttttttttttttcggtttcggggttcggttagtcgtaatcgtcgtttcggcgttagtaggaatttaggtcgagcgatcggtttcggagttcgaggcggcggagggttcgcggtagttgcgattggcgagttcgagagcgttcggggagggggcgttcggtttggaatttttcggtttttttcggtttagcgaggataaagtatttttggtcgtcgtcgtcgtcgtcgtcgtggtttacgtcgcgtcgtataaagggcgagtcgt

SEQ ID NO: 9688 - DNA, 730 bp, Artificial Sequence
  chemically treated genomic DNA (Homo sapiens) CpG-island No: 9688
acgactcgccctttatacgacgcgacgtaaaccacgacgacgacgacgacgacgaccaaaaatactttatcctcgctaaaccgaaaaaaaccgaaaaattccaaaccgaacgccccctccccgaacgctctcgaactcgccaatcgcaactaccgcgaaccctccgccgcctcgaactccgaaaccgatcgctcgacctaaattcctactaacgccgaaacgacgattacgactaaccgaaccccgaaaccgaaaaaaaaaaaacgccgcgaaccgaaaaccgccgaaacctactcgcgatacgaccgaaaccgccgcgaacctaaacgcccttcattttcttataaatatcgccgcaacctaacgaccgaaactaaaaaaaaaaacaaaaaaacctaatattcgattacaaacgataactcacgaaccttacccgcccgaaactaacaccccgcgaaaacaaaactacgcccgcctaaaacaactccgaatccaaaaaaaccccaaaaacgacgctttaaccccgacccccgcgccctctccgaaaaaaaaaaaatcaaaaacgaaaaaaaaccgaaaaactaaaccccgaacccgccgtcgaaccgccgaccctccgacaccatctaaaccccgacgaaaacaaccgcctaaaaaaaaaaaaaaaccaaaaacgtaaaaaaaataaaactctaaaaacgccgaaacgaaactaactccccaaaaacgc

SEQ ID NO: 9689 - DNA, 674 bp, Artificial Sequence
  chemically treated genomic DNA (Homo sapiens) CpG-island No: 9689
ttagtttcgggagcgtattttttttcggttttcgttttttagtatagtcgcgtagttgggttacgggatgcggcgtaatttgttcgtattttttagtcgaatttatttcgtttcgtttcgtttcgggcgcgggtttcggagttcgggtatttgcggggcgtttttttttcgcgggtagttcggttttgttgcgtttgtagaagtttaatttttgcgagggttttttttagatcgggtttttcgggtttcgtttagaagcgaggagcgatcgggttgcgggcgttacgggcgtcgcggttcgtaggtcgcgcgtcgtttcgtttcgttttcggtttcgcgaagattttgcgaggggtatttacggggttcggttttttcgtcgtcggcgcgttttttcgggggtttatggtgttttcggattcgtgagttcggtcgtagcgttgtatagtatcgtttagaaaatggacgtcggcggttcggttttgtcggttcggttcgttttcggcgcggggtagaggacgtagttcgttcgggaggaggtcggttcgattcgtagtttcgcgggttcggggttggggtaattgcggcgttaaggattaggttttaggagggcggcggcgggattcgtgagggtttcgtaaggttttatgttcgatttagtggttagtcggggt

SEQ ID NO: 9690 - DNA, 674 bp, Artificial Sequence
  chemically treated genomic DNA (Homo sapiens) CpG-island No: 9690
accccgactaaccactaaatcgaacataaaaccttacgaaaccctcacgaatcccgccgccgccctcctaaaacctaatccttaacgccgcaattaccccaaccccgaacccgcgaaactacgaatcgaaccgacctcctcccgaacgaactacgtcctctaccccgcgccgaaaacgaaccgaaccgacaaaaccgaaccgccgacgtccattttctaaacgatactatacaacgctacgaccgaactcacgaatccgaaaacaccataaacccccgaaaaaacgcgccgacgacgaaaaaaccgaaccccgtaaatacccctcgcaaaatcttcgcgaaaccgaaaacgaaacgaaacgacgcgcgacctacgaaccgcgacgcccgtaacgcccgcaacccgatcgctcctcgcttctaaacgaaacccgaaaaacccgatctaaaaaaaaccctcgcaaaaattaaacttctacaaacgcaacaaaaccgaactacccgcgaaaaaaaaacgccccgcaaatacccgaactccgaaacccgcgcccgaaacgaaacgaaacgaaataaattcgactaaaaaatacgaacaaattacgccgcatcccgtaacccaactacgcgactatactaaaaaacgaaaaccgaaaaaaaatacgctcccgaaactaa

SEQ ID NO: 9691 - DNA, 674 bp, Artificial Sequence
  chemically treated genomic DNA (Homo sapiens) CpG-island No: 9691
gtttcggttggttattgggtcgggtatggggttttacggggtttttacgggtttcgtcgtcgtttttttgaggtttggtttttggcgtcgtagttattttagtttcgggttcgcggggttgcgggtcgggtcgattttttttcggacgggttgcgttttttgtttcgcgtcgggggcgggtcgggtcggtagagtcgagtcgtcggcgtttattttttgggcggtgttgtgtagcgttgcggtcggatttacgggttcggaagtattatggattttcggggaaacgcgtcggcggcgaaggagtcgagtttcgtaagtgtttttcgtagggttttcgcggggtcgggggcggggcggggcgacgcgcggtttgcgggtcgcggcgttcgtggcgttcgtagttcgatcgtttttcgtttttggacggagttcggaaagttcggtttgagagaaattttcgtaagggttgagtttttgtaaacgtagtagaatcgagttgttcgcggggaggaagcgtttcgtaggtgttcggatttcggggttcgcgttcggagcggggcggggcggggtgggttcggttggagagtgcgggtaggttgcgtcgtatttcgtggtttaattgcgcggttgtgttagagggcgggggtcgaggaggaatgcgttttcggggttgg

SEQ ID NO: 9692 - DNA, 674 bp, Artificial Sequence
  chemically treated genomic DNA (Homo sapiens) CpG-island No: 9692
ccaaccccgaaaacgcattcctcctcgacccccgccctctaacacaaccgcgcaattaaaccacgaaatacgacgcaacctacccgcactctccaaccgaacccaccccgccccgccccgctccgaacgcgaaccccgaaatccgaacacctacgaaacgcttcctccccgcgaacaactcgattctactacgtttacaaaaactcaacccttacgaaaatttctctcaaaccgaactttccgaactccgtccaaaaacgaaaaacgatcgaactacgaacgccacgaacgccgcgacccgcaaaccgcgcgtcgccccgccccgcccccgaccccgcgaaaaccctacgaaaaacacttacgaaactcgactccttcgccgccgacgcgtttccccgaaaatccataatacttccgaacccgtaaatccgaccgcaacgctacacaacaccgcccaaaaaataaacgccgacgactcgactctaccgacccgacccgcccccgacgcgaaacaaaaaacgcaacccgtccgaaaaaaaatcgacccgacccgcaaccccgcgaacccgaaactaaaataactacgacgccaaaaaccaaacctcaaaaaaacgacgacgaaacccgtaaaaaccccgtaaaaccccatacccgacccaataaccaaccgaaac

SEQ ID NO: 9693 - DNA, 753 bp, Artificial Sequence
  chemically treated genomic DNA (Homo sapiens) CpG-island No: 9693
gttcggttcgggggtggcgaaggcggtgaatggagattcggggggggcgggggcggggtcgcggcgggcggggcggggcggggcgagtcgggtcgaggttcgggggcggggttaggcgcgcggttggtttgggtttaggtcgttgttgggtttcgtttcgttcggttacgtaggcggtagggttgcggtacgggtcgggcggtattatggcggcggcggcgtttgttgttgcggcggtttttttcgaggcgttagcggcgagtgcgattgtagagttcgaggtcggggattaggatagtcgcgaggttcgagtgttgtagagtttgcggggtaagatttgtaagcgggggttgggttgaggggacgttttggcggcgttgggcgcgaggttgagggggcggcgggttttcggcggtggcggcgtcgagttgcgttgggatcgcgggttcgggagggggtttgggtcgggcgcggttgaggttggaagggggtgtgttggggggcggcgtcgtttcgacggggcggcgtgggtcggggttgttgtttttcggagggagtgggagttggagatgggtttggggtgggagagttcggtttgcgtcggcgtgaggggttcggacgaggggagcggtttggatatagggacgttggagttcggtgcgcggtcggaattttagattttgattttttcgttttttttttttttatttgatttttgagttattattgttttttttttgtatttaagttttt

SEQ ID NO: 9694 - DNA, 753 bp, Artificial Sequence
  chemically treated genomic DNA (Homo sapiens) CpG-island No: 9694
aaaaacttaaatacaaaaaaaaaacaataataactcaaaaatcaaataaaaaaaaaaaaaacgaaaaaatcaaaatctaaaattccgaccgcgcaccgaactccaacgtccctatatccaaaccgctcccctcgtccgaacccctcacgccgacgcaaaccgaactctcccaccccaaacccatctccaactcccactccctccgaaaaacaacaaccccgacccacgccgccccgtcgaaacgacgccgccccccaacacacccccttccaacctcaaccgcgcccgacccaaaccccctcccgaacccgcgatcccaacgcaactcgacgccgccaccgccgaaaacccgccgccccctcaacctcgcgcccaacgccgccaaaacgtcccctcaacccaacccccgcttacaaatcttaccccgcaaactctacaacactcgaacctcgcgactatcctaatccccgacctcgaactctacaatcgcactcgccgctaacgcctcgaaaaaaaccgccgcaacaacaaacgccgccgccgccataataccgcccgacccgtaccgcaaccctaccgcctacgtaaccgaacgaaacgaaacccaacaacgacctaaacccaaaccaaccgcgcgcctaaccccgcccccgaacctcgacccgactcgccccgccccgccccgcccgccgcgaccccgcccccgccccccccgaatctccattcaccgccttcgccacccccgaaccgaac

SEQ ID NO: 9695 - DNA, 753 bp, Artificial Sequence
  chemically treated genomic DNA (Homo sapiens) CpG-island No: 9695
gaaagtttaggtgtagagaaaaggtaataatagtttaggagttagataaggaaggagaaagcgaaagagttagggtttgaggtttcgatcgcgtatcggattttagcgtttttgtgtttagatcgtttttttcgttcgagttttttacgtcggcgtagatcgggtttttttattttaggtttatttttagtttttatttttttcggagagtagtagtttcggtttacgtcgtttcgtcgaggcgacgtcgttttttaatatatttttttttagttttaatcgcgttcggtttaggttttttttcgggttcgcgattttagcgtagttcggcgtcgttatcgtcgagaattcgtcgtttttttagtttcgcgtttagcgtcgttagggcgtttttttagtttagttttcgtttatagattttgtttcgtaggttttgtaatattcgaatttcgcgattgttttggttttcggtttcgggttttgtagtcgtattcgtcgttggcgtttcggaagaagtcgtcgtagtagtaggcgtcgtcgtcgttatggtgtcgttcggttcgtgtcgtagttttgtcgtttgcgtagtcgggcgaggcggagtttagtagcggtttaggtttaggttagtcgcgcgtttggtttcgttttcgggtttcggttcgattcgtttcgtttcgtttcgttcgtcgcggtttcgttttcgtttttttcgggtttttatttatcgttttcgttattttcgagtcgggt

SEQ ID NO: 9696 - DNA, 753 bp, Artificial Sequence
  chemically treated genomic DNA (Homo sapiens) CpG-island No: 9696
acccgactcgaaaataacgaaaacgataaataaaaacccgaaaaaaacgaaaacgaaaccgcgacgaacgaaacgaaacgaaacgaatcgaaccgaaacccgaaaacgaaaccaaacgcgcgactaacctaaacctaaaccgctactaaactccgcctcgcccgactacgcaaacgacaaaactacgacacgaaccgaacgacaccataacgacgacgacgcctactactacgacgacttcttccgaaacgccaacgacgaatacgactacaaaacccgaaaccgaaaaccaaaacaatcgcgaaattcgaatattacaaaacctacgaaacaaaatctataaacgaaaactaaactaaaaaaacgccctaacgacgctaaacgcgaaactaaaaaaacgacgaattctcgacgataacgacgccgaactacgctaaaatcgcgaacccgaaaaaaaacctaaaccgaacgcgattaaaactaaaaaaaaatatattaaaaaacgacgtcgcctcgacgaaacgacgtaaaccgaaactactactctccgaaaaaaataaaaactaaaaataaacctaaaataaaaaaacccgatctacgccgacgtaaaaaactcgaacgaaaaaaacgatctaaacacaaaaacgctaaaatccgatacgcgatcgaaacctcaaaccctaactctttcgctttctccttccttatctaactcctaaactattattaccttttctctacacctaaactttc

SEQ ID NO: 9697 - DNA, 539 bp, Artificial Sequence
  chemically treated genomic DNA (Homo sapiens) CpG-island No: 9697
cgttcgggcgggggtcgcgcgtcgtcgttcgcgtcgtcgtcgttcgtttttcgcgtcgtttttttttttttttgtttttttttttttgttcggcgtgttcgtttcgcgttttttttttttttcgtttttttttttttttttttttttttttttttttttttcgttttgtttttttcggtttgcgcgttcgttgtcggttttgtttttttcgcgcgtttttcggttcgttttttcgttttcgtgtttttggtgtttttttgttttttttcgtttttttttgtttttgttcgtcggtgttttttttttttttttttttttgcgttgtttttttttttttttttttttcgttttttttttttcgtttcgttttttcgtttcgtttttttttttgtttgttttcgtttcgttttttcgttgtcgcggtcgtcgggtgttcgcgtttttttcgacgtttagtttaagtcggttatcgtttgttgtttgttcgttcgtcgttcgcgtttttagtttttatagattgattataagaaaataaataa

SEQ ID NO: 9698 - DNA, 539 bp, Artificial Sequence
  chemically treated genomic DNA (Homo sapiens) CpG-island No: 9698
ttatttattttcttataatcaatctataaaaactaaaaacgcgaacgacgaacgaacaaacaacaaacgataaccgacttaaactaaacgtcgaaaaaaacgcgaacacccgacgaccgcgacaacgaaaaaacgaaacgaaaacaaacaaaaaaaaaaacgaaacgaaaaaacgaaacgaaaaaaaaaaaacgaaaaaaaaaaaaaaaaaaaaacaacgcaaaaaaaaaaaaaaaaaaaaaacaccgacgaacaaaaacaaaaaaaaacgaaaaaaaacaaaaaaacaccaaaaacacgaaaacgaaaaaacgaaccgaaaaacgcgcgaaaaaaacaaaaccgacaacgaacgcgcaaaccgaaaaaaacaaaacgaaaaaaaaaaaaaaaaaaaaaaaaaaaaaaaaaaaaacgaaaaaaaaaaaaaacgcgaaacgaacacgccgaacaaaaaaaaaaaaacaaaaaaaaaaaaaaacgacgcgaaaaacgaacgacgacgacgcgaacgacgacgcgcgacccccgcccgaacg

SEQ ID NO: 9699 - DNA, 539 bp, Artificial Sequence
  chemically treated genomic DNA (Homo sapiens) CpG-island No: 9699
ttgtttgtttttttgtaattagtttataaggattggaggcgcgggcggcgagcggataagtagtaaacgatagtcgatttggattaagcgtcgagagaagcgcggatattcgacgatcgcggtagcgagagagcgagacgaggataagtagggaggggggcgagacgaaagaacgggacggagaggaggaggcggaaagagaggagggggagagatagcgtaggagaagaaagggagagaaagtatcggcgggtaaaagtagaggagagcgagggaaaataaaggaatattagaagtacgggaacgaagaggcggatcggaggacgcgcgaaaaaggtagaatcggtaacgagcgcgtaggtcggaagaggtaagacgaggagggagaggaaaaaaggaagggaagagaagggggcgaaagaggagagaaacgcgagacgaatacgtcgagtaaagaagaaaaaataagggaaaaaggaggcggcgcggggagcgggcggcggcggcgcgggcggcggcgcgcggttttcgttcgggcg

SEQ ID NO: 9700 - DNA, 539 bp, Artificial Sequence
  chemically treated genomic DNA (Homo sapiens) CpG-island No: 9700
cgcccgaacgaaaaccgcgcgccgccgcccgcgccgccgccgcccgctccccgcgccgcctcctttttcccttattttttcttctttactcgacgtattcgtctcgcgtttctctcctctttcgcccccttctcttcccttccttttttcctctccctcctcgtcttacctcttccgacctacgcgctcgttaccgattctacctttttcgcgcgtcctccgatccgcctcttcgttcccgtacttctaatattcctttattttccctcgctctcctctacttttacccgccgatactttctctccctttcttctcctacgctatctctccccctcctctctttccgcctcctcctctccgtcccgttctttcgtctcgcccccctccctacttatcctcgtctcgctctctcgctaccgcgatcgtcgaatatccgcgcttctctcgacgcttaatccaaatcgactatcgtttactacttatccgctcgccgcccgcgcctccaatccttataaactaattacaaaaaaacaaacaa

SEQ ID NO: 9701 - DNA, 546 bp, Artificial Sequence
  chemically treated genomic DNA (Homo sapiens) CpG-island No: 9701
atgttcgtgggtgcggggcgtcgggcgaagggagatttcgcgattttaggcgttttcgcggtgtttacggtaggcgtaaagcgtagtaagggatattttttaaagtcgtatttcgtcggacggttgttttcgttttcgttttttaggtagcggtgggataaagcgcggtttttttttcgtcggggtttagggagggaaggtcggattagggttcgcgtttttcggttgtatttttttcgcgtcgcgtcggtcgtatataggtggtttttcgttcgggaggggtaggtttcggtatttttatataataatagagttttgcgcgtcgggaacgcgttttttcgtcgtcgcggtttttattcggttacgtttttattcggtttttaattcgttcgtttcgcggcgtttgggtcgagtgttgttcgttggtttggttcgtatttttttaaagttatttgttggttttgtagcgcggtagagacgtttttttcgattttttgggagcgaggagttaggggggtttcggtaggtattcgtttttgttttttt

SEQ ID NO: 9702 - DNA, 546 bp, Artificial Sequence
  chemically treated genomic DNA (Homo sapiens) CpG-island No: 9702
aaaaaaacaaaaacgaatacctaccgaaacccccctaactcctcgctcccaaaaaatcgaaaaaaacgtctctaccgcgctacaaaaccaacaaataactttaaaaaaatacgaaccaaaccaacgaacaacactcgacccaaacgccgcgaaacgaacgaattaaaaaccgaataaaaacgtaaccgaataaaaaccgcgacgacgaaaaaacgcgttcccgacgcgcaaaactctattattatataaaaataccgaaacctacccctcccgaacgaaaaaccacctatatacgaccgacgcgacgcgaaaaaaatacaaccgaaaaacgcgaaccctaatccgaccttccctccctaaaccccgacgaaaaaaaaaccgcgctttatcccaccgctacctaaaaaacgaaaacgaaaacaaccgtccgacgaaatacgactttaaaaaatatcccttactacgctttacgcctaccgtaaacaccgcgaaaacgcctaaaatcgcgaaatctcccttcgcccgacgccccgcacccacgaacat

SEQ ID NO: 9703 - DNA, 546 bp, Artificial Sequence
  chemically treated genomic DNA (Homo sapiens) CpG-island No: 9703
gggggagtaaggacgagtgtttgtcgggatttttttggtttttcgtttttaaggagtcgaggggaacgtttttatcgcgttgtaaagttagtaggtaattttggggaggtgcgggttaggttagcgagtagtattcggtttaggcgtcgcggggcggacggattggaagtcggatggaggcgtggtcgggtgggggtcgcggcggcggggaggcgcgttttcggcgcgtagagttttattgttatataaaagtgtcgaagtttgtttttttcgagcggaaaattatttgtgtgcggtcggcgcggcgcgagagggatgtagtcggaaggcgcgggttttaattcggttttttttttttaaatttcggcggaaaagaggtcgcgttttgttttatcgttgtttgagaggcggaagcgggggtagtcgttcggcggggtgcggttttggggagtgttttttgttgcgttttgcgtttatcgtgaatatcgcgagggcgtttaaggtcgcggggttttttttcgttcgacgtttcgtatttacgggtat

SEQ ID NO: 9704 - DNA, 546 bp, Artificial Sequence
  chemically treated genomic DNA (Homo sapiens) CpG-island No: 9704
atacccgtaaatacgaaacgtcgaacgaaaaaaaaccccgcgaccttaaacgccctcgcgatattcacgataaacgcaaaacgcaacaaaaaacactccccaaaaccgcaccccgccgaacgactacccccgcttccgcctctcaaacaacgataaaacaaaacgcgacctcttttccgccgaaatttaaaaaaaaaaaaccgaattaaaacccgcgccttccgactacatccctctcgcgccgcgccgaccgcacacaaataattttccgctcgaaaaaaacaaacttcgacacttttatataacaataaaactctacgcgccgaaaacgcgcctccccgccgccgcgacccccacccgaccacgcctccatccgacttccaatccgtccgccccgcgacgcctaaaccgaatactactcgctaacctaacccgcacctccccaaaattacctactaactttacaacgcgataaaaacgttcccctcgactccttaaaaacgaaaaaccaaaaaaatcccgacaaacactcgtccttactccccc

SEQ ID NO: 9705 - DNA, 829 bp, Artificial Sequence
  chemically treated genomic DNA (Homo sapiens) CpG-island No: 9705
gggtaaggcgaggcggaattaaatttcgtttcgagagcggtagtttcgcgcgcggtgcgttcggtttatgtttgtttcgaggggcgtttggtaggtatttcgttttttttcgtagttcgatttttatgatagatacgtttagattcgtgtttttcgcgtcggaaatggcgattagtaagacggtggcgtggtttaacgagtagttggagttgggtaacgagcggttgttgttgatggattgtcggtcgtaggagttatacgagtcgtcgtatatcgagtcggttattaacgtggttatttcgggtattatgttgcggcgtttgtagaagggtaatttgtcggtgcgcgcgttttttacgcgcggcgaggatcgggatcgttttattcggcgttgtggtatcgatatagtggtgttttacgacgagagtagtagcgattggaacgagaatacgggcggcgagtcggtgttcgggttgttgtttaagaagtttaaggacgagggttgtcgggcgttttatttggaaggtacgcgtttagggaatttcgcgcgcggggtagggttaggggcgtagggttgcgggcggggcgcgtggattgaaaatatttttgtttcgtttagttggagtttcggagtcgcgttgttcgtttagggatcggtagtcggcgaggtaggggtcgcgaatcgcgcgtttcgtattagagaatcgggtcggtttagaatttattcgttttcggttgcgggtatcggcggtttttttttaacgggttttgcgtttttttagttagaatattttttattattattttgttttttatcgttcgattttga

SEQ ID NO: 9706 - DNA, 829 bp, Artificial Sequence
  chemically treated genomic DNA (Homo sapiens) CpG-island No: 9706
tcaaaatcgaacgataaaaaacaaaataataataaaaaatattctaactaaaaaaacgcaaaacccgttaaaaaaaaaccgccgatacccgcaaccgaaaacgaataaattctaaaccgacccgattctctaatacgaaacgcgcgattcgcgacccctacctcgccgactaccgatccctaaacgaacaacgcgactccgaaactccaactaaacgaaacaaaaatattttcaatccacgcgccccgcccgcaaccctacgcccctaaccctaccccgcgcgcgaaattccctaaacgcgtaccttccaaataaaacgcccgacaaccctcgtccttaaacttcttaaacaacaacccgaacaccgactcgccgcccgtattctcgttccaatcgctactactctcgtcgtaaaacaccactatatcgataccacaacgccgaataaaacgatcccgatcctcgccgcgcgtaaaaaacgcgcgcaccgacaaattacccttctacaaacgccgcaacataatacccgaaataaccacgttaataaccgactcgatatacgacgactcgtataactcctacgaccgacaatccatcaacaacaaccgctcgttacccaactccaactactcgttaaaccacgccaccgtcttactaatcgccatttccgacgcgaaaaacacgaatctaaacgtatctatcataaaaatcgaactacgaaaaaaaacgaaatacctaccaaacgcccctcgaaacaaacataaaccgaacgcaccgcgcgcgaaactaccgctctcgaaacgaaatttaattccgcctcgccttaccc

SEQ ID NO: 9707 - DNA, 829 bp, Artificial Sequence
  chemically treated genomic DNA (Homo sapiens) CpG-island No: 9707
ttaaaatcgaacgatagaaaatagggtgatggtggaggatgttttggttaagaaggcgtagaattcgttagaaagaaatcgtcggtattcgtagtcggaagcgagtggattttgagtcggttcggttttttggtgcggaacgcgcggttcgcggtttttatttcgtcggttgtcggtttttaggcgggtagcgcggtttcgaagttttagttgagcggagtagaggtatttttaatttacgcgtttcgttcgtagttttgcgtttttagttttgtttcgcgcgcggagttttttgggcgcgtattttttaggtagaacgttcggtagttttcgtttttgagttttttgagtagtagttcgagtatcgattcgtcgttcgtattttcgttttagtcgttgttgttttcgtcgtagagtattattgtgtcggtgttatagcgtcgggtgaagcggtttcggttttcgtcgcgcgtgaagagcgcgcgtatcggtaggttatttttttgtaggcgtcgtagtatgatgttcgggatggttacgttgatggtcgattcgatgtgcgacgattcgtatagtttttgcggtcggtagtttattagtagtagtcgttcgttgtttagttttagttgttcgttgagttacgttatcgttttgttgatcgttattttcgacgcgaagggtacgggtttgagcgtatttattatgggggtcgagttgcgggagagggcggggtgtttattagacgtttttcggggtaggtataggtcgagcgtatcgcgcgcgaagttgtcgttttcggagcggggtttaatttcgtttcgttttattt

SEQ ID NO: 9708 - DNA, 829 bp, Artificial Sequence
  chemically treated genomic DNA (Homo sapiens) CpG-island No: 9708
aaataaaacgaaacgaaattaaaccccgctccgaaaacgacaacttcgcgcgcgatacgctcgacctatacctaccccgaaaaacgtctaataaacaccccgccctctcccgcaactcgacccccataataaatacgctcaaacccgtacccttcgcgtcgaaaataacgatcaacaaaacgataacgtaactcaacgaacaactaaaactaaacaacgaacgactactactaataaactaccgaccgcaaaaactatacgaatcgtcgcacatcgaatcgaccatcaacgtaaccatcccgaacatcatactacgacgcctacaaaaaaataacctaccgatacgcgcgctcttcacgcgcgacgaaaaccgaaaccgcttcacccgacgctataacaccgacacaataatactctacgacgaaaacaacaacgactaaaacgaaaatacgaacgacgaatcgatactcgaactactactcaaaaaactcaaaaacgaaaactaccgaacgttctacctaaaaaatacgcgcccaaaaaactccgcgcgcgaaacaaaactaaaaacgcaaaactacgaacgaaacgcgtaaattaaaaatacctctactccgctcaactaaaacttcgaaaccgcgctacccgcctaaaaaccgacaaccgacgaaataaaaaccgcgaaccgcgcgttccgcaccaaaaaaccgaaccgactcaaaatccactcgcttccgactacgaataccgacgatttctttctaacgaattctacgccttcttaaccaaaacatcctccaccatcaccctattttctatcgttcgattttaa

SEQ ID NO: 9709 - DNA, 574 bp, Artificial Sequence
  chemically treated genomic DNA (Homo sapiens) CpG-island No: 9709
tttcgcgttgcgtatttggaagtgcgtaggttgtttcgtcgtttcgtcggcgcgttggtagttgaagtaggtttttgttatgtttaggtggtcgaggggtagcgggtcgtgggggtttttgaagtagtagaggtagtagcggcgttcgtttaatacgaatcgacggttgcggtagttacgtagtcgcgttggttttcgcgcggtattcgtttcgggttttgtagtttttttatcgtcgtcgttgtttttttttgttcgggtttcggtttcggtatggttgtttgcgcgttaatcgtttgtttttcggttttcgcgttttcgcgttgcggttgttgcgttttttgttttcgcggtgtttttttttcgtcgtttcgttttttttttaggcgtttaaagtggtttggaatttgtagaacgtttttttttaagttcgttggtagttgttttagttcgttggtttttgttttcgttcgttggtcgttgttttcgcgacgtttcggaagttaggttttgtttttcgtatttgttaagttttcgttttgtcggagtttcgttttgtcgtttaggttggagt

SEQ ID NO: 9710 - DNA, 574 bp, Artificial Sequence
  chemically treated genomic DNA (Homo sapiens) CpG-island No: 9710
actccaacctaaacgacaaaacgaaactccgacaaaacgaaaacttaacaaatacgaaaaacaaaacctaacttccgaaacgtcgcgaaaacaacgaccaacgaacgaaaacaaaaaccaacgaactaaaacaactaccaacgaacttaaaaaaaaacgttctacaaattccaaaccactttaaacgcctaaaaaaaaaacgaaacgacgaaaaaaaaacaccgcgaaaacaaaaaacgcaacaaccgcaacgcgaaaacgcgaaaaccgaaaaacaaacgattaacgcgcaaacaaccataccgaaaccgaaacccgaacaaaaaaaaacaacgacgacgataaaaaaactacaaaacccgaaacgaataccgcgcgaaaaccaacgcgactacgtaactaccgcaaccgtcgattcgtattaaacgaacgccgctactacctctactacttcaaaaacccccacgacccgctacccctcgaccacctaaacataacaaaaacctacttcaactaccaacgcgccgacgaaacgacgaaacaacctacgcacttccaaatacgcaacgcgaaa

SEQ ID NO: 9711 - DNA, 574 bp, Artificial Sequence
  chemically treated genomic DNA (Homo sapiens) CpG-island No: 9711
attttagtttgggcgatagagcgagatttcggtagggcggggatttggtaggtgcgggaggtaggatttggttttcggggcgtcgcgggggtaacggttagcgggcgggggtaagggttagcgggttaggataattgttaacgggtttggaggggggcgttttataaattttaggttattttgagcgtttgagagaggagcggggcggcgggaagggggtatcgcgggggtagggagcgtagtagtcgtagcgcgaaggcgcgggggtcggggaataaacggttggcgcgtaggtagttatatcggggtcggaattcgggtagaggagggtagcgacggcgatggggaggttgtagagttcggggcgggtatcgcgcgggaattagcgcgattgcgtggttatcgtagtcgtcggttcgtgttggacgggcgtcgttgttgtttttgttattttaagaatttttacgattcgttgtttttcggttatttggatatagtagaagtttgttttagttattagcgcgtcgacgaggcggcggagtagtttgcgtatttttaggtgcgtagcgcggga

SEQ ID NO: 9712 - DNA, 574 bp, Artificial Sequence
  chemically treated genomic DNA (Homo sapiens) CpG-island No: 9712
tcccgcgctacgcacctaaaaatacgcaaactactccgccgcctcgtcgacgcgctaataactaaaacaaacttctactatatccaaataaccgaaaaacaacgaatcgtaaaaattcttaaaataacaaaaacaacaacgacgcccgtccaacacgaaccgacgactacgataaccacgcaatcgcgctaattcccgcgcgatacccgccccgaactctacaacctccccatcgccgtcgctaccctcctctacccgaattccgaccccgatataactacctacgcgccaaccgtttattccccgacccccgcgccttcgcgctacgactactacgctccctacccccgcgatacccccttcccgccgccccgctcctctctcaaacgctcaaaataacctaaaatttataaaacgcccccctccaaacccgttaacaattatcctaacccgctaacccttacccccgcccgctaaccgttacccccgcgacgccccgaaaaccaaatcctacctcccgcacctaccaaatccccgccctaccgaaatctcgctctatcgcccaaactaaaat

SEQ ID NO: 9713 - DNA, 735 bp, Artificial Sequence
  chemically treated genomic DNA (Homo sapiens) CpG-island No: 9713
ttcgtttcgtttcgtgtcggtttcgtttggagtcgtttcgttttcgttttttatcgagttttttaggtgatgttgtagttaagatggcgttcgcggcggtcgtggcggtttgagcgtgatgtttcgggttttcggcggcggttgtggttttggtcggggttttgggtttttttcggtcgtgagcgattagcgttttttcgtcggtcgggttagtcgggatagagaggagacggttacgaagagaggaggtagtgagtaataggacgagatcgcggcgtttttagtttcggtattatggtcgggattattaagaaataaattttgaagtatttttttaggttagtgagcgtttcggtgtcggcgttagtcggtttttattttagttcgtattggagttagtttgcggtttcgggggcggcggcgtttggcggttgtgcgggaggcgattttcggattttttcgttttggtcggggtagaggtcgcggtttcggattttttgtcgtcggcggcgtcgggggttggttttacgaatcggtttttgacgcgtttttttttagggtgggcgcgcggaggagttcggagtgcggagcgcggcgggttgggatcgttttcggcgcggcgtttgggggcgtttcggttcggttttgtgcggtattgagcggaggttggaggtggtttggcgttatttaagtgtttggttaatgtgttgggttttaattcgagttcggtgtttt

SEQ ID NO: 9714 - DNA, 735 bp, Artificial Sequence
  chemically treated genomic DNA (Homo sapiens) CpG-island No: 9714
aaaacaccgaactcgaattaaaacccaacacattaaccaaacacttaaataacgccaaaccacctccaacctccgctcaataccgcacaaaaccgaaccgaaacgcccccaaacgccgcgccgaaaacgatcccaacccgccgcgctccgcactccgaactcctccgcgcgcccaccctaaaaaaaaacgcgtcaaaaaccgattcgtaaaaccaacccccgacgccgccgacgacaaaaaatccgaaaccgcgacctctaccccgaccaaaacgaaaaaatccgaaaatcgcctcccgcacaaccgccaaacgccgccgcccccgaaaccgcaaactaactccaatacgaactaaaataaaaaccgactaacgccgacaccgaaacgctcactaacctaaaaaaatacttcaaaatttatttcttaataatcccgaccataataccgaaactaaaaacgccgcgatctcgtcctattactcactacctcctctcttcgtaaccgtctcctctctatcccgactaacccgaccgacgaaaaaacgctaatcgctcacgaccgaaaaaaacccaaaaccccgaccaaaaccacaaccgccgccgaaaacccgaaacatcacgctcaaaccgccacgaccgccgcgaacgccatcttaactacaacatcacctaaaaaactcgataaaaaacgaaaacgaaacgactccaaacgaaaccgacacgaaacgaaacgaa

SEQ ID NO: 9715 - DNA, 735 bp, Artificial Sequence
  chemically treated genomic DNA (Homo sapiens) CpG-island No: 9715
ggagtatcgaattcgagttagagtttagtatattaattaggtatttgggtgacgttaggttatttttagttttcgtttagtatcgtatagagtcgagtcgggacgtttttagacgtcgcgtcgggagcgattttagttcgtcgcgtttcgtatttcgggttttttcgcgcgtttattttgggagaagacgcgttaggggtcgattcgtgaggttagttttcggcgtcgtcggcgataagagattcggggtcgcgatttttgtttcggttagagcggggaagttcgaaggtcgtttttcgtatagtcgttaggcgtcgtcgttttcgaagtcgtaggttgattttagtgcgggttggggtggaggtcgattggcgtcgatatcgaggcgtttattgatttggagaggtgttttaagatttgttttttgatgatttcggttatggtatcgaggttggagacgtcgcggtttcgttttgttgtttattgtttttttttttcgtggtcgttttttttttgtttcggttagttcggtcggcggagaggcgttgatcgtttacgatcgggagagatttaaggtttcggttaaggttatagtcgtcgtcgagaattcggagtattacgtttaggtcgttacggtcgtcgcgggcgttattttggttgtagtattatttaagagattcggtggagggcgggggcggggcggttttaggcggggtcggtacgaggcggggcggg

SEQ ID NO: 9716 - DNA, 735 bp, Artificial Sequence
  chemically treated genomic DNA (Homo sapiens) CpG-island No: 9716
cccgccccgcctcgtaccgaccccgcctaaaaccgccccgcccccgccctccaccgaatctcttaaataatactacaaccaaaataacgcccgcgacgaccgtaacgacctaaacgtaatactccgaattctcgacgacgactataaccttaaccgaaaccttaaatctctcccgatcgtaaacgatcaacgcctctccgccgaccgaactaaccgaaacaaaaaaaaaacgaccacgaaaaaaaaaaacaataaacaacaaaacgaaaccgcgacgtctccaacctcgataccataaccgaaatcatcaaaaaacaaatcttaaaacacctctccaaatcaataaacgcctcgatatcgacgccaatcgacctccaccccaacccgcactaaaatcaacctacgacttcgaaaacgacgacgcctaacgactatacgaaaaacgaccttcgaacttccccgctctaaccgaaacaaaaatcgcgaccccgaatctcttatcgccgacgacgccgaaaactaacctcacgaatcgacccctaacgcgtcttctcccaaaataaacgcgcgaaaaaacccgaaatacgaaacgcgacgaactaaaatcgctcccgacgcgacgtctaaaaacgtcccgactcgactctatacgatactaaacgaaaactaaaaataacctaacgtcacccaaatacctaattaatatactaaactctaactcgaattcgatactcc

SEQ ID NO: 9717 - DNA, 624 bp, Artificial Sequence
  chemically treated genomic DNA (Homo sapiens) CpG-island No: 9717
  unsure (48)
ttatcgtagtacggttatattcgtatttttatgacgttcgtatatgtngttattttttttttaatacgcgtagcgtttattttttattttttttatatattttttattttttaattgtttatagagttttatttatttatatatacgttgtttattttatttatacgttacgtttatttatagcgcgcgtttgaattatatttcgtttttatcgttatatcgttttttttttttggtttcgttttatttaataattaattattttttttattggttatttacgtttttacggatattttttgtgtttttatattaattattattcgtcgattttttttatatttatttattcgtcgtttagtttttgattatgcgtcgtttatcgtttttattacgtatacgattatcgattttcgaattttcgtatttacggacgatcgttatattttgcgtataacgttcgaatggacgtcgtttatacgtacgtattattttttgtttgttcgtagttttcgatattttttattatttcgtttttgttgtttttttttatcgatacgtttagttattgtatgattggatttttttttatttatcgatttattagtcgtcgtcgtatttttt

SEQ ID NO: 9718 - DNA, 624 bp, Artificial Sequence
  chemically treated genomic DNA (Homo sapiens) CpG-island No: 9718
  unsure (577)
aaaaaatacgacgacgactaataaatcgataaataaaaaaaaatccaatcatacaataactaaacgtatcgataaaaaaaaacaacaaaaacgaaataataaaaaatatcgaaaactacgaacaaacaaaaaataatacgtacgtataaacgacgtccattcgaacgttatacgcaaaatataacgatcgtccgtaaatacgaaaattcgaaaatcgataatcgtatacgtaataaaaacgataaacgacgcataatcaaaaactaaacgacgaataaataaatataaaaaaaatcgacgaataataattaatataaaaacacaaaaaatatccgtaaaaacgtaaataaccaataaaaaaaataattaattattaaataaaacgaaaccaaaaaaaaaaaacgatataacgataaaaacgaaatataattcaaacgcgcgctataaataaacgtaacgtataaataaaataaacaacgtatatataaataaataaaactctataaacaattaaaaaataaaaaatatataaaaaaaataaaaaataaacgctacgcgtattaaaaaaaaaataacnacatatacgaacgtcataaaaatacgaatataaccgtactacgataa

SEQ ID NO: 9719 - DNA, 624 bp, Artificial Sequence
  chemically treated genomic DNA (Homo sapiens) CpG-island No: 9719
  unsure (577)
agagggtgcggcgacggttgatgaatcggtgagtgaagagaagtttagttatatagtggttgggcgtgtcgataggaagaggtaatagaggcgaagtggtgaagggtgtcggaagttgcgggtagatagggagtagtgcgtacgtataagcgacgtttattcgagcgttgtgcgtagggtgtggcggtcgttcgtaggtgcgagggttcgagggtcggtgatcgtgtgcgtagtggagacggtgggcgacgtatggttaggagttgagcgacgggtggataggtgtagggagagtcggcgagtgatagttggtgtggagatataggaggtgttcgtgggaacgtgagtgattaatgagaaaagtggttggttgttgggtaaggcgagattagggaagggggacggtgtgacggtaagggcggagtgtggtttaggcgcgcgttgtaggtgggcgtgacgtgtgagtagagtaggtagcgtgtgtgtggataagtagagttttgtgagtagttagagagtggagggtgtgtgagaagggtgaagagtgagcgttgcgcgtattgaggagagagtggtngtatgtgcggacgttatggaggtgcggatgtggtcgtgttgcgatga

SEQ ID NO: 9720 - DNA, 624 bp, Artificial Sequence
  chemically treated genomic DNA (Homo sapiens) CpG-island No: 9720
  unsure (48)
tcatcgcaacacgaccacatccgcacctccataacgtccgcacatacnaccactctctcctcaatacgcgcaacgctcactcttcacccttctcacacaccctccactctctaactactcacaaaactctacttatccacacacacgctacctactctactcacacgtcacgcccacctacaacgcgcgcctaaaccacactccgcccttaccgtcacaccgtcccccttccctaatctcgccttacccaacaaccaaccacttttctcattaatcactcacgttcccacgaacacctcctatatctccacaccaactatcactcgccgactctccctacacctatccacccgtcgctcaactcctaaccatacgtcgcccaccgtctccactacgcacacgatcaccgaccctcgaaccctcgcacctacgaacgaccgccacaccctacgcacaacgctcgaataaacgtcgcttatacgtacgcactactccctatctacccgcaacttccgacacccttcaccacttcgcctctattacctcttcctatcgacacgcccaaccactatataactaaacttctcttcactcaccgattcatcaaccgtcgccgcaccctct

SEQ ID NO: 9721 - DNA, 779 bp, Artificial Sequence
  chemically treated genomic DNA (Homo sapiens) CpG-island No: 9721
  unsure (713)
gtcgtgatcgtgattttggtcggtcgttgtggttggggtcggttaagtcgaatatcggttatacgtaagcggcggcgggtgtggttggtgtgattaagatggtgatggcgatgcggtacgggtagttgttacgtacgttgtacgtggaatcgtcgtcgtcggaggtggattggtcggcggggacggtttaattttttacggagaatacgttttggtttaggagtggtcgtgttcgtcgggtgggggtgtcgtcgttcgggattagtggtattaacgcgtacgttattttcgaatagttttcgggagtgtcgagttagtttgcggggtcgggttcgggttttgtcgtggatgtttcggtggtgtcgtggatggtgtcgggtaaaatattcgaagcgttattcgcgtaggtaacggcgttgatgatttatttggacgagcgatttgatgttttttcgttggatgttgggtattcgttggcgttgatacggtcggcgttggatgagcgagcggtggtgttggggtcggatcgtgaaaacgttgttgtgcggtgtgaagcgttgtttttcggttatgaggtttttgggtttggtgatcggatttatttggggtttcggtggtcgtatcggggtttttggtttttcggttaagggtggttagttggttcggggatatggttcgggggttttatcgagggtttttcgggggttcgttgnttgtttttttacgaagtttttttcgagtttggattaaaattttggttaggagattcgggttcggga

SEQ ID NO: 9722 - DNA, 779 bp, Artificial Sequence
  chemically treated genomic DNA (Homo sapiens) CpG-island No: 9722
  unsure (67)
tcccgaacccgaatctcctaaccaaaattttaatccaaactcgaaaaaaacttcgtaaaaaaacaancaacgaacccccgaaaaaccctcgataaaacccccgaaccatatccccgaaccaactaaccacccttaaccgaaaaaccaaaaaccccgatacgaccaccgaaaccccaaataaatccgatcaccaaacccaaaaacctcataaccgaaaaacaacgcttcacaccgcacaacaacgttttcacgatccgaccccaacaccaccgctcgctcatccaacgccgaccgtatcaacgccaacgaatacccaacatccaacgaaaaaacatcaaatcgctcgtccaaataaatcatcaacgccgttacctacgcgaataacgcttcgaatattttacccgacaccatccacgacaccaccgaaacatccacgacaaaacccgaacccgaccccgcaaactaactcgacactcccgaaaactattcgaaaataacgtacgcgttaataccactaatcccgaacgacgacacccccacccgacgaacacgaccactcctaaaccaaaacgtattctccgtaaaaaattaaaccgtccccgccgaccaatccacctccgacgacgacgattccacgtacaacgtacgtaacaactacccgtaccgcatcgccatcaccatcttaatcacaccaaccacacccgccgccgcttacgtataaccgatattcgacttaaccgaccccaaccacaacgaccgaccaaaatcacgatcacgac

SEQ ID NO: 9723 - DNA, 779 bp, Artificial Sequence
  chemically treated genomic DNA (Homo sapiens) CpG-island No: 9723
  unsure (67)
tttcgaattcggattttttggttaagattttgatttaagttcggaaaaagtttcgtaaaaaggtagntagcgaattttcgaaaaattttcggtaaagttttcgggttatattttcgagttaattgattatttttgatcgggaaattaaaaatttcgatgcggttatcgaggttttaagtagattcggttattaaatttagaagttttatgatcggaagatagcgttttatatcgtataataacgtttttacggttcgattttagtattatcgttcgtttatttagcgtcgatcgtgttaacgttagcgagtatttaatatttagcgaggagatattaggtcgttcgtttagataggttattaacgtcgttgtttgcgcggatagcgtttcgggtgttttgttcgatattatttacggtattatcggaatatttacgatagaattcgaattcggtttcgtagattgattcggtattttcgggggttgttcgaggatgacgtgcgcgttagtattattgatttcgaacgacgatatttttattcgacgaatacgattatttttgggttagggcgtgtttttcgtaaggagttgaatcgttttcgtcgattaatttattttcggcgacggcgattttacgtgtaacgtgcgtggtagttgttcgtgtcgtatcgttattattattttgattatattagttatattcgtcgtcgtttgcgtatgatcgatgttcgatttgatcgattttaattataacggtcggttaggattacgattacggt

SEQ ID NO: 9724 - DNA, 779 bp, Artificial Sequence
  chemically treated genomic DNA (Homo sapiens) CpG-island No: 9724
  unsure (713)
accgtaatcgtaatcctaaccgaccgttataattaaaatcgatcaaatcgaacatcgatcatacgcaaacgacgacgaatataactaatataatcaaaataataataacgatacgacacgaacaactaccacgcacgttacacgtaaaatcgccgtcgccgaaaataaattaatcgacgaaaacgattcaactccttacgaaaaacacgccctaacccaaaaataatcgtattcgtcgaataaaaatatcgtcgttcgaaatcaataatactaacgcgcacgtcatcctcgaacaacccccgaaaataccgaatcaatctacgaaaccgaattcgaattctatcgtaaatattccgataataccgtaaataatatcgaacaaaacacccgaaacgctatccgcgcaaacaacgacgttaataacctatctaaacgaacgacctaatatctcctcgctaaatattaaatactcgctaacgttaacacgatcgacgctaaataaacgaacgataatactaaaatcgaaccgtaaaaacgttattatacgatataaaacgctatcttccgatcataaaacttctaaatttaataaccgaatctacttaaaacctcgataaccgcatcgaaatttttaatttcccgatcaaaaataatcaattaactcgaaaatataacccgaaaactttaccgaaaatttttcgaaaattcgctanctacctttttacgaaactttttccgaacttaaatcaaaatcttaaccaaaaaatccgaattcgaaa

SEQ ID NO: 9725 - DNA, 712 bp, Artificial Sequence
  chemically treated genomic DNA (Homo sapiens) CpG-island No: 9725
gttcgtcgcgttgtagcggtgtttttttagtcgtcgtagttgcgtcgcgtttagcggttcgtttagcgtttttagttagcgcggcgcggattcggtttcggcgtttgtcgttatggtcgtttgagggtttcgtcgtcgttatcgagcgtagttcgcgtttggcgttgggggtagggagaggtggagggagaggttggcggtcgggttttgcgattgtcgggttggatttatcggtcgggttcgtacggcggaggtcgaggttaggtcggtttgttcggttgtcggggttttagttttagaagttgtggggtcgcggttgcggttcgcgggtggggcggggtttcggggaggggttcggttgggggcggggcggagggggttttgttaggggcggggaggcgggtgtcgcgttcgcgggttattttcggcgttcgttaacggtaatttgttatcggcgattaaggtttttgattttttaggggtcggttgtattgcgtttgaggtttgatgttttaatttacggcgtcggattacgttttgaggtcgttttttcgcgggttgtattacgatcgagtcggttttttttttaggggtcggaatacgatttcggtcgtttagtgttagttattgtaggattacgttgttcgtagagtttgggggttttcgtgtgagaatatagttttgtagggttcgggttacgggggtgacggtt

SEQ ID NO: 9726 - DNA, 712 bp, Artificial Sequence
  chemically treated genomic DNA (Homo sapiens) CpG-island No: 9726
aaccgtcacccccgtaacccgaaccctacaaaactatattctcacacgaaaacccccaaactctacgaacaacgtaatcctacaataactaacactaaacgaccgaaatcgtattccgacccctaaaaaaaaaaccgactcgatcgtaatacaacccgcgaaaaaacgacctcaaaacgtaatccgacgccgtaaattaaaacatcaaacctcaaacgcaatacaaccgacccctaaaaaatcaaaaaccttaatcgccgataacaaattaccgttaacgaacgccgaaaataacccgcgaacgcgacacccgcctccccgcccctaacaaaaccccctccgccccgcccccaaccgaacccctccccgaaaccccgccccacccgcgaaccgcaaccgcgaccccacaacttctaaaactaaaaccccgacaaccgaacaaaccgacctaacctcgacctccgccgtacgaacccgaccgataaatccaacccgacaatcgcaaaacccgaccgccaacctctccctccacctctccctacccccaacgccaaacgcgaactacgctcgataacgacgacgaaaccctcaaacgaccataacgacaaacgccgaaaccgaatccgcgccgcgctaactaaaaacgctaaacgaaccgctaaacgcgacgcaactacgacgactaaaaaaacaccgctacaacgcgacgaac

SEQ ID NO: 9727 - DNA, 712 bp, Artificial Sequence
  chemically treated genomic DNA (Homo sapiens) CpG-island No: 9727
ggtcgttattttcgtgattcgagttttgtaaaattgtgtttttatacgaaaatttttaggttttgcgggtagcgtggttttgtagtggttaatattgggcgatcggagtcgtgtttcgatttttaggagaggaatcggttcggtcgtggtgtagttcgcgaggagacgattttagggcgtaattcgacgtcgtgggttaagatattagattttaggcgtagtgtagtcggtttttggggagttaaggattttgatcgtcgataataagttgtcgttggcgggcgtcgagggtgattcgcgagcgcggtattcgttttttcgtttttagtaggatttttttcgtttcgtttttagtcggattttttttcgaggtttcgttttattcgcgagtcgtagtcgcggttttatagtttttggggttggggtttcggtagtcgggtaggtcggtttgatttcgattttcgtcgtgcgggttcgatcggtgagtttagttcggtagtcgtaggattcggtcgttagtttttttttttatttttttttgtttttagcgttaggcgcgggttgcgttcggtggcggcggcggggtttttaggcggttatggcggtaggcgtcggggtcgggttcgcgtcgcgttggttgagggcgttgagcgagtcgttgagcgcggcgtagttgcggcgattggaggagtatcgttatagcgcggcgggt

SEQ ID NO: 9728 - DNA, 712 bp, Artificial Sequence
  chemically treated genomic DNA (Homo sapiens) CpG-island No: 9728
acccgccgcgctataacgatactcctccaatcgccgcaactacgccgcgctcaacgactcgctcaacgccctcaaccaacgcgacgcgaacccgaccccgacgcctaccgccataaccgcctaaaaaccccgccgccgccaccgaacgcaacccgcgcctaacgctaaaaacaaaaaaaaataaaaaaaaaaactaacgaccgaatcctacgactaccgaactaaactcaccgatcgaacccgcacgacgaaaatcgaaatcaaaccgacctacccgactaccgaaaccccaaccccaaaaactataaaaccgcgactacgactcgcgaataaaacgaaacctcgaaaaaaaatccgactaaaaacgaaacgaaaaaaatcctactaaaaacgaaaaaacgaataccgcgctcgcgaatcaccctcgacgcccgccaacgacaacttattatcgacgatcaaaatccttaactccccaaaaaccgactacactacgcctaaaatctaatatcttaacccacgacgtcgaattacgccctaaaatcgtctcctcgcgaactacaccacgaccgaaccgattcctctcctaaaaatcgaaacacgactccgatcgcccaatattaaccactacaaaaccacgctacccgcaaaacctaaaaattttcgtataaaaacacaattttacaaaactcgaatcacgaaaataacgacc

SEQ ID NO: 9729 - DNA, 662 bp, Artificial Sequence
  chemically treated genomic DNA (Homo sapiens) CpG-island No: 9729
tcgtgatcgtgattttggtcggtcgttgtggttggggtcggttaagtcgaatatcggttatacgtaagcggcggcgggtgtggttggtgtgattaagatggtgatggcgatgcggtacgggtagttgttacgtacgttgtacgtggaatcgtcgtcgtcggaggtggattggtcggcggggacggtttaattttttacggagaatacgttttggtttaggagtggtcgtgttcgtcgggtgggggtgtcgtcgttcgggattagtggtattaacgcgtacgttattttcgaatagttttcgggagtgtcgagttagtttgcggggtcgggttcgggttttgtcgtggatgtttcggtggtgtcgtggatggtgtcgggtaaaatattcgaagcgttattcgcgtaggtaacggcgttgatgatttatttggacgagcgatttgatgttttttcgttggatgttgggtattcgttggcgttgatacggtcggcgttggatgagcgagcggtggttttggggtcggatcgtgaaacgttgatgtgcggtgtgaaagcgttgtttgtcggttatgagggtttttgggtttggtgatcggaatttgtggggggtttgggggttcgtatatcgggttttggtggttttttcgggttacgggtgggtt

SEQ ID NO: 9730 - DNA, 662 bp, Artificial Sequence
  chemically treated genomic DNA (Homo sapiens) CpG-island No: 9730
aacccacccgtaacccgaaaaaaccaccaaaacccgatatacgaacccccaaaccccccacaaattccgatcaccaaacccaaaaaccctcataaccgacaaacaacgctttcacaccgcacatcaacgtttcacgatccgaccccaaaaccaccgctcgctcatccaacgccgaccgtatcaacgccaacgaatacccaacatccaacgaaaaaacatcaaatcgctcgtccaaataaatcatcaacgccgttacctacgcgaataacgcttcgaatattttacccgacaccatccacgacaccaccgaaacatccacgacaaaacccgaacccgaccccgcaaactaactcgacactcccgaaaactattcgaaaataacgtacgcgttaataccactaatcccgaacgacgacacccccacccgacgaacacgaccactcctaaaccaaaacgtattctccgtaaaaaattaaaccgtccccgccgaccaatccacctccgacgacgacgattccacgtacaacgtacgtaacaactacccgtaccgcatcgccatcaccatcttaatcacaccaaccacacccgccgccgcttacgtataaccgatattcgacttaaccgaccccaaccacaacgaccgaccaaaatcacgatcacga

SEQ ID NO: 9731 - DNA, 662 bp, Artificial Sequence
  chemically treated genomic DNA (Homo sapiens) CpG-island No: 9731
gatttattcgtggttcgggaaaattattaaaattcgatatgcgggtttttaagttttttatagatttcggttattaaatttagaagtttttatgatcggtagatagcgtttttatatcgtatattaacgttttacggttcgattttagaattatcgttcgtttatttagcgtcgatcgtgttaacgttagcgagtatttaatatttagcgaggagatattaggtcgttcgtttagataggttattaacgtcgttgtttgcgcggatagcgtttcgggtgttttgttcgatattatttacggtattatcggaatatttacgatagaattcgaattcggtttcgtagattgattcggtattttcgggggttgttcgaggatgacgtgcgcgttagtattattgatttcgaacgacgatatttttattcgacgaatacgattatttttgggttagggcgtgtttttcgtaaggagttgaatcgttttcgtcgattaatttattttcggcgacggcgattttacgtgtaacgtgcgtggtagttgttcgtgtcgtatcgttattattattttgattatattagttatattcgtcgtcgtttgcgtatgatcgatgttcgatttgatcgattttaattataacggtcggttaggattacgattacgg

SEQ ID NO: 9732 - DNA, 662 bp, Artificial Sequence
  chemically treated genomic DNA (Homo sapiens) CpG-island No: 9732
ccgtaatcgtaatcctaaccgaccgttataattaaaatcgatcaaatcgaacatcgatcatacgcaaacgacgacgaatataactaatataatcaaaataataataacgatacgacacgaacaactaccacgcacgttacacgtaaaatcgccgtcgccgaaaataaattaatcgacgaaaacgattcaactccttacgaaaaacacgccctaacccaaaaataatcgtattcgtcgaataaaaatatcgtcgttcgaaatcaataatactaacgcgcacgtcatcctcgaacaacccccgaaaataccgaatcaatctacgaaaccgaattcgaattctatcgtaaatattccgataataccgtaaataatatcgaacaaaacacccgaaacgctatccgcgcaaacaacgacgttaataacctatctaaacgaacgacctaatatctcctcgctaaatattaaatactcgctaacgttaacacgatcgacgctaaataaacgaacgataattctaaaatcgaaccgtaaaacgttaatatacgatataaaaacgctatctaccgatcataaaaacttctaaatttaataaccgaaatctataaaaaacttaaaaacccgcatatcgaattttaataattttcccgaaccacgaataaatc

SEQ ID NO: 9733 - DNA, 505 bp, Artificial Sequence
  chemically treated genomic DNA (Homo sapiens) CpG-island No: 9733
  unsure (488)
gtttcgtcgtcgatatcgagcgtagttcgcgtttggcgttgggggtagggagaggtggagggagaggttggcggtcgggttttgcgattgtcgggttggatttatcggtcgggttcgtacggcggaggtcgaggttaggtcggtttgttcggttgtcggggttttagttttagaagttgtggggtcgcggttgcggttcgcgggtggggcggagtttcggggaggggttcggttgggggcggtgcggagggggttttgttaggggcggagaggcgggtgtcgcgttcgcgggttattttcggcgttcgttaacggtaatttgttatcggcgattaaggtttttgattttttaggggtcggttgtattgcgtttgaggtttgatgttttaatttacggcgtcggattacgttttgaggtcgttttttcgcgggttgtattacgatcgagtcgggttttttttaggggtcggaatacgaattcgggtcgnttagtgtagttattgga

SEQ ID NO: 9734 - DNA, 505 bp, Artificial Sequence
  chemically treated genomic DNA (Homo sapiens) CpG-island No: 9734
  unsure (18)
tccaataactacactaancgacccgaattcgtattccgacccctaaaaaaaacccgactcgatcgtaatacaacccgcgaaaaaacgacctcaaaacgtaatccgacgccgtaaattaaaacatcaaacctcaaacgcaatacaaccgacccctaaaaaatcaaaaaccttaatcgccgataacaaattaccgttaacgaacgccgaaaataacccgcgaacgcgacacccgcctctccgcccctaacaaaaccccctccgcaccgcccccaaccgaacccctccccgaaactccgccccacccgcgaaccgcaaccgcgaccccacaacttctaaaactaaaaccccgacaaccgaacaaaccgacctaacctcgacctccgccgtacgaacccgaccgataaatccaacccgacaatcgcaaaacccgaccgccaacctctccctccacctctccctacccccaacgccaaacgcgaactacgctcgatatcgacgacgaaac

SEQ ID NO: 9735 - DNA, 505 bp, Artificial Sequence
  chemically treated genomic DNA (Homo sapiens) CpG-island No: 9735
  unsure (18)
tttagtggttatattggncgattcgagttcgtgtttcgatttttagagagaattcggttcggtcgtggtgtagttcgcgaggagacgattttagggcgtaattcgacgtcgtgggttaagatattagattttaggcgtagtgtagtcggtttttgaggagttaaggattttgatcgtcgataataagttgtcgttggcgggcgtcgagggtgattcgcgagcgcggtattcgttttttcgtttttagtaggatttttttcgtatcgtttttagtcggattttttttcgaggtttcgttttattcgcgagtcgtagtcgcggttttatagtttttggggttggggtttcggtagtcgggtaggtcggtttgatttcgattttcgtcgtgcgggttcgatcggtgagtttagttcggtagtcgtaggattcggtcgttagtttttttttttatttttttttgtttttagcgttaggcgcgggttgcgttcggtgtcgacggcggggt

SEQ ID NO: 9736 - DNA, 505 bp, Artificial Sequence
  chemically treated genomic DNA (Homo sapiens) CpG-island No: 9736
  unsure (488)
accccgccgtcgacaccgaacgcaacccgcgcctaacgctaaaaacaaaaaaaaataaaaaaaaaaactaacgaccgaatcctacgactaccgaactaaactcaccgatcgaacccgcacgacgaaaatcgaaatcaaaccgacctacccgactaccgaaaccccaaccccaaaaactataaaaccgcgactacgactcgcgaataaaacgaaacctcgaaaaaaaatccgactaaaaacgatacgaaaaaaatcctactaaaaacgaaaaaacgaataccgcgctcgcgaatcaccctcgacgcccgccaacgacaacttattatcgacgatcaaaatccttaactcctcaaaaaccgactacactacgcctaaaatctaatatcttaacccacgacgtcgaattacgccctaaaatcgtctcctcgcgaactacaccacgaccgaaccgaattctctctaaaaatcgaaacacgaactcgaatcgnccaatataaccactaaa

SEQ ID NO: 9737 - DNA, 558 bp, Artificial Sequence
  chemically treated genomic DNA (Homo sapiens) CpG-island No: 9737
cgatacgagcgtatacgtcgttcgtttgttattgttagcgagtttagatgatagtttaagagcgtagtttatatattacgagtggtcgcgtcgcgcgttcgcgttagattcggttttttggtattgttgcgtttttgggttttcgcgatttgttgtttgttttattgttgcgtttttttttttatgcgttcgttgggtgttttcgttgttttcgtgtttgttcgtgttgttttttcgttattggcgtttttttgtgtttattggtttaagtttgggattttggcgttcgtattcggtgggaggttgttgtcgttaggtttcggttggtttgtgcgttttggtttttttcggatttgggcgtcgttcgtttgttttttcgtgggttttgtcggtttttttttttttcgttttcgcgtttttggtttcggttgcgggtttttgtgcgttttttttatttcgttcgttcgttcgcgggtcgtcgcgtcgcggtttttcgattttttttgggttttcgttcgttcgttttttttttcggtttcggttcgttttttttttttt

SEQ ID NO: 9738 - DNA, 558 bp, Artificial Sequence
  chemically treated genomic DNA (Homo sapiens) CpG-island No: 9738
aaaaaaaaaaaaacgaaccgaaaccgaaaaaaaaaacgaacgaacgaaaacccaaaaaaaatcgaaaaaccgcgacgcgacgacccgcgaacgaacgaacgaaataaaaaaaacgcacaaaaacccgcaaccgaaaccaaaaacgcgaaaacgaaaaaaaaaaaaaccgacaaaacccacgaaaaaacaaacgaacgacgcccaaatccgaaaaaaaccaaaacgcacaaaccaaccgaaacctaacgacaacaacctcccaccgaatacgaacgccaaaatcccaaacttaaaccaataaacacaaaaaaacgccaataacgaaaaaacaacacgaacaaacacgaaaacaacgaaaacacccaacgaacgcataaaaaaaaaaacgcaacaataaaacaaacaacaaatcgcgaaaacccaaaaacgcaacaataccaaaaaaccgaatctaacgcgaacgcgcgacgcgaccactcgtaatatataaactacgctcttaaactatcatctaaactcgctaacaataacaaacgaacgacgtatacgctcgtatcg

SEQ ID NO: 9739 - DNA, 558 bp, Artificial Sequence
  chemically treated genomic DNA (Homo sapiens) CpG-island No: 9739
ggaaagaggggggcgggtcgaagtcggaaggaggggcgaacggacggaggtttaaagggggtcgagaggtcgcggcgcggcggttcgcggacgggcgagcggagtagagggggcgtataggggttcgtagtcggagttagaagcgcggaagcgaggaagagaaggatcgataggatttacgagagagtaagcgagcggcgtttaaattcgaggagagttaaggcgtataagttagtcggaatttgacggtagtagttttttatcgagtgcgaacgttaaagttttaggtttaagttaatgagtataaggaagcgttagtaacgaaagaatagtacgagtagatacggggataacgagaatatttagcgagcgtatagaggaagaagcgtagtagtaaggtagatagtaggtcgcgaggatttaggagcgtaataatgttagaaagtcgagtttagcgcgagcgcgcgacgcgattattcgtggtgtgtgagttgcgtttttaggttgttatttaagttcgttagtagtagtaggcgggcggcgtgtgcgttcgtgtcg

SEQ ID NO: 9740 - DNA, 558 bp, Artificial Sequence
  chemically treated genomic DNA (Homo sapiens) CpG-island No: 9740
cgacacgaacgcacacgccgcccgcctactactactaacgaacttaaataacaacctaaaaacgcaactcacacaccacgaataatcgcgtcgcgcgctcgcgctaaactcgactttctaacattattacgctcctaaatcctcgcgacctactatctaccttactactacgcttcttcctctatacgctcgctaaatattctcgttatccccgtatctactcgtactattctttcgttactaacgcttccttatactcattaacttaaacctaaaactttaacgttcgcactcgataaaaaactactaccgtcaaattccgactaacttatacgccttaactctcctcgaatttaaacgccgctcgcttactctctcgtaaatcctatcgatccttctcttcctcgcttccgcgcttctaactccgactacgaacccctatacgccccctctactccgctcgcccgtccgcgaaccgccgcgccgcgacctctcgaccccctttaaacctccgtccgttcgcccctccttccgacttcgacccgcccccctctttcc

SEQ ID NO: 9741 - DNA, 947 bp, Artificial Sequence
  chemically treated genomic DNA (Homo sapiens) CpG-island No: 9741
ttcgtcgatttgtaattcgaaatattgtggttgttgttttcggagtcggttttttttttttttttttagttttaagagattcgcgcgtttttagagtttcgtaaagtttagcgcgttgcgttttttgggtagagcggtttttgttaggtattgcggttgtttcgaaagggcgtattgcgtttcgaggacgttcgattttcgaggtttcgattttcggaaaaggtcgggttgcgtcgagattttagttttggttggggtacgtttttgtggtttcgcgcgttttttcgagcgtcgagcggttttttttatcgttgcggttcgagggtgtttagcgtagttagatattataattttcggttcggtttagtttagttcggcggcgaagatgtgttttcggtcgtggcgtcgacgttttggttgttcgcgttttagcgcgtagttttagggtcggttcgcgtcggaggcggttgttatgttaggaatgtgagagttttaggttttttttcgggattaaagcgaattataaataattttttagcgtatcgttttttttcgtttttcgttttttttcgtttttttttttcggttttcgttttttttcggggaggcggcgttgttggtcgagcgtcggttcggttttcgagtttcgttttttcgcgtttagcgttttttaggtcgcggtgtgttcgtttttgttttatgttttgttttcggagttgttggagataatttaatttaattttgtttattatcgtttttatttttagtcgtcgattcgtttttattttttatttttaaatttatcgacgggacgatagtaagggttgtattacgcgtgttttggggttgttgcgggaggggatttcggttgtgtgtgtgtgtgtgtgtgtgtgtgcgtgtgtgtgtatcgggggaggtgggaaagggaggagggattgtaaagatat

SEQ ID NO: 9742 - DNA, 947 bp, Artificial Sequence
  chemically treated genomic DNA (Homo sapiens) CpG-island No: 9742
atatctttacaatccctcctccctttcccacctcccccgatacacacacacgcacacacacacacacacacacacacaaccgaaatcccctcccgcaacaaccccaaaacacgcgtaatacaacccttactatcgtcccgtcgataaatttaaaaataaaaaataaaaacgaatcgacgactaaaaataaaaacgataataaacaaaattaaattaaattatctccaacaactccgaaaacaaaacataaaacaaaaacgaacacaccgcgacctaaaaaacgctaaacgcgaaaaaacgaaactcgaaaaccgaaccgacgctcgaccaacaacgccgcctccccgaaaaaaaacgaaaaccgaaaaaaaaaaacgaaaaaaaacgaaaaacgaaaaaaaacgatacgctaaaaaattatttataattcgctttaatcccgaaaaaaaacctaaaactctcacattcctaacataacaaccgcctccgacgcgaaccgaccctaaaactacgcgctaaaacgcgaacaaccaaaacgtcgacgccacgaccgaaaacacatcttcgccgccgaactaaactaaaccgaaccgaaaattataatatctaactacgctaaacaccctcgaaccgcaacgataaaaaaaaccgctcgacgctcgaaaaaacgcgcgaaaccacaaaaacgtaccccaaccaaaactaaaatctcgacgcaacccgaccttttccgaaaatcgaaacctcgaaaatcgaacgtcctcgaaacgcaatacgccctttcgaaacaaccgcaatacctaacaaaaaccgctctacccaaaaaacgcaacgcgctaaactttacgaaactctaaaaacgcgcgaatctcttaaaactaaaaaaaaaaaaaaaaaaccgactccgaaaacaacaaccacaatatttcgaattacaaatcgacgaa

SEQ ID NO: 9743 - DNA, 947 bp, Artificial Sequence
  chemically treated genomic DNA (Homo sapiens) CpG-island No: 9743
atgtttttgtagtttttttttttttttttatttttttcggtatatatatacgtatatatatatatatatatatatatagtcggagttttttttcgtagtaattttaggatacgcgtggtatagtttttgttgtcgtttcgtcgatgggtttagggatgaagggtgagagcgggtcggcgattgggagtggaggcgataatgggtagagttggattaaattgtttttagtagtttcgaaggtaaagtatggggtaggggcggatatatcgcggtttggagggcgttgggcgcggaggaacggagttcgggggtcgggtcggcgttcggttagtagcgtcgttttttcggaggaaggcgggggtcgggaggagggagcgggagaaggcggagggcggaggagggcggtgcgttgagaggttatttgtggttcgttttgatttcgagggggaatttgaaatttttatatttttggtatagtagtcgttttcggcgcgggtcgattttggggttgcgcgttggggcgcgaatagttagagcgtcggcgttacggtcgagaatatattttcgtcgtcgagttgagttgggtcgagtcggaggttgtggtgtttgattgcgttgggtattttcgggtcgtagcggtaaggaaggtcgttcggcgttcgggagagcgcgcgaggttatagaaacgtgttttagttaaagttggagtttcggcgtaattcggtttttttcgggagtcggagtttcgaggatcgagcgttttcggggcgtagtgcgttttttcgaggtagtcgtagtgtttggtaagggtcgttttgtttagggagcgtagcgcgttgggttttgcggggttttagaaacgcgcgggttttttggggttgggggagaggggagagggtcgatttcggagataatagttatagtgtttcgggttgtaggtcggcggg

SEQ ID NO: 9744 - DNA, 947 bp, Artificial Sequence
  chemically treated genomic DNA (Homo sapiens) CpG-island No: 9744
cccgccgacctacaacccgaaacactataactattatctccgaaatcgaccctctcccctctcccccaaccccaaaaaacccgcgcgtttctaaaaccccgcaaaacccaacgcgctacgctccctaaacaaaacgacccttaccaaacactacgactacctcgaaaaaacgcactacgccccgaaaacgctcgatcctcgaaactccgactcccgaaaaaaaccgaattacgccgaaactccaactttaactaaaacacgtttctataacctcgcgcgctctcccgaacgccgaacgaccttccttaccgctacgacccgaaaatacccaacgcaatcaaacaccacaacctccgactcgacccaactcaactcgacgacgaaaatatattctcgaccgtaacgccgacgctctaactattcgcgccccaacgcgcaaccccaaaatcgacccgcgccgaaaacgactactataccaaaaatataaaaatttcaaattccccctcgaaatcaaaacgaaccacaaataacctctcaacgcaccgccctcctccgccctccgccttctcccgctccctcctcccgacccccgccttcctccgaaaaaacgacgctactaaccgaacgccgacccgacccccgaactccgttcctccgcgcccaacgccctccaaaccgcgatatatccgcccctaccccatactttaccttcgaaactactaaaaacaatttaatccaactctacccattatcgcctccactcccaatcgccgacccgctctcacccttcatccctaaacccatcgacgaaacgacaacaaaaactataccacgcgtatcctaaaattactacgaaaaaaaactccgactatatatatatatatatatatatatacgtatatatataccgaaaaaaataaaaaaaaaaaaaaaaactacaaaaacat

SEQ ID NO: 9745 - DNA, 930 bp, Artificial Sequence
  chemically treated genomic DNA (Homo sapiens) CpG-island No: 9745
ttttcgttcgtttttaggcgtcgatttcgattttagcgggtttcggacggcgtttttttttttttcgtcgtttttcggcggtcgagtcgcgcgtaacggagatatttaaatcgttttttcgggacggcggcgtggaagagatcggaaaggcggcggcggcgttggtttgggggtcggggcggtggtcgcgcgggttagggtcgcggagtcgggcgggtatttattagcgcgtgttgtcgtggaaatgttttagaattgcgtagtcgaagaacgagttagcggggttttggaagtgtacggggcgttgcgggtcgaggttgtaggcgttcgcggggattttcgcgagtattagcgttagtagtagcgcgcggtatttttcggcgtttttcggcgtagtcgggtcgtttatttttagtcggtcgtcgtttttttttttgttcggcgagtagggcgtcgagcgcgcgggtcgcggggttcgtcgacggttaggaagtttttcggtgcgggagttttgcgtttggatacgggcggaatgcgggcgtcgggttcgttatcggggcgcggacggcgggttgagcgggcgttgaaggcgagtataggggcggtttcgagcggcggcgtttttagttcgttcgagaagtttgcgcgagcgggtttcgggtcgggcggcgttggtttgcggaggggcgcgttcgcgaggtgggcggttcgggcggcggcggttggacggcgcggtagcgttttatgcgggtcgtgagttttgcgcgtatttttcgggcgggagttagtttttgggattcgtcggggcgtttcgaattgtttttttttcgtcgcgtacggggcgttcgggttttcggagataaggttgttttttttcgttattataggttttgtcggttttgttgggtttgtttttttgtttttgttttt

SEQ ID NO: 9746 - DNA, 930 bp, Artificial Sequence
  chemically treated genomic DNA (Homo sapiens) CpG-island No: 9746
aaaaacaaaaacaaaaaaacaaacccaacaaaaccgacaaaacctataataacgaaaaaaaacaaccttatctccgaaaacccgaacgccccgtacgcgacgaaaaaaaaacaattcgaaacgccccgacgaatcccaaaaactaactcccgcccgaaaaatacgcgcaaaactcacgacccgcataaaacgctaccgcgccgtccaaccgccgccgcccgaaccgcccacctcgcgaacgcgcccctccgcaaaccaacgccgcccgacccgaaacccgctcgcgcaaacttctcgaacgaactaaaaacgccgccgctcgaaaccgcccctatactcgccttcaacgcccgctcaacccgccgtccgcgccccgataacgaacccgacgcccgcattccgcccgtatccaaacgcaaaactcccgcaccgaaaaacttcctaaccgtcgacgaaccccgcgacccgcgcgctcgacgccctactcgccgaacaaaaaaaaaaacgacgaccgactaaaaataaacgacccgactacgccgaaaaacgccgaaaaataccgcgcgctactactaacgctaatactcgcgaaaatccccgcgaacgcctacaacctcgacccgcaacgccccgtacacttccaaaaccccgctaactcgttcttcgactacgcaattctaaaacatttccacgacaacacgcgctaataaatacccgcccgactccgcgaccctaacccgcgcgaccaccgccccgacccccaaaccaacgccgccgccgcctttccgatctcttccacgccgccgtcccgaaaaaacgatttaaatatctccgttacgcgcgactcgaccgccgaaaaacgacgaaaaaaaaaaaaacgccgtccgaaacccgctaaaatcgaaatcgacgcctaaaaacgaacgaaaa

SEQ ID NO: 9747 - DNA, 930 bp, Artificial Sequence
  chemically treated genomic DNA (Homo sapiens) CpG-island No: 9747
agagataaaggtagggagataggtttagtagggtcggtagagtttgtagtgacggaggggagtagttttattttcgggaattcgagcgtttcgtgcgcggcggggagggggtagttcggggcgtttcggcgggttttaggggttgattttcgttcgggaagtgcgcgtagggtttacggttcgtatggggcgttgtcgcgtcgtttagtcgtcgtcgttcgggtcgtttatttcgcgggcgcgttttttcgtagattagcgtcgttcggttcgggattcgttcgcgtagatttttcgggcggattgaggacgtcgtcgttcggggtcgtttttgtgttcgtttttagcgttcgtttagttcgtcgttcgcgtttcggtggcgggttcgacgttcgtatttcgttcgtgtttaggcgtagagttttcgtatcggggagttttttggtcgtcggcgggtttcgcggttcgcgcgttcggcgttttgttcgtcgggtagaggggaaggcggcggtcggttggggatgggcggttcggttgcgtcgaggggcgtcgggaggtatcgcgcgttgttgttggcgttggtgttcgcggggattttcgcgggcgtttataatttcgattcgtagcgtttcgtgtatttttagggtttcgttgattcgtttttcggttacgtagttttggagtatttttacgataatacgcgttggtgagtgttcgttcgatttcgcgattttggttcgcgcggttatcgtttcggtttttaggttagcgtcgtcgtcgttttttcggttttttttacgtcgtcgtttcgagggggcgatttaaatgttttcgttgcgcgcggttcggtcgtcgggggacggcgggagaagggaggacgtcgttcggggttcgttaaggtcggggtcggcgtttggaggcgggcggggg

SEQ ID NO: 9748 - DNA, 930 bp, Artificial Sequence
  chemically treated genomic DNA (Homo sapiens) CpG-island No: 9748
cccccgcccgcctccaaacgccgaccccgaccttaacgaaccccgaacgacgtcctcccttctcccgccgtcccccgacgaccgaaccgcgcgcaacgaaaacatttaaatcgccccctcgaaacgacgacgtaaaaaaaaccgaaaaaacgacgacgacgctaacctaaaaaccgaaacgataaccgcgcgaaccaaaatcgcgaaatcgaacgaacactcaccaacgcgtattatcgtaaaaatactccaaaactacgtaaccgaaaaacgaatcaacgaaaccctaaaaatacacgaaacgctacgaatcgaaattataaacgcccgcgaaaatccccgcgaacaccaacgccaacaacaacgcgcgatacctcccgacgcccctcgacgcaaccgaaccgcccatccccaaccgaccgccgccttcccctctacccgacgaacaaaacgccgaacgcgcgaaccgcgaaacccgccgacgaccaaaaaactccccgatacgaaaactctacgcctaaacacgaacgaaatacgaacgtcgaacccgccaccgaaacgcgaacgacgaactaaacgaacgctaaaaacgaacacaaaaacgaccccgaacgacgacgtcctcaatccgcccgaaaaatctacgcgaacgaatcccgaaccgaacgacgctaatctacgaaaaaacgcgcccgcgaaataaacgacccgaacgacgacgactaaacgacgcgacaacgccccatacgaaccgtaaaccctacgcgcacttcccgaacgaaaatcaacccctaaaacccgccgaaacgccccgaactaccccctccccgccgcgcacgaaacgctcgaattcccgaaaataaaactactcccctccgtcactacaaactctaccgaccctactaaacctatctccctacctttatctct

SEQ ID NO: 9749 - DNA, 734 bp, Artificial Sequence
  chemically treated genomic DNA (Homo sapiens) CpG-island No: 9749
gtgatcgtgattttggtcggtcgttgtggttggggtcggttaagtcgaatatcggttatacgtaagcggcggcgggtgtggttggtgtgattaagatggtgatggcgatgcggtacgggtagttgttacgtacgttgtacgtggaatcgtcgtcgtcggaggtggattggtcggcggggacggtttaattttttacggagaatacgttttggtttaggagtggtcgtgttcgtcgggtgggggtgtcgtcgttcgggattagtggtattaacgcgtacgttattttcgaatagttttcgggagtgtcgagttagtttgcggggtcgggttcgggttttgtcgtggatgtttcggtggtgtcgtggatggtgtcgggtaaaatattcgaagcgttattcgcgtaggtaacggcgttgatgatttatttggacgagcgatttgatgttttttcgttggatgttgggtattcgttggcgttgatacggtcggcgttggatgagcgagcggtggtgttggggtcggacgtgaaatttgttgtgcggtgtgaagcgttgtttgtcggttatgaggtttttgggttggtgatcggatttgtgggggttcggggtcgtatcgggtttgtgtttttcggttaaggtggttagtggttaggggatcggtcgggggttttatcgggtttttttaggtgttcgttgttgtttttgacgaatttgtgtcgagttggatgtatattt

SEQ ID NO: 9750 - DNA, 734 bp, Artificial Sequence
  chemically treated genomic DNA (Homo sapiens) CpG-island No: 9750
aaatatacatccaactcgacacaaattcgtcaaaaacaacaacgaacacctaaaaaaacccgataaaacccccgaccgatcccctaaccactaaccaccttaaccgaaaaacacaaacccgatacgaccccgaacccccacaaatccgatcaccaacccaaaaacctcataaccgacaaacaacgcttcacaccgcacaacaaatttcacgtccgaccccaacaccaccgctcgctcatccaacgccgaccgtatcaacgccaacgaatacccaacatccaacgaaaaaacatcaaatcgctcgtccaaataaatcatcaacgccgttacctacgcgaataacgcttcgaatattttacccgacaccatccacgacaccaccgaaacatccacgacaaaacccgaacccgaccccgcaaactaactcgacactcccgaaaactattcgaaaataacgtacgcgttaataccactaatcccgaacgacgacacccccacccgacgaacacgaccactcctaaaccaaaacgtattctccgtaaaaaattaaaccgtccccgccgaccaatccacctccgacgacgacgattccacgtacaacgtacgtaacaactacccgtaccgcatcgccatcaccatcttaatcacaccaaccacacccgccgccgcttacgtataaccgatattcgacttaaccgaccccaaccacaacgaccgaccaaaatcacgatcac

SEQ ID NO: 9751 - DNA, 734 bp, Artificial Sequence
  chemically treated genomic DNA (Homo sapiens) CpG-island No: 9751
ggatgtgtatttagttcggtataagttcgttagaggtagtagcgaatatttgaaaaggttcggtaaagttttcggtcgattttttagttattgattattttgatcggaaaatataaattcgatgcggtttcgagtttttatagattcggttattaatttagaagttttatgatcggtagatagcgttttatatcgtataataagttttacgttcgattttagtattatcgttcgtttatttagcgtcgatcgtgttaacgttagcgagtatttaatatttagcgaggagatattaggtcgttcgtttagataggttattaacgtcgttgtttgcgcggatagcgtttcgggtgttttgttcgatattatttacggtattatcggaatatttacgatagaattcgaattcggtttcgtagattgattcggtattttcgggggttgttcgaggatgacgtgcgcgttagtattattgatttcgaacgacgatatttttattcgacgaatacgattatttttgggttagggcgtgtttttcgtaaggagttgaatcgttttcgtcgattaatttattttcggcgacggcgattttacgtgtaacgtgcgtggtagttgttcgtgtcgtatcgttattattattttgattatattagttatattcgtcgtcgtttgcgtatgatcgatgttcgatttgatcgattttaattataacggtcggttaggattacgattat

SEQ ID NO: 9752 - DNA, 734 bp, Artificial Sequence
  chemically treated genomic DNA (Homo sapiens) CpG-island No: 9752
ataatcgtaatcctaaccgaccgttataattaaaatcgatcaaatcgaacatcgatcatacgcaaacgacgacgaatataactaatataatcaaaataataataacgatacgacacgaacaactaccacgcacgttacacgtaaaatcgccgtcgccgaaaataaattaatcgacgaaaacgattcaactccttacgaaaaacacgccctaacccaaaaataatcgtattcgtcgaataaaaatatcgtcgttcgaaatcaataatactaacgcgcacgtcatcctcgaacaacccccgaaaataccgaatcaatctacgaaaccgaattcgaattctatcgtaaatattccgataataccgtaaataatatcgaacaaaacacccgaaacgctatccgcgcaaacaacgacgttaataacctatctaaacgaacgacctaatatctcctcgctaaatattaaatactcgctaacgttaacacgatcgacgctaaataaacgaacgataatactaaaatcgaacgtaaaacttattatacgatataaaacgctatctaccgatcataaaacttctaaattaataaccgaatctataaaaactcgaaaccgcatcgaatttatattttccgatcaaaataatcaataactaaaaaatcgaccgaaaactttaccgaaccttttcaaatattcgctactacctctaacgaacttataccgaactaaatacacatcc

SEQ ID NO: 9753 - DNA, 761 bp, Artificial Sequence
  chemically treated genomic DNA (Homo sapiens) CpG-island No: 9753
tgtcgtcggtttttatttaggtcgaggtggttcggttttatgtatcgcgacgtaacgcggggaggtagataaggtatagggcggcgtttataatttatgttaattcgttttatgtgttcgtcgaggcggtataaatcgtcgtgacgattagcggtttaatgatcgaagttaggttggtaagagtcgcgagcgatttttgaagttgtttttgatggtcgttatttatttgtttggatagtatggtttgtaacgcgggtatttcgatgtcgtcggaagcgagaagaattataatggggaaggttatttagtttcgcgtcgcgaacgttagtaagacgtagtttagcgcgtcggtcgttatgtcggcgataatggtttgtttttcgtcgaaacgtttggtggcgggattagtgacgaaggtttgagcgagggcgtgtaagatttcgaatatcgtaagcgataggtcgattatcgtcgcgttttagcgaaagcggttttcgtcgaaaatgatttagagcgttgtcggtatttgttttacgagttgtatgataaagaagatagttataagtgcggcgacgatagttatgtttcgcgtttatcggaaggagttgattgggttgaaggtttttaagggtatcgagttgtatgataaagaagatagttataagtgcggcgacgatagttatgtttcgcgtttatcggaaggagttgattgggttgaaggtttttaagggtatcggtcgagtttgatattgtaggattat

SEQ ID NO: 9754 - DNA, 761 bp, Artificial Sequence
  chemically treated genomic DNA (Homo sapiens) CpG-island No: 9754
ataatcctacaatatcaaactcgaccgatacccttaaaaaccttcaacccaatcaactccttccgataaacgcgaaacataactatcgtcgccgcacttataactatcttctttatcatacaactcgatacccttaaaaaccttcaacccaatcaactccttccgataaacgcgaaacataactatcgtcgccgcacttataactatcttctttatcatacaactcgtaaaacaaataccgacaacgctctaaatcattttcgacgaaaaccgctttcgctaaaacgcgacgataatcgacctatcgcttacgatattcgaaatcttacacgccctcgctcaaaccttcgtcactaatcccgccaccaaacgtttcgacgaaaaacaaaccattatcgccgacataacgaccgacgcgctaaactacgtcttactaacgttcgcgacgcgaaactaaataaccttccccattataattcttctcgcttccgacgacatcgaaatacccgcgttacaaaccatactatccaaacaaataaataacgaccatcaaaaacaacttcaaaaatcgctcgcgactcttaccaacctaacttcgatcattaaaccgctaatcgtcacgacgatttataccgcctcgacgaacacataaaacgaattaacataaattataaacgccgccctataccttatctacctccccgcgttacgtcgcgatacataaaaccgaaccacctcgacctaaataaaaaccgacgaca

SEQ ID NO: 9755 - DNA, 761 bp, Artificial Sequence
  chemically treated genomic DNA (Homo sapiens) CpG-island No: 9755
atagttttataatgttaagttcgatcgatgtttttgagagtttttaatttagttagtttttttcggtgggcgcggggtatgattatcgtcgtcgtatttatgattgttttttttattatgtaattcgatgtttttgagagtttttaatttagttagtttttttcggtgggcgcggggtatgattatcgtcgtcgtatttatgattgttttttttattatgtaattcgtaggataggtgtcggtagcgttttgggttattttcggcgaggatcgttttcgttggagcgcgacgatgatcggtttgtcgtttgcggtattcggaattttgtacgttttcgtttaagttttcgttattggtttcgttattaaacgtttcggcgagaagtaggttattatcgtcggtatggcggtcgacgcgttgggttacgttttgttggcgttcgcgacgcgaggttggatggttttttttattatgatttttttcgttttcggcggtatcgggatgttcgcgttgtaggttatgttgtttaggtaggtagatgacgattattagggatagttttaaggatcgttcgcggtttttattagtttaatttcgattattggatcgttgatcgttacggcgatttatgtcgtttcggcgagtatatggaacgggttggtatggattgtaggcgtcgttttatattttgtttgttttttcgcgttgcgtcgcggtgtatggagtcgggttatttcgatttgaatggaagtcggcggta

SEQ ID NO: 9756 - DNA, 761 bp, Artificial Sequence
  chemically treated genomic DNA (Homo sapiens) CpG-island No: 9756
taccgccgacttccattcaaatcgaaataacccgactccatacaccgcgacgcaacgcgaaaaaacaaacaaaatataaaacgacgcctacaatccataccaacccgttccatatactcgccgaaacgacataaatcgccgtaacgatcaacgatccaataatcgaaattaaactaataaaaaccgcgaacgatccttaaaactatccctaataatcgtcatctacctacctaaacaacataacctacaacgcgaacatcccgataccgccgaaaacgaaaaaaatcataataaaaaaaaccatccaacctcgcgtcgcgaacgccaacaaaacgtaacccaacgcgtcgaccgccataccgacgataataacctacttctcgccgaaacgtttaataacgaaaccaataacgaaaacttaaacgaaaacgtacaaaattccgaataccgcaaacgacaaaccgatcatcgtcgcgctccaacgaaaacgatcctcgccgaaaataacccaaaacgctaccgacacctatcctacgaattacataataaaaaaaacaatcataaatacgacgacgataatcataccccgcgcccaccgaaaaaaactaactaaattaaaaactctcaaaaacatcgaattacataataaaaaaaacaatcataaatacgacgacgataatcataccccgcgcccaccgaaaaaaactaactaaattaaaaactctcaaaaacatcgatcgaacttaacattataaaactat

SEQ ID NO: 9757 - DNA, 718 bp, Artificial Sequence
  chemically treated genomic DNA (Homo sapiens) CpG-island No: 9757
ggtcggcgaggttcgggggcgtcgcgtcgagttgcggtttttttttttaattttttcgggcgtcgttattttttttttttttagtattagggtatttgtacggcgcgattgaggaaggtgtttgcgtcggtcgttagtttttttacgttgaagtttatgatatttattttaggcggtagtcgggcggagtcggtcgatttagcggcggcgaggcggaggtgtcgcggtcgggttggggcgtagggttagagcggcgagggtagacgtggtaggtggagggaggcggcgttagtttcgtagtcgtagttgtcgttttcgtgaacggggaggatgaaggcggggcgagggaggagaataagcgcgcggcggtagcgttaaggatgggttagtcggttcggagaacggtcgttaacgtcgacgatgggtttcgcgggcgagtcggagatggacgggcgatttcgtcgtgtggattcgggttttaagggaaaaataagcgcgggtcgcggggcggagtttttttcgaggttatcgcgggaatagcgattttttgaggattgcggcggcgtagtttcggggcgcgtcgggagtttcgttcggtttttgtggaggaagcggcgagggcgagtcgcggggtttcggcgtttttgtatgtttgtatttaacgagaatttagagcgaatacgatttatatttttttttttgttttaagaggaaatat

SEQ ID NO: 9758 - DNA, 718 bp, Artificial Sequence
  chemically treated genomic DNA (Homo sapiens) CpG-island No: 9758
atatttcctcttaaaacaaaaaaaaaaatataaatcgtattcgctctaaattctcgttaaatacaaacatacaaaaacgccgaaaccccgcgactcgccctcgccgcttcctccacaaaaaccgaacgaaactcccgacgcgccccgaaactacgccgccgcaatcctcaaaaaatcgctattcccgcgataacctcgaaaaaaactccgccccgcgacccgcgcttatttttcccttaaaacccgaatccacacgacgaaatcgcccgtccatctccgactcgcccgcgaaacccatcgtcgacgttaacgaccgttctccgaaccgactaacccatccttaacgctaccgccgcgcgcttattctcctccctcgccccgccttcatcctccccgttcacgaaaacgacaactacgactacgaaactaacgccgcctccctccacctaccacgtctaccctcgccgctctaaccctacgccccaacccgaccgcgacacctccgcctcgccgccgctaaatcgaccgactccgcccgactaccgcctaaaataaatatcataaacttcaacgtaaaaaaactaacgaccgacgcaaacaccttcctcaatcgcgccgtacaaataccctaatactaaaaaaaaaaaaaataacgacgcccgaaaaaattaaaaaaaaaaaccgcaactcgacgcgacgcccccgaacctcgccgacc

SEQ ID NO: 9759 - DNA, 718 bp, Artificial Sequence
  chemically treated genomic DNA (Homo sapiens) CpG-island No: 9759
atatttttttttaaaataaaaagagaaatgtgggtcgtgttcgttttgggttttcgttaagtgtaagtatatagaggcgtcgagatttcgcggttcgttttcgtcgttttttttataggagtcgggcggagttttcggcgcgtttcggggttgcgtcgtcgtaatttttaaggggtcgttgttttcgcgataatttcgagaaaggtttcgtttcgcggttcgcgtttgttttttttttgggattcgggtttatacggcggggtcgttcgtttattttcggttcgttcgcggggtttatcgtcgacgttagcggtcgtttttcgagtcgattgatttatttttggcgttgtcgtcgcgcgtttgtttttttttttcgtttcgtttttatttttttcgtttacggaaacgatagttgcggttgcggggttggcgtcgtttttttttatttattacgtttgttttcgtcgttttagttttgcgttttagttcggtcgcggtattttcgtttcgtcgtcgttaggtcggtcggtttcgttcggttgtcgtttaggatgaatattatggattttaacgtgaagaagttggcggtcgacgtaggtattttttttagtcgcgtcgtgtaggtattttggtgttggggggaaaaggggtggcggcgttcgggaaggttgagggaggggatcgtagttcgacgcggcgttttcgggtttcgtcgatt

SEQ ID NO: 9760 - DNA, 718 bp, Artificial Sequence
  chemically treated genomic DNA (Homo sapiens) CpG-island No: 9760
aatcgacgaaacccgaaaacgccgcgtcgaactacgatcccctccctcaaccttcccgaacgccgccaccccttttccccccaacaccaaaatacctacacgacgcgactaaaaaaaatacctacgtcgaccgccaacttcttcacgttaaaatccataatattcatcctaaacgacaaccgaacgaaaccgaccgacctaacgacgacgaaacgaaaataccgcgaccgaactaaaacgcaaaactaaaacgacgaaaacaaacgtaataaataaaaaaaaacgacgccaaccccgcaaccgcaactatcgtttccgtaaacgaaaaaaataaaaacgaaacgaaaaaaaaaaacaaacgcgcgacgacaacgccaaaaataaatcaatcgactcgaaaaacgaccgctaacgtcgacgataaaccccgcgaacgaaccgaaaataaacgaacgaccccgccgtataaacccgaatcccaaaaaaaaaacaaacgcgaaccgcgaaacgaaacctttctcgaaattatcgcgaaaacaacgaccccttaaaaattacgacgacgcaaccccgaaacgcgccgaaaactccgcccgactcctataaaaaaaacgacgaaaacgaaccgcgaaatctcgacgcctctatatacttacacttaacgaaaacccaaaacgaacacgacccacatttctctttttattttaaaaaaaaatat

SEQ ID NO: 9761 - DNA, 567 bp, Artificial Sequence
  chemically treated genomic DNA (Homo sapiens) CpG-island No: 9761
atcgtcggaatgggtgattcgtattgttcgtggattatcgttttatttgttgcgatcgtgtatttgggttgggtcgtttcgttgtttattttcgttttttagattttttttttatcgttcgcgtggttggttttttaatttgttattgtatttggagttcggtgggttcggtgggtgtttttattttagataggtcggataatggtggttcgtcgagttgggtcgtatggtcgtattgcgtttttgcgtatattacgttttggttcggttacgtgtattggttattgtgtatagtggttgtgttggtacgttgtttgcggtgtttatgggtagggtgggtttgtacggtcgggtcggtacgtgtgggttgtgttgcggtgtgcgcgtgtcgtggtttgtgggtacgatttgtgtgttttggtgttgtagttgggtatttcgggttttgtcgcgtgtacgtattatttcgcgggtttggcgaggttggcgggtgtgcgtcgtgggtttggggggttgtggtcgttgggttagggttgtgatttggtgttggcgaggggtttgagtttt

SEQ ID NO: 9762 - DNA, 567 bp, Artificial Sequence
  chemically treated genomic DNA (Homo sapiens) CpG-island No: 9762
aaaactcaaacccctcgccaacaccaaatcacaaccctaacccaacgaccacaaccccccaaacccacgacgcacacccgccaacctcgccaaacccgcgaaataatacgtacacgcgacaaaacccgaaatacccaactacaacaccaaaacacacaaatcgtacccacaaaccacgacacgcgcacaccgcaacacaacccacacgtaccgacccgaccgtacaaacccaccctacccataaacaccgcaaacaacgtaccaacacaaccactatacacaataaccaatacacgtaaccgaaccaaaacgtaatatacgcaaaaacgcaatacgaccatacgacccaactcgacgaaccaccattatccgacctatctaaaataaaaacacccaccgaacccaccgaactccaaatacaataacaaattaaaaaaccaaccacgcgaacgataaaaaaaaaatctaaaaaacgaaaataaacaacgaaacgacccaacccaaatacacgatcgcaacaaataaaacgataatccacgaacaatacgaatcacccattccgacgat

SEQ ID NO: 9763 - DNA, 567 bp, Artificial Sequence
  chemically treated genomic DNA (Homo sapiens) CpG-island No: 9763
agagtttaagtttttcgttagtattaagttataattttggtttaacgattatagttttttaaatttacgacgtatattcgttaatttcgttaaattcgcgaaatagtacgtatacgcggtaggattcgaaatatttaattatagtattaaaatatataaatcgtatttatagattacgatacgcgtatatcgtagtataatttatacgtgtcgattcgatcgtatagatttattttgtttataggtatcgtaagtaacgtattagtataattattgtatataatagttagtatacgtaatcgggttaaaacgtagtatacgtaggggcgtaatgcgattatacgatttaattcggcgagttattattattcgatttgtttaaagtgaggatatttatcgggtttatcgggttttaagtgtaatagtaagttaagggattagttacgcggacggtagagggaaggtttagaaaacgggagtgagtagcgaaacggtttagtttagatgtacggtcgtagtagataggacggtaatttacgggtaatgcgggttatttatttcggcgat

SEQ ID NO: 9764 - DNA, 567 bp, Artificial Sequence
  chemically treated genomic DNA (Homo sapiens) CpG-island No: 9764
atcgccgaaataaataacccgcattacccgtaaattaccgtcctatctactacgaccgtacatctaaactaaaccgtttcgctactcactcccgttttctaaaccttccctctaccgtccgcgtaactaatcccttaacttactattacacttaaaacccgataaacccgataaatatcctcactttaaacaaatcgaataataataactcgccgaattaaatcgtataatcgcattacgcccctacgtatactacgttttaacccgattacgtatactaactattatatacaataattatactaatacgttacttacgatacctataaacaaaataaatctatacgatcgaatcgacacgtataaattatactacgatatacgcgtatcgtaatctataaatacgatttatatattttaatactataattaaatatttcgaatcctaccgcgtatacgtactatttcgcgaatttaacgaaattaacgaatatacgtcgtaaatttaaaaaactataatcgttaaaccaaaattataacttaatactaacgaaaaacttaaactct

SEQ ID NO: 9765 - DNA, 534 bp, Artificial Sequence
  chemically treated genomic DNA (Homo sapiens) CpG-island No: 9765
attgacggtcgtcgtttcgcgtcgttttatatattgtttgtagttgttgcgtggcgtgttcgtgcggtattacgttgtttttggtcggagtgttgtttatttgtttggagtttcgttgatcgatcgttgtttgtcgatttcgtaatttgtttggcgatattttttggggttttagttattatatattggttcggtgcgttttaaaattatgtgcgcggttgtgtttgtacgaatatcgatttttatatttcgtgggtaaatttgtgattatttcgacggaatacgacgttattataatggtcggttgtgtttaattttatggtcggacgttttttttatatagcggcggaaaagttgatttggggttggtttcgatttgtatgtcgttttttacgttatatttttttgtttatttcgtgcgtatattttcgatacgcgttgacgtttgcgtaattttgcgggtatcgttgcgagtatttaattataagaatgattgggtaatacgtgcgtgagcgttgttaatttggtacgtcg

SEQ ID NO: 9766 - DNA, 534 bp, Artificial Sequence
  chemically treated genomic DNA (Homo sapiens) CpG-island No: 9766
cgacgtaccaaattaacaacgctcacgcacgtattacccaatcattcttataattaaatactcgcaacgatacccgcaaaattacgcaaacgtcaacgcgtatcgaaaatatacgcacgaaataaacaaaaaaatataacgtaaaaaacgacatacaaatcgaaaccaaccccaaatcaacttttccgccgctatataaaaaaaacgtccgaccataaaattaaacacaaccgaccattataataacgtcgtattccgtcgaaataatcacaaatttacccacgaaatataaaaatcgatattcgtacaaacacaaccgcgcacataattttaaaacgcaccgaaccaatatataataactaaaaccccaaaaaatatcgccaaacaaattacgaaatcgacaaacaacgatcgatcaacgaaactccaaacaaataaacaacactccgaccaaaaacaacgtaataccgcacgaacacgccacgcaacaactacaaacaatatataaaacgacgcgaaacgacgaccgtcaat

SEQ ID NO: 9767 - DNA, 534 bp, Artificial Sequence
  chemically treated genomic DNA (Homo sapiens) CpG-island No: 9767
cgacgtattaaattagtaacgtttacgtacgtgttatttaattatttttgtaattggatattcgtaacggtgttcgtagggttacgtaagcgttaacgcgtgtcgggggtatacgtacggggtggataaaaaaatgtagcgtagggggcggtatgtaggtcgaggttaattttaggttagttttttcgtcgttatatgaaaaaggcgttcggttatgaaattaggtataatcggttattatagtagcgtcgtatttcgtcggggtggttataggtttgtttacggggtataggggtcgatattcgtgtaagtatagtcgcgtatatagttttaaaacgtatcgggttaatgtgtaatagttaaggttttagggggtatcgttaagtaaattacggggtcggtaagtagcggtcggttaacggggttttaggtaggtgggtagtatttcggttaggaatagcgtggtgtcgtacgagtacgttacgtagtagttgtaggtaatgtgtaaagcggcgcggggcggcgatcgttagt

SEQ ID NO: 9768 - DNA, 534 bp, Artificial Sequence
  chemically treated genomic DNA (Homo sapiens) CpG-island No: 9768
actaacgatcgccgccccgcgccgctttacacattacctacaactactacgtaacgtactcgtacgacaccacgctattcctaaccgaaatactacccacctacctaaaaccccgttaaccgaccgctacttaccgaccccgtaatttacttaacgataccccctaaaaccttaactattacacattaacccgatacgttttaaaactatatacgcgactatacttacacgaatatcgacccctataccccgtaaacaaacctataaccaccccgacgaaatacgacgctactataataaccgattatacctaatttcataaccgaacgcctttttcatataacgacgaaaaaactaacctaaaattaacctcgacctacataccgccccctacgctacatttttttatccaccccgtacgtatacccccgacacgcgttaacgcttacgtaaccctacgaacaccgttacgaatatccaattacaaaaataattaaataacacgtacgtaaacgttactaatttaatacgtcg

SEQ ID NO: 9769 - DNA, 571 bp, Artificial Sequence
  chemically treated genomic DNA (Homo sapiens) CpG-island No: 9769
  unsure (403)
tatagtggtgagcggtgggggttgggtagacgcgcgcggagacgtcgcgggtcgggtgtgcgtagtttcgggtttggtacgcggacggcgtagttgggtatggatgatatgtagtgggtcgttacgtatgatggggggtgtattattgagcggatttgtcgcgttggttattgttagtagaagtgttgcgtgggtttcgtggagtttagtcgttgtgggtggtcggacgggtgtattacggtcgggtagttatagcgcgcgtagggggggcgtcggaggtggttggttttaggagttgcgggttcggcgatttttgcgtatgtgttttgtggtttcgcgcgttgtggttattgtgtttcggggtagatgtgttgttggtgagggttttcgttcgtggtggtgngtatatagattaagagtatatggatacgcgggcgggggcggggtgtgagcgggcgcgtcgtgagtgggtcgggcggtgggggtgtggggtgggtcgttggcggtgtgtggtgtgtcgggagttatatacgggtgatagatatttaatgaatgttggtgggggggtggg

SEQ ID NO: 9770 - DNA, 571 bp, Artificial Sequence
  chemically treated genomic DNA (Homo sapiens) CpG-island No: 9770
  unsure (169)
cccacccccccaccaacattcattaaatatctatcacccgtatataactcccgacacaccacacaccgccaacgacccaccccacacccccaccgcccgacccactcacgacgcgcccgctcacaccccgcccccgcccgcgtatccatatactcttaatctatatacncaccaccacgaacgaaaaccctcaccaacaacacatctaccccgaaacacaataaccacaacgcgcgaaaccacaaaacacatacgcaaaaatcgccgaacccgcaactcctaaaaccaaccacctccgacgccccccctacgcgcgctataactacccgaccgtaatacacccgtccgaccacccacaacgactaaactccacgaaacccacgcaacacttctactaacaataaccaacgcgacaaatccgctcaataatacaccccccatcatacgtaacgacccactacatatcatccatacccaactacgccgtccgcgtaccaaacccgaaactacgcacacccgacccgcgacgtctccgcgcgcgtctacccaacccccaccgctcaccactata

SEQ ID NO: 9771 - DNA, 571 bp, Artificial Sequence
  chemically treated genomic DNA (Homo sapiens) CpG-island No: 9771
  unsure (169)
tttatttttttattaatatttattaagtgtttattattcgtatgtgattttcgatatattatatatcgttagcgatttattttatatttttatcgttcgatttatttacgacgcgttcgtttatatttcgttttcgttcgcgtatttatgtatttttgatttgtatatntattattacgaacgaagatttttattaataatatatttatttcgaggtataatggttatagcgcgcgaaattataggatatatgcgtaaagatcgtcggattcgtaatttttggggttagttattttcgacgttttttttacgcgcgttgtgattattcgatcgtagtatattcgttcggttatttataacggttgggttttacgaagtttacgtaatatttttattaatagtgattaacgcggtaaattcgtttagtggtatattttttattatacgtaacggtttattatatgttatttatatttaattacgtcgttcgcgtattaagttcgaagttacgtatattcggttcgcggcgttttcgcgcgcgtttatttaatttttatcgtttattattgtg

SEQ ID NO: 9772 - DNA, 571 bp, Artificial Sequence
  chemically treated genomic DNA (Homo sapiens) CpG-island No: 9772
  unsure (403)
cacaataataaacgataaaaattaaataaacgcgcgcgaaaacgccgcgaaccgaatatacgtaacttcgaacttaatacgcgaacgacgtaattaaatataaataacatataataaaccgttacgtataataaaaaatataccactaaacgaatttaccgcgttaatcactattaataaaaatattacgtaaacttcgtaaaacccaaccgttataaataaccgaacgaatatactacgatcgaataatcacaacgcgcgtaaaaaaaacgtcgaaaataactaaccccaaaaattacgaatccgacgatctttacgcatatatcctataatttcgcgcgctataaccattatacctcgaaataaatatattattaataaaaatcttcgttcgtaataatanatatacaaatcaaaaatacataaatacgcgaacgaaaacgaaatataaacgaacgcgtcgtaaataaatcgaacgataaaaatataaaataaatcgctaacgatatataatatatcgaaaatcacatacgaataataaacacttaataaatattaataaaaaaataaa

SEQ ID NO: 9773 - DNA, 746 bp, Artificial Sequence
  chemically treated genomic DNA (Homo sapiens) CpG-island No: 9773
  unsure (457)
gttcgtcgggtaggtagcgtttttcgcggcgtttcgttatttttttttttttttttattggtaggggttcgggttcgggcggaagtggggtaggcgggcgggagcgaggcgttatcgtgtatatttatgaggcgcgcgtagtttagtatgttaatgaggcggggcgcgcggtcggttaagaaggttgttgggcggcggcggtggttgttggttcgggtagtcgggcgcgagcggcgtagataaggggttatttgtcggcgttaataggatatggagtcgttcggcgggggtttggggttcggtcgcggtattcggataagaagaagggtcggagttcggatgagttgtttgcgacgggcggcgcggcggtaaatataagaaatttgtgagtgttttttttattttgtttttcgtttggcggagtggtcgttttttggattcgggcgattttcgttgntttcgggggcgttttgttgtagttggggagtcgtttcgagtttttttttggttggtggttttgggttcgcggtttatttttttttcggggaatcgggggtcgtgttttttgtgttcgttcggtttttgggattttcgcgggagacgtagggttggtcgttttagtttcggggttagttatttatttgcgggttttatatatgttttcgtaatatattttgtcgcgttaggggaatttcgtagcgggaggggttggagcgttgttgatatcgcgtaatggattaattcgt

SEQ ID NO: 9774 - DNA, 746 bp, Artificial Sequence
  chemically treated genomic DNA (Homo sapiens) CpG-island No: 9774
  unsure (290)
acgaattaatccattacgcgatatcaacaacgctccaacccctcccgctacgaaattcccctaacgcgacaaaatatattacgaaaacatatataaaacccgcaaataaataactaaccccgaaactaaaacgaccaaccctacgtctcccgcgaaaatcccaaaaaccgaacgaacacaaaaaacacgacccccgattccccgaaaaaaaaataaaccgcgaacccaaaaccaccaaccaaaaaaaaactcgaaacgactccccaactacaacaaaacgcccccgaaancaacgaaaatcgcccgaatccaaaaaacgaccactccgccaaacgaaaaacaaaataaaaaaaacactcacaaatttcttatatttaccgccgcgccgcccgtcgcaaacaactcatccgaactccgacccttcttcttatccgaataccgcgaccgaaccccaaacccccgccgaacgactccatatcctattaacgccgacaaataaccccttatctacgccgctcgcgcccgactacccgaaccaacaaccaccgccgccgcccaacaaccttcttaaccgaccgcgcgccccgcctcattaacatactaaactacgcgcgcctcataaatatacacgataacgcctcgctcccgcccgcctaccccacttccgcccgaacccgaacccctaccaataaaaaaaaaaaaaaaaataacgaaacgccgcgaaaaacgctacctacccgacgaac

SEQ ID NO: 9775 - DNA, 746 bp, Artificial Sequence
  chemically treated genomic DNA (Homo sapiens) CpG-island No: 9775
  unsure (290)
gcgaattgatttattgcgcgatattagtagcgttttaatttttttcgttgcggaatttttttggcgcggtaagatatattgcggagatatgtgtggggttcgtaaataggtggttaatttcggggttggagcggttaattttgcgtttttcgcgggagttttaggggtcgagcgggtataggggatacggttttcgatttttcgaggggaaaatgggtcgcgagtttagagttattaattagaaggaagttcggggcggttttttagttgtagtaagacgttttcgaggntagcgagggtcgttcgagtttagagggcggttatttcgttaggcgaagagtagggtgggagggatatttataaattttttatgtttgtcgtcgcgtcgttcgtcgtaggtagtttattcgggtttcgatttttttttttgttcgggtatcgcggtcgggttttaggttttcgtcggacggttttatgttttgttagcgtcggtaagtgattttttgtttacgtcgttcgcgttcggttgttcgagttagtaattatcgtcgtcgtttagtagtttttttagtcggtcgcgcgtttcgttttattaatatgttgggttgcgcgcgttttatgaatatatacggtgacgtttcgttttcgttcgtttgttttattttcgttcggattcgagtttttattaatgggggaagggaggggggtggcgggacgtcgcggaaggcgttatttgttcggcgggt

SEQ ID NO: 9776 - DNA, 746 bp, Artificial Sequence
  chemically treated genomic DNA (Homo sapiens) CpG-island No: 9776
  unsure (457)
acccgccgaacaaataacgccttccgcgacgtcccgccacccccctcccttcccccattaataaaaactcgaatccgaacgaaaataaaacaaacgaacgaaaacgaaacgtcaccgtatatattcataaaacgcgcgcaacccaacatattaataaaacgaaacgcgcgaccgactaaaaaaactactaaacgacgacgataattactaactcgaacaaccgaacgcgaacgacgtaaacaaaaaatcacttaccgacgctaacaaaacataaaaccgtccgacgaaaacctaaaacccgaccgcgatacccgaacaaaaaaaaaaatcgaaacccgaataaactacctacgacgaacgacgcgacgacaaacataaaaaatttataaatatccctcccaccctactcttcgcctaacgaaataaccgccctctaaactcgaacgaccctcgctancctcgaaaacgtcttactacaactaaaaaaccgccccgaacttccttctaattaataactctaaactcgcgacccattttcccctcgaaaaatcgaaaaccgtatcccctatacccgctcgacccctaaaactcccgcgaaaaacgcaaaattaaccgctccaaccccgaaattaaccacctatttacgaaccccacacatatctccgcaatatatcttaccgcgccaaaaaaattccgcaacgaaaaaaattaaaacgctactaatatcgcgcaataaatcaattcgc

SEQ ID NO: 9777 - DNA, 726 bp, Artificial Sequence
  chemically treated genomic DNA (Homo sapiens) CpG-island No: 9777
ttcgtttttcgtttcggttagtggtttattttgttgagggttattaggcgcgttaaatcgttttgatgttttattattaaattgattagttgcgtagaatggtggcgcgttttttggcggtgagcgcgcgttagcgggtagggcgcggttggcggcgtcgatagcggcgcgggttttattcggtttattttcggtacgttatttagtttgtcgtcgttcgtcggattggtgcgtcgatggttttattattgttggcgtttagttatttttcgttaattaagtttgttggcggattacgttattgtcgtttatttttatcgttatattttttttttcggtttttcgtttttttgcggcgtgttacgtatttaattacgttcgttcgtatcgtgcgttcggggtattttggtttgttatcgcgttgttttgtcgtttttgtttttataggattgtttgtttcgtcgggcgttttcgcgcggattttcgtttgttttcgaacgtaatttatttcgcgaacgtggtttttcggttcgttgtcgtttagtcggtttttgttcgtatttcgttttttacgtttcgtgttatcgattttttttcgtttaacgtttttttatagtgtttcggtttttcggtttttcgtttgtttcgtttttttttattttttttcggtaatcgattattggtcgtgttaagtttgtttatgtttttgttggtgtatttttagta

SEQ ID NO: 9778 - DNA, 726 bp, Artificial Sequence
  chemically treated genomic DNA (Homo sapiens) CpG-island No: 9778
tactaaaaatacaccaacaaaaacataaacaaacttaacacgaccaataatcgattaccgaaaaaaaataaaaaaaaacgaaacaaacgaaaaaccgaaaaaccgaaacactataaaaaaacgttaaacgaaaaaaaatcgataacacgaaacgtaaaaaacgaaatacgaacaaaaaccgactaaacgacaacgaaccgaaaaaccacgttcgcgaaataaattacgttcgaaaacaaacgaaaatccgcgcgaaaacgcccgacgaaacaaacaatcctataaaaacaaaaacgacaaaacaacgcgataacaaaccaaaataccccgaacgcacgatacgaacgaacgtaattaaatacgtaacacgccgcaaaaaaacgaaaaaccgaaaaaaaaaatataacgataaaaataaacgacaataacgtaatccgccaacaaacttaattaacgaaaaataactaaacgccaacaataataaaaccatcgacgcaccaatccgacgaacgacgacaaactaaataacgtaccgaaaataaaccgaataaaacccgcgccgctatcgacgccgccaaccgcgccctacccgctaacgcgcgctcaccgccaaaaaacgcgccaccattctacgcaactaatcaatttaataataaaacatcaaaacgatttaacgcgcctaataaccctcaacaaaataaaccactaaccgaaacgaaaaacgaa

SEQ ID NO: 9779 - DNA, 726 bp, Artificial Sequence
  chemically treated genomic DNA (Homo sapiens) CpG-island No: 9779
tgttgagagtgtattaataagggtatgggtaagtttggtacggttaatgatcggttgtcgggggggggtggggagaagcggagtagacgaaagatcgggggatcggggtattgtgagggggcgttaggcggggggggatcggtaatacggggcgtgaggggcggggtgcgggtaagggtcggttgggcggtagcgggtcggggggttacgttcgcggggtaggttgcgttcgggggtaggcgggggttcgcgcgagggcgttcggcggggtaggtagttttatgggggtaagggcggtaggataacgcggtggtaagttagagtatttcggacgtacggtgcgagcggacgtagttggatgcgtgatacgtcgtaggagagcgaggaatcgggaaaaaggatgtagcgatgaaagtgaacgatagtaacgtagttcgttagtaggtttgattaacggggaatggttggacgttaataatggtgaagttatcgacgtattaattcggcgaacggcgataagttgggtagcgtgtcgaaaatgggtcggatgaaattcgcgtcgttatcgacgtcgttaatcgcgttttgttcgttggcgcgcgtttatcgttaaagaacgcgttattattttgcgtaattggttaatttgatgatggagtattaggacgatttagcgcgtttgatgatttttaatagggtaaattattggtcgaagcgaaaggcgaa

SEQ ID NO: 9780 - DNA, 726 bp, Artificial Sequence
  chemically treated genomic DNA (Homo sapiens) CpG-island No: 9780
ttcgcctttcgcttcgaccaataatttaccctattaaaaatcatcaaacgcgctaaatcgtcctaatactccatcatcaaattaaccaattacgcaaaataataacgcgttctttaacgataaacgcgcgccaacgaacaaaacgcgattaacgacgtcgataacgacgcgaatttcatccgacccattttcgacacgctacccaacttatcgccgttcgccgaattaatacgtcgataacttcaccattattaacgtccaaccattccccgttaatcaaacctactaacgaactacgttactatcgttcactttcatcgctacatcctttttcccgattcctcgctctcctacgacgtatcacgcatccaactacgtccgctcgcaccgtacgtccgaaatactctaacttaccaccgcgttatcctaccgcccttacccccataaaactacctaccccgccgaacgccctcgcgcgaacccccgcctacccccgaacgcaacctaccccgcgaacgtaaccccccgacccgctaccgcccaaccgacccttacccgcaccccgcccctcacgccccgtattaccgatccccccccgcctaacgccccctcacaataccccgatcccccgatctttcgtctactccgcttctccccacccccccccgacaaccgatcattaaccgtaccaaacttacccatacccttattaatacactctcaaca

SEQ ID NO: 9781 - DNA, 560 bp, Artificial Sequence
  chemically treated genomic DNA (Homo sapiens) CpG-island No: 9781
gcgtttttgtcgtttcgtttatttgtatatggtaggtttcgtttttagcgttagtttcgttatatcgtttattattagtacgcggtagttcggtattttattagtatttggattgttgtagttattgaatcgatattggcgttgtaggatcgtcgagtagtaattggttttttgttagttggatggggaatagacggttggaatagtttttagatttgttagtttcgttttgatagtattaagcgttcgtttacggatatggagagcgtagcggttgttagcgtattcgtaatatttgacgtttcggtaacggtagtagaatatcgacgttatcggttggggttttagggtaaatttcgtatcgtgcgaggttatatggatattggtggcggtgaatcgttgttggcggtattgggtgagaaacgttatattttgcgtgagttattacgttttgttagtttagttagtcgtagttgtcggcgtttataatgggatatcgttattcggtagggcgttaaagatttatttttcgatttcgttgattgtttattttattggtt

SEQ ID NO: 9782 - DNA, 560 bp, Artificial Sequence
  chemically treated genomic DNA (Homo sapiens) CpG-island No: 9782
aaccaataaaataaacaatcaacgaaatcgaaaaataaatctttaacgccctaccgaataacgatatcccattataaacgccgacaactacgactaactaaactaacaaaacgtaataactcacgcaaaatataacgtttctcacccaataccgccaacaacgattcaccgccaccaatatccatataacctcgcacgatacgaaatttaccctaaaaccccaaccgataacgtcgatattctactaccgttaccgaaacgtcaaatattacgaatacgctaacaaccgctacgctctccatatccgtaaacgaacgcttaatactatcaaaacgaaactaacaaatctaaaaactattccaaccgtctattccccatccaactaacaaaaaaccaattactactcgacgatcctacaacgccaatatcgattcaataactacaacaatccaaatactaataaaataccgaactaccgcgtactaataataaacgatataacgaaactaacgctaaaaacgaaacctaccatatacaaataaacgaaacgacaaaaacgc

SEQ ID NO: 9783 - DNA, 560 bp, Artificial Sequence
  chemically treated genomic DNA (Homo sapiens) CpG-island No: 9783
agttaatgaggtgagtagttagcgaaatcgaaaggtgaatttttagcgttttgtcggataacggtattttattatgaacgtcgataattacgattggttgaattggtagagcgtaatggtttacgtaaagtgtggcgttttttatttaatgtcgttaatagcgatttatcgttattaatatttatgtgatttcgtacggtacggaatttattttaaaattttaatcggtagcgtcgatgttttgttgtcgttgtcggggcgttaaatattgcgaatgcgttggtagtcgttgcgttttttatgttcgtgggcgaacgtttgatgttattaaagcggggttggtaaatttgaaagttgttttagtcgtttgttttttatttaattggtagaaaattagttgttgttcgacgattttataacgttaatgtcggtttaatgattgtagtagtttaggtattggtgaaatgtcgggttatcgcgtgttggtggtgggcgatatggcggaattggcgttgaaagcgaagtttgttatgtataggtgggcgaggcggtaaaagcgt

SEQ ID NO: 9784 - DNA, 560 bp, Artificial Sequence
  chemically treated genomic DNA (Homo sapiens) CpG-island No: 9784
acgcttttaccgcctcgcccacctatacataacaaacttcgctttcaacgccaattccgccatatcgcccaccaccaacacgcgataacccgacatttcaccaatacctaaactactacaatcattaaaccgacattaacgttataaaatcgtcgaacaacaactaattttctaccaattaaataaaaaacaaacgactaaaacaactttcaaatttaccaaccccgctttaataacatcaaacgttcgcccacgaacataaaaaacgcaacgactaccaacgcattcgcaatatttaacgccccgacaacgacaacaaaacatcgacgctaccgattaaaattttaaaataaattccgtaccgtacgaaatcacataaatattaataacgataaatcgctattaacgacattaaataaaaaacgccacactttacgtaaaccattacgctctaccaattcaaccaatcgtaattatcgacgttcataataaaataccgttatccgacaaaacgctaaaaattcacctttcgatttcgctaactactcacctcattaact

SEQ ID NO: 9785 - DNA, 519 bp, Artificial Sequence
  chemically treated genomic DNA (Homo sapiens) CpG-island No: 9785
aatagcgtttaggtaacgataggcgttatacgttttagtacgttagcgggtaaaaatttgttcgttttattatttgtttgtattagtaggtttcgttgcgttaacgtttttttttttagcgataacgggttgaaaattatttatataaggcggtaatttgttggggagtttcgggaaagtagagtgttggcggtgatttattttttgtagtagcgtagatgttgcgcgatttgcgttagtgttagatgatcgggatttagtattacgttagtttttttattaatgttagacgtaggttaagcggcgtatttaaatgtcgtcgttcgtttatgtttgaagttgtatacgcgaaagaagttttttattagtcgtttacgaaattgttgttgatgggtttgtggaaggcgggtatattattttgcgttagatttattaaaaagcggggataaatcgattttagacgcgatcggggtcgttaagtaacgttttggttaatatcgttttgtcgtaaaagtgttt

SEQ ID NO: 9786 - DNA, 519 bp, Artificial Sequence
  chemically treated genomic DNA (Homo sapiens) CpG-island No: 9786
aaacacttttacgacaaaacgatattaaccaaaacgttacttaacgaccccgatcgcgtctaaaatcgatttatccccgctttttaataaatctaacgcaaaataatatacccgccttccacaaacccatcaacaacaatttcgtaaacgactaataaaaaacttctttcgcgtatacaacttcaaacataaacgaacgacgacatttaaatacgccgcttaacctacgtctaacattaataaaaaaactaacgtaatactaaatcccgatcatctaacactaacgcaaatcgcgcaacatctacgctactacaaaaaataaatcaccgccaacactctactttcccgaaactccccaacaaattaccgccttatataaataattttcaacccgttatcgctaaaaaaaaaaacgttaacgcaacgaaacctactaatacaaacaaataataaaacgaacaaatttttacccgctaacgtactaaaacgtataacgcctatcgttacctaaacgctatt

SEQ ID NO: 9787 - DNA, 519 bp, Artificial Sequence
  chemically treated genomic DNA (Homo sapiens) CpG-island No: 9787
aaatatttttacggtagaacgatattgattaagacgttatttgacggtttcggtcgcgtttggagtcggtttattttcgttttttagtggatttggcgtagggtgatgtgttcgttttttataagtttattagtagtagtttcgtgaacgattgatgaggaatttttttcgcgtgtgtagttttagatatggacgaacggcggtatttaaatgcgtcgtttagtttgcgtttgatattggtggaaaaattggcgtgatgttggatttcggttatttggtattgacgtagatcgcgtagtatttgcgttgttgtaaaaaatggattatcgttagtattttgttttttcggagttttttagtaaattgtcgttttgtatgagtggtttttagttcgttgtcgttgaaggaaaaggcgttaacgtaacgaggtttattggtgtaggtaggtgatagagcgagtaaatttttattcgttggcgtgttggggcgtataacgtttgtcgttgtttgggcgttgtt

SEQ ID NO: 9788 - DNA, 519 bp, Artificial Sequence
  chemically treated genomic DNA (Homo sapiens) CpG-island No: 9788
aacaacgcccaaacaacgacaaacgttatacgccccaacacgccaacgaataaaaatttactcgctctatcacctacctacaccaataaacctcgttacgttaacgccttttccttcaacgacaacgaactaaaaaccactcatacaaaacgacaatttactaaaaaactccgaaaaaacaaaatactaacgataatccattttttacaacaacgcaaatactacgcgatctacgtcaataccaaataaccgaaatccaacatcacgccaatttttccaccaatatcaaacgcaaactaaacgacgcatttaaataccgccgttcgtccatatctaaaactacacacgcgaaaaaaattcctcatcaatcgttcacgaaactactactaataaacttataaaaaacgaacacatcaccctacgccaaatccactaaaaaacgaaaataaaccgactccaaacgcgaccgaaaccgtcaaataacgtcttaatcaatatcgttctaccgtaaaaatattt

SEQ ID NO: 9789 - DNA, 612 bp, Artificial Sequence
  chemically treated genomic DNA (Homo sapiens) CpG-island No: 9789
tgttgtttcgtagaagacgtgtttttggcgtagggcgacgatgcgttcgtagtagttagggcgtaatttatttgatgtagcgtgacgattacggtgatgtcgtcgtttggttgatgtcgcgtagggtgtttattacgatgcgcgttgattttggtttagcgaggcgatgggtttatcggttagaattattttcgtttgttgtatagcgtacgggtaatcgttatacgttgttgttggtcgtcggagagggtgaaacgcgttgatgggtaaaatgtattatgttaacgcgggttagcgtttgaacgcgcgttgtttttgttcgtcggtgaattagttaaaataggtgcgtcgaacggcgtgttgtcgagcgcgttaattagtacgttttttagtacgttcggcggtttattaggttgaattgttggaatatgtagtcggtatgggcgcgtttttgcggatatcgcgggttaggcggttttcgcgttggattgtgcggttagtagttcgatatggttatcgatagatttatcgtcggtaattaaatcgttaagtgacgtaaaagggtggatttttcggaattcgacggattaagtaggttattattttatcgtg

SEQ ID NO: 9790 - DNA, 612 bp, Artificial Sequence
  chemically treated genomic DNA (Homo sapiens) CpG-island No: 9790
cacgataaaataataacctacttaatccgtcgaattccgaaaaatccacccttttacgtcacttaacgatttaattaccgacgataaatctatcgataaccatatcgaactactaaccgcacaatccaacgcgaaaaccgcctaacccgcgatatccgcaaaaacgcgcccataccgactacatattccaacaattcaacctaataaaccgccgaacgtactaaaaaacgtactaattaacgcgctcgacaacacgccgttcgacgcacctattttaactaattcaccgacgaacaaaaacaacgcgcgttcaaacgctaacccgcgttaacataatacattttacccatcaacgcgtttcaccctctccgacgaccaacaacaacgtataacgattacccgtacgctatacaacaaacgaaaataattctaaccgataaacccatcgcctcgctaaaccaaaatcaacgcgcatcgtaataaacaccctacgcgacatcaaccaaacgacgacatcaccgtaatcgtcacgctacatcaaataaattacgccctaactactacgaacgcatcgtcgccctacgccaaaaacacgtcttctacgaaacaaca

SEQ ID NO: 9791 - DNA, 612 bp, Artificial Sequence
  chemically treated genomic DNA (Homo sapiens) CpG-island No: 9791
tacggtgaaatggtggtttgtttggttcgtcgggtttcggaaaatttatttttttacgttatttaacggtttgattatcggcgataaatttgtcggtagttatatcgagttgttggtcgtatagtttagcgcgaaggtcgtttggttcgcgatattcgtaaaagcgcgtttatatcggttatatattttaataatttaatttggtgaatcgtcgagcgtattggagaacgtgttgattggcgcgttcggtagtacgtcgttcggcgtatttgttttagttggtttatcggcgagtagaaatagcgcgcgtttaggcgttgattcgcgttggtatggtgtattttgtttattagcgcgttttatttttttcggcggttagtagtaacgtgtggcgattgttcgtgcgttgtgtagtaggcgaaagtgattttggtcgatgaatttatcgtttcgttggattagaattagcgcgtatcgtgatggatattttgcgcgatattaattagacgacggtattatcgtggtcgttacgttgtattaggtggattacgttttggttattgcgaacgtatcgtcgttttgcgttaggggtacgttttttacgaggtagta

SEQ ID NO: 9792 - DNA, 612 bp, Artificial Sequence
  chemically treated genomic DNA (Homo sapiens) CpG-island No: 9792
tactacctcgtaaaaaacgtacccctaacgcaaaacgacgatacgttcgcaataaccaaaacgtaatccacctaatacaacgtaacgaccacgataataccgtcgtctaattaatatcgcgcaaaatatccatcacgatacgcgctaattctaatccaacgaaacgataaattcatcgaccaaaatcactttcgcctactacacaacgcacgaacaatcgccacacgttactactaaccgccgaaaaaaataaaacgcgctaataaacaaaatacaccataccaacgcgaatcaacgcctaaacgcgcgctatttctactcgccgataaaccaactaaaacaaatacgccgaacgacgtactaccgaacgcgccaatcaacacgttctccaatacgctcgacgattcaccaaattaaattattaaaatatataaccgatataaacgcgcttttacgaatatcgcgaaccaaacgaccttcgcgctaaactatacgaccaacaactcgatataactaccgacaaatttatcgccgataatcaaaccgttaaataacgtaaaaaaataaattttccgaaacccgacgaaccaaacaaaccaccatttcaccgta

SEQ ID NO: 9793 - DNA, 602 bp, Artificial Sequence
  chemically treated genomic DNA (Homo sapiens) CpG-island No: 9793
tcgttttttttcgtttacgattttggtttcgtttttcgtttaggttgtaacggaggtagagttaacgtttcgcgggtttttacgtattattttaacgcgtgttttcggagaagaacgtattcgggttacgggagtcgtgttttaggtttcgtttttttatttttcgaaaggttaatttttatttcgatttttttaggtttttttcgttttttttttatttttttaggttcgttttttgcgttttttataggaagtcggagggtcgttttgatttcgaatttttataggcgtgaatttgttttgttgtgtatttttgcggggtggtttgcgttaggtttgtcgcgcgcggtgagttcgcgtagatttgattttgcgtttcgcgttcggttgaggtcgtcgtcgttttttcgggatgtcgcggtcggggtttcgtagcgttgggcggtcgtcgcgggtcgttgggggtgtaggttgttcgtttgttgttattggtgtttggattcggcggcgtttttgagattattttcggttttttgataacgttaagtagtgtttttacgaggatatcgtttagggtttaagtgtattttggagttttaggt

SEQ ID NO: 9794 - DNA, 602 bp, Artificial Sequence
  chemically treated genomic DNA (Homo sapiens) CpG-island No: 9794
acctaaaactccaaaatacacttaaaccctaaacgatatcctcgtaaaaacactacttaacgttatcaaaaaaccgaaaataatctcaaaaacgccgccgaatccaaacaccaataacaacaaacgaacaacctacacccccaacgacccgcgacgaccgcccaacgctacgaaaccccgaccgcgacatcccgaaaaaacgacgacgacctcaaccgaacgcgaaacgcaaaatcaaatctacgcgaactcaccgcgcgcgacaaacctaacgcaaaccaccccgcaaaaatacacaacaaaacaaattcacgcctataaaaattcgaaatcaaaacgaccctccgacttcctataaaaaacgcaaaaaacgaacctaaaaaaataaaaaaaaaacgaaaaaaacctaaaaaaatcgaaataaaaattaacctttcgaaaaataaaaaaacgaaacctaaaacacgactcccgtaacccgaatacgttcttctccgaaaacacgcgttaaaataatacgtaaaaacccgcgaaacgttaactctacctccgttacaacctaaacgaaaaacgaaaccaaaatcgtaaacgaaaaaaaacga

SEQ ID NO: 9795 - DNA, 602 bp, Artificial Sequence
  chemically treated genomic DNA (Homo sapiens) CpG-island No: 9795
atttggaattttagggtgtatttgggttttgagcgatgttttcgtagaagtattgtttggcgttgttaggaagtcgaaggtgattttagaggcgtcgtcgggtttaggtattagtagtagtaggcgagtagtttgtatttttaacggttcgcgacggtcgtttagcgttgcgggatttcggtcgcggtatttcgagaaggcggcggcggttttaatcgagcgcgagacgtagggttaggtttgcgcggatttatcgcgcgcggtaggtttagcgtaggttatttcgtaaagatatatagtagagtaggtttacgtttgtggagattcgggattagagcgatttttcggttttttgtgaggggcgtagagggcggatttggggaggtaaaagagaagcggaaaaggtttgagagggtcgaagtggggattagtttttcggggggtgaaggggcggagtttgagatacggttttcgtgattcggatgcgttttttttcgggaatacgcgttggagtggtacgtggaagttcgcgaggcgttggttttgttttcgttgtagtttgggcgaggggcggggttagagtcgtgggcggagaggggcga

SEQ ID NO: 9796 - DNA, 602 bp, Artificial Sequence
  chemically treated genomic DNA (Homo sapiens) CpG-island No: 9796
tcgcccctctccgcccacgactctaaccccgcccctcgcccaaactacaacgaaaacaaaaccaacgcctcgcgaacttccacgtaccactccaacgcgtattcccgaaaaaaaacgcatccgaatcacgaaaaccgtatctcaaactccgccccttcaccccccgaaaaactaatccccacttcgaccctctcaaaccttttccgcttctcttttacctccccaaatccgccctctacgcccctcacaaaaaaccgaaaaatcgctctaatcccgaatctccacaaacgtaaacctactctactatatatctttacgaaataacctacgctaaacctaccgcgcgcgataaatccgcgcaaacctaaccctacgtctcgcgctcgattaaaaccgccgccgccttctcgaaataccgcgaccgaaatcccgcaacgctaaacgaccgtcgcgaaccgttaaaaatacaaactactcgcctactactactaatacctaaacccgacgacgcctctaaaatcaccttcgacttcctaacaacgccaaacaatacttctacgaaaacatcgctcaaaacccaaatacaccctaaaattccaaat

SEQ ID NO: 9797 - DNA, 703 bp, Artificial Sequence
  chemically treated genomic DNA (Homo sapiens) CpG-island No: 9797
gaattcgagttgtttcgggtcgtttcgatggtatagattcggttttcgtgcgtaagcgtttcgttttttagcgcgttgtcgtaggtacgtttttttagtagtttaggtttcgtttttttttcgtcgtttatttcggtcgcgacgtttcgtttcgcgtttaggttgttgttggtcgcgtcgtcgttttttttcggtttaatggcgtggcggtatagttagtgatgtgcgtttaggtttgttcggttttcggttcgtagtttattatattattcgtttagtagtcgttgtagtcgttgtagttcgagtcgattaagggcgggaggcgttcgggtggcggggcgtggcgaatagcgcggtcggatttatttttttgggcgcggagtatggaggagttgtgcggtcgtaggcggagtagggcggtcgggcggcggtggggataacggtttttttttgaaggggacggataaagtcgagtgattagcggcggcggggaggattagttttcgggtaggtagtggcgcggtagcggtttgttagggttcgggtcggggtttgaggtgttcgcggaagtttgggcgggaaggagggcgtcgggggagtcgaaggcgggtagcgggcggagattatagtttggtttatcgggaggggtttgtggtcgatggaggagttgggagggggttgtcgttgtttggaatagggagag

SEQ ID NO: 9798 - DNA, 703 bp, Artificial Sequence
  chemically treated genomic DNA (Homo sapiens) CpG-island No: 9798
ctctccctattccaaacaacgacaaccccctcccaactcctccatcgaccacaaacccctcccgataaaccaaactataatctccgcccgctacccgccttcgactcccccgacgccctccttcccgcccaaacttccgcgaacacctcaaaccccgacccgaaccctaacaaaccgctaccgcgccactacctacccgaaaactaatcctccccgccgccgctaatcactcgactttatccgtccccttcaaaaaaaaaccgttatccccaccgccgcccgaccgccctactccgcctacgaccgcacaactcctccatactccgcgcccaaaaaaataaatccgaccgcgctattcgccacgccccgccacccgaacgcctcccgcccttaatcgactcgaactacaacgactacaacgactactaaacgaataatataataaactacgaaccgaaaaccgaacaaacctaaacgcacatcactaactataccgccacgccattaaaccgaaaaaaaacgacgacgcgaccaacaacaacctaaacgcgaaacgaaacgtcgcgaccgaaataaacgacgaaaaaaaaacgaaacctaaactactaaaaaaacgtacctacgacaacgcgctaaaaaacgaaacgcttacgcacgaaaaccgaatctataccatcgaaacgacccgaaacaactcgaattc

SEQ ID NO: 9799 - DNA, 703 bp, Artificial Sequence
  chemically treated genomic DNA (Homo sapiens) CpG-island No: 9799
ttttttttgttttagataacggtagtttttttttaatttttttatcgattataagtttttttcgatgggttaagttgtggttttcgttcgttgttcgttttcggttttttcggcgttttttttttcgtttaggttttcgcgggtattttaggtttcggttcgagttttggtaggtcgttgtcgcgttattatttgttcggggattagtttttttcgtcgtcgttggttattcggttttgttcgttttttttaaagggaaatcgttgtttttatcgtcgttcggtcgttttgtttcgtttgcggtcgtatagtttttttatgtttcgcgtttaaaggaatgaattcggtcgcgttgttcgttacgtttcgttattcgagcgtttttcgtttttagtcggttcggattgtagcggttgtagcgattgttggacggatggtgtaatgggttgcgagtcgggggtcggataagtttgagcgtatattattgattgtgtcgttacgttattgggtcgggggagggcggcggcgcggttagtaatagtttaggcgcggggcggggcgtcgcggtcggggtgggcgacggggagggggcggggtttgaattattgggaggacgtgtttgcggtaacgcgttggggggcggggcgtttgcgtacgggggtcggatttgtgttatcgaagcggttcgaggtagttcgagttt

SEQ ID NO: 9800 - DNA, 703 bp, Artificial Sequence
  chemically treated genomic DNA (Homo sapiens) CpG-island No: 9800
aaactcgaactacctcgaaccgcttcgataacacaaatccgacccccgtacgcaaacgccccgccccccaacgcgttaccgcaaacacgtcctcccaataattcaaaccccgccccctccccgtcgcccaccccgaccgcgacgccccgccccgcgcctaaactattactaaccgcgccgccgccctcccccgacccaataacgtaacgacacaatcaataatatacgctcaaacttatccgacccccgactcgcaacccattacaccatccgtccaacaatcgctacaaccgctacaatccgaaccgactaaaaacgaaaaacgctcgaataacgaaacgtaacgaacaacgcgaccgaattcattcctttaaacgcgaaacataaaaaaactatacgaccgcaaacgaaacaaaacgaccgaacgacgataaaaacaacgatttccctttaaaaaaaacgaacaaaaccgaataaccaacgacgacgaaaaaaactaatccccgaacaaataataacgcgacaacgacctaccaaaactcgaaccgaaacctaaaatacccgcgaaaacctaaacgaaaaaaaaaacgccgaaaaaaccgaaaacgaacaacgaacgaaaaccacaacttaacccatcgaaaaaaacttataatcgataaaaaaattaaaaaaaaactaccgttatctaaaacaaaaaaaa

SEQ ID NO: 9801 - DNA, 684 bp, Artificial Sequence
  chemically treated genomic DNA (Homo sapiens) CpG-island No: 9801
gtcgtattttgcgatcgtcgttgtaaattagcgtattttaacgtcgttagttttgagcgtagcgttatagttattgtgcgttatatgattttaatggagtcggttttggtcgtttgtgtgattagtcgtcgtatgtcgaattggtaataagttgatttgtattgtagtttatgttattggtagcgtttagatgggtttgatatcgcgtatacgggtaataatgtcggcgcgttaaacgtttcggatattattttattcggcgtatttatatttagaagatgtcgttaacgtcggggttattgattgtttgttgtaggcgagtaatgattcgttgtaattcgttatttcggaataaggttgaagcgtacgggttttacgattagcgtgtcggaaatcggtaagatcgcgatattatttgttatttgaagttgcgtgatggacggggatttatgttattatttttattaaatagcgtagcggttcggttatttgttcggtattaagcgtgatgttagagacggtattgttagtcgggtgatgtttaattggttagttagcgcgtaaaagaaaatcgcgtataggcgggtttaagtattagcggtttattaaaggttatattggtatatgcggaagatatatagttcgtgcggtaaggcgagtatgttgtatattttgattagttcg

SEQ ID NO: 9802 - DNA, 684 bp, Artificial Sequence
  chemically treated genomic DNA (Homo sapiens) CpG-island No: 9802
cgaactaatcaaaatatacaacatactcgccttaccgcacgaactatatatcttccgcatataccaatataacctttaataaaccgctaatacttaaacccgcctatacgcgattttcttttacgcgctaactaaccaattaaacatcacccgactaacaataccgtctctaacatcacgcttaataccgaacaaataaccgaaccgctacgctatttaataaaaataataacataaatccccgtccatcacgcaacttcaaataacaaataatatcgcgatcttaccgatttccgacacgctaatcgtaaaacccgtacgcttcaaccttattccgaaataacgaattacaacgaatcattactcgcctacaacaaacaatcaataaccccgacgttaacgacatcttctaaatataaatacgccgaataaaataatatccgaaacgtttaacgcgccgacattattacccgtatacgcgatatcaaacccatctaaacgctaccaataacataaactacaatacaaatcaacttattaccaattcgacatacgacgactaatcacacaaacgaccaaaaccgactccattaaaatcatataacgcacaataactataacgctacgctcaaaactaacgacgttaaaatacgctaatttacaacgacgatcgcaaaatacgac

SEQ ID NO: 9803 - DNA, 684 bp, Artificial Sequence
  chemically treated genomic DNA (Homo sapiens) CpG-island No: 9803
cgaattagttagggtatataatatgttcgttttatcgtacgagttgtgtatttttcgtatatgttagtatggtttttaatgagtcgttgatgtttgaattcgtttatgcgcggtttttttttgcgcgttggttggttagttgggtattattcggttgataatatcgtttttggtattacgtttgatgtcggataaatagtcgaatcgttgcgttgtttggtgaggatgatgatatggattttcgtttattacgtagttttaggtggtaaatggtatcgcggttttgtcggttttcggtacgttggtcgtaaaattcgtgcgttttagttttatttcgggatgacgggttataacggattattgttcgtttgtagtaggtaattagtgatttcggcgttgacggtattttttggatatggatacgtcgggtggaatggtgttcggggcgtttgacgcgtcgatattattgttcgtatgcgcgatattaaatttatttgggcgttgttaatgatatgaattgtagtgtaggttagtttattgttagttcggtatgcgacggttggttatataaacggttagaatcggttttattggggttatgtggcgtatagtaattatggcgttgcgtttaaaattaacggcgttgaggtacgttgatttatagcggcgatcgtaaggtgcgat

SEQ ID NO: 9804 - DNA, 684 bp, Artificial Sequence
  chemically treated genomic DNA (Homo sapiens) CpG-island No: 9804
atcgcaccttacgatcgccgctataaatcaacgtacctcaacgccgttaattttaaacgcaacgccataattactatacgccacataaccccaataaaaccgattctaaccgtttatataaccaaccgtcgcataccgaactaacaataaactaacctacactacaattcatatcattaacaacgcccaaataaatttaatatcgcgcatacgaacaataatatcgacgcgtcaaacgccccgaacaccattccacccgacgtatccatatccaaaaaataccgtcaacgccgaaatcactaattacctactacaaacgaacaataatccgttataacccgtcatcccgaaataaaactaaaacgcacgaattttacgaccaacgtaccgaaaaccgacaaaaccgcgataccatttaccacctaaaactacgtaataaacgaaaatccatatcatcatcctcaccaaacaacgcaacgattcgactatttatccgacatcaaacgtaataccaaaaacgatattatcaaccgaataatacccaactaaccaaccaacgcgcaaaaaaaaaccgcgcataaacgaattcaaacatcaacgactcattaaaaaccatactaacatatacgaaaaatacacaactcgtacgataaaacgaacatattatataccctaactaattcg

SEQ ID NO: 9805 - DNA, 787 bp, Artificial Sequence
  chemically treated genomic DNA (Homo sapiens) CpG-island No: 9805
  unsure (746, 752, 766..)
atagtcggatttatttgttcgtggaatgttttattcgtcgcgtcgatttattaagatcgacgatgttcgcgttgttgatgtttagtttcggttgttgttaagtgtattattcgtatcggtacgtaatgtttttatttaacgtaggttgttttttgatagtcgttttgatcgttggaaagcgaaatcgtcgtatcgtattgattgttagattttttttattatcgatttttgtcgaatatcggtcgttgcgttataggtttcgttatgttcggttaacgttagttttgtttattatggatgtttagcgtttttagtttatagttaacgtataaatattatttggtgcggtcgtgaggcggaatttataattattttcggcgatatcgtttcgttttgcgtaatgtgtaacgttttgttcgtttttatttcgtgttttgtaaattacgtaacgttaatgagttattcgatttaataatcgttgcgtttttattagttgaacgtcgatatggttatcgtcgtgttttagtaattgagcgtcgttagagggttattcgttatgggattattttacgggtttagtacgtcgataagtacgtcgttcgtttcgtttatttgatagttacggttttttaggtgtagttattcgcgtcgataattagcgtatcgacgttgatatttttttcgcgagcgtcgtagtaggaatattcgtatcgaaagatggatgttacgcgtcgtattttattggntcgagnttatatcgaagtgnngattgttttcgaatttttat

SEQ ID NO: 9806 - DNA, 787 bp, Artificial Sequence
  chemically treated genomic DNA (Homo sapiens) CpG-island No: 9806
  unsure (21..22, 36, 42)
ataaaaattcgaaaacaatcnncacttcgatataanctcganccaataaaatacgacgcgtaacatccatctttcgatacgaatattcctactacgacgctcgcgaaaaaaatatcaacgtcgatacgctaattatcgacgcgaataactacacctaaaaaaccgtaactatcaaataaacgaaacgaacgacgtacttatcgacgtactaaacccgtaaaataatcccataacgaataaccctctaacgacgctcaattactaaaacacgacgataaccatatcgacgttcaactaataaaaacgcaacgattattaaatcgaataactcattaacgttacgtaatttacaaaacacgaaataaaaacgaacaaaacgttacacattacgcaaaacgaaacgatatcgccgaaaataattataaattccgcctcacgaccgcaccaaataatatttatacgttaactataaactaaaaacgctaaacatccataataaacaaaactaacgttaaccgaacataacgaaacctataacgcaacgaccgatattcgacaaaaatcgataataaaaaaaatctaacaatcaatacgatacgacgatttcgctttccaacgatcaaaacgactatcaaaaaacaacctacgttaaataaaaacattacgtaccgatacgaataatacacttaacaacaaccgaaactaaacatcaacaacgcgaacatcgtcgatcttaataaatcgacgcgacgaataaaacattccacgaacaaataaatccgactat

SEQ ID NO: 9807 - DNA, 787 bp, Artificial Sequence
  chemically treated genomic DNA (Homo sapiens) CpG-island No: 9807
  unsure (21..22, 36, 42)
gtaaaagttcggaagtaattnntatttcggtgtganttcggnttagtggaatgcgacgcgtagtatttatttttcgatacggatatttttgttgcgacgttcgcggagggaatattagcgtcgatacgttggttgtcggcgcgggtgattatatttggaaggtcgtaattattaggtaaacgggacgggcgacgtgtttatcgacgtgttaaattcgtggaatgattttatggcgaataattttttgacgacgtttaattgttggaatacgacgatagttatgtcggcgtttaattggtgaaggcgtaacggttattgggtcgggtggtttattaacgttacgtgatttatagggtacgaggtggaagcggataaaacgttatatattgcgtaaaacggaacggtgtcgtcgagggtgattatggatttcgttttacgatcgtattaggtaatgtttgtacgttaattatgggttgaaagcgttgaatatttatggtgggtaaagttgacgttagtcgaatatggcggagtttatggcgtaacggtcgatattcggtaaaaatcggtggtgaaggggatttggtaattaatacggtgcgacggtttcgttttttaacggttagaacgattattagggggtaatttacgttagatggggatattacgtatcgatgcggatggtgtatttggtaataatcggaattgaatattagtaacgcggatatcgtcgattttaatggatcgacgcgacgggtaagatattttacgggtagatgggttcgattgt

SEQ ID NO: 9808 - DNA, 787 bp, Artificial Sequence
  chemically treated genomic DNA (Homo sapiens) CpG-island No: 9808
  unsure (746, 752, 766..)
acaatcgaacccatctacccgtaaaatatcttacccgtcgcgtcgatccattaaaatcgacgatatccgcgttactaatattcaattccgattattaccaaatacaccatccgcatcgatacgtaatatccccatctaacgtaaattaccccctaataatcgttctaaccgttaaaaaacgaaaccgtcgcaccgtattaattaccaaatccccttcaccaccgatttttaccgaatatcgaccgttacgccataaactccgccatattcgactaacgtcaactttacccaccataaatattcaacgctttcaacccataattaacgtacaaacattacctaatacgatcgtaaaacgaaatccataatcaccctcgacgacaccgttccgttttacgcaatatataacgttttatccgcttccacctcgtaccctataaatcacgtaacgttaataaaccacccgacccaataaccgttacgccttcaccaattaaacgccgacataactatcgtcgtattccaacaattaaacgtcgtcaaaaaattattcgccataaaatcattccacgaatttaacacgtcgataaacacgtcgcccgtcccgtttacctaataattacgaccttccaaatataatcacccgcgccgacaaccaacgtatcgacgctaatattccctccgcgaacgtcgcaacaaaaatatccgtatcgaaaaataaatactacgcgtcgcattccactaanccgaantcacaccgaaatannaattacttccgaacttttac

SEQ ID NO: 9809 - DNA, 591 bp, Artificial Sequence
  chemically treated genomic DNA (Homo sapiens) CpG-island No: 9809
  unsure (462, 468, 470..471, 555, 560, 574, 578, 580, 583..)
ttttgtaacggcgcgttttttgtatgagtcgttgttttggcgtacggtgtgtattatcgcgtattgttggtcgtttgggttattcgttgtagtcgtcgggtgtgttcgttgtttttcggtcgcggttttgtggagggttttatttggtgcgatagtttcgtatttcgtttgaatggtacgcgcgtagattcgattatataagagtcgttatgaaatttatgcgaataaaggttgtagattcgattttatattatatttgcggaaaattagaatacgtttttatttatataatttcggtcggtttcgcgttttttatagaaaatatataataatatattatattatttattttttttattcgatagcgtgattttgaagttcggtagtttggatttggtcgatggtacgcggtagtggatattaaatcgtattttttttttgtcgaatcgtttttcggattgntttagntnngttagttatgcgtaaagtgcgttagcgtgtagagatgcggtgagttttatcgtagaggtcgaaaagtagtttttgacgttggangagtnggttattttcggtnaggntntannnacgcgt

SEQ ID NO: 9810 - DNA, 591 bp, Artificial Sequence
  chemically treated genomic DNA (Homo sapiens) CpG-island No: 9810
  unsure (7..8, 12, 14, 18, 32, 37, 121..122, 124, 130)
acgcgtnnntanancctnaccgaaaataaccnactcntccaacgtcaaaaactacttttcgacctctacgataaaactcaccgcatctctacacgctaacgcactttacgcataactaacnnanctaaancaatccgaaaaacgattcgacaaaaaaaaaatacgatttaatatccactaccgcgtaccatcgaccaaatccaaactaccgaacttcaaaatcacgctatcgaataaaaaaaataaataatataatatattattatatattttctataaaaaacgcgaaaccgaccgaaattatataaataaaaacgtattctaattttccgcaaatataatataaaatcgaatctacaacctttattcgcataaatttcataacgactcttatataatcgaatctacgcgcgtaccattcaaacgaaatacgaaactatcgcaccaaataaaaccctccacaaaaccgcgaccgaaaaacaacgaacacacccgacgactacaacgaataacccaaacgaccaacaatacgcgataatacacaccgtacgccaaaacaacgactcatacaaaaaacgcgccgttacaaaa

SEQ ID NO: 9811 - DNA, 591 bp, Artificial Sequence
  chemically treated genomic DNA (Homo sapiens) CpG-island No: 9811
  unsure (7..8, 12, 14, 18, 32, 37, 121..122, 124, 130)
acgcgtnnntanantttngtcgggaataattngtttntttagcgttaaaagttgtttttcgatttttgcggtaaaatttatcgtatttttgtacgttggcgtattttgcgtatagttggtnnanttgggntaattcgggaagcgattcggtaaaggggagatacggtttgatatttattatcgcgtattatcgattagatttagattgtcgagttttagaattacgttgtcgggtggggggggtgggtggtgtggtgtgttgttgtgtgttttttgtagaaaacgcggagtcgatcggggttgtatgggtgggggcgtgttttggtttttcgtaggtgtggtgtggagtcgaatttgtagtttttgttcgtatggattttatggcggtttttgtgtgatcgggtttgcgcgcgtgttatttaagcggggtgcgggattgtcgtattagatggaattttttataaagtcgcggtcggggaataacgagtatattcggcggttatagcgggtaatttaggcgattagtaatgcgcggtagtgtatatcgtgcgttaaagtagcggtttatgtaaggaacgcgtcgttatagga

SEQ ID NO: 9812 - DNA, 591 bp, Artificial Sequence
  chemically treated genomic DNA (Homo sapiens) CpG-island No: 9812
  unsure (462, 468, 470..471, 555, 560, 574, 578, 580, 583..)
tcctataacgacgcgttccttacataaaccgctactttaacgcacgatatacactaccgcgcattactaatcgcctaaattacccgctataaccgccgaatatactcgttattccccgaccgcgactttataaaaaattccatctaatacgacaatcccgcaccccgcttaaataacacgcgcgcaaacccgatcacacaaaaaccgccataaaatccatacgaacaaaaactacaaattcgactccacaccacacctacgaaaaaccaaaacacgcccccacccatacaaccccgatcgactccgcgttttctacaaaaaacacacaacaacacaccacaccacccaccccccccacccgacaacgtaattctaaaactcgacaatctaaatctaatcgataatacgcgataataaatatcaaaccgtatctcccctttaccgaatcgcttcccgaattancccaantnnaccaactatacgcaaaatacgccaacgtacaaaaatacgataaattttaccgcaaaaatcgaaaaacaacttttaacgctaaanaaacnaattattcccgacnaaantntannnacgcgt

SEQ ID NO: 9813 - DNA, 520 bp, Artificial Sequence
  chemically treated genomic DNA (Homo sapiens) CpG-island No: 9813
  unsure (69, 101, 111..112, 177..178, 410)
ttttacgaacgggtcgtgtattggtgtaaaatttttgtgcgttattttaagttttaatatcgcgtttgncgagtatattttcgtttttcgttagattaggncgttaattanngcgatagagtgcgtcgcgattcgatttgcgttttttcgtaagtagggttgcggtaagttttggannatggcgtattgtggcgtttttgaatggcgggtattttatcgtttcgttacgttatttagtagtaggtgatattttataattcgcgataatggtttgcgattttttaggtataaattttgggttttcgattgttcgggattaggttataagcgtaggtttcggagaaatacgggtaaaaaaatcgggtgtaacgcggtttttgtgcggggcgttggttttgggttattcgggnatttcggtttattaggatataattggtgtatcggtttttcgggggaggttgtgtatggtggtttcgtaggttttcgagaatattatgttgtttttttaatcggttttaaa

SEQ ID NO: 9814 - DNA, 520 bp, Artificial Sequence
  chemically treated genomic DNA (Homo sapiens) CpG-island No: 9814
  unsure (111, 343..344, 409..410, 420, 452)
tttaaaaccgattaaaaaaacaacataatattctcgaaaacctacgaaaccaccatacacaacctcccccgaaaaaccgatacaccaattatatcctaataaaccgaaatncccgaataacccaaaaccaacgccccgcacaaaaaccgcgttacacccgatttttttacccgtatttctccgaaacctacgcttataacctaatcccgaacaatcgaaaacccaaaatttatacctaaaaaatcgcaaaccattatcgcgaattataaaatatcacctactactaaataacgtaacgaaacgataaaatacccgccattcaaaaacgccacaatacgccatnntccaaaacttaccgcaaccctacttacgaaaaaacgcaaatcgaatcgcgacgcactctatcgcnntaattaacgncctaatctaacgaaaaacgaaaatatactcgncaaacgcgatattaaaacttaaaataacgcacaaaaattttacaccaatacacgacccgttcgtaaaa

SEQ ID NO: 9815 - DNA, 520 bp, Artificial Sequence
  chemically treated genomic DNA (Homo sapiens) CpG-island No: 9815
  unsure (111, 343..344, 409..410, 420, 452)
tttgaggtcgattaaaagaataatatagtattttcgaaaatttgcggaattattatgtatagtttttttcgagagatcggtatattagttgtgttttgataagtcgagatnttcgggtgatttaagattaacgtttcgtataggggtcgcgttatattcggtttttttgttcgtgttttttcggggtttgcgtttataatttaatttcgggtaatcgaggatttaggatttgtatttgaggagtcgtaagttattatcgcgggttgtggaatattatttgttattgaatggcgtaacgggacgataaagtattcgttatttaggggcgttatagtgcgttatnntttagggtttgtcgtaattttgtttgcggaaaggcgtagatcgggtcgcggcgtattttgtcgtnntaattaacgntttagtttggcgaaaggcgggaatgtgttcgntaagcgcggtattaaagtttgggataacgtataggggttttgtattagtgtacgattcgttcgtaaaa

SEQ ID NO: 9816 - DNA, 520 bp, Artificial Sequence
  chemically treated genomic DNA (Homo sapiens) CpG-island No: 9816
  unsure (69, 101, 111..112, 177..178, 410)
ttttacgaacgaatcgtacactaatacaaaacccctatacgttatcccaaactttaataccgcgcttancgaacacattcccgcctttcgccaaactaaancgttaattannacgacaaaatacgccgcgacccgatctacgcctttccgcaaacaaaattacgacaaaccctaaannataacgcactataacgcccctaaataacgaatactttatcgtcccgttacgccattcaataacaaataatattccacaacccgcgataataacttacgactcctcaaatacaaatcctaaatcctcgattacccgaaattaaattataaacgcaaaccccgaaaaaacacgaacaaaaaaaccgaatataacgcgacccctatacgaaacgttaatcttaaatcacccgaanatctcgacttatcaaaacacaactaatataccgatctctcgaaaaaaactatacataataattccgcaaattttcgaaaatactatattattcttttaatcgacctcaaa

SEQ ID NO: 9817 - DNA, 788 bp, Artificial Sequence
  chemically treated genomic DNA (Homo sapiens) CpG-island No: 9817
ttattggcgatcgttagcggggttataaataaattgtgttgcggtaaatgtatttgtaacgtcgggaattgtttgcgaaatagtttcgttacgttcggttgtatataagagtcgttcgttagttataaattagtaatgttttgttttttaatatgtcgggcgataatgttcgttattttttcgtatatcggttttatcgtaggttaaatttttttatcgtgatcgcgtttgtattgtttcgttttttttagcgaaatacggcgattttcggcgagagttagagagatgtgatgttcgtcggtggttttattcgtcgagtacgttattttgtttttttttacgatggtaatgtcggtagtgtcgtcgtcgatatttattatatcggcgttgtttagttgtagtagattcgtaattgcggttggtttatttagtatatggtttatttttagttcggtagattttagtacgttgatggaaatacgcgggttcgtatttggaggaaatgaagtcgtcgtatggtttaaacgacgatcgaattgttgttcgagcgtgtcgagatggcgacgaataatggtgatagcgtttaagaaattttagacgatgtcgtcgcgaattatatcggtttagttcgaggtatattcgttattggtttgatcgtcgcggtcgataattatcgatattatattcgtagtgtttagatttattttaggtatagcggagatttcgtcgcggcgggcgtttggtttatagcgttgtcgtcgtttgtagacgtggggtgagtttttgtt

SEQ ID NO: 9818 - DNA, 788 bp, Artificial Sequence
  chemically treated genomic DNA (Homo sapiens) CpG-island No: 9818
aacaaaaactcaccccacgtctacaaacgacgacaacgctataaaccaaacgcccgccgcgacgaaatctccgctatacctaaaataaatctaaacactacgaatataatatcgataattatcgaccgcgacgatcaaaccaataacgaatatacctcgaactaaaccgatataattcgcgacgacatcgtctaaaatttcttaaacgctatcaccattattcgtcgccatctcgacacgctcgaacaacaattcgatcgtcgtttaaaccatacgacgacttcatttcctccaaatacgaacccgcgtatttccatcaacgtactaaaatctaccgaactaaaaataaaccatatactaaataaaccaaccgcaattacgaatctactacaactaaacaacgccgatataataaatatcgacgacgacactaccgacattaccatcgtaaaaaaaaacaaaataacgtactcgacgaataaaaccaccgacgaacatcacatctctctaactctcgccgaaaatcgccgtatttcgctaaaaaaaacgaaacaatacaaacgcgatcacgataaaaaaatttaacctacgataaaaccgatatacgaaaaaataacgaacattatcgcccgacatattaaaaaacaaaacattactaatttataactaacgaacgactcttatatacaaccgaacgtaacgaaactatttcgcaaacaattcccgacgttacaaatacatttaccgcaacacaatttatttataaccccgctaacgatcgccaataa

SEQ ID NO: 9819 - DNA, 788 bp, Artificial Sequence
  chemically treated genomic DNA (Homo sapiens) CpG-island No: 9819
aataagggtttattttacgtttgtaaacggcggtaacgttgtgaattagacgttcgtcgcgacggaattttcgttgtgtttggggtgaatttgggtattgcgaatgtggtgtcgatggttgtcgatcgcgacggttaagttagtggcgggtatgtttcggattgggtcgatgtggttcgcgacggtatcgtttgggattttttgggcgttgttattattgttcgtcgttatttcgatacgttcgagtagtaattcggtcgtcgtttaagttatgcggcgattttattttttttaggtacggattcgcgtatttttattaacgtgttggaatttgtcggattggaagtgagttatgtgttggatgagttaatcgtagttgcggatttgttgtaattggataacgtcggtgtagtggatatcggcggcggtattatcggtattgttatcgtgaaaaagggtaaggtgacgtattcggcggatgaagttatcggcggatattatatttttttgattttcgtcggaaatcgtcgtatttcgttggaagaggcggagtagtataagcgcggttacggtgaagagatttggtttgcggtgaaatcggtgtacgaaaaaatggcggatattgtcgttcggtatattgaagggtagggtattattgatttatggttggcgggcggtttttgtatgtaatcgggcgtggcggaattgtttcgtaaataattttcggcgttataggtgtatttatcgtagtatagtttgtttatgatttcgttggcgatcgttagtag

SEQ ID NO: 9820 - DNA, 788 bp, Artificial Sequence
  chemically treated genomic DNA (Homo sapiens) CpG-island No: 9820
ctactaacgatcgccaacgaaatcataaacaaactatactacgataaatacacctataacgccgaaaattatttacgaaacaattccgccacgcccgattacatacaaaaaccgcccgccaaccataaatcaataataccctacccttcaatataccgaacgacaatatccgccattttttcgtacaccgatttcaccgcaaaccaaatctcttcaccgtaaccgcgcttatactactccgcctcttccaacgaaatacgacgatttccgacgaaaatcaaaaaaatataatatccgccgataacttcatccgccgaatacgtcaccttaccctttttcacgataacaataccgataataccgccgccgatatccactacaccgacgttatccaattacaacaaatccgcaactacgattaactcatccaacacataactcacttccaatccgacaaattccaacacgttaataaaaatacgcgaatccgtacctaaaaaaaataaaatcgccgcataacttaaacgacgaccgaattactactcgaacgtatcgaaataacgacgaacaataataacaacgcccaaaaaatcccaaacgataccgtcgcgaaccacatcgacccaatccgaaacatacccgccactaacttaaccgtcgcgatcgacaaccatcgacaccacattcgcaatacccaaattcaccccaaacacaacgaaaattccgtcgcgacgaacgtctaattcacaacgttaccgccgtttacaaacgtaaaataaacccttatt

SEQ ID NO: 9821 - DNA, 848 bp, Artificial Sequence
  chemically treated genomic DNA (Homo sapiens) CpG-island No: 9821
  unsure (663..664, 671..)
gttgtcgtaaagtaaaaattgggtcgttaatttcgggtgatttattacgtattttacgaagtagagcgtcgtttcgtcgcgtattacgttggagtaggtcgttattattttgaacgcgtatatgatgcgttattggttgttgtttagtagtagtttaaggtttttcgttatcgacgagttcggttgtattttaaaggtgtagcgttttttggtcgtgaagaagtagacgtagagtagtattacgtcgtttagttttagtacgtatatggcgtcgaagtagtttatttgttcgttttttttgtcgatgatgtttattagcggtagcgcgatgtcgttgatagcgagcgagttcgtcgtcgttaggaagaagcgttaggattgtagggcgtgacgttttttcgggtcggcggtgatgacgttcggtatggcgtagtacggtacgttaacgaaggtgtagattagggttaggagaatgtaggttacgtaggcgtagatgattttgtttgtgcggagaagttcggcgtgtagaaggttagtacgtagacgatgtcgaacgggatggttttttatagtaggaacgggcggaattggtcgtgtcgcgtgcgggtgcggtttattagtagttttattagcgggtcggtgacggcgtcgagataacgcggnngagattnnaaaaatagcgtgtttataattttcgtcgataggtcgaagacgtcggtgtagaaataggttagtaggaatatcgtggtttgttagacgaagtcgtaggcggtgttttttagttcgtagttaattttgttttttatggttaattgcgttattagaattatatttttatgtagtgtgtt

SEQ ID NO: 9822 - DNA, 848 bp, Artificial Sequence
  chemically treated genomic DNA (Homo sapiens) CpG-island No: 9822
  unsure (177..178, 185..)
aacacactacataaaaatataattctaataacgcaattaaccataaaaaacaaaattaactacgaactaaaaaacaccgcctacgacttcgtctaacaaaccacgatattcctactaacctatttctacaccgacgtcttcgacctatcgacgaaaattataaacacgctatttttnnaatctcnnccgcgttatctcgacgccgtcaccgacccgctaataaaactactaataaaccgcacccgcacgcgacacgaccaattccgcccgttcctactataaaaaaccatcccgttcgacatcgtctacgtactaaccttctacacgccgaacttctccgcacaaacaaaatcatctacgcctacgtaacctacattctcctaaccctaatctacaccttcgttaacgtaccgtactacgccataccgaacgtcatcaccgccgacccgaaaaaacgtcacgccctacaatcctaacgcttcttcctaacgacgacgaactcgctcgctatcaacgacatcgcgctaccgctaataaacatcatcgacaaaaaaaacgaacaaataaactacttcgacgccatatacgtactaaaactaaacgacgtaatactactctacgtctacttcttcacgaccaaaaaacgctacacctttaaaatacaaccgaactcgtcgataacgaaaaaccttaaactactactaaacaacaaccaataacgcatcatatacgcgttcaaaataataacgacctactccaacgtaatacgcgacgaaacgacgctctacttcgtaaaatacgtaataaatcacccgaaattaacgacccaatttttactttacgacaac

SEQ ID NO: 9823 - DNA, 848 bp, Artificial Sequence
  chemically treated genomic DNA (Homo sapiens) CpG-island No: 9823
  unsure (177..178, 185..)
ggtatattatataagggtgtaattttgatgacgtaattaattatgaaagataaaattggttacgggttgggagatatcgtttgcggtttcgtttggtaggttacgatgtttttgttggtttatttttatatcgacgttttcggtttgtcggcggggattatgggtacgttgtttttnnggttttnntcgcgttgtttcgacgtcgttatcgattcgttgatggggttgttggtagatcgtattcgtacgcggtacggttagtttcgttcgtttttgttgtggggggttatttcgttcggtatcgtttgcgtgttgattttttatacgtcggattttttcgtataggtaagattatttacgtttgcgtgatttatatttttttgattttggtttatattttcgttaacgtgtcgtattgcgttatgtcgggcgttattatcgtcgattcgaaagagcgttacgttttgtagttttggcgtttttttttggcggcggcgggttcgttcgttattagcggtatcgcgttgtcgttggtgagtattatcggtaaaggggacgagtaggtgggttatttcggcgttatgtgcgtgttggggttgagcggcgtggtgttgttttacgtttgtttttttacgattaaagagcgttatatttttgaggtgtagtcgggttcgtcggtggcgaaagattttaagttgttgttgggtaatagttagtggcgtattatgtgcgcgtttaagatgatggcgatttgttttaacgtggtgcgcggcggggcgacgttttatttcgtgaaatacgtgatggattattcggagttggcgatttagtttttattttacggtagt

SEQ ID NO: 9824 - DNA, 848 bp, Artificial Sequence
  chemically treated genomic DNA (Homo sapiens) CpG-island No: 9824
  unsure (663..664, 671..)
actaccgtaaaataaaaactaaatcgccaactccgaataatccatcacgtatttcacgaaataaaacgtcgccccgccgcgcaccacgttaaaacaaatcgccatcatcttaaacgcgcacataatacgccactaactattacccaacaacaacttaaaatctttcgccaccgacgaacccgactacacctcaaaaatataacgctctttaatcgtaaaaaaacaaacgtaaaacaacaccacgccgctcaaccccaacacgcacataacgccgaaataacccacctactcgtcccctttaccgataatactcaccaacgacaacgcgataccgctaataacgaacgaacccgccgccgccaaaaaaaaacgccaaaactacaaaacgtaacgctctttcgaatcgacgataataacgcccgacataacgcaatacgacacgttaacgaaaatataaaccaaaatcaaaaaaatataaatcacgcaaacgtaaataatcttacctatacgaaaaaatccgacgtataaaaaatcaacacgcaaacgataccgaacgaaataaccccccacaacaaaaacgaacgaaactaaccgtaccgcgtacgaatacgatctaccaacaaccccatcaacgaatcgataacgacgtcgaaacaacgcgannaaaaccnnaaaaacaacgtacccataatccccgccgacaaaccgaaaacgtcgatataaaaataaaccaacaaaaacatcgtaacctaccaaacgaaaccgcaaacgatatctcccaacccgtaaccaattttatctttcataattaattacgtcatcaaaattacacccttatataatatacc

SEQ ID NO: 9825 - DNA, 538 bp, Artificial Sequence
  chemically treated genomic DNA (Homo sapiens) CpG-island No: 9825
ttttgggtcgatttgttattttcgcgggtaacgtggcgttagaaaatttcggttttcgtattttcggttttggtgtcggtcgtgaagacgtttgggaatcggatttggatgttaattggggtgatgaaaaagtttggttgatttatcgttattcggaagcgttggcgaaagtatcgttgggtgtaatcgagatgggtttgatttacgttaattcggaaggttcggattatagcggcgaatcgttttttgcggtagtagttattcgcgcgattttcggtaatatgggtatgaacgacgaagaaatcgtggcgttgattgcgggtggttatacgttgggtaaaatttacggtgtcggttcgatattaaatgtaggttttgatttagaagttgtatcgattgaagaataaggtttaggttgggcgagtatttacggtagcggcgttggcgtagatgttattatttttggtttggaagtagtttggatttagacgtcgatttagtggagtaattattttttcgagaatttgtttaagtatga

SEQ ID NO: 9826 - DNA, 538 bp, Artificial Sequence
  chemically treated genomic DNA (Homo sapiens) CpG-island No: 9826
tcatacttaaacaaattctcgaaaaaataattactccactaaatcgacgtctaaatccaaactacttccaaaccaaaaataataacatctacgccaacgccgctaccgtaaatactcgcccaacctaaaccttattcttcaatcgatacaacttctaaatcaaaacctacatttaatatcgaaccgacaccgtaaattttacccaacgtataaccacccgcaatcaacgccacgatttcttcgtcgttcatacccatattaccgaaaatcgcgcgaataactactaccgcaaaaaacgattcgccgctataatccgaaccttccgaattaacgtaaatcaaacccatctcgattacacccaacgatactttcgccaacgcttccgaataacgataaatcaaccaaactttttcatcaccccaattaacatccaaatccgattcccaaacgtcttcacgaccgacaccaaaaccgaaaatacgaaaaccgaaattttctaacgccacgttacccgcgaaaataacaaatcgacccaaaa

SEQ ID NO: 9827 - DNA, 538 bp, Artificial Sequence
  chemically treated genomic DNA (Homo sapiens) CpG-island No: 9827
ttatatttgaataggttttcgaagaaatagttgttttattgggtcggcgtttgggtttagattatttttagattagaggtaatggtatttgcgttaacgtcgttgtcgtaagtgttcgtttaatttaaattttgttttttaatcggtgtagtttttggattaggatttatatttgatgtcggatcggtatcgtgggttttatttagcgtatgattattcgtaattagcgttacggttttttcgtcgtttatgtttatgttgtcgaaggtcgcgcggatagttgttgtcgtagaaagcggttcgtcgttgtgattcgggtttttcgggttaacgtaaattagatttatttcggttgtatttagcggtgttttcgttagcgttttcggatgacggtgagttagttaggtttttttattattttagttaatatttagattcggtttttagacgtttttacgatcggtattaaaatcgaaggtacggaagtcggagttttttagcgttacgttattcgcgaggataataggtcggtttagga

SEQ ID NO: 9828 - DNA, 538 bp, Artificial Sequence
  chemically treated genomic DNA (Homo sapiens) CpG-island No: 9828
tcctaaaccgacctattatcctcgcgaataacgtaacgctaaaaaactccgacttccgtaccttcgattttaataccgatcgtaaaaacgtctaaaaaccgaatctaaatattaactaaaataataaaaaaacctaactaactcaccgtcatccgaaaacgctaacgaaaacaccgctaaatacaaccgaaataaatctaatttacgttaacccgaaaaacccgaatcacaacgacgaaccgctttctacgacaacaactatccgcgcgaccttcgacaacataaacataaacgacgaaaaaaccgtaacgctaattacgaataatcatacgctaaataaaacccacgataccgatccgacatcaaatataaatcctaatccaaaaactacaccgattaaaaaacaaaatttaaattaaacgaacacttacgacaacgacgttaacgcaaataccattacctctaatctaaaaataatctaaacccaaacgccgacccaataaaacaactatttcttcgaaaacctattcaaatataa

SEQ ID NO: 9829 - DNA, 709 bp, Artificial Sequence
  chemically treated genomic DNA (Homo sapiens) CpG-island No: 9829
tcgttcgttaaagtcgttttgttgtattagtcggtttagcgtatcgtaattgaagacgttgtggttgtcgttttcgttggttaggttgatgatacgttcggtagtatcgtattttatattgcgcgttagttcgttttgcgtggtgttgatcgtttttttttacgtatcgtattgtgtttcgtttcggttgtcgttcggggtgataacggtagttaggtcgtttgcggcgttgtatttatatcgcgttttacggttttgtgcgttttttattcgaggttaatcggttacggttgtttatagcggacggtaaggttgatgtttttttcgcggtggatcgcgtatatttggtcgaagcggtcgtatttataacgggtttggtagttcgagtagtcggtgaacgttagtaattgttcgtagcggttttaggttatttgtcgggtgttgttcgtcgtattcgttgtcgtcgtcggtaatttattgtgcgcgttatcgtagcggtagcgtattgttttttcgttgcgcgatgttttcgatattagtttgttcggtttattatattttacggcggttttttagttcgttcggggatatatatacgaacgatttagtttggttttcggatcgattatagataaatatttcgttttttcgtaatcgttataggatgtgggtgatgatttcgtggatatcgtatagggatattaacgat

SEQ ID NO: 9830 - DNA, 709 bp, Artificial Sequence
  chemically treated genomic DNA (Homo sapiens) CpG-island No: 9830
atcgttaatatccctatacgatatccacgaaatcatcacccacatcctataacgattacgaaaaaacgaaatatttatctataatcgatccgaaaaccaaactaaatcgttcgtatatatatccccgaacgaactaaaaaaccgccgtaaaatataataaaccgaacaaactaatatcgaaaacatcgcgcaacgaaaaaacaatacgctaccgctacgataacgcgcacaataaattaccgacgacgacaacgaatacgacgaacaacacccgacaaataacctaaaaccgctacgaacaattactaacgttcaccgactactcgaactaccaaacccgttataaatacgaccgcttcgaccaaatatacgcgatccaccgcgaaaaaaacatcaaccttaccgtccgctataaacaaccgtaaccgattaacctcgaataaaaaacgcacaaaaccgtaaaacgcgatataaatacaacgccgcaaacgacctaactaccgttatcaccccgaacgacaaccgaaacgaaacacaatacgatacgtaaaaaaaaacgatcaacaccacgcaaaacgaactaacgcgcaatataaaatacgatactaccgaacgtatcatcaacctaaccaacgaaaacgacaaccacaacgtcttcaattacgatacgctaaaccgactaatacaacaaaacgactttaacgaacga

SEQ ID NO: 9831 - DNA, 709 bp, Artificial Sequence
  chemically treated genomic DNA (Homo sapiens) CpG-island No: 9831
atcgttggtgtttttgtgcgatatttacgggattattatttatattttgtgacggttgcgggaagacgaaatgtttatttataatcgattcgggaattaggttggatcgttcgtgtgtgtgttttcggacgggttggagagtcgtcgtggaatatgatgaatcgggtaggttggtatcggagatatcgcgtagcggggagatagtacgttatcgttacgatgacgcgtatagtgagttatcggcgacgataacggatgcgacgggtagtattcggtagatgatttggagtcgttacgggtagttgttggcgtttatcgattgttcgggttattagattcgttatgaatacgatcgtttcggttagatgtacgcggtttatcgcgaggaaggtattagttttatcgttcgttatggataatcgtggtcggttaatttcgggtgaaagacgtatagggtcgtgaaacgcggtatgaatataacgtcgtaggcgatttgattgtcgttattatttcggacggtaatcggagcgagatatagtacgatgcgtggggaaaggcggttagtattacgtagggcgggttgacgcgtagtatggagtacgatgttgtcggacgtgttattagtttgattaacgagaacggtagttatagcgtttttagttacgatgcgttggatcggttggtatagtagggcggttttgacgggcgg

SEQ ID NO: 9832 - DNA, 709 bp, Artificial Sequence
  chemically treated genomic DNA (Homo sapiens) CpG-island No: 9832
ccgcccgtcaaaaccgccctactataccaaccgatccaacgcatcgtaactaaaaacgctataactaccgttctcgttaatcaaactaataacacgtccgacaacatcgtactccatactacgcgtcaacccgccctacgtaatactaaccgcctttccccacgcatcgtactatatctcgctccgattaccgtccgaaataataacgacaatcaaatcgcctacgacgttatattcataccgcgtttcacgaccctatacgtctttcacccgaaattaaccgaccacgattatccataacgaacgataaaactaataccttcctcgcgataaaccgcgtacatctaaccgaaacgatcgtattcataacgaatctaataacccgaacaatcgataaacgccaacaactacccgtaacgactccaaatcatctaccgaatactacccgtcgcatccgttatcgtcgccgataactcactatacgcgtcatcgtaacgataacgtactatctccccgctacgcgatatctccgataccaacctacccgattcatcatattccacgacgactctccaacccgtccgaaaacacacacacgaacgatccaacctaattcccgaatcgattataaataaacatttcgtcttcccgcaaccgtcacaaaatataaataataatcccgtaaatatcgcacaaaaacaccaacgat

SEQ ID NO: 9833 - DNA, 1109 bp, Artificial Sequence
  chemically treated genomic DNA (Homo sapiens) CpG-island No: 9833
ttggcgttggtggcgatggtcggtgtaggcgttattcgtaattcgttgtattgttatcgtttttggtagtaattgaaaggttagtcggtcgaatttatttggtagttcgatgacggtattagtttggtggtagtattgcgtatcggttcgatcgaaagtttgatttaggggttgtattagttcgtttttcgcgtagaaaaacgtatcggtttggtattgttcggtaagggtaatatcggttttcgttggttggaattgttcgttcgtgagtagagtacgttttcggtacgtatcggttttgagtttgtgttggtaggtgtggtggatagtcgtcgtagtttgttgagttatgacgggttggacgttagtcgcgcgttagttttttttaacgatgaagcggttgagtaggatgaagagtcgttgtttttgtggatgcgcgtttattcgtatgatgatttagtggtgttggacgttatcgttagttagtagtttgttgattagtattttgatttcgttagttacggtttttacgttattagcgttaataaattggcgggagttagcgatagtaataaatatcgttagatttacgacgttttcgaaaaaatcgggcgttattggttgtataatgttatcgtcggtgcgggtttgtcgattaattatatcgtgcgcgatttgatcgatatgcggcgatattattttgtcgattagcgggatttttttcggtacgtttttttggttgtttttgtaattcgacggtagcgtgtcgtttatcgagttggtggattaggcgtggtagtagggtttaatcgaatttgattcgcgtgacgatttttttggtaaagacgtgatgcgtaagttggtgattttggcgcgtgaagtaggttataatatcgaatcggattaggtacgtgtggaatcgttggtgtttgtttattgcgaaggcggtagtatcgattatttttttgaaaatggcgatgaattgaacgagtagatggtgtaacggttggaagcggttcgcgaaatggggttggtgttgcgttacgtggcgcgtttcgatgttaacggtaaagcgcgtgtaggcgtggaagcggtgcgtgaagattatt

SEQ ID NO: 9834 - DNA, 1109 bp, Artificial Sequence
  chemically treated genomic DNA (Homo sapiens) CpG-island No: 9834
aataatcttcacgcaccgcttccacgcctacacgcgctttaccgttaacatcgaaacgcgccacgtaacgcaacaccaaccccatttcgcgaaccgcttccaaccgttacaccatctactcgttcaattcatcgccattttcaaaaaaataatcgatactaccgccttcgcaataaacaaacaccaacgattccacacgtacctaatccgattcgatattataacctacttcacgcgccaaaatcaccaacttacgcatcacgtctttaccaaaaaaatcgtcacgcgaatcaaattcgattaaaccctactaccacgcctaatccaccaactcgataaacgacacgctaccgtcgaattacaaaaacaaccaaaaaaacgtaccgaaaaaaatcccgctaatcgacaaaataatatcgccgcatatcgatcaaatcgcgcacgatataattaatcgacaaacccgcaccgacgataacattatacaaccaataacgcccgattttttcgaaaacgtcgtaaatctaacgatatttattactatcgctaactcccgccaatttattaacgctaataacgtaaaaaccgtaactaacgaaatcaaaatactaatcaacaaactactaactaacgataacgtccaacaccactaaatcatcatacgaataaacgcgcatccacaaaaacaacgactcttcatcctactcaaccgcttcatcgttaaaaaaaactaacgcgcgactaacgtccaacccgtcataactcaacaaactacgacgactatccaccacacctaccaacacaaactcaaaaccgatacgtaccgaaaacgtactctactcacgaacgaacaattccaaccaacgaaaaccgatattacccttaccgaacaataccaaaccgatacgtttttctacgcgaaaaacgaactaatacaacccctaaatcaaactttcgatcgaaccgatacgcaatactaccaccaaactaataccgtcatcgaactaccaaataaattcgaccgactaacctttcaattactaccaaaaacgataacaatacaacgaattacgaataacgcctacaccgaccatcgccaccaacgccaa

SEQ ID NO: 9835 - DNA, 1109 bp, Artificial Sequence
  chemically treated genomic DNA (Homo sapiens) CpG-island No: 9835
gatgatttttacgtatcgtttttacgtttatacgcgttttatcgttggtatcgaaacgcgttacgtagcgtagtattagttttatttcgcgggtcgtttttagtcgttgtattatttgttcgtttagtttatcgttatttttaaagaaatggtcgatgttgtcgttttcgtaatgagtaggtattagcgattttatacgtatttgattcggttcgatgttgtaatttgttttacgcgttagaattattagtttgcgtattacgtttttgttagagagatcgttacgcgggttaggttcggttaagttttgttgttacgtttgatttattagttcggtaaacggtacgttatcgtcgaattgtaggaatagttaggagagcgtgtcggagaagatttcgttgatcgataaaatagtatcgtcgtatgtcgattagatcgcgtacggtgtggttgatcggtaagttcgtatcgacggtggtattgtatagttagtgacgttcggttttttcgaaggcgtcgtggatttggcgatatttattgttgtcgttggttttcgttagtttgttggcgttgataacgtggaaatcgtggttggcgaaattaagatattgattagtaagttgttggttggcggtaacgtttagtattattaaattattatacggatgggcgcgtatttataggaataacgattttttattttgtttaatcgttttatcgttgaagaaggttaacgcgcggttggcgtttagttcgttatagtttaataggttgcggcggttgtttattatatttgttagtataaatttaaagtcggtacgtgtcgaaagcgtgttttgtttacgggcgaatagttttagttaacgggaatcgatattgtttttatcgaataatattaggtcgatgcgtttttttgcgcggaagacggattgatgtagtttttgaattaggttttcggtcgggtcggtgcgtagtattgttattaggttgatgtcgttatcggattgttaggtaaattcgatcggttggttttttagttgttgttagaagcggtggtaatgtagcgggttacgggtgacgtttgtatcgattatcgttattagcgttag

SEQ ID NO: 9836 - DNA, 1109 bp, Artificial Sequence
  chemically treated genomic DNA (Homo sapiens) CpG-island No: 9836
ctaacgctaataacgataatcgatacaaacgtcacccgtaacccgctacattaccaccgcttctaacaacaactaaaaaaccaaccgatcgaatttacctaacaatccgataacgacatcaacctaataacaatactacgcaccgacccgaccgaaaacctaattcaaaaactacatcaatccgtcttccgcgcaaaaaaacgcatcgacctaatattattcgataaaaacaatatcgattcccgttaactaaaactattcgcccgtaaacaaaacacgctttcgacacgtaccgactttaaatttatactaacaaatataataaacaaccgccgcaacctattaaactataacgaactaaacgccaaccgcgcgttaaccttcttcaacgataaaacgattaaacaaaataaaaaatcgttattcctataaatacgcgcccatccgtataataatttaataatactaaacgttaccgccaaccaacaacttactaatcaatatcttaatttcgccaaccacgatttccacgttatcaacgccaacaaactaacgaaaaccaacgacaacaataaatatcgccaaatccacgacgccttcgaaaaaaccgaacgtcactaactatacaataccaccgtcgatacgaacttaccgatcaaccacaccgtacgcgatctaatcgacatacgacgatactattttatcgatcaacgaaatcttctccgacacgctctcctaactattcctacaattcgacgataacgtaccgtttaccgaactaataaatcaaacgtaacaacaaaacttaaccgaacctaacccgcgtaacgatctctctaacaaaaacgtaatacgcaaactaataattctaacgcgtaaaacaaattacaacatcgaaccgaatcaaatacgtataaaatcgctaatacctactcattacgaaaacgacaacatcgaccatttctttaaaaataacgataaactaaacgaacaaataatacaacgactaaaaacgacccgcgaaataaaactaatactacgctacgtaacgcgtttcgataccaacgataaaacgcgtataaacgtaaaaacgatacgtaaaaatcatc

SEQ ID NO: 9837 - DNA, 729 bp, Artificial Sequence
  chemically treated genomic DNA (Homo sapiens) CpG-island No: 9837
gtttgggtcgcgtagattggcgttaaatttacgcgaaacgcgtggtggttaaatttcgtttgttttagtttataaattagcgcgtaaatcgcgtcggtgtcgtattgcgtggtcgggcgaagtttataagtaggtatggtgtttttttttttgatggattagcgttagtagcgtgtcgatcgattggcgtaggttgtcgttattgttgagcgtatggtaattttgtggagtatagcgggcggcgcgcgttaggcgggcgttaattttattggcgtttttacggttacggttttttaggcgttggcggaggattttcggcgaaatttgtaaatagacgggtagtagcgtcgattgatagcgcgttcgcgtttgcggtagatgggcgcgtgagtcgttgattagtacgtcgaattcggcgtgtagttagagattaatttcgacgtcgacgttataatatagatcgttagcgtgttagtttaaggttaatagattttgtttcgcgcgggtaaaaaatttttgttcgtttagggcgatatggtttttattttcggcgttggtatcgcgcgtgatgtagcgatgcgttattagtaattgagtttgttttcgtaggcggagtttcgttagtaggttgtttttttcggagtcggacggttttattaattaaattagtttttttattattagaatatttttttattttgacgttagacgtggtcgatatgaatatga

SEQ ID NO: 9838 - DNA, 729 bp, Artificial Sequence
  chemically treated genomic DNA (Homo sapiens) CpG-island No: 9838
tcatattcatatcgaccacgtctaacgtcaaaataaaaaaatattctaataataaaaaaactaatttaattaataaaaccgtccgactccgaaaaaaacaacctactaacgaaactccgcctacgaaaacaaactcaattactaataacgcatcgctacatcacgcgcgataccaacgccgaaaataaaaaccatatcgccctaaacgaacaaaaattttttacccgcgcgaaacaaaatctattaaccttaaactaacacgctaacgatctatattataacgtcgacgtcgaaattaatctctaactacacgccgaattcgacgtactaatcaacgactcacgcgcccatctaccgcaaacgcgaacgcgctatcaatcgacgctactacccgtctatttacaaatttcgccgaaaatcctccgccaacgcctaaaaaaccgtaaccgtaaaaacgccaataaaattaacgcccgcctaacgcgcgccgcccgctatactccacaaaattaccatacgctcaacaataacgacaacctacgccaatcgatcgacacgctactaacgctaatccatcaaaaaaaaaaacaccatacctacttataaacttcgcccgaccacgcaatacgacaccgacgcgatttacgcgctaatttataaactaaaacaaacgaaatttaaccaccacgcgtttcgcgtaaatttaacgccaatctacgcgacccaaac

SEQ ID NO: 9839 - DNA, 729 bp, Artificial Sequence
  chemically treated genomic DNA (Homo sapiens) CpG-island No: 9839
ttatatttatatcgattacgtttggcgttagggtaaaagggtgttttgatgatgggaaaattgatttggttaatggggtcgttcggtttcgggaaagatagtttgttggcggaatttcgtttgcgggaataaatttagttattggtggcgtatcgttatattacgcgcgatgttagcgtcggaagtgaaaattatatcgttttgagcgagtaggagttttttattcgcgcggggtaaaatttgttggttttaagttggtacgttaacggtttgtattatggcgtcggcgtcgagattgatttttggttgtacgtcggattcgacgtgttggttaacggtttacgcgtttatttgtcgtaggcgcgggcgcgttattaatcggcgttgttgttcgtttgtttataggtttcgtcggagatttttcgttagcgtttggaaaatcgtggtcgtgaaaacgttagtgaaattaacgttcgtttggcgcgcgtcgttcgttatattttataggattgttatacgtttaataatgacggtagtttgcgttagtcggtcgatacgttgttgacgttgatttattagaaggagaaatattatgtttgtttgtgagtttcgttcggttacgtagtacgatatcgacgcggtttacgcgttgatttgtgagttaaaataggcggagtttgattattacgcgtttcgcgtgggtttaacgttaatttgcgcgatttaaat

SEQ ID NO: 9840 - DNA, 729 bp, Artificial Sequence
  chemically treated genomic DNA (Homo sapiens) CpG-island No: 9840
atttaaatcgcgcaaattaacgttaaacccacgcgaaacgcgtaataatcaaactccgcctattttaactcacaaatcaacgcgtaaaccgcgtcgatatcgtactacgtaaccgaacgaaactcacaaacaaacataatatttctccttctaataaatcaacgtcaacaacgtatcgaccgactaacgcaaactaccgtcattattaaacgtataacaatcctataaaatataacgaacgacgcgcgccaaacgaacgttaatttcactaacgttttcacgaccacgattttccaaacgctaacgaaaaatctccgacgaaacctataaacaaacgaacaacaacgccgattaataacgcgcccgcgcctacgacaaataaacgcgtaaaccgttaaccaacacgtcgaatccgacgtacaaccaaaaatcaatctcgacgccgacgccataatacaaaccgttaacgtaccaacttaaaaccaacaaattttaccccgcgcgaataaaaaactcctactcgctcaaaacgatataattttcacttccgacgctaacatcgcgcgtaatataacgatacgccaccaataactaaatttattcccgcaaacgaaattccgccaacaaactatctttcccgaaaccgaacgaccccattaaccaaatcaattttcccatcatcaaaacacccttttaccctaacgccaaacgtaatcgatataaatataa

SEQ ID NO: 9841 - DNA, 792 bp, Artificial Sequence
  chemically treated genomic DNA (Homo sapiens) CpG-island No: 9841
gcgtgtggcgatgggtcgcgcgattgtgcgcgattcggcggtgtttttgtttgatgagtcgttttttaatttcgatgttaagttgcgcgtgtagatgcgttttgaattgtaatagttgtatcgtcgtttgaaaacgattttattttacgttatttacgattaggttgaagcgatgacgttcgtttagcgagtaatggtgatgaacggcggtgttgtcgaatagattggtatattagttgaagtttacgaaaagttcgttagattgtttgtagcgagttttatcggtagttcggcgatgaatttgttgataggtcgcgtgaattacgaaggtacgtatttcgaattggacggcggttattgagtttgcgttaaacggtggttaacgttagtatgtcgggcgttaaatgattttcggattcgttcggaatatattgcgttagttcgtagtagaagcggcgtacgatgtgatggatacgttggagattttcgggcgtagattatttggcgtacggacgttggggcgagtagaagttggtggtgcgattggcgtattaggagcgttcgacggtaggtagtacgttgtggttgtatttggcggaaaattagttgtatttttttgatggtgaaataggataacgagtatgagtaattggttttattttcgtatcgtttttatcgtggcggcggtaagttggtttcggaaaatattttggcgttatcgacgtcgggtaaaatacggttataagatgatcgaatttgacgcgaagttatcgaaagatggcgagatttttt

SEQ ID NO: 9842 - DNA, 792 bp, Artificial Sequence
  chemically treated genomic DNA (Homo sapiens) CpG-island No: 9842
aaaaaatctcgccatctttcgataacttcgcgtcaaattcgatcatcttataaccgtattttacccgacgtcgataacgccaaaatattttccgaaaccaacttaccgccgccacgataaaaacgatacgaaaataaaaccaattactcatactcgttatcctatttcaccatcaaaaaaatacaactaattttccgccaaatacaaccacaacgtactacctaccgtcgaacgctcctaatacgccaatcgcaccaccaacttctactcgccccaacgtccgtacgccaaataatctacgcccgaaaatctccaacgtatccatcacatcgtacgccgcttctactacgaactaacgcaatatattccgaacgaatccgaaaatcatttaacgcccgacatactaacgttaaccaccgtttaacgcaaactcaataaccgccgtccaattcgaaatacgtaccttcgtaattcacgcgacctatcaacaaattcatcgccgaactaccgataaaactcgctacaaacaatctaacgaacttttcgtaaacttcaactaatataccaatctattcgacaacaccgccgttcatcaccattactcgctaaacgaacgtcatcgcttcaacctaatcgtaaataacgtaaaataaaatcgttttcaaacgacgatacaactattacaattcaaaacgcatctacacgcgcaacttaacatcgaaattaaaaaacgactcatcaaacaaaaacaccgccgaatcgcgcacaatcgcgcgacccatcgccacacgc

SEQ ID NO: 9843 - DNA, 792 bp, Artificial Sequence
  chemically treated genomic DNA (Homo sapiens) CpG-island No: 9843
ggaagatttcgttatttttcgataatttcgcgttaaattcgattattttatgatcgtattttgttcgacgtcgatgacgttagggtgtttttcggggttagtttatcgtcgttacgatgaggacgatgcggggataaggttagttatttatattcgttgttttgttttattattaaaaagatgtagttgatttttcgttagatgtagttatagcgtgttgtttgtcgtcgggcgtttttgatgcgttagtcgtattattagtttttgttcgttttagcgttcgtgcgttaggtaatttgcgttcgaggatttttagcgtgtttattatatcgtacgtcgtttttgttgcgagttagcgtaatatgtttcgggcgaattcgagagttatttaacgttcggtatattgacgttagttatcgtttagcgtaagtttaatgatcgtcgtttagttcgaaatgcgtgttttcgtaatttacgcggtttgttagtaggtttatcgtcggattgtcgataaaattcgttataaatagtttggcgggtttttcgtagattttaattggtgtgttaatttgttcggtaatatcgtcgtttattattattattcgttgggcgagcgttatcgttttaatttgatcgtgagtaacgtagagtgaagtcgtttttaggcgacggtgtaattgttgtagtttaagacgtatttgtacgcgtagtttggtatcgaggttagagagcggtttattaaataggaatatcgtcggatcgcgtataatcgcgcggtttatcgttatacgt

SEQ ID NO: 9844 - DNA, 792 bp, Artificial Sequence
  chemically treated genomic DNA (Homo sapiens) CpG-island No: 9844
acgtataacgataaaccgcgcgattatacgcgatccgacgatattcctatttaataaaccgctctctaacctcgataccaaactacgcgtacaaatacgtcttaaactacaacaattacaccgtcgcctaaaaacgacttcactctacgttactcacgatcaaattaaaacgataacgctcgcccaacgaataataataataaacgacgatattaccgaacaaattaacacaccaattaaaatctacgaaaaacccgccaaactatttataacgaattttatcgacaatccgacgataaacctactaacaaaccgcgtaaattacgaaaacacgcatttcgaactaaacgacgatcattaaacttacgctaaacgataactaacgtcaatataccgaacgttaaataactctcgaattcgcccgaaacatattacgctaactcgcaacaaaaacgacgtacgatataataaacacgctaaaaatcctcgaacgcaaattacctaacgcacgaacgctaaaacgaacaaaaactaataatacgactaacgcatcaaaaacgcccgacgacaaacaacacgctataactacatctaacgaaaaatcaactacatctttttaataataaaacaaaacaacgaatataaataactaaccttatccccgcatcgtcctcatcgtaacgacgataaactaaccccgaaaaacaccctaacgtcatcgacgtcgaacaaaatacgatcataaaataatcgaatttaacgcgaaattatcgaaaaataacgaaatcttcc

SEQ ID NO: 9845 - DNA, 907 bp, Artificial Sequence
  chemically treated genomic DNA (Homo sapiens) CpG-island No: 9845
cgcgcggttacgggttggtgttcggatatgagcgagcgtaaagcgatggcgatggcgttggtcgatcgcgttttgtaagtttcggagtacggcgagtacgcgataggttcggcgtaggatgaagagttcgtgttggtatatgtcgataacgtcgaagtcgtaggttttgttttatattttaaatttttttattacgtcgatttttaggtcgaattggagttatttaaacgtttgtaataggagtagaattatggttaatttagagcggattataattttgtttatttcgacgagtagattaaacgtatgattcgtcgcgttattttaaaagcggtgtgcgattttcggttattaggtgtcgtttggcgggcgcgagatgtcgatgtcgtacggttggggaatcggcggtatttagtttatcgttagcgtgattggcgaaagcgacgtgttgaaggtgattgattagggcgcggatgatattataacgtcgtgtcgattcgtaatttttttaagcgcgtgatcggggtaaatattacggaacgtacggacgatgcgacggttatttagacgcgttatcgtatttcgaaacgtcgtgatcgaagattagataattattttttaggtgttaattttcgagtcgtgcgttttatcgaagttcggcgaaagggaaattcgaattatgtacgcgttggaagaagtataggcgtgatgtaggtgaaattgtatgacgatatcgtatcgcgtatcggttatatcggtagaaattacgtttatacggtgaaggtaatgggggttacgtgattggaattagacgttcggattcgtaagattcgataatttaaagattggttattgacgtttagatacgttattgcgtagggcggggagttagaagtcgtattatgcg

SEQ ID NO: 9846 - DNA, 907 bp, Artificial Sequence
  chemically treated genomic DNA (Homo sapiens) CpG-island No: 9846
cgcataatacgacttctaactccccgccctacgcaataacgtatctaaacgtcaataaccaatctttaaattatcgaatcttacgaatccgaacgtctaattccaatcacgtaacccccattaccttcaccgtataaacgtaatttctaccgatataaccgatacgcgatacgatatcgtcatacaatttcacctacatcacgcctatacttcttccaacgcgtacataattcgaatttccctttcgccgaacttcgataaaacgcacgactcgaaaattaacacctaaaaaataattatctaatcttcgatcacgacgtttcgaaatacgataacgcgtctaaataaccgtcgcatcgtccgtacgttccgtaatatttaccccgatcacgcgcttaaaaaaattacgaatcgacacgacgttataatatcatccgcgccctaatcaatcaccttcaacacgtcgctttcgccaatcacgctaacgataaactaaataccgccgattccccaaccgtacgacatcgacatctcgcgcccgccaaacgacacctaataaccgaaaatcgcacaccgcttttaaaataacgcgacgaatcatacgtttaatctactcgtcgaaataaacaaaattataatccgctctaaattaaccataattctactcctattacaaacgtttaaataactccaattcgacctaaaaatcgacgtaataaaaaaatttaaaatataaaacaaaacctacgacttcgacgttatcgacatataccaacacgaactcttcatcctacgccgaacctatcgcgtactcgccgtactccgaaacttacaaaacgcgatcgaccaacgccatcgccatcgctttacgctcgctcatatccgaacaccaacccgtaaccgcgcg

SEQ ID NO: 9847 - DNA, 907 bp, Artificial Sequence
  chemically treated genomic DNA (Homo sapiens) CpG-island No: 9847
cgtatgatgcggtttttggtttttcgttttgcgtagtggcgtgtttgggcgttagtggttagtttttgggttatcgaattttgcggattcgggcgtttggttttagttacgtagtttttattatttttatcgtataggcgtagtttttgtcgatatgatcgatacgcggtgcgatatcgttatatagttttatttgtattacgtttgtattttttttagcgcgtgtatggttcgggtttttttttcgtcgggtttcgataaagcgtacggttcggggattggtatttggaagataattatttgattttcggttacggcgtttcgggatgcggtgacgcgtttggataatcgtcgtatcgttcgtacgtttcgtggtgtttatttcggttacgcgtttgaagaagttgcgaatcgatacggcgttgtggtgttattcgcgttttggttaattatttttagtacgtcgttttcgttaattacgttggcggtaagttgaatgtcgtcggttttttagtcgtacggtatcggtatttcgcgttcgttaaacggtatttgataatcggggatcgtatatcgtttttaagatggcgcggcggattatgcgtttggtttgttcgtcgaggtaggtaaagttgtagttcgttttagattagttatggttttgtttttgttgtagacgtttgagtagttttagttcggtttggaaatcgacgtagtgggggagtttgaggtgtgagataaagtttgcggtttcgacgttgtcggtatgtgttagtacgaattttttattttgcgtcgggtttgtcgcgtgttcgtcgtatttcggggtttgtagagcgcggtcgattagcgttatcgttatcgttttgcgttcgtttatgttcgaatattagttcgtagtcgcgcg

SEQ ID NO: 9848 - DNA, 907 bp, Artificial Sequence
  chemically treated genomic DNA (Homo sapiens) CpG-island No: 9848
cgcgcgactacgaactaatattcgaacataaacgaacgcaaaacgataacgataacgctaatcgaccgcgctctacaaaccccgaaatacgacgaacacgcgacaaacccgacgcaaaataaaaaattcgtactaacacataccgacaacgtcgaaaccgcaaactttatctcacacctcaaactcccccactacgtcgatttccaaaccgaactaaaactactcaaacgtctacaacaaaaacaaaaccataactaatctaaaacgaactacaactttacctacctcgacgaacaaaccaaacgcataatccgccgcgccatcttaaaaacgatatacgatccccgattatcaaataccgtttaacgaacgcgaaataccgataccgtacgactaaaaaaccgacgacattcaacttaccgccaacgtaattaacgaaaacgacgtactaaaaataattaaccaaaacgcgaataacaccacaacgccgtatcgattcgcaacttcttcaaacgcgtaaccgaaataaacaccacgaaacgtacgaacgatacgacgattatccaaacgcgtcaccgcatcccgaaacgccgtaaccgaaaatcaaataattatcttccaaataccaatccccgaaccgtacgctttatcgaaacccgacgaaaaaaaaacccgaaccatacacgcgctaaaaaaaatacaaacgtaatacaaataaaactatataacgatatcgcaccgcgtatcgatcatatcgacaaaaactacgcctatacgataaaaataataaaaactacgtaactaaaaccaaacgcccgaatccgcaaaattcgataacccaaaaactaaccactaacgcccaaacacgccactacgcaaaacgaaaaaccaaaaaccgcatcatacg

SEQ ID NO: 9849 - DNA, 573 bp, Artificial Sequence
  chemically treated genomic DNA (Homo sapiens) CpG-island No: 9849
ttttttttcggtaagcgtaggttcgtttatcgggatcgatagggttcgcgaagcgttggttggcgggttgacgagttggcgggttggcgggttgatttttcgacggcggcgacggtagtttttggttcggagtttttttttttttatttcggatttgtttttagaatcgaacgagttagtgaggtgagcgttttcgtgtttagagcggttttacgtgttttttattaaataatcggacggtattattttatttattcgattcgttcgattcgtttgttttttagagttattttagacgcgcgcgcgcgtttggttacgttcgtttttttttttttgcgcgtttttgcgatttcgtgcgtgttcgttttgtttgtgaggtcgcgggaagtagcgcgtaggagtagaagtaatagggtgtcgtcgaataggtggggagtggaggtttggaagtacgtttgcggaagacggttcgtttgcggtttttttcgcgtgattagttgcgttcgtttaatttaattatgatttttatttttttattttggtttttttttcgagcgaataaggaaggggcgt

SEQ ID NO: 9850 - DNA, 573 bp, Artificial Sequence
  chemically treated genomic DNA (Homo sapiens) CpG-island No: 9850
acgccccttccttattcgctcgaaaaaaaaaccaaaataaaaaaataaaaatcataattaaattaaacgaacgcaactaatcacgcgaaaaaaaccgcaaacgaaccgtcttccgcaaacgtacttccaaacctccactccccacctattcgacgacaccctattacttctactcctacgcgctacttcccgcgacctcacaaacaaaacgaacacgcacgaaatcgcaaaaacgcgcaaaaaaaaaaaaacgaacgtaaccaaacgcgcgcgcgcgtctaaaataactctaaaaaacaaacgaatcgaacgaatcgaataaataaaataataccgtccgattatttaataaaaaacacgtaaaaccgctctaaacacgaaaacgctcacctcactaactcgttcgattctaaaaacaaatccgaaataaaaaaaaaaaaactccgaaccaaaaactaccgtcgccgccgtcgaaaaatcaacccgccaacccgccaactcgtcaacccgccaaccaacgcttcgcgaaccctatcgatcccgataaacgaacctacgcttaccgaaaaaaaa

SEQ ID NO: 9851 - DNA, 573 bp, Artificial Sequence
  chemically treated genomic DNA (Homo sapiens) CpG-island No: 9851
acgttttttttttgttcgttcggaaagaggattaaaatggaggagtaagaattatgattaaattgagcgagcgtaattaattacgcgaagagggtcgtaggcgggtcgtttttcgtaagcgtgtttttaggtttttattttttatttattcggcggtattttgttatttttgtttttgcgcgttgtttttcgcgattttataggtagagcgaatacgtacggagtcgtaggggcgcgtaaagggggaggagcgggcgtgattaggcgcgcgcgcgcgtttggagtgattttagagagtaggcgagtcgggcggatcgggtgggtagagtggtgtcgttcggttgtttggtgggaggtacgtaagatcgttttgggtacgggggcgtttattttattggttcgttcggttttaggagtagattcggggtagagggaaaagagtttcgggttaggggttgtcgtcgtcgtcgtcggggagttagttcgttagttcgttagttcgttagttcgttagttagcgtttcgcgggttttgtcggtttcggtaagcgggtttgcgtttatcggaaagagg

SEQ ID NO: 9852 - DNA, 573 bp, Artificial Sequence
  chemically treated genomic DNA (Homo sapiens) CpG-island No: 9852
cctctttccgataaacgcaaacccgcttaccgaaaccgacaaaacccgcgaaacgctaactaacgaactaacgaactaacgaactaacgaactaactccccgacgacgacgacgacaacccctaacccgaaactcttttccctctaccccgaatctactcctaaaaccgaacgaaccaataaaataaacgcccccgtacccaaaacgatcttacgtacctcccaccaaacaaccgaacgacaccactctacccacccgatccgcccgactcgcctactctctaaaatcactccaaacgcgcgcgcgcgcctaatcacgcccgctcctccccctttacgcgcccctacgactccgtacgtattcgctctacctataaaatcgcgaaaaacaacgcgcaaaaacaaaaataacaaaataccgccgaataaataaaaaataaaaacctaaaaacacgcttacgaaaaacgacccgcctacgaccctcttcgcgtaattaattacgctcgctcaatttaatcataattcttactcctccattttaatcctctttccgaacgaacaaaaaaaaaacgt

SEQ ID NO: 9853 - DNA, 814 bp, Artificial Sequence
  chemically treated genomic DNA (Homo sapiens) CpG-island No: 9853
attttcggtagtagtacgtcgttgtcgttagaaattatttgtcgtacgtcgcgaattcgttgggtgagcgggttattttgtgttttgtttattagcgttatagttagtaatcgaggtttaaatttgataggttcgattagcggaatggttttttaattgatttgttgttcgttggtttcggtgatggtgcgggttagcgtttcgaggtttttttttttcgttttcgtcgttagcggttgtttgtttattcgttagtcggtaaaattaagtagtggttgttgaatagtaaaaacggtagtgtgcgtgtattttcggtattatcgttagtacgaatataatttcggtgtgcggtgtagagtatcgacggtgtttgttagtagttggttacgtacgttatgggcgatatcgtcgttgtcgttgacgcgggtgacgataatcgtcgtcgcggtggagagtagtagggaagggatttgcgttattaggtcgtcgtcgatggttattagtatatattgttggaaggtagtatcggcgtttaggttgtatttgaagatttcgatatagacgtcgtcgattaggttgatcgttagaattattatttcggcgatggcgtttcgcgtataaatttcgatgtttcgtatatcgcgtcgtataaatcgggttcgtttggtaatatttttacgtcgggtttgttttgcgttttgttggtaattcggcgtaagatcgggttatcgttattgtagtcggtatcgcgtttaggaaaggggagaatttcgaaattttttgtttatgggtattaaaaagttttgtatattta

SEQ ID NO: 9854 - DNA, 814 bp, Artificial Sequence
  chemically treated genomic DNA (Homo sapiens) CpG-island No: 9854
taaatatacaaaactttttaatacccataaacaaaaaatttcgaaattctcccctttcctaaacgcgataccgactacaataacgataacccgatcttacgccgaattaccaacaaaacgcaaaacaaacccgacgtaaaaatattaccaaacgaacccgatttatacgacgcgatatacgaaacatcgaaatttatacgcgaaacgccatcgccgaaataataattctaacgatcaacctaatcgacgacgtctatatcgaaatcttcaaatacaacctaaacgccgatactaccttccaacaatatatactaataaccatcgacgacgacctaataacgcaaatcccttccctactactctccaccgcgacgacgattatcgtcacccgcgtcaacgacaacgacgatatcgcccataacgtacgtaaccaactactaacaaacaccgtcgatactctacaccgcacaccgaaattatattcgtactaacgataataccgaaaatacacgcacactaccgtttttactattcaacaaccactacttaattttaccgactaacgaataaacaaacaaccgctaacgacgaaaacgaaaaaaaaaaacctcgaaacgctaacccgcaccatcaccgaaaccaacgaacaacaaatcaattaaaaaaccattccgctaatcgaacctatcaaatttaaacctcgattactaactataacgctaataaacaaaacacaaaataacccgctcacccaacgaattcgcgacgtacgacaaataatttctaacgacaacgacgtactactaccgaaaat

SEQ ID NO: 9855 - DNA, 814 bp, Artificial Sequence
  chemically treated genomic DNA (Homo sapiens) CpG-island No: 9855
tgagtgtgtagaattttttggtatttataggtaggagatttcgaggttttttttttttttagacgcgatgtcggttatagtggcgatgattcgattttacgtcggattgttaataaggcgtagggtaaattcggcgtaaagatgttgttaagcgagttcgatttgtacggcgcgatgtacggggtatcgaagtttgtgcgcgggacgttatcgtcgggatgatgattttggcgattaatttgatcggcggcgtttgtatcgggatttttaaatataatttgagcgtcgatgttgttttttagtagtatgtgttgatgattatcggcgacggtttggtggcgtagattttttttttgttgttttttatcgcggcggcgattatcgttattcgcgttagcgataacggcgatatcgtttatgacgtgcgtaattagttgttggtaagtatcgtcggtgttttatatcgtatatcgggattatgttcgtgttggcggtggtatcgggaatgtacgtatattgtcgtttttgttgtttagtagttattgtttggttttatcggttggcggatgagtaaatagtcgttggcggcggaggcggaagagaaaagtttcgaaacgttgattcgtattattatcgaaattagcgagtagtaggttagttgggaaattatttcgttgatcgagtttattaagtttaagtttcggttattaattgtggcgttggtggataaagtatagggtaattcgtttatttagcggattcgcggcgtgcggtaggtgatttttgacggtaacggcgtgttgttgtcggagat

SEQ ID NO: 9856 - DNA, 814 bp, Artificial Sequence
  chemically treated genomic DNA (Homo sapiens) CpG-island No: 9856
atctccgacaacaacacgccgttaccgtcaaaaatcacctaccgcacgccgcgaatccgctaaataaacgaattaccctatactttatccaccaacgccacaattaataaccgaaacttaaacttaataaactcgatcaacgaaataatttcccaactaacctactactcgctaatttcgataataatacgaatcaacgtttcgaaacttttctcttccgcctccgccgccaacgactatttactcatccgccaaccgataaaaccaaacaataactactaaacaacaaaaacgacaatatacgtacattcccgataccaccgccaacacgaacataatcccgatatacgatataaaacaccgacgatacttaccaacaactaattacgcacgtcataaacgatatcgccgttatcgctaacgcgaataacgataatcgccgccgcgataaaaaacaacaaaaaaaaaatctacgccaccaaaccgtcgccgataatcatcaacacatactactaaaaaacaacatcgacgctcaaattatatttaaaaatcccgatacaaacgccgccgatcaaattaatcgccaaaatcatcatcccgacgataacgtcccgcgcacaaacttcgataccccgtacatcgcgccgtacaaatcgaactcgcttaacaacatctttacgccgaatttaccctacgccttattaacaatccgacgtaaaatcgaatcatcgccactataaccgacatcgcgtctaaaaaaaaaaaaaacctcgaaatctcctacctataaataccaaaaaattctacacactca

SEQ ID NO: 9857 - DNA, 1592 bp, Artificial Sequence
  chemically treated genomic DNA (Homo sapiens) CpG-island No: 9857
aagttgttcgtcgaagatttagatcgaagtgtttcgtttgttatcgatttgttttcggaagagaacggttttatcgttaatttaggtcgttggttatagtggtatggaaaggtgcggacgtttcggggattgcgttgattgacggcgagattttttcggtatttttttgcgtttgcgtaagatgtatgtcgaatagggtggtcgaattcggattaggtgttgaatatgatatggaattacgttatttcgtagagttatttttagaagaagtggcgatggagagtaacggtaaggcgttggcgatattatcgattcggtaatcggtgcggttatcgttaagaaaggttaaaatttagttcgttcgtttaattgcgcgatgacggtataattttttgtggtgttggattttcgtcggtagttggacgtcggaaggtaattagatggtattcgtgataacgtcgattcgtttggtttcggtaatacgttgggttgggtagggtatggtcgtttaatcgtcgtattttgtataatcgcgttttcgtagatcgtagggtaattcgtgggattcgaagcgttagttgttgaaatgggacgtattaagtggatcggttgggatatttcggattatagcgtagcgttttcggtagcggcgtcgggtcgtttattatgtagtaggaaggtatggggcgttttttgttttcgataagatggcggaaggttcgttttcggaatattacgagcgtttgaaacgtcgttgggaattaattcgttgtatttaaacgttatttcgattcggttgtacgtatttttaaagacgacgtcgaagtattgggtaaagcgataagttttcgtatgtcggaattatttatcgtttgatcgagtatttttttattggattaaatacgcgttgttgaacgcgattttgtagttagagtagttgtggaaatcggggagtcgttggcgaataaatttggtattgtttaggggatatcgtgaaagttttttttaatcgtggttatattaaagttaaagcggggtgattaaacgtattcgtacgttgaaaacgaacggtaggtttaagtttcgtgtcgttgaaagtagttaatttggtcggaagcgtaatcggatcgtgaatcgaaaaacgcggttcggcgattgtttaggcgttcgacgttgaaggtaatcgagtaaagcggtagaaggttgggcgcgtggttgcggtattatcgttattaggttgagcgtttgattatcgataaaggcgaatggttgttgtatcggtttatgtgaagggcgaaagtatcgaagtattgttgtcgaatatggttggatttttttggcgaaattgtcgatttcgaaattgatgcgttggggcgtagcgacgtgtatttcgtgcgttcggtgtatatcgtgattttgttgttggggataaagttatttcggtaattattttgggtatttagttcgatcgcgtgatcgcggttatcgttttatgggcgagtcggaatttattatcgataacgttattagtattcggaaattttgcgtgagcgtgggaaagttatcgtcgattagaagaacgtaaggcgaag

SEQ ID NO: 9858 - DNA, 1592 bp, Artificial Sequence
  chemically treated genomic DNA (Homo sapiens) CpG-island No: 9858
cttcgccttacgttcttctaatcgacgataactttcccacgctcacgcaaaatttccgaatactaataacgttatcgataataaattccgactcgcccataaaacgataaccgcgatcacgcgatcgaactaaatacccaaaataattaccgaaataactttatccccaacaacaaaatcacgatatacaccgaacgcacgaaatacacgtcgctacgccccaacgcatcaatttcgaaatcgacaatttcgccaaaaaaatccaaccatattcgacaacaatacttcgatactttcgcccttcacataaaccgatacaacaaccattcgcctttatcgataatcaaacgctcaacctaataacgataataccgcaaccacgcgcccaaccttctaccgctttactcgattaccttcaacgtcgaacgcctaaacaatcgccgaaccgcgtttttcgattcacgatccgattacgcttccgaccaaattaactactttcaacgacacgaaacttaaacctaccgttcgttttcaacgtacgaatacgtttaatcaccccgctttaactttaatataaccacgattaaaaaaaactttcacgatatcccctaaacaataccaaatttattcgccaacgactccccgatttccacaactactctaactacaaaatcgcgttcaacaacgcgtatttaatccaataaaaaaatactcgatcaaacgataaataattccgacatacgaaaacttatcgctttacccaatacttcgacgtcgtctttaaaaatacgtacaaccgaatcgaaataacgtttaaatacaacgaattaattcccaacgacgtttcaaacgctcgtaatattccgaaaacgaaccttccgccatcttatcgaaaacaaaaaacgccccataccttcctactacataataaacgacccgacgccgctaccgaaaacgctacgctataatccgaaatatcccaaccgatccacttaatacgtcccatttcaacaactaacgcttcgaatcccacgaattaccctacgatctacgaaaacgcgattatacaaaatacgacgattaaacgaccataccctacccaacccaacgtattaccgaaaccaaacgaatcgacgttatcacgaataccatctaattaccttccgacgtccaactaccgacgaaaatccaacaccacaaaaaattataccgtcatcgcgcaattaaacgaacgaactaaattttaacctttcttaacgataaccgcaccgattaccgaatcgataatatcgccaacgccttaccgttactctccatcgccacttcttctaaaaataactctacgaaataacgtaattccatatcatattcaacacctaatccgaattcgaccaccctattcgacatacatcttacgcaaacgcaaaaaaataccgaaaaaatctcgccgtcaatcaacgcaatccccgaaacgtccgcacctttccataccactataaccaacgacctaaattaacgataaaaccgttctcttccgaaaacaaatcgataacaaacgaaacacttcgatctaaatcttcgacgaacaactt

SEQ ID NO: 9859 - DNA, 1592 bp, Artificial Sequence
  chemically treated genomic DNA (Homo sapiens) CpG-island No: 9859
tttcgttttacgtttttttaatcggcgatgatttttttacgtttacgtagaattttcggatattgatggcgttatcgatggtgaatttcggttcgtttataaagcggtggtcgcgattacgcgatcggattgaatgtttagaatggttgtcggaatgattttgtttttagtagtagggttacggtgtgtatcggacgtacgaagtgtacgtcgttgcgttttaacgtattagtttcgggatcggtagtttcgttagagaagtttaattatattcggtagtagtgtttcggtgttttcgttttttatatgggtcgatatagtagttattcgtttttatcggtagttagacgtttagtttggtaacggtaatatcgtaattacgcgtttaattttttgtcgttttgttcggttgtttttagcgtcgaacgtttgggtaatcgtcgggtcgcgtttttcgatttacgattcggttgcgttttcggttaggttagttatttttagcgatacgaggtttggatttgtcgttcgtttttagcgtgcgaatacgtttggttatttcgttttggttttgatatagttacggttggaggagatttttacggtattttttgggtaatgttaagtttattcgttagcgatttttcgatttttataattgttttggttgtaaaatcgcgtttaatagcgcgtgtttggtttagtagggaagtgttcggttagacgataggtggtttcgatatacgggaatttatcgttttatttaatgtttcggcgtcgtttttaaagatacgtgtagtcgggtcgagataacgtttggatgtagcgggttagtttttagcggcgttttaaacgttcgtagtgtttcgggaacggatttttcgttattttatcgagggtaaaagacgttttatgtttttttgttgtatgataaacggttcgacgtcgttatcggaggcgttgcgttgtagttcggaatattttagtcggtttatttagtgcgttttattttagtaattgacgtttcggattttacgggttattttgcggtttgcggaggcgcggttatatagaatgcggcggttaagcggttatgttttgtttagtttagcgtgttatcgaggttagacggatcggcgttattacgggtgttatttggttgtttttcggcgtttagttatcggcgaaaatttagtattataggaggttgtatcgttatcgcgtaattgggcgaacgaattaagttttggttttttttgacgataatcgtatcggttgtcggatcggtaatatcgttagcgttttatcgttgttttttatcgttattttttttgaagatggttttgcggaatggcgtagttttatgttatgtttagtatttggttcgggttcggttattttgttcggtatatattttgcgtaagcgtaggaagatatcggagggatttcgtcgttagttagcgtaattttcggggcgttcgtatttttttatgttattgtaattagcgatttgagttaacgatagaatcgttttttttcggaagtaggtcgatggtagacggaatatttcggtttggattttcgacgagtaattt

SEQ ID NO: 9860 - DNA, 1592 bp, Artificial Sequence
  chemically treated genomic DNA (Homo sapiens) CpG-island No: 9860
aaattactcgtcgaaaatccaaaccgaaatattccgtctaccatcgacctacttccgaaaaaaaacgattctatcgttaactcaaatcgctaattacaataacataaaaaaatacgaacgccccgaaaattacgctaactaacgacgaaatccctccgatatcttcctacgcttacgcaaaatatataccgaacaaaataaccgaacccgaaccaaatactaaacataacataaaactacgccattccgcaaaaccatcttcaaaaaaaataacgataaaaaacaacgataaaacgctaacgatattaccgatccgacaaccgatacgattatcgtcaaaaaaaaccaaaacttaattcgttcgcccaattacgcgataacgatacaacctcctataatactaaattttcgccgataactaaacgccgaaaaacaaccaaataacacccgtaataacgccgatccgtctaacctcgataacacgctaaactaaacaaaacataaccgcttaaccgccgcattctatataaccgcgcctccgcaaaccgcaaaataacccgtaaaatccgaaacgtcaattactaaaataaaacgcactaaataaaccgactaaaatattccgaactacaacgcaacgcctccgataacgacgtcgaaccgtttatcatacaacaaaaaaacataaaacgtcttttaccctcgataaaataacgaaaaatccgttcccgaaacactacgaacgtttaaaacgccgctaaaaactaacccgctacatccaaacgttatctcgacccgactacacgtatctttaaaaacgacgccgaaacattaaataaaacgataaattcccgtatatcgaaaccacctatcgtctaaccgaacacttccctactaaaccaaacacgcgctattaaacgcgattttacaaccaaaacaattataaaaatcgaaaaatcgctaacgaataaacttaacattacccaaaaaataccgtaaaaatctcctccaaccgtaactatatcaaaaccaaaacgaaataaccaaacgtattcgcacgctaaaaacgaacgacaaatccaaacctcgtatcgctaaaaataactaacctaaccgaaaacgcaaccgaatcgtaaatcgaaaaacgcgacccgacgattacccaaacgttcgacgctaaaaacaaccgaacaaaacgacaaaaaattaaacgcgtaattacgatattaccgttaccaaactaaacgtctaactaccgataaaaacgaataactactatatcgacccatataaaaaacgaaaacaccgaaacactactaccgaatataattaaacttctctaacgaaactaccgatcccgaaactaatacgttaaaacgcaacgacgtacacttcgtacgtccgatacacaccgtaaccctactactaaaaacaaaatcattccgacaaccattctaaacattcaatccgatcgcgtaatcgcgaccaccgctttataaacgaaccgaaattcaccatcgataacgccatcaatatccgaaaattctacgtaaacgtaaaaaaatcatcgccgattaaaaaaacgtaaaacgaaa

SEQ ID NO: 9861 - DNA, 594 bp, Artificial Sequence
  chemically treated genomic DNA (Homo sapiens) CpG-island No: 9861
cggttcggttttcgggatagttaaattgtgggggtacggggcggtggtttatttcggaagaaatattcgttcgcggtagtttagaggaagttttttttcggaatatgttttcgcgcgttaagatacgatagttgtttgttttttacgtcgtcgatatatattattttttattttcggtacgtatgatattcgtgacgaaattgaatgagggtagtatggaaattaaagatttgatgtgataggggcggtattaatggtgttggtatcgcggtagacgtcgttggacgcggtttatcgtgttgatgttggaggcgtaggatttcgtttgcgcgatttttttcgtagtttaaaatttatttacggtggtttgcgttattttgagtattatgaattcgtttggttagcgaggcgttggttgaacgtgaagtgttgttgaaaatgtttcgtatatcgttttttcgatgcgttttcgtttgttatatcgttcgtattgcgttcggcgtggatgattcgtattggtttgtttatgtacgattatcgggtaaacgtattagtttgtcgggattaattggtttgcgttttggcgtaatttag

SEQ ID NO: 9862 - DNA, 594 bp, Artificial Sequence
  chemically treated genomic DNA (Homo sapiens) CpG-island No: 9862
ctaaattacgccaaaacgcaaaccaattaatcccgacaaactaatacgtttacccgataatcgtacataaacaaaccaatacgaatcatccacgccgaacgcaatacgaacgatataacaaacgaaaacgcatcgaaaaaacgatatacgaaacattttcaacaacacttcacgttcaaccaacgcctcgctaaccaaacgaattcataatactcaaaataacgcaaaccaccgtaaataaattttaaactacgaaaaaaatcgcgcaaacgaaatcctacgcctccaacatcaacacgataaaccgcgtccaacgacgtctaccgcgataccaacaccattaataccgcccctatcacatcaaatctttaatttccatactaccctcattcaatttcgtcacgaatatcatacgtaccgaaaataaaaaataatatatatcgacgacgtaaaaaacaaacaactatcgtatcttaacgcgcgaaaacatattccgaaaaaaaacttcctctaaactaccgcgaacgaatatttcttccgaaataaaccaccgccccgtacccccacaatttaactatcccgaaaaccgaaccg

SEQ ID NO: 9863 - DNA, 594 bp, Artificial Sequence
  chemically treated genomic DNA (Homo sapiens) CpG-island No: 9863
ttgaattgcgttaaaacgtaaattagttgatttcggtaagttggtgcgtttattcgatgatcgtatataaatagattaatgcgaattatttacgtcgggcgtagtgcggacgatgtggtaggcgaaaacgtatcgggaaggcgatatgcggggtatttttagtagtattttacgtttagttagcgtttcgttgattaggcggatttatagtgtttaaggtagcgtaggttatcgtgaatgagttttgaattgcggaagaggtcgcgtaagcgagattttgcgtttttagtattagtacggtaaatcgcgtttagcggcgtttgtcgcgatattagtattattgatgtcgtttttattatattagatttttggtttttatgttgtttttatttaatttcgttacgggtgttatgcgtgtcgggggtaaggagtaatatgtgtcgacggcgtgaaagataaatagttgtcgtgttttggcgcgcgaaaatatatttcggggggagattttttttggattgtcgcgggcgggtatttttttcgggataaattatcgtttcgtatttttataatttggttatttcggaagtcgaatcg

SEQ ID NO: 9864 - DNA, 594 bp, Artificial Sequence
  chemically treated genomic DNA (Homo sapiens) CpG-island No: 9864
cgattcgacttccgaaataaccaaattataaaaatacgaaacgataatttatcccgaaaaaaatacccgcccgcgacaatccaaaaaaaatctccccccgaaatatattttcgcgcgccaaaacacgacaactatttatctttcacgccgtcgacacatattactccttacccccgacacgcataacacccgtaacgaaattaaataaaaacaacataaaaaccaaaaatctaatataataaaaacgacatcaataatactaatatcgcgacaaacgccgctaaacgcgatttaccgtactaatactaaaaacgcaaaatctcgcttacgcgacctcttccgcaattcaaaactcattcacgataacctacgctaccttaaacactataaatccgcctaatcaacgaaacgctaactaaacgtaaaatactactaaaaataccccgcatatcgccttcccgatacgttttcgcctaccacatcgtccgcactacgcccgacgtaaataattcgcattaatctatttatatacgatcatcgaataaacgcaccaacttaccgaaatcaactaatttacgttttaacgcaattcaa

SEQ ID NO: 9865 - DNA, 584 bp, Artificial Sequence
  chemically treated genomic DNA (Homo sapiens) CpG-island No: 9865
  unsure (38, 102)
tcgtcgcgtcggcggttaaggttaacgcgggtttcggngggtttttttaggggacgtttttattattgggcggcgtttaggttattttatttttttttaggntttattggcgatttcggttattggtattggcgtaggtaacgttattgacgggcgattttcgtgatgtacgacgtttttggtattatcggcggttatatttttaattcgttaaaaattttttcgtcgaaacgggcgatattcgcgcggttgtcggtagtatatggttgaagtggagttcggcgtttattcgggcgaagaattagtttttattaaggagttacgttgtgttaattatcgaaattttgtcgcgttgcgttagtaaattcgtcgtttgcgtatggaaggtaagcgcgtggcgtggtgtttattatgggtaatttgtacgatggttatatgaagttggtcgagaagttaaagttcgcgtcgatgtggtcgtcgttagtattttcgttaatcgatgtagttcgatcgttcggaagatttggttcgttatttacggattttgaggaggattgcgagaagttaaataaacgtaaagtgga

SEQ ID NO: 9866 - DNA, 584 bp, Artificial Sequence
  chemically treated genomic DNA (Homo sapiens) CpG-island No: 9866
  unsure (483, 547)
tccactttacgtttatttaacttctcgcaatcctcctcaaaatccgtaaataacgaaccaaatcttccgaacgatcgaactacatcgattaacgaaaatactaacgacgaccacatcgacgcgaactttaacttctcgaccaacttcatataaccatcgtacaaattacccataataaacaccacgccacgcgcttaccttccatacgcaaacgacgaatttactaacgcaacgcgacaaaatttcgataattaacacaacgtaactccttaataaaaactaattcttcgcccgaataaacgccgaactccacttcaaccatatactaccgacaaccgcgcgaatatcgcccgtttcgacgaaaaaatttttaacgaattaaaaatataaccgccgataataccaaaaacgtcgtacatcacgaaaatcgcccgtcaataacgttacctacgccaataccaataaccgaaatcgccaataaancctaaaaaaaaataaaataacctaaacgccgcccaataataaaaacgtcccctaaaaaaacccnccgaaacccgcgttaaccttaaccgccgacgcgacga

SEQ ID NO: 9867 - DNA, 584 bp, Artificial Sequence
  chemically treated genomic DNA (Homo sapiens) CpG-island No: 9867
  unsure (483, 547)
tttattttacgtttgtttagtttttcgtagttttttttaaggttcgtggataacgagttagatttttcgggcggtcgaattgtatcggttaacgaaaatattgacgacgattatatcggcgcgggttttggtttttcgattagttttatatggttatcgtgtaggttatttatggtaggtattacgttacgcgtttgttttttatacgtaggcggcgaatttgttgacgtagcgcggtagggtttcgataattaatataacgtgattttttaatggaaattggtttttcgttcggataaacgtcggattttattttagttatatattgtcgatagtcgcgcggatgtcgttcgtttcggcgaggaaatttttagcgaattaggaatgtgatcgtcggtaatattaaaggcgtcgtgtattacgaggatcgttcgttagtgacgttgtttgcgttaatgttaataatcgggatcgttagtaagntttggggaaaaatggagtggtttgggcgtcgtttaatagtggaagcgttttttaagaggatttntcggggttcgcgttggttttggtcgtcggcgcggcgg

SEQ ID NO: 9868 - DNA, 584 bp, Artificial Sequence
  chemically treated genomic DNA (Homo sapiens) CpG-island No: 9868
  unsure (38, 102)
ccgccgcgccgacgaccaaaaccaacgcgaaccccganaaatcctcttaaaaaacgcttccactattaaacgacgcccaaaccactccatttttccccaaancttactaacgatcccgattattaacattaacgcaaacaacgtcactaacgaacgatcctcgtaatacacgacgcctttaatattaccgacgatcacattcctaattcgctaaaaatttcctcgccgaaacgaacgacatccgcgcgactatcgacaatatataactaaaataaaatccgacgtttatccgaacgaaaaaccaatttccattaaaaaatcacgttatattaattatcgaaaccctaccgcgctacgtcaacaaattcgccgcctacgtataaaaaacaaacgcgtaacgtaatacctaccataaataacctacacgataaccatataaaactaatcgaaaaaccaaaacccgcgccgatataatcgtcgtcaatattttcgttaaccgatacaattcgaccgcccgaaaaatctaactcgttatccacgaaccttaaaaaaaactacgaaaaactaaacaaacgtaaaataaa

SEQ ID NO: 9869 - DNA, 1188 bp, Artificial Sequence
  chemically treated genomic DNA (Homo sapiens) CpG-island No: 9869
aggcgttgtttcgcgtcgatttgatgtttggtagtattcgatgtagtggtatagtattttttcgttttttaaatttggatcgataaagtttttttttacggttgggtttacggttatggcggtcggcgttgtatggtaaatatttgttgtgggcggtgacgatcggcggcgggaaagttattttgaaattggtgcgtattcgggttttgatgtgttgtcgcgtcgttataggcgacggtaatttattgcgggttgaattggttgttatcgttgttatgtattgtatttttatttgtgacgacgaaattttcgaagggtagcgcgttattataagtaacgtttgttggaatggtaggaggtttattatgatagttatacgttgatttaggcgttgatttatttcggttcggtagcgttattgtatttattgcggtacgttttggtttgggatcggtatttggttatcgatcgtcggttgtattattggttcgtgggggttgcgattggtgatcgattcgaatttattttgtattttgtcgagattgggttggtgttgatgttgttattatcggtttcgaattcgatttataaaggttgtggaagttgcgtgcggagtgttcggttgtggcgtattgtagatggtgatttgcggcggtttgttgggttgttttgtatgttatttgggttgcgttggtaggtcgcggaattgatggtatgacgttggcgtttttttttacggcgattgttatgtaggcgatgatgaacgtaatttgatggtgacgtaaatgggtcgtagtgtttttgcggtgtgttgttttaggatatcgcggcgatttcgttggtggcgatgatttcgttttggtaacgagtagtgtttcgacgacgatgggcgtatttgttttttcgggttaaaagtggcgggtgcgttggtgttggtggtattgttggggcgttatttacgcgttcggcgttgcgttttgtagttcgttttggtttgcgggaagttttagtgtcgtggcgttatttttcgtgtttggttttggtttgttgttggagagtcggtttgtcgatggcgatgggcgcgtttttgacgggcgtattgcgtaagttcggatatcgattgtcggatgtattttttaattagttcggtattttttatatttatgttttaaatttgttggtatttaa

SEQ ID NO: 9870 - DNA, 1188 bp, Artificial Sequence
  chemically treated genomic DNA (Homo sapiens) CpG-island No: 9870
ttaaataccaacaaatttaaaacataaatataaaaaataccgaactaattaaaaaatacatccgacaatcgatatccgaacttacgcaatacgcccgtcaaaaacgcgcccatcgccatcgacaaaccgactctccaacaacaaaccaaaaccaaacacgaaaaataacgccacgacactaaaacttcccgcaaaccaaaacgaactacaaaacgcaacgccgaacgcgtaaataacgccccaacaataccaccaacaccaacgcacccgccacttttaacccgaaaaaacaaatacgcccatcgtcgtcgaaacactactcgttaccaaaacgaaatcatcgccaccaacgaaatcgccgcgatatcctaaaacaacacaccgcaaaaacactacgacccatttacgtcaccatcaaattacgttcatcatcgcctacataacaatcgccgtaaaaaaaaacgccaacgtcataccatcaattccgcgacctaccaacgcaacccaaataacatacaaaacaacccaacaaaccgccgcaaatcaccatctacaatacgccacaaccgaacactccgcacgcaacttccacaacctttataaatcgaattcgaaaccgataataacaacatcaacaccaacccaatctcgacaaaatacaaaataaattcgaatcgatcaccaatcgcaacccccacgaaccaataatacaaccgacgatcgataaccaaataccgatcccaaaccaaaacgtaccgcaataaatacaataacgctaccgaaccgaaataaatcaacgcctaaatcaacgtataactatcataataaacctcctaccattccaacaaacgttacttataataacgcgctacccttcgaaaatttcgtcgtcacaaataaaaatacaatacataacaacgataacaaccaattcaacccgcaataaattaccgtcgcctataacgacgcgacaacacatcaaaacccgaatacgcaccaatttcaaaataactttcccgccgccgatcgtcaccgcccacaacaaatatttaccatacaacgccgaccgccataaccgtaaacccaaccgtaaaaaaaaactttatcgatccaaatttaaaaaacgaaaaaatactataccactacatcgaatactaccaaacatcaaatcgacgcgaaacaacgcct

SEQ ID NO: 9871 - DNA, 1188 bp, Artificial Sequence
  chemically treated genomic DNA (Homo sapiens) CpG-island No: 9871
ttgaatgttagtaaatttgagatatgagtgtagaaggtatcgagttgattgaagggtatattcggtagtcggtattcgagtttgcgtagtacgttcgttagaaacgcgtttatcgttatcgataagtcgattttttagtagtaaattaaagttaaatacgaggaataacgttacggtattaaaatttttcgtaagttagagcgggttataaaacgtagcgtcggacgcgtgaatagcgttttagtaatattattagtattagcgtattcgttatttttaattcgagagagtaaatgcgtttatcgtcgtcgaggtattgttcgttgttagagcggaattatcgttattagcgggatcgtcgcgatattttggaatagtatatcgtaaaggtattgcgatttatttgcgttattattagattgcgtttattatcgtttgtatggtaatcgtcgtagaggagagcgttagcgttatgttattaatttcgcgatttgttagcgtagtttaagtaatatgtagaatagtttagtaggtcgtcgtaaattattatttgtaatgcgttatagtcgaatatttcgtacgtagtttttatagtttttgtggatcgagttcgaggtcgataataatagtattagtattagtttaatttcggtaaagtgtagaatagattcggatcggttattagtcgtagtttttacgggttaataatgtagtcggcgatcggtagttaagtatcgattttagattaagacgtatcgtaatgggtataatagcgttgtcgaatcgagataaattagcgtttgaattagcgtatggttattatgatgggttttttgttattttagtagacgttgtttatagtgacgcgttgtttttcgagggtttcgtcgttataaataaaggtgtagtgtatggtaacggtggtagttagtttagttcgtagtagattgtcgtcgtttgtagcggcgcgatagtatattaaagttcggatgcgtattaattttaaaatggttttttcgtcgtcggtcgttatcgtttatagtaaatgtttgttatgtagcgtcggtcgttatgatcgtaagtttagtcgtgggagaaaattttatcgatttaagtttgaggagcggaggaatgttgtattattgtatcggatgttgttagatattagatcggcgcgagatagcgttt

SEQ ID NO: 9872 - DNA, 1188 bp, Artificial Sequence
  chemically treated genomic DNA (Homo sapiens) CpG-island No: 9872
aaacgctatctcgcgccgatctaatatctaacaacatccgatacaataatacaacattcctccgctcctcaaacttaaatcgataaaattttctcccacgactaaacttacgatcataacgaccgacgctacataacaaacatttactataaacgataacgaccgacgacgaaaaaaccattttaaaattaatacgcatccgaactttaatatactatcgcgccgctacaaacgacgacaatctactacgaactaaactaactaccaccgttaccatacactacacctttatttataacgacgaaaccctcgaaaaacaacgcgtcactataaacaacgtctactaaaataacaaaaaacccatcataataaccatacgctaattcaaacgctaatttatctcgattcgacaacgctattatacccattacgatacgtcttaatctaaaatcgatacttaactaccgatcgccgactacattattaacccgtaaaaactacgactaataaccgatccgaatctattctacactttaccgaaattaaactaatactaatactattattatcgacctcgaactcgatccacaaaaactataaaaactacgtacgaaatattcgactataacgcattacaaataataatttacgacgacctactaaactattctacatattacttaaactacgctaacaaatcgcgaaattaataacataacgctaacgctctcctctacgacgattaccatacaaacgataataaacgcaatctaataataacgcaaataaatcgcaatacctttacgatatactattccaaaatatcgcgacgatcccgctaataacgataattccgctctaacaacgaacaatacctcgacgacgataaacgcatttactctctcgaattaaaaataacgaatacgctaatactaataatattactaaaacgctattcacgcgtccgacgctacgttttataacccgctctaacttacgaaaaattttaataccgtaacgttattcctcgtatttaactttaatttactactaaaaaatcgacttatcgataacgataaacgcgtttctaacgaacgtactacgcaaactcgaataccgactaccgaatatacccttcaatcaactcgataccttctacactcatatctcaaatttactaacattcaa

SEQ ID NO: 9873 - DNA, 513 bp, Artificial Sequence
  chemically treated genomic DNA (Homo sapiens) CpG-island No: 9873
  unsure (317)
aagaacgtcgtgtaaattcgattaacggggtcgttaggatcgttgtgatgggggtcgggaaatttatcgaagagagggcggtcgattattgggggaaacgttgaggagaaatttcgtttgatgataagtcgttttttagtgtatacggtttttcggaatagaggtaaatatattacggtaataataattcggtagagagagtttcgcgataataggtatattatttagaataggtattattgaataaagtaataggcggtataaggttatttcgcggtagggttttttcgcgttttttattcgattttttcgtgttngagtgttattggaagtttatggtcgcgtatttttgtagattggtgtcgttacgtcgttattgtagtattgatgttgttgatcgcgtcgaaattgtatcgtagacgtaggatgacgttgtagataaagcggcgaaagtagtcgtagcgtaaatttagggaaatttttttataagtcgttaatttttcgttagcggtt

SEQ ID NO: 9874 - DNA, 513 bp, Artificial Sequence
  chemically treated genomic DNA (Homo sapiens) CpG-island No: 9874
  unsure (197)
aaccgctaacgaaaaattaacgacttataaaaaaatttccctaaatttacgctacgactactttcgccgctttatctacaacgtcatcctacgtctacgatacaatttcgacgcgatcaacaacatcaatactacaataacgacgtaacgacaccaatctacaaaaatacgcgaccataaacttccaataacactcnaacacgaaaaaatcgaataaaaaacgcgaaaaaaccctaccgcgaaataaccttataccgcctattactttattcaataatacctattctaaataatatacctattatcgcgaaactctctctaccgaattattattaccgtaatatatttacctctattccgaaaaaccgtatacactaaaaaacgacttatcatcaaacgaaatttctcctcaacgtttcccccaataatcgaccgccctctcttcgataaatttcccgacccccatcacaacgatcctaacgaccccgttaatcgaatttacacgacgttctt

SEQ ID NO: 9875 - DNA, 513 bp, Artificial Sequence
  chemically treated genomic DNA (Homo sapiens) CpG-island No: 9875
  unsure (197)
agtcgttaacgaaaagttagcggtttgtaaaagagtttttttgaatttacgttacggttgttttcgtcgttttgtttgtagcgttattttgcgtttgcggtgtagtttcggcgcggttagtagtattagtattgtaataacggcgtagcgatattaatttgtaagaatacgcgattatagatttttagtgatatttnagtacgggggggtcgggtggggagcgcgaggaggttttgtcgcggggtaattttgtgtcgtttgttgttttgtttagtggtatttgttttgggtgatgtgtttattatcgcggggttttttttatcgggttgttattatcgtggtgtgtttgtttttgtttcgggaaatcgtgtatattagaggacggtttattattaggcggggtttttttttagcgttttttttaatagtcggtcgtttttttttcgataagtttttcggtttttattatagcgattttggcgatttcgttaatcgggtttgtacggcgttttt

SEQ ID NO: 9876 - DNA, 513 bp, Artificial Sequence
  chemically treated genomic DNA (Homo sapiens) CpG-island No: 9876
  unsure (317)
aaaaacgccgtacaaacccgattaacgaaatcgccaaaatcgctataataaaaaccgaaaaacttatcgaaaaaaaaacgaccgactattaaaaaaaacgctaaaaaaaaaccccgcctaataataaaccgtcctctaatatacacgatttcccgaaacaaaaacaaacacaccacgataataacaacccgataaaaaaaaccccgcgataataaacacatcacccaaaacaaataccactaaacaaaacaacaaacgacacaaaattaccccgcgacaaaacctcctcgcgctccccacccgacccccccgtactnaaatatcactaaaaatctataatcgcgtattcttacaaattaatatcgctacgccgttattacaatactaatactactaaccgcgccgaaactacaccgcaaacgcaaaataacgctacaaacaaaacgacgaaaacaaccgtaacgtaaattcaaaaaaactcttttacaaaccgctaacttttcgttaacgact

SEQ ID NO: 9877 - DNA, 573 bp, Artificial Sequence
  chemically treated genomic DNA (Homo sapiens) CpG-island No: 9877
agcgtcgcgttatttttttgttgcgttgttttagtttttaggtaattagcgaatcgtgttagtcgtttgttagatgttgattacgttttgattgaatttttacgttaatatcggatgttaaagcgtggcgcgtatcgtcgagtcggttttattgatatgttgatcgttcggttcgacgaacgtagcgttttataacggattgtattcgattgtttttgttattagcggtaaaacgtttaatgtttagaaattagtttttgcgtttatgagaggtcgatacggattcggataaatttattgaatagtgttatattagtttcgtttaatgtttatgcgttatcgttatcgagagaaattagcgtcgaattagtgtgttagagtagcggttcgtttttgtttttagtatcgttatcgcgcgttttgtcgggtaaaaacgattaatagagaagaacgttgcgttaatcggtagtcgcgttcggggtgtaaatttggtatttttattacgcgttgtatgtgggtaaatttgtcgtggtgtgtaattgttggatcgttaaattttcgattataggttat

SEQ ID NO: 9878 - DNA, 573 bp, Artificial Sequence
  chemically treated genomic DNA (Homo sapiens) CpG-island No: 9878
ataacctataatcgaaaatttaacgatccaacaattacacaccacgacaaatttacccacatacaacgcgtaataaaaataccaaatttacaccccgaacgcgactaccgattaacgcaacgttcttctctattaatcgtttttacccgacaaaacgcgcgataacgatactaaaaacaaaaacgaaccgctactctaacacactaattcgacgctaatttctctcgataacgataacgcataaacattaaacgaaactaatataacactattcaataaatttatccgaatccgtatcgacctctcataaacgcaaaaactaatttctaaacattaaacgttttaccgctaataacaaaaacaatcgaatacaatccgttataaaacgctacgttcgtcgaaccgaacgatcaacatatcaataaaaccgactcgacgatacgcgccacgctttaacatccgatattaacgtaaaaattcaatcaaaacgtaatcaacatctaacaaacgactaacacgattcgctaattacctaaaaactaaaacaacgcaacaaaaaaataacgcgacgct

SEQ ID NO: 9879 - DNA, 573 bp, Artificial Sequence
  chemically treated genomic DNA (Homo sapiens) CpG-island No: 9879
atgatttgtgatcgagagtttagcgatttaataattatatattacggtaaatttatttatatgtagcgcgtagtggggatgttagatttatatttcggacgcggttatcgattggcgtagcgtttttttttgttggtcgtttttattcggtaagacgcgcggtaacggtgttggaaatagaaacgggtcgttattttgatatattggttcggcgttggtttttttcgatggcgataacgtatgggtattaagcgaagttggtgtggtattatttagtggatttgttcgagttcgtatcggttttttatgggcgtaaaaattggtttttgggtattgggcgttttatcgttgatagtaggaataatcggatgtaattcgttatgagacgttgcgttcgtcgggtcgggcggttaatatgttaataaaatcgattcggcggtacgcgttacgttttggtattcggtattagcgtgaaggtttagttagagcgtagttagtatttaataagcggttggtacgattcgttgattgtttggaagttggagtaacgtaataggaaaatagcgcggcgtt

SEQ ID NO: 9880 - DNA, 573 bp, Artificial Sequence
  chemically treated genomic DNA (Homo sapiens) CpG-island No: 9880
aacgccgcgctattttcctattacgttactccaacttccaaacaatcaacgaatcgtaccaaccgcttattaaatactaactacgctctaactaaaccttcacgctaataccgaataccaaaacgtaacgcgtaccgccgaatcgattttattaacatattaaccgcccgacccgacgaacgcaacgtctcataacgaattacatccgattattcctactatcaacgataaaacgcccaatacccaaaaaccaatttttacgcccataaaaaaccgatacgaactcgaacaaatccactaaataataccacaccaacttcgcttaatacccatacgttatcgccatcgaaaaaaaccaacgccgaaccaatatatcaaaataacgacccgtttctatttccaacaccgttaccgcgcgtcttaccgaataaaaacgaccaacaaaaaaaaacgctacgccaatcgataaccgcgtccgaaatataaatctaacatccccactacgcgctacatataaataaatttaccgtaatatataattattaaatcgctaaactctcgatcacaaatcat

SEQ ID NO: 9881 - DNA, 1347 bp, Artificial Sequence
  chemically treated genomic DNA (Homo sapiens) CpG-island No: 9881
  unsure (7, 15, 17, 21, 1204..1205, 1277, 1282, 1293, 1301..1302, 1310)
  unsure (1317..1318, 1323..1324, 1328, 1331, 1335..1336, 1338, 1340)
  unsure (1342, 1344, 1346)
cgtgggngttcgggntnttanggttcggtttcgggtcggcgggttagtgtttttatggttgaagttagcgcgagaatttttttttcgatagtttttgtacggttatgcgtttttggaaattgttagttcgaggttggaataggtggcggtgtaatcgtaagtcggtagacgtggttggtgtcggaggcgtaattatttgtcgatttcggtgattagttttaagaaatatcgaatcggcgttggtgatgttatcgattagtttacggggttgcgggtttgaatgattaggtgtttcgggtcgtattggttggagattttacgtattgcgttaaatttttagttacgattaggcggttggcgtttaggtttggcgggcggtttcggtacgcggtagttttgttagttggcgttcgaggtttcggtaacgcgacgcgttatattagtagcgggcgttagtaaaatttttgtgagttcgggtcgtgtttagtttgagagagtaaattagaagttataaattcggcgtagcgtcgttgttagtaattattagtattttcgacgggttgcgggtatatcgatcgtcgtatcgtttagacgttggtttatttgacgttcgtttcggtgataaaggcgttattcggttcgaagattttgtttattttggtatagatttcgtattaaacgttagtgcggtaatggtttgtgcgtcgcgacgttaaatacgttttgtatatcgtatagttgcgtcgtataaaggatttatcggtaatcggcggcggtgagtatagtattatttttttatagttcgtatattcgtcggagtcgttagtattaatatcgttgagaagagcggggcgggtcgttaggaatatataatttaattgaagttatcggacgcgtgatttgcggtaacgtacgtttggttgcgtttttatatttatcggcggtagtttttggtagtgtggaaggttttaatattttttttattgcgtattcggtttaattcgtttgttttagttcgtcgtttaggcgtcgcggcgggggattttcgcgatttcgcgcggtaacgggttattaaattcgcgcgttttcgtaggttttatgcggtgtttttcgttatcgagaatatcgtaatagtgcgggtatgttttaaggcggaatcgcgggggtttatagtggggagtcgttgaaagttttgtgcggagtnngattttttcggtttataatttttcgttatgaacgttttgcggcgttttcgtattacgttaggtacgcgtcgnaggtntgttcggattncggttatnngtttgttncgaggannnttanngtanggnatanntngngntntng

SEQ ID NO: 9882 - DNA, 1347 bp, Artificial Sequence
  chemically treated genomic DNA (Homo sapiens) CpG-island No: 9882
  unsure (2, 4, 6, 8, 10, 12..13, 17, 20, 24..25, 29..30, 38, 46..47)
  unsure (55, 66, 71, 143..144, 1327, 1331, 1333, 1341)
cnanancncnanntatnccntacnntaannntcctcgnaacaaacnnataaccgnaatccgaacanacctncgacgcgtacctaacgtaatacgaaaacgccgcaaaacgttcataacgaaaaattataaaccgaaaaaatcnnactccgcacaaaactttcaacgactccccactataaacccccgcgattccgccttaaaacatacccgcactattacgatattctcgataacgaaaaacaccgcataaaacctacgaaaacgcgcgaatttaataacccgttaccgcgcgaaatcgcgaaaatcccccgccgcgacgcctaaacgacgaactaaaacaaacgaattaaaccgaatacgcaataaaaaaaatattaaaaccttccacactaccaaaaactaccgccgataaatataaaaacgcaaccaaacgtacgttaccgcaaatcacgcgtccgataacttcaattaaattatatattcctaacgacccgccccgctcttctcaacgatattaatactaacgactccgacgaatatacgaactataaaaaaataatactatactcaccgccgccgattaccgataaatcctttatacgacgcaactatacgatatacaaaacgtatttaacgtcgcgacgcacaaaccattaccgcactaacgtttaatacgaaatctataccaaaataaacaaaatcttcgaaccgaataacgcctttatcaccgaaacgaacgtcaaataaaccaacgtctaaacgatacgacgatcgatatacccgcaacccgtcgaaaatactaataattactaacaacgacgctacgccgaatttataacttctaatttactctctcaaactaaacacgacccgaactcacaaaaattttactaacgcccgctactaatataacgcgtcgcgttaccgaaacctcgaacgccaactaacaaaactaccgcgtaccgaaaccgcccgccaaacctaaacgccaaccgcctaatcgtaactaaaaatttaacgcaatacgtaaaatctccaaccaatacgacccgaaacacctaatcattcaaacccgcaaccccgtaaactaatcgataacatcaccaacgccgattcgatatttcttaaaactaatcaccgaaatcgacaaataattacgcctccgacaccaaccacgtctaccgacttacgattacaccgccacctattccaacctcgaactaacaatttccaaaaacgcataaccgtacaaaaactatcgaaaaaaaaattctcgcgctaacttcaaccataaaaacactaacccgccgacccgaaaccgaaccntaanancccgaacncccacg

SEQ ID NO: 9883 - DNA, 1347 bp, Artificial Sequence
  chemically treated genomic DNA (Homo sapiens) CpG-island No: 9883
  unsure (2, 4, 6, 8, 10, 12..13, 17, 20, 24..25, 29..30, 38, 46..47)
  unsure (55, 66, 71, 143..144, 1327, 1331, 1333, 1341)
tnanantntngnntgtnttntgtnntggnnnttttcgnaataggtnngtaatcgnaattcggatanatttncggcgcgtgtttggcgtagtgcgggaacgtcgtagggcgtttatagcggggaattgtgggtcgaaaggattnngtttcgtataaagtttttaacggttttttattgtaagttttcgcgatttcgttttgaagtatattcgtattgttacgatattttcgataacggaaagtatcgtatgaggtttgcggaaacgcgcgagtttgataattcgttatcgcgcgaggtcgcgagaatttttcgtcgcgacgtttgagcgacgagttaaaataggcgaattgggtcgggtgcgtagtaaaaagaatattgaaattttttatattgttaaaaattgtcgtcggtagatgtagaaacgtagttaggcgtgcgttgtcgtaggttacgcgttcggtagttttagttgggttgtatatttttggcggttcgtttcgttttttttaacggtattaatgttggcgatttcggcgagtatgcgggttgtaaaaaagtggtgttgtgtttatcgtcgtcgattgtcgatggattttttatgcggcgtagttgtgcggtgtgtaggacgtgtttaacgtcgcggcgtataggttattgtcgtattggcgtttggtacggaatttgtgttaaagtggataaaattttcgggtcgggtaacgtttttgttatcgaagcgaacgttaggtgagttagcgtttggacggtgcggcgatcgatatgttcgtagttcgtcggaagtgttggtgattgttgatagcggcgttacgtcggatttgtggtttttgatttgtttttttaggttgaatacggttcggatttatagggattttattgacgttcgttgttgatatggcgcgtcgcgttgtcgaggtttcgaacgttaattggtagaattgtcgcgtgtcgaaatcgttcgttaggtttgaacgttagtcgtttgatcgtgattaaagatttagcgtagtgcgtgggatttttaattagtacggttcggagtatttgattatttagattcgtaatttcgtgaattggtcgatagtattattagcgtcggttcggtattttttgggattggttatcggaatcggtaggtgattacgttttcggtattaattacgtttatcgatttacggttatatcgttatttgttttagtttcgggttggtaatttttagaagcgtatgatcgtataggaattgtcgaaagaggggttttcgcgttggttttaattatagaaatattggttcgtcggttcgaagtcgggttntggnanttcgggtntttacg

SEQ ID NO: 9884 - DNA, 1347 bp, Artificial Sequence
  chemically treated genomic DNA (Homo sapiens) CpG-island No: 9884
  unsure (7, 15, 17, 21, 1204..1205, 1277, 1282, 1293, 1301..1302, 1310)
  unsure (1317..1318, 1323..1324, 1328, 1331, 1335..1336, 1338, 1340)
  unsure (1342, 1344, 1346)
cgtaaanacccgaantnccanaacccgacttcgaaccgacgaaccaatatttctataattaaaaccaacgcgaaaacccctctttcgacaattcctatacgatcatacgcttctaaaaattaccaacccgaaactaaaacaaataacgatataaccgtaaatcgataaacgtaattaataccgaaaacgtaatcacctaccgattccgataaccaatcccaaaaaataccgaaccgacgctaataatactatcgaccaattcacgaaattacgaatctaaataatcaaatactccgaaccgtactaattaaaaatcccacgcactacgctaaatctttaatcacgatcaaacgactaacgttcaaacctaacgaacgatttcgacacgcgacaattctaccaattaacgttcgaaacctcgacaacgcgacgcgccatatcaacaacgaacgtcaataaaatccctataaatccgaaccgtattcaacctaaaaaaacaaatcaaaaaccacaaatccgacgtaacgccgctatcaacaatcaccaacacttccgacgaactacgaacatatcgatcgccgcaccgtccaaacgctaactcacctaacgttcgcttcgataacaaaaacgttacccgacccgaaaattttatccactttaacacaaattccgtaccaaacgccaatacgacaataacctatacgccgcgacgttaaacacgtcctacacaccgcacaactacgccgcataaaaaatccatcgacaatcgacgacgataaacacaacaccacttttttacaacccgcatactcgccgaaatcgccaacattaataccgttaaaaaaaacgaaacgaaccgccaaaaatatacaacccaactaaaactaccgaacgcgtaacctacgacaacgcacgcctaactacgtttctacatctaccgacgacaatttttaacaatataaaaaatttcaatattctttttactacgcacccgacccaattcgcctattttaactcgtcgctcaaacgtcgcgacgaaaaattctcgcgacctcgcgcgataacgaattatcaaactcgcgcgtttccgcaaacctcatacgatactttccgttatcgaaaatatcgtaacaatacgaatatacttcaaaacgaaatcgcgaaaacttacaataaaaaaccgttaaaaactttatacgaaacnnaatcctttcgacccacaattccccgctataaacgccctacgacgttcccgcactacgccaaacacgcgccgnaaatntatccgaattncgattacnnacctattncgaaaannnccannacanaanacanncnanantntna

SEQ ID NO: 9885 - DNA, 991 bp, Artificial Sequence
  chemically treated genomic DNA (Homo sapiens) CpG-island No: 9885
tcgttgcgtaggcgagtagttagattagtagcgaagtgataatgtcgtttattattgtgatagcgcgatagtcgttaggttttgattaaatagtattatcgttatcgtacgtcgttttacgtttcggtgttaaagtttattacgttagggttgttagcgggttacgtattagcgattgaaaaatcgcgttattgacgtttagtgtgcgttaattaatagcgttattagtacgcgtggtaaacgttattcggtgttattatcgttatattgcgcggcgtatcgtttattagcgcggcgaatattgcgaggtttttagcgtgacggtatcgttgcgtaatttttagatatttgaattatataggcggaaattagtagtaaataggtgatgagtaatcggcgaagacgtaaattatgtattatttcgcgttttacgtcgtacgaggaagatcgtatcggtgtattaataaacgtattgattatagaaacgcgtagttcgtcggtataattattcgttcgatgatatcggtaaatagtagtagggtaggggagtaagtagcgtgacgggtagcgattagcgatgatcggtatttattagtaacgcgttatatgcggtattattaggttaataaaggtaatcgggttaatattgtcgtcgtattattataaagtacggtaatcgttagtagattaattattgtgtgcgcgttacgcgattgtttagcgtcgtcgcggtgtcgttgtcgggtttaaattgtttagcgcgcgatttagtaatagcgtagttgtttcggtattagtattcgggattagtattatttttaaggtatgtagattgcgaatattagcgaatcggtttgttagaaacgtaattgatcgtagacgttaggatagtagggcgattcggttggatttatttgcgtgagggtaacgcgggtattgattgtttattatcggtgtttatagattagtttttcgttgaaatatgaaatgt

SEQ ID NO: 9886 - DNA, 991 bp, Artificial Sequence
  chemically treated genomic DNA (Homo sapiens) CpG-island No: 9886
acatttcatatttcaacgaaaaactaatctataaacaccgataataaacaatcaatacccgcgttaccctcacgcaaataaatccaaccgaatcgccctactatcctaacgtctacgatcaattacgtttctaacaaaccgattcgctaatattcgcaatctacataccttaaaaataatactaatcccgaatactaataccgaaacaactacgctattactaaatcgcgcgctaaacaatttaaacccgacaacgacaccgcgacgacgctaaacaatcgcgtaacgcgcacacaataattaatctactaacgattaccgtactttataataatacgacgacaatattaacccgattacctttattaacctaataataccgcatataacgcgttactaataaataccgatcatcgctaatcgctacccgtcacgctacttactcccctaccctactactatttaccgatatcatcgaacgaataattataccgacgaactacgcgtttctataatcaatacgtttattaatacaccgatacgatcttcctcgtacgacgtaaaacgcgaaataatacataatttacgtcttcgccgattactcatcacctatttactactaatttccgcctatataattcaaatatctaaaaattacgcaacgataccgtcacgctaaaaacctcgcaatattcgccgcgctaataaacgatacgccgcgcaatataacgataataacaccgaataacgtttaccacgcgtactaataacgctattaattaacgcacactaaacgtcaataacgcgatttttcaatcgctaatacgtaacccgctaacaaccctaacgtaataaactttaacaccgaaacgtaaaacgacgtacgataacgataatactatttaatcaaaacctaacgactatcgcgctatcacaataataaacgacattatcacttcgctactaatctaactactcgcctacgcaacga

SEQ ID NO: 9887 - DNA, 991 bp, Artificial Sequence
  chemically treated genomic DNA (Homo sapiens) CpG-island No: 9887
atattttatattttaacgaaagattagtttatgagtatcgataataagtaattagtgttcgcgttatttttacgtaggtgggtttagtcggatcgttttgttattttgacgtttacgattagttgcgtttttggtaagtcggttcgttggtattcgtaatttatatattttaaaagtggtgttgatttcgggtgttgatgtcggagtaattgcgttattattgagtcgcgcgttgaatagtttgagttcggtagcgatatcgcgacggcgttgggtagtcgcgtggcgcgtatatagtgattggtttgttggcgattatcgtgttttgtggtagtgcgacggtaatgttggttcgattgtttttattggtttgatgatgtcgtatatggcgcgttgttggtgggtgtcgattatcgttggtcgttgttcgttacgttatttgtttttttgttttgttgttgtttgtcgatattatcgggcgggtgattgtgtcggcgaattgcgcgtttttgtggttagtgcgtttattggtgtatcggtgcgatttttttcgtgcgacgtaaaacgcgaggtggtgtatgatttacgttttcgtcgattatttattatttgtttgttgttggttttcgtttgtgtggtttaggtatttggggattacgtagcggtgtcgttacgttggaaatttcgtagtattcgtcgcgttgatgggcgatgcgtcgcgtagtatgacgatggtggtatcgaatggcgtttattacgcgtgttgatggcgttgttgattggcgtatattgggcgttagtggcgcgattttttagtcgttgatgcgtaattcgttggtagttttgacgtaatgggttttaatatcggggcgtggagcggcgtgcggtggcgatggtgttgtttggttaggatttgacggttatcgcgttgttataatggtgggcggtattgttatttcgttgttggtttggttgttcgtttgcgtaacgg

SEQ ID NO: 9888 - DNA, 991 bp, Artificial Sequence
  chemically treated genomic DNA (Homo sapiens) CpG-island No: 9888
ccgttacgcaaacgaacaaccaaaccaacaacgaaataacaataccgcccaccattataacaacgcgataaccgtcaaatcctaaccaaacaacaccatcgccaccgcacgccgctccacgccccgatattaaaacccattacgtcaaaactaccaacgaattacgcatcaacgactaaaaaatcgcgccactaacgcccaatatacgccaatcaacaacgccatcaacacgcgtaataaacgccattcgataccaccatcgtcatactacgcgacgcatcgcccatcaacgcgacgaatactacgaaatttccaacgtaacgacaccgctacgtaatccccaaatacctaaaccacacaaacgaaaaccaacaacaaacaaataataaataatcgacgaaaacgtaaatcatacaccacctcgcgttttacgtcgcacgaaaaaaatcgcaccgatacaccaataaacgcactaaccacaaaaacgcgcaattcgccgacacaatcacccgcccgataatatcgacaaacaacaacaaaacaaaaaaacaaataacgtaacgaacaacgaccaacgataatcgacacccaccaacaacgcgccatatacgacatcatcaaaccaataaaaacaatcgaaccaacattaccgtcgcactaccacaaaacacgataatcgccaacaaaccaatcactatatacgcgccacgcgactacccaacgccgtcgcgatatcgctaccgaactcaaactattcaacgcgcgactcaataataacgcaattactccgacatcaacacccgaaatcaacaccacttttaaaatatataaattacgaataccaacgaaccgacttaccaaaaacgcaactaatcgtaaacgtcaaaataacaaaacgatccgactaaacccacctacgtaaaaataacgcgaacactaattacttattatcgatactcataaactaatctttcgttaaaatataaaatat

SEQ ID NO: 9889 - DNA, 522 bp, Artificial Sequence
  chemically treated genomic DNA (Homo sapiens) CpG-island No: 9889
agacgaaaagcgggtagtttacgttacgtagagtaaatagacgattatttacgatggtagatgtatagtggagtacggggtgattttcgtttttttaagaagagaaggatgattgtagacgcgcgttttacgaaaggcgatgtttagttttagttcgggggtgtcggtcggagttaatgtattcgtacgtttgtcggtgataaattagtgttaggggtgtttatcggaagttataaatataggatttatcggggtatagtttagcgtcgtttttgtttttttttttattttttttttttggcgagggatgttagttttttgtagtcgggaagcggatcgttatatttttttgtatgatcgttgacgacgagtatttatcgtttttataattcgcgttattcgtacggaaatagttcgagtgggttagtgtcgattatagattatattttgattatgaggaatttcgattgttgcgcgatggatttgtaggtattataaatagggttagtacggttgcgtttt

SEQ ID NO: 9890 - DNA, 522 bp, Artificial Sequence
  chemically treated genomic DNA (Homo sapiens) CpG-island No: 9890
aaaacgcaaccgtactaaccctatttataatacctacaaatccatcgcgcaacaatcgaaattcctcataatcaaaatataatctataatcgacactaacccactcgaactatttccgtacgaataacgcgaattataaaaacgataaatactcgtcgtcaacgatcatacaaaaaaatataacgatccgcttcccgactacaaaaaactaacatccctcgccaaaaaaaaaaaataaaaaaaaaaacaaaaacgacgctaaactataccccgataaatcctatatttataacttccgataaacacccctaacactaatttatcaccgacaaacgtacgaatacattaactccgaccgacacccccgaactaaaactaaacatcgcctttcgtaaaacgcgcgtctacaatcatccttctcttcttaaaaaaacgaaaatcaccccgtactccactatacatctaccatcgtaaataatcgtctatttactctacgtaacgtaaactacccgcttttcgtct

SEQ ID NO: 9891 - DNA, 522 bp, Artificial Sequence
  chemically treated genomic DNA (Homo sapiens) CpG-island No: 9891
aggacgtagtcgtattgattttatttgtaatgtttataaatttatcgcgtagtaatcgaaattttttatggttaggatgtggtttgtagtcggtattggtttattcgggttgttttcgtacgaatggcgcgaattatgggggcggtaaatattcgtcgttagcggttatgtaagaagatgtgacggttcgtttttcggttgtaaaagattggtatttttcgttaaggggaaggaataaaaggaaaagtaaagacggcgttgaattgtgtttcgatgggttttgtgtttgtaattttcggtgggtatttttaatattggtttgttatcggtagacgtgcgggtatattaatttcgatcggtattttcggattgaaattgaatatcgtttttcgtgagacgcgcgtttgtaattatttttttttttttggagaggcgaagattatttcgtattttattgtgtatttattatcgtggatggtcgtttgtttattttgcgtggcgtgaattgttcgtttttcgttt

SEQ ID NO: 9892 - DNA, 522 bp, Artificial Sequence
  chemically treated genomic DNA (Homo sapiens) CpG-island No: 9892
aaacgaaaaacgaacaattcacgccacgcaaaataaacaaacgaccatccacgataataaatacacaataaaatacgaaataatcttcgcctctccaaaaaaaaaaaaataattacaaacgcgcgtctcacgaaaaacgatattcaatttcaatccgaaaataccgatcgaaattaatatacccgcacgtctaccgataacaaaccaatattaaaaatacccaccgaaaattacaaacacaaaacccatcgaaacacaattcaacgccgtctttacttttccttttattccttccccttaacgaaaaataccaatcttttacaaccgaaaaacgaaccgtcacatcttcttacataaccgctaacgacgaatatttaccgcccccataattcgcgccattcgtacgaaaacaacccgaataaaccaataccgactacaaaccacatcctaaccataaaaaatttcgattactacgcgataaatttataaacattacaaataaaatcaatacgactacgtcct

SEQ ID NO: 9893 - DNA, 1072 bp, Artificial Sequence
  chemically treated genomic DNA (Homo sapiens) CpG-island No: 9893
gggggatggacgtaggataatttgtcgggttgtgaaaaagcggtgtaggtgaaagtgaagttttgtttgatgtttagttcgaagtggtttatttattggcgaagtggaacgttagattttagggtaatacgattttagcgcgggcgaagggttgtaacgtatatgaaagtttttcgtttcgatgaagatcgttttttttcgttgtttcggtttatgttgattagtgggattgggaacgcgtaatgggcgacggtagcgttaattttcgattttgaaaagtacggtagaggcgatttgggcgggattaaagtaatcgaagttgcggttagcgaagagtttggtttggtatcgttttgtcggattagatttatttcgtatatagttaggagttattgtttcgtattcggattttgatgttaaagggcgtgagcgggcgatagcgaaagatttggcgcggtattttttgtcgggattggcggtaagttgagcgatggttattttacgacgtgcgcgtatcggattatgatgattggagtatttcgttagagtgggttatgcgggtttgaacggcgatattttggtgtggaattcggtattgaagatgcgtttgagtttttttttatggggattcgtgtagatgtcgatagttgaagtattaattggcgttgatcggtgacgaagatcgtttggagttgagtggtattaggcgttgttgcgcggtgaaatgtcgtagattatcggcggggtatcggttagtttcgtttgattatgttgttgttgtaattgtcgtatacggttaggtttagtgtggagtatggttagttgttgttcgcgagagcgtttttttttgttgtaataatttatcgtcgttagcgtttgagtaggcggtttgtatttcggtattaaagcgttagatatgatcgaaaatgcgtatgatgtcggttagtcgtgtgtcgatatcgttacggtatgaaagcgatgttgatgtatcgttgtagtttttttattttattcgtttcgtcgttaggtaatcgttgacgataatattagaaattaataacggatcgggatt

SEQ ID NO: 9894 - DNA, 1072 bp, Artificial Sequence
  chemically treated genomic DNA (Homo sapiens) CpG-island No: 9894
aatcccgatccgttattaatttctaatattatcgtcaacgattacctaacgacgaaacgaataaaataaaaaaactacaacgatacatcaacatcgctttcataccgtaacgatatcgacacacgactaaccgacatcatacgcattttcgatcatatctaacgctttaataccgaaatacaaaccgcctactcaaacgctaacgacgataaattattacaacaaaaaaaaacgctctcgcgaacaacaactaaccatactccacactaaacctaaccgtatacgacaattacaacaacaacataatcaaacgaaactaaccgataccccgccgataatctacgacatttcaccgcgcaacaacgcctaataccactcaactccaaacgatcttcgtcaccgatcaacgccaattaatacttcaactatcgacatctacacgaatccccataaaaaaaaactcaaacgcatcttcaataccgaattccacaccaaaatatcgccgttcaaacccgcataacccactctaacgaaatactccaatcatcataatccgatacgcgcacgtcgtaaaataaccatcgctcaacttaccgccaatcccgacaaaaaataccgcgccaaatctttcgctatcgcccgctcacgccctttaacatcaaaatccgaatacgaaacaataactcctaactatatacgaaataaatctaatccgacaaaacgataccaaaccaaactcttcgctaaccgcaacttcgattactttaatcccgcccaaatcgcctctaccgtacttttcaaaatcgaaaattaacgctaccgtcgcccattacgcgttcccaatcccactaatcaacataaaccgaaacaacgaaaaaaaacgatcttcatcgaaacgaaaaactttcatatacgttacaacccttcgcccgcgctaaaatcgtattaccctaaaatctaacgttccacttcgccaataaataaaccacttcgaactaaacatcaaacaaaacttcactttcacctacaccgctttttcacaacccgacaaattatcctacgtccatccccc

SEQ ID NO: 9895 - DNA, 1072 bp, Artificial Sequence
  chemically treated genomic DNA (Homo sapiens) CpG-island No: 9895
gatttcgattcgttgttgatttttgatgttatcgttagcggttgtttgacgacgggacgagtaaagtgaaagagttgtagcggtatattagtatcgtttttatgtcgtggcgatgtcggtatacggttaatcggtattatgcgtattttcgattatatttggcgttttgatatcgggatgtaagtcgtttgtttagacgttggcggcgataaattattatagtagagaaggacgttttcgcgaatagtagttggttatattttatattgaatttggtcgtatgcggtagttgtagtagtagtatagttaaacgagattggtcgatatttcgtcgatggtttgcggtattttatcgcgtagtagcgtttgatgttatttagttttaggcgattttcgttatcggttagcgttagttgatgttttagttgtcggtatttatacggatttttatggaggaaagtttaaacgtatttttagtatcgggttttatattagaatatcgtcgtttagattcgtatggtttattttgacggggtgttttagttattataattcggtgcgcgtacgtcgtgggatgattatcgtttagtttgtcgttaatttcgataaggaatatcgcgttagatttttcgttatcgttcgtttacgttttttggtattaagattcggatacgagatagtaatttttggttgtgtacgaagtggatttgattcggtaggacggtgttaggttaaatttttcgttaatcgtagtttcggttgttttaatttcgtttagatcgtttttatcgtgttttttagagtcgagaattgacgttatcgtcgtttattacgcgtttttagttttattggttaatatagatcgaggtaacggagaaagacggtttttatcggggcgaagggtttttatgtgcgttatagtttttcgttcgcgttgaagtcgtgttgttttaaggtttgacgttttatttcgttagtgaatgaattatttcgaattgggtattaggtagagttttatttttatttgtatcgtttttttatagttcgataagttattttgcgtttatttttt

SEQ ID NO: 9896 - DNA, 1072 bp, Artificial Sequence
  chemically treated genomic DNA (Homo sapiens) CpG-island No: 9896
aaaaaataaacgcaaaataacttatcgaactataaaaaaacgatacaaataaaaataaaactctacctaatacccaattcgaaataattcattcactaacgaaataaaacgtcaaaccttaaaacaacacgacttcaacgcgaacgaaaaactataacgcacataaaaacccttcgccccgataaaaaccgtctttctccgttacctcgatctatattaaccaataaaactaaaaacgcgtaataaacgacgataacgtcaattctcgactctaaaaaacacgataaaaacgatctaaacgaaattaaaacaaccgaaactacgattaacgaaaaatttaacctaacaccgtcctaccgaatcaaatccacttcgtacacaaccaaaaattactatctcgtatccgaatcttaataccaaaaaacgtaaacgaacgataacgaaaaatctaacgcgatattccttatcgaaattaacgacaaactaaacgataatcatcccacgacgtacgcgcaccgaattataataactaaaacaccccgtcaaaataaaccatacgaatctaaacgacgatattctaatataaaacccgatactaaaaatacgtttaaactttcctccataaaaatccgtataaataccgacaactaaaacatcaactaacgctaaccgataacgaaaatcgcctaaaactaaataacatcaaacgctactacgcgataaaataccgcaaaccatcgacgaaatatcgaccaatctcgtttaactatactactactacaactaccgcatacgaccaaattcaatataaaatataaccaactactattcgcgaaaacgtccttctctactataataatttatcgccgccaacgtctaaacaaacgacttacatcccgatatcaaaacgccaaatataatcgaaaatacgcataataccgattaaccgtataccgacatcgccacgacataaaaacgatactaatataccgctacaactctttcactttactcgtcccgtcgtcaaacaaccgctaacgataacatcaaaaatcaacaacgaatcgaaatc

SEQ ID NO: 9897 - DNA, 678 bp, Artificial Sequence
  chemically treated genomic DNA (Homo sapiens) CpG-island No: 9897
acgtattcgggtgaaagttttcgttacggcggggaatgttttaaagcgcgtttagtgagattaagataaaatcggtcggagtaatatcggggtagaacgtcgaaaggggaaaaatttcgtagataaacgcgggatcgatattcggagaggtaaagagagaaagcgtcgtatagcggaatagcggttttatattataggtaagatatatttagtcgtggtatttattatcggaatggttatatgtcgttagtacgtcgagcgtagataacgacggttagaaggttcgataatgtcgagcgttatcggaatggaaatataatcgttggttttattatcgattcgagaattaatttagagtatgttacgcggttacgtcgtcgttcgttagttttttggcgaggaagaagtttttatatcgtacgttagtagtgtttcggcgaatatcgatgggttagcgcgagtatttcgtaaatcggaataattatcggttcgagaacgtgagttagttcggtgttagcgcggttatatcgattatcgttaggtttagtgcgtttatgttataaagtttttttcgaattgatcgtttgatttttcgatatttttacgaatttatcgaggaaacgagtagaatcgtcgaattgcgataggattttgttacggtagttattagtataaaga

SEQ ID NO: 9898 - DNA, 678 bp, Artificial Sequence
  chemically treated genomic DNA (Homo sapiens) CpG-island No: 9898
tctttatactaataactaccgtaacaaaatcctatcgcaattcgacgattctactcgtttcctcgataaattcgtaaaaatatcgaaaaatcaaacgatcaattcgaaaaaaactttataacataaacgcactaaacctaacgataatcgatataaccgcgctaacaccgaactaactcacgttctcgaaccgataattattccgatttacgaaatactcgcgctaacccatcgatattcgccgaaacactactaacgtacgatataaaaacttcttcctcgccaaaaaactaacgaacgacgacgtaaccgcgtaacatactctaaattaattctcgaatcgataataaaaccaacgattatatttccattccgataacgctcgacattatcgaaccttctaaccgtcgttatctacgctcgacgtactaacgacatataaccattccgataataaataccacgactaaatatatcttacctataatataaaaccgctattccgctatacgacgctttctctctttacctctccgaatatcgatcccgcgtttatctacgaaatttttcccctttcgacgttctaccccgatattactccgaccgattttatcttaatctcactaaacgcgctttaaaacattccccgccgtaacgaaaactttcacccgaatacgt

SEQ ID NO: 9899 - DNA, 678 bp, Artificial Sequence
  chemically treated genomic DNA (Homo sapiens) CpG-island No: 9899
tttttatgttgatagttgtcgtagtaggattttgtcgtagttcggcggttttgttcgttttttcggtaagttcgtaaaagtatcgaaggattaggcggttagttcgaagaaggttttatggtatgggcgtattgggtttggcgatggtcggtatgatcgcgttggtatcggattggtttacgttttcgggtcggtaattatttcggtttacgaaatgttcgcgttaatttatcgatgttcgtcggaatattgttggcgtgcgatatgggggtttttttttcgttaaagagttggcgggcggcgacgtagtcgcgtggtatattttgggttaattttcgggtcgatgatggggttaacgattgtgtttttatttcggtggcgttcggtattatcgaattttttgatcgtcgttatttgcgttcggcgtgttggcggtatgtgattatttcgatggtgggtattacggttgggtatattttgtttgtggtgtgggatcgttgtttcgttatgcggcgttttttttttttgttttttcgggtgtcggtttcgcgtttatttgcggagttttttttttttcggcgttttgtttcggtgttatttcggtcggttttattttagttttattgggcgcgttttggaatatttttcgtcgtggcgaagatttttattcggatacgt

SEQ ID NO: 9900 - DNA, 678 bp, Artificial Sequence
  chemically treated genomic DNA (Homo sapiens) CpG-island No: 9900
acgtatccgaataaaaatcttcgccacgacgaaaaatattccaaaacgcgcccaataaaactaaaataaaaccgaccgaaataacaccgaaacaaaacgccgaaaaaaaaaaaactccgcaaataaacgcgaaaccgacacccgaaaaaacaaaaaaaaaaaacgccgcataacgaaacaacgatcccacaccacaaacaaaatatacccaaccgtaatacccaccatcgaaataatcacataccgccaacacgccgaacgcaaataacgacgatcaaaaaattcgataataccgaacgccaccgaaataaaaacacaatcgttaaccccatcatcgacccgaaaattaacccaaaatataccacgcgactacgtcgccgcccgccaactctttaacgaaaaaaaaacccccatatcgcacgccaacaatattccgacgaacatcgataaattaacgcgaacatttcgtaaaccgaaataattaccgacccgaaaacgtaaaccaatccgataccaacgcgatcataccgaccatcgccaaacccaatacgcccataccataaaaccttcttcgaactaaccgcctaatccttcgatacttttacgaacttaccgaaaaaacgaacaaaaccgccgaactacgacaaaatcctactacgacaactatcaacataaaaa

SEQ ID NO: 9901 - DNA, 615 bp, Artificial Sequence
  chemically treated genomic DNA (Homo sapiens) CpG-island No: 9901
ttcgcggtacgttttcgtattagtggatttttagtatttggtaataatacggaatagcggcgtaaaaagcgtttgcgtttattttatgtttgttacgatcgtttagtaatatcgagcgggcgagtaagtggttatttcggttagttttgggcgattaatgttttttttattttttttttgatcggttatagaaaaacggcgagtgggtattggtatttatcgtattgattataatatatgttgcgcgtttagtcgtcgttcggttaatgcggtatttattttatcgtgtaatcggtatgaataaacgtttttttgtttttcgtttttcgcgcgtggtgtcgagataataaaatataatgtcgatgggatcggtgatttcgttagcgcgttatttagttgcggattatggggattaaatatttcgggttatcgtttaacggacgtcgcgtcggcgtagtaatggcgttaattttcggtcgttaattaatattcgtagtaggtgatcgtttattagtttcgttgcgttgtaattagtatttgatttattttcgtttttttatagaattgtttgtttgcgttttacggtttatgtattaggtttaatagattatgagg

SEQ ID NO: 9902 - DNA, 615 bp, Artificial Sequence
  chemically treated genomic DNA (Homo sapiens) CpG-island No: 9902
cctcataatctattaaacctaatacataaaccgtaaaacgcaaacaaacaattctataaaaaaacgaaaataaatcaaatactaattacaacgcaacgaaactaataaacgatcacctactacgaatattaattaacgaccgaaaattaacgccattactacgccgacgcgacgtccgttaaacgataacccgaaatatttaatccccataatccgcaactaaataacgcgctaacgaaatcaccgatcccatcgacattatattttattatctcgacaccacgcgcgaaaaacgaaaaacaaaaaaacgtttattcataccgattacacgataaaataaataccgcattaaccgaacgacgactaaacgcgcaacatatattataatcaatacgataaataccaatacccactcgccgtttttctataaccgatcaaaaaaaaaataaaaaaaacattaatcgcccaaaactaaccgaaataaccacttactcgcccgctcgatattactaaacgatcgtaacaaacataaaataaacgcaaacgctttttacgccgctattccgtattattaccaaatactaaaaatccactaatacgaaaacgtaccgcgaa

SEQ ID NO: 9903 - DNA, 615 bp, Artificial Sequence
  chemically treated genomic DNA (Homo sapiens) CpG-island No: 9903
ttttatggtttattaagtttggtgtatgagtcgtggagcgtaggtagataattttgtaaaggagcgaagatgagttaggtattgattatagcgtaacggggttggtgggcggttatttgttgcggatgttgattaacgatcgaaagttaacgttattgttgcgtcgacgcgacgttcgttgggcgatagttcggggtgtttaatttttatgattcgtaattgagtgacgcgttggcgaggttatcgattttatcgatattgtgttttgttgtttcggtattacgcgcgagaagcggggagtaaagaggcgtttatttatgtcgattatacgatggagtggatatcgtattaatcgggcggcgattgggcgcgtagtatatgttgtagttagtgcgatgggtgttaatgtttattcgtcgtttttttataatcggttaaaggggagatggaagaagtattaatcgtttagaattggtcgaaatgattatttgttcgttcgttcgatgttattgggcgatcgtagtaaatatgggatgaacgtaaacgttttttgcgtcgttgtttcgtgttgttattaggtattggaaatttattgatgcgagaacgtgtcgcggg

SEQ ID NO: 9904 - DNA, 615 bp, Artificial Sequence
  chemically treated genomic DNA (Homo sapiens) CpG-island No: 9904
cccgcgacacgttctcgcatcaataaatttccaatacctaataacaacacgaaacaacgacgcaaaaaacgtttacgttcatcccatatttactacgatcgcccaataacatcgaacgaacgaacaaataatcatttcgaccaattctaaacgattaatacttcttccatctcccctttaaccgattataaaaaaacgacgaataaacattaacacccatcgcactaactacaacatatactacgcgcccaatcgccgcccgattaatacgatatccactccatcgtataatcgacataaataaacgcctctttactccccgcttctcgcgcgtaataccgaaacaacaaaacacaatatcgataaaatcgataacctcgccaacgcgtcactcaattacgaatcataaaaattaaacaccccgaactatcgcccaacgaacgtcgcgtcgacgcaacaataacgttaactttcgatcgttaatcaacatccgcaacaaataaccgcccaccaaccccgttacgctataatcaatacctaactcatcttcgctcctttacaaaattatctacctacgctccacgactcatacaccaaacttaataaaccataaaa

SEQ ID NO: 9905 - DNA, 565 bp, Artificial Sequence
  chemically treated genomic DNA (Homo sapiens) CpG-island No: 9905
  unsure (316, 338..)
gtagatcgaggaaacggttgagtacgattttatttatcgtagtggtgaacggttgggttttgtcgttagggtgttgtttattatattatagatggcgtaatgtattggtaacgcgtatcggtaatgtgtagcgtcggatcgtttatttattacgtagacgggcgagggcggtatttagatgttgcgacgttttacggcgtaggcgcggttgtagatatcgttttttagtatttgtaggtttagtagcgaacgggtatggttttttaaggcgggcggaatcggttcgcggataggggttagtttaaatttgtttttntggttttaaaggtggataattnntgtttcgtttgagtacgcggttgtgcgtaatgtattagttttatattttcgtagttttatagcgattaatcgttagtttgagcgttttaatatcgcgattcgggttgaaattagcgggattatcggatagtttagacgcgtcgatagagattaattttaatacgaatattttgtttttcggtaatgtcgagtatgttcgtgttataatgtagggaatgtcgagttt

SEQ ID NO: 9906 - DNA, 565 bp, Artificial Sequence
  chemically treated genomic DNA (Homo sapiens) CpG-island No: 9906
  unsure (227..228, 250)
aaactcgacattccctacattataacacgaacatactcgacattaccgaaaaacaaaatattcgtattaaaattaatctctatcgacgcgtctaaactatccgataatcccgctaatttcaacccgaatcgcgatattaaaacgctcaaactaacgattaatcgctataaaactacgaaaatataaaactaatacattacgcacaaccgcgtactcaaacgaaacannaattatccacctttaaaaccanaaaaacaaatttaaactaacccctatccgcgaaccgattccgcccgccttaaaaaaccatacccgttcgctactaaacctacaaatactaaaaaacgatatctacaaccgcgcctacgccgtaaaacgtcgcaacatctaaataccgccctcgcccgtctacgtaataaataaacgatccgacgctacacattaccgatacgcgttaccaatacattacgccatctataatataataaacaacaccctaacgacaaaacccaaccgttcaccactacgataaataaaatcgtactcaaccgtttcctcgatctac

SEQ ID NO: 9907 - DNA, 565 bp, Artificial Sequence
  chemically treated genomic DNA (Homo sapiens) CpG-island No: 9907
  unsure (227..228, 250)
gaattcggtattttttgtattgtggtacgaatatgttcgatattgtcgagaagtaaaatattcgtattgaaattgatttttgtcggcgcgtttgggttgttcggtgatttcgttggttttaattcgggtcgcggtattgaagcgtttaagttggcgattgatcgttataaagttacgagaatgtggaattggtgtattacgtatagtcgcgtgtttaagcgaagtanngattgtttatttttggggttangagaataggtttgaattggtttttgttcgcggatcgatttcgttcgttttggaagattatattcgttcgttgttgggtttgtaaatgttggaaggcgatatttatagtcgcgtttacgtcgtgaagcgtcgtagtatttggatgtcgttttcgttcgtttgcgtaatgagtggacgattcggcgttgtatattgtcgatgcgcgttattagtgtattgcgttatttgtgatgtggtaagtaatattttgacggtagaatttagtcgtttattattgcggtagataaaatcgtgtttaatcgttttttcggtttgt

SEQ ID NO: 9908 - DNA, 565 bp, Artificial Sequence
  chemically treated genomic DNA (Homo sapiens) CpG-island No: 9908
  unsure (316, 338..)
acaaaccgaaaaaacgattaaacacgattttatctaccgcaataataaacgactaaattctaccgtcaaaatattacttaccacatcacaaataacgcaatacactaataacgcgcatcgacaatatacaacgccgaatcgtccactcattacgcaaacgaacgaaaacgacatccaaatactacgacgcttcacgacgtaaacgcgactataaatatcgccttccaacatttacaaacccaacaacgaacgaatataatcttccaaaacgaacgaaatcgatccgcgaacaaaaaccaattcaaacctattctcntaaccccaaaaataaacaatcnntacttcgcttaaacacgcgactatacgtaatacaccaattccacattctcgtaactttataacgatcaatcgccaacttaaacgcttcaataccgcgacccgaattaaaaccaacgaaatcaccgaacaacccaaacgcgccgacaaaaatcaatttcaatacgaatattttacttctcgacaatatcgaacatattcgtaccacaatacaaaaaataccgaattc

SEQ ID NO: 9909 - DNA, 515 bp, Artificial Sequence
  chemically treated genomic DNA (Homo sapiens) CpG-island No: 9909
gttgtgtggagattacggtgtgttttacggtggtgcgtttcgtagggtaatatcgtagcgttagtgatatcggtaattgggttaacgcgatggtgcgattttttatttttatattggtcgtttgaaagtggtcgggaaatatttatttaggtacgtaacgagattatagcgcgtttcgatttagttttgaaagttcgtaagtcgatgttagcgtcgcggcgtttcgatcgtaaaagcgtacgttatcggcgaagttagtaaatcgggttagtagtcgattattatatttttttgattattatggatgcgattaacgtcgcgggcggtttgatttagatgtagattggcgtaacgtggtgtttatttagaatggcgtaaagataaagtgaatttttatgcgttgatgtagcgtggcgatttgcgttagaataattgttgtattcgggcgatattttatttatttcgcgtaacgatgatttgaagttttcgtgatgggtgaagtgggtaaatagagt

SEQ ID NO: 9910 - DNA, 515 bp, Artificial Sequence
  chemically treated genomic DNA (Homo sapiens) CpG-island No: 9910
actctatttacccacttcacccatcacgaaaacttcaaatcatcgttacgcgaaataaataaaatatcgcccgaatacaacaattattctaacgcaaatcgccacgctacatcaacgcataaaaattcactttatctttacgccattctaaataaacaccacgttacgccaatctacatctaaatcaaaccgcccgcgacgttaatcgcatccataataatcaaaaaaatataataatcgactactaacccgatttactaacttcgccgataacgtacgcttttacgatcgaaacgccgcgacgctaacatcgacttacgaactttcaaaactaaatcgaaacgcgctataatctcgttacgtacctaaataaatatttcccgaccactttcaaacgaccaatataaaaataaaaaatcgcaccatcgcgttaacccaattaccgatatcactaacgctacgatattaccctacgaaacgcaccaccgtaaaacacaccgtaatctccacacaac

SEQ ID NO: 9911 - DNA, 515 bp, Artificial Sequence
  chemically treated genomic DNA (Homo sapiens) CpG-island No: 9911
gttttgtttatttattttatttattacgaagattttagattatcgttgcgcggaataaataaaatatcgttcgggtgtagtagttgttttggcgtaagtcgttacgttgtattagcgtatagaggtttattttgtttttacgttattttgggtgagtattacgttgcgttagtttgtatttgggttagatcgttcgcggcgttaatcgtatttatgatggttagaggaatatggtaatcggttgttgattcgatttgttgatttcgtcggtgacgtacgtttttgcgatcggaacgtcgcgacgttgatatcgatttgcgggtttttaagattgaatcgagacgcgttgtaatttcgttgcgtatttgggtaagtgtttttcggttatttttaggcgattaatataggggtagaaaatcgtattatcgcgttaatttagttgtcggtattattggcgttacggtattgttttgcgggacgtattatcgtggggtatatcgtggtttttatatagt

SEQ ID NO: 9912 - DNA, 515 bp, Artificial Sequence
  chemically treated genomic DNA (Homo sapiens) CpG-island No: 9912
actatataaaaaccacgatataccccacgataatacgtcccgcaaaacaataccgtaacgccaataataccgacaactaaattaacgcgataatacgattttctacccctatattaatcgcctaaaaataaccgaaaaacacttacccaaatacgcaacgaaattacaacgcgtctcgattcaatcttaaaaacccgcaaatcgatatcaacgtcgcgacgttccgatcgcaaaaacgtacgtcaccgacgaaatcaacaaatcgaatcaacaaccgattaccatattcctctaaccatcataaatacgattaacgccgcgaacgatctaacccaaatacaaactaacgcaacgtaatactcacccaaaataacgtaaaaacaaaataaacctctatacgctaatacaacgtaacgacttacgccaaaacaactactacacccgaacgatattttatttattccgcgcaacgataatctaaaatcttcgtaataaataaaataaataaacaaaac

SEQ ID NO: 9913 - DNA, 563 bp, Artificial Sequence
  chemically treated genomic DNA (Homo sapiens) CpG-island No: 9913
tgtatcgaaatcggtgaagtggtttattttaaagttcgcgttacgtgttggcgattggcggagtagggcgtatttattagtttattattaacgttatattaatatcggcgacggtgtcggtatggttattcgtgtcggcgtacggtgtaggatatggaaatgtggtagttttattcgatcggtattgtcgggcgggcgtattggttatcgaaggttgtcgtggtgaaggcggttatttgcgaataaatatggcgaacgttttatggagcgttatgcgtcgaacgttaaaatttggcgggtcgtgacgtggttgcgcgttttattatgatcgaaattcggaaggtcgcggttgtgatggttcgtgggggttatacgcgaaattgaaatcgattatttgggtaaagaagttttcgaatttcgtttgtcgggtattttgagttttttcgtattttcgtttacgtcgattcggtgaaagagtcgatttcgttattttaatttgttattatatgatgggcggtatttcgagtaaagttacggttaggtattgattgtgaatgagaaat

SEQ ID NO: 9914 - DNA, 563 bp, Artificial Sequence
  chemically treated genomic DNA (Homo sapiens) CpG-island No: 9914
atttctcattcacaatcaatacctaaccgtaactttactcgaaataccgcccatcatataataacaaattaaaataacgaaatcgactctttcaccgaatcgacgtaaacgaaaatacgaaaaaactcaaaatacccgacaaacgaaattcgaaaacttctttacccaaataatcgatttcaatttcgcgtataacccccacgaaccatcacaaccgcgaccttccgaatttcgatcataataaaacgcgcaaccacgtcacgacccgccaaattttaacgttcgacgcataacgctccataaaacgttcgccatatttattcgcaaataaccgccttcaccacgacaaccttcgataaccaatacgcccgcccgacaataccgatcgaataaaactaccacatttccatatcctacaccgtacgccgacacgaataaccataccgacaccgtcgccgatattaatataacgttaataataaactaataaatacgccctactccgccaatcgccaacacgtaacgcgaactttaaaataaaccacttcaccgatttcgataca

SEQ ID NO: 9915 - DNA, 563 bp, Artificial Sequence
  chemically treated genomic DNA (Homo sapiens) CpG-island No: 9915
gttttttatttatagttagtgtttgatcgtaattttgttcggaatatcgtttattatgtagtgataggttgggataacggaatcggtttttttatcggatcgacgtgagcgaaggtacgggaaagtttaggatattcggtagacgggattcgagaatttttttatttaggtgatcggttttagtttcgcgtgtggtttttacggattattatagtcgcgatttttcggatttcgattatgatggaacgcgtaattacgttacggttcgttaggttttggcgttcggcgtataacgttttataaaacgttcgttatgtttgttcgtagataatcgtttttattacggtaattttcggtgattagtacgttcgttcggtaatgtcggtcgggtggaattgttatatttttatattttgtatcgtacgtcggtacggatagttatgtcgatatcgtcgtcggtgttaatgtggcgttggtggtggattgataaatacgttttgtttcgttagtcgttagtacgtagcgcgggttttgaaataaattattttatcggtttcgatgta

SEQ ID NO: 9916 - DNA, 563 bp, Artificial Sequence
  chemically treated genomic DNA (Homo sapiens) CpG-island No: 9916
tacatcgaaaccgataaaataatttatttcaaaacccgcgctacgtactaacgactaacgaaacaaaacgtatttatcaatccaccaccaacgccacattaacaccgacgacgatatcgacataactatccgtaccgacgtacgatacaaaatataaaaatataacaattccacccgaccgacattaccgaacgaacgtactaatcaccgaaaattaccgtaataaaaacgattatctacgaacaaacataacgaacgttttataaaacgttatacgccgaacgccaaaacctaacgaaccgtaacgtaattacgcgttccatcataatcgaaatccgaaaaatcgcgactataataatccgtaaaaaccacacgcgaaactaaaaccgatcacctaaataaaaaaattctcgaatcccgtctaccgaatatcctaaactttcccgtaccttcgctcacgtcgatccgataaaaaaaccgattccgttatcccaacctatcactacataataaacgatattccgaacaaaattacgatcaaacactaactataaataaaaaac

SEQ ID NO: 9917 - DNA, 1202 bp, Artificial Sequence
  chemically treated genomic DNA (Homo sapiens) CpG-island No: 9917
ttgtttcggtttgttgtcgttggtgaattcgtgtgttcggtatcgggttatcgttggggaatttttgtgatcgtggtttggttcggagtttttttaaattttttgaaggacggcgatttagtttttatcgttggtcgatcgttaattcgggaaacggattacggaagtttgatcgttcggaatgaggtgaaatagtgtagatgtttttgtttagttttattattatattattttggtaataattgtcggtaatatatcggtagatcgacggtagacgagagtaagagatagaacgattgatcgataatttcgttcgttgcgcgtaattggcgcgggaggtaggaacgacggtgtagaggtgatgggtttcgaagggtatttgattaacgaattttgacgttgcgtattaattagcgtagtgattagtggggcggcgattatttaatcggatgcgatttgtcgtagaagtagtgcgtgcggtgcgcgaacgttcggtaacgattttattattatttatcgattgtcgatgttcgatttggtgaagacggcgggatttttgtcgaaacggtagagttggcgtaggttattgagcggcgggcgcgattattattaatatcggtattggttggtatgaagtagtatttcgattattgttacgttcgtgtcgcgcggcgtatttagttgggtacgcgtaaattgaaaggttacgtttcgttgtcgttggtaattattaatcgattaacgattcgtaggttgtcgacgatattttttcgcgcggcgatgttatatggtatcgatggcgcgatcgttttttgttgatgcggagttgttgttaaagcgtaatcgggacgagtcgatgagattaatatttgtattggttgtattaggtttgtttcgattaaattttcgttggtaaagttatttcgtgtttgtgaattttcgcgtttggtacgaaattaaaatggtatttttttcgtcggaaaaaaaatttggcggggtcgtgggggtttgttggcggggttgttataacggggtcgggatacgtatttgttgagttattaaatggggagaaattttaacgcgtataagaggattataaaatacggtttaatacgataagaggagagttaatataaggggcgtatcgtaaaaatttaggatacgttttttttgttatataaattcgtttttattttttcgtt

SEQ ID NO: 9918 - DNA, 1202 bp, Artificial Sequence
  chemically treated genomic DNA (Homo sapiens) CpG-island No: 9918
aacgaaaaaataaaaacgaatttatataacaaaaaaaacgtatcctaaatttttacgatacgccccttatattaactctcctcttatcgtattaaaccgtattttataatcctcttatacgcgttaaaatttctccccatttaataactcaacaaatacgtatcccgaccccgttataacaaccccgccaacaaacccccacgaccccgccaaattttttttccgacgaaaaaaataccattttaatttcgtaccaaacgcgaaaattcacaaacacgaaataactttaccaacgaaaatttaatcgaaacaaacctaatacaaccaatacaaatattaatctcatcgactcgtcccgattacgctttaacaacaactccgcatcaacaaaaaacgatcgcgccatcgataccatataacatcgccgcgcgaaaaaatatcgtcgacaacctacgaatcgttaatcgattaataattaccaacgacaacgaaacgtaacctttcaatttacgcgtacccaactaaatacgccgcgcgacacgaacgtaacaataatcgaaatactacttcataccaaccaataccgatattaataataatcgcgcccgccgctcaataacctacgccaactctaccgtttcgacaaaaatcccgccgtcttcaccaaatcgaacatcgacaatcgataaataataataaaatcgttaccgaacgttcgcgcaccgcacgcactacttctacgacaaatcgcatccgattaaataatcgccgccccactaatcactacgctaattaatacgcaacgtcaaaattcgttaatcaaatacccttcgaaacccatcacctctacaccgtcgttcctacctcccgcgccaattacgcgcaacgaacgaaattatcgatcaatcgttctatctcttactctcgtctaccgtcgatctaccgatatattaccgacaattattaccaaaataatataataataaaactaaacaaaaacatctacactatttcacctcattccgaacgatcaaacttccgtaatccgtttcccgaattaacgatcgaccaacgataaaaactaaatcgccgtccttcaaaaaatttaaaaaaactccgaaccaaaccacgatcacaaaaattccccaacgataacccgataccgaacacacgaattcaccaacgacaacaaaccgaaacaa

SEQ ID NO: 9919 - DNA, 1202 bp, Artificial Sequence
  chemically treated genomic DNA (Homo sapiens) CpG-island No: 9919
aacgagaaaataaaagcgggtttatatgataagaggggcgtgttttgggtttttgcgatacgttttttgtgttggttttttttttgtcgtgttgggtcgtgttttgtagtttttttgtgcgcgttggaatttttttttatttggtggtttaataggtacgtgtttcggtttcgttatggtaatttcgttagtaggtttttacggtttcgttagatttttttttcggcgggaaggatgttattttggtttcgtgttaggcgcgaggatttataggtacgaggtgattttgttaacgaagatttgatcgagataggtttgatgtagttaatataagtgttgattttatcggttcgtttcgattgcgttttgatagtagtttcgtattagtaagaaacggtcgcgttatcgatattatatggtatcgtcgcgcgagagaatatcgtcggtaatttgcggatcgttaatcggttggtggttattagcggtagcgagacgtggttttttagtttgcgcgtatttagttaaatgcgtcgcgcggtacgggcgtggtaatggtcggaatattgttttatgttagttaatgtcggtgttgataatggtcgcgttcgtcgtttaatggtttgcgttagttttatcgtttcggtaaaagtttcgtcgtttttattaggtcgagtatcgatagtcggtagataataatgaagtcgttgtcgagcgttcgcgtatcgtacgtattatttttacggtaaatcgtattcggttgggtaatcgtcgttttattggttattacgttgattggtgcgtagcgttagaattcgttgattaaatatttttcggaatttattatttttatatcgtcgtttttgtttttcgcgttagttgcgcgtagcgggcgaaattgtcgattagtcgttttgttttttgttttcgtttgtcgtcgatttgtcggtgtgttgtcggtagttgttattaggatagtgtagtgatggagttaagtaaggatatttgtattgttttattttatttcgagcggttaaattttcgtggttcgtttttcgagttgacggtcgattagcgataaaagttgggtcgtcgttttttagaaaatttgaaggaatttcgggttaagttacggttataggagttttttagcggtagttcggtatcgaatatacggatttattagcggtaataggtcgggataa

SEQ ID NO: 9920 - DNA, 1202 bp, Artificial Sequence
  chemically treated genomic DNA (Homo sapiens) CpG-island No: 9920
ttatcccgacctattaccgctaataaatccgtatattcgataccgaactaccgctaaaaaactcctataaccgtaacttaacccgaaattccttcaaattttctaaaaaacgacgacccaacttttatcgctaatcgaccgtcaactcgaaaaacgaaccacgaaaatttaaccgctcgaaataaaataaaacaatacaaatatccttacttaactccatcactacactatcctaataacaactaccgacaacacaccgacaaatcgacgacaaacgaaaacaaaaaacaaaacgactaatcgacaatttcgcccgctacgcgcaactaacgcgaaaaacaaaaacgacgatataaaaataataaattccgaaaaatatttaatcaacgaattctaacgctacgcaccaatcaacgtaataaccaataaaacgacgattacccaaccgaatacgatttaccgtaaaaataatacgtacgatacgcgaacgctcgacaacgacttcattattatctaccgactatcgatactcgacctaataaaaacgacgaaacttttaccgaaacgataaaactaacgcaaaccattaaacgacgaacgcgaccattatcaacaccgacattaactaacataaaacaatattccgaccattaccacgcccgtaccgcgcgacgcatttaactaaatacgcgcaaactaaaaaaccacgtctcgctaccgctaataaccaccaaccgattaacgatccgcaaattaccgacgatattctctcgcgcgacgataccatataatatcgataacgcgaccgtttcttactaatacgaaactactatcaaaacgcaatcgaaacgaaccgataaaatcaacacttatattaactacatcaaacctatctcgatcaaatcttcgttaacaaaatcacctcgtacctataaatcctcgcgcctaacacgaaaccaaaataacatccttcccgccgaaaaaaaaatctaacgaaaccgtaaaaacctactaacgaaattaccataacgaaaccgaaacacgtacctattaaaccaccaaataaaaaaaaattccaacgcgcacaaaaaaactacaaaacacgacccaacacgacaaaaaaaaaaccaacacaaaaaacgtatcgcaaaaacccaaaacacgcccctcttatcatataaacccgcttttattttctcgtt

SEQ ID NO: 9921 - DNA, 917 bp, Artificial Sequence
  chemically treated genomic DNA (Homo sapiens) CpG-island No: 9921
gcgagttttcgacgtatattcgttatagcgcgttggcggcggtatttaatattcggtgttggttgtcggtttgacgttaacgttggcggtttggttggtcgaagttcgtagaatttgatgatgtttgtttattatttgatggtagtggcggggttggtttaattatcggcgtaattatgaaagagacggtaatcgttcgtgaaaggtgcgatatcggcggcgttagatatataggaagcgaagaattttgttagcgaaatgtattgttttttgagtattattaattattattattatttcggttaatgagtaaaggtaatcgttcgcgttagattcgggtaatcgttagtaatttcgatatttgatttaacgttagaattcgattacggggagtaattagtttggtaataaatcgatattcggtagtcgttgcgtattaagcggtaattttttattttggttttagtttgttgggcgattattagttagggacgaggttgcgtggtgttttgttacgttgataataattttatcgttcggttgtagacgggacgcgtatagtattgtgttattatgttgatggatttagtggtgtcgtcgtttagacgatagttttattattcggtgtatttagtaattgcgttatttttttcgtgtagttttataacgcgcggttaggcgttgggtttcggtaaatggttgcgatggacgttttcggcgtttagattgtaaaattgttgggtggtttaattacggttttaggtttaagcgcggtcgcggcgttgtcgagatagcgttcgtattttgtagtgcgggaaattgggcgcgaaattgcgcgggattaaaacgtttatggtatttttcggtttgatgtatcgatcgtgacgtaaaattattttgatataaggagagtgtta

SEQ ID NO: 9922 - DNA, 917 bp, Artificial Sequence
  chemically treated genomic DNA (Homo sapiens) CpG-island No: 9922
taacactctccttatatcaaaataattttacgtcacgatcgatacatcaaaccgaaaaataccataaacgttttaatcccgcgcaatttcgcgcccaatttcccgcactacaaaatacgaacgctatctcgacaacgccgcgaccgcgcttaaacctaaaaccgtaattaaaccacccaacaattttacaatctaaacgccgaaaacgtccatcgcaaccatttaccgaaacccaacgcctaaccgcgcgttataaaactacacgaaaaaaataacgcaattactaaatacaccgaataataaaactatcgtctaaacgacgacaccactaaatccatcaacataataacacaatactatacgcgtcccgtctacaaccgaacgataaaattattatcaacgtaacaaaacaccacgcaacctcgtccctaactaataatcgcccaacaaactaaaaccaaaataaaaaattaccgcttaatacgcaacgactaccgaatatcgatttattaccaaactaattactccccgtaatcgaattctaacgttaaatcaaatatcgaaattactaacgattacccgaatctaacgcgaacgattacctttactcattaaccgaaataataataataattaataatactcaaaaaacaatacatttcgctaacaaaattcttcgcttcctatatatctaacgccgccgatatcgcacctttcacgaacgattaccgtctctttcataattacgccgataattaaaccaaccccgccactaccatcaaataataaacaaacatcatcaaattctacgaacttcgaccaaccaaaccgccaacgttaacgtcaaaccgacaaccaacaccgaatattaaataccgccgccaacgcgctataacgaatatacgtcgaaaactcgc

SEQ ID NO: 9923 - DNA, 917 bp, Artificial Sequence
  chemically treated genomic DNA (Homo sapiens) CpG-island No: 9923
tagtattttttttgtattaaagtgattttgcgttacgatcggtgtattaagtcgaggagtattatgaacgttttaatttcgcgtagtttcgcgtttagtttttcgtattataggatgcgggcgttatttcgatagcgtcgcgatcgcgtttaaatttgaagtcgtggttgaattatttaatagttttatagtttgagcgtcggaaacgtttatcgtagttatttgtcgaagtttaacgtttgatcgcgcgttatgaagttgtacgagagaagtggcgtaattattgaatgtatcggatgataaaattatcgtttggacggcggtattattgaatttattaatatggtggtataatgttatgcgcgtttcgtttgtaatcgggcgatgagattattgttagcgtggtagaatattacgtaatttcgtttttggttgatggtcgtttaataaattggagttaaagtgggaaattgtcgtttaatgcgtagcgattgtcggatgtcgatttgttgttaaattgattatttttcgtagtcggattttggcgttgggttagatgtcgaagttattggcggttgttcggatttggcgcgagcgattatttttgtttattagtcgggatggtggtgatggttgatggtgtttagggggtagtgtatttcgttgatagaatttttcgttttttgtatatttgacgtcgtcggtgtcgtattttttacggacgattgtcgttttttttatggttacgtcggtgattaaattaatttcgttattattattaggtaataggtaggtattattagattttgcgagtttcgattagttaggtcgttagcgttggcgttagatcggtaattagtatcgaatattaaatgtcgtcgttagcgcgttgtaacggatatgcgtcgggaattcgt

SEQ ID NO: 9924 - DNA, 917 bp, Artificial Sequence
  chemically treated genomic DNA (Homo sapiens) CpG-island No: 9924
acgaattcccgacgcatatccgttacaacgcgctaacgacgacatttaatattcgatactaattaccgatctaacgccaacgctaacgacctaactaatcgaaactcgcaaaatctaataatacctacctattacctaataataataacgaaattaatttaatcaccgacgtaaccataaaaaaaacgacaatcgtccgtaaaaaatacgacaccgacgacgtcaaatatacaaaaaacgaaaaattctatcaacgaaatacactaccccctaaacaccatcaaccatcaccaccatcccgactaataaacaaaaataatcgctcgcgccaaatccgaacaaccgccaataacttcgacatctaacccaacgccaaaatccgactacgaaaaataatcaatttaacaacaaatcgacatccgacaatcgctacgcattaaacgacaatttcccactttaactccaatttattaaacgaccatcaaccaaaaacgaaattacgtaatattctaccacgctaacaataatctcatcgcccgattacaaacgaaacgcgcataacattataccaccatattaataaattcaataataccgccgtccaaacgataattttatcatccgatacattcaataattacgccacttctctcgtacaacttcataacgcgcgatcaaacgttaaacttcgacaaataactacgataaacgtttccgacgctcaaactataaaactattaaataattcaaccacgacttcaaatttaaacgcgatcgcgacgctatcgaaataacgcccgcatcctataatacgaaaaactaaacgcgaaactacgcgaaattaaaacgttcataatactcctcgacttaatacaccgatcgtaacgcaaaatcactttaatacaaaaaaaatacta

SEQ ID NO: 9925 - DNA, 566 bp, Artificial Sequence
  chemically treated genomic DNA (Homo sapiens) CpG-island No: 9925
ttgtttacggcgtagaagtagaatattagtcgtaaatttgtttgttgtatgagttgttttagttcgtttattcggtgtgtgttggtcggttcgtttataatgggggtttaaggtgatggtcgagcggatgattagtgtttgttacgtgaggttattagttcggtggtgtcgtaattttatttttttttcgtacgacggtagttcgggaataggttcgtagcgattttggtgaatcgtcggggtcgtattcgatagtattagtgtttttttttgatattcgttcggtgcgggtcgttatttaggtcgtgcgtattacggtggtgttagtgttcgcgtcgtgggagttttttcgggattttatttattcgtgatttcgtgcgttcgaagtataggagttttaatagtgtttcgaaagagagcgaaacgcgggttttttggggattaatttggagtacgtgttcggaagaatttggttcgtattatgaatagtatcgggggataatatttacgttagagaaggcgatattatcgtagcggaataaatattggagggaattaaagttata

SEQ ID NO: 9926 - DNA, 566 bp, Artificial Sequence
  chemically treated genomic DNA (Homo sapiens) CpG-island No: 9926
tataactttaattccctccaatatttattccgctacgataatatcgccttctctaacgtaaatattatcccccgatactattcataatacgaaccaaattcttccgaacacgtactccaaattaatccccaaaaaacccgcgtttcgctctctttcgaaacactattaaaactcctatacttcgaacgcacgaaatcacgaataaataaaatcccgaaaaaactcccacgacgcgaacactaacaccaccgtaatacgcacgacctaaataacgacccgcaccgaacgaatatcaaaaaaaaacactaatactatcgaatacgaccccgacgattcaccaaaatcgctacgaacctattcccgaactaccgtcgtacgaaaaaaaaataaaattacgacaccaccgaactaataacctcacgtaacaaacactaatcatccgctcgaccatcaccttaaacccccattataaacgaaccgaccaacacacaccgaataaacgaactaaaacaactcatacaacaaacaaatttacgactaatattctacttctacgccgtaaacaa

SEQ ID NO: 9927 - DNA, 566 bp, Artificial Sequence
  chemically treated genomic DNA (Homo sapiens) CpG-island No: 9927
tgtagttttagttttttttaatatttgtttcgttgcggtaatgtcgttttttttagcgtgggtattatttttcggtgttgtttatgatgcggattagattttttcggatacgtgttttagattggtttttagagaattcgcgtttcgttttttttcgggatattattagggtttttatatttcgaacgtacggaattacggatgggtaaaatttcgaagggatttttacggcgcgggtattgatattatcgtggtgcgtacggtttgaatgacggttcgtatcgggcgggtattagggaaaggtattgatgttatcgagtacggtttcgacggtttattaaaatcgttacgagtttgttttcggattatcgtcgtgcgaaaggaggatggagttgcgatattatcgggttggtggttttacgtggtaggtattaattattcgttcggttattattttaagtttttattgtagacggatcgattagtatatatcggatggacgggttggaatagtttatgtagtaggtagatttgcggttgatattttgtttttgcgtcgtggataa

SEQ ID NO: 9928 - DNA, 566 bp, Artificial Sequence
  chemically treated genomic DNA (Homo sapiens) CpG-island No: 9928
ttatccacgacgcaaaaacaaaatatcaaccgcaaatctacctactacataaactattccaacccgtccatccgatatatactaatcgatccgtctacaataaaaacttaaaataataaccgaacgaataattaatacctaccacgtaaaaccaccaacccgataatatcgcaactccatcctcctttcgcacgacgataatccgaaaacaaactcgtaacgattttaataaaccgtcgaaaccgtactcgataacatcaatacctttccctaatacccgcccgatacgaaccgtcattcaaaccgtacgcaccacgataatatcaatacccgcgccgtaaaaatcccttcgaaattttacccatccgtaattccgtacgttcgaaatataaaaaccctaataatatcccgaaaaaaaacgaaacgcgaattctctaaaaaccaatctaaaacacgtatccgaaaaaatctaatccgcatcataaacaacaccgaaaaataatacccacgctaaaaaaaacgacattaccgcaacgaaacaaatattaaaaaaaactaaaactaca

SEQ ID NO: 9929 - DNA, 859 bp, Artificial Sequence
  chemically treated genomic DNA (Homo sapiens) CpG-island No: 9929
gttggcggggaatttttatcgtagattaatgaaggcgattgtgtatatgttatcgacgttgtcggggattttcgtagtagaggcggtagtatgttgtaaaaaatcgataagttaattatgagcgtatttgaagtgggcgggtatttggtaaaatcgggaaagcggaaatcgttatcgattttgttcgttggagatggtagaaacgattatttagtttaagtcgtaggagtagtgcggttaggtatgacgatggataaaattattgaggaattggataatatcggcggttgtcggggttggcgaatttgtgggtgtcgttaattcgtaatcgttcgatatgtttttaatcggtattaaaagttttatcggtattaaagtttcggtattgtgttggcggatatcgacgcgatggttgagtaaattgaagaagagcgcgaacggtgttaggcgtagtttttgcgtttgtcgagcggttggaagtgggcgttatattaacgttgagattaatcgtgaaaaagtcgtacgttaggtatgacggtggcggatgtgtagttgtttgtgatttttgcggtgggcgggcgatggttggcgaaacggtggaagggattgttcgttatttaattaattgcgttattcgtaaagttggcgcgatagttcgtaggtattgcgttagtttcgattttgacgtcgatgaagtagtaaattattttggtagacgtggtcgtattaaagtttttatcggatcgtcgatgttgaaaatcgagaatgcgcgtcgacgagttggatttatatcgatgttcgcgatcgtgatatggtgtcggtgtttacgatttgtaaaaagcgatagttgaaaaagtgt

SEQ ID NO: 9930 - DNA, 859 bp, Artificial Sequence
  chemically treated genomic DNA (Homo sapiens) CpG-island No: 9930
acactttttcaactatcgctttttacaaatcgtaaacaccgacaccatatcacgatcgcgaacatcgatataaatccaactcgtcgacgcgcattctcgattttcaacatcgacgatccgataaaaactttaatacgaccacgtctaccaaaataatttactacttcatcgacgtcaaaatcgaaactaacgcaatacctacgaactatcgcgccaactttacgaataacgcaattaattaaataacgaacaatcccttccaccgtttcgccaaccatcgcccgcccaccgcaaaaatcacaaacaactacacatccgccaccgtcatacctaacgtacgactttttcacgattaatctcaacgttaatataacgcccacttccaaccgctcgacaaacgcaaaaactacgcctaacaccgttcgcgctcttcttcaatttactcaaccatcgcgtcgatatccgccaacacaataccgaaactttaataccgataaaacttttaataccgattaaaaacatatcgaacgattacgaattaacgacacccacaaattcgccaaccccgacaaccgccgatattatccaattcctcaataattttatccatcgtcatacctaaccgcactactcctacgacttaaactaaataatcgtttctaccatctccaacgaacaaaatcgataacgatttccgctttcccgattttaccaaatacccgcccacttcaaatacgctcataattaacttatcgattttttacaacatactaccgcctctactacgaaaatccccgacaacgtcgataacatatacacaatcgccttcattaatctacgataaaaattccccgccaac

SEQ ID NO: 9931 - DNA, 859 bp, Artificial Sequence
  chemically treated genomic DNA (Homo sapiens) CpG-island No: 9931
gtatttttttagttatcgttttttgtaaatcgtgaatatcgatattatgttacgatcgcgggtatcgatataaatttagttcgtcggcgcgtattttcggtttttagtatcgacggttcggtagagattttaatgcggttacgtttgttagggtgatttgttgttttatcggcgttaggatcggagttggcgtagtgtttgcggattatcgcgttagttttgcggataacgtaattaattggataacgggtaattttttttatcgtttcgttaattatcgttcgtttatcgtagaagttataaataattgtatattcgttatcgttatatttaacgtgcggtttttttacggttaattttaacgttgatatagcgtttatttttagtcgttcggtaagcgtagaagttacgtttggtatcgttcgcgtttttttttaatttgtttagttatcgcgtcgatattcgttagtatagtgtcgaaattttaatgtcgatggggtttttaatgtcggttgagagtatatcgaacggttacgaattggcggtatttatagattcgttagtttcggtagtcgtcggtgttatttagttttttaatgattttgtttatcgttatgtttggtcgtattgtttttgcggtttaagttggatggtcgtttttattatttttagcgagtagaatcggtggcggttttcgttttttcggttttgttaaatattcgtttattttaggtacgtttataattagtttgtcggttttttgtagtatattgtcgtttttgttgcggaaattttcggtagcgtcgatggtatatatataatcgtttttattgatttgcggtaaaaatttttcgttaat

SEQ ID NO: 9932 - DNA, 859 bp, Artificial Sequence
  chemically treated genomic DNA (Homo sapiens) CpG-island No: 9932
attaacgaaaaatttttaccgcaaatcaataaaaacgattatatatataccatcgacgctaccgaaaatttccgcaacaaaaacgacaatatactacaaaaaaccgacaaactaattataaacgtacctaaaataaacgaatatttaacaaaaccgaaaaaacgaaaaccgccaccgattctactcgctaaaaataataaaaacgaccatccaacttaaaccgcaaaaacaatacgaccaaacataacgataaacaaaatcattaaaaaactaaataacaccgacgactaccgaaactaacgaatctataaataccgccaattcgtaaccgttcgatatactctcaaccgacattaaaaaccccatcgacattaaaatttcgacactatactaacgaatatcgacgcgataactaaacaaattaaaaaaaaacgcgaacgataccaaacgtaacttctacgcttaccgaacgactaaaaataaacgctatatcaacgttaaaattaaccgtaaaaaaaccgcacgttaaatataacgataacgaatatacaattatttataacttctacgataaacgaacgataattaacgaaacgataaaaaaaattacccgttatccaattaattacgttatccgcaaaactaacgcgataatccgcaaacactacgccaactccgatcctaacgccgataaaacaacaaatcaccctaacaaacgtaaccgcattaaaatctctaccgaaccgtcgatactaaaaaccgaaaatacgcgccgacgaactaaatttatatcgatacccgcgatcgtaacataatatcgatattcacgatttacaaaaaacgataactaaaaaaatac

SEQ ID NO: 9933 - DNA, 766 bp, Artificial Sequence
  chemically treated genomic DNA (Homo sapiens) CpG-island No: 9933
  unsure (711)
cgagtagtcgcgtcgttttttgtttatgtttttgcgtatgtcgtaatcggtcgttagtaacgttcgttttagttttggttgcgtttcggaaagtagttttgatgatcggaacgtagcgttttgtttgtttattgcgtaagaagcgcgtttagttgttcggttgtatttgcgaagtatttttcgtaatcgttgattaaatagttcgtcgggtaaattttgaattaatattttttgttcggcggtattatcgttagttagcggtaggtgttttttagttggcgtacgttgtttgttacgttagacgcgttagagtagtttcggttttcggatgtagtaatttttttttacgtttagttcgcgcgcggtaatttgtaaaaaatggcgcgttagcggggaatattttttcgacgttcgcgtagcggcggtagatgaacgcggaaacgtttaggcggtggaatagatttttacggaatttatttttttgtattgttgttcgagattttggtgagtggtagcgataattcgtatatttattttatcggcgtatagtcgttaacgcggtaaaattgatcgtttgttagtacgttagtaaacgcgtttgtatatttagcggtatattattaatttcgtcgaggataatgtatcgttatcggtttgtttaaaacgtttttgacgaatggtattgcgttagtaaacgcgtttttttcgtgngttaatagttttgattcgatttatttttcgcgataggtggtatatttagcgcgat

SEQ ID NO: 9934 - DNA, 766 bp, Artificial Sequence
  chemically treated genomic DNA (Homo sapiens) CpG-island No: 9934
  unsure (56)
atcgcgctaaatataccacctatcgcgaaaaataaatcgaatcaaaactattaacncacgaaaaaaacgcgtttactaacgcaataccattcgtcaaaaacgttttaaacaaaccgataacgatacattatcctcgacgaaattaataatataccgctaaatatacaaacgcgtttactaacgtactaacaaacgatcaattttaccgcgttaacgactatacgccgataaaataaatatacgaattatcgctaccactcaccaaaatctcgaacaacaatacaaaaaaataaattccgtaaaaatctattccaccgcctaaacgtttccgcgttcatctaccgccgctacgcgaacgtcgaaaaaatattccccgctaacgcgccattttttacaaattaccgcgcgcgaactaaacgtaaaaaaaaattactacatccgaaaaccgaaactactctaacgcgtctaacgtaacaaacaacgtacgccaactaaaaaacacctaccgctaactaacgataataccgccgaacaaaaaatattaattcaaaatttacccgacgaactatttaatcaacgattacgaaaaatacttcgcaaatacaaccgaacaactaaacgcgcttcttacgcaataaacaaacaaaacgctacgttccgatcatcaaaactactttccgaaacgcaaccaaaactaaaacgaacgttactaacgaccgattacgacatacgcaaaaacataaacaaaaaacgacgcgactactcg

SEQ ID NO: 9935 - DNA, 766 bp, Artificial Sequence
  chemically treated genomic DNA (Homo sapiens) CpG-island No: 9935
  unsure (56)
atcgcgttgaatatgttatttatcgcgaaagatggatcgaattagaattgttggtntacgagaaaggcgcgtttattggcgtaatattattcgttaggggcgttttgaataggtcgatggcggtatattattttcgacgaaattggtgatatgtcgttggatgtgtagacgcgtttgttggcgtgttggtagacggttagttttatcgcgttggcggttatgcgtcggtaaagtggatgtgcggattatcgttgttatttattagaatttcgaatagtagtgtaggaaggtaagtttcgtgaggatttgttttatcgtttgaacgttttcgcgtttatttgtcgtcgttgcgcgaacgtcgggaagatatttttcgttggcgcgttattttttataggttgtcgcgcgcgaattgggcgtagaaggaagttattgtattcggaaatcgaagttgttttgacgcgtttggcgtggtaggtaacgtgcgttagttggaaaatatttgtcgttggttaacggtgatgtcgtcgggtaggaagtgttgatttaggatttgttcggcgaattgtttgattaacggttgcggagagtatttcgtaaatgtaatcggatagttgggcgcgttttttgcgtagtgggtagatagagcgttgcgtttcggttattaaaattgtttttcgaagcgtagttagagttggagcggacgttattgacgatcggttgcgatatacgtaggggtataaataggaagcggcgcggttattcg

SEQ ID NO: 9936 - DNA, 766 bp, Artificial Sequence
  chemically treated genomic DNA (Homo sapiens) CpG-island No: 9936
  unsure (711)
cgaataaccgcgccgcttcctatttatacccctacgtatatcgcaaccgatcgtcaataacgtccgctccaactctaactacgcttcgaaaaacaattttaataaccgaaacgcaacgctctatctacccactacgcaaaaaacgcgcccaactatccgattacatttacgaaatactctccgcaaccgttaatcaaacaattcgccgaacaaatcctaaatcaacacttcctacccgacgacatcaccgttaaccaacgacaaatattttccaactaacgcacgttacctaccacgccaaacgcgtcaaaacaacttcgatttccgaatacaataacttccttctacgcccaattcgcgcgcgacaacctataaaaaataacgcgccaacgaaaaatatcttcccgacgttcgcgcaacgacgacaaataaacgcgaaaacgttcaaacgataaaacaaatcctcacgaaacttaccttcctacactactattcgaaattctaataaataacaacgataatccgcacatccactttaccgacgcataaccgccaacgcgataaaactaaccgtctaccaacacgccaacaaacgcgtctacacatccaacgacatatcaccaatttcgtcgaaaataatataccgccatcgacctattcaaaacgcccctaacgaataatattacgccaataaacgcgcctttctcgtanaccaacaattctaattcgatccatctttcgcgataaataacatattcaacgcgat

SEQ ID NO: 9937 - DNA, 668 bp, Artificial Sequence
  chemically treated genomic DNA (Homo sapiens) CpG-island No: 9937
gacgcgttatcgtgagcgatcggagtagtttagacgttgattgttaataatttggtaatttttaggtttttgttcgcgattagtattatattattttttttagtttgtataacgcgtaagttatcgttttagtacggttttttattattttggtatgttcggatttaatattttcgttagaatatcgttgatgatggtacgcggtttttcgtacgcgggttatcgttcgttattatcgttacgttagtaaatttttcggtattgcgtttattagtggacgtttatttttatcgcgatcgttattatagtaaagatatattatagtttgttcgtatagtgtagacgcgttgtttgtaagttttttttagtgtattcggcgtatgcgcgtaatttattattatcgtcggttgtttggcgtagtgaatatttttatacgttcgtaaatcggttgtagatcgcggcggtttttagtagattagttagtggatagtcgagtgttaatagttcgttagcgcgagtagtaggttgttgacgttaaaagcgtttattagatgtttttaatttcgttatcgttttaatttgagttaaagcgaatcgtcgtacgttgtcgtgatagtttatttcggtcgtttttaattagcgttcgtgatagtcggattaatatgatt

SEQ ID NO: 9938 - DNA, 668 bp, Artificial Sequence
  chemically treated genomic DNA (Homo sapiens) CpG-island No: 9938
aatcatattaatccgactatcacgaacgctaattaaaaacgaccgaaataaactatcacgacaacgtacgacgattcgctttaactcaaattaaaacgataacgaaattaaaaacatctaataaacgcttttaacgtcaacaacctactactcgcgctaacgaactattaacactcgactatccactaactaatctactaaaaaccgccgcgatctacaaccgatttacgaacgtataaaaatattcactacgccaaacaaccgacgataataataaattacgcgcatacgccgaatacactaaaaaaaacttacaaacaacgcgtctacactatacgaacaaactataatatatctttactataataacgatcgcgataaaaataaacgtccactaataaacgcaataccgaaaaatttactaacgtaacgataataacgaacgataacccgcgtacgaaaaaccgcgtaccatcatcaacgatattctaacgaaaatattaaatccgaacataccaaaataataaaaaaccgtactaaaacgataacttacgcgttatacaaactaaaaaaaataatataatactaatcgcgaacaaaaacctaaaaattaccaaattattaacaatcaacgtctaaactactccgatcgctcacgataacgcgtc

SEQ ID NO: 9939 - DNA, 668 bp, Artificial Sequence
  chemically treated genomic DNA (Homo sapiens) CpG-island No: 9939
gattatattaattcgattgttacggacgttggttgaaagcgatcgaagtgaattattacgatagcgtgcgacgattcgttttagtttaagttggggcgatggcgaaattgaaagtatttgatgggcgtttttaacgttagtaatttgttgttcgcgttggcgaattgttggtattcggttatttattggttgatttgttgaaaatcgtcgcggtttgtaatcggtttgcggacgtatggaagtgtttattgcgttaggtaatcgacggtggtggtggattacgcgtatacgtcggatgtattggaaaaagtttataggtagcgcgtttgtattgtgcgggtaagttgtggtgtgtttttgttgtggtggcgatcgcgataaaggtaagcgtttattgatgggcgtaatgtcgaagagtttgttgacgtggcggtggtgacggacgataattcgcgtacgaagaatcgcgtgttattattaacgatattttggcgggaatgttagattcggatatgttaaagtgatggaaggtcgtgttgaagcggtgatttgcgcgttatgtaggttaaagagaatgatgtggtattggtcgcgggtaaaggtttgaagattattagattgttggtaattagcgtttggattatttcgatcgtttacggtggcgcgtt

SEQ ID NO: 9940 - DNA, 668 bp, Artificial Sequence
  chemically treated genomic DNA (Homo sapiens) CpG-island No: 9940
aacgcgccaccgtaaacgatcgaaataatccaaacgctaattaccaacaatctaataatcttcaaacctttacccgcgaccaataccacatcattctctttaacctacataacgcgcaaatcaccgcttcaacacgaccttccatcactttaacatatccgaatctaacattcccgccaaaatatcgttaataataacacgcgattcttcgtacgcgaattatcgtccgtcaccaccgccacgtcaacaaactcttcgacattacgcccatcaataaacgcttacctttatcgcgatcgccaccacaacaaaaacacaccacaacttacccgcacaatacaaacgcgctacctataaactttttccaatacatccgacgtatacgcgtaatccaccaccaccgtcgattacctaacgcaataaacacttccatacgtccgcaaaccgattacaaaccgcgacgattttcaacaaatcaaccaataaataaccgaataccaacaattcgccaacgcgaacaacaaattactaacgttaaaaacgcccatcaaatactttcaatttcgccatcgccccaacttaaactaaaacgaatcgtcgcacgctatcgtaataattcacttcgatcgctttcaaccaacgtccgtaacaatcgaattaatataatc

SEQ ID NO: 9941 - DNA, 557 bp, Artificial Sequence
  chemically treated genomic DNA (Homo sapiens) CpG-island No: 9941
  unsure (520)
gcggtgttgttgttggcgattgggttagtcgggttaaggtttgagtacggatgcggttggcgtttacgttttgggtgattaacgcgttggaacggaattcgtacgttgttgggagagacgtatgtttaggtcgtgattatcgtgttgtcggtataattaattacgttaatcgtcgttttcggatattttttagtattattgttacgtcggttagggtgttagcgttcgtcggttttaggtcgcgttgttgttgtcgaaggttatattgttcggtatattgaggatatgttattttcgttgcgggttacgttaatattagtgtcgcgtattttgttcgtagtttcgttttttgtatatttatgtaataattaacgtcgtcgtttaagttgcgtttgttgttgcgttaattagcgcgtttttatcgcgatttttttcgaagaagagagcgtataaatatcgcgtttagagagagttagattggggatgtaattattgttcggtcgcgggtaggttatgtggntaatcggaaggttataggggataaaatttttttgaat

SEQ ID NO: 9942 - DNA, 557 bp, Artificial Sequence
  chemically treated genomic DNA (Homo sapiens) CpG-island No: 9942
  unsure (38)
attcaaaaaaattttatcccctataaccttccgattanccacataacctacccgcgaccgaacaataattacatccccaatctaactctctctaaacgcgatatttatacgctctcttcttcgaaaaaaatcgcgataaaaacgcgctaattaacgcaacaacaaacgcaacttaaacgacgacgttaattattacataaatatacaaaaaacgaaactacgaacaaaatacgcgacactaatattaacgtaacccgcaacgaaaataacatatcctcaatataccgaacaatataaccttcgacaacaacaacgcgacctaaaaccgacgaacgctaacaccctaaccgacgtaacaataatactaaaaaatatccgaaaacgacgattaacgtaattaattataccgacaacacgataatcacgacctaaacatacgtctctcccaacaacgtacgaattccgttccaacgcgttaatcacccaaaacgtaaacgccaaccgcatccgtactcaaaccttaacccgactaacccaatcgccaacaacaacaccgc

SEQ ID NO: 9943 - DNA, 557 bp, Artificial Sequence
  chemically treated genomic DNA (Homo sapiens) CpG-island No: 9943
  unsure (38)
gtttagagaggttttattttttataatttttcgattgnttatataatttattcgcgatcgaatagtaattgtatttttagtttggttttttttgggcgcggtatttgtgcgttttttttttcgagaaagatcgcggtaaaggcgcgttgattggcgtagtagtaggcgtagtttgggcggcggcgttggttattatatggatgtgtaggaagcgaagttgcggataaaatgcgcggtattggtgttagcgtaattcgtagcggggataatatatttttaatatgtcgaataatgtgattttcgatagtagtagcgcgatttgaaatcggcgggcgttaatattttgatcggcgtggtaatggtattgaagagtattcgaaaacggcggttaacgtgattggttatatcgatagtacggtggttacgatttgaatatgcgttttttttagtaacgtgcggatttcgttttagcgcgttgattatttagggcgtggacgttagtcgtattcgtatttaggttttggttcggttaatttaatcgttagtaatagtatcgt

SEQ ID NO: 9944 - DNA, 557 bp, Artificial Sequence
  chemically treated genomic DNA (Homo sapiens) CpG-island No: 9944
  unsure (520)
acgatactattactaacgattaaattaaccgaaccaaaacctaaatacgaatacgactaacgtccacgccctaaataatcaacgcgctaaaacgaaatccgcacgttactaaaaaaaacgcatattcaaatcgtaaccaccgtactatcgatataaccaatcacgttaaccgccgttttcgaatactcttcaataccattaccacgccgatcaaaatattaacgcccgccgatttcaaatcgcgctactactatcgaaaatcacattattcgacatattaaaaatatattatccccgctacgaattacgctaacaccaataccgcgcattttatccgcaacttcgcttcctacacatccatataataaccaacgccgccgcccaaactacgcctactactacgccaatcaacgcgcctttaccgcgatctttctcgaaaaaaaaaacgcacaaataccgcgcccaaaaaaaaccaaactaaaaatacaattactattcgatcgcgaataaattatataancaatcgaaaaattataaaaaataaaacctctctaaac

SEQ ID NO: 9945 - DNA, 596 bp, Artificial Sequence
  chemically treated genomic DNA (Homo sapiens) CpG-island No: 9945
atggcggtataggttattgggcggtgcgatggttagtgaatagtattttttttaaattatagaatggggttaagtcgaagttatcgttaattattagacgggacggtattcggtttttcggcgataaaaaatcgtatattcgcgtggttggtggaatatacggttatgcggatgtattatatagtgaaggtcggtatcgattattaggatcgaaagatgtagttggtaatatcgcgttgcgtatggcgatgtagattgcgagtaatatattcgtcgtgagaaagcgaattttaatatttgtatttttaggtattgttggtaaatatcgttagtttgtatgtcgtttattacggtcggttggtttgaaacgtatcgttaatcgtatttatcgtttgatcgatatttggcggcgggtttgtaataaaaaggtttgaaattgcgttatgcgtattattcgatattttgtgtgtggaagtggtcgataaagcgggcgtattgacgttgtcgaagcggttgaaattaatttgcgtagcgatattttgaacgcggttggattatttttgatgaaataattacgcgtgaaaacgtaatgtagt

SEQ ID NO: 9946 - DNA, 596 bp, Artificial Sequence
  chemically treated genomic DNA (Homo sapiens) CpG-island No: 9946
actacattacgttttcacgcgtaattatttcatcaaaaataatccaaccgcgttcaaaatatcgctacgcaaattaatttcaaccgcttcgacaacgtcaatacgcccgctttatcgaccacttccacacacaaaatatcgaataatacgcataacgcaatttcaaacctttttattacaaacccgccgccaaatatcgatcaaacgataaatacgattaacgatacgtttcaaaccaaccgaccgtaataaacgacatacaaactaacgatatttaccaacaatacctaaaaatacaaatattaaaattcgctttctcacgacgaatatattactcgcaatctacatcgccatacgcaacgcgatattaccaactacatctttcgatcctaataatcgataccgaccttcactatataatacatccgcataaccgtatattccaccaaccacgcgaatatacgattttttatcgccgaaaaaccgaataccgtcccgtctaataattaacgataacttcgacttaaccccattctataatttaaaaaaaatactattcactaaccatcgcaccgcccaataacctataccgccat

SEQ ID NO: 9947 - DNA, 596 bp, Artificial Sequence
  chemically treated genomic DNA (Homo sapiens) CpG-island No: 9947
gttgtattacgtttttacgcgtggttgttttattaagggtgatttaatcgcgtttagaatatcgttacgtaggttgattttagtcgtttcggtagcgttagtacgttcgttttgtcggttatttttatatataaggtgtcgaatagtgcgtatggcgtagttttagatttttttgttgtaggttcgtcgttagatatcggttagacggtgaatgcggttagcgatacgttttaggttaatcggtcgtgataaacggtatataggttggcgatgtttgttagtagtatttggaagtataaatgttggagttcgtttttttacggcggatatgttgttcgtagtttgtatcgttatgcgtagcgcggtattgttagttgtatttttcgattttagtagtcggtatcggtttttattgtgtagtgtattcgtataatcgtatgttttattagttacgcgaatgtgcggttttttatcgtcgaaaaatcgggtgtcgtttcgtttggtggttggcggtggtttcgatttaattttattttatggtttgaagaagatgttatttattggttatcgtatcgtttagtgatttgtgtcgttat

SEQ ID NO: 9948 - DNA, 596 bp, Artificial Sequence
  chemically treated genomic DNA (Homo sapiens) CpG-island No: 9948
ataacgacacaaatcactaaacgatacgataaccaataaataacatcttcttcaaaccataaaataaaattaaatcgaaaccaccgccaaccaccaaacgaaacgacacccgatttttcgacgataaaaaaccgcacattcgcgtaactaataaaacatacgattatacgaatacactacacaataaaaaccgataccgactactaaaatcgaaaaatacaactaacaataccgcgctacgcataacgatacaaactacgaacaacatatccgccgtaaaaaaacgaactccaacatttatacttccaaatactactaacaaacatcgccaacctatataccgtttatcacgaccgattaacctaaaacgtatcgctaaccgcattcaccgtctaaccgatatctaacgacgaacctacaacaaaaaaatctaaaactacgccatacgcactattcgacaccttatatataaaaataaccgacaaaacgaacgtactaacgctaccgaaacgactaaaatcaacctacgtaacgatattctaaacgcgattaaatcacccttaataaaacaaccacgcgtaaaaacgtaatacaac

SEQ ID NO: 9949 - DNA, 723 bp, Artificial Sequence
  chemically treated genomic DNA (Homo sapiens) CpG-island No: 9949
  unsure (380, 452)
ttacggtttggatatcgatacgttggataagacgtggtttacgatagtcgttttatttagtttgcgatgttgcgcgatacgaaatttttatttattcggtgtttaatcgttattatagcgaaatcgaatgatgcgttatatgtattcgttggagcgtaaagatttggcgttgaatcggcgatgatttcgttgggtttttgtattatgaaattgaacgtcgtcgttagatgattttaattatttggtcggaatttggcgaattgtattcgttttgtcgtcggagtaggtcgaatgttattagtagatgattgcgtagttggttgttggttggtgaaattgacgggttacgacgtcgtttgtatgttggcgaagttggcgtntaagaggaataagcgggttgttggggatcgtttttttttgaagtcgtcgaagtatgcgaaattgtgatcggnttggtacggataaattcgcgggtatttagtagtatatagcggcgtgcgtgtgtaattacgcgttttgtgcgcgtagaagggggaattttcggagttgtttcgcggaaataaggggtatgcgttatgaaatattttagattatattgggttgttagtttatcgcgcggacggatatcggtaggaagacgataaagtcgatttttagttcgttgtcgtcggtaaaacgtatgttttacgcgttttaatatttttttgtataattttaagggtg

SEQ ID NO: 9950 - DNA, 723 bp, Artificial Sequence
  chemically treated genomic DNA (Homo sapiens) CpG-island No: 9950
  unsure (272, 344)
cacccttaaaattatacaaaaaaatattaaaacgcgtaaaacatacgttttaccgacgacaacgaactaaaaatcgactttatcgtcttcctaccgatatccgtccgcgcgataaactaacaacccaatataatctaaaatatttcataacgcataccccttatttccgcgaaacaactccgaaaattcccccttctacgcgcacaaaacgcgtaattacacacgcacgccgctatatactactaaatacccgcgaatttatccgtaccaanccgatcacaatttcgcatacttcgacgacttcaaaaaaaaacgatccccaacaacccgcttattcctcttanacgccaacttcgccaacatacaaacgacgtcgtaacccgtcaatttcaccaaccaacaaccaactacgcaatcatctactaataacattcgacctactccgacgacaaaacgaatacaattcgccaaattccgaccaaataattaaaatcatctaacgacgacgttcaatttcataatacaaaaacccaacgaaatcatcgccgattcaacgccaaatctttacgctccaacgaatacatataacgcatcattcgatttcgctataataacgattaaacaccgaataaataaaaatttcgtatcgcgcaacatcgcaaactaaataaaacgactatcgtaaaccacgtcttatccaacgtatcgatatccaaaccgtaa

SEQ ID NO: 9951 - DNA, 723 bp, Artificial Sequence
  chemically treated genomic DNA (Homo sapiens) CpG-island No: 9951
  unsure (272, 344)
tatttttgagattgtgtaggaaggtgttgaagcgcgtaaaatatgcgttttgtcgacggtagcgaattggaagtcgattttatcgtttttttatcggtattcgttcgcgcgataagttggtaatttagtgtggtttggagtgttttatagcgtatattttttgttttcgcgggataatttcgagggtttttttttttgcgcgtatagagcgcgtgattatatacgtacgtcgttgtgtgttattaaatgttcgcgggtttgttcgtgttagntcgattataatttcgtatatttcggcggttttaaaaaaggacgatttttagtagttcgtttattttttttgngcgttagtttcgttagtatataagcggcgtcgtaattcgttagttttattagttagtagttagttgcgtaattatttgttgataatattcggtttgtttcggcggtagaacgggtgtagttcgttaaatttcggttaggtgattgggattatttggcggcggcgtttagttttatggtgtaggaatttagcgggattatcgtcgatttagcgttagatttttacgttttagcgagtgtatatagcgtattattcggtttcgttgtggtagcgattaaatatcggatgggtgaggatttcgtgtcgcgtagtatcgtaggttggatagagcggttgtcgtgagttacgttttgtttagcgtgtcgatgtttaggtcgtgg

SEQ ID NO: 9952 - DNA, 723 bp, Artificial Sequence
  chemically treated genomic DNA (Homo sapiens) CpG-island No: 9952
  unsure (380, 452)
ccacgacctaaacatcgacacgctaaacaaaacgtaactcacgacaaccgctctatccaacctacgatactacgcgacacgaaatcctcacccatccgatatttaatcgctaccacaacgaaaccgaataatacgctatatacactcgctaaaacgtaaaaatctaacgctaaatcgacgataatcccgctaaattcctacaccataaaactaaacgccgccgccaaataatcccaatcacctaaccgaaatttaacgaactacacccgttctaccgccgaaacaaaccgaatattatcaacaaataattacgcaactaactactaactaataaaactaacgaattacgacgccgcttatatactaacgaaactaacgcncaaaaaaaataaacgaactactaaaaatcgtccttttttaaaaccgccgaaatatacgaaattataatcganctaacacgaacaaacccgcgaacatttaataacacacaacgacgtacgtatataatcacgcgctctatacgcgcaaaaaaaaaaaccctcgaaattatcccgcgaaaacaaaaaatatacgctataaaacactccaaaccacactaaattaccaacttatcgcgcgaacgaataccgataaaaaaacgataaaatcgacttccaattcgctaccgtcgacaaaacgcatattttacgcgcttcaacaccttcctacacaatctcaaaaata

SEQ ID NO: 9953 - DNA, 726 bp, Artificial Sequence
  chemically treated genomic DNA (Homo sapiens) CpG-island No: 9953
cgatgtgttggcgttgtcgttgcgtagtaacgtttggttggacgtgaaggttcggttcgtgtgttggtagtggtggtttttagggcgtacgtatttttaattagataatgtcgtaggttgtgcgaaattgggtgatttagttattatttggtattagagcggtaaaggtcgtaataattcgttgaataggcgtatgtcgaagcggggtaatcgtagtaaaagtgacggaatttattgatgatatggcggcggcgtatgcgtgggcggtgtcgtcgtttgtcgtttcggtgcgttaacggtgagtgaaatcgtcgcgtaggattatcggcgttgtttgtgtcgttttaatataaagatcgttagtatattggaatgcgttatcgttggaaaaagcgggcgtagttaaattatcgatagttatagtttagcgtggatgttgtcggtaataatttgtcggtggtcgaaatttttattatggggaagcgttcgggttggtttattcgatgtttcgagagtgggatgagtggtcggtgtcggggatgttggagttttggtcgtgagttacgtaggggcgatgttttttttggggggggtgttcgtttcgcggtgtttcggggtttttcgatatcgtttagtacggcggtaaagtggtggatggcgtagtgaaaagatgtatgagatcgtcgatagttcgaagaaaattgtcgatattattagtttatcgat

SEQ ID NO: 9954 - DNA, 726 bp, Artificial Sequence
  chemically treated genomic DNA (Homo sapiens) CpG-island No: 9954
atcgataaactaataatatcgacaattttcttcgaactatcgacgatctcatacatcttttcactacgccatccaccactttaccgccgtactaaacgatatcgaaaaaccccgaaacaccgcgaaacgaacaccccccccaaaaaaaacatcgcccctacgtaactcacgaccaaaactccaacatccccgacaccgaccactcatcccactctcgaaacatcgaataaaccaacccgaacgcttccccataataaaaatttcgaccaccgacaaattattaccgacaacatccacgctaaactataactatcgataatttaactacgcccgctttttccaacgataacgcattccaatatactaacgatctttatattaaaacgacacaaacaacgccgataatcctacgcgacgatttcactcaccgttaacgcaccgaaacgacaaacgacgacaccgcccacgcatacgccgccgccatatcatcaataaattccgtcacttttactacgattaccccgcttcgacatacgcctattcaacgaattattacgacctttaccgctctaataccaaataataactaaatcacccaatttcgcacaacctacgacattatctaattaaaaatacgtacgccctaaaaaccaccactaccaacacacgaaccgaaccttcacgtccaaccaaacgttactacgcaacgacaacgccaacacatcg

SEQ ID NO: 9955 - DNA, 726 bp, Artificial Sequence
  chemically treated genomic DNA (Homo sapiens) CpG-island No: 9955
gtcgataagttgataatgtcggtaatttttttcgaattatcggcgattttatgtatttttttattacgttatttattattttgtcgtcgtgttgggcggtgtcggaaggtttcgagatatcgcgggacgggtattttttttaaggggaatatcgtttttacgtaatttacgattagggttttaatattttcggtatcggttatttattttattttcggggtatcggatggattagttcgggcgtttttttatgataaaagtttcgattatcggtaggttgttgtcgatagtatttacgttaagttgtggttgtcgataatttggttgcgttcgttttttttagcggtagcgtattttagtatgttggcggtttttatgttgaaacggtataaataacgtcggtagttttgcgcggcgattttatttatcgttaacgtatcggagcggtaaacgacgatatcgtttacgtatacgtcgtcgttatattattaataaatttcgttatttttgttgcggttgtttcgtttcggtatacgtttgtttaacggattgttgcgatttttgtcgttttgatgttagatagtgattgaattatttagtttcgtataatttgcggtattgtttggttaagaatgcgtgcgttttgagaattattattattagtatacgaatcggatttttacgtttagttaaacgttgttgcgtaacggtagcgttaatatatcg

SEQ ID NO: 9956 - DNA, 726 bp, Artificial Sequence
  chemically treated genomic DNA (Homo sapiens) CpG-island No: 9956
cgatatattaacgctaccgttacgcaacaacgtttaactaaacgtaaaaatccgattcgtatactaataataataattctcaaaacgcacgcattcttaaccaaacaataccgcaaattatacgaaactaaataattcaatcactatctaacatcaaaacgacaaaaatcgcaacaatccgttaaacaaacgtataccgaaacgaaacaaccgcaacaaaaataacgaaatttattaataatataacgacgacgtatacgtaaacgatatcgtcgtttaccgctccgatacgttaacgataaataaaatcgccgcgcaaaactaccgacgttatttataccgtttcaacataaaaaccgccaacatactaaaatacgctaccgctaaaaaaaacgaacgcaaccaaattatcgacaaccacaacttaacgtaaatactatcgacaacaacctaccgataatcgaaacttttatcataaaaaaacgcccgaactaatccatccgataccccgaaaataaaataaataaccgataccgaaaatattaaaaccctaatcgtaaattacgtaaaaacgatattccccttaaaaaaaatacccgtcccgcgatatctcgaaaccttccgacaccgcccaacacgacgacaaaataataaataacgtaataaaaaaatacataaaatcgccgataattcgaaaaaaattaccgacattatcaacttatcgac

SEQ ID NO: 9957 - DNA, 549 bp, Artificial Sequence
  chemically treated genomic DNA (Homo sapiens) CpG-island No: 9957
  unsure (461..462, 490)
tcggcgagatttcgttgtttagttattattagatcgagtatagatcgagttcgttttttagcgtgaagttcgtttgtcgtttggtggtttattgttatcgatagtatcgaagcgttaacggttatcgatattaattcgtacgcgcgattcgcggcggcgatatcgaagaaatcgcgtttaatattatttcgaagttgtcgatgagattgttcgttagttgcgtttgcgtgatttggcggtttgattgttatcgattttatcgatatgacgttagtacgttatcgcgtgcggtagaaaatcgtttgcgtgaagcggtgcgttaggatcgtgcggtatttaaattagttatatttttcgttttggtttgttggaaatgtttcgtagcgtttgagtttattattgggtgaatttagttattacgtttgttcgtttgttttggtattggtatcgtgcgtgataannncgaattcggtttttggttttttcgggnttttttttttcgtttgttttttaaaaatttttgtgttttttgggtttcggtttttcgtt

SEQ ID NO: 9958 - DNA, 549 bp, Artificial Sequence
  chemically treated genomic DNA (Homo sapiens) CpG-island No: 9958
  unsure (60, 87..)
aacgaaaaaccgaaacccaaaaaacacaaaaatttttaaaaaacaaacgaaaaaaaaaancccgaaaaaaccaaaaaccgaattcgnnnttatcacgcacgataccaataccaaaacaaacgaacaaacgtaataactaaattcacccaataataaactcaaacgctacgaaacatttccaacaaaccaaaacgaaaaatataactaatttaaataccgcacgatcctaacgcaccgcttcacgcaaacgattttctaccgcacgcgataacgtactaacgtcatatcgataaaatcgataacaatcaaaccgccaaatcacgcaaacgcaactaacgaacaatctcatcgacaacttcgaaataatattaaacgcgatttcttcgatatcgccgccgcgaatcgcgcgtacgaattaatatcgataaccgttaacgcttcgatactatcgataacaataaaccaccaaacgacaaacgaacttcacgctaaaaaacgaactcgatctatactcgatctaataataactaaacaacgaaatctcgccga

SEQ ID NO: 9959 - DNA, 549 bp, Artificial Sequence
  chemically treated genomic DNA (Homo sapiens) CpG-island No: 9959
  unsure (60, 87..)
ggcgaaaaatcggagtttaaagggtataaaaatttttaaggggtaaacggggaaaagggnttcggggaaattaaaggtcgaattcgnnnttgttacgtacggtgttagtattagaataagcggataaacgtgatgattggatttatttagtgatgggtttaggcgttgcgggatatttttagtaggttaaagcgagaaatatggttgatttgaatatcgtacggttttgacgtatcgttttacgtagacggttttttatcgtacgcggtggcgtattggcgttatgtcgatgaagtcgataataattaggtcgttaggttacgtaggcgtagttgacgagtaattttatcggtagtttcgaggtagtgttaaacgcggttttttcgatatcgtcgtcgcgggtcgcgcgtgcgagttgatgtcgatggtcgttaacgtttcggtgttgtcgataataatggattattagacggtagacgaattttacgttggaaggcggattcgatttgtgttcgatttggtagtggttgaatagcgggatttcgtcgg

SEQ ID NO: 9960 - DNA, 549 bp, Artificial Sequence
  chemically treated genomic DNA (Homo sapiens) CpG-island No: 9960
  unsure (461..462, 490)
ccgacgaaatcccgctattcaaccactaccaaatcgaacacaaatcgaatccgccttccaacgtaaaattcgtctaccgtctaataatccattattatcgacaacaccgaaacgttaacgaccatcgacatcaactcgcacgcgcgacccgcgacgacgatatcgaaaaaaccgcgtttaacactacctcgaaactaccgataaaattactcgtcaactacgcctacgtaacctaacgacctaattattatcgacttcatcgacataacgccaatacgccaccgcgtacgataaaaaaccgtctacgtaaaacgatacgtcaaaaccgtacgatattcaaatcaaccatatttctcgctttaacctactaaaaatatcccgcaacgcctaaacccatcactaaataaatccaatcatcacgtttatccgcttattctaatactaacaccgtacgtaacaannncgaattcgacctttaatttccccgaancccttttccccgtttaccccttaaaaatttttataccctttaaactccgatttttcgcc

SEQ ID NO: 9961 - DNA, 557 bp, Artificial Sequence
  chemically treated genomic DNA (Homo sapiens) CpG-island No: 9961
taagtgttagtttcggacgttgtatttttttagttatgttagcgtcgtattattcgtatagttatttttagtcgcgagttggggagatttttggttagtacgtttattgcgtcgttttataaatatcgttagcggttaaatttagattcggttatgttttttcggaatgtaaattacgttaggtttaattttttcgttaatgatcgtttcggtagaatttgttcgcgtgcgttttataatcgaatagtatcgttattttgtagtcgcgtttttgggtatcgttaggatgaatggtgataggtttacgatttttatcgcgtataattcgcgtagagaattgtaatttagttggttgtgtagcggtgcgtcggatgggtagaaagtatttgtaattgttttggttcggtatgttttgttattcgttcggttttagttatattggatgtttagggtaattcggtaatcgtaatcggtaatacgttgtgagaagattttaattttgtcgttgcggtttttaacggatgcgttagcggatcgcggtaaaaattagcgaagta

SEQ ID NO: 9962 - DNA, 557 bp, Artificial Sequence
  chemically treated genomic DNA (Homo sapiens) CpG-island No: 9962
tacttcgctaatttttaccgcgatccgctaacgcatccgttaaaaaccgcaacgacaaaattaaaatcttctcacaacgtattaccgattacgattaccgaattaccctaaacatccaatataactaaaaccgaacgaataacaaaacataccgaaccaaaacaattacaaatactttctacccatccgacgcaccgctacacaaccaactaaattacaattctctacgcgaattatacgcgataaaaatcgtaaacctatcaccattcatcctaacgatacccaaaaacgcgactacaaaataacgatactattcgattataaaacgcacgcgaacaaattctaccgaaacgatcattaacgaaaaaattaaacctaacgtaatttacattccgaaaaaacataaccgaatctaaatttaaccgctaacgatatttataaaacgacgcaataaacgtactaaccaaaaatctccccaactcgcgactaaaaataactatacgaataatacgacgctaacataactaaaaaaatacaacgtccgaaactaacactta

SEQ ID NO: 9963 - DNA, 557 bp, Artificial Sequence
  chemically treated genomic DNA (Homo sapiens) CpG-island No: 9963
tgtttcgttgatttttgtcgcgattcgttggcgtattcgttaaaaatcgtagcggtaagattgaaatttttttatagcgtattgtcgattacggttatcggattgttttgggtatttaatgtggttggagtcggacgaatggtagggtatgtcgaattagaatagttgtaggtattttttgtttattcggcgtatcgttgtatagttagttgaattatagttttttgcgcgaattgtacgcggtggaaatcgtgagtttgttattatttattttgacgatgtttaggagcgcggttataagatggcgatattgttcggttgtggaacgtacgcgggtaaattttgtcggagcggttattagcgagggaattaaatttggcgtgatttgtatttcgaaggggtatggtcggatttggatttaatcgttgacggtatttgtaaaacggcgtagtgaacgtgttgattaaagatttttttagttcgcggttgggaatggttgtgcgggtaatacggcgttggtatggttggaaaaatataacgttcggaattgatattta

SEQ ID NO: 9964 - DNA, 557 bp, Artificial Sequence
  chemically treated genomic DNA (Homo sapiens) CpG-island No: 9964
taaatatcaattccgaacgttatatttttccaaccataccaacgccgtattacccgcacaaccattcccaaccgcgaactaaaaaaatctttaatcaacacgttcactacgccgttttacaaataccgtcaacgattaaatccaaatccgaccataccccttcgaaatacaaatcacgccaaatttaattccctcgctaataaccgctccgacaaaatttacccgcgtacgttccacaaccgaacaatatcgccatcttataaccgcgctcctaaacatcgtcaaaataaataataacaaactcacgatttccaccgcgtacaattcgcgcaaaaaactataattcaactaactatacaacgatacgccgaataaacaaaaaatacctacaactattctaattcgacataccctaccattcgtccgactccaaccacattaaatacccaaaacaatccgataaccgtaatcgacaatacgctataaaaaaatttcaatcttaccgctacgatttttaacgaatacgccaacgaatcgcgacaaaaatcaacgaaaca

SEQ ID NO: 9965 - DNA, 887 bp, Artificial Sequence
  chemically treated genomic DNA (Homo sapiens) CpG-island No: 9965
tatttcgatggtgacgtcgagtatagatatgacggtgaagtcgaggtcggttatagcgcgtggatgatatatagaattggcgttacgaataggaataggaatttagcggttcggtagtgtcgttaacgacgtaggcgattaggttagaaatagtagatttttaattttatggcgatttttcgggcgcgcgtagtgatataagttaacgttgtatttggtagatcgtcgagaaacgtaggtattttatttgcgaaaggaaacgcgtggcgtttttagaaaaatcgtgagtggtcgggtatttaattgcgtttggaagatggttagtgcgtcgttgacgtttgatcgtattttttgtattcgcgtgcgggattattgggtaaaacgggtgtttttttttttttgggtcgcgtaaaattcggttttttttttacgtttagatattttatacgtaaatttcggggcgtgcgtaaattttttattttttatcggtttgttttatataagaaatattcggacgttagttatttcgaacgtttattcgtagatatagcgtttaatgtggtcgatggtatcgcgttaaatttatcgtttagagtgtaggaattttcgtatagacggtttgcgggtagattcgttcgtaaattttcggtagggtgttggtttggtgtatagtttcgtcgttttaaaaatacgtttttcgttggcgagttttagttattcgggatgtagttgtgtatcgggtatttttattcgtagtatgggttgcgtacgataggtagcggttagtttgcgttttggtttggttttcggaaaacgttcgtaaattttaataaatttaattttgcggatttttagcggttttttggcggattaacgcgttgtaggtt

SEQ ID NO: 9966 - DNA, 887 bp, Artificial Sequence
  chemically treated genomic DNA (Homo sapiens) CpG-island No: 9966
aacctacaacgcgttaatccgccaaaaaaccgctaaaaatccgcaaaattaaatttattaaaatttacgaacgttttccgaaaaccaaaccaaaacgcaaactaaccgctacctatcgtacgcaacccatactacgaataaaaatacccgatacacaactacatcccgaataactaaaactcgccaacgaaaaacgtatttttaaaacgacgaaactatacaccaaaccaacaccctaccgaaaatttacgaacgaatctacccgcaaaccgtctatacgaaaattcctacactctaaacgataaatttaacgcgataccatcgaccacattaaacgctatatctacgaataaacgttcgaaataactaacgtccgaatatttcttatataaaacaaaccgataaaaaataaaaaatttacgcacgccccgaaatttacgtataaaatatctaaacgtaaaaaaaaaaccgaattttacgcgacccaaaaaaaaaaaaacacccgttttacccaataatcccgcacgcgaatacaaaaaatacgatcaaacgtcaacgacgcactaaccatcttccaaacgcaattaaatacccgaccactcacgatttttctaaaaacgccacgcgtttcctttcgcaaataaaatacctacgtttctcgacgatctaccaaatacaacgttaacttatatcactacgcgcgcccgaaaaatcgccataaaattaaaaatctactatttctaacctaatcgcctacgtcgttaacgacactaccgaaccgctaaattcctattcctattcgtaacgccaattctatatatcatccacgcgctataaccgacctcgacttcaccgtcatatctatactcgacgtcaccatcgaaata

SEQ ID NO: 9967 - DNA, 887 bp, Artificial Sequence
  chemically treated genomic DNA (Homo sapiens) CpG-island No: 9967
gatttgtagcgcgttgattcgttaagaaatcgttgaagattcgtaaaattgagtttgttgaaatttacgagcgtttttcgaaggttaggttaaagcgtaggttgatcgttgtttgtcgtgcgtaatttatattgcgagtggaaatgttcggtatataattatatttcgaatggttgaagttcgttaacgaggggcgtatttttgaagcggcggaattgtgtattagattaatattttgtcggaagtttgcggacgagtttgttcgtaaatcgtttgtgcgaaggtttttgtattttgaacgatgagtttggcgcggtattatcggttatattgagcgttatatttacggataagcgttcgagatggttggcgttcggatattttttgtgtggaatagatcggtgaaaagtggggaatttgcgtacgtttcgaggtttgcgtgtgggatgtttgaacgtaaagggaaaatcgggttttacgcggtttaaaagggggggggtattcgttttgtttagtggtttcgtacgcggatgtaggaagtgcggttaaacgttagcggcgtattgattattttttaggcgtaattgagtgttcgattatttacggtttttttgaaagcgttacgcgttttttttcgtaggtaaaatgtttgcgtttttcggcggtttgttaggtgtagcgttagtttgtattattgcgcgcgttcggaaaatcgttataaaattaaaggtttgttatttttggtttgatcgtttgcgtcgttggcggtattatcgaatcgttggatttttgtttttgttcgtagcgttagttttgtatgttatttacgcgttgtaatcggtttcggttttatcgttatgtttgtgttcggcgttattatcggaata

SEQ ID NO: 9968 - DNA, 887 bp, Artificial Sequence
  chemically treated genomic DNA (Homo sapiens) CpG-island No: 9968
tattccgataataacgccgaacacaaacataacgataaaaccgaaaccgattacaacgcgtaaataacatacaaaactaacgctacgaacaaaaacaaaaatccaacgattcgataataccgccaacgacgcaaacgatcaaaccaaaaataacaaacctttaattttataacgattttccgaacgcgcgcaataatacaaactaacgctacacctaacaaaccgccgaaaaacgcaaacattttacctacgaaaaaaaacgcgtaacgctttcaaaaaaaccgtaaataatcgaacactcaattacgcctaaaaaataatcaatacgccgctaacgtttaaccgcacttcctacatccgcgtacgaaaccactaaacaaaacgaatacccccccccttttaaaccgcgtaaaacccgattttccctttacgttcaaacatcccacacgcaaacctcgaaacgtacgcaaattccccacttttcaccgatctattccacacaaaaaatatccgaacgccaaccatctcgaacgcttatccgtaaatataacgctcaatataaccgataataccgcgccaaactcatcgttcaaaatacaaaaaccttcgcacaaacgatttacgaacaaactcgtccgcaaacttccgacaaaatattaatctaatacacaattccgccgcttcaaaaatacgcccctcgttaacgaacttcaaccattcgaaatataattatataccgaacatttccactcgcaatataaattacgcacgacaaacaacgatcaacctacgctttaacctaaccttcgaaaaacgctcgtaaatttcaacaaactcaattttacgaatcttcaacgatttcttaacgaatcaacgcgctacaaatc

SEQ ID NO: 9969 - DNA, 501 bp, Artificial Sequence
  chemically treated genomic DNA (Homo sapiens) CpG-island No: 9969
gtttgagagtcggtatgttgtatatgttcggtgataagattacgtagatgtttttatggatcgttagagcgttaacgtttaagatttcgattagtttcggttaacgcgtttgcggaaatcgtcgtttttatcgagaacgtaagcgaaacgtcggttatgttcgtatcgaagttaacgtcggttttatttagaatgtagcgatattattcgttatatatttataatcgttgtcgttaatgttttttatacggtgatagtatcggagttacgtacgttcgaaacgtttattcgcgcggttgcggtatatagacgattacggtcgcgttataaagtaggtgttgtcgaatgttgcgttatggtgcggagggggattatcggcgagacgggggttatcgtcgttgtttttcgttattttcgtttcgtagtagttttcgcgcgtttattcgagatttttttggcgttagaatttttttttgttgtgtttaatttcgtggggtatta

SEQ ID NO: 9970 - DNA, 501 bp, Artificial Sequence
  chemically treated genomic DNA (Homo sapiens) CpG-island No: 9970
taataccccacgaaattaaacacaacaaaaaaaaattctaacgccaaaaaaatctcgaataaacgcgcgaaaactactacgaaacgaaaataacgaaaaacaacgacgataacccccgtctcgccgataatccccctccgcaccataacgcaacattcgacaacacctactttataacgcgaccgtaatcgtctatataccgcaaccgcgcgaataaacgtttcgaacgtacgtaactccgatactatcaccgtataaaaaacattaacgacaacgattataaatatataacgaataatatcgctacattctaaataaaaccgacgttaacttcgatacgaacataaccgacgtttcgcttacgttctcgataaaaacgacgatttccgcaaacgcgttaaccgaaactaatcgaaatcttaaacgttaacgctctaacgatccataaaaacatctacgtaatcttatcaccgaacatatacaacataccgactctcaaac

SEQ ID NO: 9971 - DNA, 501 bp, Artificial Sequence
  chemically treated genomic DNA (Homo sapiens) CpG-island No: 9971
taatattttacggggttgggtataataaaaagaggttttagcgttagagaaatttcggataaacgcgcgggaattattgcggaacgaaaatagcgaaaagtagcggcgataattttcgtttcgtcggtggttttttttcgtattatgacgtaatattcggtaatatttgttttatggcgcgatcgtggtcgtttgtatgtcgtagtcgcgcgggtgaacgtttcgggcgtgcgtaatttcggtgttattatcgtgtagaaggtattggcgataacggttgtgaatatatgacgggtggtatcgttgtattttgggtaaaatcggcgttaatttcggtgcgggtatgatcggcgtttcgtttacgttttcgatgaaagcggcgattttcgtaaacgcgttaatcggaattggtcgaggttttaagcgttgacgttttggcgatttatgaaggtatttgcgtggttttattatcgagtatgtgtagtatatcggtttttaggt

SEQ ID NO: 9972 - DNA, 501 bp, Artificial Sequence
  chemically treated genomic DNA (Homo sapiens) CpG-island No: 9972
acctaaaaaccgatatactacacatactcgataataaaaccacgcaaataccttcataaatcgccaaaacgtcaacgcttaaaacctcgaccaattccgattaacgcgtttacgaaaatcgccgctttcatcgaaaacgtaaacgaaacgccgatcatacccgcaccgaaattaacgccgattttacccaaaatacaacgataccacccgtcatatattcacaaccgttatcgccaataccttctacacgataataacaccgaaattacgcacgcccgaaacgttcacccgcgcgactacgacatacaaacgaccacgatcgcgccataaaacaaatattaccgaatattacgtcataatacgaaaaaaaaccaccgacgaaacgaaaattatcgccgctacttttcgctattttcgttccgcaataattcccgcgcgtttatccgaaatttctctaacgctaaaacctctttttattatacccaaccccgtaaaatatta

SEQ ID NO: 9973 - DNA, 981 bp, Artificial Sequence
  chemically treated genomic DNA (Homo sapiens) CpG-island No: 9973
tatttgtcgttcggttaataataattattgcgggtttgcgtttatcgtcgattttttttagtaggcgttcgtatagtggatgtcggtggttttacgtagatagcgatgcgtaattcgtgatatgggtatcggttggtttgttatttggttcgttcgtagcgggaagtcgtcgcgatcgatttcgtaaggtggtaagattcggcgtaacgtttatttgttttatcgtaaatagcgtgcggtacgtttcgcgtcgttttgtattttatcggtaattagtatgatttttgttcgttatatagagcgcgtaaacgttgtataaaggttggcgacgagggtagaaatcgttttcgttttgaatcggtttaattacgatggcggcgatattttcggcgcggtattatttttgaagattcggtggatgttggcgatagtttattttcgtttatgtcgtgtagcgggtaaggataaagcgcgcgataaaatgattcggtattagttttatgttcgtagagtacggatttattttgtcgttagcgttagcgtgtaatgcgtgcgttcgtgatacgcgtcgttaaaagtatggtgtcgttacgtttggtggcggcgcgggcgatttttatcgcgtttttatcgtttcggaatcggtcgtaattagtagcgtttttttggcgaaatcgtcggtattttttgatttataatttcgtatagttttagatacggttcgtagttagtatttggaagtaggtgtgcgatagtttttttaattgcgtttttacgcggttattattttcggatgtaggtgttcggtattgagtatcgtaattcgttcgcgaaattaagatatttacggtttttaacgttttatattcggtatttttcgcgcggttagcgaaaatcgggtgaatttgtttaacgttacgggaatcgtttgattgcggcgttgtattaattttttattgttgtttattcgtttttttagtt

SEQ ID NO: 9974 - DNA, 981 bp, Artificial Sequence
  chemically treated genomic DNA (Homo sapiens) CpG-island No: 9974
aactaaaaaaacgaataaacaacaataaaaaattaatacaacgccgcaatcaaacgattcccgtaacgttaaacaaattcacccgattttcgctaaccgcgcgaaaaataccgaatataaaacgttaaaaaccgtaaatatcttaatttcgcgaacgaattacgatactcaataccgaacacctacatccgaaaataataaccgcgtaaaaacgcaattaaaaaaactatcgcacacctacttccaaatactaactacgaaccgtatctaaaactatacgaaattataaatcaaaaaataccgacgatttcgccaaaaaaacgctactaattacgaccgattccgaaacgataaaaacgcgataaaaatcgcccgcgccgccaccaaacgtaacgacaccatacttttaacgacgcgtatcacgaacgcacgcattacacgctaacgctaacgacaaaataaatccgtactctacgaacataaaactaataccgaatcattttatcgcgcgctttatccttacccgctacacgacataaacgaaaataaactatcgccaacatccaccgaatcttcaaaaataataccgcgccgaaaatatcgccgccatcgtaattaaaccgattcaaaacgaaaacgatttctaccctcgtcgccaacctttatacaacgtttacgcgctctatataacgaacaaaaatcatactaattaccgataaaatacaaaacgacgcgaaacgtaccgcacgctatttacgataaaacaaataaacgttacgccgaatcttaccaccttacgaaatcgatcgcgacgacttcccgctacgaacgaaccaaataacaaaccaaccgatacccatatcacgaattacgcatcgctatctacgtaaaaccaccgacatccactatacgaacgcctactaaaaaaaatcgacgataaacgcaaacccgcaataattattattaaccgaacgacaaata

SEQ ID NO: 9975 - DNA, 981 bp, Artificial Sequence
  chemically treated genomic DNA (Homo sapiens) CpG-island No: 9975
aattggagaagcgaatgaatagtaataaagagttaatgtagcgtcgtagttaggcgattttcgtggcgttgggtaaatttattcgattttcgttgatcgcgcggaaaatgtcgggtgtgggacgttgaaggtcgtgagtattttgatttcgcgggcggattgcggtgtttaatatcgggtatttgtattcgaaggtggtggtcgcgtggaagcgtagttgaaaaaattgtcgtatatttgtttttaggtgttggttacgagtcgtatttggagttgtgcgagattatgaattagaaggtgtcggcgatttcgttaagaaaacgttgttggttacgatcggtttcgaagcggtgaaaacgcggtaaaaatcgttcgcgtcgttattaaacgtagcggtattatgtttttagcggcgcgtattacgggcgtacgtattatacgttggcgttgacggtaaggtgaattcgtattttgcgggtatggggttgatgtcgggttattttatcgcgcgttttatttttgttcgttgtacggtataagcgaggatgagttatcgttagtatttatcggatttttaaaaatgatgtcgcgtcggaagtatcgtcgttatcgtgattgagtcggtttagggcgaaggcggtttttattttcgtcgttagtttttatgtagcgtttacgcgttttgtgtgacgagtagggattatgttgattgtcgatgaagtgtagagcggcgcggggcgtatcgtacgttgtttgcgatggagtagatgggcgttgcgtcggattttattattttgcgaaatcgatcgcggcggtttttcgttgcgggcgggttaggtagtagattagtcgatatttatattacgagttgcgtatcgttgtttgcgtgaaattatcgatatttattgtacgaacgtttgttggaagagatcgacgataagcgtaagttcgtagtggttgttgttagtcgaacggtagatg

SEQ ID NO: 9976 - DNA, 981 bp, Artificial Sequence
  chemically treated genomic DNA (Homo sapiens) CpG-island No: 9976
catctaccgttcgactaacaacaaccactacgaacttacgcttatcgtcgatctcttccaacaaacgttcgtacaataaatatcgataatttcacgcaaacaacgatacgcaactcgtaatataaatatcgactaatctactacctaacccgcccgcaacgaaaaaccgccgcgatcgatttcgcaaaataataaaatccgacgcaacgcccatctactccatcgcaaacaacgtacgatacgccccgcgccgctctacacttcatcgacaatcaacataatccctactcgtcacacaaaacgcgtaaacgctacataaaaactaacgacgaaaataaaaaccgccttcgccctaaaccgactcaatcacgataacgacgatacttccgacgcgacatcatttttaaaaatccgataaatactaacgataactcatcctcgcttataccgtacaacgaacaaaaataaaacgcgcgataaaataacccgacatcaaccccatacccgcaaaatacgaattcaccttaccgtcaacgccaacgtataatacgtacgcccgtaatacgcgccgctaaaaacataataccgctacgtttaataacgacgcgaacgatttttaccgcgttttcaccgcttcgaaaccgatcgtaaccaacaacgttttcttaacgaaatcgccgacaccttctaattcataatctcgcacaactccaaatacgactcgtaaccaacacctaaaaacaaatatacgacaattttttcaactacgcttccacgcgaccaccaccttcgaatacaaatacccgatattaaacaccgcaatccgcccgcgaaatcaaaatactcacgaccttcaacgtcccacacccgacattttccgcgcgatcaacgaaaatcgaataaatttacccaacgccacgaaaatcgcctaactacgacgctacattaactctttattactattcattcgcttctccaatt

SEQ ID NO: 9977 - DNA, 510 bp, Artificial Sequence
  chemically treated genomic DNA (Homo sapiens) CpG-island No: 9977
ttttcgattttttttcggttttagttagcgtttagatcgattatcgatatggcggttattttgttgtgttatgattttaatcgggagttggttagtgtgtaggtcgtgcgagaagtataaattttttatttcggcgtattgggtagaatcgaatttatacgttaggtttgcgagagttttacgagttgggatggtttaggaggaaataacgtaaatcgggtattcgtcgggatattttttaaagtcgggatgcgtatattttggtatttttcgtgttggtagaagtcgtttttgacgtttttattaggaggaggatttatgtttgttttcgtcgttttgattttgcggtcgggcgtggagagtgttttttcgttttcgggggaaatatttatagtgtatcggttggcgttagttttcggaggttgcgttttatcgttggtttttgaagaaaacgggagaattttcgattttgcgattgaatcgtagattagattaatgatttgcgtttga

SEQ ID NO: 9978 - DNA, 510 bp, Artificial Sequence
  chemically treated genomic DNA (Homo sapiens) CpG-island No: 9978
tcaaacgcaaatcattaatctaatctacgattcaatcgcaaaatcgaaaattctcccgttttcttcaaaaaccaacgataaaacgcaacctccgaaaactaacgccaaccgatacactataaatatttcccccgaaaacgaaaaaacactctccacgcccgaccgcaaaatcaaaacgacgaaaacaaacataaatcctcctcctaataaaaacgtcaaaaacgacttctaccaacacgaaaaataccaaaatatacgcatcccgactttaaaaaatatcccgacgaatacccgatttacgttatttcctcctaaaccatcccaactcgtaaaactctcgcaaacctaacgtataaattcgattctacccaatacgccgaaataaaaaatttatacttctcgcacgacctacacactaaccaactcccgattaaaatcataacacaacaaaataaccgccatatcgataatcgatctaaacgctaactaaaaccgaaaaaaaatcgaaaa

SEQ ID NO: 9979 - DNA, 510 bp, Artificial Sequence
  chemically treated genomic DNA (Homo sapiens) CpG-island No: 9979
ttagacgtagattattagtttaatttgcggtttaatcgtaaggtcgaaagttttttcgttttttttaaaggttagcgataaggcgtaattttcggggattgacgttagtcgatatattatgggtatttttttcggaggcgagaaagtattttttacgttcggtcgtaggattaggacgacgggggtaggtatgaattttttttttgatggagacgttagaggcgatttttgttagtacggagagtgttagagtatgcgtatttcggttttggggaatatttcgacgggtgttcgatttgcgttgtttttttttggattattttagttcgtggagttttcgtagatttaacgtgtgggttcgattttgtttaatgcgtcgagataaaaggtttatgtttttcgtacggtttgtatattagttagttttcggttgagattatggtatagtaaaatgatcgttatatcggtaatcgatttgagcgttggttgaggtcggaaaaagatcgaaga

SEQ ID NO: 9980 - DNA, 510 bp, Artificial Sequence
  chemically treated genomic DNA (Homo sapiens) CpG-island No: 9980
tcttcgatctttttccgacctcaaccaacgctcaaatcgattaccgatataacgatcattttactataccataatctcaaccgaaaactaactaatatacaaaccgtacgaaaaacataaaccttttatctcgacgcattaaacaaaatcgaacccacacgttaaatctacgaaaactccacgaactaaaataatccaaaaaaaaacaacgcaaatcgaacacccgtcgaaatattccccaaaaccgaaatacgcatactctaacactctccgtactaacaaaaatcgcctctaacgtctccatcaaaaaaaaaattcatacctacccccgtcgtcctaatcctacgaccgaacgtaaaaaatactttctcgcctccgaaaaaaatacccataatatatcgactaacgtcaatccccgaaaattacgccttatcgctaacctttaaaaaaaacgaaaaaactttcgaccttacgattaaaccgcaaattaaactaataatctacgtctaa

SEQ ID NO: 9981 - DNA, 510 bp, Artificial Sequence
  chemically treated genomic DNA (Homo sapiens) CpG-island No: 9981
tcggtgcggtaattattattttattttcgttgttatcgaagttatttgcgtttaggtttgcgttatgacgcgtaatttatcgttgaaatttgttatcgtagtgttattaggtttttgtttgttcgttgagcgttatcggcgcgttgcggtcgtatatttttgtgttgtgttcgggggtttttttcgtttgtttttttcgcgcggaaggaagtggtatgttttttttttaatgcgcgatgtattttcgcgggggcgtaaagtttgcgggagcggggcgcgggggtttgttaattcgcgaggcgttttagtgttttttcgcgggatataagggtgggtacggggttcgtacggtgtcgagtattgtgggagacggcgtatgtttgaaaggtatcgtcgggggaagttttgttgttagcgttagaaacgtcgtttaattagcgtcgaagtgagcgtagtgattaaagttatgtagtggtaatggattttcgtaaattgaaaaaaggcgatgaa

SEQ ID NO: 9982 - DNA, 510 bp, Artificial Sequence
  chemically treated genomic DNA (Homo sapiens) CpG-island No: 9982
ttcatcgccttttttcaatttacgaaaatccattaccactacataactttaatcactacgctcacttcgacgctaattaaacgacgtttctaacgctaacaacaaaacttcccccgacgatacctttcaaacatacgccgtctcccacaatactcgacaccgtacgaaccccgtacccacccttatatcccgcgaaaaaacactaaaacgcctcgcgaattaacaaacccccgcgccccgctcccgcaaactttacgcccccgcgaaaatacatcgcgcattaaaaaaaaaacataccacttccttccgcgcgaaaaaaacaaacgaaaaaaacccccgaacacaacacaaaaatatacgaccgcaacgcgccgataacgctcaacgaacaaacaaaaacctaataacactacgataacaaatttcaacgataaattacgcgtcataacgcaaacctaaacgcaaataacttcgataacaacgaaaataaaataataattaccgcaccga

SEQ ID NO: 9983 - DNA, 510 bp, Artificial Sequence
  chemically treated genomic DNA (Homo sapiens) CpG-island No: 9983
tttatcgtttttttttagtttgcggaaatttattgttattgtatggttttaattattgcgtttatttcggcgttggttaaacggcgtttttggcgttggtaataaagtttttttcgacggtattttttagatatgcgtcgttttttatagtgttcgatatcgtacgggtttcgtgtttatttttgtatttcgcgggaggatattggggcgtttcgcgggttagtaagttttcgcgtttcgttttcgtaggttttacgttttcgcgaaaatatatcgcgtattaaagggggggtatattattttttttcgcgcgaggagaataaacggggggaattttcgggtataatataaaaatgtgcggtcgtagcgcgtcggtaacgtttaacgaataggtagaagtttggtaatattgcgatggtagattttaacggtgaattgcgcgttatggcgtaagtttggacgtagatgatttcggtagtaacgaaagtaaagtgatagttgtcgtatcgg

SEQ ID NO: 9984 - DNA, 510 bp, Artificial Sequence
  chemically treated genomic DNA (Homo sapiens) CpG-island No: 9984
ccgatacgacaactatcactttactttcgttactaccgaaatcatctacgtccaaacttacgccataacgcgcaattcaccgttaaaatctaccatcgcaatattaccaaacttctacctattcgttaaacgttaccgacgcgctacgaccgcacatttttatattatacccgaaaattccccccgtttattctcctcgcgcgaaaaaaaataatataccccccctttaatacgcgatatattttcgcgaaaacgtaaaacctacgaaaacgaaacgcgaaaacttactaacccgcgaaacgccccaatatcctcccgcgaaatacaaaaataaacacgaaacccgtacgatatcgaacactataaaaaacgacgcatatctaaaaaataccgtcgaaaaaaactttattaccaacgccaaaaacgccgtttaaccaacgccgaaataaacgcaataattaaaaccatacaataacaataaatttccgcaaactaaaaaaaaacgataaa

SEQ ID NO: 9985 - DNA, 656 bp, Artificial Sequence
  chemically treated genomic DNA (Homo sapiens) CpG-island No: 9985
attatttcgttataacgcggtttttcggtcgtaaattttaaaatttgtttcggtcgcgaatcgatttttttgcgcgttagatagcgaaaatcgtgttttagtcgaatatttcgaagagatcgatgttttcggtttttgcgtttagtaacgtcgtaagtcggaggggcggtttttttgttagttatagcgtagacggtttattttattttaattacgtttagagtgatgcgttcgttagtggtaaaggtggttatttcgtgacgttggtagaaagttcgcgaaagttatcgcgttatgttgtttgggagaggtcgtaaaagttaattaggcgcgtcgcgtttcggtgttaaaacgacgttgtcgttagtgagtgaggcgtggcgttttattttataatttaggtcggtttaatatttttttggcgttggcgtagattcggtagggtgaaggttagagattgattcgcgcgtatagattttcgcgaaatttgttttcggtaatagttggcgtaaatcgcgtatcgtttcggcgataagttgaaaattattgttatttggcgatcgttgttaaacgggtaaaaggttttttttttaatggttttagtagtattgtttgttcgtttgcgtttagttcgttaattttattaagaataatat

SEQ ID NO: 9986 - DNA, 656 bp, Artificial Sequence
  chemically treated genomic DNA (Homo sapiens) CpG-island No: 9986
atattattcttaataaaattaacgaactaaacgcaaacgaacaaacaatactactaaaaccattaaaaaaaaaaccttttacccgtttaacaacgatcgccaaataacaataattttcaacttatcgccgaaacgatacgcgatttacgccaactattaccgaaaacaaatttcgcgaaaatctatacgcgcgaatcaatctctaaccttcaccctaccgaatctacgccaacgccaaaaaaatattaaaccgacctaaattataaaataaaacgccacgcctcactcactaacgacaacgtcgttttaacaccgaaacgcgacgcgcctaattaacttttacgacctctcccaaacaacataacgcgataactttcgcgaactttctaccaacgtcacgaaataaccacctttaccactaacgaacgcatcactctaaacgtaattaaaataaaataaaccgtctacgctataactaacaaaaaaaccgcccctccgacttacgacgttactaaacgcaaaaaccgaaaacatcgatctcttcgaaatattcgactaaaacacgattttcgctatctaacgcgcaaaaaaatcgattcgcgaccgaaacaaattttaaaatttacgaccgaaaaaccgcgttataacgaaataat

SEQ ID NO: 9987 - DNA, 656 bp, Artificial Sequence
  chemically treated genomic DNA (Homo sapiens) CpG-island No: 9987
atgttgtttttgatgagattggcgaattgggcgtagacgaataggtaatgttgttgaagttattgaagagaaaattttttattcgtttggtagcgatcgttaggtggtagtgatttttagtttatcgtcggaacggtgcgcgatttgcgttagttgttgtcgaaggtaaatttcgcgaagatttgtacgcgcggattaatttttgatttttattttgtcgggtttacgttagcgttaggaagatattgaatcgatttggattatgaagtggagcgttacgttttatttattggcgatagcgtcgttttaatatcgaagcgcggcgcgtttggttggtttttgcgattttttttaggtaatatggcgcggtaattttcgcgaattttttgttagcgttacgggatggttatttttgttattagcggacgtattattttggacgtggttgagatgagataaatcgtttgcgttataattggtaggagagtcgttttttcggtttacggcgttgttgggcgtagaggtcgaaaatatcgattttttcgaggtgttcgattgggatacggttttcgttatttggcgcgtagggaaatcggttcgcggtcgaggtaggttttgaagtttgcggtcggggagtcgcgttataacggggtggt

SEQ ID NO: 9988 - DNA, 656 bp, Artificial Sequence
  chemically treated genomic DNA (Homo sapiens) CpG-island No: 9988
accaccccgttataacgcgactccccgaccgcaaacttcaaaacctacctcgaccgcgaaccgatttccctacgcgccaaataacgaaaaccgtatcccaatcgaacacctcgaaaaaatcgatattttcgacctctacgcccaacaacgccgtaaaccgaaaaaacgactctcctaccaattataacgcaaacgatttatctcatctcaaccacgtccaaaataatacgtccgctaataacaaaaataaccatcccgtaacgctaacaaaaaattcgcgaaaattaccgcgccatattacctaaaaaaaatcgcaaaaaccaaccaaacgcgccgcgcttcgatattaaaacgacgctatcgccaataaataaaacgtaacgctccacttcataatccaaatcgattcaatatcttcctaacgctaacgtaaacccgacaaaataaaaatcaaaaattaatccgcgcgtacaaatcttcgcgaaatttaccttcgacaacaactaacgcaaatcgcgcaccgttccgacgataaactaaaaatcactaccacctaacgatcgctaccaaacgaataaaaaattttctcttcaataacttcaacaacattacctattcgtctacgcccaattcgccaatctcatcaaaaacaacat

SEQ ID NO: 9989 - DNA, 502 bp, Artificial Sequence
  chemically treated genomic DNA (Homo sapiens) CpG-island No: 9989
ttacggttgatttgaatgtagtagtcgtgtatcgtattaaagttaattttagcgtgtttaggtcggtacgtttacgttcgcggatttttagacgtttagataatcggtcgcgtcgttagttagcgcgcgttatttatttagtttttgttatagttcgatgcgataatattatcgtcgcgtattagtatcggcggttgtcgatgattgttcgttttagtagatcgcgtagttcggtaaattcgttatttttttacgtagcgtttgtatcggtgtattatcgatagtttttaattcgtacgtagtttcggtagttgttggaaagcgtggcgtatacgggttagacgcgtgggcgagtagttcgtaaagttagacgtgttagaatacgttttagtcgtcgatttgacgtagtatcggttgtagttcggcggtgaaattttgtatgcgttaatagtttgttggcgtttaaggtaggtagttgttatttttaggtgattttagagga

SEQ ID NO: 9990 - DNA, 502 bp, Artificial Sequence
  chemically treated genomic DNA (Homo sapiens) CpG-island No: 9990
tcctctaaaatcacctaaaaataacaactacctaccttaaacgccaacaaactattaacgcatacaaaatttcaccgccgaactacaaccgatactacgtcaaatcgacgactaaaacgtattctaacacgtctaactttacgaactactcgcccacgcgtctaacccgtatacgccacgctttccaacaactaccgaaactacgtacgaattaaaaactatcgataatacaccgatacaaacgctacgtaaaaaaataacgaatttaccgaactacgcgatctactaaaacgaacaatcatcgacaaccgccgatactaatacgcgacgataatattatcgcatcgaactataacaaaaactaaataaataacgcgcgctaactaacgacgcgaccgattatctaaacgtctaaaaatccgcgaacgtaaacgtaccgacctaaacacgctaaaattaactttaatacgatacacgactactacattcaaatcaaccgtaa

SEQ ID NO: 9991 - DNA, 502 bp, Artificial Sequence
  chemically treated genomic DNA (Homo sapiens) CpG-island No: 9991
ttttttagagttatttgaggatgatagttgtttgttttgagcgttagtaaattattggcgtatgtaggattttatcgtcgggttatagtcggtattgcgttaggtcggcgattggaacgtattttggtacgtttggttttacgaattgttcgtttacgcgtttggttcgtatgcgttacgttttttagtaattgtcggagttgcgtgcgagttagaaattgtcgatagtgtatcggtataggcgttacgtgagaagatggcgagtttgtcgagttgcgcgatttgttggagcgagtaattatcgataatcgtcggtgttggtacgcgacggtggtgttatcgtatcgggttataataagagttggatgagtggcgcgcgttggttgacggcgcgatcgattatttgagcgtttggaagttcgcgagcgtgaacgtatcggtttggatacgttgaagttggttttaatgcggtgtacggttattatatttaaattagtcgtgg

SEQ ID NO: 9992 - DNA, 502 bp, Artificial Sequence
  chemically treated genomic DNA (Homo sapiens) CpG-island No: 9992
ccacgactaatttaaatataataaccgtacaccgcattaaaaccaacttcaacgtatccaaaccgatacgttcacgctcgcgaacttccaaacgctcaaataatcgatcgcgccgtcaaccaacgcgcgccactcatccaactcttattataacccgatacgataacaccaccgtcgcgtaccaacaccgacgattatcgataattactcgctccaacaaatcgcgcaactcgacaaactcgccatcttctcacgtaacgcctataccgatacactatcgacaatttctaactcgcacgcaactccgacaattactaaaaaacgtaacgcatacgaaccaaacgcgtaaacgaacaattcgtaaaaccaaacgtaccaaaatacgttccaatcgccgacctaacgcaataccgactataacccgacgataaaatcctacatacgccaataatttactaacgctcaaaacaaacaactatcatcctcaaataactctaaaaaa

SEQ ID NO: 9993 - DNA, 567 bp, Artificial Sequence
  chemically treated genomic DNA (Homo sapiens) CpG-island No: 9993
cgtgtatacgttatcgtaaatagtgcgttcggtcgggtaggtgtgtttaaagtatttagattttcgtgatattagcgtattagtatcgattgagcggtttttttagataaggtatatggatttgaatatcgtgcgtttggtcgatacgattagacgattaatacgttgttttagtagattcgggttgaatggtaggttaatattattatgtggttggcgaattggaagttacgttttttagaatcgattttgagtatagtagtatttgtgcgtcggtgtttttttcggtaaattagcggtagcgcggttacgttcgataatcgatatattttcgtggaatatcgcgcgcgaatatttttacgttcgcgtagtatttgttttagttgtagcgtagggtagttttggcgtagattattagtattttttgagagcgatggttggtcggtagtttattagttatttaacgcgcggatcgaagttttattaggtggtttattatttttaaatttttgataaatacgtttcgggtagagtatatcgtagtacgatttttcgtatttttacgtg

SEQ ID NO: 9994 - DNA, 567 bp, Artificial Sequence
  chemically treated genomic DNA (Homo sapiens) CpG-island No: 9994
cacgtaaaaatacgaaaaatcgtactacgatatactctacccgaaacgtatttatcaaaaatttaaaaataataaaccacctaataaaacttcgatccgcgcgttaaataactaataaactaccgaccaaccatcgctctcaaaaaatactaataatctacgccaaaactaccctacgctacaactaaaacaaatactacgcgaacgtaaaaatattcgcgcgcgatattccacgaaaatatatcgattatcgaacgtaaccgcgctaccgctaatttaccgaaaaaaacaccgacgcacaaatactactatactcaaaatcgattctaaaaaacgtaacttccaattcgccaaccacataataatattaacctaccattcaacccgaatctactaaaacaacgtattaatcgtctaatcgtatcgaccaaacgcacgatattcaaatccatataccttatctaaaaaaaccgctcaatcgatactaatacgctaatatcacgaaaatctaaatactttaaacacacctacccgaccgaacgcactatttacgataacgtatacacg

SEQ ID NO: 9995 - DNA, 567 bp, Artificial Sequence
  chemically treated genomic DNA (Homo sapiens) CpG-island No: 9995
tacgtaaaagtgcggaagatcgtgttgcgatatgttttattcggagcgtatttattaggaatttgaaggtgataagttatttggtggaatttcgattcgcgcgttgagtggttgatgggttatcgattagttatcgtttttagaaagtgttggtgatttgcgttaaagttgttttgcgttgtaattggagtaggtattgcgcgaacgtgaaggtattcgcgcgcggtgttttacgaaggtatgtcgattatcgaacgtgatcgcgttgtcgttggtttgtcgaagaagatatcggcgtataggtattgttgtgtttagaatcggttttgaaggacgtaatttttagttcgttagttatatggtgatgttgatttgttatttaattcggatttattggagtagcgtattggtcgtttggtcgtatcggttaggcgtacgatatttagatttatgtgttttatttggagaaatcgtttagtcggtgttggtgcgttggtattacgaaggtttggatgttttgagtatatttgttcgatcggacgtattatttacgatagcgtatatacg

SEQ ID NO: 9996 - DNA, 567 bp, Artificial Sequence
  chemically treated genomic DNA (Homo sapiens) CpG-island No: 9996
cgtatatacgctatcgtaaataatacgtccgatcgaacaaatatactcaaaacatccaaaccttcgtaataccaacgcaccaacaccgactaaacgatttctccaaataaaacacataaatctaaatatcgtacgcctaaccgatacgaccaaacgaccaatacgctactccaataaatccgaattaaataacaaatcaacatcaccatataactaacgaactaaaaattacgtccttcaaaaccgattctaaacacaacaatacctatacgccgatatcttcttcgacaaaccaacgacaacgcgatcacgttcgataatcgacataccttcgtaaaacaccgcgcgcgaataccttcacgttcgcgcaatacctactccaattacaacgcaaaacaactttaacgcaaatcaccaacactttctaaaaacgataactaatcgataacccatcaaccactcaacgcgcgaatcgaaattccaccaaataacttatcaccttcaaattcctaataaatacgctccgaataaaacatatcgcaacacgatcttccgcacttttacgta

SEQ ID NO: 9997 - DNA, 515 bp, Artificial Sequence
  chemically treated genomic DNA (Homo sapiens) CpG-island No: 9997
attgcgtcggtagcggtagtttaatggtgtgtagtttcgtttcgggaatttttttatatcgttacgcgtgttacggaatagtacgcgttggtgtcgtggcgatttattagtatcgaaattagtttttgacgggcgtttgggtattttcgttgtcgttgtttgttgtttgtaatagcggttcgatttttgttcgtcgattatttcgtcgagtatgtttagttcgttattgtttatttgttatttgttagtagtatggtaacggcgttcgtaatcggacgataattttttgttttttaacgaattgcgtaaaatcgtggaaacggttcgggttagtagacgtagacgggcgaagtggttttttatttttagttgtttcggggcgcggttagtagtagaacgttcggtacgtgttttgttagttgtttaatgtttgatttgaacgttaggcgcggtaacggggttattaattgttgattgttgtttagaagattagtaagataagcggtattattgat

SEQ ID NO: 9998 - DNA, 515 bp, Artificial Sequence
  chemically treated genomic DNA (Homo sapiens) CpG-island No: 9998
atcaataataccgcttatcttactaatcttctaaacaacaatcaacaattaataaccccgttaccgcgcctaacgttcaaatcaaacattaaacaactaacaaaacacgtaccgaacgttctactactaaccgcgccccgaaacaactaaaaataaaaaaccacttcgcccgtctacgtctactaacccgaaccgtttccacgattttacgcaattcgttaaaaaacaaaaaattatcgtccgattacgaacgccgttaccatactactaacaaataacaaataaacaataacgaactaaacatactcgacgaaataatcgacgaacaaaaatcgaaccgctattacaaacaacaaacaacgacaacgaaaatacccaaacgcccgtcaaaaactaatttcgatactaataaatcgccacgacaccaacgcgtactattccgtaacacgcgtaacgatataaaaaaattcccgaaacgaaactacacaccattaaactaccgctaccgacgcaat

SEQ ID NO: 9999 - DNA, 515 bp, Artificial Sequence
  chemically treated genomic DNA (Homo sapiens) CpG-island No: 9999
attagtggtatcgtttgttttgttgattttttgagtagtaattagtagttgataatttcgttgtcgcgtttggcgtttaaattaggtattgaataattggtagagtacgtgtcgggcgttttgttgttgatcgcgtttcggaatagttggggatggaaagttatttcgttcgtttgcgtttgttgattcgaatcgtttttacgattttgcgtagttcgttgaagagtagaaaattatcgttcggttgcggacgtcgttgttatgttgttggtaggtaataaatgagtaatgacgaattgaatatgttcggcgagatgatcggcgagtaggaatcgagtcgttgttgtaggtagtaaatagcgatagcgaagatgtttagacgttcgttaggagttggtttcgatgttgatggatcgttacggtattagcgcgtgttgtttcgtaatacgcgtaacggtgtgaaaggattttcgaaacggagttgtatattattaagttgtcgttatcgacgtagt

SEQ ID NO: 10000 - DNA, 515 bp, Artificial Sequence
  chemically treated genomic DNA (Homo sapiens) CpG-island No: 10000
actacgtcgataacgacaacttaataatatacaactccgtttcgaaaatcctttcacaccgttacgcgtattacgaaacaacacgcgctaataccgtaacgatccatcaacatcgaaaccaactcctaacgaacgtctaaacatcttcgctatcgctatttactacctacaacaacgactcgattcctactcgccgatcatctcgccgaacatattcaattcgtcattactcatttattacctaccaacaacataacaacgacgtccgcaaccgaacgataattttctactcttcaacgaactacgcaaaatcgtaaaaacgattcgaatcaacaaacgcaaacgaacgaaataactttccatccccaactattccgaaacgcgatcaacaacaaaacgcccgacacgtactctaccaattattcaatacctaatttaaacgccaaacgcgacaacgaaattatcaactactaattactactcaaaaaatcaacaaaacaaacgataccactaat

SEQ ID NO: 10001 - DNA, 731 bp, Artificial Sequence
  chemically treated genomic DNA (Homo sapiens) CpG-island No: 10001
tcgtatcgtcggtttttcggtttaagttttaatattcgggcgaattggcgtgttttattattcggtagtatgaattattattcgttagttattttattggagacgacggagatcgttgtcgaagcggcgttttatcgtttttagtatgacgttttgtatgttttattgttgaagtcgtcggtagtgatcgtttagtgtagtgttttagattatagtagtttagcgcgaacgtgatacgtagttttttttcgttatttagtagaattcgaattcgttagagtattatcgttgattgtttttttttaggttattttgtttgtatgtgttcgtttcgatggcggtatagtaggttttgtttaagtaatagcgtattttggcgtatgattcggtaaatacgtttggtttgatcgtaggtatattattaagttttgtttgtttgcgaagtagcgttttattcgacgataattatacgttggtagtttttcgataatatggtgtataggagaagtatattcgtattattagtgtgacgattgcggcggttatttattagttatcggttcgtttgagaatgacgtgtaattgcgtacgcgatattcgagataacggttgattaagtttattttttattttcgggtaataagggcggtgcgttatttatttttttgttcgtttatatttaacggtttttttgagggtttatttgggtagtgtatgttagaatattcgtt

SEQ ID NO: 10002 - DNA, 731 bp, Artificial Sequence
  chemically treated genomic DNA (Homo sapiens) CpG-island No: 10002
aacgaatattctaacatacactacccaaataaaccctcaaaaaaaccgttaaatataaacgaacaaaaaaataaataacgcaccgcccttattacccgaaaataaaaaataaacttaatcaaccgttatctcgaatatcgcgtacgcaattacacgtcattctcaaacgaaccgataactaataaataaccgccgcaatcgtcacactaataatacgaatatacttctcctatacaccatattatcgaaaaactaccaacgtataattatcgtcgaataaaacgctacttcgcaaacaaacaaaacttaataatatacctacgatcaaaccaaacgtatttaccgaatcatacgccaaaatacgctattacttaaacaaaacctactataccgccatcgaaacgaacacatacaaacaaaataacctaaaaaaaaacaatcaacgataatactctaacgaattcgaattctactaaataacgaaaaaaaactacgtatcacgttcgcgctaaactactataatctaaaacactacactaaacgatcactaccgacgacttcaacaataaaacatacaaaacgtcatactaaaaacgataaaacgccgcttcgacaacgatctccgtcgtctccaataaaataactaacgaataataattcatactaccgaataataaaacacgccaattcgcccgaatattaaaacttaaaccgaaaaaccgacgatacga

SEQ ID NO: 10003 - DNA, 731 bp, Artificial Sequence
  chemically treated genomic DNA (Homo sapiens) CpG-island No: 10003
agcgagtattttagtatgtattgtttaaatgaatttttaaagaagtcgttgaatatggacgggtaaaaaagtggatagcgtatcgtttttattgttcggggatggggagtaagtttagttagtcgttgtttcgggtgtcgcgtgcgtagttgtacgttatttttagacgaatcgatgattgatggatggtcgtcgtagtcgttatattgatgatacggatgtgttttttttatatattatgttatcggagagttgttaacgtatggttatcgtcgggtagggcgttgtttcgtagataggtagaatttgatggtatgtttgcgattaagttaaacgtgtttatcggattatgcgttagaatgcgttgttgtttgagtaaaatttgttgtatcgttatcgaaacgggtatatataggtagagtggtttgaaagaaagtaattagcgatggtgttttgacgggttcgagttttgttggataacggagagagattgcgtgttacgttcgcgttggattgttgtgatttgaggtattgtattgggcggttattatcggcggttttaatagtgaaatatataggacgttatgttgggagcggtggaacgtcgtttcggtaacgattttcgtcgtttttagtggagtggttgacggataatggtttatgttatcgggtaatgaaatacgttagttcgttcggatgttgggatttgaatcgaagaatcggcggtgcgg

SEQ ID NO: 10004 - DNA, 731 bp, Artificial Sequence
  chemically treated genomic DNA (Homo sapiens) CpG-island No: 10004
ccgcaccgccgattcttcgattcaaatcccaacatccgaacgaactaacgtatttcattacccgataacataaaccattatccgtcaaccactccactaaaaacgacgaaaatcgttaccgaaacgacgttccaccgctcccaacataacgtcctatatatttcactattaaaaccgccgataataaccgcccaatacaatacctcaaatcacaacaatccaacgcgaacgtaacacgcaatctctctccgttatccaacaaaactcgaacccgtcaaaacaccatcgctaattactttctttcaaaccactctacctatatatacccgtttcgataacgatacaacaaattttactcaaacaacaacgcattctaacgcataatccgataaacacgtttaacttaatcgcaaacataccatcaaattctacctatctacgaaacaacgccctacccgacgataaccatacgttaacaactctccgataacataatatataaaaaaaacacatccgtatcatcaatataacgactacgacgaccatccatcaatcatcgattcgtctaaaaataacgtacaactacgcacgcgacacccgaaacaacgactaactaaacttactccccatccccgaacaataaaaacgatacgctatccacttttttacccgtccatattcaacgacttctttaaaaattcatttaaacaatacatactaaaatactcgct

SEQ ID NO: 10005 - DNA, 749 bp, Artificial Sequence
  chemically treated genomic DNA (Homo sapiens) CpG-island No: 10005
gagggagcgtttcggcggaggagttaaggaagagggggaggagaaacgcgttagaatttcggttcgggcgttttcgtcggtcgcggaggattgtagtttttaataggttcgtagaacgcgcgttcgttttttgtggttggtcgttttttttcgcgggagcggttggcggagagatttcggttataggttcgcgttcgagagttttttagaggcggtttttttcggttttttttttttttggagtttttagtcgtcggcggttttttcggggcgaggtagagggcgttcgggtttttcgttttagtattatttcggggatagttttcgcgtcgtacgggtttttatcgggttagtattgtagcggcggatagcggcggtcgggcggttttttcgtatttttcgttttggtttcgcgcggttgttaaggatcgttttcgttttcgcgggtcgtttttaacgttagtatcgcggcggcggatagttttttcggcggtatcgcgaatcgcgaataaagtcgcgggtttggggttttagcgcgtttaggggtggcgtgaggtcgtatcgatcgggggattttagtttttttagaaaggtgttatcggcgagttaggcgggggtttagtatagttcgcgttttcggtttgggttcgtcgttcgtcgaggtttggtcgtgtaatgcggggtttagttaagagtgggtaagagggtagaggggaaataggtatagagggtttcggtttcgttaggcg

SEQ ID NO: 10006 - DNA, 749 bp, Artificial Sequence
  chemically treated genomic DNA (Homo sapiens) CpG-island No: 10006
cgcctaacgaaaccgaaaccctctatacctatttcccctctaccctcttacccactcttaactaaaccccgcattacacgaccaaacctcgacgaacgacgaacccaaaccgaaaacgcgaactatactaaacccccgcctaactcgccgataacacctttctaaaaaaactaaaatcccccgatcgatacgacctcacgccacccctaaacgcgctaaaaccccaaacccgcgactttattcgcgattcgcgataccgccgaaaaaactatccgccgccgcgatactaacgttaaaaacgacccgcgaaaacgaaaacgatccttaacaaccgcgcgaaaccaaaacgaaaaatacgaaaaaaccgcccgaccgccgctatccgccgctacaatactaacccgataaaaacccgtacgacgcgaaaactatccccgaaataatactaaaacgaaaaacccgaacgccctctacctcgccccgaaaaaaccgccgacgactaaaaactccaaaaaaaaaaaaaaccgaaaaaaaccgcctctaaaaaactctcgaacgcgaacctataaccgaaatctctccgccaaccgctcccgcgaaaaaaaacgaccaaccacaaaaaacgaacgcgcgttctacgaacctattaaaaactacaatcctccgcgaccgacgaaaacgcccgaaccgaaattctaacgcgtttctcctccccctcttccttaactcctccgccgaaacgctccctc

SEQ ID NO: 10007 - DNA, 749 bp, Artificial Sequence
  chemically treated genomic DNA (Homo sapiens) CpG-island No: 10007
cgtttagcggagtcgggattttttgtgtttgttttttttttatttttttgtttatttttagttgggtttcgtattgtacggttaggtttcggcgggcggcggatttaagtcggagacgcgggttgtgttaggttttcgtttagttcgtcggtgatatttttttgggagagttgaaatttttcgatcgatgcggttttacgttatttttaggcgcgttggggttttagattcgcggttttgttcgcggttcgcggtgtcgtcggagaggttgttcgtcgtcgcggtgttagcgttgggagcggttcgcgggggcgaggacggtttttagtagtcgcgcggaattagggcggagggtgcggaggagtcgttcggtcgtcgttgttcgtcgttgtagtgttgattcgatagggattcgtgcggcgcgggagttgttttcgagatggtgttggagcgagaagttcgagcgttttttgtttcgtttcggaagagtcgtcggcggttgagagttttaggagggggagaggtcggaggaagtcgtttttaggaagttttcgagcgcgggtttgtggtcggggttttttcgttaatcgttttcgcggaggagggcggttagttatagggagcgagcgcgcgttttacgaatttgttggaggttgtagtttttcgcggtcgacgagggcgttcgggtcgaggttttggcgcgtttttttttttttttttttttgattttttcgtcgaggcgttttttt

SEQ ID NO: 10008 - DNA, 749 bp, Artificial Sequence
  chemically treated genomic DNA (Homo sapiens) CpG-island No: 10008
aaaaaaacgcctcgacgaaaaaatcaaaaaaaaaaaaaaaaaaaaacgcgccaaaacctcgacccgaacgccctcgtcgaccgcgaaaaactacaacctccaacaaattcgtaaaacgcgcgctcgctccctataactaaccgccctcctccgcgaaaacgattaacgaaaaaaccccgaccacaaacccgcgctcgaaaacttcctaaaaacgacttcctccgacctctccccctcctaaaactctcaaccgccgacgactcttccgaaacgaaacaaaaaacgctcgaacttctcgctccaacaccatctcgaaaacaactcccgcgccgcacgaatccctatcgaatcaacactacaacgacgaacaacgacgaccgaacgactcctccgcaccctccgccctaattccgcgcgactactaaaaaccgtcctcgcccccgcgaaccgctcccaacgctaacaccgcgacgacgaacaacctctccgacgacaccgcgaaccgcgaacaaaaccgcgaatctaaaaccccaacgcgcctaaaaataacgtaaaaccgcatcgatcgaaaaatttcaactctcccaaaaaaatatcaccgacgaactaaacgaaaacctaacacaacccgcgtctccgacttaaatccgccgcccgccgaaacctaaccgtacaatacgaaacccaactaaaaataaacaaaaaaataaaaaaaaaacaaacacaaaaaatcccgactccgctaaacg

SEQ ID NO: 10009 - DNA, 692 bp, Artificial Sequence
  chemically treated genomic DNA (Homo sapiens) CpG-island No: 10009
cgcgttatattagagtagtagttttgatatagcgtatcgaaatcggagtgataaattcgttcgttgtaataattttgtcgttggttttgtcgtgggtagcgttttacgttagttattggcgataatggtgttaaaagaggtttttttgcgttttgttggcgtataaattattttagtttagcggttatttcggttcgtttattttcgtttgaataaagcggcgaatatgttttgtatcgcgttagtaattttataggcgaggcggattttttttattttttttggcgtttgatttgtcgtagtatattcggcgtggcgttaattagtttcgtattgagttagattgttagcggtgcgcggttttttaatttatttgttggtttttaaatcgagcgtttgtaattgtttatcggtaatgatttgattgacgatagtggaagcgtgttcgtcgcgttaagtaaatgtagttggtagttttgcgtacggtttttattttaacgtaatagcgcgaatttattagaatgtgcgtatttttcggttaattattatataatttgattcggtggagatttttagatgcggtttttgttttgtcgtgaggagagaagtattgtatttagttgttgcgttttagttagtcgcgtagcgaagcgagtaatgttatttggatttttttttttacggttatcgat

SEQ ID NO: 10010 - DNA, 692 bp, Artificial Sequence
  chemically treated genomic DNA (Homo sapiens) CpG-island No: 10010
atcgataaccgtaaaaaaaaaaatccaaataacattactcgcttcgctacgcgactaactaaaacgcaacaactaaatacaatacttctctcctcacgacaaaacaaaaaccgcatctaaaaatctccaccgaatcaaattatataataattaaccgaaaaatacgcacattctaataaattcgcgctattacgttaaaataaaaaccgtacgcaaaactaccaactacatttacttaacgcgacgaacacgcttccactatcgtcaatcaaatcattaccgataaacaattacaaacgctcgatttaaaaaccaacaaataaattaaaaaaccgcgcaccgctaacaatctaactcaatacgaaactaattaacgccacgccgaatatactacgacaaatcaaacgccaaaaaaaataaaaaaaatccgcctcgcctataaaattactaacgcgatacaaaacatattcgccgctttattcaaacgaaaataaacgaaccgaaataaccgctaaactaaaataatttatacgccaacaaaacgcaaaaaaacctcttttaacaccattatcgccaataactaacgtaaaacgctacccacgacaaaaccaacgacaaaattattacaacgaacgaatttatcactccgatttcgatacgctatatcaaaactactactctaatataacgcg

SEQ ID NO: 10011 - DNA, 692 bp, Artificial Sequence
  chemically treated genomic DNA (Homo sapiens) CpG-island No: 10011
atcgatagtcgtaagaaggaaaatttagatgatattattcgtttcgttgcgcgattggttaaggcgtaataattggatgtagtgtttttttttttacggtagaataaaagtcgtatttggggatttttatcggattaggttatgtggtgattagtcggaaagtgcgtatattttggtggattcgcgttattacgttgaggtggaagtcgtgcgtaaggttattagttgtatttgtttgacgcgacgaatacgtttttattatcgttaattaaattattgtcgatgaatagttgtaaacgttcggtttgagggttagtaggtgagttgggaaatcgcgtatcgttggtagtttgatttaatgcgaaattggttagcgttacgtcggatgtgttgcggtaaattaaacgttagaggaggtggagaaaattcgtttcgtttgtgggattgttgacgcggtgtagagtatattcgtcgttttatttaggcggggatgagcgagtcgagatagtcgttgaattggagtggtttatgcgttagtagggcgtagaaaagttttttttgatattattgtcgttagtggttggcgtggggcgttgtttacggtaaagttagcgataagattgttgtagcgggcgagtttgttatttcgatttcggtgcgttgtattagggttattgttttgatatgacgcg

SEQ ID NO: 10012 - DNA, 692 bp, Artificial Sequence
  chemically treated genomic DNA (Homo sapiens) CpG-island No: 10012
cgcgtcatatcaaaacaataaccctaatacaacgcaccgaaatcgaaataacaaactcgcccgctacaacaatcttatcgctaactttaccgtaaacaacgccccacgccaaccactaacgacaataatatcaaaaaaaacttttctacgccctactaacgcataaaccactccaattcaacgactatctcgactcgctcatccccgcctaaataaaacgacgaatatactctacaccgcgtcaacaatcccacaaacgaaacgaattttctccacctcctctaacgtttaatttaccgcaacacatccgacgtaacgctaaccaatttcgcattaaatcaaactaccaacgatacgcgatttcccaactcacctactaaccctcaaaccgaacgtttacaactattcatcgacaataatttaattaacgataataaaaacgtattcgtcgcgtcaaacaaatacaactaataaccttacgcacgacttccacctcaacgtaataacgcgaatccaccaaaatatacgcactttccgactaatcaccacataacctaatccgataaaaatccccaaatacgacttttattctaccgtaaaaaaaaaaacactacatccaattattacgccttaaccaatcgcgcaacgaaacgaataatatcatctaaattttccttcttacgactatcgat

SEQ ID NO: 10013 - DNA, 634 bp, Artificial Sequence
  chemically treated genomic DNA (Homo sapiens) CpG-island No: 10013
attttttttcggttggtgcgtgcgtggttatggcgcgttataagtcgtatttgtcgttgagtttatgttgatgacgtcgcgatagcgttaggtattgattttgttgaaattcgtttattaacgtcgttcgcgaaggagatgttaattcgtttacgggtaaacgtattatagcgtagggttgtcggagtgttttgaaaaaggtcggaaaatttttgatgggaaaaacgtcgtgtagaatgttagaattagtaaggtaatttgcgttcggcgttggcgtcgtttgttttagttatatttttaatatttggtttgtcgcgtagaaatagtaggcgcgcgttttttgatgaattaggatggaattataacgtgtaaagcggcgcgacggaaatcggttagggtgtcgatatcgtttttcgtaaatggtggtagaaatcgtgggggtttcggttagcgacgttcgtttattttaatttaagatatcgacgttacgtcgttcgatttcggcgtattgttttacgttagagttatgttgtcgcgtttgcgttgcgtagtgcggtatattattaaaagagaaaattatcgtttacgtcgtagttatgttatattagtagcgatgaatttgattttgataaaa

SEQ ID NO: 10014 - DNA, 634 bp, Artificial Sequence
  chemically treated genomic DNA (Homo sapiens) CpG-island No: 10014
ttttatcaaaatcaaattcatcgctactaatataacataactacgacgtaaacgataattttctcttttaataatataccgcactacgcaacgcaaacgcgacaacataactctaacgtaaaacaatacgccgaaatcgaacgacgtaacgtcgatatcttaaattaaaataaacgaacgtcgctaaccgaaacccccacgatttctaccaccatttacgaaaaacgatatcgacaccctaaccgatttccgtcgcgccgctttacacgttataattccatcctaattcatcaaaaaacgcgcgcctactatttctacgcgacaaaccaaatattaaaaatataactaaaacaaacgacgccaacgccgaacgcaaattaccttactaattctaacattctacacgacgtttttcccatcaaaaattttccgacctttttcaaaacactccgacaaccctacgctataatacgtttacccgtaaacgaattaacatctccttcgcgaacgacgttaataaacgaatttcaacaaaatcaatacctaacgctatcgcgacgtcatcaacataaactcaacgacaaatacgacttataacgcgccataaccacgcacgcaccaaccgaaaaaaaat

SEQ ID NO: 10015 - DNA, 634 bp, Artificial Sequence
  chemically treated genomic DNA (Homo sapiens) CpG-island No: 10015
ttttattagggttagatttatcgttgttgatgtagtatgattgcggcgtgagcgatgatttttttttttaataatgtgtcgtattgcgtagcgtaggcgcggtaatatagttttggcgtgaggtaatgcgtcgggatcgaacggcgtaacgtcggtattttgagttgaaataagcgaacgtcgttgatcggaatttttacggtttttgttattatttgcgagagacggtgtcggtattttgatcgattttcgtcgcgtcgttttgtacgttatggttttattttgatttattagaaggcgcgcgtttgttatttttacgcgataggttaggtgttagaggtgtagttaaaataggcgacgttaacgtcgggcgtaaattgttttgttggttttggtattttgtacggcgttttttttattaaagatttttcggttttttttaagatatttcggtaattttgcgttgtaatacgtttgttcgtgagcggattagtatttttttcgcgggcggcgttggtaaacgaattttaataggattaatatttaacgttgtcgcggcgttattagtatagatttaacggtaaatacgatttgtggcgcgttataattacgtacgtattagtcgaggggaggt

SEQ ID NO: 10016 - DNA, 634 bp, Artificial Sequence
  chemically treated genomic DNA (Homo sapiens) CpG-island No: 10016
acctcccctcgactaatacgtacgtaattataacgcgccacaaatcgtatttaccgttaaatctatactaataacgccgcgacaacgttaaatattaatcctattaaaattcgtttaccaacgccgcccgcgaaaaaaatactaatccgctcacgaacaaacgtattacaacgcaaaattaccgaaatatcttaaaaaaaaccgaaaaatctttaataaaaaaaacgccgtacaaaataccaaaaccaacaaaacaatttacgcccgacgttaacgtcgcctattttaactacacctctaacacctaacctatcgcgtaaaaataacaaacgcgcgccttctaataaatcaaaataaaaccataacgtacaaaacgacgcgacgaaaatcgatcaaaataccgacaccgtctctcgcaaataataacaaaaaccgtaaaaattccgatcaacgacgttcgcttatttcaactcaaaataccgacgttacgccgttcgatcccgacgcattacctcacgccaaaactatattaccgcgcctacgctacgcaatacgacacattattaaaaaaaaaaatcatcgctcacgccgcaatcatactacatcaacaacgataaatctaaccctaataaaa

SEQ ID NO: 10017 - DNA, 518 bp, Artificial Sequence
  chemically treated genomic DNA (Homo sapiens) CpG-island No: 10017
  unsure (203)
atacgtttgtaattatataattttgtcgattataattaaattcgtcggatggtcggtttgttatttatattatcggtcgttattatgatcgttttattgcgattttcgatttcgtattcgggaattgagggcgatttggcgttgaggcgttatcggtcgcgtcgcgacgttttattgtgttcgacgaaacggtgaatttgttngttaaatataggttgtacgtacgaggttcggcgagttttgaatagagggtgcggttgtagtattaatgaagggttataatcgcgtggcgtaattgattttataaggcgaggtaagaaacggcgggatcgtacgggatagttaaaagaaaagaatattgatatatggcgttgcgagacgttattgtagatcgttaagtgggtagaattttggcgacgattgtcgtaagttaataattatacgtagtgttattgggtataaattatagtttttgcgttacgcgcgaatatttttataacgggcgtcgtttatatata

SEQ ID NO: 10018 - DNA, 518 bp, Artificial Sequence
  chemically treated genomic DNA (Homo sapiens) CpG-island No: 10018
  unsure (316)
tatatataaacgacgcccgttataaaaatattcgcgcgtaacgcaaaaactataatttatacccaataacactacgtataattattaacttacgacaatcgtcgccaaaattctacccacttaacgatctacaataacgtctcgcaacgccatatatcaatattcttttcttttaactatcccgtacgatcccgccgtttcttacctcgccttataaaatcaattacgccacgcgattataacccttcattaatactacaaccgcaccctctattcaaaactcgccgaacctcgtacgtacaacctatatttaacnaacaaattcaccgtttcgtcgaacacaataaaacgtcgcgacgcgaccgataacgcctcaacgccaaatcgccctcaattcccgaatacgaaatcgaaaatcgcaataaaacgatcataataacgaccgataatataaataacaaaccgaccatccgacgaatttaattataatcgacaaaattatataattacaaacgtat

SEQ ID NO: 10019 - DNA, 518 bp, Artificial Sequence
  chemically treated genomic DNA (Homo sapiens) CpG-island No: 10019
  unsure (316)
tatatataagcggcgttcgttgtaggaatgttcgcgcgtagcgtaggggttataatttatatttagtggtattacgtgtagttattggtttgcggtaatcgtcgttagggttttgtttatttagcggtttgtagtggcgtttcgtagcgttatgtattaatattttttttttttggttgtttcgtgcggtttcgtcgttttttatttcgttttataggattagttgcgttacgcggttatggttttttattagtgttatagtcgtattttttgtttagggttcgtcgggtttcgtgcgtgtagtttgtgtttggtnggtaaatttatcgtttcgtcgggtataataaggcgtcgcggcgcggtcggtaacgttttagcgttaggtcgtttttaattttcgggtgcggagtcgggggtcgtaataaagcggttatggtagcggtcggtaatgtaaataataggtcggttattcggcgggtttggttgtggtcggtaaagttgtgtagttatagacgtgt

SEQ ID NO: 10020 - DNA, 518 bp, Artificial Sequence
  chemically treated genomic DNA (Homo sapiens) CpG-island No: 10020
  unsure (203)
acacgtctataactacacaactttaccgaccacaaccaaacccgccgaataaccgacctattatttacattaccgaccgctaccataaccgctttattacgacccccgactccgcacccgaaaattaaaaacgacctaacgctaaaacgttaccgaccgcgccgcgacgccttattatacccgacgaaacgataaatttaccnaccaaacacaaactacacgcacgaaacccgacgaaccctaaacaaaaaatacgactataacactaataaaaaaccataaccgcgtaacgcaactaatcctataaaacgaaataaaaaacgacgaaaccgcacgaaacaaccaaaaaaaaaaaatattaatacataacgctacgaaacgccactacaaaccgctaaataaacaaaaccctaacgacgattaccgcaaaccaataactacacgtaataccactaaatataaattataacccctacgctacgcgcgaacattcctacaacgaacgccgcttatatata

SEQ ID NO: 10021 - DNA, 529 bp, Artificial Sequence
  chemically treated genomic DNA (Homo sapiens) CpG-island No: 10021
  unsure (406..407, 474..475, 487, 491)
cgaagtttatgcgcgtttttatattgttattttgatggtcgcggtataatgtggggggtacggttagtttgcggtatattaatgacgcgttacgagtgatgtatgggtgggtcgttatttatttttaaatagtgtgtgcgggggttacgcgttcggatacggggaatgcgcgtagtcggttgttattgatatttagcgtagatgcgtggagacgtcgcgattattcgcgggcggagcgggtcgttaattcgtaacgggacgtatttgtatttgttagtcggaaaggtttggttgtgcgtttacgtaggtgaagggtagaatagtttgtcgtttggcgggcgttgtatagcgattgtattaaggattatcggttgttttttaattgttttgaagttcgtttttttanntgggaattattttgttagcggcggtaatcgcggtattttaattggtatttgttcgttggtattgggnngtgtttattggngtgncgggcgtttggtataatattttgtgtttggaaataaat

SEQ ID NO: 10022 - DNA, 529 bp, Artificial Sequence
  chemically treated genomic DNA (Homo sapiens) CpG-island No: 10022
  unsure (39, 43, 55..56, 123..)
atttatttccaaacacaaaatattataccaaacgcccgncacnccaataaacacnncccaataccaacgaacaaataccaattaaaataccgcgattaccgccgctaacaaaataattcccanntaaaaaaacgaacttcaaaacaattaaaaaacaaccgataatccttaatacaatcgctatacaacgcccgccaaacgacaaactattctacccttcacctacgtaaacgcacaaccaaacctttccgactaacaaatacaaatacgtcccgttacgaattaacgacccgctccgcccgcgaataatcgcgacgtctccacgcatctacgctaaatatcaataacaaccgactacgcgcattccccgtatccgaacgcgtaacccccgcacacactatttaaaaataaataacgacccacccatacatcactcgtaacgcgtcattaatataccgcaaactaaccgtaccccccacattataccgcgaccatcaaaataacaatataaaaacgcgcataaacttcg

SEQ ID NO: 10023 - DNA, 529 bp, Artificial Sequence
  chemically treated genomic DNA (Homo sapiens) CpG-island No: 10023
  unsure (39, 43, 55..56, 123..)
atttgtttttagatatagagtattatattaggcgttcgntatnttagtgggtatnntttagtgttagcgagtaggtgttagttaaggtgtcgcggttatcgtcgttagtaaaatggtttttanntaaagggacggattttagggtagttaaggggtagtcggtagtttttggtgtagtcgttatatagcgttcgttaggcggtaggttattttgttttttatttacgtaggcgtatagttaaattttttcggttagtagatataagtacgtttcgttacgggttggcggttcgtttcgttcgcgggtggtcgcggcgtttttacgtatttgcgttaggtattaatagtagtcggttacgcgtatttttcgtgttcgggcgcgtggttttcgtatatattatttaggggtgggtggcggtttatttatatattattcgtagcgcgttattaatatatcgtaggttaatcgtgttttttatattatgtcgcggttattagaatagtaatataagggcgcgtatgggtttcg

SEQ ID NO: 10024 - DNA, 529 bp, Artificial Sequence
  chemically treated genomic DNA (Homo sapiens) CpG-island No: 10024
  unsure (406..407, 474..475, 487, 491)
cgaaacccatacgcgcccttatattactattctaataaccgcgacataatataaaaaacacgattaacctacgatatattaataacgcgctacgaataatatataaataaaccgccacccacccctaaataatatatacgaaaaccacgcgcccgaacacgaaaaatacgcgtaaccgactactattaatacctaacgcaaatacgtaaaaacgccgcgaccacccgcgaacgaaacgaaccgccaacccgtaacgaaacgtacttatatctactaaccgaaaaaatttaactatacgcctacgtaaataaaaaacaaaataacctaccgcctaacgaacgctatataacgactacaccaaaaactaccgactaccccttaactaccctaaaatccgtccctttanntaaaaaccattttactaacgacgataaccgcgacaccttaactaacacctactcgctaacactaaannatacccactaanatancgaacgcctaatataatactctatatctaaaaacaaat

SEQ ID NO: 10025 - DNA, 887 bp, Artificial Sequence
  chemically treated genomic DNA (Homo sapiens) CpG-island No: 10025
acgtatttttttcgtattgttagttcggtattagagatatcggatttagttatttgcgtagttttagtatcggcgtaaacgtttgttttatcggtatggtaaaatcgtgagcggtaattattattgatttttcgtggtcgtaatcgtatatttaggtcgtatcgcgggaacgcgatggtaaacgatcgtttttgtaaatcgttataatgatgaatggtagtagcgggtaggtaattagtagtaacgtgattatcggttgagaaacggtggtgttagtaggttttagcggtagaggtatagtagtagagagtatcggtagtagttacggcgtagtaatatcgttaattacgtagtaaatcgttagtgttattacgtttacgtttattaggagcggcgtataggtggcgttttcggtttttttggtgcgcggcgcgtcgaggaacgtgacgttatagattttcgttatatatattatcgttagcgtatcggtaattgttagttttatagcgagtagcggttttagtagacgggtaataaacgcgttattattgtttagtttgaaaaatgattgatagataatttatttttcggtaaaattatttagcggcggtagcgtagttattgttattagttcgattaatatggcgatggagataatcggtatttttttgttaatattatcgagtttttcgatatcgcgatgatcggtacggaattagacgtttttcgtttcgaggaatagtacgtttttgaataggttatggttaagtagatggtatagattatcgaattaggttaagagtaattagcgtcggttgttttcgagcgcgatattcgttacgttagcgtttagttttagtaggatgatgtcgatattttttaggtgt

SEQ ID NO: 10026 - DNA, 887 bp, Artificial Sequence
  chemically treated genomic DNA (Homo sapiens) CpG-island No: 10026
acacctaaaaaatatcgacatcatcctactaaaactaaacgctaacgtaacgaatatcgcgctcgaaaacaaccgacgctaattactcttaacctaattcgataatctataccatctacttaaccataacctattcaaaaacgtactattcctcgaaacgaaaaacgtctaattccgtaccgatcatcgcgatatcgaaaaactcgataatattaacaaaaaaataccgattatctccatcgccatattaatcgaactaataacaataactacgctaccgccgctaaataattttaccgaaaaataaattatctatcaatcatttttcaaactaaacaataataacgcgtttattacccgtctactaaaaccgctactcgctataaaactaacaattaccgatacgctaacgataatatatataacgaaaatctataacgtcacgttcctcgacgcgccgcgcaccaaaaaaaccgaaaacgccacctatacgccgctcctaataaacgtaaacgtaataacactaacgatttactacgtaattaacgatattactacgccgtaactactaccgatactctctactactatacctctaccgctaaaacctactaacaccaccgtttctcaaccgataatcacgttactactaattacctacccgctactaccattcatcattataacgatttacaaaaacgatcgtttaccatcgcgttcccgcgatacgacctaaatatacgattacgaccacgaaaaatcaataataattaccgctcacgattttaccataccgataaaacaaacgtttacgccgatactaaaactacgcaaataactaaatccgatatctctaataccgaactaacaatacgaaaaaaatacgt

SEQ ID NO: 10027 - DNA, 887 bp, Artificial Sequence
  chemically treated genomic DNA (Homo sapiens) CpG-island No: 10027
atatttggaaaatatcggtattattttgttggggttgggcgttggcgtaacgggtatcgcgttcgaaaataatcggcgttgattgtttttggtttggttcggtggtttgtattatttgtttaattatagtttgtttaaaagcgtattgtttttcggggcggggagcgtttggtttcgtatcggttatcgcgatatcgaaaaattcggtggtattggtaagaaaatgtcggttatttttatcgttatgttagtcgggttgatggtaatggttgcgttgtcgtcgttgaatggttttgtcggggaatgggttatttattaattattttttaaattgagtaatagtggcgcgtttgttgttcgtttgttggggtcgttgttcgttgtggggttggtaattatcggtgcgttggcggtgatgtgtatggcgaaagtttatggcgttacgtttttcggcgcgtcgcgtattagagaagtcgaaaacgttatttgtgcgtcgtttttgatgagcgtaagcgtagtggtattggcgatttgttgcgtaattggcggtgttgttgcgtcgtggttattgtcgatgttttttgttgttgtatttttgtcgttggagtttgttaatattatcgttttttaatcgatgattacgttgttgttgattgtttgttcgttgttgttatttattattatggcgatttgtaaaggcgatcgtttgttatcgcgttttcgcggtgcggtttgggtgtgcggttacgattacgaaaaattaatggtgattatcgtttacggttttgttatgtcggtgaaataggcgtttgcgtcggtgttgaaattacgtaaatggttgaattcggtgtttttggtgtcgggttggtagtgcgaggggagtgcgt

SEQ ID NO: 10028 - DNA, 887 bp, Artificial Sequence
  chemically treated genomic DNA (Homo sapiens) CpG-island No: 10028
acgcactcccctcgcactaccaacccgacaccaaaaacaccgaattcaaccatttacgtaatttcaacaccgacgcaaacgcctatttcaccgacataacaaaaccgtaaacgataatcaccattaatttttcgtaatcgtaaccgcacacccaaaccgcaccgcgaaaacgcgataacaaacgatcgcctttacaaatcgccataataataaataacaacaacgaacaaacaatcaacaacaacgtaatcatcgattaaaaaacgataatattaacaaactccaacgacaaaaatacaacaacaaaaaacatcgacaataaccacgacgcaacaacaccgccaattacgcaacaaatcgccaataccactacgcttacgctcatcaaaaacgacgcacaaataacgttttcgacttctctaatacgcgacgcgccgaaaaacgtaacgccataaactttcgccatacacatcaccgccaacgcaccgataattaccaaccccacaacgaacaacgaccccaacaaacgaacaacaaacgcgccactattactcaatttaaaaaataattaataaataacccattccccgacaaaaccattcaacgacgacaacgcaaccattaccatcaacccgactaacataacgataaaaataaccgacattttcttaccaataccaccgaatttttcgatatcgcgataaccgatacgaaaccaaacgctccccgccccgaaaaacaatacgcttttaaacaaactataattaaacaaataatacaaaccaccgaaccaaaccaaaaacaatcaacgccgattattttcgaacgcgatacccgttacgccaacgcccaaccccaacaaaataataccgatattttccaaatat

SEQ ID NO: 10029 - DNA, 502 bp, Artificial Sequence
  chemically treated genomic DNA (Homo sapiens) CpG-island No: 10029
gttcggaatttgtttattggtgtagtttggtttcgtttggtatattttgaggatagttttttttgttgatgtgttttcgggcgtgtataataagtattcggtgcgttatcgcgcgtatattttgcgttagttgtgttaggagatggtacgatttgtatgttagtttcgacgtttaagatttattataagcgatgtttcgttagtagagtttttcgttagtggtgatgaatttttaggatgcgtatagcgtttatattcgcggtgacgtggagttggtgcggattcgtgatgtcgaagggcgaattgcggtagaaggggcgttgttttatttatttggcgtgttttgcgtggtattcggggaagtttgggttggggcggtttaacgttatttttttgtattggaagaaggggtgaatttgttgtcgggattttcgtcggagttgtaaggtgtttatagcgaaatcgatgcggatggcgtgaaacggttgtacggttatgtgtt

SEQ ID NO: 10030 - DNA, 502 bp, Artificial Sequence
  chemically treated genomic DNA (Homo sapiens) CpG-island No: 10030
aacacataaccgtacaaccgtttcacgccatccgcatcgatttcgctataaacaccttacaactccgacgaaaatcccgacaacaaattcaccccttcttccaatacaaaaaaataacgttaaaccgccccaacccaaacttccccgaataccacgcaaaacacgccaaataaataaaacaacgccccttctaccgcaattcgcccttcgacatcacgaatccgcaccaactccacgtcaccgcgaatataaacgctatacgcatcctaaaaattcatcaccactaacgaaaaactctactaacgaaacatcgcttataataaatcttaaacgtcgaaactaacatacaaatcgtaccatctcctaacacaactaacgcaaaatatacgcgcgataacgcaccgaatacttattatacacgcccgaaaacacatcaacaaaaaaaactatcctcaaaatataccaaacgaaaccaaactacaccaataaacaaattccgaac

SEQ ID NO: 10031 - DNA, 502 bp, Artificial Sequence
  chemically treated genomic DNA (Homo sapiens) CpG-island No: 10031
aatatataatcgtataatcgttttacgttattcgtatcggtttcgttataaatattttgtagtttcggcgaaaatttcggtaataaatttatttttttttttagtgtaaggaaataacgttgaatcgttttagtttagattttttcgggtattacgtaaagtacgttaggtggataaggtaacgttttttttgtcgtaattcgtttttcggtattacgaattcgtattaattttacgttatcgcgaatataagcgttatgcgtattttgggggtttattattattgacgggaaattttgttggcggaatatcgtttatagtaggttttagacgtcgaaattgatatatagatcgtgttattttttgatataattggcgtagggtgtacgcgcgatagcgtatcggatatttgttatatacgttcggaaatatattaataggggggattatttttaaaatgtgttaaacggggttagattgtattagtgggtagatttcgggt

SEQ ID NO: 10032 - DNA, 502 bp, Artificial Sequence
  chemically treated genomic DNA (Homo sapiens) CpG-island No: 10032
acccgaaatctacccactaatacaatctaaccccgtttaacacattttaaaaataatcccccctattaatatatttccgaacgtatataacaaatatccgatacgctatcgcgcgtacaccctacgccaattatatcaaaaaataacacgatctatatatcaatttcgacgtctaaaacctactataaacgatattccgccaacaaaatttcccgtcaataataataaacccccaaaatacgcataacgcttatattcgcgataacgtaaaattaatacgaattcgtaataccgaaaaacgaattacgacaaaaaaaacgttaccttatccacctaacgtactttacgtaatacccgaaaaaatctaaactaaaacgattcaacgttatttccttacactaaaaaaaaaaataaatttattaccgaaattttcgccgaaactacaaaatatttataacgaaaccgatacgaataacgtaaaacgattatacgattatatatt

SEQ ID NO: 10033 - DNA, 580 bp, Artificial Sequence
  chemically treated genomic DNA (Homo sapiens) CpG-island No: 10033
agtcgcgttgtggggttttgtttaataggcgttggcgacgttttgcgagaattcggaaaatttttattagtttgtagtgcgaaaagtgttgggggataatttgttaatggcgatgggggttatgttggaagaagcgtaattaatggtgacggcggaaagtattagttattagagttatcgtcgattgttttttcgcgttcgtgaatatgtgttggaaaatatgttcgaatcggtgacggtgttggatttgtgtaattaattgtatgttagtcgtcgtacgttataaaacgcgttttacgttattttaggtattggttcgaacgcgtggttgaaacgtattcgtttgaacgtcgtacgtcgcgaattgataagttcgtggtcgtaaagtatgacggtaaaagacgtcgttatgtagtggggattttggtatttggggtaatttgttacggattattagtagttgtttttcgagaagtcgttattgacgttgtattagcggatgcgggagtgggggtgagggagttatatttaatttttgattttaataaatttatttaacgtcgtttttgggttgttattt

SEQ ID NO: 10034 - DNA, 580 bp, Artificial Sequence
  chemically treated genomic DNA (Homo sapiens) CpG-island No: 10034
aaataacaacccaaaaacgacgttaaataaatttattaaaatcaaaaattaaatataactccctcacccccactcccgcatccgctaatacaacgtcaataacgacttctcgaaaaacaactactaataatccgtaacaaattaccccaaataccaaaatccccactacataacgacgtcttttaccgtcatactttacgaccacgaacttatcaattcgcgacgtacgacgttcaaacgaatacgtttcaaccacgcgttcgaaccaatacctaaaataacgtaaaacgcgttttataacgtacgacgactaacatacaattaattacacaaatccaacaccgtcaccgattcgaacatattttccaacacatattcacgaacgcgaaaaaacaatcgacgataactctaataactaatactttccgccgtcaccattaattacgcttcttccaacataacccccatcgccattaacaaattatcccccaacacttttcgcactacaaactaataaaaattttccgaattctcgcaaaacgtcgccaacgcctattaaacaaaaccccacaacgcgact
